United States Patent Application Publication US 2007/0042381 A1 - sequence listing, part 35

SEQ ID NO: 1555414 - RNA, 21 nt, Human adenovirus C
acgcgggcgcugaccugcgcu

SEQ ID NO: 1555415 - RNA, 13 nt, Human adenovirus C
cauaccacugcaa

SEQ ID NO: 1555416 - RNA, 23 nt, Human adenovirus C
cugcucggacggcaacugucacu

SEQ ID NO: 1555417 - RNA, 19 nt, Human adenovirus C
gggcccggcacuaccugga

SEQ ID NO: 1555418 - RNA, 14 nt, Human adenovirus C
caaacacaucugag

SEQ ID NO: 1555419 - RNA, 23 nt, Human adenovirus C
gagcaacagcaggaggaagccag

SEQ ID NO: 1555420 - RNA, 16 nt, Human adenovirus C
caggggagcugagccc

SEQ ID NO: 1555421 - RNA, 16 nt, Human adenovirus C
ugccaugcgcgggcgg

SEQ ID NO: 1555422 - RNA, 17 nt, Human adenovirus C
ugagcgcgcgcagcagc

SEQ ID NO: 1555423 - RNA, 17 nt, Human adenovirus C
gcaccaggugcagaccc

SEQ ID NO: 1555424 - RNA, 20 nt, Human adenovirus C
guucugcagagcucucuggg

SEQ ID NO: 1555425 - RNA, 16 nt, Human adenovirus C
ccccuucgaugcuccc

SEQ ID NO: 1555426 - RNA, 13 nt, Human adenovirus C
agcugcagcugcc

SEQ ID NO: 1555427 - RNA, 23 nt, Human adenovirus C
guauucgcgcgcaacgcaccgcc

SEQ ID NO: 1555428 - RNA, 15 nt, Human adenovirus C
caguccgggccagac

SEQ ID NO: 1555429 - RNA, 13 nt, Human adenovirus C
gcgcgagggacag

SEQ ID NO: 1555430 - RNA, 13 nt, Human adenovirus C
ccgccgccgcagc

SEQ ID NO: 1555431 - RNA, 23 nt, Human adenovirus C
agacggcguaguuucgcaggcgc

SEQ ID NO: 1555432 - RNA, 17 nt, Human adenovirus C
uugcccuuggaggaggc

SEQ ID NO: 1555433 - RNA, 15 nt, Human adenovirus C
cagcagcaggaggag

SEQ ID NO: 1555434 - RNA, 23 nt, Human adenovirus C
cugaccaaaugcgccagaaggcg

SEQ ID NO: 1555435 - RNA, 15 nt, Human adenovirus C
gcugcgggguggugu

SEQ ID NO: 1555436 - RNA, 23 nt, Human adenovirus C
uucuccccggcuggccuuaaaaa

SEQ ID NO: 1555437 - RNA, 14 nt, Human adenovirus C
gguccugcuggugc

SEQ ID NO: 1555438 - RNA, 21 nt, Human adenovirus C
gaggcgccgcacgaggggcag

SEQ ID NO: 1555439 - RNA, 15 nt, Human adenovirus C
ggaggcaagcacaca

SEQ ID NO: 1555440 - RNA, 15 nt, Human adenovirus C
gagaaggucaucaag

SEQ ID NO: 1555441 - RNA, 18 nt, Human adenovirus C
aggcgcagagacacugau

SEQ ID NO: 1555442 - RNA, 14 nt, Human adenovirus C
ccucuuccucccau

SEQ ID NO: 1555443 - RNA, 14 nt, Human adenovirus C
accaccacaccucg

SEQ ID NO: 1555444 - RNA, 19 nt, Human adenovirus C
gcuggccagggugcgcuug

SEQ ID NO: 1555445 - RNA, 15 nt, Human adenovirus C
uaaauaaaaaccaga

SEQ ID NO: 1555446 - RNA, 19 nt, Human adenovirus C
ccgagggccgcuggcugcu

SEQ ID NO: 1555447 - RNA, 18 nt, Human adenovirus C
aaagcgguuaagcuggga

SEQ ID NO: 1555448 - RNA, 15 nt, Human adenovirus C
ccuccgggcacagca

SEQ ID NO: 1555449 - RNA, 23 nt, Human adenovirus C
gaggaugaagaagaggaagauga

SEQ ID NO: 1555450 - RNA, 12 nt, Human adenovirus C
ucaaacccagcu

SEQ ID NO: 1555451 - RNA, 21 nt, Human adenovirus C
gagcucuaacaguaccucuug

SEQ ID NO: 1555452 - RNA, 19 nt, Human adenovirus C
cuggccaaccaggcagugc

SEQ ID NO: 1555453 - RNA, 15 nt, Human adenovirus C
gccggccacggccug

SEQ ID NO: 1555454 - RNA, 22 nt, Human adenovirus C
agguguaccaguccgggccaga

SEQ ID NO: 1555455 - RNA, 18 nt, Human adenovirus C
gaacgggguguuugacau

SEQ ID NO: 1555456 - RNA, 12 nt, Human adenovirus C
acggcaccgcca

SEQ ID NO: 1555457 - RNA, 13 nt, Human adenovirus C
gcggcuggagcug

SEQ ID NO: 1555458 - RNA, 18 nt, Human adenovirus C
ugcccuacauccuuccau

SEQ ID NO: 1555459 - RNA, 14 nt, Human adenovirus C
ggcgaggcgcgccg

SEQ ID NO: 1555460 - RNA, 16 nt, Human adenovirus C
cgcauccacaaggccg

SEQ ID NO: 1555461 - RNA, 21 nt, Human adenovirus C
accugagccuuugcgccuuca

SEQ ID NO: 1555462 - RNA, 16 nt, Human adenovirus C
cgcgcuggggcaggag

SEQ ID NO: 1555463 - RNA, 18 nt, Human adenovirus C
cagacggugaaccaggag

SEQ ID NO: 1555464 - RNA, 17 nt, Human adenovirus C
auugcaucccaccuuuc

SEQ ID NO: 1555465 - RNA, 15 nt, Human adenovirus C
caagcacacagacca

SEQ ID NO: 1555466 - RNA, 21 nt, Human adenovirus C
gguccgugugcaccagccgca

SEQ ID NO: 1555467 - RNA, 11 nt, Human adenovirus C
gacgaccuggg

SEQ ID NO: 1555468 - RNA, 13 nt, Human adenovirus C
uacgccaacuccg

SEQ ID NO: 1555469 - RNA, 17 nt, Human adenovirus C
gcuguaccugccagaca

SEQ ID NO: 1555470 - RNA, 20 nt, Human adenovirus C
cugucuuacaaaccuggaaa

SEQ ID NO: 1555471 - RNA, 17 nt, Human adenovirus C
auguggaaucaggcugu

SEQ ID NO: 1555472 - RNA, 14 nt, Human adenovirus C
acagagacaggacu

SEQ ID NO: 1555473 - RNA, 17 nt, Human adenovirus C
uacuaagaaaacacaug

SEQ ID NO: 1555474 - RNA, 16 nt, Human adenovirus C
ugcugagccacaggcu

SEQ ID NO: 1555475 - RNA, 13 nt, Human adenovirus C
ugccuuuuacugc

SEQ ID NO: 1555476 - RNA, 15 nt, Human adenovirus C
cggagugcugggcca

SEQ ID NO: 1555477 - RNA, 21 nt, Human adenovirus C
augcuaaugcggcaggaggga

SEQ ID NO: 1555478 - RNA, 21 nt, Human adenovirus C
ugaggccgaggcagcggcaga

SEQ ID NO: 1555479 - RNA, 16 nt, Human adenovirus C
uggcgaugagcagcug

SEQ ID NO: 1555480 - RNA, 19 nt, Human adenovirus C
ucaacggaauccgcgccca

SEQ ID NO: 1555481 - RNA, 16 nt, Human adenovirus C
cggguuuggcuggugg

SEQ ID NO: 1555482 - RNA, 23 nt, Human adenovirus C
ugcgggcucccacaggcgaccgc

SEQ ID NO: 1555483 - RNA, 12 nt, Human adenovirus C
cacucgcuccag

SEQ ID NO: 1555484 - RNA, 18 nt, Human adenovirus C
gccccccuucucccaccc

SEQ ID NO: 1555485 - RNA, 21 nt, Human adenovirus C
aauaagccacacccagccaac

SEQ ID NO: 1555486 - RNA, 22 nt, Human adenovirus C
caucaacgcgcgcgcagccucc

SEQ ID NO: 1555487 - RNA, 22 nt, Human adenovirus C
agauguuagaaucauugaaaac

SEQ ID NO: 1555488 - RNA, 13 nt, Human adenovirus C
cgggcagcggcga

SEQ ID NO: 1555489 - RNA, 19 nt, Human adenovirus C
uacaacaguuuccagcgag

SEQ ID NO: 1555490 - RNA, 14 nt, Human adenovirus C
gucaggcgggagcu

SEQ ID NO: 1555491 - RNA, 17 nt, Human adenovirus C
auguuuuguuugaaguc

SEQ ID NO: 1555492 - RNA, 21 nt, Human adenovirus C
acguuuacaaggcccugggca

SEQ ID NO: 1555493 - RNA, 22 nt, Human adenovirus C
acuaccuuuccgccgccaacau

SEQ ID NO: 1555494 - RNA, 13 nt, Human adenovirus C
gaugaggccggcc

SEQ ID NO: 1555495 - RNA, 19 nt, Human adenovirus C
uaccucugcaaacgacugc

SEQ ID NO: 1555496 - RNA, 13 nt, Human adenovirus C
ccaccauccuaaa

SEQ ID NO: 1555497 - RNA, 13 nt, Human adenovirus C
agggccuccccuu

SEQ ID NO: 1555498 - RNA, 24 nt, Human adenovirus C
ccccgccaacgugcccuacccacu

SEQ ID NO: 1555499 - RNA, 12 nt, Human adenovirus C
accugcggccua

SEQ ID NO: 1555500 - RNA, 14 nt, Human adenovirus C
cggugaaggggugc

SEQ ID NO: 1555501 - RNA, 13 nt, Human adenovirus C
cacgucuccugag

SEQ ID NO: 1555502 - RNA, 20 nt, Human adenovirus C
cagagugggaauuugagccc

SEQ ID NO: 1555503 - RNA, 16 nt, Human adenovirus C
agccgcggcaaugcag

SEQ ID NO: 1555504 - RNA, 19 nt, Human adenovirus C
acaccggggcgcgcugcgg

SEQ ID NO: 1555505 - RNA, 17 nt, Human adenovirus C
cacgcuggaagacgcgg

SEQ ID NO: 1555506 - RNA, 12 nt, Human adenovirus C
agucacuccugc

SEQ ID NO: 1555507 - RNA, 17 nt, Human adenovirus C
agcuaugcuaaccagcg

SEQ ID NO: 1555508 - RNA, 14 nt, Human adenovirus C
acagguggagauga

SEQ ID NO: 1555509 - RNA, 18 nt, Human adenovirus C
cacuaguauugccacugc

SEQ ID NO: 1555510 - RNA, 16 nt, Human adenovirus C
cugaguuggcaccccu

SEQ ID NO: 1555511 - RNA, 17 nt, Human adenovirus C
gcugaggcccgaucacu

SEQ ID NO: 1555512 - RNA, 18 nt, Human adenovirus C
guggacuauucugcugca

SEQ ID NO: 1555513 - RNA, 17 nt, Human adenovirus C
ucaaaucuucacuuccg

SEQ ID NO: 1555514 - RNA, 17 nt, Human adenovirus C
cugacagaggacagcaa

SEQ ID NO: 1555515 - RNA, 17 nt, Human adenovirus C
uuccggcagcagccgca

SEQ ID NO: 1555516 - RNA, 18 nt, Human adenovirus C
agucagcaaaucuuuguc

SEQ ID NO: 1555517 - RNA, 17 nt, Human adenovirus C
augccaucuugaacccg

SEQ ID NO: 1555518 - RNA, 19 nt, Human adenovirus C
cgaagccuuccauccagac

SEQ ID NO: 1555519 - RNA, 20 nt, Human adenovirus C
auccaaaaccucaaaaugaa

SEQ ID NO: 1555520 - RNA, 16 nt, Human adenovirus C
gcgucucuggccccgc

SEQ ID NO: 1555521 - RNA, 22 nt, Human adenovirus C
cugggaacggggccgaggugga

SEQ ID NO: 1555522 - RNA, 13 nt, Human adenovirus C
ccaggcgcggcgg

SEQ ID NO: 1555523 - RNA, 17 nt, Human adenovirus C
uaaccuaaaugccaacc

SEQ ID NO: 1555524 - RNA, 21 nt, Human adenovirus C
cuccuucagcgcgcgcugccc

SEQ ID NO: 1555525 - RNA, 19 nt, Human adenovirus C
cccggugagcgcuccaccc

SEQ ID NO: 1555526 - RNA, 15 nt, Human adenovirus C
gaucacaaccccacc

SEQ ID NO: 1555527 - RNA, 22 nt, Human adenovirus C
gcgauccuaacucugcagaccu

SEQ ID NO: 1555528 - RNA, 20 nt, Human adenovirus C
cagcggcagaagcugccgcc

SEQ ID NO: 1555529 - RNA, 18 nt, Human adenovirus C
gcgcuccuuggccgcgau

SEQ ID NO: 1555530 - RNA, 13 nt, Human adenovirus C
gcagcagccgcag

SEQ ID NO: 1555531 - RNA, 15 nt, Human adenovirus C
cgcguccaggccagc

SEQ ID NO: 1555532 - RNA, 15 nt, Human adenovirus C
agaggaccucugcac

SEQ ID NO: 1555533 - RNA, 12 nt, Human adenovirus C
ccagcggccaca

SEQ ID NO: 1555534 - RNA, 19 nt, Human adenovirus C
cuaucaccgucacccagca

SEQ ID NO: 1555535 - RNA, 18 nt, Human adenovirus C
agcuuccgcaggccaagc

SEQ ID NO: 1555536 - RNA, 21 nt, Human adenovirus C
aguuuuauaaaggauaaaugg

SEQ ID NO: 1555537 - RNA, 19 nt, Human adenovirus C
cucugguaucucagccgcc

SEQ ID NO: 1555538 - RNA, 17 nt, Human adenovirus C
gugucccuaaccaugac

SEQ ID NO: 1555539 - RNA, 19 nt, Human adenovirus C
guccagcugcugagccaca

SEQ ID NO: 1555540 - RNA, 14 nt, Human adenovirus C
cugccacagagggc

SEQ ID NO: 1555541 - RNA, 13 nt, Human adenovirus C
cgcgcuggccagg

SEQ ID NO: 1555542 - RNA, 23 nt, Human adenovirus C
acgccauugacgcggugguggag

SEQ ID NO: 1555543 - RNA, 16 nt, Human adenovirus C
uguggccgggggugcu

SEQ ID NO: 1555544 - RNA, 20 nt, Human adenovirus C
cccaaaagcagggcuucaau

SEQ ID NO: 1555545 - RNA, 22 nt, Human adenovirus C
augcuuuugagcguuugaccaa

SEQ ID NO: 1555546 - RNA, 15 nt, Human adenovirus C
ggacaggcuuacccc

SEQ ID NO: 1555547 - RNA, 12 nt, Human adenovirus C
cagcgccagugc

SEQ ID NO: 1555548 - RNA, 15 nt, Human adenovirus C
aguuggcccgcugcc

SEQ ID NO: 1555549 - RNA, 13 nt, Human adenovirus C
caggcagaggagg

SEQ ID NO: 1555550 - RNA, 22 nt, Human adenovirus C
caagcggcaacccuuccaggag

SEQ ID NO: 1555551 - RNA, 16 nt, Human adenovirus C
ccaaucaaucagccuc

SEQ ID NO: 1555552 - RNA, 20 nt, Human adenovirus C
cagacgcgccagacccccca

SEQ ID NO: 1555553 - RNA, 21 nt, Human adenovirus C
gucaggcgauccuaacucugc

SEQ ID NO: 1555554 - RNA, 13 nt, Human adenovirus C
gcggcggcggcug

SEQ ID NO: 1555555 - RNA, 12 nt, Human adenovirus C
cccagggccaca

SEQ ID NO: 1555556 - RNA, 23 nt, Human adenovirus C
gguggccgcguccaucuggucag

SEQ ID NO: 1555557 - RNA, 19 nt, Human adenovirus C
aaacuacgucuuaaacugg

SEQ ID NO: 1555558 - RNA, 16 nt, Human adenovirus C
acgaucggcaggcuca

SEQ ID NO: 1555559 - RNA, 19 nt, Human adenovirus C
aagaucuggaaggugcuga

SEQ ID NO: 1555560 - RNA, 15 nt, Human adenovirus C
agcuguccuaucaac

SEQ ID NO: 1555561 - RNA, 16 nt, Human adenovirus C
aaacuuuugcuaccaa

SEQ ID NO: 1555562 - RNA, 23 nt, Human adenovirus C
ggaucagacaaugcagaaacaca

SEQ ID NO: 1555563 - RNA, 14 nt, Human adenovirus C
gcuggaacagagcu

SEQ ID NO: 1555564 - RNA, 23 nt, Human adenovirus C
ugucccuaaccaugacuuugagg

SEQ ID NO: 1555565 - RNA, 19 nt, Human adenovirus C
cuguguauuuuuuccagga

SEQ ID NO: 1555566 - RNA, 15 nt, Human adenovirus C
caucguaggugacaa

SEQ ID NO: 1555567 - RNA, 14 nt, Human adenovirus C
agguuaccucugca

SEQ ID NO: 1555568 - RNA, 23 nt, Human adenovirus C
guccccagguacagcccacccug

SEQ ID NO: 1555569 - RNA, 21 nt, Human adenovirus C
gagucuccagauaucaaccca

SEQ ID NO: 1555570 - RNA, 18 nt, Human adenovirus C
ccgugacacugcagcagg

SEQ ID NO: 1555571 - RNA, 22 nt, Human adenovirus C
ccuuaguaugcagcgcgcggcg

SEQ ID NO: 1555572 - RNA, 22 nt, Human adenovirus C
gaacagggcggggauggcgcag

SEQ ID NO: 1555573 - RNA, 16 nt, Human adenovirus C
agcgccagcgacugga

SEQ ID NO: 1555574 - RNA, 13 nt, Human adenovirus C
cguggugagcgcg

SEQ ID NO: 1555575 - RNA, 17 nt, Human adenovirus C
gcucccucacccgcagc

SEQ ID NO: 1555576 - RNA, 21 nt, Human adenovirus C
cgccaacuccgcccacgcgcu

SEQ ID NO: 1555577 - RNA, 18 nt, Human adenovirus C
gcgugacacgcgcgaggc

SEQ ID NO: 1555578 - RNA, 13 nt, Human adenovirus C
caucugcagccuc

SEQ ID NO: 1555579 - RNA, 17 nt, Human adenovirus C
ucccuuagaaccaaagu

SEQ ID NO: 1555580 - RNA, 16 nt, Human adenovirus C
gccacugccacagagg

SEQ ID NO: 1555581 - RNA, 21 nt, Human adenovirus C
ccaagagcaacaacagcgcca

SEQ ID NO: 1555582 - RNA, 23 nt, Human adenovirus C
cagcaugaagggcacgagcugcu

SEQ ID NO: 1555583 - RNA, 20 nt, Human adenovirus C
acugcagcaggugcugccca

SEQ ID NO: 1555584 - RNA, 17 nt, Human adenovirus C
cgaggccguggcgcagc

SEQ ID NO: 1555585 - RNA, 12 nt, Human adenovirus C
uaaugcaucaaa

SEQ ID NO: 1555586 - RNA, 24 nt, Human adenovirus C
ccaagccgacgcgcccuggaggca

SEQ ID NO: 1555587 - RNA, 23 nt, Human adenovirus C
ugacuaccuuuccgccgccaaca

SEQ ID NO: 1555588 - RNA, 20 nt, Human adenovirus C
cccauggcccacaacacggc

SEQ ID NO: 1555589 - RNA, 19 nt, Human adenovirus C
ugacgaccguucgcacugg

SEQ ID NO: 1555590 - RNA, 21 nt, Human adenovirus C
cccgaugaggccggccugguc

SEQ ID NO: 1555591 - RNA, 15 nt, Human adenovirus C
uccgcgguccuccuc

SEQ ID NO: 1555592 - RNA, 16 nt, Human adenovirus C
gcagucugcagcgcug

SEQ ID NO: 1555593 - RNA, 14 nt, Human adenovirus C
cgcagccuccaugc

SEQ ID NO: 1555594 - RNA, 22 nt, Human adenovirus C
guccuguguauuuuuuccagga

SEQ ID NO: 1555595 - RNA, 18 nt, Human adenovirus C
agcgcgcgcagcagcagg

SEQ ID NO: 1555596 - RNA, 17 nt, Human adenovirus C
cgcucaguugacgggga

SEQ ID NO: 1555597 - RNA, 16 nt, Human adenovirus C
acuuugcgucucuggc

SEQ ID NO: 1555598 - RNA, 13 nt, Human adenovirus C
acccgcaccuaca

SEQ ID NO: 1555599 - RNA, 16 nt, Human adenovirus C
agcagcuggccuugcg

SEQ ID NO: 1555600 - RNA, 15 nt, Human adenovirus C
gacgcucggugcgag

SEQ ID NO: 1555601 - RNA, 21 nt, Human adenovirus C
gguggaucccauggacgagcc

SEQ ID NO: 1555602 - RNA, 14 nt, Human adenovirus C
uacucuuauaaaau

SEQ ID NO: 1555603 - RNA, 13 nt, Human adenovirus C
cgccugcugggcg

SEQ ID NO: 1555604 - RNA, 20 nt, Human adenovirus C
ggcgauggagcgcaggguuu

SEQ ID NO: 1555605 - RNA, 19 nt, Human adenovirus C
cggugaggcgugcgcaguc

SEQ ID NO: 1555606 - RNA, 19 nt, Human adenovirus C
ccuugagcgacgaccuggg

SEQ ID NO: 1555607 - RNA, 20 nt, Human adenovirus C
gacuuugcuuuccugagccc

SEQ ID NO: 1555608 - RNA, 12 nt, Human adenovirus C
gcgcggcggcug

SEQ ID NO: 1555609 - RNA, 13 nt, Human adenovirus C
ugccgcagugguc

SEQ ID NO: 1555610 - RNA, 13 nt, Human adenovirus C
gaggaugaagaag

SEQ ID NO: 1555611 - RNA, 19 nt, Human adenovirus C
cuuugcgucucuggccccg

SEQ ID NO: 1555612 - RNA, 19 nt, Human adenovirus C
gccugccgacuuggaggag

SEQ ID NO: 1555613 - RNA, 15 nt, Human adenovirus C
ggcggcguggaggaa

SEQ ID NO: 1555614 - RNA, 13 nt, Human adenovirus C
cccaccacugugg

SEQ ID NO: 1555615 - RNA, 13 nt, Human adenovirus C
ccugagccuuugc

SEQ ID NO: 1555616 - RNA, 17 nt, Human adenovirus C
ccuuuccuuccucccaa

SEQ ID NO: 1555617 - RNA, 17 nt, Human adenovirus C
aucagccccccucucug

SEQ ID NO: 1555618 - RNA, 18 nt, Human adenovirus C
cggcagcggcagcaacag

SEQ ID NO: 1555619 - RNA, 13 nt, Human adenovirus C
gcccaacccgcgc

SEQ ID NO: 1555620 - RNA, 15 nt, Human adenovirus C
gggagaucagcuggg

SEQ ID NO: 1555621 - RNA, 16 nt, Human adenovirus C
agcuugaucugcuggc

SEQ ID NO: 1555622 - RNA, 18 nt, Human adenovirus C
agugucuugcugucuuua

SEQ ID NO: 1555623 - RNA, 17 nt, Human adenovirus C
ugccacagagggcaugg

SEQ ID NO: 1555624 - RNA, 14 nt, Human adenovirus C
agugcugggccagc

SEQ ID NO: 1555625 - RNA, 21 nt, Human adenovirus C
cugaccgugcaagacuccaaa

SEQ ID NO: 1555626 - RNA, 16 nt, Human adenovirus C
cauucgggcagcagcg

SEQ ID NO: 1555627 - RNA, 14 nt, Human adenovirus C
cgagggccagcugu

SEQ ID NO: 1555628 - RNA, 15 nt, Human adenovirus C
aaaaacaaagucaaa

SEQ ID NO: 1555629 - RNA, 15 nt, Human adenovirus C
cuccuccuccugcca

SEQ ID NO: 1555630 - RNA, 15 nt, Human adenovirus C
gccuggaggagcgca

SEQ ID NO: 1555631 - RNA, 14 nt, Human adenovirus C
ggacagggccucuc

SEQ ID NO: 1555632 - RNA, 11 nt, Human adenovirus C
cggugccauga

SEQ ID NO: 1555633 - RNA, 21 nt, Human adenovirus C
acgaacccguaucgacccgcg

SEQ ID NO: 1555634 - RNA, 12 nt, Human adenovirus C
caugcacaucuc

SEQ ID NO: 1555635 - RNA, 14 nt, Human adenovirus C
gcagggcaaccugg

SEQ ID NO: 1555636 - RNA, 22 nt, Human adenovirus C
cccgaguauuucaccaaugcca

SEQ ID NO: 1555637 - RNA, 16 nt, Human adenovirus C
accguaaaccugagcc

SEQ ID NO: 1555638 - RNA, 15 nt, Human adenovirus C
uguagguuaccucug

SEQ ID NO: 1555639 - RNA, 14 nt, Human adenovirus C
acgggcagccugga

SEQ ID NO: 1555640 - RNA, 20 nt, Human adenovirus C
cgcuggacgagggcaaccca

SEQ ID NO: 1555641 - RNA, 15 nt, Human adenovirus C
cgggacugggcgugc

SEQ ID NO: 1555642 - RNA, 15 nt, Human adenovirus C
gcaagacuccaaacu

SEQ ID NO: 1555643 - RNA, 21 nt, Human adenovirus C
guacuuuaacggcucuucauu

SEQ ID NO: 1555644 - RNA, 19 nt, Human adenovirus C
ggcagcaaugccuggagga

SEQ ID NO: 1555645 - RNA, 17 nt, Human adenovirus C
aucaaucagccucgccc

SEQ ID NO: 1555646 - RNA, 20 nt, Human adenovirus C
cacucacagaccugggccaa

SEQ ID NO: 1555647 - RNA, 18 nt, Human adenovirus C
ccugauuucugccagcgc

SEQ ID NO: 1555648 - RNA, 16 nt, Human adenovirus C
gcgcaccaccggcggc

SEQ ID NO: 1555649 - RNA, 18 nt, Human adenovirus C
gagcuaugcuaaccagcg

SEQ ID NO: 1555650 - RNA, 19 nt, Human adenovirus C
uucacacgcuugaagacaa

SEQ ID NO: 1555651 - RNA, 17 nt, Human adenovirus C
agagccggccuggaccc

SEQ ID NO: 1555652 - RNA, 23 nt, Human adenovirus C
cuagccuaaagcccgugacacug

SEQ ID NO: 1555653 - RNA, 15 nt, Human adenovirus C
cucggcgguggcaga

SEQ ID NO: 1555654 - RNA, 15 nt, Human adenovirus C
ucgccccccuucucc

SEQ ID NO: 1555655 - RNA, 16 nt, Human adenovirus C
cccguauuugccgugc

SEQ ID NO: 1555656 - RNA, 13 nt, Human adenovirus C
caugucccugacu

SEQ ID NO: 1555657 - RNA, 19 nt, Human adenovirus C
aucaggguccagaggaccu

SEQ ID NO: 1555658 - RNA, 20 nt, Human adenovirus C
aacugcgaggacagggccuc

SEQ ID NO: 1555659 - RNA, 21 nt, Human adenovirus C
cuugacgaccguucgcacugg

SEQ ID NO: 1555660 - RNA, 13 nt, Human adenovirus C
cccgcgccacugg

SEQ ID NO: 1555661 - RNA, 21 nt, Human adenovirus C
ccaggaacagcucuacagcuu

SEQ ID NO: 1555662 - RNA, 16 nt, Human adenovirus C
ccgggacugggcgugc

SEQ ID NO: 1555663 - RNA, 15 nt, Human adenovirus C
gugaauccacagaaa

SEQ ID NO: 1555664 - RNA, 24 nt, Human adenovirus C
ugaugguacccaagcgccagcgac

SEQ ID NO: 1555665 - RNA, 21 nt, Human adenovirus C
agcgcccuucacggacagugg

SEQ ID NO: 1555666 - RNA, 21 nt, Human adenovirus C
cccgcuugcaagcagugcagc

SEQ ID NO: 1555667 - RNA, 17 nt, Human adenovirus C
ugugcguaacuugcugg

SEQ ID NO: 1555668 - RNA, 20 nt, Human adenovirus C
ccacagagggcauggagaca

SEQ ID NO: 1555669 - RNA, 16 nt, Human adenovirus C
cucacagaccugggcc

SEQ ID NO: 1555670 - RNA, 18 nt, Human adenovirus C
gaggacacgggcagccug

SEQ ID NO: 1555671 - RNA, 16 nt, Human adenovirus C
ccuuacuuuaucucaa

SEQ ID NO: 1555672 - RNA, 23 nt, Human adenovirus C
agcauaaaaaaauccaguggacu

SEQ ID NO: 1555673 - RNA, 14 nt, Human adenovirus C
cugagacgaaggcu

SEQ ID NO: 1555674 - RNA, 14 nt, Human adenovirus C
cccauuugaugcuc

SEQ ID NO: 1555675 - RNA, 22 nt, Human adenovirus C
uacccaccaccaguagcacuag

SEQ ID NO: 1555676 - RNA, 19 nt, Human adenovirus C
gcauuaaguggcucgcucc

SEQ ID NO: 1555677 - RNA, 20 nt, Human adenovirus C
cgggccgcucgaaggcuggc

SEQ ID NO: 1555678 - RNA, 14 nt, Human adenovirus C
ugcccgccaccugc

SEQ ID NO: 1555679 - RNA, 14 nt, Human adenovirus C
gccagcgccugcac

SEQ ID NO: 1555680 - RNA, 12 nt, Human adenovirus C
cuagguccaggu

SEQ ID NO: 1555681 - RNA, 12 nt, Human adenovirus C
cgagggccagcu

SEQ ID NO: 1555682 - RNA, 21 nt, Human adenovirus C
caucguuuaaaagccggucuu

SEQ ID NO: 1555683 - RNA, 20 nt, Human adenovirus C
guacacagcccgccaacgug

SEQ ID NO: 1555684 - RNA, 17 nt, Human adenovirus C
guaagcgcgcuggagca

SEQ ID NO: 1555685 - RNA, 20 nt, Human adenovirus C
agcgcagcggugcagccaca

SEQ ID NO: 1555686 - RNA, 16 nt, Human adenovirus C
cgccaacuccgcccac

SEQ ID NO: 1555687 - RNA, 16 nt, Human adenovirus C
ugccugcuccagagau

SEQ ID NO: 1555688 - RNA, 18 nt, Human adenovirus C
gaugaccggcucaaccau

SEQ ID NO: 1555689 - RNA, 14 nt, Human adenovirus C
augucagccuugcc

SEQ ID NO: 1555690 - RNA, 12 nt, Human adenovirus C
gaucugcgccag

SEQ ID NO: 1555691 - RNA, 17 nt, Human adenovirus C
ucgaagccguugauguu

SEQ ID NO: 1555692 - RNA, 14 nt, Human adenovirus C
cgaccacagcaacu

SEQ ID NO: 1555693 - RNA, 17 nt, Human adenovirus C
ugcgcgagauugagcuc

SEQ ID NO: 1555694 - RNA, 13 nt, Human adenovirus C
ucaggaauucugc

SEQ ID NO: 1555695 - RNA, 21 nt, Human adenovirus C
uauaacucaccugaaaaucag

SEQ ID NO: 1555696 - RNA, 21 nt, Human adenovirus C
cccaggcggcggguacagugg

SEQ ID NO: 1555697 - RNA, 13 nt, Human adenovirus C
cgccagcccccac

SEQ ID NO: 1555698 - RNA, 23 nt, Human adenovirus C
gcaacuuggcgauggagcgcagg

SEQ ID NO: 1555699 - RNA, 14 nt, Human adenovirus C
ugccaaccuaugga

SEQ ID NO: 1555700 - RNA, 15 nt, Human adenovirus C
gcucgcgaaggaggc

SEQ ID NO: 1555701 - RNA, 17 nt, Human adenovirus C
ggcgcaccgggaggcgg

SEQ ID NO: 1555702 - RNA, 22 nt, Human adenovirus C
ggccuugcaggcgcagagacac

SEQ ID NO: 1555703 - RNA, 15 nt, Human adenovirus C
cugcccgccaccugc

SEQ ID NO: 1555704 - RNA, 23 nt, Human adenovirus C
acaacagcugccgccaugggcuc

SEQ ID NO: 1555705 - RNA, 19 nt, Human adenovirus C
cgaggaucgcucaguacca

SEQ ID NO: 1555706 - RNA, 19 nt, Human adenovirus C
acuggcaccuuuuguucca

SEQ ID NO: 1555707 - RNA, 18 nt, Human adenovirus C
aguacgagucacuccugc

SEQ ID NO: 1555708 - RNA, 14 nt, Human adenovirus C
cgaucguggagcac

SEQ ID NO: 1555709 - RNA, 19 nt, Human adenovirus C
uaccccuucgaugaugccg

SEQ ID NO: 1555710 - RNA, 21 nt, Human adenovirus C
ucucgcauuccacgagccagg

SEQ ID NO: 1555711 - RNA, 22 nt, Human adenovirus C
uggugcaguuugcccgcgccac

SEQ ID NO: 1555712 - RNA, 15 nt, Human adenovirus C
aguuaagagagcugc

SEQ ID NO: 1555713 - RNA, 19 nt, Human adenovirus C
cacgguuaacuccuccucc

SEQ ID NO: 1555714 - RNA, 17 nt, Human adenovirus C
accccgccaacgugccc

SEQ ID NO: 1555715 - RNA, 16 nt, Human adenovirus C
augagcuccacagguc

SEQ ID NO: 1555716 - RNA, 17 nt, Human adenovirus C
ggcgccauccaccacca

SEQ ID NO: 1555717 - RNA, 22 nt, Human adenovirus C
auguauuauaacagcacuggca

SEQ ID NO: 1555718 - RNA, 15 nt, Human adenovirus C
ugucuaugcccaggc

SEQ ID NO: 1555719 - RNA, 14 nt, Human adenovirus C
gggcuggcgguggc

SEQ ID NO: 1555720 - RNA, 20 nt, Human adenovirus C
ccggcccgaugaggccggcc

SEQ ID NO: 1555721 - RNA, 18 nt, Human adenovirus C
cagaccaaagcaaaccuc

SEQ ID NO: 1555722 - RNA, 18 nt, Human adenovirus C
acgcucgagaucaggcua

SEQ ID NO: 1555723 - RNA, 22 nt, Human adenovirus C
acgauguaaaguuccaagaagc

SEQ ID NO: 1555724 - RNA, 14 nt, Human adenovirus C
caugucgcugucca

SEQ ID NO: 1555725 - RNA, 16 nt, Human adenovirus C
gggcccauuacagugu

SEQ ID NO: 1555726 - RNA, 20 nt, Human adenovirus C
augcacaucucgggccagga

SEQ ID NO: 1555727 - RNA, 19 nt, Human adenovirus C
guuccugcucucacagauc

SEQ ID NO: 1555728 - RNA, 17 nt, Human adenovirus C
ucacugcuaccuucugc

SEQ ID NO: 1555729 - RNA, 21 nt, Human adenovirus C
gcucgaucucuuccuccugga

SEQ ID NO: 1555730 - RNA, 14 nt, Human adenovirus C
ucacuuggugcugg

SEQ ID NO: 1555731 - RNA, 12 nt, Human adenovirus C
ccuacugcaccg

SEQ ID NO: 1555732 - RNA, 17 nt, Human adenovirus C
acuggauggccuuugcc

SEQ ID NO: 1555733 - RNA, 12 nt, Human adenovirus C
ucuuuuuccaaa

SEQ ID NO: 1555734 - RNA, 12 nt, Human adenovirus C
cagcuugccugc

SEQ ID NO: 1555735 - RNA, 12 nt, Human adenovirus C
acaagugggaau

SEQ ID NO: 1555736 - RNA, 22 nt, Human adenovirus C
cgacugcgccugacacaccucg

SEQ ID NO: 1555737 - RNA, 15 nt, Human adenovirus C
guuuagagaacacug

SEQ ID NO: 1555738 - RNA, 13 nt, Human adenovirus C
cugagccccgggc

SEQ ID NO: 1555739 - RNA, 15 nt, Human adenovirus C
ugcagaccaaccugg

SEQ ID NO: 1555740 - RNA, 13 nt, Human adenovirus C
gcgcaggguggcu

SEQ ID NO: 1555741 - RNA, 18 nt, Human adenovirus C
acugacccgcuguuccuu

SEQ ID NO: 1555742 - RNA, 17 nt, Human adenovirus C
agaccgggauccgcuca

SEQ ID NO: 1555743 - RNA, 17 nt, Human adenovirus C
cgucaugcacgcagcac

SEQ ID NO: 1555744 - RNA, 16 nt, Human adenovirus C
ugguggcuaccucucc

SEQ ID NO: 1555745 - RNA, 17 nt, Human adenovirus C
ccuccuuauuccacuga

SEQ ID NO: 1555746 - RNA, 15 nt, Human adenovirus C
agcuugccugcucca

SEQ ID NO: 1555747 - RNA, 15 nt, Human adenovirus C
gguuaacuccuccuc

SEQ ID NO: 1555748 - RNA, 14 nt, Human adenovirus C
cuacgaagaccaau

SEQ ID NO: 1555749 - RNA, 14 nt, Human adenovirus C
cuggcccgcgguga

SEQ ID NO: 1555750 - RNA, 12 nt, Human adenovirus C
ggaagcgguggu

SEQ ID NO: 1555751 - RNA, 12 nt, Human adenovirus C
ggccggacaggc

SEQ ID NO: 1555752 - RNA, 19 nt, Human adenovirus C
acggcgacgaggaccugcu

SEQ ID NO: 1555753 - RNA, 15 nt, Human adenovirus C
uaggaggggcauggc

SEQ ID NO: 1555754 - RNA, 18 nt, Human adenovirus C
cuggcuggcacgggcagc

SEQ ID NO: 1555755 - RNA, 13 nt, Human adenovirus C
gcucuacagcuuc

SEQ ID NO: 1555756 - RNA, 17 nt, Human adenovirus C
cgugagcgcgcgcagca

SEQ ID NO: 1555757 - RNA, 23 nt, Human adenovirus C
gcggcgucgaugacuugcaagag

SEQ ID NO: 1555758 - RNA, 12 nt, Human adenovirus C
gugcagcacagc

SEQ ID NO: 1555759 - RNA, 18 nt, Human adenovirus C
cacgcucaagggcgaggc

SEQ ID NO: 1555760 - RNA, 12 nt, Human adenovirus C
ugauacaaacac

SEQ ID NO: 1555761 - RNA, 16 nt, Human adenovirus C
gcgcccuaccugugcu

SEQ ID NO: 1555762 - RNA, 16 nt, Human adenovirus C
uaggcccgggaccagc

SEQ ID NO: 1555763 - RNA, 18 nt, Human adenovirus C
uaaacaacucgcugcugc

SEQ ID NO: 1555764 - RNA, 22 nt, Human adenovirus C
gaaaaucagagggcgagguauu

SEQ ID NO: 1555765 - RNA, 21 nt, Human adenovirus C
guuuaaacagcgaggaggagc

SEQ ID NO: 1555766 - RNA, 13 nt, Human adenovirus C
agacggcggaggc

SEQ ID NO: 1555767 - RNA, 17 nt, Human adenovirus C
agggugcaugcccaggc

SEQ ID NO: 1555768 - RNA, 19 nt, Human adenovirus C
ugggcaccuaugacaagcg

SEQ ID NO: 1555769 - RNA, 21 nt, Human adenovirus C
cgccugauuucugccagcgcc

SEQ ID NO: 1555770 - RNA, 21 nt, Human adenovirus C
aauauugcgcuguaccugcca

SEQ ID NO: 1555771 - RNA, 18 nt, Human adenovirus C
gagacguacuucagccug

SEQ ID NO: 1555772 - RNA, 20 nt, Human adenovirus C
agcaaggaaauucccacgcc

SEQ ID NO: 1555773 - RNA, 12 nt, Human adenovirus C
gccggcggcggu

SEQ ID NO: 1555774 - RNA, 23 nt, Human adenovirus C
caaaaccuucucuacgccaacuc

SEQ ID NO: 1555775 - RNA, 17 nt, Human adenovirus C
cagcacucggcagaaac

SEQ ID NO: 1555776 - RNA, 17 nt, Human adenovirus C
ccgacgggcggccaugc

SEQ ID NO: 1555777 - RNA, 15 nt, Human adenovirus C
gcgcuggggcaggag

SEQ ID NO: 1555778 - RNA, 11 nt, Human adenovirus C
aacguggagcu

SEQ ID NO: 1555779 - RNA, 18 nt, Human adenovirus C
ugggacaccacuggaacc

SEQ ID NO: 1555780 - RNA, 21 nt, Human adenovirus C
ugcaauucuucucaaauacua

SEQ ID NO: 1555781 - RNA, 19 nt, Human adenovirus C
guacagugaagauguaaau

SEQ ID NO: 1555782 - RNA, 20 nt, Human adenovirus C
gcagcugaugguacccaagc

SEQ ID NO: 1555783 - RNA, 14 nt, Human adenovirus C
gugacgaaaaggcu

SEQ ID NO: 1555784 - RNA, 15 nt, Human adenovirus C
acauuggcuggaaug

SEQ ID NO: 1555785 - RNA, 19 nt, Human adenovirus C
cgcaacuagauugcaagaa

SEQ ID NO: 1555786 - RNA, 16 nt, Human adenovirus C
gaagacgacgggcccg

SEQ ID NO: 1555787 - RNA, 24 nt, Human adenovirus C
cacaccucguaauaaccuuaaucc

SEQ ID NO: 1555788 - RNA, 15 nt, Human adenovirus C
caaggccugcagacc

SEQ ID NO: 1555789 - RNA, 19 nt, Human adenovirus C
caagacagaaacacagagc

SEQ ID NO: 1555790 - RNA, 14 nt, Human adenovirus C
ccuggaggcagcug

SEQ ID NO: 1555791 - RNA, 18 nt, Human adenovirus C
gacgaaguaaguuugcca

SEQ ID NO: 1555792 - RNA, 15 nt, Human adenovirus C
cgcccucuccugagc

SEQ ID NO: 1555793 - RNA, 11 nt, Human adenovirus C
agugucacugu

SEQ ID NO: 1555794 - RNA, 12 nt, Human adenovirus C
uaacuugcaugg

SEQ ID NO: 1555795 - RNA, 14 nt, Human adenovirus C
cagaaccaccagca

SEQ ID NO: 1555796 - RNA, 17 nt, Human adenovirus C
ucaucucuacagccccu

SEQ ID NO: 1555797 - RNA, 16 nt, Human adenovirus C
cgcgggcuagguccag

SEQ ID NO: 1555798 - RNA, 22 nt, Human adenovirus C
ccgugugcuugauauggcuucc

SEQ ID NO: 1555799 - RNA, 14 nt, Human adenovirus C
gcuucacuggacuc

SEQ ID NO: 1555800 - RNA, 21 nt, Human adenovirus C
acgugcagaccaaccuggacc

SEQ ID NO: 1555801 - RNA, 17 nt, Human adenovirus C
cgcuggccgcucuucau

SEQ ID NO: 1555802 - RNA, 17 nt, Human adenovirus C
gguucggggcugugccu

SEQ ID NO: 1555803 - RNA, 23 nt, Human adenovirus C
cauguuguaauucaccaccuccc

SEQ ID NO: 1555804 - RNA, 16 nt, Human adenovirus C
acaccuacgacuacau

SEQ ID NO: 1555805 - RNA, 19 nt, Human adenovirus C
gcagcaaugccuggaggag

SEQ ID NO: 1555806 - RNA, 18 nt, Human adenovirus C
cagcauaacaacucagga

SEQ ID NO: 1555807 - RNA, 16 nt, Human adenovirus C
gaaucuacuggggcuc

SEQ ID NO: 1555808 - RNA, 21 nt, Human adenovirus C
aggagggagagugcuuaaaaa

SEQ ID NO: 1555809 - RNA, 17 nt, Human adenovirus C
gcagccggugggcccgu

SEQ ID NO: 1555810 - RNA, 15 nt, Human adenovirus C
ccacgguggcaccua

SEQ ID NO: 1555811 - RNA, 20 nt, Human adenovirus C
gccgugcugaaacgcagcau

SEQ ID NO: 1555812 - RNA, 23 nt, Human adenovirus C
uucuugucccuccgcacccacua

SEQ ID NO: 1555813 - RNA, 16 nt, Human adenovirus C
cauccaggugaugccg

SEQ ID NO: 1555814 - RNA, 18 nt, Human adenovirus C
acaucaacuuugcgucuc

SEQ ID NO: 1555815 - RNA, 19 nt, Human adenovirus C
cccucucaaaagcgggcau

SEQ ID NO: 1555816 - RNA, 14 nt, Human adenovirus C
gguugaucuccuga

SEQ ID NO: 1555817 - RNA, 15 nt, Human adenovirus C
gaggcagcuggggcc

SEQ ID NO: 1555818 - RNA, 14 nt, Human adenovirus C
cuucagcuggggcu

SEQ ID NO: 1555819 - RNA, 19 nt, Human adenovirus C
aauucuguuuauucuuaua

SEQ ID NO: 1555820 - RNA, 16 nt, Human adenovirus C
cacaggguugcagcac

SEQ ID NO: 1555821 - RNA, 19 nt, Human adenovirus C
cgccaguggcggcggcgcu

SEQ ID NO: 1555822 - RNA, 17 nt, Human adenovirus C
gcacgucuagggcgcag

SEQ ID NO: 1555823 - RNA, 13 nt, Human adenovirus C
ggcgugcuggaca

SEQ ID NO: 1555824 - RNA, 21 nt, Human adenovirus C
agaaacgaaagccaaaaaacc

SEQ ID NO: 1555825 - RNA, 15 nt, Human adenovirus C
ggaggcagcuggggc

SEQ ID NO: 1555826 - RNA, 14 nt, Human adenovirus C
cugcagcgcugcca

SEQ ID NO: 1555827 - RNA, 14 nt, Human adenovirus C
aagcugcagcugcc

SEQ ID NO: 1555828 - RNA, 21 nt, Human adenovirus C
ccucgaccacugccgccgcca

SEQ ID NO: 1555829 - RNA, 21 nt, Human adenovirus C
gcaagcugauugccaggggca

SEQ ID NO: 1555830 - RNA, 11 nt, Human adenovirus C
agcaucugcag

SEQ ID NO: 1555831 - RNA, 18 nt, Human adenovirus C
agcccgccaagaguuucu

SEQ ID NO: 1555832 - RNA, 23 nt, Human adenovirus C
acggccugguaggcgcagcaucc

SEQ ID NO: 1555833 - RNA, 16 nt, Human adenovirus C
caaacuuuccuggacg

SEQ ID NO: 1555834 - RNA, 17 nt, Human adenovirus C
cagcuaaaugccguggu

SEQ ID NO: 1555835 - RNA, 16 nt, Human adenovirus C
cacagcggcggcagca

SEQ ID NO: 1555836 - RNA, 19 nt, Human adenovirus C
caccuaugacaagcgcuuu

SEQ ID NO: 1555837 - RNA, 21 nt, Human adenovirus C
uacgaacccccgcggcgccgg

SEQ ID NO: 1555838 - RNA, 15 nt, Human adenovirus C
ucagaugcugaccug

SEQ ID NO: 1555839 - RNA, 20 nt, Human adenovirus C
agcuggcgcgcuggcuugag

SEQ ID NO: 1555840 - RNA, 20 nt, Human adenovirus C
agcggggggcuucugaggcu

SEQ ID NO: 1555841 - RNA, 13 nt, Human adenovirus C
ucccauucuccag

SEQ ID NO: 1555842 - RNA, 22 nt, Human adenovirus C
agcgcauccacaaggccgugag

SEQ ID NO: 1555843 - RNA, 20 nt, Human adenovirus C
gcagcgaugugccccucgcc

SEQ ID NO: 1555844 - RNA, 16 nt, Human adenovirus C
cgcgguaccugcggcc

SEQ ID NO: 1555845 - RNA, 17 nt, Human adenovirus C
cagccuccgccgccgcu

SEQ ID NO: 1555846 - RNA, 22 nt, Human adenovirus C
cagacccaucuccuaacugcag

SEQ ID NO: 1555847 - RNA, 18 nt, Human adenovirus C
gcagguuccugagcagcu

SEQ ID NO: 1555848 - RNA, 17 nt, Human adenovirus C
cccaacccgcgccucaa

SEQ ID NO: 1555849 - RNA, 22 nt, Human adenovirus C
aucagccucgccccccuucucc

SEQ ID NO: 1555850 - RNA, 19 nt, Human adenovirus C
ggccaaccaggcagugcaa

SEQ ID NO: 1555851 - RNA, 21 nt, Human adenovirus C
caguacaaguuguggccccca

SEQ ID NO: 1555852 - RNA, 17 nt, Human adenovirus C
ccaaaaagaagcugcag

SEQ ID NO: 1555853 - RNA, 16 nt, Human adenovirus C
gcugcuccucuucccg

SEQ ID NO: 1555854 - RNA, 13 nt, Human adenovirus C
cgccgccaccagu

SEQ ID NO: 1555855 - RNA, 21 nt, Human adenovirus C
uucuaccccguauuugccgug

SEQ ID NO: 1555856 - RNA, 13 nt, Human adenovirus C
uggacuucaccca

SEQ ID NO: 1555857 - RNA, 12 nt, Human adenovirus C
uuugagccccuc

SEQ ID NO: 1555858 - RNA, 17 nt, Human adenovirus C
gaagacgugagcgguga

SEQ ID NO: 1555859 - RNA, 12 nt, Human adenovirus C
cgcaccucgcgc

SEQ ID NO: 1555860 - RNA, 20 nt, Human adenovirus C
augcgggccaugagcugcga

SEQ ID NO: 1555861 - RNA, 13 nt, Human adenovirus C
gcaacugggcagc

SEQ ID NO: 1555862 - RNA, 22 nt, Human adenovirus C
aauaccuguguggaagccugga

SEQ ID NO: 1555863 - RNA, 21 nt, Human adenovirus C
ucggccccaccgguucuucac

SEQ ID NO: 1555864 - RNA, 21 nt, Human adenovirus C
cucagcgcagcggugcagcca

SEQ ID NO: 1555865 - RNA, 21 nt, Human adenovirus C
cacccuugccgucugcgccgu

SEQ ID NO: 1555866 - RNA, 18 nt, Human adenovirus C
gucccuaaccaugacuuu

SEQ ID NO: 1555867 - RNA, 23 nt, Human adenovirus C
guaucuuuuguguggucaagcag

SEQ ID NO: 1555868 - RNA, 15 nt, Human adenovirus C
ccucagcuacaagcu

SEQ ID NO: 1555869 - RNA, 13 nt, Human adenovirus C
ugcagccagggga

SEQ ID NO: 1555870 - RNA, 19 nt, Human adenovirus C
agggccucucagaugcuga

SEQ ID NO: 1555871 - RNA, 18 nt, Human adenovirus C
ugcaacagguuauugccc

SEQ ID NO: 1555872 - RNA, 22 nt, Human adenovirus C
gaaguauuccauagagcagcug

SEQ ID NO: 1555873 - RNA, 14 nt, Human adenovirus C
gaaaccccuucccu

SEQ ID NO: 1555874 - RNA, 16 nt, Human adenovirus C
gccgcgcgcuggggca

SEQ ID NO: 1555875 - RNA, 13 nt, Human adenovirus C
ccgucacccagca

SEQ ID NO: 1555876 - RNA, 16 nt, Human adenovirus C
gcugcagcugccgccg

SEQ ID NO: 1555877 - RNA, 14 nt, Human adenovirus C
agcggcauuaaaaa

SEQ ID NO: 1555878 - RNA, 16 nt, Human adenovirus C
guuagucugcagaauu

SEQ ID NO: 1555879 - RNA, 15 nt, Human adenovirus C
cucuagcgaugaaga

SEQ ID NO: 1555880 - RNA, 14 nt, Human adenovirus C
agcccgugcuggcc

SEQ ID NO: 1555881 - RNA, 22 nt, Human adenovirus C
gauauccguagauguaccugga

SEQ ID NO: 1555882 - RNA, 14 nt, Human adenovirus C
acgcgcggcggcgg

SEQ ID NO: 1555883 - RNA, 18 nt, Human adenovirus C
auauuaaugcaucucaua

SEQ ID NO: 1555884 - RNA, 12 nt, Human adenovirus C
auuuccugcaga

SEQ ID NO: 1555885 - RNA, 13 nt, Human adenovirus C
agugcggcggcgg

SEQ ID NO: 1555886 - RNA, 21 nt, Human adenovirus C
auuacugacgccagacgccgc

SEQ ID NO: 1555887 - RNA, 19 nt, Human adenovirus C
aaaagaagcugcagcugcc

SEQ ID NO: 1555888 - RNA, 23 nt, Human adenovirus C
aaucuaacuuuuagcuuaaugac

SEQ ID NO: 1555889 - RNA, 16 nt, Human adenovirus C
ccaaguucaugccuuu

SEQ ID NO: 1555890 - RNA, 17 nt, Human adenovirus C
cgagggagaggagcccg

SEQ ID NO: 1555891 - RNA, 16 nt, Human adenovirus C
ccgccgccgcuccguc

SEQ ID NO: 1555892 - RNA, 15 nt, Human adenovirus C
acccggagaugcagc

SEQ ID NO: 1555893 - RNA, 16 nt, Human adenovirus C
cccaggcuggggagaa

SEQ ID NO: 1555894 - RNA, 18 nt, Human adenovirus C
cugcccacgcuugcaccg

SEQ ID NO: 1555895 - RNA, 15 nt, Human adenovirus C
cgcugaggccgaggc

SEQ ID NO: 1555896 - RNA, 13 nt, Human adenovirus C
cacuaucagcgcc

SEQ ID NO: 1555897 - RNA, 23 nt, Human adenovirus C
cagugucgucgcauccgcccugc

SEQ ID NO: 1555898 - RNA, 19 nt, Human adenovirus C
aguuuucacuccacaggcu

SEQ ID NO: 1555899 - RNA, 14 nt, Human adenovirus C
gggcuucugaggcu

SEQ ID NO: 1555900 - RNA, 23 nt, Human adenovirus C
cuuucacuuuccgcuucacugga

SEQ ID NO: 1555901 - RNA, 21 nt, Human adenovirus C
cuuaaaaaacauuacuggaac

SEQ ID NO: 1555902 - RNA, 13 nt, Human adenovirus C
cgaugagcagcug

SEQ ID NO: 1555903 - RNA, 17 nt, Human adenovirus C
uaagaacuauggcagca

SEQ ID NO: 1555904 - RNA, 18 nt, Human adenovirus C
gcggucccauccaagguc

SEQ ID NO: 1555905 - RNA, 19 nt, Human adenovirus C
cccuagacaaggccggaaa

SEQ ID NO: 1555906 - RNA, 17 nt, Human adenovirus C
cgagucucgggccggcc

SEQ ID NO: 1555907 - RNA, 13 nt, Human adenovirus C
gaauucauucaga

SEQ ID NO: 1555908 - RNA, 13 nt, Human adenovirus C
aucugcuccagag

SEQ ID NO: 1555909 - RNA, 23 nt, Human adenovirus C
ggcuguacauccugcacgagguu

SEQ ID NO: 1555910 - RNA, 20 nt, Human adenovirus C
acuaucgcaacaccacugcu

SEQ ID NO: 1555911 - RNA, 19 nt, Human adenovirus C
cgaagagcauaucgagggc

SEQ ID NO: 1555912 - RNA, 22 nt, Human adenovirus C
aggauuacaagugggaauuuga

SEQ ID NO: 1555913 - RNA, 23 nt, Human adenovirus C
ccuugcuagacugcuccuucagc

SEQ ID NO: 1555914 - RNA, 19 nt, Human adenovirus C
cgccacaauguggccuccg

SEQ ID NO: 1555915 - RNA, 17 nt, Human adenovirus C
gcugccgccaugggcuc

SEQ ID NO: 1555916 - RNA, 15 nt, Human adenovirus C
aguaccuuaccuggu

SEQ ID NO: 1555917 - RNA, 17 nt, Human adenovirus C
gcagccacaacgcgcag

SEQ ID NO: 1555918 - RNA, 16 nt, Human adenovirus C
gguaccauauaaaccu

SEQ ID NO: 1555919 - RNA, 15 nt, Human adenovirus C
guaguuucgcaggcg

SEQ ID NO: 1555920 - RNA, 19 nt, Human adenovirus C
ggaacggggccgaggugga

SEQ ID NO: 1555921 - RNA, 22 nt, Human adenovirus C
gagauacuacauggacaaaaga

SEQ ID NO: 1555922 - RNA, 19 nt, Human adenovirus C
ggcgagggccuggcgcggc

SEQ ID NO: 1555923 - RNA, 13 nt, Human adenovirus C
gccaccugagccu

SEQ ID NO: 1555924 - RNA, 23 nt, Human adenovirus C
cuccgccgcuuuggggucacugc

SEQ ID NO: 1555925 - RNA, 16 nt, Human adenovirus C
cgcgcacgucgcaccg

SEQ ID NO: 1555926 - RNA, 16 nt, Human adenovirus C
cuaccggagugcuggg

SEQ ID NO: 1555927 - RNA, 21 nt, Human adenovirus C
augagcaaacaguacaaguug

SEQ ID NO: 1555928 - RNA, 19 nt, Human adenovirus C
ucuucggcaucaaggaagg

SEQ ID NO: 1555929 - RNA, 14 nt, Human adenovirus C
ucaguagcaagcug

SEQ ID NO: 1555930 - RNA, 16 nt, Human adenovirus C
aggaugggcaggggcu

SEQ ID NO: 1555931 - RNA, 13 nt, Human adenovirus C
ggaggaagccagg

SEQ ID NO: 1555932 - RNA, 14 nt, Human adenovirus C
aaacaggucucugc

SEQ ID NO: 1555933 - RNA, 16 nt, Human adenovirus C
cacaagccccacugac

SEQ ID NO: 1555934 - RNA, 14 nt, Human adenovirus C
auugacgcgguggu

SEQ ID NO: 1555935 - RNA, 21 nt, Human adenovirus C
gagccugggcuggagcccgag

SEQ ID NO: 1555936 - RNA, 17 nt, Human adenovirus C
uuccgcgguccuccucg

SEQ ID NO: 1555937 - RNA, 13 nt, Human adenovirus C
ccgggucagggcg

SEQ ID NO: 1555938 - RNA, 19 nt, Human adenovirus C
acgccuuugccaacuggcc

SEQ ID NO: 1555939 - RNA, 19 nt, Human adenovirus C
gacacccaagggugcagcu

SEQ ID NO: 1555940 - RNA, 18 nt, Human adenovirus C
caggacgacgcagaggca

SEQ ID NO: 1555941 - RNA, 20 nt, Human adenovirus C
cggcgacagugucgcgcacc

SEQ ID NO: 1555942 - RNA, 19 nt, Human adenovirus C
acaggcggcuauuaccacc

SEQ ID NO: 1555943 - RNA, 22 nt, Human adenovirus C
ggaggcaagcacacagaccauc

SEQ ID NO: 1555944 - RNA, 18 nt, Human adenovirus C
ucuucauucagccgccgc

SEQ ID NO: 1555945 - RNA, 17 nt, Human adenovirus C
cagcgccauuaugagca

SEQ ID NO: 1555946 - RNA, 18 nt, Human adenovirus C
ccgcggcgacaggucagg

SEQ ID NO: 1555947 - RNA, 13 nt, Human adenovirus C
ucauuuugcugcc

SEQ ID NO: 1555948 - RNA, 20 nt, Human adenovirus C
gaagcgugacacgcgcgagg

SEQ ID NO: 1555949 - RNA, 22 nt, Human adenovirus C
agugcccgcugucauaccacug

SEQ ID NO: 1555950 - RNA, 12 nt, Human adenovirus C
ccuaucagcagc

SEQ ID NO: 1555951 - RNA, 20 nt, Human adenovirus C
ucaauguuggcacaacacag

SEQ ID NO: 1555952 - RNA, 11 nt, Human adenovirus C
aaccugaaaga

SEQ ID NO: 1555953 - RNA, 14 nt, Human adenovirus C
acugggacagccua

SEQ ID NO: 1555954 - RNA, 13 nt, Human adenovirus C
agcagcacaggcc

SEQ ID NO: 1555955 - RNA, 15 nt, Human adenovirus C
cauaacauggugugu

SEQ ID NO: 1555956 - RNA, 16 nt, Human adenovirus C
aacuauuuuguagaau

SEQ ID NO: 1555957 - RNA, 15 nt, Human adenovirus C
agcuuaaaagaugac

SEQ ID NO: 1555958 - RNA, 21 nt, Human adenovirus C
cagccugcaaagggcccuggc

SEQ ID NO: 1555959 - RNA, 18 nt, Human adenovirus C
aacgaagcuauguccaag

SEQ ID NO: 1555960 - RNA, 19 nt, Human adenovirus C
cuuggguccggccugcuga

SEQ ID NO: 1555961 - RNA, 19 nt, Human adenovirus C
gaccucguccucggagccg

SEQ ID NO: 1555962 - RNA, 23 nt, Human adenovirus C
uuccagaccaguagacaaggccu

SEQ ID NO: 1555963 - RNA, 21 nt, Human adenovirus C
gacgcgcccuggaggcagcug

SEQ ID NO: 1555964 - RNA, 23 nt, Human adenovirus C
cuggcaagauaucggcaccagca

SEQ ID NO: 1555965 - RNA, 21 nt, Human adenovirus C
gcugauugccaggggcaggcc

SEQ ID NO: 1555966 - RNA, 14 nt, Human adenovirus C
acugcaccggcggc

SEQ ID NO: 1555967 - RNA, 23 nt, Human adenovirus C
acgcuuguggcgcgcgaggaggu

SEQ ID NO: 1555968 - RNA, 21 nt, Human adenovirus C
uaauguacuaggagacacuuu

SEQ ID NO: 1555969 - RNA, 22 nt, Human adenovirus C
cgaaccuuuggacaccucccac

SEQ ID NO: 1555970 - RNA, 15 nt, Human adenovirus C
gggaacaacccauuc

SEQ ID NO: 1555971 - RNA, 15 nt, Human adenovirus C
acgcuggaccugccu

SEQ ID NO: 1555972 - RNA, 21 nt, Human adenovirus C
cugcuuaaaagccaccugagc

SEQ ID NO: 1555973 - RNA, 20 nt, Human adenovirus C
cgagacguacuucagccuga

SEQ ID NO: 1555974 - RNA, 17 nt, Human adenovirus C
augcgcgagggacaggc

SEQ ID NO: 1555975 - RNA, 16 nt, Human adenovirus C
gcucgaucucuuccuc

SEQ ID NO: 1555976 - RNA, 22 nt, Human adenovirus C
cacaguaacugcagcacagcac

SEQ ID NO: 1555977 - RNA, 19 nt, Human adenovirus C
cccgagagccggccuggac

SEQ ID NO: 1555978 - RNA, 16 nt, Human adenovirus C
gauguaaauauggaaa

SEQ ID NO: 1555979 - RNA, 16 nt, Human adenovirus C
gccaaaaccuucucua

SEQ ID NO: 1555980 - RNA, 23 nt, Human adenovirus C
caaggccuggaacagcagcacag

SEQ ID NO: 1555981 - RNA, 18 nt, Human adenovirus C
accacagaccggucccag

SEQ ID NO: 1555982 - RNA, 21 nt, Human adenovirus C
aagauaucggcaccagcaaua

SEQ ID NO: 1555983 - RNA, 19 nt, Human adenovirus C
agccacaggcugcugucca

SEQ ID NO: 1555984 - RNA, 21 nt, Human adenovirus C
gcauaguggugcaggagcgca

SEQ ID NO: 1555985 - RNA, 13 nt, Human adenovirus C
aagcuaaaauaca

SEQ ID NO: 1555986 - RNA, 13 nt, Human adenovirus C
ggguccagaggac

SEQ ID NO: 1555987 - RNA, 15 nt, Human adenovirus C
cagagacgcccaggc

SEQ ID NO: 1555988 - RNA, 19 nt, Human adenovirus C
cgcucgucgggcaccaggu

SEQ ID NO: 1555989 - RNA, 13 nt, Human adenovirus C
cccaggcugggga

SEQ ID NO: 1555990 - RNA, 23 nt, Human adenovirus C
aaagcuagcccugcaaacaucag

SEQ ID NO: 1555991 - RNA, 12 nt, Human adenovirus C
ccugccaccucc

SEQ ID NO: 1555992 - RNA, 16 nt, Human adenovirus C
cagccccuccgcggcg

SEQ ID NO: 1555993 - RNA, 12 nt, Human adenovirus C
gcuccucucuug

SEQ ID NO: 1555994 - RNA, 14 nt, Human adenovirus C
cccgcggugcuccu

SEQ ID NO: 1555995 - RNA, 14 nt, Human adenovirus C
cagacgggccaggg

SEQ ID NO: 1555996 - RNA, 14 nt, Human adenovirus C
cgucaucuccagcg

SEQ ID NO: 1555997 - RNA, 17 nt, Human adenovirus C
uuuuggacgaggaggag

SEQ ID NO: 1555998 - RNA, 12 nt, Human adenovirus C
ggucccuguguu

SEQ ID NO: 1555999 - RNA, 18 nt, Human adenovirus C
ggcugcucugcucggaag

SEQ ID NO: 1556000 - RNA, 18 nt, Human adenovirus C
ggcaacccuuccaggagg

SEQ ID NO: 1556001 - RNA, 14 nt, Human adenovirus C
cugcgucuggcgcc

SEQ ID NO: 1556002 - RNA, 23 nt, Human adenovirus C
gccgugccagaggugcuugccac

SEQ ID NO: 1556003 - RNA, 21 nt, Human adenovirus C
auugagcuccacgugccgggc

SEQ ID NO: 1556004 - RNA, 15 nt, Human adenovirus C
cagcgcacuacugcc

SEQ ID NO: 1556005 - RNA, 21 nt, Human adenovirus C
ugcgagccgaucgggaagaac

SEQ ID NO: 1556006 - RNA, 13 nt, Human adenovirus C
uccauaagggccu

SEQ ID NO: 1556007 - RNA, 16 nt, Human adenovirus C
aguggucuuacaugca

SEQ ID NO: 1556008 - RNA, 18 nt, Human adenovirus C
uggagcucugcaaccugg

SEQ ID NO: 1556009 - RNA, 24 nt, Human adenovirus C
agauaccccuauccugccgugcca

SEQ ID NO: 1556010 - RNA, 20 nt, Human adenovirus C
cugguuauacgccaucaucu

SEQ ID NO: 1556011 - RNA, 16 nt, Human adenovirus C
cagucacaagccccac

SEQ ID NO: 1556012 - RNA, 13 nt, Human adenovirus C
auugcuugagccc

SEQ ID NO: 1556013 - RNA, 18 nt, Human adenovirus C
gacgaugacucggcagac

SEQ ID NO: 1556014 - RNA, 13 nt, Human adenovirus C
ccaggaacagcuc

SEQ ID NO: 1556015 - RNA, 19 nt, Human adenovirus C
ggcaugcgucgugcgcacc

SEQ ID NO: 1556016 - RNA, 15 nt, Human adenovirus C
acgggcggaggagaa

SEQ ID NO: 1556017 - RNA, 17 nt, Human adenovirus C
aaggggugcgcuccggg

SEQ ID NO: 1556018 - RNA, 21 nt, Human adenovirus C
uuauacuagcacuucugugcc

SEQ ID NO: 1556019 - RNA, 17 nt, Human adenovirus C
gcagaaaccugugcugc

SEQ ID NO: 1556020 - RNA, 14 nt, Human adenovirus C
uugcauuuggguaa

SEQ ID NO: 1556021 - RNA, 18 nt, Human adenovirus C
gcggcuguagaccacgcc

SEQ ID NO: 1556022 - RNA, 16 nt, Human adenovirus C
ugcaggaauacaacau

SEQ ID NO: 1556023 - RNA, 18 nt, Human adenovirus C
ccacuguuacucagccac

SEQ ID NO: 1556024 - RNA, 22 nt, Human adenovirus C
aguugcuugcuugcaagacugu

SEQ ID NO: 1556025 - RNA, 21 nt, Human adenovirus C
cuugucccuccgcacccacua

SEQ ID NO: 1556026 - RNA, 21 nt, Human adenovirus C
gcucaaaggcuacaggggccu

SEQ ID NO: 1556027 - RNA, 23 nt, Human adenovirus C
gcgcgagcucagcgaccgcgagc

SEQ ID NO: 1556028 - RNA, 22 nt, Human adenovirus C
gaacuauggcagcaaggccugg

SEQ ID NO: 1556029 - RNA, 13 nt, Human adenovirus C
cugcagagccagc

SEQ ID NO: 1556030 - RNA, 16 nt, Human adenovirus C
gccgccgccgucgccg

SEQ ID NO: 1556031 - RNA, 17 nt, Human adenovirus C
aagaucuggaaggugcu

SEQ ID NO: 1556032 - RNA, 16 nt, Human adenovirus C
cgcgcccuggaggcag

SEQ ID NO: 1556033 - RNA, 12 nt, Human adenovirus C
gaccugcgcugg

SEQ ID NO: 1556034 - RNA, 16 nt, Human adenovirus C
aaugcgccgugggcua

SEQ ID NO: 1556035 - RNA, 15 nt, Human adenovirus C
ccggugcugcggcag

SEQ ID NO: 1556036 - RNA, 20 nt, Human adenovirus C
cuuccauaagggccuccccu

SEQ ID NO: 1556037 - RNA, 22 nt, Human adenovirus C
ucgccagggcuacgugcgccag

SEQ ID NO: 1556038 - RNA, 18 nt, Human adenovirus C
aucagcguaaaucccaca

SEQ ID NO: 1556039 - RNA, 10 nt, Human adenovirus C
uuccucccaa

SEQ ID NO: 1556040 - RNA, 16 nt, Human adenovirus C
aacccuuccaggaggg

SEQ ID NO: 1556041 - RNA, 13 nt, Human adenovirus C
ugucucuaagcaa

SEQ ID NO: 1556042 - RNA, 15 nt, Human adenovirus C
gauggcgcaggcggc

SEQ ID NO: 1556043 - RNA, 21 nt, Human adenovirus C
cggggauucauguugugcaga

SEQ ID NO: 1556044 - RNA, 20 nt, Human adenovirus C
caagggcgaggcgcgccgcg

SEQ ID NO: 1556045 - RNA, 23 nt, Human adenovirus C
gugguuuuguacagugaagaugu

SEQ ID NO: 1556046 - RNA, 18 nt, Human adenovirus C
caggcgggagcuccugca

SEQ ID NO: 1556047 - RNA, 18 nt, Human adenovirus C
gucucgcauuccacgagc

SEQ ID NO: 1556048 - RNA, 13 nt, Human adenovirus C
accuacucuggcu

SEQ ID NO: 1556049 - RNA, 15 nt, Human adenovirus C
uggagacugcagccu

SEQ ID NO: 1556050 - RNA, 13 nt, Human adenovirus C
uaggguagcaucu

SEQ ID NO: 1556051 - RNA, 13 nt, Human adenovirus C
cacgcccccuucg

SEQ ID NO: 1556052 - RNA, 18 nt, Human adenovirus C
cggcagaugcgccccccu

SEQ ID NO: 1556053 - RNA, 12 nt, Human adenovirus C
gccgcggugcag

SEQ ID NO: 1556054 - RNA, 19 nt, Human adenovirus C
aaccuuuggacaccuccca

SEQ ID NO: 1556055 - RNA, 18 nt, Human adenovirus C
gcuacaaccuccgcuccu

SEQ ID NO: 1556056 - RNA, 21 nt, Human adenovirus C
cuggagucucacgcucgcuug

SEQ ID NO: 1556057 - RNA, 19 nt, Human adenovirus C
ccacuguuacucagccacu

SEQ ID NO: 1556058 - RNA, 22 nt, Human adenovirus C
uagcaagcugauugccaggggc

SEQ ID NO: 1556059 - RNA, 14 nt, Human adenovirus C
cugcagcuagccaa

SEQ ID NO: 1556060 - RNA, 13 nt, Human adenovirus C
acgcgacgagaaa

SEQ ID NO: 1556061 - RNA, 12 nt, Human adenovirus C
cgucaggagggg

SEQ ID NO: 1556062 - RNA, 12 nt, Human adenovirus C
uagacugcuccu

SEQ ID NO: 1556063 - RNA, 13 nt, Human adenovirus C
ggcgcugcagagc

SEQ ID NO: 1556064 - RNA, 22 nt, Human adenovirus C
aggcacccccgcuugaggagga

SEQ ID NO: 1556065 - RNA, 14 nt, Human adenovirus C
ccggcggcagcggc

SEQ ID NO: 1556066 - RNA, 15 nt, Human adenovirus C
aggagcgcugggcgu

SEQ ID NO: 1556067 - RNA, 15 nt, Human adenovirus C
ggagaucugcaccac

SEQ ID NO: 1556068 - RNA, 18 nt, Human adenovirus C
gauggccgcgggcugggu

SEQ ID NO: 1556069 - RNA, 21 nt, Human adenovirus C
cgcugcccugguguaccagga

SEQ ID NO: 1556070 - RNA, 15 nt, Human adenovirus C
aaggggguggugugu

SEQ ID NO: 1556071 - RNA, 14 nt, Human adenovirus C
cggcagcggcagca

SEQ ID NO: 1556072 - RNA, 21 nt, Human adenovirus C
agauauggcccucaccugccg

SEQ ID NO: 1556073 - RNA, 12 nt, Human adenovirus C
ccggcggcagaa

SEQ ID NO: 1556074 - RNA, 14 nt, Human adenovirus C
aaaccucaccuccc

SEQ ID NO: 1556075 - RNA, 17 nt, Human adenovirus C
cgcucauggcgcagcug

SEQ ID NO: 1556076 - RNA, 17 nt, Human adenovirus C
ucuucagcaaauacugc

SEQ ID NO: 1556077 - RNA, 20 nt, Human adenovirus C
cagccauaucccuccgggga

SEQ ID NO: 1556078 - RNA, 19 nt, Human adenovirus C
ugcuggauuuucuggccau

SEQ ID NO: 1556079 - RNA, 16 nt, Human adenovirus C
aaacauuacuggaacu

SEQ ID NO: 1556080 - RNA, 23 nt, Human adenovirus C
aggcggcggcggcggcaggagca

SEQ ID NO: 1556081 - RNA, 11 nt, Human adenovirus C
ucugcagagca

SEQ ID NO: 1556082 - RNA, 21 nt, Human adenovirus C
gcggcaacaacaguggcagcg

SEQ ID NO: 1556083 - RNA, 19 nt, Human adenovirus C
caagcgagugguggcuccc

SEQ ID NO: 1556084 - RNA, 15 nt, Human adenovirus C
agguguaggccacgu

SEQ ID NO: 1556085 - RNA, 17 nt, Human adenovirus C
cguaugccugcgcggcc

SEQ ID NO: 1556086 - RNA, 16 nt, Human adenovirus C
accuggaccggcuggu

SEQ ID NO: 1556087 - RNA, 12 nt, Human adenovirus C
ugaaccaggaga

SEQ ID NO: 1556088 - RNA, 22 nt, Human adenovirus C
auggcacccaaaaagaagcugc

SEQ ID NO: 1556089 - RNA, 21 nt, Human adenovirus C
agguaggcgaucccuacugua

SEQ ID NO: 1556090 - RNA, 17 nt, Human adenovirus C
cugcuuaaaagccaccu

SEQ ID NO: 1556091 - RNA, 18 nt, Human adenovirus C
cucacuuaaaucagcaca

SEQ ID NO: 1556092 - RNA, 20 nt, Human adenovirus C
ccgcagcccuaucagcagcc

SEQ ID NO: 1556093 - RNA, 23 nt, Human adenovirus C
ccgcacgcgaaccuacgcccaga

SEQ ID NO: 1556094 - RNA, 17 nt, Human adenovirus C
gcuacaaauaggaucag

SEQ ID NO: 1556095 - RNA, 23 nt, Human adenovirus C
auggguguucuugcuggucaggc

SEQ ID NO: 1556096 - RNA, 21 nt, Human adenovirus C
cccgcaacuucagacuggggu

SEQ ID NO: 1556097 - RNA, 20 nt, Human adenovirus C
accucgaccacugccgccgc

SEQ ID NO: 1556098 - RNA, 18 nt, Human adenovirus C
gcguccaugucgccgcca

SEQ ID NO: 1556099 - RNA, 15 nt, Human adenovirus C
guggaccuggccaac

SEQ ID NO: 1556100 - RNA, 14 nt, Human adenovirus C
aagaaaaacaccac

SEQ ID NO: 1556101 - RNA, 22 nt, Human adenovirus C
cugggugugcgcggcaccagcg

SEQ ID NO: 1556102 - RNA, 22 nt, Human adenovirus C
cugaccaaaugcgccagaaggc

SEQ ID NO: 1556103 - RNA, 16 nt, Human adenovirus C
accugccagacaagcu

SEQ ID NO: 1556104 - RNA, 16 nt, Human adenovirus C
ggaccacagaacccac

SEQ ID NO: 1556105 - RNA, 19 nt, Human adenovirus C
gcucuagaccgugcaaaag

SEQ ID NO: 1556106 - RNA, 15 nt, Human adenovirus C
gggucaaaaaccagg

SEQ ID NO: 1556107 - RNA, 13 nt, Human adenovirus C
acuggggcggcga

SEQ ID NO: 1556108 - RNA, 15 nt, Human adenovirus C
caguacuggcagcgg

SEQ ID NO: 1556109 - RNA, 12 nt, Human adenovirus C
ggaggggcaugg

SEQ ID NO: 1556110 - RNA, 13 nt, Human adenovirus C
gccgcgcaccugg

SEQ ID NO: 1556111 - RNA, 23 nt, Human adenovirus C
caaauauggaacauucccagcug

SEQ ID NO: 1556112 - RNA, 18 nt, Human adenovirus C
acggcgacgaggaccugc

SEQ ID NO: 1556113 - RNA, 22 nt, Human adenovirus C
ggggaggcaagcacacagacca

SEQ ID NO: 1556114 - RNA, 14 nt, Human adenovirus C
cuagcccugcaaac

SEQ ID NO: 1556115 - RNA, 12 nt, Human adenovirus C
ccgcgcgcggcg

SEQ ID NO: 1556116 - RNA, 22 nt, Human adenovirus C
uccgaaccuuuggacaccuccc

SEQ ID NO: 1556117 - RNA, 18 nt, Human adenovirus C
gaugacuugcaagaggcc

SEQ ID NO: 1556118 - RNA, 22 nt, Human adenovirus C
gaccgugucuagcuugcugacg

SEQ ID NO: 1556119 - RNA, 18 nt, Human adenovirus C
gaacaaaacucccuuaga

SEQ ID NO: 1556120 - RNA, 21 nt, Human adenovirus C
gcuuugcucccaaaccucagc

SEQ ID NO: 1556121 - RNA, 23 nt, Human adenovirus C
ggugguagauggccuggccucug

SEQ ID NO: 1556122 - RNA, 16 nt, Human adenovirus C
cguuucagccccccgg

SEQ ID NO: 1556123 - RNA, 22 nt, Human adenovirus C
acgugccgcggggacaggagga

SEQ ID NO: 1556124 - RNA, 15 nt, Human adenovirus C
cagcccgugcuggcc

SEQ ID NO: 1556125 - RNA, 13 nt, Human adenovirus C
gcccgacagggaa

SEQ ID NO: 1556126 - RNA, 14 nt, Human adenovirus C
aacucgcugcugca

SEQ ID NO: 1556127 - RNA, 20 nt, Human adenovirus C
cgguucuuugcugacccgga

SEQ ID NO: 1556128 - RNA, 21 nt, Human adenovirus C
caaguacuagcuacuguagcu

SEQ ID NO: 1556129 - RNA, 19 nt, Human adenovirus C
uuuguacagugaagaugua

SEQ ID NO: 1556130 - RNA, 21 nt, Human adenovirus C
cgaugcuccccuggacccgcc

SEQ ID NO: 1556131 - RNA, 21 nt, Human adenovirus C
cucccaaaagacauauuuccu

SEQ ID NO: 1556132 - RNA, 13 nt, Human adenovirus C
ccgcggggacagg

SEQ ID NO: 1556133 - RNA, 19 nt, Human adenovirus C
aggacccuggugcugccaa

SEQ ID NO: 1556134 - RNA, 18 nt, Human adenovirus C
ccccgggcagcaggcgcg

SEQ ID NO: 1556135 - RNA, 21 nt, Human adenovirus C
gcccgccggcuaugcacugca

SEQ ID NO: 1556136 - RNA, 20 nt, Human adenovirus C
cuacccgacgccgaaccacc

SEQ ID NO: 1556137 - RNA, 15 nt, Human adenovirus C
gcugaaacgcagcau

SEQ ID NO: 1556138 - RNA, 15 nt, Human adenovirus C
cgugcagaccgugga

SEQ ID NO: 1556139 - RNA, 13 nt, Human adenovirus C
caguccgggccag

SEQ ID NO: 1556140 - RNA, 19 nt, Human adenovirus C
auuugaagagcuuuugaaa

SEQ ID NO: 1556141 - RNA, 18 nt, Human adenovirus C
aucaggcuacuaagaaaa

SEQ ID NO: 1556142 - RNA, 17 nt, Human adenovirus C
cccugggaucaggcuac

SEQ ID NO: 1556143 - RNA, 23 nt, Human adenovirus C
gcggucucggucguugagggucc

SEQ ID NO: 1556144 - RNA, 13 nt, Human adenovirus C
ccauagcggaugu

SEQ ID NO: 1556145 - RNA, 15 nt, Human adenovirus C
caccacccuccucac

SEQ ID NO: 1556146 - RNA, 13 nt, Human adenovirus C
agcagcaggagga

SEQ ID NO: 1556147 - RNA, 18 nt, Human adenovirus C
ucauaguuguguuccagg

SEQ ID NO: 1556148 - RNA, 18 nt, Human adenovirus C
uguggccuccgacugugg

SEQ ID NO: 1556149 - RNA, 22 nt, Human adenovirus C
ggacgcuaccgcugcgcaacag

SEQ ID NO: 1556150 - RNA, 11 nt, Human adenovirus C
aauguggccuc

SEQ ID NO: 1556151 - RNA, 17 nt, Human adenovirus C
gccagaggagcugcuga

SEQ ID NO: 1556152 - RNA, 13 nt, Human adenovirus C
cugcagcagcgcg

SEQ ID NO: 1556153 - RNA, 21 nt, Human adenovirus C
uuccaugcucagucugggcaa

SEQ ID NO: 1556154 - RNA, 16 nt, Human adenovirus C
caacgugccgcgggga

SEQ ID NO: 1556155 - RNA, 14 nt, Human adenovirus C
auuaacaaaaauac

SEQ ID NO: 1556156 - RNA, 13 nt, Human adenovirus C
ccgggcacagcag

SEQ ID NO: 1556157 - RNA, 13 nt, Human adenovirus C
aggguucggggcu

SEQ ID NO: 1556158 - RNA, 17 nt, Human adenovirus C
cgcaaccgcgcccaggc

SEQ ID NO: 1556159 - RNA, 15 nt, Human adenovirus C
gcagcuggccuugcg

SEQ ID NO: 1556160 - RNA, 13 nt, Human adenovirus C
caguggacuaaac

SEQ ID NO: 1556161 - RNA, 18 nt, Human adenovirus C
ccuuacuacaccuacucu

SEQ ID NO: 1556162 - RNA, 16 nt, Human adenovirus C
gacgacuggcgccagg

SEQ ID NO: 1556163 - RNA, 22 nt, Human adenovirus C
gccgcuucagccgcugcagcca

SEQ ID NO: 1556164 - RNA, 19 nt, Human adenovirus C
uuuguagcgccacaucuuc

SEQ ID NO: 1556165 - RNA, 19 nt, Human adenovirus C
acgcggugguggaggaggc

SEQ ID NO: 1556166 - RNA, 18 nt, Human adenovirus C
gucaucucuacagccccu

SEQ ID NO: 1556167 - RNA, 21 nt, Human adenovirus C
aacgacgagucggugagcucc

SEQ ID NO: 1556168 - RNA, 22 nt, Human adenovirus C
aggcgcuuuuccaagagaaggu

SEQ ID NO: 1556169 - RNA, 16 nt, Human adenovirus C
gaacuaccugcugacc

SEQ ID NO: 1556170 - RNA, 19 nt, Human adenovirus C
uccugucgagccaaacgcu

SEQ ID NO: 1556171 - RNA, 16 nt, Human adenovirus C
cugcagagcucucugg

SEQ ID NO: 1556172 - RNA, 16 nt, Human adenovirus C
aaagcagaccaaagca

SEQ ID NO: 1556173 - RNA, 21 nt, Human adenovirus C
gugcaguuugcccgcgccacc

SEQ ID NO: 1556174 - RNA, 22 nt, Human adenovirus C
cgguaaagaccccgggcagcag

SEQ ID NO: 1556175 - RNA, 16 nt, Human adenovirus C
gccgcuggacgagggc

SEQ ID NO: 1556176 - RNA, 14 nt, Human adenovirus C
cggccgcugcggcc

SEQ ID NO: 1556177 - RNA, 14 nt, Human adenovirus C
gaauuguugcuaca

SEQ ID NO: 1556178 - RNA, 13 nt, Human adenovirus C
cacuggcagggac

SEQ ID NO: 1556179 - RNA, 15 nt, Human adenovirus C
cagucguagcaggag

SEQ ID NO: 1556180 - RNA, 15 nt, Human adenovirus C
accugcuugagcagg

SEQ ID NO: 1556181 - RNA, 20 nt, Human adenovirus C
uaaacauuccagcaccuuca

SEQ ID NO: 1556182 - RNA, 16 nt, Human adenovirus C
gugaugccggcggcgg

SEQ ID NO: 1556183 - RNA, 20 nt, Human adenovirus C
gacacccaagggugcagcug

SEQ ID NO: 1556184 - RNA, 16 nt, Human adenovirus C
gccacagagggcaugg

SEQ ID NO: 1556185 - RNA, 15 nt, Human adenovirus C
agcuacccacccagc

SEQ ID NO: 1556186 - RNA, 12 nt, Human adenovirus C
cugccaggcuca

SEQ ID NO: 1556187 - RNA, 15 nt, Human adenovirus C
gaucaggcuacuaag

SEQ ID NO: 1556188 - RNA, 17 nt, Human adenovirus C
gccgcacgaggggcagu

SEQ ID NO: 1556189 - RNA, 14 nt, Human adenovirus C
gacgaaugagcucc

SEQ ID NO: 1556190 - RNA, 20 nt, Human adenovirus C
gcucuggccguucgggguca

SEQ ID NO: 1556191 - RNA, 22 nt, Human adenovirus C
ggcagcuggggccggaccuggg

SEQ ID NO: 1556192 - RNA, 15 nt, Human adenovirus C
gcgggagcuccugca

SEQ ID NO: 1556193 - RNA, 22 nt, Human adenovirus C
aagagcuucuacaacgaccagg

SEQ ID NO: 1556194 - RNA, 22 nt, Human adenovirus C
uuaaaucagcacaguaacugca

SEQ ID NO: 1556195 - RNA, 13 nt, Human adenovirus C
ggcguuggacagc

SEQ ID NO: 1556196 - RNA, 19 nt, Human adenovirus C
augaggaagguccuccucc

SEQ ID NO: 1556197 - RNA, 15 nt, Human adenovirus C
cacagaagcaaaggc

SEQ ID NO: 1556198 - RNA, 16 nt, Human adenovirus C
agggccgcuggcugcu

SEQ ID NO: 1556199 - RNA, 14 nt, Human adenovirus C
uucgcacuggggcg

SEQ ID NO: 1556200 - RNA, 21 nt, Human adenovirus C
gcaacagcgcgagcaggcaga

SEQ ID NO: 1556201 - RNA, 22 nt, Human adenovirus C
uauuuccugaagcaaaaccagg

SEQ ID NO: 1556202 - RNA, 18 nt, Human adenovirus C
cagccauaucccuccggg

SEQ ID NO: 1556203 - RNA, 22 nt, Human adenovirus C
auacacaggguugcagcacugg

SEQ ID NO: 1556204 - RNA, 16 nt, Human adenovirus C
aacuccaacgcggcag

SEQ ID NO: 1556205 - RNA, 22 nt, Human adenovirus C
gcagguuggaauucuucaccag

SEQ ID NO: 1556206 - RNA, 20 nt, Human adenovirus C
uggagucagucgagaaggag

SEQ ID NO: 1556207 - RNA, 14 nt, Human adenovirus C
augaugacaaacuu

SEQ ID NO: 1556208 - RNA, 18 nt, Human adenovirus C
ccugccagacaagcuaaa

SEQ ID NO: 1556209 - RNA, 23 nt, Human adenovirus C
cccagcagaaaccugugcugcca

SEQ ID NO: 1556210 - RNA, 18 nt, Human adenovirus C
ggcugguccugcuggugc

SEQ ID NO: 1556211 - RNA, 19 nt, Human adenovirus C
ugcugcaccugcgugaggg

SEQ ID NO: 1556212 - RNA, 14 nt, Human adenovirus C
acagugaagaugua

SEQ ID NO: 1556213 - RNA, 14 nt, Human adenovirus C
cacaguaacugcag

SEQ ID NO: 1556214 - RNA, 13 nt, Human adenovirus C
acugcugcuggaa

SEQ ID NO: 1556215 - RNA, 18 nt, Human adenovirus C
uacgacccuuacuacacc

SEQ ID NO: 1556216 - RNA, 13 nt, Human adenovirus C
accugggcggcga

SEQ ID NO: 1556217 - RNA, 21 nt, Human adenovirus C
uagauugcaucccaccuuuca

SEQ ID NO: 1556218 - RNA, 21 nt, Human adenovirus C
ggcgcaccgggaggcggucga

SEQ ID NO: 1556219 - RNA, 19 nt, Human adenovirus C
gcagaggcggccgcccuug

SEQ ID NO: 1556220 - RNA, 17 nt, Human adenovirus C
cgugcgcaggguggcuc

SEQ ID NO: 1556221 - RNA, 14 nt, Human adenovirus C
ggcgaugagcagcu

SEQ ID NO: 1556222 - RNA, 18 nt, Human adenovirus C
uggaauucuucaccagca

SEQ ID NO: 1556223 - RNA, 16 nt, Human adenovirus C
augaagaucuggaagg

SEQ ID NO: 1556224 - RNA, 13 nt, Human adenovirus C
gaggcuugggagu

SEQ ID NO: 1556225 - RNA, 17 nt, Human adenovirus C
cucuacaagcuugucua

SEQ ID NO: 1556226 - RNA, 17 nt, Human adenovirus C
gguauugggguaacuga

SEQ ID NO: 1556227 - RNA, 16 nt, Human adenovirus C
gguugccgccugcugc

SEQ ID NO: 1556228 - RNA, 16 nt, Human adenovirus C
guccacuagggggucc

SEQ ID NO: 1556229 - RNA, 19 nt, Human adenovirus C
uauacgccaucaucucugu

SEQ ID NO: 1556230 - RNA, 20 nt, Human adenovirus C
gccgggagagggggcagggg

SEQ ID NO: 1556231 - RNA, 12 nt, Human adenovirus C
guacuuugacau

SEQ ID NO: 1556232 - RNA, 14 nt, Human adenovirus C
ucuucuucuucugg

SEQ ID NO: 1556233 - RNA, 18 nt, Human adenovirus C
uaagagagcugcagcugc

SEQ ID NO: 1556234 - RNA, 14 nt, Human adenovirus C
agaagcugcagcug

SEQ ID NO: 1556235 - RNA, 19 nt, Human adenovirus C
gcugugcgcuuccuagcga

SEQ ID NO: 1556236 - RNA, 13 nt, Human adenovirus C
cggcuaggucucg

SEQ ID NO: 1556237 - RNA, 19 nt, Human adenovirus C
ccgaggcagcggcagaagc

SEQ ID NO: 1556238 - RNA, 23 nt, Human adenovirus C
acaucgaaguagauugcauccca

SEQ ID NO: 1556239 - RNA, 15 nt, Human adenovirus C
cgccgugccgccagc

SEQ ID NO: 1556240 - RNA, 14 nt, Human adenovirus C
cggagggugccaga

SEQ ID NO: 1556241 - RNA, 14 nt, Human adenovirus C
ggcggcgcuggccg

SEQ ID NO: 1556242 - RNA, 21 nt, Human adenovirus C
cucgcuuacuaaggacaaaca

SEQ ID NO: 1556243 - RNA, 15 nt, Human adenovirus C
gaggacuaccacgcc

SEQ ID NO: 1556244 - RNA, 17 nt, Human adenovirus C
auccuaacucugcagac

SEQ ID NO: 1556245 - RNA, 19 nt, Human adenovirus C
cgucaucucuacagccccu

SEQ ID NO: 1556246 - RNA, 15 nt, Human adenovirus C
gcggcaccagcgcau

SEQ ID NO: 1556247 - RNA, 20 nt, Human adenovirus C
cggccaaucaagcagguggc

SEQ ID NO: 1556248 - RNA, 19 nt, Human adenovirus C
ccaggcggcggguacagug

SEQ ID NO: 1556249 - RNA, 15 nt, Human adenovirus C
ccgcgcgcuggggca

SEQ ID NO: 1556250 - RNA, 18 nt, Human adenovirus C
gcagacacgaucggcagg

SEQ ID NO: 1556251 - RNA, 22 nt, Human adenovirus C
ccugugcuuugcucccaaaccu

SEQ ID NO: 1556252 - RNA, 23 nt, Human adenovirus C
gcucccaccaugcgcgagggaca

SEQ ID NO: 1556253 - RNA, 19 nt, Human adenovirus C
cuccuuuccuuccucccaa

SEQ ID NO: 1556254 - RNA, 18 nt, Human adenovirus C
ggcagacaugcagggcac

SEQ ID NO: 1556255 - RNA, 17 nt, Human adenovirus C
acccaaaaagaagcugc

SEQ ID NO: 1556256 - RNA, 15 nt, Human adenovirus C
agcuugagccuggcu

SEQ ID NO: 1556257 - RNA, 15 nt, Human adenovirus C
ggcgcaguuggaaga

SEQ ID NO: 1556258 - RNA, 12 nt, Human adenovirus C
cgccgcagcagc

SEQ ID NO: 1556259 - RNA, 23 nt, Human adenovirus C
uacaaccccaccaauguggaaau

SEQ ID NO: 1556260 - RNA, 17 nt, Human adenovirus C
ccggaaaccucaccucc

SEQ ID NO: 1556261 - RNA, 16 nt, Human adenovirus C
cggccaugcgggccgc

SEQ ID NO: 1556262 - RNA, 21 nt, Human adenovirus C
gcgccugauuucugccagcgc

SEQ ID NO: 1556263 - RNA, 17 nt, Human adenovirus C
ggcguugccgcuggacg

SEQ ID NO: 1556264 - RNA, 21 nt, Human adenovirus C
cugccccuacguuuacaaggc

SEQ ID NO: 1556265 - RNA, 14 nt, Human adenovirus C
gcagcaggugcugc

SEQ ID NO: 1556266 - RNA, 17 nt, Human adenovirus C
aucuugguuacaucuga

SEQ ID NO: 1556267 - RNA, 22 nt, Human adenovirus C
cugcgaggacagggccucucag

SEQ ID NO: 1556268 - RNA, 20 nt, Human adenovirus C
caaccuggaccggcuggugg

SEQ ID NO: 1556269 - RNA, 16 nt, Human adenovirus C
ugauuccauaggugau

SEQ ID NO: 1556270 - RNA, 18 nt, Human adenovirus C
agcgcccucuccugagcg

SEQ ID NO: 1556271 - RNA, 11 nt, Human adenovirus C
cuuugccaacu

SEQ ID NO: 1556272 - RNA, 19 nt, Human adenovirus C
ccuccuccugccaggcuca

SEQ ID NO: 1556273 - RNA, 16 nt, Human adenovirus C
aaaccuauuaaaaaac

SEQ ID NO: 1556274 - RNA, 16 nt, Human adenovirus C
gaguuuaaggaaccag

SEQ ID NO: 1556275 - RNA, 22 nt, Human adenovirus C
aacacggccuccacgcuggaag

SEQ ID NO: 1556276 - RNA, 22 nt, Human adenovirus C
cgagagcguggugagcgcggcg

SEQ ID NO: 1556277 - RNA, 13 nt, Human adenovirus C
ucccauagacaag

SEQ ID NO: 1556278 - RNA, 18 nt, Human adenovirus C
ggauucauguugugcaga

SEQ ID NO: 1556279 - RNA, 15 nt, Human adenovirus C
ccuuuggacaccucc

SEQ ID NO: 1556280 - RNA, 22 nt, Human adenovirus C
cucaggcgccgccggcacugcc

SEQ ID NO: 1556281 - RNA, 14 nt, Human adenovirus C
gacuacucaacccg

SEQ ID NO: 1556282 - RNA, 14 nt, Human adenovirus C
cuaaacccuucagg

SEQ ID NO: 1556283 - RNA, 15 nt, Human adenovirus C
cuggagcucccgcgg

SEQ ID NO: 1556284 - RNA, 11 nt, Human adenovirus C
ccgcaccugcc

SEQ ID NO: 1556285 - RNA, 21 nt, Human adenovirus C
gccgcuuuggggucacugcua

SEQ ID NO: 1556286 - RNA, 14 nt, Human adenovirus C
gaaggugauugguu

SEQ ID NO: 1556287 - RNA, 20 nt, Human adenovirus C
ccaucuccuaacugcagaau

SEQ ID NO: 1556288 - RNA, 22 nt, Human adenovirus C
ugcccgcugucauaccacugca

SEQ ID NO: 1556289 - RNA, 19 nt, Human adenovirus C
aaugaaaaaauucauagau

SEQ ID NO: 1556290 - RNA, 19 nt, Human adenovirus C
cacccgucccaucgcgccc

SEQ ID NO: 1556291 - RNA, 21 nt, Human adenovirus C
ugcgguucaucccuguggacc

SEQ ID NO: 1556292 - RNA, 15 nt, Human adenovirus C
cugccgucaucccug

SEQ ID NO: 1556293 - RNA, 21 nt, Human adenovirus C
agagcccgagggccgcuggcu

SEQ ID NO: 1556294 - RNA, 12 nt, Human adenovirus C
uacgucacuucc

SEQ ID NO: 1556295 - RNA, 21 nt, Human adenovirus C
guacuccgccaccgagggacc

SEQ ID NO: 1556296 - RNA, 22 nt, Human adenovirus C
ggagcgaagaaacccaucugag

SEQ ID NO: 1556297 - RNA, 15 nt, Human adenovirus C
gcagagcccauggaa

SEQ ID NO: 1556298 - RNA, 15 nt, Human adenovirus C
cggcucaccacccag

SEQ ID NO: 1556299 - RNA, 14 nt, Human adenovirus C
ugaggguuggaagc

SEQ ID NO: 1556300 - RNA, 15 nt, Human adenovirus C
accucgaccacugcc

SEQ ID NO: 1556301 - RNA, 22 nt, Human adenovirus C
uccaggcggucccacagcucgg

SEQ ID NO: 1556302 - RNA, 14 nt, Human adenovirus C
cccucgccuggcgg

SEQ ID NO: 1556303 - RNA, 18 nt, Human adenovirus C
gacucggcagacgacagc

SEQ ID NO: 1556304 - RNA, 16 nt, Human adenovirus C
gcgagcaggcagaggc

SEQ ID NO: 1556305 - RNA, 23 nt, Human adenovirus C
aggaggagaugauggaagacugg

SEQ ID NO: 1556306 - RNA, 23 nt, Human adenovirus C
cuuuuguaaaaacgugcgcagua

SEQ ID NO: 1556307 - RNA, 13 nt, Human adenovirus C
cugagucuccaga

SEQ ID NO: 1556308 - RNA, 17 nt, Human adenovirus C
cccggagaugcagcgca

SEQ ID NO: 1556309 - RNA, 16 nt, Human adenovirus C
ccagcaucgcuacaac

SEQ ID NO: 1556310 - RNA, 19 nt, Human adenovirus C
ucauuccacgcucaagggc

SEQ ID NO: 1556311 - RNA, 15 nt, Human adenovirus C
uaugacacagaaacc

SEQ ID NO: 1556312 - RNA, 14 nt, Human adenovirus C
ugccaugcgcgggc

SEQ ID NO: 1556313 - RNA, 14 nt, Human adenovirus C
cagaccugggccaa

SEQ ID NO: 1556314 - RNA, 19 nt, Human adenovirus C
auccagcggcggcggcgcg

SEQ ID NO: 1556315 - RNA, 14 nt, Human adenovirus C
agaucuccgcgucc

SEQ ID NO: 1556316 - RNA, 15 nt, Human adenovirus C
gcccagucugcaaga

SEQ ID NO: 1556317 - RNA, 21 nt, Human adenovirus C
ggaagacguaugcgcaggagc

SEQ ID NO: 1556318 - RNA, 20 nt, Human adenovirus C
ccacgccccgcgccacguca

SEQ ID NO: 1556319 - RNA, 16 nt, Human adenovirus C
gagucucgggccggcc

SEQ ID NO: 1556320 - RNA, 17 nt, Human adenovirus C
cacugucgcugcaaccu

SEQ ID NO: 1556321 - RNA, 11 nt, Human adenovirus C
gccacgucaca

SEQ ID NO: 1556322 - RNA, 17 nt, Human adenovirus C
cggcuaugcacugcagg

SEQ ID NO: 1556323 - RNA, 17 nt, Human adenovirus C
cuucaaucuccucuucc

SEQ ID NO: 1556324 - RNA, 14 nt, Human adenovirus C
agcaaggccugccc

SEQ ID NO: 1556325 - RNA, 20 nt, Human adenovirus C
cgggcggccaugcgggccgc

SEQ ID NO: 1556326 - RNA, 13 nt, Human adenovirus C
gcggcggcagcag

SEQ ID NO: 1556327 - RNA, 19 nt, Human adenovirus C
ucccaaaaagggugcaugc

SEQ ID NO: 1556328 - RNA, 22 nt, Human adenovirus C
ucguggcuacaccuaccgcccc

SEQ ID NO: 1556329 - RNA, 22 nt, Human adenovirus C
gugcuuauggugggagaaaaac

SEQ ID NO: 1556330 - RNA, 14 nt, Human adenovirus C
cgcgcugcggcugc

SEQ ID NO: 1556331 - RNA, 21 nt, Human adenovirus C
cacgcacgaaggaggcguagg

SEQ ID NO: 1556332 - RNA, 14 nt, Human adenovirus C
guuccugagcagcu

SEQ ID NO: 1556333 - RNA, 14 nt, Human adenovirus C
acgaagccuuccau

SEQ ID NO: 1556334 - RNA, 18 nt, Human adenovirus C
agauccgcguccaggucc

SEQ ID NO: 1556335 - RNA, 20 nt, Human adenovirus C
ugacaguggagagcccagga

SEQ ID NO: 1556336 - RNA, 15 nt, Human adenovirus C
aucccugaacuacca

SEQ ID NO: 1556337 - RNA, 21 nt, Human adenovirus C
cagccacucucgcaaggccug

SEQ ID NO: 1556338 - RNA, 13 nt, Human adenovirus C
agaucagcuggga

SEQ ID NO: 1556339 - RNA, 22 nt, Human adenovirus C
aauucuuuaauuaugaaacgga

SEQ ID NO: 1556340 - RNA, 19 nt, Human adenovirus C
ccaucgcgcccauggcuac

SEQ ID NO: 1556341 - RNA, 15 nt, Human adenovirus C
guuggaggaguggcu

SEQ ID NO: 1556342 - RNA, 21 nt, Human adenovirus C
caugucgcuguccagcugcug

SEQ ID NO: 1556343 - RNA, 19 nt, Human adenovirus C
cgaggaugaagaagaggaa

SEQ ID NO: 1556344 - RNA, 17 nt, Human adenovirus C
gcaagaccaggacgacg

SEQ ID NO: 1556345 - RNA, 22 nt, Human adenovirus C
ugacaaaagaacccacacugau

SEQ ID NO: 1556346 - RNA, 13 nt, Human adenovirus C
gaggugcuugcca

SEQ ID NO: 1556347 - RNA, 14 nt, Human adenovirus C
gcugcaacccgcgg

SEQ ID NO: 1556348 - RNA, 18 nt, Human adenovirus C
ccucggucgcauuccccu

SEQ ID NO: 1556349 - RNA, 23 nt, Human adenovirus C
ccgcaguuggcgaugagcagcug

SEQ ID NO: 1556350 - RNA, 18 nt, Human adenovirus C
gauuagcaaacuuguaaa

SEQ ID NO: 1556351 - RNA, 16 nt, Human adenovirus C
gagggccgcuggcugc

SEQ ID NO: 1556352 - RNA, 17 nt, Human adenovirus C
gaggagccuccaccggc

SEQ ID NO: 1556353 - RNA, 13 nt, Human adenovirus C
augcaucaaacaa

SEQ ID NO: 1556354 - RNA, 14 nt, Human adenovirus C
ggcugcagccaggg

SEQ ID NO: 1556355 - RNA, 14 nt, Human adenovirus C
guugaggguggugg

SEQ ID NO: 1556356 - RNA, 13 nt, Human adenovirus C
accgugcagcuga

SEQ ID NO: 1556357 - RNA, 16 nt, Human adenovirus C
cgagcaggacccaggu

SEQ ID NO: 1556358 - RNA, 16 nt, Human adenovirus C
augcgccagaaggcgc

SEQ ID NO: 1556359 - RNA, 17 nt, Human adenovirus C
gguccagcagaggcggc

SEQ ID NO: 1556360 - RNA, 17 nt, Human adenovirus C
gcauccggugcugcggc

SEQ ID NO: 1556361 - RNA, 16 nt, Human adenovirus C
cauccgcggcagcucg

SEQ ID NO: 1556362 - RNA, 14 nt, Human adenovirus C
ggaggaagccaggc

SEQ ID NO: 1556363 - RNA, 22 nt, Human adenovirus C
acuggcaaagcacacugaacag

SEQ ID NO: 1556364 - RNA, 23 nt, Human adenovirus C
ugcgugugaccccgaagccccuc

SEQ ID NO: 1556365 - RNA, 15 nt, Human adenovirus C
cgcggcggucaccag

SEQ ID NO: 1556366 - RNA, 20 nt, Human adenovirus C
ccuucacccaguaccgcagc

SEQ ID NO: 1556367 - RNA, 13 nt, Human adenovirus C
accugggcuggcg

SEQ ID NO: 1556368 - RNA, 22 nt, Human adenovirus C
ugugcuugauauggcuuccacg

SEQ ID NO: 1556369 - RNA, 16 nt, Human adenovirus C
gcugcuggaagggggu

SEQ ID NO: 1556370 - RNA, 12 nt, Human adenovirus C
uugguccagcag

SEQ ID NO: 1556371 - RNA, 14 nt, Human adenovirus C
gccuggaacagcag

SEQ ID NO: 1556372 - RNA, 12 nt, Human adenovirus C
agaggccgcauc

SEQ ID NO: 1556373 - RNA, 21 nt, Human adenovirus C
cucuuccauaagggccucccc

SEQ ID NO: 1556374 - RNA, 18 nt, Human adenovirus C
gacaaagcccaagaaauc

SEQ ID NO: 1556375 - RNA, 19 nt, Human adenovirus C
ccugagcaacuuguugggc

SEQ ID NO: 1556376 - RNA, 20 nt, Human adenovirus C
gcugugccuuuuacugcugc

SEQ ID NO: 1556377 - RNA, 22 nt, Human adenovirus C
ucagugcaacaugaccaaggac

SEQ ID NO: 1556378 - RNA, 17 nt, Human adenovirus C
aggcucucuucagcaaa

SEQ ID NO: 1556379 - RNA, 19 nt, Human adenovirus C
uccacaaaaaacacccaga

SEQ ID NO: 1556380 - RNA, 14 nt, Human adenovirus C
ccaacccgcgccuc

SEQ ID NO: 1556381 - RNA, 14 nt, Human adenovirus C
cacaagccccacug

SEQ ID NO: 1556382 - RNA, 23 nt, Human adenovirus C
uacaaguuguggcccccacaaaa

SEQ ID NO: 1556383 - RNA, 18 nt, Human adenovirus C
ugaccagcucggcgguga

SEQ ID NO: 1556384 - RNA, 20 nt, Human adenovirus C
cgaagaaggaagagcaggau

SEQ ID NO: 1556385 - RNA, 21 nt, Human adenovirus C
uuugacgcugcgguucauccc

SEQ ID NO: 1556386 - RNA, 20 nt, Human adenovirus C
accacuuacaauuaccucag

SEQ ID NO: 1556387 - RNA, 18 nt, Human adenovirus C
gaaccccggauccggccg

SEQ ID NO: 1556388 - RNA, 21 nt, Human adenovirus C
caguggaacgaagcugaugcu

SEQ ID NO: 1556389 - RNA, 17 nt, Human adenovirus C
agccgcgcgcuggggca

SEQ ID NO: 1556390 - RNA, 19 nt, Human adenovirus C
gaccgcgagcugaugcaca

SEQ ID NO: 1556391 - RNA, 16 nt, Human adenovirus C
cuggccaguguuugag

SEQ ID NO: 1556392 - RNA, 21 nt, Human adenovirus C
gggguccacucgcuccagggu

SEQ ID NO: 1556393 - RNA, 15 nt, Human adenovirus C
cuguaacgcuggacc

SEQ ID NO: 1556394 - RNA, 19 nt, Human adenovirus C
agguggcacuuaggccaga

SEQ ID NO: 1556395 - RNA, 17 nt, Human adenovirus C
ccacagccgccugagca

SEQ ID NO: 1556396 - RNA, 22 nt, Human adenovirus C
ggaagacguaugcgcaggagca

SEQ ID NO: 1556397 - RNA, 23 nt, Human adenovirus C
cagagcgugagccuuaaccugau

SEQ ID NO: 1556398 - RNA, 13 nt, Human adenovirus C
ggugcagacccug

SEQ ID NO: 1556399 - RNA, 15 nt, Human adenovirus C
cucccuugccgugcu

SEQ ID NO: 1556400 - RNA, 22 nt, Human adenovirus C
uuucuggcggaggugcugcuga

SEQ ID NO: 1556401 - RNA, 20 nt, Human adenovirus C
auugcguaccucaggcacca

SEQ ID NO: 1556402 - RNA, 18 nt, Human adenovirus C
accauuaacgaggauggg

SEQ ID NO: 1556403 - RNA, 12 nt, Human adenovirus C
cgcuggccaggg

SEQ ID NO: 1556404 - RNA, 23 nt, Human adenovirus C
cuccacgcuggaagccaugcuca

SEQ ID NO: 1556405 - RNA, 17 nt, Human adenovirus C
ggaauccgcgcccaccg

SEQ ID NO: 1556406 - RNA, 20 nt, Human adenovirus C
cacccaaugguuuccaagaa

SEQ ID NO: 1556407 - RNA, 13 nt, Human adenovirus C
ccuaucacaucuu

SEQ ID NO: 1556408 - RNA, 18 nt, Human adenovirus C
acugccacggguagcuug

SEQ ID NO: 1556409 - RNA, 16 nt, Human adenovirus C
ucaaaucuucacuucc

SEQ ID NO: 1556410 - RNA, 20 nt, Human adenovirus C
gcgcccacaccuacagccug

SEQ ID NO: 1556411 - RNA, 18 nt, Human adenovirus C
ugcccaucuccaucccau

SEQ ID NO: 1556412 - RNA, 18 nt, Human adenovirus C
agugcuuguuaccgugga

SEQ ID NO: 1556413 - RNA, 13 nt, Human adenovirus C
ucaaaaacaugcu

SEQ ID NO: 1556414 - RNA, 13 nt, Human adenovirus C
cccuguggaccgc

SEQ ID NO: 1556415 - RNA, 12 nt, Human adenovirus C
ggcgcaggcggc

SEQ ID NO: 1556416 - RNA, 23 nt, Human adenovirus C
caaccuucaaaucaaacuuuccu

SEQ ID NO: 1556417 - RNA, 20 nt, Human adenovirus C
uggcgcaucccauucuccag

SEQ ID NO: 1556418 - RNA, 23 nt, Human adenovirus C
aaacucuucgcggucuuuccagu

SEQ ID NO: 1556419 - RNA, 14 nt, Human adenovirus C
ggcggcggcaggag

SEQ ID NO: 1556420 - RNA, 17 nt, Human adenovirus C
ugucuuacaaaccugga

SEQ ID NO: 1556421 - RNA, 22 nt, Human adenovirus C
acacaccucgaccacugccgcc

SEQ ID NO: 1556422 - RNA, 21 nt, Human adenovirus C
ugauuaaaugagacaugauuc

SEQ ID NO: 1556423 - RNA, 14 nt, Human adenovirus C
cagcacuggcaaca

SEQ ID NO: 1556424 - RNA, 18 nt, Human adenovirus C
ggcagagcgacugcgccu

SEQ ID NO: 1556425 - RNA, 22 nt, Human adenovirus C
gcguccaugucgccgccagagg

SEQ ID NO: 1556426 - RNA, 17 nt, Human adenovirus C
gcgcuguaccugccaga

SEQ ID NO: 1556427 - RNA, 12 nt, Human adenovirus C
gcgcggccgccg

SEQ ID NO: 1556428 - RNA, 15 nt, Human adenovirus C
uacuuuucagcagau

SEQ ID NO: 1556429 - RNA, 19 nt, Human adenovirus C
agcggugacgcgggcgggc

SEQ ID NO: 1556430 - RNA, 19 nt, Human adenovirus C
gaaaccccacgguggcacc

SEQ ID NO: 1556431 - RNA, 19 nt, Human adenovirus C
guagauggccuggccucug

SEQ ID NO: 1556432 - RNA, 20 nt, Human adenovirus C
gcauuagcggggugguggac

SEQ ID NO: 1556433 - RNA, 16 nt, Human adenovirus C
ccgggagagggggcag

SEQ ID NO: 1556434 - RNA, 17 nt, Human adenovirus C
ggccgaaaacagggcca

SEQ ID NO: 1556435 - RNA, 20 nt, Human adenovirus C
gggggcaacauccaagauga

SEQ ID NO: 1556436 - RNA, 14 nt, Human adenovirus C
uaaugacugcaaau

SEQ ID NO: 1556437 - RNA, 12 nt, Human adenovirus C
cgcagccggugg

SEQ ID NO: 1556438 - RNA, 16 nt, Human adenovirus C
cagcugcuacaacaaa

SEQ ID NO: 1556439 - RNA, 14 nt, Human adenovirus C
ccagcgacuggaag

SEQ ID NO: 1556440 - RNA, 22 nt, Human adenovirus C
ccgaaccuuuggacaccuccca

SEQ ID NO: 1556441 - RNA, 15 nt, Human adenovirus C
accgucuggcugcuc

SEQ ID NO: 1556442 - RNA, 13 nt, Human adenovirus C
cccauacccgcca

SEQ ID NO: 1556443 - RNA, 13 nt, Human adenovirus C
cagcggcagaagc

SEQ ID NO: 1556444 - RNA, 16 nt, Human adenovirus C
agggcacccuccccuu

SEQ ID NO: 1556445 - RNA, 13 nt, Human adenovirus C
agacaagcuaaaa

SEQ ID NO: 1556446 - RNA, 12 nt, Human adenovirus C
ugcuucuucccc

SEQ ID NO: 1556447 - RNA, 13 nt, Human adenovirus C
cugcccgccaccu

SEQ ID NO: 1556448 - RNA, 16 nt, Human adenovirus C
caaccuauggagaaau

SEQ ID NO: 1556449 - RNA, 20 nt, Human adenovirus C
uccgcacccacuaucuucau

SEQ ID NO: 1556450 - RNA, 17 nt, Human adenovirus C
ugcgucgcaaccaggaa

SEQ ID NO: 1556451 - RNA, 12 nt, Human adenovirus C
ccaccaccgccu

SEQ ID NO: 1556452 - RNA, 14 nt, Human adenovirus C
ccuuugccuggaac

SEQ ID NO: 1556453 - RNA, 13 nt, Human adenovirus C
ugcccgccaccug

SEQ ID NO: 1556454 - RNA, 13 nt, Human adenovirus C
cccgcgccacguc

SEQ ID NO: 1556455 - RNA, 20 nt, Human adenovirus C
cgaggaggacuuugagcccg

SEQ ID NO: 1556456 - RNA, 14 nt, Human adenovirus C
ucgggaagaacugg

SEQ ID NO: 1556457 - RNA, 16 nt, Human adenovirus C
cccggcggugcgggcg

SEQ ID NO: 1556458 - RNA, 19 nt, Human adenovirus C
ugcagcgcaagcuagagga

SEQ ID NO: 1556459 - RNA, 18 nt, Human adenovirus C
uacaaguuguggccccca

SEQ ID NO: 1556460 - RNA, 21 nt, Human adenovirus C
ggaaacagggacgagccccuu

SEQ ID NO: 1556461 - RNA, 15 nt, Human adenovirus C
ccugcgacgggccga

SEQ ID NO: 1556462 - RNA, 17 nt, Human adenovirus C
gaccgucuggcugcucg

SEQ ID NO: 1556463 - RNA, 15 nt, Human adenovirus C
aaggccucaaggcgc

SEQ ID NO: 1556464 - RNA, 16 nt, Human adenovirus C
cguagcucagugcaac

SEQ ID NO: 1556465 - RNA, 21 nt, Human adenovirus C
cugcgugaagacgacgggccc

SEQ ID NO: 1556466 - RNA, 14 nt, Human adenovirus C
acucgcugcugcag

SEQ ID NO: 1556467 - RNA, 23 nt, Human adenovirus C
cuggggcaggaggacacgggcag

SEQ ID NO: 1556468 - RNA, 19 nt, Human adenovirus C
auagcuaacgugucguaug

SEQ ID NO: 1556469 - RNA, 17 nt, Human adenovirus C
uccaugggcgcacucac

SEQ ID NO: 1556470 - RNA, 23 nt, Human adenovirus C
ccugcaaagggcccuggcuggca

SEQ ID NO: 1556471 - RNA, 15 nt, Human adenovirus C
ugggauaugcuccag

SEQ ID NO: 1556472 - RNA, 17 nt, Human adenovirus C
ggcgcagcaucccuuuu

SEQ ID NO: 1556473 - RNA, 15 nt, Human adenovirus C
cugagccccgggcug

SEQ ID NO: 1556474 - RNA, 21 nt, Human adenovirus C
gcgcuccgaccaacacccagu

SEQ ID NO: 1556475 - RNA, 18 nt, Human adenovirus C
gauaugcuccaggcgggc

SEQ ID NO: 1556476 - RNA, 15 nt, Human adenovirus C
ucuggcgcccaacga

SEQ ID NO: 1556477 - RNA, 14 nt, Human adenovirus C
gggugguggaccug

SEQ ID NO: 1556478 - RNA, 18 nt, Human adenovirus C
gaaaugccuguuugaaag

SEQ ID NO: 1556479 - RNA, 19 nt, Human adenovirus C
cggcgacaccuuugccaca

SEQ ID NO: 1556480 - RNA, 21 nt, Human adenovirus C
ggcagccuggaggcaacccug

SEQ ID NO: 1556481 - RNA, 23 nt, Human adenovirus C
cugccagcgccugcacugcaaau

SEQ ID NO: 1556482 - RNA, 13 nt, Human adenovirus C
cuccccccgcuga

SEQ ID NO: 1556483 - RNA, 16 nt, Human adenovirus C
uggacuaaacuuugau

SEQ ID NO: 1556484 - RNA, 16 nt, Human adenovirus C
gcaguagucggugcuc

SEQ ID NO: 1556485 - RNA, 20 nt, Human adenovirus C
aaaaugaaagucacugugga

SEQ ID NO: 1556486 - RNA, 22 nt, Human adenovirus C
gugccaaaaaucuuugaggguc

SEQ ID NO: 1556487 - RNA, 19 nt, Human adenovirus C
guacauccugcacgagguu

SEQ ID NO: 1556488 - RNA, 18 nt, Human adenovirus C
ucgggcggggggaccaaa

SEQ ID NO: 1556489 - RNA, 17 nt, Human adenovirus C
acccagcacucggcaga

SEQ ID NO: 1556490 - RNA, 22 nt, Human adenovirus C
ucacaucgaaguagauugcauc

SEQ ID NO: 1556491 - RNA, 14 nt, Human adenovirus C
guggcgcccucuuc

SEQ ID NO: 1556492 - RNA, 15 nt, Human adenovirus C
cuagcucccaagggc

SEQ ID NO: 1556493 - RNA, 23 nt, Human adenovirus C
agcagaaaccugugcugccaggg

SEQ ID NO: 1556494 - RNA, 23 nt, Human adenovirus C
auggcuaccggagugcugggcca

SEQ ID NO: 1556495 - RNA, 19 nt, Human adenovirus C
agaagguaagcgggucuug

SEQ ID NO: 1556496 - RNA, 18 nt, Human adenovirus C
cuggccccaaacucccau

SEQ ID NO: 1556497 - RNA, 16 nt, Human adenovirus C
acaacuuugccaugga

SEQ ID NO: 1556498 - RNA, 16 nt, Human adenovirus C
guucugacagggccca

SEQ ID NO: 1556499 - RNA, 15 nt, Human adenovirus C
caucugcagcgccag

SEQ ID NO: 1556500 - RNA, 13 nt, Human adenovirus C
caacacguaauga

SEQ ID NO: 1556501 - RNA, 15 nt, Human adenovirus C
ccgaggucgagaagc

SEQ ID NO: 1556502 - RNA, 21 nt, Human adenovirus C
cggcagaugcgccccccuccu

SEQ ID NO: 1556503 - RNA, 15 nt, Human adenovirus C
ccucuuguccugcau

SEQ ID NO: 1556504 - RNA, 19 nt, Human adenovirus C
auuagagaucuuauuccau

SEQ ID NO: 1556505 - RNA, 18 nt, Human adenovirus C
ggccaguguuugagcaca

SEQ ID NO: 1556506 - RNA, 20 nt, Human adenovirus C
gccgcacgaggggcagugca

SEQ ID NO: 1556507 - RNA, 19 nt, Human adenovirus C
auacuacauggacaaaaga

SEQ ID NO: 1556508 - RNA, 15 nt, Human adenovirus C
auaggacugaugcau

SEQ ID NO: 1556509 - RNA, 14 nt, Human adenovirus C
ccggggcuguggac

SEQ ID NO: 1556510 - RNA, 15 nt, Human adenovirus C
gcaacgccacaacau

SEQ ID NO: 1556511 - RNA, 16 nt, Human adenovirus C
caccaguguaaaagag

SEQ ID NO: 1556512 - RNA, 16 nt, Human adenovirus C
cggccgccgcagcagc

SEQ ID NO: 1556513 - RNA, 13 nt, Human adenovirus C
ucacuccacaggc

SEQ ID NO: 1556514 - RNA, 20 nt, Human adenovirus C
cauuaaguuugacagcauuu

SEQ ID NO: 1556515 - RNA, 13 nt, Human adenovirus C
aggccuggaacag

SEQ ID NO: 1556516 - RNA, 19 nt, Human adenovirus C
uggacaccuccgcaccacu

SEQ ID NO: 1556517 - RNA, 16 nt, Human adenovirus C
ucagccucgccccccu

SEQ ID NO: 1556518 - RNA, 17 nt, Human adenovirus C
gagcuccacgugccggg

SEQ ID NO: 1556519 - RNA, 12 nt, Human adenovirus C
caccaccucccg

SEQ ID NO: 1556520 - RNA, 22 nt, Human adenovirus C
gcagaggagguuuuggacgagg

SEQ ID NO: 1556521 - RNA, 15 nt, Human adenovirus C
gcugcagagccagcc

SEQ ID NO: 1556522 - RNA, 13 nt, Human adenovirus C
cagcccuaucagc

SEQ ID NO: 1556523 - RNA, 21 nt, Human adenovirus C
caucgcuaugcgccacuggca

SEQ ID NO: 1556524 - RNA, 12 nt, Human adenovirus C
accucccuugcc

SEQ ID NO: 1556525 - RNA, 15 nt, Human adenovirus C
acccuuccaggaggg

SEQ ID NO: 1556526 - RNA, 17 nt, Human adenovirus C
guccgugugcaccagcc

SEQ ID NO: 1556527 - RNA, 15 nt, Human adenovirus C
aggcuaauggcaaug

SEQ ID NO: 1556528 - RNA, 12 nt, Human adenovirus C
agacgacagcgu

SEQ ID NO: 1556529 - RNA, 21 nt, Human adenovirus C
cggagcuaugcuaaccagcgu

SEQ ID NO: 1556530 - RNA, 22 nt, Human adenovirus C
ggccgcgucaugcacgcagcac

SEQ ID NO: 1556531 - RNA, 12 nt, Human adenovirus C
cgagguggagau

SEQ ID NO: 1556532 - RNA, 12 nt, Human adenovirus C
gcuaccagggcu

SEQ ID NO: 1556533 - RNA, 19 nt, Human adenovirus C
cuauuaccggcugcaacug

SEQ ID NO: 1556534 - RNA, 14 nt, Human adenovirus C
caguggacgcggcc

SEQ ID NO: 1556535 - RNA, 17 nt, Human adenovirus C
acgguuuuccuggccaa

SEQ ID NO: 1556536 - RNA, 17 nt, Human adenovirus C
cgccgagcuguugcccg

SEQ ID NO: 1556537 - RNA, 22 nt, Human adenovirus C
cagagcauaguggugcaggagc

SEQ ID NO: 1556538 - RNA, 13 nt, Human adenovirus C
gcccgccaccugc

SEQ ID NO: 1556539 - RNA, 24 nt, Human adenovirus C
cccacgauguaaaguuccaagaag

SEQ ID NO: 1556540 - RNA, 14 nt, Human adenovirus C
ccuuugagcugcag

SEQ ID NO: 1556541 - RNA, 11 nt, Human adenovirus C
agaaaccccac

SEQ ID NO: 1556542 - RNA, 13 nt, Human adenovirus C
cagacgacagcag

SEQ ID NO: 1556543 - RNA, 20 nt, Human adenovirus C
cccuugcggcagucugcagc

SEQ ID NO: 1556544 - RNA, 17 nt, Human adenovirus C
uuugauauucaccuggc

SEQ ID NO: 1556545 - RNA, 14 nt, Human adenovirus C
gaagacugggacag

SEQ ID NO: 1556546 - RNA, 18 nt, Human adenovirus C
aagccaugcucagaaaug

SEQ ID NO: 1556547 - RNA, 15 nt, Human adenovirus C
cccgccaccaguugg

SEQ ID NO: 1556548 - RNA, 15 nt, Human adenovirus C
ggcauccgcgccgca

SEQ ID NO: 1556549 - RNA, 22 nt, Human adenovirus C
gcaucgcugucugcgagggcca

SEQ ID NO: 1556550 - RNA, 17 nt, Human adenovirus C
gcgguauccugccccuc

SEQ ID NO: 1556551 - RNA, 20 nt, Human adenovirus C
ccuuggccaauugcaagcca

SEQ ID NO: 1556552 - RNA, 15 nt, Human adenovirus C
aucgcuacggcggcg

SEQ ID NO: 1556553 - RNA, 11 nt, Human adenovirus C
ggaggugagcu

SEQ ID NO: 1556554 - RNA, 15 nt, Human adenovirus C
ggugaaggggugcgc

SEQ ID NO: 1556555 - RNA, 14 nt, Human adenovirus C
gcaaaacgcucgag

SEQ ID NO: 1556556 - RNA, 12 nt, Human adenovirus C
gcggcggcagca

SEQ ID NO: 1556557 - RNA, 20 nt, Human adenovirus C
caaaggcacgaccgucagcg

SEQ ID NO: 1556558 - RNA, 22 nt, Human adenovirus C
ggacagggccucucagaugcug

SEQ ID NO: 1556559 - RNA, 19 nt, Human adenovirus C
cagugucagauggaaagcu

SEQ ID NO: 1556560 - RNA, 19 nt, Human adenovirus C
ucagccgcgcgcuggggca

SEQ ID NO: 1556561 - RNA, 18 nt, Human adenovirus C
cacggcguggccuucccc

SEQ ID NO: 1556562 - RNA, 15 nt, Human adenovirus C
acuaguauugccacu

SEQ ID NO: 1556563 - RNA, 22 nt, Human adenovirus C
ugagcgggggguaccugcugga

SEQ ID NO: 1556564 - RNA, 20 nt, Human adenovirus C
cugccgccgccgccacccac

SEQ ID NO: 1556565 - RNA, 21 nt, Human adenovirus C
gggacgggggguuuaccugga

SEQ ID NO: 1556566 - RNA, 18 nt, Human adenovirus C
ccauuuuugcccuagcca

SEQ ID NO: 1556567 - RNA, 21 nt, Human adenovirus C
cagggcggggauggcgcaggc

SEQ ID NO: 1556568 - RNA, 19 nt, Human adenovirus C
ccacacgggcggaggagaa

SEQ ID NO: 1556569 - RNA, 12 nt, Human adenovirus C
gagcccacccuu

SEQ ID NO: 1556570 - RNA, 19 nt, Human adenovirus C
uccuccgggcacagcagcg

SEQ ID NO: 1556571 - RNA, 20 nt, Human adenovirus C
ggaagcagagugggaauuug

SEQ ID NO: 1556572 - RNA, 20 nt, Human adenovirus C
caaacagguggagcugaaau

SEQ ID NO: 1556573 - RNA, 11 nt, Human adenovirus C
agaacugagac

SEQ ID NO: 1556574 - RNA, 21 nt, Human adenovirus C
ggagcgcagcuugagccuggc

SEQ ID NO: 1556575 - RNA, 19 nt, Human adenovirus C
gagcauacuuuccaggaga

SEQ ID NO: 1556576 - RNA, 23 nt, Human adenovirus C
cgggcugggugugcgcggcacca

SEQ ID NO: 1556577 - RNA, 18 nt, Human adenovirus C
augcgccacuggcaggga

SEQ ID NO: 1556578 - RNA, 16 nt, Human adenovirus C
ccagacauuacuccca

SEQ ID NO: 1556579 - RNA, 14 nt, Human adenovirus C
guauccggugcacu

SEQ ID NO: 1556580 - RNA, 16 nt, Human adenovirus C
cuggagcugcccaaga

SEQ ID NO: 1556581 - RNA, 15 nt, Human adenovirus C
cugcagcgcugccaa

SEQ ID NO: 1556582 - RNA, 14 nt, Human adenovirus C
ccgcgguccuccuc

SEQ ID NO: 1556583 - RNA, 19 nt, Human adenovirus C
ucgcgccuguugcugcugc

SEQ ID NO: 1556584 - RNA, 13 nt, Human adenovirus C
aguagcacaaaac

SEQ ID NO: 1556585 - RNA, 17 nt, Human adenovirus C
gcgggcugcucugcucg

SEQ ID NO: 1556586 - RNA, 18 nt, Human adenovirus C
aggaagaugaagaugaag

SEQ ID NO: 1556587 - RNA, 17 nt, Human adenovirus C
gcgcugcggccccgcgg

SEQ ID NO: 1556588 - RNA, 15 nt, Human adenovirus C
uaacauccaccaccg

SEQ ID NO: 1556589 - RNA, 21 nt, Human adenovirus C
gacauuucagaucggcggcgc

SEQ ID NO: 1556590 - RNA, 13 nt, Human adenovirus C
gcguucaggaauu

SEQ ID NO: 1556591 - RNA, 18 nt, Human adenovirus C
gcacaucucgggccagga

SEQ ID NO: 1556592 - RNA, 22 nt, Human adenovirus C
uagaaccaaaguugcaggagcu

SEQ ID NO: 1556593 - RNA, 17 nt, Human adenovirus C
cuacaucguaggugaca

SEQ ID NO: 1556594 - RNA, 12 nt, Human adenovirus C
uccacagcucgc

SEQ ID NO: 1556595 - RNA, 12 nt, Human adenovirus C
cggcggcagcag

SEQ ID NO: 1556596 - RNA, 21 nt, Human adenovirus C
uggcagcaaugccuggaggag

SEQ ID NO: 1556597 - RNA, 18 nt, Human adenovirus C
accguggagccugggcug

SEQ ID NO: 1556598 - RNA, 19 nt, Human adenovirus C
gccgcgcaccuggcggaca

SEQ ID NO: 1556599 - RNA, 17 nt, Human adenovirus C
gcuggaagccaugcuca

SEQ ID NO: 1556600 - RNA, 22 nt, Human adenovirus C
uaccuuggguauccugucugag

SEQ ID NO: 1556601 - RNA, 18 nt, Human adenovirus C
gcugcgcgcuggccaggg

SEQ ID NO: 1556602 - RNA, 22 nt, Human adenovirus C
cugcgcuagcuuuuuuggccac

SEQ ID NO: 1556603 - RNA, 14 nt, Human adenovirus C
ccagacgggccagg

SEQ ID NO: 1556604 - RNA, 12 nt, Human adenovirus C
cuuaugccaggc

SEQ ID NO: 1556605 - RNA, 23 nt, Human adenovirus C
acaugcgagcccaacccgcgccu

SEQ ID NO: 1556606 - RNA, 16 nt, Human adenovirus C
cugcagcuagccaacu

SEQ ID NO: 1556607 - RNA, 13 nt, Human adenovirus C
gucgcaggggcaa

SEQ ID NO: 1556608 - RNA, 14 nt, Human adenovirus C
caccccgcaccgcu

SEQ ID NO: 1556609 - RNA, 14 nt, Human adenovirus C
uaauggacuacuug

SEQ ID NO: 1556610 - RNA, 17 nt, Human adenovirus C
cuacgucaucuccagcg

SEQ ID NO: 1556611 - RNA, 13 nt, Human adenovirus C
gccagcacgcucu

SEQ ID NO: 1556612 - RNA, 20 nt, Human adenovirus C
guguggaagccuggaccgau

SEQ ID NO: 1556613 - RNA, 23 nt, Human adenovirus C
caaauuccucauguucuuguccc

SEQ ID NO: 1556614 - RNA, 16 nt, Human adenovirus C
ucuggagcucccgcgg

SEQ ID NO: 1556615 - RNA, 23 nt, Human adenovirus C
ccguaucgacccgcgagcuuaga

SEQ ID NO: 1556616 - RNA, 22 nt, Human adenovirus C
caccuuuuguuccaccgcucug

SEQ ID NO: 1556617 - RNA, 22 nt, Human adenovirus C
uugcgcuaugugcagcagagcg

SEQ ID NO: 1556618 - RNA, 23 nt, Human adenovirus C
gugcugguggaacuugaggguga

SEQ ID NO: 1556619 - RNA, 21 nt, Human adenovirus C
cugucccuuuuuuuuccacag

SEQ ID NO: 1556620 - RNA, 15 nt, Human adenovirus C
acccuggcugugggu

SEQ ID NO: 1556621 - RNA, 17 nt, Human adenovirus C
gcuaggagcgcccucuc

SEQ ID NO: 1556622 - RNA, 20 nt, Human adenovirus C
cugacccggagaugcagcgc

SEQ ID NO: 1556623 - RNA, 22 nt, Human adenovirus C
cuacaugagcgcgggaccccac

SEQ ID NO: 1556624 - RNA, 15 nt, Human adenovirus C
cugcuugagcaggcc

SEQ ID NO: 1556625 - RNA, 14 nt, Human adenovirus C
ugccugaagauggc

SEQ ID NO: 1556626 - RNA, 16 nt, Human adenovirus C
cgcguuccggcagcag

SEQ ID NO: 1556627 - RNA, 23 nt, Human adenovirus C
gcccugcgcgucggccagguagc

SEQ ID NO: 1556628 - RNA, 21 nt, Human adenovirus C
cacgccuuugccaacuggccc

SEQ ID NO: 1556629 - RNA, 17 nt, Human adenovirus C
ugcaagcagugcagcuu

SEQ ID NO: 1556630 - RNA, 23 nt, Human adenovirus C
ugcaagaggccgcauccccgcgg

SEQ ID NO: 1556631 - RNA, 18 nt, Human adenovirus C
ggggauucauguugugca

SEQ ID NO: 1556632 - RNA, 15 nt, Human adenovirus C
gcgcacgcuuguggc

SEQ ID NO: 1556633 - RNA, 13 nt, Human adenovirus C
ccgagguggagau

SEQ ID NO: 1556634 - RNA, 19 nt, Human adenovirus C
ucgaggucacccacuuugc

SEQ ID NO: 1556635 - RNA, 19 nt, Human adenovirus C
gcgcuguaccugccagaca

SEQ ID NO: 1556636 - RNA, 20 nt, Human adenovirus C
ucuacagccccuacugcacc

SEQ ID NO: 1556637 - RNA, 20 nt, Human adenovirus C
uccacggacgacuggcgcca

SEQ ID NO: 1556638 - RNA, 14 nt, Human adenovirus C
gaagggcacgagcu

SEQ ID NO: 1556639 - RNA, 19 nt, Human adenovirus C
gcaccgggacugggcgugc

SEQ ID NO: 1556640 - RNA, 20 nt, Human adenovirus C
cgcagcuugagccuggcuga

SEQ ID NO: 1556641 - RNA, 16 nt, Human adenovirus C
acgggccagggucaug

SEQ ID NO: 1556642 - RNA, 20 nt, Human adenovirus C
agggcgcugucauaccugau

SEQ ID NO: 1556643 - RNA, 15 nt, Human adenovirus C
gaucugcgccagcag

SEQ ID NO: 1556644 - RNA, 20 nt, Human adenovirus C
acucuguaugcuauauuuca

SEQ ID NO: 1556645 - RNA, 15 nt, Human adenovirus C
ggugccucuuccaaa

SEQ ID NO: 1556646 - RNA, 12 nt, Human adenovirus C
auacuaaauaca

SEQ ID NO: 1556647 - RNA, 21 nt, Human adenovirus C
acgccuuccugaguacacagc

SEQ ID NO: 1556648 - RNA, 20 nt, Human adenovirus C
ccugcugaaugcgcaggcgg

SEQ ID NO: 1556649 - RNA, 15 nt, Human adenovirus C
gguggaggaggcgcg

SEQ ID NO: 1556650 - RNA, 12 nt, Human adenovirus C
gguccagcagag

SEQ ID NO: 1556651 - RNA, 17 nt, Human adenovirus C
acggcaccgccagcgca

SEQ ID NO: 1556652 - RNA, 21 nt, Human adenovirus C
ugaagcgcugccggucuucgc

SEQ ID NO: 1556653 - RNA, 19 nt, Human adenovirus C
cugacgccagacgccgcac

SEQ ID NO: 1556654 - RNA, 21 nt, Human adenovirus C
acaugcagggcacccuccccu

SEQ ID NO: 1556655 - RNA, 23 nt, Human adenovirus C
ccagcugcuacaacaaacagagc

SEQ ID NO: 1556656 - RNA, 17 nt, Human adenovirus C
gacgggcccggugagcu

SEQ ID NO: 1556657 - RNA, 17 nt, Human adenovirus C
guaccugagccccgggc

SEQ ID NO: 1556658 - RNA, 21 nt, Human adenovirus C
gccagacaugaugcaagaccc

SEQ ID NO: 1556659 - RNA, 17 nt, Human adenovirus C
caugcaucuguggagag

SEQ ID NO: 1556660 - RNA, 18 nt, Human adenovirus C
cguguucugacagggccc

SEQ ID NO: 1556661 - RNA, 21 nt, Human adenovirus C
guuucuggcggaggugcugcu

SEQ ID NO: 1556662 - RNA, 19 nt, Human adenovirus C
uacagccccuacugcaccg

SEQ ID NO: 1556663 - RNA, 21 nt, Human adenovirus C
caugcgcgggcggcaagcgcg

SEQ ID NO: 1556664 - RNA, 16 nt, Human adenovirus C
auugagguacugaaau

SEQ ID NO: 1556665 - RNA, 17 nt, Human adenovirus C
agccacuuaaaaaaaca

SEQ ID NO: 1556666 - RNA, 16 nt, Human adenovirus C
uagaggggcucucuga

SEQ ID NO: 1556667 - RNA, 15 nt, Human adenovirus C
uacaagcuccucccg

SEQ ID NO: 1556668 - RNA, 20 nt, Human adenovirus C
ucucagcgcagcggugcagc

SEQ ID NO: 1556669 - RNA, 22 nt, Human adenovirus C
aguagaagucccugcgacgggc

SEQ ID NO: 1556670 - RNA, 17 nt, Human adenovirus C
acgcgcgcgcagccucc

SEQ ID NO: 1556671 - RNA, 10 nt, Human adenovirus C
uucugcugug

SEQ ID NO: 1556672 - RNA, 22 nt, Human adenovirus C
cagguuuuguaagcgaagacga

SEQ ID NO: 1556673 - RNA, 22 nt, Human adenovirus C
ugaucugcuuaaaagccaccug

SEQ ID NO: 1556674 - RNA, 23 nt, Human adenovirus C
uccacgcuggaagccaugcucag

SEQ ID NO: 1556675 - RNA, 20 nt, Human adenovirus C
agggcuacaacguagcucag

SEQ ID NO: 1556676 - RNA, 14 nt, Human adenovirus C
caggaaccaugaca

SEQ ID NO: 1556677 - RNA, 19 nt, Human adenovirus C
cguccagacgggccagggu

SEQ ID NO: 1556678 - RNA, 14 nt, Human adenovirus C
ccauccgcggcagc

SEQ ID NO: 1556679 - RNA, 22 nt, Human adenovirus C
cuggcgaucguaaacgcgcugg

SEQ ID NO: 1556680 - RNA, 18 nt, Human adenovirus C
cuccagcggccacacccg

SEQ ID NO: 1556681 - RNA, 19 nt, Human adenovirus C
cuacaucguaggugacaaa

SEQ ID NO: 1556682 - RNA, 19 nt, Human adenovirus C
acgugcagaccaaccugga

SEQ ID NO: 1556683 - RNA, 15 nt, Human adenovirus C
agaccuaccgcguca

SEQ ID NO: 1556684 - RNA, 19 nt, Human adenovirus C
cucuggggauggcgggcgc

SEQ ID NO: 1556685 - RNA, 21 nt, Human adenovirus C
gcuaccuucugcagcuagcca

SEQ ID NO: 1556686 - RNA, 14 nt, Human adenovirus C
guccagcagaggcg

SEQ ID NO: 1556687 - RNA, 23 nt, Human adenovirus C
cgcgagcugaugcacagccugca

SEQ ID NO: 1556688 - RNA, 19 nt, Human adenovirus C
cuucagagaagaacaugcc

SEQ ID NO: 1556689 - RNA, 23 nt, Human adenovirus C
gagguugaccugacgaccgcgca

SEQ ID NO: 1556690 - RNA, 18 nt, Human adenovirus C
ccccuuaguaugcagcgc

SEQ ID NO: 1556691 - RNA, 14 nt, Human adenovirus C
ugaagaugaagaag

SEQ ID NO: 1556692 - RNA, 15 nt, Human adenovirus C
gcgcaggagcacagg

SEQ ID NO: 1556693 - RNA, 16 nt, Human adenovirus C
guggucgcgaaagguc

SEQ ID NO: 1556694 - RNA, 20 nt, Human adenovirus C
ccuaaacaacucgcugcugc

SEQ ID NO: 1556695 - RNA, 17 nt, Human adenovirus C
ugcucaacccacacaau

SEQ ID NO: 1556696 - RNA, 18 nt, Human adenovirus C
augcagaaacacaagcua

SEQ ID NO: 1556697 - RNA, 15 nt, Human adenovirus C
cuacuucggcugcuu

SEQ ID NO: 1556698 - RNA, 23 nt, Human adenovirus C
aaagcggaacauuaacaaaaaua

SEQ ID NO: 1556699 - RNA, 18 nt, Human adenovirus C
acgcgcagcccgugggcu

SEQ ID NO: 1556700 - RNA, 20 nt, Human adenovirus C
ugcggccuaccggggggaga

SEQ ID NO: 1556701 - RNA, 14 nt, Human adenovirus C
cagacgcgccagac

SEQ ID NO: 1556702 - RNA, 16 nt, Human adenovirus C
aaugcagaaacacaag

SEQ ID NO: 1556703 - RNA, 13 nt, Human adenovirus C
cgcgggcgggccc

SEQ ID NO: 1556704 - RNA, 15 nt, Human adenovirus C
caaguagcacaaaac

SEQ ID NO: 1556705 - RNA, 13 nt, Human adenovirus C
aggucagcugcaa

SEQ ID NO: 1556706 - RNA, 22 nt, Human adenovirus C
cgggagagggggcaggggcacg

SEQ ID NO: 1556707 - RNA, 18 nt, Human adenovirus C
cuggcgcaaaaucuccug

SEQ ID NO: 1556708 - RNA, 16 nt, Human adenovirus C
ccuccccuucuccuac

SEQ ID NO: 1556709 - RNA, 15 nt, Human adenovirus C
gguggcggcgagguc

SEQ ID NO: 1556710 - RNA, 13 nt, Human adenovirus C
cgugcggcaggga

SEQ ID NO: 1556711 - RNA, 20 nt, Human adenovirus C
cgagcggccgccgcagcagc

SEQ ID NO: 1556712 - RNA, 11 nt, Human adenovirus C
cagcacagcag

SEQ ID NO: 1556713 - RNA, 23 nt, Human adenovirus C
ucacccuuauccucaucugcagc

SEQ ID NO: 1556714 - RNA, 14 nt, Human adenovirus C
auaguggugcagga

SEQ ID NO: 1556715 - RNA, 19 nt, Human adenovirus C
ggaagcgacgaaugagcuc

SEQ ID NO: 1556716 - RNA, 13 nt, Human adenovirus C
auucaccaccucc

SEQ ID NO: 1556717 - RNA, 12 nt, Human adenovirus C
uaaccaccaccg

SEQ ID NO: 1556718 - RNA, 19 nt, Human adenovirus C
uacaaacgaagccuuccau

SEQ ID NO: 1556719 - RNA, 22 nt, Human adenovirus C
ugcgccccccuccucagcagcg

SEQ ID NO: 1556720 - RNA, 14 nt, Human adenovirus C
gucauaccacugca

SEQ ID NO: 1556721 - RNA, 18 nt, Human adenovirus C
agcuugccugcuccagag

SEQ ID NO: 1556722 - RNA, 11 nt, Human adenovirus C
cggugagcgcu

SEQ ID NO: 1556723 - RNA, 20 nt, Human adenovirus C
uaucaccgucacccagcacu

SEQ ID NO: 1556724 - RNA, 17 nt, Human adenovirus C
gcggcaacgugcagacc

SEQ ID NO: 1556725 - RNA, 15 nt, Human adenovirus C
aauaagauuaacagu

SEQ ID NO: 1556726 - RNA, 18 nt, Human adenovirus C
uccagagcgcccuccacc

SEQ ID NO: 1556727 - RNA, 12 nt, Human adenovirus C
agaagcgcgggg

SEQ ID NO: 1556728 - RNA, 16 nt, Human adenovirus C
agggcugccugcacuu

SEQ ID NO: 1556729 - RNA, 21 nt, Human adenovirus C
acccaaaaagaagcugcagcu

SEQ ID NO: 1556730 - RNA, 22 nt, Human adenovirus C
uggugcgcucgucgggcaccag

SEQ ID NO: 1556731 - RNA, 18 nt, Human adenovirus C
auaguggugcaggagcgc

SEQ ID NO: 1556732 - RNA, 14 nt, Human adenovirus C
cugcagccagggga

SEQ ID NO: 1556733 - RNA, 14 nt, Human adenovirus C
aaggcuacaggggc

SEQ ID NO: 1556734 - RNA, 19 nt, Human adenovirus C
uggaacagcagcacaggcc

SEQ ID NO: 1556735 - RNA, 15 nt, Human adenovirus C
gucgccaccgccgcc

SEQ ID NO: 1556736 - RNA, 18 nt, Human adenovirus C
cgucauuacccagggcca

SEQ ID NO: 1556737 - RNA, 12 nt, Human adenovirus C
cccuccccuucu

SEQ ID NO: 1556738 - RNA, 13 nt, Human adenovirus C
gcacucgcaccgu

SEQ ID NO: 1556739 - RNA, 15 nt, Human adenovirus C
uuaggguauaugcaa

SEQ ID NO: 1556740 - RNA, 17 nt, Human adenovirus C
cucacccgcagcugccu

SEQ ID NO: 1556741 - RNA, 14 nt, Human adenovirus C
uuacugcugcugga

SEQ ID NO: 1556742 - RNA, 17 nt, Human adenovirus C
uggcguugccgcuggac

SEQ ID NO: 1556743 - RNA, 19 nt, Human adenovirus C
agcggaugucagccuugcc

SEQ ID NO: 1556744 - RNA, 15 nt, Human adenovirus C
uggccugaaccgcga

SEQ ID NO: 1556745 - RNA, 21 nt, Human adenovirus C
gcgcaaaggugucccuaacca

SEQ ID NO: 1556746 - RNA, 19 nt, Human adenovirus C
aacucaggggcgcagcuug

SEQ ID NO: 1556747 - RNA, 22 nt, Human adenovirus C
ggacgggggguuuaccuggacc

SEQ ID NO: 1556748 - RNA, 14 nt, Human adenovirus C
gcggggugcccuug

SEQ ID NO: 1556749 - RNA, 15 nt, Human adenovirus C
uccauccggcccagg

SEQ ID NO: 1556750 - RNA, 14 nt, Human adenovirus C
ggccaugcaucugu

SEQ ID NO: 1556751 - RNA, 21 nt, Human adenovirus C
auaccuugacggaaccuucua

SEQ ID NO: 1556752 - RNA, 18 nt, Human adenovirus C
ccuugacggaaccuucua

SEQ ID NO: 1556753 - RNA, 23 nt, Human adenovirus C
ugcugacccggagaugcagcgca

SEQ ID NO: 1556754 - RNA, 22 nt, Human adenovirus C
uguuuggaagauuuuucugcug

SEQ ID NO: 1556755 - RNA, 17 nt, Human adenovirus C
gacugggcgugcagacc

SEQ ID NO: 1556756 - RNA, 19 nt, Human adenovirus C
gagcgcuccuuuuggcuuc

SEQ ID NO: 1556757 - RNA, 14 nt, Human adenovirus C
cgagugguggcucc

SEQ ID NO: 1556758 - RNA, 21 nt, Human adenovirus C
cucuauaaacauuccagcacc

SEQ ID NO: 1556759 - RNA, 22 nt, Human adenovirus C
guuccuuauagugcagcacagc

SEQ ID NO: 1556760 - RNA, 17 nt, Human adenovirus C
gcccagcguggcgcugg

SEQ ID NO: 1556761 - RNA, 22 nt, Human adenovirus C
cugcuuuacggauuugucaccc

SEQ ID NO: 1556762 - RNA, 14 nt, Human adenovirus C
gcgcgcgggcagga

SEQ ID NO: 1556763 - RNA, 13 nt, Human adenovirus C
ccaaaagcagggc

SEQ ID NO: 1556764 - RNA, 16 nt, Human adenovirus C
cucaacccgaauaaac

SEQ ID NO: 1556765 - RNA, 14 nt, Human adenovirus C
caacgcgcagcccg

SEQ ID NO: 1556766 - RNA, 12 nt, Human adenovirus C
caguuuccaaaa

SEQ ID NO: 1556767 - RNA, 20 nt, Human adenovirus C
ugcagagcuucaugcugcgg

SEQ ID NO: 1556768 - RNA, 20 nt, Human adenovirus C
ccuggccaaccaggcagugc

SEQ ID NO: 1556769 - RNA, 20 nt, Human adenovirus C
agcgggggguaccugcugga

SEQ ID NO: 1556770 - RNA, 13 nt, Human adenovirus C
ugcugcagccgca

SEQ ID NO: 1556771 - RNA, 18 nt, Human adenovirus C
cgcuggaaaaguccaccc

SEQ ID NO: 1556772 - RNA, 14 nt, Human adenovirus C
gcuugagcaggcca

SEQ ID NO: 1556773 - RNA, 19 nt, Human adenovirus C
ugcagaccguaaaccugag

SEQ ID NO: 1556774 - RNA, 20 nt, Human adenovirus C
caaggacugguuccuggugc

SEQ ID NO: 1556775 - RNA, 17 nt, Human adenovirus C
cugggccagcacacacc

SEQ ID NO: 1556776 - RNA, 20 nt, Human adenovirus C
gcacccaaaaagaagcugca

SEQ ID NO: 1556777 - RNA, 22 nt, Human adenovirus C
guuccauccggcccaggggcgu

SEQ ID NO: 1556778 - RNA, 23 nt, Human adenovirus C
auuucugccagcgccugcacugc

SEQ ID NO: 1556779 - RNA, 17 nt, Human adenovirus C
ccacaggcugcugucca

SEQ ID NO: 1556780 - RNA, 15 nt, Human adenovirus C
caacagggucugcca

SEQ ID NO: 1556781 - RNA, 22 nt, Human adenovirus C
ucugcacucuuauuaaaaccau

SEQ ID NO: 1556782 - RNA, 24 nt, Human adenovirus C
aggcggcggcaacaacaguggcag

SEQ ID NO: 1556783 - RNA, 12 nt, Human adenovirus C
cgcaacugggca

SEQ ID NO: 1556784 - RNA, 15 nt, Human adenovirus C
ugaaauccuguggug

SEQ ID NO: 1556785 - RNA, 19 nt, Human adenovirus C
uauaaugucacagucuucc

SEQ ID NO: 1556786 - RNA, 15 nt, Human adenovirus C
acgcgcuccccuccg

SEQ ID NO: 1556787 - RNA, 23 nt, Human adenovirus C
ccgcgggcugggugugcgcggca

SEQ ID NO: 1556788 - RNA, 16 nt, Human adenovirus C
aagagacgcucggugc

SEQ ID NO: 1556789 - RNA, 18 nt, Human adenovirus C
cacgguguaagcuucuau

SEQ ID NO: 1556790 - RNA, 15 nt, Human adenovirus C
cuaccggagugcugg

SEQ ID NO: 1556791 - RNA, 13 nt, Human adenovirus C
cugcagcacagca

SEQ ID NO: 1556792 - RNA, 17 nt, Human adenovirus C
ggcggcuauuaccacca

SEQ ID NO: 1556793 - RNA, 13 nt, Human adenovirus C
gacaacgcgcaug

SEQ ID NO: 1556794 - RNA, 23 nt, Human adenovirus C
caaguuguggcccccacaaaagu

SEQ ID NO: 1556795 - RNA, 13 nt, Human adenovirus C
gagcaggacccag

SEQ ID NO: 1556796 - RNA, 18 nt, Human adenovirus C
ugcgcgagauugagcucc

SEQ ID NO: 1556797 - RNA, 13 nt, Human adenovirus C
ggggcagugcaga

SEQ ID NO: 1556798 - RNA, 16 nt, Human adenovirus C
uuuaaugacuaccuuu

SEQ ID NO: 1556799 - RNA, 23 nt, Human adenovirus C
cacguggcggccgccgaccuggu

SEQ ID NO: 1556800 - RNA, 15 nt, Human adenovirus C
acccaagggugcagc

SEQ ID NO: 1556801 - RNA, 16 nt, Human adenovirus C
uaggauuuuucccacu

SEQ ID NO: 1556802 - RNA, 23 nt, Human adenovirus C
ucaggaauucugcccgccaccug

SEQ ID NO: 1556803 - RNA, 14 nt, Human adenovirus C
cuuacucccaauga

SEQ ID NO: 1556804 - RNA, 18 nt, Human adenovirus C
cgcagcgaugugccccuc

SEQ ID NO: 1556805 - RNA, 19 nt, Human adenovirus C
ugcagcagccgccgccaug

SEQ ID NO: 1556806 - RNA, 20 nt, Human adenovirus C
aggggugcgcuccgggcugc

SEQ ID NO: 1556807 - RNA, 13 nt, Human adenovirus C
acgcggcggcaga

SEQ ID NO: 1556808 - RNA, 21 nt, Human adenovirus C
cggggaguaggcauccgcgcc

SEQ ID NO: 1556809 - RNA, 13 nt, Human adenovirus C
cagccgcugcagc

SEQ ID NO: 1556810 - RNA, 15 nt, Human adenovirus C
aacccacacaaugaa

SEQ ID NO: 1556811 - RNA, 18 nt, Human adenovirus C
uguggcgcgcgaggaggu

SEQ ID NO: 1556812 - RNA, 13 nt, Human adenovirus C
gcagcacagcacc

SEQ ID NO: 1556813 - RNA, 20 nt, Human adenovirus C
acauuacucccauuuuucca

SEQ ID NO: 1556814 - RNA, 12 nt, Human adenovirus C
cuacaggggccu

SEQ ID NO: 1556815 - RNA, 20 nt, Human adenovirus C
ggcgcucguugguccagcag

SEQ ID NO: 1556816 - RNA, 19 nt, Human adenovirus C
guauccggugcacuuggga

SEQ ID NO: 1556817 - RNA, 21 nt, Human adenovirus C
ggcggucggccaugccccagg

SEQ ID NO: 1556818 - RNA, 14 nt, Human adenovirus C
ugcacgucuccuga

SEQ ID NO: 1556819 - RNA, 23 nt, Human adenovirus C
guaggggagaucagcugggaaga

SEQ ID NO: 1556820 - RNA, 16 nt, Human adenovirus C
agccaacuaccuugcc

SEQ ID NO: 1556821 - RNA, 21 nt, Human adenovirus C
cgagggacaggcuuaccccgc

SEQ ID NO: 1556822 - RNA, 17 nt, Human adenovirus C
uccaagcgcaaaaucaa

SEQ ID NO: 1556823 - RNA, 12 nt, Human adenovirus C
caguaacugcag

SEQ ID NO: 1556824 - RNA, 13 nt, Human adenovirus C
gcggccaugcggg

SEQ ID NO: 1556825 - RNA, 13 nt, Human adenovirus C
uagauggccuggc

SEQ ID NO: 1556826 - RNA, 14 nt, Human adenovirus C
cagccuggaggcaa

SEQ ID NO: 1556827 - RNA, 16 nt, Human adenovirus C
cagauccuuccuauca

SEQ ID NO: 1556828 - RNA, 15 nt, Human adenovirus C
gcccgaggguaacga

SEQ ID NO: 1556829 - RNA, 14 nt, Human adenovirus C
ccugugcugccagg

SEQ ID NO: 1556830 - RNA, 19 nt, Human adenovirus C
ucuuauauuauugacccuu

SEQ ID NO: 1556831 - RNA, 15 nt, Human adenovirus C
ccugugaugcuggau

SEQ ID NO: 1556832 - RNA, 17 nt, Human adenovirus C
ggcugacgcggcggcag

SEQ ID NO: 1556833 - RNA, 16 nt, Human adenovirus C
acgaaagccaaaaaac

SEQ ID NO: 1556834 - RNA, 20 nt, Human adenovirus C
cucaacucccggaacucagg

SEQ ID NO: 1556835 - RNA, 17 nt, Human adenovirus C
ggcagaggcggcgcugc

SEQ ID NO: 1556836 - RNA, 22 nt, Human adenovirus C
uggcaccuuuuguuccaccgcu

SEQ ID NO: 1556837 - RNA, 19 nt, Human adenovirus C
cuauccaaaaacccaaagu

SEQ ID NO: 1556838 - RNA, 22 nt, Human adenovirus C
cgaggacgaugaguacgagcca

SEQ ID NO: 1556839 - RNA, 20 nt, Human adenovirus C
guggcccuuggcgcgcagcu

SEQ ID NO: 1556840 - RNA, 12 nt, Human adenovirus C
cgcgcccauggc

SEQ ID NO: 1556841 - RNA, 23 nt, Human adenovirus C
ucuacagcuuccuggagcgccac

SEQ ID NO: 1556842 - RNA, 14 nt, Human adenovirus C
ggccggcaacgcca

SEQ ID NO: 1556843 - RNA, 21 nt, Human adenovirus C
ugcaggaauacaacauggcag

SEQ ID NO: 1556844 - RNA, 19 nt, Human adenovirus C
gcaauaugagcgguggcgc

SEQ ID NO: 1556845 - RNA, 19 nt, Human adenovirus C
ccaucgcgcaacugggcag

SEQ ID NO: 1556846 - RNA, 17 nt, Human adenovirus C
augaauggaacuucagg

SEQ ID NO: 1556847 - RNA, 16 nt, Human adenovirus C
gcaacgaccgccugcu

SEQ ID NO: 1556848 - RNA, 19 nt, Human adenovirus C
cgaccgggguucgaacccc

SEQ ID NO: 1556849 - RNA, 14 nt, Human adenovirus C
ggcggaggugcugc

SEQ ID NO: 1556850 - RNA, 17 nt, Human adenovirus C
gacacuguaccgcgagg

SEQ ID NO: 1556851 - RNA, 20 nt, Human adenovirus C
uccucugauaguuacuagcg

SEQ ID NO: 1556852 - RNA, 22 nt, Human adenovirus C
aaggaggacagccuaaccgccc

SEQ ID NO: 1556853 - RNA, 11 nt, Human adenovirus C
accacuguggu

SEQ ID NO: 1556854 - RNA, 14 nt, Human adenovirus C
ugcgacgucagaca

SEQ ID NO: 1556855 - RNA, 15 nt, Human adenovirus C
uaccugagccccggg

SEQ ID NO: 1556856 - RNA, 23 nt, Human adenovirus C
ccauaaugauggcaaugggccca

SEQ ID NO: 1556857 - RNA, 15 nt, Human adenovirus C
uggagagcgguggug

SEQ ID NO: 1556858 - RNA, 18 nt, Human adenovirus C
acaucauuuugcugccag

SEQ ID NO: 1556859 - RNA, 22 nt, Human adenovirus C
cccaaccguagaugggacacca

SEQ ID NO: 1556860 - RNA, 14 nt, Human adenovirus C
guauauuccuuaga

SEQ ID NO: 1556861 - RNA, 20 nt, Human adenovirus C
cugcaaagggcccuggcugg

SEQ ID NO: 1556862 - RNA, 15 nt, Human adenovirus C
ccaccacgccgcgcg

SEQ ID NO: 1556863 - RNA, 22 nt, Human adenovirus C
agaacuccucacuuaaaaaaca

SEQ ID NO: 1556864 - RNA, 16 nt, Human adenovirus C
cgccgccacccacgga

SEQ ID NO: 1556865 - RNA, 18 nt, Human adenovirus C
ccugcaggaaucgcccca

SEQ ID NO: 1556866 - RNA, 20 nt, Human adenovirus C
gcagacaugcagggcacccu

SEQ ID NO: 1556867 - RNA, 21 nt, Human adenovirus C
cagauggugauuacgaacccc

SEQ ID NO: 1556868 - RNA, 16 nt, Human adenovirus C
uggacuuggaggaggg

SEQ ID NO: 1556869 - RNA, 12 nt, Human adenovirus C
uccauacacaaa

SEQ ID NO: 1556870 - RNA, 12 nt, Human adenovirus C
ugcuaccucuuu

SEQ ID NO: 1556871 - RNA, 18 nt, Human adenovirus C
agauugcaagaaaaaacu

SEQ ID NO: 1556872 - RNA, 22 nt, Human adenovirus C
cgggcggcagcggguggcgguc

SEQ ID NO: 1556873 - RNA, 18 nt, Human adenovirus C
agagcaacaacagcgcca

SEQ ID NO: 1556874 - RNA, 12 nt, Human adenovirus C
aaugacugggcg

SEQ ID NO: 1556875 - RNA, 16 nt, Human adenovirus C
gcggcgcugcagagcc

SEQ ID NO: 1556876 - RNA, 11 nt, Human adenovirus C
caccaugcgcg

SEQ ID NO: 1556877 - RNA, 10 nt, Human adenovirus C
gcagccacag

SEQ ID NO: 1556878 - RNA, 11 nt, Human adenovirus C
ccaagcaguuc

SEQ ID NO: 1556879 - RNA, 19 nt, Human adenovirus C
ccauuaaguaccgugaaug

SEQ ID NO: 1556880 - RNA, 14 nt, Human adenovirus C
caguguccacagug

SEQ ID NO: 1556881 - RNA, 17 nt, Human adenovirus C
gaccguaaaccugagcc

SEQ ID NO: 1556882 - RNA, 13 nt, Human adenovirus C
agucgcaggaccc

SEQ ID NO: 1556883 - RNA, 14 nt, Human adenovirus C
gggguuugacccag

SEQ ID NO: 1556884 - RNA, 23 nt, Human adenovirus C
gcuggggcaggaggacacgggca

SEQ ID NO: 1556885 - RNA, 17 nt, Human adenovirus C
aggcuguccgugucccc

SEQ ID NO: 1556886 - RNA, 15 nt, Human adenovirus C
gcccuaccugugcuu

SEQ ID NO: 1556887 - RNA, 11 nt, Human adenovirus C
ucaaaaaccag

SEQ ID NO: 1556888 - RNA, 21 nt, Human adenovirus C
accugcucggacggcaacugu

SEQ ID NO: 1556889 - RNA, 21 nt, Human adenovirus C
ccgccgucgccgucgccagcc

SEQ ID NO: 1556890 - RNA, 20 nt, Human adenovirus C
uuggcgcgcccgccagcccc

SEQ ID NO: 1556891 - RNA, 21 nt, Human adenovirus C
uggcuccauaccauaccuuga

SEQ ID NO: 1556892 - RNA, 22 nt, Human adenovirus C
aaaugaccguggagccugggcu

SEQ ID NO: 1556893 - RNA, 18 nt, Human adenovirus C
gggauuccgaggaagaau

SEQ ID NO: 1556894 - RNA, 15 nt, Human adenovirus C
caaagucaaacugcu

SEQ ID NO: 1556895 - RNA, 12 nt, Human adenovirus C
agggaguggcaa

SEQ ID NO: 1556896 - RNA, 11 nt, Human adenovirus C
ggccagaugcu

SEQ ID NO: 1556897 - RNA, 12 nt, Human adenovirus C
gagccggcggcg

SEQ ID NO: 1556898 - RNA, 17 nt, Human adenovirus C
agagcaacaacagcgcc

SEQ ID NO: 1556899 - RNA, 20 nt, Human adenovirus C
ccaaagcgugcaggggccca

SEQ ID NO: 1556900 - RNA, 23 nt, Human adenovirus C
gccuaaagcgcgagucuggugac

SEQ ID NO: 1556901 - RNA, 16 nt, Human adenovirus C
cgucgccagcccgugc

SEQ ID NO: 1556902 - RNA, 15 nt, Human adenovirus C
uacgaaaaaaccacu

SEQ ID NO: 1556903 - RNA, 14 nt, Human adenovirus C
cuugcccuuggagg

SEQ ID NO: 1556904 - RNA, 13 nt, Human adenovirus C
ccacccuccucac

SEQ ID NO: 1556905 - RNA, 22 nt, Human adenovirus C
gagcccgacgcgcggaccggga

SEQ ID NO: 1556906 - RNA, 22 nt, Human adenovirus C
caguacaaguuguggcccccac

SEQ ID NO: 1556907 - RNA, 16 nt, Human adenovirus C
ggccaaccaggcagug

SEQ ID NO: 1556908 - RNA, 18 nt, Human adenovirus C
acggccgcuacgugcccu

SEQ ID NO: 1556909 - RNA, 22 nt, Human adenovirus C
cguuucgcggguuggggcggcu

SEQ ID NO: 1556910 - RNA, 20 nt, Human adenovirus C
cuccagaggggcguggcgaa

SEQ ID NO: 1556911 - RNA, 19 nt, Human adenovirus C
gacccgccguuugugccuc

SEQ ID NO: 1556912 - RNA, 15 nt, Human adenovirus C
cggugguaugcgccc

SEQ ID NO: 1556913 - RNA, 17 nt, Human adenovirus C
ccacgcucggugacgaa

SEQ ID NO: 1556914 - RNA, 15 nt, Human adenovirus C
gcgaucguggagcac

SEQ ID NO: 1556915 - RNA, 17 nt, Human adenovirus C
cgugggucugggggugc

SEQ ID NO: 1556916 - RNA, 11 nt, Human adenovirus C
gaaaccccaga

SEQ ID NO: 1556917 - RNA, 18 nt, Human adenovirus C
ugauggaagacugggaca

SEQ ID NO: 1556918 - RNA, 12 nt, Human adenovirus C
cuuccgcagcca

SEQ ID NO: 1556919 - RNA, 22 nt, Human adenovirus C
uuaaccuacaccaguguaaaag

SEQ ID NO: 1556920 - RNA, 14 nt, Human adenovirus C
agucauccaugucc

SEQ ID NO: 1556921 - RNA, 21 nt, Human adenovirus C
cagucaaguuuacuugcaugg

SEQ ID NO: 1556922 - RNA, 14 nt, Human adenovirus C
augugccccucgcc

SEQ ID NO: 1556923 - RNA, 12 nt, Human adenovirus C
aguaguccaggg

SEQ ID NO: 1556924 - RNA, 14 nt, Human adenovirus C
uagguguaggccac

SEQ ID NO: 1556925 - RNA, 16 nt, Human adenovirus C
uccuggauuugggagg

SEQ ID NO: 1556926 - RNA, 17 nt, Human adenovirus C
gccccgggcuggugcag

SEQ ID NO: 1556927 - RNA, 15 nt, Human adenovirus C
gaaccugaacggggu

SEQ ID NO: 1556928 - RNA, 12 nt, Human adenovirus C
uccuggugcaga

SEQ ID NO: 1556929 - RNA, 16 nt, Human adenovirus C
ugaccugcgcugggcc

SEQ ID NO: 1556930 - RNA, 15 nt, Human adenovirus C
gcagaagcugccgcc

SEQ ID NO: 1556931 - RNA, 23 nt, Human adenovirus C
ucaucggcugaagcagggccagg

SEQ ID NO: 1556932 - RNA, 16 nt, Human adenovirus C
gaccuggccaaccagg

SEQ ID NO: 1556933 - RNA, 13 nt, Human adenovirus C
augagcuccacag

SEQ ID NO: 1556934 - RNA, 14 nt, Human adenovirus C
cgcgcuggccaggg

SEQ ID NO: 1556935 - RNA, 11 nt, Human adenovirus C
ugcaaaggugg

SEQ ID NO: 1556936 - RNA, 17 nt, Human adenovirus C
uauaccuuuuuaaugca

SEQ ID NO: 1556937 - RNA, 14 nt, Human adenovirus C
aaugccuguuugaa

SEQ ID NO: 1556938 - RNA, 15 nt, Human adenovirus C
aagggcgaggcgcgc

SEQ ID NO: 1556939 - RNA, 22 nt, Human adenovirus C
cgggcccuugcuucccaggaug

SEQ ID NO: 1556940 - RNA, 20 nt, Human adenovirus C
ugaccagacaccguccugag

SEQ ID NO: 1556941 - RNA, 15 nt, Human adenovirus C
ccagcucggcgguga

SEQ ID NO: 1556942 - RNA, 23 nt, Human adenovirus C
agagcauguccaaggugaaccug

SEQ ID NO: 1556943 - RNA, 12 nt, Human adenovirus C
gcugccagggcc

SEQ ID NO: 1556944 - RNA, 19 nt, Human adenovirus C
guguuccgcgguccuccuc

SEQ ID NO: 1556945 - RNA, 15 nt, Human adenovirus C
gauuccucugggacg

SEQ ID NO: 1556946 - RNA, 18 nt, Human adenovirus C
ugcaaacaucagcccccc

SEQ ID NO: 1556947 - RNA, 14 nt, Human adenovirus C
gcgucuggcgccca

SEQ ID NO: 1556948 - RNA, 21 nt, Human adenovirus C
gggucuuuuaccagcacucgc

SEQ ID NO: 1556949 - RNA, 20 nt, Human adenovirus C
gugguccgugugcaccagcc

SEQ ID NO: 1556950 - RNA, 16 nt, Human adenovirus C
caaggccugcccacca

SEQ ID NO: 1556951 - RNA, 15 nt, Human adenovirus C
ucuccuucgcccgcc

SEQ ID NO: 1556952 - RNA, 23 nt, Human adenovirus C
caccgucaagaaaaacaccacca

SEQ ID NO: 1556953 - RNA, 20 nt, Human adenovirus C
ccuggcaaacggccaugggc

SEQ ID NO: 1556954 - RNA, 16 nt, Human adenovirus C
uaacaguccccaggua

SEQ ID NO: 1556955 - RNA, 14 nt, Human adenovirus C
uacaacaaacagag

SEQ ID NO: 1556956 - RNA, 17 nt, Human adenovirus C
gauggcaaugggcccac

SEQ ID NO: 1556957 - RNA, 23 nt, Human adenovirus C
ccugggcauagucucgccgcgcg

SEQ ID NO: 1556958 - RNA, 13 nt, Human adenovirus C
gacuuggaggagg

SEQ ID NO: 1556959 - RNA, 16 nt, Human adenovirus C
cgagcugaugcacagc

SEQ ID NO: 1556960 - RNA, 17 nt, Human adenovirus C
ccccggcgcccgcgccg

SEQ ID NO: 1556961 - RNA, 21 nt, Human adenovirus C
ugcaguagaagguaagcgggu

SEQ ID NO: 1556962 - RNA, 20 nt, Human adenovirus C
agcggucacacagaagcaaa

SEQ ID NO: 1556963 - RNA, 16 nt, Human adenovirus C
gacaacgcgcaugccc

SEQ ID NO: 1556964 - RNA, 16 nt, Human adenovirus C
cugaggcuacagagga

SEQ ID NO: 1556965 - RNA, 23 nt, Human adenovirus C
uuuccaacguggagcucugcaac

SEQ ID NO: 1556966 - RNA, 22 nt, Human adenovirus C
gugugggcguggcuuaagggug

SEQ ID NO: 1556967 - RNA, 16 nt, Human adenovirus C
ugcagaaacacaagcu

SEQ ID NO: 1556968 - RNA, 16 nt, Human adenovirus C
cuuccuuccaggcgcg

SEQ ID NO: 1556969 - RNA, 20 nt, Human adenovirus C
gcgcucccucacccgcagcu

SEQ ID NO: 1556970 - RNA, 22 nt, Human adenovirus C
cgccaccaccgccuccaccgau

SEQ ID NO: 1556971 - RNA, 14 nt, Human adenovirus C
cagauucacucaaa

SEQ ID NO: 1556972 - RNA, 16 nt, Human adenovirus C
gcggggcuuaaagggu

SEQ ID NO: 1556973 - RNA, 22 nt, Human adenovirus C
auacggaggauaggguggccuu

SEQ ID NO: 1556974 - RNA, 19 nt, Human adenovirus C
cuuggccaauugcaagcca

SEQ ID NO: 1556975 - RNA, 17 nt, Human adenovirus C
ggugcaugcccaggcuu

SEQ ID NO: 1556976 - RNA, 14 nt, Human adenovirus C
gcgaucguggagca

SEQ ID NO: 1556977 - RNA, 22 nt, Human adenovirus C
ccaccuucuuccccauggccca

SEQ ID NO: 1556978 - RNA, 23 nt, Human adenovirus C
cuccgaacgguaagagccuagca

SEQ ID NO: 1556979 - RNA, 13 nt, Human adenovirus C
gcccucuuccucc

SEQ ID NO: 1556980 - RNA, 17 nt, Human adenovirus C
caagaacuugcaggggc

SEQ ID NO: 1556981 - RNA, 20 nt, Human adenovirus C
aggguggcucgcgaaggagg

SEQ ID NO: 1556982 - RNA, 21 nt, Human adenovirus C
agcuggggccggaccugggcu

SEQ ID NO: 1556983 - RNA, 19 nt, Human adenovirus C
ccugggcauagucucgccg

SEQ ID NO: 1556984 - RNA, 23 nt, Human adenovirus C
cgcaguuggcgaugagcagcugg

SEQ ID NO: 1556985 - RNA, 14 nt, Human adenovirus C
caagcagugcagcu

SEQ ID NO: 1556986 - RNA, 17 nt, Human adenovirus C
gagccaggugagcucug

SEQ ID NO: 1556987 - RNA, 13 nt, Human adenovirus C
agacgggccaggg

SEQ ID NO: 1556988 - RNA, 16 nt, Human adenovirus C
caaacaacauggaaau

SEQ ID NO: 1556989 - RNA, 23 nt, Human adenovirus C
ucaacggaauccgcgcccaccga

SEQ ID NO: 1556990 - RNA, 21 nt, Human adenovirus C
ugacucuucuguuagcuggcc

SEQ ID NO: 1556991 - RNA, 20 nt, Human adenovirus C
cgugcccaucuccaucccau

SEQ ID NO: 1556992 - RNA, 14 nt, Human adenovirus C
cugcgacgggccga

SEQ ID NO: 1556993 - RNA, 15 nt, Human adenovirus C
ggcacgagcugcuuc

SEQ ID NO: 1556994 - RNA, 19 nt, Human adenovirus C
ccgcacugggcgcaccacc

SEQ ID NO: 1556995 - RNA, 22 nt, Human adenovirus C
caguaacuuuauguccaugggc

SEQ ID NO: 1556996 - RNA, 21 nt, Human adenovirus C
gccugcgucauuacccagggc

SEQ ID NO: 1556997 - RNA, 18 nt, Human adenovirus C
ugcguaacuugcuggaac

SEQ ID NO: 1556998 - RNA, 17 nt, Human adenovirus C
cgccagacgccgcaccu

SEQ ID NO: 1556999 - RNA, 19 nt, Human adenovirus C
ugcuguugaagcaucugca

SEQ ID NO: 1557000 - RNA, 19 nt, Human adenovirus C
auucaguaguauagcccca

SEQ ID NO: 1557001 - RNA, 14 nt, Human adenovirus C
agcaagagcagcgg

SEQ ID NO: 1557002 - RNA, 11 nt, Human adenovirus C
ucaccaggcgc

SEQ ID NO: 1557003 - RNA, 14 nt, Human adenovirus C
ucuuguucccagcg

SEQ ID NO: 1557004 - RNA, 21 nt, Human adenovirus C
gaggaagguccuccucccucc

SEQ ID NO: 1557005 - RNA, 17 nt, Human adenovirus C
cauucaacuaacauaaa

SEQ ID NO: 1557006 - RNA, 21 nt, Human adenovirus C
aggaggauuacaagugggaau

SEQ ID NO: 1557007 - RNA, 21 nt, Human adenovirus C
aggcugagcaccguggcgggc

SEQ ID NO: 1557008 - RNA, 18 nt, Human adenovirus C
gccuuuuacugcugcugg

SEQ ID NO: 1557009 - RNA, 22 nt, Human adenovirus C
ugaagacaaaggaaaccccuuc

SEQ ID NO: 1557010 - RNA, 17 nt, Human adenovirus C
gcuuccuuccaggcgcg

SEQ ID NO: 1557011 - RNA, 13 nt, Human adenovirus C
aaagcuagcccug

SEQ ID NO: 1557012 - RNA, 22 nt, Human adenovirus C
ggucacccacuuugccuacccg

SEQ ID NO: 1557013 - RNA, 20 nt, Human adenovirus C
cccaacucggccgccugugg

SEQ ID NO: 1557014 - RNA, 19 nt, Human adenovirus C
cugggacagucaggcagag

SEQ ID NO: 1557015 - RNA, 23 nt, Human adenovirus C
uacuaaggacaaacagguggagc

SEQ ID NO: 1557016 - RNA, 15 nt, Human adenovirus C
ugcgcgcuggccagg

SEQ ID NO: 1557017 - RNA, 22 nt, Human adenovirus C
cauuuuuucuggggugaugcag

SEQ ID NO: 1557018 - RNA, 16 nt, Human adenovirus C
gacaaggagguaaaga

SEQ ID NO: 1557019 - RNA, 21 nt, Human adenovirus C
agcgcagcuugagccuggcug

SEQ ID NO: 1557020 - RNA, 20 nt, Human adenovirus C
ggccguucucgcgggggcgc

SEQ ID NO: 1557021 - RNA, 18 nt, Human adenovirus C
cccgcuuuccaagauggc

SEQ ID NO: 1557022 - RNA, 15 nt, Human adenovirus C
uccuccagaagacgg

SEQ ID NO: 1557023 - RNA, 15 nt, Human adenovirus C
ccuccucagcagcgg

SEQ ID NO: 1557024 - RNA, 13 nt, Human adenovirus C
auucagccgccgc

SEQ ID NO: 1557025 - RNA, 12 nt, Human adenovirus C
cuacccccggcu

SEQ ID NO: 1557026 - RNA, 14 nt, Human adenovirus C
caggugagcucugg

SEQ ID NO: 1557027 - RNA, 20 nt, Human adenovirus C
ugaaggggugcgcuccgggc

SEQ ID NO: 1557028 - RNA, 21 nt, Human adenovirus C
cgacgagcggccgccgcagca

SEQ ID NO: 1557029 - RNA, 13 nt, Human adenovirus C
aagcugcagcugc

SEQ ID NO: 1557030 - RNA, 20 nt, Human adenovirus C
gagcauaguggugcaggagc

SEQ ID NO: 1557031 - RNA, 22 nt, Human adenovirus C
uaauagcgcccuucacggacag

SEQ ID NO: 1557032 - RNA, 15 nt, Human adenovirus C
acgcccacgccgcca

SEQ ID NO: 1557033 - RNA, 16 nt, Human adenovirus C
cauauuuccugcagau

SEQ ID NO: 1557034 - RNA, 16 nt, Human adenovirus C
uacagaggaggcuagg

SEQ ID NO: 1557035 - RNA, 14 nt, Human adenovirus C
aggaaaccccuucc

SEQ ID NO: 1557036 - RNA, 16 nt, Human adenovirus C
acuggaaccagggccg

SEQ ID NO: 1557037 - RNA, 12 nt, Human adenovirus C
acgagccagagg

SEQ ID NO: 1557038 - RNA, 18 nt, Human adenovirus C
accgucaucucuacagcc

SEQ ID NO: 1557039 - RNA, 22 nt, Human adenovirus C
guucuaauggagaacuccucac

SEQ ID NO: 1557040 - RNA, 18 nt, Human adenovirus C
ucccguagaggagccucc

SEQ ID NO: 1557041 - RNA, 19 nt, Human adenovirus C
gccacaacgcgcagcccgu

SEQ ID NO: 1557042 - RNA, 13 nt, Human adenovirus C
aguggagcgggag

SEQ ID NO: 1557043 - RNA, 22 nt, Human adenovirus C
guggaccuggccaaccaggcag

SEQ ID NO: 1557044 - RNA, 21 nt, Human adenovirus C
gcuggaugugaccgaggagcu

SEQ ID NO: 1557045 - RNA, 13 nt, Human adenovirus C
cuggaggcagcug

SEQ ID NO: 1557046 - RNA, 23 nt, Human adenovirus C
acuuggcacccaccgugcagcug

SEQ ID NO: 1557047 - RNA, 12 nt, Human adenovirus C
cgcggcagaacc

SEQ ID NO: 1557048 - RNA, 13 nt, Human adenovirus C
gugaugccuuuga

SEQ ID NO: 1557049 - RNA, 14 nt, Human adenovirus C
uggagugcuggugg

SEQ ID NO: 1557050 - RNA, 20 nt, Human adenovirus C
cgugacacugcagcaggugc

SEQ ID NO: 1557051 - RNA, 14 nt, Human adenovirus C
acccuggugcugcc

SEQ ID NO: 1557052 - RNA, 20 nt, Human adenovirus C
cacguggccaucauaccaca

SEQ ID NO: 1557053 - RNA, 18 nt, Human adenovirus C
caacggacccggcggugc

SEQ ID NO: 1557054 - RNA, 18 nt, Human adenovirus C
cuccaugcccuucuccca

SEQ ID NO: 1557055 - RNA, 13 nt, Human adenovirus C
cugacaccuauca

SEQ ID NO: 1557056 - RNA, 19 nt, Human adenovirus C
agggcggggauggcgcagg

SEQ ID NO: 1557057 - RNA, 19 nt, Human adenovirus C
cugagccccgggcuggugc

SEQ ID NO: 1557058 - RNA, 18 nt, Human adenovirus C
cuccccggcuggccuuaa

SEQ ID NO: 1557059 - RNA, 21 nt, Human adenovirus C
cagcggcaagagcaagagcag

SEQ ID NO: 1557060 - RNA, 13 nt, Human adenovirus C
cccuucccuggga

SEQ ID NO: 1557061 - RNA, 20 nt, Human adenovirus C
auauaggacuaaaaaaugac

SEQ ID NO: 1557062 - RNA, 15 nt, Human adenovirus C
acaacacggccucca

SEQ ID NO: 1557063 - RNA, 14 nt, Human adenovirus C
uaggcuaccucgcu

SEQ ID NO: 1557064 - RNA, 16 nt, Human adenovirus C
ggcgguggcagaugcc

SEQ ID NO: 1557065 - RNA, 17 nt, Human adenovirus C
cuccugacguaaccugc

SEQ ID NO: 1557066 - RNA, 14 nt, Human adenovirus C
uggaggcagcuggg

SEQ ID NO: 1557067 - RNA, 19 nt, Human adenovirus C
ggccauuuuuucuggggug

SEQ ID NO: 1557068 - RNA, 14 nt, Human adenovirus C
auccuacacggugu

SEQ ID NO: 1557069 - RNA, 18 nt, Human adenovirus C
cgcgcgcagcagcagggc

SEQ ID NO: 1557070 - RNA, 12 nt, Human adenovirus C
aaggccuggcca

SEQ ID NO: 1557071 - RNA, 13 nt, Human adenovirus C
gagcacagggaug

SEQ ID NO: 1557072 - RNA, 16 nt, Human adenovirus C
uucgcgguugggccuu

SEQ ID NO: 1557073 - RNA, 20 nt, Human adenovirus C
agauauuuuucuauguggaa

SEQ ID NO: 1557074 - RNA, 15 nt, Human adenovirus C
cuccgcgguaccugc

SEQ ID NO: 1557075 - RNA, 17 nt, Human adenovirus C
ccacagcggcggcagca

SEQ ID NO: 1557076 - RNA, 14 nt, Human adenovirus C
uacuagcuacugua

SEQ ID NO: 1557077 - RNA, 23 nt, Human adenovirus C
gcgcgcuggccagggugcgcuug

SEQ ID NO: 1557078 - RNA, 20 nt, Human adenovirus C
aaccccuuuucuggaccucc

SEQ ID NO: 1557079 - RNA, 13 nt, Human adenovirus C
cgcggcaccagcg

SEQ ID NO: 1557080 - RNA, 17 nt, Human adenovirus C
guggaggaggcgcgcaa

SEQ ID NO: 1557081 - RNA, 21 nt, Human adenovirus C
gccugcugggcgaggaggagu

SEQ ID NO: 1557082 - RNA, 20 nt, Human adenovirus C
agccgcugcagccaccgccc

SEQ ID NO: 1557083 - RNA, 21 nt, Human adenovirus C
cacaggccagaugcugaggga

SEQ ID NO: 1557084 - RNA, 19 nt, Human adenovirus C
cacaagcucgccugcgcca

SEQ ID NO: 1557085 - RNA, 16 nt, Human adenovirus C
ccacuguuacucagcc

SEQ ID NO: 1557086 - RNA, 21 nt, Human adenovirus C
cagaugcgccccccuccucag

SEQ ID NO: 1557087 - RNA, 15 nt, Human adenovirus C
gggugguggcggugu

SEQ ID NO: 1557088 - RNA, 19 nt, Human adenovirus C
uccaauauugcgcuguacc

SEQ ID NO: 1557089 - RNA, 13 nt, Human adenovirus C
agucacuggucuu

SEQ ID NO: 1557090 - RNA, 14 nt, Human adenovirus C
cgccggcacugccu

SEQ ID NO: 1557091 - RNA, 12 nt, Human adenovirus C
gaagguggccau

SEQ ID NO: 1557092 - RNA, 22 nt, Human adenovirus C
caucccugagcaggggggccac

SEQ ID NO: 1557093 - RNA, 14 nt, Human adenovirus C
ggcgggagcuccug

SEQ ID NO: 1557094 - RNA, 11 nt, Human adenovirus C
aggucagcugc

SEQ ID NO: 1557095 - RNA, 14 nt, Human adenovirus C
uucaaaaucccaca

SEQ ID NO: 1557096 - RNA, 23 nt, Human adenovirus C
uucgguuccaccauuaagaacua

SEQ ID NO: 1557097 - RNA, 14 nt, Human adenovirus C
gcugaugcacagcc

SEQ ID NO: 1557098 - RNA, 14 nt, Human adenovirus C
aagcgcgcugaggc

SEQ ID NO: 1557099 - RNA, 14 nt, Human adenovirus C
aggcccgggaccag

SEQ ID NO: 1557100 - RNA, 17 nt, Human adenovirus C
cuaacauaaacacacaa

SEQ ID NO: 1557101 - RNA, 16 nt, Human adenovirus C
gaugaagaugaagaag

SEQ ID NO: 1557102 - RNA, 19 nt, Human adenovirus C
gacggccugguaggcgcag

SEQ ID NO: 1557103 - RNA, 18 nt, Human adenovirus C
agguugcuacgggcgggc

SEQ ID NO: 1557104 - RNA, 20 nt, Human adenovirus C
gacauuucagaucggcggcg

SEQ ID NO: 1557105 - RNA, 16 nt, Human adenovirus C
acggacgacuggcgcc

SEQ ID NO: 1557106 - RNA, 21 nt, Human adenovirus C
caggagcacagggaugugccc

SEQ ID NO: 1557107 - RNA, 20 nt, Human adenovirus C
accaggacgacgcagaggca

SEQ ID NO: 1557108 - RNA, 20 nt, Human adenovirus C
gagggcguuggacagcaacu

SEQ ID NO: 1557109 - RNA, 19 nt, Human adenovirus C
gcgcagacgcgccagaccc

SEQ ID NO: 1557110 - RNA, 21 nt, Human adenovirus C
ucuagggcgcaguaguccagg

SEQ ID NO: 1557111 - RNA, 16 nt, Human adenovirus C
uuggguauccugucug

SEQ ID NO: 1557112 - RNA, 15 nt, Human adenovirus C
ccgccaaaugcggag

SEQ ID NO: 1557113 - RNA, 22 nt, Human adenovirus C
agacgaaggcucgcguccaggc

SEQ ID NO: 1557114 - RNA, 17 nt, Human adenovirus C
ggcggugguggaggcgc

SEQ ID NO: 1557115 - RNA, 21 nt, Human adenovirus C
gcccuaacaguggcaaccacc

SEQ ID NO: 1557116 - RNA, 12 nt, Human adenovirus C
acgcccuucucg

SEQ ID NO: 1557117 - RNA, 21 nt, Human adenovirus C
gucacuguagucaucgccuuc

SEQ ID NO: 1557118 - RNA, 19 nt, Human adenovirus C
gcacccugaucucacuuaa

SEQ ID NO: 1557119 - RNA, 21 nt, Human adenovirus C
agccgagcggacaagcagcug

SEQ ID NO: 1557120 - RNA, 22 nt, Human adenovirus C
ugaaccgcgagcgguugcugcg

SEQ ID NO: 1557121 - RNA, 23 nt, Human adenovirus C
ccacggcuaggucucgcgcggcg

SEQ ID NO: 1557122 - RNA, 20 nt, Human adenovirus C
gcuaccggagugcugggcca

SEQ ID NO: 1557123 - RNA, 16 nt, Human adenovirus C
caguauuacccagaaa

SEQ ID NO: 1557124 - RNA, 21 nt, Human adenovirus C
gcugcgguucaucccugugga

SEQ ID NO: 1557125 - RNA, 17 nt, Human adenovirus C
cuggugcaguuugcccg

SEQ ID NO: 1557126 - RNA, 23 nt, Human adenovirus C
caugagcgcgggaccccacauga

SEQ ID NO: 1557127 - RNA, 19 nt, Human adenovirus C
aagcaggggccaagaacaa

SEQ ID NO: 1557128 - RNA, 12 nt, Human adenovirus C
aacaacagcgcc

SEQ ID NO: 1557129 - RNA, 21 nt, Human adenovirus C
gcgcaccaccggcggcggcgc

SEQ ID NO: 1557130 - RNA, 13 nt, Human adenovirus C
gccgcauccccgc

SEQ ID NO: 1557131 - RNA, 23 nt, Human adenovirus C
uggauguggacgccuaccaggca

SEQ ID NO: 1557132 - RNA, 13 nt, Human adenovirus C
acauguggaguua

SEQ ID NO: 1557133 - RNA, 14 nt, Human adenovirus C
agaaagaugaugau

SEQ ID NO: 1557134 - RNA, 15 nt, Human adenovirus C
cauagaugccaugaa

SEQ ID NO: 1557135 - RNA, 19 nt, Human adenovirus C
gaacagcagcacaggccag

SEQ ID NO: 1557136 - RNA, 20 nt, Human adenovirus C
acgcuggaagacgcggaggc

SEQ ID NO: 1557137 - RNA, 18 nt, Human adenovirus C
guacggcaccgccagcgc

SEQ ID NO: 1557138 - RNA, 19 nt, Human adenovirus C
uggccgaaaacagggccau

SEQ ID NO: 1557139 - RNA, 17 nt, Human adenovirus C
uguggugagcuguuuga

SEQ ID NO: 1557140 - RNA, 13 nt, Human adenovirus C
cacaauguggccu

SEQ ID NO: 1557141 - RNA, 13 nt, Human adenovirus C
auuggcucuggca

SEQ ID NO: 1557142 - RNA, 21 nt, Human adenovirus C
ugugucauguaugcguccaug

SEQ ID NO: 1557143 - RNA, 12 nt, Human adenovirus C
ggccagcuguug

SEQ ID NO: 1557144 - RNA, 20 nt, Human adenovirus C
aaaaagaagcugcagcugcc

SEQ ID NO: 1557145 - RNA, 20 nt, Human adenovirus C
caaggccggaaaccucaccu

SEQ ID NO: 1557146 - RNA, 16 nt, Human adenovirus C
cggcgccagcaccugu

SEQ ID NO: 1557147 - RNA, 13 nt, Human adenovirus C
acgcuggaccugc

SEQ ID NO: 1557148 - RNA, 17 nt, Human adenovirus C
cgugccaaccgcagccg

SEQ ID NO: 1557149 - RNA, 13 nt, Human adenovirus C
gcggucuuuccag

SEQ ID NO: 1557150 - RNA, 19 nt, Human adenovirus C
agccugauucgggaguuua

SEQ ID NO: 1557151 - RNA, 15 nt, Human adenovirus C
guagcugccuuccca

SEQ ID NO: 1557152 - RNA, 17 nt, Human adenovirus C
ccaagcgccagcgacug

SEQ ID NO: 1557153 - RNA, 15 nt, Human adenovirus C
cggacaagcagcugg

SEQ ID NO: 1557154 - RNA, 21 nt, Human adenovirus C
cggccugguaggcgcagcauc

SEQ ID NO: 1557155 - RNA, 13 nt, Human adenovirus C
cagcagccgcggc

SEQ ID NO: 1557156 - RNA, 18 nt, Human adenovirus C
auauggcccucaccugcc

SEQ ID NO: 1557157 - RNA, 14 nt, Human adenovirus C
caugaaccacccua

SEQ ID NO: 1557158 - RNA, 13 nt, Human adenovirus C
uugacaugaccau

SEQ ID NO: 1557159 - RNA, 20 nt, Human adenovirus C
cagcuggggccggaccuggg

SEQ ID NO: 1557160 - RNA, 12 nt, Human adenovirus C
ccacgccuuugc

SEQ ID NO: 1557161 - RNA, 15 nt, Human adenovirus C
uaggcccgggaccag

SEQ ID NO: 1557162 - RNA, 20 nt, Human adenovirus C
ggcacuaaagcaaggccugc

SEQ ID NO: 1557163 - RNA, 16 nt, Human adenovirus C
guucaucccuguggac

SEQ ID NO: 1557164 - RNA, 19 nt, Human adenovirus C
ggacaaguugaaagagcaa

SEQ ID NO: 1557165 - RNA, 12 nt, Human adenovirus C
agauuuuucugc

SEQ ID NO: 1557166 - RNA, 17 nt, Human adenovirus C
accucuuugagcccuuu

SEQ ID NO: 1557167 - RNA, 17 nt, Human adenovirus C
ugagcuugaucugcugg

SEQ ID NO: 1557168 - RNA, 21 nt, Human adenovirus C
ugcagcugccgucaucccuga

SEQ ID NO: 1557169 - RNA, 23 nt, Human adenovirus C
acgcguuccggcagcagccgcag

SEQ ID NO: 1557170 - RNA, 22 nt, Human adenovirus C
ccaacgugccgcggggacagga

SEQ ID NO: 1557171 - RNA, 14 nt, Human adenovirus C
gccgcggcagaacc

SEQ ID NO: 1557172 - RNA, 19 nt, Human adenovirus C
ugcaaagggcccuggcugg

SEQ ID NO: 1557173 - RNA, 23 nt, Human adenovirus C
gcuggugcaguuugcccgcgcca

SEQ ID NO: 1557174 - RNA, 16 nt, Human adenovirus C
uggccggggcuccggg

SEQ ID NO: 1557175 - RNA, 14 nt, Human adenovirus C
gccaccgcccgcgg

SEQ ID NO: 1557176 - RNA, 19 nt, Human adenovirus C
cgugagcgugagccggcgg

SEQ ID NO: 1557177 - RNA, 15 nt, Human adenovirus C
gguuuacugguccca

SEQ ID NO: 1557178 - RNA, 20 nt, Human adenovirus C
uuagguucuacgaagaccaa

SEQ ID NO: 1557179 - RNA, 16 nt, Human adenovirus C
ucccuuagaaccaaag

SEQ ID NO: 1557180 - RNA, 13 nt, Human adenovirus C
cacucgcuccagg

SEQ ID NO: 1557181 - RNA, 22 nt, Human adenovirus C
gcuaccggagugcugggccagc

SEQ ID NO: 1557182 - RNA, 13 nt, Human adenovirus C
ccauauauccaua

SEQ ID NO: 1557183 - RNA, 20 nt, Human adenovirus C
cccgaucacuuggugcuggc

SEQ ID NO: 1557184 - RNA, 21 nt, Human adenovirus C
acugcuaaaaauaacauuguc

SEQ ID NO: 1557185 - RNA, 21 nt, Human adenovirus C
cugcugccaugcgcgggcggc

SEQ ID NO: 1557186 - RNA, 18 nt, Human adenovirus C
gcgcagcagcagggcaac

SEQ ID NO: 1557187 - RNA, 23 nt, Human adenovirus C
aggagcagagcccauggaacccg

SEQ ID NO: 1557188 - RNA, 21 nt, Human adenovirus C
agcugccgccgccgccaccca

SEQ ID NO: 1557189 - RNA, 14 nt, Human adenovirus C
gucacuugcugaca

SEQ ID NO: 1557190 - RNA, 11 nt, Human adenovirus C
uggcagugguc

SEQ ID NO: 1557191 - RNA, 21 nt, Human adenovirus C
agaggccgcauccccgcggcg

SEQ ID NO: 1557192 - RNA, 17 nt, Human adenovirus C
gguggaccuggccaacc

SEQ ID NO: 1557193 - RNA, 14 nt, Human adenovirus C
ugaugaaaauucua

SEQ ID NO: 1557194 - RNA, 19 nt, Human adenovirus C
gaaggaaaugcguggaaga

SEQ ID NO: 1557195 - RNA, 14 nt, Human adenovirus C
uuaaaaaacaccac

SEQ ID NO: 1557196 - RNA, 15 nt, Human adenovirus C
gcaaacaucagcccc

SEQ ID NO: 1557197 - RNA, 23 nt, Human adenovirus C
ccacccgcccgcgccugcugggc

SEQ ID NO: 1557198 - RNA, 16 nt, Human adenovirus C
cgugcacuccaagagc

SEQ ID NO: 1557199 - RNA, 17 nt, Human adenovirus C
cguuucucagcagcugu

SEQ ID NO: 1557200 - RNA, 18 nt, Human adenovirus C
cuggcggguuuggcuggu

SEQ ID NO: 1557201 - RNA, 17 nt, Human adenovirus C
cagcccgggggaggcaa

SEQ ID NO: 1557202 - RNA, 19 nt, Human adenovirus C
agaucuuucauccaugaca

SEQ ID NO: 1557203 - RNA, 21 nt, Human adenovirus C
ccgcgcgcgggcaggagcugg

SEQ ID NO: 1557204 - RNA, 18 nt, Human adenovirus C
caguugccgaggaugaag

SEQ ID NO: 1557205 - RNA, 16 nt, Human adenovirus C
cacuguuacucagcca

SEQ ID NO: 1557206 - RNA, 18 nt, Human adenovirus C
gcccgcgccugcugggcg

SEQ ID NO: 1557207 - RNA, 14 nt, Human adenovirus C
agagccggccugga

SEQ ID NO: 1557208 - RNA, 16 nt, Human adenovirus C
uaguuaagagagcugc

SEQ ID NO: 1557209 - RNA, 16 nt, Human adenovirus C
gcucguugguccagca

SEQ ID NO: 1557210 - RNA, 15 nt, Human adenovirus C
ugaucaaacccagcu

SEQ ID NO: 1557211 - RNA, 16 nt, Human adenovirus C
uacugcugcuggaagg

SEQ ID NO: 1557212 - RNA, 17 nt, Human adenovirus C
gccgugagcgugagccg

SEQ ID NO: 1557213 - RNA, 18 nt, Human adenovirus C
cuacugcaccggcggcag

SEQ ID NO: 1557214 - RNA, 16 nt, Human adenovirus C
uacucccauuuuucca

SEQ ID NO: 1557215 - RNA, 21 nt, Human adenovirus C
ccaacucugguaucucagccg

SEQ ID NO: 1557216 - RNA, 17 nt, Human adenovirus C
cacacagaccaucaauc

SEQ ID NO: 1557217 - RNA, 14 nt, Human adenovirus C
guuuggcggggcaa

SEQ ID NO: 1557218 - RNA, 14 nt, Human adenovirus C
ggagaggcagagcg

SEQ ID NO: 1557219 - RNA, 21 nt, Human adenovirus C
ucccacgauacgucacuuccc

SEQ ID NO: 1557220 - RNA, 16 nt, Human adenovirus C
aaaccucagcgccucc

SEQ ID NO: 1557221 - RNA, 17 nt, Human adenovirus C
agaaaccugugcugcca

SEQ ID NO: 1557222 - RNA, 18 nt, Human adenovirus C
cuguggggcuccucccag

SEQ ID NO: 1557223 - RNA, 19 nt, Human adenovirus C
cuuugcaaguagcacaaaa

SEQ ID NO: 1557224 - RNA, 22 nt, Human adenovirus C
agcaagccgcucauggcgcagc

SEQ ID NO: 1557225 - RNA, 17 nt, Human adenovirus C
ggaccccauggcauggg

SEQ ID NO: 1557226 - RNA, 13 nt, Human adenovirus C
cuggggugaugca

SEQ ID NO: 1557227 - RNA, 21 nt, Human adenovirus C
ccauuccugaaucagcguaaa

SEQ ID NO: 1557228 - RNA, 12 nt, Human adenovirus C
cugcccaagacu

SEQ ID NO: 1557229 - RNA, 14 nt, Human adenovirus C
acccacccagcgcc

SEQ ID NO: 1557230 - RNA, 22 nt, Human adenovirus C
ugagcuccacaggucacgggcc

SEQ ID NO: 1557231 - RNA, 18 nt, Human adenovirus C
gaaggcucgcguccaggc

SEQ ID NO: 1557232 - RNA, 15 nt, Human adenovirus C
guguuacuuuucagc

SEQ ID NO: 1557233 - RNA, 17 nt, Human adenovirus C
cgagcccaacccgcgcc

SEQ ID NO: 1557234 - RNA, 13 nt, Human adenovirus C
gcucgaggggagu

SEQ ID NO: 1557235 - RNA, 19 nt, Human adenovirus C
cucaacuaaugcaaaucca

SEQ ID NO: 1557236 - RNA, 14 nt, Human adenovirus C
agagcccgagggcc

SEQ ID NO: 1557237 - RNA, 17 nt, Human adenovirus C
ggcaacaacaguggcag

SEQ ID NO: 1557238 - RNA, 20 nt, Human adenovirus C
ccaggaaagucccgcuccca

SEQ ID NO: 1557239 - RNA, 17 nt, Human adenovirus C
gcaagauaccccuaucc

SEQ ID NO: 1557240 - RNA, 18 nt, Human adenovirus C
agcagggcaaccugggcu

SEQ ID NO: 1557241 - RNA, 19 nt, Human adenovirus C
ccggcucgcuccacggugg

SEQ ID NO: 1557242 - RNA, 18 nt, Human adenovirus C
ugguggacgucgcgccgc

SEQ ID NO: 1557243 - RNA, 16 nt, Human adenovirus C
cacucucgcaaggccu

SEQ ID NO: 1557244 - RNA, 12 nt, Human adenovirus C
cuaaagcggguc

SEQ ID NO: 1557245 - RNA, 20 nt, Human adenovirus C
ccauccgcaauacagagaca

SEQ ID NO: 1557246 - RNA, 16 nt, Human adenovirus C
cgcggcgauuggcgcc

SEQ ID NO: 1557247 - RNA, 12 nt, Human adenovirus C
gagacagugucu

SEQ ID NO: 1557248 - RNA, 18 nt, Human adenovirus C
gcgcugcuccucuucccg

SEQ ID NO: 1557249 - RNA, 11 nt, Human adenovirus C
gaccuggccaa

SEQ ID NO: 1557250 - RNA, 22 nt, Human adenovirus C
aggggcauggccggccacggcc

SEQ ID NO: 1557251 - RNA, 20 nt, Human adenovirus C
cuuauacuagcacuucugug

SEQ ID NO: 1557252 - RNA, 17 nt, Human adenovirus C
aaaaacccaaagucaaa

SEQ ID NO: 1557253 - RNA, 16 nt, Human adenovirus C
aguaugauuaaaugag

SEQ ID NO: 1557254 - RNA, 18 nt, Human adenovirus C
ccccagguacagcccacc

SEQ ID NO: 1557255 - RNA, 13 nt, Human adenovirus C
gcccuuggaggag

SEQ ID NO: 1557256 - RNA, 12 nt, Human adenovirus C
ucgacaccaccc

SEQ ID NO: 1557257 - RNA, 23 nt, Human adenovirus C
cugcugugcguaacuugcuggaa

SEQ ID NO: 1557258 - RNA, 24 nt, Human adenovirus C
cugcuuauuacagcgcuugcuuug

SEQ ID NO: 1557259 - RNA, 17 nt, Human adenovirus C
aguugagggugguggcg

SEQ ID NO: 1557260 - RNA, 16 nt, Human adenovirus C
cgcccucuuccuccca

SEQ ID NO: 1557261 - RNA, 21 nt, Human adenovirus C
cgggcugcgcgcuggccaggg

SEQ ID NO: 1557262 - RNA, 15 nt, Human adenovirus C
acgcacgaaggaggc

SEQ ID NO: 1557263 - RNA, 17 nt, Human adenovirus C
augacaaacuuacccug

SEQ ID NO: 1557264 - RNA, 20 nt, Human adenovirus C
cuugcuggaacagagcucua

SEQ ID NO: 1557265 - RNA, 22 nt, Human adenovirus C
ugacacaccucgaccacugccg

SEQ ID NO: 1557266 - RNA, 14 nt, Human adenovirus C
gacuacaugaacaa

SEQ ID NO: 1557267 - RNA, 12 nt, Human adenovirus C
ccugagcagcug

SEQ ID NO: 1557268 - RNA, 20 nt, Human adenovirus C
gcccugcgcgucggccaggu

SEQ ID NO: 1557269 - RNA, 18 nt, Human adenovirus C
acgcuuguggcgcgcgag

SEQ ID NO: 1557270 - RNA, 14 nt, Human adenovirus C
auucccacgcccua

SEQ ID NO: 1557271 - RNA, 13 nt, Human adenovirus C
cagcaucaccucc

SEQ ID NO: 1557272 - RNA, 16 nt, Human adenovirus C
uggggugggugagcgc

SEQ ID NO: 1557273 - RNA, 19 nt, Human adenovirus C
gcgaggccauaggucaggc

SEQ ID NO: 1557274 - RNA, 19 nt, Human adenovirus C
cgagucuggugacuuggca

SEQ ID NO: 1557275 - RNA, 22 nt, Human adenovirus C
ccggcagcagccgcaggccaac

SEQ ID NO: 1557276 - RNA, 17 nt, Human adenovirus C
ccuuggcgcgcagcuug

SEQ ID NO: 1557277 - RNA, 14 nt, Human adenovirus C
augaguacgagcca

SEQ ID NO: 1557278 - RNA, 17 nt, Human adenovirus C
ccagcauaacaacucag

SEQ ID NO: 1557279 - RNA, 13 nt, Human adenovirus C
caucucgggccag

SEQ ID NO: 1557280 - RNA, 19 nt, Human adenovirus C
uaucugacaaccccaacac

SEQ ID NO: 1557281 - RNA, 14 nt, Human adenovirus C
aacgcgcggcggcg

SEQ ID NO: 1557282 - RNA, 14 nt, Human adenovirus C
ccguugaacaaaac

SEQ ID NO: 1557283 - RNA, 14 nt, Human adenovirus C
caaacuugcaagaa

SEQ ID NO: 1557284 - RNA, 19 nt, Human adenovirus C
ccgaagauagcggccgggc

SEQ ID NO: 1557285 - RNA, 14 nt, Human adenovirus C
cagggccaggucgg

SEQ ID NO: 1557286 - RNA, 14 nt, Human adenovirus C
gcgguuaggcugga

SEQ ID NO: 1557287 - RNA, 20 nt, Human adenovirus C
gagcgcuccacccgcaccua

SEQ ID NO: 1557288 - RNA, 16 nt, Human adenovirus C
cagauacccaccacca

SEQ ID NO: 1557289 - RNA, 17 nt, Human adenovirus C
cgggcggaggagaagcg

SEQ ID NO: 1557290 - RNA, 21 nt, Human adenovirus C
uccgggcugcgcgcuggccag

SEQ ID NO: 1557291 - RNA, 12 nt, Human adenovirus C
gucaucucugug

SEQ ID NO: 1557292 - RNA, 17 nt, Human adenovirus C
gacauauuuccugcaga

SEQ ID NO: 1557293 - RNA, 14 nt, Human adenovirus C
gcguuccggcagca

SEQ ID NO: 1557294 - RNA, 13 nt, Human adenovirus C
uccugccaggcuc

SEQ ID NO: 1557295 - RNA, 15 nt, Human adenovirus C
cgggcagcaggcgcg

SEQ ID NO: 1557296 - RNA, 20 nt, Human adenovirus C
aggugucaccguugaacaaa

SEQ ID NO: 1557297 - RNA, 11 nt, Human adenovirus C
acuuccagccc

SEQ ID NO: 1557298 - RNA, 19 nt, Human adenovirus C
gcgcaucccauucuccagu

SEQ ID NO: 1557299 - RNA, 13 nt, Human adenovirus C
gaccaaaacggug

SEQ ID NO: 1557300 - RNA, 20 nt, Human adenovirus C
cgaaggcucgcguccaggcc

SEQ ID NO: 1557301 - RNA, 13 nt, Human adenovirus C
cagacaaugcaga

SEQ ID NO: 1557302 - RNA, 19 nt, Human adenovirus C
cccgagggccgcuggcugc

SEQ ID NO: 1557303 - RNA, 15 nt, Human adenovirus C
acagccgccugagca

SEQ ID NO: 1557304 - RNA, 20 nt, Human adenovirus C
cagcagggcaaccugggcuc

SEQ ID NO: 1557305 - RNA, 20 nt, Human adenovirus C
cuugcaagcagugcagcuuc

SEQ ID NO: 1557306 - RNA, 13 nt, Human adenovirus C
cuuugugagcgca

SEQ ID NO: 1557307 - RNA, 22 nt, Human adenovirus C
ccaggcgcggcggcugcugcgc

SEQ ID NO: 1557308 - RNA, 19 nt, Human adenovirus C
ccguggagccugggcugga

SEQ ID NO: 1557309 - RNA, 22 nt, Human adenovirus C
agauaaugacugcaaauuuacu

SEQ ID NO: 1557310 - RNA, 23 nt, Human adenovirus C
cccaacucugguaucucagccgc

SEQ ID NO: 1557311 - RNA, 21 nt, Human adenovirus C
gggugauggugucgcgcucgc

SEQ ID NO: 1557312 - RNA, 20 nt, Human adenovirus C
cgccagggcuacgugcgcca

SEQ ID NO: 1557313 - RNA, 12 nt, Human adenovirus C
cucgucacaucc

SEQ ID NO: 1557314 - RNA, 17 nt, Human adenovirus C
ccaccaauguggaaaua

SEQ ID NO: 1557315 - RNA, 22 nt, Human adenovirus C
gguggcaccgggacugggcgug

SEQ ID NO: 1557316 - RNA, 23 nt, Human adenovirus C
cagguuggaauucuucaccagca

SEQ ID NO: 1557317 - RNA, 18 nt, Human adenovirus C
cccaaaaagggugcaugc

SEQ ID NO: 1557318 - RNA, 18 nt, Human adenovirus C
acaagcuacccacccagc

SEQ ID NO: 1557319 - RNA, 16 nt, Human adenovirus C
ccuagccgcgcguccc

SEQ ID NO: 1557320 - RNA, 15 nt, Human adenovirus C
auccgcggcagcucg

SEQ ID NO: 1557321 - RNA, 24 nt, Human adenovirus C
cgggcaagauuauacccacaaccu

SEQ ID NO: 1557322 - RNA, 20 nt, Human adenovirus C
caacucggccgccuguggac

SEQ ID NO: 1557323 - RNA, 13 nt, Human adenovirus C
acuuucuccaaag

SEQ ID NO: 1557324 - RNA, 21 nt, Human adenovirus C
agucugcagcgcugccaaaaa

SEQ ID NO: 1557325 - RNA, 12 nt, Human adenovirus C
cagcugccgcca

SEQ ID NO: 1557326 - RNA, 12 nt, Human adenovirus C
acgcugguggcu

SEQ ID NO: 1557327 - RNA, 24 nt, Human adenovirus C
caugguguguggcaacugcgagga

SEQ ID NO: 1557328 - RNA, 15 nt, Human adenovirus C
uccgggcacagcagc

SEQ ID NO: 1557329 - RNA, 18 nt, Human adenovirus C
ggacugguuccuggugca

SEQ ID NO: 1557330 - RNA, 21 nt, Human adenovirus C
acucccauggaucacaacccc

SEQ ID NO: 1557331 - RNA, 14 nt, Human adenovirus C
cugcucucacagau

SEQ ID NO: 1557332 - RNA, 23 nt, Human adenovirus C
caaagaucuugguugugggccau

SEQ ID NO: 1557333 - RNA, 14 nt, Human adenovirus C
cccgcgccacuggg

SEQ ID NO: 1557334 - RNA, 18 nt, Human adenovirus C
auugggguaacugacacc

SEQ ID NO: 1557335 - RNA, 13 nt, Human adenovirus C
cucugcaaccugg

SEQ ID NO: 1557336 - RNA, 15 nt, Human adenovirus C
gcaccuucgccccag

SEQ ID NO: 1557337 - RNA, 14 nt, Human adenovirus C
augguucugcagag

SEQ ID NO: 1557338 - RNA, 15 nt, Human adenovirus C
cagaacgaccacagc

SEQ ID NO: 1557339 - RNA, 16 nt, Human adenovirus C
auggaagacugggaca

SEQ ID NO: 1557340 - RNA, 15 nt, Human adenovirus C
ccucacccgcagcug

SEQ ID NO: 1557341 - RNA, 14 nt, Human adenovirus C
guuggagaucugca

SEQ ID NO: 1557342 - RNA, 16 nt, Human adenovirus C
ggcagucugcagcgcu

SEQ ID NO: 1557343 - RNA, 21 nt, Human adenovirus C
gaaaagcuuauuauucgccac

SEQ ID NO: 1557344 - RNA, 17 nt, Human adenovirus C
ugccaccucccucccaa

SEQ ID NO: 1557345 - RNA, 14 nt, Human adenovirus C
caacaccuagccua

SEQ ID NO: 1557346 - RNA, 23 nt, Human adenovirus C
accuccgcuccucaggcgccgcc

SEQ ID NO: 1557347 - RNA, 21 nt, Human adenovirus C
acucgcgccuguugcugcugc

SEQ ID NO: 1557348 - RNA, 23 nt, Human adenovirus C
ccgaaccuuuggacaccucccac

SEQ ID NO: 1557349 - RNA, 19 nt, Human adenovirus C
ggagcgcugggcguggugc

SEQ ID NO: 1557350 - RNA, 15 nt, Human adenovirus C
gccgcggucgcucac

SEQ ID NO: 1557351 - RNA, 19 nt, Human adenovirus C
guagaggggcucucugagu

SEQ ID NO: 1557352 - RNA, 19 nt, Human adenovirus C
ugaagaaaaccguuuccgg

SEQ ID NO: 1557353 - RNA, 19 nt, Human adenovirus C
cgccagacgccgcaccugc

SEQ ID NO: 1557354 - RNA, 17 nt, Human adenovirus C
gaaagcuuccgcaggcc

SEQ ID NO: 1557355 - RNA, 16 nt, Human adenovirus C
ugccaugaaccacccu

SEQ ID NO: 1557356 - RNA, 20 nt, Human adenovirus C
cuagcgagguaagcacuuac

SEQ ID NO: 1557357 - RNA, 11 nt, Human adenovirus C
gcaugaugcaa

SEQ ID NO: 1557358 - RNA, 21 nt, Human adenovirus C
cggcaguagucggugcucguc

SEQ ID NO: 1557359 - RNA, 17 nt, Human adenovirus C
gcgcagacgcgccagac

SEQ ID NO: 1557360 - RNA, 20 nt, Human adenovirus C
ccagaggagcugcugagccg

SEQ ID NO: 1557361 - RNA, 15 nt, Human adenovirus C
gcauggcgacuaccu

SEQ ID NO: 1557362 - RNA, 18 nt, Human adenovirus C
gggcugcgcgcuggccag

SEQ ID NO: 1557363 - RNA, 15 nt, Human adenovirus C
gacagaggacagcaa

SEQ ID NO: 1557364 - RNA, 22 nt, Human adenovirus C
cuggaaaaguccacccaaagcg

SEQ ID NO: 1557365 - RNA, 22 nt, Human adenovirus C
accagggcuucuacauuccaga

SEQ ID NO: 1557366 - RNA, 21 nt, Human adenovirus C
cggcaugcgucgugcgcacca

SEQ ID NO: 1557367 - RNA, 16 nt, Human adenovirus C
gaggcauucagggaug

SEQ ID NO: 1557368 - RNA, 23 nt, Human adenovirus C
aauguauuauaacagcacuggca

SEQ ID NO: 1557369 - RNA, 14 nt, Human adenovirus C
agcagagcgugagc

SEQ ID NO: 1557370 - RNA, 15 nt, Human adenovirus C
ucgcguccaggccag

SEQ ID NO: 1557371 - RNA, 17 nt, Human adenovirus C
agaagcugcagcugccg

SEQ ID NO: 1557372 - RNA, 14 nt, Human adenovirus C
acgugccgcgggga

SEQ ID NO: 1557373 - RNA, 13 nt, Human adenovirus C
uggccgcgggcug

SEQ ID NO: 1557374 - RNA, 11 nt, Human adenovirus C
aggaaggugau

SEQ ID NO: 1557375 - RNA, 13 nt, Human adenovirus C
cagcgaggaggag

SEQ ID NO: 1557376 - RNA, 13 nt, Human adenovirus C
gagccccucgccu

SEQ ID NO: 1557377 - RNA, 18 nt, Human adenovirus C
gcagcggugcagccacaa

SEQ ID NO: 1557378 - RNA, 21 nt, Human adenovirus C
uacuucccagagacgcccagg

SEQ ID NO: 1557379 - RNA, 22 nt, Human adenovirus C
agccaacuaccuugccuaccac

SEQ ID NO: 1557380 - RNA, 19 nt, Human adenovirus C
cccugcaaacaucagcccc

SEQ ID NO: 1557381 - RNA, 21 nt, Human adenovirus C
agccgccgccguuagcccaag

SEQ ID NO: 1557382 - RNA, 14 nt, Human adenovirus C
uggaccuggccaac

SEQ ID NO: 1557383 - RNA, 14 nt, Human adenovirus C
augcagccggugga

SEQ ID NO: 1557384 - RNA, 23 nt, Human adenovirus C
cgaugccgccaacgcgccuacca

SEQ ID NO: 1557385 - RNA, 17 nt, Human adenovirus C
aauacugcgcgcugacu

SEQ ID NO: 1557386 - RNA, 16 nt, Human adenovirus C
gaaaccucaccuccca

SEQ ID NO: 1557387 - RNA, 14 nt, Human adenovirus C
cuuaaccugaugcg

SEQ ID NO: 1557388 - RNA, 21 nt, Human adenovirus C
gccgcgucaugcacgcagcac

SEQ ID NO: 1557389 - RNA, 17 nt, Human adenovirus C
cuuacaauuaccucagg

SEQ ID NO: 1557390 - RNA, 16 nt, Human adenovirus C
ccaaucccgcccgcca

SEQ ID NO: 1557391 - RNA, 23 nt, Human adenovirus C
guccucggagccgcgcuccggag

SEQ ID NO: 1557392 - RNA, 15 nt, Human adenovirus C
uaucccccaaggccu

SEQ ID NO: 1557393 - RNA, 21 nt, Human adenovirus C
gccccccuucucccaccccca

SEQ ID NO: 1557394 - RNA, 19 nt, Human adenovirus C
ccuugcggcagucugcagc

SEQ ID NO: 1557395 - RNA, 22 nt, Human adenovirus C
acaccggggcgcgcugcggcug

SEQ ID NO: 1557396 - RNA, 22 nt, Human adenovirus C
ggccauuuuuacaaagcgcggg

SEQ ID NO: 1557397 - RNA, 19 nt, Human adenovirus C
cgcuugcaagcagugcagc

SEQ ID NO: 1557398 - RNA, 18 nt, Human adenovirus C
cagaaacuuccagcccau

SEQ ID NO: 1557399 - RNA, 18 nt, Human adenovirus C
ugcggcuggagcugccca

SEQ ID NO: 1557400 - RNA, 22 nt, Human adenovirus C
acagagggcugccugcacuucc

SEQ ID NO: 1557401 - RNA, 20 nt, Human adenovirus C
ccagauguugcgcagcggca

SEQ ID NO: 1557402 - RNA, 19 nt, Human adenovirus C
ggugcugcgcgcggagguu

SEQ ID NO: 1557403 - RNA, 16 nt, Human adenovirus C
ccgcugcagccaccgc

SEQ ID NO: 1557404 - RNA, 17 nt, Human adenovirus C
ugagcuccacgugccgg

SEQ ID NO: 1557405 - RNA, 20 nt, Human adenovirus C
ucagcugggaagaaagcagg

SEQ ID NO: 1557406 - RNA, 21 nt, Human adenovirus C
cagaugaaacgcgccagaccg

SEQ ID NO: 1557407 - RNA, 13 nt, Human adenovirus C
cacagaccugggc

SEQ ID NO: 1557408 - RNA, 19 nt, Human adenovirus C
uccgcuccucaggcgccgc

SEQ ID NO: 1557409 - RNA, 16 nt, Human adenovirus C
cugucauaccacugca

SEQ ID NO: 1557410 - RNA, 18 nt, Human adenovirus C
agaggccgaguccuacuu

SEQ ID NO: 1557411 - RNA, 21 nt, Human adenovirus C
uccacgcuggaagccaugcuc

SEQ ID NO: 1557412 - RNA, 17 nt, Human adenovirus C
caggaaagucccgcucc

SEQ ID NO: 1557413 - RNA, 16 nt, Human adenovirus C
cuuacuacaccuacuc

SEQ ID NO: 1557414 - RNA, 18 nt, Human adenovirus C
uccuaacucugcagaccu

SEQ ID NO: 1557415 - RNA, 16 nt, Human adenovirus C
gcccgagggccgcugg

SEQ ID NO: 1557416 - RNA, 19 nt, Human adenovirus C
uaggcgauuucggccauga

SEQ ID NO: 1557417 - RNA, 20 nt, Human adenovirus C
uauuuguugccuaaagcgca

SEQ ID NO: 1557418 - RNA, 20 nt, Human adenovirus C
auaugaguggguggaguuca

SEQ ID NO: 1557419 - RNA, 15 nt, Human adenovirus C
ccaaagcagaccaaa

SEQ ID NO: 1557420 - RNA, 21 nt, Human adenovirus C
gcggcugacgcggcggcagau

SEQ ID NO: 1557421 - RNA, 21 nt, Human adenovirus C
auggaaaaauaggaauuaaaa

SEQ ID NO: 1557422 - RNA, 12 nt, Human adenovirus C
gcuagcauuaag

SEQ ID NO: 1557423 - RNA, 14 nt, Human adenovirus C
cauggcgcagcugu

SEQ ID NO: 1557424 - RNA, 19 nt, Human adenovirus C
gggcguggcuuaagggugg

SEQ ID NO: 1557425 - RNA, 22 nt, Human adenovirus C
caccgguugcugcgcccacacc

SEQ ID NO: 1557426 - RNA, 23 nt, Human adenovirus C
ggcgccgcgcgcgggcaggagcu

SEQ ID NO: 1557427 - RNA, 21 nt, Human adenovirus C
agcuguccauggucuggagcu

SEQ ID NO: 1557428 - RNA, 20 nt, Human adenovirus C
cggugccaugauuacuaaac

SEQ ID NO: 1557429 - RNA, 15 nt, Human adenovirus C
gccggguggugcacg

SEQ ID NO: 1557430 - RNA, 15 nt, Human adenovirus C
acgccaucaucucug

SEQ ID NO: 1557431 - RNA, 13 nt, Human adenovirus C
cacccgccccguu

SEQ ID NO: 1557432 - RNA, 22 nt, Human adenovirus C
cucagcgaccgcgagcugaugc

SEQ ID NO: 1557433 - RNA, 15 nt, Human adenovirus C
cggccacuacccgga

SEQ ID NO: 1557434 - RNA, 13 nt, Human adenovirus C
uccguccugcagg

SEQ ID NO: 1557435 - RNA, 17 nt, Human adenovirus C
cagccgguggaggacau

SEQ ID NO: 1557436 - RNA, 23 nt, Human adenovirus C
ugagcccguguucugacagggcc

SEQ ID NO: 1557437 - RNA, 22 nt, Human adenovirus C
cugagcccguguucugacaggg

SEQ ID NO: 1557438 - RNA, 23 nt, Human adenovirus C
cagcguaaaucccacacugcagg

SEQ ID NO: 1557439 - RNA, 16 nt, Human adenovirus C
agggcccuggcuggca

SEQ ID NO: 1557440 - RNA, 21 nt, Human adenovirus C
uaccugugcuuugcucccaaa

SEQ ID NO: 1557441 - RNA, 15 nt, Human adenovirus C
gaugaagaagaggaa

SEQ ID NO: 1557442 - RNA, 20 nt, Human adenovirus C
ccaaagcagaccaaagcaaa

SEQ ID NO: 1557443 - RNA, 13 nt, Human adenovirus C
caagcacacagac

SEQ ID NO: 1557444 - RNA, 15 nt, Human adenovirus C
cuggacguuagcgcc

SEQ ID NO: 1557445 - RNA, 15 nt, Human adenovirus C
uccucaggggagcug

SEQ ID NO: 1557446 - RNA, 22 nt, Human adenovirus C
gucugaggguaacuccagggug

SEQ ID NO: 1557447 - RNA, 10 nt, Human adenovirus C
gccugcuggg

SEQ ID NO: 1557448 - RNA, 13 nt, Human adenovirus C
auacccaccacca

SEQ ID NO: 1557449 - RNA, 16 nt, Human adenovirus C
ggccgccgcagcagcc

SEQ ID NO: 1557450 - RNA, 23 nt, Human adenovirus C
guucccagcaucgcuacaaccuc

SEQ ID NO: 1557451 - RNA, 15 nt, Human adenovirus C
gucaugucuuuccac

SEQ ID NO: 1557452 - RNA, 18 nt, Human adenovirus C
cggccaaucaagcaggug

SEQ ID NO: 1557453 - RNA, 23 nt, Human adenovirus C
cuuggcacccaccgugcagcuga

SEQ ID NO: 1557454 - RNA, 21 nt, Human adenovirus C
ggaggagcaacagcaggagga

SEQ ID NO: 1557455 - RNA, 15 nt, Human adenovirus C
gcucccaccaugcgc

SEQ ID NO: 1557456 - RNA, 18 nt, Human adenovirus C
cacgaucuuggccuugcu

SEQ ID NO: 1557457 - RNA, 15 nt, Human adenovirus C
gcaauaacacaggcu

SEQ ID NO: 1557458 - RNA, 15 nt, Human adenovirus C
ggcuauaggacugau

SEQ ID NO: 1557459 - RNA, 16 nt, Human adenovirus C
gaugcugaccugcucg

SEQ ID NO: 1557460 - RNA, 14 nt, Human adenovirus C
cugcagcugccgcc

SEQ ID NO: 1557461 - RNA, 21 nt, Human adenovirus C
acagguggagcugaaauauga

SEQ ID NO: 1557462 - RNA, 15 nt, Human adenovirus C
cgagcaggcagaggc

SEQ ID NO: 1557463 - RNA, 14 nt, Human adenovirus C
cuguuuugcagcag

SEQ ID NO: 1557464 - RNA, 18 nt, Human adenovirus C
cgcagcccuaucagcagc

SEQ ID NO: 1557465 - RNA, 15 nt, Human adenovirus C
uagugcagcacagca

SEQ ID NO: 1557466 - RNA, 22 nt, Human adenovirus C
caaacucuucgcggucuuucca

SEQ ID NO: 1557467 - RNA, 19 nt, Human adenovirus C
caacgagcgcuccguggcc

SEQ ID NO: 1557468 - RNA, 19 nt, Human adenovirus C
guuccucacagaccuguau

SEQ ID NO: 1557469 - RNA, 17 nt, Human adenovirus C
gccgugccaaccgcagc

SEQ ID NO: 1557470 - RNA, 17 nt, Human adenovirus C
gcuacaagcuacccacc

SEQ ID NO: 1557471 - RNA, 13 nt, Human adenovirus C
gcggcgaccugaa

SEQ ID NO: 1557472 - RNA, 19 nt, Human adenovirus C
gcuuauguuuguuugccuu

SEQ ID NO: 1557473 - RNA, 18 nt, Human adenovirus C
cgggcaggagcuggugcu

SEQ ID NO: 1557474 - RNA, 14 nt, Human adenovirus C
ucacuccacaggcu

SEQ ID NO: 1557475 - RNA, 16 nt, Human adenovirus C
ggugagcgcggcgcca

SEQ ID NO: 1557476 - RNA, 13 nt, Human adenovirus C
gagggacaggcuu

SEQ ID NO: 1557477 - RNA, 13 nt, Human adenovirus C
caagacuacucaa

SEQ ID NO: 1557478 - RNA, 20 nt, Human adenovirus C
uccccuccgguggcgugguc

SEQ ID NO: 1557479 - RNA, 16 nt, Human adenovirus C
accgcgucacgcacga

SEQ ID NO: 1557480 - RNA, 17 nt, Human adenovirus C
cuggaggcagcuggggc

SEQ ID NO: 1557481 - RNA, 17 nt, Human adenovirus C
caucgaggucacccacu

SEQ ID NO: 1557482 - RNA, 17 nt, Human adenovirus C
cucggaguaccugagcc

SEQ ID NO: 1557483 - RNA, 14 nt, Human adenovirus C
cacggcucgcgccc

SEQ ID NO: 1557484 - RNA, 22 nt, Human adenovirus C
agugcuuguuaccguggagcuu

SEQ ID NO: 1557485 - RNA, 16 nt, Human adenovirus C
cgaggccguggcgcag

SEQ ID NO: 1557486 - RNA, 17 nt, Human adenovirus C
uugcaagacagaaacac

SEQ ID NO: 1557487 - RNA, 18 nt, Human adenovirus C
uuaaucaaacucacagaa

SEQ ID NO: 1557488 - RNA, 16 nt, Human adenovirus C
ucccugggaucaggcu

SEQ ID NO: 1557489 - RNA, 17 nt, Human adenovirus C
agcagacggugaaccag

SEQ ID NO: 1557490 - RNA, 19 nt, Human adenovirus C
gaagggcacgagcugcuuc

SEQ ID NO: 1557491 - RNA, 18 nt, Human adenovirus C
gacugcgguauaaugguu

SEQ ID NO: 1557492 - RNA, 22 nt, Human adenovirus C
gucccagcguuugacgcugcgg

SEQ ID NO: 1557493 - RNA, 19 nt, Human adenovirus C
gagguugcuacgggcgggc

SEQ ID NO: 1557494 - RNA, 21 nt, Human adenovirus C
aaagcuagcccugcaaacauc

SEQ ID NO: 1557495 - RNA, 19 nt, Human adenovirus C
aggaggacuuugagcccga

SEQ ID NO: 1557496 - RNA, 13 nt, Human adenovirus C
agaucuuauucca

SEQ ID NO: 1557497 - RNA, 18 nt, Human adenovirus C
guucgagucucgggccgg

SEQ ID NO: 1557498 - RNA, 22 nt, Human adenovirus C
caugcuauaccccauacccgcc

SEQ ID NO: 1557499 - RNA, 24 nt, Human adenovirus C
gcguuucagccccccggcgcccgc

SEQ ID NO: 1557500 - RNA, 15 nt, Human adenovirus C
cuccagggugcgcca

SEQ ID NO: 1557501 - RNA, 19 nt, Human adenovirus C
uaaaugccaaccuauggag

SEQ ID NO: 1557502 - RNA, 17 nt, Human adenovirus C
gcagaugggagcugucc

SEQ ID NO: 1557503 - RNA, 18 nt, Human adenovirus C
gaagaucuggaaggugcu

SEQ ID NO: 1557504 - RNA, 23 nt, Human adenovirus C
gaaggcucgcguccaggccagca

SEQ ID NO: 1557505 - RNA, 15 nt, Human adenovirus C
cagcguagucugggu

SEQ ID NO: 1557506 - RNA, 19 nt, Human adenovirus C
agcauaguggugcaggagc

SEQ ID NO: 1557507 - RNA, 16 nt, Human adenovirus C
ccggcgccagcaccug

SEQ ID NO: 1557508 - RNA, 16 nt, Human adenovirus C
cugcgcgucggccagg

SEQ ID NO: 1557509 - RNA, 20 nt, Human adenovirus C
uuaagaaaugccuguuugaa

SEQ ID NO: 1557510 - RNA, 15 nt, Human adenovirus C
gcgcgggcaggagcu

SEQ ID NO: 1557511 - RNA, 15 nt, Human adenovirus C
agugcccgcugucau

SEQ ID NO: 1557512 - RNA, 21 nt, Human adenovirus C
cacuaguauugccacugccac

SEQ ID NO: 1557513 - RNA, 18 nt, Human adenovirus C
agcaaggccugcccacca

SEQ ID NO: 1557514 - RNA, 15 nt, Human adenovirus C
ccucaggggagcuga

SEQ ID NO: 1557515 - RNA, 15 nt, Human adenovirus C
ucaacuaacauaaac

SEQ ID NO: 1557516 - RNA, 15 nt, Human adenovirus C
cacugcagcaggugc

SEQ ID NO: 1557517 - RNA, 20 nt, Human adenovirus C
gucccuaaccaugacuuuga

SEQ ID NO: 1557518 - RNA, 16 nt, Human adenovirus C
gaggggcagugcagac

SEQ ID NO: 1557519 - RNA, 23 nt, Human adenovirus C
agcgguguuccgcgguccuccuc

SEQ ID NO: 1557520 - RNA, 19 nt, Human adenovirus C
gaccgugguuugcaacugu

SEQ ID NO: 1557521 - RNA, 23 nt, Human adenovirus C
acuggucuugucaugccuggggu

SEQ ID NO: 1557522 - RNA, 15 nt, Human adenovirus C
gcuguauccaaagcu

SEQ ID NO: 1557523 - RNA, 23 nt, Human adenovirus C
cccugcaaacaucagccccccuc

SEQ ID NO: 1557524 - RNA, 15 nt, Human adenovirus C
cugacaaagcccaag

SEQ ID NO: 1557525 - RNA, 20 nt, Human adenovirus C
caugucuaugcccaggcucc

SEQ ID NO: 1557526 - RNA, 17 nt, Human adenovirus C
cgaggaugaagaagagg

SEQ ID NO: 1557527 - RNA, 18 nt, Human adenovirus C
cagucugcagcgcugcca

SEQ ID NO: 1557528 - RNA, 22 nt, Human adenovirus C
gagaacuccaacgcggcagccg

SEQ ID NO: 1557529 - RNA, 12 nt, Human adenovirus C
agagagcugcag

SEQ ID NO: 1557530 - RNA, 23 nt, Human adenovirus C
gacgcguugcaagagcgcagcga

SEQ ID NO: 1557531 - RNA, 19 nt, Human adenovirus C
uaacgcuggaccugccucc

SEQ ID NO: 1557532 - RNA, 23 nt, Human adenovirus C
gccgcaggccaaccggcucuccg

SEQ ID NO: 1557533 - RNA, 16 nt, Human adenovirus C
cagagcuguccuauca

SEQ ID NO: 1557534 - RNA, 15 nt, Human adenovirus C
ccgcaacuucagacu

SEQ ID NO: 1557535 - RNA, 22 nt, Human adenovirus C
ccaaccgcagccgagcggacaa

SEQ ID NO: 1557536 - RNA, 13 nt, Human adenovirus C
ugcuuuccugagc

SEQ ID NO: 1557537 - RNA, 14 nt, Human adenovirus C
agugcuuugcccgc

SEQ ID NO: 1557538 - RNA, 18 nt, Human adenovirus C
gagggcgagggccuggcg

SEQ ID NO: 1557539 - RNA, 16 nt, Human adenovirus C
agcggggggcuucuga

SEQ ID NO: 1557540 - RNA, 20 nt, Human adenovirus C
uccacgggcgcaggguccuc

SEQ ID NO: 1557541 - RNA, 15 nt, Human adenovirus C
ccgcccgcgccugcu

SEQ ID NO: 1557542 - RNA, 19 nt, Human adenovirus C
uccgcauaccccgcgccac

SEQ ID NO: 1557543 - RNA, 11 nt, Human adenovirus C
uugaagacaug

SEQ ID NO: 1557544 - RNA, 12 nt, Human adenovirus C
uuguugcuacau

SEQ ID NO: 1557545 - RNA, 21 nt, Human adenovirus C
aacuggugcuuauggugggag

SEQ ID NO: 1557546 - RNA, 14 nt, Human adenovirus C
auggccugcugcac

SEQ ID NO: 1557547 - RNA, 19 nt, Human adenovirus C
caagagcaagagcagcggc

SEQ ID NO: 1557548 - RNA, 13 nt, Human adenovirus C
ggugcgcuugagg

SEQ ID NO: 1557549 - RNA, 18 nt, Human adenovirus C
aagccgcucauggcgcag

SEQ ID NO: 1557550 - RNA, 15 nt, Human adenovirus C
gccacaucuucucuu

SEQ ID NO: 1557551 - RNA, 21 nt, Human adenovirus C
acuuggugcuggccugcaccc

SEQ ID NO: 1557552 - RNA, 16 nt, Human adenovirus C
gaagaaggaagagcag

SEQ ID NO: 1557553 - RNA, 13 nt, Human adenovirus C
gacuuugugccca

SEQ ID NO: 1557554 - RNA, 16 nt, Human adenovirus C
gugacaaagagacgcu

SEQ ID NO: 1557555 - RNA, 22 nt, Human adenovirus C
ccuuuucuggaccucccggcca

SEQ ID NO: 1557556 - RNA, 16 nt, Human adenovirus C
cgaccggcaaggcaau

SEQ ID NO: 1557557 - RNA, 22 nt, Human adenovirus C
gcgcgaaaagaaccugccuccg

SEQ ID NO: 1557558 - RNA, 16 nt, Human adenovirus C
ggaacauucccagcug

SEQ ID NO: 1557559 - RNA, 14 nt, Human adenovirus C
cgaugagcagcugg

SEQ ID NO: 1557560 - RNA, 13 nt, Human adenovirus C
acucugcagaccu

SEQ ID NO: 1557561 - RNA, 20 nt, Human adenovirus C
gcuggcgguagaggggccag

SEQ ID NO: 1557562 - RNA, 16 nt, Human adenovirus C
gcggcggcggcaggag

SEQ ID NO: 1557563 - RNA, 14 nt, Human adenovirus C
caucaucucuguca

SEQ ID NO: 1557564 - RNA, 15 nt, Human adenovirus C
cgagccaggugagcu

SEQ ID NO: 1557565 - RNA, 14 nt, Human adenovirus C
gauguuaacauggu

SEQ ID NO: 1557566 - RNA, 19 nt, Human adenovirus C
caccuguucucaccgcgcg

SEQ ID NO: 1557567 - RNA, 19 nt, Human adenovirus C
gcaucccuuuucuacgggu

SEQ ID NO: 1557568 - RNA, 17 nt, Human adenovirus C
ccagcaauaacacaggc

SEQ ID NO: 1557569 - RNA, 22 nt, Human adenovirus C
agcgacacccaagggugcagcu

SEQ ID NO: 1557570 - RNA, 14 nt, Human adenovirus C
gcagaggcggcgcu

SEQ ID NO: 1557571 - RNA, 16 nt, Human adenovirus C
cuugaggaggaggaag

SEQ ID NO: 1557572 - RNA, 13 nt, Human adenovirus C
gcuagguccaggu

SEQ ID NO: 1557573 - RNA, 17 nt, Human adenovirus C
cguggcuuaaggguggg

SEQ ID NO: 1557574 - RNA, 16 nt, Human adenovirus C
cgcugaccugcgcugg

SEQ ID NO: 1557575 - RNA, 15 nt, Human adenovirus C
gcaccuacgcacgac

SEQ ID NO: 1557576 - RNA, 15 nt, Human adenovirus C
cuugacauuggcugg

SEQ ID NO: 1557577 - RNA, 21 nt, Human adenovirus C
cccguagaggagccuccaccg

SEQ ID NO: 1557578 - RNA, 17 nt, Human adenovirus C
cggccugguaggcgcag

SEQ ID NO: 1557579 - RNA, 19 nt, Human adenovirus C
auuaacgaggaugggcagg

SEQ ID NO: 1557580 - RNA, 21 nt, Human adenovirus C
ggguguucuugcuggucaggc

SEQ ID NO: 1557581 - RNA, 20 nt, Human adenovirus C
acuucggcugcuuguccuug

SEQ ID NO: 1557582 - RNA, 22 nt, Human adenovirus C
ccacgugaccggguguuccuga

SEQ ID NO: 1557583 - RNA, 18 nt, Human adenovirus C
gucuugcauacggccgcc

SEQ ID NO: 1557584 - RNA, 19 nt, Human adenovirus C
auguucagauacaugggca

SEQ ID NO: 1557585 - RNA, 21 nt, Human adenovirus C
auaugcccuacauccuuccau

SEQ ID NO: 1557586 - RNA, 24 nt, Human adenovirus C
cggggcaaagaagcgcuccgacca

SEQ ID NO: 1557587 - RNA, 17 nt, Human adenovirus C
gagucgcgcagcuuguu

SEQ ID NO: 1557588 - RNA, 17 nt, Human adenovirus C
gccccccggcgcccgcg

SEQ ID NO: 1557589 - RNA, 20 nt, Human adenovirus C
uggcgaccccucauaaacac

SEQ ID NO: 1557590 - RNA, 14 nt, Human adenovirus C
cacgggcggcggcc

SEQ ID NO: 1557591 - RNA, 17 nt, Human adenovirus C
uggcuugagacgcgcga

SEQ ID NO: 1557592 - RNA, 21 nt, Human adenovirus C
aacaucgcgcagaugggagcu

SEQ ID NO: 1557593 - RNA, 13 nt, Human adenovirus C
gcgcuccauggcc

SEQ ID NO: 1557594 - RNA, 22 nt, Human adenovirus C
cguagaggagccuccaccggcc

SEQ ID NO: 1557595 - RNA, 20 nt, Human adenovirus C
cugcuagaguugcaacagcg

SEQ ID NO: 1557596 - RNA, 15 nt, Human adenovirus C
aggagcugaggcccg

SEQ ID NO: 1557597 - RNA, 14 nt, Human adenovirus C
augagcagcuggcg

SEQ ID NO: 1557598 - RNA, 17 nt, Human adenovirus C
aacagcacuggcaacau

SEQ ID NO: 1557599 - RNA, 22 nt, Human adenovirus C
agucucacgcucgcuugguccu

SEQ ID NO: 1557600 - RNA, 12 nt, Human adenovirus C
gccuggaggagc

SEQ ID NO: 1557601 - RNA, 20 nt, Human adenovirus C
gcaagcuaaugauggccgca

SEQ ID NO: 1557602 - RNA, 16 nt, Human adenovirus C
cuuccagcccaugagc

SEQ ID NO: 1557603 - RNA, 21 nt, Human adenovirus C
guaucgacccgcgagcuuaga

SEQ ID NO: 1557604 - RNA, 16 nt, Human adenovirus C
cugugcuacaccuggc

SEQ ID NO: 1557605 - RNA, 20 nt, Human adenovirus C
aggagcgcagcuugagccug

SEQ ID NO: 1557606 - RNA, 17 nt, Human adenovirus C
ccgggagagggggcagg

SEQ ID NO: 1557607 - RNA, 17 nt, Human adenovirus C
cagcuuguugaccagcu

SEQ ID NO: 1557608 - RNA, 21 nt, Human adenovirus C
cggcgccgcgcgcgggcagga

SEQ ID NO: 1557609 - RNA, 12 nt, Human adenovirus C
cggaccugggcu

SEQ ID NO: 1557610 - RNA, 22 nt, Human adenovirus C
ugcugaguauaauaaauacaga

SEQ ID NO: 1557611 - RNA, 14 nt, Human adenovirus C
acauuacuggaacu

SEQ ID NO: 1557612 - RNA, 14 nt, Human adenovirus C
cgccugcaggaauc

SEQ ID NO: 1557613 - RNA, 20 nt, Human adenovirus C
aggugaaaaucguaaaacuu

SEQ ID NO: 1557614 - RNA, 15 nt, Human adenovirus C
cgcgcuggccagggu

SEQ ID NO: 1557615 - RNA, 16 nt, Human adenovirus C
gagacggcggaggcgc

SEQ ID NO: 1557616 - RNA, 23 nt, Human adenovirus C
cuacagccugagcguaaccagac

SEQ ID NO: 1557617 - RNA, 21 nt, Human adenovirus C
cgaggagcugaggcccgauca

SEQ ID NO: 1557618 - RNA, 20 nt, Human adenovirus C
acgcggguuuggcagggcga

SEQ ID NO: 1557619 - RNA, 12 nt, Human adenovirus C
acuaccacgccc

SEQ ID NO: 1557620 - RNA, 13 nt, Human adenovirus C
ccuauuaaaaaac

SEQ ID NO: 1557621 - RNA, 22 nt, Human adenovirus C
gccugcaaaauuuccaacgugg

SEQ ID NO: 1557622 - RNA, 12 nt, Human adenovirus C
ucccuugccgug

SEQ ID NO: 1557623 - RNA, 22 nt, Human adenovirus C
ggcggcaacaacaguggcagcg

SEQ ID NO: 1557624 - RNA, 16 nt, Human adenovirus C
accccccacccuugcc

SEQ ID NO: 1557625 - RNA, 15 nt, Human adenovirus C
uccugagcagcugcg

SEQ ID NO: 1557626 - RNA, 20 nt, Human adenovirus C
uugcauacggccgccagagc

SEQ ID NO: 1557627 - RNA, 22 nt, Human adenovirus C
cucagcgccucccaaaagacau

SEQ ID NO: 1557628 - RNA, 17 nt, Human adenovirus C
ggccaguguuugagcac

SEQ ID NO: 1557629 - RNA, 23 nt, Human adenovirus C
cuggggugaugcaguagaaggua

SEQ ID NO: 1557630 - RNA, 12 nt, Human adenovirus C
ccuccgcccugc

SEQ ID NO: 1557631 - RNA, 11 nt, Human adenovirus C
gguggcggcga

SEQ ID NO: 1557632 - RNA, 17 nt, Human adenovirus C
cugcucugcucggaaga

SEQ ID NO: 1557633 - RNA, 16 nt, Human adenovirus C
ugggcuaaucuugguu

SEQ ID NO: 1557634 - RNA, 16 nt, Human adenovirus C
ggaggacuuugagccc

SEQ ID NO: 1557635 - RNA, 22 nt, Human adenovirus C
ccacucucgcaaggccuggcca

SEQ ID NO: 1557636 - RNA, 13 nt, Human adenovirus C
cucgaccacugcc

SEQ ID NO: 1557637 - RNA, 21 nt, Human adenovirus C
guaagcgguuaggcuggaaag

SEQ ID NO: 1557638 - RNA, 15 nt, Human adenovirus C
gccgggucagggcgc

SEQ ID NO: 1557639 - RNA, 16 nt, Human adenovirus C
agcccaacccgcgccu

SEQ ID NO: 1557640 - RNA, 14 nt, Human adenovirus C
caaacgaggaacaa

SEQ ID NO: 1557641 - RNA, 14 nt, Human adenovirus C
cuaaaaaacuggaa

SEQ ID NO: 1557642 - RNA, 14 nt, Human adenovirus C
gaagaagaggaaga

SEQ ID NO: 1557643 - RNA, 14 nt, Human adenovirus C
aacgcgccuaccac

SEQ ID NO: 1557644 - RNA, 11 nt, Human adenovirus C
gggugcccuug

SEQ ID NO: 1557645 - RNA, 14 nt, Human adenovirus C
ucaucccuguggac

SEQ ID NO: 1557646 - RNA, 14 nt, Human adenovirus C
gccggcgccccaga

SEQ ID NO: 1557647 - RNA, 16 nt, Human adenovirus C
agcggcggcagcagca

SEQ ID NO: 1557648 - RNA, 17 nt, Human adenovirus C
gaucacuuggugcuggc

SEQ ID NO: 1557649 - RNA, 13 nt, Human adenovirus C
gaccggcuggugg

SEQ ID NO: 1557650 - RNA, 14 nt, Human adenovirus C
aaagcaugaugcaa

SEQ ID NO: 1557651 - RNA, 14 nt, Human adenovirus C
aguugcauguggaa

SEQ ID NO: 1557652 - RNA, 19 nt, Human adenovirus C
agcaacaucaacaacagcu

SEQ ID NO: 1557653 - RNA, 19 nt, Human adenovirus C
gggauggcgcaggcggcgg

SEQ ID NO: 1557654 - RNA, 19 nt, Human adenovirus C
cagcagguuucugcccuga

SEQ ID NO: 1557655 - RNA, 14 nt, Human adenovirus C
caugaaagccuuga

SEQ ID NO: 1557656 - RNA, 23 nt, Human adenovirus C
gcugcgcgcggagguugcuggcg

SEQ ID NO: 1557657 - RNA, 16 nt, Human adenovirus C
acgggcccggugagcu

SEQ ID NO: 1557658 - RNA, 18 nt, Human adenovirus C
ccaccaguagcacuagua

SEQ ID NO: 1557659 - RNA, 23 nt, Human adenovirus C
gcucaagggcgaggcgcgccgcg

SEQ ID NO: 1557660 - RNA, 16 nt, Human adenovirus C
gccucggcgguggcag

SEQ ID NO: 1557661 - RNA, 15 nt, Human adenovirus C
gccgacuuggaggag

SEQ ID NO: 1557662 - RNA, 14 nt, Human adenovirus C
ccuucccaaaaagg

SEQ ID NO: 1557663 - RNA, 16 nt, Human adenovirus C
agcaguuccaggcggu

SEQ ID NO: 1557664 - RNA, 23 nt, Human adenovirus C
cagaccgucugaagacaccuuca

SEQ ID NO: 1557665 - RNA, 21 nt, Human adenovirus C
cagggaagaaacucuggugac

SEQ ID NO: 1557666 - RNA, 14 nt, Human adenovirus C
cacuuacuggcugc

SEQ ID NO: 1557667 - RNA, 15 nt, Human adenovirus C
cgcacccgccccccg

SEQ ID NO: 1557668 - RNA, 14 nt, Human adenovirus C
uucaucccugugga

SEQ ID NO: 1557669 - RNA, 14 nt, Human adenovirus C
caucucuacagccc

SEQ ID NO: 1557670 - RNA, 14 nt, Human adenovirus C
cugcagagccagcc

SEQ ID NO: 1557671 - RNA, 19 nt, Human adenovirus C
cugaggcccgaucacuugg

SEQ ID NO: 1557672 - RNA, 14 nt, Human adenovirus C
gagcgagguguggg

SEQ ID NO: 1557673 - RNA, 15 nt, Human adenovirus C
cggcgcugcagagcc

SEQ ID NO: 1557674 - RNA, 11 nt, Human adenovirus C
gaaagcuaaag

SEQ ID NO: 1557675 - RNA, 14 nt, Human adenovirus C
cagacaaugcagaa

SEQ ID NO: 1557676 - RNA, 18 nt, Human adenovirus C
caccuacgaugaccugga

SEQ ID NO: 1557677 - RNA, 23 nt, Human adenovirus C
gguaguuaagagagcugcagcug

SEQ ID NO: 1557678 - RNA, 17 nt, Human adenovirus C
gcuacaacguagcucag

SEQ ID NO: 1557679 - RNA, 20 nt, Human adenovirus C
cugcagggaagaccucgcac

SEQ ID NO: 1557680 - RNA, 20 nt, Human adenovirus C
gcuccucaggcgccgccggc

SEQ ID NO: 1557681 - RNA, 14 nt, Human adenovirus C
cacgucgcaccggc

SEQ ID NO: 1557682 - RNA, 17 nt, Human adenovirus C
cuuauccucaucugcag

SEQ ID NO: 1557683 - RNA, 15 nt, Human adenovirus C
gacacaugucgcccu

SEQ ID NO: 1557684 - RNA, 18 nt, Human adenovirus C
gacgcggugguggaggag

SEQ ID NO: 1557685 - RNA, 18 nt, Human adenovirus C
gaaaccucaccucccaaa

SEQ ID NO: 1557686 - RNA, 14 nt, Human adenovirus C
gcgcgucggccagg

SEQ ID NO: 1557687 - RNA, 17 nt, Human adenovirus C
cauggccggccacggcc

SEQ ID NO: 1557688 - RNA, 17 nt, Human adenovirus C
ccucuuguccugcaucu

SEQ ID NO: 1557689 - RNA, 15 nt, Human adenovirus C
acugcuaaaaauaac

SEQ ID NO: 1557690 - RNA, 20 nt, Human adenovirus C
ugcgcaggagcacagggaug

SEQ ID NO: 1557691 - RNA, 22 nt, Human adenovirus C
auguucucuucuuuuacaguau

SEQ ID NO: 1557692 - RNA, 20 nt, Human adenovirus C
gagcugaugcacagccugca

SEQ ID NO: 1557693 - RNA, 21 nt, Human adenovirus C
ucgagacgccgccucagccgc

SEQ ID NO: 1557694 - RNA, 17 nt, Human adenovirus C
ggaucuuaugccaggcc

SEQ ID NO: 1557695 - RNA, 17 nt, Human adenovirus C
caggcggucggccaugc

SEQ ID NO: 1557696 - RNA, 12 nt, Human adenovirus C
cucccgguacca

SEQ ID NO: 1557697 - RNA, 16 nt, Human adenovirus C
ccgggcuggugcaguu

SEQ ID NO: 1557698 - RNA, 13 nt, Human adenovirus C
gaccaaagcaaac

SEQ ID NO: 1557699 - RNA, 20 nt, Human adenovirus C
uaccggcaaccgccucagcu

SEQ ID NO: 1557700 - RNA, 13 nt, Human adenovirus C
uauguucccagcc

SEQ ID NO: 1557701 - RNA, 13 nt, Human adenovirus C
ucauccaugacag

SEQ ID NO: 1557702 - RNA, 17 nt, Human adenovirus C
gcauuggaacucuacaa

SEQ ID NO: 1557703 - RNA, 22 nt, Human adenovirus C
uggcccacaacacggccuccac

SEQ ID NO: 1557704 - RNA, 23 nt, Human adenovirus C
ccuuccgcuccacgagccagauc

SEQ ID NO: 1557705 - RNA, 22 nt, Human adenovirus C
ccaccgcaaugcgggccuccgu

SEQ ID NO: 1557706 - RNA, 23 nt, Human adenovirus C
ggccggaccugggcuggcggugg

SEQ ID NO: 1557707 - RNA, 23 nt, Human adenovirus C
caauuucggugucguugacggcg

SEQ ID NO: 1557708 - RNA, 17 nt, Human adenovirus C
ugcgggccaugagcugc

SEQ ID NO: 1557709 - RNA, 18 nt, Human adenovirus C
gcaggacccuggugcugc

SEQ ID NO: 1557710 - RNA, 23 nt, Human adenovirus C
cgcaucuugcgcuaugugcagca

SEQ ID NO: 1557711 - RNA, 17 nt, Human adenovirus C
ccccaaacucccaugga

SEQ ID NO: 1557712 - RNA, 20 nt, Human adenovirus C
gcaacccgcggugcuccucg

SEQ ID NO: 1557713 - RNA, 19 nt, Human adenovirus C
gagagggggcaggggcacg

SEQ ID NO: 1557714 - RNA, 15 nt, Human adenovirus C
ucaaacccagcuuca

SEQ ID NO: 1557715 - RNA, 16 nt, Human adenovirus C
ccagcgccugcacugc

SEQ ID NO: 1557716 - RNA, 15 nt, Human adenovirus C
ugcacgucuccugag

SEQ ID NO: 1557717 - RNA, 15 nt, Human adenovirus C
cugcgacgcguugca

SEQ ID NO: 1557718 - RNA, 19 nt, Human adenovirus C
ugcccuacauccuuccauc

SEQ ID NO: 1557719 - RNA, 20 nt, Human adenovirus C
cgaagcuauguccaagcgca

SEQ ID NO: 1557720 - RNA, 23 nt, Human adenovirus C
uaccugcuggauuuucuggccau

SEQ ID NO: 1557721 - RNA, 19 nt, Human adenovirus C
acugcgccugacacaccuc

SEQ ID NO: 1557722 - RNA, 22 nt, Human adenovirus C
acaaagcgcgguucacccuggc

SEQ ID NO: 1557723 - RNA, 14 nt, Human adenovirus C
uacuuaaaaucagu

SEQ ID NO: 1557724 - RNA, 13 nt, Human adenovirus C
ggauggcgcaggc

SEQ ID NO: 1557725 - RNA, 17 nt, Human adenovirus C
uuacugcugcuggaagg

SEQ ID NO: 1557726 - RNA, 21 nt, Human adenovirus C
gucagccgcgcgcuggggcag

SEQ ID NO: 1557727 - RNA, 15 nt, Human adenovirus C
ccggcgccagcaccu

SEQ ID NO: 1557728 - RNA, 23 nt, Human adenovirus C
caccgugcagcugaugguaccca

SEQ ID NO: 1557729 - RNA, 19 nt, Human adenovirus C
cagagaagaacaugccgca

SEQ ID NO: 1557730 - RNA, 12 nt, Human adenovirus C
ugaccagcucgg

SEQ ID NO: 1557731 - RNA, 17 nt, Human adenovirus C
ugcgcgagggacaggcu

SEQ ID NO: 1557732 - RNA, 20 nt, Human adenovirus C
cuagccauauauccauaccu

SEQ ID NO: 1557733 - RNA, 18 nt, Human adenovirus C
aggaggacuuugagcccg

SEQ ID NO: 1557734 - RNA, 19 nt, Human adenovirus C
ugcuuaaaagccaccugag

SEQ ID NO: 1557735 - RNA, 13 nt, Human adenovirus C
ugacggcgcggcc

SEQ ID NO: 1557736 - RNA, 21 nt, Human adenovirus C
cagacuauuuuuuccagacca

SEQ ID NO: 1557737 - RNA, 12 nt, Human adenovirus C
gccuggaggcaa

SEQ ID NO: 1557738 - RNA, 21 nt, Human adenovirus C
ccugcgccguagcgccauugc

SEQ ID NO: 1557739 - RNA, 19 nt, Human adenovirus C
ucccccguaacauccugca

SEQ ID NO: 1557740 - RNA, 22 nt, Human adenovirus C
gccugcugaaugcgcaggcggu

SEQ ID NO: 1557741 - RNA, 13 nt, Human adenovirus C
uaauucaccaccu

SEQ ID NO: 1557742 - RNA, 15 nt, Human adenovirus C
acgcagcaccuugcg

SEQ ID NO: 1557743 - RNA, 15 nt, Human adenovirus C
cgccaugggcuccag

SEQ ID NO: 1557744 - RNA, 19 nt, Human adenovirus C
ggcgauccuaacucugcag

SEQ ID NO: 1557745 - RNA, 16 nt, Human adenovirus C
gucauaccacugcaac

SEQ ID NO: 1557746 - RNA, 22 nt, Human adenovirus C
uucugaucagaugaugcaagac

SEQ ID NO: 1557747 - RNA, 18 nt, Human adenovirus C
acucgagacgccgccuca

SEQ ID NO: 1557748 - RNA, 22 nt, Human adenovirus C
gccgucgccagcccgugcuggc

SEQ ID NO: 1557749 - RNA, 12 nt, Human adenovirus C
cguaggugagcu

SEQ ID NO: 1557750 - RNA, 20 nt, Human adenovirus C
aacagcgccaaggcuaccgc

SEQ ID NO: 1557751 - RNA, 13 nt, Human adenovirus C
ucuccugcacguc

SEQ ID NO: 1557752 - RNA, 13 nt, Human adenovirus C
gaggauagggugg

SEQ ID NO: 1557753 - RNA, 20 nt, Human adenovirus C
cuuuuauguauaaauuucca

SEQ ID NO: 1557754 - RNA, 22 nt, Human adenovirus C
gcgacaggucaggcgggagcuc

SEQ ID NO: 1557755 - RNA, 20 nt, Human adenovirus C
cggcgcaccgggaggcgguc

SEQ ID NO: 1557756 - RNA, 13 nt, Human adenovirus C
ggugcgcggagcc

SEQ ID NO: 1557757 - RNA, 19 nt, Human adenovirus C
aaaacuacgucuuaaacug

SEQ ID NO: 1557758 - RNA, 17 nt, Human adenovirus C
ugccgccgccgccaccc

SEQ ID NO: 1557759 - RNA, 18 nt, Human adenovirus C
gaggcaaacgaggaacaa

SEQ ID NO: 1557760 - RNA, 13 nt, Human adenovirus C
uggugggcgccga

SEQ ID NO: 1557761 - RNA, 20 nt, Human adenovirus C
ccguuggagacugcagccuc

SEQ ID NO: 1557762 - RNA, 20 nt, Human adenovirus C
aaagcgcgggcggagggugc

SEQ ID NO: 1557763 - RNA, 16 nt, Human adenovirus C
gcgcccuggaggcagc

SEQ ID NO: 1557764 - RNA, 14 nt, Human adenovirus C
cggcgccagcaccu

SEQ ID NO: 1557765 - RNA, 13 nt, Human adenovirus C
guacccaacucca

SEQ ID NO: 1557766 - RNA, 21 nt, Human adenovirus C
auggcagcaaggccuggaaca

SEQ ID NO: 1557767 - RNA, 12 nt, Human adenovirus C
ugcugggccagc

SEQ ID NO: 1557768 - RNA, 17 nt, Human adenovirus C
ucuuggccuugcuagac

SEQ ID NO: 1557769 - RNA, 23 nt, Human adenovirus C
ccgcgcgcgcacacguggcggcc

SEQ ID NO: 1557770 - RNA, 23 nt, Human adenovirus C
gcuacaacguagcucagugcaac

SEQ ID NO: 1557771 - RNA, 14 nt, Human adenovirus C
cgcaccugccccua

SEQ ID NO: 1557772 - RNA, 12 nt, Human adenovirus C
ugcgcuuuucug

SEQ ID NO: 1557773 - RNA, 13 nt, Human adenovirus C
aggagcugaggcc

SEQ ID NO: 1557774 - RNA, 13 nt, Human adenovirus C
ccggcccaggggc

SEQ ID NO: 1557775 - RNA, 17 nt, Human adenovirus C
agcuugcccuuggagga

SEQ ID NO: 1557776 - RNA, 16 nt, Human adenovirus C
ugcccgccaccugcug

SEQ ID NO: 1557777 - RNA, 16 nt, Human adenovirus C
ugaaaauaaaaaacag

SEQ ID NO: 1557778 - RNA, 17 nt, Human adenovirus C
cgacgcguugcaagagc

SEQ ID NO: 1557779 - RNA, 16 nt, Human adenovirus C
cugcgcucccucaccc

SEQ ID NO: 1557780 - RNA, 18 nt, Human adenovirus C
caggccgucuacucccag

SEQ ID NO: 1557781 - RNA, 18 nt, Human adenovirus C
cagaccguaaaccugagc

SEQ ID NO: 1557782 - RNA, 15 nt, Human adenovirus C
aauuuuucuggaauu

SEQ ID NO: 1557783 - RNA, 23 nt, Human adenovirus C
uccgcaagcggcaacccuuccag

SEQ ID NO: 1557784 - RNA, 15 nt, Human adenovirus C
aggaggcacuaaagc

SEQ ID NO: 1557785 - RNA, 16 nt, Human adenovirus C
ucgcucccaccaugcg

SEQ ID NO: 1557786 - RNA, 17 nt, Human adenovirus C
uucugccacgaagaagu

SEQ ID NO: 1557787 - RNA, 12 nt, Human adenovirus C
gcgcuccauggc

SEQ ID NO: 1557788 - RNA, 23 nt, Human adenovirus C
aacaugguucugcagagcucucu

SEQ ID NO: 1557789 - RNA, 20 nt, Human adenovirus C
caaaccgaagauagcggccg

SEQ ID NO: 1557790 - RNA, 18 nt, Human adenovirus C
ggacccuggugcugccaa

SEQ ID NO: 1557791 - RNA, 23 nt, Human adenovirus C
auacugggacagucaggcagagg

SEQ ID NO: 1557792 - RNA, 14 nt, Human adenovirus C
cgucuagggcgcag

SEQ ID NO: 1557793 - RNA, 19 nt, Human adenovirus C
accgcgcacgucgcaccgg

SEQ ID NO: 1557794 - RNA, 15 nt, Human adenovirus C
uggaggaggcgccgc

SEQ ID NO: 1557795 - RNA, 13 nt, Human adenovirus C
ugagccuggcuga

SEQ ID NO: 1557796 - RNA, 15 nt, Human adenovirus C
gcggaggagaagcgc

SEQ ID NO: 1557797 - RNA, 22 nt, Human adenovirus C
aaaaugggcagcggucuuaccc

SEQ ID NO: 1557798 - RNA, 19 nt, Human adenovirus C
cuccacuuaaacucaggca

SEQ ID NO: 1557799 - RNA, 23 nt, Human adenovirus C
ucaaauauggaacauucccagcu

SEQ ID NO: 1557800 - RNA, 15 nt, Human adenovirus C
auaaggugggggucu

SEQ ID NO: 1557801 - RNA, 14 nt, Human adenovirus C
cccgggaccagcgg

SEQ ID NO: 1557802 - RNA, 16 nt, Human adenovirus C
gggcguguggcagcaa

SEQ ID NO: 1557803 - RNA, 13 nt, Human adenovirus C
aaagucaaacaua

SEQ ID NO: 1557804 - RNA, 13 nt, Human adenovirus C
gcgggguggugga

SEQ ID NO: 1557805 - RNA, 14 nt, Human adenovirus C
cuccaugcccuucu

SEQ ID NO: 1557806 - RNA, 19 nt, Human adenovirus C
cacaccucgaccacugccg

SEQ ID NO: 1557807 - RNA, 17 nt, Human adenovirus C
ugccagacaugaugcaa

SEQ ID NO: 1557808 - RNA, 20 nt, Human adenovirus C
agcgcaaccuaaaggagcug

SEQ ID NO: 1557809 - RNA, 16 nt, Human adenovirus C
gcuccuaacuccugug

SEQ ID NO: 1557810 - RNA, 12 nt, Human adenovirus C
acgcgccagacc

SEQ ID NO: 1557811 - RNA, 14 nt, Human adenovirus C
cuauguaaacuccu

SEQ ID NO: 1557812 - RNA, 14 nt, Human adenovirus C
agcuugaucugcug

SEQ ID NO: 1557813 - RNA, 14 nt, Human adenovirus C
augagguacaugau

SEQ ID NO: 1557814 - RNA, 22 nt, Human adenovirus C
aagaccauucacguagccagcc

SEQ ID NO: 1557815 - RNA, 14 nt, Human adenovirus C
ucgucauaggccau

SEQ ID NO: 1557816 - RNA, 14 nt, Human adenovirus C
cgcgcgucgcaccg

SEQ ID NO: 1557817 - RNA, 13 nt, Human adenovirus C
aucuccuaacugc

SEQ ID NO: 1557818 - RNA, 14 nt, Human adenovirus C
cccuggugcugcca

SEQ ID NO: 1557819 - RNA, 19 nt, Human adenovirus C
cagacuauuuuuuccagac

SEQ ID NO: 1557820 - RNA, 17 nt, Human adenovirus C
gagggaccugagcgagu

SEQ ID NO: 1557821 - RNA, 16 nt, Human adenovirus C
guguggcaacugcgag

SEQ ID NO: 1557822 - RNA, 20 nt, Human adenovirus C
acgucaucuccagcggccac

SEQ ID NO: 1557823 - RNA, 18 nt, Human adenovirus C
cgguugccucggcggugg

SEQ ID NO: 1557824 - RNA, 21 nt, Human adenovirus C
cgguccuuugcaaguagcaca

SEQ ID NO: 1557825 - RNA, 15 nt, Human adenovirus C
gugaccuuccgcucc

SEQ ID NO: 1557826 - RNA, 17 nt, Human adenovirus C
aaagacaaucuuuuugu

SEQ ID NO: 1557827 - RNA, 16 nt, Human adenovirus C
ccgugcuuucacuuuc

SEQ ID NO: 1557828 - RNA, 21 nt, Human adenovirus C
ugacaaggucaacgcuggugg

SEQ ID NO: 1557829 - RNA, 15 nt, Human adenovirus C
caccgggacugggcg

SEQ ID NO: 1557830 - RNA, 22 nt, Human adenovirus C
uggcgguagugggucuagcugc

SEQ ID NO: 1557831 - RNA, 13 nt, Human adenovirus C
agccggcggcgcg

SEQ ID NO: 1557832 - RNA, 21 nt, Human adenovirus C
caaccuccgcuccucaggcgc

SEQ ID NO: 1557833 - RNA, 23 nt, Human adenovirus C
gcggccauucagaccguggugcg

SEQ ID NO: 1557834 - RNA, 17 nt, Human adenovirus C
acagcgaggaggagcgc

SEQ ID NO: 1557835 - RNA, 14 nt, Human adenovirus C
cgcaacaccacugc

SEQ ID NO: 1557836 - RNA, 13 nt, Human adenovirus C
cggcgggcggugg

SEQ ID NO: 1557837 - RNA, 16 nt, Human adenovirus C
augccauagaugccau

SEQ ID NO: 1557838 - RNA, 17 nt, Human adenovirus C
ugguacuucccagagac

SEQ ID NO: 1557839 - RNA, 22 nt, Human adenovirus C
cugacaaccccaacaccuacga

SEQ ID NO: 1557840 - RNA, 23 nt, Human adenovirus C
gagcccgagguccgcgugcggcc

SEQ ID NO: 1557841 - RNA, 15 nt, Human adenovirus C
agaccaguagacaag

SEQ ID NO: 1557842 - RNA, 21 nt, Human adenovirus C
uugcaacagcgcgagcaggca

SEQ ID NO: 1557843 - RNA, 23 nt, Human adenovirus C
agaccgucugaagacaccuucaa

SEQ ID NO: 1557844 - RNA, 22 nt, Human adenovirus C
ggaguucacgcugcccgagggc

SEQ ID NO: 1557845 - RNA, 14 nt, Human adenovirus C
gccuggcugacaag

SEQ ID NO: 1557846 - RNA, 23 nt, Human adenovirus C
uggcauuagcggggugguggacc

SEQ ID NO: 1557847 - RNA, 13 nt, Human adenovirus C
gcgccccccuccu

SEQ ID NO: 1557848 - RNA, 16 nt, Human adenovirus C
acauaaacuauaacag

SEQ ID NO: 1557849 - RNA, 18 nt, Human adenovirus C
gcagccacaacgcgcagc

SEQ ID NO: 1557850 - RNA, 18 nt, Human adenovirus C
cuccuuugucuggagaaa

SEQ ID NO: 1557851 - RNA, 16 nt, Human adenovirus C
cgaugauucgcaccgc

SEQ ID NO: 1557852 - RNA, 17 nt, Human adenovirus C
agcggcaacccuuccag

SEQ ID NO: 1557853 - RNA, 17 nt, Human adenovirus C
cagaaggugaccgugcc

SEQ ID NO: 1557854 - RNA, 17 nt, Human adenovirus C
gcgcucaaaaacaugcu

SEQ ID NO: 1557855 - RNA, 18 nt, Human adenovirus C
gagccccgggcuggugca

SEQ ID NO: 1557856 - RNA, 16 nt, Human adenovirus C
cugcgcacgcccuucu

SEQ ID NO: 1557857 - RNA, 13 nt, Human adenovirus C
caacgccacaaca

SEQ ID NO: 1557858 - RNA, 15 nt, Human adenovirus C
cuacauuucugggaa

SEQ ID NO: 1557859 - RNA, 17 nt, Human adenovirus C
ccgcgcgcccuggggcg

SEQ ID NO: 1557860 - RNA, 18 nt, Human adenovirus C
gucgccgucgccagcccg

SEQ ID NO: 1557861 - RNA, 17 nt, Human adenovirus C
ugcccuucucccacgca

SEQ ID NO: 1557862 - RNA, 14 nt, Human adenovirus C
cugcugcagccgca

SEQ ID NO: 1557863 - RNA, 22 nt, Human adenovirus C
gagcugcccaagacuacucaac

SEQ ID NO: 1557864 - RNA, 18 nt, Human adenovirus C
ugacgcguuccggcagca

SEQ ID NO: 1557865 - RNA, 12 nt, Human adenovirus C
cagcaggaggaa

SEQ ID NO: 1557866 - RNA, 15 nt, Human adenovirus C
gcgacgaaugagcuc

SEQ ID NO: 1557867 - RNA, 20 nt, Human adenovirus C
cauagcggaugucagccuug

SEQ ID NO: 1557868 - RNA, 19 nt, Human adenovirus C
agccuccaugcccuucucc

SEQ ID NO: 1557869 - RNA, 20 nt, Human adenovirus C
augucguuucucagcagcug

SEQ ID NO: 1557870 - RNA, 16 nt, Human adenovirus C
cuauguucccagccau

SEQ ID NO: 1557871 - RNA, 22 nt, Human adenovirus C
aacuauggcagcaaggccugga

SEQ ID NO: 1557872 - RNA, 22 nt, Human adenovirus C
cggcgccgcgcgcgggcaggag

SEQ ID NO: 1557873 - RNA, 19 nt, Human adenovirus C
cugcaacagguuauugccc

SEQ ID NO: 1557874 - RNA, 23 nt, Human adenovirus C
gcgcgucccugcgccgugccgcc

SEQ ID NO: 1557875 - RNA, 17 nt, Human adenovirus C
caggguauaacucaccu

SEQ ID NO: 1557876 - RNA, 12 nt, Human adenovirus C
ccaccacuggaa

SEQ ID NO: 1557877 - RNA, 22 nt, Human adenovirus C
uuaaaaacaaguugcaugugga

SEQ ID NO: 1557878 - RNA, 18 nt, Human adenovirus C
gcucuugucggagaucag

SEQ ID NO: 1557879 - RNA, 18 nt, Human adenovirus C
accauccuaaaccagcug

SEQ ID NO: 1557880 - RNA, 22 nt, Human adenovirus C
guaaaguuccaagaagcgcggg

SEQ ID NO: 1557881 - RNA, 15 nt, Human adenovirus C
auccgcaagcggcaa

SEQ ID NO: 1557882 - RNA, 14 nt, Human adenovirus C
ucagagaagaacau

SEQ ID NO: 1557883 - RNA, 13 nt, Human adenovirus C
ccaaagcaaaccu

SEQ ID NO: 1557884 - RNA, 14 nt, Human adenovirus C
aggcgcauguggac

SEQ ID NO: 1557885 - RNA, 23 nt, Human adenovirus C
cggcuuucgcuguacggcaguag

SEQ ID NO: 1557886 - RNA, 17 nt, Human adenovirus C
ucaugcugcgggguggu

SEQ ID NO: 1557887 - RNA, 13 nt, Human adenovirus C
cggucggccaugc

SEQ ID NO: 1557888 - RNA, 14 nt, Human adenovirus C
ccggagcgaggugu

SEQ ID NO: 1557889 - RNA, 17 nt, Human adenovirus C
acaaugaaaaaauucau

SEQ ID NO: 1557890 - RNA, 17 nt, Human adenovirus C
acgggcagccuggaggc

SEQ ID NO: 1557891 - RNA, 15 nt, Human adenovirus C
gacacgggcagccug

SEQ ID NO: 1557892 - RNA, 23 nt, Human adenovirus C
ccugguaaccgcguacgagcaga

SEQ ID NO: 1557893 - RNA, 14 nt, Human adenovirus C
cuacgacuacauga

SEQ ID NO: 1557894 - RNA, 16 nt, Human adenovirus C
caaaauaaaaagucug

SEQ ID NO: 1557895 - RNA, 12 nt, Human adenovirus C
uuguccagcuua

SEQ ID NO: 1557896 - RNA, 15 nt, Human adenovirus C
cagcgccaaaaacug

SEQ ID NO: 1557897 - RNA, 20 nt, Human adenovirus C
caagauuauacccacaaccu

SEQ ID NO: 1557898 - RNA, 17 nt, Human adenovirus C
gguuccugagcagcugc

SEQ ID NO: 1557899 - RNA, 15 nt, Human adenovirus C
cagacgggccagggu

SEQ ID NO: 1557900 - RNA, 18 nt, Human adenovirus C
gaccauucacguagccag

SEQ ID NO: 1557901 - RNA, 20 nt, Human adenovirus C
cuaucguggcuacaccuacc

SEQ ID NO: 1557902 - RNA, 13 nt, Human adenovirus C
cagagcgugagcc

SEQ ID NO: 1557903 - RNA, 19 nt, Human adenovirus C
gccugcgucauuacccagg

SEQ ID NO: 1557904 - RNA, 21 nt, Human adenovirus C
accagcucaaucagucacagu

SEQ ID NO: 1557905 - RNA, 15 nt, Human adenovirus C
ccaguccgggccaga

SEQ ID NO: 1557906 - RNA, 13 nt, Human adenovirus C
cgcgcgcuggggc

SEQ ID NO: 1557907 - RNA, 20 nt, Human adenovirus C
aagugauuaucgagcaggac

SEQ ID NO: 1557908 - RNA, 22 nt, Human adenovirus C
uggcaccccuauucgacaccac

SEQ ID NO: 1557909 - RNA, 17 nt, Human adenovirus C
guagcaccacugcagag

SEQ ID NO: 1557910 - RNA, 16 nt, Human adenovirus C
gcccuccaccuucagc

SEQ ID NO: 1557911 - RNA, 20 nt, Human adenovirus C
ggcuucuacauuccagaaag

SEQ ID NO: 1557912 - RNA, 21 nt, Human adenovirus C
accgggguacccaacuccaug

SEQ ID NO: 1557913 - RNA, 16 nt, Human adenovirus C
aaccaaaguugcagga

SEQ ID NO: 1557914 - RNA, 20 nt, Human adenovirus C
ggacaaccccagacccaucu

SEQ ID NO: 1557915 - RNA, 16 nt, Human adenovirus C
ucugcagcgcugccaa

SEQ ID NO: 1557916 - RNA, 21 nt, Human adenovirus C
gcacucacagaccugggccaa

SEQ ID NO: 1557917 - RNA, 23 nt, Human adenovirus C
acuugcggcuggagcugcccaag

SEQ ID NO: 1557918 - RNA, 13 nt, Human adenovirus C
uccacgagccagg

SEQ ID NO: 1557919 - RNA, 13 nt, Human adenovirus C
cacgcuggccagc

SEQ ID NO: 1557920 - RNA, 21 nt, Human adenovirus C
aggcaggacccuggugcugcc

SEQ ID NO: 1557921 - RNA, 18 nt, Human adenovirus C
aguccccagguacagccc

SEQ ID NO: 1557922 - RNA, 14 nt, Human adenovirus C
uccccagguacagc

SEQ ID NO: 1557923 - RNA, 12 nt, Human adenovirus C
acgccaagaaaa

SEQ ID NO: 1557924 - RNA, 13 nt, Human adenovirus C
aggaggggcaaca

SEQ ID NO: 1557925 - RNA, 16 nt, Human adenovirus C
gucaucucuacagccc

SEQ ID NO: 1557926 - RNA, 18 nt, Human adenovirus C
ggagcaacagcaggagga

SEQ ID NO: 1557927 - RNA, 21 nt, Human adenovirus C
cuccguggccgcgcaccuggc

SEQ ID NO: 1557928 - RNA, 17 nt, Human adenovirus C
cacaggguugcagcacu

SEQ ID NO: 1557929 - RNA, 14 nt, Human adenovirus C
agugucaugccaaa

SEQ ID NO: 1557930 - RNA, 18 nt, Human adenovirus C
ccggcucaccacccaggu

SEQ ID NO: 1557931 - RNA, 14 nt, Human adenovirus C
caccgccagcgcac

SEQ ID NO: 1557932 - RNA, 12 nt, Human adenovirus C
caggcgggagcu

SEQ ID NO: 1557933 - RNA, 14 nt, Human adenovirus C
gucgccgccagagg

SEQ ID NO: 1557934 - RNA, 14 nt, Human adenovirus C
ccaggugcagaccc

SEQ ID NO: 1557935 - RNA, 23 nt, Human adenovirus C
cagcuagccaacuaccuugccua

SEQ ID NO: 1557936 - RNA, 20 nt, Human adenovirus C
acaugucuaugcccaggcuc

SEQ ID NO: 1557937 - RNA, 17 nt, Human adenovirus C
cauuguaaaaaucugcu

SEQ ID NO: 1557938 - RNA, 18 nt, Human adenovirus C
cuggaccaggugucaccg

SEQ ID NO: 1557939 - RNA, 21 nt, Human adenovirus C
cggaggcucucuucagcaaau

SEQ ID NO: 1557940 - RNA, 19 nt, Human adenovirus C
guggaacgaagcugaugcu

SEQ ID NO: 1557941 - RNA, 19 nt, Human adenovirus C
caaggccugcccaccaccc

SEQ ID NO: 1557942 - RNA, 23 nt, Human adenovirus C
auuugcaagacagaaacacagag

SEQ ID NO: 1557943 - RNA, 18 nt, Human adenovirus C
uagguucuacgaagacca

SEQ ID NO: 1557944 - RNA, 13 nt, Human adenovirus C
gccuguugcugcu

SEQ ID NO: 1557945 - RNA, 20 nt, Human adenovirus C
gggcugguugguggcggcgu

SEQ ID NO: 1557946 - RNA, 20 nt, Human adenovirus C
aaacuuguaaauaucaggaa

SEQ ID NO: 1557947 - RNA, 12 nt, Human adenovirus C
ccgccgccgccg

SEQ ID NO: 1557948 - RNA, 13 nt, Human adenovirus C
acccuccucaccu

SEQ ID NO: 1557949 - RNA, 15 nt, Human adenovirus C
ggugcugcggcagau

SEQ ID NO: 1557950 - RNA, 18 nt, Human adenovirus C
gcugaggccgaggcagcg

SEQ ID NO: 1557951 - RNA, 15 nt, Human adenovirus C
cgcgggcggagggug

SEQ ID NO: 1557952 - RNA, 17 nt, Human adenovirus C
ucaacaaagcaggggcc

SEQ ID NO: 1557953 - RNA, 12 nt, Human adenovirus C
gcucccaagggc

SEQ ID NO: 1557954 - RNA, 16 nt, Human adenovirus C
caagaaguugaagaca

SEQ ID NO: 1557955 - RNA, 21 nt, Human adenovirus C
acucugacaaagcccaagaaa

SEQ ID NO: 1557956 - RNA, 17 nt, Human adenovirus C
cccagcgauagcaguuc

SEQ ID NO: 1557957 - RNA, 19 nt, Human adenovirus C
gagcgcccucuccugagcg

SEQ ID NO: 1557958 - RNA, 20 nt, Human adenovirus C
guagcaagcugauugccagg

SEQ ID NO: 1557959 - RNA, 15 nt, Human adenovirus C
ucgaaggcuggccgc

SEQ ID NO: 1557960 - RNA, 21 nt, Human adenovirus C
uuaaguauaugagcaauucaa

SEQ ID NO: 1557961 - RNA, 21 nt, Human adenovirus C
cacugugguacuucccagaga

SEQ ID NO: 1557962 - RNA, 14 nt, Human adenovirus C
uguuauauuccaca

SEQ ID NO: 1557963 - RNA, 14 nt, Human adenovirus C
agcgggguggugga

SEQ ID NO: 1557964 - RNA, 17 nt, Human adenovirus C
cgcgccuaccaccuucc

SEQ ID NO: 1557965 - RNA, 18 nt, Human adenovirus C
cgcugcgucuggcgccca

SEQ ID NO: 1557966 - RNA, 14 nt, Human adenovirus C
gcugauugccaggg

SEQ ID NO: 1557967 - RNA, 22 nt, Human adenovirus C
cuugccuacgaacgccaccugu

SEQ ID NO: 1557968 - RNA, 14 nt, Human adenovirus C
aacacaagcuaaac

SEQ ID NO: 1557969 - RNA, 12 nt, Human adenovirus C
agauccgcgucc

SEQ ID NO: 1557970 - RNA, 19 nt, Human adenovirus C
gcccagcaauaacacaggc

SEQ ID NO: 1557971 - RNA, 15 nt, Human adenovirus C
caggguccagaggac

SEQ ID NO: 1557972 - RNA, 12 nt, Human adenovirus C
ccaagcgccagc

SEQ ID NO: 1557973 - RNA, 18 nt, Human adenovirus C
ugcgucauuacccagggc

SEQ ID NO: 1557974 - RNA, 23 nt, Human adenovirus C
ucagaaacuuccagcccaugagc

SEQ ID NO: 1557975 - RNA, 13 nt, Human adenovirus C
acauuccagcacc

SEQ ID NO: 1557976 - RNA, 15 nt, Human adenovirus C
gcugggcguggugcc

SEQ ID NO: 1557977 - RNA, 17 nt, Human adenovirus C
acagagcgaguauauau

SEQ ID NO: 1557978 - RNA, 13 nt, Human adenovirus C
ccagcagaggcgg

SEQ ID NO: 1557979 - RNA, 14 nt, Human adenovirus C
ugcugagccgccgu

SEQ ID NO: 1557980 - RNA, 23 nt, Human adenovirus C
auuaaacauggcgccauccacca

SEQ ID NO: 1557981 - RNA, 22 nt, Human adenovirus C
accuugagcgacgaccugggcg

SEQ ID NO: 1557982 - RNA, 17 nt, Human adenovirus C
cuggcggaggugcugcu

SEQ ID NO: 1557983 - RNA, 19 nt, Human adenovirus C
ccgcaggccaagcagcuug

SEQ ID NO: 1557984 - RNA, 23 nt, Human adenovirus C
augcgccccccuccucagcagcg

SEQ ID NO: 1557985 - RNA, 19 nt, Human adenovirus C
cuucauuuguaauuuacaa

SEQ ID NO: 1557986 - RNA, 12 nt, Human adenovirus C
aagccuggaccg

SEQ ID NO: 1557987 - RNA, 16 nt, Human adenovirus C
ccaccuucagccucaa

SEQ ID NO: 1557988 - RNA, 23 nt, Human adenovirus C
uuccauaggugauagaaccagau

SEQ ID NO: 1557989 - RNA, 23 nt, Human adenovirus C
acgcgcggcaaacgcucugcaac

SEQ ID NO: 1557990 - RNA, 14 nt, Human adenovirus C
cgcgcgcgggcagg

SEQ ID NO: 1557991 - RNA, 17 nt, Human adenovirus C
cgccgcuuucuucucua

SEQ ID NO: 1557992 - RNA, 22 nt, Human adenovirus C
ugcagaccguaaaccugagcca

SEQ ID NO: 1557993 - RNA, 18 nt, Human adenovirus C
uaacaugguguguggcaa

SEQ ID NO: 1557994 - RNA, 20 nt, Human adenovirus C
gcugacacuguaccgcgagg

SEQ ID NO: 1557995 - RNA, 18 nt, Human adenovirus C
ugcgcuguaccugccaga

SEQ ID NO: 1557996 - RNA, 19 nt, Human adenovirus C
gaugagguguacggcgacg

SEQ ID NO: 1557997 - RNA, 18 nt, Human adenovirus C
agaagcaccauguccuug

SEQ ID NO: 1557998 - RNA, 20 nt, Human adenovirus C
ggcccgcggugaugccuuug

SEQ ID NO: 1557999 - RNA, 18 nt, Human adenovirus C
gcacucacagaccugggc

SEQ ID NO: 1558000 - RNA, 21 nt, Human adenovirus C
gcuggaaaaguccacccaaag

SEQ ID NO: 1558001 - RNA, 12 nt, Human adenovirus C
cgcucccucacc

SEQ ID NO: 1558002 - RNA, 13 nt, Human adenovirus C
aagcuacccaccc

SEQ ID NO: 1558003 - RNA, 22 nt, Human adenovirus C
cggagucaacuuugguagcugc

SEQ ID NO: 1558004 - RNA, 20 nt, Human adenovirus C
uccucaaaucuucacuuccg

SEQ ID NO: 1558005 - RNA, 18 nt, Human adenovirus C
augguacccaagcgccag

SEQ ID NO: 1558006 - RNA, 22 nt, Human adenovirus C
ccucaggcgccgccggcacugc

SEQ ID NO: 1558007 - RNA, 15 nt, Human adenovirus C
ggcggggggcugccg

SEQ ID NO: 1558008 - RNA, 15 nt, Human adenovirus C
agccacacccagcca

SEQ ID NO: 1558009 - RNA, 15 nt, Human adenovirus C
acagcugccgccaug

SEQ ID NO: 1558010 - RNA, 13 nt, Human adenovirus C
cgcggccgcacug

SEQ ID NO: 1558011 - RNA, 17 nt, Human adenovirus C
cgaaagcuaaagcgggu

SEQ ID NO: 1558012 - RNA, 17 nt, Human adenovirus C
gcagaccaaccuggacc

SEQ ID NO: 1558013 - RNA, 14 nt, Human adenovirus C
ugucagauggaaag

SEQ ID NO: 1558014 - RNA, 17 nt, Human adenovirus C
cagcauugauggucgcc

SEQ ID NO: 1558015 - RNA, 23 nt, Human adenovirus C
gcuucuaaauagcuaacgugucg

SEQ ID NO: 1558016 - RNA, 13 nt, Human adenovirus C
cagcagcagggca

SEQ ID NO: 1558017 - RNA, 19 nt, Human adenovirus C
cagcccgggggaggcaagc

SEQ ID NO: 1558018 - RNA, 19 nt, Human adenovirus C
ccaggcuccuuugucugga

SEQ ID NO: 1558019 - RNA, 16 nt, Human adenovirus C
acggcgaguacuaagc

SEQ ID NO: 1558020 - RNA, 18 nt, Human adenovirus C
ccgaccaacacccagugc

SEQ ID NO: 1558021 - RNA, 22 nt, Human adenovirus C
ucuguguaguaguuguaguaua

SEQ ID NO: 1558022 - RNA, 22 nt, Human adenovirus C
cucgccuucgaucucagcgcag

SEQ ID NO: 1558023 - RNA, 20 nt, Human adenovirus C
caaagacaaaauuggcaagu

SEQ ID NO: 1558024 - RNA, 13 nt, Human adenovirus C
uuacuguaacugc

SEQ ID NO: 1558025 - RNA, 17 nt, Human adenovirus C
guugacggggagggcua

SEQ ID NO: 1558026 - RNA, 21 nt, Human adenovirus C
cguagguggcgcccucuuccu

SEQ ID NO: 1558027 - RNA, 11 nt, Human adenovirus C
aaagcgcgggc

SEQ ID NO: 1558028 - RNA, 19 nt, Human adenovirus C
ggguggugcacgcuggcca

SEQ ID NO: 1558029 - RNA, 16 nt, Human adenovirus C
cacuuacuggcugcag

SEQ ID NO: 1558030 - RNA, 17 nt, Human adenovirus C
aacauucugcagagcau

SEQ ID NO: 1558031 - RNA, 15 nt, Human adenovirus C
ccacaccuacagccu

SEQ ID NO: 1558032 - RNA, 15 nt, Human adenovirus C
uacugacgccagacg

SEQ ID NO: 1558033 - RNA, 23 nt, Human adenovirus C
gcaccagcucaaucagucacagu

SEQ ID NO: 1558034 - RNA, 13 nt, Human adenovirus C
acgagcauacuuu

SEQ ID NO: 1558035 - RNA, 18 nt, Human adenovirus C
uaguuuuguaucuguuuu

SEQ ID NO: 1558036 - RNA, 14 nt, Human adenovirus C
cuacccacccagcg

SEQ ID NO: 1558037 - RNA, 15 nt, Human adenovirus C
ugcgcuccgggcugc

SEQ ID NO: 1558038 - RNA, 12 nt, Human adenovirus C
cuacaccuaccg

SEQ ID NO: 1558039 - RNA, 18 nt, Human adenovirus C
guuggcggggggcugccg

SEQ ID NO: 1558040 - RNA, 20 nt, Human adenovirus C
cccguucaugggaaacuggc

SEQ ID NO: 1558041 - RNA, 20 nt, Human adenovirus C
aagaucuugguugugggcca

SEQ ID NO: 1558042 - RNA, 18 nt, Human adenovirus C
ggcucuagcgaugaagau

SEQ ID NO: 1558043 - RNA, 19 nt, Human adenovirus C
aucugggucaccaggcgcu

SEQ ID NO: 1558044 - RNA, 23 nt, Human adenovirus C
uuuccaggggcugguugguggcg

SEQ ID NO: 1558045 - RNA, 17 nt, Human adenovirus C
aggccaagcagcuuguc

SEQ ID NO: 1558046 - RNA, 21 nt, Human adenovirus C
gcccuuggaggaggcgccgca

SEQ ID NO: 1558047 - RNA, 18 nt, Human adenovirus C
ggucagggcgcgggcuag

SEQ ID NO: 1558048 - RNA, 19 nt, Human adenovirus C
ccacuuaaacucaggcaca

SEQ ID NO: 1558049 - RNA, 15 nt, Human adenovirus C
cgcaaccgcagaccc

SEQ ID NO: 1558050 - RNA, 21 nt, Human adenovirus C
cacacgggcggaggagaagcg

SEQ ID NO: 1558051 - RNA, 12 nt, Human adenovirus C
gaggugagcuca

SEQ ID NO: 1558052 - RNA, 15 nt, Human adenovirus C
cgcgugucgaaccca

SEQ ID NO: 1558053 - RNA, 18 nt, Human adenovirus C
cguggccgcgcaccuggc

SEQ ID NO: 1558054 - RNA, 20 nt, Human adenovirus C
cggcagacaugcagggcacc

SEQ ID NO: 1558055 - RNA, 15 nt, Human adenovirus C
caacagcgccaaggc

SEQ ID NO: 1558056 - RNA, 15 nt, Human adenovirus C
augaccaccugcgcg

SEQ ID NO: 1558057 - RNA, 17 nt, Human adenovirus C
ccgggcgaagacggcgu

SEQ ID NO: 1558058 - RNA, 17 nt, Human adenovirus C
gccgucaucccugagca

SEQ ID NO: 1558059 - RNA, 20 nt, Human adenovirus C
aacagcgaaaaugaaaguca

SEQ ID NO: 1558060 - RNA, 15 nt, Human adenovirus C
accgcagacccugcu

SEQ ID NO: 1558061 - RNA, 20 nt, Human adenovirus C
gaacaagcgagugguggcuc

SEQ ID NO: 1558062 - RNA, 13 nt, Human adenovirus C
caaauauggaaca

SEQ ID NO: 1558063 - RNA, 13 nt, Human adenovirus C
acgcacgaaggag

SEQ ID NO: 1558064 - RNA, 13 nt, Human adenovirus C
aaaacuaaaauug

SEQ ID NO: 1558065 - RNA, 13 nt, Human adenovirus C
caccaccgccucc

SEQ ID NO: 1558066 - RNA, 17 nt, Human adenovirus C
cccgccgccgcagcccu

SEQ ID NO: 1558067 - RNA, 20 nt, Human adenovirus C
cgugaagacgacgggcccgg

SEQ ID NO: 1558068 - RNA, 21 nt, Human adenovirus C
gcucccucacccgcagcugcc

SEQ ID NO: 1558069 - RNA, 13 nt, Human adenovirus C
gcggcgugcugga

SEQ ID NO: 1558070 - RNA, 22 nt, Human adenovirus C
uggccaauugcaagccaucaac

SEQ ID NO: 1558071 - RNA, 18 nt, Human adenovirus C
augaagggcacgagcugc

SEQ ID NO: 1558072 - RNA, 19 nt, Human adenovirus C
cuacucuuauaaaaugcac

SEQ ID NO: 1558073 - RNA, 11 nt, Human adenovirus C
cugugcugcca

SEQ ID NO: 1558074 - RNA, 19 nt, Human adenovirus C
cagcggcaacgugcagacc

SEQ ID NO: 1558075 - RNA, 19 nt, Human adenovirus C
uuacaacagcggcaacgug

SEQ ID NO: 1558076 - RNA, 11 nt, Human adenovirus C
ggaggaggcgc

SEQ ID NO: 1558077 - RNA, 14 nt, Human adenovirus C
cccagcggucccau

SEQ ID NO: 1558078 - RNA, 22 nt, Human adenovirus C
cuagcgccugcugccaugcgcg

SEQ ID NO: 1558079 - RNA, 15 nt, Human adenovirus C
ggccuuugccuggaa

SEQ ID NO: 1558080 - RNA, 22 nt, Human adenovirus C
aggugaugccggcggcgguggu

SEQ ID NO: 1558081 - RNA, 14 nt, Human adenovirus C
auugcguaccucag

SEQ ID NO: 1558082 - RNA, 21 nt, Human adenovirus C
ccaguccuuuaaugacuaccu

SEQ ID NO: 1558083 - RNA, 21 nt, Human adenovirus C
agauugagguacugaaaugug

SEQ ID NO: 1558084 - RNA, 12 nt, Human adenovirus C
auacugggacag

SEQ ID NO: 1558085 - RNA, 18 nt, Human adenovirus C
aggcuacagaggaggcua

SEQ ID NO: 1558086 - RNA, 21 nt, Human adenovirus C
caugucuuuccacgggcgcag

SEQ ID NO: 1558087 - RNA, 20 nt, Human adenovirus C
gaggggggacacggcggcga

SEQ ID NO: 1558088 - RNA, 20 nt, Human adenovirus C
agcauaaaaaaauccagugg

SEQ ID NO: 1558089 - RNA, 20 nt, Human adenovirus C
aguuuaaaugggaugucaaa

SEQ ID NO: 1558090 - RNA, 19 nt, Human adenovirus C
cugaugguacccaagcgcc

SEQ ID NO: 1558091 - RNA, 17 nt, Human adenovirus C
uccauaugacacagaaa

SEQ ID NO: 1558092 - RNA, 15 nt, Human adenovirus C
acaccgucacccucg

SEQ ID NO: 1558093 - RNA, 20 nt, Human adenovirus C
gucauggaccgcaucauguc

SEQ ID NO: 1558094 - RNA, 19 nt, Human adenovirus C
caaccaggaacagcucuac

SEQ ID NO: 1558095 - RNA, 13 nt, Human adenovirus C
guuugccuccccg

SEQ ID NO: 1558096 - RNA, 17 nt, Human adenovirus C
gccagcgccugcacugc

SEQ ID NO: 1558097 - RNA, 14 nt, Human adenovirus C
gauaucuugaaguc

SEQ ID NO: 1558098 - RNA, 21 nt, Human adenovirus C
aaugugugggcguggcuuaag

SEQ ID NO: 1558099 - RNA, 17 nt, Human adenovirus C
aauuaaccuaaaugcca

SEQ ID NO: 1558100 - RNA, 14 nt, Human adenovirus C
cuuccagcccauga

SEQ ID NO: 1558101 - RNA, 18 nt, Human adenovirus C
augccaugaaccacccua

SEQ ID NO: 1558102 - RNA, 13 nt, Human adenovirus C
cuggcggcggugg

SEQ ID NO: 1558103 - RNA, 21 nt, Human adenovirus C
accccgugaccuuccgcucca

SEQ ID NO: 1558104 - RNA, 15 nt, Human adenovirus C
ccaugcucagucugg

SEQ ID NO: 1558105 - RNA, 18 nt, Human adenovirus C
acacugauuaaaaacaag

SEQ ID NO: 1558106 - RNA, 20 nt, Human adenovirus C
gccgccguuagcccaagagc

SEQ ID NO: 1558107 - RNA, 13 nt, Human adenovirus C
gguggcagaugcc

SEQ ID NO: 1558108 - RNA, 20 nt, Human adenovirus C
gccugcugaaugcgcaggcg

SEQ ID NO: 1558109 - RNA, 23 nt, Human adenovirus C
cucgcugcugcagccgcagcgcg

SEQ ID NO: 1558110 - RNA, 16 nt, Human adenovirus C
ccacacaagcucgccu

SEQ ID NO: 1558111 - RNA, 15 nt, Human adenovirus C
guggacuaaacuuug

SEQ ID NO: 1558112 - RNA, 20 nt, Human adenovirus C
ggcagaugccgcggugcagg

SEQ ID NO: 1558113 - RNA, 15 nt, Human adenovirus C
ggcagcuggggccgg

SEQ ID NO: 1558114 - RNA, 15 nt, Human adenovirus C
gcugcgcgaggagga

SEQ ID NO: 1558115 - RNA, 18 nt, Human adenovirus C
cuguagaccacgcccccu

SEQ ID NO: 1558116 - RNA, 12 nt, Human adenovirus C
agaaaugccugu

SEQ ID NO: 1558117 - RNA, 21 nt, Human adenovirus C
ccuucagccucaagcagcgaa

SEQ ID NO: 1558118 - RNA, 15 nt, Human adenovirus C
ugcagcacagcaggg

SEQ ID NO: 1558119 - RNA, 18 nt, Human adenovirus C
ucagaugcgaguagccca

SEQ ID NO: 1558120 - RNA, 12 nt, Human adenovirus C
uaaguuugacag

SEQ ID NO: 1558121 - RNA, 16 nt, Human adenovirus C
ccucgccggcgcccca

SEQ ID NO: 1558122 - RNA, 16 nt, Human adenovirus C
ccuguaacgcuggacc

SEQ ID NO: 1558123 - RNA, 20 nt, Human adenovirus C
gaagaacuggaucucccgcc

SEQ ID NO: 1558124 - RNA, 18 nt, Human adenovirus C
caaguugaaagagcaaaa

SEQ ID NO: 1558125 - RNA, 21 nt, Human adenovirus C
cggcuauuaccaccacaccuc

SEQ ID NO: 1558126 - RNA, 12 nt, Human adenovirus C
guggugcaggag

SEQ ID NO: 1558127 - RNA, 24 nt, Human adenovirus C
caccuucuuccccauggcccacaa

SEQ ID NO: 1558128 - RNA, 16 nt, Human adenovirus C
ugacccgcuguuccuu

SEQ ID NO: 1558129 - RNA, 18 nt, Human adenovirus C
gcagcagccgcaggccaa

SEQ ID NO: 1558130 - RNA, 23 nt, Human adenovirus C
ccggggaguaggcauccgcgccg

SEQ ID NO: 1558131 - RNA, 9 nt, Human adenovirus C
uggcggcgg

SEQ ID NO: 1558132 - RNA, 20 nt, Human adenovirus C
cccuuggaggaggcgccgca

SEQ ID NO: 1558133 - RNA, 23 nt, Human adenovirus C
ccgccuguggacuauucugcugc

SEQ ID NO: 1558134 - RNA, 20 nt, Human adenovirus C
gacgcguuccggcagcagcc

SEQ ID NO: 1558135 - RNA, 15 nt, Human adenovirus C
uaagucuaagcagcc

SEQ ID NO: 1558136 - RNA, 15 nt, Human adenovirus C
gcugaaaauaaaaaa

SEQ ID NO: 1558137 - RNA, 12 nt, Human adenovirus C
cagccacagugc

SEQ ID NO: 1558138 - RNA, 13 nt, Human adenovirus C
uaccaucacggcg

SEQ ID NO: 1558139 - RNA, 17 nt, Human adenovirus C
cauaccuugacauuggc

SEQ ID NO: 1558140 - RNA, 16 nt, Human adenovirus C
cggcgacaggucaggc

SEQ ID NO: 1558141 - RNA, 18 nt, Human adenovirus C
ccgcagccggugggcccg

SEQ ID NO: 1558142 - RNA, 13 nt, Human adenovirus C
guccaaggugaac

SEQ ID NO: 1558143 - RNA, 14 nt, Human adenovirus C
gcugaaacccacca

SEQ ID NO: 1558144 - RNA, 22 nt, Human adenovirus C
ccaaggacugguuccuggugca

SEQ ID NO: 1558145 - RNA, 12 nt, Human adenovirus C
agagacaggacu

SEQ ID NO: 1558146 - RNA, 11 nt, Human adenovirus C
gagaggagccc

SEQ ID NO: 1558147 - RNA, 12 nt, Human adenovirus C
ggcgggcugcuc

SEQ ID NO: 1558148 - RNA, 15 nt, Human adenovirus C
gcccgugcacuccaa

SEQ ID NO: 1558149 - RNA, 13 nt, Human adenovirus C
cccgcucccacca

SEQ ID NO: 1558150 - RNA, 12 nt, Human adenovirus C
gcggcagcagca

SEQ ID NO: 1558151 - RNA, 20 nt, Human adenovirus C
acugcagagcuucaugcugc

SEQ ID NO: 1558152 - RNA, 13 nt, Human adenovirus C
aaccgcgcccagg

SEQ ID NO: 1558153 - RNA, 20 nt, Human adenovirus C
acacugcagcaggugcugcc

SEQ ID NO: 1558154 - RNA, 15 nt, Human adenovirus C
gcaggucgggcgccg

SEQ ID NO: 1558155 - RNA, 18 nt, Human adenovirus C
gccucggaguaccugagc

SEQ ID NO: 1558156 - RNA, 14 nt, Human adenovirus C
gcuaugugcagcag

SEQ ID NO: 1558157 - RNA, 19 nt, Human adenovirus C
guccagcuuauucagcauc

SEQ ID NO: 1558158 - RNA, 14 nt, Human adenovirus C
caucuccagcggcc

SEQ ID NO: 1558159 - RNA, 15 nt, Human adenovirus C
cgcgggggcgcaguu

SEQ ID NO: 1558160 - RNA, 21 nt, Human adenovirus C
gcugccuguaucacaaaagcg

SEQ ID NO: 1558161 - RNA, 16 nt, Human adenovirus C
cagacacgaucggcag

SEQ ID NO: 1558162 - RNA, 21 nt, Human adenovirus C
ugagcgggggguaccugcugg

SEQ ID NO: 1558163 - RNA, 15 nt, Human adenovirus C
gucaucucugugcug

SEQ ID NO: 1558164 - RNA, 21 nt, Human adenovirus C
gguaccuuugagcugcagggu

SEQ ID NO: 1558165 - RNA, 20 nt, Human adenovirus C
gcgcccuggaggcagcuggg

SEQ ID NO: 1558166 - RNA, 23 nt, Human adenovirus C
aggaggucgggaccgagguugcu

SEQ ID NO: 1558167 - RNA, 17 nt, Human adenovirus C
cugccgucaucccugag

SEQ ID NO: 1558168 - RNA, 18 nt, Human adenovirus C
agcucugcaaccuggucu

SEQ ID NO: 1558169 - RNA, 11 nt, Human adenovirus C
ccgacuggcca

SEQ ID NO: 1558170 - RNA, 13 nt, Human adenovirus C
cgaggagcugagg

SEQ ID NO: 1558171 - RNA, 17 nt, Human adenovirus C
agcuugagccuggcuga

SEQ ID NO: 1558172 - RNA, 17 nt, Human adenovirus C
cuucaacuacaccguca

SEQ ID NO: 1558173 - RNA, 19 nt, Human adenovirus C
cgaggggaguuauggugga

SEQ ID NO: 1558174 - RNA, 16 nt, Human adenovirus C
ggccgacgggcggcca

SEQ ID NO: 1558175 - RNA, 13 nt, Human adenovirus C
cugcacugcaaau

SEQ ID NO: 1558176 - RNA, 18 nt, Human adenovirus C
cgggcggccaugcgggcc

SEQ ID NO: 1558177 - RNA, 13 nt, Human adenovirus C
aguaguuacugga

SEQ ID NO: 1558178 - RNA, 18 nt, Human adenovirus C
gcagagcucucugggaaa

SEQ ID NO: 1558179 - RNA, 14 nt, Human adenovirus C
accgguggguugcu

SEQ ID NO: 1558180 - RNA, 22 nt, Human adenovirus C
auguaugcguccaugucgccgc

SEQ ID NO: 1558181 - RNA, 18 nt, Human adenovirus C
cggcgggcggugggccgc

SEQ ID NO: 1558182 - RNA, 14 nt, Human adenovirus C
guuaauuaccuggg

SEQ ID NO: 1558183 - RNA, 20 nt, Human adenovirus C
ggcgcggaagagaacuccaa

SEQ ID NO: 1558184 - RNA, 13 nt, Human adenovirus C
uguugucaucucu

SEQ ID NO: 1558185 - RNA, 20 nt, Human adenovirus C
gaccaguggagaggcagagc

SEQ ID NO: 1558186 - RNA, 12 nt, Human adenovirus C
ccguagaggagc

SEQ ID NO: 1558187 - RNA, 15 nt, Human adenovirus C
ccgcgggcugggugu

SEQ ID NO: 1558188 - RNA, 17 nt, Human adenovirus C
cauaacuuggacauaaa

SEQ ID NO: 1558189 - RNA, 13 nt, Human adenovirus C
ggagaugcagcgc

SEQ ID NO: 1558190 - RNA, 15 nt, Human adenovirus C
caagagcaagagcag

SEQ ID NO: 1558191 - RNA, 16 nt, Human adenovirus C
acgaggggcagugcag

SEQ ID NO: 1558192 - RNA, 23 nt, Human adenovirus C
ucacaccuauuaccggcugcaac

SEQ ID NO: 1558193 - RNA, 21 nt, Human adenovirus C
cuggucuugucaugccugggg

SEQ ID NO: 1558194 - RNA, 12 nt, Human adenovirus C
ccucagcagcgg

SEQ ID NO: 1558195 - RNA, 20 nt, Human adenovirus C
cugcccgccaccugcugugc

SEQ ID NO: 1558196 - RNA, 13 nt, Human adenovirus C
gcagcaaggccug

SEQ ID NO: 1558197 - RNA, 13 nt, Human adenovirus C
cugccgcccccgc

SEQ ID NO: 1558198 - RNA, 15 nt, Human adenovirus C
ugcgcuuuucugugc

SEQ ID NO: 1558199 - RNA, 22 nt, Human adenovirus C
cgaagccuuccauccagacauc

SEQ ID NO: 1558200 - RNA, 15 nt, Human adenovirus C
gcgcuuuccaggcuu

SEQ ID NO: 1558201 - RNA, 23 nt, Human adenovirus C
gcgcggcggucaccagaggcuca

SEQ ID NO: 1558202 - RNA, 15 nt, Human adenovirus C
gcgcaggcggcggca

SEQ ID NO: 1558203 - RNA, 17 nt, Human adenovirus C
auucuucucaaauacua

SEQ ID NO: 1558204 - RNA, 16 nt, Human adenovirus C
guggaacuugagggug

SEQ ID NO: 1558205 - RNA, 18 nt, Human adenovirus C
cgcgggcccuugcuuccc

SEQ ID NO: 1558206 - RNA, 15 nt, Human adenovirus C
gucccuccgcaccca

SEQ ID NO: 1558207 - RNA, 16 nt, Human adenovirus C
cgaggacagggccucu

SEQ ID NO: 1558208 - RNA, 15 nt, Human adenovirus C
cagcaacagcagcgg

SEQ ID NO: 1558209 - RNA, 17 nt, Human adenovirus C
cugcgcgcuggccaggg

SEQ ID NO: 1558210 - RNA, 19 nt, Human adenovirus C
gacgaaguaaguuugccac

SEQ ID NO: 1558211 - RNA, 13 nt, Human adenovirus C
auugaggaguucg

SEQ ID NO: 1558212 - RNA, 22 nt, Human adenovirus C
caaaccuggaaaaggugaugaa

SEQ ID NO: 1558213 - RNA, 19 nt, Human adenovirus C
cacgcaaccgcgcccaggc

SEQ ID NO: 1558214 - RNA, 18 nt, Human adenovirus C
ccacaggcugcuguccaa

SEQ ID NO: 1558215 - RNA, 15 nt, Human adenovirus C
agaaggugcuggcga

SEQ ID NO: 1558216 - RNA, 20 nt, Human adenovirus C
gcaagcaacaucaacaacag

SEQ ID NO: 1558217 - RNA, 14 nt, Human adenovirus C
ggccaaccaggcag

SEQ ID NO: 1558218 - RNA, 14 nt, Human adenovirus C
uggcgccaggucau

SEQ ID NO: 1558219 - RNA, 14 nt, Human adenovirus C
accaccacccuccu

SEQ ID NO: 1558220 - RNA, 16 nt, Human adenovirus C
aggcucgcguccaggc

SEQ ID NO: 1558221 - RNA, 17 nt, Human adenovirus C
ccaucgcgcaacugggc

SEQ ID NO: 1558222 - RNA, 15 nt, Human adenovirus C
cccgcuugaggagga

SEQ ID NO: 1558223 - RNA, 18 nt, Human adenovirus C
uaagcauaacauggugug

SEQ ID NO: 1558224 - RNA, 13 nt, Human adenovirus C
acuuaaacucagg

SEQ ID NO: 1558225 - RNA, 21 nt, Human adenovirus C
cagcagcggaugauccuccag

SEQ ID NO: 1558226 - RNA, 22 nt, Human adenovirus C
cgucgccagcccgugcuggccc

SEQ ID NO: 1558227 - RNA, 14 nt, Human adenovirus C
ugcacgcagcaccu

SEQ ID NO: 1558228 - RNA, 19 nt, Human adenovirus C
caucuugcgcuaugugcag

SEQ ID NO: 1558229 - RNA, 20 nt, Human adenovirus C
uucaguaguauagccccacc

SEQ ID NO: 1558230 - RNA, 22 nt, Human adenovirus C
aaaguccacaaaaaacacccag

SEQ ID NO: 1558231 - RNA, 21 nt, Human adenovirus C
ugaccaugaagaucuggaagg

SEQ ID NO: 1558232 - RNA, 17 nt, Human adenovirus C
aacgcgaucguggagca

SEQ ID NO: 1558233 - RNA, 18 nt, Human adenovirus C
ccgcucauggacccuccu

SEQ ID NO: 1558234 - RNA, 14 nt, Human adenovirus C
gaugcgccccccuc

SEQ ID NO: 1558235 - RNA, 14 nt, Human adenovirus C
ggagcugcccaaga

SEQ ID NO: 1558236 - RNA, 20 nt, Human adenovirus C
cagcuuccuggagcgccacu

SEQ ID NO: 1558237 - RNA, 17 nt, Human adenovirus C
ugggcguguggcagcaa

SEQ ID NO: 1558238 - RNA, 18 nt, Human adenovirus C
aucagcuucggcgcacgc

SEQ ID NO: 1558239 - RNA, 19 nt, Human adenovirus C
ccgccagaggagcugcuga

SEQ ID NO: 1558240 - RNA, 14 nt, Human adenovirus C
ugaaagagguaguu

SEQ ID NO: 1558241 - RNA, 20 nt, Human adenovirus C
ccccuuugaguucgccacca

SEQ ID NO: 1558242 - RNA, 18 nt, Human adenovirus C
ugauggccgcagugcuug

SEQ ID NO: 1558243 - RNA, 21 nt, Human adenovirus C
gcuccucguuuagccaggucu

SEQ ID NO: 1558244 - RNA, 23 nt, Human adenovirus C
accugaacgggguguuugacaug

SEQ ID NO: 1558245 - RNA, 13 nt, Human adenovirus C
aucucagccgccu

SEQ ID NO: 1558246 - RNA, 21 nt, Human adenovirus C
aagugcuuugcccgcggcucc

SEQ ID NO: 1558247 - RNA, 15 nt, Human adenovirus C
ccccuauccugccgu

SEQ ID NO: 1558248 - RNA, 16 nt, Human adenovirus C
cgggcacuaccgcgcg

SEQ ID NO: 1558249 - RNA, 19 nt, Human adenovirus C
accauccuaaaccagcugg

SEQ ID NO: 1558250 - RNA, 16 nt, Human adenovirus C
ucggaccaccacgccg

SEQ ID NO: 1558251 - RNA, 20 nt, Human adenovirus C
cugaaucuggcgccucugcg

SEQ ID NO: 1558252 - RNA, 14 nt, Human adenovirus C
gacgggccaggguc

SEQ ID NO: 1558253 - RNA, 16 nt, Human adenovirus C
gcuaugcacugcaggg

SEQ ID NO: 1558254 - RNA, 14 nt, Human adenovirus C
agaaccagauauuu

SEQ ID NO: 1558255 - RNA, 14 nt, Human adenovirus C
cggcagcagccgca

SEQ ID NO: 1558256 - RNA, 14 nt, Human adenovirus C
cggcggcgcgcaac

SEQ ID NO: 1558257 - RNA, 17 nt, Human adenovirus C
gacagaaacacagagcu

SEQ ID NO: 1558258 - RNA, 15 nt, Human adenovirus C
cgcggcagccgcggc

SEQ ID NO: 1558259 - RNA, 21 nt, Human adenovirus C
ggaacgcggguuuggcagggc

SEQ ID NO: 1558260 - RNA, 18 nt, Human adenovirus C
cugaguacacagcccgcc

SEQ ID NO: 1558261 - RNA, 20 nt, Human adenovirus C
cccgagggccgcuggcugcu

SEQ ID NO: 1558262 - RNA, 19 nt, Human adenovirus C
cgagacguacuucagccug

SEQ ID NO: 1558263 - RNA, 13 nt, Human adenovirus C
gcggccgccgcag

SEQ ID NO: 1558264 - RNA, 23 nt, Human adenovirus C
ugcgccccccuccucagcagcgg

SEQ ID NO: 1558265 - RNA, 18 nt, Human adenovirus C
caacgugcccaucuccau

SEQ ID NO: 1558266 - RNA, 15 nt, Human adenovirus C
cgccagaccccccau

SEQ ID NO: 1558267 - RNA, 13 nt, Human adenovirus C
guacaugauuuua

SEQ ID NO: 1558268 - RNA, 20 nt, Human adenovirus C
guuggaauucuucaccagca

SEQ ID NO: 1558269 - RNA, 16 nt, Human adenovirus C
cagcccuaucagcagc

SEQ ID NO: 1558270 - RNA, 16 nt, Human adenovirus C
ugaaaaucagagggcg

SEQ ID NO: 1558271 - RNA, 19 nt, Human adenovirus C
acggggccgagguggagau

SEQ ID NO: 1558272 - RNA, 21 nt, Human adenovirus C
ugagguguaccaguccgggcc

SEQ ID NO: 1558273 - RNA, 18 nt, Human adenovirus C
cgggcccggugagcuuga

SEQ ID NO: 1558274 - RNA, 14 nt, Human adenovirus C
uggggauggcgggc

SEQ ID NO: 1558275 - RNA, 18 nt, Human adenovirus C
accucuuugagcccuuug

SEQ ID NO: 1558276 - RNA, 18 nt, Human adenovirus C
cggugcugcggcagaugc

SEQ ID NO: 1558277 - RNA, 23 nt, Human adenovirus C
gccagacuauuuuuuccagacca

SEQ ID NO: 1558278 - RNA, 19 nt, Human adenovirus C
ggcacccgcgcgcgcuggc

SEQ ID NO: 1558279 - RNA, 19 nt, Human adenovirus C
aagggcacgagcugcuucc

SEQ ID NO: 1558280 - RNA, 14 nt, Human adenovirus C
acuaggagacacuu

SEQ ID NO: 1558281 - RNA, 19 nt, Human adenovirus C
gcagacccugcgagugugg

SEQ ID NO: 1558282 - RNA, 21 nt, Human adenovirus C
cucaggauuacaagcuccucc

SEQ ID NO: 1558283 - RNA, 22 nt, Human adenovirus C
gcagcuguuggaucugcgccag

SEQ ID NO: 1558284 - RNA, 16 nt, Human adenovirus C
gaucaucuccccgcgg

SEQ ID NO: 1558285 - RNA, 16 nt, Human adenovirus C
gggagaucagcuggga

SEQ ID NO: 1558286 - RNA, 17 nt, Human adenovirus C
aaacccugcaacagggu

SEQ ID NO: 1558287 - RNA, 21 nt, Human adenovirus C
ccagcagaaaccugugcugcc

SEQ ID NO: 1558288 - RNA, 13 nt, Human adenovirus C
cucagaugcugac

SEQ ID NO: 1558289 - RNA, 23 nt, Human adenovirus C
gggaugcaaacuugcaagaacaa

SEQ ID NO: 1558290 - RNA, 23 nt, Human adenovirus C
ccagaggagcugcugagccgccg

SEQ ID NO: 1558291 - RNA, 18 nt, Human adenovirus C
acagcuaugauccagaug

SEQ ID NO: 1558292 - RNA, 17 nt, Human adenovirus C
cagccacaacgcgcagc

SEQ ID NO: 1558293 - RNA, 15 nt, Human adenovirus C
aucucgauccagcau

SEQ ID NO: 1558294 - RNA, 19 nt, Human adenovirus C
agccucgccccccuucucc

SEQ ID NO: 1558295 - RNA, 14 nt, Human adenovirus C
ggcugcuguugcuu

SEQ ID NO: 1558296 - RNA, 13 nt, Human adenovirus C
caccgggacuggg

SEQ ID NO: 1558297 - RNA, 19 nt, Human adenovirus C
cgccagaggagcugcugag

SEQ ID NO: 1558298 - RNA, 13 nt, Human adenovirus C
gacgggguaacgc

SEQ ID NO: 1558299 - RNA, 20 nt, Human adenovirus C
ccagagaugaccggcucaac

SEQ ID NO: 1558300 - RNA, 15 nt, Human adenovirus C
aggcgcgccgcgacu

SEQ ID NO: 1558301 - RNA, 15 nt, Human adenovirus C
cccaguaccgcagcu

SEQ ID NO: 1558302 - RNA, 13 nt, Human adenovirus C
ggcggcggcccug

SEQ ID NO: 1558303 - RNA, 21 nt, Human adenovirus C
cugacgcguuccggcagcagc

SEQ ID NO: 1558304 - RNA, 15 nt, Human adenovirus C
cacccggcgccagca

SEQ ID NO: 1558305 - RNA, 22 nt, Human adenovirus C
gguugugcagggugacaagguc

SEQ ID NO: 1558306 - RNA, 16 nt, Human adenovirus C
gaaucuaacuuuuagc

SEQ ID NO: 1558307 - RNA, 17 nt, Human adenovirus C
ugcagauguuggccaac

SEQ ID NO: 1558308 - RNA, 20 nt, Human adenovirus C
acaggucucugcgcucccuc

SEQ ID NO: 1558309 - RNA, 23 nt, Human adenovirus C
aguggaaaauacaccacugaaac

SEQ ID NO: 1558310 - RNA, 22 nt, Human adenovirus C
ccguguucugacagggcccagu

SEQ ID NO: 1558311 - RNA, 18 nt, Human adenovirus C
ggagcuugagugcaugca

SEQ ID NO: 1558312 - RNA, 15 nt, Human adenovirus C
guccaucuggucaga

SEQ ID NO: 1558313 - RNA, 23 nt, Human adenovirus C
cagaagcuaaugaaugcacuacu

SEQ ID NO: 1558314 - RNA, 18 nt, Human adenovirus C
gcacgagcugcuucccaa

SEQ ID NO: 1558315 - RNA, 21 nt, Human adenovirus C
cgugcgcaguacuggcagcgg

SEQ ID NO: 1558316 - RNA, 15 nt, Human adenovirus C
ccaaccaggcagugc

SEQ ID NO: 1558317 - RNA, 14 nt, Human adenovirus C
guuccacgcagggc

SEQ ID NO: 1558318 - RNA, 12 nt, Human adenovirus C
ugcuugccaccu

SEQ ID NO: 1558319 - RNA, 20 nt, Human adenovirus C
aguggaaaauacaccacuga

SEQ ID NO: 1558320 - RNA, 18 nt, Human adenovirus C
cccugcaaacaucagccc

SEQ ID NO: 1558321 - RNA, 12 nt, Human adenovirus C
aaucuccugcac

SEQ ID NO: 1558322 - RNA, 15 nt, Human adenovirus C
gcaaccaccgcuccu

SEQ ID NO: 1558323 - RNA, 14 nt, Human adenovirus C
cucgaucucuuccu

SEQ ID NO: 1558324 - RNA, 21 nt, Human adenovirus C
guuccauccggcccaggggcg

SEQ ID NO: 1558325 - RNA, 19 nt, Human adenovirus C
aaugagcuugaucugcugg

SEQ ID NO: 1558326 - RNA, 13 nt, Human adenovirus C
cggcgcugcagag

SEQ ID NO: 1558327 - RNA, 18 nt, Human adenovirus C
uccucaggauuacaagcu

SEQ ID NO: 1558328 - RNA, 20 nt, Human adenovirus C
cauggcggggaccacagaac

SEQ ID NO: 1558329 - RNA, 12 nt, Human adenovirus C
aucccuguggac

SEQ ID NO: 1558330 - RNA, 23 nt, Human adenovirus C
ugcagcugccgucaucccugagc

SEQ ID NO: 1558331 - RNA, 17 nt, Human adenovirus C
accuguaacgcuggacc

SEQ ID NO: 1558332 - RNA, 19 nt, Human adenovirus C
cucgccugcgccauaguca

SEQ ID NO: 1558333 - RNA, 20 nt, Human adenovirus C
ccauccaaguauaggucucu

SEQ ID NO: 1558334 - RNA, 20 nt, Human adenovirus C
agccgacgcgcccuggaggc

SEQ ID NO: 1558335 - RNA, 15 nt, Human adenovirus C
ccaagaaauccacag

SEQ ID NO: 1558336 - RNA, 19 nt, Human adenovirus C
agcaaaucccgaauauuaa

SEQ ID NO: 1558337 - RNA, 12 nt, Human adenovirus C
gggggcgagguc

SEQ ID NO: 1558338 - RNA, 19 nt, Human adenovirus C
ccuaucagcagccgcgggc

SEQ ID NO: 1558339 - RNA, 16 nt, Human adenovirus C
aaugcaauuugaguca

SEQ ID NO: 1558340 - RNA, 21 nt, Human adenovirus C
acgugccgcggggacaggagg

SEQ ID NO: 1558341 - RNA, 13 nt, Human adenovirus C
agaaacacaagcu

SEQ ID NO: 1558342 - RNA, 23 nt, Human adenovirus C
cgcgcgagcccaaaguccagaug

SEQ ID NO: 1558343 - RNA, 16 nt, Human adenovirus C
ggucgcccgggcaggg

SEQ ID NO: 1558344 - RNA, 19 nt, Human adenovirus C
ccugcgcggccuuccggag

SEQ ID NO: 1558345 - RNA, 19 nt, Human adenovirus C
gucacugcuaccuucugca

SEQ ID NO: 1558346 - RNA, 14 nt, Human adenovirus C
cuggccaaccaggc

SEQ ID NO: 1558347 - RNA, 21 nt, Human adenovirus C
cuccacuuaaacucaggcaca

SEQ ID NO: 1558348 - RNA, 15 nt, Human adenovirus C
cggaguaccugagcc

SEQ ID NO: 1558349 - RNA, 14 nt, Human adenovirus C
gcgcgcgcaaaccc

SEQ ID NO: 1558350 - RNA, 22 nt, Human adenovirus C
gggaggcaagcacacagaccau

SEQ ID NO: 1558351 - RNA, 15 nt, Human adenovirus C
ccgcaggccaaccgg

SEQ ID NO: 1558352 - RNA, 16 nt, Human adenovirus C
ugcaaacuugcaagaa

SEQ ID NO: 1558353 - RNA, 19 nt, Human adenovirus C
agggcacccuccccuucuc

SEQ ID NO: 1558354 - RNA, 15 nt, Human adenovirus C
ccugccgugccaacc

SEQ ID NO: 1558355 - RNA, 10 nt, Human adenovirus C
ugaaacuuuu

SEQ ID NO: 1558356 - RNA, 14 nt, Human adenovirus C
uuagcguacaguca

SEQ ID NO: 1558357 - RNA, 14 nt, Human adenovirus C
gcggugcaggcggc

SEQ ID NO: 1558358 - RNA, 16 nt, Human adenovirus C
uaugauccagauguua

SEQ ID NO: 1558359 - RNA, 19 nt, Human adenovirus C
ucuggugacuuggcaccca

SEQ ID NO: 1558360 - RNA, 23 nt, Human adenovirus C
gcuccgggcugcgcgcuggccag

SEQ ID NO: 1558361 - RNA, 20 nt, Human adenovirus C
cgcguccuaucgagccgcac

SEQ ID NO: 1558362 - RNA, 13 nt, Human adenovirus C
ccaccuucagccu

SEQ ID NO: 1558363 - RNA, 13 nt, Human adenovirus C
cucgcuguggagc

SEQ ID NO: 1558364 - RNA, 19 nt, Human adenovirus C
cugcaaacaucagcccccc

SEQ ID NO: 1558365 - RNA, 19 nt, Human adenovirus C
gcucggcggugaccugcac

SEQ ID NO: 1558366 - RNA, 12 nt, Human adenovirus C
ccuggugcugcc

SEQ ID NO: 1558367 - RNA, 18 nt, Human adenovirus C
cguuggagacugcagccu

SEQ ID NO: 1558368 - RNA, 13 nt, Human adenovirus C
gugccagaggugc

SEQ ID NO: 1558369 - RNA, 15 nt, Human adenovirus C
agagacgcccaggcc

SEQ ID NO: 1558370 - RNA, 14 nt, Human adenovirus C
cgcugcccuggugu

SEQ ID NO: 1558371 - RNA, 17 nt, Human adenovirus C
cuggagcucccgcggcg

SEQ ID NO: 1558372 - RNA, 17 nt, Human adenovirus C
ugucugcgagggccagc

SEQ ID NO: 1558373 - RNA, 14 nt, Human adenovirus C
gaugaagaagagga

SEQ ID NO: 1558374 - RNA, 14 nt, Human adenovirus C
ccaagacuacucaa

SEQ ID NO: 1558375 - RNA, 14 nt, Human adenovirus C
gacgacagcagcgu

SEQ ID NO: 1558376 - RNA, 17 nt, Human adenovirus C
cugguuuccaugagccg

SEQ ID NO: 1558377 - RNA, 20 nt, Human adenovirus C
ugcacgcuggccagcacgcu

SEQ ID NO: 1558378 - RNA, 15 nt, Human adenovirus C
ccucaggcaccaucc

SEQ ID NO: 1558379 - RNA, 16 nt, Human adenovirus C
ucaccgucacccagca

SEQ ID NO: 1558380 - RNA, 17 nt, Human adenovirus C
guauugccacugccaca

SEQ ID NO: 1558381 - RNA, 14 nt, Human adenovirus C
ugccacacgggcgg

SEQ ID NO: 1558382 - RNA, 21 nt, Human adenovirus C
cuugaccgucuggcugcucga

SEQ ID NO: 1558383 - RNA, 13 nt, Human adenovirus C
cuacagccccuac

SEQ ID NO: 1558384 - RNA, 15 nt, Human adenovirus C
gcgcccguguugaug

SEQ ID NO: 1558385 - RNA, 14 nt, Human adenovirus C
gcuggugcugcgcg

SEQ ID NO: 1558386 - RNA, 12 nt, Human adenovirus C
cgggcggcaugc

SEQ ID NO: 1558387 - RNA, 14 nt, Human adenovirus C
ucgggaaugaaugu

SEQ ID NO: 1558388 - RNA, 18 nt, Human adenovirus C
gcccuaccugugcuuugc

SEQ ID NO: 1558389 - RNA, 14 nt, Human adenovirus C
gagccccgggcugg

SEQ ID NO: 1558390 - RNA, 14 nt, Human adenovirus C
aagcccgccaagag

SEQ ID NO: 1558391 - RNA, 14 nt, Human adenovirus C
ucggcgguggcaga

SEQ ID NO: 1558392 - RNA, 23 nt, Human adenovirus C
gccuccgaacgguaagagccuag

SEQ ID NO: 1558393 - RNA, 16 nt, Human adenovirus C
auggccuuugccugga

SEQ ID NO: 1558394 - RNA, 13 nt, Human adenovirus C
aucugacaacccc

SEQ ID NO: 1558395 - RNA, 15 nt, Human adenovirus C
gcccuggcuggcacg

SEQ ID NO: 1558396 - RNA, 14 nt, Human adenovirus C
ggcacaugcgagcc

SEQ ID NO: 1558397 - RNA, 23 nt, Human adenovirus C
gcuacaccuaccgccccagaaga

SEQ ID NO: 1558398 - RNA, 15 nt, Human adenovirus C
cuccugccaggcuca

SEQ ID NO: 1558399 - RNA, 23 nt, Human adenovirus C
gcuaccggagugcugggccagca

SEQ ID NO: 1558400 - RNA, 13 nt, Human adenovirus C
cguggcgggcggc

SEQ ID NO: 1558401 - RNA, 17 nt, Human adenovirus C
cgccugcuuacucccaa

SEQ ID NO: 1558402 - RNA, 17 nt, Human adenovirus C
cggccuuccggagcgag

SEQ ID NO: 1558403 - RNA, 18 nt, Human adenovirus C
uggcuccauaccauaccu

SEQ ID NO: 1558404 - RNA, 17 nt, Human adenovirus C
cacgguuuccugucgag

SEQ ID NO: 1558405 - RNA, 17 nt, Human adenovirus C
uaguauagccccaccac

SEQ ID NO: 1558406 - RNA, 15 nt, Human adenovirus C
gccaggacgccucgg

SEQ ID NO: 1558407 - RNA, 14 nt, Human adenovirus C
uugcucgcccuugc

SEQ ID NO: 1558408 - RNA, 19 nt, Human adenovirus C
cucggagcuaugcuaacca

SEQ ID NO: 1558409 - RNA, 22 nt, Human adenovirus C
auguaccuuacuuuaucucaaa

SEQ ID NO: 1558410 - RNA, 19 nt, Human adenovirus C
ccgcgguugugcaggguga

SEQ ID NO: 1558411 - RNA, 13 nt, Human adenovirus C
gcaaggccuggaa

SEQ ID NO: 1558412 - RNA, 16 nt, Human adenovirus C
ggcuacaggggccucu

SEQ ID NO: 1558413 - RNA, 13 nt, Human adenovirus C
guugacggccugg

SEQ ID NO: 1558414 - RNA, 14 nt, Human adenovirus C
ggugguggcggugu

SEQ ID NO: 1558415 - RNA, 17 nt, Human adenovirus C
ccccuucgaugcucccc

SEQ ID NO: 1558416 - RNA, 17 nt, Human adenovirus C
ccaggggcugguuggug

SEQ ID NO: 1558417 - RNA, 15 nt, Human adenovirus C
agcagggcaaccugg

SEQ ID NO: 1558418 - RNA, 13 nt, Human adenovirus C
ucuuaugccaggc

SEQ ID NO: 1558419 - RNA, 21 nt, Human adenovirus C
gaggcacuaaagcaaggccug

SEQ ID NO: 1558420 - RNA, 12 nt, Human adenovirus C
acgccaccuucu

SEQ ID NO: 1558421 - RNA, 15 nt, Human adenovirus C
gagagccggccugga

SEQ ID NO: 1558422 - RNA, 13 nt, Human adenovirus C
uugcccgcgccac

SEQ ID NO: 1558423 - RNA, 20 nt, Human adenovirus C
ucaccaacgcguuuagcagg

SEQ ID NO: 1558424 - RNA, 19 nt, Human adenovirus C
gccgcggcgauuggcgccg

SEQ ID NO: 1558425 - RNA, 16 nt, Human adenovirus C
agcgacgaccugggcg

SEQ ID NO: 1558426 - RNA, 20 nt, Human adenovirus C
ccuggaacagcagcacaggc

SEQ ID NO: 1558427 - RNA, 18 nt, Human adenovirus C
gucuaagcagccgccgcc

SEQ ID NO: 1558428 - RNA, 14 nt, Human adenovirus C
gcgcaguuggaaga

SEQ ID NO: 1558429 - RNA, 17 nt, Human adenovirus C
cugcccgccaccugcug

SEQ ID NO: 1558430 - RNA, 22 nt, Human adenovirus C
cauaucccagggaacaacccau

SEQ ID NO: 1558431 - RNA, 23 nt, Human adenovirus C
ccgccagcccccaccaucaccac

SEQ ID NO: 1558432 - RNA, 19 nt, Human adenovirus C
ggugcucguccagacgggc

SEQ ID NO: 1558433 - RNA, 17 nt, Human adenovirus C
gaccccuguauauuaau

SEQ ID NO: 1558434 - RNA, 14 nt, Human adenovirus C
aggagccuccaccg

SEQ ID NO: 1558435 - RNA, 21 nt, Human adenovirus C
gcgcccuucacggacaguggc

SEQ ID NO: 1558436 - RNA, 20 nt, Human adenovirus C
gccgugccaaccgcagccga

SEQ ID NO: 1558437 - RNA, 18 nt, Human adenovirus C
gcccuugauggagggcaa

SEQ ID NO: 1558438 - RNA, 15 nt, Human adenovirus C
cgcgagucuggugac

SEQ ID NO: 1558439 - RNA, 17 nt, Human adenovirus C
ucauggguaacagacau

SEQ ID NO: 1558440 - RNA, 16 nt, Human adenovirus C
gcucggucacgugcuc

SEQ ID NO: 1558441 - RNA, 21 nt, Human adenovirus C
ucgccagcccgugcuggcccc

SEQ ID NO: 1558442 - RNA, 21 nt, Human adenovirus C
acccgcccgcgccugcugggc

SEQ ID NO: 1558443 - RNA, 19 nt, Human adenovirus C
cccaaaaagaagcugcagc

SEQ ID NO: 1558444 - RNA, 15 nt, Human adenovirus C
ggcauagucucgccg

SEQ ID NO: 1558445 - RNA, 19 nt, Human adenovirus C
ggcagaaacagagggcugc

SEQ ID NO: 1558446 - RNA, 12 nt, Human adenovirus C
gcgccagcaccu

SEQ ID NO: 1558447 - RNA, 20 nt, Human adenovirus C
ggcacacgugcauacacuuc

SEQ ID NO: 1558448 - RNA, 19 nt, Human adenovirus C
uuauaacagcacuggcaac

SEQ ID NO: 1558449 - RNA, 22 nt, Human adenovirus C
cggcccugcuuaaccgcgcacg

SEQ ID NO: 1558450 - RNA, 23 nt, Human adenovirus C
acgugccgcggggacaggaggac

SEQ ID NO: 1558451 - RNA, 17 nt, Human adenovirus C
ucugcccgccaccugcu

SEQ ID NO: 1558452 - RNA, 16 nt, Human adenovirus C
ggccauucagaccgug

SEQ ID NO: 1558453 - RNA, 18 nt, Human adenovirus C
guagagcuugggcgcgag

SEQ ID NO: 1558454 - RNA, 17 nt, Human adenovirus C
cacuuggugcuggccug

SEQ ID NO: 1558455 - RNA, 23 nt, Human adenovirus C
uagcaagccgcucauggcgcagc

SEQ ID NO: 1558456 - RNA, 15 nt, Human adenovirus C
agugaagauguaaau

SEQ ID NO: 1558457 - RNA, 13 nt, Human adenovirus C
ucaucucugugcu

SEQ ID NO: 1558458 - RNA, 14 nt, Human adenovirus C
gcgguauccugccc

SEQ ID NO: 1558459 - RNA, 14 nt, Human adenovirus C
uggaacaaugacag

SEQ ID NO: 1558460 - RNA, 14 nt, Human adenovirus C
cgcuggccagcacg

SEQ ID NO: 1558461 - RNA, 20 nt, Human adenovirus C
uggaggagcgacgcaagcua

SEQ ID NO: 1558462 - RNA, 21 nt, Human adenovirus C
ugacgcgggcgcugaccugcg

SEQ ID NO: 1558463 - RNA, 22 nt, Human adenovirus C
uacuccggcacugccuacaacg

SEQ ID NO: 1558464 - RNA, 15 nt, Human adenovirus C
caugucgcccucuuc

SEQ ID NO: 1558465 - RNA, 15 nt, Human adenovirus C
cuucuaaauagcuaa

SEQ ID NO: 1558466 - RNA, 16 nt, Human adenovirus C
auguuguacagguggc

SEQ ID NO: 1558467 - RNA, 17 nt, Human adenovirus C
gcggugcgggcggcgcu

SEQ ID NO: 1558468 - RNA, 19 nt, Human adenovirus C
ggccugcaaaauuuccaac

SEQ ID NO: 1558469 - RNA, 17 nt, Human adenovirus C
ugucgucgcauccgccc

SEQ ID NO: 1558470 - RNA, 16 nt, Human adenovirus C
cagcucuacagcuucc

SEQ ID NO: 1558471 - RNA, 20 nt, Human adenovirus C
cuggcgcggcuaggagcgcc

SEQ ID NO: 1558472 - RNA, 19 nt, Human adenovirus C
gcggaugucagccuugccu

SEQ ID NO: 1558473 - RNA, 13 nt, Human adenovirus C
agcuggccgggca

SEQ ID NO: 1558474 - RNA, 18 nt, Human adenovirus C
accagccugugaugcugg

SEQ ID NO: 1558475 - RNA, 20 nt, Human adenovirus C
uguaagcgaagacgacgagg

SEQ ID NO: 1558476 - RNA, 15 nt, Human adenovirus C
cgggcacuaccgcgc

SEQ ID NO: 1558477 - RNA, 14 nt, Human adenovirus C
gacaaguugaaaga

SEQ ID NO: 1558478 - RNA, 15 nt, Human adenovirus C
acagaggaggcuagg

SEQ ID NO: 1558479 - RNA, 14 nt, Human adenovirus C
cgcgucggccaggu

SEQ ID NO: 1558480 - RNA, 22 nt, Human adenovirus C
agcaggccaacgagcgccucgg

SEQ ID NO: 1558481 - RNA, 23 nt, Human adenovirus C
uacacaguccuuucuccccggcu

SEQ ID NO: 1558482 - RNA, 15 nt, Human adenovirus C
ugagguacaugauuu

SEQ ID NO: 1558483 - RNA, 23 nt, Human adenovirus C
gaguugcaacagcgcgagcaggc

SEQ ID NO: 1558484 - RNA, 13 nt, Human adenovirus C
cccuucuucuucu

SEQ ID NO: 1558485 - RNA, 23 nt, Human adenovirus C
aggcuaccgcucguggcgcgggc

SEQ ID NO: 1558486 - RNA, 15 nt, Human adenovirus C
cuugccugcuccaga

SEQ ID NO: 1558487 - RNA, 20 nt, Human adenovirus C
agggcgcuccuaacuccugu

SEQ ID NO: 1558488 - RNA, 21 nt, Human adenovirus C
cgcagcuuguugaccagcucg

SEQ ID NO: 1558489 - RNA, 19 nt, Human adenovirus C
gguguaggccacgugaccg

SEQ ID NO: 1558490 - RNA, 15 nt, Human adenovirus C
caagcuacccaccca

SEQ ID NO: 1558491 - RNA, 14 nt, Human adenovirus C
agccaggucuugca

SEQ ID NO: 1558492 - RNA, 21 nt, Human adenovirus C
ggcacugccuacaacgcucua

SEQ ID NO: 1558493 - RNA, 15 nt, Human adenovirus C
agcgguuaggcugga

SEQ ID NO: 1558494 - RNA, 16 nt, Human adenovirus C
cguaggugagcuccuc

SEQ ID NO: 1558495 - RNA, 12 nt, Human adenovirus C
ggacauaaacau

SEQ ID NO: 1558496 - RNA, 20 nt, Human adenovirus C
ugauucuuugaaucuggguc

SEQ ID NO: 1558497 - RNA, 16 nt, Human adenovirus C
uuacauuuaaaucaga

SEQ ID NO: 1558498 - RNA, 12 nt, Human adenovirus C
ucuuccuccugg

SEQ ID NO: 1558499 - RNA, 12 nt, Human adenovirus C
gcagggugacaa

SEQ ID NO: 1558500 - RNA, 21 nt, Human adenovirus C
cgcaaccuaaaggagcugcag

SEQ ID NO: 1558501 - RNA, 23 nt, Human adenovirus C
uggcaccuuuuguuccaccgcuc

SEQ ID NO: 1558502 - RNA, 13 nt, Human adenovirus C
uggcccgcgguga

SEQ ID NO: 1558503 - RNA, 15 nt, Human adenovirus C
uggacgcuggaagac

SEQ ID NO: 1558504 - RNA, 17 nt, Human adenovirus C
uggaggaggcgcgcaac

SEQ ID NO: 1558505 - RNA, 23 nt, Human adenovirus C
auugauggucgccccguccugcc

SEQ ID NO: 1558506 - RNA, 22 nt, Human adenovirus C
auuguuguguagguacuccgcc

SEQ ID NO: 1558507 - RNA, 17 nt, Human adenovirus C
aguuggaagacgccgcc

SEQ ID NO: 1558508 - RNA, 20 nt, Human adenovirus C
aguuccaagaagcgcggggu

SEQ ID NO: 1558509 - RNA, 18 nt, Human adenovirus C
agugucgucgcauccgcc

SEQ ID NO: 1558510 - RNA, 16 nt, Human adenovirus C
aguuggggccuccgcc

SEQ ID NO: 1558511 - RNA, 14 nt, Human adenovirus C
aggcaaacgaggaa

SEQ ID NO: 1558512 - RNA, 13 nt, Human adenovirus C
agcgccucgggga

SEQ ID NO: 1558513 - RNA, 20 nt, Human adenovirus C
agauugagcuccacgugccg

SEQ ID NO: 1558514 - RNA, 20 nt, Human adenovirus C
agauuagguucuacgaagac

SEQ ID NO: 1558515 - RNA, 22 nt, Human adenovirus C
agaugugggagacgacgugcug

SEQ ID NO: 1558516 - RNA, 15 nt, Human adenovirus C
acacaagcuaaaccu

SEQ ID NO: 1558517 - RNA, 15 nt, Human adenovirus C
acccagcagaaaccu

SEQ ID NO: 1558518 - RNA, 20 nt, Human adenovirus C
aacccacacugauuaugaca

SEQ ID NO: 1558519 - RNA, 18 nt, Human adenovirus C
aacggccgcuacgugccc

SEQ ID NO: 1558520 - RNA, 18 nt, Human adenovirus C
aacgccaccaacgugccc

SEQ ID NO: 1558521 - RNA, 11 nt, Human adenovirus C
gagacaugauu

SEQ ID NO: 1558522 - RNA, 19 nt, Human adenovirus C
gcagggcgcugucauaccu

SEQ ID NO: 1558523 - RNA, 14 nt, Human adenovirus C
gaaaacagcgaaaa

SEQ ID NO: 1558524 - RNA, 15 nt, Human adenovirus C
gaaacgcgcggcaaa

SEQ ID NO: 1558525 - RNA, 16 nt, Human adenovirus C
gaacaagagcugaaaa

SEQ ID NO: 1558526 - RNA, 21 nt, Human adenovirus C
gaagugauuaucgagcaggac

SEQ ID NO: 1558527 - RNA, 17 nt, Human adenovirus C
gacagcaacuuggcgau

SEQ ID NO: 1558528 - RNA, 12 nt, Human adenovirus C
cggccguccgcc

SEQ ID NO: 1558529 - RNA, 15 nt, Human adenovirus C
cggcggcagcagcag

SEQ ID NO: 1558530 - RNA, 15 nt, Human adenovirus C
cggcggcggcaggag

SEQ ID NO: 1558531 - RNA, 18 nt, Human adenovirus C
guuuugcgacccggcacc

SEQ ID NO: 1558532 - RNA, 19 nt, Human adenovirus C
guuucagccccccggcgcc

SEQ ID NO: 1558533 - RNA, 20 nt, Human adenovirus C
uggacaugaccgcgcgcaac

SEQ ID NO: 1558534 - RNA, 13 nt, Human adenovirus C
ugcguggaagaac

SEQ ID NO: 1558535 - RNA, 22 nt, Human adenovirus C
ugacuaccuuuccgccgccaac

SEQ ID NO: 1558536 - RNA, 14 nt, Human adenovirus C
ugacugcgcguaac

SEQ ID NO: 1558537 - RNA, 13 nt, Human adenovirus C
ugacacccgcaac

SEQ ID NO: 1558538 - RNA, 21 nt, Human adenovirus C
gcuuaccccgccaacgugccc

SEQ ID NO: 1558539 - RNA, 15 nt, Human adenovirus C
ggaggagaagcgcgc

SEQ ID NO: 1558540 - RNA, 22 nt, Human adenovirus C
ggagcuggugcugcgcgcggag

SEQ ID NO: 1558541 - RNA, 20 nt, Human adenovirus C
ggugacggccuacuggagug

SEQ ID NO: 1558542 - RNA, 19 nt, Human adenovirus C
ggugcagacccugcgagug

SEQ ID NO: 1558543 - RNA, 19 nt, Human adenovirus C
ggugcaguuugcccgcgcc

SEQ ID NO: 1558544 - RNA, 23 nt, Human adenovirus C
gugcgcgggcacuaccgcgcgcc

SEQ ID NO: 1558545 - RNA, 19 nt, Human adenovirus C
ggguaucauggcggacgac

SEQ ID NO: 1558546 - RNA, 16 nt, Human adenovirus C
ggucaucgcgccggag

SEQ ID NO: 1558547 - RNA, 14 nt, Human adenovirus C
gcgcgcccgccagc

SEQ ID NO: 1558548 - RNA, 17 nt, Human adenovirus C
ggccguucucgcggggg

SEQ ID NO: 1558549 - RNA, 21 nt, Human adenovirus C
gcaccguccgaagaaaagcgc

SEQ ID NO: 1558550 - RNA, 13 nt, Human adenovirus C
gagggcccggcgc

SEQ ID NO: 1558551 - RNA, 13 nt, Human adenovirus C
gauagcggccggg

SEQ ID NO: 1558552 - RNA, 18 nt, Human adenovirus C
cgcggcaaacgcucugca

SEQ ID NO: 1558553 - RNA, 20 nt, Human adenovirus C
cguggcgaaaagcguccgcg

SEQ ID NO: 1558554 - RNA, 19 nt, Human adenovirus C
cucgcucgacgaagugcca

SEQ ID NO: 1558555 - RNA, 12 nt, Human adenovirus C
ugugcccggccc

SEQ ID NO: 1558556 - RNA, 22 nt, Human adenovirus C
uguccaucaacgcgcgcgcagc

SEQ ID NO: 1558557 - RNA, 19 nt, Human adenovirus C
uggucccggcgcgcgcaaa

SEQ ID NO: 1558558 - RNA, 21 nt, Human adenovirus C
ugggcauccgcaagcggcaac

SEQ ID NO: 1558559 - RNA, 13 nt, Human adenovirus C
ugggccgcggggg

SEQ ID NO: 1558560 - RNA, 16 nt, Human adenovirus C
ugcgcgugcgcgggca

SEQ ID NO: 1558561 - RNA, 18 nt, Human adenovirus C
ugcggccuaccgggggga

SEQ ID NO: 1558562 - RNA, 20 nt, Human adenovirus C
uucacggacaguggcagcgu

SEQ ID NO: 1558563 - RNA, 19 nt, Human adenovirus C
uucccgcacuguuggaugu

SEQ ID NO: 1558564 - RNA, 20 nt, Human adenovirus C
uugcugacacuguaccgcga

SEQ ID NO: 1558565 - RNA, 22 nt, Human adenovirus C
ugcgacgucagacaacggggga

SEQ ID NO: 1558566 - RNA, 23 nt, Human adenovirus C
ugcgcacccgccccccgcgcaac

SEQ ID NO: 1558567 - RNA, 19 nt, Human adenovirus C
guggggcuccucccaggca

SEQ ID NO: 1558568 - RNA, 13 nt, Human adenovirus C
guggucccggcgc

SEQ ID NO: 1558569 - RNA, 17 nt, Human adenovirus C
guguaccaguccgggcc

SEQ ID NO: 1558570 - RNA, 15 nt, Human adenovirus C
uacugcaccggcggc

SEQ ID NO: 1558571 - RNA, 20 nt, Human adenovirus C
cuggaacagagcucuaacag

SEQ ID NO: 1558572 - RNA, 21 nt, Human adenovirus C
gaagcugcagcugccgccgcc

SEQ ID NO: 1558573 - RNA, 18 nt, Human adenovirus C
gacggcggccuggcgcaa

SEQ ID NO: 1558574 - RNA, 12 nt, Human adenovirus C
cggggacaggag

SEQ ID NO: 1558575 - RNA, 14 nt, Human adenovirus C
cggugaaccaggag

SEQ ID NO: 1558576 - RNA, 14 nt, Human adenovirus C
cggugacgcgggcg

SEQ ID NO: 1558577 - RNA, 13 nt, Human adenovirus C
cucuugcguccgc

SEQ ID NO: 1558578 - RNA, 17 nt, Human adenovirus C
cugaggcuacagaggag

SEQ ID NO: 1558579 - RNA, 14 nt, Human adenovirus C
gugagcgcggcgcc

SEQ ID NO: 1558580 - RNA, 19 nt, Human adenovirus C
gugagcgugagccggcggc

SEQ ID NO: 1558581 - RNA, 13 nt, Human adenovirus C
gugaugcuggaug

SEQ ID NO: 1558582 - RNA, 14 nt, Human adenovirus C
gugcaguuggccau

SEQ ID NO: 1558583 - RNA, 20 nt, Human adenovirus C
ggaaccgggacuggaacaau

SEQ ID NO: 1558584 - RNA, 20 nt, Human adenovirus C
ggaagacguaugcgcaggag

SEQ ID NO: 1558585 - RNA, 21 nt, Human adenovirus C
ggacaggcuuaccccgccaac

SEQ ID NO: 1558586 - RNA, 17 nt, Human adenovirus C
guacucguacaaagcgc

SEQ ID NO: 1558587 - RNA, 22 nt, Human adenovirus C
guagcacgucgccaccgccgcc

SEQ ID NO: 1558588 - RNA, 15 nt, Human adenovirus C
gucaauacggccggu

SEQ ID NO: 1558589 - RNA, 21 nt, Human adenovirus C
gucgugcgcaccaccggcggc

SEQ ID NO: 1558590 - RNA, 14 nt, Human adenovirus C
gcucgccgcccagc

SEQ ID NO: 1558591 - RNA, 21 nt, Human adenovirus C
gcguggcccuuggcgcgcagc

SEQ ID NO: 1558592 - RNA, 21 nt, Human adenovirus C
gcccuucacggacaguggcag

SEQ ID NO: 1558593 - RNA, 20 nt, Human adenovirus C
gccgcuggacgagggcaacc

SEQ ID NO: 1558594 - RNA, 15 nt, Human adenovirus C
gccuaccaggcaagc

SEQ ID NO: 1558595 - RNA, 19 nt, Human adenovirus C
caacguguuuauuuuucaa

SEQ ID NO: 1558596 - RNA, 23 nt, Human adenovirus C
auauuggcuaccagggcuucuac

SEQ ID NO: 1558597 - RNA, 13 nt, Human adenovirus C
aucccuccgggga

SEQ ID NO: 1558598 - RNA, 14 nt, Human adenovirus C
aggcguacgugccg

SEQ ID NO: 1558599 - RNA, 22 nt, Human adenovirus C
auacggccgccagagcuuccac

SEQ ID NO: 1558600 - RNA, 13 nt, Human adenovirus C
acacggccuccac

SEQ ID NO: 1558601 - RNA, 14 nt, Human adenovirus C
aauaggcaaaaccg

SEQ ID NO: 1558602 - RNA, 13 nt, Human adenovirus C
accgcccgcggga

SEQ ID NO: 1558603 - RNA, 19 nt, Human adenovirus C
accgugaaugcccuccgcc

SEQ ID NO: 1558604 - RNA, 19 nt, Human adenovirus C
ccaucuauaggccuaucau

SEQ ID NO: 1558605 - RNA, 22 nt, Human adenovirus C
ccauuuuuacaaagcgcgggcg

SEQ ID NO: 1558606 - RNA, 20 nt, Human adenovirus C
cccaauuacauugcuuucag

SEQ ID NO: 1558607 - RNA, 13 nt, Human adenovirus C
ccccuccgcggcg

SEQ ID NO: 1558608 - RNA, 13 nt, Human adenovirus C
ccccucgccggcg

SEQ ID NO: 1558609 - RNA, 20 nt, Human adenovirus C
ccccuucggcaucgcgggcg

SEQ ID NO: 1558610 - RNA, 20 nt, Human adenovirus C
cccgaauaaacuacaugagc

SEQ ID NO: 1558611 - RNA, 21 nt, Human adenovirus C
cccuaucagcagccgcgggcc

SEQ ID NO: 1558612 - RNA, 16 nt, Human adenovirus C
ccuuccaggcgcggcg

SEQ ID NO: 1558613 - RNA, 16 nt, Human adenovirus C
ccuuauaucgcccagc

SEQ ID NO: 1558614 - RNA, 13 nt, Human adenovirus C
cgaggaggaggag

SEQ ID NO: 1558615 - RNA, 15 nt, Human adenovirus C
cgccgcgcgcgggca

SEQ ID NO: 1558616 - RNA, 15 nt, Human adenovirus C
gagcccacccuucuu

SEQ ID NO: 1558617 - RNA, 20 nt, Human adenovirus C
gaucgcacccuuuggcgcau

SEQ ID NO: 1558618 - RNA, 21 nt, Human adenovirus C
gaucuccugaaucuggcgccu

SEQ ID NO: 1558619 - RNA, 19 nt, Human adenovirus C
gagcgcugcgucuggcgcc

SEQ ID NO: 1558620 - RNA, 23 nt, Human adenovirus C
ccgcgcaccuggcggacauuauc

SEQ ID NO: 1558621 - RNA, 22 nt, Human adenovirus C
cgccugcugccaugcgcgggcg

SEQ ID NO: 1558622 - RNA, 20 nt, Human adenovirus C
uccuaccuuggaauuuugca

SEQ ID NO: 1558623 - RNA, 16 nt, Human adenovirus C
ggcgccgugcccggaa

SEQ ID NO: 1558624 - RNA, 17 nt, Human adenovirus C
ggcgcgcacaaacgcgg

SEQ ID NO: 1558625 - RNA, 21 nt, Human adenovirus C
ggcggcccugcuuaaccgcgc

SEQ ID NO: 1558626 - RNA, 13 nt, Human adenovirus C
ggcggcgcgcaac

SEQ ID NO: 1558627 - RNA, 16 nt, Human adenovirus C
gcgccgcgcgcgggca

SEQ ID NO: 1558628 - RNA, 20 nt, Human adenovirus C
gcgccguagcgccauugcuu

SEQ ID NO: 1558629 - RNA, 16 nt, Human adenovirus C
gcgccgugccgccagc

SEQ ID NO: 1558630 - RNA, 20 nt, Human adenovirus C
gcgcgcaacuacacgcccac

SEQ ID NO: 1558631 - RNA, 14 nt, Human adenovirus C
ucccaucgcgcaac

SEQ ID NO: 1558632 - RNA, 20 nt, Human adenovirus C
cuaugcaccccgcaccgcuc

SEQ ID NO: 1558633 - RNA, 23 nt, Human adenovirus C
gagcugcugagccgccgugcgcc

SEQ ID NO: 1558634 - RNA, 20 nt, Human adenovirus C
gauuugggagggaguggcaa

SEQ ID NO: 1558635 - RNA, 15 nt, Human adenovirus C
gcaaccgcgcccagg

SEQ ID NO: 1558636 - RNA, 20 nt, Human adenovirus C
cuacgaaaaaaccacuaccg

SEQ ID NO: 1558637 - RNA, 19 nt, Human adenovirus C
ccgggucagggcgcgggcu

SEQ ID NO: 1558638 - RNA, 20 nt, Human adenovirus C
ccguccgccgugauccaugc

SEQ ID NO: 1558639 - RNA, 17 nt, Human adenovirus C
cacccacggacgaggag

SEQ ID NO: 1558640 - RNA, 15 nt, Human adenovirus C
acugcagccuccgcc

SEQ ID NO: 1558641 - RNA, 16 nt, Human adenovirus C
acuggaacccgccgcc

SEQ ID NO: 1558642 - RNA, 20 nt, Human adenovirus C
acugguguuuagugcuccac

SEQ ID NO: 1558643 - RNA, 19 nt, Human adenovirus C
acuguugucuuccguccgc

SEQ ID NO: 1558644 - RNA, 12 nt, Human adenovirus C
acuacguccgcg

SEQ ID NO: 1558645 - RNA, 21 nt, Human adenovirus C
cagagcauaguggugcaggag

SEQ ID NO: 1558646 - RNA, 23 nt, Human adenovirus C
cagaggagguuuuggacgaggag

SEQ ID NO: 1558647 - RNA, 11 nt, Human adenovirus C
aagcaaaacca

SEQ ID NO: 1558648 - RNA, 13 nt, Human adenovirus C
cgagggagaggag

SEQ ID NO: 1558649 - RNA, 21 nt, Human adenovirus C
cgaggucgauggccgcgggcu

SEQ ID NO: 1558650 - RNA, 14 nt, Human adenovirus C
cgccggcacugccu

SEQ ID NO: 1558651 - RNA, 20 nt, Human adenovirus C
cgccgggcccggcacuaccu

SEQ ID NO: 1558652 - RNA, 14 nt, Human adenovirus C
cgccugacacaccu

SEQ ID NO: 1558653 - RNA, 20 nt, Human adenovirus C
cggaggagcaacagcaggag

SEQ ID NO: 1558654 - RNA, 16 nt, Human adenovirus C
augcagcgcgcggcga

SEQ ID NO: 1558655 - RNA, 20 nt, Human adenovirus C
augccaggccuacaaauccu

SEQ ID NO: 1558656 - RNA, 16 nt, Human adenovirus C
augccauucgcggcga

SEQ ID NO: 1558657 - RNA, 15 nt, Human adenovirus C
aucuccccgcggcga

SEQ ID NO: 1558658 - RNA, 22 nt, Human adenovirus C
augacaccgaacagggcgggga

SEQ ID NO: 1558659 - RNA, 22 nt, Human adenovirus C
cagcggguuuaucaccgugcuu

SEQ ID NO: 1558660 - RNA, 17 nt, Human adenovirus C
cagucgagaaggaggac

SEQ ID NO: 1558661 - RNA, 15 nt, Human adenovirus C
agcccgacgcgcgga

SEQ ID NO: 1558662 - RNA, 17 nt, Human adenovirus C
agcccgccaacgugccg

SEQ ID NO: 1558663 - RNA, 23 nt, Human adenovirus C
agcccgccaacgugccgcgggga

SEQ ID NO: 1558664 - RNA, 13 nt, Human adenovirus C
aucgccgcggcga

SEQ ID NO: 1558665 - RNA, 14 nt, Human adenovirus C
agcucccgcggcga

SEQ ID NO: 1558666 - RNA, 22 nt, Human adenovirus C
cugugcugccagggccguccgc

SEQ ID NO: 1558667 - RNA, 12 nt, Human adenovirus C
gaccgccugcuu

SEQ ID NO: 1558668 - RNA, 14 nt, Human adenovirus C
gcacgcaaccgcgc

SEQ ID NO: 1558669 - RNA, 20 nt, Human adenovirus C
gcacgcccuucucggccggc

SEQ ID NO: 1558670 - RNA, 15 nt, Human adenovirus C
gcacugccgcccaac

SEQ ID NO: 1558671 - RNA, 14 nt, Human adenovirus C
gcagcaccuugcgu

SEQ ID NO: 1558672 - RNA, 19 nt, Human adenovirus C
gcagccgcgggcccuugcu

SEQ ID NO: 1558673 - RNA, 22 nt, Human adenovirus C
cugggacagucaggcagaggag

SEQ ID NO: 1558674 - RNA, 20 nt, Human adenovirus C
cugcugagccgccgugcgcc

SEQ ID NO: 1558675 - RNA, 20 nt, Human adenovirus C
gcauuccccucgccggcgcc

SEQ ID NO: 1558676 - RNA, 19 nt, Human adenovirus C
gcauccgcaagcggcaacc

SEQ ID NO: 1558677 - RNA, 22 nt, Human adenovirus C
guaagucuaagcagccgccgcc

SEQ ID NO: 1558678 - RNA, 22 nt, Human adenovirus C
ggagccugggcuggagcccgag

SEQ ID NO: 1558679 - RNA, 16 nt, Human adenovirus C
guacggcaccgccagc

SEQ ID NO: 1558680 - RNA, 18 nt, Human adenovirus C
gcguaggagucgcgcagc

SEQ ID NO: 1558681 - RNA, 20 nt, Human adenovirus C
gcuagccaacuaccuugccu

SEQ ID NO: 1558682 - RNA, 20 nt, Human adenovirus C
ggacgcgacgagaaacgcgc

SEQ ID NO: 1558683 - RNA, 17 nt, Human adenovirus C
gcccgggggaggcaagc

SEQ ID NO: 1558684 - RNA, 17 nt, Human adenovirus C
gccggucuucgcccugc

SEQ ID NO: 1558685 - RNA, 21 nt, Human adenovirus C
gcgacgagcggccgccgcagc

SEQ ID NO: 1558686 - RNA, 20 nt, Human adenovirus C
gcgacgggguaacgcccagc

SEQ ID NO: 1558687 - RNA, 18 nt, Human adenovirus C
gcggccacacccggcgcc

SEQ ID NO: 1558688 - RNA, 18 nt, Human adenovirus C
gcgcgcuaccaccccagc

SEQ ID NO: 1558689 - RNA, 18 nt, Human adenovirus C
ggccaggacgccucggag

SEQ ID NO: 1558690 - RNA, 15 nt, Human adenovirus C
ggcgggcccccggag

SEQ ID NO: 1558691 - RNA, 22 nt, Human adenovirus C
ggcucgcucccuguagccggag

SEQ ID NO: 1558692 - RNA, 17 nt, Human adenovirus C
gggcgcaguuggaagac

SEQ ID NO: 1558693 - RNA, 21 nt, Human adenovirus C
gggcugcucugcucggaagac

SEQ ID NO: 1558694 - RNA, 21 nt, Human adenovirus C
caccucuggggauggcgggcg

SEQ ID NO: 1558695 - RNA, 19 nt, Human adenovirus C
cacgaucuuggccuugcua

SEQ ID NO: 1558696 - RNA, 17 nt, Human adenovirus C
acgucgccaccgccgcc

SEQ ID NO: 1558697 - RNA, 14 nt, Human adenovirus C
agaagaacaugccg

SEQ ID NO: 1558698 - RNA, 13 nt, Human adenovirus C
agacgacgaggau

SEQ ID NO: 1558699 - RNA, 18 nt, Human adenovirus C
agaccugggccaaaaccu

SEQ ID NO: 1558700 - RNA, 20 nt, Human adenovirus C
caccgaacagggcggggaug

SEQ ID NO: 1558701 - RNA, 19 nt, Human adenovirus C
acgguuugaggccguccgc

SEQ ID NO: 1558702 - RNA, 14 nt, Human adenovirus C
ccguucucgcgggg

SEQ ID NO: 1558703 - RNA, 22 nt, Human adenovirus C
cuaacaguggcaaccaccgcuc

SEQ ID NO: 1558704 - RNA, 20 nt, Human adenovirus C
cuaaccagcguagccccuau

SEQ ID NO: 1558705 - RNA, 15 nt, Human adenovirus C
ccgcguccaaaaccu

SEQ ID NO: 1558706 - RNA, 16 nt, Human adenovirus C
ccgcauccccgcggcg

SEQ ID NO: 1558707 - RNA, 22 nt, Human adenovirus C
ccgcaccgcucccuggucugca

SEQ ID NO: 1558708 - RNA, 17 nt, Human adenovirus C
cagaaagcuacaaggac

SEQ ID NO: 1558709 - RNA, 20 nt, Human adenovirus C
ccaagaugagguacaugauu

SEQ ID NO: 1558710 - RNA, 18 nt, Human adenovirus C
ccaacguggagcucugca

SEQ ID NO: 1558711 - RNA, 15 nt, Human adenovirus C
caagucauuuuucau

SEQ ID NO: 1558712 - RNA, 18 nt, Human adenovirus C
caaaauuuccaacgugga

SEQ ID NO: 1558713 - RNA, 21 nt, Human adenovirus C
augguugguggacgucgcgcc

SEQ ID NO: 1558714 - RNA, 20 nt, Human adenovirus C
auguccaugggcgcacucac

SEQ ID NO: 1558715 - RNA, 12 nt, Human adenovirus C
ccccacaugaua

SEQ ID NO: 1558716 - RNA, 14 nt, Human adenovirus C
cccggccacuaccc

SEQ ID NO: 1558717 - RNA, 16 nt, Human adenovirus C
aaaucaggcaaagccu

SEQ ID NO: 1558718 - RNA, 15 nt, Human adenovirus C
aaagcuauguugggu

SEQ ID NO: 1558719 - RNA, 20 nt, Human adenovirus C
aaaccagcuggccaaaaccu

SEQ ID NO: 1558720 - RNA, 20 nt, Human adenovirus C
aaaagaagcugcagcugccg

SEQ ID NO: 1558721 - RNA, 19 nt, Human adenovirus C
aaaagauuauccaaaaccu

SEQ ID NO: 1558722 - RNA, 21 nt, Human
cucgugccaccccgagggcug

SEQ ID NO: 1558723 - RNA, 13 nt, Human
ccuuccccagcau

SEQ ID NO: 1558724 - RNA, 12 nt, Human
ccuuccccagca

SEQ ID NO: 1558725 - RNA, 14 nt, Human
cuaagucauucaua

SEQ ID NO: 1558726 - RNA, 16 nt, Human
cccugacagggccagu

SEQ ID NO: 1558727 - RNA, 13 nt, Human
cccugacagggcc

SEQ ID NO: 1558728 - RNA, 16 nt, Human
cccuggaugcccagga

SEQ ID NO: 1558729 - RNA, 15 nt, Human
cccuggaugcccagg

SEQ ID NO: 1558730 - RNA, 19 nt, Human
cccagcaugcaccacgggc

SEQ ID NO: 1558731 - RNA, 23 nt, Human
cccagcaugcaccacgggcccgg

SEQ ID NO: 1558732 - RNA, 15 nt, Human
ccagacggggcugga

SEQ ID NO: 1558733 - RNA, 15 nt, Human
ccagaucaaggaugu

SEQ ID NO: 1558734 - RNA, 18 nt, Human
ccagacuugggaggaugu

SEQ ID NO: 1558735 - RNA, 15 nt, Human
caggaccccagcucu

SEQ ID NO: 1558736 - RNA, 14 nt, Human
caggaccccagcuc

SEQ ID NO: 1558737 - RNA, 13 nt, Human
caggaccccagcu

SEQ ID NO: 1558738 - RNA, 12 nt, Human
caggaccccagc

SEQ ID NO: 1558739 - RNA, 17 nt, Human
caggaccucgugccacc

SEQ ID NO: 1558740 - RNA, 14 nt, Human
cauuuguuguuuga

SEQ ID NO: 1558741 - RNA, 17 nt, Human
gccggccaguggccuuc

SEQ ID NO: 1558742 - RNA, 15 nt, Human
gccuccucaggagcc

SEQ ID NO: 1558743 - RNA, 17 nt, Human
gccaccccgagggcuga

SEQ ID NO: 1558744 - RNA, 23 nt, Human
gccaccccgagggcugagccugg

SEQ ID NO: 1558745 - RNA, 16 nt, Human
gccaccccgagggcug

SEQ ID NO: 1558746 - RNA, 13 nt, Human
ggaccccagcucu

SEQ ID NO: 1558747 - RNA, 15 nt, Human
ggaccccagcucugc

SEQ ID NO: 1558748 - RNA, 12 nt, Human
ggaccccagcuc

SEQ ID NO: 1558749 - RNA, 17 nt, Human
aaaagcuggauuuucuu

SEQ ID NO: 1558750 - RNA, 18 nt, Human
gaccucgugccaccccga

SEQ ID NO: 1558751 - RNA, 20 nt, Human
gagggcugagccugguccca

SEQ ID NO: 1558752 - RNA, 20 nt, Human
cuuauuagaaaaauauuaua

SEQ ID NO: 1558753 - RNA, 15 nt, Human
cuggaugcccaggaa

SEQ ID NO: 1558754 - RNA, 14 nt, Human
cuggaugcccagga

SEQ ID NO: 1558755 - RNA, 13 nt, Human
cuggaugcccagg

SEQ ID NO: 1558756 - RNA, 16 nt, Human
cuggaugcccaggaau

SEQ ID NO: 1558757 - RNA, 14 nt, Human
cuggaugauauuuu

SEQ ID NO: 1558758 - RNA, 11 nt, Human
cuggugcccug

SEQ ID NO: 1558759 - RNA, 15 nt, Human
cugcagccugcagga

SEQ ID NO: 1558760 - RNA, 19 nt, Human
cugcagccugcaggaccuc

SEQ ID NO: 1558761 - RNA, 14 nt, Human
cugcagccugcagg

SEQ ID NO: 1558762 - RNA, 12 nt, Human
cugcagccugca

SEQ ID NO: 1558763 - RNA, 16 nt, Human
aacauuugcugucagc

SEQ ID NO: 1558764 - RNA, 23 nt, Human
gugccguguccccugacagggcc

SEQ ID NO: 1558765 - RNA, 22 nt, Human
gugccguguccccugacagggc

SEQ ID NO: 1558766 - RNA, 18 nt, Human
uaguuuugugaaggugau

SEQ ID NO: 1558767 - RNA, 12 nt, Human
accauuauuuuu

SEQ ID NO: 1558768 - RNA, 16 nt, Human
accagacggggcugga

SEQ ID NO: 1558769 - RNA, 21 nt, Human
accagacggggcuggagugug

SEQ ID NO: 1558770 - RNA, 15 nt, Human
accagacggggcugg

SEQ ID NO: 1558771 - RNA, 14 nt, Human
accagacggggcug

SEQ ID NO: 1558772 - RNA, 18 nt, Human
acaguugcuguuguguga

SEQ ID NO: 1558773 - RNA, 23 nt, Human
accucgugccaccccgagggcug

SEQ ID NO: 1558774 - RNA, 19 nt, Human
accucgugccaccccgagg

SEQ ID NO: 1558775 - RNA, 17 nt, Human
acgggcccggguugggu

SEQ ID NO: 1558776 - RNA, 16 nt, Human
acgggcccggguuggg

SEQ ID NO: 1558777 - RNA, 21 nt, Human
acgggcccggguugggucacc

SEQ ID NO: 1558778 - RNA, 20 nt, Human
acgggcccggguugggucac

SEQ ID NO: 1558779 - RNA, 16 nt, Human
ucgguccuggugcccu

SEQ ID NO: 1558780 - RNA, 13 nt, Human
ucgguccuggugc

SEQ ID NO: 1558781 - RNA, 15 nt, Human
acuuauagauugaaa

SEQ ID NO: 1558782 - RNA, 19 nt, Human
acuugaauaaccaucugaa

SEQ ID NO: 1558783 - RNA, 20 nt, Human
acuugaauaaccaucugaaa

SEQ ID NO: 1558784 - RNA, 15 nt, Human
agagucuccauuuaa

SEQ ID NO: 1558785 - RNA, 18 nt, Human
aggagccgaagcccaggg

SEQ ID NO: 1558786 - RNA, 16 nt, Human
aggagccgaagcccag

SEQ ID NO: 1558787 - RNA, 21 nt, Human
uggagugugaggguccugcag

SEQ ID NO: 1558788 - RNA, 13 nt, Human
agggaggcagggg

SEQ ID NO: 1558789 - RNA, 20 nt, Human
uggggccaugccuccucagg

SEQ ID NO: 1558790 - RNA, 21 nt, Human
uggggccaugccuccucagga

SEQ ID NO: 1558791 - RNA, 19 nt, Human
uggggccaugccuccucag

SEQ ID NO: 1558792 - RNA, 14 nt, Human
uggggccaugccuc

SEQ ID NO: 1558793 - RNA, 23 nt, Human
aggggugcggcggucccagcucc

SEQ ID NO: 1558794 - RNA, 21 nt, Human
aggggugcggcggucccagcu

SEQ ID NO: 1558795 - RNA, 20 nt, Human
aggggugcggcggucccagc

SEQ ID NO: 1558796 - RNA, 22 nt, Human
aggggugcggcggucccagcuc

SEQ ID NO: 1558797 - RNA, 18 nt, Human
aggugauauuuuucuuau

SEQ ID NO: 1558798 - RNA, 19 nt, Human
uggugcccuggaugcccag

SEQ ID NO: 1558799 - RNA, 14 nt, Human
uguaguaucucaua

SEQ ID NO: 1558800 - RNA, 21 nt, Human
agucucaugccuugagaucug

SEQ ID NO: 1558801 - RNA, 19 nt, Human
agucucaugccuugagauc

SEQ ID NO: 1558802 - RNA, 16 nt, Human
ugugccacaggcuuag

SEQ ID NO: 1558803 - RNA, 12 nt, Human
ugugccacaggc

SEQ ID NO: 1558804 - RNA, 20 nt, Human
uuuacuucuaagucauucau

SEQ ID NO: 1558805 - RNA, 23 nt, Human
uuuaggauguguauuucauuuau

SEQ ID NO: 1558806 - RNA, 12 nt, Human
uuuuugauauau

SEQ ID NO: 1558807 - RNA, 16 nt, Human
auuauaaaguuuucua

SEQ ID NO: 1558808 - RNA, 13 nt, Human
auuauaaaguuuu

SEQ ID NO: 1558809 - RNA, 16 nt, Human
auuauaacucauuugu

SEQ ID NO: 1558810 - RNA, 21 nt, Human
uuugacacuuauagauugaaa

SEQ ID NO: 1558811 - RNA, 18 nt, Human
uuuuccaaucauuugacu

SEQ ID NO: 1558812 - RNA, 22 nt, Human
aagagucgcugugccacaggcu

SEQ ID NO: 1558813 - RNA, 15 nt, Human
aagagucgcugugcc

SEQ ID NO: 1558814 - RNA, 19 nt, Human
accacgggcccggguuggg

SEQ ID NO: 1558815 - RNA, 13 nt, Human
agcaucuaucaga

SEQ ID NO: 1558816 - RNA, 21 nt, Human
agggacaggaccccagcucug

SEQ ID NO: 1558817 - RNA, 16 nt, Human
caccagacggggcugg

SEQ ID NO: 1558818 - RNA, 17 nt, Human
caccagacggggcugga

SEQ ID NO: 1558819 - RNA, 21 nt, Human
ccacaggcuuagggacaggac

SEQ ID NO: 1558820 - RNA, 19 nt, Human
ccacaggcuuagggacagg

SEQ ID NO: 1558821 - RNA, 18 nt, Human
ccacaggcuuagggacag

SEQ ID NO: 1558822 - RNA, 15 nt, Human
ccacaggcuuaggga

SEQ ID NO: 1558823 - RNA, 12 nt, Human
cccaggggccgg

SEQ ID NO: 1558824 - RNA, 16 nt, Human
cccaggugauauuuuu

SEQ ID NO: 1558825 - RNA, 9 nt, Human
cccagcucc

SEQ ID NO: 1558826 - RNA, 19 nt, Human
ccccaggagggaggcaggg

SEQ ID NO: 1558827 - RNA, 18 nt, Human
ccccaggagggaggcagg

SEQ ID NO: 1558828 - RNA, 22 nt, Human
ccgagggcugagccugguccca

SEQ ID NO: 1558829 - RNA, 16 nt, Human
ccgagggcugagccug

SEQ ID NO: 1558830 - RNA, 13 nt, Human
ccgagggcugagc

SEQ ID NO: 1558831 - RNA, 16 nt, Human
ccugaagaacuauuuu

SEQ ID NO: 1558832 - RNA, 21 nt, Human
cgggcaggguguggggccaug

SEQ ID NO: 1558833 - RNA, 15 nt, Human
cgucgguccuggugc

SEQ ID NO: 1558834 - RNA, 24 nt, Human
cuuacuugcauaccaaguugauac

SEQ ID NO: 1558835 - RNA, 18 nt, Human
gacagggccagugcaguu

SEQ ID NO: 1558836 - RNA, 16 nt, Human
gaaggugauuuauucu

SEQ ID NO: 1558837 - RNA, 19 nt, Human
gaauaaucaaauacauuuu

SEQ ID NO: 1558838 - RNA, 16 nt, Human
gaagcccaggggccgg

SEQ ID NO: 1558839 - RNA, 19 nt, Human
gcaagcucuuuuauaugcu

SEQ ID NO: 1558840 - RNA, 15 nt, Human
gcaugcaccacgggc

SEQ ID NO: 1558841 - RNA, 14 nt, Human
gcaugcaccacggg

SEQ ID NO: 1558842 - RNA, 15 nt, Human
gcaccacgggcccgg

SEQ ID NO: 1558843 - RNA, 13 nt, Human
gcagccugcagga

SEQ ID NO: 1558844 - RNA, 16 nt, Human
gcagccugcaggaccu

SEQ ID NO: 1558845 - RNA, 15 nt, Human
gcaggaccucgugcc

SEQ ID NO: 1558846 - RNA, 22 nt, Human
gcggucccagcucccuggcucc

SEQ ID NO: 1558847 - RNA, 18 nt, Human
gcggucccagcucccugg

SEQ ID NO: 1558848 - RNA, 14 nt, Human
gcggucccagcucc

SEQ ID NO: 1558849 - RNA, 13 nt, Human
gcggucccagcuc

SEQ ID NO: 1558850 - RNA, 23 nt, Human
gccugcaggaccucgugccaccc

SEQ ID NO: 1558851 - RNA, 18 nt, Human
gccugcaggaccucgugc

SEQ ID NO: 1558852 - RNA, 17 nt, Human
gccugcaggaccucgug

SEQ ID NO: 1558853 - RNA, 13 nt, Human
gccugcaggaccu

SEQ ID NO: 1558854 - RNA, 17 nt, Human
gccgggcaggguguggg

SEQ ID NO: 1558855 - RNA, 19 nt, Human
ggagccgaagcccaggggc

SEQ ID NO: 1558856 - RNA, 17 nt, Human
ggagccgaagcccaggg

SEQ ID NO: 1558857 - RNA, 15 nt, Human
ggagccgaagcccag

SEQ ID NO: 1558858 - RNA, 22 nt, Human
ggagccgaagcccaggggccgg

SEQ ID NO: 1558859 - RNA, 11 nt, Human
ggcugagccug

SEQ ID NO: 1558860 - RNA, 19 nt, Human
ggucaccagacggggcugg

SEQ ID NO: 1558861 - RNA, 21 nt, Human
gggugcggcggucccagcucc

SEQ ID NO: 1558862 - RNA, 20 nt, Human
ggggugcggcggucccagcu

SEQ ID NO: 1558863 - RNA, 22 nt, Human
ggggugcggcggucccagcucc

SEQ ID NO: 1558864 - RNA, 20 nt, Human
uacuugaauaaccaucugaa

SEQ ID NO: 1558865 - RNA, 18 nt, Human
uacuugaauaaccaucug

SEQ ID NO: 1558866 - RNA, 16 nt, Human
uacagaaauauccaug

SEQ ID NO: 1558867 - RNA, 16 nt, Human
uaagagguugauuaua

SEQ ID NO: 1558868 - RNA, 14 nt, Human
guuuucuaaauuua

SEQ ID NO: 1558869 - RNA, 22 nt, Human
uccuggugcccuggaugcccag

SEQ ID NO: 1558870 - RNA, 13 nt, Human
uccuggugcccug

SEQ ID NO: 1558871 - RNA, 12 nt, Human
uccuggugcccu

SEQ ID NO: 1558872 - RNA, 18 nt, Human
ugccaccccgagggcuga

SEQ ID NO: 1558873 - RNA, 17 nt, Human
ugccaccccgagggcug

SEQ ID NO: 1558874 - RNA, 13 nt, Human
uggaugcccagga

SEQ ID NO: 1558875 - RNA, 14 nt, Human
uggaugcccaggaa

SEQ ID NO: 1558876 - RNA, 19 nt, Human
uggaugauauuuuuuauca

SEQ ID NO: 1558877 - RNA, 14 nt, Human
uguguaguuccagc

SEQ ID NO: 1558878 - RNA, 15 nt, Human
uguuguuuuuggaug

SEQ ID NO: 1558879 - RNA, 23 nt, Human
uguggggccaugccuccucagga

SEQ ID NO: 1558880 - RNA, 17 nt, Human
ugugaggguccugcagc

SEQ ID NO: 1558881 - RNA, 22 nt, Human
uuccccagcaugcaccacgggc

SEQ ID NO: 1558882 - RNA, 14 nt, Human
uuugauauaugaaa

SEQ ID NO: 1558883 - RNA, 22 nt, Human
cucugcgucgguccuggugccc

SEQ ID NO: 1558884 - RNA, 21 nt, Human
cucugcgucgguccuggugcc

SEQ ID NO: 1558885 - RNA, 20 nt, Human
cucugcgucgguccuggugc

SEQ ID NO: 1558886 - RNA, 19 nt, Human
cucugcgucgguccuggug

SEQ ID NO: 1558887 - RNA, 17 nt, Human
cuccgccuuaccaggag

SEQ ID NO: 1558888 - RNA, 19 nt, Human
cggcggucccagcucccug

SEQ ID NO: 1558889 - RNA, 16 nt, Human
cggcggucccagcucc

SEQ ID NO: 1558890 - RNA, 15 nt, Human
cggcggucccagcuc

SEQ ID NO: 1558891 - RNA, 18 nt, Human
ccugcaggaccucgugcc

SEQ ID NO: 1558892 - RNA, 17 nt, Human
ccugcaggaccucgugc

SEQ ID NO: 1558893 - RNA, 19 nt, Human
ccugcagccugcaggaccu

SEQ ID NO: 1558894 - RNA, 22 nt, Human
ccaugucaagagucgcugugcc

SEQ ID NO: 1558895 - RNA, 21 nt, Human
cagccugcaggaccucgugcc

SEQ ID NO: 1558896 - RNA, 12 nt, Human
cagccugcagga

SEQ ID NO: 1558897 - RNA, 21 nt, Human
ggccaugccuccucaggagcc

SEQ ID NO: 1558898 - RNA, 18 nt, Human
ggccaugccuccucagga

SEQ ID NO: 1558899 - RNA, 17 nt, Human
ggccaugccuccucagg

SEQ ID NO: 1558900 - RNA, 22 nt, Human
ggccaguggccuuccccagcau

SEQ ID NO: 1558901 - RNA, 19 nt, Human
ggccaguggccuuccccag

SEQ ID NO: 1558902 - RNA, 22 nt, Human
ggccagugcaguuugguguguc

SEQ ID NO: 1558903 - RNA, 22 nt, Human
gggacaggaccccagcucugcg

SEQ ID NO: 1558904 - RNA, 21 nt, Human
gggacaggaccccagcucugc

SEQ ID NO: 1558905 - RNA, 19 nt, Human
gggacaggaccccagcucu

SEQ ID NO: 1558906 - RNA, 17 nt, Human
gggacaggaccccagcu

SEQ ID NO: 1558907 - RNA, 15 nt, Human
gggacaggaccccag

SEQ ID NO: 1558908 - RNA, 22 nt, Human
gggccaugccuccucaggagcc

SEQ ID NO: 1558909 - RNA, 23 nt, Human
gggccaugccuccucaggagccg

SEQ ID NO: 1558910 - RNA, 13 nt, Human
gggccaugccucc

SEQ ID NO: 1558911 - RNA, 13 nt, Human
gguccuggugccc

SEQ ID NO: 1558912 - RNA, 12 nt, Human
gguccuggugcc

SEQ ID NO: 1558913 - RNA, 24 nt, Human
gguccuggugcccuggaugcccag

SEQ ID NO: 1558914 - RNA, 14 nt, Human
gguccuggugcccu

SEQ ID NO: 1558915 - RNA, 21 nt, Human
gcuggagugugaggguccugc

SEQ ID NO: 1558916 - RNA, 15 nt, Human
gcuggagugugaggg

SEQ ID NO: 1558917 - RNA, 13 nt, Human
gcugugccacagg

SEQ ID NO: 1558918 - RNA, 19 nt, Human
gcugugccacaggcuuagg

SEQ ID NO: 1558919 - RNA, 20 nt, Human
gcugugccacaggcuuaggg

SEQ ID NO: 1558920 - RNA, 15 nt, Human
gcugugccacaggcu

SEQ ID NO: 1558921 - RNA, 14 nt, Human
gcugugccacaggc

SEQ ID NO: 1558922 - RNA, 21 nt, Human
gccaguggccuuccccagcau

SEQ ID NO: 1558923 - RNA, 17 nt, Human
cuucuaagucauucaua

SEQ ID NO: 1558924 - RNA, 18 nt, Human
gugccaccccgagggcug

SEQ ID NO: 1558925 - RNA, 15 nt, Human
gugaggguccugcag

SEQ ID NO: 1558926 - RNA, 14 nt, Human
gugaggguccugca

SEQ ID NO: 1558927 - RNA, 23 nt, Human
gugaggguccugcagccugcagg

SEQ ID NO: 1558928 - RNA, 24 nt, Human
gugaggguccugcagccugcagga

SEQ ID NO: 1558929 - RNA, 11 nt, Human
aaauuguguua

SEQ ID NO: 1558930 - RNA, 23 nt, Human
guguggggccaugccuccucagg

SEQ ID NO: 1558931 - RNA, 21 nt, Human
guguggggccaugccuccuca

SEQ ID NO: 1558932 - RNA, 14 nt, Human
guguauuucauuua

SEQ ID NO: 1558933 - RNA, 19 nt, Human
guggccuuccccagcaugc

SEQ ID NO: 1558934 - RNA, 21 nt, Human
guggccuuccccagcaugcac

SEQ ID NO: 1558935 - RNA, 18 nt, Human
guggccuuccccagcaug

SEQ ID NO: 1558936 - RNA, 17 nt, Human
guggccuuccccagcau

SEQ ID NO: 1558937 - RNA, 21 nt, Human
guggggccaugccuccucagg

SEQ ID NO: 1558938 - RNA, 22 nt, Human
guggggccaugccuccucagga

SEQ ID NO: 1558939 - RNA, 15 nt, Human
aagcccaggggccgg

SEQ ID NO: 1558940 - RNA, 18 nt, Human
uaccauuauuuuuaggau

SEQ ID NO: 1558941 - RNA, 20 nt, Human
aauuacuuacguauguuugu

SEQ ID NO: 1558942 - RNA, 15 nt, Human
uauaacucauuuguu

SEQ ID NO: 1558943 - RNA, 17 nt, Human
uagaaacauguaauccu

SEQ ID NO: 1558944 - RNA, 14 nt, Human
acgagggugccgug

SEQ ID NO: 1558945 - RNA, 15 nt, Human
uccccugacagggcc

SEQ ID NO: 1558946 - RNA, 12 nt, Human
uccccugacagg

SEQ ID NO: 1558947 - RNA, 11 nt, Human
accccagcucu

SEQ ID NO: 1558948 - RNA, 16 nt, Human
ucgcugugccacaggc

SEQ ID NO: 1558949 - RNA, 20 nt, Human
agaaauuacuaauuuuacuu

SEQ ID NO: 1558950 - RNA, 17 nt, Human
agaauaaucaaauacau

SEQ ID NO: 1558951 - RNA, 20 nt, Human
ugaaaaagcuggauuuucuu

SEQ ID NO: 1558952 - RNA, 12 nt, Human
agauuuuguugg

SEQ ID NO: 1558953 - RNA, 22 nt, Human
ugaccccaggagggaggcaggg

SEQ ID NO: 1558954 - RNA, 20 nt, Human
ugaccccaggagggaggcag

SEQ ID NO: 1558955 - RNA, 17 nt, Human
agccacauauugagaug

SEQ ID NO: 1558956 - RNA, 17 nt, Human
ugaucaaacaugucucu

SEQ ID NO: 1558957 - RNA, 19 nt, Human
ugauauuuuuuaucauaaa

SEQ ID NO: 1558958 - RNA, 17 nt, Human
ugauauuuuuuaucaua

SEQ ID NO: 1558959 - RNA, 14 nt, Human
ugaguagucucaug

SEQ ID NO: 1558960 - RNA, 17 nt, Human
ugcagccugcaggaccu

SEQ ID NO: 1558961 - RNA, 18 nt, Human
ugcagccugcaggaccuc

SEQ ID NO: 1558962 - RNA, 22 nt, Human
agccuggucccacgagggugcc

SEQ ID NO: 1558963 - RNA, 17 nt, Human
ugcggcggucccagcuc

SEQ ID NO: 1558964 - RNA, 14 nt, Human
ugcggcggucccag

SEQ ID NO: 1558965 - RNA, 13 nt, Human
ugcggcgguccca

SEQ ID NO: 1558966 - RNA, 18 nt, Human
ugcggcggucccagcucc

SEQ ID NO: 1558967 - RNA, 15 nt, Human
uggccuuccccagca

SEQ ID NO: 1558968 - RNA, 23 nt, Human
uggccuuccccagcaugcaccac

SEQ ID NO: 1558969 - RNA, 13 nt, Human
uggccuuccccag

SEQ ID NO: 1558970 - RNA, 23 nt, Human
aggguguggggccaugccuccuc

SEQ ID NO: 1558971 - RNA, 22 nt, Human
aggguguggggccaugccuccu

SEQ ID NO: 1558972 - RNA, 19 nt, Human
ugucaagagucgcugugcc

SEQ ID NO: 1558973 - RNA, 17 nt, Human
ugucaagagucgcugug

SEQ ID NO: 1558974 - RNA, 15 nt, Human
aguuagaacauuugc

SEQ ID NO: 1558975 - RNA, 16 nt, Human
uuacaggcacuaaagu

SEQ ID NO: 1558976 - RNA, 16 nt, Human
auaaccaucugaaagu

SEQ ID NO: 1558977 - RNA, 21 nt, Human
auaaucccuggaugauauuuu

SEQ ID NO: 1558978 - RNA, 20 nt, Human
auaaucccuggaugauauuu

SEQ ID NO: 1558979 - RNA, 22 nt, Human
uuagggacaggaccccagcucu

SEQ ID NO: 1558980 - RNA, 21 nt, Human
uuagggacaggaccccagcuc

SEQ ID NO: 1558981 - RNA, 20 nt, Human
auaguucccaggugauauuu

SEQ ID NO: 1558982 - RNA, 18 nt, Human
uuaguuuugugaagguga

SEQ ID NO: 1558983 - RNA, 13 nt, Human
uugaaauuuccua

SEQ ID NO: 1558984 - RNA, 14 nt, Human
uuccuuuuuuugau

SEQ ID NO: 1558985 - RNA, 17 nt, Human
uuuaagcaaguuaagug

SEQ ID NO: 1558986 - RNA, 16 nt, Human
uuuaagcaaguuaagu

SEQ ID NO: 1558987 - RNA, 14 nt, Human
auggccgggcaggg

SEQ ID NO: 1558988 - RNA, 22 nt, Human
uuggaugguguuacauauuaua

SEQ ID NO: 1558989 - RNA, 23 nt, Human
aguugauacuugaauaaccaucu

SEQ ID NO: 1558990 - RNA, 17 nt, Human
aguggccuuccccagca

SEQ ID NO: 1558991 - RNA, 13 nt, Human
agggacuuagcaa

SEQ ID NO: 1558992 - RNA, 21 nt, Human
aggguccugcagccugcagga

SEQ ID NO: 1558993 - RNA, 19 nt, Human
aggguccugcagccugcag

SEQ ID NO: 1558994 - RNA, 17 nt, Human
aggguccugcagccugc

SEQ ID NO: 1558995 - RNA, 16 nt, Human
aggguccugcagccug

SEQ ID NO: 1558996 - RNA, 23 nt, Human
aggcuuagggacaggaccccagc

SEQ ID NO: 1558997 - RNA, 21 nt, Human
aacuuacuugcauaccaaguu

SEQ ID NO: 1558998 - RNA, 17 nt, Human
acagggccagugcaguu

SEQ ID NO: 1558999 - RNA, 22 nt, Human
accaucugaaagugguacuuga

SEQ ID NO: 1559000 - RNA, 22 nt, Human
caagagucgcugugccacaggc

SEQ ID NO: 1559001 - RNA, 19 nt, Human
caagagucgcugugccaca

SEQ ID NO: 1559002 - RNA, 15 nt, Human
ccaugccuccucagg

SEQ ID NO: 1559003 - RNA, 16 nt, Human
ccaugccuccucagga

SEQ ID NO: 1559004 - RNA, 17 nt, Human
cccacgagggugccgug

SEQ ID NO: 1559005 - RNA, 12 nt, Human
cccagcucugcg

SEQ ID NO: 1559006 - RNA, 11 nt, Human
cccagcucugc

SEQ ID NO: 1559007 - RNA, 22 nt, Human
ccagcucugcgucgguccuggu

SEQ ID NO: 1559008 - RNA, 17 nt, Human
ccagugcuuuauguugu

SEQ ID NO: 1559009 - RNA, 15 nt, Human
caugccuccucagga

SEQ ID NO: 1559010 - RNA, 19 nt, Human
cauagaaaacacuacagug

SEQ ID NO: 1559011 - RNA, 19 nt, Human
caguggccuuccccagcau

SEQ ID NO: 1559012 - RNA, 17 nt, Human
caguggccuuccccagc

SEQ ID NO: 1559013 - RNA, 18 nt, Human
caguggccuuccccagca

SEQ ID NO: 1559014 - RNA, 22 nt, Human
cggccaguggccuuccccagca

SEQ ID NO: 1559015 - RNA, 12 nt, Human
cggucccagcuc

SEQ ID NO: 1559016 - RNA, 13 nt, Human
cggucccagcucc

SEQ ID NO: 1559017 - RNA, 13 nt, Human
cgguccuggugcc

SEQ ID NO: 1559018 - RNA, 19 nt, Human
cgugccaccccgagggcug

SEQ ID NO: 1559019 - RNA, 22 nt, Human
cgugccaccccgagggcugagc

SEQ ID NO: 1559020 - RNA, 15 nt, Human
cgugccaccccgagg

SEQ ID NO: 1559021 - RNA, 12 nt, Human
cugacagggcca

SEQ ID NO: 1559022 - RNA, 17 nt, Human
cugacagggccagugca

SEQ ID NO: 1559023 - RNA, 12 nt, Human
cugagccugguc

SEQ ID NO: 1559024 - RNA, 19 nt, Human
cuggucccacgagggugcc

SEQ ID NO: 1559025 - RNA, 17 nt, Human
cuggucccacgagggug

SEQ ID NO: 1559026 - RNA, 14 nt, Human
cuggucccacgagg

SEQ ID NO: 1559027 - RNA, 19 nt, Human
gaaauuacuaauuuuacuu

SEQ ID NO: 1559028 - RNA, 20 nt, Human
gaaauuuccuaauuuauucu

SEQ ID NO: 1559029 - RNA, 20 nt, Human
gaaauuacuaauuuuacuuc

SEQ ID NO: 1559030 - RNA, 20 nt, Human
gacaugggugaacuuacuug

SEQ ID NO: 1559031 - RNA, 14 nt, Human
gaccccagcucugc

SEQ ID NO: 1559032 - RNA, 12 nt, Human
gaccccagcucu

SEQ ID NO: 1559033 - RNA, 15 nt, Human
gagccgaagcccagg

SEQ ID NO: 1559034 - RNA, 14 nt, Human
gagccgaagcccag

SEQ ID NO: 1559035 - RNA, 15 nt, Human
gccaugccuccucag

SEQ ID NO: 1559036 - RNA, 18 nt, Human
gccguguccccugacagg

SEQ ID NO: 1559037 - RNA, 13 nt, Human
gccgaagcccagg

SEQ ID NO: 1559038 - RNA, 12 nt, Human
gccuccucagga

SEQ ID NO: 1559039 - RNA, 15 nt, Human
gcgucgguccuggug

SEQ ID NO: 1559040 - RNA, 18 nt, Human
uuuuggaugguguuacau

SEQ ID NO: 1559041 - RNA, 15 nt, Human
uuuucuaaauuuauc

SEQ ID NO: 1559042 - RNA, 13 nt, Human
uuuuuugauauau

SEQ ID NO: 1559043 - RNA, 13 nt, Human
uuugaauaugaaa

SEQ ID NO: 1559044 - RNA, 15 nt, Human
guauguuuguacuug

SEQ ID NO: 1559045 - RNA, 16 nt, Human
gucaccagacggggcu

SEQ ID NO: 1559046 - RNA, 17 nt, Human
gucaccagacggggcug

SEQ ID NO: 1559047 - RNA, 17 nt, Human
gucgcugugccacaggc

SEQ ID NO: 1559048 - RNA, 18 nt, Human
gucgguccuggugcccug

SEQ ID NO: 1559049 - RNA, 17 nt, Human
gucgguccuggugcccu

SEQ ID NO: 1559050 - RNA, 15 nt, Human
gucgguccuggugcc

SEQ ID NO: 1559051 - RNA, 14 nt, Human
gugauauuuuucuu

SEQ ID NO: 1559052 - RNA, 22 nt, Human
gugcggcggucccagcucccug

SEQ ID NO: 1559053 - RNA, 19 nt, Human
gugcggcggucccagcucc

SEQ ID NO: 1559054 - RNA, 18 nt, Human
gugcggcggucccagcuc

SEQ ID NO: 1559055 - RNA, 21 nt, Human
gugcaguuugguguguccucc

SEQ ID NO: 1559056 - RNA, 14 nt, Human
gugguacuugauca

SEQ ID NO: 1559057 - RNA, 16 nt, Human
guggugaccccaggag

SEQ ID NO: 1559058 - RNA, 18 nt, Human
guggugaccccaggaggg

SEQ ID NO: 1559059 - RNA, 23 nt, Human
guguuacuagccucaaaauacau

SEQ ID NO: 1559060 - RNA, 18 nt, Human
guguccccugacagggcc

SEQ ID NO: 1559061 - RNA, 20 nt, Human
guuacauauuauauguucua

SEQ ID NO: 1559062 - RNA, 21 nt, Human
uaaagaaaaguuuaccaucug

SEQ ID NO: 1559063 - RNA, 15 nt, Human
uaaaguuaguaaaga

SEQ ID NO: 1559064 - RNA, 22 nt, Human
uaagugguucuuugguuccagu

SEQ ID NO: 1559065 - RNA, 18 nt, Human
uaagucauucauaaaccu

SEQ ID NO: 1559066 - RNA, 14 nt, Human
uacagcuccuuuga

SEQ ID NO: 1559067 - RNA, 20 nt, Human
uacagcuccuuugaaaacuc

SEQ ID NO: 1559068 - RNA, 18 nt, Human
uccagcaaaucaagcuga

SEQ ID NO: 1559069 - RNA, 18 nt, Human
ucccacgagggugccgug

SEQ ID NO: 1559070 - RNA, 18 nt, Human
uccuccgccuuaccagga

SEQ ID NO: 1559071 - RNA, 16 nt, Human
ugcgucgguccuggug

SEQ ID NO: 1559072 - RNA, 17 nt, Human
ugcuaaaggagcaucua

SEQ ID NO: 1559073 - RNA, 21 nt, Human
uguccuccgccuuaccaggag

SEQ ID NO: 1559074 - RNA, 13 nt, Human
uuaaauauuuagu

SEQ ID NO: 1559075 - RNA, 21 nt, Human
uuaagagguugauuauaaagu

SEQ ID NO: 1559076 - RNA, 15 nt, Human
uuaagcaaguuaagu

SEQ ID NO: 1559077 - RNA, 22 nt, Human
aauauuauaacucauuuguugu

SEQ ID NO: 1559078 - RNA, 16 nt, Human
agggacaggaccccag

SEQ ID NO: 1559079 - RNA, 13 nt, Human
agggacaggaccc

SEQ ID NO: 1559080 - RNA, 18 nt, Human
agggacaggaccccagcu

SEQ ID NO: 1559081 - RNA, 17 nt, Human
agggacaggaccccagc

SEQ ID NO: 1559082 - RNA, 20 nt, Human
agggacaggaccccagcucu

SEQ ID NO: 1559083 - RNA, 19 nt, Human
aguggccuuccccagcaug

SEQ ID NO: 1559084 - RNA, 18 nt, Human
aguggccuuccccagcau

SEQ ID NO: 1559085 - RNA, 18 nt, Human
cguguccccugacagggc

SEQ ID NO: 1559086 - RNA, 16 nt, Human
cguguccccugacagg

SEQ ID NO: 1559087 - RNA, 19 nt, Human
cguguccccugacagggcc

SEQ ID NO: 1559088 - RNA, 14 nt, Human
ccccgagggcugag

SEQ ID NO: 1559089 - RNA, 21 nt, Human
ccccgagggcugagccugguc

SEQ ID NO: 1559090 - RNA, 19 nt, Human
ccccgagggcugagccugg

SEQ ID NO: 1559091 - RNA, 16 nt, Human
ccccugacagggccag

SEQ ID NO: 1559092 - RNA, 17 nt, Human
ccgaagcccaggggccg

SEQ ID NO: 1559093 - RNA, 16 nt, Human
ccgaagcccaggggcc

SEQ ID NO: 1559094 - RNA, 15 nt, Human
ccgaagcccaggggc

SEQ ID NO: 1559095 - RNA, 14 nt, Human
ccuggaugcccagg

SEQ ID NO: 1559096 - RNA, 17 nt, Human
caggaccccagcucugc

SEQ ID NO: 1559097 - RNA, 16 nt, Human
caggaccccagcucug

SEQ ID NO: 1559098 - RNA, 18 nt, Human
caggaccccagcucugcg

SEQ ID NO: 1559099 - RNA, 21 nt, Human
caggagggaggcaggggaggg

SEQ ID NO: 1559100 - RNA, 15 nt, Human
caggagggaggcagg

SEQ ID NO: 1559101 - RNA, 22 nt, Human
caggguguggggccaugccucc

SEQ ID NO: 1559102 - RNA, 17 nt, Human
caggguguggggccaug

SEQ ID NO: 1559103 - RNA, 16 nt, Human
caggguguggggccau

SEQ ID NO: 1559104 - RNA, 16 nt, Human
ccacgagggugccgug

SEQ ID NO: 1559105 - RNA, 21 nt, Human
caugucaagagucgcugugcc

SEQ ID NO: 1559106 - RNA, 19 nt, Human
caugucaagagucgcugug

SEQ ID NO: 1559107 - RNA, 14 nt, Human
caugcaccacgggc

SEQ ID NO: 1559108 - RNA, 18 nt, Human
cacaggcuuagggacagg

SEQ ID NO: 1559109 - RNA, 22 nt, Human
cacaggcuuagggacaggaccc

SEQ ID NO: 1559110 - RNA, 19 nt, Human
cacaggcuuagggacagga

SEQ ID NO: 1559111 - RNA, 16 nt, Human
ggggccggccaguggc

SEQ ID NO: 1559112 - RNA, 16 nt, Human
gguccugcagccugca

SEQ ID NO: 1559113 - RNA, 15 nt, Human
gguccugcagccugc

SEQ ID NO: 1559114 - RNA, 15 nt, Human
aaauauuauaacuca

SEQ ID NO: 1559115 - RNA, 17 nt, Human
ggacaggaccccagcuc

SEQ ID NO: 1559116 - RNA, 16 nt, Human
ggacaggaccccagcu

SEQ ID NO: 1559117 - RNA, 15 nt, Human
ggacaggaccccagc

SEQ ID NO: 1559118 - RNA, 14 nt, Human
ggacaggaccccag

SEQ ID NO: 1559119 - RNA, 20 nt, Human
ggacaggaccccagcucugc

SEQ ID NO: 1559120 - RNA, 18 nt, Human
ggacaggaccccagcucu

SEQ ID NO: 1559121 - RNA, 21 nt, Human
ggacaggaccccagcucugcg

SEQ ID NO: 1559122 - RNA, 22 nt, Human
cuuagggacaggaccccagcuc

SEQ ID NO: 1559123 - RNA, 21 nt, Human
cuuagggacaggaccccagcu

SEQ ID NO: 1559124 - RNA, 23 nt, Human
cuuagggacaggaccccagcucu

SEQ ID NO: 1559125 - RNA, 20 nt, Human
cuuagggacaggaccccagc

SEQ ID NO: 1559126 - RNA, 18 nt, Human
cuuagggacaggacccca

SEQ ID NO: 1559127 - RNA, 14 nt, Human
guccugcagccugc

SEQ ID NO: 1559128 - RNA, 18 nt, Human
guccugcagccugcagga

SEQ ID NO: 1559129 - RNA, 10 nt, Human
guccugcagc

SEQ ID NO: 1559130 - RNA, 16 nt, Human
aagaaaaguuuaccau

SEQ ID NO: 1559131 - RNA, 21 nt, Human
aagauguagcgcuuugaauau

SEQ ID NO: 1559132 - RNA, 17 nt, Human
gugugaggguccugcag

SEQ ID NO: 1559133 - RNA, 14 nt, Human
aaguuuaccaucug

SEQ ID NO: 1559134 - RNA, 19 nt, Human
aaguuagaacauuugcugu

SEQ ID NO: 1559135 - RNA, 24 nt, Human
guuuuuggaugguguuacauauua

SEQ ID NO: 1559136 - RNA, 12 nt, Human
aaggagcaucua

SEQ ID NO: 1559137 - RNA, 21 nt, Human
guugggucaccagacggggcu

SEQ ID NO: 1559138 - RNA, 14 nt, Human
guugggucaccaga

SEQ ID NO: 1559139 - RNA, 22 nt, Human
aauuuacccucuugaauauaau

SEQ ID NO: 1559140 - RNA, 19 nt, Human
aauuuacccucuugaauau

SEQ ID NO: 1559141 - RNA, 17 nt, Human
aauuuaucaguaccuaa

SEQ ID NO: 1559142 - RNA, 19 nt, Human
uauagauugaaauuuccua

SEQ ID NO: 1559143 - RNA, 16 nt, Human
uauggccgggcagggu

SEQ ID NO: 1559144 - RNA, 13 nt, Human
uauuucauuuauu

SEQ ID NO: 1559145 - RNA, 18 nt, Human
ucauuugacuaagagucu

SEQ ID NO: 1559146 - RNA, 18 nt, Human
accgacguugccaucaaa

SEQ ID NO: 1559147 - RNA, 13 nt, Human
uccugcagccugc

SEQ ID NO: 1559148 - RNA, 11 nt, Human
ugagccugguc

SEQ ID NO: 1559149 - RNA, 19 nt, Human
ugaggguccugcagccugc

SEQ ID NO: 1559150 - RNA, 18 nt, Human
ugaggguccugcagccug

SEQ ID NO: 1559151 - RNA, 15 nt, Human
ugaggguccugcagc

SEQ ID NO: 1559152 - RNA, 14 nt, Human
ugaggguccugcag

SEQ ID NO: 1559153 - RNA, 22 nt, Human
ugaggguccugcagccugcagg

SEQ ID NO: 1559154 - RNA, 21 nt, Human
ugaggguccugcagccugcag

SEQ ID NO: 1559155 - RNA, 23 nt, Human
ugaggguccugcagccugcagga

SEQ ID NO: 1559156 - RNA, 14 nt, Human
agagucgcugugcc

SEQ ID NO: 1559157 - RNA, 19 nt, Human
agagucgcugugccacagg

SEQ ID NO: 1559158 - RNA, 15 nt, Human
agagucgcugugcca

SEQ ID NO: 1559159 - RNA, 14 nt, Human
ugaauauaaucccu

SEQ ID NO: 1559160 - RNA, 22 nt, Human
ucuggucuaaauuguguuacua

SEQ ID NO: 1559161 - RNA, 21 nt, Human
agccugcaggaccucgugcca

SEQ ID NO: 1559162 - RNA, 20 nt, Human
agccugcaggaccucgugcc

SEQ ID NO: 1559163 - RNA, 21 nt, Human
ugcaguuugguguguccuccg

SEQ ID NO: 1559164 - RNA, 22 nt, Human
agcucugcgucgguccuggugc

SEQ ID NO: 1559165 - RNA, 23 nt, Human
agcucugcgucgguccuggugcc

SEQ ID NO: 1559166 - RNA, 17 nt, Human
agggcugagccuggucc

SEQ ID NO: 1559167 - RNA, 16 nt, Human
agggcugagccugguc

SEQ ID NO: 1559168 - RNA, 18 nt, Human
agucgcugugccacaggc

SEQ ID NO: 1559169 - RNA, 18 nt, Human
uguccccugacagggcca

SEQ ID NO: 1559170 - RNA, 16 nt, Human
uguccccugacagggc

SEQ ID NO: 1559171 - RNA, 15 nt, Human
uguccccugacaggg

SEQ ID NO: 1559172 - RNA, 19 nt, Human
agugugaggguccugcagc

SEQ ID NO: 1559173 - RNA, 16 nt, Human
aguuuaccaucugaaa

SEQ ID NO: 1559174 - RNA, 12 nt, Human
aguuuaccaucu

SEQ ID NO: 1559175 - RNA, 21 nt, Human
aguuuugugaaggugauuuau

SEQ ID NO: 1559176 - RNA, 19 nt, Human
auaacucauuuguuguuug

SEQ ID NO: 1559177 - RNA, 17 nt, Human
auaaucaaauacauuuu

SEQ ID NO: 1559178 - RNA, 22 nt, Human
uugacacuuauagauugaaauu

SEQ ID NO: 1559179 - RNA, 13 nt, Human
uugauuauaaagu

SEQ ID NO: 1559180 - RNA, 18 nt, Human
auccuaaauuuacccucu

SEQ ID NO: 1559181 - RNA, 16 nt, Human
auauuuuuuaucauaa

SEQ ID NO: 1559182 - RNA, 18 nt, Human
augccuccucaggagccg

SEQ ID NO: 1559183 - RNA, 14 nt, Human
augccuccucagga

SEQ ID NO: 1559184 - RNA, 15 nt, Human
augccuccucaggag

SEQ ID NO: 1559185 - RNA, 13 nt, Human
augccuccucagg

SEQ ID NO: 1559186 - RNA, 21 nt, Human
auguagcgcuuugaauaugaa

SEQ ID NO: 1559187 - RNA, 19 nt, Human
auguagcgcuuugaauaug

SEQ ID NO: 1559188 - RNA, 18 nt, Human
uuugugaaggugauuuau

SEQ ID NO: 1559189 - RNA, 14 nt, Human
augguguuacauau

SEQ ID NO: 1559190 - RNA, 22 nt, Human
auugguuuuccaaucauuugac

SEQ ID NO: 1559191 - RNA, 13 nt, Human
caaauacauuuua

SEQ ID NO: 1559192 - RNA, 15 nt, Human
caccccgagggcuga

SEQ ID NO: 1559193 - RNA, 19 nt, Human
ccaguggccuuccccagca

SEQ ID NO: 1559194 - RNA, 17 nt, Human
ccaguggccuuccccag

SEQ ID NO: 1559195 - RNA, 23 nt, Human
ccagugcaguuugguguguccuc

SEQ ID NO: 1559196 - RNA, 15 nt, Human
ccgggcagggugugg

SEQ ID NO: 1559197 - RNA, 16 nt, Human
cgaagcccaggggccg

SEQ ID NO: 1559198 - RNA, 13 nt, Human
cggaauauauuuu

SEQ ID NO: 1559199 - RNA, 15 nt, Human
cgcugugccacaggc

SEQ ID NO: 1559200 - RNA, 11 nt, Human
cuaaaaacaua

SEQ ID NO: 1559201 - RNA, 14 nt, Human
cuaaauuuuaagug

SEQ ID NO: 1559202 - RNA, 21 nt, Human
cucaggagccgaagcccaggg

SEQ ID NO: 1559203 - RNA, 23 nt, Human
cucaggagccgaagcccaggggc

SEQ ID NO: 1559204 - RNA, 22 nt, Human
cuguauauauuuauggccgggc

SEQ ID NO: 1559205 - RNA, 13 nt, Human
cugugccacaggc

SEQ ID NO: 1559206 - RNA, 20 nt, Human
gacaggaccccagcucugcg

SEQ ID NO: 1559207 - RNA, 18 nt, Human
gacaggaccccagcucug

SEQ ID NO: 1559208 - RNA, 17 nt, Human
gacaggaccccagcucu

SEQ ID NO: 1559209 - RNA, 16 nt, Human
gacaggaccccagcuc

SEQ ID NO: 1559210 - RNA, 15 nt, Human
gacaggaccccagcu

SEQ ID NO: 1559211 - RNA, 14 nt, Human
gacaggaccccagc

SEQ ID NO: 1559212 - RNA, 19 nt, Human
gacaggaccccagcucugc

SEQ ID NO: 1559213 - RNA, 22 nt, Human
gaggggugcggcggucccagcu

SEQ ID NO: 1559214 - RNA, 19 nt, Human
gaggggugcggcgguccca

SEQ ID NO: 1559215 - RNA, 23 nt, Human
gagggugccguguccccugacag

SEQ ID NO: 1559216 - RNA, 18 nt, Human
gaggguccugcagccugc

SEQ ID NO: 1559217 - RNA, 21 nt, Human
gaggguccugcagccugcagg

SEQ ID NO: 1559218 - RNA, 17 nt, Human
gaggguccugcagccug

SEQ ID NO: 1559219 - RNA, 13 nt, Human
gaggguccugcag

SEQ ID NO: 1559220 - RNA, 20 nt, Human
gcccuggaugcccaggaauc

SEQ ID NO: 1559221 - RNA, 20 nt, Human
gcucugcgucgguccuggug

SEQ ID NO: 1559222 - RNA, 21 nt, Human
gcucugcgucgguccuggugc

SEQ ID NO: 1559223 - RNA, 23 nt, Human
gcuuagggacaggaccccagcuc

SEQ ID NO: 1559224 - RNA, 22 nt, Human
gcuuagggacaggaccccagcu

SEQ ID NO: 1559225 - RNA, 13 nt, Human
ggaccucgugcca

SEQ ID NO: 1559226 - RNA, 23 nt, Human
guacaguugcuguugugugauca

SEQ ID NO: 1559227 - RNA, 21 nt, Human
gguuuuccaaucauuugacua

SEQ ID NO: 1559228 - RNA, 19 nt, Human
ggugcggcggucccagcuc

SEQ ID NO: 1559229 - RNA, 20 nt, Human
ggugcccuggaugcccagga

SEQ ID NO: 1559230 - RNA, 19 nt, Human
ggugcccuggaugcccagg

SEQ ID NO: 1559231 - RNA, 18 nt, Human
ggugcccuggaugcccag

SEQ ID NO: 1559232 - RNA, 15 nt, Human
ggugcccuggaugcc

SEQ ID NO: 1559233 - RNA, 15 nt, Human
ggucccagcucccug

SEQ ID NO: 1559234 - RNA, 14 nt, Human
ggucccagcucccu

SEQ ID NO: 1559235 - RNA, 12 nt, Human
ggucccagcucc

SEQ ID NO: 1559236 - RNA, 20 nt, Human
ggucccagcucccuggcucc

SEQ ID NO: 1559237 - RNA, 13 nt, Human
gggcugagccugg

SEQ ID NO: 1559238 - RNA, 23 nt, Human
gggcugagccuggucccacgagg

SEQ ID NO: 1559239 - RNA, 15 nt, Human
gggcugagccugguc

SEQ ID NO: 1559240 - RNA, 22 nt, Human
gggcccggguugggucaccaga

SEQ ID NO: 1559241 - RNA, 21 nt, Human
gggcccggguugggucaccag

SEQ ID NO: 1559242 - RNA, 19 nt, Human
ggggugcggcggucccagc

SEQ ID NO: 1559243 - RNA, 11 nt, Human
gucccagcucc

SEQ ID NO: 1559244 - RNA, 18 nt, Human
guccuccgccuuaccagg

SEQ ID NO: 1559245 - RNA, 23 nt, Human
guccuggugcccuggaugcccag

SEQ ID NO: 1559246 - RNA, 20 nt, Human
guccuggugcccuggaugcc

SEQ ID NO: 1559247 - RNA, 12 nt, Human
guccuggugccc

SEQ ID NO: 1559248 - RNA, 11 nt, Human
guccuggugcc

SEQ ID NO: 1559249 - RNA, 15 nt, Human
gucccagcucccugg

SEQ ID NO: 1559250 - RNA, 18 nt, Human
gugcccuggaugcccagg

SEQ ID NO: 1559251 - RNA, 19 nt, Human
gugcccuggaugcccagga

SEQ ID NO: 1559252 - RNA, 19 nt, Human
ucaccagacggggcuggag

SEQ ID NO: 1559253 - RNA, 15 nt, Human
ucaccagacggggcu

SEQ ID NO: 1559254 - RNA, 17 nt, Human
uauuauauguucuagaa

SEQ ID NO: 1559255 - RNA, 14 nt, Human
uauuauauguucua

SEQ ID NO: 1559256 - RNA, 20 nt, Human
uccccagcaugcaccacggg

SEQ ID NO: 1559257 - RNA, 19 nt, Human
uccccagcaugcaccacgg

SEQ ID NO: 1559258 - RNA, 21 nt, Human
uccccagcaugcaccacgggc

SEQ ID NO: 1559259 - RNA, 19 nt, Human
uccgccuuaccaggagaag

SEQ ID NO: 1559260 - RNA, 16 nt, Human
ucuaucagauuaaguu

SEQ ID NO: 1559261 - RNA, 13 nt, Human
ugccuccucagga

SEQ ID NO: 1559262 - RNA, 12 nt, Human
ugccuccucagg

SEQ ID NO: 1559263 - RNA, 16 nt, Human
ugccuccucaggagcc

SEQ ID NO: 1559264 - RNA, 19 nt, Human
ugggucaccagacggggcu

SEQ ID NO: 1559265 - RNA, 21 nt, Human
ugggucaccagacggggcugg

SEQ ID NO: 1559266 - RNA, 20 nt, Human
ugggucaccagacggggcug

SEQ ID NO: 1559267 - RNA, 20 nt, Human
uuauugguuuuccaaucauu

SEQ ID NO: 1559268 - RNA, 16 nt, Human
uuauggccgggcaggg

SEQ ID NO: 1559269 - RNA, 13 nt, Human
uuuccuaauuuau

SEQ ID NO: 1559270 - RNA, 21 nt, Human
uuuacccucuugaauauaauc

SEQ ID NO: 1559271 - RNA, 13 nt, Human
uuuaccaucugaa

SEQ ID NO: 1559272 - RNA, 14 nt, Human
uuuaccaucugaaa

SEQ ID NO: 1559273 - RNA, 13 nt, Human
uuguuugguuaua

SEQ ID NO: 1559274 - RNA, 18 nt, Human
uucuaagucauucauaaa

SEQ ID NO: 1559275 - RNA, 14 nt, Human
aaaaauuuuuguuu

SEQ ID NO: 1559276 - RNA, 13 nt, Human
aaaaauuuuuguu

SEQ ID NO: 1559277 - RNA, 15 nt, Human
accccgagggcugag

SEQ ID NO: 1559278 - RNA, 13 nt, Human
agacggggcugga

SEQ ID NO: 1559279 - RNA, 15 nt, Human
agcaugcaccacggg

SEQ ID NO: 1559280 - RNA, 17 nt, Human
aggaccccagcucugcg

SEQ ID NO: 1559281 - RNA, 16 nt, Human
aggaccccagcucugc

SEQ ID NO: 1559282 - RNA, 14 nt, Human
aggaccccagcucu

SEQ ID NO: 1559283 - RNA, 13 nt, Human
aggaccccagcuc

SEQ ID NO: 1559284 - RNA, 14 nt, Human
aggaccucgugcca

SEQ ID NO: 1559285 - RNA, 17 nt, Human
cuaauuuauucuaaauu

SEQ ID NO: 1559286 - RNA, 16 nt, Human
ccugcagccugcagga

SEQ ID NO: 1559287 - RNA, 22 nt, Human
ccucaggagccgaagcccaggg

SEQ ID NO: 1559288 - RNA, 19 nt, Human
ccucaggagccgaagccca

SEQ ID NO: 1559289 - RNA, 12 nt, Human
ccucaggagccg

SEQ ID NO: 1559290 - RNA, 21 nt, Human
ccucaggagccgaagcccagg

SEQ ID NO: 1559291 - RNA, 22 nt, Human
ccaggagggaggcaggggaggg

SEQ ID NO: 1559292 - RNA, 15 nt, Human
ccaggagggaggcag

SEQ ID NO: 1559293 - RNA, 19 nt, Human
ccaggggccggccaguggc

SEQ ID NO: 1559294 - RNA, 21 nt, Human
ccaggagggaggcaggggagg

SEQ ID NO: 1559295 - RNA, 20 nt, Human
cagaauaaucaaauacauuu

SEQ ID NO: 1559296 - RNA, 22 nt, Human
cagugcaguuugguguguccuc

SEQ ID NO: 1559297 - RNA, 23 nt, Human
cuggagugugaggguccugcagc

SEQ ID NO: 1559298 - RNA, 21 nt, Human
cuggugcccuggaugcccagg

SEQ ID NO: 1559299 - RNA, 20 nt, Human
cuggugcccuggaugcccag

SEQ ID NO: 1559300 - RNA, 17 nt, Human
cuggugcccuggaugcc

SEQ ID NO: 1559301 - RNA, 16 nt, Human
gauacuugaauaacca

SEQ ID NO: 1559302 - RNA, 20 nt, Human
ggagugugaggguccugcag

SEQ ID NO: 1559303 - RNA, 18 nt, Human
aaaaaguuugucuuaguu

SEQ ID NO: 1559304 - RNA, 11 nt, Human
aaaaaguuugu

SEQ ID NO: 1559305 - RNA, 13 nt, Human
ggccuuccccagc

SEQ ID NO: 1559306 - RNA, 14 nt, Human
ggccuuccccagca

SEQ ID NO: 1559307 - RNA, 17 nt, Human
gggccggccaguggccu

SEQ ID NO: 1559308 - RNA, 23 nt, Human
ggggccaugccuccucaggagcc

SEQ ID NO: 1559309 - RNA, 19 nt, Human
ggggccaugccuccucagg

SEQ ID NO: 1559310 - RNA, 17 nt, Human
ggggccaugccuccuca

SEQ ID NO: 1559311 - RNA, 14 nt, Human
ggggccaugccucc

SEQ ID NO: 1559312 - RNA, 19 nt, Human
ggguccugcagccugcagg

SEQ ID NO: 1559313 - RNA, 23 nt, Human
ggguccugcagccugcaggaccu

SEQ ID NO: 1559314 - RNA, 18 nt, Human
ggguccugcagccugcag

SEQ ID NO: 1559315 - RNA, 13 nt, Human
guaauccuaaauu

SEQ ID NO: 1559316 - RNA, 23 nt, Human
aaagugguacuugaucauuuuua

SEQ ID NO: 1559317 - RNA, 20 nt, Human
aaagugguacuugaucauuu

SEQ ID NO: 1559318 - RNA, 14 nt, Human
aaagugguacuuga

SEQ ID NO: 1559319 - RNA, 17 nt, Human
gcggcggucccagcucc

SEQ ID NO: 1559320 - RNA, 16 nt, Human
gcggcggucccagcuc

SEQ ID NO: 1559321 - RNA, 14 nt, Human
gcggcggucccagc

SEQ ID NO: 1559322 - RNA, 16 nt, Human
gucgcugugccacagg

SEQ ID NO: 1559323 - RNA, 14 nt, Human
guccccugacaggg

SEQ ID NO: 1559324 - RNA, 14 nt, Human
aagaaacaacagaa

SEQ ID NO: 1559325 - RNA, 21 nt, Human
uagggacaggaccccagcucu

SEQ ID NO: 1559326 - RNA, 22 nt, Human
uagggacaggaccccagcucug

SEQ ID NO: 1559327 - RNA, 20 nt, Human
uagggacaggaccccagcuc

SEQ ID NO: 1559328 - RNA, 19 nt, Human
uagggacaggaccccagcu

SEQ ID NO: 1559329 - RNA, 15 nt, Human
uaguucccaggugau

SEQ ID NO: 1559330 - RNA, 16 nt, Human
acaggcuuagggacag

SEQ ID NO: 1559331 - RNA, 18 nt, Human
acaggaccccagcucugc

SEQ ID NO: 1559332 - RNA, 19 nt, Human
acaggaccccagcucugcg

SEQ ID NO: 1559333 - RNA, 17 nt, Human
acaggaccccagcucug

SEQ ID NO: 1559334 - RNA, 16 nt, Human
acaggaccccagcucu

SEQ ID NO: 1559335 - RNA, 15 nt, Human
acaggaccccagcuc

SEQ ID NO: 1559336 - RNA, 14 nt, Human
acaggaccccagcu

SEQ ID NO: 1559337 - RNA, 13 nt, Human
acaggaccccagc

SEQ ID NO: 1559338 - RNA, 12 nt, Human
acaggaccccag

SEQ ID NO: 1559339 - RNA, 21 nt, Human
aauuaguacagaaauauccau

SEQ ID NO: 1559340 - RNA, 21 nt, Human
uaagcaaguuaaguguccucc

SEQ ID NO: 1559341 - RNA, 10 nt, Human
ucccagcucc

SEQ ID NO: 1559342 - RNA, 15 nt, Human
acuaauuuuacuucu

SEQ ID NO: 1559343 - RNA, 22 nt, Human
uccucaggagccgaagcccagg

SEQ ID NO: 1559344 - RNA, 21 nt, Human
uccucaggagccgaagcccag

SEQ ID NO: 1559345 - RNA, 17 nt, Human
uccugcagccugcagga

SEQ ID NO: 1559346 - RNA, 20 nt, Human
ucugcgucgguccuggugcc

SEQ ID NO: 1559347 - RNA, 20 nt, Human
acuugaucauuuuuaccauu

SEQ ID NO: 1559348 - RNA, 19 nt, Human
ugaaauuuccuaauuuauu

SEQ ID NO: 1559349 - RNA, 19 nt, Human
ugacagggccagugcaguu

SEQ ID NO: 1559350 - RNA, 16 nt, Human
ugacagggccagugca

SEQ ID NO: 1559351 - RNA, 22 nt, Human
aggagggaggcaggggaggggu

SEQ ID NO: 1559352 - RNA, 13 nt, Human
uggccgggcaggg

SEQ ID NO: 1559353 - RNA, 12 nt, Human
uggccgggcagg

SEQ ID NO: 1559354 - RNA, 13 nt, Human
agcccaggggccg

SEQ ID NO: 1559355 - RNA, 14 nt, Human
agccgaagcccagg

SEQ ID NO: 1559356 - RNA, 15 nt, Human
agggugccguguccc

SEQ ID NO: 1559357 - RNA, 24 nt, Human
agggugccguguccccugacaggg

SEQ ID NO: 1559358 - RNA, 22 nt, Human
auaaaccuugucuaugaaauga

SEQ ID NO: 1559359 - RNA, 19 nt, Human
auaccaaguugauacuuga

SEQ ID NO: 1559360 - RNA, 16 nt, Human
aguuugguguguccuc

SEQ ID NO: 1559361 - RNA, 13 nt, Human
agugguuuagaaa

SEQ ID NO: 1559362 - RNA, 19 nt, Human
aucaauucuguauuccaga

SEQ ID NO: 1559363 - RNA, 23 nt, Human
auauauuuauggccgggcagggu

SEQ ID NO: 1559364 - RNA, 22 nt, Human
uuugaaaacucuguguuuggaa

SEQ ID NO: 1559365 - RNA, 14 nt, Human
augaaaugacuucu

SEQ ID NO: 1559366 - RNA, 24 nt, Human
auuacuuacguauguuuguacuug

SEQ ID NO: 1559367 - RNA, 15 nt, Human
uuuugauauaugaaa

SEQ ID NO: 1559368 - RNA, 16 nt, Human
uuuuguuugguuauau

SEQ ID NO: 1559369 - RNA, 13 nt, Human
uuuuguuugguua

SEQ ID NO: 1559370 - RNA, 21 nt, Human
uuuuguuugguuauaucgaaa

SEQ ID NO: 1559371 - RNA, 13 nt, Human
cagacggggcugg

SEQ ID NO: 1559372 - RNA, 19 nt, Human
cagacggggcuggagugug

SEQ ID NO: 1559373 - RNA, 17 nt, Human
cagcaugcaccacgggc

SEQ ID NO: 1559374 - RNA, 18 nt, Human
caggaccucgugccaccc

SEQ ID NO: 1559375 - RNA, 19 nt, Human
caggaaucuguauauauuu

SEQ ID NO: 1559376 - RNA, 19 nt, Human
caggagaagaaccugaaga

SEQ ID NO: 1559377 - RNA, 21 nt, Human
caggagccgaagcccaggggc

SEQ ID NO: 1559378 - RNA, 18 nt, Human
caggagccgaagcccagg

SEQ ID NO: 1559379 - RNA, 17 nt, Human
caggagccgaagcccag

SEQ ID NO: 1559380 - RNA, 17 nt, Human
caggcuuagggacagga

SEQ ID NO: 1559381 - RNA, 16 nt, Human
caggcuuagggacagg

SEQ ID NO: 1559382 - RNA, 16 nt, Human
cagggccagugcaguu

SEQ ID NO: 1559383 - RNA, 13 nt, Human
caggggaggggug

SEQ ID NO: 1559384 - RNA, 22 nt, Human
caggggccggccaguggccuuc

SEQ ID NO: 1559385 - RNA, 17 nt, Human
caggggccggccagugg

SEQ ID NO: 1559386 - RNA, 14 nt, Human
cauuuuuaccauua

SEQ ID NO: 1559387 - RNA, 19 nt, Human
cauucauaaaccuugucua

SEQ ID NO: 1559388 - RNA, 23 nt, Human
ccaccccgagggcugagccuggu

SEQ ID NO: 1559389 - RNA, 20 nt, Human
ccagcaugcaccacgggccc

SEQ ID NO: 1559390 - RNA, 18 nt, Human
ccagcaugcaccacgggc

SEQ ID NO: 1559391 - RNA, 18 nt, Human
ccauuauuuuuaggaugu

SEQ ID NO: 1559392 - RNA, 17 nt, Human
ccaucugaaagugguac

SEQ ID NO: 1559393 - RNA, 18 nt, Human
cccggguugggucaccag

SEQ ID NO: 1559394 - RNA, 23 nt, Human
cccgagggcugagccugguccca

SEQ ID NO: 1559395 - RNA, 19 nt, Human
ccguguccccugacagggc

SEQ ID NO: 1559396 - RNA, 17 nt, Human
ccguguccccugacagg

SEQ ID NO: 1559397 - RNA, 13 nt, Human
ccgccuuaccagg

SEQ ID NO: 1559398 - RNA, 20 nt, Human
ccuggucccacgagggugcc

SEQ ID NO: 1559399 - RNA, 20 nt, Human
ccuggugcccuggaugccca

SEQ ID NO: 1559400 - RNA, 18 nt, Human
ccuggugcccuggaugcc

SEQ ID NO: 1559401 - RNA, 12 nt, Human
ccuggugcccug

SEQ ID NO: 1559402 - RNA, 21 nt, Human
ccuggugcccuggaugcccag

SEQ ID NO: 1559403 - RNA, 22 nt, Human
ccuggugcccuggaugcccagg

SEQ ID NO: 1559404 - RNA, 13 nt, Human
cuccucaggagcc

SEQ ID NO: 1559405 - RNA, 12 nt, Human
cuccucaggagc

SEQ ID NO: 1559406 - RNA, 14 nt, Human
cugaagaacuauuu

SEQ ID NO: 1559407 - RNA, 17 nt, Human
cugcgucgguccuggug

SEQ ID NO: 1559408 - RNA, 18 nt, Human
cugcgucgguccuggugc

SEQ ID NO: 1559409 - RNA, 16 nt, Human
gaaucuguauauauuu

SEQ ID NO: 1559410 - RNA, 18 nt, Human
gaacuuacuugcauacca

SEQ ID NO: 1559411 - RNA, 18 nt, Human
gaaccugaagaacuauuu

SEQ ID NO: 1559412 - RNA, 23 nt, Human
gagccuggucccacgagggugcc

SEQ ID NO: 1559413 - RNA, 19 nt, Human
gagccuggucccacgaggg

SEQ ID NO: 1559414 - RNA, 14 nt, Human
gauagacugcuaca

SEQ ID NO: 1559415 - RNA, 13 nt, Human
gagucgcugugcc

SEQ ID NO: 1559416 - RNA, 17 nt, Human
gcacuaaaguuaguaaa

SEQ ID NO: 1559417 - RNA, 12 nt, Human
gcaggggagggg

SEQ ID NO: 1559418 - RNA, 21 nt, Human
gccuggucccacgagggugcc

SEQ ID NO: 1559419 - RNA, 15 nt, Human
ggcggucccagcucc

SEQ ID NO: 1559420 - RNA, 14 nt, Human
ggcggucccagcuc

SEQ ID NO: 1559421 - RNA, 17 nt, Human
ggcucccaugucaagag

SEQ ID NO: 1559422 - RNA, 22 nt, Human
ggcuuagggacaggaccccagc

SEQ ID NO: 1559423 - RNA, 23 nt, Human
ucaggagccgaagcccaggggcc

SEQ ID NO: 1559424 - RNA, 22 nt, Human
uauuccagacuugggaggaugu

SEQ ID NO: 1559425 - RNA, 22 nt, Human
ucgugccaccccgagggcugag

SEQ ID NO: 1559426 - RNA, 18 nt, Human
ugcccuggaugcccagga

SEQ ID NO: 1559427 - RNA, 16 nt, Human
ugcccuggaugcccag

SEQ ID NO: 1559428 - RNA, 21 nt, Human
ugccguguccccugacagggc

SEQ ID NO: 1559429 - RNA, 20 nt, Human
ugccacaggcuuagggacag

SEQ ID NO: 1559430 - RNA, 21 nt, Human
ugccacaggcuuagggacagg

SEQ ID NO: 1559431 - RNA, 17 nt, Human
ugccacaggcuuaggga

SEQ ID NO: 1559432 - RNA, 19 nt, Human
uuauuagaaaaauauuaua

SEQ ID NO: 1559433 - RNA, 23 nt, Human
uuauguuguuguuguuuuuggau

SEQ ID NO: 1559434 - RNA, 21 nt, Human
uuauaucgaaauaguuacagg

SEQ ID NO: 1559435 - RNA, 20 nt, Human adenovirus D
agguacaugggcaugagccc

SEQ ID NO: 1559436 - RNA, 16 nt, Human adenovirus D
agcgguggacggccac

SEQ ID NO: 1559437 - RNA, 15 nt, Human adenovirus D
aucagcgcgcugcgg

SEQ ID NO: 1559438 - RNA, 15 nt, Human adenovirus D
ccgccgccgccgugc

SEQ ID NO: 1559439 - RNA, 19 nt, Human adenovirus D
cacugcccauauacaugau

SEQ ID NO: 1559440 - RNA, 21 nt, Human adenovirus D
guggcgagaggcgagcagcug

SEQ ID NO: 1559441 - RNA, 21 nt, Human adenovirus D
caaggcgcgcuucacucuggc

SEQ ID NO: 1559442 - RNA, 20 nt, Human adenovirus D
uggacuucacagagagccgc

SEQ ID NO: 1559443 - RNA, 11 nt, Human adenovirus D
gcccaggcgcc

SEQ ID NO: 1559444 - RNA, 15 nt, Human adenovirus D
agccaaagcucaugu

SEQ ID NO: 1559445 - RNA, 21 nt, Human adenovirus D
cagcaguauccgcggagucca

SEQ ID NO: 1559446 - RNA, 15 nt, Human adenovirus D
ggcccuggagcagcg

SEQ ID NO: 1559447 - RNA, 14 nt, Human adenovirus D
gcauaucagccagu

SEQ ID NO: 1559448 - RNA, 22 nt, Human adenovirus D
caggaugcagccaguggcccug

SEQ ID NO: 1559449 - RNA, 14 nt, Human adenovirus D
uccagcuggccggc

SEQ ID NO: 1559450 - RNA, 18 nt, Human adenovirus D
gucccggaggaggggggc

SEQ ID NO: 1559451 - RNA, 22 nt, Human adenovirus D
ccggggguucauguugugcagg

SEQ ID NO: 1559452 - RNA, 19 nt, Human adenovirus D
accugcauuggcagccgag

SEQ ID NO: 1559453 - RNA, 22 nt, Human adenovirus D
acggucugcaggccgggcugca

SEQ ID NO: 1559454 - RNA, 13 nt, Human adenovirus D
ggcagcggggccu

SEQ ID NO: 1559455 - RNA, 24 nt, Human adenovirus D
ucagcauguggaacucugcggugg

SEQ ID NO: 1559456 - RNA, 21 nt, Human adenovirus D
cgugugauuaaaaagcagcac

SEQ ID NO: 1559457 - RNA, 14 nt, Human adenovirus D
gccugaugcaggau

SEQ ID NO: 1559458 - RNA, 23 nt, Human adenovirus D
uagauggaucgagugaaggugac

SEQ ID NO: 1559459 - RNA, 21 nt, Human adenovirus D
acaguucagaaguaaauuuga

SEQ ID NO: 1559460 - RNA, 16 nt, Human adenovirus D
ccacagggcacugccg

SEQ ID NO: 1559461 - RNA, 22 nt, Human adenovirus D
aggggcucguuaguccagcaga

SEQ ID NO: 1559462 - RNA, 18 nt, Human adenovirus D
gaauuugaaaccacuucc

SEQ ID NO: 1559463 - RNA, 22 nt, Human adenovirus D
uacauccauucucgaagauucu

SEQ ID NO: 1559464 - RNA, 17 nt, Human adenovirus D
gcgaggacaccaguacu

SEQ ID NO: 1559465 - RNA, 14 nt, Human adenovirus D
guugggcagcgaga

SEQ ID NO: 1559466 - RNA, 21 nt, Human adenovirus D
augcucgucagggggguccgc

SEQ ID NO: 1559467 - RNA, 16 nt, Human adenovirus D
cauguucaccagcaag

SEQ ID NO: 1559468 - RNA, 23 nt, Human adenovirus D
acagccgucuggacccgcggccg

SEQ ID NO: 1559469 - RNA, 13 nt, Human adenovirus D
gcgccgggcgcug

SEQ ID NO: 1559470 - RNA, 15 nt, Human adenovirus D
cuggcgacgcagccg

SEQ ID NO: 1559471 - RNA, 20 nt, Human adenovirus D
ggcuccucgaggacggagag

SEQ ID NO: 1559472 - RNA, 19 nt, Human adenovirus D
uaaaggcaccuuacacuga

SEQ ID NO: 1559473 - RNA, 20 nt, Human adenovirus D
cggcaaaauggcgugcugga

SEQ ID NO: 1559474 - RNA, 14 nt, Human adenovirus D
ccgccgcggccauc

SEQ ID NO: 1559475 - RNA, 14 nt, Human adenovirus D
ccaggaggcggugc

SEQ ID NO: 1559476 - RNA, 13 nt, Human adenovirus D
ggcagggugagcc

SEQ ID NO: 1559477 - RNA, 13 nt, Human adenovirus D
gcauggcaggcag

SEQ ID NO: 1559478 - RNA, 18 nt, Human adenovirus D
cucccagcgccgcgcugg

SEQ ID NO: 1559479 - RNA, 17 nt, Human adenovirus D
gaggagagcagguuucu

SEQ ID NO: 1559480 - RNA, 19 nt, Human adenovirus D
agcagaaauuucaagcugg

SEQ ID NO: 1559481 - RNA, 14 nt, Human adenovirus D
ggccaugcugcgcc

SEQ ID NO: 1559482 - RNA, 22 nt, Human adenovirus D
acgcagccggcgaacgugccgc

SEQ ID NO: 1559483 - RNA, 20 nt, Human adenovirus D
ugcagucguggacgcugcuc

SEQ ID NO: 1559484 - RNA, 19 nt, Human adenovirus D
agcuccgcgaacagcagca

SEQ ID NO: 1559485 - RNA, 13 nt, Human adenovirus D
aaaagcagcacag

SEQ ID NO: 1559486 - RNA, 14 nt, Human adenovirus D
uugacauccuggau

SEQ ID NO: 1559487 - RNA, 21 nt, Human adenovirus D
ggccgagaucguccucccccg

SEQ ID NO: 1559488 - RNA, 15 nt, Human adenovirus D
uggacuucgcagcca

SEQ ID NO: 1559489 - RNA, 18 nt, Human adenovirus D
guacaacaugcugacugc

SEQ ID NO: 1559490 - RNA, 16 nt, Human adenovirus D
ggccgaggaggagcgc

SEQ ID NO: 1559491 - RNA, 16 nt, Human adenovirus D
cauaauagaaacagau

SEQ ID NO: 1559492 - RNA, 12 nt, Human adenovirus D
cugcagggcgcc

SEQ ID NO: 1559493 - RNA, 16 nt, Human adenovirus D
uacucuaaaugcaaau

SEQ ID NO: 1559494 - RNA, 17 nt, Human adenovirus D
gcgcgucccuugaggag

SEQ ID NO: 1559495 - RNA, 17 nt, Human adenovirus D
agggcguagagcuuggg

SEQ ID NO: 1559496 - RNA, 19 nt, Human adenovirus D
uuccaggagaucacuagcg

SEQ ID NO: 1559497 - RNA, 23 nt, Human adenovirus D
ccagcaacuucauguccaugggc

SEQ ID NO: 1559498 - RNA, 20 nt, Human adenovirus D
uccaaggccaucugccacuc

SEQ ID NO: 1559499 - RNA, 15 nt, Human adenovirus D
ggguaguggcucgcg

SEQ ID NO: 1559500 - RNA, 17 nt, Human adenovirus D
gcccaaacuggggcgac

SEQ ID NO: 1559501 - RNA, 13 nt, Human adenovirus D
aggcggugcugcu

SEQ ID NO: 1559502 - RNA, 18 nt, Human adenovirus D
ggucggcgacgacgcgcu

SEQ ID NO: 1559503 - RNA, 12 nt, Human adenovirus D
ucugcucuucca

SEQ ID NO: 1559504 - RNA, 16 nt, Human adenovirus D
gucaccuucacagcua

SEQ ID NO: 1559505 - RNA, 13 nt, Human adenovirus D
gucaggcaggcau

SEQ ID NO: 1559506 - RNA, 19 nt, Human adenovirus D
gccguaccagugcaacuuu

SEQ ID NO: 1559507 - RNA, 14 nt, Human adenovirus D
gacguuucuggggu

SEQ ID NO: 1559508 - RNA, 16 nt, Human adenovirus D
cgcaugguuucgguga

SEQ ID NO: 1559509 - RNA, 13 nt, Human adenovirus D
acagccuucagca

SEQ ID NO: 1559510 - RNA, 18 nt, Human adenovirus D
ucuaugaaagcauacaga

SEQ ID NO: 1559511 - RNA, 14 nt, Human adenovirus D
gcccgcgagcgagg

SEQ ID NO: 1559512 - RNA, 22 nt, Human adenovirus D
aaaccacuuccuuuaccuucuc

SEQ ID NO: 1559513 - RNA, 13 nt, Human adenovirus D
ggccguagcaggc

SEQ ID NO: 1559514 - RNA, 21 nt, Human adenovirus D
agaacacccaacugagcaggg

SEQ ID NO: 1559515 - RNA, 16 nt, Human adenovirus D
gagggucuggagcucg

SEQ ID NO: 1559516 - RNA, 19 nt, Human adenovirus D
accagcaucgaggugcaga

SEQ ID NO: 1559517 - RNA, 16 nt, Human adenovirus D
cuaccagggcuuccac

SEQ ID NO: 1559518 - RNA, 16 nt, Human adenovirus D
gcauccacugcuccug

SEQ ID NO: 1559519 - RNA, 16 nt, Human adenovirus D
gcgguuccggccccgc

SEQ ID NO: 1559520 - RNA, 20 nt, Human adenovirus D
ugugauuaaaaagcagcaca

SEQ ID NO: 1559521 - RNA, 22 nt, Human adenovirus D
ucgccacggucaccgagccucc

SEQ ID NO: 1559522 - RNA, 13 nt, Human adenovirus D
caucuugcagagc

SEQ ID NO: 1559523 - RNA, 18 nt, Human adenovirus D
ccgucuacucccagcuca

SEQ ID NO: 1559524 - RNA, 20 nt, Human adenovirus D
guaaguuuuauggcugcugg

SEQ ID NO: 1559525 - RNA, 13 nt, Human adenovirus D
ucuggacccgcgg

SEQ ID NO: 1559526 - RNA, 18 nt, Human adenovirus D
ccagcaauaacaccggcu

SEQ ID NO: 1559527 - RNA, 18 nt, Human adenovirus D
gcugcccgccaccugcaa

SEQ ID NO: 1559528 - RNA, 13 nt, Human adenovirus D
gucaguugcacca

SEQ ID NO: 1559529 - RNA, 21 nt, Human adenovirus D
agaagcaaccuuuccaagagg

SEQ ID NO: 1559530 - RNA, 22 nt, Human adenovirus D
ccagccgcgguuaugcagggug

SEQ ID NO: 1559531 - RNA, 22 nt, Human adenovirus D
cugaguggcggcuuucugcccg

SEQ ID NO: 1559532 - RNA, 16 nt, Human adenovirus D
agcugcgcgagggccu

SEQ ID NO: 1559533 - RNA, 16 nt, Human adenovirus D
cacaguccaggucaca

SEQ ID NO: 1559534 - RNA, 13 nt, Human adenovirus D
ccgcaccgcuccu

SEQ ID NO: 1559535 - RNA, 21 nt, Human adenovirus D
cggccuuguagggacagcagc

SEQ ID NO: 1559536 - RNA, 17 nt, Human adenovirus D
cggccauucuggaggcg

SEQ ID NO: 1559537 - RNA, 19 nt, Human adenovirus D
cccugagagcgcuggcgug

SEQ ID NO: 1559538 - RNA, 22 nt, Human adenovirus D
ucuuccccagcgguucuggguc

SEQ ID NO: 1559539 - RNA, 19 nt, Human adenovirus D
ucgggcauuaacggggugg

SEQ ID NO: 1559540 - RNA, 15 nt, Human adenovirus D
cauaguaaagaaaca

SEQ ID NO: 1559541 - RNA, 18 nt, Human adenovirus D
aguacauguucaccagca

SEQ ID NO: 1559542 - RNA, 22 nt, Human adenovirus D
ucuccaucauguucgacuccuc

SEQ ID NO: 1559543 - RNA, 21 nt, Human adenovirus D
cggguauaaaaacccugguga

SEQ ID NO: 1559544 - RNA, 16 nt, Human adenovirus D
ccugcaggggcguccc

SEQ ID NO: 1559545 - RNA, 17 nt, Human adenovirus D
ucuuguaacuuuuaguc

SEQ ID NO: 1559546 - RNA, 23 nt, Human adenovirus D
ugacaauaauugaacugccuaca

SEQ ID NO: 1559547 - RNA, 19 nt, Human adenovirus D
aaaggcgcgcguccacgcc

SEQ ID NO: 1559548 - RNA, 21 nt, Human adenovirus D
acaggagccgcuaguggaaga

SEQ ID NO: 1559549 - RNA, 19 nt, Human adenovirus D
uccacuccgcacauguuga

SEQ ID NO: 1559550 - RNA, 23 nt, Human adenovirus D
ggggccaagaaggccggggccga

SEQ ID NO: 1559551 - RNA, 13 nt, Human adenovirus D
ggccaccucgccg

SEQ ID NO: 1559552 - RNA, 22 nt, Human adenovirus D
ccucgaaucaggcuggagccgc

SEQ ID NO: 1559553 - RNA, 17 nt, Human adenovirus D
ucugcccgcgcucaucc

SEQ ID NO: 1559554 - RNA, 20 nt, Human adenovirus D
ggagccaagaaacgucccag

SEQ ID NO: 1559555 - RNA, 18 nt, Human adenovirus D
cucagccacuccaagugg

SEQ ID NO: 1559556 - RNA, 19 nt, Human adenovirus D
cacagcaguacaagcgcca

SEQ ID NO: 1559557 - RNA, 20 nt, Human adenovirus D
agggcuuccacgugcccgag

SEQ ID NO: 1559558 - RNA, 15 nt, Human adenovirus D
aggccaggaggagac

SEQ ID NO: 1559559 - RNA, 20 nt, Human adenovirus D
cugcagggcgcccagcaugu

SEQ ID NO: 1559560 - RNA, 19 nt, Human adenovirus D
cugccaugggaggaagcaa

SEQ ID NO: 1559561 - RNA, 15 nt, Human adenovirus D
cugcugccgggcugc

SEQ ID NO: 1559562 - RNA, 15 nt, Human adenovirus D
gccagucccucaucc

SEQ ID NO: 1559563 - RNA, 14 nt, Human adenovirus D
ccgccgaggcuagc

SEQ ID NO: 1559564 - RNA, 21 nt, Human adenovirus D
cgcagugggcguacaugcaca

SEQ ID NO: 1559565 - RNA, 16 nt, Human adenovirus D
ccauugucaacacggc

SEQ ID NO: 1559566 - RNA, 21 nt, Human adenovirus D
aagaggggcagcaaccuaaag

SEQ ID NO: 1559567 - RNA, 19 nt, Human adenovirus D
cuuucuuugccaucaugau

SEQ ID NO: 1559568 - RNA, 12 nt, Human adenovirus D
gaggcauggcag

SEQ ID NO: 1559569 - RNA, 20 nt, Human adenovirus D
uugacaaauggagccagaac

SEQ ID NO: 1559570 - RNA, 21 nt, Human adenovirus D
gccagaugcaucccguccugc

SEQ ID NO: 1559571 - RNA, 14 nt, Human adenovirus D
acacccaacugagc

SEQ ID NO: 1559572 - RNA, 17 nt, Human adenovirus D
cagggaguuccugaugg

SEQ ID NO: 1559573 - RNA, 16 nt, Human adenovirus D
auuucagaaccaugaa

SEQ ID NO: 1559574 - RNA, 23 nt, Human adenovirus D
caccgugcgcuaccaccccagca

SEQ ID NO: 1559575 - RNA, 14 nt, Human adenovirus D
agcaggggcgcugg

SEQ ID NO: 1559576 - RNA, 21 nt, Human adenovirus D
aaucuaggaggcccaucuaca

SEQ ID NO: 1559577 - RNA, 14 nt, Human adenovirus D
gagcucgcgggcca

SEQ ID NO: 1559578 - RNA, 13 nt, Human adenovirus D
ggcgcuagccagc

SEQ ID NO: 1559579 - RNA, 15 nt, Human adenovirus D
agguggcccugggcc

SEQ ID NO: 1559580 - RNA, 17 nt, Human adenovirus D
cuggccucgggcauuaa

SEQ ID NO: 1559581 - RNA, 14 nt, Human adenovirus D
acgcgaccgugggg

SEQ ID NO: 1559582 - RNA, 14 nt, Human adenovirus D
aggaccugggcuuc

SEQ ID NO: 1559583 - RNA, 13 nt, Human adenovirus D
acauguugaaaag

SEQ ID NO: 1559584 - RNA, 12 nt, Human adenovirus D
uggaggagcagc

SEQ ID NO: 1559585 - RNA, 22 nt, Human adenovirus D
caucuuuuggaagaucucgguc

SEQ ID NO: 1559586 - RNA, 21 nt, Human adenovirus D
agcaggguacccacugggugg

SEQ ID NO: 1559587 - RNA, 19 nt, Human adenovirus D
ugccgccaaggagcuccuc

SEQ ID NO: 1559588 - RNA, 16 nt, Human adenovirus D
uccccgcccugcugga

SEQ ID NO: 1559589 - RNA, 18 nt, Human adenovirus D
aagaggagucgccggagg

SEQ ID NO: 1559590 - RNA, 18 nt, Human adenovirus D
aagcgcugguugaacaug

SEQ ID NO: 1559591 - RNA, 18 nt, Human adenovirus D
ccugacgacccgcaaccc

SEQ ID NO: 1559592 - RNA, 16 nt, Human adenovirus D
augccaucaacaucca

SEQ ID NO: 1559593 - RNA, 19 nt, Human adenovirus D
gcaucugaugaaauaaaaa

SEQ ID NO: 1559594 - RNA, 20 nt, Human adenovirus D
caugugugauaucacacugc

SEQ ID NO: 1559595 - RNA, 20 nt, Human adenovirus D
gcagcgacugacuacccacu

SEQ ID NO: 1559596 - RNA, 20 nt, Human adenovirus D
cagcagaagaucccggcgca

SEQ ID NO: 1559597 - RNA, 16 nt, Human adenovirus D
caccgaccuugcaaaa

SEQ ID NO: 1559598 - RNA, 13 nt, Human adenovirus D
gccggcucaagca

SEQ ID NO: 1559599 - RNA, 14 nt, Human adenovirus D
gauggugaagaugc

SEQ ID NO: 1559600 - RNA, 15 nt, Human adenovirus D
ccaccaccagcccau

SEQ ID NO: 1559601 - RNA, 16 nt, Human adenovirus D
agagugaggcacugcu

SEQ ID NO: 1559602 - RNA, 22 nt, Human adenovirus D
aagaugauaccaagagaaguua

SEQ ID NO: 1559603 - RNA, 14 nt, Human adenovirus D
cuuccugcagcuca

SEQ ID NO: 1559604 - RNA, 16 nt, Human adenovirus D
cacacgcccugggugu

SEQ ID NO: 1559605 - RNA, 17 nt, Human adenovirus D
cggcacgaucccgggca

SEQ ID NO: 1559606 - RNA, 12 nt, Human adenovirus D
cucugacacacc

SEQ ID NO: 1559607 - RNA, 16 nt, Human adenovirus D
cuuccaggagccugau

SEQ ID NO: 1559608 - RNA, 19 nt, Human adenovirus D
ccguaucgugcugcucucu

SEQ ID NO: 1559609 - RNA, 23 nt, Human adenovirus D
cugcgcaaauuuguacccgagga

SEQ ID NO: 1559610 - RNA, 14 nt, Human adenovirus D
ccgccaagcuccuc

SEQ ID NO: 1559611 - RNA, 16 nt, Human adenovirus D
gugcagucguggacgc

SEQ ID NO: 1559612 - RNA, 15 nt, Human adenovirus D
cugcugccgagccgc

SEQ ID NO: 1559613 - RNA, 22 nt, Human adenovirus D
accauguuauucagcagcccau

SEQ ID NO: 1559614 - RNA, 18 nt, Human adenovirus D
cugaaaguaugucucugg

SEQ ID NO: 1559615 - RNA, 17 nt, Human adenovirus D
cgcacgggccgccgggc

SEQ ID NO: 1559616 - RNA, 18 nt, Human adenovirus D
cgaccgugccgcggugcg

SEQ ID NO: 1559617 - RNA, 22 nt, Human adenovirus D
cggugagcagcuugcugacgcc

SEQ ID NO: 1559618 - RNA, 14 nt, Human adenovirus D
ccucgcgcaacugg

SEQ ID NO: 1559619 - RNA, 22 nt, Human adenovirus D
gagacaguagcgucucaagaga

SEQ ID NO: 1559620 - RNA, 17 nt, Human adenovirus D
gugguccuggucacccu

SEQ ID NO: 1559621 - RNA, 13 nt, Human adenovirus D
cgguccccgaggc

SEQ ID NO: 1559622 - RNA, 17 nt, Human adenovirus D
ggcagcggggacagaga

SEQ ID NO: 1559623 - RNA, 20 nt, Human adenovirus D
gcccgagggucgcuggcugc

SEQ ID NO: 1559624 - RNA, 19 nt, Human adenovirus D
ccacgcgcucgacaugacc

SEQ ID NO: 1559625 - RNA, 12 nt, Human adenovirus D
gaggggcagcaa

SEQ ID NO: 1559626 - RNA, 14 nt, Human adenovirus D
cgcguccaucgugc

SEQ ID NO: 1559627 - RNA, 22 nt, Human adenovirus D
acccucagaagaagaccacccg

SEQ ID NO: 1559628 - RNA, 20 nt, Human adenovirus D
cgccgauuuaaagacccaca

SEQ ID NO: 1559629 - RNA, 14 nt, Human adenovirus D
guuggcuugcccug

SEQ ID NO: 1559630 - RNA, 19 nt, Human adenovirus D
uagcuuagggaguuugcau

SEQ ID NO: 1559631 - RNA, 12 nt, Human adenovirus D
cugcgcaacgac

SEQ ID NO: 1559632 - RNA, 18 nt, Human adenovirus D
gugaagaaaacuggcaag

SEQ ID NO: 1559633 - RNA, 19 nt, Human adenovirus D
cauccaguuaaugcugccu

SEQ ID NO: 1559634 - RNA, 22 nt, Human adenovirus D
ucaggguccgcgugaggguggu

SEQ ID NO: 1559635 - RNA, 15 nt, Human adenovirus D
auaauagaaacagau

SEQ ID NO: 1559636 - RNA, 23 nt, Human adenovirus D
ucucugcgcucgcucacccgcag

SEQ ID NO: 1559637 - RNA, 16 nt, Human adenovirus D
caugcggggggagaug

SEQ ID NO: 1559638 - RNA, 21 nt, Human adenovirus D
caagacugcggggggaacauc

SEQ ID NO: 1559639 - RNA, 21 nt, Human adenovirus D
acccgguucgcggacggccgc

SEQ ID NO: 1559640 - RNA, 15 nt, Human adenovirus D
gcuacaugcccagca

SEQ ID NO: 1559641 - RNA, 12 nt, Human adenovirus D
cagacuggucaa

SEQ ID NO: 1559642 - RNA, 11 nt, Human adenovirus D
caccaugcgcc

SEQ ID NO: 1559643 - RNA, 21 nt, Human adenovirus D
gccaguggaagaggggcagca

SEQ ID NO: 1559644 - RNA, 23 nt, Human adenovirus D
gauguguuuuuagaugcagcaag

SEQ ID NO: 1559645 - RNA, 21 nt, Human adenovirus D
cgugggacucacccuggggcu

SEQ ID NO: 1559646 - RNA, 18 nt, Human adenovirus D
caggcggugcugcugccg

SEQ ID NO: 1559647 - RNA, 15 nt, Human adenovirus D
cgguggccccgaccc

SEQ ID NO: 1559648 - RNA, 13 nt, Human adenovirus D
gacacccccgcgu

SEQ ID NO: 1559649 - RNA, 16 nt, Human adenovirus D
gacgagcugcuugccg

SEQ ID NO: 1559650 - RNA, 17 nt, Human adenovirus D
caugccacgaacagcca

SEQ ID NO: 1559651 - RNA, 15 nt, Human adenovirus D
ugagcgcgagccggc

SEQ ID NO: 1559652 - RNA, 14 nt, Human adenovirus D
auccugaucucugc

SEQ ID NO: 1559653 - RNA, 20 nt, Human adenovirus D
cagucucugccgccggggcu

SEQ ID NO: 1559654 - RNA, 17 nt, Human adenovirus D
agacacuugagcuggcc

SEQ ID NO: 1559655 - RNA, 22 nt, Human adenovirus D
guagagggaaccuaccacugcc

SEQ ID NO: 1559656 - RNA, 19 nt, Human adenovirus D
uacaagcgccaacagcagc

SEQ ID NO: 1559657 - RNA, 11 nt, Human adenovirus D
caccaaggcca

SEQ ID NO: 1559658 - RNA, 23 nt, Human adenovirus D
gcacgucggcguggcgcucgggc

SEQ ID NO: 1559659 - RNA, 19 nt, Human adenovirus D
caggugagcucgggcugcu

SEQ ID NO: 1559660 - RNA, 15 nt, Human adenovirus D
cgguguagcccgugc

SEQ ID NO: 1559661 - RNA, 17 nt, Human adenovirus D
gcacaggcacacugaca

SEQ ID NO: 1559662 - RNA, 16 nt, Human adenovirus D
caggcgcaaccaggag

SEQ ID NO: 1559663 - RNA, 11 nt, Human adenovirus D
aggugcugccc

SEQ ID NO: 1559664 - RNA, 21 nt, Human adenovirus D
ucuggggcgcuuccaagauca

SEQ ID NO: 1559665 - RNA, 15 nt, Human adenovirus D
ucucuucuuguaacu

SEQ ID NO: 1559666 - RNA, 23 nt, Human adenovirus D
uggagaucaaccuccaggccaac

SEQ ID NO: 1559667 - RNA, 19 nt, Human adenovirus D
ugcacuuucuuugccauca

SEQ ID NO: 1559668 - RNA, 19 nt, Human adenovirus D
gccccugcaagugcacaga

SEQ ID NO: 1559669 - RNA, 13 nt, Human adenovirus D
uaugaucccaaca

SEQ ID NO: 1559670 - RNA, 17 nt, Human adenovirus D
ccucuugcagcuggcca

SEQ ID NO: 1559671 - RNA, 17 nt, Human adenovirus D
guuuauaaaucuuacac

SEQ ID NO: 1559672 - RNA, 19 nt, Human adenovirus D
ucccacagugcccccucca

SEQ ID NO: 1559673 - RNA, 15 nt, Human adenovirus D
gaaagucaggagcag

SEQ ID NO: 1559674 - RNA, 22 nt, Human adenovirus D
guacccuccucccaacucuggu

SEQ ID NO: 1559675 - RNA, 15 nt, Human adenovirus D
caaaacgaccacagc

SEQ ID NO: 1559676 - RNA, 12 nt, Human adenovirus D
cuuaaaucauuu

SEQ ID NO: 1559677 - RNA, 23 nt, Human adenovirus D
ugaagacgccgccggucaucucc

SEQ ID NO: 1559678 - RNA, 15 nt, Human adenovirus D
uccaaacuagcagac

SEQ ID NO: 1559679 - RNA, 15 nt, Human adenovirus D
gucagggaacugaua

SEQ ID NO: 1559680 - RNA, 21 nt, Human adenovirus D
gugagccgcgcgcuggggcag

SEQ ID NO: 1559681 - RNA, 13 nt, Human adenovirus D
aucugugcugccu

SEQ ID NO: 1559682 - RNA, 13 nt, Human adenovirus D
cucccacagugcc

SEQ ID NO: 1559683 - RNA, 19 nt, Human adenovirus D
ucaucgcgccacuggccac

SEQ ID NO: 1559684 - RNA, 18 nt, Human adenovirus D
cacagcuagacaccacag

SEQ ID NO: 1559685 - RNA, 19 nt, Human adenovirus D
ggcuggaacccgcgcucgc

SEQ ID NO: 1559686 - RNA, 17 nt, Human adenovirus D
aaagaaguggccagugu

SEQ ID NO: 1559687 - RNA, 19 nt, Human adenovirus D
caccauguuauucagcagc

SEQ ID NO: 1559688 - RNA, 12 nt, Human adenovirus D
gccgaccggagc

SEQ ID NO: 1559689 - RNA, 20 nt, Human adenovirus D
gccaucuaaacuaaagccaa

SEQ ID NO: 1559690 - RNA, 16 nt, Human adenovirus D
caugaacacacugccc

SEQ ID NO: 1559691 - RNA, 15 nt, Human adenovirus D
cucuccugaaccaca

SEQ ID NO: 1559692 - RNA, 22 nt, Human adenovirus D
gucccagcgucugacgcugcgc

SEQ ID NO: 1559693 - RNA, 14 nt, Human adenovirus D
gaccuggcggaggc

SEQ ID NO: 1559694 - RNA, 19 nt, Human adenovirus D
cugaacgacucgcugcugc

SEQ ID NO: 1559695 - RNA, 17 nt, Human adenovirus D
gcugcgcuuugugcccg

SEQ ID NO: 1559696 - RNA, 15 nt, Human adenovirus D
uggagguuuucccgg

SEQ ID NO: 1559697 - RNA, 15 nt, Human adenovirus D
accaccccagcaucc

SEQ ID NO: 1559698 - RNA, 13 nt, Human adenovirus D
gcccgugggcgac

SEQ ID NO: 1559699 - RNA, 13 nt, Human adenovirus D
ugaaaaccaagga

SEQ ID NO: 1559700 - RNA, 14 nt, Human adenovirus D
ccuugaggaggaga

SEQ ID NO: 1559701 - RNA, 17 nt, Human adenovirus D
ugaaaacgugccugcuc

SEQ ID NO: 1559702 - RNA, 16 nt, Human adenovirus D
uugaccaccagggagc

SEQ ID NO: 1559703 - RNA, 20 nt, Human adenovirus D
gcaaugcuuuuuaggagacu

SEQ ID NO: 1559704 - RNA, 18 nt, Human adenovirus D
agcuggacaagcuucuug

SEQ ID NO: 1559705 - RNA, 16 nt, Human adenovirus D
cauggcaggcagcggc

SEQ ID NO: 1559706 - RNA, 19 nt, Human adenovirus D
ggcgccgcccgagcucugc

SEQ ID NO: 1559707 - RNA, 19 nt, Human adenovirus D
ugagguccucggggcauug

SEQ ID NO: 1559708 - RNA, 22 nt, Human adenovirus D
cuaagcuaguacucuacaaucc

SEQ ID NO: 1559709 - RNA, 17 nt, Human adenovirus D
agggcaugggucaggca

SEQ ID NO: 1559710 - RNA, 20 nt, Human adenovirus D
gaccugcagcaggugcugcc

SEQ ID NO: 1559711 - RNA, 13 nt, Human adenovirus D
ccagaggcagacu

SEQ ID NO: 1559712 - RNA, 18 nt, Human adenovirus D
ccuugauuuuuccagccc

SEQ ID NO: 1559713 - RNA, 14 nt, Human adenovirus D
cgccgccugcgcug

SEQ ID NO: 1559714 - RNA, 21 nt, Human adenovirus D
accucuucuauuucuuccucu

SEQ ID NO: 1559715 - RNA, 19 nt, Human adenovirus D
aacauccccgcccugcugg

SEQ ID NO: 1559716 - RNA, 14 nt, Human adenovirus D
auuaaaaagcagca

SEQ ID NO: 1559717 - RNA, 22 nt, Human adenovirus D
caagacgcaggccaggaggaga

SEQ ID NO: 1559718 - RNA, 15 nt, Human adenovirus D
ccgagucucaccugg

SEQ ID NO: 1559719 - RNA, 14 nt, Human adenovirus D
gacgcgcucccggc

SEQ ID NO: 1559720 - RNA, 22 nt, Human adenovirus D
gcccagcagcauguacggagga

SEQ ID NO: 1559721 - RNA, 19 nt, Human adenovirus D
ucagguuacauuccugcac

SEQ ID NO: 1559722 - RNA, 20 nt, Human adenovirus D
ggccaugccccaggccuggc

SEQ ID NO: 1559723 - RNA, 23 nt, Human adenovirus D
aacuacucggugcuuagccuggg

SEQ ID NO: 1559724 - RNA, 17 nt, Human adenovirus D
uccgcaggcgggacaga

SEQ ID NO: 1559725 - RNA, 16 nt, Human adenovirus D
aaagcucccacagugc

SEQ ID NO: 1559726 - RNA, 16 nt, Human adenovirus D
gacgcacgggccgccg

SEQ ID NO: 1559727 - RNA, 23 nt, Human adenovirus D
cgucaaccucccgcccaagguca

SEQ ID NO: 1559728 - RNA, 21 nt, Human adenovirus D
gggucaucuugcacaguuggc

SEQ ID NO: 1559729 - RNA, 19 nt, Human adenovirus D
agcugaacgggggcgccuu

SEQ ID NO: 1559730 - RNA, 17 nt, Human adenovirus D
gcucgcgcaccugcuac

SEQ ID NO: 1559731 - RNA, 20 nt, Human adenovirus D
cagcacaguaaguuccuguc

SEQ ID NO: 1559732 - RNA, 22 nt, Human adenovirus D
uccaccacccacgcccgcucca

SEQ ID NO: 1559733 - RNA, 14 nt, Human adenovirus D
ccuccuccuggaga

SEQ ID NO: 1559734 - RNA, 14 nt, Human adenovirus D
ugggcccgugggcu

SEQ ID NO: 1559735 - RNA, 17 nt, Human adenovirus D
acugaaagaacuuggua

SEQ ID NO: 1559736 - RNA, 15 nt, Human adenovirus D
gucugaagcgccgcc

SEQ ID NO: 1559737 - RNA, 21 nt, Human adenovirus D
gaaggugguggacggccuggc

SEQ ID NO: 1559738 - RNA, 15 nt, Human adenovirus D
gcucgguuguugaug

SEQ ID NO: 1559739 - RNA, 14 nt, Human adenovirus D
gcaaugcgggccug

SEQ ID NO: 1559740 - RNA, 13 nt, Human adenovirus D
cucggaguaccug

SEQ ID NO: 1559741 - RNA, 22 nt, Human adenovirus D
uccgacuuugucccgcugagcu

SEQ ID NO: 1559742 - RNA, 17 nt, Human adenovirus D
cacuucgccuaccccgc

SEQ ID NO: 1559743 - RNA, 16 nt, Human adenovirus D
ugagcgacgaccuggg

SEQ ID NO: 1559744 - RNA, 15 nt, Human adenovirus D
gaccccauggacaac

SEQ ID NO: 1559745 - RNA, 22 nt, Human adenovirus D
cucgagcuacaugcccagcagc

SEQ ID NO: 1559746 - RNA, 19 nt, Human adenovirus D
caacaacucgggcuucacc

SEQ ID NO: 1559747 - RNA, 19 nt, Human adenovirus D
auugucaagcuugguggca

SEQ ID NO: 1559748 - RNA, 20 nt, Human adenovirus D
agcuaagaaaaaaucagagu

SEQ ID NO: 1559749 - RNA, 18 nt, Human adenovirus D
ucaaucucccaccaccag

SEQ ID NO: 1559750 - RNA, 18 nt, Human adenovirus D
ccccgcaaaaucaagcgg

SEQ ID NO: 1559751 - RNA, 14 nt, Human adenovirus D
caguagaaggugag

SEQ ID NO: 1559752 - RNA, 19 nt, Human adenovirus D
gaccggcagcggggccugg

SEQ ID NO: 1559753 - RNA, 21 nt, Human adenovirus D
cuuuagguguugcaugauggg

SEQ ID NO: 1559754 - RNA, 19 nt, Human adenovirus D
agcaggagugcagggauga

SEQ ID NO: 1559755 - RNA, 23 nt, Human adenovirus D
uacaucucggggaacggggcaga

SEQ ID NO: 1559756 - RNA, 20 nt, Human adenovirus D
auuccugcaccauccccagg

SEQ ID NO: 1559757 - RNA, 21 nt, Human adenovirus D
uaugacacgcgcacacuuugg

SEQ ID NO: 1559758 - RNA, 15 nt, Human adenovirus D
agcgcccucagcagu

SEQ ID NO: 1559759 - RNA, 20 nt, Human adenovirus D
gcgguccccgaggcccuugc

SEQ ID NO: 1559760 - RNA, 19 nt, Human adenovirus D
acaagauucaauaagguuc

SEQ ID NO: 1559761 - RNA, 18 nt, Human adenovirus D
uggacgaguggcuguuga

SEQ ID NO: 1559762 - RNA, 17 nt, Human adenovirus D
cuuccaguacucccgga

SEQ ID NO: 1559763 - RNA, 14 nt, Human adenovirus D
ccagguccacgcug

SEQ ID NO: 1559764 - RNA, 20 nt, Human adenovirus D
gcucugcugcgccgcgccag

SEQ ID NO: 1559765 - RNA, 14 nt, Human adenovirus D
aguuuggccuggau

SEQ ID NO: 1559766 - RNA, 22 nt, Human adenovirus D
guacgagagcgugauggcgcag

SEQ ID NO: 1559767 - RNA, 16 nt, Human adenovirus D
gugggcguggggcaag

SEQ ID NO: 1559768 - RNA, 23 nt, Human adenovirus D
cagcuccugagcgagacccaggu

SEQ ID NO: 1559769 - RNA, 16 nt, Human adenovirus D
ucagcaacuaccccgu

SEQ ID NO: 1559770 - RNA, 17 nt, Human adenovirus D
cacuuaaguccugggcc

SEQ ID NO: 1559771 - RNA, 22 nt, Human adenovirus D
gauuagagguagguuugaguag

SEQ ID NO: 1559772 - RNA, 18 nt, Human adenovirus D
ggcuaccuugcacccacc

SEQ ID NO: 1559773 - RNA, 16 nt, Human adenovirus D
agauccugcugcucca

SEQ ID NO: 1559774 - RNA, 20 nt, Human adenovirus D
cgcagcucuucccgcugaac

SEQ ID NO: 1559775 - RNA, 21 nt, Human adenovirus D
ccgccauggggcgccgcccga

SEQ ID NO: 1559776 - RNA, 18 nt, Human adenovirus D
agcaugccgaagaagaac

SEQ ID NO: 1559777 - RNA, 14 nt, Human adenovirus D
gcuggguggccggc

SEQ ID NO: 1559778 - RNA, 18 nt, Human adenovirus D
agguggcccugggccuga

SEQ ID NO: 1559779 - RNA, 20 nt, Human adenovirus D
gcaugaaggggacgagcugc

SEQ ID NO: 1559780 - RNA, 20 nt, Human adenovirus D
gcgaaccgagcacucgugcu

SEQ ID NO: 1559781 - RNA, 13 nt, Human adenovirus D
gugcuccagccaa

SEQ ID NO: 1559782 - RNA, 14 nt, Human adenovirus D
cacugccggugcac

SEQ ID NO: 1559783 - RNA, 18 nt, Human adenovirus D
ccugagccgccagcuggc

SEQ ID NO: 1559784 - RNA, 20 nt, Human adenovirus D
caugaaauugcgggugaugc

SEQ ID NO: 1559785 - RNA, 18 nt, Human adenovirus D
agcucggcgaugguggcg

SEQ ID NO: 1559786 - RNA, 14 nt, Human adenovirus D
gccgcuggacgaga

SEQ ID NO: 1559787 - RNA, 18 nt, Human adenovirus D
gcccgaguuguccuggua

SEQ ID NO: 1559788 - RNA, 24 nt, Human adenovirus D
cagcaguagccccucugugcccag

SEQ ID NO: 1559789 - RNA, 16 nt, Human adenovirus D
gccauagcucagcccg

SEQ ID NO: 1559790 - RNA, 12 nt, Human adenovirus D
ucaccaaggcca

SEQ ID NO: 1559791 - RNA, 18 nt, Human adenovirus D
ucaccucaacgcccaggc

SEQ ID NO: 1559792 - RNA, 22 nt, Human adenovirus D
cggcgguuccggccccgcgggc

SEQ ID NO: 1559793 - RNA, 10 nt, Human adenovirus D
ccaggaggag

SEQ ID NO: 1559794 - RNA, 19 nt, Human adenovirus D
gcagguggacgagccgccu

SEQ ID NO: 1559795 - RNA, 13 nt, Human adenovirus D
uggccugcgccau

SEQ ID NO: 1559796 - RNA, 12 nt, Human adenovirus D
agccgccugagc

SEQ ID NO: 1559797 - RNA, 16 nt, Human adenovirus D
ccauugaauggcacug

SEQ ID NO: 1559798 - RNA, 19 nt, Human adenovirus D
ccgcgccagacgcacgggc

SEQ ID NO: 1559799 - RNA, 16 nt, Human adenovirus D
gcccgggacggaggcu

SEQ ID NO: 1559800 - RNA, 21 nt, Human adenovirus D
cgccaccuucuuccccauggc

SEQ ID NO: 1559801 - RNA, 14 nt, Human adenovirus D
uagcaaggugcuga

SEQ ID NO: 1559802 - RNA, 13 nt, Human adenovirus D
aggccuggcccug

SEQ ID NO: 1559803 - RNA, 14 nt, Human adenovirus D
gaucagccccgcgc

SEQ ID NO: 1559804 - RNA, 21 nt, Human adenovirus D
cgccaacucggcccacgcgcu

SEQ ID NO: 1559805 - RNA, 13 nt, Human adenovirus D
caaugagaggagu

SEQ ID NO: 1559806 - RNA, 21 nt, Human adenovirus D
cuccuggugcgucgagcacag

SEQ ID NO: 1559807 - RNA, 20 nt, Human adenovirus D
gccguacgugcccauagaca

SEQ ID NO: 1559808 - RNA, 16 nt, Human adenovirus D
uaaugacaaacaaaag

SEQ ID NO: 1559809 - RNA, 20 nt, Human adenovirus D
cuuuugguuucaaauucauu

SEQ ID NO: 1559810 - RNA, 23 nt, Human adenovirus D
cauauaucuuggagguuuggcau

SEQ ID NO: 1559811 - RNA, 17 nt, Human adenovirus D
cgcauccugcaacugcg

SEQ ID NO: 1559812 - RNA, 19 nt, Human adenovirus D
ugcuggaggguugaaagau

SEQ ID NO: 1559813 - RNA, 22 nt, Human adenovirus D
aacugcgcguccgucagcagca

SEQ ID NO: 1559814 - RNA, 20 nt, Human adenovirus D
caaccuggaccggcugguga

SEQ ID NO: 1559815 - RNA, 14 nt, Human adenovirus D
aaucagccccuucc

SEQ ID NO: 1559816 - RNA, 14 nt, Human adenovirus D
gacaguggcagcgu

SEQ ID NO: 1559817 - RNA, 16 nt, Human adenovirus D
caacuagccggagccg

SEQ ID NO: 1559818 - RNA, 15 nt, Human adenovirus D
uccugaucucugcca

SEQ ID NO: 1559819 - RNA, 13 nt, Human adenovirus D
cuccgcaccgcuc

SEQ ID NO: 1559820 - RNA, 13 nt, Human adenovirus D
gcugguggcgcug

SEQ ID NO: 1559821 - RNA, 19 nt, Human adenovirus D
aggucagcagcaagagcuc

SEQ ID NO: 1559822 - RNA, 22 nt, Human adenovirus D
cgcugggcguggugcuggauga

SEQ ID NO: 1559823 - RNA, 19 nt, Human adenovirus D
caucggacgacugggaggc

SEQ ID NO: 1559824 - RNA, 20 nt, Human adenovirus D
acggcugcauccacugcucc

SEQ ID NO: 1559825 - RNA, 21 nt, Human adenovirus D
gggguauuacuaggcccagca

SEQ ID NO: 1559826 - RNA, 17 nt, Human adenovirus D
cuggcgagacugggggc

SEQ ID NO: 1559827 - RNA, 16 nt, Human adenovirus D
cggcgggccaugcgca

SEQ ID NO: 1559828 - RNA, 20 nt, Human adenovirus D
ugcaaugucaggucugcugg

SEQ ID NO: 1559829 - RNA, 13 nt, Human adenovirus D
cugcaggccgggc

SEQ ID NO: 1559830 - RNA, 15 nt, Human adenovirus D
cacaacaccgccucc

SEQ ID NO: 1559831 - RNA, 17 nt, Human adenovirus D
aguuuuucauccagaau

SEQ ID NO: 1559832 - RNA, 19 nt, Human adenovirus D
aaguacauagugaccaaga

SEQ ID NO: 1559833 - RNA, 14 nt, Human adenovirus D
accucaucgccacc

SEQ ID NO: 1559834 - RNA, 15 nt, Human adenovirus D
gguggcccugggccu

SEQ ID NO: 1559835 - RNA, 22 nt, Human adenovirus D
gcugaggaaucggaucuucccc

SEQ ID NO: 1559836 - RNA, 20 nt, Human adenovirus D
cacuccccccuuugucuccu

SEQ ID NO: 1559837 - RNA, 15 nt, Human adenovirus D
cgggugaugguggcu

SEQ ID NO: 1559838 - RNA, 12 nt, Human adenovirus D
cgcgcgggcagg

SEQ ID NO: 1559839 - RNA, 16 nt, Human adenovirus D
cgaacaguccacccag

SEQ ID NO: 1559840 - RNA, 21 nt, Human adenovirus D
caaacaggcugucgguguccc

SEQ ID NO: 1559841 - RNA, 24 nt, Human adenovirus D
ccacuacucacacuacacagcuag

SEQ ID NO: 1559842 - RNA, 12 nt, Human adenovirus D
gcuugcccugcc

SEQ ID NO: 1559843 - RNA, 20 nt, Human adenovirus D
uccagaggacuuggaugagg

SEQ ID NO: 1559844 - RNA, 15 nt, Human adenovirus D
cuccacucgacccug

SEQ ID NO: 1559845 - RNA, 14 nt, Human adenovirus D
ugagggccucggcg

SEQ ID NO: 1559846 - RNA, 15 nt, Human adenovirus D
cugcccgccaacacc

SEQ ID NO: 1559847 - RNA, 20 nt, Human adenovirus D
cucgaacaguccacccagac

SEQ ID NO: 1559848 - RNA, 12 nt, Human adenovirus D
ggcggcagagcg

SEQ ID NO: 1559849 - RNA, 13 nt, Human adenovirus D
gucaucgacucgg

SEQ ID NO: 1559850 - RNA, 19 nt, Human adenovirus D
cccagaacuggcagagcac

SEQ ID NO: 1559851 - RNA, 16 nt, Human adenovirus D
gcuggaugcggagccg

SEQ ID NO: 1559852 - RNA, 16 nt, Human adenovirus D
cagcucuucggagccu

SEQ ID NO: 1559853 - RNA, 16 nt, Human adenovirus D
cccuauuuaaaggcac

SEQ ID NO: 1559854 - RNA, 15 nt, Human adenovirus D
uccuggucugcaacc

SEQ ID NO: 1559855 - RNA, 16 nt, Human adenovirus D
uuccgcguaccugcgc

SEQ ID NO: 1559856 - RNA, 16 nt, Human adenovirus D
ccgcuaguggaagaga

SEQ ID NO: 1559857 - RNA, 15 nt, Human adenovirus D
gcggcgcggagcaag

SEQ ID NO: 1559858 - RNA, 12 nt, Human adenovirus D
ucgaucaucucc

SEQ ID NO: 1559859 - RNA, 17 nt, Human adenovirus D
ccgagucgcggaugaag

SEQ ID NO: 1559860 - RNA, 17 nt, Human adenovirus D
ucauaugguagacccac

SEQ ID NO: 1559861 - RNA, 16 nt, Human adenovirus D
ccugcacacggagugc

SEQ ID NO: 1559862 - RNA, 19 nt, Human adenovirus D
acgaggcguucagggaggc

SEQ ID NO: 1559863 - RNA, 15 nt, Human adenovirus D
acaugcccagcagca

SEQ ID NO: 1559864 - RNA, 21 nt, Human adenovirus D
gccaccucgccgcgcaggggc

SEQ ID NO: 1559865 - RNA, 13 nt, Human adenovirus D
ccauagggagccu

SEQ ID NO: 1559866 - RNA, 15 nt, Human adenovirus D
caggaucauugaaaa

SEQ ID NO: 1559867 - RNA, 19 nt, Human adenovirus D
gcccgggucuggugcaguu

SEQ ID NO: 1559868 - RNA, 17 nt, Human adenovirus D
ugccacaugcaccuggg

SEQ ID NO: 1559869 - RNA, 22 nt, Human adenovirus D
gcgucuuucucuuucucugcca

SEQ ID NO: 1559870 - RNA, 20 nt, Human adenovirus D
guaucugaggcauauaaaaa

SEQ ID NO: 1559871 - RNA, 14 nt, Human adenovirus D
gcuagacaccacag

SEQ ID NO: 1559872 - RNA, 12 nt, Human adenovirus D
uggcuugcauga

SEQ ID NO: 1559873 - RNA, 20 nt, Human adenovirus D
cccacgugguauacaagcca

SEQ ID NO: 1559874 - RNA, 13 nt, Human adenovirus D
gagugcagggaug

SEQ ID NO: 1559875 - RNA, 22 nt, Human adenovirus D
gcuccagcgaaagagagcucgc

SEQ ID NO: 1559876 - RNA, 22 nt, Human adenovirus D
ggagggggggaucauguccacc

SEQ ID NO: 1559877 - RNA, 12 nt, Human adenovirus D
uccgcaacuucc

SEQ ID NO: 1559878 - RNA, 13 nt, Human adenovirus D
gggacuggcaagc

SEQ ID NO: 1559879 - RNA, 17 nt, Human adenovirus D
ccugauauugcuucccu

SEQ ID NO: 1559880 - RNA, 13 nt, Human adenovirus D
caauagacagcag

SEQ ID NO: 1559881 - RNA, 17 nt, Human adenovirus D
caagcuggugaugccag

SEQ ID NO: 1559882 - RNA, 15 nt, Human adenovirus D
ugaagcaggagcgca

SEQ ID NO: 1559883 - RNA, 14 nt, Human adenovirus D
uucugguugucugu

SEQ ID NO: 1559884 - RNA, 12 nt, Human adenovirus D
guugugcaggac

SEQ ID NO: 1559885 - RNA, 16 nt, Human adenovirus D
acaugcccagcagcag

SEQ ID NO: 1559886 - RNA, 22 nt, Human adenovirus D
ccaggguugagucgcggcagaa

SEQ ID NO: 1559887 - RNA, 15 nt, Human adenovirus D
gcugggcguggugcu

SEQ ID NO: 1559888 - RNA, 14 nt, Human adenovirus D
ccaggggguccacc

SEQ ID NO: 1559889 - RNA, 16 nt, Human adenovirus D
acacaaaaaugaagcc

SEQ ID NO: 1559890 - RNA, 23 nt, Human adenovirus D
gcccauaauucagggugcuccag

SEQ ID NO: 1559891 - RNA, 17 nt, Human adenovirus D
ggagccgcucggccaug

SEQ ID NO: 1559892 - RNA, 18 nt, Human adenovirus D
gacaauucagagccaggg

SEQ ID NO: 1559893 - RNA, 11 nt, Human adenovirus D
ggccuggagca

SEQ ID NO: 1559894 - RNA, 21 nt, Human adenovirus D
cccauggacgggaaccccacc

SEQ ID NO: 1559895 - RNA, 16 nt, Human adenovirus D
cgcgcaacugggccgc

SEQ ID NO: 1559896 - RNA, 15 nt, Human adenovirus D
aggagggauugcagg

SEQ ID NO: 1559897 - RNA, 17 nt, Human adenovirus D
gcuccggguucuggaga

SEQ ID NO: 1559898 - RNA, 20 nt, Human adenovirus D
gcucgcgcccguagucugga

SEQ ID NO: 1559899 - RNA, 15 nt, Human adenovirus D
cacccugcccuucca

SEQ ID NO: 1559900 - RNA, 21 nt, Human adenovirus D
gcucgucuagaaccccacagg

SEQ ID NO: 1559901 - RNA, 13 nt, Human adenovirus D
caccuagaccacu

SEQ ID NO: 1559902 - RNA, 22 nt, Human adenovirus D
cacccagaucccgccggggguu

SEQ ID NO: 1559903 - RNA, 17 nt, Human adenovirus D
aguccagcagagucugc

SEQ ID NO: 1559904 - RNA, 15 nt, Human adenovirus D
ggacgaguggcuguu

SEQ ID NO: 1559905 - RNA, 13 nt, Human adenovirus D
uccgcaccgcucc

SEQ ID NO: 1559906 - RNA, 14 nt, Human adenovirus D
augaacaggagcac

SEQ ID NO: 1559907 - RNA, 22 nt, Human adenovirus D
cggaaucagaauauccccuucc

SEQ ID NO: 1559908 - RNA, 21 nt, Human adenovirus D
caccaacuuuaucagcgcgcu

SEQ ID NO: 1559909 - RNA, 15 nt, Human adenovirus D
guagucaugcaugag

SEQ ID NO: 1559910 - RNA, 22 nt, Human adenovirus D
caggggcuugaguccgucggcc

SEQ ID NO: 1559911 - RNA, 13 nt, Human adenovirus D
gucaaacaggcaa

SEQ ID NO: 1559912 - RNA, 23 nt, Human adenovirus D
gccauagagggcguuggagagaa

SEQ ID NO: 1559913 - RNA, 21 nt, Human adenovirus D
uugcugacgggggugcccaac

SEQ ID NO: 1559914 - RNA, 22 nt, Human adenovirus D
ugcuccaggucgucgccccgga

SEQ ID NO: 1559915 - RNA, 22 nt, Human adenovirus D
ucgccgcaccauccgcgccgca

SEQ ID NO: 1559916 - RNA, 22 nt, Human adenovirus D
aggagccauagagggcguugga

SEQ ID NO: 1559917 - RNA, 16 nt, Human adenovirus D
cuugcaacuugcaaac

SEQ ID NO: 1559918 - RNA, 18 nt, Human adenovirus D
augaagguagaagaccau

SEQ ID NO: 1559919 - RNA, 17 nt, Human adenovirus D
accgagccucccaggag

SEQ ID NO: 1559920 - RNA, 13 nt, Human adenovirus D
gcugcggcugaug

SEQ ID NO: 1559921 - RNA, 20 nt, Human adenovirus D
cggguguaaugaaacccgcc

SEQ ID NO: 1559922 - RNA, 21 nt, Human adenovirus D
agcucaucgacuggugcugcg

SEQ ID NO: 1559923 - RNA, 16 nt, Human adenovirus D
ggaggccacgugcgag

SEQ ID NO: 1559924 - RNA, 20 nt, Human adenovirus D
aaagugacgucauugaagag

SEQ ID NO: 1559925 - RNA, 13 nt, Human adenovirus D
auguccggggcgg

SEQ ID NO: 1559926 - RNA, 15 nt, Human adenovirus D
ccggucucugcgcuc

SEQ ID NO: 1559927 - RNA, 14 nt, Human adenovirus D
ccacuacagcugac

SEQ ID NO: 1559928 - RNA, 20 nt, Human adenovirus D
ugaggacuuguuacaugaca

SEQ ID NO: 1559929 - RNA, 18 nt, Human adenovirus D
gcgggcgccucccaggac

SEQ ID NO: 1559930 - RNA, 18 nt, Human adenovirus D
gugcacucccaguucuug

SEQ ID NO: 1559931 - RNA, 18 nt, Human adenovirus D
cggacguggugcugcugc

SEQ ID NO: 1559932 - RNA, 18 nt, Human adenovirus D
caccugcggcgcggagca

SEQ ID NO: 1559933 - RNA, 19 nt, Human adenovirus D
auucaaggccauaaaucug

SEQ ID NO: 1559934 - RNA, 17 nt, Human adenovirus D
agcaguccaugcccaac

SEQ ID NO: 1559935 - RNA, 21 nt, Human adenovirus D
ugcugguggaaacagacagcc

SEQ ID NO: 1559936 - RNA, 23 nt, Human adenovirus D
cggcugcauccacugcuccugcg

SEQ ID NO: 1559937 - RNA, 15 nt, Human adenovirus D
acugcuggcccugcu

SEQ ID NO: 1559938 - RNA, 17 nt, Human adenovirus D
gaucauguccaccugcg

SEQ ID NO: 1559939 - RNA, 21 nt, Human adenovirus D
cuuguaccugcccgacuccua

SEQ ID NO: 1559940 - RNA, 23 nt, Human adenovirus D
cugggguauuacuaggcccagca

SEQ ID NO: 1559941 - RNA, 17 nt, Human adenovirus D
ggccaugcgcaggcgcc

SEQ ID NO: 1559942 - RNA, 14 nt, Human adenovirus D
aucccaacagccuu

SEQ ID NO: 1559943 - RNA, 16 nt, Human adenovirus D
gcggaugcuggcgcgc

SEQ ID NO: 1559944 - RNA, 14 nt, Human adenovirus D
ucuuccccauggcg

SEQ ID NO: 1559945 - RNA, 15 nt, Human adenovirus D
ucaacagcugugcua

SEQ ID NO: 1559946 - RNA, 22 nt, Human adenovirus D
gcccgcgccgcggcgacagcgc

SEQ ID NO: 1559947 - RNA, 15 nt, Human adenovirus D
cugaccaacuggucu

SEQ ID NO: 1559948 - RNA, 18 nt, Human adenovirus D
gguaauccacggacagaa

SEQ ID NO: 1559949 - RNA, 17 nt, Human adenovirus D
ccgccgcuaucugcucu

SEQ ID NO: 1559950 - RNA, 17 nt, Human adenovirus D
uccaucgauuucaucaa

SEQ ID NO: 1559951 - RNA, 20 nt, Human adenovirus D
cagcaucagucuccuggugc

SEQ ID NO: 1559952 - RNA, 18 nt, Human adenovirus D
caaaguaaaaaaccgguc

SEQ ID NO: 1559953 - RNA, 11 nt, Human adenovirus D
augaacacacu

SEQ ID NO: 1559954 - RNA, 22 nt, Human adenovirus D
cggcgcuuggugggcagaggag

SEQ ID NO: 1559955 - RNA, 18 nt, Human adenovirus D
caucgugcgcgaccuggg

SEQ ID NO: 1559956 - RNA, 15 nt, Human adenovirus D
acagccuugccccca

SEQ ID NO: 1559957 - RNA, 15 nt, Human adenovirus D
aggagcugagaccag

SEQ ID NO: 1559958 - RNA, 17 nt, Human adenovirus D
uggagcgcguaggccgc

SEQ ID NO: 1559959 - RNA, 21 nt, Human adenovirus D
uccaugaugauggcgaugggc

SEQ ID NO: 1559960 - RNA, 22 nt, Human adenovirus D
cgaccucgccgucuacucccag

SEQ ID NO: 1559961 - RNA, 21 nt, Human adenovirus D
auccgcagcuacaccucccuc

SEQ ID NO: 1559962 - RNA, 16 nt, Human adenovirus D
ggcgccggcgcuagcc

SEQ ID NO: 1559963 - RNA, 23 nt, Human adenovirus D
gagcaggggcuacauucuggacu

SEQ ID NO: 1559964 - RNA, 13 nt, Human adenovirus D
cuugaggaggaac

SEQ ID NO: 1559965 - RNA, 18 nt, Human adenovirus D
auggcuaccugggaggag

SEQ ID NO: 1559966 - RNA, 16 nt, Human adenovirus D
cucccggcggcagcgg

SEQ ID NO: 1559967 - RNA, 15 nt, Human adenovirus D
cuagaaccccacagg

SEQ ID NO: 1559968 - RNA, 15 nt, Human adenovirus D
agccccucugugccc

SEQ ID NO: 1559969 - RNA, 15 nt, Human adenovirus D
gcacccaccacaguu

SEQ ID NO: 1559970 - RNA, 18 nt, Human adenovirus D
ggaugguuuacaauuuug

SEQ ID NO: 1559971 - RNA, 13 nt, Human adenovirus D
agcgcauccugag

SEQ ID NO: 1559972 - RNA, 14 nt, Human adenovirus D
gucugcucgggcau

SEQ ID NO: 1559973 - RNA, 16 nt, Human adenovirus D
cgccucggaccuggcc

SEQ ID NO: 1559974 - RNA, 14 nt, Human adenovirus D
caugagcaggcagg

SEQ ID NO: 1559975 - RNA, 23 nt, Human adenovirus D
ucucugccgccggggcucggugc

SEQ ID NO: 1559976 - RNA, 13 nt, Human adenovirus D
ccugcccuuccag

SEQ ID NO: 1559977 - RNA, 13 nt, Human adenovirus D
gccagcagcacau

SEQ ID NO: 1559978 - RNA, 16 nt, Human adenovirus D
guuucgucaggcaggc

SEQ ID NO: 1559979 - RNA, 22 nt, Human adenovirus D
agagaaggguuaacauuugaca

SEQ ID NO: 1559980 - RNA, 20 nt, Human adenovirus D
gggacuuggucaccccgccg

SEQ ID NO: 1559981 - RNA, 16 nt, Human adenovirus D
gaaccucagccacucc

SEQ ID NO: 1559982 - RNA, 20 nt, Human adenovirus D
acuacuaauucucaaagugu

SEQ ID NO: 1559983 - RNA, 14 nt, Human adenovirus D
gccugaugagcucg

SEQ ID NO: 1559984 - RNA, 16 nt, Human adenovirus D
aggccgugagcgcgag

SEQ ID NO: 1559985 - RNA, 13 nt, Human adenovirus D
ggaccaaccccac

SEQ ID NO: 1559986 - RNA, 20 nt, Human adenovirus D
cugcgcuuugugcccgugga

SEQ ID NO: 1559987 - RNA, 22 nt, Human adenovirus D
cgccgcguaaccaacgcgccgg

SEQ ID NO: 1559988 - RNA, 13 nt, Human adenovirus D
gguggaagaugac

SEQ ID NO: 1559989 - RNA, 22 nt, Human adenovirus D
ugcgcaaaaccuguucagggac

SEQ ID NO: 1559990 - RNA, 13 nt, Human adenovirus D
cgccgagccugaa

SEQ ID NO: 1559991 - RNA, 14 nt, Human adenovirus D
cuggacccccagac

SEQ ID NO: 1559992 - RNA, 15 nt, Human adenovirus D
cacccacgacacagc

SEQ ID NO: 1559993 - RNA, 21 nt, Human adenovirus D
ugaggaucauaucccagggga

SEQ ID NO: 1559994 - RNA, 18 nt, Human adenovirus D
ucauucaaggccauaaau

SEQ ID NO: 1559995 - RNA, 15 nt, Human adenovirus D
uugucccgcugagcu

SEQ ID NO: 1559996 - RNA, 22 nt, Human adenovirus D
agucagcaacuaccccgugguc

SEQ ID NO: 1559997 - RNA, 13 nt, Human adenovirus D
gaugucugugaag

SEQ ID NO: 1559998 - RNA, 23 nt, Human adenovirus D
cccuccacuuucauaaucaggca

SEQ ID NO: 1559999 - RNA, 16 nt, Human adenovirus D
cauaaucaccauguua

SEQ ID NO: 1560000 - RNA, 19 nt, Human adenovirus D
gcaacuuuuccgagaccau

SEQ ID NO: 1560001 - RNA, 23 nt, Human adenovirus D
uuucgggcgggcagggagcugcg

SEQ ID NO: 1560002 - RNA, 18 nt, Human adenovirus D
uggugcgucgagcacagc

SEQ ID NO: 1560003 - RNA, 21 nt, Human adenovirus D
uccugagauaugugcagcaga

SEQ ID NO: 1560004 - RNA, 18 nt, Human adenovirus D
ugaccauaagcagggugg

SEQ ID NO: 1560005 - RNA, 16 nt, Human adenovirus D
uagccagaccaagcug

SEQ ID NO: 1560006 - RNA, 24 nt, Human adenovirus D
gcugccggaccucaugcaagaccc

SEQ ID NO: 1560007 - RNA, 14 nt, Human adenovirus D
acucgcgggcggcc

SEQ ID NO: 1560008 - RNA, 14 nt, Human adenovirus D
cuuagacugcuauc

SEQ ID NO: 1560009 - RNA, 18 nt, Human adenovirus D
aucaaaucgccaagggca

SEQ ID NO: 1560010 - RNA, 22 nt, Human adenovirus D
caaacuauugcuucccauugaa

SEQ ID NO: 1560011 - RNA, 20 nt, Human adenovirus D
uggaaacucuuggagcaggg

SEQ ID NO: 1560012 - RNA, 20 nt, Human adenovirus D
cgcgaguucgcuccgcggcg

SEQ ID NO: 1560013 - RNA, 21 nt, Human adenovirus D
aaucacucuuuccagcagcag

SEQ ID NO: 1560014 - RNA, 22 nt, Human adenovirus D
agcuagcacccaaaaacugcau

SEQ ID NO: 1560015 - RNA, 16 nt, Human adenovirus D
aggagucgccggagga

SEQ ID NO: 1560016 - RNA, 23 nt, Human adenovirus D
gcaggauaaauauggccuggagc

SEQ ID NO: 1560017 - RNA, 23 nt, Human adenovirus D
gacaucgcgaaccaggcagugca

SEQ ID NO: 1560018 - RNA, 20 nt, Human adenovirus D
ccaggggaugaacaguggca

SEQ ID NO: 1560019 - RNA, 19 nt, Human adenovirus D
guuucucaacagcugggac

SEQ ID NO: 1560020 - RNA, 23 nt, Human adenovirus D
aaugucuuauggugacucggcug

SEQ ID NO: 1560021 - RNA, 22 nt, Human adenovirus D
gccacuuccgcgcuccgugggg

SEQ ID NO: 1560022 - RNA, 11 nt, Human adenovirus D
cggcugcugcu

SEQ ID NO: 1560023 - RNA, 11 nt, Human adenovirus D
acaugcacugg

SEQ ID NO: 1560024 - RNA, 21 nt, Human adenovirus D
uggucuuucuggcuugcuucu

SEQ ID NO: 1560025 - RNA, 20 nt, Human adenovirus D
ccgaagaagaacaggagccg

SEQ ID NO: 1560026 - RNA, 21 nt, Human adenovirus D
ggaggcaccaucacaggaggc

SEQ ID NO: 1560027 - RNA, 21 nt, Human adenovirus D
ugugcugguggaaacagacag

SEQ ID NO: 1560028 - RNA, 13 nt, Human adenovirus D
caaguccagggug

SEQ ID NO: 1560029 - RNA, 23 nt, Human adenovirus D
aagcagguggcgccgggccuggg

SEQ ID NO: 1560030 - RNA, 17 nt, Human adenovirus D
accucuacgccaccuuc

SEQ ID NO: 1560031 - RNA, 16 nt, Human adenovirus D
gccgcggcgagcggga

SEQ ID NO: 1560032 - RNA, 22 nt, Human adenovirus D
cgcccaacucgcggcugcugcu

SEQ ID NO: 1560033 - RNA, 24 nt, Human adenovirus D
ucauucucgagcgaucugggaugc

SEQ ID NO: 1560034 - RNA, 17 nt, Human adenovirus D
ggaggcgugcacuggcu

SEQ ID NO: 1560035 - RNA, 19 nt, Human adenovirus D
ggaagaagagacagaagaa

SEQ ID NO: 1560036 - RNA, 22 nt, Human adenovirus D
cuaaugguccugcaagaggaga

SEQ ID NO: 1560037 - RNA, 16 nt, Human adenovirus D
agccaggugagcucgg

SEQ ID NO: 1560038 - RNA, 18 nt, Human adenovirus D
cgccaaccggcugaugcc

SEQ ID NO: 1560039 - RNA, 17 nt, Human adenovirus D
caucaccaccgucagug

SEQ ID NO: 1560040 - RNA, 19 nt, Human adenovirus D
cugcaggggcgucccgcgg

SEQ ID NO: 1560041 - RNA, 18 nt, Human adenovirus D
ggcguggcuaaggugacu

SEQ ID NO: 1560042 - RNA, 12 nt, Human adenovirus D
uccuccaggacu

SEQ ID NO: 1560043 - RNA, 14 nt, Human adenovirus D
ugagcggcugcacg

SEQ ID NO: 1560044 - RNA, 16 nt, Human adenovirus D
cucaaagaccagaacu

SEQ ID NO: 1560045 - RNA, 11 nt, Human adenovirus D
aacaaggccau

SEQ ID NO: 1560046 - RNA, 22 nt, Human adenovirus D
aucaccauguuauucagcagcc

SEQ ID NO: 1560047 - RNA, 14 nt, Human adenovirus D
cagggaggcgcugc

SEQ ID NO: 1560048 - RNA, 21 nt, Human adenovirus D
cucagcugccaugggaggaag

SEQ ID NO: 1560049 - RNA, 12 nt, Human adenovirus D
cucaggcgcaac

SEQ ID NO: 1560050 - RNA, 22 nt, Human adenovirus D
gcuccuucaacgcgcgcugccc

SEQ ID NO: 1560051 - RNA, 22 nt, Human adenovirus D
ggccgcucgcucguucugccca

SEQ ID NO: 1560052 - RNA, 23 nt, Human adenovirus D
augccaagauagcccugcgccca

SEQ ID NO: 1560053 - RNA, 22 nt, Human adenovirus D
cggggcgaaguuccccucgcag

SEQ ID NO: 1560054 - RNA, 15 nt, Human adenovirus D
cggagcccacccgcu

SEQ ID NO: 1560055 - RNA, 21 nt, Human adenovirus D
ccugggcacuggagcacagac

SEQ ID NO: 1560056 - RNA, 17 nt, Human adenovirus D
acaguuauaccaccucc

SEQ ID NO: 1560057 - RNA, 22 nt, Human adenovirus D
cuaacgcuguaccgcgaggcca

SEQ ID NO: 1560058 - RNA, 15 nt, Human adenovirus D
caagugccuuuauca

SEQ ID NO: 1560059 - RNA, 16 nt, Human adenovirus D
gacugacuacccacug

SEQ ID NO: 1560060 - RNA, 20 nt, Human adenovirus D
gcccgccauggggcgccgcc

SEQ ID NO: 1560061 - RNA, 20 nt, Human adenovirus D
cuucacagagagccgccuga

SEQ ID NO: 1560062 - RNA, 18 nt, Human adenovirus D
acucuuaaaucauuuaaa

SEQ ID NO: 1560063 - RNA, 18 nt, Human adenovirus D
ucacucuuuccagcagca

SEQ ID NO: 1560064 - RNA, 20 nt, Human adenovirus D
acuacaaggacuacaaggcc

SEQ ID NO: 1560065 - RNA, 14 nt, Human adenovirus D
gcagcacaguaagu

SEQ ID NO: 1560066 - RNA, 15 nt, Human adenovirus D
cuuuuccugaugcag

SEQ ID NO: 1560067 - RNA, 19 nt, Human adenovirus D
ucgcuguccacgagcgcca

SEQ ID NO: 1560068 - RNA, 16 nt, Human adenovirus D
cacuuaaguccugggc

SEQ ID NO: 1560069 - RNA, 16 nt, Human adenovirus D
gugaccaucguaccag

SEQ ID NO: 1560070 - RNA, 21 nt, Human adenovirus D
acacugcagggagccagggga

SEQ ID NO: 1560071 - RNA, 21 nt, Human adenovirus D
gugcagccgugaucccacagg

SEQ ID NO: 1560072 - RNA, 12 nt, Human adenovirus D
gaggguguccug

SEQ ID NO: 1560073 - RNA, 20 nt, Human adenovirus D
cccugaacuaucaaaacgac

SEQ ID NO: 1560074 - RNA, 17 nt, Human adenovirus D
cugcucaccaccccgga

SEQ ID NO: 1560075 - RNA, 21 nt, Human adenovirus D
auugaaugggacuuauccaca

SEQ ID NO: 1560076 - RNA, 23 nt, Human adenovirus D
agaugcgacccaugagcugcgag

SEQ ID NO: 1560077 - RNA, 16 nt, Human adenovirus D
uuccccuccgcugugc

SEQ ID NO: 1560078 - RNA, 22 nt, Human adenovirus D
gagagcgggcaugaccucggca

SEQ ID NO: 1560079 - RNA, 18 nt, Human adenovirus D
gcaccugugggaccuggc

SEQ ID NO: 1560080 - RNA, 17 nt, Human adenovirus D
guagacaaagagcacag

SEQ ID NO: 1560081 - RNA, 15 nt, Human adenovirus D
cacccuggaagccau

SEQ ID NO: 1560082 - RNA, 20 nt, Human adenovirus D
ugcaccuguggagggcaugg

SEQ ID NO: 1560083 - RNA, 24 nt, Human adenovirus D
ggcugacgagcccgcgcgggagcc

SEQ ID NO: 1560084 - RNA, 20 nt, Human adenovirus D
ugauggccuguaccgggacc

SEQ ID NO: 1560085 - RNA, 15 nt, Human adenovirus D
ugccgcuggacgaga

SEQ ID NO: 1560086 - RNA, 18 nt, Human adenovirus D
gccagaaggggcaccuuc

SEQ ID NO: 1560087 - RNA, 21 nt, Human adenovirus D
cccgcccagguuuuccaugca

SEQ ID NO: 1560088 - RNA, 17 nt, Human adenovirus D
cagucagugaagcccug

SEQ ID NO: 1560089 - RNA, 13 nt, Human adenovirus D
ggcgggcugcccg

SEQ ID NO: 1560090 - RNA, 17 nt, Human adenovirus D
cuccuucaacgcgcgcu

SEQ ID NO: 1560091 - RNA, 19 nt, Human adenovirus D
aaacuugagcuuguuuaug

SEQ ID NO: 1560092 - RNA, 14 nt, Human adenovirus D
ucgaugaucucacg

SEQ ID NO: 1560093 - RNA, 16 nt, Human adenovirus D
guuuuccaugcacuca

SEQ ID NO: 1560094 - RNA, 23 nt, Human adenovirus D
ugggggcaauaccgggaugauga

SEQ ID NO: 1560095 - RNA, 22 nt, Human adenovirus D
gcacguggcggcggccaaccug

SEQ ID NO: 1560096 - RNA, 13 nt, Human adenovirus D
acagaugguagca

SEQ ID NO: 1560097 - RNA, 16 nt, Human adenovirus D
cuccacgugccgcgcg

SEQ ID NO: 1560098 - RNA, 18 nt, Human adenovirus D
cuacgccagccgcaggcg

SEQ ID NO: 1560099 - RNA, 17 nt, Human adenovirus D
cgcgcgaagauggccac

SEQ ID NO: 1560100 - RNA, 15 nt, Human adenovirus D
gcgcaguugggagcu

SEQ ID NO: 1560101 - RNA, 17 nt, Human adenovirus D
ucguacuucugccagca

SEQ ID NO: 1560102 - RNA, 13 nt, Human adenovirus D
gacgcagccggcg

SEQ ID NO: 1560103 - RNA, 21 nt, Human adenovirus D
gccgccggcggcgggccaugc

SEQ ID NO: 1560104 - RNA, 15 nt, Human adenovirus D
ugcauggccagccuu

SEQ ID NO: 1560105 - RNA, 14 nt, Human adenovirus D
cagaacuggcagag

SEQ ID NO: 1560106 - RNA, 13 nt, Human adenovirus D
cccgccgccaggc

SEQ ID NO: 1560107 - RNA, 16 nt, Human adenovirus D
ccgggaccgaguucag

SEQ ID NO: 1560108 - RNA, 19 nt, Human adenovirus D
ugacuuugaaccugaaaga

SEQ ID NO: 1560109 - RNA, 15 nt, Human adenovirus D
cuucucuuacugaaa

SEQ ID NO: 1560110 - RNA, 15 nt, Human adenovirus D
acauccuggaccagg

SEQ ID NO: 1560111 - RNA, 22 nt, Human adenovirus D
ucagccccuuccccuaucccaa

SEQ ID NO: 1560112 - RNA, 17 nt, Human adenovirus D
gaaacgucccaggaaac

SEQ ID NO: 1560113 - RNA, 17 nt, Human adenovirus D
ccuggcuccgcggcacg

SEQ ID NO: 1560114 - RNA, 17 nt, Human adenovirus D
caagcucaugcuggccg

SEQ ID NO: 1560115 - RNA, 19 nt, Human adenovirus D
ugcugcgccgcgccagacg

SEQ ID NO: 1560116 - RNA, 13 nt, Human adenovirus D
caccccccgcagg

SEQ ID NO: 1560117 - RNA, 15 nt, Human adenovirus D
gugaagggcacagcc

SEQ ID NO: 1560118 - RNA, 23 nt, Human adenovirus D
caaucucggcgucauugacggcg

SEQ ID NO: 1560119 - RNA, 22 nt, Human adenovirus D
aggaagcccagagcucgcgggc

SEQ ID NO: 1560120 - RNA, 14 nt, Human adenovirus D
gcguguugcggccc

SEQ ID NO: 1560121 - RNA, 21 nt, Human adenovirus D
cucacaguaagugcagcacau

SEQ ID NO: 1560122 - RNA, 21 nt, Human adenovirus D
caggcccagaacuggcagagc

SEQ ID NO: 1560123 - RNA, 16 nt, Human adenovirus D
ccccgagcgccugagg

SEQ ID NO: 1560124 - RNA, 15 nt, Human adenovirus D
cucucguuccagacg

SEQ ID NO: 1560125 - RNA, 14 nt, Human adenovirus D
uacuguaaagccac

SEQ ID NO: 1560126 - RNA, 13 nt, Human adenovirus D
uccuccgcaucca

SEQ ID NO: 1560127 - RNA, 15 nt, Human adenovirus D
cuggcugcuggagcu

SEQ ID NO: 1560128 - RNA, 19 nt, Human adenovirus D
aggagaacugcuggcccug

SEQ ID NO: 1560129 - RNA, 14 nt, Human adenovirus D
ggaggaugugcugc

SEQ ID NO: 1560130 - RNA, 14 nt, Human adenovirus D
gacgagaacccgag

SEQ ID NO: 1560131 - RNA, 17 nt, Human adenovirus D
gucuaccugcgcacgcc

SEQ ID NO: 1560132 - RNA, 21 nt, Human adenovirus D
caccccuuacauguggagcua

SEQ ID NO: 1560133 - RNA, 15 nt, Human adenovirus D
gucuacuucaacccc

SEQ ID NO: 1560134 - RNA, 21 nt, Human adenovirus D
gcggccagcgcuggguggccg

SEQ ID NO: 1560135 - RNA, 21 nt, Human adenovirus D
ugaucuuuaugaacaugaagu

SEQ ID NO: 1560136 - RNA, 12 nt, Human adenovirus D
gagcccacccgc

SEQ ID NO: 1560137 - RNA, 20 nt, Human adenovirus D
gcugcuucgcccgggagagc

SEQ ID NO: 1560138 - RNA, 21 nt, Human adenovirus D
ugcacucauccaugaugaugg

SEQ ID NO: 1560139 - RNA, 19 nt, Human adenovirus D
gccucccgcccgacacugc

SEQ ID NO: 1560140 - RNA, 20 nt, Human adenovirus D
ggccacgaccgugccgcggu

SEQ ID NO: 1560141 - RNA, 20 nt, Human adenovirus D
ugagaugccccagcagaagc

SEQ ID NO: 1560142 - RNA, 16 nt, Human adenovirus D
ggagcgcguaggccgc

SEQ ID NO: 1560143 - RNA, 22 nt, Human adenovirus D
cacccgcgccgacgcgcuccuc

SEQ ID NO: 1560144 - RNA, 16 nt, Human adenovirus D
ggccaucgugcagaac

SEQ ID NO: 1560145 - RNA, 19 nt, Human adenovirus D
gucaaggugcgccccauca

SEQ ID NO: 1560146 - RNA, 18 nt, Human adenovirus D
ccacugccgccgccugcg

SEQ ID NO: 1560147 - RNA, 16 nt, Human adenovirus D
gacguggugcugcugc

SEQ ID NO: 1560148 - RNA, 19 nt, Human adenovirus D
ugacaacccgccugccagg

SEQ ID NO: 1560149 - RNA, 18 nt, Human adenovirus D
caggguacccacugggug

SEQ ID NO: 1560150 - RNA, 21 nt, Human adenovirus D
gaugaccgagcugacggccag

SEQ ID NO: 1560151 - RNA, 21 nt, Human adenovirus D
agaccaccuggugauggccug

SEQ ID NO: 1560152 - RNA, 15 nt, Human adenovirus D
gcaacccccagcucc

SEQ ID NO: 1560153 - RNA, 15 nt, Human adenovirus D
ugaaguacauccauu

SEQ ID NO: 1560154 - RNA, 19 nt, Human adenovirus D
cgcgagcugaugcugagcc

SEQ ID NO: 1560155 - RNA, 16 nt, Human adenovirus D
agaugccgggacagag

SEQ ID NO: 1560156 - RNA, 22 nt, Human adenovirus D
gccaagauagcccugcgcccag

SEQ ID NO: 1560157 - RNA, 16 nt, Human adenovirus D
agcaauccuccaggac

SEQ ID NO: 1560158 - RNA, 21 nt, Human adenovirus D
ccugugacaugcaaaaucuua

SEQ ID NO: 1560159 - RNA, 22 nt, Human adenovirus D
cugacaauucagagccagggcu

SEQ ID NO: 1560160 - RNA, 16 nt, Human adenovirus D
agcggggacagagaau

SEQ ID NO: 1560161 - RNA, 23 nt, Human adenovirus D
aggagcuggacaagcuucuugcu

SEQ ID NO: 1560162 - RNA, 15 nt, Human adenovirus D
ucguuaguccagcag

SEQ ID NO: 1560163 - RNA, 23 nt, Human adenovirus D
aaacuaaugacaaacaaaagcca

SEQ ID NO: 1560164 - RNA, 19 nt, Human adenovirus D
caacaugggugugcuggcu

SEQ ID NO: 1560165 - RNA, 20 nt, Human adenovirus D
agaucaccuacgagcucgug

SEQ ID NO: 1560166 - RNA, 11 nt, Human adenovirus D
cugggggcgcc

SEQ ID NO: 1560167 - RNA, 20 nt, Human adenovirus D
aucgccacaggugcugccca

SEQ ID NO: 1560168 - RNA, 21 nt, Human adenovirus D
cgggccuacgagcucaaccuc

SEQ ID NO: 1560169 - RNA, 14 nt, Human adenovirus D
agcaucgcgcaggc

SEQ ID NO: 1560170 - RNA, 15 nt, Human adenovirus D
uuguuguacucugug

SEQ ID NO: 1560171 - RNA, 15 nt, Human adenovirus D
cucguaccuggguca

SEQ ID NO: 1560172 - RNA, 20 nt, Human adenovirus D
ccagcccaugagcaggcagg

SEQ ID NO: 1560173 - RNA, 17 nt, Human adenovirus D
acugcaccccccgcagg

SEQ ID NO: 1560174 - RNA, 14 nt, Human adenovirus D
agaaccgccugggg

SEQ ID NO: 1560175 - RNA, 21 nt, Human adenovirus D
cgagcaagggcgaccagcucu

SEQ ID NO: 1560176 - RNA, 16 nt, Human adenovirus D
uugaaaaggcagcuga

SEQ ID NO: 1560177 - RNA, 19 nt, Human adenovirus D
gaguggcggcuuucugccc

SEQ ID NO: 1560178 - RNA, 12 nt, Human adenovirus D
uacaacuacaca

SEQ ID NO: 1560179 - RNA, 13 nt, Human adenovirus D
cgcacgggccgcc

SEQ ID NO: 1560180 - RNA, 18 nt, Human adenovirus D
ccccauggcgcacaacac

SEQ ID NO: 1560181 - RNA, 16 nt, Human adenovirus D
ugcggcugcugcaaau

SEQ ID NO: 1560182 - RNA, 13 nt, Human adenovirus D
aucagccaggacu

SEQ ID NO: 1560183 - RNA, 16 nt, Human adenovirus D
cucucgcuccaugaac

SEQ ID NO: 1560184 - RNA, 18 nt, Human adenovirus D
uccaccgaaggcagcucc

SEQ ID NO: 1560185 - RNA, 18 nt, Human adenovirus D
gccgcgugguagcccccu

SEQ ID NO: 1560186 - RNA, 17 nt, Human adenovirus D
gcacguggcggcggcca

SEQ ID NO: 1560187 - RNA, 14 nt, Human adenovirus D
acuucagccugggc

SEQ ID NO: 1560188 - RNA, 12 nt, Human adenovirus D
ccugcagcccaa

SEQ ID NO: 1560189 - RNA, 16 nt, Human adenovirus D
acugcucgaucuccuc

SEQ ID NO: 1560190 - RNA, 17 nt, Human adenovirus D
gggaccggggaggcacc

SEQ ID NO: 1560191 - RNA, 13 nt, Human adenovirus D
cccagccuccacc

SEQ ID NO: 1560192 - RNA, 19 nt, Human adenovirus D
aaguugaaaaacugggcgu

SEQ ID NO: 1560193 - RNA, 22 nt, Human adenovirus D
acucccgucucgacccgagccc

SEQ ID NO: 1560194 - RNA, 18 nt, Human adenovirus D
accccaggcggaccagaa

SEQ ID NO: 1560195 - RNA, 19 nt, Human adenovirus D
accaccgcgaccgcggccg

SEQ ID NO: 1560196 - RNA, 18 nt, Human adenovirus D
gaugauguccuugaggag

SEQ ID NO: 1560197 - RNA, 18 nt, Human adenovirus D
cuggugcgucgagcacag

SEQ ID NO: 1560198 - RNA, 16 nt, Human adenovirus D
ggcgcaaccaggagga

SEQ ID NO: 1560199 - RNA, 15 nt, Human adenovirus D
ugcccucgcuacugc

SEQ ID NO: 1560200 - RNA, 20 nt, Human adenovirus D
aggacacuaaagggagagcu

SEQ ID NO: 1560201 - RNA, 16 nt, Human adenovirus D
ccucugccguccgccc

SEQ ID NO: 1560202 - RNA, 13 nt, Human adenovirus D
gguccgggggcag

SEQ ID NO: 1560203 - RNA, 15 nt, Human adenovirus D
ggugaaggggugggc

SEQ ID NO: 1560204 - RNA, 14 nt, Human adenovirus D
cgugcccgagggcu

SEQ ID NO: 1560205 - RNA, 16 nt, Human adenovirus D
cuacuggucgcugccg

SEQ ID NO: 1560206 - RNA, 17 nt, Human adenovirus D
gaucugcaucucccagg

SEQ ID NO: 1560207 - RNA, 21 nt, Human adenovirus D
caugcagacacuugagcuggc

SEQ ID NO: 1560208 - RNA, 18 nt, Human adenovirus D
gagcccgaggagaugcgc

SEQ ID NO: 1560209 - RNA, 17 nt, Human adenovirus D
ugcccuuuucccaggac

SEQ ID NO: 1560210 - RNA, 19 nt, Human adenovirus D
cagcaggagcgugccgcca

SEQ ID NO: 1560211 - RNA, 14 nt, Human adenovirus D
ucccaccccuuaca

SEQ ID NO: 1560212 - RNA, 23 nt, Human adenovirus D
ggcaccaucacaggaggcacaga

SEQ ID NO: 1560213 - RNA, 12 nt, Human adenovirus D
cagggagccagg

SEQ ID NO: 1560214 - RNA, 13 nt, Human adenovirus D
auaaacuuaguuu

SEQ ID NO: 1560215 - RNA, 18 nt, Human adenovirus D
cugcagcguguucaaaac

SEQ ID NO: 1560216 - RNA, 17 nt, Human adenovirus D
ccgggucuggugcaguu

SEQ ID NO: 1560217 - RNA, 15 nt, Human adenovirus D
ugaccugcagcaggu

SEQ ID NO: 1560218 - RNA, 22 nt, Human adenovirus D
gggcguguaccgcaacgaccgc

SEQ ID NO: 1560219 - RNA, 23 nt, Human adenovirus D
aaccugcgcgggcuguggggcgu

SEQ ID NO: 1560220 - RNA, 14 nt, Human adenovirus D
cuaccuugcaccca

SEQ ID NO: 1560221 - RNA, 12 nt, Human adenovirus D
cuugaggaggag

SEQ ID NO: 1560222 - RNA, 22 nt, Human adenovirus D
ggcauagcuuccguugcgcugc

SEQ ID NO: 1560223 - RNA, 21 nt, Human adenovirus D
ccagcgucauguccuuccagg

SEQ ID NO: 1560224 - RNA, 19 nt, Human adenovirus D
gagguuccguuugugccuc

SEQ ID NO: 1560225 - RNA, 20 nt, Human adenovirus D
ggacccuuuuaccuuaacca

SEQ ID NO: 1560226 - RNA, 15 nt, Human adenovirus D
uccuuucccuggugg

SEQ ID NO: 1560227 - RNA, 22 nt, Human adenovirus D
gugaaggccggcaugcccacca

SEQ ID NO: 1560228 - RNA, 19 nt, Human adenovirus D
ucuacucccagcucauccg

SEQ ID NO: 1560229 - RNA, 16 nt, Human adenovirus D
uacaaagcugaaagcu

SEQ ID NO: 1560230 - RNA, 20 nt, Human adenovirus D
auguaaguuuuauggcugcu

SEQ ID NO: 1560231 - RNA, 13 nt, Human adenovirus D
ggcccggcacggc

SEQ ID NO: 1560232 - RNA, 18 nt, Human adenovirus D
agcauggcuaccugggag

SEQ ID NO: 1560233 - RNA, 11 nt, Human adenovirus D
cgcagccugag

SEQ ID NO: 1560234 - RNA, 23 nt, Human adenovirus D
cggacuggguuaguaugucccug

SEQ ID NO: 1560235 - RNA, 19 nt, Human adenovirus D
uccaugcgaauuccccuca

SEQ ID NO: 1560236 - RNA, 20 nt, Human adenovirus D
gcacaacaccgccuccaccc

SEQ ID NO: 1560237 - RNA, 18 nt, Human adenovirus D
ccacgcuucuuccccagc

SEQ ID NO: 1560238 - RNA, 19 nt, Human adenovirus D
gcugugcugguggaaacag

SEQ ID NO: 1560239 - RNA, 23 nt, Human adenovirus D
gaggagcugugucgggccuacga

SEQ ID NO: 1560240 - RNA, 20 nt, Human adenovirus D
cucgcacucgacgagccagg

SEQ ID NO: 1560241 - RNA, 18 nt, Human adenovirus D
agcccgggucuggugcag

SEQ ID NO: 1560242 - RNA, 16 nt, Human adenovirus D
ggaggaugcacccgcu

SEQ ID NO: 1560243 - RNA, 17 nt, Human adenovirus D
aggagggauugcagggc

SEQ ID NO: 1560244 - RNA, 20 nt, Human adenovirus D
cugcaccccccgcaggcagg

SEQ ID NO: 1560245 - RNA, 22 nt, Human adenovirus D
ggcggguccccguugggcagcg

SEQ ID NO: 1560246 - RNA, 16 nt, Human adenovirus D
gaugaguugggccuga

SEQ ID NO: 1560247 - RNA, 15 nt, Human adenovirus D
gcgcgagcugagcga

SEQ ID NO: 1560248 - RNA, 23 nt, Human adenovirus D
cgugcuccggcggauagcgcgcc

SEQ ID NO: 1560249 - RNA, 23 nt, Human adenovirus D
gguggaaacagacagccagguca

SEQ ID NO: 1560250 - RNA, 17 nt, Human adenovirus D
ucugaaaagucauccaa

SEQ ID NO: 1560251 - RNA, 22 nt, Human adenovirus D
cggccugcgucaucacccaggg

SEQ ID NO: 1560252 - RNA, 16 nt, Human adenovirus D
uucugggucaccuugg

SEQ ID NO: 1560253 - RNA, 15 nt, Human adenovirus D
ucccucucgagagcg

SEQ ID NO: 1560254 - RNA, 17 nt, Human adenovirus D
cauguucucacaguaag

SEQ ID NO: 1560255 - RNA, 23 nt, Human adenovirus D
ggaagcaaaguuuuucaggggcu

SEQ ID NO: 1560256 - RNA, 12 nt, Human adenovirus D
aucacacugcau

SEQ ID NO: 1560257 - RNA, 17 nt, Human adenovirus D
gccgugcugcucgagcg

SEQ ID NO: 1560258 - RNA, 17 nt, Human adenovirus D
ugaauaucagacaugcu

SEQ ID NO: 1560259 - RNA, 21 nt, Human adenovirus D
uuccccucaucacaucagcca

SEQ ID NO: 1560260 - RNA, 11 nt, Human adenovirus D
uggggcgccgc

SEQ ID NO: 1560261 - RNA, 20 nt, Human adenovirus D
caaaacccacucuauuuuca

SEQ ID NO: 1560262 - RNA, 18 nt, Human adenovirus D
aggcggugcugcugccga

SEQ ID NO: 1560263 - RNA, 21 nt, Human adenovirus D
gcggaucaccguagagggcac

SEQ ID NO: 1560264 - RNA, 15 nt, Human adenovirus D
gccauggggcgccgc

SEQ ID NO: 1560265 - RNA, 12 nt, Human adenovirus D
uuuuuccagccu

SEQ ID NO: 1560266 - RNA, 20 nt, Human adenovirus D
cagcugccaugggaggaagc

SEQ ID NO: 1560267 - RNA, 14 nt, Human adenovirus D
gaauauccccuucc

SEQ ID NO: 1560268 - RNA, 16 nt, Human adenovirus D
ccugguacgagcuaca

SEQ ID NO: 1560269 - RNA, 22 nt, Human adenovirus D
gugcgcgacuccgucacgggcg

SEQ ID NO: 1560270 - RNA, 16 nt, Human adenovirus D
cugcaccauccccagg

SEQ ID NO: 1560271 - RNA, 20 nt, Human adenovirus D
accugcagcaggugcugccc

SEQ ID NO: 1560272 - RNA, 22 nt, Human adenovirus D
uucuggagaaguuccucugcau

SEQ ID NO: 1560273 - RNA, 22 nt, Human adenovirus D
aggauacgcgggaagagcccuu

SEQ ID NO: 1560274 - RNA, 22 nt, Human adenovirus D
ggcccggcaacgaccggcugcu

SEQ ID NO: 1560275 - RNA, 21 nt, Human adenovirus D
ggcgagcgggacuuggucacc

SEQ ID NO: 1560276 - RNA, 18 nt, Human adenovirus D
uccaguaggaaccagcac

SEQ ID NO: 1560277 - RNA, 16 nt, Human adenovirus D
ggccauugcucgcucg

SEQ ID NO: 1560278 - RNA, 21 nt, Human adenovirus D
gagcagcggcgcaagcucaug

SEQ ID NO: 1560279 - RNA, 13 nt, Human adenovirus D
cguggacgcugcu

SEQ ID NO: 1560280 - RNA, 15 nt, Human adenovirus D
ggugacagaaccaga

SEQ ID NO: 1560281 - RNA, 14 nt, Human adenovirus D
cguccgucagcagc

SEQ ID NO: 1560282 - RNA, 14 nt, Human adenovirus D
augaccugggcggc

SEQ ID NO: 1560283 - RNA, 23 nt, Human adenovirus D
gaccuucauaauagaaacagauc

SEQ ID NO: 1560284 - RNA, 16 nt, Human adenovirus D
gagccugcgccgggcg

SEQ ID NO: 1560285 - RNA, 21 nt, Human adenovirus D
cucuacgcguacauccagcau

SEQ ID NO: 1560286 - RNA, 22 nt, Human adenovirus D
aacaggcugucgguguccccgu

SEQ ID NO: 1560287 - RNA, 22 nt, Human adenovirus D
guucagggaccgcagcggggag

SEQ ID NO: 1560288 - RNA, 14 nt, Human adenovirus D
cuccacccuggugu

SEQ ID NO: 1560289 - RNA, 22 nt, Human adenovirus D
cggggcgggggugaugagcugc

SEQ ID NO: 1560290 - RNA, 23 nt, Human adenovirus D
cgucuacacagacaaacauccau

SEQ ID NO: 1560291 - RNA, 17 nt, Human adenovirus D
gacgagaaccugaagga

SEQ ID NO: 1560292 - RNA, 19 nt, Human adenovirus D
cggcuaccagggcuuccac

SEQ ID NO: 1560293 - RNA, 22 nt, Human adenovirus D
ggacggccaggccuccgagcag

SEQ ID NO: 1560294 - RNA, 17 nt, Human adenovirus D
gcaagccucugacggcg

SEQ ID NO: 1560295 - RNA, 17 nt, Human adenovirus D
agccaggugagcucggg

SEQ ID NO: 1560296 - RNA, 19 nt, Human adenovirus D
cagaggacuuggaugagga

SEQ ID NO: 1560297 - RNA, 12 nt, Human adenovirus D
agggccugggcu

SEQ ID NO: 1560298 - RNA, 20 nt, Human adenovirus D
agcguagcuaugacgaggug

SEQ ID NO: 1560299 - RNA, 17 nt, Human adenovirus D
ccaggaggagcucuauc

SEQ ID NO: 1560300 - RNA, 15 nt, Human adenovirus D
acuucugccagcaga

SEQ ID NO: 1560301 - RNA, 16 nt, Human adenovirus D
ggcagagguggucauu

SEQ ID NO: 1560302 - RNA, 17 nt, Human adenovirus D
cacagcaccgcauccug

SEQ ID NO: 1560303 - RNA, 22 nt, Human adenovirus D
aacccgcgcucgcgcaccugcu

SEQ ID NO: 1560304 - RNA, 13 nt, Human adenovirus D
gagcuuggccgag

SEQ ID NO: 1560305 - RNA, 22 nt, Human adenovirus D
agcagcaggguacccacugggu

SEQ ID NO: 1560306 - RNA, 15 nt, Human adenovirus D
gaggggggccaccuc

SEQ ID NO: 1560307 - RNA, 19 nt, Human adenovirus D
gcaaaaaaaauuauaucua

SEQ ID NO: 1560308 - RNA, 22 nt, Human adenovirus D
aggaacuucaggaguggcggcc

SEQ ID NO: 1560309 - RNA, 19 nt, Human adenovirus D
gcuaaugguccugcaagag

SEQ ID NO: 1560310 - RNA, 15 nt, Human adenovirus D
aucccacgccgagcc

SEQ ID NO: 1560311 - RNA, 21 nt, Human adenovirus D
cagcagcccuucuccacgggg

SEQ ID NO: 1560312 - RNA, 14 nt, Human adenovirus D
cgggaucaagcgcg

SEQ ID NO: 1560313 - RNA, 22 nt, Human adenovirus D
uaccauugcaaggcagaaucaa

SEQ ID NO: 1560314 - RNA, 14 nt, Human adenovirus D
uaaagccagcagca

SEQ ID NO: 1560315 - RNA, 20 nt, Human adenovirus D
ugaccuacgcgaccgugggg

SEQ ID NO: 1560316 - RNA, 23 nt, Human adenovirus D
gccgcggcagccgcagccgccau

SEQ ID NO: 1560317 - RNA, 19 nt, Human adenovirus D
caaccuccaggccaaccug

SEQ ID NO: 1560318 - RNA, 16 nt, Human adenovirus D
ugauauccaguaggaa

SEQ ID NO: 1560319 - RNA, 14 nt, Human adenovirus D
caggagcaggagga

SEQ ID NO: 1560320 - RNA, 22 nt, Human adenovirus D
gcccagcaauaacaccggcugg

SEQ ID NO: 1560321 - RNA, 14 nt, Human adenovirus D
agaaauuucaagcu

SEQ ID NO: 1560322 - RNA, 16 nt, Human adenovirus D
ugcaguuuggccugga

SEQ ID NO: 1560323 - RNA, 22 nt, Human adenovirus D
agaacuuguuauugagcccauc

SEQ ID NO: 1560324 - RNA, 12 nt, Human adenovirus D
aagccagcagca

SEQ ID NO: 1560325 - RNA, 15 nt, Human adenovirus D
cagcccuaccccgcc

SEQ ID NO: 1560326 - RNA, 20 nt, Human adenovirus D
ccgauggucgcuggacccca

SEQ ID NO: 1560327 - RNA, 15 nt, Human adenovirus D
gaaacgccccugcaa

SEQ ID NO: 1560328 - RNA, 19 nt, Human adenovirus D
guacugguacuugggcugc

SEQ ID NO: 1560329 - RNA, 13 nt, Human adenovirus D
guacuugggcugc

SEQ ID NO: 1560330 - RNA, 21 nt, Human adenovirus D
cucuccgcaccgcuccugguc

SEQ ID NO: 1560331 - RNA, 19 nt, Human adenovirus D
auccagucauagcaggggc

SEQ ID NO: 1560332 - RNA, 21 nt, Human adenovirus D
ugcggcagcuuuuugagcucc

SEQ ID NO: 1560333 - RNA, 17 nt, Human adenovirus D
agcucgaaaucggugcg

SEQ ID NO: 1560334 - RNA, 22 nt, Human adenovirus D
gcuggucacauccaucuccacc

SEQ ID NO: 1560335 - RNA, 11 nt, Human adenovirus D
aaaagucacuu

SEQ ID NO: 1560336 - RNA, 21 nt, Human adenovirus D
ggcgcgcuccuuggccgcgau

SEQ ID NO: 1560337 - RNA, 20 nt, Human adenovirus D
ggcguggcccuuggcgcgga

SEQ ID NO: 1560338 - RNA, 21 nt, Human adenovirus D
cuaaugacaaacaaaagccau

SEQ ID NO: 1560339 - RNA, 22 nt, Human adenovirus D
augcagccaguggcccuggaug

SEQ ID NO: 1560340 - RNA, 15 nt, Human adenovirus D
cuggccuuccaccuc

SEQ ID NO: 1560341 - RNA, 11 nt, Human adenovirus D
ggcuggccgug

SEQ ID NO: 1560342 - RNA, 23 nt, Human adenovirus D
cugccgguuucgggcgggcaggg

SEQ ID NO: 1560343 - RNA, 20 nt, Human adenovirus D
ugggguauuacuaggcccag

SEQ ID NO: 1560344 - RNA, 13 nt, Human adenovirus D
caugcuggaauaa

SEQ ID NO: 1560345 - RNA, 16 nt, Human adenovirus D
gaacagcagcagcaaa

SEQ ID NO: 1560346 - RNA, 18 nt, Human adenovirus D
ggcgguccccgcccagcg

SEQ ID NO: 1560347 - RNA, 22 nt, Human adenovirus D
caccgcaaugcgggccugcgcu

SEQ ID NO: 1560348 - RNA, 13 nt, Human adenovirus D
ggagcggucugga

SEQ ID NO: 1560349 - RNA, 16 nt, Human adenovirus D
caccugggcgccagaa

SEQ ID NO: 1560350 - RNA, 11 nt, Human adenovirus D
ccucugcaucu

SEQ ID NO: 1560351 - RNA, 17 nt, Human adenovirus D
gacggccuacgagcaga

SEQ ID NO: 1560352 - RNA, 19 nt, Human adenovirus D
cccaggcggugcugcugcc

SEQ ID NO: 1560353 - RNA, 19 nt, Human adenovirus D
caacccgauaucgcgcauc

SEQ ID NO: 1560354 - RNA, 16 nt, Human adenovirus D
cagcgucgaggagcug

SEQ ID NO: 1560355 - RNA, 12 nt, Human adenovirus D
gcccuuccagca

SEQ ID NO: 1560356 - RNA, 14 nt, Human adenovirus D
gcgcccucagcagu

SEQ ID NO: 1560357 - RNA, 14 nt, Human adenovirus D
cucugaaaagucau

SEQ ID NO: 1560358 - RNA, 22 nt, Human adenovirus D
cgcacccggcauccugcacgca

SEQ ID NO: 1560359 - RNA, 13 nt, Human adenovirus D
cgcauugcaugag

SEQ ID NO: 1560360 - RNA, 11 nt, Human adenovirus D
caagcugguga

SEQ ID NO: 1560361 - RNA, 16 nt, Human adenovirus D
gcucaggaccauaggg

SEQ ID NO: 1560362 - RNA, 17 nt, Human adenovirus D
cagaauauccccuuccu

SEQ ID NO: 1560363 - RNA, 18 nt, Human adenovirus D
cggacugccaccgccgcc

SEQ ID NO: 1560364 - RNA, 20 nt, Human adenovirus D
cauaugcuacaucugcugcc

SEQ ID NO: 1560365 - RNA, 21 nt, Human adenovirus D
cuauucucaucucgcccagca

SEQ ID NO: 1560366 - RNA, 13 nt, Human adenovirus D
aucgugcugcucu

SEQ ID NO: 1560367 - RNA, 15 nt, Human adenovirus D
aagauaucauaaaga

SEQ ID NO: 1560368 - RNA, 15 nt, Human adenovirus D
gagugucccccgccg

SEQ ID NO: 1560369 - RNA, 19 nt, Human adenovirus D
uaaugcuccaaagcuagca

SEQ ID NO: 1560370 - RNA, 15 nt, Human adenovirus D
gggaugaacaguggc

SEQ ID NO: 1560371 - RNA, 21 nt, Human adenovirus D
ugaagcccgugaccugcagca

SEQ ID NO: 1560372 - RNA, 18 nt, Human adenovirus D
cggcguaguugcgcaggc

SEQ ID NO: 1560373 - RNA, 14 nt, Human adenovirus D
caccuguggagggc

SEQ ID NO: 1560374 - RNA, 20 nt, Human adenovirus D
cgggcucuuccuccguagcc

SEQ ID NO: 1560375 - RNA, 14 nt, Human adenovirus D
cucuccgcaccgcu

SEQ ID NO: 1560376 - RNA, 12 nt, Human adenovirus D
cuugcagagcau

SEQ ID NO: 1560377 - RNA, 21 nt, Human adenovirus D
gagcaacccaaaaucgagcag

SEQ ID NO: 1560378 - RNA, 12 nt, Human adenovirus D
cggcgcggagca

SEQ ID NO: 1560379 - RNA, 15 nt, Human adenovirus D
aggagcgugccgcca

SEQ ID NO: 1560380 - RNA, 19 nt, Human adenovirus D
cagccuucagcaucagucu

SEQ ID NO: 1560381 - RNA, 20 nt, Human adenovirus D
ccucaucacaucagccagga

SEQ ID NO: 1560382 - RNA, 18 nt, Human adenovirus D
uaguugggccuccaggaa

SEQ ID NO: 1560383 - RNA, 22 nt, Human adenovirus D
caugccgaagaagaacaggagc

SEQ ID NO: 1560384 - RNA, 13 nt, Human adenovirus D
cguccgcaggcgg

SEQ ID NO: 1560385 - RNA, 22 nt, Human adenovirus D
gagcccgagggucgcuggcugc

SEQ ID NO: 1560386 - RNA, 23 nt, Human adenovirus D
uggaagagauggaagaagaaugg

SEQ ID NO: 1560387 - RNA, 13 nt, Human adenovirus D
cggccgcggccag

SEQ ID NO: 1560388 - RNA, 17 nt, Human adenovirus D
aaugcaggauccagcgc

SEQ ID NO: 1560389 - RNA, 19 nt, Human adenovirus D
agcuuguugggccuuggcc

SEQ ID NO: 1560390 - RNA, 17 nt, Human adenovirus D
agcgguugagcugggag

SEQ ID NO: 1560391 - RNA, 21 nt, Human adenovirus D
agcagcauguacggaggagcc

SEQ ID NO: 1560392 - RNA, 18 nt, Human adenovirus D
ggccgcgagaccggaggc

SEQ ID NO: 1560393 - RNA, 16 nt, Human adenovirus D
ucaucacccagcaguc

SEQ ID NO: 1560394 - RNA, 18 nt, Human adenovirus D
ccccuggcucccagccuc

SEQ ID NO: 1560395 - RNA, 17 nt, Human adenovirus D
gagucgaggucagcagc

SEQ ID NO: 1560396 - RNA, 21 nt, Human adenovirus D
guaugccaagauagcccugcg

SEQ ID NO: 1560397 - RNA, 17 nt, Human adenovirus D
ugcccugcucaccugca

SEQ ID NO: 1560398 - RNA, 17 nt, Human adenovirus D
aggaugaacaggagcac

SEQ ID NO: 1560399 - RNA, 21 nt, Human adenovirus D
ccgaggugccccagagcgagg

SEQ ID NO: 1560400 - RNA, 22 nt, Human adenovirus D
agucaaucucccaccaccagcc

SEQ ID NO: 1560401 - RNA, 13 nt, Human adenovirus D
ccggccgcgcuug

SEQ ID NO: 1560402 - RNA, 20 nt, Human adenovirus D
ggcuaccgcggcacccggua

SEQ ID NO: 1560403 - RNA, 16 nt, Human adenovirus D
ccgcgccagacgcacg

SEQ ID NO: 1560404 - RNA, 20 nt, Human adenovirus D
uaagcagaguacucauaaag

SEQ ID NO: 1560405 - RNA, 18 nt, Human adenovirus D
ugcaggcgucgcagcgcc

SEQ ID NO: 1560406 - RNA, 19 nt, Human adenovirus D
gcuagaaaacacccacagg

SEQ ID NO: 1560407 - RNA, 15 nt, Human adenovirus D
agcgaccccgagacc

SEQ ID NO: 1560408 - RNA, 14 nt, Human adenovirus D
ugcaaaaagucacu

SEQ ID NO: 1560409 - RNA, 13 nt, Human adenovirus D
gccgcaggccaac

SEQ ID NO: 1560410 - RNA, 18 nt, Human adenovirus D
cgaacuuucuccacaccu

SEQ ID NO: 1560411 - RNA, 21 nt, Human adenovirus D
uaccugggaggagaggaggau

SEQ ID NO: 1560412 - RNA, 19 nt, Human adenovirus D
cggccagcagggugccucc

SEQ ID NO: 1560413 - RNA, 20 nt, Human adenovirus D
aggaauguggaaagauucag

SEQ ID NO: 1560414 - RNA, 16 nt, Human adenovirus D
gccgaagaagaacagg

SEQ ID NO: 1560415 - RNA, 14 nt, Human adenovirus D
gccuuguagggaca

SEQ ID NO: 1560416 - RNA, 18 nt, Human adenovirus D
gccaggucaaaacccacu

SEQ ID NO: 1560417 - RNA, 22 nt, Human adenovirus D
guacuuuacgcuggccagcacg

SEQ ID NO: 1560418 - RNA, 22 nt, Human adenovirus D
cgagcuccgcgaacagcagcag

SEQ ID NO: 1560419 - RNA, 21 nt, Human adenovirus D
gauuucaucaaucaucagguu

SEQ ID NO: 1560420 - RNA, 15 nt, Human adenovirus D
gucugcucgggcaug

SEQ ID NO: 1560421 - RNA, 21 nt, Human adenovirus D
acagucugagggccacccuga

SEQ ID NO: 1560422 - RNA, 16 nt, Human adenovirus D
gcgccagacgcacggg

SEQ ID NO: 1560423 - RNA, 18 nt, Human adenovirus D
uucaacgacuaccucucg

SEQ ID NO: 1560424 - RNA, 18 nt, Human adenovirus D
gguucaagaacgagggcc

SEQ ID NO: 1560425 - RNA, 21 nt, Human adenovirus D
gagcaggggcuacauucugga

SEQ ID NO: 1560426 - RNA, 18 nt, Human adenovirus D
gcaccugcgucugcagca

SEQ ID NO: 1560427 - RNA, 21 nt, Human adenovirus D
cacacuagaaagcaguucacu

SEQ ID NO: 1560428 - RNA, 23 nt, Human adenovirus D
cgagccgccuucguacgaggagg

SEQ ID NO: 1560429 - RNA, 23 nt, Human adenovirus D
ugcagccgccgcgggucaagaac

SEQ ID NO: 1560430 - RNA, 20 nt, Human adenovirus D
agcaagggcgaccagcucug

SEQ ID NO: 1560431 - RNA, 13 nt, Human adenovirus D
gccgugcucaagc

SEQ ID NO: 1560432 - RNA, 22 nt, Human adenovirus D
ggcaacauccccgcccugcugg

SEQ ID NO: 1560433 - RNA, 16 nt, Human adenovirus D
gcaccgccacccgccg

SEQ ID NO: 1560434 - RNA, 14 nt, Human adenovirus D
uagggacagcagcc

SEQ ID NO: 1560435 - RNA, 15 nt, Human adenovirus D
cacuggagcacagac

SEQ ID NO: 1560436 - RNA, 11 nt, Human adenovirus D
gggagagcugc

SEQ ID NO: 1560437 - RNA, 20 nt, Human adenovirus D
uaagcaugagcggcuccagc

SEQ ID NO: 1560438 - RNA, 17 nt, Human adenovirus D
cggugguaggccccugu

SEQ ID NO: 1560439 - RNA, 14 nt, Human adenovirus D
ccccaaacgccagc

SEQ ID NO: 1560440 - RNA, 15 nt, Human adenovirus D
ucacccgcaguugcu

SEQ ID NO: 1560441 - RNA, 15 nt, Human adenovirus D
acgccguacgugccc

SEQ ID NO: 1560442 - RNA, 19 nt, Human adenovirus D
aaccugaaagacaguucaa

SEQ ID NO: 1560443 - RNA, 20 nt, Human adenovirus D
ggugucagaggauggucauc

SEQ ID NO: 1560444 - RNA, 19 nt, Human adenovirus D
ucagacgggugcuccgggu

SEQ ID NO: 1560445 - RNA, 17 nt, Human adenovirus D
augccuucgugcacugg

SEQ ID NO: 1560446 - RNA, 12 nt, Human adenovirus D
uucacagagagc

SEQ ID NO: 1560447 - RNA, 20 nt, Human adenovirus D
accagaugcggcaguauauc

SEQ ID NO: 1560448 - RNA, 17 nt, Human adenovirus D
gcuggaugauguccuug

SEQ ID NO: 1560449 - RNA, 20 nt, Human adenovirus D
gucaggaaaauaucaauaca

SEQ ID NO: 1560450 - RNA, 14 nt, Human adenovirus D
acauauuggaacuu

SEQ ID NO: 1560451 - RNA, 15 nt, Human adenovirus D
gacggccgcggcgag

SEQ ID NO: 1560452 - RNA, 14 nt, Human adenovirus D
acgcuguaccgcag

SEQ ID NO: 1560453 - RNA, 21 nt, Human adenovirus D
gcauguacaacaugcugacug

SEQ ID NO: 1560454 - RNA, 14 nt, Human adenovirus D
uuacucuaaaugca

SEQ ID NO: 1560455 - RNA, 15 nt, Human adenovirus D
ccgcaggcgcccagc

SEQ ID NO: 1560456 - RNA, 14 nt, Human adenovirus D
cuuucucugccaca

SEQ ID NO: 1560457 - RNA, 14 nt, Human adenovirus D
gccgccgccugcgc

SEQ ID NO: 1560458 - RNA, 14 nt, Human adenovirus D
ugcagaccgcgggc

SEQ ID NO: 1560459 - RNA, 22 nt, Human adenovirus D
uggaacccgcgcucgcgcaccu

SEQ ID NO: 1560460 - RNA, 15 nt, Human adenovirus D
gcgugcgaguuggag

SEQ ID NO: 1560461 - RNA, 18 nt, Human adenovirus D
ccacggaccggucccagc

SEQ ID NO: 1560462 - RNA, 22 nt, Human adenovirus D
uccaucagcgcccucagcaguc

SEQ ID NO: 1560463 - RNA, 16 nt, Human adenovirus D
cgaccgacccauggac

SEQ ID NO: 1560464 - RNA, 24 nt, Human adenovirus D
uacaaucgccacaggugcugccca

SEQ ID NO: 1560465 - RNA, 17 nt, Human adenovirus D
caggccgcagcucuucc

SEQ ID NO: 1560466 - RNA, 14 nt, Human adenovirus D
gcaccgcuccuggu

SEQ ID NO: 1560467 - RNA, 14 nt, Human adenovirus D
gacacugcagggag

SEQ ID NO: 1560468 - RNA, 19 nt, Human adenovirus D
ccgcgcgcgcgcacguggc

SEQ ID NO: 1560469 - RNA, 16 nt, Human adenovirus D
gcccgaccgacccaug

SEQ ID NO: 1560470 - RNA, 13 nt, Human adenovirus D
ggacuaccugcau

SEQ ID NO: 1560471 - RNA, 14 nt, Human adenovirus D
ugggcacuggagca

SEQ ID NO: 1560472 - RNA, 20 nt, Human adenovirus D
uugcacccaccaugcgccaa

SEQ ID NO: 1560473 - RNA, 17 nt, Human adenovirus D
cucggaccuggccgaga

SEQ ID NO: 1560474 - RNA, 22 nt, Human adenovirus D
acguagucguugcaggugcgca

SEQ ID NO: 1560475 - RNA, 22 nt, Human adenovirus D
acugcuaucaggagaaaauuga

SEQ ID NO: 1560476 - RNA, 12 nt, Human adenovirus D
caagcgcccaga

SEQ ID NO: 1560477 - RNA, 14 nt, Human adenovirus D
gcugcuucugccug

SEQ ID NO: 1560478 - RNA, 21 nt, Human adenovirus D
gggcguagagcuugggcgcaa

SEQ ID NO: 1560479 - RNA, 14 nt, Human adenovirus D
augccaagauagcc

SEQ ID NO: 1560480 - RNA, 17 nt, Human adenovirus D
ggcccugggccugaugc

SEQ ID NO: 1560481 - RNA, 14 nt, Human adenovirus D
cagaguaagaggag

SEQ ID NO: 1560482 - RNA, 12 nt, Human adenovirus D
ccgacacugcag

SEQ ID NO: 1560483 - RNA, 19 nt, Human adenovirus D
cacaguagucaucaaaugc

SEQ ID NO: 1560484 - RNA, 20 nt, Human adenovirus D
ugcccaaaaucuucgaaggg

SEQ ID NO: 1560485 - RNA, 22 nt, Human adenovirus D
auccuccgggacgcccuggccg

SEQ ID NO: 1560486 - RNA, 15 nt, Human adenovirus D
ucacucuuuccagca

SEQ ID NO: 1560487 - RNA, 18 nt, Human adenovirus D
cgagauggacggccaggc

SEQ ID NO: 1560488 - RNA, 17 nt, Human adenovirus D
cgcgcaugaccaccugc

SEQ ID NO: 1560489 - RNA, 17 nt, Human adenovirus D
gagcugcgcgagggccu

SEQ ID NO: 1560490 - RNA, 19 nt, Human adenovirus D
ucaggcgcaaccaggagga

SEQ ID NO: 1560491 - RNA, 16 nt, Human adenovirus D
cuaccgggacccugag

SEQ ID NO: 1560492 - RNA, 21 nt, Human adenovirus D
gcuuaaggaaucuucuuuucu

SEQ ID NO: 1560493 - RNA, 12 nt, Human adenovirus D
agaacaggagcc

SEQ ID NO: 1560494 - RNA, 20 nt, Human adenovirus D
cauaaucaccauguuauuca

SEQ ID NO: 1560495 - RNA, 18 nt, Human adenovirus D
cucgccuucggcuggaac

SEQ ID NO: 1560496 - RNA, 18 nt, Human adenovirus D
ugcaacaugaccaaggac

SEQ ID NO: 1560497 - RNA, 18 nt, Human adenovirus D
ucgccgucuacucccagc

SEQ ID NO: 1560498 - RNA, 14 nt, Human adenovirus D
ggccauaggccagg

SEQ ID NO: 1560499 - RNA, 12 nt, Human adenovirus D
gagcacagcagu

SEQ ID NO: 1560500 - RNA, 20 nt, Human adenovirus D
uccuucaacgacuaccucuc

SEQ ID NO: 1560501 - RNA, 15 nt, Human adenovirus D
cgccaagggcagccc

SEQ ID NO: 1560502 - RNA, 15 nt, Human adenovirus D
accuugaaaccccag

SEQ ID NO: 1560503 - RNA, 12 nt, Human adenovirus D
cgcuggggcaga

SEQ ID NO: 1560504 - RNA, 17 nt, Human adenovirus D
gagggcaugggucaggc

SEQ ID NO: 1560505 - RNA, 18 nt, Human adenovirus D
gugugcuggcuggucagg

SEQ ID NO: 1560506 - RNA, 21 nt, Human adenovirus D
accaguacucguacaaggcgc

SEQ ID NO: 1560507 - RNA, 18 nt, Human adenovirus D
cgcgucgcuguccacgag

SEQ ID NO: 1560508 - RNA, 16 nt, Human adenovirus D
cgagcaggaccugggc

SEQ ID NO: 1560509 - RNA, 22 nt, Human adenovirus D
ugcuauggcucauuugcaagac

SEQ ID NO: 1560510 - RNA, 17 nt, Human adenovirus D
caucuguccaaccccga

SEQ ID NO: 1560511 - RNA, 22 nt, Human adenovirus D
cgcgagggccuggaccgccagc

SEQ ID NO: 1560512 - RNA, 20 nt, Human adenovirus D
gccagguccucgagcaugag

SEQ ID NO: 1560513 - RNA, 18 nt, Human adenovirus D
gcagaccgcgggccuccu

SEQ ID NO: 1560514 - RNA, 18 nt, Human adenovirus D
ggcguuuuugaggcggcg

SEQ ID NO: 1560515 - RNA, 18 nt, Human adenovirus D
gccugggaauccugcacg

SEQ ID NO: 1560516 - RNA, 17 nt, Human adenovirus D
aaccuuuggaccugagc

SEQ ID NO: 1560517 - RNA, 23 nt, Human adenovirus D
cucaggcgcaaccaggaggagcu

SEQ ID NO: 1560518 - RNA, 17 nt, Human adenovirus D
caggagcaggaggagga

SEQ ID NO: 1560519 - RNA, 16 nt, Human adenovirus D
cccaacucgcggcugc

SEQ ID NO: 1560520 - RNA, 13 nt, Human adenovirus D
gccgccugcgcug

SEQ ID NO: 1560521 - RNA, 13 nt, Human adenovirus D
gccugaugcagga

SEQ ID NO: 1560522 - RNA, 12 nt, Human adenovirus D
uucagcagcacc

SEQ ID NO: 1560523 - RNA, 15 nt, Human adenovirus D
ggacagcagcccuuc

SEQ ID NO: 1560524 - RNA, 18 nt, Human adenovirus D
augcccuuuucccaggac

SEQ ID NO: 1560525 - RNA, 23 nt, Human adenovirus D
accugaacgacucgcugcugcag

SEQ ID NO: 1560526 - RNA, 19 nt, Human adenovirus D
uugucgcugaucugauccu

SEQ ID NO: 1560527 - RNA, 17 nt, Human adenovirus D
ccgggacgcccuggccg

SEQ ID NO: 1560528 - RNA, 17 nt, Human adenovirus D
gccccaggcggugcugc

SEQ ID NO: 1560529 - RNA, 15 nt, Human adenovirus D
accacaccuucaaga

SEQ ID NO: 1560530 - RNA, 23 nt, Human adenovirus D
aguccccucgaaucaggcuggag

SEQ ID NO: 1560531 - RNA, 13 nt, Human adenovirus D
caugacccugcau

SEQ ID NO: 1560532 - RNA, 20 nt, Human adenovirus D
cagguuacauuccugcacca

SEQ ID NO: 1560533 - RNA, 16 nt, Human adenovirus D
aagaaguaugccaaga

SEQ ID NO: 1560534 - RNA, 22 nt, Human adenovirus D
uccugcacuuucuuugccauca

SEQ ID NO: 1560535 - RNA, 22 nt, Human adenovirus D
ccaugagucuguguccgcgcuc

SEQ ID NO: 1560536 - RNA, 22 nt, Human adenovirus D
agacaucauaauuaugcuccug

SEQ ID NO: 1560537 - RNA, 19 nt, Human adenovirus D
aggacgguguagcccgugc

SEQ ID NO: 1560538 - RNA, 17 nt, Human adenovirus D
ggcgccauucggagcac

SEQ ID NO: 1560539 - RNA, 19 nt, Human adenovirus D
cauaugcuacaucugcugc

SEQ ID NO: 1560540 - RNA, 22 nt, Human adenovirus D
ccggcgcuagccagccacagcc

SEQ ID NO: 1560541 - RNA, 17 nt, Human adenovirus D
cagacggugaagcagga

SEQ ID NO: 1560542 - RNA, 16 nt, Human adenovirus D
cgcgggaagagcccuu

SEQ ID NO: 1560543 - RNA, 23 nt, Human adenovirus D
gugcagggaugaguugggccuga

SEQ ID NO: 1560544 - RNA, 19 nt, Human adenovirus D
cucaucacaucagccagga

SEQ ID NO: 1560545 - RNA, 13 nt, Human adenovirus D
ggugcgcuggggc

SEQ ID NO: 1560546 - RNA, 18 nt, Human adenovirus D
ggaccaggcggcagagcg

SEQ ID NO: 1560547 - RNA, 17 nt, Human adenovirus D
gcgcgccgcgccgccac

SEQ ID NO: 1560548 - RNA, 21 nt, Human adenovirus D
cagugaaaacgugccugcucu

SEQ ID NO: 1560549 - RNA, 21 nt, Human adenovirus D
cugcaacgccuuccccuccga

SEQ ID NO: 1560550 - RNA, 15 nt, Human adenovirus D
ccggagcgacacccc

SEQ ID NO: 1560551 - RNA, 11 nt, Human adenovirus D
gcugguugaac

SEQ ID NO: 1560552 - RNA, 13 nt, Human adenovirus D
cgcgugguagccc

SEQ ID NO: 1560553 - RNA, 14 nt, Human adenovirus D
cuggccgagcugga

SEQ ID NO: 1560554 - RNA, 22 nt, Human adenovirus D
gcacgcggccguucaugggcac

SEQ ID NO: 1560555 - RNA, 20 nt, Human adenovirus D
aucgugcgcgaccugggcug

SEQ ID NO: 1560556 - RNA, 20 nt, Human adenovirus D
cgccgcgcuggggagggcca

SEQ ID NO: 1560557 - RNA, 14 nt, Human adenovirus D
agacagccagguca

SEQ ID NO: 1560558 - RNA, 16 nt, Human adenovirus D
ucuacgccaccuucuu

SEQ ID NO: 1560559 - RNA, 17 nt, Human adenovirus D
aucaaaacgaccacagc

SEQ ID NO: 1560560 - RNA, 18 nt, Human adenovirus D
cccaaaaucgagcaggac

SEQ ID NO: 1560561 - RNA, 14 nt, Human adenovirus D
caccuuccugcagc

SEQ ID NO: 1560562 - RNA, 15 nt, Human adenovirus D
ccccgcgugcagcug

SEQ ID NO: 1560563 - RNA, 16 nt, Human adenovirus D
ggccaaccuguggaag

SEQ ID NO: 1560564 - RNA, 15 nt, Human adenovirus D
caugcgccaagggca

SEQ ID NO: 1560565 - RNA, 15 nt, Human adenovirus D
gacauggccagcacg

SEQ ID NO: 1560566 - RNA, 17 nt, Human adenovirus D
auggacgggaaccccac

SEQ ID NO: 1560567 - RNA, 18 nt, Human adenovirus D
gcuccucgaggacggaga

SEQ ID NO: 1560568 - RNA, 11 nt, Human adenovirus D
cagagccaggg

SEQ ID NO: 1560569 - RNA, 21 nt, Human adenovirus D
aggccuacuacuccugaucag

SEQ ID NO: 1560570 - RNA, 20 nt, Human adenovirus D
cugcgucaucacccagggcg

SEQ ID NO: 1560571 - RNA, 18 nt, Human adenovirus D
gacagaggcaacagcaaa

SEQ ID NO: 1560572 - RNA, 18 nt, Human adenovirus D
cacgggguugcagcacug

SEQ ID NO: 1560573 - RNA, 17 nt, Human adenovirus D
gcgccgcccgagcucug

SEQ ID NO: 1560574 - RNA, 17 nt, Human adenovirus D
cgcaccgcuccuggucu

SEQ ID NO: 1560575 - RNA, 14 nt, Human adenovirus D
ugugauaugcacag

SEQ ID NO: 1560576 - RNA, 20 nt, Human adenovirus D
caagucaaaagaaaacuaau

SEQ ID NO: 1560577 - RNA, 23 nt, Human adenovirus D
aggaggauuugauguuggcuugc

SEQ ID NO: 1560578 - RNA, 23 nt, Human adenovirus D
ggcgcagcuguuccuggugguac

SEQ ID NO: 1560579 - RNA, 14 nt, Human adenovirus D
aucgcgcaggaggc

SEQ ID NO: 1560580 - RNA, 15 nt, Human adenovirus D
gugguaguucaagga

SEQ ID NO: 1560581 - RNA, 23 nt, Human adenovirus D
cgccacaggugcugcccacccuc

SEQ ID NO: 1560582 - RNA, 19 nt, Human adenovirus D
acugaaggaaaaaucacuc

SEQ ID NO: 1560583 - RNA, 15 nt, Human adenovirus D
cgcgccacuggccac

SEQ ID NO: 1560584 - RNA, 20 nt, Human adenovirus D
ggccugggcucgcugguggc

SEQ ID NO: 1560585 - RNA, 19 nt, Human adenovirus D
agaugaggcgugcgguggu

SEQ ID NO: 1560586 - RNA, 21 nt, Human adenovirus D
aucgcgggcuuuguaacucua

SEQ ID NO: 1560587 - RNA, 14 nt, Human adenovirus D
gaggcgugcacugg

SEQ ID NO: 1560588 - RNA, 19 nt, Human adenovirus D
cagcagcaaaauaaaugau

SEQ ID NO: 1560589 - RNA, 12 nt, Human adenovirus D
cgcccugcugga

SEQ ID NO: 1560590 - RNA, 19 nt, Human adenovirus D
cugagcaaccuccugggca

SEQ ID NO: 1560591 - RNA, 21 nt, Human adenovirus D
acauucuggacuucgcagcca

SEQ ID NO: 1560592 - RNA, 19 nt, Human adenovirus D
gucagcaacuaccccgugg

SEQ ID NO: 1560593 - RNA, 17 nt, Human adenovirus D
accugcagcgccagucc

SEQ ID NO: 1560594 - RNA, 20 nt, Human adenovirus D
auugcaggccgugcugcucg

SEQ ID NO: 1560595 - RNA, 15 nt, Human adenovirus D
ggccauucuggaggc

SEQ ID NO: 1560596 - RNA, 13 nt, Human adenovirus D
aaagccagcagca

SEQ ID NO: 1560597 - RNA, 15 nt, Human adenovirus D
gucugcaacccccag

SEQ ID NO: 1560598 - RNA, 14 nt, Human adenovirus D
ugaccaccagggag

SEQ ID NO: 1560599 - RNA, 17 nt, Human adenovirus D
aggccauaaaucugccc

SEQ ID NO: 1560600 - RNA, 20 nt, Human adenovirus D
cggccaauguuacgcugccc

SEQ ID NO: 1560601 - RNA, 13 nt, Human adenovirus D
cuggcugcuggag

SEQ ID NO: 1560602 - RNA, 17 nt, Human adenovirus D
gccgcguaagcaggagc

SEQ ID NO: 1560603 - RNA, 18 nt, Human adenovirus D
accugaaggagcuggaca

SEQ ID NO: 1560604 - RNA, 17 nt, Human adenovirus D
gaagggcaucuucugcc

SEQ ID NO: 1560605 - RNA, 16 nt, Human adenovirus D
accggcagcggggccu

SEQ ID NO: 1560606 - RNA, 16 nt, Human adenovirus D
cgagaaccgccugggg

SEQ ID NO: 1560607 - RNA, 19 nt, Human adenovirus D
acgcugaaaggcgggcugc

SEQ ID NO: 1560608 - RNA, 16 nt, Human adenovirus D
cacuugccgccugcgc

SEQ ID NO: 1560609 - RNA, 21 nt, Human adenovirus D
guacccgaggacuaccacgcc

SEQ ID NO: 1560610 - RNA, 18 nt, Human adenovirus D
cggggaaggucucgcucc

SEQ ID NO: 1560611 - RNA, 17 nt, Human adenovirus D
cucgacgagccagguga

SEQ ID NO: 1560612 - RNA, 21 nt, Human adenovirus D
uacgccaacucggcccacgcg

SEQ ID NO: 1560613 - RNA, 16 nt, Human adenovirus D
gccagcacgcucuugu

SEQ ID NO: 1560614 - RNA, 18 nt, Human adenovirus D
cgaggaggauuugauguu

SEQ ID NO: 1560615 - RNA, 17 nt, Human adenovirus D
ggccugaaccgccgccg

SEQ ID NO: 1560616 - RNA, 16 nt, Human adenovirus D
gaucucugccauguuc

SEQ ID NO: 1560617 - RNA, 23 nt, Human adenovirus D
ggagguagcaccacugcauggcc

SEQ ID NO: 1560618 - RNA, 20 nt, Human adenovirus D
gccaacauuacuucuggcac

SEQ ID NO: 1560619 - RNA, 16 nt, Human adenovirus D
accuacgaguacauga

SEQ ID NO: 1560620 - RNA, 12 nt, Human adenovirus D
acagacagccag

SEQ ID NO: 1560621 - RNA, 15 nt, Human adenovirus D
cuaucuaugaaagca

SEQ ID NO: 1560622 - RNA, 13 nt, Human adenovirus D
aacgagggccugg

SEQ ID NO: 1560623 - RNA, 23 nt, Human adenovirus D
ggaucgacgguggacgggcgccc

SEQ ID NO: 1560624 - RNA, 14 nt, Human adenovirus D
ccgccaaggagcuc

SEQ ID NO: 1560625 - RNA, 13 nt, Human adenovirus D
cgcuggggcagaa

SEQ ID NO: 1560626 - RNA, 18 nt, Human adenovirus D
gcccugcucaccugcacc

SEQ ID NO: 1560627 - RNA, 21 nt, Human adenovirus D
augagcucguaguugagggcc

SEQ ID NO: 1560628 - RNA, 19 nt, Human adenovirus D
ccucgucauccuuccagua

SEQ ID NO: 1560629 - RNA, 21 nt, Human adenovirus D
gcuucgcccgggagagcugcg

SEQ ID NO: 1560630 - RNA, 17 nt, Human adenovirus D
gcucgaaaucggugcgc

SEQ ID NO: 1560631 - RNA, 15 nt, Human adenovirus D
ccuucaccgaccugg

SEQ ID NO: 1560632 - RNA, 13 nt, Human adenovirus D
ugauaaagcgugg

SEQ ID NO: 1560633 - RNA, 17 nt, Human adenovirus D
ccgccaaggagcuccuc

SEQ ID NO: 1560634 - RNA, 15 nt, Human adenovirus D
gugggccccuggcug

SEQ ID NO: 1560635 - RNA, 14 nt, Human adenovirus D
gcgucgagcacagc

SEQ ID NO: 1560636 - RNA, 13 nt, Human adenovirus D
cccaggcggugcu

SEQ ID NO: 1560637 - RNA, 17 nt, Human adenovirus D
caggucgucgccccgga

SEQ ID NO: 1560638 - RNA, 15 nt, Human adenovirus D
agacguuucuggggu

SEQ ID NO: 1560639 - RNA, 12 nt, Human adenovirus D
cggcgaccaccg

SEQ ID NO: 1560640 - RNA, 19 nt, Human adenovirus D
uggaacgagaucggcacca

SEQ ID NO: 1560641 - RNA, 18 nt, Human adenovirus D
gaccagaccaccugguga

SEQ ID NO: 1560642 - RNA, 14 nt, Human adenovirus D
accgagccucccag

SEQ ID NO: 1560643 - RNA, 15 nt, Human adenovirus D
ggggaacggggcaga

SEQ ID NO: 1560644 - RNA, 15 nt, Human adenovirus D
gcagcaccucgguac

SEQ ID NO: 1560645 - RNA, 18 nt, Human adenovirus D
cuccggaccuaugggaac

SEQ ID NO: 1560646 - RNA, 23 nt, Human adenovirus D
caguacuuagaagagcccccucc

SEQ ID NO: 1560647 - RNA, 19 nt, Human adenovirus D
gaggagacugauggccacg

SEQ ID NO: 1560648 - RNA, 13 nt, Human adenovirus D
agugaccaagacc

SEQ ID NO: 1560649 - RNA, 17 nt, Human adenovirus D
gaauaacaugcugauca

SEQ ID NO: 1560650 - RNA, 22 nt, Human adenovirus D
ccaggaaacuaggcgcagcugc

SEQ ID NO: 1560651 - RNA, 18 nt, Human adenovirus D
ugcgcguccgucagcagc

SEQ ID NO: 1560652 - RNA, 14 nt, Human adenovirus D
gaaacaagucaaaa

SEQ ID NO: 1560653 - RNA, 22 nt, Human adenovirus D
cugcucucucuucuuguaacuu

SEQ ID NO: 1560654 - RNA, 12 nt, Human adenovirus D
cgcggcugcugc

SEQ ID NO: 1560655 - RNA, 18 nt, Human adenovirus D
gagcgcgagccggcggcg

SEQ ID NO: 1560656 - RNA, 22 nt, Human adenovirus D
ccagcagucgggcgagaccaac

SEQ ID NO: 1560657 - RNA, 13 nt, Human adenovirus D
guuuauguugauc

SEQ ID NO: 1560658 - RNA, 15 nt, Human adenovirus D
cgauguaacaucacc

SEQ ID NO: 1560659 - RNA, 19 nt, Human adenovirus D
ugccccacaucgaggcccu

SEQ ID NO: 1560660 - RNA, 23 nt, Human adenovirus D
cagcucaucgacuggugcugcgc

SEQ ID NO: 1560661 - RNA, 20 nt, Human adenovirus D
gguuagguucuucacccagc

SEQ ID NO: 1560662 - RNA, 18 nt, Human adenovirus D
cgcgcuugcugggcgagg

SEQ ID NO: 1560663 - RNA, 23 nt, Human adenovirus D
cucuagcaugaccagacccaggc

SEQ ID NO: 1560664 - RNA, 15 nt, Human adenovirus D
gcaggcgcuggaaga

SEQ ID NO: 1560665 - RNA, 17 nt, Human adenovirus D
cccucucgagagcgggc

SEQ ID NO: 1560666 - RNA, 13 nt, Human adenovirus D
gcagccgccgcgg

SEQ ID NO: 1560667 - RNA, 22 nt, Human adenovirus D
gccgcggccagaugcggaggag

SEQ ID NO: 1560668 - RNA, 19 nt, Human adenovirus D
ugucgccgauggccuccag

SEQ ID NO: 1560669 - RNA, 18 nt, Human adenovirus D
cagccgugaucccacagg

SEQ ID NO: 1560670 - RNA, 15 nt, Human adenovirus D
ccuggcuccgcggca

SEQ ID NO: 1560671 - RNA, 16 nt, Human adenovirus D
caugggugugcuggcu

SEQ ID NO: 1560672 - RNA, 16 nt, Human adenovirus D
ggcuuccgccgccggg

SEQ ID NO: 1560673 - RNA, 21 nt, Human adenovirus D
acugccgcugcaaccugugcu

SEQ ID NO: 1560674 - RNA, 20 nt, Human adenovirus D
uccacaaacuacauggacaa

SEQ ID NO: 1560675 - RNA, 21 nt, Human adenovirus D
gaaacacagauuugaauugca

SEQ ID NO: 1560676 - RNA, 13 nt, Human adenovirus D
cagcagcaggagc

SEQ ID NO: 1560677 - RNA, 12 nt, Human adenovirus D
caaguggaugga

SEQ ID NO: 1560678 - RNA, 19 nt, Human adenovirus D
gucccuucucggaccaacc

SEQ ID NO: 1560679 - RNA, 22 nt, Human adenovirus D
aguugcaccacgcuucuucccc

SEQ ID NO: 1560680 - RNA, 17 nt, Human adenovirus D
cccaggcggaccagaaa

SEQ ID NO: 1560681 - RNA, 18 nt, Human adenovirus D
cggccaaucagcaguagc

SEQ ID NO: 1560682 - RNA, 18 nt, Human adenovirus D
caguggggaggacacaga

SEQ ID NO: 1560683 - RNA, 14 nt, Human adenovirus D
ggccaaucagcagu

SEQ ID NO: 1560684 - RNA, 17 nt, Human adenovirus D
gcccgagcucugcugcg

SEQ ID NO: 1560685 - RNA, 15 nt, Human adenovirus D
uccucuucugucucu

SEQ ID NO: 1560686 - RNA, 18 nt, Human adenovirus D
agacggugaagcaggagc

SEQ ID NO: 1560687 - RNA, 21 nt, Human adenovirus D
gggagcugcgcgagggccugg

SEQ ID NO: 1560688 - RNA, 15 nt, Human adenovirus D
augcaaaaucuuaca

SEQ ID NO: 1560689 - RNA, 22 nt, Human adenovirus D
acgagagcgugauggcgcaggc

SEQ ID NO: 1560690 - RNA, 12 nt, Human adenovirus D
ggcgacccagga

SEQ ID NO: 1560691 - RNA, 16 nt, Human adenovirus D
uaggggacgugagcgc

SEQ ID NO: 1560692 - RNA, 22 nt, Human adenovirus D
ccgccacccuugaccugccucc

SEQ ID NO: 1560693 - RNA, 15 nt, Human adenovirus D
aucaacauaggcgcc

SEQ ID NO: 1560694 - RNA, 19 nt, Human adenovirus D
ggccgagaccgugagcucg

SEQ ID NO: 1560695 - RNA, 23 nt, Human adenovirus D
aaaaucacucuuuccagcagcag

SEQ ID NO: 1560696 - RNA, 16 nt, Human adenovirus D
ugccacucgcgggcgg

SEQ ID NO: 1560697 - RNA, 17 nt, Human adenovirus D
agaucauggugcccaag

SEQ ID NO: 1560698 - RNA, 18 nt, Human adenovirus D
ggcggacugccaccgccg

SEQ ID NO: 1560699 - RNA, 14 nt, Human adenovirus D
ugaucaaaacuuaa

SEQ ID NO: 1560700 - RNA, 14 nt, Human adenovirus D
cgccgccgccgcac

SEQ ID NO: 1560701 - RNA, 19 nt, Human adenovirus D
cccgcccgcgugcgccgcg

SEQ ID NO: 1560702 - RNA, 15 nt, Human adenovirus D
guuacgcugcccgcc

SEQ ID NO: 1560703 - RNA, 20 nt, Human adenovirus D
cucgaagacgccgaggcucu

SEQ ID NO: 1560704 - RNA, 19 nt, Human adenovirus D
acauuaugauaaucugcau

SEQ ID NO: 1560705 - RNA, 14 nt, Human adenovirus D
gugcgaggggccaa

SEQ ID NO: 1560706 - RNA, 22 nt, Human adenovirus D
aacgagaucggcaccagccagc

SEQ ID NO: 1560707 - RNA, 17 nt, Human adenovirus D
ugaggauugggaggagg

SEQ ID NO: 1560708 - RNA, 21 nt, Human adenovirus D
acucgacccugaagggcgagg

SEQ ID NO: 1560709 - RNA, 19 nt, Human adenovirus D
caacucgcggcugcugcug

SEQ ID NO: 1560710 - RNA, 16 nt, Human adenovirus D
accucccaccccagaa

SEQ ID NO: 1560711 - RNA, 14 nt, Human adenovirus D
ccccagacacccac

SEQ ID NO: 1560712 - RNA, 17 nt, Human adenovirus D
ccaugcagacucugcuc

SEQ ID NO: 1560713 - RNA, 23 nt, Human adenovirus D
uagaaacagauccugcugcucca

SEQ ID NO: 1560714 - RNA, 19 nt, Human adenovirus D
cugggcguugcgggccgag

SEQ ID NO: 1560715 - RNA, 18 nt, Human adenovirus D
gcgagaccggaggcgugc

SEQ ID NO: 1560716 - RNA, 19 nt, Human adenovirus D
aggggugggccccuggcug

SEQ ID NO: 1560717 - RNA, 17 nt, Human adenovirus D
caaggacuacaaggccg

SEQ ID NO: 1560718 - RNA, 20 nt, Human adenovirus D
ccuggaucugccgccucugc

SEQ ID NO: 1560719 - RNA, 19 nt, Human adenovirus D
ggccgugagcgcgagccgg

SEQ ID NO: 1560720 - RNA, 12 nt, Human adenovirus D
cgucggaagagg

SEQ ID NO: 1560721 - RNA, 15 nt, Human adenovirus D
ggcggcagaggcacg

SEQ ID NO: 1560722 - RNA, 23 nt, Human adenovirus D
agcaugcgcuaaacuaagguggc

SEQ ID NO: 1560723 - RNA, 13 nt, Human adenovirus D
aggcacugcucuu

SEQ ID NO: 1560724 - RNA, 14 nt, Human adenovirus D
aggguaaagccagc

SEQ ID NO: 1560725 - RNA, 14 nt, Human adenovirus D
cucgcucuggggcc

SEQ ID NO: 1560726 - RNA, 22 nt, Human adenovirus D
agccggccgcgcuugcugggcg

SEQ ID NO: 1560727 - RNA, 22 nt, Human adenovirus D
cuccugaaccacacggccagca

SEQ ID NO: 1560728 - RNA, 16 nt, Human adenovirus D
gugcgaguuggaggag

SEQ ID NO: 1560729 - RNA, 21 nt, Human adenovirus D
uacggcaucucgauccagcag

SEQ ID NO: 1560730 - RNA, 16 nt, Human adenovirus D
ccccgcgccgcgcugc

SEQ ID NO: 1560731 - RNA, 14 nt, Human adenovirus D
cauccugaucucug

SEQ ID NO: 1560732 - RNA, 16 nt, Human adenovirus D
cgaacacgccaccgcu

SEQ ID NO: 1560733 - RNA, 12 nt, Human adenovirus D
cucgcugcugca

SEQ ID NO: 1560734 - RNA, 13 nt, Human adenovirus D
uggugcuggauga

SEQ ID NO: 1560735 - RNA, 17 nt, Human adenovirus D
uaaagccacaaccagag

SEQ ID NO: 1560736 - RNA, 14 nt, Human adenovirus D
aggguugaaagauu

SEQ ID NO: 1560737 - RNA, 23 nt, Human adenovirus D
aguuugcauagcuugccgggcuc

SEQ ID NO: 1560738 - RNA, 17 nt, Human adenovirus D
cagggugccucccgccc

SEQ ID NO: 1560739 - RNA, 16 nt, Human adenovirus D
uguagggacagcagcc

SEQ ID NO: 1560740 - RNA, 13 nt, Human adenovirus D
aaaaagucacuua

SEQ ID NO: 1560741 - RNA, 15 nt, Human adenovirus D
cagcgcggccagcgu

SEQ ID NO: 1560742 - RNA, 19 nt, Human adenovirus D
gcgcuggggcugcucggcg

SEQ ID NO: 1560743 - RNA, 15 nt, Human adenovirus D
cccgcgcccaccauc

SEQ ID NO: 1560744 - RNA, 15 nt, Human adenovirus D
gccuggggcagacag

SEQ ID NO: 1560745 - RNA, 19 nt, Human adenovirus D
cgcggccagcgucaugucc

SEQ ID NO: 1560746 - RNA, 12 nt, Human adenovirus D
uggaagaagaau

SEQ ID NO: 1560747 - RNA, 19 nt, Human adenovirus D
cacgugaccaggggucccc

SEQ ID NO: 1560748 - RNA, 13 nt, Human adenovirus D
cccacggccaucu

SEQ ID NO: 1560749 - RNA, 18 nt, Human adenovirus D
ucuacgcguacauccagc

SEQ ID NO: 1560750 - RNA, 13 nt, Human adenovirus D
cuggguggcccuu

SEQ ID NO: 1560751 - RNA, 15 nt, Human adenovirus D
cagguccgggggcag

SEQ ID NO: 1560752 - RNA, 19 nt, Human adenovirus D
ccaacaauaaaagaccaau

SEQ ID NO: 1560753 - RNA, 14 nt, Human adenovirus D
gcgcaaccaggagg

SEQ ID NO: 1560754 - RNA, 14 nt, Human adenovirus D
cacaucggacuggg

SEQ ID NO: 1560755 - RNA, 20 nt, Human adenovirus D
aauaugggagagaacaaaac

SEQ ID NO: 1560756 - RNA, 13 nt, Human adenovirus D
acaguacuggcaa

SEQ ID NO: 1560757 - RNA, 15 nt, Human adenovirus D
ggaccgcagcgggga

SEQ ID NO: 1560758 - RNA, 15 nt, Human adenovirus D
gcuaccucuugcagc

SEQ ID NO: 1560759 - RNA, 15 nt, Human adenovirus D
gcuucuacagccagc

SEQ ID NO: 1560760 - RNA, 16 nt, Human adenovirus D
cugacaauucagagcc

SEQ ID NO: 1560761 - RNA, 15 nt, Human adenovirus D
agguguaggccacgu

SEQ ID NO: 1560762 - RNA, 22 nt, Human adenovirus D
gacgggugcuccggguucugga

SEQ ID NO: 1560763 - RNA, 14 nt, Human adenovirus D
gggcugggacccug

SEQ ID NO: 1560764 - RNA, 22 nt, Human adenovirus D
cgcgcuggcuugguacccgcga

SEQ ID NO: 1560765 - RNA, 18 nt, Human adenovirus D
ggcgugcacuggcucgcc

SEQ ID NO: 1560766 - RNA, 13 nt, Human adenovirus D
agaccuucaaccu

SEQ ID NO: 1560767 - RNA, 23 nt, Human adenovirus D
aguggcaaugcaggauccagcgc

SEQ ID NO: 1560768 - RNA, 21 nt, Human adenovirus D
ugaccagguccacgcuggugg

SEQ ID NO: 1560769 - RNA, 22 nt, Human adenovirus D
augagcccguagcugcgcgggg

SEQ ID NO: 1560770 - RNA, 19 nt, Human adenovirus D
gacgagccaggugagcucg

SEQ ID NO: 1560771 - RNA, 17 nt, Human adenovirus D
aucuccuccuccuggag

SEQ ID NO: 1560772 - RNA, 13 nt, Human adenovirus D
agccgcaggcgcc

SEQ ID NO: 1560773 - RNA, 14 nt, Human adenovirus D
gacaccacagugca

SEQ ID NO: 1560774 - RNA, 23 nt, Human adenovirus D
ccaggaugcagccaguggcccug

SEQ ID NO: 1560775 - RNA, 15 nt, Human adenovirus D
cgaccuccuccccau

SEQ ID NO: 1560776 - RNA, 12 nt, Human adenovirus D
ccgccuggggca

SEQ ID NO: 1560777 - RNA, 23 nt, Human adenovirus D
ggcaacaccugggcacuggagca

SEQ ID NO: 1560778 - RNA, 24 nt, Human adenovirus D
agcagcaccucgguacccuccucc

SEQ ID NO: 1560779 - RNA, 19 nt, Human adenovirus D
aguucgcuccgcggcggcg

SEQ ID NO: 1560780 - RNA, 15 nt, Human adenovirus D
gaucgcgaggacacc

SEQ ID NO: 1560781 - RNA, 19 nt, Human adenovirus D
gggcucguuaguccagcag

SEQ ID NO: 1560782 - RNA, 22 nt, Human adenovirus D
cgcaggaguccaccgcuccgcu

SEQ ID NO: 1560783 - RNA, 17 nt, Human adenovirus D
agggcuuuuccugaugc

SEQ ID NO: 1560784 - RNA, 15 nt, Human adenovirus D
ugcagggagccaggg

SEQ ID NO: 1560785 - RNA, 21 nt, Human adenovirus D
accaugaaggcuuucacagcu

SEQ ID NO: 1560786 - RNA, 15 nt, Human adenovirus D
ggaugugcccaagua

SEQ ID NO: 1560787 - RNA, 17 nt, Human adenovirus D
cugaugaacaacgccau

SEQ ID NO: 1560788 - RNA, 15 nt, Human adenovirus D
agacaccacagugca

SEQ ID NO: 1560789 - RNA, 18 nt, Human adenovirus D
gccccacaucgaggcccu

SEQ ID NO: 1560790 - RNA, 20 nt, Human adenovirus D
augaggagaaggaaaaauug

SEQ ID NO: 1560791 - RNA, 20 nt, Human adenovirus D
cuucagcaucagucuccugg

SEQ ID NO: 1560792 - RNA, 17 nt, Human adenovirus D
ugcagggaagcaaaguu

SEQ ID NO: 1560793 - RNA, 17 nt, Human adenovirus D
agcaauccuccaggacu

SEQ ID NO: 1560794 - RNA, 17 nt, Human adenovirus D
ccucaaugucagcugca

SEQ ID NO: 1560795 - RNA, 15 nt, Human adenovirus D
cuccucucgugcucc

SEQ ID NO: 1560796 - RNA, 19 nt, Human adenovirus D
cuacccacugacuuagcuc

SEQ ID NO: 1560797 - RNA, 18 nt, Human adenovirus D
cacgccaccacccacacc

SEQ ID NO: 1560798 - RNA, 14 nt, Human adenovirus D
ugggacgacgugga

SEQ ID NO: 1560799 - RNA, 18 nt, Human adenovirus D
cucucgaagacgccgagg

SEQ ID NO: 1560800 - RNA, 20 nt, Human adenovirus D
caggaaacuaggcgcagcug

SEQ ID NO: 1560801 - RNA, 13 nt, Human adenovirus D
ugacaaucaaaac

SEQ ID NO: 1560802 - RNA, 12 nt, Human adenovirus D
ugaucucugcca

SEQ ID NO: 1560803 - RNA, 15 nt, Human adenovirus D
acagcaagccucuga

SEQ ID NO: 1560804 - RNA, 15 nt, Human adenovirus D
cugagcaaccuccug

SEQ ID NO: 1560805 - RNA, 14 nt, Human adenovirus D
augccccaggccug

SEQ ID NO: 1560806 - RNA, 16 nt, Human adenovirus D
gcuggcccacggccau

SEQ ID NO: 1560807 - RNA, 14 nt, Human adenovirus D
auugauaaggagaa

SEQ ID NO: 1560808 - RNA, 19 nt, Human adenovirus D
gccgcgcuugcugggcgag

SEQ ID NO: 1560809 - RNA, 12 nt, Human adenovirus D
cccuggcuccgc

SEQ ID NO: 1560810 - RNA, 14 nt, Human adenovirus D
ccccgcaggcagga

SEQ ID NO: 1560811 - RNA, 19 nt, Human adenovirus D
cuggagcgcguaggccgcu

SEQ ID NO: 1560812 - RNA, 18 nt, Human adenovirus D
ugcuggcuggucaggccu

SEQ ID NO: 1560813 - RNA, 17 nt, Human adenovirus D
cucccacaaucacggca

SEQ ID NO: 1560814 - RNA, 18 nt, Human adenovirus D
gccuucuauggaggcaga

SEQ ID NO: 1560815 - RNA, 18 nt, Human adenovirus D
gccagcugaacgggggcg

SEQ ID NO: 1560816 - RNA, 20 nt, Human adenovirus D
agcacugcaaauuuaacuuc

SEQ ID NO: 1560817 - RNA, 17 nt, Human adenovirus D
cguccuuucgcugcugc

SEQ ID NO: 1560818 - RNA, 16 nt, Human adenovirus D
gcagagcacgcugcac

SEQ ID NO: 1560819 - RNA, 15 nt, Human adenovirus D
cuuuuccgagaccau

SEQ ID NO: 1560820 - RNA, 20 nt, Human adenovirus D
ugcaacccccagcuccugag

SEQ ID NO: 1560821 - RNA, 15 nt, Human adenovirus D
agggcgaggcgcggc

SEQ ID NO: 1560822 - RNA, 21 nt, Human adenovirus D
agacuaagcuaguacucuaca

SEQ ID NO: 1560823 - RNA, 22 nt, Human adenovirus D
ccugcuggagcgcguaggccgc

SEQ ID NO: 1560824 - RNA, 16 nt, Human adenovirus D
uucgcagaaccaugaa

SEQ ID NO: 1560825 - RNA, 16 nt, Human adenovirus D
gcccgccaccugcaac

SEQ ID NO: 1560826 - RNA, 15 nt, Human adenovirus D
cuuucauccaucugg

SEQ ID NO: 1560827 - RNA, 18 nt, Human adenovirus D
cuccaugcuucugggcaa

SEQ ID NO: 1560828 - RNA, 16 nt, Human adenovirus D
gcuuccguugcgcugc

SEQ ID NO: 1560829 - RNA, 18 nt, Human adenovirus D
ucaucguugugcgccgcg

SEQ ID NO: 1560830 - RNA, 12 nt, Human adenovirus D
gugcgguggugu

SEQ ID NO: 1560831 - RNA, 22 nt, Human adenovirus D
ccagucccuuuuccaggaaagg

SEQ ID NO: 1560832 - RNA, 13 nt, Human adenovirus D
ucaaacaggcaaa

SEQ ID NO: 1560833 - RNA, 17 nt, Human adenovirus D
cgcagaaaucaguuucc

SEQ ID NO: 1560834 - RNA, 13 nt, Human adenovirus D
ugaaccuuuggac

SEQ ID NO: 1560835 - RNA, 15 nt, Human adenovirus D
aggcacacagcucaa

SEQ ID NO: 1560836 - RNA, 13 nt, Human adenovirus D
guagucuggagaa

SEQ ID NO: 1560837 - RNA, 17 nt, Human adenovirus D
cagccuugcccccaagg

SEQ ID NO: 1560838 - RNA, 13 nt, Human adenovirus D
ccugaugcaggag

SEQ ID NO: 1560839 - RNA, 18 nt, Human adenovirus D
ccacaccugugacaugca

SEQ ID NO: 1560840 - RNA, 19 nt, Human adenovirus D
ucuggagaaguuccucugc

SEQ ID NO: 1560841 - RNA, 13 nt, Human adenovirus D
cugauaagacaca

SEQ ID NO: 1560842 - RNA, 22 nt, Human adenovirus D
gccggcgcgcccggggccaggu

SEQ ID NO: 1560843 - RNA, 20 nt, Human adenovirus D
gucucgaggacgagaaccug

SEQ ID NO: 1560844 - RNA, 17 nt, Human adenovirus D
aggagucgccggaggag

SEQ ID NO: 1560845 - RNA, 15 nt, Human adenovirus D
cuaaucaagacaaaa

SEQ ID NO: 1560846 - RNA, 17 nt, Human adenovirus D
ucaaguuugacagcaga

SEQ ID NO: 1560847 - RNA, 13 nt, Human adenovirus D
gagggccuggacc

SEQ ID NO: 1560848 - RNA, 18 nt, Human adenovirus D
cgugcugcgcgacgagga

SEQ ID NO: 1560849 - RNA, 12 nt, Human adenovirus D
cgcccugggugu

SEQ ID NO: 1560850 - RNA, 15 nt, Human adenovirus D
cgcgcgaggaggugg

SEQ ID NO: 1560851 - RNA, 16 nt, Human adenovirus D
guucaggagcgcagcc

SEQ ID NO: 1560852 - RNA, 22 nt, Human adenovirus D
gcgcuggcggagaacaaggcca

SEQ ID NO: 1560853 - RNA, 15 nt, Human adenovirus D
ugaacuucuugcuga

SEQ ID NO: 1560854 - RNA, 22 nt, Human adenovirus D
cgcguaaauuggaaggggcgca

SEQ ID NO: 1560855 - RNA, 14 nt, Human adenovirus D
uguacuucucccaa

SEQ ID NO: 1560856 - RNA, 12 nt, Human adenovirus D
caucagccagga

SEQ ID NO: 1560857 - RNA, 22 nt, Human adenovirus D
gcccaacucgcggcugcugcug

SEQ ID NO: 1560858 - RNA, 20 nt, Human adenovirus D
caccaccagcccauuucaca

SEQ ID NO: 1560859 - RNA, 14 nt, Human adenovirus D
agccaaacacaccu

SEQ ID NO: 1560860 - RNA, 20 nt, Human adenovirus D
gcaucaaaaauuaucuuuuu

SEQ ID NO: 1560861 - RNA, 17 nt, Human adenovirus D
ugggccacuacagcuga

SEQ ID NO: 1560862 - RNA, 19 nt, Human adenovirus D
guuucuggggucagagaca

SEQ ID NO: 1560863 - RNA, 14 nt, Human adenovirus D
gacuugggcgggag

SEQ ID NO: 1560864 - RNA, 21 nt, Human adenovirus D
cuugaccugccuccaccaccc

SEQ ID NO: 1560865 - RNA, 12 nt, Human adenovirus D
cucggagcuggc

SEQ ID NO: 1560866 - RNA, 11 nt, Human adenovirus D
ccagcagcaca

SEQ ID NO: 1560867 - RNA, 22 nt, Human adenovirus D
caaauuggcggacauauggaau

SEQ ID NO: 1560868 - RNA, 12 nt, Human adenovirus D
ccagcccagggc

SEQ ID NO: 1560869 - RNA, 20 nt, Human adenovirus D
gacagaggcuaccucaagug

SEQ ID NO: 1560870 - RNA, 15 nt, Human adenovirus D
cccauuucacagugu

SEQ ID NO: 1560871 - RNA, 18 nt, Human adenovirus D
gcguccgcggccacuucc

SEQ ID NO: 1560872 - RNA, 14 nt, Human adenovirus D
guccgcuccgcagu

SEQ ID NO: 1560873 - RNA, 22 nt, Human adenovirus D
ugaauaugaauuccaugaucuu

SEQ ID NO: 1560874 - RNA, 13 nt, Human adenovirus D
uccuccuggagau

SEQ ID NO: 1560875 - RNA, 18 nt, Human adenovirus D
gggcgcucccaaucccag

SEQ ID NO: 1560876 - RNA, 16 nt, Human adenovirus D
uaaagaaacagaacaa

SEQ ID NO: 1560877 - RNA, 23 nt, Human adenovirus D
cucgcaguccgccaagcuccucg

SEQ ID NO: 1560878 - RNA, 19 nt, Human adenovirus D
guaugccaagauagcccug

SEQ ID NO: 1560879 - RNA, 21 nt, Human adenovirus D
auguguggacuauccuugcag

SEQ ID NO: 1560880 - RNA, 22 nt, Human adenovirus D
gaggccaucuaaacuaaagcca

SEQ ID NO: 1560881 - RNA, 14 nt, Human adenovirus D
ucuuugacacaccu

SEQ ID NO: 1560882 - RNA, 20 nt, Human adenovirus D
acuccgcgaccuccucccca

SEQ ID NO: 1560883 - RNA, 17 nt, Human adenovirus D
aaugugagugauaaagc

SEQ ID NO: 1560884 - RNA, 13 nt, Human adenovirus D
cucgcugguggcg

SEQ ID NO: 1560885 - RNA, 19 nt, Human adenovirus D
agcaccucgguacccuccu

SEQ ID NO: 1560886 - RNA, 15 nt, Human adenovirus D
gccuggccucgggca

SEQ ID NO: 1560887 - RNA, 16 nt, Human adenovirus D
cucagguugucaguuu

SEQ ID NO: 1560888 - RNA, 22 nt, Human adenovirus D
ggacugguuccucguccagaug

SEQ ID NO: 1560889 - RNA, 14 nt, Human adenovirus D
ccgccgcaggagag

SEQ ID NO: 1560890 - RNA, 22 nt, Human adenovirus D
ccacgugguauacaagccagga

SEQ ID NO: 1560891 - RNA, 13 nt, Human adenovirus D
caacaugcugacu

SEQ ID NO: 1560892 - RNA, 15 nt, Human adenovirus D
gucgcgguggggcgg

SEQ ID NO: 1560893 - RNA, 18 nt, Human adenovirus D
gcuggggagggccacguu

SEQ ID NO: 1560894 - RNA, 21 nt, Human adenovirus D
aucgguccgugugauuaaaaa

SEQ ID NO: 1560895 - RNA, 20 nt, Human adenovirus D
uggcuccuacggagggcaga

SEQ ID NO: 1560896 - RNA, 21 nt, Human adenovirus D
gcaaugcuagagugaggcacu

SEQ ID NO: 1560897 - RNA, 21 nt, Human adenovirus D
cacagcgauucccgggcuuuc

SEQ ID NO: 1560898 - RNA, 14 nt, Human adenovirus D
gaagagcagcacag

SEQ ID NO: 1560899 - RNA, 13 nt, Human adenovirus D
ucgcggaugaugu

SEQ ID NO: 1560900 - RNA, 22 nt, Human adenovirus D
ggccaauguuacgcugcccgcc

SEQ ID NO: 1560901 - RNA, 17 nt, Human adenovirus D
caucguaguucaggagc

SEQ ID NO: 1560902 - RNA, 13 nt, Human adenovirus D
uggcggagcgagc

SEQ ID NO: 1560903 - RNA, 17 nt, Human adenovirus D
ggagccugaugagcucg

SEQ ID NO: 1560904 - RNA, 12 nt, Human adenovirus D
aagaagaaguua

SEQ ID NO: 1560905 - RNA, 13 nt, Human adenovirus D
cucccaccccaga

SEQ ID NO: 1560906 - RNA, 22 nt, Human adenovirus D
accgucgccucggaccuggccg

SEQ ID NO: 1560907 - RNA, 22 nt, Human adenovirus D
ucuggacccuccgucggaagag

SEQ ID NO: 1560908 - RNA, 13 nt, Human adenovirus D
aaaguuuuucagg

SEQ ID NO: 1560909 - RNA, 21 nt, Human adenovirus D
cucugauucaugugaacaaaa

SEQ ID NO: 1560910 - RNA, 22 nt, Human adenovirus D
gcccugagccgccagcuggccg

SEQ ID NO: 1560911 - RNA, 16 nt, Human adenovirus D
ucaaguaggugaagaa

SEQ ID NO: 1560912 - RNA, 12 nt, Human adenovirus D
caucaccacagg

SEQ ID NO: 1560913 - RNA, 22 nt, Human adenovirus D
gaccaugcagaucauggugccc

SEQ ID NO: 1560914 - RNA, 17 nt, Human adenovirus D
caggcgcuggaagaggu

SEQ ID NO: 1560915 - RNA, 16 nt, Human adenovirus D
gcgcuggggagggcca

SEQ ID NO: 1560916 - RNA, 22 nt, Human adenovirus D
gucccgguguugcgcccugaga

SEQ ID NO: 1560917 - RNA, 13 nt, Human adenovirus D
aagaaacagaaca

SEQ ID NO: 1560918 - RNA, 21 nt, Human adenovirus D
accagguccacgcugguggcc

SEQ ID NO: 1560919 - RNA, 13 nt, Human adenovirus D
cgcagccgcggca

SEQ ID NO: 1560920 - RNA, 19 nt, Human adenovirus D
aacggcugcauccacugcu

SEQ ID NO: 1560921 - RNA, 19 nt, Human adenovirus D
ccccagaugggccuggccg

SEQ ID NO: 1560922 - RNA, 12 nt, Human adenovirus D
aguugagggccu

SEQ ID NO: 1560923 - RNA, 18 nt, Human adenovirus D
gcgcccugagagcgcugg

SEQ ID NO: 1560924 - RNA, 22 nt, Human adenovirus D
ggcaacagcaaaagauacagag

SEQ ID NO: 1560925 - RNA, 22 nt, Human adenovirus D
ggagcagugucuggagcgggcu

SEQ ID NO: 1560926 - RNA, 20 nt, Human adenovirus D
ccacccgcaugaacuggcuc

SEQ ID NO: 1560927 - RNA, 16 nt, Human adenovirus D
ucagagugcaccagcc

SEQ ID NO: 1560928 - RNA, 19 nt, Human adenovirus D
cggggaaggucucgcucca

SEQ ID NO: 1560929 - RNA, 20 nt, Human adenovirus D
agaucagcugcagcgcacuc

SEQ ID NO: 1560930 - RNA, 13 nt, Human adenovirus D
gacgagaccagag

SEQ ID NO: 1560931 - RNA, 20 nt, Human adenovirus D
ccacaggugcugcccacccu

SEQ ID NO: 1560932 - RNA, 20 nt, Human adenovirus D
cagcgccacgaccggcagcg

SEQ ID NO: 1560933 - RNA, 18 nt, Human adenovirus D
ugauucaguacuuagaag

SEQ ID NO: 1560934 - RNA, 21 nt, Human adenovirus D
gcugacaauucagagccaggg

SEQ ID NO: 1560935 - RNA, 13 nt, Human adenovirus D
cucccaccaccag

SEQ ID NO: 1560936 - RNA, 17 nt, Human adenovirus D
gcccgccgccaggccca

SEQ ID NO: 1560937 - RNA, 16 nt, Human adenovirus D
caacucgcggcugcug

SEQ ID NO: 1560938 - RNA, 15 nt, Human adenovirus D
caugcaagguguggu

SEQ ID NO: 1560939 - RNA, 18 nt, Human adenovirus D
ugcagacacuugagcugg

SEQ ID NO: 1560940 - RNA, 18 nt, Human adenovirus D
ggaccauagggagccugc

SEQ ID NO: 1560941 - RNA, 23 nt, Human adenovirus D
cuacgccagccgcaggcgcccag

SEQ ID NO: 1560942 - RNA, 19 nt, Human adenovirus D
gaacugauguugauuaaaa

SEQ ID NO: 1560943 - RNA, 21 nt, Human adenovirus D
ugcuaccucuugcagcuggcc

SEQ ID NO: 1560944 - RNA, 16 nt, Human adenovirus D
cuuuccagcagcaggg

SEQ ID NO: 1560945 - RNA, 22 nt, Human adenovirus D
guggguuggcuugcaugaagga

SEQ ID NO: 1560946 - RNA, 17 nt, Human adenovirus D
gagaggagcucuugcag

SEQ ID NO: 1560947 - RNA, 15 nt, Human adenovirus D
cccacgccgagccug

SEQ ID NO: 1560948 - RNA, 14 nt, Human adenovirus D
gugcuggagagcga

SEQ ID NO: 1560949 - RNA, 23 nt, Human adenovirus D
gaggcgaagauggggccccgcca

SEQ ID NO: 1560950 - RNA, 17 nt, Human adenovirus D
aguauugugggccuggg

SEQ ID NO: 1560951 - RNA, 18 nt, Human adenovirus D
acaauaaaagaccaauaa

SEQ ID NO: 1560952 - RNA, 18 nt, Human adenovirus D
auugucaagcuugguggc

SEQ ID NO: 1560953 - RNA, 17 nt, Human adenovirus D
gccugggcgugcagacc

SEQ ID NO: 1560954 - RNA, 22 nt, Human adenovirus D
ccugaucucugccauguucuca

SEQ ID NO: 1560955 - RNA, 13 nt, Human adenovirus D
gcccaacccgcgu

SEQ ID NO: 1560956 - RNA, 15 nt, Human adenovirus D
ggggcgcugggcgug

SEQ ID NO: 1560957 - RNA, 17 nt, Human adenovirus D
ugaagaaaacuggcaag

SEQ ID NO: 1560958 - RNA, 15 nt, Human adenovirus D
ccugaucucugccau

SEQ ID NO: 1560959 - RNA, 18 nt, Human adenovirus D
ggcgagaggcgagcagcu

SEQ ID NO: 1560960 - RNA, 15 nt, Human adenovirus D
gccgcgcgggcagga

SEQ ID NO: 1560961 - RNA, 13 nt, Human adenovirus D
ggucagagugcac

SEQ ID NO: 1560962 - RNA, 16 nt, Human adenovirus D
cgccgccacugcaccc

SEQ ID NO: 1560963 - RNA, 18 nt, Human adenovirus D
uuuaauuggcaaacuugu

SEQ ID NO: 1560964 - RNA, 12 nt, Human adenovirus D
cagcacaguaag

SEQ ID NO: 1560965 - RNA, 15 nt, Human adenovirus D
cccccaggcccugga

SEQ ID NO: 1560966 - RNA, 23 nt, Human adenovirus D
cggcggugguguucacgcccggc

SEQ ID NO: 1560967 - RNA, 22 nt, Human adenovirus D
agcuugguggcaaaggagccau

SEQ ID NO: 1560968 - RNA, 18 nt, Human adenovirus D
ucaacaaccaugugcgca

SEQ ID NO: 1560969 - RNA, 17 nt, Human adenovirus D
uggacgagggggcagua

SEQ ID NO: 1560970 - RNA, 16 nt, Human adenovirus D
uucuacagccagcagc

SEQ ID NO: 1560971 - RNA, 17 nt, Human adenovirus D
cgcugcaaagccagccg

SEQ ID NO: 1560972 - RNA, 15 nt, Human adenovirus D
gaagauggaggagca

SEQ ID NO: 1560973 - RNA, 21 nt, Human adenovirus D
caacaucugugcugccuuugc

SEQ ID NO: 1560974 - RNA, 18 nt, Human adenovirus D
gcgcucccggcggcagcg

SEQ ID NO: 1560975 - RNA, 13 nt, Human adenovirus D
ugcccuuggaaga

SEQ ID NO: 1560976 - RNA, 22 nt, Human adenovirus D
gauaaggagaaggauucaaaac

SEQ ID NO: 1560977 - RNA, 22 nt, Human adenovirus D
gcucggccaugccccaggccug

SEQ ID NO: 1560978 - RNA, 19 nt, Human adenovirus D
agaagaaugggacagccag

SEQ ID NO: 1560979 - RNA, 14 nt, Human adenovirus D
ggugcgcuggggcu

SEQ ID NO: 1560980 - RNA, 19 nt, Human adenovirus D
cuaaucauuuaauaaagau

SEQ ID NO: 1560981 - RNA, 21 nt, Human adenovirus D
ccuacgcgaccguggggaacu

SEQ ID NO: 1560982 - RNA, 19 nt, Human adenovirus D
agccaagaaacgucccagc

SEQ ID NO: 1560983 - RNA, 17 nt, Human adenovirus D
cgcccguagucuggaga

SEQ ID NO: 1560984 - RNA, 22 nt, Human adenovirus D
cucggaguaccugagcccgggu

SEQ ID NO: 1560985 - RNA, 19 nt, Human adenovirus D
ucaccauguuauucagcag

SEQ ID NO: 1560986 - RNA, 16 nt, Human adenovirus D
cguccagcgcggccag

SEQ ID NO: 1560987 - RNA, 15 nt, Human adenovirus D
cugacauccauggcc

SEQ ID NO: 1560988 - RNA, 19 nt, Human adenovirus D
uacagccagcagcuccggg

SEQ ID NO: 1560989 - RNA, 19 nt, Human adenovirus D
agauuuaauuggcaaacuu

SEQ ID NO: 1560990 - RNA, 14 nt, Human adenovirus D
cguguggcagcagu

SEQ ID NO: 1560991 - RNA, 19 nt, Human adenovirus D
gaaagaggcggaacugcug

SEQ ID NO: 1560992 - RNA, 17 nt, Human adenovirus D
cccgggucuggugcagu

SEQ ID NO: 1560993 - RNA, 20 nt, Human adenovirus D
ggcgccgccggcggcgagga

SEQ ID NO: 1560994 - RNA, 20 nt, Human adenovirus D
ggaggcgguccccgcccagc

SEQ ID NO: 1560995 - RNA, 18 nt, Human adenovirus D
ugaacgccuuccuggcga

SEQ ID NO: 1560996 - RNA, 17 nt, Human adenovirus D
gcucccagccuccaccg

SEQ ID NO: 1560997 - RNA, 21 nt, Human adenovirus D
guuggaggaagaaaugaggca

SEQ ID NO: 1560998 - RNA, 16 nt, Human adenovirus D
gcgcagcggcaggaaa

SEQ ID NO: 1560999 - RNA, 16 nt, Human adenovirus D
ccaggcaaagcucaac

SEQ ID NO: 1561000 - RNA, 23 nt, Human adenovirus D
gcgcgcuccacgguggcggcgag

SEQ ID NO: 1561001 - RNA, 21 nt, Human adenovirus D
ggcaccaucacaggaggcaca

SEQ ID NO: 1561002 - RNA, 22 nt, Human adenovirus D
cugucaugccacgaacagccac

SEQ ID NO: 1561003 - RNA, 15 nt, Human adenovirus D
ccaacggcugcaucc

SEQ ID NO: 1561004 - RNA, 15 nt, Human adenovirus D
caugauccagcggcg

SEQ ID NO: 1561005 - RNA, 23 nt, Human adenovirus D
gcagccgugaucccacagggcac

SEQ ID NO: 1561006 - RNA, 14 nt, Human adenovirus D
ggaggggggccacc

SEQ ID NO: 1561007 - RNA, 16 nt, Human adenovirus D
acuuccccccuggggu

SEQ ID NO: 1561008 - RNA, 16 nt, Human adenovirus D
agagcaaucccacgcc

SEQ ID NO: 1561009 - RNA, 14 nt, Human adenovirus D
ccgcgguccuccuc

SEQ ID NO: 1561010 - RNA, 18 nt, Human adenovirus D
gcagggugaccaggucca

SEQ ID NO: 1561011 - RNA, 15 nt, Human adenovirus D
cgcaggcgcccagcc

SEQ ID NO: 1561012 - RNA, 20 nt, Human adenovirus D
ccccauagucaucacccagc

SEQ ID NO: 1561013 - RNA, 21 nt, Human adenovirus D
cugucccuacgucuacaaggc

SEQ ID NO: 1561014 - RNA, 17 nt, Human adenovirus D
ccagaacuuccagcaga

SEQ ID NO: 1561015 - RNA, 13 nt, Human adenovirus D
gcgacccaugagc

SEQ ID NO: 1561016 - RNA, 21 nt, Human adenovirus D
agagguugaaaaggcagcuga

SEQ ID NO: 1561017 - RNA, 15 nt, Human adenovirus D
aucacaucagccagg

SEQ ID NO: 1561018 - RNA, 17 nt, Human adenovirus D
cuccgguggcgaccgcc

SEQ ID NO: 1561019 - RNA, 19 nt, Human adenovirus D
gagcggcgaggggcugcua

SEQ ID NO: 1561020 - RNA, 16 nt, Human adenovirus D
cccaggccuggcccug

SEQ ID NO: 1561021 - RNA, 16 nt, Human adenovirus D
uugccgaaggacccca

SEQ ID NO: 1561022 - RNA, 19 nt, Human adenovirus D
gcccguucucgcuggucac

SEQ ID NO: 1561023 - RNA, 17 nt, Human adenovirus D
gcgaucucggacaugaa

SEQ ID NO: 1561024 - RNA, 16 nt, Human adenovirus D
caccgccuccacccug

SEQ ID NO: 1561025 - RNA, 15 nt, Human adenovirus D
cucuuuccagcagca

SEQ ID NO: 1561026 - RNA, 17 nt, Human adenovirus D
guccuugaggaggagac

SEQ ID NO: 1561027 - RNA, 20 nt, Human adenovirus D
cgcaggcgggacagaggagg

SEQ ID NO: 1561028 - RNA, 14 nt, Human adenovirus D
cuguucagggaccg

SEQ ID NO: 1561029 - RNA, 17 nt, Human adenovirus D
uaacuaugaucccaaca

SEQ ID NO: 1561030 - RNA, 14 nt, Human adenovirus D
gccguccgcccgcg

SEQ ID NO: 1561031 - RNA, 16 nt, Human adenovirus D
acgggauagagagucu

SEQ ID NO: 1561032 - RNA, 22 nt, Human adenovirus D
gaggaugcacccgcugcggggu

SEQ ID NO: 1561033 - RNA, 15 nt, Human adenovirus D
ccggggcggggguga

SEQ ID NO: 1561034 - RNA, 18 nt, Human adenovirus D
agcggccagcgcugggug

SEQ ID NO: 1561035 - RNA, 23 nt, Human adenovirus D
gguaguucaaggacaugcagcug

SEQ ID NO: 1561036 - RNA, 20 nt, Human adenovirus D
aacaaccuuaccaguggacu

SEQ ID NO: 1561037 - RNA, 16 nt, Human adenovirus D
cagggugcuccagcca

SEQ ID NO: 1561038 - RNA, 20 nt, Human adenovirus D
uacuuucgcucccaccgcgc

SEQ ID NO: 1561039 - RNA, 14 nt, Human adenovirus D
agaccaccugguga

SEQ ID NO: 1561040 - RNA, 21 nt, Human adenovirus D
gcugcccguucucgcugguca

SEQ ID NO: 1561041 - RNA, 14 nt, Human adenovirus D
cucagcagucucug

SEQ ID NO: 1561042 - RNA, 11 nt, Human adenovirus D
ggaggcagagc

SEQ ID NO: 1561043 - RNA, 20 nt, Human adenovirus D
uuugcaagaaggaaguauga

SEQ ID NO: 1561044 - RNA, 21 nt, Human adenovirus D
gaacuaaucauuuaauaaaga

SEQ ID NO: 1561045 - RNA, 21 nt, Human adenovirus D
aagcuagcacccaaaaacugc

SEQ ID NO: 1561046 - RNA, 12 nt, Human adenovirus D
uucaagaacugg

SEQ ID NO: 1561047 - RNA, 16 nt, Human adenovirus D
gcuucgaagagccggc

SEQ ID NO: 1561048 - RNA, 20 nt, Human adenovirus D
acaucaauuuugcgucccug

SEQ ID NO: 1561049 - RNA, 15 nt, Human adenovirus D
aaaagcguccgcagu

SEQ ID NO: 1561050 - RNA, 11 nt, Human adenovirus D
gguggcggcga

SEQ ID NO: 1561051 - RNA, 13 nt, Human adenovirus D
guuuaauaaaagc

SEQ ID NO: 1561052 - RNA, 17 nt, Human adenovirus D
caaucucccaccaccag

SEQ ID NO: 1561053 - RNA, 16 nt, Human adenovirus D
cuacgagcucaaccuc

SEQ ID NO: 1561054 - RNA, 22 nt, Human adenovirus D
gcaaggucgaggagaccugcac

SEQ ID NO: 1561055 - RNA, 16 nt, Human adenovirus D
acugauggccacgggg

SEQ ID NO: 1561056 - RNA, 16 nt, Human adenovirus D
ugcugccgcucaguca

SEQ ID NO: 1561057 - RNA, 18 nt, Human adenovirus D
ugcagggcgcccagcaug

SEQ ID NO: 1561058 - RNA, 17 nt, Human adenovirus D
gagggccucggcggcgu

SEQ ID NO: 1561059 - RNA, 12 nt, Human adenovirus D
aaccucagccac

SEQ ID NO: 1561060 - RNA, 16 nt, Human adenovirus D
gaccaggcggcagagc

SEQ ID NO: 1561061 - RNA, 21 nt, Human adenovirus D
acaaccaugugcgcacccuga

SEQ ID NO: 1561062 - RNA, 16 nt, Human adenovirus D
gcgcuggggcugcucg

SEQ ID NO: 1561063 - RNA, 14 nt, Human adenovirus D
caugcuggccgugg

SEQ ID NO: 1561064 - RNA, 18 nt, Human adenovirus D
gcggucgcgguggggcgg

SEQ ID NO: 1561065 - RNA, 20 nt, Human adenovirus D
ccaagaaacgucccagcagc

SEQ ID NO: 1561066 - RNA, 21 nt, Human adenovirus D
guggcgcucgggcaggucccg

SEQ ID NO: 1561067 - RNA, 13 nt, Human adenovirus D
cugaggcagacgc

SEQ ID NO: 1561068 - RNA, 13 nt, Human adenovirus D
gugcgggggcaga

SEQ ID NO: 1561069 - RNA, 18 nt, Human adenovirus D
cgaccggucgacggugag

SEQ ID NO: 1561070 - RNA, 15 nt, Human adenovirus D
cgcaguccgccaagc

SEQ ID NO: 1561071 - RNA, 12 nt, Human adenovirus D
gcgcgcugcccg

SEQ ID NO: 1561072 - RNA, 20 nt, Human adenovirus D
ggccguccuuucgcugcugc

SEQ ID NO: 1561073 - RNA, 13 nt, Human adenovirus D
ucagagugcacca

SEQ ID NO: 1561074 - RNA, 13 nt, Human adenovirus D
ugauauugcuucc

SEQ ID NO: 1561075 - RNA, 19 nt, Human adenovirus D
agaugcgacccaugagcug

SEQ ID NO: 1561076 - RNA, 15 nt, Human adenovirus D
ccacccagaccgugc

SEQ ID NO: 1561077 - RNA, 11 nt, Human adenovirus D
cgucccagcag

SEQ ID NO: 1561078 - RNA, 19 nt, Human adenovirus D
uccugcugcuccaccaccu

SEQ ID NO: 1561079 - RNA, 17 nt, Human adenovirus D
gcagccgccgugcuccc

SEQ ID NO: 1561080 - RNA, 19 nt, Human adenovirus D
accgcgagcugaugcugag

SEQ ID NO: 1561081 - RNA, 13 nt, Human adenovirus D
gagcaggaccugg

SEQ ID NO: 1561082 - RNA, 18 nt, Human adenovirus D
gaggccaucgugcagaac

SEQ ID NO: 1561083 - RNA, 20 nt, Human adenovirus D
caggagccgcuaguggaaga

SEQ ID NO: 1561084 - RNA, 20 nt, Human adenovirus D
ugacgagcccgcgcgggagc

SEQ ID NO: 1561085 - RNA, 19 nt, Human adenovirus D
caguacucccggagcggga

SEQ ID NO: 1561086 - RNA, 13 nt, Human adenovirus D
cggaggcuggcug

SEQ ID NO: 1561087 - RNA, 14 nt, Human adenovirus D
uccaugcgggugac

SEQ ID NO: 1561088 - RNA, 18 nt, Human adenovirus D
gacaagauaucauaaaga

SEQ ID NO: 1561089 - RNA, 12 nt, Human adenovirus D
gguggaggcgcg

SEQ ID NO: 1561090 - RNA, 16 nt, Human adenovirus D
gugcagaccguggaca

SEQ ID NO: 1561091 - RNA, 20 nt, Human adenovirus D
ccauucggagcacgcccgcc

SEQ ID NO: 1561092 - RNA, 20 nt, Human adenovirus D
cgcugguagggggcgccgcc

SEQ ID NO: 1561093 - RNA, 17 nt, Human adenovirus D
cagucguggacgcugcu

SEQ ID NO: 1561094 - RNA, 21 nt, Human adenovirus D
acacuuccuucgcagucucca

SEQ ID NO: 1561095 - RNA, 20 nt, Human adenovirus D
ugccagauugggggacgaug

SEQ ID NO: 1561096 - RNA, 15 nt, Human adenovirus D
gacagcguuccccuc

SEQ ID NO: 1561097 - RNA, 22 nt, Human adenovirus D
cagaaucaaaucgccaagggca

SEQ ID NO: 1561098 - RNA, 12 nt, Human adenovirus D
cagcacgguggc

SEQ ID NO: 1561099 - RNA, 17 nt, Human adenovirus D
gcaucggaacccuccag

SEQ ID NO: 1561100 - RNA, 19 nt, Human adenovirus D
gacgagaccagaggcagac

SEQ ID NO: 1561101 - RNA, 12 nt, Human adenovirus D
cgugcaggcgcc

SEQ ID NO: 1561102 - RNA, 14 nt, Human adenovirus D
cagcaggagugcag

SEQ ID NO: 1561103 - RNA, 20 nt, Human adenovirus D
agcaugaaggggacgagcug

SEQ ID NO: 1561104 - RNA, 17 nt, Human adenovirus D
ccagcgcgugcugcgcg

SEQ ID NO: 1561105 - RNA, 16 nt, Human adenovirus D
cauacaaagcugaaag

SEQ ID NO: 1561106 - RNA, 17 nt, Human adenovirus D
ggucggcgacgacgcgc

SEQ ID NO: 1561107 - RNA, 16 nt, Human adenovirus D
gucacacuuaguucag

SEQ ID NO: 1561108 - RNA, 22 nt, Human adenovirus D
agcgccuuaccugguacgagcu

SEQ ID NO: 1561109 - RNA, 15 nt, Human adenovirus D
acucugugugcugag

SEQ ID NO: 1561110 - RNA, 18 nt, Human adenovirus D
ugccauuuugaacccgca

SEQ ID NO: 1561111 - RNA, 15 nt, Human adenovirus D
cagcaggagugcagg

SEQ ID NO: 1561112 - RNA, 18 nt, Human adenovirus D
guccuugaggaggagacu

SEQ ID NO: 1561113 - RNA, 18 nt, Human adenovirus D
cgcgcgguaggcccuggu

SEQ ID NO: 1561114 - RNA, 19 nt, Human adenovirus D
gcgccgggccugggcgugc

SEQ ID NO: 1561115 - RNA, 12 nt, Human adenovirus D
ugaccaagcugg

SEQ ID NO: 1561116 - RNA, 20 nt, Human adenovirus D
ccaacuggucuccugccugg

SEQ ID NO: 1561117 - RNA, 19 nt, Human adenovirus D
gugcugccccaggcggugc

SEQ ID NO: 1561118 - RNA, 12 nt, Human adenovirus D
ggcuggagccgc

SEQ ID NO: 1561119 - RNA, 23 nt, Human adenovirus D
ucaccugcaccugcgucugcagc

SEQ ID NO: 1561120 - RNA, 22 nt, Human adenovirus D
uccccagcgguucugggucacc

SEQ ID NO: 1561121 - RNA, 19 nt, Human adenovirus D
agacgaugggcguccagcg

SEQ ID NO: 1561122 - RNA, 16 nt, Human adenovirus D
ucuuuagacucugaca

SEQ ID NO: 1561123 - RNA, 16 nt, Human adenovirus D
cgcccgacacugcagg

SEQ ID NO: 1561124 - RNA, 17 nt, Human adenovirus D
cacuugagcuggccuuc

SEQ ID NO: 1561125 - RNA, 15 nt, Human adenovirus D
uccagcccagggcgc

SEQ ID NO: 1561126 - RNA, 11 nt, Human adenovirus D
cugcuggaugg

SEQ ID NO: 1561127 - RNA, 12 nt, Human adenovirus D
gucaucacccag

SEQ ID NO: 1561128 - RNA, 22 nt, Human adenovirus D
aguuucaaacccuacucgggca

SEQ ID NO: 1561129 - RNA, 13 nt, Human adenovirus D
accucucggccgc

SEQ ID NO: 1561130 - RNA, 14 nt, Human adenovirus D
gacccccaggcccu

SEQ ID NO: 1561131 - RNA, 15 nt, Human adenovirus D
cucccaccaccagcc

SEQ ID NO: 1561132 - RNA, 18 nt, Human adenovirus D
ucauggaggcccacaaag

SEQ ID NO: 1561133 - RNA, 18 nt, Human adenovirus D
uucagggugcuccagcca

SEQ ID NO: 1561134 - RNA, 15 nt, Human adenovirus D
gcaguagccccgccc

SEQ ID NO: 1561135 - RNA, 14 nt, Human adenovirus D
ucgccggaggaggc

SEQ ID NO: 1561136 - RNA, 12 nt, Human adenovirus D
agcuugcccuug

SEQ ID NO: 1561137 - RNA, 24 nt, Human adenovirus D
ggaggcguacaugccgcaaauguc

SEQ ID NO: 1561138 - RNA, 19 nt, Human adenovirus D
gaucucggucugcucgggc

SEQ ID NO: 1561139 - RNA, 19 nt, Human adenovirus D
auaaaguuuuucauccaga

SEQ ID NO: 1561140 - RNA, 20 nt, Human adenovirus D
cucacaguaagugcagcaca

SEQ ID NO: 1561141 - RNA, 13 nt, Human adenovirus D
ugaaucucgguuu

SEQ ID NO: 1561142 - RNA, 20 nt, Human adenovirus D
uauagucuaugggaacauau

SEQ ID NO: 1561143 - RNA, 19 nt, Human adenovirus D
ccgcgccgacgcgcuccuc

SEQ ID NO: 1561144 - RNA, 21 nt, Human adenovirus D
ccgucgccucggaccuggccg

SEQ ID NO: 1561145 - RNA, 17 nt, Human adenovirus D
caucacaucagccagga

SEQ ID NO: 1561146 - RNA, 15 nt, Human adenovirus D
ugaggcaggccaugg

SEQ ID NO: 1561147 - RNA, 15 nt, Human adenovirus D
cuuuuuaaaaacacu

SEQ ID NO: 1561148 - RNA, 17 nt, Human adenovirus D
gacaaagagcacagcag

SEQ ID NO: 1561149 - RNA, 20 nt, Human adenovirus D
accucuucuauuucuuccuc

SEQ ID NO: 1561150 - RNA, 16 nt, Human adenovirus D
gagcucuuaagaaaga

SEQ ID NO: 1561151 - RNA, 22 nt, Human adenovirus D
gacgcgcucccggcggcagcgg

SEQ ID NO: 1561152 - RNA, 20 nt, Human adenovirus D
cgugcgcacccguccuccuc

SEQ ID NO: 1561153 - RNA, 16 nt, Human adenovirus D
gcaguugaccaugagc

SEQ ID NO: 1561154 - RNA, 17 nt, Human adenovirus D
augggggcggaccugca

SEQ ID NO: 1561155 - RNA, 22 nt, Human adenovirus D
gccggccaauguuacgcugccc

SEQ ID NO: 1561156 - RNA, 16 nt, Human adenovirus D
caguggcccuggaugu

SEQ ID NO: 1561157 - RNA, 22 nt, Human adenovirus D
uggggcgcuuacaagcgcgggc

SEQ ID NO: 1561158 - RNA, 21 nt, Human adenovirus D
agccaggugagcucgggcugc

SEQ ID NO: 1561159 - RNA, 13 nt, Human adenovirus D
augggcaccugga

SEQ ID NO: 1561160 - RNA, 15 nt, Human adenovirus D
ucuuugcccugcuca

SEQ ID NO: 1561161 - RNA, 18 nt, Human adenovirus D
gaccucccaccccagaaa

SEQ ID NO: 1561162 - RNA, 23 nt, Human adenovirus D
cuucgagguggaccccauggaug

SEQ ID NO: 1561163 - RNA, 18 nt, Human adenovirus D
uuggugggcagaggaggu

SEQ ID NO: 1561164 - RNA, 14 nt, Human adenovirus D
cauuuuuccagccu

SEQ ID NO: 1561165 - RNA, 15 nt, Human adenovirus D
cgcgguccuccucgu

SEQ ID NO: 1561166 - RNA, 14 nt, Human adenovirus D
aguccaccgcuccg

SEQ ID NO: 1561167 - RNA, 21 nt, Human adenovirus D
caggcgccggcgcuagccagc

SEQ ID NO: 1561168 - RNA, 22 nt, Human adenovirus D
gccaggggagugaagagggaga

SEQ ID NO: 1561169 - RNA, 17 nt, Human adenovirus D
caggugaugccggcagc

SEQ ID NO: 1561170 - RNA, 18 nt, Human adenovirus D
augaauuuugggcggagg

SEQ ID NO: 1561171 - RNA, 18 nt, Human adenovirus D
ugaggcggugguagccgu

SEQ ID NO: 1561172 - RNA, 20 nt, Human adenovirus D
ggcgcggcgggggcggagag

SEQ ID NO: 1561173 - RNA, 18 nt, Human adenovirus D
cgugaccugcagcaggug

SEQ ID NO: 1561174 - RNA, 18 nt, Human adenovirus D
ugcgccaagggcagcccu

SEQ ID NO: 1561175 - RNA, 17 nt, Human adenovirus D
caggcccagaacuggca

SEQ ID NO: 1561176 - RNA, 18 nt, Human adenovirus D
gucugucauauccugaag

SEQ ID NO: 1561177 - RNA, 15 nt, Human adenovirus D
cugagccgccagcug

SEQ ID NO: 1561178 - RNA, 12 nt, Human adenovirus D
ggccuggagcag

SEQ ID NO: 1561179 - RNA, 15 nt, Human adenovirus D
gaaaucacacuuuug

SEQ ID NO: 1561180 - RNA, 13 nt, Human adenovirus D
caucaccacaggc

SEQ ID NO: 1561181 - RNA, 22 nt, Human adenovirus D
cgcgaggccauaggccaggcgc

SEQ ID NO: 1561182 - RNA, 22 nt, Human adenovirus D
ucccgucucgacccgagcccga

SEQ ID NO: 1561183 - RNA, 14 nt, Human adenovirus D
ccggucgacgguga

SEQ ID NO: 1561184 - RNA, 14 nt, Human adenovirus D
aggaagcccagagc

SEQ ID NO: 1561185 - RNA, 18 nt, Human adenovirus D
ucaucugcagggcgccca

SEQ ID NO: 1561186 - RNA, 21 nt, Human adenovirus D
uggcgaccgccgugcgccgcg

SEQ ID NO: 1561187 - RNA, 15 nt, Human adenovirus D
aguuuuauggcugcu

SEQ ID NO: 1561188 - RNA, 17 nt, Human adenovirus D
ggccugggagugaaaag

SEQ ID NO: 1561189 - RNA, 22 nt, Human adenovirus D
ggcgcagcugcgcuuagucaug

SEQ ID NO: 1561190 - RNA, 23 nt, Human adenovirus D
guggcuauuuucacugaaggaaa

SEQ ID NO: 1561191 - RNA, 14 nt, Human adenovirus D
gaaaugaggcaggc

SEQ ID NO: 1561192 - RNA, 14 nt, Human adenovirus D
gcuacaauuacuuc

SEQ ID NO: 1561193 - RNA, 13 nt, Human adenovirus D
caggcgccugagu

SEQ ID NO: 1561194 - RNA, 23 nt, Human adenovirus D
ucuccggugaugccuuccaaaau

SEQ ID NO: 1561195 - RNA, 19 nt, Human adenovirus D
gggccccgccaaccggcug

SEQ ID NO: 1561196 - RNA, 16 nt, Human adenovirus D
cuugagaugcagaugg

SEQ ID NO: 1561197 - RNA, 16 nt, Human adenovirus D
ugucaggucugcuggu

SEQ ID NO: 1561198 - RNA, 15 nt, Human adenovirus D
agagcucaaaguaaa

SEQ ID NO: 1561199 - RNA, 16 nt, Human adenovirus D
agcggccgcggccaga

SEQ ID NO: 1561200 - RNA, 22 nt, Human adenovirus D
gcagcuccgguugugcagcccc

SEQ ID NO: 1561201 - RNA, 13 nt, Human adenovirus D
cccgcagcacgcg

SEQ ID NO: 1561202 - RNA, 15 nt, Human adenovirus D
ggagcacgcccgcca

SEQ ID NO: 1561203 - RNA, 14 nt, Human adenovirus D
cagcaagccucuga

SEQ ID NO: 1561204 - RNA, 14 nt, Human adenovirus D
aaaacagaaagcau

SEQ ID NO: 1561205 - RNA, 17 nt, Human adenovirus D
aggaccauagggagccu

SEQ ID NO: 1561206 - RNA, 23 nt, Human adenovirus D
ccgcgccaaccgcacccgcgccg

SEQ ID NO: 1561207 - RNA, 21 nt, Human adenovirus D
cugagcggcugcacgagcgcc

SEQ ID NO: 1561208 - RNA, 23 nt, Human adenovirus D
augugaccucccaccccagaaag

SEQ ID NO: 1561209 - RNA, 17 nt, Human adenovirus D
cagccauagcucagccc

SEQ ID NO: 1561210 - RNA, 14 nt, Human adenovirus D
gggcagaggugguc

SEQ ID NO: 1561211 - RNA, 20 nt, Human adenovirus D
ccgagggucgcuggcugcug

SEQ ID NO: 1561212 - RNA, 13 nt, Human adenovirus D
aaaacccaugaaa

SEQ ID NO: 1561213 - RNA, 19 nt, Human adenovirus D
gacgggcugcuucugccug

SEQ ID NO: 1561214 - RNA, 11 nt, Human adenovirus D
cggcugagcuc

SEQ ID NO: 1561215 - RNA, 17 nt, Human adenovirus D
ccagcgaaagagagcuc

SEQ ID NO: 1561216 - RNA, 16 nt, Human adenovirus D
auggcucagcugccau

SEQ ID NO: 1561217 - RNA, 16 nt, Human adenovirus D
aauucagggugcucca

SEQ ID NO: 1561218 - RNA, 17 nt, Human adenovirus D
ugaaaguaugucucugg

SEQ ID NO: 1561219 - RNA, 21 nt, Human adenovirus D
auugauuuuuacaccagcgcg

SEQ ID NO: 1561220 - RNA, 19 nt, Human adenovirus D
cggccaaucagcaguagcc

SEQ ID NO: 1561221 - RNA, 23 nt, Human adenovirus D
gcaugccgaagaagaacaggagc

SEQ ID NO: 1561222 - RNA, 18 nt, Human adenovirus D
ucucuucaacaucugugc

SEQ ID NO: 1561223 - RNA, 12 nt, Human adenovirus D
aggcgcagcugc

SEQ ID NO: 1561224 - RNA, 18 nt, Human adenovirus D
ccggcagcggggccuggu

SEQ ID NO: 1561225 - RNA, 16 nt, Human adenovirus D
acuugccgccugcgca

SEQ ID NO: 1561226 - RNA, 23 nt, Human adenovirus D
gccugcgcccgcgccgcggcgac

SEQ ID NO: 1561227 - RNA, 16 nt, Human adenovirus D
ccuccgucggaagagg

SEQ ID NO: 1561228 - RNA, 17 nt, Human adenovirus D
ggcagagcucuuaagaa

SEQ ID NO: 1561229 - RNA, 13 nt, Human adenovirus D
gcuagcccuuccu

SEQ ID NO: 1561230 - RNA, 23 nt, Human adenovirus D
accggucucugcgcucgcucacc

SEQ ID NO: 1561231 - RNA, 12 nt, Human adenovirus D
cgauguagaguu

SEQ ID NO: 1561232 - RNA, 22 nt, Human adenovirus D
acuacuaauucucaaaguguga

SEQ ID NO: 1561233 - RNA, 18 nt, Human adenovirus D
gauaaagcgugguaguuu

SEQ ID NO: 1561234 - RNA, 20 nt, Human adenovirus D
ugauccguaucgugcugcuc

SEQ ID NO: 1561235 - RNA, 14 nt, Human adenovirus D
uuaaccuauaaaaa

SEQ ID NO: 1561236 - RNA, 18 nt, Human adenovirus D
cacugaaaauuugcaaaa

SEQ ID NO: 1561237 - RNA, 15 nt, Human adenovirus D
gggcgaagugcucaa

SEQ ID NO: 1561238 - RNA, 19 nt, Human adenovirus D
aaauccacuccgcacaugu

SEQ ID NO: 1561239 - RNA, 23 nt, Human adenovirus D
auugaaauacccaacaaccuuac

SEQ ID NO: 1561240 - RNA, 17 nt, Human adenovirus D
gcuccgcgaacagcagc

SEQ ID NO: 1561241 - RNA, 15 nt, Human adenovirus D
uggagccacugcuac

SEQ ID NO: 1561242 - RNA, 15 nt, Human adenovirus D
caacccuuccugguc

SEQ ID NO: 1561243 - RNA, 13 nt, Human adenovirus D
gcccgcuccaccg

SEQ ID NO: 1561244 - RNA, 14 nt, Human adenovirus D
gccgaggcuagcac

SEQ ID NO: 1561245 - RNA, 16 nt, Human adenovirus D
gccgccgcggccaucu

SEQ ID NO: 1561246 - RNA, 16 nt, Human adenovirus D
gucugcuccugcacuu

SEQ ID NO: 1561247 - RNA, 19 nt, Human adenovirus D
auuagcuaaugugucuuug

SEQ ID NO: 1561248 - RNA, 14 nt, Human adenovirus D
cucgcgcaccugcu

SEQ ID NO: 1561249 - RNA, 23 nt, Human adenovirus D
accaugaaggggcucuugcugau

SEQ ID NO: 1561250 - RNA, 18 nt, Human adenovirus D
gcuuccguugcgcugcag

SEQ ID NO: 1561251 - RNA, 14 nt, Human adenovirus D
ccaggggagugaag

SEQ ID NO: 1561252 - RNA, 18 nt, Human adenovirus D
cgucacggugaaggggug

SEQ ID NO: 1561253 - RNA, 16 nt, Human adenovirus D
acagucaacuguuaag

SEQ ID NO: 1561254 - RNA, 21 nt, Human adenovirus D
gauaugcccuccuauuacuug

SEQ ID NO: 1561255 - RNA, 15 nt, Human adenovirus D
uugaaaucugaaagu

SEQ ID NO: 1561256 - RNA, 23 nt, Human adenovirus D
cgagggccugggcucgcuggugg

SEQ ID NO: 1561257 - RNA, 22 nt, Human adenovirus D
ugcgagaaggcgcccaggccgc

SEQ ID NO: 1561258 - RNA, 23 nt, Human adenovirus D
cuugcaagacagaaacaccgagc

SEQ ID NO: 1561259 - RNA, 16 nt, Human adenovirus D
caggcccuggagcagc

SEQ ID NO: 1561260 - RNA, 22 nt, Human adenovirus D
aaagaggcuccggguggaagau

SEQ ID NO: 1561261 - RNA, 16 nt, Human adenovirus D
agaggcgagcagcugu

SEQ ID NO: 1561262 - RNA, 22 nt, Human adenovirus D
cgccgggccaugaugcgagccg

SEQ ID NO: 1561263 - RNA, 23 nt, Human adenovirus D
caugugugauaucacacugcaug

SEQ ID NO: 1561264 - RNA, 20 nt, Human adenovirus D
cgccgggccugggcgugcag

SEQ ID NO: 1561265 - RNA, 22 nt, Human adenovirus D
aagauggauggaaaaauauuug

SEQ ID NO: 1561266 - RNA, 16 nt, Human adenovirus D
cgcggacggccgcggc

SEQ ID NO: 1561267 - RNA, 16 nt, Human adenovirus D
guuucgggcgggcagg

SEQ ID NO: 1561268 - RNA, 19 nt, Human adenovirus D
cugcaccauccccagguaa

SEQ ID NO: 1561269 - RNA, 20 nt, Human adenovirus D
gaagccguggcgcagcgcga

SEQ ID NO: 1561270 - RNA, 16 nt, Human adenovirus D
ccucguccucuuccuc

SEQ ID NO: 1561271 - RNA, 19 nt, Human adenovirus D
ugucuucccucucagaugu

SEQ ID NO: 1561272 - RNA, 18 nt, Human adenovirus D
gcacauaaucaccauguu

SEQ ID NO: 1561273 - RNA, 20 nt, Human adenovirus D
cugaagauguaaccuugcaa

SEQ ID NO: 1561274 - RNA, 22 nt, Human adenovirus D
cauggccaggggagugaagagg

SEQ ID NO: 1561275 - RNA, 19 nt, Human adenovirus D
gugcuagacauggccagca

SEQ ID NO: 1561276 - RNA, 18 nt, Human adenovirus D
uggcgccgggccugggcg

SEQ ID NO: 1561277 - RNA, 18 nt, Human adenovirus D
cgagcaagacgcaggcca

SEQ ID NO: 1561278 - RNA, 14 nt, Human adenovirus D
ugcgcgagggccug

SEQ ID NO: 1561279 - RNA, 19 nt, Human adenovirus D
aacucgugcgaggggccaa

SEQ ID NO: 1561280 - RNA, 17 nt, Human adenovirus D
ggugaaccugagccagg

SEQ ID NO: 1561281 - RNA, 17 nt, Human adenovirus D
cgucgcuguccacgagc

SEQ ID NO: 1561282 - RNA, 17 nt, Human adenovirus D
gcaaaagcgccaggagg

SEQ ID NO: 1561283 - RNA, 15 nt, Human adenovirus D
cccgcggaugcuggc

SEQ ID NO: 1561284 - RNA, 16 nt, Human adenovirus D
cgcuucuucgagaggg

SEQ ID NO: 1561285 - RNA, 12 nt, Human adenovirus D
aaaacuggcaag

SEQ ID NO: 1561286 - RNA, 13 nt, Human adenovirus D
gcaggcgcccagc

SEQ ID NO: 1561287 - RNA, 20 nt, Human adenovirus D
accccuggcucccagccucc

SEQ ID NO: 1561288 - RNA, 20 nt, Human adenovirus D
gagcuguccauggugucgcg

SEQ ID NO: 1561289 - RNA, 21 nt, Human adenovirus D
uagacaaagagcacagcagua

SEQ ID NO: 1561290 - RNA, 14 nt, Human adenovirus D
cugcugccgcucag

SEQ ID NO: 1561291 - RNA, 19 nt, Human adenovirus D
cgcgucgcuguccacgagc

SEQ ID NO: 1561292 - RNA, 19 nt, Human adenovirus D
aaucaauguaacuaaacuu

SEQ ID NO: 1561293 - RNA, 21 nt, Human adenovirus D
gagcagugucuggagcgggcu

SEQ ID NO: 1561294 - RNA, 18 nt, Human adenovirus D
gagcuugcccuuggaaga

SEQ ID NO: 1561295 - RNA, 13 nt, Human adenovirus D
cuuaguuuaaaag

SEQ ID NO: 1561296 - RNA, 13 nt, Human adenovirus D
gagcucacccacu

SEQ ID NO: 1561297 - RNA, 15 nt, Human adenovirus D
ggcgcggagcuugcc

SEQ ID NO: 1561298 - RNA, 21 nt, Human adenovirus D
ccgcacuggcuuccgccgccg

SEQ ID NO: 1561299 - RNA, 22 nt, Human adenovirus D
ccccgcaggcaggacucgcaga

SEQ ID NO: 1561300 - RNA, 21 nt, Human adenovirus D
gcagcaggugcugccccaggc

SEQ ID NO: 1561301 - RNA, 14 nt, Human adenovirus D
cugcuaaagcuaau

SEQ ID NO: 1561302 - RNA, 18 nt, Human adenovirus D
cagcagagucgaggucag

SEQ ID NO: 1561303 - RNA, 18 nt, Human adenovirus D
ggugacgguaagcacgag

SEQ ID NO: 1561304 - RNA, 17 nt, Human adenovirus D
agcgaugagcagcuugc

SEQ ID NO: 1561305 - RNA, 21 nt, Human adenovirus D
cugguugacaaauggagccag

SEQ ID NO: 1561306 - RNA, 17 nt, Human adenovirus D
cgcccgggagagcugcg

SEQ ID NO: 1561307 - RNA, 14 nt, Human adenovirus D
gcgacgcggcggcg

SEQ ID NO: 1561308 - RNA, 18 nt, Human adenovirus D
aggguccgcgugagggug

SEQ ID NO: 1561309 - RNA, 17 nt, Human adenovirus D
cagcugccgucgucccg

SEQ ID NO: 1561310 - RNA, 22 nt, Human adenovirus D
gccucgagcuacaugcccagca

SEQ ID NO: 1561311 - RNA, 15 nt, Human adenovirus D
cacuacucagcuucu

SEQ ID NO: 1561312 - RNA, 15 nt, Human adenovirus D
agcugcgcgagggcc

SEQ ID NO: 1561313 - RNA, 18 nt, Human adenovirus D
ccaggucaaaacccacuc

SEQ ID NO: 1561314 - RNA, 13 nt, Human adenovirus D
augcuccugggug

SEQ ID NO: 1561315 - RNA, 17 nt, Human adenovirus D
cgccgccgugcgcacca

SEQ ID NO: 1561316 - RNA, 15 nt, Human adenovirus D
gagcgccuuaccugg

SEQ ID NO: 1561317 - RNA, 22 nt, Human adenovirus D
augcccagcagcagcaguagcc

SEQ ID NO: 1561318 - RNA, 22 nt, Human adenovirus D
agggucgcuggcugcuggagcu

SEQ ID NO: 1561319 - RNA, 17 nt, Human adenovirus D
gcaguugggaccggugc

SEQ ID NO: 1561320 - RNA, 17 nt, Human adenovirus D
cuucucccaaguucaaa

SEQ ID NO: 1561321 - RNA, 21 nt, Human adenovirus D
cuggaagccaugcugcgcaac

SEQ ID NO: 1561322 - RNA, 23 nt, Human adenovirus D
accagguccacgcugguggccac

SEQ ID NO: 1561323 - RNA, 17 nt, Human adenovirus D
ucgcgccacuggccacg

SEQ ID NO: 1561324 - RNA, 19 nt, Human adenovirus D
ccuggccgaccggagcgaa

SEQ ID NO: 1561325 - RNA, 21 nt, Human adenovirus D
cgagcgggaccggggaggcac

SEQ ID NO: 1561326 - RNA, 12 nt, Human adenovirus D
ucuuccuggggc

SEQ ID NO: 1561327 - RNA, 18 nt, Human adenovirus D
augacggguugcaggugg

SEQ ID NO: 1561328 - RNA, 18 nt, Human adenovirus D
gcugucuuaccagcucuu

SEQ ID NO: 1561329 - RNA, 16 nt, Human adenovirus D
agcgacgaccugggcg

SEQ ID NO: 1561330 - RNA, 22 nt, Human adenovirus D
ccgcaggaguccaccgcuccgc

SEQ ID NO: 1561331 - RNA, 14 nt, Human adenovirus D
ucuaccgucgccac

SEQ ID NO: 1561332 - RNA, 17 nt, Human adenovirus D
caggcgacccuggaggu

SEQ ID NO: 1561333 - RNA, 13 nt, Human adenovirus D
acuuggggaacuu

SEQ ID NO: 1561334 - RNA, 14 nt, Human adenovirus D
cgacgccccugagc

SEQ ID NO: 1561335 - RNA, 18 nt, Human adenovirus D
cgcgcuggggagggccac

SEQ ID NO: 1561336 - RNA, 16 nt, Human adenovirus D
gagccucccaggaggc

SEQ ID NO: 1561337 - RNA, 12 nt, Human adenovirus D
ccuucauaauag

SEQ ID NO: 1561338 - RNA, 19 nt, Human adenovirus D
auguuauucagcagcccau

SEQ ID NO: 1561339 - RNA, 19 nt, Human adenovirus D
cgcugaaaggcgggcugcc

SEQ ID NO: 1561340 - RNA, 19 nt, Human adenovirus D
ucauccagaauucaaccac

SEQ ID NO: 1561341 - RNA, 19 nt, Human adenovirus D
gagauagcaguugaccaug

SEQ ID NO: 1561342 - RNA, 23 nt, Human adenovirus D
ucacacuuaguucagcugcaaug

SEQ ID NO: 1561343 - RNA, 21 nt, Human adenovirus D
cagacgcacgggccgccgggc

SEQ ID NO: 1561344 - RNA, 17 nt, Human adenovirus D
cagucauagcaggggcg

SEQ ID NO: 1561345 - RNA, 13 nt, Human adenovirus D
gcgugcaggcgcc

SEQ ID NO: 1561346 - RNA, 13 nt, Human adenovirus D
caucauggcccug

SEQ ID NO: 1561347 - RNA, 16 nt, Human adenovirus D
ugcagcccccuccggu

SEQ ID NO: 1561348 - RNA, 18 nt, Human adenovirus D
ccucuugcagcuggccaa

SEQ ID NO: 1561349 - RNA, 19 nt, Human adenovirus D
cucugcgcucgcucacccg

SEQ ID NO: 1561350 - RNA, 22 nt, Human adenovirus D
gccuugauuuuuccagcccagg

SEQ ID NO: 1561351 - RNA, 17 nt, Human adenovirus D
cggcccuggcugguggu

SEQ ID NO: 1561352 - RNA, 14 nt, Human adenovirus D
uccggucuagcauc

SEQ ID NO: 1561353 - RNA, 17 nt, Human adenovirus D
acaacaagauucaauaa

SEQ ID NO: 1561354 - RNA, 12 nt, Human adenovirus D
acucccuucuca

SEQ ID NO: 1561355 - RNA, 20 nt, Human adenovirus D
ccggggcggaguggccucuc

SEQ ID NO: 1561356 - RNA, 19 nt, Human adenovirus D
gcuuggucuuucuggcuug

SEQ ID NO: 1561357 - RNA, 23 nt, Human adenovirus D
cagcgccccgaggacacccggcc

SEQ ID NO: 1561358 - RNA, 14 nt, Human adenovirus D
cacccucaggcgca

SEQ ID NO: 1561359 - RNA, 16 nt, Human adenovirus D
cgcccgagcucugcug

SEQ ID NO: 1561360 - RNA, 16 nt, Human adenovirus D
cgcgcccgcagcacgc

SEQ ID NO: 1561361 - RNA, 16 nt, Human adenovirus D
acguccauggcgcagu

SEQ ID NO: 1561362 - RNA, 18 nt, Human adenovirus D
caggaggcggugcgcacg

SEQ ID NO: 1561363 - RNA, 14 nt, Human adenovirus D
ggucaccuuggcuu

SEQ ID NO: 1561364 - RNA, 15 nt, Human adenovirus D
agguaguugagggug

SEQ ID NO: 1561365 - RNA, 17 nt, Human adenovirus D
cgcuggggcugcucggc

SEQ ID NO: 1561366 - RNA, 11 nt, Human adenovirus D
ugacccugcau

SEQ ID NO: 1561367 - RNA, 15 nt, Human adenovirus D
gcaucuuccuggggc

SEQ ID NO: 1561368 - RNA, 21 nt, Human adenovirus D
ccgccgcuguggagccacugc

SEQ ID NO: 1561369 - RNA, 19 nt, Human adenovirus D
caggcgccauucggagcac

SEQ ID NO: 1561370 - RNA, 21 nt, Human adenovirus D
ugcuccaaagcuagcacccaa

SEQ ID NO: 1561371 - RNA, 13 nt, Human adenovirus D
gcacccaccacag

SEQ ID NO: 1561372 - RNA, 20 nt, Human adenovirus D
ccgacuaggaagugcggcgg

SEQ ID NO: 1561373 - RNA, 21 nt, Human adenovirus D
uccagcagcaggguacccacu

SEQ ID NO: 1561374 - RNA, 21 nt, Human adenovirus D
ggcgcaagcucaugcuggccg

SEQ ID NO: 1561375 - RNA, 22 nt, Human adenovirus D
cgcagaucugcaucucccaggc

SEQ ID NO: 1561376 - RNA, 12 nt, Human adenovirus D
cacucuauuuuc

SEQ ID NO: 1561377 - RNA, 21 nt, Human adenovirus D
uggcgaucgugaacgcgcugg

SEQ ID NO: 1561378 - RNA, 15 nt, Human adenovirus D
ggcgggcagggagcu

SEQ ID NO: 1561379 - RNA, 13 nt, Human adenovirus D
acaacagccgcag

SEQ ID NO: 1561380 - RNA, 14 nt, Human adenovirus D
gcagguggcgccgg

SEQ ID NO: 1561381 - RNA, 23 nt, Human adenovirus D
gagcacgagcaagacgcaggcca

SEQ ID NO: 1561382 - RNA, 14 nt, Human adenovirus D
cgcgcgccgcgccg

SEQ ID NO: 1561383 - RNA, 20 nt, Human adenovirus D
gacacugcagggagccaggg

SEQ ID NO: 1561384 - RNA, 12 nt, Human adenovirus D
acaaggccugga

SEQ ID NO: 1561385 - RNA, 19 nt, Human adenovirus D
ugcacgagaaccgccuggg

SEQ ID NO: 1561386 - RNA, 23 nt, Human adenovirus D
uggcuauuuucacugaaggaaaa

SEQ ID NO: 1561387 - RNA, 17 nt, Human adenovirus D
ccaggcagugcagcgcg

SEQ ID NO: 1561388 - RNA, 16 nt, Human adenovirus D
cccgauggucgcugga

SEQ ID NO: 1561389 - RNA, 22 nt, Human adenovirus D
acgcgcuccucgcucuggggcc

SEQ ID NO: 1561390 - RNA, 21 nt, Human adenovirus D
ccccggacgucaccugcggcg

SEQ ID NO: 1561391 - RNA, 16 nt, Human adenovirus D
uguuguagaugaucca

SEQ ID NO: 1561392 - RNA, 15 nt, Human adenovirus D
augaaggcuuucaca

SEQ ID NO: 1561393 - RNA, 18 nt, Human adenovirus D
ggacuucgcagccaugca

SEQ ID NO: 1561394 - RNA, 21 nt, Human adenovirus D
ccgcaccgccacccgccgccg

SEQ ID NO: 1561395 - RNA, 15 nt, Human adenovirus D
ccgcccgccgccagg

SEQ ID NO: 1561396 - RNA, 20 nt, Human adenovirus D
cccggacguggugcugcugc

SEQ ID NO: 1561397 - RNA, 13 nt, Human adenovirus D
cggguucuggaga

SEQ ID NO: 1561398 - RNA, 16 nt, Human adenovirus D
gguacuuuacgcuggc

SEQ ID NO: 1561399 - RNA, 17 nt, Human adenovirus D
cuugaaaucgcaguugg

SEQ ID NO: 1561400 - RNA, 21 nt, Human adenovirus D
cauccgucccgacgaggccgg

SEQ ID NO: 1561401 - RNA, 19 nt, Human adenovirus D
cagagagccgccugagcaa

SEQ ID NO: 1561402 - RNA, 15 nt, Human adenovirus D
uggcgugcuggagag

SEQ ID NO: 1561403 - RNA, 21 nt, Human adenovirus D
gaccugcagcaggugcugccc

SEQ ID NO: 1561404 - RNA, 21 nt, Human adenovirus D
caugggaggaagcaacaucac

SEQ ID NO: 1561405 - RNA, 16 nt, Human adenovirus D
cucggccauucuggag

SEQ ID NO: 1561406 - RNA, 18 nt, Human adenovirus D
uaaccaucgaaaccagau

SEQ ID NO: 1561407 - RNA, 16 nt, Human adenovirus D
gccggcgcuagccagc

SEQ ID NO: 1561408 - RNA, 20 nt, Human adenovirus D
agugccuuuaucagcacugc

SEQ ID NO: 1561409 - RNA, 21 nt, Human adenovirus D
cugaagcccgugaccugcagc

SEQ ID NO: 1561410 - RNA, 22 nt, Human adenovirus D
cucgcagaucugcaucucccag

SEQ ID NO: 1561411 - RNA, 14 nt, Human adenovirus D
cuggcuggucaggc

SEQ ID NO: 1561412 - RNA, 13 nt, Human adenovirus D
gugaaaacgugcc

SEQ ID NO: 1561413 - RNA, 17 nt, Human adenovirus D
gcuagcccuuccuggac

SEQ ID NO: 1561414 - RNA, 14 nt, Human adenovirus D
ugcaacccccagcu

SEQ ID NO: 1561415 - RNA, 16 nt, Human adenovirus D
auuugacaacccgccu

SEQ ID NO: 1561416 - RNA, 20 nt, Human adenovirus D
cgcagucuccaacgccugcg

SEQ ID NO: 1561417 - RNA, 16 nt, Human adenovirus D
cucaacgcccaggcaa

SEQ ID NO: 1561418 - RNA, 21 nt, Human adenovirus D
acuugcaaguggggcggcaaa

SEQ ID NO: 1561419 - RNA, 21 nt, Human adenovirus D
acagccuugcccccaagggcg

SEQ ID NO: 1561420 - RNA, 12 nt, Human adenovirus D
ccacugcauggc

SEQ ID NO: 1561421 - RNA, 18 nt, Human adenovirus D
gaugaaccuuuggaccug

SEQ ID NO: 1561422 - RNA, 14 nt, Human adenovirus D
gccagccgcaggcg

SEQ ID NO: 1561423 - RNA, 18 nt, Human adenovirus D
aauauggccuggagcaga

SEQ ID NO: 1561424 - RNA, 14 nt, Human adenovirus D
ugcacgcgggugag

SEQ ID NO: 1561425 - RNA, 22 nt, Human adenovirus D
gagauggugggccguuggaaga

SEQ ID NO: 1561426 - RNA, 15 nt, Human adenovirus D
uuuauggcugcugga

SEQ ID NO: 1561427 - RNA, 14 nt, Human adenovirus D
uggccaggggagug

SEQ ID NO: 1561428 - RNA, 13 nt, Human adenovirus D
ggaagagugccca

SEQ ID NO: 1561429 - RNA, 13 nt, Human adenovirus D
uacuccagucucc

SEQ ID NO: 1561430 - RNA, 17 nt, Human adenovirus D
uccgcggaguccagcga

SEQ ID NO: 1561431 - RNA, 14 nt, Human adenovirus D
aggcauggcaggca

SEQ ID NO: 1561432 - RNA, 19 nt, Human adenovirus D
caacgauuucacccccgcc

SEQ ID NO: 1561433 - RNA, 15 nt, Human adenovirus D
ugcgagaaggcgccc

SEQ ID NO: 1561434 - RNA, 19 nt, Human adenovirus D
acuggaaacucuuggagca

SEQ ID NO: 1561435 - RNA, 13 nt, Human adenovirus D
gcagcccuucucc

SEQ ID NO: 1561436 - RNA, 19 nt, Human adenovirus D
ccucaucacaucagccagg

SEQ ID NO: 1561437 - RNA, 17 nt, Human adenovirus D
gguggcccugggccuga

SEQ ID NO: 1561438 - RNA, 18 nt, Human adenovirus D
ggugcuccggguucugga

SEQ ID NO: 1561439 - RNA, 19 nt, Human adenovirus D
uccagggucucaggguccg

SEQ ID NO: 1561440 - RNA, 15 nt, Human adenovirus D
cacccccgcgugcag

SEQ ID NO: 1561441 - RNA, 22 nt, Human adenovirus D
agcgcgcgucauggcuggucag

SEQ ID NO: 1561442 - RNA, 20 nt, Human adenovirus D
caccagccgcaccgcggcgu

SEQ ID NO: 1561443 - RNA, 19 nt, Human adenovirus D
acgccucggaguaccugag

SEQ ID NO: 1561444 - RNA, 19 nt, Human adenovirus D
gaaucuugaacuacuggcu

SEQ ID NO: 1561445 - RNA, 18 nt, Human adenovirus D
acccggcccguggucagc

SEQ ID NO: 1561446 - RNA, 11 nt, Human adenovirus D
acauggcaagc

SEQ ID NO: 1561447 - RNA, 21 nt, Human adenovirus D
auccuccgggacgcccuggcc

SEQ ID NO: 1561448 - RNA, 16 nt, Human adenovirus D
acuaaugacaaacaaa

SEQ ID NO: 1561449 - RNA, 12 nt, Human adenovirus D
agggagccaggg

SEQ ID NO: 1561450 - RNA, 21 nt, Human adenovirus D
ugcugacauccauggccaggg

SEQ ID NO: 1561451 - RNA, 22 nt, Human adenovirus D
ugcacuggcccgaccgacccau

SEQ ID NO: 1561452 - RNA, 19 nt, Human adenovirus D
aguuauggucugcuccugc

SEQ ID NO: 1561453 - RNA, 21 nt, Human adenovirus D
ccaccccuuacauguggagcu

SEQ ID NO: 1561454 - RNA, 18 nt, Human adenovirus D
cuuaagaaagacacaaaa

SEQ ID NO: 1561455 - RNA, 16 nt, Human adenovirus D
caugcaccuguggagg

SEQ ID NO: 1561456 - RNA, 22 nt, Human adenovirus D
ggaacuaaucauuuaauaaaga

SEQ ID NO: 1561457 - RNA, 15 nt, Human adenovirus D
ucaaaaacaaaguga

SEQ ID NO: 1561458 - RNA, 21 nt, Human adenovirus D
caggagggggccacucccagc

SEQ ID NO: 1561459 - RNA, 20 nt, Human adenovirus D
agcaccucgguacccuccuc

SEQ ID NO: 1561460 - RNA, 19 nt, Human adenovirus D
uccgcgguauauggcuccu

SEQ ID NO: 1561461 - RNA, 13 nt, Human adenovirus D
gccuaccccgccg

SEQ ID NO: 1561462 - RNA, 16 nt, Human adenovirus D
guauugugggccuggg

SEQ ID NO: 1561463 - RNA, 17 nt, Human adenovirus D
uccaguaggaaccagca

SEQ ID NO: 1561464 - RNA, 21 nt, Human adenovirus D
ccagauguugcgcagcggcag

SEQ ID NO: 1561465 - RNA, 13 nt, Human adenovirus D
gcuguccacgggg

SEQ ID NO: 1561466 - RNA, 14 nt, Human adenovirus D
accugcggggcgau

SEQ ID NO: 1561467 - RNA, 18 nt, Human adenovirus D
gccacggucaccgagccu

SEQ ID NO: 1561468 - RNA, 13 nt, Human adenovirus D
ggaucgccaggcc

SEQ ID NO: 1561469 - RNA, 15 nt, Human adenovirus D
ggguuaggccgcgcg

SEQ ID NO: 1561470 - RNA, 13 nt, Human adenovirus D
agagccggcgggc

SEQ ID NO: 1561471 - RNA, 15 nt, Human adenovirus D
ccaccagggagcuga

SEQ ID NO: 1561472 - RNA, 23 nt, Human adenovirus D
gucaucaccuuccugcagcucau

SEQ ID NO: 1561473 - RNA, 12 nt, Human adenovirus D
aagcgccguggc

SEQ ID NO: 1561474 - RNA, 12 nt, Human adenovirus D
cccagaacuggc

SEQ ID NO: 1561475 - RNA, 20 nt, Human adenovirus D
gucucgcacucgacgagcca

SEQ ID NO: 1561476 - RNA, 22 nt, Human adenovirus D
ucacacuacacagcuagacacc

SEQ ID NO: 1561477 - RNA, 20 nt, Human adenovirus D
caugaaguucaauggagaga

SEQ ID NO: 1561478 - RNA, 12 nt, Human adenovirus D
aggcccagcagc

SEQ ID NO: 1561479 - RNA, 21 nt, Human adenovirus D
guccucugaaaagucauccaa

SEQ ID NO: 1561480 - RNA, 21 nt, Human adenovirus D
caggggcucguuaguccagca

SEQ ID NO: 1561481 - RNA, 23 nt, Human adenovirus D
cgagcucaaccucuucucgccgc

SEQ ID NO: 1561482 - RNA, 16 nt, Human adenovirus D
gcgucgcugaaagcau

SEQ ID NO: 1561483 - RNA, 16 nt, Human adenovirus D
cgcucucguuccagac

SEQ ID NO: 1561484 - RNA, 15 nt, Human adenovirus D
cgcugcugcagccgc

SEQ ID NO: 1561485 - RNA, 17 nt, Human adenovirus D
ugcaacaugaccaagga

SEQ ID NO: 1561486 - RNA, 19 nt, Human adenovirus D
caguccaaccuggaccggc

SEQ ID NO: 1561487 - RNA, 21 nt, Human adenovirus D
cggcaguuucgcacgccucgc

SEQ ID NO: 1561488 - RNA, 19 nt, Human adenovirus D
cccauggacgggaacccca

SEQ ID NO: 1561489 - RNA, 14 nt, Human adenovirus D
ggccgagaccguga

SEQ ID NO: 1561490 - RNA, 14 nt, Human adenovirus D
ucaucuugcacagu

SEQ ID NO: 1561491 - RNA, 23 nt, Human adenovirus D
acggcaugggaugcgugagggcg

SEQ ID NO: 1561492 - RNA, 14 nt, Human adenovirus D
agauggugggccgu

SEQ ID NO: 1561493 - RNA, 19 nt, Human adenovirus D
ugcaccuguggagggcaug

SEQ ID NO: 1561494 - RNA, 17 nt, Human adenovirus D
ugagaccaaguccaggg

SEQ ID NO: 1561495 - RNA, 13 nt, Human adenovirus D
caguaguccagcg

SEQ ID NO: 1561496 - RNA, 18 nt, Human adenovirus D
cggccgcggcgagcggga

SEQ ID NO: 1561497 - RNA, 17 nt, Human adenovirus D
cagcauugucugccugg

SEQ ID NO: 1561498 - RNA, 12 nt, Human adenovirus D
gcuggccagcac

SEQ ID NO: 1561499 - RNA, 18 nt, Human adenovirus D
ucccucgggccccggggc

SEQ ID NO: 1561500 - RNA, 13 nt, Human adenovirus D
ccgcagcucuucc

SEQ ID NO: 1561501 - RNA, 19 nt, Human adenovirus D
cucugccacacauggcaag

SEQ ID NO: 1561502 - RNA, 16 nt, Human adenovirus D
accgccgccggcggcg

SEQ ID NO: 1561503 - RNA, 16 nt, Human adenovirus D
acaaggcccugggcau

SEQ ID NO: 1561504 - RNA, 15 nt, Human adenovirus D
agcgccaacagcagc

SEQ ID NO: 1561505 - RNA, 18 nt, Human adenovirus D
uugagaauaacaugcuga

SEQ ID NO: 1561506 - RNA, 21 nt, Human adenovirus D
gcgagcugaugcugagccugc

SEQ ID NO: 1561507 - RNA, 18 nt, Human adenovirus D
gccucggaguaccugagc

SEQ ID NO: 1561508 - RNA, 14 nt, Human adenovirus D
ucuuuccagcagca

SEQ ID NO: 1561509 - RNA, 19 nt, Human adenovirus D
ugagcgggcucuuccuccg

SEQ ID NO: 1561510 - RNA, 22 nt, Human adenovirus D
ggccaccucgccgcgcaggggc

SEQ ID NO: 1561511 - RNA, 21 nt, Human adenovirus D
gauucaauaagguucugcccu

SEQ ID NO: 1561512 - RNA, 22 nt, Human adenovirus D
aagucacuuaaguccugggcca

SEQ ID NO: 1561513 - RNA, 19 nt, Human adenovirus D
acccagaucccgccggggg

SEQ ID NO: 1561514 - RNA, 23 nt, Human adenovirus D
agucgaggucagcagcaagagcu

SEQ ID NO: 1561515 - RNA, 16 nt, Human adenovirus D
agugauuggggaaccu

SEQ ID NO: 1561516 - RNA, 12 nt, Human adenovirus D
ccggcugaugcc

SEQ ID NO: 1561517 - RNA, 16 nt, Human adenovirus D
cacuggagcacagacc

SEQ ID NO: 1561518 - RNA, 19 nt, Human adenovirus D
uaucaugcaacuuggaagg

SEQ ID NO: 1561519 - RNA, 14 nt, Human adenovirus D
gcgugcagcugcag

SEQ ID NO: 1561520 - RNA, 20 nt, Human adenovirus D
gcggcagcuuuuugagcucc

SEQ ID NO: 1561521 - RNA, 22 nt, Human adenovirus D
ccagcagcagcaguagccccuc

SEQ ID NO: 1561522 - RNA, 18 nt, Human adenovirus D
aaagcaguucacuagccu

SEQ ID NO: 1561523 - RNA, 15 nt, Human adenovirus D
ugacucggcugagcu

SEQ ID NO: 1561524 - RNA, 14 nt, Human adenovirus D
gcgcuggcuuggua

SEQ ID NO: 1561525 - RNA, 19 nt, Human adenovirus D
ggucucccccagcaugccg

SEQ ID NO: 1561526 - RNA, 19 nt, Human adenovirus D
cauccuggaccaggcggca

SEQ ID NO: 1561527 - RNA, 19 nt, Human adenovirus D
guaaagaaacagaacaaaa

SEQ ID NO: 1561528 - RNA, 17 nt, Human adenovirus D
gcggccguucaugggca

SEQ ID NO: 1561529 - RNA, 18 nt, Human adenovirus D
cgcaaccaggaggagcuc

SEQ ID NO: 1561530 - RNA, 15 nt, Human adenovirus D
gcagccgcggcagcc

SEQ ID NO: 1561531 - RNA, 17 nt, Human adenovirus D
auggccuggagcagaua

SEQ ID NO: 1561532 - RNA, 21 nt, Human adenovirus D
gacgcagccggcgaacgugcc

SEQ ID NO: 1561533 - RNA, 17 nt, Human adenovirus D
gcagugucucgaggacg

SEQ ID NO: 1561534 - RNA, 18 nt, Human adenovirus D
cacagcaguccaugccca

SEQ ID NO: 1561535 - RNA, 14 nt, Human adenovirus D
ucacagucuggugg

SEQ ID NO: 1561536 - RNA, 21 nt, Human adenovirus D
acaguuauaccaccuccuccu

SEQ ID NO: 1561537 - RNA, 18 nt, Human adenovirus D
auccuugcagacuuuagc

SEQ ID NO: 1561538 - RNA, 15 nt, Human adenovirus D
ucccaccgcgccgcc

SEQ ID NO: 1561539 - RNA, 15 nt, Human adenovirus D
ugcgaguuggaggag

SEQ ID NO: 1561540 - RNA, 16 nt, Human adenovirus D
caaucgccacaggugc

SEQ ID NO: 1561541 - RNA, 16 nt, Human adenovirus D
cguguaccgcaacgac

SEQ ID NO: 1561542 - RNA, 18 nt, Human adenovirus D
ccugcaggggcgucccgc

SEQ ID NO: 1561543 - RNA, 16 nt, Human adenovirus D
uacaacgcccugcugg

SEQ ID NO: 1561544 - RNA, 21 nt, Human adenovirus D
cucaggaccauagggagccug

SEQ ID NO: 1561545 - RNA, 19 nt, Human adenovirus D
ggcgcugcaaagccagccg

SEQ ID NO: 1561546 - RNA, 21 nt, Human adenovirus D
cagagauggacuuggaagagg

SEQ ID NO: 1561547 - RNA, 13 nt, Human adenovirus D
ucuaccugcgcac

SEQ ID NO: 1561548 - RNA, 12 nt, Human adenovirus D
cgacuguagggc

SEQ ID NO: 1561549 - RNA, 21 nt, Human adenovirus D
gaucaucuccccgcggcggcg

SEQ ID NO: 1561550 - RNA, 19 nt, Human adenovirus D
ucggcgcuuggugggcaga

SEQ ID NO: 1561551 - RNA, 20 nt, Human adenovirus D
ccgcgcgggagccaggucca

SEQ ID NO: 1561552 - RNA, 15 nt, Human adenovirus D
guucugggucaccuu

SEQ ID NO: 1561553 - RNA, 22 nt, Human adenovirus D
gcagccgugaucccacagggca

SEQ ID NO: 1561554 - RNA, 16 nt, Human adenovirus D
accuugcuuccacacu

SEQ ID NO: 1561555 - RNA, 17 nt, Human adenovirus D
aguuuacccugcccgag

SEQ ID NO: 1561556 - RNA, 20 nt, Human adenovirus D
gaugccggcagcgguggugg

SEQ ID NO: 1561557 - RNA, 19 nt, Human adenovirus D
gccgacccguggccccggg

SEQ ID NO: 1561558 - RNA, 22 nt, Human adenovirus D
gcugccgcuggacgagagcaau

SEQ ID NO: 1561559 - RNA, 15 nt, Human adenovirus D
ggucgucgccccgga

SEQ ID NO: 1561560 - RNA, 20 nt, Human adenovirus D
gacucgcugcugcagccgcc

SEQ ID NO: 1561561 - RNA, 14 nt, Human adenovirus D
gagggcauggguca

SEQ ID NO: 1561562 - RNA, 17 nt, Human adenovirus D
cgcgcucgcgcaccugc

SEQ ID NO: 1561563 - RNA, 22 nt, Human adenovirus D
cuccgagcagcgcauccugcaa

SEQ ID NO: 1561564 - RNA, 15 nt, Human adenovirus D
aucaagacaaaauuc

SEQ ID NO: 1561565 - RNA, 22 nt, Human adenovirus D
ugaagagaaucuugccugcucg

SEQ ID NO: 1561566 - RNA, 17 nt, Human adenovirus D
caggucaaaacccacuc

SEQ ID NO: 1561567 - RNA, 18 nt, Human adenovirus D
gucacuuaaguccugggc

SEQ ID NO: 1561568 - RNA, 20 nt, Human adenovirus D
cacuuucauaaucaggcaga

SEQ ID NO: 1561569 - RNA, 19 nt, Human adenovirus D
guauaaguguaagagcaag

SEQ ID NO: 1561570 - RNA, 22 nt, Human adenovirus D
cgcuccaugaaccggcgcacgu

SEQ ID NO: 1561571 - RNA, 18 nt, Human adenovirus D
auucagggugcuccagcc

SEQ ID NO: 1561572 - RNA, 19 nt, Human adenovirus D
gugaggguguccuggaagu

SEQ ID NO: 1561573 - RNA, 15 nt, Human adenovirus D
aggagcaggaggagg

SEQ ID NO: 1561574 - RNA, 16 nt, Human adenovirus D
aggagcgaugggggca

SEQ ID NO: 1561575 - RNA, 22 nt, Human adenovirus D
cggcacccgguacuacgccagc

SEQ ID NO: 1561576 - RNA, 18 nt, Human adenovirus D
gcugauugcucuggccug

SEQ ID NO: 1561577 - RNA, 17 nt, Human adenovirus D
agaccgacgcugggcuc

SEQ ID NO: 1561578 - RNA, 20 nt, Human adenovirus D
cggcguaguugcgcaggcgc

SEQ ID NO: 1561579 - RNA, 15 nt, Human adenovirus D
cauccuggaccaggc

SEQ ID NO: 1561580 - RNA, 18 nt, Human adenovirus D
aucauuauuuucauaugc

SEQ ID NO: 1561581 - RNA, 19 nt, Human adenovirus D
augaccaugcagacucugc

SEQ ID NO: 1561582 - RNA, 15 nt, Human adenovirus D
gcgucgacggggaag

SEQ ID NO: 1561583 - RNA, 15 nt, Human adenovirus D
aaagaaacagcagag

SEQ ID NO: 1561584 - RNA, 21 nt, Human adenovirus D
ggcggaccugcauuggcagcc

SEQ ID NO: 1561585 - RNA, 15 nt, Human adenovirus D
guagagguagcggga

SEQ ID NO: 1561586 - RNA, 18 nt, Human adenovirus D
agcaggguaaagccagca

SEQ ID NO: 1561587 - RNA, 13 nt, Human adenovirus D
cgggccuacgagc

SEQ ID NO: 1561588 - RNA, 23 nt, Human adenovirus D
gacgcggcgguugacauccugga

SEQ ID NO: 1561589 - RNA, 20 nt, Human adenovirus D
cugccgcugcaaccugugcu

SEQ ID NO: 1561590 - RNA, 13 nt, Human adenovirus D
gcucagcugccau

SEQ ID NO: 1561591 - RNA, 14 nt, Human adenovirus D
gugaugccuuccaa

SEQ ID NO: 1561592 - RNA, 21 nt, Human adenovirus D
agcagacggugaagcaggagc

SEQ ID NO: 1561593 - RNA, 16 nt, Human adenovirus D
auaggccaggcgcagg

SEQ ID NO: 1561594 - RNA, 23 nt, Human adenovirus D
cgcagugcacgggcaucagcauc

SEQ ID NO: 1561595 - RNA, 17 nt, Human adenovirus D
aggaucauaucccaggg

SEQ ID NO: 1561596 - RNA, 22 nt, Human adenovirus D
uagugggcguggcuaaggugac

SEQ ID NO: 1561597 - RNA, 13 nt, Human adenovirus D
auuugaaaccacu

SEQ ID NO: 1561598 - RNA, 17 nt, Human adenovirus D
cacugaaaauuugcaaa

SEQ ID NO: 1561599 - RNA, 11 nt, Human adenovirus D
cagaacaaaaa

SEQ ID NO: 1561600 - RNA, 17 nt, Human adenovirus D
caccucaacgcccaggc

SEQ ID NO: 1561601 - RNA, 20 nt, Human adenovirus D
ccucgagcuacaugcccagc

SEQ ID NO: 1561602 - RNA, 15 nt, Human adenovirus D
cugcaacccccagcu

SEQ ID NO: 1561603 - RNA, 14 nt, Human adenovirus D
uuuaauuggcaaac

SEQ ID NO: 1561604 - RNA, 14 nt, Human adenovirus D
gcggccgcggccag

SEQ ID NO: 1561605 - RNA, 16 nt, Human adenovirus D
cugaaccgcuggaaga

SEQ ID NO: 1561606 - RNA, 21 nt, Human adenovirus D
cgcuccaugcuucugggcaac

SEQ ID NO: 1561607 - RNA, 12 nt, Human adenovirus D
accuccugggca

SEQ ID NO: 1561608 - RNA, 19 nt, Human adenovirus D
ggaggcggugcgcacgccc

SEQ ID NO: 1561609 - RNA, 20 nt, Human adenovirus D
ccugcagcccaaacuggggc

SEQ ID NO: 1561610 - RNA, 18 nt, Human adenovirus D
gaagagccggcucgucua

SEQ ID NO: 1561611 - RNA, 23 nt, Human adenovirus D
acuugcaaacaauaaaaaacuug

SEQ ID NO: 1561612 - RNA, 19 nt, Human adenovirus D
ggucaucaccuuccugcag

SEQ ID NO: 1561613 - RNA, 15 nt, Human adenovirus D
gucgaggagaccugc

SEQ ID NO: 1561614 - RNA, 21 nt, Human adenovirus D
aacuacuugcaaguggggcgg

SEQ ID NO: 1561615 - RNA, 22 nt, Human adenovirus D
gaacuccucuaucucgccuggu

SEQ ID NO: 1561616 - RNA, 13 nt, Human adenovirus D
gcccgagggcaac

SEQ ID NO: 1561617 - RNA, 13 nt, Human adenovirus D
gaaaauuugcaaa

SEQ ID NO: 1561618 - RNA, 14 nt, Human adenovirus D
uugggaagaacugg

SEQ ID NO: 1561619 - RNA, 18 nt, Human adenovirus D
guagacaaagagcacagc

SEQ ID NO: 1561620 - RNA, 14 nt, Human adenovirus D
ucccggccaaggcc

SEQ ID NO: 1561621 - RNA, 20 nt, Human adenovirus D
aaccugagccaggcuuucaa

SEQ ID NO: 1561622 - RNA, 23 nt, Human adenovirus D
acagcaccgccgcagccgcggca

SEQ ID NO: 1561623 - RNA, 15 nt, Human adenovirus D
ucagccauagcucag

SEQ ID NO: 1561624 - RNA, 18 nt, Human adenovirus D
gacccaggaauggcacgc

SEQ ID NO: 1561625 - RNA, 20 nt, Human adenovirus D
gcuagaaaacacccacaggg

SEQ ID NO: 1561626 - RNA, 17 nt, Human adenovirus D
gguagagcggccagcgc

SEQ ID NO: 1561627 - RNA, 15 nt, Human adenovirus D
cgagaccagaggcag

SEQ ID NO: 1561628 - RNA, 13 nt, Human adenovirus D
gcaacuuccagcc

SEQ ID NO: 1561629 - RNA, 14 nt, Human adenovirus D
cauagucaucaccc

SEQ ID NO: 1561630 - RNA, 13 nt, Human adenovirus D
cggcgggccaugc

SEQ ID NO: 1561631 - RNA, 20 nt, Human adenovirus D
ccccaucccggccaaggcca

SEQ ID NO: 1561632 - RNA, 21 nt, Human adenovirus D
gaagggcucggucgggacgag

SEQ ID NO: 1561633 - RNA, 16 nt, Human adenovirus D
caacuggucuccugcc

SEQ ID NO: 1561634 - RNA, 23 nt, Human adenovirus D
caaaaucgagcaggaccugggcu

SEQ ID NO: 1561635 - RNA, 22 nt, Human adenovirus D
uaccccgguucgaguccccucg

SEQ ID NO: 1561636 - RNA, 17 nt, Human adenovirus D
auccugaucucugccau

SEQ ID NO: 1561637 - RNA, 13 nt, Human adenovirus D
agagcgagauguc

SEQ ID NO: 1561638 - RNA, 18 nt, Human adenovirus D
aguaaauuugacacagca

SEQ ID NO: 1561639 - RNA, 20 nt, Human adenovirus D
uucucacaguaagugcagca

SEQ ID NO: 1561640 - RNA, 18 nt, Human adenovirus D
cugagauaugugcagcag

SEQ ID NO: 1561641 - RNA, 17 nt, Human adenovirus D
guaaagccagcagcaca

SEQ ID NO: 1561642 - RNA, 16 nt, Human adenovirus D
ccuggcgacgcagccg

SEQ ID NO: 1561643 - RNA, 17 nt, Human adenovirus D
ucaccuuccugcagcuc

SEQ ID NO: 1561644 - RNA, 16 nt, Human adenovirus D
ucaggagcgcagccug

SEQ ID NO: 1561645 - RNA, 17 nt, Human adenovirus D
cauccacaaggccguga

SEQ ID NO: 1561646 - RNA, 13 nt, Human adenovirus D
ccgcccugagcuc

SEQ ID NO: 1561647 - RNA, 14 nt, Human adenovirus D
ggcgcguggaggaa

SEQ ID NO: 1561648 - RNA, 17 nt, Human adenovirus D
cuacgucuacaaggccc

SEQ ID NO: 1561649 - RNA, 20 nt, Human adenovirus D
cagauccugcugcuccacca

SEQ ID NO: 1561650 - RNA, 20 nt, Human adenovirus D
ccguccgcccgcgcccacca

SEQ ID NO: 1561651 - RNA, 21 nt, Human adenovirus D
gaugcaugcggggggagauga

SEQ ID NO: 1561652 - RNA, 16 nt, Human adenovirus D
auggacuuggaagagg

SEQ ID NO: 1561653 - RNA, 17 nt, Human adenovirus D
gaagugcggcggcggcu

SEQ ID NO: 1561654 - RNA, 22 nt, Human adenovirus D
cugcagcaggugcugccccagg

SEQ ID NO: 1561655 - RNA, 13 nt, Human adenovirus D
cgccgcuaucugc

SEQ ID NO: 1561656 - RNA, 14 nt, Human adenovirus D
ccaacggcugcauc

SEQ ID NO: 1561657 - RNA, 12 nt, Human adenovirus D
ucggacuggguu

SEQ ID NO: 1561658 - RNA, 20 nt, Human adenovirus D
acaggccgcagcucuucccg

SEQ ID NO: 1561659 - RNA, 21 nt, Human adenovirus D
uaaaucauuggaacuaaucau

SEQ ID NO: 1561660 - RNA, 13 nt, Human adenovirus D
ccucggcggcgug

SEQ ID NO: 1561661 - RNA, 12 nt, Human adenovirus D
gccgcggccaga

SEQ ID NO: 1561662 - RNA, 15 nt, Human adenovirus D
ggaauuaccucaucg

SEQ ID NO: 1561663 - RNA, 12 nt, Human adenovirus D
cgcgccacuccc

SEQ ID NO: 1561664 - RNA, 20 nt, Human adenovirus D
auaagacauuuuaaugaauu

SEQ ID NO: 1561665 - RNA, 14 nt, Human adenovirus D
gcggucgcgguggg

SEQ ID NO: 1561666 - RNA, 12 nt, Human adenovirus D
gucugugccucu

SEQ ID NO: 1561667 - RNA, 18 nt, Human adenovirus D
caucaccuuccugcagcu

SEQ ID NO: 1561668 - RNA, 12 nt, Human adenovirus D
acauguggagcu

SEQ ID NO: 1561669 - RNA, 13 nt, Human adenovirus D
cugcuggagcuga

SEQ ID NO: 1561670 - RNA, 17 nt, Human adenovirus D
gugcuggaggguugaaa

SEQ ID NO: 1561671 - RNA, 17 nt, Human adenovirus D
cgggccgccgggccaug

SEQ ID NO: 1561672 - RNA, 21 nt, Human adenovirus D
caagugccacaugcaccuggg

SEQ ID NO: 1561673 - RNA, 20 nt, Human adenovirus D
gccccugcaagugcacagac

SEQ ID NO: 1561674 - RNA, 15 nt, Human adenovirus D
gcacuggagcacaga

SEQ ID NO: 1561675 - RNA, 20 nt, Human adenovirus D
aggggagugaagagggagag

SEQ ID NO: 1561676 - RNA, 14 nt, Human adenovirus D
gaagaacaggagcc

SEQ ID NO: 1561677 - RNA, 15 nt, Human adenovirus D
cgcucgcgcaccugc

SEQ ID NO: 1561678 - RNA, 16 nt, Human adenovirus D
ccugggcgccagaagg

SEQ ID NO: 1561679 - RNA, 21 nt, Human adenovirus D
cggucgacggugagcagcuug

SEQ ID NO: 1561680 - RNA, 16 nt, Human adenovirus D
cguccgucagcagcag

SEQ ID NO: 1561681 - RNA, 20 nt, Human adenovirus D
augcggggggagaugaugug

SEQ ID NO: 1561682 - RNA, 23 nt, Human adenovirus D
gaacaacgauuucacccccgccg

SEQ ID NO: 1561683 - RNA, 18 nt, Human adenovirus D
agcucgucuuccaggagc

SEQ ID NO: 1561684 - RNA, 15 nt, Human adenovirus D
ucgggccccggggcg

SEQ ID NO: 1561685 - RNA, 20 nt, Human adenovirus D
ggcccugcuggccgagcugg

SEQ ID NO: 1561686 - RNA, 24 nt, Human adenovirus D
cccagaacuggcagagcacgcugc

SEQ ID NO: 1561687 - RNA, 16 nt, Human adenovirus D
gcuaccugggaggaga

SEQ ID NO: 1561688 - RNA, 19 nt, Human adenovirus D
ucuuacgagggucuuuuug

SEQ ID NO: 1561689 - RNA, 15 nt, Human adenovirus D
gccaccuucuucccc

SEQ ID NO: 1561690 - RNA, 14 nt, Human adenovirus D
gcagaagguggugg

SEQ ID NO: 1561691 - RNA, 14 nt, Human adenovirus D
accggcagcggggc

SEQ ID NO: 1561692 - RNA, 23 nt, Human adenovirus D
ccuugucguacuucugccagcag

SEQ ID NO: 1561693 - RNA, 19 nt, Human adenovirus D
ucguccagaugcucuccca

SEQ ID NO: 1561694 - RNA, 12 nt, Human adenovirus D
gggcccgacucc

SEQ ID NO: 1561695 - RNA, 14 nt, Human adenovirus D
gaccacguccccgu

SEQ ID NO: 1561696 - RNA, 19 nt, Human adenovirus D
cugcagaguucccucggca

SEQ ID NO: 1561697 - RNA, 22 nt, Human adenovirus D
gcgcgguaggcccugguccacc

SEQ ID NO: 1561698 - RNA, 21 nt, Human adenovirus D
ggccuggagcagauaaaaacc

SEQ ID NO: 1561699 - RNA, 19 nt, Human adenovirus D
cuucuuccgcaacuuccag

SEQ ID NO: 1561700 - RNA, 21 nt, Human adenovirus D
auccacaaggccgugagcgcg

SEQ ID NO: 1561701 - RNA, 14 nt, Human adenovirus D
cacgagaaggugcu

SEQ ID NO: 1561702 - RNA, 22 nt, Human adenovirus D
ccugcgcgucgacggcgccucc

SEQ ID NO: 1561703 - RNA, 17 nt, Human adenovirus D
ucuuuaugaacaugaag

SEQ ID NO: 1561704 - RNA, 12 nt, Human adenovirus D
agccgccagcug

SEQ ID NO: 1561705 - RNA, 19 nt, Human adenovirus D
caaaauggcgugcuggaga

SEQ ID NO: 1561706 - RNA, 20 nt, Human adenovirus D
ggagcaggguaaagccagca

SEQ ID NO: 1561707 - RNA, 14 nt, Human adenovirus D
ccgcccugcuggau

SEQ ID NO: 1561708 - RNA, 15 nt, Human adenovirus D
gcgagggcgagaaca

SEQ ID NO: 1561709 - RNA, 15 nt, Human adenovirus D
gcucguucugcccac

SEQ ID NO: 1561710 - RNA, 18 nt, Human adenovirus D
ccccauggacaacgucaa

SEQ ID NO: 1561711 - RNA, 20 nt, Human adenovirus D
uacaagcgccaacagcagcg

SEQ ID NO: 1561712 - RNA, 17 nt, Human adenovirus D
cgagcaggaccugggcu

SEQ ID NO: 1561713 - RNA, 22 nt, Human adenovirus D
cagccgugaucccacagggcac

SEQ ID NO: 1561714 - RNA, 15 nt, Human adenovirus D
cggcggcgggccaug

SEQ ID NO: 1561715 - RNA, 19 nt, Human adenovirus D
ggugacucggcugagcucg

SEQ ID NO: 1561716 - RNA, 14 nt, Human adenovirus D
aggcuggagccgcg

SEQ ID NO: 1561717 - RNA, 21 nt, Human adenovirus D
uccuggaccgcggucccaguu

SEQ ID NO: 1561718 - RNA, 16 nt, Human adenovirus D
auggauuaaaaauauu

SEQ ID NO: 1561719 - RNA, 15 nt, Human adenovirus D
ucuucaacaucugug

SEQ ID NO: 1561720 - RNA, 18 nt, Human adenovirus D
gcgagaccaacggcugca

SEQ ID NO: 1561721 - RNA, 14 nt, Human adenovirus D
cccgcgacccccag

SEQ ID NO: 1561722 - RNA, 14 nt, Human adenovirus D
uguaaauaagucac

SEQ ID NO: 1561723 - RNA, 17 nt, Human adenovirus D
aggcgacaacgccaggc

SEQ ID NO: 1561724 - RNA, 16 nt, Human adenovirus D
ccagaacuuccagcag

SEQ ID NO: 1561725 - RNA, 18 nt, Human adenovirus D
acacuuaguucagcugca

SEQ ID NO: 1561726 - RNA, 20 nt, Human adenovirus D
gagaccggaggcgugcacug

SEQ ID NO: 1561727 - RNA, 14 nt, Human adenovirus D
caaaagaaaacuaa

SEQ ID NO: 1561728 - RNA, 17 nt, Human adenovirus D
cuggcagagcacgcugc

SEQ ID NO: 1561729 - RNA, 12 nt, Human adenovirus D
cuugaacagcau

SEQ ID NO: 1561730 - RNA, 23 nt, Human adenovirus D
ccacgauguaacaucaccacagg

SEQ ID NO: 1561731 - RNA, 18 nt, Human adenovirus D
ggaggagauggugggccg

SEQ ID NO: 1561732 - RNA, 13 nt, Human adenovirus D
agaugcagcaagc

SEQ ID NO: 1561733 - RNA, 21 nt, Human adenovirus D
cugccgguuucgggcgggcag

SEQ ID NO: 1561734 - RNA, 17 nt, Human adenovirus D
cugcuggcccugcuggc

SEQ ID NO: 1561735 - RNA, 17 nt, Human adenovirus D
cuggcggagaacaaggc

SEQ ID NO: 1561736 - RNA, 23 nt, Human adenovirus D
cggccagcgucauguccuuccag

SEQ ID NO: 1561737 - RNA, 22 nt, Human adenovirus D
ccacggguguaaugaaacccgc

SEQ ID NO: 1561738 - RNA, 17 nt, Human adenovirus D
gagaacugcuggcccug

SEQ ID NO: 1561739 - RNA, 19 nt, Human adenovirus D
gcaauaccgggaugaugac

SEQ ID NO: 1561740 - RNA, 23 nt, Human adenovirus D
cccagcagaagcagaaguucacc

SEQ ID NO: 1561741 - RNA, 18 nt, Human adenovirus D
gcacaucgccgggcagga

SEQ ID NO: 1561742 - RNA, 22 nt, Human adenovirus D
ucagagccagggcuaagcgugg

SEQ ID NO: 1561743 - RNA, 23 nt, Human adenovirus D
gaucaccguagagggcaccaccg

SEQ ID NO: 1561744 - RNA, 18 nt, Human adenovirus D
ccucacaguccaggucac

SEQ ID NO: 1561745 - RNA, 14 nt, Human adenovirus D
aagauaucauaaag

SEQ ID NO: 1561746 - RNA, 17 nt, Human adenovirus D
gcgggcuguggggcgug

SEQ ID NO: 1561747 - RNA, 11 nt, Human adenovirus D
accaaccagac

SEQ ID NO: 1561748 - RNA, 16 nt, Human adenovirus D
ccacucuauuuucaag

SEQ ID NO: 1561749 - RNA, 22 nt, Human adenovirus D
ccgccaucgaacacgccaccgc

SEQ ID NO: 1561750 - RNA, 14 nt, Human adenovirus D
ccaccgacacguac

SEQ ID NO: 1561751 - RNA, 21 nt, Human adenovirus D
gcccauuucacaguguacacg

SEQ ID NO: 1561752 - RNA, 15 nt, Human adenovirus D
uucauugucuucccu

SEQ ID NO: 1561753 - RNA, 15 nt, Human adenovirus D
gauuggccuguccug

SEQ ID NO: 1561754 - RNA, 17 nt, Human adenovirus D
caauucagagccagggc

SEQ ID NO: 1561755 - RNA, 15 nt, Human adenovirus D
cuaaacuaaagccaa

SEQ ID NO: 1561756 - RNA, 20 nt, Human adenovirus D
gcaugguuucggugacggcg

SEQ ID NO: 1561757 - RNA, 17 nt, Human adenovirus D
ugccaggaugggccgga

SEQ ID NO: 1561758 - RNA, 16 nt, Human adenovirus D
ccauccgcgccgcagc

SEQ ID NO: 1561759 - RNA, 13 nt, Human adenovirus D
augcaccugggcg

SEQ ID NO: 1561760 - RNA, 20 nt, Human adenovirus D
cgcggccguucaugggcacc

SEQ ID NO: 1561761 - RNA, 23 nt, Human adenovirus D
gggacucacccuggggcuccucg

SEQ ID NO: 1561762 - RNA, 17 nt, Human adenovirus D
cgcuccaccgaaggcag

SEQ ID NO: 1561763 - RNA, 17 nt, Human adenovirus D
auccccuucuccagcaa

SEQ ID NO: 1561764 - RNA, 15 nt, Human adenovirus D
ugaccagacccaggc

SEQ ID NO: 1561765 - RNA, 18 nt, Human adenovirus D
gggcguggugcuggauga

SEQ ID NO: 1561766 - RNA, 14 nt, Human adenovirus D
gcccgucgccgcac

SEQ ID NO: 1561767 - RNA, 18 nt, Human adenovirus D
ggcgcgcccggggccagg

SEQ ID NO: 1561768 - RNA, 14 nt, Human adenovirus D
aaaacugcaugcug

SEQ ID NO: 1561769 - RNA, 16 nt, Human adenovirus D
gcccggggccaggucc

SEQ ID NO: 1561770 - RNA, 16 nt, Human adenovirus D
ucuucucccacagcuc

SEQ ID NO: 1561771 - RNA, 14 nt, Human adenovirus D
uccgcaacuuccag

SEQ ID NO: 1561772 - RNA, 16 nt, Human adenovirus D
accagaacuuccagca

SEQ ID NO: 1561773 - RNA, 17 nt, Human adenovirus D
ucaaucucccaccacca

SEQ ID NO: 1561774 - RNA, 14 nt, Human adenovirus D
cacccugcccuucc

SEQ ID NO: 1561775 - RNA, 14 nt, Human adenovirus D
ucaucgacuggugc

SEQ ID NO: 1561776 - RNA, 19 nt, Human adenovirus D
cccaggaaacuaggcgcag

SEQ ID NO: 1561777 - RNA, 12 nt, Human adenovirus D
cagcugcagaag

SEQ ID NO: 1561778 - RNA, 23 nt, Human adenovirus D
cagcaugaaggggacgagcugcu

SEQ ID NO: 1561779 - RNA, 18 nt, Human adenovirus D
gugccuuaccgccagaga

SEQ ID NO: 1561780 - RNA, 21 nt, Human adenovirus D
accucauuugcauauuaacuu

SEQ ID NO: 1561781 - RNA, 22 nt, Human adenovirus D
cugcaaacggugaaccugagcc

SEQ ID NO: 1561782 - RNA, 12 nt, Human adenovirus D
ccugaucagaaa

SEQ ID NO: 1561783 - RNA, 23 nt, Human adenovirus D
aagaccauucugcacaccaacau

SEQ ID NO: 1561784 - RNA, 13 nt, Human adenovirus D
cgccaggcuggcc

SEQ ID NO: 1561785 - RNA, 15 nt, Human adenovirus D
gacuccgcgaccucc

SEQ ID NO: 1561786 - RNA, 15 nt, Human adenovirus D
agguguuggcaaagc

SEQ ID NO: 1561787 - RNA, 13 nt, Human adenovirus D
uuaguccagcaga

SEQ ID NO: 1561788 - RNA, 16 nt, Human adenovirus D
ucaauacauagaccac

SEQ ID NO: 1561789 - RNA, 19 nt, Human adenovirus D
auggcccugacgacccgca

SEQ ID NO: 1561790 - RNA, 17 nt, Human adenovirus D
gcaacgaccggcugcuc

SEQ ID NO: 1561791 - RNA, 22 nt, Human adenovirus D
auuuucauugucuucccucuca

SEQ ID NO: 1561792 - RNA, 19 nt, Human adenovirus D
ggaggccgugaaggccggc

SEQ ID NO: 1561793 - RNA, 16 nt, Human adenovirus D
guguaccgcaacgacc

SEQ ID NO: 1561794 - RNA, 17 nt, Human adenovirus D
uuuaaaauaaaacuucu

SEQ ID NO: 1561795 - RNA, 22 nt, Human adenovirus D
uugacuuccggguucccacguu

SEQ ID NO: 1561796 - RNA, 15 nt, Human adenovirus D
cacaguaaguuccug

SEQ ID NO: 1561797 - RNA, 17 nt, Human adenovirus D
cugguacuugggcugcc

SEQ ID NO: 1561798 - RNA, 22 nt, Human adenovirus D
agcaaggugcugacauccaugg

SEQ ID NO: 1561799 - RNA, 16 nt, Human adenovirus D
ccgcugucucagccuc

SEQ ID NO: 1561800 - RNA, 15 nt, Human adenovirus D
ggcacccacgacaca

SEQ ID NO: 1561801 - RNA, 17 nt, Human adenovirus D
agccgcaggcgcccagc

SEQ ID NO: 1561802 - RNA, 14 nt, Human adenovirus D
agcugggcugggac

SEQ ID NO: 1561803 - RNA, 17 nt, Human adenovirus D
ggcacuggagcacagac

SEQ ID NO: 1561804 - RNA, 14 nt, Human adenovirus D
cguggcuucgagca

SEQ ID NO: 1561805 - RNA, 20 nt, Human adenovirus D
cgguccucggucaggagcaa

SEQ ID NO: 1561806 - RNA, 16 nt, Human adenovirus D
ugucaaauuccugguc

SEQ ID NO: 1561807 - RNA, 20 nt, Human adenovirus D
gcuccguuguacgacaccac

SEQ ID NO: 1561808 - RNA, 21 nt, Human adenovirus D
acgcugaaaggcgggcugccc

SEQ ID NO: 1561809 - RNA, 20 nt, Human adenovirus D
cagccgcguaagcaggagca

SEQ ID NO: 1561810 - RNA, 14 nt, Human adenovirus D
cuggacccgcggcc

SEQ ID NO: 1561811 - RNA, 20 nt, Human adenovirus D
gccggcgacaagcuggccug

SEQ ID NO: 1561812 - RNA, 16 nt, Human adenovirus D
guggcgcucgggcagg

SEQ ID NO: 1561813 - RNA, 17 nt, Human adenovirus D
ggcgguuccggccccgc

SEQ ID NO: 1561814 - RNA, 16 nt, Human adenovirus D
gcacguggcggcggcc

SEQ ID NO: 1561815 - RNA, 11 nt, Human adenovirus D
uggugcccaag

SEQ ID NO: 1561816 - RNA, 15 nt, Human adenovirus D
aggaagugcuggaca

SEQ ID NO: 1561817 - RNA, 13 nt, Human adenovirus D
aauuucaagcugg

SEQ ID NO: 1561818 - RNA, 22 nt, Human adenovirus D
gcagcacaguaaguuccugucu

SEQ ID NO: 1561819 - RNA, 19 nt, Human adenovirus D
auugcuucccuggaagagu

SEQ ID NO: 1561820 - RNA, 14 nt, Human adenovirus D
ccgcaacuuccagc

SEQ ID NO: 1561821 - RNA, 21 nt, Human adenovirus D
ccgucagcagcaggagcgugc

SEQ ID NO: 1561822 - RNA, 17 nt, Human adenovirus D
cgaaucaggcuggagcc

SEQ ID NO: 1561823 - RNA, 13 nt, Human adenovirus D
ucgccgagcccga

SEQ ID NO: 1561824 - RNA, 21 nt, Human adenovirus D
ggacggccgcggcgagcggga

SEQ ID NO: 1561825 - RNA, 17 nt, Human adenovirus D
aucgagcaggaccuggg

SEQ ID NO: 1561826 - RNA, 23 nt, Human adenovirus D
uccacuuucauaaucaggcagac

SEQ ID NO: 1561827 - RNA, 19 nt, Human adenovirus D
gcgggcagggagcugcgcg

SEQ ID NO: 1561828 - RNA, 14 nt, Human adenovirus D
cggagcgaggugug

SEQ ID NO: 1561829 - RNA, 20 nt, Human adenovirus D
ucauagcaggggcgcugggc

SEQ ID NO: 1561830 - RNA, 19 nt, Human adenovirus D
ccaucagcgcccucagcag

SEQ ID NO: 1561831 - RNA, 14 nt, Human adenovirus D
ugugcccgcccagg

SEQ ID NO: 1561832 - RNA, 21 nt, Human adenovirus D
augcggaggaauguggaaaga

SEQ ID NO: 1561833 - RNA, 17 nt, Human adenovirus D
aguaugccaagauagcc

SEQ ID NO: 1561834 - RNA, 16 nt, Human adenovirus D
caugagucuguguccg

SEQ ID NO: 1561835 - RNA, 21 nt, Human adenovirus D
agugccuuuaucagcacugca

SEQ ID NO: 1561836 - RNA, 16 nt, Human adenovirus D
gccgcgccaaccgcac

SEQ ID NO: 1561837 - RNA, 18 nt, Human adenovirus D
auccgcagcuacaccucc

SEQ ID NO: 1561838 - RNA, 14 nt, Human adenovirus D
cagcgcccucagca

SEQ ID NO: 1561839 - RNA, 15 nt, Human adenovirus D
gaaacucagucacuc

SEQ ID NO: 1561840 - RNA, 17 nt, Human adenovirus D
ucgaagccguugauguu

SEQ ID NO: 1561841 - RNA, 22 nt, Human adenovirus D
agcggccugaaccgccgccggc

SEQ ID NO: 1561842 - RNA, 16 nt, Human adenovirus D
acagcauauaccccuc

SEQ ID NO: 1561843 - RNA, 20 nt, Human adenovirus D
gaugucugugaagcagugug

SEQ ID NO: 1561844 - RNA, 12 nt, Human adenovirus D
gggagcgagccc

SEQ ID NO: 1561845 - RNA, 14 nt, Human adenovirus D
acagccagcagcuc

SEQ ID NO: 1561846 - RNA, 16 nt, Human adenovirus D
cccgggucucccccag

SEQ ID NO: 1561847 - RNA, 14 nt, Human adenovirus D
gagcggcuccagcg

SEQ ID NO: 1561848 - RNA, 17 nt, Human adenovirus D
cgguccccgaggcccuu

SEQ ID NO: 1561849 - RNA, 15 nt, Human adenovirus D
gcgcagccugagcuu

SEQ ID NO: 1561850 - RNA, 17 nt, Human adenovirus D
uggacaacgucaacccc

SEQ ID NO: 1561851 - RNA, 14 nt, Human adenovirus D
gcgcgcuggggcag

SEQ ID NO: 1561852 - RNA, 19 nt, Human adenovirus D
gggccugcgcuaccgcucc

SEQ ID NO: 1561853 - RNA, 19 nt, Human adenovirus D
ucgcugaaaaacaggccgc

SEQ ID NO: 1561854 - RNA, 14 nt, Human adenovirus D
gaucgccaggccuc

SEQ ID NO: 1561855 - RNA, 15 nt, Human adenovirus D
aggccauaggccagg

SEQ ID NO: 1561856 - RNA, 15 nt, Human adenovirus D
ccagaaaccccgcaa

SEQ ID NO: 1561857 - RNA, 19 nt, Human adenovirus D
ugggcauagucgcgccgcg

SEQ ID NO: 1561858 - RNA, 20 nt, Human adenovirus D
cacacuagcgcccugguaga

SEQ ID NO: 1561859 - RNA, 16 nt, Human adenovirus D
cugccacacauggcaa

SEQ ID NO: 1561860 - RNA, 23 nt, Human adenovirus D
gugagcucgucuuccaggagccu

SEQ ID NO: 1561861 - RNA, 11 nt, Human adenovirus D
ggaucuucccc

SEQ ID NO: 1561862 - RNA, 22 nt, Human adenovirus D
ccuuacuuucgcucccaccgcg

SEQ ID NO: 1561863 - RNA, 11 nt, Human adenovirus D
caagucaaaag

SEQ ID NO: 1561864 - RNA, 16 nt, Human adenovirus D
ggcggcuuucugcccg

SEQ ID NO: 1561865 - RNA, 14 nt, Human adenovirus D
cuguuggagaacga

SEQ ID NO: 1561866 - RNA, 16 nt, Human adenovirus D
aaugucagcugcaaaa

SEQ ID NO: 1561867 - RNA, 19 nt, Human adenovirus D
ggaucuagaagggggcaac

SEQ ID NO: 1561868 - RNA, 22 nt, Human adenovirus D
gaagauguuaaagugggcgugg

SEQ ID NO: 1561869 - RNA, 13 nt, Human adenovirus D
caugcccuuuucc

SEQ ID NO: 1561870 - RNA, 14 nt, Human adenovirus D
caacaauaaaagac

SEQ ID NO: 1561871 - RNA, 17 nt, Human adenovirus D
cgagggucgcuggcugc

SEQ ID NO: 1561872 - RNA, 23 nt, Human adenovirus D
ccccccucagcgucgaggagcug

SEQ ID NO: 1561873 - RNA, 18 nt, Human adenovirus D
ugacaguucagaaguaaa

SEQ ID NO: 1561874 - RNA, 18 nt, Human adenovirus D
uuccguucuacccagcaa

SEQ ID NO: 1561875 - RNA, 17 nt, Human adenovirus D
gcgcauccccuucucca

SEQ ID NO: 1561876 - RNA, 14 nt, Human adenovirus D
ugagccgccagcug

SEQ ID NO: 1561877 - RNA, 19 nt, Human adenovirus D
ucaacuguuaagaccacua

SEQ ID NO: 1561878 - RNA, 15 nt, Human adenovirus D
guggacgcugcucac

SEQ ID NO: 1561879 - RNA, 23 nt, Human adenovirus D
ugcaccugggcgccagaaggggc

SEQ ID NO: 1561880 - RNA, 13 nt, Human adenovirus D
uaaagaaacagaa

SEQ ID NO: 1561881 - RNA, 14 nt, Human adenovirus D
ugcuggaugauguc

SEQ ID NO: 1561882 - RNA, 20 nt, Human adenovirus D
cuacggagggcagaaacagc

SEQ ID NO: 1561883 - RNA, 17 nt, Human adenovirus D
cacaucggacuggguua

SEQ ID NO: 1561884 - RNA, 18 nt, Human adenovirus D
acagcaggagugcaggga

SEQ ID NO: 1561885 - RNA, 22 nt, Human adenovirus D
gcgaagggcuggcgagacuggg

SEQ ID NO: 1561886 - RNA, 17 nt, Human adenovirus D
uuucugcagacaucaug

SEQ ID NO: 1561887 - RNA, 19 nt, Human adenovirus D
cuacccagcaagucagcaa

SEQ ID NO: 1561888 - RNA, 16 nt, Human adenovirus D
acugcagggagccagg

SEQ ID NO: 1561889 - RNA, 15 nt, Human adenovirus D
gguaagagcccagca

SEQ ID NO: 1561890 - RNA, 20 nt, Human adenovirus D
gacgagacuggccucgagcu

SEQ ID NO: 1561891 - RNA, 13 nt, Human adenovirus D
aaaauuugcaaaa

SEQ ID NO: 1561892 - RNA, 20 nt, Human adenovirus D
cccgcucaccaucugagcuc

SEQ ID NO: 1561893 - RNA, 12 nt, Human adenovirus D
uccccccugggg

SEQ ID NO: 1561894 - RNA, 20 nt, Human adenovirus D
cgugccauccgucacccaga

SEQ ID NO: 1561895 - RNA, 21 nt, Human adenovirus D
cagagccagggcuaagcgugg

SEQ ID NO: 1561896 - RNA, 14 nt, Human adenovirus D
ucuugcaugccuuc

SEQ ID NO: 1561897 - RNA, 15 nt, Human adenovirus D
ggcgugcuggagagc

SEQ ID NO: 1561898 - RNA, 16 nt, Human adenovirus D
auuucuuagacugcua

SEQ ID NO: 1561899 - RNA, 19 nt, Human adenovirus D
cacagagagccgccugagc

SEQ ID NO: 1561900 - RNA, 13 nt, Human adenovirus D
cucucucuucuug

SEQ ID NO: 1561901 - RNA, 17 nt, Human adenovirus D
cucggaguaccugagcc

SEQ ID NO: 1561902 - RNA, 21 nt, Human adenovirus D
ggcccucgaugaaagucagga

SEQ ID NO: 1561903 - RNA, 22 nt, Human adenovirus D
ugcuguggucgacuugcaagac

SEQ ID NO: 1561904 - RNA, 18 nt, Human adenovirus D
ggcccugcuggccgagcu

SEQ ID NO: 1561905 - RNA, 21 nt, Human adenovirus D
ggcgaguuugccuacgggaag

SEQ ID NO: 1561906 - RNA, 13 nt, Human adenovirus D
ggcggugcugcug

SEQ ID NO: 1561907 - RNA, 14 nt, Human adenovirus D
cugacgcugagcga

SEQ ID NO: 1561908 - RNA, 16 nt, Human adenovirus D
acagcgacgagacugg

SEQ ID NO: 1561909 - RNA, 22 nt, Human adenovirus D
cagcugacaauucagagccagg

SEQ ID NO: 1561910 - RNA, 21 nt, Human adenovirus D
cugauauugcuucccuggaag

SEQ ID NO: 1561911 - RNA, 20 nt, Human adenovirus D
gaggcccaucuacaggccag

SEQ ID NO: 1561912 - RNA, 23 nt, Human adenovirus D
caagcagguggcgccgggccugg

SEQ ID NO: 1561913 - RNA, 22 nt, Human adenovirus D
uugaagucaugugugauaucac

SEQ ID NO: 1561914 - RNA, 15 nt, Human adenovirus D
uggaggcgcgcggga

SEQ ID NO: 1561915 - RNA, 19 nt, Human adenovirus D
uaagcaggagcaggaggag

SEQ ID NO: 1561916 - RNA, 20 nt, Human adenovirus D
uucucuuacugaaacucagu

SEQ ID NO: 1561917 - RNA, 23 nt, Human adenovirus D
uccagcagcaggguacccacugg

SEQ ID NO: 1561918 - RNA, 23 nt, Human adenovirus D
gagauagcaguugaccaugagcu

SEQ ID NO: 1561919 - RNA, 20 nt, Human adenovirus D
gcgccgcggcgacagcgcca

SEQ ID NO: 1561920 - RNA, 17 nt, Human adenovirus D
uacugccacugccaaca

SEQ ID NO: 1561921 - RNA, 22 nt, Human adenovirus D
ggcacucagguugucaguuucu

SEQ ID NO: 1561922 - RNA, 16 nt, Human adenovirus D
cccacuacucagcuuc

SEQ ID NO: 1561923 - RNA, 20 nt, Human adenovirus D
caucgugcgcgaccugggcu

SEQ ID NO: 1561924 - RNA, 21 nt, Human adenovirus D
gugauggcgcaggcgacccug

SEQ ID NO: 1561925 - RNA, 16 nt, Human adenovirus D
acgugccgcgcgggca

SEQ ID NO: 1561926 - RNA, 12 nt, Human adenovirus D
ccggcacggcgg

SEQ ID NO: 1561927 - RNA, 20 nt, Human adenovirus D
caccgugcgcuaccacccca

SEQ ID NO: 1561928 - RNA, 22 nt, Human adenovirus D
aggagggauugcagggcguaga

SEQ ID NO: 1561929 - RNA, 15 nt, Human adenovirus D
accccaucccggcca

SEQ ID NO: 1561930 - RNA, 23 nt, Human adenovirus D
agaugcagcaagccccggacccc

SEQ ID NO: 1561931 - RNA, 20 nt, Human adenovirus D
ggaaacucuuggagcagggu

SEQ ID NO: 1561932 - RNA, 14 nt, Human adenovirus D
guccucuuccucuu

SEQ ID NO: 1561933 - RNA, 11 nt, Human adenovirus D
aaaacccacuc

SEQ ID NO: 1561934 - RNA, 15 nt, Human adenovirus D
agaagagcagcacag

SEQ ID NO: 1561935 - RNA, 13 nt, Human adenovirus D
cauggcccugacg

SEQ ID NO: 1561936 - RNA, 16 nt, Human adenovirus D
gccccacaucgaggcc

SEQ ID NO: 1561937 - RNA, 18 nt, Human adenovirus D
cgagaggcgagcagcugu

SEQ ID NO: 1561938 - RNA, 20 nt, Human adenovirus D
cuaaaaaaugucuauucuca

SEQ ID NO: 1561939 - RNA, 16 nt, Human adenovirus D
gcggagcuugcccuug

SEQ ID NO: 1561940 - RNA, 15 nt, Human adenovirus D
gugcagcugcagaag

SEQ ID NO: 1561941 - RNA, 18 nt, Human adenovirus D
acuagccggagccgggag

SEQ ID NO: 1561942 - RNA, 14 nt, Human adenovirus D
gaugccgcaguggg

SEQ ID NO: 1561943 - RNA, 18 nt, Human adenovirus D
gaccguggcuucgagcag

SEQ ID NO: 1561944 - RNA, 15 nt, Human adenovirus D
ggaccggucccagcg

SEQ ID NO: 1561945 - RNA, 17 nt, Human adenovirus D
cggcaucuuugacaugg

SEQ ID NO: 1561946 - RNA, 21 nt, Human adenovirus D
ccggcgacaagcuggccugcg

SEQ ID NO: 1561947 - RNA, 23 nt, Human adenovirus D
agcuucuugcuagaaaccucaaa

SEQ ID NO: 1561948 - RNA, 23 nt, Human adenovirus D
gcccaggcgccauucggagcacg

SEQ ID NO: 1561949 - RNA, 19 nt, Human adenovirus D
caagaccuaccaaugaaaa

SEQ ID NO: 1561950 - RNA, 22 nt, Human adenovirus D
cuuaaccacccacgagcaaccc

SEQ ID NO: 1561951 - RNA, 20 nt, Human adenovirus D
ccggcugcucacgccgaacg

SEQ ID NO: 1561952 - RNA, 20 nt, Human adenovirus D
caacaucggcuaccagggcu

SEQ ID NO: 1561953 - RNA, 21 nt, Human adenovirus D
gcuggccgugguccuggucac

SEQ ID NO: 1561954 - RNA, 15 nt, Human adenovirus D
accgcuccuggucug

SEQ ID NO: 1561955 - RNA, 21 nt, Human adenovirus D
cauuacuauuacugccacugc

SEQ ID NO: 1561956 - RNA, 15 nt, Human adenovirus D
ccccagucagaccca

SEQ ID NO: 1561957 - RNA, 22 nt, Human adenovirus D
acaccaacuuuaucagcgcgcu

SEQ ID NO: 1561958 - RNA, 22 nt, Human adenovirus D
gaggcgguccccgcccagcgag

SEQ ID NO: 1561959 - RNA, 15 nt, Human adenovirus D
agcaggggcgcuggg

SEQ ID NO: 1561960 - RNA, 15 nt, Human adenovirus D
ggaauggcacgcucu

SEQ ID NO: 1561961 - RNA, 15 nt, Human adenovirus D
cgcagugggcgcaga

SEQ ID NO: 1561962 - RNA, 13 nt, Human adenovirus D
gaacgagggccug

SEQ ID NO: 1561963 - RNA, 20 nt, Human adenovirus D
gauggacuuggaagagggcg

SEQ ID NO: 1561964 - RNA, 19 nt, Human adenovirus D
cgggcggccauugcucgcu

SEQ ID NO: 1561965 - RNA, 22 nt, Human adenovirus D
cuggcgaucgugaacgcgcugg

SEQ ID NO: 1561966 - RNA, 23 nt, Human adenovirus D
aacuuccugaccacgguggugca

SEQ ID NO: 1561967 - RNA, 22 nt, Human adenovirus D
guggagcugaccaacuggucuc

SEQ ID NO: 1561968 - RNA, 20 nt, Human adenovirus D
ggaugcgugagggcggaggc

SEQ ID NO: 1561969 - RNA, 18 nt, Human adenovirus D
gauaugugcagcagagcg

SEQ ID NO: 1561970 - RNA, 21 nt, Human adenovirus D
caaaaucgagcaggaccuggg

SEQ ID NO: 1561971 - RNA, 14 nt, Human adenovirus D
gcaccugugggacc

SEQ ID NO: 1561972 - RNA, 19 nt, Human adenovirus D
ugcaccugggcgccagaag

SEQ ID NO: 1561973 - RNA, 15 nt, Human adenovirus D
ccuucuccaggguga

SEQ ID NO: 1561974 - RNA, 23 nt, Human adenovirus D
cagcuucgaguacgaggccaugc

SEQ ID NO: 1561975 - RNA, 15 nt, Human adenovirus D
gccugguguacacag

SEQ ID NO: 1561976 - RNA, 13 nt, Human adenovirus D
ggcaacggccgcu

SEQ ID NO: 1561977 - RNA, 15 nt, Human adenovirus D
guuauggucugcucc

SEQ ID NO: 1561978 - RNA, 20 nt, Human adenovirus D
ccaucgugcgcgaccugggc

SEQ ID NO: 1561979 - RNA, 13 nt, Human adenovirus D
aaaacuaaugaca

SEQ ID NO: 1561980 - RNA, 12 nt, Human adenovirus D
cggaggcuggcu

SEQ ID NO: 1561981 - RNA, 14 nt, Human adenovirus D
ugcgaggagagcag

SEQ ID NO: 1561982 - RNA, 22 nt, Human adenovirus D
gaccccgccauaagggcggcgc

SEQ ID NO: 1561983 - RNA, 15 nt, Human adenovirus D
gcacgguaagagccc

SEQ ID NO: 1561984 - RNA, 16 nt, Human adenovirus D
ugagauaugugcagca

SEQ ID NO: 1561985 - RNA, 17 nt, Human adenovirus D
ugaggaucauaucccag

SEQ ID NO: 1561986 - RNA, 19 nt, Human adenovirus D
cgcggaugaagugcgcgua

SEQ ID NO: 1561987 - RNA, 11 nt, Human adenovirus D
gcaagaaggaa

SEQ ID NO: 1561988 - RNA, 13 nt, Human adenovirus D
cugguacuugggc

SEQ ID NO: 1561989 - RNA, 14 nt, Human adenovirus D
ccuggcgacgcagc

SEQ ID NO: 1561990 - RNA, 19 nt, Human adenovirus D
cgccuucaccgaccugggu

SEQ ID NO: 1561991 - RNA, 14 nt, Human adenovirus D
cgagcacucgugcu

SEQ ID NO: 1561992 - RNA, 21 nt, Human adenovirus D
cagcuccgguugugcagcccc

SEQ ID NO: 1561993 - RNA, 20 nt, Human adenovirus D
ggcagacgcugaaaggcggg

SEQ ID NO: 1561994 - RNA, 16 nt, Human adenovirus D
uagcaauggaaaucac

SEQ ID NO: 1561995 - RNA, 12 nt, Human adenovirus D
cgaccacagcaa

SEQ ID NO: 1561996 - RNA, 19 nt, Human adenovirus D
cacguacuucagccugggc

SEQ ID NO: 1561997 - RNA, 16 nt, Human adenovirus D
cccugagcggcugcac

SEQ ID NO: 1561998 - RNA, 12 nt, Human adenovirus D
gcugauggugac

SEQ ID NO: 1561999 - RNA, 16 nt, Human adenovirus D
aaguuuaauggggugc

SEQ ID NO: 1562000 - RNA, 15 nt, Human adenovirus D
agaugaugugcaguu

SEQ ID NO: 1562001 - RNA, 16 nt, Human adenovirus D
ccuugcccccaagggc

SEQ ID NO: 1562002 - RNA, 16 nt, Human adenovirus D
gaccgcgagcugaugc

SEQ ID NO: 1562003 - RNA, 19 nt, Human adenovirus D
ucggcuggaacccgcgcuc

SEQ ID NO: 1562004 - RNA, 12 nt, Human adenovirus D
ggucgcgguggg

SEQ ID NO: 1562005 - RNA, 17 nt, Human adenovirus D
cuggcuucuacagccag

SEQ ID NO: 1562006 - RNA, 19 nt, Human adenovirus D
cugcacgagaaccgccugg

SEQ ID NO: 1562007 - RNA, 16 nt, Human adenovirus D
ccggcgcuagccagcc

SEQ ID NO: 1562008 - RNA, 19 nt, Human adenovirus D
gcagcacauaaucaccaug

SEQ ID NO: 1562009 - RNA, 16 nt, Human adenovirus D
cuccgcgaccuccucc

SEQ ID NO: 1562010 - RNA, 22 nt, Human adenovirus D
cggaggcgugcacuggcucgcc

SEQ ID NO: 1562011 - RNA, 15 nt, Human adenovirus D
gagcugggagggaug

SEQ ID NO: 1562012 - RNA, 16 nt, Human adenovirus D
cgggguugcagcacug

SEQ ID NO: 1562013 - RNA, 23 nt, Human adenovirus D
ccauggacgggaaccccaccaug

SEQ ID NO: 1562014 - RNA, 14 nt, Human adenovirus D
ccaacgcgccgggg

SEQ ID NO: 1562015 - RNA, 14 nt, Human adenovirus D
caaccuccugggca

SEQ ID NO: 1562016 - RNA, 16 nt, Human adenovirus D
cacgcgcacacuuugg

SEQ ID NO: 1562017 - RNA, 14 nt, Human adenovirus D
ccaggcccuggagc

SEQ ID NO: 1562018 - RNA, 22 nt, Human adenovirus D
caggguagcggggcacaggcac

SEQ ID NO: 1562019 - RNA, 19 nt, Human adenovirus D
ucgaugaaagucaggagca

SEQ ID NO: 1562020 - RNA, 15 nt, Human adenovirus D
cgcccgucgccgcac

SEQ ID NO: 1562021 - RNA, 18 nt, Human adenovirus D
auggaacccaaaguauga

SEQ ID NO: 1562022 - RNA, 21 nt, Human adenovirus D
cugaagauguaaccuugcaag

SEQ ID NO: 1562023 - RNA, 18 nt, Human adenovirus D
augcacccguaaaugacu

SEQ ID NO: 1562024 - RNA, 22 nt, Human adenovirus D
ggguguuuuugcgaaaacacuu

SEQ ID NO: 1562025 - RNA, 13 nt, Human adenovirus D
cagaggaagaggg

SEQ ID NO: 1562026 - RNA, 22 nt, Human adenovirus D
ggacaucgcgaaccaggcagug

SEQ ID NO: 1562027 - RNA, 20 nt, Human adenovirus D
cacacuuuugguuucaaauu

SEQ ID NO: 1562028 - RNA, 18 nt, Human adenovirus D
gcaccaucacaggaggca

SEQ ID NO: 1562029 - RNA, 17 nt, Human adenovirus D
cggccguucaugggcac

SEQ ID NO: 1562030 - RNA, 22 nt, Human adenovirus D
acuccccuuacuuucgcuccca

SEQ ID NO: 1562031 - RNA, 18 nt, Human adenovirus D
auucaaauuacuuuucug

SEQ ID NO: 1562032 - RNA, 19 nt, Human adenovirus D
ggaaauguucugauuauug

SEQ ID NO: 1562033 - RNA, 22 nt, Human adenovirus D
gggcgucccgcgguccuccucg

SEQ ID NO: 1562034 - RNA, 17 nt, Human adenovirus D
accaugaauacagugau

SEQ ID NO: 1562035 - RNA, 23 nt, Human adenovirus D
ggaggacuuaaccacccacgagc

SEQ ID NO: 1562036 - RNA, 13 nt, Human adenovirus D
ugcccuuccagca

SEQ ID NO: 1562037 - RNA, 16 nt, Human adenovirus D
gccaggaggcggugcg

SEQ ID NO: 1562038 - RNA, 19 nt, Human adenovirus D
auacagaugguagcagcag

SEQ ID NO: 1562039 - RNA, 13 nt, Human adenovirus D
gccuuccccuccg

SEQ ID NO: 1562040 - RNA, 19 nt, Human adenovirus D
guuccagacgcggcuguag

SEQ ID NO: 1562041 - RNA, 19 nt, Human adenovirus D
acucggugcuuagccuggg

SEQ ID NO: 1562042 - RNA, 17 nt, Human adenovirus D
cccaugagcugcgagaa

SEQ ID NO: 1562043 - RNA, 12 nt, Human adenovirus D
gaggcaggccau

SEQ ID NO: 1562044 - RNA, 19 nt, Human adenovirus D
uggcgugcgaguuggagga

SEQ ID NO: 1562045 - RNA, 19 nt, Human adenovirus D
cugcuccugcucccgggcu

SEQ ID NO: 1562046 - RNA, 14 nt, Human adenovirus D
auugcuagcccuuc

SEQ ID NO: 1562047 - RNA, 15 nt, Human adenovirus D
guacuggcaacaugg

SEQ ID NO: 1562048 - RNA, 19 nt, Human adenovirus D
auccagcggcgcaggggca

SEQ ID NO: 1562049 - RNA, 15 nt, Human adenovirus D
gcgcaggcgacccug

SEQ ID NO: 1562050 - RNA, 17 nt, Human adenovirus D
cgugcgcgaccugggcu

SEQ ID NO: 1562051 - RNA, 16 nt, Human adenovirus D
cucgcuccggaggcau

SEQ ID NO: 1562052 - RNA, 14 nt, Human adenovirus D
ggcgcuggaagagg

SEQ ID NO: 1562053 - RNA, 20 nt, Human adenovirus D
cccgccauaagggcggcgcu

SEQ ID NO: 1562054 - RNA, 20 nt, Human adenovirus D
acugggcguugcgggccgag

SEQ ID NO: 1562055 - RNA, 13 nt, Human adenovirus D
aguugguccagau

SEQ ID NO: 1562056 - RNA, 17 nt, Human adenovirus D
ggcgaagggcuggcgag

SEQ ID NO: 1562057 - RNA, 13 nt, Human adenovirus D
augcgcaggcgcc

SEQ ID NO: 1562058 - RNA, 12 nt, Human adenovirus D
gacgagccaaac

SEQ ID NO: 1562059 - RNA, 20 nt, Human adenovirus D
ggggcgccgccggcggcgag

SEQ ID NO: 1562060 - RNA, 19 nt, Human adenovirus D
ggcgacgacgcgcucggcg

SEQ ID NO: 1562061 - RNA, 15 nt, Human adenovirus D
acacugaaaauguca

SEQ ID NO: 1562062 - RNA, 22 nt, Human adenovirus D
uaaacguguuuuuuauuucaaa

SEQ ID NO: 1562063 - RNA, 23 nt, Human adenovirus D
cgcaggggcucguuaguccagca

SEQ ID NO: 1562064 - RNA, 18 nt, Human adenovirus D
caguccaugcccaacagg

SEQ ID NO: 1562065 - RNA, 21 nt, Human adenovirus D
uccgcgaccuccuccccauga

SEQ ID NO: 1562066 - RNA, 20 nt, Human adenovirus D
augcugagccugcgccgggc

SEQ ID NO: 1562067 - RNA, 13 nt, Human adenovirus D
gacgacggcgacg

SEQ ID NO: 1562068 - RNA, 15 nt, Human adenovirus D
caagcgggccucaca

SEQ ID NO: 1562069 - RNA, 22 nt, Human adenovirus D
cagcagcauguacggaggagcc

SEQ ID NO: 1562070 - RNA, 17 nt, Human adenovirus D
cguacuucugccagcag

SEQ ID NO: 1562071 - RNA, 12 nt, Human adenovirus D
cgacgccccuga

SEQ ID NO: 1562072 - RNA, 18 nt, Human adenovirus D
aagaaacgucccagcagc

SEQ ID NO: 1562073 - RNA, 20 nt, Human adenovirus D
accgcggcgucaucgaggcc

SEQ ID NO: 1562074 - RNA, 15 nt, Human adenovirus D
cuucuauggaggcag

SEQ ID NO: 1562075 - RNA, 13 nt, Human adenovirus D
cgcgaacagcagc

SEQ ID NO: 1562076 - RNA, 17 nt, Human adenovirus D
auugagagugcggugga

SEQ ID NO: 1562077 - RNA, 17 nt, Human adenovirus D
accuggugauggccugu

SEQ ID NO: 1562078 - RNA, 12 nt, Human adenovirus D
cccgccacccuu

SEQ ID NO: 1562079 - RNA, 16 nt, Human adenovirus D
ccuuccugcagcucau

SEQ ID NO: 1562080 - RNA, 13 nt, Human adenovirus D
aggugcugcccca

SEQ ID NO: 1562081 - RNA, 13 nt, Human adenovirus D
acaugcagcugcc

SEQ ID NO: 1562082 - RNA, 17 nt, Human adenovirus D
cucggugcggcugcugc

SEQ ID NO: 1562083 - RNA, 18 nt, Human adenovirus D
agcaggggcgcugggcgu

SEQ ID NO: 1562084 - RNA, 19 nt, Human adenovirus D
accuguucagggaccgcag

SEQ ID NO: 1562085 - RNA, 14 nt, Human adenovirus D
cauggaaccuagca

SEQ ID NO: 1562086 - RNA, 15 nt, Human adenovirus D
gcaccugugggaccu

SEQ ID NO: 1562087 - RNA, 19 nt, Human adenovirus D
gagcucgucuuccaggagc

SEQ ID NO: 1562088 - RNA, 17 nt, Human adenovirus D
cguaagcaggagcagga

SEQ ID NO: 1562089 - RNA, 20 nt, Human adenovirus D
agcccaacggcaccugcgag

SEQ ID NO: 1562090 - RNA, 21 nt, Human adenovirus D
acgugcaguccaaccuggacc

SEQ ID NO: 1562091 - RNA, 19 nt, Human adenovirus D
gacgcugcgcuuugugccc

SEQ ID NO: 1562092 - RNA, 14 nt, Human adenovirus D
uaacauuugaauuu

SEQ ID NO: 1562093 - RNA, 16 nt, Human adenovirus D
gugguuuuucugguug

SEQ ID NO: 1562094 - RNA, 17 nt, Human adenovirus D
cgcgaggccauaggcca

SEQ ID NO: 1562095 - RNA, 20 nt, Human adenovirus D
ggcgcgccuuggaggccgcc

SEQ ID NO: 1562096 - RNA, 21 nt, Human adenovirus D
gagaugccccagcagaagcag

SEQ ID NO: 1562097 - RNA, 20 nt, Human adenovirus D
agaacacccaacugagcagg

SEQ ID NO: 1562098 - RNA, 23 nt, Human adenovirus D
auucuggacuucgcagccaugca

SEQ ID NO: 1562099 - RNA, 15 nt, Human adenovirus D
cgcgugacgcacugg

SEQ ID NO: 1562100 - RNA, 14 nt, Human adenovirus D
auggcaggcagcgg

SEQ ID NO: 1562101 - RNA, 19 nt, Human adenovirus D
cugcgcgagggccuggacc

SEQ ID NO: 1562102 - RNA, 16 nt, Human adenovirus D
ccagcgcgugcugcgc

SEQ ID NO: 1562103 - RNA, 18 nt, Human adenovirus D
ccagccacagccacagac

SEQ ID NO: 1562104 - RNA, 17 nt, Human adenovirus D
ccgugaccugcagcagg

SEQ ID NO: 1562105 - RNA, 17 nt, Human adenovirus D
gcugcacgagcgccagg

SEQ ID NO: 1562106 - RNA, 19 nt, Human adenovirus D
gaaggugguggacggccug

SEQ ID NO: 1562107 - RNA, 16 nt, Human adenovirus D
gaccggucgacgguga

SEQ ID NO: 1562108 - RNA, 20 nt, Human adenovirus D
cugggcguggugcuggauga

SEQ ID NO: 1562109 - RNA, 21 nt, Human adenovirus D
ccucaucacaucagccaggac

SEQ ID NO: 1562110 - RNA, 14 nt, Human adenovirus D
gcaggguaaagcca

SEQ ID NO: 1562111 - RNA, 21 nt, Human adenovirus D
gaaccccacaggaugaacagg

SEQ ID NO: 1562112 - RNA, 17 nt, Human adenovirus D
cagcgcauccugcaacu

SEQ ID NO: 1562113 - RNA, 20 nt, Human adenovirus D
cgcugagcgacgaccugggc

SEQ ID NO: 1562114 - RNA, 19 nt, Human adenovirus D
cagcaagccccggaccccg

SEQ ID NO: 1562115 - RNA, 20 nt, Human adenovirus D
gaugugcaguuuggccugga

SEQ ID NO: 1562116 - RNA, 18 nt, Human adenovirus D
uguaaagccacaaccaga

SEQ ID NO: 1562117 - RNA, 14 nt, Human adenovirus D
ccaaaaaaacacac

SEQ ID NO: 1562118 - RNA, 14 nt, Human adenovirus D
ugggcacccacgac

SEQ ID NO: 1562119 - RNA, 15 nt, Human adenovirus D
uccgcgaccuccucc

SEQ ID NO: 1562120 - RNA, 18 nt, Human adenovirus D
gcgcuuggugggcagagg

SEQ ID NO: 1562121 - RNA, 18 nt, Human adenovirus D
cccucaucacaucagcca

SEQ ID NO: 1562122 - RNA, 14 nt, Human adenovirus D
ccgacagcagcaca

SEQ ID NO: 1562123 - RNA, 15 nt, Human adenovirus D
ugccucuccaucagc

SEQ ID NO: 1562124 - RNA, 18 nt, Human adenovirus D
cauagucaucacccagca

SEQ ID NO: 1562125 - RNA, 15 nt, Human adenovirus D
gaucagaaacacaga

SEQ ID NO: 1562126 - RNA, 16 nt, Human adenovirus D
cguagaaauccacggc

SEQ ID NO: 1562127 - RNA, 13 nt, Human adenovirus D
uccugccugggaa

SEQ ID NO: 1562128 - RNA, 21 nt, Human adenovirus D
gcacccgguacuacgccagcc

SEQ ID NO: 1562129 - RNA, 16 nt, Human adenovirus D
ucuaccuuggucacau

SEQ ID NO: 1562130 - RNA, 23 nt, Human adenovirus D
ccacgaccggcagcggggccugg

SEQ ID NO: 1562131 - RNA, 13 nt, Human adenovirus D
gcgcuaccgcucc

SEQ ID NO: 1562132 - RNA, 20 nt, Human adenovirus D
ggaugcagccaguggcccug

SEQ ID NO: 1562133 - RNA, 16 nt, Human adenovirus D
gcggacugccaccgcc

SEQ ID NO: 1562134 - RNA, 20 nt, Human adenovirus D
ccuuugcggacuccgcgacc

SEQ ID NO: 1562135 - RNA, 22 nt, Human adenovirus D
uugcugaccaauagacagcaga

SEQ ID NO: 1562136 - RNA, 23 nt, Human adenovirus D
caagagcgagaugucugugaagc

SEQ ID NO: 1562137 - RNA, 23 nt, Human adenovirus D
ucaggaguggcggcccuggcugg

SEQ ID NO: 1562138 - RNA, 19 nt, Human adenovirus D
acaccgugaaaauggaugu

SEQ ID NO: 1562139 - RNA, 10 nt, Human adenovirus D
acauguggag

SEQ ID NO: 1562140 - RNA, 12 nt, Human adenovirus D
gcucacccgcag

SEQ ID NO: 1562141 - RNA, 17 nt, Human adenovirus D
cccaggcccuggagcag

SEQ ID NO: 1562142 - RNA, 19 nt, Human adenovirus D
gaaagcgguugagcgggcu

SEQ ID NO: 1562143 - RNA, 17 nt, Human adenovirus D
caagacaaaggaggcca

SEQ ID NO: 1562144 - RNA, 16 nt, Human adenovirus D
gcugcgaggagagcag

SEQ ID NO: 1562145 - RNA, 13 nt, Human adenovirus D
accacaccuguga

SEQ ID NO: 1562146 - RNA, 18 nt, Human adenovirus D
cgagcuggaagcccugag

SEQ ID NO: 1562147 - RNA, 13 nt, Human adenovirus D
uaucauucagagg

SEQ ID NO: 1562148 - RNA, 16 nt, Human adenovirus D
gucgccucggaccugg

SEQ ID NO: 1562149 - RNA, 16 nt, Human adenovirus D
gcggcgggggcggaga

SEQ ID NO: 1562150 - RNA, 22 nt, Human adenovirus D
cucgcugguggacgccuacauc

SEQ ID NO: 1562151 - RNA, 12 nt, Human adenovirus D
agcggcagggcu

SEQ ID NO: 1562152 - RNA, 13 nt, Human adenovirus D
uauaauaagcaga

SEQ ID NO: 1562153 - RNA, 21 nt, Human adenovirus D
gcugcugccgggcugcggggu

SEQ ID NO: 1562154 - RNA, 18 nt, Human adenovirus D
uacccaacaaccuuacca

SEQ ID NO: 1562155 - RNA, 21 nt, Human adenovirus D
gccgcgggcgccucccaggac

SEQ ID NO: 1562156 - RNA, 21 nt, Human adenovirus D
augcugagccugcgccgggcg

SEQ ID NO: 1562157 - RNA, 18 nt, Human adenovirus D
ugcauacaaaugcuucaa

SEQ ID NO: 1562158 - RNA, 17 nt, Human adenovirus D
gcucaaagaccagaacu

SEQ ID NO: 1562159 - RNA, 13 nt, Human adenovirus D
gcagacagggccu

SEQ ID NO: 1562160 - RNA, 17 nt, Human adenovirus D
ccaggcggaccagaaac

SEQ ID NO: 1562161 - RNA, 14 nt, Human adenovirus D
cuccaccacccacg

SEQ ID NO: 1562162 - RNA, 12 nt, Human adenovirus D
uauccccuuccu

SEQ ID NO: 1562163 - RNA, 20 nt, Human adenovirus D
ccucgagcaugaggcggugg

SEQ ID NO: 1562164 - RNA, 16 nt, Human adenovirus D
cgcgaacagcagcagc

SEQ ID NO: 1562165 - RNA, 14 nt, Human adenovirus D
ccauguuggaggaa

SEQ ID NO: 1562166 - RNA, 23 nt, Human adenovirus D
ugaagcaguguguguuugagaaa

SEQ ID NO: 1562167 - RNA, 18 nt, Human adenovirus D
agaucccgccgcaggaga

SEQ ID NO: 1562168 - RNA, 14 nt, Human adenovirus D
cgaaccaggcagug

SEQ ID NO: 1562169 - RNA, 23 nt, Human adenovirus D
gcggccguucaugggcaccugga

SEQ ID NO: 1562170 - RNA, 17 nt, Human adenovirus D
ugcaaguggggcggcaa

SEQ ID NO: 1562171 - RNA, 16 nt, Human adenovirus D
cuggccucgagcuaca

SEQ ID NO: 1562172 - RNA, 18 nt, Human adenovirus D
ugauggauguguggacua

SEQ ID NO: 1562173 - RNA, 15 nt, Human adenovirus D
ggcacgcucugaggc

SEQ ID NO: 1562174 - RNA, 20 nt, Human adenovirus D
aagccaggaaaagaggauga

SEQ ID NO: 1562175 - RNA, 17 nt, Human adenovirus D
cacucgcgggcggccau

SEQ ID NO: 1562176 - RNA, 18 nt, Human adenovirus D
agcgcgccgacccguggc

SEQ ID NO: 1562177 - RNA, 14 nt, Human adenovirus D
ccaaggauaacaug

SEQ ID NO: 1562178 - RNA, 15 nt, Human adenovirus D
cauugcaaggcagaa

SEQ ID NO: 1562179 - RNA, 21 nt, Human adenovirus D
gucaucaccuuccugcagcuc

SEQ ID NO: 1562180 - RNA, 15 nt, Human adenovirus D
cggaguaccugagcc

SEQ ID NO: 1562181 - RNA, 17 nt, Human adenovirus D
ucccagcgccgcgcugg

SEQ ID NO: 1562182 - RNA, 14 nt, Human adenovirus D
ucaaccuccaggcc

SEQ ID NO: 1562183 - RNA, 18 nt, Human adenovirus D
cgccagacgcacgggccg

SEQ ID NO: 1562184 - RNA, 14 nt, Human adenovirus D
ugguggaaacagac

SEQ ID NO: 1562185 - RNA, 16 nt, Human adenovirus D
gaccaccugcgcgagg

SEQ ID NO: 1562186 - RNA, 19 nt, Human adenovirus D
uccuggugguacagcacag

SEQ ID NO: 1562187 - RNA, 11 nt, Human adenovirus D
uuccucugugg

SEQ ID NO: 1562188 - RNA, 19 nt, Human adenovirus D
accugcagcaggugcugcc

SEQ ID NO: 1562189 - RNA, 23 nt, Human adenovirus D
cucgcgcucaucguugugcgccg

SEQ ID NO: 1562190 - RNA, 18 nt, Human adenovirus D
gacucauccugcuggugc

SEQ ID NO: 1562191 - RNA, 20 nt, Human adenovirus D
uggaacaccaucagacuggg

SEQ ID NO: 1562192 - RNA, 14 nt, Human adenovirus D
auggcgugcuggag

SEQ ID NO: 1562193 - RNA, 19 nt, Human adenovirus D
guugagucgcggcagaacc

SEQ ID NO: 1562194 - RNA, 13 nt, Human adenovirus D
cugcuccugcacu

SEQ ID NO: 1562195 - RNA, 23 nt, Human adenovirus D
ccugcucaccugcaccugcgucu

SEQ ID NO: 1562196 - RNA, 23 nt, Human adenovirus D
gaacccuccaguuuguggaggag

SEQ ID NO: 1562197 - RNA, 16 nt, Human adenovirus D
gaagagcguccgcagg

SEQ ID NO: 1562198 - RNA, 14 nt, Human adenovirus D
ugcaaacaauaaaa

SEQ ID NO: 1562199 - RNA, 11 nt, Human adenovirus D
gccgccaggcc

SEQ ID NO: 1562200 - RNA, 16 nt, Human adenovirus D
aggucaaaacccacuc

SEQ ID NO: 1562201 - RNA, 16 nt, Human adenovirus D
caacagauuuaagcaa

SEQ ID NO: 1562202 - RNA, 19 nt, Human adenovirus D
cccugagccgccagcuggc

SEQ ID NO: 1562203 - RNA, 14 nt, Human adenovirus D
cugcugccgagccg

SEQ ID NO: 1562204 - RNA, 16 nt, Human adenovirus D
aggcuggagccgcgac

SEQ ID NO: 1562205 - RNA, 18 nt, Human adenovirus D
aacaaaacccaugaaaga

SEQ ID NO: 1562206 - RNA, 20 nt, Human adenovirus D
acugguacuugggcugccac

SEQ ID NO: 1562207 - RNA, 16 nt, Human adenovirus D
gaugaugccgcagugg

SEQ ID NO: 1562208 - RNA, 12 nt, Human adenovirus D
cagccgagccgg

SEQ ID NO: 1562209 - RNA, 21 nt, Human adenovirus D
ccaguaggaaccagcacacuc

SEQ ID NO: 1562210 - RNA, 18 nt, Human adenovirus D
ugcagccaguggcccugg

SEQ ID NO: 1562211 - RNA, 21 nt, Human adenovirus D
ggucagcgaugagcagcuugc

SEQ ID NO: 1562212 - RNA, 15 nt, Human adenovirus D
gcaggcgggacagag

SEQ ID NO: 1562213 - RNA, 10 nt, Human adenovirus D
cccagugcuu

SEQ ID NO: 1562214 - RNA, 14 nt, Human adenovirus D
gaugggucugugcc

SEQ ID NO: 1562215 - RNA, 16 nt, Human adenovirus D
ucaaagugugaaaauu

SEQ ID NO: 1562216 - RNA, 22 nt, Human adenovirus D
ggccccgccaaccggcugaugc

SEQ ID NO: 1562217 - RNA, 15 nt, Human adenovirus D
augaacaggagcacg

SEQ ID NO: 1562218 - RNA, 20 nt, Human adenovirus D
auccagccuguacccagagc

SEQ ID NO: 1562219 - RNA, 19 nt, Human adenovirus D
gagcaccccaacggcccug

SEQ ID NO: 1562220 - RNA, 20 nt, Human adenovirus D
gagcucuuaagaaagacaca

SEQ ID NO: 1562221 - RNA, 15 nt, Human adenovirus D
cagcagggugccucc

SEQ ID NO: 1562222 - RNA, 18 nt, Human adenovirus D
cuggaccaggcggcagag

SEQ ID NO: 1562223 - RNA, 20 nt, Human adenovirus D
uacccagcaagucagcaacu

SEQ ID NO: 1562224 - RNA, 14 nt, Human adenovirus D
cgccggcucaagca

SEQ ID NO: 1562225 - RNA, 16 nt, Human adenovirus D
gucagaaugugauggg

SEQ ID NO: 1562226 - RNA, 13 nt, Human adenovirus D
uuccagcccaggg

SEQ ID NO: 1562227 - RNA, 16 nt, Human adenovirus D
acucccucccucggcu

SEQ ID NO: 1562228 - RNA, 16 nt, Human adenovirus D
gcgucgacggcgccuc

SEQ ID NO: 1562229 - RNA, 17 nt, Human adenovirus D
gacgcccuugugcccgc

SEQ ID NO: 1562230 - RNA, 14 nt, Human adenovirus D
uacccacugggugg

SEQ ID NO: 1562231 - RNA, 21 nt, Human adenovirus D
gcugacauccauggccagggg

SEQ ID NO: 1562232 - RNA, 14 nt, Human adenovirus D
cccgauagccgcca

SEQ ID NO: 1562233 - RNA, 22 nt, Human adenovirus D
aaagugcuggaggguugaaaga

SEQ ID NO: 1562234 - RNA, 18 nt, Human adenovirus D
gaugugcaguuuggccug

SEQ ID NO: 1562235 - RNA, 20 nt, Human adenovirus D
agcauuacuauuacugccac

SEQ ID NO: 1562236 - RNA, 18 nt, Human adenovirus D
cagggcgcacuacagccg

SEQ ID NO: 1562237 - RNA, 19 nt, Human adenovirus D
cuggaucgaaaucaaaauc

SEQ ID NO: 1562238 - RNA, 15 nt, Human adenovirus D
uggaugcggagccgc

SEQ ID NO: 1562239 - RNA, 23 nt, Human adenovirus D
guccgcacgguaagagcccagca

SEQ ID NO: 1562240 - RNA, 13 nt, Human adenovirus D
gacgagcucgccg

SEQ ID NO: 1562241 - RNA, 17 nt, Human adenovirus D
aggcaaagcucaacccg

SEQ ID NO: 1562242 - RNA, 19 nt, Human adenovirus D
ggccggcgcgcccggggcc

SEQ ID NO: 1562243 - RNA, 13 nt, Human adenovirus D
gaggugcagaccg

SEQ ID NO: 1562244 - RNA, 23 nt, Human adenovirus D
gagccaagaaacgucccagcagc

SEQ ID NO: 1562245 - RNA, 14 nt, Human adenovirus D
cccagcaacccuuc

SEQ ID NO: 1562246 - RNA, 13 nt, Human adenovirus D
accuccugggcau

SEQ ID NO: 1562247 - RNA, 19 nt, Human adenovirus D
cguaggagucuugcagcuu

SEQ ID NO: 1562248 - RNA, 15 nt, Human adenovirus D
guucucgcuggucac

SEQ ID NO: 1562249 - RNA, 22 nt, Human adenovirus D
cccuccccgacccccuuccacu

SEQ ID NO: 1562250 - RNA, 13 nt, Human adenovirus D
accgaaggcagcu

SEQ ID NO: 1562251 - RNA, 13 nt, Human adenovirus D
gaaauaaaaaacc

SEQ ID NO: 1562252 - RNA, 20 nt, Human adenovirus D
cuuaguucagcugcaaugau

SEQ ID NO: 1562253 - RNA, 13 nt, Human adenovirus D
ccgccgcggccau

SEQ ID NO: 1562254 - RNA, 22 nt, Human adenovirus D
cgcugcaaccugugcucuccgc

SEQ ID NO: 1562255 - RNA, 18 nt, Human adenovirus D
gccgccucugcgugaaga

SEQ ID NO: 1562256 - RNA, 13 nt, Human adenovirus D
cucugugcccagu

SEQ ID NO: 1562257 - RNA, 16 nt, Human adenovirus D
cuacaaucgccacagg

SEQ ID NO: 1562258 - RNA, 15 nt, Human adenovirus D
ugggcgugcagaccg

SEQ ID NO: 1562259 - RNA, 16 nt, Human adenovirus D
cggcgcguggaggaag

SEQ ID NO: 1562260 - RNA, 13 nt, Human adenovirus D
ggcgucccgcggu

SEQ ID NO: 1562261 - RNA, 23 nt, Human adenovirus D
ucacagcuaagaaaaaaucagag

SEQ ID NO: 1562262 - RNA, 17 nt, Human adenovirus D
ggcccacggccaucuuu

SEQ ID NO: 1562263 - RNA, 23 nt, Human adenovirus D
ugcgguacugguacuugggcugc

SEQ ID NO: 1562264 - RNA, 18 nt, Human adenovirus D
cuuccuauuuaacauccu

SEQ ID NO: 1562265 - RNA, 18 nt, Human adenovirus D
ccucuuugcccugcucac

SEQ ID NO: 1562266 - RNA, 15 nt, Human adenovirus D
cgggccaugaggguc

SEQ ID NO: 1562267 - RNA, 20 nt, Human adenovirus D
cggccguccuuucgcugcug

SEQ ID NO: 1562268 - RNA, 19 nt, Human adenovirus D
accaggaugcagccagugg

SEQ ID NO: 1562269 - RNA, 16 nt, Human adenovirus D
cucggaguaccugagc

SEQ ID NO: 1562270 - RNA, 17 nt, Human adenovirus D
ugggaucuuuauucuug

SEQ ID NO: 1562271 - RNA, 23 nt, Human adenovirus D
gaagcgcucgaucaucuccccgc

SEQ ID NO: 1562272 - RNA, 20 nt, Human adenovirus D
ucacucuggccgugggcgac

SEQ ID NO: 1562273 - RNA, 17 nt, Human adenovirus D
ccggaggcgugcacugg

SEQ ID NO: 1562274 - RNA, 15 nt, Human adenovirus D
guagcugcgcggggc

SEQ ID NO: 1562275 - RNA, 14 nt, Human adenovirus D
ccugaaggagcugg

SEQ ID NO: 1562276 - RNA, 22 nt, Human adenovirus D
agcugcuugccgaaggacccca

SEQ ID NO: 1562277 - RNA, 15 nt, Human adenovirus D
gccgucacccugccc

SEQ ID NO: 1562278 - RNA, 19 nt, Human adenovirus D
cacaccaggaugcagccag

SEQ ID NO: 1562279 - RNA, 13 nt, Human adenovirus D
acaauaaaaauua

SEQ ID NO: 1562280 - RNA, 12 nt, Human adenovirus D
cucaacaucaca

SEQ ID NO: 1562281 - RNA, 22 nt, Human adenovirus D
cucacccuggggcuccucgagg

SEQ ID NO: 1562282 - RNA, 21 nt, Human adenovirus D
ggcggccuuugaugugcggca

SEQ ID NO: 1562283 - RNA, 13 nt, Human adenovirus D
caccgccuccacc

SEQ ID NO: 1562284 - RNA, 14 nt, Human adenovirus D
cgacccaugagcug

SEQ ID NO: 1562285 - RNA, 18 nt, Human adenovirus D
gaaaaacagaaagcaugc

SEQ ID NO: 1562286 - RNA, 17 nt, Human adenovirus D
gugaccaagcuggugau

SEQ ID NO: 1562287 - RNA, 16 nt, Human adenovirus D
cgguggccccgaccca

SEQ ID NO: 1562288 - RNA, 13 nt, Human adenovirus D
cagacagccaggu

SEQ ID NO: 1562289 - RNA, 22 nt, Human adenovirus D
gccucuccaucagcgcccucag

SEQ ID NO: 1562290 - RNA, 23 nt, Human adenovirus D
agacugauggccacggggagccc

SEQ ID NO: 1562291 - RNA, 15 nt, Human adenovirus D
gagcugagcgaccgc

SEQ ID NO: 1562292 - RNA, 14 nt, Human adenovirus D
cagggaacugaaag

SEQ ID NO: 1562293 - RNA, 14 nt, Human adenovirus D
ccccgcggcggcga

SEQ ID NO: 1562294 - RNA, 20 nt, Human adenovirus D
agcagcaagagcucaaagua

SEQ ID NO: 1562295 - RNA, 15 nt, Human adenovirus D
caucuucugccuggu

SEQ ID NO: 1562296 - RNA, 11 nt, Human adenovirus D
gaaugcugcua

SEQ ID NO: 1562297 - RNA, 18 nt, Human adenovirus D
ggacagccagcagaagaa

SEQ ID NO: 1562298 - RNA, 16 nt, Human adenovirus D
gcgcccuucaccgaca

SEQ ID NO: 1562299 - RNA, 16 nt, Human adenovirus D
cuugaccugccuccac

SEQ ID NO: 1562300 - RNA, 17 nt, Human adenovirus D
gccgcggcgagcgggac

SEQ ID NO: 1562301 - RNA, 15 nt, Human adenovirus D
gcugaugcugagccu

SEQ ID NO: 1562302 - RNA, 21 nt, Human adenovirus D
gccaggccuccgagcagcgca

SEQ ID NO: 1562303 - RNA, 13 nt, Human adenovirus D
cacaggcacacug

SEQ ID NO: 1562304 - RNA, 20 nt, Human adenovirus D
ccaugcccuuuucccaggac

SEQ ID NO: 1562305 - RNA, 13 nt, Human adenovirus D
gugaucugcuuga

SEQ ID NO: 1562306 - RNA, 17 nt, Human adenovirus D
ccgacuucaugagccag

SEQ ID NO: 1562307 - RNA, 13 nt, Human adenovirus D
gcccuugccaccu

SEQ ID NO: 1562308 - RNA, 19 nt, Human adenovirus D
agcagcccuguggacgcug

SEQ ID NO: 1562309 - RNA, 19 nt, Human adenovirus D
cccgcucaucggccagaca

SEQ ID NO: 1562310 - RNA, 23 nt, Human adenovirus D
aauaaaaaacuugagcuuguuua

SEQ ID NO: 1562311 - RNA, 16 nt, Human adenovirus D
gcagggagccagggga

SEQ ID NO: 1562312 - RNA, 20 nt, Human adenovirus D
cgcuuggugggcagaggagg

SEQ ID NO: 1562313 - RNA, 12 nt, Human adenovirus D
ccuugccuuccu

SEQ ID NO: 1562314 - RNA, 21 nt, Human adenovirus D
gagggucacacuagcgcccug

SEQ ID NO: 1562315 - RNA, 18 nt, Human adenovirus D
gcucuucccgcugaacug

SEQ ID NO: 1562316 - RNA, 12 nt, Human adenovirus D
ugccugccccuc

SEQ ID NO: 1562317 - RNA, 21 nt, Human adenovirus D
cuucagcauguggaacucugc

SEQ ID NO: 1562318 - RNA, 22 nt, Human adenovirus D
ugcagaccgaccccuggcuccc

SEQ ID NO: 1562319 - RNA, 13 nt, Human adenovirus D
caccagccgcacc

SEQ ID NO: 1562320 - RNA, 20 nt, Human adenovirus D
ggcauuggagaaugcugcua

SEQ ID NO: 1562321 - RNA, 14 nt, Human adenovirus D
aucucauggucuga

SEQ ID NO: 1562322 - RNA, 14 nt, Human adenovirus D
gccacgugaccagg

SEQ ID NO: 1562323 - RNA, 17 nt, Human adenovirus D
gacguggacagcgcggu

SEQ ID NO: 1562324 - RNA, 12 nt, Human adenovirus D
cgggcucuuccu

SEQ ID NO: 1562325 - RNA, 19 nt, Human adenovirus D
augaccauagaccugauga

SEQ ID NO: 1562326 - RNA, 22 nt, Human adenovirus D
agucaaaagaaaacuaaugaca

SEQ ID NO: 1562327 - RNA, 18 nt, Human adenovirus D
cuggccgugguccugguc

SEQ ID NO: 1562328 - RNA, 18 nt, Human adenovirus D
cgcccggcguacgugccu

SEQ ID NO: 1562329 - RNA, 13 nt, Human adenovirus D
ugcccccuccacu

SEQ ID NO: 1562330 - RNA, 21 nt, Human adenovirus D
cgcccagcaauaacaccggcu

SEQ ID NO: 1562331 - RNA, 20 nt, Human adenovirus D
caccgacagucugagggcca

SEQ ID NO: 1562332 - RNA, 18 nt, Human adenovirus D
caggcgcaaccaggagga

SEQ ID NO: 1562333 - RNA, 21 nt, Human adenovirus D
acucggugcuuagccugggca

SEQ ID NO: 1562334 - RNA, 19 nt, Human adenovirus D
ccuagcauguacgccgcca

SEQ ID NO: 1562335 - RNA, 13 nt, Human adenovirus D
caccacugcaugg

SEQ ID NO: 1562336 - RNA, 15 nt, Human adenovirus D
ccaaccggcugaugc

SEQ ID NO: 1562337 - RNA, 13 nt, Human adenovirus D
guccccgcccgcc

SEQ ID NO: 1562338 - RNA, 19 nt, Human adenovirus D
gagggcaugggucaggcag

SEQ ID NO: 1562339 - RNA, 19 nt, Human adenovirus D
gacggcgcagcuguuccug

SEQ ID NO: 1562340 - RNA, 17 nt, Human adenovirus D
gcuccaccaccugcagc

SEQ ID NO: 1562341 - RNA, 17 nt, Human adenovirus D
ucaaugucagcugcaaa

SEQ ID NO: 1562342 - RNA, 24 nt, Human adenovirus D
ggguagguauucccucucgagagc

SEQ ID NO: 1562343 - RNA, 14 nt, Human adenovirus D
uggccccggggcgg

SEQ ID NO: 1562344 - RNA, 22 nt, Human adenovirus D
cuaagguggcuauuuucacuga

SEQ ID NO: 1562345 - RNA, 15 nt, Human adenovirus D
ggcacagacgaagaa

SEQ ID NO: 1562346 - RNA, 22 nt, Human adenovirus D
auccaacugaaguacauccauu

SEQ ID NO: 1562347 - RNA, 13 nt, Human adenovirus D
gcgagacccaggu

SEQ ID NO: 1562348 - RNA, 16 nt, Human adenovirus D
cggcagccgcagccgc

SEQ ID NO: 1562349 - RNA, 15 nt, Human adenovirus D
ccgcuguggagccac

SEQ ID NO: 1562350 - RNA, 14 nt, Human adenovirus D
cucaaugucagcug

SEQ ID NO: 1562351 - RNA, 18 nt, Human adenovirus D
cucagucacucucauuuc

SEQ ID NO: 1562352 - RNA, 17 nt, Human adenovirus D
gacgacugggaggcugc

SEQ ID NO: 1562353 - RNA, 22 nt, Human adenovirus D
cccauaauucagggugcuccag

SEQ ID NO: 1562354 - RNA, 13 nt, Human adenovirus D
gacggugagcagc

SEQ ID NO: 1562355 - RNA, 15 nt, Human adenovirus D
cugcgauauggauga

SEQ ID NO: 1562356 - RNA, 15 nt, Human adenovirus D
gcuauaaaucuuuuc

SEQ ID NO: 1562357 - RNA, 17 nt, Human adenovirus D
gaagaacauccauguga

SEQ ID NO: 1562358 - RNA, 13 nt, Human adenovirus D
uuaaaggcaccuu

SEQ ID NO: 1562359 - RNA, 15 nt, Human adenovirus D
gccgccgggccauga

SEQ ID NO: 1562360 - RNA, 16 nt, Human adenovirus D
cgcagacgagcggccg

SEQ ID NO: 1562361 - RNA, 21 nt, Human adenovirus D
ucaccguagagggcaccaccg

SEQ ID NO: 1562362 - RNA, 14 nt, Human adenovirus D
gagcugacggccag

SEQ ID NO: 1562363 - RNA, 16 nt, Human adenovirus D
aggggucuaucuggac

SEQ ID NO: 1562364 - RNA, 14 nt, Human adenovirus D
ccgcagcucuuccc

SEQ ID NO: 1562365 - RNA, 16 nt, Human adenovirus D
gcaagggcgaccagcu

SEQ ID NO: 1562366 - RNA, 20 nt, Human adenovirus D
ugcguggaagaauuuggaga

SEQ ID NO: 1562367 - RNA, 19 nt, Human adenovirus D
gcucgccgaggaggcgguc

SEQ ID NO: 1562368 - RNA, 21 nt, Human adenovirus D
gggcgcccagugcuuccagca

SEQ ID NO: 1562369 - RNA, 16 nt, Human adenovirus D
agguguccgagcuccg

SEQ ID NO: 1562370 - RNA, 14 nt, Human adenovirus D
ccaggcccagaacu

SEQ ID NO: 1562371 - RNA, 14 nt, Human adenovirus D
acagcgugguggcg

SEQ ID NO: 1562372 - RNA, 15 nt, Human adenovirus D
gcgauguugccaccc

SEQ ID NO: 1562373 - RNA, 12 nt, Human adenovirus D
gggagcgguggg

SEQ ID NO: 1562374 - RNA, 17 nt, Human adenovirus D
cuccaacgccugcgcca

SEQ ID NO: 1562375 - RNA, 12 nt, Human adenovirus D
agcacagcaccg

SEQ ID NO: 1562376 - RNA, 16 nt, Human adenovirus D
ccaaugcaacaugacc

SEQ ID NO: 1562377 - RNA, 23 nt, Human adenovirus D
ggcggaggcguacaugccgcaaa

SEQ ID NO: 1562378 - RNA, 14 nt, Human adenovirus D
gacaaagagcacag

SEQ ID NO: 1562379 - RNA, 16 nt, Human adenovirus D
ggcgccaucuugccca

SEQ ID NO: 1562380 - RNA, 11 nt, Human adenovirus D
cgcaccucgcg

SEQ ID NO: 1562381 - RNA, 17 nt, Human adenovirus D
augaaggcuuucacagc

SEQ ID NO: 1562382 - RNA, 21 nt, Human adenovirus D
agcacaugguaauccacggac

SEQ ID NO: 1562383 - RNA, 20 nt, Human adenovirus D
cgggaugaugaccgagcuga

SEQ ID NO: 1562384 - RNA, 23 nt, Human adenovirus D
aauaagcagaguacucauaaaga

SEQ ID NO: 1562385 - RNA, 22 nt, Human adenovirus D
cuguauuaccuuccuugcugga

SEQ ID NO: 1562386 - RNA, 16 nt, Human adenovirus D
ggucagaacauguucu

SEQ ID NO: 1562387 - RNA, 15 nt, Human adenovirus D
ucagguguccagcug

SEQ ID NO: 1562388 - RNA, 16 nt, Human adenovirus D
cagaaggacgugcgcc

SEQ ID NO: 1562389 - RNA, 23 nt, Human adenovirus D
ccucacaguccaggucacagucu

SEQ ID NO: 1562390 - RNA, 19 nt, Human adenovirus D
uggucagagugcaccagcc

SEQ ID NO: 1562391 - RNA, 20 nt, Human adenovirus D
ucauggccaacagccacaug

SEQ ID NO: 1562392 - RNA, 20 nt, Human adenovirus D
gugccuuuaucagcacugca

SEQ ID NO: 1562393 - RNA, 13 nt, Human adenovirus D
caggugcugccca

SEQ ID NO: 1562394 - RNA, 12 nt, Human adenovirus D
cgcuagccagcc

SEQ ID NO: 1562395 - RNA, 17 nt, Human adenovirus D
cagcccaaacuggggcg

SEQ ID NO: 1562396 - RNA, 15 nt, Human adenovirus D
augggaacauauauc

SEQ ID NO: 1562397 - RNA, 14 nt, Human adenovirus D
gguaagagcccagc

SEQ ID NO: 1562398 - RNA, 17 nt, Human adenovirus D
ggugagcucgggcugcu

SEQ ID NO: 1562399 - RNA, 22 nt, Human adenovirus D
gcugagcgaccgcgagcugaug

SEQ ID NO: 1562400 - RNA, 16 nt, Human adenovirus D
gacgcaagagccggcg

SEQ ID NO: 1562401 - RNA, 13 nt, Human adenovirus D
aucagcacugcaa

SEQ ID NO: 1562402 - RNA, 18 nt, Human adenovirus D
cccugcaagugcacagac

SEQ ID NO: 1562403 - RNA, 19 nt, Human adenovirus D
acggacuugauuggccugu

SEQ ID NO: 1562404 - RNA, 17 nt, Human adenovirus D
gcccgugggcugcggcu

SEQ ID NO: 1562405 - RNA, 13 nt, Human adenovirus D
gcugaaagcaugg

SEQ ID NO: 1562406 - RNA, 22 nt, Human adenovirus D
cauggcgcucaaggugcugacg

SEQ ID NO: 1562407 - RNA, 19 nt, Human adenovirus D
gaggagcgcauccugagau

SEQ ID NO: 1562408 - RNA, 16 nt, Human adenovirus D
gagcaaccuccugggc

SEQ ID NO: 1562409 - RNA, 19 nt, Human adenovirus D
cugagauaugugcagcaga

SEQ ID NO: 1562410 - RNA, 15 nt, Human adenovirus D
ccuggcucccagccu

SEQ ID NO: 1562411 - RNA, 20 nt, Human adenovirus D
cgaggaggccgugaaggccg

SEQ ID NO: 1562412 - RNA, 22 nt, Human adenovirus D
ucgaagauucuggagaaguucc

SEQ ID NO: 1562413 - RNA, 19 nt, Human adenovirus D
ucccucccucggcucgggu

SEQ ID NO: 1562414 - RNA, 23 nt, Human adenovirus D
uagggcgccaucuugcccacguc

SEQ ID NO: 1562415 - RNA, 15 nt, Human adenovirus D
cagcgaaagagagcu

SEQ ID NO: 1562416 - RNA, 15 nt, Human adenovirus D
ggcucggugcggcug

SEQ ID NO: 1562417 - RNA, 16 nt, Human adenovirus D
gcagacuuuagcaaga

SEQ ID NO: 1562418 - RNA, 17 nt, Human adenovirus D
gcuagagugccacugcc

SEQ ID NO: 1562419 - RNA, 20 nt, Human adenovirus D
aggagaacugcuggcccugc

SEQ ID NO: 1562420 - RNA, 21 nt, Human adenovirus D
gaggcguucagggaggcgcug

SEQ ID NO: 1562421 - RNA, 21 nt, Human adenovirus D
agaggagucgccggaggaggc

SEQ ID NO: 1562422 - RNA, 17 nt, Human adenovirus D
gcgauguugagcuggac

SEQ ID NO: 1562423 - RNA, 19 nt, Human adenovirus D
gcgaccgcgagcugaugcu

SEQ ID NO: 1562424 - RNA, 16 nt, Human adenovirus D
acucuuccgccgccga

SEQ ID NO: 1562425 - RNA, 15 nt, Human adenovirus D
gcggcgcgagcugag

SEQ ID NO: 1562426 - RNA, 23 nt, Human adenovirus D
gaccagggguccccgacgggggg

SEQ ID NO: 1562427 - RNA, 19 nt, Human adenovirus D
acccuaaucaauguaacua

SEQ ID NO: 1562428 - RNA, 16 nt, Human adenovirus D
ucacccugcccuucca

SEQ ID NO: 1562429 - RNA, 14 nt, Human adenovirus D
acgcaagagccggc

SEQ ID NO: 1562430 - RNA, 18 nt, Human adenovirus D
ugccagauugggggacga

SEQ ID NO: 1562431 - RNA, 15 nt, Human adenovirus D
gacguggugcugcug

SEQ ID NO: 1562432 - RNA, 14 nt, Human adenovirus D
aacgucccagcagc

SEQ ID NO: 1562433 - RNA, 13 nt, Human adenovirus D
ugccuugucuauc

SEQ ID NO: 1562434 - RNA, 17 nt, Human adenovirus D
ccaguuugggcacuggg

SEQ ID NO: 1562435 - RNA, 16 nt, Human adenovirus D
cugcuggcccacggcc

SEQ ID NO: 1562436 - RNA, 13 nt, Human adenovirus D
cgcuagccagcca

SEQ ID NO: 1562437 - RNA, 15 nt, Human adenovirus D
gaccauucugcacac

SEQ ID NO: 1562438 - RNA, 15 nt, Human adenovirus D
ucccagccuccaccg

SEQ ID NO: 1562439 - RNA, 18 nt, Human adenovirus D
ucacucuggccgugggcg

SEQ ID NO: 1562440 - RNA, 23 nt, Human adenovirus D
guacuuugucugcuguaaagcca

SEQ ID NO: 1562441 - RNA, 12 nt, Human adenovirus D
agaacaaggcca

SEQ ID NO: 1562442 - RNA, 22 nt, Human adenovirus D
gucacccugcccuuccagcaca

SEQ ID NO: 1562443 - RNA, 15 nt, Human adenovirus D
ggcagggagcugcgc

SEQ ID NO: 1562444 - RNA, 15 nt, Human adenovirus D
acugccgcugcaacc

SEQ ID NO: 1562445 - RNA, 20 nt, Human adenovirus D
uacagaugguagcagcagag

SEQ ID NO: 1562446 - RNA, 22 nt, Human adenovirus D
agcaagacacgccggcuuguag

SEQ ID NO: 1562447 - RNA, 13 nt, Human adenovirus D
aucuuccuggggc

SEQ ID NO: 1562448 - RNA, 23 nt, Human adenovirus D
gauguaaguuuuauggcugcugg

SEQ ID NO: 1562449 - RNA, 15 nt, Human adenovirus D
acuugauuggccugu

SEQ ID NO: 1562450 - RNA, 13 nt, Human adenovirus D
cacaggugcugcc

SEQ ID NO: 1562451 - RNA, 13 nt, Human adenovirus D
agaaggccggggc

SEQ ID NO: 1562452 - RNA, 23 nt, Human adenovirus D
gccagaaggggcaccuuccagcc

SEQ ID NO: 1562453 - RNA, 17 nt, Human adenovirus D
guacaugauccagcggc

SEQ ID NO: 1562454 - RNA, 24 nt, Human adenovirus D
cgcguaaauuggaaggggcgcagg

SEQ ID NO: 1562455 - RNA, 18 nt, Human adenovirus D
aguacauagugaccaaga

SEQ ID NO: 1562456 - RNA, 21 nt, Human adenovirus D
aagccuucuauggaggcagag

SEQ ID NO: 1562457 - RNA, 21 nt, Human adenovirus D
ggcucuuccuccguagccugg

SEQ ID NO: 1562458 - RNA, 19 nt, Human adenovirus D
gcacuuucauucucgagcg

SEQ ID NO: 1562459 - RNA, 14 nt, Human adenovirus D
gcugcucaccaccc

SEQ ID NO: 1562460 - RNA, 18 nt, Human adenovirus D
aguuuaauaaaagcuaaa

SEQ ID NO: 1562461 - RNA, 20 nt, Human adenovirus D
gcacaggcacacugacauac

SEQ ID NO: 1562462 - RNA, 16 nt, Human adenovirus D
gcugcugaucgcgccc

SEQ ID NO: 1562463 - RNA, 22 nt, Human adenovirus D
ugaaccugaacggcaucuuuga

SEQ ID NO: 1562464 - RNA, 15 nt, Human adenovirus D
ccgcucggccaugcc

SEQ ID NO: 1562465 - RNA, 15 nt, Human adenovirus D
ccugcagcgccaguc

SEQ ID NO: 1562466 - RNA, 14 nt, Human adenovirus D
ucgcggaugauguc

SEQ ID NO: 1562467 - RNA, 16 nt, Human adenovirus D
uccgcgaacagcagca

SEQ ID NO: 1562468 - RNA, 20 nt, Human adenovirus D
uuucaaauuuuauguaucuu

SEQ ID NO: 1562469 - RNA, 15 nt, Human adenovirus D
gucugccccccgccc

SEQ ID NO: 1562470 - RNA, 13 nt, Human adenovirus D
aagacccacagcc

SEQ ID NO: 1562471 - RNA, 13 nt, Human adenovirus D
uaccuucgagcug

SEQ ID NO: 1562472 - RNA, 17 nt, Human adenovirus D
ccugcagcaggugcugc

SEQ ID NO: 1562473 - RNA, 17 nt, Human adenovirus D
gguacuccagucuccgg

SEQ ID NO: 1562474 - RNA, 23 nt, Human adenovirus D
agcgguucugggucaccuuggcu

SEQ ID NO: 1562475 - RNA, 20 nt, Human adenovirus D
cuuccguugcgcugcaggcg

SEQ ID NO: 1562476 - RNA, 23 nt, Human adenovirus D
agcgguugagcgggcucuuccuc

SEQ ID NO: 1562477 - RNA, 16 nt, Human adenovirus D
caguuaaugcugccuu

SEQ ID NO: 1562478 - RNA, 22 nt, Human adenovirus D
cagcagugucucgaggacgaga

SEQ ID NO: 1562479 - RNA, 16 nt, Human adenovirus D
gcagaggucuggggcg

SEQ ID NO: 1562480 - RNA, 23 nt, Human adenovirus D
ccccaggcggugcugcugccgag

SEQ ID NO: 1562481 - RNA, 23 nt, Human adenovirus D
ugaacuacuggcuucuacagcca

SEQ ID NO: 1562482 - RNA, 24 nt, Human adenovirus D
cgagcccgagggucgcuggcugcu

SEQ ID NO: 1562483 - RNA, 18 nt, Human adenovirus D
cauugaauggcacuggca

SEQ ID NO: 1562484 - RNA, 15 nt, Human adenovirus D
ugcggcugaugguga

SEQ ID NO: 1562485 - RNA, 11 nt, Human adenovirus D
gcuccaaagcu

SEQ ID NO: 1562486 - RNA, 19 nt, Human adenovirus D
gaaaccccagacacccacg

SEQ ID NO: 1562487 - RNA, 16 nt, Human adenovirus D
agagaugagagucuga

SEQ ID NO: 1562488 - RNA, 14 nt, Human adenovirus D
aacagacagccagg

SEQ ID NO: 1562489 - RNA, 14 nt, Human adenovirus D
gaaccgccuggggc

SEQ ID NO: 1562490 - RNA, 22 nt, Human adenovirus D
accgcagcggggaggagcccga

SEQ ID NO: 1562491 - RNA, 22 nt, Human adenovirus D
gcugaugucgccgauggccucc

SEQ ID NO: 1562492 - RNA, 20 nt, Human adenovirus D
acaggccuaacuacauuggc

SEQ ID NO: 1562493 - RNA, 22 nt, Human adenovirus D
acauuccugcaccauccccagg

SEQ ID NO: 1562494 - RNA, 16 nt, Human adenovirus D
cugcagggagccaggg

SEQ ID NO: 1562495 - RNA, 22 nt, Human adenovirus D
ucauaucccaggggacuggaaa

SEQ ID NO: 1562496 - RNA, 22 nt, Human adenovirus D
ccugcacgagaaccgccugggg

SEQ ID NO: 1562497 - RNA, 23 nt, Human adenovirus D
aaucaggaugguuuacaauuuug

SEQ ID NO: 1562498 - RNA, 14 nt, Human adenovirus D
cuuaaccacccacg

SEQ ID NO: 1562499 - RNA, 16 nt, Human adenovirus D
guugcgcagcggcagg

SEQ ID NO: 1562500 - RNA, 13 nt, Human adenovirus D
ucgagagcgggca

SEQ ID NO: 1562501 - RNA, 11 nt, Human adenovirus D
cuuuggcuuuu

SEQ ID NO: 1562502 - RNA, 13 nt, Human adenovirus D
uagacauggccag

SEQ ID NO: 1562503 - RNA, 16 nt, Human adenovirus D
agacauggccagcacg

SEQ ID NO: 1562504 - RNA, 16 nt, Human adenovirus D
cuccacgccaccaccc

SEQ ID NO: 1562505 - RNA, 14 nt, Human adenovirus D
cugcagacaucaug

SEQ ID NO: 1562506 - RNA, 23 nt, Human adenovirus D
cucgcagaucugcaucucccagg

SEQ ID NO: 1562507 - RNA, 14 nt, Human adenovirus D
caugugaacaaaac

SEQ ID NO: 1562508 - RNA, 18 nt, Human adenovirus D
ccuuguagggacagcagc

SEQ ID NO: 1562509 - RNA, 14 nt, Human adenovirus D
gauggggccccgcc

SEQ ID NO: 1562510 - RNA, 14 nt, Human adenovirus D
cuccguuguacgac

SEQ ID NO: 1562511 - RNA, 13 nt, Human adenovirus D
ccgccaacaccaa

SEQ ID NO: 1562512 - RNA, 22 nt, Human adenovirus D
aggugaugccggcagcgguggu

SEQ ID NO: 1562513 - RNA, 20 nt, Human adenovirus D
gccagcugaacgggggcgcc

SEQ ID NO: 1562514 - RNA, 14 nt, Human adenovirus D
gaagaucagcugca

SEQ ID NO: 1562515 - RNA, 16 nt, Human adenovirus D
cgggcgggcagggagc

SEQ ID NO: 1562516 - RNA, 13 nt, Human adenovirus D
gugcucccauagc

SEQ ID NO: 1562517 - RNA, 17 nt, Human adenovirus D
cggacguggugcugcug

SEQ ID NO: 1562518 - RNA, 18 nt, Human adenovirus D
aucgaacacgccaccgcu

SEQ ID NO: 1562519 - RNA, 22 nt, Human adenovirus D
gcgccucccaggacuacuccac

SEQ ID NO: 1562520 - RNA, 16 nt, Human adenovirus D
cuggcuucuacagcca

SEQ ID NO: 1562521 - RNA, 22 nt, Human adenovirus D
aggagcagcgccccgaggacac

SEQ ID NO: 1562522 - RNA, 16 nt, Human adenovirus D
caucacaucagccagg

SEQ ID NO: 1562523 - RNA, 22 nt, Human adenovirus D
cugagguaaaauucaacugcag

SEQ ID NO: 1562524 - RNA, 17 nt, Human adenovirus D
agggggcgguggcagga

SEQ ID NO: 1562525 - RNA, 18 nt, Human adenovirus D
ccaugagggucuggagcu

SEQ ID NO: 1562526 - RNA, 21 nt, Human adenovirus D
aagaggcuccggguggaagau

SEQ ID NO: 1562527 - RNA, 23 nt, Human adenovirus D
gguccgcaggaguccaccgcucc

SEQ ID NO: 1562528 - RNA, 18 nt, Human adenovirus D
cguucagggaggcgcugc

SEQ ID NO: 1562529 - RNA, 15 nt, Human adenovirus D
uacgugcccuuccac

SEQ ID NO: 1562530 - RNA, 15 nt, Human adenovirus D
gcagaggucuggggc

SEQ ID NO: 1562531 - RNA, 21 nt, Human adenovirus D
gcaacugcgcguccgucagca

SEQ ID NO: 1562532 - RNA, 16 nt, Human adenovirus D
gcaccugugggaccug

SEQ ID NO: 1562533 - RNA, 14 nt, Human adenovirus D
gcguguggcagcag

SEQ ID NO: 1562534 - RNA, 13 nt, Human adenovirus D
gucgcagccgccg

SEQ ID NO: 1562535 - RNA, 22 nt, Human adenovirus D
aaaccuuaguugggccuccagg

SEQ ID NO: 1562536 - RNA, 14 nt, Human adenovirus D
gcuggcugcuggag

SEQ ID NO: 1562537 - RNA, 15 nt, Human adenovirus D
gggcaugagcccguc

SEQ ID NO: 1562538 - RNA, 19 nt, Human adenovirus D
ggagaugcgcgacugccgg

SEQ ID NO: 1562539 - RNA, 21 nt, Human adenovirus D
uccaccgaaggcagcuccggu

SEQ ID NO: 1562540 - RNA, 17 nt, Human adenovirus D
cauggugcccaagcgcc

SEQ ID NO: 1562541 - RNA, 17 nt, Human adenovirus D
caccccaggcggaccag

SEQ ID NO: 1562542 - RNA, 17 nt, Human adenovirus D
ugccuuccaaaauguga

SEQ ID NO: 1562543 - RNA, 23 nt, Human adenovirus D
ggccugugcaaugucaggucugc

SEQ ID NO: 1562544 - RNA, 18 nt, Human adenovirus D
gaaacagauccugcugcu

SEQ ID NO: 1562545 - RNA, 12 nt, Human adenovirus D
guggcggggccc

SEQ ID NO: 1562546 - RNA, 16 nt, Human adenovirus D
cacucaaacuggcuga

SEQ ID NO: 1562547 - RNA, 19 nt, Human adenovirus D
gccuuuccccaccuacucc

SEQ ID NO: 1562548 - RNA, 14 nt, Human adenovirus D
gcucaucggccaga

SEQ ID NO: 1562549 - RNA, 15 nt, Human adenovirus D
cgcggcacggcacgc

SEQ ID NO: 1562550 - RNA, 23 nt, Human adenovirus D
gaagaggagcugaucucgcugcc

SEQ ID NO: 1562551 - RNA, 14 nt, Human adenovirus D
gcugcaaagccagc

SEQ ID NO: 1562552 - RNA, 24 nt, Human adenovirus D
ggugcccaagcgccggcgcgugga

SEQ ID NO: 1562553 - RNA, 16 nt, Human adenovirus D
cugggagggaugcaug

SEQ ID NO: 1562554 - RNA, 22 nt, Human adenovirus D
cacaguuaguacaacuacacag

SEQ ID NO: 1562555 - RNA, 12 nt, Human adenovirus D
accgccuccccg

SEQ ID NO: 1562556 - RNA, 21 nt, Human adenovirus D
caguuaagaauccacagauca

SEQ ID NO: 1562557 - RNA, 15 nt, Human adenovirus D
cgucaucacccaggg

SEQ ID NO: 1562558 - RNA, 20 nt, Human adenovirus D
gccgggccaugaugcgagcc

SEQ ID NO: 1562559 - RNA, 19 nt, Human adenovirus D
agcgugcguucucuuccuu

SEQ ID NO: 1562560 - RNA, 15 nt, Human adenovirus D
cuuccugcagcucau

SEQ ID NO: 1562561 - RNA, 20 nt, Human adenovirus D
gacaguagcgucucaagaga

SEQ ID NO: 1562562 - RNA, 15 nt, Human adenovirus D
cagggugcuccagcc

SEQ ID NO: 1562563 - RNA, 19 nt, Human adenovirus D
acguacuucagccugggca

SEQ ID NO: 1562564 - RNA, 15 nt, Human adenovirus D
gccuguccugcaggg

SEQ ID NO: 1562565 - RNA, 19 nt, Human adenovirus D
agacgcugaaaggcgggcu

SEQ ID NO: 1562566 - RNA, 16 nt, Human adenovirus D
gcauguacaacaugcu

SEQ ID NO: 1562567 - RNA, 16 nt, Human adenovirus D
aacucuguugaggcau

SEQ ID NO: 1562568 - RNA, 20 nt, Human adenovirus D
ccucgccgucuacucccagc

SEQ ID NO: 1562569 - RNA, 15 nt, Human adenovirus D
ccaggcccuggagca

SEQ ID NO: 1562570 - RNA, 14 nt, Human adenovirus D
gaucaagugccaca

SEQ ID NO: 1562571 - RNA, 18 nt, Human adenovirus D
ccgaggugccccagagcg

SEQ ID NO: 1562572 - RNA, 23 nt, Human adenovirus D
ccacucgcgggcggccauugcuc

SEQ ID NO: 1562573 - RNA, 20 nt, Human adenovirus D
aacuacuggcuucuacagcc

SEQ ID NO: 1562574 - RNA, 17 nt, Human adenovirus D
aaagccacaaccagagc

SEQ ID NO: 1562575 - RNA, 19 nt, Human adenovirus D
aucaaaacgaccacagcaa

SEQ ID NO: 1562576 - RNA, 16 nt, Human adenovirus D
cugcuacaucucgggg

SEQ ID NO: 1562577 - RNA, 17 nt, Human adenovirus D
agccaucgcgcaggagg

SEQ ID NO: 1562578 - RNA, 20 nt, Human adenovirus D
guagcugcgcggggccacga

SEQ ID NO: 1562579 - RNA, 20 nt, Human adenovirus D
uggaagaagaaugggacagc

SEQ ID NO: 1562580 - RNA, 18 nt, Human adenovirus D
ucccggcgcaguacgcgc

SEQ ID NO: 1562581 - RNA, 23 nt, Human adenovirus D
guaguugcgcaggcgcuggaaga

SEQ ID NO: 1562582 - RNA, 18 nt, Human adenovirus D
aucgccgaggagaacugc

SEQ ID NO: 1562583 - RNA, 23 nt, Human adenovirus D
ugcguaccuugucguacuucugc

SEQ ID NO: 1562584 - RNA, 23 nt, Human adenovirus D
augggcgccuucaccgaccuggg

SEQ ID NO: 1562585 - RNA, 14 nt, Human adenovirus D
gagagaacaaaacc

SEQ ID NO: 1562586 - RNA, 21 nt, Human adenovirus D
gggggccacucccagcgccgc

SEQ ID NO: 1562587 - RNA, 20 nt, Human adenovirus D
caugaccauagaccugauga

SEQ ID NO: 1562588 - RNA, 18 nt, Human adenovirus D
uccccccuuugucuccuc

SEQ ID NO: 1562589 - RNA, 17 nt, Human adenovirus D
acaugcucuaccccauc

SEQ ID NO: 1562590 - RNA, 17 nt, Human adenovirus D
gugucccugaccaugac

SEQ ID NO: 1562591 - RNA, 23 nt, Human adenovirus D
gcgcuugagacucauccugcugg

SEQ ID NO: 1562592 - RNA, 22 nt, Human adenovirus D
aaucucccaccaccagcccauu

SEQ ID NO: 1562593 - RNA, 15 nt, Human adenovirus D
cagauuuaagcaagg

SEQ ID NO: 1562594 - RNA, 11 nt, Human adenovirus D
agaugcagcaa

SEQ ID NO: 1562595 - RNA, 22 nt, Human adenovirus D
cuucgaguacgaggccaugcug

SEQ ID NO: 1562596 - RNA, 23 nt, Human adenovirus D
ccgacgauguagaguuccaugaa

SEQ ID NO: 1562597 - RNA, 19 nt, Human adenovirus D
cagcggcagggugagccgg

SEQ ID NO: 1562598 - RNA, 21 nt, Human adenovirus D
agaacccggacagcaagccuc

SEQ ID NO: 1562599 - RNA, 14 nt, Human adenovirus D
gggcgugcagaccg

SEQ ID NO: 1562600 - RNA, 11 nt, Human adenovirus D
gcaccgcuccu

SEQ ID NO: 1562601 - RNA, 14 nt, Human adenovirus D
cuggaagcccugag

SEQ ID NO: 1562602 - RNA, 16 nt, Human adenovirus D
gcccugcucaccugca

SEQ ID NO: 1562603 - RNA, 18 nt, Human adenovirus D
cucuacgccaccuucuuc

SEQ ID NO: 1562604 - RNA, 13 nt, Human adenovirus D
gcaggcagcggcc

SEQ ID NO: 1562605 - RNA, 20 nt, Human adenovirus D
ccaggguugagucgcggcag

SEQ ID NO: 1562606 - RNA, 17 nt, Human adenovirus D
ggaguucgucagaaugu

SEQ ID NO: 1562607 - RNA, 19 nt, Human adenovirus D
caugacccugcauggcugc

SEQ ID NO: 1562608 - RNA, 16 nt, Human adenovirus D
agccugaugagcucgg

SEQ ID NO: 1562609 - RNA, 22 nt, Human adenovirus D
ggagaacgaugccuucuccagg

SEQ ID NO: 1562610 - RNA, 16 nt, Human adenovirus D
cgucccggaggagggg

SEQ ID NO: 1562611 - RNA, 21 nt, Human adenovirus D
agcaggagugcagggaugagu

SEQ ID NO: 1562612 - RNA, 24 nt, Human adenovirus D
cggcgaggggcugcuagagugcca

SEQ ID NO: 1562613 - RNA, 21 nt, Human adenovirus D
caaauccaacucuuaaaucau

SEQ ID NO: 1562614 - RNA, 15 nt, Human adenovirus D
ccaacggcaaacagc

SEQ ID NO: 1562615 - RNA, 20 nt, Human adenovirus D
guccacgcugguggccaccu

SEQ ID NO: 1562616 - RNA, 14 nt, Human adenovirus D
cuacaacagcacaa

SEQ ID NO: 1562617 - RNA, 21 nt, Human adenovirus D
acucgcaaaaauaaaucauug

SEQ ID NO: 1562618 - RNA, 14 nt, Human adenovirus D
ucauuuuuccagcc

SEQ ID NO: 1562619 - RNA, 20 nt, Human adenovirus D
cccgccgaggcuagcacgca

SEQ ID NO: 1562620 - RNA, 15 nt, Human adenovirus D
guggaagagauggaa

SEQ ID NO: 1562621 - RNA, 21 nt, Human adenovirus D
cauggugggcgucaaccccau

SEQ ID NO: 1562622 - RNA, 17 nt, Human adenovirus D
ucaucacaucagccagg

SEQ ID NO: 1562623 - RNA, 18 nt, Human adenovirus D
ccaggaugcagccagugg

SEQ ID NO: 1562624 - RNA, 20 nt, Human adenovirus D
gaugacggguugcagguggu

SEQ ID NO: 1562625 - RNA, 16 nt, Human adenovirus D
gcgaucccgcuguggc

SEQ ID NO: 1562626 - RNA, 12 nt, Human adenovirus D
gcguguggcagc

SEQ ID NO: 1562627 - RNA, 16 nt, Human adenovirus D
uguuggagcaggcggc

SEQ ID NO: 1562628 - RNA, 19 nt, Human adenovirus D
caaucuggcgguaccaggg

SEQ ID NO: 1562629 - RNA, 12 nt, Human adenovirus D
ugcuuccagcaa

SEQ ID NO: 1562630 - RNA, 15 nt, Human adenovirus D
cuccaaagcuagcac

SEQ ID NO: 1562631 - RNA, 15 nt, Human adenovirus D
caccuggaggcacca

SEQ ID NO: 1562632 - RNA, 16 nt, Human adenovirus D
auccgcgccgcagccc

SEQ ID NO: 1562633 - RNA, 19 nt, Human adenovirus D
acacgcuguaccgcagcug

SEQ ID NO: 1562634 - RNA, 12 nt, Human adenovirus D
caggucugcugg

SEQ ID NO: 1562635 - RNA, 18 nt, Human adenovirus D
ccgaggagaacugcuggc

SEQ ID NO: 1562636 - RNA, 16 nt, Human adenovirus D
gcccucucaacaucac

SEQ ID NO: 1562637 - RNA, 19 nt, Human adenovirus D
cggcagcggggccuggugu

SEQ ID NO: 1562638 - RNA, 13 nt, Human adenovirus D
ucgcuggacccca

SEQ ID NO: 1562639 - RNA, 14 nt, Human adenovirus D
ugaaccgccgccgg

SEQ ID NO: 1562640 - RNA, 19 nt, Human adenovirus D
ugcaccacgcuucuucccc

SEQ ID NO: 1562641 - RNA, 15 nt, Human adenovirus D
auaaagaauaugcca

SEQ ID NO: 1562642 - RNA, 15 nt, Human adenovirus D
ccaggccuggcccug

SEQ ID NO: 1562643 - RNA, 15 nt, Human adenovirus D
cugaucagaaacaca

SEQ ID NO: 1562644 - RNA, 15 nt, Human adenovirus D
cagguggacgagccg

SEQ ID NO: 1562645 - RNA, 16 nt, Human adenovirus D
ugagcucgucuuccag

SEQ ID NO: 1562646 - RNA, 15 nt, Human adenovirus D
cgucuuugccaugga

SEQ ID NO: 1562647 - RNA, 17 nt, Human adenovirus D
cgagaaccgccuggggc

SEQ ID NO: 1562648 - RNA, 22 nt, Human adenovirus D
gagcagugucuggagcgggcuu

SEQ ID NO: 1562649 - RNA, 19 nt, Human adenovirus D
uagucaucacccagcaguc

SEQ ID NO: 1562650 - RNA, 20 nt, Human adenovirus D
cgcugcacgggcuguaccuc

SEQ ID NO: 1562651 - RNA, 16 nt, Human adenovirus D
gaggggggccaccucg

SEQ ID NO: 1562652 - RNA, 15 nt, Human adenovirus D
ucauguacuacaaca

SEQ ID NO: 1562653 - RNA, 16 nt, Human adenovirus D
agcucaaagaccagaa

SEQ ID NO: 1562654 - RNA, 20 nt, Human adenovirus D
ccaacaugcucuaccccauc

SEQ ID NO: 1562655 - RNA, 23 nt, Human adenovirus D
ccucgaugaaagucaggagcagc

SEQ ID NO: 1562656 - RNA, 15 nt, Human adenovirus D
ccgagcucugcugcg

SEQ ID NO: 1562657 - RNA, 16 nt, Human adenovirus D
cccgagcucugcugcg

SEQ ID NO: 1562658 - RNA, 23 nt, Human adenovirus D
gucauaacccgccucuccuuucu

SEQ ID NO: 1562659 - RNA, 18 nt, Human adenovirus D
aaauuuuuauuuccucug

SEQ ID NO: 1562660 - RNA, 15 nt, Human adenovirus D
cuagagugaggcacu

SEQ ID NO: 1562661 - RNA, 12 nt, Human adenovirus D
agcagcggcgca

SEQ ID NO: 1562662 - RNA, 13 nt, Human adenovirus D
ccgccaaccggcu

SEQ ID NO: 1562663 - RNA, 15 nt, Human adenovirus D
cgcgaggacgcagcg

SEQ ID NO: 1562664 - RNA, 19 nt, Human adenovirus D
gcuaccucuugcagcuggc

SEQ ID NO: 1562665 - RNA, 20 nt, Human adenovirus D
gggcgcucccaaucccaguc

SEQ ID NO: 1562666 - RNA, 18 nt, Human adenovirus D
ggagggauugcagggcgu

SEQ ID NO: 1562667 - RNA, 23 nt, Human adenovirus D
uucgucaggcaggcaugcaagau

SEQ ID NO: 1562668 - RNA, 23 nt, Human adenovirus D
acgcucaggaccauagggagccu

SEQ ID NO: 1562669 - RNA, 14 nt, Human adenovirus D
acagacagccaggu

SEQ ID NO: 1562670 - RNA, 22 nt, Human adenovirus D
acgccggcucaucugcagggcg

SEQ ID NO: 1562671 - RNA, 23 nt, Human adenovirus D
ggcaaugcuagagugaggcacug

SEQ ID NO: 1562672 - RNA, 14 nt, Human adenovirus D
aggcuuucacagcu

SEQ ID NO: 1562673 - RNA, 14 nt, Human adenovirus D
ccugcaagaggaga

SEQ ID NO: 1562674 - RNA, 14 nt, Human adenovirus D
gcccuuccagcaca

SEQ ID NO: 1562675 - RNA, 15 nt, Human adenovirus D
ggcgcaagcucaugc

SEQ ID NO: 1562676 - RNA, 16 nt, Human adenovirus D
caagcucaugcuggcc

SEQ ID NO: 1562677 - RNA, 13 nt, Human adenovirus D
cucccaaguucaa

SEQ ID NO: 1562678 - RNA, 18 nt, Human adenovirus D
aaucagaguaagaggagu

SEQ ID NO: 1562679 - RNA, 13 nt, Human adenovirus D
cagucgcaccuuc

SEQ ID NO: 1562680 - RNA, 16 nt, Human adenovirus D
augggccuggccgcgg

SEQ ID NO: 1562681 - RNA, 19 nt, Human adenovirus D
agaaggugagggggucccg

SEQ ID NO: 1562682 - RNA, 16 nt, Human adenovirus D
agccgcgcgcuggggc

SEQ ID NO: 1562683 - RNA, 19 nt, Human adenovirus D
gcuguggucgacuugcaag

SEQ ID NO: 1562684 - RNA, 11 nt, Human adenovirus D
ggcugcugcug

SEQ ID NO: 1562685 - RNA, 14 nt, Human adenovirus D
uucgacagcgucaa

SEQ ID NO: 1562686 - RNA, 23 nt, Human adenovirus D
gaaaccagauauuguuggagcag

SEQ ID NO: 1562687 - RNA, 19 nt, Human adenovirus D
gugauacgaggcagaggca

SEQ ID NO: 1562688 - RNA, 21 nt, Human adenovirus D
gcacgcccgcgagcgagggcg

SEQ ID NO: 1562689 - RNA, 20 nt, Human adenovirus D
uggcccugggccugaugcac

SEQ ID NO: 1562690 - RNA, 20 nt, Human adenovirus D
  misc_feature (7)..(7): n is a, c, g, or u
ggagucnuacuucgacaugg

SEQ ID NO: 1562691 - RNA, 11 nt, Human adenovirus D
gccagcagcac

SEQ ID NO: 1562692 - RNA, 20 nt, Human adenovirus D
auaaaagggggcgggucugu

SEQ ID NO: 1562693 - RNA, 15 nt, Human adenovirus D
ugaaagucaggagca

SEQ ID NO: 1562694 - RNA, 17 nt, Human adenovirus D
aggucgaggagaccugc

SEQ ID NO: 1562695 - RNA, 21 nt, Human adenovirus D
acugccgguuucgggcgggca

SEQ ID NO: 1562696 - RNA, 16 nt, Human adenovirus D
gaggaggggggccacc

SEQ ID NO: 1562697 - RNA, 23 nt, Human adenovirus D
ccagugauuggggaaccucagcc

SEQ ID NO: 1562698 - RNA, 21 nt, Human adenovirus D
uacaccaggccuacuacuccu

SEQ ID NO: 1562699 - RNA, 12 nt, Human adenovirus D
cgcucaggacca

SEQ ID NO: 1562700 - RNA, 16 nt, Human adenovirus D
caucgccgagcccgag

SEQ ID NO: 1562701 - RNA, 15 nt, Human adenovirus D
acgcccuggccgacc

SEQ ID NO: 1562702 - RNA, 22 nt, Human adenovirus D
ccaugcagacacuugagcuggc

SEQ ID NO: 1562703 - RNA, 14 nt, Human adenovirus D
cgggaaccccacca

SEQ ID NO: 1562704 - RNA, 18 nt, Human adenovirus D
caaccucaccaaccagac

SEQ ID NO: 1562705 - RNA, 16 nt, Human adenovirus D
acacguagcagcccug

SEQ ID NO: 1562706 - RNA, 15 nt, Human adenovirus D
ccuggucgagcggga

SEQ ID NO: 1562707 - RNA, 13 nt, Human adenovirus D
cucguaggugagg

SEQ ID NO: 1562708 - RNA, 12 nt, Human adenovirus D
gcagccgagccg

SEQ ID NO: 1562709 - RNA, 12 nt, Human adenovirus D
gugggccccugg

SEQ ID NO: 1562710 - RNA, 16 nt, Human adenovirus D
gcgggugaugguggcu

SEQ ID NO: 1562711 - RNA, 15 nt, Human adenovirus D
gccgccgcaccgcca

SEQ ID NO: 1562712 - RNA, 23 nt, Human adenovirus D
caugagcucguaguugagggccu

SEQ ID NO: 1562713 - RNA, 15 nt, Human adenovirus D
cuucuacagccagca

SEQ ID NO: 1562714 - RNA, 19 nt, Human adenovirus D
gaagagaaucuugccugcu

SEQ ID NO: 1562715 - RNA, 20 nt, Human adenovirus D
auucucauuuuuccagccuu

SEQ ID NO: 1562716 - RNA, 15 nt, Human adenovirus D
acgccgaggcucugu

SEQ ID NO: 1562717 - RNA, 14 nt, Human adenovirus D
gcgccugaggcaga

SEQ ID NO: 1562718 - RNA, 18 nt, Human adenovirus D
cggcaucuuccuggggca

SEQ ID NO: 1562719 - RNA, 18 nt, Human adenovirus D
caggcgggacagaggagg

SEQ ID NO: 1562720 - RNA, 22 nt, Human adenovirus D
aagucacaguuauaccaccucc

SEQ ID NO: 1562721 - RNA, 14 nt, Human adenovirus D
cauagaccugauga

SEQ ID NO: 1562722 - RNA, 16 nt, Human adenovirus D
uggcgcucgggcaggu

SEQ ID NO: 1562723 - RNA, 12 nt, Human adenovirus D
gauugcucuggc

SEQ ID NO: 1562724 - RNA, 18 nt, Human adenovirus D
ucgacgcagugagagaag

SEQ ID NO: 1562725 - RNA, 13 nt, Human adenovirus D
agaaccaugaagg

SEQ ID NO: 1562726 - RNA, 23 nt, Human adenovirus D
acgccguucuccgccggaaacgc

SEQ ID NO: 1562727 - RNA, 20 nt, Human adenovirus D
guauuaccuuccuugcugga

SEQ ID NO: 1562728 - RNA, 17 nt, Human adenovirus D
cauaauagaaacagauc

SEQ ID NO: 1562729 - RNA, 19 nt, Human adenovirus D
cuagacuugaaagcggccg

SEQ ID NO: 1562730 - RNA, 14 nt, Human adenovirus D
cagugucucgagga

SEQ ID NO: 1562731 - RNA, 13 nt, Human adenovirus D
uugcaaggcagaa

SEQ ID NO: 1562732 - RNA, 17 nt, Human adenovirus D
uggacuugggcgggagc

SEQ ID NO: 1562733 - RNA, 12 nt, Human adenovirus D
agaaugcugcua

SEQ ID NO: 1562734 - RNA, 23 nt, Human adenovirus D
gggcucuuccuccguagccuggc

SEQ ID NO: 1562735 - RNA, 20 nt, Human adenovirus D
gcgagugcgggggcagacac

SEQ ID NO: 1562736 - RNA, 20 nt, Human adenovirus D
caacaugaccaaggacuggu

SEQ ID NO: 1562737 - RNA, 19 nt, Human adenovirus D
gcgcgugcccgugcgcacc

SEQ ID NO: 1562738 - RNA, 21 nt, Human adenovirus D
gccggggguucauguugugca

SEQ ID NO: 1562739 - RNA, 17 nt, Human adenovirus D
ugcuccaaagcuagcac

SEQ ID NO: 1562740 - RNA, 22 nt, Human adenovirus D
gcuuguaaaagcguccgcagua

SEQ ID NO: 1562741 - RNA, 13 nt, Human adenovirus D
ugcaaccugugcu

SEQ ID NO: 1562742 - RNA, 20 nt, Human adenovirus D
gcugacauccauggccaggg

SEQ ID NO: 1562743 - RNA, 16 nt, Human adenovirus D
ucagccccuuccccua

SEQ ID NO: 1562744 - RNA, 19 nt, Human adenovirus D
cuaugagaugccccagcag

SEQ ID NO: 1562745 - RNA, 18 nt, Human adenovirus D
acaucacauucaaaaacc

SEQ ID NO: 1562746 - RNA, 19 nt, Human adenovirus D
cgaagacgagggcgcgcag

SEQ ID NO: 1562747 - RNA, 21 nt, Human adenovirus D
gagcucuugcagggaagcaaa

SEQ ID NO: 1562748 - RNA, 15 nt, Human adenovirus D
cagccaaagcucaug

SEQ ID NO: 1562749 - RNA, 16 nt, Human adenovirus D
gccuacgguccagagg

SEQ ID NO: 1562750 - RNA, 18 nt, Human adenovirus D
gguagcaccacugcaugg

SEQ ID NO: 1562751 - RNA, 14 nt, Human adenovirus D
caugaccgcgcgca

SEQ ID NO: 1562752 - RNA, 17 nt, Human adenovirus D
aguugcagaccgcgggc

SEQ ID NO: 1562753 - RNA, 21 nt, Human adenovirus D
caaagaccagaacuuccagca

SEQ ID NO: 1562754 - RNA, 15 nt, Human adenovirus D
cggccagucugauga

SEQ ID NO: 1562755 - RNA, 21 nt, Human adenovirus D
gauggccuguaccgggaccga

SEQ ID NO: 1562756 - RNA, 18 nt, Human adenovirus D
ccgcgguuaugcagggug

SEQ ID NO: 1562757 - RNA, 21 nt, Human adenovirus D
gcaaaauaaaacucaccaagg

SEQ ID NO: 1562758 - RNA, 19 nt, Human adenovirus D
ccauagggagccugcgccc

SEQ ID NO: 1562759 - RNA, 15 nt, Human adenovirus D
ugcugcagccgccgc

SEQ ID NO: 1562760 - RNA, 14 nt, Human adenovirus D
acggagggcagaaa

SEQ ID NO: 1562761 - RNA, 14 nt, Human adenovirus D
gcgccgcgccgcca

SEQ ID NO: 1562762 - RNA, 22 nt, Human adenovirus D
cucccagcucauccgcagcuac

SEQ ID NO: 1562763 - RNA, 13 nt, Human adenovirus D
ucacauuaaaggc

SEQ ID NO: 1562764 - RNA, 15 nt, Human adenovirus D
cgcuggccagcacgc

SEQ ID NO: 1562765 - RNA, 22 nt, Human adenovirus D
ccacgagcgccagcuguugggg

SEQ ID NO: 1562766 - RNA, 14 nt, Human adenovirus D
uagagggcaccacc

SEQ ID NO: 1562767 - RNA, 23 nt, Human adenovirus D
ugacauggguggggaugaaccuu

SEQ ID NO: 1562768 - RNA, 20 nt, Human adenovirus D
agguuuggcauaucagccag

SEQ ID NO: 1562769 - RNA, 15 nt, Human adenovirus D
cuugcugggcgagga

SEQ ID NO: 1562770 - RNA, 15 nt, Human adenovirus D
agcagucucugccgc

SEQ ID NO: 1562771 - RNA, 17 nt, Human adenovirus D
cucagcagucucugccg

SEQ ID NO: 1562772 - RNA, 18 nt, Human adenovirus D
gguacaugggcaugagcc

SEQ ID NO: 1562773 - RNA, 18 nt, Human adenovirus D
gcccgugaccugcagcag

SEQ ID NO: 1562774 - RNA, 23 nt, Human adenovirus D
ccaggaggagaccgacgcugggc

SEQ ID NO: 1562775 - RNA, 21 nt, Human adenovirus D
acuuugucugcuguaaagcca

SEQ ID NO: 1562776 - RNA, 12 nt, Human adenovirus D
gggaggagcccg

SEQ ID NO: 1562777 - RNA, 19 nt, Human adenovirus D
ccagcugaacgggggcgcc

SEQ ID NO: 1562778 - RNA, 17 nt, Human adenovirus D
gccacaugcaccugggc

SEQ ID NO: 1562779 - RNA, 16 nt, Human adenovirus D
uccgcugugcuggugg

SEQ ID NO: 1562780 - RNA, 20 nt, Human adenovirus D
ucccgcccgacacugcaggg

SEQ ID NO: 1562781 - RNA, 15 nt, Human adenovirus D
accaccccaggcgga

SEQ ID NO: 1562782 - RNA, 20 nt, Human adenovirus D
agcacgagcaagacgcaggc

SEQ ID NO: 1562783 - RNA, 20 nt, Human adenovirus D
auggcgcaggcgacccugga

SEQ ID NO: 1562784 - RNA, 23 nt, Human adenovirus D
acgaugagaccaaguccagggug

SEQ ID NO: 1562785 - RNA, 14 nt, Human adenovirus D
gaggcgguccccgc

SEQ ID NO: 1562786 - RNA, 18 nt, Human adenovirus D
ucagcugcagcgcacucu

SEQ ID NO: 1562787 - RNA, 13 nt, Human adenovirus D
gauggcgugcgag

SEQ ID NO: 1562788 - RNA, 16 nt, Human adenovirus D
caggggcggcagaggc

SEQ ID NO: 1562789 - RNA, 18 nt, Human adenovirus D
guacaacgcccugcugga

SEQ ID NO: 1562790 - RNA, 23 nt, Human adenovirus D
uaccugcccgacuccuacaagua

SEQ ID NO: 1562791 - RNA, 13 nt, Human adenovirus D
agagcccccuccc

SEQ ID NO: 1562792 - RNA, 15 nt, Human adenovirus D
gcuugccgggcucug

SEQ ID NO: 1562793 - RNA, 22 nt, Human adenovirus D
cugacgcccaacucgcggcugc

SEQ ID NO: 1562794 - RNA, 15 nt, Human adenovirus D
cggcgaggggcugcu

SEQ ID NO: 1562795 - RNA, 17 nt, Human adenovirus D
gaccccuggcucccagc

SEQ ID NO: 1562796 - RNA, 18 nt, Human adenovirus D
ccagcgagugaccgucac

SEQ ID NO: 1562797 - RNA, 13 nt, Human adenovirus D
ucucaacagcugg

SEQ ID NO: 1562798 - RNA, 16 nt, Human adenovirus D
acucguaccuggguca

SEQ ID NO: 1562799 - RNA, 20 nt, Human adenovirus D
gaugcugcccgccaccugca

SEQ ID NO: 1562800 - RNA, 19 nt, Human adenovirus D
gccaggugagcucgggcug

SEQ ID NO: 1562801 - RNA, 21 nt, Human adenovirus D
cagcgcgaguagucaaucucc

SEQ ID NO: 1562802 - RNA, 13 nt, Human adenovirus D
ugauuuuuccagc

SEQ ID NO: 1562803 - RNA, 19 nt, Human adenovirus D
gcgcgggcggacugccacc

SEQ ID NO: 1562804 - RNA, 16 nt, Human adenovirus D
auuccucgaccaugac

SEQ ID NO: 1562805 - RNA, 18 nt, Human adenovirus D
caacucuuaaaucauuua

SEQ ID NO: 1562806 - RNA, 20 nt, Human adenovirus D
aggauggucaucacccucag

SEQ ID NO: 1562807 - RNA, 20 nt, Human adenovirus D
uggcgaccgccgugcgccgc

SEQ ID NO: 1562808 - RNA, 13 nt, Human adenovirus D
ucccucccucggc

SEQ ID NO: 1562809 - RNA, 18 nt, Human adenovirus D
gugaccagguccacgcug

SEQ ID NO: 1562810 - RNA, 12 nt, Human adenovirus D
auuucacagugu

SEQ ID NO: 1562811 - RNA, 20 nt, Human adenovirus D
guagcccgugcacuugggga

SEQ ID NO: 1562812 - RNA, 16 nt, Human adenovirus D
cagacacaucuccuaa

SEQ ID NO: 1562813 - RNA, 14 nt, Human adenovirus D
guugaggguggugg

SEQ ID NO: 1562814 - RNA, 12 nt, Human adenovirus D
cugccuggucaa

SEQ ID NO: 1562815 - RNA, 22 nt, Human adenovirus D
acccggacguggugcugcugcc

SEQ ID NO: 1562816 - RNA, 11 nt, Human adenovirus D
uuuccggggcg

SEQ ID NO: 1562817 - RNA, 15 nt, Human adenovirus D
gugggcguggggcaa

SEQ ID NO: 1562818 - RNA, 13 nt, Human adenovirus D
acgagggccuggg

SEQ ID NO: 1562819 - RNA, 15 nt, Human adenovirus D
ucccgcucccagcga

SEQ ID NO: 1562820 - RNA, 13 nt, Human adenovirus D
gcggcggcuggcg

SEQ ID NO: 1562821 - RNA, 19 nt, Human adenovirus D
ugcgcaggcgccugagugg

SEQ ID NO: 1562822 - RNA, 20 nt, Human adenovirus D
gcugcugaaacaccugcagc

SEQ ID NO: 1562823 - RNA, 20 nt, Human adenovirus D
gcagcccaaacuggggcgac

SEQ ID NO: 1562824 - RNA, 19 nt, Human adenovirus D
cggcugcacgagcgccagg

SEQ ID NO: 1562825 - RNA, 13 nt, Human adenovirus D
aagguucugcccu

SEQ ID NO: 1562826 - RNA, 17 nt, Human adenovirus D
guggguuggcuugcaug

SEQ ID NO: 1562827 - RNA, 21 nt, Human adenovirus D
acaacagccuugcccccaagg

SEQ ID NO: 1562828 - RNA, 22 nt, Human adenovirus D
cacugccgccgccugcgcugcu

SEQ ID NO: 1562829 - RNA, 18 nt, Human adenovirus D
acugcuggcccugcuggc

SEQ ID NO: 1562830 - RNA, 22 nt, Human adenovirus D
gcgcuuccaagaucaggggaug

SEQ ID NO: 1562831 - RNA, 21 nt, Human adenovirus D
gcugcccgacuucaugagcca

SEQ ID NO: 1562832 - RNA, 17 nt, Human adenovirus D
ugagguacaugggcaug

SEQ ID NO: 1562833 - RNA, 18 nt, Human adenovirus D
caaaaccuaccacuggcu

SEQ ID NO: 1562834 - RNA, 16 nt, Human adenovirus D
ucaaaacucacuuugg

SEQ ID NO: 1562835 - RNA, 16 nt, Human adenovirus D
cagaccuucagggagu

SEQ ID NO: 1562836 - RNA, 16 nt, Human adenovirus D
gcaacaccugggcacu

SEQ ID NO: 1562837 - RNA, 15 nt, Human adenovirus D
gcaggcgccggcgcu

SEQ ID NO: 1562838 - RNA, 17 nt, Human adenovirus D
caucguugugcgccgcg

SEQ ID NO: 1562839 - RNA, 16 nt, Human adenovirus D
caggcggugcugcugc

SEQ ID NO: 1562840 - RNA, 17 nt, Human adenovirus D
cgcuguggagccacugc

SEQ ID NO: 1562841 - RNA, 18 nt, Human adenovirus D
cuccggguucuggagaca

SEQ ID NO: 1562842 - RNA, 17 nt, Human adenovirus D
augcgccaagggcagcc

SEQ ID NO: 1562843 - RNA, 18 nt, Human adenovirus D
aguuacgggagcgagccc

SEQ ID NO: 1562844 - RNA, 16 nt, Human adenovirus D
cggcgcugcaaagcca

SEQ ID NO: 1562845 - RNA, 14 nt, Human adenovirus D
gacaaauggagcca

SEQ ID NO: 1562846 - RNA, 19 nt, Human adenovirus D
ggccgcgauguugagcugg

SEQ ID NO: 1562847 - RNA, 19 nt, Human adenovirus D
cuacaucguaggugacaaa

SEQ ID NO: 1562848 - RNA, 14 nt, Human adenovirus D
gccuggucaaacag

SEQ ID NO: 1562849 - RNA, 18 nt, Human adenovirus D
cagcugggacuugccgca

SEQ ID NO: 1562850 - RNA, 19 nt, Human adenovirus D
agcgggaucaucgccugcu

SEQ ID NO: 1562851 - RNA, 14 nt, Human adenovirus D
guaagagcccagca

SEQ ID NO: 1562852 - RNA, 14 nt, Human adenovirus D
ggaaggaggacacu

SEQ ID NO: 1562853 - RNA, 16 nt, Human adenovirus D
ggagccugaugagcuc

SEQ ID NO: 1562854 - RNA, 10 nt, Human adenovirus D
agcagcacag

SEQ ID NO: 1562855 - RNA, 21 nt, Human adenovirus D
gcaagagccggcgggcggacg

SEQ ID NO: 1562856 - RNA, 19 nt, Human adenovirus D
agcaccgccgcagccgcgg

SEQ ID NO: 1562857 - RNA, 15 nt, Human adenovirus D
cugacgccuccguga

SEQ ID NO: 1562858 - RNA, 17 nt, Human adenovirus D
cgacccaugagcugcga

SEQ ID NO: 1562859 - RNA, 13 nt, Human adenovirus D
agauggccacccc

SEQ ID NO: 1562860 - RNA, 18 nt, Human adenovirus D
uggcggagaacaaggcca

SEQ ID NO: 1562861 - RNA, 18 nt, Human adenovirus D
caaagcuagcacccaaaa

SEQ ID NO: 1562862 - RNA, 15 nt, Human adenovirus D
gugagcucgggcugc

SEQ ID NO: 1562863 - RNA, 19 nt, Human adenovirus D
ugaaggccggcaugcccac

SEQ ID NO: 1562864 - RNA, 15 nt, Human adenovirus D
acuagcgcccuggua

SEQ ID NO: 1562865 - RNA, 14 nt, Human adenovirus D
acgagacuggccuc

SEQ ID NO: 1562866 - RNA, 18 nt, Human adenovirus D
gaauaggcacugaaaauu

SEQ ID NO: 1562867 - RNA, 15 nt, Human adenovirus D
aggggagugaagagg

SEQ ID NO: 1562868 - RNA, 14 nt, Human adenovirus D
cgcuccguggggcg

SEQ ID NO: 1562869 - RNA, 18 nt, Human adenovirus D
gccuggaauaguagcacg

SEQ ID NO: 1562870 - RNA, 16 nt, Human adenovirus D
uagcaccacugcaugg

SEQ ID NO: 1562871 - RNA, 16 nt, Human adenovirus D
ucuaaacuaaagccaa

SEQ ID NO: 1562872 - RNA, 20 nt, Human adenovirus D
guaugucucugguguaguug

SEQ ID NO: 1562873 - RNA, 18 nt, Human adenovirus D
acguuaccgacagcagca

SEQ ID NO: 1562874 - RNA, 19 nt, Human adenovirus D
cuuguagggacagcagccc

SEQ ID NO: 1562875 - RNA, 23 nt, Human adenovirus D
aagugccacaugcaccugggcgc

SEQ ID NO: 1562876 - RNA, 22 nt, Human adenovirus D
gagaccggaggcgugcacuggc

SEQ ID NO: 1562877 - RNA, 16 nt, Human adenovirus D
acucuuaaaucauuua

SEQ ID NO: 1562878 - RNA, 21 nt, Human adenovirus D
accgugaauaucagacaugcu

SEQ ID NO: 1562879 - RNA, 18 nt, Human adenovirus D
gugaugagcugcgaggag

SEQ ID NO: 1562880 - RNA, 19 nt, Human adenovirus D
cugcaugcuggaauaagcu

SEQ ID NO: 1562881 - RNA, 23 nt, Human adenovirus D
cauguugugcaggaccaccagga

SEQ ID NO: 1562882 - RNA, 22 nt, Human adenovirus D
cugcauauucggguagaggccu

SEQ ID NO: 1562883 - RNA, 17 nt, Human adenovirus D
gcaaggucgaggagacc

SEQ ID NO: 1562884 - RNA, 21 nt, Human adenovirus D
ggccagugauuggggaaccuc

SEQ ID NO: 1562885 - RNA, 22 nt, Human adenovirus D
agccugcgccgggcgcugguag

SEQ ID NO: 1562886 - RNA, 22 nt, Human adenovirus D
auuucaaauuuuauguaucuuu

SEQ ID NO: 1562887 - RNA, 18 nt, Human adenovirus D
uaggaaccagcacacuca

SEQ ID NO: 1562888 - RNA, 17 nt, Human adenovirus D
ggccacgaccgugccgc

SEQ ID NO: 1562889 - RNA, 17 nt, Human adenovirus D
ggcgcugggcguggugc

SEQ ID NO: 1562890 - RNA, 12 nt, Human adenovirus D
ccgcggucccag

SEQ ID NO: 1562891 - RNA, 19 nt, Human adenovirus D
ugcuaaacaucgccgagcc

SEQ ID NO: 1562892 - RNA, 14 nt, Human adenovirus D
cagcucauccgcag

SEQ ID NO: 1562893 - RNA, 16 nt, Human adenovirus D
gcgcggcgggggcgga

SEQ ID NO: 1562894 - RNA, 21 nt, Human adenovirus D
acaaucuggcgguaccagggg

SEQ ID NO: 1562895 - RNA, 15 nt, Human adenovirus D
gagaucggcaccagc

SEQ ID NO: 1562896 - RNA, 15 nt, Human adenovirus D
aucccggccaaggcc

SEQ ID NO: 1562897 - RNA, 16 nt, Human adenovirus D
cagacgcaagagccgg

SEQ ID NO: 1562898 - RNA, 20 nt, Human adenovirus D
ucugguugacaaauggagcc

SEQ ID NO: 1562899 - RNA, 12 nt, Human adenovirus D
uuggcagccgag

SEQ ID NO: 1562900 - RNA, 14 nt, Human adenovirus D
gaccgcagcgggga

SEQ ID NO: 1562901 - RNA, 23 nt, Human adenovirus D
cgccccugcaagugcacagaccc

SEQ ID NO: 1562902 - RNA, 15 nt, Human adenovirus D
acugccaccgccgcc

SEQ ID NO: 1562903 - RNA, 13 nt, Human adenovirus D
guggcuguugaug

SEQ ID NO: 1562904 - RNA, 22 nt, Human adenovirus D
gcggcguggcccuuggcgcgga

SEQ ID NO: 1562905 - RNA, 16 nt, Human adenovirus D
uacaugcccagcagca

SEQ ID NO: 1562906 - RNA, 23 nt, Human adenovirus D
ccgguggcgaccgccgugcgccg

SEQ ID NO: 1562907 - RNA, 12 nt, Human adenovirus D
gaguuguccugg

SEQ ID NO: 1562908 - RNA, 20 nt, Human adenovirus D
guggcaacaccugggcacug

SEQ ID NO: 1562909 - RNA, 21 nt, Human adenovirus D
gccaagaaacgucccagcagc

SEQ ID NO: 1562910 - RNA, 18 nt, Human adenovirus D
ugaccacgguggugcaga

SEQ ID NO: 1562911 - RNA, 22 nt, Human adenovirus D
gauccagucauagcaggggcgc

SEQ ID NO: 1562912 - RNA, 17 nt, Human adenovirus D
gcaagguccgcaggagu

SEQ ID NO: 1562913 - RNA, 16 nt, Human adenovirus D
gaaccugaaggagcug

SEQ ID NO: 1562914 - RNA, 14 nt, Human adenovirus D
caucgaaaccagau

SEQ ID NO: 1562915 - RNA, 13 nt, Human adenovirus D
ggcggccauugcu

SEQ ID NO: 1562916 - RNA, 23 nt, Human adenovirus D
cuaguguacaacgcccugcugga

SEQ ID NO: 1562917 - RNA, 22 nt, Human adenovirus D
cacuggcuuccgccgccggggu

SEQ ID NO: 1562918 - RNA, 19 nt, Human adenovirus D
agcugcgcgagggccugga

SEQ ID NO: 1562919 - RNA, 15 nt, Human adenovirus D
ccuacuacuccugau

SEQ ID NO: 1562920 - RNA, 22 nt, Human adenovirus D
gcacccguccuccucgucccug

SEQ ID NO: 1562921 - RNA, 20 nt, Human adenovirus D
aggcaucggaacccuccagu

SEQ ID NO: 1562922 - RNA, 19 nt, Human adenovirus D
agccgcguaagcaggagca

SEQ ID NO: 1562923 - RNA, 18 nt, Human adenovirus D
cgccgaagcgccguggcc

SEQ ID NO: 1562924 - RNA, 15 nt, Human adenovirus D
gcuggaugcggagcc

SEQ ID NO: 1562925 - RNA, 22 nt, Human adenovirus D
gcgguucaagaacgagggccug

SEQ ID NO: 1562926 - RNA, 19 nt, Human adenovirus D
cacagcuagacaccacagu

SEQ ID NO: 1562927 - RNA, 17 nt, Human adenovirus D
gcuacaaucgccacagg

SEQ ID NO: 1562928 - RNA, 18 nt, Human adenovirus D
gcgacccaugauggugcu

SEQ ID NO: 1562929 - RNA, 21 nt, Human adenovirus D
gcuccaaagcuagcacccaaa

SEQ ID NO: 1562930 - RNA, 17 nt, Human adenovirus D
gccuccacccuggaagc

SEQ ID NO: 1562931 - RNA, 22 nt, Human adenovirus D
ugcggacuuuucuguugcaugu

SEQ ID NO: 1562932 - RNA, 16 nt, Human adenovirus D
uacgccaacucggccc

SEQ ID NO: 1562933 - RNA, 21 nt, Human adenovirus D
gaucccgcuguggcugaagau

SEQ ID NO: 1562934 - RNA, 16 nt, Human adenovirus D
ugcgcgagggccugga

SEQ ID NO: 1562935 - RNA, 20 nt, Human adenovirus D
ucucugccauguucucacag

SEQ ID NO: 1562936 - RNA, 17 nt, Human adenovirus D
ugcagcaggugcugccc

SEQ ID NO: 1562937 - RNA, 20 nt, Human adenovirus D
uccuggucugcaacccccag

SEQ ID NO: 1562938 - RNA, 14 nt, Human adenovirus D
ugggaacaaggccu

SEQ ID NO: 1562939 - RNA, 17 nt, Human adenovirus D
caacuacacagucaacu

SEQ ID NO: 1562940 - RNA, 20 nt, Human adenovirus D
caagccucugacggcgcagc

SEQ ID NO: 1562941 - RNA, 16 nt, Human adenovirus D
accuucaaccucacca

SEQ ID NO: 1562942 - RNA, 20 nt, Human adenovirus D
acgagcccgcgcgggagcca

SEQ ID NO: 1562943 - RNA, 22 nt, Human adenovirus D
gucggaagacccaagagcgaga

SEQ ID NO: 1562944 - RNA, 14 nt, Human adenovirus D
agaaacaagucaaa

SEQ ID NO: 1562945 - RNA, 16 nt, Human adenovirus D
ccacgcccgcuccacc

SEQ ID NO: 1562946 - RNA, 13 nt, Human adenovirus D
gcgcccggggcca

SEQ ID NO: 1562947 - RNA, 20 nt, Human adenovirus D
cucagcgucgaggagcugug

SEQ ID NO: 1562948 - RNA, 23 nt, Human adenovirus D
ccuugcgcgagcagaacgggggc

SEQ ID NO: 1562949 - RNA, 18 nt, Human adenovirus D
gggcgccgccggcggcga

SEQ ID NO: 1562950 - RNA, 14 nt, Human adenovirus D
ugcugcccgccacc

SEQ ID NO: 1562951 - RNA, 23 nt, Human adenovirus D
ccucugacggcgcagcuguuccu

SEQ ID NO: 1562952 - RNA, 19 nt, Human adenovirus D
agcagcaggguacccacug

SEQ ID NO: 1562953 - RNA, 16 nt, Human adenovirus D
cucgauccccuaccuu

SEQ ID NO: 1562954 - RNA, 12 nt, Human adenovirus D
cugccagcagaa

SEQ ID NO: 1562955 - RNA, 12 nt, Human adenovirus D
ggcgggacagag

SEQ ID NO: 1562956 - RNA, 13 nt, Human adenovirus D
ggggcgugcaggc

SEQ ID NO: 1562957 - RNA, 18 nt, Human adenovirus D
cgagccgcgcgccgcgcc

SEQ ID NO: 1562958 - RNA, 13 nt, Human adenovirus D
uucagagccaggg

SEQ ID NO: 1562959 - RNA, 22 nt, Human adenovirus D
aaaucugcccugauauccagua

SEQ ID NO: 1562960 - RNA, 14 nt, Human adenovirus D
uuugcgaaaacacu

SEQ ID NO: 1562961 - RNA, 18 nt, Human adenovirus D
augggaaugagagccgga

SEQ ID NO: 1562962 - RNA, 17 nt, Human adenovirus D
agcagaagaagacgaau

SEQ ID NO: 1562963 - RNA, 20 nt, Human adenovirus D
cgucacccugcccuuccagc

SEQ ID NO: 1562964 - RNA, 12 nt, Human adenovirus D
uggcucagcugc

SEQ ID NO: 1562965 - RNA, 17 nt, Human adenovirus D
aucuuugacauggaugu

SEQ ID NO: 1562966 - RNA, 23 nt, Human adenovirus D
gcgguacacgggguugcagcacu

SEQ ID NO: 1562967 - RNA, 20 nt, Human adenovirus D
ugccagacgcaagagccggc

SEQ ID NO: 1562968 - RNA, 22 nt, Human adenovirus D
cgccgauuuaaagacccacagc

SEQ ID NO: 1562969 - RNA, 24 nt, Human adenovirus D
cgccagccgcgguuaugcagggug

SEQ ID NO: 1562970 - RNA, 14 nt, Human adenovirus D
uggugucaggaaaa

SEQ ID NO: 1562971 - RNA, 14 nt, Human adenovirus D
agcuggaagcccug

SEQ ID NO: 1562972 - RNA, 18 nt, Human adenovirus D
gcagacacaccaggaugc

SEQ ID NO: 1562973 - RNA, 13 nt, Human adenovirus D
guacucauaaaga

SEQ ID NO: 1562974 - RNA, 17 nt, Human adenovirus D
ucacucuuuccagcagc

SEQ ID NO: 1562975 - RNA, 13 nt, Human adenovirus D
gcgcaggcgaccc

SEQ ID NO: 1562976 - RNA, 22 nt, Human adenovirus D
aggcgaagauggggccccgcca

SEQ ID NO: 1562977 - RNA, 20 nt, Human adenovirus D
ggggugaugagcugcgagga

SEQ ID NO: 1562978 - RNA, 11 nt, Human adenovirus D
ugaugcccaac

SEQ ID NO: 1562979 - RNA, 14 nt, Human adenovirus D
caggcgggacagag

SEQ ID NO: 1562980 - RNA, 20 nt, Human adenovirus D
caguagacaaagagcacagc

SEQ ID NO: 1562981 - RNA, 13 nt, Human adenovirus D
guugugcgccgcg

SEQ ID NO: 1562982 - RNA, 17 nt, Human adenovirus D
gcauuggcagccgagcc

SEQ ID NO: 1562983 - RNA, 17 nt, Human adenovirus D
cggcaguauaucaggug

SEQ ID NO: 1562984 - RNA, 14 nt, Human adenovirus D
ucaucacccagcag

SEQ ID NO: 1562985 - RNA, 17 nt, Human adenovirus D
gggcugcucggcgcgga

SEQ ID NO: 1562986 - RNA, 17 nt, Human adenovirus D
gaagaaaacuggcaaga

SEQ ID NO: 1562987 - RNA, 17 nt, Human adenovirus D
caggaugaacaggagca

SEQ ID NO: 1562988 - RNA, 21 nt, Human adenovirus D
cccagcgucugacgcugcgcu

SEQ ID NO: 1562989 - RNA, 17 nt, Human adenovirus D
guaagugcagcacauaa

SEQ ID NO: 1562990 - RNA, 15 nt, Human adenovirus D
gcaguugaccaugag

SEQ ID NO: 1562991 - RNA, 22 nt, Human adenovirus D
ccucugcgugaagaccacuggc

SEQ ID NO: 1562992 - RNA, 20 nt, Human adenovirus D
gaaggugagggggucccgcu

SEQ ID NO: 1562993 - RNA, 15 nt, Human adenovirus D
ucaucucgcccagca

SEQ ID NO: 1562994 - RNA, 20 nt, Human adenovirus D
cagucagugaagcccugguu

SEQ ID NO: 1562995 - RNA, 14 nt, Human adenovirus D
accgugaaaaugga

SEQ ID NO: 1562996 - RNA, 19 nt, Human adenovirus D
ugaauaucagacaugcugc

SEQ ID NO: 1562997 - RNA, 17 nt, Human adenovirus D
cuuacucagguuuggau

SEQ ID NO: 1562998 - RNA, 18 nt, Human adenovirus D
cgccaucuugcccacguc

SEQ ID NO: 1562999 - RNA, 22 nt, Human adenovirus D
cauccacaaggccgugagcgcg

SEQ ID NO: 1563000 - RNA, 20 nt, Human adenovirus D
accggaggcgugcacuggcu

SEQ ID NO: 1563001 - RNA, 12 nt, Human adenovirus D
cauucaaggcca

SEQ ID NO: 1563002 - RNA, 21 nt, Human adenovirus D
gccuuguagggacagcagccc

SEQ ID NO: 1563003 - RNA, 13 nt, Human adenovirus D
acaucagccagga

SEQ ID NO: 1563004 - RNA, 16 nt, Human adenovirus D
guugaccaugagcucg

SEQ ID NO: 1563005 - RNA, 17 nt, Human adenovirus D
gaggccacgugcgaggg

SEQ ID NO: 1563006 - RNA, 22 nt, Human adenovirus D
acaacaagauucaauaagguuc

SEQ ID NO: 1563007 - RNA, 18 nt, Human adenovirus D
cagcaggagcgugccgcc

SEQ ID NO: 1563008 - RNA, 20 nt, Human adenovirus D
ccuucuuccgcaacuuccag

SEQ ID NO: 1563009 - RNA, 13 nt, Human adenovirus D
cggggcacaggca

SEQ ID NO: 1563010 - RNA, 17 nt, Human adenovirus D
auaugcuacaucugcug

SEQ ID NO: 1563011 - RNA, 19 nt, Human adenovirus D
uuccguuugugccuccgcg

SEQ ID NO: 1563012 - RNA, 21 nt, Human adenovirus D
gucgucgcagccgccgugcuc

SEQ ID NO: 1563013 - RNA, 16 nt, Human adenovirus D
cguccacgccaagaca

SEQ ID NO: 1563014 - RNA, 22 nt, Human adenovirus D
augucagcugcaaaaagucacu

SEQ ID NO: 1563015 - RNA, 16 nt, Human adenovirus D
gccaagauagcccugc

SEQ ID NO: 1563016 - RNA, 21 nt, Human adenovirus D
cgauaaagugcaagucacgca

SEQ ID NO: 1563017 - RNA, 21 nt, Human adenovirus D
cgcuggaagaccuacgcucag

SEQ ID NO: 1563018 - RNA, 13 nt, Human adenovirus D
ccccuuccacugu

SEQ ID NO: 1563019 - RNA, 21 nt, Human adenovirus D
ccagcgcucguacccgcucac

SEQ ID NO: 1563020 - RNA, 14 nt, Human adenovirus D
ccacggggagggcg

SEQ ID NO: 1563021 - RNA, 14 nt, Human adenovirus D
cgucauugaagaga

SEQ ID NO: 1563022 - RNA, 21 nt, Human adenovirus D
ucaucaccguuccaugcagac

SEQ ID NO: 1563023 - RNA, 22 nt, Human adenovirus D
agcacuuuuauuuuacaugcac

SEQ ID NO: 1563024 - RNA, 14 nt, Human adenovirus D
caaugucagcugca

SEQ ID NO: 1563025 - RNA, 19 nt, Human adenovirus D
gucuggacccgcggccgcc

SEQ ID NO: 1563026 - RNA, 19 nt, Human adenovirus D
gaguaccugaacgacucgc

SEQ ID NO: 1563027 - RNA, 16 nt, Human adenovirus D
ggccgccaacaugcuc

SEQ ID NO: 1563028 - RNA, 20 nt, Human adenovirus D
agcaccccaacggcccugca

SEQ ID NO: 1563029 - RNA, 15 nt, Human adenovirus D
gacgagcccgcgcgg

SEQ ID NO: 1563030 - RNA, 23 nt, Human adenovirus D
auccagaauucaaccacaccugu

SEQ ID NO: 1563031 - RNA, 16 nt, Human adenovirus D
agaaggcgcccaggcc

SEQ ID NO: 1563032 - RNA, 18 nt, Human adenovirus D
gagacgcccuugugcccg

SEQ ID NO: 1563033 - RNA, 19 nt, Human adenovirus D
ugauccuuguccagauccu

SEQ ID NO: 1563034 - RNA, 16 nt, Human adenovirus D
ugaccugccuccacca

SEQ ID NO: 1563035 - RNA, 20 nt, Human adenovirus D
ggaugucaaauuccuggucc

SEQ ID NO: 1563036 - RNA, 18 nt, Human adenovirus D
uagcagcccuguggacgc

SEQ ID NO: 1563037 - RNA, 13 nt, Human adenovirus D
ugcccccaagggc

SEQ ID NO: 1563038 - RNA, 22 nt, Human adenovirus D
ugcaaaaagucacuuaaguccu

SEQ ID NO: 1563039 - RNA, 21 nt, Human adenovirus D
agaggagcugaucucgcugcc

SEQ ID NO: 1563040 - RNA, 19 nt, Human adenovirus D
cagauagugcuuacucuau

SEQ ID NO: 1563041 - RNA, 19 nt, Human adenovirus D
uucagccauagcucagccc

SEQ ID NO: 1563042 - RNA, 17 nt, Human adenovirus D
aggcgcaaccaggagga

SEQ ID NO: 1563043 - RNA, 14 nt, Human adenovirus D
acucgcugcugcag

SEQ ID NO: 1563044 - RNA, 22 nt, Human adenovirus D
ucgguacccuccucccaacucu

SEQ ID NO: 1563045 - RNA, 16 nt, Human adenovirus D
ccugugacaugcaaaa

SEQ ID NO: 1563046 - RNA, 15 nt, Human adenovirus D
uauaaaucuuacaca

SEQ ID NO: 1563047 - RNA, 15 nt, Human adenovirus D
ugcaguuuggccugg

SEQ ID NO: 1563048 - RNA, 18 nt, Human adenovirus D
auuuaaagacccacagcc

SEQ ID NO: 1563049 - RNA, 19 nt, Human adenovirus D
cauccugagauaugugcag

SEQ ID NO: 1563050 - RNA, 17 nt, Human adenovirus D
gcccacggugguggaga

SEQ ID NO: 1563051 - RNA, 14 nt, Human adenovirus D
cggaccggucccag

SEQ ID NO: 1563052 - RNA, 22 nt, Human adenovirus D
aggcagaggcacacagcucaac

SEQ ID NO: 1563053 - RNA, 14 nt, Human adenovirus D
ccucugugcccagu

SEQ ID NO: 1563054 - RNA, 17 nt, Human adenovirus D
ccuggucaucaccuucc

SEQ ID NO: 1563055 - RNA, 16 nt, Human adenovirus D
cgcaggccaggaggag

SEQ ID NO: 1563056 - RNA, 20 nt, Human adenovirus D
gcuguauuaccuuccuugcu

SEQ ID NO: 1563057 - RNA, 14 nt, Human adenovirus D
ggaugagguggacg

SEQ ID NO: 1563058 - RNA, 16 nt, Human adenovirus D
ggaaccuaccacugcc

SEQ ID NO: 1563059 - RNA, 17 nt, Human adenovirus D
agccacaugacccugca

SEQ ID NO: 1563060 - RNA, 17 nt, Human adenovirus D
ggcccuggagcagcggc

SEQ ID NO: 1563061 - RNA, 16 nt, Human adenovirus D
gcuaucugcucuucca

SEQ ID NO: 1563062 - RNA, 20 nt, Human adenovirus D
ccugggcacuggagcacaga

SEQ ID NO: 1563063 - RNA, 23 nt, Human adenovirus D
auagucacacuuaguucagcugc

SEQ ID NO: 1563064 - RNA, 22 nt, Human adenovirus D
acgucgcccgaguuguccuggu

SEQ ID NO: 1563065 - RNA, 17 nt, Human adenovirus D
agcaggugcugccccag

SEQ ID NO: 1563066 - RNA, 23 nt, Human adenovirus D
guccaugguagcaauggaaauca

SEQ ID NO: 1563067 - RNA, 20 nt, Human adenovirus D
agcgguccucggucaggagc

SEQ ID NO: 1563068 - RNA, 16 nt, Human adenovirus D
gccgagaccgugagcu

SEQ ID NO: 1563069 - RNA, 15 nt, Human adenovirus D
cugccgcgccaaccg

SEQ ID NO: 1563070 - RNA, 13 nt, Human adenovirus D
gagcuugcccuug

SEQ ID NO: 1563071 - RNA, 12 nt, Human adenovirus D
uguaacaucacc

SEQ ID NO: 1563072 - RNA, 21 nt, Human adenovirus D
ggagcgaggugugcgucaggg

SEQ ID NO: 1563073 - RNA, 17 nt, Human adenovirus D
cggcuuacaacagccuu

SEQ ID NO: 1563074 - RNA, 18 nt, Human adenovirus D
uguuuauaaaucuuacac

SEQ ID NO: 1563075 - RNA, 23 nt, Human adenovirus D
cagccuugauuuuuccagcccag

SEQ ID NO: 1563076 - RNA, 12 nt, Human adenovirus D
cccuggaagagu

SEQ ID NO: 1563077 - RNA, 12 nt, Human adenovirus D
gagcagcacaga

SEQ ID NO: 1563078 - RNA, 21 nt, Human adenovirus D
ugccgagccgcgggaucaagc

SEQ ID NO: 1563079 - RNA, 17 nt, Human adenovirus D
aucacccucagaagaag

SEQ ID NO: 1563080 - RNA, 22 nt, Human adenovirus D
acuggcuucuacagccagcagc

SEQ ID NO: 1563081 - RNA, 19 nt, Human adenovirus D
uccccucaucacaucagcc

SEQ ID NO: 1563082 - RNA, 19 nt, Human adenovirus D
ugugagugauaaagcgugg

SEQ ID NO: 1563083 - RNA, 18 nt, Human adenovirus D
cugaaccacacggccagc

SEQ ID NO: 1563084 - RNA, 18 nt, Human adenovirus D
ccccgacccccuuccacu

SEQ ID NO: 1563085 - RNA, 16 nt, Human adenovirus D
gaggcauggcaggcag

SEQ ID NO: 1563086 - RNA, 20 nt, Human adenovirus D
ucgaguacgaggccaugcug

SEQ ID NO: 1563087 - RNA, 13 nt, Human adenovirus D
ucgcucuggggcc

SEQ ID NO: 1563088 - RNA, 14 nt, Human adenovirus D
gugcgaggaugaga

SEQ ID NO: 1563089 - RNA, 17 nt, Human adenovirus D
ugcagaccgaccccugg

SEQ ID NO: 1563090 - RNA, 15 nt, Human adenovirus D
agauggaagaagaau

SEQ ID NO: 1563091 - RNA, 20 nt, Human adenovirus D
gcagcgccagucccucaucc

SEQ ID NO: 1563092 - RNA, 15 nt, Human adenovirus D
agcuggccgcccuga

SEQ ID NO: 1563093 - RNA, 20 nt, Human adenovirus D
ucgccacaggugcugcccac

SEQ ID NO: 1563094 - RNA, 15 nt, Human adenovirus D
gaccgacgcugggcu

SEQ ID NO: 1563095 - RNA, 13 nt, Human adenovirus D
uuucuccacaccu

SEQ ID NO: 1563096 - RNA, 19 nt, Human adenovirus D
gccgucgucccggaggagg

SEQ ID NO: 1563097 - RNA, 12 nt, Human adenovirus D
aaacuggggcga

SEQ ID NO: 1563098 - RNA, 14 nt, Human adenovirus D
ggccaaccugguga

SEQ ID NO: 1563099 - RNA, 18 nt, Human adenovirus D
gagagcgugauggcgcag

SEQ ID NO: 1563100 - RNA, 16 nt, Human adenovirus D
cgaagauggggccccg

SEQ ID NO: 1563101 - RNA, 21 nt, Human adenovirus D
ggauguaaguuuuauggcugc

SEQ ID NO: 1563102 - RNA, 23 nt, Human adenovirus D
cccaggaaacuaggcgcagcugc

SEQ ID NO: 1563103 - RNA, 16 nt, Human adenovirus D
cggagggugccagauu

SEQ ID NO: 1563104 - RNA, 14 nt, Human adenovirus D
cccagcgccgcgcu

SEQ ID NO: 1563105 - RNA, 21 nt, Human adenovirus D
gaggccaucuaaacuaaagcc

SEQ ID NO: 1563106 - RNA, 14 nt, Human adenovirus D
uaucuaugaaagca

SEQ ID NO: 1563107 - RNA, 15 nt, Human adenovirus D
ccaacaugcucuacc

SEQ ID NO: 1563108 - RNA, 22 nt, Human adenovirus D
ugguggaaacagacagccaggu

SEQ ID NO: 1563109 - RNA, 13 nt, Human adenovirus D
ucuggcuugcuuc

SEQ ID NO: 1563110 - RNA, 14 nt, Human adenovirus D
ugccaggggucuac

SEQ ID NO: 1563111 - RNA, 16 nt, Human adenovirus D
uggaagaagagcagca

SEQ ID NO: 1563112 - RNA, 22 nt, Human adenovirus D
guuggaggaagaaaugaggcag

SEQ ID NO: 1563113 - RNA, 21 nt, Human adenovirus D
ccgccauaagggcggcgcugc

SEQ ID NO: 1563114 - RNA, 17 nt, Human adenovirus D
aggcaaagaucaccuac

SEQ ID NO: 1563115 - RNA, 19 nt, Human adenovirus D
cgcaguugggagcugucca

SEQ ID NO: 1563116 - RNA, 14 nt, Human adenovirus D
aucccgccgcagga

SEQ ID NO: 1563117 - RNA, 13 nt, Human adenovirus D
ggcaaagcgguug

SEQ ID NO: 1563118 - RNA, 19 nt, Human adenovirus D
cacagcaacuuccugacca

SEQ ID NO: 1563119 - RNA, 13 nt, Human adenovirus D
uggccuggagcag

SEQ ID NO: 1563120 - RNA, 18 nt, Human adenovirus D
ggcuacgcgcggaaucag

SEQ ID NO: 1563121 - RNA, 12 nt, Human adenovirus D
uugaaaaaauug

SEQ ID NO: 1563122 - RNA, 17 nt, Human adenovirus D
ggaccaggcggcagagc

SEQ ID NO: 1563123 - RNA, 19 nt, Human adenovirus D
gagccacugcuaccucuug

SEQ ID NO: 1563124 - RNA, 18 nt, Human adenovirus D
ucauugacggcgggcuga

SEQ ID NO: 1563125 - RNA, 16 nt, Human adenovirus D
gagcugcgcgagggcc

SEQ ID NO: 1563126 - RNA, 15 nt, Human adenovirus D
acuguaaagccacaa

SEQ ID NO: 1563127 - RNA, 15 nt, Human adenovirus D
ggucacacuagcgcc

SEQ ID NO: 1563128 - RNA, 21 nt, Human adenovirus D
gaacgacucgcugcugcagcc

SEQ ID NO: 1563129 - RNA, 13 nt, Human adenovirus D
gcgagguugagcu

SEQ ID NO: 1563130 - RNA, 18 nt, Human adenovirus D
ugcacaucgccgggcagg

SEQ ID NO: 1563131 - RNA, 20 nt, Human adenovirus D
ggcuccuacggagggcagaa

SEQ ID NO: 1563132 - RNA, 15 nt, Human adenovirus D
augacugaccaccac

SEQ ID NO: 1563133 - RNA, 16 nt, Human adenovirus D
ugaacgcgcuggcgga

SEQ ID NO: 1563134 - RNA, 16 nt, Human adenovirus D
acgagcccgcgcggga

SEQ ID NO: 1563135 - RNA, 22 nt, Human adenovirus D
ggaaucggaucuuccccacucu

SEQ ID NO: 1563136 - RNA, 13 nt, Human adenovirus D
ggcagugcagcgc

SEQ ID NO: 1563137 - RNA, 23 nt, Human adenovirus D
cccuucaccgacaguggcagcgu

SEQ ID NO: 1563138 - RNA, 11 nt, Human adenovirus D
ggaagcccuga

SEQ ID NO: 1563139 - RNA, 20 nt, Human adenovirus D
ggcaggccauggacgagaac

SEQ ID NO: 1563140 - RNA, 15 nt, Human adenovirus D
cauguugaaaagcuc

SEQ ID NO: 1563141 - RNA, 17 nt, Human adenovirus D
aggauaaauauggccug

SEQ ID NO: 1563142 - RNA, 22 nt, Human adenovirus D
gcggcaaaauggcgugcuggag

SEQ ID NO: 1563143 - RNA, 20 nt, Human adenovirus D
aggcauggcaggcagcggcc

SEQ ID NO: 1563144 - RNA, 12 nt, Human adenovirus D
cuggaacaccau

SEQ ID NO: 1563145 - RNA, 16 nt, Human adenovirus D
guccgcaggcgggaca

SEQ ID NO: 1563146 - RNA, 13 nt, Human adenovirus D
agcaggcaggugg

SEQ ID NO: 1563147 - RNA, 17 nt, Human adenovirus D
cgcgauguugagcugga

SEQ ID NO: 1563148 - RNA, 22 nt, Human adenovirus D
gcagcggugguggaggcgcgcg

SEQ ID NO: 1563149 - RNA, 12 nt, Human adenovirus D
cacgcccugggu

SEQ ID NO: 1563150 - RNA, 22 nt, Human adenovirus D
cgggcgggcagggagcugcgcg

SEQ ID NO: 1563151 - RNA, 16 nt, Human adenovirus D
aggaagugcggcggcg

SEQ ID NO: 1563152 - RNA, 13 nt, Human adenovirus D
cguccuggaccgc

SEQ ID NO: 1563153 - RNA, 21 nt, Human adenovirus D
gaccggaggcgugcacuggcu

SEQ ID NO: 1563154 - RNA, 14 nt, Human adenovirus D
acguggugcugcug

SEQ ID NO: 1563155 - RNA, 14 nt, Human adenovirus D
agcagaggaagagg

SEQ ID NO: 1563156 - RNA, 19 nt, Human adenovirus D
ucgccagggaacugaaaga

SEQ ID NO: 1563157 - RNA, 21 nt, Human adenovirus D
ucgaggacgugagcggcgagg

SEQ ID NO: 1563158 - RNA, 13 nt, Human adenovirus D
gcuccagccaaag

SEQ ID NO: 1563159 - RNA, 21 nt, Human adenovirus D
acgugcccauagacaaggagg

SEQ ID NO: 1563160 - RNA, 18 nt, Human adenovirus D
cucagcagucucugccgc

SEQ ID NO: 1563161 - RNA, 15 nt, Human adenovirus D
uccaccacccacgcc

SEQ ID NO: 1563162 - RNA, 21 nt, Human adenovirus D
ugcccagcagcagcaguagcc

SEQ ID NO: 1563163 - RNA, 17 nt, Human adenovirus D
ucgcucuggggcccggc

SEQ ID NO: 1563164 - RNA, 18 nt, Human adenovirus D
cgcuccaccgaaggcagc

SEQ ID NO: 1563165 - RNA, 23 nt, Human adenovirus D
ugagcgcauguacaacaugcuga

SEQ ID NO: 1563166 - RNA, 13 nt, Human adenovirus D
auguguggacuau

SEQ ID NO: 1563167 - RNA, 19 nt, Human adenovirus D
uauccaguaggaaccagca

SEQ ID NO: 1563168 - RNA, 14 nt, Human adenovirus D
cacagugcccccuc

SEQ ID NO: 1563169 - RNA, 19 nt, Human adenovirus D
agacggugaagcaggagcg

SEQ ID NO: 1563170 - RNA, 18 nt, Human adenovirus D
cagcucaucgacuggugc

SEQ ID NO: 1563171 - RNA, 19 nt, Human adenovirus D
gcuggccagcacgcucuug

SEQ ID NO: 1563172 - RNA, 16 nt, Human adenovirus D
cugcuucugccuggug

SEQ ID NO: 1563173 - RNA, 21 nt, Human adenovirus D
agggcacagccucucugaagc

SEQ ID NO: 1563174 - RNA, 11 nt, Human adenovirus D
cgcccaggcgc

SEQ ID NO: 1563175 - RNA, 19 nt, Human adenovirus D
gagcaaucccacgccgagc

SEQ ID NO: 1563176 - RNA, 14 nt, Human adenovirus D
gccacaugacccug

SEQ ID NO: 1563177 - RNA, 18 nt, Human adenovirus D
agguggacgagcagaccu

SEQ ID NO: 1563178 - RNA, 19 nt, Human adenovirus D
gcagaccuucauaauagaa

SEQ ID NO: 1563179 - RNA, 17 nt, Human adenovirus D
agcuugggcgcaagaaa

SEQ ID NO: 1563180 - RNA, 18 nt, Human adenovirus D
gcccagguuuuccaugca

SEQ ID NO: 1563181 - RNA, 22 nt, Human adenovirus D
agaaggugguggacggccuggc

SEQ ID NO: 1563182 - RNA, 20 nt, Human adenovirus D
cugcgcguccgucagcagca

SEQ ID NO: 1563183 - RNA, 17 nt, Human adenovirus D
ggugcaguuugcccgcg

SEQ ID NO: 1563184 - RNA, 15 nt, Human adenovirus D
cucaccaaggccaua

SEQ ID NO: 1563185 - RNA, 23 nt, Human adenovirus D
ccacaaaaacgaagaucagcugc

SEQ ID NO: 1563186 - RNA, 15 nt, Human adenovirus D
gcaaccaggaggagc

SEQ ID NO: 1563187 - RNA, 20 nt, Human adenovirus D
cagccacagacagagaugga

SEQ ID NO: 1563188 - RNA, 14 nt, Human adenovirus D
gcaggggcggcaga

SEQ ID NO: 1563189 - RNA, 15 nt, Human adenovirus D
guccagcgcggccag

SEQ ID NO: 1563190 - RNA, 13 nt, Human adenovirus D
guuaucgaggacg

SEQ ID NO: 1563191 - RNA, 18 nt, Human adenovirus D
cacugacuuagcucccua

SEQ ID NO: 1563192 - RNA, 17 nt, Human adenovirus D
gcagcguguuggacuug

SEQ ID NO: 1563193 - RNA, 22 nt, Human adenovirus D
gaaaccucaaaaagcuguggac

SEQ ID NO: 1563194 - RNA, 17 nt, Human adenovirus D
gcaggcgacccuggagg

SEQ ID NO: 1563195 - RNA, 21 nt, Human adenovirus D
gaucgugguaaacgggcccug

SEQ ID NO: 1563196 - RNA, 15 nt, Human adenovirus D
cgaugugcucgguga

SEQ ID NO: 1563197 - RNA, 20 nt, Human adenovirus D
uacauagaccacgcuacaaa

SEQ ID NO: 1563198 - RNA, 17 nt, Human adenovirus D
ccugaacggcaucuuug

SEQ ID NO: 1563199 - RNA, 16 nt, Human adenovirus D
ugcuacaucugcugcc

SEQ ID NO: 1563200 - RNA, 17 nt, Human adenovirus D
uccaguuaaugcugccu

SEQ ID NO: 1563201 - RNA, 11 nt, Human adenovirus D
ggaagaagagc

SEQ ID NO: 1563202 - RNA, 17 nt, Human adenovirus D
ggcgcugcaaagccagc

SEQ ID NO: 1563203 - RNA, 16 nt, Human adenovirus D
caggagaggcauggca

SEQ ID NO: 1563204 - RNA, 18 nt, Human adenovirus D
aguacuuggaaagcaaga

SEQ ID NO: 1563205 - RNA, 19 nt, Human adenovirus D
agccggcucgucuagaacc

SEQ ID NO: 1563206 - RNA, 13 nt, Human adenovirus D
gcugugcuggugg

SEQ ID NO: 1563207 - RNA, 13 nt, Human adenovirus D
gcccugcuggccg

SEQ ID NO: 1563208 - RNA, 13 nt, Human adenovirus D
aaaaccacauuug

SEQ ID NO: 1563209 - RNA, 14 nt, Human adenovirus D
ccacacggccagca

SEQ ID NO: 1563210 - RNA, 21 nt, Human adenovirus D
ggacacgcuguaccgcagcug

SEQ ID NO: 1563211 - RNA, 17 nt, Human adenovirus D
uuccaguacucccggag

SEQ ID NO: 1563212 - RNA, 17 nt, Human adenovirus D
gccaggugagcucgggc

SEQ ID NO: 1563213 - RNA, 17 nt, Human adenovirus D
ucgcggcgaacgagcca

SEQ ID NO: 1563214 - RNA, 22 nt, Human adenovirus D
guccaucgugcgcgaccugggc

SEQ ID NO: 1563215 - RNA, 16 nt, Human adenovirus D
caggccgggcugcacg

SEQ ID NO: 1563216 - RNA, 17 nt, Human adenovirus D
gcgugauggcgcaggcg

SEQ ID NO: 1563217 - RNA, 15 nt, Human adenovirus D
ggggacgagcugcuu

SEQ ID NO: 1563218 - RNA, 22 nt, Human adenovirus D
cucgcggacgcgguuccagaug

SEQ ID NO: 1563219 - RNA, 20 nt, Human adenovirus D
gaauauccccuuccucacuc

SEQ ID NO: 1563220 - RNA, 21 nt, Human adenovirus D
ugcucuccgcaccgcuccugg

SEQ ID NO: 1563221 - RNA, 22 nt, Human adenovirus D
caccauguuauucagcagccca

SEQ ID NO: 1563222 - RNA, 21 nt, Human adenovirus D
cugggguacuuuacgcuggcc

SEQ ID NO: 1563223 - RNA, 21 nt, Human adenovirus D
ucaauguaacuaaacuuuaug

SEQ ID NO: 1563224 - RNA, 21 nt, Human adenovirus D
acgcaaacggguuaggccgcg

SEQ ID NO: 1563225 - RNA, 19 nt, Human adenovirus D
ccucaugaacacacugccc

SEQ ID NO: 1563226 - RNA, 19 nt, Human adenovirus D
aagcgggccucacagucca

SEQ ID NO: 1563227 - RNA, 19 nt, Human adenovirus D
caccgugcgcuaccacccc

SEQ ID NO: 1563228 - RNA, 24 nt, Human adenovirus D
cgcucaggaccauagggagccugc

SEQ ID NO: 1563229 - RNA, 15 nt, Human adenovirus D
cacaucggacugggu

SEQ ID NO: 1563230 - RNA, 17 nt, Human adenovirus D
uaaugaucaaaacuuaa

SEQ ID NO: 1563231 - RNA, 18 nt, Human adenovirus D
gacucgggggucugucau

SEQ ID NO: 1563232 - RNA, 17 nt, Human adenovirus D
cacuagcgcccugguag

SEQ ID NO: 1563233 - RNA, 14 nt, Human adenovirus D
agcagucucugccg

SEQ ID NO: 1563234 - RNA, 18 nt, Human adenovirus D
acaggaugggucugugcc

SEQ ID NO: 1563235 - RNA, 14 nt, Human adenovirus D
ugcuagcccuuccu

SEQ ID NO: 1563236 - RNA, 19 nt, Human adenovirus D
agcggcgcaagcucaugcu

SEQ ID NO: 1563237 - RNA, 23 nt, Human adenovirus D
ucagaucgugguaaacgggcccu

SEQ ID NO: 1563238 - RNA, 16 nt, Human adenovirus D
agaggcgacccaugau

SEQ ID NO: 1563239 - RNA, 13 nt, Human adenovirus D
gaucuuggaugga

SEQ ID NO: 1563240 - RNA, 19 nt, Human adenovirus D
acaagcgccaacagcagcg

SEQ ID NO: 1563241 - RNA, 12 nt, Human adenovirus D
cgcaggccagga

SEQ ID NO: 1563242 - RNA, 23 nt, Human adenovirus D
cuccuggugcgucgagcacagca

SEQ ID NO: 1563243 - RNA, 16 nt, Human adenovirus D
cgcucgggcagguccc

SEQ ID NO: 1563244 - RNA, 13 nt, Human adenovirus D
ucaaccuccaggc

SEQ ID NO: 1563245 - RNA, 14 nt, Human adenovirus D
acccgcucaccauc

SEQ ID NO: 1563246 - RNA, 14 nt, Human adenovirus D
cgguaagcacgagc

SEQ ID NO: 1563247 - RNA, 16 nt, Human adenovirus D
ccgggcuaccgcggca

SEQ ID NO: 1563248 - RNA, 16 nt, Human adenovirus D
gcaggccauggacgag

SEQ ID NO: 1563249 - RNA, 15 nt, Human adenovirus D
aaggcgcgcccaccc

SEQ ID NO: 1563250 - RNA, 13 nt, Human adenovirus D
cagccgcaggcgc

SEQ ID NO: 1563251 - RNA, 13 nt, Human adenovirus D
gacaaaggaggcc

SEQ ID NO: 1563252 - RNA, 19 nt, Human adenovirus D
ucacaguaagugcagcaca

SEQ ID NO: 1563253 - RNA, 20 nt, Human adenovirus D
cagcuccgguugugcagccc

SEQ ID NO: 1563254 - RNA, 16 nt, Human adenovirus D
caccgcuaccgcuucc

SEQ ID NO: 1563255 - RNA, 19 nt, Human adenovirus D
cgaagaagaacaggagccg

SEQ ID NO: 1563256 - RNA, 18 nt, Human adenovirus D
agcaucagucuccuggug

SEQ ID NO: 1563257 - RNA, 14 nt, Human adenovirus D
uaauagaaacagau

SEQ ID NO: 1563258 - RNA, 21 nt, Human adenovirus D
uccugggccacuacagcugac

SEQ ID NO: 1563259 - RNA, 15 nt, Human adenovirus D
gaccggggaggcacc

SEQ ID NO: 1563260 - RNA, 16 nt, Human adenovirus D
augagagucugaaaaa

SEQ ID NO: 1563261 - RNA, 22 nt, Human adenovirus D
ucugauuagcauagucacacuu

SEQ ID NO: 1563262 - RNA, 19 nt, Human adenovirus D
ugccaccaguuggacgagu

SEQ ID NO: 1563263 - RNA, 19 nt, Human adenovirus D
uggcagagcacgcugcaca

SEQ ID NO: 1563264 - RNA, 16 nt, Human adenovirus D
uacacacuagaaagca

SEQ ID NO: 1563265 - RNA, 18 nt, Human adenovirus D
gcugagcgacgaccuggg

SEQ ID NO: 1563266 - RNA, 18 nt, Human adenovirus D
guuuaugacucaugggcg

SEQ ID NO: 1563267 - RNA, 23 nt, Human adenovirus D
cggcgcguggaggaagugcugga

SEQ ID NO: 1563268 - RNA, 13 nt, Human adenovirus D
aguacgaggccau

SEQ ID NO: 1563269 - RNA, 14 nt, Human adenovirus D
cugcucuucccugg

SEQ ID NO: 1563270 - RNA, 13 nt, Human adenovirus D
ggcugcuggagcu

SEQ ID NO: 1563271 - RNA, 19 nt, Human adenovirus D
caggaugcagccaguggcc

SEQ ID NO: 1563272 - RNA, 15 nt, Human adenovirus D
ggagggauugcaggg

SEQ ID NO: 1563273 - RNA, 13 nt, Human adenovirus D
gcccgcgccgcgg

SEQ ID NO: 1563274 - RNA, 14 nt, Human adenovirus D
gcgauguugccacc

SEQ ID NO: 1563275 - RNA, 15 nt, Human adenovirus D
cauccauggccaggg

SEQ ID NO: 1563276 - RNA, 22 nt, Human adenovirus D
cauucuggacuucgcagccaug

SEQ ID NO: 1563277 - RNA, 14 nt, Human adenovirus D
gcugggcucgagca

SEQ ID NO: 1563278 - RNA, 11 nt, Human adenovirus D
cgggagcgagc

SEQ ID NO: 1563279 - RNA, 21 nt, Human adenovirus D
ucauggccaacagccacauga

SEQ ID NO: 1563280 - RNA, 15 nt, Human adenovirus D
guaguugcgcaggcg

SEQ ID NO: 1563281 - RNA, 18 nt, Human adenovirus D
cggaggccaucgugcaga

SEQ ID NO: 1563282 - RNA, 23 nt, Human adenovirus D
gaagccuucuauggaggcagagc

SEQ ID NO: 1563283 - RNA, 14 nt, Human adenovirus D
cuccaggccaaccu

SEQ ID NO: 1563284 - RNA, 14 nt, Human adenovirus D
acgcgccagccgcg

SEQ ID NO: 1563285 - RNA, 18 nt, Human adenovirus D
gugcaggaccaccaggac

SEQ ID NO: 1563286 - RNA, 20 nt, Human adenovirus D
uggccgcgauguugagcugg

SEQ ID NO: 1563287 - RNA, 16 nt, Human adenovirus D
ggcuucuacagccagc

SEQ ID NO: 1563288 - RNA, 12 nt, Human adenovirus D
ggcauccugcac

SEQ ID NO: 1563289 - RNA, 20 nt, Human adenovirus D
cuacuggcuucuacagccag

SEQ ID NO: 1563290 - RNA, 16 nt, Human adenovirus D
cugccgagccgcggga

SEQ ID NO: 1563291 - RNA, 15 nt, Human adenovirus D
ugcucaccaccccgg

SEQ ID NO: 1563292 - RNA, 22 nt, Human adenovirus D
ugagguacaugggcaugagccc

SEQ ID NO: 1563293 - RNA, 17 nt, Human adenovirus D
gggcuucgaagagccgg

SEQ ID NO: 1563294 - RNA, 14 nt, Human adenovirus D
cuacaaggaccgca

SEQ ID NO: 1563295 - RNA, 18 nt, Human adenovirus D
ccccagggaccacaaugu

SEQ ID NO: 1563296 - RNA, 15 nt, Human adenovirus D
ucaacuacuguggca

SEQ ID NO: 1563297 - RNA, 15 nt, Human adenovirus D
cgacacguacuucag

SEQ ID NO: 1563298 - RNA, 12 nt, Human adenovirus D
uugagcuggccu

SEQ ID NO: 1563299 - RNA, 16 nt, Human adenovirus D
caccgcuccuggucug

SEQ ID NO: 1563300 - RNA, 22 nt, Human adenovirus D
gaccgcggccguagcaggcgcc

SEQ ID NO: 1563301 - RNA, 20 nt, Human adenovirus D
ggcauggcaggcagcggccu

SEQ ID NO: 1563302 - RNA, 18 nt, Human adenovirus D
gagaccaacggcugcauc

SEQ ID NO: 1563303 - RNA, 14 nt, Human adenovirus D
aggacacccggccc

SEQ ID NO: 1563304 - RNA, 15 nt, Human adenovirus D
cccgagcucugcugc

SEQ ID NO: 1563305 - RNA, 14 nt, Human adenovirus D
uagucaaucuccca

SEQ ID NO: 1563306 - RNA, 20 nt, Human adenovirus D
cagaugucaggaucauugaa

SEQ ID NO: 1563307 - RNA, 15 nt, Human adenovirus D
cuucgcagccaugca

SEQ ID NO: 1563308 - RNA, 17 nt, Human adenovirus D
uucucggccaaucagca

SEQ ID NO: 1563309 - RNA, 17 nt, Human adenovirus D
caccacccacgcccgcu

SEQ ID NO: 1563310 - RNA, 21 nt, Human adenovirus D
cgcgggcuguggggcgugcag

SEQ ID NO: 1563311 - RNA, 22 nt, Human adenovirus D
ggugcgccccaucaagcaggug

SEQ ID NO: 1563312 - RNA, 16 nt, Human adenovirus D
cccaaaaucgagcagg

SEQ ID NO: 1563313 - RNA, 20 nt, Human adenovirus D
gcaucagcaucauccccgcg

SEQ ID NO: 1563314 - RNA, 23 nt, Human adenovirus D
guguaucucaauaaacagcacuu

SEQ ID NO: 1563315 - RNA, 19 nt, Human adenovirus D
cuggcgacgcagccggcga

SEQ ID NO: 1563316 - RNA, 20 nt, Human adenovirus D
uuuuaggagacuuucaucca

SEQ ID NO: 1563317 - RNA, 14 nt, Human adenovirus D
ugagguggacgagg

SEQ ID NO: 1563318 - RNA, 19 nt, Human adenovirus D
aucacaucggacuggguua

SEQ ID NO: 1563319 - RNA, 21 nt, Human adenovirus D
ucaacagcugggacuugccgc

SEQ ID NO: 1563320 - RNA, 17 nt, Human adenovirus D
caggagaggcauggcag

SEQ ID NO: 1563321 - RNA, 20 nt, Human adenovirus D
acucgcagacgagcggccgc

SEQ ID NO: 1563322 - RNA, 14 nt, Human adenovirus D
gccaugcgcaggcg

SEQ ID NO: 1563323 - RNA, 14 nt, Human adenovirus D
accggaggcuggcu

SEQ ID NO: 1563324 - RNA, 16 nt, Human adenovirus D
aucccaacagccuuca

SEQ ID NO: 1563325 - RNA, 19 nt, Human adenovirus D
cagugaaaacgugccugcu

SEQ ID NO: 1563326 - RNA, 20 nt, Human adenovirus D
cgcaaaaccuguucagggac

SEQ ID NO: 1563327 - RNA, 20 nt, Human adenovirus D
guacauguucaccagcaagu

SEQ ID NO: 1563328 - RNA, 18 nt, Human adenovirus D
gugcgcgaccugggcugc

SEQ ID NO: 1563329 - RNA, 15 nt, Human adenovirus D
ucggacgacugggag

SEQ ID NO: 1563330 - RNA, 18 nt, Human adenovirus D
ccuggggcaucucuucgu

SEQ ID NO: 1563331 - RNA, 20 nt, Human adenovirus D
augcgacccaugagcugcga

SEQ ID NO: 1563332 - RNA, 13 nt, Human adenovirus D
uggggcagacagu

SEQ ID NO: 1563333 - RNA, 17 nt, Human adenovirus D
cugcugccgcucaguca

SEQ ID NO: 1563334 - RNA, 13 nt, Human adenovirus D
gagcucuugcagg

SEQ ID NO: 1563335 - RNA, 13 nt, Human adenovirus D
gcuggcccuccau

SEQ ID NO: 1563336 - RNA, 17 nt, Human adenovirus D
aguggaagaagagcagc

SEQ ID NO: 1563337 - RNA, 14 nt, Human adenovirus D
ccucggugcagccg

SEQ ID NO: 1563338 - RNA, 23 nt, Human adenovirus D
gcggcuuuggcaaagacguuucu

SEQ ID NO: 1563339 - RNA, 14 nt, Human adenovirus D
aguuaaugcugccu

SEQ ID NO: 1563340 - RNA, 15 nt, Human adenovirus D
acagauccugcugcu

SEQ ID NO: 1563341 - RNA, 17 nt, Human adenovirus D
ugcugaucaagugccac

SEQ ID NO: 1563342 - RNA, 19 nt, Human adenovirus D
cggcggcgaggggcuccuc

SEQ ID NO: 1563343 - RNA, 16 nt, Human adenovirus D
cuaccucucggccgcc

SEQ ID NO: 1563344 - RNA, 15 nt, Human adenovirus D
gcgaggaggaccagg

SEQ ID NO: 1563345 - RNA, 15 nt, Human adenovirus D
ccugcggggcgauga

SEQ ID NO: 1563346 - RNA, 23 nt, Human adenovirus D
cagcaaauuccucgaccaugacc

SEQ ID NO: 1563347 - RNA, 19 nt, Human adenovirus D
ugguccuggucacccucga

SEQ ID NO: 1563348 - RNA, 22 nt, Human adenovirus D
agcagcgcgcgucauggcuggu

SEQ ID NO: 1563349 - RNA, 17 nt, Human adenovirus D
cgccgcuaucugcucuu

SEQ ID NO: 1563350 - RNA, 20 nt, Human adenovirus D
agacucauccugcuggugcu

SEQ ID NO: 1563351 - RNA, 21 nt, Human adenovirus D
uaagcaggagcaggaggagga

SEQ ID NO: 1563352 - RNA, 18 nt, Human adenovirus D
uaaauuuaaaaccucauu

SEQ ID NO: 1563353 - RNA, 21 nt, Human adenovirus D
agaugcagcaagccccggacc

SEQ ID NO: 1563354 - RNA, 18 nt, Human adenovirus D
gccagcgcuggguggccg

SEQ ID NO: 1563355 - RNA, 14 nt, Human adenovirus D
gcgcaggaggccau

SEQ ID NO: 1563356 - RNA, 12 nt, Human adenovirus D
gccaggaggaga

SEQ ID NO: 1563357 - RNA, 17 nt, Human adenovirus D
gacgagccaggugagcu

SEQ ID NO: 1563358 - RNA, 20 nt, Human adenovirus D
acacgggguugcagcacugg

SEQ ID NO: 1563359 - RNA, 22 nt, Human adenovirus D
gcacagacccaccccagucaga

SEQ ID NO: 1563360 - RNA, 15 nt, Human adenovirus D
aggaugaacaggagc

SEQ ID NO: 1563361 - RNA, 21 nt, Human adenovirus D
cauguccaccugcggggcgau

SEQ ID NO: 1563362 - RNA, 22 nt, Human adenovirus D
caacccgcguaauuggcccucc

SEQ ID NO: 1563363 - RNA, 22 nt, Human adenovirus D
uacuuuuaaugaagaagcagau

SEQ ID NO: 1563364 - RNA, 14 nt, Human adenovirus D
aucgccgaggagaa

SEQ ID NO: 1563365 - RNA, 12 nt, Human adenovirus D
uuuuuccagccc

SEQ ID NO: 1563366 - RNA, 13 nt, Human adenovirus D
cguccgcggccac

SEQ ID NO: 1563367 - RNA, 15 nt, Human adenovirus D
ggaccaccccaggcg

SEQ ID NO: 1563368 - RNA, 18 nt, Human adenovirus D
ccgcguaagcaggagcag

SEQ ID NO: 1563369 - RNA, 22 nt, Human adenovirus D
cguccgcaguacucgcagcgcu

SEQ ID NO: 1563370 - RNA, 21 nt, Human adenovirus D
cccaggcaaagcucaacccgc

SEQ ID NO: 1563371 - RNA, 18 nt, Human adenovirus D
cauccuggaccaggcggc

SEQ ID NO: 1563372 - RNA, 23 nt, Human adenovirus D
cagaaguaaauuugacacagcag

SEQ ID NO: 1563373 - RNA, 18 nt, Human adenovirus D
gcagccgcguaagcagga

SEQ ID NO: 1563374 - RNA, 17 nt, Human adenovirus D
cucuuuccagcagcagg

SEQ ID NO: 1563375 - RNA, 14 nt, Human adenovirus D
ccuugcagagcagc

SEQ ID NO: 1563376 - RNA, 14 nt, Human adenovirus D
uggcgugcuggaga

SEQ ID NO: 1563377 - RNA, 22 nt, Human adenovirus D
ggauuaucucuacaaauuguug

SEQ ID NO: 1563378 - RNA, 13 nt, Human adenovirus D
ccuggcccugaca

SEQ ID NO: 1563379 - RNA, 18 nt, Human adenovirus D
uggauagcuaugauccag

SEQ ID NO: 1563380 - RNA, 16 nt, Human adenovirus D
caccgagccucccagg

SEQ ID NO: 1563381 - RNA, 18 nt, Human adenovirus D
cgaagauggggccccgcc

SEQ ID NO: 1563382 - RNA, 16 nt, Human adenovirus D
uggaagaggggcagca

SEQ ID NO: 1563383 - RNA, 14 nt, Human adenovirus D
ggcgaacgugccgc

SEQ ID NO: 1563384 - RNA, 15 nt, Human adenovirus D
gugcugccccaggcg

SEQ ID NO: 1563385 - RNA, 15 nt, Human adenovirus D
ggccgcccugaccca

SEQ ID NO: 1563386 - RNA, 19 nt, Human adenovirus D
gugagcggcgaggggcugc

SEQ ID NO: 1563387 - RNA, 18 nt, Human adenovirus D
ucgggaucgccaggccuc

SEQ ID NO: 1563388 - RNA, 18 nt, Human adenovirus D
gcgcccaccaucaccacc

SEQ ID NO: 1563389 - RNA, 18 nt, Human adenovirus D
ggccgcccacgguggugg

SEQ ID NO: 1563390 - RNA, 13 nt, Human adenovirus D
aucacccagcagu

SEQ ID NO: 1563391 - RNA, 20 nt, Human adenovirus D
gaggugccccagagcgaggu

SEQ ID NO: 1563392 - RNA, 19 nt, Human adenovirus D
agaggcggaacugcuggcc

SEQ ID NO: 1563393 - RNA, 16 nt, Human adenovirus D
uaccucuugcagcugg

SEQ ID NO: 1563394 - RNA, 16 nt, Human adenovirus D
gagucgcggcagaacc

SEQ ID NO: 1563395 - RNA, 15 nt, Human adenovirus D
cagaacuggcagagc

SEQ ID NO: 1563396 - RNA, 15 nt, Human adenovirus D
auuuuuuccaagacc

SEQ ID NO: 1563397 - RNA, 12 nt, Human adenovirus D
cgcaccucgcgc

SEQ ID NO: 1563398 - RNA, 13 nt, Human adenovirus D
gcauguucuugca

SEQ ID NO: 1563399 - RNA, 21 nt, Human adenovirus D
gcucaggaccauagggagccu

SEQ ID NO: 1563400 - RNA, 21 nt, Human adenovirus D
uaauucagggugcuccagcca

SEQ ID NO: 1563401 - RNA, 18 nt, Human adenovirus D
ccucgaggacggagaggc

SEQ ID NO: 1563402 - RNA, 17 nt, Human adenovirus D
ggccaugaugcgagccg

SEQ ID NO: 1563403 - RNA, 20 nt, Human adenovirus D
gccgcucgcucguucugccc

SEQ ID NO: 1563404 - RNA, 15 nt, Human adenovirus D
gcgcgguaggcccug

SEQ ID NO: 1563405 - RNA, 23 nt, Human adenovirus D
ucgccuucggcuggaacccgcgc

SEQ ID NO: 1563406 - RNA, 15 nt, Human adenovirus D
ucagguauccagccu

SEQ ID NO: 1563407 - RNA, 14 nt, Human adenovirus D
ccacuuccgcgcuc

SEQ ID NO: 1563408 - RNA, 12 nt, Human adenovirus D
ccacagccagcc

SEQ ID NO: 1563409 - RNA, 17 nt, Human adenovirus D
cuuuaucagcacugcaa

SEQ ID NO: 1563410 - RNA, 18 nt, Human adenovirus D
gcuaccaccccagcaucc

SEQ ID NO: 1563411 - RNA, 19 nt, Human adenovirus D
gguagggggcgccgccggc

SEQ ID NO: 1563412 - RNA, 14 nt, Human adenovirus D
cugagccgccagcu

SEQ ID NO: 1563413 - RNA, 19 nt, Human adenovirus D
gcuguggggcgugcaggcg

SEQ ID NO: 1563414 - RNA, 13 nt, Human adenovirus D
cagccugggcaac

SEQ ID NO: 1563415 - RNA, 20 nt, Human adenovirus D
guguacaacgcccugcugga

SEQ ID NO: 1563416 - RNA, 21 nt, Human adenovirus D
cgcuguccacgagcgccagcu

SEQ ID NO: 1563417 - RNA, 22 nt, Human adenovirus D
cacccucagaagaagaccaccc

SEQ ID NO: 1563418 - RNA, 18 nt, Human adenovirus D
ucacaguuauaccaccuc

SEQ ID NO: 1563419 - RNA, 18 nt, Human adenovirus D
cuugaggaggaacuucag

SEQ ID NO: 1563420 - RNA, 13 nt, Human adenovirus D
guccaggucacag

SEQ ID NO: 1563421 - RNA, 13 nt, Human adenovirus D
guuggugagcucu

SEQ ID NO: 1563422 - RNA, 21 nt, Human adenovirus D
guccacgagcgccagcuguug

SEQ ID NO: 1563423 - RNA, 14 nt, Human adenovirus D
gguggugcagaaca

SEQ ID NO: 1563424 - RNA, 22 nt, Human adenovirus D
ugcuccacucgacccugaaggg

SEQ ID NO: 1563425 - RNA, 17 nt, Human adenovirus D
caagcuggccugcgcca

SEQ ID NO: 1563426 - RNA, 12 nt, Human adenovirus D
gcagccugagcu

SEQ ID NO: 1563427 - RNA, 17 nt, Human adenovirus D
gagauaugugcagcaga

SEQ ID NO: 1563428 - RNA, 16 nt, Human adenovirus D
cuccauccccucgcgc

SEQ ID NO: 1563429 - RNA, 16 nt, Human adenovirus D
ugcuccagccaaagcu

SEQ ID NO: 1563430 - RNA, 22 nt, Human adenovirus D
ggguagaagcaacagauuuaag

SEQ ID NO: 1563431 - RNA, 21 nt, Human adenovirus D
caaucuggcgguaccagggga

SEQ ID NO: 1563432 - RNA, 22 nt, Human adenovirus D
cagagcagcucuucggagccuc

SEQ ID NO: 1563433 - RNA, 16 nt, Human adenovirus D
gggcagacacaccagg

SEQ ID NO: 1563434 - RNA, 16 nt, Human adenovirus D
gcgccuuggaggccgc

SEQ ID NO: 1563435 - RNA, 23 nt, Human adenovirus D
gcacguggcggcggccaaccugg

SEQ ID NO: 1563436 - RNA, 16 nt, Human adenovirus D
acgacucgcugcugca

SEQ ID NO: 1563437 - RNA, 19 nt, Human adenovirus D
caguuauaccaccuccucc

SEQ ID NO: 1563438 - RNA, 15 nt, Human adenovirus D
accaggggguccacc

SEQ ID NO: 1563439 - RNA, 14 nt, Human adenovirus D
accguggggaacuc

SEQ ID NO: 1563440 - RNA, 13 nt, Human adenovirus D
cgcggccgcccac

SEQ ID NO: 1563441 - RNA, 16 nt, Human adenovirus D
uccugcacgcagcagc

SEQ ID NO: 1563442 - RNA, 16 nt, Human adenovirus D
cagccuguacccagag

SEQ ID NO: 1563443 - RNA, 16 nt, Human adenovirus D
uaguuguucagcagca

SEQ ID NO: 1563444 - RNA, 23 nt, Human adenovirus D
agcucagcccgcuuaccaguaga

SEQ ID NO: 1563445 - RNA, 19 nt, Human adenovirus D
aucgcgggcuuuguaacuc

SEQ ID NO: 1563446 - RNA, 18 nt, Human adenovirus D
cuaugagaugccccagca

SEQ ID NO: 1563447 - RNA, 17 nt, Human adenovirus D
ccagaccaagcugcugu

SEQ ID NO: 1563448 - RNA, 12 nt, Human adenovirus D
ucgugcgagggg

SEQ ID NO: 1563449 - RNA, 15 nt, Human adenovirus D
gaccuugcagagcag

SEQ ID NO: 1563450 - RNA, 13 nt, Human adenovirus D
acccguccuccuc

SEQ ID NO: 1563451 - RNA, 16 nt, Human adenovirus D
cacguacuucagccug

SEQ ID NO: 1563452 - RNA, 19 nt, Human adenovirus D
gauggccuccagccuuucc

SEQ ID NO: 1563453 - RNA, 14 nt, Human adenovirus D
gcucuugcagggaa

SEQ ID NO: 1563454 - RNA, 19 nt, Human adenovirus D
cucguagaggcgggugagg

SEQ ID NO: 1563455 - RNA, 17 nt, Human adenovirus D
acaacccgccugccagg

SEQ ID NO: 1563456 - RNA, 18 nt, Human adenovirus D
aacagcaaaagauacaga

SEQ ID NO: 1563457 - RNA, 20 nt, Human adenovirus D
agccaggucaaaacccacuc

SEQ ID NO: 1563458 - RNA, 17 nt, Human adenovirus D
guggacuauccuugcag

SEQ ID NO: 1563459 - RNA, 12 nt, Human adenovirus D
gcuccagccaaa

SEQ ID NO: 1563460 - RNA, 20 nt, Human adenovirus D
gccaugggcguguggcagca

SEQ ID NO: 1563461 - RNA, 21 nt, Human adenovirus D
gggcauuaacgggguggugga

SEQ ID NO: 1563462 - RNA, 16 nt, Human adenovirus D
cuugugguucuucugu

SEQ ID NO: 1563463 - RNA, 21 nt, Human adenovirus D
ugaggcauauaaaaaugcagu

SEQ ID NO: 1563464 - RNA, 23 nt, Human adenovirus D
gcucucucuucuuguaacuuuua

SEQ ID NO: 1563465 - RNA, 18 nt, Human adenovirus D
cuuguuacaugacauggg

SEQ ID NO: 1563466 - RNA, 18 nt, Human adenovirus D
ugcaguccaaccuggacc

SEQ ID NO: 1563467 - RNA, 14 nt, Human adenovirus D
aaaccccgccaaaa

SEQ ID NO: 1563468 - RNA, 22 nt, Human adenovirus D
gcacgagcaagacgcaggccag

SEQ ID NO: 1563469 - RNA, 23 nt, Human adenovirus D
agacggacuugauuggccugucc

SEQ ID NO: 1563470 - RNA, 22 nt, Human adenovirus D
cacccccucgaugaugccgcag

SEQ ID NO: 1563471 - RNA, 14 nt, Human adenovirus D
gggugcgcgacucc

SEQ ID NO: 1563472 - RNA, 20 nt, Human adenovirus D
cauggggcgccgcccgagcu

SEQ ID NO: 1563473 - RNA, 16 nt, Human adenovirus D
uagcagacagggccug

SEQ ID NO: 1563474 - RNA, 21 nt, Human adenovirus D
ccugcgcgagguugagcucca

SEQ ID NO: 1563475 - RNA, 13 nt, Human adenovirus D
uggucggcgccga

SEQ ID NO: 1563476 - RNA, 18 nt, Human adenovirus D
ccaggucgucgccccgga

SEQ ID NO: 1563477 - RNA, 22 nt, Human adenovirus D
acucuccugaaccacacggcca

SEQ ID NO: 1563478 - RNA, 13 nt, Human adenovirus D
ugcaucucccagg

SEQ ID NO: 1563479 - RNA, 22 nt, Human adenovirus D
cuuuaguugguccagauggaaa

SEQ ID NO: 1563480 - RNA, 14 nt, Human adenovirus D
caaggcacccacca

SEQ ID NO: 1563481 - RNA, 17 nt, Human adenovirus D
caucuuugacauggaug

SEQ ID NO: 1563482 - RNA, 13 nt, Human adenovirus D
cgcugaaagcaug

SEQ ID NO: 1563483 - RNA, 15 nt, Human adenovirus D
gucgcuggcugcugg

SEQ ID NO: 1563484 - RNA, 19 nt, Human adenovirus D
gccuucgugcacuggcccg

SEQ ID NO: 1563485 - RNA, 16 nt, Human adenovirus D
gacggucugcaggccg

SEQ ID NO: 1563486 - RNA, 16 nt, Human adenovirus D
aagacguuucuggggu

SEQ ID NO: 1563487 - RNA, 13 nt, Human adenovirus D
cuacauucuggac

SEQ ID NO: 1563488 - RNA, 23 nt, Human adenovirus D
acgccuuccuggcgacgcagccg

SEQ ID NO: 1563489 - RNA, 18 nt, Human adenovirus D
gcacucauccaugaugau

SEQ ID NO: 1563490 - RNA, 19 nt, Human adenovirus D
ucuggacuucgcagccaug

SEQ ID NO: 1563491 - RNA, 13 nt, Human adenovirus D
agagcacagcagu

SEQ ID NO: 1563492 - RNA, 23 nt, Human adenovirus D
gaugaacaacgccaucuuggaaa

SEQ ID NO: 1563493 - RNA, 18 nt, Human adenovirus D
accacagcaacuuccuga

SEQ ID NO: 1563494 - RNA, 14 nt, Human adenovirus D
gcagugggcgcaga

SEQ ID NO: 1563495 - RNA, 15 nt, Human adenovirus D
gccgucuggacccgc

SEQ ID NO: 1563496 - RNA, 12 nt, Human adenovirus D
cagcgugguggc

SEQ ID NO: 1563497 - RNA, 16 nt, Human adenovirus D
guggucagcgaugagc

SEQ ID NO: 1563498 - RNA, 14 nt, Human adenovirus D
cuuuaucugcuggg

SEQ ID NO: 1563499 - RNA, 16 nt, Human adenovirus D
aguuguaaugaucaaa

SEQ ID NO: 1563500 - RNA, 14 nt, Human adenovirus D
gcguccgcuccgca

SEQ ID NO: 1563501 - RNA, 23 nt, Human adenovirus D
ccaguagacaaagagcacagcag

SEQ ID NO: 1563502 - RNA, 18 nt, Human adenovirus D
gagggcuacaaggaccgc

SEQ ID NO: 1563503 - RNA, 17 nt, Human adenovirus D
gccagcaaacgccgccg

SEQ ID NO: 1563504 - RNA, 11 nt, Human adenovirus D
ucuucugccug

SEQ ID NO: 1563505 - RNA, 23 nt, Human adenovirus D
uagaugggcuccgagaagaugcc

SEQ ID NO: 1563506 - RNA, 12 nt, Human adenovirus D
cgcuguggagcc

SEQ ID NO: 1563507 - RNA, 21 nt, Human adenovirus D
ggaacgagaagaacgcacaga

SEQ ID NO: 1563508 - RNA, 18 nt, Human adenovirus D
cuugaaagggaugucaaa

SEQ ID NO: 1563509 - RNA, 16 nt, Human adenovirus D
aguggaagaagagcag

SEQ ID NO: 1563510 - RNA, 22 nt, Human adenovirus D
agcccugagccgccagcuggcc

SEQ ID NO: 1563511 - RNA, 13 nt, Human adenovirus D
ccagaccaccugg

SEQ ID NO: 1563512 - RNA, 22 nt, Human adenovirus D
gccccaggcggugcugcugccg

SEQ ID NO: 1563513 - RNA, 14 nt, Human adenovirus D
accgcggucccagu

SEQ ID NO: 1563514 - RNA, 22 nt, Human adenovirus D
gagcuuaacuuguaugugccuu

SEQ ID NO: 1563515 - RNA, 23 nt, Human adenovirus D
guagaagcaacagauuuaagcaa

SEQ ID NO: 1563516 - RNA, 21 nt, Human adenovirus D
cagcucaucgacuggugcugc

SEQ ID NO: 1563517 - RNA, 15 nt, Human adenovirus D
cgccgcaccauccgc

SEQ ID NO: 1563518 - RNA, 21 nt, Human adenovirus D
acccaaaaccuaccacuggcu

SEQ ID NO: 1563519 - RNA, 22 nt, Human adenovirus D
ccagacgggcgaagugcucaac

SEQ ID NO: 1563520 - RNA, 22 nt, Human adenovirus D
gugcugacauccauggccaggg

SEQ ID NO: 1563521 - RNA, 13 nt, Human adenovirus D
ugagagcgcuggc

SEQ ID NO: 1563522 - RNA, 22 nt, Human adenovirus D
uaaagugcaagucacgcaggug

SEQ ID NO: 1563523 - RNA, 17 nt, Human adenovirus D
aggcggacaagcuaaau

SEQ ID NO: 1563524 - RNA, 23 nt, Human adenovirus D
ugucuccuccgauggauucaaaa

SEQ ID NO: 1563525 - RNA, 19 nt, Human adenovirus D
gccgccgaagggcgagaag

SEQ ID NO: 1563526 - RNA, 17 nt, Human adenovirus D
acaacagccgcaggcca

SEQ ID NO: 1563527 - RNA, 22 nt, Human adenovirus D
gguggauuuuuuccaagacccg

SEQ ID NO: 1563528 - RNA, 21 nt, Human adenovirus D
ucgacggggaaggcuacaacg

SEQ ID NO: 1563529 - RNA, 17 nt, Human adenovirus D
ggcggcgcugcaaagcc

SEQ ID NO: 1563530 - RNA, 18 nt, Human adenovirus D
accuuggcuuugcugggu

SEQ ID NO: 1563531 - RNA, 22 nt, Human adenovirus D
uugagagagaggaaggaggaca

SEQ ID NO: 1563532 - RNA, 13 nt, Human adenovirus D
gcuccucucgugc

SEQ ID NO: 1563533 - RNA, 15 nt, Human adenovirus D
agcaagccccggacc

SEQ ID NO: 1563534 - RNA, 14 nt, Human adenovirus D
uggucaucacccuc

SEQ ID NO: 1563535 - RNA, 14 nt, Human adenovirus D
agccagccacagcc

SEQ ID NO: 1563536 - RNA, 21 nt, Human adenovirus D
ccgccgcuaucugcucuucca

SEQ ID NO: 1563537 - RNA, 23 nt, Human adenovirus D
ugcacaguagucaucaaaugcga

SEQ ID NO: 1563538 - RNA, 15 nt, Human adenovirus D
gccaugccccaggcc

SEQ ID NO: 1563539 - RNA, 18 nt, Human adenovirus D
uguacuccuucuuccgca

SEQ ID NO: 1563540 - RNA, 20 nt, Human adenovirus D
gacuuggaugaggaagagga

SEQ ID NO: 1563541 - RNA, 12 nt, Human adenovirus D
uccuuucgcugc

SEQ ID NO: 1563542 - RNA, 17 nt, Human adenovirus D
ccagccguaccagugca

SEQ ID NO: 1563543 - RNA, 17 nt, Human adenovirus D
caccgccacccgccgcc

SEQ ID NO: 1563544 - RNA, 19 nt, Human adenovirus D
uccacugcuccugcgaaag

SEQ ID NO: 1563545 - RNA, 16 nt, Human adenovirus D
gaccagggguccccga

SEQ ID NO: 1563546 - RNA, 17 nt, Human adenovirus D
ucgcgaaccaggcagug

SEQ ID NO: 1563547 - RNA, 12 nt, Human adenovirus D
cguggcgcagcg

SEQ ID NO: 1563548 - RNA, 19 nt, Human adenovirus D
cgguaccuucgagcugcaa

SEQ ID NO: 1563549 - RNA, 20 nt, Human adenovirus D
ggagaucacuagcgugagcc

SEQ ID NO: 1563550 - RNA, 20 nt, Human adenovirus D
cagcagcacaugguaaucca

SEQ ID NO: 1563551 - RNA, 23 nt, Human adenovirus D
augcuggccgugguccuggucac

SEQ ID NO: 1563552 - RNA, 14 nt, Human adenovirus D
cugcagcgccaguc

SEQ ID NO: 1563553 - RNA, 20 nt, Human adenovirus D
ucugccauguucucacagua

SEQ ID NO: 1563554 - RNA, 15 nt, Human adenovirus D
caacuuccccuaccc

SEQ ID NO: 1563555 - RNA, 15 nt, Human adenovirus D
gacacaccuggaggc

SEQ ID NO: 1563556 - RNA, 16 nt, Human adenovirus D
gagauaugugcagcag

SEQ ID NO: 1563557 - RNA, 18 nt, Human adenovirus D
ucaauaagguucugcccu

SEQ ID NO: 1563558 - RNA, 22 nt, Human adenovirus D
cauccagaauucaaccacaccu

SEQ ID NO: 1563559 - RNA, 14 nt, Human adenovirus D
acaugcccagcagc

SEQ ID NO: 1563560 - RNA, 17 nt, Human adenovirus D
cucguacccgcucacca

SEQ ID NO: 1563561 - RNA, 14 nt, Human adenovirus D
ccuuuaucagcacu

SEQ ID NO: 1563562 - RNA, 17 nt, Human adenovirus D
acgaugugaccacggac

SEQ ID NO: 1563563 - RNA, 21 nt, Human adenovirus D
ccacaggaugaacaggagcac

SEQ ID NO: 1563564 - RNA, 16 nt, Human adenovirus D
ggacgggcgcccagug

SEQ ID NO: 1563565 - RNA, 24 nt, Human adenovirus D
gacggcguaguugcgcaggcgcug

SEQ ID NO: 1563566 - RNA, 21 nt, Human adenovirus D
gguagcaccacugcauggccu

SEQ ID NO: 1563567 - RNA, 21 nt, Human adenovirus D
cuugauuuuuccagcccaggg

SEQ ID NO: 1563568 - RNA, 17 nt, Human adenovirus D
cuccucgcucuggggcc

SEQ ID NO: 1563569 - RNA, 17 nt, Human adenovirus D
gggugagccggccgcgc

SEQ ID NO: 1563570 - RNA, 14 nt, Human adenovirus D
cagcaggugcugcc

SEQ ID NO: 1563571 - RNA, 16 nt, Human adenovirus D
ggcgaagggcuggcga

SEQ ID NO: 1563572 - RNA, 12 nt, Human adenovirus D
ccgccgccgccg

SEQ ID NO: 1563573 - RNA, 23 nt, Human adenovirus D
ucaccauguuauucagcagccca

SEQ ID NO: 1563574 - RNA, 22 nt, Human adenovirus D
cggucaccgagccucccaggag

SEQ ID NO: 1563575 - RNA, 22 nt, Human adenovirus D
gcugcacgagcgccaggucggc

SEQ ID NO: 1563576 - RNA, 21 nt, Human adenovirus D
ccugaaccacacggccagcag

SEQ ID NO: 1563577 - RNA, 23 nt, Human adenovirus D
gugauccguaucgugcugcucuc

SEQ ID NO: 1563578 - RNA, 16 nt, Human adenovirus D
cuggccagcacgcucu

SEQ ID NO: 1563579 - RNA, 15 nt, Human adenovirus D
gaccugccuccacca

SEQ ID NO: 1563580 - RNA, 16 nt, Human adenovirus D
gcuggcugcuggagcu

SEQ ID NO: 1563581 - RNA, 20 nt, Human adenovirus D
gcccgucgccgcaccugucc

SEQ ID NO: 1563582 - RNA, 20 nt, Human adenovirus D
cuucaacaucugugcugccu

SEQ ID NO: 1563583 - RNA, 24 nt, Human adenovirus D
augcacccguaaaugacucuccug

SEQ ID NO: 1563584 - RNA, 19 nt, Human adenovirus D
caccuuggcuuugcugggu

SEQ ID NO: 1563585 - RNA, 16 nt, Human adenovirus D
aggcccuggagcagcg

SEQ ID NO: 1563586 - RNA, 14 nt, Human adenovirus D
cuuuccauggccuc

SEQ ID NO: 1563587 - RNA, 20 nt, Human adenovirus D
guugaugaccugggcggcga

SEQ ID NO: 1563588 - RNA, 24 nt, Human adenovirus D
agguggacgagggggcaguagagu

SEQ ID NO: 1563589 - RNA, 24 nt, Human adenovirus D
gacggacuugauuggccuguccug

SEQ ID NO: 1563590 - RNA, 20 nt, Human adenovirus D
uuccugucuucuuccggcaa

SEQ ID NO: 1563591 - RNA, 23 nt, Human adenovirus D
augcaggauaaauauggccugga

SEQ ID NO: 1563592 - RNA, 12 nt, Human adenovirus D
acaguacuggca

SEQ ID NO: 1563593 - RNA, 20 nt, Human adenovirus D
cgggaccgaguucagcucca

SEQ ID NO: 1563594 - RNA, 20 nt, Human adenovirus D
guuccggccccgcgggcagg

SEQ ID NO: 1563595 - RNA, 16 nt, Human adenovirus D
gccuuuaucagcacug

SEQ ID NO: 1563596 - RNA, 17 nt, Human adenovirus D
cgccaggaggcggugcg

SEQ ID NO: 1563597 - RNA, 13 nt, Human adenovirus D
ggggacgugagcg

SEQ ID NO: 1563598 - RNA, 19 nt, Human adenovirus D
cgacuucaugagccagagc

SEQ ID NO: 1563599 - RNA, 16 nt, Human adenovirus D
agacucauccugcugg

SEQ ID NO: 1563600 - RNA, 13 nt, Human adenovirus D
uggcggaggccau

SEQ ID NO: 1563601 - RNA, 19 nt, Human adenovirus D
cugcgcgagguugagcucc

SEQ ID NO: 1563602 - RNA, 15 nt, Human adenovirus D
ccauccccauccagu

SEQ ID NO: 1563603 - RNA, 12 nt, Human adenovirus D
cucuuggagcag

SEQ ID NO: 1563604 - RNA, 17 nt, Human adenovirus D
acugccaccgccgccgc

SEQ ID NO: 1563605 - RNA, 22 nt, Human adenovirus D
gguagcggucguuguccaccag

SEQ ID NO: 1563606 - RNA, 15 nt, Human adenovirus D
caccugcaccugcgu

SEQ ID NO: 1563607 - RNA, 14 nt, Human adenovirus D
uucuguacuuuguc

SEQ ID NO: 1563608 - RNA, 11 nt, Human adenovirus D
gccacucccag

SEQ ID NO: 1563609 - RNA, 20 nt, Human adenovirus D
cgcggcgggggcggagagcg

SEQ ID NO: 1563610 - RNA, 16 nt, Human adenovirus D
gcuggaugugcccaag

SEQ ID NO: 1563611 - RNA, 12 nt, Human adenovirus D
augagcugcgag

SEQ ID NO: 1563612 - RNA, 19 nt, Human adenovirus D
gcauguacaacaugcugac

SEQ ID NO: 1563613 - RNA, 17 nt, Human adenovirus D
uuguugagggaggaaag

SEQ ID NO: 1563614 - RNA, 17 nt, Human adenovirus D
gggcucgcugguggcgc

SEQ ID NO: 1563615 - RNA, 17 nt, Human adenovirus D
cuagagugccacugccg

SEQ ID NO: 1563616 - RNA, 20 nt, Human adenovirus D
gcagacacauguccccuucc

SEQ ID NO: 1563617 - RNA, 18 nt, Human adenovirus D
accugcaccugcgucugc

SEQ ID NO: 1563618 - RNA, 20 nt, Human adenovirus D
uaccugggaggagaggagga

SEQ ID NO: 1563619 - RNA, 17 nt, Human adenovirus D
cugcagggagccagggg

SEQ ID NO: 1563620 - RNA, 14 nt, Human adenovirus D
gcgcgggcaggaug

SEQ ID NO: 1563621 - RNA, 22 nt, Human adenovirus D
acuccuacaaguacacgccggc

SEQ ID NO: 1563622 - RNA, 20 nt, Human adenovirus D
cgacugucuagggccuuucc

SEQ ID NO: 1563623 - RNA, 21 nt, Human adenovirus D
uuauaucuauugcuagcccuu

SEQ ID NO: 1563624 - RNA, 14 nt, Human adenovirus D
uacuuuucugguug

SEQ ID NO: 1563625 - RNA, 17 nt, Human adenovirus D
cacuggcuuccgccgcc

SEQ ID NO: 1563626 - RNA, 15 nt, Human adenovirus D
cacagugcccccucc

SEQ ID NO: 1563627 - RNA, 23 nt, Human adenovirus D
cgcuccgugcgaggaugagagcc

SEQ ID NO: 1563628 - RNA, 17 nt, Human adenovirus D
cguguccacgcauugca

SEQ ID NO: 1563629 - RNA, 21 nt, Human adenovirus D
cuuugacacaccuggaggcac

SEQ ID NO: 1563630 - RNA, 16 nt, Human adenovirus D
aaaccuaccacuggcu

SEQ ID NO: 1563631 - RNA, 21 nt, Human adenovirus D
gcuucccauugaauggcacug

SEQ ID NO: 1563632 - RNA, 16 nt, Human adenovirus D
cuucaaccccuucucg

SEQ ID NO: 1563633 - RNA, 19 nt, Human adenovirus D
gcgcugggcguggugcugg

SEQ ID NO: 1563634 - RNA, 22 nt, Human adenovirus D
ggagcaggguaaagccagcagc

SEQ ID NO: 1563635 - RNA, 13 nt, Human adenovirus D
uugaagauucugg

SEQ ID NO: 1563636 - RNA, 21 nt, Human adenovirus D
acggcaucucgauccagcaga

SEQ ID NO: 1563637 - RNA, 19 nt, Human adenovirus D
gaugucaucacuggcggag

SEQ ID NO: 1563638 - RNA, 21 nt, Human adenovirus D
ucaggcagcggggacagagaa

SEQ ID NO: 1563639 - RNA, 19 nt, Human adenovirus D
gcucggcgaggauggccug

SEQ ID NO: 1563640 - RNA, 14 nt, Human adenovirus D
ggccagcacgcucu

SEQ ID NO: 1563641 - RNA, 15 nt, Human adenovirus D
gcaaaaauaaaucau

SEQ ID NO: 1563642 - RNA, 17 nt, Human adenovirus D
uggaagcccugagccgc

SEQ ID NO: 1563643 - RNA, 22 nt, Human adenovirus D
agauccugagauacgaugagac

SEQ ID NO: 1563644 - RNA, 22 nt, Human adenovirus D
augcggagccgcucggccaugc

SEQ ID NO: 1563645 - RNA, 18 nt, Human adenovirus D
ggccguagcaggcgccgg

SEQ ID NO: 1563646 - RNA, 19 nt, Human adenovirus D
gcugcccgacuucaugagc

SEQ ID NO: 1563647 - RNA, 23 nt, Human adenovirus D
ccguggcuucgagcaguggcucu

SEQ ID NO: 1563648 - RNA, 12 nt, Human adenovirus D
agccuacccaaa

SEQ ID NO: 1563649 - RNA, 19 nt, Human adenovirus D
gaagggguucucgcgcuca

SEQ ID NO: 1563650 - RNA, 20 nt, Human adenovirus D
uccaggucuggcacaucuuu

SEQ ID NO: 1563651 - RNA, 16 nt, Human adenovirus D
ggaaagacgguggugc

SEQ ID NO: 1563652 - RNA, 21 nt, Human adenovirus D
uuucgugacuugacuuccggg

SEQ ID NO: 1563653 - RNA, 17 nt, Human adenovirus D
cggccgaggaggagcgc

SEQ ID NO: 1563654 - RNA, 23 nt, Human adenovirus D
uggcggaggcggagucuuccaug

SEQ ID NO: 1563655 - RNA, 13 nt, Human adenovirus D
gcacugccggugc

SEQ ID NO: 1563656 - RNA, 22 nt, Human adenovirus D
gacgcugaaaggcgggcugccc

SEQ ID NO: 1563657 - RNA, 12 nt, Human adenovirus D
ggagggcagaaa

SEQ ID NO: 1563658 - RNA, 12 nt, Human adenovirus D
agcggggccugg

SEQ ID NO: 1563659 - RNA, 16 nt, Human adenovirus D
cguacgugccugcgca

SEQ ID NO: 1563660 - RNA, 13 nt, Human adenovirus D
caauggaaaucac

SEQ ID NO: 1563661 - RNA, 21 nt, Human adenovirus D
gcaacucguaccugggucacc

SEQ ID NO: 1563662 - RNA, 19 nt, Human adenovirus D
acuuccgcguaccugcgca

SEQ ID NO: 1563663 - RNA, 15 nt, Human adenovirus D
gaagugcucaacccg

SEQ ID NO: 1563664 - RNA, 21 nt, Human adenovirus D
cacucacuuuuaggugaagca

SEQ ID NO: 1563665 - RNA, 14 nt, Human adenovirus D
aggggcggacccca

SEQ ID NO: 1563666 - RNA, 15 nt, Human adenovirus D
gcguccgucagcagc

SEQ ID NO: 1563667 - RNA, 14 nt, Human adenovirus D
uggcgacccaggaa

SEQ ID NO: 1563668 - RNA, 13 nt, Human adenovirus D
uagagcggccagc

SEQ ID NO: 1563669 - RNA, 13 nt, Human adenovirus D
ccgcgaggccaua

SEQ ID NO: 1563670 - RNA, 20 nt, Human adenovirus D
ccgcgcgccgcgccgccacu

SEQ ID NO: 1563671 - RNA, 15 nt, Human adenovirus D
ugggcguguggcagc

SEQ ID NO: 1563672 - RNA, 23 nt, Human adenovirus D
ugugcaaugucaggucugcuggu

SEQ ID NO: 1563673 - RNA, 21 nt, Human adenovirus D
ccaggugagcucgggcugcuc

SEQ ID NO: 1563674 - RNA, 18 nt, Human adenovirus D
ccugcaagugcacagacc

SEQ ID NO: 1563675 - RNA, 18 nt, Human adenovirus D
gccgccggcggcgggcca

SEQ ID NO: 1563676 - RNA, 18 nt, Human adenovirus D
ugcgagccgcgcgccgcg

SEQ ID NO: 1563677 - RNA, 19 nt, Human adenovirus D
ccaugcagaucauggugcc

SEQ ID NO: 1563678 - RNA, 22 nt, Human adenovirus D
auuacucgcaaaaauaaaucau

SEQ ID NO: 1563679 - RNA, 12 nt, Human adenovirus D
cgauccagcaga

SEQ ID NO: 1563680 - RNA, 14 nt, Human adenovirus D
ggucccgguguugc

SEQ ID NO: 1563681 - RNA, 14 nt, Human adenovirus D
cagcgagaggagcu

SEQ ID NO: 1563682 - RNA, 19 nt, Human adenovirus D
gugggaccuggcggaggcc

SEQ ID NO: 1563683 - RNA, 14 nt, Human adenovirus D
gugggcguggggca

SEQ ID NO: 1563684 - RNA, 13 nt, Human adenovirus D
uucugccagcaga

SEQ ID NO: 1563685 - RNA, 19 nt, Human adenovirus D
agcggugguaggccccugu

SEQ ID NO: 1563686 - RNA, 17 nt, Human adenovirus D
cccugagcucgcgccuc

SEQ ID NO: 1563687 - RNA, 17 nt, Human adenovirus D
cgcggcgaaacgcucug

SEQ ID NO: 1563688 - RNA, 18 nt, Human adenovirus D
ccgcaggaguccaccgcu

SEQ ID NO: 1563689 - RNA, 18 nt, Human adenovirus D
augagaugccccagcaga

SEQ ID NO: 1563690 - RNA, 19 nt, Human adenovirus D
ucugcccaccgugcgcuac

SEQ ID NO: 1563691 - RNA, 23 nt, Human adenovirus D
uccugccugggaauccugcacga

SEQ ID NO: 1563692 - RNA, 15 nt, Human adenovirus D
gcaucagucuccugg

SEQ ID NO: 1563693 - RNA, 16 nt, Human adenovirus D
ugaaauugcgggugau

SEQ ID NO: 1563694 - RNA, 18 nt, Human adenovirus D
cgcgcccguagucuggag

SEQ ID NO: 1563695 - RNA, 16 nt, Human adenovirus D
ugccgucgucccggag

SEQ ID NO: 1563696 - RNA, 23 nt, Human adenovirus D
ugggguacuuuacgcuggccagc

SEQ ID NO: 1563697 - RNA, 21 nt, Human adenovirus D
gccucggcggcguggcccuug

SEQ ID NO: 1563698 - RNA, 18 nt, Human adenovirus D
gucgcggacgcgcucccg

SEQ ID NO: 1563699 - RNA, 15 nt, Human adenovirus D
uaaaggcgggugucu

SEQ ID NO: 1563700 - RNA, 20 nt, Human adenovirus D
gccagcgucauguccuucca

SEQ ID NO: 1563701 - RNA, 16 nt, Human adenovirus D
guggacuucacagaga

SEQ ID NO: 1563702 - RNA, 18 nt, Human adenovirus D
caggugaugccggcagcg

SEQ ID NO: 1563703 - RNA, 21 nt, Human adenovirus D
gaccucggaguaccugagccg

SEQ ID NO: 1563704 - RNA, 17 nt, Human adenovirus D
ggccggcaugcccacca

SEQ ID NO: 1563705 - RNA, 22 nt, Human adenovirus D
ccccucgaaucaggcuggagcc

SEQ ID NO: 1563706 - RNA, 14 nt, Human adenovirus D
cacaguagucauca

SEQ ID NO: 1563707 - RNA, 18 nt, Human adenovirus D
acgaggauuucgagccga

SEQ ID NO: 1563708 - RNA, 23 nt, Human adenovirus D
acccggacguggugcugcugccg

SEQ ID NO: 1563709 - RNA, 16 nt, Human adenovirus D
uuuuaaugaagaagca

SEQ ID NO: 1563710 - RNA, 21 nt, Human adenovirus D
gcgcagguggacgagcagacc

SEQ ID NO: 1563711 - RNA, 13 nt, Human adenovirus D
aaaagaaacaagu

SEQ ID NO: 1563712 - RNA, 13 nt, Human adenovirus D
auuaugcuccugg

SEQ ID NO: 1563713 - RNA, 23 nt, Human adenovirus D
cacccgguacuacgccagccgca

SEQ ID NO: 1563714 - RNA, 15 nt, Human adenovirus D
cagggagccagggga

SEQ ID NO: 1563715 - RNA, 17 nt, Human adenovirus D
cgagcuggaagcccuga

SEQ ID NO: 1563716 - RNA, 22 nt, Human adenovirus D
aggccgccuacgguccagagga

SEQ ID NO: 1563717 - RNA, 21 nt, Human adenovirus D
ccucugccguccgcccgcgcc

SEQ ID NO: 1563718 - RNA, 13 nt, Human adenovirus D
cgcguccgcggcc

SEQ ID NO: 1563719 - RNA, 19 nt, Human adenovirus D
ccuggugauacgaggcaga

SEQ ID NO: 1563720 - RNA, 20 nt, Human adenovirus D
gcucgucuuccaggagccug

SEQ ID NO: 1563721 - RNA, 21 nt, Human adenovirus D
acucccgucucgacccgagcc

SEQ ID NO: 1563722 - RNA, 18 nt, Human adenovirus D
uccagcagagucugccgc

SEQ ID NO: 1563723 - RNA, 13 nt, Human adenovirus D
aaaauacagaugg

SEQ ID NO: 1563724 - RNA, 18 nt, Human adenovirus D
ucggaguaccugagccgc

SEQ ID NO: 1563725 - RNA, 20 nt, Human adenovirus D
cggcgacgacgacauccugg

SEQ ID NO: 1563726 - RNA, 14 nt, Human adenovirus D
gcacgauccugacg

SEQ ID NO: 1563727 - RNA, 19 nt, Human adenovirus D
agcgcgccgacccguggcc

SEQ ID NO: 1563728 - RNA, 11 nt, Human adenovirus D
ucgcugcugcc

SEQ ID NO: 1563729 - RNA, 19 nt, Human adenovirus D
gaaccuuuggaccugagcu

SEQ ID NO: 1563730 - RNA, 19 nt, Human adenovirus D
gcagaguacucauaaagaa

SEQ ID NO: 1563731 - RNA, 23 nt, Human adenovirus D
cuggaguuucacccgucugaaaa

SEQ ID NO: 1563732 - RNA, 17 nt, Human adenovirus D
cuucgaguacgaggcca

SEQ ID NO: 1563733 - RNA, 22 nt, Human adenovirus D
acgagcaagacgcaggccagga

SEQ ID NO: 1563734 - RNA, 15 nt, Human adenovirus D
cagcaacccuuccug

SEQ ID NO: 1563735 - RNA, 17 nt, Human adenovirus D
ggaacucgcggacgcgg

SEQ ID NO: 1563736 - RNA, 11 nt, Human adenovirus D
ucaugcaagac

SEQ ID NO: 1563737 - RNA, 22 nt, Human adenovirus D
caguauccgcggaguccagcga

SEQ ID NO: 1563738 - RNA, 18 nt, Human adenovirus D
agaagugacaauuuaacu

SEQ ID NO: 1563739 - RNA, 19 nt, Human adenovirus D
gggccuacgagcucaaccu

SEQ ID NO: 1563740 - RNA, 19 nt, Human adenovirus D
ccugagcaaccuccugggc

SEQ ID NO: 1563741 - RNA, 20 nt, Human adenovirus D
uaccccaucccggccaaggc

SEQ ID NO: 1563742 - RNA, 20 nt, Human adenovirus D
ccagacgcaagagccggcgg

SEQ ID NO: 1563743 - RNA, 12 nt, Human adenovirus D
ugaagcgccgcc

SEQ ID NO: 1563744 - RNA, 18 nt, Human adenovirus D
ccgcccgagcucugcugc

SEQ ID NO: 1563745 - RNA, 21 nt, Human adenovirus D
agcacaaacgugcaguccaac

SEQ ID NO: 1563746 - RNA, 13 nt, Human adenovirus D
aagcugggcuggg

SEQ ID NO: 1563747 - RNA, 12 nt, Human adenovirus D
cacgugaccagg

SEQ ID NO: 1563748 - RNA, 19 nt, Human adenovirus D
cucgcaguccgccaagcuc

SEQ ID NO: 1563749 - RNA, 16 nt, Human adenovirus D
gggaccggcggggccu

SEQ ID NO: 1563750 - RNA, 18 nt, Human adenovirus D
ugcaagucacgcagguga

SEQ ID NO: 1563751 - RNA, 22 nt, Human adenovirus D
aacaggagccgcuaguggaaga

SEQ ID NO: 1563752 - RNA, 14 nt, Human adenovirus D
cgaggggcuccucu

SEQ ID NO: 1563753 - RNA, 13 nt, Human adenovirus D
cgccaacagcagc

SEQ ID NO: 1563754 - RNA, 18 nt, Human adenovirus D
uguaagugugacaaucaa

SEQ ID NO: 1563755 - RNA, 14 nt, Human adenovirus D
agguggcuauuuuc

SEQ ID NO: 1563756 - RNA, 16 nt, Human adenovirus D
gaauaucagacaugcu

SEQ ID NO: 1563757 - RNA, 13 nt, Human adenovirus D
gcagagagauggc

SEQ ID NO: 1563758 - RNA, 13 nt, Human adenovirus D
aaacaggcugucg

SEQ ID NO: 1563759 - RNA, 17 nt, Human adenovirus D
ugacaaauggagccaga

SEQ ID NO: 1563760 - RNA, 23 nt, Human adenovirus D
caccaggacgguguagcccgugc

SEQ ID NO: 1563761 - RNA, 14 nt, Human adenovirus D
gggcacuggagcac

SEQ ID NO: 1563762 - RNA, 12 nt, Human adenovirus D
ucguucugccca

SEQ ID NO: 1563763 - RNA, 22 nt, Human adenovirus D
gacagagauggacuuggaagag

SEQ ID NO: 1563764 - RNA, 19 nt, Human adenovirus D
ucaccuuggcuuugcuggg

SEQ ID NO: 1563765 - RNA, 20 nt, Human adenovirus D
ugagguuggcgauguugcca

SEQ ID NO: 1563766 - RNA, 23 nt, Human adenovirus D
ccuguauauuuuuagaauggaag

SEQ ID NO: 1563767 - RNA, 13 nt, Human adenovirus D
ugaaacaccugca

SEQ ID NO: 1563768 - RNA, 14 nt, Human adenovirus D
ccacaggugcugcc

SEQ ID NO: 1563769 - RNA, 21 nt, Human adenovirus D
cggggugaacaucccccgcaa

SEQ ID NO: 1563770 - RNA, 12 nt, Human adenovirus D
cccgcaggcagg

SEQ ID NO: 1563771 - RNA, 16 nt, Human adenovirus D
ccggccccgcgggcag

SEQ ID NO: 1563772 - RNA, 19 nt, Human adenovirus D
ggaacaccaucagacuggg

SEQ ID NO: 1563773 - RNA, 23 nt, Human adenovirus D
augaaaaagcugaggauggcaaa

SEQ ID NO: 1563774 - RNA, 16 nt, Human adenovirus D
ucaagcugggcuggga

SEQ ID NO: 1563775 - RNA, 15 nt, Human adenovirus D
aggacaugcagcugc

SEQ ID NO: 1563776 - RNA, 21 nt, Human adenovirus D
gugguggcgacgcggcggcga

SEQ ID NO: 1563777 - RNA, 16 nt, Human adenovirus D
gaagacuauaaaguca

SEQ ID NO: 1563778 - RNA, 14 nt, Human adenovirus D
ccacgguggugcag

SEQ ID NO: 1563779 - RNA, 13 nt, Human adenovirus D
agcguccgcuccg

SEQ ID NO: 1563780 - RNA, 12 nt, Human adenovirus D
cuccguagccug

SEQ ID NO: 1563781 - RNA, 14 nt, Human adenovirus D
acagaacaaaaaca

SEQ ID NO: 1563782 - RNA, 22 nt, Human adenovirus D
gagagguugaaaaggcagcuga

SEQ ID NO: 1563783 - RNA, 17 nt, Human adenovirus D
accgcugucucagccuc

SEQ ID NO: 1563784 - RNA, 14 nt, Human adenovirus D
gcgcagcggcagga

SEQ ID NO: 1563785 - RNA, 14 nt, Human adenovirus D
ucaacugcagaccg

SEQ ID NO: 1563786 - RNA, 22 nt, Human adenovirus D
gcucgaucuccuccuccuggag

SEQ ID NO: 1563787 - RNA, 11 nt, Human adenovirus D
uaugccagacg

SEQ ID NO: 1563788 - RNA, 20 nt, Human adenovirus D
cugcugccgcucagucaucc

SEQ ID NO: 1563789 - RNA, 19 nt, Human adenovirus D
ccaggguugagucgcggca

SEQ ID NO: 1563790 - RNA, 19 nt, Human adenovirus D
caagaacgagggccugggc

SEQ ID NO: 1563791 - RNA, 23 nt, Human adenovirus D
accccuuuggguucucggaccgc

SEQ ID NO: 1563792 - RNA, 13 nt, Human adenovirus D
ucugccagcagaa

SEQ ID NO: 1563793 - RNA, 15 nt, Human adenovirus D
cugaacgggggcgcc

SEQ ID NO: 1563794 - RNA, 20 nt, Human adenovirus D
uggagacgcccuugugcccg

SEQ ID NO: 1563795 - RNA, 17 nt, Human adenovirus D
uaauucucaaaguguga

SEQ ID NO: 1563796 - RNA, 15 nt, Human adenovirus D
gcgccgccggcggcg

SEQ ID NO: 1563797 - RNA, 22 nt, Human adenovirus D
uguuauugagcccaucaagcaa

SEQ ID NO: 1563798 - RNA, 19 nt, Human adenovirus D
caggggaugaacaguggca

SEQ ID NO: 1563799 - RNA, 18 nt, Human adenovirus D
guuugagaauaacaugcu

SEQ ID NO: 1563800 - RNA, 23 nt, Human adenovirus D
ggcgcacaacaccgccuccaccc

SEQ ID NO: 1563801 - RNA, 16 nt, Human adenovirus D
auaccauugcaaggca

SEQ ID NO: 1563802 - RNA, 15 nt, Human adenovirus D
ccacugcauggccuc

SEQ ID NO: 1563803 - RNA, 23 nt, Human adenovirus D
gagcgaggugugcgucagggcga

SEQ ID NO: 1563804 - RNA, 16 nt, Human adenovirus D
gagccgccagcuggcc

SEQ ID NO: 1563805 - RNA, 15 nt, Human adenovirus D
gcuggcgcgcacgua

SEQ ID NO: 1563806 - RNA, 16 nt, Human adenovirus D
gaacgcgcgaagaugg

SEQ ID NO: 1563807 - RNA, 13 nt, Human adenovirus D
ccgugcgcaccac

SEQ ID NO: 1563808 - RNA, 16 nt, Human adenovirus D
gcaccagccgcaccgc

SEQ ID NO: 1563809 - RNA, 15 nt, Human adenovirus D
ugcccgccaccugca

SEQ ID NO: 1563810 - RNA, 17 nt, Human adenovirus D
caguaggaaccagcaca

SEQ ID NO: 1563811 - RNA, 22 nt, Human adenovirus D
cgccuggggcagacagugcucc

SEQ ID NO: 1563812 - RNA, 17 nt, Human adenovirus D
cgggcuguggggcgugc

SEQ ID NO: 1563813 - RNA, 14 nt, Human adenovirus D
caauaccgggauga

SEQ ID NO: 1563814 - RNA, 14 nt, Human adenovirus D
cugcaaccugugcu

SEQ ID NO: 1563815 - RNA, 16 nt, Human adenovirus D
agcaggaccugggcuu

SEQ ID NO: 1563816 - RNA, 16 nt, Human adenovirus D
cgauguaacaucacca

SEQ ID NO: 1563817 - RNA, 17 nt, Human adenovirus D
gccaaccgcacccgcgc

SEQ ID NO: 1563818 - RNA, 18 nt, Human adenovirus D
gugagcucuucaaucggu

SEQ ID NO: 1563819 - RNA, 14 nt, Human adenovirus D
cgagccucccagga

SEQ ID NO: 1563820 - RNA, 17 nt, Human adenovirus D
ggcauccugcacgcagc

SEQ ID NO: 1563821 - RNA, 13 nt, Human adenovirus D
ugaaucucggcca

SEQ ID NO: 1563822 - RNA, 20 nt, Human adenovirus D
ggcacagccucucugaagca

SEQ ID NO: 1563823 - RNA, 19 nt, Human adenovirus D
gcgcgaagccguggcgcag

SEQ ID NO: 1563824 - RNA, 13 nt, Human adenovirus D
cccggccaaggcc

SEQ ID NO: 1563825 - RNA, 14 nt, Human adenovirus D
gcucccaccgcgcc

SEQ ID NO: 1563826 - RNA, 15 nt, Human adenovirus D
acgccuuccuggcga

SEQ ID NO: 1563827 - RNA, 20 nt, Human adenovirus D
gaccgcggccguagcaggcg

SEQ ID NO: 1563828 - RNA, 16 nt, Human adenovirus D
ccuuccaccucggugc

SEQ ID NO: 1563829 - RNA, 14 nt, Human adenovirus D
gaggcgagcagcug

SEQ ID NO: 1563830 - RNA, 12 nt, Human adenovirus D
uuaucugcuggg

SEQ ID NO: 1563831 - RNA, 20 nt, Human adenovirus D
gcuuacaacagccuugcccc

SEQ ID NO: 1563832 - RNA, 11 nt, Human adenovirus D
gacaccacagu

SEQ ID NO: 1563833 - RNA, 16 nt, Human adenovirus D
ccgucagcagcaggag

SEQ ID NO: 1563834 - RNA, 14 nt, Human adenovirus D
gaggggcagcaacc

SEQ ID NO: 1563835 - RNA, 14 nt, Human adenovirus D
guggcggggcccga

SEQ ID NO: 1563836 - RNA, 16 nt, Human adenovirus D
aucccacgccgagccu

SEQ ID NO: 1563837 - RNA, 15 nt, Human adenovirus D
gcugcuucugccugg

SEQ ID NO: 1563838 - RNA, 21 nt, Human adenovirus D
caaaagaguuucaacaaccau

SEQ ID NO: 1563839 - RNA, 14 nt, Human adenovirus D
gguuggcuugcaug

SEQ ID NO: 1563840 - RNA, 15 nt, Human adenovirus D
cagcaagagcucaaa

SEQ ID NO: 1563841 - RNA, 14 nt, Human adenovirus D
accaggggguccac

SEQ ID NO: 1563842 - RNA, 22 nt, Human adenovirus D
gaagaaccauuuuuauuccaaa

SEQ ID NO: 1563843 - RNA, 18 nt, Human adenovirus D
cuacauguucgaccccuu

SEQ ID NO: 1563844 - RNA, 17 nt, Human adenovirus D
ugcugcucgagcgccca

SEQ ID NO: 1563845 - RNA, 15 nt, Human adenovirus D
ugggcaacggccgcu

SEQ ID NO: 1563846 - RNA, 19 nt, Human adenovirus D
guuagguucuucacccagc

SEQ ID NO: 1563847 - RNA, 12 nt, Human adenovirus D
augccccaggcc

SEQ ID NO: 1563848 - RNA, 16 nt, Human adenovirus D
ugaggcaggccaugga

SEQ ID NO: 1563849 - RNA, 17 nt, Human adenovirus D
ggacuucacagagagcc

SEQ ID NO: 1563850 - RNA, 15 nt, Human adenovirus D
aaucggaucuucccc

SEQ ID NO: 1563851 - RNA, 16 nt, Human adenovirus D
caugacaaccucuucu

SEQ ID NO: 1563852 - RNA, 14 nt, Human adenovirus D
uuaagaauccacag

SEQ ID NO: 1563853 - RNA, 17 nt, Human adenovirus D
gaacaguccacccagac

SEQ ID NO: 1563854 - RNA, 17 nt, Human adenovirus D
caaacuagcagacaggg

SEQ ID NO: 1563855 - RNA, 24 nt, Human adenovirus D
agaaaugggcccuugaacagcaua

SEQ ID NO: 1563856 - RNA, 15 nt, Human adenovirus D
gccgaggcucuguuc

SEQ ID NO: 1563857 - RNA, 17 nt, Human adenovirus D
accucgguacccuccuc

SEQ ID NO: 1563858 - RNA, 18 nt, Human adenovirus D
cugguggcgcugaacgcc

SEQ ID NO: 1563859 - RNA, 15 nt, Human adenovirus D
uccccaccuacuccu

SEQ ID NO: 1563860 - RNA, 14 nt, Human adenovirus D
ccauagcucagccc

SEQ ID NO: 1563861 - RNA, 13 nt, Human adenovirus D
agcgagacccagg

SEQ ID NO: 1563862 - RNA, 16 nt, Human adenovirus D
cugaugagcucggcga

SEQ ID NO: 1563863 - RNA, 22 nt, Human adenovirus D
agccgcuccgugcgaggaugag

SEQ ID NO: 1563864 - RNA, 17 nt, Human adenovirus D
cgcguucucacuuccuc

SEQ ID NO: 1563865 - RNA, 14 nt, Human adenovirus D
cucccucacccacg

SEQ ID NO: 1563866 - RNA, 18 nt, Human adenovirus D
ugcuggaugcggagccgc

SEQ ID NO: 1563867 - RNA, 15 nt, Human adenovirus D
ggcagccgagccggc

SEQ ID NO: 1563868 - RNA, 20 nt, Human adenovirus D
acuucagccugggcaacaag

SEQ ID NO: 1563869 - RNA, 18 nt, Human adenovirus D
cucacaguccaggucaca

SEQ ID NO: 1563870 - RNA, 16 nt, Human adenovirus D
acagcguuccccuccg

SEQ ID NO: 1563871 - RNA, 15 nt, Human adenovirus D
cuccuccuccuggag

SEQ ID NO: 1563872 - RNA, 19 nt, Human adenovirus D
agccacgauguaacaucac

SEQ ID NO: 1563873 - RNA, 13 nt, Human adenovirus D
aacagcagaggaa

SEQ ID NO: 1563874 - RNA, 17 nt, Human adenovirus D
cgcuucuuaccucgcgu

SEQ ID NO: 1563875 - RNA, 23 nt, Human adenovirus D
cugcgcaaaaccuguucagggac

SEQ ID NO: 1563876 - RNA, 20 nt, Human adenovirus D
caaguaggugaagaaaacug

SEQ ID NO: 1563877 - RNA, 17 nt, Human adenovirus D
gcauccugcagcccaaa

SEQ ID NO: 1563878 - RNA, 13 nt, Human adenovirus D
cgcaacuuccagc

SEQ ID NO: 1563879 - RNA, 23 nt, Human adenovirus D
cagucacucucauuucagaacca

SEQ ID NO: 1563880 - RNA, 16 nt, Human adenovirus D
ccgcugugcuggugga

SEQ ID NO: 1563881 - RNA, 11 nt, Human adenovirus D
agcggccagcg

SEQ ID NO: 1563882 - RNA, 20 nt, Human adenovirus D
cucgcugguggcgcugaacg

SEQ ID NO: 1563883 - RNA, 18 nt, Human adenovirus D
gccuuguagggacagcag

SEQ ID NO: 1563884 - RNA, 16 nt, Human adenovirus D
ccucucgugcuccggc

SEQ ID NO: 1563885 - RNA, 17 nt, Human adenovirus D
cugggcucgcugguggc

SEQ ID NO: 1563886 - RNA, 14 nt, Human adenovirus D
acgcacgggccgcc

SEQ ID NO: 1563887 - RNA, 22 nt, Human adenovirus D
cagccugagcuuggccgagaag

SEQ ID NO: 1563888 - RNA, 20 nt, Human adenovirus D
ggcaaagcgguugagcuggg

SEQ ID NO: 1563889 - RNA, 19 nt, Human adenovirus D
guccgcaggcgggacagag

SEQ ID NO: 1563890 - RNA, 22 nt, Human adenovirus D
ggccgaaauuggugcgcugggg

SEQ ID NO: 1563891 - RNA, 13 nt, Human adenovirus D
agcaucaaaaauu

SEQ ID NO: 1563892 - RNA, 23 nt, Human adenovirus D
cagacaaacauccauguuggagg

SEQ ID NO: 1563893 - RNA, 23 nt, Human adenovirus D
ugcaacugcgcguccgucagcag

SEQ ID NO: 1563894 - RNA, 19 nt, Human adenovirus D
ggccgaaaaccccgccggg

SEQ ID NO: 1563895 - RNA, 20 nt, Human adenovirus D
uccacgcugguggccaccuc

SEQ ID NO: 1563896 - RNA, 21 nt, Human adenovirus D
cgggauagagagucuggugga

SEQ ID NO: 1563897 - RNA, 15 nt, Human adenovirus D
aggaggaugugcugc

SEQ ID NO: 1563898 - RNA, 19 nt, Human adenovirus D
cgaaauuggugcgcugggg

SEQ ID NO: 1563899 - RNA, 14 nt, Human adenovirus D
ggcagcggggccug

SEQ ID NO: 1563900 - RNA, 18 nt, Human adenovirus D
gcgcacguggcggcggcc

SEQ ID NO: 1563901 - RNA, 21 nt, Human adenovirus D
agacugauggccacggggagc

SEQ ID NO: 1563902 - RNA, 15 nt, Human adenovirus D
aaacuaaagccaaac

SEQ ID NO: 1563903 - RNA, 16 nt, Human adenovirus D
cucggcugagcucgcu

SEQ ID NO: 1563904 - RNA, 15 nt, Human adenovirus D
ucgccgcgcaggggc

SEQ ID NO: 1563905 - RNA, 13 nt, Human adenovirus D
cggccgcccacgg

SEQ ID NO: 1563906 - RNA, 22 nt, Human adenovirus D
uggucgagcgggaccggggagg

SEQ ID NO: 1563907 - RNA, 23 nt, Human adenovirus D
uuucuggggucagagacaucaua

SEQ ID NO: 1563908 - RNA, 22 nt, Human adenovirus D
gaugaaagucaggagcagcgcc

SEQ ID NO: 1563909 - RNA, 23 nt, Human adenovirus D
cggggguucauguugugcaggac

SEQ ID NO: 1563910 - RNA, 17 nt, Human adenovirus D
acagcaggagugcaggg

SEQ ID NO: 1563911 - RNA, 18 nt, Human adenovirus D
gaagccaugcugcgcaac

SEQ ID NO: 1563912 - RNA, 22 nt, Human adenovirus D
ugacuucaaccccgucuacccc

SEQ ID NO: 1563913 - RNA, 20 nt, Human adenovirus D
uuaaaaaccaaaaaaaacaa

SEQ ID NO: 1563914 - RNA, 13 nt, Human adenovirus D
cacaccugugaca

SEQ ID NO: 1563915 - RNA, 12 nt, Human adenovirus D
gugcgcuggggc

SEQ ID NO: 1563916 - RNA, 14 nt, Human adenovirus D
uucagauccccacc

SEQ ID NO: 1563917 - RNA, 12 nt, Human adenovirus D
gcauggcaggca

SEQ ID NO: 1563918 - RNA, 15 nt, Human adenovirus D
gcuuccguugcgcug

SEQ ID NO: 1563919 - RNA, 16 nt, Human adenovirus D
aggaugaacaggagca

SEQ ID NO: 1563920 - RNA, 13 nt, Human adenovirus D
ucagggugcucca

SEQ ID NO: 1563921 - RNA, 15 nt, Human adenovirus D
gaccccauggaugag

SEQ ID NO: 1563922 - RNA, 15 nt, Human adenovirus D
acucgcggcugcugc

SEQ ID NO: 1563923 - RNA, 22 nt, Human adenovirus D
agcccgaggucaaggugcgccc

SEQ ID NO: 1563924 - RNA, 13 nt, Human adenovirus D
ccaggcccagaac

SEQ ID NO: 1563925 - RNA, 16 nt, Human adenovirus D
gcucgucuuccaggag

SEQ ID NO: 1563926 - RNA, 24 nt, Human adenovirus D
cacuagaaagcaguucacuagccu

SEQ ID NO: 1563927 - RNA, 18 nt, Human adenovirus D
agacgauccugcaggugg

SEQ ID NO: 1563928 - RNA, 21 nt, Human adenovirus D
cggcgaacuuucuccacaccu

SEQ ID NO: 1563929 - RNA, 20 nt, Human adenovirus D
augcaccugugggaccuggc

SEQ ID NO: 1563930 - RNA, 19 nt, Human adenovirus D
ggccagcgcuggguggccg

SEQ ID NO: 1563931 - RNA, 23 nt, Human adenovirus D
ugugcucuccgcaccgcuccugg

SEQ ID NO: 1563932 - RNA, 19 nt, Human adenovirus D
gcaggguaaagccagcagc

SEQ ID NO: 1563933 - RNA, 19 nt, Human adenovirus D
acggcaucuuccuggggca

SEQ ID NO: 1563934 - RNA, 19 nt, Human adenovirus D
ggccgagaagguggcggca

SEQ ID NO: 1563935 - RNA, 16 nt, Human adenovirus D
aggagaacugcuggcc

SEQ ID NO: 1563936 - RNA, 18 nt, Human adenovirus D
ccuccgguggcgaccgcc

SEQ ID NO: 1563937 - RNA, 20 nt, Human adenovirus D
ucgcagcgcugcacgggcug

SEQ ID NO: 1563938 - RNA, 21 nt, Human adenovirus D
ggcgcuagccagccacagcca

SEQ ID NO: 1563939 - RNA, 21 nt, Human adenovirus D
caacuuuaucagcgcgcugcg

SEQ ID NO: 1563940 - RNA, 19 nt, Human adenovirus D
cauccauggccaggggagu

SEQ ID NO: 1563941 - RNA, 17 nt, Human adenovirus D
ugcuagcccuuccugga

SEQ ID NO: 1563942 - RNA, 16 nt, Human adenovirus D
uuuacaugcacuggag

SEQ ID NO: 1563943 - RNA, 16 nt, Human adenovirus D
acgaccggcugcucac

SEQ ID NO: 1563944 - RNA, 13 nt, Human adenovirus D
ugacuacccacug

SEQ ID NO: 1563945 - RNA, 17 nt, Human adenovirus D
gcucccaccgcgccgcc

SEQ ID NO: 1563946 - RNA, 16 nt, Human adenovirus D
gcagggagcugcgcga

SEQ ID NO: 1563947 - RNA, 16 nt, Human adenovirus D
cagcaucagucuccug

SEQ ID NO: 1563948 - RNA, 16 nt, Human adenovirus D
uggcagccgagccggc

SEQ ID NO: 1563949 - RNA, 18 nt, Human adenovirus D
gcgcgucauggcugguca

SEQ ID NO: 1563950 - RNA, 20 nt, Human adenovirus D
auacaacucgugcgaggggc

SEQ ID NO: 1563951 - RNA, 13 nt, Human adenovirus D
cacacgcccuggg

SEQ ID NO: 1563952 - RNA, 13 nt, Human adenovirus D
cccggaggagggg

SEQ ID NO: 1563953 - RNA, 15 nt, Human adenovirus D
acuaggcccagcagc

SEQ ID NO: 1563954 - RNA, 17 nt, Human adenovirus D
cgccgauggccuccagc

SEQ ID NO: 1563955 - RNA, 22 nt, Human adenovirus D
cgugugcugugauacuguugca

SEQ ID NO: 1563956 - RNA, 13 nt, Human adenovirus D
cagcaccccgucc

SEQ ID NO: 1563957 - RNA, 22 nt, Human adenovirus D
uuacaccgcgucgcugaaagca

SEQ ID NO: 1563958 - RNA, 23 nt, Human adenovirus D
gggacccugagaacggggugcag

SEQ ID NO: 1563959 - RNA, 18 nt, Human adenovirus D
ggacgagaaccugaagga

SEQ ID NO: 1563960 - RNA, 14 nt, Human adenovirus D
cucggggcauugca

SEQ ID NO: 1563961 - RNA, 17 nt, Human adenovirus D
gagaacggggugcaguc

SEQ ID NO: 1563962 - RNA, 19 nt, Human adenovirus D
aacccgccugccaggaugg

SEQ ID NO: 1563963 - RNA, 17 nt, Human adenovirus D
agaaggguuaacauuug

SEQ ID NO: 1563964 - RNA, 20 nt, Human adenovirus D
cgccagccgcaggcgcccag

SEQ ID NO: 1563965 - RNA, 14 nt, Human adenovirus D
gcccugacccagca

SEQ ID NO: 1563966 - RNA, 16 nt, Human adenovirus D
gcgcaucuacaagaga

SEQ ID NO: 1563967 - RNA, 20 nt, Human adenovirus D
ggaaacuaggcgcagcugcg

SEQ ID NO: 1563968 - RNA, 19 nt, Human adenovirus D
ucauguuggggaugaugga

SEQ ID NO: 1563969 - RNA, 17 nt, Human adenovirus D
gcgagaggagcucuugc

SEQ ID NO: 1563970 - RNA, 22 nt, Human adenovirus D
cgcgaggagguggcccugggcc

SEQ ID NO: 1563971 - RNA, 17 nt, Human adenovirus D
ccggggaggcaccaccu

SEQ ID NO: 1563972 - RNA, 16 nt, Human adenovirus D
aaagccagcagcacau

SEQ ID NO: 1563973 - RNA, 17 nt, Human adenovirus D
gcccugcuauggcucau

SEQ ID NO: 1563974 - RNA, 20 nt, Human adenovirus D
caucgcggggugaacauccc

SEQ ID NO: 1563975 - RNA, 17 nt, Human adenovirus D
gcccugcucaccugcac

SEQ ID NO: 1563976 - RNA, 16 nt, Human adenovirus D
guaauuggaacugaug

SEQ ID NO: 1563977 - RNA, 13 nt, Human adenovirus D
gcucgggcugcuc

SEQ ID NO: 1563978 - RNA, 14 nt, Human adenovirus D
cgcccagcaugucc

SEQ ID NO: 1563979 - RNA, 23 nt, Human adenovirus D
cuggacuucgcagccaugcaccu

SEQ ID NO: 1563980 - RNA, 13 nt, Human adenovirus D
uccccgcgccgcg

SEQ ID NO: 1563981 - RNA, 15 nt, Human adenovirus D
caugagccagagcau

SEQ ID NO: 1563982 - RNA, 15 nt, Human adenovirus D
cgccggggcucggug

SEQ ID NO: 1563983 - RNA, 18 nt, Human adenovirus D
cccugcuggccgagcugg

SEQ ID NO: 1563984 - RNA, 22 nt, Human adenovirus D
cacuccuaaaaccggaggugag

SEQ ID NO: 1563985 - RNA, 17 nt, Human adenovirus D
ccagggcuuccacgugc

SEQ ID NO: 1563986 - RNA, 16 nt, Human adenovirus D
ggcgcgagcugagcga

SEQ ID NO: 1563987 - RNA, 20 nt, Human adenovirus D
cguaccugggucaccugcua

SEQ ID NO: 1563988 - RNA, 13 nt, Human adenovirus D
aggcaaugagagg

SEQ ID NO: 1563989 - RNA, 12 nt, Human adenovirus D
augagggucugg

SEQ ID NO: 1563990 - RNA, 19 nt, Human adenovirus D
gcucccacagugcccccuc

SEQ ID NO: 1563991 - RNA, 22 nt, Human adenovirus D
aggccggggccgaaauuggugc

SEQ ID NO: 1563992 - RNA, 16 nt, Human adenovirus D
auuacuauuacugcca

SEQ ID NO: 1563993 - RNA, 16 nt, Human adenovirus D
ggagccagaacaccca

SEQ ID NO: 1563994 - RNA, 21 nt, Human adenovirus D
ucuacgcguacauccagcaua

SEQ ID NO: 1563995 - RNA, 20 nt, Human adenovirus D
ugcggccuugcggagcgagg

SEQ ID NO: 1563996 - RNA, 14 nt, Human adenovirus D
gcaagcgcccagag

SEQ ID NO: 1563997 - RNA, 19 nt, Human adenovirus D
gcaagaugauaccaagaga

SEQ ID NO: 1563998 - RNA, 11 nt, Human adenovirus D
aaaauaugcaa

SEQ ID NO: 1563999 - RNA, 14 nt, Human adenovirus D
ccuggaccaggcgg

SEQ ID NO: 1564000 - RNA, 21 nt, Human adenovirus D
auccuuuuguagagggaaccu

SEQ ID NO: 1564001 - RNA, 23 nt, Human adenovirus D
ugcccgagggcuacaaggaccgc

SEQ ID NO: 1564002 - RNA, 17 nt, Human adenovirus D
aaacuaggcgcagcugc

SEQ ID NO: 1564003 - RNA, 22 nt, Human adenovirus D
augugcaguuuggccuggaucu

SEQ ID NO: 1564004 - RNA, 21 nt, Human adenovirus D
acgaccacagcaacuuccuga

SEQ ID NO: 1564005 - RNA, 13 nt, Human adenovirus D
caccggcuggggu

SEQ ID NO: 1564006 - RNA, 23 nt, Human adenovirus D
cugguggaaacagacagccaggu

SEQ ID NO: 1564007 - RNA, 16 nt, Human adenovirus D
cuaucauucagagggg

SEQ ID NO: 1564008 - RNA, 13 nt, Human adenovirus D
ugcaaugucaggu

SEQ ID NO: 1564009 - RNA, 22 nt, Human adenovirus D
caucgcgaaccaggcagugcag

SEQ ID NO: 1564010 - RNA, 14 nt, Human adenovirus D
ugccgcagugggcg

SEQ ID NO: 1564011 - RNA, 23 nt, Human adenovirus D
ggcgugcgcgugcccgugcgcac

SEQ ID NO: 1564012 - RNA, 23 nt, Human adenovirus D
gcucucacuugccgccugcgcau

SEQ ID NO: 1564013 - RNA, 14 nt, Human adenovirus D
uucagggugcucca

SEQ ID NO: 1564014 - RNA, 16 nt, Human adenovirus D
ggcgcgccuuggaggc

SEQ ID NO: 1564015 - RNA, 17 nt, Human adenovirus D
aagccucugacggcgca

SEQ ID NO: 1564016 - RNA, 13 nt, Human adenovirus D
caggaggcacaga

SEQ ID NO: 1564017 - RNA, 19 nt, Human adenovirus D
ccggcgaacgugccgcgcg

SEQ ID NO: 1564018 - RNA, 14 nt, Human adenovirus D
acugcuaccucuug

SEQ ID NO: 1564019 - RNA, 19 nt, Human adenovirus D
uggccuguccugcaggggc

SEQ ID NO: 1564020 - RNA, 13 nt, Human adenovirus D
guacuucugccag

SEQ ID NO: 1564021 - RNA, 17 nt, Human adenovirus D
gcccgccauggggcgcc

SEQ ID NO: 1564022 - RNA, 17 nt, Human adenovirus D
agccguacaccaggccu

SEQ ID NO: 1564023 - RNA, 21 nt, Human adenovirus D
gacgggagcaauccuccagga

SEQ ID NO: 1564024 - RNA, 21 nt, Human adenovirus D
cagcaacuaccccguggucgg

SEQ ID NO: 1564025 - RNA, 14 nt, Human adenovirus D
ggugucccugacca

SEQ ID NO: 1564026 - RNA, 17 nt, Human adenovirus D
cuuguagggacagcagc

SEQ ID NO: 1564027 - RNA, 22 nt, Human adenovirus D
ucaacaucacauucaaaaaccg

SEQ ID NO: 1564028 - RNA, 15 nt, Human adenovirus D
ucccaggucauacaa

SEQ ID NO: 1564029 - RNA, 17 nt, Human adenovirus D
ggucugcuccugcacuu

SEQ ID NO: 1564030 - RNA, 17 nt, Human adenovirus D
augccaucaacauccac

SEQ ID NO: 1564031 - RNA, 23 nt, Human adenovirus D
gccgccggcggcgggccaugcgc

SEQ ID NO: 1564032 - RNA, 20 nt, Human adenovirus D
accaaggcacccaccacagu

SEQ ID NO: 1564033 - RNA, 13 nt, Human adenovirus D
acuguaaagccac

SEQ ID NO: 1564034 - RNA, 12 nt, Human adenovirus D
cggaaaacagga

SEQ ID NO: 1564035 - RNA, 15 nt, Human adenovirus D
cgacagucugagggc

SEQ ID NO: 1564036 - RNA, 17 nt, Human adenovirus D
cauguuauucagcagcc

SEQ ID NO: 1564037 - RNA, 19 nt, Human adenovirus D
ucgagccgaacgagcagac

SEQ ID NO: 1564038 - RNA, 20 nt, Human adenovirus D
ccgaggagaacugcuggccc

SEQ ID NO: 1564039 - RNA, 18 nt, Human adenovirus D
cgggaccggggaggcacc

SEQ ID NO: 1564040 - RNA, 17 nt, Human adenovirus D
aguuggcgacccaggaa

SEQ ID NO: 1564041 - RNA, 11 nt, Human adenovirus D
cggcaccugcg

SEQ ID NO: 1564042 - RNA, 19 nt, Human adenovirus D
gaggagcggucuggacccu

SEQ ID NO: 1564043 - RNA, 16 nt, Human adenovirus D
aaccggaggcuggcug

SEQ ID NO: 1564044 - RNA, 15 nt, Human adenovirus D
gcugaaacaccugca

SEQ ID NO: 1564045 - RNA, 19 nt, Human adenovirus D
uagacaaagagcacagcag

SEQ ID NO: 1564046 - RNA, 20 nt, Human adenovirus D
caugccuucgugcacuggcc

SEQ ID NO: 1564047 - RNA, 13 nt, Human adenovirus D
cugcgccgggcgc

SEQ ID NO: 1564048 - RNA, 22 nt, Human adenovirus D
cuuugacacaccuggaggcacc

SEQ ID NO: 1564049 - RNA, 12 nt, Human adenovirus D
ggccaugcugcg

SEQ ID NO: 1564050 - RNA, 14 nt, Human adenovirus D
cccugacccagcag

SEQ ID NO: 1564051 - RNA, 15 nt, Human adenovirus D
uggaccggcugguga

SEQ ID NO: 1564052 - RNA, 16 nt, Human adenovirus D
gaagauggggccccgc

SEQ ID NO: 1564053 - RNA, 24 nt, Human adenovirus D
gccagcccaacggcaccugcgagc

SEQ ID NO: 1564054 - RNA, 13 nt, Human adenovirus D
uaccucucggccg

SEQ ID NO: 1564055 - RNA, 15 nt, Human adenovirus D
gcgaagauggccacc

SEQ ID NO: 1564056 - RNA, 15 nt, Human adenovirus D
aaucgcggcggccau

SEQ ID NO: 1564057 - RNA, 17 nt, Human adenovirus D
ggacaucgcgaaccagg

SEQ ID NO: 1564058 - RNA, 15 nt, Human adenovirus D
gcccuugcgcgagca

SEQ ID NO: 1564059 - RNA, 19 nt, Human adenovirus D
guuugaguagugggcgugg

SEQ ID NO: 1564060 - RNA, 15 nt, Human adenovirus D
ucagucuccuggugc

SEQ ID NO: 1564061 - RNA, 15 nt, Human adenovirus D
cauccaaggccaucu

SEQ ID NO: 1564062 - RNA, 13 nt, Human adenovirus D
cgccuccacccug

SEQ ID NO: 1564063 - RNA, 17 nt, Human adenovirus D
uuaaaaagcagcacagu

SEQ ID NO: 1564064 - RNA, 18 nt, Human adenovirus D
gaccgugccgcggugcgc

SEQ ID NO: 1564065 - RNA, 18 nt, Human adenovirus D
uacgccaacucggcccac

SEQ ID NO: 1564066 - RNA, 15 nt, Human adenovirus D
cggacugccaccgcc

SEQ ID NO: 1564067 - RNA, 20 nt, Human adenovirus D
gauauugcuucccuggaaga

SEQ ID NO: 1564068 - RNA, 20 nt, Human adenovirus D
gaaagggcccgggacggagg

SEQ ID NO: 1564069 - RNA, 17 nt, Human adenovirus D
gacccaugagcugcgag

SEQ ID NO: 1564070 - RNA, 14 nt, Human adenovirus D
agccagcagcacau

SEQ ID NO: 1564071 - RNA, 23 nt, Human adenovirus D
uggccggcgcgcccggggccagg

SEQ ID NO: 1564072 - RNA, 15 nt, Human adenovirus D
uugaaaccacuuccu

SEQ ID NO: 1564073 - RNA, 17 nt, Human adenovirus D
cacaggaugaacaggag

SEQ ID NO: 1564074 - RNA, 22 nt, Human adenovirus D
agugcuuacucuauaacauuug

SEQ ID NO: 1564075 - RNA, 17 nt, Human adenovirus D
aacugaaccgcuggaag

SEQ ID NO: 1564076 - RNA, 14 nt, Human adenovirus D
gagugggauaaaga

SEQ ID NO: 1564077 - RNA, 16 nt, Human adenovirus D
gauggacuuggaagag

SEQ ID NO: 1564078 - RNA, 14 nt, Human adenovirus D
gcgaccugggcugc

SEQ ID NO: 1564079 - RNA, 13 nt, Human adenovirus D
cauaucagccagu

SEQ ID NO: 1564080 - RNA, 15 nt, Human adenovirus D
uggauguggagcccg

SEQ ID NO: 1564081 - RNA, 15 nt, Human adenovirus D
gauaaauauggccug

SEQ ID NO: 1564082 - RNA, 18 nt, Human adenovirus D
acgcuguaccgcagcugg

SEQ ID NO: 1564083 - RNA, 20 nt, Human adenovirus D
uaaacuaaagccaaacacac

SEQ ID NO: 1564084 - RNA, 23 nt, Human adenovirus D
acggggaucagccccgcgcgcgc

SEQ ID NO: 1564085 - RNA, 19 nt, Human adenovirus D
aggcgcgcuucacucuggc

SEQ ID NO: 1564086 - RNA, 12 nt, Human adenovirus D
ucuacaaggccc

SEQ ID NO: 1564087 - RNA, 21 nt, Human adenovirus D
cccggacguggugcugcugcc

SEQ ID NO: 1564088 - RNA, 18 nt, Human adenovirus D
ccuccaggacuaucuaug

SEQ ID NO: 1564089 - RNA, 22 nt, Human adenovirus D
agcagguggcgccgggccuggg

SEQ ID NO: 1564090 - RNA, 12 nt, Human adenovirus D
gggcgguggugg

SEQ ID NO: 1564091 - RNA, 19 nt, Human adenovirus D
agccgccugagcaaccucc

SEQ ID NO: 1564092 - RNA, 13 nt, Human adenovirus D
gagggucugcgag

SEQ ID NO: 1564093 - RNA, 12 nt, Human adenovirus D
ggcaaaggagcc

SEQ ID NO: 1564094 - RNA, 19 nt, Human adenovirus D
ggcaaagcucaacccgcgu

SEQ ID NO: 1564095 - RNA, 18 nt, Human adenovirus D
cuguggucgacuugcaag

SEQ ID NO: 1564096 - RNA, 17 nt, Human adenovirus D
augccuucuccagggug

SEQ ID NO: 1564097 - RNA, 20 nt, Human adenovirus D
cugcagguggacgagccgcc

SEQ ID NO: 1564098 - RNA, 16 nt, Human adenovirus D
ccucccccgcaagcga

SEQ ID NO: 1564099 - RNA, 17 nt, Human adenovirus D
cuaccacgcccaugaga

SEQ ID NO: 1564100 - RNA, 15 nt, Human adenovirus D
agucugccgcccuug

SEQ ID NO: 1564101 - RNA, 13 nt, Human adenovirus D
gaccgcagcgggg

SEQ ID NO: 1564102 - RNA, 13 nt, Human adenovirus D
cagcccagggcgc

SEQ ID NO: 1564103 - RNA, 10 nt, Human adenovirus D
gucugccccc

SEQ ID NO: 1564104 - RNA, 21 nt, Human adenovirus D
ggccaucgugcagaacccgga

SEQ ID NO: 1564105 - RNA, 14 nt, Human adenovirus D
gacaacagccgcag

SEQ ID NO: 1564106 - RNA, 13 nt, Human adenovirus D
gcaugagcggcuc

SEQ ID NO: 1564107 - RNA, 13 nt, Human adenovirus D
gcagcggggccug

SEQ ID NO: 1564108 - RNA, 16 nt, Human adenovirus D
aauucucauuuuucca

SEQ ID NO: 1564109 - RNA, 20 nt, Human adenovirus D
ugagcagcuugcgcgcuggc

SEQ ID NO: 1564110 - RNA, 19 nt, Human adenovirus D
uccagcagcaggguaccca

SEQ ID NO: 1564111 - RNA, 17 nt, Human adenovirus D
agcggccgaaaaccccg

SEQ ID NO: 1564112 - RNA, 22 nt, Human adenovirus D
aagaagggcaucuucugccugg

SEQ ID NO: 1564113 - RNA, 16 nt, Human adenovirus D
aggcauggcaggcagc

SEQ ID NO: 1564114 - RNA, 16 nt, Human adenovirus D
acagcaccgccgcagc

SEQ ID NO: 1564115 - RNA, 21 nt, Human adenovirus D
ggcgccgcccgagcucugcug

SEQ ID NO: 1564116 - RNA, 18 nt, Human adenovirus D
gccucugacggcgcagcu

SEQ ID NO: 1564117 - RNA, 13 nt, Human adenovirus D
uugaauugcaaau

SEQ ID NO: 1564118 - RNA, 17 nt, Human adenovirus D
gcugaccaacuggucuc

SEQ ID NO: 1564119 - RNA, 20 nt, Human adenovirus D
aguccuguaaauaagucacu

SEQ ID NO: 1564120 - RNA, 20 nt, Human adenovirus D
gauggaacucuguugaggca

SEQ ID NO: 1564121 - RNA, 14 nt, Human adenovirus D
gggcgggcagggag

SEQ ID NO: 1564122 - RNA, 22 nt, Human adenovirus D
gcacccgguacuacgccagccg

SEQ ID NO: 1564123 - RNA, 14 nt, Human adenovirus D
agugaccgucacug

SEQ ID NO: 1564124 - RNA, 17 nt, Human adenovirus D
gcuagacauggccagca

SEQ ID NO: 1564125 - RNA, 18 nt, Human adenovirus D
gcagcccuucuccacggg

SEQ ID NO: 1564126 - RNA, 18 nt, Human adenovirus D
acugccgccgccugcgcu

SEQ ID NO: 1564127 - RNA, 22 nt, Human adenovirus D
gcgcgagcagaacgggggcagc

SEQ ID NO: 1564128 - RNA, 16 nt, Human adenovirus D
guacuucagccugggc

SEQ ID NO: 1564129 - RNA, 12 nt, Human adenovirus D
acuaaucauuua

SEQ ID NO: 1564130 - RNA, 19 nt, Human adenovirus D
cgugagcgcgagccggcgg

SEQ ID NO: 1564131 - RNA, 14 nt, Human adenovirus D
cgaccccuggcucc

SEQ ID NO: 1564132 - RNA, 16 nt, Human adenovirus D
caaaugcgagcauaca

SEQ ID NO: 1564133 - RNA, 17 nt, Human adenovirus D
acucgcggcugcugcug

SEQ ID NO: 1564134 - RNA, 15 nt, Human adenovirus D
cagcgccacgaccgg

SEQ ID NO: 1564135 - RNA, 17 nt, Human adenovirus D
uaaauauggccuggagc

SEQ ID NO: 1564136 - RNA, 21 nt, Human adenovirus D
acugcuaucaggagaaaauug

SEQ ID NO: 1564137 - RNA, 15 nt, Human adenovirus D
ccgcugcgcagcagu

SEQ ID NO: 1564138 - RNA, 15 nt, Human adenovirus D
ucucgauccagcaga

SEQ ID NO: 1564139 - RNA, 16 nt, Human adenovirus D
accagauacuucagca

SEQ ID NO: 1564140 - RNA, 16 nt, Human adenovirus D
cggugggucggagccc

SEQ ID NO: 1564141 - RNA, 16 nt, Human adenovirus D
caugauccagcggcgc

SEQ ID NO: 1564142 - RNA, 15 nt, Human adenovirus D
ucgcggcugcugcug

SEQ ID NO: 1564143 - RNA, 14 nt, Human adenovirus D
ggcgggggcggaga

SEQ ID NO: 1564144 - RNA, 21 nt, Human adenovirus D
ccagucccuuuuccaggaaag

SEQ ID NO: 1564145 - RNA, 12 nt, Human adenovirus D
gaccaugagcuc

SEQ ID NO: 1564146 - RNA, 17 nt, Human adenovirus D
cugcuguaaagccagaa

SEQ ID NO: 1564147 - RNA, 17 nt, Human adenovirus D
gcuauaauaagcagagu

SEQ ID NO: 1564148 - RNA, 19 nt, Human adenovirus D
caguauaucaggugccugc

SEQ ID NO: 1564149 - RNA, 17 nt, Human adenovirus D
cguucuacccagcaagu

SEQ ID NO: 1564150 - RNA, 22 nt, Human adenovirus D
gagucugaaaaacagaaagcau

SEQ ID NO: 1564151 - RNA, 20 nt, Human adenovirus D
gcauguacaacaugcugacu

SEQ ID NO: 1564152 - RNA, 17 nt, Human adenovirus D
cccacaggaugaacagg

SEQ ID NO: 1564153 - RNA, 16 nt, Human adenovirus D
aguaggaaccagcaca

SEQ ID NO: 1564154 - RNA, 21 nt, Human adenovirus D
gccaagacaaaggaggccacg

SEQ ID NO: 1564155 - RNA, 22 nt, Human adenovirus D
gccagacgcacgggccgccggg

SEQ ID NO: 1564156 - RNA, 16 nt, Human adenovirus D
caaccggcugaugccc

SEQ ID NO: 1564157 - RNA, 18 nt, Human adenovirus D
agagcgugauggcgcagg

SEQ ID NO: 1564158 - RNA, 13 nt, Human adenovirus D
accaccccaggcg

SEQ ID NO: 1564159 - RNA, 22 nt, Human adenovirus D
gugaucccacagggcacugccg

SEQ ID NO: 1564160 - RNA, 17 nt, Human adenovirus D
gaugaggauugggagga

SEQ ID NO: 1564161 - RNA, 17 nt, Human adenovirus D
ggcgcuuggugggcaga

SEQ ID NO: 1564162 - RNA, 14 nt, Human adenovirus D
gccgagcccgaggg

SEQ ID NO: 1564163 - RNA, 18 nt, Human adenovirus D
ugcgcgagguugagcucc

SEQ ID NO: 1564164 - RNA, 13 nt, Human adenovirus D
agccgccagcugg

SEQ ID NO: 1564165 - RNA, 15 nt, Human adenovirus D
cugacgcugagcgac

SEQ ID NO: 1564166 - RNA, 16 nt, Human adenovirus D
caaaaaaaacaaucag

SEQ ID NO: 1564167 - RNA, 20 nt, Human adenovirus D
cugacugccgccggccauug

SEQ ID NO: 1564168 - RNA, 16 nt, Human adenovirus D
ccacauccaagugccc

SEQ ID NO: 1564169 - RNA, 20 nt, Human adenovirus D
cgcagguggacgagcagacc

SEQ ID NO: 1564170 - RNA, 17 nt, Human adenovirus D
caacaucugugcugccu

SEQ ID NO: 1564171 - RNA, 18 nt, Human adenovirus D
ucacggcaucuuccuggg

SEQ ID NO: 1564172 - RNA, 20 nt, Human adenovirus D
cuggcgguagagcggccagc

SEQ ID NO: 1564173 - RNA, 20 nt, Human adenovirus D
aggugcgccccaucaagcag

SEQ ID NO: 1564174 - RNA, 13 nt, Human adenovirus D
uaagagcccagca

SEQ ID NO: 1564175 - RNA, 21 nt, Human adenovirus D
gaggcauuggagaaugcugcu

SEQ ID NO: 1564176 - RNA, 18 nt, Human adenovirus D
ucaccuuccugcagcuca

SEQ ID NO: 1564177 - RNA, 14 nt, Human adenovirus D
ucuuuaucugcugg

SEQ ID NO: 1564178 - RNA, 14 nt, Human adenovirus D
cacaggcacacuga

SEQ ID NO: 1564179 - RNA, 17 nt, Human adenovirus D
cuuggucacaugcuugg

SEQ ID NO: 1564180 - RNA, 21 nt, Human adenovirus D
cgacgacauccuggaccaggc

SEQ ID NO: 1564181 - RNA, 18 nt, Human adenovirus D
uccaacggcaaacagcau

SEQ ID NO: 1564182 - RNA, 13 nt, Human adenovirus D
cagaggagggauu

SEQ ID NO: 1564183 - RNA, 17 nt, Human adenovirus D
cggccaugccccaggcc

SEQ ID NO: 1564184 - RNA, 17 nt, Human adenovirus D
ccguucuccgccggaaa

SEQ ID NO: 1564185 - RNA, 16 nt, Human adenovirus D
caaccaugugcgcacc

SEQ ID NO: 1564186 - RNA, 13 nt, Human adenovirus D
cugggaggcugcg

SEQ ID NO: 1564187 - RNA, 17 nt, Human adenovirus D
cgcaacuuccagcccau

SEQ ID NO: 1564188 - RNA, 19 nt, Human adenovirus D
ucuucaacaucugugcugc

SEQ ID NO: 1564189 - RNA, 17 nt, Human adenovirus D
acgucggcguggcgcuc

SEQ ID NO: 1564190 - RNA, 13 nt, Human adenovirus D
augcuccaaagcu

SEQ ID NO: 1564191 - RNA, 16 nt, Human adenovirus D
ugccagacgcaagagc

SEQ ID NO: 1564192 - RNA, 16 nt, Human adenovirus D
gacaaacaaaagccau

SEQ ID NO: 1564193 - RNA, 22 nt, Human adenovirus D
gcccgacuucaugagccagagc

SEQ ID NO: 1564194 - RNA, 22 nt, Human adenovirus D
gggcucuuccuccguagccugg

SEQ ID NO: 1564195 - RNA, 12 nt, Human adenovirus D
aacuuaacucug

SEQ ID NO: 1564196 - RNA, 13 nt, Human adenovirus D
guccgggggcagg

SEQ ID NO: 1564197 - RNA, 19 nt, Human adenovirus D
ugcagaacccggacagcaa

SEQ ID NO: 1564198 - RNA, 17 nt, Human adenovirus D
acaguaagugcagcaca

SEQ ID NO: 1564199 - RNA, 15 nt, Human adenovirus D
ccgcccgacacugca

SEQ ID NO: 1564200 - RNA, 18 nt, Human adenovirus D
agugcaacuuuagccaga

SEQ ID NO: 1564201 - RNA, 16 nt, Human adenovirus D
uaaggagaaggauuca

SEQ ID NO: 1564202 - RNA, 19 nt, Human adenovirus D
gucugcucgggcaugagcu

SEQ ID NO: 1564203 - RNA, 11 nt, Human adenovirus D
ccucagccacu

SEQ ID NO: 1564204 - RNA, 15 nt, Human adenovirus D
ugcuggcccugcugg

SEQ ID NO: 1564205 - RNA, 23 nt, Human adenovirus D
auucuggaaauuaugagcaucaa

SEQ ID NO: 1564206 - RNA, 19 nt, Human adenovirus D
cuuuguaacucuaaucauu

SEQ ID NO: 1564207 - RNA, 17 nt, Human adenovirus D
cagauggaaaggucacu

SEQ ID NO: 1564208 - RNA, 20 nt, Human adenovirus D
cgaggccgucuaccugcgca

SEQ ID NO: 1564209 - RNA, 13 nt, Human adenovirus D
cugccgcugcaac

SEQ ID NO: 1564210 - RNA, 17 nt, Human adenovirus D
ggaccuggcggaggcca

SEQ ID NO: 1564211 - RNA, 16 nt, Human adenovirus D
ggugaagcaggagcgc

SEQ ID NO: 1564212 - RNA, 16 nt, Human adenovirus D
acuauaaagucacagu

SEQ ID NO: 1564213 - RNA, 17 nt, Human adenovirus D
cgggcgggcagggagcu

SEQ ID NO: 1564214 - RNA, 10 nt, Human adenovirus D
acccagcagg

SEQ ID NO: 1564215 - RNA, 14 nt, Human adenovirus D
cuugggcugccacu

SEQ ID NO: 1564216 - RNA, 16 nt, Human adenovirus D
cgaggagcugagacca

SEQ ID NO: 1564217 - RNA, 15 nt, Human adenovirus D
cgguauauggcuccu

SEQ ID NO: 1564218 - RNA, 22 nt, Human adenovirus D
aguacaagcgccaacagcagcg

SEQ ID NO: 1564219 - RNA, 14 nt, Human adenovirus D
ggaacggggcagag

SEQ ID NO: 1564220 - RNA, 21 nt, Human adenovirus D
accugaacgacucgcugcugc

SEQ ID NO: 1564221 - RNA, 22 nt, Human adenovirus D
agaacaaaaacagacuggucaa

SEQ ID NO: 1564222 - RNA, 12 nt, Human adenovirus D
gaggacggagag

SEQ ID NO: 1564223 - RNA, 14 nt, Human adenovirus D
cugcccaccgugcg

SEQ ID NO: 1564224 - RNA, 17 nt, Human adenovirus D
gcagaggcacacagcuc

SEQ ID NO: 1564225 - RNA, 23 nt, Human adenovirus D
acucgcagacgagcggccgccgc

SEQ ID NO: 1564226 - RNA, 16 nt, Human adenovirus D
acccacucuauuuuca

SEQ ID NO: 1564227 - RNA, 19 nt, Human adenovirus D
gcgcgaucccgcuguggcu

SEQ ID NO: 1564228 - RNA, 23 nt, Human adenovirus D
ccaucaagcagguggcgccgggc

SEQ ID NO: 1564229 - RNA, 17 nt, Human adenovirus D
ucccaacagccuucagc

SEQ ID NO: 1564230 - RNA, 22 nt, Human adenovirus D
ugcaggauaaauauggccugga

SEQ ID NO: 1564231 - RNA, 15 nt, Human adenovirus D
ccgcgcuugcugggc

SEQ ID NO: 1564232 - RNA, 21 nt, Human adenovirus D
cgggugcuagacauggccagc

SEQ ID NO: 1564233 - RNA, 15 nt, Human adenovirus D
ccugccgcgccaacc

SEQ ID NO: 1564234 - RNA, 15 nt, Human adenovirus D
uugcccuuacaugua

SEQ ID NO: 1564235 - RNA, 14 nt, Human adenovirus D
uggggcuccucgag

SEQ ID NO: 1564236 - RNA, 13 nt, Human adenovirus D
ccgccggcggcga

SEQ ID NO: 1564237 - RNA, 21 nt, Human adenovirus D
cacucccgucucgacccgagc

SEQ ID NO: 1564238 - RNA, 13 nt, Human adenovirus D
uguugcagagaga

SEQ ID NO: 1564239 - RNA, 15 nt, Human adenovirus D
guguugcggcccggc

SEQ ID NO: 1564240 - RNA, 15 nt, Human adenovirus D
guggcgccgggccug

SEQ ID NO: 1564241 - RNA, 21 nt, Human adenovirus D
cgggugaccccgacgccccug

SEQ ID NO: 1564242 - RNA, 17 nt, Human adenovirus D
ccaugcgaauuccccuc

SEQ ID NO: 1564243 - RNA, 15 nt, Human adenovirus D
cgggugagggcgugc

SEQ ID NO: 1564244 - RNA, 15 nt, Human adenovirus D
aguggaagagaugga

SEQ ID NO: 1564245 - RNA, 13 nt, Human adenovirus D
gcugcuggagcug

SEQ ID NO: 1564246 - RNA, 16 nt, Human adenovirus D
gcucugcugcgccgcg

SEQ ID NO: 1564247 - RNA, 12 nt, Human adenovirus D
aaauuugcaaaa

SEQ ID NO: 1564248 - RNA, 18 nt, Human adenovirus D
gaccgccggcucaagcag

SEQ ID NO: 1564249 - RNA, 18 nt, Human adenovirus D
gccguccuuucgcugcug

SEQ ID NO: 1564250 - RNA, 17 nt, Human adenovirus D
cacggucuucgcccugc

SEQ ID NO: 1564251 - RNA, 22 nt, Human adenovirus D
augccgaagaagaacaggagcc

SEQ ID NO: 1564252 - RNA, 19 nt, Human adenovirus D
aggcgggaauuaccucauc

SEQ ID NO: 1564253 - RNA, 19 nt, Human adenovirus D
guucauggccaacagccac

SEQ ID NO: 1564254 - RNA, 19 nt, Human adenovirus D
gucuggugcaguuugcccg

SEQ ID NO: 1564255 - RNA, 15 nt, Human adenovirus D
cggccagcagggugc

SEQ ID NO: 1564256 - RNA, 23 nt, Human adenovirus D
cgcgcaucaucgcgccacuggcc

SEQ ID NO: 1564257 - RNA, 18 nt, Human adenovirus D
ggaagaaaugaggcaggc

SEQ ID NO: 1564258 - RNA, 15 nt, Human adenovirus D
caaugucagcugcaa

SEQ ID NO: 1564259 - RNA, 13 nt, Human adenovirus D
gcagugggcgcag

SEQ ID NO: 1564260 - RNA, 15 nt, Human adenovirus D
uggauugcaauuuug

SEQ ID NO: 1564261 - RNA, 22 nt, Human adenovirus D
auaauucagggugcuccagcca

SEQ ID NO: 1564262 - RNA, 15 nt, Human adenovirus D
gccuguacccagagc

SEQ ID NO: 1564263 - RNA, 14 nt, Human adenovirus D
gcgggagcgguggg

SEQ ID NO: 1564264 - RNA, 15 nt, Human adenovirus D
augaaagucaggagc

SEQ ID NO: 1564265 - RNA, 18 nt, Human adenovirus D
ccugggcgugcagaccgu

SEQ ID NO: 1564266 - RNA, 22 nt, Human adenovirus D
gcggguccccguugggcagcga

SEQ ID NO: 1564267 - RNA, 13 nt, Human adenovirus D
uugcagagcagcu

SEQ ID NO: 1564268 - RNA, 19 nt, Human adenovirus D
cccugcaagugcacagacc

SEQ ID NO: 1564269 - RNA, 12 nt, Human adenovirus D
ggaggagcagcc

SEQ ID NO: 1564270 - RNA, 15 nt, Human adenovirus D
ugcaucccguccugc

SEQ ID NO: 1564271 - RNA, 20 nt, Human adenovirus D
cgagcagaacgggggcagca

SEQ ID NO: 1564272 - RNA, 18 nt, Human adenovirus D
acggccuggccucgggca

SEQ ID NO: 1564273 - RNA, 16 nt, Human adenovirus D
cggccgaaaaccccgc

SEQ ID NO: 1564274 - RNA, 19 nt, Human adenovirus D
agugcaguuggccaugagc

SEQ ID NO: 1564275 - RNA, 14 nt, Human adenovirus D
aaggaugaggugga

SEQ ID NO: 1564276 - RNA, 15 nt, Human adenovirus D
ccgugguccugguca

SEQ ID NO: 1564277 - RNA, 18 nt, Human adenovirus D
agcagagucugccgcccu

SEQ ID NO: 1564278 - RNA, 17 nt, Human adenovirus D
gaccagaacuuccagca

SEQ ID NO: 1564279 - RNA, 16 nt, Human adenovirus D
gaccaauagacagcag

SEQ ID NO: 1564280 - RNA, 14 nt, Human adenovirus D
caucauggcccuga

SEQ ID NO: 1564281 - RNA, 20 nt, Human adenovirus D
acagaacaaaaacagacugg

SEQ ID NO: 1564282 - RNA, 16 nt, Human adenovirus D
gaagaagaacaggagc

SEQ ID NO: 1564283 - RNA, 16 nt, Human adenovirus D
cccuccgcccugagcu

SEQ ID NO: 1564284 - RNA, 18 nt, Human adenovirus D
gguagggggcgccgccgg

SEQ ID NO: 1564285 - RNA, 17 nt, Human adenovirus D
cggccugaaccgccgcc

SEQ ID NO: 1564286 - RNA, 20 nt, Human adenovirus D
ggcguucagggaggcgcugc

SEQ ID NO: 1564287 - RNA, 21 nt, Human adenovirus D
agucacuaggaccccagggac

SEQ ID NO: 1564288 - RNA, 21 nt, Human adenovirus D
ccugggagucucuaccgaggg

SEQ ID NO: 1564289 - RNA, 22 nt, Human adenovirus D
cagagauggacuuggaagaggg

SEQ ID NO: 1564290 - RNA, 15 nt, Human adenovirus D
gguacccuccuccca

SEQ ID NO: 1564291 - RNA, 14 nt, Human adenovirus D
uguuuauaaaucuu

SEQ ID NO: 1564292 - RNA, 23 nt, Human adenovirus D
cgcggacgcgcucccggcggcag

SEQ ID NO: 1564293 - RNA, 14 nt, Human adenovirus D
cgagcacagcaccg

SEQ ID NO: 1564294 - RNA, 23 nt, Human adenovirus D
acuggagcacagaccuucaggga

SEQ ID NO: 1564295 - RNA, 22 nt, Human adenovirus D
ccaggcccagaacuggcagagc

SEQ ID NO: 1564296 - RNA, 15 nt, Human adenovirus D
ccccagacacccacg

SEQ ID NO: 1564297 - RNA, 14 nt, Human adenovirus D
ggcugcuucugccu

SEQ ID NO: 1564298 - RNA, 16 nt, Human adenovirus D
ucugcucauacugcua

SEQ ID NO: 1564299 - RNA, 15 nt, Human adenovirus D
ccucacucucuuccg

SEQ ID NO: 1564300 - RNA, 22 nt, Human adenovirus D
ggccucucaauugaaugcugug

SEQ ID NO: 1564301 - RNA, 20 nt, Human adenovirus D
auggcgugcgaguuggagga

SEQ ID NO: 1564302 - RNA, 19 nt, Human adenovirus D
uggacaucgcgaaccaggc

SEQ ID NO: 1564303 - RNA, 16 nt, Human adenovirus D
auaugguagacccacu

SEQ ID NO: 1564304 - RNA, 13 nt, Human adenovirus D
gcccgagcucugc

SEQ ID NO: 1564305 - RNA, 14 nt, Human adenovirus D
aggucucgcuccac

SEQ ID NO: 1564306 - RNA, 16 nt, Human adenovirus D
cuggcugcuggagcug

SEQ ID NO: 1564307 - RNA, 17 nt, Human adenovirus D
guaaaugacucuccuga

SEQ ID NO: 1564308 - RNA, 17 nt, Human adenovirus D
ccacaggugcugcccac

SEQ ID NO: 1564309 - RNA, 21 nt, Human adenovirus D
cucaacaucacauucaaaaac

SEQ ID NO: 1564310 - RNA, 12 nt, Human adenovirus D
aggggccaagaa

SEQ ID NO: 1564311 - RNA, 15 nt, Human adenovirus D
cucugcugcgccgcg

SEQ ID NO: 1564312 - RNA, 12 nt, Human adenovirus D
ccugcgccgggc

SEQ ID NO: 1564313 - RNA, 14 nt, Human adenovirus D
ucugcccuccgccc

SEQ ID NO: 1564314 - RNA, 14 nt, Human adenovirus D
acugcgacucgggg

SEQ ID NO: 1564315 - RNA, 18 nt, Human adenovirus D
uucaauaagguucugccc

SEQ ID NO: 1564316 - RNA, 17 nt, Human adenovirus D
cgacccaugauggugcu

SEQ ID NO: 1564317 - RNA, 19 nt, Human adenovirus D
cugcucccgggcuccuaca

SEQ ID NO: 1564318 - RNA, 14 nt, Human adenovirus D
agccguggcgcagc

SEQ ID NO: 1564319 - RNA, 14 nt, Human adenovirus D
caccgacacguacu

SEQ ID NO: 1564320 - RNA, 16 nt, Human adenovirus D
ggcgagauagcaguug

SEQ ID NO: 1564321 - RNA, 15 nt, Human adenovirus D
gcgaccaccgcgacc

SEQ ID NO: 1564322 - RNA, 20 nt, Human adenovirus D
gacaaugauggauacuuggu

SEQ ID NO: 1564323 - RNA, 18 nt, Human adenovirus D
ccucaugaacacacugcc

SEQ ID NO: 1564324 - RNA, 15 nt, Human adenovirus D
agaagagcccccucc

SEQ ID NO: 1564325 - RNA, 17 nt, Human adenovirus D
ccagacccaggcgcgga

SEQ ID NO: 1564326 - RNA, 23 nt, Human adenovirus D
cugcagcauugucugccugguca

SEQ ID NO: 1564327 - RNA, 17 nt, Human adenovirus D
agcccaugagcaggcag

SEQ ID NO: 1564328 - RNA, 16 nt, Human adenovirus D
uccaacgccugcgcca

SEQ ID NO: 1564329 - RNA, 20 nt, Human adenovirus D
gggagcugcgcgagggccug

SEQ ID NO: 1564330 - RNA, 13 nt, Human adenovirus D
cuaaagcucuucu

SEQ ID NO: 1564331 - RNA, 23 nt, Human adenovirus D
ucaucguugugcgccgcgcuggg

SEQ ID NO: 1564332 - RNA, 16 nt, Human adenovirus D
gcucuaucgcuuccuc

SEQ ID NO: 1564333 - RNA, 16 nt, Human adenovirus D
aagaaguuagaggagg

SEQ ID NO: 1564334 - RNA, 17 nt, Human adenovirus D
ggugaugccggcagcgg

SEQ ID NO: 1564335 - RNA, 13 nt, Human adenovirus D
ccgaaggacccca

SEQ ID NO: 1564336 - RNA, 12 nt, Human adenovirus D
gaacaaggccau

SEQ ID NO: 1564337 - RNA, 23 nt, Human adenovirus D
ccgccaucgaacacgccaccgcu

SEQ ID NO: 1564338 - RNA, 15 nt, Human adenovirus D
ugcgcggggccacga

SEQ ID NO: 1564339 - RNA, 20 nt, Human adenovirus D
cgcaaggucgaggagaccug

SEQ ID NO: 1564340 - RNA, 21 nt, Human adenovirus D
cauccaacugaaguacaucca

SEQ ID NO: 1564341 - RNA, 12 nt, Human adenovirus D
cuaaugacaaac

SEQ ID NO: 1564342 - RNA, 16 nt, Human adenovirus D
cacgguucucucagca

SEQ ID NO: 1564343 - RNA, 17 nt, Human adenovirus D
uguaguuguucagcagc

SEQ ID NO: 1564344 - RNA, 13 nt, Human adenovirus D
ggccuggagcaga

SEQ ID NO: 1564345 - RNA, 19 nt, Human adenovirus D
gggagcugcgcgagggccu

SEQ ID NO: 1564346 - RNA, 17 nt, Human adenovirus D
auuggugcgcuggggcu

SEQ ID NO: 1564347 - RNA, 13 nt, Human adenovirus D
cauauaccccucc

SEQ ID NO: 1564348 - RNA, 15 nt, Human adenovirus D
gguucuucacccagc

SEQ ID NO: 1564349 - RNA, 15 nt, Human adenovirus D
ccgcgccgccacugc

SEQ ID NO: 1564350 - RNA, 19 nt, Human adenovirus D
ggugacgguaagcacgagc

SEQ ID NO: 1564351 - RNA, 14 nt, Human adenovirus D
cucaugcccuuccg

SEQ ID NO: 1564352 - RNA, 21 nt, Human adenovirus D
ucagcccgcuuaccaguagac

SEQ ID NO: 1564353 - RNA, 22 nt, Human adenovirus D
cuugaacucggggaucaccagu

SEQ ID NO: 1564354 - RNA, 12 nt, Human adenovirus D
ucgagcugcaag

SEQ ID NO: 1564355 - RNA, 22 nt, Human adenovirus D
agcaggguacccacuggguggc

SEQ ID NO: 1564356 - RNA, 14 nt, Human adenovirus D
ggcgccucccagga

SEQ ID NO: 1564357 - RNA, 13 nt, Human adenovirus D
cgcucgcucaccc

SEQ ID NO: 1564358 - RNA, 19 nt, Human adenovirus D
ugccuggucaaacaggcaa

SEQ ID NO: 1564359 - RNA, 19 nt, Human adenovirus D
ugaaaaaaacgguuuccgg

SEQ ID NO: 1564360 - RNA, 11 nt, Human adenovirus D
ugccaauaaac

SEQ ID NO: 1564361 - RNA, 13 nt, Human adenovirus D
ugcaccuguggga

SEQ ID NO: 1564362 - RNA, 20 nt, Human adenovirus D
caagggcgcucccaauccca

SEQ ID NO: 1564363 - RNA, 23 nt, Human adenovirus D
ccgggcucugugaacagcggcag

SEQ ID NO: 1564364 - RNA, 15 nt, Human adenovirus D
gaccggcagcggggc

SEQ ID NO: 1564365 - RNA, 15 nt, Human adenovirus D
gagcgcgagccggcg

SEQ ID NO: 1564366 - RNA, 22 nt, Human adenovirus D
accuuccagccguaccagugca

SEQ ID NO: 1564367 - RNA, 13 nt, Human adenovirus D
gaacuuucuccac

SEQ ID NO: 1564368 - RNA, 22 nt, Human adenovirus D
ugcccuuccacauccaagugcc

SEQ ID NO: 1564369 - RNA, 16 nt, Human adenovirus D
cgcgugacgcacuggc

SEQ ID NO: 1564370 - RNA, 14 nt, Human adenovirus D
ggaggcggugcgca

SEQ ID NO: 1564371 - RNA, 21 nt, Human adenovirus D
accgcaaugcgggccugcgcu

SEQ ID NO: 1564372 - RNA, 16 nt, Human adenovirus D
gccaugcgcaggcgcc

SEQ ID NO: 1564373 - RNA, 15 nt, Human adenovirus D
uagaagagcccccuc

SEQ ID NO: 1564374 - RNA, 16 nt, Human adenovirus D
acgguggugcagaaca

SEQ ID NO: 1564375 - RNA, 14 nt, Human adenovirus D
agaagaacgcacag

SEQ ID NO: 1564376 - RNA, 22 nt, Human adenovirus D
ggacuuuucuguugcauguucu

SEQ ID NO: 1564377 - RNA, 18 nt, Human adenovirus D
gaccgaguucagcuccag

SEQ ID NO: 1564378 - RNA, 16 nt, Human adenovirus D
caucgcgcaggaggcc

SEQ ID NO: 1564379 - RNA, 15 nt, Human adenovirus D
gcgcgcaugaccacc

SEQ ID NO: 1564380 - RNA, 12 nt, Human adenovirus D
aaacuaaagcca

SEQ ID NO: 1564381 - RNA, 15 nt, Human adenovirus D
aagacccacagccag

SEQ ID NO: 1564382 - RNA, 12 nt, Human adenovirus D
uccacugcuccu

SEQ ID NO: 1564383 - RNA, 15 nt, Human adenovirus D
gcuggcgaucgugaa

SEQ ID NO: 1564384 - RNA, 19 nt, Human adenovirus D
ugcccaacggcaugcuaca

SEQ ID NO: 1564385 - RNA, 21 nt, Human adenovirus D
cggggcgggggugaugagcug

SEQ ID NO: 1564386 - RNA, 20 nt, Human adenovirus D
guggaaacagacagccaggu

SEQ ID NO: 1564387 - RNA, 15 nt, Human adenovirus D
ggaugcggagccgcu

SEQ ID NO: 1564388 - RNA, 18 nt, Human adenovirus D
ucucagaugucaaagagg

SEQ ID NO: 1564389 - RNA, 13 nt, Human adenovirus D
cuggcucccagcc

SEQ ID NO: 1564390 - RNA, 18 nt, Human adenovirus D
ccaaacuauugcuuccca

SEQ ID NO: 1564391 - RNA, 16 nt, Human adenovirus D
caccuguggagggcau

SEQ ID NO: 1564392 - RNA, 18 nt, Human adenovirus D
acaauaauugaacugccu

SEQ ID NO: 1564393 - RNA, 17 nt, Human adenovirus D
auguugauuaaaaacca

SEQ ID NO: 1564394 - RNA, 22 nt, Human adenovirus D
auggacgagaacccgaggagcg

SEQ ID NO: 1564395 - RNA, 17 nt, Human adenovirus D
cggccguagcaggcgcc

SEQ ID NO: 1564396 - RNA, 20 nt, Human adenovirus D
ggcgccuucaauuggagcag

SEQ ID NO: 1564397 - RNA, 17 nt, Human adenovirus D
ccgcuaucugcucuucc

SEQ ID NO: 1564398 - RNA, 13 nt, Human adenovirus D
acgcugcccgcca

SEQ ID NO: 1564399 - RNA, 17 nt, Human adenovirus D
cucaccaaggccauagc

SEQ ID NO: 1564400 - RNA, 16 nt, Human adenovirus D
gacggacuugauuggc

SEQ ID NO: 1564401 - RNA, 22 nt, Human adenovirus D
aucaacaucuugcagagcaucg

SEQ ID NO: 1564402 - RNA, 16 nt, Human adenovirus D
uggaggaagugcugga

SEQ ID NO: 1564403 - RNA, 17 nt, Human adenovirus D
ccgcgauguugagcugg

SEQ ID NO: 1564404 - RNA, 16 nt, Human adenovirus D
uggaggagcagccgcg

SEQ ID NO: 1564405 - RNA, 15 nt, Human adenovirus D
agaucaggggaugua

SEQ ID NO: 1564406 - RNA, 21 nt, Human adenovirus D
cagccgcaggcgcccagccag

SEQ ID NO: 1564407 - RNA, 17 nt, Human adenovirus D
ggcgggcagggagcugc

SEQ ID NO: 1564408 - RNA, 15 nt, Human adenovirus D
gaagccguggcgcag

SEQ ID NO: 1564409 - RNA, 17 nt, Human adenovirus D
cgauccugacgcgccag

SEQ ID NO: 1564410 - RNA, 13 nt, Human adenovirus D
ggggaagauggag

SEQ ID NO: 1564411 - RNA, 16 nt, Human adenovirus D
ccgcaggccaacagac

SEQ ID NO: 1564412 - RNA, 16 nt, Human adenovirus D
cgagucgucgcagccg

SEQ ID NO: 1564413 - RNA, 14 nt, Human adenovirus D
cugccuccaccacc

SEQ ID NO: 1564414 - RNA, 20 nt, Human adenovirus D
gacgcugagcgacgaccugg

SEQ ID NO: 1564415 - RNA, 15 nt, Human adenovirus D
ccgucggccaugggc

SEQ ID NO: 1564416 - RNA, 15 nt, Human adenovirus D
ccuggugauggccug

SEQ ID NO: 1564417 - RNA, 22 nt, Human adenovirus D
ggcuuuuccugaugcaggaggg

SEQ ID NO: 1564418 - RNA, 14 nt, Human adenovirus D
aguaaguuccuguc

SEQ ID NO: 1564419 - RNA, 19 nt, Human adenovirus D
cccugcccgagggcaacuu

SEQ ID NO: 1564420 - RNA, 19 nt, Human adenovirus D
acuuacuugaaaucugaaa

SEQ ID NO: 1564421 - RNA, 14 nt, Human adenovirus D
ccgagccucccagg

SEQ ID NO: 1564422 - RNA, 17 nt, Human adenovirus D
caguuugggcacugggg

SEQ ID NO: 1564423 - RNA, 17 nt, Human adenovirus D
cgcggaucucacggccu

SEQ ID NO: 1564424 - RNA, 19 nt, Human adenovirus D
cagccggcgaacgugccgc

SEQ ID NO: 1564425 - RNA, 20 nt, Human adenovirus D
acaguauugugggccuggga

SEQ ID NO: 1564426 - RNA, 13 nt, Human adenovirus D
cagcacugcaaau

SEQ ID NO: 1564427 - RNA, 23 nt, Human adenovirus D
ggucggaagacccaagagcgaga

SEQ ID NO: 1564428 - RNA, 18 nt, Human adenovirus D
auccccgucuccugccgc

SEQ ID NO: 1564429 - RNA, 18 nt, Human adenovirus D
ugacaauucagagccagg

SEQ ID NO: 1564430 - RNA, 14 nt, Human adenovirus D
ugauuaaaaaccaa

SEQ ID NO: 1564431 - RNA, 22 nt, Human adenovirus D
gacccaguggcgagaggcgagc

SEQ ID NO: 1564432 - RNA, 17 nt, Human adenovirus D
ugaguccgucggccaug

SEQ ID NO: 1564433 - RNA, 16 nt, Human adenovirus D
ggucgacggugagcag

SEQ ID NO: 1564434 - RNA, 13 nt, Human adenovirus D
uggcccugggccu

SEQ ID NO: 1564435 - RNA, 19 nt, Human adenovirus D
auggugcccaagcgccggc

SEQ ID NO: 1564436 - RNA, 14 nt, Human adenovirus D
cgcguacauccagc

SEQ ID NO: 1564437 - RNA, 11 nt, Human adenovirus D
gacagaagaag

SEQ ID NO: 1564438 - RNA, 20 nt, Human adenovirus D
ggccacgugcgagggguagc

SEQ ID NO: 1564439 - RNA, 17 nt, Human adenovirus D
ccagcuggccgcccuga

SEQ ID NO: 1564440 - RNA, 21 nt, Human adenovirus D
ugcugcuccaccaccugcagc

SEQ ID NO: 1564441 - RNA, 19 nt, Human adenovirus D
acgagcaagacgcaggcca

SEQ ID NO: 1564442 - RNA, 14 nt, Human adenovirus D
acgaggcagaggca

SEQ ID NO: 1564443 - RNA, 13 nt, Human adenovirus D
augaauuccauga

SEQ ID NO: 1564444 - RNA, 22 nt, Human adenovirus D
gaccucgccgucuacucccagc

SEQ ID NO: 1564445 - RNA, 17 nt, Human adenovirus D
cccaggcggugcugcug

SEQ ID NO: 1564446 - RNA, 14 nt, Human adenovirus D
augacucaugggcg

SEQ ID NO: 1564447 - RNA, 21 nt, Human adenovirus D
acuaccugcaucgcgcggcgu

SEQ ID NO: 1564448 - RNA, 18 nt, Human adenovirus D
caugcccuuuucccagga

SEQ ID NO: 1564449 - RNA, 11 nt, Human adenovirus D
aacccugguga

SEQ ID NO: 1564450 - RNA, 18 nt, Human adenovirus D
ugcugaaacaccugcagc

SEQ ID NO: 1564451 - RNA, 22 nt, Human adenovirus D
agcagggugggcaaaaagaaac

SEQ ID NO: 1564452 - RNA, 14 nt, Human adenovirus D
cacccaccacaguu

SEQ ID NO: 1564453 - RNA, 18 nt, Human adenovirus D
ccgagucgucgcagccgc

SEQ ID NO: 1564454 - RNA, 13 nt, Human adenovirus D
aacgcccugcugg

SEQ ID NO: 1564455 - RNA, 14 nt, Human adenovirus D
ccaccacgcgcauc

SEQ ID NO: 1564456 - RNA, 13 nt, Human adenovirus D
gcgcggggccacg

SEQ ID NO: 1564457 - RNA, 13 nt, Human adenovirus D
gcgaggggccaag

SEQ ID NO: 1564458 - RNA, 20 nt, Human adenovirus D
cgcgaccgcggccguagcag

SEQ ID NO: 1564459 - RNA, 14 nt, Human adenovirus D
ccagugcuuccagc

SEQ ID NO: 1564460 - RNA, 17 nt, Human adenovirus D
gucuccaacgccugcgc

SEQ ID NO: 1564461 - RNA, 20 nt, Human adenovirus D
auacagaugguagcagcaga

SEQ ID NO: 1564462 - RNA, 16 nt, Human adenovirus D
ccugggccugaugcac

SEQ ID NO: 1564463 - RNA, 17 nt, Human adenovirus D
cgagccauugaccacca

SEQ ID NO: 1564464 - RNA, 11 nt, Human adenovirus D
aucgccaggcc

SEQ ID NO: 1564465 - RNA, 16 nt, Human adenovirus D
gcugagaccagaccac

SEQ ID NO: 1564466 - RNA, 14 nt, Human adenovirus D
cguaagcaggagca

SEQ ID NO: 1564467 - RNA, 17 nt, Human adenovirus D
ccuugucguacuucugc

SEQ ID NO: 1564468 - RNA, 22 nt, Human adenovirus D
gccaucaacauccaccagugca

SEQ ID NO: 1564469 - RNA, 20 nt, Human adenovirus D
ugccccaggcggugcugcug

SEQ ID NO: 1564470 - RNA, 22 nt, Human adenovirus D
cuccggaggcaucggaacccuc

SEQ ID NO: 1564471 - RNA, 10 nt, Human adenovirus D
uuuccucugu

SEQ ID NO: 1564472 - RNA, 21 nt, Human adenovirus D
ucguugugcgccgcgcugggg

SEQ ID NO: 1564473 - RNA, 19 nt, Human adenovirus D
gagcuggacaagcuucuug

SEQ ID NO: 1564474 - RNA, 18 nt, Human adenovirus D
ccaacagccuucagcauc

SEQ ID NO: 1564475 - RNA, 14 nt, Human adenovirus D
gggacgugagcgcg

SEQ ID NO: 1564476 - RNA, 20 nt, Human adenovirus D
agaacugcuggcccugcugg

SEQ ID NO: 1564477 - RNA, 18 nt, Human adenovirus D
ggccucgagcuacaugcc

SEQ ID NO: 1564478 - RNA, 14 nt, Human adenovirus D
cugcuucugccugg

SEQ ID NO: 1564479 - RNA, 23 nt, Human adenovirus D
cgagcuacaugcccagcagcagc

SEQ ID NO: 1564480 - RNA, 19 nt, Human adenovirus D
ccccaggcccuggagcagc

SEQ ID NO: 1564481 - RNA, 19 nt, Human adenovirus D
cccuccccgacccccuucc

SEQ ID NO: 1564482 - RNA, 14 nt, Human adenovirus D
cgcgcccacccgga

SEQ ID NO: 1564483 - RNA, 12 nt, Human adenovirus D
caacuuccagcc

SEQ ID NO: 1564484 - RNA, 20 nt, Human adenovirus D
gcaaaaccuguucagggacc

SEQ ID NO: 1564485 - RNA, 14 nt, Human adenovirus D
ccgucacccagaaa

SEQ ID NO: 1564486 - RNA, 19 nt, Human adenovirus D
acgaugguuucccucgggc

SEQ ID NO: 1564487 - RNA, 20 nt, Human adenovirus D
gaaccugaaggagcuggaca

SEQ ID NO: 1564488 - RNA, 15 nt, Human adenovirus D
cugaaaaacagaaag

SEQ ID NO: 1564489 - RNA, 21 nt, Human adenovirus D
gguggaaacagacagccaggu

SEQ ID NO: 1564490 - RNA, 20 nt, Human adenovirus D
uccugggccacuacagcuga

SEQ ID NO: 1564491 - RNA, 13 nt, Human adenovirus D
uacaugcacugga

SEQ ID NO: 1564492 - RNA, 13 nt, Human adenovirus D
accagaccaccug

SEQ ID NO: 1564493 - RNA, 17 nt, Human adenovirus D
agcgugggacuggcaag

SEQ ID NO: 1564494 - RNA, 16 nt, Human adenovirus D
accgacaguggcagcg

SEQ ID NO: 1564495 - RNA, 14 nt, Human adenovirus D
cucuaucuucucuu

SEQ ID NO: 1564496 - RNA, 17 nt, Human adenovirus D
aucacucuuuccagcag

SEQ ID NO: 1564497 - RNA, 15 nt, Human adenovirus D
uggaagaagagcagc

SEQ ID NO: 1564498 - RNA, 14 nt, Human adenovirus D
aagcagguggcgcc

SEQ ID NO: 1564499 - RNA, 15 nt, Human adenovirus D
gguuccggccccgcg

SEQ ID NO: 1564500 - RNA, 19 nt, Human adenovirus D
augcccuuccgcgccaaga

SEQ ID NO: 1564501 - RNA, 23 nt, Human adenovirus D
uccugaaccacacggccagcagg

SEQ ID NO: 1564502 - RNA, 16 nt, Human adenovirus D
cggaguaccugagccg

SEQ ID NO: 1564503 - RNA, 20 nt, Human adenovirus D
uaaauauggccuggagcaga

SEQ ID NO: 1564504 - RNA, 14 nt, Human adenovirus D
aaccugcgcgggcu

SEQ ID NO: 1564505 - RNA, 13 nt, Human adenovirus D
ucccacuacaaca

SEQ ID NO: 1564506 - RNA, 17 nt, Human adenovirus D
gcaggagcaggaggagg

SEQ ID NO: 1564507 - RNA, 18 nt, Human adenovirus D
agcugcaaaaagucacuu

SEQ ID NO: 1564508 - RNA, 13 nt, Human adenovirus D
ucccaggacgaga

SEQ ID NO: 1564509 - RNA, 19 nt, Human adenovirus D
cgauccugacgcgccagcc

SEQ ID NO: 1564510 - RNA, 15 nt, Human adenovirus D
ccagugcuuccagca

SEQ ID NO: 1564511 - RNA, 15 nt, Human adenovirus D
ccggcgaccaccgcg

SEQ ID NO: 1564512 - RNA, 12 nt, Human adenovirus D
agcgcauccuga

SEQ ID NO: 1564513 - RNA, 12 nt, Human adenovirus D
auccacaaacua

SEQ ID NO: 1564514 - RNA, 15 nt, Human adenovirus D
caaggucgaggagac

SEQ ID NO: 1564515 - RNA, 15 nt, Human adenovirus D
gcgccugaggcagac

SEQ ID NO: 1564516 - RNA, 14 nt, Human adenovirus D
cagacaugcugcua

SEQ ID NO: 1564517 - RNA, 19 nt, Human adenovirus D
cgcagugagagaagcggug

SEQ ID NO: 1564518 - RNA, 23 nt, Human adenovirus D
aucugcccugauauccaguagga

SEQ ID NO: 1564519 - RNA, 16 nt, Human adenovirus D
ccuggcggaggccauc

SEQ ID NO: 1564520 - RNA, 19 nt, Human adenovirus D
ucaugaucuaccccuguuu

SEQ ID NO: 1564521 - RNA, 15 nt, Human adenovirus D
gcggagggugccaga

SEQ ID NO: 1564522 - RNA, 16 nt, Human adenovirus D
ggugaguugguggccg

SEQ ID NO: 1564523 - RNA, 21 nt, Human adenovirus D
cuuacucuauaacauuugaau

SEQ ID NO: 1564524 - RNA, 19 nt, Human adenovirus D
gggcagcgagagggcgcug

SEQ ID NO: 1564525 - RNA, 16 nt, Human adenovirus D
ccaaacgccagcccaa

SEQ ID NO: 1564526 - RNA, 17 nt, Human adenovirus D
cuugugguuuuaacagg

SEQ ID NO: 1564527 - RNA, 17 nt, Human adenovirus D
gccuggugaagggcaca

SEQ ID NO: 1564528 - RNA, 16 nt, Human adenovirus D
gccugaguggcggcuu

SEQ ID NO: 1564529 - RNA, 15 nt, Human adenovirus D
ugcgcgaccugggcu

SEQ ID NO: 1564530 - RNA, 16 nt, Human adenovirus D
accuggcggaggccau

SEQ ID NO: 1564531 - RNA, 14 nt, Human adenovirus D
ggggacgugagcgc

SEQ ID NO: 1564532 - RNA, 19 nt, Human adenovirus D
guuccaugaaucgcgggcg

SEQ ID NO: 1564533 - RNA, 13 nt, Human adenovirus D
ggggacgagcugc

SEQ ID NO: 1564534 - RNA, 12 nt, Human adenovirus D
cgagucucaccu

SEQ ID NO: 1564535 - RNA, 22 nt, Human adenovirus D
aaaaaucacucuuuccagcagc

SEQ ID NO: 1564536 - RNA, 15 nt, Human adenovirus D
gcugcugccgagccg

SEQ ID NO: 1564537 - RNA, 23 nt, Human adenovirus D
caaccgggugcuagacauggcca

SEQ ID NO: 1564538 - RNA, 18 nt, Human adenovirus D
ccaaucgcgcccgcagca

SEQ ID NO: 1564539 - RNA, 22 nt, Human adenovirus D
guaugacacgcgcacacuuugg

SEQ ID NO: 1564540 - RNA, 16 nt, Human adenovirus D
gccccgcgggcagggg

SEQ ID NO: 1564541 - RNA, 19 nt, Human adenovirus D
gcgccaaaugcgucccacc

SEQ ID NO: 1564542 - RNA, 17 nt, Human adenovirus D
aaaugcuaccugggagu

SEQ ID NO: 1564543 - RNA, 15 nt, Human adenovirus D
gcggacgcgcucccg

SEQ ID NO: 1564544 - RNA, 12 nt, Human adenovirus D
augccgcagugg

SEQ ID NO: 1564545 - RNA, 20 nt, Human adenovirus D
aguaugucccuggcauggua

SEQ ID NO: 1564546 - RNA, 21 nt, Human adenovirus D
gcggcgguuccggccccgcgg

SEQ ID NO: 1564547 - RNA, 23 nt, Human adenovirus D
agcgacacccccgcgugcagcug

SEQ ID NO: 1564548 - RNA, 13 nt, Human adenovirus D
gugaagcaauacc

SEQ ID NO: 1564549 - RNA, 15 nt, Human adenovirus D
uggccggugagacgc

SEQ ID NO: 1564550 - RNA, 20 nt, Human adenovirus D
ugcuucugggcaacggccgc

SEQ ID NO: 1564551 - RNA, 18 nt, Human adenovirus D
caaaagauacagaguaaa

SEQ ID NO: 1564552 - RNA, 15 nt, Human adenovirus D
gucaucacccucaga

SEQ ID NO: 1564553 - RNA, 21 nt, Human adenovirus D
aucacucuuuccagcagcagg

SEQ ID NO: 1564554 - RNA, 14 nt, Human adenovirus D
ggcaccagccagcu

SEQ ID NO: 1564555 - RNA, 13 nt, Human adenovirus D
ccuggucaucacc

SEQ ID NO: 1564556 - RNA, 12 nt, Human adenovirus D
cugcuccugcac

SEQ ID NO: 1564557 - RNA, 22 nt, Human adenovirus D
aacuaucaaaacgaccacagca

SEQ ID NO: 1564558 - RNA, 15 nt, Human adenovirus D
ccgugcgcaccaccg

SEQ ID NO: 1564559 - RNA, 21 nt, Human adenovirus D
cauugaccaccagggagcuga

SEQ ID NO: 1564560 - RNA, 20 nt, Human adenovirus D
cuggaugauguccuugagga

SEQ ID NO: 1564561 - RNA, 13 nt, Human adenovirus D
guggacgagcaga

SEQ ID NO: 1564562 - RNA, 16 nt, Human adenovirus D
guucucgcuggucaca

SEQ ID NO: 1564563 - RNA, 14 nt, Human adenovirus D
cgaggugcagaccg

SEQ ID NO: 1564564 - RNA, 18 nt, Human adenovirus D
uccccgcccagcgagagg

SEQ ID NO: 1564565 - RNA, 13 nt, Human adenovirus D
cagcacacucacu

SEQ ID NO: 1564566 - RNA, 18 nt, Human adenovirus D
gcgacgacgacauccugg

SEQ ID NO: 1564567 - RNA, 14 nt, Human adenovirus D
ccgacgcgcuccuc

SEQ ID NO: 1564568 - RNA, 18 nt, Human adenovirus D
agggguugaggggcggac

SEQ ID NO: 1564569 - RNA, 16 nt, Human adenovirus D
aacugaugaaaaagcu

SEQ ID NO: 1564570 - RNA, 23 nt, Human adenovirus D
ccuuccaguacucccggagcggg

SEQ ID NO: 1564571 - RNA, 15 nt, Human adenovirus D
cucaucggccagaca

SEQ ID NO: 1564572 - RNA, 20 nt, Human adenovirus D
ugcggcagcuuuuugagcuc

SEQ ID NO: 1564573 - RNA, 21 nt, Human adenovirus D
gucaggagcagcgccccgagg

SEQ ID NO: 1564574 - RNA, 22 nt, Human adenovirus D
gcgcacguucaggacaccgggg

SEQ ID NO: 1564575 - RNA, 16 nt, Human adenovirus D
gcagacacaccaggau

SEQ ID NO: 1564576 - RNA, 19 nt, Human adenovirus D
cugcccuccgcccugagcu

SEQ ID NO: 1564577 - RNA, 13 nt, Human adenovirus D
ucucgauccagca

SEQ ID NO: 1564578 - RNA, 15 nt, Human adenovirus D
cgagaccgugagcuc

SEQ ID NO: 1564579 - RNA, 18 nt, Human adenovirus D
cacgagaaccgccugggg

SEQ ID NO: 1564580 - RNA, 22 nt, Human adenovirus D
cuguacuuugucugcuguaaag

SEQ ID NO: 1564581 - RNA, 14 nt, Human adenovirus D
guucuugcaugccu

SEQ ID NO: 1564582 - RNA, 16 nt, Human adenovirus D
cgccggcggcgggcca

SEQ ID NO: 1564583 - RNA, 21 nt, Human adenovirus D
ggcagccgagccggcgcgccu

SEQ ID NO: 1564584 - RNA, 20 nt, Human adenovirus D
ccuugcagagcagcucuucg

SEQ ID NO: 1564585 - RNA, 22 nt, Human adenovirus D
ugcaagggugcgcuugagacuc

SEQ ID NO: 1564586 - RNA, 20 nt, Human adenovirus D
guucaagaacgagggccugg

SEQ ID NO: 1564587 - RNA, 21 nt, Human adenovirus D
gccucugcgugaagaccacug

SEQ ID NO: 1564588 - RNA, 17 nt, Human adenovirus D
cuuccguucuacccagc

SEQ ID NO: 1564589 - RNA, 23 nt, Human adenovirus D
ugacacagcaguccaugcccaac

SEQ ID NO: 1564590 - RNA, 20 nt, Human adenovirus D
ccaggcggcagagcgggcgg

SEQ ID NO: 1564591 - RNA, 22 nt, Human adenovirus D
agcgggaucaucgccugcuugc

SEQ ID NO: 1564592 - RNA, 20 nt, Human adenovirus D
caacucuuaaaucauuuaaa

SEQ ID NO: 1564593 - RNA, 14 nt, Human adenovirus D
cacucgcagugcac

SEQ ID NO: 1564594 - RNA, 21 nt, Human adenovirus D
aggugacaaagagccgcuccg

SEQ ID NO: 1564595 - RNA, 19 nt, Human adenovirus D
gagcuacaugcccagcagc

SEQ ID NO: 1564596 - RNA, 17 nt, Human adenovirus D
cgaagccguggcgcagc

SEQ ID NO: 1564597 - RNA, 20 nt, Human adenovirus D
gucuagaaccccacaggaug

SEQ ID NO: 1564598 - RNA, 16 nt, Human adenovirus D
cucuucuuccaugaca

SEQ ID NO: 1564599 - RNA, 21 nt, Human adenovirus D
ccuaggggaagauggaggagc

SEQ ID NO: 1564600 - RNA, 17 nt, Human adenovirus D
gggagcaauccuccagg

SEQ ID NO: 1564601 - RNA, 15 nt, Human adenovirus D
ugcgccaagggcagc

SEQ ID NO: 1564602 - RNA, 15 nt, Human adenovirus D
agaauauccccuucc

SEQ ID NO: 1564603 - RNA, 15 nt, Human adenovirus D
ccacacggccagcag

SEQ ID NO: 1564604 - RNA, 21 nt, Human adenovirus D
caggugacagcguuccccucc

SEQ ID NO: 1564605 - RNA, 22 nt, Human adenovirus D
uuugacaacccgccugccagga

SEQ ID NO: 1564606 - RNA, 23 nt, Human adenovirus D
ugggcugcggcuuuggcaaagac

SEQ ID NO: 1564607 - RNA, 16 nt, Human adenovirus D
uggguggccggcgcgc

SEQ ID NO: 1564608 - RNA, 19 nt, Human adenovirus D
ccacgucuucaaccgcuuc

SEQ ID NO: 1564609 - RNA, 22 nt, Human adenovirus D
gagcugaucucgcugccgcugg

SEQ ID NO: 1564610 - RNA, 22 nt, Human adenovirus D
cucgagcgcccauuccuggaga

SEQ ID NO: 1564611 - RNA, 18 nt, Human adenovirus D
ccaccuggugauggccug

SEQ ID NO: 1564612 - RNA, 20 nt, Human adenovirus D
ugaagauucuggaaauuaug

SEQ ID NO: 1564613 - RNA, 18 nt, Human adenovirus D
uguagguguuggcaaagc

SEQ ID NO: 1564614 - RNA, 21 nt, Human adenovirus D
gcaagggcgaccagcucuggg

SEQ ID NO: 1564615 - RNA, 19 nt, Human adenovirus D
ucuacgcguacauccagca

SEQ ID NO: 1564616 - RNA, 16 nt, Human adenovirus D
uaauuaugcuccuggg

SEQ ID NO: 1564617 - RNA, 16 nt, Human adenovirus D
caggccuccgagcagc

SEQ ID NO: 1564618 - RNA, 12 nt, Human adenovirus D
uccgcgcuccgu

SEQ ID NO: 1564619 - RNA, 18 nt, Human adenovirus D
cuccaguuuguggaggag

SEQ ID NO: 1564620 - RNA, 21 nt, Human adenovirus D
accgcaacucguaccuggguc

SEQ ID NO: 1564621 - RNA, 16 nt, Human adenovirus D
gcaggaguccaccgcu

SEQ ID NO: 1564622 - RNA, 15 nt, Human adenovirus D
aguagucaucaaaug

SEQ ID NO: 1564623 - RNA, 22 nt, Human adenovirus D
ccuuucacccggacguggugcu

SEQ ID NO: 1564624 - RNA, 18 nt, Human adenovirus D
acuaugaucccaacagcc

SEQ ID NO: 1564625 - RNA, 17 nt, Human adenovirus D
cgcugguagggggcgcc

SEQ ID NO: 1564626 - RNA, 22 nt, Human adenovirus D
uacuacuccugaucagaaacac

SEQ ID NO: 1564627 - RNA, 22 nt, Human adenovirus D
aacggcugcauccacugcuccu

SEQ ID NO: 1564628 - RNA, 11 nt, Human adenovirus D
ccguccucuga

SEQ ID NO: 1564629 - RNA, 22 nt, Human adenovirus D
caaccaugugcgcacccugauc

SEQ ID NO: 1564630 - RNA, 21 nt, Human adenovirus D
cagccgugaucccacagggca

SEQ ID NO: 1564631 - RNA, 15 nt, Human adenovirus D
aacgccaggcuggcc

SEQ ID NO: 1564632 - RNA, 23 nt, Human adenovirus D
gcuugguacccgcgacccccagg

SEQ ID NO: 1564633 - RNA, 16 nt, Human adenovirus D
cacugcuccugcgaaa

SEQ ID NO: 1564634 - RNA, 12 nt, Human adenovirus D
gacaaugaugga

SEQ ID NO: 1564635 - RNA, 19 nt, Human adenovirus D
augucgacgaagcgguggu

SEQ ID NO: 1564636 - RNA, 11 nt, Human adenovirus D
aacugcuggcc

SEQ ID NO: 1564637 - RNA, 12 nt, Human adenovirus D
aguucaggagcg

SEQ ID NO: 1564638 - RNA, 15 nt, Human adenovirus D
cgacguggacagcgc

SEQ ID NO: 1564639 - RNA, 12 nt, Human adenovirus D
gaagaagagaca

SEQ ID NO: 1564640 - RNA, 13 nt, Human adenovirus D
auuucuuccucug

SEQ ID NO: 1564641 - RNA, 14 nt, Human adenovirus D
ucuguccaaccccg

SEQ ID NO: 1564642 - RNA, 16 nt, Human adenovirus D
cagcccaaacuggggc

SEQ ID NO: 1564643 - RNA, 15 nt, Human adenovirus D
gaggcuauuaagaag

SEQ ID NO: 1564644 - RNA, 22 nt, Human adenovirus D
gcuggcggagaacaaggccauc

SEQ ID NO: 1564645 - RNA, 19 nt, Human adenovirus D
acggugaaggggugggccc

SEQ ID NO: 1564646 - RNA, 23 nt, Human adenovirus D
uacggaccaccccaggcggacca

SEQ ID NO: 1564647 - RNA, 19 nt, Human adenovirus D
caaugucaggucugcuggu

SEQ ID NO: 1564648 - RNA, 16 nt, Human adenovirus D
gggagccagguccaga

SEQ ID NO: 1564649 - RNA, 22 nt, Human adenovirus D
cgagcaacccaaaaucgagcag

SEQ ID NO: 1564650 - RNA, 15 nt, Human adenovirus D
auaaauuuugacgag

SEQ ID NO: 1564651 - RNA, 15 nt, Human adenovirus D
caaggugcugacauc

SEQ ID NO: 1564652 - RNA, 14 nt, Human adenovirus D
cgcauguacuccuu

SEQ ID NO: 1564653 - RNA, 19 nt, Human adenovirus D
agcagcuugcgcgcuggcu

SEQ ID NO: 1564654 - RNA, 13 nt, Human adenovirus D
gcgcgaccugggc

SEQ ID NO: 1564655 - RNA, 15 nt, Human adenovirus D
aagagcccuuuuugc

SEQ ID NO: 1564656 - RNA, 23 nt, Human adenovirus D
gcuggucacauccaucuccacca

SEQ ID NO: 1564657 - RNA, 17 nt, Human adenovirus D
ucacucaaacuggcuga

SEQ ID NO: 1564658 - RNA, 15 nt, Human adenovirus D
uccagcgcggccagc

SEQ ID NO: 1564659 - RNA, 22 nt, Human adenovirus D
aaaauagucuauuuuugaggau

SEQ ID NO: 1564660 - RNA, 15 nt, Human adenovirus D
cguggugcuggauga

SEQ ID NO: 1564661 - RNA, 17 nt, Human adenovirus D
gcccugagccgccagcu

SEQ ID NO: 1564662 - RNA, 14 nt, Human adenovirus D
cacaggaggcacag

SEQ ID NO: 1564663 - RNA, 16 nt, Human adenovirus D
aguucagcuccagugg

SEQ ID NO: 1564664 - RNA, 23 nt, Human adenovirus D
cggcgaacgugccgcgcgggcag

SEQ ID NO: 1564665 - RNA, 13 nt, Human adenovirus D
ggagcgcauccug

SEQ ID NO: 1564666 - RNA, 18 nt, Human adenovirus D
gucauugauacccuggac

SEQ ID NO: 1564667 - RNA, 22 nt, Human adenovirus D
gccugccaggaugggccggagu

SEQ ID NO: 1564668 - RNA, 20 nt, Human adenovirus D
gcugcucaccaccccggacg

SEQ ID NO: 1564669 - RNA, 18 nt, Human adenovirus D
ccccagaaagaaguggcc

SEQ ID NO: 1564670 - RNA, 17 nt, Human adenovirus D
cccgagcucugcugcgc

SEQ ID NO: 1564671 - RNA, 20 nt, Human adenovirus D
uccaugcagacacuugagcu

SEQ ID NO: 1564672 - RNA, 14 nt, Human adenovirus D
cguuaguccagcag

SEQ ID NO: 1564673 - RNA, 13 nt, Human adenovirus D
cucaacagcuggg

SEQ ID NO: 1564674 - RNA, 20 nt, Human adenovirus D
gagcccgcgcgggagccagg

SEQ ID NO: 1564675 - RNA, 13 nt, Human adenovirus D
cugacccagcagg

SEQ ID NO: 1564676 - RNA, 13 nt, Human adenovirus D
gcuggggcugcuc

SEQ ID NO: 1564677 - RNA, 12 nt, Human adenovirus D
auugcuucccau

SEQ ID NO: 1564678 - RNA, 23 nt, Human adenovirus D
augccgaagaagaacaggagccg

SEQ ID NO: 1564679 - RNA, 19 nt, Human adenovirus D
gcgucagggcgaagguguc

SEQ ID NO: 1564680 - RNA, 18 nt, Human adenovirus D
gaagaaugggacagccag

SEQ ID NO: 1564681 - RNA, 16 nt, Human adenovirus D
ccgucugccccccgcc

SEQ ID NO: 1564682 - RNA, 15 nt, Human adenovirus D
ugccacucgcgggcg

SEQ ID NO: 1564683 - RNA, 21 nt, Human adenovirus D
gcucaacccgggucuccccca

SEQ ID NO: 1564684 - RNA, 15 nt, Human adenovirus D
ugagccgcgcgcugg

SEQ ID NO: 1564685 - RNA, 15 nt, Human adenovirus D
cagcgcgcugcggcu

SEQ ID NO: 1564686 - RNA, 19 nt, Human adenovirus D
caggcgcuggaagagguag

SEQ ID NO: 1564687 - RNA, 18 nt, Human adenovirus D
cagcugcagcgcacucuc

SEQ ID NO: 1564688 - RNA, 15 nt, Human adenovirus D
ccccuccgcugugcu

SEQ ID NO: 1564689 - RNA, 21 nt, Human adenovirus D
gggugaccagguccacgcugg

SEQ ID NO: 1564690 - RNA, 19 nt, Human adenovirus D
ccugacgcgccagccgcgg

SEQ ID NO: 1564691 - RNA, 14 nt, Human adenovirus D
ugaagcccugguuu

SEQ ID NO: 1564692 - RNA, 21 nt, Human adenovirus D
gcccuugcggacauacaaaaa

SEQ ID NO: 1564693 - RNA, 18 nt, Human adenovirus D
ugggcaaaaagaaacaag

SEQ ID NO: 1564694 - RNA, 19 nt, Human adenovirus D
caccguuccaugcagacac

SEQ ID NO: 1564695 - RNA, 20 nt, Human adenovirus D
gcggcggaugguggcgagga

SEQ ID NO: 1564696 - RNA, 19 nt, Human adenovirus D
agaaucuugccugcucgcg

SEQ ID NO: 1564697 - RNA, 16 nt, Human adenovirus D
gcauaauauggugaag

SEQ ID NO: 1564698 - RNA, 22 nt, Human adenovirus D
cggggcucggugcggcugcugc

SEQ ID NO: 1564699 - RNA, 21 nt, Human adenovirus D
agcagaagaucccggcgcagu

SEQ ID NO: 1564700 - RNA, 16 nt, Human adenovirus D
caggugcugccccagg

SEQ ID NO: 1564701 - RNA, 14 nt, Human adenovirus D
ccugcucaccugca

SEQ ID NO: 1564702 - RNA, 17 nt, Human adenovirus D
caucucgauccagcaga

SEQ ID NO: 1564703 - RNA, 15 nt, Human adenovirus D
guggcccugggccug

SEQ ID NO: 1564704 - RNA, 14 nt, Human adenovirus D
guccaccgcuccgc

SEQ ID NO: 1564705 - RNA, 15 nt, Human adenovirus D
uccgcgaacagcagc

SEQ ID NO: 1564706 - RNA, 20 nt, Human adenovirus D
cgacacccccgcgugcagcu

SEQ ID NO: 1564707 - RNA, 18 nt, Human adenovirus D
ggucagcgaugagcagcu

SEQ ID NO: 1564708 - RNA, 13 nt, Human adenovirus D
augaacaugaagu

SEQ ID NO: 1564709 - RNA, 18 nt, Human adenovirus D
cgcugcugccgcucaguc

SEQ ID NO: 1564710 - RNA, 13 nt, Human adenovirus D
aguaccugagccc

SEQ ID NO: 1564711 - RNA, 15 nt, Human adenovirus D
acuauugcuucccau

SEQ ID NO: 1564712 - RNA, 14 nt, Human adenovirus D
gccaugacagcgac

SEQ ID NO: 1564713 - RNA, 14 nt, Human adenovirus D
ccaggcggcagagc

SEQ ID NO: 1564714 - RNA, 16 nt, Human adenovirus D
agcaagacgcaggcca

SEQ ID NO: 1564715 - RNA, 15 nt, Human adenovirus D
caaagcgggaucauc

SEQ ID NO: 1564716 - RNA, 13 nt, Human adenovirus D
accagcacacuca

SEQ ID NO: 1564717 - RNA, 23 nt, Human adenovirus D
cgaccuugcaaaagcgccaggag

SEQ ID NO: 1564718 - RNA, 18 nt, Human adenovirus D
accacugcauggccucgu

SEQ ID NO: 1564719 - RNA, 20 nt, Human adenovirus D
uggagcaggcggcggucacc

SEQ ID NO: 1564720 - RNA, 15 nt, Human adenovirus D
cugcgcccgcgccgc

SEQ ID NO: 1564721 - RNA, 17 nt, Human adenovirus D
gcuugcuggaugcggag

SEQ ID NO: 1564722 - RNA, 13 nt, Human adenovirus D
cuacaucugcugc

SEQ ID NO: 1564723 - RNA, 15 nt, Human adenovirus D
ggcgcaaccaggagg

SEQ ID NO: 1564724 - RNA, 14 nt, Human adenovirus D
cagcccaugagcag

SEQ ID NO: 1564725 - RNA, 20 nt, Human adenovirus D
aggcguuuuugaggcggcgg

SEQ ID NO: 1564726 - RNA, 16 nt, Human adenovirus D
uuaaaggcuggcccuc

SEQ ID NO: 1564727 - RNA, 14 nt, Human adenovirus D
gcagcacuggaaca

SEQ ID NO: 1564728 - RNA, 20 nt, Human adenovirus D
uggaaagauucagggcaaaa

SEQ ID NO: 1564729 - RNA, 18 nt, Human adenovirus D
aggccaggcgcaggugga

SEQ ID NO: 1564730 - RNA, 15 nt, Human adenovirus D
gacgagcggccgccg

SEQ ID NO: 1564731 - RNA, 21 nt, Human adenovirus D
aggcucauaugaccaugcaga

SEQ ID NO: 1564732 - RNA, 19 nt, Human adenovirus D
cuuccguucuacccagcaa

SEQ ID NO: 1564733 - RNA, 18 nt, Human adenovirus D
ugcgcacccguccuccuc

SEQ ID NO: 1564734 - RNA, 19 nt, Human adenovirus D
gacgugcgcccggcguacg

SEQ ID NO: 1564735 - RNA, 15 nt, Human adenovirus D
auugcucuggccugc

SEQ ID NO: 1564736 - RNA, 23 nt, Human adenovirus D
cacaaguacugcgcgcucacucu

SEQ ID NO: 1564737 - RNA, 15 nt, Human adenovirus D
gggccgccgggccau

SEQ ID NO: 1564738 - RNA, 17 nt, Human adenovirus D
ccugcucaccugcaccu

SEQ ID NO: 1564739 - RNA, 11 nt, Human adenovirus D
cagccagaacc

SEQ ID NO: 1564740 - RNA, 13 nt, Human adenovirus D
gagccgccugagc

SEQ ID NO: 1564741 - RNA, 22 nt, Human adenovirus D
accccgccauaagggcggcgcu

SEQ ID NO: 1564742 - RNA, 11 nt, Human adenovirus D
ccccgccgggu

SEQ ID NO: 1564743 - RNA, 16 nt, Human adenovirus D
gccacaggugcugccc

SEQ ID NO: 1564744 - RNA, 17 nt, Human adenovirus D
gcugcaagguccgcagg

SEQ ID NO: 1564745 - RNA, 16 nt, Human adenovirus D
gaaagcaguucacuag

SEQ ID NO: 1564746 - RNA, 22 nt, Human adenovirus D
ugcacgagaaccgccuggggca

SEQ ID NO: 1564747 - RNA, 14 nt, Human adenovirus D
ggaucgccaggccu

SEQ ID NO: 1564748 - RNA, 11 nt, Human adenovirus D
gcuccugagcg

SEQ ID NO: 1564749 - RNA, 22 nt, Human adenovirus D
aguuucaacaaccaugugcgca

SEQ ID NO: 1564750 - RNA, 20 nt, Human adenovirus D
aaccagcacacucacuuuua

SEQ ID NO: 1564751 - RNA, 13 nt, Human adenovirus D
aauucucaaagug

SEQ ID NO: 1564752 - RNA, 15 nt, Human adenovirus D
aaggugaaaccagau

SEQ ID NO: 1564753 - RNA, 19 nt, Human adenovirus D
cucugguacuccagucucc

SEQ ID NO: 1564754 - RNA, 14 nt, Human adenovirus D
cagccuugccccca

SEQ ID NO: 1564755 - RNA, 23 nt, Human adenovirus D
cuaaacuaagguggcuauuuuca

SEQ ID NO: 1564756 - RNA, 19 nt, Human adenovirus D
cgaggucagcagcaagagc

SEQ ID NO: 1564757 - RNA, 16 nt, Human adenovirus D
cgcugcugcagccgcc

SEQ ID NO: 1564758 - RNA, 12 nt, Human adenovirus D
ccagcagcaggg

SEQ ID NO: 1564759 - RNA, 14 nt, Human adenovirus D
cagauccugcugcu

SEQ ID NO: 1564760 - RNA, 17 nt, Human adenovirus D
augcaaaaucuuacacu

SEQ ID NO: 1564761 - RNA, 14 nt, Human adenovirus D
cuaucugcucuucc

SEQ ID NO: 1564762 - RNA, 13 nt, Human adenovirus D
aggggacgugagc

SEQ ID NO: 1564763 - RNA, 20 nt, Human adenovirus D
ggcgugcgaguuggaggaga

SEQ ID NO: 1564764 - RNA, 19 nt, Human adenovirus D
gcuguaccgcagcugguac

SEQ ID NO: 1564765 - RNA, 17 nt, Human adenovirus D
ucaugcaacuuggaagg

SEQ ID NO: 1564766 - RNA, 23 nt, Human adenovirus D
cugcuugcaagacugcgggggga

SEQ ID NO: 1564767 - RNA, 13 nt, Human adenovirus D
ggcucagcugcca

SEQ ID NO: 1564768 - RNA, 17 nt, Human adenovirus D
cgcccgugggcgaccgg

SEQ ID NO: 1564769 - RNA, 16 nt, Human adenovirus D
ccggucaucucccggu

SEQ ID NO: 1564770 - RNA, 13 nt, Human adenovirus D
ugauuccacauau

SEQ ID NO: 1564771 - RNA, 21 nt, Human adenovirus D
cggggccuucgaaggggggcu

SEQ ID NO: 1564772 - RNA, 23 nt, Human adenovirus D
agccgucuggacccgcggccgcc

SEQ ID NO: 1564773 - RNA, 20 nt, Human adenovirus D
cagguccacgcugguggcca

SEQ ID NO: 1564774 - RNA, 17 nt, Human adenovirus D
ucaccgagccucccagg

SEQ ID NO: 1564775 - RNA, 12 nt, Human adenovirus D
caaaaagaaaca

SEQ ID NO: 1564776 - RNA, 15 nt, Human adenovirus D
cagauccugcugcuc

SEQ ID NO: 1564777 - RNA, 17 nt, Human adenovirus D
gagaucguccuucacuc

SEQ ID NO: 1564778 - RNA, 18 nt, Human adenovirus D
gugcccaacggcaugcua

SEQ ID NO: 1564779 - RNA, 14 nt, Human adenovirus D
ugcccaacaggccu

SEQ ID NO: 1564780 - RNA, 12 nt, Human adenovirus D
cagccuucagca

SEQ ID NO: 1564781 - RNA, 22 nt, Human adenovirus D
gcagcgucgacggggaaggcua

SEQ ID NO: 1564782 - RNA, 19 nt, Human adenovirus D
agccgcgcgcuggggcaga

SEQ ID NO: 1564783 - RNA, 15 nt, Human adenovirus D
gagcagcacagacac

SEQ ID NO: 1564784 - RNA, 15 nt, Human adenovirus D
ggagcugaccaacug

SEQ ID NO: 1564785 - RNA, 18 nt, Human adenovirus D
aguuccugauggaugugu

SEQ ID NO: 1564786 - RNA, 13 nt, Human adenovirus D
gaguggcggcccu

SEQ ID NO: 1564787 - RNA, 20 nt, Human adenovirus D
gacacguacuucagccuggg

SEQ ID NO: 1564788 - RNA, 17 nt, Human adenovirus D
cacugcaccccccgcag

SEQ ID NO: 1564789 - RNA, 13 nt, Human adenovirus D
acgcacgggccgc

SEQ ID NO: 1564790 - RNA, 16 nt, Human adenovirus D
agcugaucucgcugcc

SEQ ID NO: 1564791 - RNA, 18 nt, Human adenovirus D
gcgaccugggcugcgggc

SEQ ID NO: 1564792 - RNA, 19 nt, Human adenovirus D
acgcacgagaaggugcugg

SEQ ID NO: 1564793 - RNA, 23 nt, Human adenovirus D
acuacucggugcuuagccugggc

SEQ ID NO: 1564794 - RNA, 17 nt, Human adenovirus D
uggucggcacggucugg

SEQ ID NO: 1564795 - RNA, 15 nt, Human adenovirus D
gucgacggcgccucc

SEQ ID NO: 1564796 - RNA, 23 nt, Human adenovirus D
cagcagcaccucgguacccuccu

SEQ ID NO: 1564797 - RNA, 18 nt, Human adenovirus D
cgucacccugcccuucca

SEQ ID NO: 1564798 - RNA, 17 nt, Human adenovirus D
gggcuccgagaagaugc

SEQ ID NO: 1564799 - RNA, 13 nt, Human adenovirus D
auggccuggagca

SEQ ID NO: 1564800 - RNA, 23 nt, Human adenovirus D
gggccucggcggcguggcccuug

SEQ ID NO: 1564801 - RNA, 22 nt, Human adenovirus D
guggacaucgcgaaccaggcag

SEQ ID NO: 1564802 - RNA, 18 nt, Human adenovirus D
ggcaccuagaccacugcc

SEQ ID NO: 1564803 - RNA, 18 nt, Human adenovirus D
ccaccgagucucaccugg

SEQ ID NO: 1564804 - RNA, 12 nt, Human adenovirus D
uaucacaucuuu

SEQ ID NO: 1564805 - RNA, 14 nt, Human adenovirus D
aggggaugaacagu

SEQ ID NO: 1564806 - RNA, 17 nt, Human adenovirus D
cagguccgggggcaggg

SEQ ID NO: 1564807 - RNA, 18 nt, Human adenovirus D
gguuucucaacagcuggg

SEQ ID NO: 1564808 - RNA, 17 nt, Human adenovirus D
accgcuaccgcuuccac

SEQ ID NO: 1564809 - RNA, 18 nt, Human adenovirus D
gggaugucaaauuccugg

SEQ ID NO: 1564810 - RNA, 17 nt, Human adenovirus D
gaaacgucccagcagca

SEQ ID NO: 1564811 - RNA, 22 nt, Human adenovirus D
guggccaccucgccgcgcaggg

SEQ ID NO: 1564812 - RNA, 17 nt, Human adenovirus D
ucacccugcccuuccag

SEQ ID NO: 1564813 - RNA, 23 nt, Human adenovirus D
cugcagaccgggggacaaauaca

SEQ ID NO: 1564814 - RNA, 13 nt, Human adenovirus D
ccacgugaccauc

SEQ ID NO: 1564815 - RNA, 16 nt, Human adenovirus D
uaguugaggguggugg

SEQ ID NO: 1564816 - RNA, 16 nt, Human adenovirus D
gcagcagcaguagccc

SEQ ID NO: 1564817 - RNA, 17 nt, Human adenovirus D
gcgcgagguugagcucc

SEQ ID NO: 1564818 - RNA, 15 nt, Human adenovirus D
ccuugaccugccucc

SEQ ID NO: 1564819 - RNA, 14 nt, Human adenovirus D
aggguguccuggaa

SEQ ID NO: 1564820 - RNA, 21 nt, Human adenovirus D
ccagccuuuccauggccucgu

SEQ ID NO: 1564821 - RNA, 13 nt, Human adenovirus D
cucaccaaggcca

SEQ ID NO: 1564822 - RNA, 14 nt, Human adenovirus D
gaguggcggcccug

SEQ ID NO: 1564823 - RNA, 17 nt, Human adenovirus D
ucaaggacaugcagcug

SEQ ID NO: 1564824 - RNA, 14 nt, Human adenovirus D
gaacguagccagaa

SEQ ID NO: 1564825 - RNA, 17 nt, Human adenovirus D
ugcgcgagguugagcuc

SEQ ID NO: 1564826 - RNA, 23 nt, Human adenovirus D
gcucgagcgcccauuccuggaga

SEQ ID NO: 1564827 - RNA, 14 nt, Human adenovirus D
cacagccucucuga

SEQ ID NO: 1564828 - RNA, 17 nt, Human adenovirus D
ccauguuauucagcagc

SEQ ID NO: 1564829 - RNA, 20 nt, Human adenovirus D
cuaccugggaggagaggagg

SEQ ID NO: 1564830 - RNA, 19 nt, Human adenovirus D
gcgggccucacaguccagg

SEQ ID NO: 1564831 - RNA, 24 nt, Human adenovirus D
ugguagggggcgccgccggcggcg

SEQ ID NO: 1564832 - RNA, 21 nt, Human adenovirus D
cauccagcauaagaaucacau

SEQ ID NO: 1564833 - RNA, 22 nt, Human adenovirus D
gacaugaccgcgcgcaacaugg

SEQ ID NO: 1564834 - RNA, 13 nt, Human adenovirus D
cagagagauggcu

SEQ ID NO: 1564835 - RNA, 16 nt, Human adenovirus D
ugaccagacccaggcg

SEQ ID NO: 1564836 - RNA, 20 nt, Human adenovirus D
cacgguaagagcccagcaug

SEQ ID NO: 1564837 - RNA, 12 nt, Human adenovirus D
gaauaacaugcu

SEQ ID NO: 1564838 - RNA, 22 nt, Human adenovirus D
cgacaugggggcggaccugcau

SEQ ID NO: 1564839 - RNA, 14 nt, Human adenovirus D
agcagcaccucggu

SEQ ID NO: 1564840 - RNA, 13 nt, Human adenovirus D
agccguaccagug

SEQ ID NO: 1564841 - RNA, 21 nt, Human adenovirus D
gagccauugaccaccagggag

SEQ ID NO: 1564842 - RNA, 23 nt, Human adenovirus D
cugcacgagaaccgccuggggca

SEQ ID NO: 1564843 - RNA, 16 nt, Human adenovirus D
gcccacggugguggag

SEQ ID NO: 1564844 - RNA, 14 nt, Human adenovirus D
ugcuucugggcaac

SEQ ID NO: 1564845 - RNA, 21 nt, Human adenovirus D
gcagguuucucaacagcuggg

SEQ ID NO: 1564846 - RNA, 18 nt, Human adenovirus D
ucaugccacgaacagcca

SEQ ID NO: 1564847 - RNA, 22 nt, Human adenovirus D
gaugugcccaaguacuuggaaa

SEQ ID NO: 1564848 - RNA, 15 nt, Human adenovirus D
agacgagcggccgcc

SEQ ID NO: 1564849 - RNA, 19 nt, Human adenovirus D
cgcauccugaucucugcca

SEQ ID NO: 1564850 - RNA, 15 nt, Human adenovirus D
ggagauggaagaugc

SEQ ID NO: 1564851 - RNA, 23 nt, Human adenovirus D
aaagugcuggaggguugaaagau

SEQ ID NO: 1564852 - RNA, 19 nt, Human adenovirus D
aaaaacugcaugcuggaau

SEQ ID NO: 1564853 - RNA, 20 nt, Human adenovirus D
gcaagaccuaccaaugaaaa

SEQ ID NO: 1564854 - RNA, 17 nt, Human adenovirus D
ccuggugcgucgagcac

SEQ ID NO: 1564855 - RNA, 15 nt, Human adenovirus D
ucgcgcaggccgcug

SEQ ID NO: 1564856 - RNA, 12 nt, Human adenovirus D
cagggggguccg

SEQ ID NO: 1564857 - RNA, 16 nt, Human adenovirus D
ggaauccugcacgaga

SEQ ID NO: 1564858 - RNA, 17 nt, Human adenovirus D
cggugaaccugagccag

SEQ ID NO: 1564859 - RNA, 13 nt, Human adenovirus D
agccagaccaagc

SEQ ID NO: 1564860 - RNA, 20 nt, Human adenovirus D
ccgccaaggagcuccucgau

SEQ ID NO: 1564861 - RNA, 11 nt, Human adenovirus D
ucauucaaggc

SEQ ID NO: 1564862 - RNA, 17 nt, Human adenovirus D
gacacugguuuggaacu

SEQ ID NO: 1564863 - RNA, 16 nt, Human adenovirus D
cacucccagcgccgcg

SEQ ID NO: 1564864 - RNA, 13 nt, Human adenovirus D
gagcucugcugcg

SEQ ID NO: 1564865 - RNA, 18 nt, Human adenovirus D
gauuaaaaagcagcacag

SEQ ID NO: 1564866 - RNA, 19 nt, Human adenovirus D
gccccuucgaccguggacg

SEQ ID NO: 1564867 - RNA, 13 nt, Human adenovirus D
cuggucaaaaaca

SEQ ID NO: 1564868 - RNA, 14 nt, Human adenovirus D
ucuaaccuucuuuu

SEQ ID NO: 1564869 - RNA, 22 nt, Human adenovirus D
aggcacugcucuucccuggaga

SEQ ID NO: 1564870 - RNA, 18 nt, Human adenovirus D
caccugcgagcccaaccc

SEQ ID NO: 1564871 - RNA, 21 nt, Human adenovirus D
aagaaccugcgcgggcugugg

SEQ ID NO: 1564872 - RNA, 22 nt, Human adenovirus D
cagcgcccucagcagucucugc

SEQ ID NO: 1564873 - RNA, 14 nt, Human adenovirus D
cggagccucgcucc

SEQ ID NO: 1564874 - RNA, 19 nt, Human adenovirus D
gaaggaagcccagagcucg

SEQ ID NO: 1564875 - RNA, 18 nt, Human adenovirus D
cuucaccgaccuggguca

SEQ ID NO: 1564876 - RNA, 23 nt, Human adenovirus D
gcggagucuuccaugcgggugac

SEQ ID NO: 1564877 - RNA, 14 nt, Human adenovirus D
ugcccuuacaugua

SEQ ID NO: 1564878 - RNA, 20 nt, Human adenovirus D
gcauccugagauaugugcag

SEQ ID NO: 1564879 - RNA, 14 nt, Human adenovirus D
aggaaccaugaagg

SEQ ID NO: 1564880 - RNA, 14 nt, Human adenovirus D
agcucgcgggccau

SEQ ID NO: 1564881 - RNA, 21 nt, Human adenovirus D
uggcggcggccaaccugguga

SEQ ID NO: 1564882 - RNA, 16 nt, Human adenovirus D
gcagcguguucaaaac

SEQ ID NO: 1564883 - RNA, 15 nt, Human adenovirus D
caugcagacucugcu

SEQ ID NO: 1564884 - RNA, 23 nt, Human adenovirus D
ucgaccguggcuucgagcagugg

SEQ ID NO: 1564885 - RNA, 14 nt, Human adenovirus D
cuggaucgaaauca

SEQ ID NO: 1564886 - RNA, 15 nt, Human adenovirus D
gcagcgccccgagga

SEQ ID NO: 1564887 - RNA, 16 nt, Human adenovirus D
guacuucugccagcag

SEQ ID NO: 1564888 - RNA, 15 nt, Human adenovirus D
ccagauugggggacg

SEQ ID NO: 1564889 - RNA, 21 nt, Human adenovirus D
agauguggguuggcuugcaug

SEQ ID NO: 1564890 - RNA, 15 nt, Human adenovirus D
acugcuaccucuugc

SEQ ID NO: 1564891 - RNA, 22 nt, Human adenovirus D
gcaugaaggggacgagcugcuu

SEQ ID NO: 1564892 - RNA, 20 nt, Human adenovirus D
accccgaugacggguugcag

SEQ ID NO: 1564893 - RNA, 17 nt, Human adenovirus D
aggccgucacccugccc

SEQ ID NO: 1564894 - RNA, 16 nt, Human adenovirus D
ugcuuguaccacaaaa

SEQ ID NO: 1564895 - RNA, 21 nt, Human adenovirus D
cugcgccauugucaacacggc

SEQ ID NO: 1564896 - RNA, 21 nt, Human adenovirus D
ggggcgccgccggcggcgagg

SEQ ID NO: 1564897 - RNA, 20 nt, Human adenovirus D
gcugcaaccugugcucuccg

SEQ ID NO: 1564898 - RNA, 12 nt, Human adenovirus D
gucugagggcca

SEQ ID NO: 1564899 - RNA, 13 nt, Human adenovirus D
gccaagacaaagg

SEQ ID NO: 1564900 - RNA, 21 nt, Human adenovirus D
cccgcguaauuggcccuccac

SEQ ID NO: 1564901 - RNA, 20 nt, Human adenovirus D
cggcacggucuggccgguga

SEQ ID NO: 1564902 - RNA, 14 nt, Human adenovirus D
gcccuccacccugg

SEQ ID NO: 1564903 - RNA, 16 nt, Human adenovirus D
auguacaacaugcuga

SEQ ID NO: 1564904 - RNA, 20 nt, Human adenovirus D
ugagcucgucuuccaggagc

SEQ ID NO: 1564905 - RNA, 21 nt, Human adenovirus D
agggggacuuacuuugcaaga

SEQ ID NO: 1564906 - RNA, 17 nt, Human adenovirus D
gaagaccuacgcucagg

SEQ ID NO: 1564907 - RNA, 21 nt, Human adenovirus D
cguagaggcgggugagggcgu

SEQ ID NO: 1564908 - RNA, 18 nt, Human adenovirus D
caggcgccauucggagca

SEQ ID NO: 1564909 - RNA, 21 nt, Human adenovirus D
gucuccugccugggaauccug

SEQ ID NO: 1564910 - RNA, 19 nt, Human adenovirus D
gguccgcgugagggugguc

SEQ ID NO: 1564911 - RNA, 18 nt, Human adenovirus D
cacguuucgucaggcagg

SEQ ID NO: 1564912 - RNA, 22 nt, Human adenovirus D
gccgggguucuauacgggcgag

SEQ ID NO: 1564913 - RNA, 23 nt, Human adenovirus D
ggcaacauccccgcccugcugga

SEQ ID NO: 1564914 - RNA, 13 nt, Human adenovirus D
acagccagcagcu

SEQ ID NO: 1564915 - RNA, 14 nt, Human adenovirus D
gcaggcgcccagcc

SEQ ID NO: 1564916 - RNA, 21 nt, Human adenovirus D
gacuggguuaguaugucccug

SEQ ID NO: 1564917 - RNA, 16 nt, Human adenovirus D
ccuacgcgaccguggg

SEQ ID NO: 1564918 - RNA, 21 nt, Human adenovirus D
acuaauucucaaagugugaaa

SEQ ID NO: 1564919 - RNA, 23 nt, Human adenovirus D
caccuuccguucuacccagcaag

SEQ ID NO: 1564920 - RNA, 14 nt, Human adenovirus D
cuccugccugggaa

SEQ ID NO: 1564921 - RNA, 15 nt, Human adenovirus D
gacgccgaggcucug

SEQ ID NO: 1564922 - RNA, 15 nt, Human adenovirus D
gucauggcuggucag

SEQ ID NO: 1564923 - RNA, 18 nt, Human adenovirus D
gcccugcuggaugugccc

SEQ ID NO: 1564924 - RNA, 15 nt, Human adenovirus D
gccuggugaagggca

SEQ ID NO: 1564925 - RNA, 14 nt, Human adenovirus D
cccguccugcgcca

SEQ ID NO: 1564926 - RNA, 16 nt, Human adenovirus D
uggaccgcggucccag

SEQ ID NO: 1564927 - RNA, 13 nt, Human adenovirus D
uaaauaagucacu

SEQ ID NO: 1564928 - RNA, 18 nt, Human adenovirus D
aggccgugaaggccggca

SEQ ID NO: 1564929 - RNA, 15 nt, Human adenovirus D
cucugcaucugauga

SEQ ID NO: 1564930 - RNA, 16 nt, Human adenovirus D
cagaugguagcagcag

SEQ ID NO: 1564931 - RNA, 19 nt, Human adenovirus D
cucacaguaagugcagcac

SEQ ID NO: 1564932 - RNA, 21 nt, Human adenovirus D
agcucgucuuccaggagccug

SEQ ID NO: 1564933 - RNA, 19 nt, Human adenovirus D
cucguagaaauccacggcg

SEQ ID NO: 1564934 - RNA, 14 nt, Human adenovirus D
guaagugcagcaca

SEQ ID NO: 1564935 - RNA, 18 nt, Human adenovirus D
gccagcgcgugcugcgcg

SEQ ID NO: 1564936 - RNA, 23 nt, Human adenovirus D
gcccugcuggccgagcuggaagc

SEQ ID NO: 1564937 - RNA, 14 nt, Human adenovirus D
uacaacguggccca

SEQ ID NO: 1564938 - RNA, 20 nt, Human adenovirus D
cgaccucggaguaccugagc

SEQ ID NO: 1564939 - RNA, 22 nt, Human adenovirus D
ccgaaauuggugcgcuggggcu

SEQ ID NO: 1564940 - RNA, 20 nt, Human adenovirus D
ggucgaggagaccugcacua

SEQ ID NO: 1564941 - RNA, 18 nt, Human adenovirus D
gccaccucgccgcgcagg

SEQ ID NO: 1564942 - RNA, 13 nt, Human adenovirus D
ccugcucccgggc

SEQ ID NO: 1564943 - RNA, 23 nt, Human adenovirus D
ggugaggaucauaucccagggga

SEQ ID NO: 1564944 - RNA, 21 nt, Human adenovirus D
gacgcccuggccgaccggagc

SEQ ID NO: 1564945 - RNA, 19 nt, Human adenovirus D
cccccaggcccuggagcag

SEQ ID NO: 1564946 - RNA, 22 nt, Human adenovirus D
gcgcgaguagucaaucucccac

SEQ ID NO: 1564947 - RNA, 13 nt, Human adenovirus D
cugccccaggcgg

SEQ ID NO: 1564948 - RNA, 13 nt, Human adenovirus D
acccacaccgccu

SEQ ID NO: 1564949 - RNA, 17 nt, Human adenovirus D
caugccccaggccuggc

SEQ ID NO: 1564950 - RNA, 15 nt, Human adenovirus D
cgcccgccgccaggc

SEQ ID NO: 1564951 - RNA, 15 nt, Human adenovirus D
gcccgccgccaggcc

SEQ ID NO: 1564952 - RNA, 18 nt, Human adenovirus D
cauggcaagcugccaugg

SEQ ID NO: 1564953 - RNA, 13 nt, Human adenovirus D
ucucaacaucaca

SEQ ID NO: 1564954 - RNA, 14 nt, Human adenovirus D
cuuuccagcagcag

SEQ ID NO: 1564955 - RNA, 21 nt, Human adenovirus D
gcugcuagagugccacugccg

SEQ ID NO: 1564956 - RNA, 18 nt, Human adenovirus D
cacugccgccgccugcgc

SEQ ID NO: 1564957 - RNA, 18 nt, Human adenovirus D
ccgugcacuuggggaacu

SEQ ID NO: 1564958 - RNA, 17 nt, Human adenovirus D
gaaaacuuuaaugcucc

SEQ ID NO: 1564959 - RNA, 12 nt, Human adenovirus D
aucgccgagccc

SEQ ID NO: 1564960 - RNA, 17 nt, Human adenovirus D
gcucggucgggacgaga

SEQ ID NO: 1564961 - RNA, 15 nt, Human adenovirus D
ggucugcuccugcac

SEQ ID NO: 1564962 - RNA, 15 nt, Human adenovirus D
ucacucuggccgugg

SEQ ID NO: 1564963 - RNA, 16 nt, Human adenovirus D
gagccgaacgagcaga

SEQ ID NO: 1564964 - RNA, 17 nt, Human adenovirus D
gaaggcuuucacagcuu

SEQ ID NO: 1564965 - RNA, 20 nt, Human adenovirus D
cagcggccugaaccgccgcc

SEQ ID NO: 1564966 - RNA, 15 nt, Human adenovirus D
caacagccuucagca

SEQ ID NO: 1564967 - RNA, 18 nt, Human adenovirus D
acgcacgggccgccgggc

SEQ ID NO: 1564968 - RNA, 19 nt, Human adenovirus D
uugaauuuguauggaauaa

SEQ ID NO: 1564969 - RNA, 14 nt, Human adenovirus D
cguguucaaaacaa

SEQ ID NO: 1564970 - RNA, 15 nt, Human adenovirus D
agccucccaggaggc

SEQ ID NO: 1564971 - RNA, 15 nt, Human adenovirus D
cccaggcggugcugc

SEQ ID NO: 1564972 - RNA, 16 nt, Human adenovirus D
gucgcuggcugcugga

SEQ ID NO: 1564973 - RNA, 19 nt, Human adenovirus D
ccuauaaaaacaacaaaac

SEQ ID NO: 1564974 - RNA, 21 nt, Human adenovirus D
gcaguagccccucugugccca

SEQ ID NO: 1564975 - RNA, 18 nt, Human adenovirus D
cccaggcggugcugcugc

SEQ ID NO: 1564976 - RNA, 17 nt, Human adenovirus D
gcaggcgcuggaagagg

SEQ ID NO: 1564977 - RNA, 19 nt, Human adenovirus D
gcuagacauggccagcacg

SEQ ID NO: 1564978 - RNA, 16 nt, Human adenovirus D
cgcccgccgccaggcc

SEQ ID NO: 1564979 - RNA, 15 nt, Human adenovirus D
ucuggacccccagac

SEQ ID NO: 1564980 - RNA, 17 nt, Human adenovirus D
ucgauggugaagaugcc

SEQ ID NO: 1564981 - RNA, 14 nt, Human adenovirus D
gcuccguggggcgc

SEQ ID NO: 1564982 - RNA, 22 nt, Human adenovirus D
cagugcaacuuuagccagacca

SEQ ID NO: 1564983 - RNA, 22 nt, Human adenovirus D
aacagauccugcugcuccacca

SEQ ID NO: 1564984 - RNA, 22 nt, Human adenovirus D
cggcgcagcuguuccugguggu

SEQ ID NO: 1564985 - RNA, 18 nt, Human adenovirus D
gagguacaugggcaugag

SEQ ID NO: 1564986 - RNA, 15 nt, Human adenovirus D
ggugagggggucccg

SEQ ID NO: 1564987 - RNA, 23 nt, Human adenovirus D
aacugcgcguccgucagcagcag

SEQ ID NO: 1564988 - RNA, 19 nt, Human adenovirus D
cagaaggggcaccuuccag

SEQ ID NO: 1564989 - RNA, 23 nt, Human adenovirus D
gccgagcuggaagcccugagccg

SEQ ID NO: 1564990 - RNA, 17 nt, Human adenovirus D
cacucuuuccagcagca

SEQ ID NO: 1564991 - RNA, 17 nt, Human adenovirus D
cagaccgaccccuggcu

SEQ ID NO: 1564992 - RNA, 20 nt, Human adenovirus D
gcccgaguuguccugguagg

SEQ ID NO: 1564993 - RNA, 20 nt, Human adenovirus D
aacacacacgcccugggugu

SEQ ID NO: 1564994 - RNA, 20 nt, Human adenovirus D
cagcggcgcaagcucaugcu

SEQ ID NO: 1564995 - RNA, 16 nt, Human adenovirus D
ccgcgggaucaagcgc

SEQ ID NO: 1564996 - RNA, 22 nt, Human adenovirus D
caugccccaggccuggcccuga

SEQ ID NO: 1564997 - RNA, 13 nt, Human adenovirus D
gcgcaacugggcc

SEQ ID NO: 1564998 - RNA, 17 nt, Human adenovirus D
gcccaacggcaccugcg

SEQ ID NO: 1564999 - RNA, 21 nt, Human adenovirus D
ucaucgcgccacuggccacgg

SEQ ID NO: 1565000 - RNA, 15 nt, Human adenovirus D
ccugugggaccuggc

SEQ ID NO: 1565001 - RNA, 19 nt, Human adenovirus D
cggcaugaaauugcgggug

SEQ ID NO: 1565002 - RNA, 15 nt, Human adenovirus D
cauugucugccuggu

SEQ ID NO: 1565003 - RNA, 22 nt, Human adenovirus D
uggagggcaugggucaggcagc

SEQ ID NO: 1565004 - RNA, 16 nt, Human adenovirus D
cgccaccaugagcaag

SEQ ID NO: 1565005 - RNA, 23 nt, Human adenovirus D
ugcagaacccggacagcaagccu

SEQ ID NO: 1565006 - RNA, 16 nt, Human adenovirus D
gcgcaggcgcuggaag

SEQ ID NO: 1565007 - RNA, 22 nt, Human adenovirus D
gccgggccaugaugcgagccgc

SEQ ID NO: 1565008 - RNA, 16 nt, Human adenovirus D
cugcaaaaagucacuu

SEQ ID NO: 1565009 - RNA, 20 nt, Human adenovirus D
ccaggccuccgagcagcgca

SEQ ID NO: 1565010 - RNA, 14 nt, Human adenovirus D
ggaugaggaagagg

SEQ ID NO: 1565011 - RNA, 21 nt, Human adenovirus D
acugcaccccccgcaggcagg

SEQ ID NO: 1565012 - RNA, 15 nt, Human adenovirus D
gcucaggaccauagg

SEQ ID NO: 1565013 - RNA, 21 nt, Human adenovirus D
gagcaggguaaagccagcagc

SEQ ID NO: 1565014 - RNA, 16 nt, Human adenovirus D
ugucgccgauggccuc

SEQ ID NO: 1565015 - RNA, 17 nt, Human adenovirus D
cggccgaaaaccccgcc

SEQ ID NO: 1565016 - RNA, 17 nt, Human adenovirus D
uucaaaacucacuuugg

SEQ ID NO: 1565017 - RNA, 15 nt, Human adenovirus D
cgccggcucaucugc

SEQ ID NO: 1565018 - RNA, 20 nt, Human adenovirus D
cagagggggcgguggcagga

SEQ ID NO: 1565019 - RNA, 20 nt, Human adenovirus D
cauccuggaccaggcggcag

SEQ ID NO: 1565020 - RNA, 18 nt, Human adenovirus D
ccgggccugggcgugcag

SEQ ID NO: 1565021 - RNA, 20 nt, Human adenovirus D
ggagauuuacggaccacccc

SEQ ID NO: 1565022 - RNA, 20 nt, Human adenovirus D
gcgccggggccgcucgcucg

SEQ ID NO: 1565023 - RNA, 13 nt, Human adenovirus D
ggccgccgggcca

SEQ ID NO: 1565024 - RNA, 15 nt, Human adenovirus D
gaaaugcuaccuggg

SEQ ID NO: 1565025 - RNA, 14 nt, Human adenovirus D
cagcuacaccuccc

SEQ ID NO: 1565026 - RNA, 13 nt, Human adenovirus D
cgaggaggagcgc

SEQ ID NO: 1565027 - RNA, 15 nt, Human adenovirus D
aaagcugaggauggc

SEQ ID NO: 1565028 - RNA, 14 nt, Human adenovirus D
ccacgcgcucgaca

SEQ ID NO: 1565029 - RNA, 20 nt, Human adenovirus D
cuggacccgcggccgcccac

SEQ ID NO: 1565030 - RNA, 14 nt, Human adenovirus D
cgcgagcugaugcu

SEQ ID NO: 1565031 - RNA, 20 nt, Human adenovirus D
ggccaaucagcaguagcccc

SEQ ID NO: 1565032 - RNA, 14 nt, Human adenovirus D
aggagcaggaggag

SEQ ID NO: 1565033 - RNA, 21 nt, Human adenovirus D
gugcccaaguacuuggaaagc

SEQ ID NO: 1565034 - RNA, 15 nt, Human adenovirus D
ugcaguuggccauga

SEQ ID NO: 1565035 - RNA, 19 nt, Human adenovirus D
ccauggacaacgucaaccc

SEQ ID NO: 1565036 - RNA, 15 nt, Human adenovirus D
acugaaaauuugcaa

SEQ ID NO: 1565037 - RNA, 14 nt, Human adenovirus D
gugcugacauccau

SEQ ID NO: 1565038 - RNA, 22 nt, Human adenovirus D
cucucugaagcauaauauggug

SEQ ID NO: 1565039 - RNA, 17 nt, Human adenovirus D
gugcacucccaguucuu

SEQ ID NO: 1565040 - RNA, 23 nt, Human adenovirus D
ggcgaacgugccgcgcgggcagg

SEQ ID NO: 1565041 - RNA, 23 nt, Human adenovirus D
cccagcaauaacaccggcugggg

SEQ ID NO: 1565042 - RNA, 18 nt, Human adenovirus D
aaugcaggauccagcgcu

SEQ ID NO: 1565043 - RNA, 23 nt, Human adenovirus D
cucguacaaggcgcgcuucacuc

SEQ ID NO: 1565044 - RNA, 20 nt, Human adenovirus D
cccaacucgcggcugcugcu

SEQ ID NO: 1565045 - RNA, 19 nt, Human adenovirus D
cccggacgucaccugcggc

SEQ ID NO: 1565046 - RNA, 20 nt, Human adenovirus D
gagccgcuaguggaagagau

SEQ ID NO: 1565047 - RNA, 19 nt, Human adenovirus D
gagguacaugggcaugagc

SEQ ID NO: 1565048 - RNA, 13 nt, Human adenovirus D
cgcuguggagcca

SEQ ID NO: 1565049 - RNA, 13 nt, Human adenovirus D
uaguccagcagag

SEQ ID NO: 1565050 - RNA, 15 nt, Human adenovirus D
agaacggggugcagu

SEQ ID NO: 1565051 - RNA, 17 nt, Human adenovirus D
gcgguagagcggccagc

SEQ ID NO: 1565052 - RNA, 21 nt, Human adenovirus D
cgucacggugaaggggugggc

SEQ ID NO: 1565053 - RNA, 21 nt, Human adenovirus D
guucaaaacaacaagauucaa

SEQ ID NO: 1565054 - RNA, 18 nt, Human adenovirus D
caaugucaggucugcugg

SEQ ID NO: 1565055 - RNA, 15 nt, Human adenovirus D
ucgagagcgggcaug

SEQ ID NO: 1565056 - RNA, 12 nt, Human adenovirus D
gaucucugccau

SEQ ID NO: 1565057 - RNA, 14 nt, Human adenovirus D
gcucaaccucuucu

SEQ ID NO: 1565058 - RNA, 17 nt, Human adenovirus D
cagggcgaagguguccc

SEQ ID NO: 1565059 - RNA, 17 nt, Human adenovirus D
ccacgcugguggccacc

SEQ ID NO: 1565060 - RNA, 15 nt, Human adenovirus D
uucagccugggcaac

SEQ ID NO: 1565061 - RNA, 16 nt, Human adenovirus D
ggcgggcagggagcug

SEQ ID NO: 1565062 - RNA, 12 nt, Human adenovirus D
cucucagcacgg

SEQ ID NO: 1565063 - RNA, 21 nt, Human adenovirus D
gcacaguuggcgacccaggaa

SEQ ID NO: 1565064 - RNA, 13 nt, Human adenovirus D
caucgugcagaac

SEQ ID NO: 1565065 - RNA, 22 nt, Human adenovirus D
ggucugucauauccugaagaac

SEQ ID NO: 1565066 - RNA, 13 nt, Human adenovirus D
gcagucucugccg

SEQ ID NO: 1565067 - RNA, 22 nt, Human adenovirus D
ccagcugaacgggggcgccuuc

SEQ ID NO: 1565068 - RNA, 21 nt, Human adenovirus D
ccccucaucacaucagccagg

SEQ ID NO: 1565069 - RNA, 20 nt, Human adenovirus D
gcacccgcugcgggguacug

SEQ ID NO: 1565070 - RNA, 21 nt, Human adenovirus D
caacccgggucucccccagca

SEQ ID NO: 1565071 - RNA, 21 nt, Human adenovirus D
ccuacaaguacacgccggcca

SEQ ID NO: 1565072 - RNA, 16 nt, Human adenovirus D
cggcagcggggccugg

SEQ ID NO: 1565073 - RNA, 13 nt, Human adenovirus D
ccagcuggccgcc

SEQ ID NO: 1565074 - RNA, 20 nt, Human adenovirus D
agucacuaggaccccaggga

SEQ ID NO: 1565075 - RNA, 19 nt, Human adenovirus D
acgugcccaucuccauccc

SEQ ID NO: 1565076 - RNA, 21 nt, Human adenovirus D
ggaggagaccgacgcugggcu

SEQ ID NO: 1565077 - RNA, 23 nt, Human adenovirus D
cgcugggcucgagcauggcuacc

SEQ ID NO: 1565078 - RNA, 17 nt, Human adenovirus D
ucucugaaucucggcca

SEQ ID NO: 1565079 - RNA, 23 nt, Human adenovirus D
ugcuccaggucgucgccccggag

SEQ ID NO: 1565080 - RNA, 21 nt, Human adenovirus D
caccgagucucaccugguuag

SEQ ID NO: 1565081 - RNA, 18 nt, Human adenovirus D
aggcauauaaaaaugcag

SEQ ID NO: 1565082 - RNA, 18 nt, Human adenovirus D
gcagguggacgagcagac

SEQ ID NO: 1565083 - RNA, 19 nt, Human adenovirus D
gggugcuagacauggccag

SEQ ID NO: 1565084 - RNA, 21 nt, Human adenovirus D
uaugguacuaaugacagaggc

SEQ ID NO: 1565085 - RNA, 18 nt, Human adenovirus D
cagcccauuucacagugu

SEQ ID NO: 1565086 - RNA, 15 nt, Human adenovirus D
gcuaaucaugcccca

SEQ ID NO: 1565087 - RNA, 22 nt, Human adenovirus D
uggcggagaacaaggccauccg

SEQ ID NO: 1565088 - RNA, 15 nt, Human adenovirus D
ccagcaacccuuccu

SEQ ID NO: 1565089 - RNA, 15 nt, Human adenovirus D
cagcacagcagggac

SEQ ID NO: 1565090 - RNA, 17 nt, Human adenovirus D
guagcggggcacaggca

SEQ ID NO: 1565091 - RNA, 13 nt, Human adenovirus D
augaucccaacag

SEQ ID NO: 1565092 - RNA, 12 nt, Human adenovirus D
caauacucuggg

SEQ ID NO: 1565093 - RNA, 22 nt, Human adenovirus D
cgacgaguuggugagcucuuca

SEQ ID NO: 1565094 - RNA, 15 nt, Human adenovirus D
uucaaaaacuucccc

SEQ ID NO: 1565095 - RNA, 21 nt, Human adenovirus D
gugaacaaaacccaugaaaga

SEQ ID NO: 1565096 - RNA, 11 nt, Human adenovirus D
ucggagccccu

SEQ ID NO: 1565097 - RNA, 21 nt, Human adenovirus D
agcgcgcgucauggcugguca

SEQ ID NO: 1565098 - RNA, 19 nt, Human adenovirus D
ggaggcgaagauggggccc

SEQ ID NO: 1565099 - RNA, 22 nt, Human adenovirus D
auaucauaaagauggauggaaa

SEQ ID NO: 1565100 - RNA, 21 nt, Human adenovirus D
cgugaucccacagggcacugc

SEQ ID NO: 1565101 - RNA, 15 nt, Human adenovirus D
cgcccugcuggagcg

SEQ ID NO: 1565102 - RNA, 16 nt, Human adenovirus D
cacagcaguccaugcc

SEQ ID NO: 1565103 - RNA, 19 nt, Human adenovirus D
gaaucgcaagcgcccagag

SEQ ID NO: 1565104 - RNA, 20 nt, Human adenovirus D
cauaccugauauugcuuccc

SEQ ID NO: 1565105 - RNA, 23 nt, Human adenovirus D
ggcgaccggucgacggugagcag

SEQ ID NO: 1565106 - RNA, 17 nt, Human adenovirus D
gccgugagcgcgagccg

SEQ ID NO: 1565107 - RNA, 17 nt, Human adenovirus D
gcgugcuggagagcgau

SEQ ID NO: 1565108 - RNA, 17 nt, Human adenovirus D
guggcgccgggccuggg

SEQ ID NO: 1565109 - RNA, 17 nt, Human adenovirus D
caggcggugcugcugcc

SEQ ID NO: 1565110 - RNA, 20 nt, Human adenovirus D
gugggccccuggcugggcgc

SEQ ID NO: 1565111 - RNA, 22 nt, Human adenovirus D
cgggcggcgaacuuucuccaca

SEQ ID NO: 1565112 - RNA, 20 nt, Human adenovirus D
gacgucccagagcucgguga

SEQ ID NO: 1565113 - RNA, 14 nt, Human adenovirus D
gaaaaaauugagga

SEQ ID NO: 1565114 - RNA, 22 nt, Human adenovirus D
ucccgccgcaggagaggcaugg

SEQ ID NO: 1565115 - RNA, 15 nt, Human adenovirus D
cgucgcuugacagca

SEQ ID NO: 1565116 - RNA, 14 nt, Human adenovirus D
ccaugugcgcaccc

SEQ ID NO: 1565117 - RNA, 19 nt, Human adenovirus D
ugguggcgcgcaccucgcg

SEQ ID NO: 1565118 - RNA, 20 nt, Human adenovirus D
cugccgccggggcucggugc

SEQ ID NO: 1565119 - RNA, 15 nt, Human adenovirus D
agaaccugcgcgggc

SEQ ID NO: 1565120 - RNA, 14 nt, Human adenovirus D
ccggcggcagcggc

SEQ ID NO: 1565121 - RNA, 14 nt, Human adenovirus D
ccauuccuggagau

SEQ ID NO: 1565122 - RNA, 13 nt, Human adenovirus D
acagcacagcagg

SEQ ID NO: 1565123 - RNA, 14 nt, Human adenovirus D
cugagccugcgccg

SEQ ID NO: 1565124 - RNA, 16 nt, Human adenovirus D
uggugcgucgagcaca

SEQ ID NO: 1565125 - RNA, 17 nt, Human adenovirus D
cgcgggcggacugccac

SEQ ID NO: 1565126 - RNA, 21 nt, Human adenovirus D
agcugcaagguccgcaggagu

SEQ ID NO: 1565127 - RNA, 15 nt, Human adenovirus D
ugaaaucugaaagua

SEQ ID NO: 1565128 - RNA, 12 nt, Human adenovirus D
ccagccagcaaa

SEQ ID NO: 1565129 - RNA, 15 nt, Human adenovirus D
gacaccacagugcag

SEQ ID NO: 1565130 - RNA, 19 nt, Human adenovirus D
cagacggugaagcaggagc

SEQ ID NO: 1565131 - RNA, 13 nt, Human adenovirus D
uugcccgcgccac

SEQ ID NO: 1565132 - RNA, 15 nt, Human adenovirus D
gaugauaccaagaga

SEQ ID NO: 1565133 - RNA, 16 nt, Human adenovirus D
accucuacgccaccuu

SEQ ID NO: 1565134 - RNA, 20 nt, Human adenovirus D
ggagccgcuaguggaagaga

SEQ ID NO: 1565135 - RNA, 19 nt, Human adenovirus D
acucccagcgccgcgcugg

SEQ ID NO: 1565136 - RNA, 22 nt, Human adenovirus D
uccugucacucaaacuggcuga

SEQ ID NO: 1565137 - RNA, 16 nt, Human adenovirus D
agcccugcgcccagau

SEQ ID NO: 1565138 - RNA, 19 nt, Human adenovirus D
aucucccaccaccagccca

SEQ ID NO: 1565139 - RNA, 16 nt, Human adenovirus D
ccaagaucaggggaug

SEQ ID NO: 1565140 - RNA, 17 nt, Human adenovirus D
uggaaaaguggaagaag

SEQ ID NO: 1565141 - RNA, 19 nt, Human adenovirus D
aaguacuacugaacagaca

SEQ ID NO: 1565142 - RNA, 23 nt, Human adenovirus D
gcagcaccucgguacccuccucc

SEQ ID NO: 1565143 - RNA, 14 nt, Human adenovirus D
ucacaggaggcaca

SEQ ID NO: 1565144 - RNA, 20 nt, Human adenovirus D
ccugggcauucgcaagaagc

SEQ ID NO: 1565145 - RNA, 14 nt, Human adenovirus D
acgacucgcugcug

SEQ ID NO: 1565146 - RNA, 18 nt, Human adenovirus D
ccuucagcaucagucucc

SEQ ID NO: 1565147 - RNA, 16 nt, Human adenovirus D
aggcauucacauacac

SEQ ID NO: 1565148 - RNA, 19 nt, Human adenovirus D
ggcuuacaacagccuugcc

SEQ ID NO: 1565149 - RNA, 15 nt, Human adenovirus D
aucagacaugcugcu

SEQ ID NO: 1565150 - RNA, 13 nt, Human adenovirus D
gaucucgcugccg

SEQ ID NO: 1565151 - RNA, 22 nt, Human adenovirus D
auuaacuuuuguuuacuuugug

SEQ ID NO: 1565152 - RNA, 21 nt, Human adenovirus D
cauaauuaugcuccuggguga

SEQ ID NO: 1565153 - RNA, 18 nt, Human adenovirus D
gccuacuuuuugggcacc

SEQ ID NO: 1565154 - RNA, 14 nt, Human adenovirus D
cggcugcugcaaau

SEQ ID NO: 1565155 - RNA, 15 nt, Human adenovirus D
ccgucuacugcaucu

SEQ ID NO: 1565156 - RNA, 12 nt, Human adenovirus D
auaucagccagu

SEQ ID NO: 1565157 - RNA, 20 nt, Human adenovirus D
ucuuccuccguagccuggcg

SEQ ID NO: 1565158 - RNA, 14 nt, Human adenovirus D
uccaguaggaacca

SEQ ID NO: 1565159 - RNA, 24 nt, Human adenovirus D
caaaaaugaagcccugcuauggcu

SEQ ID NO: 1565160 - RNA, 18 nt, Human adenovirus D
auugcuucccuggaagag

SEQ ID NO: 1565161 - RNA, 23 nt, Human adenovirus D
ugaccgagcugacggccagucug

SEQ ID NO: 1565162 - RNA, 15 nt, Human adenovirus D
agcauauaccccucc

SEQ ID NO: 1565163 - RNA, 18 nt, Human adenovirus D
agccauugaccaccaggg

SEQ ID NO: 1565164 - RNA, 21 nt, Human adenovirus D
uguugcaugaugggaaugaga

SEQ ID NO: 1565165 - RNA, 16 nt, Human adenovirus D
aggacgaguaccugaa

SEQ ID NO: 1565166 - RNA, 23 nt, Human adenovirus D
gucgcuagacuugaaagcggccg

SEQ ID NO: 1565167 - RNA, 15 nt, Human adenovirus D
cugcugcagccgccg

SEQ ID NO: 1565168 - RNA, 20 nt, Human adenovirus D
cacccuggaagccaugcugc

SEQ ID NO: 1565169 - RNA, 17 nt, Human adenovirus D
acaccagacacaucucc

SEQ ID NO: 1565170 - RNA, 22 nt, Human adenovirus D
cagcacaacaacucgggcuuca

SEQ ID NO: 1565171 - RNA, 21 nt, Human adenovirus D
acgcagccggcgaacgugccg

SEQ ID NO: 1565172 - RNA, 15 nt, Human adenovirus D
gcaaacaauaaaaaa

SEQ ID NO: 1565173 - RNA, 23 nt, Human adenovirus D
ugucagaugguuuuccaaaauca

SEQ ID NO: 1565174 - RNA, 15 nt, Human adenovirus D
ucggagcuggcuccg

SEQ ID NO: 1565175 - RNA, 14 nt, Human adenovirus D
gaagcaucgccagg

SEQ ID NO: 1565176 - RNA, 22 nt, Human adenovirus D
gucacacuagcgcccugguaga

SEQ ID NO: 1565177 - RNA, 19 nt, Human adenovirus D
ggcgggggugaugagcugc

SEQ ID NO: 1565178 - RNA, 17 nt, Human adenovirus D
gacguggugcugcugcc

SEQ ID NO: 1565179 - RNA, 19 nt, Human adenovirus D
ugaccgaggagcugagacc

SEQ ID NO: 1565180 - RNA, 14 nt, Human adenovirus D
acucacgccggggu

SEQ ID NO: 1565181 - RNA, 16 nt, Human adenovirus D
ggaggagacugauggc

SEQ ID NO: 1565182 - RNA, 17 nt, Human adenovirus D
cagacacaucuccuaau

SEQ ID NO: 1565183 - RNA, 17 nt, Human adenovirus D
ggagucuugcagcuugg

SEQ ID NO: 1565184 - RNA, 20 nt, Human adenovirus D
agggcgcgcaguugggagcu

SEQ ID NO: 1565185 - RNA, 12 nt, Human adenovirus D
ugcuccagccaa

SEQ ID NO: 1565186 - RNA, 18 nt, Human adenovirus D
uggcccugacgacccgca

SEQ ID NO: 1565187 - RNA, 18 nt, Human adenovirus D
cccgagggcuacaaggac

SEQ ID NO: 1565188 - RNA, 14 nt, Human adenovirus D
gcccuugccaccua

SEQ ID NO: 1565189 - RNA, 21 nt, Human adenovirus D
cggccuacgagcagacgguga

SEQ ID NO: 1565190 - RNA, 18 nt, Human adenovirus D
caacuggucuccugccug

SEQ ID NO: 1565191 - RNA, 13 nt, Human adenovirus D
gagaccugcacua

SEQ ID NO: 1565192 - RNA, 13 nt, Human adenovirus D
agaaguuccucug

SEQ ID NO: 1565193 - RNA, 16 nt, Human adenovirus D
guccgugugauuaaaa

SEQ ID NO: 1565194 - RNA, 22 nt, Human adenovirus D
cccgagggucgcuggcugcugg

SEQ ID NO: 1565195 - RNA, 17 nt, Human adenovirus D
caaccccauagucauca

SEQ ID NO: 1565196 - RNA, 22 nt, Human adenovirus D
uccagcagcaggguacccacug

SEQ ID NO: 1565197 - RNA, 15 nt, Human adenovirus D
gcucgacgcuccgga

SEQ ID NO: 1565198 - RNA, 14 nt, Human adenovirus D
aagcugccaugggc

SEQ ID NO: 1565199 - RNA, 16 nt, Human adenovirus D
cugacacaccuggucc

SEQ ID NO: 1565200 - RNA, 20 nt, Human adenovirus D
gguccugcaagaggagacag

SEQ ID NO: 1565201 - RNA, 14 nt, Human adenovirus D
uuucacagcuugcg

SEQ ID NO: 1565202 - RNA, 19 nt, Human adenovirus D
cgaggagcaccccaacggc

SEQ ID NO: 1565203 - RNA, 12 nt, Human adenovirus D
cacgcgggugag

SEQ ID NO: 1565204 - RNA, 16 nt, Human adenovirus D
ucccacgccgagccug

SEQ ID NO: 1565205 - RNA, 18 nt, Human adenovirus D
ugaacgacucgcugcugc

SEQ ID NO: 1565206 - RNA, 12 nt, Human adenovirus D
acucgcugcugc

SEQ ID NO: 1565207 - RNA, 21 nt, Human adenovirus D
cgcgagggccuggaccgccag

SEQ ID NO: 1565208 - RNA, 15 nt, Human adenovirus D
uccacgagcgccagc

SEQ ID NO: 1565209 - RNA, 23 nt, Human adenovirus D
agcagguggcgccgggccugggc

SEQ ID NO: 1565210 - RNA, 12 nt, Human adenovirus D
cgucgcaucaug

SEQ ID NO: 1565211 - RNA, 23 nt, Human adenovirus D
ugggaugcugcccgccaccugca

SEQ ID NO: 1565212 - RNA, 22 nt, Human adenovirus D
uaacuaugaucccaacagccuu

SEQ ID NO: 1565213 - RNA, 17 nt, Human adenovirus D
ugauuuuuacaccagcg

SEQ ID NO: 1565214 - RNA, 15 nt, Human adenovirus D
uaaaaguaaacacua

SEQ ID NO: 1565215 - RNA, 20 nt, Human adenovirus D
cucgagcuacaugcccagca

SEQ ID NO: 1565216 - RNA, 18 nt, Human adenovirus D
ugcugacgggggugccca

SEQ ID NO: 1565217 - RNA, 21 nt, Human adenovirus D
ggggcagacacaccaggaugc

SEQ ID NO: 1565218 - RNA, 13 nt, Human adenovirus D
ugggacagccagc

SEQ ID NO: 1565219 - RNA, 14 nt, Human adenovirus D
cugaagcgccgccg

SEQ ID NO: 1565220 - RNA, 19 nt, Human adenovirus D
caucggcuaccagggcuuc

SEQ ID NO: 1565221 - RNA, 12 nt, Human adenovirus D
auggcaggcagc

SEQ ID NO: 1565222 - RNA, 22 nt, Human adenovirus D
gcgacacccccgcgugcagcug

SEQ ID NO: 1565223 - RNA, 17 nt, Human adenovirus D
acggcaucuuccugggg

SEQ ID NO: 1565224 - RNA, 18 nt, Human adenovirus D
cccaacuacguguugcau

SEQ ID NO: 1565225 - RNA, 15 nt, Human adenovirus D
cagaguaagaggagu

SEQ ID NO: 1565226 - RNA, 19 nt, Human adenovirus D
gcgccucaaugucagcugc

SEQ ID NO: 1565227 - RNA, 13 nt, Human adenovirus D
cugcgagaggagu

SEQ ID NO: 1565228 - RNA, 15 nt, Human adenovirus D
uccuggaccaggcgg

SEQ ID NO: 1565229 - RNA, 13 nt, Human adenovirus D
cauaaucaggcag

SEQ ID NO: 1565230 - RNA, 22 nt, Human adenovirus D
acguggugcugcugccgggcug

SEQ ID NO: 1565231 - RNA, 16 nt, Human adenovirus D
caccauccgcgccgca

SEQ ID NO: 1565232 - RNA, 18 nt, Human adenovirus D
aggaugugcugcugaaac

SEQ ID NO: 1565233 - RNA, 22 nt, Human adenovirus D
gucuggcacaucuuuuggaaga

SEQ ID NO: 1565234 - RNA, 15 nt, Human adenovirus D
cccuggagguuccgu

SEQ ID NO: 1565235 - RNA, 16 nt, Human adenovirus D
aacaucaccacaggca

SEQ ID NO: 1565236 - RNA, 20 nt, Human adenovirus D
gagcgcccauuccuggagau

SEQ ID NO: 1565237 - RNA, 15 nt, Human adenovirus D
ggaugcgugagggcg

SEQ ID NO: 1565238 - RNA, 21 nt, Human adenovirus D
auggcuaccugggaggagagg

SEQ ID NO: 1565239 - RNA, 19 nt, Human adenovirus D
gccaucaagaaccugcucc

SEQ ID NO: 1565240 - RNA, 17 nt, Human adenovirus D
aguaccugagccgcgag

SEQ ID NO: 1565241 - RNA, 14 nt, Human adenovirus D
aagcaucgcgcagg

SEQ ID NO: 1565242 - RNA, 15 nt, Human adenovirus D
gccgggguuguggac

SEQ ID NO: 1565243 - RNA, 14 nt, Human adenovirus D
gaacuggcagagca

SEQ ID NO: 1565244 - RNA, 13 nt, Human adenovirus D
gcuggacgagagc

SEQ ID NO: 1565245 - RNA, 19 nt, Human adenovirus D
gagcuggaagcccugagcc

SEQ ID NO: 1565246 - RNA, 14 nt, Human adenovirus D
cuucugggcaacgg

SEQ ID NO: 1565247 - RNA, 19 nt, Human adenovirus D
auagcuuccguugcgcugc

SEQ ID NO: 1565248 - RNA, 17 nt, Human adenovirus D
ccucuucucgccgcgcg

SEQ ID NO: 1565249 - RNA, 13 nt, Human adenovirus D
cucugcgcgcgcg

SEQ ID NO: 1565250 - RNA, 17 nt, Human adenovirus D
agcagcuugcgcgcugg

SEQ ID NO: 1565251 - RNA, 15 nt, Human adenovirus D
aggcgggugagggcg

SEQ ID NO: 1565252 - RNA, 17 nt, Human adenovirus D
gcagcgccccgaggaca

SEQ ID NO: 1565253 - RNA, 14 nt, Human adenovirus D
gaccaagcugcugu

SEQ ID NO: 1565254 - RNA, 19 nt, Human adenovirus D
agcgcauguacaacaugcu

SEQ ID NO: 1565255 - RNA, 22 nt, Human adenovirus D
gccacugcaccccccgcaggca

SEQ ID NO: 1565256 - RNA, 13 nt, Human adenovirus D
uggccccggggcg

SEQ ID NO: 1565257 - RNA, 21 nt, Human adenovirus D
gcgacccaugagcugcgagaa

SEQ ID NO: 1565258 - RNA, 20 nt, Human adenovirus D
ugcagacacuugagcuggcc

SEQ ID NO: 1565259 - RNA, 15 nt, Human adenovirus D
agcacugcaaauuua

SEQ ID NO: 1565260 - RNA, 16 nt, Human adenovirus D
ccugcuccugcucccg

SEQ ID NO: 1565261 - RNA, 18 nt, Human adenovirus D
cccccaagggcgcuccca

SEQ ID NO: 1565262 - RNA, 23 nt, Human adenovirus D
ccgaccuugcaaaagcgccagga

SEQ ID NO: 1565263 - RNA, 12 nt, Human adenovirus D
acccgccacccu

SEQ ID NO: 1565264 - RNA, 20 nt, Human adenovirus D
cuuuuuauauguugacaaua

SEQ ID NO: 1565265 - RNA, 19 nt, Human adenovirus D
cugaacgggggcgccuuca

SEQ ID NO: 1565266 - RNA, 13 nt, Human adenovirus D
acgaacagccacg

SEQ ID NO: 1565267 - RNA, 17 nt, Human adenovirus D
cccgugaccugcagcag

SEQ ID NO: 1565268 - RNA, 15 nt, Human adenovirus D
gcgaagaggagcuga

SEQ ID NO: 1565269 - RNA, 16 nt, Human adenovirus D
ugccgcgcgggcagga

SEQ ID NO: 1565270 - RNA, 14 nt, Human adenovirus D
guccuugccuuccu

SEQ ID NO: 1565271 - RNA, 13 nt, Human adenovirus D
cagggagccaggg

SEQ ID NO: 1565272 - RNA, 16 nt, Human adenovirus D
cucugaaaagucaucc

SEQ ID NO: 1565273 - RNA, 13 nt, Human adenovirus D
cggaggagccaag

SEQ ID NO: 1565274 - RNA, 20 nt, Human adenovirus D
aggaggcuauuaagaaguau

SEQ ID NO: 1565275 - RNA, 13 nt, Human adenovirus D
cggcgggggcgga

SEQ ID NO: 1565276 - RNA, 16 nt, Human adenovirus D
auguacuacaacagua

SEQ ID NO: 1565277 - RNA, 14 nt, Human adenovirus D
guuagagaugaggc

SEQ ID NO: 1565278 - RNA, 16 nt, Human adenovirus D
cacaggaggcacagac

SEQ ID NO: 1565279 - RNA, 10 nt, Human adenovirus D
acuacagccg

SEQ ID NO: 1565280 - RNA, 16 nt, Human adenovirus D
aagcgggccucacagu

SEQ ID NO: 1565281 - RNA, 15 nt, Human adenovirus D
gaugaguugggccug

SEQ ID NO: 1565282 - RNA, 14 nt, Human adenovirus D
ucgcggacggccgc

SEQ ID NO: 1565283 - RNA, 16 nt, Human adenovirus D
cagaugggccuggccg

SEQ ID NO: 1565284 - RNA, 15 nt, Human adenovirus D
ccugcacuuucuuug

SEQ ID NO: 1565285 - RNA, 14 nt, Human adenovirus D
gcuggucaggccuc

SEQ ID NO: 1565286 - RNA, 21 nt, Human adenovirus D
agcguagggcuuuuccugaug

SEQ ID NO: 1565287 - RNA, 15 nt, Human adenovirus D
aucgauggugaagau

SEQ ID NO: 1565288 - RNA, 19 nt, Human adenovirus D
gcuccgcccacaaucgggu

SEQ ID NO: 1565289 - RNA, 18 nt, Human adenovirus D
gugaugcuucaacagcug

SEQ ID NO: 1565290 - RNA, 20 nt, Human adenovirus D
gguuccucguccagaugcuc

SEQ ID NO: 1565291 - RNA, 19 nt, Human adenovirus D
gcccguagcugcgcggggc

SEQ ID NO: 1565292 - RNA, 14 nt, Human adenovirus D
cgcaccgcuccugg

SEQ ID NO: 1565293 - RNA, 18 nt, Human adenovirus D
uggucagcgaugagcagc

SEQ ID NO: 1565294 - RNA, 24 nt, Human adenovirus D
cccgcuugcuggaugcggagccgc

SEQ ID NO: 1565295 - RNA, 22 nt, Human adenovirus D
accccauccagguguagguuuc

SEQ ID NO: 1565296 - RNA, 19 nt, Human adenovirus D
cacugcucuucccuggaga

SEQ ID NO: 1565297 - RNA, 12 nt, Human adenovirus D
gagcgggacuug

SEQ ID NO: 1565298 - RNA, 16 nt, Human adenovirus D
cgcgguauauggcucc

SEQ ID NO: 1565299 - RNA, 14 nt, Human adenovirus D
uagcuacuuucaca

SEQ ID NO: 1565300 - RNA, 17 nt, Human adenovirus D
caccaugagcaaggaga

SEQ ID NO: 1565301 - RNA, 11 nt, Human adenovirus D
cagaaagaaau

SEQ ID NO: 1565302 - RNA, 17 nt, Human adenovirus D
ugcagggagccagggga

SEQ ID NO: 1565303 - RNA, 21 nt, Human adenovirus D
cggagcaagucuacuggucgc

SEQ ID NO: 1565304 - RNA, 19 nt, Human adenovirus D
caggagaggcauggcaggc

SEQ ID NO: 1565305 - RNA, 21 nt, Human adenovirus D
ucaaccucaccaaccagacug

SEQ ID NO: 1565306 - RNA, 13 nt, Human adenovirus D
agggacagcagcc

SEQ ID NO: 1565307 - RNA, 16 nt, Human adenovirus D
acucgcggcugcugcu

SEQ ID NO: 1565308 - RNA, 17 nt, Human adenovirus D
guacggcgacgacgaca

SEQ ID NO: 1565309 - RNA, 20 nt, Human adenovirus D
aggagccgcuaguggaagag

SEQ ID NO: 1565310 - RNA, 22 nt, Human adenovirus D
aaaugaagccguccucugaaaa

SEQ ID NO: 1565311 - RNA, 20 nt, Human adenovirus D
uggugcaguuugcccgcgcc

SEQ ID NO: 1565312 - RNA, 23 nt, Human adenovirus D
gacaagauaucauaaagauggau

SEQ ID NO: 1565313 - RNA, 21 nt, Human adenovirus D
caguggcgagaggcgagcagc

SEQ ID NO: 1565314 - RNA, 12 nt, Human adenovirus D
aacuaaagccaa

SEQ ID NO: 1565315 - RNA, 20 nt, Human adenovirus D
acacaugauggagcuuaucu

SEQ ID NO: 1565316 - RNA, 17 nt, Human adenovirus D
uggcuucuacagccagc

SEQ ID NO: 1565317 - RNA, 19 nt, Human adenovirus D
gcugcucgagcgcccauuc

SEQ ID NO: 1565318 - RNA, 19 nt, Human adenovirus D
aaaccccgccaaaaaaaca

SEQ ID NO: 1565319 - RNA, 16 nt, Human adenovirus D
gugggcguacaugcac

SEQ ID NO: 1565320 - RNA, 15 nt, Human adenovirus D
acuucagccugggca

SEQ ID NO: 1565321 - RNA, 13 nt, Human adenovirus D
cagccacagccac

SEQ ID NO: 1565322 - RNA, 19 nt, Human adenovirus D
cauguacccgaccaugcag

SEQ ID NO: 1565323 - RNA, 16 nt, Human adenovirus D
acgacccgcaaccccg

SEQ ID NO: 1565324 - RNA, 15 nt, Human adenovirus D
aucuuuaucugcugg

SEQ ID NO: 1565325 - RNA, 21 nt, Human adenovirus D
cccacuucgccuaccccgccg

SEQ ID NO: 1565326 - RNA, 12 nt, Human adenovirus D
ccacuuccuuua

SEQ ID NO: 1565327 - RNA, 16 nt, Human adenovirus D
gaaggcgcccaggccg

SEQ ID NO: 1565328 - RNA, 22 nt, Human adenovirus D
gaauaucagacaugcugcuaca

SEQ ID NO: 1565329 - RNA, 22 nt, Human adenovirus D
ccugaagaacauccaugugacc

SEQ ID NO: 1565330 - RNA, 15 nt, Human adenovirus D
acugaccaccaccug

SEQ ID NO: 1565331 - RNA, 16 nt, Human adenovirus D
accacccacaccgccu

SEQ ID NO: 1565332 - RNA, 15 nt, Human adenovirus D
acgucaccugcggcg

SEQ ID NO: 1565333 - RNA, 22 nt, Human adenovirus D
cuggaaacucuuggagcagggu

SEQ ID NO: 1565334 - RNA, 23 nt, Human adenovirus D
ugcagcacauaaucaccauguua

SEQ ID NO: 1565335 - RNA, 15 nt, Human adenovirus D
ggcgacgcagccggc

SEQ ID NO: 1565336 - RNA, 20 nt, Human adenovirus D
aggagaccgacgcugggcuc

SEQ ID NO: 1565337 - RNA, 23 nt, Human adenovirus D
agcacccaaaaacugcaugcugg

SEQ ID NO: 1565338 - RNA, 19 nt, Human adenovirus D
cugggcauagucgcgccgc

SEQ ID NO: 1565339 - RNA, 17 nt, Human adenovirus D
gcuggccgagcuggaag

SEQ ID NO: 1565340 - RNA, 14 nt, Human adenovirus D
uuaaaaagcagcac

SEQ ID NO: 1565341 - RNA, 17 nt, Human adenovirus D
caugccuucgugcacug

SEQ ID NO: 1565342 - RNA, 21 nt, Human adenovirus D
cguggggcgcuuacaagcgcg

SEQ ID NO: 1565343 - RNA, 13 nt, Human adenovirus D
aagcucccacagu

SEQ ID NO: 1565344 - RNA, 17 nt, Human adenovirus D
ccagcguaagcgcgcgg

SEQ ID NO: 1565345 - RNA, 20 nt, Human adenovirus D
caacuggucuccugccuggg

SEQ ID NO: 1565346 - RNA, 20 nt, Human adenovirus D
ccucuuugcccugcucaccu

SEQ ID NO: 1565347 - RNA, 19 nt, Human adenovirus D
cuguaggccauccccaucc

SEQ ID NO: 1565348 - RNA, 20 nt, Human adenovirus D
gcuccggcggauagcgcgcc

SEQ ID NO: 1565349 - RNA, 16 nt, Human adenovirus D
gcccgacuccgccgcc

SEQ ID NO: 1565350 - RNA, 18 nt, Human adenovirus D
caggugcugcccacccuc

SEQ ID NO: 1565351 - RNA, 21 nt, Human adenovirus D
uccguaaccaucgaaaccaga

SEQ ID NO: 1565352 - RNA, 16 nt, Human adenovirus D
cuagccagccacagcc

SEQ ID NO: 1565353 - RNA, 20 nt, Human adenovirus D
caagaucaggggauguaagu

SEQ ID NO: 1565354 - RNA, 15 nt, Human adenovirus D
cagcaagccccggac

SEQ ID NO: 1565355 - RNA, 14 nt, Human adenovirus D
cgguggggcgguga

SEQ ID NO: 1565356 - RNA, 13 nt, Human adenovirus D
cuccguccgcuuc

SEQ ID NO: 1565357 - RNA, 18 nt, Human adenovirus D
cuccccgacccccuucca

SEQ ID NO: 1565358 - RNA, 19 nt, Human adenovirus D
uggguuggcuugcaugaag

SEQ ID NO: 1565359 - RNA, 12 nt, Human adenovirus D
uugauuggccug

SEQ ID NO: 1565360 - RNA, 12 nt, Human adenovirus D
ucccuggcuccg

SEQ ID NO: 1565361 - RNA, 17 nt, Human adenovirus D
agaaccugaaggagcug

SEQ ID NO: 1565362 - RNA, 21 nt, Human adenovirus D
caugaaggggacgagcugcuu

SEQ ID NO: 1565363 - RNA, 20 nt, Human adenovirus D
gaaggggacgagcugcuugc

SEQ ID NO: 1565364 - RNA, 20 nt, Human adenovirus D
agagagguugaaaaggcagc

SEQ ID NO: 1565365 - RNA, 15 nt, Human adenovirus D
gagucgcggaugaag

SEQ ID NO: 1565366 - RNA, 15 nt, Human adenovirus D
gugcgucgagcacag

SEQ ID NO: 1565367 - RNA, 22 nt, Human adenovirus D
ucgaugaaagucaggagcagcg

SEQ ID NO: 1565368 - RNA, 22 nt, Human adenovirus D
uacaguuaagaauccacagauc

SEQ ID NO: 1565369 - RNA, 18 nt, Human adenovirus D
cuauugcuagcccuuccu

SEQ ID NO: 1565370 - RNA, 18 nt, Human adenovirus D
caggggcgucccgcgguc

SEQ ID NO: 1565371 - RNA, 17 nt, Human adenovirus D
gggccacuacagcugac

SEQ ID NO: 1565372 - RNA, 15 nt, Human adenovirus D
caguuaaugcugccu

SEQ ID NO: 1565373 - RNA, 11 nt, Human adenovirus D
ucucaaagugu

SEQ ID NO: 1565374 - RNA, 14 nt, Human adenovirus D
cgacagcagcacag

SEQ ID NO: 1565375 - RNA, 18 nt, Human adenovirus D
gcaccugcuacauguucg

SEQ ID NO: 1565376 - RNA, 16 nt, Human adenovirus D
ccgaagggcgagaagc

SEQ ID NO: 1565377 - RNA, 19 nt, Human adenovirus D
aaaaaucacucuuuccagc

SEQ ID NO: 1565378 - RNA, 21 nt, Human adenovirus D
gccaucggcacgaucccgggc

SEQ ID NO: 1565379 - RNA, 16 nt, Human adenovirus D
cagcuacaccucccuc

SEQ ID NO: 1565380 - RNA, 18 nt, Human adenovirus D
gagaaguuccucugcauc

SEQ ID NO: 1565381 - RNA, 12 nt, Human adenovirus D
aucucuagcaug

SEQ ID NO: 1565382 - RNA, 22 nt, Human adenovirus D
gagguccucggggcauugcagg

SEQ ID NO: 1565383 - RNA, 24 nt, Human adenovirus D
gcagcaguauccgcggaguccagc

SEQ ID NO: 1565384 - RNA, 13 nt, Human adenovirus D
ccauggcgcagua

SEQ ID NO: 1565385 - RNA, 18 nt, Human adenovirus D
cuacuuuuugggcaccca

SEQ ID NO: 1565386 - RNA, 23 nt, Human adenovirus D
auaugaccaugcagacucugcuc

SEQ ID NO: 1565387 - RNA, 13 nt, Human adenovirus D
ugcgcgaccuggg

SEQ ID NO: 1565388 - RNA, 21 nt, Human adenovirus D
aggaggacuuaaccacccacg

SEQ ID NO: 1565389 - RNA, 18 nt, Human adenovirus D
aauaugggagagaacaaa

SEQ ID NO: 1565390 - RNA, 17 nt, Human adenovirus D
caccuggugauggccug

SEQ ID NO: 1565391 - RNA, 15 nt, Human adenovirus D
ugcaagucacgcagg

SEQ ID NO: 1565392 - RNA, 21 nt, Human adenovirus D
ugaagauguaaccuugcaaga

SEQ ID NO: 1565393 - RNA, 13 nt, Human adenovirus D
uagggacagcagc

SEQ ID NO: 1565394 - RNA, 19 nt, Human adenovirus D
guugacaaauggagccaga

SEQ ID NO: 1565395 - RNA, 21 nt, Human adenovirus D
guagguauucccucucgagag

SEQ ID NO: 1565396 - RNA, 16 nt, Human adenovirus D
ccgcagccgcggcagc

SEQ ID NO: 1565397 - RNA, 15 nt, Human adenovirus D
ccggagcccacccgc

SEQ ID NO: 1565398 - RNA, 22 nt, Human adenovirus D
ccaccugcgcgagguugagcuc

SEQ ID NO: 1565399 - RNA, 20 nt, Human adenovirus D
aguaggacauggauuaaaaa

SEQ ID NO: 1565400 - RNA, 11 nt, Human adenovirus D
ggcgcccagcc

SEQ ID NO: 1565401 - RNA, 22 nt, Human adenovirus D
cggguauaaaaacccuggugau

SEQ ID NO: 1565402 - RNA, 14 nt, Human adenovirus D
acccgccucuccuu

SEQ ID NO: 1565403 - RNA, 14 nt, Human adenovirus D
cggaaacgccacca

SEQ ID NO: 1565404 - RNA, 18 nt, Human adenovirus D
cgcccugagagcgcuggc

SEQ ID NO: 1565405 - RNA, 20 nt, Human adenovirus D
cacuuccuuuaccuucuccu

SEQ ID NO: 1565406 - RNA, 19 nt, Human adenovirus D
aaaucacaucggacugggu

SEQ ID NO: 1565407 - RNA, 14 nt, Human adenovirus D
ggccgggcugcacg

SEQ ID NO: 1565408 - RNA, 16 nt, Human adenovirus D
guggcuguugauguga

SEQ ID NO: 1565409 - RNA, 17 nt, Human adenovirus D
gggcgaaggugucccug

SEQ ID NO: 1565410 - RNA, 19 nt, Human adenovirus D
gaacagcauauaccccucc

SEQ ID NO: 1565411 - RNA, 16 nt, Human adenovirus D
ggaauguuacugcaua

SEQ ID NO: 1565412 - RNA, 15 nt, Human adenovirus D
caaaacaacaagauu

SEQ ID NO: 1565413 - RNA, 18 nt, Human adenovirus D
ggccuccaggaauuccag

SEQ ID NO: 1565414 - RNA, 22 nt, Human adenovirus D
accagauccucugccguccgcc

SEQ ID NO: 1565415 - RNA, 17 nt, Human adenovirus D
ccugcgucaucacccag

SEQ ID NO: 1565416 - RNA, 17 nt, Human adenovirus D
gucaaguuugacagcag

SEQ ID NO: 1565417 - RNA, 13 nt, Human adenovirus D
ucugcugcgccgc

SEQ ID NO: 1565418 - RNA, 15 nt, Human adenovirus D
uagacauggccagca

SEQ ID NO: 1565419 - RNA, 15 nt, Human adenovirus D
ugaggguguccugga

SEQ ID NO: 1565420 - RNA, 15 nt, Human adenovirus D
cuaccaccccagcau

SEQ ID NO: 1565421 - RNA, 20 nt, Human adenovirus D
gcacaguauugugggccugg

SEQ ID NO: 1565422 - RNA, 23 nt, Human adenovirus D
guggucgacuugcaagacagaaa

SEQ ID NO: 1565423 - RNA, 20 nt, Human adenovirus D
gccgauuuaaagacccacag

SEQ ID NO: 1565424 - RNA, 19 nt, Human adenovirus D
cgaugaaagucaggagcag

SEQ ID NO: 1565425 - RNA, 14 nt, Human adenovirus D
ugccucuccaucag

SEQ ID NO: 1565426 - RNA, 17 nt, Human adenovirus D
uccuacggagggcagaa

SEQ ID NO: 1565427 - RNA, 19 nt, Human adenovirus D
ggcuggcgagacugggggc

SEQ ID NO: 1565428 - RNA, 19 nt, Human adenovirus D
gucagacccaguggcgaga

SEQ ID NO: 1565429 - RNA, 16 nt, Human adenovirus D
ugguggccaccucgcc

SEQ ID NO: 1565430 - RNA, 14 nt, Human adenovirus D
ccacuacucacacu

SEQ ID NO: 1565431 - RNA, 13 nt, Human adenovirus D
acguggugcugcu

SEQ ID NO: 1565432 - RNA, 14 nt, Human adenovirus D
gcccacccucaggc

SEQ ID NO: 1565433 - RNA, 18 nt, Human adenovirus D
ugcacgcgggugagggug

SEQ ID NO: 1565434 - RNA, 21 nt, Human adenovirus D
cagccuugauuuuuccagccc

SEQ ID NO: 1565435 - RNA, 20 nt, Human adenovirus D
agauggaagaagaaugggac

SEQ ID NO: 1565436 - RNA, 12 nt, Human adenovirus D
ccgugcgcaccc

SEQ ID NO: 1565437 - RNA, 20 nt, Human adenovirus D
cggacguggugcugcugccg

SEQ ID NO: 1565438 - RNA, 14 nt, Human adenovirus D
cgacucgcugcugc

SEQ ID NO: 1565439 - RNA, 16 nt, Human adenovirus D
ccuccgcauccaagaa

SEQ ID NO: 1565440 - RNA, 21 nt, Human adenovirus D
guacaacgcccugcuggagcg

SEQ ID NO: 1565441 - RNA, 16 nt, Human adenovirus D
ccuuguagggacagca

SEQ ID NO: 1565442 - RNA, 14 nt, Human adenovirus D
gaacgagggccugg

SEQ ID NO: 1565443 - RNA, 15 nt, Human adenovirus D
gugaguugguggccg

SEQ ID NO: 1565444 - RNA, 18 nt, Human adenovirus D
accgagccucccaggagg

SEQ ID NO: 1565445 - RNA, 18 nt, Human adenovirus D
cacagaccuucagggagu

SEQ ID NO: 1565446 - RNA, 16 nt, Human adenovirus D
cgaguggaacuuccgc

SEQ ID NO: 1565447 - RNA, 20 nt, Human adenovirus D
ucacucuuuccagcagcagg

SEQ ID NO: 1565448 - RNA, 12 nt, Human adenovirus D
gugcaaugucag

SEQ ID NO: 1565449 - RNA, 17 nt, Human adenovirus D
ggccguucaugggcacc

SEQ ID NO: 1565450 - RNA, 20 nt, Human adenovirus D
gcgccccgaggacacccggc

SEQ ID NO: 1565451 - RNA, 18 nt, Human adenovirus D
guuggcgacccaggaaug

SEQ ID NO: 1565452 - RNA, 17 nt, Human adenovirus D
auucaaaacucacuuug

SEQ ID NO: 1565453 - RNA, 18 nt, Human adenovirus D
aauuggaaaaguggaaga

SEQ ID NO: 1565454 - RNA, 19 nt, Human adenovirus D
cgcccagcgagaggagcuc

SEQ ID NO: 1565455 - RNA, 18 nt, Human adenovirus D
aggaaccccacgguggcc

SEQ ID NO: 1565456 - RNA, 22 nt, Human adenovirus D
gccaggccucuacccggacgag

SEQ ID NO: 1565457 - RNA, 16 nt, Human adenovirus D
gccguagcaggcgccg

SEQ ID NO: 1565458 - RNA, 16 nt, Human adenovirus D
ccaacucuuaaaucau

SEQ ID NO: 1565459 - RNA, 17 nt, Human adenovirus D
cucucuuugugucuccg

SEQ ID NO: 1565460 - RNA, 23 nt, Human adenovirus D
augucucgguguacaagauccug

SEQ ID NO: 1565461 - RNA, 17 nt, Human adenovirus D
ugagaauaacaugcuga

SEQ ID NO: 1565462 - RNA, 11 nt, Human adenovirus D
acuccacagcc

SEQ ID NO: 1565463 - RNA, 13 nt, Human adenovirus D
ugugaccacggac

SEQ ID NO: 1565464 - RNA, 18 nt, Human adenovirus D
cacacuuaguucagcugc

SEQ ID NO: 1565465 - RNA, 15 nt, Human adenovirus D
cgccgcggccaucuc

SEQ ID NO: 1565466 - RNA, 17 nt, Human adenovirus D
gccacgaccggcagcgg

SEQ ID NO: 1565467 - RNA, 22 nt, Human adenovirus D
ccagaugaggauugggaggagg

SEQ ID NO: 1565468 - RNA, 16 nt, Human adenovirus D
cggugcggcugcugca

SEQ ID NO: 1565469 - RNA, 17 nt, Human adenovirus D
ugccacugccaacauua

SEQ ID NO: 1565470 - RNA, 15 nt, Human adenovirus D
cgagggcgcgcaguu

SEQ ID NO: 1565471 - RNA, 13 nt, Human adenovirus D
aguuggaggagau

SEQ ID NO: 1565472 - RNA, 13 nt, Human adenovirus D
cagaguaagagga

SEQ ID NO: 1565473 - RNA, 17 nt, Human adenovirus D
accggggaggcaccacc

SEQ ID NO: 1565474 - RNA, 17 nt, Human adenovirus D
ucgcgguggggcgguga

SEQ ID NO: 1565475 - RNA, 15 nt, Human adenovirus D
gcuaccgcggcaccc

SEQ ID NO: 1565476 - RNA, 14 nt, Human adenovirus D
gcucccgggcuccu

SEQ ID NO: 1565477 - RNA, 17 nt, Human adenovirus D
accggaggcgugcacug

SEQ ID NO: 1565478 - RNA, 15 nt, Human adenovirus D
gccgcagcccggcgg

SEQ ID NO: 1565479 - RNA, 13 nt, Human adenovirus D
aggucuggggcgc

SEQ ID NO: 1565480 - RNA, 22 nt, Human adenovirus D
accaccgagucucaccugguua

SEQ ID NO: 1565481 - RNA, 21 nt, Human adenovirus D
cacaguuauaccaccuccucc

SEQ ID NO: 1565482 - RNA, 22 nt, Human adenovirus D
gcagcgacugacuacccacuga

SEQ ID NO: 1565483 - RNA, 15 nt, Human adenovirus D
gguggcgccgggccu

SEQ ID NO: 1565484 - RNA, 14 nt, Human adenovirus D
cagggagcugagga

SEQ ID NO: 1565485 - RNA, 15 nt, Human adenovirus D
gccauagcucagccc

SEQ ID NO: 1565486 - RNA, 14 nt, Human adenovirus D
ugcuccugggugag

SEQ ID NO: 1565487 - RNA, 12 nt, Human adenovirus D
gcgccgcccgag

SEQ ID NO: 1565488 - RNA, 14 nt, Human adenovirus D
aaccaaaaaaaaca

SEQ ID NO: 1565489 - RNA, 20 nt, Human adenovirus D
gaucucggcgcggcgggggc

SEQ ID NO: 1565490 - RNA, 20 nt, Human adenovirus D
ccagauguugcgcagcggca

SEQ ID NO: 1565491 - RNA, 16 nt, Human adenovirus D
ucgcgccacuggccac

SEQ ID NO: 1565492 - RNA, 16 nt, Human adenovirus D
cgcgcgguaggcccug

SEQ ID NO: 1565493 - RNA, 22 nt, Human adenovirus D
guggacauucagauccccaccg

SEQ ID NO: 1565494 - RNA, 17 nt, Human adenovirus D
aacuuaguuuaaaagua

SEQ ID NO: 1565495 - RNA, 18 nt, Human adenovirus D
cagcaccgcauccugauc

SEQ ID NO: 1565496 - RNA, 21 nt, Human adenovirus D
cggcugggguauuacuaggcc

SEQ ID NO: 1565497 - RNA, 15 nt, Human adenovirus D
ccugagagcgcuggc

SEQ ID NO: 1565498 - RNA, 13 nt, Human adenovirus D
ggcgcaaccagga

SEQ ID NO: 1565499 - RNA, 22 nt, Human adenovirus D
cucggccgacgauagcagcgug

SEQ ID NO: 1565500 - RNA, 13 nt, Human adenovirus D
caaacgccagccc

SEQ ID NO: 1565501 - RNA, 13 nt, Human adenovirus D
guguccagcuggc

SEQ ID NO: 1565502 - RNA, 15 nt, Human adenovirus D
cgaggcagaggcaca

SEQ ID NO: 1565503 - RNA, 13 nt, Human adenovirus D
cagcgaaagagag

SEQ ID NO: 1565504 - RNA, 21 nt, Human adenovirus D
gugcacuggcccgaccgaccc

SEQ ID NO: 1565505 - RNA, 19 nt, Human adenovirus D
uugaguuucccgaggagca

SEQ ID NO: 1565506 - RNA, 22 nt, Human adenovirus D
agcaguagccccucugugccca

SEQ ID NO: 1565507 - RNA, 17 nt, Human adenovirus D
gcagguggacgagcaga

SEQ ID NO: 1565508 - RNA, 22 nt, Human adenovirus D
ccaccaugcgccaagggcagcc

SEQ ID NO: 1565509 - RNA, 23 nt, Human adenovirus D
ugcggagccgcucggccaugccc

SEQ ID NO: 1565510 - RNA, 14 nt, Human adenovirus D
gggcgccuucaccg

SEQ ID NO: 1565511 - RNA, 16 nt, Human adenovirus D
gcacaguuggcgaccc

SEQ ID NO: 1565512 - RNA, 17 nt, Human adenovirus D
aacucgcggcugcugcu

SEQ ID NO: 1565513 - RNA, 14 nt, Human adenovirus D
gcuggccuuccacc

SEQ ID NO: 1565514 - RNA, 15 nt, Human adenovirus D
ggcgacaagcuggcc

SEQ ID NO: 1565515 - RNA, 18 nt, Human adenovirus D
cugagccgccagcuggcc

SEQ ID NO: 1565516 - RNA, 13 nt, Human adenovirus D
ccggcagcggugg

SEQ ID NO: 1565517 - RNA, 14 nt, Human adenovirus D
cguucuacccagca

SEQ ID NO: 1565518 - RNA, 20 nt, Human adenovirus D
augcaccugggcgccagaag

SEQ ID NO: 1565519 - RNA, 23 nt, Human adenovirus D
cagacgggcgaagugcucaaccc

SEQ ID NO: 1565520 - RNA, 16 nt, Human adenovirus D
uccaccucggugcagc

SEQ ID NO: 1565521 - RNA, 20 nt, Human adenovirus D
aguaugccaagauagcccug

SEQ ID NO: 1565522 - RNA, 16 nt, Human adenovirus D
ugggaagaagagacag

SEQ ID NO: 1565523 - RNA, 16 nt, Human adenovirus D
aucauaucccagggga

SEQ ID NO: 1565524 - RNA, 15 nt, Human adenovirus D
cgccgggccugggcg

SEQ ID NO: 1565525 - RNA, 19 nt, Human adenovirus D
guaacaucaccacaggcaa

SEQ ID NO: 1565526 - RNA, 21 nt, Human adenovirus D
ccugcuggccgagcuggaagc

SEQ ID NO: 1565527 - RNA, 20 nt, Human adenovirus D
caagugccacaugcaccugg

SEQ ID NO: 1565528 - RNA, 18 nt, Human adenovirus D
gaggcgagcagcuguuga

SEQ ID NO: 1565529 - RNA, 21 nt, Human adenovirus D
gcagccgcguaagcaggagca

SEQ ID NO: 1565530 - RNA, 18 nt, Human adenovirus D
acgggcugcuucugccug

SEQ ID NO: 1565531 - RNA, 21 nt, Human adenovirus D
uugccggcgacaagcuggccu

SEQ ID NO: 1565532 - RNA, 12 nt, Human adenovirus D
gcgggcuguggg

SEQ ID NO: 1565533 - RNA, 20 nt, Human adenovirus D
caggguacccacuggguggc

SEQ ID NO: 1565534 - RNA, 14 nt, Human adenovirus D
cuauuacugccacu

SEQ ID NO: 1565535 - RNA, 19 nt, Human adenovirus D
cuaaugacagaggcaacag

SEQ ID NO: 1565536 - RNA, 22 nt, Human adenovirus D
ccacagccuugauuuuuccagc

SEQ ID NO: 1565537 - RNA, 16 nt, Human adenovirus D
uucaugaccagcauga

SEQ ID NO: 1565538 - RNA, 16 nt, Human adenovirus D
uucaauaauggaagca

SEQ ID NO: 1565539 - RNA, 14 nt, Human adenovirus D
gcugggcguggugc

SEQ ID NO: 1565540 - RNA, 17 nt, Human adenovirus D
gaacgacucgcugcugc

SEQ ID NO: 1565541 - RNA, 17 nt, Human adenovirus D
augauggaacccacgug

SEQ ID NO: 1565542 - RNA, 19 nt, Human adenovirus D
cgcagccgcggcagccgca

SEQ ID NO: 1565543 - RNA, 18 nt, Human adenovirus D
uuuugaagucauguguga

SEQ ID NO: 1565544 - RNA, 16 nt, Human adenovirus D
ggcgacgcaccgggag

SEQ ID NO: 1565545 - RNA, 18 nt, Human adenovirus D
ggcggcuuucugcccgcg

SEQ ID NO: 1565546 - RNA, 21 nt, Human adenovirus D
gcauacagagauucagccaua

SEQ ID NO: 1565547 - RNA, 16 nt, Human adenovirus D
cccaaugcaacaugac

SEQ ID NO: 1565548 - RNA, 22 nt, Human adenovirus D
ggcucgguuguugaugaccugg

SEQ ID NO: 1565549 - RNA, 14 nt, Human adenovirus D
gcgccagccgcggu

SEQ ID NO: 1565550 - RNA, 15 nt, Human adenovirus D
aggaggacacuaaag

SEQ ID NO: 1565551 - RNA, 22 nt, Human adenovirus D
gcuccgguugugcagcccccuc

SEQ ID NO: 1565552 - RNA, 19 nt, Human adenovirus D
augaaggcuuucacagcuu

SEQ ID NO: 1565553 - RNA, 22 nt, Human adenovirus D
acagccgucuggacccgcggcc

SEQ ID NO: 1565554 - RNA, 16 nt, Human adenovirus D
ucgggccccggggcga

SEQ ID NO: 1565555 - RNA, 14 nt, Human adenovirus D
gccgaagggcgaga

SEQ ID NO: 1565556 - RNA, 15 nt, Human adenovirus D
acagacccaccccag

SEQ ID NO: 1565557 - RNA, 14 nt, Human adenovirus D
accccagacaccca

SEQ ID NO: 1565558 - RNA, 20 nt, Human adenovirus D
ccgcgagcugaugcugagcc

SEQ ID NO: 1565559 - RNA, 19 nt, Human adenovirus D
ggaauaaagaauaugccag

SEQ ID NO: 1565560 - RNA, 12 nt, Human adenovirus D
ggaauccugcac

SEQ ID NO: 1565561 - RNA, 13 nt, Human adenovirus D
aaacucagucacu

SEQ ID NO: 1565562 - RNA, 19 nt, Human adenovirus D
gacuuugucccgcugagcu

SEQ ID NO: 1565563 - RNA, 18 nt, Human adenovirus D
ggccaugaugcgagccgc

SEQ ID NO: 1565564 - RNA, 23 nt, Human adenovirus D
acgaccucgccgucuacucccag

SEQ ID NO: 1565565 - RNA, 16 nt, Human adenovirus D
gagaagcuuggcgaug

SEQ ID NO: 1565566 - RNA, 21 nt, Human adenovirus D
aaaaagcagcacaguaaguuc

SEQ ID NO: 1565567 - RNA, 22 nt, Human adenovirus D
cuuacauguccaguuacgccuc

SEQ ID NO: 1565568 - RNA, 13 nt, Human adenovirus D
cggcgcaggggca

SEQ ID NO: 1565569 - RNA, 21 nt, Human adenovirus D
ccacaggugcugcccacccuc

SEQ ID NO: 1565570 - RNA, 18 nt, Human adenovirus D
ucaaguuugacagcagaa

SEQ ID NO: 1565571 - RNA, 14 nt, Human adenovirus D
ugguggaggcgcgc

SEQ ID NO: 1565572 - RNA, 12 nt, Human adenovirus D
ucugugcugccu

SEQ ID NO: 1565573 - RNA, 24 nt, Human adenovirus D
ccuuaccugguacgagcuacagca

SEQ ID NO: 1565574 - RNA, 14 nt, Human adenovirus D
augaggagaaggaa

SEQ ID NO: 1565575 - RNA, 19 nt, Human adenovirus D
ggacgcugcucaccacccc

SEQ ID NO: 1565576 - RNA, 19 nt, Human adenovirus D
caacagccuucagcaucag

SEQ ID NO: 1565577 - RNA, 18 nt, Human adenovirus D
gugcuagacauggccagc

SEQ ID NO: 1565578 - RNA, 12 nt, Human adenovirus D
ccagcagcacau

SEQ ID NO: 1565579 - RNA, 15 nt, Human adenovirus D
uagcacggggcaguu

SEQ ID NO: 1565580 - RNA, 19 nt, Human adenovirus D
ccccgccgaggcuagcacg

SEQ ID NO: 1565581 - RNA, 20 nt, Human adenovirus D
aggggcugcuagagugccac

SEQ ID NO: 1565582 - RNA, 20 nt, Human adenovirus D
cucgcugaaaaacaggccgc

SEQ ID NO: 1565583 - RNA, 20 nt, Human adenovirus D
ccccuucaaccaccaccgca

SEQ ID NO: 1565584 - RNA, 17 nt, Human adenovirus D
acgaggaauuugaaaau

SEQ ID NO: 1565585 - RNA, 22 nt, Human adenovirus D
ucgcggcugcugcugcugcuga

SEQ ID NO: 1565586 - RNA, 11 nt, Human adenovirus D
aagggcggcgc

SEQ ID NO: 1565587 - RNA, 20 nt, Human adenovirus D
ggggaugaaccuuuggaccu

SEQ ID NO: 1565588 - RNA, 15 nt, Human adenovirus D
gagcuggaagcccug

SEQ ID NO: 1565589 - RNA, 21 nt, Human adenovirus D
aggcgaagauggggccccgcc

SEQ ID NO: 1565590 - RNA, 12 nt, Human adenovirus D
aggugcagaccg

SEQ ID NO: 1565591 - RNA, 20 nt, Human adenovirus D
aagcuaaugguccugcaaga

SEQ ID NO: 1565592 - RNA, 20 nt, Human adenovirus D
acuuauggcucagcugccau

SEQ ID NO: 1565593 - RNA, 20 nt, Human adenovirus D
cgcacgguaagagcccagca

SEQ ID NO: 1565594 - RNA, 14 nt, Human adenovirus D
agcgguucaagaac

SEQ ID NO: 1565595 - RNA, 15 nt, Human adenovirus D
gacuugauuggccug

SEQ ID NO: 1565596 - RNA, 15 nt, Human adenovirus D
gaggagguggcccug

SEQ ID NO: 1565597 - RNA, 16 nt, Human adenovirus D
ugugcaguuuggccug

SEQ ID NO: 1565598 - RNA, 13 nt, Human adenovirus D
cgucggaagagga

SEQ ID NO: 1565599 - RNA, 14 nt, Human adenovirus D
cggagggcagaaac

SEQ ID NO: 1565600 - RNA, 15 nt, Human adenovirus D
gcgcuugcaagggug

SEQ ID NO: 1565601 - RNA, 20 nt, Human adenovirus D
cugaccaauagacagcagaa

SEQ ID NO: 1565602 - RNA, 18 nt, Human adenovirus D
caugcccucucaacauca

SEQ ID NO: 1565603 - RNA, 23 nt, Human adenovirus D
cagcaaguuuaaggcgcggguga

SEQ ID NO: 1565604 - RNA, 12 nt, Human adenovirus D
caaauacauccu

SEQ ID NO: 1565605 - RNA, 21 nt, Human adenovirus D
agagggcgaagggcuggcgag

SEQ ID NO: 1565606 - RNA, 19 nt, Human adenovirus D
gaaagauuuaauuggcaaa

SEQ ID NO: 1565607 - RNA, 21 nt, Human adenovirus D
ggcgcugggcguggugcugga

SEQ ID NO: 1565608 - RNA, 18 nt, Human adenovirus D
ggccucgugcucuggggu

SEQ ID NO: 1565609 - RNA, 16 nt, Human adenovirus D
cguggacgcugcucac

SEQ ID NO: 1565610 - RNA, 20 nt, Human adenovirus D
gucaggcagcggggacagag

SEQ ID NO: 1565611 - RNA, 20 nt, Human adenovirus D
aagaggcuccggguggaaga

SEQ ID NO: 1565612 - RNA, 14 nt, Human adenovirus D
gauggaugugugga

SEQ ID NO: 1565613 - RNA, 13 nt, Human adenovirus D
cgccgccgcggcc

SEQ ID NO: 1565614 - RNA, 13 nt, Human adenovirus D
caccgccgcagcc

SEQ ID NO: 1565615 - RNA, 22 nt, Human adenovirus D
ccgagcuccgcgaacagcagca

SEQ ID NO: 1565616 - RNA, 15 nt, Human adenovirus D
acgcguacauccagc

SEQ ID NO: 1565617 - RNA, 13 nt, Human adenovirus D
caacucgggcuuc

SEQ ID NO: 1565618 - RNA, 13 nt, Human adenovirus D
cauuuuuccagcc

SEQ ID NO: 1565619 - RNA, 15 nt, Human adenovirus D
uaaagccacaaccag

SEQ ID NO: 1565620 - RNA, 22 nt, Human adenovirus D
gauccccgucuccugccgcgcc

SEQ ID NO: 1565621 - RNA, 18 nt, Human adenovirus D
acacuagaaagcaguuca

SEQ ID NO: 1565622 - RNA, 18 nt, Human adenovirus D
gggcgccuuccccggagc

SEQ ID NO: 1565623 - RNA, 15 nt, Human adenovirus D
gcacgcucugaggcu

SEQ ID NO: 1565624 - RNA, 14 nt, Human adenovirus D
cgccuggggcagac

SEQ ID NO: 1565625 - RNA, 22 nt, Human adenovirus D
auuaccucaucgccaccaugag

SEQ ID NO: 1565626 - RNA, 16 nt, Human adenovirus D
ggcggaugguggcgag

SEQ ID NO: 1565627 - RNA, 19 nt, Human adenovirus D
ccuucaacagaaccggagg

SEQ ID NO: 1565628 - RNA, 17 nt, Human adenovirus D
gcaagucuacuggucgc

SEQ ID NO: 1565629 - RNA, 19 nt, Human adenovirus D
auuacuaggcccagcagca

SEQ ID NO: 1565630 - RNA, 12 nt, Human adenovirus D
agauacuucagc

SEQ ID NO: 1565631 - RNA, 22 nt, Human adenovirus D
cugaaccacacggccagcaggg

SEQ ID NO: 1565632 - RNA, 15 nt, Human adenovirus D
gaagugcggcggcgg

SEQ ID NO: 1565633 - RNA, 19 nt, Human adenovirus D
augcaaaaucuuacacugu

SEQ ID NO: 1565634 - RNA, 21 nt, Human adenovirus D
uacacgggguugcagcacugg

SEQ ID NO: 1565635 - RNA, 11 nt, Human adenovirus D
agucaggagca

SEQ ID NO: 1565636 - RNA, 12 nt, Human adenovirus D
gagccauagagg

SEQ ID NO: 1565637 - RNA, 13 nt, Human adenovirus D
ccccagacaccca

SEQ ID NO: 1565638 - RNA, 22 nt, Human adenovirus D
uccaucgugcgcgaccugggcu

SEQ ID NO: 1565639 - RNA, 15 nt, Human adenovirus D
gagggaugcaugcgg

SEQ ID NO: 1565640 - RNA, 17 nt, Human adenovirus D
agaacgagggccugggc

SEQ ID NO: 1565641 - RNA, 17 nt, Human adenovirus D
cgcacccguccuccucg

SEQ ID NO: 1565642 - RNA, 20 nt, Human adenovirus D
cgccgacccguggccccggg

SEQ ID NO: 1565643 - RNA, 19 nt, Human adenovirus D
uccagcgcucguacccgcu

SEQ ID NO: 1565644 - RNA, 14 nt, Human adenovirus D
gacucgggagcaaa

SEQ ID NO: 1565645 - RNA, 23 nt, Human adenovirus D
cagguccacgcugguggccaccu

SEQ ID NO: 1565646 - RNA, 18 nt, Human adenovirus D
gcccgauagccgccagga

SEQ ID NO: 1565647 - RNA, 17 nt, Human adenovirus D
gcagaaggugguggacg

SEQ ID NO: 1565648 - RNA, 23 nt, Human adenovirus D
ugcagccgugaucccacagggca

SEQ ID NO: 1565649 - RNA, 22 nt, Human adenovirus D
ugacagcgacgagacuggccuc

SEQ ID NO: 1565650 - RNA, 18 nt, Human adenovirus D
cccucgggccccggggcg

SEQ ID NO: 1565651 - RNA, 15 nt, Human adenovirus D
cugggcacuggagca

SEQ ID NO: 1565652 - RNA, 22 nt, Human adenovirus D
cacgaccgugccgcggugcgcu

SEQ ID NO: 1565653 - RNA, 22 nt, Human adenovirus D
ggauucaaaaacuuccccccug

SEQ ID NO: 1565654 - RNA, 16 nt, Human adenovirus D
gccaggccuccgagca

SEQ ID NO: 1565655 - RNA, 19 nt, Human adenovirus D
cgcugcugccgcucaguca

SEQ ID NO: 1565656 - RNA, 14 nt, Human adenovirus D
auggaggagcagcc

SEQ ID NO: 1565657 - RNA, 20 nt, Human adenovirus D
uuggugggauaacagcgccc

SEQ ID NO: 1565658 - RNA, 20 nt, Human adenovirus D
cccacgaugugaccacggac

SEQ ID NO: 1565659 - RNA, 21 nt, Human adenovirus D
gcucguagggguugaggggcg

SEQ ID NO: 1565660 - RNA, 21 nt, Human adenovirus D
ggcaacaccugggcacuggag

SEQ ID NO: 1565661 - RNA, 15 nt, Human adenovirus D
uggggucucggggaa

SEQ ID NO: 1565662 - RNA, 16 nt, Human adenovirus D
cggccgcggcgagcgg

SEQ ID NO: 1565663 - RNA, 20 nt, Human adenovirus D
cgggugaggguguccuggaa

SEQ ID NO: 1565664 - RNA, 16 nt, Human adenovirus D
gcgcauccugcagccc

SEQ ID NO: 1565665 - RNA, 15 nt, Human adenovirus D
uacaugcccagcagc

SEQ ID NO: 1565666 - RNA, 19 nt, Human adenovirus D
gcucuuaagaaagacacaa

SEQ ID NO: 1565667 - RNA, 12 nt, Human adenovirus D
uggccgaccgga

SEQ ID NO: 1565668 - RNA, 16 nt, Human adenovirus D
cgaggccgggcuagug

SEQ ID NO: 1565669 - RNA, 12 nt, Human adenovirus D
cgagcaggaccu

SEQ ID NO: 1565670 - RNA, 14 nt, Human adenovirus D
ccggccccgcgggc

SEQ ID NO: 1565671 - RNA, 14 nt, Human adenovirus D
auaaagaagacuau

SEQ ID NO: 1565672 - RNA, 21 nt, Human adenovirus D
caggaaaggguacuccacagc

SEQ ID NO: 1565673 - RNA, 16 nt, Human adenovirus D
ucggagggggggauca

SEQ ID NO: 1565674 - RNA, 13 nt, Human adenovirus D
aacggcaccugcg

SEQ ID NO: 1565675 - RNA, 12 nt, Human adenovirus D
cacuccccccuu

SEQ ID NO: 1565676 - RNA, 16 nt, Human adenovirus D
gcagggcgcccagcau

SEQ ID NO: 1565677 - RNA, 21 nt, Human adenovirus D
aaccugcgcgggcuguggggc

SEQ ID NO: 1565678 - RNA, 15 nt, Human adenovirus D
cgcuggguggccggc

SEQ ID NO: 1565679 - RNA, 20 nt, Human adenovirus D
cgucuacaaggcccugggca

SEQ ID NO: 1565680 - RNA, 17 nt, Human adenovirus D
ggaccccacggcauggg

SEQ ID NO: 1565681 - RNA, 20 nt, Human adenovirus D
cugcuaccucuugcagcugg

SEQ ID NO: 1565682 - RNA, 16 nt, Human adenovirus D
ggcaggggcggcagag

SEQ ID NO: 1565683 - RNA, 20 nt, Human adenovirus D
ccgaugcuauugagagagag

SEQ ID NO: 1565684 - RNA, 22 nt, Human adenovirus D
aguugacggucugcaggccggg

SEQ ID NO: 1565685 - RNA, 16 nt, Human adenovirus D
ggccccuggcugggcg

SEQ ID NO: 1565686 - RNA, 15 nt, Human adenovirus D
acucgacgagccagg

SEQ ID NO: 1565687 - RNA, 15 nt, Human adenovirus D
gcgguugagcgggcu

SEQ ID NO: 1565688 - RNA, 15 nt, Human adenovirus D
gaauugguauaagug

SEQ ID NO: 1565689 - RNA, 21 nt, Human adenovirus D
agcacgcccgccauggggcgc

SEQ ID NO: 1565690 - RNA, 14 nt, Human adenovirus D
ggcacggcgguggu

SEQ ID NO: 1565691 - RNA, 13 nt, Human adenovirus D
gacugauggccac

SEQ ID NO: 1565692 - RNA, 20 nt, Human adenovirus D
cccuggcucccagccuccac

SEQ ID NO: 1565693 - RNA, 17 nt, Human adenovirus D
cgagcugacggccaguc

SEQ ID NO: 1565694 - RNA, 23 nt, Human adenovirus D
augcaccuguggagggcaugggu

SEQ ID NO: 1565695 - RNA, 13 nt, Human adenovirus D
gcugggcugggac

SEQ ID NO: 1565696 - RNA, 18 nt, Human adenovirus D
gcaugcccaccacgcgca

SEQ ID NO: 1565697 - RNA, 22 nt, Human adenovirus D
ugaggaggagacugauggccac

SEQ ID NO: 1565698 - RNA, 22 nt, Human adenovirus D
agccucgaacaguccacccaga

SEQ ID NO: 1565699 - RNA, 15 nt, Human adenovirus D
ucucacucaaggugg

SEQ ID NO: 1565700 - RNA, 16 nt, Human adenovirus D
cgcugagcuaccgcga

SEQ ID NO: 1565701 - RNA, 19 nt, Human adenovirus D
gagcugcgcgagggccugg

SEQ ID NO: 1565702 - RNA, 23 nt, Human adenovirus D
ucugccagcagaaaugggcccuu

SEQ ID NO: 1565703 - RNA, 18 nt, Human adenovirus D
cggucguuguccaccagg

SEQ ID NO: 1565704 - RNA, 13 nt, Human adenovirus D
gccgccgccgcgg

SEQ ID NO: 1565705 - RNA, 21 nt, Human adenovirus D
uucuggaaauuaugagcauca

SEQ ID NO: 1565706 - RNA, 19 nt, Human adenovirus D
gacaugggggcggaccugc

SEQ ID NO: 1565707 - RNA, 13 nt, Human adenovirus D
ccccgcgcgcgcg

SEQ ID NO: 1565708 - RNA, 19 nt, Human adenovirus D
gcagguggcgccgggccug

SEQ ID NO: 1565709 - RNA, 15 nt, Human adenovirus D
uaacagggaaaggaa

SEQ ID NO: 1565710 - RNA, 17 nt, Human adenovirus D
cgaaugggaagaagaga

SEQ ID NO: 1565711 - RNA, 14 nt, Human adenovirus D
cagagucugccgcc

SEQ ID NO: 1565712 - RNA, 12 nt, Human adenovirus D
uccagggugcgc

SEQ ID NO: 1565713 - RNA, 21 nt, Human adenovirus D
ggccauucuggaggcgguggu

SEQ ID NO: 1565714 - RNA, 23 nt, Human adenovirus D
agcagcuugcgcgcuggcuuggu

SEQ ID NO: 1565715 - RNA, 19 nt, Human adenovirus D
agcugaccaacuggucucc

SEQ ID NO: 1565716 - RNA, 14 nt, Human adenovirus D
aggccaacagacuc

SEQ ID NO: 1565717 - RNA, 12 nt, Human adenovirus D
ggaucagccccg

SEQ ID NO: 1565718 - RNA, 19 nt, Human adenovirus D
gccaggaggcggugcgcac

SEQ ID NO: 1565719 - RNA, 21 nt, Human adenovirus D
ggcguaguugcgcaggcgcug

SEQ ID NO: 1565720 - RNA, 13 nt, Human adenovirus D
ucgacggugagca

SEQ ID NO: 1565721 - RNA, 20 nt, Human adenovirus D
cgcccagcaauaacaccggc

SEQ ID NO: 1565722 - RNA, 16 nt, Human adenovirus D
gccuucgaaggggggc

SEQ ID NO: 1565723 - RNA, 17 nt, Human adenovirus D
uaugcuccugggugaga

SEQ ID NO: 1565724 - RNA, 22 nt, Human adenovirus D
gucgccacggucaccgagccuc

SEQ ID NO: 1565725 - RNA, 22 nt, Human adenovirus D
cugcugaaacaccugcagcgcc

SEQ ID NO: 1565726 - RNA, 17 nt, Human adenovirus D
ucggaguaccugagccc

SEQ ID NO: 1565727 - RNA, 22 nt, Human adenovirus D
uuucacugaaggaaaaaucacu

SEQ ID NO: 1565728 - RNA, 15 nt, Human adenovirus D
gucaggucugcuggu

SEQ ID NO: 1565729 - RNA, 21 nt, Human adenovirus D
cccucgcgcaacugggccgcu

SEQ ID NO: 1565730 - RNA, 22 nt, Human adenovirus D
ccauggcgcacaacaccgccuc

SEQ ID NO: 1565731 - RNA, 15 nt, Human adenovirus D
gcagcggggccuggu

SEQ ID NO: 1565732 - RNA, 18 nt, Human adenovirus D
ucgaggagaccugcacua

SEQ ID NO: 1565733 - RNA, 14 nt, Human adenovirus D
cacccacaccgccu

SEQ ID NO: 1565734 - RNA, 19 nt, Human adenovirus D
aagcuagcacccaaaaacu

SEQ ID NO: 1565735 - RNA, 16 nt, Human adenovirus D
cuucaccgaccugggu

SEQ ID NO: 1565736 - RNA, 12 nt, Human adenovirus D
ccaccgccgccg

SEQ ID NO: 1565737 - RNA, 16 nt, Human adenovirus D
agcucgccgaggaggc

SEQ ID NO: 1565738 - RNA, 19 nt, Human adenovirus D
uggcuucuacagccagcag

SEQ ID NO: 1565739 - RNA, 15 nt, Human adenovirus D
gacuauccuugcaga

SEQ ID NO: 1565740 - RNA, 15 nt, Human adenovirus D
cacauggcaagcugc

SEQ ID NO: 1565741 - RNA, 15 nt, Human adenovirus D
ugcccccaagggcgc

SEQ ID NO: 1565742 - RNA, 14 nt, Human adenovirus D
uagugaccaagacc

SEQ ID NO: 1565743 - RNA, 12 nt, Human adenovirus D
auucaaggccau

SEQ ID NO: 1565744 - RNA, 22 nt, Human adenovirus D
gcaaguacauagugaccaagac

SEQ ID NO: 1565745 - RNA, 23 nt, Human adenovirus D
cacauguccccuuccuccgcauc

SEQ ID NO: 1565746 - RNA, 13 nt, Human adenovirus D
auccagcggcgca

SEQ ID NO: 1565747 - RNA, 20 nt, Human adenovirus D
caagaagaaguuagaggagg

SEQ ID NO: 1565748 - RNA, 17 nt, Human adenovirus D
cggugcuuagccugggc

SEQ ID NO: 1565749 - RNA, 15 nt, Human adenovirus D
gccuucuauggaggc

SEQ ID NO: 1565750 - RNA, 15 nt, Human adenovirus D
cuggugcgucgagca

SEQ ID NO: 1565751 - RNA, 19 nt, Human adenovirus D
acgcgcaucaucgcgccac

SEQ ID NO: 1565752 - RNA, 22 nt, Human adenovirus D
ucacccagaaaagucuccucug

SEQ ID NO: 1565753 - RNA, 21 nt, Human adenovirus D
ugcgcgaagccguggcgcagc

SEQ ID NO: 1565754 - RNA, 17 nt, Human adenovirus D
ggugacggccuacgagc

SEQ ID NO: 1565755 - RNA, 20 nt, Human adenovirus D
gggguauuacuaggcccagc

SEQ ID NO: 1565756 - RNA, 23 nt, Human adenovirus D
acaugcagcugccgucgucccgg

SEQ ID NO: 1565757 - RNA, 23 nt, Human adenovirus D
cucgaaggacgauaaagugcaag

SEQ ID NO: 1565758 - RNA, 14 nt, Human adenovirus D
ccgcuaucugcucu

SEQ ID NO: 1565759 - RNA, 20 nt, Human adenovirus D
cagaaggacgugcgcccggc

SEQ ID NO: 1565760 - RNA, 16 nt, Human adenovirus D
ucgacggugagcagcu

SEQ ID NO: 1565761 - RNA, 20 nt, Human adenovirus D
gauuauccuuucccuggugg

SEQ ID NO: 1565762 - RNA, 22 nt, Human adenovirus D
ccaggaggagaccgacgcuggg

SEQ ID NO: 1565763 - RNA, 22 nt, Human adenovirus D
uguacacgguucucucagcacg

SEQ ID NO: 1565764 - RNA, 16 nt, Human adenovirus D
gcagcuugcgcgcugg

SEQ ID NO: 1565765 - RNA, 13 nt, Human adenovirus D
cgcagaaaucagu

SEQ ID NO: 1565766 - RNA, 20 nt, Human adenovirus D
uuuagugggaccucagauau

SEQ ID NO: 1565767 - RNA, 13 nt, Human adenovirus D
gaaaaggcagcug

SEQ ID NO: 1565768 - RNA, 15 nt, Human adenovirus D
cagucaacuguuaag

SEQ ID NO: 1565769 - RNA, 23 nt, Human adenovirus D
cuaaucauuuaauaaagaucacu

SEQ ID NO: 1565770 - RNA, 20 nt, Human adenovirus D
cgccauugucaacacggccg

SEQ ID NO: 1565771 - RNA, 18 nt, Human adenovirus D
aaacuuuaaugcuccaaa

SEQ ID NO: 1565772 - RNA, 17 nt, Human adenovirus D
gcaaguacauagugacc

SEQ ID NO: 1565773 - RNA, 20 nt, Human adenovirus D
gaucuccaacguggagcuga

SEQ ID NO: 1565774 - RNA, 15 nt, Human adenovirus D
ugcgcuuugugcccg

SEQ ID NO: 1565775 - RNA, 11 nt, Human adenovirus D
cccucgcuggu

SEQ ID NO: 1565776 - RNA, 20 nt, Human adenovirus D
gccacgugaccagggguccc

SEQ ID NO: 1565777 - RNA, 12 nt, Human adenovirus D
augcaggagggg

SEQ ID NO: 1565778 - RNA, 11 nt, Human adenovirus D
gugcugcugcc

SEQ ID NO: 1565779 - RNA, 23 nt, Human adenovirus D
cggcgaggggcuccucucgugcu

SEQ ID NO: 1565780 - RNA, 15 nt, Human adenovirus D
cgggguacugacgcc

SEQ ID NO: 1565781 - RNA, 18 nt, Human adenovirus D
cuugcagacuuuagcaag

SEQ ID NO: 1565782 - RNA, 18 nt, Human adenovirus D
ugacagaggcaacagcaa

SEQ ID NO: 1565783 - RNA, 21 nt, Human adenovirus D
guccaucgugcgcgaccuggg

SEQ ID NO: 1565784 - RNA, 16 nt, Human adenovirus D
gggcaugggucaggca

SEQ ID NO: 1565785 - RNA, 20 nt, Human adenovirus D
cugccacuugaacucgggga

SEQ ID NO: 1565786 - RNA, 15 nt, Human adenovirus D
agggcgaaggugucc

SEQ ID NO: 1565787 - RNA, 15 nt, Human adenovirus D
ccauaggccaggcgc

SEQ ID NO: 1565788 - RNA, 12 nt, Human adenovirus D
ggucugcaggcc

SEQ ID NO: 1565789 - RNA, 17 nt, Human adenovirus D
ggcuuucuuugacacac

SEQ ID NO: 1565790 - RNA, 17 nt, Human adenovirus D
cccugcaagugcacaga

SEQ ID NO: 1565791 - RNA, 22 nt, Human adenovirus D
aguggcgagaggcgagcagcug

SEQ ID NO: 1565792 - RNA, 16 nt, Human adenovirus D
ggccgagaccgugagc

SEQ ID NO: 1565793 - RNA, 19 nt, Human adenovirus D
caguauugugggccuggga

SEQ ID NO: 1565794 - RNA, 18 nt, Human adenovirus D
gggccacuacagcugaca

SEQ ID NO: 1565795 - RNA, 14 nt, Human adenovirus D
ucaagcugggcugg

SEQ ID NO: 1565796 - RNA, 19 nt, Human adenovirus D
cuccgcggcacggcacgcg

SEQ ID NO: 1565797 - RNA, 22 nt, Human adenovirus D
uggucggcgccgagcucaugcc

SEQ ID NO: 1565798 - RNA, 15 nt, Human adenovirus D
cagcagcgacugacu

SEQ ID NO: 1565799 - RNA, 13 nt, Human adenovirus D
ucacgcaggugac

SEQ ID NO: 1565800 - RNA, 20 nt, Human adenovirus D
cauguugaaaagcucccaca

SEQ ID NO: 1565801 - RNA, 15 nt, Human adenovirus D
ugauucaaacagcaa

SEQ ID NO: 1565802 - RNA, 12 nt, Human adenovirus D
cagaaacagcau

SEQ ID NO: 1565803 - RNA, 11 nt, Human adenovirus D
aaucugcauga

SEQ ID NO: 1565804 - RNA, 17 nt, Human adenovirus D
uacagcacagcagggac

SEQ ID NO: 1565805 - RNA, 17 nt, Human adenovirus D
cucgcgcaacugggccg

SEQ ID NO: 1565806 - RNA, 17 nt, Human adenovirus D
aagcaggagcaggagga

SEQ ID NO: 1565807 - RNA, 15 nt, Human adenovirus D
aaggcucauaugacc

SEQ ID NO: 1565808 - RNA, 16 nt, Human adenovirus D
cgcccauuccuggaga

SEQ ID NO: 1565809 - RNA, 16 nt, Human adenovirus D
cacucgacgagccagg

SEQ ID NO: 1565810 - RNA, 22 nt, Human adenovirus D
cgagccggcggcgcgagcugag

SEQ ID NO: 1565811 - RNA, 15 nt, Human adenovirus D
gcauugucugccugg

SEQ ID NO: 1565812 - RNA, 20 nt, Human adenovirus D
cuuccguucuacccagcaag

SEQ ID NO: 1565813 - RNA, 20 nt, Human adenovirus D
ggcggagggugccagauugg

SEQ ID NO: 1565814 - RNA, 19 nt, Human adenovirus D
cugcagggcgcccagcaug

SEQ ID NO: 1565815 - RNA, 15 nt, Human adenovirus D
cucaugaacacacug

SEQ ID NO: 1565816 - RNA, 16 nt, Human adenovirus D
ucaagacaaaauucca

SEQ ID NO: 1565817 - RNA, 16 nt, Human adenovirus D
ugcuccaccaccugca

SEQ ID NO: 1565818 - RNA, 20 nt, Human adenovirus D
gcaacucguaccugggucac

SEQ ID NO: 1565819 - RNA, 20 nt, Human adenovirus D
ggcacggucuucgcccugcg

SEQ ID NO: 1565820 - RNA, 20 nt, Human adenovirus D
gcggggccacgaccgugccg

SEQ ID NO: 1565821 - RNA, 16 nt, Human adenovirus D
auacucggaaaacagg

SEQ ID NO: 1565822 - RNA, 15 nt, Human adenovirus D
gccugccccucauga

SEQ ID NO: 1565823 - RNA, 12 nt, Human adenovirus D
cagccugagcuu

SEQ ID NO: 1565824 - RNA, 22 nt, Human adenovirus D
cugggguauuacuaggcccagc

SEQ ID NO: 1565825 - RNA, 14 nt, Human adenovirus D
gcgggcaggggcgg

SEQ ID NO: 1565826 - RNA, 20 nt, Human adenovirus D
uagucccgaauacagggacg

SEQ ID NO: 1565827 - RNA, 18 nt, Human adenovirus D
cugggcguugcgggccga

SEQ ID NO: 1565828 - RNA, 21 nt, Human adenovirus D
ugcucgcucguagggguugag

SEQ ID NO: 1565829 - RNA, 13 nt, Human adenovirus D
cccgucuccugcc

SEQ ID NO: 1565830 - RNA, 19 nt, Human adenovirus D
gaacugcuggcccugcugg

SEQ ID NO: 1565831 - RNA, 22 nt, Human adenovirus D
cggcaugggaugcgugagggcg

SEQ ID NO: 1565832 - RNA, 22 nt, Human adenovirus D
agcagccgcguaagcaggagca

SEQ ID NO: 1565833 - RNA, 17 nt, Human adenovirus D
cauugucuucccucuca

SEQ ID NO: 1565834 - RNA, 12 nt, Human adenovirus D
uggacgagccgc

SEQ ID NO: 1565835 - RNA, 15 nt, Human adenovirus D
gaccugaugaacaac

SEQ ID NO: 1565836 - RNA, 13 nt, Human adenovirus D
gucucgcacucga

SEQ ID NO: 1565837 - RNA, 18 nt, Human adenovirus D
ccucgucauccuuccagu

SEQ ID NO: 1565838 - RNA, 16 nt, Human adenovirus D
cuuucuuugacacacc

SEQ ID NO: 1565839 - RNA, 21 nt, Human adenovirus D
cggccauucuggaggcggugg

SEQ ID NO: 1565840 - RNA, 18 nt, Human adenovirus D
ggcugcuggaugggcgug

SEQ ID NO: 1565841 - RNA, 20 nt, Human adenovirus D
gaaaaauugcuauaaaucuu

SEQ ID NO: 1565842 - RNA, 14 nt, Human adenovirus D
gcuaccgcggcacc

SEQ ID NO: 1565843 - RNA, 12 nt, Human adenovirus D
gauccagcggcg

SEQ ID NO: 1565844 - RNA, 16 nt, Human adenovirus D
cgcucuggggcccggc

SEQ ID NO: 1565845 - RNA, 23 nt, Human adenovirus D
aagauacagaguaaaaguaaaca

SEQ ID NO: 1565846 - RNA, 15 nt, Human adenovirus D
ugagaauaacaugcu

SEQ ID NO: 1565847 - RNA, 14 nt, Human adenovirus D
acaggaggcacaga

SEQ ID NO: 1565848 - RNA, 20 nt, Human adenovirus D
gaaaugggcccuugaacagc

SEQ ID NO: 1565849 - RNA, 17 nt, Human adenovirus D
aggcgcccagccagcaa

SEQ ID NO: 1565850 - RNA, 18 nt, Human adenovirus D
aggccuuucacccggacg

SEQ ID NO: 1565851 - RNA, 20 nt, Human adenovirus D
augcaacaugaccaaggacu

SEQ ID NO: 1565852 - RNA, 23 nt, Human adenovirus D
cacgcggaucucacggccugcgu

SEQ ID NO: 1565853 - RNA, 13 nt, Human adenovirus D
aaucgcggcggcc

SEQ ID NO: 1565854 - RNA, 20 nt, Human adenovirus D
acacuuccuucgcagucucc

SEQ ID NO: 1565855 - RNA, 18 nt, Human adenovirus D
ccgcggccguagcaggcg

SEQ ID NO: 1565856 - RNA, 18 nt, Human adenovirus D
uaccugguacgagcuaca

SEQ ID NO: 1565857 - RNA, 17 nt, Human adenovirus D
ucgcgcaggaggccauc

SEQ ID NO: 1565858 - RNA, 14 nt, Human adenovirus D
cucuuccgccgccg

SEQ ID NO: 1565859 - RNA, 14 nt, Human adenovirus D
ucgucgccccggag

SEQ ID NO: 1565860 - RNA, 23 nt, Human adenovirus D
gcccgagggucgcuggcugcugg

SEQ ID NO: 1565861 - RNA, 16 nt, Human adenovirus D
cagcgcuggguggccg

SEQ ID NO: 1565862 - RNA, 14 nt, Human adenovirus D
ugucccccgccgcu

SEQ ID NO: 1565863 - RNA, 21 nt, Human adenovirus D
acuccucggucagcuggcccg

SEQ ID NO: 1565864 - RNA, 23 nt, Human adenovirus D
agcaguguguguuugagaaaugc

SEQ ID NO: 1565865 - RNA, 14 nt, Human adenovirus D
ggcguucagggagg

SEQ ID NO: 1565866 - RNA, 20 nt, Human adenovirus D
gaggcggagucuuccaugcg

SEQ ID NO: 1565867 - RNA, 20 nt, Human adenovirus D
acaacaucggcuaccagggc

SEQ ID NO: 1565868 - RNA, 17 nt, Human adenovirus D
gcgaccccgagaccugc

SEQ ID NO: 1565869 - RNA, 22 nt, Human adenovirus D
caugguagcaauggaaaucaca

SEQ ID NO: 1565870 - RNA, 15 nt, Human adenovirus D
cggccaaggccacca

SEQ ID NO: 1565871 - RNA, 17 nt, Human adenovirus D
ugaagguuaguugcaga

SEQ ID NO: 1565872 - RNA, 18 nt, Human adenovirus D
caggcccagaacuggcag

SEQ ID NO: 1565873 - RNA, 21 nt, Human adenovirus D
acauguggagcuaucagcccc

SEQ ID NO: 1565874 - RNA, 12 nt, Human adenovirus D
cgcggcagaacc

SEQ ID NO: 1565875 - RNA, 19 nt, Human adenovirus D
cacccaacugagcaggggc

SEQ ID NO: 1565876 - RNA, 20 nt, Human adenovirus D
ccuccgggacgcccuggccg

SEQ ID NO: 1565877 - RNA, 20 nt, Human adenovirus D
cgucugacugccgccggcca

SEQ ID NO: 1565878 - RNA, 15 nt, Human adenovirus D
gucauugauacccug

SEQ ID NO: 1565879 - RNA, 22 nt, Human adenovirus D
cagcacgcggaucucacggccu

SEQ ID NO: 1565880 - RNA, 13 nt, Human adenovirus D
ccacucugagaca

SEQ ID NO: 1565881 - RNA, 17 nt, Human adenovirus D
gcggcgcaagcucaugc

SEQ ID NO: 1565882 - RNA, 23 nt, Human adenovirus D
uccccucgaaucaggcuggagcc

SEQ ID NO: 1565883 - RNA, 14 nt, Human adenovirus D
ccgccgccgccgcc

SEQ ID NO: 1565884 - RNA, 21 nt, Human adenovirus D
ggaggcgguccccgcccagcg

SEQ ID NO: 1565885 - RNA, 22 nt, Human adenovirus D
caacgugcccaucuccaucccc

SEQ ID NO: 1565886 - RNA, 18 nt, Human adenovirus D
gcauguacggaggagcca

SEQ ID NO: 1565887 - RNA, 16 nt, Human adenovirus D
cggacgugcgcgaagc

SEQ ID NO: 1565888 - RNA, 14 nt, Human adenovirus D
gcugccgcuggacg

SEQ ID NO: 1565889 - RNA, 13 nt, Human adenovirus D
agugcaagaaggg

SEQ ID NO: 1565890 - RNA, 14 nt, Human adenovirus D
cuugguaugaugau

SEQ ID NO: 1565891 - RNA, 15 nt, Human adenovirus D
ugaaggaaaaaucac

SEQ ID NO: 1565892 - RNA, 13 nt, Human adenovirus D
cacaucgccgggc

SEQ ID NO: 1565893 - RNA, 17 nt, Human adenovirus D
caggguaaagccagcag

SEQ ID NO: 1565894 - RNA, 15 nt, Human adenovirus D
aagggcggcgcugca

SEQ ID NO: 1565895 - RNA, 16 nt, Human adenovirus D
agcagcuguugaaaaa

SEQ ID NO: 1565896 - RNA, 18 nt, Human adenovirus D
ggccugcgucaucaccca

SEQ ID NO: 1565897 - RNA, 20 nt, Human adenovirus D
uagagggcguuggagagaag

SEQ ID NO: 1565898 - RNA, 15 nt, Human adenovirus D
aagagggagaggagc

SEQ ID NO: 1565899 - RNA, 14 nt, Human adenovirus D
cuccguagccuggc

SEQ ID NO: 1565900 - RNA, 18 nt, Human adenovirus D
augaggauugggaggagg

SEQ ID NO: 1565901 - RNA, 21 nt, Human adenovirus D
gaugguggcgaggaggaccag

SEQ ID NO: 1565902 - RNA, 21 nt, Human adenovirus D
augccggcagcggugguggag

SEQ ID NO: 1565903 - RNA, 17 nt, Human adenovirus D
acagccucucugaagca

SEQ ID NO: 1565904 - RNA, 20 nt, Human adenovirus D
gggguacuuuacgcuggcca

SEQ ID NO: 1565905 - RNA, 21 nt, Human adenovirus D
cccucggcaacgaccugcgcg

SEQ ID NO: 1565906 - RNA, 24 nt, Human adenovirus D
cagacgauaaauuuugacgagcgg

SEQ ID NO: 1565907 - RNA, 16 nt, Human adenovirus D
auuacucgcaaaaaua

SEQ ID NO: 1565908 - RNA, 22 nt, Human adenovirus D
accacgcuacaaauccaacucu

SEQ ID NO: 1565909 - RNA, 20 nt, Human adenovirus D
ugcugguggaaacagacagc

SEQ ID NO: 1565910 - RNA, 16 nt, Human adenovirus D
cgcaggaguccaccgc

SEQ ID NO: 1565911 - RNA, 13 nt, Human adenovirus D
aaccgccuggggc

SEQ ID NO: 1565912 - RNA, 22 nt, Human adenovirus D
gccaggccuccgagcagcgcau

SEQ ID NO: 1565913 - RNA, 21 nt, Human adenovirus D
acggccggccgcgagaccgga

SEQ ID NO: 1565914 - RNA, 18 nt, Human adenovirus D
gccugcgcccgcgccgcg

SEQ ID NO: 1565915 - RNA, 14 nt, Human adenovirus D
cgucaccugcggcg

SEQ ID NO: 1565916 - RNA, 16 nt, Human adenovirus D
ccgggccugggcgugc

SEQ ID NO: 1565917 - RNA, 12 nt, Human adenovirus D
cauacugcuauc

SEQ ID NO: 1565918 - RNA, 23 nt, Human adenovirus D
ucgacagcgucaaccucuacgcc

SEQ ID NO: 1565919 - RNA, 15 nt, Human adenovirus D
cgccaaaaaaacaca

SEQ ID NO: 1565920 - RNA, 18 nt, Human adenovirus D
gccagccgacuucuccag

SEQ ID NO: 1565921 - RNA, 18 nt, Human adenovirus D
gcaccugggcgccagaag

SEQ ID NO: 1565922 - RNA, 17 nt, Human adenovirus D
cauggccucgugcucug

SEQ ID NO: 1565923 - RNA, 16 nt, Human adenovirus D
ggcggauagcgcgccg

SEQ ID NO: 1565924 - RNA, 22 nt, Human adenovirus D
gcuggaagaccuacgcucagga

SEQ ID NO: 1565925 - RNA, 23 nt, Human adenovirus D
uaugggagagaacaaaaccuuag

SEQ ID NO: 1565926 - RNA, 21 nt, Human adenovirus D
aacucugauucaugugaacaa

SEQ ID NO: 1565927 - RNA, 18 nt, Human adenovirus D
aaaaagaaacaagucaaa

SEQ ID NO: 1565928 - RNA, 18 nt, Human adenovirus D
ggccgaaauuggugcgcu

SEQ ID NO: 1565929 - RNA, 16 nt, Human adenovirus D
caccaucaccaccguc

SEQ ID NO: 1565930 - RNA, 21 nt, Human adenovirus D
cagcagaagaucccggcgcag

SEQ ID NO: 1565931 - RNA, 15 nt, Human adenovirus D
ggugcuuagccuggg

SEQ ID NO: 1565932 - RNA, 12 nt, Human adenovirus D
ggucagcuggcc

SEQ ID NO: 1565933 - RNA, 23 nt, Human adenovirus D
uaagacauaacugggugaugcuu

SEQ ID NO: 1565934 - RNA, 19 nt, Human adenovirus D
agagaaguuuaauggggug

SEQ ID NO: 1565935 - RNA, 21 nt, Human adenovirus D
ucacagcuaagaaaaaaucag

SEQ ID NO: 1565936 - RNA, 22 nt, Human adenovirus D
gcaugcaagaucuccaacgugg

SEQ ID NO: 1565937 - RNA, 19 nt, Human adenovirus D
ugccauuuuucagcagagu

SEQ ID NO: 1565938 - RNA, 15 nt, Human adenovirus D
cucacuugccgccug

SEQ ID NO: 1565939 - RNA, 16 nt, Human adenovirus D
gcgagaaggcgcccag

SEQ ID NO: 1565940 - RNA, 16 nt, Human adenovirus D
gcuccaaagcuagcac

SEQ ID NO: 1565941 - RNA, 14 nt, Human adenovirus D
cacgcccugggugu

SEQ ID NO: 1565942 - RNA, 18 nt, Human adenovirus D
cugcagcucaucgacugg

SEQ ID NO: 1565943 - RNA, 12 nt, Human adenovirus D
gggacgugagcg

SEQ ID NO: 1565944 - RNA, 17 nt, Human adenovirus D
agcauggcuaccuggga

SEQ ID NO: 1565945 - RNA, 16 nt, Human adenovirus D
gcgcauccccuucucc

SEQ ID NO: 1565946 - RNA, 12 nt, Human adenovirus D
cuacagccagca

SEQ ID NO: 1565947 - RNA, 22 nt, Human adenovirus D
ccuggugcgucgagcacagcac

SEQ ID NO: 1565948 - RNA, 14 nt, Human adenovirus D
uuuaacuguaucug

SEQ ID NO: 1565949 - RNA, 23 nt, Human adenovirus D
cgcacuggcuuccgccgccgggg

SEQ ID NO: 1565950 - RNA, 18 nt, Human adenovirus D
gaucuccuccuccuggag

SEQ ID NO: 1565951 - RNA, 19 nt, Human adenovirus D
ugggcgugcagaccgugga

SEQ ID NO: 1565952 - RNA, 23 nt, Human adenovirus D
guuauugagcccaucaagcaaga

SEQ ID NO: 1565953 - RNA, 22 nt, Human adenovirus D
gacgagaacguccauggcgcag

SEQ ID NO: 1565954 - RNA, 21 nt, Human adenovirus D
acgccccugagcggcugcacg

SEQ ID NO: 1565955 - RNA, 17 nt, Human adenovirus D
ggugcgucgagcacagc

SEQ ID NO: 1565956 - RNA, 15 nt, Human adenovirus D
caacaccgccuccac

SEQ ID NO: 1565957 - RNA, 22 nt, Human adenovirus D
uccgcggccacuuccgcgcucc

SEQ ID NO: 1565958 - RNA, 16 nt, Human adenovirus D
cgugaucccacagggc

SEQ ID NO: 1565959 - RNA, 15 nt, Human adenovirus D
ugcgucccuggcucc

SEQ ID NO: 1565960 - RNA, 18 nt, Human adenovirus D
cuggcgguagagcggcca

SEQ ID NO: 1565961 - RNA, 15 nt, Human adenovirus D
cccugcucaccugca

SEQ ID NO: 1565962 - RNA, 15 nt, Human adenovirus D
ccgaggacacccggc

SEQ ID NO: 1565963 - RNA, 13 nt, Human adenovirus D
ccaacagccacau

SEQ ID NO: 1565964 - RNA, 15 nt, Human adenovirus D
gagccacugcuaccu

SEQ ID NO: 1565965 - RNA, 19 nt, Human adenovirus D
cagagucgaggucagcagc

SEQ ID NO: 1565966 - RNA, 18 nt, Human adenovirus D
ucuuccucuccuccuccc

SEQ ID NO: 1565967 - RNA, 22 nt, Human adenovirus D
cgagcucaugcccuuccgcgcc

SEQ ID NO: 1565968 - RNA, 13 nt, Human adenovirus D
ggccucucgcucc

SEQ ID NO: 1565969 - RNA, 18 nt, Human adenovirus D
agacaaaggaggccacgu

SEQ ID NO: 1565970 - RNA, 16 nt, Human adenovirus D
uuucugcagacaucau

SEQ ID NO: 1565971 - RNA, 14 nt, Human adenovirus D
cagccgccaugaca

SEQ ID NO: 1565972 - RNA, 14 nt, Human adenovirus D
gaccuuccaggaga

SEQ ID NO: 1565973 - RNA, 16 nt, Human adenovirus D
guugguuuaaucagga

SEQ ID NO: 1565974 - RNA, 19 nt, Human adenovirus D
gccacugcaccccccgcag

SEQ ID NO: 1565975 - RNA, 15 nt, Human adenovirus D
accaacaugcccaau

SEQ ID NO: 1565976 - RNA, 18 nt, Human adenovirus D
cucaauaaacagcacuuu

SEQ ID NO: 1565977 - RNA, 12 nt, Human adenovirus D
caaagagcacag

SEQ ID NO: 1565978 - RNA, 19 nt, Human adenovirus D
gcagcaggugcugccccag

SEQ ID NO: 1565979 - RNA, 12 nt, Human adenovirus D
caccagcccauu

SEQ ID NO: 1565980 - RNA, 13 nt, Human adenovirus D
gcgcccaggccgc

SEQ ID NO: 1565981 - RNA, 15 nt, Human adenovirus D
ccaugcgccaagggc

SEQ ID NO: 1565982 - RNA, 14 nt, Human adenovirus D
cauaaaucugcccu

SEQ ID NO: 1565983 - RNA, 17 nt, Human adenovirus D
uggucccuucucggacc

SEQ ID NO: 1565984 - RNA, 13 nt, Human adenovirus D
ccuuccaguacuc

SEQ ID NO: 1565985 - RNA, 15 nt, Human adenovirus D
cucgcgcaacugggc

SEQ ID NO: 1565986 - RNA, 15 nt, Human adenovirus D
gagccgccagcuggc

SEQ ID NO: 1565987 - RNA, 17 nt, Human adenovirus D
ugucguacuucugccag

SEQ ID NO: 1565988 - RNA, 12 nt, Human adenovirus D
accugagccgcg

SEQ ID NO: 1565989 - RNA, 18 nt, Human adenovirus D
ccggugagacgcgcgcag

SEQ ID NO: 1565990 - RNA, 22 nt, Human adenovirus D
ugcucuccgcaccgcuccuggu

SEQ ID NO: 1565991 - RNA, 15 nt, Human adenovirus D
aaacaauaaaaaacu

SEQ ID NO: 1565992 - RNA, 12 nt, Human adenovirus D
aagaagagcagc

SEQ ID NO: 1565993 - RNA, 12 nt, Human adenovirus D
ccgccagcuggc

SEQ ID NO: 1565994 - RNA, 22 nt, Human adenovirus D
cgccggcgcuagccagccacag

SEQ ID NO: 1565995 - RNA, 15 nt, Human adenovirus D
caguccgccaagcuc

SEQ ID NO: 1565996 - RNA, 18 nt, Human adenovirus D
gccgcugcaaccugugcu

SEQ ID NO: 1565997 - RNA, 14 nt, Human adenovirus D
gcgcgaccugggcu

SEQ ID NO: 1565998 - RNA, 14 nt, Human adenovirus D
ggaaccauggacac

SEQ ID NO: 1565999 - RNA, 23 nt, Human adenovirus D
ccacagccuugauuuuuccagcc

SEQ ID NO: 1566000 - RNA, 15 nt, Human adenovirus D
gucccuggcuccgcg

SEQ ID NO: 1566001 - RNA, 19 nt, Human adenovirus D
acugggcguugcgggccga

SEQ ID NO: 1566002 - RNA, 21 nt, Human adenovirus D
agcagcuugcugacgcccaac

SEQ ID NO: 1566003 - RNA, 18 nt, Human adenovirus D
caguacuggcaacauggg

SEQ ID NO: 1566004 - RNA, 21 nt, Human adenovirus D
gugcaguuugcccgcgccacc

SEQ ID NO: 1566005 - RNA, 15 nt, Human adenovirus D
cugggcucgcuggug

SEQ ID NO: 1566006 - RNA, 16 nt, Human adenovirus D
cugaacgccuuccugg

SEQ ID NO: 1566007 - RNA, 17 nt, Human adenovirus D
cuacaugcccagcagca

SEQ ID NO: 1566008 - RNA, 19 nt, Human adenovirus D
accgaggugccccagagcg

SEQ ID NO: 1566009 - RNA, 15 nt, Human adenovirus D
cacuggguggcccuu

SEQ ID NO: 1566010 - RNA, 23 nt, Human adenovirus D
caaacggugaaccugagccaggc

SEQ ID NO: 1566011 - RNA, 19 nt, Human adenovirus D
ggcgcgccuuggaggccgc

SEQ ID NO: 1566012 - RNA, 13 nt, Human adenovirus D
gcuucuacagcca

SEQ ID NO: 1566013 - RNA, 14 nt, Human adenovirus D
gaucccgcuguggc

SEQ ID NO: 1566014 - RNA, 13 nt, Human adenovirus D
ucccgcucccagc

SEQ ID NO: 1566015 - RNA, 18 nt, Human adenovirus D
cuuuaucagcacugcaaa

SEQ ID NO: 1566016 - RNA, 15 nt, Human adenovirus D
gagugaggcacugcu

SEQ ID NO: 1566017 - RNA, 15 nt, Human adenovirus D
cacagucaacuguua

SEQ ID NO: 1566018 - RNA, 12 nt, Human adenovirus D
ccaccaacgugc

SEQ ID NO: 1566019 - RNA, 20 nt, Human adenovirus D
gauuuggcuuucuuugacac

SEQ ID NO: 1566020 - RNA, 12 nt, Human adenovirus D
aggcgugcacug

SEQ ID NO: 1566021 - RNA, 22 nt, Human adenovirus D
gccgccacugcaccccccgcag

SEQ ID NO: 1566022 - RNA, 14 nt, Human adenovirus D
gccuucgaaggggg

SEQ ID NO: 1566023 - RNA, 20 nt, Human adenovirus D
caggagggggccacucccag

SEQ ID NO: 1566024 - RNA, 16 nt, Human adenovirus D
uguugcacgcggguga

SEQ ID NO: 1566025 - RNA, 13 nt, Human adenovirus D
gcgcuaccacccc

SEQ ID NO: 1566026 - RNA, 22 nt, Human adenovirus D
cuguccaugguagcaauggaaa

SEQ ID NO: 1566027 - RNA, 17 nt, Human adenovirus D
cggcggccaaccuggug

SEQ ID NO: 1566028 - RNA, 13 nt, Human adenovirus D
cuuaaccacccac

SEQ ID NO: 1566029 - RNA, 21 nt, Human adenovirus D
ccucgagcuacaugcccagca

SEQ ID NO: 1566030 - RNA, 14 nt, Human adenovirus D
ucaugaccagcaug

SEQ ID NO: 1566031 - RNA, 20 nt, Human adenovirus D
agaccagaacuuccagcaga

SEQ ID NO: 1566032 - RNA, 20 nt, Human adenovirus D
accccuuacauguggagcua

SEQ ID NO: 1566033 - RNA, 21 nt, Human adenovirus D
ggcagcuccgguugugcagcc

SEQ ID NO: 1566034 - RNA, 20 nt, Human adenovirus D
cgacugacuacccacugacu

SEQ ID NO: 1566035 - RNA, 18 nt, Human adenovirus D
ugcuauaaaucuuuucuc

SEQ ID NO: 1566036 - RNA, 20 nt, Human adenovirus D
gcgcuggggcugcucggcgc

SEQ ID NO: 1566037 - RNA, 14 nt, Human adenovirus D
accggugcucugcg

SEQ ID NO: 1566038 - RNA, 18 nt, Human adenovirus D
uuagacucugacacaccu

SEQ ID NO: 1566039 - RNA, 18 nt, Human adenovirus D
accugcgcaaggucgagg

SEQ ID NO: 1566040 - RNA, 15 nt, Human adenovirus D
gggcaccuuccagcc

SEQ ID NO: 1566041 - RNA, 21 nt, Human adenovirus D
ugagacucauccugcuggugc

SEQ ID NO: 1566042 - RNA, 18 nt, Human adenovirus D
caagaccccgucaccuuc

SEQ ID NO: 1566043 - RNA, 19 nt, Human adenovirus D
gccccaggcggugcugcug

SEQ ID NO: 1566044 - RNA, 17 nt, Human adenovirus D
ucaugaccagcaugaag

SEQ ID NO: 1566045 - RNA, 16 nt, Human adenovirus D
uuaaccacccacgagc

SEQ ID NO: 1566046 - RNA, 17 nt, Human adenovirus D
gcucaggaccauaggga

SEQ ID NO: 1566047 - RNA, 22 nt, Human adenovirus D
aucagccccagaugggccuggc

SEQ ID NO: 1566048 - RNA, 13 nt, Human adenovirus D
ggccgagcuggaa

SEQ ID NO: 1566049 - RNA, 20 nt, Human adenovirus D
cccaguuucaaacccuacuc

SEQ ID NO: 1566050 - RNA, 21 nt, Human adenovirus D
uauaaucgccagggaacugaa

SEQ ID NO: 1566051 - RNA, 24 nt, Human adenovirus D
cuuacucagguuuggauauucaaa

SEQ ID NO: 1566052 - RNA, 21 nt, Human adenovirus D
gcccguagcugcgcggggcca

SEQ ID NO: 1566053 - RNA, 19 nt, Human adenovirus D
ugcaggauaaauauggccu

SEQ ID NO: 1566054 - RNA, 15 nt, Human adenovirus D
cuaccacgcccauga

SEQ ID NO: 1566055 - RNA, 18 nt, Human adenovirus D
aaaaacagacuggucaaa

SEQ ID NO: 1566056 - RNA, 23 nt, Human adenovirus D
cauuacuauuacugccacugcca

SEQ ID NO: 1566057 - RNA, 14 nt, Human adenovirus D
acauccauggccag

SEQ ID NO: 1566058 - RNA, 18 nt, Human adenovirus D
ccacccacgagcaaccca

SEQ ID NO: 1566059 - RNA, 21 nt, Human adenovirus D
cguguccacgcauugcaugag

SEQ ID NO: 1566060 - RNA, 12 nt, Human adenovirus D
uaagcaggagca

SEQ ID NO: 1566061 - RNA, 22 nt, Human adenovirus D
cugcuaaacaucgccgagcccg

SEQ ID NO: 1566062 - RNA, 18 nt, Human adenovirus D
agggagcugcgcgagggc

SEQ ID NO: 1566063 - RNA, 19 nt, Human adenovirus D
cccaggaauggcacgcucu

SEQ ID NO: 1566064 - RNA, 13 nt, Human adenovirus D
cgcaagcucaugc

SEQ ID NO: 1566065 - RNA, 17 nt, Human adenovirus D
uguaaagccagaaagaa

SEQ ID NO: 1566066 - RNA, 22 nt, Human adenovirus D
aggugcugacauccauggccag

SEQ ID NO: 1566067 - RNA, 22 nt, Human adenovirus D
cauccuggaccaggcggcagag

SEQ ID NO: 1566068 - RNA, 23 nt, Human adenovirus D
gaacuuccaaacuauugcuuccc

SEQ ID NO: 1566069 - RNA, 20 nt, Human adenovirus D
cccgcgugcagcugcagaag

SEQ ID NO: 1566070 - RNA, 15 nt, Human adenovirus D
guccugucacucaaa

SEQ ID NO: 1566071 - RNA, 16 nt, Human adenovirus D
gccugcaaacggugaa

SEQ ID NO: 1566072 - RNA, 13 nt, Human adenovirus D
ugaaggggacgag

SEQ ID NO: 1566073 - RNA, 21 nt, Human adenovirus D
aucaccauguuauucagcagc

SEQ ID NO: 1566074 - RNA, 22 nt, Human adenovirus D
gcagcacauaaucaccauguua

SEQ ID NO: 1566075 - RNA, 18 nt, Human adenovirus D
uccgcagcuacaccuccc

SEQ ID NO: 1566076 - RNA, 20 nt, Human adenovirus D
uuggcagccgagccggcgcg

SEQ ID NO: 1566077 - RNA, 15 nt, Human adenovirus D
gguaaagccagcagc

SEQ ID NO: 1566078 - RNA, 12 nt, Human adenovirus D
cggaggugagcu

SEQ ID NO: 1566079 - RNA, 12 nt, Human adenovirus D
gcgcccucagca

SEQ ID NO: 1566080 - RNA, 21 nt, Human adenovirus D
cguccaucgugcgcgaccugg

SEQ ID NO: 1566081 - RNA, 20 nt, Human adenovirus D
ugacaugcaaaaucuuacac

SEQ ID NO: 1566082 - RNA, 22 nt, Human adenovirus D
gagguggacgagggggcaguag

SEQ ID NO: 1566083 - RNA, 23 nt, Human adenovirus D
aucggacgacugggaggcugcga

SEQ ID NO: 1566084 - RNA, 15 nt, Human adenovirus D
gagccauagagggcg

SEQ ID NO: 1566085 - RNA, 17 nt, Human adenovirus D
accgucaccuucacagc

SEQ ID NO: 1566086 - RNA, 15 nt, Human adenovirus D
cugggaauccugcac

SEQ ID NO: 1566087 - RNA, 16 nt, Human adenovirus D
cagaaguucaccugca

SEQ ID NO: 1566088 - RNA, 16 nt, Human adenovirus D
ugaacccgcacuggcu

SEQ ID NO: 1566089 - RNA, 13 nt, Human adenovirus D
gaaagcauacaga

SEQ ID NO: 1566090 - RNA, 17 nt, Human adenovirus D
gacuggaaacucuugga

SEQ ID NO: 1566091 - RNA, 19 nt, Human adenovirus D
augcuguggucgacuugca

SEQ ID NO: 1566092 - RNA, 13 nt, Human adenovirus D
guccucuuccucu

SEQ ID NO: 1566093 - RNA, 16 nt, Human adenovirus D
cgcccugagagcgcug

SEQ ID NO: 1566094 - RNA, 14 nt, Human adenovirus D
acagccacaugacc

SEQ ID NO: 1566095 - RNA, 21 nt, Human adenovirus D
aaaucugaaaguaugucucug

SEQ ID NO: 1566096 - RNA, 18 nt, Human adenovirus D
auggcgugcuggagagcg

SEQ ID NO: 1566097 - RNA, 20 nt, Human adenovirus D
uucuuccggcaaaaaucaca

SEQ ID NO: 1566098 - RNA, 11 nt, Human adenovirus D
gacagccaggu

SEQ ID NO: 1566099 - RNA, 14 nt, Human adenovirus D
cucauccugcuggu

SEQ ID NO: 1566100 - RNA, 19 nt, Human adenovirus D
acaccugugacaugcaaaa

SEQ ID NO: 1566101 - RNA, 13 nt, Human adenovirus D
ccgccgcaccgcc

SEQ ID NO: 1566102 - RNA, 21 nt, Human adenovirus D
agccauugaccaccagggagc

SEQ ID NO: 1566103 - RNA, 22 nt, Human adenovirus D
ucauccaugaugauggcgaugg

SEQ ID NO: 1566104 - RNA, 23 nt, Human adenovirus D
cgagcagacggugaagcaggagc

SEQ ID NO: 1566105 - RNA, 21 nt, Human adenovirus D
ccuugcaaaagcgccaggagg

SEQ ID NO: 1566106 - RNA, 16 nt, Human adenovirus D
cgaggacuaccacgcc

SEQ ID NO: 1566107 - RNA, 17 nt, Human adenovirus D
cgcgagugucccccgcc

SEQ ID NO: 1566108 - RNA, 16 nt, Human adenovirus D
caggccgcagcucuuc

SEQ ID NO: 1566109 - RNA, 19 nt, Human adenovirus D
ggagcucuugcagggaagc

SEQ ID NO: 1566110 - RNA, 13 nt, Human adenovirus D
cagcugcagcgca

SEQ ID NO: 1566111 - RNA, 18 nt, Human adenovirus D
gaucaaccuccaggccaa

SEQ ID NO: 1566112 - RNA, 23 nt, Human adenovirus D
uuucuacgggugaguugguggcc

SEQ ID NO: 1566113 - RNA, 20 nt, Human adenovirus D
aggagcugaucucgcugccg

SEQ ID NO: 1566114 - RNA, 18 nt, Human adenovirus D
gaagugcggcggcggcug

SEQ ID NO: 1566115 - RNA, 12 nt, Human adenovirus D
cuuccagcagaa

SEQ ID NO: 1566116 - RNA, 13 nt, Human adenovirus D
agcgcgugcugcg

SEQ ID NO: 1566117 - RNA, 12 nt, Human adenovirus D
caagugcacaga

SEQ ID NO: 1566118 - RNA, 20 nt, Human adenovirus D
gcugaccaauagacagcaga

SEQ ID NO: 1566119 - RNA, 13 nt, Human adenovirus D
ccagaugaggauu

SEQ ID NO: 1566120 - RNA, 22 nt, Human adenovirus D
ugauaaggagaaggauucaaaa

SEQ ID NO: 1566121 - RNA, 22 nt, Human adenovirus D
agcgacacccccgcgugcagcu

SEQ ID NO: 1566122 - RNA, 16 nt, Human adenovirus D
cauguuauucagcagc

SEQ ID NO: 1566123 - RNA, 20 nt, Human adenovirus D
uggccgcccugacccagcag

SEQ ID NO: 1566124 - RNA, 18 nt, Human adenovirus D
gcgccagacgcacgggcc

SEQ ID NO: 1566125 - RNA, 15 nt, Human adenovirus D
ugcgauauggaugau

SEQ ID NO: 1566126 - RNA, 21 nt, Human adenovirus D
ccagaaagaaguggccagugu

SEQ ID NO: 1566127 - RNA, 18 nt, Human adenovirus D
gacacaccuggaggcacc

SEQ ID NO: 1566128 - RNA, 18 nt, Human adenovirus D
cuacgaaucauggaggcc

SEQ ID NO: 1566129 - RNA, 18 nt, Human adenovirus D
guccgcccgcgcccacca

SEQ ID NO: 1566130 - RNA, 21 nt, Human adenovirus D
aggucccgguguugcgcccug

SEQ ID NO: 1566131 - RNA, 14 nt, Human adenovirus D
gucaggcaggcaug

SEQ ID NO: 1566132 - RNA, 19 nt, Human adenovirus D
aggugguggacggccuggc

SEQ ID NO: 1566133 - RNA, 12 nt, Human adenovirus D
cugauguugauu

SEQ ID NO: 1566134 - RNA, 13 nt, Human adenovirus D
ggaugcaugcggg

SEQ ID NO: 1566135 - RNA, 19 nt, Human adenovirus D
acgcggaucucacggccug

SEQ ID NO: 1566136 - RNA, 20 nt, Human adenovirus D
aucagcacugcaaauuuaac

SEQ ID NO: 1566137 - RNA, 12 nt, Human adenovirus D
ucuucugggugg

SEQ ID NO: 1566138 - RNA, 15 nt, Human adenovirus D
caccgcgaccgcggc

SEQ ID NO: 1566139 - RNA, 14 nt, Human adenovirus D
caagucucucuaac

SEQ ID NO: 1566140 - RNA, 13 nt, Human adenovirus D
agcucugcugcgc

SEQ ID NO: 1566141 - RNA, 14 nt, Human adenovirus D
gcugcuggaugggc

SEQ ID NO: 1566142 - RNA, 22 nt, Human adenovirus D
cgccaccuucuuccccauggcg

SEQ ID NO: 1566143 - RNA, 23 nt, Human adenovirus D
caggauaaauauggccuggagca

SEQ ID NO: 1566144 - RNA, 21 nt, Human adenovirus D
guccgcaugacuaacucaggu

SEQ ID NO: 1566145 - RNA, 18 nt, Human adenovirus D
ccggaggcgugcacuggc

SEQ ID NO: 1566146 - RNA, 19 nt, Human adenovirus D
cuggcgaaagauggcgugc

SEQ ID NO: 1566147 - RNA, 20 nt, Human adenovirus D
ccgccggaaacgccaccacc

SEQ ID NO: 1566148 - RNA, 16 nt, Human adenovirus D
gaucugggaugcugcc

SEQ ID NO: 1566149 - RNA, 14 nt, Human adenovirus D
ggcagggugagccg

SEQ ID NO: 1566150 - RNA, 15 nt, Human adenovirus D
gaugaugaccgagcu

SEQ ID NO: 1566151 - RNA, 17 nt, Human adenovirus D
aucgugaacgcgcuggc

SEQ ID NO: 1566152 - RNA, 14 nt, Human adenovirus D
aggaaccagcacac

SEQ ID NO: 1566153 - RNA, 19 nt, Human adenovirus D
accaugaccauagaccuga

SEQ ID NO: 1566154 - RNA, 16 nt, Human adenovirus D
gcaucagucuccuggu

SEQ ID NO: 1566155 - RNA, 18 nt, Human adenovirus D
cgagaucggcaccagcca

SEQ ID NO: 1566156 - RNA, 14 nt, Human adenovirus D
gcaagugcacagac

SEQ ID NO: 1566157 - RNA, 17 nt, Human adenovirus D
accacacggccagcagg

SEQ ID NO: 1566158 - RNA, 18 nt, Human adenovirus D
cgacccccaggcccugga

SEQ ID NO: 1566159 - RNA, 15 nt, Human adenovirus D
gaaucgcgggcggcc

SEQ ID NO: 1566160 - RNA, 20 nt, Human adenovirus D
gugcugacauccauggccag

SEQ ID NO: 1566161 - RNA, 17 nt, Human adenovirus D
ccucuguggugaggauc

SEQ ID NO: 1566162 - RNA, 19 nt, Human adenovirus D
gcuucugccuggugaaggg

SEQ ID NO: 1566163 - RNA, 23 nt, Human adenovirus D
augcuccaggucgucgccccgga

SEQ ID NO: 1566164 - RNA, 21 nt, Human adenovirus D
aaucgagcaggaccugggcuu

SEQ ID NO: 1566165 - RNA, 14 nt, Human adenovirus D
ccucgcuacugcug

SEQ ID NO: 1566166 - RNA, 23 nt, Human adenovirus D
gcugacaauucagagccagggcu

SEQ ID NO: 1566167 - RNA, 12 nt, Human adenovirus D
augaccucggca

SEQ ID NO: 1566168 - RNA, 19 nt, Human adenovirus D
agggcaccaccgagucuca

SEQ ID NO: 1566169 - RNA, 17 nt, Human adenovirus D
cucugacggcgcagcug

SEQ ID NO: 1566170 - RNA, 14 nt, Human adenovirus D
gaccacgguggugc

SEQ ID NO: 1566171 - RNA, 14 nt, Human adenovirus D
ucacaagucucucu

SEQ ID NO: 1566172 - RNA, 16 nt, Human adenovirus D
acagugcccccuccac

SEQ ID NO: 1566173 - RNA, 23 nt, Human adenovirus D
gggccugcaaacggugaaccuga

SEQ ID NO: 1566174 - RNA, 16 nt, Human adenovirus D
agcaaccuccugggca

SEQ ID NO: 1566175 - RNA, 22 nt, Human adenovirus D
augcccuccuauuacuugguga

SEQ ID NO: 1566176 - RNA, 23 nt, Human adenovirus D
cgccgcgcuggggagggccacgu

SEQ ID NO: 1566177 - RNA, 18 nt, Human adenovirus D
ucugcccgcgcucauccc

SEQ ID NO: 1566178 - RNA, 16 nt, Human adenovirus D
ucuauugcuagcccuu

SEQ ID NO: 1566179 - RNA, 17 nt, Human adenovirus D
uccaacucuuaaaucau

SEQ ID NO: 1566180 - RNA, 14 nt, Human adenovirus D
acccugugaccaag

SEQ ID NO: 1566181 - RNA, 17 nt, Human adenovirus D
uggauugcaauuuugug

SEQ ID NO: 1566182 - RNA, 14 nt, Human adenovirus D
caccugucccuacg

SEQ ID NO: 1566183 - RNA, 16 nt, Human adenovirus D
acuggucaaaaacaaa

SEQ ID NO: 1566184 - RNA, 16 nt, Human adenovirus D
agggcagcccuacccc

SEQ ID NO: 1566185 - RNA, 12 nt, Human adenovirus D
cuuccuggggca

SEQ ID NO: 1566186 - RNA, 15 nt, Human adenovirus D
ucggacaugaacugc

SEQ ID NO: 1566187 - RNA, 14 nt, Human adenovirus D
cggcgcgcuccuug

SEQ ID NO: 1566188 - RNA, 12 nt, Human adenovirus D
uguaaagccaga

SEQ ID NO: 1566189 - RNA, 20 nt, Human adenovirus D
gcaagguccgcaggagucca

SEQ ID NO: 1566190 - RNA, 18 nt, Human adenovirus D
gcacguucaggacaccgg

SEQ ID NO: 1566191 - RNA, 11 nt, Human adenovirus D
agcagcagggu

SEQ ID NO: 1566192 - RNA, 20 nt, Human adenovirus D
aauuuuuguuguacucugug

SEQ ID NO: 1566193 - RNA, 15 nt, Human adenovirus D
cuaccgcggcacccg

SEQ ID NO: 1566194 - RNA, 15 nt, Human adenovirus D
uggcuucagagacaa

SEQ ID NO: 1566195 - RNA, 22 nt, Human adenovirus D
cagcaguacaagcgccaacagc

SEQ ID NO: 1566196 - RNA, 12 nt, Human adenovirus D
ugaacaggagca

SEQ ID NO: 1566197 - RNA, 18 nt, Human adenovirus D
gaaaugguucacggccuu

SEQ ID NO: 1566198 - RNA, 20 nt, Human adenovirus D
gaucuccuccuccuggagau

SEQ ID NO: 1566199 - RNA, 18 nt, Human adenovirus D
gucccgcuugcuggaugc

SEQ ID NO: 1566200 - RNA, 14 nt, Human adenovirus D
aggccggcaugccc

SEQ ID NO: 1566201 - RNA, 13 nt, Human adenovirus D
gcuggccgagcug

SEQ ID NO: 1566202 - RNA, 16 nt, Human adenovirus D
accagguccacgcugg

SEQ ID NO: 1566203 - RNA, 21 nt, Human adenovirus D
cacauguccccuuccuccgca

SEQ ID NO: 1566204 - RNA, 23 nt, Human adenovirus D
cugaaaaacaggccgcagcucuu

SEQ ID NO: 1566205 - RNA, 20 nt, Human adenovirus D
cagcaggugcugccccaggc

SEQ ID NO: 1566206 - RNA, 14 nt, Human adenovirus D
gccggugcacuccc

SEQ ID NO: 1566207 - RNA, 16 nt, Human adenovirus D
uggguuggcuugcaug

SEQ ID NO: 1566208 - RNA, 13 nt, Human adenovirus D
ucacccagcaguc

SEQ ID NO: 1566209 - RNA, 22 nt, Human adenovirus D
ccucggggcauugcaggccgug

SEQ ID NO: 1566210 - RNA, 16 nt, Human adenovirus D
gugcggccuugcggag

SEQ ID NO: 1566211 - RNA, 22 nt, Human adenovirus D
gccuacuuuuugggcacccacg

SEQ ID NO: 1566212 - RNA, 22 nt, Human adenovirus D
ggggugcccaacggcaugcuac

SEQ ID NO: 1566213 - RNA, 15 nt, Human adenovirus D
auggauucaaaaacu

SEQ ID NO: 1566214 - RNA, 23 nt, Human adenovirus D
ggcucaucugcagggcgcccagc

SEQ ID NO: 1566215 - RNA, 20 nt, Human adenovirus D
gcaacccaaaaucgagcagg

SEQ ID NO: 1566216 - RNA, 21 nt, Human adenovirus D
gcugccuugucuaucauucag

SEQ ID NO: 1566217 - RNA, 15 nt, Human adenovirus D
gacggaucgcccagg

SEQ ID NO: 1566218 - RNA, 15 nt, Human adenovirus D
augaugauuuaaaaa

SEQ ID NO: 1566219 - RNA, 16 nt, Human adenovirus D
uacauggacaagauau

SEQ ID NO: 1566220 - RNA, 19 nt, Human adenovirus D
gcgcagcaguauccgcgga

SEQ ID NO: 1566221 - RNA, 19 nt, Human adenovirus D
ggccaugccccaggccugg

SEQ ID NO: 1566222 - RNA, 18 nt, Human adenovirus D
ggcgacaagcuggccugc

SEQ ID NO: 1566223 - RNA, 17 nt, Human adenovirus D
augccgauguugguggg

SEQ ID NO: 1566224 - RNA, 14 nt, Human adenovirus D
gugucuuccucucc

SEQ ID NO: 1566225 - RNA, 22 nt, Human adenovirus D
gcgcugguagggggcgccgccg

SEQ ID NO: 1566226 - RNA, 21 nt, Human adenovirus D
ggcuccagcgaaagagagcuc

SEQ ID NO: 1566227 - RNA, 15 nt, Human adenovirus D
gccgccgucugcccc

SEQ ID NO: 1566228 - RNA, 22 nt, Human adenovirus D
aagcgcagcguugagcucaccc

SEQ ID NO: 1566229 - RNA, 15 nt, Human adenovirus D
aaucuuuaucugcug

SEQ ID NO: 1566230 - RNA, 13 nt, Human adenovirus D
augaggcgguggu

SEQ ID NO: 1566231 - RNA, 11 nt, Human adenovirus D
guucaccugca

SEQ ID NO: 1566232 - RNA, 22 nt, Human adenovirus D
ccgacacugcagggagccaggg

SEQ ID NO: 1566233 - RNA, 13 nt, Human adenovirus D
uccagcaacuuca

SEQ ID NO: 1566234 - RNA, 17 nt, Human adenovirus D
agggacagcagcccuuc

SEQ ID NO: 1566235 - RNA, 15 nt, Human adenovirus D
gcuggucaggccucu

SEQ ID NO: 1566236 - RNA, 21 nt, Human adenovirus D
cuggucaucaccuuccugcag

SEQ ID NO: 1566237 - RNA, 19 nt, Human adenovirus D
cgagccauugaccaccagg

SEQ ID NO: 1566238 - RNA, 20 nt, Human adenovirus D
gagaucaaccuccaggccaa

SEQ ID NO: 1566239 - RNA, 22 nt, Human adenovirus D
uggcaaagcgguugagcuggga

SEQ ID NO: 1566240 - RNA, 24 nt, Human adenovirus D
caugcggggggagaugaugugcag

SEQ ID NO: 1566241 - RNA, 20 nt, Human adenovirus D
ggacgcgcucccggcggcag

SEQ ID NO: 1566242 - RNA, 13 nt, Human adenovirus D
ucgagcacagcac

SEQ ID NO: 1566243 - RNA, 16 nt, Human adenovirus D
ccgucuacugcaucug

SEQ ID NO: 1566244 - RNA, 14 nt, Human adenovirus D
uauaaaaacaacaa

SEQ ID NO: 1566245 - RNA, 15 nt, Human adenovirus D
ccgcgcgcuggggca

SEQ ID NO: 1566246 - RNA, 17 nt, Human adenovirus D
ggcgcgauccucgccca

SEQ ID NO: 1566247 - RNA, 15 nt, Human adenovirus D
ccaccgaaggcagcu

SEQ ID NO: 1566248 - RNA, 21 nt, Human adenovirus D
ccggcgcaguacgcgcugucg

SEQ ID NO: 1566249 - RNA, 18 nt, Human adenovirus D
acaguaagugcagcacau

SEQ ID NO: 1566250 - RNA, 16 nt, Human adenovirus D
ggucacaugcuugguc

SEQ ID NO: 1566251 - RNA, 19 nt, Human adenovirus D
cuccagcaacuucaugucc

SEQ ID NO: 1566252 - RNA, 20 nt, Human adenovirus D
gugccgccaaggagcuccuc

SEQ ID NO: 1566253 - RNA, 22 nt, Human adenovirus D
uuccccaccuacuccucuuugc

SEQ ID NO: 1566254 - RNA, 21 nt, Human adenovirus D
cgagaccggaggcgugcacug

SEQ ID NO: 1566255 - RNA, 21 nt, Human adenovirus D
ccgucuggacccgcggccgcc

SEQ ID NO: 1566256 - RNA, 19 nt, Human adenovirus D
gagagcgugauggcgcagg

SEQ ID NO: 1566257 - RNA, 16 nt, Human adenovirus D
aucggcuaccagggcu

SEQ ID NO: 1566258 - RNA, 17 nt, Human adenovirus D
cccggccaaggccacca

SEQ ID NO: 1566259 - RNA, 22 nt, Human adenovirus D
cuaggaagugcggcggcggcug

SEQ ID NO: 1566260 - RNA, 19 nt, Human adenovirus D
ugcugauugcucuggccug

SEQ ID NO: 1566261 - RNA, 12 nt, Human adenovirus D
accuucacagcu

SEQ ID NO: 1566262 - RNA, 22 nt, Human adenovirus D
ggcuggucaguugcaccacgcu

SEQ ID NO: 1566263 - RNA, 17 nt, Human adenovirus D
aggcgcgcccacccgga

SEQ ID NO: 1566264 - RNA, 14 nt, Human adenovirus D
aaaucuuacacaug

SEQ ID NO: 1566265 - RNA, 15 nt, Human adenovirus D
guagcagcagaggaa

SEQ ID NO: 1566266 - RNA, 21 nt, Human adenovirus D
ggcccggcacggcgguggugu

SEQ ID NO: 1566267 - RNA, 12 nt, Human adenovirus D
ccccgcgggcag

SEQ ID NO: 1566268 - RNA, 14 nt, Human adenovirus D
aggugagcucgggc

SEQ ID NO: 1566269 - RNA, 15 nt, Human adenovirus D
cagcaggugcugccc

SEQ ID NO: 1566270 - RNA, 18 nt, Human adenovirus D
ugccugggaauccugcac

SEQ ID NO: 1566271 - RNA, 22 nt, Human adenovirus D
guggucauugauacccuggaca

SEQ ID NO: 1566272 - RNA, 22 nt, Human adenovirus D
guugccaaagaaaauggucagg

SEQ ID NO: 1566273 - RNA, 18 nt, Human adenovirus D
ugacccaaucaccauagc

SEQ ID NO: 1566274 - RNA, 17 nt, Human adenovirus D
cugaucugauccuuguc

SEQ ID NO: 1566275 - RNA, 22 nt, Human adenovirus D
cgcacaacaccgccuccacccu

SEQ ID NO: 1566276 - RNA, 17 nt, Human adenovirus D
gagagcaaucccacgcc

SEQ ID NO: 1566277 - RNA, 16 nt, Human adenovirus D
accgccuccccgcaga

SEQ ID NO: 1566278 - RNA, 16 nt, Human adenovirus D
ccgagggucgcuggcu

SEQ ID NO: 1566279 - RNA, 13 nt, Human adenovirus D
cucguagauggau

SEQ ID NO: 1566280 - RNA, 22 nt, Human adenovirus D
aucgcggcggccaucggcacga

SEQ ID NO: 1566281 - RNA, 14 nt, Human adenovirus D
cagcaagccccgga

SEQ ID NO: 1566282 - RNA, 17 nt, Human adenovirus D
gaugucauaacccgccu

SEQ ID NO: 1566283 - RNA, 18 nt, Human adenovirus D
cucggcaacgaccugcgc

SEQ ID NO: 1566284 - RNA, 18 nt, Human adenovirus D
agguauuuguugagggag

SEQ ID NO: 1566285 - RNA, 23 nt, Human adenovirus D
gagccgcgcgcuggggcagaacg

SEQ ID NO: 1566286 - RNA, 18 nt, Human adenovirus D
ccgcaggcgggacagagg

SEQ ID NO: 1566287 - RNA, 15 nt, Human adenovirus D
gugugcgucagggcg

SEQ ID NO: 1566288 - RNA, 22 nt, Human adenovirus D
cccccaggcccuggagcagcgg

SEQ ID NO: 1566289 - RNA, 18 nt, Human adenovirus D
ccagucccuuuuccagga

SEQ ID NO: 1566290 - RNA, 22 nt, Human adenovirus D
cgucagggcgaaggugucccug

SEQ ID NO: 1566291 - RNA, 15 nt, Human adenovirus D
gggccugaugcagga

SEQ ID NO: 1566292 - RNA, 13 nt, Human adenovirus D
cccaacggcccug

SEQ ID NO: 1566293 - RNA, 20 nt, Human adenovirus D
gccgccaucgaacacgccac

SEQ ID NO: 1566294 - RNA, 17 nt, Human adenovirus D
gacucugacacaccugg

SEQ ID NO: 1566295 - RNA, 21 nt, Human adenovirus D
uccaccucucccgaucauuga

SEQ ID NO: 1566296 - RNA, 12 nt, Human adenovirus D
gggcagggagcu

SEQ ID NO: 1566297 - RNA, 22 nt, Human adenovirus D
gggcaugaccucggcacucagg

SEQ ID NO: 1566298 - RNA, 14 nt, Human adenovirus D
accacaaaaacgaa

SEQ ID NO: 1566299 - RNA, 17 nt, Human adenovirus D
aguacaagcgccaacag

SEQ ID NO: 1566300 - RNA, 16 nt, Human adenovirus D
ugcaugagaauuuuug

SEQ ID NO: 1566301 - RNA, 18 nt, Human adenovirus D
accagaacuuccagcaga

SEQ ID NO: 1566302 - RNA, 17 nt, Human adenovirus D
ggaagccaugcugcgca

SEQ ID NO: 1566303 - RNA, 13 nt, Human adenovirus D
cgccacuggccac

SEQ ID NO: 1566304 - RNA, 17 nt, Human adenovirus D
ggcgccgagcucaugcc

SEQ ID NO: 1566305 - RNA, 14 nt, Human adenovirus D
uccaccucucccga

SEQ ID NO: 1566306 - RNA, 17 nt, Human adenovirus D
aagcgcugguugaacau

SEQ ID NO: 1566307 - RNA, 20 nt, Human adenovirus D
caacaaguuuaggaacccca

SEQ ID NO: 1566308 - RNA, 12 nt, Human adenovirus D
caccgaccuggg

SEQ ID NO: 1566309 - RNA, 15 nt, Human adenovirus D
gcucgaucuccuccu

SEQ ID NO: 1566310 - RNA, 16 nt, Human adenovirus D
gggcgccucccaggac

SEQ ID NO: 1566311 - RNA, 21 nt, Human adenovirus D
acgucuacaaggcccugggca

SEQ ID NO: 1566312 - RNA, 22 nt, Human adenovirus D
uuucuggggucagagacaucau

SEQ ID NO: 1566313 - RNA, 13 nt, Human adenovirus D
uggaggagcagcc

SEQ ID NO: 1566314 - RNA, 15 nt, Human adenovirus D
ccacuggccacgggu

SEQ ID NO: 1566315 - RNA, 18 nt, Human adenovirus D
cgcaggcgacccuggagg

SEQ ID NO: 1566316 - RNA, 20 nt, Human adenovirus D
ggucaccccgccgauuuaaa

SEQ ID NO: 1566317 - RNA, 22 nt, Human adenovirus D
uggcgaugggcccgugggcugc

SEQ ID NO: 1566318 - RNA, 20 nt, Human adenovirus D
gcuccagccaaagcucaugu

SEQ ID NO: 1566319 - RNA, 21 nt, Human adenovirus D
cgaugccaucaacauccacca

SEQ ID NO: 1566320 - RNA, 13 nt, Human adenovirus D
gggaagagcccuu

SEQ ID NO: 1566321 - RNA, 23 nt, Human adenovirus D
gcgcccagauugcaaguacauag

SEQ ID NO: 1566322 - RNA, 22 nt, Human adenovirus D
accuaugggaacaaggccugga

SEQ ID NO: 1566323 - RNA, 24 nt, Human adenovirus D
uccaucgugcgcgaccugggcugc

SEQ ID NO: 1566324 - RNA, 16 nt, Human adenovirus D
ccugcgcgggcugugg

SEQ ID NO: 1566325 - RNA, 14 nt, Human adenovirus D
uuaguucagcugca

SEQ ID NO: 1566326 - RNA, 17 nt, Human adenovirus D
caugugaacaaaaccca

SEQ ID NO: 1566327 - RNA, 17 nt, Human adenovirus D
aagcaaccuuuccaaga

SEQ ID NO: 1566328 - RNA, 18 nt, Human adenovirus D
aggcgggacagaggaggg

SEQ ID NO: 1566329 - RNA, 14 nt, Human adenovirus D
cacgagcgccaggu

SEQ ID NO: 1566330 - RNA, 14 nt, Human adenovirus D
gucgccggaggagg

SEQ ID NO: 1566331 - RNA, 16 nt, Human adenovirus D
cgcugcaaagccagcc

SEQ ID NO: 1566332 - RNA, 21 nt, Human adenovirus D
augguacuaaugacagaggca

SEQ ID NO: 1566333 - RNA, 23 nt, Human adenovirus D
agucuccuggugcgucgagcaca

SEQ ID NO: 1566334 - RNA, 23 nt, Human adenovirus D
caagaggcgacccaugauggugc

SEQ ID NO: 1566335 - RNA, 15 nt, Human adenovirus D
gccccuggcugggcg

SEQ ID NO: 1566336 - RNA, 15 nt, Human adenovirus D
gccagucugaugaau

SEQ ID NO: 1566337 - RNA, 18 nt, Human adenovirus D
uggugggccguuggaaga

SEQ ID NO: 1566338 - RNA, 16 nt, Human adenovirus D
gcccugagagcgcugg

SEQ ID NO: 1566339 - RNA, 14 nt, Human adenovirus D
cccuggcucccagc

SEQ ID NO: 1566340 - RNA, 21 nt, Human adenovirus D
cgagcagaacgggggcagcac

SEQ ID NO: 1566341 - RNA, 18 nt, Human adenovirus D
cagcaucauccccgcgcc

SEQ ID NO: 1566342 - RNA, 17 nt, Human adenovirus D
gccacggucaccgagcc

SEQ ID NO: 1566343 - RNA, 21 nt, Human adenovirus D
acggucugcaggccgggcugc

SEQ ID NO: 1566344 - RNA, 19 nt, Human adenovirus D
gcgugcgaguuggaggaga

SEQ ID NO: 1566345 - RNA, 12 nt, Human adenovirus D
cuggcccgaccg

SEQ ID NO: 1566346 - RNA, 18 nt, Human adenovirus D
gcuggcugcuggagcuga

SEQ ID NO: 1566347 - RNA, 22 nt, Human adenovirus D
agucacacuuaguucagcugca

SEQ ID NO: 1566348 - RNA, 18 nt, Human adenovirus D
gauguaacaucaccacag

SEQ ID NO: 1566349 - RNA, 21 nt, Human adenovirus D
ugcagcaggugcugccccagg

SEQ ID NO: 1566350 - RNA, 13 nt, Human adenovirus D
accgccuggggca

SEQ ID NO: 1566351 - RNA, 15 nt, Human adenovirus D
cacccuggggcuccu

SEQ ID NO: 1566352 - RNA, 19 nt, Human adenovirus D
gaccacgguggugcagaac

SEQ ID NO: 1566353 - RNA, 21 nt, Human adenovirus D
gccggcggcgcgagcugagcg

SEQ ID NO: 1566354 - RNA, 17 nt, Human adenovirus D
ccgcauccacaaggccg

SEQ ID NO: 1566355 - RNA, 19 nt, Human adenovirus D
gagcagaccuuccaggaga

SEQ ID NO: 1566356 - RNA, 21 nt, Human adenovirus D
ggcugcauccacugcuccugc

SEQ ID NO: 1566357 - RNA, 17 nt, Human adenovirus D
ccagcacacucacuuuu

SEQ ID NO: 1566358 - RNA, 17 nt, Human adenovirus D
guugacggucugcaggc

SEQ ID NO: 1566359 - RNA, 14 nt, Human adenovirus D
cgcgcccggggcca

SEQ ID NO: 1566360 - RNA, 22 nt, Human adenovirus D
cgcgcgcaugaccaccugcgcg

SEQ ID NO: 1566361 - RNA, 21 nt, Human adenovirus D
gcacgucugacugccgccggc

SEQ ID NO: 1566362 - RNA, 17 nt, Human adenovirus D
cgcuagccagccacagc

SEQ ID NO: 1566363 - RNA, 23 nt, Human adenovirus D
cccaggcggugcugcugccgagc

SEQ ID NO: 1566364 - RNA, 19 nt, Human adenovirus D
ggcucggugcggcugcugc

SEQ ID NO: 1566365 - RNA, 22 nt, Human adenovirus D
acuuuugcccuuacauguaacu

SEQ ID NO: 1566366 - RNA, 13 nt, Human adenovirus D
gacgcgcuccucg

SEQ ID NO: 1566367 - RNA, 16 nt, Human adenovirus D
aggaggggggccaccu

SEQ ID NO: 1566368 - RNA, 16 nt, Human adenovirus D
guugguccagauggaa

SEQ ID NO: 1566369 - RNA, 17 nt, Human adenovirus D
gugcgaggaugagagcc

SEQ ID NO: 1566370 - RNA, 15 nt, Human adenovirus D
aagccacaaccagag

SEQ ID NO: 1566371 - RNA, 21 nt, Human adenovirus D
cugaccaauagacagcagaag

SEQ ID NO: 1566372 - RNA, 22 nt, Human adenovirus D
ggacgcccuggccgaccggagc

SEQ ID NO: 1566373 - RNA, 16 nt, Human adenovirus D
cagccgcaccgcggcg

SEQ ID NO: 1566374 - RNA, 15 nt, Human adenovirus D
gaucccgccgcagga

SEQ ID NO: 1566375 - RNA, 17 nt, Human adenovirus D
uccaucaacuacugugg

SEQ ID NO: 1566376 - RNA, 20 nt, Human adenovirus D
acguggccuuguaccugccc

SEQ ID NO: 1566377 - RNA, 16 nt, Human adenovirus D
acccugcccuuccagc

SEQ ID NO: 1566378 - RNA, 17 nt, Human adenovirus D
gggggcagacacaccag

SEQ ID NO: 1566379 - RNA, 12 nt, Human adenovirus D
aaagccagcagc

SEQ ID NO: 1566380 - RNA, 18 nt, Human adenovirus D
gcagcaggguacccacug

SEQ ID NO: 1566381 - RNA, 18 nt, Human adenovirus D
cacgagcaagacgcaggc

SEQ ID NO: 1566382 - RNA, 12 nt, Human adenovirus D
gcucuugcaggg

SEQ ID NO: 1566383 - RNA, 14 nt, Human adenovirus D
caccagacacaucu

SEQ ID NO: 1566384 - RNA, 13 nt, Human adenovirus D
ugcugcuccacca

SEQ ID NO: 1566385 - RNA, 16 nt, Human adenovirus D
cgacccccaggcccug

SEQ ID NO: 1566386 - RNA, 19 nt, Human adenovirus D
cgagaucguccucccccga

SEQ ID NO: 1566387 - RNA, 14 nt, Human adenovirus D
gcggggggagauga

SEQ ID NO: 1566388 - RNA, 21 nt, Human adenovirus D
aagacgaaugggaagaagaga

SEQ ID NO: 1566389 - RNA, 20 nt, Human adenovirus D
gaacaaaacccaugaaagaa

SEQ ID NO: 1566390 - RNA, 14 nt, Human adenovirus D
auaagguucugccc

SEQ ID NO: 1566391 - RNA, 20 nt, Human adenovirus D
ucuggaggcgguggucccuu

SEQ ID NO: 1566392 - RNA, 20 nt, Human adenovirus D
uucugcccuccgcccugagc

SEQ ID NO: 1566393 - RNA, 14 nt, Human adenovirus D
ggagcgaggugugc

SEQ ID NO: 1566394 - RNA, 23 nt, Human adenovirus D
ugcacccaccaugcgccaagggc

SEQ ID NO: 1566395 - RNA, 22 nt, Human adenovirus D
aggagacgauccugcaggugga

SEQ ID NO: 1566396 - RNA, 17 nt, Human adenovirus D
acagugcccccuccacu

SEQ ID NO: 1566397 - RNA, 21 nt, Human adenovirus D
gucacacuuaguucagcugca

SEQ ID NO: 1566398 - RNA, 15 nt, Human adenovirus D
ggugagcagcuugcu

SEQ ID NO: 1566399 - RNA, 18 nt, Human adenovirus D
caacgugcccaucuccau

SEQ ID NO: 1566400 - RNA, 16 nt, Human adenovirus D
cgacacugcagggagc

SEQ ID NO: 1566401 - RNA, 21 nt, Human adenovirus D
cgcugagcgacgaccugggcg

SEQ ID NO: 1566402 - RNA, 19 nt, Human adenovirus D
ggagacuuucauccaucug

SEQ ID NO: 1566403 - RNA, 14 nt, Human adenovirus D
cgcgacccccaggc

SEQ ID NO: 1566404 - RNA, 18 nt, Human adenovirus D
ccacccuggaagccaugc

SEQ ID NO: 1566405 - RNA, 17 nt, Human adenovirus D
gcucacucuuaaagacu

SEQ ID NO: 1566406 - RNA, 19 nt, Human adenovirus D
agcaggggcuacauucugg

SEQ ID NO: 1566407 - RNA, 18 nt, Human adenovirus D
ugcaccauccccagguaa

SEQ ID NO: 1566408 - RNA, 13 nt, Human adenovirus D
cuggggagggcca

SEQ ID NO: 1566409 - RNA, 16 nt, Human adenovirus D
ccagugcuuccagcaa

SEQ ID NO: 1566410 - RNA, 18 nt, Human adenovirus D
gaucccaacagccuucag

SEQ ID NO: 1566411 - RNA, 14 nt, Human adenovirus D
guagagcggccagc

SEQ ID NO: 1566412 - RNA, 15 nt, Human adenovirus D
ggaggcggugcgcac

SEQ ID NO: 1566413 - RNA, 19 nt, Human adenovirus D
caggucacagucuggugga

SEQ ID NO: 1566414 - RNA, 20 nt, Human adenovirus D
cucguucugcccaccgugcg

SEQ ID NO: 1566415 - RNA, 15 nt, Human adenovirus D
gcagaacgggggcag

SEQ ID NO: 1566416 - RNA, 16 nt, Human adenovirus D
agcgcccauuccugga

SEQ ID NO: 1566417 - RNA, 23 nt, Human adenovirus D
auuugacacagcaguccaugccc

SEQ ID NO: 1566418 - RNA, 16 nt, Human adenovirus D
ugaggggcggacccca

SEQ ID NO: 1566419 - RNA, 15 nt, Human adenovirus D
ucacuugccgccugc

SEQ ID NO: 1566420 - RNA, 18 nt, Human adenovirus D
ugcgucaucacccagggc

SEQ ID NO: 1566421 - RNA, 15 nt, Human adenovirus D
uugagagagaggaag

SEQ ID NO: 1566422 - RNA, 12 nt, Human adenovirus D
gagcuggcuccg

SEQ ID NO: 1566423 - RNA, 14 nt, Human adenovirus D
uguacuuugucugc

SEQ ID NO: 1566424 - RNA, 20 nt, Human adenovirus D
gaccugcauuggcagccgag

SEQ ID NO: 1566425 - RNA, 16 nt, Human adenovirus D
aucaacuacaaggacu

SEQ ID NO: 1566426 - RNA, 16 nt, Human adenovirus D
caggaaauccccgggc

SEQ ID NO: 1566427 - RNA, 14 nt, Human adenovirus D
ccucagcagucucu

SEQ ID NO: 1566428 - RNA, 16 nt, Human adenovirus D
cguugagcucacccac

SEQ ID NO: 1566429 - RNA, 20 nt, Human adenovirus D
cagauguugcgcagcggcag

SEQ ID NO: 1566430 - RNA, 12 nt, Human adenovirus D
cuauuuucacug

SEQ ID NO: 1566431 - RNA, 14 nt, Human adenovirus D
acggccagcagggu

SEQ ID NO: 1566432 - RNA, 21 nt, Human adenovirus D
gaggccuugacaaaggccgug

SEQ ID NO: 1566433 - RNA, 19 nt, Human adenovirus D
cuauacgggcgaguacgac

SEQ ID NO: 1566434 - RNA, 20 nt, Human adenovirus D
ggucugcaacccccagcucc

SEQ ID NO: 1566435 - RNA, 22 nt, Human adenovirus D
ccagcacaacaacucgggcuuc

SEQ ID NO: 1566436 - RNA, 16 nt, Human adenovirus D
aguuggugagcucuuc

SEQ ID NO: 1566437 - RNA, 17 nt, Human adenovirus D
gcuccucgcucuggggc

SEQ ID NO: 1566438 - RNA, 15 nt, Human adenovirus D
ccguucuacccagca

SEQ ID NO: 1566439 - RNA, 21 nt, Human adenovirus D
gcuggcgguagagcggccagc

SEQ ID NO: 1566440 - RNA, 13 nt, Human adenovirus D
acugccacugcca

SEQ ID NO: 1566441 - RNA, 14 nt, Human adenovirus D
caaaagcgccagga

SEQ ID NO: 1566442 - RNA, 16 nt, Human adenovirus D
gagagccgccugagca

SEQ ID NO: 1566443 - RNA, 21 nt, Human adenovirus D
acaccuggaggcaccaucaca

SEQ ID NO: 1566444 - RNA, 17 nt, Human adenovirus D
cggacgacugggaggcu

SEQ ID NO: 1566445 - RNA, 23 nt, Human adenovirus D
ucugccuggugaagggcacagcc

SEQ ID NO: 1566446 - RNA, 13 nt, Human adenovirus D
ugugaccucccac

SEQ ID NO: 1566447 - RNA, 15 nt, Human adenovirus D
aggagaacugcuggc

SEQ ID NO: 1566448 - RNA, 17 nt, Human adenovirus D
ccgcgcuugcugggcga

SEQ ID NO: 1566449 - RNA, 15 nt, Human adenovirus D
gcaaacuugugguuu

SEQ ID NO: 1566450 - RNA, 16 nt, Human adenovirus D
cuuuacgcuggccagc

SEQ ID NO: 1566451 - RNA, 14 nt, Human adenovirus D
cugcgcgagggccu

SEQ ID NO: 1566452 - RNA, 22 nt, Human adenovirus D
cuggacgggagcaauccuccag

SEQ ID NO: 1566453 - RNA, 22 nt, Human adenovirus D
augugaugggaucgacggugga

SEQ ID NO: 1566454 - RNA, 18 nt, Human adenovirus D
gaaccugcuccugcuccc

SEQ ID NO: 1566455 - RNA, 13 nt, Human adenovirus D
cugcaagaggaga

SEQ ID NO: 1566456 - RNA, 23 nt, Human adenovirus D
gagcccgagggucgcuggcugcu

SEQ ID NO: 1566457 - RNA, 19 nt, Human adenovirus D
gcaaaguuuuucaggggcu

SEQ ID NO: 1566458 - RNA, 19 nt, Human adenovirus D
gugacggccuacgagcaga

SEQ ID NO: 1566459 - RNA, 15 nt, Human adenovirus D
ucagcaucagucucc

SEQ ID NO: 1566460 - RNA, 19 nt, Human adenovirus D
agcuggacaagcuucuugc

SEQ ID NO: 1566461 - RNA, 14 nt, Human adenovirus D
ccaggaauggcacg

SEQ ID NO: 1566462 - RNA, 19 nt, Human adenovirus D
uggaacaccaucagacugg

SEQ ID NO: 1566463 - RNA, 17 nt, Human adenovirus D
caccugugggaccuggc

SEQ ID NO: 1566464 - RNA, 13 nt, Human adenovirus D
ugcagggugacca

SEQ ID NO: 1566465 - RNA, 17 nt, Human adenovirus D
ccccaaacgccagccca

SEQ ID NO: 1566466 - RNA, 18 nt, Human adenovirus D
ccgguuucgggcgggcag

SEQ ID NO: 1566467 - RNA, 15 nt, Human adenovirus D
aguuguucagcagca

SEQ ID NO: 1566468 - RNA, 13 nt, Human adenovirus D
gccaggcgcaggu

SEQ ID NO: 1566469 - RNA, 19 nt, Human adenovirus D
gggcggcaaaauggcgugc

SEQ ID NO: 1566470 - RNA, 14 nt, Human adenovirus D
cggacguggugcug

SEQ ID NO: 1566471 - RNA, 23 nt, Human adenovirus D
gaugcaacgcaucauggcccuga

SEQ ID NO: 1566472 - RNA, 14 nt, Human adenovirus D
gaugaguugggccu

SEQ ID NO: 1566473 - RNA, 14 nt, Human adenovirus D
gugacggcgcgacc

SEQ ID NO: 1566474 - RNA, 14 nt, Human adenovirus D
gccgcucagucauc

SEQ ID NO: 1566475 - RNA, 17 nt, Human adenovirus D
cugcugaaacaccugca

SEQ ID NO: 1566476 - RNA, 15 nt, Human adenovirus D
gggcugcuagagugc

SEQ ID NO: 1566477 - RNA, 14 nt, Human adenovirus D
ggcgaccaccgcga

SEQ ID NO: 1566478 - RNA, 21 nt, Human adenovirus D
cacggucaccgagccucccag

SEQ ID NO: 1566479 - RNA, 22 nt, Human adenovirus D
aagcggucgcgcgaagaggagc

SEQ ID NO: 1566480 - RNA, 19 nt, Human adenovirus D
guacacgguucucucagca

SEQ ID NO: 1566481 - RNA, 12 nt, Human adenovirus D
aggcgagcagcu

SEQ ID NO: 1566482 - RNA, 20 nt, Human adenovirus D
ccauagucaucacccagcag

SEQ ID NO: 1566483 - RNA, 19 nt, Human adenovirus D
ggcucgccuucggcuggaa

SEQ ID NO: 1566484 - RNA, 18 nt, Human adenovirus D
cuuagcucccuauuuaaa

SEQ ID NO: 1566485 - RNA, 19 nt, Human adenovirus D
uuaaaaagcagcacaguaa

SEQ ID NO: 1566486 - RNA, 18 nt, Human adenovirus D
ucggucagcuggcccggc

SEQ ID NO: 1566487 - RNA, 12 nt, Human adenovirus D
cagcagcacagc

SEQ ID NO: 1566488 - RNA, 17 nt, Human adenovirus D
cggaaacgccaccaccu

SEQ ID NO: 1566489 - RNA, 22 nt, Human adenovirus D
aagcguccgcuccgcagugggc

SEQ ID NO: 1566490 - RNA, 13 nt, Human adenovirus D
cuacagaaacauc

SEQ ID NO: 1566491 - RNA, 18 nt, Human adenovirus D
gaguagucaaucucccac

SEQ ID NO: 1566492 - RNA, 17 nt, Human adenovirus D
ccuucaccgaccugggu

SEQ ID NO: 1566493 - RNA, 17 nt, Human adenovirus D
gucgcuggcugcuggag

SEQ ID NO: 1566494 - RNA, 19 nt, Human adenovirus D
ugcgucgagcacagcaccg

SEQ ID NO: 1566495 - RNA, 17 nt, Human adenovirus D
cgaggaccaaucgcgcc

SEQ ID NO: 1566496 - RNA, 13 nt, Human adenovirus D
cgccgcaccuguc

SEQ ID NO: 1566497 - RNA, 19 nt, Human adenovirus D
gcgcacgccguucuccgcc

SEQ ID NO: 1566498 - RNA, 14 nt, Human adenovirus D
gcacuacagccggg

SEQ ID NO: 1566499 - RNA, 23 nt, Human adenovirus D
cggcacgcggccguucaugggca

SEQ ID NO: 1566500 - RNA, 17 nt, Human adenovirus D
uggcgacccaggaaugg

SEQ ID NO: 1566501 - RNA, 20 nt, Human adenovirus D
uguccuggaagucguccaug

SEQ ID NO: 1566502 - RNA, 14 nt, Human adenovirus D
gccaucaagaaccu

SEQ ID NO: 1566503 - RNA, 20 nt, Human adenovirus D
gggcgugcagaccguggaca

SEQ ID NO: 1566504 - RNA, 18 nt, Human adenovirus D
ggcaugggucaggcagcg

SEQ ID NO: 1566505 - RNA, 18 nt, Human adenovirus D
caagcgccaacagcagcg

SEQ ID NO: 1566506 - RNA, 16 nt, Human adenovirus D
ucgcucguucugccca

SEQ ID NO: 1566507 - RNA, 16 nt, Human adenovirus D
ggacucacccuggggc

SEQ ID NO: 1566508 - RNA, 13 nt, Human adenovirus D
acgagaccagagg

SEQ ID NO: 1566509 - RNA, 22 nt, Human adenovirus D
cauagagggcguuggagagaag

SEQ ID NO: 1566510 - RNA, 14 nt, Human adenovirus D
aauggcgugcugga

SEQ ID NO: 1566511 - RNA, 18 nt, Human adenovirus D
agucugaagcgccgccga

SEQ ID NO: 1566512 - RNA, 22 nt, Human adenovirus D
agggaaaagcucaaagaccaga

SEQ ID NO: 1566513 - RNA, 16 nt, Human adenovirus D
ccgagcugacggccag

SEQ ID NO: 1566514 - RNA, 12 nt, Human adenovirus D
gcaacagcaaaa

SEQ ID NO: 1566515 - RNA, 14 nt, Human adenovirus D
aggugucccugacc

SEQ ID NO: 1566516 - RNA, 14 nt, Human adenovirus D
caggggguagaagc

SEQ ID NO: 1566517 - RNA, 17 nt, Human adenovirus D
agcgcccauuccuggag

SEQ ID NO: 1566518 - RNA, 17 nt, Human adenovirus D
cccuccgcccugagcuc

SEQ ID NO: 1566519 - RNA, 14 nt, Human adenovirus D
gccuguacccagag

SEQ ID NO: 1566520 - RNA, 19 nt, Human adenovirus D
ccgcgauguugagcuggac

SEQ ID NO: 1566521 - RNA, 19 nt, Human adenovirus D
gccagacagccgugccauc

SEQ ID NO: 1566522 - RNA, 15 nt, Human adenovirus D
uugucuucccucuca

SEQ ID NO: 1566523 - RNA, 19 nt, Human adenovirus D
aagcaagaugauaccaaga

SEQ ID NO: 1566524 - RNA, 14 nt, Human adenovirus D
agagacagaagaag

SEQ ID NO: 1566525 - RNA, 18 nt, Human adenovirus D
caggguaaagccagcagc

SEQ ID NO: 1566526 - RNA, 17 nt, Human adenovirus D
cugcacuuucuuugcca

SEQ ID NO: 1566527 - RNA, 23 nt, Human adenovirus D
agcucaaacacguagcagcccug

SEQ ID NO: 1566528 - RNA, 16 nt, Human adenovirus D
ggugagccggccgcgc

SEQ ID NO: 1566529 - RNA, 15 nt, Human adenovirus D
ggggcgggucugugc

SEQ ID NO: 1566530 - RNA, 23 nt, Human adenovirus D
acggcugcauccacugcuccugc

SEQ ID NO: 1566531 - RNA, 14 nt, Human adenovirus D
cagguauccagccu

SEQ ID NO: 1566532 - RNA, 20 nt, Human adenovirus D
gucagacccaguggcgagag

SEQ ID NO: 1566533 - RNA, 14 nt, Human adenovirus D
cagaacaaaaacag

SEQ ID NO: 1566534 - RNA, 21 nt, Human adenovirus D
ggccgcccugacccagcaggu

SEQ ID NO: 1566535 - RNA, 20 nt, Human adenovirus D
gaagccuucuauggaggcag

SEQ ID NO: 1566536 - RNA, 13 nt, Human adenovirus D
cccgccaccugca

SEQ ID NO: 1566537 - RNA, 21 nt, Human adenovirus D
cugguagggggcgccgccggc

SEQ ID NO: 1566538 - RNA, 23 nt, Human adenovirus D
gcggagcuugcccuuggaagagc

SEQ ID NO: 1566539 - RNA, 21 nt, Human adenovirus D
cacccggacguggugcugcug

SEQ ID NO: 1566540 - RNA, 13 nt, Human adenovirus D
uggcaccaauuca

SEQ ID NO: 1566541 - RNA, 16 nt, Human adenovirus D
cgccacaggugcugcc

SEQ ID NO: 1566542 - RNA, 23 nt, Human adenovirus D
cauggcuaccugggaggagagga

SEQ ID NO: 1566543 - RNA, 20 nt, Human adenovirus D
caggugagcucgggcugcuc

SEQ ID NO: 1566544 - RNA, 14 nt, Human adenovirus D
gcaugaccagaccc

SEQ ID NO: 1566545 - RNA, 13 nt, Human adenovirus D
cucgcccagcaau

SEQ ID NO: 1566546 - RNA, 15 nt, Human adenovirus D
cgguguugcgcccug

SEQ ID NO: 1566547 - RNA, 13 nt, Human adenovirus D
cagacgcugaaag

SEQ ID NO: 1566548 - RNA, 17 nt, Human adenovirus D
uuccgcaaggaugucaa

SEQ ID NO: 1566549 - RNA, 18 nt, Human adenovirus D
caggcugucggugucccc

SEQ ID NO: 1566550 - RNA, 22 nt, Human adenovirus D
uggccgagcuggaagcccugag

SEQ ID NO: 1566551 - RNA, 15 nt, Human adenovirus D
aacaugcucuacccc

SEQ ID NO: 1566552 - RNA, 15 nt, Human adenovirus D
ugcucuggggucgug

SEQ ID NO: 1566553 - RNA, 12 nt, Human adenovirus D
gcugucgguguc

SEQ ID NO: 1566554 - RNA, 22 nt, Human adenovirus D
ccggaccccgccauaagggcgg

SEQ ID NO: 1566555 - RNA, 23 nt, Human adenovirus D
cgccuuccuggcgacgcagccgg

SEQ ID NO: 1566556 - RNA, 14 nt, Human adenovirus D
cgggcuaccgcggc

SEQ ID NO: 1566557 - RNA, 17 nt, Human adenovirus D
gccccugcaagugcaca

SEQ ID NO: 1566558 - RNA, 20 nt, Human adenovirus D
ccauuaucccgacgccgggc

SEQ ID NO: 1566559 - RNA, 17 nt, Human adenovirus D
ggcguggugcuggauga

SEQ ID NO: 1566560 - RNA, 20 nt, Human adenovirus D
ugcaggauaaauauggccug

SEQ ID NO: 1566561 - RNA, 19 nt, Human adenovirus D
ucacacuuaguucagcugc

SEQ ID NO: 1566562 - RNA, 14 nt, Human adenovirus D
cguguacugggugc

SEQ ID NO: 1566563 - RNA, 13 nt, Human adenovirus D
acgccagccgcag

SEQ ID NO: 1566564 - RNA, 15 nt, Human adenovirus D
cugcuucgcccggga

SEQ ID NO: 1566565 - RNA, 14 nt, Human adenovirus D
ccggcgaccaccgc

SEQ ID NO: 1566566 - RNA, 13 nt, Human adenovirus D
cacccucaggcgc

SEQ ID NO: 1566567 - RNA, 17 nt, Human adenovirus D
gaaaguaugucucuggu

SEQ ID NO: 1566568 - RNA, 16 nt, Human adenovirus D
gacgcaggccaggagg

SEQ ID NO: 1566569 - RNA, 15 nt, Human adenovirus D
accugugacaugcaa

SEQ ID NO: 1566570 - RNA, 15 nt, Human adenovirus D
cauagaugggcuccg

SEQ ID NO: 1566571 - RNA, 17 nt, Human adenovirus D
caggggagugaagaggg

SEQ ID NO: 1566572 - RNA, 13 nt, Human adenovirus D
cagccgcaggcca

SEQ ID NO: 1566573 - RNA, 20 nt, Human adenovirus D
agccuugauuuuuccagccc

SEQ ID NO: 1566574 - RNA, 15 nt, Human adenovirus D
cagaucauggugccc

SEQ ID NO: 1566575 - RNA, 19 nt, Human adenovirus D
cuaccugcaucgcgcggcg

SEQ ID NO: 1566576 - RNA, 20 nt, Human adenovirus D
caaucgccacaggugcugcc

SEQ ID NO: 1566577 - RNA, 16 nt, Human adenovirus D
cuaacuuauacuacca

SEQ ID NO: 1566578 - RNA, 17 nt, Human adenovirus D
acaaucagccccuuccc

SEQ ID NO: 1566579 - RNA, 16 nt, Human adenovirus D
cgagcagcgcauccug

SEQ ID NO: 1566580 - RNA, 14 nt, Human adenovirus D
ucaggagcagcgcc

SEQ ID NO: 1566581 - RNA, 13 nt, Human adenovirus D
gcggcguccugga

SEQ ID NO: 1566582 - RNA, 13 nt, Human adenovirus D
ccccacgguggcc

SEQ ID NO: 1566583 - RNA, 22 nt, Human adenovirus D
ucccgucuuugcgguccccgag

SEQ ID NO: 1566584 - RNA, 18 nt, Human adenovirus D
ggaucgacgguggacggg

SEQ ID NO: 1566585 - RNA, 13 nt, Human adenovirus D
aacuuccagcaga

SEQ ID NO: 1566586 - RNA, 21 nt, Human adenovirus D
aaacuaagguggcuauuuuca

SEQ ID NO: 1566587 - RNA, 19 nt, Human adenovirus D
cggcggacaucgcuucccu

SEQ ID NO: 1566588 - RNA, 16 nt, Human adenovirus D
ugcgcgagcagaacgg

SEQ ID NO: 1566589 - RNA, 15 nt, Human adenovirus D
gcacgcccgccaugg

SEQ ID NO: 1566590 - RNA, 13 nt, Human adenovirus D
ggcguacaugcac

SEQ ID NO: 1566591 - RNA, 18 nt, Human adenovirus D
ccacaugacccugcaugg

SEQ ID NO: 1566592 - RNA, 12 nt, Human adenovirus D
ugucucuggugu

SEQ ID NO: 1566593 - RNA, 23 nt, Human adenovirus D
ccauggccaggggagugaagagg

SEQ ID NO: 1566594 - RNA, 13 nt, Human adenovirus D
gaugucucggugu

SEQ ID NO: 1566595 - RNA, 21 nt, Human adenovirus D
agcaguauccgcggaguccag

SEQ ID NO: 1566596 - RNA, 23 nt, Human adenovirus D
cugagcucuuaccaaguccaggg

SEQ ID NO: 1566597 - RNA, 15 nt, Human adenovirus D
caacugcagaccggg

SEQ ID NO: 1566598 - RNA, 18 nt, Human adenovirus D
agcgccagucccucaucc

SEQ ID NO: 1566599 - RNA, 15 nt, Human adenovirus D
ugauugcucuggccu

SEQ ID NO: 1566600 - RNA, 14 nt, Human adenovirus D
acuaaucauuuaau

SEQ ID NO: 1566601 - RNA, 23 nt, Human adenovirus D
augcagccaguggcccuggaugu

SEQ ID NO: 1566602 - RNA, 15 nt, Human adenovirus D
caacaugcugacugc

SEQ ID NO: 1566603 - RNA, 16 nt, Human adenovirus D
cacggccuuguaggga

SEQ ID NO: 1566604 - RNA, 18 nt, Human adenovirus D
ucacacuacacagcuaga

SEQ ID NO: 1566605 - RNA, 17 nt, Human adenovirus D
agacccggagcccaccc

SEQ ID NO: 1566606 - RNA, 20 nt, Human adenovirus D
gccgccaaggagcuccucga

SEQ ID NO: 1566607 - RNA, 14 nt, Human adenovirus D
gagaaggugcuggc

SEQ ID NO: 1566608 - RNA, 21 nt, Human adenovirus D
acgcgcugucggccgaggagg

SEQ ID NO: 1566609 - RNA, 18 nt, Human adenovirus D
ggcgcugcaaagccagcc

SEQ ID NO: 1566610 - RNA, 23 nt, Human adenovirus D
cacgggacgcuaccgcugcgcag

SEQ ID NO: 1566611 - RNA, 14 nt, Human adenovirus D
ggagacgggcugcu

SEQ ID NO: 1566612 - RNA, 21 nt, Human adenovirus D
cgugccccccaaacgccagcc

SEQ ID NO: 1566613 - RNA, 12 nt, Human adenovirus D
gagcucacccac

SEQ ID NO: 1566614 - RNA, 14 nt, Human adenovirus D
ccugggucagaaca

SEQ ID NO: 1566615 - RNA, 23 nt, Human adenovirus D
ggagcagccgcguaagcaggagc

SEQ ID NO: 1566616 - RNA, 16 nt, Human adenovirus D
ccagacgcggcuguag

SEQ ID NO: 1566617 - RNA, 15 nt, Human adenovirus D
gcgagcugagcgacc

SEQ ID NO: 1566618 - RNA, 19 nt, Human adenovirus D
cgcguguugcggcccggca

SEQ ID NO: 1566619 - RNA, 20 nt, Human adenovirus D
ugaagggcacagccucucug

SEQ ID NO: 1566620 - RNA, 14 nt, Human adenovirus D
aaauauggccugga

SEQ ID NO: 1566621 - RNA, 14 nt, Human adenovirus D
acgccuuccuggcg

SEQ ID NO: 1566622 - RNA, 21 nt, Human adenovirus D
accgacacguacuucagccug

SEQ ID NO: 1566623 - RNA, 15 nt, Human adenovirus D
uccucgcucuggggc

SEQ ID NO: 1566624 - RNA, 22 nt, Human adenovirus D
gccgguuucgggcgggcaggga

SEQ ID NO: 1566625 - RNA, 14 nt, Human adenovirus D
gccccgccaaccgg

SEQ ID NO: 1566626 - RNA, 16 nt, Human adenovirus D
caugugcgcacccuga

SEQ ID NO: 1566627 - RNA, 17 nt, Human adenovirus D
ggaguccaccgcuccgc

SEQ ID NO: 1566628 - RNA, 13 nt, Human adenovirus D
gccagcacgcucu

SEQ ID NO: 1566629 - RNA, 16 nt, Human adenovirus D
agcagacagggccugc

SEQ ID NO: 1566630 - RNA, 12 nt, Human adenovirus D
uuucuucuccca

SEQ ID NO: 1566631 - RNA, 22 nt, Human adenovirus D
cggagcgacacccccgcgugca

SEQ ID NO: 1566632 - RNA, 23 nt, Human adenovirus D
ugguggcuagaaaacacccacag

SEQ ID NO: 1566633 - RNA, 23 nt, Human adenovirus D
cccucaucacaucagccaggacu

SEQ ID NO: 1566634 - RNA, 12 nt, Human adenovirus D
cuacaaggccgu

SEQ ID NO: 1566635 - RNA, 20 nt, Human adenovirus D
gacugauggccacggggagc

SEQ ID NO: 1566636 - RNA, 21 nt, Human adenovirus D
gcagugggcgcagacggucuc

SEQ ID NO: 1566637 - RNA, 19 nt, Human adenovirus D
gacaucgcgaaccaggcag

SEQ ID NO: 1566638 - RNA, 13 nt, Human adenovirus D
cggugcugcugcc

SEQ ID NO: 1566639 - RNA, 15 nt, Human adenovirus D
ggcgcaggcgacccu

SEQ ID NO: 1566640 - RNA, 21 nt, Human adenovirus D
ccgcucgcucguucugcccac

SEQ ID NO: 1566641 - RNA, 15 nt, Human adenovirus D
uggaagccaugcugc

SEQ ID NO: 1566642 - RNA, 16 nt, Human adenovirus D
cccaacggcaccugcg

SEQ ID NO: 1566643 - RNA, 15 nt, Human adenovirus D
cagggucucaggguc

SEQ ID NO: 1566644 - RNA, 11 nt, Human adenovirus D
agcagcacagu

SEQ ID NO: 1566645 - RNA, 16 nt, Human adenovirus D
ccugcgcuaccgcucc

SEQ ID NO: 1566646 - RNA, 14 nt, Human adenovirus D
cgcaagcucaugcu

SEQ ID NO: 1566647 - RNA, 20 nt, Human adenovirus D
gccacccgccgccgucugcc

SEQ ID NO: 1566648 - RNA, 16 nt, Human adenovirus D
ucaccuuccugcagcu

SEQ ID NO: 1566649 - RNA, 19 nt, Human adenovirus D
gccaauguuacgcugcccg

SEQ ID NO: 1566650 - RNA, 22 nt, Human adenovirus D
gaggagcaccccaacggcccug

SEQ ID NO: 1566651 - RNA, 23 nt, Human adenovirus D
gggcgcuugcaagggugcgcuug

SEQ ID NO: 1566652 - RNA, 16 nt, Human adenovirus D
gcucggugacgugcuc

SEQ ID NO: 1566653 - RNA, 16 nt, Human adenovirus D
gggcuggcgagacugg

SEQ ID NO: 1566654 - RNA, 24 nt, Human adenovirus D
gaggaggacuuaaccacccacgag

SEQ ID NO: 1566655 - RNA, 13 nt, Human adenovirus D
accaggaugcagc

SEQ ID NO: 1566656 - RNA, 12 nt, Human adenovirus D
ccuggcucccag

SEQ ID NO: 1566657 - RNA, 18 nt, Human adenovirus D
cgcccagguuuuccaugc

SEQ ID NO: 1566658 - RNA, 23 nt, Human adenovirus D
gaacccgcgcucgcgcaccugcu

SEQ ID NO: 1566659 - RNA, 13 nt, Human adenovirus D
ccgcguccccgcc

SEQ ID NO: 1566660 - RNA, 16 nt, Human adenovirus D
cugaaaauuugcaaaa

SEQ ID NO: 1566661 - RNA, 16 nt, Human adenovirus D
ccggugcccgcuccgc

SEQ ID NO: 1566662 - RNA, 20 nt, Human adenovirus D
gcagcggggaggagcccgag

SEQ ID NO: 1566663 - RNA, 14 nt, Human adenovirus D
ggccguuggaagau

SEQ ID NO: 1566664 - RNA, 22 nt, Human adenovirus D
gccagcaaacgccgccgccgca

SEQ ID NO: 1566665 - RNA, 17 nt, Human adenovirus D
gguuaguaugucccugg

SEQ ID NO: 1566666 - RNA, 10 nt, Human adenovirus D
cucaccaccc

SEQ ID NO: 1566667 - RNA, 20 nt, Human adenovirus D
caugccacgaacagccacga

SEQ ID NO: 1566668 - RNA, 17 nt, Human adenovirus D
aaacucuuggagcaggg

SEQ ID NO: 1566669 - RNA, 21 nt, Human adenovirus D
ucaccauguuauucagcagcc

SEQ ID NO: 1566670 - RNA, 20 nt, Human adenovirus D
cgagcccgagggucgcuggc

SEQ ID NO: 1566671 - RNA, 14 nt, Human adenovirus D
cgcaccgucgccuc

SEQ ID NO: 1566672 - RNA, 16 nt, Human adenovirus D
cucacuuuuaggugaa

SEQ ID NO: 1566673 - RNA, 18 nt, Human adenovirus D
uccaaggccaucugccac

SEQ ID NO: 1566674 - RNA, 19 nt, Human adenovirus D
cgagaccugcgcaaggucg

SEQ ID NO: 1566675 - RNA, 20 nt, Human adenovirus D
ccgcacgguaagagcccagc

SEQ ID NO: 1566676 - RNA, 18 nt, Human adenovirus D
gcaggguaaagccagcag

SEQ ID NO: 1566677 - RNA, 15 nt, Human adenovirus D
ccgcggccgcccacg

SEQ ID NO: 1566678 - RNA, 15 nt, Human adenovirus D
uaucagcgcgcugcg

SEQ ID NO: 1566679 - RNA, 22 nt, Human adenovirus D
gcccgagggucgcuggcugcug

SEQ ID NO: 1566680 - RNA, 21 nt, Human adenovirus D
accccacgguggccccgaccc

SEQ ID NO: 1566681 - RNA, 18 nt, Human adenovirus D
gagaccaaguccagggug

SEQ ID NO: 1566682 - RNA, 15 nt, Human adenovirus D
aauggcgugcuggag

SEQ ID NO: 1566683 - RNA, 16 nt, Human adenovirus D
cgucgacggcgccucc

SEQ ID NO: 1566684 - RNA, 18 nt, Human adenovirus D
caucccggccaaggccac

SEQ ID NO: 1566685 - RNA, 19 nt, Human adenovirus D
augacagaggcaacagcaa

SEQ ID NO: 1566686 - RNA, 21 nt, Human adenovirus D
ggccuggaauaguagcacggg

SEQ ID NO: 1566687 - RNA, 21 nt, Human adenovirus D
agagaaggguuaacauuugac

SEQ ID NO: 1566688 - RNA, 21 nt, Human adenovirus D
ccaacggcugcauccacugcu

SEQ ID NO: 1566689 - RNA, 17 nt, Human adenovirus D
gagccaggugagcucgg

SEQ ID NO: 1566690 - RNA, 14 nt, Human adenovirus D
aacaguacuggcaa

SEQ ID NO: 1566691 - RNA, 16 nt, Human adenovirus D
gcuucccuggaagagu

SEQ ID NO: 1566692 - RNA, 16 nt, Human adenovirus D
cgccauggggcgccgc

SEQ ID NO: 1566693 - RNA, 20 nt, Human adenovirus D
aauacagaugguagcagcag

SEQ ID NO: 1566694 - RNA, 13 nt, Human adenovirus D
agacagcagaaga

SEQ ID NO: 1566695 - RNA, 22 nt, Human adenovirus D
cugcuaccucuugcagcuggcc

SEQ ID NO: 1566696 - RNA, 21 nt, Human adenovirus D
cacgucugacugccgccggcc

SEQ ID NO: 1566697 - RNA, 21 nt, Human adenovirus D
cgcucggugacaaacaggcug

SEQ ID NO: 1566698 - RNA, 15 nt, Human adenovirus D
gugaagauagacagc

SEQ ID NO: 1566699 - RNA, 18 nt, Human adenovirus D
gucaucaccuuccugcag

SEQ ID NO: 1566700 - RNA, 13 nt, Human adenovirus D
acgaggcagaggc

SEQ ID NO: 1566701 - RNA, 21 nt, Human adenovirus D
ccgagcuccgcgaacagcagc

SEQ ID NO: 1566702 - RNA, 20 nt, Human adenovirus D
cucuacgcguacauccagca

SEQ ID NO: 1566703 - RNA, 23 nt, Human adenovirus D
cacgugaccagggguccccgacg

SEQ ID NO: 1566704 - RNA, 13 nt, Human adenovirus D
gaacugaugaaaa

SEQ ID NO: 1566705 - RNA, 21 nt, Human adenovirus D
ccggaguaucauugaugcaug

SEQ ID NO: 1566706 - RNA, 13 nt, Human adenovirus D
caucaucgcgcca

SEQ ID NO: 1566707 - RNA, 22 nt, Human adenovirus D
ccgacuuugucccgcugagcua

SEQ ID NO: 1566708 - RNA, 23 nt, Human adenovirus D
caaccaugugcgcacccugaucg

SEQ ID NO: 1566709 - RNA, 13 nt, Human adenovirus D
cgugaccaggggu

SEQ ID NO: 1566710 - RNA, 19 nt, Human adenovirus D
gcgccuucaauuggagcag

SEQ ID NO: 1566711 - RNA, 15 nt, Human adenovirus D
aagucuacuggucgc

SEQ ID NO: 1566712 - RNA, 21 nt, Human adenovirus D
uccgcaggaguccaccgcucc

SEQ ID NO: 1566713 - RNA, 23 nt, Human adenovirus D
agcgauucccgggcuuucuugcc

SEQ ID NO: 1566714 - RNA, 14 nt, Human adenovirus D
aucuugcccacguc

SEQ ID NO: 1566715 - RNA, 14 nt, Human adenovirus D
ggaacugaugaaaa

SEQ ID NO: 1566716 - RNA, 20 nt, Human adenovirus D
ggaggccaucgugcagaacc

SEQ ID NO: 1566717 - RNA, 23 nt, Human adenovirus D
gagcuacagcaggagugcaggga

SEQ ID NO: 1566718 - RNA, 21 nt, Human adenovirus D
gaagcccgugaccugcagcag

SEQ ID NO: 1566719 - RNA, 23 nt, Human adenovirus D
gagauccagguccgggggcaggg

SEQ ID NO: 1566720 - RNA, 16 nt, Human adenovirus D
ccaggcuggccgugcu

SEQ ID NO: 1566721 - RNA, 16 nt, Human adenovirus D
ucggaaaacaggaugg

SEQ ID NO: 1566722 - RNA, 17 nt, Human adenovirus D
guacagcacagcaggga

SEQ ID NO: 1566723 - RNA, 16 nt, Human adenovirus D
cgcgggcggccauugc

SEQ ID NO: 1566724 - RNA, 12 nt, Human adenovirus D
gacgguggugcg

SEQ ID NO: 1566725 - RNA, 15 nt, Human adenovirus D
uggccuguccugcag

SEQ ID NO: 1566726 - RNA, 18 nt, Human adenovirus D
cggcagcuuuuugagcuc

SEQ ID NO: 1566727 - RNA, 15 nt, Human adenovirus D
cuaccugggaggaga

SEQ ID NO: 1566728 - RNA, 15 nt, Human adenovirus D
cuacggagggcagaa

SEQ ID NO: 1566729 - RNA, 14 nt, Human adenovirus D
accuugaaagggau

SEQ ID NO: 1566730 - RNA, 23 nt, Human adenovirus D
aaguuuaauggggugcuguucau

SEQ ID NO: 1566731 - RNA, 17 nt, Human adenovirus D
agaaccccacaggauga

SEQ ID NO: 1566732 - RNA, 21 nt, Human adenovirus D
caggagaugagcagaacuaca

SEQ ID NO: 1566733 - RNA, 16 nt, Human adenovirus D
cgcugccggaccucau

SEQ ID NO: 1566734 - RNA, 20 nt, Human adenovirus D
uccgguugugcagcccccuc

SEQ ID NO: 1566735 - RNA, 20 nt, Human adenovirus D
uuuugaggaugcaucaucca

SEQ ID NO: 1566736 - RNA, 21 nt, Human adenovirus D
uacaagagagaugcuccaggu

SEQ ID NO: 1566737 - RNA, 18 nt, Human adenovirus D
cggccugaaccgccgccg

SEQ ID NO: 1566738 - RNA, 23 nt, Human adenovirus D
ugagagucugaaaaacagaaagc

SEQ ID NO: 1566739 - RNA, 22 nt, Human adenovirus D
caggaugggucugugccucucc

SEQ ID NO: 1566740 - RNA, 14 nt, Human adenovirus D
cacggccagcaggg

SEQ ID NO: 1566741 - RNA, 20 nt, Human adenovirus D
uggauggaaaaauauuugug

SEQ ID NO: 1566742 - RNA, 19 nt, Human adenovirus D
aaugacaaacaaaagccau

SEQ ID NO: 1566743 - RNA, 23 nt, Human adenovirus D
caggcuggccgugcucaagcgca

SEQ ID NO: 1566744 - RNA, 12 nt, Human adenovirus D
aucugaaaguau

SEQ ID NO: 1566745 - RNA, 18 nt, Human adenovirus D
aggugcgccccaucaagc

SEQ ID NO: 1566746 - RNA, 23 nt, Human adenovirus D
ucacggccuuguagggacagcag

SEQ ID NO: 1566747 - RNA, 14 nt, Human adenovirus D
ggccucuacccgga

SEQ ID NO: 1566748 - RNA, 22 nt, Human adenovirus D
gcggccguccuuucgcugcugc

SEQ ID NO: 1566749 - RNA, 18 nt, Human adenovirus D
cgcgaggagguggcccug

SEQ ID NO: 1566750 - RNA, 18 nt, Human adenovirus D
gggugcgcuugagacuca

SEQ ID NO: 1566751 - RNA, 14 nt, Human adenovirus D
cgagaucaagcgca

SEQ ID NO: 1566752 - RNA, 19 nt, Human adenovirus D
gccguggccucuucgcccg

SEQ ID NO: 1566753 - RNA, 23 nt, Human adenovirus D
cuggugauacgaggcagaggcac

SEQ ID NO: 1566754 - RNA, 17 nt, Human adenovirus D
agcuccugagcgagacc

SEQ ID NO: 1566755 - RNA, 15 nt, Human adenovirus D
acaucugugcugccu

SEQ ID NO: 1566756 - RNA, 22 nt, Human adenovirus D
uaagaauccacagaucagacau

SEQ ID NO: 1566757 - RNA, 23 nt, Human adenovirus D
ccccucgaaucaggcuggagccg

SEQ ID NO: 1566758 - RNA, 22 nt, Human adenovirus D
cgcccacggugguggagaugga

SEQ ID NO: 1566759 - RNA, 13 nt, Human adenovirus D
ccuccaggccaac

SEQ ID NO: 1566760 - RNA, 14 nt, Human adenovirus D
caucuccaccacgu

SEQ ID NO: 1566761 - RNA, 14 nt, Human adenovirus D
ucuacagccagcag

SEQ ID NO: 1566762 - RNA, 18 nt, Human adenovirus D
acucgcagugcacgggca

SEQ ID NO: 1566763 - RNA, 21 nt, Human adenovirus D
cugcacaccaacaugcccaau

SEQ ID NO: 1566764 - RNA, 17 nt, Human adenovirus D
gaugguuucccucgggc

SEQ ID NO: 1566765 - RNA, 23 nt, Human adenovirus D
ucagggcgaaggugucccugacc

SEQ ID NO: 1566766 - RNA, 17 nt, Human adenovirus D
cacgccguucuccgccg

SEQ ID NO: 1566767 - RNA, 20 nt, Human adenovirus D
caugugaacaaaacccauga

SEQ ID NO: 1566768 - RNA, 22 nt, Human adenovirus D
ggaagcccugagccgccagcug

SEQ ID NO: 1566769 - RNA, 14 nt, Human adenovirus D
aggccuggcccuga

SEQ ID NO: 1566770 - RNA, 15 nt, Human adenovirus D
cggaccaccccaggc

SEQ ID NO: 1566771 - RNA, 14 nt, Human adenovirus D
cggugcugcugccg

SEQ ID NO: 1566772 - RNA, 17 nt, Human adenovirus D
cugaguuuaauaaaagc

SEQ ID NO: 1566773 - RNA, 17 nt, Human adenovirus D
ucucggaccaaccccac

SEQ ID NO: 1566774 - RNA, 14 nt, Human adenovirus D
gaaaagucauccaa

SEQ ID NO: 1566775 - RNA, 20 nt, Human adenovirus D
gggcauuaacgggguggugg

SEQ ID NO: 1566776 - RNA, 19 nt, Human adenovirus D
caggccuaacuacauuggc

SEQ ID NO: 1566777 - RNA, 21 nt, Human adenovirus D
gaagaaaugaggcaggccaug

SEQ ID NO: 1566778 - RNA, 12 nt, Human adenovirus D
gacaacgccagg

SEQ ID NO: 1566779 - RNA, 18 nt, Human adenovirus D
auacauccucuggcuuuu

SEQ ID NO: 1566780 - RNA, 12 nt, Human adenovirus D
caagaacgccau

SEQ ID NO: 1566781 - RNA, 14 nt, Human adenovirus D
gacaagcuggccug

SEQ ID NO: 1566782 - RNA, 11 nt, Human adenovirus D
gggcacccacg

SEQ ID NO: 1566783 - RNA, 16 nt, Human adenovirus D
ggcccuggcugguggu

SEQ ID NO: 1566784 - RNA, 13 nt, Human adenovirus D
uuccaaaaucaga

SEQ ID NO: 1566785 - RNA, 17 nt, Human adenovirus D
uguagaugauccaguca

SEQ ID NO: 1566786 - RNA, 17 nt, Human adenovirus D
uguuuacaaucuggcgg

SEQ ID NO: 1566787 - RNA, 14 nt, Human adenovirus D
gccccccgcccgcg

SEQ ID NO: 1566788 - RNA, 16 nt, Human adenovirus D
agucucaccugguuag

SEQ ID NO: 1566789 - RNA, 21 nt, Human adenovirus D
ggcucccagccuccaccgcua

SEQ ID NO: 1566790 - RNA, 20 nt, Human adenovirus D
cucaccaccccggacgucac

SEQ ID NO: 1566791 - RNA, 15 nt, Human adenovirus D
acgagggccugggcu

SEQ ID NO: 1566792 - RNA, 21 nt, Human adenovirus D
cagaaggugguggacggccug

SEQ ID NO: 1566793 - RNA, 17 nt, Human adenovirus D
cagcaggagcgugccgc

SEQ ID NO: 1566794 - RNA, 14 nt, Human adenovirus D
ugcaggccgggcug

SEQ ID NO: 1566795 - RNA, 14 nt, Human adenovirus D
aaucaauguaacua

SEQ ID NO: 1566796 - RNA, 14 nt, Human adenovirus D
gggugggccccugg

SEQ ID NO: 1566797 - RNA, 22 nt, Human adenovirus D
aacucugauucaugugaacaaa

SEQ ID NO: 1566798 - RNA, 23 nt, Human adenovirus D
agcuggcccggcaacgaccggcu

SEQ ID NO: 1566799 - RNA, 14 nt, Human adenovirus D
cuaaugacaaacaa

SEQ ID NO: 1566800 - RNA, 14 nt, Human adenovirus D
ccagacccaggcgc

SEQ ID NO: 1566801 - RNA, 15 nt, Human adenovirus D
cauccugcacgcagc

SEQ ID NO: 1566802 - RNA, 22 nt, Human adenovirus D
caggaggagaccgacgcugggc

SEQ ID NO: 1566803 - RNA, 15 nt, Human adenovirus D
ugcuacaucugcugc

SEQ ID NO: 1566804 - RNA, 12 nt, Human adenovirus D
ccaucaccaccg

SEQ ID NO: 1566805 - RNA, 21 nt, Human adenovirus D
gacauccuggaccaggcggca

SEQ ID NO: 1566806 - RNA, 16 nt, Human adenovirus D
ggaccgcagcggggag

SEQ ID NO: 1566807 - RNA, 22 nt, Human adenovirus D
ugguaguuuuuucuuuaaucau

SEQ ID NO: 1566808 - RNA, 15 nt, Human adenovirus D
uauggccuggagcag

SEQ ID NO: 1566809 - RNA, 17 nt, Human adenovirus D
ucggcucgacgcuccgg

SEQ ID NO: 1566810 - RNA, 23 nt, Human adenovirus D
gcacgcgggugaggguguccugg

SEQ ID NO: 1566811 - RNA, 13 nt, Human adenovirus D
ccugcccgacucc

SEQ ID NO: 1566812 - RNA, 16 nt, Human adenovirus D
gcccagcgagaggagc

SEQ ID NO: 1566813 - RNA, 13 nt, Human adenovirus D
agcaggcgccggc

SEQ ID NO: 1566814 - RNA, 17 nt, Human adenovirus D
gccggcgaaccgagcac

SEQ ID NO: 1566815 - RNA, 13 nt, Human adenovirus D
caggaccaccagg

SEQ ID NO: 1566816 - RNA, 13 nt, Human adenovirus D
cgcaugaccaccu

SEQ ID NO: 1566817 - RNA, 19 nt, Human adenovirus D
uagcacguuucgucaggca

SEQ ID NO: 1566818 - RNA, 12 nt, Human adenovirus D
ccgagcucugcu

SEQ ID NO: 1566819 - RNA, 14 nt, Human adenovirus D
caggccaggaggag

SEQ ID NO: 1566820 - RNA, 14 nt, Human adenovirus D
aggcgagcagcugu

SEQ ID NO: 1566821 - RNA, 17 nt, Human adenovirus D
gcggagaacaaggccau

SEQ ID NO: 1566822 - RNA, 12 nt, Human adenovirus D
cagcgcgagcgg

SEQ ID NO: 1566823 - RNA, 20 nt, Human adenovirus D
cgggccuacuuuuugggcac

SEQ ID NO: 1566824 - RNA, 19 nt, Human adenovirus D
uuuuccaugcacucaucca

SEQ ID NO: 1566825 - RNA, 14 nt, Human adenovirus D
gcgccgcgccagac

SEQ ID NO: 1566826 - RNA, 14 nt, Human adenovirus D
uaucagacaugcug

SEQ ID NO: 1566827 - RNA, 12 nt, Human adenovirus D
ggagccacugcu

SEQ ID NO: 1566828 - RNA, 15 nt, Human adenovirus D
ggcacccaccacagu

SEQ ID NO: 1566829 - RNA, 23 nt, Human adenovirus D
agucacaguuauaccaccuccuc

SEQ ID NO: 1566830 - RNA, 17 nt, Human adenovirus D
cgucgacggggaaggcu

SEQ ID NO: 1566831 - RNA, 17 nt, Human adenovirus D
ggcgccggcgcuagcca

SEQ ID NO: 1566832 - RNA, 23 nt, Human adenovirus D
cuuucacccggacguggugcugc

SEQ ID NO: 1566833 - RNA, 14 nt, Human adenovirus D
cgcuaccgcuucca

SEQ ID NO: 1566834 - RNA, 17 nt, Human adenovirus D
ccucaggcgcaaccagg

SEQ ID NO: 1566835 - RNA, 14 nt, Human adenovirus D
gauacccuggacaa

SEQ ID NO: 1566836 - RNA, 11 nt, Human adenovirus D
acauguaacuu

SEQ ID NO: 1566837 - RNA, 12 nt, Human adenovirus D
uagaaacagauc

SEQ ID NO: 1566838 - RNA, 15 nt, Human adenovirus D
augggucaggcagcg

SEQ ID NO: 1566839 - RNA, 17 nt, Human adenovirus D
gaaacagauccugcugc

SEQ ID NO: 1566840 - RNA, 16 nt, Human adenovirus D
uuuuagaauggaagac

SEQ ID NO: 1566841 - RNA, 18 nt, Human adenovirus D
gaaagaacauacaugggc

SEQ ID NO: 1566842 - RNA, 17 nt, Human adenovirus D
ccaagaucaggggaugu

SEQ ID NO: 1566843 - RNA, 15 nt, Human adenovirus D
ucacggugaaggggu

SEQ ID NO: 1566844 - RNA, 12 nt, Human adenovirus D
cauucuggaggc

SEQ ID NO: 1566845 - RNA, 11 nt, Human adenovirus D
ggcacuggcac

SEQ ID NO: 1566846 - RNA, 17 nt, Human adenovirus D
cugaaaggcgggcugcc

SEQ ID NO: 1566847 - RNA, 16 nt, Human adenovirus D
gguggacgagcagacc

SEQ ID NO: 1566848 - RNA, 13 nt, Human adenovirus D
gcagaggaagagg

SEQ ID NO: 1566849 - RNA, 13 nt, Human adenovirus D
cuaucauucagag

SEQ ID NO: 1566850 - RNA, 15 nt, Human adenovirus D
aagaagacuauaaag

SEQ ID NO: 1566851 - RNA, 22 nt, Human adenovirus D
cguuacgucacuuuugcccuua

SEQ ID NO: 1566852 - RNA, 17 nt, Human adenovirus D
guucaggagcgcagccu

SEQ ID NO: 1566853 - RNA, 15 nt, Human adenovirus D
cgcuguaccgcagcu

SEQ ID NO: 1566854 - RNA, 13 nt, Human adenovirus D
gucagugaagccc

SEQ ID NO: 1566855 - RNA, 22 nt, Human adenovirus D
gaggaucgcggcgaacgagcca

SEQ ID NO: 1566856 - RNA, 17 nt, Human adenovirus D
gcaccuagaccacugcc

SEQ ID NO: 1566857 - RNA, 19 nt, Human adenovirus D
auuggccuguccugcaggg

SEQ ID NO: 1566858 - RNA, 17 nt, Human adenovirus D
ggccagaugcggaggag

SEQ ID NO: 1566859 - RNA, 18 nt, Human adenovirus D
ucacauacacacuagaaa

SEQ ID NO: 1566860 - RNA, 23 nt, Human adenovirus D
accugcagcguguucaaaacaac

SEQ ID NO: 1566861 - RNA, 13 nt, Human adenovirus D
cagccggcgaacg

SEQ ID NO: 1566862 - RNA, 23 nt, Human adenovirus D
cuugcacaguuggcgacccagga

SEQ ID NO: 1566863 - RNA, 15 nt, Human adenovirus D
accacucugagacaa

SEQ ID NO: 1566864 - RNA, 22 nt, Human adenovirus D
cucuguaggccauccccaucca

SEQ ID NO: 1566865 - RNA, 24 nt, Human adenovirus D
ggccuccgagcagcgcauccugca

SEQ ID NO: 1566866 - RNA, 22 nt, Human adenovirus D
ugguggcuagaaaacacccaca

SEQ ID NO: 1566867 - RNA, 17 nt, Human adenovirus D
auuggagaaugcugcua

SEQ ID NO: 1566868 - RNA, 17 nt, Human adenovirus D
gacuccgcgaccuccuc

SEQ ID NO: 1566869 - RNA, 24 nt, Human adenovirus D
cgggcuucaccggcuaccuugcac

SEQ ID NO: 1566870 - RNA, 19 nt, Human adenovirus D
uggucagcgaugagcagcu

SEQ ID NO: 1566871 - RNA, 11 nt, Human adenovirus D
uacaacaugcu

SEQ ID NO: 1566872 - RNA, 15 nt, Human adenovirus D
cgcuggggcagaacg

SEQ ID NO: 1566873 - RNA, 19 nt, Human adenovirus D
gccgcguccccgcccgccg

SEQ ID NO: 1566874 - RNA, 17 nt, Human adenovirus D
ccggugucagaggaugg

SEQ ID NO: 1566875 - RNA, 18 nt, Human adenovirus D
ggagaggcauggcaggca

SEQ ID NO: 1566876 - RNA, 14 nt, Human adenovirus D
uggugaagggcugc

SEQ ID NO: 1566877 - RNA, 13 nt, Human adenovirus D
gcugaugcccaac

SEQ ID NO: 1566878 - RNA, 12 nt, Human adenovirus D
accggcuggggu

SEQ ID NO: 1566879 - RNA, 15 nt, Human adenovirus D
caccagggagcugag

SEQ ID NO: 1566880 - RNA, 16 nt, Human adenovirus D
gguugacauccuggau

SEQ ID NO: 1566881 - RNA, 16 nt, Human adenovirus D
cagcaacccuuccugg

SEQ ID NO: 1566882 - RNA, 15 nt, Human adenovirus D
cccugcauggcugcg

SEQ ID NO: 1566883 - RNA, 17 nt, Human adenovirus D
caucagcgcccucagca

SEQ ID NO: 1566884 - RNA, 14 nt, Human adenovirus D
gcagcgccccgagg

SEQ ID NO: 1566885 - RNA, 13 nt, Human adenovirus D
gucugcuccugca

SEQ ID NO: 1566886 - RNA, 15 nt, Human adenovirus D
cgguugugcagcccc

SEQ ID NO: 1566887 - RNA, 17 nt, Human adenovirus D
uaugagaugccccagca

SEQ ID NO: 1566888 - RNA, 21 nt, Human adenovirus D
aggagaggcauggcaggcagc

SEQ ID NO: 1566889 - RNA, 13 nt, Human adenovirus D
ggggacagagaau

SEQ ID NO: 1566890 - RNA, 18 nt, Human adenovirus D
aauaucagacaugcugcu

SEQ ID NO: 1566891 - RNA, 21 nt, Human adenovirus D
uccaccgugugcagacacaug

SEQ ID NO: 1566892 - RNA, 20 nt, Human adenovirus D
ggcagcggugguggaggcgc

SEQ ID NO: 1566893 - RNA, 18 nt, Human adenovirus D
gcuccaugcuucugggca

SEQ ID NO: 1566894 - RNA, 14 nt, Human adenovirus D
gcggcgcaggggca

SEQ ID NO: 1566895 - RNA, 22 nt, Human adenovirus D
cggggguucauguugugcagga

SEQ ID NO: 1566896 - RNA, 16 nt, Human adenovirus D
ccagccaaagcucaug

SEQ ID NO: 1566897 - RNA, 17 nt, Human adenovirus D
guaguugcgcaggcgcu

SEQ ID NO: 1566898 - RNA, 18 nt, Human adenovirus D
ccugcucaccugcaccug

SEQ ID NO: 1566899 - RNA, 22 nt, Human adenovirus D
cccuggugauacgaggcagagg

SEQ ID NO: 1566900 - RNA, 13 nt, Human adenovirus D
acugcuggcccug

SEQ ID NO: 1566901 - RNA, 20 nt, Human adenovirus D
guucgagaucaagcgcagcg

SEQ ID NO: 1566902 - RNA, 13 nt, Human adenovirus D
gcgcuccgugggg

SEQ ID NO: 1566903 - RNA, 15 nt, Human adenovirus D
uccuccguagccugg

SEQ ID NO: 1566904 - RNA, 16 nt, Human adenovirus D
ggcaugggucaggcag

SEQ ID NO: 1566905 - RNA, 18 nt, Human adenovirus D
ggcgaugggcccgugggc

SEQ ID NO: 1566906 - RNA, 12 nt, Human adenovirus D
cccacugggugg

SEQ ID NO: 1566907 - RNA, 16 nt, Human adenovirus D
ucgacuugcaagacag

SEQ ID NO: 1566908 - RNA, 18 nt, Human adenovirus D
cgaggagaacugcuggcc

SEQ ID NO: 1566909 - RNA, 22 nt, Human adenovirus D
gcccuaaauuuaaaaccucauu

SEQ ID NO: 1566910 - RNA, 16 nt, Human adenovirus D
ccagacacccacgugg

SEQ ID NO: 1566911 - RNA, 16 nt, Human adenovirus D
cgccaggaggcggugc

SEQ ID NO: 1566912 - RNA, 22 nt, Human adenovirus D
gccacccuugaccugccuccac

SEQ ID NO: 1566913 - RNA, 15 nt, Human adenovirus D
agauacagaguaaaa

SEQ ID NO: 1566914 - RNA, 20 nt, Human adenovirus D
gcguccgcuccgcagugggc

SEQ ID NO: 1566915 - RNA, 17 nt, Human adenovirus D
gcaggccgggcugcacg

SEQ ID NO: 1566916 - RNA, 16 nt, Human adenovirus D
agaaccugcuccugcu

SEQ ID NO: 1566917 - RNA, 19 nt, Human adenovirus D
ugaaucagguauccagccu

SEQ ID NO: 1566918 - RNA, 18 nt, Human adenovirus D
gcuccuggucugcaaccc

SEQ ID NO: 1566919 - RNA, 23 nt, Human adenovirus D
aagggauauagucuaugggaaca

SEQ ID NO: 1566920 - RNA, 21 nt, Human adenovirus D
ugcccgacgauguagaguucc

SEQ ID NO: 1566921 - RNA, 15 nt, Human adenovirus D
aaaucuuacacauga

SEQ ID NO: 1566922 - RNA, 13 nt, Human adenovirus D
gcuggccagcacg

SEQ ID NO: 1566923 - RNA, 17 nt, Human adenovirus D
cucggcgaugguggcgc

SEQ ID NO: 1566924 - RNA, 20 nt, Human adenovirus D
cuuccacuguuagcuacuuu

SEQ ID NO: 1566925 - RNA, 17 nt, Human adenovirus D
guagguauucccucucg

SEQ ID NO: 1566926 - RNA, 14 nt, Human adenovirus D
gggucaggcagcgg

SEQ ID NO: 1566927 - RNA, 16 nt, Human adenovirus D
aggacauggauuaaaa

SEQ ID NO: 1566928 - RNA, 20 nt, Human adenovirus D
uccaaaauggcuuacauguc

SEQ ID NO: 1566929 - RNA, 23 nt, Human adenovirus D
uccgcacgguaagagcccagcau

SEQ ID NO: 1566930 - RNA, 21 nt, Human adenovirus D
uuuuugaggaugcaucaucca

SEQ ID NO: 1566931 - RNA, 21 nt, Human adenovirus D
ggccccggggcggaguggccu

SEQ ID NO: 1566932 - RNA, 16 nt, Human adenovirus D
cacaucggacuggguu

SEQ ID NO: 1566933 - RNA, 15 nt, Human adenovirus D
ugcagcacuggaaca

SEQ ID NO: 1566934 - RNA, 19 nt, Human adenovirus D
ccggcgacaagcuggccug

SEQ ID NO: 1566935 - RNA, 21 nt, Human adenovirus D
uacaaccaaggcacccaccac

SEQ ID NO: 1566936 - RNA, 15 nt, Human adenovirus D
gcguaagcaggagca

SEQ ID NO: 1566937 - RNA, 19 nt, Human adenovirus D
agcccgcgcgggagccagg

SEQ ID NO: 1566938 - RNA, 21 nt, Human adenovirus D
augcauggccagccuuacuca

SEQ ID NO: 1566939 - RNA, 19 nt, Human adenovirus D
uuacacucgcagugcacgg

SEQ ID NO: 1566940 - RNA, 16 nt, Human adenovirus D
cucggcggcguggccc

SEQ ID NO: 1566941 - RNA, 15 nt, Human adenovirus D
gcgcccguagucugg

SEQ ID NO: 1566942 - RNA, 16 nt, Human adenovirus D
aggcuggcccuccauc

SEQ ID NO: 1566943 - RNA, 17 nt, Human adenovirus D
aggucagcagcaagagc

SEQ ID NO: 1566944 - RNA, 17 nt, Human adenovirus D
aaguuuuucauccagaa

SEQ ID NO: 1566945 - RNA, 13 nt, Human adenovirus D
caagcgcccagag

SEQ ID NO: 1566946 - RNA, 22 nt, Human adenovirus D
ggcaaaauggcgugcuggagag

SEQ ID NO: 1566947 - RNA, 14 nt, Human adenovirus D
cccugguccaccuc

SEQ ID NO: 1566948 - RNA, 23 nt, Human adenovirus D
ucccggaggaggggggccaccuc

SEQ ID NO: 1566949 - RNA, 15 nt, Human adenovirus D
gaggagaccugcacu

SEQ ID NO: 1566950 - RNA, 16 nt, Human adenovirus D
cugcaacgccuucccc

SEQ ID NO: 1566951 - RNA, 15 nt, Human adenovirus D
ccccuggcucccagc

SEQ ID NO: 1566952 - RNA, 23 nt, Human adenovirus D
caugcaagaccccgucaccuucc

SEQ ID NO: 1566953 - RNA, 23 nt, Human adenovirus D
ggauuaaaaauauuagaugacaa

SEQ ID NO: 1566954 - RNA, 13 nt, Human adenovirus D
gaggggcuccucu

SEQ ID NO: 1566955 - RNA, 18 nt, Human adenovirus D
uguccagauccucggcgu

SEQ ID NO: 1566956 - RNA, 18 nt, Human adenovirus D
caugacauggguggggau

SEQ ID NO: 1566957 - RNA, 23 nt, Human adenovirus D
cgagaacguccauggcgcaguag

SEQ ID NO: 1566958 - RNA, 12 nt, Human adenovirus D
uggcccugcugg

SEQ ID NO: 1566959 - RNA, 14 nt, Human adenovirus D
accgaccccuggcu

SEQ ID NO: 1566960 - RNA, 15 nt, Human adenovirus D
gccgcguccccgccc

SEQ ID NO: 1566961 - RNA, 15 nt, Human adenovirus D
ugaaccugagccagg

SEQ ID NO: 1566962 - RNA, 15 nt, Human adenovirus D
cuggccgugggcgac

SEQ ID NO: 1566963 - RNA, 15 nt, Human adenovirus D
acguagcagcccugu

SEQ ID NO: 1566964 - RNA, 18 nt, Human adenovirus D
guccgcaggcgggacaga

SEQ ID NO: 1566965 - RNA, 19 nt, Human adenovirus D
gcgguguaggggacgugag

SEQ ID NO: 1566966 - RNA, 20 nt, Human adenovirus D
gcgcaaauuuguacccgagg

SEQ ID NO: 1566967 - RNA, 19 nt, Human adenovirus D
gcaagggcgaccagcucug

SEQ ID NO: 1566968 - RNA, 16 nt, Human adenovirus D
gauggaaaggucacuu

SEQ ID NO: 1566969 - RNA, 20 nt, Human adenovirus D
caagacgcaggccaggagga

SEQ ID NO: 1566970 - RNA, 15 nt, Human adenovirus D
cagcaguagccccgc

SEQ ID NO: 1566971 - RNA, 20 nt, Human adenovirus D
uggaaacagacagccagguc

SEQ ID NO: 1566972 - RNA, 15 nt, Human adenovirus D
ccagaaggggcaccu

SEQ ID NO: 1566973 - RNA, 19 nt, Human adenovirus D
caugcucuaccccaucccg

SEQ ID NO: 1566974 - RNA, 12 nt, Human adenovirus D
accuuggucaca

SEQ ID NO: 1566975 - RNA, 14 nt, Human adenovirus D
ccugaucucugcca

SEQ ID NO: 1566976 - RNA, 21 nt, Human adenovirus D
ugcgcuaccgcuccaugcuuc

SEQ ID NO: 1566977 - RNA, 19 nt, Human adenovirus D
cgugaccugcagcaggugc

SEQ ID NO: 1566978 - RNA, 15 nt, Human adenovirus D
ccaggaugcagccag

SEQ ID NO: 1566979 - RNA, 18 nt, Human adenovirus D
cauagaccugaugaacaa

SEQ ID NO: 1566980 - RNA, 18 nt, Human adenovirus D
augggccuggccgcgggc

SEQ ID NO: 1566981 - RNA, 20 nt, Human adenovirus D
acaguaaguuccugucuucu

SEQ ID NO: 1566982 - RNA, 15 nt, Human adenovirus D
cgcgaaccaggcagu

SEQ ID NO: 1566983 - RNA, 20 nt, Human adenovirus D
ccccgcgugcagcugcagaa

SEQ ID NO: 1566984 - RNA, 20 nt, Human adenovirus D
uguuguacucugugugcuga

SEQ ID NO: 1566985 - RNA, 12 nt, Human adenovirus D
ucacccagcagu

SEQ ID NO: 1566986 - RNA, 15 nt, Human adenovirus D
guggccuuguaccug

SEQ ID NO: 1566987 - RNA, 15 nt, Human adenovirus D
ggccugggcucgcug

SEQ ID NO: 1566988 - RNA, 18 nt, Human adenovirus D
cccugcucaccugcaccu

SEQ ID NO: 1566989 - RNA, 17 nt, Human adenovirus D
acuaucuaugaaagcau

SEQ ID NO: 1566990 - RNA, 13 nt, Human adenovirus D
cacugcaaauuua

SEQ ID NO: 1566991 - RNA, 19 nt, Human adenovirus D
ggugcugaaacgggcacgg

SEQ ID NO: 1566992 - RNA, 14 nt, Human adenovirus D
cuccuccuggagau

SEQ ID NO: 1566993 - RNA, 20 nt, Human adenovirus D
ggcuccucucgugcuccggc

SEQ ID NO: 1566994 - RNA, 16 nt, Human adenovirus D
cagcuguuccuggugg

SEQ ID NO: 1566995 - RNA, 14 nt, Human adenovirus D
gguguggaagauga

SEQ ID NO: 1566996 - RNA, 17 nt, Human adenovirus D
agcgaccccgagaccug

SEQ ID NO: 1566997 - RNA, 22 nt, Human adenovirus D
cuucccauugaauggcacuggc

SEQ ID NO: 1566998 - RNA, 18 nt, Human adenovirus D
caaccuugaaaccccaga

SEQ ID NO: 1566999 - RNA, 15 nt, Human adenovirus D
cgucggccaugggca

SEQ ID NO: 1567000 - RNA, 17 nt, Human adenovirus D
cagaacccggacagcaa

SEQ ID NO: 1567001 - RNA, 15 nt, Human adenovirus D
cugguggaaacagac

SEQ ID NO: 1567002 - RNA, 13 nt, Human adenovirus D
acgcccugggugu

SEQ ID NO: 1567003 - RNA, 21 nt, Human adenovirus D
agucaaauauuagcuaaugug

SEQ ID NO: 1567004 - RNA, 22 nt, Human adenovirus D
ugugggccugggagugaaaagu

SEQ ID NO: 1567005 - RNA, 22 nt, Human adenovirus D
cagcauguacggaggagccaag

SEQ ID NO: 1567006 - RNA, 16 nt, Human adenovirus D
cuucaugagccagagc

SEQ ID NO: 1567007 - RNA, 17 nt, Human adenovirus D
cgccgucaaccucccgc

SEQ ID NO: 1567008 - RNA, 14 nt, Human adenovirus D
ggagccagguccag

SEQ ID NO: 1567009 - RNA, 16 nt, Human adenovirus D
ggacggaucgcccagg

SEQ ID NO: 1567010 - RNA, 20 nt, Human adenovirus D
gaccagguccacgcuggugg

SEQ ID NO: 1567011 - RNA, 15 nt, Human adenovirus D
caaccagagccagaa

SEQ ID NO: 1567012 - RNA, 15 nt, Human adenovirus D
uccucuucuuccaug

SEQ ID NO: 1567013 - RNA, 12 nt, Human adenovirus D
ccaccaccugca

SEQ ID NO: 1567014 - RNA, 21 nt, Human adenovirus D
auccugacgcgccagccgcgg

SEQ ID NO: 1567015 - RNA, 14 nt, Human adenovirus D
cgcccggcgagcgg

SEQ ID NO: 1567016 - RNA, 19 nt, Human adenovirus D
ucaaggacaugcagcugcc

SEQ ID NO: 1567017 - RNA, 15 nt, Human adenovirus D
caaaacccacucuau

SEQ ID NO: 1567018 - RNA, 21 nt, Human adenovirus D
cggucguuguccaccaggggg

SEQ ID NO: 1567019 - RNA, 12 nt, Human adenovirus D
cggccaaggcca

SEQ ID NO: 1567020 - RNA, 17 nt, Human adenovirus D
ccuacaucaacauaggc

SEQ ID NO: 1567021 - RNA, 16 nt, Human adenovirus D
gagaccaaguccaggg

SEQ ID NO: 1567022 - RNA, 15 nt, Human adenovirus D
cucgucuuccaggag

SEQ ID NO: 1567023 - RNA, 22 nt, Human adenovirus D
guaccuugucguacuucugcca

SEQ ID NO: 1567024 - RNA, 17 nt, Human adenovirus D
ggccaggccuccgagca

SEQ ID NO: 1567025 - RNA, 15 nt, Human adenovirus D
cagcagcaagagcuc

SEQ ID NO: 1567026 - RNA, 16 nt, Human adenovirus D
cugcucgggcaugagc

SEQ ID NO: 1567027 - RNA, 23 nt, Human adenovirus D
agcugcgagaaggcgcccaggcc

SEQ ID NO: 1567028 - RNA, 16 nt, Human adenovirus D
cuggcccggcaacgac

SEQ ID NO: 1567029 - RNA, 12 nt, Human adenovirus D
acaucugugcug

SEQ ID NO: 1567030 - RNA, 20 nt, Human adenovirus D
gagccugcgccgggcgcugg

SEQ ID NO: 1567031 - RNA, 11 nt, Human adenovirus D
guacccagagc

SEQ ID NO: 1567032 - RNA, 15 nt, Human adenovirus D
gcuagacaccacagu

SEQ ID NO: 1567033 - RNA, 21 nt, Human adenovirus D
aagucacuaggaccccaggga

SEQ ID NO: 1567034 - RNA, 13 nt, Human adenovirus D
cuggucaucaccu

SEQ ID NO: 1567035 - RNA, 20 nt, Human adenovirus D
cuucgaguacgaggccaugc

SEQ ID NO: 1567036 - RNA, 14 nt, Human adenovirus D
aucagcugcagcgc

SEQ ID NO: 1567037 - RNA, 19 nt, Human adenovirus D
gcaggggcuacauucugga

SEQ ID NO: 1567038 - RNA, 13 nt, Human adenovirus D
gccaggcuggccg

SEQ ID NO: 1567039 - RNA, 22 nt, Human adenovirus D
acuuagaagagcccccuccccg

SEQ ID NO: 1567040 - RNA, 22 nt, Human adenovirus D
ucaaagaccagaacuuccagca

SEQ ID NO: 1567041 - RNA, 22 nt, Human adenovirus D
gcgcccaccaucaccaccguca

SEQ ID NO: 1567042 - RNA, 13 nt, Human adenovirus D
gaugcagcaagcc

SEQ ID NO: 1567043 - RNA, 15 nt, Human adenovirus D
uggaggguugaaaga

SEQ ID NO: 1567044 - RNA, 12 nt, Human adenovirus D
gccaggcccaga

SEQ ID NO: 1567045 - RNA, 19 nt, Human adenovirus D
agcagaaguucaccugcau

SEQ ID NO: 1567046 - RNA, 23 nt, Human adenovirus D
gaucagccccgcgcgcgcgcacg

SEQ ID NO: 1567047 - RNA, 15 nt, Human adenovirus D
uccaccugcggggcg

SEQ ID NO: 1567048 - RNA, 22 nt, Human adenovirus D
cgacccaggaauggcacgcucu

SEQ ID NO: 1567049 - RNA, 15 nt, Human adenovirus D
ccaaguccagggugc

SEQ ID NO: 1567050 - RNA, 16 nt, Human adenovirus D
accacgguggugcaga

SEQ ID NO: 1567051 - RNA, 22 nt, Human adenovirus D
cccuucucgggaucgccaggcc

SEQ ID NO: 1567052 - RNA, 20 nt, Human adenovirus D
ccgccgaggcuagcacgcag

SEQ ID NO: 1567053 - RNA, 15 nt, Human adenovirus D
ggaccgagucgcgga

SEQ ID NO: 1567054 - RNA, 22 nt, Human adenovirus D
cacgauguaacaucaccacagg

SEQ ID NO: 1567055 - RNA, 14 nt, Human adenovirus D
ggaggcgaagaugg

SEQ ID NO: 1567056 - RNA, 20 nt, Human adenovirus D
agucacuuaaguccugggcc

SEQ ID NO: 1567057 - RNA, 13 nt, Human adenovirus D
cagcugcagaagg

SEQ ID NO: 1567058 - RNA, 13 nt, Human adenovirus D
augaauaugaauu

SEQ ID NO: 1567059 - RNA, 17 nt, Human adenovirus D
gcuaccucuugcagcug

SEQ ID NO: 1567060 - RNA, 20 nt, Human adenovirus D
gcgggaucaucgccugcuug

SEQ ID NO: 1567061 - RNA, 15 nt, Human adenovirus D
caaccugugcucucc

SEQ ID NO: 1567062 - RNA, 14 nt, Human adenovirus D
aauuacagucacua

SEQ ID NO: 1567063 - RNA, 20 nt, Human adenovirus D
aaucuggcgguaccagggga

SEQ ID NO: 1567064 - RNA, 15 nt, Human adenovirus D
gcagccugagcuugg

SEQ ID NO: 1567065 - RNA, 22 nt, Human adenovirus D
cugccccaggcggugcugcugc

SEQ ID NO: 1567066 - RNA, 11 nt, Human adenovirus D
cuuucaagaac

SEQ ID NO: 1567067 - RNA, 11 nt, Human adenovirus D
aaggcagcuga

SEQ ID NO: 1567068 - RNA, 18 nt, Human adenovirus D
acccggacguggugcugc

SEQ ID NO: 1567069 - RNA, 15 nt, Human adenovirus D
ucgucauccuuccag

SEQ ID NO: 1567070 - RNA, 22 nt, Human adenovirus D
gcagccgcguaagcaggagcag

SEQ ID NO: 1567071 - RNA, 16 nt, Human adenovirus D
agguggcccugggccu

SEQ ID NO: 1567072 - RNA, 15 nt, Human adenovirus D
gcuguucauggccaa

SEQ ID NO: 1567073 - RNA, 16 nt, Human adenovirus D
gcuggggcugcucggc

SEQ ID NO: 1567074 - RNA, 13 nt, Human adenovirus D
ucagauauuccag

SEQ ID NO: 1567075 - RNA, 19 nt, Human adenovirus D
ucaccgagccucccaggag

SEQ ID NO: 1567076 - RNA, 15 nt, Human adenovirus D
gcaguuuggccugga

SEQ ID NO: 1567077 - RNA, 14 nt, Human adenovirus D
gcgccaagggcagc

SEQ ID NO: 1567078 - RNA, 23 nt, Human adenovirus D
gcaguccaugcccaacaggccua

SEQ ID NO: 1567079 - RNA, 21 nt, Human adenovirus D
ccgcagccgcggcagccgcag

SEQ ID NO: 1567080 - RNA, 14 nt, Human adenovirus D
caggaugaacagga

SEQ ID NO: 1567081 - RNA, 17 nt, Human adenovirus D
cuacuugcaaguggggc

SEQ ID NO: 1567082 - RNA, 16 nt, Human adenovirus D
uuccggcaaaaaucac

SEQ ID NO: 1567083 - RNA, 15 nt, Human adenovirus D
uacagucacuagugg

SEQ ID NO: 1567084 - RNA, 17 nt, Human adenovirus D
cugaccuugcagagcag

SEQ ID NO: 1567085 - RNA, 21 nt, Human adenovirus D
gauccagucauagcaggggcg

SEQ ID NO: 1567086 - RNA, 19 nt, Human adenovirus D
gcccgggacggaggcucgg

SEQ ID NO: 1567087 - RNA, 12 nt, Human adenovirus D
ugccccagcaga

SEQ ID NO: 1567088 - RNA, 22 nt, Human adenovirus D
gaccacugccgccgccugcgcu

SEQ ID NO: 1567089 - RNA, 23 nt, Human adenovirus D
cgccaaaaaaacacacacgcccu

SEQ ID NO: 1567090 - RNA, 11 nt, Human adenovirus D
cccgaggcccu

SEQ ID NO: 1567091 - RNA, 12 nt, Human adenovirus D
ggccgagcugga

SEQ ID NO: 1567092 - RNA, 20 nt, Human adenovirus D
uggcagccgagccggcgcgc

SEQ ID NO: 1567093 - RNA, 20 nt, Human adenovirus D
gcugcuucugccuggugaag

SEQ ID NO: 1567094 - RNA, 23 nt, Human adenovirus D
cagauccugcugcuccaccaccu

SEQ ID NO: 1567095 - RNA, 17 nt, Human adenovirus D
uucgagacgucccagag

SEQ ID NO: 1567096 - RNA, 16 nt, Human adenovirus D
cccguggucggcgccg

SEQ ID NO: 1567097 - RNA, 15 nt, Human adenovirus D
uggcuucuacagcca

SEQ ID NO: 1567098 - RNA, 17 nt, Human adenovirus D
ucaugaacacacugccc

SEQ ID NO: 1567099 - RNA, 16 nt, Human adenovirus D
cucaucucgcccagca

SEQ ID NO: 1567100 - RNA, 22 nt, Human adenovirus D
caagcgcgggcggacugccacc

SEQ ID NO: 1567101 - RNA, 23 nt, Human adenovirus D
auaggcacugaaaauuugcaaaa

SEQ ID NO: 1567102 - RNA, 16 nt, Human adenovirus D
gcgcgcccggggccag

SEQ ID NO: 1567103 - RNA, 19 nt, Human adenovirus D
uacaacaguacuggcaaca

SEQ ID NO: 1567104 - RNA, 18 nt, Human adenovirus D
gccaccuaucacaucuuu

SEQ ID NO: 1567105 - RNA, 15 nt, Human adenovirus D
gagcuacagcaggag

SEQ ID NO: 1567106 - RNA, 19 nt, Human adenovirus D
gcagaaauuucaagcuggg

SEQ ID NO: 1567107 - RNA, 21 nt, Human adenovirus D
uggugcgcucgucgggcacga

SEQ ID NO: 1567108 - RNA, 21 nt, Human adenovirus D
gccuucuauggaggcagagcu

SEQ ID NO: 1567109 - RNA, 21 nt, Human adenovirus D
uggagcaggguaaagccagca

SEQ ID NO: 1567110 - RNA, 16 nt, Human adenovirus D
ucgccucggaccuggc

SEQ ID NO: 1567111 - RNA, 12 nt, Human adenovirus D
gaguggcggcuu

SEQ ID NO: 1567112 - RNA, 16 nt, Human adenovirus D
cuacugcaucugucca

SEQ ID NO: 1567113 - RNA, 14 nt, Human adenovirus D
cugccgccggggcu

SEQ ID NO: 1567114 - RNA, 21 nt, Human adenovirus D
uugaugcgcuucuuaccucgc

SEQ ID NO: 1567115 - RNA, 23 nt, Human adenovirus D
cacguacuuugacauccgcggcg

SEQ ID NO: 1567116 - RNA, 16 nt, Human adenovirus D
ccacaggaugaacagg

SEQ ID NO: 1567117 - RNA, 12 nt, Human adenovirus D
ggccaggggagu

SEQ ID NO: 1567118 - RNA, 22 nt, Human adenovirus D
gugugauuaaaaagcagcacag

SEQ ID NO: 1567119 - RNA, 13 nt, Human adenovirus D
caaggcgcgcuuc

SEQ ID NO: 1567120 - RNA, 16 nt, Human adenovirus D
cugguuccucguccag

SEQ ID NO: 1567121 - RNA, 19 nt, Human adenovirus D
gagcaggguaaagccagca

SEQ ID NO: 1567122 - RNA, 14 nt, Human adenovirus D
gggacagaguuucu

SEQ ID NO: 1567123 - RNA, 16 nt, Human adenovirus D
ggaucgcgaggacacc

SEQ ID NO: 1567124 - RNA, 16 nt, Human adenovirus D
gcaggcgggacagagg

SEQ ID NO: 1567125 - RNA, 17 nt, Human adenovirus D
caccgagucucaccugg

SEQ ID NO: 1567126 - RNA, 20 nt, Human adenovirus D
uacucuacaauccuuuugua

SEQ ID NO: 1567127 - RNA, 22 nt, Human adenovirus D
gccauggggcgccgcccgagcu

SEQ ID NO: 1567128 - RNA, 17 nt, Human adenovirus D
cauuggagaaugcugcu

SEQ ID NO: 1567129 - RNA, 14 nt, Human adenovirus D
augcuaccugggag

SEQ ID NO: 1567130 - RNA, 17 nt, Human adenovirus D
caagaaacgucccagca

SEQ ID NO: 1567131 - RNA, 18 nt, Human adenovirus D
uguaccgcgaggccauag

SEQ ID NO: 1567132 - RNA, 14 nt, Human adenovirus D
acuuacuuugcaag

SEQ ID NO: 1567133 - RNA, 16 nt, Human adenovirus D
cuugccgaaggacccc

SEQ ID NO: 1567134 - RNA, 21 nt, Human adenovirus D
uacgaggcagaggcacacagc

SEQ ID NO: 1567135 - RNA, 19 nt, Human adenovirus D
gaaccugcgcgggcugugg

SEQ ID NO: 1567136 - RNA, 14 nt, Human adenovirus D
gcugguggccaccu

SEQ ID NO: 1567137 - RNA, 19 nt, Human adenovirus D
gacgcgcucccggcggcag

SEQ ID NO: 1567138 - RNA, 14 nt, Human adenovirus D
gcucgguugaggca

SEQ ID NO: 1567139 - RNA, 13 nt, Human adenovirus D
uaccgacagcagc

SEQ ID NO: 1567140 - RNA, 22 nt, Human adenovirus D
gcagcacaugguaauccacgga

SEQ ID NO: 1567141 - RNA, 23 nt, Human adenovirus D
gcguaagcaggagcaggaggagg

SEQ ID NO: 1567142 - RNA, 16 nt, Human adenovirus D
uggcggcccuggcugg

SEQ ID NO: 1567143 - RNA, 16 nt, Human adenovirus D
accagcccauuucaca

SEQ ID NO: 1567144 - RNA, 12 nt, Human adenovirus D
ucaaccacaccu

SEQ ID NO: 1567145 - RNA, 15 nt, Human adenovirus D
auuuuuacaccagcg

SEQ ID NO: 1567146 - RNA, 18 nt, Human adenovirus D
ggccgagaccgugagcuc

SEQ ID NO: 1567147 - RNA, 17 nt, Human adenovirus D
gcuccuggucugcaacc

SEQ ID NO: 1567148 - RNA, 19 nt, Human adenovirus D
cucgagcucgaaugcaugc

SEQ ID NO: 1567149 - RNA, 22 nt, Human adenovirus D
agcgguucaagaacgagggccu

SEQ ID NO: 1567150 - RNA, 20 nt, Human adenovirus D
gaucuuuaugaacaugaagu

SEQ ID NO: 1567151 - RNA, 16 nt, Human adenovirus D
ucaaacaggcaaagau

SEQ ID NO: 1567152 - RNA, 20 nt, Human adenovirus D
ggucugucauauccugaaga

SEQ ID NO: 1567153 - RNA, 22 nt, Human adenovirus D
cacaugcuuggucuuucuggcu

SEQ ID NO: 1567154 - RNA, 23 nt, Human adenovirus D
acaugggcaugagcccgucccgg

SEQ ID NO: 1567155 - RNA, 19 nt, Human adenovirus D
gaugcuucaacagcugugc

SEQ ID NO: 1567156 - RNA, 22 nt, Human adenovirus D
acguuucuggggucagagacau

SEQ ID NO: 1567157 - RNA, 13 nt, Human adenovirus D
cuuuccagcagca

SEQ ID NO: 1567158 - RNA, 17 nt, Human adenovirus D
acccgcgacccccaggc

SEQ ID NO: 1567159 - RNA, 18 nt, Human adenovirus D
cacccugcccuuccagca

SEQ ID NO: 1567160 - RNA, 19 nt, Human adenovirus D
auguuacugcauacaaaug

SEQ ID NO: 1567161 - RNA, 21 nt, Human adenovirus D
caggagaucacuagcgugagc

SEQ ID NO: 1567162 - RNA, 14 nt, Human adenovirus D
accuaccacugcca

SEQ ID NO: 1567163 - RNA, 17 nt, Human adenovirus D
accaggggguccaccuu

SEQ ID NO: 1567164 - RNA, 15 nt, Human adenovirus D
gacucacccuggggc

SEQ ID NO: 1567165 - RNA, 17 nt, Human adenovirus D
cccugcccuuccagcac

SEQ ID NO: 1567166 - RNA, 16 nt, Human adenovirus D
cucguucauccagguc

SEQ ID NO: 1567167 - RNA, 14 nt, Human adenovirus D
ugaagagggagagg

SEQ ID NO: 1567168 - RNA, 16 nt, Human adenovirus D
uaccaugggaaaugca

SEQ ID NO: 1567169 - RNA, 13 nt, Human adenovirus D
gcggcgggggcgg

SEQ ID NO: 1567170 - RNA, 10 nt, Human adenovirus D
guugcaugag

SEQ ID NO: 1567171 - RNA, 20 nt, Human adenovirus D
gucuacuggucgcugccgga

SEQ ID NO: 1567172 - RNA, 15 nt, Human adenovirus D
acgugagcggcgagg

SEQ ID NO: 1567173 - RNA, 18 nt, Human adenovirus D
ucagacgggugcuccggg

SEQ ID NO: 1567174 - RNA, 14 nt, Human adenovirus D
ggggugguccuggg

SEQ ID NO: 1567175 - RNA, 17 nt, Human adenovirus D
cccuucuccagcaacuu

SEQ ID NO: 1567176 - RNA, 19 nt, Human adenovirus D
gguucauguugugcaggac

SEQ ID NO: 1567177 - RNA, 14 nt, Human adenovirus D
agggggcgggucug

SEQ ID NO: 1567178 - RNA, 14 nt, Human adenovirus D
aaggacgauaaagu

SEQ ID NO: 1567179 - RNA, 16 nt, Human adenovirus D
uaguaaagaaacagaa

SEQ ID NO: 1567180 - RNA, 19 nt, Human adenovirus D
augcgcuucuuaccucgcg

SEQ ID NO: 1567181 - RNA, 22 nt, Human adenovirus D
aaaaagucacuuaaguccuggg

SEQ ID NO: 1567182 - RNA, 23 nt, Human adenovirus D
uggagcacagaccuucagggagu

SEQ ID NO: 1567183 - RNA, 13 nt, Human adenovirus D
guucuucacccag

SEQ ID NO: 1567184 - RNA, 15 nt, Human adenovirus D
uagaagugacaauuu

SEQ ID NO: 1567185 - RNA, 22 nt, Human adenovirus D
aucagaauauccccuuccucac

SEQ ID NO: 1567186 - RNA, 15 nt, Human adenovirus D
aucucgauccagcag

SEQ ID NO: 1567187 - RNA, 18 nt, Human adenovirus D
caaccuccaggccaaccu

SEQ ID NO: 1567188 - RNA, 20 nt, Human adenovirus D
gcaccucgguacccuccucc

SEQ ID NO: 1567189 - RNA, 22 nt, Human adenovirus D
acuagcgugagccgcgcgcugg

SEQ ID NO: 1567190 - RNA, 19 nt, Human adenovirus D
cacaguuggcgacccagga

SEQ ID NO: 1567191 - RNA, 23 nt, Human adenovirus D
gacacauguccccuuccuccgca

SEQ ID NO: 1567192 - RNA, 16 nt, Human adenovirus D
cagauauuccagauca

SEQ ID NO: 1567193 - RNA, 12 nt, Human adenovirus D
aguccaccgcuc

SEQ ID NO: 1567194 - RNA, 16 nt, Human adenovirus D
cuagacauggccagca

SEQ ID NO: 1567195 - RNA, 18 nt, Human adenovirus D
ggggcuacauucuggacu

SEQ ID NO: 1567196 - RNA, 17 nt, Human adenovirus D
cuccaacguggagcuga

SEQ ID NO: 1567197 - RNA, 14 nt, Human adenovirus D
cucacccuggggcu

SEQ ID NO: 1567198 - RNA, 21 nt, Human adenovirus D
ccagccgcaggcgcccagcca

SEQ ID NO: 1567199 - RNA, 19 nt, Human adenovirus D
ugaaagcuauaaaaaugaa

SEQ ID NO: 1567200 - RNA, 21 nt, Human adenovirus D
gcguuccccuccgcugugcug

SEQ ID NO: 1567201 - RNA, 11 nt, Human adenovirus D
aagcugggcug

SEQ ID NO: 1567202 - RNA, 18 nt, Human adenovirus D
cgcggcguccuggaccgc

SEQ ID NO: 1567203 - RNA, 12 nt, Human adenovirus D
gggcggaccugc

SEQ ID NO: 1567204 - RNA, 14 nt, Human adenovirus D
ggccccggggcgaa

SEQ ID NO: 1567205 - RNA, 14 nt, Human adenovirus D
uacgcuggccagca

SEQ ID NO: 1567206 - RNA, 17 nt, Human adenovirus D
cccggcauccugcacgc

SEQ ID NO: 1567207 - RNA, 16 nt, Human adenovirus D
acuaggcccagcagca

SEQ ID NO: 1567208 - RNA, 23 nt, Human adenovirus D
cgcaagcucaugcuggccguggu

SEQ ID NO: 1567209 - RNA, 17 nt, Human adenovirus D
cagauacuucagcaugu

SEQ ID NO: 1567210 - RNA, 18 nt, Human adenovirus D
ccuccgucggaagaggag

SEQ ID NO: 1567211 - RNA, 20 nt, Human adenovirus D
uggccggcgcgcccggggcc

SEQ ID NO: 1567212 - RNA, 16 nt, Human adenovirus D
cugagcuuggccgaga

SEQ ID NO: 1567213 - RNA, 16 nt, Human adenovirus D
cguagcagcccugugg

SEQ ID NO: 1567214 - RNA, 15 nt, Human adenovirus D
accuucaaccucacc

SEQ ID NO: 1567215 - RNA, 21 nt, Human adenovirus D
acccugagaacggggugcagu

SEQ ID NO: 1567216 - RNA, 23 nt, Human adenovirus D
cccggcauccugcacgcagcagc

SEQ ID NO: 1567217 - RNA, 15 nt, Human adenovirus D
augguacuaaugaca

SEQ ID NO: 1567218 - RNA, 15 nt, Human adenovirus D
cccaacggcaccugc

SEQ ID NO: 1567219 - RNA, 13 nt, Human adenovirus D
accagacacaucu

SEQ ID NO: 1567220 - RNA, 23 nt, Human adenovirus D
ggcaacgaccggcugcucacgcc

SEQ ID NO: 1567221 - RNA, 23 nt, Human adenovirus D
cuucacagagagccgccugagca

SEQ ID NO: 1567222 - RNA, 14 nt, Human adenovirus D
gcacgucgcccgag

SEQ ID NO: 1567223 - RNA, 20 nt, Human adenovirus D
acccacgugguauacaagcc

SEQ ID NO: 1567224 - RNA, 20 nt, Human adenovirus D
gcccacggugguggagaugg

SEQ ID NO: 1567225 - RNA, 20 nt, Human adenovirus D
uggaucgcgaggacaccagu

SEQ ID NO: 1567226 - RNA, 22 nt, Human adenovirus D
gaagaauuggaaaaguggaaga

SEQ ID NO: 1567227 - RNA, 12 nt, Human adenovirus D
accacaccuuca

SEQ ID NO: 1567228 - RNA, 16 nt, Human adenovirus D
gugcgcgaccugggcu

SEQ ID NO: 1567229 - RNA, 14 nt, Human adenovirus D
agaguaaaaguaaa

SEQ ID NO: 1567230 - RNA, 21 nt, Human adenovirus D
ugcaucaacguuucucggcca

SEQ ID NO: 1567231 - RNA, 15 nt, Human adenovirus D
gcagacggugaagca

SEQ ID NO: 1567232 - RNA, 22 nt, Human adenovirus D
ggacgcuaccgcugcgcagcag

SEQ ID NO: 1567233 - RNA, 14 nt, Human adenovirus D
gcaccacugcaugg

SEQ ID NO: 1567234 - RNA, 11 nt, Human adenovirus D
uccgagcagcg

SEQ ID NO: 1567235 - RNA, 17 nt, Human adenovirus D
caagguccgcaggaguc

SEQ ID NO: 1567236 - RNA, 14 nt, Human adenovirus D
ccuucaaccaccac

SEQ ID NO: 1567237 - RNA, 17 nt, Human adenovirus D
aguccaugcccaacagg

SEQ ID NO: 1567238 - RNA, 15 nt, Human adenovirus D
ucgacgagccaggug

SEQ ID NO: 1567239 - RNA, 15 nt, Human adenovirus D
cacccucagaagaag

SEQ ID NO: 1567240 - RNA, 16 nt, Human adenovirus D
agacugauggccacgg

SEQ ID NO: 1567241 - RNA, 16 nt, Human adenovirus D
gguccccgaggcccuu

SEQ ID NO: 1567242 - RNA, 17 nt, Human adenovirus D
gaccacgguggugcaga

SEQ ID NO: 1567243 - RNA, 13 nt, Human adenovirus D
gaguugguggccg

SEQ ID NO: 1567244 - RNA, 14 nt, Human adenovirus D
ccguccuugccuuc

SEQ ID NO: 1567245 - RNA, 22 nt, Human adenovirus D
gagcagacggggaucagccccg

SEQ ID NO: 1567246 - RNA, 15 nt, Human adenovirus D
caggccgggcugcac

SEQ ID NO: 1567247 - RNA, 20 nt, Human adenovirus D
ggcgagaagcggccgcggcc

SEQ ID NO: 1567248 - RNA, 15 nt, Human adenovirus D
caacaccagacacau

SEQ ID NO: 1567249 - RNA, 21 nt, Human adenovirus D
gaggcggagucuuccaugcgg

SEQ ID NO: 1567250 - RNA, 16 nt, Human adenovirus D
gacuucgcagccaugc

SEQ ID NO: 1567251 - RNA, 14 nt, Human adenovirus D
gcccagagcucgcg

SEQ ID NO: 1567252 - RNA, 22 nt, Human adenovirus D
ccccuucucgggaucgccaggc

SEQ ID NO: 1567253 - RNA, 15 nt, Human adenovirus D
gcugccccaggcggu

SEQ ID NO: 1567254 - RNA, 22 nt, Human adenovirus D
cgaagcgccguggccucuucgc

SEQ ID NO: 1567255 - RNA, 12 nt, Human adenovirus D
uggcccugggcc

SEQ ID NO: 1567256 - RNA, 19 nt, Human adenovirus D
gccuuguagggacagcagc

SEQ ID NO: 1567257 - RNA, 22 nt, Human adenovirus D
acagauuugaauugcaaauuga

SEQ ID NO: 1567258 - RNA, 19 nt, Human adenovirus D
ccucggaguaccugagccg

SEQ ID NO: 1567259 - RNA, 15 nt, Human adenovirus D
ggcugauggugaccg

SEQ ID NO: 1567260 - RNA, 12 nt, Human adenovirus D
augggugugcug

SEQ ID NO: 1567261 - RNA, 18 nt, Human adenovirus D
gcgucccuugaggaggaa

SEQ ID NO: 1567262 - RNA, 14 nt, Human adenovirus D
gacgccccugagcg

SEQ ID NO: 1567263 - RNA, 16 nt, Human adenovirus D
gcgaggaugagagccg

SEQ ID NO: 1567264 - RNA, 21 nt, Human adenovirus D
accaaggcacccaccacaguu

SEQ ID NO: 1567265 - RNA, 20 nt, Human adenovirus D
uauccagccuguacccagag

SEQ ID NO: 1567266 - RNA, 16 nt, Human adenovirus D
gcauggccucgugcuc

SEQ ID NO: 1567267 - RNA, 15 nt, Human adenovirus D
cucugacacaccugg

SEQ ID NO: 1567268 - RNA, 17 nt, Human adenovirus D
gccugcgcccgcgccgc

SEQ ID NO: 1567269 - RNA, 19 nt, Human adenovirus D
ccuccagccuuuccauggc

SEQ ID NO: 1567270 - RNA, 15 nt, Human adenovirus D
ugagcccgucccggg

SEQ ID NO: 1567271 - RNA, 22 nt, Human adenovirus D
cgguacacgggguugcagcacu

SEQ ID NO: 1567272 - RNA, 15 nt, Human adenovirus D
ggcagggugagccgg

SEQ ID NO: 1567273 - RNA, 15 nt, Human adenovirus D
guuugggcacugggg

SEQ ID NO: 1567274 - RNA, 21 nt, Human adenovirus D
ccuccuguuacuguaaagcca

SEQ ID NO: 1567275 - RNA, 23 nt, Human adenovirus D
gagcuggccuuccaccucggugc

SEQ ID NO: 1567276 - RNA, 23 nt, Human adenovirus D
ccgcugugcugguggaaacagac

SEQ ID NO: 1567277 - RNA, 14 nt, Human adenovirus D
ggcugcuggagcug

SEQ ID NO: 1567278 - RNA, 21 nt, Human adenovirus D
acacgccaccgcuuuugacaa

SEQ ID NO: 1567279 - RNA, 17 nt, Human adenovirus D
uccagcggcgcaggggc

SEQ ID NO: 1567280 - RNA, 15 nt, Human adenovirus D
ccuucgugcacuggc

SEQ ID NO: 1567281 - RNA, 21 nt, Human adenovirus D
gcugcuaaacaucgccgagcc

SEQ ID NO: 1567282 - RNA, 15 nt, Human adenovirus D
cgaccccuggcuccc

SEQ ID NO: 1567283 - RNA, 15 nt, Human adenovirus D
caccuuccugcagcu

SEQ ID NO: 1567284 - RNA, 23 nt, Human adenovirus D
ucaccuaugagaugccccagcag

SEQ ID NO: 1567285 - RNA, 16 nt, Human adenovirus D
gcauguacggaggagc

SEQ ID NO: 1567286 - RNA, 15 nt, Human adenovirus D
cuccgcggcggcgcg

SEQ ID NO: 1567287 - RNA, 14 nt, Human adenovirus D
cuuguguccucccc

SEQ ID NO: 1567288 - RNA, 19 nt, Human adenovirus D
aucacucuuuccagcagca

SEQ ID NO: 1567289 - RNA, 23 nt, Human adenovirus D
gaggaguuugugcccucggucua

SEQ ID NO: 1567290 - RNA, 21 nt, Human adenovirus D
cgccucugcgugaagaccacu

SEQ ID NO: 1567291 - RNA, 20 nt, Human adenovirus D
cuccucgaggacggagaggc

SEQ ID NO: 1567292 - RNA, 22 nt, Human adenovirus D
agcugcgagaaggcgcccaggc

SEQ ID NO: 1567293 - RNA, 15 nt, Human adenovirus D
cggccaaccugguga

SEQ ID NO: 1567294 - RNA, 13 nt, Human adenovirus D
cucagcagucucu

SEQ ID NO: 1567295 - RNA, 14 nt, Human adenovirus D
cccaccgcgccgcc

SEQ ID NO: 1567296 - RNA, 16 nt, Human adenovirus D
cgcucgcgcaccugcu

SEQ ID NO: 1567297 - RNA, 13 nt, Human adenovirus D
cacgcccugggug

SEQ ID NO: 1567298 - RNA, 16 nt, Human adenovirus D
gaucaucuccccgcgg

SEQ ID NO: 1567299 - RNA, 15 nt, Human adenovirus D
ggagccauagagggc

SEQ ID NO: 1567300 - RNA, 16 nt, Human adenovirus D
cuuuagccagaccaag

SEQ ID NO: 1567301 - RNA, 14 nt, Human adenovirus D
cggcgcgagcugag

SEQ ID NO: 1567302 - RNA, 21 nt, Human adenovirus D
ccacugcaccccccgcaggca

SEQ ID NO: 1567303 - RNA, 12 nt, Human adenovirus D
ccugcccuucca

SEQ ID NO: 1567304 - RNA, 22 nt, Human adenovirus D
cuggcacauacaaagcugaaag

SEQ ID NO: 1567305 - RNA, 13 nt, Human adenovirus D
ucgucgccccgga

SEQ ID NO: 1567306 - RNA, 20 nt, Human adenovirus D
gcaacuucauguccaugggc

SEQ ID NO: 1567307 - RNA, 14 nt, Human adenovirus D
cgcgcuccacggug

SEQ ID NO: 1567308 - RNA, 15 nt, Human adenovirus D
ccuuucgcugcugcc

SEQ ID NO: 1567309 - RNA, 18 nt, Human adenovirus D
uagguuugaguagugggc

SEQ ID NO: 1567310 - RNA, 18 nt, Human adenovirus D
caggguugagucgcggca

SEQ ID NO: 1567311 - RNA, 22 nt, Human adenovirus D
cgccaccacccacaccgccucc

SEQ ID NO: 1567312 - RNA, 24 nt, Human adenovirus D
acgcgcugucggccgaggaggagc

SEQ ID NO: 1567313 - RNA, 13 nt, Human adenovirus D
uauaaaucuuaca

SEQ ID NO: 1567314 - RNA, 18 nt, Human adenovirus D
gauaaauauggccuggag

SEQ ID NO: 1567315 - RNA, 19 nt, Human adenovirus D
uuuaaaaccucauuugcau

SEQ ID NO: 1567316 - RNA, 16 nt, Human adenovirus D
gcucguuaguccagca

SEQ ID NO: 1567317 - RNA, 16 nt, Human adenovirus D
gcuggacaagcuucuu

SEQ ID NO: 1567318 - RNA, 22 nt, Human adenovirus D
ccgaggagaugcgcgacugccg

SEQ ID NO: 1567319 - RNA, 16 nt, Human adenovirus D
acggugaaccugagcc

SEQ ID NO: 1567320 - RNA, 18 nt, Human adenovirus D
auacagagauucagccau

SEQ ID NO: 1567321 - RNA, 21 nt, Human adenovirus D
cggcacggucuggccggugag

SEQ ID NO: 1567322 - RNA, 17 nt, Human adenovirus D
gccccuggcugggcgcu

SEQ ID NO: 1567323 - RNA, 15 nt, Human adenovirus D
ucaccaaggccauag

SEQ ID NO: 1567324 - RNA, 20 nt, Human adenovirus D
ggccgagaagguggcggcaa

SEQ ID NO: 1567325 - RNA, 13 nt, Human adenovirus D
ccgccgccgcacc

SEQ ID NO: 1567326 - RNA, 15 nt, Human adenovirus D
ggacuuaaccaccca

SEQ ID NO: 1567327 - RNA, 22 nt, Human adenovirus D
ggccgcggccagaugcggagga

SEQ ID NO: 1567328 - RNA, 17 nt, Human adenovirus D
accccagaaagaagugg

SEQ ID NO: 1567329 - RNA, 17 nt, Human adenovirus D
ccgugcucaagcgcagc

SEQ ID NO: 1567330 - RNA, 21 nt, Human adenovirus D
accuucaagaaagucuccauc

SEQ ID NO: 1567331 - RNA, 13 nt, Human adenovirus D
accaccagcccau

SEQ ID NO: 1567332 - RNA, 16 nt, Human adenovirus D
ggaagagauggaagaa

SEQ ID NO: 1567333 - RNA, 17 nt, Human adenovirus D
augcacaucgccgggca

SEQ ID NO: 1567334 - RNA, 20 nt, Human adenovirus D
gaggccauaggccaggcgca

SEQ ID NO: 1567335 - RNA, 18 nt, Human adenovirus D
gcugacauccauggccag

SEQ ID NO: 1567336 - RNA, 18 nt, Human adenovirus D
uguaguuguucagcagca

SEQ ID NO: 1567337 - RNA, 13 nt, Human adenovirus D
gcgagaugucugu

SEQ ID NO: 1567338 - RNA, 13 nt, Human adenovirus D
ccgccauggggcg

SEQ ID NO: 1567339 - RNA, 21 nt, Human adenovirus D
cuucuguacuuugucugcugu

SEQ ID NO: 1567340 - RNA, 13 nt, Human adenovirus D
ugcugacugcgac

SEQ ID NO: 1567341 - RNA, 23 nt, Human adenovirus D
agaaaugggcccuugaacagcau

SEQ ID NO: 1567342 - RNA, 15 nt, Human adenovirus D
cccgaccgcugucuc

SEQ ID NO: 1567343 - RNA, 19 nt, Human adenovirus D
uguacccgaggacuaccac

SEQ ID NO: 1567344 - RNA, 19 nt, Human adenovirus D
cuugacagcaccgccgcag

SEQ ID NO: 1567345 - RNA, 16 nt, Human adenovirus D
acgcgcacacuuugga

SEQ ID NO: 1567346 - RNA, 17 nt, Human adenovirus D
gcagcugguaccugucc

SEQ ID NO: 1567347 - RNA, 17 nt, Human adenovirus D
aagacgcaggccaggag

SEQ ID NO: 1567348 - RNA, 21 nt, Human adenovirus D
gccggcgaacgugccgcgcgg

SEQ ID NO: 1567349 - RNA, 20 nt, Human adenovirus D
guccgcaggaguccaccgcu

SEQ ID NO: 1567350 - RNA, 21 nt, Human adenovirus D
uggcgacgaacucggcgguga

SEQ ID NO: 1567351 - RNA, 13 nt, Human adenovirus D
cccacccccccgg

SEQ ID NO: 1567352 - RNA, 17 nt, Human adenovirus D
uggagaaguuccucugc

SEQ ID NO: 1567353 - RNA, 17 nt, Human adenovirus D
uaacacuccuaaaaccg

SEQ ID NO: 1567354 - RNA, 15 nt, Human adenovirus D
gagacccaggucauc

SEQ ID NO: 1567355 - RNA, 13 nt, Human adenovirus D
gcgccccccgcgg

SEQ ID NO: 1567356 - RNA, 15 nt, Human adenovirus D
cggcggcgcuucccg

SEQ ID NO: 1567357 - RNA, 19 nt, Human adenovirus D
caccgcgucgcugaaagca

SEQ ID NO: 1567358 - RNA, 15 nt, Human adenovirus D
ucgguacccuccucc

SEQ ID NO: 1567359 - RNA, 13 nt, Human adenovirus D
guuauucagcagc

SEQ ID NO: 1567360 - RNA, 14 nt, Human adenovirus D
ggccgcggccagau

SEQ ID NO: 1567361 - RNA, 16 nt, Human adenovirus D
accguaccaugggaaa

SEQ ID NO: 1567362 - RNA, 20 nt, Human adenovirus D
cgccgcuguggagccacugc

SEQ ID NO: 1567363 - RNA, 20 nt, Human adenovirus D
cggacuugauuggccugucc

SEQ ID NO: 1567364 - RNA, 14 nt, Human adenovirus D
ugccgaagaagaac

SEQ ID NO: 1567365 - RNA, 19 nt, Human adenovirus D
cugggcucgcugguggcgc

SEQ ID NO: 1567366 - RNA, 12 nt, Human adenovirus D
ccgccugccagg

SEQ ID NO: 1567367 - RNA, 13 nt, Human adenovirus D
cagucuccuggug

SEQ ID NO: 1567368 - RNA, 19 nt, Human adenovirus D
gaucgacgguggacgggcg

SEQ ID NO: 1567369 - RNA, 18 nt, Human adenovirus D
cggcggcagcggcgguuc

SEQ ID NO: 1567370 - RNA, 19 nt, Human adenovirus D
ugggcuucgaagagccggc

SEQ ID NO: 1567371 - RNA, 22 nt, Human adenovirus D
ucucccacagcucgcgguugag

SEQ ID NO: 1567372 - RNA, 15 nt, Human adenovirus D
gaacugaugaaaaag

SEQ ID NO: 1567373 - RNA, 15 nt, Human adenovirus D
cccaagagcgagaug

SEQ ID NO: 1567374 - RNA, 18 nt, Human adenovirus D
agccgcgguuaugcaggg

SEQ ID NO: 1567375 - RNA, 14 nt, Human adenovirus D
ccgucgccacgguc

SEQ ID NO: 1567376 - RNA, 22 nt, Human adenovirus D
cauggacgagaacccgaggagc

SEQ ID NO: 1567377 - RNA, 19 nt, Human adenovirus D
gacagcuuuuacaugcgca

SEQ ID NO: 1567378 - RNA, 18 nt, Human adenovirus D
caaagcgguugagcuggg

SEQ ID NO: 1567379 - RNA, 13 nt, Human adenovirus D
ccgcuugcuggau

SEQ ID NO: 1567380 - RNA, 17 nt, Human adenovirus D
cuucgagguggacccca

SEQ ID NO: 1567381 - RNA, 18 nt, Human adenovirus D
ucaggugccugccccuca

SEQ ID NO: 1567382 - RNA, 14 nt, Human adenovirus D
ccugcgcugcuucg

SEQ ID NO: 1567383 - RNA, 14 nt, Human adenovirus D
aucgccgagcccga

SEQ ID NO: 1567384 - RNA, 17 nt, Human adenovirus D
agauccugcugcuccac

SEQ ID NO: 1567385 - RNA, 19 nt, Human adenovirus D
ggucugcgaccggacggag

SEQ ID NO: 1567386 - RNA, 14 nt, Human adenovirus D
ucacauacacacua

SEQ ID NO: 1567387 - RNA, 18 nt, Human adenovirus D
gcagccgcggcagccgca

SEQ ID NO: 1567388 - RNA, 17 nt, Human adenovirus D
gaccuugcagagcagcu

SEQ ID NO: 1567389 - RNA, 15 nt, Human adenovirus D
ugacgucauugaaga

SEQ ID NO: 1567390 - RNA, 22 nt, Human adenovirus D
cugauauugcuucccuggaaga

SEQ ID NO: 1567391 - RNA, 22 nt, Human adenovirus D
uggccuggaucuugagguuggc

SEQ ID NO: 1567392 - RNA, 18 nt, Human adenovirus D
acucgcgggcggccauug

SEQ ID NO: 1567393 - RNA, 13 nt, Human adenovirus D
gucccagcagcac

SEQ ID NO: 1567394 - RNA, 23 nt, Human adenovirus D
aaguuccugucuucuuccggcaa

SEQ ID NO: 1567395 - RNA, 23 nt, Human adenovirus D
cucagccucgaacaguccaccca

SEQ ID NO: 1567396 - RNA, 22 nt, Human adenovirus D
cuggagauguggguuggcuugc

SEQ ID NO: 1567397 - RNA, 15 nt, Human adenovirus D
cguggcuucgagcag

SEQ ID NO: 1567398 - RNA, 16 nt, Human adenovirus D
ggacgacgaggacucg

SEQ ID NO: 1567399 - RNA, 22 nt, Human adenovirus D
cgaggccgucuaccugcgcacg

SEQ ID NO: 1567400 - RNA, 13 nt, Human adenovirus D
gagacgcgcgcag

SEQ ID NO: 1567401 - RNA, 15 nt, Human adenovirus D
ccgggucuggugcag

SEQ ID NO: 1567402 - RNA, 19 nt, Human adenovirus D
guaccuucgagcugcaagg

SEQ ID NO: 1567403 - RNA, 20 nt, Human adenovirus D
ccgaguucagcuccaguggg

SEQ ID NO: 1567404 - RNA, 13 nt, Human adenovirus D
cuuuaaucauuug

SEQ ID NO: 1567405 - RNA, 17 nt, Human adenovirus D
cacccagaccgugcagg

SEQ ID NO: 1567406 - RNA, 12 nt, Human adenovirus D
ccugaugaacaa

SEQ ID NO: 1567407 - RNA, 18 nt, Human adenovirus D
ggggcaacauccccgccc

SEQ ID NO: 1567408 - RNA, 20 nt, Human adenovirus D
uacaugcccucucaacauca

SEQ ID NO: 1567409 - RNA, 15 nt, Human adenovirus D
cccugacccagcagg

SEQ ID NO: 1567410 - RNA, 18 nt, Human adenovirus D
ccccucaugaacacacug

SEQ ID NO: 1567411 - RNA, 15 nt, Human adenovirus D
caguugggagcuguc

SEQ ID NO: 1567412 - RNA, 16 nt, Human adenovirus D
gccagcagggugccuc

SEQ ID NO: 1567413 - RNA, 13 nt, Human adenovirus D
aguggaagaagag

SEQ ID NO: 1567414 - RNA, 12 nt, Human adenovirus D
agcgcgagccgg

SEQ ID NO: 1567415 - RNA, 19 nt, Human adenovirus D
gggguagcggucguugucc

SEQ ID NO: 1567416 - RNA, 22 nt, Human adenovirus D
caggagggggccacucccagcg

SEQ ID NO: 1567417 - RNA, 13 nt, Human adenovirus D
aacagacagccag

SEQ ID NO: 1567418 - RNA, 15 nt, Human adenovirus D
gaagaaaacuggcaa

SEQ ID NO: 1567419 - RNA, 15 nt, Human adenovirus D
ccaccucgccgcgca

SEQ ID NO: 1567420 - RNA, 20 nt, Human adenovirus D
cgcaguacucgcagcgcugc

SEQ ID NO: 1567421 - RNA, 20 nt, Human adenovirus D
ccggcaugcccaccacgcgc

SEQ ID NO: 1567422 - RNA, 16 nt, Human adenovirus D
gguggcccugggccug

SEQ ID NO: 1567423 - RNA, 17 nt, Human adenovirus D
ucggcccacgcgcucga

SEQ ID NO: 1567424 - RNA, 21 nt, Human adenovirus D
cgggaccggggaggcaccacc

SEQ ID NO: 1567425 - RNA, 19 nt, Human adenovirus D
gggacgacguggacagcgc

SEQ ID NO: 1567426 - RNA, 19 nt, Human adenovirus D
ggcaaugcuagagugaggc

SEQ ID NO: 1567427 - RNA, 15 nt, Human adenovirus D
gacauuuuaaugaau

SEQ ID NO: 1567428 - RNA, 20 nt, Human adenovirus D
ggugacggccuacgagcaga

SEQ ID NO: 1567429 - RNA, 17 nt, Human adenovirus D
ucccgaggagcacccca

SEQ ID NO: 1567430 - RNA, 19 nt, Human adenovirus D
cugaucugauccuugucca

SEQ ID NO: 1567431 - RNA, 16 nt, Human adenovirus D
cgcccugacccagcag

SEQ ID NO: 1567432 - RNA, 19 nt, Human adenovirus D
cgcucagucauccaacuga

SEQ ID NO: 1567433 - RNA, 21 nt, Human adenovirus D
cagccacaugacccugcaugg

SEQ ID NO: 1567434 - RNA, 22 nt, Human adenovirus D
ccugguuagguucuucacccag

SEQ ID NO: 1567435 - RNA, 18 nt, Human adenovirus D
uaugauaaucugcaugau

SEQ ID NO: 1567436 - RNA, 12 nt, Human adenovirus D
ugagcugggagg

SEQ ID NO: 1567437 - RNA, 21 nt, Human adenovirus D
gcuccgguugugcagcccccu

SEQ ID NO: 1567438 - RNA, 20 nt, Human adenovirus D
gcacgucggcguggcgcucg

SEQ ID NO: 1567439 - RNA, 15 nt, Human adenovirus D
gguccccgaggcccu

SEQ ID NO: 1567440 - RNA, 22 nt, Human adenovirus D
cgcuugcuggaugcggagccgc

SEQ ID NO: 1567441 - RNA, 18 nt, Human adenovirus D
gccgcggcagccgcagcc

SEQ ID NO: 1567442 - RNA, 19 nt, Human adenovirus D
guccaacggcaaacagcau

SEQ ID NO: 1567443 - RNA, 14 nt, Human adenovirus D
gugaacgcgcuggc

SEQ ID NO: 1567444 - RNA, 17 nt, Human adenovirus D
ccccaggcggaccagaa

SEQ ID NO: 1567445 - RNA, 16 nt, Human adenovirus D
cacggaccggucccag

SEQ ID NO: 1567446 - RNA, 20 nt, Human adenovirus D
gcaagccucugacggcgcag

SEQ ID NO: 1567447 - RNA, 20 nt, Human adenovirus D
cgcucuuaucccaugcccuc

SEQ ID NO: 1567448 - RNA, 14 nt, Human adenovirus D
gggcucgagcaugg

SEQ ID NO: 1567449 - RNA, 14 nt, Human adenovirus D
gcagacagggccug

SEQ ID NO: 1567450 - RNA, 19 nt, Human adenovirus D
acaaccagauccucugccg

SEQ ID NO: 1567451 - RNA, 19 nt, Human adenovirus D
aggaauaggcacugaaaau

SEQ ID NO: 1567452 - RNA, 15 nt, Human adenovirus D
ugaaagaacauacau

SEQ ID NO: 1567453 - RNA, 18 nt, Human adenovirus D
cucgucgcuugacagcac

SEQ ID NO: 1567454 - RNA, 21 nt, Human adenovirus D
guauccagccuguacccagag

SEQ ID NO: 1567455 - RNA, 22 nt, Human adenovirus D
acauggugggcuaauauaacuu

SEQ ID NO: 1567456 - RNA, 14 nt, Human adenovirus D
ggaagacccggagc

SEQ ID NO: 1567457 - RNA, 15 nt, Human adenovirus D
ccgaguuguccuggu

SEQ ID NO: 1567458 - RNA, 16 nt, Human adenovirus D
caaggccgugagcgcg

SEQ ID NO: 1567459 - RNA, 15 nt, Human adenovirus D
agaauccacagauca

SEQ ID NO: 1567460 - RNA, 22 nt, Human adenovirus D
agcaagccucugacggcgcagc

SEQ ID NO: 1567461 - RNA, 17 nt, Human adenovirus D
cauacagagauucagcc

SEQ ID NO: 1567462 - RNA, 18 nt, Human adenovirus D
uacauggugggcuaauau

SEQ ID NO: 1567463 - RNA, 19 nt, Human adenovirus D
cuucaaccccuucucggga

SEQ ID NO: 1567464 - RNA, 15 nt, Human adenovirus D
gcugcccgccaccug

SEQ ID NO: 1567465 - RNA, 23 nt, Human adenovirus D
gcugagaccagaccaccugguga

SEQ ID NO: 1567466 - RNA, 23 nt, Human adenovirus D
gagcgacacccccgcgugcagcu

SEQ ID NO: 1567467 - RNA, 23 nt, Human adenovirus D
acuucuuuuugauaauaaaggug

SEQ ID NO: 1567468 - RNA, 18 nt, Human adenovirus D
aucgccaggccucuaccc

SEQ ID NO: 1567469 - RNA, 20 nt, Human adenovirus D
gagcaucguaguucaggagc

SEQ ID NO: 1567470 - RNA, 14 nt, Human adenovirus D
ggagggauugcagg

SEQ ID NO: 1567471 - RNA, 12 nt, Human adenovirus D
ugaacuugcuga

SEQ ID NO: 1567472 - RNA, 20 nt, Human adenovirus D
gcgcagcuguuccugguggu

SEQ ID NO: 1567473 - RNA, 17 nt, Human adenovirus D
gaccaggcggcagagcg

SEQ ID NO: 1567474 - RNA, 16 nt, Human adenovirus D
uuccagacgcggcugu

SEQ ID NO: 1567475 - RNA, 14 nt, Human adenovirus D
caugcccgacccca

SEQ ID NO: 1567476 - RNA, 12 nt, Human adenovirus D
acagaaagcaug

SEQ ID NO: 1567477 - RNA, 15 nt, Human adenovirus D
cggcgggggcggaga

SEQ ID NO: 1567478 - RNA, 19 nt, Human adenovirus D
gccacaugacccugcaugg

SEQ ID NO: 1567479 - RNA, 17 nt, Human adenovirus D
caccucggugcagccgu

SEQ ID NO: 1567480 - RNA, 17 nt, Human adenovirus D
cgcccagugcuuccagc

SEQ ID NO: 1567481 - RNA, 23 nt, Human adenovirus D
augcuuggucuuucuggcuugcu

SEQ ID NO: 1567482 - RNA, 18 nt, Human adenovirus D
uccacgccaagacaaagg

SEQ ID NO: 1567483 - RNA, 13 nt, Human adenovirus D
agauccagguccg

SEQ ID NO: 1567484 - RNA, 15 nt, Human adenovirus D
cuacuggucgcugcc

SEQ ID NO: 1567485 - RNA, 12 nt, Human adenovirus D
aaacauccaugu

SEQ ID NO: 1567486 - RNA, 17 nt, Human adenovirus D
cuccggguucuggagac

SEQ ID NO: 1567487 - RNA, 19 nt, Human adenovirus D
ccucccgcccgacacugca

SEQ ID NO: 1567488 - RNA, 13 nt, Human adenovirus D
gggcagggagcug

SEQ ID NO: 1567489 - RNA, 19 nt, Human adenovirus D
ucgcacucgacgagccagg

SEQ ID NO: 1567490 - RNA, 20 nt, Human adenovirus D
uacagccagcagcuccgggu

SEQ ID NO: 1567491 - RNA, 22 nt, Human adenovirus D
cccgagaccugcgcaaggucga

SEQ ID NO: 1567492 - RNA, 15 nt, Human adenovirus D
uggcgcucgggcagg

SEQ ID NO: 1567493 - RNA, 18 nt, Human adenovirus D
caguagacaaagagcaca

SEQ ID NO: 1567494 - RNA, 22 nt, Human adenovirus D
gccgcuccgugcgaggaugaga

SEQ ID NO: 1567495 - RNA, 19 nt, Human adenovirus D
acuggucuccugccuggga

SEQ ID NO: 1567496 - RNA, 15 nt, Human adenovirus D
gacaugggggcggac

SEQ ID NO: 1567497 - RNA, 18 nt, Human adenovirus D
gcaucagucuccuggugc

SEQ ID NO: 1567498 - RNA, 14 nt, Human adenovirus D
ggcggugcugcugc

SEQ ID NO: 1567499 - RNA, 18 nt, Human adenovirus D
uuuccaugcacucaucca

SEQ ID NO: 1567500 - RNA, 20 nt, Human adenovirus D
caccagcgcgaguagucaau

SEQ ID NO: 1567501 - RNA, 16 nt, Human adenovirus D
uucaaggacaugcagc

SEQ ID NO: 1567502 - RNA, 20 nt, Human adenovirus D
cucuccuuucuucucccaca

SEQ ID NO: 1567503 - RNA, 16 nt, Human adenovirus D
caggaugaacaggagc

SEQ ID NO: 1567504 - RNA, 17 nt, Human adenovirus D
cgcuggaccccauggac

SEQ ID NO: 1567505 - RNA, 21 nt, Human adenovirus D
acuggucaaaaacaaagugac

SEQ ID NO: 1567506 - RNA, 15 nt, Human adenovirus D
gcgcgcucacucuua

SEQ ID NO: 1567507 - RNA, 16 nt, Human adenovirus D
cugcaggccgggcugc

SEQ ID NO: 1567508 - RNA, 15 nt, Human adenovirus D
ugaccaagcugguga

SEQ ID NO: 1567509 - RNA, 15 nt, Human adenovirus D
gcacagaccuucagg

SEQ ID NO: 1567510 - RNA, 15 nt, Human adenovirus D
gugagugauaaagcg

SEQ ID NO: 1567511 - RNA, 22 nt, Human adenovirus D
cuucaagaaagucuccaucaug

SEQ ID NO: 1567512 - RNA, 16 nt, Human adenovirus D
uccacgcauugcauga

SEQ ID NO: 1567513 - RNA, 19 nt, Human adenovirus D
ggcggcgauaugccagacg

SEQ ID NO: 1567514 - RNA, 17 nt, Human adenovirus D
uacaaccaaggcaccca

SEQ ID NO: 1567515 - RNA, 12 nt, Human adenovirus D
acguacuucagc

SEQ ID NO: 1567516 - RNA, 18 nt, Human adenovirus D
gcggagccgcucggccau

SEQ ID NO: 1567517 - RNA, 15 nt, Human adenovirus D
cucugcgugaagacc

SEQ ID NO: 1567518 - RNA, 21 nt, Human adenovirus D
acccgauaucgcgcauccugc

SEQ ID NO: 1567519 - RNA, 20 nt, Human adenovirus D
cgccgaggagaacugcuggc

SEQ ID NO: 1567520 - RNA, 21 nt, Human adenovirus D
aggugagggggucccgcuccc

SEQ ID NO: 1567521 - RNA, 16 nt, Human adenovirus D
agcgcgguguuuucac

SEQ ID NO: 1567522 - RNA, 19 nt, Human adenovirus D
cgaggagcugagaccagac

SEQ ID NO: 1567523 - RNA, 16 nt, Human adenovirus D
gcauccacaaggccgu

SEQ ID NO: 1567524 - RNA, 22 nt, Human adenovirus D
agccgucuggacccgcggccgc

SEQ ID NO: 1567525 - RNA, 18 nt, Human adenovirus D
ucucaauaaacagcacuu

SEQ ID NO: 1567526 - RNA, 16 nt, Human adenovirus D
cuaugaaagcauacag

SEQ ID NO: 1567527 - RNA, 14 nt, Human adenovirus D
aggcagacucaggg

SEQ ID NO: 1567528 - RNA, 22 nt, Human adenovirus D
uugaagauucuggaaauuauga

SEQ ID NO: 1567529 - RNA, 16 nt, Human adenovirus D
accuuccugcagcuca

SEQ ID NO: 1567530 - RNA, 13 nt, Human adenovirus D
acucgggcacggc

SEQ ID NO: 1567531 - RNA, 11 nt, Human adenovirus D
ggggcgguggu

SEQ ID NO: 1567532 - RNA, 15 nt, Human adenovirus D
ugcagcauugucugc

SEQ ID NO: 1567533 - RNA, 14 nt, Human adenovirus D
ugcugccgggcugc

SEQ ID NO: 1567534 - RNA, 16 nt, Human adenovirus D
caugagcugcgagaag

SEQ ID NO: 1567535 - RNA, 19 nt, Human adenovirus D
gcucuuaccaaguccaggg

SEQ ID NO: 1567536 - RNA, 12 nt, Human adenovirus D
gcuggggcagaa

SEQ ID NO: 1567537 - RNA, 22 nt, Human adenovirus D
aggagaacugcuggcccugcug

SEQ ID NO: 1567538 - RNA, 20 nt, Human adenovirus D
ggaaaggaauaggcacugaa

SEQ ID NO: 1567539 - RNA, 17 nt, Human adenovirus D
gcgcacccguccuccuc

SEQ ID NO: 1567540 - RNA, 12 nt, Human adenovirus D
agcgccaggagg

SEQ ID NO: 1567541 - RNA, 18 nt, Human adenovirus D
cgucauguccuuccaggg

SEQ ID NO: 1567542 - RNA, 17 nt, Human adenovirus D
gcuccugagcgagaccc

SEQ ID NO: 1567543 - RNA, 15 nt, Human adenovirus D
aaguacacgccggcc

SEQ ID NO: 1567544 - RNA, 21 nt, Human adenovirus D
cgagcccgcgcgggagccagg

SEQ ID NO: 1567545 - RNA, 16 nt, Human adenovirus D
cgagccgaacgagcag

SEQ ID NO: 1567546 - RNA, 14 nt, Human adenovirus D
cacauacacacuag

SEQ ID NO: 1567547 - RNA, 15 nt, Human adenovirus D
ucccaccccagaaag

SEQ ID NO: 1567548 - RNA, 18 nt, Human adenovirus D
cuccugcucccgggcucc

SEQ ID NO: 1567549 - RNA, 15 nt, Human adenovirus D
gcucaccaccccgga

SEQ ID NO: 1567550 - RNA, 13 nt, Human adenovirus D
cggccaccagucc

SEQ ID NO: 1567551 - RNA, 16 nt, Human adenovirus D
gucaucacuggcggag

SEQ ID NO: 1567552 - RNA, 14 nt, Human adenovirus D
cggcgcugcaaagc

SEQ ID NO: 1567553 - RNA, 13 nt, Human adenovirus D
uaugaggaucuag

SEQ ID NO: 1567554 - RNA, 22 nt, Human adenovirus D
ucaggaccauagggagccugcg

SEQ ID NO: 1567555 - RNA, 15 nt, Human adenovirus D
augggaacaaggccu

SEQ ID NO: 1567556 - RNA, 16 nt, Human adenovirus D
cagacagggccugcaa

SEQ ID NO: 1567557 - RNA, 22 nt, Human adenovirus D
cacaccuggaggcaccaucaca

SEQ ID NO: 1567558 - RNA, 17 nt, Human adenovirus D
caacgugcccaucucca

SEQ ID NO: 1567559 - RNA, 14 nt, Human adenovirus D
gacaacgccaggcu

SEQ ID NO: 1567560 - RNA, 18 nt, Human adenovirus D
gucacggucggcgcgcuc

SEQ ID NO: 1567561 - RNA, 14 nt, Human adenovirus D
cugaucugauccuu

SEQ ID NO: 1567562 - RNA, 13 nt, Human adenovirus D
cggccgccaacau

SEQ ID NO: 1567563 - RNA, 16 nt, Human adenovirus D
ccagaccaccugguga

SEQ ID NO: 1567564 - RNA, 18 nt, Human adenovirus D
acgcgcgaagauggccac

SEQ ID NO: 1567565 - RNA, 16 nt, Human adenovirus D
uaaucauuuaauaaag

SEQ ID NO: 1567566 - RNA, 16 nt, Human adenovirus D
gcucgguugaggcacc

SEQ ID NO: 1567567 - RNA, 15 nt, Human adenovirus D
cagccuugcccccaa

SEQ ID NO: 1567568 - RNA, 15 nt, Human adenovirus D
gcgagggccuggacc

SEQ ID NO: 1567569 - RNA, 15 nt, Human adenovirus D
cgggacgcccuggcc

SEQ ID NO: 1567570 - RNA, 15 nt, Human adenovirus D
ucguacgagagcgug

SEQ ID NO: 1567571 - RNA, 20 nt, Human adenovirus D
agcaaguuuaaggcgcgggu

SEQ ID NO: 1567572 - RNA, 18 nt, Human adenovirus D
guagagcuugggcgcaag

SEQ ID NO: 1567573 - RNA, 22 nt, Human adenovirus D
gcagcauugucugccuggucau

SEQ ID NO: 1567574 - RNA, 14 nt, Human adenovirus D
uuaccgccagagaa

SEQ ID NO: 1567575 - RNA, 16 nt, Human adenovirus D
auggcuuguggccccc

SEQ ID NO: 1567576 - RNA, 20 nt, Human adenovirus D
uucucggccaaucagcagua

SEQ ID NO: 1567577 - RNA, 17 nt, Human adenovirus D
cucauuuuuccagccuu

SEQ ID NO: 1567578 - RNA, 12 nt, Human adenovirus D
ugcagcacugga

SEQ ID NO: 1567579 - RNA, 19 nt, Human adenovirus D
cccucgaaucaggcuggag

SEQ ID NO: 1567580 - RNA, 13 nt, Human adenovirus D
gcugguugaacau

SEQ ID NO: 1567581 - RNA, 19 nt, Human adenovirus D
augaaagucaggagcagcg

SEQ ID NO: 1567582 - RNA, 17 nt, Human adenovirus D
ggcgcacgucugacugc

SEQ ID NO: 1567583 - RNA, 16 nt, Human adenovirus D
cgacgaggccgggcua

SEQ ID NO: 1567584 - RNA, 13 nt, Human adenovirus D
gcagcgcacucuc

SEQ ID NO: 1567585 - RNA, 17 nt, Human adenovirus D
acaugcgcauggcgcuc

SEQ ID NO: 1567586 - RNA, 20 nt, Human adenovirus D
cucgaaucaggcuggagccg

SEQ ID NO: 1567587 - RNA, 19 nt, Human adenovirus D
cgggcgccucccaggacua

SEQ ID NO: 1567588 - RNA, 16 nt, Human adenovirus D
ccugcacgcagcagcg

SEQ ID NO: 1567589 - RNA, 15 nt, Human adenovirus D
caucacaggaggcac

SEQ ID NO: 1567590 - RNA, 12 nt, Human adenovirus D
gcuccguggggc

SEQ ID NO: 1567591 - RNA, 20 nt, Human adenovirus D
cuucaacgacuaccucucgg

SEQ ID NO: 1567592 - RNA, 18 nt, Human adenovirus D
ccacacauggcaagcugc

SEQ ID NO: 1567593 - RNA, 15 nt, Human adenovirus D
cucggccaaucagca

SEQ ID NO: 1567594 - RNA, 19 nt, Human adenovirus D
accacggaccggucccagc

SEQ ID NO: 1567595 - RNA, 22 nt, Human adenovirus D
gacacagcaguccaugcccaac

SEQ ID NO: 1567596 - RNA, 13 nt, Human adenovirus D
acagaaccggagg

SEQ ID NO: 1567597 - RNA, 17 nt, Human adenovirus D
caccaggggguccaccu

SEQ ID NO: 1567598 - RNA, 15 nt, Human adenovirus D
agaauauaaagcaga

SEQ ID NO: 1567599 - RNA, 21 nt, Human adenovirus D
acaguccacccagaccgugca

SEQ ID NO: 1567600 - RNA, 14 nt, Human adenovirus D
cacucuuuccagca

SEQ ID NO: 1567601 - RNA, 21 nt, Human adenovirus D
acuuugguacuuacaaagugu

SEQ ID NO: 1567602 - RNA, 16 nt, Human adenovirus D
agcccaaacuggggcg

SEQ ID NO: 1567603 - RNA, 21 nt, Human adenovirus D
agcaucguaguucaggagcgc

SEQ ID NO: 1567604 - RNA, 21 nt, Human adenovirus D
aguccuuuagacaacagccgc

SEQ ID NO: 1567605 - RNA, 20 nt, Human adenovirus D
cuccuucaacgcgcgcugcc

SEQ ID NO: 1567606 - RNA, 15 nt, Human adenovirus D
agucccuuuuccagg

SEQ ID NO: 1567607 - RNA, 18 nt, Human adenovirus D
ggccccgcgggcaggggc

SEQ ID NO: 1567608 - RNA, 20 nt, Human adenovirus D
cugguugacaaauggagcca

SEQ ID NO: 1567609 - RNA, 14 nt, Human adenovirus D
gcaagaggagacag

SEQ ID NO: 1567610 - RNA, 18 nt, Human adenovirus D
cggcggccaaccugguga

SEQ ID NO: 1567611 - RNA, 21 nt, Human adenovirus D
cugcagcccaaacuggggcga

SEQ ID NO: 1567612 - RNA, 16 nt, Human adenovirus D
guggcccugggccuga

SEQ ID NO: 1567613 - RNA, 12 nt, Human adenovirus D
ugaggcagacgc

SEQ ID NO: 1567614 - RNA, 20 nt, Human adenovirus D
ccugccugggaauccugcac

SEQ ID NO: 1567615 - RNA, 17 nt, Human adenovirus D
acgauccugcaggugga

SEQ ID NO: 1567616 - RNA, 19 nt, Human adenovirus D
ugcuaccucuugcagcugg

SEQ ID NO: 1567617 - RNA, 19 nt, Human adenovirus D
ccaaggcacccaccacagu

SEQ ID NO: 1567618 - RNA, 22 nt, Human adenovirus D
auguaaguuuuauggcugcugg

SEQ ID NO: 1567619 - RNA, 16 nt, Human adenovirus D
accagacccaggcgcg

SEQ ID NO: 1567620 - RNA, 24 nt, Human adenovirus D
cgaccaguugacggucugcaggcc

SEQ ID NO: 1567621 - RNA, 15 nt, Human adenovirus D
gcaagcgcccagagc

SEQ ID NO: 1567622 - RNA, 16 nt, Human adenovirus D
ccgaggaggcgguccc

SEQ ID NO: 1567623 - RNA, 22 nt, Human adenovirus D
gccaccacccacaccgccuccc

SEQ ID NO: 1567624 - RNA, 17 nt, Human adenovirus D
cacagccacagacagag

SEQ ID NO: 1567625 - RNA, 19 nt, Human adenovirus D
aguacgacaugcccgaccc

SEQ ID NO: 1567626 - RNA, 24 nt, Human adenovirus D
ccgugugauuaaaaagcagcacag

SEQ ID NO: 1567627 - RNA, 16 nt, Human adenovirus D
uaagugugacaaucaa

SEQ ID NO: 1567628 - RNA, 17 nt, Human adenovirus D
ggccgcgauguugagcu

SEQ ID NO: 1567629 - RNA, 14 nt, Human adenovirus D
uacaugcccagcag

SEQ ID NO: 1567630 - RNA, 15 nt, Human adenovirus D
gccagcgcgugcugc

SEQ ID NO: 1567631 - RNA, 16 nt, Human adenovirus D
uaauuaagguuacuuu

SEQ ID NO: 1567632 - RNA, 14 nt, Human adenovirus D
ugccuucuccaggg

SEQ ID NO: 1567633 - RNA, 22 nt, Human adenovirus D
cgcagacgagcggccgccgccg

SEQ ID NO: 1567634 - RNA, 20 nt, Human adenovirus D
agcucguguccaacggcaaa

SEQ ID NO: 1567635 - RNA, 17 nt, Human adenovirus D
ccacuuccgcgcuccgu

SEQ ID NO: 1567636 - RNA, 10 nt, Human adenovirus D
aacagcagca

SEQ ID NO: 1567637 - RNA, 17 nt, Human adenovirus D
gaaccgccuggggcaga

SEQ ID NO: 1567638 - RNA, 12 nt, Human adenovirus D
auacaagccagg

SEQ ID NO: 1567639 - RNA, 17 nt, Human adenovirus D
caucgcgaaccaggcag

SEQ ID NO: 1567640 - RNA, 18 nt, Human adenovirus D
guggagggcaugggucag

SEQ ID NO: 1567641 - RNA, 20 nt, Human adenovirus D
gcgcauccccuucuccagca

SEQ ID NO: 1567642 - RNA, 22 nt, Human adenovirus D
ccacgcgcaucaucgcgccacu

SEQ ID NO: 1567643 - RNA, 16 nt, Human adenovirus D
ugaguagugggcgugg

SEQ ID NO: 1567644 - RNA, 15 nt, Human adenovirus D
auaagucacuaggac

SEQ ID NO: 1567645 - RNA, 13 nt, Human adenovirus D
cgacccccuucca

SEQ ID NO: 1567646 - RNA, 21 nt, Human adenovirus D
gcacagacaccgucgccgcac

SEQ ID NO: 1567647 - RNA, 13 nt, Human adenovirus D
ugcuuccacacuu

SEQ ID NO: 1567648 - RNA, 18 nt, Human adenovirus D
gugcaguuggccaugagc

SEQ ID NO: 1567649 - RNA, 17 nt, Human adenovirus D
uugcgucccuggcuccg

SEQ ID NO: 1567650 - RNA, 20 nt, Human adenovirus D
ggccgugagcgcgagccggc

SEQ ID NO: 1567651 - RNA, 21 nt, Human adenovirus D
ccugagauacgaugagaccaa

SEQ ID NO: 1567652 - RNA, 18 nt, Human adenovirus D
agcuucgaguacgaggcc

SEQ ID NO: 1567653 - RNA, 18 nt, Human adenovirus D
aucuccaacguggagcug

SEQ ID NO: 1567654 - RNA, 17 nt, Human adenovirus D
ggaugcgugagggcgga

SEQ ID NO: 1567655 - RNA, 23 nt, Human adenovirus D
ugggaccggugcucugcgcgcgc

SEQ ID NO: 1567656 - RNA, 16 nt, Human adenovirus D
gcagcaguagccccuc

SEQ ID NO: 1567657 - RNA, 23 nt, Human adenovirus D
ccgccugcgcauccccguuccga

SEQ ID NO: 1567658 - RNA, 18 nt, Human adenovirus D
cuccaccgaaggcagcuc

SEQ ID NO: 1567659 - RNA, 20 nt, Human adenovirus D
agcgcccauuccuggagaug

SEQ ID NO: 1567660 - RNA, 17 nt, Human adenovirus D
ccuggagacgggcugcu

SEQ ID NO: 1567661 - RNA, 17 nt, Human adenovirus D
cuaaugacaaacaaaag

SEQ ID NO: 1567662 - RNA, 19 nt, Human adenovirus D
ugaagcccugcuauggcuc

SEQ ID NO: 1567663 - RNA, 19 nt, Human adenovirus D
cgaggugcagaccgacccc

SEQ ID NO: 1567664 - RNA, 21 nt, Human adenovirus D
ggcugcuagagugccacugcc

SEQ ID NO: 1567665 - RNA, 22 nt, Human adenovirus D
uccgcccgcgcccaccaucacc

SEQ ID NO: 1567666 - RNA, 13 nt, Human adenovirus D
agguacaugggca

SEQ ID NO: 1567667 - RNA, 13 nt, Human adenovirus D
gccucuccaucag

SEQ ID NO: 1567668 - RNA, 19 nt, Human adenovirus D
gucguacuucugccagcag

SEQ ID NO: 1567669 - RNA, 15 nt, Human adenovirus D
augcgacccaugagc

SEQ ID NO: 1567670 - RNA, 20 nt, Human adenovirus D
cgcgagcaagggcgaccagc

SEQ ID NO: 1567671 - RNA, 17 nt, Human adenovirus D
cgaucugggaugcugcc

SEQ ID NO: 1567672 - RNA, 20 nt, Human adenovirus D
ccgaggagcugagaccagac

SEQ ID NO: 1567673 - RNA, 21 nt, Human adenovirus D
cuugcugaccaauagacagca

SEQ ID NO: 1567674 - RNA, 23 nt, Human adenovirus D
gaguccuuuagacaacagccgca

SEQ ID NO: 1567675 - RNA, 15 nt, Human adenovirus D
cgauagccgccagga

SEQ ID NO: 1567676 - RNA, 23 nt, Human adenovirus D
gccgaaauuggugcgcuggggcu

SEQ ID NO: 1567677 - RNA, 15 nt, Human adenovirus D
ggugucuuccucucc

SEQ ID NO: 1567678 - RNA, 18 nt, Human adenovirus D
acauggcaagcugccaug

SEQ ID NO: 1567679 - RNA, 13 nt, Human adenovirus D
auacaagccagga

SEQ ID NO: 1567680 - RNA, 18 nt, Human adenovirus D
gacucgcagacgagcggc

SEQ ID NO: 1567681 - RNA, 20 nt, Human adenovirus D
cuuccacgugcccgagggcu

SEQ ID NO: 1567682 - RNA, 16 nt, Human adenovirus D
cugggcauucgcaaga

SEQ ID NO: 1567683 - RNA, 20 nt, Human adenovirus D
cuuagcucccuauuuaaagg

SEQ ID NO: 1567684 - RNA, 15 nt, Human adenovirus D
gcaguuggccaugag

SEQ ID NO: 1567685 - RNA, 16 nt, Human adenovirus D
cucggugcuuagccug

SEQ ID NO: 1567686 - RNA, 23 nt, Human adenovirus D
cgaugcuauugagagagaggaag

SEQ ID NO: 1567687 - RNA, 16 nt, Human adenovirus D
aauuggugcgcugggg

SEQ ID NO: 1567688 - RNA, 15 nt, Human adenovirus D
gguccacgcuggugg

SEQ ID NO: 1567689 - RNA, 12 nt, Human adenovirus D
gaggugagcucu

SEQ ID NO: 1567690 - RNA, 20 nt, Human adenovirus D
cacugccgccgccugcgcug

SEQ ID NO: 1567691 - RNA, 13 nt, Human adenovirus D
agcggccgcggcc

SEQ ID NO: 1567692 - RNA, 15 nt, Human adenovirus D
gcccgugggcugcgg

SEQ ID NO: 1567693 - RNA, 14 nt, Human adenovirus D
ccgucuacugcauc

SEQ ID NO: 1567694 - RNA, 15 nt, Human adenovirus D
acacuacuaauucuc

SEQ ID NO: 1567695 - RNA, 16 nt, Human adenovirus D
ggcagggugagccggc

SEQ ID NO: 1567696 - RNA, 15 nt, Human adenovirus D
gagggcguuggagag

SEQ ID NO: 1567697 - RNA, 19 nt, Human adenovirus D
cuagcaugaccagacccag

SEQ ID NO: 1567698 - RNA, 18 nt, Human adenovirus D
ucaggcgcaaccaggagg

SEQ ID NO: 1567699 - RNA, 21 nt, Human adenovirus D
cgagggcaaugcuagagugag

SEQ ID NO: 1567700 - RNA, 12 nt, Human adenovirus D
ccgccaccugca

SEQ ID NO: 1567701 - RNA, 19 nt, Human adenovirus D
agcucgucuuccaggagcc

SEQ ID NO: 1567702 - RNA, 20 nt, Human adenovirus D
cccgccaaaaaaacacacac

SEQ ID NO: 1567703 - RNA, 20 nt, Human adenovirus D
gcguccccgcccgccgccag

SEQ ID NO: 1567704 - RNA, 12 nt, Human adenovirus D
cgcgccgcggcg

SEQ ID NO: 1567705 - RNA, 22 nt, Human adenovirus D
gcgggccucacaguccagguca

SEQ ID NO: 1567706 - RNA, 20 nt, Human adenovirus D
gguggacuucacagagagcc

SEQ ID NO: 1567707 - RNA, 22 nt, Human adenovirus D
ccagcgaaagagagcucgcguc

SEQ ID NO: 1567708 - RNA, 21 nt, Human adenovirus D
ggggaucaccaguuugggcac

SEQ ID NO: 1567709 - RNA, 15 nt, Human adenovirus D
aucaugguguggaag

SEQ ID NO: 1567710 - RNA, 16 nt, Human adenovirus D
cggaccccgccauaag

SEQ ID NO: 1567711 - RNA, 15 nt, Human adenovirus D
cgcaucauggcccug

SEQ ID NO: 1567712 - RNA, 19 nt, Human adenovirus D
ccacagcucgcgguugagg

SEQ ID NO: 1567713 - RNA, 15 nt, Human adenovirus D
cgagggccugggcuc

SEQ ID NO: 1567714 - RNA, 16 nt, Human adenovirus D
gcaguuggccaugagc

SEQ ID NO: 1567715 - RNA, 16 nt, Human adenovirus D
aggcauauaaaaaugc

SEQ ID NO: 1567716 - RNA, 16 nt, Human adenovirus D
gagccaggugagcucg

SEQ ID NO: 1567717 - RNA, 18 nt, Human adenovirus D
ccccaagggcgcucccaa

SEQ ID NO: 1567718 - RNA, 19 nt, Human adenovirus D
ugacacaccuggaggcacc

SEQ ID NO: 1567719 - RNA, 21 nt, Human adenovirus D
cccagcaauaacaccggcugg

SEQ ID NO: 1567720 - RNA, 15 nt, Human adenovirus D
cuguaccgcagcugg

SEQ ID NO: 1567721 - RNA, 14 nt, Human adenovirus D
ccaccuacuccucu

SEQ ID NO: 1567722 - RNA, 18 nt, Human adenovirus D
auuaauguuaaugucacu

SEQ ID NO: 1567723 - RNA, 16 nt, Human adenovirus D
gcccgagcucugcugc

SEQ ID NO: 1567724 - RNA, 14 nt, Human adenovirus D
cuucugccagcaga

SEQ ID NO: 1567725 - RNA, 21 nt, Human adenovirus D
auauccaguaggaaccagcac

SEQ ID NO: 1567726 - RNA, 16 nt, Human adenovirus D
gaacgggggcagcaca

SEQ ID NO: 1567727 - RNA, 13 nt, Human adenovirus D
gacagcguggugg

SEQ ID NO: 1567728 - RNA, 19 nt, Human adenovirus D
ccaggagccugaugagcuc

SEQ ID NO: 1567729 - RNA, 16 nt, Human adenovirus D
cuuguagggacagcag

SEQ ID NO: 1567730 - RNA, 23 nt, Human adenovirus D
ccagugcaacuuuagccagacca

SEQ ID NO: 1567731 - RNA, 14 nt, Human adenovirus D
ccgccggcucaagc

SEQ ID NO: 1567732 - RNA, 19 nt, Human adenovirus D
ccagcguaagcgcgcggcu

SEQ ID NO: 1567733 - RNA, 22 nt, Human adenovirus D
cgggccaugagggucuggagcu

SEQ ID NO: 1567734 - RNA, 14 nt, Human adenovirus D
cauaucccagggga

SEQ ID NO: 1567735 - RNA, 22 nt, Human adenovirus D
augaccuucgagguggacccca

SEQ ID NO: 1567736 - RNA, 18 nt, Human adenovirus D
cgccccgaggacacccgg

SEQ ID NO: 1567737 - RNA, 17 nt, Human adenovirus D
auacaaagcugaaagcu

SEQ ID NO: 1567738 - RNA, 19 nt, Human adenovirus D
agucugagggccacccuga

SEQ ID NO: 1567739 - RNA, 14 nt, Human adenovirus D
cggggaggagcccg

SEQ ID NO: 1567740 - RNA, 16 nt, Human adenovirus D
ggaaggcuacaacgug

SEQ ID NO: 1567741 - RNA, 20 nt, Human adenovirus D
gagggcgaagggcuggcgag

SEQ ID NO: 1567742 - RNA, 17 nt, Human adenovirus D
agggcgaccagcucugg

SEQ ID NO: 1567743 - RNA, 23 nt, Human adenovirus D
accugccuccaccacccacgccc

SEQ ID NO: 1567744 - RNA, 20 nt, Human adenovirus D
cggucgcgguggggcgguga

SEQ ID NO: 1567745 - RNA, 16 nt, Human adenovirus D
uacccgaccaugcaga

SEQ ID NO: 1567746 - RNA, 14 nt, Human adenovirus D
cgaugggcccgugg

SEQ ID NO: 1567747 - RNA, 20 nt, Human adenovirus D
cacaggugcugcccacccuc

SEQ ID NO: 1567748 - RNA, 16 nt, Human adenovirus D
cagcgaaagagagcuc

SEQ ID NO: 1567749 - RNA, 17 nt, Human adenovirus D
uccagcgaaagagagcu

SEQ ID NO: 1567750 - RNA, 19 nt, Human adenovirus D
aggagcugaucucgcugcc

SEQ ID NO: 1567751 - RNA, 14 nt, Human adenovirus D
cuccgcgaacagca

SEQ ID NO: 1567752 - RNA, 19 nt, Human adenovirus D
cagagagauggcucucacu

SEQ ID NO: 1567753 - RNA, 19 nt, Human adenovirus D
cggcgggccaugcgcaggc

SEQ ID NO: 1567754 - RNA, 19 nt, Human adenovirus D
caccugcagcgccaguccc

SEQ ID NO: 1567755 - RNA, 18 nt, Human adenovirus D
gagcucgaaugcaugcga

SEQ ID NO: 1567756 - RNA, 12 nt, Human adenovirus D
ucgcugcugccg

SEQ ID NO: 1567757 - RNA, 17 nt, Human adenovirus D
caggugcugccccaggc

SEQ ID NO: 1567758 - RNA, 21 nt, Human adenovirus D
cccagccagcaaacgccgccg

SEQ ID NO: 1567759 - RNA, 15 nt, Human adenovirus D
agcgcguaggccgcu

SEQ ID NO: 1567760 - RNA, 15 nt, Human adenovirus D
guuacuguaaagcca

SEQ ID NO: 1567761 - RNA, 20 nt, Human adenovirus D
cuagagugaggcacugcucu

SEQ ID NO: 1567762 - RNA, 18 nt, Human adenovirus D
uggacccgcggccgccca

SEQ ID NO: 1567763 - RNA, 21 nt, Human adenovirus D
uggcgagaggcgagcagcugu

SEQ ID NO: 1567764 - RNA, 23 nt, Human adenovirus D
ggccuacgagcucaaccucuucu

SEQ ID NO: 1567765 - RNA, 21 nt, Human adenovirus D
gacagcgacgagacuggccuc

SEQ ID NO: 1567766 - RNA, 22 nt, Human adenovirus D
ggcggaccugcauuggcagccg

SEQ ID NO: 1567767 - RNA, 21 nt, Human adenovirus D
ugcagaccgcgggccuccucg

SEQ ID NO: 1567768 - RNA, 13 nt, Human adenovirus D
cgcggacggccgc

SEQ ID NO: 1567769 - RNA, 22 nt, Human adenovirus D
agggaugaguugggccugaugc

SEQ ID NO: 1567770 - RNA, 17 nt, Human adenovirus D
ucguagaggcgggugag

SEQ ID NO: 1567771 - RNA, 15 nt, Human adenovirus D
augggacagccagca

SEQ ID NO: 1567772 - RNA, 12 nt, Human adenovirus D
cgagcacagcac

SEQ ID NO: 1567773 - RNA, 18 nt, Human adenovirus D
gacgagaccagaggcaga

SEQ ID NO: 1567774 - RNA, 14 nt, Human adenovirus D
gaggcgggugaggg

SEQ ID NO: 1567775 - RNA, 18 nt, Human adenovirus D
caccugggcacuggagca

SEQ ID NO: 1567776 - RNA, 13 nt, Human adenovirus D
cacugccgccgcc

SEQ ID NO: 1567777 - RNA, 14 nt, Human adenovirus D
gccggcggcgagga

SEQ ID NO: 1567778 - RNA, 22 nt, Human adenovirus D
ugcugcuacaucucggggaacg

SEQ ID NO: 1567779 - RNA, 23 nt, Human adenovirus D
cuccccuuacuuucgcucccacc

SEQ ID NO: 1567780 - RNA, 18 nt, Human adenovirus D
uguacaacgcccugcugg

SEQ ID NO: 1567781 - RNA, 18 nt, Human adenovirus D
gucugcaggccgggcugc

SEQ ID NO: 1567782 - RNA, 13 nt, Human adenovirus D
cgcggcgacagcg

SEQ ID NO: 1567783 - RNA, 16 nt, Human adenovirus D
gguugagcgggcucuu

SEQ ID NO: 1567784 - RNA, 13 nt, Human adenovirus D
gccgcagcucuuc

SEQ ID NO: 1567785 - RNA, 13 nt, Human adenovirus D
cacacagcucaac

SEQ ID NO: 1567786 - RNA, 22 nt, Human adenovirus D
ccccgcgggcaggggcggcaga

SEQ ID NO: 1567787 - RNA, 14 nt, Human adenovirus D
ccucggucagcugg

SEQ ID NO: 1567788 - RNA, 15 nt, Human adenovirus D
cacgguggugcagaa

SEQ ID NO: 1567789 - RNA, 14 nt, Human adenovirus D
gggcaggggcggca

SEQ ID NO: 1567790 - RNA, 14 nt, Human adenovirus D
cgcuggccagcacg

SEQ ID NO: 1567791 - RNA, 15 nt, Human adenovirus D
gacaacgccaggcug

SEQ ID NO: 1567792 - RNA, 16 nt, Human adenovirus D
caccaacgaccagucc

SEQ ID NO: 1567793 - RNA, 15 nt, Human adenovirus D
aaccugcgcgggcug

SEQ ID NO: 1567794 - RNA, 17 nt, Human adenovirus D
caaaagugcuggagggu

SEQ ID NO: 1567795 - RNA, 16 nt, Human adenovirus D
cuuggcgauggaucuc

SEQ ID NO: 1567796 - RNA, 15 nt, Human adenovirus D
agggaacugaaagaa

SEQ ID NO: 1567797 - RNA, 22 nt, Human adenovirus D
guuccagauguugcgcagcggc

SEQ ID NO: 1567798 - RNA, 21 nt, Human adenovirus D
gcaagauuuacaagacgccgu

SEQ ID NO: 1567799 - RNA, 16 nt, Human adenovirus D
cgaggcguucagggag

SEQ ID NO: 1567800 - RNA, 15 nt, Human adenovirus D
gucccuuuuccagga

SEQ ID NO: 1567801 - RNA, 17 nt, Human adenovirus D
agcauacaugcccucuc

SEQ ID NO: 1567802 - RNA, 14 nt, Human adenovirus D
acgcccugcuggag

SEQ ID NO: 1567803 - RNA, 16 nt, Human adenovirus D
cuuugcggcaguuucg

SEQ ID NO: 1567804 - RNA, 12 nt, Human adenovirus D
caggaccugggc

SEQ ID NO: 1567805 - RNA, 15 nt, Human adenovirus D
cccuugaccugccuc

SEQ ID NO: 1567806 - RNA, 12 nt, Human adenovirus D
gacagccagcag

SEQ ID NO: 1567807 - RNA, 16 nt, Human adenovirus D
gccucccaggaggcga

SEQ ID NO: 1567808 - RNA, 17 nt, Human adenovirus D
cggucugcaggccgggc

SEQ ID NO: 1567809 - RNA, 17 nt, Human adenovirus D
acacgguucucucagca

SEQ ID NO: 1567810 - RNA, 19 nt, Human adenovirus D
aggcaccaucacaggaggc

SEQ ID NO: 1567811 - RNA, 21 nt, Human adenovirus D
gccguccuuucgcugcugccg

SEQ ID NO: 1567812 - RNA, 17 nt, Human adenovirus D
uacaaggacuacaaggc

SEQ ID NO: 1567813 - RNA, 15 nt, Human adenovirus D
cuucgagcaguggcu

SEQ ID NO: 1567814 - RNA, 16 nt, Human adenovirus D
cuuaguucagcugcaa

SEQ ID NO: 1567815 - RNA, 13 nt, Human adenovirus D
uucacgcccggcg

SEQ ID NO: 1567816 - RNA, 14 nt, Human adenovirus D
uacacucgcagugc

SEQ ID NO: 1567817 - RNA, 14 nt, Human adenovirus D
ggggaggagcccga

SEQ ID NO: 1567818 - RNA, 14 nt, Human adenovirus D
auggcgaugggccc

SEQ ID NO: 1567819 - RNA, 18 nt, Human adenovirus D
agagucugaaaaacagaa

SEQ ID NO: 1567820 - RNA, 15 nt, Human adenovirus D
agccagaccaagcug

SEQ ID NO: 1567821 - RNA, 18 nt, Human adenovirus D
ggcccaaugcaacaugac

SEQ ID NO: 1567822 - RNA, 17 nt, Human adenovirus D
gcggaguccagcgagug

SEQ ID NO: 1567823 - RNA, 19 nt, Human adenovirus D
ccugaugaacaacgccauc

SEQ ID NO: 1567824 - RNA, 22 nt, Human adenovirus D
ccacccuugaccugccuccacc

SEQ ID NO: 1567825 - RNA, 19 nt, Human adenovirus D
accccuggcucccagccuc

SEQ ID NO: 1567826 - RNA, 19 nt, Human adenovirus D
uuuagguguugcaugaugg

SEQ ID NO: 1567827 - RNA, 24 nt, Human adenovirus D
ucgcacucgacgagccaggugagc

SEQ ID NO: 1567828 - RNA, 18 nt, Human adenovirus D
ggacgacugggaggcugc

SEQ ID NO: 1567829 - RNA, 15 nt, Human adenovirus D
aaccggaggcuggcu

SEQ ID NO: 1567830 - RNA, 20 nt, Human adenovirus D
ccuggugguacagcacagca

SEQ ID NO: 1567831 - RNA, 20 nt, Human adenovirus D
gugcaguuggccaugagcga

SEQ ID NO: 1567832 - RNA, 13 nt, Human adenovirus D
uggcaagcugcca

SEQ ID NO: 1567833 - RNA, 13 nt, Human adenovirus D
cugaaaaacagaa

SEQ ID NO: 1567834 - RNA, 17 nt, Human adenovirus D
agaaccggaggcuggcu

SEQ ID NO: 1567835 - RNA, 19 nt, Human adenovirus D
uggcaagagucugaagccu

SEQ ID NO: 1567836 - RNA, 15 nt, Human adenovirus D
cgcgacccccaggcc

SEQ ID NO: 1567837 - RNA, 17 nt, Human adenovirus D
cgugcgcgugcccgugc

SEQ ID NO: 1567838 - RNA, 13 nt, Human adenovirus D
accggaggcuggc

SEQ ID NO: 1567839 - RNA, 17 nt, Human adenovirus D
accaaguccaggguagc

SEQ ID NO: 1567840 - RNA, 20 nt, Human adenovirus D
acaacuacacagucaacugu

SEQ ID NO: 1567841 - RNA, 18 nt, Human adenovirus D
gcgggaucaucgccugcu

SEQ ID NO: 1567842 - RNA, 20 nt, Human adenovirus D
agcccgugaccugcagcagg

SEQ ID NO: 1567843 - RNA, 15 nt, Human adenovirus D
ccgccgccugcgcug

SEQ ID NO: 1567844 - RNA, 18 nt, Human adenovirus D
ucacccggacguggugcu

SEQ ID NO: 1567845 - RNA, 15 nt, Human adenovirus D
gcgagaaggcgcgcg

SEQ ID NO: 1567846 - RNA, 16 nt, Human adenovirus D
cuacuuuuugggcacc

SEQ ID NO: 1567847 - RNA, 22 nt, Human adenovirus D
gaaucucggccaccagucccuu

SEQ ID NO: 1567848 - RNA, 18 nt, Human adenovirus D
auccaguuaaugcugccu

SEQ ID NO: 1567849 - RNA, 15 nt, Human adenovirus D
cuagcgcccugguag

SEQ ID NO: 1567850 - RNA, 15 nt, Human adenovirus D
cuccucguagagaaa

SEQ ID NO: 1567851 - RNA, 18 nt, Human adenovirus D
cagcgucaaccucuacgc

SEQ ID NO: 1567852 - RNA, 17 nt, Human adenovirus D
cuggagacacugguuug

SEQ ID NO: 1567853 - RNA, 17 nt, Human adenovirus D
ugcuugagaugcagaug

SEQ ID NO: 1567854 - RNA, 20 nt, Human adenovirus D
cgaccgcauccacaaggccg

SEQ ID NO: 1567855 - RNA, 23 nt, Human adenovirus D
uggucaucaccuuccugcagcuc

SEQ ID NO: 1567856 - RNA, 17 nt, Human adenovirus D
uggcucccagccuccac

SEQ ID NO: 1567857 - RNA, 19 nt, Human adenovirus D
auggagcuuaucuugguua

SEQ ID NO: 1567858 - RNA, 15 nt, Human adenovirus D
ccgcgucgcugucca

SEQ ID NO: 1567859 - RNA, 16 nt, Human adenovirus D
cugcacgaccucggag

SEQ ID NO: 1567860 - RNA, 13 nt, Human adenovirus D
aaacaggcaaaga

SEQ ID NO: 1567861 - RNA, 21 nt, Human adenovirus D
gcuucgaguacgaggccaugc

SEQ ID NO: 1567862 - RNA, 14 nt, Human adenovirus D
cgcucguucugccc

SEQ ID NO: 1567863 - RNA, 21 nt, Human adenovirus D
ggcggacugccaccgccgccg

SEQ ID NO: 1567864 - RNA, 22 nt, Human adenovirus D
aacugcuggcccugcuggccga

SEQ ID NO: 1567865 - RNA, 22 nt, Human adenovirus D
ccaguagacaaagagcacagca

SEQ ID NO: 1567866 - RNA, 17 nt, Human adenovirus D
ccgcggccguagcaggc

SEQ ID NO: 1567867 - RNA, 15 nt, Human adenovirus D
cagggaggcgcugcu

SEQ ID NO: 1567868 - RNA, 17 nt, Human adenovirus D
ggccgagaccgugagcu

SEQ ID NO: 1567869 - RNA, 22 nt, Human adenovirus D
agcucgucuuccaggagccuga

SEQ ID NO: 1567870 - RNA, 11 nt, Human adenovirus D
accgccacccg

SEQ ID NO: 1567871 - RNA, 21 nt, Human adenovirus D
ggagccaggggaugaacagug

SEQ ID NO: 1567872 - RNA, 13 nt, Human adenovirus D
gaggccaugcugc

SEQ ID NO: 1567873 - RNA, 14 nt, Human adenovirus D
gcacccaccacagu

SEQ ID NO: 1567874 - RNA, 16 nt, Human adenovirus D
aagaauccacagauca

SEQ ID NO: 1567875 - RNA, 14 nt, Human adenovirus D
accagaaagacuaa

SEQ ID NO: 1567876 - RNA, 15 nt, Human adenovirus D
ggcuccucucgugcu

SEQ ID NO: 1567877 - RNA, 14 nt, Human adenovirus D
ggaagauggaggag

SEQ ID NO: 1567878 - RNA, 17 nt, Human adenovirus D
ggcguucagggaggcgc

SEQ ID NO: 1567879 - RNA, 19 nt, Human adenovirus D
auguccaccugcggggcga

SEQ ID NO: 1567880 - RNA, 23 nt, Human adenovirus D
caaauuguugguguaaauccacu

SEQ ID NO: 1567881 - RNA, 19 nt, Human adenovirus D
cuccugccgcgccaaccgc

SEQ ID NO: 1567882 - RNA, 11 nt, Human adenovirus D
acgcuggccag

SEQ ID NO: 1567883 - RNA, 16 nt, Human adenovirus D
cauuucagaaccauga

SEQ ID NO: 1567884 - RNA, 22 nt, Human adenovirus D
gaccugcgcgucgacggcgccu

SEQ ID NO: 1567885 - RNA, 19 nt, Human adenovirus D
gccucaaugucagcugcaa

SEQ ID NO: 1567886 - RNA, 17 nt, Human adenovirus D
gcgcucgcgcaccugcu

SEQ ID NO: 1567887 - RNA, 15 nt, Human adenovirus D
agaaggugcuggcga

SEQ ID NO: 1567888 - RNA, 19 nt, Human adenovirus D
gucacauccaucuccacca

SEQ ID NO: 1567889 - RNA, 21 nt, Human adenovirus D
ccacugcauggccucgugcuc

SEQ ID NO: 1567890 - RNA, 20 nt, Human adenovirus D
acgcugagcgacgaccuggg

SEQ ID NO: 1567891 - RNA, 16 nt, Human adenovirus D
cggccaaccuggugac

SEQ ID NO: 1567892 - RNA, 17 nt, Human adenovirus D
cugacgagcccgcgcgg

SEQ ID NO: 1567893 - RNA, 21 nt, Human adenovirus D
ucugauuagcauagucacacu

SEQ ID NO: 1567894 - RNA, 14 nt, Human adenovirus D
ugaauggcacuggc

SEQ ID NO: 1567895 - RNA, 20 nt, Human adenovirus D
acacgcuguaccgcagcugg

SEQ ID NO: 1567896 - RNA, 18 nt, Human adenovirus D
cuucagccugggcaacaa

SEQ ID NO: 1567897 - RNA, 18 nt, Human adenovirus D
cuuuuuagcccuuauuug

SEQ ID NO: 1567898 - RNA, 20 nt, Human adenovirus D
agguaauucucauuuuucca

SEQ ID NO: 1567899 - RNA, 18 nt, Human adenovirus D
gcccagaacuggcagagc

SEQ ID NO: 1567900 - RNA, 15 nt, Human adenovirus D
acaaguuuaggaacc

SEQ ID NO: 1567901 - RNA, 15 nt, Human adenovirus D
uguugcauccuucca

SEQ ID NO: 1567902 - RNA, 20 nt, Human adenovirus D
uccaucagcgcccucagcag

SEQ ID NO: 1567903 - RNA, 23 nt, Human adenovirus D
ugcgccgcgcuggggagggccac

SEQ ID NO: 1567904 - RNA, 17 nt, Human adenovirus D
aaaccacauuugaagau

SEQ ID NO: 1567905 - RNA, 14 nt, Human adenovirus D
cacaaucacggcau

SEQ ID NO: 1567906 - RNA, 16 nt, Human adenovirus D
uccgcggccacuuccg

SEQ ID NO: 1567907 - RNA, 20 nt, Human adenovirus D
acagcucgcgguugagggcg

SEQ ID NO: 1567908 - RNA, 18 nt, Human adenovirus D
gccugaugcaccuguggg

SEQ ID NO: 1567909 - RNA, 20 nt, Human adenovirus D
gucgcuugacagcaccgccg

SEQ ID NO: 1567910 - RNA, 17 nt, Human adenovirus D
ccaucuaaacuaaagcc

SEQ ID NO: 1567911 - RNA, 16 nt, Human adenovirus D
cuacagccagcagcuc

SEQ ID NO: 1567912 - RNA, 14 nt, Human adenovirus D
cgagaccagaggca

SEQ ID NO: 1567913 - RNA, 21 nt, Human adenovirus D
guaagcacgagcggcagggcu

SEQ ID NO: 1567914 - RNA, 19 nt, Human adenovirus D
gacuaccugcaucgcgcgg

SEQ ID NO: 1567915 - RNA, 22 nt, Human adenovirus D
cugaagcccgugaccugcagca

SEQ ID NO: 1567916 - RNA, 23 nt, Human adenovirus D
gucgccacggucaccgagccucc

SEQ ID NO: 1567917 - RNA, 15 nt, Human adenovirus D
ugccgcgcgggcagg

SEQ ID NO: 1567918 - RNA, 20 nt, Human adenovirus D
cugcaacccccagcuccuga

SEQ ID NO: 1567919 - RNA, 11 nt, Human adenovirus D
caaauuacuuu

SEQ ID NO: 1567920 - RNA, 15 nt, Human adenovirus D
acucaccaaggccau

SEQ ID NO: 1567921 - RNA, 16 nt, Human adenovirus D
gcuaccuugcacccac

SEQ ID NO: 1567922 - RNA, 20 nt, Human adenovirus D
gcuguggagccacugcuacc

SEQ ID NO: 1567923 - RNA, 15 nt, Human adenovirus D
cugccggugcacucc

SEQ ID NO: 1567924 - RNA, 20 nt, Human adenovirus D
gcugauuacucuaaaugcaa

SEQ ID NO: 1567925 - RNA, 22 nt, Human adenovirus D
auggccuguaccgggaccgagu

SEQ ID NO: 1567926 - RNA, 15 nt, Human adenovirus D
cgcucccaccgcgcc

SEQ ID NO: 1567927 - RNA, 16 nt, Human adenovirus D
accgccgugcgccgcg

SEQ ID NO: 1567928 - RNA, 14 nt, Human adenovirus D
cuugcugggcgagg

SEQ ID NO: 1567929 - RNA, 12 nt, Human adenovirus D
uacucccgcccc

SEQ ID NO: 1567930 - RNA, 20 nt, Human adenovirus D
cagccuuggauuaucucuac

SEQ ID NO: 1567931 - RNA, 14 nt, Human adenovirus D
ugcugccccaggcg

SEQ ID NO: 1567932 - RNA, 20 nt, Human adenovirus D
ccucguuucggggguuggga

SEQ ID NO: 1567933 - RNA, 22 nt, Human adenovirus D
cacgccggcuuguagaggauag

SEQ ID NO: 1567934 - RNA, 13 nt, Human adenovirus D
augcugaucaagu

SEQ ID NO: 1567935 - RNA, 13 nt, Human adenovirus D
agucaggagcagc

SEQ ID NO: 1567936 - RNA, 13 nt, Human adenovirus D
gcgccacuggcca

SEQ ID NO: 1567937 - RNA, 14 nt, Human adenovirus D
cuggaugcggagcc

SEQ ID NO: 1567938 - RNA, 16 nt, Human adenovirus D
gacgaguuggugagcu

SEQ ID NO: 1567939 - RNA, 15 nt, Human adenovirus D
cgggcagggagcugc

SEQ ID NO: 1567940 - RNA, 17 nt, Human adenovirus D
gcgacagcgccacgacc

SEQ ID NO: 1567941 - RNA, 21 nt, Human adenovirus D
ccuccgcgguauauggcuccu

SEQ ID NO: 1567942 - RNA, 15 nt, Human adenovirus D
gguauauuauugaug

SEQ ID NO: 1567943 - RNA, 20 nt, Human adenovirus D
uggagguuuucccggacgag

SEQ ID NO: 1567944 - RNA, 15 nt, Human adenovirus D
cagacuggucaaaaa

SEQ ID NO: 1567945 - RNA, 22 nt, Human adenovirus D
ccgcuccaccgaaggcagcucc

SEQ ID NO: 1567946 - RNA, 14 nt, Human adenovirus D
agcgacgaccuggg

SEQ ID NO: 1567947 - RNA, 19 nt, Human adenovirus D
uccccucgaaucaggcugg

SEQ ID NO: 1567948 - RNA, 13 nt, Human adenovirus D
gccaaucagcagu

SEQ ID NO: 1567949 - RNA, 20 nt, Human adenovirus D
cuguugcauguucuugcaug

SEQ ID NO: 1567950 - RNA, 17 nt, Human adenovirus D
gugcugacgcugagcga

SEQ ID NO: 1567951 - RNA, 15 nt, Human adenovirus D
caccuuacacugacg

SEQ ID NO: 1567952 - RNA, 13 nt, Human adenovirus D
ugaugcaggaggg

SEQ ID NO: 1567953 - RNA, 15 nt, Human adenovirus D
ucgaggacggagagg

SEQ ID NO: 1567954 - RNA, 17 nt, Human adenovirus D
cuggaccggcuggugac

SEQ ID NO: 1567955 - RNA, 18 nt, Human adenovirus D
cggugguggagauggaag

SEQ ID NO: 1567956 - RNA, 13 nt, Human adenovirus D
caccgaaggcagc

SEQ ID NO: 1567957 - RNA, 16 nt, Human adenovirus D
uuaaagacccacagcc

SEQ ID NO: 1567958 - RNA, 14 nt, Human adenovirus D
agcaggagugcagg

SEQ ID NO: 1567959 - RNA, 20 nt, Human adenovirus D
cuucucgccgcgcgugcccc

SEQ ID NO: 1567960 - RNA, 19 nt, Human adenovirus D
gacaucgcuucccugaacu

SEQ ID NO: 1567961 - RNA, 22 nt, Human adenovirus D
cugcgccaaaugcgucccaccc

SEQ ID NO: 1567962 - RNA, 16 nt, Human adenovirus D
uaacaucaccacaggc

SEQ ID NO: 1567963 - RNA, 15 nt, Human adenovirus D
caugaccgcgcgcaa

SEQ ID NO: 1567964 - RNA, 23 nt, Human adenovirus D
ugcgguggauuuuuuccaagacc

SEQ ID NO: 1567965 - RNA, 18 nt, Human adenovirus D
cugggcacuggagcacag

SEQ ID NO: 1567966 - RNA, 18 nt, Human adenovirus D
cccaguuucaaacccuac

SEQ ID NO: 1567967 - RNA, 23 nt, Human adenovirus D
ugcgaaagccccgaguguaucua

SEQ ID NO: 1567968 - RNA, 15 nt, Human adenovirus D
cagacggugaagcag

SEQ ID NO: 1567969 - RNA, 23 nt, Human adenovirus D
acgguggacgggcgcccagugcu

SEQ ID NO: 1567970 - RNA, 16 nt, Human adenovirus D
gaaggcuuucacagcu

SEQ ID NO: 1567971 - RNA, 14 nt, Human adenovirus D
ugggaugcugcccg

SEQ ID NO: 1567972 - RNA, 18 nt, Human adenovirus D
ggagccugaugagcucgg

SEQ ID NO: 1567973 - RNA, 13 nt, Human adenovirus D
cgcccagccagca

SEQ ID NO: 1567974 - RNA, 20 nt, Human adenovirus D
accucgccgcgcaggggcuc

SEQ ID NO: 1567975 - RNA, 13 nt, Human adenovirus D
cgcccgcagcacg

SEQ ID NO: 1567976 - RNA, 19 nt, Human adenovirus D
guggcuagaaaacacccac

SEQ ID NO: 1567977 - RNA, 14 nt, Human adenovirus D
accacuggccccgu

SEQ ID NO: 1567978 - RNA, 17 nt, Human adenovirus D
aacgagggccugggcuc

SEQ ID NO: 1567979 - RNA, 15 nt, Human adenovirus D
cccguucucgcuggu

SEQ ID NO: 1567980 - RNA, 13 nt, Human adenovirus D
gcccugcuggagc

SEQ ID NO: 1567981 - RNA, 16 nt, Human adenovirus D
cuuuaucagccagaac

SEQ ID NO: 1567982 - RNA, 15 nt, Human adenovirus D
ggagcucuugcaggg

SEQ ID NO: 1567983 - RNA, 17 nt, Human adenovirus D
cgcuacgugcccuucca

SEQ ID NO: 1567984 - RNA, 13 nt, Human adenovirus D
agcagcaguagcc

SEQ ID NO: 1567985 - RNA, 16 nt, Human adenovirus D
acgcccugcuggagcg

SEQ ID NO: 1567986 - RNA, 20 nt, Human adenovirus D
gcgcagguggacgagcagac

SEQ ID NO: 1567987 - RNA, 16 nt, Human adenovirus D
cuccuccuccuggaga

SEQ ID NO: 1567988 - RNA, 22 nt, Human adenovirus D
uucccauugaauggcacuggca

SEQ ID NO: 1567989 - RNA, 19 nt, Human adenovirus D
caaacacaccugacacaaa

SEQ ID NO: 1567990 - RNA, 17 nt, Human adenovirus D
ggaugaugaccgagcug

SEQ ID NO: 1567991 - RNA, 13 nt, Human adenovirus D
acuuacuuugcaa

SEQ ID NO: 1567992 - RNA, 19 nt, Human adenovirus D
cccuacgucuacaaggccc

SEQ ID NO: 1567993 - RNA, 22 nt, Human adenovirus D
gcccucgaugaaagucaggagc

SEQ ID NO: 1567994 - RNA, 14 nt, Human adenovirus D
ucagcagucucugc

SEQ ID NO: 1567995 - RNA, 19 nt, Human adenovirus D
acgggcugcuucugccugg

SEQ ID NO: 1567996 - RNA, 15 nt, Human adenovirus D
cgggccuacgagcuc

SEQ ID NO: 1567997 - RNA, 17 nt, Human adenovirus D
ggcagccgcagccgcca

SEQ ID NO: 1567998 - RNA, 15 nt, Human adenovirus D
gagcgacacccccgc

SEQ ID NO: 1567999 - RNA, 23 nt, Human adenovirus D
gcccugagcucgcgccucaaugu

SEQ ID NO: 1568000 - RNA, 18 nt, Human adenovirus D
guacgagagcgugauggc

SEQ ID NO: 1568001 - RNA, 16 nt, Human adenovirus D
cucgucuuccaggagc

SEQ ID NO: 1568002 - RNA, 14 nt, Human adenovirus D
cuguuacuguaaag

SEQ ID NO: 1568003 - RNA, 23 nt, Human adenovirus D
acagccuucagcaucagucuccu

SEQ ID NO: 1568004 - RNA, 17 nt, Human adenovirus D
gucccgcugagcuaccg

SEQ ID NO: 1568005 - RNA, 17 nt, Human adenovirus D
cuaucgcuuccucgcgc

SEQ ID NO: 1568006 - RNA, 11 nt, Human adenovirus D
cagcagcaccu

SEQ ID NO: 1568007 - RNA, 16 nt, Human adenovirus D
cggcgcgcccggggcc

SEQ ID NO: 1568008 - RNA, 22 nt, Human adenovirus D
gaggaaucggaucuuccccacu

SEQ ID NO: 1568009 - RNA, 13 nt, Human adenovirus D
gauccugcugcuc

SEQ ID NO: 1568010 - RNA, 17 nt, Human adenovirus D
auggcggagcgagcugg

SEQ ID NO: 1568011 - RNA, 14 nt, Human adenovirus D
acagcagcgacuga

SEQ ID NO: 1568012 - RNA, 19 nt, Human adenovirus D
gcgcagguggacgagcaga

SEQ ID NO: 1568013 - RNA, 14 nt, Human adenovirus D
ggccggugagacgc

SEQ ID NO: 1568014 - RNA, 14 nt, Human adenovirus D
ccggccgcgagacc

SEQ ID NO: 1568015 - RNA, 14 nt, Human adenovirus D
caccaggaugcagc

SEQ ID NO: 1568016 - RNA, 17 nt, Human adenovirus D
caugcacaucgccgggc

SEQ ID NO: 1568017 - RNA, 12 nt, Human adenovirus D
ccucgcugaaaa

SEQ ID NO: 1568018 - RNA, 24 nt, Human adenovirus D
cggggcgggggugaugagcugcga

SEQ ID NO: 1568019 - RNA, 14 nt, Human adenovirus D
cgacuccucgguca

SEQ ID NO: 1568020 - RNA, 21 nt, Human adenovirus D
gaagcauaauauggugaaggg

SEQ ID NO: 1568021 - RNA, 15 nt, Human adenovirus D
ugcugcugcugcuga

SEQ ID NO: 1568022 - RNA, 18 nt, Human adenovirus D
caaucgggcaacagggga

SEQ ID NO: 1568023 - RNA, 17 nt, Human adenovirus D
aucucccaccaccagcc

SEQ ID NO: 1568024 - RNA, 16 nt, Human adenovirus D
acacggucacugucca

SEQ ID NO: 1568025 - RNA, 22 nt, Human adenovirus D
cccgcaugaacuggcucagugc

SEQ ID NO: 1568026 - RNA, 18 nt, Human adenovirus D
cagcuggccgcccugacc

SEQ ID NO: 1568027 - RNA, 15 nt, Human adenovirus D
ggcuucagagacaac

SEQ ID NO: 1568028 - RNA, 14 nt, Human adenovirus D
cgguugagcuggga

SEQ ID NO: 1568029 - RNA, 14 nt, Human adenovirus D
caccgcgaccgcgg

SEQ ID NO: 1568030 - RNA, 20 nt, Human adenovirus D
ccgacgccccugagcggcug

SEQ ID NO: 1568031 - RNA, 14 nt, Human adenovirus D
accgcauccugauc

SEQ ID NO: 1568032 - RNA, 16 nt, Human adenovirus D
aucacaucagccagga

SEQ ID NO: 1568033 - RNA, 15 nt, Human adenovirus D
gugcgcuggggcugc

SEQ ID NO: 1568034 - RNA, 12 nt, Human adenovirus D
cgugccugcucu

SEQ ID NO: 1568035 - RNA, 21 nt, Human adenovirus D
aggugagcucgggcugcucgg

SEQ ID NO: 1568036 - RNA, 18 nt, Human adenovirus D
gugcagaacccggacagc

SEQ ID NO: 1568037 - RNA, 22 nt, Human adenovirus D
caggguugagucgcggcagaac

SEQ ID NO: 1568038 - RNA, 16 nt, Human adenovirus D
cuuacugaaacucagu

SEQ ID NO: 1568039 - RNA, 15 nt, Human adenovirus D
cgcgcgggagccagg

SEQ ID NO: 1568040 - RNA, 16 nt, Human adenovirus D
ucuuggcgagggucug

SEQ ID NO: 1568041 - RNA, 14 nt, Human adenovirus D
uacgugcccuucca

SEQ ID NO: 1568042 - RNA, 16 nt, Human adenovirus D
cgcgcuccacgguggc

SEQ ID NO: 1568043 - RNA, 13 nt, Human adenovirus D
aucacccagggcg

SEQ ID NO: 1568044 - RNA, 19 nt, Human adenovirus D
gggucuaucuggaccccca

SEQ ID NO: 1568045 - RNA, 14 nt, Human adenovirus D
acgagggccugggc

SEQ ID NO: 1568046 - RNA, 14 nt, Human adenovirus D
gccgcgcaggggcu

SEQ ID NO: 1568047 - RNA, 15 nt, Human adenovirus D
agcugacggccaguc

SEQ ID NO: 1568048 - RNA, 16 nt, Human adenovirus D
ugccuccaccacccac

SEQ ID NO: 1568049 - RNA, 12 nt, Human adenovirus D
caggaugcagcc

SEQ ID NO: 1568050 - RNA, 12 nt, Human adenovirus D
cgcccugagagc

SEQ ID NO: 1568051 - RNA, 14 nt, Human adenovirus D
accgcgccgccauc

SEQ ID NO: 1568052 - RNA, 15 nt, Human adenovirus D
ccugcccuuccagca

SEQ ID NO: 1568053 - RNA, 19 nt, Human adenovirus D
cguacuucagccugggcaa

SEQ ID NO: 1568054 - RNA, 15 nt, Human adenovirus D
gagguugagcuccac

SEQ ID NO: 1568055 - RNA, 13 nt, Human adenovirus D
cuugcacaguugg

SEQ ID NO: 1568056 - RNA, 15 nt, Human adenovirus D
gaguacucauaaaga

SEQ ID NO: 1568057 - RNA, 17 nt, Human adenovirus D
cuggugaagggcacagc

SEQ ID NO: 1568058 - RNA, 14 nt, Human adenovirus D
gggcacagccucuc

SEQ ID NO: 1568059 - RNA, 16 nt, Human adenovirus D
cuaaauuuaagccagu

SEQ ID NO: 1568060 - RNA, 14 nt, Human adenovirus D
acccacgacacagc

SEQ ID NO: 1568061 - RNA, 22 nt, Human adenovirus D
aggcagacgcugaaaggcgggc

SEQ ID NO: 1568062 - RNA, 19 nt, Human adenovirus D
cacccggacguggugcugc

SEQ ID NO: 1568063 - RNA, 19 nt, Human adenovirus D
cacugcagggagccagggg

SEQ ID NO: 1568064 - RNA, 16 nt, Human adenovirus D
caggcgacccuggagg

SEQ ID NO: 1568065 - RNA, 17 nt, Human adenovirus D
cagcagucucugccgcc

SEQ ID NO: 1568066 - RNA, 19 nt, Human adenovirus D
cagaggauggucaucaccc

SEQ ID NO: 1568067 - RNA, 22 nt, Human adenovirus D
gcgcucgaaauccccgggggcc

SEQ ID NO: 1568068 - RNA, 18 nt, Human adenovirus D
gcaugccuucgugcacug

SEQ ID NO: 1568069 - RNA, 21 nt, Human adenovirus D
caaggccauaaaucugcccug

SEQ ID NO: 1568070 - RNA, 18 nt, Human adenovirus D
ggcaggccauggacgaga

SEQ ID NO: 1568071 - RNA, 14 nt, Human adenovirus D
cuaauuacagucac

SEQ ID NO: 1568072 - RNA, 18 nt, Human adenovirus D
guguacuugguggacaac

SEQ ID NO: 1568073 - RNA, 16 nt, Human adenovirus D
uuguagugucagaugg

SEQ ID NO: 1568074 - RNA, 19 nt, Human adenovirus D
gcuugcaagggugcgcuug

SEQ ID NO: 1568075 - RNA, 23 nt, Human adenovirus D
gcgcguggaggaagugcuggaca

SEQ ID NO: 1568076 - RNA, 18 nt, Human adenovirus D
gcagaacuacacggucac

SEQ ID NO: 1568077 - RNA, 13 nt, Human adenovirus D
ggcugcuggaugg

SEQ ID NO: 1568078 - RNA, 11 nt, Human adenovirus D
gggcuucaccg

SEQ ID NO: 1568079 - RNA, 19 nt, Human adenovirus D
acgagcucgccgaggaggc

SEQ ID NO: 1568080 - RNA, 13 nt, Human adenovirus D
ucuacucccagcu

SEQ ID NO: 1568081 - RNA, 13 nt, Human adenovirus D
cuaggcgcagcug

SEQ ID NO: 1568082 - RNA, 12 nt, Human adenovirus D
acgggccgccgg

SEQ ID NO: 1568083 - RNA, 19 nt, Human adenovirus D
gcagagucugccgcccuug

SEQ ID NO: 1568084 - RNA, 23 nt, Human adenovirus D
gauccucgcccaauugcacgcca

SEQ ID NO: 1568085 - RNA, 15 nt, Human adenovirus D
ugcgucugcagcauu

SEQ ID NO: 1568086 - RNA, 12 nt, Human adenovirus D
cgucaggcaggc

SEQ ID NO: 1568087 - RNA, 16 nt, Human adenovirus D
cauaaagauggaugga

SEQ ID NO: 1568088 - RNA, 21 nt, Human adenovirus D
agggaaaagcucaaagaccag

SEQ ID NO: 1568089 - RNA, 15 nt, Human adenovirus D
ccccaaacgccagcc

SEQ ID NO: 1568090 - RNA, 14 nt, Human adenovirus D
gcccugcgcccaga

SEQ ID NO: 1568091 - RNA, 19 nt, Human adenovirus D
agggcagcccuaccccgcc

SEQ ID NO: 1568092 - RNA, 18 nt, Human adenovirus D
agcaagggcgaccagcuc

SEQ ID NO: 1568093 - RNA, 23 nt, Human adenovirus D
gaagacgaaugggaagaagagac

SEQ ID NO: 1568094 - RNA, 16 nt, Human adenovirus D
ccucuacgccaccuuc

SEQ ID NO: 1568095 - RNA, 22 nt, Human adenovirus D
cagcaagccucugacggcgcag

SEQ ID NO: 1568096 - RNA, 15 nt, Human adenovirus D
agcaggaccugggcu

SEQ ID NO: 1568097 - RNA, 18 nt, Human adenovirus D
guguaguuguucagcagc

SEQ ID NO: 1568098 - RNA, 17 nt, Human adenovirus D
uacacagcuagacacca

SEQ ID NO: 1568099 - RNA, 15 nt, Human adenovirus D
cgggucucccccagc

SEQ ID NO: 1568100 - RNA, 13 nt, Human adenovirus D
cgcggcugcugcu

SEQ ID NO: 1568101 - RNA, 22 nt, Human adenovirus D
gcggaggccaucgugcagaacc

SEQ ID NO: 1568102 - RNA, 13 nt, Human adenovirus D
ccaugacagcgac

SEQ ID NO: 1568103 - RNA, 22 nt, Human adenovirus D
gaguuccugauggaugugugga

SEQ ID NO: 1568104 - RNA, 14 nt, Human adenovirus D
cgccgccaggccca

SEQ ID NO: 1568105 - RNA, 18 nt, Human adenovirus D
cuccgggacgcccuggcc

SEQ ID NO: 1568106 - RNA, 14 nt, Human adenovirus D
ugacgcaugcaagg

SEQ ID NO: 1568107 - RNA, 14 nt, Human adenovirus D
cagccgcggcagcc

SEQ ID NO: 1568108 - RNA, 20 nt, Human adenovirus D
cgcagcuacaccucccucac

SEQ ID NO: 1568109 - RNA, 21 nt, Human adenovirus D
aggacucgcagacgagcggcc

SEQ ID NO: 1568110 - RNA, 20 nt, Human adenovirus D
ggcuacgcgcggaaucagaa

SEQ ID NO: 1568111 - RNA, 20 nt, Human adenovirus D
cuacaaggccgucacccugc

SEQ ID NO: 1568112 - RNA, 15 nt, Human adenovirus D
ugaacgccuuccugg

SEQ ID NO: 1568113 - RNA, 17 nt, Human adenovirus D
cuccgcgaacagcagca

SEQ ID NO: 1568114 - RNA, 22 nt, Human adenovirus D
guuacuguaaagccacaaccag

SEQ ID NO: 1568115 - RNA, 16 nt, Human adenovirus D
cuggcgacgcagccgg

SEQ ID NO: 1568116 - RNA, 19 nt, Human adenovirus D
aggaaacuaggcgcagcug

SEQ ID NO: 1568117 - RNA, 23 nt, Human adenovirus D
cggggcucggugcggcugcugca

SEQ ID NO: 1568118 - RNA, 13 nt, Human adenovirus D
uguccaaccccga

SEQ ID NO: 1568119 - RNA, 21 nt, Human adenovirus D
gaccuucaaccucaccaacca

SEQ ID NO: 1568120 - RNA, 17 nt, Human adenovirus D
gccucaaugucagcugc

SEQ ID NO: 1568121 - RNA, 13 nt, Human adenovirus D
aauccuccaggac

SEQ ID NO: 1568122 - RNA, 20 nt, Human adenovirus D
gucugcuccugcacuuucuu

SEQ ID NO: 1568123 - RNA, 17 nt, Human adenovirus D
cgagaggcgagcagcug

SEQ ID NO: 1568124 - RNA, 16 nt, Human adenovirus D
cgagccaggugagcuc

SEQ ID NO: 1568125 - RNA, 17 nt, Human adenovirus D
ccgcucaucggccagac

SEQ ID NO: 1568126 - RNA, 16 nt, Human adenovirus D
ugcagcaggugcugcc

SEQ ID NO: 1568127 - RNA, 20 nt, Human adenovirus D
agaaccauuuuuauuccaaa

SEQ ID NO: 1568128 - RNA, 17 nt, Human adenovirus D
ggcaucuuccuggggca

SEQ ID NO: 1568129 - RNA, 16 nt, Human adenovirus D
ccacaggugcugccca

SEQ ID NO: 1568130 - RNA, 23 nt, Human adenovirus D
gcggggggagaugaugugcaguu

SEQ ID NO: 1568131 - RNA, 20 nt, Human adenovirus D
ugccacucgcgggcggccau

SEQ ID NO: 1568132 - RNA, 17 nt, Human adenovirus D
cccugagccgccagcug

SEQ ID NO: 1568133 - RNA, 20 nt, Human adenovirus D
cgacacguacuucagccugg

SEQ ID NO: 1568134 - RNA, 18 nt, Human adenovirus D
aggccgccuacgguccag

SEQ ID NO: 1568135 - RNA, 15 nt, Human adenovirus D
cgacgagccagguga

SEQ ID NO: 1568136 - RNA, 15 nt, Human adenovirus D
gggugacagaaccag

SEQ ID NO: 1568137 - RNA, 22 nt, Human adenovirus D
aucaagugccacaugcaccugg

SEQ ID NO: 1568138 - RNA, 16 nt, Human adenovirus D
cgcccggcguacgugc

SEQ ID NO: 1568139 - RNA, 13 nt, Human adenovirus D
cacgccaccgcuu

SEQ ID NO: 1568140 - RNA, 15 nt, Human adenovirus D
cccauuccuggagau

SEQ ID NO: 1568141 - RNA, 22 nt, Human adenovirus D
acggcgcagcuguuccuggugg

SEQ ID NO: 1568142 - RNA, 21 nt, Human adenovirus D
acgcgcgaagauggccacccc

SEQ ID NO: 1568143 - RNA, 21 nt, Human adenovirus D
gccucgagcuacaugcccagc

SEQ ID NO: 1568144 - RNA, 11 nt, Human adenovirus D
ccaccccaggc

SEQ ID NO: 1568145 - RNA, 17 nt, Human adenovirus D
gacagagauggacuugg

SEQ ID NO: 1568146 - RNA, 23 nt, Human adenovirus D
gcgcagcguugagcucacccacu

SEQ ID NO: 1568147 - RNA, 23 nt, Human adenovirus D
ugaugcaggauaaauauggccug

SEQ ID NO: 1568148 - RNA, 20 nt, Human adenovirus D
auuaugagcaucaaaaauua

SEQ ID NO: 1568149 - RNA, 13 nt, Human adenovirus D
uuaccgccagaga

SEQ ID NO: 1568150 - RNA, 14 nt, Human adenovirus D
gaaagucaggagca

SEQ ID NO: 1568151 - RNA, 15 nt, Human adenovirus D
gcgaggagguggccc

SEQ ID NO: 1568152 - RNA, 13 nt, Human adenovirus D
aacccaugaaaga

SEQ ID NO: 1568153 - RNA, 22 nt, Human adenovirus D
ccugguacgagcuacagcagga

SEQ ID NO: 1568154 - RNA, 22 nt, Human adenovirus D
gaagggcacagccucucugaag

SEQ ID NO: 1568155 - RNA, 21 nt, Human adenovirus D
caaaguaaaaaaccggucucu

SEQ ID NO: 1568156 - RNA, 17 nt, Human adenovirus D
uccacagaucagacaua

SEQ ID NO: 1568157 - RNA, 23 nt, Human adenovirus D
gagguaguugagggugguggcga

SEQ ID NO: 1568158 - RNA, 12 nt, Human adenovirus D
gcgagacccagg

SEQ ID NO: 1568159 - RNA, 22 nt, Human adenovirus D
guaggaaccagcacacucacuu

SEQ ID NO: 1568160 - RNA, 16 nt, Human adenovirus D
cucccacagcucgcgg

SEQ ID NO: 1568161 - RNA, 24 nt, Human adenovirus D
uggaagaccuacgcucaggaccau

SEQ ID NO: 1568162 - RNA, 12 nt, Human adenovirus D
ccuuccugcagc

SEQ ID NO: 1568163 - RNA, 15 nt, Human adenovirus D
ggcguacgugccugc

SEQ ID NO: 1568164 - RNA, 15 nt, Human adenovirus D
augagagucugaaaa

SEQ ID NO: 1568165 - RNA, 23 nt, Human adenovirus D
gcagacuuccucguuucgggggu

SEQ ID NO: 1568166 - RNA, 22 nt, Human adenovirus D
gacuaucuaugaaagcauacag

SEQ ID NO: 1568167 - RNA, 15 nt, Human adenovirus D
ggccaggaggagacc

SEQ ID NO: 1568168 - RNA, 23 nt, Human adenovirus D
aaaugaagccguccucugaaaag

SEQ ID NO: 1568169 - RNA, 13 nt, Human adenovirus D
ucgcgcaggccgc

SEQ ID NO: 1568170 - RNA, 14 nt, Human adenovirus D
cuacaaggccguca

SEQ ID NO: 1568171 - RNA, 15 nt, Human adenovirus D
gccuucgugcacugg

SEQ ID NO: 1568172 - RNA, 19 nt, Human adenovirus D
cuugugguuuuaacaggga

SEQ ID NO: 1568173 - RNA, 16 nt, Human adenovirus D
agcaucgaggugcaga

SEQ ID NO: 1568174 - RNA, 15 nt, Human adenovirus D
gccuuguaccugccc

SEQ ID NO: 1568175 - RNA, 21 nt, Human adenovirus D
augaaggggacgagcugcuug

SEQ ID NO: 1568176 - RNA, 22 nt, Human adenovirus D
acggagaggcugacgagcccgc

SEQ ID NO: 1568177 - RNA, 22 nt, Human adenovirus D
ugaagaacauccaugugaccuc

SEQ ID NO: 1568178 - RNA, 23 nt, Human adenovirus D
ccacugcuaccucuugcagcugg

SEQ ID NO: 1568179 - RNA, 18 nt, Human adenovirus D
ccuacgucuacaaggccc

SEQ ID NO: 1568180 - RNA, 17 nt, Human adenovirus D
gcgucauggcuggucag

SEQ ID NO: 1568181 - RNA, 13 nt, Human adenovirus D
auaaucaggcaga

SEQ ID NO: 1568182 - RNA, 18 nt, Human adenovirus D
caaggugcugacauccau

SEQ ID NO: 1568183 - RNA, 12 nt, Human adenovirus D
ccugggaggaga

SEQ ID NO: 1568184 - RNA, 16 nt, Human adenovirus D
acuagcgugagccgcg

SEQ ID NO: 1568185 - RNA, 17 nt, Human adenovirus D
gcuccaccgaaggcagc

SEQ ID NO: 1568186 - RNA, 21 nt, Human adenovirus D
uuuucugguugacaaauggag

SEQ ID NO: 1568187 - RNA, 16 nt, Human adenovirus D
guguugcggcccggca

SEQ ID NO: 1568188 - RNA, 21 nt, Human adenovirus D
cuggugguuuucauguucgcc

SEQ ID NO: 1568189 - RNA, 15 nt, Human adenovirus D
cgauccugacgcgcc

SEQ ID NO: 1568190 - RNA, 23 nt, Human adenovirus D
ccucaugaacacacugcccauau

SEQ ID NO: 1568191 - RNA, 13 nt, Human adenovirus D
ggccacggggagc

SEQ ID NO: 1568192 - RNA, 23 nt, Human adenovirus D
agcuagacaccacagugcagaau

SEQ ID NO: 1568193 - RNA, 13 nt, Human adenovirus D
ucacccuggggcu

SEQ ID NO: 1568194 - RNA, 18 nt, Human adenovirus D
ccgcgcgccgcgccgcca

SEQ ID NO: 1568195 - RNA, 18 nt, Human adenovirus D
acccgcggccgcccacgg

SEQ ID NO: 1568196 - RNA, 22 nt, Human adenovirus D
cccggacguggugcugcugccg

SEQ ID NO: 1568197 - RNA, 23 nt, Human adenovirus D
gaaugagagccggagugaugaau

SEQ ID NO: 1568198 - RNA, 19 nt, Human adenovirus D
caaguaggugaagaaaacu

SEQ ID NO: 1568199 - RNA, 14 nt, Human adenovirus D
cagcuccagugggg

SEQ ID NO: 1568200 - RNA, 13 nt, Human adenovirus D
ucgcuggucacau

SEQ ID NO: 1568201 - RNA, 19 nt, Human adenovirus D
cgccagacgcacgggccgc

SEQ ID NO: 1568202 - RNA, 13 nt, Human adenovirus D
uaagaaucacauu

SEQ ID NO: 1568203 - RNA, 22 nt, Human adenovirus D
cuacggcaucucgauccagcag

SEQ ID NO: 1568204 - RNA, 19 nt, Human adenovirus D
cgccgacgcgcuccucgcu

SEQ ID NO: 1568205 - RNA, 14 nt, Human adenovirus D
ugcagguggacgag

SEQ ID NO: 1568206 - RNA, 16 nt, Human adenovirus D
aggcgcccaggccgcu

SEQ ID NO: 1568207 - RNA, 21 nt, Human adenovirus D
cacuagcgugagccgcgcgcu

SEQ ID NO: 1568208 - RNA, 18 nt, Human adenovirus D
cacuuuugcccuuacaug

SEQ ID NO: 1568209 - RNA, 18 nt, Human adenovirus D
uccccgaggcccuugcca

SEQ ID NO: 1568210 - RNA, 18 nt, Human adenovirus D
uacgcguacauccagcau

SEQ ID NO: 1568211 - RNA, 13 nt, Human adenovirus D
ugaacucggggau

SEQ ID NO: 1568212 - RNA, 13 nt, Human adenovirus D
acagcaggagugc

SEQ ID NO: 1568213 - RNA, 21 nt, Human adenovirus D
cggccuuugaugugcggcagc

SEQ ID NO: 1568214 - RNA, 21 nt, Human adenovirus D
cuucuuccccauggcgcacaa

SEQ ID NO: 1568215 - RNA, 20 nt, Human adenovirus D
gcaagucacgcaggugacag

SEQ ID NO: 1568216 - RNA, 21 nt, Human adenovirus D
agguguuggcaaagcgguuga

SEQ ID NO: 1568217 - RNA, 20 nt, Human adenovirus D
uggagcaggguaaagccagc

SEQ ID NO: 1568218 - RNA, 12 nt, Human adenovirus D
ccauggggcgcc

SEQ ID NO: 1568219 - RNA, 22 nt, Human adenovirus D
caccaggccuacuacuccugau

SEQ ID NO: 1568220 - RNA, 22 nt, Human adenovirus D
uggacgcgguucauugacagcg

SEQ ID NO: 1568221 - RNA, 13 nt, Human adenovirus D
aagaaguggccag

SEQ ID NO: 1568222 - RNA, 15 nt, Human adenovirus D
uaaaauucaacugca

SEQ ID NO: 1568223 - RNA, 21 nt, Human adenovirus D
cccucaucacaucagccagga

SEQ ID NO: 1568224 - RNA, 14 nt, Human adenovirus D
aggcccuggagcag

SEQ ID NO: 1568225 - RNA, 14 nt, Human adenovirus D
uagacauggccagc

SEQ ID NO: 1568226 - RNA, 18 nt, Human adenovirus D
agcgggcucuuccuccgu

SEQ ID NO: 1568227 - RNA, 13 nt, Human adenovirus D
aggagcaggagga

SEQ ID NO: 1568228 - RNA, 17 nt, Human adenovirus D
gcgcgaagauggccacc

SEQ ID NO: 1568229 - RNA, 17 nt, Human adenovirus D
acaggcaaugagaggag

SEQ ID NO: 1568230 - RNA, 21 nt, Human adenovirus D
cccggcgcaguacgcgcuguc

SEQ ID NO: 1568231 - RNA, 12 nt, Human adenovirus D
cucggcaacgac

SEQ ID NO: 1568232 - RNA, 16 nt, Human adenovirus D
cccagugcuuccagca

SEQ ID NO: 1568233 - RNA, 23 nt, Human adenovirus D
ucacccggacguggugcugcugc

SEQ ID NO: 1568234 - RNA, 14 nt, Human adenovirus D
gucaacaugauccu

SEQ ID NO: 1568235 - RNA, 20 nt, Human adenovirus D
gaauuuguauggaauaaaga

SEQ ID NO: 1568236 - RNA, 17 nt, Human adenovirus D
ugcgacccaugagcugc

SEQ ID NO: 1568237 - RNA, 18 nt, Human adenovirus D
acccaaaaacugcaugcu

SEQ ID NO: 1568238 - RNA, 15 nt, Human adenovirus D
cccagugcuuccagc

SEQ ID NO: 1568239 - RNA, 12 nt, Human adenovirus D
aacacacugccc

SEQ ID NO: 1568240 - RNA, 16 nt, Human adenovirus D
accaaggaaacucccu

SEQ ID NO: 1568241 - RNA, 18 nt, Human adenovirus D
augugcaguuuggccugg

SEQ ID NO: 1568242 - RNA, 19 nt, Human adenovirus D
cacaugacccugcauggcu

SEQ ID NO: 1568243 - RNA, 23 nt, Human adenovirus D
uucacagcuaagaaaaaaucaga

SEQ ID NO: 1568244 - RNA, 23 nt, Human adenovirus D
gcagcccuaccccgccaacuucc

SEQ ID NO: 1568245 - RNA, 22 nt, Human adenovirus D
caccaguuggacgaguggcugu

SEQ ID NO: 1568246 - RNA, 24 nt, Human adenovirus D
cugccgcugcaaccugugcucucc

SEQ ID NO: 1568247 - RNA, 20 nt, Human adenovirus D
aagaucuccaacguggagcu

SEQ ID NO: 1568248 - RNA, 20 nt, Human adenovirus D
ccacuacucacacuacacag

SEQ ID NO: 1568249 - RNA, 20 nt, Human adenovirus D
cagucagacccaguggcgag

SEQ ID NO: 1568250 - RNA, 16 nt, Human adenovirus D
aagggcaucuucugcc

SEQ ID NO: 1568251 - RNA, 22 nt, Human adenovirus D
ccgcauccacaaggccgugagc

SEQ ID NO: 1568252 - RNA, 20 nt, Human adenovirus D
ggugcugccccaggcggugc

SEQ ID NO: 1568253 - RNA, 17 nt, Human adenovirus D
cacgcgcacacuuugga

SEQ ID NO: 1568254 - RNA, 18 nt, Human adenovirus D
ugaacugccuacaaccaa

SEQ ID NO: 1568255 - RNA, 13 nt, Human adenovirus D
uaaugaagaagca

SEQ ID NO: 1568256 - RNA, 18 nt, Human adenovirus D
gcgggccaugagggucug

SEQ ID NO: 1568257 - RNA, 15 nt, Human adenovirus D
acuugagcuggccuu

SEQ ID NO: 1568258 - RNA, 20 nt, Human adenovirus D
ggcggaacugcuggcccacg

SEQ ID NO: 1568259 - RNA, 15 nt, Human adenovirus D
aacaauaaaaaacuu

SEQ ID NO: 1568260 - RNA, 11 nt, Human adenovirus D
agucaggcagg

SEQ ID NO: 1568261 - RNA, 19 nt, Human adenovirus D
cuggucugcaacccccagc

SEQ ID NO: 1568262 - RNA, 15 nt, Human adenovirus D
cauccccgcgccgcg

SEQ ID NO: 1568263 - RNA, 14 nt, Human adenovirus D
ugaagggcacagcc

SEQ ID NO: 1568264 - RNA, 22 nt, Human adenovirus D
ggcugggcgcuugcaagggugc

SEQ ID NO: 1568265 - RNA, 16 nt, Human adenovirus D
auugcccaacaauaaa

SEQ ID NO: 1568266 - RNA, 18 nt, Human adenovirus D
ccgagcacucgugcugau

SEQ ID NO: 1568267 - RNA, 21 nt, Human adenovirus D
agcagguuucucaacagcugg

SEQ ID NO: 1568268 - RNA, 14 nt, Human adenovirus D
gggcuggcgagacu

SEQ ID NO: 1568269 - RNA, 16 nt, Human adenovirus D
ccagaugcucucccac

SEQ ID NO: 1568270 - RNA, 21 nt, Human adenovirus D
ccuucgugcacuggcccgacc

SEQ ID NO: 1568271 - RNA, 15 nt, Human adenovirus D
cuacgugcccuucca

SEQ ID NO: 1568272 - RNA, 20 nt, Human adenovirus D
caccggcuaccuugcaccca

SEQ ID NO: 1568273 - RNA, 13 nt, Human adenovirus D
cauugucugccug

SEQ ID NO: 1568274 - RNA, 13 nt, Human adenovirus D
aagugugguuuau

SEQ ID NO: 1568275 - RNA, 20 nt, Human adenovirus D
cauggccaacagccacauga

SEQ ID NO: 1568276 - RNA, 14 nt, Human adenovirus D
aggaggggggccac

SEQ ID NO: 1568277 - RNA, 20 nt, Human adenovirus D
cggggcauugcaggccgugc

SEQ ID NO: 1568278 - RNA, 14 nt, Human adenovirus D
cuuugucugcugua

SEQ ID NO: 1568279 - RNA, 13 nt, Human adenovirus D
ccgcgccgcagcc

SEQ ID NO: 1568280 - RNA, 19 nt, Human adenovirus D
uacggaccaccccaggcgg

SEQ ID NO: 1568281 - RNA, 17 nt, Human adenovirus D
guccacgagcgccagcu

SEQ ID NO: 1568282 - RNA, 15 nt, Human adenovirus D
acgagcggcagggcu

SEQ ID NO: 1568283 - RNA, 16 nt, Human adenovirus D
augcacucauccauga

SEQ ID NO: 1568284 - RNA, 20 nt, Human adenovirus D
gggaaccucagccacuccaa

SEQ ID NO: 1568285 - RNA, 20 nt, Human adenovirus D
agcgaucugggaugcugccc

SEQ ID NO: 1568286 - RNA, 16 nt, Human adenovirus D
ugugguagcuuacacc

SEQ ID NO: 1568287 - RNA, 14 nt, Human adenovirus D
cgcggcgaacgagc

SEQ ID NO: 1568288 - RNA, 16 nt, Human adenovirus D
cgagcuggaagcccug

SEQ ID NO: 1568289 - RNA, 16 nt, Human adenovirus D
gagccauugaccacca

SEQ ID NO: 1568290 - RNA, 18 nt, Human adenovirus D
ccugggaggagaggagga

SEQ ID NO: 1568291 - RNA, 23 nt, Human adenovirus D
guccgcuccgcagugggcgcaga

SEQ ID NO: 1568292 - RNA, 15 nt, Human adenovirus D
acgguggcggcgagg

SEQ ID NO: 1568293 - RNA, 15 nt, Human adenovirus D
uacuuugucugcugu

SEQ ID NO: 1568294 - RNA, 16 nt, Human adenovirus D
cgccgcgccagacgca

SEQ ID NO: 1568295 - RNA, 12 nt, Human adenovirus D
gggaggcgcugc

SEQ ID NO: 1568296 - RNA, 20 nt, Human adenovirus D
ccccaggcggugcugcugcc

SEQ ID NO: 1568297 - RNA, 17 nt, Human adenovirus D
ggccauucuggaggcgg

SEQ ID NO: 1568298 - RNA, 16 nt, Human adenovirus D
gccugccaggaugggc

SEQ ID NO: 1568299 - RNA, 21 nt, Human adenovirus D
cuggcgagacugggggcgccu

SEQ ID NO: 1568300 - RNA, 19 nt, Human adenovirus D
ggggcucguuaguccagca

SEQ ID NO: 1568301 - RNA, 13 nt, Human adenovirus D
agcgcccugguag

SEQ ID NO: 1568302 - RNA, 13 nt, Human adenovirus D
ccaggcagugcag

SEQ ID NO: 1568303 - RNA, 11 nt, Human adenovirus D
gguggccccga

SEQ ID NO: 1568304 - RNA, 23 nt, Human adenovirus D
uucacccggacguggugcugcug

SEQ ID NO: 1568305 - RNA, 18 nt, Human adenovirus D
uggccaguguuugagaau

SEQ ID NO: 1568306 - RNA, 21 nt, Human adenovirus D
cauucacauacacacuagaaa

SEQ ID NO: 1568307 - RNA, 22 nt, Human adenovirus D
agcucguaguugagggccucgg

SEQ ID NO: 1568308 - RNA, 16 nt, Human adenovirus D
gcuccaccgaaggcag

SEQ ID NO: 1568309 - RNA, 23 nt, Human adenovirus D
agcuuggcgacgaacucggcggu

SEQ ID NO: 1568310 - RNA, 12 nt, Human adenovirus D
ggugcuccagcc

SEQ ID NO: 1568311 - RNA, 18 nt, Human adenovirus D
gaugcuucaacagcugug

SEQ ID NO: 1568312 - RNA, 21 nt, Human adenovirus D
cccucagcgucgaggagcugu

SEQ ID NO: 1568313 - RNA, 18 nt, Human adenovirus D
uucucaucucgcccagca

SEQ ID NO: 1568314 - RNA, 23 nt, Human adenovirus D
ugcggaucaccguagagggcacc

SEQ ID NO: 1568315 - RNA, 21 nt, Human adenovirus D
gucggcgcgcuccuuggccgc

SEQ ID NO: 1568316 - RNA, 21 nt, Human adenovirus D
gcgagcagaacgggggcagca

SEQ ID NO: 1568317 - RNA, 23 nt, Human adenovirus D
aaauuguugguguaaauccacuc

SEQ ID NO: 1568318 - RNA, 15 nt, Human adenovirus D
gcucuucccuggaga

SEQ ID NO: 1568319 - RNA, 17 nt, Human adenovirus D
ccccuucaaccaccacc

SEQ ID NO: 1568320 - RNA, 12 nt, Human adenovirus D
ccugcucucaca

SEQ ID NO: 1568321 - RNA, 14 nt, Human adenovirus D
ugcagccaguggcc

SEQ ID NO: 1568322 - RNA, 16 nt, Human adenovirus D
guaucuuuauugauuu

SEQ ID NO: 1568323 - RNA, 13 nt, Human adenovirus D
cccaacggcaugc

SEQ ID NO: 1568324 - RNA, 12 nt, Human adenovirus D
gccaggaggcgg

SEQ ID NO: 1568325 - RNA, 12 nt, Human adenovirus D
ccaucauguucg

SEQ ID NO: 1568326 - RNA, 15 nt, Human adenovirus D
cucggggaucaccag

SEQ ID NO: 1568327 - RNA, 13 nt, Human adenovirus D
uguacuucuccca

SEQ ID NO: 1568328 - RNA, 17 nt, Human adenovirus D
gacgcagccggcgaacg

SEQ ID NO: 1568329 - RNA, 17 nt, Human adenovirus D
ccagcaucgaggugcag

SEQ ID NO: 1568330 - RNA, 15 nt, Human adenovirus D
agguggacgagcaga

SEQ ID NO: 1568331 - RNA, 21 nt, Human adenovirus D
ccuggugcgucgagcacagca

SEQ ID NO: 1568332 - RNA, 18 nt, Human adenovirus D
acuuggaugaggaagagg

SEQ ID NO: 1568333 - RNA, 18 nt, Human adenovirus D
augaaagcauacagagau

SEQ ID NO: 1568334 - RNA, 13 nt, Human adenovirus D
cccuuccucacuc

SEQ ID NO: 1568335 - RNA, 20 nt, Human adenovirus D
ccuucucgggaucgccaggc

SEQ ID NO: 1568336 - RNA, 19 nt, Human adenovirus D
gugcuccagccaaagcuca

SEQ ID NO: 1568337 - RNA, 14 nt, Human adenovirus D
aaagggaugucaaa

SEQ ID NO: 1568338 - RNA, 18 nt, Human adenovirus D
ccacguuacgucacuuuu

SEQ ID NO: 1568339 - RNA, 19 nt, Human adenovirus D
cgucccgacgaggccgggc

SEQ ID NO: 1568340 - RNA, 15 nt, Human adenovirus D
agaggcgagcagcug

SEQ ID NO: 1568341 - RNA, 20 nt, Human adenovirus D
ggugcuagacauggccagca

SEQ ID NO: 1568342 - RNA, 13 nt, Human adenovirus D
agggguugagggg

SEQ ID NO: 1568343 - RNA, 13 nt, Human adenovirus D
caccugcggcgcg

SEQ ID NO: 1568344 - RNA, 19 nt, Human adenovirus D
guggucagcgaugagcagc

SEQ ID NO: 1568345 - RNA, 23 nt, Human adenovirus D
gcuaccuugcacccaccaugcgc

SEQ ID NO: 1568346 - RNA, 17 nt, Human adenovirus D
ggccgucacccugcccu

SEQ ID NO: 1568347 - RNA, 14 nt, Human adenovirus D
gcgaggacgcagcg

SEQ ID NO: 1568348 - RNA, 15 nt, Human adenovirus D
ugcgcccgcgccgcg

SEQ ID NO: 1568349 - RNA, 15 nt, Human adenovirus D
agcgugggacuggca

SEQ ID NO: 1568350 - RNA, 16 nt, Human adenovirus D
gcguggcgcucgggca

SEQ ID NO: 1568351 - RNA, 15 nt, Human adenovirus D
agagagucuggugga

SEQ ID NO: 1568352 - RNA, 19 nt, Human adenovirus D
gcugguagggggcgccgcc

SEQ ID NO: 1568353 - RNA, 22 nt, Human adenovirus D
uauccagccuguacccagagcu

SEQ ID NO: 1568354 - RNA, 17 nt, Human adenovirus D
ggcgcccgugggcgacc

SEQ ID NO: 1568355 - RNA, 14 nt, Human adenovirus D
acaccgccuccccg

SEQ ID NO: 1568356 - RNA, 17 nt, Human adenovirus D
ggaacugauaagacaca

SEQ ID NO: 1568357 - RNA, 17 nt, Human adenovirus D
caccccccgcaggcagg

SEQ ID NO: 1568358 - RNA, 14 nt, Human adenovirus D
augcgccaagggca

SEQ ID NO: 1568359 - RNA, 20 nt, Human adenovirus D
acgggcugcuucugccuggu

SEQ ID NO: 1568360 - RNA, 14 nt, Human adenovirus D
ucaguuucccauga

SEQ ID NO: 1568361 - RNA, 21 nt, Human adenovirus D
cacuguuguuuauaaaucuua

SEQ ID NO: 1568362 - RNA, 18 nt, Human adenovirus D
ccgcuacgugcccuucca

SEQ ID NO: 1568363 - RNA, 15 nt, Human adenovirus D
gucuacaaggcccug

SEQ ID NO: 1568364 - RNA, 16 nt, Human adenovirus D
gcgauauuggagucaa

SEQ ID NO: 1568365 - RNA, 16 nt, Human adenovirus D
guucgacguggucaga

SEQ ID NO: 1568366 - RNA, 13 nt, Human adenovirus D
gcuaaagcucuuc

SEQ ID NO: 1568367 - RNA, 15 nt, Human adenovirus D
gagaugcgcgacugc

SEQ ID NO: 1568368 - RNA, 17 nt, Human adenovirus D
aggcuuucacagcuugc

SEQ ID NO: 1568369 - RNA, 19 nt, Human adenovirus D
agcacgcggaucucacggc

SEQ ID NO: 1568370 - RNA, 11 nt, Human adenovirus D
ggcgcccagca

SEQ ID NO: 1568371 - RNA, 17 nt, Human adenovirus D
cgaugccuucuccaggg

SEQ ID NO: 1568372 - RNA, 14 nt, Human adenovirus D
gcaggccgugcugc

SEQ ID NO: 1568373 - RNA, 19 nt, Human adenovirus D
gcagacggugaagcaggag

SEQ ID NO: 1568374 - RNA, 20 nt, Human adenovirus D
ucgcagucuccaacgccugc

SEQ ID NO: 1568375 - RNA, 16 nt, Human adenovirus D
agaggaaggaggacac

SEQ ID NO: 1568376 - RNA, 17 nt, Human adenovirus D
ccacacggccagcaggg

SEQ ID NO: 1568377 - RNA, 21 nt, Human adenovirus D
gcuggcuugguacccgcgacc

SEQ ID NO: 1568378 - RNA, 14 nt, Human adenovirus D
gcuggcccugcugg

SEQ ID NO: 1568379 - RNA, 18 nt, Human adenovirus D
ggccaaccuguggaagag

SEQ ID NO: 1568380 - RNA, 15 nt, Human adenovirus D
acucacccuggggcu

SEQ ID NO: 1568381 - RNA, 17 nt, Human adenovirus D
cccagcucauccgcagc

SEQ ID NO: 1568382 - RNA, 16 nt, Human adenovirus D
cuagcccuuccuggac

SEQ ID NO: 1568383 - RNA, 16 nt, Human adenovirus D
acgcgcucgacaugac

SEQ ID NO: 1568384 - RNA, 15 nt, Human adenovirus D
cgccgacccguggcc

SEQ ID NO: 1568385 - RNA, 17 nt, Human adenovirus D
auggauguggagcccga

SEQ ID NO: 1568386 - RNA, 19 nt, Human adenovirus D
aagggcucggucgggacga

SEQ ID NO: 1568387 - RNA, 14 nt, Human adenovirus D
caacaccagacaca

SEQ ID NO: 1568388 - RNA, 12 nt, Human adenovirus D
accugccuccac

SEQ ID NO: 1568389 - RNA, 15 nt, Human adenovirus D
ccauaaaucugcccu

SEQ ID NO: 1568390 - RNA, 15 nt, Human adenovirus D
auuacugccacugcc

SEQ ID NO: 1568391 - RNA, 17 nt, Human adenovirus D
aaaaucagaagagauga

SEQ ID NO: 1568392 - RNA, 13 nt, Human adenovirus D
gcugggcgaggac

SEQ ID NO: 1568393 - RNA, 20 nt, Human adenovirus D
cuacugcaucuguccaaccc

SEQ ID NO: 1568394 - RNA, 19 nt, Human adenovirus D
cuucaccggcuaccuugca

SEQ ID NO: 1568395 - RNA, 22 nt, Human adenovirus D
gcagggugaccagguccacgcu

SEQ ID NO: 1568396 - RNA, 17 nt, Human adenovirus D
gcugaucaagugccaca

SEQ ID NO: 1568397 - RNA, 15 nt, Human adenovirus D
agcgaugagcagcuu

SEQ ID NO: 1568398 - RNA, 23 nt, Human adenovirus D
cgacgcuuuuucagcgaccccga

SEQ ID NO: 1568399 - RNA, 19 nt, Human adenovirus D
caggcggcggucaccucaa

SEQ ID NO: 1568400 - RNA, 13 nt, Human adenovirus D
ucccaccaccagc

SEQ ID NO: 1568401 - RNA, 16 nt, Human adenovirus D
gguacuugggcugcca

SEQ ID NO: 1568402 - RNA, 13 nt, Human adenovirus D
gcuguccacgagc

SEQ ID NO: 1568403 - RNA, 23 nt, Human adenovirus D
acauggccagcacguacuuugac

SEQ ID NO: 1568404 - RNA, 21 nt, Human adenovirus D
guccuuuagacaacagccgca

SEQ ID NO: 1568405 - RNA, 13 nt, Human adenovirus D
acugcauggccuc

SEQ ID NO: 1568406 - RNA, 15 nt, Human adenovirus D
aguaaagaaacagaa

SEQ ID NO: 1568407 - RNA, 16 nt, Human adenovirus D
cauggcuaccugggag

SEQ ID NO: 1568408 - RNA, 12 nt, Human adenovirus D
ugcccagcagca

SEQ ID NO: 1568409 - RNA, 21 nt, Human adenovirus D
ugcaaacggugaaccugagcc

SEQ ID NO: 1568410 - RNA, 18 nt, Human adenovirus D
gcggccuugcggagcgag

SEQ ID NO: 1568411 - RNA, 12 nt, Human adenovirus D
gggccugggcuc

SEQ ID NO: 1568412 - RNA, 16 nt, Human adenovirus D
cucgcugcugcagccg

SEQ ID NO: 1568413 - RNA, 17 nt, Human adenovirus D
uggaccccauggacaac

SEQ ID NO: 1568414 - RNA, 12 nt, Human adenovirus D
caccaaggccau

SEQ ID NO: 1568415 - RNA, 23 nt, Human adenovirus D
aacaggaugggucugugccucuc

SEQ ID NO: 1568416 - RNA, 17 nt, Human adenovirus D
uugaccugccuccacca

SEQ ID NO: 1568417 - RNA, 19 nt, Human adenovirus D
gucgcccgaguuguccugg

SEQ ID NO: 1568418 - RNA, 20 nt, Human adenovirus D
uggcgccgggccugggcgug

SEQ ID NO: 1568419 - RNA, 17 nt, Human adenovirus D
acgacauccuggaccag

SEQ ID NO: 1568420 - RNA, 21 nt, Human adenovirus D
gugaaggccggcaugcccacc

SEQ ID NO: 1568421 - RNA, 15 nt, Human adenovirus D
gcugaacgccuuccu

SEQ ID NO: 1568422 - RNA, 15 nt, Human adenovirus D
gccgcgagaccggag

SEQ ID NO: 1568423 - RNA, 22 nt, Human adenovirus D
cgggugaccccgacgccccuga

SEQ ID NO: 1568424 - RNA, 21 nt, Human adenovirus D
cggcaaucaacuacucggugc

SEQ ID NO: 1568425 - RNA, 16 nt, Human adenovirus D
cgugcgcgaccugggc

SEQ ID NO: 1568426 - RNA, 15 nt, Human adenovirus D
gccguagagguagcg

SEQ ID NO: 1568427 - RNA, 18 nt, Human adenovirus D
uaaaaacaacaaaaccac

SEQ ID NO: 1568428 - RNA, 19 nt, Human adenovirus D
caccaacgugcccaucucc

SEQ ID NO: 1568429 - RNA, 20 nt, Human adenovirus D
ccuggaucuugagguuggcg

SEQ ID NO: 1568430 - RNA, 12 nt, Human adenovirus D
ggagcaggagga

SEQ ID NO: 1568431 - RNA, 21 nt, Human adenovirus D
ggcaguauaucaggugccugc

SEQ ID NO: 1568432 - RNA, 21 nt, Human adenovirus D
aggacuuggaugaggaagagg

SEQ ID NO: 1568433 - RNA, 17 nt, Human adenovirus D
caggagcgcagccugag

SEQ ID NO: 1568434 - RNA, 21 nt, Human adenovirus D
accuacuccucuuugcccugc

SEQ ID NO: 1568435 - RNA, 19 nt, Human adenovirus D
caagcagguggcgccgggc

SEQ ID NO: 1568436 - RNA, 15 nt, Human adenovirus D
acgcaggccaggagg

SEQ ID NO: 1568437 - RNA, 22 nt, Human adenovirus D
uuaacauccucuucugucucuu

SEQ ID NO: 1568438 - RNA, 12 nt, Human adenovirus D
gccuuaccuggu

SEQ ID NO: 1568439 - RNA, 18 nt, Human adenovirus D
gccuccccgcagaaauca

SEQ ID NO: 1568440 - RNA, 23 nt, Human adenovirus D
gcugaggaaucggaucuucccca

SEQ ID NO: 1568441 - RNA, 21 nt, Human adenovirus D
augagcagcuugcgcgcuggc

SEQ ID NO: 1568442 - RNA, 23 nt, Human adenovirus D
agacgcugaaaggcgggcugccc

SEQ ID NO: 1568443 - RNA, 15 nt, Human adenovirus D
ucccgccgcaggaga

SEQ ID NO: 1568444 - RNA, 13 nt, Human adenovirus D
cgcgcgcuggggc

SEQ ID NO: 1568445 - RNA, 14 nt, Human adenovirus D
gcgcuggggcagaa

SEQ ID NO: 1568446 - RNA, 16 nt, Human adenovirus D
uacacgggguugcagc

SEQ ID NO: 1568447 - RNA, 18 nt, Human adenovirus D
ccaaggcacccaccacag

SEQ ID NO: 1568448 - RNA, 15 nt, Human adenovirus D
cgaugagcagcuugc

SEQ ID NO: 1568449 - RNA, 23 nt, Human adenovirus D
acagcaguacaagcgccaacagc

SEQ ID NO: 1568450 - RNA, 17 nt, Human adenovirus D
ugcgagccgcgcgccgc

SEQ ID NO: 1568451 - RNA, 14 nt, Human adenovirus D
gcggccagcgcugg

SEQ ID NO: 1568452 - RNA, 16 nt, Human adenovirus D
gauguuggcuugcccu

SEQ ID NO: 1568453 - RNA, 21 nt, Human adenovirus D
ccaggaggcggugcgcacgcc

SEQ ID NO: 1568454 - RNA, 16 nt, Human adenovirus D
ucacucuuuccagcag

SEQ ID NO: 1568455 - RNA, 14 nt, Human adenovirus D
cuaggcccagcagc

SEQ ID NO: 1568456 - RNA, 15 nt, Human adenovirus D
ggugagggcgugcuu

SEQ ID NO: 1568457 - RNA, 16 nt, Human adenovirus D
guuccguuugugccuc

SEQ ID NO: 1568458 - RNA, 18 nt, Human adenovirus D
gauucagccauagcucag

SEQ ID NO: 1568459 - RNA, 14 nt, Human adenovirus D
ggaccgccagcgcg

SEQ ID NO: 1568460 - RNA, 13 nt, Human adenovirus D
uggcuugcaugaa

SEQ ID NO: 1568461 - RNA, 16 nt, Human adenovirus D
cugcugccgcucaguc

SEQ ID NO: 1568462 - RNA, 17 nt, Human adenovirus D
ucacucuggccgugggc

SEQ ID NO: 1568463 - RNA, 14 nt, Human adenovirus D
gccgaacgagcaga

SEQ ID NO: 1568464 - RNA, 22 nt, Human adenovirus D
gagaauuuuuguuguacucugu

SEQ ID NO: 1568465 - RNA, 15 nt, Human adenovirus D
ucacaucagccagga

SEQ ID NO: 1568466 - RNA, 13 nt, Human adenovirus D
cccucccucggcu

SEQ ID NO: 1568467 - RNA, 23 nt, Human adenovirus D
uuggaggaagaaaugaggcaggc

SEQ ID NO: 1568468 - RNA, 22 nt, Human adenovirus D
guaucugaggcauauaaaaaug

SEQ ID NO: 1568469 - RNA, 22 nt, Human adenovirus D
uggccccggggcggaguggccu

SEQ ID NO: 1568470 - RNA, 17 nt, Human adenovirus D
cgcaaugcgggccugcg

SEQ ID NO: 1568471 - RNA, 14 nt, Human adenovirus D
gcaauccuccagga

SEQ ID NO: 1568472 - RNA, 14 nt, Human adenovirus D
caacagccgcaggc

SEQ ID NO: 1568473 - RNA, 15 nt, Human adenovirus D
ucagggugcuccagc

SEQ ID NO: 1568474 - RNA, 17 nt, Human adenovirus D
gcagcgcugcacgggcu

SEQ ID NO: 1568475 - RNA, 19 nt, Human adenovirus D
ugcaccagccgcaccgcgg

SEQ ID NO: 1568476 - RNA, 21 nt, Human adenovirus D
gagggcaugggucaggcagcg

SEQ ID NO: 1568477 - RNA, 21 nt, Human adenovirus D
uuacaccgcgucgcugaaagc

SEQ ID NO: 1568478 - RNA, 22 nt, Human adenovirus D
gucuucccucucagaugucaaa

SEQ ID NO: 1568479 - RNA, 13 nt, Human adenovirus D
gcccgccaccugc

SEQ ID NO: 1568480 - RNA, 18 nt, Human adenovirus D
auuuuuguuguacucugu

SEQ ID NO: 1568481 - RNA, 18 nt, Human adenovirus D
ggugaaccugagccaggc

SEQ ID NO: 1568482 - RNA, 16 nt, Human adenovirus D
cgccgagccugaagcc

SEQ ID NO: 1568483 - RNA, 15 nt, Human adenovirus D
cgccuccacccugga

SEQ ID NO: 1568484 - RNA, 14 nt, Human adenovirus D
cgucggaagaggag

SEQ ID NO: 1568485 - RNA, 16 nt, Human adenovirus D
accaauagacagcaga

SEQ ID NO: 1568486 - RNA, 21 nt, Human adenovirus D
cgcgagcugaugcugagccug

SEQ ID NO: 1568487 - RNA, 16 nt, Human adenovirus D
ggaagggaaugcgugg

SEQ ID NO: 1568488 - RNA, 20 nt, Human adenovirus D
ccaugcgaauuccccucauc

SEQ ID NO: 1568489 - RNA, 14 nt, Human adenovirus D
agucugagggccac

SEQ ID NO: 1568490 - RNA, 18 nt, Human adenovirus D
gcacagacaccgucgccg

SEQ ID NO: 1568491 - RNA, 20 nt, Human adenovirus D
ccaccgugugcagacacaug

SEQ ID NO: 1568492 - RNA, 23 nt, Human adenovirus D
ggaugaaccuuuggaccugagcu

SEQ ID NO: 1568493 - RNA, 22 nt, Human adenovirus D
gaagacggcguaguugcgcagg

SEQ ID NO: 1568494 - RNA, 19 nt, Human adenovirus D
cugcaacugcgcguccguc

SEQ ID NO: 1568495 - RNA, 21 nt, Human adenovirus D
gccaccagucccuuuuccagg

SEQ ID NO: 1568496 - RNA, 11 nt, Human adenovirus D
caggagaggca

SEQ ID NO: 1568497 - RNA, 16 nt, Human adenovirus D
uggggcgugcaggcgc

SEQ ID NO: 1568498 - RNA, 22 nt, Human adenovirus D
gcgggacauccaggugaugccg

SEQ ID NO: 1568499 - RNA, 16 nt, Human adenovirus D
cgagcgcaccgucgcc

SEQ ID NO: 1568500 - RNA, 17 nt, Human adenovirus D
aagcaguucacuagccu

SEQ ID NO: 1568501 - RNA, 20 nt, Human adenovirus D
cagggcgcgauccucgccca

SEQ ID NO: 1568502 - RNA, 14 nt, Human adenovirus D
ccaggccaaccugu

SEQ ID NO: 1568503 - RNA, 24 nt, Human adenovirus D
gagaggcauggcaggcagcggccu

SEQ ID NO: 1568504 - RNA, 14 nt, Human adenovirus D
accagaccaccugg

SEQ ID NO: 1568505 - RNA, 14 nt, Human adenovirus D
ugaacugauguuga

SEQ ID NO: 1568506 - RNA, 18 nt, Human adenovirus D
cuggcucccagccuccac

SEQ ID NO: 1568507 - RNA, 14 nt, Human adenovirus D
gcccaguuccauca

SEQ ID NO: 1568508 - RNA, 17 nt, Human adenovirus D
gauacagaguaaaagua

SEQ ID NO: 1568509 - RNA, 20 nt, Human adenovirus D
aacaaucagccccuuccccu

SEQ ID NO: 1568510 - RNA, 21 nt, Human adenovirus D
cgagcucugcugcgccgcgcc

SEQ ID NO: 1568511 - RNA, 13 nt, Human adenovirus D
ggccauggacgag

SEQ ID NO: 1568512 - RNA, 21 nt, Human adenovirus D
ucaccggcuaccuugcaccca

SEQ ID NO: 1568513 - RNA, 20 nt, Human adenovirus D
uggcaaagcgguugagcugg

SEQ ID NO: 1568514 - RNA, 15 nt, Human adenovirus D
caagaacgagggccu

SEQ ID NO: 1568515 - RNA, 12 nt, Human adenovirus D
aaaucuuuaucu

SEQ ID NO: 1568516 - RNA, 17 nt, Human adenovirus D
auauuccagaucacaug

SEQ ID NO: 1568517 - RNA, 21 nt, Human adenovirus D
gacagucugagggccacccug

SEQ ID NO: 1568518 - RNA, 15 nt, Human adenovirus D
aacaucugugcugcc

SEQ ID NO: 1568519 - RNA, 21 nt, Human adenovirus D
caccgucgccucggaccuggc

SEQ ID NO: 1568520 - RNA, 20 nt, Human adenovirus D
aaauacagaugguagcagca

SEQ ID NO: 1568521 - RNA, 23 nt, Human adenovirus D
cagcucaacgacgaguuggugag

SEQ ID NO: 1568522 - RNA, 16 nt, Human adenovirus D
ggaccaccaggacggu

SEQ ID NO: 1568523 - RNA, 19 nt, Human adenovirus D
ccgaagcgccguggccucu

SEQ ID NO: 1568524 - RNA, 19 nt, Human adenovirus D
ucaugccacgaacagccac

SEQ ID NO: 1568525 - RNA, 15 nt, Human adenovirus D
gcccacguccaaaau

SEQ ID NO: 1568526 - RNA, 22 nt, Human adenovirus D
gcaggccgugcugcucgagcgc

SEQ ID NO: 1568527 - RNA, 16 nt, Human adenovirus D
gaugcugcccgccacc

SEQ ID NO: 1568528 - RNA, 13 nt, Human adenovirus D
gccaguggcccug

SEQ ID NO: 1568529 - RNA, 18 nt, Human adenovirus D
gacacguacuucagccug

SEQ ID NO: 1568530 - RNA, 22 nt, Human adenovirus D
ggaggagaccgacgcugggcuc

SEQ ID NO: 1568531 - RNA, 17 nt, Human adenovirus D
cugagccugcgccgggc

SEQ ID NO: 1568532 - RNA, 19 nt, Human adenovirus D
ugagccagagcauguugca

SEQ ID NO: 1568533 - RNA, 18 nt, Human adenovirus D
ccgcgggcaggggcggca

SEQ ID NO: 1568534 - RNA, 15 nt, Human adenovirus D
ccucggaccuggccg

SEQ ID NO: 1568535 - RNA, 22 nt, Human adenovirus D
caaagcuagcacccaaaaacug

SEQ ID NO: 1568536 - RNA, 20 nt, Human adenovirus D
uccugaaccacacggccagc

SEQ ID NO: 1568537 - RNA, 14 nt, Human adenovirus D
ccaccaccagccca

SEQ ID NO: 1568538 - RNA, 23 nt, Human adenovirus D
cacgauguaacaucaccacaggc

SEQ ID NO: 1568539 - RNA, 21 nt, Human adenovirus D
caagauagcccugcgcccaga

SEQ ID NO: 1568540 - RNA, 21 nt, Human adenovirus D
gggaguuugcauagcuugccg

SEQ ID NO: 1568541 - RNA, 18 nt, Human adenovirus D
ugugcucuccgcaccgcu

SEQ ID NO: 1568542 - RNA, 19 nt, Human adenovirus D
gcagaggucuggggcgcuu

SEQ ID NO: 1568543 - RNA, 19 nt, Human adenovirus D
augccaagauagcccugcg

SEQ ID NO: 1568544 - RNA, 15 nt, Human adenovirus D
cccagcgaucccagc

SEQ ID NO: 1568545 - RNA, 16 nt, Human adenovirus D
caugaaagaacauaca

SEQ ID NO: 1568546 - RNA, 12 nt, Human adenovirus D
cgccaccugcaa

SEQ ID NO: 1568547 - RNA, 22 nt, Human adenovirus D
uggcgcacaacaccgccuccac

SEQ ID NO: 1568548 - RNA, 20 nt, Human adenovirus D
cugacaauucagagccaggg

SEQ ID NO: 1568549 - RNA, 16 nt, Human adenovirus D
ugcaccauccccaggu

SEQ ID NO: 1568550 - RNA, 15 nt, Human adenovirus D
uugcgcccugagagc

SEQ ID NO: 1568551 - RNA, 13 nt, Human adenovirus D
agcggggccuggu

SEQ ID NO: 1568552 - RNA, 12 nt, Human adenovirus D
aaggggcgcagg

SEQ ID NO: 1568553 - RNA, 15 nt, Human adenovirus D
gcgcacaacaccgcc

SEQ ID NO: 1568554 - RNA, 14 nt, Human adenovirus D
ggugcuuagccugg

SEQ ID NO: 1568555 - RNA, 14 nt, Human adenovirus D
gaacuuuagaagug

SEQ ID NO: 1568556 - RNA, 23 nt, Human adenovirus D
guugaggcaccuagaccacugcc

SEQ ID NO: 1568557 - RNA, 14 nt, Human adenovirus D
cagcugccauggga

SEQ ID NO: 1568558 - RNA, 15 nt, Human adenovirus D
accagaacuuccagc

SEQ ID NO: 1568559 - RNA, 17 nt, Human adenovirus D
gcagcuguuccuggugg

SEQ ID NO: 1568560 - RNA, 22 nt, Human adenovirus D
gagauagcaguugaccaugagc

SEQ ID NO: 1568561 - RNA, 22 nt, Human adenovirus D
cgccgacgcgcuccucgcucug

SEQ ID NO: 1568562 - RNA, 21 nt, Human adenovirus D
cgcguggaggaagugcuggac

SEQ ID NO: 1568563 - RNA, 19 nt, Human adenovirus D
accgcgucgcugaaagcau

SEQ ID NO: 1568564 - RNA, 12 nt, Human adenovirus D
aauauggccugg

SEQ ID NO: 1568565 - RNA, 16 nt, Human adenovirus D
gaaguaaauuugacac

SEQ ID NO: 1568566 - RNA, 21 nt, Human adenovirus D
caaaacuaauuacagucacua

SEQ ID NO: 1568567 - RNA, 16 nt, Human adenovirus D
cggggaucagccccgc

SEQ ID NO: 1568568 - RNA, 13 nt, Human adenovirus D
aggugagcucugg

SEQ ID NO: 1568569 - RNA, 18 nt, Human adenovirus D
cauccgcgccgcagcccg

SEQ ID NO: 1568570 - RNA, 23 nt, Human adenovirus D
aacgaggcguucagggaggcgcu

SEQ ID NO: 1568571 - RNA, 13 nt, Human adenovirus D
agcuggcccggca

SEQ ID NO: 1568572 - RNA, 21 nt, Human adenovirus D
acccuaaggcucccuugcaac

SEQ ID NO: 1568573 - RNA, 14 nt, Human adenovirus D
gagcuggccuucca

SEQ ID NO: 1568574 - RNA, 20 nt, Human adenovirus D
gaggagaacugcuggcccug

SEQ ID NO: 1568575 - RNA, 22 nt, Human adenovirus D
ccucuccaucagcgcccucagc

SEQ ID NO: 1568576 - RNA, 13 nt, Human adenovirus D
cucuugcagcugg

SEQ ID NO: 1568577 - RNA, 21 nt, Human adenovirus D
cgacgaguuggugagcucuuc

SEQ ID NO: 1568578 - RNA, 15 nt, Human adenovirus D
cucccgccccuucga

SEQ ID NO: 1568579 - RNA, 20 nt, Human adenovirus D
agcauaauauggugaagggc

SEQ ID NO: 1568580 - RNA, 16 nt, Human adenovirus D
cucgguacccuccucc

SEQ ID NO: 1568581 - RNA, 23 nt, Human adenovirus D
ccccauggaugagcccaccgucc

SEQ ID NO: 1568582 - RNA, 18 nt, Human adenovirus D
gcuggaagcccugagccg

SEQ ID NO: 1568583 - RNA, 15 nt, Human adenovirus D
caacgcgcgcugccc

SEQ ID NO: 1568584 - RNA, 12 nt, Human adenovirus D
ccgcgcugggga

SEQ ID NO: 1568585 - RNA, 22 nt, Human adenovirus D
ggccuacuuuuugggcacccac

SEQ ID NO: 1568586 - RNA, 18 nt, Human adenovirus D
gcucccggcggcagcggc

SEQ ID NO: 1568587 - RNA, 18 nt, Human adenovirus D
augccccagcagaagcag

SEQ ID NO: 1568588 - RNA, 23 nt, Human adenovirus D
ccaggauacgcgggaagagcccu

SEQ ID NO: 1568589 - RNA, 15 nt, Human adenovirus D
ugggcucgcuggugg

SEQ ID NO: 1568590 - RNA, 21 nt, Human adenovirus D
caccgcaaugcgggccugcgc

SEQ ID NO: 1568591 - RNA, 13 nt, Human adenovirus D
aauaacaugcuga

SEQ ID NO: 1568592 - RNA, 15 nt, Human adenovirus D
cgcccucagcagucu

SEQ ID NO: 1568593 - RNA, 13 nt, Human adenovirus D
cagccuccaccgc

SEQ ID NO: 1568594 - RNA, 13 nt, Human adenovirus D
cgucccagcagca

SEQ ID NO: 1568595 - RNA, 15 nt, Human adenovirus D
acgaugagaccaagu

SEQ ID NO: 1568596 - RNA, 21 nt, Human adenovirus D
gccgccaucgaacacgccacc

SEQ ID NO: 1568597 - RNA, 20 nt, Human adenovirus D
ggugguguucacgcccggcg

SEQ ID NO: 1568598 - RNA, 19 nt, Human adenovirus D
gagaacugcuggcccugcu

SEQ ID NO: 1568599 - RNA, 17 nt, Human adenovirus D
ggcgggggugaugagcu

SEQ ID NO: 1568600 - RNA, 19 nt, Human adenovirus D
ccauagucaucacccagca

SEQ ID NO: 1568601 - RNA, 17 nt, Human adenovirus D
uaaguguaagagcaaga

SEQ ID NO: 1568602 - RNA, 23 nt, Human adenovirus D
cgccgauuuaaagacccacagcc

SEQ ID NO: 1568603 - RNA, 18 nt, Human adenovirus D
cccagcucauccgcagcu

SEQ ID NO: 1568604 - RNA, 15 nt, Human adenovirus D
agaaagcaguucacu

SEQ ID NO: 1568605 - RNA, 21 nt, Human adenovirus D
gugcugacauccauggccagg

SEQ ID NO: 1568606 - RNA, 23 nt, Human adenovirus D
cagcaacuucauguccaugggcg

SEQ ID NO: 1568607 - RNA, 20 nt, Human adenovirus D
ugccggcgacaagcuggccu

SEQ ID NO: 1568608 - RNA, 19 nt, Human adenovirus D
caggguaaagccagcagca

SEQ ID NO: 1568609 - RNA, 23 nt, Human adenovirus D
gccguguccacgcauugcaugag

SEQ ID NO: 1568610 - RNA, 21 nt, Human adenovirus D
cgggcugcuucugccugguga

SEQ ID NO: 1568611 - RNA, 13 nt, Human adenovirus D
aguucagcuccag

SEQ ID NO: 1568612 - RNA, 21 nt, Human adenovirus D
gaccaaucgcgcccgcagcac

SEQ ID NO: 1568613 - RNA, 17 nt, Human adenovirus D
auagcaggggcgcuggg

SEQ ID NO: 1568614 - RNA, 17 nt, Human adenovirus D
agcaggggcgcugggcg

SEQ ID NO: 1568615 - RNA, 18 nt, Human adenovirus D
uggugggauaacagcgcc

SEQ ID NO: 1568616 - RNA, 18 nt, Human adenovirus D
gaccuugcagagcagcuc

SEQ ID NO: 1568617 - RNA, 22 nt, Human adenovirus D
cggccguccuuucgcugcugcc

SEQ ID NO: 1568618 - RNA, 20 nt, Human adenovirus D
cuggagaagcaucgccaggg

SEQ ID NO: 1568619 - RNA, 20 nt, Human adenovirus D
gaagggcaucuucugccugg

SEQ ID NO: 1568620 - RNA, 17 nt, Human adenovirus D
caucaagcaagaugaua

SEQ ID NO: 1568621 - RNA, 22 nt, Human adenovirus D
acaacugcguguaucucaauaa

SEQ ID NO: 1568622 - RNA, 22 nt, Human adenovirus D
gauacgaggcagaggcacacag

SEQ ID NO: 1568623 - RNA, 20 nt, Human adenovirus D
ucuuccgcaacuuccagccc

SEQ ID NO: 1568624 - RNA, 20 nt, Human adenovirus D
cgcaggcgcccagccagcaa

SEQ ID NO: 1568625 - RNA, 16 nt, Human adenovirus D
cugacggcgcagcugu

SEQ ID NO: 1568626 - RNA, 16 nt, Human adenovirus D
cgagaagaacgcacag

SEQ ID NO: 1568627 - RNA, 17 nt, Human adenovirus D
  misc_feature (8)..(8): n is a, c, g, or u
cggccgangggagucgc

SEQ ID NO: 1568628 - RNA, 20 nt, Human adenovirus D
gcccaacucgcggcugcugc

SEQ ID NO: 1568629 - RNA, 16 nt, Human adenovirus D
aacucagucacucuca

SEQ ID NO: 1568630 - RNA, 14 nt, Human adenovirus D
gaagaagagcagca

SEQ ID NO: 1568631 - RNA, 20 nt, Human adenovirus D
ggccugcgucaucacccagg

SEQ ID NO: 1568632 - RNA, 17 nt, Human adenovirus D
caaaacuuaacucugau

SEQ ID NO: 1568633 - RNA, 16 nt, Human adenovirus D
cacgggccgccgggcc

SEQ ID NO: 1568634 - RNA, 16 nt, Human adenovirus D
gcuagacaccacagug

SEQ ID NO: 1568635 - RNA, 23 nt, Human adenovirus D
acaguagcgucucaagagagguu

SEQ ID NO: 1568636 - RNA, 17 nt, Human adenovirus D
acagcgccacgaccggc

SEQ ID NO: 1568637 - RNA, 17 nt, Human adenovirus D
gcccagugcuuccagca

SEQ ID NO: 1568638 - RNA, 16 nt, Human adenovirus D
caaaacucacuuuggu

SEQ ID NO: 1568639 - RNA, 17 nt, Human adenovirus D
gauacuguugcagagag

SEQ ID NO: 1568640 - RNA, 14 nt, Human adenovirus D
cagccuccaccgcu

SEQ ID NO: 1568641 - RNA, 14 nt, Human adenovirus D
uccguccgcuucga

SEQ ID NO: 1568642 - RNA, 12 nt, Human adenovirus D
gacccccaggcc

SEQ ID NO: 1568643 - RNA, 18 nt, Human adenovirus D
gaagcagaaguucaccug

SEQ ID NO: 1568644 - RNA, 16 nt, Human adenovirus D
aacagcauauaccccu

SEQ ID NO: 1568645 - RNA, 16 nt, Human adenovirus D
cucucuuugugucucc

SEQ ID NO: 1568646 - RNA, 16 nt, Human adenovirus D
ggaaccccaccaugaa

SEQ ID NO: 1568647 - RNA, 14 nt, Human adenovirus D
cuccguggggcgcu

SEQ ID NO: 1568648 - RNA, 14 nt, Human adenovirus D
aggcgcccgugggc

SEQ ID NO: 1568649 - RNA, 14 nt, Human adenovirus D
cauacuuauggcuc

SEQ ID NO: 1568650 - RNA, 17 nt, Human adenovirus D
ucaacuguuaagaccac

SEQ ID NO: 1568651 - RNA, 20 nt, Human adenovirus D
ccugagcgagacccagguca

SEQ ID NO: 1568652 - RNA, 18 nt, Human adenovirus D
ggcugcauccacugcucc

SEQ ID NO: 1568653 - RNA, 18 nt, Human adenovirus D
gcgugcccgugcgcaccc

SEQ ID NO: 1568654 - RNA, 15 nt, Human adenovirus D
ggccugaugcaggau

SEQ ID NO: 1568655 - RNA, 19 nt, Human adenovirus D
ccggcauccugcacgcagc

SEQ ID NO: 1568656 - RNA, 14 nt, Human adenovirus D
ggcgaccagcucug

SEQ ID NO: 1568657 - RNA, 16 nt, Human adenovirus D
cuuccucacucccccc

SEQ ID NO: 1568658 - RNA, 15 nt, Human adenovirus D
gugcuaaagcucuuc

SEQ ID NO: 1568659 - RNA, 14 nt, Human adenovirus D
cgggaucgccaggc

SEQ ID NO: 1568660 - RNA, 16 nt, Human adenovirus D
ucgucccggaggaggg

SEQ ID NO: 1568661 - RNA, 16 nt, Human adenovirus D
ccggcgacaagcuggc

SEQ ID NO: 1568662 - RNA, 13 nt, Human adenovirus D
ucaucacccagca

SEQ ID NO: 1568663 - RNA, 12 nt, Human adenovirus D
uauuuccucugu

SEQ ID NO: 1568664 - RNA, 21 nt, Human adenovirus D
ggugaagaugccgggacagag

SEQ ID NO: 1568665 - RNA, 17 nt, Human adenovirus D
acaaagagcacagcagu

SEQ ID NO: 1568666 - RNA, 21 nt, Human adenovirus D
ccgcguccccgcccgccgcca

SEQ ID NO: 1568667 - RNA, 17 nt, Human adenovirus D
aguugagggugguggcg

SEQ ID NO: 1568668 - RNA, 15 nt, Human adenovirus D
accucccucacccac

SEQ ID NO: 1568669 - RNA, 16 nt, Human adenovirus D
gcaggaccaccaggac

SEQ ID NO: 1568670 - RNA, 19 nt, Human adenovirus D
ccagaucucggcgcggcgg

SEQ ID NO: 1568671 - RNA, 16 nt, Human adenovirus D
gcacuggagcacagac

SEQ ID NO: 1568672 - RNA, 16 nt, Human adenovirus D
cuuguuagagaugagg

SEQ ID NO: 1568673 - RNA, 18 nt, Human adenovirus D
cagagggggcgguggcag

SEQ ID NO: 1568674 - RNA, 18 nt, Human adenovirus D
cacgguaagagcccagca

SEQ ID NO: 1568675 - RNA, 20 nt, Human adenovirus D
gcuuguaagcaucgcgcagg

SEQ ID NO: 1568676 - RNA, 19 nt, Human adenovirus D
ccuaugggaacaaggccug

SEQ ID NO: 1568677 - RNA, 16 nt, Human adenovirus D
acgcaggccaggagga

SEQ ID NO: 1568678 - RNA, 22 nt, Human adenovirus D
gagcugagaccagaccaccugg

SEQ ID NO: 1568679 - RNA, 15 nt, Human adenovirus D
ucccgacgaggccgg

SEQ ID NO: 1568680 - RNA, 21 nt, Human adenovirus D
ccagaaggggcaccuuccagc

SEQ ID NO: 1568681 - RNA, 12 nt, Human adenovirus D
ccgggccugggc

SEQ ID NO: 1568682 - RNA, 19 nt, Human adenovirus D
agguuugaguagugggcgu

SEQ ID NO: 1568683 - RNA, 23 nt, Human adenovirus D
gagcugagaccagaccaccuggu

SEQ ID NO: 1568684 - RNA, 23 nt, Human adenovirus D
cuuccaugcgggugaccccgacg

SEQ ID NO: 1568685 - RNA, 14 nt, Human adenovirus D
gccggcggcgcgag

SEQ ID NO: 1568686 - RNA, 15 nt, Human adenovirus D
ccacgaacagccacg

SEQ ID NO: 1568687 - RNA, 16 nt, Human adenovirus D
ugguagggggcgccgc

SEQ ID NO: 1568688 - RNA, 17 nt, Human adenovirus D
cuuguuauugagcccau

SEQ ID NO: 1568689 - RNA, 20 nt, Human adenovirus D
caggacucgcagacgagcgg

SEQ ID NO: 1568690 - RNA, 18 nt, Human adenovirus D
ggaggcacagacgaagaa

SEQ ID NO: 1568691 - RNA, 18 nt, Human adenovirus D
gacuucaugagccagagc

SEQ ID NO: 1568692 - RNA, 18 nt, Human adenovirus D
caggcgccugaguggcgg

SEQ ID NO: 1568693 - RNA, 18 nt, Human adenovirus D
aguggcaacaccugggca

SEQ ID NO: 1568694 - RNA, 12 nt, Human adenovirus D
ggcaccagccag

SEQ ID NO: 1568695 - RNA, 14 nt, Human adenovirus D
uacaagauccugag

SEQ ID NO: 1568696 - RNA, 15 nt, Human adenovirus D
ccugcauuggcagcc

SEQ ID NO: 1568697 - RNA, 12 nt, Human adenovirus D
agcgccagcugu

SEQ ID NO: 1568698 - RNA, 23 nt, Human adenovirus D
caggguagcggggcacaggcaca

SEQ ID NO: 1568699 - RNA, 20 nt, Human adenovirus D
augcagggugaccaggucca

SEQ ID NO: 1568700 - RNA, 17 nt, Human adenovirus D
gaaacaagucaaaagaa

SEQ ID NO: 1568701 - RNA, 20 nt, Human adenovirus D
agcauggcuaccugggagga

SEQ ID NO: 1568702 - RNA, 15 nt, Human adenovirus D
cagaccaagcugcug

SEQ ID NO: 1568703 - RNA, 17 nt, Human adenovirus D
gacucacccuggggcuc

SEQ ID NO: 1568704 - RNA, 16 nt, Human adenovirus D
acaggcacacugacau

SEQ ID NO: 1568705 - RNA, 18 nt, Human adenovirus D
cucgcucgguugaggcac

SEQ ID NO: 1568706 - RNA, 15 nt, Human adenovirus D
agaaaugaggcaggc

SEQ ID NO: 1568707 - RNA, 19 nt, Human adenovirus D
gacacguacuucagccugg

SEQ ID NO: 1568708 - RNA, 22 nt, Human adenovirus D
cauaucccaggggacuggaaac

SEQ ID NO: 1568709 - RNA, 15 nt, Human adenovirus D
uugaggcauucacau

SEQ ID NO: 1568710 - RNA, 15 nt, Human adenovirus D
ccagaacuuccagca

SEQ ID NO: 1568711 - RNA, 13 nt, Human adenovirus D
ggacggccaggcc

SEQ ID NO: 1568712 - RNA, 22 nt, Human adenovirus D
cgaugagaucaacuacaaggac

SEQ ID NO: 1568713 - RNA, 22 nt, Human adenovirus D
agcccagggcgcacuacagccg

SEQ ID NO: 1568714 - RNA, 16 nt, Human adenovirus D
gcccauuccuggagau

SEQ ID NO: 1568715 - RNA, 16 nt, Human adenovirus D
cagucugagggccacc

SEQ ID NO: 1568716 - RNA, 22 nt, Human adenovirus D
cuaaugacagaggcaacagcaa

SEQ ID NO: 1568717 - RNA, 13 nt, Human adenovirus D
cuucgugcacugg

SEQ ID NO: 1568718 - RNA, 20 nt, Human adenovirus D
gcagugucucgaggacgaga

SEQ ID NO: 1568719 - RNA, 18 nt, Human adenovirus D
cucuucgcagaaccauga

SEQ ID NO: 1568720 - RNA, 17 nt, Human adenovirus D
ccaacagccacaugacc

SEQ ID NO: 1568721 - RNA, 17 nt, Human adenovirus D
gagccugcgcccgcgcc

SEQ ID NO: 1568722 - RNA, 22 nt, Human adenovirus D
gcauccuuuaauccgugugcug

SEQ ID NO: 1568723 - RNA, 18 nt, Human adenovirus D
augggaacaaggccugga

SEQ ID NO: 1568724 - RNA, 14 nt, Human adenovirus D
caggucaaaaccca

SEQ ID NO: 1568725 - RNA, 22 nt, Human adenovirus D
acgucaucgacucgguggucgc

SEQ ID NO: 1568726 - RNA, 14 nt, Human adenovirus D
agcgcgcugcggcu

SEQ ID NO: 1568727 - RNA, 14 nt, Human adenovirus D
agaucaucauaaga

SEQ ID NO: 1568728 - RNA, 22 nt, Human adenovirus D
uuaccucaucgccaccaugagc

SEQ ID NO: 1568729 - RNA, 12 nt, Human adenovirus D
cgacccccaggc

SEQ ID NO: 1568730 - RNA, 22 nt, Human adenovirus D
caagcuaaauuuaagccagugg

SEQ ID NO: 1568731 - RNA, 12 nt, Human adenovirus D
cguucaugggca

SEQ ID NO: 1568732 - RNA, 19 nt, Human adenovirus D
cagccuuuccauggccucg

SEQ ID NO: 1568733 - RNA, 15 nt, Human adenovirus D
ucaucaaucaucagg

SEQ ID NO: 1568734 - RNA, 21 nt, Human adenovirus D
uguuggaggaagaaaugaggc

SEQ ID NO: 1568735 - RNA, 19 nt, Human adenovirus D
cccgccauggggcgccgcc

SEQ ID NO: 1568736 - RNA, 14 nt, Human adenovirus D
agccgcaggccaac

SEQ ID NO: 1568737 - RNA, 18 nt, Human adenovirus D
acuccuacaauacucugg

SEQ ID NO: 1568738 - RNA, 22 nt, Human adenovirus D
acuggcugacccaaucaccaua

SEQ ID NO: 1568739 - RNA, 14 nt, Human adenovirus D
augccccagcagaa

SEQ ID NO: 1568740 - RNA, 14 nt, Human adenovirus D
uggccaacagccac

SEQ ID NO: 1568741 - RNA, 19 nt, Human adenovirus D
gcgacgcuuuuucagcgac

SEQ ID NO: 1568742 - RNA, 19 nt, Human adenovirus D
gacgggcuuugacgagcgc

SEQ ID NO: 1568743 - RNA, 13 nt, Human adenovirus D
guugaacccagau

SEQ ID NO: 1568744 - RNA, 14 nt, Human adenovirus D
ggcgcugcaaagcc

SEQ ID NO: 1568745 - RNA, 15 nt, Human adenovirus D
caaucagccccuucc

SEQ ID NO: 1568746 - RNA, 21 nt, Human adenovirus D
uggaagagggcgaagggcugg

SEQ ID NO: 1568747 - RNA, 17 nt, Human adenovirus D
ggccgcagcucuucccg

SEQ ID NO: 1568748 - RNA, 13 nt, Human adenovirus D
aagaucagcugca

SEQ ID NO: 1568749 - RNA, 19 nt, Human adenovirus D
augcagacacuugagcugg

SEQ ID NO: 1568750 - RNA, 17 nt, Human adenovirus D
gcuggcgagacuggggg

SEQ ID NO: 1568751 - RNA, 16 nt, Human adenovirus D
aggacgagaaccugaa

SEQ ID NO: 1568752 - RNA, 19 nt, Human adenovirus D
ccuggucacccucgagcuc

SEQ ID NO: 1568753 - RNA, 14 nt, Human adenovirus D
cagugcccccucca

SEQ ID NO: 1568754 - RNA, 18 nt, Human adenovirus D
aucacaucggacuggguu

SEQ ID NO: 1568755 - RNA, 21 nt, Human adenovirus D
ccgcugucucagccucgaaca

SEQ ID NO: 1568756 - RNA, 12 nt, Human adenovirus D
ugcaagaaggaa

SEQ ID NO: 1568757 - RNA, 18 nt, Human adenovirus D
gcugagcgaccgcgagcu

SEQ ID NO: 1568758 - RNA, 15 nt, Human adenovirus D
ggccagucugaugaa

SEQ ID NO: 1568759 - RNA, 14 nt, Human adenovirus D
ugguccuggucacc

SEQ ID NO: 1568760 - RNA, 18 nt, Human adenovirus D
gcaggugcugccccaggc

SEQ ID NO: 1568761 - RNA, 14 nt, Human adenovirus D
ugaacccagaugag

SEQ ID NO: 1568762 - RNA, 16 nt, Human adenovirus D
gucacuuuugcccuua

SEQ ID NO: 1568763 - RNA, 20 nt, Human adenovirus D
cgcgcuggacaugaccgcgc

SEQ ID NO: 1568764 - RNA, 12 nt, Human adenovirus D
cgugaaggccgg

SEQ ID NO: 1568765 - RNA, 19 nt, Human adenovirus D
aggcgaaacgccccugcaa

SEQ ID NO: 1568766 - RNA, 23 nt, Human adenovirus D
ggucccuucucggaccaacccca

SEQ ID NO: 1568767 - RNA, 21 nt, Human adenovirus D
cagggcacugccggugcacuc

SEQ ID NO: 1568768 - RNA, 17 nt, Human adenovirus D
cucucagcacgguggcc

SEQ ID NO: 1568769 - RNA, 21 nt, Human adenovirus D
accgggaugaugaccgagcug

SEQ ID NO: 1568770 - RNA, 15 nt, Human adenovirus D
gcgcucccggcggca

SEQ ID NO: 1568771 - RNA, 17 nt, Human adenovirus D
guggugcuggaugaugu

SEQ ID NO: 1568772 - RNA, 16 nt, Human adenovirus D
gaggacgagaaccuga

SEQ ID NO: 1568773 - RNA, 17 nt, Human adenovirus D
accucuugcagcuggcc

SEQ ID NO: 1568774 - RNA, 15 nt, Human adenovirus D
cagccgcaggccaac

SEQ ID NO: 1568775 - RNA, 16 nt, Human adenovirus D
guggccccggggcgga

SEQ ID NO: 1568776 - RNA, 18 nt, Human adenovirus D
gagaggcugacgagcccg

SEQ ID NO: 1568777 - RNA, 21 nt, Human adenovirus D
aggucuaaaaaccccgccaaa

SEQ ID NO: 1568778 - RNA, 21 nt, Human adenovirus D
gcuaguguacaacgcccugcu

SEQ ID NO: 1568779 - RNA, 18 nt, Human adenovirus D
cugccccaggcggugcug

SEQ ID NO: 1568780 - RNA, 16 nt, Human adenovirus D
caacaguacuggcaac

SEQ ID NO: 1568781 - RNA, 22 nt, Human adenovirus D
cccgccgcuguggagccacugc

SEQ ID NO: 1568782 - RNA, 21 nt, Human adenovirus D
gauggccacggggagccccuu

SEQ ID NO: 1568783 - RNA, 22 nt, Human adenovirus D
uccgcagcuacaccucccucac

SEQ ID NO: 1568784 - RNA, 20 nt, Human adenovirus D
cugaaacaccugcagcgcca

SEQ ID NO: 1568785 - RNA, 22 nt, Human adenovirus D
ccgugagcucgucuuccaggag

SEQ ID NO: 1568786 - RNA, 19 nt, Human adenovirus D
aucagcaguagccccgccc

SEQ ID NO: 1568787 - RNA, 16 nt, Human adenovirus D
cgcagcggcaggaaau

SEQ ID NO: 1568788 - RNA, 23 nt, Human adenovirus D
cuggaacgagaucggcaccagcc

SEQ ID NO: 1568789 - RNA, 21 nt, Human adenovirus D
uggagcucgucgcgaaagagg

SEQ ID NO: 1568790 - RNA, 15 nt, Human adenovirus D
acacggucacugucc

SEQ ID NO: 1568791 - RNA, 16 nt, Human adenovirus D
ugcgaaaacacuuccg

SEQ ID NO: 1568792 - RNA, 18 nt, Human adenovirus D
ccggcggauagcgcgccg

SEQ ID NO: 1568793 - RNA, 16 nt, Human adenovirus D
gcgcucgcucacccgc

SEQ ID NO: 1568794 - RNA, 12 nt, Human adenovirus D
cgugcacuggcu

SEQ ID NO: 1568795 - RNA, 16 nt, Human adenovirus D
ugcucuaccccauccc

SEQ ID NO: 1568796 - RNA, 18 nt, Human adenovirus D
gaugccuucuccagggug

SEQ ID NO: 1568797 - RNA, 20 nt, Human adenovirus D
gcaagccccggaccccgcca

SEQ ID NO: 1568798 - RNA, 20 nt, Human adenovirus D
uguaggccauccccauccag

SEQ ID NO: 1568799 - RNA, 17 nt, Human adenovirus D
cagcuugcgcgcuggcu

SEQ ID NO: 1568800 - RNA, 23 nt, Human adenovirus D
ggcgcaagcucaugcuggccgug

SEQ ID NO: 1568801 - RNA, 15 nt, Human adenovirus D
cuuuaucagccagaa

SEQ ID NO: 1568802 - RNA, 22 nt, Human adenovirus D
cagcaggguacccacugggugg

SEQ ID NO: 1568803 - RNA, 21 nt, Human adenovirus D
caccacgcuucuuccccagcg

SEQ ID NO: 1568804 - RNA, 15 nt, Human adenovirus D
cgagcugcaaggucc

SEQ ID NO: 1568805 - RNA, 15 nt, Human adenovirus D
ggccaugcugcgccg

SEQ ID NO: 1568806 - RNA, 16 nt, Human adenovirus D
ugaaagcauacagaga

SEQ ID NO: 1568807 - RNA, 17 nt, Human adenovirus D
cagaaccggaggcuggc

SEQ ID NO: 1568808 - RNA, 19 nt, Human adenovirus D
uagggccuuuccccaccua

SEQ ID NO: 1568809 - RNA, 22 nt, Human adenovirus D
ugcagacacuugagcuggccuu

SEQ ID NO: 1568810 - RNA, 22 nt, Human adenovirus D
cgacacccccgcgugcagcugc

SEQ ID NO: 1568811 - RNA, 18 nt, Human adenovirus D
gugacggccuacgagcag

SEQ ID NO: 1568812 - RNA, 19 nt, Human adenovirus D
ugccaucaugaucuacccc

SEQ ID NO: 1568813 - RNA, 15 nt, Human adenovirus D
gcgagccgcgcgccg

SEQ ID NO: 1568814 - RNA, 19 nt, Human adenovirus D
cuagacauggccagcacgu

SEQ ID NO: 1568815 - RNA, 13 nt, Human adenovirus D
gcacaaacgugca

SEQ ID NO: 1568816 - RNA, 16 nt, Human adenovirus D
guggaagaggggcagc

SEQ ID NO: 1568817 - RNA, 20 nt, Human adenovirus D
aguucaggagcgcagccuga

SEQ ID NO: 1568818 - RNA, 15 nt, Human adenovirus D
cgcgaacagcagcag

SEQ ID NO: 1568819 - RNA, 20 nt, Human adenovirus D
cucaggcgcaaccaggagga

SEQ ID NO: 1568820 - RNA, 22 nt, Human adenovirus D
acacuuaguucagcugcaauga

SEQ ID NO: 1568821 - RNA, 19 nt, Human adenovirus D
gcugcuagagugccacugc

SEQ ID NO: 1568822 - RNA, 18 nt, Human adenovirus D
agccggcgaacgugccgc

SEQ ID NO: 1568823 - RNA, 14 nt, Human adenovirus D
gcgaaccaggcagu

SEQ ID NO: 1568824 - RNA, 15 nt, Human adenovirus D
uggagaaugcugcua

SEQ ID NO: 1568825 - RNA, 18 nt, Human adenovirus D
cuacgcguacauccagca

SEQ ID NO: 1568826 - RNA, 19 nt, Human adenovirus D
ggccaagaaggccggggcc

SEQ ID NO: 1568827 - RNA, 15 nt, Human adenovirus D
ucccacagggcacug

SEQ ID NO: 1568828 - RNA, 15 nt, Human adenovirus D
ugaagagggagagga

SEQ ID NO: 1568829 - RNA, 14 nt, Human adenovirus D
agcuugugcggccu

SEQ ID NO: 1568830 - RNA, 16 nt, Human adenovirus D
guuacuguaaagccac

SEQ ID NO: 1568831 - RNA, 14 nt, Human adenovirus D
gcgccucaauguca

SEQ ID NO: 1568832 - RNA, 19 nt, Human adenovirus D
cacuacuaauucucaaagu

SEQ ID NO: 1568833 - RNA, 13 nt, Human adenovirus D
gcaggccaacaga

SEQ ID NO: 1568834 - RNA, 22 nt, Human adenovirus D
gcccugcgauauggaugauggc

SEQ ID NO: 1568835 - RNA, 15 nt, Human adenovirus D
agcgaucugggaugc

SEQ ID NO: 1568836 - RNA, 19 nt, Human adenovirus D
ccggucgacggugagcagc

SEQ ID NO: 1568837 - RNA, 14 nt, Human adenovirus D
ggggcaauaccggg

SEQ ID NO: 1568838 - RNA, 16 nt, Human adenovirus D
gccauggggcgccgcc

SEQ ID NO: 1568839 - RNA, 16 nt, Human adenovirus D
ugaccgaggagcugag

SEQ ID NO: 1568840 - RNA, 15 nt, Human adenovirus D
cggcggcuggcggua

SEQ ID NO: 1568841 - RNA, 17 nt, Human adenovirus D
cuugugcccgcccaggu

SEQ ID NO: 1568842 - RNA, 15 nt, Human adenovirus D
cuaccuugcacccac

SEQ ID NO: 1568843 - RNA, 16 nt, Human adenovirus D
ccucugcaucugauga

SEQ ID NO: 1568844 - RNA, 18 nt, Human adenovirus D
guagcggggcacaggcac

SEQ ID NO: 1568845 - RNA, 16 nt, Human adenovirus D
gcuggcuggucaggcc

SEQ ID NO: 1568846 - RNA, 21 nt, Human adenovirus D
aacugcgcguccgucagcagc

SEQ ID NO: 1568847 - RNA, 15 nt, Human adenovirus D
acacccaacugagca

SEQ ID NO: 1568848 - RNA, 14 nt, Human adenovirus D
gggcgccucccagg

SEQ ID NO: 1568849 - RNA, 21 nt, Human adenovirus D
ggagaucacuagcgugagccg

SEQ ID NO: 1568850 - RNA, 14 nt, Human adenovirus D
gcauggccucgugc

SEQ ID NO: 1568851 - RNA, 21 nt, Human adenovirus D
ugcuuguguccucccccgcaa

SEQ ID NO: 1568852 - RNA, 15 nt, Human adenovirus D
ggcgugcaggcgccc

SEQ ID NO: 1568853 - RNA, 20 nt, Human adenovirus D
gcugaaacaccugcagcgcc

SEQ ID NO: 1568854 - RNA, 12 nt, Human adenovirus D
ccggcagcgggg

SEQ ID NO: 1568855 - RNA, 23 nt, Human adenovirus D
cacagucaacuguuaagaccacu

SEQ ID NO: 1568856 - RNA, 13 nt, Human adenovirus D
ucagcacugcaaa

SEQ ID NO: 1568857 - RNA, 19 nt, Human adenovirus D
uggcggcccuggcuggugg

SEQ ID NO: 1568858 - RNA, 17 nt, Human adenovirus D
gugaugucucacucaag

SEQ ID NO: 1568859 - RNA, 21 nt, Human adenovirus D
gccuugauuuuuccagcccag

SEQ ID NO: 1568860 - RNA, 22 nt, Human adenovirus D
cccguggucagcgaugagcagc

SEQ ID NO: 1568861 - RNA, 18 nt, Human adenovirus D
agaacgagggccugggcu

SEQ ID NO: 1568862 - RNA, 18 nt, Human adenovirus D
cgcgccacuggccacggg

SEQ ID NO: 1568863 - RNA, 16 nt, Human adenovirus D
ccuccgcccugagcuc

SEQ ID NO: 1568864 - RNA, 15 nt, Human adenovirus D
ccucguccucuuccu

SEQ ID NO: 1568865 - RNA, 20 nt, Human adenovirus D
cgugaaggccggcaugccca

SEQ ID NO: 1568866 - RNA, 13 nt, Human adenovirus D
acgagcggccgcc

SEQ ID NO: 1568867 - RNA, 16 nt, Human adenovirus D
gaccugggcugcgggc

SEQ ID NO: 1568868 - RNA, 14 nt, Human adenovirus D
ccgaggaagauccc

SEQ ID NO: 1568869 - RNA, 19 nt, Human adenovirus D
ggcgugcgcgacgacgcgg

SEQ ID NO: 1568870 - RNA, 12 nt, Human adenovirus D
ggcggagggugc

SEQ ID NO: 1568871 - RNA, 15 nt, Human adenovirus D
gaaaucgcaguuggg

SEQ ID NO: 1568872 - RNA, 19 nt, Human adenovirus D
aacuugugguuuuaacagg

SEQ ID NO: 1568873 - RNA, 18 nt, Human adenovirus D
ugaguccgucggccaugg

SEQ ID NO: 1568874 - RNA, 16 nt, Human adenovirus D
gacgagacgcgcgcgg

SEQ ID NO: 1568875 - RNA, 15 nt, Human adenovirus D
accaggcagugcagc

SEQ ID NO: 1568876 - RNA, 21 nt, Human adenovirus D
acagcggcagggugagccggc

SEQ ID NO: 1568877 - RNA, 15 nt, Human adenovirus D
cugcgcgagguugag

SEQ ID NO: 1568878 - RNA, 13 nt, Human adenovirus D
augaggcaggcca

SEQ ID NO: 1568879 - RNA, 13 nt, Human adenovirus D
ugccuuccaaaau

SEQ ID NO: 1568880 - RNA, 14 nt, Human adenovirus D
acuaggaccccagg

SEQ ID NO: 1568881 - RNA, 22 nt, Human adenovirus D
cgcccaggcgccauucggagca

SEQ ID NO: 1568882 - RNA, 18 nt, Human adenovirus D
ccacauccaagugcccca

SEQ ID NO: 1568883 - RNA, 15 nt, Human adenovirus D
uacagagauucagcc

SEQ ID NO: 1568884 - RNA, 14 nt, Human adenovirus D
ucgcuggcugcugg

SEQ ID NO: 1568885 - RNA, 21 nt, Human adenovirus D
cgcccagccagcaaacgccgc

SEQ ID NO: 1568886 - RNA, 21 nt, Human adenovirus D
ggcgcaggcgacccuggaggu

SEQ ID NO: 1568887 - RNA, 19 nt, Human adenovirus D
accucaaaaagcuguggac

SEQ ID NO: 1568888 - RNA, 22 nt, Human adenovirus D
ucacccggacguggugcugcug

SEQ ID NO: 1568889 - RNA, 11 nt, Human adenovirus D
aaagcaugguu

SEQ ID NO: 1568890 - RNA, 12 nt, Human adenovirus D
cagacagccagg

SEQ ID NO: 1568891 - RNA, 21 nt, Human adenovirus D
cacccagaccgugcaggggcc

SEQ ID NO: 1568892 - RNA, 13 nt, Human adenovirus D
accuuccugcagc

SEQ ID NO: 1568893 - RNA, 22 nt, Human adenovirus D
cggcaaucaacuacucggugcu

SEQ ID NO: 1568894 - RNA, 21 nt, Human adenovirus D
auaaaucugcccugauaucca

SEQ ID NO: 1568895 - RNA, 14 nt, Human adenovirus D
gagcuccucgaugc

SEQ ID NO: 1568896 - RNA, 23 nt, Human adenovirus D
gcauccugagauaugugcagcag

SEQ ID NO: 1568897 - RNA, 16 nt, Human adenovirus D
gaaaggcgggcugccc

SEQ ID NO: 1568898 - RNA, 13 nt, Human adenovirus D
gccaggguugaau

SEQ ID NO: 1568899 - RNA, 17 nt, Human adenovirus D
gccgcgccagacgcacg

SEQ ID NO: 1568900 - RNA, 16 nt, Human adenovirus D
agguggacgagccgcc

SEQ ID NO: 1568901 - RNA, 14 nt, Human adenovirus D
gcccaacaggccua

SEQ ID NO: 1568902 - RNA, 12 nt, Human adenovirus D
gcccacggccau

SEQ ID NO: 1568903 - RNA, 13 nt, Human adenovirus D
cugucggccgagg

SEQ ID NO: 1568904 - RNA, 21 nt, Human adenovirus D
cuaggggaagauggaggagca

SEQ ID NO: 1568905 - RNA, 18 nt, Human adenovirus D
acggcaucuuccuggggc

SEQ ID NO: 1568906 - RNA, 23 nt, Human adenovirus D
cugugacaugcaaaaucuuacac

SEQ ID NO: 1568907 - RNA, 16 nt, Human adenovirus D
gacaauucagagccag

SEQ ID NO: 1568908 - RNA, 17 nt, Human adenovirus D
ggacagcaagccucuga

SEQ ID NO: 1568909 - RNA, 13 nt, Human adenovirus D
aggcgcccaggcc

SEQ ID NO: 1568910 - RNA, 15 nt, Human adenovirus D
acuuuaaugcuccaa

SEQ ID NO: 1568911 - RNA, 18 nt, Human adenovirus D
ccggucucugcgcucgcu

SEQ ID NO: 1568912 - RNA, 14 nt, Human adenovirus D
ccucucggccgcca

SEQ ID NO: 1568913 - RNA, 15 nt, Human adenovirus D
gggcagcgagagggc

SEQ ID NO: 1568914 - RNA, 12 nt, Human adenovirus D
agcaauaccacc

SEQ ID NO: 1568915 - RNA, 21 nt, Human adenovirus D
ggcuuugcuggguugcuccuu

SEQ ID NO: 1568916 - RNA, 13 nt, Human adenovirus D
guuggcuugcaug

SEQ ID NO: 1568917 - RNA, 23 nt, Human adenovirus D
accuucuuuuugauacuaacacu

SEQ ID NO: 1568918 - RNA, 18 nt, Human adenovirus D
uagaaacagauccugcug

SEQ ID NO: 1568919 - RNA, 17 nt, Human adenovirus D
ucuuccuccguagccug

SEQ ID NO: 1568920 - RNA, 15 nt, Human adenovirus D
ugacgucauuugcau

SEQ ID NO: 1568921 - RNA, 21 nt, Human adenovirus D
aucggaucuuccccacucuuu

SEQ ID NO: 1568922 - RNA, 21 nt, Human adenovirus D
agggcugcacggaugagcgca

SEQ ID NO: 1568923 - RNA, 23 nt, Human adenovirus D
aggccgggcugcacgaccucgga

SEQ ID NO: 1568924 - RNA, 20 nt, Human adenovirus D
aagaaucacauuaaaggcug

SEQ ID NO: 1568925 - RNA, 17 nt, Human adenovirus D
gccuguccugcaggggc

SEQ ID NO: 1568926 - RNA, 14 nt, Human adenovirus D
cuuucggcgcuugg

SEQ ID NO: 1568927 - RNA, 22 nt, Human adenovirus D
gcuggcuugguacccgcgaccc

SEQ ID NO: 1568928 - RNA, 18 nt, Human adenovirus D
cggucgcgcgaagaggag

SEQ ID NO: 1568929 - RNA, 19 nt, Human adenovirus D
acccagaccgugcaggggc

SEQ ID NO: 1568930 - RNA, 11 nt, Human adenovirus D
gagcaacccaa

SEQ ID NO: 1568931 - RNA, 17 nt, Human adenovirus D
agguuugaguagugggc

SEQ ID NO: 1568932 - RNA, 23 nt, Human adenovirus D
ccccggacgucaccugcggcgcg

SEQ ID NO: 1568933 - RNA, 15 nt, Human adenovirus D
acacacgcccugggu

SEQ ID NO: 1568934 - RNA, 15 nt, Human adenovirus D
cagccaguggcccug

SEQ ID NO: 1568935 - RNA, 22 nt, Human adenovirus D
gucgccgcaccauccgcgccgc

SEQ ID NO: 1568936 - RNA, 18 nt, Human adenovirus D
caugcacccguaaaugac

SEQ ID NO: 1568937 - RNA, 23 nt, Human adenovirus D
gaauauccccuuccucacucccc

SEQ ID NO: 1568938 - RNA, 21 nt, Human adenovirus D
cucaggcgcaaccaggaggag

SEQ ID NO: 1568939 - RNA, 16 nt, Human adenovirus D
agacaaaggaggccac

SEQ ID NO: 1568940 - RNA, 14 nt, Human adenovirus D
agccaguggcccug

SEQ ID NO: 1568941 - RNA, 14 nt, Human adenovirus D
cugucggccgagga

SEQ ID NO: 1568942 - RNA, 18 nt, Human adenovirus D
ccuucuccacggggaggg

SEQ ID NO: 1568943 - RNA, 14 nt, Human adenovirus D
cacacuagaaagca

SEQ ID NO: 1568944 - RNA, 14 nt, Human adenovirus D
agaacgagggccug

SEQ ID NO: 1568945 - RNA, 19 nt, Human adenovirus D
ucacuuugguacuuacaaa

SEQ ID NO: 1568946 - RNA, 18 nt, Human adenovirus D
acucugcucauacugcua

SEQ ID NO: 1568947 - RNA, 17 nt, Human adenovirus D
aggggguuaggcagagc

SEQ ID NO: 1568948 - RNA, 12 nt, Human adenovirus D
cuuuggcaaaga

SEQ ID NO: 1568949 - RNA, 13 nt, Human adenovirus D
ccugggcucgcug

SEQ ID NO: 1568950 - RNA, 14 nt, Human adenovirus D
gucugccuggucau

SEQ ID NO: 1568951 - RNA, 23 nt, Human adenovirus D
cgcgaggccauaggccaggcgca

SEQ ID NO: 1568952 - RNA, 19 nt, Human adenovirus D
cgguggccccgacccacga

SEQ ID NO: 1568953 - RNA, 16 nt, Human adenovirus D
ucagcgaugagcagcu

SEQ ID NO: 1568954 - RNA, 22 nt, Human adenovirus D
aagcgccaggaggcggugcgca

SEQ ID NO: 1568955 - RNA, 18 nt, Human adenovirus D
ggcagcggggccuggugu

SEQ ID NO: 1568956 - RNA, 15 nt, Human adenovirus D
gccaaucgcagucgc

SEQ ID NO: 1568957 - RNA, 22 nt, Human adenovirus D
auaaguuaggguguaaguguga

SEQ ID NO: 1568958 - RNA, 18 nt, Human adenovirus D
guagggguugaggggcgg

SEQ ID NO: 1568959 - RNA, 14 nt, Human adenovirus D
aacgcgcgcugccc

SEQ ID NO: 1568960 - RNA, 19 nt, Human adenovirus D
cgagggucugcgagaggag

SEQ ID NO: 1568961 - RNA, 18 nt, Human adenovirus D
ucgcagacgagcggccgc

SEQ ID NO: 1568962 - RNA, 18 nt, Human adenovirus D
cucgguacccuccuccca

SEQ ID NO: 1568963 - RNA, 13 nt, Human adenovirus D
ccagaucacaugg

SEQ ID NO: 1568964 - RNA, 15 nt, Human adenovirus D
agcgcgagggcgaga

SEQ ID NO: 1568965 - RNA, 17 nt, Human adenovirus D
caugcccaaugugaacg

SEQ ID NO: 1568966 - RNA, 13 nt, Human adenovirus D
uguucagcagcac

SEQ ID NO: 1568967 - RNA, 18 nt, Human adenovirus D
ccggcuaccuugcaccca

SEQ ID NO: 1568968 - RNA, 20 nt, Human adenovirus D
cucgaucuccuccuccugga

SEQ ID NO: 1568969 - RNA, 21 nt, Human adenovirus D
caaaggagccauagagggcgu

SEQ ID NO: 1568970 - RNA, 13 nt, Human adenovirus D
acuggguggcccu

SEQ ID NO: 1568971 - RNA, 18 nt, Human adenovirus D
acgcugaaaggcgggcug

SEQ ID NO: 1568972 - RNA, 19 nt, Human adenovirus D
cugggugacagaaccagau

SEQ ID NO: 1568973 - RNA, 22 nt, Human adenovirus D
ugagcuugaaacgucccaggaa

SEQ ID NO: 1568974 - RNA, 20 nt, Human adenovirus D
ucguaccagaugcggcagua

SEQ ID NO: 1568975 - RNA, 20 nt, Human adenovirus D
gcuccacgguggcggcgagg

SEQ ID NO: 1568976 - RNA, 23 nt, Human adenovirus D
ggccacguugcgguacugguacu

SEQ ID NO: 1568977 - RNA, 21 nt, Human adenovirus D
ggugagccggccgcgcuugcu

SEQ ID NO: 1568978 - RNA, 23 nt, Human adenovirus D
aguacgacaugcccgaccccaac

SEQ ID NO: 1568979 - RNA, 22 nt, Human adenovirus D
ggccuacuacuccugaucagaa

SEQ ID NO: 1568980 - RNA, 13 nt, Human adenovirus D
uuaaaaaccaaaa

SEQ ID NO: 1568981 - RNA, 20 nt, Human adenovirus D
gcgccauugucaacacggcc

SEQ ID NO: 1568982 - RNA, 23 nt, Human adenovirus D
ggccuguccugcaggggcguccc

SEQ ID NO: 1568983 - RNA, 17 nt, Human adenovirus D
cgcgcccggggccaggu

SEQ ID NO: 1568984 - RNA, 21 nt, Human adenovirus D
gcuccguuguacgacaccacu

SEQ ID NO: 1568985 - RNA, 13 nt, Human adenovirus D
gcgccgcgccgcc

SEQ ID NO: 1568986 - RNA, 15 nt, Human adenovirus D
ucggggcauugcagg

SEQ ID NO: 1568987 - RNA, 21 nt, Human adenovirus D
gcaugaaggaagcccagagcu

SEQ ID NO: 1568988 - RNA, 19 nt, Human adenovirus D
gccuccccgcagaaaucag

SEQ ID NO: 1568989 - RNA, 14 nt, Human adenovirus D
cagcgccccgagga

SEQ ID NO: 1568990 - RNA, 12 nt, Human adenovirus D
aauccacacagu

SEQ ID NO: 1568991 - RNA, 16 nt, Human adenovirus D
ccaggccuggcccuga

SEQ ID NO: 1568992 - RNA, 17 nt, Human adenovirus D
cggaguaccugagcccg

SEQ ID NO: 1568993 - RNA, 13 nt, Human adenovirus D
acaagcuggccug

SEQ ID NO: 1568994 - RNA, 14 nt, Human adenovirus D
gccacuacagcuga

SEQ ID NO: 1568995 - RNA, 14 nt, Human adenovirus D
cauccacugcuccu

SEQ ID NO: 1568996 - RNA, 14 nt, Human adenovirus D
guggugucuuccuc

SEQ ID NO: 1568997 - RNA, 21 nt, Human adenovirus D
gucucugguguaguuguucag

SEQ ID NO: 1568998 - RNA, 14 nt, Human adenovirus D
cgcuggggcugcuc

SEQ ID NO: 1568999 - RNA, 22 nt, Human adenovirus D
uuugaggcggcggaugguggcg

SEQ ID NO: 1569000 - RNA, 19 nt, Human adenovirus D
cgcucuugucgcugaucug

SEQ ID NO: 1569001 - RNA, 21 nt, Human adenovirus D
aaccugugcucuccgcaccgc

SEQ ID NO: 1569002 - RNA, 17 nt, Human adenovirus D
gaccgcugucucagccu

SEQ ID NO: 1569003 - RNA, 14 nt, Human adenovirus D
accuuccuugcugg

SEQ ID NO: 1569004 - RNA, 23 nt, Human adenovirus D
ccgcaccgcuccuggucugcaac

SEQ ID NO: 1569005 - RNA, 17 nt, Human adenovirus D
gaucgccgcgacccgcg

SEQ ID NO: 1569006 - RNA, 19 nt, Human adenovirus D
uucaaggacaugcagcugc

SEQ ID NO: 1569007 - RNA, 16 nt, Human adenovirus D
agcugcgcggggccac

SEQ ID NO: 1569008 - RNA, 12 nt, Human adenovirus D
cagugcacgggc

SEQ ID NO: 1569009 - RNA, 22 nt, Human adenovirus D
ucacuccccccuuugucuccuc

SEQ ID NO: 1569010 - RNA, 14 nt, Human adenovirus D
ccucguucauccag

SEQ ID NO: 1569011 - RNA, 22 nt, Human adenovirus D
augaacacacugcccauauaca

SEQ ID NO: 1569012 - RNA, 14 nt, Human adenovirus D
gcggagcuugcccu

SEQ ID NO: 1569013 - RNA, 15 nt, Human adenovirus D
ccuucggcuggaacc

SEQ ID NO: 1569014 - RNA, 19 nt, Human adenovirus D
agaccaugugagccugggu

SEQ ID NO: 1569015 - RNA, 14 nt, Human adenovirus D
ccagcgcggccagc

SEQ ID NO: 1569016 - RNA, 22 nt, Human adenovirus D
gccgccugagcaaccuccuggg

SEQ ID NO: 1569017 - RNA, 20 nt, Human adenovirus D
ggcgaccagcucuggguccc

SEQ ID NO: 1569018 - RNA, 18 nt, Human adenovirus D
cuuaaggaaucuucuuuu

SEQ ID NO: 1569019 - RNA, 15 nt, Human adenovirus D
ggcgacgcaccggga

SEQ ID NO: 1569020 - RNA, 20 nt, Human adenovirus D
gcauguacgccgccaaccgg

SEQ ID NO: 1569021 - RNA, 20 nt, Human adenovirus D
aucacuuacuugaaaucuga

SEQ ID NO: 1569022 - RNA, 14 nt, Human adenovirus D
uaggcccagcagca

SEQ ID NO: 1569023 - RNA, 21 nt, Human adenovirus D
acucuguaggccauccccauc

SEQ ID NO: 1569024 - RNA, 16 nt, Human adenovirus D
gaccuggcggaggcca

SEQ ID NO: 1569025 - RNA, 11 nt, Human adenovirus D
gcgcccgcagc

SEQ ID NO: 1569026 - RNA, 22 nt, Human adenovirus D
gaccagaccaccuggugauggc

SEQ ID NO: 1569027 - RNA, 19 nt, Human adenovirus D
gugucuuccucuccuccuc

SEQ ID NO: 1569028 - RNA, 11 nt, Human adenovirus D
cguagccagaa

SEQ ID NO: 1569029 - RNA, 14 nt, Human adenovirus D
gacgacauccugga

SEQ ID NO: 1569030 - RNA, 14 nt, Human adenovirus D
cagggacaacgagg

SEQ ID NO: 1569031 - RNA, 23 nt, Human adenovirus D
cuggccgcgggcgccucccagga

SEQ ID NO: 1569032 - RNA, 15 nt, Human adenovirus D
ccgcgccagacgcac

SEQ ID NO: 1569033 - RNA, 21 nt, Human adenovirus D
acuccuucuuccgcaacuucc

SEQ ID NO: 1569034 - RNA, 14 nt, Human adenovirus D
aggaugucaacaug

SEQ ID NO: 1569035 - RNA, 15 nt, Human adenovirus D
cguggugcugcugcc

SEQ ID NO: 1569036 - RNA, 17 nt, Human adenovirus D
auuaaaaagcagcacag

SEQ ID NO: 1569037 - RNA, 20 nt, Human adenovirus D
cuccuccuguuacuguaaag

SEQ ID NO: 1569038 - RNA, 23 nt, Human adenovirus D
cuugacagcaccgccgcagccgc

SEQ ID NO: 1569039 - RNA, 13 nt, Human adenovirus D
agcugcgaggaga

SEQ ID NO: 1569040 - RNA, 15 nt, Human adenovirus D
gacgcucuagaggca

SEQ ID NO: 1569041 - RNA, 21 nt, Human adenovirus D
gccagccgcgguuaugcaggg

SEQ ID NO: 1569042 - RNA, 22 nt, Human adenovirus D
guacuacaacaguacuggcaac

SEQ ID NO: 1569043 - RNA, 14 nt, Human adenovirus D
gucugugccucucc

SEQ ID NO: 1569044 - RNA, 19 nt, Human adenovirus D
ccgugcaggggcccgacuc

SEQ ID NO: 1569045 - RNA, 12 nt, Human adenovirus D
cggccgccgccg

SEQ ID NO: 1569046 - RNA, 22 nt, Human adenovirus D
gagucaaguuugacagcagaaa

SEQ ID NO: 1569047 - RNA, 23 nt, Human adenovirus D
cuugagacucauccugcuggugc

SEQ ID NO: 1569048 - RNA, 13 nt, Human adenovirus D
uaaagccagcagc

SEQ ID NO: 1569049 - RNA, 13 nt, Human adenovirus D
gaagcccugguuu

SEQ ID NO: 1569050 - RNA, 22 nt, Human adenovirus D
cagcgcucguacccgcucacca

SEQ ID NO: 1569051 - RNA, 21 nt, Human adenovirus D
ggcggcgcugcaaagccagcc

SEQ ID NO: 1569052 - RNA, 11 nt, Human adenovirus D
agucuccuggu

SEQ ID NO: 1569053 - RNA, 13 nt, Human adenovirus D
agagcuugggcgc

SEQ ID NO: 1569054 - RNA, 15 nt, Human adenovirus D
caauaaacagcacuu

SEQ ID NO: 1569055 - RNA, 19 nt, Human adenovirus D
ucucgguguacaagauccu

SEQ ID NO: 1569056 - RNA, 17 nt, Human adenovirus D
gugcugcugccgagccg

SEQ ID NO: 1569057 - RNA, 13 nt, Human adenovirus D
augaaucgcgggc

SEQ ID NO: 1569058 - RNA, 18 nt, Human adenovirus D
aguauggugaucagccau

SEQ ID NO: 1569059 - RNA, 19 nt, Human adenovirus D
uuccgcaacuuccagccca

SEQ ID NO: 1569060 - RNA, 20 nt, Human adenovirus D
cugcagcauugucugccugg

SEQ ID NO: 1569061 - RNA, 12 nt, Human adenovirus D
ugacucuccuga

SEQ ID NO: 1569062 - RNA, 17 nt, Human adenovirus D
cacugcauggccucgug

SEQ ID NO: 1569063 - RNA, 19 nt, Human adenovirus D
ggcgagaggcgagcagcug

SEQ ID NO: 1569064 - RNA, 21 nt, Human adenovirus D
ucauccuuccaguacucccgg

SEQ ID NO: 1569065 - RNA, 17 nt, Human adenovirus D
ccaagaaacgucccagc

SEQ ID NO: 1569066 - RNA, 19 nt, Human adenovirus D
uagguucuucacccagcaa

SEQ ID NO: 1569067 - RNA, 22 nt, Human adenovirus D
caaauaaacuuuaucagccaga

SEQ ID NO: 1569068 - RNA, 23 nt, Human adenovirus D
ggacgccucggaguaccugagcc

SEQ ID NO: 1569069 - RNA, 11 nt, Human adenovirus D
uuugggcacug

SEQ ID NO: 1569070 - RNA, 23 nt, Human adenovirus D
cuacucggugcuuagccugggca

SEQ ID NO: 1569071 - RNA, 20 nt, Human adenovirus D
uucagcuccaguggggagga

SEQ ID NO: 1569072 - RNA, 22 nt, Human adenovirus D
augaaagcauacagagauucag

SEQ ID NO: 1569073 - RNA, 19 nt, Human adenovirus D
cuguguccgcgcucgguga

SEQ ID NO: 1569074 - RNA, 20 nt, Human adenovirus D
gacucgcagacgagcggccg

SEQ ID NO: 1569075 - RNA, 15 nt, Human adenovirus D
acggagggcagaaac

SEQ ID NO: 1569076 - RNA, 13 nt, Human adenovirus D
cgagcgccagcug

SEQ ID NO: 1569077 - RNA, 19 nt, Human adenovirus D
gcugcgcggggccacgacc

SEQ ID NO: 1569078 - RNA, 14 nt, Human adenovirus D
accugcuacauguu

SEQ ID NO: 1569079 - RNA, 19 nt, Human adenovirus D
cuaucgcucuuaucccaug

SEQ ID NO: 1569080 - RNA, 13 nt, Human adenovirus D
gacauggccagca

SEQ ID NO: 1569081 - RNA, 20 nt, Human adenovirus D
cggaggccaucgugcagaac

SEQ ID NO: 1569082 - RNA, 13 nt, Human adenovirus D
ggugcugcugccg

SEQ ID NO: 1569083 - RNA, 16 nt, Human adenovirus D
cagaaccaugaauaca

SEQ ID NO: 1569084 - RNA, 15 nt, Human adenovirus D
caguagaaggugagg

SEQ ID NO: 1569085 - RNA, 20 nt, Human adenovirus D
caccgccgcagccgcggcag

SEQ ID NO: 1569086 - RNA, 16 nt, Human adenovirus D
augaugaccgagcuga

SEQ ID NO: 1569087 - RNA, 23 nt, Human adenovirus D
ucacaguuauaccaccuccuccu

SEQ ID NO: 1569088 - RNA, 16 nt, Human adenovirus D
ugugguuuaugacuca

SEQ ID NO: 1569089 - RNA, 19 nt, Human adenovirus D
ccaugaaggggcucuugcu

SEQ ID NO: 1569090 - RNA, 15 nt, Human adenovirus D
ugguauccaugcccu

SEQ ID NO: 1569091 - RNA, 17 nt, Human adenovirus D
ucaacaucugugcugcc

SEQ ID NO: 1569092 - RNA, 21 nt, Human adenovirus D
auuguugggaggaaccaugaa

SEQ ID NO: 1569093 - RNA, 13 nt, Human adenovirus D
cccggacagcaag

SEQ ID NO: 1569094 - RNA, 22 nt, Human adenovirus D
acggcuuacaacagccuugccc

SEQ ID NO: 1569095 - RNA, 20 nt, Human adenovirus D
caggcccagaacuggcagag

SEQ ID NO: 1569096 - RNA, 19 nt, Human adenovirus D
aucgugguaaacgggcccu

SEQ ID NO: 1569097 - RNA, 12 nt, Human adenovirus D
aggcccagaacu

SEQ ID NO: 1569098 - RNA, 14 nt, Human adenovirus D
aucagacaugcugc

SEQ ID NO: 1569099 - RNA, 12 nt, Human adenovirus D
gcagcggcagga

SEQ ID NO: 1569100 - RNA, 15 nt, Human adenovirus D
cgucggaagaggagu

SEQ ID NO: 1569101 - RNA, 12 nt, Human adenovirus D
ugccgggacaga

SEQ ID NO: 1569102 - RNA, 19 nt, Human adenovirus D
cccuggccgaccggagcga

SEQ ID NO: 1569103 - RNA, 15 nt, Human adenovirus D
cgggggcagacacac

SEQ ID NO: 1569104 - RNA, 23 nt, Human adenovirus D
gcugaucaacaucuugcagagca

SEQ ID NO: 1569105 - RNA, 19 nt, Human adenovirus D
aauaggcacugaaaauuug

SEQ ID NO: 1569106 - RNA, 21 nt, Human adenovirus D
ccugaaggagcuggacaagcu

SEQ ID NO: 1569107 - RNA, 13 nt, Human adenovirus D
ucauguccaccug

SEQ ID NO: 1569108 - RNA, 13 nt, Human adenovirus D
guucugcccaccg

SEQ ID NO: 1569109 - RNA, 20 nt, Human adenovirus D
gagggcaaugcuagagugag

SEQ ID NO: 1569110 - RNA, 23 nt, Human adenovirus D
cgggccaugagggucuggagcuc

SEQ ID NO: 1569111 - RNA, 19 nt, Human adenovirus D
cgggguuguggacuuccgc

SEQ ID NO: 1569112 - RNA, 13 nt, Human adenovirus D
cugcgcggggcca

SEQ ID NO: 1569113 - RNA, 17 nt, Human adenovirus D
agccgcuaguggaagag

SEQ ID NO: 1569114 - RNA, 20 nt, Human adenovirus D
ccaggucacagucuggugga

SEQ ID NO: 1569115 - RNA, 15 nt, Human adenovirus D
auggcaagcugccau

SEQ ID NO: 1569116 - RNA, 17 nt, Human adenovirus D
ucucccaccaccagccc

SEQ ID NO: 1569117 - RNA, 16 nt, Human adenovirus D
cgagaucggcaccagc

SEQ ID NO: 1569118 - RNA, 24 nt, Human adenovirus D
ccggcgcacgucugacugccgccg

SEQ ID NO: 1569119 - RNA, 15 nt, Human adenovirus D
ccugacccagcaggu

SEQ ID NO: 1569120 - RNA, 22 nt, Human adenovirus D
caucagguuacauuccugcacc

SEQ ID NO: 1569121 - RNA, 22 nt, Human adenovirus D
gggugccagauugggggacgau

SEQ ID NO: 1569122 - RNA, 22 nt, Human adenovirus D
uggggcagaacgacaccgacag

SEQ ID NO: 1569123 - RNA, 19 nt, Human adenovirus D
cagaaguucaccugcaugg

SEQ ID NO: 1569124 - RNA, 21 nt, Human adenovirus D
ccaguagacaaagagcacagc

SEQ ID NO: 1569125 - RNA, 16 nt, Human adenovirus D
gcagguguccgagcuc

SEQ ID NO: 1569126 - RNA, 16 nt, Human adenovirus D
guccucccccgagcgc

SEQ ID NO: 1569127 - RNA, 20 nt, Human adenovirus D
aggaagugcggcggcggcug

SEQ ID NO: 1569128 - RNA, 19 nt, Human adenovirus D
acguguugcauccuuccau

SEQ ID NO: 1569129 - RNA, 17 nt, Human adenovirus D
gcucgcgggccaugagg

SEQ ID NO: 1569130 - RNA, 21 nt, Human adenovirus D
augccuucgugcacuggcccg

SEQ ID NO: 1569131 - RNA, 15 nt, Human adenovirus D
cagacaaacauccau

SEQ ID NO: 1569132 - RNA, 13 nt, Human adenovirus D
cgaggcagaggca

SEQ ID NO: 1569133 - RNA, 19 nt, Human adenovirus D
ucggggcauugcaggccgu

SEQ ID NO: 1569134 - RNA, 17 nt, Human adenovirus D
ccgcggaugcuggcgcg

SEQ ID NO: 1569135 - RNA, 19 nt, Human adenovirus D
agcgggaccggggaggcac

SEQ ID NO: 1569136 - RNA, 22 nt, Human adenovirus D
ccguccuuucgcugcugccgcu

SEQ ID NO: 1569137 - RNA, 15 nt, Human adenovirus D
ccgcgacccccaggc

SEQ ID NO: 1569138 - RNA, 17 nt, Human adenovirus D
gcuugaaacgucccagg

SEQ ID NO: 1569139 - RNA, 14 nt, Human adenovirus D
cugcugcuccacca

SEQ ID NO: 1569140 - RNA, 14 nt, Human adenovirus D
accgacauggaugu

SEQ ID NO: 1569141 - RNA, 19 nt, Human adenovirus D
cacaggaugaacaggagca

SEQ ID NO: 1569142 - RNA, 21 nt, Human adenovirus D
ggcacugcucuucccuggaga

SEQ ID NO: 1569143 - RNA, 13 nt, Human adenovirus D
ccacgguggcggc

SEQ ID NO: 1569144 - RNA, 14 nt, Human adenovirus D
gcaaggugcugaca

SEQ ID NO: 1569145 - RNA, 22 nt, Human adenovirus D
ggcgcacgucugacugccgccg

SEQ ID NO: 1569146 - RNA, 18 nt, Human adenovirus D
cgcgucauggcuggucag

SEQ ID NO: 1569147 - RNA, 20 nt, Human adenovirus D
gccgugcgccgcguccccgc

SEQ ID NO: 1569148 - RNA, 18 nt, Human adenovirus D
augccaagauagcccugc

SEQ ID NO: 1569149 - RNA, 22 nt, Human adenovirus D
cgaccuugcaaaagcgccagga

SEQ ID NO: 1569150 - RNA, 14 nt, Human adenovirus D
gccaacauuacuuc

SEQ ID NO: 1569151 - RNA, 17 nt, Human adenovirus D
uccacgagcgccagcug

SEQ ID NO: 1569152 - RNA, 23 nt, Human adenovirus D
aggcgcgcguccacgccaagaca

SEQ ID NO: 1569153 - RNA, 21 nt, Human adenovirus D
guacuuagaagagcccccucc

SEQ ID NO: 1569154 - RNA, 19 nt, Human adenovirus D
gcacaguuggcgacccagg

SEQ ID NO: 1569155 - RNA, 16 nt, Human adenovirus D
cgacaccaacgaccag

SEQ ID NO: 1569156 - RNA, 16 nt, Human adenovirus D
augccccaggccuggc

SEQ ID NO: 1569157 - RNA, 23 nt, Human adenovirus D
augggccuggccgcgggcgccuc

SEQ ID NO: 1569158 - RNA, 19 nt, Human adenovirus D
cccgagcucugcugcgccg

SEQ ID NO: 1569159 - RNA, 16 nt, Human adenovirus D
auccuuucccuggugg

SEQ ID NO: 1569160 - RNA, 19 nt, Human adenovirus D
gcgccgccaucgaacacgc

SEQ ID NO: 1569161 - RNA, 16 nt, Human adenovirus D
agcgccaacagcagcg

SEQ ID NO: 1569162 - RNA, 12 nt, Human adenovirus D
cagcagcccaua

SEQ ID NO: 1569163 - RNA, 22 nt, Human adenovirus D
ccauagcgugcguucucuuccu

SEQ ID NO: 1569164 - RNA, 15 nt, Human adenovirus D
cacuggcucgccuuc

SEQ ID NO: 1569165 - RNA, 16 nt, Human adenovirus D
cccaaaaacugcaugc

SEQ ID NO: 1569166 - RNA, 19 nt, Human adenovirus D
cauggccucgugcucuggg

SEQ ID NO: 1569167 - RNA, 22 nt, Human adenovirus D
cccgaugacggguugcaggugg

SEQ ID NO: 1569168 - RNA, 17 nt, Human adenovirus D
caacucuuccgccgccg

SEQ ID NO: 1569169 - RNA, 15 nt, Human adenovirus D
cccacagggcacugc

SEQ ID NO: 1569170 - RNA, 22 nt, Human adenovirus D
gcgagugcgggggcagacacac

SEQ ID NO: 1569171 - RNA, 13 nt, Human adenovirus D
gcagcucuucccg

SEQ ID NO: 1569172 - RNA, 18 nt, Human adenovirus D
acuaggaccccagggacc

SEQ ID NO: 1569173 - RNA, 22 nt, Human adenovirus D
uccugagauaugugcagcagag

SEQ ID NO: 1569174 - RNA, 15 nt, Human adenovirus D
cugacacaaaacuaa

SEQ ID NO: 1569175 - RNA, 19 nt, Human adenovirus D
cgcagcggggaggagcccg

SEQ ID NO: 1569176 - RNA, 20 nt, Human adenovirus D
aaagaucacuuacuugaaau

SEQ ID NO: 1569177 - RNA, 15 nt, Human adenovirus D
gggcgucaaccccau

SEQ ID NO: 1569178 - RNA, 13 nt, Human adenovirus D
acgcccgcuccac

SEQ ID NO: 1569179 - RNA, 17 nt, Human adenovirus D
cgucggcgucgcgcgcg

SEQ ID NO: 1569180 - RNA, 15 nt, Human adenovirus D
gucuggcacaucuuu

SEQ ID NO: 1569181 - RNA, 21 nt, Human adenovirus D
cguggccucuucgcccgaccg

SEQ ID NO: 1569182 - RNA, 18 nt, Human adenovirus D
caugaaggggcucuugcu

SEQ ID NO: 1569183 - RNA, 21 nt, Human adenovirus D
cucccaacucugguacuccag

SEQ ID NO: 1569184 - RNA, 15 nt, Human adenovirus D
aucuugcccacgucc

SEQ ID NO: 1569185 - RNA, 23 nt, Human adenovirus D
guccaugggcgccuucaccgacc

SEQ ID NO: 1569186 - RNA, 18 nt, Human adenovirus D
acggugaagcaggagcgc

SEQ ID NO: 1569187 - RNA, 17 nt, Human adenovirus D
gagcacagcaguacaag

SEQ ID NO: 1569188 - RNA, 19 nt, Human adenovirus D
uugagcuuguuuauguuga

SEQ ID NO: 1569189 - RNA, 14 nt, Human adenovirus D
cauccugcuggugc

SEQ ID NO: 1569190 - RNA, 16 nt, Human adenovirus D
ugccuuuaucagcacu

SEQ ID NO: 1569191 - RNA, 18 nt, Human adenovirus D
cgcaggcgcuggaagagg

SEQ ID NO: 1569192 - RNA, 22 nt, Human adenovirus D
caugcgacgcuuuuucagcgac

SEQ ID NO: 1569193 - RNA, 14 nt, Human adenovirus D
cccccagcuccuga

SEQ ID NO: 1569194 - RNA, 20 nt, Human adenovirus D
ccuugcccccaagggcgcuc

SEQ ID NO: 1569195 - RNA, 14 nt, Human adenovirus D
uccuggucacccuc

SEQ ID NO: 1569196 - RNA, 19 nt, Human adenovirus D
aaguguggaagucaaauau

SEQ ID NO: 1569197 - RNA, 15 nt, Human adenovirus D
uccccgcccgccgcc

SEQ ID NO: 1569198 - RNA, 23 nt, Human adenovirus D
gaccgcauccacaaggccgugag

SEQ ID NO: 1569199 - RNA, 17 nt, Human adenovirus D
cauguucaccagcaagu

SEQ ID NO: 1569200 - RNA, 20 nt, Human adenovirus D
ggcaugggucaggcagcggg

SEQ ID NO: 1569201 - RNA, 16 nt, Human adenovirus D
cggaccggucccagcg

SEQ ID NO: 1569202 - RNA, 13 nt, Human adenovirus D
cucuuugcccugc

SEQ ID NO: 1569203 - RNA, 16 nt, Human adenovirus D
caggccuggcccugac

SEQ ID NO: 1569204 - RNA, 16 nt, Human adenovirus D
gcacguacuuugacau

SEQ ID NO: 1569205 - RNA, 16 nt, Human adenovirus D
gcugcuagagugccac

SEQ ID NO: 1569206 - RNA, 11 nt, Human adenovirus D
ccuccacccug

SEQ ID NO: 1569207 - RNA, 19 nt, Human adenovirus D
gccaggauacgcgggaaga

SEQ ID NO: 1569208 - RNA, 14 nt, Human adenovirus D
cucgcuacugcuga

SEQ ID NO: 1569209 - RNA, 16 nt, Human adenovirus D
ccgcgcuugcugggcg

SEQ ID NO: 1569210 - RNA, 17 nt, Human adenovirus D
cuccgguugugcagccc

SEQ ID NO: 1569211 - RNA, 20 nt, Human adenovirus D
gagcucuuaccaaguccagg

SEQ ID NO: 1569212 - RNA, 19 nt, Human adenovirus D
ugcgcguccgucagcagca

SEQ ID NO: 1569213 - RNA, 15 nt, Human adenovirus D
ccggcggcagcggcg

SEQ ID NO: 1569214 - RNA, 19 nt, Human adenovirus D
uccgcacgguaagagccca

SEQ ID NO: 1569215 - RNA, 19 nt, Human adenovirus D
cgccgcuguggagccacug

SEQ ID NO: 1569216 - RNA, 15 nt, Human adenovirus D
cucggugcggcugcu

SEQ ID NO: 1569217 - RNA, 12 nt, Human adenovirus D
cuucgcccugcg

SEQ ID NO: 1569218 - RNA, 14 nt, Human adenovirus D
gcgagaaggcgcgc

SEQ ID NO: 1569219 - RNA, 15 nt, Human adenovirus D
gucuccgucacggug

SEQ ID NO: 1569220 - RNA, 19 nt, Human adenovirus D
cgcuggucacauccaucuc

SEQ ID NO: 1569221 - RNA, 18 nt, Human adenovirus D
ucgcuggcugcuggagcu

SEQ ID NO: 1569222 - RNA, 18 nt, Human adenovirus D
agucaaguuugacagcag

SEQ ID NO: 1569223 - RNA, 18 nt, Human adenovirus D
ggcaucucgauccagcag

SEQ ID NO: 1569224 - RNA, 20 nt, Human adenovirus D
uccaguaggaaccagcacac

SEQ ID NO: 1569225 - RNA, 13 nt, Human adenovirus D
caguaagugcagc

SEQ ID NO: 1569226 - RNA, 18 nt, Human adenovirus D
ggccauaaaucugcccug

SEQ ID NO: 1569227 - RNA, 19 nt, Human adenovirus D
uacacgguucucucagcac

SEQ ID NO: 1569228 - RNA, 23 nt, Human adenovirus D
ccggaccuaugggaacaaggccu

SEQ ID NO: 1569229 - RNA, 19 nt, Human adenovirus D
cagcgacgagacuggccuc

SEQ ID NO: 1569230 - RNA, 17 nt, Human adenovirus D
ggucacacuagcgcccu

SEQ ID NO: 1569231 - RNA, 18 nt, Human adenovirus D
cggcgcgagcugagcgac

SEQ ID NO: 1569232 - RNA, 22 nt, Human adenovirus D
gcuagagugaggcacugcucuu

SEQ ID NO: 1569233 - RNA, 23 nt, Human adenovirus D
cgagccgcgcgccgcgccgccac

SEQ ID NO: 1569234 - RNA, 22 nt, Human adenovirus D
gcagcguugagcucacccacuu

SEQ ID NO: 1569235 - RNA, 15 nt, Human adenovirus D
acgccaggcuggccg

SEQ ID NO: 1569236 - RNA, 20 nt, Human adenovirus D
gccacugccgcugcaaccug

SEQ ID NO: 1569237 - RNA, 23 nt, Human adenovirus D
gcccagcagcauguacggaggag

SEQ ID NO: 1569238 - RNA, 17 nt, Human adenovirus D
ccgugcgcuaccacccc

SEQ ID NO: 1569239 - RNA, 16 nt, Human adenovirus D
guggagcccgagguca

SEQ ID NO: 1569240 - RNA, 23 nt, Human adenovirus D
acaccgccuccacccuggaagcc

SEQ ID NO: 1569241 - RNA, 12 nt, Human adenovirus D
cugcugcuccac

SEQ ID NO: 1569242 - RNA, 23 nt, Human adenovirus D
ugggcccuugaacagcauauacc

SEQ ID NO: 1569243 - RNA, 14 nt, Human adenovirus D
ggccccgcgggcag

SEQ ID NO: 1569244 - RNA, 17 nt, Human adenovirus D
guggccuuguaccugcc

SEQ ID NO: 1569245 - RNA, 15 nt, Human adenovirus D
uccgcauccaagaag

SEQ ID NO: 1569246 - RNA, 18 nt, Human adenovirus D
ucaggagcgcagccugag

SEQ ID NO: 1569247 - RNA, 13 nt, Human adenovirus D
acgaugagaccaa

SEQ ID NO: 1569248 - RNA, 18 nt, Human adenovirus D
uggaagaagagcagcaca

SEQ ID NO: 1569249 - RNA, 15 nt, Human adenovirus D
guucaauggagagaa

SEQ ID NO: 1569250 - RNA, 14 nt, Human adenovirus D
aacucuuaaaucau

SEQ ID NO: 1569251 - RNA, 20 nt, Human adenovirus D
aaggugguggacggccuggc

SEQ ID NO: 1569252 - RNA, 22 nt, Human adenovirus D
gaggacuuaaccacccacgagc

SEQ ID NO: 1569253 - RNA, 13 nt, Human adenovirus D
gaauaaagccucu

SEQ ID NO: 1569254 - RNA, 15 nt, Human adenovirus D
cggcaccagccagcu

SEQ ID NO: 1569255 - RNA, 12 nt, Human adenovirus D
gacaucaugaac

SEQ ID NO: 1569256 - RNA, 19 nt, Human adenovirus D
aucccggccaaggccacca

SEQ ID NO: 1569257 - RNA, 17 nt, Human adenovirus D
ugauuucuacgggugag

SEQ ID NO: 1569258 - RNA, 13 nt, Human adenovirus D
caaagagccgcuc

SEQ ID NO: 1569259 - RNA, 15 nt, Human adenovirus D
ccuccguagccuggc

SEQ ID NO: 1569260 - RNA, 15 nt, Human adenovirus D
caagcagguggcgcc

SEQ ID NO: 1569261 - RNA, 23 nt, Human adenovirus D
guacuacgccagccgcaggcgcc

SEQ ID NO: 1569262 - RNA, 16 nt, Human adenovirus D
auucauaccaucaaug

SEQ ID NO: 1569263 - RNA, 21 nt, Human adenovirus D
guaggccacgugaccaggggu

SEQ ID NO: 1569264 - RNA, 12 nt, Human adenovirus D
auuaaaaaauua

SEQ ID NO: 1569265 - RNA, 16 nt, Human adenovirus D
acgucaccugcggcgc

SEQ ID NO: 1569266 - RNA, 13 nt, Human adenovirus D
gccgcgccagacg

SEQ ID NO: 1569267 - RNA, 18 nt, Human adenovirus D
uggaagagauggaagaag

SEQ ID NO: 1569268 - RNA, 13 nt, Human adenovirus D
caguguuugagaa

SEQ ID NO: 1569269 - RNA, 19 nt, Human adenovirus D
caagcuggugaugccaggg

SEQ ID NO: 1569270 - RNA, 19 nt, Human adenovirus D
auccugaucucugccaugu

SEQ ID NO: 1569271 - RNA, 12 nt, Human adenovirus D
gccgcaggccaa

SEQ ID NO: 1569272 - RNA, 17 nt, Human adenovirus D
ggcaagagucugaagcc

SEQ ID NO: 1569273 - RNA, 20 nt, Human adenovirus D
ccggcggcgcgagcugagcg

SEQ ID NO: 1569274 - RNA, 16 nt, Human adenovirus D
augugccuuaccgcca

SEQ ID NO: 1569275 - RNA, 12 nt, Human adenovirus D
aggccaggagga

SEQ ID NO: 1569276 - RNA, 22 nt, Human adenovirus D
cugcgcugcuucgcccgggaga

SEQ ID NO: 1569277 - RNA, 22 nt, Human adenovirus D
gaagcggugucgcggacgcgcu

SEQ ID NO: 1569278 - RNA, 17 nt, Human adenovirus D
cugcucuucccuggaga

SEQ ID NO: 1569279 - RNA, 15 nt, Human adenovirus D
gacauacaaaaaucg

SEQ ID NO: 1569280 - RNA, 15 nt, Human adenovirus D
cagcucugggucccc

SEQ ID NO: 1569281 - RNA, 18 nt, Human adenovirus D
gcucgcgccucaauguca

SEQ ID NO: 1569282 - RNA, 17 nt, Human adenovirus D
ccaguaggaaccagcac

SEQ ID NO: 1569283 - RNA, 20 nt, Human adenovirus D
cgacgaggauuucgagccga

SEQ ID NO: 1569284 - RNA, 18 nt, Human adenovirus D
gaggcauggcaggcagcg

SEQ ID NO: 1569285 - RNA, 14 nt, Human adenovirus D
aaguaggugaagaa

SEQ ID NO: 1569286 - RNA, 20 nt, Human adenovirus D
gcggccagaugcggaggaga

SEQ ID NO: 1569287 - RNA, 17 nt, Human adenovirus D
agccgcgcgcuggggca

SEQ ID NO: 1569288 - RNA, 15 nt, Human adenovirus D
cggugcccgcuccgc

SEQ ID NO: 1569289 - RNA, 14 nt, Human adenovirus D
acuagcgcccuggu

SEQ ID NO: 1569290 - RNA, 14 nt, Human adenovirus D
cugaaggagcugga

SEQ ID NO: 1569291 - RNA, 22 nt, Human adenovirus D
gucuuucucuuucucugccaca

SEQ ID NO: 1569292 - RNA, 16 nt, Human adenovirus D
cugugcuaaguguggu

SEQ ID NO: 1569293 - RNA, 14 nt, Human adenovirus D
aaggugugguuuau

SEQ ID NO: 1569294 - RNA, 18 nt, Human adenovirus D
gcagaagaagacgaaugg

SEQ ID NO: 1569295 - RNA, 13 nt, Human adenovirus D
cgucccaggaaac

SEQ ID NO: 1569296 - RNA, 21 nt, Human adenovirus D
gaccccuggcucccagccucc

SEQ ID NO: 1569297 - RNA, 22 nt, Human adenovirus D
gagcacgcccgccauggggcgc

SEQ ID NO: 1569298 - RNA, 19 nt, Human adenovirus D
gaaccgccgccggcggcgg

SEQ ID NO: 1569299 - RNA, 22 nt, Human adenovirus D
cccugggcauagucgcgccgcg

SEQ ID NO: 1569300 - RNA, 13 nt, Human adenovirus D
gauagccgccagg

SEQ ID NO: 1569301 - RNA, 16 nt, Human adenovirus D
gggaacggggcagagg

SEQ ID NO: 1569302 - RNA, 13 nt, Human adenovirus D
agccggcggcgcg

SEQ ID NO: 1569303 - RNA, 19 nt, Human adenovirus D
gcaacaggggauguugauc

SEQ ID NO: 1569304 - RNA, 18 nt, Human adenovirus D
cuaaagccaaacacaccu

SEQ ID NO: 1569305 - RNA, 17 nt, Human adenovirus D
cgacagucugagggcca

SEQ ID NO: 1569306 - RNA, 17 nt, Human adenovirus D
ucucggccaaucagcag

SEQ ID NO: 1569307 - RNA, 14 nt, Human adenovirus D
gcagccgccaugac

SEQ ID NO: 1569308 - RNA, 19 nt, Human adenovirus D
cugcagguggacgagccgc

SEQ ID NO: 1569309 - RNA, 22 nt, Human adenovirus D
agggcaucuucugccuggucaa

SEQ ID NO: 1569310 - RNA, 19 nt, Human adenovirus D
caugcgcaggcgccugagu

SEQ ID NO: 1569311 - RNA, 17 nt, Human adenovirus D
uuacuaggcccagcagc

SEQ ID NO: 1569312 - RNA, 14 nt, Human adenovirus D
gcuggagagcgaua

SEQ ID NO: 1569313 - RNA, 23 nt, Human adenovirus D
gcccguggucagcgaugagcagc

SEQ ID NO: 1569314 - RNA, 21 nt, Human adenovirus D
cacgcacgagaaggugcuggc

SEQ ID NO: 1569315 - RNA, 14 nt, Human adenovirus D
aggcgcuggaagag

SEQ ID NO: 1569316 - RNA, 16 nt, Human adenovirus D
caacagccacaugacc

SEQ ID NO: 1569317 - RNA, 22 nt, Human adenovirus D
ccuccuguuacuguaaagccac

SEQ ID NO: 1569318 - RNA, 19 nt, Human adenovirus D
acgcuguaccgcgaggcca

SEQ ID NO: 1569319 - RNA, 18 nt, Human adenovirus D
gcuguaccgcgaggccau

SEQ ID NO: 1569320 - RNA, 19 nt, Human adenovirus D
ccuccccgacccccuucca

SEQ ID NO: 1569321 - RNA, 16 nt, Human adenovirus D
cuaccgcugcgcagca

SEQ ID NO: 1569322 - RNA, 18 nt, Human adenovirus D
cugcuagagugccacugc

SEQ ID NO: 1569323 - RNA, 18 nt, Human adenovirus D
gccgcguaagcaggagca

SEQ ID NO: 1569324 - RNA, 20 nt, Human adenovirus D
cgggacuuggucaccccgcc

SEQ ID NO: 1569325 - RNA, 19 nt, Human adenovirus D
guguugcaugaugggaaug

SEQ ID NO: 1569326 - RNA, 15 nt, Human adenovirus D
gccucguccucuucc

SEQ ID NO: 1569327 - RNA, 16 nt, Human adenovirus D
ggugcgcacgcccgcg

SEQ ID NO: 1569328 - RNA, 15 nt, Human adenovirus D
gucagcugcaaaaag

SEQ ID NO: 1569329 - RNA, 17 nt, Human adenovirus D
ccgcuaccgcuuccacu

SEQ ID NO: 1569330 - RNA, 21 nt, Human adenovirus D
guccuucacucccaaccaggc

SEQ ID NO: 1569331 - RNA, 13 nt, Human adenovirus D
gaugagcugcgag

SEQ ID NO: 1569332 - RNA, 22 nt, Human adenovirus D
accaacggcugcauccacugcu

SEQ ID NO: 1569333 - RNA, 14 nt, Human adenovirus D
auucagagccaggg

SEQ ID NO: 1569334 - RNA, 21 nt, Human adenovirus D
ggagcuugcccuuggaagagc

SEQ ID NO: 1569335 - RNA, 13 nt, Human adenovirus D
uucgcugcugccg

SEQ ID NO: 1569336 - RNA, 22 nt, Human adenovirus D
aggcagcuccgguugugcagcc

SEQ ID NO: 1569337 - RNA, 20 nt, Human adenovirus D
cuccgcacauguugaaaagc

SEQ ID NO: 1569338 - RNA, 17 nt, Human adenovirus D
cucgaagauucuggaga

SEQ ID NO: 1569339 - RNA, 21 nt, Human adenovirus D
agauucaauaagguucugccc

SEQ ID NO: 1569340 - RNA, 13 nt, Human adenovirus D
aucgaggugcaga

SEQ ID NO: 1569341 - RNA, 19 nt, Human adenovirus D
uggccuuaaauaaggaaau

SEQ ID NO: 1569342 - RNA, 17 nt, Human adenovirus D
ugagguuagugccaaua

SEQ ID NO: 1569343 - RNA, 18 nt, Human adenovirus D
ggccacggggagccccuu

SEQ ID NO: 1569344 - RNA, 13 nt, Human adenovirus D
aucagacaugcug

SEQ ID NO: 1569345 - RNA, 16 nt, Human adenovirus D
gcaauaccaccccaug

SEQ ID NO: 1569346 - RNA, 17 nt, Human adenovirus D
cagcagaaaugggcccu

SEQ ID NO: 1569347 - RNA, 23 nt, Human adenovirus D
cgcguguugcggcccggcacggc

SEQ ID NO: 1569348 - RNA, 13 nt, Human adenovirus D
gucaggagcagcg

SEQ ID NO: 1569349 - RNA, 22 nt, Human adenovirus D
caacaccugggcacuggagcac

SEQ ID NO: 1569350 - RNA, 22 nt, Human adenovirus D
ggcggacugccaccgccgccgc

SEQ ID NO: 1569351 - RNA, 12 nt, Human adenovirus D
uuccugaugcag

SEQ ID NO: 1569352 - RNA, 18 nt, Human adenovirus D
cuugcaacuugcaaacaa

SEQ ID NO: 1569353 - RNA, 20 nt, Human adenovirus D
cccaggaauggcacgcucug

SEQ ID NO: 1569354 - RNA, 17 nt, Human adenovirus D
aggccgugaaggccggc

SEQ ID NO: 1569355 - RNA, 21 nt, Human adenovirus D
gcggggaggagcccgaggaga

SEQ ID NO: 1569356 - RNA, 11 nt, Human adenovirus D
uaugccagggu

SEQ ID NO: 1569357 - RNA, 14 nt, Human adenovirus D
ccugacgagccaaa

SEQ ID NO: 1569358 - RNA, 19 nt, Human adenovirus D
augcaucccguccugcgcc

SEQ ID NO: 1569359 - RNA, 13 nt, Human adenovirus D
ggcaccagccagc

SEQ ID NO: 1569360 - RNA, 18 nt, Human adenovirus D
gagcgugauggcgcaggc

SEQ ID NO: 1569361 - RNA, 15 nt, Human adenovirus D
cucgguugaggcacc

SEQ ID NO: 1569362 - RNA, 16 nt, Human adenovirus D
cagcacaaacgugcag

SEQ ID NO: 1569363 - RNA, 16 nt, Human adenovirus D
gccuggucaaacaggc

SEQ ID NO: 1569364 - RNA, 20 nt, Human adenovirus D
uggccuccagccuuuccaug

SEQ ID NO: 1569365 - RNA, 22 nt, Human adenovirus D
cagcagaaauuucaagcugggc

SEQ ID NO: 1569366 - RNA, 16 nt, Human adenovirus D
acguggugcugcugcc

SEQ ID NO: 1569367 - RNA, 20 nt, Human adenovirus D
cgcaguccgccaagcuccuc

SEQ ID NO: 1569368 - RNA, 16 nt, Human adenovirus D
caaucagccccuuccc

SEQ ID NO: 1569369 - RNA, 19 nt, Human adenovirus D
cgcgaggccauaggccagg

SEQ ID NO: 1569370 - RNA, 23 nt, Human adenovirus D
gcggccguccuuucgcugcugcc

SEQ ID NO: 1569371 - RNA, 15 nt, Human adenovirus D
cuggaagccaugcug

SEQ ID NO: 1569372 - RNA, 21 nt, Human adenovirus D
ggccuuaaauaaggaaauguu

SEQ ID NO: 1569373 - RNA, 16 nt, Human adenovirus D
ucaaaguaaaaaaccg

SEQ ID NO: 1569374 - RNA, 13 nt, Human adenovirus D
ggcgcuggaagag

SEQ ID NO: 1569375 - RNA, 21 nt, Human adenovirus D
gccccugagcggcugcacgag

SEQ ID NO: 1569376 - RNA, 19 nt, Human adenovirus D
agccggagugaugaauaug

SEQ ID NO: 1569377 - RNA, 16 nt, Human adenovirus D
gccuuguaccugcccg

SEQ ID NO: 1569378 - RNA, 17 nt, Human adenovirus D
gcuugcgcgcuggcuug

SEQ ID NO: 1569379 - RNA, 23 nt, Human adenovirus D
ugucacuagaggugguaaaauua

SEQ ID NO: 1569380 - RNA, 21 nt, Human adenovirus D
acucgugcgaggggccaagaa

SEQ ID NO: 1569381 - RNA, 13 nt, Human adenovirus D
accgaggugcccc

SEQ ID NO: 1569382 - RNA, 13 nt, Human adenovirus D
augaacaggagca

SEQ ID NO: 1569383 - RNA, 17 nt, Human adenovirus D
ggaggcgguccccgccc

SEQ ID NO: 1569384 - RNA, 20 nt, Human adenovirus D
gcgccucaaugucagcugca

SEQ ID NO: 1569385 - RNA, 18 nt, Human adenovirus D
acuuguaugugccuuacc

SEQ ID NO: 1569386 - RNA, 16 nt, Human adenovirus D
cacaguuggcgaccca

SEQ ID NO: 1569387 - RNA, 18 nt, Human adenovirus D
uccacgguggcggcgagg

SEQ ID NO: 1569388 - RNA, 16 nt, Human adenovirus D
gcuauaaaucuuuucu

SEQ ID NO: 1569389 - RNA, 15 nt, Human adenovirus D
gcaggcgacccugga

SEQ ID NO: 1569390 - RNA, 19 nt, Human adenovirus D
acagcuagacaccacagug

SEQ ID NO: 1569391 - RNA, 12 nt, Human adenovirus D
aucgcccaggcg

SEQ ID NO: 1569392 - RNA, 21 nt, Human adenovirus D
ucgagcauggcuaccugggag

SEQ ID NO: 1569393 - RNA, 23 nt, Human adenovirus D
agcuggaagcccugagccgccag

SEQ ID NO: 1569394 - RNA, 21 nt, Human adenovirus D
gaguucgcuccgcggcggcgc

SEQ ID NO: 1569395 - RNA, 20 nt, Human adenovirus D
uggagcacagaccuucaggg

SEQ ID NO: 1569396 - RNA, 13 nt, Human adenovirus D
ggccuguccugca

SEQ ID NO: 1569397 - RNA, 17 nt, Human adenovirus D
ucagcagucucugccgc

SEQ ID NO: 1569398 - RNA, 18 nt, Human adenovirus D
gaccugcgcgucgacggc

SEQ ID NO: 1569399 - RNA, 17 nt, Human adenovirus D
guguccgcgcucgguga

SEQ ID NO: 1569400 - RNA, 22 nt, Human adenovirus D
cauggccagcacguacuuugac

SEQ ID NO: 1569401 - RNA, 15 nt, Human adenovirus D
ccggcacggcggugg

SEQ ID NO: 1569402 - RNA, 19 nt, Human adenovirus D
caaaguuuuucaggggcuu

SEQ ID NO: 1569403 - RNA, 22 nt, Human adenovirus D
ccccgagaauuucaugaccagc

SEQ ID NO: 1569404 - RNA, 23 nt, Human adenovirus D
caaggccauccgucccgacgagg

SEQ ID NO: 1569405 - RNA, 20 nt, Human adenovirus D
cacaaaaaugaagcccugcu

SEQ ID NO: 1569406 - RNA, 22 nt, Human adenovirus D
gcucccacagugcccccuccac

SEQ ID NO: 1569407 - RNA, 18 nt, Human adenovirus D
uggccgcccugacccagc

SEQ ID NO: 1569408 - RNA, 14 nt, Human adenovirus D
gcgucgaggagcug

SEQ ID NO: 1569409 - RNA, 19 nt, Human adenovirus D
acuaaacuuuaugagggag

SEQ ID NO: 1569410 - RNA, 21 nt, Human adenovirus D
caucgugcgcgaccugggcug

SEQ ID NO: 1569411 - RNA, 11 nt, Human adenovirus D
ggcggagggug

SEQ ID NO: 1569412 - RNA, 19 nt, Human adenovirus D
gaagcccagagcucgcggg

SEQ ID NO: 1569413 - RNA, 21 nt, Human adenovirus D
cagcaagccucugacggcgca

SEQ ID NO: 1569414 - RNA, 17 nt, Human adenovirus D
ggguccugucacucaaa

SEQ ID NO: 1569415 - RNA, 21 nt, Human adenovirus D
agcugccaugggaggaagcaa

SEQ ID NO: 1569416 - RNA, 13 nt, Human adenovirus D
gccagcacguacu

SEQ ID NO: 1569417 - RNA, 21 nt, Human adenovirus D
acuacuuccgcgugacgcacu

SEQ ID NO: 1569418 - RNA, 16 nt, Human adenovirus D
cguuccaucagcacgu

SEQ ID NO: 1569419 - RNA, 16 nt, Human adenovirus D
gauggccuguaccggg

SEQ ID NO: 1569420 - RNA, 17 nt, Human adenovirus D
acaaagcugaaagcuau

SEQ ID NO: 1569421 - RNA, 14 nt, Human adenovirus D
agcuaauggacuac

SEQ ID NO: 1569422 - RNA, 22 nt, Human adenovirus D
ugggcgcuugcaagggugcgcu

SEQ ID NO: 1569423 - RNA, 20 nt, Human adenovirus D
gggguucauguugugcagga

SEQ ID NO: 1569424 - RNA, 16 nt, Human adenovirus D
augaccauagaccuga

SEQ ID NO: 1569425 - RNA, 14 nt, Human adenovirus D
gcgcaggcgcugga

SEQ ID NO: 1569426 - RNA, 12 nt, Human adenovirus D
acgaccugggcg

SEQ ID NO: 1569427 - RNA, 17 nt, Human adenovirus D
cugggcucgagcauggc

SEQ ID NO: 1569428 - RNA, 14 nt, Human adenovirus D
uauggucugcuccu

SEQ ID NO: 1569429 - RNA, 13 nt, Human adenovirus D
ccagccuccaccg

SEQ ID NO: 1569430 - RNA, 19 nt, Human adenovirus D
aagauggaggagcagccgc

SEQ ID NO: 1569431 - RNA, 21 nt, Human adenovirus D
agcagaggaagagggucacac

SEQ ID NO: 1569432 - RNA, 17 nt, Human adenovirus D
ggcuucaccggcuaccu

SEQ ID NO: 1569433 - RNA, 22 nt, Human adenovirus D
acuuaacucugauucaugugaa

SEQ ID NO: 1569434 - RNA, 13 nt, Human adenovirus D
cagcuggcccggc

SEQ ID NO: 1569435 - RNA, 22 nt, Human adenovirus D
gaaccucaaguaggugaagaaa

SEQ ID NO: 1569436 - RNA, 15 nt, Human adenovirus D
gaacuggcagagcac

SEQ ID NO: 1569437 - RNA, 17 nt, Human adenovirus D
ucggcggcguggcccuu

SEQ ID NO: 1569438 - RNA, 13 nt, Human adenovirus D
cuucgagcagugg

SEQ ID NO: 1569439 - RNA, 14 nt, Human adenovirus D
ggcgcaaccaggag

SEQ ID NO: 1569440 - RNA, 14 nt, Human adenovirus D
aauuuuuauuuccu

SEQ ID NO: 1569441 - RNA, 21 nt, Human adenovirus D
gcuccagccaaagcucauguu

SEQ ID NO: 1569442 - RNA, 16 nt, Human adenovirus D
caauguuacgcugccc

SEQ ID NO: 1569443 - RNA, 22 nt, Human adenovirus D
cuggacccuccgucggaagagg

SEQ ID NO: 1569444 - RNA, 23 nt, Human adenovirus D
agaccaugaccauagaccugaug

SEQ ID NO: 1569445 - RNA, 21 nt, Human adenovirus D
augccccacaucgaggcccuc

SEQ ID NO: 1569446 - RNA, 15 nt, Human adenovirus D
cacguggcggcggcc

SEQ ID NO: 1569447 - RNA, 20 nt, Human adenovirus D
cagcauguacggaggagcca

SEQ ID NO: 1569448 - RNA, 13 nt, Human adenovirus D
gacgguguagccc

SEQ ID NO: 1569449 - RNA, 14 nt, Human adenovirus D
caauguaacuaaac

SEQ ID NO: 1569450 - RNA, 19 nt, Human adenovirus D
ucaaacccuacucgggcac

SEQ ID NO: 1569451 - RNA, 12 nt, Human adenovirus D
guggccucuucg

SEQ ID NO: 1569452 - RNA, 14 nt, Human adenovirus D
aucagaaacacaga

SEQ ID NO: 1569453 - RNA, 13 nt, Human adenovirus D
accugcgcgggcu

SEQ ID NO: 1569454 - RNA, 17 nt, Human adenovirus D
gcccuugcgcgagcaga

SEQ ID NO: 1569455 - RNA, 18 nt, Human adenovirus D
augcaccuguggagggca

SEQ ID NO: 1569456 - RNA, 15 nt, Human adenovirus D
acgacauccuggacc

SEQ ID NO: 1569457 - RNA, 16 nt, Human adenovirus D
gacugauggccacggg

SEQ ID NO: 1569458 - RNA, 16 nt, Human adenovirus D
acaagucaaaagaaaa

SEQ ID NO: 1569459 - RNA, 14 nt, Human adenovirus D
ggcgggcagggagc

SEQ ID NO: 1569460 - RNA, 16 nt, Human adenovirus D
gggcguugcgggccga

SEQ ID NO: 1569461 - RNA, 21 nt, Human adenovirus D
cagucuccaacgccugcgcca

SEQ ID NO: 1569462 - RNA, 19 nt, Human adenovirus D
ccgcaacucguaccugggu

SEQ ID NO: 1569463 - RNA, 20 nt, Human adenovirus D
ucacauuaaaggcuggcccu

SEQ ID NO: 1569464 - RNA, 18 nt, Human adenovirus D
agaaacgucccagcagca

SEQ ID NO: 1569465 - RNA, 21 nt, Human adenovirus D
ugcaaacaauaaaaaacuuga

SEQ ID NO: 1569466 - RNA, 16 nt, Human adenovirus D
gcgcgaguucgcuccg

SEQ ID NO: 1569467 - RNA, 15 nt, Human adenovirus D
aaucaagacaaaauu

SEQ ID NO: 1569468 - RNA, 14 nt, Human adenovirus D
aguggggcggcaaa

SEQ ID NO: 1569469 - RNA, 14 nt, Human adenovirus D
ccgucagcagcagg

SEQ ID NO: 1569470 - RNA, 14 nt, Human adenovirus D
gcaggcgcuggaag

SEQ ID NO: 1569471 - RNA, 23 nt, Human adenovirus D
agcccaacggcaccugcgagccc

SEQ ID NO: 1569472 - RNA, 13 nt, Human adenovirus D
cggagcuggcucc

SEQ ID NO: 1569473 - RNA, 21 nt, Human adenovirus D
cacgcugguggccaccucgcc

SEQ ID NO: 1569474 - RNA, 19 nt, Human adenovirus D
gacgagguguacggcgacg

SEQ ID NO: 1569475 - RNA, 16 nt, Human adenovirus D
gaaagcuauaaaaaug

SEQ ID NO: 1569476 - RNA, 16 nt, Human adenovirus D
cugugccucuccauca

SEQ ID NO: 1569477 - RNA, 19 nt, Human adenovirus D
guacgaggccaugcugcgc

SEQ ID NO: 1569478 - RNA, 17 nt, Human adenovirus D
cgcgaagauggccaccc

SEQ ID NO: 1569479 - RNA, 13 nt, Human adenovirus D
uggagggcugucc

SEQ ID NO: 1569480 - RNA, 13 nt, Human adenovirus D
gaucgcgaggaca

SEQ ID NO: 1569481 - RNA, 11 nt, Human adenovirus D
ccagaauucaa

SEQ ID NO: 1569482 - RNA, 16 nt, Human adenovirus D
ccaggcagugcagcgc

SEQ ID NO: 1569483 - RNA, 12 nt, Human adenovirus D
gcuggcccugcu

SEQ ID NO: 1569484 - RNA, 12 nt, Human adenovirus D
ugggaugcugcc

SEQ ID NO: 1569485 - RNA, 17 nt, Human adenovirus D
cgaguuggaggagaugg

SEQ ID NO: 1569486 - RNA, 14 nt, Human adenovirus D
agccggcggcgcga

SEQ ID NO: 1569487 - RNA, 17 nt, Human adenovirus D
uccugcugcuccaccac

SEQ ID NO: 1569488 - RNA, 23 nt, Human adenovirus D
uccaguuacgggagcgagccccc

SEQ ID NO: 1569489 - RNA, 18 nt, Human adenovirus D
gccugggcucgcuggugg

SEQ ID NO: 1569490 - RNA, 15 nt, Human adenovirus D
acgcgccggggccgc

SEQ ID NO: 1569491 - RNA, 22 nt, Human adenovirus D
uugaugcgcuucuuaccucgcg

SEQ ID NO: 1569492 - RNA, 16 nt, Human adenovirus D
accaggacgguguagc

SEQ ID NO: 1569493 - RNA, 13 nt, Human adenovirus D
aggaggagacuga

SEQ ID NO: 1569494 - RNA, 19 nt, Human adenovirus D
gcgauguugccacccagau

SEQ ID NO: 1569495 - RNA, 16 nt, Human adenovirus D
guaaugaaacccgcca

SEQ ID NO: 1569496 - RNA, 14 nt, Human adenovirus D
gcacagcagggaca

SEQ ID NO: 1569497 - RNA, 23 nt, Human adenovirus D
gccaagaaacgucccagcagcac

SEQ ID NO: 1569498 - RNA, 16 nt, Human adenovirus D
ggacgacguggacagc

SEQ ID NO: 1569499 - RNA, 22 nt, Human adenovirus D
gcguggcccuuggcgcggagcu

SEQ ID NO: 1569500 - RNA, 17 nt, Human adenovirus D
agaacauguucuacgcc

SEQ ID NO: 1569501 - RNA, 20 nt, Human adenovirus D
cauagcuuccguugcgcugc

SEQ ID NO: 1569502 - RNA, 19 nt, Human adenovirus D
gcaaagcgguugagcuggg

SEQ ID NO: 1569503 - RNA, 15 nt, Human adenovirus D
ugaaagcauacagag

SEQ ID NO: 1569504 - RNA, 20 nt, Human adenovirus D
gcuggcugaaucccacuccc

SEQ ID NO: 1569505 - RNA, 15 nt, Human adenovirus D
cuccggguucuggag

SEQ ID NO: 1569506 - RNA, 21 nt, Human adenovirus D
gaccaggcggcagagcgggcg

SEQ ID NO: 1569507 - RNA, 18 nt, Human adenovirus D
ggacgggcgcccagugcu

SEQ ID NO: 1569508 - RNA, 19 nt, Human adenovirus D
ugggcuauaauaagcagag

SEQ ID NO: 1569509 - RNA, 16 nt, Human adenovirus D
cagcauguacggagga

SEQ ID NO: 1569510 - RNA, 18 nt, Human adenovirus D
ugcugauugcucuggccu

SEQ ID NO: 1569511 - RNA, 22 nt, Human adenovirus D
accugcauuggcagccgagccg

SEQ ID NO: 1569512 - RNA, 23 nt, Human adenovirus D
cgccaagacaaaggaggccacgu

SEQ ID NO: 1569513 - RNA, 22 nt, Human adenovirus D
gaagcccugagccgccagcugg

SEQ ID NO: 1569514 - RNA, 23 nt, Human adenovirus D
gccgcugcaaccugugcucuccg

SEQ ID NO: 1569515 - RNA, 21 nt, Human adenovirus D
cagccgucuggacccgcggcc

SEQ ID NO: 1569516 - RNA, 17 nt, Human adenovirus D
ccucgcgucuccaugag

SEQ ID NO: 1569517 - RNA, 23 nt, Human adenovirus D
gaugauguccuugaggaggagac

SEQ ID NO: 1569518 - RNA, 19 nt, Human adenovirus D
cuggagacgggcugcuucu

SEQ ID NO: 1569519 - RNA, 14 nt, Human adenovirus D
ggccgaggaggagc

SEQ ID NO: 1569520 - RNA, 21 nt, Human adenovirus D
aggugcugccccaggcggugc

SEQ ID NO: 1569521 - RNA, 20 nt, Human adenovirus D
agauagugcuuacucuauaa

SEQ ID NO: 1569522 - RNA, 14 nt, Human adenovirus D
ucuccauccccucg

SEQ ID NO: 1569523 - RNA, 16 nt, Human adenovirus D
aucuacaagagagaug

SEQ ID NO: 1569524 - RNA, 14 nt, Human adenovirus D
gcaggccaggagga

SEQ ID NO: 1569525 - RNA, 14 nt, Human adenovirus D
acaugacccugcau

SEQ ID NO: 1569526 - RNA, 19 nt, Human adenovirus D
agccacagccacagacaga

SEQ ID NO: 1569527 - RNA, 18 nt, Human adenovirus D
acauccucuucugucucu

SEQ ID NO: 1569528 - RNA, 22 nt, Human adenovirus D
ggcacugcucuucccuggagac

SEQ ID NO: 1569529 - RNA, 13 nt, Human adenovirus D
ccuucgagcugca

SEQ ID NO: 1569530 - RNA, 16 nt, Human adenovirus D
acgagacgcgcgcggc

SEQ ID NO: 1569531 - RNA, 12 nt, Human adenovirus D
ccccuggcuccc

SEQ ID NO: 1569532 - RNA, 21 nt, Human adenovirus D
cugacauccauggccagggga

SEQ ID NO: 1569533 - RNA, 12 nt, Human adenovirus D
cacagugcagaa

SEQ ID NO: 1569534 - RNA, 20 nt, Human adenovirus D
acaguagucaucaaaugcga

SEQ ID NO: 1569535 - RNA, 14 nt, Human adenovirus D
acggcgggcugacg

SEQ ID NO: 1569536 - RNA, 20 nt, Human adenovirus D
ucucccaggcuuucaucucg

SEQ ID NO: 1569537 - RNA, 22 nt, Human adenovirus D
gagaucaacuacaaggacuaca

SEQ ID NO: 1569538 - RNA, 20 nt, Human adenovirus D
ccacgaugugaccacggacc

SEQ ID NO: 1569539 - RNA, 16 nt, Human adenovirus D
aucucgcugccgcugg

SEQ ID NO: 1569540 - RNA, 16 nt, Human adenovirus D
ggcccagaacuggcag

SEQ ID NO: 1569541 - RNA, 18 nt, Human adenovirus D
agacgcaggccaggagga

SEQ ID NO: 1569542 - RNA, 21 nt, Human adenovirus D
ugcacaguauugugggccugg

SEQ ID NO: 1569543 - RNA, 22 nt, Human adenovirus D
ugugaccacggaccggucccag

SEQ ID NO: 1569544 - RNA, 14 nt, Human adenovirus D
cgccugcuugcaag

SEQ ID NO: 1569545 - RNA, 14 nt, Human adenovirus D
acuggguggcccuu

SEQ ID NO: 1569546 - RNA, 20 nt, Human adenovirus D
cgcgguaacguuccaucagc

SEQ ID NO: 1569547 - RNA, 16 nt, Human adenovirus D
aaugucaggucugcug

SEQ ID NO: 1569548 - RNA, 15 nt, Human adenovirus D
gacaacagccgcagg

SEQ ID NO: 1569549 - RNA, 20 nt, Human adenovirus D
ucgaucaucuccccgcggcg

SEQ ID NO: 1569550 - RNA, 15 nt, Human adenovirus D
gcgccgacgcgcucc

SEQ ID NO: 1569551 - RNA, 17 nt, Human adenovirus D
cgaugaaagucaggagc

SEQ ID NO: 1569552 - RNA, 23 nt, Human adenovirus D
gcgcugcccguucucgcugguca

SEQ ID NO: 1569553 - RNA, 21 nt, Human adenovirus D
cuacggcaucucgauccagca

SEQ ID NO: 1569554 - RNA, 14 nt, Human adenovirus D
gcucgcgcccguag

SEQ ID NO: 1569555 - RNA, 20 nt, Human adenovirus D
ccucgaugaugccgcagugg

SEQ ID NO: 1569556 - RNA, 18 nt, Human adenovirus D
ugagacucauccugcugg

SEQ ID NO: 1569557 - RNA, 16 nt, Human adenovirus D
ucgcccgggagagcug

SEQ ID NO: 1569558 - RNA, 21 nt, Human adenovirus D
cuucuuccggcaaaaaucaca

SEQ ID NO: 1569559 - RNA, 14 nt, Human adenovirus D
cucgucuuccagga

SEQ ID NO: 1569560 - RNA, 23 nt, Human adenovirus D
auguucucacaguaagugcagca

SEQ ID NO: 1569561 - RNA, 20 nt, Human adenovirus D
gccaucaagaaccugcuccu

SEQ ID NO: 1569562 - RNA, 23 nt, Human adenovirus D
cgggccaugaugcgagccgcgcg

SEQ ID NO: 1569563 - RNA, 17 nt, Human adenovirus D
cuagacuucauggcuug

SEQ ID NO: 1569564 - RNA, 18 nt, Human adenovirus D
auguuauucagcagccca

SEQ ID NO: 1569565 - RNA, 17 nt, Human adenovirus D
caugagcggcuccagcg

SEQ ID NO: 1569566 - RNA, 22 nt, Human adenovirus D
cggcaaaauggcgugcuggaga

SEQ ID NO: 1569567 - RNA, 12 nt, Human adenovirus D
ccccaggccugg

SEQ ID NO: 1569568 - RNA, 12 nt, Human adenovirus D
caagucaaaaga

SEQ ID NO: 1569569 - RNA, 20 nt, Human adenovirus D
auccuccaggacuaucuaug

SEQ ID NO: 1569570 - RNA, 20 nt, Human adenovirus D
acgacugcgacuguagggca

SEQ ID NO: 1569571 - RNA, 18 nt, Human adenovirus D
uccgcagugggcgcagac

SEQ ID NO: 1569572 - RNA, 22 nt, Human adenovirus D
cugguggaaacagacagccagg

SEQ ID NO: 1569573 - RNA, 13 nt, Human adenovirus D
ggccaaggccacc

SEQ ID NO: 1569574 - RNA, 21 nt, Human adenovirus D
cuucccggugcccgcuccgcc

SEQ ID NO: 1569575 - RNA, 15 nt, Human adenovirus D
agaccuuccaggaga

SEQ ID NO: 1569576 - RNA, 20 nt, Human adenovirus D
gcagccugagcuuggccgag

SEQ ID NO: 1569577 - RNA, 20 nt, Human adenovirus D
accaccuggugauggccugu

SEQ ID NO: 1569578 - RNA, 12 nt, Human adenovirus D
acaaggcgcgcu

SEQ ID NO: 1569579 - RNA, 21 nt, Human adenovirus D
cgcgcccuucaccgacagugg

SEQ ID NO: 1569580 - RNA, 18 nt, Human adenovirus D
cugcgcguccgucagcag

SEQ ID NO: 1569581 - RNA, 20 nt, Human adenovirus D
caugacccugcauggcugcg

SEQ ID NO: 1569582 - RNA, 14 nt, Human adenovirus D
agagagaggaagga

SEQ ID NO: 1569583 - RNA, 14 nt, Human adenovirus D
cucuucgcccgacc

SEQ ID NO: 1569584 - RNA, 19 nt, Human adenovirus D
gcacgguaagagcccagca

SEQ ID NO: 1569585 - RNA, 19 nt, Human adenovirus D
cucggccaaucagcaguag

SEQ ID NO: 1569586 - RNA, 17 nt, Human adenovirus D
cacaggugcugcccacc

SEQ ID NO: 1569587 - RNA, 15 nt, Human adenovirus D
cccagcaagucagca

SEQ ID NO: 1569588 - RNA, 16 nt, Human adenovirus D
gccuuaccgccagaga

SEQ ID NO: 1569589 - RNA, 19 nt, Human adenovirus D
ccgacgcgcuccucgcucu

SEQ ID NO: 1569590 - RNA, 15 nt, Human adenovirus D
cugcuguaaagccag

SEQ ID NO: 1569591 - RNA, 22 nt, Human adenovirus D
aggagcugaucucgcugccgcu

SEQ ID NO: 1569592 - RNA, 22 nt, Human adenovirus D
gugcgucgagcacagcaccgca

SEQ ID NO: 1569593 - RNA, 21 nt, Human adenovirus D
aguggcaacaccugggcacug

SEQ ID NO: 1569594 - RNA, 13 nt, Human adenovirus D
cagcgagaggagc

SEQ ID NO: 1569595 - RNA, 14 nt, Human adenovirus D
aagaacauccaugu

SEQ ID NO: 1569596 - RNA, 17 nt, Human adenovirus D
cagccgucuggacccgc

SEQ ID NO: 1569597 - RNA, 20 nt, Human adenovirus D
uuccaccucggugcagccgu

SEQ ID NO: 1569598 - RNA, 14 nt, Human adenovirus D
ccuacgguccagag

SEQ ID NO: 1569599 - RNA, 13 nt, Human adenovirus D
ccgcugugcuggu

SEQ ID NO: 1569600 - RNA, 19 nt, Human adenovirus D
gagaaccgccuggggcaga

SEQ ID NO: 1569601 - RNA, 22 nt, Human adenovirus D
gacagugcuccacucgacccug

SEQ ID NO: 1569602 - RNA, 14 nt, Human adenovirus D
gcugcugccgagcc

SEQ ID NO: 1569603 - RNA, 14 nt, Human adenovirus D
gcgagaagcggccg

SEQ ID NO: 1569604 - RNA, 17 nt, Human adenovirus D
gcacucauccaugauga

SEQ ID NO: 1569605 - RNA, 19 nt, Human adenovirus D
ccgagggucgcuggcugcu

SEQ ID NO: 1569606 - RNA, 23 nt, Human adenovirus D
gaggcgggugagggcgugcuuga

SEQ ID NO: 1569607 - RNA, 17 nt, Human adenovirus D
uggcucagcugccaugg

SEQ ID NO: 1569608 - RNA, 21 nt, Human adenovirus D
acguggugcugcugccgggcu

SEQ ID NO: 1569609 - RNA, 13 nt, Human adenovirus D
caccagccagcug

SEQ ID NO: 1569610 - RNA, 16 nt, Human adenovirus D
cugcaagugcacagac

SEQ ID NO: 1569611 - RNA, 16 nt, Human adenovirus D
gaggacuaccacgccc

SEQ ID NO: 1569612 - RNA, 16 nt, Human adenovirus D
accugaccuugcagag

SEQ ID NO: 1569613 - RNA, 18 nt, Human adenovirus D
uaugacacgcgcacacuu

SEQ ID NO: 1569614 - RNA, 17 nt, Human adenovirus D
uccggugaugccuucca

SEQ ID NO: 1569615 - RNA, 17 nt, Human adenovirus D
caaccuccaggccaacc

SEQ ID NO: 1569616 - RNA, 15 nt, Human adenovirus D
aguggcccuggaugu

SEQ ID NO: 1569617 - RNA, 21 nt, Human adenovirus D
aggucagcagcaagagcucaa

SEQ ID NO: 1569618 - RNA, 13 nt, Human adenovirus D
cccaacaauaaaa

SEQ ID NO: 1569619 - RNA, 20 nt, Human adenovirus D
cacugaaaaugucaaccuug

SEQ ID NO: 1569620 - RNA, 22 nt, Human adenovirus D
ccagcaugccgaagaagaacag

SEQ ID NO: 1569621 - RNA, 15 nt, Human adenovirus D
gggcguagagcuugg

SEQ ID NO: 1569622 - RNA, 16 nt, Human adenovirus D
ugaaaaaauugaggac

SEQ ID NO: 1569623 - RNA, 21 nt, Human adenovirus D
ugcugccgcucagucauccaa

SEQ ID NO: 1569624 - RNA, 12 nt, Human adenovirus D
cauguccaccug

SEQ ID NO: 1569625 - RNA, 20 nt, Human adenovirus D
gugcugcugaaacaccugca

SEQ ID NO: 1569626 - RNA, 17 nt, Human adenovirus D
guaccagucgggcccgg

SEQ ID NO: 1569627 - RNA, 17 nt, Human adenovirus D
cucguuaguccagcaga

SEQ ID NO: 1569628 - RNA, 17 nt, Human adenovirus D
guaagugcaguuggcca

SEQ ID NO: 1569629 - RNA, 18 nt, Human adenovirus D
acccuacucgggcacggc

SEQ ID NO: 1569630 - RNA, 18 nt, Human adenovirus D
gccaaccuggugacggcc

SEQ ID NO: 1569631 - RNA, 14 nt, Human adenovirus D
cagcaucgccucac

SEQ ID NO: 1569632 - RNA, 15 nt, Human adenovirus D
cucgcuacugcugau

SEQ ID NO: 1569633 - RNA, 21 nt, Human adenovirus D
agcccccuuuuuucuuuuugc

SEQ ID NO: 1569634 - RNA, 12 nt, Human adenovirus D
ucugcgagagga

SEQ ID NO: 1569635 - RNA, 21 nt, Human adenovirus D
cgaggagcugagaccagacca

SEQ ID NO: 1569636 - RNA, 22 nt, Human adenovirus D
cgagcuacaugcccagcagcag

SEQ ID NO: 1569637 - RNA, 19 nt, Human adenovirus D
accuaugggaacaaggccu

SEQ ID NO: 1569638 - RNA, 20 nt, Human adenovirus D
caaaacuaauuacagucacu

SEQ ID NO: 1569639 - RNA, 13 nt, Human adenovirus D
cagaccgugcagg

SEQ ID NO: 1569640 - RNA, 14 nt, Human adenovirus D
ggucgcgguggggc

SEQ ID NO: 1569641 - RNA, 20 nt, Human adenovirus D
aaaaacccucgaccagcauc

SEQ ID NO: 1569642 - RNA, 17 nt, Human adenovirus D
cauacaaagcugaaagc

SEQ ID NO: 1569643 - RNA, 12 nt, Human adenovirus D
ccacuccgcaca

SEQ ID NO: 1569644 - RNA, 21 nt, Human adenovirus D
aggcaccaucacaggaggcac

SEQ ID NO: 1569645 - RNA, 22 nt, Human adenovirus D
cgggcggacggaucgcccaggc

SEQ ID NO: 1569646 - RNA, 13 nt, Human adenovirus D
cuacaugcccagc

SEQ ID NO: 1569647 - RNA, 17 nt, Human adenovirus D
cagaugguagcagcaga

SEQ ID NO: 1569648 - RNA, 19 nt, Human adenovirus D
gcauagucacacuuaguuc

SEQ ID NO: 1569649 - RNA, 15 nt, Human adenovirus D
agcaaacgccgccgc

SEQ ID NO: 1569650 - RNA, 19 nt, Human adenovirus D
gcgacccaugagcugcgag

SEQ ID NO: 1569651 - RNA, 18 nt, Human adenovirus D
agcugcgcgagggccugg

SEQ ID NO: 1569652 - RNA, 21 nt, Human adenovirus D
gccaaacacaccugacacaaa

SEQ ID NO: 1569653 - RNA, 12 nt, Human adenovirus D
gugaggcacugc

SEQ ID NO: 1569654 - RNA, 20 nt, Human adenovirus D
accuugcagagcagcucuuc

SEQ ID NO: 1569655 - RNA, 16 nt, Human adenovirus D
aagcugaggauggcaa

SEQ ID NO: 1569656 - RNA, 15 nt, Human adenovirus D
cgcgcuggcggagaa

SEQ ID NO: 1569657 - RNA, 13 nt, Human adenovirus D
cugacgacccgca

SEQ ID NO: 1569658 - RNA, 23 nt, Human adenovirus D
cagcccagggcgcacuacagccg

SEQ ID NO: 1569659 - RNA, 14 nt, Human adenovirus D
ggcgcccagccagc

SEQ ID NO: 1569660 - RNA, 23 nt, Human adenovirus D
ucuugcaugccuucgugcacugg

SEQ ID NO: 1569661 - RNA, 21 nt, Human adenovirus D
gugaagcccugguuucaucau

SEQ ID NO: 1569662 - RNA, 13 nt, Human adenovirus D
cgagccaggugag

SEQ ID NO: 1569663 - RNA, 22 nt, Human adenovirus D
ccccugcaagugcacagaccca

SEQ ID NO: 1569664 - RNA, 15 nt, Human adenovirus D
cugaaacaccugcag

SEQ ID NO: 1569665 - RNA, 13 nt, Human adenovirus D
ggaugcagccagu

SEQ ID NO: 1569666 - RNA, 18 nt, Human adenovirus D
cagaauucaaccacaccu

SEQ ID NO: 1569667 - RNA, 15 nt, Human adenovirus D
caccuucaagaaagu

SEQ ID NO: 1569668 - RNA, 20 nt, Human adenovirus D
ccgcacuggcuuccgccgcc

SEQ ID NO: 1569669 - RNA, 14 nt, Human adenovirus D
aauucagagccagg

SEQ ID NO: 1569670 - RNA, 14 nt, Human adenovirus D
ucaagugccacaug

SEQ ID NO: 1569671 - RNA, 24 nt, Human adenovirus D
cggcggucaccucaacgcccaggc

SEQ ID NO: 1569672 - RNA, 12 nt, Human adenovirus D
cuaccugggagg

SEQ ID NO: 1569673 - RNA, 16 nt, Human adenovirus D
caccgcauccugaucu

SEQ ID NO: 1569674 - RNA, 20 nt, Human adenovirus D
cccggcaacgaccggcugcu

SEQ ID NO: 1569675 - RNA, 20 nt, Human adenovirus D
gccucgagcuacaugcccag

SEQ ID NO: 1569676 - RNA, 21 nt, Human adenovirus D
gccugcgucaucacccagggc

SEQ ID NO: 1569677 - RNA, 23 nt, Human adenovirus D
gcacgcggccguucaugggcacc

SEQ ID NO: 1569678 - RNA, 16 nt, Human adenovirus D
cauccaccagugcaag

SEQ ID NO: 1569679 - RNA, 20 nt, Human adenovirus D
ugagcgcgagccggcggcgc

SEQ ID NO: 1569680 - RNA, 12 nt, Human adenovirus D
caccuuccagcc

SEQ ID NO: 1569681 - RNA, 16 nt, Human adenovirus D
gguggggcggugaucu

SEQ ID NO: 1569682 - RNA, 19 nt, Human adenovirus D
ggugcagucguggacgcug

SEQ ID NO: 1569683 - RNA, 13 nt, Human adenovirus D
ucagagccagggc

SEQ ID NO: 1569684 - RNA, 20 nt, Human adenovirus D
gcuacagcaggagugcaggg

SEQ ID NO: 1569685 - RNA, 19 nt, Human adenovirus D
cacgaucccgggcauagcu

SEQ ID NO: 1569686 - RNA, 20 nt, Human adenovirus D
ggcccagaacuggcagagca

SEQ ID NO: 1569687 - RNA, 13 nt, Human adenovirus D
ugacacgcgcaca

SEQ ID NO: 1569688 - RNA, 18 nt, Human adenovirus D
cagccuccaccgcuaccg

SEQ ID NO: 1569689 - RNA, 20 nt, Human adenovirus D
cagaaguucaccugcauggu

SEQ ID NO: 1569690 - RNA, 15 nt, Human adenovirus D
gggaacaaggccugg

SEQ ID NO: 1569691 - RNA, 19 nt, Human adenovirus D
ucggccgaggaggagcgca

SEQ ID NO: 1569692 - RNA, 18 nt, Human adenovirus D
gcacuggggucucgggga

SEQ ID NO: 1569693 - RNA, 19 nt, Human adenovirus D
gcaggaguccaccgcuccg

SEQ ID NO: 1569694 - RNA, 19 nt, Human adenovirus D
aacauccaccagugcaaga

SEQ ID NO: 1569695 - RNA, 11 nt, Human adenovirus D
uagaaacagau

SEQ ID NO: 1569696 - RNA, 18 nt, Human adenovirus D
cuggaccucgagauggac

SEQ ID NO: 1569697 - RNA, 19 nt, Human adenovirus D
cagacagccaggucaaaac

SEQ ID NO: 1569698 - RNA, 16 nt, Human adenovirus D
acaaucagccccuucc

SEQ ID NO: 1569699 - RNA, 16 nt, Human adenovirus D
gcugguggccaccucg

SEQ ID NO: 1569700 - RNA, 17 nt, Human adenovirus D
ucgaggacgugagcggc

SEQ ID NO: 1569701 - RNA, 14 nt, Human adenovirus D
uacaauacucuggg

SEQ ID NO: 1569702 - RNA, 19 nt, Human adenovirus D
cgcuccucgcucuggggcc

SEQ ID NO: 1569703 - RNA, 14 nt, Human adenovirus D
aggggcggcagagg

SEQ ID NO: 1569704 - RNA, 13 nt, Human adenovirus D
ccgcggaguccag

SEQ ID NO: 1569705 - RNA, 20 nt, Human adenovirus D
ugaaccacacggccagcagg

SEQ ID NO: 1569706 - RNA, 18 nt, Human adenovirus D
cagccgcguaagcaggag

SEQ ID NO: 1569707 - RNA, 19 nt, Human adenovirus D
acggggugguggacaucgc

SEQ ID NO: 1569708 - RNA, 12 nt, Human adenovirus D
caaggaggugaa

SEQ ID NO: 1569709 - RNA, 17 nt, Human adenovirus D
gugcgcgaccugggcug

SEQ ID NO: 1569710 - RNA, 16 nt, Human adenovirus D
cugaaggagcuggaca

SEQ ID NO: 1569711 - RNA, 22 nt, Human adenovirus D
gacugcgacuguagggcacgag

SEQ ID NO: 1569712 - RNA, 21 nt, Human adenovirus D
caccguuccaugcagacacuu

SEQ ID NO: 1569713 - RNA, 15 nt, Human adenovirus D
cgucgagcacagcac

SEQ ID NO: 1569714 - RNA, 20 nt, Human adenovirus D
ucacugaaggaaaaaucacu

SEQ ID NO: 1569715 - RNA, 16 nt, Human adenovirus D
uacaacagccuugccc

SEQ ID NO: 1569716 - RNA, 20 nt, Human adenovirus D
ggaggccgugaaggccggca

SEQ ID NO: 1569717 - RNA, 21 nt, Human adenovirus D
agcaggggcgcugggcguggu

SEQ ID NO: 1569718 - RNA, 22 nt, Human adenovirus D
cagagcucuuaagaaagacaca

SEQ ID NO: 1569719 - RNA, 13 nt, Human adenovirus D
cugccacucgcgg

SEQ ID NO: 1569720 - RNA, 16 nt, Human adenovirus D
cagcucaucgacuggu

SEQ ID NO: 1569721 - RNA, 20 nt, Human adenovirus D
cccgccgcuaucugcucuuc

SEQ ID NO: 1569722 - RNA, 19 nt, Human adenovirus D
acggccuuguagggacagc

SEQ ID NO: 1569723 - RNA, 16 nt, Human adenovirus D
gcaucgaggugcagac

SEQ ID NO: 1569724 - RNA, 18 nt, Human adenovirus D
cgccugaggcagacgcug

SEQ ID NO: 1569725 - RNA, 22 nt, Human adenovirus D
gcucguguccaacggcaaacag

SEQ ID NO: 1569726 - RNA, 14 nt, Human adenovirus D
cagcgcgugcugcg

SEQ ID NO: 1569727 - RNA, 22 nt, Human adenovirus D
ccuccgguggcgaccgccgugc

SEQ ID NO: 1569728 - RNA, 15 nt, Human adenovirus D
gagccugcgcccgcg

SEQ ID NO: 1569729 - RNA, 17 nt, Human adenovirus D
cuugaacuacuggcuuc

SEQ ID NO: 1569730 - RNA, 15 nt, Human adenovirus D
guuugcccgcgccac

SEQ ID NO: 1569731 - RNA, 17 nt, Human adenovirus D
cggugggucggagcccc

SEQ ID NO: 1569732 - RNA, 18 nt, Human adenovirus D
uggcgaugugcucgguga

SEQ ID NO: 1569733 - RNA, 19 nt, Human adenovirus D
cuggcggagaacaaggcca

SEQ ID NO: 1569734 - RNA, 21 nt, Human adenovirus D
cauucucgaagauucuggaga

SEQ ID NO: 1569735 - RNA, 20 nt, Human adenovirus D
accccaucccggccaaggcc

SEQ ID NO: 1569736 - RNA, 20 nt, Human adenovirus D
cagcccaacggcaccugcga

SEQ ID NO: 1569737 - RNA, 18 nt, Human adenovirus D
acuuugucugcuguaaag

SEQ ID NO: 1569738 - RNA, 18 nt, Human adenovirus D
gacagcgugguggcgacg

SEQ ID NO: 1569739 - RNA, 21 nt, Human adenovirus D
gcagacacauguccccuuccu

SEQ ID NO: 1569740 - RNA, 12 nt, Human adenovirus D
uuacgucacuuu

SEQ ID NO: 1569741 - RNA, 12 nt, Human adenovirus D
cgcuggccagca

SEQ ID NO: 1569742 - RNA, 15 nt, Human adenovirus D
aaccccacaggauga

SEQ ID NO: 1569743 - RNA, 12 nt, Human adenovirus D
cccccgagcgcc

SEQ ID NO: 1569744 - RNA, 17 nt, Human adenovirus D
ggccauaaaucugcccu

SEQ ID NO: 1569745 - RNA, 19 nt, Human adenovirus D
cggcgccuccguccgcuuc

SEQ ID NO: 1569746 - RNA, 14 nt, Human adenovirus D
uggcgagggucugc

SEQ ID NO: 1569747 - RNA, 15 nt, Human adenovirus D
gcggggccuggugug

SEQ ID NO: 1569748 - RNA, 14 nt, Human adenovirus D
gcagggagcugcgc

SEQ ID NO: 1569749 - RNA, 12 nt, Human adenovirus D
caccccaggcgg

SEQ ID NO: 1569750 - RNA, 14 nt, Human adenovirus D
cguggcgcagcgcg

SEQ ID NO: 1569751 - RNA, 11 nt, Human adenovirus D
cacccuggugu

SEQ ID NO: 1569752 - RNA, 17 nt, Human adenovirus D
ggcaaagcgguugagcu

SEQ ID NO: 1569753 - RNA, 19 nt, Human adenovirus D
aggucuaaaaaccccgcca

SEQ ID NO: 1569754 - RNA, 14 nt, Human adenovirus D
cagacggugaagca

SEQ ID NO: 1569755 - RNA, 20 nt, Human adenovirus D
acgagcagaccuuccaggag

SEQ ID NO: 1569756 - RNA, 13 nt, Human adenovirus D
cggcgcgagcuga

SEQ ID NO: 1569757 - RNA, 21 nt, Human adenovirus D
gguauucccucucgagagcgg

SEQ ID NO: 1569758 - RNA, 14 nt, Human adenovirus D
cugggugacagaac

SEQ ID NO: 1569759 - RNA, 20 nt, Human adenovirus D
aaaaaucacucuuuccagca

SEQ ID NO: 1569760 - RNA, 19 nt, Human adenovirus D
gacgguaagcacgagcggc

SEQ ID NO: 1569761 - RNA, 22 nt, Human adenovirus D
cacgagcgccaggucggcgacg

SEQ ID NO: 1569762 - RNA, 20 nt, Human adenovirus D
cugaacgacucgcugcugca

SEQ ID NO: 1569763 - RNA, 20 nt, Human adenovirus D
aaaagcguccgcuccgcagu

SEQ ID NO: 1569764 - RNA, 17 nt, Human adenovirus D
gaguggcggcccuggcu

SEQ ID NO: 1569765 - RNA, 13 nt, Human adenovirus D
cggcuuuaacaau

SEQ ID NO: 1569766 - RNA, 16 nt, Human adenovirus D
ccagcgaucccagcgu

SEQ ID NO: 1569767 - RNA, 13 nt, Human adenovirus D
uguggagccacug

SEQ ID NO: 1569768 - RNA, 13 nt, Human adenovirus D
ucagccccuuccc

SEQ ID NO: 1569769 - RNA, 15 nt, Human adenovirus D
cagaccaccugguga

SEQ ID NO: 1569770 - RNA, 21 nt, Human adenovirus D
gcacgagaaccgccuggggca

SEQ ID NO: 1569771 - RNA, 16 nt, Human adenovirus D
cgccuuggaggccgcc

SEQ ID NO: 1569772 - RNA, 19 nt, Human adenovirus D
cggagaggcugacgagccc

SEQ ID NO: 1569773 - RNA, 23 nt, Human adenovirus D
cagccuuggauuaucucuacaaa

SEQ ID NO: 1569774 - RNA, 14 nt, Human adenovirus D
gcaguccaaccugg

SEQ ID NO: 1569775 - RNA, 14 nt, Human adenovirus D
ggcggcggccaacc

SEQ ID NO: 1569776 - RNA, 21 nt, Human adenovirus D
gcgguucaagaacgagggccu

SEQ ID NO: 1569777 - RNA, 19 nt, Human adenovirus D
cgaugguggcgcgcaccuc

SEQ ID NO: 1569778 - RNA, 21 nt, Human adenovirus D
gcgagaacauguacccgacca

SEQ ID NO: 1569779 - RNA, 14 nt, Human adenovirus D
ggcggcgcugcaaa

SEQ ID NO: 1569780 - RNA, 14 nt, Human adenovirus D
ggcccgacuccgcc

SEQ ID NO: 1569781 - RNA, 14 nt, Human adenovirus D
caucgugcagaacc

SEQ ID NO: 1569782 - RNA, 22 nt, Human adenovirus D
gauagcagcguguuggacuugg

SEQ ID NO: 1569783 - RNA, 17 nt, Human adenovirus D
augggcccgugggcugc

SEQ ID NO: 1569784 - RNA, 16 nt, Human adenovirus D
gaccggugcucugcgc

SEQ ID NO: 1569785 - RNA, 23 nt, Human adenovirus D
ucaucugcagggcgcccagcaug

SEQ ID NO: 1569786 - RNA, 19 nt, Human adenovirus D
cugcaggcgucgcagcgcc

SEQ ID NO: 1569787 - RNA, 23 nt, Human adenovirus D
acaaugauggauacuugguagca

SEQ ID NO: 1569788 - RNA, 16 nt, Human adenovirus D
gaccuaccaaugaaaa

SEQ ID NO: 1569789 - RNA, 15 nt, Human adenovirus D
ugaccaauagacagc

SEQ ID NO: 1569790 - RNA, 18 nt, Human adenovirus D
gcgggcaugaccucggca

SEQ ID NO: 1569791 - RNA, 18 nt, Human adenovirus D
gcacggcuuacaacagcc

SEQ ID NO: 1569792 - RNA, 22 nt, Human adenovirus D
cuuucugcccgcgcucaucccc

SEQ ID NO: 1569793 - RNA, 23 nt, Human adenovirus D
ccagguccacgcugguggccacc

SEQ ID NO: 1569794 - RNA, 21 nt, Human adenovirus D
agccaggucaaaacccacucu

SEQ ID NO: 1569795 - RNA, 12 nt, Human adenovirus D
augaacugcucg

SEQ ID NO: 1569796 - RNA, 16 nt, Human adenovirus D
gagcgccugaggcaga

SEQ ID NO: 1569797 - RNA, 17 nt, Human adenovirus D
cggccccgcgggcaggg

SEQ ID NO: 1569798 - RNA, 24 nt, Human adenovirus D
cagcauguacggaggagccaagaa

SEQ ID NO: 1569799 - RNA, 17 nt, Human adenovirus D
gcuaccugggaggagag

SEQ ID NO: 1569800 - RNA, 17 nt, Human adenovirus D
ccugagccgccagcugg

SEQ ID NO: 1569801 - RNA, 23 nt, Human adenovirus D
ugacaacccgccugccaggaugg

SEQ ID NO: 1569802 - RNA, 18 nt, Human adenovirus D
acggaccaccccaggcgg

SEQ ID NO: 1569803 - RNA, 23 nt, Human adenovirus D
gguggauagcuaugauccagaug

SEQ ID NO: 1569804 - RNA, 16 nt, Human adenovirus D
ggcugcuggagcugau

SEQ ID NO: 1569805 - RNA, 16 nt, Human adenovirus D
uguaaccuugcaagag

SEQ ID NO: 1569806 - RNA, 16 nt, Human adenovirus D
guuucucaacagcugg

SEQ ID NO: 1569807 - RNA, 16 nt, Human adenovirus D
gcaugaccucggcacu

SEQ ID NO: 1569808 - RNA, 16 nt, Human adenovirus D
caugacccugcauggc

SEQ ID NO: 1569809 - RNA, 15 nt, Human adenovirus D
uguucagcagcaccu

SEQ ID NO: 1569810 - RNA, 17 nt, Human adenovirus D
gccaggggaugaacagu

SEQ ID NO: 1569811 - RNA, 23 nt, Human adenovirus D
caguugcuuguaccacaaaaacg

SEQ ID NO: 1569812 - RNA, 16 nt, Human adenovirus D
gcucccaccgcgccgc

SEQ ID NO: 1569813 - RNA, 17 nt, Human adenovirus D
gaaaucaguuucccaug

SEQ ID NO: 1569814 - RNA, 17 nt, Human adenovirus D
gacccugagaacggggu

SEQ ID NO: 1569815 - RNA, 17 nt, Human adenovirus D
ggacuauccuugcagac

SEQ ID NO: 1569816 - RNA, 16 nt, Human adenovirus D
gucuagaaccccacag

SEQ ID NO: 1569817 - RNA, 14 nt, Human adenovirus D
ccugagccgccagc

SEQ ID NO: 1569818 - RNA, 20 nt, Human adenovirus D
cccucgcgcaacugggccgc

SEQ ID NO: 1569819 - RNA, 19 nt, Human adenovirus D
gugaccugcagcaggugcu

SEQ ID NO: 1569820 - RNA, 19 nt, Human adenovirus D
ccccaggcggugcugcugc

SEQ ID NO: 1569821 - RNA, 19 nt, Human adenovirus D
aagauguuaaagugggcgu

SEQ ID NO: 1569822 - RNA, 16 nt, Human adenovirus D
ugauguccuugaggag

SEQ ID NO: 1569823 - RNA, 14 nt, Human adenovirus D
guucuucgaggacc

SEQ ID NO: 1569824 - RNA, 22 nt, Human adenovirus D
acagccuucagcaucagucucc

SEQ ID NO: 1569825 - RNA, 16 nt, Human adenovirus D
agcaggagcaggagga

SEQ ID NO: 1569826 - RNA, 14 nt, Human adenovirus D
cgcuugacagcacc

SEQ ID NO: 1569827 - RNA, 16 nt, Human adenovirus D
ugccggaccucaugca

SEQ ID NO: 1569828 - RNA, 13 nt, Human adenovirus D
ugcaggauccagc

SEQ ID NO: 1569829 - RNA, 18 nt, Human adenovirus D
uacaagcgccaacagcag

SEQ ID NO: 1569830 - RNA, 18 nt, Human adenovirus D
acugacuacccacugacu

SEQ ID NO: 1569831 - RNA, 22 nt, Human adenovirus D
cuuugucugcuguaaagccaga

SEQ ID NO: 1569832 - RNA, 17 nt, Human adenovirus D
agcggcgcaagcucaug

SEQ ID NO: 1569833 - RNA, 18 nt, Human adenovirus D
uagucaaucucccaccac

SEQ ID NO: 1569834 - RNA, 17 nt, Human adenovirus D
ccagaggcagacucagg

SEQ ID NO: 1569835 - RNA, 15 nt, Human adenovirus D
gcaucucccaggcuu

SEQ ID NO: 1569836 - RNA, 15 nt, Human adenovirus D
cugauggccacgggg

SEQ ID NO: 1569837 - RNA, 13 nt, Human adenovirus D
aggagaccugcac

SEQ ID NO: 1569838 - RNA, 14 nt, Human adenovirus D
gagccggcucgucu

SEQ ID NO: 1569839 - RNA, 12 nt, Human adenovirus D
gacagggccugc

SEQ ID NO: 1569840 - RNA, 18 nt, Human adenovirus D
ucuggcgguaccagggga

SEQ ID NO: 1569841 - RNA, 17 nt, Human adenovirus D
acccagagcuuagcaag

SEQ ID NO: 1569842 - RNA, 14 nt, Human adenovirus D
uccugcgaaagccc

SEQ ID NO: 1569843 - RNA, 20 nt, Human adenovirus D
gcaggggcaucucgcugaug

SEQ ID NO: 1569844 - RNA, 11 nt, Human adenovirus D
ccccuccugcg

SEQ ID NO: 1569845 - RNA, 16 nt, Human adenovirus D
agcggcgcaggggcau

SEQ ID NO: 1569846 - RNA, 12 nt, Human adenovirus D
ucccccagcaug

SEQ ID NO: 1569847 - RNA, 13 nt, Human adenovirus D
gagagucuggugg

SEQ ID NO: 1569848 - RNA, 18 nt, Human adenovirus D
cacugcagggagccaggg

SEQ ID NO: 1569849 - RNA, 15 nt, Human adenovirus D
uacaaagcugaaagc

SEQ ID NO: 1569850 - RNA, 24 nt, Human adenovirus D
ucgagacgucccagagcucgguga

SEQ ID NO: 1569851 - RNA, 19 nt, Human adenovirus D
aggaauugguauaagugua

SEQ ID NO: 1569852 - RNA, 17 nt, Human adenovirus D
cgauaucgcgcauccug

SEQ ID NO: 1569853 - RNA, 21 nt, Human adenovirus D
uggggugcuguucauggccaa

SEQ ID NO: 1569854 - RNA, 14 nt, Human adenovirus D
ugcugccgagccgc

SEQ ID NO: 1569855 - RNA, 19 nt, Human adenovirus D
ggccggcaugcccaccacg

SEQ ID NO: 1569856 - RNA, 14 nt, Human adenovirus D
gaccucggcacuca

SEQ ID NO: 1569857 - RNA, 18 nt, Human adenovirus D
uggccuuguaccugcccg

SEQ ID NO: 1569858 - RNA, 14 nt, Human adenovirus D
ccgcgugcagcugc

SEQ ID NO: 1569859 - RNA, 14 nt, Human adenovirus D
ggcgucgcagcgcc

SEQ ID NO: 1569860 - RNA, 17 nt, Human adenovirus D
agaaaaguccuguaaau

SEQ ID NO: 1569861 - RNA, 13 nt, Human adenovirus D
acgggcccugcga

SEQ ID NO: 1569862 - RNA, 12 nt, Human adenovirus D
uacaaagugugg

SEQ ID NO: 1569863 - RNA, 14 nt, Human adenovirus D
agggaaugcgugga

SEQ ID NO: 1569864 - RNA, 16 nt, Human adenovirus D
gcgacacacuuccauu

SEQ ID NO: 1569865 - RNA, 18 nt, Human adenovirus D
ucucagcacgguggccuu

SEQ ID NO: 1569866 - RNA, 21 nt, Human adenovirus D
gccggccgcgcuugcugggcg

SEQ ID NO: 1569867 - RNA, 18 nt, Human adenovirus D
cucacucucuuccgcguc

SEQ ID NO: 1569868 - RNA, 21 nt, Human adenovirus D
cuuccuccguagccuggcgga

SEQ ID NO: 1569869 - RNA, 16 nt, Human adenovirus D
cucggucaggagcaag

SEQ ID NO: 1569870 - RNA, 18 nt, Human adenovirus D
ugggccacuacagcugac

SEQ ID NO: 1569871 - RNA, 18 nt, Human adenovirus D
cgaggccaugcugcgccg

SEQ ID NO: 1569872 - RNA, 19 nt, Human adenovirus D
cgcggcggcgauaugccag

SEQ ID NO: 1569873 - RNA, 16 nt, Human adenovirus D
agagggagaggagcga

SEQ ID NO: 1569874 - RNA, 14 nt, Human adenovirus D
uggaugugcccaag

SEQ ID NO: 1569875 - RNA, 20 nt, Human adenovirus D
cuggauuuccugccaccagu

SEQ ID NO: 1569876 - RNA, 15 nt, Human adenovirus D
gaggacacccggccc

SEQ ID NO: 1569877 - RNA, 20 nt, Human adenovirus D
cccagagcucgcgggccaug

SEQ ID NO: 1569878 - RNA, 13 nt, Human adenovirus D
ccgucgccgcacc

SEQ ID NO: 1569879 - RNA, 21 nt, Human adenovirus D
ccauugucaacacggccggcc

SEQ ID NO: 1569880 - RNA, 22 nt, Human adenovirus D
ccggagauuuacggaccacccc

SEQ ID NO: 1569881 - RNA, 14 nt, Human adenovirus D
ugaccaacuggucu

SEQ ID NO: 1569882 - RNA, 14 nt, Human adenovirus D
cggaucgcccaggc

SEQ ID NO: 1569883 - RNA, 14 nt, Human adenovirus D
gauggaggagcagc

SEQ ID NO: 1569884 - RNA, 23 nt, Human adenovirus D
gcaccacgcuucuuccccagcgg

SEQ ID NO: 1569885 - RNA, 16 nt, Human adenovirus D
agggccuggaccgcca

SEQ ID NO: 1569886 - RNA, 21 nt, Human adenovirus D
cggcgcuuggugggcagagga

SEQ ID NO: 1569887 - RNA, 18 nt, Human adenovirus D
caccaugcgccaagggca

SEQ ID NO: 1569888 - RNA, 19 nt, Human adenovirus D
cacagugcccccuccacuu

SEQ ID NO: 1569889 - RNA, 22 nt, Human adenovirus D
uuuccccaccuacuccucuuug

SEQ ID NO: 1569890 - RNA, 23 nt, Human adenovirus D
cacgccgagccugaagcccguga

SEQ ID NO: 1569891 - RNA, 17 nt, Human adenovirus D
ugacauccauggccagg

SEQ ID NO: 1569892 - RNA, 21 nt, Human adenovirus D
gggagacggucgacgaagcgc

SEQ ID NO: 1569893 - RNA, 20 nt, Human adenovirus D
ucaccauguuauucagcagc

SEQ ID NO: 1569894 - RNA, 14 nt, Human adenovirus D
accgacgcugggcu

SEQ ID NO: 1569895 - RNA, 17 nt, Human adenovirus D
cuauaaaaacaacaaaa

SEQ ID NO: 1569896 - RNA, 13 nt, Human adenovirus D
acauccaugugac

SEQ ID NO: 1569897 - RNA, 16 nt, Human adenovirus D
cacaggcacacugaca

SEQ ID NO: 1569898 - RNA, 17 nt, Human adenovirus D
agccccggaccccgcca

SEQ ID NO: 1569899 - RNA, 16 nt, Human adenovirus D
acccugcccgagggca

SEQ ID NO: 1569900 - RNA, 14 nt, Human adenovirus D
caccgagccuccca

SEQ ID NO: 1569901 - RNA, 17 nt, Human adenovirus D
auuuaauaaagaucacu

SEQ ID NO: 1569902 - RNA, 11 nt, Human adenovirus D
cauacaaucau

SEQ ID NO: 1569903 - RNA, 18 nt, Human adenovirus D
acaaguacacgccggcca

SEQ ID NO: 1569904 - RNA, 15 nt, Human adenovirus D
guacacgguucucuc

SEQ ID NO: 1569905 - RNA, 15 nt, Human adenovirus D
ucgcucuuaucccau

SEQ ID NO: 1569906 - RNA, 20 nt, Human adenovirus D
aucaagugccacaugcaccu

SEQ ID NO: 1569907 - RNA, 15 nt, Human adenovirus D
aggcaggacucgcag

SEQ ID NO: 1569908 - RNA, 14 nt, Human adenovirus D
caggccgugcugcu

SEQ ID NO: 1569909 - RNA, 17 nt, Human adenovirus D
ucgcaagcgcccagagc

SEQ ID NO: 1569910 - RNA, 15 nt, Human adenovirus D
cuuggugggcagagg

SEQ ID NO: 1569911 - RNA, 18 nt, Human adenovirus D
guggccuuguaccugccc

SEQ ID NO: 1569912 - RNA, 17 nt, Human adenovirus D
gccgcccugacccagca

SEQ ID NO: 1569913 - RNA, 12 nt, Human adenovirus D
cagccagcagaa

SEQ ID NO: 1569914 - RNA, 17 nt, Human adenovirus D
ccagccgcaggcgccca

SEQ ID NO: 1569915 - RNA, 17 nt, Human adenovirus D
gcaucccguccugcgcc

SEQ ID NO: 1569916 - RNA, 22 nt, Human adenovirus D
gcagaaauuucaagcugggcug

SEQ ID NO: 1569917 - RNA, 20 nt, Human adenovirus D
caacgcaucauggcccugac

SEQ ID NO: 1569918 - RNA, 14 nt, Human adenovirus D
gaugguagcagcag

SEQ ID NO: 1569919 - RNA, 14 nt, Human adenovirus D
caccaucugagcuc

SEQ ID NO: 1569920 - RNA, 14 nt, Human adenovirus D
ccugagagcgcugg

SEQ ID NO: 1569921 - RNA, 17 nt, Human adenovirus D
ucgccgaggagaacugc

SEQ ID NO: 1569922 - RNA, 13 nt, Human adenovirus D
agcgccaggaggc

SEQ ID NO: 1569923 - RNA, 19 nt, Human adenovirus D
ggcgguagagcggccagcg

SEQ ID NO: 1569924 - RNA, 18 nt, Human adenovirus D
augaaguucaauggagag

SEQ ID NO: 1569925 - RNA, 17 nt, Human adenovirus D
uccccgacccccuucca

SEQ ID NO: 1569926 - RNA, 15 nt, Human adenovirus D
caucgcgcaggccgc

SEQ ID NO: 1569927 - RNA, 19 nt, Human adenovirus D
gugaagaugccgggacaga

SEQ ID NO: 1569928 - RNA, 21 nt, Human adenovirus D
ugccccaaaaguucuuugcca

SEQ ID NO: 1569929 - RNA, 12 nt, Human adenovirus D
agcauguggaac

SEQ ID NO: 1569930 - RNA, 19 nt, Human adenovirus D
cggcccggcacggcggugg

SEQ ID NO: 1569931 - RNA, 19 nt, Human adenovirus D
cgcuuggugggcagaggag

SEQ ID NO: 1569932 - RNA, 22 nt, Human adenovirus D
gcaccgucgccucggaccuggc

SEQ ID NO: 1569933 - RNA, 16 nt, Human adenovirus D
cagcaucgaggugcag

SEQ ID NO: 1569934 - RNA, 19 nt, Human adenovirus D
aagaaacgucccagcagca

SEQ ID NO: 1569935 - RNA, 16 nt, Human adenovirus D
guaacuaaacuuuaug

SEQ ID NO: 1569936 - RNA, 19 nt, Human adenovirus D
ggauugcagggcguagagc

SEQ ID NO: 1569937 - RNA, 21 nt, Human adenovirus D
augcgucccacccccccggcg

SEQ ID NO: 1569938 - RNA, 21 nt, Human adenovirus D
augcugcccgccaccugcaac

SEQ ID NO: 1569939 - RNA, 17 nt, Human adenovirus D
ccccguugggcagcgag

SEQ ID NO: 1569940 - RNA, 13 nt, Human adenovirus D
agggcgcgguggg

SEQ ID NO: 1569941 - RNA, 20 nt, Human adenovirus D
gaaaugaggcaggccaugga

SEQ ID NO: 1569942 - RNA, 15 nt, Human adenovirus D
ucuuuauucuugugg

SEQ ID NO: 1569943 - RNA, 21 nt, Human adenovirus D
ugggguacuuuacgcuggcca

SEQ ID NO: 1569944 - RNA, 21 nt, Human adenovirus D
cgcccaacucgcggcugcugc

SEQ ID NO: 1569945 - RNA, 21 nt, Human adenovirus D
uuggccuguccugcaggggcg

SEQ ID NO: 1569946 - RNA, 12 nt, Human adenovirus D
ccguagccuggc

SEQ ID NO: 1569947 - RNA, 13 nt, Human adenovirus D
ccccuggcugggc

SEQ ID NO: 1569948 - RNA, 14 nt, Human adenovirus D
cagggaacugauaa

SEQ ID NO: 1569949 - RNA, 16 nt, Human adenovirus D
gagcaggaccugggcu

SEQ ID NO: 1569950 - RNA, 14 nt, Human adenovirus D
acucgcggcugcug

SEQ ID NO: 1569951 - RNA, 13 nt, Human adenovirus D
cuccuccuggaga

SEQ ID NO: 1569952 - RNA, 12 nt, Human adenovirus D
uuaguccagcag

SEQ ID NO: 1569953 - RNA, 14 nt, Human adenovirus D
cuccaaagcuagca

SEQ ID NO: 1569954 - RNA, 15 nt, Human adenovirus D
ucaaccccuucaacc

SEQ ID NO: 1569955 - RNA, 17 nt, Human adenovirus D
gcaaccaggaggagcuc

SEQ ID NO: 1569956 - RNA, 20 nt, Human adenovirus D
acaucgccgggcaggacgcc

SEQ ID NO: 1569957 - RNA, 16 nt, Human adenovirus D
aagauggaggagcagc

SEQ ID NO: 1569958 - RNA, 22 nt, Human adenovirus D
ccugaaccgccgccggcggcgg

SEQ ID NO: 1569959 - RNA, 17 nt, Human adenovirus D
cucgcagugcacgggca

SEQ ID NO: 1569960 - RNA, 15 nt, Human adenovirus D
ggaagaagagcagca

SEQ ID NO: 1569961 - RNA, 22 nt, Human adenovirus D
cugguguaguuguucagcagca

SEQ ID NO: 1569962 - RNA, 15 nt, Human adenovirus D
ugccuggugaagggc

SEQ ID NO: 1569963 - RNA, 19 nt, Human adenovirus D
cugagauacgaugagacca

SEQ ID NO: 1569964 - RNA, 18 nt, Human adenovirus D
cauggcgcacaacaccgc

SEQ ID NO: 1569965 - RNA, 19 nt, Human adenovirus D
gcggacggaucgcccaggc

SEQ ID NO: 1569966 - RNA, 21 nt, Human adenovirus D
ugggaugcugcccgccaccug

SEQ ID NO: 1569967 - RNA, 20 nt, Human adenovirus D
aaaucgagcaggaccugggc

SEQ ID NO: 1569968 - RNA, 16 nt, Human adenovirus D
cggaguggccucucgc

SEQ ID NO: 1569969 - RNA, 13 nt, Human adenovirus D
ccuggagcagcgg

SEQ ID NO: 1569970 - RNA, 19 nt, Human adenovirus D
cugcaccccccgcaggcag

SEQ ID NO: 1569971 - RNA, 17 nt, Human adenovirus D
ccgcgguauauggcucc

SEQ ID NO: 1569972 - RNA, 23 nt, Human adenovirus D
cgaggagaacugcuggcccugcu

SEQ ID NO: 1569973 - RNA, 18 nt, Human adenovirus D
caacaggccuaacuacau

SEQ ID NO: 1569974 - RNA, 14 nt, Human adenovirus D
gcugcgcggggcca

SEQ ID NO: 1569975 - RNA, 20 nt, Human adenovirus D
auggaacccaaaguaugaca

SEQ ID NO: 1569976 - RNA, 20 nt, Human adenovirus D
ccuccaguuuguggaggagu

SEQ ID NO: 1569977 - RNA, 14 nt, Human adenovirus D
uccucuccuccucc

SEQ ID NO: 1569978 - RNA, 22 nt, Human adenovirus D
uacucccagcucauccgcagcu

SEQ ID NO: 1569979 - RNA, 17 nt, Human adenovirus D
ccagcagaagguggugg

SEQ ID NO: 1569980 - RNA, 20 nt, Human adenovirus D
cuuccuggcgacgcagccgg

SEQ ID NO: 1569981 - RNA, 17 nt, Human adenovirus D
gggcaucuucugccugg

SEQ ID NO: 1569982 - RNA, 16 nt, Human adenovirus D
gugccagauuggggga

SEQ ID NO: 1569983 - RNA, 19 nt, Human adenovirus D
cacccccgccgaggcuagc

SEQ ID NO: 1569984 - RNA, 18 nt, Human adenovirus D
uccuggacgggagcaauc

SEQ ID NO: 1569985 - RNA, 20 nt, Human adenovirus D
caucgcgaaccaggcagugc

SEQ ID NO: 1569986 - RNA, 23 nt, Human adenovirus D
cuggacgggagcaauccuccagg

SEQ ID NO: 1569987 - RNA, 20 nt, Human adenovirus D
caggcgaaacgccccugcaa

SEQ ID NO: 1569988 - RNA, 20 nt, Human adenovirus D
aguaccugagccgcgagaag

SEQ ID NO: 1569989 - RNA, 12 nt, Human adenovirus D
ccacgacacagc

SEQ ID NO: 1569990 - RNA, 16 nt, Human adenovirus D
caggcagcggccugaa

SEQ ID NO: 1569991 - RNA, 16 nt, Human adenovirus D
cggccauucuggaggc

SEQ ID NO: 1569992 - RNA, 19 nt, Human adenovirus D
cagcaacccuuccuggucg

SEQ ID NO: 1569993 - RNA, 12 nt, Human adenovirus D
gaucauugagag

SEQ ID NO: 1569994 - RNA, 12 nt, Human adenovirus D
auccacugcucc

SEQ ID NO: 1569995 - RNA, 20 nt, Human adenovirus D
ggcgacaacgccaggcuggc

SEQ ID NO: 1569996 - RNA, 17 nt, Human adenovirus D
ugggccguuggaagaug

SEQ ID NO: 1569997 - RNA, 15 nt, Human adenovirus D
ugagcagcuugcuga

SEQ ID NO: 1569998 - RNA, 17 nt, Human adenovirus D
cccugugaccaagcugg

SEQ ID NO: 1569999 - RNA, 22 nt, Human adenovirus D
uaaaaauauuagaugacaaaag

SEQ ID NO: 1570000 - RNA, 16 nt, Human adenovirus D
agcuacaugcccagca

SEQ ID NO: 1570001 - RNA, 16 nt, Human adenovirus D
cccgugaccugcagca

SEQ ID NO: 1570002 - RNA, 21 nt, Human adenovirus D
gugcaaugucaggucugcugg

SEQ ID NO: 1570003 - RNA, 21 nt, Human adenovirus D
caggcggcagagcgggcgggc

SEQ ID NO: 1570004 - RNA, 21 nt, Human adenovirus D
ugaccugccuccaccacccac

SEQ ID NO: 1570005 - RNA, 16 nt, Human adenovirus D
aacgcccugcuggagc

SEQ ID NO: 1570006 - RNA, 14 nt, Human adenovirus D
cggcaaaaaucaca

SEQ ID NO: 1570007 - RNA, 18 nt, Human adenovirus D
gauuucaucaaucaucag

SEQ ID NO: 1570008 - RNA, 16 nt, Human adenovirus D
caggcgcccagccagc

SEQ ID NO: 1570009 - RNA, 14 nt, Human adenovirus D
cacgguaagagccc

SEQ ID NO: 1570010 - RNA, 12 nt, Human adenovirus D
gcaggaccuggg

SEQ ID NO: 1570011 - RNA, 17 nt, Human adenovirus D
ucccaggcuuucaucuc

SEQ ID NO: 1570012 - RNA, 17 nt, Human adenovirus D
gaucccacagggcacug

SEQ ID NO: 1570013 - RNA, 17 nt, Human adenovirus D
gucugcuguaaagccag

SEQ ID NO: 1570014 - RNA, 19 nt, Human adenovirus D
ggcgugcagaccguggaca

SEQ ID NO: 1570015 - RNA, 23 nt, Human adenovirus D
gguguaccagucgggcccggacu

SEQ ID NO: 1570016 - RNA, 14 nt, Human adenovirus D
cucaacgcccaggc

SEQ ID NO: 1570017 - RNA, 18 nt, Human adenovirus D
accgcaaugcgggccugc

SEQ ID NO: 1570018 - RNA, 20 nt, Human adenovirus D
cuucuacagccagcagcucc

SEQ ID NO: 1570019 - RNA, 15 nt, Human adenovirus D
cucauuuuuccagcc

SEQ ID NO: 1570020 - RNA, 17 nt, Human adenovirus D
cccgggggccucguccu

SEQ ID NO: 1570021 - RNA, 17 nt, Human adenovirus D
cgcuaccgcuccaugcu

SEQ ID NO: 1570022 - RNA, 21 nt, Human adenovirus D
gcccagcgagaggagcucuug

SEQ ID NO: 1570023 - RNA, 18 nt, Human adenovirus D
gagcugaugcugagccug

SEQ ID NO: 1570024 - RNA, 15 nt, Human adenovirus D
cagggaacugaaaga

SEQ ID NO: 1570025 - RNA, 18 nt, Human adenovirus D
ucgcaagcgcccagagcg

SEQ ID NO: 1570026 - RNA, 20 nt, Human adenovirus D
ggaggacuuaaccacccacg

SEQ ID NO: 1570027 - RNA, 16 nt, Human adenovirus D
uucuuuggcuuuugug

SEQ ID NO: 1570028 - RNA, 22 nt, Human adenovirus D
auaaagaucacuuacuugaaau

SEQ ID NO: 1570029 - RNA, 14 nt, Human adenovirus D
agacauggccagca

SEQ ID NO: 1570030 - RNA, 15 nt, Human adenovirus D
cagacgaagaauaua

SEQ ID NO: 1570031 - RNA, 23 nt, Human adenovirus D
gaaacagcagaggaagaggguca

SEQ ID NO: 1570032 - RNA, 14 nt, Human adenovirus D
ggccgcagcucuuc

SEQ ID NO: 1570033 - RNA, 16 nt, Human adenovirus D
gaacaguggcaaugca

SEQ ID NO: 1570034 - RNA, 21 nt, Human adenovirus D
cugggguauuacuaggcccag

SEQ ID NO: 1570035 - RNA, 21 nt, Human adenovirus D
cggucaccucaacgcccaggc

SEQ ID NO: 1570036 - RNA, 20 nt, Human adenovirus D
cagccaguggcccuggaugu

SEQ ID NO: 1570037 - RNA, 22 nt, Human adenovirus D
cgacuucaugagccagagcaug

SEQ ID NO: 1570038 - RNA, 20 nt, Human adenovirus D
ggcugcuucugccuggugaa

SEQ ID NO: 1570039 - RNA, 19 nt, Human adenovirus D
ucugaaagaaacagcagag

SEQ ID NO: 1570040 - RNA, 16 nt, Human adenovirus D
aggcgcccagccagca

SEQ ID NO: 1570041 - RNA, 16 nt, Human adenovirus D
gaggcucgguuguuga

SEQ ID NO: 1570042 - RNA, 12 nt, Human adenovirus D
ugccggccccuc

SEQ ID NO: 1570043 - RNA, 22 nt, Human adenovirus D
uggugcaguuugcccgcgccac

SEQ ID NO: 1570044 - RNA, 13 nt, Human adenovirus D
uaaggagaaggau

SEQ ID NO: 1570045 - RNA, 12 nt, Human adenovirus D
cccggacagcaa

SEQ ID NO: 1570046 - RNA, 18 nt, Human adenovirus D
ccaaaugcgucccacccc

SEQ ID NO: 1570047 - RNA, 19 nt, Human adenovirus D
cugcccguucucgcugguc

SEQ ID NO: 1570048 - RNA, 16 nt, Human adenovirus D
cccacugacuuagcuc

SEQ ID NO: 1570049 - RNA, 20 nt, Human adenovirus D
ggcgccggcgcuagccagcc

SEQ ID NO: 1570050 - RNA, 20 nt, Human adenovirus D
guaggccauccccauccagu

SEQ ID NO: 1570051 - RNA, 18 nt, Human adenovirus D
cuuggugggcagaggagg

SEQ ID NO: 1570052 - RNA, 21 nt, Human adenovirus D
cgcagcgugaagacgccgccg

SEQ ID NO: 1570053 - RNA, 19 nt, Human adenovirus D
ccugaucucugccauguuc

SEQ ID NO: 1570054 - RNA, 17 nt, Human adenovirus D
cuugguaugagguugua

SEQ ID NO: 1570055 - RNA, 12 nt, Human adenovirus D
accugggcggcg

SEQ ID NO: 1570056 - RNA, 15 nt, Human adenovirus D
uguagggacagcagc

SEQ ID NO: 1570057 - RNA, 15 nt, Human adenovirus D
gaacacacugcccau

SEQ ID NO: 1570058 - RNA, 19 nt, Human adenovirus D
cacuggcccgaccgaccca

SEQ ID NO: 1570059 - RNA, 20 nt, Human adenovirus D
uagaagaccauaguaaagaa

SEQ ID NO: 1570060 - RNA, 17 nt, Human adenovirus D
gcuaccuugcacccacc

SEQ ID NO: 1570061 - RNA, 22 nt, Human adenovirus D
accugcgcaaggucgaggagac

SEQ ID NO: 1570062 - RNA, 14 nt, Human adenovirus D
gaugugcggcagcu

SEQ ID NO: 1570063 - RNA, 15 nt, Human adenovirus D
ggcuccgcggcacgg

SEQ ID NO: 1570064 - RNA, 20 nt, Human adenovirus D
cuggucaguugcaccacgcu

SEQ ID NO: 1570065 - RNA, 15 nt, Human adenovirus D
gugaggaucauaucc

SEQ ID NO: 1570066 - RNA, 15 nt, Human adenovirus D
caacagccacaugac

SEQ ID NO: 1570067 - RNA, 17 nt, Human adenovirus D
cugucuuaccagcucuu

SEQ ID NO: 1570068 - RNA, 20 nt, Human adenovirus D
gcgcgccgcgccgccacugc

SEQ ID NO: 1570069 - RNA, 16 nt, Human adenovirus D
gucacucucauuucag

SEQ ID NO: 1570070 - RNA, 15 nt, Human adenovirus D
cgugaacgcgcuggc

SEQ ID NO: 1570071 - RNA, 21 nt, Human adenovirus D
cccagagcuuagcaaggugcu

SEQ ID NO: 1570072 - RNA, 18 nt, Human adenovirus D
gagaaccgccuggggcag

SEQ ID NO: 1570073 - RNA, 20 nt, Human adenovirus D
cgugcgcuaccaccccagca

SEQ ID NO: 1570074 - RNA, 17 nt, Human adenovirus D
acggucugcaggccggg

SEQ ID NO: 1570075 - RNA, 23 nt, Human adenovirus D
gcagguuucucaacagcugggac

SEQ ID NO: 1570076 - RNA, 13 nt, Human adenovirus D
ccggaaacgccac

SEQ ID NO: 1570077 - RNA, 11 nt, Human adenovirus D
ggcggcagagc

SEQ ID NO: 1570078 - RNA, 14 nt, Human adenovirus D
cuuuaaugcuccaa

SEQ ID NO: 1570079 - RNA, 15 nt, Human adenovirus D
gcagugucuggagcg

SEQ ID NO: 1570080 - RNA, 21 nt, Human adenovirus D
caauaauggaagcauuacuau

SEQ ID NO: 1570081 - RNA, 23 nt, Human adenovirus D
aggcuaccugaccuugcagagca

SEQ ID NO: 1570082 - RNA, 18 nt, Human adenovirus D
guuagguucuucacccag

SEQ ID NO: 1570083 - RNA, 21 nt, Human adenovirus D
gcuggcggagaacaaggccau

SEQ ID NO: 1570084 - RNA, 19 nt, Human adenovirus D
gcaguccgccaagcuccuc

SEQ ID NO: 1570085 - RNA, 19 nt, Human adenovirus D
gucaccgagccucccagga

SEQ ID NO: 1570086 - RNA, 20 nt, Human adenovirus D
ggcgacgacgacauccugga

SEQ ID NO: 1570087 - RNA, 22 nt, Human adenovirus D
ucuucuuguaacuuuuagucag

SEQ ID NO: 1570088 - RNA, 17 nt, Human adenovirus D
uuuacaugcgcauggcg

SEQ ID NO: 1570089 - RNA, 14 nt, Human adenovirus D
cgucuacaaggccc

SEQ ID NO: 1570090 - RNA, 15 nt, Human adenovirus D
ccuccgucggaagag

SEQ ID NO: 1570091 - RNA, 22 nt, Human adenovirus D
ccagagaacgcgcgaagauggc

SEQ ID NO: 1570092 - RNA, 13 nt, Human adenovirus D
cccguccuccucg

SEQ ID NO: 1570093 - RNA, 15 nt, Human adenovirus D
acucuuaaagacuaa

SEQ ID NO: 1570094 - RNA, 14 nt, Human adenovirus D
ccagaacuuccagc

SEQ ID NO: 1570095 - RNA, 13 nt, Human adenovirus D
cagagcucgguga

SEQ ID NO: 1570096 - RNA, 14 nt, Human adenovirus D
aaucgcgggcggcc

SEQ ID NO: 1570097 - RNA, 14 nt, Human adenovirus D
caaagagcacagca

SEQ ID NO: 1570098 - RNA, 14 nt, Human adenovirus D
ccaacguggagcug

SEQ ID NO: 1570099 - RNA, 21 nt, Human adenovirus D
ccgaggacuaccacgcccaug

SEQ ID NO: 1570100 - RNA, 16 nt, Human adenovirus D
acuugggcugccacuu

SEQ ID NO: 1570101 - RNA, 19 nt, Human adenovirus D
caguccaugcccaacaggc

SEQ ID NO: 1570102 - RNA, 16 nt, Human adenovirus D
cccacaucgaggcccu

SEQ ID NO: 1570103 - RNA, 19 nt, Human adenovirus D
acagcaucgccucaccuau

SEQ ID NO: 1570104 - RNA, 19 nt, Human adenovirus D
ggccacucccagcgccgcg

SEQ ID NO: 1570105 - RNA, 19 nt, Human adenovirus D
agggcgcucccaaucccag

SEQ ID NO: 1570106 - RNA, 12 nt, Human adenovirus D
caguggcccugg

SEQ ID NO: 1570107 - RNA, 13 nt, Human adenovirus D
ggucgcugccgga

SEQ ID NO: 1570108 - RNA, 18 nt, Human adenovirus D
acuggcuuccgccgccgg

SEQ ID NO: 1570109 - RNA, 16 nt, Human adenovirus D
gccggcgaaccgagca

SEQ ID NO: 1570110 - RNA, 15 nt, Human adenovirus D
guggaaacagacagc

SEQ ID NO: 1570111 - RNA, 21 nt, Human adenovirus D
uauuuaaaggcaccuuacacu

SEQ ID NO: 1570112 - RNA, 20 nt, Human adenovirus D
aaaaucuuacacuguuguuu

SEQ ID NO: 1570113 - RNA, 18 nt, Human adenovirus D
ccaagaaacgucccagca

SEQ ID NO: 1570114 - RNA, 14 nt, Human adenovirus D
gccuucgugcacug

SEQ ID NO: 1570115 - RNA, 14 nt, Human adenovirus D
cagcacacucacuu

SEQ ID NO: 1570116 - RNA, 20 nt, Human adenovirus D
gccccucaugaacacacugc

SEQ ID NO: 1570117 - RNA, 12 nt, Human adenovirus D
ccgcgcgccgcg

SEQ ID NO: 1570118 - RNA, 22 nt, Human adenovirus D
guuccuggugguacagcacagc

SEQ ID NO: 1570119 - RNA, 16 nt, Human adenovirus D
gccgggcgcugguagg

SEQ ID NO: 1570120 - RNA, 15 nt, Human adenovirus D
uugaaaaggcagcug

SEQ ID NO: 1570121 - RNA, 21 nt, Human adenovirus D
ccacaaugugguagcuuacac

SEQ ID NO: 1570122 - RNA, 15 nt, Human adenovirus D
gucaggcaggauuca

SEQ ID NO: 1570123 - RNA, 18 nt, Human adenovirus D
gccagccuuacucagguu

SEQ ID NO: 1570124 - RNA, 20 nt, Human adenovirus D
auugcaggauugauaaggag

SEQ ID NO: 1570125 - RNA, 17 nt, Human adenovirus D
gcagguggacgagccgc

SEQ ID NO: 1570126 - RNA, 16 nt, Human adenovirus D
ccaccgcuaccgcuuc

SEQ ID NO: 1570127 - RNA, 17 nt, Human adenovirus D
ugcuucaauaauggaag

SEQ ID NO: 1570128 - RNA, 14 nt, Human adenovirus D
cucaacagcuggga

SEQ ID NO: 1570129 - RNA, 18 nt, Human adenovirus D
uguacgacaccacucgcg

SEQ ID NO: 1570130 - RNA, 21 nt, Human adenovirus D
cagcaacccuuccuggucgag

SEQ ID NO: 1570131 - RNA, 13 nt, Human adenovirus D
uguacacugaaaa

SEQ ID NO: 1570132 - RNA, 19 nt, Human adenovirus D
aaaaccaguuuucccccgu

SEQ ID NO: 1570133 - RNA, 16 nt, Human adenovirus D
guucuacccagcaagu

SEQ ID NO: 1570134 - RNA, 14 nt, Human adenovirus D
ccucgaccaugacc

SEQ ID NO: 1570135 - RNA, 21 nt, Human adenovirus D
cgguggucccuucucggacca

SEQ ID NO: 1570136 - RNA, 17 nt, Human adenovirus D
cgaaguuccccucgcag

SEQ ID NO: 1570137 - RNA, 19 nt, Human adenovirus D
acagaaccagauacuucag

SEQ ID NO: 1570138 - RNA, 15 nt, Human adenovirus D
gagcaggaccugggc

SEQ ID NO: 1570139 - RNA, 14 nt, Human adenovirus D
ugcagacucugcuc

SEQ ID NO: 1570140 - RNA, 17 nt, Human adenovirus D
aacauuacuucuggcac

SEQ ID NO: 1570141 - RNA, 20 nt, Human adenovirus D
agcaguccaugcccaacagg

SEQ ID NO: 1570142 - RNA, 13 nt, Human adenovirus D
caccucggugcag

SEQ ID NO: 1570143 - RNA, 18 nt, Human adenovirus D
auguccuuccagggucuc

SEQ ID NO: 1570144 - RNA, 18 nt, Human adenovirus D
agcacugcaaauuuaacu

SEQ ID NO: 1570145 - RNA, 18 nt, Human adenovirus D
ccccuuugucuccuccga

SEQ ID NO: 1570146 - RNA, 21 nt, Human adenovirus D
acuacagcugacaauucagag

SEQ ID NO: 1570147 - RNA, 18 nt, Human adenovirus D
ggaguaccugagcccggg

SEQ ID NO: 1570148 - RNA, 14 nt, Human adenovirus D
cgagcucugcugcg

SEQ ID NO: 1570149 - RNA, 13 nt, Human adenovirus D
cuuucacuuuggu

SEQ ID NO: 1570150 - RNA, 16 nt, Human adenovirus D
ggccguuggaagaugu

SEQ ID NO: 1570151 - RNA, 14 nt, Human adenovirus D
ccagacgcacgggc

SEQ ID NO: 1570152 - RNA, 17 nt, Human adenovirus D
gcuagaaaacacccaca

SEQ ID NO: 1570153 - RNA, 19 nt, Human adenovirus D
agcccugagccgccagcug

SEQ ID NO: 1570154 - RNA, 23 nt, Human adenovirus D
aggggucuaucuggacccccaga

SEQ ID NO: 1570155 - RNA, 14 nt, Human adenovirus D
agagugccacugcc

SEQ ID NO: 1570156 - RNA, 22 nt, Human adenovirus D
cuggaagcccugagccgccagc

SEQ ID NO: 1570157 - RNA, 18 nt, Human adenovirus D
ucagcgcccucagcaguc

SEQ ID NO: 1570158 - RNA, 17 nt, Human adenovirus D
gaguuggugagcucuuc

SEQ ID NO: 1570159 - RNA, 20 nt, Human adenovirus D
cuccugccugggaauccugc

SEQ ID NO: 1570160 - RNA, 19 nt, Human adenovirus D
gugaagaccacuggccccg

SEQ ID NO: 1570161 - RNA, 19 nt, Human adenovirus D
gccuuuagguguugcauga

SEQ ID NO: 1570162 - RNA, 15 nt, Human adenovirus D
cuucaacaucugugc

SEQ ID NO: 1570163 - RNA, 19 nt, Human adenovirus D
auugcccaacaauaaaaga

SEQ ID NO: 1570164 - RNA, 13 nt, Human adenovirus D
ggcacuggagcac

SEQ ID NO: 1570165 - RNA, 21 nt, Human adenovirus D
cucgagcgcccauuccuggag

SEQ ID NO: 1570166 - RNA, 14 nt, Human adenovirus D
cuggacgagagcaa

SEQ ID NO: 1570167 - RNA, 14 nt, Human adenovirus D
auccgcgccgcagc

SEQ ID NO: 1570168 - RNA, 12 nt, Human adenovirus D
gucauccuucca

SEQ ID NO: 1570169 - RNA, 16 nt, Human adenovirus D
gcccgcgugcgccgcg

SEQ ID NO: 1570170 - RNA, 17 nt, Human adenovirus D
ccugcaccugcgucugc

SEQ ID NO: 1570171 - RNA, 17 nt, Human adenovirus D
ggccgaaaaccccgccg

SEQ ID NO: 1570172 - RNA, 15 nt, Human adenovirus D
gccgcuguggagcca

SEQ ID NO: 1570173 - RNA, 15 nt, Human adenovirus D
ggaggaccagguccu

SEQ ID NO: 1570174 - RNA, 14 nt, Human adenovirus D
gcuguccacgggga

SEQ ID NO: 1570175 - RNA, 15 nt, Human adenovirus D
aaaagcucccacagu

SEQ ID NO: 1570176 - RNA, 15 nt, Human adenovirus D
gcgagccggcggcgc

SEQ ID NO: 1570177 - RNA, 22 nt, Human adenovirus D
gcugagccugcgccgggcgcug

SEQ ID NO: 1570178 - RNA, 23 nt, Human adenovirus D
gaagcccgugaccugcagcaggu

SEQ ID NO: 1570179 - RNA, 22 nt, Human adenovirus D
gagcccguagcugcgcggggcc

SEQ ID NO: 1570180 - RNA, 17 nt, Human adenovirus D
gcucggugacgaagaag

SEQ ID NO: 1570181 - RNA, 14 nt, Human adenovirus D
augcaccuguggag

SEQ ID NO: 1570182 - RNA, 15 nt, Human adenovirus D
ggugaaccugagcca

SEQ ID NO: 1570183 - RNA, 16 nt, Human adenovirus D
ggcccgggacggaggc

SEQ ID NO: 1570184 - RNA, 13 nt, Human adenovirus D
gcaacgccuuccc

SEQ ID NO: 1570185 - RNA, 18 nt, Human adenovirus D
uucuagaaacgaggagga

SEQ ID NO: 1570186 - RNA, 22 nt, Human adenovirus D
gggcaucucgcugaugucgccg

SEQ ID NO: 1570187 - RNA, 23 nt, Human adenovirus D
cccccaggcccuggagcagcggc

SEQ ID NO: 1570188 - RNA, 18 nt, Human adenovirus D
ugacagcgacgagacugg

SEQ ID NO: 1570189 - RNA, 19 nt, Human adenovirus D
gagcagguuucucaacagc

SEQ ID NO: 1570190 - RNA, 16 nt, Human adenovirus D
cgugcagcugcagaag

SEQ ID NO: 1570191 - RNA, 16 nt, Human adenovirus D
cgggccccggggcgaa

SEQ ID NO: 1570192 - RNA, 14 nt, Human adenovirus D
ugcagggagccagg

SEQ ID NO: 1570193 - RNA, 23 nt, Human adenovirus D
caagacgcaggccaggaggagac

SEQ ID NO: 1570194 - RNA, 10 nt, Human adenovirus D
gaacuuucuc

SEQ ID NO: 1570195 - RNA, 18 nt, Human adenovirus D
cgugcuugagaugcagau

SEQ ID NO: 1570196 - RNA, 18 nt, Human adenovirus D
ccucuucuauuucuuccu

SEQ ID NO: 1570197 - RNA, 14 nt, Human adenovirus D
agcgcgugcugcgc

SEQ ID NO: 1570198 - RNA, 18 nt, Human adenovirus D
cggggccacgaccgugcc

SEQ ID NO: 1570199 - RNA, 14 nt, Human adenovirus D
agcuauaaaaauga

SEQ ID NO: 1570200 - RNA, 21 nt, Human adenovirus D
ccaagauagcccugcgcccag

SEQ ID NO: 1570201 - RNA, 17 nt, Human adenovirus D
cucgcgcccguagucug

SEQ ID NO: 1570202 - RNA, 15 nt, Human adenovirus D
caccgcuccuggucu

SEQ ID NO: 1570203 - RNA, 18 nt, Human adenovirus D
ucgcgcaacugggccgcu

SEQ ID NO: 1570204 - RNA, 14 nt, Human adenovirus D
gagcuacaugccca

SEQ ID NO: 1570205 - RNA, 12 nt, Human adenovirus D
agcuggcuccgu

SEQ ID NO: 1570206 - RNA, 21 nt, Human adenovirus D
cauccccgcccugcuggaugu

SEQ ID NO: 1570207 - RNA, 23 nt, Human adenovirus D
ggucucgcacucgacgagccagg

SEQ ID NO: 1570208 - RNA, 12 nt, Human adenovirus D
cagcggcgcagg

SEQ ID NO: 1570209 - RNA, 17 nt, Human adenovirus D
cgcggccgcccacggug

SEQ ID NO: 1570210 - RNA, 22 nt, Human adenovirus D
cgaugggcccgugggcugcggc

SEQ ID NO: 1570211 - RNA, 17 nt, Human adenovirus D
cgagcaugaggcggugg

SEQ ID NO: 1570212 - RNA, 12 nt, Human adenovirus D
ccacucgcgggc

SEQ ID NO: 1570213 - RNA, 15 nt, Human adenovirus D
cagcuguuccuggug

SEQ ID NO: 1570214 - RNA, 16 nt, Human adenovirus D
ccauggggcgccgccc

SEQ ID NO: 1570215 - RNA, 17 nt, Human adenovirus D
gucacuuaaguccuggg

SEQ ID NO: 1570216 - RNA, 22 nt, Human adenovirus D
gcugcccguucucgcuggucac

SEQ ID NO: 1570217 - RNA, 17 nt, Human adenovirus D
cuucaccgaccuggguc

SEQ ID NO: 1570218 - RNA, 17 nt, Human adenovirus D
gcgacccccaggcccug

SEQ ID NO: 1570219 - RNA, 13 nt, Human adenovirus D
gaaggugauuggc

SEQ ID NO: 1570220 - RNA, 21 nt, Human adenovirus D
ugcccgacuucaugagccaga

SEQ ID NO: 1570221 - RNA, 15 nt, Human adenovirus D
gccauccccauccag

SEQ ID NO: 1570222 - RNA, 12 nt, Human adenovirus D
gccugaggcaga

SEQ ID NO: 1570223 - RNA, 17 nt, Human adenovirus D
gccgcgguuaugcaggg

SEQ ID NO: 1570224 - RNA, 20 nt, Human adenovirus D
cccacgccgagccugaagcc

SEQ ID NO: 1570225 - RNA, 15 nt, Human adenovirus D
ccgagaccugcgcaa

SEQ ID NO: 1570226 - RNA, 15 nt, Human adenovirus D
uaaguggcaacaccu

SEQ ID NO: 1570227 - RNA, 22 nt, Human adenovirus D
uugcaugccuucgugcacuggc

SEQ ID NO: 1570228 - RNA, 20 nt, Human adenovirus D
cacccgccgccgucugcccc

SEQ ID NO: 1570229 - RNA, 22 nt, Human adenovirus D
agcagaaauuucaagcugggcu

SEQ ID NO: 1570230 - RNA, 23 nt, Human adenovirus D
caucgugcagaacccggacagca

SEQ ID NO: 1570231 - RNA, 20 nt, Human adenovirus D
uagacaaagagcacagcagu

SEQ ID NO: 1570232 - RNA, 13 nt, Human adenovirus D
cggagugaugaau

SEQ ID NO: 1570233 - RNA, 20 nt, Human adenovirus D
cggcguggcgcucgggcagg

SEQ ID NO: 1570234 - RNA, 18 nt, Human adenovirus D
aaacgaagaucagcugca

SEQ ID NO: 1570235 - RNA, 16 nt, Human adenovirus D
ucuucaaccgcuuccc

SEQ ID NO: 1570236 - RNA, 22 nt, Human adenovirus D
guggacuuccgcguaccugcgc

SEQ ID NO: 1570237 - RNA, 15 nt, Human adenovirus D
cucccucguacgaga

SEQ ID NO: 1570238 - RNA, 17 nt, Human adenovirus D
aggacgcagcgugaaga

SEQ ID NO: 1570239 - RNA, 21 nt, Human adenovirus D
uggacccuccgucggaagagg

SEQ ID NO: 1570240 - RNA, 19 nt, Human adenovirus D
cugggcaacggccgcuacg

SEQ ID NO: 1570241 - RNA, 14 nt, Human adenovirus D
ggagaggcauggca

SEQ ID NO: 1570242 - RNA, 19 nt, Human adenovirus D
gcgaaggugucccugacca

SEQ ID NO: 1570243 - RNA, 14 nt, Human adenovirus D
cagcgcuggguggc

SEQ ID NO: 1570244 - RNA, 17 nt, Human adenovirus D
acaguuggcgacccagg

SEQ ID NO: 1570245 - RNA, 22 nt, Human adenovirus D
cagacucugcucauacugcuau

SEQ ID NO: 1570246 - RNA, 22 nt, Human adenovirus D
gcuggcugaaucccacucccac

SEQ ID NO: 1570247 - RNA, 15 nt, Human adenovirus D
cugaccuugcagagc

SEQ ID NO: 1570248 - RNA, 14 nt, Human adenovirus D
aggucugcugguag

SEQ ID NO: 1570249 - RNA, 15 nt, Human adenovirus D
cgaccgcgagcugau

SEQ ID NO: 1570250 - RNA, 14 nt, Human adenovirus D
cgucuacucccagc

SEQ ID NO: 1570251 - RNA, 19 nt, Human adenovirus D
aucucuagcaugaccagac

SEQ ID NO: 1570252 - RNA, 18 nt, Human adenovirus D
acuacauggacaagauau

SEQ ID NO: 1570253 - RNA, 20 nt, Human adenovirus D
ccggucucugcgcucgcuca

SEQ ID NO: 1570254 - RNA, 16 nt, Human adenovirus D
aucagguauccagccu

SEQ ID NO: 1570255 - RNA, 22 nt, Human adenovirus D
uccgcacgguaagagcccagca

SEQ ID NO: 1570256 - RNA, 19 nt, Human adenovirus D
cuuuuaggugaagcaauac

SEQ ID NO: 1570257 - RNA, 18 nt, Human adenovirus D
cccuugaacagcauauac

SEQ ID NO: 1570258 - RNA, 18 nt, Human adenovirus D
uguuuuugcgaaaacacu

SEQ ID NO: 1570259 - RNA, 13 nt, Human adenovirus D
agaucgccgcgac

SEQ ID NO: 1570260 - RNA, 20 nt, Human adenovirus D
uggugcugaaacgggcacgg

SEQ ID NO: 1570261 - RNA, 16 nt, Human adenovirus D
acuugacuuccggguu

SEQ ID NO: 1570262 - RNA, 20 nt, Human adenovirus D
ugagagucugaaaaacagaa

SEQ ID NO: 1570263 - RNA, 18 nt, Human adenovirus D
aacugcuggcccugcugg

SEQ ID NO: 1570264 - RNA, 17 nt, Human adenovirus D
cuugcugacgcccaacu

SEQ ID NO: 1570265 - RNA, 22 nt, Human adenovirus D
ugagcucuuaccaaguccaggg

SEQ ID NO: 1570266 - RNA, 17 nt, Human adenovirus D
cuacaaggcccugggca

SEQ ID NO: 1570267 - RNA, 17 nt, Human adenovirus D
aagucacuuaaguccug

SEQ ID NO: 1570268 - RNA, 22 nt, Human adenovirus D
ggugggcaaaaagaaacaaguc

SEQ ID NO: 1570269 - RNA, 15 nt, Human adenovirus D
aguugcgcaggcgcu

SEQ ID NO: 1570270 - RNA, 19 nt, Human adenovirus D
cuugauuuuuccagcccag

SEQ ID NO: 1570271 - RNA, 18 nt, Human adenovirus D
accagacccaggcgcgga

SEQ ID NO: 1570272 - RNA, 15 nt, Human adenovirus D
cauguucgacuccuc

SEQ ID NO: 1570273 - RNA, 23 nt, Human adenovirus D
caaauucauuuuugaagucaugu

SEQ ID NO: 1570274 - RNA, 13 nt, Human adenovirus D
accagucgggccc

SEQ ID NO: 1570275 - RNA, 20 nt, Human adenovirus D
uagagugccacugccgcugc

SEQ ID NO: 1570276 - RNA, 20 nt, Human adenovirus D
cauuuaauaaagaucacuua

SEQ ID NO: 1570277 - RNA, 15 nt, Human adenovirus D
cuacaugcccagcag

SEQ ID NO: 1570278 - RNA, 20 nt, Human adenovirus D
cagcccauaauucagggugc

SEQ ID NO: 1570279 - RNA, 15 nt, Human adenovirus D
ccggccaaggccacc

SEQ ID NO: 1570280 - RNA, 19 nt, Human adenovirus D
aggcggcggucaccucaac

SEQ ID NO: 1570281 - RNA, 13 nt, Human adenovirus D
accgacgcugggc

SEQ ID NO: 1570282 - RNA, 21 nt, Human adenovirus D
ucgcagcgcugcacgggcugu

SEQ ID NO: 1570283 - RNA, 18 nt, Human adenovirus D
auggccucgugcucuggg

SEQ ID NO: 1570284 - RNA, 16 nt, Human adenovirus D
ccugcauuggcagccg

SEQ ID NO: 1570285 - RNA, 23 nt, Human adenovirus D
aaggauucaaaacucacuuuggu

SEQ ID NO: 1570286 - RNA, 13 nt, Human adenovirus D
auaguaaagaaac

SEQ ID NO: 1570287 - RNA, 16 nt, Human adenovirus D
ggucccgcucccagcg

SEQ ID NO: 1570288 - RNA, 19 nt, Human adenovirus D
uccaacguggagcugacca

SEQ ID NO: 1570289 - RNA, 18 nt, Human adenovirus D
aguugggccuccaggaau

SEQ ID NO: 1570290 - RNA, 23 nt, Human adenovirus D
ucuccaucauguucgacuccucg

SEQ ID NO: 1570291 - RNA, 13 nt, Human adenovirus D
uggugauggccug

SEQ ID NO: 1570292 - RNA, 14 nt, Human adenovirus D
acaucagccaggac

SEQ ID NO: 1570293 - RNA, 15 nt, Human adenovirus D
gccgcgcgcuggggc

SEQ ID NO: 1570294 - RNA, 13 nt, Human adenovirus D
aagauacagagua

SEQ ID NO: 1570295 - RNA, 21 nt, Human adenovirus D
cguucgcgaggacgcagcgug

SEQ ID NO: 1570296 - RNA, 14 nt, Human adenovirus D
gacucgcugcugca

SEQ ID NO: 1570297 - RNA, 21 nt, Human adenovirus D
gugcaacuuuagccagaccaa

SEQ ID NO: 1570298 - RNA, 15 nt, Human adenovirus D
cgaacuuucuccaca

SEQ ID NO: 1570299 - RNA, 13 nt, Human adenovirus D
gugcagcagagcg

SEQ ID NO: 1570300 - RNA, 13 nt, Human adenovirus D
gaugcugagccug

SEQ ID NO: 1570301 - RNA, 17 nt, Human adenovirus D
cccagcguaagcgcgcg

SEQ ID NO: 1570302 - RNA, 20 nt, Human adenovirus D
cccggggcggaguggccucu

SEQ ID NO: 1570303 - RNA, 17 nt, Human adenovirus D
ggacguggugcugcugc

SEQ ID NO: 1570304 - RNA, 23 nt, Human adenovirus D
cuuggagcaggguaaagccagca

SEQ ID NO: 1570305 - RNA, 22 nt, Human adenovirus D
gagaugucugugaagcagugug

SEQ ID NO: 1570306 - RNA, 18 nt, Human adenovirus D
ggagguagcaccacugca

SEQ ID NO: 1570307 - RNA, 18 nt, Human adenovirus D
caccgccuccacccugga

SEQ ID NO: 1570308 - RNA, 18 nt, Human adenovirus D
gcagcaggagcgugccgc

SEQ ID NO: 1570309 - RNA, 13 nt, Human adenovirus D
guugggcagcgag

SEQ ID NO: 1570310 - RNA, 15 nt, Human adenovirus D
gcagcagcaguagcc

SEQ ID NO: 1570311 - RNA, 13 nt, Human adenovirus D
cccgcgugcgccg

SEQ ID NO: 1570312 - RNA, 15 nt, Human adenovirus D
uguccuugaggagga

SEQ ID NO: 1570313 - RNA, 20 nt, Human adenovirus D
ccggccgcgcuugcugggcg

SEQ ID NO: 1570314 - RNA, 21 nt, Human adenovirus D
ugcagaacaacgauuucaccc

SEQ ID NO: 1570315 - RNA, 23 nt, Human adenovirus D
gagggaugcaugcggggggagau

SEQ ID NO: 1570316 - RNA, 14 nt, Human adenovirus D
gcuucuacagccag

SEQ ID NO: 1570317 - RNA, 18 nt, Human adenovirus D
ggcacggcacgcggccgu

SEQ ID NO: 1570318 - RNA, 20 nt, Human adenovirus D
caucauccaaggccaucugc

SEQ ID NO: 1570319 - RNA, 14 nt, Human adenovirus D
ucagccaggacucu

SEQ ID NO: 1570320 - RNA, 23 nt, Human adenovirus D
cuuaaaucauuuaaaauaaaacu

SEQ ID NO: 1570321 - RNA, 16 nt, Human adenovirus D
ggccacucccagcgcc

SEQ ID NO: 1570322 - RNA, 16 nt, Human adenovirus D
ccccauggcgcacaac

SEQ ID NO: 1570323 - RNA, 16 nt, Human adenovirus D
cgcggacgcgcucccg

SEQ ID NO: 1570324 - RNA, 22 nt, Human adenovirus D
aggggccaagaaggccggggcc

SEQ ID NO: 1570325 - RNA, 15 nt, Human adenovirus D
ggaugcaugcggggg

SEQ ID NO: 1570326 - RNA, 17 nt, Human adenovirus D
guccgccaagcuccucg

SEQ ID NO: 1570327 - RNA, 21 nt, Human adenovirus D
cucaucugcagggcgcccagc

SEQ ID NO: 1570328 - RNA, 15 nt, Human adenovirus D
uauuagaugacaaaa

SEQ ID NO: 1570329 - RNA, 15 nt, Human adenovirus D
cuugcaacuugcaaa

SEQ ID NO: 1570330 - RNA, 12 nt, Human adenovirus D
accaccugguga

SEQ ID NO: 1570331 - RNA, 17 nt, Human adenovirus D
cuaugggaacaaggccu

SEQ ID NO: 1570332 - RNA, 16 nt, Human adenovirus D
ugcgccgaagcgccgu

SEQ ID NO: 1570333 - RNA, 15 nt, Human adenovirus D
gugaggguguccugg

SEQ ID NO: 1570334 - RNA, 22 nt, Human adenovirus D
auggccuccagccuuuccaugg

SEQ ID NO: 1570335 - RNA, 17 nt, Human adenovirus D
aggacuacaaggccguc

SEQ ID NO: 1570336 - RNA, 20 nt, Human adenovirus D
cguccgcaguacucgcagcg

SEQ ID NO: 1570337 - RNA, 19 nt, Human adenovirus D
gaacaaaacccaugaaaga

SEQ ID NO: 1570338 - RNA, 21 nt, Human adenovirus D
ccacugcuccugcgaaagccc

SEQ ID NO: 1570339 - RNA, 16 nt, Human adenovirus D
gcaagacgcaggccag

SEQ ID NO: 1570340 - RNA, 17 nt, Human adenovirus D
cugaaggaaaaaucacu

SEQ ID NO: 1570341 - RNA, 19 nt, Human adenovirus D
cuuuagguguugcaugaug

SEQ ID NO: 1570342 - RNA, 21 nt, Human adenovirus D
ugcaacaugaccaaggacugg

SEQ ID NO: 1570343 - RNA, 14 nt, Human adenovirus D
caagagcgagaugu

SEQ ID NO: 1570344 - RNA, 19 nt, Human adenovirus D
cgcgcgcgaggagguggcc

SEQ ID NO: 1570345 - RNA, 15 nt, Human adenovirus D
uccaguacucccgga

SEQ ID NO: 1570346 - RNA, 16 nt, Human adenovirus D
guccccgcccgccgcc

SEQ ID NO: 1570347 - RNA, 15 nt, Human adenovirus D
cucggucaggagcaa

SEQ ID NO: 1570348 - RNA, 14 nt, Human adenovirus D
cuaggcgcagcugc

SEQ ID NO: 1570349 - RNA, 20 nt, Human adenovirus D
acucugguacuccagucucc

SEQ ID NO: 1570350 - RNA, 12 nt, Human adenovirus D
cccgcacccggc

SEQ ID NO: 1570351 - RNA, 21 nt, Human adenovirus D
cacccgguacuacgccagccg

SEQ ID NO: 1570352 - RNA, 13 nt, Human adenovirus D
cagucugaugaau

SEQ ID NO: 1570353 - RNA, 16 nt, Human adenovirus D
gaggacgaguaccuga

SEQ ID NO: 1570354 - RNA, 16 nt, Human adenovirus D
aguucacuagccucca

SEQ ID NO: 1570355 - RNA, 18 nt, Human adenovirus D
ggaaacagacagccaggu

SEQ ID NO: 1570356 - RNA, 19 nt, Human adenovirus D
caucaucgcgccacuggcc

SEQ ID NO: 1570357 - RNA, 13 nt, Human adenovirus D
gcuguaaagccag

SEQ ID NO: 1570358 - RNA, 17 nt, Human adenovirus D
gcaguacucgcagcgcu

SEQ ID NO: 1570359 - RNA, 14 nt, Human adenovirus D
uggccacggggagc

SEQ ID NO: 1570360 - RNA, 16 nt, Human adenovirus D
acaacgccaggcuggc

SEQ ID NO: 1570361 - RNA, 14 nt, Human adenovirus D
cgagcgccagcugu

SEQ ID NO: 1570362 - RNA, 19 nt, Human adenovirus D
aaggugcugacauccaugg

SEQ ID NO: 1570363 - RNA, 17 nt, Human adenovirus D
guaccaugggaaaugca

SEQ ID NO: 1570364 - RNA, 17 nt, Human adenovirus D
gcucggccaugccccag

SEQ ID NO: 1570365 - RNA, 17 nt, Human adenovirus D
cucaucacaucagccag

SEQ ID NO: 1570366 - RNA, 20 nt, Human adenovirus D
ccugcgcaaggucgaggaga

SEQ ID NO: 1570367 - RNA, 13 nt, Human adenovirus D
gcagcacauaauc

SEQ ID NO: 1570368 - RNA, 22 nt, Human adenovirus D
cccagcaacccuuccuggucga

SEQ ID NO: 1570369 - RNA, 18 nt, Human adenovirus D
cuacacggucacugucca

SEQ ID NO: 1570370 - RNA, 20 nt, Human adenovirus D
cccgagggucgcuggcugcu

SEQ ID NO: 1570371 - RNA, 14 nt, Human adenovirus D
ucuauuuucaaggu

SEQ ID NO: 1570372 - RNA, 14 nt, Human adenovirus D
acucaccaaggcca

SEQ ID NO: 1570373 - RNA, 16 nt, Human adenovirus D
cggccguagcaggcgc

SEQ ID NO: 1570374 - RNA, 14 nt, Human adenovirus D
cgcgcccgcagcac

SEQ ID NO: 1570375 - RNA, 24 nt, Human adenovirus D
gcaggguaaagccagcagcacaug

SEQ ID NO: 1570376 - RNA, 12 nt, Human adenovirus D
cccccagcuccu

SEQ ID NO: 1570377 - RNA, 16 nt, Human adenovirus D
uccugaagaacaucca

SEQ ID NO: 1570378 - RNA, 19 nt, Human adenovirus D
ccaguuucaaacccuacuc

SEQ ID NO: 1570379 - RNA, 21 nt, Human adenovirus D
caacagaaccggaggcuggcu

SEQ ID NO: 1570380 - RNA, 22 nt, Human adenovirus D
uccccucaucacaucagccagg

SEQ ID NO: 1570381 - RNA, 22 nt, Human adenovirus D
gccuccgcgguauauggcuccu

SEQ ID NO: 1570382 - RNA, 20 nt, Human adenovirus D
cuccucuuugcccugcucac

SEQ ID NO: 1570383 - RNA, 17 nt, Human adenovirus D
cugagauaugugcagca

SEQ ID NO: 1570384 - RNA, 19 nt, Human adenovirus D
ugggcacccacgacacagc

SEQ ID NO: 1570385 - RNA, 22 nt, Human adenovirus D
acgcggaucucacggccugcgu

SEQ ID NO: 1570386 - RNA, 18 nt, Human adenovirus D
cguccgucagcagcagga

SEQ ID NO: 1570387 - RNA, 22 nt, Human adenovirus D
agaaccugaaggagcuggacaa

SEQ ID NO: 1570388 - RNA, 21 nt, Human adenovirus D
gcggaguccagcgagugaccg

SEQ ID NO: 1570389 - RNA, 14 nt, Human adenovirus D
ccggccaaggccac

SEQ ID NO: 1570390 - RNA, 13 nt, Human adenovirus D
gagcagacgguga

SEQ ID NO: 1570391 - RNA, 15 nt, Human adenovirus D
guucuggagacacug

SEQ ID NO: 1570392 - RNA, 14 nt, Human adenovirus D
gacuacaaggccgu

SEQ ID NO: 1570393 - RNA, 13 nt, Human adenovirus D
guacccgaggacu

SEQ ID NO: 1570394 - RNA, 21 nt, Human adenovirus D
gcugaucaacaucuugcagag

SEQ ID NO: 1570395 - RNA, 21 nt, Human adenovirus D
ucuuccgcaacuuccagccca

SEQ ID NO: 1570396 - RNA, 21 nt, Human adenovirus D
aaaucacucuuuccagcagca

SEQ ID NO: 1570397 - RNA, 23 nt, Human adenovirus D
ugcggccguccuuucgcugcugc

SEQ ID NO: 1570398 - RNA, 19 nt, Human adenovirus D
gagaugcgacccaugagcu

SEQ ID NO: 1570399 - RNA, 19 nt, Human adenovirus D
uuccaucaucgccgaggag

SEQ ID NO: 1570400 - RNA, 16 nt, Human adenovirus D
gacucacccuggggcu

SEQ ID NO: 1570401 - RNA, 21 nt, Human adenovirus D
gcgggccaugcgcaggcgccu

SEQ ID NO: 1570402 - RNA, 19 nt, Human adenovirus D
ggccaugagggucuggagc

SEQ ID NO: 1570403 - RNA, 16 nt, Human adenovirus D
ucccggccaaggccac

SEQ ID NO: 1570404 - RNA, 13 nt, Human adenovirus D
cgcguggaggaag

SEQ ID NO: 1570405 - RNA, 15 nt, Human adenovirus D
gcgaggucauucgag

SEQ ID NO: 1570406 - RNA, 17 nt, Human adenovirus D
cuguauuaccuuccuug

SEQ ID NO: 1570407 - RNA, 17 nt, Human adenovirus D
uagccagaccaagcugc

SEQ ID NO: 1570408 - RNA, 16 nt, Human adenovirus D
acuccgcgaccuccuc

SEQ ID NO: 1570409 - RNA, 18 nt, Human adenovirus D
ucagaauauccccuuccu

SEQ ID NO: 1570410 - RNA, 20 nt, Human adenovirus D
gcuaguguacaacgcccugc

SEQ ID NO: 1570411 - RNA, 16 nt, Human adenovirus D
accaggcagugcagcg

SEQ ID NO: 1570412 - RNA, 19 nt, Human adenovirus D
gagcugaugcugagccugc

SEQ ID NO: 1570413 - RNA, 12 nt, Human adenovirus D
gcggcugcugca

SEQ ID NO: 1570414 - RNA, 19 nt, Human adenovirus D
aguuuccugacgagccaaa

SEQ ID NO: 1570415 - RNA, 14 nt, Human adenovirus D
gucugaagcgccgc

SEQ ID NO: 1570416 - RNA, 13 nt, Human adenovirus D
augggaaugagag

SEQ ID NO: 1570417 - RNA, 13 nt, Human adenovirus D
ggggccagguccu

SEQ ID NO: 1570418 - RNA, 15 nt, Human adenovirus D
gcgucccuggcuccg

SEQ ID NO: 1570419 - RNA, 19 nt, Human adenovirus D
acaguauugugggccuggg

SEQ ID NO: 1570420 - RNA, 14 nt, Human adenovirus D
agggccucggcggc

SEQ ID NO: 1570421 - RNA, 13 nt, Human adenovirus D
cuugacagcaccg

SEQ ID NO: 1570422 - RNA, 22 nt, Human adenovirus D
cggguguaaugaaacccgccac

SEQ ID NO: 1570423 - RNA, 21 nt, Human adenovirus D
gccaggggaugaacaguggca

SEQ ID NO: 1570424 - RNA, 16 nt, Human adenovirus D
aggcgcgcccacccgg

SEQ ID NO: 1570425 - RNA, 21 nt, Human adenovirus D
uuaauaugggagagaacaaaa

SEQ ID NO: 1570426 - RNA, 18 nt, Human adenovirus D
uccuucaacgacuaccuc

SEQ ID NO: 1570427 - RNA, 20 nt, Human adenovirus D
ggcagguggucgaugagauc

SEQ ID NO: 1570428 - RNA, 15 nt, Human adenovirus D
agaagaacaggagcc

SEQ ID NO: 1570429 - RNA, 14 nt, Human adenovirus D
caguuugggcacug

SEQ ID NO: 1570430 - RNA, 18 nt, Human adenovirus D
cccaggcccuggagcagc

SEQ ID NO: 1570431 - RNA, 21 nt, Human adenovirus D
ucuugcuagauucucugggug

SEQ ID NO: 1570432 - RNA, 18 nt, Human adenovirus D
caagcuugguggcaaagg

SEQ ID NO: 1570433 - RNA, 22 nt, Human adenovirus D
gcugccccaggcggugcugcug

SEQ ID NO: 1570434 - RNA, 18 nt, Human adenovirus D
ccagccuguacccagagc

SEQ ID NO: 1570435 - RNA, 15 nt, Human adenovirus D
gcagagcagcucuuc

SEQ ID NO: 1570436 - RNA, 16 nt, Human adenovirus D
cugaagaacauccaug

SEQ ID NO: 1570437 - RNA, 11 nt, Human adenovirus D
acaugacaugg

SEQ ID NO: 1570438 - RNA, 12 nt, Human adenovirus D
ggcugcuggagc

SEQ ID NO: 1570439 - RNA, 17 nt, Human adenovirus D
cucaauaaacagcacuu

SEQ ID NO: 1570440 - RNA, 17 nt, Human adenovirus D
uugcgcgagcagaacgg

SEQ ID NO: 1570441 - RNA, 13 nt, Human adenovirus D
cgcgcgggcagga

SEQ ID NO: 1570442 - RNA, 12 nt, Human adenovirus D
aauaagucacua

SEQ ID NO: 1570443 - RNA, 16 nt, Human adenovirus D
gcagcgcauccugcaa

SEQ ID NO: 1570444 - RNA, 14 nt, Human adenovirus D
acaugaccaaggac

SEQ ID NO: 1570445 - RNA, 14 nt, Human adenovirus D
ccugcuggagcgcg

SEQ ID NO: 1570446 - RNA, 22 nt, Human adenovirus D
uccagauggaaaggucacuugg

SEQ ID NO: 1570447 - RNA, 20 nt, Human adenovirus D
ccguuuaucaauaagcuaau

SEQ ID NO: 1570448 - RNA, 22 nt, Human adenovirus D
caauaagguucugcccuccgcc

SEQ ID NO: 1570449 - RNA, 21 nt, Human adenovirus D
ugcauggccucgugcucuggg

SEQ ID NO: 1570450 - RNA, 13 nt, Human adenovirus D
gcagguggcgccg

SEQ ID NO: 1570451 - RNA, 15 nt, Human adenovirus D
gucgccucggaccug

SEQ ID NO: 1570452 - RNA, 11 nt, Human adenovirus D
aguccagcaga

SEQ ID NO: 1570453 - RNA, 20 nt, Human adenovirus D
cccucaggcgcaaccaggag

SEQ ID NO: 1570454 - RNA, 13 nt, Human adenovirus D
caccuuccagccg

SEQ ID NO: 1570455 - RNA, 15 nt, Human adenovirus D
cucgcggcugcugcu

SEQ ID NO: 1570456 - RNA, 15 nt, Human adenovirus D
gcgacaacgccaggc

SEQ ID NO: 1570457 - RNA, 18 nt, Human adenovirus D
cggcagcggggccuggug

SEQ ID NO: 1570458 - RNA, 13 nt, Human adenovirus D
ggcgugcagaccg

SEQ ID NO: 1570459 - RNA, 18 nt, Human adenovirus D
guacuaaugacagaggca

SEQ ID NO: 1570460 - RNA, 14 nt, Human adenovirus D
gcaccauccccagg

SEQ ID NO: 1570461 - RNA, 19 nt, Human adenovirus D
ggccucuucgcccgaccgc

SEQ ID NO: 1570462 - RNA, 14 nt, Human adenovirus D
gccugaggcagacg

SEQ ID NO: 1570463 - RNA, 14 nt, Human adenovirus D
gccuggggcagaca

SEQ ID NO: 1570464 - RNA, 16 nt, Human adenovirus D
  misc_feature (7)..(7): n is a, c, g, or u
ggccgangggagucgc

SEQ ID NO: 1570465 - RNA, 15 nt, Human adenovirus D
aggaggaccaggucc

SEQ ID NO: 1570466 - RNA, 16 nt, Human adenovirus D
gccuccaccacccacg

SEQ ID NO: 1570467 - RNA, 16 nt, Human adenovirus D
ggcacggcacgcggcc

SEQ ID NO: 1570468 - RNA, 20 nt, Human adenovirus D
ucagcuaaucaugccccaca

SEQ ID NO: 1570469 - RNA, 21 nt, Human adenovirus D
cacaguauugugggccuggga

SEQ ID NO: 1570470 - RNA, 15 nt, Human adenovirus D
cagcgccgcgcugga

SEQ ID NO: 1570471 - RNA, 22 nt, Human adenovirus D
cuggaagagguaguugagggug

SEQ ID NO: 1570472 - RNA, 19 nt, Human adenovirus D
uaaaaaugcaguugaauuu

SEQ ID NO: 1570473 - RNA, 15 nt, Human adenovirus D
cggucaggagcaagc

SEQ ID NO: 1570474 - RNA, 13 nt, Human adenovirus D
gcucccacagugc

SEQ ID NO: 1570475 - RNA, 22 nt, Human adenovirus D
acucccagcgccgcgcuggaca

SEQ ID NO: 1570476 - RNA, 16 nt, Human adenovirus D
ccugggaggagaggag

SEQ ID NO: 1570477 - RNA, 15 nt, Human adenovirus D
ggagcccacccgcug

SEQ ID NO: 1570478 - RNA, 19 nt, Human adenovirus D
cgaggaggagcgcauccug

SEQ ID NO: 1570479 - RNA, 15 nt, Human adenovirus D
ggagcggucuggacc

SEQ ID NO: 1570480 - RNA, 19 nt, Human adenovirus D
gccaauaacgggauagaga

SEQ ID NO: 1570481 - RNA, 16 nt, Human adenovirus D
ccuacucgggcacggc

SEQ ID NO: 1570482 - RNA, 21 nt, Human adenovirus D
acggaccggucccagcgucug

SEQ ID NO: 1570483 - RNA, 17 nt, Human adenovirus D
ggaccaaccccacgcac

SEQ ID NO: 1570484 - RNA, 13 nt, Human adenovirus D
cgcccgcgccgcg

SEQ ID NO: 1570485 - RNA, 16 nt, Human adenovirus D
ugaccuugcagagcag

SEQ ID NO: 1570486 - RNA, 13 nt, Human adenovirus D
caggagcacgagc

SEQ ID NO: 1570487 - RNA, 19 nt, Human adenovirus D
ugugggaccuggcggaggc

SEQ ID NO: 1570488 - RNA, 16 nt, Human adenovirus D
cagcaauaacaccggc

SEQ ID NO: 1570489 - RNA, 23 nt, Human adenovirus D
ggcgacgacgcgcucggcgagga

SEQ ID NO: 1570490 - RNA, 18 nt, Human adenovirus D
cauaagaaucacauuaaa

SEQ ID NO: 1570491 - RNA, 14 nt, Human adenovirus D
gcauggcaggcagc

SEQ ID NO: 1570492 - RNA, 17 nt, Human adenovirus D
acaucaauuuugcgucc

SEQ ID NO: 1570493 - RNA, 22 nt, Human adenovirus D
acgcugagcgacgaccugggcg

SEQ ID NO: 1570494 - RNA, 15 nt, Human adenovirus D
cuuugacacaccugg

SEQ ID NO: 1570495 - RNA, 21 nt, Human adenovirus D
cacugcaccccccgcaggcag

SEQ ID NO: 1570496 - RNA, 18 nt, Human adenovirus D
gaguggccucucgcucca

SEQ ID NO: 1570497 - RNA, 23 nt, Human adenovirus D
cagggaugaguugggccugaugc

SEQ ID NO: 1570498 - RNA, 20 nt, Human adenovirus D
gaggccgccuacgguccaga

SEQ ID NO: 1570499 - RNA, 15 nt, Human adenovirus D
ccaagcgggccucac

SEQ ID NO: 1570500 - RNA, 20 nt, Human adenovirus D
uuuuauggcugcuggauggg

SEQ ID NO: 1570501 - RNA, 23 nt, Human adenovirus D
cgcauguacaacaugcugacugc

SEQ ID NO: 1570502 - RNA, 14 nt, Human adenovirus D
gaccaccaccugga

SEQ ID NO: 1570503 - RNA, 15 nt, Human adenovirus D
agcccaaacuggggc

SEQ ID NO: 1570504 - RNA, 15 nt, Human adenovirus D
gcaggcagcggccug

SEQ ID NO: 1570505 - RNA, 13 nt, Human adenovirus D
acaaagcugaaag

SEQ ID NO: 1570506 - RNA, 16 nt, Human adenovirus D
aguacauguucaccag

SEQ ID NO: 1570507 - RNA, 22 nt, Human adenovirus D
ugcagcguguucaaaacaacaa

SEQ ID NO: 1570508 - RNA, 15 nt, Human adenovirus D
aauuaugcuccuggg

SEQ ID NO: 1570509 - RNA, 19 nt, Human adenovirus D
ggagcugaucucgcugccg

SEQ ID NO: 1570510 - RNA, 20 nt, Human adenovirus D
gaucccagcguaagcgcgcg

SEQ ID NO: 1570511 - RNA, 19 nt, Human adenovirus D
uguucaaaacaacaagauu

SEQ ID NO: 1570512 - RNA, 16 nt, Human adenovirus D
gcgcacguggcggcgg

SEQ ID NO: 1570513 - RNA, 17 nt, Human adenovirus D
cuuccuccguagccugg

SEQ ID NO: 1570514 - RNA, 21 nt, Human adenovirus D
cacgagcaagacgcaggccag

SEQ ID NO: 1570515 - RNA, 10 nt, Human adenovirus D
aaaacacaca

SEQ ID NO: 1570516 - RNA, 14 nt, Human adenovirus D
ggcggugguagccg

SEQ ID NO: 1570517 - RNA, 22 nt, Human adenovirus D
uacacucgcagugcacgggcau

SEQ ID NO: 1570518 - RNA, 13 nt, Human adenovirus D
cgccacaggugcu

SEQ ID NO: 1570519 - RNA, 19 nt, Human adenovirus D
ccugggcugcgggccuacu

SEQ ID NO: 1570520 - RNA, 20 nt, Human adenovirus D
gcccagagcucgcgggccau

SEQ ID NO: 1570521 - RNA, 17 nt, Human adenovirus D
gaaucgcgggcggccuu

SEQ ID NO: 1570522 - RNA, 16 nt, Human adenovirus D
cgcgcgcgguaggccc

SEQ ID NO: 1570523 - RNA, 13 nt, Human adenovirus D
aaagcgccaggag

SEQ ID NO: 1570524 - RNA, 20 nt, Human adenovirus D
gcgaagauggggccccgcca

SEQ ID NO: 1570525 - RNA, 19 nt, Human adenovirus D
aggcgggacagaggaggga

SEQ ID NO: 1570526 - RNA, 23 nt, Human adenovirus D
agugaucgcgggcuuuguaacuc

SEQ ID NO: 1570527 - RNA, 16 nt, Human adenovirus D
ccgggucucccccagc

SEQ ID NO: 1570528 - RNA, 16 nt, Human adenovirus D
cuggaccggcugguga

SEQ ID NO: 1570529 - RNA, 12 nt, Human adenovirus D
gacccaggcgcg

SEQ ID NO: 1570530 - RNA, 19 nt, Human adenovirus D
ggccugaaccgccgccggc

SEQ ID NO: 1570531 - RNA, 22 nt, Human adenovirus D
cugccuggugaagggcacagcc

SEQ ID NO: 1570532 - RNA, 17 nt, Human adenovirus D
agacugcuaucaggaga

SEQ ID NO: 1570533 - RNA, 13 nt, Human adenovirus D
ccuggcucccagc

SEQ ID NO: 1570534 - RNA, 19 nt, Human adenovirus D
ucgccacaggugcugccca

SEQ ID NO: 1570535 - RNA, 13 nt, Human adenovirus D
cgcccggggccag

SEQ ID NO: 1570536 - RNA, 21 nt, Human adenovirus D
cguggacgcugcucaccaccc

SEQ ID NO: 1570537 - RNA, 21 nt, Human adenovirus D
cauggcgcaguaguccagcgu

SEQ ID NO: 1570538 - RNA, 13 nt, Human adenovirus D
guaccgcagcugg

SEQ ID NO: 1570539 - RNA, 17 nt, Human adenovirus D
cuagagugaggcacugc

SEQ ID NO: 1570540 - RNA, 19 nt, Human adenovirus D
ccagcaucgaggugcagac

SEQ ID NO: 1570541 - RNA, 15 nt, Human adenovirus D
aacaauaugugcgca

SEQ ID NO: 1570542 - RNA, 15 nt, Human adenovirus D
aggcgcuggaagagg

SEQ ID NO: 1570543 - RNA, 14 nt, Human adenovirus D
gucgaggagaccug

SEQ ID NO: 1570544 - RNA, 17 nt, Human adenovirus D
uaaugguccugcaagag

SEQ ID NO: 1570545 - RNA, 14 nt, Human adenovirus D
agcucaugcuggcc

SEQ ID NO: 1570546 - RNA, 21 nt, Human adenovirus D
agccaguggaagaggggcagc

SEQ ID NO: 1570547 - RNA, 13 nt, Human adenovirus D
cugagcucgcucg

SEQ ID NO: 1570548 - RNA, 12 nt, Human adenovirus D
ccaaaaucagaa

SEQ ID NO: 1570549 - RNA, 13 nt, Human adenovirus D
cgagcgcaccguc

SEQ ID NO: 1570550 - RNA, 20 nt, Human adenovirus D
uuagucauguguaaauaaag

SEQ ID NO: 1570551 - RNA, 18 nt, Human adenovirus D
cccuccacuuucauaauc

SEQ ID NO: 1570552 - RNA, 18 nt, Human adenovirus D
ccugcuggccgagcugga

SEQ ID NO: 1570553 - RNA, 21 nt, Human adenovirus D
cgcuacugcugauuacucuaa

SEQ ID NO: 1570554 - RNA, 15 nt, Human adenovirus D
cacaucgaggcccuc

SEQ ID NO: 1570555 - RNA, 22 nt, Human adenovirus D
aggaggacuuaaccacccacga

SEQ ID NO: 1570556 - RNA, 18 nt, Human adenovirus D
cccugcccuuccagcaca

SEQ ID NO: 1570557 - RNA, 23 nt, Human adenovirus D
gccccgccaaccggcugaugccc

SEQ ID NO: 1570558 - RNA, 14 nt, Human adenovirus D
cuuccguugcgcug

SEQ ID NO: 1570559 - RNA, 18 nt, Human adenovirus D
cucggugcggcugcugca

SEQ ID NO: 1570560 - RNA, 14 nt, Human adenovirus D
gcccaggccgcucu

SEQ ID NO: 1570561 - RNA, 21 nt, Human adenovirus D
gcggaccugcauuggcagccg

SEQ ID NO: 1570562 - RNA, 18 nt, Human adenovirus D
agccgcgcgccgcgccgc

SEQ ID NO: 1570563 - RNA, 19 nt, Human adenovirus D
caaaagcguccgcuccgca

SEQ ID NO: 1570564 - RNA, 18 nt, Human adenovirus D
cauggccucgugcucugg

SEQ ID NO: 1570565 - RNA, 16 nt, Human adenovirus D
ugccgguuucgggcgg

SEQ ID NO: 1570566 - RNA, 19 nt, Human adenovirus D
gcagaagaucccggcgcag

SEQ ID NO: 1570567 - RNA, 18 nt, Human adenovirus D
gucccucauccuccggga

SEQ ID NO: 1570568 - RNA, 11 nt, Human adenovirus D
gcgaacagcag

SEQ ID NO: 1570569 - RNA, 22 nt, Human adenovirus D
cauugauacccuggacaaggcc

SEQ ID NO: 1570570 - RNA, 14 nt, Human adenovirus D
auuuaauuggcaaa

SEQ ID NO: 1570571 - RNA, 22 nt, Human adenovirus D
cggcgaugacugaccaccaccu

SEQ ID NO: 1570572 - RNA, 19 nt, Human adenovirus D
guccuucacucccaaccag

SEQ ID NO: 1570573 - RNA, 14 nt, Human adenovirus D
gcgucuccaugagu

SEQ ID NO: 1570574 - RNA, 11 nt, Human adenovirus D
ccugagcgaga

SEQ ID NO: 1570575 - RNA, 15 nt, Human adenovirus D
agcccgauagccgcc

SEQ ID NO: 1570576 - RNA, 20 nt, Human adenovirus D
cugccaacauuacuucuggc

SEQ ID NO: 1570577 - RNA, 14 nt, Human adenovirus D
ucgauccagcagac

SEQ ID NO: 1570578 - RNA, 13 nt, Human adenovirus D
ggggcauugcagg

SEQ ID NO: 1570579 - RNA, 12 nt, Human adenovirus D
uuaaugcugccu

SEQ ID NO: 1570580 - RNA, 16 nt, Human adenovirus D
guaguggcucgcgccc

SEQ ID NO: 1570581 - RNA, 14 nt, Human adenovirus D
ugacggcgggcuga

SEQ ID NO: 1570582 - RNA, 17 nt, Human adenovirus D
ugucaaagcgcaucuac

SEQ ID NO: 1570583 - RNA, 15 nt, Human adenovirus D
gcagacagggccugc

SEQ ID NO: 1570584 - RNA, 18 nt, Human adenovirus D
uauggugaucagccauga

SEQ ID NO: 1570585 - RNA, 17 nt, Human adenovirus D
cuucuauggaggcagag

SEQ ID NO: 1570586 - RNA, 17 nt, Human adenovirus D
cuggucacccucgagcu

SEQ ID NO: 1570587 - RNA, 19 nt, Human adenovirus D
cgggccugggcgugcagac

SEQ ID NO: 1570588 - RNA, 15 nt, Human adenovirus D
ggugcuaaagcucuu

SEQ ID NO: 1570589 - RNA, 15 nt, Human adenovirus D
agaucggcaccagcc

SEQ ID NO: 1570590 - RNA, 13 nt, Human adenovirus D
gacccacagccag

SEQ ID NO: 1570591 - RNA, 20 nt, Human adenovirus D
gcccucgaugaaagucagga

SEQ ID NO: 1570592 - RNA, 17 nt, Human adenovirus D
caacgucaaccccuuca

SEQ ID NO: 1570593 - RNA, 14 nt, Human adenovirus D
cucaaaaagcugug

SEQ ID NO: 1570594 - RNA, 21 nt, Human adenovirus D
ugcgcguaggagucuugcagc

SEQ ID NO: 1570595 - RNA, 22 nt, Human adenovirus D
uggagcagugucuggagcgggc

SEQ ID NO: 1570596 - RNA, 16 nt, Human adenovirus D
ucucuucuuguaacuu

SEQ ID NO: 1570597 - RNA, 19 nt, Human adenovirus D
ugcucgucagggggguccg

SEQ ID NO: 1570598 - RNA, 17 nt, Human adenovirus D
gcaugaccagacccagg

SEQ ID NO: 1570599 - RNA, 18 nt, Human adenovirus D
uccaagcgggccucacag

SEQ ID NO: 1570600 - RNA, 12 nt, Human adenovirus D
uaaaaacccugg

SEQ ID NO: 1570601 - RNA, 14 nt, Human adenovirus D
acucggagcuggcu

SEQ ID NO: 1570602 - RNA, 18 nt, Human adenovirus D
cauggacgggaaccccac

SEQ ID NO: 1570603 - RNA, 22 nt, Human adenovirus D
cucaaagaccagaacuuccagc

SEQ ID NO: 1570604 - RNA, 21 nt, Human adenovirus D
ugguccagauggaaaggucac

SEQ ID NO: 1570605 - RNA, 13 nt, Human adenovirus D
ccgagccugaagc

SEQ ID NO: 1570606 - RNA, 12 nt, Human adenovirus D
cugaaagcaugg

SEQ ID NO: 1570607 - RNA, 22 nt, Human adenovirus D
agguuucucaacagcugggacu

SEQ ID NO: 1570608 - RNA, 14 nt, Human adenovirus D
agggucuggagcuc

SEQ ID NO: 1570609 - RNA, 14 nt, Human adenovirus D
ucagcugcagcgca

SEQ ID NO: 1570610 - RNA, 16 nt, Human adenovirus D
agcauauaccccuccu

SEQ ID NO: 1570611 - RNA, 17 nt, Human adenovirus D
acgugcccaucuccauc

SEQ ID NO: 1570612 - RNA, 17 nt, Human adenovirus D
gagcaggaccugggcuu

SEQ ID NO: 1570613 - RNA, 21 nt, Human adenovirus D
augcaggauaaauauggccug

SEQ ID NO: 1570614 - RNA, 23 nt, Human adenovirus D
gcucaccaucugagcucuuacca

SEQ ID NO: 1570615 - RNA, 20 nt, Human adenovirus D
aggaggcccaucuacaggcc

SEQ ID NO: 1570616 - RNA, 22 nt, Human adenovirus D
cugcacgagaaccgccuggggc

SEQ ID NO: 1570617 - RNA, 13 nt, Human adenovirus D
cuuuaucugcugg

SEQ ID NO: 1570618 - RNA, 19 nt, Human adenovirus D
ugaaccacacggccagcag

SEQ ID NO: 1570619 - RNA, 18 nt, Human adenovirus D
gccgccggggcucggugc

SEQ ID NO: 1570620 - RNA, 14 nt, Human adenovirus D
ugcaaccugugcuc

SEQ ID NO: 1570621 - RNA, 16 nt, Human adenovirus D
cggugguaggccccug

SEQ ID NO: 1570622 - RNA, 19 nt, Human adenovirus D
uucccuggaagagugccca

SEQ ID NO: 1570623 - RNA, 17 nt, Human adenovirus D
cuaccugggagucucua

SEQ ID NO: 1570624 - RNA, 17 nt, Human adenovirus D
gcaucgaggugcagacc

SEQ ID NO: 1570625 - RNA, 17 nt, Human adenovirus D
ggggcucguuaguccag

SEQ ID NO: 1570626 - RNA, 16 nt, Human adenovirus D
ccacgaccggcagcgg

SEQ ID NO: 1570627 - RNA, 17 nt, Human adenovirus D
cagcgcuggguggccgg

SEQ ID NO: 1570628 - RNA, 23 nt, Human adenovirus D
uggccaacagccacaugacccug

SEQ ID NO: 1570629 - RNA, 14 nt, Human adenovirus D
gcauggcuaccugg

SEQ ID NO: 1570630 - RNA, 23 nt, Human adenovirus D
cugcaacccccagcuccugagcg

SEQ ID NO: 1570631 - RNA, 20 nt, Human adenovirus D
cucguacccgcucaccaucu

SEQ ID NO: 1570632 - RNA, 16 nt, Human adenovirus D
ccagcuggccgcccug

SEQ ID NO: 1570633 - RNA, 21 nt, Human adenovirus D
uacauagaccacgcuacaaau

SEQ ID NO: 1570634 - RNA, 13 nt, Human adenovirus D
ucacccucgagcu

SEQ ID NO: 1570635 - RNA, 16 nt, Human adenovirus D
cgcccugcuggagcgc

SEQ ID NO: 1570636 - RNA, 19 nt, Human adenovirus D
ccgcgugacgcacuggccg

SEQ ID NO: 1570637 - RNA, 12 nt, Human adenovirus D
cgcgggaagagc

SEQ ID NO: 1570638 - RNA, 13 nt, Human adenovirus D
gagcgccagcugu

SEQ ID NO: 1570639 - RNA, 15 nt, Human adenovirus D
cucuucuuccaugac

SEQ ID NO: 1570640 - RNA, 14 nt, Human adenovirus D
aaugcuccaaagcu

SEQ ID NO: 1570641 - RNA, 23 nt, Human adenovirus D
gacagagauggacuuggaagagg

SEQ ID NO: 1570642 - RNA, 20 nt, Human adenovirus D
gcagcccuucuccacgggga

SEQ ID NO: 1570643 - RNA, 17 nt, Human adenovirus D
gcgauccucgcccaauu

SEQ ID NO: 1570644 - RNA, 23 nt, Human adenovirus D
ucgcgccucaaugucagcugcaa

SEQ ID NO: 1570645 - RNA, 20 nt, Human adenovirus D
auguggaacucugcggugga

SEQ ID NO: 1570646 - RNA, 21 nt, Human adenovirus D
ucaaacagcaaagcaucuuua

SEQ ID NO: 1570647 - RNA, 18 nt, Human adenovirus D
ucacauccaucuccacca

SEQ ID NO: 1570648 - RNA, 22 nt, Human adenovirus D
guaggcccugguccaccucucc

SEQ ID NO: 1570649 - RNA, 14 nt, Human adenovirus D
ccgagaccgugagc

SEQ ID NO: 1570650 - RNA, 19 nt, Human adenovirus D
uucucaucucgcccagcaa

SEQ ID NO: 1570651 - RNA, 19 nt, Human adenovirus D
agcuccgguugugcagccc

SEQ ID NO: 1570652 - RNA, 20 nt, Human adenovirus D
gugaagguuaguugcagacc

SEQ ID NO: 1570653 - RNA, 18 nt, Human adenovirus D
acugcucuucccuggaga

SEQ ID NO: 1570654 - RNA, 15 nt, Human adenovirus D
cgucccgacgaggcc

SEQ ID NO: 1570655 - RNA, 19 nt, Human adenovirus D
gugacucggcugagcucgc

SEQ ID NO: 1570656 - RNA, 15 nt, Human adenovirus D
ccgcaacuuccagcc

SEQ ID NO: 1570657 - RNA, 22 nt, Human adenovirus D
ucucuagcaugaccagacccag

SEQ ID NO: 1570658 - RNA, 19 nt, Human adenovirus D
cucgccgucuacucccagc

SEQ ID NO: 1570659 - RNA, 17 nt, Human adenovirus D
uugagcccaucaagcaa

SEQ ID NO: 1570660 - RNA, 14 nt, Human adenovirus D
cgcaggcgacccug

SEQ ID NO: 1570661 - RNA, 16 nt, Human adenovirus D
cguuacucggagcugg

SEQ ID NO: 1570662 - RNA, 22 nt, Human adenovirus D
cugcugcugaucgcgcccuuca

SEQ ID NO: 1570663 - RNA, 17 nt, Human adenovirus D
ccucaugaacacacugc

SEQ ID NO: 1570664 - RNA, 13 nt, Human adenovirus D
cugggggcggugg

SEQ ID NO: 1570665 - RNA, 19 nt, Human adenovirus D
cagaacccggacagcaagc

SEQ ID NO: 1570666 - RNA, 23 nt, Human adenovirus D
cgaccgcauccacaaggccguga

SEQ ID NO: 1570667 - RNA, 19 nt, Human adenovirus D
gcugggacccugugaccaa

SEQ ID NO: 1570668 - RNA, 21 nt, Human adenovirus D
ccagcaucgaggugcagaccg

SEQ ID NO: 1570669 - RNA, 15 nt, Human adenovirus D
ggcagcggggccugg

SEQ ID NO: 1570670 - RNA, 20 nt, Human adenovirus D
aggauaaauauggccuggag

SEQ ID NO: 1570671 - RNA, 18 nt, Human adenovirus D
uguagagggaaccuacca

SEQ ID NO: 1570672 - RNA, 22 nt, Human adenovirus D
ggaacucgucgcuugacagcac

SEQ ID NO: 1570673 - RNA, 11 nt, Human adenovirus D
acaaggccugg

SEQ ID NO: 1570674 - RNA, 21 nt, Human adenovirus D
aacuacuggcuucuacagcca

SEQ ID NO: 1570675 - RNA, 19 nt, Human adenovirus D
acgguccagaggacuugga

SEQ ID NO: 1570676 - RNA, 15 nt, Human adenovirus D
aacucagucacucuc

SEQ ID NO: 1570677 - RNA, 16 nt, Human adenovirus D
cggcuguagaccacgu

SEQ ID NO: 1570678 - RNA, 15 nt, Human adenovirus D
aucacuggcggaggc

SEQ ID NO: 1570679 - RNA, 22 nt, Human adenovirus D
gggaaaggaauaggcacugaaa

SEQ ID NO: 1570680 - RNA, 20 nt, Human adenovirus D
acgacgacauccuggaccag

SEQ ID NO: 1570681 - RNA, 23 nt, Human adenovirus D
gcauuacuauuacugccacugcc

SEQ ID NO: 1570682 - RNA, 19 nt, Human adenovirus D
caguauggugaucagccau

SEQ ID NO: 1570683 - RNA, 17 nt, Human adenovirus D
gaacugauaagacacau

SEQ ID NO: 1570684 - RNA, 13 nt, Human adenovirus D
cccuucuccagca

SEQ ID NO: 1570685 - RNA, 24 nt, Human adenovirus D
cagcacaugguaauccacggacag

SEQ ID NO: 1570686 - RNA, 21 nt, Human adenovirus D
gccagcuggccgcccugaccc

SEQ ID NO: 1570687 - RNA, 20 nt, Human adenovirus D
aaaucacucuuuccagcagc

SEQ ID NO: 1570688 - RNA, 17 nt, Human adenovirus D
uggcuugguacccgcga

SEQ ID NO: 1570689 - RNA, 14 nt, Human adenovirus D
cacaucagccagga

SEQ ID NO: 1570690 - RNA, 16 nt, Human adenovirus D
ucaucucgcccagcaa

SEQ ID NO: 1570691 - RNA, 19 nt, Human adenovirus D
auugauuuuuacaccagcg

SEQ ID NO: 1570692 - RNA, 16 nt, Human adenovirus D
cgcgcuugcugggcga

SEQ ID NO: 1570693 - RNA, 17 nt, Human adenovirus D
ccugacacaaaacuaau

SEQ ID NO: 1570694 - RNA, 18 nt, Human adenovirus D
acggacuugauuggccug

SEQ ID NO: 1570695 - RNA, 20 nt, Human adenovirus D
cacgcguguugcggcccggc

SEQ ID NO: 1570696 - RNA, 15 nt, Human adenovirus D
cguccgcaggcggga

SEQ ID NO: 1570697 - RNA, 16 nt, Human adenovirus D
cugcggcgcggagcaa

SEQ ID NO: 1570698 - RNA, 18 nt, Human adenovirus D
aggcuagcacgcagacga

SEQ ID NO: 1570699 - RNA, 20 nt, Human adenovirus D
accuuggcuuugcuggguug

SEQ ID NO: 1570700 - RNA, 21 nt, Human adenovirus D
uguggagggcaugggucaggc

SEQ ID NO: 1570701 - RNA, 15 nt, Human adenovirus D
guccaugggcgccuu

SEQ ID NO: 1570702 - RNA, 12 nt, Human adenovirus D
cuucuacagcca

SEQ ID NO: 1570703 - RNA, 17 nt, Human adenovirus D
cugcuucugccugguga

SEQ ID NO: 1570704 - RNA, 13 nt, Human adenovirus D
ccugagcccgggu

SEQ ID NO: 1570705 - RNA, 21 nt, Human adenovirus D
gacucaggggguugcgcacgu

SEQ ID NO: 1570706 - RNA, 16 nt, Human adenovirus D
ggcggugcugcugccg

SEQ ID NO: 1570707 - RNA, 23 nt, Human adenovirus D
caggcccagaacuggcagagcac

SEQ ID NO: 1570708 - RNA, 15 nt, Human adenovirus D
cacuacagccggggu

SEQ ID NO: 1570709 - RNA, 16 nt, Human adenovirus D
agaccgugcaggggcc

SEQ ID NO: 1570710 - RNA, 14 nt, Human adenovirus D
ugcgguacacgggg

SEQ ID NO: 1570711 - RNA, 16 nt, Human adenovirus D
ugcuggaugcggagcc

SEQ ID NO: 1570712 - RNA, 15 nt, Human adenovirus D
cuugcaaacaauaaa

SEQ ID NO: 1570713 - RNA, 24 nt, Human adenovirus D
ggcgauaugccagacgcaagagcc

SEQ ID NO: 1570714 - RNA, 17 nt, Human adenovirus D
uauuacuaggcccagca

SEQ ID NO: 1570715 - RNA, 22 nt, Human adenovirus D
uaaucaccauguuauucagcag

SEQ ID NO: 1570716 - RNA, 21 nt, Human adenovirus D
gcaagagcucaaaguaaaaaa

SEQ ID NO: 1570717 - RNA, 18 nt, Human adenovirus D
cuccaacguggagcugac

SEQ ID NO: 1570718 - RNA, 17 nt, Human adenovirus D
acuguugcagagagaug

SEQ ID NO: 1570719 - RNA, 19 nt, Human adenovirus D
gcagcucaucgacuggugc

SEQ ID NO: 1570720 - RNA, 19 nt, Human adenovirus D
agaugccccagcagaagca

SEQ ID NO: 1570721 - RNA, 18 nt, Human adenovirus D
gcggcggaugguggcgag

SEQ ID NO: 1570722 - RNA, 15 nt, Human adenovirus D
gcaccccccgcaggc

SEQ ID NO: 1570723 - RNA, 17 nt, Human adenovirus D
agagucugaaaaacaga

SEQ ID NO: 1570724 - RNA, 21 nt, Human adenovirus D
ccgugcgcuaccaccccagca

SEQ ID NO: 1570725 - RNA, 20 nt, Human adenovirus D
gcauggccucgugcucuggg

SEQ ID NO: 1570726 - RNA, 13 nt, Human adenovirus D
ggccagcacgcuc

SEQ ID NO: 1570727 - RNA, 18 nt, Human adenovirus D
gaagacgagggcgcgcag

SEQ ID NO: 1570728 - RNA, 17 nt, Human adenovirus D
agccgugaucccacagg

SEQ ID NO: 1570729 - RNA, 18 nt, Human adenovirus D
ucccaugauucaguacuu

SEQ ID NO: 1570730 - RNA, 15 nt, Human adenovirus D
cucugccgccggggc

SEQ ID NO: 1570731 - RNA, 18 nt, Human adenovirus D
accguagagggcaccacc

SEQ ID NO: 1570732 - RNA, 16 nt, Human adenovirus D
cccgaguuguccuggu

SEQ ID NO: 1570733 - RNA, 18 nt, Human adenovirus D
ugcgcgaguucgcuccgc

SEQ ID NO: 1570734 - RNA, 16 nt, Human adenovirus D
guggugguggcggggc

SEQ ID NO: 1570735 - RNA, 22 nt, Human adenovirus D
gggggguccgcaucgaugguga

SEQ ID NO: 1570736 - RNA, 21 nt, Human adenovirus D
augaccccgaugacggguugc

SEQ ID NO: 1570737 - RNA, 19 nt, Human adenovirus D
guuccgaauuaccgaggaa

SEQ ID NO: 1570738 - RNA, 16 nt, Human adenovirus D
ggcggagggugccaga

SEQ ID NO: 1570739 - RNA, 15 nt, Human adenovirus D
gcgugaagacgccgc

SEQ ID NO: 1570740 - RNA, 18 nt, Human adenovirus D
cacaguaagugcagcaca

SEQ ID NO: 1570741 - RNA, 16 nt, Human adenovirus D
cgacaugcccgacccc

SEQ ID NO: 1570742 - RNA, 12 nt, Human adenovirus D
cucugugcccag

SEQ ID NO: 1570743 - RNA, 22 nt, Human adenovirus D
caucauaagacauuuuaaugaa

SEQ ID NO: 1570744 - RNA, 18 nt, Human adenovirus D
cauuaacgggguggugga

SEQ ID NO: 1570745 - RNA, 15 nt, Human adenovirus D
cugacuacccacuga

SEQ ID NO: 1570746 - RNA, 18 nt, Human adenovirus D
cagggcgaaggugucccu

SEQ ID NO: 1570747 - RNA, 20 nt, Human adenovirus D
gucccccgccgcuguggagc

SEQ ID NO: 1570748 - RNA, 16 nt, Human adenovirus D
ccaugugaccucccac

SEQ ID NO: 1570749 - RNA, 18 nt, Human adenovirus D
gccgugggcgacaaccgg

SEQ ID NO: 1570750 - RNA, 18 nt, Human adenovirus D
uagaagagcccccucccc

SEQ ID NO: 1570751 - RNA, 21 nt, Human adenovirus D
acaucauaauuaugcuccugg

SEQ ID NO: 1570752 - RNA, 16 nt, Human adenovirus D
ucaugcaacuuggaag

SEQ ID NO: 1570753 - RNA, 13 nt, Human adenovirus D
cuccgcagugggc

SEQ ID NO: 1570754 - RNA, 11 nt, Human adenovirus D
cuggagcagcg

SEQ ID NO: 1570755 - RNA, 21 nt, Human adenovirus D
uucaaggccauaaaucugccc

SEQ ID NO: 1570756 - RNA, 15 nt, Human adenovirus D
aucagcugcagcgca

SEQ ID NO: 1570757 - RNA, 14 nt, Human adenovirus D
uuccugguccacaa

SEQ ID NO: 1570758 - RNA, 14 nt, Human adenovirus D
cuacaugcccagca

SEQ ID NO: 1570759 - RNA, 16 nt, Human adenovirus D
gcccugguccaccucu

SEQ ID NO: 1570760 - RNA, 21 nt, Human adenovirus D
uacaacaucggcuaccagggc

SEQ ID NO: 1570761 - RNA, 20 nt, Human adenovirus D
uccugagcgagacccagguc

SEQ ID NO: 1570762 - RNA, 15 nt, Human adenovirus D
cuggagacgggcugc

SEQ ID NO: 1570763 - RNA, 21 nt, Human adenovirus D
cccaggacgagaccagaggca

SEQ ID NO: 1570764 - RNA, 18 nt, Human adenovirus D
cuuugaaccugaaagaca

SEQ ID NO: 1570765 - RNA, 12 nt, Human adenovirus D
cacgcccgcucc

SEQ ID NO: 1570766 - RNA, 16 nt, Human adenovirus D
cauggccaacagccac

SEQ ID NO: 1570767 - RNA, 22 nt, Human adenovirus D
gcaggugacagcguuccccucc

SEQ ID NO: 1570768 - RNA, 18 nt, Human adenovirus D
uaugaccaugcagacucu

SEQ ID NO: 1570769 - RNA, 19 nt, Human adenovirus D
gacuccucggucagcuggc

SEQ ID NO: 1570770 - RNA, 23 nt, Human adenovirus D
cucugggggcgguggugguggcg

SEQ ID NO: 1570771 - RNA, 21 nt, Human adenovirus D
gcaacauccccgcccugcugg

SEQ ID NO: 1570772 - RNA, 22 nt, Human adenovirus D
uggcucuaaaaaauaugcaagg

SEQ ID NO: 1570773 - RNA, 14 nt, Human adenovirus D
uauggccuggagca

SEQ ID NO: 1570774 - RNA, 19 nt, Human adenovirus D
gugcuggaggguugaaaga

SEQ ID NO: 1570775 - RNA, 15 nt, Human adenovirus D
gacugaccaccaccu

SEQ ID NO: 1570776 - RNA, 21 nt, Human adenovirus D
augauccagcggcgcaggggc

SEQ ID NO: 1570777 - RNA, 21 nt, Human adenovirus D
caugccgaagaagaacaggag

SEQ ID NO: 1570778 - RNA, 15 nt, Human adenovirus D
auggcugcuggaugg

SEQ ID NO: 1570779 - RNA, 16 nt, Human adenovirus D
cgcgaagaggagcuga

SEQ ID NO: 1570780 - RNA, 12 nt, Human adenovirus D
cagucacucuca

SEQ ID NO: 1570781 - RNA, 22 nt, Human adenovirus D
ggcgaccggucgacggugagca

SEQ ID NO: 1570782 - RNA, 11 nt, Human adenovirus D
ccagcagcagg

SEQ ID NO: 1570783 - RNA, 14 nt, Human adenovirus D
caaaaauuaucuuu

SEQ ID NO: 1570784 - RNA, 16 nt, Human adenovirus D
guaaagccagaaagaa

SEQ ID NO: 1570785 - RNA, 14 nt, Human adenovirus D
gcuucacucuggcc

SEQ ID NO: 1570786 - RNA, 21 nt, Human adenovirus D
gaccuugcagagcagcucuuc

SEQ ID NO: 1570787 - RNA, 21 nt, Human adenovirus D
cgguggauuuuuuccaagacc

SEQ ID NO: 1570788 - RNA, 15 nt, Human adenovirus D
acagcacagcaggga

SEQ ID NO: 1570789 - RNA, 18 nt, Human adenovirus D
gaagaccauaguaaagaa

SEQ ID NO: 1570790 - RNA, 20 nt, Human adenovirus D
cuauaauccacacaguuucc

SEQ ID NO: 1570791 - RNA, 20 nt, Human adenovirus D
gaaacgucccagcagcaccc

SEQ ID NO: 1570792 - RNA, 12 nt, Human adenovirus D
caaacaaaagcc

SEQ ID NO: 1570793 - RNA, 17 nt, Human adenovirus D
cgcagcgcugcacgggc

SEQ ID NO: 1570794 - RNA, 15 nt, Human adenovirus D
gcgcccugagagcgc

SEQ ID NO: 1570795 - RNA, 15 nt, Human adenovirus D
gcaagggcgaccagc

SEQ ID NO: 1570796 - RNA, 13 nt, Human adenovirus D
aagcuggccugcg

SEQ ID NO: 1570797 - RNA, 18 nt, Human adenovirus D
acagcuagacaccacagu

SEQ ID NO: 1570798 - RNA, 17 nt, Human adenovirus D
gcugccaugggaggaag

SEQ ID NO: 1570799 - RNA, 21 nt, Human adenovirus D
cgcuggcggagaacaaggcca

SEQ ID NO: 1570800 - RNA, 22 nt, Human adenovirus D
gagcagacggugaagcaggagc

SEQ ID NO: 1570801 - RNA, 15 nt, Human adenovirus D
cgucaggcaggcaug

SEQ ID NO: 1570802 - RNA, 19 nt, Human adenovirus D
gcgcucgcgcaccugcuac

SEQ ID NO: 1570803 - RNA, 13 nt, Human adenovirus D
acccgaggagcgg

SEQ ID NO: 1570804 - RNA, 13 nt, Human adenovirus D
cgcgcgcugcccg

SEQ ID NO: 1570805 - RNA, 13 nt, Human adenovirus D
gaguaccugagcc

SEQ ID NO: 1570806 - RNA, 12 nt, Human adenovirus D
gaacgggggcag

SEQ ID NO: 1570807 - RNA, 23 nt, Human adenovirus D
ccagcaaauuccucgaccaugac

SEQ ID NO: 1570808 - RNA, 13 nt, Human adenovirus D
aguugguggccgu

SEQ ID NO: 1570809 - RNA, 14 nt, Human adenovirus D
cgucccagcagcac

SEQ ID NO: 1570810 - RNA, 13 nt, Human adenovirus D
ugcuaaagcucuu

SEQ ID NO: 1570811 - RNA, 19 nt, Human adenovirus D
ccacacauggcaagcugcc

SEQ ID NO: 1570812 - RNA, 19 nt, Human adenovirus D
ggacccugugaccaagcug

SEQ ID NO: 1570813 - RNA, 18 nt, Human adenovirus D
ugcauuggggauaaaguu

SEQ ID NO: 1570814 - RNA, 23 nt, Human adenovirus D
gacagccaggucaaaacccacuc

SEQ ID NO: 1570815 - RNA, 16 nt, Human adenovirus D
ucggugcggcugcugc

SEQ ID NO: 1570816 - RNA, 19 nt, Human adenovirus D
gcccuguggacgcuguuag

SEQ ID NO: 1570817 - RNA, 16 nt, Human adenovirus D
aggaggaugugcugcu

SEQ ID NO: 1570818 - RNA, 16 nt, Human adenovirus D
gcccuccgcccugagc

SEQ ID NO: 1570819 - RNA, 16 nt, Human adenovirus D
accaggaugcagccag

SEQ ID NO: 1570820 - RNA, 13 nt, Human adenovirus D
aggcaaagcucaa

SEQ ID NO: 1570821 - RNA, 21 nt, Human adenovirus D
accgcuccaugcuucugggca

SEQ ID NO: 1570822 - RNA, 14 nt, Human adenovirus D
uuuacaugcacugg

SEQ ID NO: 1570823 - RNA, 14 nt, Human adenovirus D
gugagcgcgagccg

SEQ ID NO: 1570824 - RNA, 22 nt, Human adenovirus D
gagcuuuuacaacgaccucgcc

SEQ ID NO: 1570825 - RNA, 17 nt, Human adenovirus D
ccgcgcucggugacaaa

SEQ ID NO: 1570826 - RNA, 21 nt, Human adenovirus D
gagcagcuugcgcgcuggcuu

SEQ ID NO: 1570827 - RNA, 13 nt, Human adenovirus D
acagagagccgcc

SEQ ID NO: 1570828 - RNA, 13 nt, Human adenovirus D
gcggaggagacga

SEQ ID NO: 1570829 - RNA, 21 nt, Human adenovirus D
gcgaggccauaggccaggcgc

SEQ ID NO: 1570830 - RNA, 14 nt, Human adenovirus D
gcugccggaccuca

SEQ ID NO: 1570831 - RNA, 21 nt, Human adenovirus D
ugaaaugaagccguccucuga

SEQ ID NO: 1570832 - RNA, 14 nt, Human adenovirus D
caacgccaggcugg

SEQ ID NO: 1570833 - RNA, 19 nt, Human adenovirus D
ggcgugcacuggcucgccu

SEQ ID NO: 1570834 - RNA, 21 nt, Human adenovirus D
gcugccgucgucccggaggag

SEQ ID NO: 1570835 - RNA, 20 nt, Human adenovirus D
acuuacuugaaaucugaaag

SEQ ID NO: 1570836 - RNA, 19 nt, Human adenovirus D
gcugcugaaacaccugcag

SEQ ID NO: 1570837 - RNA, 19 nt, Human adenovirus D
acaaucagccccuuccccu

SEQ ID NO: 1570838 - RNA, 21 nt, Human adenovirus D
acgccucggaguaccugagcc

SEQ ID NO: 1570839 - RNA, 23 nt, Human adenovirus D
ugcugccccaggcggugcugcug

SEQ ID NO: 1570840 - RNA, 13 nt, Human adenovirus D
cgcgagggccugg

SEQ ID NO: 1570841 - RNA, 15 nt, Human adenovirus D
uaggaccccagggac

SEQ ID NO: 1570842 - RNA, 14 nt, Human adenovirus D
ugugaccaagcugg

SEQ ID NO: 1570843 - RNA, 12 nt, Human adenovirus D
guccuggucacc

SEQ ID NO: 1570844 - RNA, 18 nt, Human adenovirus D
cucaugcccuuccgcgcc

SEQ ID NO: 1570845 - RNA, 18 nt, Human adenovirus D
gacuaucuaugaaagcau

SEQ ID NO: 1570846 - RNA, 22 nt, Human adenovirus D
uccccucgcgcaacugggccgc

SEQ ID NO: 1570847 - RNA, 19 nt, Human adenovirus D
gacuuccgcguaccugcgc

SEQ ID NO: 1570848 - RNA, 14 nt, Human adenovirus D
cguggugcugcugc

SEQ ID NO: 1570849 - RNA, 18 nt, Human adenovirus D
ugccuucgugcacuggcc

SEQ ID NO: 1570850 - RNA, 16 nt, Human adenovirus D
ccaggggguccaccuu

SEQ ID NO: 1570851 - RNA, 11 nt, Human adenovirus D
uguccggggcg

SEQ ID NO: 1570852 - RNA, 18 nt, Human adenovirus D
uggcuccuacggagggca

SEQ ID NO: 1570853 - RNA, 14 nt, Human adenovirus D
agugacaauuuaac

SEQ ID NO: 1570854 - RNA, 19 nt, Human adenovirus D
uggcaacaccugggcacug

SEQ ID NO: 1570855 - RNA, 22 nt, Human adenovirus D
uuauaaucgccagggaacugaa

SEQ ID NO: 1570856 - RNA, 17 nt, Human adenovirus D
guaguucaggagcgcag

SEQ ID NO: 1570857 - RNA, 16 nt, Human adenovirus D
gccgagcuggaagccc

SEQ ID NO: 1570858 - RNA, 23 nt, Human adenovirus D
ggcgaaguugaaaaacugggcgu

SEQ ID NO: 1570859 - RNA, 15 nt, Human adenovirus D
ugggacagccagcag

SEQ ID NO: 1570860 - RNA, 19 nt, Human adenovirus D
caaaaacagacuggucaaa

SEQ ID NO: 1570861 - RNA, 19 nt, Human adenovirus D
cauucuggacuucgcagcc

SEQ ID NO: 1570862 - RNA, 15 nt, Human adenovirus D
cgccuuggaggccgc

SEQ ID NO: 1570863 - RNA, 19 nt, Human adenovirus D
ggccgccuuuagguguugc

SEQ ID NO: 1570864 - RNA, 23 nt, Human adenovirus D
accacugccgccgccugcgcugc

SEQ ID NO: 1570865 - RNA, 13 nt, Human adenovirus D
acaggccgcagcu

SEQ ID NO: 1570866 - RNA, 12 nt, Human adenovirus D
cuccacgugccg

SEQ ID NO: 1570867 - RNA, 22 nt, Human adenovirus D
gagauccagguccgggggcagg

SEQ ID NO: 1570868 - RNA, 17 nt, Human adenovirus D
uggaacccaaaguauga

SEQ ID NO: 1570869 - RNA, 22 nt, Human adenovirus D
acccacgugguauacaagccag

SEQ ID NO: 1570870 - RNA, 18 nt, Human adenovirus D
cgagaagcggccgcggcc

SEQ ID NO: 1570871 - RNA, 17 nt, Human adenovirus D
cagaaagaaguggccag

SEQ ID NO: 1570872 - RNA, 20 nt, Human adenovirus D
gcacguuucgucaggcaggc

SEQ ID NO: 1570873 - RNA, 20 nt, Human adenovirus D
cucucggccauucuggaggc

SEQ ID NO: 1570874 - RNA, 20 nt, Human adenovirus D
cggcagggugagccggccgc

SEQ ID NO: 1570875 - RNA, 14 nt, Human adenovirus D
ccggcaacgaccgg

SEQ ID NO: 1570876 - RNA, 16 nt, Human adenovirus D
gguccugcaagaggag

SEQ ID NO: 1570877 - RNA, 20 nt, Human adenovirus D
gccuucuauggaggcagagc

SEQ ID NO: 1570878 - RNA, 22 nt, Human adenovirus D
cugaugaaucgcaagcgcccag

SEQ ID NO: 1570879 - RNA, 21 nt, Human adenovirus D
cggcaccugcgagcccaaccc

SEQ ID NO: 1570880 - RNA, 17 nt, Human adenovirus D
ucuguccaaccccgaag

SEQ ID NO: 1570881 - RNA, 16 nt, Human adenovirus D
aguggccucucgcucc

SEQ ID NO: 1570882 - RNA, 14 nt, Human adenovirus D
ggggcggcagaggc

SEQ ID NO: 1570883 - RNA, 21 nt, Human adenovirus D
gacuccgcgaccuccucccca

SEQ ID NO: 1570884 - RNA, 22 nt, Human adenovirus D
agcucccacagugcccccucca

SEQ ID NO: 1570885 - RNA, 16 nt, Human adenovirus D
ggcauggcaggcagcg

SEQ ID NO: 1570886 - RNA, 19 nt, Human adenovirus D
ccugggcauagucgcgccg

SEQ ID NO: 1570887 - RNA, 13 nt, Human adenovirus D
cuuccgcgccaag

SEQ ID NO: 1570888 - RNA, 14 nt, Human adenovirus D
uggaucgaaaucaa

SEQ ID NO: 1570889 - RNA, 21 nt, Human adenovirus D
acccucaggcgcaaccaggag

SEQ ID NO: 1570890 - RNA, 22 nt, Human adenovirus D
ugugauuaaaaagcagcacagu

SEQ ID NO: 1570891 - RNA, 16 nt, Human adenovirus D
ucguacuucugccagc

SEQ ID NO: 1570892 - RNA, 23 nt, Human adenovirus D
gcggacggaucgcccaggcgcca

SEQ ID NO: 1570893 - RNA, 19 nt, Human adenovirus D
guugucugugggaucuuua

SEQ ID NO: 1570894 - RNA, 20 nt, Human adenovirus D
cggcgcgcccggggccaggu

SEQ ID NO: 1570895 - RNA, 18 nt, Human adenovirus D
cugacgggggugcccaac

SEQ ID NO: 1570896 - RNA, 22 nt, Human adenovirus D
gcgguacacgggguugcagcac

SEQ ID NO: 1570897 - RNA, 14 nt, Human adenovirus D
cugcucucucuucu

SEQ ID NO: 1570898 - RNA, 19 nt, Human adenovirus D
cguccuuucgcugcugccg

SEQ ID NO: 1570899 - RNA, 20 nt, Human adenovirus D
ccgccauggggcgccgcccg

SEQ ID NO: 1570900 - RNA, 17 nt, Human adenovirus D
cuaucuaugaaagcaua

SEQ ID NO: 1570901 - RNA, 13 nt, Human adenovirus D
ccccaggcggugc

SEQ ID NO: 1570902 - RNA, 15 nt, Human adenovirus D
augccagacgcaaga

SEQ ID NO: 1570903 - RNA, 20 nt, Human adenovirus D
gccgcgggcgccucccagga

SEQ ID NO: 1570904 - RNA, 22 nt, Human adenovirus D
acgacacagcgauucccgggcu

SEQ ID NO: 1570905 - RNA, 18 nt, Human adenovirus D
gcgaccccguucgcgagg

SEQ ID NO: 1570906 - RNA, 21 nt, Human adenovirus D
gucauagcaggggcgcugggc

SEQ ID NO: 1570907 - RNA, 14 nt, Human adenovirus D
acauagaccacgcu

SEQ ID NO: 1570908 - RNA, 16 nt, Human adenovirus D
gccaucgugcagaacc

SEQ ID NO: 1570909 - RNA, 16 nt, Human adenovirus D
cugauggccacgggga

SEQ ID NO: 1570910 - RNA, 21 nt, Human adenovirus D
gguggauagcuaugauccaga

SEQ ID NO: 1570911 - RNA, 16 nt, Human adenovirus D
gugcaggaccaccagg

SEQ ID NO: 1570912 - RNA, 15 nt, Human adenovirus D
ugacauacaucuuuu

SEQ ID NO: 1570913 - RNA, 18 nt, Human adenovirus D
gagaucggcaccagccag

SEQ ID NO: 1570914 - RNA, 14 nt, Human adenovirus D
uccaacguggagcu

SEQ ID NO: 1570915 - RNA, 20 nt, Human adenovirus D
ggcgaacgugccgcgcgggc

SEQ ID NO: 1570916 - RNA, 20 nt, Human adenovirus D
ccauugguugaacccagaug

SEQ ID NO: 1570917 - RNA, 16 nt, Human adenovirus D
caacaucaccauugaa

SEQ ID NO: 1570918 - RNA, 22 nt, Human adenovirus D
gaucaucuccccgcggcggcga

SEQ ID NO: 1570919 - RNA, 15 nt, Human adenovirus D
agcgucgaggagcug

SEQ ID NO: 1570920 - RNA, 15 nt, Human adenovirus D
acgcccuugugcccg

SEQ ID NO: 1570921 - RNA, 18 nt, Human adenovirus D
gguucauguugugcagga

SEQ ID NO: 1570922 - RNA, 16 nt, Human adenovirus D
cuuccagcccaugagc

SEQ ID NO: 1570923 - RNA, 18 nt, Human adenovirus D
gcaguagccccucugugc

SEQ ID NO: 1570924 - RNA, 19 nt, Human adenovirus D
gccguagagguagcgggac

SEQ ID NO: 1570925 - RNA, 16 nt, Human adenovirus D
gggcguccagcgcggc

SEQ ID NO: 1570926 - RNA, 12 nt, Human adenovirus D
aggaccugggcu

SEQ ID NO: 1570927 - RNA, 20 nt, Human adenovirus D
agcacuggauugcaauuuug

SEQ ID NO: 1570928 - RNA, 14 nt, Human adenovirus D
gccgccgccgugcg

SEQ ID NO: 1570929 - RNA, 20 nt, Human adenovirus D
gucugcaacccccagcuccu

SEQ ID NO: 1570930 - RNA, 13 nt, Human adenovirus D
acuuuucuguugc

SEQ ID NO: 1570931 - RNA, 21 nt, Human adenovirus D
aaaagcagcacaguaaguucc

SEQ ID NO: 1570932 - RNA, 18 nt, Human adenovirus D
ugcugaccaauagacagc

SEQ ID NO: 1570933 - RNA, 20 nt, Human adenovirus D
accgccuccccgcagaaauc

SEQ ID NO: 1570934 - RNA, 18 nt, Human adenovirus D
cgcguaagcaggagcagg

SEQ ID NO: 1570935 - RNA, 12 nt, Human adenovirus D
ugcacccaccau

SEQ ID NO: 1570936 - RNA, 17 nt, Human adenovirus D
augcgugagggcggagg

SEQ ID NO: 1570937 - RNA, 19 nt, Human adenovirus D
cgcggugggucggagcccc

SEQ ID NO: 1570938 - RNA, 17 nt, Human adenovirus D
ccugggcacuggagcac

SEQ ID NO: 1570939 - RNA, 14 nt, Human adenovirus D
cccggcggcagcgg

SEQ ID NO: 1570940 - RNA, 17 nt, Human adenovirus D
cgccgcgccgccacugc

SEQ ID NO: 1570941 - RNA, 15 nt, Human adenovirus D
cagcagaggaagagg

SEQ ID NO: 1570942 - RNA, 15 nt, Human adenovirus D
gcuggcccacggcca

SEQ ID NO: 1570943 - RNA, 13 nt, Human adenovirus D
cguggcgcagcgc

SEQ ID NO: 1570944 - RNA, 18 nt, Human adenovirus D
acaucgccgagcccgagg

SEQ ID NO: 1570945 - RNA, 23 nt, Human adenovirus D
ucgcccgaccgcugucucagccu

SEQ ID NO: 1570946 - RNA, 12 nt, Human adenovirus D
guacgagagcgu

SEQ ID NO: 1570947 - RNA, 17 nt, Human adenovirus D
uccugcaccauccccag

SEQ ID NO: 1570948 - RNA, 15 nt, Human adenovirus D
ccaacgccugcgcca

SEQ ID NO: 1570949 - RNA, 15 nt, Human adenovirus D
caaccaaggcaccca

SEQ ID NO: 1570950 - RNA, 22 nt, Human adenovirus D
cggacggaguguuccaacuagc

SEQ ID NO: 1570951 - RNA, 15 nt, Human adenovirus D
gcagugucucgagga

SEQ ID NO: 1570952 - RNA, 19 nt, Human adenovirus D
guguaccagucgggcccgg

SEQ ID NO: 1570953 - RNA, 16 nt, Human adenovirus D
gucaugugugauauca

SEQ ID NO: 1570954 - RNA, 21 nt, Human adenovirus D
cgaccugggcguguaccgcaa

SEQ ID NO: 1570955 - RNA, 23 nt, Human adenovirus D
cauccaagcgggccucacagucc

SEQ ID NO: 1570956 - RNA, 16 nt, Human adenovirus D
ccgucggaagaggagu

SEQ ID NO: 1570957 - RNA, 15 nt, Human adenovirus D
ccugggcucgcuggu

SEQ ID NO: 1570958 - RNA, 14 nt, Human adenovirus D
gcaugcggggggag

SEQ ID NO: 1570959 - RNA, 20 nt, Human adenovirus D
caagcuggugaugccagggg

SEQ ID NO: 1570960 - RNA, 22 nt, Human adenovirus D
acccguccaugcgaauuccccu

SEQ ID NO: 1570961 - RNA, 23 nt, Human adenovirus D
ccguccaugcgaauuccccucau

SEQ ID NO: 1570962 - RNA, 14 nt, Human adenovirus D
auuaugacauagau

SEQ ID NO: 1570963 - RNA, 17 nt, Human adenovirus D
gaggaccaaucgcgccc

SEQ ID NO: 1570964 - RNA, 17 nt, Human adenovirus D
ccaggcccagaacuggc

SEQ ID NO: 1570965 - RNA, 12 nt, Human adenovirus D
cgcccaggcgcc

SEQ ID NO: 1570966 - RNA, 18 nt, Human adenovirus D
gcacguuucgucaggcag

SEQ ID NO: 1570967 - RNA, 13 nt, Human adenovirus D
ucgcggcugcugc

SEQ ID NO: 1570968 - RNA, 21 nt, Human adenovirus D
cgugcugcucucucuucuugu

SEQ ID NO: 1570969 - RNA, 21 nt, Human adenovirus D
acgacauccuggaccaggcgg

SEQ ID NO: 1570970 - RNA, 12 nt, Human adenovirus D
ggcggaggcgga

SEQ ID NO: 1570971 - RNA, 21 nt, Human adenovirus D
cgcgcugucggccgaggagga

SEQ ID NO: 1570972 - RNA, 15 nt, Human adenovirus D
ccagaugcucuccca

SEQ ID NO: 1570973 - RNA, 22 nt, Human adenovirus D
ugcugaccaauagacagcagaa

SEQ ID NO: 1570974 - RNA, 19 nt, Human adenovirus D
ggcgauguugccacccaga

SEQ ID NO: 1570975 - RNA, 16 nt, Human adenovirus D
acuacugaacagacag

SEQ ID NO: 1570976 - RNA, 22 nt, Human adenovirus D
ccgcagcuacaccucccucacc

SEQ ID NO: 1570977 - RNA, 14 nt, Human adenovirus D
cccacagccagccg

SEQ ID NO: 1570978 - RNA, 17 nt, Human adenovirus D
uggacaacaccagacac

SEQ ID NO: 1570979 - RNA, 15 nt, Human adenovirus D
cagcuccagugggga

SEQ ID NO: 1570980 - RNA, 20 nt, Human adenovirus D
caagaaacgucccagcagca

SEQ ID NO: 1570981 - RNA, 18 nt, Human adenovirus D
gcgccgcggcgacagcgc

SEQ ID NO: 1570982 - RNA, 20 nt, Human adenovirus D
ccgcaggcgcccagccagca

SEQ ID NO: 1570983 - RNA, 14 nt, Human adenovirus D
ggaggcaccaccua

SEQ ID NO: 1570984 - RNA, 17 nt, Human adenovirus D
acauggaaccuagcaug

SEQ ID NO: 1570985 - RNA, 16 nt, Human adenovirus D
cgauguugccacccag

SEQ ID NO: 1570986 - RNA, 17 nt, Human adenovirus D
cgcgaggacaccaguac

SEQ ID NO: 1570987 - RNA, 23 nt, Human adenovirus D
cgaggauuucgagccgaacgagc

SEQ ID NO: 1570988 - RNA, 16 nt, Human adenovirus D
aagacgaaugggaaga

SEQ ID NO: 1570989 - RNA, 15 nt, Human adenovirus D
auaugaccaugcaga

SEQ ID NO: 1570990 - RNA, 16 nt, Human adenovirus D
uaacaccggcuggggu

SEQ ID NO: 1570991 - RNA, 17 nt, Human adenovirus D
ugagaacggggugcagu

SEQ ID NO: 1570992 - RNA, 19 nt, Human adenovirus D
cgcgguucauugacagcgu

SEQ ID NO: 1570993 - RNA, 21 nt, Human adenovirus D
gugauacgaggcagaggcaca

SEQ ID NO: 1570994 - RNA, 15 nt, Human adenovirus D
aagaccgugaauauc

SEQ ID NO: 1570995 - RNA, 15 nt, Human adenovirus D
ugcccagcagcagca

SEQ ID NO: 1570996 - RNA, 15 nt, Human adenovirus D
cugacggcgcagcug

SEQ ID NO: 1570997 - RNA, 12 nt, Human adenovirus D
ucaagaaccugc

SEQ ID NO: 1570998 - RNA, 21 nt, Human adenovirus D
agauguaaccuugcaagaggc

SEQ ID NO: 1570999 - RNA, 16 nt, Human adenovirus D
ugccauguucucacag

SEQ ID NO: 1571000 - RNA, 15 nt, Human adenovirus D
cacgccgagccugaa

SEQ ID NO: 1571001 - RNA, 19 nt, Human adenovirus D
guuccccuccgcugugcug

SEQ ID NO: 1571002 - RNA, 14 nt, Human adenovirus D
gcugacgcugagcg

SEQ ID NO: 1571003 - RNA, 17 nt, Human adenovirus D
cggagaacaaggccauc

SEQ ID NO: 1571004 - RNA, 15 nt, Human adenovirus D
ccugaaccgccgccg

SEQ ID NO: 1571005 - RNA, 22 nt, Human adenovirus D
gugccucccgcccgacacugca

SEQ ID NO: 1571006 - RNA, 18 nt, Human adenovirus D
uauuacuaggcccagcag

SEQ ID NO: 1571007 - RNA, 23 nt, Human adenovirus D
acugcuaucaggagaaaauugau

SEQ ID NO: 1571008 - RNA, 18 nt, Human adenovirus D
cgcgacccccaggcccug

SEQ ID NO: 1571009 - RNA, 15 nt, Human adenovirus D
cugggcugggacccu

SEQ ID NO: 1571010 - RNA, 12 nt, Human adenovirus D
gguaauucucau

SEQ ID NO: 1571011 - RNA, 14 nt, Human adenovirus D
gccuucagcaucag

SEQ ID NO: 1571012 - RNA, 17 nt, Human adenovirus D
ugcgcgaccugggcugc

SEQ ID NO: 1571013 - RNA, 16 nt, Human adenovirus D
ucaccaguuugggcac

SEQ ID NO: 1571014 - RNA, 17 nt, Human adenovirus D
cgucugaaaaccaagga

SEQ ID NO: 1571015 - RNA, 18 nt, Human adenovirus D
aggcgcgcguccacgcca

SEQ ID NO: 1571016 - RNA, 15 nt, Human adenovirus D
ggaccaggcggcaga

SEQ ID NO: 1571017 - RNA, 19 nt, Human adenovirus D
cugacauccauggccaggg

SEQ ID NO: 1571018 - RNA, 17 nt, Human adenovirus D
uaaagaauaugccaggg

SEQ ID NO: 1571019 - RNA, 20 nt, Human adenovirus D
ucaucgccugcuugcaagac

SEQ ID NO: 1571020 - RNA, 24 nt, Human adenovirus D
gagacccaggucaucgguaccuuc

SEQ ID NO: 1571021 - RNA, 13 nt, Human adenovirus D
cuuauccacaaac

SEQ ID NO: 1571022 - RNA, 20 nt, Human adenovirus D
cgccauaagggcggcgcugc

SEQ ID NO: 1571023 - RNA, 14 nt, Human adenovirus D
cacgcauugcauga

SEQ ID NO: 1571024 - RNA, 15 nt, Human adenovirus D
ccaggcuggccgugc

SEQ ID NO: 1571025 - RNA, 23 nt, Human adenovirus D
gcucgaucuccuccuccuggaga

SEQ ID NO: 1571026 - RNA, 18 nt, Human adenovirus D
aggccgugcugcucgagc

SEQ ID NO: 1571027 - RNA, 14 nt, Human adenovirus D
cgcuggcugcugga

SEQ ID NO: 1571028 - RNA, 14 nt, Human adenovirus D
acucuggccguggg

SEQ ID NO: 1571029 - RNA, 14 nt, Human adenovirus D
ggacaugcagcugc

SEQ ID NO: 1571030 - RNA, 17 nt, Human adenovirus D
cgccaaccgcacccgcg

SEQ ID NO: 1571031 - RNA, 14 nt, Human adenovirus D
ccaacgugcccauc

SEQ ID NO: 1571032 - RNA, 23 nt, Human adenovirus D
uggccccgugacuuugaaccuga

SEQ ID NO: 1571033 - RNA, 19 nt, Human adenovirus D
ccuggcuccgcggcacggc

SEQ ID NO: 1571034 - RNA, 22 nt, Human adenovirus D
gaggaagaucccgccgcaggag

SEQ ID NO: 1571035 - RNA, 17 nt, Human adenovirus D
cagacucugcucauacu

SEQ ID NO: 1571036 - RNA, 22 nt, Human adenovirus D
ggauguaaguuuuauggcugcu

SEQ ID NO: 1571037 - RNA, 11 nt, Human adenovirus D
cucgcuccaca

SEQ ID NO: 1571038 - RNA, 12 nt, Human adenovirus D
gaugccaggggu

SEQ ID NO: 1571039 - RNA, 14 nt, Human adenovirus D
ggaagugcuggaca

SEQ ID NO: 1571040 - RNA, 22 nt, Human adenovirus D
caggagccgcuaguggaagaga

SEQ ID NO: 1571041 - RNA, 19 nt, Human adenovirus D
cuguaccucauccacgaga

SEQ ID NO: 1571042 - RNA, 14 nt, Human adenovirus D
gcaggagugcaggg

SEQ ID NO: 1571043 - RNA, 22 nt, Human adenovirus D
ggcguggcccuuggcgcggagc

SEQ ID NO: 1571044 - RNA, 14 nt, Human adenovirus D
cccgcccugcugga

SEQ ID NO: 1571045 - RNA, 17 nt, Human adenovirus D
gccagccacagccacag

SEQ ID NO: 1571046 - RNA, 21 nt, Human adenovirus D
ccauucggagcacgcccgcca

SEQ ID NO: 1571047 - RNA, 14 nt, Human adenovirus D
cuuuuccaggaaag

SEQ ID NO: 1571048 - RNA, 17 nt, Human adenovirus D
auaauaaagguguacuu

SEQ ID NO: 1571049 - RNA, 15 nt, Human adenovirus D
gccucggaccuggcc

SEQ ID NO: 1571050 - RNA, 19 nt, Human adenovirus D
cgggcuguggggcgugcag

SEQ ID NO: 1571051 - RNA, 15 nt, Human adenovirus D
gacugggaggcugcg

SEQ ID NO: 1571052 - RNA, 20 nt, Human adenovirus D
cggcgucauugacggcgggc

SEQ ID NO: 1571053 - RNA, 19 nt, Human adenovirus D
uugagacucauccugcugg

SEQ ID NO: 1571054 - RNA, 17 nt, Human adenovirus D
ugcaagaggcgacccau

SEQ ID NO: 1571055 - RNA, 13 nt, Human adenovirus D
cuuagccugggca

SEQ ID NO: 1571056 - RNA, 23 nt, Human adenovirus D
agcaugagcggcuccagcgaaag

SEQ ID NO: 1571057 - RNA, 22 nt, Human adenovirus D
gagcucgucuuccaggagccug

SEQ ID NO: 1571058 - RNA, 18 nt, Human adenovirus D
cgucaccugcggcgcgga

SEQ ID NO: 1571059 - RNA, 20 nt, Human adenovirus D
gaucagucagugaagcccug

SEQ ID NO: 1571060 - RNA, 14 nt, Human adenovirus D
guggagccacugcu

SEQ ID NO: 1571061 - RNA, 11 nt, Human adenovirus D
aggaaccccac

SEQ ID NO: 1571062 - RNA, 17 nt, Human adenovirus D
cccacuacaacaucggc

SEQ ID NO: 1571063 - RNA, 20 nt, Human adenovirus D
cagugcaacuuuagccagac

SEQ ID NO: 1571064 - RNA, 23 nt, Human adenovirus D
ucaccuuggcuuugcuggguugc

SEQ ID NO: 1571065 - RNA, 12 nt, Human adenovirus D
aggcagaggcac

SEQ ID NO: 1571066 - RNA, 20 nt, Human adenovirus D
cugacgacccgcaaccccga

SEQ ID NO: 1571067 - RNA, 20 nt, Human adenovirus D
ccggcgcacgucugacugcc

SEQ ID NO: 1571068 - RNA, 22 nt, Human adenovirus D
ugccacucgcgggcggccauug

SEQ ID NO: 1571069 - RNA, 16 nt, Human adenovirus D
acugaccaccaccugg

SEQ ID NO: 1571070 - RNA, 22 nt, Human adenovirus D
guggacgcgguucauugacagc

SEQ ID NO: 1571071 - RNA, 12 nt, Human adenovirus D
cgcuucuucccc

SEQ ID NO: 1571072 - RNA, 16 nt, Human adenovirus D
gcucgcucguucugcc

SEQ ID NO: 1571073 - RNA, 22 nt, Human adenovirus D
uggagaucgccgcgacccgcgc

SEQ ID NO: 1571074 - RNA, 19 nt, Human adenovirus D
acgcacgggccgccgggcc

SEQ ID NO: 1571075 - RNA, 21 nt, Human adenovirus D
cugcacgagaaccgccugggg

SEQ ID NO: 1571076 - RNA, 22 nt, Human adenovirus D
gucaaccuugaaaccccagaca

SEQ ID NO: 1571077 - RNA, 19 nt, Human adenovirus D
ggcggacaucgcuucccug

SEQ ID NO: 1571078 - RNA, 15 nt, Human adenovirus D
gggugaugcggaaag

SEQ ID NO: 1571079 - RNA, 15 nt, Human adenovirus D
cgcaggaggccaucu

SEQ ID NO: 1571080 - RNA, 22 nt, Human adenovirus D
cauccacgagauacacagcgcg

SEQ ID NO: 1571081 - RNA, 14 nt, Human adenovirus D
gagauaugugcagc

SEQ ID NO: 1571082 - RNA, 15 nt, Human adenovirus D
augcacccgcugcgg

SEQ ID NO: 1571083 - RNA, 15 nt, Human adenovirus D
cugaugaaaaagcug

SEQ ID NO: 1571084 - RNA, 21 nt, Human adenovirus D
gagggugccagauugggggac

SEQ ID NO: 1571085 - RNA, 16 nt, Human adenovirus D
guaauggggcgggucc

SEQ ID NO: 1571086 - RNA, 16 nt, Human adenovirus D
ccagccguaccagugc

SEQ ID NO: 1571087 - RNA, 20 nt, Human adenovirus D
cuacaaucgccacaggugcu

SEQ ID NO: 1571088 - RNA, 17 nt, Human adenovirus D
ucagcaguagccccgcc

SEQ ID NO: 1571089 - RNA, 14 nt, Human adenovirus D
uggaaacagacagc

SEQ ID NO: 1571090 - RNA, 17 nt, Human adenovirus D
caaccucuacgccaccu

SEQ ID NO: 1571091 - RNA, 17 nt, Human adenovirus D
aagaacgagggccuggg

SEQ ID NO: 1571092 - RNA, 23 nt, Human adenovirus D
gcucaucugcagggcgcccagca

SEQ ID NO: 1571093 - RNA, 17 nt, Human adenovirus D
gagaccgacgcugggcu

SEQ ID NO: 1571094 - RNA, 17 nt, Human adenovirus D
guccagcgcggccagcg

SEQ ID NO: 1571095 - RNA, 14 nt, Human adenovirus D
cagacgagcggccg

SEQ ID NO: 1571096 - RNA, 19 nt, Human adenovirus D
cagccgcguaagcaggagc

SEQ ID NO: 1571097 - RNA, 13 nt, Human adenovirus D
ucccagcgccgcg

SEQ ID NO: 1571098 - RNA, 19 nt, Human adenovirus D
ccgcguaauuggcccucca

SEQ ID NO: 1571099 - RNA, 18 nt, Human adenovirus D
gcgcgggagccaggucca

SEQ ID NO: 1571100 - RNA, 13 nt, Human adenovirus D
cgcccgcgcccac

SEQ ID NO: 1571101 - RNA, 22 nt, Human adenovirus D
ggcaaucaacuacucggugcuu

SEQ ID NO: 1571102 - RNA, 14 nt, Human adenovirus D
gacuccgucacggg

SEQ ID NO: 1571103 - RNA, 12 nt, Human adenovirus D
ugcgcgggcugu

SEQ ID NO: 1571104 - RNA, 12 nt, Human adenovirus D
uuacuucaucau

SEQ ID NO: 1571105 - RNA, 23 nt, Human adenovirus D
cgcucgaucaucuccccgcggcg

SEQ ID NO: 1571106 - RNA, 12 nt, Human adenovirus D
gagugaagaggg

SEQ ID NO: 1571107 - RNA, 20 nt, Human adenovirus D
gauacuuucggcgcuuggug

SEQ ID NO: 1571108 - RNA, 22 nt, Human adenovirus D
ggccgaaaaccccgccggguag

SEQ ID NO: 1571109 - RNA, 16 nt, Human adenovirus D
uccaugaucuuuauga

SEQ ID NO: 1571110 - RNA, 14 nt, Human adenovirus D
auuggugcgcuggg

SEQ ID NO: 1571111 - RNA, 21 nt, Human adenovirus D
ggcgccauucggagcacgccc

SEQ ID NO: 1571112 - RNA, 20 nt, Human adenovirus D
aucaccaguuugggcacugg

SEQ ID NO: 1571113 - RNA, 22 nt, Human adenovirus D
acuuccucguuucggggguugg

SEQ ID NO: 1571114 - RNA, 19 nt, Human adenovirus D
ucugcaacccccagcuccu

SEQ ID NO: 1571115 - RNA, 22 nt, Human adenovirus D
gagaacugcuggcccugcuggc

SEQ ID NO: 1571116 - RNA, 19 nt, Human adenovirus D
aacgacgaguuggugagcu

SEQ ID NO: 1571117 - RNA, 13 nt, Human adenovirus D
ccacgguggugga

SEQ ID NO: 1571118 - RNA, 22 nt, Human adenovirus D
cgccggcggcgggccaugcgca

SEQ ID NO: 1571119 - RNA, 21 nt, Human adenovirus D
acugcgcguccgucagcagca

SEQ ID NO: 1571120 - RNA, 18 nt, Human adenovirus D
guccuuucgcugcugccg

SEQ ID NO: 1571121 - RNA, 19 nt, Human adenovirus D
gcaccccccgcaggcagga

SEQ ID NO: 1571122 - RNA, 18 nt, Human adenovirus D
gccgaggagaacugcugg

SEQ ID NO: 1571123 - RNA, 21 nt, Human adenovirus D
gcugagcgacgaccugggcgu

SEQ ID NO: 1571124 - RNA, 18 nt, Human adenovirus D
ggcagcggugguggaggc

SEQ ID NO: 1571125 - RNA, 17 nt, Human adenovirus D
caccugcgucugcagca

SEQ ID NO: 1571126 - RNA, 21 nt, Human adenovirus D
ccaugggcgccuucaccgacc

SEQ ID NO: 1571127 - RNA, 13 nt, Human adenovirus D
gcguccgcaggcg

SEQ ID NO: 1571128 - RNA, 18 nt, Human adenovirus D
uggauuaucucuacaaau

SEQ ID NO: 1571129 - RNA, 21 nt, Human adenovirus D
caccauccgcgccgcagcccg

SEQ ID NO: 1571130 - RNA, 21 nt, Human adenovirus D
uaccagucgggcccggacuac

SEQ ID NO: 1571131 - RNA, 23 nt, Human adenovirus D
aacagacuggucaaaaacaaagu

SEQ ID NO: 1571132 - RNA, 18 nt, Human adenovirus D
cguaguugcgcaggcgcu

SEQ ID NO: 1571133 - RNA, 14 nt, Human adenovirus D
cgcuccgcugaaac

SEQ ID NO: 1571134 - RNA, 18 nt, Human adenovirus D
aggacgagaccagaggca

SEQ ID NO: 1571135 - RNA, 17 nt, Human adenovirus D
uaaaaaccccgccaaaa

SEQ ID NO: 1571136 - RNA, 21 nt, Human adenovirus D
cauggcccugacgacccgcaa

SEQ ID NO: 1571137 - RNA, 19 nt, Human adenovirus D
cgcuuccucgcgcgccacu

SEQ ID NO: 1571138 - RNA, 17 nt, Human adenovirus D
ccgcguccgcggccacu

SEQ ID NO: 1571139 - RNA, 16 nt, Human adenovirus D
gcuggccgagcuggaa

SEQ ID NO: 1571140 - RNA, 22 nt, Human adenovirus D
cccuggagacgggcugcuucug

SEQ ID NO: 1571141 - RNA, 13 nt, Human adenovirus D
gccgcgcugggga

SEQ ID NO: 1571142 - RNA, 12 nt, Human adenovirus D
cagccgcaggcc

SEQ ID NO: 1571143 - RNA, 17 nt, Human adenovirus D
aaugggcccuugaacag

SEQ ID NO: 1571144 - RNA, 14 nt, Human adenovirus D
cagacucugcucau

SEQ ID NO: 1571145 - RNA, 19 nt, Human adenovirus D
gcggcgaacuuucuccaca

SEQ ID NO: 1571146 - RNA, 22 nt, Human adenovirus D
ucaacccgggucucccccagca

SEQ ID NO: 1571147 - RNA, 18 nt, Human adenovirus D
cugaaggagcuggacaag

SEQ ID NO: 1571148 - RNA, 19 nt, Human adenovirus D
accaacuggucuccugccu

SEQ ID NO: 1571149 - RNA, 13 nt, Human adenovirus D
gggcggagagcga

SEQ ID NO: 1571150 - RNA, 14 nt, Human adenovirus D
ccacugcuccugcg

SEQ ID NO: 1571151 - RNA, 16 nt, Human adenovirus D
guacauccagcauaag

SEQ ID NO: 1571152 - RNA, 15 nt, Human adenovirus D
aggugauuggcuugu

SEQ ID NO: 1571153 - RNA, 15 nt, Human adenovirus D
cuuguugggccuugg

SEQ ID NO: 1571154 - RNA, 16 nt, Human adenovirus D
cuaggcccagcagcau

SEQ ID NO: 1571155 - RNA, 16 nt, Human adenovirus D
cuuaccaaguccaggg

SEQ ID NO: 1571156 - RNA, 11 nt, Human adenovirus D
ucauggcccug

SEQ ID NO: 1571157 - RNA, 18 nt, Human adenovirus D
ccgagcugacggccaguc

SEQ ID NO: 1571158 - RNA, 15 nt, Human adenovirus D
ucagacaugcugcua

SEQ ID NO: 1571159 - RNA, 15 nt, Human adenovirus D
gcuccagccaaagcu

SEQ ID NO: 1571160 - RNA, 13 nt, Human adenovirus D
cagaugcggagga

SEQ ID NO: 1571161 - RNA, 23 nt, Human adenovirus D
gaggaccagguccuugggucccg

SEQ ID NO: 1571162 - RNA, 17 nt, Human adenovirus D
cccuggcucccagccuc

SEQ ID NO: 1571163 - RNA, 18 nt, Human adenovirus D
ggccugggcgugcagacc

SEQ ID NO: 1571164 - RNA, 14 nt, Human adenovirus D
ggcgcuugcaaggg

SEQ ID NO: 1571165 - RNA, 16 nt, Human adenovirus D
acaucugugcugccuu

SEQ ID NO: 1571166 - RNA, 18 nt, Human adenovirus D
uggcgagaggcgagcagc

SEQ ID NO: 1571167 - RNA, 17 nt, Human adenovirus D
cgcgaaccaggcagugc

SEQ ID NO: 1571168 - RNA, 16 nt, Human adenovirus D
agucugaagcgccgcc

SEQ ID NO: 1571169 - RNA, 17 nt, Human adenovirus D
ucagguuuggauauuca

SEQ ID NO: 1571170 - RNA, 15 nt, Human adenovirus D
acagcaccgccgcag

SEQ ID NO: 1571171 - RNA, 20 nt, Human adenovirus D
gugaagaugccgggacagag

SEQ ID NO: 1571172 - RNA, 23 nt, Human adenovirus D
acauccuggaccaggcggcagag

SEQ ID NO: 1571173 - RNA, 12 nt, Human adenovirus D
agcgcagccuga

SEQ ID NO: 1571174 - RNA, 20 nt, Human adenovirus D
gcuggcggagaacaaggcca

SEQ ID NO: 1571175 - RNA, 17 nt, Human adenovirus D
cugccgccgccugcgcu

SEQ ID NO: 1571176 - RNA, 16 nt, Human adenovirus D
uucgaguacgaggcca

SEQ ID NO: 1571177 - RNA, 19 nt, Human adenovirus D
ggcucuaaaaaauaugcaa

SEQ ID NO: 1571178 - RNA, 11 nt, Human adenovirus D
gugcagcugca

SEQ ID NO: 1571179 - RNA, 20 nt, Human adenovirus D
ggcugaaucccacucccaca

SEQ ID NO: 1571180 - RNA, 12 nt, Human adenovirus D
ugggcugggacc

SEQ ID NO: 1571181 - RNA, 21 nt, Human adenovirus D
caacgacgguauugaaauacc

SEQ ID NO: 1571182 - RNA, 21 nt, Human adenovirus D
gcauaauauggugaagggcug

SEQ ID NO: 1571183 - RNA, 17 nt, Human adenovirus D
caguguguguuugagaa

SEQ ID NO: 1571184 - RNA, 23 nt, Human adenovirus D
caccauguuauucagcagcccau

SEQ ID NO: 1571185 - RNA, 15 nt, Human adenovirus D
caaaacucacuuugg

SEQ ID NO: 1571186 - RNA, 12 nt, Human adenovirus D
cuaccugggagu

SEQ ID NO: 1571187 - RNA, 14 nt, Human adenovirus D
agugccacaugcac

SEQ ID NO: 1571188 - RNA, 21 nt, Human adenovirus D
aggggauguugaucagucagu

SEQ ID NO: 1571189 - RNA, 18 nt, Human adenovirus D
cgacgaacucggcgguga

SEQ ID NO: 1571190 - RNA, 13 nt, Human adenovirus D
auaccaucaaugc

SEQ ID NO: 1571191 - RNA, 18 nt, Human adenovirus D
gcuaagaaaaaaucagag

SEQ ID NO: 1571192 - RNA, 19 nt, Human adenovirus D
agaaccaugaauacaguga

SEQ ID NO: 1571193 - RNA, 22 nt, Human adenovirus D
gugcgcccggcguacgugccug

SEQ ID NO: 1571194 - RNA, 18 nt, Human adenovirus D
ggugucgcggagauccag

SEQ ID NO: 1571195 - RNA, 13 nt, Human adenovirus D
cugaccaccaccu

SEQ ID NO: 1571196 - RNA, 11 nt, Human adenovirus D
gacccccuucc

SEQ ID NO: 1571197 - RNA, 18 nt, Human adenovirus D
ccccccgcggaugcuggc

SEQ ID NO: 1571198 - RNA, 18 nt, Human adenovirus D
cugcauccacugcuccug

SEQ ID NO: 1571199 - RNA, 18 nt, Human adenovirus D
ccaaaauggcuuacaugu

SEQ ID NO: 1571200 - RNA, 13 nt, Human adenovirus D
augggugugcugg

SEQ ID NO: 1571201 - RNA, 20 nt, Human adenovirus D
caaacguaacuuuaguuggu

SEQ ID NO: 1571202 - RNA, 23 nt, Human adenovirus D
caaaggucuaaaaaccccgccaa

SEQ ID NO: 1571203 - RNA, 20 nt, Human adenovirus D
caaguacacgccggccaaug

SEQ ID NO: 1571204 - RNA, 17 nt, Human adenovirus D
caaggccauagcgugcg

SEQ ID NO: 1571205 - RNA, 14 nt, Human adenovirus D
ccccaggcggugcu

SEQ ID NO: 1571206 - RNA, 14 nt, Human adenovirus D
aaaccuuaguuggg

SEQ ID NO: 1571207 - RNA, 13 nt, Human adenovirus D
gcgccacuggcca

SEQ ID NO: 1571208 - RNA, 23 nt, Human adenovirus D
uccacggggaccacguccucucg

SEQ ID NO: 1571209 - RNA, 17 nt, Human adenovirus D
ucgcgccacuggccacg

SEQ ID NO: 1571210 - RNA, 17 nt, Human adenovirus D
gcgaggggcuccucucg

SEQ ID NO: 1571211 - RNA, 16 nt, Human adenovirus D
gcgauaugccagacgc

SEQ ID NO: 1571212 - RNA, 15 nt, Human adenovirus D
gcgaggacaccagua

SEQ ID NO: 1571213 - RNA, 19 nt, Human adenovirus D
cagaacccggacagcaagc

SEQ ID NO: 1571214 - RNA, 15 nt, Human adenovirus D
cagaacuggcagagc

SEQ ID NO: 1571215 - RNA, 12 nt, Human adenovirus D
cagacagccagg

SEQ ID NO: 1571216 - RNA, 19 nt, Human adenovirus D
cagcaggagcgugccgcca

SEQ ID NO: 1571217 - RNA, 18 nt, Human adenovirus D
cagcaguacaagcgccaa

SEQ ID NO: 1571218 - RNA, 19 nt, Human adenovirus D
cagcaucgaggugcagacc

SEQ ID NO: 1571219 - RNA, 16 nt, Human adenovirus D
cagccgcagccgccau

SEQ ID NO: 1571220 - RNA, 14 nt, Human adenovirus D
cagccagcaaacgc

SEQ ID NO: 1571221 - RNA, 22 nt, Human adenovirus D
ccgaucauugagagugcggugg

SEQ ID NO: 1571222 - RNA, 21 nt, Human adenovirus D
cguuagccgugcgucgugacg

SEQ ID NO: 1571223 - RNA, 17 nt, Human adenovirus D
cgcgagccggcggcgcg

SEQ ID NO: 1571224 - RNA, 20 nt, Human adenovirus D
cgcgagcgagggcgcggugg

SEQ ID NO: 1571225 - RNA, 18 nt, Human adenovirus D
acgggagcgagcccccuu

SEQ ID NO: 1571226 - RNA, 22 nt, Human adenovirus D
cacccguaaaugacucuccuga

SEQ ID NO: 1571227 - RNA, 15 nt, Human adenovirus D
agacccacagccagc

SEQ ID NO: 1571228 - RNA, 19 nt, Human adenovirus D
agaaaauugauaugcccuc

SEQ ID NO: 1571229 - RNA, 20 nt, Human adenovirus D
cacgaccgugccgcggugcg

SEQ ID NO: 1571230 - RNA, 15 nt, Human adenovirus D
cgccaggcuggccgu

SEQ ID NO: 1571231 - RNA, 19 nt, Human adenovirus D
cgaguacauguucaccagc

SEQ ID NO: 1571232 - RNA, 22 nt, Human adenovirus D
cgagcacagcaccgcauccuga

SEQ ID NO: 1571233 - RNA, 20 nt, Human adenovirus D
cgagggccuggaccgccagc

SEQ ID NO: 1571234 - RNA, 16 nt, Human adenovirus D
cgagaucggcaccagc

SEQ ID NO: 1571235 - RNA, 20 nt, Human adenovirus D
cgaccacagcaacuuccuga

SEQ ID NO: 1571236 - RNA, 20 nt, Human adenovirus D
cgacucgcugcugcagccgc

SEQ ID NO: 1571237 - RNA, 23 nt, Human adenovirus D
agcuggaagcccugagccgccag

SEQ ID NO: 1571238 - RNA, 16 nt, Human adenovirus D
aguagaguuugugcgc

SEQ ID NO: 1571239 - RNA, 13 nt, Human adenovirus D
aggugcugacgcu

SEQ ID NO: 1571240 - RNA, 13 nt, Human adenovirus D
aggugcuggcgau

SEQ ID NO: 1571241 - RNA, 17 nt, Human adenovirus D
agguggacgagccgccu

SEQ ID NO: 1571242 - RNA, 20 nt, Human adenovirus D
caguauugugggccugggag

SEQ ID NO: 1571243 - RNA, 12 nt, Human adenovirus D
caguuaguuggu

SEQ ID NO: 1571244 - RNA, 14 nt, Human adenovirus D
gcggcccggcacgg

SEQ ID NO: 1571245 - RNA, 14 nt, Human adenovirus D
gcggccgcccacgg

SEQ ID NO: 1571246 - RNA, 15 nt, Human adenovirus D
gcggaugcuggcgcg

SEQ ID NO: 1571247 - RNA, 23 nt, Human adenovirus D
gcgaccgcggccguagcaggcgc

SEQ ID NO: 1571248 - RNA, 20 nt, Human adenovirus D
gcgaagccguggcgcagcgc

SEQ ID NO: 1571249 - RNA, 14 nt, Human adenovirus D
gccguacaccaggc

SEQ ID NO: 1571250 - RNA, 15 nt, Human adenovirus D
gccgugcgcaccacc

SEQ ID NO: 1571251 - RNA, 14 nt, Human adenovirus D
gcccugcuggccga

SEQ ID NO: 1571252 - RNA, 20 nt, Human adenovirus D
gccgcgccaaccgcacccgc

SEQ ID NO: 1571253 - RNA, 15 nt, Human adenovirus D
ggacgaugguuuccc

SEQ ID NO: 1571254 - RNA, 16 nt, Human adenovirus D
gcuagcacgcagacga

SEQ ID NO: 1571255 - RNA, 15 nt, Human adenovirus D
gcucaugcuggccgu

SEQ ID NO: 1571256 - RNA, 16 nt, Human adenovirus D
gcucccaaucccaguc

SEQ ID NO: 1571257 - RNA, 15 nt, Human adenovirus D
guccgucggccaugg

SEQ ID NO: 1571258 - RNA, 21 nt, Human adenovirus D
guacccgcgacccccaggccc

SEQ ID NO: 1571259 - RNA, 20 nt, Human adenovirus D
gucgccucggaccuggccga

SEQ ID NO: 1571260 - RNA, 15 nt, Human adenovirus D
gcaucgcgcaggccg

SEQ ID NO: 1571261 - RNA, 17 nt, Human adenovirus D
gcagugggcgcagacgg

SEQ ID NO: 1571262 - RNA, 19 nt, Human adenovirus D
gcagccugagcuuggccga

SEQ ID NO: 1571263 - RNA, 15 nt, Human adenovirus D
gcagcgugaagacgc

SEQ ID NO: 1571264 - RNA, 20 nt, Human adenovirus D
gcagcacaucaagcagaugc

SEQ ID NO: 1571265 - RNA, 19 nt, Human adenovirus D
gcagcacuggaacaccauc

SEQ ID NO: 1571266 - RNA, 23 nt, Human adenovirus D
gcagaacaacgauuucacccccg

SEQ ID NO: 1571267 - RNA, 24 nt, Human adenovirus D
gcagaagaucccggcgcaguacgc

SEQ ID NO: 1571268 - RNA, 14 nt, Human adenovirus D
gcacgcagcagcgc

SEQ ID NO: 1571269 - RNA, 17 nt, Human adenovirus D
gaccugccuccaccacc

SEQ ID NO: 1571270 - RNA, 14 nt, Human adenovirus D
gacgagacuggccu

SEQ ID NO: 1571271 - RNA, 14 nt, Human adenovirus D
gacgcacuggccga

SEQ ID NO: 1571272 - RNA, 21 nt, Human adenovirus D
gcacgagcaagacgcaggcca

SEQ ID NO: 1571273 - RNA, 15 nt, Human adenovirus D
cagagcgggcgggcg

SEQ ID NO: 1571274 - RNA, 18 nt, Human adenovirus D
cagcaccgccgcagccgc

SEQ ID NO: 1571275 - RNA, 22 nt, Human adenovirus D
cacgugcgagggguagcggucg

SEQ ID NO: 1571276 - RNA, 13 nt, Human adenovirus D
cacaucagccagg

SEQ ID NO: 1571277 - RNA, 23 nt, Human adenovirus D
gaugguggcgcgcaccucgcgcu

SEQ ID NO: 1571278 - RNA, 19 nt, Human adenovirus D
gaggagaacugcuggcccu

SEQ ID NO: 1571279 - RNA, 21 nt, Human adenovirus D
gaggcacgucggcguggcgcu

SEQ ID NO: 1571280 - RNA, 14 nt, Human adenovirus D
cuagcccuuccugg

SEQ ID NO: 1571281 - RNA, 20 nt, Human adenovirus D
gcacaaacgugcaguccaac

SEQ ID NO: 1571282 - RNA, 17 nt, Human adenovirus D
gcgccgcgccagacgca

SEQ ID NO: 1571283 - RNA, 17 nt, Human adenovirus D
gcgccugaggcagacgc

SEQ ID NO: 1571284 - RNA, 15 nt, Human adenovirus D
gcgcccucagcaguc

SEQ ID NO: 1571285 - RNA, 21 nt, Human adenovirus D
ggcggcgauaugccagacgca

SEQ ID NO: 1571286 - RNA, 21 nt, Human adenovirus D
ggcgcucaaggugcugacgcu

SEQ ID NO: 1571287 - RNA, 14 nt, Human adenovirus D
cgccuuccuggcga

SEQ ID NO: 1571288 - RNA, 13 nt, Human adenovirus D
ccgcccgcgugcg

SEQ ID NO: 1571289 - RNA, 13 nt, Human adenovirus D
ccgccgccgugcg

SEQ ID NO: 1571290 - RNA, 14 nt, Human adenovirus D
gagcggccagcgcu

SEQ ID NO: 1571291 - RNA, 20 nt, Human adenovirus D
gagcgccugaggcagacgcu

SEQ ID NO: 1571292 - RNA, 23 nt, Human adenovirus D
gaugcugcccgccaccugcaacg

SEQ ID NO: 1571293 - RNA, 18 nt, Human adenovirus D
gagccugcgccgggcgcu

SEQ ID NO: 1571294 - RNA, 22 nt, Human adenovirus D
gagcccaacccgcgucucaacu

SEQ ID NO: 1571295 - RNA, 16 nt, Human adenovirus D
cgcguccgucagcagc

SEQ ID NO: 1571296 - RNA, 18 nt, Human adenovirus D
cggacauauggaauuucu

SEQ ID NO: 1571297 - RNA, 23 nt, Human adenovirus D
cggaccugcauuggcagccgagc

SEQ ID NO: 1571298 - RNA, 11 nt, Human adenovirus D
ccuucgcaguc

SEQ ID NO: 1571299 - RNA, 13 nt, Human adenovirus D
cgaccgccgugcg

SEQ ID NO: 1571300 - RNA, 19 nt, Human adenovirus D
cgaccggaucggagaaucu

SEQ ID NO: 1571301 - RNA, 20 nt, Human adenovirus D
ccugacgacccgcaaccccg

SEQ ID NO: 1571302 - RNA, 14 nt, Human adenovirus D
caggaggcggugcg

SEQ ID NO: 1571303 - RNA, 20 nt, Human adenovirus D
accgcuccuggucugcaacc

SEQ ID NO: 1571304 - RNA, 15 nt, Human adenovirus D
aggcggugcugcugc

SEQ ID NO: 1571305 - RNA, 23 nt, Human adenovirus D
aggccgcucucguuccagacgcg

SEQ ID NO: 1571306 - RNA, 17 nt, Human adenovirus D
acgagcggucgcggugg

SEQ ID NO: 1571307 - RNA, 14 nt, Human adenovirus D
aucccaugcccucg

SEQ ID NO: 1571308 - RNA, 13 nt, Human adenovirus D
auccgugugcugu

SEQ ID NO: 1571309 - RNA, 16 nt, Human adenovirus D
caacaucuugcagagc

SEQ ID NO: 1571310 - RNA, 16 nt, Human adenovirus D
caagagccggcgggcg

SEQ ID NO: 1571311 - RNA, 15 nt, Human adenovirus D
cacacaguuuccuga

SEQ ID NO: 1571312 - RNA, 18 nt, Human adenovirus D
caaucucccaccaccagc

SEQ ID NO: 1571313 - RNA, 15 nt, Human adenovirus D
caggcagugcagcgc

SEQ ID NO: 1571314 - RNA, 16 nt, Human adenovirus D
gccuacgagcagacgg

SEQ ID NO: 1571315 - RNA, 19 nt, Human adenovirus D
gccgauugggaagaacugg

SEQ ID NO: 1571316 - RNA, 17 nt, Human adenovirus D
gccgcaccgccacccgc

SEQ ID NO: 1571317 - RNA, 16 nt, Human adenovirus D
gccgccagcuggccgc

SEQ ID NO: 1571318 - RNA, 19 nt, Human adenovirus D
gccgccaggcccagaacug

SEQ ID NO: 1571319 - RNA, 18 nt, Human adenovirus D
gcccuuuuugccggccga

SEQ ID NO: 1571320 - RNA, 17 nt, Human adenovirus D
gccgaacgagcagacgg

SEQ ID NO: 1571321 - RNA, 21 nt, Human adenovirus D
gcgggcaggggcggcagaggc

SEQ ID NO: 1571322 - RNA, 15 nt, Human adenovirus D
gcgggccucacaguc

SEQ ID NO: 1571323 - RNA, 14 nt, Human adenovirus D
gcuggccagcacgc

SEQ ID NO: 1571324 - RNA, 19 nt, Human adenovirus D
gucggcacggucuggccgg

SEQ ID NO: 1571325 - RNA, 17 nt, Human adenovirus D
guagguguaggccacgu

SEQ ID NO: 1571326 - RNA, 22 nt, Human adenovirus D
cgucacuuuugcccuuacaugu

SEQ ID NO: 1571327 - RNA, 15 nt, Human adenovirus D
cggggaucagccccg

SEQ ID NO: 1571328 - RNA, 23 nt, Human adenovirus D
gacggcguaguugcgcaggcgcu

SEQ ID NO: 1571329 - RNA, 16 nt, Human adenovirus D
gacggccuggccucgg

SEQ ID NO: 1571330 - RNA, 22 nt, Human adenovirus D
gaccaugacuuucaagaacugg

SEQ ID NO: 1571331 - RNA, 18 nt, Human adenovirus D
gaagaucagcugcagcgc

SEQ ID NO: 1571332 - RNA, 17 nt, Human adenovirus D
gaagaauuuggagacgc

SEQ ID NO: 1571333 - RNA, 20 nt, Human adenovirus D
gccaucaacauccaccagug

SEQ ID NO: 1571334 - RNA, 21 nt, Human adenovirus D
gccccagaugggccuggccgc

SEQ ID NO: 1571335 - RNA, 13 nt, Human adenovirus D
gugcugcugccga

SEQ ID NO: 1571336 - RNA, 20 nt, Human adenovirus D
uaguguacaacgcccugcug

SEQ ID NO: 1571337 - RNA, 15 nt, Human adenovirus D
cucggaccaacccca

SEQ ID NO: 1571338 - RNA, 19 nt, Human adenovirus D
gagauaugugcagcagagc

SEQ ID NO: 1571339 - RNA, 22 nt, Human adenovirus D
gaguccuuuagacaacagccgc

SEQ ID NO: 1571340 - RNA, 22 nt, Human adenovirus D
gagugccacugccgcugcaacc

SEQ ID NO: 1571341 - RNA, 21 nt, Human adenovirus D
gcacaucgccgggcaggacgc

SEQ ID NO: 1571342 - RNA, 17 nt, Human adenovirus D
gcaccaccuacaccguc

SEQ ID NO: 1571343 - RNA, 21 nt, Human adenovirus D
gcaccauccgcgccgcagccc

SEQ ID NO: 1571344 - RNA, 20 nt, Human adenovirus D
gagcagcgcauccugcaacu

SEQ ID NO: 1571345 - RNA, 13 nt, Human adenovirus D
gagggccugggcu

SEQ ID NO: 1571346 - RNA, 14 nt, Human adenovirus D
gagggucuggagcu

SEQ ID NO: 1571347 - RNA, 17 nt, Human adenovirus D
gagggucgcuggcugcu

SEQ ID NO: 1571348 - RNA, 17 nt, Human adenovirus D
gagcacgagcaagacgc

SEQ ID NO: 1571349 - RNA, 21 nt, Human adenovirus D
gcaccugugggaccuggcgga

SEQ ID NO: 1571350 - RNA, 17 nt, Human adenovirus D
ccggagcgacacccccg

SEQ ID NO: 1571351 - RNA, 20 nt, Human adenovirus D
ggccggcaugcccaccacgc

SEQ ID NO: 1571352 - RNA, 21 nt, Human adenovirus D
ggcuggucaguugcaccacgc

SEQ ID NO: 1571353 - RNA, 13 nt, Human adenovirus D
gggaucaccaguu

SEQ ID NO: 1571354 - RNA, 15 nt, Human adenovirus D
gggcaccaccgaguc

SEQ ID NO: 1571355 - RNA, 20 nt, Human adenovirus D
gcgcagacggucucgcacuc

SEQ ID NO: 1571356 - RNA, 21 nt, Human adenovirus D
gcgcagguggacgagcagacc

SEQ ID NO: 1571357 - RNA, 23 nt, Human adenovirus D
ggucacauccaucuccaccacgu

SEQ ID NO: 1571358 - RNA, 23 nt, Human adenovirus D
ggucacggauacaacucgcaguc

SEQ ID NO: 1571359 - RNA, 23 nt, Human adenovirus D
gggugggccccuggcugggcgcu

SEQ ID NO: 1571360 - RNA, 17 nt, Human adenovirus D
ucgcugccgcuggacga

SEQ ID NO: 1571361 - RNA, 13 nt, Human adenovirus D
uggaggccgccua

SEQ ID NO: 1571362 - RNA, 14 nt, Human adenovirus D
ggucggagccccuu

SEQ ID NO: 1571363 - RNA, 18 nt, Human adenovirus D
ggugagccggccgcgcuu

SEQ ID NO: 1571364 - RNA, 16 nt, Human adenovirus D
gguuacacucgcagug

SEQ ID NO: 1571365 - RNA, 14 nt, Human adenovirus D
gucagcuggcccgg

SEQ ID NO: 1571366 - RNA, 14 nt, Human adenovirus D
guccagcuggccgg

SEQ ID NO: 1571367 - RNA, 13 nt, Human adenovirus D
guccccgaggccc

SEQ ID NO: 1571368 - RNA, 17 nt, Human adenovirus D
gcuucuuaccucgcguc

SEQ ID NO: 1571369 - RNA, 14 nt, Human adenovirus D
gcgcugucggccga

SEQ ID NO: 1571370 - RNA, 18 nt, Human adenovirus D
gcgcuucacucuggccgu

SEQ ID NO: 1571371 - RNA, 15 nt, Human adenovirus D
gcgcuugcugggcga

SEQ ID NO: 1571372 - RNA, 23 nt, Human adenovirus D
gcggauaucuugaaaucgcaguu

SEQ ID NO: 1571373 - RNA, 14 nt, Human adenovirus D
gcggcggccaucgg

SEQ ID NO: 1571374 - RNA, 21 nt, Human adenovirus D
gcggcuggaguuucacccguc

SEQ ID NO: 1571375 - RNA, 20 nt, Human adenovirus D
gcguccgcaguacucgcagc

SEQ ID NO: 1571376 - RNA, 20 nt, Human adenovirus D
gcgucuagccaaucgcaguc

SEQ ID NO: 1571377 - RNA, 20 nt, Human adenovirus D
gcucguacccgcucaccauc

SEQ ID NO: 1571378 - RNA, 20 nt, Human adenovirus D
uaaagccaaacacaccugac

SEQ ID NO: 1571379 - RNA, 17 nt, Human adenovirus D
ucaaccuccaggccaac

SEQ ID NO: 1571380 - RNA, 20 nt, Human adenovirus D
ucaacguuucucggccaauc

SEQ ID NO: 1571381 - RNA, 18 nt, Human adenovirus D
cgggacuuggucaccccg

SEQ ID NO: 1571382 - RNA, 22 nt, Human adenovirus D
cgggagcgguggggucaacccg

SEQ ID NO: 1571383 - RNA, 14 nt, Human adenovirus D
gacgcccuggccga

SEQ ID NO: 1571384 - RNA, 23 nt, Human adenovirus D
gaagugcggcggcggcuggcggu

SEQ ID NO: 1571385 - RNA, 21 nt, Human adenovirus D
gacggccuacgagcagacggu

SEQ ID NO: 1571386 - RNA, 15 nt, Human adenovirus D
gacugauggccacgg

SEQ ID NO: 1571387 - RNA, 22 nt, Human adenovirus D
gaagggcgagaagcggccgcgg

SEQ ID NO: 1571388 - RNA, 16 nt, Human adenovirus D
gaaacaccugcagcgc

SEQ ID NO: 1571389 - RNA, 21 nt, Human adenovirus D
gcaggcaggacucgcagacga

SEQ ID NO: 1571390 - RNA, 16 nt, Human adenovirus D
gcaggcgucgcagcgc

SEQ ID NO: 1571391 - RNA, 22 nt, Human adenovirus D
gccaagacaaaggaggccacgu

SEQ ID NO: 1571392 - RNA, 18 nt, Human adenovirus D
gagaccagaggcagacuc

SEQ ID NO: 1571393 - RNA, 12 nt, Human adenovirus D
gagaccugcacu

SEQ ID NO: 1571394 - RNA, 14 nt, Human adenovirus D
gagagcgcuggcgu

SEQ ID NO: 1571395 - RNA, 20 nt, Human adenovirus D
gcagcucuucccgcugaacu

SEQ ID NO: 1571396 - RNA, 15 nt, Human adenovirus D
gcagcuugcugacgc

SEQ ID NO: 1571397 - RNA, 20 nt, Human adenovirus D
acaagucggcggacaucgcu

SEQ ID NO: 1571398 - RNA, 18 nt, Human adenovirus D
acgaacucggcggugacg

SEQ ID NO: 1571399 - RNA, 16 nt, Human adenovirus D
agcauacaugcccucu

SEQ ID NO: 1571400 - RNA, 20 nt, Human adenovirus D
agcgccagucccucauccuc

SEQ ID NO: 1571401 - RNA, 21 nt, Human adenovirus D
aggcagcuccgguugugcagc

SEQ ID NO: 1571402 - RNA, 15 nt, Human adenovirus D
aggccaacagacucu

SEQ ID NO: 1571403 - RNA, 20 nt, Human adenovirus D
aggagaggaggaugugcugc

SEQ ID NO: 1571404 - RNA, 13 nt, Human adenovirus D
cauaucagccagu

SEQ ID NO: 1571405 - RNA, 14 nt, Human adenovirus D
ccaccugcggggcg

SEQ ID NO: 1571406 - RNA, 17 nt, Human
cuaauuuauucuaaauu

SEQ ID NO: 1571407 - RNA, 21 nt, Human
ccaggagggaggcaggggagg

SEQ ID NO: 1571408 - RNA, 19 nt, Human
ccaggggccggccaguggc

SEQ ID NO: 1571409 - RNA, 15 nt, Human
ccaggagggaggcag

SEQ ID NO: 1571410 - RNA, 22 nt, Human
ccaggagggaggcaggggaggg

SEQ ID NO: 1571411 - RNA, 21 nt, Human
ccucaggagccgaagcccagg

SEQ ID NO: 1571412 - RNA, 12 nt, Human
ccucaggagccg

SEQ ID NO: 1571413 - RNA, 19 nt, Human
ccucaggagccgaagccca

SEQ ID NO: 1571414 - RNA, 22 nt, Human
ccucaggagccgaagcccaggg

SEQ ID NO: 1571415 - RNA, 16 nt, Human
ccugcagccugcagga

SEQ ID NO: 1571416 - RNA, 22 nt, Human
cagugcaguuugguguguccuc

SEQ ID NO: 1571417 - RNA, 20 nt, Human
cagaauaaucaaauacauuu

SEQ ID NO: 1571418 - RNA, 23 nt, Human
cuggagugugaggguccugcagc

SEQ ID NO: 1571419 - RNA, 17 nt, Human
cuggugcccuggaugcc

SEQ ID NO: 1571420 - RNA, 20 nt, Human
cuggugcccuggaugcccag

SEQ ID NO: 1571421 - RNA, 21 nt, Human
cuggugcccuggaugcccagg

SEQ ID NO: 1571422 - RNA, 16 nt, Human
gauacuugaauaacca

SEQ ID NO: 1571423 - RNA, 20 nt, Human
ggagugugaggguccugcag

SEQ ID NO: 1571424 - RNA, 11 nt, Human
aaaaaguuugu

SEQ ID NO: 1571425 - RNA, 18 nt, Human
aaaaaguuugucuuaguu

SEQ ID NO: 1571426 - RNA, 14 nt, Human
ggccuuccccagca

SEQ ID NO: 1571427 - RNA, 13 nt, Human
ggccuuccccagc

SEQ ID NO: 1571428 - RNA, 14 nt, Human
aaagugguacuuga

SEQ ID NO: 1571429 - RNA, 20 nt, Human
aaagugguacuugaucauuu

SEQ ID NO: 1571430 - RNA, 23 nt, Human
aaagugguacuugaucauuuuua

SEQ ID NO: 1571431 - RNA, 13 nt, Human
guaauccuaaauu

SEQ ID NO: 1571432 - RNA, 18 nt, Human
ggguccugcagccugcag

SEQ ID NO: 1571433 - RNA, 23 nt, Human
ggguccugcagccugcaggaccu

SEQ ID NO: 1571434 - RNA, 19 nt, Human
ggguccugcagccugcagg

SEQ ID NO: 1571435 - RNA, 14 nt, Human
ggggccaugccucc

SEQ ID NO: 1571436 - RNA, 17 nt, Human
ggggccaugccuccuca

SEQ ID NO: 1571437 - RNA, 19 nt, Human
ggggccaugccuccucagg

SEQ ID NO: 1571438 - RNA, 23 nt, Human
ggggccaugccuccucaggagcc

SEQ ID NO: 1571439 - RNA, 17 nt, Human
gggccggccaguggccu

SEQ ID NO: 1571440 - RNA, 14 nt, Human
gcggcggucccagc

SEQ ID NO: 1571441 - RNA, 16 nt, Human
gcggcggucccagcuc

SEQ ID NO: 1571442 - RNA, 17 nt, Human
gcggcggucccagcucc

SEQ ID NO: 1571443 - RNA, 21 nt, Human
uuuuguuugguuauaucgaaa

SEQ ID NO: 1571444 - RNA, 13 nt, Human
uuuuguuugguua

SEQ ID NO: 1571445 - RNA, 16 nt, Human
uuuuguuugguuauau

SEQ ID NO: 1571446 - RNA, 15 nt, Human
uuuugauauaugaaa

SEQ ID NO: 1571447 - RNA, 24 nt, Human
auuacuuacguauguuuguacuug

SEQ ID NO: 1571448 - RNA, 14 nt, Human
augaaaugacuucu

SEQ ID NO: 1571449 - RNA, 22 nt, Human
uuugaaaacucuguguuuggaa

SEQ ID NO: 1571450 - RNA, 23 nt, Human
auauauuuauggccgggcagggu

SEQ ID NO: 1571451 - RNA, 19 nt, Human
aucaauucuguauuccaga

SEQ ID NO: 1571452 - RNA, 13 nt, Human
agugguuuagaaa

SEQ ID NO: 1571453 - RNA, 16 nt, Human
aguuugguguguccuc

SEQ ID NO: 1571454 - RNA, 19 nt, Human
auaccaaguugauacuuga

SEQ ID NO: 1571455 - RNA, 22 nt, Human
auaaaccuugucuaugaaauga

SEQ ID NO: 1571456 - RNA, 24 nt, Human
agggugccguguccccugacaggg

SEQ ID NO: 1571457 - RNA, 15 nt, Human
agggugccguguccc

SEQ ID NO: 1571458 - RNA, 21 nt, Human
agucucaugccuugagaucug

SEQ ID NO: 1571459 - RNA, 14 nt, Human
agccgaagcccagg

SEQ ID NO: 1571460 - RNA, 13 nt, Human
agcccaggggccg

SEQ ID NO: 1571461 - RNA, 12 nt, Human
uggccgggcagg

SEQ ID NO: 1571462 - RNA, 13 nt, Human
uggccgggcaggg

SEQ ID NO: 1571463 - RNA, 22 nt, Human
aggagggaggcaggggaggggu

SEQ ID NO: 1571464 - RNA, 16 nt, Human
ugacagggccagugca

SEQ ID NO: 1571465 - RNA, 19 nt, Human
ugacagggccagugcaguu

SEQ ID NO: 1571466 - RNA, 19 nt, Human
ugaaauuuccuaauuuauu

SEQ ID NO: 1571467 - RNA, 20 nt, Human
acuugaucauuuuuaccauu

SEQ ID NO: 1571468 - RNA, 20 nt, Human
ucugcgucgguccuggugcc

SEQ ID NO: 1571469 - RNA, 17 nt, Human
uccugcagccugcagga

SEQ ID NO: 1571470 - RNA, 21 nt, Human
uccucaggagccgaagcccag

SEQ ID NO: 1571471 - RNA, 22 nt, Human
uccucaggagccgaagcccagg

SEQ ID NO: 1571472 - RNA, 15 nt, Human
acuaauuuuacuucu

SEQ ID NO: 1571473 - RNA, 10 nt, Human
ucccagcucc

SEQ ID NO: 1571474 - RNA, 21 nt, Human
uaagcaaguuaaguguccucc

SEQ ID NO: 1571475 - RNA, 21 nt, Human
aauuaguacagaaauauccau

SEQ ID NO: 1571476 - RNA, 12 nt, Human
acaggaccccag

SEQ ID NO: 1571477 - RNA, 13 nt, Human
acaggaccccagc

SEQ ID NO: 1571478 - RNA, 14 nt, Human
acaggaccccagcu

SEQ ID NO: 1571479 - RNA, 15 nt, Human
acaggaccccagcuc

SEQ ID NO: 1571480 - RNA, 16 nt, Human
acaggaccccagcucu

SEQ ID NO: 1571481 - RNA, 17 nt, Human
acaggaccccagcucug

SEQ ID NO: 1571482 - RNA, 19 nt, Human
acaggaccccagcucugcg

SEQ ID NO: 1571483 - RNA, 18 nt, Human
acaggaccccagcucugc

SEQ ID NO: 1571484 - RNA, 16 nt, Human
acaggcuuagggacag

SEQ ID NO: 1571485 - RNA, 15 nt, Human
uaguucccaggugau

SEQ ID NO: 1571486 - RNA, 19 nt, Human
uagggacaggaccccagcu

SEQ ID NO: 1571487 - RNA, 20 nt, Human
uagggacaggaccccagcuc

SEQ ID NO: 1571488 - RNA, 22 nt, Human
uagggacaggaccccagcucug

SEQ ID NO: 1571489 - RNA, 21 nt, Human
uagggacaggaccccagcucu

SEQ ID NO: 1571490 - RNA, 14 nt, Human
aagaaacaacagaa

SEQ ID NO: 1571491 - RNA, 14 nt, Human
guccccugacaggg

SEQ ID NO: 1571492 - RNA, 16 nt, Human
gucgcugugccacagg

SEQ ID NO: 1571493 - RNA, 13 nt, Human
aaaaauuuuuguu

SEQ ID NO: 1571494 - RNA, 14 nt, Human
aaaaauuuuuguuu

SEQ ID NO: 1571495 - RNA, 14 nt, Human
aggaccucgugcca

SEQ ID NO: 1571496 - RNA, 13 nt, Human
aggaccccagcuc

SEQ ID NO: 1571497 - RNA, 14 nt, Human
aggaccccagcucu

SEQ ID NO: 1571498 - RNA, 16 nt, Human
aggaccccagcucugc

SEQ ID NO: 1571499 - RNA, 17 nt, Human
aggaccccagcucugcg

SEQ ID NO: 1571500 - RNA, 15 nt, Human
agcaugcaccacggg

SEQ ID NO: 1571501 - RNA, 13 nt, Human
agacggggcugga

SEQ ID NO: 1571502 - RNA, 15 nt, Human
accccgagggcugag

SEQ ID NO: 1571503 - RNA, 21 nt, Human
uuauaucgaaauaguuacagg

SEQ ID NO: 1571504 - RNA, 23 nt, Human
uuauguuguuguuguuuuuggau

SEQ ID NO: 1571505 - RNA, 19 nt, Human
uuauuagaaaaauauuaua

SEQ ID NO: 1571506 - RNA, 17 nt, Human
ugccacaggcuuaggga

SEQ ID NO: 1571507 - RNA, 21 nt, Human
ugccacaggcuuagggacagg

SEQ ID NO: 1571508 - RNA, 20 nt, Human
ugccacaggcuuagggacag

SEQ ID NO: 1571509 - RNA, 21 nt, Human
ugccguguccccugacagggc

SEQ ID NO: 1571510 - RNA, 16 nt, Human
ugcccuggaugcccag

SEQ ID NO: 1571511 - RNA, 18 nt, Human
ugcccuggaugcccagga

SEQ ID NO: 1571512 - RNA, 22 nt, Human
ucgugccaccccgagggcugag

SEQ ID NO: 1571513 - RNA, 22 nt, Human
uauuccagacuugggaggaugu

SEQ ID NO: 1571514 - RNA, 23 nt, Human
ucaggagccgaagcccaggggcc

SEQ ID NO: 1571515 - RNA, 22 nt, Human
ggcuuagggacaggaccccagc

SEQ ID NO: 1571516 - RNA, 17 nt, Human
ggcucccaugucaagag

SEQ ID NO: 1571517 - RNA, 14 nt, Human
ggcggucccagcuc

SEQ ID NO: 1571518 - RNA, 15 nt, Human
ggcggucccagcucc

SEQ ID NO: 1571519 - RNA, 21 nt, Human
gccuggucccacgagggugcc

SEQ ID NO: 1571520 - RNA, 12 nt, Human
gcaggggagggg

SEQ ID NO: 1571521 - RNA, 17 nt, Human
gcacuaaaguuaguaaa

SEQ ID NO: 1571522 - RNA, 13 nt, Human
gagucgcugugcc

SEQ ID NO: 1571523 - RNA, 14 nt, Human
gauagacugcuaca

SEQ ID NO: 1571524 - RNA, 19 nt, Human
gagccuggucccacgaggg

SEQ ID NO: 1571525 - RNA, 23 nt, Human
gagccuggucccacgagggugcc

SEQ ID NO: 1571526 - RNA, 18 nt, Human
gaaccugaagaacuauuu

SEQ ID NO: 1571527 - RNA, 18 nt, Human
gaacuuacuugcauacca

SEQ ID NO: 1571528 - RNA, 16 nt, Human
gaaucuguauauauuu

SEQ ID NO: 1571529 - RNA, 18 nt, Human
cugcgucgguccuggugc

SEQ ID NO: 1571530 - RNA, 17 nt, Human
cugcgucgguccuggug

SEQ ID NO: 1571531 - RNA, 14 nt, Human
cugaagaacuauuu

SEQ ID NO: 1571532 - RNA, 12 nt, Human
cuccucaggagc

SEQ ID NO: 1571533 - RNA, 13 nt, Human
cuccucaggagcc

SEQ ID NO: 1571534 - RNA, 22 nt, Human
ccuggugcccuggaugcccagg

SEQ ID NO: 1571535 - RNA, 21 nt, Human
ccuggugcccuggaugcccag

SEQ ID NO: 1571536 - RNA, 12 nt, Human
ccuggugcccug

SEQ ID NO: 1571537 - RNA, 18 nt, Human
ccuggugcccuggaugcc

SEQ ID NO: 1571538 - RNA, 20 nt, Human
ccuggugcccuggaugccca

SEQ ID NO: 1571539 - RNA, 20 nt, Human
ccuggucccacgagggugcc

SEQ ID NO: 1571540 - RNA, 13 nt, Human
ccgccuuaccagg

SEQ ID NO: 1571541 - RNA, 17 nt, Human
ccguguccccugacagg

SEQ ID NO: 1571542 - RNA, 19 nt, Human
ccguguccccugacagggc

SEQ ID NO: 1571543 - RNA, 23 nt, Human
cccgagggcugagccugguccca

SEQ ID NO: 1571544 - RNA, 18 nt, Human
cccggguugggucaccag

SEQ ID NO: 1571545 - RNA, 17 nt, Human
ccaucugaaagugguac

SEQ ID NO: 1571546 - RNA, 18 nt, Human
ccauuauuuuuaggaugu

SEQ ID NO: 1571547 - RNA, 18 nt, Human
ccagcaugcaccacgggc

SEQ ID NO: 1571548 - RNA, 20 nt, Human
ccagcaugcaccacgggccc

SEQ ID NO: 1571549 - RNA, 23 nt, Human
ccaccccgagggcugagccuggu

SEQ ID NO: 1571550 - RNA, 19 nt, Human
cauucauaaaccuugucua

SEQ ID NO: 1571551 - RNA, 14 nt, Human
cauuuuuaccauua

SEQ ID NO: 1571552 - RNA, 17 nt, Human
caggggccggccagugg

SEQ ID NO: 1571553 - RNA, 22 nt, Human
caggggccggccaguggccuuc

SEQ ID NO: 1571554 - RNA, 13 nt, Human
caggggaggggug

SEQ ID NO: 1571555 - RNA, 16 nt, Human
cagggccagugcaguu

SEQ ID NO: 1571556 - RNA, 16 nt, Human
caggcuuagggacagg

SEQ ID NO: 1571557 - RNA, 17 nt, Human
caggcuuagggacagga

SEQ ID NO: 1571558 - RNA, 17 nt, Human
caggagccgaagcccag

SEQ ID NO: 1571559 - RNA, 18 nt, Human
caggagccgaagcccagg

SEQ ID NO: 1571560 - RNA, 21 nt, Human
caggagccgaagcccaggggc

SEQ ID NO: 1571561 - RNA, 19 nt, Human
caggagaagaaccugaaga

SEQ ID NO: 1571562 - RNA, 19 nt, Human
caggaaucuguauauauuu

SEQ ID NO: 1571563 - RNA, 18 nt, Human
caggaccucgugccaccc

SEQ ID NO: 1571564 - RNA, 17 nt, Human
cagcaugcaccacgggc

SEQ ID NO: 1571565 - RNA, 19 nt, Human
cagacggggcuggagugug

SEQ ID NO: 1571566 - RNA, 13 nt, Human
cagacggggcugg

SEQ ID NO: 1571567 - RNA, 19 nt, Human
cguguccccugacagggcc

SEQ ID NO: 1571568 - RNA, 16 nt, Human
cguguccccugacagg

SEQ ID NO: 1571569 - RNA, 18 nt, Human
cguguccccugacagggc

SEQ ID NO: 1571570 - RNA, 14 nt, Human
ccuggaugcccagg

SEQ ID NO: 1571571 - RNA, 15 nt, Human
ccgaagcccaggggc

SEQ ID NO: 1571572 - RNA, 16 nt, Human
ccgaagcccaggggcc

SEQ ID NO: 1571573 - RNA, 17 nt, Human
ccgaagcccaggggccg

SEQ ID NO: 1571574 - RNA, 16 nt, Human
ccccugacagggccag

SEQ ID NO: 1571575 - RNA, 19 nt, Human
ccccgagggcugagccugg

SEQ ID NO: 1571576 - RNA, 21 nt, Human
ccccgagggcugagccugguc

SEQ ID NO: 1571577 - RNA, 14 nt, Human
ccccgagggcugag

SEQ ID NO: 1571578 - RNA, 19 nt, Human
cacaggcuuagggacagga

SEQ ID NO: 1571579 - RNA, 22 nt, Human
cacaggcuuagggacaggaccc

SEQ ID NO: 1571580 - RNA, 18 nt, Human
cacaggcuuagggacagg

SEQ ID NO: 1571581 - RNA, 14 nt, Human
caugcaccacgggc

SEQ ID NO: 1571582 - RNA, 19 nt, Human
caugucaagagucgcugug

SEQ ID NO: 1571583 - RNA, 21 nt, Human
caugucaagagucgcugugcc

SEQ ID NO: 1571584 - RNA, 16 nt, Human
ccacgagggugccgug

SEQ ID NO: 1571585 - RNA, 16 nt, Human
caggguguggggccau

SEQ ID NO: 1571586 - RNA, 17 nt, Human
caggguguggggccaug

SEQ ID NO: 1571587 - RNA, 22 nt, Human
caggguguggggccaugccucc

SEQ ID NO: 1571588 - RNA, 15 nt, Human
caggagggaggcagg

SEQ ID NO: 1571589 - RNA, 21 nt, Human
caggagggaggcaggggaggg

SEQ ID NO: 1571590 - RNA, 18 nt, Human
caggaccccagcucugcg

SEQ ID NO: 1571591 - RNA, 16 nt, Human
caggaccccagcucug

SEQ ID NO: 1571592 - RNA, 17 nt, Human
caggaccccagcucugc

SEQ ID NO: 1571593 - RNA, 15 nt, Human
caggaccccagcucu

SEQ ID NO: 1571594 - RNA, 15 nt, Human
aaauauuauaacuca

SEQ ID NO: 1571595 - RNA, 15 nt, Human
gguccugcagccugc

SEQ ID NO: 1571596 - RNA, 16 nt, Human
gguccugcagccugca

SEQ ID NO: 1571597 - RNA, 16 nt, Human
ggggccggccaguggc

SEQ ID NO: 1571598 - RNA, 14 nt, Human
ggacaggaccccag

SEQ ID NO: 1571599 - RNA, 15 nt, Human
ggacaggaccccagc

SEQ ID NO: 1571600 - RNA, 16 nt, Human
ggacaggaccccagcu

SEQ ID NO: 1571601 - RNA, 17 nt, Human
ggacaggaccccagcuc

SEQ ID NO: 1571602 - RNA, 21 nt, Human
ggacaggaccccagcucugcg

SEQ ID NO: 1571603 - RNA, 18 nt, Human
ggacaggaccccagcucu

SEQ ID NO: 1571604 - RNA, 20 nt, Human
ggacaggaccccagcucugc

SEQ ID NO: 1571605 - RNA, 23 nt, Human
cuuagggacaggaccccagcucu

SEQ ID NO: 1571606 - RNA, 21 nt, Human
cuuagggacaggaccccagcu

SEQ ID NO: 1571607 - RNA, 22 nt, Human
cuuagggacaggaccccagcuc

SEQ ID NO: 1571608 - RNA, 18 nt, Human
cuuagggacaggacccca

SEQ ID NO: 1571609 - RNA, 20 nt, Human
cuuagggacaggaccccagc

SEQ ID NO: 1571610 - RNA, 22 nt, Human
auugguuuuccaaucauuugac

SEQ ID NO: 1571611 - RNA, 14 nt, Human
augguguuacauau

SEQ ID NO: 1571612 - RNA, 18 nt, Human
uuugugaaggugauuuau

SEQ ID NO: 1571613 - RNA, 19 nt, Human
auguagcgcuuugaauaug

SEQ ID NO: 1571614 - RNA, 21 nt, Human
auguagcgcuuugaauaugaa

SEQ ID NO: 1571615 - RNA, 13 nt, Human
augccuccucagg

SEQ ID NO: 1571616 - RNA, 15 nt, Human
augccuccucaggag

SEQ ID NO: 1571617 - RNA, 14 nt, Human
augccuccucagga

SEQ ID NO: 1571618 - RNA, 18 nt, Human
augccuccucaggagccg

SEQ ID NO: 1571619 - RNA, 16 nt, Human
auauuuuuuaucauaa

SEQ ID NO: 1571620 - RNA, 18 nt, Human
auccuaaauuuacccucu

SEQ ID NO: 1571621 - RNA, 13 nt, Human
uugauuauaaagu

SEQ ID NO: 1571622 - RNA, 22 nt, Human
uugacacuuauagauugaaauu

SEQ ID NO: 1571623 - RNA, 17 nt, Human
auaaucaaauacauuuu

SEQ ID NO: 1571624 - RNA, 19 nt, Human
auaacucauuuguuguuug

SEQ ID NO: 1571625 - RNA, 21 nt, Human
aguuuugugaaggugauuuau

SEQ ID NO: 1571626 - RNA, 12 nt, Human
aguuuaccaucu

SEQ ID NO: 1571627 - RNA, 16 nt, Human
aguuuaccaucugaaa

SEQ ID NO: 1571628 - RNA, 19 nt, Human
agugugaggguccugcagc

SEQ ID NO: 1571629 - RNA, 15 nt, Human
uguccccugacaggg

SEQ ID NO: 1571630 - RNA, 16 nt, Human
uguccccugacagggc

SEQ ID NO: 1571631 - RNA, 18 nt, Human
uguccccugacagggcca

SEQ ID NO: 1571632 - RNA, 18 nt, Human
agucgcugugccacaggc

SEQ ID NO: 1571633 - RNA, 16 nt, Human
agggcugagccugguc

SEQ ID NO: 1571634 - RNA, 17 nt, Human
agggcugagccuggucc

SEQ ID NO: 1571635 - RNA, 23 nt, Human
agcucugcgucgguccuggugcc

SEQ ID NO: 1571636 - RNA, 22 nt, Human
agcucugcgucgguccuggugc

SEQ ID NO: 1571637 - RNA, 21 nt, Human
ugcaguuugguguguccuccg

SEQ ID NO: 1571638 - RNA, 20 nt, Human
agccugcaggaccucgugcc

SEQ ID NO: 1571639 - RNA, 21 nt, Human
agccugcaggaccucgugcca

SEQ ID NO: 1571640 - RNA, 22 nt, Human
ucuggucuaaauuguguuacua

SEQ ID NO: 1571641 - RNA, 14 nt, Human
ugaauauaaucccu

SEQ ID NO: 1571642 - RNA, 15 nt, Human
agagucgcugugcca

SEQ ID NO: 1571643 - RNA, 19 nt, Human
agagucgcugugccacagg

SEQ ID NO: 1571644 - RNA, 14 nt, Human
agagucgcugugcc

SEQ ID NO: 1571645 - RNA, 23 nt, Human
ugaggguccugcagccugcagga

SEQ ID NO: 1571646 - RNA, 21 nt, Human
ugaggguccugcagccugcag

SEQ ID NO: 1571647 - RNA, 22 nt, Human
ugaggguccugcagccugcagg

SEQ ID NO: 1571648 - RNA, 14 nt, Human
ugaggguccugcag

SEQ ID NO: 1571649 - RNA, 15 nt, Human
ugaggguccugcagc

SEQ ID NO: 1571650 - RNA, 18 nt, Human
ugaggguccugcagccug

SEQ ID NO: 1571651 - RNA, 19 nt, Human
ugaggguccugcagccugc

SEQ ID NO: 1571652 - RNA, 11 nt, Human
ugagccugguc

SEQ ID NO: 1571653 - RNA, 13 nt, Human
uccugcagccugc

SEQ ID NO: 1571654 - RNA, 18 nt, Human
accgacguugccaucaaa

SEQ ID NO: 1571655 - RNA, 18 nt, Human
ucauuugacuaagagucu

SEQ ID NO: 1571656 - RNA, 13 nt, Human
uauuucauuuauu

SEQ ID NO: 1571657 - RNA, 16 nt, Human
uauggccgggcagggu

SEQ ID NO: 1571658 - RNA, 19 nt, Human
uauagauugaaauuuccua

SEQ ID NO: 1571659 - RNA, 17 nt, Human
aauuuaucaguaccuaa

SEQ ID NO: 1571660 - RNA, 19 nt, Human
aauuuacccucuugaauau

SEQ ID NO: 1571661 - RNA, 22 nt, Human
aauuuacccucuugaauauaau

SEQ ID NO: 1571662 - RNA, 14 nt, Human
guugggucaccaga

SEQ ID NO: 1571663 - RNA, 21 nt, Human
guugggucaccagacggggcu

SEQ ID NO: 1571664 - RNA, 12 nt, Human
aaggagcaucua

SEQ ID NO: 1571665 - RNA, 24 nt, Human
guuuuuggaugguguuacauauua

SEQ ID NO: 1571666 - RNA, 19 nt, Human
aaguuagaacauuugcugu

SEQ ID NO: 1571667 - RNA, 14 nt, Human
aaguuuaccaucug

SEQ ID NO: 1571668 - RNA, 17 nt, Human
gugugaggguccugcag

SEQ ID NO: 1571669 - RNA, 21 nt, Human
aagauguagcgcuuugaauau

SEQ ID NO: 1571670 - RNA, 16 nt, Human
aagaaaaguuuaccau

SEQ ID NO: 1571671 - RNA, 10 nt, Human
guccugcagc

SEQ ID NO: 1571672 - RNA, 18 nt, Human
guccugcagccugcagga

SEQ ID NO: 1571673 - RNA, 14 nt, Human
guccugcagccugc

SEQ ID NO: 1571674 - RNA, 18 nt, Human
aguggccuuccccagcau

SEQ ID NO: 1571675 - RNA, 19 nt, Human
aguggccuuccccagcaug

SEQ ID NO: 1571676 - RNA, 17 nt, Human
agggacaggaccccagc

SEQ ID NO: 1571677 - RNA, 18 nt, Human
agggacaggaccccagcu

SEQ ID NO: 1571678 - RNA, 13 nt, Human
agggacaggaccc

SEQ ID NO: 1571679 - RNA, 16 nt, Human
agggacaggaccccag

SEQ ID NO: 1571680 - RNA, 22 nt, Human
aauauuauaacucauuuguugu

SEQ ID NO: 1571681 - RNA, 15 nt, Human
caccccgagggcuga

SEQ ID NO: 1571682 - RNA, 13 nt, Human
caaauacauuuua

SEQ ID NO: 1571683 - RNA, 18 nt, Human
uucuaagucauucauaaa

SEQ ID NO: 1571684 - RNA, 13 nt, Human
uuguuugguuaua

SEQ ID NO: 1571685 - RNA, 14 nt, Human
uuuaccaucugaaa

SEQ ID NO: 1571686 - RNA, 13 nt, Human
uuuaccaucugaa

SEQ ID NO: 1571687 - RNA, 21 nt, Human
uuuacccucuugaauauaauc

SEQ ID NO: 1571688 - RNA, 13 nt, Human
uuuccuaauuuau

SEQ ID NO: 1571689 - RNA, 16 nt, Human
uuauggccgggcaggg

SEQ ID NO: 1571690 - RNA, 20 nt, Human
uuauugguuuuccaaucauu

SEQ ID NO: 1571691 - RNA, 20 nt, Human
ugggucaccagacggggcug

SEQ ID NO: 1571692 - RNA, 19 nt, Human
ugggucaccagacggggcu

SEQ ID NO: 1571693 - RNA, 16 nt, Human
ugccuccucaggagcc

SEQ ID NO: 1571694 - RNA, 12 nt, Human
ugccuccucagg

SEQ ID NO: 1571695 - RNA, 13 nt, Human
ugccuccucagga

SEQ ID NO: 1571696 - RNA, 16 nt, Human
ucuaucagauuaaguu

SEQ ID NO: 1571697 - RNA, 19 nt, Human
uccgccuuaccaggagaag

SEQ ID NO: 1571698 - RNA, 21 nt, Human
uccccagcaugcaccacgggc

SEQ ID NO: 1571699 - RNA, 19 nt, Human
uccccagcaugcaccacgg

SEQ ID NO: 1571700 - RNA, 20 nt, Human
uccccagcaugcaccacggg

SEQ ID NO: 1571701 - RNA, 14 nt, Human
uauuauauguucua

SEQ ID NO: 1571702 - RNA, 17 nt, Human
uauuauauguucuagaa

SEQ ID NO: 1571703 - RNA, 15 nt, Human
ucaccagacggggcu

SEQ ID NO: 1571704 - RNA, 19 nt, Human
ucaccagacggggcuggag

SEQ ID NO: 1571705 - RNA, 19 nt, Human
gugcccuggaugcccagga

SEQ ID NO: 1571706 - RNA, 18 nt, Human
gugcccuggaugcccagg

SEQ ID NO: 1571707 - RNA, 15 nt, Human
gucccagcucccugg

SEQ ID NO: 1571708 - RNA, 11 nt, Human
guccuggugcc

SEQ ID NO: 1571709 - RNA, 12 nt, Human
guccuggugccc

SEQ ID NO: 1571710 - RNA, 20 nt, Human
guccuggugcccuggaugcc

SEQ ID NO: 1571711 - RNA, 23 nt, Human
guccuggugcccuggaugcccag

SEQ ID NO: 1571712 - RNA, 18 nt, Human
guccuccgccuuaccagg

SEQ ID NO: 1571713 - RNA, 11 nt, Human
gucccagcucc

SEQ ID NO: 1571714 - RNA, 19 nt, Human
ggggugcggcggucccagc

SEQ ID NO: 1571715 - RNA, 21 nt, Human
gggcccggguugggucaccag

SEQ ID NO: 1571716 - RNA, 22 nt, Human
gggcccggguugggucaccaga

SEQ ID NO: 1571717 - RNA, 15 nt, Human
gggcugagccugguc

SEQ ID NO: 1571718 - RNA, 23 nt, Human
gggcugagccuggucccacgagg

SEQ ID NO: 1571719 - RNA, 13 nt, Human
gggcugagccugg

SEQ ID NO: 1571720 - RNA, 20 nt, Human
ggucccagcucccuggcucc

SEQ ID NO: 1571721 - RNA, 12 nt, Human
ggucccagcucc

SEQ ID NO: 1571722 - RNA, 14 nt, Human
ggucccagcucccu

SEQ ID NO: 1571723 - RNA, 15 nt, Human
ggucccagcucccug

SEQ ID NO: 1571724 - RNA, 15 nt, Human
ggugcccuggaugcc

SEQ ID NO: 1571725 - RNA, 18 nt, Human
ggugcccuggaugcccag

SEQ ID NO: 1571726 - RNA, 19 nt, Human
ggugcccuggaugcccagg

SEQ ID NO: 1571727 - RNA, 20 nt, Human
ggugcccuggaugcccagga

SEQ ID NO: 1571728 - RNA, 19 nt, Human
ggugcggcggucccagcuc

SEQ ID NO: 1571729 - RNA, 21 nt, Human
gguuuuccaaucauuugacua

SEQ ID NO: 1571730 - RNA, 23 nt, Human
guacaguugcuguugugugauca

SEQ ID NO: 1571731 - RNA, 22 nt, Human
gcuuagggacaggaccccagcu

SEQ ID NO: 1571732 - RNA, 23 nt, Human
gcuuagggacaggaccccagcuc

SEQ ID NO: 1571733 - RNA, 21 nt, Human
gcucugcgucgguccuggugc

SEQ ID NO: 1571734 - RNA, 20 nt, Human
gcucugcgucgguccuggug

SEQ ID NO: 1571735 - RNA, 20 nt, Human
gcccuggaugcccaggaauc

SEQ ID NO: 1571736 - RNA, 13 nt, Human
gaggguccugcag

SEQ ID NO: 1571737 - RNA, 17 nt, Human
gaggguccugcagccug

SEQ ID NO: 1571738 - RNA, 21 nt, Human
gaggguccugcagccugcagg

SEQ ID NO: 1571739 - RNA, 18 nt, Human
gaggguccugcagccugc

SEQ ID NO: 1571740 - RNA, 23 nt, Human
gagggugccguguccccugacag

SEQ ID NO: 1571741 - RNA, 19 nt, Human
gaggggugcggcgguccca

SEQ ID NO: 1571742 - RNA, 22 nt, Human
gaggggugcggcggucccagcu

SEQ ID NO: 1571743 - RNA, 19 nt, Human
gacaggaccccagcucugc

SEQ ID NO: 1571744 - RNA, 14 nt, Human
gacaggaccccagc

SEQ ID NO: 1571745 - RNA, 15 nt, Human
gacaggaccccagcu

SEQ ID NO: 1571746 - RNA, 16 nt, Human
gacaggaccccagcuc

SEQ ID NO: 1571747 - RNA, 17 nt, Human
gacaggaccccagcucu

SEQ ID NO: 1571748 - RNA, 18 nt, Human
gacaggaccccagcucug

SEQ ID NO: 1571749 - RNA, 20 nt, Human
gacaggaccccagcucugcg

SEQ ID NO: 1571750 - RNA, 13 nt, Human
cugugccacaggc

SEQ ID NO: 1571751 - RNA, 22 nt, Human
cuguauauauuuauggccgggc

SEQ ID NO: 1571752 - RNA, 23 nt, Human
cucaggagccgaagcccaggggc

SEQ ID NO: 1571753 - RNA, 21 nt, Human
cucaggagccgaagcccaggg

SEQ ID NO: 1571754 - RNA, 14 nt, Human
cuaaauuuuaagug

SEQ ID NO: 1571755 - RNA, 11 nt, Human
cuaaaaacaua

SEQ ID NO: 1571756 - RNA, 15 nt, Human
cgcugugccacaggc

SEQ ID NO: 1571757 - RNA, 13 nt, Human
cggaauauauuuu

SEQ ID NO: 1571758 - RNA, 16 nt, Human
cgaagcccaggggccg

SEQ ID NO: 1571759 - RNA, 15 nt, Human
ccgggcagggugugg

SEQ ID NO: 1571760 - RNA, 23 nt, Human
ccagugcaguuugguguguccuc

SEQ ID NO: 1571761 - RNA, 17 nt, Human
ccaguggccuuccccag

SEQ ID NO: 1571762 - RNA, 19 nt, Human
ccaguggccuuccccagca

SEQ ID NO: 1571763 - RNA, 22 nt, Human
accaucugaaagugguacuuga

SEQ ID NO: 1571764 - RNA, 17 nt, Human
acagggccagugcaguu

SEQ ID NO: 1571765 - RNA, 21 nt, Human
aacuuacuugcauaccaaguu

SEQ ID NO: 1571766 - RNA, 23 nt, Human
aggcuuagggacaggaccccagc

SEQ ID NO: 1571767 - RNA, 16 nt, Human
aggguccugcagccug

SEQ ID NO: 1571768 - RNA, 17 nt, Human
aggguccugcagccugc

SEQ ID NO: 1571769 - RNA, 19 nt, Human
aggguccugcagccugcag

SEQ ID NO: 1571770 - RNA, 21 nt, Human
aggguccugcagccugcagga

SEQ ID NO: 1571771 - RNA, 13 nt, Human
agggacuuagcaa

SEQ ID NO: 1571772 - RNA, 17 nt, Human
aguggccuuccccagca

SEQ ID NO: 1571773 - RNA, 23 nt, Human
aguugauacuugaauaaccaucu

SEQ ID NO: 1571774 - RNA, 19 nt, Human
cucugcgucgguccuggug

SEQ ID NO: 1571775 - RNA, 20 nt, Human
cucugcgucgguccuggugc

SEQ ID NO: 1571776 - RNA, 21 nt, Human
cucugcgucgguccuggugcc

SEQ ID NO: 1571777 - RNA, 22 nt, Human
cucugcgucgguccuggugccc

SEQ ID NO: 1571778 - RNA, 17 nt, Human
cuccgccuuaccaggag

SEQ ID NO: 1571779 - RNA, 15 nt, Human
cggcggucccagcuc

SEQ ID NO: 1571780 - RNA, 16 nt, Human
cggcggucccagcucc

SEQ ID NO: 1571781 - RNA, 19 nt, Human
cggcggucccagcucccug

SEQ ID NO: 1571782 - RNA, 22 nt, Human
ccaugucaagagucgcugugcc

SEQ ID NO: 1571783 - RNA, 19 nt, Human
ccugcagccugcaggaccu

SEQ ID NO: 1571784 - RNA, 17 nt, Human
ccugcaggaccucgugc

SEQ ID NO: 1571785 - RNA, 18 nt, Human
ccugcaggaccucgugcc

SEQ ID NO: 1571786 - RNA, 12 nt, Human
cagccugcagga

SEQ ID NO: 1571787 - RNA, 21 nt, Human
cagccugcaggaccucgugcc

SEQ ID NO: 1571788 - RNA, 17 nt, Human
ggccaugccuccucagg

SEQ ID NO: 1571789 - RNA, 18 nt, Human
ggccaugccuccucagga

SEQ ID NO: 1571790 - RNA, 21 nt, Human
ggccaugccuccucaggagcc

SEQ ID NO: 1571791 - RNA, 22 nt, Human
ggccagugcaguuugguguguc

SEQ ID NO: 1571792 - RNA, 19 nt, Human
ggccaguggccuuccccag

SEQ ID NO: 1571793 - RNA, 22 nt, Human
ggccaguggccuuccccagcau

SEQ ID NO: 1571794 - RNA, 15 nt, Human
gggacaggaccccag

SEQ ID NO: 1571795 - RNA, 17 nt, Human
gggacaggaccccagcu

SEQ ID NO: 1571796 - RNA, 19 nt, Human
gggacaggaccccagcucu

SEQ ID NO: 1571797 - RNA, 21 nt, Human
gggacaggaccccagcucugc

SEQ ID NO: 1571798 - RNA, 22 nt, Human
gggacaggaccccagcucugcg

SEQ ID NO: 1571799 - RNA, 13 nt, Human
gggccaugccucc

SEQ ID NO: 1571800 - RNA, 23 nt, Human
gggccaugccuccucaggagccg

SEQ ID NO: 1571801 - RNA, 22 nt, Human
gggccaugccuccucaggagcc

SEQ ID NO: 1571802 - RNA, 14 nt, Human
gguccuggugcccu

SEQ ID NO: 1571803 - RNA, 24 nt, Human
gguccuggugcccuggaugcccag

SEQ ID NO: 1571804 - RNA, 12 nt, Human
gguccuggugcc

SEQ ID NO: 1571805 - RNA, 13 nt, Human
gguccuggugccc

SEQ ID NO: 1571806 - RNA, 15 nt, Human
gcuggagugugaggg

SEQ ID NO: 1571807 - RNA, 21 nt, Human
gcuggagugugaggguccugc

SEQ ID NO: 1571808 - RNA, 13 nt, Human
gcugugccacagg

SEQ ID NO: 1571809 - RNA, 14 nt, Human
gcugugccacaggc

SEQ ID NO: 1571810 - RNA, 15 nt, Human
gcugugccacaggcu

SEQ ID NO: 1571811 - RNA, 20 nt, Human
gcugugccacaggcuuaggg

SEQ ID NO: 1571812 - RNA, 19 nt, Human
gcugugccacaggcuuagg

SEQ ID NO: 1571813 - RNA, 21 nt, Human
gccaguggccuuccccagcau

SEQ ID NO: 1571814 - RNA, 17 nt, Human
cuucuaagucauucaua

SEQ ID NO: 1571815 - RNA, 22 nt, Human
uuggaugguguuacauauuaua

SEQ ID NO: 1571816 - RNA, 14 nt, Human
auggccgggcaggg

SEQ ID NO: 1571817 - RNA, 16 nt, Human
uuuaagcaaguuaagu

SEQ ID NO: 1571818 - RNA, 17 nt, Human
uuuaagcaaguuaagug

SEQ ID NO: 1571819 - RNA, 14 nt, Human
uuccuuuuuuugau

SEQ ID NO: 1571820 - RNA, 13 nt, Human
uugaaauuuccua

SEQ ID NO: 1571821 - RNA, 18 nt, Human
uuaguuuugugaagguga

SEQ ID NO: 1571822 - RNA, 20 nt, Human
auaguucccaggugauauuu

SEQ ID NO: 1571823 - RNA, 21 nt, Human
uuagggacaggaccccagcuc

SEQ ID NO: 1571824 - RNA, 22 nt, Human
uuagggacaggaccccagcucu

SEQ ID NO: 1571825 - RNA, 20 nt, Human
auaaucccuggaugauauuu

SEQ ID NO: 1571826 - RNA, 21 nt, Human
auaaucccuggaugauauuuu

SEQ ID NO: 1571827 - RNA, 16 nt, Human
auaaccaucugaaagu

SEQ ID NO: 1571828 - RNA, 16 nt, Human
uuacaggcacuaaagu

SEQ ID NO: 1571829 - RNA, 15 nt, Human
aguuagaacauuugc

SEQ ID NO: 1571830 - RNA, 17 nt, Human
ugucaagagucgcugug

SEQ ID NO: 1571831 - RNA, 19 nt, Human
ugucaagagucgcugugcc

SEQ ID NO: 1571832 - RNA, 22 nt, Human
aggguguggggccaugccuccu

SEQ ID NO: 1571833 - RNA, 23 nt, Human
aggguguggggccaugccuccuc

SEQ ID NO: 1571834 - RNA, 13 nt, Human
uggccuuccccag

SEQ ID NO: 1571835 - RNA, 23 nt, Human
uggccuuccccagcaugcaccac

SEQ ID NO: 1571836 - RNA, 15 nt, Human
uggccuuccccagca

SEQ ID NO: 1571837 - RNA, 18 nt, Human
ugcggcggucccagcucc

SEQ ID NO: 1571838 - RNA, 13 nt, Human
ugcggcgguccca

SEQ ID NO: 1571839 - RNA, 14 nt, Human
ugcggcggucccag

SEQ ID NO: 1571840 - RNA, 17 nt, Human
ugcggcggucccagcuc

SEQ ID NO: 1571841 - RNA, 22 nt, Human
agccuggucccacgagggugcc

SEQ ID NO: 1571842 - RNA, 18 nt, Human
ugcagccugcaggaccuc

SEQ ID NO: 1571843 - RNA, 17 nt, Human
ugcagccugcaggaccu

SEQ ID NO: 1571844 - RNA, 14 nt, Human
ugaguagucucaug

SEQ ID NO: 1571845 - RNA, 17 nt, Human
ugauauuuuuuaucaua

SEQ ID NO: 1571846 - RNA, 19 nt, Human
ugauauuuuuuaucauaaa

SEQ ID NO: 1571847 - RNA, 17 nt, Human
ugaucaaacaugucucu

SEQ ID NO: 1571848 - RNA, 17 nt, Human
agccacauauugagaug

SEQ ID NO: 1571849 - RNA, 20 nt, Human
ugaccccaggagggaggcag

SEQ ID NO: 1571850 - RNA, 22 nt, Human
ugaccccaggagggaggcaggg

SEQ ID NO: 1571851 - RNA, 12 nt, Human
agauuuuguugg

SEQ ID NO: 1571852 - RNA, 20 nt, Human
ugaaaaagcuggauuuucuu

SEQ ID NO: 1571853 - RNA, 17 nt, Human
agaauaaucaaauacau

SEQ ID NO: 1571854 - RNA, 20 nt, Human
agaaauuacuaauuuuacuu

SEQ ID NO: 1571855 - RNA, 16 nt, Human
ucgcugugccacaggc

SEQ ID NO: 1571856 - RNA, 11 nt, Human
accccagcucu

SEQ ID NO: 1571857 - RNA, 12 nt, Human
uccccugacagg

SEQ ID NO: 1571858 - RNA, 15 nt, Human
uccccugacagggcc

SEQ ID NO: 1571859 - RNA, 14 nt, Human
acgagggugccgug

SEQ ID NO: 1571860 - RNA, 17 nt, Human
uagaaacauguaauccu

SEQ ID NO: 1571861 - RNA, 15 nt, Human
uauaacucauuuguu

SEQ ID NO: 1571862 - RNA, 20 nt, Human
aauuacuuacguauguuugu

SEQ ID NO: 1571863 - RNA, 18 nt, Human
uaccauuauuuuuaggau

SEQ ID NO: 1571864 - RNA, 15 nt, Human
aagcccaggggccgg

SEQ ID NO: 1571865 - RNA, 22 nt, Human
guggggccaugccuccucagga

SEQ ID NO: 1571866 - RNA, 21 nt, Human
guggggccaugccuccucagg

SEQ ID NO: 1571867 - RNA, 17 nt, Human
guggccuuccccagcau

SEQ ID NO: 1571868 - RNA, 18 nt, Human
guggccuuccccagcaug

SEQ ID NO: 1571869 - RNA, 21 nt, Human
guggccuuccccagcaugcac

SEQ ID NO: 1571870 - RNA, 19 nt, Human
guggccuuccccagcaugc

SEQ ID NO: 1571871 - RNA, 14 nt, Human
guguauuucauuua

SEQ ID NO: 1571872 - RNA, 21 nt, Human
guguggggccaugccuccuca

SEQ ID NO: 1571873 - RNA, 23 nt, Human
guguggggccaugccuccucagg

SEQ ID NO: 1571874 - RNA, 11 nt, Human
aaauuguguua

SEQ ID NO: 1571875 - RNA, 24 nt, Human
gugaggguccugcagccugcagga

SEQ ID NO: 1571876 - RNA, 23 nt, Human
gugaggguccugcagccugcagg

SEQ ID NO: 1571877 - RNA, 14 nt, Human
gugaggguccugca

SEQ ID NO: 1571878 - RNA, 15 nt, Human
gugaggguccugcag

SEQ ID NO: 1571879 - RNA, 18 nt, Human
gugccaccccgagggcug

SEQ ID NO: 1571880 - RNA, 19 nt, Human
caagagucgcugugccaca

SEQ ID NO: 1571881 - RNA, 22 nt, Human
caagagucgcugugccacaggc

SEQ ID NO: 1571882 - RNA, 15 nt, Human
uuaagcaaguuaagu

SEQ ID NO: 1571883 - RNA, 21 nt, Human
uuaagagguugauuauaaagu

SEQ ID NO: 1571884 - RNA, 13 nt, Human
uuaaauauuuagu

SEQ ID NO: 1571885 - RNA, 21 nt, Human
uguccuccgccuuaccaggag

SEQ ID NO: 1571886 - RNA, 17 nt, Human
ugcuaaaggagcaucua

SEQ ID NO: 1571887 - RNA, 16 nt, Human
ugcgucgguccuggug

SEQ ID NO: 1571888 - RNA, 18 nt, Human
uccuccgccuuaccagga

SEQ ID NO: 1571889 - RNA, 18 nt, Human
ucccacgagggugccgug

SEQ ID NO: 1571890 - RNA, 18 nt, Human
uccagcaaaucaagcuga

SEQ ID NO: 1571891 - RNA, 20 nt, Human
uacagcuccuuugaaaacuc

SEQ ID NO: 1571892 - RNA, 14 nt, Human
uacagcuccuuuga

SEQ ID NO: 1571893 - RNA, 18 nt, Human
uaagucauucauaaaccu

SEQ ID NO: 1571894 - RNA, 22 nt, Human
uaagugguucuuugguuccagu

SEQ ID NO: 1571895 - RNA, 15 nt, Human
uaaaguuaguaaaga

SEQ ID NO: 1571896 - RNA, 21 nt, Human
uaaagaaaaguuuaccaucug

SEQ ID NO: 1571897 - RNA, 20 nt, Human
guuacauauuauauguucua

SEQ ID NO: 1571898 - RNA, 18 nt, Human
guguccccugacagggcc

SEQ ID NO: 1571899 - RNA, 23 nt, Human
guguuacuagccucaaaauacau

SEQ ID NO: 1571900 - RNA, 18 nt, Human
guggugaccccaggaggg

SEQ ID NO: 1571901 - RNA, 16 nt, Human
guggugaccccaggag

SEQ ID NO: 1571902 - RNA, 14 nt, Human
gugguacuugauca

SEQ ID NO: 1571903 - RNA, 21 nt, Human
gugcaguuugguguguccucc

SEQ ID NO: 1571904 - RNA, 18 nt, Human
gugcggcggucccagcuc

SEQ ID NO: 1571905 - RNA, 19 nt, Human
gugcggcggucccagcucc

SEQ ID NO: 1571906 - RNA, 22 nt, Human
gugcggcggucccagcucccug

SEQ ID NO: 1571907 - RNA, 14 nt, Human
gugauauuuuucuu

SEQ ID NO: 1571908 - RNA, 15 nt, Human
gucgguccuggugcc

SEQ ID NO: 1571909 - RNA, 17 nt, Human
gucgguccuggugcccu

SEQ ID NO: 1571910 - RNA, 18 nt, Human
gucgguccuggugcccug

SEQ ID NO: 1571911 - RNA, 17 nt, Human
gucgcugugccacaggc

SEQ ID NO: 1571912 - RNA, 17 nt, Human
gucaccagacggggcug

SEQ ID NO: 1571913 - RNA, 16 nt, Human
gucaccagacggggcu

SEQ ID NO: 1571914 - RNA, 15 nt, Human
guauguuuguacuug

SEQ ID NO: 1571915 - RNA, 13 nt, Human
uuugaauaugaaa

SEQ ID NO: 1571916 - RNA, 13 nt, Human
uuuuuugauauau

SEQ ID NO: 1571917 - RNA, 15 nt, Human
uuuucuaaauuuauc

SEQ ID NO: 1571918 - RNA, 18 nt, Human
uuuuggaugguguuacau

SEQ ID NO: 1571919 - RNA, 15 nt, Human
gcgucgguccuggug

SEQ ID NO: 1571920 - RNA, 12 nt, Human
gccuccucagga

SEQ ID NO: 1571921 - RNA, 13 nt, Human
gccgaagcccagg

SEQ ID NO: 1571922 - RNA, 18 nt, Human
gccguguccccugacagg

SEQ ID NO: 1571923 - RNA, 15 nt, Human
gccaugccuccucag

SEQ ID NO: 1571924 - RNA, 14 nt, Human
gagccgaagcccag

SEQ ID NO: 1571925 - RNA, 15 nt, Human
gagccgaagcccagg

SEQ ID NO: 1571926 - RNA, 12 nt, Human
gaccccagcucu

SEQ ID NO: 1571927 - RNA, 14 nt, Human
gaccccagcucugc

SEQ ID NO: 1571928 - RNA, 20 nt, Human
gacaugggugaacuuacuug

SEQ ID NO: 1571929 - RNA, 20 nt, Human
gaaauuacuaauuuuacuuc

SEQ ID NO: 1571930 - RNA, 20 nt, Human
gaaauuuccuaauuuauucu

SEQ ID NO: 1571931 - RNA, 19 nt, Human
gaaauuacuaauuuuacuu

SEQ ID NO: 1571932 - RNA, 14 nt, Human
cuggucccacgagg

SEQ ID NO: 1571933 - RNA, 17 nt, Human
cuggucccacgagggug

SEQ ID NO: 1571934 - RNA, 19 nt, Human
cuggucccacgagggugcc

SEQ ID NO: 1571935 - RNA, 12 nt, Human
cugagccugguc

SEQ ID NO: 1571936 - RNA, 17 nt, Human
cugacagggccagugca

SEQ ID NO: 1571937 - RNA, 12 nt, Human
cugacagggcca

SEQ ID NO: 1571938 - RNA, 15 nt, Human
cgugccaccccgagg

SEQ ID NO: 1571939 - RNA, 22 nt, Human
cgugccaccccgagggcugagc

SEQ ID NO: 1571940 - RNA, 19 nt, Human
cgugccaccccgagggcug

SEQ ID NO: 1571941 - RNA, 13 nt, Human
cgguccuggugcc

SEQ ID NO: 1571942 - RNA, 13 nt, Human
cggucccagcucc

SEQ ID NO: 1571943 - RNA, 12 nt, Human
cggucccagcuc

SEQ ID NO: 1571944 - RNA, 22 nt, Human
cggccaguggccuuccccagca

SEQ ID NO: 1571945 - RNA, 18 nt, Human
caguggccuuccccagca

SEQ ID NO: 1571946 - RNA, 17 nt, Human
caguggccuuccccagc

SEQ ID NO: 1571947 - RNA, 19 nt, Human
caguggccuuccccagcau

SEQ ID NO: 1571948 - RNA, 19 nt, Human
cauagaaaacacuacagug

SEQ ID NO: 1571949 - RNA, 15 nt, Human
caugccuccucagga

SEQ ID NO: 1571950 - RNA, 17 nt, Human
ccagugcuuuauguugu

SEQ ID NO: 1571951 - RNA, 22 nt, Human
ccagcucugcgucgguccuggu

SEQ ID NO: 1571952 - RNA, 11 nt, Human
cccagcucugc

SEQ ID NO: 1571953 - RNA, 12 nt, Human
cccagcucugcg

SEQ ID NO: 1571954 - RNA, 17 nt, Human
cccacgagggugccgug

SEQ ID NO: 1571955 - RNA, 16 nt, Human
ccaugccuccucagga

SEQ ID NO: 1571956 - RNA, 15 nt, Human
ccaugccuccucagg

SEQ ID NO: 1571957 - RNA, 21 nt, Human
agggacaggaccccagcucug

SEQ ID NO: 1571958 - RNA, 20 nt, Human
agggacaggaccccagcucu

SEQ ID NO: 1571959 - RNA, 13 nt, Human
agcaucuaucaga

SEQ ID NO: 1571960 - RNA, 19 nt, Human
accacgggcccggguuggg

SEQ ID NO: 1571961 - RNA, 15 nt, Human
aagagucgcugugcc

SEQ ID NO: 1571962 - RNA, 22 nt, Human
aagagucgcugugccacaggcu

SEQ ID NO: 1571963 - RNA, 21 nt, Human
cucgugccaccccgagggcug

SEQ ID NO: 1571964 - RNA, 14 nt, Human
cuaagucauucaua

SEQ ID NO: 1571965 - RNA, 12 nt, Human
ccuuccccagca

SEQ ID NO: 1571966 - RNA, 13 nt, Human
ccuuccccagcau

SEQ ID NO: 1571967 - RNA, 18 nt, Human
ccagacuugggaggaugu

SEQ ID NO: 1571968 - RNA, 15 nt, Human
ccagaucaaggaugu

SEQ ID NO: 1571969 - RNA, 15 nt, Human
ccagacggggcugga

SEQ ID NO: 1571970 - RNA, 23 nt, Human
cccagcaugcaccacgggcccgg

SEQ ID NO: 1571971 - RNA, 19 nt, Human
cccagcaugcaccacgggc

SEQ ID NO: 1571972 - RNA, 15 nt, Human
cccuggaugcccagg

SEQ ID NO: 1571973 - RNA, 16 nt, Human
cccuggaugcccagga

SEQ ID NO: 1571974 - RNA, 13 nt, Human
cccugacagggcc

SEQ ID NO: 1571975 - RNA, 16 nt, Human
cccugacagggccagu

SEQ ID NO: 1571976 - RNA, 14 nt, Human
cauuuguuguuuga

SEQ ID NO: 1571977 - RNA, 17 nt, Human
caggaccucgugccacc

SEQ ID NO: 1571978 - RNA, 12 nt, Human
caggaccccagc

SEQ ID NO: 1571979 - RNA, 13 nt, Human
caggaccccagcu

SEQ ID NO: 1571980 - RNA, 14 nt, Human
caggaccccagcuc

SEQ ID NO: 1571981 - RNA, 17 nt, Human
gccggccaguggccuuc

SEQ ID NO: 1571982 - RNA, 15 nt, Human
gccuccucaggagcc

SEQ ID NO: 1571983 - RNA, 16 nt, Human
gccaccccgagggcug

SEQ ID NO: 1571984 - RNA, 23 nt, Human
gccaccccgagggcugagccugg

SEQ ID NO: 1571985 - RNA, 17 nt, Human
gccaccccgagggcuga

SEQ ID NO: 1571986 - RNA, 12 nt, Human
ggaccccagcuc

SEQ ID NO: 1571987 - RNA, 15 nt, Human
ggaccccagcucugc

SEQ ID NO: 1571988 - RNA, 13 nt, Human
ggaccccagcucu

SEQ ID NO: 1571989 - RNA, 17 nt, Human
aaaagcuggauuuucuu

SEQ ID NO: 1571990 - RNA, 18 nt, Human
gaccucgugccaccccga

SEQ ID NO: 1571991 - RNA, 20 nt, Human
gagggcugagccugguccca

SEQ ID NO: 1571992 - RNA, 20 nt, Human
cuuauuagaaaaauauuaua

SEQ ID NO: 1571993 - RNA, 14 nt, Human
cuggaugauauuuu

SEQ ID NO: 1571994 - RNA, 16 nt, Human
cuggaugcccaggaau

SEQ ID NO: 1571995 - RNA, 13 nt, Human
cuggaugcccagg

SEQ ID NO: 1571996 - RNA, 14 nt, Human
cuggaugcccagga

SEQ ID NO: 1571997 - RNA, 15 nt, Human
cuggaugcccaggaa

SEQ ID NO: 1571998 - RNA, 11 nt, Human
cuggugcccug

SEQ ID NO: 1571999 - RNA, 12 nt, Human
cugcagccugca

SEQ ID NO: 1572000 - RNA, 14 nt, Human
cugcagccugcagg

SEQ ID NO: 1572001 - RNA, 19 nt, Human
cugcagccugcaggaccuc

SEQ ID NO: 1572002 - RNA, 15 nt, Human
cugcagccugcagga

SEQ ID NO: 1572003 - RNA, 18 nt, Human
uuuuccaaucauuugacu

SEQ ID NO: 1572004 - RNA, 21 nt, Human
uuugacacuuauagauugaaa

SEQ ID NO: 1572005 - RNA, 16 nt, Human
auuauaacucauuugu

SEQ ID NO: 1572006 - RNA, 13 nt, Human
auuauaaaguuuu

SEQ ID NO: 1572007 - RNA, 16 nt, Human
auuauaaaguuuucua

SEQ ID NO: 1572008 - RNA, 12 nt, Human
uuuuugauauau

SEQ ID NO: 1572009 - RNA, 23 nt, Human
uuuaggauguguauuucauuuau

SEQ ID NO: 1572010 - RNA, 20 nt, Human
uuuacuucuaagucauucau

SEQ ID NO: 1572011 - RNA, 12 nt, Human
ugugccacaggc

SEQ ID NO: 1572012 - RNA, 16 nt, Human
ugugccacaggcuuag

SEQ ID NO: 1572013 - RNA, 19 nt, Human
agucucaugccuugagauc

SEQ ID NO: 1572014 - RNA, 14 nt, Human
uguaguaucucaua

SEQ ID NO: 1572015 - RNA, 19 nt, Human
uggugcccuggaugcccag

SEQ ID NO: 1572016 - RNA, 18 nt, Human
aggugauauuuuucuuau

SEQ ID NO: 1572017 - RNA, 22 nt, Human
aggggugcggcggucccagcuc

SEQ ID NO: 1572018 - RNA, 20 nt, Human
aggggugcggcggucccagc

SEQ ID NO: 1572019 - RNA, 21 nt, Human
aggggugcggcggucccagcu

SEQ ID NO: 1572020 - RNA, 23 nt, Human
aggggugcggcggucccagcucc

SEQ ID NO: 1572021 - RNA, 14 nt, Human
uggggccaugccuc

SEQ ID NO: 1572022 - RNA, 19 nt, Human
uggggccaugccuccucag

SEQ ID NO: 1572023 - RNA, 21 nt, Human
uggggccaugccuccucagga

SEQ ID NO: 1572024 - RNA, 20 nt, Human
uggggccaugccuccucagg

SEQ ID NO: 1572025 - RNA, 13 nt, Human
agggaggcagggg

SEQ ID NO: 1572026 - RNA, 21 nt, Human
uggagugugaggguccugcag

SEQ ID NO: 1572027 - RNA, 16 nt, Human
aggagccgaagcccag

SEQ ID NO: 1572028 - RNA, 18 nt, Human
aggagccgaagcccaggg

SEQ ID NO: 1572029 - RNA, 15 nt, Human
agagucuccauuuaa

SEQ ID NO: 1572030 - RNA, 20 nt, Human
acuugaauaaccaucugaaa

SEQ ID NO: 1572031 - RNA, 19 nt, Human
acuugaauaaccaucugaa

SEQ ID NO: 1572032 - RNA, 15 nt, Human
acuuauagauugaaa

SEQ ID NO: 1572033 - RNA, 13 nt, Human
ucgguccuggugc

SEQ ID NO: 1572034 - RNA, 16 nt, Human
ucgguccuggugcccu

SEQ ID NO: 1572035 - RNA, 20 nt, Human
acgggcccggguugggucac

SEQ ID NO: 1572036 - RNA, 21 nt, Human
acgggcccggguugggucacc

SEQ ID NO: 1572037 - RNA, 16 nt, Human
acgggcccggguuggg

SEQ ID NO: 1572038 - RNA, 17 nt, Human
acgggcccggguugggu

SEQ ID NO: 1572039 - RNA, 19 nt, Human
accucgugccaccccgagg

SEQ ID NO: 1572040 - RNA, 23 nt, Human
accucgugccaccccgagggcug

SEQ ID NO: 1572041 - RNA, 18 nt, Human
acaguugcuguuguguga

SEQ ID NO: 1572042 - RNA, 14 nt, Human
accagacggggcug

SEQ ID NO: 1572043 - RNA, 15 nt, Human
accagacggggcugg

SEQ ID NO: 1572044 - RNA, 21 nt, Human
accagacggggcuggagugug

SEQ ID NO: 1572045 - RNA, 16 nt, Human
accagacggggcugga

SEQ ID NO: 1572046 - RNA, 12 nt, Human
accauuauuuuu

SEQ ID NO: 1572047 - RNA, 18 nt, Human
uaguuuugugaaggugau

SEQ ID NO: 1572048 - RNA, 22 nt, Human
gugccguguccccugacagggc

SEQ ID NO: 1572049 - RNA, 23 nt, Human
gugccguguccccugacagggcc

SEQ ID NO: 1572050 - RNA, 16 nt, Human
aacauuugcugucagc

SEQ ID NO: 1572051 - RNA, 17 nt, Human
caccagacggggcugga

SEQ ID NO: 1572052 - RNA, 16 nt, Human
caccagacggggcugg

SEQ ID NO: 1572053 - RNA, 14 nt, Human
uuugauauaugaaa

SEQ ID NO: 1572054 - RNA, 22 nt, Human
uuccccagcaugcaccacgggc

SEQ ID NO: 1572055 - RNA, 17 nt, Human
ugugaggguccugcagc

SEQ ID NO: 1572056 - RNA, 23 nt, Human
uguggggccaugccuccucagga

SEQ ID NO: 1572057 - RNA, 15 nt, Human
uguuguuuuuggaug

SEQ ID NO: 1572058 - RNA, 14 nt, Human
uguguaguuccagc

SEQ ID NO: 1572059 - RNA, 19 nt, Human
uggaugauauuuuuuauca

SEQ ID NO: 1572060 - RNA, 14 nt, Human
uggaugcccaggaa

SEQ ID NO: 1572061 - RNA, 13 nt, Human
uggaugcccagga

SEQ ID NO: 1572062 - RNA, 21 nt, Human
ugggucaccagacggggcugg

SEQ ID NO: 1572063 - RNA, 17 nt, Human
ugccaccccgagggcug

SEQ ID NO: 1572064 - RNA, 18 nt, Human
ugccaccccgagggcuga

SEQ ID NO: 1572065 - RNA, 12 nt, Human
uccuggugcccu

SEQ ID NO: 1572066 - RNA, 13 nt, Human
uccuggugcccug

SEQ ID NO: 1572067 - RNA, 22 nt, Human
uccuggugcccuggaugcccag

SEQ ID NO: 1572068 - RNA, 14 nt, Human
guuuucuaaauuua

SEQ ID NO: 1572069 - RNA, 16 nt, Human
uaagagguugauuaua

SEQ ID NO: 1572070 - RNA, 16 nt, Human
uacagaaauauccaug

SEQ ID NO: 1572071 - RNA, 18 nt, Human
uacuugaauaaccaucug

SEQ ID NO: 1572072 - RNA, 20 nt, Human
uacuugaauaaccaucugaa

SEQ ID NO: 1572073 - RNA, 22 nt, Human
ggggugcggcggucccagcucc

SEQ ID NO: 1572074 - RNA, 20 nt, Human
ggggugcggcggucccagcu

SEQ ID NO: 1572075 - RNA, 21 nt, Human
gggugcggcggucccagcucc

SEQ ID NO: 1572076 - RNA, 19 nt, Human
ggucaccagacggggcugg

SEQ ID NO: 1572077 - RNA, 11 nt, Human
ggcugagccug

SEQ ID NO: 1572078 - RNA, 22 nt, Human
ggagccgaagcccaggggccgg

SEQ ID NO: 1572079 - RNA, 15 nt, Human
ggagccgaagcccag

SEQ ID NO: 1572080 - RNA, 17 nt, Human
ggagccgaagcccaggg

SEQ ID NO: 1572081 - RNA, 19 nt, Human
ggagccgaagcccaggggc

SEQ ID NO: 1572082 - RNA, 13 nt, Human
ggaccucgugcca

SEQ ID NO: 1572083 - RNA, 17 nt, Human
gccgggcaggguguggg

SEQ ID NO: 1572084 - RNA, 13 nt, Human
gccugcaggaccu

SEQ ID NO: 1572085 - RNA, 17 nt, Human
gccugcaggaccucgug

SEQ ID NO: 1572086 - RNA, 18 nt, Human
gccugcaggaccucgugc

SEQ ID NO: 1572087 - RNA, 23 nt, Human
gccugcaggaccucgugccaccc

SEQ ID NO: 1572088 - RNA, 13 nt, Human
gcggucccagcuc

SEQ ID NO: 1572089 - RNA, 14 nt, Human
gcggucccagcucc

SEQ ID NO: 1572090 - RNA, 18 nt, Human
gcggucccagcucccugg

SEQ ID NO: 1572091 - RNA, 22 nt, Human
gcggucccagcucccuggcucc

SEQ ID NO: 1572092 - RNA, 15 nt, Human
gcaggaccucgugcc

SEQ ID NO: 1572093 - RNA, 16 nt, Human
gcagccugcaggaccu

SEQ ID NO: 1572094 - RNA, 13 nt, Human
gcagccugcagga

SEQ ID NO: 1572095 - RNA, 15 nt, Human
gcaccacgggcccgg

SEQ ID NO: 1572096 - RNA, 14 nt, Human
gcaugcaccacggg

SEQ ID NO: 1572097 - RNA, 15 nt, Human
gcaugcaccacgggc

SEQ ID NO: 1572098 - RNA, 19 nt, Human
gcaagcucuuuuauaugcu

SEQ ID NO: 1572099 - RNA, 16 nt, Human
gaagcccaggggccgg

SEQ ID NO: 1572100 - RNA, 19 nt, Human
gaauaaucaaauacauuuu

SEQ ID NO: 1572101 - RNA, 16 nt, Human
gaaggugauuuauucu

SEQ ID NO: 1572102 - RNA, 18 nt, Human
gacagggccagugcaguu

SEQ ID NO: 1572103 - RNA, 24 nt, Human
cuuacuugcauaccaaguugauac

SEQ ID NO: 1572104 - RNA, 15 nt, Human
cgucgguccuggugc

SEQ ID NO: 1572105 - RNA, 21 nt, Human
cgggcaggguguggggccaug

SEQ ID NO: 1572106 - RNA, 16 nt, Human
ccugaagaacuauuuu

SEQ ID NO: 1572107 - RNA, 13 nt, Human
ccgagggcugagc

SEQ ID NO: 1572108 - RNA, 16 nt, Human
ccgagggcugagccug

SEQ ID NO: 1572109 - RNA, 22 nt, Human
ccgagggcugagccugguccca

SEQ ID NO: 1572110 - RNA, 18 nt, Human
ccccaggagggaggcagg

SEQ ID NO: 1572111 - RNA, 19 nt, Human
ccccaggagggaggcaggg

SEQ ID NO: 1572112 - RNA, 9 nt, Human
cccagcucc

SEQ ID NO: 1572113 - RNA, 16 nt, Human
cccaggugauauuuuu

SEQ ID NO: 1572114 - RNA, 12 nt, Human
cccaggggccgg

SEQ ID NO: 1572115 - RNA, 15 nt, Human
ccacaggcuuaggga

SEQ ID NO: 1572116 - RNA, 18 nt, Human
ccacaggcuuagggacag

SEQ ID NO: 1572117 - RNA, 19 nt, Human
ccacaggcuuagggacagg

SEQ ID NO: 1572118 - RNA, 21 nt, Human
ccacaggcuuagggacaggac

SEQ ID NO: 1572119 - RNA, 20 nt, Human
ccuuuuuuugauauaugaaa

SEQ ID NO: 1572120 - RNA, 17 nt, Human
cccagcaugcaccacgg

SEQ ID NO: 1572121 - RNA, 19 nt, Human
cuugaauaaccaucugaaa

SEQ ID NO: 1572122 - RNA, 21 nt, Human
ccucaggagccgaagcccagg

SEQ ID NO: 1572123 - RNA, 17 nt, Human
ccaaauuaguacagaaa

SEQ ID NO: 1572124 - RNA, 21 nt, Human adenovirus E
ccucaggcggcagugguggcg

SEQ ID NO: 1572125 - RNA, 11 nt, Human adenovirus E
ggugugccccg

SEQ ID NO: 1572126 - RNA, 19 nt, Human adenovirus E
aacgugcagaccaaccugg

SEQ ID NO: 1572127 - RNA, 21 nt, Human adenovirus E
agcggcucgacuccguggccu

SEQ ID NO: 1572128 - RNA, 17 nt, Human adenovirus E
ccaagaagaggcagcag

SEQ ID NO: 1572129 - RNA, 13 nt, Human adenovirus E
cacagacugaacg

SEQ ID NO: 1572130 - RNA, 14 nt, Human adenovirus E
acccggacgugcag

SEQ ID NO: 1572131 - RNA, 17 nt, Human adenovirus E
uuagcgcucuaguuuuu

SEQ ID NO: 1572132 - RNA, 14 nt, Human adenovirus E
ucgacgccaucagc

SEQ ID NO: 1572133 - RNA, 17 nt, Human adenovirus E
aucguggugcaggagcg

SEQ ID NO: 1572134 - RNA, 19 nt, Human adenovirus E
accugugggaccugcugga

SEQ ID NO: 1572135 - RNA, 15 nt, Human adenovirus E
cggagcacccccgcc

SEQ ID NO: 1572136 - RNA, 19 nt, Human adenovirus E
augguguacuaugccuucu

SEQ ID NO: 1572137 - RNA, 15 nt, Human adenovirus E
acagcugaggauugu

SEQ ID NO: 1572138 - RNA, 14 nt, Human adenovirus E
acgcacuaccacca

SEQ ID NO: 1572139 - RNA, 18 nt, Human adenovirus E
gucuccacguuccacaca

SEQ ID NO: 1572140 - RNA, 21 nt, Human adenovirus E
ggucgaguuggaaggcgacaa

SEQ ID NO: 1572141 - RNA, 16 nt, Human adenovirus E
ccacagccggcgcuuc

SEQ ID NO: 1572142 - RNA, 13 nt, Human adenovirus E
ccacaccacagcu

SEQ ID NO: 1572143 - RNA, 17 nt, Human adenovirus E
cgggguuucuucuuggg

SEQ ID NO: 1572144 - RNA, 23 nt, Human adenovirus E
ccagcaccaggcaggccacgggg

SEQ ID NO: 1572145 - RNA, 14 nt, Human adenovirus E
uuggcauuguuuuu

SEQ ID NO: 1572146 - RNA, 20 nt, Human adenovirus E
ucauccuggccguguugcuc

SEQ ID NO: 1572147 - RNA, 13 nt, Human adenovirus E
ugccugcgccgcu

SEQ ID NO: 1572148 - RNA, 14 nt, Human adenovirus E
agggacucccucag

SEQ ID NO: 1572149 - RNA, 18 nt, Human adenovirus E
ugagguacaugggcauga

SEQ ID NO: 1572150 - RNA, 14 nt, Human adenovirus E
aauuuuuaagaaaa

SEQ ID NO: 1572151 - RNA, 15 nt, Human adenovirus E
ggcagugguggcggg

SEQ ID NO: 1572152 - RNA, 16 nt, Human adenovirus E
uggaagaagcagccgc

SEQ ID NO: 1572153 - RNA, 23 nt, Human adenovirus E
cgcaugcggaucucgcucagguc

SEQ ID NO: 1572154 - RNA, 19 nt, Human adenovirus E
aguucgccccccggcggcg

SEQ ID NO: 1572155 - RNA, 13 nt, Human adenovirus E
cugcggcgcggcc

SEQ ID NO: 1572156 - RNA, 20 nt, Human adenovirus E
uagcuuuauuaaagauguga

SEQ ID NO: 1572157 - RNA, 19 nt, Human adenovirus E
gccgagacgaugggcaggc

SEQ ID NO: 1572158 - RNA, 20 nt, Human adenovirus E
gagcuccucguaggugagcu

SEQ ID NO: 1572159 - RNA, 12 nt, Human adenovirus E
uucgaccccguc

SEQ ID NO: 1572160 - RNA, 14 nt, Human adenovirus E
aggacgccgaggcu

SEQ ID NO: 1572161 - RNA, 17 nt, Human adenovirus E
agcaccaggcaggccac

SEQ ID NO: 1572162 - RNA, 20 nt, Human adenovirus E
caggagcggcgaggagcccg

SEQ ID NO: 1572163 - RNA, 14 nt, Human adenovirus E
acggcuccccgcgc

SEQ ID NO: 1572164 - RNA, 13 nt, Human adenovirus E
ccccauagccagc

SEQ ID NO: 1572165 - RNA, 21 nt, Human adenovirus E
  misc_feature (7)..(7): n is a, c, g, or u
ccaaccnuacuuuuuccaccc

SEQ ID NO: 1572166 - RNA, 22 nt, Human adenovirus E
gaccuggugaacauucugcaga

SEQ ID NO: 1572167 - RNA, 22 nt, Human adenovirus E
uggaagacguaugcgcaggagc

SEQ ID NO: 1572168 - RNA, 14 nt, Human adenovirus E
gggcgugccccagg

SEQ ID NO: 1572169 - RNA, 16 nt, Human adenovirus E
caacaucuccuucacc

SEQ ID NO: 1572170 - RNA, 16 nt, Human adenovirus E
aggugacccugggccu

SEQ ID NO: 1572171 - RNA, 16 nt, Human adenovirus E
cgaggaggaggcagag

SEQ ID NO: 1572172 - RNA, 15 nt, Human adenovirus E
cagcugcaccacgcu

SEQ ID NO: 1572173 - RNA, 17 nt, Human adenovirus E
ggcgcugcagagccagc

SEQ ID NO: 1572174 - RNA, 19 nt, Human adenovirus E
ucgagggucuccuggauga

SEQ ID NO: 1572175 - RNA, 14 nt, Human adenovirus E
aggagauggaggaa

SEQ ID NO: 1572176 - RNA, 22 nt, Human adenovirus E
gcggagacccugcgcaaggucg

SEQ ID NO: 1572177 - RNA, 18 nt, Human adenovirus E
caagaacagccagagcag

SEQ ID NO: 1572178 - RNA, 18 nt, Human adenovirus E
agggggcgauccuggccc

SEQ ID NO: 1572179 - RNA, 20 nt, Human adenovirus E
ucgagagccacaccacagcu

SEQ ID NO: 1572180 - RNA, 13 nt, Human adenovirus E
cggacuuccgugu

SEQ ID NO: 1572181 - RNA, 20 nt, Human adenovirus E
guagcuccauugcagggccu

SEQ ID NO: 1572182 - RNA, 15 nt, Human adenovirus E
cggcggcggcgaugc

SEQ ID NO: 1572183 - RNA, 14 nt, Human adenovirus E
aggcguggaacagc

SEQ ID NO: 1572184 - RNA, 15 nt, Human adenovirus E
ggcccggcaggccac

SEQ ID NO: 1572185 - RNA, 19 nt, Human adenovirus E
accacagggccagcaccgc

SEQ ID NO: 1572186 - RNA, 17 nt, Human adenovirus E
ccgcuacaacagcacca

SEQ ID NO: 1572187 - RNA, 13 nt, Human adenovirus E
cucccagagcugg

SEQ ID NO: 1572188 - RNA, 16 nt, Human adenovirus E
gcgucgccggcggcgc

SEQ ID NO: 1572189 - RNA, 21 nt, Human adenovirus E
cgcuguccacgagcgccagcu

SEQ ID NO: 1572190 - RNA, 12 nt, Human adenovirus E
aagccacccuga

SEQ ID NO: 1572191 - RNA, 15 nt, Human adenovirus E
gaugaggcgugcgua

SEQ ID NO: 1572192 - RNA, 16 nt, Human adenovirus E
cucacuaccaauaaca

SEQ ID NO: 1572193 - RNA, 22 nt, Human adenovirus E
agcgaaccccgcagaacagggc

SEQ ID NO: 1572194 - RNA, 23 nt, Human adenovirus E
gagcgccucggccgcguggccuu

SEQ ID NO: 1572195 - RNA, 15 nt, Human adenovirus E
gcugacguccugcag

SEQ ID NO: 1572196 - RNA, 17 nt, Human adenovirus E
agcugauggugcccaag

SEQ ID NO: 1572197 - RNA, 13 nt, Human adenovirus E
acaccuggcagac

SEQ ID NO: 1572198 - RNA, 16 nt, Human adenovirus E
uauguuggagcaacau

SEQ ID NO: 1572199 - RNA, 19 nt, Human adenovirus E
gcccgguuccacgcggggc

SEQ ID NO: 1572200 - RNA, 17 nt, Human adenovirus E
gaagaucgcggagaugg

SEQ ID NO: 1572201 - RNA, 20 nt, Human adenovirus E
gaucaucgccuugugcaugg

SEQ ID NO: 1572202 - RNA, 16 nt, Human adenovirus E
ggcagcccagccgccg

SEQ ID NO: 1572203 - RNA, 18 nt, Human adenovirus E
cgaccucauuuuccccga

SEQ ID NO: 1572204 - RNA, 17 nt, Human adenovirus E
gagcgugaugcagcagg

SEQ ID NO: 1572205 - RNA, 21 nt, Human adenovirus E
ccgugcggugagcgccagcag

SEQ ID NO: 1572206 - RNA, 17 nt, Human adenovirus E
cggccuuguaggcgcag

SEQ ID NO: 1572207 - RNA, 18 nt, Human adenovirus E
aucuccaacguggagcug

SEQ ID NO: 1572208 - RNA, 22 nt, Human adenovirus E
caggccgucuacucgcagcagc

SEQ ID NO: 1572209 - RNA, 14 nt, Human adenovirus E
cagcccuuccagga

SEQ ID NO: 1572210 - RNA, 19 nt, Human adenovirus E
cagaacgugcugcacacca

SEQ ID NO: 1572211 - RNA, 22 nt, Human adenovirus E
gccgggguucuacacgggcgag

SEQ ID NO: 1572212 - RNA, 14 nt, Human adenovirus E
accgcucccuggcc

SEQ ID NO: 1572213 - RNA, 16 nt, Human adenovirus E
ucacccgccccgcccc

SEQ ID NO: 1572214 - RNA, 17 nt, Human adenovirus E
cgccgaacacucgugcu

SEQ ID NO: 1572215 - RNA, 23 nt, Human adenovirus E
augugaauguuacugaggggggc

SEQ ID NO: 1572216 - RNA, 14 nt, Human adenovirus E
ccgcggugcuccuc

SEQ ID NO: 1572217 - RNA, 22 nt, Human adenovirus E
acccagccagaugaugcaauuu

SEQ ID NO: 1572218 - RNA, 19 nt, Human adenovirus E
cguaagcagugcucaggug

SEQ ID NO: 1572219 - RNA, 18 nt, Human adenovirus E
cgccagcuccuccucggc

SEQ ID NO: 1572220 - RNA, 19 nt, Human adenovirus E
ugcccuucaucaacccccc

SEQ ID NO: 1572221 - RNA, 21 nt, Human adenovirus E
cccugcgguggugaaggagga

SEQ ID NO: 1572222 - RNA, 24 nt, Human adenovirus E
cgcaccgaggugccccucagcgug

SEQ ID NO: 1572223 - RNA, 22 nt, Human adenovirus E
cuaugagaaaagcaaggaggau

SEQ ID NO: 1572224 - RNA, 23 nt, Human adenovirus E
gccccgcagcagucgcugccgcc

SEQ ID NO: 1572225 - RNA, 23 nt, Human adenovirus E
gcggcgcgagcugagcgaccagg

SEQ ID NO: 1572226 - RNA, 19 nt, Human adenovirus E
cucagucucaaguccagca

SEQ ID NO: 1572227 - RNA, 17 nt, Human adenovirus E
aggcguccgcgccgcag

SEQ ID NO: 1572228 - RNA, 21 nt, Human adenovirus E
ccucggcguuggccaucccga

SEQ ID NO: 1572229 - RNA, 18 nt, Human adenovirus E
ccugaacgccugcugggc

SEQ ID NO: 1572230 - RNA, 14 nt, Human adenovirus E
acgagcagcuggcc

SEQ ID NO: 1572231 - RNA, 12 nt, Human adenovirus E
cguaggugagcu

SEQ ID NO: 1572232 - RNA, 22 nt, Human adenovirus E
ccauccuggaggccguggugcc

SEQ ID NO: 1572233 - RNA, 20 nt, Human adenovirus E
cucgaccgcaccgaggugcc

SEQ ID NO: 1572234 - RNA, 16 nt, Human adenovirus E
ccaccguggugcagaa

SEQ ID NO: 1572235 - RNA, 12 nt, Human adenovirus E
cacaggcagcaa

SEQ ID NO: 1572236 - RNA, 23 nt, Human adenovirus E
acauggaauacaccacccucucc

SEQ ID NO: 1572237 - RNA, 13 nt, Human adenovirus E
cacacgcccagca

SEQ ID NO: 1572238 - RNA, 15 nt, Human adenovirus E
caacuccuccuccag

SEQ ID NO: 1572239 - RNA, 16 nt, Human adenovirus E
ggcacgacaggcagcg

SEQ ID NO: 1572240 - RNA, 15 nt, Human adenovirus E
agucgguccacagcu

SEQ ID NO: 1572241 - RNA, 15 nt, Human adenovirus E
cucaggcagaggagg

SEQ ID NO: 1572242 - RNA, 18 nt, Human adenovirus E
cauggagacucagccauc

SEQ ID NO: 1572243 - RNA, 20 nt, Human adenovirus E
guccacugucgagagccaca

SEQ ID NO: 1572244 - RNA, 20 nt, Human adenovirus E
cuccaagucugugccacccu

SEQ ID NO: 1572245 - RNA, 19 nt, Human adenovirus E
gugugccgcgguccuccuc

SEQ ID NO: 1572246 - RNA, 16 nt, Human adenovirus E
cugggaccccgugacc

SEQ ID NO: 1572247 - RNA, 18 nt, Human adenovirus E
cccgcgccgacgcccuuu

SEQ ID NO: 1572248 - RNA, 23 nt, Human adenovirus E
gaacuccauggcuugcagggucc

SEQ ID NO: 1572249 - RNA, 18 nt, Human adenovirus E
gugcagcagaagcguggg

SEQ ID NO: 1572250 - RNA, 20 nt, Human adenovirus E
gaggaucgcggcgaacgagc

SEQ ID NO: 1572251 - RNA, 21 nt, Human adenovirus E
gcacucccgcaucugcaccuc

SEQ ID NO: 1572252 - RNA, 13 nt, Human adenovirus E
uauuuuuccucca

SEQ ID NO: 1572253 - RNA, 15 nt, Human adenovirus E
uccagcgcagccagg

SEQ ID NO: 1572254 - RNA, 18 nt, Human adenovirus E
gaucccgaauaccacagc

SEQ ID NO: 1572255 - RNA, 13 nt, Human adenovirus E
cucuuccucuucu

SEQ ID NO: 1572256 - RNA, 18 nt, Human adenovirus E
accgucaccuccacagcc

SEQ ID NO: 1572257 - RNA, 23 nt, Human adenovirus E
ccgaaggcaacuucucggugacc

SEQ ID NO: 1572258 - RNA, 14 nt, Human adenovirus E
cagcacucaggcag

SEQ ID NO: 1572259 - RNA, 23 nt, Human adenovirus E
cgguggugucgcaucaggccccg

SEQ ID NO: 1572260 - RNA, 21 nt, Human adenovirus E
cucgggucggucagggagaug

SEQ ID NO: 1572261 - RNA, 14 nt, Human adenovirus E
cugcugcugcuggu

SEQ ID NO: 1572262 - RNA, 14 nt, Human adenovirus E
cuagaacagucagc

SEQ ID NO: 1572263 - RNA, 14 nt, Human adenovirus E
cggcgaggagcccg

SEQ ID NO: 1572264 - RNA, 21 nt, Human adenovirus E
cacaccaacaugcccaacgug

SEQ ID NO: 1572265 - RNA, 20 nt, Human adenovirus E
caggagcgcgggcugccgcu

SEQ ID NO: 1572266 - RNA, 13 nt, Human adenovirus E
gcccggcgagcgc

SEQ ID NO: 1572267 - RNA, 17 nt, Human adenovirus E
uagacagauggaagaca

SEQ ID NO: 1572268 - RNA, 19 nt, Human adenovirus E
ugguccuggugaccgugga

SEQ ID NO: 1572269 - RNA, 17 nt, Human adenovirus E
aggcggucccagagcuc

SEQ ID NO: 1572270 - RNA, 15 nt, Human adenovirus E
ucuucuuccuccucc

SEQ ID NO: 1572271 - RNA, 13 nt, Human adenovirus E
cacacacacagau

SEQ ID NO: 1572272 - RNA, 16 nt, Human adenovirus E
aggcggcggcaggacc

SEQ ID NO: 1572273 - RNA, 16 nt, Human adenovirus E
ggccauccuggaggcc

SEQ ID NO: 1572274 - RNA, 19 nt, Human adenovirus E
cguccucgcuguccuggcu

SEQ ID NO: 1572275 - RNA, 17 nt, Human adenovirus E
aggagcuuggcgaugga

SEQ ID NO: 1572276 - RNA, 18 nt, Human adenovirus E
accacagcaacuuccuga

SEQ ID NO: 1572277 - RNA, 23 nt, Human adenovirus E
aggcacuacaaugcucagucuca

SEQ ID NO: 1572278 - RNA, 20 nt, Human adenovirus E
gcccgguuccacgcggggcg

SEQ ID NO: 1572279 - RNA, 9 nt, Human adenovirus E
ccagcagca

SEQ ID NO: 1572280 - RNA, 13 nt, Human adenovirus E
gcaccggagcacc

SEQ ID NO: 1572281 - RNA, 17 nt, Human adenovirus E
uguuccugguggugcag

SEQ ID NO: 1572282 - RNA, 14 nt, Human adenovirus E
cggucggggaccgc

SEQ ID NO: 1572283 - RNA, 16 nt, Human adenovirus E
cuuccauucggggaag

SEQ ID NO: 1572284 - RNA, 23 nt, Human adenovirus E
cugaaucuaauacuaccacccac

SEQ ID NO: 1572285 - RNA, 16 nt, Human adenovirus E
cgcaaucaggcagcac

SEQ ID NO: 1572286 - RNA, 17 nt, Human adenovirus E
gggugacaaagagcugu

SEQ ID NO: 1572287 - RNA, 22 nt, Human adenovirus E
guggccaccucgccgcgcaggg

SEQ ID NO: 1572288 - RNA, 22 nt, Human adenovirus E
gguguugcuuucgauuguggga

SEQ ID NO: 1572289 - RNA, 20 nt, Human adenovirus E
cccacggcccucagcaucag

SEQ ID NO: 1572290 - RNA, 23 nt, Human adenovirus E
ugcugaaaaagggccgcgggguc

SEQ ID NO: 1572291 - RNA, 19 nt, Human adenovirus E
ccccagaugggccuggccg

SEQ ID NO: 1572292 - RNA, 20 nt, Human adenovirus E
caaccacgugcgcacccuga

SEQ ID NO: 1572293 - RNA, 19 nt, Human adenovirus E
cgagcagcuggcccggugg

SEQ ID NO: 1572294 - RNA, 15 nt, Human adenovirus E
aucccagcuggauca

SEQ ID NO: 1572295 - RNA, 18 nt, Human adenovirus E
cgagagcgugaugcagca

SEQ ID NO: 1572296 - RNA, 22 nt, Human adenovirus E
gaaugagcagagucaggcuggg

SEQ ID NO: 1572297 - RNA, 12 nt, Human adenovirus E
auuacacagaca

SEQ ID NO: 1572298 - RNA, 16 nt, Human adenovirus E
uccugcacaggcagca

SEQ ID NO: 1572299 - RNA, 16 nt, Human adenovirus E
ccggcggcgcacgggc

SEQ ID NO: 1572300 - RNA, 13 nt, Human adenovirus E
accacuacagccu

SEQ ID NO: 1572301 - RNA, 14 nt, Human adenovirus E
gagggucuccugga

SEQ ID NO: 1572302 - RNA, 12 nt, Human adenovirus E
uuaccucugcuc

SEQ ID NO: 1572303 - RNA, 22 nt, Human adenovirus E
cgcgcgccgggcggcaggggcg

SEQ ID NO: 1572304 - RNA, 23 nt, Human adenovirus E
cgagguguaccaguccgggccgg

SEQ ID NO: 1572305 - RNA, 21 nt, Human adenovirus E
caaggccgagcugucggccug

SEQ ID NO: 1572306 - RNA, 21 nt, Human adenovirus E
cgaguugaaccucuucucgcc

SEQ ID NO: 1572307 - RNA, 22 nt, Human adenovirus E
caucauaguugugguccugggu

SEQ ID NO: 1572308 - RNA, 15 nt, Human adenovirus E
ggcguacaugccgca

SEQ ID NO: 1572309 - RNA, 16 nt, Human adenovirus E
uagaaagccuggugga

SEQ ID NO: 1572310 - RNA, 14 nt, Human adenovirus E
gcacuaccucuuca

SEQ ID NO: 1572311 - RNA, 14 nt, Human adenovirus E
ccugcaugccaacc

SEQ ID NO: 1572312 - RNA, 16 nt, Human adenovirus E
uggcagacgggcaugg

SEQ ID NO: 1572313 - RNA, 13 nt, Human adenovirus E
ucuccccccgcac

SEQ ID NO: 1572314 - RNA, 21 nt, Human adenovirus E
gagcuugggggcgaggaagac

SEQ ID NO: 1572315 - RNA, 19 nt, Human adenovirus E
guacaggagccauaauggc

SEQ ID NO: 1572316 - RNA, 14 nt, Human adenovirus E
caggaacugaaagu

SEQ ID NO: 1572317 - RNA, 18 nt, Human adenovirus E
cgucaaggaugcgcugcu

SEQ ID NO: 1572318 - RNA, 12 nt, Human adenovirus E
gccgcccaggac

SEQ ID NO: 1572319 - RNA, 22 nt, Human adenovirus E
guggcagcggccgaggcggcug

SEQ ID NO: 1572320 - RNA, 22 nt, Human adenovirus E
gcccccgcgguaccuggcgccu

SEQ ID NO: 1572321 - RNA, 13 nt, Human adenovirus E
uuccuccacccuc

SEQ ID NO: 1572322 - RNA, 13 nt, Human adenovirus E
aucagcgccccgc

SEQ ID NO: 1572323 - RNA, 15 nt, Human adenovirus E
cugaacgggggcgcc

SEQ ID NO: 1572324 - RNA, 16 nt, Human adenovirus E
gcugcugguggccccc

SEQ ID NO: 1572325 - RNA, 17 nt, Human adenovirus E
agggcgaaagugucccu

SEQ ID NO: 1572326 - RNA, 17 nt, Human adenovirus E
aaugcaaauuccaagaa

SEQ ID NO: 1572327 - RNA, 20 nt, Human adenovirus E
gcaaggaggaugcagcagcu

SEQ ID NO: 1572328 - RNA, 12 nt, Human adenovirus E
cugcccuggaga

SEQ ID NO: 1572329 - RNA, 12 nt, Human adenovirus E
ggggcgggggag

SEQ ID NO: 1572330 - RNA, 17 nt, Human adenovirus E
caggaaauuccccagcc

SEQ ID NO: 1572331 - RNA, 16 nt, Human adenovirus E
gaggagcuggcagugc

SEQ ID NO: 1572332 - RNA, 18 nt, Human adenovirus E
accacaauuacucacacc

SEQ ID NO: 1572333 - RNA, 15 nt, Human adenovirus E
cagcguggaggagcu

SEQ ID NO: 1572334 - RNA, 17 nt, Human adenovirus E
cagcaguuugggcagcg

SEQ ID NO: 1572335 - RNA, 20 nt, Human adenovirus E
ugagccgcgcccugggccag

SEQ ID NO: 1572336 - RNA, 13 nt, Human adenovirus E
ucaugcccgccuc

SEQ ID NO: 1572337 - RNA, 13 nt, Human adenovirus E
ccagcgcgugacc

SEQ ID NO: 1572338 - RNA, 16 nt, Human adenovirus E
acccaacauacuuuua

SEQ ID NO: 1572339 - RNA, 15 nt, Human adenovirus E
acgcucugcaaggag

SEQ ID NO: 1572340 - RNA, 18 nt, Human adenovirus E
gccagaucguccagggca

SEQ ID NO: 1572341 - RNA, 20 nt, Human adenovirus E
ggccucgacucccaccugcu

SEQ ID NO: 1572342 - RNA, 20 nt, Human adenovirus E
gaccaccguggugcagaaca

SEQ ID NO: 1572343 - RNA, 23 nt, Human adenovirus E
cgcgaggccaucggccaggcgca

SEQ ID NO: 1572344 - RNA, 20 nt, Human adenovirus E
auacucaccaaggccauggc

SEQ ID NO: 1572345 - RNA, 19 nt, Human adenovirus E
cagcagagucgggggcagg

SEQ ID NO: 1572346 - RNA, 20 nt, Human adenovirus E
cuccagugccuucucuagca

SEQ ID NO: 1572347 - RNA, 20 nt, Human adenovirus E
gacaugcuuuuggucuccac

SEQ ID NO: 1572348 - RNA, 19 nt, Human adenovirus E
aaugagcagagucaggcug

SEQ ID NO: 1572349 - RNA, 23 nt, Human adenovirus E
agcccgaggucaaggugcggccc

SEQ ID NO: 1572350 - RNA, 19 nt, Human adenovirus E
uccugcguuacgugcagca

SEQ ID NO: 1572351 - RNA, 22 nt, Human adenovirus E
caggagaugcaauugaaagcaa

SEQ ID NO: 1572352 - RNA, 14 nt, Human adenovirus E
agaaagcaagcagc

SEQ ID NO: 1572353 - RNA, 13 nt, Human adenovirus E
uccacccaccaca

SEQ ID NO: 1572354 - RNA, 20 nt, Human adenovirus E
cagcguggaggagcucagcc

SEQ ID NO: 1572355 - RNA, 17 nt, Human adenovirus E
ugcggggggagaugagg

SEQ ID NO: 1572356 - RNA, 18 nt, Human adenovirus E
gagagacguucccggugg

SEQ ID NO: 1572357 - RNA, 19 nt, Human adenovirus E
gcaggggcggcaggggcac

SEQ ID NO: 1572358 - RNA, 19 nt, Human adenovirus E
cucgagugccacugccgcu

SEQ ID NO: 1572359 - RNA, 16 nt, Human adenovirus E
uagagcuugggggcga

SEQ ID NO: 1572360 - RNA, 22 nt, Human adenovirus E
ccuggcgccuacggaggggcgg

SEQ ID NO: 1572361 - RNA, 22 nt, Human adenovirus E
cgggccuuggaggcggcggcag

SEQ ID NO: 1572362 - RNA, 16 nt, Human adenovirus E
ugagcgaccaggagcu

SEQ ID NO: 1572363 - RNA, 20 nt, Human adenovirus E
ggcgcgagcgggucggagag

SEQ ID NO: 1572364 - RNA, 14 nt, Human adenovirus E
gccgcaccgcuccc

SEQ ID NO: 1572365 - RNA, 17 nt, Human adenovirus E
cuccgcggccggccauu

SEQ ID NO: 1572366 - RNA, 22 nt, Human adenovirus E
ggccugguguacaacgcgcugc

SEQ ID NO: 1572367 - RNA, 14 nt, Human adenovirus E
cgucaccugcggcg

SEQ ID NO: 1572368 - RNA, 12 nt, Human adenovirus E
cggucagggaga

SEQ ID NO: 1572369 - RNA, 16 nt, Human adenovirus E
cugcgcaacggccugc

SEQ ID NO: 1572370 - RNA, 15 nt, Human adenovirus E
ccacggcccucagca

SEQ ID NO: 1572371 - RNA, 13 nt, Human adenovirus E
cgcgcccugggcc

SEQ ID NO: 1572372 - RNA, 18 nt, Human adenovirus E
gccgagacgaugggcagg

SEQ ID NO: 1572373 - RNA, 18 nt, Human adenovirus E
cgcuccggaauccugccc

SEQ ID NO: 1572374 - RNA, 14 nt, Human adenovirus E
cacagaaccaccag

SEQ ID NO: 1572375 - RNA, 15 nt, Human adenovirus E
gcccccgcuggaggc

SEQ ID NO: 1572376 - RNA, 13 nt, Human adenovirus E
gccguggcccagc

SEQ ID NO: 1572377 - RNA, 13 nt, Human adenovirus E
agcuggagugccu

SEQ ID NO: 1572378 - RNA, 21 nt, Human adenovirus E
ugcuacagaaagcacagacug

SEQ ID NO: 1572379 - RNA, 16 nt, Human adenovirus E
agcuugcccucggccu

SEQ ID NO: 1572380 - RNA, 17 nt, Human adenovirus E
ggcgaguaccuggaaga

SEQ ID NO: 1572381 - RNA, 18 nt, Human adenovirus E
gcgcuguccggccgcgag

SEQ ID NO: 1572382 - RNA, 20 nt, Human adenovirus E
acguggccgcggccaaccug

SEQ ID NO: 1572383 - RNA, 20 nt, Human adenovirus E
caauaucacgaaaucauaug

SEQ ID NO: 1572384 - RNA, 19 nt, Human adenovirus E
gaacagcagucaggcagag

SEQ ID NO: 1572385 - RNA, 21 nt, Human adenovirus E
gucccccguugggcagggaga

SEQ ID NO: 1572386 - RNA, 15 nt, Human adenovirus E
cagcaaccugcuggg

SEQ ID NO: 1572387 - RNA, 16 nt, Human adenovirus E
uacacaugaucagcgg

SEQ ID NO: 1572388 - RNA, 17 nt, Human adenovirus E
ugggugcgcgacgccgc

SEQ ID NO: 1572389 - RNA, 16 nt, Human adenovirus E
uccaagaccccauagc

SEQ ID NO: 1572390 - RNA, 21 nt, Human adenovirus E
gcccacuuagcauuaccacac

SEQ ID NO: 1572391 - RNA, 22 nt, Human adenovirus E
gcucgcgcagagcgcccuccac

SEQ ID NO: 1572392 - RNA, 15 nt, Human adenovirus E
gucgccgcaccgccg

SEQ ID NO: 1572393 - RNA, 15 nt, Human adenovirus E
uccuagaacagucag

SEQ ID NO: 1572394 - RNA, 21 nt, Human adenovirus E
aaccugacacaccaccacagc

SEQ ID NO: 1572395 - RNA, 21 nt, Human adenovirus E
ugaagcacaaaauucucaggu

SEQ ID NO: 1572396 - RNA, 17 nt, Human adenovirus E
agcgggggggaggacgc

SEQ ID NO: 1572397 - RNA, 20 nt, Human adenovirus E
aaaagcgcccgaggaagcaa

SEQ ID NO: 1572398 - RNA, 15 nt, Human adenovirus E
ugcuaguccccagag

SEQ ID NO: 1572399 - RNA, 23 nt, Human adenovirus E
  misc_feature (7)..(7): n is a, c, g, or u
cagaagnuggaagacgugcugga

SEQ ID NO: 1572400 - RNA, 16 nt, Human adenovirus E
caguacgugcaacaca

SEQ ID NO: 1572401 - RNA, 15 nt, Human adenovirus E
acaggcagcaaagcc

SEQ ID NO: 1572402 - RNA, 15 nt, Human adenovirus E
cccgucucucagcca

SEQ ID NO: 1572403 - RNA, 16 nt, Human adenovirus E
aagccagccaugauaa

SEQ ID NO: 1572404 - RNA, 20 nt, Human adenovirus E
auggcaugcgaguuggagga

SEQ ID NO: 1572405 - RNA, 16 nt, Human adenovirus E
gaagucugcccgcagg

SEQ ID NO: 1572406 - RNA, 20 nt, Human adenovirus E
cgcuguugagacccgagcgg

SEQ ID NO: 1572407 - RNA, 18 nt, Human adenovirus E
gaggugacccugggccug

SEQ ID NO: 1572408 - RNA, 14 nt, Human adenovirus E
agaacagccagagc

SEQ ID NO: 1572409 - RNA, 20 nt, Human adenovirus E
ucuccaccauuaaauauacu

SEQ ID NO: 1572410 - RNA, 13 nt, Human adenovirus E
caucaggccccgc

SEQ ID NO: 1572411 - RNA, 15 nt, Human adenovirus E
cucgcacuccacgag

SEQ ID NO: 1572412 - RNA, 17 nt, Human adenovirus E
cugaaacacaaaauaaa

SEQ ID NO: 1572413 - RNA, 20 nt, Human adenovirus E
gugcgcuucuuguaggcggg

SEQ ID NO: 1572414 - RNA, 17 nt, Human adenovirus E
ucauguacgccagcaac

SEQ ID NO: 1572415 - RNA, 17 nt, Human adenovirus E
gaguccaaccugggauc

SEQ ID NO: 1572416 - RNA, 21 nt, Human adenovirus E
cgucuggugcggcgggcgcag

SEQ ID NO: 1572417 - RNA, 23 nt, Human adenovirus E
cagcgccccgcauccccaaauuc

SEQ ID NO: 1572418 - RNA, 19 nt, Human adenovirus E
gcgccgcagugggcgcaga

SEQ ID NO: 1572419 - RNA, 22 nt, Human adenovirus E
gccugcaagaucuccaacgugg

SEQ ID NO: 1572420 - RNA, 13 nt, Human adenovirus E
ccgccccgccgcc

SEQ ID NO: 1572421 - RNA, 21 nt, Human adenovirus E
gggauggguaagcgcggaggc

SEQ ID NO: 1572422 - RNA, 13 nt, Human adenovirus E
ugacccugggccu

SEQ ID NO: 1572423 - RNA, 15 nt, Human adenovirus E
cagcaaggcguggaa

SEQ ID NO: 1572424 - RNA, 21 nt, Human adenovirus E
ggcaggccacggggucuccgg

SEQ ID NO: 1572425 - RNA, 16 nt, Human adenovirus E
caagagauggaggaau

SEQ ID NO: 1572426 - RNA, 11 nt, Human adenovirus E
ggcggcggcgc

SEQ ID NO: 1572427 - RNA, 22 nt, Human adenovirus E
gagcucugcaagcuccugcaga

SEQ ID NO: 1572428 - RNA, 21 nt, Human adenovirus E
cucgccaucugcccccaccgc

SEQ ID NO: 1572429 - RNA, 14 nt, Human adenovirus E
uaaguacucuuuca

SEQ ID NO: 1572430 - RNA, 22 nt, Human adenovirus E
ggcgcaaguacggcgcggccag

SEQ ID NO: 1572431 - RNA, 14 nt, Human adenovirus E
uagagccucgggaa

SEQ ID NO: 1572432 - RNA, 18 nt, Human adenovirus E
cagcacucaggcagagga

SEQ ID NO: 1572433 - RNA, 16 nt, Human adenovirus E
gcacaaaauucucagg

SEQ ID NO: 1572434 - RNA, 20 nt, Human adenovirus E
gccucuguuaaauuuuugcu

SEQ ID NO: 1572435 - RNA, 13 nt, Human adenovirus E
ccgcugaacgaag

SEQ ID NO: 1572436 - RNA, 14 nt, Human adenovirus E
gccaggugaggucg

SEQ ID NO: 1572437 - RNA, 17 nt, Human adenovirus E
aauaauacuuucauuuu

SEQ ID NO: 1572438 - RNA, 17 nt, Human adenovirus E
cgcgcccugggccagga

SEQ ID NO: 1572439 - RNA, 22 nt, Human adenovirus E
cgacccccggucccccacccag

SEQ ID NO: 1572440 - RNA, 20 nt, Human adenovirus E
cucgaucaugugcuccuucu

SEQ ID NO: 1572441 - RNA, 12 nt, Human adenovirus E
agcagaaggggg

SEQ ID NO: 1572442 - RNA, 18 nt, Human adenovirus E
ggucucccgcaagacccc

SEQ ID NO: 1572443 - RNA, 19 nt, Human adenovirus E
gaacagccagagcaggaag

SEQ ID NO: 1572444 - RNA, 20 nt, Human adenovirus E
gggggccacgagccggggca

SEQ ID NO: 1572445 - RNA, 17 nt, Human adenovirus E
cagcgcccugcgccuga

SEQ ID NO: 1572446 - RNA, 20 nt, Human adenovirus E
ccuggcuccgcgacacggca

SEQ ID NO: 1572447 - RNA, 21 nt, Human adenovirus E
agcuccaguguaagccccaca

SEQ ID NO: 1572448 - RNA, 16 nt, Human adenovirus E
ggccaacgccagucca

SEQ ID NO: 1572449 - RNA, 15 nt, Human adenovirus E
cgaaguccuccccag

SEQ ID NO: 1572450 - RNA, 17 nt, Human adenovirus E
cauggaccaggugcuca

SEQ ID NO: 1572451 - RNA, 14 nt, Human adenovirus E
cccauagccagccg

SEQ ID NO: 1572452 - RNA, 15 nt, Human adenovirus E
gguuccaccgcgagu

SEQ ID NO: 1572453 - RNA, 23 nt, Human adenovirus E
cgucuggugcggcgggcgcagca

SEQ ID NO: 1572454 - RNA, 14 nt, Human adenovirus E
cguggccuggaggc

SEQ ID NO: 1572455 - RNA, 15 nt, Human adenovirus E
cgauacgggugaugg

SEQ ID NO: 1572456 - RNA, 18 nt, Human adenovirus E
aucguggugcaggagcgc

SEQ ID NO: 1572457 - RNA, 22 nt, Human adenovirus E
gacgacccgggcaaccuggaag

SEQ ID NO: 1572458 - RNA, 15 nt, Human adenovirus E
gggcagggagagggc

SEQ ID NO: 1572459 - RNA, 15 nt, Human adenovirus E
cacaccaccacagca

SEQ ID NO: 1572460 - RNA, 14 nt, Human adenovirus E
ucaaggacaaagug

SEQ ID NO: 1572461 - RNA, 15 nt, Human adenovirus E
cccggccacuacccg

SEQ ID NO: 1572462 - RNA, 15 nt, Human adenovirus E
cagggauaggagcuc

SEQ ID NO: 1572463 - RNA, 16 nt, Human adenovirus E
ccccgccaugcgcgcg

SEQ ID NO: 1572464 - RNA, 23 nt, Human adenovirus E
gcaccucggcccgguuguugaug

SEQ ID NO: 1572465 - RNA, 19 nt, Human adenovirus E
cucgcugaacuaccagaac

SEQ ID NO: 1572466 - RNA, 15 nt, Human adenovirus E
acggcccucagcauc

SEQ ID NO: 1572467 - RNA, 21 nt, Human adenovirus E
caagaaugaacacuguauccc

SEQ ID NO: 1572468 - RNA, 15 nt, Human adenovirus E
acggucgagcugacc

SEQ ID NO: 1572469 - RNA, 16 nt, Human adenovirus E
cauuacacagacaacc

SEQ ID NO: 1572470 - RNA, 13 nt, Human adenovirus E
ucaggcagcaccg

SEQ ID NO: 1572471 - RNA, 20 nt, Human adenovirus E
cccaugaucaagcccagcac

SEQ ID NO: 1572472 - RNA, 19 nt, Human adenovirus E
gguuagaguuuggaagcag

SEQ ID NO: 1572473 - RNA, 13 nt, Human adenovirus E
cucaccaaggcca

SEQ ID NO: 1572474 - RNA, 19 nt, Human adenovirus E
cgagugccacugccgcugc

SEQ ID NO: 1572475 - RNA, 18 nt, Human adenovirus E
ggccgucuacucgcagca

SEQ ID NO: 1572476 - RNA, 11 nt, Human adenovirus E
acccagccaga

SEQ ID NO: 1572477 - RNA, 15 nt, Human adenovirus E
aaguccagcaaagcg

SEQ ID NO: 1572478 - RNA, 12 nt, Human adenovirus E
aauaccacagcg

SEQ ID NO: 1572479 - RNA, 19 nt, Human adenovirus E
aucaugccugauggcucug

SEQ ID NO: 1572480 - RNA, 13 nt, Human adenovirus E
gucaggccguccu

SEQ ID NO: 1572481 - RNA, 23 nt, Human adenovirus E
cugcuggaggccaucgugcagaa

SEQ ID NO: 1572482 - RNA, 23 nt, Human adenovirus E
cgcggcuucaggcgccagcgccg

SEQ ID NO: 1572483 - RNA, 22 nt, Human adenovirus E
gacgccuuugugcccgcccagg

SEQ ID NO: 1572484 - RNA, 16 nt, Human adenovirus E
cugacggcgcagcugu

SEQ ID NO: 1572485 - RNA, 19 nt, Human adenovirus E
gaccgagcuccagcuccag

SEQ ID NO: 1572486 - RNA, 22 nt, Human adenovirus E
cucggacgauuggacccaggcc

SEQ ID NO: 1572487 - RNA, 19 nt, Human adenovirus E
cgugaucgaggacgucagc

SEQ ID NO: 1572488 - RNA, 21 nt, Human adenovirus E
cagcugggacuugccgcagcc

SEQ ID NO: 1572489 - RNA, 23 nt, Human adenovirus E
gcggccagccugcugaugcccaa

SEQ ID NO: 1572490 - RNA, 13 nt, Human adenovirus E
ggcgagggccugc

SEQ ID NO: 1572491 - RNA, 13 nt, Human adenovirus E
agugucuggagga

SEQ ID NO: 1572492 - RNA, 18 nt, Human adenovirus E
gguucauguugugcagga

SEQ ID NO: 1572493 - RNA, 23 nt, Human adenovirus E
ccgugcggugagcgccagcaggc

SEQ ID NO: 1572494 - RNA, 19 nt, Human adenovirus E
gggucuaccucgaccccca

SEQ ID NO: 1572495 - RNA, 14 nt, Human adenovirus E
acauaaagcuuacc

SEQ ID NO: 1572496 - RNA, 17 nt, Human adenovirus E
gccgccgggccuuggag

SEQ ID NO: 1572497 - RNA, 21 nt, Human adenovirus E
ucucaguuuuuccaacaacac

SEQ ID NO: 1572498 - RNA, 16 nt, Human adenovirus E
ggcgacgagcucggcg

SEQ ID NO: 1572499 - RNA, 12 nt, Human adenovirus E
gcucgccacauc

SEQ ID NO: 1572500 - RNA, 15 nt, Human adenovirus E
cgaggugccccucag

SEQ ID NO: 1572501 - RNA, 23 nt, Human adenovirus E
cugggcauucgcaagaggcagcc

SEQ ID NO: 1572502 - RNA, 15 nt, Human adenovirus E
ccacaccacagcuac

SEQ ID NO: 1572503 - RNA, 15 nt, Human adenovirus E
ugaaacccuccgggc

SEQ ID NO: 1572504 - RNA, 14 nt, Human adenovirus E
guggagccacugcu

SEQ ID NO: 1572505 - RNA, 21 nt, Human adenovirus E
gcgagcugagcgaccaggagc

SEQ ID NO: 1572506 - RNA, 22 nt, Human adenovirus E
cugcaggugguaguugagggag

SEQ ID NO: 1572507 - RNA, 20 nt, Human adenovirus E
gagcgcucgcgguggggcgg

SEQ ID NO: 1572508 - RNA, 19 nt, Human adenovirus E
cccgucuccugccgcgcca

SEQ ID NO: 1572509 - RNA, 19 nt, Human adenovirus E
aucugggccuggucggcgu

SEQ ID NO: 1572510 - RNA, 21 nt, Human adenovirus E
ggaggccagcacccagaccau

SEQ ID NO: 1572511 - RNA, 16 nt, Human adenovirus E
uggcgggcggcgccac

SEQ ID NO: 1572512 - RNA, 18 nt, Human adenovirus E
gugauccggggcagaagc

SEQ ID NO: 1572513 - RNA, 13 nt, Human adenovirus E
cugacccugagcg

SEQ ID NO: 1572514 - RNA, 18 nt, Human adenovirus E
gccgcggcggugcccgag

SEQ ID NO: 1572515 - RNA, 14 nt, Human adenovirus E
cauucuacacuaaa

SEQ ID NO: 1572516 - RNA, 15 nt, Human adenovirus E
ccucgacccccagac

SEQ ID NO: 1572517 - RNA, 22 nt, Human adenovirus E
cagcugcgcgccuucaccucgc

SEQ ID NO: 1572518 - RNA, 14 nt, Human adenovirus E
gucugccugcuuau

SEQ ID NO: 1572519 - RNA, 11 nt, Human adenovirus E
accguggagcu

SEQ ID NO: 1572520 - RNA, 19 nt, Human adenovirus E
acgcgcccgcgcuugcugg

SEQ ID NO: 1572521 - RNA, 22 nt, Human adenovirus E
ggcgggggagaugagcugggcc

SEQ ID NO: 1572522 - RNA, 15 nt, Human adenovirus E
aacuuuuaauccaaa

SEQ ID NO: 1572523 - RNA, 19 nt, Human adenovirus E
cgaggaggaggcagaggag

SEQ ID NO: 1572524 - RNA, 20 nt, Human adenovirus E
aacccaccccacccagugag

SEQ ID NO: 1572525 - RNA, 21 nt, Human adenovirus E
cagcgcacucucgaggacgcc

SEQ ID NO: 1572526 - RNA, 21 nt, Human adenovirus E
ggccugcgucgccggcggcgc

SEQ ID NO: 1572527 - RNA, 22 nt, Human adenovirus E
guuccgcaccgaaggaagaggc

SEQ ID NO: 1572528 - RNA, 16 nt, Human adenovirus E
ugauuuaccccugcuu

SEQ ID NO: 1572529 - RNA, 13 nt, Human adenovirus E
ugauccuccacca

SEQ ID NO: 1572530 - RNA, 15 nt, Human adenovirus E
acugaaagucaagaa

SEQ ID NO: 1572531 - RNA, 17 nt, Human adenovirus E
ucagccaaucagcgccc

SEQ ID NO: 1572532 - RNA, 17 nt, Human adenovirus E
caucguggugcaggagc

SEQ ID NO: 1572533 - RNA, 23 nt, Human adenovirus E
agcggugugccgcgguccuccuc

SEQ ID NO: 1572534 - RNA, 23 nt, Human adenovirus E
cuugcgcaaguucgugcccgagg

SEQ ID NO: 1572535 - RNA, 17 nt, Human adenovirus E
cugcacgccgcaccgcu

SEQ ID NO: 1572536 - RNA, 16 nt, Human adenovirus E
cccugaaagugcugac

SEQ ID NO: 1572537 - RNA, 19 nt, Human adenovirus E
ucgccgcgcgugcccccca

SEQ ID NO: 1572538 - RNA, 13 nt, Human adenovirus E
caacaaaugccag

SEQ ID NO: 1572539 - RNA, 12 nt, Human adenovirus E
gcacggauacca

SEQ ID NO: 1572540 - RNA, 23 nt, Human adenovirus E
caagcagaaccuguucagagaca

SEQ ID NO: 1572541 - RNA, 13 nt, Human adenovirus E
ugucaugaugcag

SEQ ID NO: 1572542 - RNA, 13 nt, Human adenovirus E
gccgcggccgccg

SEQ ID NO: 1572543 - RNA, 16 nt, Human adenovirus E
gucuggugcggcgggc

SEQ ID NO: 1572544 - RNA, 18 nt, Human adenovirus E
guggcggugcaggccucu

SEQ ID NO: 1572545 - RNA, 21 nt, Human adenovirus E
gcuccugguucaccugcagca

SEQ ID NO: 1572546 - RNA, 18 nt, Human adenovirus E
caaggccauggcgaccag

SEQ ID NO: 1572547 - RNA, 17 nt, Human adenovirus E
gggccagacccagccag

SEQ ID NO: 1572548 - RNA, 14 nt, Human adenovirus E
agccuuuagacagc

SEQ ID NO: 1572549 - RNA, 20 nt, Human adenovirus E
cuccugguccugugaugugu

SEQ ID NO: 1572550 - RNA, 13 nt, Human adenovirus E
caucuccaacacg

SEQ ID NO: 1572551 - RNA, 23 nt, Human adenovirus E
gcuccugcagaagaacucaaggg

SEQ ID NO: 1572552 - RNA, 13 nt, Human adenovirus E
ccgcgcccaccga

SEQ ID NO: 1572553 - RNA, 14 nt, Human adenovirus E
augguacugaucug

SEQ ID NO: 1572554 - RNA, 22 nt, Human adenovirus E
cuaucucuuccucuucuugguc

SEQ ID NO: 1572555 - RNA, 17 nt, Human adenovirus E
ucauccucgaacgcucc

SEQ ID NO: 1572556 - RNA, 17 nt, Human adenovirus E
ggcgcuaaucaccgcua

SEQ ID NO: 1572557 - RNA, 20 nt, Human adenovirus E
cgguguucuuuuaacagaac

SEQ ID NO: 1572558 - RNA, 12 nt, Human adenovirus E
cccggcggcgcg

SEQ ID NO: 1572559 - RNA, 17 nt, Human adenovirus E
gagcagaccuaccagga

SEQ ID NO: 1572560 - RNA, 23 nt, Human adenovirus E
acgcacuaccaccacuacagccu

SEQ ID NO: 1572561 - RNA, 19 nt, Human adenovirus E
ugcagaaccccaccagcaa

SEQ ID NO: 1572562 - RNA, 15 nt, Human adenovirus E
cgccagacgccgcac

SEQ ID NO: 1572563 - RNA, 13 nt, Human adenovirus E
ggcuugcagaccg

SEQ ID NO: 1572564 - RNA, 12 nt, Human adenovirus E
cuacaagacccc

SEQ ID NO: 1572565 - RNA, 22 nt, Human adenovirus E
caccgcaacaacagcccccucc

SEQ ID NO: 1572566 - RNA, 20 nt, Human adenovirus E
uccagauaacuggacagaaa

SEQ ID NO: 1572567 - RNA, 16 nt, Human adenovirus E
gagacccgagcgggag

SEQ ID NO: 1572568 - RNA, 16 nt, Human adenovirus E
gcggccuugcgcaggg

SEQ ID NO: 1572569 - RNA, 14 nt, Human adenovirus E
acugcuaccugcug

SEQ ID NO: 1572570 - RNA, 16 nt, Human adenovirus E
gagaacagcagucagg

SEQ ID NO: 1572571 - RNA, 20 nt, Human adenovirus E
gccaacgugccccggggcca

SEQ ID NO: 1572572 - RNA, 22 nt, Human adenovirus E
ggugcaggagcgcgggcugccg

SEQ ID NO: 1572573 - RNA, 20 nt, Human adenovirus E
gcccggcgagcgcuccggca

SEQ ID NO: 1572574 - RNA, 19 nt, Human adenovirus E
augguagaauucaaggaca

SEQ ID NO: 1572575 - RNA, 17 nt, Human adenovirus E
gcuaguaccaaugagca

SEQ ID NO: 1572576 - RNA, 20 nt, Human adenovirus E
cggcagcggccaucgccagc

SEQ ID NO: 1572577 - RNA, 19 nt, Human adenovirus E
agcugagcgaccaggagcu

SEQ ID NO: 1572578 - RNA, 12 nt, Human adenovirus E
cagcaucaucug

SEQ ID NO: 1572579 - RNA, 20 nt, Human adenovirus E
gcuaccgccaaaaaucagac

SEQ ID NO: 1572580 - RNA, 13 nt, Human adenovirus E
ugacggugccggc

SEQ ID NO: 1572581 - RNA, 16 nt, Human adenovirus E
gaacuuuuugcugacc

SEQ ID NO: 1572582 - RNA, 16 nt, Human adenovirus E
cagaguuuggaagagc

SEQ ID NO: 1572583 - RNA, 22 nt, Human adenovirus E
ggcucgacuccguggccuggag

SEQ ID NO: 1572584 - RNA, 22 nt, Human adenovirus E
gcugcuggagcgcguggcccgc

SEQ ID NO: 1572585 - RNA, 23 nt, Human adenovirus E
cucaggggguccggguccaggga

SEQ ID NO: 1572586 - RNA, 15 nt, Human adenovirus E
cgccaguccagacug

SEQ ID NO: 1572587 - RNA, 16 nt, Human adenovirus E
gccgcuggcuccugga

SEQ ID NO: 1572588 - RNA, 17 nt, Human adenovirus E
cacagcgcccuggucga

SEQ ID NO: 1572589 - RNA, 15 nt, Human adenovirus E
acgaagcccugcagg

SEQ ID NO: 1572590 - RNA, 19 nt, Human adenovirus E
caucgcuauucgccccaga

SEQ ID NO: 1572591 - RNA, 20 nt, Human adenovirus E
uccagagauccacggccagg

SEQ ID NO: 1572592 - RNA, 21 nt, Human adenovirus E
guuacugacgccagacgccgc

SEQ ID NO: 1572593 - RNA, 20 nt, Human adenovirus E
cggccgucccagacaugcaa

SEQ ID NO: 1572594 - RNA, 16 nt, Human adenovirus E
gaagcaacugcagccg

SEQ ID NO: 1572595 - RNA, 19 nt, Human adenovirus E
ucaacaauagcacucaacc

SEQ ID NO: 1572596 - RNA, 22 nt, Human adenovirus E
cugcgccgcuucuucgccgacg

SEQ ID NO: 1572597 - RNA, 15 nt, Human adenovirus E
gcagagucaggcugg

SEQ ID NO: 1572598 - RNA, 20 nt, Human adenovirus E
gacccagccagaugaugcaa

SEQ ID NO: 1572599 - RNA, 12 nt, Human adenovirus E
ccccgugccagc

SEQ ID NO: 1572600 - RNA, 12 nt, Human adenovirus E
aggagcgcgggc

SEQ ID NO: 1572601 - RNA, 14 nt, Human adenovirus E
gcgcgucggccagg

SEQ ID NO: 1572602 - RNA, 16 nt, Human adenovirus E
gcccugggccaggacg

SEQ ID NO: 1572603 - RNA, 17 nt, Human adenovirus E
ccacagggccagcaccg

SEQ ID NO: 1572604 - RNA, 23 nt, Human adenovirus E
cuggcuguuccagggcuccccga

SEQ ID NO: 1572605 - RNA, 13 nt, Human adenovirus E
caggcagcaaagc

SEQ ID NO: 1572606 - RNA, 21 nt, Human adenovirus E
aaucaucugcauguucauuuu

SEQ ID NO: 1572607 - RNA, 17 nt, Human adenovirus E
ggugggguagcagcgcc

SEQ ID NO: 1572608 - RNA, 15 nt, Human adenovirus E
gacguagaggggcuc

SEQ ID NO: 1572609 - RNA, 15 nt, Human adenovirus E
ggucuucgcggugcc

SEQ ID NO: 1572610 - RNA, 14 nt, Human adenovirus E
cuugcagguccaag

SEQ ID NO: 1572611 - RNA, 17 nt, Human adenovirus E
cgcugcgcccccagcgg

SEQ ID NO: 1572612 - RNA, 19 nt, Human adenovirus E
uggcaccucucgcccccgc

SEQ ID NO: 1572613 - RNA, 20 nt, Human adenovirus E
guguacaacgcgcugcugga

SEQ ID NO: 1572614 - RNA, 17 nt, Human adenovirus E
ccaggcggucccagagc

SEQ ID NO: 1572615 - RNA, 17 nt, Human adenovirus E
gccagcacccagaccau

SEQ ID NO: 1572616 - RNA, 14 nt, Human adenovirus E
gagcagaccuacca

SEQ ID NO: 1572617 - RNA, 23 nt, Human adenovirus E
caugguguacuaugccuucugcu

SEQ ID NO: 1572618 - RNA, 15 nt, Human adenovirus E
gucugugccacccuc

SEQ ID NO: 1572619 - RNA, 13 nt, Human adenovirus E
cgaagaccccggc

SEQ ID NO: 1572620 - RNA, 21 nt, Human adenovirus E
caccacagcgcccuggucgag

SEQ ID NO: 1572621 - RNA, 18 nt, Human adenovirus E
cgcgcucccuggggcgcc

SEQ ID NO: 1572622 - RNA, 17 nt, Human adenovirus E
agucgaagaccccggcg

SEQ ID NO: 1572623 - RNA, 16 nt, Human adenovirus E
acagcaccacagggca

SEQ ID NO: 1572624 - RNA, 23 nt, Human adenovirus E
cucgcgguggggcggccagcuga

SEQ ID NO: 1572625 - RNA, 19 nt, Human adenovirus E
uccgcgacacggcacgcgg

SEQ ID NO: 1572626 - RNA, 12 nt, Human adenovirus E
gucgggggcagg

SEQ ID NO: 1572627 - RNA, 12 nt, Human adenovirus E
cccaggacaugg

SEQ ID NO: 1572628 - RNA, 16 nt, Human adenovirus E
gcaggggcgcagggca

SEQ ID NO: 1572629 - RNA, 15 nt, Human adenovirus E
ccacuacuaucucuu

SEQ ID NO: 1572630 - RNA, 15 nt, Human adenovirus E
uggcgcgugaagacc

SEQ ID NO: 1572631 - RNA, 14 nt, Human adenovirus E
gcggucauggacca

SEQ ID NO: 1572632 - RNA, 15 nt, Human adenovirus E
uccuuugacgaggaa

SEQ ID NO: 1572633 - RNA, 17 nt, Human adenovirus E
cguugcggugugccccg

SEQ ID NO: 1572634 - RNA, 13 nt, Human adenovirus E
gcccccaccgccg

SEQ ID NO: 1572635 - RNA, 14 nt, Human adenovirus E
gcaucccagcugga

SEQ ID NO: 1572636 - RNA, 21 nt, Human adenovirus E
gcggcgaacgagccggcgcaa

SEQ ID NO: 1572637 - RNA, 16 nt, Human adenovirus E
gugcgacugggcuuuu

SEQ ID NO: 1572638 - RNA, 13 nt, Human adenovirus E
agcaugaagggga

SEQ ID NO: 1572639 - RNA, 18 nt, Human adenovirus E
acuuugagcugcccgagg

SEQ ID NO: 1572640 - RNA, 15 nt, Human adenovirus E
agcaaagcccccgau

SEQ ID NO: 1572641 - RNA, 19 nt, Human adenovirus E
ggagaugacugacccacug

SEQ ID NO: 1572642 - RNA, 15 nt, Human adenovirus E
cugacgucgcccagc

SEQ ID NO: 1572643 - RNA, 18 nt, Human adenovirus E
cacucaggcagaggagga

SEQ ID NO: 1572644 - RNA, 12 nt, Human adenovirus E
gcucuccacguc

SEQ ID NO: 1572645 - RNA, 21 nt, Human adenovirus E
ugcucgagugccacugccgcu

SEQ ID NO: 1572646 - RNA, 18 nt, Human adenovirus E
ccaacaaaugccagcuga

SEQ ID NO: 1572647 - RNA, 16 nt, Human adenovirus E
cagcagucaggcagag

SEQ ID NO: 1572648 - RNA, 15 nt, Human adenovirus E
accccauagccagcc

SEQ ID NO: 1572649 - RNA, 17 nt, Human adenovirus E
agcuccagcuccagugu

SEQ ID NO: 1572650 - RNA, 16 nt, Human adenovirus E
agcuggaucaugauca

SEQ ID NO: 1572651 - RNA, 16 nt, Human adenovirus E
aaagcuccgcuugccg

SEQ ID NO: 1572652 - RNA, 18 nt, Human adenovirus E
cugggacagcacucaggc

SEQ ID NO: 1572653 - RNA, 13 nt, Human adenovirus E
gccaucggcuccu

SEQ ID NO: 1572654 - RNA, 17 nt, Human adenovirus E
aacuggugcuugaaguc

SEQ ID NO: 1572655 - RNA, 19 nt, Human adenovirus E
ccgcagcagcgagcugggc

SEQ ID NO: 1572656 - RNA, 17 nt, Human adenovirus E
cucggcgaugguggcgc

SEQ ID NO: 1572657 - RNA, 22 nt, Human adenovirus E
cagucucaaguccagcaaagcg

SEQ ID NO: 1572658 - RNA, 12 nt, Human adenovirus E
uagacagcagcc

SEQ ID NO: 1572659 - RNA, 24 nt, Human adenovirus E
acugucuuccggaucgcuguccac

SEQ ID NO: 1572660 - RNA, 20 nt, Human adenovirus E
gcuccugguucaccugcagc

SEQ ID NO: 1572661 - RNA, 17 nt, Human adenovirus E
cucuugcaggacagcga

SEQ ID NO: 1572662 - RNA, 13 nt, Human adenovirus E
ggcaucagcugga

SEQ ID NO: 1572663 - RNA, 17 nt, Human adenovirus E
gcggcgacgaggccggc

SEQ ID NO: 1572664 - RNA, 18 nt, Human adenovirus E
ugugguagucaaauacug

SEQ ID NO: 1572665 - RNA, 20 nt, Human adenovirus E
uggacucugacgcuccuggu

SEQ ID NO: 1572666 - RNA, 16 nt, Human adenovirus E
uggggcgugcaggccc

SEQ ID NO: 1572667 - RNA, 13 nt, Human adenovirus E
gaggaagacuggg

SEQ ID NO: 1572668 - RNA, 14 nt, Human adenovirus E
acggggugcuggag

SEQ ID NO: 1572669 - RNA, 13 nt, Human adenovirus E
cgcagggcauggu

SEQ ID NO: 1572670 - RNA, 12 nt, Human adenovirus E
gacccacugcug

SEQ ID NO: 1572671 - RNA, 20 nt, Human adenovirus E
cagaugugggacgaugagga

SEQ ID NO: 1572672 - RNA, 13 nt, Human adenovirus E
gcaugcaauggca

SEQ ID NO: 1572673 - RNA, 16 nt, Human adenovirus E
agguuguucaacaguc

SEQ ID NO: 1572674 - RNA, 19 nt, Human adenovirus E
cucagcgccgggcccgcga

SEQ ID NO: 1572675 - RNA, 17 nt, Human adenovirus E
caaagcauguugcaaaa

SEQ ID NO: 1572676 - RNA, 15 nt, Human adenovirus E
aaugucauuuucaua

SEQ ID NO: 1572677 - RNA, 23 nt, Human adenovirus E
ucccaagaucuucgagggucugg

SEQ ID NO: 1572678 - RNA, 18 nt, Human adenovirus E
cgugccccggggccagga

SEQ ID NO: 1572679 - RNA, 17 nt, Human adenovirus E
ugcaggagcgcgggcug

SEQ ID NO: 1572680 - RNA, 18 nt, Human adenovirus E
augcuuacccaauccaag

SEQ ID NO: 1572681 - RNA, 17 nt, Human adenovirus E
ccgcacccgcgccgacg

SEQ ID NO: 1572682 - RNA, 19 nt, Human adenovirus E
cugacgccagacgccgcac

SEQ ID NO: 1572683 - RNA, 19 nt, Human adenovirus E
aagcccccgaucccuccag

SEQ ID NO: 1572684 - RNA, 16 nt, Human adenovirus E
cuggccaucgugaacg

SEQ ID NO: 1572685 - RNA, 21 nt, Human adenovirus E
acuucaaccccuucuccggcu

SEQ ID NO: 1572686 - RNA, 20 nt, Human adenovirus E
ggcucucggccauccuggag

SEQ ID NO: 1572687 - RNA, 15 nt, Human adenovirus E
ggcgguggggcggca

SEQ ID NO: 1572688 - RNA, 20 nt, Human adenovirus E
cuuagcuuugacaguacagg

SEQ ID NO: 1572689 - RNA, 17 nt, Human adenovirus E
accuggcagacgggcau

SEQ ID NO: 1572690 - RNA, 18 nt, Human adenovirus E
gaagcagagaaugagcag

SEQ ID NO: 1572691 - RNA, 20 nt, Human adenovirus E
uggggcaguuucuugagcuc

SEQ ID NO: 1572692 - RNA, 13 nt, Human adenovirus E
gacgacagcagcg

SEQ ID NO: 1572693 - RNA, 16 nt, Human adenovirus E
cuuuaccgacaaaaau

SEQ ID NO: 1572694 - RNA, 15 nt, Human adenovirus E
cgacucccaccugcu

SEQ ID NO: 1572695 - RNA, 15 nt, Human adenovirus E
aggucaaccaaccuc

SEQ ID NO: 1572696 - RNA, 18 nt, Human adenovirus E
ugcaggggcggcaggggc

SEQ ID NO: 1572697 - RNA, 15 nt, Human adenovirus E
gucuggaggagcaga

SEQ ID NO: 1572698 - RNA, 12 nt, Human adenovirus E
gcggaacagcau

SEQ ID NO: 1572699 - RNA, 17 nt, Human adenovirus E
acuaccucuucaggcac

SEQ ID NO: 1572700 - RNA, 20 nt, Human adenovirus E
gacaaaaaucagacccacug

SEQ ID NO: 1572701 - RNA, 16 nt, Human adenovirus E
augaccaucgaccuga

SEQ ID NO: 1572702 - RNA, 23 nt, Human adenovirus E
cagcucaacgacgaaguggugag

SEQ ID NO: 1572703 - RNA, 13 nt, Human adenovirus E
ggccgaccucauu

SEQ ID NO: 1572704 - RNA, 22 nt, Human adenovirus E
cuuuuggucuccacguuccaca

SEQ ID NO: 1572705 - RNA, 20 nt, Human adenovirus E
cgugagguaaauccaagcca

SEQ ID NO: 1572706 - RNA, 15 nt, Human adenovirus E
ugcagcucacuacca

SEQ ID NO: 1572707 - RNA, 22 nt, Human adenovirus E
accucccgguaccacaucaccc

SEQ ID NO: 1572708 - RNA, 17 nt, Human adenovirus E
gugcuguguugcugguu

SEQ ID NO: 1572709 - RNA, 12 nt, Human adenovirus E
ccaggugguggc

SEQ ID NO: 1572710 - RNA, 14 nt, Human adenovirus E
gcgcggccagccug

SEQ ID NO: 1572711 - RNA, 17 nt, Human adenovirus E
uccacuaacaucucuuc

SEQ ID NO: 1572712 - RNA, 12 nt, Human adenovirus E
guuguuggccag

SEQ ID NO: 1572713 - RNA, 18 nt, Human adenovirus E
gcgcgccgggcggcaggg

SEQ ID NO: 1572714 - RNA, 14 nt, Human adenovirus E
gaccuaccaggaga

SEQ ID NO: 1572715 - RNA, 23 nt, Human adenovirus E
caggcagaggaggaggagaugga

SEQ ID NO: 1572716 - RNA, 14 nt, Human adenovirus E
agccacaguacaga

SEQ ID NO: 1572717 - RNA, 19 nt, Human adenovirus E
ugaucgaggacgucagcgg

SEQ ID NO: 1572718 - RNA, 20 nt, Human adenovirus E
gaaucgcggacggcccuuga

SEQ ID NO: 1572719 - RNA, 14 nt, Human adenovirus E
cgucaucaaaacac

SEQ ID NO: 1572720 - RNA, 20 nt, Human adenovirus E
ccgccgugagcggggcugga

SEQ ID NO: 1572721 - RNA, 12 nt, Human adenovirus E
cacacugguggc

SEQ ID NO: 1572722 - RNA, 20 nt, Human adenovirus E
gacuccgcgcaaggaccuga

SEQ ID NO: 1572723 - RNA, 21 nt, Human adenovirus E
uggggcaguuucuugagcucc

SEQ ID NO: 1572724 - RNA, 13 nt, Human adenovirus E
agggccgcuggcu

SEQ ID NO: 1572725 - RNA, 22 nt, Human adenovirus E
gcgugccccccaagcgccagcc

SEQ ID NO: 1572726 - RNA, 23 nt, Human adenovirus E
ugcccauauuagacuaugaggcc

SEQ ID NO: 1572727 - RNA, 21 nt, Human adenovirus E
uaguugugguccugggugagg

SEQ ID NO: 1572728 - RNA, 21 nt, Human adenovirus E
cagcacuggaacaccaucagg

SEQ ID NO: 1572729 - RNA, 20 nt, Human adenovirus E
aagcggccacagugcucgca

SEQ ID NO: 1572730 - RNA, 15 nt, Human adenovirus E
uucaccugcagcaga

SEQ ID NO: 1572731 - RNA, 19 nt, Human adenovirus E
cgccaaccucgccaucugc

SEQ ID NO: 1572732 - RNA, 19 nt, Human adenovirus E
agaucaaaccgcagcagag

SEQ ID NO: 1572733 - RNA, 17 nt, Human adenovirus E
gcaggaccaccagcacg

SEQ ID NO: 1572734 - RNA, 22 nt, Human adenovirus E
gcagguccagaccucggcgcga

SEQ ID NO: 1572735 - RNA, 14 nt, Human adenovirus E
ucccaacaaaugcc

SEQ ID NO: 1572736 - RNA, 18 nt, Human adenovirus E
uccucucgagccgcaccu

SEQ ID NO: 1572737 - RNA, 13 nt, Human adenovirus E
gucaaccacugcg

SEQ ID NO: 1572738 - RNA, 21 nt, Human adenovirus E
ggccagaucguccagggcagc

SEQ ID NO: 1572739 - RNA, 15 nt, Human adenovirus E
aaaucagacccacug

SEQ ID NO: 1572740 - RNA, 16 nt, Human adenovirus E
acgagcagcuggcccg

SEQ ID NO: 1572741 - RNA, 15 nt, Human adenovirus E
cuuaacauggaucac

SEQ ID NO: 1572742 - RNA, 21 nt, Human adenovirus E
caccacagcuaccuccagugc

SEQ ID NO: 1572743 - RNA, 22 nt, Human adenovirus E
aggcgcgcgcagucguggaugc

SEQ ID NO: 1572744 - RNA, 17 nt, Human adenovirus E
cugccgcugcgcagcag

SEQ ID NO: 1572745 - RNA, 15 nt, Human adenovirus E
ucgcuguccacgagc

SEQ ID NO: 1572746 - RNA, 14 nt, Human adenovirus E
ggaggcgcucgcca

SEQ ID NO: 1572747 - RNA, 14 nt, Human adenovirus E
aggccugggcggcc

SEQ ID NO: 1572748 - RNA, 22 nt, Human adenovirus E
gaagaggaucuugcccgcgcgg

SEQ ID NO: 1572749 - RNA, 20 nt, Human adenovirus E
ggcugcaaacuuccuccaca

SEQ ID NO: 1572750 - RNA, 17 nt, Human adenovirus E
cgaggguucagccgcca

SEQ ID NO: 1572751 - RNA, 15 nt, Human adenovirus E
aaaaacgucacccgc

SEQ ID NO: 1572752 - RNA, 13 nt, Human adenovirus E
caacaggagaugc

SEQ ID NO: 1572753 - RNA, 15 nt, Human adenovirus E
cucgcgccugcugcu

SEQ ID NO: 1572754 - RNA, 12 nt, Human adenovirus E
aaauuuuugcuu

SEQ ID NO: 1572755 - RNA, 13 nt, Human adenovirus E
agagcgacaucgg

SEQ ID NO: 1572756 - RNA, 23 nt, Human adenovirus E
cggaauccugcccgccaccugcu

SEQ ID NO: 1572757 - RNA, 12 nt, Human adenovirus E
uccggggcagaa

SEQ ID NO: 1572758 - RNA, 21 nt, Human adenovirus E
gcgugcacgaagcccugcagg

SEQ ID NO: 1572759 - RNA, 21 nt, Human adenovirus E
ccgcagcaguggcagcggccg

SEQ ID NO: 1572760 - RNA, 16 nt, Human adenovirus E
ggaccccauccaggug

SEQ ID NO: 1572761 - RNA, 14 nt, Human adenovirus E
cggcgcgagcugag

SEQ ID NO: 1572762 - RNA, 16 nt, Human adenovirus E
gcacgacaggcagcgg

SEQ ID NO: 1572763 - RNA, 20 nt, Human adenovirus E
ccacgccccgcaaucaccuc

SEQ ID NO: 1572764 - RNA, 18 nt, Human adenovirus E
gccacagcgacccaugcu

SEQ ID NO: 1572765 - RNA, 14 nt, Human adenovirus E
cccugcgccugaug

SEQ ID NO: 1572766 - RNA, 21 nt, Human adenovirus E
gcagucauaaucaucugcaug

SEQ ID NO: 1572767 - RNA, 24 nt, Human adenovirus E
ugcagcugauggugcccaagcgcc

SEQ ID NO: 1572768 - RNA, 14 nt, Human adenovirus E
uacaaaucuguuga

SEQ ID NO: 1572769 - RNA, 15 nt, Human adenovirus E
uccgaggccacgcgg

SEQ ID NO: 1572770 - RNA, 16 nt, Human adenovirus E
gggcgagaucgagggc

SEQ ID NO: 1572771 - RNA, 20 nt, Human adenovirus E
ggcucgacuccguggccugg

SEQ ID NO: 1572772 - RNA, 14 nt, Human adenovirus E
cagcgccuccaaac

SEQ ID NO: 1572773 - RNA, 18 nt, Human adenovirus E
cauccccgcgcuccugga

SEQ ID NO: 1572774 - RNA, 21 nt, Human adenovirus E
gaagucguuggagaugcggcc

SEQ ID NO: 1572775 - RNA, 13 nt, Human adenovirus E
cugucggccugcg

SEQ ID NO: 1572776 - RNA, 14 nt, Human adenovirus E
ggaggagcucagcc

SEQ ID NO: 1572777 - RNA, 14 nt, Human adenovirus E
cgcaccugccccua

SEQ ID NO: 1572778 - RNA, 21 nt, Human adenovirus E
ugcagcggcagaucaacagcc

SEQ ID NO: 1572779 - RNA, 15 nt, Human adenovirus E
ccgccuaccgcagcu

SEQ ID NO: 1572780 - RNA, 13 nt, Human adenovirus E
caucgccgcggcg

SEQ ID NO: 1572781 - RNA, 15 nt, Human adenovirus E
gcccgcggagcacga

SEQ ID NO: 1572782 - RNA, 23 nt, Human adenovirus E
uugacggccuuguaggcgcagca

SEQ ID NO: 1572783 - RNA, 13 nt, Human adenovirus E
cguguggcagcag

SEQ ID NO: 1572784 - RNA, 20 nt, Human adenovirus E
gccggcgcaaacccgggagc

SEQ ID NO: 1572785 - RNA, 13 nt, Human adenovirus E
cggcgcgagcuga

SEQ ID NO: 1572786 - RNA, 21 nt, Human adenovirus E
aagagaaggccgaucccugcu

SEQ ID NO: 1572787 - RNA, 19 nt, Human adenovirus E
accaugaagauccuaggcc

SEQ ID NO: 1572788 - RNA, 15 nt, Human adenovirus E
aggaugcagcagcug

SEQ ID NO: 1572789 - RNA, 16 nt, Human adenovirus E
ugcgucaucacccagg

SEQ ID NO: 1572790 - RNA, 18 nt, Human adenovirus E
guuuaaaauuugaagaug

SEQ ID NO: 1572791 - RNA, 17 nt, Human adenovirus E
ccagggacucccucagc

SEQ ID NO: 1572792 - RNA, 16 nt, Human adenovirus E
cgagggcaugcaagac

SEQ ID NO: 1572793 - RNA, 19 nt, Human adenovirus E
cauggcuugcagggucccg

SEQ ID NO: 1572794 - RNA, 14 nt, Human adenovirus E
accucgcccugcuc

SEQ ID NO: 1572795 - RNA, 23 nt, Human adenovirus E
caggcgcacgggacgcagggcca

SEQ ID NO: 1572796 - RNA, 20 nt, Human adenovirus E
cggcagaugcgcccccacca

SEQ ID NO: 1572797 - RNA, 19 nt, Human adenovirus E
caggaaauuccccagccca

SEQ ID NO: 1572798 - RNA, 24 nt, Human adenovirus E
acccgcguucugcgcgcgggaguu

SEQ ID NO: 1572799 - RNA, 14 nt, Human adenovirus E
cagucccccgagga

SEQ ID NO: 1572800 - RNA, 20 nt, Human adenovirus E
gcucugcaagcuccugcaga

SEQ ID NO: 1572801 - RNA, 16 nt, Human adenovirus E
augccaccucagcuca

SEQ ID NO: 1572802 - RNA, 14 nt, Human adenovirus E
uuuccuccacccuc

SEQ ID NO: 1572803 - RNA, 17 nt, Human adenovirus E
cgccugcaucucgugcu

SEQ ID NO: 1572804 - RNA, 21 nt, Human adenovirus E
aagagcagaacuuccagcaga

SEQ ID NO: 1572805 - RNA, 16 nt, Human adenovirus E
gcugacguccugcagg

SEQ ID NO: 1572806 - RNA, 18 nt, Human adenovirus E
cggagcuguccagggucc

SEQ ID NO: 1572807 - RNA, 16 nt, Human adenovirus E
ggcucugaaccugccc

SEQ ID NO: 1572808 - RNA, 12 nt, Human adenovirus E
auaaaguucaag

SEQ ID NO: 1572809 - RNA, 22 nt, Human adenovirus E
cagcagcacacaacaggcgcaa

SEQ ID NO: 1572810 - RNA, 15 nt, Human adenovirus E
uacugaucugauacu

SEQ ID NO: 1572811 - RNA, 13 nt, Human adenovirus E
agaggugggcuug

SEQ ID NO: 1572812 - RNA, 22 nt, Human adenovirus E
agcugaaguaugaaugggugga

SEQ ID NO: 1572813 - RNA, 19 nt, Human adenovirus E
aucacacacgcccagcaca

SEQ ID NO: 1572814 - RNA, 13 nt, Human adenovirus E
gcaguggcagcgg

SEQ ID NO: 1572815 - RNA, 23 nt, Human adenovirus E
ucaucuuagcgcuagcagccgcg

SEQ ID NO: 1572816 - RNA, 22 nt, Human adenovirus E
ccaaggccgccgccccucucag

SEQ ID NO: 1572817 - RNA, 20 nt, Human adenovirus E
aggcguccgcgccgcagugg

SEQ ID NO: 1572818 - RNA, 23 nt, Human adenovirus E
cccaggccgaaguccagcugacu

SEQ ID NO: 1572819 - RNA, 15 nt, Human adenovirus E
cucugacgcuccugg

SEQ ID NO: 1572820 - RNA, 18 nt, Human adenovirus E
cccagccccgccaccucc

SEQ ID NO: 1572821 - RNA, 22 nt, Human adenovirus E
uacgauauguggccccccacga

SEQ ID NO: 1572822 - RNA, 20 nt, Human adenovirus E
ggaauuucagugggaagugg

SEQ ID NO: 1572823 - RNA, 22 nt, Human adenovirus E
ugagccgcgcccugggccagga

SEQ ID NO: 1572824 - RNA, 15 nt, Human adenovirus E
cugcgcggggaggcc

SEQ ID NO: 1572825 - RNA, 17 nt, Human adenovirus E
ggccgagcugucggccu

SEQ ID NO: 1572826 - RNA, 13 nt, Human adenovirus E
ggagggaagaaca

SEQ ID NO: 1572827 - RNA, 17 nt, Human adenovirus E
uggagugccugcgccgc

SEQ ID NO: 1572828 - RNA, 13 nt, Human adenovirus E
cugcaacccccag

SEQ ID NO: 1572829 - RNA, 13 nt, Human adenovirus E
ccaaccgcacccg

SEQ ID NO: 1572830 - RNA, 16 nt, Human adenovirus E
ucaguuuuuccaacaa

SEQ ID NO: 1572831 - RNA, 16 nt, Human adenovirus E
ccuagccgccuccacc

SEQ ID NO: 1572832 - RNA, 18 nt, Human adenovirus E
auuuuccccgagcgccuc

SEQ ID NO: 1572833 - RNA, 16 nt, Human adenovirus E
aaugcuaccgccaaaa

SEQ ID NO: 1572834 - RNA, 18 nt, Human adenovirus E
agcgaagagaccccgggu

SEQ ID NO: 1572835 - RNA, 22 nt, Human adenovirus E
ugcgagggggcgaggagccccg

SEQ ID NO: 1572836 - RNA, 22 nt, Human adenovirus E
gggaucagcaguuugggcagcg

SEQ ID NO: 1572837 - RNA, 19 nt, Human adenovirus E
agcgaucccauuugagcug

SEQ ID NO: 1572838 - RNA, 23 nt, Human adenovirus E
agccguuccgcaccgaaggaaga

SEQ ID NO: 1572839 - RNA, 20 nt, Human adenovirus E
gaccgaggugccccagagcg

SEQ ID NO: 1572840 - RNA, 14 nt, Human adenovirus E
cuuaccgagcagca

SEQ ID NO: 1572841 - RNA, 17 nt, Human adenovirus E
cuccccgggaccuauca

SEQ ID NO: 1572842 - RNA, 16 nt, Human adenovirus E
gauggccacgggcagc

SEQ ID NO: 1572843 - RNA, 22 nt, Human adenovirus E
ucgacuccguggccuggaggcu

SEQ ID NO: 1572844 - RNA, 15 nt, Human adenovirus E
gagccacaccacagc

SEQ ID NO: 1572845 - RNA, 16 nt, Human adenovirus E
cugugucgucaccgcc

SEQ ID NO: 1572846 - RNA, 14 nt, Human adenovirus E
ccuagccgccucca

SEQ ID NO: 1572847 - RNA, 14 nt, Human adenovirus E
ugggccugaugcac

SEQ ID NO: 1572848 - RNA, 15 nt, Human adenovirus E
cagaaaaugaugcaa

SEQ ID NO: 1572849 - RNA, 23 nt, Human adenovirus E
gccaaccggcucucggccauccu

SEQ ID NO: 1572850 - RNA, 21 nt, Human adenovirus E
cugcuccgcgcugcccucgga

SEQ ID NO: 1572851 - RNA, 20 nt, Human adenovirus E
gcagcucacuaccaauaaca

SEQ ID NO: 1572852 - RNA, 13 nt, Human adenovirus E
ccgcgaggccauc

SEQ ID NO: 1572853 - RNA, 17 nt, Human adenovirus E
caagcuccugcagaaga

SEQ ID NO: 1572854 - RNA, 20 nt, Human adenovirus E
cugccgcgccaaccgcaccc

SEQ ID NO: 1572855 - RNA, 13 nt, Human adenovirus E
ggccgaccgcgau

SEQ ID NO: 1572856 - RNA, 20 nt, Human adenovirus E
gggcgaaagugucccugacc

SEQ ID NO: 1572857 - RNA, 13 nt, Human adenovirus E
gacucccaccugc

SEQ ID NO: 1572858 - RNA, 15 nt, Human adenovirus E
cagcgcagccagggu

SEQ ID NO: 1572859 - RNA, 13 nt, Human adenovirus E
ccggaugcagggg

SEQ ID NO: 1572860 - RNA, 13 nt, Human adenovirus E
ggucugccuuccc

SEQ ID NO: 1572861 - RNA, 20 nt, Human adenovirus E
ggaggaagacugggagaaca

SEQ ID NO: 1572862 - RNA, 18 nt, Human adenovirus E
gcccgugcugcucgagcg

SEQ ID NO: 1572863 - RNA, 17 nt, Human adenovirus E
cuggcuccuggaccugg

SEQ ID NO: 1572864 - RNA, 18 nt, Human adenovirus E
cgaggccaucggccaggc

SEQ ID NO: 1572865 - RNA, 15 nt, Human adenovirus E
cgcugguggcggugu

SEQ ID NO: 1572866 - RNA, 20 nt, Human adenovirus E
gccccaguacgcgcucagca

SEQ ID NO: 1572867 - RNA, 20 nt, Human adenovirus E
agcugccgcccguggaggau

SEQ ID NO: 1572868 - RNA, 15 nt, Human adenovirus E
cgggaguuccuccac

SEQ ID NO: 1572869 - RNA, 22 nt, Human adenovirus E
ggagccuuguugcgcagggcca

SEQ ID NO: 1572870 - RNA, 19 nt, Human adenovirus E
agaacagcagucaggcaga

SEQ ID NO: 1572871 - RNA, 17 nt, Human adenovirus E
cucgcguccguguggca

SEQ ID NO: 1572872 - RNA, 19 nt, Human adenovirus E
cugggauccaugguggcgc

SEQ ID NO: 1572873 - RNA, 22 nt, Human adenovirus E
auccaugguggcgcugaacgcc

SEQ ID NO: 1572874 - RNA, 18 nt, Human adenovirus E
ccgguuguaccuggugga

SEQ ID NO: 1572875 - RNA, 20 nt, Human adenovirus E
gucucuucgggggcagaggc

SEQ ID NO: 1572876 - RNA, 20 nt, Human adenovirus E
gacuacuucuuccagaccag

SEQ ID NO: 1572877 - RNA, 18 nt, Human adenovirus E
uggacaagaugagccgcu

SEQ ID NO: 1572878 - RNA, 14 nt, Human adenovirus E
caaagagcuguccg

SEQ ID NO: 1572879 - RNA, 19 nt, Human adenovirus E
caugggcgcggaccugcac

SEQ ID NO: 1572880 - RNA, 16 nt, Human adenovirus E
cugggaguugcgcgcc

SEQ ID NO: 1572881 - RNA, 18 nt, Human adenovirus E
cgacgagcucggcgguga

SEQ ID NO: 1572882 - RNA, 12 nt, Human adenovirus E
ccgcggugcucc

SEQ ID NO: 1572883 - RNA, 16 nt, Human adenovirus E
ggcgacgaggccggcc

SEQ ID NO: 1572884 - RNA, 17 nt, Human adenovirus E
cacgcggggcgggagcu

SEQ ID NO: 1572885 - RNA, 18 nt, Human adenovirus E
cagcgaaccccgcagaac

SEQ ID NO: 1572886 - RNA, 13 nt, Human adenovirus E
ccccacccaguga

SEQ ID NO: 1572887 - RNA, 14 nt, Human adenovirus E
ccggacgugcagcc

SEQ ID NO: 1572888 - RNA, 16 nt, Human adenovirus E
cauccgcccaaggccg

SEQ ID NO: 1572889 - RNA, 11 nt, Human adenovirus E
aagaagcagcc

SEQ ID NO: 1572890 - RNA, 15 nt, Human adenovirus E
cagguguccagcugg

SEQ ID NO: 1572891 - RNA, 16 nt, Human adenovirus E
ccuccaccaacgccac

SEQ ID NO: 1572892 - RNA, 14 nt, Human adenovirus E
cucgcucugguggc

SEQ ID NO: 1572893 - RNA, 13 nt, Human adenovirus E
cggggaucagccc

SEQ ID NO: 1572894 - RNA, 20 nt, Human adenovirus E
caaguacggcgcggccagcc

SEQ ID NO: 1572895 - RNA, 19 nt, Human adenovirus E
caaggaugcgcugcucgac

SEQ ID NO: 1572896 - RNA, 16 nt, Human adenovirus E
aucugcccccaccgcc

SEQ ID NO: 1572897 - RNA, 15 nt, Human adenovirus E
auguucagggcggcc

SEQ ID NO: 1572898 - RNA, 19 nt, Human adenovirus E
ccggcauugcuuccguggc

SEQ ID NO: 1572899 - RNA, 15 nt, Human adenovirus E
uagaggaaccccgcc

SEQ ID NO: 1572900 - RNA, 21 nt, Human adenovirus E
accuguucagagacaggagcg

SEQ ID NO: 1572901 - RNA, 13 nt, Human adenovirus E
ccagaugaugcaa

SEQ ID NO: 1572902 - RNA, 16 nt, Human adenovirus E
gggauagaaagccugg

SEQ ID NO: 1572903 - RNA, 15 nt, Human adenovirus E
gagaccgagcuccag

SEQ ID NO: 1572904 - RNA, 14 nt, Human adenovirus E
caacuuggaaggga

SEQ ID NO: 1572905 - RNA, 20 nt, Human adenovirus E
uccacugucgagagccacac

SEQ ID NO: 1572906 - RNA, 19 nt, Human adenovirus E
ucacuuuguggacaacacc

SEQ ID NO: 1572907 - RNA, 18 nt, Human adenovirus E
ggccagaucguccagggc

SEQ ID NO: 1572908 - RNA, 21 nt, Human adenovirus E
gacccggacgugcagcccgag

SEQ ID NO: 1572909 - RNA, 16 nt, Human adenovirus E
gagcaggaagcagaga

SEQ ID NO: 1572910 - RNA, 17 nt, Human adenovirus E
cgguggcacgacaggca

SEQ ID NO: 1572911 - RNA, 22 nt, Human adenovirus E
caaugguacugaugacagcaac

SEQ ID NO: 1572912 - RNA, 16 nt, Human adenovirus E
gugcagccacagcgcg

SEQ ID NO: 1572913 - RNA, 19 nt, Human adenovirus E
cauguuuucugccaacacc

SEQ ID NO: 1572914 - RNA, 16 nt, Human adenovirus E
ccagcaccagcaccau

SEQ ID NO: 1572915 - RNA, 22 nt, Human adenovirus E
cuaugugacgcccgcggagcac

SEQ ID NO: 1572916 - RNA, 15 nt, Human adenovirus E
gaggccgagccacag

SEQ ID NO: 1572917 - RNA, 22 nt, Human adenovirus E
  misc_feature (7)..(7): n is a, c, g, or u
uuagaancggcggcgaagacgc

SEQ ID NO: 1572918 - RNA, 20 nt, Human adenovirus E
uugucaaugccaccucagcu

SEQ ID NO: 1572919 - RNA, 23 nt, Human adenovirus E
ccagcagcuagaaaauccacagc

SEQ ID NO: 1572920 - RNA, 21 nt, Human adenovirus E
ccucauuuuccccgagcgccu

SEQ ID NO: 1572921 - RNA, 17 nt, Human adenovirus E
gucgagggucuccugga

SEQ ID NO: 1572922 - RNA, 17 nt, Human adenovirus E
accugcaucugcugcug

SEQ ID NO: 1572923 - RNA, 17 nt, Human adenovirus E
ucgggucggucagggag

SEQ ID NO: 1572924 - RNA, 14 nt, Human adenovirus E
gagggucugggcag

SEQ ID NO: 1572925 - RNA, 19 nt, Human adenovirus E
ggcgugcgcuccuggacgc

SEQ ID NO: 1572926 - RNA, 15 nt, Human adenovirus E
cgaggccguggccca

SEQ ID NO: 1572927 - RNA, 16 nt, Human adenovirus E
ccgagcagcagcacac

SEQ ID NO: 1572928 - RNA, 23 nt, Human adenovirus E
gaugaugauauucuggagcaggc

SEQ ID NO: 1572929 - RNA, 18 nt, Human adenovirus E
accacucgccgcucgccg

SEQ ID NO: 1572930 - RNA, 23 nt, Human adenovirus E
gauggugaagaugccgggcagga

SEQ ID NO: 1572931 - RNA, 15 nt, Human adenovirus E
gcugggucugcgacc

SEQ ID NO: 1572932 - RNA, 15 nt, Human adenovirus E
agccugcugaugccc

SEQ ID NO: 1572933 - RNA, 21 nt, Human adenovirus E
ugcugggcauucgcaagaggc

SEQ ID NO: 1572934 - RNA, 19 nt, Human adenovirus E
gagaugcggcccaugagcu

SEQ ID NO: 1572935 - RNA, 23 nt, Human adenovirus E
agcagauugacaagcggaauauc

SEQ ID NO: 1572936 - RNA, 17 nt, Human adenovirus E
agcaguuugggcagcgg

SEQ ID NO: 1572937 - RNA, 16 nt, Human adenovirus E
gccacagaaguuucau

SEQ ID NO: 1572938 - RNA, 22 nt, Human adenovirus E
gcaaaacuaacacuuugcuuga

SEQ ID NO: 1572939 - RNA, 18 nt, Human adenovirus E
gacggucaacuccuccuc

SEQ ID NO: 1572940 - RNA, 14 nt, Human adenovirus E
uaaaaguccacggc

SEQ ID NO: 1572941 - RNA, 21 nt, Human adenovirus E
auuuuugccaugcgucaaaug

SEQ ID NO: 1572942 - RNA, 11 nt, Human adenovirus E
caagcgccgca

SEQ ID NO: 1572943 - RNA, 12 nt, Human adenovirus E
uguucaacaguc

SEQ ID NO: 1572944 - RNA, 12 nt, Human adenovirus E
uaaaggccaaag

SEQ ID NO: 1572945 - RNA, 18 nt, Human adenovirus E
acaccuggaccacugccg

SEQ ID NO: 1572946 - RNA, 16 nt, Human adenovirus E
cacgcugcgcccccag

SEQ ID NO: 1572947 - RNA, 24 nt, Human adenovirus E
guacccucgaucccgggggcguag

SEQ ID NO: 1572948 - RNA, 16 nt, Human adenovirus E
caccuggaccacugcc

SEQ ID NO: 1572949 - RNA, 12 nt, Human adenovirus E
guugggcaggga

SEQ ID NO: 1572950 - RNA, 15 nt, Human adenovirus E
ucccauacuccaccu

SEQ ID NO: 1572951 - RNA, 22 nt, Human adenovirus E
caacaaaagaaaaauccuccag

SEQ ID NO: 1572952 - RNA, 14 nt, Human adenovirus E
cguucucuccagca

SEQ ID NO: 1572953 - RNA, 22 nt, Human adenovirus E
ggacgacccgggcaaccuggaa

SEQ ID NO: 1572954 - RNA, 17 nt, Human adenovirus E
gaggcagcagcagcaga

SEQ ID NO: 1572955 - RNA, 16 nt, Human adenovirus E
guccucgcuguccugg

SEQ ID NO: 1572956 - RNA, 17 nt, Human adenovirus E
gaggacagccugcaaga

SEQ ID NO: 1572957 - RNA, 16 nt, Human adenovirus E
cuggaggccguggugc

SEQ ID NO: 1572958 - RNA, 14 nt, Human adenovirus E
gcgccauugguggc

SEQ ID NO: 1572959 - RNA, 15 nt, Human adenovirus E
agcuggagggcgaga

SEQ ID NO: 1572960 - RNA, 15 nt, Human adenovirus E
ccgagaagcuggcgg

SEQ ID NO: 1572961 - RNA, 24 nt, Human adenovirus E
caacgugcagaccaaccuggaccg

SEQ ID NO: 1572962 - RNA, 16 nt, Human adenovirus E
cagcaagcgguugggg

SEQ ID NO: 1572963 - RNA, 24 nt, Human adenovirus E
cgcggccagggggucgcucucguc

SEQ ID NO: 1572964 - RNA, 21 nt, Human adenovirus E
ugaugucauacuugagcuguc

SEQ ID NO: 1572965 - RNA, 15 nt, Human adenovirus E
cacagggcaggcgcu

SEQ ID NO: 1572966 - RNA, 22 nt, Human adenovirus E
ucgagggggaacccguccugau

SEQ ID NO: 1572967 - RNA, 16 nt, Human adenovirus E
cgucgccgcaccgccg

SEQ ID NO: 1572968 - RNA, 17 nt, Human adenovirus E
guggaucuuuuccagga

SEQ ID NO: 1572969 - RNA, 19 nt, Human adenovirus E
uuccacgguggcuuccagc

SEQ ID NO: 1572970 - RNA, 14 nt, Human adenovirus E
caaacuuccuccac

SEQ ID NO: 1572971 - RNA, 19 nt, Human adenovirus E
auggacucugacgcuccug

SEQ ID NO: 1572972 - RNA, 19 nt, Human adenovirus E
cagccccgauuaugcaggg

SEQ ID NO: 1572973 - RNA, 15 nt, Human adenovirus E
gggagaugagcuggg

SEQ ID NO: 1572974 - RNA, 12 nt, Human adenovirus E
ucgugcgagggg

SEQ ID NO: 1572975 - RNA, 20 nt, Human adenovirus E
cggugcugacggcuccccgc

SEQ ID NO: 1572976 - RNA, 20 nt, Human adenovirus E
acuuccuccgcggccggcca

SEQ ID NO: 1572977 - RNA, 15 nt, Human adenovirus E
gacgauguggacagc

SEQ ID NO: 1572978 - RNA, 18 nt, Human adenovirus E
gugaccuugcagcaggug

SEQ ID NO: 1572979 - RNA, 12 nt, Human adenovirus E
ccauuacuggca

SEQ ID NO: 1572980 - RNA, 18 nt, Human adenovirus E
ccugcuccgcgcugcccu

SEQ ID NO: 1572981 - RNA, 11 nt, Human adenovirus E
ucugccuccuc

SEQ ID NO: 1572982 - RNA, 20 nt, Human adenovirus E
gcccaacccgcgccucaacu

SEQ ID NO: 1572983 - RNA, 16 nt, Human adenovirus E
gcgcaucgcccggcgg

SEQ ID NO: 1572984 - RNA, 18 nt, Human adenovirus E
uggcgaugugcucgguga

SEQ ID NO: 1572985 - RNA, 18 nt, Human adenovirus E
cgggggagaugagcuggg

SEQ ID NO: 1572986 - RNA, 19 nt, Human adenovirus E
uggacaacaccugauccau

SEQ ID NO: 1572987 - RNA, 14 nt, Human adenovirus E
aacucguaccuggg

SEQ ID NO: 1572988 - RNA, 23 nt, Human adenovirus E
cugcaguacgugcaacacagaac

SEQ ID NO: 1572989 - RNA, 13 nt, Human adenovirus E
aaaaccagcagcu

SEQ ID NO: 1572990 - RNA, 15 nt, Human adenovirus E
cugggacagcacuca

SEQ ID NO: 1572991 - RNA, 13 nt, Human adenovirus E
gaggacccaccgc

SEQ ID NO: 1572992 - RNA, 19 nt, Human adenovirus E
aggcuccuuacgugccccc

SEQ ID NO: 1572993 - RNA, 21 nt, Human adenovirus E
uccccaaauucaaacaccuca

SEQ ID NO: 1572994 - RNA, 13 nt, Human adenovirus E
gaagcguucaggg

SEQ ID NO: 1572995 - RNA, 20 nt, Human adenovirus E
gugcagcagaagcgugggcc

SEQ ID NO: 1572996 - RNA, 21 nt, Human adenovirus E
cccugcgcggggaggcccggc

SEQ ID NO: 1572997 - RNA, 19 nt, Human adenovirus E
caagaauucuugcugaaaa

SEQ ID NO: 1572998 - RNA, 14 nt, Human adenovirus E
uagucauacagcuc

SEQ ID NO: 1572999 - RNA, 12 nt, Human adenovirus E
acgugagccgcg

SEQ ID NO: 1573000 - RNA, 18 nt, Human adenovirus E
acacuguaucccacccug

SEQ ID NO: 1573001 - RNA, 23 nt, Human adenovirus E
ugcaccgugcggugagcgccagc

SEQ ID NO: 1573002 - RNA, 23 nt, Human adenovirus E
caccggugugcgcgugcccgugc

SEQ ID NO: 1573003 - RNA, 16 nt, Human adenovirus E
caagcgccgcagcagu

SEQ ID NO: 1573004 - RNA, 21 nt, Human adenovirus E
augucguagacguagaggggc

SEQ ID NO: 1573005 - RNA, 17 nt, Human adenovirus E
uaccacaucacccucug

SEQ ID NO: 1573006 - RNA, 18 nt, Human adenovirus E
cuguuccugaugcaggag

SEQ ID NO: 1573007 - RNA, 12 nt, Human adenovirus E
ggcgcggccagc

SEQ ID NO: 1573008 - RNA, 20 nt, Human adenovirus E
gcccugcgcgucggccaggu

SEQ ID NO: 1573009 - RNA, 18 nt, Human adenovirus E
gggcccagguuggugcga

SEQ ID NO: 1573010 - RNA, 18 nt, Human adenovirus E
acuaccuccaccugagcg

SEQ ID NO: 1573011 - RNA, 16 nt, Human adenovirus E
gccugcgucaucaccc

SEQ ID NO: 1573012 - RNA, 16 nt, Human adenovirus E
ugcaaacuuccuccac

SEQ ID NO: 1573013 - RNA, 20 nt, Human adenovirus E
cggaggcgacgggcucucgc

SEQ ID NO: 1573014 - RNA, 22 nt, Human adenovirus E
uggaccuggccaaccaggccgu

SEQ ID NO: 1573015 - RNA, 16 nt, Human adenovirus E
gcagaccgagcccaug

SEQ ID NO: 1573016 - RNA, 16 nt, Human adenovirus E
gagccggcggcggcgc

SEQ ID NO: 1573017 - RNA, 15 nt, Human adenovirus E
ugcaguggcgcgggc

SEQ ID NO: 1573018 - RNA, 14 nt, Human adenovirus E
gaccugcacuggca

SEQ ID NO: 1573019 - RNA, 17 nt, Human adenovirus E
gaaccccaccacccaga

SEQ ID NO: 1573020 - RNA, 22 nt, Human adenovirus E
cggugugccccgguucgaggcc

SEQ ID NO: 1573021 - RNA, 18 nt, Human adenovirus E
caguuacaccugcccugg

SEQ ID NO: 1573022 - RNA, 20 nt, Human adenovirus E
acagcaccaacgugcagacc

SEQ ID NO: 1573023 - RNA, 17 nt, Human adenovirus E
cuaccugauaucgccuc

SEQ ID NO: 1573024 - RNA, 17 nt, Human adenovirus E
uggaucuggccuuagcu

SEQ ID NO: 1573025 - RNA, 23 nt, Human adenovirus E
gcugaacgccuuccucagcaccc

SEQ ID NO: 1573026 - RNA, 21 nt, Human adenovirus E
cauguggagcuaccagcccca

SEQ ID NO: 1573027 - RNA, 18 nt, Human adenovirus E
aacgcucgguguugaaau

SEQ ID NO: 1573028 - RNA, 13 nt, Human adenovirus E
gcccgaggccgcc

SEQ ID NO: 1573029 - RNA, 14 nt, Human adenovirus E
ggucucgccgcgcc

SEQ ID NO: 1573030 - RNA, 18 nt, Human adenovirus E
gcaucucgauccagcaga

SEQ ID NO: 1573031 - RNA, 20 nt, Human adenovirus E
cgacgugaucgaccaggugg

SEQ ID NO: 1573032 - RNA, 15 nt, Human adenovirus E
ucgccgcgcaggggc

SEQ ID NO: 1573033 - RNA, 19 nt, Human adenovirus E
cccagcgaaggcgaggguu

SEQ ID NO: 1573034 - RNA, 17 nt, Human adenovirus E
cagcuggcccgguggcu

SEQ ID NO: 1573035 - RNA, 12 nt, Human adenovirus E
ucuccgaaauuu

SEQ ID NO: 1573036 - RNA, 16 nt, Human adenovirus E
gacggugucgagccug

SEQ ID NO: 1573037 - RNA, 19 nt, Human adenovirus E
ucguggcgccugcaucucg

SEQ ID NO: 1573038 - RNA, 19 nt, Human adenovirus E
gcauucguuacucggagcu

SEQ ID NO: 1573039 - RNA, 21 nt, Human adenovirus E
ugcagacggaucccuggaugc

SEQ ID NO: 1573040 - RNA, 19 nt, Human adenovirus E
gucgcagggggccacgagc

SEQ ID NO: 1573041 - RNA, 23 nt, Human adenovirus E
ccacuuagcauuaccacacagac

SEQ ID NO: 1573042 - RNA, 16 nt, Human adenovirus E
gcaacaacagcccccu

SEQ ID NO: 1573043 - RNA, 21 nt, Human adenovirus E
agcagaccgugaaggaggaga

SEQ ID NO: 1573044 - RNA, 19 nt, Human adenovirus E
ucagagcgagccagucucg

SEQ ID NO: 1573045 - RNA, 15 nt, Human adenovirus E
cccgaauaccacagc

SEQ ID NO: 1573046 - RNA, 12 nt, Human adenovirus E
cagcgugguggc

SEQ ID NO: 1573047 - RNA, 17 nt, Human adenovirus E
cgcuguggagccacugc

SEQ ID NO: 1573048 - RNA, 15 nt, Human adenovirus E
cgaggccggccuggu

SEQ ID NO: 1573049 - RNA, 21 nt, Human adenovirus E
ccgaggaagaaaaccgcgccg

SEQ ID NO: 1573050 - RNA, 15 nt, Human adenovirus E
gagcucagccgcgcc

SEQ ID NO: 1573051 - RNA, 15 nt, Human adenovirus E
cuccagcuccagugu

SEQ ID NO: 1573052 - RNA, 17 nt, Human adenovirus E
gcagcguguuggacuug

SEQ ID NO: 1573053 - RNA, 14 nt, Human adenovirus E
gcaggcggcgcgag

SEQ ID NO: 1573054 - RNA, 19 nt, Human adenovirus E
agcgcucgcgguggggcgg

SEQ ID NO: 1573055 - RNA, 20 nt, Human adenovirus E
gcgucucgggacccugccau

SEQ ID NO: 1573056 - RNA, 13 nt, Human adenovirus E
uggagccauagca

SEQ ID NO: 1573057 - RNA, 23 nt, Human adenovirus E
auggcaugcgaguuggaggagau

SEQ ID NO: 1573058 - RNA, 15 nt, Human adenovirus E
ccucggaccuggccg

SEQ ID NO: 1573059 - RNA, 17 nt, Human adenovirus E
ccccgaucccuccaggu

SEQ ID NO: 1573060 - RNA, 18 nt, Human adenovirus E
ugagaaaagcaaggagga

SEQ ID NO: 1573061 - RNA, 17 nt, Human adenovirus E
ccgggcggcaggggcgg

SEQ ID NO: 1573062 - RNA, 21 nt, Human adenovirus E
agcccgugaccuugcagcagg

SEQ ID NO: 1573063 - RNA, 22 nt, Human adenovirus E
gcagcagaggaggcagcaaagu

SEQ ID NO: 1573064 - RNA, 18 nt, Human adenovirus E
guacuaugccuucugcua

SEQ ID NO: 1573065 - RNA, 19 nt, Human adenovirus E
gccagaucguccagggcag

SEQ ID NO: 1573066 - RNA, 15 nt, Human adenovirus E
agggacucccucagc

SEQ ID NO: 1573067 - RNA, 17 nt, Human adenovirus E
cggaucucgcucagguc

SEQ ID NO: 1573068 - RNA, 13 nt, Human adenovirus E
ccaccccugccgc

SEQ ID NO: 1573069 - RNA, 14 nt, Human adenovirus E
gugggcguggggca

SEQ ID NO: 1573070 - RNA, 15 nt, Human adenovirus E
ucagcgccccgcauc

SEQ ID NO: 1573071 - RNA, 15 nt, Human adenovirus E
ggcgggagcugcggc

SEQ ID NO: 1573072 - RNA, 22 nt, Human adenovirus E
ccucaagcccgugaccuugcag

SEQ ID NO: 1573073 - RNA, 20 nt, Human adenovirus E
agucucaaguccagcaaagc

SEQ ID NO: 1573074 - RNA, 15 nt, Human adenovirus E
ggcagaacgugcugc

SEQ ID NO: 1573075 - RNA, 17 nt, Human adenovirus E
ugguucaccugcagcag

SEQ ID NO: 1573076 - RNA, 14 nt, Human adenovirus E
gaacgcucugcaag

SEQ ID NO: 1573077 - RNA, 14 nt, Human adenovirus E
gugccugcgccgcu

SEQ ID NO: 1573078 - RNA, 21 nt, Human adenovirus E
ugggaaugcgcgugcacgaag

SEQ ID NO: 1573079 - RNA, 12 nt, Human adenovirus E
gaguuuggaaga

SEQ ID NO: 1573080 - RNA, 23 nt, Human adenovirus E
agcccaugaucaagcccagcacc

SEQ ID NO: 1573081 - RNA, 19 nt, Human adenovirus E
caggucaucgcgccugaga

SEQ ID NO: 1573082 - RNA, 21 nt, Human adenovirus E
cugcugaauaucaccgagccc

SEQ ID NO: 1573083 - RNA, 17 nt, Human adenovirus E
uggaagaagcagccgcc

SEQ ID NO: 1573084 - RNA, 16 nt, Human adenovirus E
cccgaggcccuggcca

SEQ ID NO: 1573085 - RNA, 16 nt, Human adenovirus E
caguuagucucuccac

SEQ ID NO: 1573086 - RNA, 23 nt, Human adenovirus E
cuggaggccaucgugcagaaccc

SEQ ID NO: 1573087 - RNA, 19 nt, Human adenovirus E
cuaccgaggucaggggcga

SEQ ID NO: 1573088 - RNA, 21 nt, Human adenovirus E
ccuggaggccguggugcccuc

SEQ ID NO: 1573089 - RNA, 23 nt, Human adenovirus E
gguuccaccgcgaguccaaccug

SEQ ID NO: 1573090 - RNA, 20 nt, Human adenovirus E
accgcagcuugcccucggcc

SEQ ID NO: 1573091 - RNA, 18 nt, Human adenovirus E
cuuagcgcuagcagccgc

SEQ ID NO: 1573092 - RNA, 20 nt, Human adenovirus E
cugaaccugacacaccacca

SEQ ID NO: 1573093 - RNA, 14 nt, Human adenovirus E
ccacagcgacccau

SEQ ID NO: 1573094 - RNA, 20 nt, Human adenovirus E
ggggcaguuucuugagcucc

SEQ ID NO: 1573095 - RNA, 15 nt, Human adenovirus E
caccaacgccauccu

SEQ ID NO: 1573096 - RNA, 23 nt, Human adenovirus E
ggcagcaccgggugauccuccac

SEQ ID NO: 1573097 - RNA, 18 nt, Human adenovirus E
gggcaauccucgcacaga

SEQ ID NO: 1573098 - RNA, 15 nt, Human adenovirus E
caggggcgcagggca

SEQ ID NO: 1573099 - RNA, 15 nt, Human adenovirus E
uggugcccaagcgcc

SEQ ID NO: 1573100 - RNA, 18 nt, Human adenovirus E
uccagaaaaagccacaga

SEQ ID NO: 1573101 - RNA, 17 nt, Human adenovirus E
cagcgccggcaggaccc

SEQ ID NO: 1573102 - RNA, 16 nt, Human adenovirus E
ccuggugaccguggag

SEQ ID NO: 1573103 - RNA, 12 nt, Human adenovirus E
gucuaccucgac

SEQ ID NO: 1573104 - RNA, 18 nt, Human adenovirus E
augcgggcggcgcugcag

SEQ ID NO: 1573105 - RNA, 19 nt, Human adenovirus E
gcuccacgcaacaccccgu

SEQ ID NO: 1573106 - RNA, 21 nt, Human adenovirus E
aauuacuuggcgguggggcgg

SEQ ID NO: 1573107 - RNA, 15 nt, Human adenovirus E
acccucaucuccuuu

SEQ ID NO: 1573108 - RNA, 19 nt, Human adenovirus E
cgacuccguggccuggagg

SEQ ID NO: 1573109 - RNA, 15 nt, Human adenovirus E
agcgcaccaccgccu

SEQ ID NO: 1573110 - RNA, 16 nt, Human adenovirus E
ugggucugcgaccuga

SEQ ID NO: 1573111 - RNA, 20 nt, Human adenovirus E
ugacccugggccugaugcac

SEQ ID NO: 1573112 - RNA, 17 nt, Human adenovirus E
cguacugcggcagaugc

SEQ ID NO: 1573113 - RNA, 18 nt, Human adenovirus E
aaugccgcggugcuccuc

SEQ ID NO: 1573114 - RNA, 18 nt, Human adenovirus E
ggagaugacugacccacu

SEQ ID NO: 1573115 - RNA, 19 nt, Human adenovirus E
ugcgagccgauggggaaga

SEQ ID NO: 1573116 - RNA, 17 nt, Human adenovirus E
cgcugcucgaccgcacc

SEQ ID NO: 1573117 - RNA, 15 nt, Human adenovirus E
ccgacgacagcagcg

SEQ ID NO: 1573118 - RNA, 21 nt, Human adenovirus E
ccucugguugaacaugcagcc

SEQ ID NO: 1573119 - RNA, 14 nt, Human adenovirus E
cgaguacaauaaca

SEQ ID NO: 1573120 - RNA, 14 nt, Human adenovirus E
ccugguccgggcgc

SEQ ID NO: 1573121 - RNA, 16 nt, Human adenovirus E
gguccaggccagcacg

SEQ ID NO: 1573122 - RNA, 14 nt, Human adenovirus E
ccucagcacccagc

SEQ ID NO: 1573123 - RNA, 20 nt, Human adenovirus E
cgcggggcgggagcugcggc

SEQ ID NO: 1573124 - RNA, 20 nt, Human adenovirus E
gaggaagacugggacagcac

SEQ ID NO: 1573125 - RNA, 17 nt, Human adenovirus E
ccucuucucgccgcgcg

SEQ ID NO: 1573126 - RNA, 15 nt, Human adenovirus E
ucaucaaguuucaau

SEQ ID NO: 1573127 - RNA, 17 nt, Human adenovirus E
gaggccaucggccaggc

SEQ ID NO: 1573128 - RNA, 15 nt, Human adenovirus E
ccugcugcgccuggc

SEQ ID NO: 1573129 - RNA, 19 nt, Human adenovirus E
guugaaaaacugggaguug

SEQ ID NO: 1573130 - RNA, 19 nt, Human adenovirus E
caagagucagagaaaggcu

SEQ ID NO: 1573131 - RNA, 14 nt, Human adenovirus E
ucagcgccccgcau

SEQ ID NO: 1573132 - RNA, 16 nt, Human adenovirus E
agccgcgcccugggcc

SEQ ID NO: 1573133 - RNA, 15 nt, Human adenovirus E
ggcgcggaggaagga

SEQ ID NO: 1573134 - RNA, 18 nt, Human adenovirus E
ugcaggccucucagcgcc

SEQ ID NO: 1573135 - RNA, 17 nt, Human adenovirus E
ccgucaccuccacagcc

SEQ ID NO: 1573136 - RNA, 17 nt, Human adenovirus E
cgcguaguugcagaggc

SEQ ID NO: 1573137 - RNA, 13 nt, Human adenovirus E
ugcaagcgccgca

SEQ ID NO: 1573138 - RNA, 16 nt, Human adenovirus E
gagagccgccucagca

SEQ ID NO: 1573139 - RNA, 20 nt, Human adenovirus E
ccucguagaggaaccccgcc

SEQ ID NO: 1573140 - RNA, 23 nt, Human adenovirus E
cggcucucggccauccuggaggc

SEQ ID NO: 1573141 - RNA, 12 nt, Human adenovirus E
gucuaccucuac

SEQ ID NO: 1573142 - RNA, 22 nt, Human adenovirus E
ccgcaucugcaccucacagcuc

SEQ ID NO: 1573143 - RNA, 23 nt, Human adenovirus E
cacggguucgugcgccaggccug

SEQ ID NO: 1573144 - RNA, 12 nt, Human adenovirus E
ugggcagggaga

SEQ ID NO: 1573145 - RNA, 15 nt, Human adenovirus E
augacugacccacug

SEQ ID NO: 1573146 - RNA, 18 nt, Human adenovirus E
gcuggaccacggcaaccc

SEQ ID NO: 1573147 - RNA, 22 nt, Human adenovirus E
cgaccaccguggaaugggccag

SEQ ID NO: 1573148 - RNA, 21 nt, Human adenovirus E
ggaccgaaagagggugcugag

SEQ ID NO: 1573149 - RNA, 21 nt, Human adenovirus E
acggcgcggccagccugcuga

SEQ ID NO: 1573150 - RNA, 19 nt, Human adenovirus E
gacaaaaaucagacccacu

SEQ ID NO: 1573151 - RNA, 18 nt, Human adenovirus E
gccaccucgccgcgcagg

SEQ ID NO: 1573152 - RNA, 16 nt, Human adenovirus E
aucuguugagcuggga

SEQ ID NO: 1573153 - RNA, 20 nt, Human adenovirus E
cgcgcgcgaggaggugaccc

SEQ ID NO: 1573154 - RNA, 22 nt, Human adenovirus E
ccagggauaggagcuccuggag

SEQ ID NO: 1573155 - RNA, 10 nt, Human adenovirus E
gccaggcgca

SEQ ID NO: 1573156 - RNA, 15 nt, Human adenovirus E
ggaagacgugcugga

SEQ ID NO: 1573157 - RNA, 20 nt, Human adenovirus E
ccggguccagggacucccuc

SEQ ID NO: 1573158 - RNA, 12 nt, Human adenovirus E
cgcaccaccgcc

SEQ ID NO: 1573159 - RNA, 19 nt, Human adenovirus E
caucaauuuuucgucccug

SEQ ID NO: 1573160 - RNA, 18 nt, Human adenovirus E
cagaggagggacuugagg

SEQ ID NO: 1573161 - RNA, 17 nt, Human adenovirus E
guggaagaagcagccgc

SEQ ID NO: 1573162 - RNA, 19 nt, Human adenovirus E
ccaagaauucuugcugaaa

SEQ ID NO: 1573163 - RNA, 21 nt, Human adenovirus E
ggaagacguaugcgcaggagc

SEQ ID NO: 1573164 - RNA, 15 nt, Human adenovirus E
  misc_feature (6)..(6): n is a, c, g, or u
cauuanuccagcaga

SEQ ID NO: 1573165 - RNA, 15 nt, Human adenovirus E
cauugucaaugccac

SEQ ID NO: 1573166 - RNA, 14 nt, Human adenovirus E
agccgaaacucauc

SEQ ID NO: 1573167 - RNA, 19 nt, Human adenovirus E
cguaugcgcaggagcacag

SEQ ID NO: 1573168 - RNA, 22 nt, Human adenovirus E
cacgccucgucaggccguccug

SEQ ID NO: 1573169 - RNA, 15 nt, Human adenovirus E
cuggacgcugcucac

SEQ ID NO: 1573170 - RNA, 12 nt, Human adenovirus E
gagucagagaaa

SEQ ID NO: 1573171 - RNA, 17 nt, Human adenovirus E
ugcugcccgacggccau

SEQ ID NO: 1573172 - RNA, 14 nt, Human adenovirus E
gaguauggcaccag

SEQ ID NO: 1573173 - RNA, 22 nt, Human adenovirus E
uucgcccuagccgccuccaccc

SEQ ID NO: 1573174 - RNA, 17 nt, Human adenovirus E
gauauucugcuccuggu

SEQ ID NO: 1573175 - RNA, 23 nt, Human adenovirus E
cagcaugaaggggacgagcugcu

SEQ ID NO: 1573176 - RNA, 23 nt, Human adenovirus E
gcgaucccugagcuccucccuca

SEQ ID NO: 1573177 - RNA, 23 nt, Human adenovirus E
cagacgcgcggcuucaggcgcca

SEQ ID NO: 1573178 - RNA, 14 nt, Human adenovirus E
aaccugacacacca

SEQ ID NO: 1573179 - RNA, 16 nt, Human adenovirus E
gaaguaccucaccugg

SEQ ID NO: 1573180 - RNA, 14 nt, Human adenovirus E
cagcggcggcagca

SEQ ID NO: 1573181 - RNA, 23 nt, Human adenovirus E
ggggccgggaccgagggggagag

SEQ ID NO: 1573182 - RNA, 15 nt, Human adenovirus E
ggguccaggccagca

SEQ ID NO: 1573183 - RNA, 21 nt, Human adenovirus E
cgaggagccccgggcccaggu

SEQ ID NO: 1573184 - RNA, 17 nt, Human adenovirus E
guugcgcagggccaggc

SEQ ID NO: 1573185 - RNA, 12 nt, Human adenovirus E
uggacugaggau

SEQ ID NO: 1573186 - RNA, 14 nt, Human adenovirus E
cuggcgugagcgac

SEQ ID NO: 1573187 - RNA, 12 nt, Human adenovirus E
cccgugcagcca

SEQ ID NO: 1573188 - RNA, 15 nt, Human adenovirus E
uaggaccaccaggaa

SEQ ID NO: 1573189 - RNA, 18 nt, Human adenovirus E
ccugugggaccugcugga

SEQ ID NO: 1573190 - RNA, 21 nt, Human adenovirus E
caaccaccccugccgcccugg

SEQ ID NO: 1573191 - RNA, 13 nt, Human adenovirus E
caggcagaggagg

SEQ ID NO: 1573192 - RNA, 20 nt, Human adenovirus E
gaugaugucauacuugagcu

SEQ ID NO: 1573193 - RNA, 19 nt, Human adenovirus E
cugaauaucaccgagcccg

SEQ ID NO: 1573194 - RNA, 19 nt, Human adenovirus E
agagcucugcaagcuccug

SEQ ID NO: 1573195 - RNA, 20 nt, Human adenovirus E
ucaaguggugcccccuccag

SEQ ID NO: 1573196 - RNA, 22 nt, Human adenovirus E
ccuuuagacagcagccccaggc

SEQ ID NO: 1573197 - RNA, 15 nt, Human adenovirus E
cucuucuacuuccuc

SEQ ID NO: 1573198 - RNA, 12 nt, Human adenovirus E
cccccggaacau

SEQ ID NO: 1573199 - RNA, 16 nt, Human adenovirus E
caggcucauccggcug

SEQ ID NO: 1573200 - RNA, 20 nt, Human adenovirus E
uccggggcagaagcacacag

SEQ ID NO: 1573201 - RNA, 16 nt, Human adenovirus E
cggcgacgaggccggc

SEQ ID NO: 1573202 - RNA, 15 nt, Human adenovirus E
cccgccccagcagca

SEQ ID NO: 1573203 - RNA, 20 nt, Human adenovirus E
cggaggaaggaaguccagag

SEQ ID NO: 1573204 - RNA, 14 nt, Human adenovirus E
acggaggccagcac

SEQ ID NO: 1573205 - RNA, 17 nt, Human adenovirus E
gaacgccugcugggccu

SEQ ID NO: 1573206 - RNA, 23 nt, Human adenovirus E
ggguggucuccgucacggugaag

SEQ ID NO: 1573207 - RNA, 22 nt, Human adenovirus E
acgugccccggggccaggagga

SEQ ID NO: 1573208 - RNA, 16 nt, Human adenovirus E
ucccaagaucuucgag

SEQ ID NO: 1573209 - RNA, 17 nt, Human adenovirus E
gacuccguggccuggag

SEQ ID NO: 1573210 - RNA, 22 nt, Human adenovirus E
ggguaaaucguucucuccagca

SEQ ID NO: 1573211 - RNA, 19 nt, Human adenovirus E
cgagcagaccuaccaggag

SEQ ID NO: 1573212 - RNA, 18 nt, Human adenovirus E
ucucagaccgugcagcag

SEQ ID NO: 1573213 - RNA, 17 nt, Human adenovirus E
accucgauuccucggga

SEQ ID NO: 1573214 - RNA, 21 nt, Human adenovirus E
gcagucaggcagaggaggagg

SEQ ID NO: 1573215 - RNA, 16 nt, Human adenovirus E
cggaucuucagccagc

SEQ ID NO: 1573216 - RNA, 23 nt, Human adenovirus E
ccuggaugccaucggcuccuagu

SEQ ID NO: 1573217 - RNA, 16 nt, Human adenovirus E
cugcccgccaccugcu

SEQ ID NO: 1573218 - RNA, 17 nt, Human adenovirus E
cgccaucgucuccugcu

SEQ ID NO: 1573219 - RNA, 14 nt, Human adenovirus E
uccacccucccagg

SEQ ID NO: 1573220 - RNA, 23 nt, Human adenovirus E
cugguguacaacgcgcugcugga

SEQ ID NO: 1573221 - RNA, 22 nt, Human adenovirus E
uaugcaauucugacaaugagga

SEQ ID NO: 1573222 - RNA, 15 nt, Human adenovirus E
gcggacgcgcgccgg

SEQ ID NO: 1573223 - RNA, 18 nt, Human adenovirus E
acgauguggacagcagcg

SEQ ID NO: 1573224 - RNA, 13 nt, Human adenovirus E
agcgccggcagga

SEQ ID NO: 1573225 - RNA, 15 nt, Human adenovirus E
ucagccagcguccga

SEQ ID NO: 1573226 - RNA, 15 nt, Human adenovirus E
gccguuccgcaccga

SEQ ID NO: 1573227 - RNA, 19 nt, Human adenovirus E
cuucgagggucugggcagc

SEQ ID NO: 1573228 - RNA, 17 nt, Human adenovirus E
ccgcgguaccuggcgcc

SEQ ID NO: 1573229 - RNA, 22 nt, Human adenovirus E
cuaacaaccaaacuaaccucca

SEQ ID NO: 1573230 - RNA, 12 nt, Human adenovirus E
ggcuugcagacc

SEQ ID NO: 1573231 - RNA, 12 nt, Human adenovirus E
acgccgcaccgc

SEQ ID NO: 1573232 - RNA, 16 nt, Human adenovirus E
aucgcccaggcaauuu

SEQ ID NO: 1573233 - RNA, 18 nt, Human adenovirus E
agggggucaucuugcagg

SEQ ID NO: 1573234 - RNA, 21 nt, Human adenovirus E
cgccaccugcuccgcgcugcc

SEQ ID NO: 1573235 - RNA, 15 nt, Human adenovirus E
cgcccaaggccgagc

SEQ ID NO: 1573236 - RNA, 20 nt, Human adenovirus E
gugaggucaucauaggccau

SEQ ID NO: 1573237 - RNA, 21 nt, Human adenovirus E
gccguccggcauuaacuccuc

SEQ ID NO: 1573238 - RNA, 18 nt, Human adenovirus E
accgccucggaccuggcc

SEQ ID NO: 1573239 - RNA, 14 nt, Human adenovirus E
gcuggaccacggca

SEQ ID NO: 1573240 - RNA, 13 nt, Human adenovirus E
cagaaguuucaug

SEQ ID NO: 1573241 - RNA, 19 nt, Human adenovirus E
caaguccuggcgggggcac

SEQ ID NO: 1573242 - RNA, 14 nt, Human adenovirus E
ccgcgcgugcagau

SEQ ID NO: 1573243 - RNA, 19 nt, Human adenovirus E
gugguccugggugagguca

SEQ ID NO: 1573244 - RNA, 19 nt, Human adenovirus E
acgucaccugcggcgugga

SEQ ID NO: 1573245 - RNA, 12 nt, Human adenovirus E
guggccuggagg

SEQ ID NO: 1573246 - RNA, 14 nt, Human adenovirus E
gcugaccaaccugg

SEQ ID NO: 1573247 - RNA, 21 nt, Human adenovirus E
gcgugccccccaagcgccagc

SEQ ID NO: 1573248 - RNA, 20 nt, Human adenovirus E
cagcagucaggcagaggagg

SEQ ID NO: 1573249 - RNA, 17 nt, Human adenovirus E
auucuuaucugccuccu

SEQ ID NO: 1573250 - RNA, 17 nt, Human adenovirus E
cauguuuucugccaaca

SEQ ID NO: 1573251 - RNA, 19 nt, Human adenovirus E
cccaugaucaagcccagca

SEQ ID NO: 1573252 - RNA, 16 nt, Human adenovirus E
acucgcagaaaaugau

SEQ ID NO: 1573253 - RNA, 18 nt, Human adenovirus E
ccacagcgucgcuccccg

SEQ ID NO: 1573254 - RNA, 19 nt, Human adenovirus E
uggagcgacaucggcacca

SEQ ID NO: 1573255 - RNA, 17 nt, Human adenovirus E
cuccuccaagucugugc

SEQ ID NO: 1573256 - RNA, 21 nt, Human adenovirus E
gcaugguguacuaugccuucu

SEQ ID NO: 1573257 - RNA, 22 nt, Human adenovirus E
gccuuagcuuugacaguacagg

SEQ ID NO: 1573258 - RNA, 16 nt, Human adenovirus E
acucagguguccagcu

SEQ ID NO: 1573259 - RNA, 19 nt, Human adenovirus E
gcgauguugagcugcacgu

SEQ ID NO: 1573260 - RNA, 16 nt, Human adenovirus E
aucacccucaagcugg

SEQ ID NO: 1573261 - RNA, 15 nt, Human adenovirus E
cagaacacgcugccc

SEQ ID NO: 1573262 - RNA, 18 nt, Human adenovirus E
accggguucgacgagcgc

SEQ ID NO: 1573263 - RNA, 17 nt, Human adenovirus E
gagggugccggacuggg

SEQ ID NO: 1573264 - RNA, 15 nt, Human adenovirus E
caggggcggcagggg

SEQ ID NO: 1573265 - RNA, 17 nt, Human adenovirus E
ugcuaccuauaccuccc

SEQ ID NO: 1573266 - RNA, 13 nt, Human adenovirus E
ggagaaccugcac

SEQ ID NO: 1573267 - RNA, 23 nt, Human adenovirus E
gauggcggcggcggcgaugcagc

SEQ ID NO: 1573268 - RNA, 15 nt, Human adenovirus E
gcccggguccaggcc

SEQ ID NO: 1573269 - RNA, 17 nt, Human adenovirus E
cggggccgggaccgagg

SEQ ID NO: 1573270 - RNA, 17 nt, Human adenovirus E
ggcgacuaccuccaccu

SEQ ID NO: 1573271 - RNA, 18 nt, Human adenovirus E
gcacaaaauucucaggug

SEQ ID NO: 1573272 - RNA, 21 nt, Human adenovirus E
agccgcgcccugggccaggac

SEQ ID NO: 1573273 - RNA, 13 nt, Human adenovirus E
cccacuccccuga

SEQ ID NO: 1573274 - RNA, 16 nt, Human adenovirus E
aggaacuggugcuuga

SEQ ID NO: 1573275 - RNA, 15 nt, Human adenovirus E
cugcacaccacccug

SEQ ID NO: 1573276 - RNA, 20 nt, Human adenovirus E
cagacggcggcaugcaaugg

SEQ ID NO: 1573277 - RNA, 14 nt, Human adenovirus E
cgggggucccggcc

SEQ ID NO: 1573278 - RNA, 23 nt, Human adenovirus E
gaggagcucagccgcgccuacga

SEQ ID NO: 1573279 - RNA, 23 nt, Human adenovirus E
augcuccaggucaucgcgccuga

SEQ ID NO: 1573280 - RNA, 12 nt, Human adenovirus E
gacucccaccug

SEQ ID NO: 1573281 - RNA, 14 nt, Human adenovirus E
ucuucgagggggaa

SEQ ID NO: 1573282 - RNA, 16 nt, Human adenovirus E
ccucugacccugccgc

SEQ ID NO: 1573283 - RNA, 13 nt, Human adenovirus E
guccgggcgcugc

SEQ ID NO: 1573284 - RNA, 16 nt, Human adenovirus E
gaucccugagcuccuc

SEQ ID NO: 1573285 - RNA, 15 nt, Human adenovirus E
cugcuucgcucggga

SEQ ID NO: 1573286 - RNA, 14 nt, Human adenovirus E
ggagcugaggaacc

SEQ ID NO: 1573287 - RNA, 23 nt, Human adenovirus E
ucucgauccagcagaccuccucg

SEQ ID NO: 1573288 - RNA, 19 nt, Human adenovirus E
ucgagggucugggcagcga

SEQ ID NO: 1573289 - RNA, 21 nt, Human adenovirus E
gcgcgaggaggugacccuggg

SEQ ID NO: 1573290 - RNA, 14 nt, Human adenovirus E
cgaaguccagcuga

SEQ ID NO: 1573291 - RNA, 17 nt, Human adenovirus E
gugccggacugggggac

SEQ ID NO: 1573292 - RNA, 19 nt, Human adenovirus E
caguggcagcggccgaggc

SEQ ID NO: 1573293 - RNA, 21 nt, Human adenovirus E
cucaggcuccucugauaagca

SEQ ID NO: 1573294 - RNA, 15 nt, Human adenovirus E
gcagaaaaaggcggg

SEQ ID NO: 1573295 - RNA, 18 nt, Human adenovirus E
guccgcgucagggugguc

SEQ ID NO: 1573296 - RNA, 17 nt, Human adenovirus E
cagcagucaggcagagg

SEQ ID NO: 1573297 - RNA, 13 nt, Human adenovirus E
gaguccagcgcgu

SEQ ID NO: 1573298 - RNA, 20 nt, Human adenovirus E
cuaccgucaccuccacagcc

SEQ ID NO: 1573299 - RNA, 17 nt, Human adenovirus E
ucuaauacuaccaccca

SEQ ID NO: 1573300 - RNA, 16 nt, Human adenovirus E
cauagcaggggcgcag

SEQ ID NO: 1573301 - RNA, 21 nt, Human adenovirus E
accaccggucucgaucauuga

SEQ ID NO: 1573302 - RNA, 22 nt, Human adenovirus E
gccgcaccgcucccuggccugc

SEQ ID NO: 1573303 - RNA, 21 nt, Human adenovirus E
cagccacagcgcgcacccggu

SEQ ID NO: 1573304 - RNA, 14 nt, Human adenovirus E
guuacgugcagcag

SEQ ID NO: 1573305 - RNA, 17 nt, Human adenovirus E
cccagccccgccaccuc

SEQ ID NO: 1573306 - RNA, 13 nt, Human adenovirus E
cugaaaacaccac

SEQ ID NO: 1573307 - RNA, 18 nt, Human adenovirus E
acuuccucaaacgcccaa

SEQ ID NO: 1573308 - RNA, 15 nt, Human adenovirus E
ccuccagaacacgcu

SEQ ID NO: 1573309 - RNA, 14 nt, Human adenovirus E
gucccccacccagu

SEQ ID NO: 1573310 - RNA, 19 nt, Human adenovirus E
cagucuggaggaagacgag

SEQ ID NO: 1573311 - RNA, 20 nt, Human adenovirus E
gcaugaaggggacgagcugc

SEQ ID NO: 1573312 - RNA, 23 nt, Human adenovirus E
gaucagccccgcgcgcgcgcacg

SEQ ID NO: 1573313 - RNA, 17 nt, Human adenovirus E
cgucaaggaugcgcugc

SEQ ID NO: 1573314 - RNA, 14 nt, Human adenovirus E
ggccuuggaggcgg

SEQ ID NO: 1573315 - RNA, 22 nt, Human adenovirus E
gccugcucgagugccacugccg

SEQ ID NO: 1573316 - RNA, 21 nt, Human adenovirus E
cggagauguuggagauggcga

SEQ ID NO: 1573317 - RNA, 16 nt, Human adenovirus E
ggcggcgcugcagagc

SEQ ID NO: 1573318 - RNA, 20 nt, Human adenovirus E
cacagaucugcaucucccag

SEQ ID NO: 1573319 - RNA, 21 nt, Human adenovirus E
gccagccccgauuaugcaggg

SEQ ID NO: 1573320 - RNA, 20 nt, Human adenovirus E
gcggcgauguugagcugcac

SEQ ID NO: 1573321 - RNA, 16 nt, Human adenovirus E
guggaauuugagcugc

SEQ ID NO: 1573322 - RNA, 14 nt, Human adenovirus E
guuccggagcagcu

SEQ ID NO: 1573323 - RNA, 21 nt, Human adenovirus E
ccccuccagaacacgcugccc

SEQ ID NO: 1573324 - RNA, 15 nt, Human adenovirus E
aaucaucauguuaca

SEQ ID NO: 1573325 - RNA, 20 nt, Human adenovirus E
caccgccgacgagaagcagc

SEQ ID NO: 1573326 - RNA, 23 nt, Human adenovirus E
acgugccccggggccaggaggac

SEQ ID NO: 1573327 - RNA, 14 nt, Human adenovirus E
aggaugcgagccga

SEQ ID NO: 1573328 - RNA, 20 nt, Human adenovirus E
ccggucccccacccaguccc

SEQ ID NO: 1573329 - RNA, 21 nt, Human adenovirus E
caaaagaaaaauccuccaggu

SEQ ID NO: 1573330 - RNA, 21 nt, Human adenovirus E
ggcaucucgauccagcagacc

SEQ ID NO: 1573331 - RNA, 13 nt, Human adenovirus E
aaaagcuuaucca

SEQ ID NO: 1573332 - RNA, 20 nt, Human adenovirus E
cagcaccgccccgcccgcca

SEQ ID NO: 1573333 - RNA, 17 nt, Human adenovirus E
cgaguuggaggagaugg

SEQ ID NO: 1573334 - RNA, 20 nt, Human adenovirus E
agcccaugaucaagcccagc

SEQ ID NO: 1573335 - RNA, 18 nt, Human adenovirus E
agaucguccagggcagcu

SEQ ID NO: 1573336 - RNA, 16 nt, Human adenovirus E
ggaaagguuggggcac

SEQ ID NO: 1573337 - RNA, 19 nt, Human adenovirus E
gcuguaguggugugcaugu

SEQ ID NO: 1573338 - RNA, 10 nt, Human adenovirus E
gauggugguc

SEQ ID NO: 1573339 - RNA, 15 nt, Human adenovirus E
cauuuuuccagccuu

SEQ ID NO: 1573340 - RNA, 14 nt, Human adenovirus E
gaagaaucgccagg

SEQ ID NO: 1573341 - RNA, 14 nt, Human adenovirus E
cugcuugcauuuca

SEQ ID NO: 1573342 - RNA, 19 nt, Human adenovirus E
cgggcacucccgcaucugc

SEQ ID NO: 1573343 - RNA, 19 nt, Human adenovirus E
ucaucaaguuucaaugugg

SEQ ID NO: 1573344 - RNA, 13 nt, Human adenovirus E
cagucccacugcu

SEQ ID NO: 1573345 - RNA, 23 nt, Human adenovirus E
gccuggaccgaaagagggugcug

SEQ ID NO: 1573346 - RNA, 16 nt, Human adenovirus E
ccgcuggaccacggca

SEQ ID NO: 1573347 - RNA, 14 nt, Human adenovirus E
cccucaaaggccgc

SEQ ID NO: 1573348 - RNA, 16 nt, Human adenovirus E
ccugcucguccucacu

SEQ ID NO: 1573349 - RNA, 15 nt, Human adenovirus E
cguccucggcgcugu

SEQ ID NO: 1573350 - RNA, 12 nt, Human adenovirus E
cucccucgguga

SEQ ID NO: 1573351 - RNA, 17 nt, Human adenovirus E
aucagcgccccgcaucc

SEQ ID NO: 1573352 - RNA, 13 nt, Human adenovirus E
uggaaacauaaag

SEQ ID NO: 1573353 - RNA, 16 nt, Human adenovirus E
caccggcggcggcgcg

SEQ ID NO: 1573354 - RNA, 20 nt, Human adenovirus E
ccucacagaucugcaucucc

SEQ ID NO: 1573355 - RNA, 15 nt, Human adenovirus E
caugcaagagaugga

SEQ ID NO: 1573356 - RNA, 19 nt, Human adenovirus E
cgcgccgcagugggcgcag

SEQ ID NO: 1573357 - RNA, 17 nt, Human adenovirus E
agcaggggcgcagggca

SEQ ID NO: 1573358 - RNA, 23 nt, Human adenovirus E
ccugggccugaugcaccuguggg

SEQ ID NO: 1573359 - RNA, 13 nt, Human adenovirus E
ccaccucagcuca

SEQ ID NO: 1573360 - RNA, 16 nt, Human adenovirus E
gccaacgccaguccag

SEQ ID NO: 1573361 - RNA, 17 nt, Human adenovirus E
gcgcggaccugcacugg

SEQ ID NO: 1573362 - RNA, 12 nt, Human adenovirus E
cggccgccguga

SEQ ID NO: 1573363 - RNA, 23 nt, Human adenovirus E
cuacacugacguaaaggccaaag

SEQ ID NO: 1573364 - RNA, 17 nt, Human adenovirus E
gaccgacgugcgcgagg

SEQ ID NO: 1573365 - RNA, 15 nt, Human adenovirus E
cggcggcagcaggug

SEQ ID NO: 1573366 - RNA, 12 nt, Human adenovirus E
gaggccagcacc

SEQ ID NO: 1573367 - RNA, 22 nt, Human adenovirus E
cgagggccugcucgagugccac

SEQ ID NO: 1573368 - RNA, 16 nt, Human adenovirus E
gcgagggggagcgcga

SEQ ID NO: 1573369 - RNA, 13 nt, Human adenovirus E
gucgcccagcgcc

SEQ ID NO: 1573370 - RNA, 13 nt, Human adenovirus E
augggcaccugga

SEQ ID NO: 1573371 - RNA, 19 nt, Human adenovirus E
aggcagaggaggacagccu

SEQ ID NO: 1573372 - RNA, 14 nt, Human adenovirus E
gauggcuggcagag

SEQ ID NO: 1573373 - RNA, 20 nt, Human adenovirus E
ccacccucuccccccgcaca

SEQ ID NO: 1573374 - RNA, 16 nt, Human adenovirus E
gggcccggaugcaggg

SEQ ID NO: 1573375 - RNA, 20 nt, Human adenovirus E
gggagcugcggcgcggccug

SEQ ID NO: 1573376 - RNA, 23 nt, Human adenovirus E
ucccggaggaggggggccaccuc

SEQ ID NO: 1573377 - RNA, 17 nt, Human adenovirus E
aguugagcgugguggcg

SEQ ID NO: 1573378 - RNA, 18 nt, Human adenovirus E
gcagucauaaucaucugc

SEQ ID NO: 1573379 - RNA, 19 nt, Human adenovirus E
cccccgggaguuccuccac

SEQ ID NO: 1573380 - RNA, 21 nt, Human adenovirus E
cgguggggccguagaugaccc

SEQ ID NO: 1573381 - RNA, 13 nt, Human adenovirus E
gugccgcgguccu

SEQ ID NO: 1573382 - RNA, 21 nt, Human adenovirus E
cgcgacggugucgagccugcu

SEQ ID NO: 1573383 - RNA, 18 nt, Human adenovirus E
ugcggaaccacagggcca

SEQ ID NO: 1573384 - RNA, 13 nt, Human adenovirus E
cgcugcagagcca

SEQ ID NO: 1573385 - RNA, 16 nt, Human adenovirus E
caccaacgccauccug

SEQ ID NO: 1573386 - RNA, 22 nt, Human adenovirus E
cuauucuuaucugccuccucca

SEQ ID NO: 1573387 - RNA, 15 nt, Human adenovirus E
ccgcaccgaggugcc

SEQ ID NO: 1573388 - RNA, 18 nt, Human adenovirus E
ucaaccccuucuccggcu

SEQ ID NO: 1573389 - RNA, 17 nt, Human adenovirus E
caccuccgacgcggccg

SEQ ID NO: 1573390 - RNA, 15 nt, Human adenovirus E
ugggguagcagcgcc

SEQ ID NO: 1573391 - RNA, 17 nt, Human adenovirus E
ucuuucauauccucucc

SEQ ID NO: 1573392 - RNA, 13 nt, Human adenovirus E
gucccuggcuccg

SEQ ID NO: 1573393 - RNA, 17 nt, Human adenovirus E
cccggcggcgcgugcag

SEQ ID NO: 1573394 - RNA, 19 nt, Human adenovirus E
cacagaucaaaccgcagca

SEQ ID NO: 1573395 - RNA, 16 nt, Human adenovirus E
ccauaggaccaccagg

SEQ ID NO: 1573396 - RNA, 22 nt, Human adenovirus E
ucauaguugugguccuggguga

SEQ ID NO: 1573397 - RNA, 21 nt, Human adenovirus E
cauagcuuaccgagcagcagc

SEQ ID NO: 1573398 - RNA, 15 nt, Human adenovirus E
gccgcuuccgcugcu

SEQ ID NO: 1573399 - RNA, 17 nt, Human adenovirus E
cugcucccagagcugga

SEQ ID NO: 1573400 - RNA, 18 nt, Human adenovirus E
gauccugcggaaccacag

SEQ ID NO: 1573401 - RNA, 22 nt, Human adenovirus E
gaacccguccugaucugcacgg

SEQ ID NO: 1573402 - RNA, 18 nt, Human adenovirus E
cgaggugccccagagcga

SEQ ID NO: 1573403 - RNA, 11 nt, Human adenovirus E
acagcagcccc

SEQ ID NO: 1573404 - RNA, 13 nt, Human adenovirus E
gugccccagggca

SEQ ID NO: 1573405 - RNA, 19 nt, Human adenovirus E
ggaccuggccaaccaggcc

SEQ ID NO: 1573406 - RNA, 16 nt, Human adenovirus E
gcacuggcagcccagc

SEQ ID NO: 1573407 - RNA, 20 nt, Human adenovirus E
gauacaccaagaacagccag

SEQ ID NO: 1573408 - RNA, 15 nt, Human adenovirus E
ucucgauccagcaga

SEQ ID NO: 1573409 - RNA, 16 nt, Human adenovirus E
cccagccccgccaccu

SEQ ID NO: 1573410 - RNA, 22 nt, Human adenovirus E
ccuggugaacauucugcagagc

SEQ ID NO: 1573411 - RNA, 19 nt, Human adenovirus E
caugacggcgacuaccucc

SEQ ID NO: 1573412 - RNA, 20 nt, Human adenovirus E
gcucaccgccacgccccgca

SEQ ID NO: 1573413 - RNA, 21 nt, Human adenovirus E
cccgugcgcgugcgcgggcac

SEQ ID NO: 1573414 - RNA, 15 nt, Human adenovirus E
ggggacgagcugcuu

SEQ ID NO: 1573415 - RNA, 19 nt, Human adenovirus E
gcaccacagggcaggcgcu

SEQ ID NO: 1573416 - RNA, 16 nt, Human adenovirus E
cuaccuggccuaccac

SEQ ID NO: 1573417 - RNA, 12 nt, Human adenovirus E
cccgcagcaguc

SEQ ID NO: 1573418 - RNA, 13 nt, Human adenovirus E
caucuccgaggac

SEQ ID NO: 1573419 - RNA, 16 nt, Human adenovirus E
uugccgaaggacccca

SEQ ID NO: 1573420 - RNA, 21 nt, Human adenovirus E
  misc_feature (8)..(8): n is a, c, g, or u
aguccugnugagcggcccugc

SEQ ID NO: 1573421 - RNA, 17 nt, Human adenovirus E
gugucccugaccaugac

SEQ ID NO: 1573422 - RNA, 19 nt, Human adenovirus E
cuccugccgcgccaaccgc

SEQ ID NO: 1573423 - RNA, 18 nt, Human adenovirus E
gaagcaguaguacagaaa

SEQ ID NO: 1573424 - RNA, 17 nt, Human adenovirus E
cucuucuuccuccucca

SEQ ID NO: 1573425 - RNA, 16 nt, Human adenovirus E
auggaacuacagcagg

SEQ ID NO: 1573426 - RNA, 18 nt, Human adenovirus E
uccagggacucccucagc

SEQ ID NO: 1573427 - RNA, 22 nt, Human adenovirus E
acgggugaaugacauccgcgcc

SEQ ID NO: 1573428 - RNA, 17 nt, Human adenovirus E
ugaaggggacgagcugc

SEQ ID NO: 1573429 - RNA, 12 nt, Human adenovirus E
accgagcuccag

SEQ ID NO: 1573430 - RNA, 16 nt, Human adenovirus E
gcgaccagcgugcguu

SEQ ID NO: 1573431 - RNA, 15 nt, Human adenovirus E
cgccagggcuugcag

SEQ ID NO: 1573432 - RNA, 18 nt, Human adenovirus E
ccgugaccuugcagcagg

SEQ ID NO: 1573433 - RNA, 18 nt, Human adenovirus E
gugucgagccugcugacg

SEQ ID NO: 1573434 - RNA, 18 nt, Human adenovirus E
cacugucgagagccacac

SEQ ID NO: 1573435 - RNA, 17 nt, Human adenovirus E
cuuccucagcacccagc

SEQ ID NO: 1573436 - RNA, 16 nt, Human adenovirus E
ugauaucuuccagaua

SEQ ID NO: 1573437 - RNA, 19 nt, Human adenovirus E
ucauccucgaacgcuccgg

SEQ ID NO: 1573438 - RNA, 13 nt, Human adenovirus E
uccgucaagcugc

SEQ ID NO: 1573439 - RNA, 13 nt, Human adenovirus E
gagauggaggaag

SEQ ID NO: 1573440 - RNA, 12 nt, Human adenovirus E
cgggcggcaggg

SEQ ID NO: 1573441 - RNA, 17 nt, Human adenovirus E
accucauuuuccccgag

SEQ ID NO: 1573442 - RNA, 17 nt, Human adenovirus E
acccccgccgcggcgcc

SEQ ID NO: 1573443 - RNA, 14 nt, Human adenovirus E
uccaguucguggag

SEQ ID NO: 1573444 - RNA, 20 nt, Human adenovirus E
guuauuuuaaugaaucagau

SEQ ID NO: 1573445 - RNA, 17 nt, Human adenovirus E
cuggaagaagcagaaga

SEQ ID NO: 1573446 - RNA, 14 nt, Human adenovirus E
cgccaggccugcaa

SEQ ID NO: 1573447 - RNA, 17 nt, Human adenovirus E
ggucucccgcaagaccc

SEQ ID NO: 1573448 - RNA, 17 nt, Human adenovirus E
cacccgugcagccacag

SEQ ID NO: 1573449 - RNA, 14 nt, Human adenovirus E
gcaucagcuggaag

SEQ ID NO: 1573450 - RNA, 23 nt, Human adenovirus E
ggcauuaccccuacacaugauca

SEQ ID NO: 1573451 - RNA, 16 nt, Human adenovirus E
gcagccccggaugauc

SEQ ID NO: 1573452 - RNA, 19 nt, Human adenovirus E
ugcauguucauuuuugcuu

SEQ ID NO: 1573453 - RNA, 15 nt, Human adenovirus E
acaacaagcauggag

SEQ ID NO: 1573454 - RNA, 15 nt, Human adenovirus E
cguggugcaggagcg

SEQ ID NO: 1573455 - RNA, 12 nt, Human adenovirus E
cacaccuggcag

SEQ ID NO: 1573456 - RNA, 20 nt, Human adenovirus E
cagggauaggagcuccugga

SEQ ID NO: 1573457 - RNA, 20 nt, Human adenovirus E
guucagggaggcgcugcuga

SEQ ID NO: 1573458 - RNA, 22 nt, Human adenovirus E
ccucugggugaaggccacggga

SEQ ID NO: 1573459 - RNA, 15 nt, Human adenovirus E
ggcgacuaccuccac

SEQ ID NO: 1573460 - RNA, 16 nt, Human adenovirus E
ucagcgcacucucgag

SEQ ID NO: 1573461 - RNA, 19 nt, Human adenovirus E
agcgaccaggagcugaugc

SEQ ID NO: 1573462 - RNA, 13 nt, Human adenovirus E
ucuguugagcugg

SEQ ID NO: 1573463 - RNA, 24 nt, Human adenovirus E
ugcauguucauuuuugcuugcugc

SEQ ID NO: 1573464 - RNA, 14 nt, Human adenovirus E
cacaggcagcaaag

SEQ ID NO: 1573465 - RNA, 12 nt, Human adenovirus E
ugagggacgagg

SEQ ID NO: 1573466 - RNA, 20 nt, Human adenovirus E
gcaggggcggcucggggccc

SEQ ID NO: 1573467 - RNA, 15 nt, Human adenovirus E
acaacgcgcugcugg

SEQ ID NO: 1573468 - RNA, 23 nt, Human adenovirus E
cauucuacacuaaaaaaauacug

SEQ ID NO: 1573469 - RNA, 23 nt, Human adenovirus E
gccugcaagacagucuggaggaa

SEQ ID NO: 1573470 - RNA, 20 nt, Human adenovirus E
acccggugauaucuuccaga

SEQ ID NO: 1573471 - RNA, 20 nt, Human adenovirus E
cggggcuguggaccucggcc

SEQ ID NO: 1573472 - RNA, 22 nt, Human adenovirus E
cucugcacgccgcaccgcuccc

SEQ ID NO: 1573473 - RNA, 20 nt, Human adenovirus E
gcagaccuaccaggagauca

SEQ ID NO: 1573474 - RNA, 15 nt, Human adenovirus E
gggcagaagcacaca

SEQ ID NO: 1573475 - RNA, 13 nt, Human adenovirus E
agcaugagcacca

SEQ ID NO: 1573476 - RNA, 22 nt, Human adenovirus E
ccuggucggcguucauccccgg

SEQ ID NO: 1573477 - RNA, 19 nt, Human adenovirus E
cauaaucaucugcauguuc

SEQ ID NO: 1573478 - RNA, 22 nt, Human adenovirus E
ugaagcccacggccgccagcuc

SEQ ID NO: 1573479 - RNA, 20 nt, Human adenovirus E
gagcaucguggugcaggagc

SEQ ID NO: 1573480 - RNA, 17 nt, Human adenovirus E
cgagcccaacccgcgcc

SEQ ID NO: 1573481 - RNA, 16 nt, Human adenovirus E
cuucaacaaguacugc

SEQ ID NO: 1573482 - RNA, 22 nt, Human adenovirus E
agaugccuuucaagagccccuc

SEQ ID NO: 1573483 - RNA, 19 nt, Human adenovirus E
ucgucaaggaugcgcugcu

SEQ ID NO: 1573484 - RNA, 21 nt, Human adenovirus E
uaaccgccccgccgcccagcc

SEQ ID NO: 1573485 - RNA, 13 nt, Human adenovirus E
accguggugcaga

SEQ ID NO: 1573486 - RNA, 16 nt, Human adenovirus E
gaggaugcagcagcug

SEQ ID NO: 1573487 - RNA, 20 nt, Human adenovirus E
cugcgccaccacccccagua

SEQ ID NO: 1573488 - RNA, 17 nt, Human adenovirus E
agcuccucccucagcaa

SEQ ID NO: 1573489 - RNA, 13 nt, Human adenovirus E
ggcgcgggcggaa

SEQ ID NO: 1573490 - RNA, 19 nt, Human adenovirus E
cuucgcgauguugaugugu

SEQ ID NO: 1573491 - RNA, 17 nt, Human adenovirus E
ugcaagaguuccaggcg

SEQ ID NO: 1573492 - RNA, 14 nt, Human adenovirus E
cuggccaaccaggc

SEQ ID NO: 1573493 - RNA, 18 nt, Human adenovirus E
ccuggagcgacaucggca

SEQ ID NO: 1573494 - RNA, 18 nt, Human adenovirus E
augaauacacccccggaa

SEQ ID NO: 1573495 - RNA, 13 nt, Human adenovirus E
gcacgacaggcag

SEQ ID NO: 1573496 - RNA, 15 nt, Human adenovirus E
gagccacugcuaccu

SEQ ID NO: 1573497 - RNA, 19 nt, Human adenovirus E
agcgccggcaggacccgga

SEQ ID NO: 1573498 - RNA, 17 nt, Human adenovirus E
ugcucgaucuccuccuc

SEQ ID NO: 1573499 - RNA, 16 nt, Human adenovirus E
caccuccacagccccu

SEQ ID NO: 1573500 - RNA, 12 nt, Human adenovirus E
cggcggccuggg

SEQ ID NO: 1573501 - RNA, 14 nt, Human adenovirus E
gggacgcagggcca

SEQ ID NO: 1573502 - RNA, 23 nt, Human adenovirus E
guauggcaccagacgaugggcgu

SEQ ID NO: 1573503 - RNA, 14 nt, Human adenovirus E
cagugucuggagga

SEQ ID NO: 1573504 - RNA, 16 nt, Human adenovirus E
cauuugagcuggaggg

SEQ ID NO: 1573505 - RNA, 11 nt, Human adenovirus E
ucccacugcua

SEQ ID NO: 1573506 - RNA, 20 nt, Human adenovirus E
accucgacccccagaccggu

SEQ ID NO: 1573507 - RNA, 13 nt, Human adenovirus E
gcuguaguggugu

SEQ ID NO: 1573508 - RNA, 23 nt, Human adenovirus E
cggaacugguacuuggccagcca

SEQ ID NO: 1573509 - RNA, 22 nt, Human adenovirus E
gaagcccacggccgccagcucc

SEQ ID NO: 1573510 - RNA, 14 nt, Human adenovirus E
augaugcccacggc

SEQ ID NO: 1573511 - RNA, 12 nt, Human adenovirus E
cacgcuccagcc

SEQ ID NO: 1573512 - RNA, 14 nt, Human adenovirus E
cgugggcggcggcc

SEQ ID NO: 1573513 - RNA, 20 nt, Human adenovirus E
caaacucaugauggccgugg

SEQ ID NO: 1573514 - RNA, 20 nt, Human adenovirus E
ggcgccuucaauuggagcag

SEQ ID NO: 1573515 - RNA, 16 nt, Human adenovirus E
acuaccuggccuacca

SEQ ID NO: 1573516 - RNA, 14 nt, Human adenovirus E
cggucaccuuccgc

SEQ ID NO: 1573517 - RNA, 15 nt, Human adenovirus E
cuguugaugugaugg

SEQ ID NO: 1573518 - RNA, 13 nt, Human adenovirus E
cuccuccucggcc

SEQ ID NO: 1573519 - RNA, 18 nt, Human adenovirus E
ucugacgccucuggguga

SEQ ID NO: 1573520 - RNA, 12 nt, Human adenovirus E
uuuuuccuccac

SEQ ID NO: 1573521 - RNA, 14 nt, Human adenovirus E
guggagcuggagug

SEQ ID NO: 1573522 - RNA, 18 nt, Human adenovirus E
gcagcagcacacaacagg

SEQ ID NO: 1573523 - RNA, 20 nt, Human adenovirus E
gcacgaggaggagcuggcag

SEQ ID NO: 1573524 - RNA, 13 nt, Human adenovirus E
ggacguccagagc

SEQ ID NO: 1573525 - RNA, 23 nt, Human adenovirus E
uucgccuccuacgugcucuuugc

SEQ ID NO: 1573526 - RNA, 19 nt, Human adenovirus E
cgcgugcacgaagcccugc

SEQ ID NO: 1573527 - RNA, 15 nt, Human adenovirus E
agcugucggccugcg

SEQ ID NO: 1573528 - RNA, 18 nt, Human adenovirus E
gaauccccacuggcuccc

SEQ ID NO: 1573529 - RNA, 21 nt, Human adenovirus E
cuggggguauaggcagggaga

SEQ ID NO: 1573530 - RNA, 14 nt, Human adenovirus E
acugaauuuuuguc

SEQ ID NO: 1573531 - RNA, 15 nt, Human adenovirus E
gucguccccggagag

SEQ ID NO: 1573532 - RNA, 14 nt, Human adenovirus E
uaaguguugaauuu

SEQ ID NO: 1573533 - RNA, 13 nt, Human adenovirus E
gagacgaugggca

SEQ ID NO: 1573534 - RNA, 15 nt, Human adenovirus E
ggugcgacugggcuu

SEQ ID NO: 1573535 - RNA, 23 nt, Human adenovirus E
gucugcccgcaggcgggacagag

SEQ ID NO: 1573536 - RNA, 21 nt, Human adenovirus E
uggacguuuagagccucggga

SEQ ID NO: 1573537 - RNA, 23 nt, Human adenovirus E
gcggcacccgcgcgugcagauga

SEQ ID NO: 1573538 - RNA, 17 nt, Human adenovirus E
caaaaaguuugagguau

SEQ ID NO: 1573539 - RNA, 13 nt, Human adenovirus E
gcuccgcgcugcc

SEQ ID NO: 1573540 - RNA, 18 nt, Human adenovirus E
guaccaguccgggccgga

SEQ ID NO: 1573541 - RNA, 13 nt, Human adenovirus E
gauguugaagugg

SEQ ID NO: 1573542 - RNA, 13 nt, Human adenovirus E
cagucucuggagc

SEQ ID NO: 1573543 - RNA, 17 nt, Human adenovirus E
cagaaggggggcagggg

SEQ ID NO: 1573544 - RNA, 17 nt, Human adenovirus E
gguggggcggccagcug

SEQ ID NO: 1573545 - RNA, 18 nt, Human adenovirus E
gcuggcagagccccuucc

SEQ ID NO: 1573546 - RNA, 14 nt, Human adenovirus E
gcgugaugcagcag

SEQ ID NO: 1573547 - RNA, 17 nt, Human adenovirus E
ugagcuccucccucagc

SEQ ID NO: 1573548 - RNA, 22 nt, Human adenovirus E
uaugauugaaaaccaucacaga

SEQ ID NO: 1573549 - RNA, 20 nt, Human adenovirus E
gaucggguuggucauccugg

SEQ ID NO: 1573550 - RNA, 16 nt, Human adenovirus E
uacccggaggguccuc

SEQ ID NO: 1573551 - RNA, 19 nt, Human adenovirus E
cccagcagcaacuuccagc

SEQ ID NO: 1573552 - RNA, 20 nt, Human adenovirus E
gccgaacucgcgccugcugc

SEQ ID NO: 1573553 - RNA, 21 nt, Human adenovirus E
gugcaggagcgcgggcugccg

SEQ ID NO: 1573554 - RNA, 17 nt, Human adenovirus E
gcagaccuaccaggaga

SEQ ID NO: 1573555 - RNA, 20 nt, Human adenovirus E
cagggucucaaagcuccgcu

SEQ ID NO: 1573556 - RNA, 21 nt, Human adenovirus E
ccugugggaccugcuggaggc

SEQ ID NO: 1573557 - RNA, 13 nt, Human adenovirus E
gcgggaggcaggu

SEQ ID NO: 1573558 - RNA, 18 nt, Human adenovirus E
caagaagaggcagcagca

SEQ ID NO: 1573559 - RNA, 13 nt, Human adenovirus E
cucagcaccgagg

SEQ ID NO: 1573560 - RNA, 18 nt, Human adenovirus E
acaccgccuaccgcagcu

SEQ ID NO: 1573561 - RNA, 23 nt, Human adenovirus E
cccagucauagcaggggcgcagg

SEQ ID NO: 1573562 - RNA, 17 nt, Human adenovirus E
gcaucuggcccggcagg

SEQ ID NO: 1573563 - RNA, 18 nt, Human adenovirus E
cccgcgcugauccccauc

SEQ ID NO: 1573564 - RNA, 19 nt, Human adenovirus E
cgugcagaaccccaccagc

SEQ ID NO: 1573565 - RNA, 22 nt, Human adenovirus E
acagaguuaugaucaccagcug

SEQ ID NO: 1573566 - RNA, 19 nt, Human adenovirus E
uggccgccggugccgccca

SEQ ID NO: 1573567 - RNA, 14 nt, Human adenovirus E
cagggacucccuca

SEQ ID NO: 1573568 - RNA, 19 nt, Human adenovirus E
ggagccuuguugcgcaggg

SEQ ID NO: 1573569 - RNA, 14 nt, Human adenovirus E
aagcccggguccag

SEQ ID NO: 1573570 - RNA, 22 nt, Human adenovirus E
uaccaggaaauuccccagccca

SEQ ID NO: 1573571 - RNA, 15 nt, Human adenovirus E
accugcaucugcugc

SEQ ID NO: 1573572 - RNA, 22 nt, Human adenovirus E
cggugugccgcgguccuccucg

SEQ ID NO: 1573573 - RNA, 12 nt, Human adenovirus E
ggcuggcagagc

SEQ ID NO: 1573574 - RNA, 22 nt, Human adenovirus E
accgcccagaucccgccugggg

SEQ ID NO: 1573575 - RNA, 13 nt, Human adenovirus E
ccgagcagcagca

SEQ ID NO: 1573576 - RNA, 19 nt, Human adenovirus E
gcacucaacccaccccacc

SEQ ID NO: 1573577 - RNA, 20 nt, Human adenovirus E
gccccuacgucuacaaggcc

SEQ ID NO: 1573578 - RNA, 16 nt, Human adenovirus E
ucgcagaaaaugaugc

SEQ ID NO: 1573579 - RNA, 17 nt, Human adenovirus E
cgcagggggccacgagc

SEQ ID NO: 1573580 - RNA, 13 nt, Human adenovirus E
ccgccagcuccuc

SEQ ID NO: 1573581 - RNA, 14 nt, Human adenovirus E
ugcaucucuucagc

SEQ ID NO: 1573582 - RNA, 14 nt, Human adenovirus E
cagcagccccaggc

SEQ ID NO: 1573583 - RNA, 17 nt, Human adenovirus E
ugggccuuuggaagaug

SEQ ID NO: 1573584 - RNA, 13 nt, Human adenovirus E
cagcucaacagcu

SEQ ID NO: 1573585 - RNA, 16 nt, Human adenovirus E
ucucaucaaguuucaa

SEQ ID NO: 1573586 - RNA, 16 nt, Human adenovirus E
gggcccagguuggugc

SEQ ID NO: 1573587 - RNA, 17 nt, Human adenovirus E
augcgucgccaccacca

SEQ ID NO: 1573588 - RNA, 16 nt, Human adenovirus E
ccugcuggaggccauc

SEQ ID NO: 1573589 - RNA, 20 nt, Human adenovirus E
gcacgagaagguccuggcca

SEQ ID NO: 1573590 - RNA, 22 nt, Human adenovirus E
ccgccuaccugauaucgccucc

SEQ ID NO: 1573591 - RNA, 17 nt, Human adenovirus E
ucgcuauucgccccaga

SEQ ID NO: 1573592 - RNA, 13 nt, Human adenovirus E
caccugcagcaga

SEQ ID NO: 1573593 - RNA, 15 nt, Human adenovirus E
cagggaggcgcugcu

SEQ ID NO: 1573594 - RNA, 18 nt, Human adenovirus E
cugcucgagugccacugc

SEQ ID NO: 1573595 - RNA, 14 nt, Human adenovirus E
ccacuacagccuag

SEQ ID NO: 1573596 - RNA, 22 nt, Human adenovirus E
caucgucaaggaugcgcugcuc

SEQ ID NO: 1573597 - RNA, 19 nt, Human adenovirus E
aacaguauccgcagcagcg

SEQ ID NO: 1573598 - RNA, 15 nt, Human adenovirus E
ucgcccgucucucag

SEQ ID NO: 1573599 - RNA, 15 nt, Human adenovirus E
gcgccaucagcaagc

SEQ ID NO: 1573600 - RNA, 22 nt, Human adenovirus E
cacagcggcggcagcaggugga

SEQ ID NO: 1573601 - RNA, 11 nt, Human adenovirus E
guccaggccag

SEQ ID NO: 1573602 - RNA, 15 nt, Human adenovirus E
gcgcugcccucggac

SEQ ID NO: 1573603 - RNA, 16 nt, Human adenovirus E
ccggcucccccggcca

SEQ ID NO: 1573604 - RNA, 12 nt, Human adenovirus E
ggcgcgcaggcc

SEQ ID NO: 1573605 - RNA, 17 nt, Human adenovirus E
uccacgagcgccagcug

SEQ ID NO: 1573606 - RNA, 18 nt, Human adenovirus E
gggcacgcacccgggcuu

SEQ ID NO: 1573607 - RNA, 16 nt, Human adenovirus E
gccgucgccgcaccgc

SEQ ID NO: 1573608 - RNA, 15 nt, Human adenovirus E
ggcuggcggugcuca

SEQ ID NO: 1573609 - RNA, 19 nt, Human adenovirus E
cagagcgcccuccaccggc

SEQ ID NO: 1573610 - RNA, 20 nt, Human adenovirus E
gguggacuucaccgagagcc

SEQ ID NO: 1573611 - RNA, 14 nt, Human adenovirus E
cguaggccugggcg

SEQ ID NO: 1573612 - RNA, 14 nt, Human adenovirus E
acuccccugaagca

SEQ ID NO: 1573613 - RNA, 18 nt, Human adenovirus E
agcucggcgaugguggcg

SEQ ID NO: 1573614 - RNA, 18 nt, Human adenovirus E
gagccaggugaggucggg

SEQ ID NO: 1573615 - RNA, 19 nt, Human adenovirus E
cugggucccggcgcccgcc

SEQ ID NO: 1573616 - RNA, 20 nt, Human adenovirus E
aucaaaacacgacuuucaaa

SEQ ID NO: 1573617 - RNA, 18 nt, Human adenovirus E
ucagcaucaucugggccu

SEQ ID NO: 1573618 - RNA, 14 nt, Human adenovirus E
cagcaauaacugua

SEQ ID NO: 1573619 - RNA, 15 nt, Human adenovirus E
uaccgagcagcagca

SEQ ID NO: 1573620 - RNA, 10 nt, Human adenovirus E
cgcccagccc

SEQ ID NO: 1573621 - RNA, 15 nt, Human adenovirus E
ucgacgagcgcacca

SEQ ID NO: 1573622 - RNA, 15 nt, Human adenovirus E
uaggacguccagagc

SEQ ID NO: 1573623 - RNA, 15 nt, Human adenovirus E
ggucccggccggggg

SEQ ID NO: 1573624 - RNA, 14 nt, Human adenovirus E
ggccaaccaggccg

SEQ ID NO: 1573625 - RNA, 19 nt, Human adenovirus E
gacggcgcagcuguuccug

SEQ ID NO: 1573626 - RNA, 16 nt, Human adenovirus E
ccagacgcgcggcuuc

SEQ ID NO: 1573627 - RNA, 15 nt, Human adenovirus E
agcucgacgagccgg

SEQ ID NO: 1573628 - RNA, 18 nt, Human adenovirus E
ugagccgcgcccugggcc

SEQ ID NO: 1573629 - RNA, 15 nt, Human adenovirus E
gaucaccagcuggcc

SEQ ID NO: 1573630 - RNA, 18 nt, Human adenovirus E
ggaucuucagccagcguc

SEQ ID NO: 1573631 - RNA, 15 nt, Human adenovirus E
gcaagacccggucac

SEQ ID NO: 1573632 - RNA, 14 nt, Human adenovirus E
cgcgcuccacggug

SEQ ID NO: 1573633 - RNA, 24 nt, Human adenovirus E
cacagcaaccucaggcacacgcac

SEQ ID NO: 1573634 - RNA, 12 nt, Human adenovirus E
cuacuuccuccu

SEQ ID NO: 1573635 - RNA, 18 nt, Human adenovirus E
agagacagcugccguccu

SEQ ID NO: 1573636 - RNA, 13 nt, Human adenovirus E
ucgcgccugcugc

SEQ ID NO: 1573637 - RNA, 20 nt, Human adenovirus E
cuaccaauaacauuuuugcc

SEQ ID NO: 1573638 - RNA, 14 nt, Human adenovirus E
guggaccucggccu

SEQ ID NO: 1573639 - RNA, 20 nt, Human adenovirus E
ugcagcgaagagaccccggg

SEQ ID NO: 1573640 - RNA, 20 nt, Human adenovirus E
gcccagccccgccaccuccg

SEQ ID NO: 1573641 - RNA, 23 nt, Human adenovirus E
auccaucgagauugaccugggcu

SEQ ID NO: 1573642 - RNA, 19 nt, Human adenovirus E
cgccugcugggccuuggcu

SEQ ID NO: 1573643 - RNA, 17 nt, Human adenovirus E
aggugacccugggccug

SEQ ID NO: 1573644 - RNA, 13 nt, Human adenovirus E
gcccguggaggau

SEQ ID NO: 1573645 - RNA, 14 nt, Human adenovirus E
guacugcggcagau

SEQ ID NO: 1573646 - RNA, 22 nt, Human adenovirus E
agaucuucgagggucugggcag

SEQ ID NO: 1573647 - RNA, 17 nt, Human adenovirus E
cgcagcagcgagcuggg

SEQ ID NO: 1573648 - RNA, 21 nt, Human adenovirus E
cugacuaacucagguguccag

SEQ ID NO: 1573649 - RNA, 22 nt, Human adenovirus E
ucauccaugaugauggcgaugg

SEQ ID NO: 1573650 - RNA, 19 nt, Human adenovirus E
cuggacaaaauaccaccuc

SEQ ID NO: 1573651 - RNA, 23 nt, Human adenovirus E
cucccgccugaaccugacacacc

SEQ ID NO: 1573652 - RNA, 14 nt, Human adenovirus E
agcaguaguacaga

SEQ ID NO: 1573653 - RNA, 16 nt, Human adenovirus E
cagaggaggaggugga

SEQ ID NO: 1573654 - RNA, 17 nt, Human adenovirus E
aguuucuugagcuccuc

SEQ ID NO: 1573655 - RNA, 17 nt, Human adenovirus E
aggagcuccuggagcga

SEQ ID NO: 1573656 - RNA, 17 nt, Human adenovirus E
guagguauucccucucg

SEQ ID NO: 1573657 - RNA, 17 nt, Human adenovirus E
ccgagucgcggaugaag

SEQ ID NO: 1573658 - RNA, 14 nt, Human adenovirus E
ccuucaccaccugc

SEQ ID NO: 1573659 - RNA, 14 nt, Human adenovirus E
aacccuuccucccc

SEQ ID NO: 1573660 - RNA, 13 nt, Human adenovirus E
ucucgauccagca

SEQ ID NO: 1573661 - RNA, 17 nt, Human adenovirus E
agcagagaaugagcaga

SEQ ID NO: 1573662 - RNA, 20 nt, Human adenovirus E
cugaacaguauccgcagcag

SEQ ID NO: 1573663 - RNA, 18 nt, Human adenovirus E
cgagcaaggacagacccu

SEQ ID NO: 1573664 - RNA, 22 nt, Human adenovirus E
cgggggcguaggcguccgcgcc

SEQ ID NO: 1573665 - RNA, 22 nt, Human adenovirus E
cugaccggggccgggaccgagg

SEQ ID NO: 1573666 - RNA, 14 nt, Human adenovirus E
cugcacuggcagcc

SEQ ID NO: 1573667 - RNA, 20 nt, Human adenovirus E
cgugggcggcggccugggca

SEQ ID NO: 1573668 - RNA, 23 nt, Human adenovirus E
cggcauugcuuccguggcggugc

SEQ ID NO: 1573669 - RNA, 23 nt, Human adenovirus E
aggaggagauggaggaagacugg

SEQ ID NO: 1573670 - RNA, 21 nt, Human adenovirus E
cgccucagcaaccugcugggc

SEQ ID NO: 1573671 - RNA, 15 nt, Human adenovirus E
ugcgggcggcgcugc

SEQ ID NO: 1573672 - RNA, 14 nt, Human adenovirus E
ccgcccguggagga

SEQ ID NO: 1573673 - RNA, 20 nt, Human adenovirus E
cgauguaggugggguagcag

SEQ ID NO: 1573674 - RNA, 15 nt, Human adenovirus E
cagccgaaacucauc

SEQ ID NO: 1573675 - RNA, 19 nt, Human adenovirus E
ugcuagugaaggucagcgg

SEQ ID NO: 1573676 - RNA, 15 nt, Human adenovirus E
gacgcugcucaccac

SEQ ID NO: 1573677 - RNA, 12 nt, Human adenovirus E
ccacccagaccg

SEQ ID NO: 1573678 - RNA, 16 nt, Human adenovirus E
guagaagagguggacg

SEQ ID NO: 1573679 - RNA, 16 nt, Human adenovirus E
gcccgugaggcgcgcg

SEQ ID NO: 1573680 - RNA, 20 nt, Human adenovirus E
cucaaugguacugaugacag

SEQ ID NO: 1573681 - RNA, 16 nt, Human adenovirus E
cuucagcgcgcgcugc

SEQ ID NO: 1573682 - RNA, 21 nt, Human adenovirus E
cgcaccaguuccgccaggagg

SEQ ID NO: 1573683 - RNA, 20 nt, Human adenovirus E
gggcgccgagcuccugcccg

SEQ ID NO: 1573684 - RNA, 18 nt, Human adenovirus E
cucaggcugacgcugcgc

SEQ ID NO: 1573685 - RNA, 22 nt, Human adenovirus E
gcagggugaugagguccacacu

SEQ ID NO: 1573686 - RNA, 12 nt, Human adenovirus E
ugcgcagggcca

SEQ ID NO: 1573687 - RNA, 15 nt, Human adenovirus E
gagcgcgggcugccg

SEQ ID NO: 1573688 - RNA, 24 nt, Human adenovirus E
gagcccgaggagaugcgcgcggcc

SEQ ID NO: 1573689 - RNA, 15 nt, Human adenovirus E
ccgucggccaugggc

SEQ ID NO: 1573690 - RNA, 21 nt, Human adenovirus E
gcuuaccgagcagcagcacac

SEQ ID NO: 1573691 - RNA, 12 nt, Human adenovirus E
cgggggcggugc

SEQ ID NO: 1573692 - RNA, 23 nt, Human adenovirus E
cggccagcugaaaaccaucaugc

SEQ ID NO: 1573693 - RNA, 18 nt, Human adenovirus E
cgacgagcgcaccaccgc

SEQ ID NO: 1573694 - RNA, 19 nt, Human adenovirus E
cauggaauacaccacccuc

SEQ ID NO: 1573695 - RNA, 17 nt, Human adenovirus E
ugcagggcgcccagcag

SEQ ID NO: 1573696 - RNA, 16 nt, Human adenovirus E
aggacguccagagcgc

SEQ ID NO: 1573697 - RNA, 19 nt, Human adenovirus E
ggcgugccccagggcaugg

SEQ ID NO: 1573698 - RNA, 15 nt, Human adenovirus E
accugacacaccacc

SEQ ID NO: 1573699 - RNA, 21 nt, Human adenovirus E
aacccguucgcucaccugcgc

SEQ ID NO: 1573700 - RNA, 15 nt, Human adenovirus E
ucacaccuuccaccu

SEQ ID NO: 1573701 - RNA, 23 nt, Human adenovirus E
acgcccgcggagcacgaggagga

SEQ ID NO: 1573702 - RNA, 16 nt, Human adenovirus E
cagccugcugaugccc

SEQ ID NO: 1573703 - RNA, 13 nt, Human adenovirus E
uaccuuuggaagu

SEQ ID NO: 1573704 - RNA, 19 nt, Human adenovirus E
ugacacuacagaaacugaa

SEQ ID NO: 1573705 - RNA, 19 nt, Human adenovirus E
cacuuccgcgcucccuggg

SEQ ID NO: 1573706 - RNA, 17 nt, Human adenovirus E
cuacaaugcucagucuc

SEQ ID NO: 1573707 - RNA, 15 nt, Human adenovirus E
ugcccgaggcccugg

SEQ ID NO: 1573708 - RNA, 11 nt, Human adenovirus E
cagcacaggca

SEQ ID NO: 1573709 - RNA, 14 nt, Human adenovirus E
ugacagcaacagua

SEQ ID NO: 1573710 - RNA, 19 nt, Human adenovirus E
uccagagauccacggccag

SEQ ID NO: 1573711 - RNA, 21 nt, Human adenovirus E
cgcgcucagcaccgaggagga

SEQ ID NO: 1573712 - RNA, 22 nt, Human adenovirus E
gcuggccuuggaagagggcgag

SEQ ID NO: 1573713 - RNA, 23 nt, Human adenovirus E
ccccggagaguuucaugaccagc

SEQ ID NO: 1573714 - RNA, 15 nt, Human adenovirus E
uggcacgacaggcag

SEQ ID NO: 1573715 - RNA, 16 nt, Human adenovirus E
agaccggugaggagcu

SEQ ID NO: 1573716 - RNA, 20 nt, Human adenovirus E
gccuucaccaccugcaucug

SEQ ID NO: 1573717 - RNA, 15 nt, Human adenovirus E
gcaagaggcagcccu

SEQ ID NO: 1573718 - RNA, 19 nt, Human adenovirus E
cuauguuggcacagcacag

SEQ ID NO: 1573719 - RNA, 23 nt, Human adenovirus E
cgccaacgugccccggggccagg

SEQ ID NO: 1573720 - RNA, 12 nt, Human adenovirus E
acguccugcagg

SEQ ID NO: 1573721 - RNA, 13 nt, Human adenovirus E
agcgcguggcccg

SEQ ID NO: 1573722 - RNA, 19 nt, Human adenovirus E
ccguugggcagggagaggg

SEQ ID NO: 1573723 - RNA, 14 nt, Human adenovirus E
cccagcgccgcgcu

SEQ ID NO: 1573724 - RNA, 22 nt, Human adenovirus E
accacccgguuguaccuggugg

SEQ ID NO: 1573725 - RNA, 19 nt, Human adenovirus E
aggagauggugggccuuug

SEQ ID NO: 1573726 - RNA, 14 nt, Human adenovirus E
guaccagauccuca

SEQ ID NO: 1573727 - RNA, 17 nt, Human adenovirus E
gaacaugcagccccgga

SEQ ID NO: 1573728 - RNA, 15 nt, Human adenovirus E
cugacggcgcagcug

SEQ ID NO: 1573729 - RNA, 12 nt, Human adenovirus E
guugcgcagggc

SEQ ID NO: 1573730 - RNA, 19 nt, Human adenovirus E
cgcccagccccgccaccuc

SEQ ID NO: 1573731 - RNA, 13 nt, Human adenovirus E
gaaccccaccacc

SEQ ID NO: 1573732 - RNA, 15 nt, Human adenovirus E
gccugcaucucgugc

SEQ ID NO: 1573733 - RNA, 15 nt, Human adenovirus E
agcccagcaccagca

SEQ ID NO: 1573734 - RNA, 13 nt, Human adenovirus E
ggccaggcgcacg

SEQ ID NO: 1573735 - RNA, 16 nt, Human adenovirus E
cagaccgagcccauga

SEQ ID NO: 1573736 - RNA, 14 nt, Human adenovirus E
ggaaggugauuggc

SEQ ID NO: 1573737 - RNA, 13 nt, Human adenovirus E
acugaugacagca

SEQ ID NO: 1573738 - RNA, 17 nt, Human adenovirus E
uggccgugguccuggug

SEQ ID NO: 1573739 - RNA, 19 nt, Human adenovirus E
gcaucaggccccgcagcag

SEQ ID NO: 1573740 - RNA, 23 nt, Human adenovirus E
  misc_feature (9)..(9): n is a, c, g, or u
ugccaaccnuacuuuuuccaccc

SEQ ID NO: 1573741 - RNA, 21 nt, Human adenovirus E
cauagucugcagcgggcccug

SEQ ID NO: 1573742 - RNA, 16 nt, Human adenovirus E
cugaauaucaccgagc

SEQ ID NO: 1573743 - RNA, 14 nt, Human adenovirus E
caagcgccgcagca

SEQ ID NO: 1573744 - RNA, 18 nt, Human adenovirus E
caucaggccccgcagcag

SEQ ID NO: 1573745 - RNA, 19 nt, Human adenovirus E
ugcugaaaacaccaccugg

SEQ ID NO: 1573746 - RNA, 11 nt, Human adenovirus E
acaaaaaugaa

SEQ ID NO: 1573747 - RNA, 15 nt, Human adenovirus E
cagcccgccaacgug

SEQ ID NO: 1573748 - RNA, 14 nt, Human adenovirus E
cgugcacgcagcag

SEQ ID NO: 1573749 - RNA, 18 nt, Human adenovirus E
cagguucuacgaggacca

SEQ ID NO: 1573750 - RNA, 13 nt, Human adenovirus E
ggcccuggccacc

SEQ ID NO: 1573751 - RNA, 14 nt, Human adenovirus E
gcaccgccgcugca

SEQ ID NO: 1573752 - RNA, 16 nt, Human adenovirus E
gauaggagcuccugga

SEQ ID NO: 1573753 - RNA, 15 nt, Human adenovirus E
agaucaacagccgcc

SEQ ID NO: 1573754 - RNA, 16 nt, Human adenovirus E
aaguggagcugccgcc

SEQ ID NO: 1573755 - RNA, 17 nt, Human adenovirus E
guggcagcggccgaggc

SEQ ID NO: 1573756 - RNA, 13 nt, Human adenovirus E
acaguauccgcag

SEQ ID NO: 1573757 - RNA, 21 nt, Human adenovirus E
cguuccugcucucacagauca

SEQ ID NO: 1573758 - RNA, 17 nt, Human adenovirus E
ggacgauuggacccagg

SEQ ID NO: 1573759 - RNA, 15 nt, Human adenovirus E
cacaucguaggugag

SEQ ID NO: 1573760 - RNA, 18 nt, Human adenovirus E
acgucgagguccucggcg

SEQ ID NO: 1573761 - RNA, 18 nt, Human adenovirus E
accugcugcgccuggcca

SEQ ID NO: 1573762 - RNA, 21 nt, Human adenovirus E
agcgcgggucucggucuccuc

SEQ ID NO: 1573763 - RNA, 22 nt, Human adenovirus E
cuccugccgcgccaaccgcacc

SEQ ID NO: 1573764 - RNA, 16 nt, Human adenovirus E
cgcucgcgguggggcg

SEQ ID NO: 1573765 - RNA, 15 nt, Human adenovirus E
uaccugcgccaccac

SEQ ID NO: 1573766 - RNA, 14 nt, Human adenovirus E
agggucugggcagc

SEQ ID NO: 1573767 - RNA, 16 nt, Human adenovirus E
ggcauuguuuuuugca

SEQ ID NO: 1573768 - RNA, 21 nt, Human adenovirus E
gugccccucagcguggaggag

SEQ ID NO: 1573769 - RNA, 14 nt, Human adenovirus E
agcggccaucgcca

SEQ ID NO: 1573770 - RNA, 17 nt, Human adenovirus E
gaccccauagccagccg

SEQ ID NO: 1573771 - RNA, 20 nt, Human adenovirus E
ccgggccuuggaggcggcgg

SEQ ID NO: 1573772 - RNA, 14 nt, Human adenovirus E
agcgcgcgcugccc

SEQ ID NO: 1573773 - RNA, 21 nt, Human adenovirus E
aguugcagggcgcccagcagg

SEQ ID NO: 1573774 - RNA, 19 nt, Human adenovirus E
ugcccaacgugaacgaguu

SEQ ID NO: 1573775 - RNA, 19 nt, Human adenovirus E
gucuaccucuaccucugcc

SEQ ID NO: 1573776 - RNA, 23 nt, Human adenovirus E
agcacccccgccaugcgcgcggc

SEQ ID NO: 1573777 - RNA, 13 nt, Human adenovirus E
ucggcgggggaga

SEQ ID NO: 1573778 - RNA, 15 nt, Human adenovirus E
cugcaacccccagcu

SEQ ID NO: 1573779 - RNA, 20 nt, Human adenovirus E
ugggccuguuccugaugcag

SEQ ID NO: 1573780 - RNA, 12 nt, Human adenovirus E
gucccacugcua

SEQ ID NO: 1573781 - RNA, 14 nt, Human adenovirus E
ggccugggcggccu

SEQ ID NO: 1573782 - RNA, 20 nt, Human adenovirus E
caaucccauccgcccaaggc

SEQ ID NO: 1573783 - RNA, 14 nt, Human adenovirus E
gaaguccgugcgcu

SEQ ID NO: 1573784 - RNA, 17 nt, Human adenovirus E
agggucucaaagcuccg

SEQ ID NO: 1573785 - RNA, 13 nt, Human adenovirus E
gaugcgcgcggcc

SEQ ID NO: 1573786 - RNA, 19 nt, Human adenovirus E
gacgccgccaccggugugc

SEQ ID NO: 1573787 - RNA, 16 nt, Human adenovirus E
ugcaagaguuccaggc

SEQ ID NO: 1573788 - RNA, 20 nt, Human adenovirus E
cuuuugguucucugcuaccu

SEQ ID NO: 1573789 - RNA, 23 nt, Human adenovirus E
agacagcugccguccucccggag

SEQ ID NO: 1573790 - RNA, 18 nt, Human adenovirus E
gcagggagagggcgcuga

SEQ ID NO: 1573791 - RNA, 17 nt, Human adenovirus E
caacuccuccuccagaa

SEQ ID NO: 1573792 - RNA, 13 nt, Human adenovirus E
ugaugcaggaggg

SEQ ID NO: 1573793 - RNA, 15 nt, Human adenovirus E
agggggccaccccca

SEQ ID NO: 1573794 - RNA, 19 nt, Human adenovirus E
gcggcgguacaccucgccc

SEQ ID NO: 1573795 - RNA, 24 nt, Human adenovirus E
cccggcgucgugcacgcagcagcg

SEQ ID NO: 1573796 - RNA, 18 nt, Human adenovirus E
cgaggaggagcuggcagu

SEQ ID NO: 1573797 - RNA, 15 nt, Human adenovirus E
ucucaucaaguuuca

SEQ ID NO: 1573798 - RNA, 12 nt, Human adenovirus E
ccagauccucag

SEQ ID NO: 1573799 - RNA, 14 nt, Human adenovirus E
gcggugccucuucc

SEQ ID NO: 1573800 - RNA, 18 nt, Human adenovirus E
ggccuuguaggcgcagca

SEQ ID NO: 1573801 - RNA, 14 nt, Human adenovirus E
cgugcguacccgga

SEQ ID NO: 1573802 - RNA, 14 nt, Human adenovirus E
cgugcucgggggug

SEQ ID NO: 1573803 - RNA, 17 nt, Human adenovirus E
ccugcugcgccuggcca

SEQ ID NO: 1573804 - RNA, 21 nt, Human adenovirus E
gcucaucaagcaucuggcccg

SEQ ID NO: 1573805 - RNA, 12 nt, Human adenovirus E
gcuccgcuugcc

SEQ ID NO: 1573806 - RNA, 22 nt, Human adenovirus E
cccuucuccggcucccccggcc

SEQ ID NO: 1573807 - RNA, 22 nt, Human adenovirus E
caccaaggccgccgccccucuc

SEQ ID NO: 1573808 - RNA, 21 nt, Human adenovirus E
cucgcgguggggcggccagcu

SEQ ID NO: 1573809 - RNA, 17 nt, Human adenovirus E
cccggcaggccaccauc

SEQ ID NO: 1573810 - RNA, 17 nt, Human adenovirus E
agaccgagcuccagcuc

SEQ ID NO: 1573811 - RNA, 18 nt, Human adenovirus E
gcacucccgcaucugcac

SEQ ID NO: 1573812 - RNA, 18 nt, Human adenovirus E
gacagcacucaggcagag

SEQ ID NO: 1573813 - RNA, 18 nt, Human adenovirus E
gcaaacccgggagcugag

SEQ ID NO: 1573814 - RNA, 17 nt, Human adenovirus E
gguaaauccaagccagc

SEQ ID NO: 1573815 - RNA, 14 nt, Human adenovirus E
ugcacaccaacaug

SEQ ID NO: 1573816 - RNA, 17 nt, Human adenovirus E
acuuggccagccacuug

SEQ ID NO: 1573817 - RNA, 15 nt, Human adenovirus E
uacagguggcagaug

SEQ ID NO: 1573818 - RNA, 14 nt, Human adenovirus E
cugcacaggcagca

SEQ ID NO: 1573819 - RNA, 20 nt, Human adenovirus E
cuaaaccccauuacuggcac

SEQ ID NO: 1573820 - RNA, 22 nt, Human adenovirus E
gucccaugguggcgcagcugac

SEQ ID NO: 1573821 - RNA, 17 nt, Human adenovirus E
ugcacgagaaccgccug

SEQ ID NO: 1573822 - RNA, 19 nt, Human adenovirus E
ccucagcguggaggagcuc

SEQ ID NO: 1573823 - RNA, 23 nt, Human adenovirus E
caccgcuaucgugugccugagca

SEQ ID NO: 1573824 - RNA, 15 nt, Human adenovirus E
cuccucccucagcaa

SEQ ID NO: 1573825 - RNA, 21 nt, Human adenovirus E
accaccuggacaaaauaccac

SEQ ID NO: 1573826 - RNA, 18 nt, Human adenovirus E
ucagccaucgccaaccuc

SEQ ID NO: 1573827 - RNA, 15 nt, Human adenovirus E
cuccacagccccuac

SEQ ID NO: 1573828 - RNA, 23 nt, Human adenovirus E
caacgcgcggcuggcggugcuca

SEQ ID NO: 1573829 - RNA, 13 nt, Human adenovirus E
gaccgagcuccag

SEQ ID NO: 1573830 - RNA, 22 nt, Human adenovirus E
gcaagcggugcguuccagcaug

SEQ ID NO: 1573831 - RNA, 20 nt, Human adenovirus E
ugcaacaacaacagccaccu

SEQ ID NO: 1573832 - RNA, 13 nt, Human adenovirus E
cgggcacucccgc

SEQ ID NO: 1573833 - RNA, 14 nt, Human adenovirus E
ggaggagcagaacc

SEQ ID NO: 1573834 - RNA, 17 nt, Human adenovirus E
gcauagauggcacucca

SEQ ID NO: 1573835 - RNA, 14 nt, Human adenovirus E
ccucuaccucugcc

SEQ ID NO: 1573836 - RNA, 13 nt, Human adenovirus E
guguugaugaugc

SEQ ID NO: 1573837 - RNA, 15 nt, Human adenovirus E
cugcgagcccaaccc

SEQ ID NO: 1573838 - RNA, 19 nt, Human adenovirus E
acggcgacuaccuccaccu

SEQ ID NO: 1573839 - RNA, 14 nt, Human adenovirus E
agaucacccugcuc

SEQ ID NO: 1573840 - RNA, 22 nt, Human adenovirus E
cauguggcgguucaccaccucc

SEQ ID NO: 1573841 - RNA, 13 nt, Human adenovirus E
caccacuacagca

SEQ ID NO: 1573842 - RNA, 21 nt, Human adenovirus E
agaugcaauugaaagcaacau

SEQ ID NO: 1573843 - RNA, 18 nt, Human adenovirus E
caggcuuugagcucggag

SEQ ID NO: 1573844 - RNA, 16 nt, Human adenovirus E
gacguccuggaucuga

SEQ ID NO: 1573845 - RNA, 21 nt, Human adenovirus E
ugucuuucguccucgcugucc

SEQ ID NO: 1573846 - RNA, 14 nt, Human adenovirus E
cggcggugacuagg

SEQ ID NO: 1573847 - RNA, 20 nt, Human adenovirus E
gcuccgcuugccguccuucu

SEQ ID NO: 1573848 - RNA, 14 nt, Human adenovirus E
ccccaagcgccagc

SEQ ID NO: 1573849 - RNA, 20 nt, Human adenovirus E
cagccaacugaacgggggcg

SEQ ID NO: 1573850 - RNA, 23 nt, Human adenovirus E
augcaagcggugcguuccagcau

SEQ ID NO: 1573851 - RNA, 21 nt, Human adenovirus E
gaccguacuacuuccgcgaga

SEQ ID NO: 1573852 - RNA, 14 nt, Human adenovirus E
guggcggugcaggc

SEQ ID NO: 1573853 - RNA, 14 nt, Human adenovirus E
ccaagagccggcgg

SEQ ID NO: 1573854 - RNA, 23 nt, Human adenovirus E
cucaucaagcaucuggcccggca

SEQ ID NO: 1573855 - RNA, 13 nt, Human adenovirus E
gcucccucgguga

SEQ ID NO: 1573856 - RNA, 20 nt, Human adenovirus E
cuaugaggccgagccacagc

SEQ ID NO: 1573857 - RNA, 22 nt, Human adenovirus E
uacuuccaagaagaggcagcag

SEQ ID NO: 1573858 - RNA, 18 nt, Human adenovirus E
caccacccuccaccgcaa

SEQ ID NO: 1573859 - RNA, 15 nt, Human adenovirus E
cagagacaggagcgg

SEQ ID NO: 1573860 - RNA, 14 nt, Human adenovirus E
gcgagggggcgagg

SEQ ID NO: 1573861 - RNA, 16 nt, Human adenovirus E
ccacagcgcgcacccg

SEQ ID NO: 1573862 - RNA, 16 nt, Human adenovirus E
cccugcgcggggaggc

SEQ ID NO: 1573863 - RNA, 22 nt, Human adenovirus E
ucaagcgcgcgucgcccaucuc

SEQ ID NO: 1573864 - RNA, 18 nt, Human adenovirus E
gcgcccgcgcuugcuggg

SEQ ID NO: 1573865 - RNA, 20 nt, Human adenovirus E
cgaggaggaggcagaggagg

SEQ ID NO: 1573866 - RNA, 18 nt, Human adenovirus E
uggcagaucacccugcuc

SEQ ID NO: 1573867 - RNA, 16 nt, Human adenovirus E
caggggguccagcaug

SEQ ID NO: 1573868 - RNA, 19 nt, Human adenovirus E
ucagcaucaucugggccug

SEQ ID NO: 1573869 - RNA, 16 nt, Human adenovirus E
cugggcauucgcaaga

SEQ ID NO: 1573870 - RNA, 13 nt, Human adenovirus E
cagccugcaagac

SEQ ID NO: 1573871 - RNA, 14 nt, Human adenovirus E
ccgccgcccagccc

SEQ ID NO: 1573872 - RNA, 16 nt, Human adenovirus E
cgggcacucccgcauc

SEQ ID NO: 1573873 - RNA, 24 nt, Human adenovirus E
ggcagcagugucuggaggagcaga

SEQ ID NO: 1573874 - RNA, 14 nt, Human adenovirus E
gucgccgcaccgcc

SEQ ID NO: 1573875 - RNA, 23 nt, Human adenovirus E
ccggagacgcgcggccacggcgg

SEQ ID NO: 1573876 - RNA, 13 nt, Human adenovirus E
cgcagggccaggc

SEQ ID NO: 1573877 - RNA, 22 nt, Human adenovirus E
cgcuggcuccuggaccugguga

SEQ ID NO: 1573878 - RNA, 15 nt, Human adenovirus E
acucaggcagaggag

SEQ ID NO: 1573879 - RNA, 19 nt, Human adenovirus E
cagcgcgcacccggugcac

SEQ ID NO: 1573880 - RNA, 20 nt, Human adenovirus E
cgcaacucguaccugggcua

SEQ ID NO: 1573881 - RNA, 21 nt, Human adenovirus E
gaccuaccaggagaucaccca

SEQ ID NO: 1573882 - RNA, 18 nt, Human adenovirus E
ucgaaucaggcuggagcc

SEQ ID NO: 1573883 - RNA, 15 nt, Human adenovirus E
ccucggcgcuguccg

SEQ ID NO: 1573884 - RNA, 15 nt, Human adenovirus E
ccgcuguggagccac

SEQ ID NO: 1573885 - RNA, 13 nt, Human adenovirus E
aaguccuccccag

SEQ ID NO: 1573886 - RNA, 14 nt, Human adenovirus E
uccucccucagcaa

SEQ ID NO: 1573887 - RNA, 20 nt, Human adenovirus E
aggaucuugcccgcgcgggg

SEQ ID NO: 1573888 - RNA, 21 nt, Human adenovirus E
gcccuggccaccuaccacauc

SEQ ID NO: 1573889 - RNA, 17 nt, Human adenovirus E
acaagaugagccgcugg

SEQ ID NO: 1573890 - RNA, 18 nt, Human adenovirus E
gucugggcagcgacgaga

SEQ ID NO: 1573891 - RNA, 22 nt, Human adenovirus E
gcgcgggugauggucucccgca

SEQ ID NO: 1573892 - RNA, 13 nt, Human adenovirus E
ucagcacccagcc

SEQ ID NO: 1573893 - RNA, 18 nt, Human adenovirus E
gcgaguuggaggagaugg

SEQ ID NO: 1573894 - RNA, 13 nt, Human adenovirus E
cgagaagcagcag

SEQ ID NO: 1573895 - RNA, 14 nt, Human adenovirus E
gcugcagagccagc

SEQ ID NO: 1573896 - RNA, 17 nt, Human adenovirus E
cggcccaugagcugcga

SEQ ID NO: 1573897 - RNA, 16 nt, Human adenovirus E
cgaggccacgcggcgg

SEQ ID NO: 1573898 - RNA, 14 nt, Human adenovirus E
agaagcagcagcag

SEQ ID NO: 1573899 - RNA, 17 nt, Human adenovirus E
cagaacggggugcugga

SEQ ID NO: 1573900 - RNA, 15 nt, Human adenovirus E
acagggcaggcgcug

SEQ ID NO: 1573901 - RNA, 11 nt, Human adenovirus E
agaccgagccc

SEQ ID NO: 1573902 - RNA, 14 nt, Human adenovirus E
ccacgcgcacaucc

SEQ ID NO: 1573903 - RNA, 21 nt, Human adenovirus E
gcaaggcguggaacagcacca

SEQ ID NO: 1573904 - RNA, 14 nt, Human adenovirus E
cacacgcacuacca

SEQ ID NO: 1573905 - RNA, 22 nt, Human adenovirus E
ggagucgguccacagcuuccgc

SEQ ID NO: 1573906 - RNA, 18 nt, Human adenovirus E
cuacagccuaggccacaa

SEQ ID NO: 1573907 - RNA, 14 nt, Human adenovirus E
guauccggugcacu

SEQ ID NO: 1573908 - RNA, 21 nt, Human adenovirus E
  misc_feature (9)..(9): n is a, c, g, or u
gcggccgancgccugggcgag

SEQ ID NO: 1573909 - RNA, 17 nt, Human adenovirus E
cgcgcccgcccagucgc

SEQ ID NO: 1573910 - RNA, 19 nt, Human adenovirus E
ccugcucgagugccacugc

SEQ ID NO: 1573911 - RNA, 19 nt, Human adenovirus E
caacagcccccuccacagc

SEQ ID NO: 1573912 - RNA, 14 nt, Human adenovirus E
guccucgcggggcc

SEQ ID NO: 1573913 - RNA, 20 nt, Human adenovirus E
ccacgagccggggcagcgcc

SEQ ID NO: 1573914 - RNA, 22 nt, Human adenovirus E
gcucugcaagcuccugcagaag

SEQ ID NO: 1573915 - RNA, 16 nt, Human adenovirus E
cggcgucgugcacgca

SEQ ID NO: 1573916 - RNA, 20 nt, Human adenovirus E
acugggagaacagcagucag

SEQ ID NO: 1573917 - RNA, 18 nt, Human adenovirus E
acacacagaucaaaccgc

SEQ ID NO: 1573918 - RNA, 19 nt, Human adenovirus E
guugauuuuaacacagagu

SEQ ID NO: 1573919 - RNA, 20 nt, Human adenovirus E
caggacagcgaaccccgcag

SEQ ID NO: 1573920 - RNA, 17 nt, Human adenovirus E
cucaacccaccccaccc

SEQ ID NO: 1573921 - RNA, 16 nt, Human adenovirus E
cacgaggaggagcugg

SEQ ID NO: 1573922 - RNA, 21 nt, Human adenovirus E
uaccucugccacaccuggcag

SEQ ID NO: 1573923 - RNA, 23 nt, Human adenovirus E
cuaguugcgggugggcuuuuggu

SEQ ID NO: 1573924 - RNA, 17 nt, Human adenovirus E
uccccgucuccugccgc

SEQ ID NO: 1573925 - RNA, 22 nt, Human adenovirus E
cuccgccgacgacagcagcgug

SEQ ID NO: 1573926 - RNA, 18 nt, Human adenovirus E
ggugaccguggagcugga

SEQ ID NO: 1573927 - RNA, 20 nt, Human adenovirus E
cggcgcgcuccacgguggcc

SEQ ID NO: 1573928 - RNA, 20 nt, Human adenovirus E
acgccuaugagaaaagcaag

SEQ ID NO: 1573929 - RNA, 16 nt, Human adenovirus E
gauguggacagcagcg

SEQ ID NO: 1573930 - RNA, 14 nt, Human adenovirus E
uagcccagaucuac

SEQ ID NO: 1573931 - RNA, 23 nt, Human adenovirus E
auaaucacacacgcccagcacac

SEQ ID NO: 1573932 - RNA, 19 nt, Human adenovirus E
caggacccgguagaggugg

SEQ ID NO: 1573933 - RNA, 12 nt, Human adenovirus E
cggcggcagcag

SEQ ID NO: 1573934 - RNA, 21 nt, Human adenovirus E
guacugcggcagaugcgcccc

SEQ ID NO: 1573935 - RNA, 18 nt, Human adenovirus E
cgacaggaugcaccgugc

SEQ ID NO: 1573936 - RNA, 18 nt, Human adenovirus E
caugaauuggcucagcgc

SEQ ID NO: 1573937 - RNA, 22 nt, Human adenovirus E
acuuccucaaacgcccaaaacu

SEQ ID NO: 1573938 - RNA, 22 nt, Human adenovirus E
gaggaggugacccugggccuga

SEQ ID NO: 1573939 - RNA, 12 nt, Human adenovirus E
caagaugagccg

SEQ ID NO: 1573940 - RNA, 12 nt, Human adenovirus E
gagaaaagcaag

SEQ ID NO: 1573941 - RNA, 23 nt, Human adenovirus E
gguaaaucguucucuccagcacc

SEQ ID NO: 1573942 - RNA, 17 nt, Human adenovirus E
caccaccugcaucugcu

SEQ ID NO: 1573943 - RNA, 18 nt, Human adenovirus E
gcaugaccaccugggcga

SEQ ID NO: 1573944 - RNA, 20 nt, Human adenovirus E
augugcuccuucuggaucau

SEQ ID NO: 1573945 - RNA, 20 nt, Human adenovirus E
ccagcaccauggaggugcag

SEQ ID NO: 1573946 - RNA, 16 nt, Human adenovirus E
ccacuaugcagcucac

SEQ ID NO: 1573947 - RNA, 17 nt, Human adenovirus E
acgugcagaccaaccug

SEQ ID NO: 1573948 - RNA, 20 nt, Human adenovirus E
cggguccaccuuuuccaggg

SEQ ID NO: 1573949 - RNA, 14 nt, Human adenovirus E
ggugcguuccagca

SEQ ID NO: 1573950 - RNA, 15 nt, Human adenovirus E
cauguuuucugccaa

SEQ ID NO: 1573951 - RNA, 15 nt, Human adenovirus E
ccagucucauugccg

SEQ ID NO: 1573952 - RNA, 23 nt, Human adenovirus E
auacagcucgugcgagggggcga

SEQ ID NO: 1573953 - RNA, 15 nt, Human adenovirus E
cggagauguuggaga

SEQ ID NO: 1573954 - RNA, 20 nt, Human adenovirus E
gcgucuaccucuaccucugc

SEQ ID NO: 1573955 - RNA, 16 nt, Human adenovirus E
agcccaacccgcgccu

SEQ ID NO: 1573956 - RNA, 14 nt, Human adenovirus E
ucaugaccagcaug

SEQ ID NO: 1573957 - RNA, 15 nt, Human adenovirus E
ggccauccuggaggc

SEQ ID NO: 1573958 - RNA, 22 nt, Human adenovirus E
agcagcuagaaaauccacagcg

SEQ ID NO: 1573959 - RNA, 19 nt, Human adenovirus E
cagagcucggugaugugcu

SEQ ID NO: 1573960 - RNA, 23 nt, Human adenovirus E
gcggccguucaugggcaccugga

SEQ ID NO: 1573961 - RNA, 18 nt, Human adenovirus E
agcaugagcaccacagcg

SEQ ID NO: 1573962 - RNA, 16 nt, Human adenovirus E
uuugguucucugcuac

SEQ ID NO: 1573963 - RNA, 21 nt, Human adenovirus E
aggaaucuucucuucucuuuu

SEQ ID NO: 1573964 - RNA, 12 nt, Human adenovirus E
aucacgguuauc

SEQ ID NO: 1573965 - RNA, 21 nt, Human adenovirus E
gcaccauggaggugcagacgg

SEQ ID NO: 1573966 - RNA, 20 nt, Human adenovirus E
gucgagcgcgagcaaggaca

SEQ ID NO: 1573967 - RNA, 17 nt, Human adenovirus E
cauugucaaugccaccu

SEQ ID NO: 1573968 - RNA, 15 nt, Human adenovirus E
cgugcagcagaucua

SEQ ID NO: 1573969 - RNA, 16 nt, Human adenovirus E
gggcuggcgcgccugg

SEQ ID NO: 1573970 - RNA, 18 nt, Human adenovirus E
ccaaacuaaccuccacca

SEQ ID NO: 1573971 - RNA, 20 nt, Human adenovirus E
gagccgcgcccugggccagg

SEQ ID NO: 1573972 - RNA, 16 nt, Human adenovirus E
gucaggcagaggagga

SEQ ID NO: 1573973 - RNA, 16 nt, Human adenovirus E
cgagcgccccuugugg

SEQ ID NO: 1573974 - RNA, 15 nt, Human adenovirus E
gggcggcggccuggg

SEQ ID NO: 1573975 - RNA, 18 nt, Human adenovirus E
ugcgcaacggccugcccg

SEQ ID NO: 1573976 - RNA, 14 nt, Human adenovirus E
agacccggcaccac

SEQ ID NO: 1573977 - RNA, 15 nt, Human adenovirus E
gcgaccaggagcuga

SEQ ID NO: 1573978 - RNA, 20 nt, Human adenovirus E
gcgugccccagggcauggga

SEQ ID NO: 1573979 - RNA, 18 nt, Human adenovirus E
accacccucuccccccgc

SEQ ID NO: 1573980 - RNA, 17 nt, Human adenovirus E
cuccguggccuggaggc

SEQ ID NO: 1573981 - RNA, 21 nt, Human adenovirus E
caagcccgugaccuugcagca

SEQ ID NO: 1573982 - RNA, 19 nt, Human adenovirus E
ucaccaccugcaucugcug

SEQ ID NO: 1573983 - RNA, 15 nt, Human adenovirus E
gcggcgaugcagccc

SEQ ID NO: 1573984 - RNA, 19 nt, Human adenovirus E
ugcccuucucgcugaacag

SEQ ID NO: 1573985 - RNA, 21 nt, Human adenovirus E
ucuccuucagcgcgcgcugcc

SEQ ID NO: 1573986 - RNA, 18 nt, Human adenovirus E
cugccuuggcaguacagu

SEQ ID NO: 1573987 - RNA, 18 nt, Human adenovirus E
caaaucuguugagcuggg

SEQ ID NO: 1573988 - RNA, 12 nt, Human adenovirus E
aaaauccacagc

SEQ ID NO: 1573989 - RNA, 21 nt, Human adenovirus E
ccgcguaauuggcccgccgcc

SEQ ID NO: 1573990 - RNA, 16 nt, Human adenovirus E
gcucugaaccugcccc

SEQ ID NO: 1573991 - RNA, 18 nt, Human adenovirus E
ccgagcugucggccugcg

SEQ ID NO: 1573992 - RNA, 21 nt, Human adenovirus E
acccggcgcuaccugcucuuc

SEQ ID NO: 1573993 - RNA, 13 nt, Human adenovirus E
cgccaguccagac

SEQ ID NO: 1573994 - RNA, 16 nt, Human adenovirus E
cccucuccccccgcac

SEQ ID NO: 1573995 - RNA, 19 nt, Human adenovirus E
agugcgucucgggacccug

SEQ ID NO: 1573996 - RNA, 19 nt, Human adenovirus E
ucguccacauccaggaagg

SEQ ID NO: 1573997 - RNA, 20 nt, Human adenovirus E
ggccuaguugcgggugggcu

SEQ ID NO: 1573998 - RNA, 15 nt, Human adenovirus E
gcgcccucaaaggcc

SEQ ID NO: 1573999 - RNA, 18 nt, Human adenovirus E
aacccaccacgccuagaa

SEQ ID NO: 1574000 - RNA, 19 nt, Human adenovirus E
gggcggcagaacggggugc

SEQ ID NO: 1574001 - RNA, 12 nt, Human adenovirus E
gugacccugggc

SEQ ID NO: 1574002 - RNA, 12 nt, Human adenovirus E
cggaggugagcu

SEQ ID NO: 1574003 - RNA, 22 nt, Human adenovirus E
acccucuccccccgcacagccu

SEQ ID NO: 1574004 - RNA, 15 nt, Human adenovirus E
cagaacgaccacagc

SEQ ID NO: 1574005 - RNA, 15 nt, Human adenovirus E
gaauacacccccgga

SEQ ID NO: 1574006 - RNA, 14 nt, Human adenovirus E
gcucggggcccgga

SEQ ID NO: 1574007 - RNA, 16 nt, Human adenovirus E
ccacagcgacccaugc

SEQ ID NO: 1574008 - RNA, 10 nt, Human adenovirus E
cagggagaua

SEQ ID NO: 1574009 - RNA, 15 nt, Human adenovirus E
ucgaucuccuccucu

SEQ ID NO: 1574010 - RNA, 14 nt, Human adenovirus E
gaccucggcacuca

SEQ ID NO: 1574011 - RNA, 19 nt, Human adenovirus E
cgcggagauggcaccucuc

SEQ ID NO: 1574012 - RNA, 16 nt, Human adenovirus E
accgugucaugaugca

SEQ ID NO: 1574013 - RNA, 16 nt, Human adenovirus E
caggcuggagccgcag

SEQ ID NO: 1574014 - RNA, 22 nt, Human adenovirus E
ggcgaggggcuggcgcgccugg

SEQ ID NO: 1574015 - RNA, 17 nt, Human adenovirus E
caacucguaccugggcu

SEQ ID NO: 1574016 - RNA, 21 nt, Human adenovirus E
  misc_feature (10)..(10): n is a, c, g, or u
uaaaucagcnuaccaccacua

SEQ ID NO: 1574017 - RNA, 14 nt, Human adenovirus E
cugcacaccacccu

SEQ ID NO: 1574018 - RNA, 11 nt, Human adenovirus E
ccguggcucug

SEQ ID NO: 1574019 - RNA, 15 nt, Human adenovirus E
accacccagaccggu

SEQ ID NO: 1574020 - RNA, 15 nt, Human adenovirus E
gcgcacauccagaaa

SEQ ID NO: 1574021 - RNA, 19 nt, Human adenovirus E
cagggauacaaguccuggc

SEQ ID NO: 1574022 - RNA, 14 nt, Human adenovirus E
gguccgcaaaugca

SEQ ID NO: 1574023 - RNA, 14 nt, Human adenovirus E
ccguccucccggag

SEQ ID NO: 1574024 - RNA, 22 nt, Human adenovirus E
cggagccuuguugcgcagggcc

SEQ ID NO: 1574025 - RNA, 10 nt, Human adenovirus E
aggccgccgc

SEQ ID NO: 1574026 - RNA, 21 nt, Human adenovirus E
agggcgagaucgagggcgagc

SEQ ID NO: 1574027 - RNA, 14 nt, Human adenovirus E
ucaccaaggccaug

SEQ ID NO: 1574028 - RNA, 9 nt, Human adenovirus E
uuugccaga

SEQ ID NO: 1574029 - RNA, 20 nt, Human adenovirus E
ucuaccucugccacaccugg

SEQ ID NO: 1574030 - RNA, 12 nt, Human adenovirus E
ucugugccaccc

SEQ ID NO: 1574031 - RNA, 19 nt, Human adenovirus E
uccaagaagaggcagcagc

SEQ ID NO: 1574032 - RNA, 13 nt, Human adenovirus E
aaccagcagcuag

SEQ ID NO: 1574033 - RNA, 16 nt, Human adenovirus E
ccagggcgcgcgggag

SEQ ID NO: 1574034 - RNA, 17 nt, Human adenovirus E
ucaggcagaggaggagg

SEQ ID NO: 1574035 - RNA, 19 nt, Human adenovirus E
cagcagaaaaccagcagcu

SEQ ID NO: 1574036 - RNA, 15 nt, Human adenovirus E
cgcacguggacgagc

SEQ ID NO: 1574037 - RNA, 18 nt, Human adenovirus E
gccccggggccaggagga

SEQ ID NO: 1574038 - RNA, 15 nt, Human adenovirus E
cugauggccacgggc

SEQ ID NO: 1574039 - RNA, 15 nt, Human adenovirus E
cgugcacgcagcagc

SEQ ID NO: 1574040 - RNA, 14 nt, Human adenovirus E
gcagcugggacuug

SEQ ID NO: 1574041 - RNA, 22 nt, Human adenovirus E
cgcgcaccaguuccgccaggag

SEQ ID NO: 1574042 - RNA, 13 nt, Human adenovirus E
cggcaggccacca

SEQ ID NO: 1574043 - RNA, 18 nt, Human adenovirus E
agaacaggagcuacaacg

SEQ ID NO: 1574044 - RNA, 22 nt, Human adenovirus E
accgccucggaccuggccgacc

SEQ ID NO: 1574045 - RNA, 15 nt, Human adenovirus E
ccugaccaccguggu

SEQ ID NO: 1574046 - RNA, 13 nt, Human adenovirus E
cagccccggauga

SEQ ID NO: 1574047 - RNA, 21 nt, Human adenovirus E
gcuaccugcugcgccuggcca

SEQ ID NO: 1574048 - RNA, 16 nt, Human adenovirus E
ugaccuugcagcaggu

SEQ ID NO: 1574049 - RNA, 14 nt, Human adenovirus E
gcgaguaccuggaa

SEQ ID NO: 1574050 - RNA, 24 nt, Human adenovirus E
gcacguacucgcgcgccacgcacu

SEQ ID NO: 1574051 - RNA, 21 nt, Human adenovirus E
ccgcagaagcaagcuccagcu

SEQ ID NO: 1574052 - RNA, 22 nt, Human adenovirus E
ccuauuccuaaaguuagcuuua

SEQ ID NO: 1574053 - RNA, 17 nt, Human adenovirus E
aggacgucagcggcgag

SEQ ID NO: 1574054 - RNA, 15 nt, Human adenovirus E
ccaucuccgcuccgg

SEQ ID NO: 1574055 - RNA, 18 nt, Human adenovirus E
agccagccaugauaaaga

SEQ ID NO: 1574056 - RNA, 18 nt, Human adenovirus E
ugcggugugccccgguuc

SEQ ID NO: 1574057 - RNA, 12 nt, Human adenovirus E
gcaucuggcccg

SEQ ID NO: 1574058 - RNA, 18 nt, Human adenovirus E
gagaaccgccuggggcag

SEQ ID NO: 1574059 - RNA, 20 nt, Human adenovirus E
ucagauguaucuacugaacu

SEQ ID NO: 1574060 - RNA, 19 nt, Human adenovirus E
ugucucuucgggggcagag

SEQ ID NO: 1574061 - RNA, 18 nt, Human adenovirus E
ggccagcacccagaccau

SEQ ID NO: 1574062 - RNA, 14 nt, Human adenovirus E
ggugcccaagcgcc

SEQ ID NO: 1574063 - RNA, 22 nt, Human adenovirus E
uggcggcgauguugagcugcac

SEQ ID NO: 1574064 - RNA, 20 nt, Human adenovirus E
gcagaucaauggcccucaca

SEQ ID NO: 1574065 - RNA, 14 nt, Human adenovirus E
ugucaguguaucua

SEQ ID NO: 1574066 - RNA, 20 nt, Human adenovirus E
ccgugagcggggcuggacag

SEQ ID NO: 1574067 - RNA, 14 nt, Human adenovirus E
cacaugucccccuc

SEQ ID NO: 1574068 - RNA, 14 nt, Human adenovirus E
agcccagcaccagc

SEQ ID NO: 1574069 - RNA, 14 nt, Human adenovirus E
aucaccgagcccga

SEQ ID NO: 1574070 - RNA, 15 nt, Human adenovirus E
ugccauucgcgcacg

SEQ ID NO: 1574071 - RNA, 16 nt, Human adenovirus E
cagcaccaacgugcag

SEQ ID NO: 1574072 - RNA, 22 nt, Human adenovirus E
ugcacgccgcaccgcucccugg

SEQ ID NO: 1574073 - RNA, 14 nt, Human adenovirus E
uccagcaccaggca

SEQ ID NO: 1574074 - RNA, 20 nt, Human adenovirus E
agagucgggggcaggagcag

SEQ ID NO: 1574075 - RNA, 12 nt, Human adenovirus E
agcuugguggcg

SEQ ID NO: 1574076 - RNA, 18 nt, Human adenovirus E
ugccacaccuggcagacg

SEQ ID NO: 1574077 - RNA, 18 nt, Human adenovirus E
gaccagcaugaaggggac

SEQ ID NO: 1574078 - RNA, 14 nt, Human adenovirus E
acucaaaaaaauac

SEQ ID NO: 1574079 - RNA, 19 nt, Human adenovirus E
gccaucuuccagcagaguc

SEQ ID NO: 1574080 - RNA, 20 nt, Human adenovirus E
accaacgccauccugaaucc

SEQ ID NO: 1574081 - RNA, 21 nt, Human adenovirus E
gcgguacaccucgcccugcuc

SEQ ID NO: 1574082 - RNA, 17 nt, Human adenovirus E
ccggcggcgcucugacu

SEQ ID NO: 1574083 - RNA, 17 nt, Human adenovirus E
cgugcagaaccccacca

SEQ ID NO: 1574084 - RNA, 16 nt, Human adenovirus E
ggggagaugaggugca

SEQ ID NO: 1574085 - RNA, 16 nt, Human adenovirus E
agaccgugcagcagau

SEQ ID NO: 1574086 - RNA, 14 nt, Human adenovirus E
ccauggaggugcag

SEQ ID NO: 1574087 - RNA, 23 nt, Human adenovirus E
cagugcgcuuuucacaagaagag

SEQ ID NO: 1574088 - RNA, 19 nt, Human adenovirus E
agcugcggcgcggccugga

SEQ ID NO: 1574089 - RNA, 13 nt, Human adenovirus E
aucgcccaagaau

SEQ ID NO: 1574090 - RNA, 22 nt, Human adenovirus E
guccucccggaggaggggggcc

SEQ ID NO: 1574091 - RNA, 15 nt, Human adenovirus E
agccagaugaugcaa

SEQ ID NO: 1574092 - RNA, 23 nt, Human adenovirus E
gugguccuggugaccguggagcu

SEQ ID NO: 1574093 - RNA, 17 nt, Human adenovirus E
cgcccgcccgcgcccac

SEQ ID NO: 1574094 - RNA, 15 nt, Human adenovirus E
cuuuagacagcagcc

SEQ ID NO: 1574095 - RNA, 15 nt, Human adenovirus E
ggacagcacucaggc

SEQ ID NO: 1574096 - RNA, 22 nt, Human adenovirus E
ugcgggcggcgcugcagagcca

SEQ ID NO: 1574097 - RNA, 17 nt, Human adenovirus E
uuaccacuaugcagcuc

SEQ ID NO: 1574098 - RNA, 20 nt, Human adenovirus E
cagcuggccuuggaagaggg

SEQ ID NO: 1574099 - RNA, 14 nt, Human adenovirus E
ccaccucagcucaa

SEQ ID NO: 1574100 - RNA, 13 nt, Human adenovirus E
gacgagcgcacca

SEQ ID NO: 1574101 - RNA, 18 nt, Human adenovirus E
ucgaaggcgggcaugacc

SEQ ID NO: 1574102 - RNA, 23 nt, Human adenovirus E
cgaggaucuguaccccaccaugc

SEQ ID NO: 1574103 - RNA, 22 nt, Human adenovirus E
cgcaccgcucccuggccugcaa

SEQ ID NO: 1574104 - RNA, 13 nt, Human adenovirus E
gugcagcccgagg

SEQ ID NO: 1574105 - RNA, 17 nt, Human adenovirus E
gcaucgcccggcggcac

SEQ ID NO: 1574106 - RNA, 19 nt, Human adenovirus E
acucgcagaaaaugaugca

SEQ ID NO: 1574107 - RNA, 20 nt, Human adenovirus E
gguagcuccauugcagggcc

SEQ ID NO: 1574108 - RNA, 16 nt, Human adenovirus E
ggccaucgccagcaug

SEQ ID NO: 1574109 - RNA, 18 nt, Human adenovirus E
gggcgugccccagggcau

SEQ ID NO: 1574110 - RNA, 15 nt, Human adenovirus E
ugagccgcuggaaga

SEQ ID NO: 1574111 - RNA, 19 nt, Human adenovirus E
cagagucgggggcaggagc

SEQ ID NO: 1574112 - RNA, 19 nt, Human adenovirus E
agccuuguugcgcagggcc

SEQ ID NO: 1574113 - RNA, 14 nt, Human adenovirus E
cucuauguuuaauu

SEQ ID NO: 1574114 - RNA, 19 nt, Human adenovirus E
ugggcauagucgcgccgcg

SEQ ID NO: 1574115 - RNA, 17 nt, Human adenovirus E
ugcccacggcccucagc

SEQ ID NO: 1574116 - RNA, 22 nt, Human adenovirus E
caagucuauguuggcacagcac

SEQ ID NO: 1574117 - RNA, 19 nt, Human adenovirus E
uuuaccgacaaaaaucaga

SEQ ID NO: 1574118 - RNA, 16 nt, Human adenovirus E
gggggcguaguucccc

SEQ ID NO: 1574119 - RNA, 17 nt, Human adenovirus E
uaccaccacuacagccu

SEQ ID NO: 1574120 - RNA, 13 nt, Human adenovirus E
ucaggcuccucug

SEQ ID NO: 1574121 - RNA, 16 nt, Human adenovirus E
  misc_feature (7)..(7): n is a, c, g, or u
ucauuanuccagcaga

SEQ ID NO: 1574122 - RNA, 16 nt, Human adenovirus E
ccacgugcgcacccug

SEQ ID NO: 1574123 - RNA, 20 nt, Human adenovirus E
cgcccggcggcaccggagca

SEQ ID NO: 1574124 - RNA, 23 nt, Human adenovirus E
cacccucugguugaacaugcagc

SEQ ID NO: 1574125 - RNA, 21 nt, Human adenovirus E
cugaaccugccccccaaaguc

SEQ ID NO: 1574126 - RNA, 13 nt, Human adenovirus E
gcaaccccacgcc

SEQ ID NO: 1574127 - RNA, 19 nt, Human adenovirus E
gacggugucgagccugcug

SEQ ID NO: 1574128 - RNA, 17 nt, Human adenovirus E
cuuccguggcggugcag

SEQ ID NO: 1574129 - RNA, 19 nt, Human adenovirus E
gcagggugaugagguccac

SEQ ID NO: 1574130 - RNA, 16 nt, Human adenovirus E
gcaugagcaccacagc

SEQ ID NO: 1574131 - RNA, 22 nt, Human adenovirus E
cgccgguggcacgacaggcagc

SEQ ID NO: 1574132 - RNA, 18 nt, Human adenovirus E
ccgacgagaagcagcagc

SEQ ID NO: 1574133 - RNA, 16 nt, Human adenovirus E
cagggccaggcgcacg

SEQ ID NO: 1574134 - RNA, 23 nt, Human adenovirus E
cgacugggcuuuucggcgcggua

SEQ ID NO: 1574135 - RNA, 14 nt, Human adenovirus E
cucgcgcuucugcu

SEQ ID NO: 1574136 - RNA, 13 nt, Human adenovirus E
uaccuccaccuga

SEQ ID NO: 1574137 - RNA, 17 nt, Human adenovirus E
uaccccaccaugcagcu

SEQ ID NO: 1574138 - RNA, 19 nt, Human adenovirus E
accgccccgccgcccagcc

SEQ ID NO: 1574139 - RNA, 21 nt, Human adenovirus E
accacccucuccccccgcaca

SEQ ID NO: 1574140 - RNA, 19 nt, Human adenovirus E
guacaugggcaucuugcac

SEQ ID NO: 1574141 - RNA, 15 nt, Human adenovirus E
gcaagaguuccaggc

SEQ ID NO: 1574142 - RNA, 19 nt, Human adenovirus E
gcccgugaccuugcagcag

SEQ ID NO: 1574143 - RNA, 16 nt, Human adenovirus E
uucaugaccagcauga

SEQ ID NO: 1574144 - RNA, 14 nt, Human adenovirus E
cgagcugggcagga

SEQ ID NO: 1574145 - RNA, 18 nt, Human adenovirus E
aguuccuccacuuccucu

SEQ ID NO: 1574146 - RNA, 18 nt, Human adenovirus E
gcacaggcagcaaagccc

SEQ ID NO: 1574147 - RNA, 15 nt, Human adenovirus E
cagccagagcaggaa

SEQ ID NO: 1574148 - RNA, 19 nt, Human adenovirus E
ucagacaugcaucccagcu

SEQ ID NO: 1574149 - RNA, 13 nt, Human adenovirus E
uccacgagccagg

SEQ ID NO: 1574150 - RNA, 22 nt, Human adenovirus E
ggaagacgaggaggaggcagag

SEQ ID NO: 1574151 - RNA, 18 nt, Human adenovirus E
acgaagcccugcaggaag

SEQ ID NO: 1574152 - RNA, 20 nt, Human adenovirus E
cuacuacuuccaagaagagg

SEQ ID NO: 1574153 - RNA, 18 nt, Human adenovirus E
cugcucgaucuccuccuc

SEQ ID NO: 1574154 - RNA, 15 nt, Human adenovirus E
ccguugggcagggag

SEQ ID NO: 1574155 - RNA, 17 nt, Human adenovirus E
caugcgcaugacccuga

SEQ ID NO: 1574156 - RNA, 20 nt, Human adenovirus E
gguacacgggguugcagcac

SEQ ID NO: 1574157 - RNA, 14 nt, Human adenovirus E
gcgcaacggccugc

SEQ ID NO: 1574158 - RNA, 21 nt, Human adenovirus E
gcagaccgugaaccugagcca

SEQ ID NO: 1574159 - RNA, 22 nt, Human adenovirus E
ccguucaugggcaccuggagcg

SEQ ID NO: 1574160 - RNA, 15 nt, Human adenovirus E
gacguaugcgcagga

SEQ ID NO: 1574161 - RNA, 20 nt, Human adenovirus E
aacuacccgguggugggcgc

SEQ ID NO: 1574162 - RNA, 20 nt, Human adenovirus E
cgcggccguucaugggcacc

SEQ ID NO: 1574163 - RNA, 17 nt, Human adenovirus E
cgccgggccuuggaggc

SEQ ID NO: 1574164 - RNA, 14 nt, Human adenovirus E
cucuugcaggacag

SEQ ID NO: 1574165 - RNA, 16 nt, Human adenovirus E
augggcgcggaccugc

SEQ ID NO: 1574166 - RNA, 16 nt, Human adenovirus E
cgugagccgcgcccug

SEQ ID NO: 1574167 - RNA, 21 nt, Human adenovirus E
gagaugcgcgcggcccgguuc

SEQ ID NO: 1574168 - RNA, 15 nt, Human adenovirus E
cucgaaggcgggcau

SEQ ID NO: 1574169 - RNA, 19 nt, Human adenovirus E
gcugggacuugccgcagcc

SEQ ID NO: 1574170 - RNA, 20 nt, Human adenovirus E
ucgcccugcucgggcaucag

SEQ ID NO: 1574171 - RNA, 21 nt, Human adenovirus E
caccugauccaucaccaaacu

SEQ ID NO: 1574172 - RNA, 13 nt, Human adenovirus E
gaggcgcugcuga

SEQ ID NO: 1574173 - RNA, 20 nt, Human adenovirus E
caguugcuuucggacauuuu

SEQ ID NO: 1574174 - RNA, 15 nt, Human adenovirus E
gcgugccccagggca

SEQ ID NO: 1574175 - RNA, 15 nt, Human adenovirus E
gacagcacucaggca

SEQ ID NO: 1574176 - RNA, 13 nt, Human adenovirus E
cgucccuggcucc

SEQ ID NO: 1574177 - RNA, 19 nt, Human adenovirus E
gaaagagggugcugaggga

SEQ ID NO: 1574178 - RNA, 12 nt, Human adenovirus E
aggcccuggcca

SEQ ID NO: 1574179 - RNA, 14 nt, Human adenovirus E
gcaccucggcccgg

SEQ ID NO: 1574180 - RNA, 13 nt, Human adenovirus E
ggcggcuggggcg

SEQ ID NO: 1574181 - RNA, 15 nt, Human adenovirus E
cggucguccccggag

SEQ ID NO: 1574182 - RNA, 13 nt, Human adenovirus E
gucggggaaggag

SEQ ID NO: 1574183 - RNA, 15 nt, Human adenovirus E
cggcgcacgggcaga

SEQ ID NO: 1574184 - RNA, 13 nt, Human adenovirus E
ugauucaacaguu

SEQ ID NO: 1574185 - RNA, 16 nt, Human adenovirus E
cugcagcgggcccuga

SEQ ID NO: 1574186 - RNA, 13 nt, Human adenovirus E
uccgaggacgagg

SEQ ID NO: 1574187 - RNA, 14 nt, Human adenovirus E
acucgcagcagcug

SEQ ID NO: 1574188 - RNA, 17 nt, Human adenovirus E
gauggcaccucucgccc

SEQ ID NO: 1574189 - RNA, 21 nt, Human adenovirus E
gccagcugaguuuucagcccg

SEQ ID NO: 1574190 - RNA, 18 nt, Human adenovirus E
uucuagaaacgaggagga

SEQ ID NO: 1574191 - RNA, 14 nt, Human adenovirus E
ggcagaggaggaca

SEQ ID NO: 1574192 - RNA, 15 nt, Human adenovirus E
uccaccuuuuccagg

SEQ ID NO: 1574193 - RNA, 20 nt, Human adenovirus E
gcucgcaacgcugcacggga

SEQ ID NO: 1574194 - RNA, 13 nt, Human adenovirus E
gcagcgggcccug

SEQ ID NO: 1574195 - RNA, 18 nt, Human adenovirus E
ccguggaaugggccagac

SEQ ID NO: 1574196 - RNA, 20 nt, Human adenovirus E
ugccaucacaccuuccaccu

SEQ ID NO: 1574197 - RNA, 21 nt, Human adenovirus E
gccagcaugucccgcccgcgg

SEQ ID NO: 1574198 - RNA, 19 nt, Human adenovirus E
caucucuucagcacucuca

SEQ ID NO: 1574199 - RNA, 18 nt, Human adenovirus E
gcgacuaccuccaccuga

SEQ ID NO: 1574200 - RNA, 13 nt, Human adenovirus E
cguaggccugggc

SEQ ID NO: 1574201 - RNA, 16 nt, Human adenovirus E
gccaggguccgguccu

SEQ ID NO: 1574202 - RNA, 20 nt, Human adenovirus E
cucggccauccuggaggccg

SEQ ID NO: 1574203 - RNA, 18 nt, Human adenovirus E
ucuacaaggcccugggca

SEQ ID NO: 1574204 - RNA, 13 nt, Human adenovirus E
ggggcgggggaga

SEQ ID NO: 1574205 - RNA, 15 nt, Human adenovirus E
cccggcaggccacca

SEQ ID NO: 1574206 - RNA, 18 nt, Human adenovirus E
guagagcuugggggcgag

SEQ ID NO: 1574207 - RNA, 15 nt, Human adenovirus E
gugggcguggggcag

SEQ ID NO: 1574208 - RNA, 18 nt, Human adenovirus E
ucugggugaucuuggccc

SEQ ID NO: 1574209 - RNA, 21 nt, Human adenovirus E
aggugacccugggccugaugc

SEQ ID NO: 1574210 - RNA, 17 nt, Human adenovirus E
caguauccgcagcagcg

SEQ ID NO: 1574211 - RNA, 19 nt, Human adenovirus E
gcaaccuggaagccacccu

SEQ ID NO: 1574212 - RNA, 20 nt, Human adenovirus E
ccugcggaaccacagggcca

SEQ ID NO: 1574213 - RNA, 12 nt, Human adenovirus E
cagaacagggca

SEQ ID NO: 1574214 - RNA, 12 nt, Human adenovirus E
uaacuggacaga

SEQ ID NO: 1574215 - RNA, 15 nt, Human adenovirus E
gaggguucagccgcc

SEQ ID NO: 1574216 - RNA, 21 nt, Human adenovirus E
aaagcccccgaucccuccagg

SEQ ID NO: 1574217 - RNA, 13 nt, Human adenovirus E
guaucccacccug

SEQ ID NO: 1574218 - RNA, 18 nt, Human adenovirus E
gagcaugagcaccacagc

SEQ ID NO: 1574219 - RNA, 17 nt, Human adenovirus E
gaucccugagcuccucc

SEQ ID NO: 1574220 - RNA, 12 nt, Human adenovirus E
ccacggagccca

SEQ ID NO: 1574221 - RNA, 12 nt, Human adenovirus E
ggccuuggaaga

SEQ ID NO: 1574222 - RNA, 17 nt, Human adenovirus E
gcaccaacccuccagga

SEQ ID NO: 1574223 - RNA, 14 nt, Human adenovirus E
guuuccacagcucg

SEQ ID NO: 1574224 - RNA, 14 nt, Human adenovirus E
acuccguggcucug

SEQ ID NO: 1574225 - RNA, 15 nt, Human adenovirus E
gaggagaaccugcac

SEQ ID NO: 1574226 - RNA, 19 nt, Human adenovirus E
gacagcgugguggcggacg

SEQ ID NO: 1574227 - RNA, 24 nt, Human adenovirus E
guacucgcgcgccacgcacuucca

SEQ ID NO: 1574228 - RNA, 14 nt, Human adenovirus E
caucguugaagagg

SEQ ID NO: 1574229 - RNA, 12 nt, Human adenovirus E
ccucuauguuua

SEQ ID NO: 1574230 - RNA, 22 nt, Human adenovirus E
ccaucgugaacgcgcuggugga

SEQ ID NO: 1574231 - RNA, 14 nt, Human adenovirus E
cugaacgaaggcuu

SEQ ID NO: 1574232 - RNA, 15 nt, Human adenovirus E
gaugcaccuguggga

SEQ ID NO: 1574233 - RNA, 16 nt, Human adenovirus E
uagcauuaccacacag

SEQ ID NO: 1574234 - RNA, 12 nt, Human adenovirus E
gggcaggcgcug

SEQ ID NO: 1574235 - RNA, 17 nt, Human adenovirus E
gcgccacccugugucgu

SEQ ID NO: 1574236 - RNA, 14 nt, Human adenovirus E
cauucugcagagca

SEQ ID NO: 1574237 - RNA, 16 nt, Human adenovirus E
ccuuguaggcgcagca

SEQ ID NO: 1574238 - RNA, 16 nt, Human adenovirus E
augugucccagcggcg

SEQ ID NO: 1574239 - RNA, 14 nt, Human adenovirus E
cuuugaggaggaga

SEQ ID NO: 1574240 - RNA, 21 nt, Human adenovirus E
acccgcagaagcaagcuccag

SEQ ID NO: 1574241 - RNA, 15 nt, Human adenovirus E
acaaaugccagcuga

SEQ ID NO: 1574242 - RNA, 18 nt, Human adenovirus E
cauguggagcuaccagcc

SEQ ID NO: 1574243 - RNA, 23 nt, Human adenovirus E
cugcgggguggacuucaccgaga

SEQ ID NO: 1574244 - RNA, 22 nt, Human adenovirus E
agcaugguuaguuagcugaucu

SEQ ID NO: 1574245 - RNA, 15 nt, Human adenovirus E
ugcgaguuggaggag

SEQ ID NO: 1574246 - RNA, 18 nt, Human adenovirus E
cugggugaaggccacggg

SEQ ID NO: 1574247 - RNA, 17 nt, Human adenovirus E
gugcaguggcgcgggcg

SEQ ID NO: 1574248 - RNA, 14 nt, Human adenovirus E
agcgccgcagcagu

SEQ ID NO: 1574249 - RNA, 18 nt, Human adenovirus E
cgagcccgagggccgcug

SEQ ID NO: 1574250 - RNA, 20 nt, Human adenovirus E
ggccaggcgcacguggacga

SEQ ID NO: 1574251 - RNA, 19 nt, Human adenovirus E
cggcgcuucugcccccgcc

SEQ ID NO: 1574252 - RNA, 19 nt, Human adenovirus E
ccacagcuaccuccagugc

SEQ ID NO: 1574253 - RNA, 13 nt, Human adenovirus E
gggcgcggaccug

SEQ ID NO: 1574254 - RNA, 18 nt, Human adenovirus E
ccuucccaccccacucug

SEQ ID NO: 1574255 - RNA, 17 nt, Human adenovirus E
agaccgugaaccugagc

SEQ ID NO: 1574256 - RNA, 18 nt, Human adenovirus E
guacgugcaacacagaac

SEQ ID NO: 1574257 - RNA, 15 nt, Human adenovirus E
ccacagggccagcac

SEQ ID NO: 1574258 - RNA, 21 nt, Human adenovirus E
ucccuggccugcaacccccag

SEQ ID NO: 1574259 - RNA, 14 nt, Human adenovirus E
ggugaggaagagcc

SEQ ID NO: 1574260 - RNA, 22 nt, Human adenovirus E
ucgcuguugagacccgagcggg

SEQ ID NO: 1574261 - RNA, 16 nt, Human adenovirus E
ccgcgagggugcugcc

SEQ ID NO: 1574262 - RNA, 15 nt, Human adenovirus E
acuacagccuaggcc

SEQ ID NO: 1574263 - RNA, 17 nt, Human adenovirus E
ccguggagcuggagugc

SEQ ID NO: 1574264 - RNA, 14 nt, Human adenovirus E
gugccccagggcau

SEQ ID NO: 1574265 - RNA, 20 nt, Human adenovirus E
ucacuuuguggacaacaccu

SEQ ID NO: 1574266 - RNA, 23 nt, Human adenovirus E
guuccugugggacgauguggaca

SEQ ID NO: 1574267 - RNA, 20 nt, Human adenovirus E
aagcguucagggaggcgcug

SEQ ID NO: 1574268 - RNA, 18 nt, Human adenovirus E
agauggugggccuuugga

SEQ ID NO: 1574269 - RNA, 23 nt, Human adenovirus E
gagcuugggggcgaggaagacgg

SEQ ID NO: 1574270 - RNA, 18 nt, Human adenovirus E
gcaggccugcgggggcaa

SEQ ID NO: 1574271 - RNA, 22 nt, Human adenovirus E
agggggcgaggagccccgggcc

SEQ ID NO: 1574272 - RNA, 15 nt, Human adenovirus E
auuuggaggaagacu

SEQ ID NO: 1574273 - RNA, 19 nt, Human adenovirus E
ucaccccggggcuguggac

SEQ ID NO: 1574274 - RNA, 18 nt, Human adenovirus E
ggcgagggccugcucgag

SEQ ID NO: 1574275 - RNA, 17 nt, Human adenovirus E
cgcgguugagaaggaac

SEQ ID NO: 1574276 - RNA, 19 nt, Human adenovirus E
acgcccuuuucaaccuggg

SEQ ID NO: 1574277 - RNA, 20 nt, Human adenovirus E
ccacgugcgcacccugaucg

SEQ ID NO: 1574278 - RNA, 16 nt, Human adenovirus E
cgagccugcugacgcc

SEQ ID NO: 1574279 - RNA, 15 nt, Human adenovirus E
cagcgacgagcagcu

SEQ ID NO: 1574280 - RNA, 12 nt, Human adenovirus E
agccccaggcca

SEQ ID NO: 1574281 - RNA, 21 nt, Human adenovirus E
uaccauugucaaugccaccuc

SEQ ID NO: 1574282 - RNA, 18 nt, Human adenovirus E
gcagacaacgcaccgacc

SEQ ID NO: 1574283 - RNA, 21 nt, Human adenovirus E
gcaggccggagcuguccaggg

SEQ ID NO: 1574284 - RNA, 17 nt, Human adenovirus E
uggaccucgauuccucg

SEQ ID NO: 1574285 - RNA, 21 nt, Human adenovirus E
cugcccccgccccagcagcaa

SEQ ID NO: 1574286 - RNA, 20 nt, Human adenovirus E
agagcgugaugcagcaggcg

SEQ ID NO: 1574287 - RNA, 23 nt, Human adenovirus E
cgcuguccgagaagcuggcggcc

SEQ ID NO: 1574288 - RNA, 19 nt, Human adenovirus E
cgccagacgccgcaccugc

SEQ ID NO: 1574289 - RNA, 19 nt, Human adenovirus E
gaggaaccccgcccacucc

SEQ ID NO: 1574290 - RNA, 15 nt, Human adenovirus E
gcugauggaaguggc

SEQ ID NO: 1574291 - RNA, 16 nt, Human adenovirus E
uggucuccaugagcuc

SEQ ID NO: 1574292 - RNA, 19 nt, Human adenovirus E
cguguucuccccccgaccg

SEQ ID NO: 1574293 - RNA, 18 nt, Human adenovirus E
gcaagaccaccacucgcc

SEQ ID NO: 1574294 - RNA, 14 nt, Human adenovirus E
uguaucccacccug

SEQ ID NO: 1574295 - RNA, 23 nt, Human adenovirus E
ccaacguggagcugaccaaccug

SEQ ID NO: 1574296 - RNA, 15 nt, Human adenovirus E
gugggaccugcugga

SEQ ID NO: 1574297 - RNA, 20 nt, Human adenovirus E
caucucuucuacuuccuccu

SEQ ID NO: 1574298 - RNA, 22 nt, Human adenovirus E
caagggcccagcgaaggcgagg

SEQ ID NO: 1574299 - RNA, 16 nt, Human adenovirus E
ccacaucacccucugg

SEQ ID NO: 1574300 - RNA, 23 nt, Human adenovirus E
gcuggaagacguaugcgcaggag

SEQ ID NO: 1574301 - RNA, 17 nt, Human adenovirus E
cuccuucagcgcgcgcu

SEQ ID NO: 1574302 - RNA, 16 nt, Human adenovirus E
cgagcccgagggccgc

SEQ ID NO: 1574303 - RNA, 13 nt, Human adenovirus E
gcgagggugcgcu

SEQ ID NO: 1574304 - RNA, 20 nt, Human adenovirus E
gcuccacgguggccgcgaag

SEQ ID NO: 1574305 - RNA, 21 nt, Human adenovirus E
uguggagccacugcuaccugc

SEQ ID NO: 1574306 - RNA, 17 nt, Human adenovirus E
cgugcagcggcagauca

SEQ ID NO: 1574307 - RNA, 20 nt, Human adenovirus E
ccaagaacagccagagcagg

SEQ ID NO: 1574308 - RNA, 12 nt, Human adenovirus E
ugaccugggcua

SEQ ID NO: 1574309 - RNA, 20 nt, Human adenovirus E
cagcagucgcugccgccgcc

SEQ ID NO: 1574310 - RNA, 14 nt, Human adenovirus E
cacggcccucagca

SEQ ID NO: 1574311 - RNA, 15 nt, Human adenovirus E
gagcuguaccugagu

SEQ ID NO: 1574312 - RNA, 18 nt, Human adenovirus E
ccagacgcgcggcuucag

SEQ ID NO: 1574313 - RNA, 14 nt, Human adenovirus E
cggguuccuguggg

SEQ ID NO: 1574314 - RNA, 17 nt, Human adenovirus E
caacaaaugccagcuga

SEQ ID NO: 1574315 - RNA, 14 nt, Human adenovirus E
ugagcggggcugga

SEQ ID NO: 1574316 - RNA, 19 nt, Human adenovirus E
acagcuaccuccagugccu

SEQ ID NO: 1574317 - RNA, 16 nt, Human adenovirus E
gugaccgaggugcccc

SEQ ID NO: 1574318 - RNA, 11 nt, Human adenovirus E
cugggccagga

SEQ ID NO: 1574319 - RNA, 21 nt, Human adenovirus E
cagcagcacacaacaggcgca

SEQ ID NO: 1574320 - RNA, 16 nt, Human adenovirus E
gauccacgggaucuga

SEQ ID NO: 1574321 - RNA, 18 nt, Human adenovirus E
ggccaaagucuaaaaaua

SEQ ID NO: 1574322 - RNA, 21 nt, Human adenovirus E
ccgccgcuguggagccacugc

SEQ ID NO: 1574323 - RNA, 22 nt, Human adenovirus E
gaaccugaaagagcucugcaag

SEQ ID NO: 1574324 - RNA, 22 nt, Human adenovirus E
gggcgucgcagggggccacgag

SEQ ID NO: 1574325 - RNA, 13 nt, Human adenovirus E
ggaccgaggggga

SEQ ID NO: 1574326 - RNA, 13 nt, Human adenovirus E
cucucgaggacgc

SEQ ID NO: 1574327 - RNA, 22 nt, Human adenovirus E
gcccgaggagaugcgcgcggcc

SEQ ID NO: 1574328 - RNA, 20 nt, Human adenovirus E
agacgaggaggaggcagagg

SEQ ID NO: 1574329 - RNA, 16 nt, Human adenovirus E
cuugggcggcagcggc

SEQ ID NO: 1574330 - RNA, 17 nt, Human adenovirus E
uggaucagguuuaggac

SEQ ID NO: 1574331 - RNA, 16 nt, Human adenovirus E
ggccgcggccaaccug

SEQ ID NO: 1574332 - RNA, 22 nt, Human adenovirus E
augauucgacaagaugaauaca

SEQ ID NO: 1574333 - RNA, 13 nt, Human adenovirus E
gggccuggccgcc

SEQ ID NO: 1574334 - RNA, 18 nt, Human adenovirus E
uccaagucugugccaccc

SEQ ID NO: 1574335 - RNA, 15 nt, Human adenovirus E
gaccugggcggcgag

SEQ ID NO: 1574336 - RNA, 22 nt, Human adenovirus E
uguccacccgcucucugcucaa

SEQ ID NO: 1574337 - RNA, 18 nt, Human adenovirus E
aggcgggacagaggaggg

SEQ ID NO: 1574338 - RNA, 16 nt, Human adenovirus E
gguucaccugcagcag

SEQ ID NO: 1574339 - RNA, 13 nt, Human adenovirus E
acaaaaaugaaca

SEQ ID NO: 1574340 - RNA, 17 nt, Human adenovirus E
ggaggccaucgugcaga

SEQ ID NO: 1574341 - RNA, 15 nt, Human adenovirus E
cgcugcgcccccagc

SEQ ID NO: 1574342 - RNA, 12 nt, Human adenovirus E
gcgcgcugcccg

SEQ ID NO: 1574343 - RNA, 18 nt, Human adenovirus E
agcugaccuagcucggcu

SEQ ID NO: 1574344 - RNA, 20 nt, Human adenovirus E
  misc_feature (7)..(7): n is a, c, g, or u
gcagccnuucuccacgggga

SEQ ID NO: 1574345 - RNA, 19 nt, Human adenovirus E
caguuuuuccaacaacacc

SEQ ID NO: 1574346 - RNA, 13 nt, Human adenovirus E
cgacaccuggacc

SEQ ID NO: 1574347 - RNA, 20 nt, Human adenovirus E
acaaaaaggaagaagaaagu

SEQ ID NO: 1574348 - RNA, 19 nt, Human adenovirus E
uccagggacucccucagca

SEQ ID NO: 1574349 - RNA, 16 nt, Human adenovirus E
accgcacccgcgccga

SEQ ID NO: 1574350 - RNA, 15 nt, Human adenovirus E
gucccgucgaccccc

SEQ ID NO: 1574351 - RNA, 18 nt, Human adenovirus E
uaucgccuccuuggaaga

SEQ ID NO: 1574352 - RNA, 21 nt, Human adenovirus E
gggacagaugugggacgauga

SEQ ID NO: 1574353 - RNA, 23 nt, Human adenovirus E
cccgcuguguugguggaaaauaa

SEQ ID NO: 1574354 - RNA, 15 nt, Human adenovirus E
gcgccggcaggaccc

SEQ ID NO: 1574355 - RNA, 15 nt, Human adenovirus E
cacgaagcccugcag

SEQ ID NO: 1574356 - RNA, 18 nt, Human adenovirus E
acgugcgcgaggccgugg

SEQ ID NO: 1574357 - RNA, 21 nt, Human adenovirus E
gccgcuccgucaagcugcugc

SEQ ID NO: 1574358 - RNA, 18 nt, Human adenovirus E
augcauagucugcagcgg

SEQ ID NO: 1574359 - RNA, 23 nt, Human adenovirus E
agagcucgcgcagagcgcccucc

SEQ ID NO: 1574360 - RNA, 14 nt, Human adenovirus E
auauaccaaugcug

SEQ ID NO: 1574361 - RNA, 22 nt, Human adenovirus E
cgcgaggaggugacccugggcc

SEQ ID NO: 1574362 - RNA, 17 nt, Human adenovirus E
ucgcaaucaggcagcac

SEQ ID NO: 1574363 - RNA, 20 nt, Human adenovirus E
acuaggaacuucaggcuggg

SEQ ID NO: 1574364 - RNA, 13 nt, Human adenovirus E
ugagcaccacagc

SEQ ID NO: 1574365 - RNA, 13 nt, Human adenovirus E
aacgcgcuggugg

SEQ ID NO: 1574366 - RNA, 17 nt, Human adenovirus E
cugguacuuggccagcc

SEQ ID NO: 1574367 - RNA, 18 nt, Human adenovirus E
ugcacgccgcaccgcucc

SEQ ID NO: 1574368 - RNA, 14 nt, Human adenovirus E
cucccggaggaggg

SEQ ID NO: 1574369 - RNA, 12 nt, Human adenovirus E
gacaacccacau

SEQ ID NO: 1574370 - RNA, 15 nt, Human adenovirus E
gaauacaccacccuc

SEQ ID NO: 1574371 - RNA, 16 nt, Human adenovirus E
acgcgcacuuccucaa

SEQ ID NO: 1574372 - RNA, 18 nt, Human adenovirus E
ccaaagucaugagcgcgg

SEQ ID NO: 1574373 - RNA, 18 nt, Human adenovirus E
cggguucgugcgccaggc

SEQ ID NO: 1574374 - RNA, 13 nt, Human adenovirus E
cgggagcugagga

SEQ ID NO: 1574375 - RNA, 16 nt, Human adenovirus E
cgaguccaaccuggga

SEQ ID NO: 1574376 - RNA, 20 nt, Human adenovirus E
ccagcaaagccuccacgcgc

SEQ ID NO: 1574377 - RNA, 19 nt, Human adenovirus E
agccacgaccgccgcggcc

SEQ ID NO: 1574378 - RNA, 21 nt, Human adenovirus E
cuuuggaagauguugaagugg

SEQ ID NO: 1574379 - RNA, 13 nt, Human adenovirus E
cgaggugccccuc

SEQ ID NO: 1574380 - RNA, 19 nt, Human adenovirus E
ugagggagagacagcugcc

SEQ ID NO: 1574381 - RNA, 17 nt, Human adenovirus E
caaacuaaccuccacca

SEQ ID NO: 1574382 - RNA, 20 nt, Human adenovirus E
uagucgagggucuccuggau

SEQ ID NO: 1574383 - RNA, 19 nt, Human adenovirus E
ggcgacgaggccggccugg

SEQ ID NO: 1574384 - RNA, 14 nt, Human adenovirus E
gaggaugcagcagc

SEQ ID NO: 1574385 - RNA, 14 nt, Human adenovirus E
caagaacagccaga

SEQ ID NO: 1574386 - RNA, 20 nt, Human adenovirus E
aggacuccgccgacgacagc

SEQ ID NO: 1574387 - RNA, 16 nt, Human adenovirus E
gucaccuccacagccc

SEQ ID NO: 1574388 - RNA, 20 nt, Human adenovirus E
uuccacgguggcuuccagca

SEQ ID NO: 1574389 - RNA, 15 nt, Human adenovirus E
cacucaacccacccc

SEQ ID NO: 1574390 - RNA, 15 nt, Human adenovirus E
caagggucuguggac

SEQ ID NO: 1574391 - RNA, 18 nt, Human adenovirus E
gcggucauaccagcagcc

SEQ ID NO: 1574392 - RNA, 22 nt, Human adenovirus E
uggaagagggcgaggggcuggc

SEQ ID NO: 1574393 - RNA, 12 nt, Human adenovirus E
ucagcuggaagu

SEQ ID NO: 1574394 - RNA, 15 nt, Human adenovirus E
ccuggaagacugaug

SEQ ID NO: 1574395 - RNA, 22 nt, Human adenovirus E
ccacguacaugaucuccuuggg

SEQ ID NO: 1574396 - RNA, 17 nt, Human adenovirus E
cggugccgcccaggacu

SEQ ID NO: 1574397 - RNA, 21 nt, Human adenovirus E
acaagucggcggacaucgccu

SEQ ID NO: 1574398 - RNA, 16 nt, Human adenovirus E
ucaggcagaggaggag

SEQ ID NO: 1574399 - RNA, 20 nt, Human adenovirus E
cagcagcacacaacaggcgc

SEQ ID NO: 1574400 - RNA, 17 nt, Human adenovirus E
caugcccaacgugaacg

SEQ ID NO: 1574401 - RNA, 15 nt, Human adenovirus E
gguguccagcuggcg

SEQ ID NO: 1574402 - RNA, 20 nt, Human adenovirus E
ccagcagcaacuuccagcca

SEQ ID NO: 1574403 - RNA, 21 nt, Human adenovirus E
cagcaaggcguggaacagcac

SEQ ID NO: 1574404 - RNA, 16 nt, Human adenovirus E
caguuccgccaggagg

SEQ ID NO: 1574405 - RNA, 12 nt, Human adenovirus E
ccugcacaggca

SEQ ID NO: 1574406 - RNA, 14 nt, Human adenovirus E
ccacagcgcccugg

SEQ ID NO: 1574407 - RNA, 14 nt, Human adenovirus E
ugucuugcugcccg

SEQ ID NO: 1574408 - RNA, 19 nt, Human adenovirus E
cuugcacgagaaccgccug

SEQ ID NO: 1574409 - RNA, 14 nt, Human adenovirus E
auuacacagacaac

SEQ ID NO: 1574410 - RNA, 15 nt, Human adenovirus E
ucaccaccucccggu

SEQ ID NO: 1574411 - RNA, 18 nt, Human adenovirus E
gccacaauacaugcccau

SEQ ID NO: 1574412 - RNA, 22 nt, Human adenovirus E
cgucuccugcuugcaggccugc

SEQ ID NO: 1574413 - RNA, 14 nt, Human adenovirus E
ggggcggcagaacg

SEQ ID NO: 1574414 - RNA, 17 nt, Human adenovirus E
aacacuguaucccaccc

SEQ ID NO: 1574415 - RNA, 16 nt, Human adenovirus E
aucucgucgaagccgu

SEQ ID NO: 1574416 - RNA, 14 nt, Human adenovirus E
gagccgccucagca

SEQ ID NO: 1574417 - RNA, 17 nt, Human adenovirus E
cccgccaacgugccccg

SEQ ID NO: 1574418 - RNA, 14 nt, Human adenovirus E
gccgcccagccccg

SEQ ID NO: 1574419 - RNA, 13 nt, Human adenovirus E
acaauaucuuuga

SEQ ID NO: 1574420 - RNA, 12 nt, Human adenovirus E
caggcagcgggg

SEQ ID NO: 1574421 - RNA, 19 nt, Human adenovirus E
accgcagcuugcccucggc

SEQ ID NO: 1574422 - RNA, 19 nt, Human adenovirus E
uaaugagaaaauuacuauu

SEQ ID NO: 1574423 - RNA, 19 nt, Human adenovirus E
cgggugauccuccaccaga

SEQ ID NO: 1574424 - RNA, 14 nt, Human adenovirus E
cagagacaggagcg

SEQ ID NO: 1574425 - RNA, 15 nt, Human adenovirus E
acacgcccagaaacc

SEQ ID NO: 1574426 - RNA, 20 nt, Human adenovirus E
gaucucgucgaagccguuga

SEQ ID NO: 1574427 - RNA, 19 nt, Human adenovirus E
ggcuucgacaccuggacca

SEQ ID NO: 1574428 - RNA, 15 nt, Human adenovirus E
ucccuggccugcaac

SEQ ID NO: 1574429 - RNA, 15 nt, Human adenovirus E
gcgagcaaggacaga

SEQ ID NO: 1574430 - RNA, 21 nt, Human adenovirus E
gugcaaccggugcugagaccc

SEQ ID NO: 1574431 - RNA, 19 nt, Human adenovirus E
cuucacgccucgucaggcc

SEQ ID NO: 1574432 - RNA, 19 nt, Human adenovirus E
caguacgcgcucagcaccg

SEQ ID NO: 1574433 - RNA, 15 nt, Human adenovirus E
cuccauugcagggcc

SEQ ID NO: 1574434 - RNA, 22 nt, Human adenovirus E
cggagcacgaggaggagcuggc

SEQ ID NO: 1574435 - RNA, 22 nt, Human adenovirus E
cgggcaugggcguguggcagca

SEQ ID NO: 1574436 - RNA, 12 nt, Human adenovirus E
ccucuucuuggu

SEQ ID NO: 1574437 - RNA, 22 nt, Human adenovirus E
ugguaguugagggagagacagc

SEQ ID NO: 1574438 - RNA, 22 nt, Human adenovirus E
cuccaauugccugaacgccugc

SEQ ID NO: 1574439 - RNA, 17 nt, Human adenovirus E
gucaggcagaggaggag

SEQ ID NO: 1574440 - RNA, 17 nt, Human adenovirus E
cucaggcagaggaggac

SEQ ID NO: 1574441 - RNA, 18 nt, Human adenovirus E
gccgagcugucggccugc

SEQ ID NO: 1574442 - RNA, 20 nt, Human adenovirus E
cucgaaucaggcuggagccg

SEQ ID NO: 1574443 - RNA, 21 nt, Human adenovirus E
ccugacacaccaccacagcaa

SEQ ID NO: 1574444 - RNA, 23 nt, Human adenovirus E
acuacuuccgcgagacgcccagg

SEQ ID NO: 1574445 - RNA, 18 nt, Human adenovirus E
acgccaucgucuccugcu

SEQ ID NO: 1574446 - RNA, 21 nt, Human adenovirus E
cggcauggcccgcgggcaggg

SEQ ID NO: 1574447 - RNA, 19 nt, Human adenovirus E
gucuggcccgugaggcgcg

SEQ ID NO: 1574448 - RNA, 21 nt, Human adenovirus E
gcucggcuucgacaccuggac

SEQ ID NO: 1574449 - RNA, 20 nt, Human adenovirus E
gggaccccgugaccgagcug

SEQ ID NO: 1574450 - RNA, 21 nt, Human adenovirus E
ggcuggucgaaaaccgcuccc

SEQ ID NO: 1574451 - RNA, 23 nt, Human adenovirus E
gcaaggucgaggagaaccugcac

SEQ ID NO: 1574452 - RNA, 12 nt, Human adenovirus E
uaccucuucagg

SEQ ID NO: 1574453 - RNA, 23 nt, Human adenovirus E
cccgcgcgcgcgcacguggccgc

SEQ ID NO: 1574454 - RNA, 18 nt, Human adenovirus E
gucucgcacuccacgagc

SEQ ID NO: 1574455 - RNA, 21 nt, Human adenovirus E
aacaacagcccccuccacagc

SEQ ID NO: 1574456 - RNA, 11 nt, Human adenovirus E
acggaggccag

SEQ ID NO: 1574457 - RNA, 22 nt, Human adenovirus E
cacaauuacucacaccacacac

SEQ ID NO: 1574458 - RNA, 17 nt, Human adenovirus E
acuaccaccacuacagc

SEQ ID NO: 1574459 - RNA, 13 nt, Human adenovirus E
cucugccacaccu

SEQ ID NO: 1574460 - RNA, 19 nt, Human adenovirus E
cgcacgggacgcagggcca

SEQ ID NO: 1574461 - RNA, 15 nt, Human adenovirus E
gcccuugcgcgagca

SEQ ID NO: 1574462 - RNA, 13 nt, Human adenovirus E
cugcgccugaugg

SEQ ID NO: 1574463 - RNA, 14 nt, Human adenovirus E
gcaucugcugcugu

SEQ ID NO: 1574464 - RNA, 13 nt, Human adenovirus E
uuccagcaaagcc

SEQ ID NO: 1574465 - RNA, 21 nt, Human adenovirus E
ccgcaucugcaccucacagcu

SEQ ID NO: 1574466 - RNA, 13 nt, Human adenovirus E
gaucccuccaggu

SEQ ID NO: 1574467 - RNA, 15 nt, Human adenovirus E
ggccugcaaccccca

SEQ ID NO: 1574468 - RNA, 17 nt, Human adenovirus E
gugagcucgucgggguc

SEQ ID NO: 1574469 - RNA, 19 nt, Human adenovirus E
ccugccgcugcgcagcagu

SEQ ID NO: 1574470 - RNA, 17 nt, Human adenovirus E
gcgaugcgggcggcgcu

SEQ ID NO: 1574471 - RNA, 21 nt, Human adenovirus E
cucggacuucgugccgcugac

SEQ ID NO: 1574472 - RNA, 15 nt, Human adenovirus E
acagcgcccuggucg

SEQ ID NO: 1574473 - RNA, 13 nt, Human adenovirus E
ccgagcuccagcu

SEQ ID NO: 1574474 - RNA, 20 nt, Human adenovirus E
cagcagaaaaccagcagcua

SEQ ID NO: 1574475 - RNA, 16 nt, Human adenovirus E
cucccccggccacuac

SEQ ID NO: 1574476 - RNA, 14 nt, Human adenovirus E
gccaccucagcuca

SEQ ID NO: 1574477 - RNA, 14 nt, Human adenovirus E
gaccaggagcugau

SEQ ID NO: 1574478 - RNA, 16 nt, Human adenovirus E
gcgccgggcccgcgau

SEQ ID NO: 1574479 - RNA, 21 nt, Human adenovirus E
cagcguguucuccccccgacc

SEQ ID NO: 1574480 - RNA, 17 nt, Human adenovirus E
gcccguggucagcgacg

SEQ ID NO: 1574481 - RNA, 17 nt, Human adenovirus E
ugaucaccagcuggccu

SEQ ID NO: 1574482 - RNA, 22 nt, Human adenovirus E
ggccugcucgagugccacugcc

SEQ ID NO: 1574483 - RNA, 19 nt, Human adenovirus E
ccuccagugccuucucuag

SEQ ID NO: 1574484 - RNA, 23 nt, Human adenovirus E
cccgggaguuccuccacuuccuc

SEQ ID NO: 1574485 - RNA, 23 nt, Human adenovirus E
caugauuggcauuauuguugcug

SEQ ID NO: 1574486 - RNA, 15 nt, Human adenovirus E
gaccgaggugcccca

SEQ ID NO: 1574487 - RNA, 23 nt, Human adenovirus E
cugcccgacuuuaugagccaaag

SEQ ID NO: 1574488 - RNA, 20 nt, Human adenovirus E
ccacagcaacuuccugacca

SEQ ID NO: 1574489 - RNA, 12 nt, Human adenovirus E
ugacccugggcc

SEQ ID NO: 1574490 - RNA, 20 nt, Human adenovirus E
cugacguaaaggccaaaguc

SEQ ID NO: 1574491 - RNA, 21 nt, Human adenovirus E
gcgagcagaaggggggcaggg

SEQ ID NO: 1574492 - RNA, 15 nt, Human adenovirus E
ugcacccgugcagcc

SEQ ID NO: 1574493 - RNA, 16 nt, Human adenovirus E
cuaucauuaccucugc

SEQ ID NO: 1574494 - RNA, 19 nt, Human adenovirus E
cgacccgggcaaccuggaa

SEQ ID NO: 1574495 - RNA, 23 nt, Human adenovirus E
agcgcuagcagccgcggccaggg

SEQ ID NO: 1574496 - RNA, 18 nt, Human adenovirus E
ugcccucggccucggugc

SEQ ID NO: 1574497 - RNA, 12 nt, Human adenovirus E
ucuggaggagca

SEQ ID NO: 1574498 - RNA, 16 nt, Human adenovirus E
cgagccggggcagcgc

SEQ ID NO: 1574499 - RNA, 22 nt, Human adenovirus E
agcgcaugcggaucucgcucag

SEQ ID NO: 1574500 - RNA, 18 nt, Human adenovirus E
cugcguuacgugcagcag

SEQ ID NO: 1574501 - RNA, 22 nt, Human adenovirus E
agggccgcuggcuccuggaccu

SEQ ID NO: 1574502 - RNA, 22 nt, Human adenovirus E
ggccgcgcaccucugacccugc

SEQ ID NO: 1574503 - RNA, 22 nt, Human adenovirus E
cgcagcagcugcgcgccuucac

SEQ ID NO: 1574504 - RNA, 16 nt, Human adenovirus E
gccgaccgcggcgccg

SEQ ID NO: 1574505 - RNA, 17 nt, Human adenovirus E
cuguaccgcgaggccau

SEQ ID NO: 1574506 - RNA, 23 nt, Human adenovirus E
ccaaaaaucagacaugcauccca

SEQ ID NO: 1574507 - RNA, 13 nt, Human adenovirus E
cuuugacuuuggu

SEQ ID NO: 1574508 - RNA, 22 nt, Human adenovirus E
gccgcgaacgcucugcaaggag

SEQ ID NO: 1574509 - RNA, 11 nt, Human adenovirus E
gcccugcagga

SEQ ID NO: 1574510 - RNA, 13 nt, Human adenovirus E
gagcgcauggucu

SEQ ID NO: 1574511 - RNA, 22 nt, Human adenovirus E
augcugacgagcccgcgcggga

SEQ ID NO: 1574512 - RNA, 15 nt, Human adenovirus E
ugaagauggagccau

SEQ ID NO: 1574513 - RNA, 19 nt, Human adenovirus E
gugaagaagaccccgcagg

SEQ ID NO: 1574514 - RNA, 13 nt, Human adenovirus E
cauuaccacacag

SEQ ID NO: 1574515 - RNA, 23 nt, Human adenovirus E
gucuccgcggccggcgcgcucca

SEQ ID NO: 1574516 - RNA, 21 nt, Human adenovirus E
cacgugagccgcgcccugggc

SEQ ID NO: 1574517 - RNA, 23 nt, Human adenovirus E
gaccgacgcccguccucggcgcu

SEQ ID NO: 1574518 - RNA, 19 nt, Human adenovirus E
cauucggggaagacguggu

SEQ ID NO: 1574519 - RNA, 18 nt, Human adenovirus E
guccgcccgcccgcgccc

SEQ ID NO: 1574520 - RNA, 16 nt, Human adenovirus E
caaugguacugaucug

SEQ ID NO: 1574521 - RNA, 17 nt, Human adenovirus E
ccgcgcuugcugggcga

SEQ ID NO: 1574522 - RNA, 18 nt, Human adenovirus E
cacccccacggaggccag

SEQ ID NO: 1574523 - RNA, 18 nt, Human adenovirus E
aggaugcagcagcugaag

SEQ ID NO: 1574524 - RNA, 14 nt, Human adenovirus E
ugacugacccacug

SEQ ID NO: 1574525 - RNA, 15 nt, Human adenovirus E
cagggcuugcagacc

SEQ ID NO: 1574526 - RNA, 18 nt, Human adenovirus E
cggcagaucaacagccgc

SEQ ID NO: 1574527 - RNA, 15 nt, Human adenovirus E
aagaguuccaggcgg

SEQ ID NO: 1574528 - RNA, 15 nt, Human adenovirus E
cucaccgccacgccc

SEQ ID NO: 1574529 - RNA, 17 nt, Human adenovirus E
guugcaagggcccagcg

SEQ ID NO: 1574530 - RNA, 16 nt, Human adenovirus E
cgcggucauggaccag

SEQ ID NO: 1574531 - RNA, 21 nt, Human adenovirus E
ugcgaccugacggagucuucc

SEQ ID NO: 1574532 - RNA, 21 nt, Human adenovirus E
cagcgcccuggucgaguugga

SEQ ID NO: 1574533 - RNA, 22 nt, Human adenovirus E
cauugucaaugccaccucagcu

SEQ ID NO: 1574534 - RNA, 18 nt, Human adenovirus E
cgcaaucaggcagcaccg

SEQ ID NO: 1574535 - RNA, 13 nt, Human adenovirus E
auggaacuacagc

SEQ ID NO: 1574536 - RNA, 13 nt, Human adenovirus E
cggacgagcugac

SEQ ID NO: 1574537 - RNA, 14 nt, Human adenovirus E
aagacgugcuggag

SEQ ID NO: 1574538 - RNA, 22 nt, Human adenovirus E
cgcucugguggccaacgccagu

SEQ ID NO: 1574539 - RNA, 21 nt, Human adenovirus E
gcagcuugccauucgcgcacg

SEQ ID NO: 1574540 - RNA, 23 nt, Human adenovirus E
ucuaucucccgccugaaccugac

SEQ ID NO: 1574541 - RNA, 19 nt, Human adenovirus E
auguccaccugcggggcga

SEQ ID NO: 1574542 - RNA, 16 nt, Human adenovirus E
acuccccuccugcaca

SEQ ID NO: 1574543 - RNA, 16 nt, Human adenovirus E
gggaccugcuggaggc

SEQ ID NO: 1574544 - RNA, 19 nt, Human adenovirus E
ugcacgguaagagccuagc

SEQ ID NO: 1574545 - RNA, 14 nt, Human adenovirus E
gacguccugcagga

SEQ ID NO: 1574546 - RNA, 16 nt, Human adenovirus E
gcacgaggaggagcug

SEQ ID NO: 1574547 - RNA, 15 nt, Human adenovirus E
cgugaccgagcuggu

SEQ ID NO: 1574548 - RNA, 19 nt, Human adenovirus E
ccauggaaacgcagaccga

SEQ ID NO: 1574549 - RNA, 18 nt, Human adenovirus E
guaucguugacggcggcc

SEQ ID NO: 1574550 - RNA, 14 nt, Human adenovirus E
gucgcagggggcca

SEQ ID NO: 1574551 - RNA, 17 nt, Human adenovirus E
gaaauuguaaaacagcc

SEQ ID NO: 1574552 - RNA, 15 nt, Human adenovirus E
gcccgguggcugggu

SEQ ID NO: 1574553 - RNA, 15 nt, Human adenovirus E
cagccccaggccaac

SEQ ID NO: 1574554 - RNA, 14 nt, Human adenovirus E
cagaaagcacagac

SEQ ID NO: 1574555 - RNA, 14 nt, Human adenovirus E
aguugcagaggcgc

SEQ ID NO: 1574556 - RNA, 14 nt, Human adenovirus E
gcagccccaggcca

SEQ ID NO: 1574557 - RNA, 20 nt, Human adenovirus E
ucgcgcuccaaccccacgca

SEQ ID NO: 1574558 - RNA, 14 nt, Human adenovirus E
accagauccucagg

SEQ ID NO: 1574559 - RNA, 23 nt, Human adenovirus E
ggagaacagcagucaggcagagg

SEQ ID NO: 1574560 - RNA, 22 nt, Human adenovirus E
cugcucgggcaucagcuggaag

SEQ ID NO: 1574561 - RNA, 11 nt, Human adenovirus E
aguccccagag

SEQ ID NO: 1574562 - RNA, 16 nt, Human adenovirus E
gcaugaccucggcacu

SEQ ID NO: 1574563 - RNA, 19 nt, Human adenovirus E
caagcggugcguuccagca

SEQ ID NO: 1574564 - RNA, 12 nt, Human adenovirus E
caagcauggaga

SEQ ID NO: 1574565 - RNA, 16 nt, Human adenovirus E
cgagacgaugggcagg

SEQ ID NO: 1574566 - RNA, 23 nt, Human adenovirus E
agugcgucucgggacccugccau

SEQ ID NO: 1574567 - RNA, 19 nt, Human adenovirus E
cgggcggcgcugcagagcc

SEQ ID NO: 1574568 - RNA, 21 nt, Human adenovirus E
uccugcccgcgcugaucccca

SEQ ID NO: 1574569 - RNA, 16 nt, Human adenovirus E
ccacggcccucagcau

SEQ ID NO: 1574570 - RNA, 12 nt, Human adenovirus E
gugccccagagc

SEQ ID NO: 1574571 - RNA, 16 nt, Human adenovirus E
gccgccgggccuugga

SEQ ID NO: 1574572 - RNA, 19 nt, Human adenovirus E
cucagcaucagucgucugg

SEQ ID NO: 1574573 - RNA, 15 nt, Human adenovirus E
ccugauaucgccucc

SEQ ID NO: 1574574 - RNA, 16 nt, Human adenovirus E
gagccacaccacagcu

SEQ ID NO: 1574575 - RNA, 19 nt, Human adenovirus E
ccaggccgaaguccagcug

SEQ ID NO: 1574576 - RNA, 14 nt, Human adenovirus E
ggggaacgggaugc

SEQ ID NO: 1574577 - RNA, 20 nt, Human adenovirus E
caggcggcgcgagcugagcg

SEQ ID NO: 1574578 - RNA, 16 nt, Human adenovirus E
cagcagcgagcugggc

SEQ ID NO: 1574579 - RNA, 15 nt, Human adenovirus E
cgcagcagcgcaugc

SEQ ID NO: 1574580 - RNA, 17 nt, Human adenovirus E
ucccucguacgagagcg

SEQ ID NO: 1574581 - RNA, 12 nt, Human adenovirus E
guuguaccuggu

SEQ ID NO: 1574582 - RNA, 15 nt, Human adenovirus E
cggcggcggcagcgg

SEQ ID NO: 1574583 - RNA, 11 nt, Human adenovirus E
cgccaccaccc

SEQ ID NO: 1574584 - RNA, 15 nt, Human adenovirus E
auaacuguaaguacu

SEQ ID NO: 1574585 - RNA, 22 nt, Human adenovirus E
gggcauaaaguugcgagugaug

SEQ ID NO: 1574586 - RNA, 14 nt, Human adenovirus E
caaggaggaugcag

SEQ ID NO: 1574587 - RNA, 20 nt, Human adenovirus E
ucauaccagcagccgccgcc

SEQ ID NO: 1574588 - RNA, 19 nt, Human adenovirus E
guguaccaguccgggccgg

SEQ ID NO: 1574589 - RNA, 14 nt, Human adenovirus E
ccuggaccacugcc

SEQ ID NO: 1574590 - RNA, 22 nt, Human adenovirus E
caggacauggaauacaccaccc

SEQ ID NO: 1574591 - RNA, 21 nt, Human adenovirus E
gccacggcggcggcagcggcc

SEQ ID NO: 1574592 - RNA, 18 nt, Human adenovirus E
accgcgccauugguggcg

SEQ ID NO: 1574593 - RNA, 15 nt, Human adenovirus E
gcaacuuccugacca

SEQ ID NO: 1574594 - RNA, 16 nt, Human adenovirus E
guaugcgaucucgguc

SEQ ID NO: 1574595 - RNA, 11 nt, Human adenovirus E
ucuuccuccuc

SEQ ID NO: 1574596 - RNA, 13 nt, Human adenovirus E
aaaauuugaagau

SEQ ID NO: 1574597 - RNA, 17 nt, Human adenovirus E
ccagaacacgcugccca

SEQ ID NO: 1574598 - RNA, 16 nt, Human adenovirus E
acggcccugcgguggu

SEQ ID NO: 1574599 - RNA, 17 nt, Human adenovirus E
gugcucggggguggugu

SEQ ID NO: 1574600 - RNA, 13 nt, Human adenovirus E
agggcgcgcggga

SEQ ID NO: 1574601 - RNA, 14 nt, Human adenovirus E
acuuccaagaagag

SEQ ID NO: 1574602 - RNA, 17 nt, Human adenovirus E
ggcggcgauguugagcu

SEQ ID NO: 1574603 - RNA, 15 nt, Human adenovirus E
gugcugacccugagc

SEQ ID NO: 1574604 - RNA, 20 nt, Human adenovirus E
ucagcgacgagcagcuggcc

SEQ ID NO: 1574605 - RNA, 17 nt, Human adenovirus E
agcucugcaagcuccug

SEQ ID NO: 1574606 - RNA, 16 nt, Human adenovirus E
uccagccgaaacucau

SEQ ID NO: 1574607 - RNA, 15 nt, Human adenovirus E
gaggucaggggcgau

SEQ ID NO: 1574608 - RNA, 15 nt, Human adenovirus E
cuggagcgacaucgg

SEQ ID NO: 1574609 - RNA, 17 nt, Human adenovirus E
caugccgcagaugucgu

SEQ ID NO: 1574610 - RNA, 18 nt, Human adenovirus E
cagcagucaggcagagga

SEQ ID NO: 1574611 - RNA, 13 nt, Human adenovirus E
cgagccaggugag

SEQ ID NO: 1574612 - RNA, 17 nt, Human adenovirus E
cccccagcgguucuggg

SEQ ID NO: 1574613 - RNA, 13 nt, Human adenovirus E
gccuccacccauc

SEQ ID NO: 1574614 - RNA, 17 nt, Human adenovirus E
cggauggcuggcagagc

SEQ ID NO: 1574615 - RNA, 16 nt, Human adenovirus E
agccgccuggacccgg

SEQ ID NO: 1574616 - RNA, 13 nt, Human adenovirus E
aguuuuacaggau

SEQ ID NO: 1574617 - RNA, 15 nt, Human adenovirus E
gagcgaccaggagcu

SEQ ID NO: 1574618 - RNA, 21 nt, Human adenovirus E
cagccccgauuaugcagggug

SEQ ID NO: 1574619 - RNA, 20 nt, Human adenovirus E
cgcgguagcgguccaucagc

SEQ ID NO: 1574620 - RNA, 15 nt, Human adenovirus E
gcaacggccugcccg

SEQ ID NO: 1574621 - RNA, 12 nt, Human adenovirus E
gcuccugguccu

SEQ ID NO: 1574622 - RNA, 13 nt, Human adenovirus E
aggagaaggagga

SEQ ID NO: 1574623 - RNA, 13 nt, Human adenovirus E
cauggcgaccagc

SEQ ID NO: 1574624 - RNA, 21 nt, Human adenovirus E
uacucacaccacacacacaga

SEQ ID NO: 1574625 - RNA, 19 nt, Human adenovirus E
gacagcacucaggcagagg

SEQ ID NO: 1574626 - RNA, 17 nt, Human adenovirus E
caggccgaaguccagcu

SEQ ID NO: 1574627 - RNA, 15 nt, Human adenovirus E
ucguccagggcagcu

SEQ ID NO: 1574628 - RNA, 18 nt, Human adenovirus E
ccaccacccccaguaccg

SEQ ID NO: 1574629 - RNA, 14 nt, Human adenovirus E
accgccgacgagaa

SEQ ID NO: 1574630 - RNA, 23 nt, Human adenovirus E
gcccugcgcgucggccagguagc

SEQ ID NO: 1574631 - RNA, 12 nt, Human adenovirus E
cgagggccugcu

SEQ ID NO: 1574632 - RNA, 11 nt, Human adenovirus E
ggcggcagcag

SEQ ID NO: 1574633 - RNA, 12 nt, Human adenovirus E
gcaggggcgcag

SEQ ID NO: 1574634 - RNA, 22 nt, Human adenovirus E
uaccgcggucauaccagcagcc

SEQ ID NO: 1574635 - RNA, 18 nt, Human adenovirus E
gcagcuguuccugguggu

SEQ ID NO: 1574636 - RNA, 21 nt, Human adenovirus E
cccagcucugguacugcaggc

SEQ ID NO: 1574637 - RNA, 22 nt, Human adenovirus E
cugcaggaagcggcccaucaug

SEQ ID NO: 1574638 - RNA, 21 nt, Human adenovirus E
uccauguuuucugccaacacc

SEQ ID NO: 1574639 - RNA, 16 nt, Human adenovirus E
cggggucgcugagccc

SEQ ID NO: 1574640 - RNA, 18 nt, Human adenovirus E
agagcaucguggugcagg

SEQ ID NO: 1574641 - RNA, 17 nt, Human adenovirus E
agcuaccagccccagau

SEQ ID NO: 1574642 - RNA, 22 nt, Human adenovirus E
aucuguagaaaaaacaaaaaug

SEQ ID NO: 1574643 - RNA, 23 nt, Human adenovirus E
ccagcaggcggcgcgagcugagc

SEQ ID NO: 1574644 - RNA, 13 nt, Human adenovirus E
cuccccccaggga

SEQ ID NO: 1574645 - RNA, 15 nt, Human adenovirus E
gcggccgccgugagc

SEQ ID NO: 1574646 - RNA, 23 nt, Human adenovirus E
cgcaacucguaccugggcuaccu

SEQ ID NO: 1574647 - RNA, 17 nt, Human adenovirus E
gaugccgggcaggaggu

SEQ ID NO: 1574648 - RNA, 19 nt, Human adenovirus E
ucgcguucccauuacgggc

SEQ ID NO: 1574649 - RNA, 15 nt, Human adenovirus E
gcgaacuccauggcu

SEQ ID NO: 1574650 - RNA, 23 nt, Human adenovirus E
caacaaaagaaaaauccuccagg

SEQ ID NO: 1574651 - RNA, 22 nt, Human adenovirus E
cgccuggccaacuaccuggccu

SEQ ID NO: 1574652 - RNA, 20 nt, Human adenovirus E
cgcugcgcaacggccugccc

SEQ ID NO: 1574653 - RNA, 20 nt, Human adenovirus E
ugcuuucgugguauugcuau

SEQ ID NO: 1574654 - RNA, 21 nt, Human adenovirus E
cggacgauuggacccaggcca

SEQ ID NO: 1574655 - RNA, 17 nt, Human adenovirus E
ugaguccgucggccaug

SEQ ID NO: 1574656 - RNA, 21 nt, Human adenovirus E
cccggagacgcgcggccacgg

SEQ ID NO: 1574657 - RNA, 13 nt, Human adenovirus E
accaggagcugau

SEQ ID NO: 1574658 - RNA, 20 nt, Human adenovirus E
cagcagagguugccagcucg

SEQ ID NO: 1574659 - RNA, 23 nt, Human adenovirus E
acaccaccuggacaaaauaccac

SEQ ID NO: 1574660 - RNA, 21 nt, Human adenovirus E
ccgccgcgcaucuccaggugg

SEQ ID NO: 1574661 - RNA, 13 nt, Human adenovirus E
aucaucugggccu

SEQ ID NO: 1574662 - RNA, 17 nt, Human adenovirus E
gcagccccaggccaacc

SEQ ID NO: 1574663 - RNA, 17 nt, Human adenovirus E
cccacggaggccagcac

SEQ ID NO: 1574664 - RNA, 13 nt, Human adenovirus E
agguacaugggca

SEQ ID NO: 1574665 - RNA, 13 nt, Human adenovirus E
cgccuggggcaga

SEQ ID NO: 1574666 - RNA, 20 nt, Human adenovirus E
gagcauugccaaaugcaaga

SEQ ID NO: 1574667 - RNA, 18 nt, Human adenovirus E
gacuccguggcucugccu

SEQ ID NO: 1574668 - RNA, 12 nt, Human adenovirus E
cgagggccgcug

SEQ ID NO: 1574669 - RNA, 21 nt, Human adenovirus E
gagccuuguugcgcagggcca

SEQ ID NO: 1574670 - RNA, 22 nt, Human adenovirus E
cugcuaccugcugcgccuggcc

SEQ ID NO: 1574671 - RNA, 15 nt, Human adenovirus E
gagcccgcgcgggag

SEQ ID NO: 1574672 - RNA, 23 nt, Human adenovirus E
ugacggguuccugugggacgaug

SEQ ID NO: 1574673 - RNA, 21 nt, Human adenovirus E
cagcgggcccugaccggggcc

SEQ ID NO: 1574674 - RNA, 22 nt, Human adenovirus E
caccuggacaaaauaccaccuc

SEQ ID NO: 1574675 - RNA, 21 nt, Human adenovirus E
ucuggaggaagacgaggagga

SEQ ID NO: 1574676 - RNA, 17 nt, Human adenovirus E
cccagaucaucggcacc

SEQ ID NO: 1574677 - RNA, 14 nt, Human adenovirus E
uggcacgacaggca

SEQ ID NO: 1574678 - RNA, 12 nt, Human adenovirus E
accuccacccac

SEQ ID NO: 1574679 - RNA, 20 nt, Human adenovirus E
ggcgcacgggacgcagggcc

SEQ ID NO: 1574680 - RNA, 19 nt, Human adenovirus E
agacgcgcgccgggcggca

SEQ ID NO: 1574681 - RNA, 22 nt, Human adenovirus E
cuacggcaucucgauccagcag

SEQ ID NO: 1574682 - RNA, 20 nt, Human adenovirus E
guaauuggcccgccgcccug

SEQ ID NO: 1574683 - RNA, 20 nt, Human adenovirus E
acuuccgcgcucccuggggc

SEQ ID NO: 1574684 - RNA, 13 nt, Human adenovirus E
acugacgccagac

SEQ ID NO: 1574685 - RNA, 13 nt, Human adenovirus E
acucgcagcagcu

SEQ ID NO: 1574686 - RNA, 12 nt, Human adenovirus E
gccgcggugcuc

SEQ ID NO: 1574687 - RNA, 19 nt, Human adenovirus E
ccgaaggaagaggcggugu

SEQ ID NO: 1574688 - RNA, 19 nt, Human adenovirus E
cauuaccacacagacaacc

SEQ ID NO: 1574689 - RNA, 21 nt, Human adenovirus E
gugggaccugcuggaggccau

SEQ ID NO: 1574690 - RNA, 17 nt, Human adenovirus E
auuaccucugcucuaug

SEQ ID NO: 1574691 - RNA, 14 nt, Human adenovirus E
cuugcaggccugcg

SEQ ID NO: 1574692 - RNA, 14 nt, Human adenovirus E
ccaccguggugcag

SEQ ID NO: 1574693 - RNA, 22 nt, Human adenovirus E
cguagaccgacuuuaugggccg

SEQ ID NO: 1574694 - RNA, 13 nt, Human adenovirus E
ucguccagggcag

SEQ ID NO: 1574695 - RNA, 14 nt, Human adenovirus E
gccagaugaugcaa

SEQ ID NO: 1574696 - RNA, 22 nt, Human adenovirus E
  misc_feature (7)..(7): n is a, c, g, or u
ccccaunuagcagucccacugc

SEQ ID NO: 1574697 - RNA, 14 nt, Human adenovirus E
gacagaugugggac

SEQ ID NO: 1574698 - RNA, 21 nt, Human adenovirus E
ugcgguacacgggguugcagc

SEQ ID NO: 1574699 - RNA, 19 nt, Human adenovirus E
cucgcaacgcugcacggga

SEQ ID NO: 1574700 - RNA, 15 nt, Human adenovirus E
gcuccuccucggccu

SEQ ID NO: 1574701 - RNA, 13 nt, Human adenovirus E
ccgcgcaccucug

SEQ ID NO: 1574702 - RNA, 13 nt, Human adenovirus E
caggcggucccag

SEQ ID NO: 1574703 - RNA, 12 nt, Human adenovirus E
ucggccaugggc

SEQ ID NO: 1574704 - RNA, 18 nt, Human adenovirus E
ugagcagagucaggcugg

SEQ ID NO: 1574705 - RNA, 13 nt, Human adenovirus E
gggccacccccag

SEQ ID NO: 1574706 - RNA, 23 nt, Human adenovirus E
ccagcagagucgggggcaggagc

SEQ ID NO: 1574707 - RNA, 23 nt, Human adenovirus E
uucgugcgccaggccugcaagau

SEQ ID NO: 1574708 - RNA, 21 nt, Human adenovirus E
ugggcauucgcaagaggcagc

SEQ ID NO: 1574709 - RNA, 14 nt, Human adenovirus E
agcgcucaccgcca

SEQ ID NO: 1574710 - RNA, 23 nt, Human adenovirus E
cucgcgccugcugcugcugcugg

SEQ ID NO: 1574711 - RNA, 23 nt, Human adenovirus E
gcagcaaagcccccgaucccucc

SEQ ID NO: 1574712 - RNA, 17 nt, Human adenovirus E
uccuccucguagaggaa

SEQ ID NO: 1574713 - RNA, 15 nt, Human adenovirus E
cauggagacucagcc

SEQ ID NO: 1574714 - RNA, 23 nt, Human adenovirus E
auuaccucugcucuaugcaauuc

SEQ ID NO: 1574715 - RNA, 21 nt, Human adenovirus E
ggaucaucugggagcugaaca

SEQ ID NO: 1574716 - RNA, 22 nt, Human adenovirus E
cgccugcugcugcugcuggugg

SEQ ID NO: 1574717 - RNA, 12 nt, Human adenovirus E
acgcgcacuucc

SEQ ID NO: 1574718 - RNA, 16 nt, Human adenovirus E
cggcgggcgcagcagc

SEQ ID NO: 1574719 - RNA, 13 nt, Human adenovirus E
cuuugaggaggag

SEQ ID NO: 1574720 - RNA, 12 nt, Human adenovirus E
caaggaggaugc

SEQ ID NO: 1574721 - RNA, 15 nt, Human adenovirus E
cggugccgcccagga

SEQ ID NO: 1574722 - RNA, 16 nt, Human adenovirus E
uugcagggccuguggg

SEQ ID NO: 1574723 - RNA, 15 nt, Human adenovirus E
cgcggcgacgaggcc

SEQ ID NO: 1574724 - RNA, 21 nt, Human adenovirus E
cccaauggggugacagugaca

SEQ ID NO: 1574725 - RNA, 19 nt, Human adenovirus E
ugccuuggcaguacaguua

SEQ ID NO: 1574726 - RNA, 14 nt, Human adenovirus E
acaaguacugcgcg

SEQ ID NO: 1574727 - RNA, 18 nt, Human adenovirus E
gccacccccagcgccgcg

SEQ ID NO: 1574728 - RNA, 12 nt, Human adenovirus E
gaggaggagcug

SEQ ID NO: 1574729 - RNA, 18 nt, Human adenovirus E
  misc_feature (6)..(6): n is a, c, g, or u
cgggcnugggcgugcaga

SEQ ID NO: 1574730 - RNA, 22 nt, Human adenovirus E
gggucgcugagcccgugcugcu

SEQ ID NO: 1574731 - RNA, 15 nt, Human adenovirus E
accaagaacagccag

SEQ ID NO: 1574732 - RNA, 22 nt, Human adenovirus E
ggucgcagaagaucccgcccca

SEQ ID NO: 1574733 - RNA, 19 nt, Human adenovirus E
gaaccugccccccaaaguc

SEQ ID NO: 1574734 - RNA, 20 nt, Human adenovirus E
cagaccgugaaggaggagag

SEQ ID NO: 1574735 - RNA, 18 nt, Human adenovirus E
uccacagcggcggcagca

SEQ ID NO: 1574736 - RNA, 14 nt, Human adenovirus E
gcgggcgcagcagc

SEQ ID NO: 1574737 - RNA, 15 nt, Human adenovirus E
caaucaggcagcacc

SEQ ID NO: 1574738 - RNA, 16 nt, Human adenovirus E
cugcaaggagaaggag

SEQ ID NO: 1574739 - RNA, 14 nt, Human adenovirus E
gccucggaccuggc

SEQ ID NO: 1574740 - RNA, 22 nt, Human adenovirus E
ccauuuaaacuuucgccagcuu

SEQ ID NO: 1574741 - RNA, 15 nt, Human adenovirus E
ccgggcccagguugg

SEQ ID NO: 1574742 - RNA, 17 nt, Human adenovirus E
gggcgucgucgccggag

SEQ ID NO: 1574743 - RNA, 15 nt, Human adenovirus E
ucgggggcaggagca

SEQ ID NO: 1574744 - RNA, 17 nt, Human adenovirus E
ccgaggacgagggcaug

SEQ ID NO: 1574745 - RNA, 22 nt, Human adenovirus E
ggggaugaugauauucuggagc

SEQ ID NO: 1574746 - RNA, 15 nt, Human adenovirus E
ugguaguugagggag

SEQ ID NO: 1574747 - RNA, 21 nt, Human adenovirus E
cagcaagccgcugacggcgca

SEQ ID NO: 1574748 - RNA, 17 nt, Human adenovirus E
cugcaaccaccccugcc

SEQ ID NO: 1574749 - RNA, 18 nt, Human adenovirus E
gggccagacccagccaga

SEQ ID NO: 1574750 - RNA, 17 nt, Human adenovirus E
agggcguuggagaggag

SEQ ID NO: 1574751 - RNA, 17 nt, Human adenovirus E
ggcgcaaacccgggagc

SEQ ID NO: 1574752 - RNA, 18 nt, Human adenovirus E
uccgccgacgacagcagc

SEQ ID NO: 1574753 - RNA, 19 nt, Human adenovirus E
ccauccagaaaucccgcca

SEQ ID NO: 1574754 - RNA, 15 nt, Human adenovirus E
acccgagcaucgcca

SEQ ID NO: 1574755 - RNA, 16 nt, Human adenovirus E
cccgcgcuugcugggc

SEQ ID NO: 1574756 - RNA, 13 nt, Human adenovirus E
cgggcgcagcagc

SEQ ID NO: 1574757 - RNA, 20 nt, Human adenovirus E
ugccauucgcgcacggccag

SEQ ID NO: 1574758 - RNA, 17 nt, Human adenovirus E
gcagaggcguccgcccu

SEQ ID NO: 1574759 - RNA, 15 nt, Human adenovirus E
cagcgggcccugacc

SEQ ID NO: 1574760 - RNA, 15 nt, Human adenovirus E
cccugccgcccuggu

SEQ ID NO: 1574761 - RNA, 13 nt, Human adenovirus E
uucucuccagcac

SEQ ID NO: 1574762 - RNA, 21 nt, Human adenovirus E
ugucccuuuuguuuccacagc

SEQ ID NO: 1574763 - RNA, 16 nt, Human adenovirus E
gcgauggcggcggcgg

SEQ ID NO: 1574764 - RNA, 14 nt, Human adenovirus E
gcuugcaggccugc

SEQ ID NO: 1574765 - RNA, 17 nt, Human adenovirus E
ucaacacgcuccagccg

SEQ ID NO: 1574766 - RNA, 16 nt, Human adenovirus E
gagggcguggcugccc

SEQ ID NO: 1574767 - RNA, 21 nt, Human adenovirus E
aauacaccacccucucccccc

SEQ ID NO: 1574768 - RNA, 13 nt, Human adenovirus E
gcuggcggugcuc

SEQ ID NO: 1574769 - RNA, 17 nt, Human adenovirus E
gaagacguaugcgcagg

SEQ ID NO: 1574770 - RNA, 18 nt, Human adenovirus E
ggaggauuuggaggaaga

SEQ ID NO: 1574771 - RNA, 15 nt, Human adenovirus E
cugcggcguggagca

SEQ ID NO: 1574772 - RNA, 14 nt, Human adenovirus E
cugguacugcgccc

SEQ ID NO: 1574773 - RNA, 13 nt, Human adenovirus E
gcaggccggagcu

SEQ ID NO: 1574774 - RNA, 17 nt, Human adenovirus E
cgugccccggggccagg

SEQ ID NO: 1574775 - RNA, 11 nt, Human adenovirus E
accgcggcgcc

SEQ ID NO: 1574776 - RNA, 21 nt, Human adenovirus E
cagcaggcggcgcgagcugag

SEQ ID NO: 1574777 - RNA, 16 nt, Human adenovirus E
gcucgaccacacagua

SEQ ID NO: 1574778 - RNA, 13 nt, Human adenovirus E
agaggcagcagca

SEQ ID NO: 1574779 - RNA, 12 nt, Human adenovirus E
cagcacccagac

SEQ ID NO: 1574780 - RNA, 19 nt, Human adenovirus E
gccgaacucgcgccugcug

SEQ ID NO: 1574781 - RNA, 23 nt, Human adenovirus E
ccgcagcuugcccucggccucgg

SEQ ID NO: 1574782 - RNA, 13 nt, Human adenovirus E
acuaccuggccua

SEQ ID NO: 1574783 - RNA, 13 nt, Human adenovirus E
agcagcagcacac

SEQ ID NO: 1574784 - RNA, 14 nt, Human adenovirus E
cagcacccagcccg

SEQ ID NO: 1574785 - RNA, 14 nt, Human adenovirus E
gccuggcccucuuc

SEQ ID NO: 1574786 - RNA, 18 nt, Human adenovirus E
gaacacuguaucccaccc

SEQ ID NO: 1574787 - RNA, 20 nt, Human adenovirus E
cucaggcacacgcacuacca

SEQ ID NO: 1574788 - RNA, 17 nt, Human adenovirus E
ugaacgccugcugggcc

SEQ ID NO: 1574789 - RNA, 15 nt, Human adenovirus E
caaugguacugaucu

SEQ ID NO: 1574790 - RNA, 14 nt, Human adenovirus E
aggagcuggcagug

SEQ ID NO: 1574791 - RNA, 13 nt, Human adenovirus E
ccaagaaugaaca

SEQ ID NO: 1574792 - RNA, 16 nt, Human adenovirus E
aucguggugcaggagc

SEQ ID NO: 1574793 - RNA, 22 nt, Human adenovirus E
ggccgcgaacgcucugcaagga

SEQ ID NO: 1574794 - RNA, 23 nt, Human adenovirus E
ugcuccugguucaccugcagcag

SEQ ID NO: 1574795 - RNA, 13 nt, Human adenovirus E
guagagguaguug

SEQ ID NO: 1574796 - RNA, 23 nt, Human adenovirus E
ugcagggccuguggggcgugcag

SEQ ID NO: 1574797 - RNA, 11 nt, Human adenovirus E
cagaggaggag

SEQ ID NO: 1574798 - RNA, 18 nt, Human adenovirus E
cggugcaggccucucagc

SEQ ID NO: 1574799 - RNA, 18 nt, Human adenovirus E
ggcggugcccgaggccgc

SEQ ID NO: 1574800 - RNA, 11 nt, Human adenovirus E
cagagcuggaa

SEQ ID NO: 1574801 - RNA, 17 nt, Human adenovirus E
cagaugggccuggccgc

SEQ ID NO: 1574802 - RNA, 18 nt, Human adenovirus E
gugcugcacaccacccug

SEQ ID NO: 1574803 - RNA, 20 nt, Human adenovirus E
cccgggcaaccuggaagcca

SEQ ID NO: 1574804 - RNA, 13 nt, Human adenovirus E
agccccaggccaa

SEQ ID NO: 1574805 - RNA, 14 nt, Human adenovirus E
cgacucccaccugc

SEQ ID NO: 1574806 - RNA, 21 nt, Human adenovirus E
gccuuggaggcggcggcagga

SEQ ID NO: 1574807 - RNA, 16 nt, Human adenovirus E
aagauauuugcaauug

SEQ ID NO: 1574808 - RNA, 19 nt, Human adenovirus E
acgugccccggggccagga

SEQ ID NO: 1574809 - RNA, 16 nt, Human adenovirus E
cacugacguaaaggcc

SEQ ID NO: 1574810 - RNA, 17 nt, Human adenovirus E
ccugcucgagugccacu

SEQ ID NO: 1574811 - RNA, 14 nt, Human adenovirus E
accugcggggcgau

SEQ ID NO: 1574812 - RNA, 16 nt, Human adenovirus E
caugguggucaggguc

SEQ ID NO: 1574813 - RNA, 23 nt, Human adenovirus E
cacucucucagaccgugcagcag

SEQ ID NO: 1574814 - RNA, 18 nt, Human adenovirus E
gcgguggggcggccagcu

SEQ ID NO: 1574815 - RNA, 21 nt, Human adenovirus E
ccacugcuaccugcugcgccu

SEQ ID NO: 1574816 - RNA, 15 nt, Human adenovirus E
ccgcucccuggccug

SEQ ID NO: 1574817 - RNA, 19 nt, Human adenovirus E
gcacccggugcacucccag

SEQ ID NO: 1574818 - RNA, 18 nt, Human adenovirus E
ccugcggaaccacagggc

SEQ ID NO: 1574819 - RNA, 15 nt, Human adenovirus E
guggagcuaccagcc

SEQ ID NO: 1574820 - RNA, 23 nt, Human adenovirus E
ggcggagaugccuuucaagagcc

SEQ ID NO: 1574821 - RNA, 18 nt, Human adenovirus E
uggcgauggagcgcaugg

SEQ ID NO: 1574822 - RNA, 18 nt, Human adenovirus E
cagcaccacagggcaggc

SEQ ID NO: 1574823 - RNA, 22 nt, Human adenovirus E
cgacgcggagacccugcgcaag

SEQ ID NO: 1574824 - RNA, 20 nt, Human adenovirus E
guugcagggcgcccagcagg

SEQ ID NO: 1574825 - RNA, 18 nt, Human adenovirus E
caccauggaggugcagac

SEQ ID NO: 1574826 - RNA, 21 nt, Human adenovirus E
uccuggcugacguccugcagg

SEQ ID NO: 1574827 - RNA, 18 nt, Human adenovirus E
ggguuggcgcggaggaag

SEQ ID NO: 1574828 - RNA, 21 nt, Human adenovirus E
uccucaauaucacgaaaucau

SEQ ID NO: 1574829 - RNA, 12 nt, Human adenovirus E
ucaggcugggcu

SEQ ID NO: 1574830 - RNA, 13 nt, Human adenovirus E
cugacgcuccugg

SEQ ID NO: 1574831 - RNA, 14 nt, Human adenovirus E
ggcugacguccugc

SEQ ID NO: 1574832 - RNA, 13 nt, Human adenovirus E
ggaguuccuccac

SEQ ID NO: 1574833 - RNA, 22 nt, Human adenovirus E
uccugcggaaccacagggccag

SEQ ID NO: 1574834 - RNA, 17 nt, Human adenovirus E
cuccuggaccuggugaa

SEQ ID NO: 1574835 - RNA, 14 nt, Human adenovirus E
caggagcacaggga

SEQ ID NO: 1574836 - RNA, 13 nt, Human adenovirus E
aggauuuggagga

SEQ ID NO: 1574837 - RNA, 13 nt, Human adenovirus E
accgagcccauga

SEQ ID NO: 1574838 - RNA, 17 nt, Human adenovirus E
ugucauacuugagcugu

SEQ ID NO: 1574839 - RNA, 17 nt, Human adenovirus E
ucgcgguggggcggcca

SEQ ID NO: 1574840 - RNA, 19 nt, Human adenovirus E
uucugggugaucuuggccc

SEQ ID NO: 1574841 - RNA, 13 nt, Human adenovirus E
ucuucccacuccc

SEQ ID NO: 1574842 - RNA, 19 nt, Human adenovirus E
gcaggcggcgcgagcugag

SEQ ID NO: 1574843 - RNA, 11 nt, Human adenovirus E
ccguggagcug

SEQ ID NO: 1574844 - RNA, 10 nt, Human adenovirus E
augaacauua

SEQ ID NO: 1574845 - RNA, 19 nt, Human adenovirus E
gcaugagcaccacagcgcc

SEQ ID NO: 1574846 - RNA, 21 nt, Human adenovirus E
ucagcggcucgacuccguggc

SEQ ID NO: 1574847 - RNA, 17 nt, Human adenovirus E
ccuggucgaguuggaag

SEQ ID NO: 1574848 - RNA, 22 nt, Human adenovirus E
gcucgagugccacugccgcugc

SEQ ID NO: 1574849 - RNA, 14 nt, Human adenovirus E
agcugaaaguggag

SEQ ID NO: 1574850 - RNA, 12 nt, Human adenovirus E
cuaguccccaga

SEQ ID NO: 1574851 - RNA, 21 nt, Human adenovirus E
cuggaagacguaugcgcagga

SEQ ID NO: 1574852 - RNA, 24 nt, Human adenovirus E
cgagcgccccuuguggaagaagga

SEQ ID NO: 1574853 - RNA, 17 nt, Human adenovirus E
ccgcaagaccaccacuc

SEQ ID NO: 1574854 - RNA, 13 nt, Human adenovirus E
ccgcaacgacagg

SEQ ID NO: 1574855 - RNA, 20 nt, Human adenovirus E
gauuccaagagaagccccug

SEQ ID NO: 1574856 - RNA, 22 nt, Human adenovirus E
gcguggccuuuggcgcggagcu

SEQ ID NO: 1574857 - RNA, 15 nt, Human adenovirus E
cucuacggcaucucg

SEQ ID NO: 1574858 - RNA, 16 nt, Human adenovirus E
agagcgcccuccaccg

SEQ ID NO: 1574859 - RNA, 23 nt, Human adenovirus E
uggccaccucgccgcgcaggggc

SEQ ID NO: 1574860 - RNA, 13 nt, Human adenovirus E
agcacgaggagga

SEQ ID NO: 1574861 - RNA, 21 nt, Human adenovirus E
cuuaucaccuucuuccaguuc

SEQ ID NO: 1574862 - RNA, 18 nt, Human adenovirus E
ggaucugaaaaccgcuga

SEQ ID NO: 1574863 - RNA, 23 nt, Human adenovirus E
cccagagcgagguguaccagucc

SEQ ID NO: 1574864 - RNA, 19 nt, Human adenovirus E
cggucgcccgucucucagc

SEQ ID NO: 1574865 - RNA, 22 nt, Human adenovirus E
cagaaccugaaagagcucugca

SEQ ID NO: 1574866 - RNA, 21 nt, Human adenovirus E
gcuuccgcgucaguugcaggg

SEQ ID NO: 1574867 - RNA, 20 nt, Human adenovirus E
gaagagccuuucggugcgag

SEQ ID NO: 1574868 - RNA, 19 nt, Human adenovirus E
ucagacccacugcugaacc

SEQ ID NO: 1574869 - RNA, 18 nt, Human adenovirus E
acacauacaaagccucag

SEQ ID NO: 1574870 - RNA, 13 nt, Human adenovirus E
gcccggcgcgacu

SEQ ID NO: 1574871 - RNA, 14 nt, Human adenovirus E
ccgagcagcagcac

SEQ ID NO: 1574872 - RNA, 20 nt, Human adenovirus E
gguaucgcaaucaggcagca

SEQ ID NO: 1574873 - RNA, 15 nt, Human adenovirus E
cggcgaugcagcccc

SEQ ID NO: 1574874 - RNA, 13 nt, Human adenovirus E
auaugcucaugca

SEQ ID NO: 1574875 - RNA, 19 nt, Human adenovirus E
caggggguccagcaugacc

SEQ ID NO: 1574876 - RNA, 16 nt, Human adenovirus E
uccccgucuccugccg

SEQ ID NO: 1574877 - RNA, 17 nt, Human adenovirus E
gcggcgauguugagcug

SEQ ID NO: 1574878 - RNA, 17 nt, Human adenovirus E
cugcacuggcagcccag

SEQ ID NO: 1574879 - RNA, 23 nt, Human adenovirus E
uuuuaaugaaucagauguaucua

SEQ ID NO: 1574880 - RNA, 19 nt, Human adenovirus E
cggugagcgccagcaggcg

SEQ ID NO: 1574881 - RNA, 13 nt, Human adenovirus E
gagcccgagggcc

SEQ ID NO: 1574882 - RNA, 15 nt, Human adenovirus E
cuuugacaguacagg

SEQ ID NO: 1574883 - RNA, 21 nt, Human adenovirus E
cccagaucaucggcaccuucg

SEQ ID NO: 1574884 - RNA, 17 nt, Human adenovirus E
ugacacuacagaaacug

SEQ ID NO: 1574885 - RNA, 19 nt, Human adenovirus E
ggcagcagugucuggagga

SEQ ID NO: 1574886 - RNA, 17 nt, Human adenovirus E
agucgggggcaggagca

SEQ ID NO: 1574887 - RNA, 19 nt, Human adenovirus E
caacccuuccuccccggga

SEQ ID NO: 1574888 - RNA, 15 nt, Human adenovirus E
acuucucggugcuga

SEQ ID NO: 1574889 - RNA, 17 nt, Human adenovirus E
cagggggaucagcauca

SEQ ID NO: 1574890 - RNA, 15 nt, Human adenovirus E
gcagcgaagagaccc

SEQ ID NO: 1574891 - RNA, 14 nt, Human adenovirus E
agcuccucccucag

SEQ ID NO: 1574892 - RNA, 15 nt, Human adenovirus E
agcgcucuaguuuuu

SEQ ID NO: 1574893 - RNA, 22 nt, Human adenovirus E
uuccaccugaucccgaauacca

SEQ ID NO: 1574894 - RNA, 17 nt, Human adenovirus E
cacaauuacucacacca

SEQ ID NO: 1574895 - RNA, 21 nt, Human adenovirus E
cagcguccgauccuggucgag

SEQ ID NO: 1574896 - RNA, 20 nt, Human adenovirus E
caugcggggggagaugaggu

SEQ ID NO: 1574897 - RNA, 17 nt, Human adenovirus E
cgucgcagggggccacg

SEQ ID NO: 1574898 - RNA, 17 nt, Human adenovirus E
gaucguccagggcagcu

SEQ ID NO: 1574899 - RNA, 14 nt, Human adenovirus E
agcggcccugccaa

SEQ ID NO: 1574900 - RNA, 13 nt, Human adenovirus E
ggcggcggcagcg

SEQ ID NO: 1574901 - RNA, 15 nt, Human adenovirus E
ggcuggcgcgccugg

SEQ ID NO: 1574902 - RNA, 17 nt, Human adenovirus E
gaagcagcagcagcaga

SEQ ID NO: 1574903 - RNA, 17 nt, Human adenovirus E
uggagaacaaggccauc

SEQ ID NO: 1574904 - RNA, 14 nt, Human adenovirus E
cuaccagccccaga

SEQ ID NO: 1574905 - RNA, 15 nt, Human adenovirus E
ggccagcugcaccac

SEQ ID NO: 1574906 - RNA, 14 nt, Human adenovirus E
ggaggugugcguga

SEQ ID NO: 1574907 - RNA, 19 nt, Human adenovirus E
cucguaaaaguccacggcg

SEQ ID NO: 1574908 - RNA, 22 nt, Human adenovirus E
gcgcggucauggaccaggugcu

SEQ ID NO: 1574909 - RNA, 15 nt, Human adenovirus E
ucagguguccagcug

SEQ ID NO: 1574910 - RNA, 18 nt, Human adenovirus E
uuccucgggaaaacucau

SEQ ID NO: 1574911 - RNA, 21 nt, Human adenovirus E
ggugauccuccaccagagaag

SEQ ID NO: 1574912 - RNA, 24 nt, Human adenovirus E
ugaacaagucuauguuggcacagc

SEQ ID NO: 1574913 - RNA, 19 nt, Human adenovirus E
gccuuguaggcgcagcagc

SEQ ID NO: 1574914 - RNA, 15 nt, Human adenovirus E
gcuccacgguggccg

SEQ ID NO: 1574915 - RNA, 16 nt, Human adenovirus E
aguggcgcggcugcuc

SEQ ID NO: 1574916 - RNA, 14 nt, Human adenovirus E
ccugcgccgcuucu

SEQ ID NO: 1574917 - RNA, 12 nt, Human adenovirus E
cggaggccagca

SEQ ID NO: 1574918 - RNA, 23 nt, Human adenovirus E
ccguggucagcgacgagcagcug

SEQ ID NO: 1574919 - RNA, 23 nt, Human adenovirus E
acugaggggcgugccccagggca

SEQ ID NO: 1574920 - RNA, 21 nt, Human adenovirus E
ugaaggaggagagcaacuucc

SEQ ID NO: 1574921 - RNA, 13 nt, Human adenovirus E
gguacaugggcau

SEQ ID NO: 1574922 - RNA, 19 nt, Human adenovirus E
cugcuguuagugcuccccc

SEQ ID NO: 1574923 - RNA, 20 nt, Human adenovirus E
ggaguacuucaaaaugaaga

SEQ ID NO: 1574924 - RNA, 21 nt, Human adenovirus E
acgcacuaccaccacuacagc

SEQ ID NO: 1574925 - RNA, 21 nt, Human adenovirus E
agggauaagcugaaagagcag

SEQ ID NO: 1574926 - RNA, 22 nt, Human adenovirus E
ucaggcgccagcgccggcagga

SEQ ID NO: 1574927 - RNA, 15 nt, Human adenovirus E
cguggccgcggccaa

SEQ ID NO: 1574928 - RNA, 18 nt, Human adenovirus E
ucuucuacuuccuccuca

SEQ ID NO: 1574929 - RNA, 23 nt, Human adenovirus E
gucaaaaccauaucccagggcac

SEQ ID NO: 1574930 - RNA, 15 nt, Human adenovirus E
gcgagacgcccaggc

SEQ ID NO: 1574931 - RNA, 15 nt, Human adenovirus E
gccgccgccagaccg

SEQ ID NO: 1574932 - RNA, 21 nt, Human adenovirus E
aggugcaaccggugcugagac

SEQ ID NO: 1574933 - RNA, 22 nt, Human adenovirus E
aaagcgcccgaggaagcaauaa

SEQ ID NO: 1574934 - RNA, 18 nt, Human adenovirus E
gggcuaccgaggaagaaa

SEQ ID NO: 1574935 - RNA, 21 nt, Human adenovirus E
agcggcacccgcgcgugcaga

SEQ ID NO: 1574936 - RNA, 15 nt, Human adenovirus E
gauauucuggagcag

SEQ ID NO: 1574937 - RNA, 16 nt, Human adenovirus E
ugcccgaggacuacca

SEQ ID NO: 1574938 - RNA, 22 nt, Human adenovirus E
aagcagccgccgccagaccguc

SEQ ID NO: 1574939 - RNA, 22 nt, Human adenovirus E
gagccgcgcccugggccaggac

SEQ ID NO: 1574940 - RNA, 16 nt, Human adenovirus E
gucaagcugcugcuca

SEQ ID NO: 1574941 - RNA, 16 nt, Human adenovirus E
ggugcccgaggccgcc

SEQ ID NO: 1574942 - RNA, 15 nt, Human adenovirus E
gggccauguucaggg

SEQ ID NO: 1574943 - RNA, 16 nt, Human adenovirus E
auccccgcgcuccugg

SEQ ID NO: 1574944 - RNA, 21 nt, Human adenovirus E
aguucgugagguaaauccaag

SEQ ID NO: 1574945 - RNA, 23 nt, Human adenovirus E
uccagcggcggagcggcaucucg

SEQ ID NO: 1574946 - RNA, 15 nt, Human adenovirus E
agcccuuccaggaag

SEQ ID NO: 1574947 - RNA, 17 nt, Human adenovirus E
augggcgcggaccugca

SEQ ID NO: 1574948 - RNA, 16 nt, Human adenovirus E
gguugcaaucgcagug

SEQ ID NO: 1574949 - RNA, 22 nt, Human adenovirus E
aggugccccucagcguggagga

SEQ ID NO: 1574950 - RNA, 12 nt, Human adenovirus E
ggaggcagagga

SEQ ID NO: 1574951 - RNA, 18 nt, Human adenovirus E
cugaaagagcucugcaag

SEQ ID NO: 1574952 - RNA, 20 nt, Human adenovirus E
agcaacuacccggugguggg

SEQ ID NO: 1574953 - RNA, 13 nt, Human adenovirus E
cgugcgcgaggcc

SEQ ID NO: 1574954 - RNA, 13 nt, Human adenovirus E
gcagggggccacg

SEQ ID NO: 1574955 - RNA, 14 nt, Human adenovirus E
uggacaaaauacca

SEQ ID NO: 1574956 - RNA, 15 nt, Human adenovirus E
acagccgccuggacc

SEQ ID NO: 1574957 - RNA, 14 nt, Human adenovirus E
gggugaugaggucc

SEQ ID NO: 1574958 - RNA, 12 nt, Human adenovirus E
gggccugugggg

SEQ ID NO: 1574959 - RNA, 19 nt, Human adenovirus E
gugagcggggcuggacaga

SEQ ID NO: 1574960 - RNA, 14 nt, Human adenovirus E
caccgugcggugag

SEQ ID NO: 1574961 - RNA, 23 nt, Human adenovirus E
uccuggccguguugcucuacuac

SEQ ID NO: 1574962 - RNA, 16 nt, Human adenovirus E
ggcgggcgcagcagcg

SEQ ID NO: 1574963 - RNA, 19 nt, Human adenovirus E
uggcgcggcugcucaggcu

SEQ ID NO: 1574964 - RNA, 14 nt, Human adenovirus E
uaaacucacuuugu

SEQ ID NO: 1574965 - RNA, 14 nt, Human adenovirus E
aucgccaaccucgc

SEQ ID NO: 1574966 - RNA, 20 nt, Human adenovirus E
gaucgaggacgucagcggcg

SEQ ID NO: 1574967 - RNA, 23 nt, Human adenovirus E
uguuacugaggggggcaauguga

SEQ ID NO: 1574968 - RNA, 16 nt, Human adenovirus E
cccuucucccaggccg

SEQ ID NO: 1574969 - RNA, 21 nt, Human adenovirus E
gccgucaucgacagcguggug

SEQ ID NO: 1574970 - RNA, 20 nt, Human adenovirus E
agaaccuguucagagacagg

SEQ ID NO: 1574971 - RNA, 20 nt, Human adenovirus E
cagcgaaccccgcagaacag

SEQ ID NO: 1574972 - RNA, 21 nt, Human adenovirus E
caaggaggaugcagcagcuga

SEQ ID NO: 1574973 - RNA, 17 nt, Human adenovirus E
ucuacguuuugaugcaa

SEQ ID NO: 1574974 - RNA, 23 nt, Human adenovirus E
agcaugaugcccacggcccucag

SEQ ID NO: 1574975 - RNA, 15 nt, Human adenovirus E
gcgggcggcgccacc

SEQ ID NO: 1574976 - RNA, 15 nt, Human adenovirus E
cugaaaacaccaccu

SEQ ID NO: 1574977 - RNA, 16 nt, Human adenovirus E
cagagcucggugaugu

SEQ ID NO: 1574978 - RNA, 19 nt, Human adenovirus E
gacguaugcgcaggagcac

SEQ ID NO: 1574979 - RNA, 17 nt, Human adenovirus E
acccgcucucugcucaa

SEQ ID NO: 1574980 - RNA, 18 nt, Human adenovirus E
ucggcgcuguccggccgc

SEQ ID NO: 1574981 - RNA, 23 nt, Human adenovirus E
acgaaggcgcgcaggccggagcu

SEQ ID NO: 1574982 - RNA, 15 nt, Human adenovirus E
gaugccgggcaggag

SEQ ID NO: 1574983 - RNA, 18 nt, Human adenovirus E
cccgguuccacgcggggc

SEQ ID NO: 1574984 - RNA, 23 nt, Human adenovirus E
gcuggaggccaucgugcagaacc

SEQ ID NO: 1574985 - RNA, 16 nt, Human adenovirus E
caugcggggggagaug

SEQ ID NO: 1574986 - RNA, 18 nt, Human adenovirus E
gccagcuccuccucggcc

SEQ ID NO: 1574987 - RNA, 15 nt, Human adenovirus E
ccuccgggcacuccc

SEQ ID NO: 1574988 - RNA, 17 nt, Human adenovirus E
cgcggucauggaccagg

SEQ ID NO: 1574989 - RNA, 13 nt, Human adenovirus E
ccuucgccuccua

SEQ ID NO: 1574990 - RNA, 18 nt, Human adenovirus E
ucgacgccaucagcgagu

SEQ ID NO: 1574991 - RNA, 23 nt, Human adenovirus E
gcacguggccgcggccaaccugg

SEQ ID NO: 1574992 - RNA, 17 nt, Human adenovirus E
cagacccagccagauga

SEQ ID NO: 1574993 - RNA, 13 nt, Human adenovirus E
cggcacucuccag

SEQ ID NO: 1574994 - RNA, 17 nt, Human adenovirus E
cagaucuagggccucag

SEQ ID NO: 1574995 - RNA, 16 nt, Human adenovirus E
cggccuugcgcaggga

SEQ ID NO: 1574996 - RNA, 13 nt, Human adenovirus E
gguguccagcugg

SEQ ID NO: 1574997 - RNA, 16 nt, Human adenovirus E
acaaagccucagcguc

SEQ ID NO: 1574998 - RNA, 14 nt, Human adenovirus E
agguggacgaggag

SEQ ID NO: 1574999 - RNA, 15 nt, Human adenovirus E
aucucuccucgcuuu

SEQ ID NO: 1575000 - RNA, 24 nt, Human adenovirus E
gcagcaguauccggggaguccagc

SEQ ID NO: 1575001 - RNA, 22 nt, Human adenovirus E
caggcgcacgggacgcagggcc

SEQ ID NO: 1575002 - RNA, 21 nt, Human adenovirus E
ccugugucgucaccgccccgc

SEQ ID NO: 1575003 - RNA, 14 nt, Human adenovirus E
ccuggccaccuacc

SEQ ID NO: 1575004 - RNA, 19 nt, Human adenovirus E
gcaccuucgaguugcaagg

SEQ ID NO: 1575005 - RNA, 13 nt, Human adenovirus E
cggcaccaccgug

SEQ ID NO: 1575006 - RNA, 22 nt, Human adenovirus E
uggagcuaccagccccagaugg

SEQ ID NO: 1575007 - RNA, 16 nt, Human adenovirus E
cgaggcccuggccacc

SEQ ID NO: 1575008 - RNA, 13 nt, Human adenovirus E
cccggaugcaggg

SEQ ID NO: 1575009 - RNA, 21 nt, Human adenovirus E
cggggaguccagcgcgugacc

SEQ ID NO: 1575010 - RNA, 14 nt, Human adenovirus E
cuaacucuuauacc

SEQ ID NO: 1575011 - RNA, 14 nt, Human adenovirus E
gagccacaccacag

SEQ ID NO: 1575012 - RNA, 17 nt, Human adenovirus E
ccugcccgccaccugcu

SEQ ID NO: 1575013 - RNA, 18 nt, Human adenovirus E
cacccagucauagcaggg

SEQ ID NO: 1575014 - RNA, 17 nt, Human adenovirus E
gucgcagggggccacga

SEQ ID NO: 1575015 - RNA, 21 nt, Human adenovirus E
cagaccgugaaggaggagagc

SEQ ID NO: 1575016 - RNA, 17 nt, Human adenovirus E
caccaagaacagccaga

SEQ ID NO: 1575017 - RNA, 17 nt, Human adenovirus E
cacgaagcccugcagga

SEQ ID NO: 1575018 - RNA, 14 nt, Human adenovirus E
cuucaauuggagca

SEQ ID NO: 1575019 - RNA, 17 nt, Human adenovirus E
gugcugcacaccacccu

SEQ ID NO: 1575020 - RNA, 20 nt, Human adenovirus E
guguugcacaauaucuuuga

SEQ ID NO: 1575021 - RNA, 18 nt, Human adenovirus E
acacgguuuccggggcgg

SEQ ID NO: 1575022 - RNA, 16 nt, Human adenovirus E
ccgccaacgugccccg

SEQ ID NO: 1575023 - RNA, 14 nt, Human adenovirus E
agcagugcucaggu

SEQ ID NO: 1575024 - RNA, 20 nt, Human adenovirus E
gcgcgggaggcagguccaga

SEQ ID NO: 1575025 - RNA, 14 nt, Human adenovirus E
gccgccccucucag

SEQ ID NO: 1575026 - RNA, 18 nt, Human adenovirus E
ucacaccacacacacaga

SEQ ID NO: 1575027 - RNA, 17 nt, Human adenovirus E
cgcgagugccccccgcc

SEQ ID NO: 1575028 - RNA, 18 nt, Human adenovirus E
gcccagguuuuccaugca

SEQ ID NO: 1575029 - RNA, 19 nt, Human adenovirus E
cugggcgagguugagcucc

SEQ ID NO: 1575030 - RNA, 15 nt, Human adenovirus E
cgaguaccuggaaga

SEQ ID NO: 1575031 - RNA, 13 nt, Human adenovirus E
cuacuuccuccuc

SEQ ID NO: 1575032 - RNA, 23 nt, Human adenovirus E
ugcgucucgggacccugccauca

SEQ ID NO: 1575033 - RNA, 22 nt, Human adenovirus E
ggaguauggcaccagacgaugg

SEQ ID NO: 1575034 - RNA, 19 nt, Human adenovirus E
gcagcggccaucgccagca

SEQ ID NO: 1575035 - RNA, 19 nt, Human adenovirus E
cgauucccgaaccccacca

SEQ ID NO: 1575036 - RNA, 20 nt, Human adenovirus E
ggcagaggaggacagccugc

SEQ ID NO: 1575037 - RNA, 23 nt, Human adenovirus E
ggggcccggaugcaggggcggca

SEQ ID NO: 1575038 - RNA, 22 nt, Human adenovirus E
cgccguagaaggcuggcgggga

SEQ ID NO: 1575039 - RNA, 20 nt, Human adenovirus E
gcagcgacgagacucgggcc

SEQ ID NO: 1575040 - RNA, 14 nt, Human adenovirus E
cugccgcccgugga

SEQ ID NO: 1575041 - RNA, 17 nt, Human adenovirus E
ccccaccaugcagcuga

SEQ ID NO: 1575042 - RNA, 19 nt, Human adenovirus E
cacccugcaugccaacccu

SEQ ID NO: 1575043 - RNA, 14 nt, Human adenovirus E
agcauuaccacaca

SEQ ID NO: 1575044 - RNA, 17 nt, Human adenovirus E
gaacgaccacagcaacu

SEQ ID NO: 1575045 - RNA, 14 nt, Human adenovirus E
aggccgugcagcgg

SEQ ID NO: 1575046 - RNA, 21 nt, Human adenovirus E
ucgcaagaggcagcccuucca

SEQ ID NO: 1575047 - RNA, 21 nt, Human adenovirus E
gcguagagcuugggggcgagg

SEQ ID NO: 1575048 - RNA, 20 nt, Human adenovirus E
gaacucaagggucuguggac

SEQ ID NO: 1575049 - RNA, 13 nt, Human adenovirus E
cacucaggcagag

SEQ ID NO: 1575050 - RNA, 18 nt, Human adenovirus E
caaccucgccaucugccc

SEQ ID NO: 1575051 - RNA, 17 nt, Human adenovirus E
cgugaaccugagccagg

SEQ ID NO: 1575052 - RNA, 14 nt, Human adenovirus E
guaggccugggcgg

SEQ ID NO: 1575053 - RNA, 18 nt, Human adenovirus E
gcccagccccgccaccuc

SEQ ID NO: 1575054 - RNA, 15 nt, Human adenovirus E
cuccaguguaagccc

SEQ ID NO: 1575055 - RNA, 20 nt, Human adenovirus E
gccauggcgaccagcgugcg

SEQ ID NO: 1575056 - RNA, 17 nt, Human adenovirus E
cggccauccuggaggcc

SEQ ID NO: 1575057 - RNA, 18 nt, Human adenovirus E
ucagcggcgagggccugc

SEQ ID NO: 1575058 - RNA, 20 nt, Human adenovirus E
ucuacacuaaaaaaauacug

SEQ ID NO: 1575059 - RNA, 14 nt, Human adenovirus E
uccggccgcgaggg

SEQ ID NO: 1575060 - RNA, 19 nt, Human adenovirus E
acggccuuguaggcgcagc

SEQ ID NO: 1575061 - RNA, 20 nt, Human adenovirus E
acugcuaguaccaaugagca

SEQ ID NO: 1575062 - RNA, 19 nt, Human adenovirus E
aaggccgccgccccucuca

SEQ ID NO: 1575063 - RNA, 18 nt, Human adenovirus E
agcacgaggaggagcugg

SEQ ID NO: 1575064 - RNA, 17 nt, Human adenovirus E
caucguaggugaggaag

SEQ ID NO: 1575065 - RNA, 14 nt, Human adenovirus E
uacagcaacaaguu

SEQ ID NO: 1575066 - RNA, 19 nt, Human adenovirus E
ugagcagagucaggcuggg

SEQ ID NO: 1575067 - RNA, 17 nt, Human adenovirus E
ucgagagccacaccaca

SEQ ID NO: 1575068 - RNA, 14 nt, Human adenovirus E
gaggcgcgcgcagu

SEQ ID NO: 1575069 - RNA, 19 nt, Human adenovirus E
ucaggcagaggaggacagc

SEQ ID NO: 1575070 - RNA, 13 nt, Human adenovirus E
gcgagggggcgag

SEQ ID NO: 1575071 - RNA, 15 nt, Human adenovirus E
cuccacccucccagg

SEQ ID NO: 1575072 - RNA, 16 nt, Human adenovirus E
accucccuugcuguuc

SEQ ID NO: 1575073 - RNA, 16 nt, Human adenovirus E
cgcggugcccgaggcc

SEQ ID NO: 1575074 - RNA, 17 nt, Human adenovirus E
aguacggcgcggccagc

SEQ ID NO: 1575075 - RNA, 15 nt, Human adenovirus E
cagaggaggacagcc

SEQ ID NO: 1575076 - RNA, 17 nt, Human adenovirus E
cacgcucgccagcaccg

SEQ ID NO: 1575077 - RNA, 15 nt, Human adenovirus E
uccggcaccgcuucc

SEQ ID NO: 1575078 - RNA, 17 nt, Human adenovirus E
ggggcccggaugcaggg

SEQ ID NO: 1575079 - RNA, 15 nt, Human adenovirus E
ccugccgcugcgcag

SEQ ID NO: 1575080 - RNA, 16 nt, Human adenovirus E
cgagcgcaccaccgcc

SEQ ID NO: 1575081 - RNA, 14 nt, Human adenovirus E
gcagcagugucugg

SEQ ID NO: 1575082 - RNA, 17 nt, Human adenovirus E
gaaccgccuggggcaga

SEQ ID NO: 1575083 - RNA, 16 nt, Human adenovirus E
cagaggaggacagccu

SEQ ID NO: 1575084 - RNA, 17 nt, Human adenovirus E
cggaacaauacucucgc

SEQ ID NO: 1575085 - RNA, 16 nt, Human adenovirus E
cccgguaccacaucac

SEQ ID NO: 1575086 - RNA, 22 nt, Human adenovirus E
aggagggacuugagggcguaga

SEQ ID NO: 1575087 - RNA, 14 nt, Human adenovirus E
ggcugacgcugcgc

SEQ ID NO: 1575088 - RNA, 23 nt, Human adenovirus E
aagcccacggccgccagcuccuc

SEQ ID NO: 1575089 - RNA, 21 nt, Human adenovirus E
uggccaucgugaacgcgcugg

SEQ ID NO: 1575090 - RNA, 14 nt, Human adenovirus E
caucuuccagcaga

SEQ ID NO: 1575091 - RNA, 13 nt, Human adenovirus E
gggcguggggcag

SEQ ID NO: 1575092 - RNA, 22 nt, Human adenovirus E
ccaauugcaagccauccagaaa

SEQ ID NO: 1575093 - RNA, 16 nt, Human adenovirus E
cguuacucggagcugg

SEQ ID NO: 1575094 - RNA, 14 nt, Human adenovirus E
gagauugaccuggg

SEQ ID NO: 1575095 - RNA, 21 nt, Human adenovirus E
aucgcaaucaggcagcaccgg

SEQ ID NO: 1575096 - RNA, 12 nt, Human adenovirus E
cacaagaagaga

SEQ ID NO: 1575097 - RNA, 17 nt, Human adenovirus E
ccacuugaacucgggga

SEQ ID NO: 1575098 - RNA, 17 nt, Human adenovirus E
ccuggcugacguccugc

SEQ ID NO: 1575099 - RNA, 13 nt, Human adenovirus E
cugcucccagagc

SEQ ID NO: 1575100 - RNA, 19 nt, Human adenovirus E
cgcccuuuucaaccugggu

SEQ ID NO: 1575101 - RNA, 15 nt, Human adenovirus E
caaguuucuccacca

SEQ ID NO: 1575102 - RNA, 22 nt, Human adenovirus E
caggcuggagccgcagcuaacg

SEQ ID NO: 1575103 - RNA, 22 nt, Human adenovirus E
guuacaccugcccuggagauga

SEQ ID NO: 1575104 - RNA, 14 nt, Human adenovirus E
gcaggagggggcca

SEQ ID NO: 1575105 - RNA, 14 nt, Human adenovirus E
cggcgcggccagcc

SEQ ID NO: 1575106 - RNA, 15 nt, Human adenovirus E
ucgcgcacggccagc

SEQ ID NO: 1575107 - RNA, 19 nt, Human adenovirus E
cuaccagccccagaugggc

SEQ ID NO: 1575108 - RNA, 16 nt, Human adenovirus E
gccaucgugcagaacc

SEQ ID NO: 1575109 - RNA, 12 nt, Human adenovirus E
gcuaccagcccc

SEQ ID NO: 1575110 - RNA, 23 nt, Human adenovirus E
cucggccauccuggaggccgugg

SEQ ID NO: 1575111 - RNA, 14 nt, Human adenovirus E
aagcaacugcagcc

SEQ ID NO: 1575112 - RNA, 19 nt, Human adenovirus E
auuuggaggaagacuggga

SEQ ID NO: 1575113 - RNA, 17 nt, Human adenovirus E
gcauucuuaagcacacc

SEQ ID NO: 1575114 - RNA, 16 nt, Human adenovirus E
uacccuucucccaggc

SEQ ID NO: 1575115 - RNA, 21 nt, Human adenovirus E
ccagaguuuggaagagcggcg

SEQ ID NO: 1575116 - RNA, 19 nt, Human adenovirus E
auccgcagcagcgagcugg

SEQ ID NO: 1575117 - RNA, 15 nt, Human adenovirus E
cggccauccuggagg

SEQ ID NO: 1575118 - RNA, 21 nt, Human adenovirus E
cagcggcauugucggugugcu

SEQ ID NO: 1575119 - RNA, 16 nt, Human adenovirus E
accccaccaugcagcu

SEQ ID NO: 1575120 - RNA, 19 nt, Human adenovirus E
gacggccuuguaggcgcag

SEQ ID NO: 1575121 - RNA, 19 nt, Human adenovirus E
acagcacucaggcagagga

SEQ ID NO: 1575122 - RNA, 12 nt, Human adenovirus E
gaauacaccccc

SEQ ID NO: 1575123 - RNA, 23 nt, Human adenovirus E
cccugccaucacaccuuccaccu

SEQ ID NO: 1575124 - RNA, 15 nt, Human adenovirus E
uggaggaagacgagg

SEQ ID NO: 1575125 - RNA, 17 nt, Human adenovirus E
guccggguccagggacu

SEQ ID NO: 1575126 - RNA, 20 nt, Human adenovirus E
ggcagcagguggacugagga

SEQ ID NO: 1575127 - RNA, 14 nt, Human adenovirus E
gucucuucagaugg

SEQ ID NO: 1575128 - RNA, 20 nt, Human adenovirus E
uaccgcccagaucccgccug

SEQ ID NO: 1575129 - RNA, 15 nt, Human adenovirus E
uccagcaccaggcag

SEQ ID NO: 1575130 - RNA, 14 nt, Human adenovirus E
agccagaugaugca

SEQ ID NO: 1575131 - RNA, 13 nt, Human adenovirus E
gcccccgccccag

SEQ ID NO: 1575132 - RNA, 20 nt, Human adenovirus E
ccacccccagcgccgcgcuc

SEQ ID NO: 1575133 - RNA, 12 nt, Human adenovirus E
cacgcgcccgcg

SEQ ID NO: 1575134 - RNA, 14 nt, Human adenovirus E
gcggcgcugcagag

SEQ ID NO: 1575135 - RNA, 15 nt, Human adenovirus E
gccagaucguccagg

SEQ ID NO: 1575136 - RNA, 20 nt, Human adenovirus E
aaugugguagucaaauacug

SEQ ID NO: 1575137 - RNA, 14 nt, Human adenovirus E
uaaauuuuugcuuu

SEQ ID NO: 1575138 - RNA, 17 nt, Human adenovirus E
uggacaagaugagccgc

SEQ ID NO: 1575139 - RNA, 17 nt, Human adenovirus E
agucauaaucaucugca

SEQ ID NO: 1575140 - RNA, 21 nt, Human adenovirus E
acagcagucaggcagaggagg

SEQ ID NO: 1575141 - RNA, 22 nt, Human adenovirus E
cuugcugcuauagaaggcuuua

SEQ ID NO: 1575142 - RNA, 22 nt, Human adenovirus E
acgcgcccgcgcuugcugggcg

SEQ ID NO: 1575143 - RNA, 17 nt, Human adenovirus E
accugaaagagcucugc

SEQ ID NO: 1575144 - RNA, 22 nt, Human adenovirus E
acagcucgugcgagggggcgag

SEQ ID NO: 1575145 - RNA, 14 nt, Human adenovirus E
cuccggcaccgcuu

SEQ ID NO: 1575146 - RNA, 16 nt, Human adenovirus E
ucaucugcauguucau

SEQ ID NO: 1575147 - RNA, 14 nt, Human adenovirus E
gacgagcgcucgcg

SEQ ID NO: 1575148 - RNA, 23 nt, Human adenovirus E
gcacgcggccguucaugggcacc

SEQ ID NO: 1575149 - RNA, 15 nt, Human adenovirus E
gccacaccacagcua

SEQ ID NO: 1575150 - RNA, 13 nt, Human adenovirus E
ccgcgcuccugga

SEQ ID NO: 1575151 - RNA, 17 nt, Human adenovirus E
cagaaccccaccagcaa

SEQ ID NO: 1575152 - RNA, 16 nt, Human adenovirus E
gagcuccagcuccagu

SEQ ID NO: 1575153 - RNA, 16 nt, Human adenovirus E
gaagaugccgggcagg

SEQ ID NO: 1575154 - RNA, 15 nt, Human adenovirus E
cggauggcuggcaga

SEQ ID NO: 1575155 - RNA, 19 nt, Human adenovirus E
gcagccacagcgcgcaccc

SEQ ID NO: 1575156 - RNA, 13 nt, Human adenovirus E
ggcacagcacagg

SEQ ID NO: 1575157 - RNA, 18 nt, Human adenovirus E
caccucgcuuacgcacgu

SEQ ID NO: 1575158 - RNA, 19 nt, Human adenovirus E
gcugcgcaacggccugccc

SEQ ID NO: 1575159 - RNA, 14 nt, Human adenovirus E
gcccggcaggccac

SEQ ID NO: 1575160 - RNA, 16 nt, Human adenovirus E
gcccggcgcgacuaca

SEQ ID NO: 1575161 - RNA, 22 nt, Human adenovirus E
gagcccgugcugcucgagcgcc

SEQ ID NO: 1575162 - RNA, 15 nt, Human adenovirus E
cauacaaagccucag

SEQ ID NO: 1575163 - RNA, 21 nt, Human adenovirus E
gggagggggccugcgucgccg

SEQ ID NO: 1575164 - RNA, 15 nt, Human adenovirus E
gugcagaccaaccug

SEQ ID NO: 1575165 - RNA, 21 nt, Human adenovirus E
ugccgcuguccgagaagcugg

SEQ ID NO: 1575166 - RNA, 16 nt, Human adenovirus E
gacggguuccuguggg

SEQ ID NO: 1575167 - RNA, 15 nt, Human adenovirus E
ucagcaucaucuggg

SEQ ID NO: 1575168 - RNA, 21 nt, Human adenovirus E
guggccagaucguccagggca

SEQ ID NO: 1575169 - RNA, 17 nt, Human adenovirus E
ccucgacccccagaccg

SEQ ID NO: 1575170 - RNA, 14 nt, Human adenovirus E
gacccgagcgggag

SEQ ID NO: 1575171 - RNA, 22 nt, Human adenovirus E
auucuacacuaaaaaaauacug

SEQ ID NO: 1575172 - RNA, 14 nt, Human adenovirus E
gcaucugcaccuca

SEQ ID NO: 1575173 - RNA, 20 nt, Human adenovirus E
ucgcgcaccaguuccgccag

SEQ ID NO: 1575174 - RNA, 14 nt, Human adenovirus E
ccccggggccagga

SEQ ID NO: 1575175 - RNA, 22 nt, Human adenovirus E
cgcccugcgcgucggccaggua

SEQ ID NO: 1575176 - RNA, 19 nt, Human adenovirus E
cccaucuccgaggacgagg

SEQ ID NO: 1575177 - RNA, 14 nt, Human adenovirus E
uccacuuccucuuc

SEQ ID NO: 1575178 - RNA, 15 nt, Human adenovirus E
accccacgccgagcc

SEQ ID NO: 1575179 - RNA, 14 nt, Human adenovirus E
gcggggggagauga

SEQ ID NO: 1575180 - RNA, 17 nt, Human adenovirus E
gccggggcagcgccgcc

SEQ ID NO: 1575181 - RNA, 23 nt, Human adenovirus E
cgcagcuugcccucggccucggu

SEQ ID NO: 1575182 - RNA, 22 nt, Human adenovirus E
uggccagaucguccagggcagc

SEQ ID NO: 1575183 - RNA, 18 nt, Human adenovirus E
uccaagauauucugcucc

SEQ ID NO: 1575184 - RNA, 17 nt, Human adenovirus E
cggcggcgaugcagccc

SEQ ID NO: 1575185 - RNA, 21 nt, Human adenovirus E
ggccugcgcgcgcccagcaag

SEQ ID NO: 1575186 - RNA, 17 nt, Human adenovirus E
gcagaaaaccagcagcu

SEQ ID NO: 1575187 - RNA, 17 nt, Human adenovirus E
gcagggccaggcgcacg

SEQ ID NO: 1575188 - RNA, 18 nt, Human adenovirus E
guaaacgccgguggcacg

SEQ ID NO: 1575189 - RNA, 13 nt, Human adenovirus E
cuucccccaggau

SEQ ID NO: 1575190 - RNA, 22 nt, Human adenovirus E
cagcggcuugaguccgucggcc

SEQ ID NO: 1575191 - RNA, 16 nt, Human adenovirus E
ccgcgccgcagugggc

SEQ ID NO: 1575192 - RNA, 19 nt, Human adenovirus E
uagucgagggucuccugga

SEQ ID NO: 1575193 - RNA, 23 nt, Human adenovirus E
auccuggaggccguggugcccuc

SEQ ID NO: 1575194 - RNA, 22 nt, Human adenovirus E
ccacuuccucuucuuccuccuc

SEQ ID NO: 1575195 - RNA, 22 nt, Human adenovirus E
gggaagaucacccuagugagcu

SEQ ID NO: 1575196 - RNA, 22 nt, Human adenovirus E
agaguuuggaagagcggcgcaa

SEQ ID NO: 1575197 - RNA, 13 nt, Human adenovirus E
gguccgguccuuc

SEQ ID NO: 1575198 - RNA, 14 nt, Human adenovirus E
caucggcaccagcc

SEQ ID NO: 1575199 - RNA, 11 nt, Human adenovirus E
gagagccacac

SEQ ID NO: 1575200 - RNA, 12 nt, Human adenovirus E
ccucgcagcccc

SEQ ID NO: 1575201 - RNA, 16 nt, Human adenovirus E
ccgcagcaguggcagc

SEQ ID NO: 1575202 - RNA, 19 nt, Human adenovirus E
ugcgguggugaaggaggaa

SEQ ID NO: 1575203 - RNA, 13 nt, Human adenovirus E
uucuccggcuccc

SEQ ID NO: 1575204 - RNA, 16 nt, Human adenovirus E
ccaccacccccaguac

SEQ ID NO: 1575205 - RNA, 16 nt, Human adenovirus E
accaccacuacagccu

SEQ ID NO: 1575206 - RNA, 22 nt, Human adenovirus E
acccgguggaucuuuuccagga

SEQ ID NO: 1575207 - RNA, 17 nt, Human adenovirus E
cacacagacaacccaca

SEQ ID NO: 1575208 - RNA, 15 nt, Human adenovirus E
cgugccccagggcau

SEQ ID NO: 1575209 - RNA, 14 nt, Human adenovirus E
cgcaagaccaccac

SEQ ID NO: 1575210 - RNA, 17 nt, Human adenovirus E
ugagacccggcaccacc

SEQ ID NO: 1575211 - RNA, 13 nt, Human adenovirus E
ugccccagagcga

SEQ ID NO: 1575212 - RNA, 22 nt, Human adenovirus E
agguggaagaagcagccgccgc

SEQ ID NO: 1575213 - RNA, 16 nt, Human adenovirus E
aucacaccuuccaccu

SEQ ID NO: 1575214 - RNA, 16 nt, Human adenovirus E
augcagcugauggugc

SEQ ID NO: 1575215 - RNA, 22 nt, Human adenovirus E
ggggaucagcaguuugggcagc

SEQ ID NO: 1575216 - RNA, 23 nt, Human adenovirus E
ggacggcccuugacguggggcag

SEQ ID NO: 1575217 - RNA, 13 nt, Human adenovirus E
ggcgggcggcgcc

SEQ ID NO: 1575218 - RNA, 16 nt, Human adenovirus E
gcagugucuggaggag

SEQ ID NO: 1575219 - RNA, 13 nt, Human adenovirus E
gcuccucccucag

SEQ ID NO: 1575220 - RNA, 13 nt, Human adenovirus E
gucaggcugggcu

SEQ ID NO: 1575221 - RNA, 23 nt, Human adenovirus E
cagaccgugaaccugagccaggc

SEQ ID NO: 1575222 - RNA, 16 nt, Human adenovirus E
ucagcgccccgcaucc

SEQ ID NO: 1575223 - RNA, 19 nt, Human adenovirus E
cacgaggaggagcuggcag

SEQ ID NO: 1575224 - RNA, 23 nt, Human adenovirus E
cccaggacauggaauacaccacc

SEQ ID NO: 1575225 - RNA, 13 nt, Human adenovirus E
ccaaaaaucagac

SEQ ID NO: 1575226 - RNA, 13 nt, Human adenovirus E
gcagcagcacaca

SEQ ID NO: 1575227 - RNA, 22 nt, Human adenovirus E
agagacagcugccguccucccg

SEQ ID NO: 1575228 - RNA, 18 nt, Human adenovirus E
accuggaagccacccuga

SEQ ID NO: 1575229 - RNA, 15 nt, Human adenovirus E
augcaagagauggag

SEQ ID NO: 1575230 - RNA, 18 nt, Human adenovirus E
accacgugcgcacccuga

SEQ ID NO: 1575231 - RNA, 17 nt, Human adenovirus E
cucgcagcagcugcgcg

SEQ ID NO: 1575232 - RNA, 22 nt, Human adenovirus E
acuccaccuccacccaccacaa

SEQ ID NO: 1575233 - RNA, 18 nt, Human adenovirus E
gccguccucccggaggag

SEQ ID NO: 1575234 - RNA, 20 nt, Human adenovirus E
ccuggcgccuacggaggggc

SEQ ID NO: 1575235 - RNA, 20 nt, Human adenovirus E
cucggacgauuggacccagg

SEQ ID NO: 1575236 - RNA, 16 nt, Human adenovirus E
cggucaacuccuccuc

SEQ ID NO: 1575237 - RNA, 22 nt, Human adenovirus E
uccugguucaccugcagcagau

SEQ ID NO: 1575238 - RNA, 20 nt, Human adenovirus E
gggcggccuugcgcagggag

SEQ ID NO: 1575239 - RNA, 17 nt, Human adenovirus E
gcccuugcgcgagcaga

SEQ ID NO: 1575240 - RNA, 17 nt, Human adenovirus E
auccacggccagggcgg

SEQ ID NO: 1575241 - RNA, 18 nt, Human adenovirus E
gcuguuccugguggugca

SEQ ID NO: 1575242 - RNA, 14 nt, Human adenovirus E
caaggagaaggagg

SEQ ID NO: 1575243 - RNA, 14 nt, Human adenovirus E
cgcccugcgccuga

SEQ ID NO: 1575244 - RNA, 23 nt, Human adenovirus E
ucuccugccaccaauuggaggaa

SEQ ID NO: 1575245 - RNA, 16 nt, Human adenovirus E
ucgcgcacggccagcg

SEQ ID NO: 1575246 - RNA, 14 nt, Human adenovirus E
ucuaccucugccac

SEQ ID NO: 1575247 - RNA, 19 nt, Human adenovirus E
ggugaaggggugcgcgccg

SEQ ID NO: 1575248 - RNA, 14 nt, Human adenovirus E
cggcggccugggca

SEQ ID NO: 1575249 - RNA, 19 nt, Human adenovirus E
gcaucguggugcaggagcg

SEQ ID NO: 1575250 - RNA, 20 nt, Human adenovirus E
aaccgccccgccgcccagcc

SEQ ID NO: 1575251 - RNA, 18 nt, Human adenovirus E
ugcagaccaaccuggacc

SEQ ID NO: 1575252 - RNA, 18 nt, Human adenovirus E
caggcggucccagagcuc

SEQ ID NO: 1575253 - RNA, 15 nt, Human adenovirus E
cugccacaccuggca

SEQ ID NO: 1575254 - RNA, 18 nt, Human adenovirus E
gaggaagacugggacagc

SEQ ID NO: 1575255 - RNA, 16 nt, Human adenovirus E
cuuucauauccucucc

SEQ ID NO: 1575256 - RNA, 16 nt, Human adenovirus E
guugcgcagggccagg

SEQ ID NO: 1575257 - RNA, 18 nt, Human adenovirus E
ucgcagaaaaugaugcaa

SEQ ID NO: 1575258 - RNA, 22 nt, Human adenovirus E
caggguaucgcaaucaggcagc

SEQ ID NO: 1575259 - RNA, 12 nt, Human adenovirus E
ccucagcaauaa

SEQ ID NO: 1575260 - RNA, 21 nt, Human adenovirus E
cagggcaauccucgcacagaa

SEQ ID NO: 1575261 - RNA, 22 nt, Human adenovirus E
ccuguucagagacaggagcggc

SEQ ID NO: 1575262 - RNA, 20 nt, Human adenovirus E
gcuucacgcucgccagcacc

SEQ ID NO: 1575263 - RNA, 13 nt, Human adenovirus E
cuaccgucaccuc

SEQ ID NO: 1575264 - RNA, 13 nt, Human adenovirus E
ccggggaguccag

SEQ ID NO: 1575265 - RNA, 15 nt, Human adenovirus E
cacgcccagcacacg

SEQ ID NO: 1575266 - RNA, 18 nt, Human adenovirus E
uaccagaacgaccacagc

SEQ ID NO: 1575267 - RNA, 16 nt, Human adenovirus E
agcgccacugagacac

SEQ ID NO: 1575268 - RNA, 16 nt, Human adenovirus E
ucucgcucgccacauc

SEQ ID NO: 1575269 - RNA, 17 nt, Human adenovirus E
cccgcgaugcgggcggc

SEQ ID NO: 1575270 - RNA, 19 nt, Human adenovirus E
uacgcccgcgccaagagcc

SEQ ID NO: 1575271 - RNA, 13 nt, Human adenovirus E
acagcagccccag

SEQ ID NO: 1575272 - RNA, 22 nt, Human adenovirus E
uggcgauguuaccgcccagauc

SEQ ID NO: 1575273 - RNA, 21 nt, Human adenovirus E
agcgcucgcgguggggcggcc

SEQ ID NO: 1575274 - RNA, 19 nt, Human adenovirus E
cagggacucccucagcaug

SEQ ID NO: 1575275 - RNA, 12 nt, Human adenovirus E
caggccagcacg

SEQ ID NO: 1575276 - RNA, 18 nt, Human adenovirus E
caucccguacugcggcag

SEQ ID NO: 1575277 - RNA, 14 nt, Human adenovirus E
aaucuucucuucuc

SEQ ID NO: 1575278 - RNA, 20 nt, Human adenovirus E
ugguguacuaugccuucugc

SEQ ID NO: 1575279 - RNA, 21 nt, Human adenovirus E
guuuccacaucguaggugagg

SEQ ID NO: 1575280 - RNA, 18 nt, Human adenovirus E
aagacagucuggaggaag

SEQ ID NO: 1575281 - RNA, 14 nt, Human adenovirus E
ggccacgagccggg

SEQ ID NO: 1575282 - RNA, 18 nt, Human adenovirus E
cggugccgcccaggacua

SEQ ID NO: 1575283 - RNA, 22 nt, Human adenovirus E
cccguccucuucccacuccccu

SEQ ID NO: 1575284 - RNA, 21 nt, Human adenovirus E
cagaggcgcucuaucucccgc

SEQ ID NO: 1575285 - RNA, 15 nt, Human adenovirus E
cauagcaaccaacau

SEQ ID NO: 1575286 - RNA, 13 nt, Human adenovirus E
gggucccggccgg

SEQ ID NO: 1575287 - RNA, 14 nt, Human adenovirus E
gaucucgcucaggu

SEQ ID NO: 1575288 - RNA, 15 nt, Human adenovirus E
cuggggcgacggggg

SEQ ID NO: 1575289 - RNA, 16 nt, Human adenovirus E
ucgugguauugcuauu

SEQ ID NO: 1575290 - RNA, 16 nt, Human adenovirus E
gcuggcagagccccuu

SEQ ID NO: 1575291 - RNA, 17 nt, Human adenovirus E
uggagcgcguggcccgc

SEQ ID NO: 1575292 - RNA, 17 nt, Human adenovirus E
cucggacuucgugccgc

SEQ ID NO: 1575293 - RNA, 16 nt, Human adenovirus E
ggagaucuuccuucac

SEQ ID NO: 1575294 - RNA, 19 nt, Human adenovirus E
gacaggagcggcgaggagc

SEQ ID NO: 1575295 - RNA, 20 nt, Human adenovirus E
ggcagcagugucuggaggag

SEQ ID NO: 1575296 - RNA, 14 nt, Human adenovirus E
cggcggcgaugcag

SEQ ID NO: 1575297 - RNA, 15 nt, Human adenovirus E
aggcaccgcagcuug

SEQ ID NO: 1575298 - RNA, 16 nt, Human adenovirus E
gcaccugugggaccug

SEQ ID NO: 1575299 - RNA, 20 nt, Human adenovirus E
cggcuucgacaccuggacca

SEQ ID NO: 1575300 - RNA, 16 nt, Human adenovirus E
acgagaagcagcagca

SEQ ID NO: 1575301 - RNA, 18 nt, Human adenovirus E
ccgggugauccuccacca

SEQ ID NO: 1575302 - RNA, 12 nt, Human adenovirus E
gcgcgcccagca

SEQ ID NO: 1575303 - RNA, 18 nt, Human adenovirus E
uuaagaaaaucaacaaaa

SEQ ID NO: 1575304 - RNA, 20 nt, Human adenovirus E
cccggaugcaggggcggcag

SEQ ID NO: 1575305 - RNA, 12 nt, Human adenovirus E
ugcaccuguggg

SEQ ID NO: 1575306 - RNA, 17 nt, Human adenovirus E
ccgcaacaacagccccc

SEQ ID NO: 1575307 - RNA, 18 nt, Human adenovirus E
agacgccgcaccugcccc

SEQ ID NO: 1575308 - RNA, 22 nt, Human adenovirus E
gggccugcucgagugccacugc

SEQ ID NO: 1575309 - RNA, 21 nt, Human adenovirus E
ucuaaccggcggagaugacug

SEQ ID NO: 1575310 - RNA, 16 nt, Human adenovirus E
ugcucuauacgggcaa

SEQ ID NO: 1575311 - RNA, 16 nt, Human adenovirus E
acucaggcagaggagg

SEQ ID NO: 1575312 - RNA, 15 nt, Human adenovirus E
gcacagcacaggcau

SEQ ID NO: 1575313 - RNA, 21 nt, Human adenovirus E
gggcggccgccaugaacucug

SEQ ID NO: 1575314 - RNA, 12 nt, Human adenovirus E
gacccaggccau

SEQ ID NO: 1575315 - RNA, 18 nt, Human adenovirus E
aaguccuggcgggggcac

SEQ ID NO: 1575316 - RNA, 15 nt, Human adenovirus E
cacccgcgcgugcag

SEQ ID NO: 1575317 - RNA, 12 nt, Human adenovirus E
cugacccacugg

SEQ ID NO: 1575318 - RNA, 21 nt, Human adenovirus E
gcggcucgacuccguggccug

SEQ ID NO: 1575319 - RNA, 11 nt, Human adenovirus E
guugcagaggc

SEQ ID NO: 1575320 - RNA, 14 nt, Human adenovirus E
gacggaucccugga

SEQ ID NO: 1575321 - RNA, 13 nt, Human adenovirus E
aaaccagcagcua

SEQ ID NO: 1575322 - RNA, 17 nt, Human adenovirus E
cgugcaacacagaacca

SEQ ID NO: 1575323 - RNA, 15 nt, Human adenovirus E
agcagucccacugcu

SEQ ID NO: 1575324 - RNA, 18 nt, Human adenovirus E
uacuaacaaccaaacuaa

SEQ ID NO: 1575325 - RNA, 15 nt, Human adenovirus E
cccaauugcaagcca

SEQ ID NO: 1575326 - RNA, 23 nt, Human adenovirus E
gccacggcggcggcagcggccau

SEQ ID NO: 1575327 - RNA, 13 nt, Human adenovirus E
uggggcggccagc

SEQ ID NO: 1575328 - RNA, 11 nt, Human adenovirus E
ccgcuguggag

SEQ ID NO: 1575329 - RNA, 16 nt, Human adenovirus E
cuucccaccccacucu

SEQ ID NO: 1575330 - RNA, 13 nt, Human adenovirus E
cuuccagcaaagc

SEQ ID NO: 1575331 - RNA, 23 nt, Human adenovirus E
gccugggcggccuugcgcaggga

SEQ ID NO: 1575332 - RNA, 14 nt, Human adenovirus E
uccgcuccacgcgu

SEQ ID NO: 1575333 - RNA, 18 nt, Human adenovirus E
acguggccgcggccaacc

SEQ ID NO: 1575334 - RNA, 18 nt, Human adenovirus E
cuggaugccaucggcucc

SEQ ID NO: 1575335 - RNA, 15 nt, Human adenovirus E
ucguuguuggccagc

SEQ ID NO: 1575336 - RNA, 22 nt, Human adenovirus E
gccgaucccugcuugcauuuca

SEQ ID NO: 1575337 - RNA, 23 nt, Human adenovirus E
ucacagaucugcaucucccaggc

SEQ ID NO: 1575338 - RNA, 15 nt, Human adenovirus E
cuucccauggugggc

SEQ ID NO: 1575339 - RNA, 21 nt, Human adenovirus E
cacacauugaaagguccagaa

SEQ ID NO: 1575340 - RNA, 19 nt, Human adenovirus E
gacgcugcgcaacggccug

SEQ ID NO: 1575341 - RNA, 18 nt, Human adenovirus E
gcuggagcgcguggcccg

SEQ ID NO: 1575342 - RNA, 17 nt, Human adenovirus E
accuucuuccaguucau

SEQ ID NO: 1575343 - RNA, 18 nt, Human adenovirus E
auugucggugugcuuucg

SEQ ID NO: 1575344 - RNA, 22 nt, Human adenovirus E
cagcagcugaagcaacugcagc

SEQ ID NO: 1575345 - RNA, 15 nt, Human adenovirus E
uccacggccagggcg

SEQ ID NO: 1575346 - RNA, 19 nt, Human adenovirus E
cgggggagaugagcugggc

SEQ ID NO: 1575347 - RNA, 16 nt, Human adenovirus E
uccaagacaguucauu

SEQ ID NO: 1575348 - RNA, 15 nt, Human adenovirus E
cugacacaccaccac

SEQ ID NO: 1575349 - RNA, 24 nt, Human adenovirus E
gucccaugguggcgcagcugaccu

SEQ ID NO: 1575350 - RNA, 23 nt, Human adenovirus E
caggguauaaagcggcuggugau

SEQ ID NO: 1575351 - RNA, 20 nt, Human adenovirus E
aggguucucuaauuccucaa

SEQ ID NO: 1575352 - RNA, 17 nt, Human adenovirus E
cagaaaaagccacagaa

SEQ ID NO: 1575353 - RNA, 12 nt, Human adenovirus E
uuucccacccuc

SEQ ID NO: 1575354 - RNA, 23 nt, Human adenovirus E
cgggcacucccgcaucugcaccu

SEQ ID NO: 1575355 - RNA, 15 nt, Human adenovirus E
ccggagcagcuggga

SEQ ID NO: 1575356 - RNA, 16 nt, Human adenovirus E
cccaucaucgccgcgg

SEQ ID NO: 1575357 - RNA, 20 nt, Human adenovirus E
ggggccacgagccggggcag

SEQ ID NO: 1575358 - RNA, 14 nt, Human adenovirus E
gggcgucgucgccg

SEQ ID NO: 1575359 - RNA, 23 nt, Human adenovirus E
caaggccauccgcggcgacgagg

SEQ ID NO: 1575360 - RNA, 15 nt, Human adenovirus E
cgucaucgacagcgu

SEQ ID NO: 1575361 - RNA, 16 nt, Human adenovirus E
cagagcaucguggugc

SEQ ID NO: 1575362 - RNA, 13 nt, Human adenovirus E
gguguugcuuucg

SEQ ID NO: 1575363 - RNA, 16 nt, Human adenovirus E
gcaccaacgugcagac

SEQ ID NO: 1575364 - RNA, 22 nt, Human adenovirus E
acguggccgucguaccagaucc

SEQ ID NO: 1575365 - RNA, 18 nt, Human adenovirus E
aggcgcgcaggccggagc

SEQ ID NO: 1575366 - RNA, 20 nt, Human adenovirus E
guggcagcagugucuggagg

SEQ ID NO: 1575367 - RNA, 21 nt, Human adenovirus E
cgcgcucgaaggcccccggga

SEQ ID NO: 1575368 - RNA, 17 nt, Human adenovirus E
uugaucuccaccgcgcc

SEQ ID NO: 1575369 - RNA, 12 nt, Human adenovirus E
accccacccagu

SEQ ID NO: 1575370 - RNA, 24 nt, Human adenovirus E
gcacguggacgagcagaccuacca

SEQ ID NO: 1575371 - RNA, 17 nt, Human adenovirus E
agcaccgggugauccuc

SEQ ID NO: 1575372 - RNA, 16 nt, Human adenovirus E
caugcaucccagcugg

SEQ ID NO: 1575373 - RNA, 17 nt, Human adenovirus E
accuggcuguuccaggg

SEQ ID NO: 1575374 - RNA, 16 nt, Human adenovirus E
gggucccgcucgacca

SEQ ID NO: 1575375 - RNA, 22 nt, Human adenovirus E
gggcaacaucuccuucacccgg

SEQ ID NO: 1575376 - RNA, 17 nt, Human adenovirus E
ggcggcgcacgggcaga

SEQ ID NO: 1575377 - RNA, 19 nt, Human adenovirus E
gggaccugcuggaggccau

SEQ ID NO: 1575378 - RNA, 14 nt, Human adenovirus E
caucugcauguuca

SEQ ID NO: 1575379 - RNA, 19 nt, Human adenovirus E
uacucuuucauauccucuc

SEQ ID NO: 1575380 - RNA, 20 nt, Human adenovirus E
guccccagaguuuggaagag

SEQ ID NO: 1575381 - RNA, 22 nt, Human adenovirus E
gugacgcaguagaaggugcggg

SEQ ID NO: 1575382 - RNA, 24 nt, Human adenovirus E
cuccggcucccccggccacuaccc

SEQ ID NO: 1575383 - RNA, 23 nt, Human adenovirus E
ggaauggcuguugaugugaugga

SEQ ID NO: 1575384 - RNA, 18 nt, Human adenovirus E
agcccgccaacgugcccc

SEQ ID NO: 1575385 - RNA, 14 nt, Human adenovirus E
gagacgaugggcag

SEQ ID NO: 1575386 - RNA, 19 nt, Human adenovirus E
ccucaaaggccgcgugcgg

SEQ ID NO: 1575387 - RNA, 15 nt, Human adenovirus E
gcuaccugcucuucc

SEQ ID NO: 1575388 - RNA, 16 nt, Human adenovirus E
cagaucguccagggca

SEQ ID NO: 1575389 - RNA, 17 nt, Human adenovirus E
cgcgagacgcccaggcc

SEQ ID NO: 1575390 - RNA, 18 nt, Human adenovirus E
cgucaagcugcugcucag

SEQ ID NO: 1575391 - RNA, 19 nt, Human adenovirus E
cgugggcggcggccugggc

SEQ ID NO: 1575392 - RNA, 17 nt, Human adenovirus E
cuccgucaagcugcugc

SEQ ID NO: 1575393 - RNA, 21 nt, Human adenovirus E
gcgaucccauuugagcuggag

SEQ ID NO: 1575394 - RNA, 18 nt, Human adenovirus E
ugccaacccuucccaccc

SEQ ID NO: 1575395 - RNA, 14 nt, Human adenovirus E
ucuccgcuccgggu

SEQ ID NO: 1575396 - RNA, 16 nt, Human adenovirus E
gaacucuucgcggucc

SEQ ID NO: 1575397 - RNA, 13 nt, Human adenovirus E
aggaggagcuggc

SEQ ID NO: 1575398 - RNA, 14 nt, Human adenovirus E
ggacagcacucagg

SEQ ID NO: 1575399 - RNA, 14 nt, Human adenovirus E
acggucauguggau

SEQ ID NO: 1575400 - RNA, 12 nt, Human adenovirus E
gcaucccagcug

SEQ ID NO: 1575401 - RNA, 16 nt, Human adenovirus E
uggcacgacaggcagc

SEQ ID NO: 1575402 - RNA, 20 nt, Human adenovirus E
ccuggggcagaacgugcugc

SEQ ID NO: 1575403 - RNA, 19 nt, Human adenovirus E
cggcgagggccugcucgag

SEQ ID NO: 1575404 - RNA, 18 nt, Human adenovirus E
gccgguauacaagcccau

SEQ ID NO: 1575405 - RNA, 23 nt, Human adenovirus E
gucagcgacgagcagcuggcccg

SEQ ID NO: 1575406 - RNA, 18 nt, Human adenovirus E
cuccgaggagggcaagcc

SEQ ID NO: 1575407 - RNA, 15 nt, Human adenovirus E
accggggccgggacc

SEQ ID NO: 1575408 - RNA, 18 nt, Human adenovirus E
cguggucuucuccaucgc

SEQ ID NO: 1575409 - RNA, 20 nt, Human adenovirus E
ggugaacauucugcagagca

SEQ ID NO: 1575410 - RNA, 12 nt, Human adenovirus E
cucccaggacau

SEQ ID NO: 1575411 - RNA, 14 nt, Human adenovirus E
cggcaucucgcuga

SEQ ID NO: 1575412 - RNA, 12 nt, Human adenovirus E
gggcggcagcgg

SEQ ID NO: 1575413 - RNA, 22 nt, Human adenovirus E
cggagcacccccgccaugcgcg

SEQ ID NO: 1575414 - RNA, 13 nt, Human adenovirus E
ccacccucccagg

SEQ ID NO: 1575415 - RNA, 16 nt, Human adenovirus E
cagcccccuccacagc

SEQ ID NO: 1575416 - RNA, 16 nt, Human adenovirus E
gcuccgcgacacggca

SEQ ID NO: 1575417 - RNA, 23 nt, Human adenovirus E
ccaccacagcaaccucaggcaca

SEQ ID NO: 1575418 - RNA, 14 nt, Human adenovirus E
gcccgcaggcggga

SEQ ID NO: 1575419 - RNA, 16 nt, Human adenovirus E
gucucuucagauggau

SEQ ID NO: 1575420 - RNA, 14 nt, Human adenovirus E
uacucgcagcagcu

SEQ ID NO: 1575421 - RNA, 18 nt, Human adenovirus E
auccccgucuccugccgc

SEQ ID NO: 1575422 - RNA, 18 nt, Human adenovirus E
cugccaucacaccuucca

SEQ ID NO: 1575423 - RNA, 13 nt, Human adenovirus E
guaggugagcucg

SEQ ID NO: 1575424 - RNA, 13 nt, Human adenovirus E
ccucaaaugcuac

SEQ ID NO: 1575425 - RNA, 17 nt, Human adenovirus E
agccagcguccgauccu

SEQ ID NO: 1575426 - RNA, 19 nt, Human adenovirus E
ggugaccguggagcuggag

SEQ ID NO: 1575427 - RNA, 18 nt, Human adenovirus E
acgugccccggggccagg

SEQ ID NO: 1575428 - RNA, 16 nt, Human adenovirus E
gaccagucgccagggc

SEQ ID NO: 1575429 - RNA, 12 nt, Human adenovirus E
caacagccgccu

SEQ ID NO: 1575430 - RNA, 23 nt, Human adenovirus E
gcuggggcgacgggggcggugcc

SEQ ID NO: 1575431 - RNA, 21 nt, Human adenovirus E
agcgguguccggggcugcuag

SEQ ID NO: 1575432 - RNA, 17 nt, Human adenovirus E
gcaucaucugggccugg

SEQ ID NO: 1575433 - RNA, 17 nt, Human adenovirus E
aggccacaauacaugcc

SEQ ID NO: 1575434 - RNA, 16 nt, Human adenovirus E
cgaagcguucagggag

SEQ ID NO: 1575435 - RNA, 19 nt, Human adenovirus E
cugguggcgguguugcuuu

SEQ ID NO: 1575436 - RNA, 18 nt, Human adenovirus E
gcccuuuucaaccugggu

SEQ ID NO: 1575437 - RNA, 14 nt, Human adenovirus E
accaccgccucgga

SEQ ID NO: 1575438 - RNA, 17 nt, Human adenovirus E
gccauaggaccaccagg

SEQ ID NO: 1575439 - RNA, 12 nt, Human adenovirus E
ccgccuccaccc

SEQ ID NO: 1575440 - RNA, 15 nt, Human adenovirus E
accaggccgugcagc

SEQ ID NO: 1575441 - RNA, 19 nt, Human adenovirus E
auacgcgcacuuccucaaa

SEQ ID NO: 1575442 - RNA, 14 nt, Human adenovirus E
acgcgcucaucaag

SEQ ID NO: 1575443 - RNA, 15 nt, Human adenovirus E
cuggccuaccacucg

SEQ ID NO: 1575444 - RNA, 16 nt, Human adenovirus E
augguggcgcagcuga

SEQ ID NO: 1575445 - RNA, 18 nt, Human adenovirus E
cacacgcacuaccaccac

SEQ ID NO: 1575446 - RNA, 17 nt, Human adenovirus E
agaugagccgcuggaag

SEQ ID NO: 1575447 - RNA, 13 nt, Human adenovirus E
ucaccuccacagc

SEQ ID NO: 1575448 - RNA, 19 nt, Human adenovirus E
gccgccggugccgcccagg

SEQ ID NO: 1575449 - RNA, 16 nt, Human adenovirus E
ccugcugcgccuggcc

SEQ ID NO: 1575450 - RNA, 17 nt, Human adenovirus E
ucaccagcuggccuugg

SEQ ID NO: 1575451 - RNA, 13 nt, Human adenovirus E
ggcggcggcgcgc

SEQ ID NO: 1575452 - RNA, 21 nt, Human adenovirus E
cgcgaucccugagcuccuccc

SEQ ID NO: 1575453 - RNA, 14 nt, Human adenovirus E
ucuggaagaagcag

SEQ ID NO: 1575454 - RNA, 13 nt, Human adenovirus E
aggaucuggaggg

SEQ ID NO: 1575455 - RNA, 21 nt, Human adenovirus E
  misc_feature (8)..(8): n is a, c, g, or u
gccccaunuagcagucccacu

SEQ ID NO: 1575456 - RNA, 20 nt, Human adenovirus E
ccgaggagaugcgcgcggcc

SEQ ID NO: 1575457 - RNA, 14 nt, Human adenovirus E
guccuggcgggggc

SEQ ID NO: 1575458 - RNA, 18 nt, Human adenovirus E
ucuccggcucccccggcc

SEQ ID NO: 1575459 - RNA, 14 nt, Human adenovirus E
uacaggagccauaa

SEQ ID NO: 1575460 - RNA, 18 nt, Human adenovirus E
aggugacccugggccuga

SEQ ID NO: 1575461 - RNA, 16 nt, Human adenovirus E
gaggccagcacccaga

SEQ ID NO: 1575462 - RNA, 22 nt, Human adenovirus E
cauuucccuuaacauggaucac

SEQ ID NO: 1575463 - RNA, 20 nt, Human adenovirus E
cauaguucaacacgcuccag

SEQ ID NO: 1575464 - RNA, 22 nt, Human adenovirus E
auacccgccaaauaaucacaca

SEQ ID NO: 1575465 - RNA, 12 nt, Human adenovirus E
ugcagggccugu

SEQ ID NO: 1575466 - RNA, 12 nt, Human adenovirus E
cagcggcggcag

SEQ ID NO: 1575467 - RNA, 19 nt, Human adenovirus E
ccggagaaaacuggcguga

SEQ ID NO: 1575468 - RNA, 14 nt, Human adenovirus E
gaggccgagccaca

SEQ ID NO: 1575469 - RNA, 16 nt, Human adenovirus E
ucaccgccccgcucag

SEQ ID NO: 1575470 - RNA, 17 nt, Human adenovirus E
ggccggagcuguccagg

SEQ ID NO: 1575471 - RNA, 17 nt, Human adenovirus E
cgguuguaccuggugga

SEQ ID NO: 1575472 - RNA, 17 nt, Human adenovirus E
acgaggaggaggcagag

SEQ ID NO: 1575473 - RNA, 21 nt, Human adenovirus E
ugccccuacgucuacaaggcc

SEQ ID NO: 1575474 - RNA, 15 nt, Human adenovirus E
ucuggagcaggcggc

SEQ ID NO: 1575475 - RNA, 20 nt, Human adenovirus E
gcagguccagaccucggcgc

SEQ ID NO: 1575476 - RNA, 23 nt, Human adenovirus E
ggccccgcagcagucgcugccgc

SEQ ID NO: 1575477 - RNA, 22 nt, Human adenovirus E
uguauuauggaacuacagcagg

SEQ ID NO: 1575478 - RNA, 15 nt, Human adenovirus E
ccugcgcaaggucga

SEQ ID NO: 1575479 - RNA, 18 nt, Human adenovirus E
uguggagcuaccagcccc

SEQ ID NO: 1575480 - RNA, 15 nt, Human adenovirus E
ggucgagcugaccca

SEQ ID NO: 1575481 - RNA, 18 nt, Human adenovirus E
guuauuuuuccuccaccc

SEQ ID NO: 1575482 - RNA, 13 nt, Human adenovirus E
cacgcuccagccg

SEQ ID NO: 1575483 - RNA, 17 nt, Human adenovirus E
cuccagaagacggauga

SEQ ID NO: 1575484 - RNA, 16 nt, Human adenovirus E
cgagagcgugaugcag

SEQ ID NO: 1575485 - RNA, 18 nt, Human adenovirus E
cggcgacuaccuccaccu

SEQ ID NO: 1575486 - RNA, 23 nt, Human adenovirus E
agcacagggacgauccccgggcg

SEQ ID NO: 1575487 - RNA, 12 nt, Human adenovirus E
cgcgcucaucaa

SEQ ID NO: 1575488 - RNA, 14 nt, Human adenovirus E
agcaccgaggagga

SEQ ID NO: 1575489 - RNA, 15 nt, Human adenovirus E
cuuccguggcggugc

SEQ ID NO: 1575490 - RNA, 14 nt, Human adenovirus E
ccuaccgcagcugg

SEQ ID NO: 1575491 - RNA, 19 nt, Human adenovirus E
uuacaaaguaacuguuguu

SEQ ID NO: 1575492 - RNA, 20 nt, Human adenovirus E
uaacucagguguccagcugg

SEQ ID NO: 1575493 - RNA, 19 nt, Human adenovirus E
gccccgguucgaggccggc

SEQ ID NO: 1575494 - RNA, 21 nt, Human adenovirus E
uccuuacaaguuucuccacca

SEQ ID NO: 1575495 - RNA, 16 nt, Human adenovirus E
cuaugccuucugcuac

SEQ ID NO: 1575496 - RNA, 18 nt, Human adenovirus E
gcaguuagcgcucuaguu

SEQ ID NO: 1575497 - RNA, 12 nt, Human adenovirus E
ugcccucggccu

SEQ ID NO: 1575498 - RNA, 13 nt, Human adenovirus E
uuccucaaaugcu

SEQ ID NO: 1575499 - RNA, 16 nt, Human adenovirus E
gaggaggggggccacc

SEQ ID NO: 1575500 - RNA, 13 nt, Human adenovirus E
accugcugggcau

SEQ ID NO: 1575501 - RNA, 14 nt, Human adenovirus E
cggaaagguugggg

SEQ ID NO: 1575502 - RNA, 15 nt, Human adenovirus E
caacaacagccaccu

SEQ ID NO: 1575503 - RNA, 17 nt, Human adenovirus E
gcaacucguaccugggc

SEQ ID NO: 1575504 - RNA, 21 nt, Human adenovirus E
caggaugcaccgugcggugag

SEQ ID NO: 1575505 - RNA, 21 nt, Human adenovirus E
uucauauccucuccgaaauuu

SEQ ID NO: 1575506 - RNA, 19 nt, Human adenovirus E
uaccaggaaauuccccagc

SEQ ID NO: 1575507 - RNA, 21 nt, Human adenovirus E
ccguggaaugggccagaccca

SEQ ID NO: 1575508 - RNA, 22 nt, Human adenovirus E
caaccacgugcgcacccugauc

SEQ ID NO: 1575509 - RNA, 22 nt, Human adenovirus E
aggacuccgccgacgacagcag

SEQ ID NO: 1575510 - RNA, 19 nt, Human adenovirus E
acuucuuccagaccagucg

SEQ ID NO: 1575511 - RNA, 19 nt, Human adenovirus E
agcagaucuagggccucag

SEQ ID NO: 1575512 - RNA, 14 nt, Human adenovirus E
ggggaacccguccu

SEQ ID NO: 1575513 - RNA, 15 nt, Human adenovirus E
ggaagaagcagaaga

SEQ ID NO: 1575514 - RNA, 18 nt, Human adenovirus E
acgcuccugguccuguga

SEQ ID NO: 1575515 - RNA, 21 nt, Human adenovirus E
auuucaccaacgccauccuga

SEQ ID NO: 1575516 - RNA, 18 nt, Human adenovirus E
cuucccagcucugguacu

SEQ ID NO: 1575517 - RNA, 21 nt, Human adenovirus E
ucccgcaucugcaccucacag

SEQ ID NO: 1575518 - RNA, 15 nt, Human adenovirus E
cgcauggucucggug

SEQ ID NO: 1575519 - RNA, 22 nt, Human adenovirus E
accuggccuaccacucggacgu

SEQ ID NO: 1575520 - RNA, 22 nt, Human adenovirus E
gcggaaccacagggccagcacc

SEQ ID NO: 1575521 - RNA, 22 nt, Human adenovirus E
gaugcaccugugggaccugcug

SEQ ID NO: 1575522 - RNA, 13 nt, Human adenovirus E
guucauuuuugcu

SEQ ID NO: 1575523 - RNA, 20 nt, Human adenovirus E
gccaacugaacgggggcgcc

SEQ ID NO: 1575524 - RNA, 14 nt, Human adenovirus E
aguacaggagccau

SEQ ID NO: 1575525 - RNA, 18 nt, Human adenovirus E
gaagacgaaggcgcgcag

SEQ ID NO: 1575526 - RNA, 18 nt, Human adenovirus E
accugugggaccugcugg

SEQ ID NO: 1575527 - RNA, 13 nt, Human adenovirus E
gagacagcugccg

SEQ ID NO: 1575528 - RNA, 14 nt, Human adenovirus E
caaguuccggagca

SEQ ID NO: 1575529 - RNA, 22 nt, Human adenovirus E
cagcaucaucugggccuggucg

SEQ ID NO: 1575530 - RNA, 20 nt, Human adenovirus E
ucaaauacucgcagaaaaug

SEQ ID NO: 1575531 - RNA, 18 nt, Human adenovirus E
gagcgcggucauggacca

SEQ ID NO: 1575532 - RNA, 13 nt, Human adenovirus E
ccgucgccgcacc

SEQ ID NO: 1575533 - RNA, 17 nt, Human adenovirus E
cauguagaacugguuga

SEQ ID NO: 1575534 - RNA, 16 nt, Human adenovirus E
augggcaccuggagcg

SEQ ID NO: 1575535 - RNA, 16 nt, Human adenovirus E
uauuuuuccuccaccc

SEQ ID NO: 1575536 - RNA, 24 nt, Human adenovirus E
cggucgcccgucucucagccaauc

SEQ ID NO: 1575537 - RNA, 14 nt, Human adenovirus E
cagcgcccuggucg

SEQ ID NO: 1575538 - RNA, 18 nt, Human adenovirus E
ggcggauggcuggcagag

SEQ ID NO: 1575539 - RNA, 15 nt, Human adenovirus E
cggucagggagauga

SEQ ID NO: 1575540 - RNA, 18 nt, Human adenovirus E
ugaacauuaaaccaugcu

SEQ ID NO: 1575541 - RNA, 23 nt, Human adenovirus E
gcgugcaggccccggucggggac

SEQ ID NO: 1575542 - RNA, 23 nt, Human adenovirus E
cgggguggacuucaccgagagcc

SEQ ID NO: 1575543 - RNA, 15 nt, Human adenovirus E
gggcaggaggucggg

SEQ ID NO: 1575544 - RNA, 18 nt, Human adenovirus E
gcguccagcgcagccagg

SEQ ID NO: 1575545 - RNA, 15 nt, Human adenovirus E
gcccggcggcaccgg

SEQ ID NO: 1575546 - RNA, 14 nt, Human adenovirus E
agaucuucgagggu

SEQ ID NO: 1575547 - RNA, 20 nt, Human adenovirus E
uggcaugcgaguuggaggag

SEQ ID NO: 1575548 - RNA, 11 nt, Human adenovirus E
gcacaggcagc

SEQ ID NO: 1575549 - RNA, 20 nt, Human adenovirus E
auuguaaaacagccacucuc

SEQ ID NO: 1575550 - RNA, 15 nt, Human adenovirus E
cguggaacagcacca

SEQ ID NO: 1575551 - RNA, 15 nt, Human adenovirus E
cgacaaaaaucagac

SEQ ID NO: 1575552 - RNA, 17 nt, Human adenovirus E
ucgauggugaagaugcc

SEQ ID NO: 1575553 - RNA, 22 nt, Human adenovirus E
gcuuggcgacgagcucggcggu

SEQ ID NO: 1575554 - RNA, 18 nt, Human adenovirus E
gagaucgagggcgagcuc

SEQ ID NO: 1575555 - RNA, 15 nt, Human adenovirus E
cuacagccuaggcca

SEQ ID NO: 1575556 - RNA, 16 nt, Human adenovirus E
cgcgguaccuggcgcc

SEQ ID NO: 1575557 - RNA, 18 nt, Human adenovirus E
ggagucaggucagugggc

SEQ ID NO: 1575558 - RNA, 19 nt, Human adenovirus E
uucagggaggcgcugcuga

SEQ ID NO: 1575559 - RNA, 19 nt, Human adenovirus E
cuggagcgcguggcccgcu

SEQ ID NO: 1575560 - RNA, 22 nt, Human adenovirus E
ccacggcaaccccacgccgagc

SEQ ID NO: 1575561 - RNA, 21 nt, Human adenovirus E
ccgaggagggcaagcccgugg

SEQ ID NO: 1575562 - RNA, 21 nt, Human adenovirus E
ucaccaaacugucaaauacuc

SEQ ID NO: 1575563 - RNA, 20 nt, Human adenovirus E
aaagcccccgaucccuccag

SEQ ID NO: 1575564 - RNA, 16 nt, Human adenovirus E
caugauccagcggcgg

SEQ ID NO: 1575565 - RNA, 19 nt, Human adenovirus E
cuccaagagcuucuucaac

SEQ ID NO: 1575566 - RNA, 22 nt, Human adenovirus E
ccaucccgaagggggucaucuu

SEQ ID NO: 1575567 - RNA, 18 nt, Human adenovirus E
cggccaucgccagcaugu

SEQ ID NO: 1575568 - RNA, 18 nt, Human adenovirus E
gcacuccauauaccaaug

SEQ ID NO: 1575569 - RNA, 15 nt, Human adenovirus E
uccuccagaagacgg

SEQ ID NO: 1575570 - RNA, 21 nt, Human adenovirus E
ggggugcgcucccggcggcgc

SEQ ID NO: 1575571 - RNA, 22 nt, Human adenovirus E
aggcggcagugguggcggggga

SEQ ID NO: 1575572 - RNA, 18 nt, Human adenovirus E
caggaaauuccccagccc

SEQ ID NO: 1575573 - RNA, 19 nt, Human adenovirus E
gauguacagguggcagaug

SEQ ID NO: 1575574 - RNA, 16 nt, Human adenovirus E
ggcgugcgcuccugga

SEQ ID NO: 1575575 - RNA, 24 nt, Human adenovirus E
ggcgaguuugcuuacggcaagcgc

SEQ ID NO: 1575576 - RNA, 13 nt, Human adenovirus E
gcagugggcgcag

SEQ ID NO: 1575577 - RNA, 16 nt, Human adenovirus E
cgguggggcggccagc

SEQ ID NO: 1575578 - RNA, 17 nt, Human adenovirus E
ucacacacgcccagcac

SEQ ID NO: 1575579 - RNA, 16 nt, Human adenovirus E
uccugcccgccaccug

SEQ ID NO: 1575580 - RNA, 21 nt, Human adenovirus E
acgcacgagaagguccuggcc

SEQ ID NO: 1575581 - RNA, 14 nt, Human adenovirus E
cggggugcuggaga

SEQ ID NO: 1575582 - RNA, 12 nt, Human adenovirus E
caacgccauccu

SEQ ID NO: 1575583 - RNA, 21 nt, Human adenovirus E
gggcguccagcgcagccaggg

SEQ ID NO: 1575584 - RNA, 14 nt, Human adenovirus E
cagcugauggugcc

SEQ ID NO: 1575585 - RNA, 16 nt, Human adenovirus E
gcccgguuccacgcgg

SEQ ID NO: 1575586 - RNA, 15 nt, Human adenovirus E
guucucuccagcacc

SEQ ID NO: 1575587 - RNA, 21 nt, Human adenovirus E
uggcggcgauguugagcugca

SEQ ID NO: 1575588 - RNA, 18 nt, Human adenovirus E
caucagucgucuggugcg

SEQ ID NO: 1575589 - RNA, 15 nt, Human adenovirus E
cugaucacaucgacc

SEQ ID NO: 1575590 - RNA, 23 nt, Human adenovirus E
ggugcccucgcgcuccaacccca

SEQ ID NO: 1575591 - RNA, 15 nt, Human adenovirus E
agcuaccuccagugc

SEQ ID NO: 1575592 - RNA, 22 nt, Human adenovirus E
aaucccaacaaaugccagcuga

SEQ ID NO: 1575593 - RNA, 17 nt, Human adenovirus E
gaugcccacggcccuca

SEQ ID NO: 1575594 - RNA, 16 nt, Human adenovirus E
gcgcccccaccacccu

SEQ ID NO: 1575595 - RNA, 14 nt, Human adenovirus E
ccgccuucgcguuc

SEQ ID NO: 1575596 - RNA, 15 nt, Human adenovirus E
caauauauagcccag

SEQ ID NO: 1575597 - RNA, 22 nt, Human adenovirus E
gcccaggccgaaguccagcuga

SEQ ID NO: 1575598 - RNA, 20 nt, Human adenovirus E
cgugaccuugcagcaggugc

SEQ ID NO: 1575599 - RNA, 14 nt, Human adenovirus E
ggggaucagccccg

SEQ ID NO: 1575600 - RNA, 21 nt, Human adenovirus E
guuccacgguggcuuccagca

SEQ ID NO: 1575601 - RNA, 15 nt, Human adenovirus E
cugcccgcaggcggg

SEQ ID NO: 1575602 - RNA, 20 nt, Human adenovirus E
  misc_feature (4)..(4): n is a, c, g, or u
accnuacuuuuuccacccgc

SEQ ID NO: 1575603 - RNA, 13 nt, Human adenovirus E
cugcagcgggccc

SEQ ID NO: 1575604 - RNA, 20 nt, Human adenovirus E
acugacguaaaggccaaagu

SEQ ID NO: 1575605 - RNA, 14 nt, Human adenovirus E
gccugauggcucug

SEQ ID NO: 1575606 - RNA, 22 nt, Human adenovirus E
cggcgcagcuguuccugguggu

SEQ ID NO: 1575607 - RNA, 18 nt, Human adenovirus E
uggucagcgacgagcagc

SEQ ID NO: 1575608 - RNA, 16 nt, Human adenovirus E
cgugaggcgcgcgcag

SEQ ID NO: 1575609 - RNA, 13 nt, Human adenovirus E
gccauccuggagg

SEQ ID NO: 1575610 - RNA, 15 nt, Human adenovirus E
caccgagagccgccu

SEQ ID NO: 1575611 - RNA, 15 nt, Human adenovirus E
agggcuugcagaccg

SEQ ID NO: 1575612 - RNA, 21 nt, Human adenovirus E
cagcagcagaaaaagaccagc

SEQ ID NO: 1575613 - RNA, 15 nt, Human adenovirus E
cccucagggcccggc

SEQ ID NO: 1575614 - RNA, 14 nt, Human adenovirus E
gacguccagagcgc

SEQ ID NO: 1575615 - RNA, 23 nt, Human adenovirus E
gcggaauaucaaaaucucugccg

SEQ ID NO: 1575616 - RNA, 16 nt, Human adenovirus E
gcagcccccgcuggag

SEQ ID NO: 1575617 - RNA, 21 nt, Human adenovirus E
auaacaagacucggaacaaua

SEQ ID NO: 1575618 - RNA, 18 nt, Human adenovirus E
gacccugccaucacaccu

SEQ ID NO: 1575619 - RNA, 18 nt, Human adenovirus E
cagaccgugaaccugagc

SEQ ID NO: 1575620 - RNA, 12 nt, Human adenovirus E
agucuggaggaa

SEQ ID NO: 1575621 - RNA, 23 nt, Human adenovirus E
cuccacgcaacaccccgugcgcg

SEQ ID NO: 1575622 - RNA, 14 nt, Human adenovirus E
ccgcgcgugccccc

SEQ ID NO: 1575623 - RNA, 14 nt, Human adenovirus E
ugggcagggagagg

SEQ ID NO: 1575624 - RNA, 22 nt, Human adenovirus E
aggaagacugggagaacagcag

SEQ ID NO: 1575625 - RNA, 23 nt, Human adenovirus E
ucgauuccucgggaaaacucauc

SEQ ID NO: 1575626 - RNA, 20 nt, Human adenovirus E
cagagcaucguggugcagga

SEQ ID NO: 1575627 - RNA, 19 nt, Human adenovirus E
gucccccgaguuguccugg

SEQ ID NO: 1575628 - RNA, 11 nt, Human adenovirus E
gcucagccgcg

SEQ ID NO: 1575629 - RNA, 14 nt, Human adenovirus E
cgccgcgcaggggc

SEQ ID NO: 1575630 - RNA, 21 nt, Human adenovirus E
ucccugagcuccucccucagc

SEQ ID NO: 1575631 - RNA, 22 nt, Human adenovirus E
acucggacgugaucgaggacgu

SEQ ID NO: 1575632 - RNA, 15 nt, Human adenovirus E
ccaccucgccgcgca

SEQ ID NO: 1575633 - RNA, 12 nt, Human adenovirus E
ucgucaggccgu

SEQ ID NO: 1575634 - RNA, 15 nt, Human adenovirus E
ccacagcaaccucag

SEQ ID NO: 1575635 - RNA, 22 nt, Human adenovirus E
uacuuccgcgagacgcccaggc

SEQ ID NO: 1575636 - RNA, 17 nt, Human adenovirus E
gcaugcuggcuagaccc

SEQ ID NO: 1575637 - RNA, 17 nt, Human adenovirus E
ugcaagacuccgaggag

SEQ ID NO: 1575638 - RNA, 14 nt, Human adenovirus E
ugccgcccaggacu

SEQ ID NO: 1575639 - RNA, 18 nt, Human adenovirus E
gcgugcacgaagcccugc

SEQ ID NO: 1575640 - RNA, 21 nt, Human adenovirus E
agcgcggucauggaccaggug

SEQ ID NO: 1575641 - RNA, 18 nt, Human adenovirus E
acguggacgagcagaccu

SEQ ID NO: 1575642 - RNA, 20 nt, Human adenovirus E
gcucacccgcaguugucugu

SEQ ID NO: 1575643 - RNA, 19 nt, Human adenovirus E
acucaccccggggcugugg

SEQ ID NO: 1575644 - RNA, 22 nt, Human adenovirus E
cggcgguacaccucgcccugcu

SEQ ID NO: 1575645 - RNA, 20 nt, Human adenovirus E
ccucauuuuccccgagcgcc

SEQ ID NO: 1575646 - RNA, 18 nt, Human adenovirus E
ugcuauuuuggaucugac

SEQ ID NO: 1575647 - RNA, 19 nt, Human adenovirus E
uccaacguggagcugacca

SEQ ID NO: 1575648 - RNA, 18 nt, Human adenovirus E
cgaggccguggcccagcg

SEQ ID NO: 1575649 - RNA, 22 nt, Human adenovirus E
aaccugacacaccaccacagca

SEQ ID NO: 1575650 - RNA, 18 nt, Human adenovirus E
ggccugcgcgcgcccagc

SEQ ID NO: 1575651 - RNA, 18 nt, Human adenovirus E
agcgcccagucggcgaga

SEQ ID NO: 1575652 - RNA, 13 nt, Human adenovirus E
aucagacccacug

SEQ ID NO: 1575653 - RNA, 16 nt, Human adenovirus E
agauccuaggccuuuu

SEQ ID NO: 1575654 - RNA, 16 nt, Human adenovirus E
gccggggcagcgccgc

SEQ ID NO: 1575655 - RNA, 18 nt, Human adenovirus E
cccccgggaguuccucca

SEQ ID NO: 1575656 - RNA, 19 nt, Human adenovirus E
gccuguuccugaugcagga

SEQ ID NO: 1575657 - RNA, 16 nt, Human adenovirus E
ccucaagcugggagag

SEQ ID NO: 1575658 - RNA, 23 nt, Human adenovirus E
agaccagcagaaaaccagcagcu

SEQ ID NO: 1575659 - RNA, 17 nt, Human adenovirus E
cuccacguuccacacag

SEQ ID NO: 1575660 - RNA, 15 nt, Human adenovirus E
acgauuggacccagg

SEQ ID NO: 1575661 - RNA, 18 nt, Human adenovirus E
gcagggccaggcgcacgg

SEQ ID NO: 1575662 - RNA, 15 nt, Human adenovirus E
cagcaaagccuccac

SEQ ID NO: 1575663 - RNA, 23 nt, Human adenovirus E
aaaugaugcaaaacuaacacuuu

SEQ ID NO: 1575664 - RNA, 13 nt, Human adenovirus E
uacccgguggugg

SEQ ID NO: 1575665 - RNA, 22 nt, Human adenovirus E
cugagcuccucccucagcaaua

SEQ ID NO: 1575666 - RNA, 19 nt, Human adenovirus E
uacgagagcgugaugcagc

SEQ ID NO: 1575667 - RNA, 22 nt, Human adenovirus E
cggccugcgucaucacccaggg

SEQ ID NO: 1575668 - RNA, 20 nt, Human adenovirus E
gaauaucaaaaucucugccg

SEQ ID NO: 1575669 - RNA, 19 nt, Human adenovirus E
gagucgcggaugaaguggg

SEQ ID NO: 1575670 - RNA, 23 nt, Human adenovirus E
gauaccacccgguuguaccuggu

SEQ ID NO: 1575671 - RNA, 16 nt, Human adenovirus E
cagcguggaggagcuc

SEQ ID NO: 1575672 - RNA, 17 nt, Human adenovirus E
cagagacaggagcggcg

SEQ ID NO: 1575673 - RNA, 14 nt, Human adenovirus E
uacccguggaucau

SEQ ID NO: 1575674 - RNA, 19 nt, Human adenovirus E
accaguuccgccaggaggc

SEQ ID NO: 1575675 - RNA, 21 nt, Human adenovirus E
cgcuccgucaagcugcugcuc

SEQ ID NO: 1575676 - RNA, 13 nt, Human adenovirus E
gccacaguacaga

SEQ ID NO: 1575677 - RNA, 22 nt, Human adenovirus E
gguucugggugaucuuggcccg

SEQ ID NO: 1575678 - RNA, 19 nt, Human adenovirus E
ccacggcccucagcaucag

SEQ ID NO: 1575679 - RNA, 12 nt, Human adenovirus E
ggucgaggagaa

SEQ ID NO: 1575680 - RNA, 19 nt, Human adenovirus E
uggaggaguucacucccuc

SEQ ID NO: 1575681 - RNA, 21 nt, Human adenovirus E
gugguggcgggggagggggcc

SEQ ID NO: 1575682 - RNA, 19 nt, Human adenovirus E
ggagaugcggcccaugagc

SEQ ID NO: 1575683 - RNA, 16 nt, Human adenovirus E
cucaccaaggccaugg

SEQ ID NO: 1575684 - RNA, 16 nt, Human adenovirus E
caagcuccugcagaag

SEQ ID NO: 1575685 - RNA, 14 nt, Human adenovirus E
aggagggcaagccc

SEQ ID NO: 1575686 - RNA, 16 nt, Human adenovirus E
cugcuggaggccaucg

SEQ ID NO: 1575687 - RNA, 20 nt, Human adenovirus E
ggcagcggccgaggcggcug

SEQ ID NO: 1575688 - RNA, 17 nt, Human adenovirus E
ucugaaccugcccccca

SEQ ID NO: 1575689 - RNA, 20 nt, Human adenovirus E
gaucagcaucaucugggccu

SEQ ID NO: 1575690 - RNA, 16 nt, Human adenovirus E
aggagguggaagaagc

SEQ ID NO: 1575691 - RNA, 16 nt, Human adenovirus E
agggcaggcgcugagg

SEQ ID NO: 1575692 - RNA, 13 nt, Human adenovirus E
ccacacagacaac

SEQ ID NO: 1575693 - RNA, 17 nt, Human adenovirus E
gugggaccugcuggagg

SEQ ID NO: 1575694 - RNA, 17 nt, Human adenovirus E
ugcucgcaacgcugcac

SEQ ID NO: 1575695 - RNA, 21 nt, Human adenovirus E
gcuggcgggcggcgccacccu

SEQ ID NO: 1575696 - RNA, 13 nt, Human adenovirus E
ccuggggcgcccu

SEQ ID NO: 1575697 - RNA, 20 nt, Human adenovirus E
accucgccgcgcaggggcuc

SEQ ID NO: 1575698 - RNA, 14 nt, Human adenovirus E
ggccguggcccagc

SEQ ID NO: 1575699 - RNA, 23 nt, Human adenovirus E
ucgagcaguuauuuuuccuccac

SEQ ID NO: 1575700 - RNA, 18 nt, Human adenovirus E
uacacccccggaacauug

SEQ ID NO: 1575701 - RNA, 23 nt, Human adenovirus E
ucaacaaaagaaaaauccuccag

SEQ ID NO: 1575702 - RNA, 22 nt, Human adenovirus E
ggugggcuuggauguugaggua

SEQ ID NO: 1575703 - RNA, 16 nt, Human adenovirus E
caguaguacagaaaca

SEQ ID NO: 1575704 - RNA, 20 nt, Human adenovirus E
guccaccuuuuccaggguau

SEQ ID NO: 1575705 - RNA, 21 nt, Human adenovirus E
ugcucagucucaaguccagca

SEQ ID NO: 1575706 - RNA, 12 nt, Human adenovirus E
acggcccucagc

SEQ ID NO: 1575707 - RNA, 15 nt, Human adenovirus E
ucuacuuccuccuca

SEQ ID NO: 1575708 - RNA, 20 nt, Human adenovirus E
gggcguccagcgcagccagg

SEQ ID NO: 1575709 - RNA, 15 nt, Human adenovirus E
cgagcuccagcucca

SEQ ID NO: 1575710 - RNA, 14 nt, Human adenovirus E
agcagcuggcccgg

SEQ ID NO: 1575711 - RNA, 23 nt, Human adenovirus E
auuagggcaagccacaguacaga

SEQ ID NO: 1575712 - RNA, 20 nt, Human adenovirus E
gccgcuggcuccuggaccug

SEQ ID NO: 1575713 - RNA, 16 nt, Human adenovirus E
cagcccaauggcaccu

SEQ ID NO: 1575714 - RNA, 16 nt, Human adenovirus E
cugaaccugacacacc

SEQ ID NO: 1575715 - RNA, 19 nt, Human adenovirus E
gaggaugcagcagcugaag

SEQ ID NO: 1575716 - RNA, 20 nt, Human adenovirus E
gcggggggagaugaggugca

SEQ ID NO: 1575717 - RNA, 17 nt, Human adenovirus E
gucugcgaccugacgga

SEQ ID NO: 1575718 - RNA, 15 nt, Human adenovirus E
cucccucguacgaga

SEQ ID NO: 1575719 - RNA, 21 nt, Human adenovirus E
gcaccaccgccucggaccugg

SEQ ID NO: 1575720 - RNA, 17 nt, Human adenovirus E
guggagaacaaggccau

SEQ ID NO: 1575721 - RNA, 17 nt, Human adenovirus E
ccagaaaaagccacaga

SEQ ID NO: 1575722 - RNA, 21 nt, Human adenovirus E
cgggauagaaagccuggugga

SEQ ID NO: 1575723 - RNA, 17 nt, Human adenovirus E
augcccacggcccucag

SEQ ID NO: 1575724 - RNA, 16 nt, Human adenovirus E
cucggccauccuggag

SEQ ID NO: 1575725 - RNA, 18 nt, Human adenovirus E
cugguggcgguguugcuu

SEQ ID NO: 1575726 - RNA, 19 nt, Human adenovirus E
cguuacgugcagcagaagc

SEQ ID NO: 1575727 - RNA, 20 nt, Human adenovirus E
ccuuccucagcacccagccc

SEQ ID NO: 1575728 - RNA, 16 nt, Human adenovirus E
cuacagaaagcacaga

SEQ ID NO: 1575729 - RNA, 14 nt, Human adenovirus E
ugcaggagggggcc

SEQ ID NO: 1575730 - RNA, 19 nt, Human adenovirus E
gcgagcagaaggggggcag

SEQ ID NO: 1575731 - RNA, 23 nt, Human adenovirus E
gccgcuccgucaagcugcugcuc

SEQ ID NO: 1575732 - RNA, 14 nt, Human adenovirus E
caguggcagcggcc

SEQ ID NO: 1575733 - RNA, 16 nt, Human adenovirus E
ccgaggacgagggcau

SEQ ID NO: 1575734 - RNA, 14 nt, Human adenovirus E
uauguggcccccca

SEQ ID NO: 1575735 - RNA, 16 nt, Human adenovirus E
gaaggguaugcuuucg

SEQ ID NO: 1575736 - RNA, 13 nt, Human adenovirus E
gcuaccuccagug

SEQ ID NO: 1575737 - RNA, 17 nt, Human adenovirus E
ugcuggagcgcguggcc

SEQ ID NO: 1575738 - RNA, 13 nt, Human adenovirus E
gugaucgaggacg

SEQ ID NO: 1575739 - RNA, 13 nt, Human adenovirus E
cgccucuggguga

SEQ ID NO: 1575740 - RNA, 14 nt, Human adenovirus E
ggcaugaccucggc

SEQ ID NO: 1575741 - RNA, 19 nt, Human adenovirus E
agcucugcaagcuccugca

SEQ ID NO: 1575742 - RNA, 23 nt, Human adenovirus E
cagcaaggcguggaacagcacca

SEQ ID NO: 1575743 - RNA, 19 nt, Human adenovirus E
gaagacugggacagcacuc

SEQ ID NO: 1575744 - RNA, 15 nt, Human adenovirus E
cgagaagcagcagca

SEQ ID NO: 1575745 - RNA, 22 nt, Human adenovirus E
ccggcgucgugcacgcagcagc

SEQ ID NO: 1575746 - RNA, 20 nt, Human adenovirus E
gcaagacccccaauggggug

SEQ ID NO: 1575747 - RNA, 19 nt, Human adenovirus E
gccaaccggcucucggcca

SEQ ID NO: 1575748 - RNA, 18 nt, Human adenovirus E
cuguaucccacccugcau

SEQ ID NO: 1575749 - RNA, 16 nt, Human adenovirus E
cggcucggggcccgga

SEQ ID NO: 1575750 - RNA, 17 nt, Human adenovirus E
gagggccgcuggcuccu

SEQ ID NO: 1575751 - RNA, 19 nt, Human adenovirus E
gaacugcugcccgacggcc

SEQ ID NO: 1575752 - RNA, 17 nt, Human adenovirus E
ggcuggcggggaacggg

SEQ ID NO: 1575753 - RNA, 17 nt, Human adenovirus E
cccaccccacccaguga

SEQ ID NO: 1575754 - RNA, 16 nt, Human adenovirus E
ggcaacauccccgcgc

SEQ ID NO: 1575755 - RNA, 14 nt, Human adenovirus E
cuccuuacgugccc

SEQ ID NO: 1575756 - RNA, 22 nt, Human adenovirus E
cagcagugucuggaggagcaga

SEQ ID NO: 1575757 - RNA, 18 nt, Human adenovirus E
aauccaagccagccauga

SEQ ID NO: 1575758 - RNA, 18 nt, Human adenovirus E
ggugcgaggaugcgagcc

SEQ ID NO: 1575759 - RNA, 14 nt, Human adenovirus E
cgcagggaggugug

SEQ ID NO: 1575760 - RNA, 14 nt, Human adenovirus E
caccacagcgcccu

SEQ ID NO: 1575761 - RNA, 21 nt, Human adenovirus E
auugaaagcaacauaagcugg

SEQ ID NO: 1575762 - RNA, 12 nt, Human adenovirus E
ugcgcagggagg

SEQ ID NO: 1575763 - RNA, 18 nt, Human adenovirus E
acugcuaccugcugcgcc

SEQ ID NO: 1575764 - RNA, 16 nt, Human adenovirus E
guuccugaugcaggag

SEQ ID NO: 1575765 - RNA, 21 nt, Human adenovirus E
acugccgcugcaaccucugca

SEQ ID NO: 1575766 - RNA, 21 nt, Human adenovirus E
cgggcacuuccgcgcucccug

SEQ ID NO: 1575767 - RNA, 13 nt, Human adenovirus E
acgacaggcagcg

SEQ ID NO: 1575768 - RNA, 15 nt, Human adenovirus E
uacgugcaacacaga

SEQ ID NO: 1575769 - RNA, 11 nt, Human adenovirus E
uccuccuccac

SEQ ID NO: 1575770 - RNA, 13 nt, Human adenovirus E
ugacgcuccuggu

SEQ ID NO: 1575771 - RNA, 17 nt, Human adenovirus E
cugcgacuggccgaccc

SEQ ID NO: 1575772 - RNA, 17 nt, Human adenovirus E
cucgcgguggggcggcc

SEQ ID NO: 1575773 - RNA, 16 nt, Human adenovirus E
guggcagcggccgagg

SEQ ID NO: 1575774 - RNA, 22 nt, Human adenovirus E
acguggagcugaccaaccuggu

SEQ ID NO: 1575775 - RNA, 16 nt, Human adenovirus E
gaggccaucgugcaga

SEQ ID NO: 1575776 - RNA, 17 nt, Human adenovirus E
ugaccggggccgggacc

SEQ ID NO: 1575777 - RNA, 20 nt, Human adenovirus E
ggaaccacagggccagcacc

SEQ ID NO: 1575778 - RNA, 12 nt, Human adenovirus E
gaaaauggcaug

SEQ ID NO: 1575779 - RNA, 14 nt, Human adenovirus E
agggacugaggggc

SEQ ID NO: 1575780 - RNA, 21 nt, Human adenovirus E
cacgagaaccgccuggggcag

SEQ ID NO: 1575781 - RNA, 21 nt, Human adenovirus E
guccagcuggcgggcggcgcc

SEQ ID NO: 1575782 - RNA, 16 nt, Human adenovirus E
ggacgauguggacagc

SEQ ID NO: 1575783 - RNA, 13 nt, Human adenovirus E
auauucuggagca

SEQ ID NO: 1575784 - RNA, 21 nt, Human adenovirus E
gauuccucgggaaaacucauc

SEQ ID NO: 1575785 - RNA, 21 nt, Human adenovirus E
agguacacauacaaagccuca

SEQ ID NO: 1575786 - RNA, 22 nt, Human adenovirus E
ggcccggaugcaggggcggcag

SEQ ID NO: 1575787 - RNA, 17 nt, Human adenovirus E
acgggcagcccuuuggu

SEQ ID NO: 1575788 - RNA, 16 nt, Human adenovirus E
cucaggcagaggagga

SEQ ID NO: 1575789 - RNA, 20 nt, Human adenovirus E
agcgacaucggcaccagcca

SEQ ID NO: 1575790 - RNA, 12 nt, Human adenovirus E
cggcagcggcgg

SEQ ID NO: 1575791 - RNA, 21 nt, Human adenovirus E
ccugcgcaaggucgaggagaa

SEQ ID NO: 1575792 - RNA, 21 nt, Human adenovirus E
aagauggagccauagcaacca

SEQ ID NO: 1575793 - RNA, 17 nt, Human adenovirus E
cgacgagaagcagcagc

SEQ ID NO: 1575794 - RNA, 15 nt, Human adenovirus E
agcucagccgcgccu

SEQ ID NO: 1575795 - RNA, 19 nt, Human adenovirus E
gcagggccuguggggcgug

SEQ ID NO: 1575796 - RNA, 13 nt, Human adenovirus E
gagccgcuggaag

SEQ ID NO: 1575797 - RNA, 15 nt, Human adenovirus E
gcggcugcucaggcu

SEQ ID NO: 1575798 - RNA, 19 nt, Human adenovirus E
ucgcacuccacgagccagg

SEQ ID NO: 1575799 - RNA, 22 nt, Human adenovirus E
augccagcugaguuuucagccc

SEQ ID NO: 1575800 - RNA, 22 nt, Human adenovirus E
cagcaggugcugccgaccgcgg

SEQ ID NO: 1575801 - RNA, 20 nt, Human adenovirus E
ucugcccccgccccagcagc

SEQ ID NO: 1575802 - RNA, 13 nt, Human adenovirus E
cgucccgggggug

SEQ ID NO: 1575803 - RNA, 12 nt, Human adenovirus E
aggaaggcagcg

SEQ ID NO: 1575804 - RNA, 18 nt, Human adenovirus E
gcuggcuccuggaccugg

SEQ ID NO: 1575805 - RNA, 19 nt, Human adenovirus E
ggucucgaucauugagcac

SEQ ID NO: 1575806 - RNA, 22 nt, Human adenovirus E
cagaggaggacagccugcaaga

SEQ ID NO: 1575807 - RNA, 22 nt, Human adenovirus E
uggaaggcgacaacgcgcggcu

SEQ ID NO: 1575808 - RNA, 21 nt, Human adenovirus E
ugcaacacagaaccaccaggu

SEQ ID NO: 1575809 - RNA, 15 nt, Human adenovirus E
ccuucgucucuucag

SEQ ID NO: 1575810 - RNA, 20 nt, Human adenovirus E
ugaacaguauccgcagcagc

SEQ ID NO: 1575811 - RNA, 16 nt, Human adenovirus E
cuucaaaaugaagauc

SEQ ID NO: 1575812 - RNA, 15 nt, Human adenovirus E
ucgccuugugcaugg

SEQ ID NO: 1575813 - RNA, 14 nt, Human adenovirus E
cccacccugcaugc

SEQ ID NO: 1575814 - RNA, 14 nt, Human adenovirus E
gauggugaagaugc

SEQ ID NO: 1575815 - RNA, 12 nt, Human adenovirus E
cagacggucccg

SEQ ID NO: 1575816 - RNA, 23 nt, Human adenovirus E
acccccgccaugcgcgcggcgcg

SEQ ID NO: 1575817 - RNA, 16 nt, Human adenovirus E
gaccgccgcggccgcc

SEQ ID NO: 1575818 - RNA, 20 nt, Human adenovirus E
aucucuucuacuuccuccuc

SEQ ID NO: 1575819 - RNA, 22 nt, Human adenovirus E
gaacucuguggaaacaauaaca

SEQ ID NO: 1575820 - RNA, 11 nt, Human adenovirus E
ucaugaugcag

SEQ ID NO: 1575821 - RNA, 21 nt, Human adenovirus E
ucaacaauagcacucaaccca

SEQ ID NO: 1575822 - RNA, 17 nt, Human adenovirus E
gugaccgagcuggucau

SEQ ID NO: 1575823 - RNA, 22 nt, Human adenovirus E
uggaauacaccacccucucccc

SEQ ID NO: 1575824 - RNA, 15 nt, Human adenovirus E
gcuccucccucagca

SEQ ID NO: 1575825 - RNA, 13 nt, Human adenovirus E
cagggccuguggg

SEQ ID NO: 1575826 - RNA, 20 nt, Human adenovirus E
gaaccccgcagaacagggca

SEQ ID NO: 1575827 - RNA, 16 nt, Human adenovirus E
ucugcaagcuccugca

SEQ ID NO: 1575828 - RNA, 21 nt, Human adenovirus E
gcuugcccucggccucggugc

SEQ ID NO: 1575829 - RNA, 21 nt, Human adenovirus E
cggcgucgugcacgcagcagc

SEQ ID NO: 1575830 - RNA, 17 nt, Human adenovirus E
cccucuucccagcucug

SEQ ID NO: 1575831 - RNA, 21 nt, Human adenovirus E
acccacgugagccgcgcccug

SEQ ID NO: 1575832 - RNA, 22 nt, Human adenovirus E
ugaugcaaaacuaacacuuugc

SEQ ID NO: 1575833 - RNA, 19 nt, Human adenovirus E
gcucucacagaucacggga

SEQ ID NO: 1575834 - RNA, 18 nt, Human adenovirus E
caggccaugcaacgcauc

SEQ ID NO: 1575835 - RNA, 17 nt, Human adenovirus E
accaggugcucaucaag

SEQ ID NO: 1575836 - RNA, 21 nt, Human adenovirus E
aggcguccgcccuugcgcgag

SEQ ID NO: 1575837 - RNA, 19 nt, Human adenovirus E
gccucugggugaaggccac

SEQ ID NO: 1575838 - RNA, 17 nt, Human adenovirus E
cgaggccaucggccagg

SEQ ID NO: 1575839 - RNA, 17 nt, Human adenovirus E
aaccuauggcagcaagg

SEQ ID NO: 1575840 - RNA, 19 nt, Human adenovirus E
acuaggacguccagagcgc

SEQ ID NO: 1575841 - RNA, 12 nt, Human adenovirus E
aaauccacagcg

SEQ ID NO: 1575842 - RNA, 17 nt, Human adenovirus E
ccacaauuacucacacc

SEQ ID NO: 1575843 - RNA, 19 nt, Human adenovirus E
ccggcgcgcuccacggugg

SEQ ID NO: 1575844 - RNA, 19 nt, Human adenovirus E
cccaacaaaugccagcuga

SEQ ID NO: 1575845 - RNA, 16 nt, Human adenovirus E
gcggaugcuggcgcgc

SEQ ID NO: 1575846 - RNA, 20 nt, Human adenovirus E
ggcgcgugcaguggcgcggg

SEQ ID NO: 1575847 - RNA, 13 nt, Human adenovirus E
gcagugcucaggu

SEQ ID NO: 1575848 - RNA, 19 nt, Human adenovirus E
ggcaauccucgcacagaac

SEQ ID NO: 1575849 - RNA, 20 nt, Human adenovirus E
cauacgugcccaagcagaac

SEQ ID NO: 1575850 - RNA, 15 nt, Human adenovirus E
cgucaagcugcugcu

SEQ ID NO: 1575851 - RNA, 17 nt, Human adenovirus E
agcggcgagggccugcu

SEQ ID NO: 1575852 - RNA, 14 nt, Human adenovirus E
cgcggcgacgaggc

SEQ ID NO: 1575853 - RNA, 13 nt, Human adenovirus E
cuccucccucagc

SEQ ID NO: 1575854 - RNA, 23 nt, Human adenovirus E
cgggggugcgcucccggcggcgc

SEQ ID NO: 1575855 - RNA, 21 nt, Human adenovirus E
gcuuaaaaccuauggcagcaa

SEQ ID NO: 1575856 - RNA, 14 nt, Human adenovirus E
gcagaccaaccugg

SEQ ID NO: 1575857 - RNA, 24 nt, Human adenovirus E
acgcgcucagcaccgaggaggagc

SEQ ID NO: 1575858 - RNA, 13 nt, Human adenovirus E
cggcgcggccagc

SEQ ID NO: 1575859 - RNA, 16 nt, Human adenovirus E
caaccaggccgugcag

SEQ ID NO: 1575860 - RNA, 15 nt, Human adenovirus E
gaggggcggaacagc

SEQ ID NO: 1575861 - RNA, 19 nt, Human adenovirus E
ccguccucuucccacuccc

SEQ ID NO: 1575862 - RNA, 21 nt, Human adenovirus E
uggcagcagugucuggaggag

SEQ ID NO: 1575863 - RNA, 17 nt, Human adenovirus E
caaccaggccgugcagc

SEQ ID NO: 1575864 - RNA, 14 nt, Human adenovirus E
caaucaggcagcac

SEQ ID NO: 1575865 - RNA, 19 nt, Human adenovirus E
cgaggacgagggcaugcaa

SEQ ID NO: 1575866 - RNA, 17 nt, Human adenovirus E
gcggugcguuccagcau

SEQ ID NO: 1575867 - RNA, 13 nt, Human adenovirus E
gcacccgcccccc

SEQ ID NO: 1575868 - RNA, 22 nt, Human adenovirus E
gggcagacggucgaugaagcgc

SEQ ID NO: 1575869 - RNA, 19 nt, Human adenovirus E
ccuuguacgauaccacccg

SEQ ID NO: 1575870 - RNA, 23 nt, Human adenovirus E
agcccgcgcccgcccagucgcag

SEQ ID NO: 1575871 - RNA, 22 nt, Human adenovirus E
aucccaacaaaugccagcugag

SEQ ID NO: 1575872 - RNA, 17 nt, Human adenovirus E
cuggaucuuugugcgca

SEQ ID NO: 1575873 - RNA, 16 nt, Human adenovirus E
caagaagaggcagcag

SEQ ID NO: 1575874 - RNA, 19 nt, Human adenovirus E
ucaccgccccgcucagggu

SEQ ID NO: 1575875 - RNA, 13 nt, Human adenovirus E
auggaggugcaga

SEQ ID NO: 1575876 - RNA, 20 nt, Human adenovirus E
cucgcgaggcauacgugccc

SEQ ID NO: 1575877 - RNA, 18 nt, Human adenovirus E
acucagguguccagcugg

SEQ ID NO: 1575878 - RNA, 14 nt, Human adenovirus E
aucugcaccucaca

SEQ ID NO: 1575879 - RNA, 18 nt, Human adenovirus E
gaacacgcugcccacgua

SEQ ID NO: 1575880 - RNA, 15 nt, Human adenovirus E
gcaugcgaguuggag

SEQ ID NO: 1575881 - RNA, 23 nt, Human adenovirus E
gcaagaucuccaacguggagcug

SEQ ID NO: 1575882 - RNA, 13 nt, Human adenovirus E
accucgcccugcu

SEQ ID NO: 1575883 - RNA, 20 nt, Human adenovirus E
  misc_feature (8)..(8): n is a, c, g, or u
cccaagcnugcaccaacccu

SEQ ID NO: 1575884 - RNA, 21 nt, Human adenovirus E
gcauguugaucaucgccuugu

SEQ ID NO: 1575885 - RNA, 18 nt, Human adenovirus E
gcauucuuaagcacaccc

SEQ ID NO: 1575886 - RNA, 16 nt, Human adenovirus E
gcaauugaccaugagu

SEQ ID NO: 1575887 - RNA, 16 nt, Human adenovirus E
cugagcgaccaggagc

SEQ ID NO: 1575888 - RNA, 21 nt, Human adenovirus E
cgcaagaggcagcccuuccag

SEQ ID NO: 1575889 - RNA, 21 nt, Human adenovirus E
ggucgcugagcccgugcugcu

SEQ ID NO: 1575890 - RNA, 22 nt, Human adenovirus E
uaugccaucuuccagcagaguc

SEQ ID NO: 1575891 - RNA, 23 nt, Human adenovirus E
auguuuucugccaacaccacuuc

SEQ ID NO: 1575892 - RNA, 14 nt, Human adenovirus E
ccacacacacagau

SEQ ID NO: 1575893 - RNA, 17 nt, Human adenovirus E
gcggaucucgcucaggu

SEQ ID NO: 1575894 - RNA, 14 nt, Human adenovirus E
gcuggcggugcuca

SEQ ID NO: 1575895 - RNA, 18 nt, Human adenovirus E
acauccccgcgcuccugg

SEQ ID NO: 1575896 - RNA, 20 nt, Human adenovirus E
acuuccucuucuuccuccuc

SEQ ID NO: 1575897 - RNA, 14 nt, Human adenovirus E
ggggcgugcaggcc

SEQ ID NO: 1575898 - RNA, 13 nt, Human adenovirus E
cacaccaccacag

SEQ ID NO: 1575899 - RNA, 17 nt, Human adenovirus E
caggcgccagcgccggc

SEQ ID NO: 1575900 - RNA, 22 nt, Human adenovirus E
ccauagcuuaccgagcagcagc

SEQ ID NO: 1575901 - RNA, 15 nt, Human adenovirus E
gagucgcggaugaag

SEQ ID NO: 1575902 - RNA, 13 nt, Human adenovirus E
uguaccccgguuc

SEQ ID NO: 1575903 - RNA, 17 nt, Human adenovirus E
ccugugggaccugcugg

SEQ ID NO: 1575904 - RNA, 13 nt, Human adenovirus E
gaagaggcagcag

SEQ ID NO: 1575905 - RNA, 22 nt, Human adenovirus E
caggacccuacguagaagaggu

SEQ ID NO: 1575906 - RNA, 14 nt, Human adenovirus E
cggcgcugcagagc

SEQ ID NO: 1575907 - RNA, 20 nt, Human adenovirus E
ggagggcgaguaccuggaag

SEQ ID NO: 1575908 - RNA, 19 nt, Human adenovirus E
uagcucggcuucgacaccu

SEQ ID NO: 1575909 - RNA, 12 nt, Human adenovirus E
cuaaagauggaa

SEQ ID NO: 1575910 - RNA, 15 nt, Human adenovirus E
cagagccccuuccgc

SEQ ID NO: 1575911 - RNA, 17 nt, Human adenovirus E
ucgagcugacccauuuc

SEQ ID NO: 1575912 - RNA, 22 nt, Human adenovirus E
ugggacagcacucaggcagagg

SEQ ID NO: 1575913 - RNA, 14 nt, Human adenovirus E
gauccacggccagg

SEQ ID NO: 1575914 - RNA, 21 nt, Human adenovirus E
cagagguugccagcucgucug

SEQ ID NO: 1575915 - RNA, 17 nt, Human adenovirus E
cacauacaaagccucag

SEQ ID NO: 1575916 - RNA, 12 nt, Human adenovirus E
gcuccagcucca

SEQ ID NO: 1575917 - RNA, 21 nt, Human adenovirus E
cccagcagcaacuuccagcca

SEQ ID NO: 1575918 - RNA, 21 nt, Human adenovirus E
acgucuacaaggcccugggca

SEQ ID NO: 1575919 - RNA, 18 nt, Human adenovirus E
ucaggccccgcagcaguc

SEQ ID NO: 1575920 - RNA, 22 nt, Human adenovirus E
cagcccgauggcaaucggugcg

SEQ ID NO: 1575921 - RNA, 23 nt, Human adenovirus E
cucccggaggaggggggccaccu

SEQ ID NO: 1575922 - RNA, 22 nt, Human adenovirus E
cgcuagcagccgcggccagggg

SEQ ID NO: 1575923 - RNA, 16 nt, Human adenovirus E
cgcagggccaggcgca

SEQ ID NO: 1575924 - RNA, 22 nt, Human adenovirus E
caccuggaccacugccgccgcu

SEQ ID NO: 1575925 - RNA, 15 nt, Human adenovirus E
ccacuaugcagcuca

SEQ ID NO: 1575926 - RNA, 18 nt, Human adenovirus E
gcagugucuggaggagca

SEQ ID NO: 1575927 - RNA, 19 nt, Human adenovirus E
acgccugcugggccuuggc

SEQ ID NO: 1575928 - RNA, 14 nt, Human adenovirus E
ucgacucccaccug

SEQ ID NO: 1575929 - RNA, 17 nt, Human adenovirus E
auagcacucaacccacc

SEQ ID NO: 1575930 - RNA, 18 nt, Human adenovirus E
gaacaccaucagggccgg

SEQ ID NO: 1575931 - RNA, 16 nt, Human adenovirus E
acagcugaggauuguc

SEQ ID NO: 1575932 - RNA, 17 nt, Human adenovirus E
acacaccaccacagcaa

SEQ ID NO: 1575933 - RNA, 15 nt, Human adenovirus E
ccgcucucugcucaa

SEQ ID NO: 1575934 - RNA, 17 nt, Human adenovirus E
ucgcaucaggccccgca

SEQ ID NO: 1575935 - RNA, 14 nt, Human adenovirus E
gaugaccugggcgg

SEQ ID NO: 1575936 - RNA, 18 nt, Human adenovirus E
agggcguuggagaggagc

SEQ ID NO: 1575937 - RNA, 13 nt, Human adenovirus E
cggcgacuaccuc

SEQ ID NO: 1575938 - RNA, 12 nt, Human adenovirus E
aagcaacauaag

SEQ ID NO: 1575939 - RNA, 19 nt, Human adenovirus E
ccaccgcgaguccaaccug

SEQ ID NO: 1575940 - RNA, 22 nt, Human adenovirus E
gccgaaaaagaaaaacagccau

SEQ ID NO: 1575941 - RNA, 21 nt, Human adenovirus E
cguuacugucguugucggauc

SEQ ID NO: 1575942 - RNA, 15 nt, Human adenovirus E
cccgagggccgcugg

SEQ ID NO: 1575943 - RNA, 13 nt, Human adenovirus E
caaacgcccaaaa

SEQ ID NO: 1575944 - RNA, 20 nt, Human adenovirus E
gcuguggagccacugcuacc

SEQ ID NO: 1575945 - RNA, 21 nt, Human adenovirus E
guauccgcagcagcgagcugg

SEQ ID NO: 1575946 - RNA, 17 nt, Human adenovirus E
aacagguggguaaaucg

SEQ ID NO: 1575947 - RNA, 14 nt, Human adenovirus E
cccugggccugaug

SEQ ID NO: 1575948 - RNA, 11 nt, Human adenovirus E
guguugaaauu

SEQ ID NO: 1575949 - RNA, 15 nt, Human adenovirus E
uucuuccuccuccac

SEQ ID NO: 1575950 - RNA, 12 nt, Human adenovirus E
ucaaaaucucug

SEQ ID NO: 1575951 - RNA, 15 nt, Human adenovirus E
gaaaucgcaguuggg

SEQ ID NO: 1575952 - RNA, 21 nt, Human adenovirus E
guggucagcgacgagcagcug

SEQ ID NO: 1575953 - RNA, 14 nt, Human adenovirus E
agcugaccaaccug

SEQ ID NO: 1575954 - RNA, 13 nt, Human adenovirus E
agccgccuggacc

SEQ ID NO: 1575955 - RNA, 12 nt, Human adenovirus E
acgugcagacca

SEQ ID NO: 1575956 - RNA, 18 nt, Human adenovirus E
ggaggugugcgugagggc

SEQ ID NO: 1575957 - RNA, 12 nt, Human adenovirus E
cgcugcacggga

SEQ ID NO: 1575958 - RNA, 19 nt, Human adenovirus E
ggcagguccagaccucggc

SEQ ID NO: 1575959 - RNA, 20 nt, Human adenovirus E
accaccugcaucugcugcug

SEQ ID NO: 1575960 - RNA, 21 nt, Human adenovirus E
ccagcccgccaacgugccccg

SEQ ID NO: 1575961 - RNA, 23 nt, Human adenovirus E
gccagcugaguuuucagcccgau

SEQ ID NO: 1575962 - RNA, 13 nt, Human adenovirus E
aacaggaagaacc

SEQ ID NO: 1575963 - RNA, 20 nt, Human adenovirus E
ggaacgagaccgagcuccag

SEQ ID NO: 1575964 - RNA, 17 nt, Human adenovirus E
ggccguggcccagcgcg

SEQ ID NO: 1575965 - RNA, 20 nt, Human adenovirus E
aggacccggagacgcgcggc

SEQ ID NO: 1575966 - RNA, 16 nt, Human adenovirus E
uacaacgcgcugcugg

SEQ ID NO: 1575967 - RNA, 15 nt, Human adenovirus E
cagcgcgcgcugccc

SEQ ID NO: 1575968 - RNA, 17 nt, Human adenovirus E
gcagcguccgcgucagg

SEQ ID NO: 1575969 - RNA, 16 nt, Human adenovirus E
cacugccgccgcuucc

SEQ ID NO: 1575970 - RNA, 12 nt, Human adenovirus E
caggcagcaccg

SEQ ID NO: 1575971 - RNA, 13 nt, Human adenovirus E
gcaagggcccagc

SEQ ID NO: 1575972 - RNA, 14 nt, Human adenovirus E
ugcgccaggccugc

SEQ ID NO: 1575973 - RNA, 17 nt, Human adenovirus E
aaacaagaagcugaaag

SEQ ID NO: 1575974 - RNA, 17 nt, Human adenovirus E
accacaaaaacuacacc

SEQ ID NO: 1575975 - RNA, 15 nt, Human adenovirus E
agauggcaccucucg

SEQ ID NO: 1575976 - RNA, 16 nt, Human adenovirus E
cagcagccccaggcca

SEQ ID NO: 1575977 - RNA, 16 nt, Human adenovirus E
ggaggagacugauggc

SEQ ID NO: 1575978 - RNA, 19 nt, Human adenovirus E
ggccacccccagcgccgcg

SEQ ID NO: 1575979 - RNA, 23 nt, Human adenovirus E
gcagcguguucuccccccgaccg

SEQ ID NO: 1575980 - RNA, 12 nt, Human adenovirus E
auaccagcagcc

SEQ ID NO: 1575981 - RNA, 19 nt, Human adenovirus E
gccccccugcucccagagc

SEQ ID NO: 1575982 - RNA, 15 nt, Human adenovirus E
ggcagcggggacaga

SEQ ID NO: 1575983 - RNA, 23 nt, Human adenovirus E
cuagaacagucagcgcucaccgc

SEQ ID NO: 1575984 - RNA, 13 nt, Human adenovirus E
cacgagccggggc

SEQ ID NO: 1575985 - RNA, 20 nt, Human adenovirus E
guucauuuuugcuugcugcu

SEQ ID NO: 1575986 - RNA, 18 nt, Human adenovirus E
ugagcggcccugccaacc

SEQ ID NO: 1575987 - RNA, 20 nt, Human adenovirus E
gccagagcaggaagcagaga

SEQ ID NO: 1575988 - RNA, 13 nt, Human adenovirus E
cgggcggcagggg

SEQ ID NO: 1575989 - RNA, 22 nt, Human adenovirus E
caggcacggguucgugcgccag

SEQ ID NO: 1575990 - RNA, 13 nt, Human adenovirus E
gacucccucagca

SEQ ID NO: 1575991 - RNA, 14 nt, Human adenovirus E
caagcccagcacca

SEQ ID NO: 1575992 - RNA, 23 nt, Human adenovirus E
gugggcguaggagucuugcagcu

SEQ ID NO: 1575993 - RNA, 13 nt, Human adenovirus E
cgcggcggugccc

SEQ ID NO: 1575994 - RNA, 20 nt, Human adenovirus E
cgucuaccccuacgaugcag

SEQ ID NO: 1575995 - RNA, 21 nt, Human adenovirus E
ccgccuggggcagaacgugcu

SEQ ID NO: 1575996 - RNA, 21 nt, Human adenovirus E
ucuccaccauuaaauauacug

SEQ ID NO: 1575997 - RNA, 17 nt, Human adenovirus E
gguggaauuugagcugc

SEQ ID NO: 1575998 - RNA, 19 nt, Human adenovirus E
uggcaccagacgaugggcg

SEQ ID NO: 1575999 - RNA, 21 nt, Human adenovirus E
gcuugccguccuucucgguga

SEQ ID NO: 1576000 - RNA, 21 nt, Human adenovirus E
cacccgguuguaccuggugga

SEQ ID NO: 1576001 - RNA, 17 nt, Human adenovirus E
ugcaucucuucagcacu

SEQ ID NO: 1576002 - RNA, 14 nt, Human adenovirus E
acguggagcugacc

SEQ ID NO: 1576003 - RNA, 13 nt, Human adenovirus E
gcccccgcuggag

SEQ ID NO: 1576004 - RNA, 12 nt, Human adenovirus E
auugacaagcgg

SEQ ID NO: 1576005 - RNA, 22 nt, Human adenovirus E
ccaccugggcgagguugagcuc

SEQ ID NO: 1576006 - RNA, 14 nt, Human adenovirus E
uagcuaccgccucu

SEQ ID NO: 1576007 - RNA, 20 nt, Human adenovirus E
aaagcgggaggguucucuaa

SEQ ID NO: 1576008 - RNA, 21 nt, Human adenovirus E
ggcgugccccagggcauggga

SEQ ID NO: 1576009 - RNA, 13 nt, Human adenovirus E
ucucuccagcacc

SEQ ID NO: 1576010 - RNA, 17 nt, Human adenovirus E
ggugauccuccaccaga

SEQ ID NO: 1576011 - RNA, 19 nt, Human adenovirus E
ccgcgcccugggccaggac

SEQ ID NO: 1576012 - RNA, 14 nt, Human adenovirus E
aucauugagcaccc

SEQ ID NO: 1576013 - RNA, 16 nt, Human adenovirus E
gccccgccgcccagcc

SEQ ID NO: 1576014 - RNA, 13 nt, Human adenovirus E
gaaagccuggugg

SEQ ID NO: 1576015 - RNA, 14 nt, Human adenovirus E
ccgccgcggccgcc

SEQ ID NO: 1576016 - RNA, 18 nt, Human adenovirus E
ucggacuucgugccgcug

SEQ ID NO: 1576017 - RNA, 21 nt, Human adenovirus E
cuuccccgagaaccagauccu

SEQ ID NO: 1576018 - RNA, 23 nt, Human adenovirus E
ucuggaggaagacgaggaggagg

SEQ ID NO: 1576019 - RNA, 13 nt, Human adenovirus E
ggaggaugcagca

SEQ ID NO: 1576020 - RNA, 22 nt, Human adenovirus E
cagcugaagcaacugcagccgu

SEQ ID NO: 1576021 - RNA, 14 nt, Human adenovirus E
agcaggggcgcagg

SEQ ID NO: 1576022 - RNA, 14 nt, Human adenovirus E
augcaggggcggca

SEQ ID NO: 1576023 - RNA, 23 nt, Human adenovirus E
caccgugcggugagcgccagcag

SEQ ID NO: 1576024 - RNA, 15 nt, Human adenovirus E
ggggagaugagcugg

SEQ ID NO: 1576025 - RNA, 15 nt, Human adenovirus E
guccagaaaaagcca

SEQ ID NO: 1576026 - RNA, 15 nt, Human adenovirus E
uggacccaggccaug

SEQ ID NO: 1576027 - RNA, 16 nt, Human adenovirus E
aggccggagcugucca

SEQ ID NO: 1576028 - RNA, 21 nt, Human adenovirus E
cgagcaguuauuuuuccucca

SEQ ID NO: 1576029 - RNA, 17 nt, Human adenovirus E
ccgaccgggugcuaacg

SEQ ID NO: 1576030 - RNA, 18 nt, Human adenovirus E
ggcaccucucgcccccgc

SEQ ID NO: 1576031 - RNA, 19 nt, Human adenovirus E
agcccacggccgccagcuc

SEQ ID NO: 1576032 - RNA, 18 nt, Human adenovirus E
cucacagcucaacagcug

SEQ ID NO: 1576033 - RNA, 14 nt, Human adenovirus E
uccuccacccuccc

SEQ ID NO: 1576034 - RNA, 14 nt, Human adenovirus E
acaaaaaugaacau

SEQ ID NO: 1576035 - RNA, 20 nt, Human adenovirus E
gaaagccccgcaaaaucaag

SEQ ID NO: 1576036 - RNA, 15 nt, Human adenovirus E
ccgagccacagcgac

SEQ ID NO: 1576037 - RNA, 17 nt, Human adenovirus E
uccaucauccccacgcc

SEQ ID NO: 1576038 - RNA, 23 nt, Human adenovirus E
gcucaaccccggcuucccccagg

SEQ ID NO: 1576039 - RNA, 17 nt, Human adenovirus E
gaucccgccccaguacg

SEQ ID NO: 1576040 - RNA, 19 nt, Human adenovirus E
ugcggcgguacaccucgcc

SEQ ID NO: 1576041 - RNA, 15 nt, Human adenovirus E
guuucaauguggauc

SEQ ID NO: 1576042 - RNA, 20 nt, Human adenovirus E
gcacagggacgauccccggg

SEQ ID NO: 1576043 - RNA, 14 nt, Human adenovirus E
aauuuuuagccaua

SEQ ID NO: 1576044 - RNA, 13 nt, Human adenovirus E
gcccuggccaccu

SEQ ID NO: 1576045 - RNA, 17 nt, Human adenovirus E
gaaggagaacaucgugg

SEQ ID NO: 1576046 - RNA, 21 nt, Human adenovirus E
ucaaccccggcuucccccagg

SEQ ID NO: 1576047 - RNA, 24 nt, Human adenovirus E
gcagccaggguccgguccuuccag

SEQ ID NO: 1576048 - RNA, 14 nt, Human adenovirus E
gucugcagcgggcc

SEQ ID NO: 1576049 - RNA, 14 nt, Human adenovirus E
uguuccugaugcag

SEQ ID NO: 1576050 - RNA, 20 nt, Human adenovirus E
ccagcgaaggguaugcuuuc

SEQ ID NO: 1576051 - RNA, 20 nt, Human adenovirus E
ucucagccaaucagcgcccc

SEQ ID NO: 1576052 - RNA, 18 nt, Human adenovirus E
agccgccgggccuuggag

SEQ ID NO: 1576053 - RNA, 14 nt, Human adenovirus E
ggacccgugaguuu

SEQ ID NO: 1576054 - RNA, 15 nt, Human adenovirus E
ucagacccacugcug

SEQ ID NO: 1576055 - RNA, 18 nt, Human adenovirus E
agccauagcaaccaacau

SEQ ID NO: 1576056 - RNA, 13 nt, Human adenovirus E
gcccgccaccugc

SEQ ID NO: 1576057 - RNA, 13 nt, Human adenovirus E
gaguaccuggaag

SEQ ID NO: 1576058 - RNA, 12 nt, Human adenovirus E
ugagcucuucgc

SEQ ID NO: 1576059 - RNA, 18 nt, Human adenovirus E
gggcccggaugcaggggc

SEQ ID NO: 1576060 - RNA, 24 nt, Human adenovirus E
gcugcccgacaugaugcaagaccc

SEQ ID NO: 1576061 - RNA, 16 nt, Human adenovirus E
cagaucccgccugggg

SEQ ID NO: 1576062 - RNA, 17 nt, Human adenovirus E
ggauggcuggcagagcc

SEQ ID NO: 1576063 - RNA, 17 nt, Human adenovirus E
acagcagcagagguugc

SEQ ID NO: 1576064 - RNA, 20 nt, Human adenovirus E
aaucccauccgcccaaggcc

SEQ ID NO: 1576065 - RNA, 23 nt, Human adenovirus E
gccccccggcggcgcgugcagug

SEQ ID NO: 1576066 - RNA, 15 nt, Human adenovirus E
gcaaccaccccugcc

SEQ ID NO: 1576067 - RNA, 13 nt, Human adenovirus E
cucuugcaggaca

SEQ ID NO: 1576068 - RNA, 12 nt, Human adenovirus E
cucggagcuggc

SEQ ID NO: 1576069 - RNA, 15 nt, Human adenovirus E
acccggcucugaacc

SEQ ID NO: 1576070 - RNA, 21 nt, Human adenovirus E
agcccacggccgccagcuccu

SEQ ID NO: 1576071 - RNA, 17 nt, Human adenovirus E
cagccagagcaggaagc

SEQ ID NO: 1576072 - RNA, 19 nt, Human adenovirus E
ggugcccgaggccgccagu

SEQ ID NO: 1576073 - RNA, 14 nt, Human adenovirus E
aucaccagcuggcc

SEQ ID NO: 1576074 - RNA, 12 nt, Human adenovirus E
cucucgccgccg

SEQ ID NO: 1576075 - RNA, 16 nt, Human adenovirus E
cgggacccugccgcug

SEQ ID NO: 1576076 - RNA, 21 nt, Human adenovirus E
cgaguugcaagggcccagcga

SEQ ID NO: 1576077 - RNA, 22 nt, Human adenovirus E
cccagaaaccggugacacacuc

SEQ ID NO: 1576078 - RNA, 14 nt, Human adenovirus E
gcugcugcugcugg

SEQ ID NO: 1576079 - RNA, 16 nt, Human adenovirus E
agcugcccgaggagca

SEQ ID NO: 1576080 - RNA, 12 nt, Human adenovirus E
gauccgcaccgg

SEQ ID NO: 1576081 - RNA, 20 nt, Human adenovirus E
cagggccauguucagggcgg

SEQ ID NO: 1576082 - RNA, 14 nt, Human adenovirus E
ccaagcgccagccc

SEQ ID NO: 1576083 - RNA, 21 nt, Human adenovirus E
ggaagcagagaaugagcagag

SEQ ID NO: 1576084 - RNA, 18 nt, Human adenovirus E
ggacaggguaucgcaauc

SEQ ID NO: 1576085 - RNA, 21 nt, Human adenovirus E
gggccauguucagggcggcca

SEQ ID NO: 1576086 - RNA, 23 nt, Human adenovirus E
ccacgcggggcgggagcugcggc

SEQ ID NO: 1576087 - RNA, 16 nt, Human adenovirus E
aucuucucuucucuuu

SEQ ID NO: 1576088 - RNA, 21 nt, Human adenovirus E
cugcccguucucgcucgccac

SEQ ID NO: 1576089 - RNA, 13 nt, Human adenovirus E
ggccaccucgccg

SEQ ID NO: 1576090 - RNA, 20 nt, Human adenovirus E
acgccugcugggccuuggcu

SEQ ID NO: 1576091 - RNA, 15 nt, Human adenovirus E
cuggaggagcagaac

SEQ ID NO: 1576092 - RNA, 21 nt, Human adenovirus E
ggccauguucagggcggccag

SEQ ID NO: 1576093 - RNA, 18 nt, Human adenovirus E
ccagcagcaacuuccagc

SEQ ID NO: 1576094 - RNA, 14 nt, Human adenovirus E
caguuacaccugcc

SEQ ID NO: 1576095 - RNA, 16 nt, Human adenovirus E
ccgggugauccuccac

SEQ ID NO: 1576096 - RNA, 20 nt, Human adenovirus E
cgccgcaccgcucccuggcc

SEQ ID NO: 1576097 - RNA, 18 nt, Human adenovirus E
cuuucauauccucuccga

SEQ ID NO: 1576098 - RNA, 12 nt, Human adenovirus E
cgccucaggcug

SEQ ID NO: 1576099 - RNA, 13 nt, Human adenovirus E
acuucaaaaugaa

SEQ ID NO: 1576100 - RNA, 19 nt, Human adenovirus E
caucaugguggucaggguc

SEQ ID NO: 1576101 - RNA, 15 nt, Human adenovirus E
uacaccacccucucc

SEQ ID NO: 1576102 - RNA, 14 nt, Human adenovirus E
cuuccagcaaagcc

SEQ ID NO: 1576103 - RNA, 15 nt, Human adenovirus E
gcaucuuggccugga

SEQ ID NO: 1576104 - RNA, 12 nt, Human adenovirus E
ggacgugcagcc

SEQ ID NO: 1576105 - RNA, 13 nt, Human adenovirus E
acgcacccgggcu

SEQ ID NO: 1576106 - RNA, 18 nt, Human adenovirus E
gcgcaagagucagagaaa

SEQ ID NO: 1576107 - RNA, 18 nt, Human adenovirus E
caccugcgagcccaaccc

SEQ ID NO: 1576108 - RNA, 13 nt, Human adenovirus E
ugcagcaggcgau

SEQ ID NO: 1576109 - RNA, 18 nt, Human adenovirus E
cucuucgggggcagaggc

SEQ ID NO: 1576110 - RNA, 13 nt, Human adenovirus E
cggccgcgcaccu

SEQ ID NO: 1576111 - RNA, 23 nt, Human adenovirus E
acgccuuacauguggagcuacca

SEQ ID NO: 1576112 - RNA, 19 nt, Human adenovirus E
ccagcagaaaaccagcagc

SEQ ID NO: 1576113 - RNA, 20 nt, Human adenovirus E
cuggcugacguccugcagga

SEQ ID NO: 1576114 - RNA, 15 nt, Human adenovirus E
ucgacaccuggacca

SEQ ID NO: 1576115 - RNA, 19 nt, Human adenovirus E
ccgcggagcacgaggagga

SEQ ID NO: 1576116 - RNA, 23 nt, Human adenovirus E
ggcaacauccccgcgcuccugga

SEQ ID NO: 1576117 - RNA, 16 nt, Human adenovirus E
ggacgcucgcgaggca

SEQ ID NO: 1576118 - RNA, 20 nt, Human adenovirus E
gcagccccccugcucccaga

SEQ ID NO: 1576119 - RNA, 15 nt, Human adenovirus E
cgacuaccuccaccu

SEQ ID NO: 1576120 - RNA, 14 nt, Human adenovirus E
gcagcacuggaaca

SEQ ID NO: 1576121 - RNA, 15 nt, Human adenovirus E
gcacgaggaggagcu

SEQ ID NO: 1576122 - RNA, 17 nt, Human adenovirus E
ucaccuccacagccccu

SEQ ID NO: 1576123 - RNA, 13 nt, Human adenovirus E
ccgcucucugcuc

SEQ ID NO: 1576124 - RNA, 16 nt, Human adenovirus E
ccuggaagccacccug

SEQ ID NO: 1576125 - RNA, 17 nt, Human adenovirus E
cgagaagcagcagcagc

SEQ ID NO: 1576126 - RNA, 11 nt, Human adenovirus E
uugcaagcgcc

SEQ ID NO: 1576127 - RNA, 16 nt, Human adenovirus E
ucacaugaccgccuuc

SEQ ID NO: 1576128 - RNA, 17 nt, Human adenovirus E
aggcagcgaccgacgcc

SEQ ID NO: 1576129 - RNA, 13 nt, Human adenovirus E
gaaccccaccagc

SEQ ID NO: 1576130 - RNA, 13 nt, Human adenovirus E
caagcccagcacc

SEQ ID NO: 1576131 - RNA, 13 nt, Human adenovirus E
uucuuccuccucc

SEQ ID NO: 1576132 - RNA, 14 nt, Human adenovirus E
caucgaccugauga

SEQ ID NO: 1576133 - RNA, 22 nt, Human adenovirus E
ccgucgcgaccuuucugaaucu

SEQ ID NO: 1576134 - RNA, 17 nt, Human adenovirus E
gcuccauugcagggccu

SEQ ID NO: 1576135 - RNA, 19 nt, Human adenovirus E
cgucucgagauccacggga

SEQ ID NO: 1576136 - RNA, 21 nt, Human adenovirus E
gcgcaucuccagguggccggg

SEQ ID NO: 1576137 - RNA, 15 nt, Human adenovirus E
gaaggugcggggguc

SEQ ID NO: 1576138 - RNA, 13 nt, Human adenovirus E
gccccaggccaac

SEQ ID NO: 1576139 - RNA, 14 nt, Human adenovirus E
cgagauccacggga

SEQ ID NO: 1576140 - RNA, 12 nt, Human adenovirus E
cagccgccgcca

SEQ ID NO: 1576141 - RNA, 16 nt, Human adenovirus E
cuaccucgacccccag

SEQ ID NO: 1576142 - RNA, 14 nt, Human adenovirus E
ggggcaguccgacc

SEQ ID NO: 1576143 - RNA, 14 nt, Human adenovirus E
ccacggcggcggca

SEQ ID NO: 1576144 - RNA, 13 nt, Human adenovirus E
gaggcccuggcca

SEQ ID NO: 1576145 - RNA, 17 nt, Human adenovirus E
auucuggagcaggcggc

SEQ ID NO: 1576146 - RNA, 20 nt, Human adenovirus E
cgacaaaaaucagacccacu

SEQ ID NO: 1576147 - RNA, 18 nt, Human adenovirus E
cacgagaaccgccugggg

SEQ ID NO: 1576148 - RNA, 17 nt, Human adenovirus E
cccgcguucugcgcgcg

SEQ ID NO: 1576149 - RNA, 15 nt, Human adenovirus E
ggugcgggggucccc

SEQ ID NO: 1576150 - RNA, 19 nt, Human adenovirus E
acugccgcugcaaccucug

SEQ ID NO: 1576151 - RNA, 17 nt, Human adenovirus E
cagcagugucuggagga

SEQ ID NO: 1576152 - RNA, 14 nt, Human adenovirus E
gcugcggcgcggcc

SEQ ID NO: 1576153 - RNA, 20 nt, Human adenovirus E
guauacaugaauggagaugu

SEQ ID NO: 1576154 - RNA, 22 nt, Human adenovirus E
  misc_feature (6)..(6): n is a, c, g, or u
cgggcnugggcgugcagaccgu

SEQ ID NO: 1576155 - RNA, 14 nt, Human adenovirus E
uguggacagcagcg

SEQ ID NO: 1576156 - RNA, 17 nt, Human adenovirus E
cccaauuuaaaagcuua

SEQ ID NO: 1576157 - RNA, 23 nt, Human adenovirus E
aucgcgcgcgaggaggugacccu

SEQ ID NO: 1576158 - RNA, 23 nt, Human adenovirus E
gggcccggaugcaggggcggcag

SEQ ID NO: 1576159 - RNA, 23 nt, Human adenovirus E
gacgcccuuuucaaccugggucc

SEQ ID NO: 1576160 - RNA, 18 nt, Human adenovirus E
cugcacuggcagcccagc

SEQ ID NO: 1576161 - RNA, 23 nt, Human adenovirus E
agguccagcgaaggguaugcuuu

SEQ ID NO: 1576162 - RNA, 15 nt, Human adenovirus E
ggaugcagcagcuga

SEQ ID NO: 1576163 - RNA, 18 nt, Human adenovirus E
gccugcugggccuuggcu

SEQ ID NO: 1576164 - RNA, 16 nt, Human adenovirus E
ucaugguauuguuauu

SEQ ID NO: 1576165 - RNA, 23 nt, Human adenovirus E
uggggccguagaugaccccgaug

SEQ ID NO: 1576166 - RNA, 18 nt, Human adenovirus E
gaacugguugacggccuu

SEQ ID NO: 1576167 - RNA, 12 nt, Human adenovirus E
cuugggcggcug

SEQ ID NO: 1576168 - RNA, 15 nt, Human adenovirus E
caguuuuuccaacaa

SEQ ID NO: 1576169 - RNA, 21 nt, Human adenovirus E
agcgcgcgucgcccaucuccg

SEQ ID NO: 1576170 - RNA, 23 nt, Human adenovirus E
uaaccgccccgccgcccagcccc

SEQ ID NO: 1576171 - RNA, 16 nt, Human adenovirus E
cugaaagagcucugca

SEQ ID NO: 1576172 - RNA, 16 nt, Human adenovirus E
caggagcacagggacg

SEQ ID NO: 1576173 - RNA, 21 nt, Human adenovirus E
gaccgccgcggccgccgugag

SEQ ID NO: 1576174 - RNA, 16 nt, Human adenovirus E
gucgggggggucggca

SEQ ID NO: 1576175 - RNA, 17 nt, Human adenovirus E
auggaggaagacuggga

SEQ ID NO: 1576176 - RNA, 16 nt, Human adenovirus E
cucgacucccaccugc

SEQ ID NO: 1576177 - RNA, 16 nt, Human adenovirus E
gaagcaguaguacaga

SEQ ID NO: 1576178 - RNA, 14 nt, Human adenovirus E
cacgggguugcagc

SEQ ID NO: 1576179 - RNA, 22 nt, Human adenovirus E
ucuaugccaucuuccagcagag

SEQ ID NO: 1576180 - RNA, 13 nt, Human adenovirus E
gaugcagcaggcg

SEQ ID NO: 1576181 - RNA, 14 nt, Human adenovirus E
cggcgaugcagccc

SEQ ID NO: 1576182 - RNA, 18 nt, Human adenovirus E
ucguucucuccagcacca

SEQ ID NO: 1576183 - RNA, 21 nt, Human adenovirus E
uggaagagggcgaggggcugg

SEQ ID NO: 1576184 - RNA, 13 nt, Human adenovirus E
cugaaacucaccc

SEQ ID NO: 1576185 - RNA, 11 nt, Human adenovirus E
ccgcaccugcc

SEQ ID NO: 1576186 - RNA, 14 nt, Human adenovirus E
cugcccgacggcca

SEQ ID NO: 1576187 - RNA, 17 nt, Human adenovirus E
ugaaccugacacaccac

SEQ ID NO: 1576188 - RNA, 16 nt, Human adenovirus E
agggcgaguaccugga

SEQ ID NO: 1576189 - RNA, 17 nt, Human adenovirus E
aggccacgugggacggg

SEQ ID NO: 1576190 - RNA, 21 nt, Human adenovirus E
aacgcuccggaauccugcccg

SEQ ID NO: 1576191 - RNA, 21 nt, Human adenovirus E
ucgagcuugguggcgaaggag

SEQ ID NO: 1576192 - RNA, 22 nt, Human adenovirus E
uggaccacggcaaccccacgcc

SEQ ID NO: 1576193 - RNA, 16 nt, Human adenovirus E
ccggcgcgacccucgu

SEQ ID NO: 1576194 - RNA, 17 nt, Human adenovirus E
cugaaaacaccaccugg

SEQ ID NO: 1576195 - RNA, 23 nt, Human adenovirus E
gacgauccccgggcgucgcaggg

SEQ ID NO: 1576196 - RNA, 21 nt, Human adenovirus E
gcggccacggcggcggcagcg

SEQ ID NO: 1576197 - RNA, 15 nt, Human adenovirus E
cccugcucccagagc

SEQ ID NO: 1576198 - RNA, 16 nt, Human adenovirus E
agacugauggccacgg

SEQ ID NO: 1576199 - RNA, 21 nt, Human adenovirus E
cgccuggccaacuaccuggcc

SEQ ID NO: 1576200 - RNA, 21 nt, Human adenovirus E
gugcaggcaccgcagcuugcc

SEQ ID NO: 1576201 - RNA, 18 nt, Human adenovirus E
agcacccucagggcccgg

SEQ ID NO: 1576202 - RNA, 14 nt, Human adenovirus E
uaugcgcaggagca

SEQ ID NO: 1576203 - RNA, 20 nt, Human adenovirus E
ggucaucuugcaggucugcc

SEQ ID NO: 1576204 - RNA, 19 nt, Human adenovirus E
guuggacuugggugggagu

SEQ ID NO: 1576205 - RNA, 14 nt, Human adenovirus E
guucagggaggcgc

SEQ ID NO: 1576206 - RNA, 18 nt, Human adenovirus E
gcaccaacgugcagacca

SEQ ID NO: 1576207 - RNA, 21 nt, Human adenovirus E
cggaggccagcacccagacca

SEQ ID NO: 1576208 - RNA, 11 nt, Human adenovirus E
agcaaggagga

SEQ ID NO: 1576209 - RNA, 14 nt, Human adenovirus E
aggccgagccacag

SEQ ID NO: 1576210 - RNA, 13 nt, Human adenovirus E
gcgcuaccacccg

SEQ ID NO: 1576211 - RNA, 16 nt, Human adenovirus E
cgccgacgacagcagc

SEQ ID NO: 1576212 - RNA, 22 nt, Human adenovirus E
caacguggagcugaccaaccug

SEQ ID NO: 1576213 - RNA, 17 nt, Human adenovirus E
cccacggccgccagcuc

SEQ ID NO: 1576214 - RNA, 21 nt, Human adenovirus E
agcucugcaagcuccugcaga

SEQ ID NO: 1576215 - RNA, 19 nt, Human adenovirus E
cagaggaggaggagaugga

SEQ ID NO: 1576216 - RNA, 12 nt, Human adenovirus E
cauacuccaccu

SEQ ID NO: 1576217 - RNA, 17 nt, Human adenovirus E
agcgcuagcagccgcgg

SEQ ID NO: 1576218 - RNA, 19 nt, Human adenovirus E
gccccguccucuucccacu

SEQ ID NO: 1576219 - RNA, 17 nt, Human adenovirus E
gggcuggcgcgccuggg

SEQ ID NO: 1576220 - RNA, 20 nt, Human adenovirus E
caagaguuccaggcgguccc

SEQ ID NO: 1576221 - RNA, 19 nt, Human adenovirus E
ggccuuggaggcggcggca

SEQ ID NO: 1576222 - RNA, 12 nt, Human adenovirus E
ucucgccgccgc

SEQ ID NO: 1576223 - RNA, 14 nt, Human adenovirus E
ugaaacccuccggg

SEQ ID NO: 1576224 - RNA, 21 nt, Human adenovirus E
agcaguggcagcggccgaggc

SEQ ID NO: 1576225 - RNA, 16 nt, Human adenovirus E
caccaacgccaccguc

SEQ ID NO: 1576226 - RNA, 23 nt, Human adenovirus E
agccgguggagaaggauagcaag

SEQ ID NO: 1576227 - RNA, 20 nt, Human adenovirus E
caucaggccccgcagcaguc

SEQ ID NO: 1576228 - RNA, 12 nt, Human adenovirus E
aggccagcaccc

SEQ ID NO: 1576229 - RNA, 19 nt, Human adenovirus E
ccggaucuuucccacccuc

SEQ ID NO: 1576230 - RNA, 17 nt, Human adenovirus E
uaccucugccacaccug

SEQ ID NO: 1576231 - RNA, 17 nt, Human adenovirus E
ugaucccgcgaugcggg

SEQ ID NO: 1576232 - RNA, 15 nt, Human adenovirus E
caaacuaaccuccac

SEQ ID NO: 1576233 - RNA, 19 nt, Human adenovirus E
accgcaccgaggugccccu

SEQ ID NO: 1576234 - RNA, 12 nt, Human adenovirus E
cagcgcgagcgg

SEQ ID NO: 1576235 - RNA, 16 nt, Human adenovirus E
gcccggcgagcgcucc

SEQ ID NO: 1576236 - RNA, 14 nt, Human adenovirus E
cgagaagcagcagc

SEQ ID NO: 1576237 - RNA, 14 nt, Human adenovirus E
ggggcgcagggcau

SEQ ID NO: 1576238 - RNA, 13 nt, Human adenovirus E
caauaacaaaaaa

SEQ ID NO: 1576239 - RNA, 20 nt, Human adenovirus E
aacaccgccuaccgcagcug

SEQ ID NO: 1576240 - RNA, 12 nt, Human adenovirus E
guccaggccagc

SEQ ID NO: 1576241 - RNA, 16 nt, Human adenovirus E
caacagcaccaacgug

SEQ ID NO: 1576242 - RNA, 15 nt, Human adenovirus E
gcagccccaggccaa

SEQ ID NO: 1576243 - RNA, 16 nt, Human adenovirus E
cucugacgcuccuggu

SEQ ID NO: 1576244 - RNA, 18 nt, Human adenovirus E
cucgacuccguggccugg

SEQ ID NO: 1576245 - RNA, 15 nt, Human adenovirus E
gcaacaacagccccc

SEQ ID NO: 1576246 - RNA, 16 nt, Human adenovirus E
aggccaucggccaggc

SEQ ID NO: 1576247 - RNA, 16 nt, Human adenovirus E
ccauagccagccgacu

SEQ ID NO: 1576248 - RNA, 15 nt, Human adenovirus E
cgucgugcacgcagc

SEQ ID NO: 1576249 - RNA, 16 nt, Human adenovirus E
ggaauggcuguugaug

SEQ ID NO: 1576250 - RNA, 17 nt, Human adenovirus E
caaccgcacccgcgccg

SEQ ID NO: 1576251 - RNA, 13 nt, Human adenovirus E
gagcgcauccugc

SEQ ID NO: 1576252 - RNA, 13 nt, Human adenovirus E
gacggaugagcuc

SEQ ID NO: 1576253 - RNA, 17 nt, Human adenovirus E
cuccgggcacucccgca

SEQ ID NO: 1576254 - RNA, 11 nt, Human adenovirus E
uuuugaugcaa

SEQ ID NO: 1576255 - RNA, 15 nt, Human adenovirus E
ucgauuccucgggaa

SEQ ID NO: 1576256 - RNA, 15 nt, Human adenovirus E
cugagcgaccaggag

SEQ ID NO: 1576257 - RNA, 12 nt, Human adenovirus E
ccggagcagcug

SEQ ID NO: 1576258 - RNA, 19 nt, Human adenovirus E
gacccugaaagugcugacc

SEQ ID NO: 1576259 - RNA, 20 nt, Human adenovirus E
cugugggaccugcuggaggc

SEQ ID NO: 1576260 - RNA, 20 nt, Human adenovirus E
gaaacagguguugaugaugc

SEQ ID NO: 1576261 - RNA, 14 nt, Human adenovirus E
ccgaggagggcaag

SEQ ID NO: 1576262 - RNA, 16 nt, Human adenovirus E
gacaggcagcggggac

SEQ ID NO: 1576263 - RNA, 14 nt, Human adenovirus E
ggcgagguugagcu

SEQ ID NO: 1576264 - RNA, 15 nt, Human adenovirus E
cuucccccaggaugc

SEQ ID NO: 1576265 - RNA, 22 nt, Human adenovirus E
gacgcugcgcaacggccugccc

SEQ ID NO: 1576266 - RNA, 14 nt, Human adenovirus E
ccucgacucccacc

SEQ ID NO: 1576267 - RNA, 22 nt, Human adenovirus E
agccggcgcaaacccgggagcu

SEQ ID NO: 1576268 - RNA, 17 nt, Human adenovirus E
gggaggcuuccugcccg

SEQ ID NO: 1576269 - RNA, 21 nt, Human adenovirus E
cugccguagucuggagaagaa

SEQ ID NO: 1576270 - RNA, 15 nt, Human adenovirus E
ccgcggccaaccugg

SEQ ID NO: 1576271 - RNA, 21 nt, Human adenovirus E
gccggaucggggagaucuucc

SEQ ID NO: 1576272 - RNA, 13 nt, Human adenovirus E
ugaaacccuccgg

SEQ ID NO: 1576273 - RNA, 12 nt, Human adenovirus E
cggagcacgagg

SEQ ID NO: 1576274 - RNA, 20 nt, Human adenovirus E
caguuauuuuuccuccaccc

SEQ ID NO: 1576275 - RNA, 12 nt, Human adenovirus E
gcgccagcaggc

SEQ ID NO: 1576276 - RNA, 19 nt, Human adenovirus E
cauuucgcguacccggcuc

SEQ ID NO: 1576277 - RNA, 21 nt, Human adenovirus E
cugugccacccucgcucuggu

SEQ ID NO: 1576278 - RNA, 21 nt, Human adenovirus E
guugagggagagacagcugcc

SEQ ID NO: 1576279 - RNA, 19 nt, Human adenovirus E
gagcagaccuaccaggaga

SEQ ID NO: 1576280 - RNA, 21 nt, Human adenovirus E
ccuuggaagagggcgaggggc

SEQ ID NO: 1576281 - RNA, 19 nt, Human adenovirus E
ggcgagaucgagggcgagc

SEQ ID NO: 1576282 - RNA, 19 nt, Human adenovirus E
uguuaccacuaugcagcuc

SEQ ID NO: 1576283 - RNA, 17 nt, Human adenovirus E
caguuagucucuccacu

SEQ ID NO: 1576284 - RNA, 16 nt, Human adenovirus E
uccucccucagcaaua

SEQ ID NO: 1576285 - RNA, 23 nt, Human adenovirus E
ucgccgcaccgccgcugcaacca

SEQ ID NO: 1576286 - RNA, 13 nt, Human adenovirus E
ggaagaagaaagu

SEQ ID NO: 1576287 - RNA, 12 nt, Human adenovirus E
cgccgcagcagu

SEQ ID NO: 1576288 - RNA, 18 nt, Human adenovirus E
gcagcugaagcaacugca

SEQ ID NO: 1576289 - RNA, 23 nt, Human adenovirus E
aggccgucuacucgcagcagcug

SEQ ID NO: 1576290 - RNA, 15 nt, Human adenovirus E
ggugauccuccacca

SEQ ID NO: 1576291 - RNA, 17 nt, Human adenovirus E
caccugcaucugcugcu

SEQ ID NO: 1576292 - RNA, 14 nt, Human adenovirus E
auucugcagagcau

SEQ ID NO: 1576293 - RNA, 22 nt, Human adenovirus E
ggggaacccguccugaucugca

SEQ ID NO: 1576294 - RNA, 19 nt, Human adenovirus E
cgcgaggccaucggccagg

SEQ ID NO: 1576295 - RNA, 20 nt, Human adenovirus E
gcgggagaagaacuucccca

SEQ ID NO: 1576296 - RNA, 16 nt, Human adenovirus E
gacgagcugcuugccg

SEQ ID NO: 1576297 - RNA, 19 nt, Human adenovirus E
aggccgccgccccucucag

SEQ ID NO: 1576298 - RNA, 13 nt, Human adenovirus E
cgccauugguggc

SEQ ID NO: 1576299 - RNA, 21 nt, Human adenovirus E
augcggaugaagcacaaaauu

SEQ ID NO: 1576300 - RNA, 19 nt, Human adenovirus E
aucgccuccuuggaagagg

SEQ ID NO: 1576301 - RNA, 22 nt, Human adenovirus E
ucaccaaacugucaaauacucg

SEQ ID NO: 1576302 - RNA, 15 nt, Human adenovirus E
ccggaucgcugucca

SEQ ID NO: 1576303 - RNA, 13 nt, Human adenovirus E
guucaacagucca

SEQ ID NO: 1576304 - RNA, 23 nt, Human adenovirus E
cucuaugccaucuuccagcagag

SEQ ID NO: 1576305 - RNA, 13 nt, Human adenovirus E
ugcccccuccaga

SEQ ID NO: 1576306 - RNA, 17 nt, Human adenovirus E
aggccaucggccaggcg

SEQ ID NO: 1576307 - RNA, 22 nt, Human adenovirus E
uccaagaccccauagccagccg

SEQ ID NO: 1576308 - RNA, 13 nt, Human adenovirus E
cccgucuccugcc

SEQ ID NO: 1576309 - RNA, 21 nt, Human adenovirus E
ccucagcaugaugcccacggc

SEQ ID NO: 1576310 - RNA, 21 nt, Human adenovirus E
uaccucugcucuaugcaauuc

SEQ ID NO: 1576311 - RNA, 19 nt, Human adenovirus E
gagcgcggucauggaccag

SEQ ID NO: 1576312 - RNA, 18 nt, Human adenovirus E
gcugcccgaggagcaccc

SEQ ID NO: 1576313 - RNA, 16 nt, Human adenovirus E
caacaaaugccagcug

SEQ ID NO: 1576314 - RNA, 13 nt, Human adenovirus E
accaugcagcuga

SEQ ID NO: 1576315 - RNA, 19 nt, Human adenovirus E
cauccugcguuacgugcag

SEQ ID NO: 1576316 - RNA, 13 nt, Human adenovirus E
ucuacgaggacca

SEQ ID NO: 1576317 - RNA, 15 nt, Human adenovirus E
aggaggcagaggagg

SEQ ID NO: 1576318 - RNA, 23 nt, Human adenovirus E
ggcuucccccaggaugccccgag

SEQ ID NO: 1576319 - RNA, 19 nt, Human adenovirus E
gggauccaugguggcgcug

SEQ ID NO: 1576320 - RNA, 13 nt, Human adenovirus E
ugcguacaaaaug

SEQ ID NO: 1576321 - RNA, 23 nt, Human adenovirus E
uucaccaccugcaucugcugcug

SEQ ID NO: 1576322 - RNA, 23 nt, Human adenovirus E
cgcucgcgguggggcggccagcu

SEQ ID NO: 1576323 - RNA, 20 nt, Human adenovirus E
gcaccgcucccuggccugca

SEQ ID NO: 1576324 - RNA, 19 nt, Human adenovirus E
accgggugcuaacgagcgc

SEQ ID NO: 1576325 - RNA, 23 nt, Human adenovirus E
ugguggucccgugcaggcaccgc

SEQ ID NO: 1576326 - RNA, 13 nt, Human adenovirus E
cguggucagcgac

SEQ ID NO: 1576327 - RNA, 14 nt, Human adenovirus E
ggcggacgagcuga

SEQ ID NO: 1576328 - RNA, 14 nt, Human adenovirus E
gguccugggugagg

SEQ ID NO: 1576329 - RNA, 20 nt, Human adenovirus E
ccagcugacuaacucaggug

SEQ ID NO: 1576330 - RNA, 23 nt, Human adenovirus E
ggcuuucaagaacuugcagggcc

SEQ ID NO: 1576331 - RNA, 18 nt, Human adenovirus E
agacguaugcgcaggagc

SEQ ID NO: 1576332 - RNA, 19 nt, Human adenovirus E
cauuacuaccgucaccucc

SEQ ID NO: 1576333 - RNA, 18 nt, Human adenovirus E
cagggacgauccccgggc

SEQ ID NO: 1576334 - RNA, 21 nt, Human adenovirus E
ucgagcaguuauuuuuccucc

SEQ ID NO: 1576335 - RNA, 15 nt, Human adenovirus E
cgagccggggcagcg

SEQ ID NO: 1576336 - RNA, 15 nt, Human adenovirus E
cauuaccacacagac

SEQ ID NO: 1576337 - RNA, 22 nt, Human adenovirus E
uggucagggucuuguugcuagu

SEQ ID NO: 1576338 - RNA, 14 nt, Human adenovirus E
ugcccgccaccugc

SEQ ID NO: 1576339 - RNA, 14 nt, Human adenovirus E
cagcagcgagcugg

SEQ ID NO: 1576340 - RNA, 13 nt, Human adenovirus E
aggugaggaagag

SEQ ID NO: 1576341 - RNA, 14 nt, Human adenovirus E
aaucaggcagcacc

SEQ ID NO: 1576342 - RNA, 15 nt, Human adenovirus E
uugaauuuuaauuuu

SEQ ID NO: 1576343 - RNA, 20 nt, Human adenovirus E
uggacuucaccgagagccgc

SEQ ID NO: 1576344 - RNA, 10 nt, Human adenovirus E
ccucacagcg

SEQ ID NO: 1576345 - RNA, 11 nt, Human adenovirus E
cgcgccugggg

SEQ ID NO: 1576346 - RNA, 18 nt, Human adenovirus E
acgcccguccucggcgcu

SEQ ID NO: 1576347 - RNA, 19 nt, Human adenovirus E
cgcgacggugucgagccug

SEQ ID NO: 1576348 - RNA, 14 nt, Human adenovirus E
cgugcgcuccugga

SEQ ID NO: 1576349 - RNA, 23 nt, Human adenovirus E
gguagcuccauugcagggccucg

SEQ ID NO: 1576350 - RNA, 15 nt, Human adenovirus E
gccgccccucucagu

SEQ ID NO: 1576351 - RNA, 23 nt, Human adenovirus E
cccaccacaauuacucacaccac

SEQ ID NO: 1576352 - RNA, 22 nt, Human adenovirus E
cgcccaggacuacuccacccgc

SEQ ID NO: 1576353 - RNA, 20 nt, Human adenovirus E
uccugugggacgauguggac

SEQ ID NO: 1576354 - RNA, 17 nt, Human adenovirus E
ccgagcugucggccugc

SEQ ID NO: 1576355 - RNA, 21 nt, Human adenovirus E
ggaucgcuguccacgagcgcc

SEQ ID NO: 1576356 - RNA, 18 nt, Human adenovirus E
cugucaaauacucgcaga

SEQ ID NO: 1576357 - RNA, 22 nt, Human adenovirus E
acagcugccguccucccggagg

SEQ ID NO: 1576358 - RNA, 19 nt, Human adenovirus E
ugcaggccugcgggggcaa

SEQ ID NO: 1576359 - RNA, 16 nt, Human adenovirus E
gaacugguugacggcc

SEQ ID NO: 1576360 - RNA, 13 nt, Human adenovirus E
cugaaacacaaaa

SEQ ID NO: 1576361 - RNA, 21 nt, Human adenovirus E
gcaagcccguggucagcgacg

SEQ ID NO: 1576362 - RNA, 19 nt, Human adenovirus E
caccaagaacagccagagc

SEQ ID NO: 1576363 - RNA, 21 nt, Human adenovirus E
ccagggucucaaagcuccgcu

SEQ ID NO: 1576364 - RNA, 13 nt, Human adenovirus E
ggacgagcugacg

SEQ ID NO: 1576365 - RNA, 12 nt, Human adenovirus E
cucccucagcau

SEQ ID NO: 1576366 - RNA, 15 nt, Human adenovirus E
gccuuggaggcggcg

SEQ ID NO: 1576367 - RNA, 12 nt, Human adenovirus E
aacgcccaaaac

SEQ ID NO: 1576368 - RNA, 18 nt, Human adenovirus E
gagguaaauccaagccag

SEQ ID NO: 1576369 - RNA, 14 nt, Human adenovirus E
ggcggcucggggcc

SEQ ID NO: 1576370 - RNA, 11 nt, Human adenovirus E
ccgccagaccg

SEQ ID NO: 1576371 - RNA, 20 nt, Human adenovirus E
gcagagucgggggcaggagc

SEQ ID NO: 1576372 - RNA, 19 nt, Human adenovirus E
ccugggcauagucgcgccg

SEQ ID NO: 1576373 - RNA, 18 nt, Human adenovirus E
ccccggcggcgcgugcag

SEQ ID NO: 1576374 - RNA, 19 nt, Human adenovirus E
cucagcaaccugcugggca

SEQ ID NO: 1576375 - RNA, 12 nt, Human adenovirus E
gcacucaggcag

SEQ ID NO: 1576376 - RNA, 19 nt, Human adenovirus E
cccaguacgcgcucagcac

SEQ ID NO: 1576377 - RNA, 22 nt, Human adenovirus E
ggcggcgaagacgcgcgccggg

SEQ ID NO: 1576378 - RNA, 22 nt, Human adenovirus E
gcccuucgcccuagccgccucc

SEQ ID NO: 1576379 - RNA, 19 nt, Human adenovirus E
gcauuaccacacagacaac

SEQ ID NO: 1576380 - RNA, 16 nt, Human adenovirus E
ucuaaccuguccaccc

SEQ ID NO: 1576381 - RNA, 18 nt, Human adenovirus E
cggcgauguugagcugca

SEQ ID NO: 1576382 - RNA, 22 nt, Human adenovirus E
ccgcauccccaaauucaaacac

SEQ ID NO: 1576383 - RNA, 19 nt, Human adenovirus E
uccacugucgagagccaca

SEQ ID NO: 1576384 - RNA, 16 nt, Human adenovirus E
gaguuggaggagaugg

SEQ ID NO: 1576385 - RNA, 22 nt, Human adenovirus E
ugcucuuugccuucaccaccug

SEQ ID NO: 1576386 - RNA, 19 nt, Human adenovirus E
gacgggcucucgccgccgc

SEQ ID NO: 1576387 - RNA, 14 nt, Human adenovirus E
caaccaaacuaacc

SEQ ID NO: 1576388 - RNA, 23 nt, Human adenovirus E
agccccccugcucccagagcugg

SEQ ID NO: 1576389 - RNA, 21 nt, Human adenovirus E
uccgcguaauuggcccgccgc

SEQ ID NO: 1576390 - RNA, 23 nt, Human adenovirus E
cgccgagacggucaacuccuccu

SEQ ID NO: 1576391 - RNA, 19 nt, Human adenovirus E
ucgcggcgaacgagccggc

SEQ ID NO: 1576392 - RNA, 15 nt, Human adenovirus E
agacccgagcgggag

SEQ ID NO: 1576393 - RNA, 13 nt, Human adenovirus E
gcagcccccgcug

SEQ ID NO: 1576394 - RNA, 17 nt, Human adenovirus E
caccagcggguccaccu

SEQ ID NO: 1576395 - RNA, 24 nt, Human adenovirus E
gauccugcggaaccacagggccag

SEQ ID NO: 1576396 - RNA, 12 nt, Human adenovirus E
ccgagcagcagc

SEQ ID NO: 1576397 - RNA, 20 nt, Human adenovirus E
ugcagggccucgugcucggg

SEQ ID NO: 1576398 - RNA, 21 nt, Human adenovirus E
ccauguucagggcggccagac

SEQ ID NO: 1576399 - RNA, 22 nt, Human adenovirus E
gccgcaagaccaccacucgccg

SEQ ID NO: 1576400 - RNA, 23 nt, Human adenovirus E
gagacgcugcggagucaggucag

SEQ ID NO: 1576401 - RNA, 22 nt, Human adenovirus E
acuaugaggccgagccacagcg

SEQ ID NO: 1576402 - RNA, 18 nt, Human adenovirus E
cgaggacgucagcggcga

SEQ ID NO: 1576403 - RNA, 13 nt, Human adenovirus E
gacugggcggugc

SEQ ID NO: 1576404 - RNA, 19 nt, Human adenovirus E
gcgguacaccucgcccugc

SEQ ID NO: 1576405 - RNA, 13 nt, Human adenovirus E
uggcagcccagcc

SEQ ID NO: 1576406 - RNA, 15 nt, Human adenovirus E
ugugggaccugcugg

SEQ ID NO: 1576407 - RNA, 20 nt, Human adenovirus E
uccgcugggugacaaagagc

SEQ ID NO: 1576408 - RNA, 21 nt, Human adenovirus E
uucuggccugcacccucaucu

SEQ ID NO: 1576409 - RNA, 14 nt, Human adenovirus E
agcaggcggcgcga

SEQ ID NO: 1576410 - RNA, 18 nt, Human adenovirus E
cggucguuguccaccagc

SEQ ID NO: 1576411 - RNA, 16 nt, Human adenovirus E
ccugggcggcgagcac

SEQ ID NO: 1576412 - RNA, 12 nt, Human adenovirus E
ggcggcuggggc

SEQ ID NO: 1576413 - RNA, 19 nt, Human adenovirus E
ccacugucgagagccacac

SEQ ID NO: 1576414 - RNA, 17 nt, Human adenovirus E
gggcgugcgcuccugga

SEQ ID NO: 1576415 - RNA, 17 nt, Human adenovirus E
uauaccuucucauacau

SEQ ID NO: 1576416 - RNA, 17 nt, Human adenovirus E
ccuccacuaacaucucu

SEQ ID NO: 1576417 - RNA, 11 nt, Human adenovirus E
ccgccgcggcg

SEQ ID NO: 1576418 - RNA, 21 nt, Human adenovirus E
caccaacgugcagaccaaccu

SEQ ID NO: 1576419 - RNA, 14 nt, Human adenovirus E
cgcccaagaaugaa

SEQ ID NO: 1576420 - RNA, 17 nt, Human adenovirus E
cguucucuccagcacca

SEQ ID NO: 1576421 - RNA, 13 nt, Human adenovirus E
ucuaccucugcca

SEQ ID NO: 1576422 - RNA, 22 nt, Human adenovirus E
caaucucgguaucguugacggc

SEQ ID NO: 1576423 - RNA, 21 nt, Human adenovirus E
ccugcacuggcagcccagccg

SEQ ID NO: 1576424 - RNA, 18 nt, Human adenovirus E
ugcaucgggcggccgcca

SEQ ID NO: 1576425 - RNA, 15 nt, Human adenovirus E
ccaccaugcagcuga

SEQ ID NO: 1576426 - RNA, 19 nt, Human adenovirus E
gcccuagccgccuccaccc

SEQ ID NO: 1576427 - RNA, 16 nt, Human adenovirus E
ccaguaauaacaccgg

SEQ ID NO: 1576428 - RNA, 15 nt, Human adenovirus E
gccaggccugcaaga

SEQ ID NO: 1576429 - RNA, 13 nt, Human adenovirus E
ugcguuccagcau

SEQ ID NO: 1576430 - RNA, 19 nt, Human adenovirus E
acgauauguggccccccac

SEQ ID NO: 1576431 - RNA, 18 nt, Human adenovirus E
cagcagaaaaagaccagc

SEQ ID NO: 1576432 - RNA, 21 nt, Human adenovirus E
accgcucccuggccugcaacc

SEQ ID NO: 1576433 - RNA, 19 nt, Human adenovirus E
cagacggaucccuggaugc

SEQ ID NO: 1576434 - RNA, 21 nt, Human adenovirus E
cuuaguggugcuguguugcug

SEQ ID NO: 1576435 - RNA, 19 nt, Human adenovirus E
agcagagguugccagcucg

SEQ ID NO: 1576436 - RNA, 21 nt, Human adenovirus E
cagccacuugaacucggggau

SEQ ID NO: 1576437 - RNA, 18 nt, Human adenovirus E
  misc_feature (8)..(8): n is a, c, g, or u
cggccgancgccugggcg

SEQ ID NO: 1576438 - RNA, 17 nt, Human adenovirus E
aaacagguguugaugau

SEQ ID NO: 1576439 - RNA, 20 nt, Human adenovirus E
agcagucaggcagaggagga

SEQ ID NO: 1576440 - RNA, 14 nt, Human adenovirus E
cuccagcaccaggc

SEQ ID NO: 1576441 - RNA, 21 nt, Human adenovirus E
cccggucccccacccaguccc

SEQ ID NO: 1576442 - RNA, 18 nt, Human adenovirus E
ccgccaugaacucugacu

SEQ ID NO: 1576443 - RNA, 15 nt, Human adenovirus E
caucaggccccgcag

SEQ ID NO: 1576444 - RNA, 20 nt, Human adenovirus E
gaagccuuuagacagcagcc

SEQ ID NO: 1576445 - RNA, 16 nt, Human adenovirus E
ggagcuaccagcccca

SEQ ID NO: 1576446 - RNA, 14 nt, Human adenovirus E
uggccaaccaggcc

SEQ ID NO: 1576447 - RNA, 18 nt, Human adenovirus E
augcaauucugacaauga

SEQ ID NO: 1576448 - RNA, 22 nt, Human adenovirus E
ugcggaacugguacuuggccag

SEQ ID NO: 1576449 - RNA, 21 nt, Human adenovirus E
ccagggggcgauccuggccca

SEQ ID NO: 1576450 - RNA, 19 nt, Human adenovirus E
ggacccgguagaggugggc

SEQ ID NO: 1576451 - RNA, 16 nt, Human adenovirus E
caccaacuucaucagc

SEQ ID NO: 1576452 - RNA, 14 nt, Human adenovirus E
ccgcucccuggccu

SEQ ID NO: 1576453 - RNA, 16 nt, Human adenovirus E
ugcgccgcuucuucgc

SEQ ID NO: 1576454 - RNA, 22 nt, Human adenovirus E
cccgcagaagcaagcuccagcu

SEQ ID NO: 1576455 - RNA, 22 nt, Human adenovirus E
gcuggcgggcggcgccacccug

SEQ ID NO: 1576456 - RNA, 17 nt, Human adenovirus E
gaaucaggcuggagccg

SEQ ID NO: 1576457 - RNA, 22 nt, Human adenovirus E
ccucgcucugguggccaacgcc

SEQ ID NO: 1576458 - RNA, 20 nt, Human adenovirus E
aggcgaggguucagccgcca

SEQ ID NO: 1576459 - RNA, 19 nt, Human adenovirus E
gucauggaccaggugcuca

SEQ ID NO: 1576460 - RNA, 14 nt, Human adenovirus E
guggcgaaggagcc

SEQ ID NO: 1576461 - RNA, 17 nt, Human adenovirus E
agccuuuagacagcagc

SEQ ID NO: 1576462 - RNA, 16 nt, Human adenovirus E
agaugccgggcaggag

SEQ ID NO: 1576463 - RNA, 23 nt, Human adenovirus E
gaaagcaaguuccggagcagcug

SEQ ID NO: 1576464 - RNA, 22 nt, Human adenovirus E
agcuugcccuucucgcugaaca

SEQ ID NO: 1576465 - RNA, 21 nt, Human adenovirus E
cucgucugccguagucuggag

SEQ ID NO: 1576466 - RNA, 15 nt, Human adenovirus E
uaauuacuccccucc

SEQ ID NO: 1576467 - RNA, 22 nt, Human adenovirus E
ugcaacuuuuuuuuggaggccg

SEQ ID NO: 1576468 - RNA, 16 nt, Human adenovirus E
acccugaaagugcuga

SEQ ID NO: 1576469 - RNA, 16 nt, Human adenovirus E
gcaagagauggaggaa

SEQ ID NO: 1576470 - RNA, 15 nt, Human adenovirus E
gugaccguggagcug

SEQ ID NO: 1576471 - RNA, 21 nt, Human adenovirus E
cagcugcaccacgcugcgccc

SEQ ID NO: 1576472 - RNA, 19 nt, Human adenovirus E
cuacacgggcgaguacgac

SEQ ID NO: 1576473 - RNA, 17 nt, Human adenovirus E
cguggaggauuuggagg

SEQ ID NO: 1576474 - RNA, 12 nt, Human adenovirus E
gcgcuucugcug

SEQ ID NO: 1576475 - RNA, 20 nt, Human adenovirus E
ccauguuuucugccaacacc

SEQ ID NO: 1576476 - RNA, 19 nt, Human adenovirus E
aaucuucauuuuaucuucu

SEQ ID NO: 1576477 - RNA, 17 nt, Human adenovirus E
cacuguaucccacccug

SEQ ID NO: 1576478 - RNA, 12 nt, Human adenovirus E
aggacgagggca

SEQ ID NO: 1576479 - RNA, 22 nt, Human adenovirus E
gcccagccccgccaccuccgac

SEQ ID NO: 1576480 - RNA, 18 nt, Human adenovirus E
ugcggcgcggccuggacc

SEQ ID NO: 1576481 - RNA, 14 nt, Human adenovirus E
gcagucccacugcu

SEQ ID NO: 1576482 - RNA, 23 nt, Human adenovirus E
ugauggccgugguccuggugacc

SEQ ID NO: 1576483 - RNA, 21 nt, Human adenovirus E
ggggaacccguccugaucugc

SEQ ID NO: 1576484 - RNA, 13 nt, Human adenovirus E
gcaucagcuggaa

SEQ ID NO: 1576485 - RNA, 18 nt, Human adenovirus E
accgguaagaaggagcgg

SEQ ID NO: 1576486 - RNA, 16 nt, Human adenovirus E
caggagggggccaccc

SEQ ID NO: 1576487 - RNA, 20 nt, Human adenovirus E
acucuuucauauccucuccg

SEQ ID NO: 1576488 - RNA, 19 nt, Human adenovirus E
gugcucgcaacgcugcacg

SEQ ID NO: 1576489 - RNA, 17 nt, Human adenovirus E
cagcggcggcagcaggu

SEQ ID NO: 1576490 - RNA, 23 nt, Human adenovirus E
gcggaacugguacuuggccagcc

SEQ ID NO: 1576491 - RNA, 21 nt, Human adenovirus E
auacagcucgugcgagggggc

SEQ ID NO: 1576492 - RNA, 22 nt, Human adenovirus E
gcaguagucgagggucuccugg

SEQ ID NO: 1576493 - RNA, 14 nt, Human adenovirus E
ggagcuggcagugc

SEQ ID NO: 1576494 - RNA, 17 nt, Human adenovirus E
uggcgguggggcggcag

SEQ ID NO: 1576495 - RNA, 19 nt, Human adenovirus E
gcgucucgagauccacggg

SEQ ID NO: 1576496 - RNA, 14 nt, Human adenovirus E
gccccgccaccucc

SEQ ID NO: 1576497 - RNA, 14 nt, Human adenovirus E
caccgcucccuggc

SEQ ID NO: 1576498 - RNA, 22 nt, Human adenovirus E
ugcaucucgugcuguacuacgu

SEQ ID NO: 1576499 - RNA, 23 nt, Human adenovirus E
cguaugcgcaggagcacagggac

SEQ ID NO: 1576500 - RNA, 12 nt, Human adenovirus E
ggagcagcuggg

SEQ ID NO: 1576501 - RNA, 13 nt, Human adenovirus E
acuccguggccug

SEQ ID NO: 1576502 - RNA, 19 nt, Human adenovirus E
cauccuggccguguugcuc

SEQ ID NO: 1576503 - RNA, 21 nt, Human adenovirus E
ccagcucgucugggguccgag

SEQ ID NO: 1576504 - RNA, 21 nt, Human adenovirus E
ucguacgagagcgugaugcag

SEQ ID NO: 1576505 - RNA, 20 nt, Human adenovirus E
ugcucuacuacaucuucugc

SEQ ID NO: 1576506 - RNA, 16 nt, Human adenovirus E
agacucgggccgcgaa

SEQ ID NO: 1576507 - RNA, 21 nt, Human adenovirus E
cagccugcaagacagucugga

SEQ ID NO: 1576508 - RNA, 15 nt, Human adenovirus E
cuguaucccacccug

SEQ ID NO: 1576509 - RNA, 15 nt, Human adenovirus E
cgugaaccugagcca

SEQ ID NO: 1576510 - RNA, 17 nt, Human adenovirus E
cuuguugcgcagggcca

SEQ ID NO: 1576511 - RNA, 19 nt, Human adenovirus E
cuuggaggcggcggcagga

SEQ ID NO: 1576512 - RNA, 13 nt, Human adenovirus E
aggaggaugcagc

SEQ ID NO: 1576513 - RNA, 19 nt, Human adenovirus E
cgucuaccucuaccucugc

SEQ ID NO: 1576514 - RNA, 22 nt, Human adenovirus E
ccaacgugccccggggccagga

SEQ ID NO: 1576515 - RNA, 16 nt, Human adenovirus E
gccagcacccagacca

SEQ ID NO: 1576516 - RNA, 14 nt, Human adenovirus E
agccacucucucag

SEQ ID NO: 1576517 - RNA, 13 nt, Human adenovirus E
ggacuugccgcag

SEQ ID NO: 1576518 - RNA, 17 nt, Human adenovirus E
uagaaugaccacaacca

SEQ ID NO: 1576519 - RNA, 15 nt, Human adenovirus E
uggacaacaccugau

SEQ ID NO: 1576520 - RNA, 13 nt, Human adenovirus E
cggcggcagcagg

SEQ ID NO: 1576521 - RNA, 23 nt, Human adenovirus E
gcgugcacgaagcccugcaggaa

SEQ ID NO: 1576522 - RNA, 15 nt, Human adenovirus E
gcgagggugcugccg

SEQ ID NO: 1576523 - RNA, 23 nt, Human adenovirus E
cacuuagcauuaccacacagaca

SEQ ID NO: 1576524 - RNA, 21 nt, Human adenovirus E
cucgcgcagagcgcccuccac

SEQ ID NO: 1576525 - RNA, 15 nt, Human adenovirus E
cgaggaggaggcaga

SEQ ID NO: 1576526 - RNA, 20 nt, Human adenovirus E
aaaugugguagucaaauacu

SEQ ID NO: 1576527 - RNA, 20 nt, Human adenovirus E
gcaaucaggcagcaccgggu

SEQ ID NO: 1576528 - RNA, 17 nt, Human adenovirus E
ggagcccgaggagaugc

SEQ ID NO: 1576529 - RNA, 21 nt, Human adenovirus E
accaccucccgguaccacauc

SEQ ID NO: 1576530 - RNA, 17 nt, Human adenovirus E
gcugcaaccucugcacg

SEQ ID NO: 1576531 - RNA, 18 nt, Human adenovirus E
cugaaucuaauacuacca

SEQ ID NO: 1576532 - RNA, 17 nt, Human adenovirus E
uccccucuucccagcuc

SEQ ID NO: 1576533 - RNA, 23 nt, Human adenovirus E
cugcagagcaucguggugcagga

SEQ ID NO: 1576534 - RNA, 18 nt, Human adenovirus E
augggcauuuuggagagg

SEQ ID NO: 1576535 - RNA, 11 nt, Human adenovirus E
ccaugaacucu

SEQ ID NO: 1576536 - RNA, 17 nt, Human adenovirus E
gagcucugcaagcuccu

SEQ ID NO: 1576537 - RNA, 16 nt, Human adenovirus E
cgcgcaucuccaggug

SEQ ID NO: 1576538 - RNA, 14 nt, Human adenovirus E
accgccgcggccgc

SEQ ID NO: 1576539 - RNA, 13 nt, Human adenovirus E
cacccacgugagc

SEQ ID NO: 1576540 - RNA, 13 nt, Human adenovirus E
ccccgcuggaggc

SEQ ID NO: 1576541 - RNA, 20 nt, Human adenovirus E
cucacaugaccgccuucgcg

SEQ ID NO: 1576542 - RNA, 19 nt, Human adenovirus E
  misc_feature (10)..(10): n is a, c, g, or u
gcagcagccnuucuccacg

SEQ ID NO: 1576543 - RNA, 22 nt, Human adenovirus E
guccagggacucccucagcaug

SEQ ID NO: 1576544 - RNA, 16 nt, Human adenovirus E
ccagggauaggagcuc

SEQ ID NO: 1576545 - RNA, 15 nt, Human adenovirus E
cgucggccaugggca

SEQ ID NO: 1576546 - RNA, 22 nt, Human adenovirus E
cgcucgcgguggggcggccagc

SEQ ID NO: 1576547 - RNA, 14 nt, Human adenovirus E
guuggccagcugca

SEQ ID NO: 1576548 - RNA, 16 nt, Human adenovirus E
ccugacuuuggagagu

SEQ ID NO: 1576549 - RNA, 19 nt, Human adenovirus E
ucuccaucgcuuacagccu

SEQ ID NO: 1576550 - RNA, 18 nt, Human adenovirus E
ucugcaagcuccugcaga

SEQ ID NO: 1576551 - RNA, 14 nt, Human adenovirus E
cggcuucccccagg

SEQ ID NO: 1576552 - RNA, 18 nt, Human adenovirus E
gcagcagugucuggagga

SEQ ID NO: 1576553 - RNA, 22 nt, Human adenovirus E
cggccggauuccgcggcuaacg

SEQ ID NO: 1576554 - RNA, 10 nt, Human adenovirus E
gggaggaaca

SEQ ID NO: 1576555 - RNA, 12 nt, Human adenovirus E
ccaggcaggcca

SEQ ID NO: 1576556 - RNA, 13 nt, Human adenovirus E
cggcggccugggc

SEQ ID NO: 1576557 - RNA, 15 nt, Human adenovirus E
cuacuggucgcugcc

SEQ ID NO: 1576558 - RNA, 23 nt, Human adenovirus E
guggcucugccuuggcaguacag

SEQ ID NO: 1576559 - RNA, 15 nt, Human adenovirus E
gcacucaacccaccc

SEQ ID NO: 1576560 - RNA, 22 nt, Human adenovirus E
gggcaugggcguguggcagcag

SEQ ID NO: 1576561 - RNA, 23 nt, Human adenovirus E
ucaccgagcccgagggccgcugg

SEQ ID NO: 1576562 - RNA, 17 nt, Human adenovirus E
  misc_feature (6)..(6): n is a, c, g, or u
ccgcancgugaagacgc

SEQ ID NO: 1576563 - RNA, 17 nt, Human adenovirus E
caccaacgugcagacca

SEQ ID NO: 1576564 - RNA, 20 nt, Human adenovirus E
caggaaggugauuggcuugu

SEQ ID NO: 1576565 - RNA, 23 nt, Human adenovirus E
auucuggccugcacccucaucuc

SEQ ID NO: 1576566 - RNA, 18 nt, Human adenovirus E
guugcagggcgcccagca

SEQ ID NO: 1576567 - RNA, 15 nt, Human adenovirus E
ugagguacaugggca

SEQ ID NO: 1576568 - RNA, 16 nt, Human adenovirus E
uacuucuuccagacca

SEQ ID NO: 1576569 - RNA, 13 nt, Human adenovirus E
gccacaccacagc

SEQ ID NO: 1576570 - RNA, 20 nt, Human adenovirus E
cugaucugauacuccucaau

SEQ ID NO: 1576571 - RNA, 23 nt, Human adenovirus E
cugacgcugcgcaacggccugcc

SEQ ID NO: 1576572 - RNA, 13 nt, Human adenovirus E
aacgccauccuga

SEQ ID NO: 1576573 - RNA, 23 nt, Human adenovirus E
augauauucuggagcaggcggcc

SEQ ID NO: 1576574 - RNA, 21 nt, Human adenovirus E
ucggugaagaagaccccgcag

SEQ ID NO: 1576575 - RNA, 19 nt, Human adenovirus E
gcagcgacgagacucgggc

SEQ ID NO: 1576576 - RNA, 16 nt, Human adenovirus E
caccaacccuccagga

SEQ ID NO: 1576577 - RNA, 15 nt, Human adenovirus E
ugucgcaucaggccc

SEQ ID NO: 1576578 - RNA, 17 nt, Human adenovirus E
cuccggaauccugcccg

SEQ ID NO: 1576579 - RNA, 15 nt, Human adenovirus E
gacgagcccgcgcgg

SEQ ID NO: 1576580 - RNA, 21 nt, Human adenovirus E
uggcaauggaggacccaccgc

SEQ ID NO: 1576581 - RNA, 13 nt, Human adenovirus E
ccgucaccuccac

SEQ ID NO: 1576582 - RNA, 13 nt, Human adenovirus E
ugggcaugagccc

SEQ ID NO: 1576583 - RNA, 20 nt, Human adenovirus E
aguucguaguugagcgccuc

SEQ ID NO: 1576584 - RNA, 17 nt, Human adenovirus E
gcaucuccagguggccg

SEQ ID NO: 1576585 - RNA, 21 nt, Human adenovirus E
cgagggccgcuggcuccugga

SEQ ID NO: 1576586 - RNA, 19 nt, Human adenovirus E
ucgcuguccacgagcgcca

SEQ ID NO: 1576587 - RNA, 12 nt, Human adenovirus E
gccagaugaugc

SEQ ID NO: 1576588 - RNA, 22 nt, Human adenovirus E
gcgaggccaucggccaggcgca

SEQ ID NO: 1576589 - RNA, 15 nt, Human adenovirus E
cucagccgcgccuac

SEQ ID NO: 1576590 - RNA, 18 nt, Human adenovirus E
acagcacucaggcagagg

SEQ ID NO: 1576591 - RNA, 16 nt, Human adenovirus E
cgcucagcaccgagga

SEQ ID NO: 1576592 - RNA, 23 nt, Human adenovirus E
ggaacucuugcaggacagcgaac

SEQ ID NO: 1576593 - RNA, 13 nt, Human adenovirus E
uagucaaauacug

SEQ ID NO: 1576594 - RNA, 17 nt, Human adenovirus E
gaggaggaggcagagga

SEQ ID NO: 1576595 - RNA, 22 nt, Human adenovirus E
gugcagcagaagcgugggccug

SEQ ID NO: 1576596 - RNA, 13 nt, Human adenovirus E
aggagcgcgggcu

SEQ ID NO: 1576597 - RNA, 18 nt, Human adenovirus E
gguccucgagcggugugc

SEQ ID NO: 1576598 - RNA, 20 nt, Human adenovirus E
gcccaucauguacgccagca

SEQ ID NO: 1576599 - RNA, 19 nt, Human adenovirus E
agucugcagcgggcccuga

SEQ ID NO: 1576600 - RNA, 15 nt, Human adenovirus E
cgcgaguccaaccug

SEQ ID NO: 1576601 - RNA, 16 nt, Human adenovirus E
agcgccgcgcucgaca

SEQ ID NO: 1576602 - RNA, 15 nt, Human adenovirus E
cugaaccugcccccc

SEQ ID NO: 1576603 - RNA, 12 nt, Human adenovirus E
accugggcggcg

SEQ ID NO: 1576604 - RNA, 22 nt, Human adenovirus E
cuccacgucgagguccucggcg

SEQ ID NO: 1576605 - RNA, 13 nt, Human adenovirus E
accgaggugcccc

SEQ ID NO: 1576606 - RNA, 14 nt, Human adenovirus E
caggucaucgcgcc

SEQ ID NO: 1576607 - RNA, 13 nt, Human adenovirus E
gaaaaagccacag

SEQ ID NO: 1576608 - RNA, 12 nt, Human adenovirus E
gccaggcgcacg

SEQ ID NO: 1576609 - RNA, 22 nt, Human adenovirus E
accagcaccauggaggugcaga

SEQ ID NO: 1576610 - RNA, 15 nt, Human adenovirus E
accgcucccuggccu

SEQ ID NO: 1576611 - RNA, 22 nt, Human adenovirus E
cggcagaacggggugcuggaga

SEQ ID NO: 1576612 - RNA, 14 nt, Human adenovirus E
aagaugagccgcug

SEQ ID NO: 1576613 - RNA, 12 nt, Human adenovirus E
ugcagcagcuga

SEQ ID NO: 1576614 - RNA, 17 nt, Human adenovirus E
cuccaacguggagcuga

SEQ ID NO: 1576615 - RNA, 19 nt, Human adenovirus E
uggcccgguggcugggucc

SEQ ID NO: 1576616 - RNA, 15 nt, Human adenovirus E
gacuccguggccugg

SEQ ID NO: 1576617 - RNA, 13 nt, Human adenovirus E
gguggugcagcau

SEQ ID NO: 1576618 - RNA, 13 nt, Human adenovirus E
cacagcacaggca

SEQ ID NO: 1576619 - RNA, 14 nt, Human adenovirus E
gaagacguggucag

SEQ ID NO: 1576620 - RNA, 20 nt, Human adenovirus E
ccgagucgcggaugaagugg

SEQ ID NO: 1576621 - RNA, 23 nt, Human adenovirus E
gcacagacugaacgacaagcugg

SEQ ID NO: 1576622 - RNA, 14 nt, Human adenovirus E
acuacaaugcucag

SEQ ID NO: 1576623 - RNA, 16 nt, Human adenovirus E
acgcaguagaaggugc

SEQ ID NO: 1576624 - RNA, 13 nt, Human adenovirus E
uuaccgagcagca

SEQ ID NO: 1576625 - RNA, 23 nt, Human adenovirus E
gugcccucgcgcuccaaccccac

SEQ ID NO: 1576626 - RNA, 13 nt, Human adenovirus E
ucaaccccggcuu

SEQ ID NO: 1576627 - RNA, 16 nt, Human adenovirus E
cugcccggcugcgggg

SEQ ID NO: 1576628 - RNA, 20 nt, Human adenovirus E
aacgugccccggggccagga

SEQ ID NO: 1576629 - RNA, 18 nt, Human adenovirus E
cggagaaaacuggcguga

SEQ ID NO: 1576630 - RNA, 19 nt, Human adenovirus E
cacagcaacuuccugacca

SEQ ID NO: 1576631 - RNA, 15 nt, Human adenovirus E
gaaucgcggacggcc

SEQ ID NO: 1576632 - RNA, 19 nt, Human adenovirus E
cacggauaccaucuccgcu

SEQ ID NO: 1576633 - RNA, 13 nt, Human adenovirus E
ucaaauuccuccu

SEQ ID NO: 1576634 - RNA, 16 nt, Human adenovirus E
gccagacccagccaga

SEQ ID NO: 1576635 - RNA, 19 nt, Human adenovirus E
aacacaaaauaaaauaaag

SEQ ID NO: 1576636 - RNA, 22 nt, Human adenovirus E
cacgcgcccgcgcuugcugggc

SEQ ID NO: 1576637 - RNA, 18 nt, Human adenovirus E
ggccgcuggcuccuggac

SEQ ID NO: 1576638 - RNA, 15 nt, Human adenovirus E
gcggcggcgcgccau

SEQ ID NO: 1576639 - RNA, 14 nt, Human adenovirus E
cugcuggaggccau

SEQ ID NO: 1576640 - RNA, 18 nt, Human adenovirus E
augcaagagauggaggaa

SEQ ID NO: 1576641 - RNA, 16 nt, Human adenovirus E
aacgccugcugggccu

SEQ ID NO: 1576642 - RNA, 12 nt, Human adenovirus E
gcagcaacuucc

SEQ ID NO: 1576643 - RNA, 23 nt, Human adenovirus E
agacugauggccacgggcagccc

SEQ ID NO: 1576644 - RNA, 15 nt, Human adenovirus E
uacccuucucccagg

SEQ ID NO: 1576645 - RNA, 20 nt, Human adenovirus E
uguuccacgguggcuuccag

SEQ ID NO: 1576646 - RNA, 16 nt, Human adenovirus E
agaccaaccuggaccg

SEQ ID NO: 1576647 - RNA, 14 nt, Human adenovirus E
ccgccgcuguggag

SEQ ID NO: 1576648 - RNA, 21 nt, Human adenovirus E
ugcaggccugcgggggcaaca

SEQ ID NO: 1576649 - RNA, 18 nt, Human adenovirus E
ggacccggacgugcagcc

SEQ ID NO: 1576650 - RNA, 16 nt, Human adenovirus E
uagaguuuggaagcag

SEQ ID NO: 1576651 - RNA, 20 nt, Human adenovirus E
agcccaucauguacgccagc

SEQ ID NO: 1576652 - RNA, 19 nt, Human adenovirus E
gagcucggagggggggauc

SEQ ID NO: 1576653 - RNA, 17 nt, Human adenovirus E
caaccuggaagccaccc

SEQ ID NO: 1576654 - RNA, 18 nt, Human adenovirus E
cuacuugcaucgggcggc

SEQ ID NO: 1576655 - RNA, 18 nt, Human adenovirus E
caaguacggcgcggccag

SEQ ID NO: 1576656 - RNA, 12 nt, Human adenovirus E
cgucacccgccc

SEQ ID NO: 1576657 - RNA, 22 nt, Human adenovirus E
cugaacgccuuccucagcaccc

SEQ ID NO: 1576658 - RNA, 20 nt, Human adenovirus E
gccuccaaacguuccauggc

SEQ ID NO: 1576659 - RNA, 14 nt, Human adenovirus E
acaccaccacagca

SEQ ID NO: 1576660 - RNA, 18 nt, Human adenovirus E
ccgaaagagggugcugag

SEQ ID NO: 1576661 - RNA, 21 nt, Human adenovirus E
gcaacucguaccugggcuacc

SEQ ID NO: 1576662 - RNA, 14 nt, Human adenovirus E
ccaggcggucccag

SEQ ID NO: 1576663 - RNA, 18 nt, Human adenovirus E
ucggaucuucagccagcg

SEQ ID NO: 1576664 - RNA, 16 nt, Human adenovirus E
cugccacaccuggcag

SEQ ID NO: 1576665 - RNA, 17 nt, Human adenovirus E
caccgcucccuggccug

SEQ ID NO: 1576666 - RNA, 19 nt, Human adenovirus E
cuaguugcgggugggcuuu

SEQ ID NO: 1576667 - RNA, 18 nt, Human adenovirus E
cauguucagggcggccag

SEQ ID NO: 1576668 - RNA, 15 nt, Human adenovirus E
ugugggacgaugagg

SEQ ID NO: 1576669 - RNA, 20 nt, Human adenovirus E
gcugcgcaacggccugcccg

SEQ ID NO: 1576670 - RNA, 14 nt, Human adenovirus E
cuuggcaguacagu

SEQ ID NO: 1576671 - RNA, 14 nt, Human adenovirus E
cguguggcagcagu

SEQ ID NO: 1576672 - RNA, 16 nt, Human adenovirus E
acacugguggccaccu

SEQ ID NO: 1576673 - RNA, 14 nt, Human adenovirus E
gcggugcaggccuc

SEQ ID NO: 1576674 - RNA, 20 nt, Human adenovirus E
cuacaagaccccguacgugc

SEQ ID NO: 1576675 - RNA, 15 nt, Human adenovirus E
uucauggaaugagua

SEQ ID NO: 1576676 - RNA, 17 nt, Human adenovirus E
gcccggcaggccaccau

SEQ ID NO: 1576677 - RNA, 23 nt, Human adenovirus E
cccgccugaaccugacacaccac

SEQ ID NO: 1576678 - RNA, 24 nt, Human adenovirus E
agcggcucgacuccguggccugga

SEQ ID NO: 1576679 - RNA, 18 nt, Human adenovirus E
uggaggcuccuuacgugc

SEQ ID NO: 1576680 - RNA, 20 nt, Human adenovirus E
gacccggacgugcagcccga

SEQ ID NO: 1576681 - RNA, 15 nt, Human adenovirus E
gagggucugggcagc

SEQ ID NO: 1576682 - RNA, 14 nt, Human adenovirus E
guggagcuaccagc

SEQ ID NO: 1576683 - RNA, 15 nt, Human adenovirus E
cgcugcccucggacu

SEQ ID NO: 1576684 - RNA, 15 nt, Human adenovirus E
aggcugggcucgagc

SEQ ID NO: 1576685 - RNA, 20 nt, Human adenovirus E
ccaggccgaaguccagcuga

SEQ ID NO: 1576686 - RNA, 19 nt, Human adenovirus E
agcccgccaacgugccccg

SEQ ID NO: 1576687 - RNA, 11 nt, Human adenovirus E
acgugcuggag

SEQ ID NO: 1576688 - RNA, 20 nt, Human adenovirus E
cgcgcaucuccagguggccg

SEQ ID NO: 1576689 - RNA, 22 nt, Human adenovirus E
cucguacgagagcgugaugcag

SEQ ID NO: 1576690 - RNA, 22 nt, Human adenovirus E
gcgcugaacgccuuccucagca

SEQ ID NO: 1576691 - RNA, 22 nt, Human adenovirus E
ggauccaugguggcgcugaacg

SEQ ID NO: 1576692 - RNA, 18 nt, Human adenovirus E
cacgucuucaaccgcuuc

SEQ ID NO: 1576693 - RNA, 13 nt, Human adenovirus E
cugcucaggcucc

SEQ ID NO: 1576694 - RNA, 15 nt, Human adenovirus E
cacguggccgcggcc

SEQ ID NO: 1576695 - RNA, 18 nt, Human adenovirus E
guggcccccuucacggac

SEQ ID NO: 1576696 - RNA, 13 nt, Human adenovirus E
cgguuccaccgcg

SEQ ID NO: 1576697 - RNA, 21 nt, Human adenovirus E
cgcgucggugaugcucuccac

SEQ ID NO: 1576698 - RNA, 17 nt, Human adenovirus E
cuccaguucguggagga

SEQ ID NO: 1576699 - RNA, 18 nt, Human adenovirus E
cgcagccccgcucgggug

SEQ ID NO: 1576700 - RNA, 21 nt, Human adenovirus E
cagcgccggcaggacccggag

SEQ ID NO: 1576701 - RNA, 13 nt, Human adenovirus E
gagauccacggcc

SEQ ID NO: 1576702 - RNA, 22 nt, Human adenovirus E
ggccagaucguccagggcagcu

SEQ ID NO: 1576703 - RNA, 19 nt, Human adenovirus E
accgcucccuggccugcaa

SEQ ID NO: 1576704 - RNA, 19 nt, Human adenovirus E
gcagcggccgaggcggcug

SEQ ID NO: 1576705 - RNA, 23 nt, Human adenovirus E
aaauuccucaaaugcuaccgcca

SEQ ID NO: 1576706 - RNA, 16 nt, Human adenovirus E
uucuccuagggaggaa

SEQ ID NO: 1576707 - RNA, 20 nt, Human adenovirus E
cugagcauucacaugcucau

SEQ ID NO: 1576708 - RNA, 13 nt, Human adenovirus E
gagcgaccaggag

SEQ ID NO: 1576709 - RNA, 18 nt, Human adenovirus E
gccauguucagggcggcc

SEQ ID NO: 1576710 - RNA, 22 nt, Human adenovirus E
gcuugccauucgcgcacggcca

SEQ ID NO: 1576711 - RNA, 19 nt, Human adenovirus E
accgggugauccuccacca

SEQ ID NO: 1576712 - RNA, 13 nt, Human adenovirus E
aauucaaggaaga

SEQ ID NO: 1576713 - RNA, 19 nt, Human adenovirus E
gccugcugacgccgaacuc

SEQ ID NO: 1576714 - RNA, 23 nt, Human adenovirus E
auggugaccgacgugcgcgaggc

SEQ ID NO: 1576715 - RNA, 18 nt, Human adenovirus E
caguauccgcagcagcga

SEQ ID NO: 1576716 - RNA, 16 nt, Human adenovirus E
ggauggcuggcagagc

SEQ ID NO: 1576717 - RNA, 17 nt, Human adenovirus E
auacaccacccucuccc

SEQ ID NO: 1576718 - RNA, 21 nt, Human adenovirus E
uaaagauggaaaauuauccuu

SEQ ID NO: 1576719 - RNA, 23 nt, Human adenovirus E
ccucgcucugguggccaacgcca

SEQ ID NO: 1576720 - RNA, 14 nt, Human adenovirus E
cuacgucguggugg

SEQ ID NO: 1576721 - RNA, 16 nt, Human adenovirus E
gggcacgauucugacc

SEQ ID NO: 1576722 - RNA, 15 nt, Human adenovirus E
ugacugacccacugg

SEQ ID NO: 1576723 - RNA, 22 nt, Human adenovirus E
ggccaccucgccgcgcaggggc

SEQ ID NO: 1576724 - RNA, 21 nt, Human adenovirus E
accgcaacucguaccugggcu

SEQ ID NO: 1576725 - RNA, 15 nt, Human adenovirus E
cgauuggacccaggc

SEQ ID NO: 1576726 - RNA, 12 nt, Human adenovirus E
caccaucaucuu

SEQ ID NO: 1576727 - RNA, 13 nt, Human adenovirus E
augcgcaggagca

SEQ ID NO: 1576728 - RNA, 11 nt, Human adenovirus E
acaccacccuc

SEQ ID NO: 1576729 - RNA, 20 nt, Human adenovirus E
cuccuucagcgcgcgcugcc

SEQ ID NO: 1576730 - RNA, 14 nt, Human adenovirus E
cggccucggugcac

SEQ ID NO: 1576731 - RNA, 20 nt, Human adenovirus E
gcuccggaauccugcccgcc

SEQ ID NO: 1576732 - RNA, 18 nt, Human adenovirus E
caugguggucccgugcag

SEQ ID NO: 1576733 - RNA, 16 nt, Human adenovirus E
gccaucgccaaccucg

SEQ ID NO: 1576734 - RNA, 13 nt, Human adenovirus E
cguaccagauccu

SEQ ID NO: 1576735 - RNA, 12 nt, Human adenovirus E
cggaugaagcac

SEQ ID NO: 1576736 - RNA, 13 nt, Human adenovirus E
gggcggcaggggc

SEQ ID NO: 1576737 - RNA, 21 nt, Human adenovirus E
gggagcugcggcgcggccugg

SEQ ID NO: 1576738 - RNA, 23 nt, Human adenovirus E
gcgcaaacccgggagcugaggaa

SEQ ID NO: 1576739 - RNA, 14 nt, Human adenovirus E
ucaccaccucccgg

SEQ ID NO: 1576740 - RNA, 17 nt, Human adenovirus E
gaaaaauccuccaggug

SEQ ID NO: 1576741 - RNA, 19 nt, Human adenovirus E
ccggggccaggaggacuac

SEQ ID NO: 1576742 - RNA, 13 nt, Human adenovirus E
aggccgugcagcg

SEQ ID NO: 1576743 - RNA, 22 nt, Human adenovirus E
gcccgacaugaugcaagacccg

SEQ ID NO: 1576744 - RNA, 19 nt, Human adenovirus E
gaugcaggggcggcagggg

SEQ ID NO: 1576745 - RNA, 23 nt, Human adenovirus E
cccauggugggcacgcacccggg

SEQ ID NO: 1576746 - RNA, 17 nt, Human adenovirus E
cucagcguggaggagcu

SEQ ID NO: 1576747 - RNA, 17 nt, Human adenovirus E
gagaccgagcuccagcu

SEQ ID NO: 1576748 - RNA, 14 nt, Human adenovirus E
cugaguuugggcaa

SEQ ID NO: 1576749 - RNA, 14 nt, Human adenovirus E
agacaggagcggcg

SEQ ID NO: 1576750 - RNA, 12 nt, Human adenovirus E
ccaccuccugau

SEQ ID NO: 1576751 - RNA, 22 nt, Human adenovirus E
caauuacucacaccacacacac

SEQ ID NO: 1576752 - RNA, 18 nt, Human adenovirus E
cagcuaccuccagugccu

SEQ ID NO: 1576753 - RNA, 19 nt, Human adenovirus E
acggggugguggaccuggc

SEQ ID NO: 1576754 - RNA, 14 nt, Human adenovirus E
gacgcgcggccacg

SEQ ID NO: 1576755 - RNA, 17 nt, Human adenovirus E
gccuucaauuggagcag

SEQ ID NO: 1576756 - RNA, 20 nt, Human adenovirus E
gggcauucgcaagaggcagc

SEQ ID NO: 1576757 - RNA, 13 nt, Human adenovirus E
guaccucaccugg

SEQ ID NO: 1576758 - RNA, 15 nt, Human adenovirus E
gccgguccucgagcg

SEQ ID NO: 1576759 - RNA, 21 nt, Human adenovirus E
ccguguugcucuacuacaucu

SEQ ID NO: 1576760 - RNA, 20 nt, Human adenovirus E
caaaaccauaucccagggca

SEQ ID NO: 1576761 - RNA, 15 nt, Human adenovirus E
gaagacgcgcgccgg

SEQ ID NO: 1576762 - RNA, 20 nt, Human adenovirus E
ccaguucauugacuggaucu

SEQ ID NO: 1576763 - RNA, 21 nt, Human adenovirus E
aagguccagaaaaagccacag

SEQ ID NO: 1576764 - RNA, 22 nt, Human adenovirus E
gccuacgaguugaaccucuucu

SEQ ID NO: 1576765 - RNA, 23 nt, Human adenovirus E
aagccuccacgcgcacauccaga

SEQ ID NO: 1576766 - RNA, 20 nt, Human adenovirus E
guccauaguucaacacgcuc

SEQ ID NO: 1576767 - RNA, 12 nt, Human adenovirus E
gcuucaggcgcc

SEQ ID NO: 1576768 - RNA, 16 nt, Human adenovirus E
gcgagacgcccaggcc

SEQ ID NO: 1576769 - RNA, 13 nt, Human adenovirus E
cugccgcccgugg

SEQ ID NO: 1576770 - RNA, 20 nt, Human adenovirus E
ccaucgagauugaccugggc

SEQ ID NO: 1576771 - RNA, 14 nt, Human adenovirus E
acgcugcccacgua

SEQ ID NO: 1576772 - RNA, 15 nt, Human adenovirus E
cuggcgggggcacaa

SEQ ID NO: 1576773 - RNA, 16 nt, Human adenovirus E
gaggaagacugggaga

SEQ ID NO: 1576774 - RNA, 15 nt, Human adenovirus E
ccagcacccagacca

SEQ ID NO: 1576775 - RNA, 22 nt, Human adenovirus E
cugcaagacagucuggaggaag

SEQ ID NO: 1576776 - RNA, 14 nt, Human adenovirus E
cguccgcgccgcag

SEQ ID NO: 1576777 - RNA, 24 nt, Human adenovirus E
cuugcgcaaguucgugcccgagga

SEQ ID NO: 1576778 - RNA, 22 nt, Human adenovirus E
ccugguccgggcgcugcacacc

SEQ ID NO: 1576779 - RNA, 16 nt, Human adenovirus E
cucccucggugaagaa

SEQ ID NO: 1576780 - RNA, 14 nt, Human adenovirus E
accaugcuagccug

SEQ ID NO: 1576781 - RNA, 17 nt, Human adenovirus E
ucacgggacccugccgc

SEQ ID NO: 1576782 - RNA, 22 nt, Human adenovirus E
gggcccgugggcggcggccugg

SEQ ID NO: 1576783 - RNA, 20 nt, Human adenovirus E
cggcauggcccgcgggcagg

SEQ ID NO: 1576784 - RNA, 12 nt, Human adenovirus E
accuccacagcc

SEQ ID NO: 1576785 - RNA, 17 nt, Human adenovirus E
ggagcggcgaggagccc

SEQ ID NO: 1576786 - RNA, 15 nt, Human adenovirus E
ugcccgcgcggggca

SEQ ID NO: 1576787 - RNA, 19 nt, Human adenovirus E
caugagcgcggucauggac

SEQ ID NO: 1576788 - RNA, 16 nt, Human adenovirus E
gugcgcgccgggcugg

SEQ ID NO: 1576789 - RNA, 16 nt, Human adenovirus E
gcagggcgcccagcag

SEQ ID NO: 1576790 - RNA, 15 nt, Human adenovirus E
uacuucaaaaugaag

SEQ ID NO: 1576791 - RNA, 13 nt, Human adenovirus E
acuuuuuccaccc

SEQ ID NO: 1576792 - RNA, 14 nt, Human adenovirus E
cagcgcagccaggg

SEQ ID NO: 1576793 - RNA, 17 nt, Human adenovirus E
aggcgauggcggcggcg

SEQ ID NO: 1576794 - RNA, 18 nt, Human adenovirus E
cucguacccguggaucau

SEQ ID NO: 1576795 - RNA, 14 nt, Human adenovirus E
ucaaacgcccaaaa

SEQ ID NO: 1576796 - RNA, 16 nt, Human adenovirus E
acuuggccagccacuu

SEQ ID NO: 1576797 - RNA, 15 nt, Human adenovirus E
cgggcaucagcugga

SEQ ID NO: 1576798 - RNA, 15 nt, Human adenovirus E
gcuggcggugcucaa

SEQ ID NO: 1576799 - RNA, 13 nt, Human adenovirus E
uccuucucgguga

SEQ ID NO: 1576800 - RNA, 15 nt, Human adenovirus E
cgacaugcccgaccc

SEQ ID NO: 1576801 - RNA, 16 nt, Human adenovirus E
cggucauaccagcagc

SEQ ID NO: 1576802 - RNA, 16 nt, Human adenovirus E
ccccacggaggccagc

SEQ ID NO: 1576803 - RNA, 22 nt, Human adenovirus E
agggcccagcgaaggcgagggu

SEQ ID NO: 1576804 - RNA, 11 nt, Human adenovirus E
augagcugggc

SEQ ID NO: 1576805 - RNA, 15 nt, Human adenovirus E
cgcgucaguugcagg

SEQ ID NO: 1576806 - RNA, 20 nt, Human adenovirus E
aaccugagccaggcuuucaa

SEQ ID NO: 1576807 - RNA, 14 nt, Human adenovirus E
uugcaagcgccgca

SEQ ID NO: 1576808 - RNA, 14 nt, Human adenovirus E
gcgcugcagagcca

SEQ ID NO: 1576809 - RNA, 16 nt, Human adenovirus E
uggccagaucguccag

SEQ ID NO: 1576810 - RNA, 13 nt, Human adenovirus E
cgcgguaccuggc

SEQ ID NO: 1576811 - RNA, 19 nt, Human adenovirus E
aacauucuggccugcaccc

SEQ ID NO: 1576812 - RNA, 21 nt, Human adenovirus E
cccugggccaggacgacccgg

SEQ ID NO: 1576813 - RNA, 16 nt, Human adenovirus E
ggcgcggaggaaggaa

SEQ ID NO: 1576814 - RNA, 16 nt, Human adenovirus E
uccccgcgcuccugga

SEQ ID NO: 1576815 - RNA, 21 nt, Human adenovirus E
cuccuagaacagucagcgcuc

SEQ ID NO: 1576816 - RNA, 22 nt, Human adenovirus E
cugggccaggacgacccgggca

SEQ ID NO: 1576817 - RNA, 13 nt, Human adenovirus E
gcaaccugcuggg

SEQ ID NO: 1576818 - RNA, 18 nt, Human adenovirus E
uaagaaaaucaacaaaag

SEQ ID NO: 1576819 - RNA, 15 nt, Human adenovirus E
caagcgccgcagcag

SEQ ID NO: 1576820 - RNA, 13 nt, Human adenovirus E
gguacuuggccag

SEQ ID NO: 1576821 - RNA, 18 nt, Human adenovirus E
augauccagcggcggagc

SEQ ID NO: 1576822 - RNA, 14 nt, Human adenovirus E
ugggcccgugggcg

SEQ ID NO: 1576823 - RNA, 17 nt, Human adenovirus E
ccagccccgccaccucc

SEQ ID NO: 1576824 - RNA, 17 nt, Human adenovirus E
cuggaggccguggugcc

SEQ ID NO: 1576825 - RNA, 23 nt, Human adenovirus E
gucguuggagaugcggcccauga

SEQ ID NO: 1576826 - RNA, 20 nt, Human adenovirus E
cugcgagcccaacccgcgcc

SEQ ID NO: 1576827 - RNA, 17 nt, Human adenovirus E
caucgauggugaagaug

SEQ ID NO: 1576828 - RNA, 19 nt, Human adenovirus E
gcgaucccauuugagcugg

SEQ ID NO: 1576829 - RNA, 21 nt, Human adenovirus E
gacgcgcgccgggcggcaggg

SEQ ID NO: 1576830 - RNA, 14 nt, Human adenovirus E
gacccugcgcaagg

SEQ ID NO: 1576831 - RNA, 17 nt, Human adenovirus E
uagcauuaccacacaga

SEQ ID NO: 1576832 - RNA, 20 nt, Human adenovirus E
augcauagucugcagcgggc

SEQ ID NO: 1576833 - RNA, 22 nt, Human adenovirus E
gagcucuaaccuguccacccgc

SEQ ID NO: 1576834 - RNA, 12 nt, Human adenovirus E
guggugcaggag

SEQ ID NO: 1576835 - RNA, 22 nt, Human adenovirus E
cugcagcgggcccugaccgggg

SEQ ID NO: 1576836 - RNA, 17 nt, Human adenovirus E
gcagccguagcuaccgc

SEQ ID NO: 1576837 - RNA, 16 nt, Human adenovirus E
ucaccuccacagcccc

SEQ ID NO: 1576838 - RNA, 16 nt, Human adenovirus E
cgggagcugcggcgcg

SEQ ID NO: 1576839 - RNA, 23 nt, Human adenovirus E
cagcugggacuugccgcagccgg

SEQ ID NO: 1576840 - RNA, 19 nt, Human adenovirus E
cccgccccaguacgcgcuc

SEQ ID NO: 1576841 - RNA, 22 nt, Human adenovirus E
acuccuagaacagucagcgcuc

SEQ ID NO: 1576842 - RNA, 12 nt, Human adenovirus E
caacggccugcc

SEQ ID NO: 1576843 - RNA, 20 nt, Human adenovirus E
cuggugaacauucugcagag

SEQ ID NO: 1576844 - RNA, 14 nt, Human adenovirus E
ucauguacagcaac

SEQ ID NO: 1576845 - RNA, 13 nt, Human adenovirus E
cgggcacuuccgc

SEQ ID NO: 1576846 - RNA, 21 nt, Human adenovirus E
caggagggggccacccccagc

SEQ ID NO: 1576847 - RNA, 18 nt, Human adenovirus E
cgagcugagcgaccagga

SEQ ID NO: 1576848 - RNA, 16 nt, Human adenovirus E
caacucguaccugggc

SEQ ID NO: 1576849 - RNA, 17 nt, Human adenovirus E
auuacuccccuccugca

SEQ ID NO: 1576850 - RNA, 23 nt, Human adenovirus E
gcaugcaauggcagaucacccug

SEQ ID NO: 1576851 - RNA, 17 nt, Human adenovirus E
uacagaaagcacagacu

SEQ ID NO: 1576852 - RNA, 16 nt, Human adenovirus E
caaguuucuccaccau

SEQ ID NO: 1576853 - RNA, 17 nt, Human adenovirus E
cuugcagggccuguggg

SEQ ID NO: 1576854 - RNA, 17 nt, Human adenovirus E
gccuaggccacaauaca

SEQ ID NO: 1576855 - RNA, 23 nt, Human adenovirus E
acaugcagccccggaugauccug

SEQ ID NO: 1576856 - RNA, 15 nt, Human adenovirus E
aagccuccacgcgca

SEQ ID NO: 1576857 - RNA, 23 nt, Human adenovirus E
gagacugauggccacgggcagcc

SEQ ID NO: 1576858 - RNA, 21 nt, Human adenovirus E
gagcagucucuggagcgggcu

SEQ ID NO: 1576859 - RNA, 22 nt, Human adenovirus E
gcccaacuacgcgcugcauccu

SEQ ID NO: 1576860 - RNA, 14 nt, Human adenovirus E
acgcgcugguggag

SEQ ID NO: 1576861 - RNA, 15 nt, Human adenovirus E
caucgucaaggaugc

SEQ ID NO: 1576862 - RNA, 23 nt, Human adenovirus E
gaggacgcgcucaucaagcaucu

SEQ ID NO: 1576863 - RNA, 13 nt, Human adenovirus E
cgcgcgcugcccg

SEQ ID NO: 1576864 - RNA, 13 nt, Human adenovirus E
uccgcgcccaccg

SEQ ID NO: 1576865 - RNA, 15 nt, Human adenovirus E
uaucuuugaggagga

SEQ ID NO: 1576866 - RNA, 19 nt, Human adenovirus E
gaucaaauuauacacugaa

SEQ ID NO: 1576867 - RNA, 18 nt, Human adenovirus E
gauccagcagaccuccuc

SEQ ID NO: 1576868 - RNA, 13 nt, Human adenovirus E
ccgcccuggugcg

SEQ ID NO: 1576869 - RNA, 21 nt, Human adenovirus E
acgggauagaaagccuggugg

SEQ ID NO: 1576870 - RNA, 17 nt, Human adenovirus E
acgccuagaaugaccac

SEQ ID NO: 1576871 - RNA, 23 nt, Human adenovirus E
guggaccuggccaaccaggccgu

SEQ ID NO: 1576872 - RNA, 14 nt, Human adenovirus E
gcggcgcacgggca

SEQ ID NO: 1576873 - RNA, 15 nt, Human adenovirus E
gcaagcgccgcagca

SEQ ID NO: 1576874 - RNA, 17 nt, Human adenovirus E
ccucugcacgccgcacc

SEQ ID NO: 1576875 - RNA, 13 nt, Human adenovirus E
aacggccugcccg

SEQ ID NO: 1576876 - RNA, 16 nt, Human adenovirus E
cgugccccggggccag

SEQ ID NO: 1576877 - RNA, 15 nt, Human adenovirus E
cagggcgcccagcag

SEQ ID NO: 1576878 - RNA, 23 nt, Human adenovirus E
cacgccgagccucaagcccguga

SEQ ID NO: 1576879 - RNA, 14 nt, Human adenovirus E
auauucugcuccug

SEQ ID NO: 1576880 - RNA, 16 nt, Human adenovirus E
gagcccaacccgcgcc

SEQ ID NO: 1576881 - RNA, 22 nt, Human adenovirus E
acugcgucuaccucuaccucug

SEQ ID NO: 1576882 - RNA, 20 nt, Human adenovirus E
caacgugcagaccaaccugg

SEQ ID NO: 1576883 - RNA, 18 nt, Human adenovirus E
ucaugggcaccuggagcg

SEQ ID NO: 1576884 - RNA, 19 nt, Human adenovirus E
cgcgagacgcccaggccga

SEQ ID NO: 1576885 - RNA, 20 nt, Human adenovirus E
cgccguugucaaccacugcg

SEQ ID NO: 1576886 - RNA, 19 nt, Human adenovirus E
aacgagggcguggcugccc

SEQ ID NO: 1576887 - RNA, 13 nt, Human adenovirus E
auccacagcggcg

SEQ ID NO: 1576888 - RNA, 17 nt, Human adenovirus E
cugugggaccugcugga

SEQ ID NO: 1576889 - RNA, 15 nt, Human adenovirus E
cgauguggacagcag

SEQ ID NO: 1576890 - RNA, 16 nt, Human adenovirus E
ggacucgggggcguag

SEQ ID NO: 1576891 - RNA, 16 nt, Human adenovirus E
cggcuccccgcgcacc

SEQ ID NO: 1576892 - RNA, 17 nt, Human adenovirus E
cgagggggcgaggagcc

SEQ ID NO: 1576893 - RNA, 18 nt, Human adenovirus E
agagcuguccgugucccc

SEQ ID NO: 1576894 - RNA, 15 nt, Human adenovirus E
ugcacgugcugcacg

SEQ ID NO: 1576895 - RNA, 18 nt, Human adenovirus E
gccggcggcggcgcaucg

SEQ ID NO: 1576896 - RNA, 13 nt, Human adenovirus E
ucccaggacaugg

SEQ ID NO: 1576897 - RNA, 16 nt, Human adenovirus E
aucucccgccugaacc

SEQ ID NO: 1576898 - RNA, 11 nt, Human adenovirus E
cuugcugcuau

SEQ ID NO: 1576899 - RNA, 21 nt, Human adenovirus E
cacuuagcauuaccacacaga

SEQ ID NO: 1576900 - RNA, 17 nt, Human adenovirus E
agcggugugccgcgguc

SEQ ID NO: 1576901 - RNA, 21 nt, Human adenovirus E
ccugcucgggcaucagcugga

SEQ ID NO: 1576902 - RNA, 21 nt, Human adenovirus E
uucacuccccucuucccagcu

SEQ ID NO: 1576903 - RNA, 16 nt, Human adenovirus E
uucuuaucugccuccu

SEQ ID NO: 1576904 - RNA, 15 nt, Human adenovirus E
caccacagcaaccuc

SEQ ID NO: 1576905 - RNA, 14 nt, Human adenovirus E
gcucccuggggcgc

SEQ ID NO: 1576906 - RNA, 17 nt, Human adenovirus E
ucggcaccagccaacug

SEQ ID NO: 1576907 - RNA, 16 nt, Human adenovirus E
ucaacuccuccuccag

SEQ ID NO: 1576908 - RNA, 22 nt, Human adenovirus E
ccugaucccgaauaccacagcg

SEQ ID NO: 1576909 - RNA, 15 nt, Human adenovirus E
gcuaccuccagugcc

SEQ ID NO: 1576910 - RNA, 18 nt, Human adenovirus E
cagaaccugaaagagcuc

SEQ ID NO: 1576911 - RNA, 18 nt, Human adenovirus E
uacgcgcacuuccucaaa

SEQ ID NO: 1576912 - RNA, 21 nt, Human adenovirus E
cuccuucagcgcgcgcugccc

SEQ ID NO: 1576913 - RNA, 16 nt, Human adenovirus E
agacagcagccccagg

SEQ ID NO: 1576914 - RNA, 20 nt, Human adenovirus E
acucccucagcaugaugccc

SEQ ID NO: 1576915 - RNA, 19 nt, Human adenovirus E
ugugggaccugcuggaggc

SEQ ID NO: 1576916 - RNA, 20 nt, Human adenovirus E
caacauccccgcgcuccugg

SEQ ID NO: 1576917 - RNA, 22 nt, Human adenovirus E
agcccgugcugcucgagcgccc

SEQ ID NO: 1576918 - RNA, 12 nt, Human adenovirus E
uuauacauguga

SEQ ID NO: 1576919 - RNA, 16 nt, Human adenovirus E
gcccggcaggccacca

SEQ ID NO: 1576920 - RNA, 18 nt, Human adenovirus E
guggccagaucguccagg

SEQ ID NO: 1576921 - RNA, 16 nt, Human adenovirus E
cuguaguggugugcau

SEQ ID NO: 1576922 - RNA, 18 nt, Human adenovirus E
gucaccuccacagccccu

SEQ ID NO: 1576923 - RNA, 21 nt, Human adenovirus E
ugccgcccaggacuacuccac

SEQ ID NO: 1576924 - RNA, 15 nt, Human adenovirus E
caggccgugcagcgg

SEQ ID NO: 1576925 - RNA, 16 nt, Human adenovirus E
cguuacgugcagcaga

SEQ ID NO: 1576926 - RNA, 21 nt, Human adenovirus E
gcucugcaaggagaaggagga

SEQ ID NO: 1576927 - RNA, 13 nt, Human adenovirus E
ggauggcuggcag

SEQ ID NO: 1576928 - RNA, 18 nt, Human adenovirus E
ggggaacccguccugauc

SEQ ID NO: 1576929 - RNA, 18 nt, Human adenovirus E
ccgcauccccaaauucaa

SEQ ID NO: 1576930 - RNA, 21 nt, Human adenovirus E
cucuuugccuucaccaccugc

SEQ ID NO: 1576931 - RNA, 15 nt, Human adenovirus E
agacuccgaggaggg

SEQ ID NO: 1576932 - RNA, 21 nt, Human adenovirus E
augcaagacccggucaccuuc

SEQ ID NO: 1576933 - RNA, 20 nt, Human adenovirus E
uggccugcaacccccagcug

SEQ ID NO: 1576934 - RNA, 13 nt, Human adenovirus E
cgcgcggcccggu

SEQ ID NO: 1576935 - RNA, 15 nt, Human adenovirus E
gcucccuggggcgcc

SEQ ID NO: 1576936 - RNA, 21 nt, Human adenovirus E
cuggaggccaucgugcagaac

SEQ ID NO: 1576937 - RNA, 21 nt, Human adenovirus E
cccagguuggugcgacugggc

SEQ ID NO: 1576938 - RNA, 16 nt, Human adenovirus E
uaccaguccgggccgg

SEQ ID NO: 1576939 - RNA, 16 nt, Human adenovirus E
aucugggagcugaaca

SEQ ID NO: 1576940 - RNA, 19 nt, Human adenovirus E
gcccccgcuggaggcuccu

SEQ ID NO: 1576941 - RNA, 23 nt, Human adenovirus E
gcagcugaagcaacugcagccgu

SEQ ID NO: 1576942 - RNA, 23 nt, Human adenovirus E
gcagguccagaccucggcgcgag

SEQ ID NO: 1576943 - RNA, 16 nt, Human adenovirus E
cuccugcacaggcagc

SEQ ID NO: 1576944 - RNA, 19 nt, Human adenovirus E
gcgcgaguucgccccccgg

SEQ ID NO: 1576945 - RNA, 16 nt, Human adenovirus E
gaagcguucagggagg

SEQ ID NO: 1576946 - RNA, 22 nt, Human adenovirus E
gcucgacuccguggccuggagg

SEQ ID NO: 1576947 - RNA, 16 nt, Human adenovirus E
accucgacccccagac

SEQ ID NO: 1576948 - RNA, 16 nt, Human adenovirus E
gugccccggggccagg

SEQ ID NO: 1576949 - RNA, 14 nt, Human adenovirus E
cgaggcauacgugc

SEQ ID NO: 1576950 - RNA, 12 nt, Human adenovirus E
cagcacucucaa

SEQ ID NO: 1576951 - RNA, 16 nt, Human adenovirus E
cuccaccuccacccac

SEQ ID NO: 1576952 - RNA, 16 nt, Human adenovirus E
gggggcagggggucca

SEQ ID NO: 1576953 - RNA, 19 nt, Human adenovirus E
acgaagcccugcaggaagc

SEQ ID NO: 1576954 - RNA, 15 nt, Human adenovirus E
uggccaacuaccugg

SEQ ID NO: 1576955 - RNA, 14 nt, Human adenovirus E
ucaggaugagcuga

SEQ ID NO: 1576956 - RNA, 17 nt, Human adenovirus E
ugcuaacgagcgccccu

SEQ ID NO: 1576957 - RNA, 15 nt, Human adenovirus E
caagaagcugaaagu

SEQ ID NO: 1576958 - RNA, 18 nt, Human adenovirus E
gcagagcgcccuccaccg

SEQ ID NO: 1576959 - RNA, 12 nt, Human adenovirus E
ccacaguacaga

SEQ ID NO: 1576960 - RNA, 22 nt, Human adenovirus E
ucuggaggaagacgaggaggag

SEQ ID NO: 1576961 - RNA, 13 nt, Human adenovirus E
ccggucaccuucc

SEQ ID NO: 1576962 - RNA, 18 nt, Human adenovirus E
ggccugcgucaucaccca

SEQ ID NO: 1576963 - RNA, 23 nt, Human adenovirus E
uuaacagaacauucuacacuaaa

SEQ ID NO: 1576964 - RNA, 22 nt, Human adenovirus E
cacgcccagcacacgcccagaa

SEQ ID NO: 1576965 - RNA, 19 nt, Human adenovirus E
ggagcuaccagccccagau

SEQ ID NO: 1576966 - RNA, 13 nt, Human adenovirus E
cugcaagcuccug

SEQ ID NO: 1576967 - RNA, 18 nt, Human adenovirus E
ccggcucccccggccacu

SEQ ID NO: 1576968 - RNA, 13 nt, Human adenovirus E
aaaaucagaccca

SEQ ID NO: 1576969 - RNA, 14 nt, Human adenovirus E
accucugccacacc

SEQ ID NO: 1576970 - RNA, 21 nt, Human adenovirus E
ccagaucauguacgaggaucu

SEQ ID NO: 1576971 - RNA, 23 nt, Human adenovirus E
ucaccaaggccauggcgaccagc

SEQ ID NO: 1576972 - RNA, 15 nt, Human adenovirus E
uccaccugcggggcg

SEQ ID NO: 1576973 - RNA, 14 nt, Human adenovirus E
acucaagggucugu

SEQ ID NO: 1576974 - RNA, 20 nt, Human adenovirus E
ugucccaugguggcgcagcu

SEQ ID NO: 1576975 - RNA, 17 nt, Human adenovirus E
ugcugcucgagcgccca

SEQ ID NO: 1576976 - RNA, 15 nt, Human adenovirus E
cucagcucaaaaugg

SEQ ID NO: 1576977 - RNA, 16 nt, Human adenovirus E
gucucgccgcgccggc

SEQ ID NO: 1576978 - RNA, 13 nt, Human adenovirus E
uugcuugcugcua

SEQ ID NO: 1576979 - RNA, 13 nt, Human adenovirus E
cggcgaggagccc

SEQ ID NO: 1576980 - RNA, 13 nt, Human adenovirus E
gcggaugaagcac

SEQ ID NO: 1576981 - RNA, 21 nt, Human adenovirus E
gcuguucguacuuaguggugc

SEQ ID NO: 1576982 - RNA, 13 nt, Human adenovirus E
acuugccgcagcc

SEQ ID NO: 1576983 - RNA, 20 nt, Human adenovirus E
cgccgacgagaagcagcagc

SEQ ID NO: 1576984 - RNA, 19 nt, Human adenovirus E
acggcguacgagcagaccg

SEQ ID NO: 1576985 - RNA, 19 nt, Human adenovirus E
ggcugcaaacuuccuccac

SEQ ID NO: 1576986 - RNA, 19 nt, Human adenovirus E
gguaaaucguucucuccag

SEQ ID NO: 1576987 - RNA, 22 nt, Human adenovirus E
ccuggaugucgacgccuaugag

SEQ ID NO: 1576988 - RNA, 22 nt, Human adenovirus E
aguaauaacaccgguuggggcc

SEQ ID NO: 1576989 - RNA, 22 nt, Human adenovirus E
gaggagcucaaccccggcuucc

SEQ ID NO: 1576990 - RNA, 12 nt, Human adenovirus E
cgagcgccucag

SEQ ID NO: 1576991 - RNA, 18 nt, Human adenovirus E
cguccguguggcagcccg

SEQ ID NO: 1576992 - RNA, 18 nt, Human adenovirus E
ggacagaggagggacuug

SEQ ID NO: 1576993 - RNA, 22 nt, Human adenovirus E
ggccagcugcaccacgcugcgc

SEQ ID NO: 1576994 - RNA, 16 nt, Human adenovirus E
agaagaggcagcagca

SEQ ID NO: 1576995 - RNA, 19 nt, Human adenovirus E
cgugcagcagaagcguggg

SEQ ID NO: 1576996 - RNA, 23 nt, Human adenovirus E
gcggcagcggccaucgccagcau

SEQ ID NO: 1576997 - RNA, 13 nt, Human adenovirus E
guagucuggagaa

SEQ ID NO: 1576998 - RNA, 17 nt, Human adenovirus E
ccaacgccauccugaau

SEQ ID NO: 1576999 - RNA, 16 nt, Human adenovirus E
agcacucaacccaccc

SEQ ID NO: 1577000 - RNA, 22 nt, Human adenovirus E
caguuauuuuuccuccacccuc

SEQ ID NO: 1577001 - RNA, 14 nt, Human adenovirus E
gcgcgcgcugcccg

SEQ ID NO: 1577002 - RNA, 14 nt, Human adenovirus E
cuaugccuucugcu

SEQ ID NO: 1577003 - RNA, 14 nt, Human adenovirus E
acgaggaccaaucc

SEQ ID NO: 1577004 - RNA, 12 nt, Human adenovirus E
ugauggacaugc

SEQ ID NO: 1577005 - RNA, 17 nt, Human adenovirus E
gcuggcagagccccuuc

SEQ ID NO: 1577006 - RNA, 19 nt, Human adenovirus E
ccacgcgcacauccagaaa

SEQ ID NO: 1577007 - RNA, 23 nt, Human adenovirus E
ucaugagcgcggucauggaccag

SEQ ID NO: 1577008 - RNA, 19 nt, Human adenovirus E
ccgccggugccgcccagga

SEQ ID NO: 1577009 - RNA, 15 nt, Human adenovirus E
accuccaccugagcg

SEQ ID NO: 1577010 - RNA, 12 nt, Human adenovirus E
acaguacagaua

SEQ ID NO: 1577011 - RNA, 17 nt, Human adenovirus E
gagggucugggcagcga

SEQ ID NO: 1577012 - RNA, 22 nt, Human adenovirus E
ccgcguaauuggcccgccgccc

SEQ ID NO: 1577013 - RNA, 19 nt, Human adenovirus E
ccccucagcguggaggagc

SEQ ID NO: 1577014 - RNA, 14 nt, Human adenovirus E
gaccaggugcucau

SEQ ID NO: 1577015 - RNA, 14 nt, Human adenovirus E
agauguugaagugg

SEQ ID NO: 1577016 - RNA, 18 nt, Human adenovirus E
aacaguccauaguucaac

SEQ ID NO: 1577017 - RNA, 18 nt, Human adenovirus E
auggugaagaugccgggc

SEQ ID NO: 1577018 - RNA, 17 nt, Human adenovirus E
ccaccacuacagcagca

SEQ ID NO: 1577019 - RNA, 14 nt, Human adenovirus E
gaagcaagcuccag

SEQ ID NO: 1577020 - RNA, 22 nt, Human adenovirus E
gauaaaccgaaguccuccccag

SEQ ID NO: 1577021 - RNA, 16 nt, Human adenovirus E
cgggacgcagggccau

SEQ ID NO: 1577022 - RNA, 15 nt, Human adenovirus E
auucccacggagccc

SEQ ID NO: 1577023 - RNA, 22 nt, Human adenovirus E
cgcaaggucgaggagaaccugc

SEQ ID NO: 1577024 - RNA, 21 nt, Human adenovirus E
gcauucgcaagaggcagcccu

SEQ ID NO: 1577025 - RNA, 21 nt, Human adenovirus E
gagguacaugggcaugagccc

SEQ ID NO: 1577026 - RNA, 22 nt, Human adenovirus E
ucaaguuucugugucugaaccc

SEQ ID NO: 1577027 - RNA, 19 nt, Human adenovirus E
gcccgcgcuugcugggcga

SEQ ID NO: 1577028 - RNA, 22 nt, Human adenovirus E
cagaugcgcccccaccacccuc

SEQ ID NO: 1577029 - RNA, 19 nt, Human adenovirus E
cagcccccuccacagccgg

SEQ ID NO: 1577030 - RNA, 19 nt, Human adenovirus E
guagggacugaggggcgug

SEQ ID NO: 1577031 - RNA, 20 nt, Human adenovirus E
ucauugccgucauucaugga

SEQ ID NO: 1577032 - RNA, 13 nt, Human adenovirus E
aaaauccuccagg

SEQ ID NO: 1577033 - RNA, 13 nt, Human adenovirus E
aagcgccagccca

SEQ ID NO: 1577034 - RNA, 14 nt, Human adenovirus E
gaccugcuggaggc

SEQ ID NO: 1577035 - RNA, 16 nt, Human adenovirus E
cugcacuggcagccca

SEQ ID NO: 1577036 - RNA, 18 nt, Human adenovirus E
uacgaguugaaccucuuc

SEQ ID NO: 1577037 - RNA, 13 nt, Human adenovirus E
cuccgcuggguga

SEQ ID NO: 1577038 - RNA, 13 nt, Human adenovirus E
cuguaucccaccc

SEQ ID NO: 1577039 - RNA, 21 nt, Human adenovirus E
caggagcgcgggcugccgcug

SEQ ID NO: 1577040 - RNA, 17 nt, Human adenovirus E
cgaaggguaugcuuucg

SEQ ID NO: 1577041 - RNA, 19 nt, Human adenovirus E
augaaguaaaugcaagcgg

SEQ ID NO: 1577042 - RNA, 17 nt, Human adenovirus E
gucauggaccaggugcu

SEQ ID NO: 1577043 - RNA, 13 nt, Human adenovirus E
ucaaguccagcaa

SEQ ID NO: 1577044 - RNA, 15 nt, Human adenovirus E
caucgcuuacagccu

SEQ ID NO: 1577045 - RNA, 22 nt, Human adenovirus E
gcaaguacggcgcggccagccu

SEQ ID NO: 1577046 - RNA, 20 nt, Human adenovirus E
acgcccuuuucaaccugggu

SEQ ID NO: 1577047 - RNA, 21 nt, Human adenovirus E
cagcggcucgacuccguggcc

SEQ ID NO: 1577048 - RNA, 15 nt, Human adenovirus E
gcccgcgcuugcugg

SEQ ID NO: 1577049 - RNA, 17 nt, Human adenovirus E
ggcuaccgcggcacgcg

SEQ ID NO: 1577050 - RNA, 22 nt, Human adenovirus E
cuguuccugguggugcagcaua

SEQ ID NO: 1577051 - RNA, 19 nt, Human adenovirus E
ugcgucucgggacccugcc

SEQ ID NO: 1577052 - RNA, 13 nt, Human adenovirus E
cgguggggcggcc

SEQ ID NO: 1577053 - RNA, 12 nt, Human adenovirus E
aaauacuggggg

SEQ ID NO: 1577054 - RNA, 16 nt, Human adenovirus E
gcggauggcuggcaga

SEQ ID NO: 1577055 - RNA, 15 nt, Human adenovirus E
gucacccgccccgcc

SEQ ID NO: 1577056 - RNA, 17 nt, Human adenovirus E
uggaggagcucagccgc

SEQ ID NO: 1577057 - RNA, 14 nt, Human adenovirus E
cgggcggcaggggc

SEQ ID NO: 1577058 - RNA, 16 nt, Human adenovirus E
gaucuccuccucuuga

SEQ ID NO: 1577059 - RNA, 15 nt, Human adenovirus E
agcagcuggcccggu

SEQ ID NO: 1577060 - RNA, 23 nt, Human adenovirus E
cuggugcggcgggcgcagcagcg

SEQ ID NO: 1577061 - RNA, 16 nt, Human adenovirus E
cacagcggcggcagca

SEQ ID NO: 1577062 - RNA, 20 nt, Human adenovirus E
ggccacgagccggggcagcg

SEQ ID NO: 1577063 - RNA, 23 nt, Human adenovirus E
ucaggcugggcucgagcaugacg

SEQ ID NO: 1577064 - RNA, 19 nt, Human adenovirus E
cagcaugaugcccacggcc

SEQ ID NO: 1577065 - RNA, 20 nt, Human adenovirus E
cucucagaccgugcagcaga

SEQ ID NO: 1577066 - RNA, 19 nt, Human adenovirus E
ugccugauggcucugauca

SEQ ID NO: 1577067 - RNA, 16 nt, Human adenovirus E
ucguucucuccagcac

SEQ ID NO: 1577068 - RNA, 21 nt, Human adenovirus E
gcuggguccuaaugcuagucc

SEQ ID NO: 1577069 - RNA, 17 nt, Human adenovirus E
acggacagcggcagcau

SEQ ID NO: 1577070 - RNA, 22 nt, Human adenovirus E
cccgccaaauaaucacacacgc

SEQ ID NO: 1577071 - RNA, 16 nt, Human adenovirus E
cagcagaagcgugggc

SEQ ID NO: 1577072 - RNA, 18 nt, Human adenovirus E
cagcuccuccucggccug

SEQ ID NO: 1577073 - RNA, 23 nt, Human adenovirus E
cgcauccugcguuacgugcagca

SEQ ID NO: 1577074 - RNA, 19 nt, Human adenovirus E
uccacgguggcuuccagca

SEQ ID NO: 1577075 - RNA, 19 nt, Human adenovirus E
agaguguaccgccgcggcc

SEQ ID NO: 1577076 - RNA, 14 nt, Human adenovirus E
gggcuaacucuuau

SEQ ID NO: 1577077 - RNA, 15 nt, Human adenovirus E
cccgcguucugcgcg

SEQ ID NO: 1577078 - RNA, 16 nt, Human adenovirus E
ggugccggcggagaug

SEQ ID NO: 1577079 - RNA, 20 nt, Human adenovirus E
cgcgucaguugcagggcgcc

SEQ ID NO: 1577080 - RNA, 13 nt, Human adenovirus E
gcggcccaugagc

SEQ ID NO: 1577081 - RNA, 12 nt, Human adenovirus E
aauccuccaggu

SEQ ID NO: 1577082 - RNA, 22 nt, Human adenovirus E
acaguuagucucuccacuuaca

SEQ ID NO: 1577083 - RNA, 17 nt, Human adenovirus E
ggccaccuaccacaucu

SEQ ID NO: 1577084 - RNA, 22 nt, Human adenovirus E
guacgagagcgugaugcagcag

SEQ ID NO: 1577085 - RNA, 20 nt, Human adenovirus E
gugcugaaaacaccaccugg

SEQ ID NO: 1577086 - RNA, 16 nt, Human adenovirus E
cagcuugcccucggcc

SEQ ID NO: 1577087 - RNA, 14 nt, Human adenovirus E
gccaaaaaucagac

SEQ ID NO: 1577088 - RNA, 20 nt, Human adenovirus E
cugcuguuagugcucccccg

SEQ ID NO: 1577089 - RNA, 19 nt, Human adenovirus E
agcugcccgaggagcaccc

SEQ ID NO: 1577090 - RNA, 17 nt, Human adenovirus E
ucgacgagcgcaccacc

SEQ ID NO: 1577091 - RNA, 16 nt, Human adenovirus E
cccacggaggccagca

SEQ ID NO: 1577092 - RNA, 12 nt, Human adenovirus E
gcgccucaggcu

SEQ ID NO: 1577093 - RNA, 23 nt, Human adenovirus E
gcaucccagcuggaucaugauca

SEQ ID NO: 1577094 - RNA, 18 nt, Human adenovirus E
gaucccgcgaugcgggcg

SEQ ID NO: 1577095 - RNA, 18 nt, Human adenovirus E
uaccgucaccuccacagc

SEQ ID NO: 1577096 - RNA, 15 nt, Human adenovirus E
cgcgcggccacggcg

SEQ ID NO: 1577097 - RNA, 11 nt, Human adenovirus E
ggccugcaaga

SEQ ID NO: 1577098 - RNA, 13 nt, Human adenovirus E
cagcggcggcagc

SEQ ID NO: 1577099 - RNA, 12 nt, Human adenovirus E
cccgcgcggggc

SEQ ID NO: 1577100 - RNA, 16 nt, Human adenovirus E
cggggguucaagcgcg

SEQ ID NO: 1577101 - RNA, 15 nt, Human adenovirus E
gcccagcaccagcac

SEQ ID NO: 1577102 - RNA, 17 nt, Human adenovirus E
gaacagcagucaggcag

SEQ ID NO: 1577103 - RNA, 15 nt, Human adenovirus E
ugccgcugcaaccuc

SEQ ID NO: 1577104 - RNA, 18 nt, Human adenovirus E
ccaagagaagccccuggg

SEQ ID NO: 1577105 - RNA, 13 nt, Human adenovirus E
uuuuccuccaccc

SEQ ID NO: 1577106 - RNA, 24 nt, Human adenovirus E
uggaaggcgacaacgcgcggcugg

SEQ ID NO: 1577107 - RNA, 14 nt, Human adenovirus E
ggagugaugaagau

SEQ ID NO: 1577108 - RNA, 13 nt, Human adenovirus E
ggaggaagacugg

SEQ ID NO: 1577109 - RNA, 17 nt, Human adenovirus E
gcucacuaccaauaaca

SEQ ID NO: 1577110 - RNA, 14 nt, Human adenovirus E
cgccaccugcuccg

SEQ ID NO: 1577111 - RNA, 21 nt, Human adenovirus E
ccagauccucagguaaaucaa

SEQ ID NO: 1577112 - RNA, 18 nt, Human adenovirus E
uccaucauccccacgccg

SEQ ID NO: 1577113 - RNA, 17 nt, Human adenovirus E
ggcgaugcagcccccgc

SEQ ID NO: 1577114 - RNA, 17 nt, Human adenovirus E
gcugaccaaccuggucu

SEQ ID NO: 1577115 - RNA, 16 nt, Human adenovirus E
gcgaugcagcccccgc

SEQ ID NO: 1577116 - RNA, 21 nt, Human adenovirus E
cggugcccgaggcccuggcca

SEQ ID NO: 1577117 - RNA, 14 nt, Human adenovirus E
gcagaaccuggucc

SEQ ID NO: 1577118 - RNA, 14 nt, Human adenovirus E
gaucagccccgcgc

SEQ ID NO: 1577119 - RNA, 22 nt, Human adenovirus E
ggggggucggcaucgaugguga

SEQ ID NO: 1577120 - RNA, 14 nt, Human adenovirus E
agauggagccauag

SEQ ID NO: 1577121 - RNA, 13 nt, Human adenovirus E
caagccgcugacg

SEQ ID NO: 1577122 - RNA, 14 nt, Human adenovirus E
caacuucucggugc

SEQ ID NO: 1577123 - RNA, 16 nt, Human adenovirus E
gucacccgccccgccc

SEQ ID NO: 1577124 - RNA, 18 nt, Human adenovirus E
uguucagagacaggagcg

SEQ ID NO: 1577125 - RNA, 14 nt, Human adenovirus E
cucccuggggcgcc

SEQ ID NO: 1577126 - RNA, 13 nt, Human adenovirus E
ggaggagcuggca

SEQ ID NO: 1577127 - RNA, 18 nt, Human adenovirus E
aacagcccccuccacagc

SEQ ID NO: 1577128 - RNA, 21 nt, Human adenovirus E
guacaacgcgcugcuggagcg

SEQ ID NO: 1577129 - RNA, 23 nt, Human adenovirus E
cagacaacccacauuacacagac

SEQ ID NO: 1577130 - RNA, 13 nt, Human adenovirus E
ggcgcugcagagc

SEQ ID NO: 1577131 - RNA, 20 nt, Human adenovirus E
ccggaucgcuguccacgagc

SEQ ID NO: 1577132 - RNA, 22 nt, Human adenovirus E
cccugaaagugcugacccugag

SEQ ID NO: 1577133 - RNA, 12 nt, Human adenovirus E
cggcgcgugcag

SEQ ID NO: 1577134 - RNA, 22 nt, Human adenovirus E
cccgccgcuguggagccacugc

SEQ ID NO: 1577135 - RNA, 17 nt, Human adenovirus E
gcaaucaggcagcaccg

SEQ ID NO: 1577136 - RNA, 12 nt, Human adenovirus E
ccaggucucugu

SEQ ID NO: 1577137 - RNA, 12 nt, Human adenovirus E
guggaucuuuuc

SEQ ID NO: 1577138 - RNA, 15 nt, Human adenovirus E
guuggcacagcacag

SEQ ID NO: 1577139 - RNA, 18 nt, Human adenovirus E
cccugccgcgcgcgcgcu

SEQ ID NO: 1577140 - RNA, 14 nt, Human adenovirus E
ggcaccugcgagcc

SEQ ID NO: 1577141 - RNA, 15 nt, Human adenovirus E
cgugguccuggugac

SEQ ID NO: 1577142 - RNA, 23 nt, Human adenovirus E
  misc_feature (6)..(6): n is a, c, g, or u
gggcancggcggcgcgcgguuga

SEQ ID NO: 1577143 - RNA, 16 nt, Human adenovirus E
cucagcaaccugcugg

SEQ ID NO: 1577144 - RNA, 19 nt, Human adenovirus E
aacagcagucaggcagagg

SEQ ID NO: 1577145 - RNA, 16 nt, Human adenovirus E
cacccagaccaucaac

SEQ ID NO: 1577146 - RNA, 20 nt, Human adenovirus E
aauuugaagauggagccaua

SEQ ID NO: 1577147 - RNA, 23 nt, Human adenovirus E
ugcuaacgagcgccccuugugga

SEQ ID NO: 1577148 - RNA, 17 nt, Human adenovirus E
cgcgaguucucgcucac

SEQ ID NO: 1577149 - RNA, 15 nt, Human adenovirus E
agcgccgcagcagug

SEQ ID NO: 1577150 - RNA, 17 nt, Human adenovirus E
gacucugacgcuccugg

SEQ ID NO: 1577151 - RNA, 19 nt, Human adenovirus E
gcaccauggaggugcagac

SEQ ID NO: 1577152 - RNA, 16 nt, Human adenovirus E
cucuauguuuaauuuu

SEQ ID NO: 1577153 - RNA, 19 nt, Human adenovirus E
cgugucaugaugcaguugc

SEQ ID NO: 1577154 - RNA, 22 nt, Human adenovirus E
cccgccucguuccagacgcggc

SEQ ID NO: 1577155 - RNA, 16 nt, Human adenovirus E
cuacuggucgcugccc

SEQ ID NO: 1577156 - RNA, 14 nt, Human adenovirus E
caacacgcuccagc

SEQ ID NO: 1577157 - RNA, 21 nt, Human adenovirus E
gccgcgugcggucgcgcacca

SEQ ID NO: 1577158 - RNA, 20 nt, Human adenovirus E
cagcccaauggcaccugcga

SEQ ID NO: 1577159 - RNA, 13 nt, Human adenovirus E
acucacaccacac

SEQ ID NO: 1577160 - RNA, 16 nt, Human adenovirus E
guaacuguuguugauc

SEQ ID NO: 1577161 - RNA, 22 nt, Human adenovirus E
gaugcauagucugcagcgggcc

SEQ ID NO: 1577162 - RNA, 16 nt, Human adenovirus E
cgcuacaacagcacca

SEQ ID NO: 1577163 - RNA, 12 nt, Human adenovirus E
ugcaccucacag

SEQ ID NO: 1577164 - RNA, 14 nt, Human adenovirus E
cuccaccaacgcca

SEQ ID NO: 1577165 - RNA, 15 nt, Human adenovirus E
ggcuggggcgacggg

SEQ ID NO: 1577166 - RNA, 20 nt, Human adenovirus E
ggcgagcgcuccggcaccgc

SEQ ID NO: 1577167 - RNA, 21 nt, Human adenovirus E
ucagccaaucagcgccccgca

SEQ ID NO: 1577168 - RNA, 19 nt, Human adenovirus E
uuccagggcgcgcgggagg

SEQ ID NO: 1577169 - RNA, 18 nt, Human adenovirus E
ggggcgauccuggcccaa

SEQ ID NO: 1577170 - RNA, 14 nt, Human adenovirus E
uccagggcuccccg

SEQ ID NO: 1577171 - RNA, 18 nt, Human adenovirus E
cgcgaggaggugacccug

SEQ ID NO: 1577172 - RNA, 14 nt, Human adenovirus E
cucagggcccggcc

SEQ ID NO: 1577173 - RNA, 17 nt, Human adenovirus E
ccacggaggccagcacc

SEQ ID NO: 1577174 - RNA, 21 nt, Human adenovirus E
gacacuaggaacuucaggcug

SEQ ID NO: 1577175 - RNA, 17 nt, Human adenovirus E
cggcgcgugcaguggcg

SEQ ID NO: 1577176 - RNA, 13 nt, Human adenovirus E
uucugcuguuagu

SEQ ID NO: 1577177 - RNA, 14 nt, Human adenovirus E
gugagcggggcugg

SEQ ID NO: 1577178 - RNA, 17 nt, Human adenovirus E
cagggccagcaccgccc

SEQ ID NO: 1577179 - RNA, 14 nt, Human adenovirus E
agcggcggcggaga

SEQ ID NO: 1577180 - RNA, 23 nt, Human adenovirus E
guggacaacaccugauccaucac

SEQ ID NO: 1577181 - RNA, 13 nt, Human adenovirus E
cuacucgcagcag

SEQ ID NO: 1577182 - RNA, 18 nt, Human adenovirus E
ggagcugaccaaccuggu

SEQ ID NO: 1577183 - RNA, 12 nt, Human adenovirus E
gucuggaggagc

SEQ ID NO: 1577184 - RNA, 16 nt, Human adenovirus E
cuugcuguagcagaac

SEQ ID NO: 1577185 - RNA, 13 nt, Human adenovirus E
gcacccucagggc

SEQ ID NO: 1577186 - RNA, 13 nt, Human adenovirus E
cuguaccgcgagg

SEQ ID NO: 1577187 - RNA, 15 nt, Human adenovirus E
agggcguuggagagg

SEQ ID NO: 1577188 - RNA, 20 nt, Human adenovirus E
ucgcccggcggcaccggagc

SEQ ID NO: 1577189 - RNA, 17 nt, Human adenovirus E
cgaggccggccuggugu

SEQ ID NO: 1577190 - RNA, 16 nt, Human adenovirus E
ggcagaugcgccccca

SEQ ID NO: 1577191 - RNA, 19 nt, Human adenovirus E
uggcaugcgaguuggagga

SEQ ID NO: 1577192 - RNA, 18 nt, Human adenovirus E
gcaagcgguuggggggag

SEQ ID NO: 1577193 - RNA, 18 nt, Human adenovirus E
acccugggccugaugcac

SEQ ID NO: 1577194 - RNA, 13 nt, Human adenovirus E
gccagacgcgcgg

SEQ ID NO: 1577195 - RNA, 16 nt, Human adenovirus E
ggucccggcgcccgcc

SEQ ID NO: 1577196 - RNA, 21 nt, Human adenovirus E
ccaaugacggguuccuguggg

SEQ ID NO: 1577197 - RNA, 15 nt, Human adenovirus E
uguggaccucggccu

SEQ ID NO: 1577198 - RNA, 20 nt, Human adenovirus E
cauagcuuaccgagcagcag

SEQ ID NO: 1577199 - RNA, 17 nt, Human adenovirus E
cugccguccucccggag

SEQ ID NO: 1577200 - RNA, 12 nt, Human adenovirus E
agcgcauccugc

SEQ ID NO: 1577201 - RNA, 17 nt, Human adenovirus E
gaagaugccgggcagga

SEQ ID NO: 1577202 - RNA, 20 nt, Human adenovirus E
ccagccccgauuaugcaggg

SEQ ID NO: 1577203 - RNA, 22 nt, Human adenovirus E
cagagucgggggcaggagcagg

SEQ ID NO: 1577204 - RNA, 18 nt, Human adenovirus E
ccaggauacggaggcggg

SEQ ID NO: 1577205 - RNA, 19 nt, Human adenovirus E
agggugccggacuggggga

SEQ ID NO: 1577206 - RNA, 18 nt, Human adenovirus E
gaacugguacuuggccag

SEQ ID NO: 1577207 - RNA, 16 nt, Human adenovirus E
auccacggccagggcg

SEQ ID NO: 1577208 - RNA, 21 nt, Human adenovirus E
gaacgccuuccucagcaccca

SEQ ID NO: 1577209 - RNA, 21 nt, Human adenovirus E
cagggccuguggggcgugcag

SEQ ID NO: 1577210 - RNA, 21 nt, Human adenovirus E
cugcaaggagaaggaggagag

SEQ ID NO: 1577211 - RNA, 12 nt, Human adenovirus E
ccgccgccagac

SEQ ID NO: 1577212 - RNA, 17 nt, Human adenovirus E
guggcacgacaggcagc

SEQ ID NO: 1577213 - RNA, 13 nt, Human adenovirus E
gagagcaugagca

SEQ ID NO: 1577214 - RNA, 14 nt, Human adenovirus E
ggcggcggcggcga

SEQ ID NO: 1577215 - RNA, 13 nt, Human adenovirus E
gcgcccuccaccg

SEQ ID NO: 1577216 - RNA, 20 nt, Human adenovirus E
aagaucuccaacguggagcu

SEQ ID NO: 1577217 - RNA, 12 nt, Human adenovirus E
ggcccucagcau

SEQ ID NO: 1577218 - RNA, 21 nt, Human adenovirus E
uaguucaacacgcuccagccg

SEQ ID NO: 1577219 - RNA, 18 nt, Human adenovirus E
aaaccauaucccagggca

SEQ ID NO: 1577220 - RNA, 12 nt, Human adenovirus E
cguucucuccag

SEQ ID NO: 1577221 - RNA, 20 nt, Human adenovirus E
uauuuuuccuccacccuccc

SEQ ID NO: 1577222 - RNA, 15 nt, Human adenovirus E
cggugcgcugguggc

SEQ ID NO: 1577223 - RNA, 20 nt, Human adenovirus E
gggcggcgcugcagagccag

SEQ ID NO: 1577224 - RNA, 21 nt, Human adenovirus E
cagcaguuugggcagcggggu

SEQ ID NO: 1577225 - RNA, 16 nt, Human adenovirus E
acaaggcccugggcau

SEQ ID NO: 1577226 - RNA, 14 nt, Human adenovirus E
ccgacggcgcgccg

SEQ ID NO: 1577227 - RNA, 12 nt, Human adenovirus E
ccucacaugacc

SEQ ID NO: 1577228 - RNA, 15 nt, Human adenovirus E
cgcugcaaccucugc

SEQ ID NO: 1577229 - RNA, 20 nt, Human adenovirus E
uagcuuaccgagcagcagca

SEQ ID NO: 1577230 - RNA, 16 nt, Human adenovirus E
uucaagaacuugcagg

SEQ ID NO: 1577231 - RNA, 20 nt, Human adenovirus E
uccacacugguggccaccuc

SEQ ID NO: 1577232 - RNA, 20 nt, Human adenovirus E
gugagcucgucggggucgcu

SEQ ID NO: 1577233 - RNA, 14 nt, Human adenovirus E
ccacggcccucagc

SEQ ID NO: 1577234 - RNA, 16 nt, Human adenovirus E
cuagccgccuccaccc

SEQ ID NO: 1577235 - RNA, 18 nt, Human adenovirus E
gcgggacgcggcugaucg

SEQ ID NO: 1577236 - RNA, 20 nt, Human adenovirus E
caggugcugccgaccgcggc

SEQ ID NO: 1577237 - RNA, 16 nt, Human adenovirus E
uccugaauccccacug

SEQ ID NO: 1577238 - RNA, 17 nt, Human adenovirus E
gguucucuaauuccuca

SEQ ID NO: 1577239 - RNA, 21 nt, Human adenovirus E
gcuuacggcaagcgcagccgu

SEQ ID NO: 1577240 - RNA, 14 nt, Human adenovirus E
ggcggcggcagcgg

SEQ ID NO: 1577241 - RNA, 15 nt, Human adenovirus E
gaggaagacugggag

SEQ ID NO: 1577242 - RNA, 21 nt, Human adenovirus E
uggugaagaugccgggcagga

SEQ ID NO: 1577243 - RNA, 17 nt, Human adenovirus E
ggcagaacgugcugcac

SEQ ID NO: 1577244 - RNA, 16 nt, Human adenovirus E
agggcgaggggcuggc

SEQ ID NO: 1577245 - RNA, 13 nt, Human adenovirus E
caccaucgucaag

SEQ ID NO: 1577246 - RNA, 21 nt, Human adenovirus E
ugcgggcggcgcugcagagcc

SEQ ID NO: 1577247 - RNA, 20 nt, Human adenovirus E
gagcaugacggcgacuaccu

SEQ ID NO: 1577248 - RNA, 18 nt, Human adenovirus E
ccgccucggaccuggccg

SEQ ID NO: 1577249 - RNA, 16 nt, Human adenovirus E
cgcucccggcggcgcu

SEQ ID NO: 1577250 - RNA, 14 nt, Human adenovirus E
gcggccuggaccga

SEQ ID NO: 1577251 - RNA, 19 nt, Human adenovirus E
caccugcuccgcgcugccc

SEQ ID NO: 1577252 - RNA, 18 nt, Human adenovirus E
gccgcugacggcgcagcu

SEQ ID NO: 1577253 - RNA, 15 nt, Human adenovirus E
gcccgaggacuacca

SEQ ID NO: 1577254 - RNA, 17 nt, Human adenovirus E
ucugauaccaggucucu

SEQ ID NO: 1577255 - RNA, 14 nt, Human adenovirus E
accgcggcgccgcg

SEQ ID NO: 1577256 - RNA, 16 nt, Human adenovirus E
ggcaucucgauccagc

SEQ ID NO: 1577257 - RNA, 14 nt, Human adenovirus E
gacagcacucaggc

SEQ ID NO: 1577258 - RNA, 22 nt, Human adenovirus E
auaauuuucauuuuuccagccu

SEQ ID NO: 1577259 - RNA, 22 nt, Human adenovirus E
gacggcccuugacguggggcag

SEQ ID NO: 1577260 - RNA, 18 nt, Human adenovirus E
caucgacagcgugguggc

SEQ ID NO: 1577261 - RNA, 19 nt, Human adenovirus E
caggacgacccgggcaacc

SEQ ID NO: 1577262 - RNA, 13 nt, Human adenovirus E
cuaugcagcucac

SEQ ID NO: 1577263 - RNA, 16 nt, Human adenovirus E
aggagcagaaccugaa

SEQ ID NO: 1577264 - RNA, 22 nt, Human adenovirus E
agcuugggggcgaggaagacgg

SEQ ID NO: 1577265 - RNA, 17 nt, Human adenovirus E
cucucagcgccacugag

SEQ ID NO: 1577266 - RNA, 17 nt, Human adenovirus E
agcagucaggcagagga

SEQ ID NO: 1577267 - RNA, 16 nt, Human adenovirus E
ggccgccagcuccucc

SEQ ID NO: 1577268 - RNA, 20 nt, Human adenovirus E
guggagccacugcuaccugc

SEQ ID NO: 1577269 - RNA, 16 nt, Human adenovirus E
gcuuccguggcggugc

SEQ ID NO: 1577270 - RNA, 19 nt, Human adenovirus E
gacagcugccguccucccg

SEQ ID NO: 1577271 - RNA, 20 nt, Human adenovirus E
gcaagccgcugacggcgcag

SEQ ID NO: 1577272 - RNA, 23 nt, Human adenovirus E
uacgcacgucuucaaccgcuucc

SEQ ID NO: 1577273 - RNA, 21 nt, Human adenovirus E
gcgcugcccguucucgcucgc

SEQ ID NO: 1577274 - RNA, 16 nt, Human adenovirus E
cugcuccgcgcugccc

SEQ ID NO: 1577275 - RNA, 17 nt, Human adenovirus E
cagagucaggcugggcu

SEQ ID NO: 1577276 - RNA, 23 nt, Human adenovirus E
cgcgccugcugcugcugcuggug

SEQ ID NO: 1577277 - RNA, 22 nt, Human adenovirus E
cagagcuggaaguccgugcgcu

SEQ ID NO: 1577278 - RNA, 22 nt, Human adenovirus E
gcccagcaagauguacggaggc

SEQ ID NO: 1577279 - RNA, 22 nt, Human adenovirus E
ugggacgauguggacagcagcg

SEQ ID NO: 1577280 - RNA, 15 nt, Human adenovirus E
ggagcggcgaggagc

SEQ ID NO: 1577281 - RNA, 16 nt, Human adenovirus E
gcugcaaccucugcac

SEQ ID NO: 1577282 - RNA, 16 nt, Human adenovirus E
cagcaaagccuccacg

SEQ ID NO: 1577283 - RNA, 20 nt, Human adenovirus E
ccgagcuccagcuccagugu

SEQ ID NO: 1577284 - RNA, 16 nt, Human adenovirus E
ccaacccuccaggaua

SEQ ID NO: 1577285 - RNA, 24 nt, Human adenovirus E
agcccgcgcgggaggcagguccag

SEQ ID NO: 1577286 - RNA, 17 nt, Human adenovirus E
gagcugcccgaaggcaa

SEQ ID NO: 1577287 - RNA, 15 nt, Human adenovirus E
ugcgcgugcgcgggc

SEQ ID NO: 1577288 - RNA, 21 nt, Human adenovirus E
ucgcccugcucgggcaucagc

SEQ ID NO: 1577289 - RNA, 15 nt, Human adenovirus E
ccgcgcccugggcca

SEQ ID NO: 1577290 - RNA, 21 nt, Human adenovirus E
gcucgcgguggggcggccagc

SEQ ID NO: 1577291 - RNA, 20 nt, Human adenovirus E
ggugcccgaggcccuggcca

SEQ ID NO: 1577292 - RNA, 22 nt, Human adenovirus E
guccccggugcugacggcuccc

SEQ ID NO: 1577293 - RNA, 23 nt, Human adenovirus E
ggucucgcacuccacgagccagg

SEQ ID NO: 1577294 - RNA, 21 nt, Human adenovirus E
cagaaccuguucagagacagg

SEQ ID NO: 1577295 - RNA, 19 nt, Human adenovirus E
cucagccaucgccaaccuc

SEQ ID NO: 1577296 - RNA, 17 nt, Human adenovirus E
cauggaauacaccaccc

SEQ ID NO: 1577297 - RNA, 11 nt, Human adenovirus E
ucccagggcac

SEQ ID NO: 1577298 - RNA, 15 nt, Human adenovirus E
agcgcauggucuggu

SEQ ID NO: 1577299 - RNA, 19 nt, Human adenovirus E
acugacuuccuccgcggcc

SEQ ID NO: 1577300 - RNA, 21 nt, Human adenovirus E
gggcaucaacgggguggugga

SEQ ID NO: 1577301 - RNA, 22 nt, Human adenovirus E
cauccuggccguguugcucuac

SEQ ID NO: 1577302 - RNA, 22 nt, Human adenovirus E
accaucgucaaggaugcgcugc

SEQ ID NO: 1577303 - RNA, 22 nt, Human adenovirus E
agcagcagaaaaagaccagcag

SEQ ID NO: 1577304 - RNA, 19 nt, Human adenovirus E
caugcaucucuucagcacu

SEQ ID NO: 1577305 - RNA, 22 nt, Human adenovirus E
guccgguccuuccagggucgca

SEQ ID NO: 1577306 - RNA, 17 nt, Human adenovirus E
gggcgagguugagcucc

SEQ ID NO: 1577307 - RNA, 13 nt, Human adenovirus E
gagccaggugagg

SEQ ID NO: 1577308 - RNA, 20 nt, Human adenovirus E
gcagcggggacagauguggg

SEQ ID NO: 1577309 - RNA, 20 nt, Human adenovirus E
gggcgaggaagacggacucg

SEQ ID NO: 1577310 - RNA, 18 nt, Human adenovirus E
gauguacagguggcagau

SEQ ID NO: 1577311 - RNA, 18 nt, Human adenovirus E
accucccgguaccacauc

SEQ ID NO: 1577312 - RNA, 17 nt, Human adenovirus E
cgccuuccucagcaccc

SEQ ID NO: 1577313 - RNA, 20 nt, Human adenovirus E
cccagucauagcaggggcgc

SEQ ID NO: 1577314 - RNA, 19 nt, Human adenovirus E
cgacaggaugcaccgugcg

SEQ ID NO: 1577315 - RNA, 19 nt, Human adenovirus E
ccggcauuaacuccucgga

SEQ ID NO: 1577316 - RNA, 17 nt, Human adenovirus E
ggggcaccucggcccgg

SEQ ID NO: 1577317 - RNA, 11 nt, Human adenovirus E
cccaggccaug

SEQ ID NO: 1577318 - RNA, 13 nt, Human adenovirus E
aagacgaggagga

SEQ ID NO: 1577319 - RNA, 15 nt, Human adenovirus E
cuuaccauugucaau

SEQ ID NO: 1577320 - RNA, 22 nt, Human adenovirus E
uacuggccacugugucagucuu

SEQ ID NO: 1577321 - RNA, 20 nt, Human adenovirus E
cccgguggugggcgccgagc

SEQ ID NO: 1577322 - RNA, 19 nt, Human adenovirus E
cagaccucggcgcgagcgg

SEQ ID NO: 1577323 - RNA, 22 nt, Human adenovirus E
gggacagcacucaggcagagga

SEQ ID NO: 1577324 - RNA, 23 nt, Human adenovirus E
cuuccagauaacuggacagaaaa

SEQ ID NO: 1577325 - RNA, 15 nt, Human adenovirus E
aacaggagcuacaac

SEQ ID NO: 1577326 - RNA, 13 nt, Human adenovirus E
ccgccgcaagacc

SEQ ID NO: 1577327 - RNA, 12 nt, Human adenovirus E
cacccgccccgc

SEQ ID NO: 1577328 - RNA, 15 nt, Human adenovirus E
acccccacggaggcc

SEQ ID NO: 1577329 - RNA, 12 nt, Human adenovirus E
agcugucggccu

SEQ ID NO: 1577330 - RNA, 20 nt, Human adenovirus E
guuggcacagcacaggcaua

SEQ ID NO: 1577331 - RNA, 21 nt, Human adenovirus E
cccaggccgaaguccagcuga

SEQ ID NO: 1577332 - RNA, 23 nt, Human adenovirus E
agcaucuggcccggcaggccacc

SEQ ID NO: 1577333 - RNA, 16 nt, Human adenovirus E
cagggcaugggauggg

SEQ ID NO: 1577334 - RNA, 17 nt, Human adenovirus E
gagaugcaauugaaagc

SEQ ID NO: 1577335 - RNA, 16 nt, Human adenovirus E
ucgcccaucuccgagg

SEQ ID NO: 1577336 - RNA, 15 nt, Human adenovirus E
cuaccuauaccuccc

SEQ ID NO: 1577337 - RNA, 16 nt, Human adenovirus E
uccguggcggugcagg

SEQ ID NO: 1577338 - RNA, 18 nt, Human adenovirus E
agcagaagcgugggccug

SEQ ID NO: 1577339 - RNA, 13 nt, Human adenovirus E
agcacucaggcag

SEQ ID NO: 1577340 - RNA, 13 nt, Human adenovirus E
caccaccacagca

SEQ ID NO: 1577341 - RNA, 22 nt, Human adenovirus E
ccaguaauaacaccgguugggg

SEQ ID NO: 1577342 - RNA, 15 nt, Human adenovirus E
cgcuccggcaccgcu

SEQ ID NO: 1577343 - RNA, 18 nt, Human adenovirus E
cucuucuacuuccuccuc

SEQ ID NO: 1577344 - RNA, 22 nt, Human adenovirus E
ggagcgacaucggcaccagcca

SEQ ID NO: 1577345 - RNA, 19 nt, Human adenovirus E
gcaugcgaguuggaggaga

SEQ ID NO: 1577346 - RNA, 16 nt, Human adenovirus E
cgggcaaccuggaagc

SEQ ID NO: 1577347 - RNA, 23 nt, Human adenovirus E
aucacuauucuuaucugccuccu

SEQ ID NO: 1577348 - RNA, 21 nt, Human adenovirus E
uucagcgcacucucgaggacg

SEQ ID NO: 1577349 - RNA, 14 nt, Human adenovirus E
augagcaccacagc

SEQ ID NO: 1577350 - RNA, 23 nt, Human adenovirus E
ugcauagucugcagcgggcccug

SEQ ID NO: 1577351 - RNA, 18 nt, Human adenovirus E
cugcacuaccucuucagg

SEQ ID NO: 1577352 - RNA, 20 nt, Human adenovirus E
uggcacuaaucacacauuga

SEQ ID NO: 1577353 - RNA, 15 nt, Human adenovirus E
cauggcgaccagcgu

SEQ ID NO: 1577354 - RNA, 12 nt, Human adenovirus E
gcccggcugcgg

SEQ ID NO: 1577355 - RNA, 16 nt, Human adenovirus E
uacucgcagcagcugc

SEQ ID NO: 1577356 - RNA, 17 nt, Human adenovirus E
uacuaaaaauaauauag

SEQ ID NO: 1577357 - RNA, 23 nt, Human adenovirus E
gacggcccuugacguggggcagu

SEQ ID NO: 1577358 - RNA, 18 nt, Human adenovirus E
uaccacaucacccucugg

SEQ ID NO: 1577359 - RNA, 18 nt, Human adenovirus E
ugccgaccgcggcgccgc

SEQ ID NO: 1577360 - RNA, 16 nt, Human adenovirus E
ugccccggggccagga

SEQ ID NO: 1577361 - RNA, 21 nt, Human adenovirus E
gcugaaaguggagcugccgcc

SEQ ID NO: 1577362 - RNA, 20 nt, Human adenovirus E
gugcgcgccgggcugggcgc

SEQ ID NO: 1577363 - RNA, 15 nt, Human adenovirus E
caaguuccggagcag

SEQ ID NO: 1577364 - RNA, 17 nt, Human adenovirus E
agaccgucguccucggc

SEQ ID NO: 1577365 - RNA, 16 nt, Human adenovirus E
gcccgaggcccuggcc

SEQ ID NO: 1577366 - RNA, 20 nt, Human adenovirus E
agggcgaguaccuggaagac

SEQ ID NO: 1577367 - RNA, 20 nt, Human adenovirus E
gaucccauuugagcuggagg

SEQ ID NO: 1577368 - RNA, 18 nt, Human adenovirus E
gagagcgugaugcagcag

SEQ ID NO: 1577369 - RNA, 22 nt, Human adenovirus E
auggcuggcagagccccuuccg

SEQ ID NO: 1577370 - RNA, 18 nt, Human adenovirus E
ccgaccccgucaccacca

SEQ ID NO: 1577371 - RNA, 16 nt, Human adenovirus E
gaaggaaggcagcgac

SEQ ID NO: 1577372 - RNA, 18 nt, Human adenovirus E
cucgccaucugcccccac

SEQ ID NO: 1577373 - RNA, 20 nt, Human adenovirus E
ccacgcggggcgggagcugc

SEQ ID NO: 1577374 - RNA, 14 nt, Human adenovirus E
aaguccagcaaagc

SEQ ID NO: 1577375 - RNA, 13 nt, Human adenovirus E
uggaggaagacug

SEQ ID NO: 1577376 - RNA, 23 nt, Human adenovirus E
cggccgccgugagcggggcugga

SEQ ID NO: 1577377 - RNA, 19 nt, Human adenovirus E
ccacugccgcugcaaccuc

SEQ ID NO: 1577378 - RNA, 12 nt, Human adenovirus E
ucgcgcuucugc

SEQ ID NO: 1577379 - RNA, 20 nt, Human adenovirus E
ggcgugccccagggcauggg

SEQ ID NO: 1577380 - RNA, 15 nt, Human adenovirus E
acuggaucuuugugc

SEQ ID NO: 1577381 - RNA, 21 nt, Human adenovirus E
gccugggguucauguugugca

SEQ ID NO: 1577382 - RNA, 11 nt, Human adenovirus E
ucaguugcagg

SEQ ID NO: 1577383 - RNA, 18 nt, Human adenovirus E
accugauaucgccuccuu

SEQ ID NO: 1577384 - RNA, 19 nt, Human adenovirus E
gcagcagaaaaagaccagc

SEQ ID NO: 1577385 - RNA, 20 nt, Human adenovirus E
ggacguccagagcgcaguag

SEQ ID NO: 1577386 - RNA, 16 nt, Human adenovirus E
cgagaaccgccugggg

SEQ ID NO: 1577387 - RNA, 12 nt, Human adenovirus E
ggggccaggagg

SEQ ID NO: 1577388 - RNA, 16 nt, Human adenovirus E
cugauggugaccgagg

SEQ ID NO: 1577389 - RNA, 19 nt, Human adenovirus E
cagcaccauggaggugcag

SEQ ID NO: 1577390 - RNA, 17 nt, Human adenovirus E
ccuggacaaaauaccac

SEQ ID NO: 1577391 - RNA, 16 nt, Human adenovirus E
gcauucacaugcucau

SEQ ID NO: 1577392 - RNA, 19 nt, Human adenovirus E
ggccaggacgacccgggca

SEQ ID NO: 1577393 - RNA, 23 nt, Human adenovirus E
ggauuccgcggcuaacgagggcg

SEQ ID NO: 1577394 - RNA, 20 nt, Human adenovirus E
cccgcgaugcgggcggcgcu

SEQ ID NO: 1577395 - RNA, 20 nt, Human adenovirus E
agcagaaaaccagcagcuag

SEQ ID NO: 1577396 - RNA, 18 nt, Human adenovirus E
ggugauaucuuccagaua

SEQ ID NO: 1577397 - RNA, 23 nt, Human adenovirus E
gccaaccaggccgugcagcggca

SEQ ID NO: 1577398 - RNA, 15 nt, Human adenovirus E
gaccaccguggugca

SEQ ID NO: 1577399 - RNA, 18 nt, Human adenovirus E
gccucaggagugaugaag

SEQ ID NO: 1577400 - RNA, 23 nt, Human adenovirus E
uccggaauccugcccgccaccug

SEQ ID NO: 1577401 - RNA, 18 nt, Human adenovirus E
ggcgaggggcuggcgcgc

SEQ ID NO: 1577402 - RNA, 15 nt, Human adenovirus E
caucguugaagagga

SEQ ID NO: 1577403 - RNA, 20 nt, Human adenovirus E
  misc_feature (8)..(8): n is a, c, g, or u
aguccugnugagcggcccug

SEQ ID NO: 1577404 - RNA, 20 nt, Human adenovirus E
caagaacagccagagcagga

SEQ ID NO: 1577405 - RNA, 19 nt, Human adenovirus E
caagucuauguuggcacag

SEQ ID NO: 1577406 - RNA, 17 nt, Human adenovirus E
gggugcuucacgcucgc

SEQ ID NO: 1577407 - RNA, 16 nt, Human adenovirus E
agcgccgcagcagugg

SEQ ID NO: 1577408 - RNA, 21 nt, Human adenovirus E
ccaggccgaaguccagcugac

SEQ ID NO: 1577409 - RNA, 12 nt, Human adenovirus E
uccaacguggag

SEQ ID NO: 1577410 - RNA, 20 nt, Human adenovirus E
cgggacccugccgcugcgca

SEQ ID NO: 1577411 - RNA, 12 nt, Human adenovirus E
gcgaugcagccc

SEQ ID NO: 1577412 - RNA, 18 nt, Human adenovirus E
cggaggccagcacccaga

SEQ ID NO: 1577413 - RNA, 16 nt, Human adenovirus E
cgcggagcacgaggag

SEQ ID NO: 1577414 - RNA, 14 nt, Human adenovirus E
guccguguccccgu

SEQ ID NO: 1577415 - RNA, 20 nt, Human adenovirus E
cuuccagauaacuggacaga

SEQ ID NO: 1577416 - RNA, 19 nt, Human adenovirus E
caccacgcugcgcccccag

SEQ ID NO: 1577417 - RNA, 18 nt, Human adenovirus E
cuuuagguuuuggaucag

SEQ ID NO: 1577418 - RNA, 19 nt, Human adenovirus E
gcaaggaggaugcagcagc

SEQ ID NO: 1577419 - RNA, 18 nt, Human adenovirus E
gcagcagguggacugagg

SEQ ID NO: 1577420 - RNA, 20 nt, Human adenovirus E
gccaacuaccuggccuacca

SEQ ID NO: 1577421 - RNA, 20 nt, Human adenovirus E
cccggcggcgcgugcagugg

SEQ ID NO: 1577422 - RNA, 22 nt, Human adenovirus E
cgccgaggcucucuucaacaag

SEQ ID NO: 1577423 - RNA, 22 nt, Human adenovirus E
ggacgccgaggcucucuucaac

SEQ ID NO: 1577424 - RNA, 16 nt, Human adenovirus E
cggccgaggcggcuga

SEQ ID NO: 1577425 - RNA, 20 nt, Human adenovirus E
gccaucacaccuuccaccug

SEQ ID NO: 1577426 - RNA, 16 nt, Human adenovirus E
caggccccgcagcagu

SEQ ID NO: 1577427 - RNA, 23 nt, Human adenovirus E
gucauagcaggggcgcagggcau

SEQ ID NO: 1577428 - RNA, 19 nt, Human adenovirus E
gccucuaccgaggucaggg

SEQ ID NO: 1577429 - RNA, 13 nt, Human adenovirus E
ugccgcccaggac

SEQ ID NO: 1577430 - RNA, 14 nt, Human adenovirus E
cgacgagcgcacca

SEQ ID NO: 1577431 - RNA, 15 nt, Human adenovirus E
cagguggacugagga

SEQ ID NO: 1577432 - RNA, 17 nt, Human adenovirus E
cgauaaacucacuuugu

SEQ ID NO: 1577433 - RNA, 16 nt, Human adenovirus E
uaccaccacuacagcc

SEQ ID NO: 1577434 - RNA, 18 nt, Human adenovirus E
ugagacgcugcggaguca

SEQ ID NO: 1577435 - RNA, 20 nt, Human adenovirus E
cugcaagacagucuggagga

SEQ ID NO: 1577436 - RNA, 18 nt, Human adenovirus E
cgaggaagaaaaccgcgc

SEQ ID NO: 1577437 - RNA, 23 nt, Human adenovirus E
gcuggagugccugcgccgcuucu

SEQ ID NO: 1577438 - RNA, 15 nt, Human adenovirus E
accgaggaggagcgc

SEQ ID NO: 1577439 - RNA, 20 nt, Human adenovirus E
uggacccggacgugcagccc

SEQ ID NO: 1577440 - RNA, 23 nt, Human adenovirus E
aggacgacccgggcaaccuggaa

SEQ ID NO: 1577441 - RNA, 14 nt, Human adenovirus E
ccgauccuggucga

SEQ ID NO: 1577442 - RNA, 20 nt, Human adenovirus E
cguaugcgcaggagcacagg

SEQ ID NO: 1577443 - RNA, 17 nt, Human adenovirus E
cggacgauuggacccag

SEQ ID NO: 1577444 - RNA, 15 nt, Human adenovirus E
aaccaucacagagag

SEQ ID NO: 1577445 - RNA, 19 nt, Human adenovirus E
ggaugcaggggcggcaggg

SEQ ID NO: 1577446 - RNA, 19 nt, Human adenovirus E
ccacgccuuacauguggag

SEQ ID NO: 1577447 - RNA, 19 nt, Human adenovirus E
  misc_feature (8)..(8): n is a, c, g, or u
cccgggcnugggcgugcag

SEQ ID NO: 1577448 - RNA, 15 nt, Human adenovirus E
aucucgcucaggucg

SEQ ID NO: 1577449 - RNA, 23 nt, Human adenovirus E
ugcuguaguggugugcauguuga

SEQ ID NO: 1577450 - RNA, 22 nt, Human adenovirus E
gcgcccaccauuaccaccguca

SEQ ID NO: 1577451 - RNA, 16 nt, Human adenovirus E
guccaccugcggggcg

SEQ ID NO: 1577452 - RNA, 15 nt, Human adenovirus E
aauuuuuagccauag

SEQ ID NO: 1577453 - RNA, 16 nt, Human adenovirus E
uccacguuccacacag

SEQ ID NO: 1577454 - RNA, 11 nt, Human adenovirus E
guggacgccgu

SEQ ID NO: 1577455 - RNA, 12 nt, Human adenovirus E
cggcccucagca

SEQ ID NO: 1577456 - RNA, 15 nt, Human adenovirus E
aggguauaaagcggc

SEQ ID NO: 1577457 - RNA, 19 nt, Human adenovirus E
ugggcgugcagaccgugga

SEQ ID NO: 1577458 - RNA, 17 nt, Human adenovirus E
gcaccucugacccugcc

SEQ ID NO: 1577459 - RNA, 13 nt, Human adenovirus E
gagucgggggcag

SEQ ID NO: 1577460 - RNA, 17 nt, Human adenovirus E
ucaaguggugcccccuc

SEQ ID NO: 1577461 - RNA, 20 nt, Human adenovirus E
ggcccgcuacaacagcacca

SEQ ID NO: 1577462 - RNA, 24 nt, Human adenovirus E
gagcuugggggcgaggaagacgga

SEQ ID NO: 1577463 - RNA, 15 nt, Human adenovirus E
ccugccgcgccaacc

SEQ ID NO: 1577464 - RNA, 17 nt, Human adenovirus E
agucucaaguccagcaa

SEQ ID NO: 1577465 - RNA, 20 nt, Human adenovirus E
gcgcggccacggcggcggca

SEQ ID NO: 1577466 - RNA, 12 nt, Human adenovirus E
ggcuggagccgc

SEQ ID NO: 1577467 - RNA, 19 nt, Human adenovirus E
agcccaauggcaccugcga

SEQ ID NO: 1577468 - RNA, 20 nt, Human adenovirus E
gccuuuagacagcagcccca

SEQ ID NO: 1577469 - RNA, 17 nt, Human adenovirus E
ugcaggccugcgggggc

SEQ ID NO: 1577470 - RNA, 12 nt, Human adenovirus E
caucggccaggc

SEQ ID NO: 1577471 - RNA, 23 nt, Human adenovirus E
  misc_feature (9)..(9): n is a, c, g, or u
uggacaucnagauucccacggag

SEQ ID NO: 1577472 - RNA, 14 nt, Human adenovirus E
gcguguggcagcag

SEQ ID NO: 1577473 - RNA, 22 nt, Human adenovirus E
gccgugagcggggcuggacaga

SEQ ID NO: 1577474 - RNA, 23 nt, Human adenovirus E
aggacgcgcucaucaagcaucug

SEQ ID NO: 1577475 - RNA, 14 nt, Human adenovirus E
cagggugaugaggu

SEQ ID NO: 1577476 - RNA, 14 nt, Human adenovirus E
gcagugggcgcaga

SEQ ID NO: 1577477 - RNA, 16 nt, Human adenovirus E
uccagaaaaagccaca

SEQ ID NO: 1577478 - RNA, 19 nt, Human adenovirus E
uacgcgcugcauccuucca

SEQ ID NO: 1577479 - RNA, 19 nt, Human adenovirus E
aauuccuccugucccucaa

SEQ ID NO: 1577480 - RNA, 20 nt, Human adenovirus E
gagcauuacucucaucaagu

SEQ ID NO: 1577481 - RNA, 15 nt, Human adenovirus E
ggcggacgcgcgccg

SEQ ID NO: 1577482 - RNA, 18 nt, Human adenovirus E
guggugcccccuccagaa

SEQ ID NO: 1577483 - RNA, 14 nt, Human adenovirus E
cuccacccucccag

SEQ ID NO: 1577484 - RNA, 16 nt, Human adenovirus E
caccaagaacagccag

SEQ ID NO: 1577485 - RNA, 15 nt, Human adenovirus E
gagggaagaacagga

SEQ ID NO: 1577486 - RNA, 12 nt, Human adenovirus E
gaugggacgaga

SEQ ID NO: 1577487 - RNA, 20 nt, Human adenovirus E
gaccgggugcuaacgagcgc

SEQ ID NO: 1577488 - RNA, 19 nt, Human adenovirus E
gucaaaaccauaucccagg

SEQ ID NO: 1577489 - RNA, 20 nt, Human adenovirus E
ccguuucuucuugggcggcu

SEQ ID NO: 1577490 - RNA, 13 nt, Human adenovirus E
ccggucucgauca

SEQ ID NO: 1577491 - RNA, 14 nt, Human adenovirus E
ugauggcgggacgc

SEQ ID NO: 1577492 - RNA, 19 nt, Human adenovirus E
gcccaggacuacuccaccc

SEQ ID NO: 1577493 - RNA, 15 nt, Human adenovirus E
cagccggagccgcuu

SEQ ID NO: 1577494 - RNA, 18 nt, Human adenovirus E
gccggcgucgcauggucu

SEQ ID NO: 1577495 - RNA, 17 nt, Human adenovirus E
cgagacgaugggcaggc

SEQ ID NO: 1577496 - RNA, 18 nt, Human adenovirus E
gccgcgcgcgcgcuacca

SEQ ID NO: 1577497 - RNA, 15 nt, Human adenovirus E
agcagaagcgugggc

SEQ ID NO: 1577498 - RNA, 19 nt, Human adenovirus E
guacuugaucuccaccgcg

SEQ ID NO: 1577499 - RNA, 16 nt, Human adenovirus E
caugucccccucgucc

SEQ ID NO: 1577500 - RNA, 20 nt, Human adenovirus E
cgccgcgcgugccccccaag

SEQ ID NO: 1577501 - RNA, 15 nt, Human adenovirus E
ugcgcgccgggcugg

SEQ ID NO: 1577502 - RNA, 19 nt, Human adenovirus E
ccaggcggucccagagcuc

SEQ ID NO: 1577503 - RNA, 21 nt, Human adenovirus E
gggcguuggagaggagcuugg

SEQ ID NO: 1577504 - RNA, 19 nt, Human adenovirus E
uggcaucggcacucuccag

SEQ ID NO: 1577505 - RNA, 22 nt, Human adenovirus E
aaguagcugauggaaguggcca

SEQ ID NO: 1577506 - RNA, 21 nt, Human adenovirus E
agaagggcgugcgcuccugga

SEQ ID NO: 1577507 - RNA, 17 nt, Human adenovirus E
gaaggauagcaagaaca

SEQ ID NO: 1577508 - RNA, 20 nt, Human adenovirus E
ccaggaaauuccccagccca

SEQ ID NO: 1577509 - RNA, 23 nt, Human adenovirus E
cguggcccgcuacaacagcacca

SEQ ID NO: 1577510 - RNA, 13 nt, Human adenovirus E
accacuucacucc

SEQ ID NO: 1577511 - RNA, 15 nt, Human adenovirus E
gugcguuccagcaug

SEQ ID NO: 1577512 - RNA, 13 nt, Human adenovirus E
uggugggcgccga

SEQ ID NO: 1577513 - RNA, 20 nt, Human adenovirus E
aaacccuccgggcacucccg

SEQ ID NO: 1577514 - RNA, 19 nt, Human adenovirus E
ccagaaaaagccacagaag

SEQ ID NO: 1577515 - RNA, 18 nt, Human adenovirus E
cguucagggaggcgcugc

SEQ ID NO: 1577516 - RNA, 15 nt, Human adenovirus E
caagacccccaaugg

SEQ ID NO: 1577517 - RNA, 17 nt, Human adenovirus E
gcuuaaaaccuauggca

SEQ ID NO: 1577518 - RNA, 15 nt, Human adenovirus E
cagccgcggccaggg

SEQ ID NO: 1577519 - RNA, 13 nt, Human adenovirus E
gagcgugaugcag

SEQ ID NO: 1577520 - RNA, 15 nt, Human adenovirus E
gcccggcaggccacc

SEQ ID NO: 1577521 - RNA, 23 nt, Human adenovirus E
cuucagcgcgcgcugcccguucu

SEQ ID NO: 1577522 - RNA, 14 nt, Human adenovirus E
caagcugcugcuca

SEQ ID NO: 1577523 - RNA, 17 nt, Human adenovirus E
ucccggcgcccgccuac

SEQ ID NO: 1577524 - RNA, 16 nt, Human adenovirus E
cccacauuacacagac

SEQ ID NO: 1577525 - RNA, 18 nt, Human adenovirus E
gcgcacggccagcgcgcg

SEQ ID NO: 1577526 - RNA, 19 nt, Human adenovirus E
cggcggugcccgaggccgc

SEQ ID NO: 1577527 - RNA, 17 nt, Human adenovirus E
ccugcuuaucaccuucu

SEQ ID NO: 1577528 - RNA, 23 nt, Human adenovirus E
gauccugcggaaccacagggcca

SEQ ID NO: 1577529 - RNA, 19 nt, Human adenovirus E
ggccaggcgcacguggacg

SEQ ID NO: 1577530 - RNA, 22 nt, Human adenovirus E
gcucgcgguggggcggccagcu

SEQ ID NO: 1577531 - RNA, 19 nt, Human adenovirus E
accgccucggaccuggccg

SEQ ID NO: 1577532 - RNA, 16 nt, Human adenovirus E
caguccuuucccgagc

SEQ ID NO: 1577533 - RNA, 22 nt, Human adenovirus E
cuuuagacagcagccccaggcc

SEQ ID NO: 1577534 - RNA, 18 nt, Human adenovirus E
guauugcuauuuuggauc

SEQ ID NO: 1577535 - RNA, 14 nt, Human adenovirus E
aggaagagaugcuc

SEQ ID NO: 1577536 - RNA, 13 nt, Human adenovirus E
uccggagcagcug

SEQ ID NO: 1577537 - RNA, 17 nt, Human adenovirus E
  misc_feature (8)..(8): n is a, c, g, or u
gcacgaangaggccacg

SEQ ID NO: 1577538 - RNA, 14 nt, Human adenovirus E
ugauauucuggagc

SEQ ID NO: 1577539 - RNA, 16 nt, Human adenovirus E
ggcaucuugcacgaga

SEQ ID NO: 1577540 - RNA, 21 nt, Human adenovirus E
caguccauaguucaacacgcu

SEQ ID NO: 1577541 - RNA, 12 nt, Human adenovirus E
cgcccagcaaga

SEQ ID NO: 1577542 - RNA, 22 nt, Human adenovirus E
acagcuaccuccagugccuucu

SEQ ID NO: 1577543 - RNA, 22 nt, Human adenovirus E
cggcgcgagcugagcgaccagg

SEQ ID NO: 1577544 - RNA, 13 nt, Human adenovirus E
ggaggucgggguc

SEQ ID NO: 1577545 - RNA, 16 nt, Human adenovirus E
ugagcaaagagauucc

SEQ ID NO: 1577546 - RNA, 15 nt, Human adenovirus E
gcuacaacagcacca

SEQ ID NO: 1577547 - RNA, 17 nt, Human adenovirus E
caacccacauuacacag

SEQ ID NO: 1577548 - RNA, 11 nt, Human adenovirus E
cugcugaaccu

SEQ ID NO: 1577549 - RNA, 16 nt, Human adenovirus E
ccgggcuaccgcggca

SEQ ID NO: 1577550 - RNA, 15 nt, Human adenovirus E
ugcagcacuggaaca

SEQ ID NO: 1577551 - RNA, 18 nt, Human adenovirus E
acgugcucuuugccuuca

SEQ ID NO: 1577552 - RNA, 15 nt, Human adenovirus E
cgaacucgcgccugc

SEQ ID NO: 1577553 - RNA, 20 nt, Human adenovirus E
agaggcggaggcgacgggcu

SEQ ID NO: 1577554 - RNA, 17 nt, Human adenovirus E
cuacaaggcccugggca

SEQ ID NO: 1577555 - RNA, 17 nt, Human adenovirus E
cagagcgcccuccaccg

SEQ ID NO: 1577556 - RNA, 17 nt, Human adenovirus E
cauccccgcgcuccugg

SEQ ID NO: 1577557 - RNA, 21 nt, Human adenovirus E
auccacagcggcggcagcagg

SEQ ID NO: 1577558 - RNA, 12 nt, Human adenovirus E
ggaucagccccg

SEQ ID NO: 1577559 - RNA, 17 nt, Human adenovirus E
ugccgcgguccuccucg

SEQ ID NO: 1577560 - RNA, 13 nt, Human adenovirus E
acaccuuccaccu

SEQ ID NO: 1577561 - RNA, 20 nt, Human adenovirus E
gccuggccgccggugccgcc

SEQ ID NO: 1577562 - RNA, 15 nt, Human adenovirus E
gacagaugugggacg

SEQ ID NO: 1577563 - RNA, 16 nt, Human adenovirus E
cugcacaccacccugc

SEQ ID NO: 1577564 - RNA, 20 nt, Human adenovirus E
caccaccugcaucugcugcu

SEQ ID NO: 1577565 - RNA, 23 nt, Human adenovirus E
ggacuccgcgcaaggaccugagc

SEQ ID NO: 1577566 - RNA, 13 nt, Human adenovirus E
gaacagccagagc

SEQ ID NO: 1577567 - RNA, 21 nt, Human adenovirus E
gauaucgccuccuuggaagag

SEQ ID NO: 1577568 - RNA, 14 nt, Human adenovirus E
cggcccucagcauc

SEQ ID NO: 1577569 - RNA, 14 nt, Human adenovirus E
ggcagcggggacag

SEQ ID NO: 1577570 - RNA, 20 nt, Human adenovirus E
gacggcgcgcccguccucgc

SEQ ID NO: 1577571 - RNA, 17 nt, Human adenovirus E
  misc_feature (6)..(6): n is a, c, g, or u
cgggcnugggcgugcag

SEQ ID NO: 1577572 - RNA, 21 nt, Human adenovirus E
cguagaggaaccccgcccacu

SEQ ID NO: 1577573 - RNA, 16 nt, Human adenovirus E
gcagcagcgagcuggg

SEQ ID NO: 1577574 - RNA, 15 nt, Human adenovirus E
agucauagcaggggc

SEQ ID NO: 1577575 - RNA, 17 nt, Human adenovirus E
gccucgugcucgggggu

SEQ ID NO: 1577576 - RNA, 21 nt, Human adenovirus E
cuucacccccacggaggccag

SEQ ID NO: 1577577 - RNA, 14 nt, Human adenovirus E
uccgguccuuccag

SEQ ID NO: 1577578 - RNA, 20 nt, Human adenovirus E
gcacuuccgcgcucccuggg

SEQ ID NO: 1577579 - RNA, 15 nt, Human adenovirus E
aacugucaaauacuc

SEQ ID NO: 1577580 - RNA, 13 nt, Human adenovirus E
cgcuguccuggcu

SEQ ID NO: 1577581 - RNA, 15 nt, Human adenovirus E
aacaguauccgcagc

SEQ ID NO: 1577582 - RNA, 16 nt, Human adenovirus E
cacggacagcggcagc

SEQ ID NO: 1577583 - RNA, 12 nt, Human adenovirus E
gcggccagcuga

SEQ ID NO: 1577584 - RNA, 18 nt, Human adenovirus E
ccgccuccacccaucauc

SEQ ID NO: 1577585 - RNA, 23 nt, Human adenovirus E
caggccgucuacucgcagcagcu

SEQ ID NO: 1577586 - RNA, 16 nt, Human adenovirus E
ggcccugcggugguga

SEQ ID NO: 1577587 - RNA, 18 nt, Human adenovirus E
cgcgagcgguuccaccgc

SEQ ID NO: 1577588 - RNA, 22 nt, Human adenovirus E
ggaccugcacuggcagcccagc

SEQ ID NO: 1577589 - RNA, 21 nt, Human adenovirus E
gccaccuccugaucccgcgau

SEQ ID NO: 1577590 - RNA, 19 nt, Human adenovirus E
ugaacacuguaucccaccc

SEQ ID NO: 1577591 - RNA, 17 nt, Human adenovirus E
agcaggaagcagagaau

SEQ ID NO: 1577592 - RNA, 14 nt, Human adenovirus E
cgacagcguggugg

SEQ ID NO: 1577593 - RNA, 15 nt, Human adenovirus E
ggggcgaggaagacg

SEQ ID NO: 1577594 - RNA, 21 nt, Human adenovirus E
cacuuacuaaguguugaauuu

SEQ ID NO: 1577595 - RNA, 20 nt, Human adenovirus E
gggugcgcucccggcggcgc

SEQ ID NO: 1577596 - RNA, 16 nt, Human adenovirus E
ggacaaaaaggaagaa

SEQ ID NO: 1577597 - RNA, 14 nt, Human adenovirus E
gagcacgaggagga

SEQ ID NO: 1577598 - RNA, 14 nt, Human adenovirus E
caguaguacagaaa

SEQ ID NO: 1577599 - RNA, 12 nt, Human adenovirus E
ucgcgcaccacc

SEQ ID NO: 1577600 - RNA, 21 nt, Human adenovirus E
ggagcacgaggaggagcuggc

SEQ ID NO: 1577601 - RNA, 16 nt, Human adenovirus E
ggccugcaacccccag

SEQ ID NO: 1577602 - RNA, 18 nt, Human adenovirus E
cugguacugcaggccccg

SEQ ID NO: 1577603 - RNA, 16 nt, Human adenovirus E
uggagcuaccagcccc

SEQ ID NO: 1577604 - RNA, 19 nt, Human adenovirus E
cacccccacggaggccagc

SEQ ID NO: 1577605 - RNA, 20 nt, Human adenovirus E
ccaccacuacagccuaggcc

SEQ ID NO: 1577606 - RNA, 14 nt, Human adenovirus E
guucuacacgggcg

SEQ ID NO: 1577607 - RNA, 22 nt, Human adenovirus E
  misc_feature (9)..(9): n is a, c, g, or u
ccccgggcnugggcgugcagac

SEQ ID NO: 1577608 - RNA, 18 nt, Human adenovirus E
gcuggagugccugcgccg

SEQ ID NO: 1577609 - RNA, 20 nt, Human adenovirus E
gccccucagcguggaggagc

SEQ ID NO: 1577610 - RNA, 20 nt, Human adenovirus E
cucaucaagcaucuggcccg

SEQ ID NO: 1577611 - RNA, 17 nt, Human adenovirus E
ugccgggcaggaggucg

SEQ ID NO: 1577612 - RNA, 14 nt, Human adenovirus E
ugaucaccagcugg

SEQ ID NO: 1577613 - RNA, 23 nt, Human adenovirus E
cuacgcgcugcauccuuccauca

SEQ ID NO: 1577614 - RNA, 22 nt, Human adenovirus E
caugcaucucuucagcacucuc

SEQ ID NO: 1577615 - RNA, 23 nt, Human adenovirus E
uggaggcuaagcgaacggguugg

SEQ ID NO: 1577616 - RNA, 18 nt, Human adenovirus E
cgcgucguuguuggccag

SEQ ID NO: 1577617 - RNA, 15 nt, Human adenovirus E
gccucggaccuggcc

SEQ ID NO: 1577618 - RNA, 21 nt, Human adenovirus E
uacucgcagaaaaugaugcaa

SEQ ID NO: 1577619 - RNA, 17 nt, Human adenovirus E
gcagucccacugcuagu

SEQ ID NO: 1577620 - RNA, 12 nt, Human adenovirus E
cugcgcccggag

SEQ ID NO: 1577621 - RNA, 17 nt, Human adenovirus E
gucgcccagcgccucca

SEQ ID NO: 1577622 - RNA, 14 nt, Human adenovirus E
gacucccucagcau

SEQ ID NO: 1577623 - RNA, 15 nt, Human adenovirus E
auucggggaagacgu

SEQ ID NO: 1577624 - RNA, 18 nt, Human adenovirus E
cuuagcuuugacaguaca

SEQ ID NO: 1577625 - RNA, 14 nt, Human adenovirus E
ccgcagcagcgagc

SEQ ID NO: 1577626 - RNA, 11 nt, Human adenovirus E
aguuccuccac

SEQ ID NO: 1577627 - RNA, 16 nt, Human adenovirus E
uggcggauggcuggca

SEQ ID NO: 1577628 - RNA, 22 nt, Human adenovirus E
cagacgcgcggcuucaggcgcc

SEQ ID NO: 1577629 - RNA, 18 nt, Human adenovirus E
agagggcgaggggcuggc

SEQ ID NO: 1577630 - RNA, 13 nt, Human adenovirus E
ccaaauccaugau

SEQ ID NO: 1577631 - RNA, 23 nt, Human adenovirus E
uacaccaacuucaucagcgcccu

SEQ ID NO: 1577632 - RNA, 19 nt, Human adenovirus E
gagcgccagcaggcggcgc

SEQ ID NO: 1577633 - RNA, 19 nt, Human adenovirus E
gcgcagggaggugugcgug

SEQ ID NO: 1577634 - RNA, 23 nt, Human adenovirus E
agcaacaaguucaaggcgcgggu

SEQ ID NO: 1577635 - RNA, 18 nt, Human adenovirus E
ccacagaaguuucauggu

SEQ ID NO: 1577636 - RNA, 12 nt, Human adenovirus E
gcggcggcagca

SEQ ID NO: 1577637 - RNA, 22 nt, Human adenovirus E
cgugcauguucucgcgcaccag

SEQ ID NO: 1577638 - RNA, 22 nt, Human adenovirus E
uucugacaaugaggacguuacu

SEQ ID NO: 1577639 - RNA, 12 nt, Human adenovirus E
acaugcagcccc

SEQ ID NO: 1577640 - RNA, 23 nt, Human adenovirus E
cuacuuccaagaagaggcagcag

SEQ ID NO: 1577641 - RNA, 13 nt, Human adenovirus E
accuggaccacug

SEQ ID NO: 1577642 - RNA, 14 nt, Human adenovirus E
gcugccgcuguccg

SEQ ID NO: 1577643 - RNA, 23 nt, Human adenovirus E
aacccacauuacacagacaacca

SEQ ID NO: 1577644 - RNA, 11 nt, Human adenovirus E
uccaggccagc

SEQ ID NO: 1577645 - RNA, 16 nt, Human adenovirus E
uaccccuacgaugcag

SEQ ID NO: 1577646 - RNA, 18 nt, Human adenovirus E
cccugugucgucaccgcc

SEQ ID NO: 1577647 - RNA, 13 nt, Human adenovirus E
agagacaggagcg

SEQ ID NO: 1577648 - RNA, 16 nt, Human adenovirus E
ccuuucaagagccccu

SEQ ID NO: 1577649 - RNA, 13 nt, Human adenovirus E
ugaccggcugcag

SEQ ID NO: 1577650 - RNA, 23 nt, Human adenovirus E
gcggccacggcggcggcagcggc

SEQ ID NO: 1577651 - RNA, 14 nt, Human adenovirus E
cuggaucuccugcc

SEQ ID NO: 1577652 - RNA, 22 nt, Human adenovirus E
gagccuuguugcgcagggccag

SEQ ID NO: 1577653 - RNA, 21 nt, Human adenovirus E
cugaagcccacggccgccagc

SEQ ID NO: 1577654 - RNA, 19 nt, Human adenovirus E
agcucuucgcugggucugc

SEQ ID NO: 1577655 - RNA, 13 nt, Human adenovirus E
gccagcuccuccu

SEQ ID NO: 1577656 - RNA, 19 nt, Human adenovirus E
aaccggugcugagacccgg

SEQ ID NO: 1577657 - RNA, 18 nt, Human adenovirus E
gcugcaccacgcugcgcc

SEQ ID NO: 1577658 - RNA, 12 nt, Human adenovirus E
cggaaggugcaa

SEQ ID NO: 1577659 - RNA, 19 nt, Human adenovirus E
cugguccgggcgcugcaca

SEQ ID NO: 1577660 - RNA, 14 nt, Human adenovirus E
cagggccagcaccg

SEQ ID NO: 1577661 - RNA, 16 nt, Human adenovirus E
ugcaucucuucagcac

SEQ ID NO: 1577662 - RNA, 13 nt, Human adenovirus E
cgggcggcgcugc

SEQ ID NO: 1577663 - RNA, 14 nt, Human adenovirus E
cauccccggguaca

SEQ ID NO: 1577664 - RNA, 18 nt, Human adenovirus E
ugcucgaucuccuccucu

SEQ ID NO: 1577665 - RNA, 16 nt, Human adenovirus E
gggcgugccccagggc

SEQ ID NO: 1577666 - RNA, 22 nt, Human adenovirus E
cguccggcauuaacuccucgga

SEQ ID NO: 1577667 - RNA, 22 nt, Human adenovirus E
ccaaccaggccgugcagcggca

SEQ ID NO: 1577668 - RNA, 13 nt, Human adenovirus E
ucauguacagcaa

SEQ ID NO: 1577669 - RNA, 17 nt, Human adenovirus E
auaacagccaggucaaa

SEQ ID NO: 1577670 - RNA, 21 nt, Human adenovirus E
guggcacgacaggcagcgggg

SEQ ID NO: 1577671 - RNA, 14 nt, Human adenovirus E
cugacccacuggcc

SEQ ID NO: 1577672 - RNA, 16 nt, Human adenovirus E
gcaggggguccagcau

SEQ ID NO: 1577673 - RNA, 14 nt, Human adenovirus E
ucccgccugaaccu

SEQ ID NO: 1577674 - RNA, 15 nt, Human adenovirus E
agaccuaccaggaga

SEQ ID NO: 1577675 - RNA, 14 nt, Human adenovirus E
ccaugcgcgcggcg

SEQ ID NO: 1577676 - RNA, 19 nt, Human adenovirus E
ggaacucuugcaggacagc

SEQ ID NO: 1577677 - RNA, 12 nt, Human adenovirus E
cacuacccggac

SEQ ID NO: 1577678 - RNA, 14 nt, Human adenovirus E
aucccgcuggacca

SEQ ID NO: 1577679 - RNA, 22 nt, Human adenovirus E
gcgcacguggacgagcagaccu

SEQ ID NO: 1577680 - RNA, 21 nt, Human adenovirus E
cucuccaguucguggaggagu

SEQ ID NO: 1577681 - RNA, 22 nt, Human adenovirus E
gccaucacaccuuccaccugau

SEQ ID NO: 1577682 - RNA, 22 nt, Human adenovirus E
cgaugcagcccccgcuggaggc

SEQ ID NO: 1577683 - RNA, 15 nt, Human adenovirus E
cagagaaugagcaga

SEQ ID NO: 1577684 - RNA, 14 nt, Human adenovirus E
caggggcggcaggg

SEQ ID NO: 1577685 - RNA, 17 nt, Human adenovirus E
agccacugcuaccugcu

SEQ ID NO: 1577686 - RNA, 18 nt, Human adenovirus E
cgcgguggggcggccagc

SEQ ID NO: 1577687 - RNA, 19 nt, Human adenovirus E
cugcaggaccacaugcuug

SEQ ID NO: 1577688 - RNA, 16 nt, Human adenovirus E
gcgcccuccaccggca

SEQ ID NO: 1577689 - RNA, 20 nt, Human adenovirus E
gcugcggcgcggccuggacc

SEQ ID NO: 1577690 - RNA, 15 nt, Human adenovirus E
augauugaaaaccau

SEQ ID NO: 1577691 - RNA, 12 nt, Human adenovirus E
ccgccaccugcu

SEQ ID NO: 1577692 - RNA, 19 nt, Human adenovirus E
cggacgauuggacccaggc

SEQ ID NO: 1577693 - RNA, 15 nt, Human adenovirus E
gaugacugacccacu

SEQ ID NO: 1577694 - RNA, 16 nt, Human adenovirus E
aggagaugcgcgcggc

SEQ ID NO: 1577695 - RNA, 17 nt, Human adenovirus E
cucagguguccagcugg

SEQ ID NO: 1577696 - RNA, 20 nt, Human adenovirus E
gaauccugcccgccaccugc

SEQ ID NO: 1577697 - RNA, 19 nt, Human adenovirus E
aguacgugcaacacagaac

SEQ ID NO: 1577698 - RNA, 15 nt, Human adenovirus E
cacggcggcggcagc

SEQ ID NO: 1577699 - RNA, 16 nt, Human adenovirus E
caaggcguggaacagc

SEQ ID NO: 1577700 - RNA, 22 nt, Human adenovirus E
accuggucucguacaugggcau

SEQ ID NO: 1577701 - RNA, 23 nt, Human adenovirus E
gauucccgaaccccaccacccag

SEQ ID NO: 1577702 - RNA, 21 nt, Human adenovirus E
ccagcuggaucaugaucauug

SEQ ID NO: 1577703 - RNA, 22 nt, Human adenovirus E
auaucgccuccuuggaagaggu

SEQ ID NO: 1577704 - RNA, 14 nt, Human adenovirus E
aauaacauuuuugc

SEQ ID NO: 1577705 - RNA, 12 nt, Human adenovirus E
cgagcaggccgu

SEQ ID NO: 1577706 - RNA, 21 nt, Human adenovirus E
uaccaggagaucacccacgug

SEQ ID NO: 1577707 - RNA, 18 nt, Human adenovirus E
gggauaggagcuccugga

SEQ ID NO: 1577708 - RNA, 14 nt, Human adenovirus E
cagccagagcagga

SEQ ID NO: 1577709 - RNA, 13 nt, Human adenovirus E
gaguucgcccccc

SEQ ID NO: 1577710 - RNA, 13 nt, Human adenovirus E
ucgagugccacug

SEQ ID NO: 1577711 - RNA, 20 nt, Human adenovirus E
gcccgccaacgugccccggg

SEQ ID NO: 1577712 - RNA, 14 nt, Human adenovirus E
ugucaaccacugcg

SEQ ID NO: 1577713 - RNA, 14 nt, Human adenovirus E
gaugugcucgguga

SEQ ID NO: 1577714 - RNA, 16 nt, Human adenovirus E
ugguggcgaaggagcc

SEQ ID NO: 1577715 - RNA, 19 nt, Human adenovirus E
cagcguccgauccuggucg

SEQ ID NO: 1577716 - RNA, 12 nt, Human adenovirus E
acuaugccuucu

SEQ ID NO: 1577717 - RNA, 21 nt, Human adenovirus E
aaaucacccucaagcugggag

SEQ ID NO: 1577718 - RNA, 22 nt, Human adenovirus E
gccucuguuaaauuuuugcuuu

SEQ ID NO: 1577719 - RNA, 15 nt, Human adenovirus E
gucccggcgcccgcc

SEQ ID NO: 1577720 - RNA, 16 nt, Human adenovirus E
gcccggguccaggcca

SEQ ID NO: 1577721 - RNA, 12 nt, Human adenovirus E
ugcgcuccugga

SEQ ID NO: 1577722 - RNA, 19 nt, Human adenovirus E
uggaugcucuauacgggca

SEQ ID NO: 1577723 - RNA, 18 nt, Human adenovirus E
ccaagaagaggcagcagc

SEQ ID NO: 1577724 - RNA, 19 nt, Human adenovirus E
cugcacaccacccugcgcg

SEQ ID NO: 1577725 - RNA, 16 nt, Human adenovirus E
acgcccguccucggcg

SEQ ID NO: 1577726 - RNA, 13 nt, Human adenovirus E
gaaaauaacagcc

SEQ ID NO: 1577727 - RNA, 15 nt, Human adenovirus E
ggcgcgcaggccgga

SEQ ID NO: 1577728 - RNA, 11 nt, Human adenovirus E
aucggccaggc

SEQ ID NO: 1577729 - RNA, 16 nt, Human adenovirus E
ugcagaggcgcuggua

SEQ ID NO: 1577730 - RNA, 11 nt, Human adenovirus E
cgggguugggc

SEQ ID NO: 1577731 - RNA, 17 nt, Human adenovirus E
acccggacgugcagccc

SEQ ID NO: 1577732 - RNA, 21 nt, Human adenovirus E
cagcaugucccgcccgcggcg

SEQ ID NO: 1577733 - RNA, 13 nt, Human adenovirus E
ccaucgccagcau

SEQ ID NO: 1577734 - RNA, 13 nt, Human adenovirus E
gcaagcuccugca

SEQ ID NO: 1577735 - RNA, 18 nt, Human adenovirus E
agccuccacgcgcacauc

SEQ ID NO: 1577736 - RNA, 21 nt, Human adenovirus E
ugcacgagaaccgccuggggc

SEQ ID NO: 1577737 - RNA, 21 nt, Human adenovirus E
ggaccacggcaaccccacgcc

SEQ ID NO: 1577738 - RNA, 18 nt, Human adenovirus E
uaccuccagugccuucuc

SEQ ID NO: 1577739 - RNA, 14 nt, Human adenovirus E
gcggccuugcgcag

SEQ ID NO: 1577740 - RNA, 13 nt, Human adenovirus E
gaccgugcagcag

SEQ ID NO: 1577741 - RNA, 22 nt, Human adenovirus E
cucacagaucacgggacccugc

SEQ ID NO: 1577742 - RNA, 13 nt, Human adenovirus E
ucuuugaggagga

SEQ ID NO: 1577743 - RNA, 19 nt, Human adenovirus E
cugguacuuggccagccac

SEQ ID NO: 1577744 - RNA, 15 nt, Human adenovirus E
cguugcggugugccc

SEQ ID NO: 1577745 - RNA, 23 nt, Human adenovirus E
accaucaucuuagcgcuagcagc

SEQ ID NO: 1577746 - RNA, 15 nt, Human adenovirus E
gaucuccaccgcgcc

SEQ ID NO: 1577747 - RNA, 23 nt, Human adenovirus E
guaggcguccgcgccgcaguggg

SEQ ID NO: 1577748 - RNA, 17 nt, Human adenovirus E
cgccgcaccgcucccug

SEQ ID NO: 1577749 - RNA, 19 nt, Human adenovirus E
  misc_feature (9)..(9): n is a, c, g, or u
agcacgaangaggccacgu

SEQ ID NO: 1577750 - RNA, 22 nt, Human adenovirus E
caccaacgugcagaccaaccug

SEQ ID NO: 1577751 - RNA, 14 nt, Human adenovirus E
acccccaguaccgc

SEQ ID NO: 1577752 - RNA, 17 nt, Human adenovirus E
cuccaucgcuuacagcc

SEQ ID NO: 1577753 - RNA, 22 nt, Human adenovirus E
gcgccagcccaauggcaccugc

SEQ ID NO: 1577754 - RNA, 13 nt, Human adenovirus E
agucucuggagcg

SEQ ID NO: 1577755 - RNA, 20 nt, Human adenovirus E
acccugugucgucaccgccc

SEQ ID NO: 1577756 - RNA, 18 nt, Human adenovirus E
acagccagagcaggaagc

SEQ ID NO: 1577757 - RNA, 21 nt, Human adenovirus E
uccagcuggcgggcggcgcca

SEQ ID NO: 1577758 - RNA, 19 nt, Human adenovirus E
accaggccgugcagcggca

SEQ ID NO: 1577759 - RNA, 19 nt, Human adenovirus E
gcuguccacgagcgccagc

SEQ ID NO: 1577760 - RNA, 18 nt, Human adenovirus E
uccgggcacucccgcauc

SEQ ID NO: 1577761 - RNA, 20 nt, Human adenovirus E
cgcacguagucauacagcuc

SEQ ID NO: 1577762 - RNA, 13 nt, Human adenovirus E
uguacagcaacaa

SEQ ID NO: 1577763 - RNA, 12 nt, Human adenovirus E
guaagccccaca

SEQ ID NO: 1577764 - RNA, 21 nt, Human adenovirus E
cuccccucuucccagcucugg

SEQ ID NO: 1577765 - RNA, 10 nt, Human adenovirus E
aacucuugca

SEQ ID NO: 1577766 - RNA, 22 nt, Human adenovirus E
  misc_feature (9)..(9): n is a, c, g, or u
cuccagcunuuccaacccuucc

SEQ ID NO: 1577767 - RNA, 14 nt, Human adenovirus E
gucaaauacuggcc

SEQ ID NO: 1577768 - RNA, 16 nt, Human adenovirus E
acggaucccuggaugc

SEQ ID NO: 1577769 - RNA, 21 nt, Human adenovirus E
cuacgucuacaaggcccuggg

SEQ ID NO: 1577770 - RNA, 17 nt, Human adenovirus E
gcggcgaucggggcgau

SEQ ID NO: 1577771 - RNA, 14 nt, Human adenovirus E
ucugcccccgcccc

SEQ ID NO: 1577772 - RNA, 14 nt, Human adenovirus E
acacaacaggcgca

SEQ ID NO: 1577773 - RNA, 19 nt, Human adenovirus E
uaugaggccgagccacagc

SEQ ID NO: 1577774 - RNA, 13 nt, Human adenovirus E
ggagggugccgga

SEQ ID NO: 1577775 - RNA, 20 nt, Human adenovirus E
ggaccugcacuggcagccca

SEQ ID NO: 1577776 - RNA, 20 nt, Human adenovirus E
caccugaucccgaauaccac

SEQ ID NO: 1577777 - RNA, 18 nt, Human adenovirus E
gcucagcaccgaggagga

SEQ ID NO: 1577778 - RNA, 16 nt, Human adenovirus E
cugguacuuggccagc

SEQ ID NO: 1577779 - RNA, 17 nt, Human adenovirus E
gaccgagggggagagcu

SEQ ID NO: 1577780 - RNA, 17 nt, Human adenovirus E
ugaagaugccgggcagg

SEQ ID NO: 1577781 - RNA, 22 nt, Human adenovirus E
cuuuggaagauguugaaguggg

SEQ ID NO: 1577782 - RNA, 22 nt, Human adenovirus E
cagaccgguaagaaggagcggc

SEQ ID NO: 1577783 - RNA, 19 nt, Human adenovirus E
cucuuugccuucaccaccu

SEQ ID NO: 1577784 - RNA, 15 nt, Human adenovirus E
ugagcccgucccggg

SEQ ID NO: 1577785 - RNA, 21 nt, Human adenovirus E
ggugauacgguucucgagaug

SEQ ID NO: 1577786 - RNA, 14 nt, Human adenovirus E
cacuggcagcccag

SEQ ID NO: 1577787 - RNA, 19 nt, Human adenovirus E
uccgccgacgacagcagcg

SEQ ID NO: 1577788 - RNA, 16 nt, Human adenovirus E
cggcggcgaugcagcc

SEQ ID NO: 1577789 - RNA, 16 nt, Human adenovirus E
gcccgagggccgcugg

SEQ ID NO: 1577790 - RNA, 13 nt, Human adenovirus E
ggcgagcucgacg

SEQ ID NO: 1577791 - RNA, 20 nt, Human adenovirus E
cgcgaguucgccccccggcg

SEQ ID NO: 1577792 - RNA, 14 nt, Human adenovirus E
cggugaugcucucc

SEQ ID NO: 1577793 - RNA, 12 nt, Human adenovirus E
gaggcagcagca

SEQ ID NO: 1577794 - RNA, 18 nt, Human adenovirus E
ggggcagaacgugcugca

SEQ ID NO: 1577795 - RNA, 17 nt, Human adenovirus E
cagaccagucgccaggg

SEQ ID NO: 1577796 - RNA, 17 nt, Human adenovirus E
ggagcuccuggagcgag

SEQ ID NO: 1577797 - RNA, 22 nt, Human adenovirus E
aucccugagcuccucccucagc

SEQ ID NO: 1577798 - RNA, 18 nt, Human adenovirus E
gcacccgccccccucgca

SEQ ID NO: 1577799 - RNA, 13 nt, Human adenovirus E
guggcgcagcuga

SEQ ID NO: 1577800 - RNA, 15 nt, Human adenovirus E
ccaacgugcagacca

SEQ ID NO: 1577801 - RNA, 17 nt, Human adenovirus E
ggccgcgaacgcucugc

SEQ ID NO: 1577802 - RNA, 14 nt, Human adenovirus E
aggacagccugcaa

SEQ ID NO: 1577803 - RNA, 20 nt, Human adenovirus E
guaccccaccaugcagcuga

SEQ ID NO: 1577804 - RNA, 23 nt, Human adenovirus E
accgccgacgagaagcagcagca

SEQ ID NO: 1577805 - RNA, 19 nt, Human adenovirus E
cuuucauuuuugcgcacau

SEQ ID NO: 1577806 - RNA, 19 nt, Human adenovirus E
ucuucgagggucugggcag

SEQ ID NO: 1577807 - RNA, 14 nt, Human adenovirus E
cucgcuguccuggc

SEQ ID NO: 1577808 - RNA, 23 nt, Human adenovirus E
aaagaagacgauaaacucacuuu

SEQ ID NO: 1577809 - RNA, 19 nt, Human adenovirus E
aucgcuuacagccugugca

SEQ ID NO: 1577810 - RNA, 21 nt, Human adenovirus E
caggcacacgcacuaccacca

SEQ ID NO: 1577811 - RNA, 21 nt, Human adenovirus E
uguccacccgcucucugcuca

SEQ ID NO: 1577812 - RNA, 22 nt, Human adenovirus E
gauggacuacuugcaucgggcg

SEQ ID NO: 1577813 - RNA, 22 nt, Human adenovirus E
acggguucgugcgccaggccug

SEQ ID NO: 1577814 - RNA, 17 nt, Human adenovirus E
cccguucucgcucgcca

SEQ ID NO: 1577815 - RNA, 16 nt, Human adenovirus E
ccgcccaaggccgagc

SEQ ID NO: 1577816 - RNA, 14 nt, Human adenovirus E
uggacccaggccau

SEQ ID NO: 1577817 - RNA, 20 nt, Human adenovirus E
gcaggagggggccaccccca

SEQ ID NO: 1577818 - RNA, 23 nt, Human adenovirus E
gcaucuuggccuggaucuugaga

SEQ ID NO: 1577819 - RNA, 20 nt, Human adenovirus E
  misc_feature (7)..(7): n is a, c, g, or u
uccccgnuacuaacaaccaa

SEQ ID NO: 1577820 - RNA, 14 nt, Human adenovirus E
cgcuguccggccgc

SEQ ID NO: 1577821 - RNA, 17 nt, Human adenovirus E
gaagcgcucgauggucu

SEQ ID NO: 1577822 - RNA, 15 nt, Human adenovirus E
ccgcgcgcgcgcuac

SEQ ID NO: 1577823 - RNA, 17 nt, Human adenovirus E
gauggccacgggcagcc

SEQ ID NO: 1577824 - RNA, 13 nt, Human adenovirus E
cucccuggccugc

SEQ ID NO: 1577825 - RNA, 14 nt, Human adenovirus E
agggcggccagacg

SEQ ID NO: 1577826 - RNA, 20 nt, Human adenovirus E
gcaccaguuccgccaggagg

SEQ ID NO: 1577827 - RNA, 23 nt, Human adenovirus E
cguacgagagcgugaugcagcag

SEQ ID NO: 1577828 - RNA, 15 nt, Human adenovirus E
ccuccuuggaagagg

SEQ ID NO: 1577829 - RNA, 14 nt, Human adenovirus E
gaaagagcagaacu

SEQ ID NO: 1577830 - RNA, 17 nt, Human adenovirus E
ugagggagagacagcug

SEQ ID NO: 1577831 - RNA, 16 nt, Human adenovirus E
caggaaauuccccagc

SEQ ID NO: 1577832 - RNA, 15 nt, Human adenovirus E
cacagaaccaccagg

SEQ ID NO: 1577833 - RNA, 18 nt, Human adenovirus E
uccaccaacgccaccguc

SEQ ID NO: 1577834 - RNA, 15 nt, Human adenovirus E
gacguuacugucguu

SEQ ID NO: 1577835 - RNA, 19 nt, Human adenovirus E
auggcaccucucgcccccg

SEQ ID NO: 1577836 - RNA, 20 nt, Human adenovirus E
cuaccucuaccucugccaca

SEQ ID NO: 1577837 - RNA, 20 nt, Human adenovirus E
caguauccggggaguccagc

SEQ ID NO: 1577838 - RNA, 15 nt, Human adenovirus E
ugggcgugcagaccg

SEQ ID NO: 1577839 - RNA, 12 nt, Human adenovirus E
gacccugggccu

SEQ ID NO: 1577840 - RNA, 17 nt, Human adenovirus E
ccgugaaggaggagagc

SEQ ID NO: 1577841 - RNA, 17 nt, Human adenovirus E
ggcgacgggcucucgcc

SEQ ID NO: 1577842 - RNA, 17 nt, Human adenovirus E
cucuucgggggcagagg

SEQ ID NO: 1577843 - RNA, 22 nt, Human adenovirus E
caaugccaccucagcucaaaau

SEQ ID NO: 1577844 - RNA, 16 nt, Human adenovirus E
ugcggcgggcgcagca

SEQ ID NO: 1577845 - RNA, 14 nt, Human adenovirus E
acgcgcacuuccuc

SEQ ID NO: 1577846 - RNA, 20 nt, Human adenovirus E
gccgcgcccugggccaggac

SEQ ID NO: 1577847 - RNA, 22 nt, Human adenovirus E
cgggcccugaccggggccggga

SEQ ID NO: 1577848 - RNA, 14 nt, Human adenovirus E
uaaucacacacgcc

SEQ ID NO: 1577849 - RNA, 17 nt, Human adenovirus E
ggcgauguugagcugca

SEQ ID NO: 1577850 - RNA, 23 nt, Human adenovirus E
agaccgacuuuaugggccggucc

SEQ ID NO: 1577851 - RNA, 20 nt, Human adenovirus E
gcgcgccgggcggcaggggc

SEQ ID NO: 1577852 - RNA, 19 nt, Human adenovirus E
gccccgcccgccaugcagc

SEQ ID NO: 1577853 - RNA, 17 nt, Human adenovirus E
cuaccucgacccccaga

SEQ ID NO: 1577854 - RNA, 22 nt, Human adenovirus E
aaagcaaggaggaugcagcagc

SEQ ID NO: 1577855 - RNA, 18 nt, Human adenovirus E
ccaggccgugcagcggca

SEQ ID NO: 1577856 - RNA, 16 nt, Human adenovirus E
agucucauugccguca

SEQ ID NO: 1577857 - RNA, 22 nt, Human adenovirus E
cucaugcaucucuucagcacuc

SEQ ID NO: 1577858 - RNA, 13 nt, Human adenovirus E
acgagaagcagca

SEQ ID NO: 1577859 - RNA, 22 nt, Human adenovirus E
ugcuugcauuucaaucccaaca

SEQ ID NO: 1577860 - RNA, 19 nt, Human adenovirus E
ggucuaaggaaucuucucu

SEQ ID NO: 1577861 - RNA, 14 nt, Human adenovirus E
ggaggaagacuggg

SEQ ID NO: 1577862 - RNA, 14 nt, Human adenovirus E
gagcgaccaggagc

SEQ ID NO: 1577863 - RNA, 13 nt, Human adenovirus E
accgcgaggccau

SEQ ID NO: 1577864 - RNA, 16 nt, Human adenovirus E
guagacguagaggggc

SEQ ID NO: 1577865 - RNA, 14 nt, Human adenovirus E
uacugaucugauac

SEQ ID NO: 1577866 - RNA, 13 nt, Human adenovirus E
caacuuccugacc

SEQ ID NO: 1577867 - RNA, 23 nt, Human adenovirus E
gcccgcggagcacgaggaggagc

SEQ ID NO: 1577868 - RNA, 11 nt, Human adenovirus E
accugcuggag

SEQ ID NO: 1577869 - RNA, 18 nt, Human adenovirus E
uguaccgcgaggccaucg

SEQ ID NO: 1577870 - RNA, 21 nt, Human adenovirus E
agcuguuccugguggugcagc

SEQ ID NO: 1577871 - RNA, 19 nt, Human adenovirus E
ugcuccugguucaccugca

SEQ ID NO: 1577872 - RNA, 14 nt, Human adenovirus E
guggaagaagcagc

SEQ ID NO: 1577873 - RNA, 20 nt, Human adenovirus E
uucuuaucugccuccuccaa

SEQ ID NO: 1577874 - RNA, 21 nt, Human adenovirus E
accuugcagcaggugcugccg

SEQ ID NO: 1577875 - RNA, 12 nt, Human adenovirus E
cgauaaacucac

SEQ ID NO: 1577876 - RNA, 20 nt, Human adenovirus E
agccacagcgacccaugcuc

SEQ ID NO: 1577877 - RNA, 19 nt, Human adenovirus E
acugcucgaucuccuccuc

SEQ ID NO: 1577878 - RNA, 22 nt, Human adenovirus E
uggagcagucucuggagcgggc

SEQ ID NO: 1577879 - RNA, 16 nt, Human adenovirus E
gaggcagguccagacc

SEQ ID NO: 1577880 - RNA, 15 nt, Human adenovirus E
uugucggaucaaauu

SEQ ID NO: 1577881 - RNA, 21 nt, Human adenovirus E
gagccgcgcccugggccagga

SEQ ID NO: 1577882 - RNA, 16 nt, Human adenovirus E
ccgcgcuugcugggcg

SEQ ID NO: 1577883 - RNA, 13 nt, Human adenovirus E
gaggccagcaccc

SEQ ID NO: 1577884 - RNA, 19 nt, Human adenovirus E
gaggcguacaugccgcaga

SEQ ID NO: 1577885 - RNA, 16 nt, Human adenovirus E
uuggcgauggagcgca

SEQ ID NO: 1577886 - RNA, 20 nt, Human adenovirus E
gcuauguuggagcaacauuu

SEQ ID NO: 1577887 - RNA, 22 nt, Human adenovirus E
ugagcaaagagauucccacgcc

SEQ ID NO: 1577888 - RNA, 22 nt, Human adenovirus E
ucgcaucaggccccgcagcagu

SEQ ID NO: 1577889 - RNA, 23 nt, Human adenovirus E
cuucugcccccgccccagcagca

SEQ ID NO: 1577890 - RNA, 11 nt, Human adenovirus E
ccugcaucucg

SEQ ID NO: 1577891 - RNA, 22 nt, Human adenovirus E
gcuucuucaacgagcaggccgu

SEQ ID NO: 1577892 - RNA, 14 nt, Human adenovirus E
cgguccuuccaggg

SEQ ID NO: 1577893 - RNA, 14 nt, Human adenovirus E
cagauccucaggua

SEQ ID NO: 1577894 - RNA, 15 nt, Human adenovirus E
ccauagccagccgac

SEQ ID NO: 1577895 - RNA, 17 nt, Human adenovirus E
cacuucacuccccucuu

SEQ ID NO: 1577896 - RNA, 15 nt, Human adenovirus E
gcccacuccgagacg

SEQ ID NO: 1577897 - RNA, 15 nt, Human adenovirus E
gcccuuuucaaccug

SEQ ID NO: 1577898 - RNA, 21 nt, Human adenovirus E
gaagacgaggaggaggcagag

SEQ ID NO: 1577899 - RNA, 16 nt, Human adenovirus E
agugucuggaggagca

SEQ ID NO: 1577900 - RNA, 19 nt, Human adenovirus E
ggcaccggagcacccccgc

SEQ ID NO: 1577901 - RNA, 17 nt, Human adenovirus E
agcucgcgguugagaag

SEQ ID NO: 1577902 - RNA, 15 nt, Human adenovirus E
gauggaaguggccag

SEQ ID NO: 1577903 - RNA, 20 nt, Human adenovirus E
caucgagauugaccugggcu

SEQ ID NO: 1577904 - RNA, 20 nt, Human adenovirus E
ggcgcacguggacgagcaga

SEQ ID NO: 1577905 - RNA, 12 nt, Human adenovirus E
ugcggcgggcgc

SEQ ID NO: 1577906 - RNA, 14 nt, Human adenovirus E
cuggagaugaugcu

SEQ ID NO: 1577907 - RNA, 14 nt, Human adenovirus E
ggcgaguaccugga

SEQ ID NO: 1577908 - RNA, 13 nt, Human adenovirus E
ccccgcgcgcgcg

SEQ ID NO: 1577909 - RNA, 16 nt, Human adenovirus E
auuguuuuuugcaauc

SEQ ID NO: 1577910 - RNA, 20 nt, Human adenovirus E
ccauggugggcacgcacccg

SEQ ID NO: 1577911 - RNA, 22 nt, Human adenovirus E
ccaugcgcgcggcgcggagccu

SEQ ID NO: 1577912 - RNA, 16 nt, Human adenovirus E
cgcgacggugucgagc

SEQ ID NO: 1577913 - RNA, 22 nt, Human adenovirus E
ggggccgggaccgagggggaga

SEQ ID NO: 1577914 - RNA, 18 nt, Human adenovirus E
ggcgccagcgccggcagg

SEQ ID NO: 1577915 - RNA, 22 nt, Human adenovirus E
gacgcccaggccgaaguccagc

SEQ ID NO: 1577916 - RNA, 13 nt, Human adenovirus E
aauuauauaugca

SEQ ID NO: 1577917 - RNA, 16 nt, Human adenovirus E
gcagccccgcucgggu

SEQ ID NO: 1577918 - RNA, 14 nt, Human adenovirus E
caucgugcagaacc

SEQ ID NO: 1577919 - RNA, 13 nt, Human adenovirus E
ggggacgagcugc

SEQ ID NO: 1577920 - RNA, 18 nt, Human adenovirus E
ccagcagccgccgccgca

SEQ ID NO: 1577921 - RNA, 18 nt, Human adenovirus E
uggugggccuuuggaaga

SEQ ID NO: 1577922 - RNA, 22 nt, Human adenovirus E
cuucacccccacggaggccagc

SEQ ID NO: 1577923 - RNA, 15 nt, Human adenovirus E
cuacagaaagcacag

SEQ ID NO: 1577924 - RNA, 17 nt, Human adenovirus E
ggaagcuauguuggagc

SEQ ID NO: 1577925 - RNA, 20 nt, Human adenovirus E
ggaggccaucgugcagaacc

SEQ ID NO: 1577926 - RNA, 19 nt, Human adenovirus E
ucaccacuacuaucucuuc

SEQ ID NO: 1577927 - RNA, 16 nt, Human adenovirus E
ucagcaguuugggcag

SEQ ID NO: 1577928 - RNA, 13 nt, Human adenovirus E
ugcuagucagcgg

SEQ ID NO: 1577929 - RNA, 22 nt, Human adenovirus E
caagagcuucuucaacgagcag

SEQ ID NO: 1577930 - RNA, 20 nt, Human adenovirus E
cuccgaggucaaccaaccuc

SEQ ID NO: 1577931 - RNA, 22 nt, Human adenovirus E
ggacugggggacaaagguaccc

SEQ ID NO: 1577932 - RNA, 20 nt, Human adenovirus E
ugcccgucuacuccaagagc

SEQ ID NO: 1577933 - RNA, 14 nt, Human adenovirus E
ugcaagacuccgag

SEQ ID NO: 1577934 - RNA, 19 nt, Human adenovirus E
accaucgucaaggaugcgc

SEQ ID NO: 1577935 - RNA, 16 nt, Human adenovirus E
cccaacuacgcgcugc

SEQ ID NO: 1577936 - RNA, 14 nt, Human adenovirus E
agauauuugcaauu

SEQ ID NO: 1577937 - RNA, 14 nt, Human adenovirus E
cgcgguccuccucg

SEQ ID NO: 1577938 - RNA, 16 nt, Human adenovirus E
ugccgcgguccuccuc

SEQ ID NO: 1577939 - RNA, 19 nt, Human adenovirus E
cucaacccaccccacccag

SEQ ID NO: 1577940 - RNA, 12 nt, Human adenovirus E
cccuagccgccu

SEQ ID NO: 1577941 - RNA, 15 nt, Human adenovirus E
uacacagacaaccac

SEQ ID NO: 1577942 - RNA, 12 nt, Human adenovirus E
gggccaccccca

SEQ ID NO: 1577943 - RNA, 19 nt, Human adenovirus E
cugcgcgcgcccagcaaga

SEQ ID NO: 1577944 - RNA, 23 nt, Human adenovirus E
aguguuuuauugauucaacaguu

SEQ ID NO: 1577945 - RNA, 13 nt, Human adenovirus E
ugccuucugcuac

SEQ ID NO: 1577946 - RNA, 22 nt, Human adenovirus E
ggcggcgcaucgcccggcggca

SEQ ID NO: 1577947 - RNA, 21 nt, Human adenovirus E
cgcucgcgguggggcggccag

SEQ ID NO: 1577948 - RNA, 14 nt, Human adenovirus E
gggccuggccgccg

SEQ ID NO: 1577949 - RNA, 16 nt, Human adenovirus E
acgggacgcagggcca

SEQ ID NO: 1577950 - RNA, 17 nt, Human adenovirus E
ggcagaggaggaggaga

SEQ ID NO: 1577951 - RNA, 13 nt, Human adenovirus E
ccccuccacagcc

SEQ ID NO: 1577952 - RNA, 15 nt, Human adenovirus E
acccggacgugcagc

SEQ ID NO: 1577953 - RNA, 22 nt, Human adenovirus E
ccugcucgagugccacugccgc

SEQ ID NO: 1577954 - RNA, 13 nt, Human adenovirus E
cccccacccaguc

SEQ ID NO: 1577955 - RNA, 14 nt, Human adenovirus E
acgcgcugcuggag

SEQ ID NO: 1577956 - RNA, 18 nt, Human adenovirus E
ggaggauguccaagcgca

SEQ ID NO: 1577957 - RNA, 15 nt, Human adenovirus E
ccaaaagauccccgu

SEQ ID NO: 1577958 - RNA, 14 nt, Human adenovirus E
gaagcgugggccug

SEQ ID NO: 1577959 - RNA, 13 nt, Human adenovirus E
uggugcaggagcg

SEQ ID NO: 1577960 - RNA, 13 nt, Human adenovirus E
cggacgugcagcc

SEQ ID NO: 1577961 - RNA, 22 nt, Human adenovirus E
uggucuccacguuccacacagu

SEQ ID NO: 1577962 - RNA, 17 nt, Human adenovirus E
cagcuugcccucggccu

SEQ ID NO: 1577963 - RNA, 18 nt, Human adenovirus E
ccggcggcgcacgggcag

SEQ ID NO: 1577964 - RNA, 22 nt, Human adenovirus E
gccugcaagacagucuggagga

SEQ ID NO: 1577965 - RNA, 15 nt, Human adenovirus E
ugacguccugcagga

SEQ ID NO: 1577966 - RNA, 13 nt, Human adenovirus E
ugcucuuugccuu

SEQ ID NO: 1577967 - RNA, 19 nt, Human adenovirus E
uuggaagcaguaguacaga

SEQ ID NO: 1577968 - RNA, 14 nt, Human adenovirus E
ugcaucccagcugg

SEQ ID NO: 1577969 - RNA, 17 nt, Human adenovirus E
ggaccccgugaccgagc

SEQ ID NO: 1577970 - RNA, 14 nt, Human adenovirus E
agcuuaccuuugga

SEQ ID NO: 1577971 - RNA, 12 nt, Human adenovirus E
uccugcacaggc

SEQ ID NO: 1577972 - RNA, 14 nt, Human adenovirus E
agauguacggaggc

SEQ ID NO: 1577973 - RNA, 15 nt, Human adenovirus E
acggcaagcgcagcc

SEQ ID NO: 1577974 - RNA, 15 nt, Human adenovirus E
ugcagcaggcgaugg

SEQ ID NO: 1577975 - RNA, 18 nt, Human adenovirus E
uggaauuugagcugcccg

SEQ ID NO: 1577976 - RNA, 21 nt, Human adenovirus E
gccccaguacgcgcucagcac

SEQ ID NO: 1577977 - RNA, 22 nt, Human adenovirus E
ccuucuccggcucccccggcca

SEQ ID NO: 1577978 - RNA, 22 nt, Human adenovirus E
aguuuggaagcaguaguacaga

SEQ ID NO: 1577979 - RNA, 20 nt, Human adenovirus E
uccugguucaccugcagcag

SEQ ID NO: 1577980 - RNA, 21 nt, Human adenovirus E
gucuauguuggcacagcacag

SEQ ID NO: 1577981 - RNA, 22 nt, Human adenovirus E
caccggcauucuuaagcacacc

SEQ ID NO: 1577982 - RNA, 18 nt, Human adenovirus E
ccgggcuaccgcggcacg

SEQ ID NO: 1577983 - RNA, 14 nt, Human adenovirus E
gcgcgaggagguga

SEQ ID NO: 1577984 - RNA, 21 nt, Human adenovirus E
gagggcgagaucgagggcgag

SEQ ID NO: 1577985 - RNA, 21 nt, Human adenovirus E
ugcccucggacuucgugccgc

SEQ ID NO: 1577986 - RNA, 16 nt, Human adenovirus E
agggugcugagggacg

SEQ ID NO: 1577987 - RNA, 21 nt, Human adenovirus E
gaugauauucuggagcaggcg

SEQ ID NO: 1577988 - RNA, 15 nt, Human adenovirus E
gccaggaggacuaca

SEQ ID NO: 1577989 - RNA, 19 nt, Human adenovirus E
accgaaagagggugcugag

SEQ ID NO: 1577990 - RNA, 22 nt, Human adenovirus E
ucauuuguuggcauuaccccua

SEQ ID NO: 1577991 - RNA, 23 nt, Human adenovirus E
ggcucgucugccguagucuggag

SEQ ID NO: 1577992 - RNA, 14 nt, Human adenovirus E
ggagcuguccaggg

SEQ ID NO: 1577993 - RNA, 15 nt, Human adenovirus E
uccacgagccaggug

SEQ ID NO: 1577994 - RNA, 16 nt, Human adenovirus E
aggccucucagcgcca

SEQ ID NO: 1577995 - RNA, 23 nt, Human adenovirus E
gcacccuuguacgauaccacccg

SEQ ID NO: 1577996 - RNA, 21 nt, Human adenovirus E
gcaaguuccggagcagcuggg

SEQ ID NO: 1577997 - RNA, 12 nt, Human adenovirus E
gucgccagggcu

SEQ ID NO: 1577998 - RNA, 21 nt, Human adenovirus E
cugcugggccuuggcucccuc

SEQ ID NO: 1577999 - RNA, 14 nt, Human adenovirus E
caccucgcccugcu

SEQ ID NO: 1578000 - RNA, 20 nt, Human adenovirus E
uccuccgcggccggccauug

SEQ ID NO: 1578001 - RNA, 21 nt, Human adenovirus E
acgcgcucagcaccgaggagg

SEQ ID NO: 1578002 - RNA, 16 nt, Human adenovirus E
cauucuuaagcacacc

SEQ ID NO: 1578003 - RNA, 15 nt, Human adenovirus E
gucaccaccaagaac

SEQ ID NO: 1578004 - RNA, 14 nt, Human adenovirus E
cagcaccaggcagg

SEQ ID NO: 1578005 - RNA, 15 nt, Human adenovirus E
ccuccacccucccag

SEQ ID NO: 1578006 - RNA, 16 nt, Human adenovirus E
aucguucucuccagca

SEQ ID NO: 1578007 - RNA, 15 nt, Human adenovirus E
ucaccugcagcagau

SEQ ID NO: 1578008 - RNA, 17 nt, Human adenovirus E
cgaacuccauggcuugc

SEQ ID NO: 1578009 - RNA, 17 nt, Human adenovirus E
accuggccaaccaggcc

SEQ ID NO: 1578010 - RNA, 14 nt, Human adenovirus E
ccuccugcacaggc

SEQ ID NO: 1578011 - RNA, 13 nt, Human adenovirus E
cccgcgcgugcag

SEQ ID NO: 1578012 - RNA, 18 nt, Human adenovirus E
acaguuuuacaggauucg

SEQ ID NO: 1578013 - RNA, 14 nt, Human adenovirus E
gcuguagcagaacc

SEQ ID NO: 1578014 - RNA, 19 nt, Human adenovirus E
gccucaggcugacgcugcg

SEQ ID NO: 1578015 - RNA, 17 nt, Human adenovirus E
caugguggcgcugaacg

SEQ ID NO: 1578016 - RNA, 15 nt, Human adenovirus E
aacccgggagcugag

SEQ ID NO: 1578017 - RNA, 20 nt, Human adenovirus E
cauggcccgcgggcagggac

SEQ ID NO: 1578018 - RNA, 23 nt, Human adenovirus E
ggaaugggccagacccagccaga

SEQ ID NO: 1578019 - RNA, 17 nt, Human adenovirus E
cccagggauaggagcuc

SEQ ID NO: 1578020 - RNA, 15 nt, Human adenovirus E
cgcgugaagaccgcg

SEQ ID NO: 1578021 - RNA, 13 nt, Human adenovirus E
gaaaaucgcccag

SEQ ID NO: 1578022 - RNA, 13 nt, Human adenovirus E
cugagggacgagg

SEQ ID NO: 1578023 - RNA, 15 nt, Human adenovirus E
gggaguugcgcgccg

SEQ ID NO: 1578024 - RNA, 19 nt, Human adenovirus E
gugcacgaagcccugcagg

SEQ ID NO: 1578025 - RNA, 21 nt, Human adenovirus E
cacgccccgcaaucaccucaa

SEQ ID NO: 1578026 - RNA, 13 nt, Human adenovirus E
gagcagcagcaca

SEQ ID NO: 1578027 - RNA, 17 nt, Human adenovirus E
acgggacgcagggccau

SEQ ID NO: 1578028 - RNA, 15 nt, Human adenovirus E
uccggaauccugccc

SEQ ID NO: 1578029 - RNA, 21 nt, Human adenovirus E
acccccacggaggccagcacc

SEQ ID NO: 1578030 - RNA, 13 nt, Human adenovirus E
cugggcagcgacg

SEQ ID NO: 1578031 - RNA, 20 nt, Human adenovirus E
gccaggugaggucgggcugg

SEQ ID NO: 1578032 - RNA, 19 nt, Human adenovirus E
uuucuagaaacgaggagga

SEQ ID NO: 1578033 - RNA, 23 nt, Human adenovirus E
ggacgacccgggcaaccuggaag

SEQ ID NO: 1578034 - RNA, 16 nt, Human adenovirus E
ggcccggcaggccacc

SEQ ID NO: 1578035 - RNA, 22 nt, Human adenovirus E
gcacccggcgucgugcacgcag

SEQ ID NO: 1578036 - RNA, 22 nt, Human adenovirus E
cuggugaacauucugcagagca

SEQ ID NO: 1578037 - RNA, 18 nt, Human adenovirus E
gaagacgcgcgccgggcg

SEQ ID NO: 1578038 - RNA, 16 nt, Human adenovirus E
ccugggccugaugcac

SEQ ID NO: 1578039 - RNA, 23 nt, Human adenovirus E
ccggaauccugcccgccaccugc

SEQ ID NO: 1578040 - RNA, 16 nt, Human adenovirus E
cuuccaucauccccac

SEQ ID NO: 1578041 - RNA, 19 nt, Human adenovirus E
ugcggcgggcgcagcagcg

SEQ ID NO: 1578042 - RNA, 16 nt, Human adenovirus E
aagaggcagcagcagc

SEQ ID NO: 1578043 - RNA, 14 nt, Human adenovirus E
aggaugagcugaag

SEQ ID NO: 1578044 - RNA, 13 nt, Human adenovirus E
ggggcggccagcu

SEQ ID NO: 1578045 - RNA, 13 nt, Human adenovirus E
uccucgcagcccc

SEQ ID NO: 1578046 - RNA, 19 nt, Human adenovirus E
uaucaugcaacuuggaagg

SEQ ID NO: 1578047 - RNA, 15 nt, Human adenovirus E
ggugccgcccaggac

SEQ ID NO: 1578048 - RNA, 14 nt, Human adenovirus E
caacgaugaaguaa

SEQ ID NO: 1578049 - RNA, 17 nt, Human adenovirus E
aguucauguacagcaac

SEQ ID NO: 1578050 - RNA, 17 nt, Human adenovirus E
ccacgguggcuuccagc

SEQ ID NO: 1578051 - RNA, 19 nt, Human adenovirus E
ggccgccgugagcggggcu

SEQ ID NO: 1578052 - RNA, 22 nt, Human adenovirus E
ggucagcgacgagcagcuggcc

SEQ ID NO: 1578053 - RNA, 14 nt, Human adenovirus E
cuggaucugacgcc

SEQ ID NO: 1578054 - RNA, 17 nt, Human adenovirus E
ggagacgcgcggccacg

SEQ ID NO: 1578055 - RNA, 13 nt, Human adenovirus E
cguugggcaggga

SEQ ID NO: 1578056 - RNA, 14 nt, Human adenovirus E
cacgcucgccagca

SEQ ID NO: 1578057 - RNA, 15 nt, Human adenovirus E
caccaaucagucccg

SEQ ID NO: 1578058 - RNA, 15 nt, Human adenovirus E
cacccucgcucuggu

SEQ ID NO: 1578059 - RNA, 17 nt, Human adenovirus E
cacgguggcuuccagca

SEQ ID NO: 1578060 - RNA, 13 nt, Human adenovirus E
ugcaucucccagg

SEQ ID NO: 1578061 - RNA, 15 nt, Human adenovirus E
ggcuccuggaccugg

SEQ ID NO: 1578062 - RNA, 15 nt, Human adenovirus E
gcugcugcugcuggu

SEQ ID NO: 1578063 - RNA, 12 nt, Human adenovirus E
agcggggcugga

SEQ ID NO: 1578064 - RNA, 23 nt, Human adenovirus E
guuggguuucggugacggcgggg

SEQ ID NO: 1578065 - RNA, 19 nt, Human adenovirus E
uccggccgcgagggugcug

SEQ ID NO: 1578066 - RNA, 16 nt, Human adenovirus E
gcgcccgccuaccuga

SEQ ID NO: 1578067 - RNA, 19 nt, Human adenovirus E
ugaccccgaugaccggcug

SEQ ID NO: 1578068 - RNA, 14 nt, Human adenovirus E
cggcagaugcgccc

SEQ ID NO: 1578069 - RNA, 19 nt, Human adenovirus E
gccaaccucgccaucugcc

SEQ ID NO: 1578070 - RNA, 14 nt, Human adenovirus E
ccacuggcucccgc

SEQ ID NO: 1578071 - RNA, 16 nt, Human adenovirus E
ugggccgguccucgag

SEQ ID NO: 1578072 - RNA, 15 nt, Human adenovirus E
accgccgcggccgcc

SEQ ID NO: 1578073 - RNA, 19 nt, Human adenovirus E
agcagaaaaagaccagcag

SEQ ID NO: 1578074 - RNA, 12 nt, Human adenovirus E
gcacagcacagg

SEQ ID NO: 1578075 - RNA, 19 nt, Human adenovirus E
ucaacuucucggugcugag

SEQ ID NO: 1578076 - RNA, 13 nt, Human adenovirus E
gcggaaccacagg

SEQ ID NO: 1578077 - RNA, 20 nt, Human adenovirus E
cugcagcgggcccugaccgg

SEQ ID NO: 1578078 - RNA, 19 nt, Human adenovirus E
ucccagcggcgaggaggau

SEQ ID NO: 1578079 - RNA, 18 nt, Human adenovirus E
agcauugccaaaugcaag

SEQ ID NO: 1578080 - RNA, 16 nt, Human adenovirus E
cgagcuccagcuccag

SEQ ID NO: 1578081 - RNA, 16 nt, Human adenovirus E
cagaugcggcgguaca

SEQ ID NO: 1578082 - RNA, 21 nt, Human adenovirus E
ggucucaaagcuccgcuugcc

SEQ ID NO: 1578083 - RNA, 15 nt, Human adenovirus E
aacacgacuuucaaa

SEQ ID NO: 1578084 - RNA, 15 nt, Human adenovirus E
cgugcccaagcagaa

SEQ ID NO: 1578085 - RNA, 15 nt, Human adenovirus E
gagcgcgagcaagga

SEQ ID NO: 1578086 - RNA, 13 nt, Human adenovirus E
cgggguugcagca

SEQ ID NO: 1578087 - RNA, 22 nt, Human adenovirus E
cccauggaaacgcagaccgagc

SEQ ID NO: 1578088 - RNA, 20 nt, Human adenovirus E
cgagcuugguggcgaaggag

SEQ ID NO: 1578089 - RNA, 18 nt, Human adenovirus E
gccgccgcaagaccacca

SEQ ID NO: 1578090 - RNA, 16 nt, Human adenovirus E
acgacccgcaaccccg

SEQ ID NO: 1578091 - RNA, 23 nt, Human adenovirus E
auccgcagcagcgagcugggcag

SEQ ID NO: 1578092 - RNA, 14 nt, Human adenovirus E
cacccaucaucaug

SEQ ID NO: 1578093 - RNA, 23 nt, Human adenovirus E
gcaaacacaugucccccucgucc

SEQ ID NO: 1578094 - RNA, 13 nt, Human adenovirus E
caucggcaccagc

SEQ ID NO: 1578095 - RNA, 20 nt, Human adenovirus E
agauccucagguaaaucaag

SEQ ID NO: 1578096 - RNA, 20 nt, Human adenovirus E
gcccauggaaacgcagaccg

SEQ ID NO: 1578097 - RNA, 15 nt, Human adenovirus E
ugcccuucucgcuga

SEQ ID NO: 1578098 - RNA, 15 nt, Human adenovirus E
ccaacgcuccacgca

SEQ ID NO: 1578099 - RNA, 15 nt, Human adenovirus E
acccacugcugaacc

SEQ ID NO: 1578100 - RNA, 23 nt, Human adenovirus E
ggcagggauacaaguccuggcgg

SEQ ID NO: 1578101 - RNA, 20 nt, Human adenovirus E
guugaugaccugggcggcga

SEQ ID NO: 1578102 - RNA, 20 nt, Human adenovirus E
ccgcgaucccugagcuccuc

SEQ ID NO: 1578103 - RNA, 18 nt, Human adenovirus E
ccugaccggggccgggac

SEQ ID NO: 1578104 - RNA, 22 nt, Human adenovirus E
auggcggcggcggcgaugcagc

SEQ ID NO: 1578105 - RNA, 14 nt, Human adenovirus E
ccgaauaccacagc

SEQ ID NO: 1578106 - RNA, 14 nt, Human adenovirus E
cgcgcccgcgcuug

SEQ ID NO: 1578107 - RNA, 20 nt, Human adenovirus E
aaccaugaagauccuaggcc

SEQ ID NO: 1578108 - RNA, 15 nt, Human adenovirus E
cgcgcccugggccag

SEQ ID NO: 1578109 - RNA, 14 nt, Human adenovirus E
ucccgcaucugcac

SEQ ID NO: 1578110 - RNA, 21 nt, Human adenovirus E
agggucccgugccccuggggu

SEQ ID NO: 1578111 - RNA, 23 nt, Human adenovirus E
gcaaagcccccgaucccuccagg

SEQ ID NO: 1578112 - RNA, 23 nt, Human adenovirus E
cucagcguggaggagcucagccg

SEQ ID NO: 1578113 - RNA, 15 nt, Human adenovirus E
cagagguugccagcu

SEQ ID NO: 1578114 - RNA, 19 nt, Human adenovirus E
acuccccuccugcacaggc

SEQ ID NO: 1578115 - RNA, 16 nt, Human adenovirus E
caggcagcggggacag

SEQ ID NO: 1578116 - RNA, 15 nt, Human adenovirus E
auuaccucugcucua

SEQ ID NO: 1578117 - RNA, 20 nt, Human adenovirus E
agguuuaaaauuugaagaug

SEQ ID NO: 1578118 - RNA, 15 nt, Human adenovirus E
uagaaugaccacaac

SEQ ID NO: 1578119 - RNA, 15 nt, Human adenovirus E
acacggccaccaagg

SEQ ID NO: 1578120 - RNA, 20 nt, Human adenovirus E
gcauuaccccuacacaugau

SEQ ID NO: 1578121 - RNA, 18 nt, Human adenovirus E
ucacggacagcggcagca

SEQ ID NO: 1578122 - RNA, 13 nt, Human adenovirus E
agcuggcagugcg

SEQ ID NO: 1578123 - RNA, 20 nt, Human adenovirus E
ucaugaacugcucgaucucc

SEQ ID NO: 1578124 - RNA, 15 nt, Human adenovirus E
gagacgcccaggccg

SEQ ID NO: 1578125 - RNA, 17 nt, Human adenovirus E
aagagauggaggaaucc

SEQ ID NO: 1578126 - RNA, 13 nt, Human adenovirus E
gcgagacgcccag

SEQ ID NO: 1578127 - RNA, 12 nt, Human adenovirus E
cacagcacaggc

SEQ ID NO: 1578128 - RNA, 20 nt, Human adenovirus E
cugacggagucuuccaacuc

SEQ ID NO: 1578129 - RNA, 15 nt, Human adenovirus E
ucacggcguacgagc

SEQ ID NO: 1578130 - RNA, 13 nt, Human adenovirus E
augcagcagcuga

SEQ ID NO: 1578131 - RNA, 23 nt, Human adenovirus E
gagguaguugagcgugguggcga

SEQ ID NO: 1578132 - RNA, 17 nt, Human adenovirus E
ccaggacuacuccaccc

SEQ ID NO: 1578133 - RNA, 14 nt, Human adenovirus E
cagcacccagacca

SEQ ID NO: 1578134 - RNA, 14 nt, Human adenovirus E
gugcgagggggcga

SEQ ID NO: 1578135 - RNA, 19 nt, Human adenovirus E
ggcgcugcagagccagccg

SEQ ID NO: 1578136 - RNA, 22 nt, Human adenovirus E
gccacaccacagcuaccuccag

SEQ ID NO: 1578137 - RNA, 13 nt, Human adenovirus E
cccgaggaagcaa

SEQ ID NO: 1578138 - RNA, 15 nt, Human adenovirus E
cagaacgugcugcac

SEQ ID NO: 1578139 - RNA, 14 nt, Human adenovirus E
ccagaacgaccaca

SEQ ID NO: 1578140 - RNA, 13 nt, Human adenovirus E
cacgcccagcaca

SEQ ID NO: 1578141 - RNA, 15 nt, Human adenovirus E
caaccaccccugccg

SEQ ID NO: 1578142 - RNA, 18 nt, Human adenovirus E
gacccggacgugcagccc

SEQ ID NO: 1578143 - RNA, 11 nt, Human adenovirus E
acgagcugacg

SEQ ID NO: 1578144 - RNA, 11 nt, Human adenovirus E
ccgagccacag

SEQ ID NO: 1578145 - RNA, 15 nt, Human adenovirus E
uaacauuuuugccau

SEQ ID NO: 1578146 - RNA, 14 nt, Human adenovirus E
ggcacgacaggcag

SEQ ID NO: 1578147 - RNA, 11 nt, Human adenovirus E
ggaccacugcc

SEQ ID NO: 1578148 - RNA, 21 nt, Human adenovirus E
uggcacgacaggcagcgggga

SEQ ID NO: 1578149 - RNA, 23 nt, Human adenovirus E
cguggaacagcaccacagggcag

SEQ ID NO: 1578150 - RNA, 21 nt, Human adenovirus E
gcaccgggugauccuccacca

SEQ ID NO: 1578151 - RNA, 21 nt, Human adenovirus E
ucgagggucugggcagcgacg

SEQ ID NO: 1578152 - RNA, 13 nt, Human adenovirus E
accccugccgccc

SEQ ID NO: 1578153 - RNA, 20 nt, Human adenovirus E
acuucucgcgcuucugcugu

SEQ ID NO: 1578154 - RNA, 17 nt, Human adenovirus E
gcgcacccgccccccuc

SEQ ID NO: 1578155 - RNA, 15 nt, Human adenovirus E
cucuguccccggugc

SEQ ID NO: 1578156 - RNA, 17 nt, Human adenovirus E
gugaacauucugcagag

SEQ ID NO: 1578157 - RNA, 15 nt, Human adenovirus E
auccccagauaauuu

SEQ ID NO: 1578158 - RNA, 16 nt, Human adenovirus E
caguauccgcagcagc

SEQ ID NO: 1578159 - RNA, 16 nt, Human adenovirus E
accgucguccucggcg

SEQ ID NO: 1578160 - RNA, 23 nt, Human adenovirus E
gcgccgcagcaguggcagcggcc

SEQ ID NO: 1578161 - RNA, 17 nt, Human adenovirus E
ggcgggggagaugagcu

SEQ ID NO: 1578162 - RNA, 14 nt, Human adenovirus E
gcgaacgcucugca

SEQ ID NO: 1578163 - RNA, 16 nt, Human adenovirus E
cucgagugccacugcc

SEQ ID NO: 1578164 - RNA, 22 nt, Human adenovirus E
cugggguucauguugugcagga

SEQ ID NO: 1578165 - RNA, 15 nt, Human adenovirus E
gcccugggccaggac

SEQ ID NO: 1578166 - RNA, 16 nt, Human adenovirus E
gacaagcuggaacacu

SEQ ID NO: 1578167 - RNA, 23 nt, Human adenovirus E
gcugacaguaugauuuuuuacaa

SEQ ID NO: 1578168 - RNA, 16 nt, Human adenovirus E
cagucaggcagaggag

SEQ ID NO: 1578169 - RNA, 21 nt, Human adenovirus E
agccuuguugcgcagggccag

SEQ ID NO: 1578170 - RNA, 13 nt, Human adenovirus E
guacuuggccagc

SEQ ID NO: 1578171 - RNA, 13 nt, Human adenovirus E
gccgcuggcuccu

SEQ ID NO: 1578172 - RNA, 15 nt, Human adenovirus E
gaucccugcuugcau

SEQ ID NO: 1578173 - RNA, 16 nt, Human adenovirus E
ugcggcgcggccugga

SEQ ID NO: 1578174 - RNA, 12 nt, Human adenovirus E
cagcggcagcau

SEQ ID NO: 1578175 - RNA, 20 nt, Human adenovirus E
aucacccuagugagcugcgg

SEQ ID NO: 1578176 - RNA, 17 nt, Human adenovirus E
agcaggucgggcgcgga

SEQ ID NO: 1578177 - RNA, 14 nt, Human adenovirus E
ugaccuugcagcag

SEQ ID NO: 1578178 - RNA, 15 nt, Human adenovirus E
ugcgcgucggccagg

SEQ ID NO: 1578179 - RNA, 19 nt, Human adenovirus E
cagcggccaucgccagcau

SEQ ID NO: 1578180 - RNA, 14 nt, Human adenovirus E
cugcugguggcccc

SEQ ID NO: 1578181 - RNA, 22 nt, Human adenovirus E
aggccaucgugcagaaccccac

SEQ ID NO: 1578182 - RNA, 16 nt, Human adenovirus E
gcgccgggcggcaggg

SEQ ID NO: 1578183 - RNA, 20 nt, Human adenovirus E
gcagcaaaguuagccuugca

SEQ ID NO: 1578184 - RNA, 14 nt, Human adenovirus E
acgauccccgggcg

SEQ ID NO: 1578185 - RNA, 16 nt, Human adenovirus E
cgagaccgagcuccag

SEQ ID NO: 1578186 - RNA, 18 nt, Human adenovirus E
ggaucagcaucaucuggg

SEQ ID NO: 1578187 - RNA, 19 nt, Human adenovirus E
agaugagccgcuggaagac

SEQ ID NO: 1578188 - RNA, 16 nt, Human adenovirus E
cggcgcaaacccggga

SEQ ID NO: 1578189 - RNA, 17 nt, Human adenovirus E
cgugagcggggcuggac

SEQ ID NO: 1578190 - RNA, 14 nt, Human adenovirus E
caucaucugggccu

SEQ ID NO: 1578191 - RNA, 17 nt, Human adenovirus E
cgcgcggcuggcggugc

SEQ ID NO: 1578192 - RNA, 21 nt, Human adenovirus E
ugcagaacaaugacuucaccc

SEQ ID NO: 1578193 - RNA, 19 nt, Human adenovirus E
  misc_feature (8)..(8): n is a, c, g, or u
uacacucnugcaccauccc

SEQ ID NO: 1578194 - RNA, 15 nt, Human adenovirus E
gccaggacgacccgg

SEQ ID NO: 1578195 - RNA, 14 nt, Human adenovirus E
cgccagcuuugcag

SEQ ID NO: 1578196 - RNA, 20 nt, Human adenovirus E
gacagcacucaggcagagga

SEQ ID NO: 1578197 - RNA, 15 nt, Human adenovirus E
ccaacgcgcaccgca

SEQ ID NO: 1578198 - RNA, 13 nt, Human adenovirus E
caggaagcagaga

SEQ ID NO: 1578199 - RNA, 13 nt, Human adenovirus E
gaguuuuuccagg

SEQ ID NO: 1578200 - RNA, 14 nt, Human adenovirus E
gcaagcuccugcag

SEQ ID NO: 1578201 - RNA, 20 nt, Human adenovirus E
cagagaaugagcagagucag

SEQ ID NO: 1578202 - RNA, 18 nt, Human adenovirus E
gcgggguuucuucuuggg

SEQ ID NO: 1578203 - RNA, 14 nt, Human adenovirus E
cgugcagccacagc

SEQ ID NO: 1578204 - RNA, 22 nt, Human adenovirus E
gggcugccgcuguccgagaagc

SEQ ID NO: 1578205 - RNA, 15 nt, Human adenovirus E
ucccaacaaaugcca

SEQ ID NO: 1578206 - RNA, 21 nt, Human adenovirus E
gcccgugggcggcggccuggg

SEQ ID NO: 1578207 - RNA, 13 nt, Human adenovirus E
caccguggugcag

SEQ ID NO: 1578208 - RNA, 22 nt, Human adenovirus E
acggcgcagcuguuccuggugg

SEQ ID NO: 1578209 - RNA, 16 nt, Human adenovirus E
gugcacccgugcagcc

SEQ ID NO: 1578210 - RNA, 16 nt, Human adenovirus E
ccgcggcgccgcgccg

SEQ ID NO: 1578211 - RNA, 12 nt, Human adenovirus E
gagugaugaaga

SEQ ID NO: 1578212 - RNA, 15 nt, Human adenovirus E
gcaaggaccugagcg

SEQ ID NO: 1578213 - RNA, 16 nt, Human adenovirus E
gccuccuuggaagagg

SEQ ID NO: 1578214 - RNA, 14 nt, Human adenovirus E
uaggagcuccugga

SEQ ID NO: 1578215 - RNA, 15 nt, Human adenovirus E
agcaagcagcacgga

SEQ ID NO: 1578216 - RNA, 15 nt, Human adenovirus E
uccccuccugcacag

SEQ ID NO: 1578217 - RNA, 17 nt, Human adenovirus E
ggcgaagacgcgcgccg

SEQ ID NO: 1578218 - RNA, 17 nt, Human adenovirus E
guccggguggaugauga

SEQ ID NO: 1578219 - RNA, 15 nt, Human adenovirus E
agaagccccuggggg

SEQ ID NO: 1578220 - RNA, 16 nt, Human adenovirus E
cugaaaguggagcugc

SEQ ID NO: 1578221 - RNA, 22 nt, Human adenovirus E
gaccuaccaggagaucacccac

SEQ ID NO: 1578222 - RNA, 15 nt, Human adenovirus E
acgcccgcgccaaga

SEQ ID NO: 1578223 - RNA, 23 nt, Human adenovirus E
aagucuauguuggcacagcacag

SEQ ID NO: 1578224 - RNA, 19 nt, Human adenovirus E
guuguuggccagcugcacc

SEQ ID NO: 1578225 - RNA, 22 nt, Human adenovirus E
ucgcgccugcugcugcugcugg

SEQ ID NO: 1578226 - RNA, 22 nt, Human adenovirus E
ccagacaugcaagagauggagg

SEQ ID NO: 1578227 - RNA, 14 nt, Human adenovirus E
agccuaggccacaa

SEQ ID NO: 1578228 - RNA, 21 nt, Human adenovirus E
guucaucaauaaacugaugga

SEQ ID NO: 1578229 - RNA, 21 nt, Human adenovirus E
gugccccgguucgaggccggc

SEQ ID NO: 1578230 - RNA, 13 nt, Human adenovirus E
cggcagugguggc

SEQ ID NO: 1578231 - RNA, 16 nt, Human adenovirus E
uuccgcgcucccuggg

SEQ ID NO: 1578232 - RNA, 13 nt, Human adenovirus E
uggaagagcggcg

SEQ ID NO: 1578233 - RNA, 17 nt, Human adenovirus E
cccaacccgcgccucaa

SEQ ID NO: 1578234 - RNA, 22 nt, Human adenovirus E
  misc_feature (10)..(10): n is a, c, g, or u
ggcucauuanuccagcagaggc

SEQ ID NO: 1578235 - RNA, 15 nt, Human adenovirus E
gcaaacccgggagcu

SEQ ID NO: 1578236 - RNA, 17 nt, Human adenovirus E
ucaucaugagcaaagag

SEQ ID NO: 1578237 - RNA, 16 nt, Human adenovirus E
aggacaaaaaggaaga

SEQ ID NO: 1578238 - RNA, 18 nt, Human adenovirus E
ugacaguacaggagccau

SEQ ID NO: 1578239 - RNA, 12 nt, Human adenovirus E
cuuaccuuuggu

SEQ ID NO: 1578240 - RNA, 12 nt, Human adenovirus E
ugcuugcugcua

SEQ ID NO: 1578241 - RNA, 23 nt, Human adenovirus E
cauggaggugcagacggaucccu

SEQ ID NO: 1578242 - RNA, 17 nt, Human adenovirus E
ucguuguuggccagcug

SEQ ID NO: 1578243 - RNA, 20 nt, Human adenovirus E
ugcacaauaucuuugaggag

SEQ ID NO: 1578244 - RNA, 16 nt, Human adenovirus E
ucgggcaucagcugga

SEQ ID NO: 1578245 - RNA, 18 nt, Human adenovirus E
uggccaacuaccuggccu

SEQ ID NO: 1578246 - RNA, 20 nt, Human adenovirus E
agggaacguguacugggugc

SEQ ID NO: 1578247 - RNA, 14 nt, Human adenovirus E
cccgcgcuccugga

SEQ ID NO: 1578248 - RNA, 18 nt, Human adenovirus E
cagaagcacacagcucaa

SEQ ID NO: 1578249 - RNA, 14 nt, Human adenovirus E
gcuucacgcucgcc

SEQ ID NO: 1578250 - RNA, 19 nt, Human adenovirus E
cgugccccagggcauggga

SEQ ID NO: 1578251 - RNA, 12 nt, Human adenovirus E
cgcgcuggugga

SEQ ID NO: 1578252 - RNA, 20 nt, Human adenovirus E
caugaucaagcccagcacca

SEQ ID NO: 1578253 - RNA, 22 nt, Human adenovirus E
gccgcagcaguggcagcggccg

SEQ ID NO: 1578254 - RNA, 15 nt, Human adenovirus E
gacuccguggcucug

SEQ ID NO: 1578255 - RNA, 22 nt, Human adenovirus E
gggggugcgcucccggcggcgc

SEQ ID NO: 1578256 - RNA, 21 nt, Human adenovirus E
agggcgugcgcuccuggacgc

SEQ ID NO: 1578257 - RNA, 19 nt, Human adenovirus E
ugcccuucgcccuagccgc

SEQ ID NO: 1578258 - RNA, 13 nt, Human adenovirus E
cccugggccagga

SEQ ID NO: 1578259 - RNA, 20 nt, Human adenovirus E
gaaggugcggggguccccgu

SEQ ID NO: 1578260 - RNA, 20 nt, Human adenovirus E
ggucacggcguacgagcaga

SEQ ID NO: 1578261 - RNA, 14 nt, Human adenovirus E
ccaagaacagccag

SEQ ID NO: 1578262 - RNA, 19 nt, Human adenovirus E
cguacuugcuguagcagaa

SEQ ID NO: 1578263 - RNA, 14 nt, Human adenovirus E
cagggcggccagac

SEQ ID NO: 1578264 - RNA, 17 nt, Human adenovirus E
ggagcuggagugccugc

SEQ ID NO: 1578265 - RNA, 22 nt, Human adenovirus E
cugcugaauaucaccgagcccg

SEQ ID NO: 1578266 - RNA, 21 nt, Human adenovirus E
gacccagaucaucggcaccuu

SEQ ID NO: 1578267 - RNA, 15 nt, Human adenovirus E
caguauccgcagcag

SEQ ID NO: 1578268 - RNA, 13 nt, Human adenovirus E
acuucgugccgcu

SEQ ID NO: 1578269 - RNA, 15 nt, Human adenovirus E
ugcucuuugccuuca

SEQ ID NO: 1578270 - RNA, 15 nt, Human adenovirus E
ccugugggaccugcu

SEQ ID NO: 1578271 - RNA, 16 nt, Human adenovirus E
acagcaaccucaggca

SEQ ID NO: 1578272 - RNA, 14 nt, Human adenovirus E
gcgcaggccggagc

SEQ ID NO: 1578273 - RNA, 14 nt, Human adenovirus E
guugugguccuggg

SEQ ID NO: 1578274 - RNA, 16 nt, Human adenovirus E
gcgccagcgccggcag

SEQ ID NO: 1578275 - RNA, 15 nt, Human adenovirus E
agcucaaccccggcu

SEQ ID NO: 1578276 - RNA, 13 nt, Human adenovirus E
cccgagggccgcu

SEQ ID NO: 1578277 - RNA, 22 nt, Human adenovirus E
cugcugcugguggcccccuuca

SEQ ID NO: 1578278 - RNA, 18 nt, Human adenovirus E
ugccugaacgccugcugg

SEQ ID NO: 1578279 - RNA, 15 nt, Human adenovirus E
cagaugcgcccccac

SEQ ID NO: 1578280 - RNA, 15 nt, Human adenovirus E
caaccucaggcacac

SEQ ID NO: 1578281 - RNA, 13 nt, Human adenovirus E
cuaccucugccac

SEQ ID NO: 1578282 - RNA, 18 nt, Human adenovirus E
gaagaccccggcgcaagu

SEQ ID NO: 1578283 - RNA, 21 nt, Human adenovirus E
acgcccuuuucaaccuggguc

SEQ ID NO: 1578284 - RNA, 19 nt, Human adenovirus E
ucgacaagaugaauacacc

SEQ ID NO: 1578285 - RNA, 18 nt, Human adenovirus E
  misc_feature (6)..(6): n is a, c, g, or u
ccccgnuacuaacaacca

SEQ ID NO: 1578286 - RNA, 23 nt, Human adenovirus E
acaagucuauguuggcacagcac

SEQ ID NO: 1578287 - RNA, 17 nt, Human adenovirus E
gucccccacccaguccc

SEQ ID NO: 1578288 - RNA, 17 nt, Human adenovirus E
ucgcccuagccgccucc

SEQ ID NO: 1578289 - RNA, 19 nt, Human adenovirus E
acaaaauaaaauaaaguuc

SEQ ID NO: 1578290 - RNA, 12 nt, Human adenovirus E
cacccucgcucu

SEQ ID NO: 1578291 - RNA, 16 nt, Human adenovirus E
cugucgagagccacac

SEQ ID NO: 1578292 - RNA, 20 nt, Human adenovirus E
cuggccugcacccucaucuc

SEQ ID NO: 1578293 - RNA, 21 nt, Human adenovirus E
uucuacacuaaaaaaauacug

SEQ ID NO: 1578294 - RNA, 20 nt, Human adenovirus E
acacgggguugcagcacugg

SEQ ID NO: 1578295 - RNA, 15 nt, Human adenovirus E
cgcugcucaccaccu

SEQ ID NO: 1578296 - RNA, 21 nt, Human adenovirus E
gcuccgcgacacggcacgcgg

SEQ ID NO: 1578297 - RNA, 18 nt, Human adenovirus E
accgccuaccgcagcugg

SEQ ID NO: 1578298 - RNA, 21 nt, Human adenovirus E
cggcggcgaagacgcgcgccg

SEQ ID NO: 1578299 - RNA, 13 nt, Human adenovirus E
gaacucuugcagg

SEQ ID NO: 1578300 - RNA, 23 nt, Human adenovirus E
ucgaaggcgggcaugaccucggc

SEQ ID NO: 1578301 - RNA, 14 nt, Human adenovirus E
gcccgaggaagcaa

SEQ ID NO: 1578302 - RNA, 17 nt, Human adenovirus E
gagccggucguccccgg

SEQ ID NO: 1578303 - RNA, 19 nt, Human adenovirus E
cccaucauguacgccagca

SEQ ID NO: 1578304 - RNA, 21 nt, Human adenovirus E
aauugucgcuaugauugaaaa

SEQ ID NO: 1578305 - RNA, 14 nt, Human adenovirus E
cgcgcgcacguggc

SEQ ID NO: 1578306 - RNA, 13 nt, Human adenovirus E
ggacgaggagggc

SEQ ID NO: 1578307 - RNA, 23 nt, Human adenovirus E
ccgcgccaaccgcacccgcgccg

SEQ ID NO: 1578308 - RNA, 18 nt, Human adenovirus E
ggaucgcuguccacgagc

SEQ ID NO: 1578309 - RNA, 14 nt, Human adenovirus E
cagcaggcggcgcg

SEQ ID NO: 1578310 - RNA, 13 nt, Human adenovirus E
ccugauggcucug

SEQ ID NO: 1578311 - RNA, 15 nt, Human adenovirus E
agagcaugagcacca

SEQ ID NO: 1578312 - RNA, 19 nt, Human adenovirus E
caacgcgcugcuggagcgc

SEQ ID NO: 1578313 - RNA, 13 nt, Human adenovirus E
ccgaggugccccu

SEQ ID NO: 1578314 - RNA, 19 nt, Human adenovirus E
uucuaucauuaccucugcu

SEQ ID NO: 1578315 - RNA, 18 nt, Human adenovirus E
agugccacugccgcugca

SEQ ID NO: 1578316 - RNA, 15 nt, Human adenovirus E
ccucugcacgccgca

SEQ ID NO: 1578317 - RNA, 14 nt, Human adenovirus E
ccccuacacaugau

SEQ ID NO: 1578318 - RNA, 23 nt, Human adenovirus E
ggaaguggccagaucguccaggg

SEQ ID NO: 1578319 - RNA, 18 nt, Human adenovirus E
agcccggguccaggccag

SEQ ID NO: 1578320 - RNA, 19 nt, Human adenovirus E
cugccgcugcgcagcagua

SEQ ID NO: 1578321 - RNA, 17 nt, Human adenovirus E
cguggaggagcucagcc

SEQ ID NO: 1578322 - RNA, 21 nt, Human adenovirus E
caggacccuacguagaagagg

SEQ ID NO: 1578323 - RNA, 19 nt, Human adenovirus E
ucuccaguucguggaggag

SEQ ID NO: 1578324 - RNA, 21 nt, Human adenovirus E
cauaguugugguccuggguga

SEQ ID NO: 1578325 - RNA, 17 nt, Human adenovirus E
caggagcgcgggcugcc

SEQ ID NO: 1578326 - RNA, 19 nt, Human adenovirus E
gagcccgcgcgggaggcag

SEQ ID NO: 1578327 - RNA, 13 nt, Human adenovirus E
aagcgugggccug

SEQ ID NO: 1578328 - RNA, 17 nt, Human adenovirus E
ugcaugccaacccuucc

SEQ ID NO: 1578329 - RNA, 22 nt, Human adenovirus E
cggcgaaguugaaaaacuggga

SEQ ID NO: 1578330 - RNA, 18 nt, Human adenovirus E
gagccgcgcccugggcca

SEQ ID NO: 1578331 - RNA, 21 nt, Human adenovirus E
acagggcaauccucgcacaga

SEQ ID NO: 1578332 - RNA, 21 nt, Human adenovirus E
cuaugccaucuuccagcagag

SEQ ID NO: 1578333 - RNA, 19 nt, Human adenovirus E
caacaugguagcccaucau

SEQ ID NO: 1578334 - RNA, 14 nt, Human adenovirus E
cuccggaauccugc

SEQ ID NO: 1578335 - RNA, 23 nt, Human adenovirus E
ugacggccuuguaggcgcagcag

SEQ ID NO: 1578336 - RNA, 17 nt, Human adenovirus E
uccaagaagaggcagca

SEQ ID NO: 1578337 - RNA, 16 nt, Human adenovirus E
gccacgaccgccgcgg

SEQ ID NO: 1578338 - RNA, 17 nt, Human adenovirus E
ccggggcgggggagaug

SEQ ID NO: 1578339 - RNA, 19 nt, Human adenovirus E
gcacccgugcagccacagc

SEQ ID NO: 1578340 - RNA, 20 nt, Human adenovirus E
gcgacacggucauguggaug

SEQ ID NO: 1578341 - RNA, 17 nt, Human adenovirus E
agcaugaugcccacggc

SEQ ID NO: 1578342 - RNA, 17 nt, Human adenovirus E
caucuccgcuccggguc

SEQ ID NO: 1578343 - RNA, 21 nt, Human adenovirus E
cagcagugucuggaggagcag

SEQ ID NO: 1578344 - RNA, 17 nt, Human adenovirus E
ggacgaugaggacuccg

SEQ ID NO: 1578345 - RNA, 12 nt, Human adenovirus E
ggcagcgccgcc

SEQ ID NO: 1578346 - RNA, 16 nt, Human adenovirus E
gaagcugaaaguggag

SEQ ID NO: 1578347 - RNA, 14 nt, Human adenovirus E
cgccgcccagcccc

SEQ ID NO: 1578348 - RNA, 21 nt, Human adenovirus E
cuccaagucugugccacccuc

SEQ ID NO: 1578349 - RNA, 13 nt, Human adenovirus E
cgcucccuggccu

SEQ ID NO: 1578350 - RNA, 13 nt, Human adenovirus E
cccgccaccugcu

SEQ ID NO: 1578351 - RNA, 21 nt, Human adenovirus E
agcggccgaccgcgauggcuc

SEQ ID NO: 1578352 - RNA, 21 nt, Human adenovirus E
gcacgugcauguucucgcgca

SEQ ID NO: 1578353 - RNA, 19 nt, Human adenovirus E
aucagcaucaucugggccu

SEQ ID NO: 1578354 - RNA, 20 nt, Human adenovirus E
cgacugcgucuaccucuacc

SEQ ID NO: 1578355 - RNA, 15 nt, Human adenovirus E
gcuaccugcugcgcc

SEQ ID NO: 1578356 - RNA, 17 nt, Human adenovirus E
cccggcggcaccggagc

SEQ ID NO: 1578357 - RNA, 21 nt, Human adenovirus E
accggcucucggccauccugg

SEQ ID NO: 1578358 - RNA, 20 nt, Human adenovirus E
agccgcgcccugggccagga

SEQ ID NO: 1578359 - RNA, 17 nt, Human adenovirus E
cccugaagcaaacagac

SEQ ID NO: 1578360 - RNA, 23 nt, Human adenovirus E
augagguccacacugguggccac

SEQ ID NO: 1578361 - RNA, 15 nt, Human adenovirus E
cuucacgccucguca

SEQ ID NO: 1578362 - RNA, 15 nt, Human adenovirus E
cucaccaaggccaug

SEQ ID NO: 1578363 - RNA, 18 nt, Human adenovirus E
auucccacggagcccaug

SEQ ID NO: 1578364 - RNA, 15 nt, Human adenovirus E
aggcggcggcaggac

SEQ ID NO: 1578365 - RNA, 16 nt, Human adenovirus E
ugaggccgagccacag

SEQ ID NO: 1578366 - RNA, 18 nt, Human adenovirus E
caugcaacuuggaaggga

SEQ ID NO: 1578367 - RNA, 15 nt, Human adenovirus E
cggcuucccccagga

SEQ ID NO: 1578368 - RNA, 15 nt, Human adenovirus E
agagguucccaagau

SEQ ID NO: 1578369 - RNA, 19 nt, Human adenovirus E
caaccuggaagccacccug

SEQ ID NO: 1578370 - RNA, 17 nt, Human adenovirus E
ucccggcggcgcucuga

SEQ ID NO: 1578371 - RNA, 17 nt, Human adenovirus E
caucgccucgcugaacu

SEQ ID NO: 1578372 - RNA, 13 nt, Human adenovirus E
ccgaggagggcaa

SEQ ID NO: 1578373 - RNA, 19 nt, Human adenovirus E
ucagucucaaguccagcaa

SEQ ID NO: 1578374 - RNA, 16 nt, Human adenovirus E
ggcgcgagcugagcga

SEQ ID NO: 1578375 - RNA, 19 nt, Human adenovirus E
ccacaagaaguaccucacc

SEQ ID NO: 1578376 - RNA, 16 nt, Human adenovirus E
gaggucaaggugcggc

SEQ ID NO: 1578377 - RNA, 14 nt, Human adenovirus E
gcuugcccucggcc

SEQ ID NO: 1578378 - RNA, 22 nt, Human adenovirus E
cgcgcuugcugggcgaagagga

SEQ ID NO: 1578379 - RNA, 21 nt, Human adenovirus E
ucucugcucaauauauagccc

SEQ ID NO: 1578380 - RNA, 17 nt, Human adenovirus E
guucgugcccgaggacu

SEQ ID NO: 1578381 - RNA, 14 nt, Human adenovirus E
cgugguccugguga

SEQ ID NO: 1578382 - RNA, 23 nt, Human adenovirus E
gccguugauguuguggcccacga

SEQ ID NO: 1578383 - RNA, 19 nt, Human adenovirus E
cccggugcugacggcuccc

SEQ ID NO: 1578384 - RNA, 20 nt, Human adenovirus E
  misc_feature (8)..(8): n is a, c, g, or u
cucauuanuccagcagaggc

SEQ ID NO: 1578385 - RNA, 18 nt, Human adenovirus E
cuucggaucuucagccag

SEQ ID NO: 1578386 - RNA, 17 nt, Human adenovirus E
ugaccaccguggugcag

SEQ ID NO: 1578387 - RNA, 22 nt, Human adenovirus E
gaugcggcccaugagcugcgag

SEQ ID NO: 1578388 - RNA, 17 nt, Human adenovirus E
guaccaguccgggccgg

SEQ ID NO: 1578389 - RNA, 14 nt, Human adenovirus E
cucgccgcucgccg

SEQ ID NO: 1578390 - RNA, 13 nt, Human adenovirus E
cggcccucagcau

SEQ ID NO: 1578391 - RNA, 13 nt, Human adenovirus E
uccucuucuuggu

SEQ ID NO: 1578392 - RNA, 23 nt, Human adenovirus E
gccggacuacuucuuccagacca

SEQ ID NO: 1578393 - RNA, 23 nt, Human adenovirus E
agcagcaacuuccagccacgacc

SEQ ID NO: 1578394 - RNA, 13 nt, Human adenovirus E
ccggagcugucca

SEQ ID NO: 1578395 - RNA, 13 nt, Human adenovirus E
cccacggccgcca

SEQ ID NO: 1578396 - RNA, 21 nt, Human adenovirus E
gaucagcaucaucugggccug

SEQ ID NO: 1578397 - RNA, 21 nt, Human adenovirus E
caccguggaaugggccagacc

SEQ ID NO: 1578398 - RNA, 18 nt, Human adenovirus E
ucagggaggcgcugcuga

SEQ ID NO: 1578399 - RNA, 22 nt, Human adenovirus E
acuaggaacuucaggcugggcu

SEQ ID NO: 1578400 - RNA, 23 nt, Human adenovirus E
cagcuguuccugguggugcagca

SEQ ID NO: 1578401 - RNA, 15 nt, Human adenovirus E
ugacggcggccugcc

SEQ ID NO: 1578402 - RNA, 19 nt, Human adenovirus E
cccugagcgacgaucuggg

SEQ ID NO: 1578403 - RNA, 17 nt, Human adenovirus E
ccagccgccgggccuug

SEQ ID NO: 1578404 - RNA, 16 nt, Human adenovirus E
cugaucuguagaaaaa

SEQ ID NO: 1578405 - RNA, 13 nt, Human adenovirus E
acacgcuccagcc

SEQ ID NO: 1578406 - RNA, 21 nt, Human adenovirus E
cuggcgggcggcgccacccug

SEQ ID NO: 1578407 - RNA, 15 nt, Human adenovirus E
cugccgcccuggugc

SEQ ID NO: 1578408 - RNA, 16 nt, Human adenovirus E
gaccgagcuccagcuc

SEQ ID NO: 1578409 - RNA, 22 nt, Human adenovirus E
cagauaaaccgaaguccucccc

SEQ ID NO: 1578410 - RNA, 17 nt, Human adenovirus E
gacaugcaucccagcug

SEQ ID NO: 1578411 - RNA, 20 nt, Human adenovirus E
ggugauaucuuccagauaac

SEQ ID NO: 1578412 - RNA, 15 nt, Human adenovirus E
ugucgagccugcuga

SEQ ID NO: 1578413 - RNA, 17 nt, Human adenovirus E
cagcagguggacugagg

SEQ ID NO: 1578414 - RNA, 20 nt, Human adenovirus E
gcgaccaggagcugaugcau

SEQ ID NO: 1578415 - RNA, 19 nt, Human adenovirus E
ggccgagcugucggccugc

SEQ ID NO: 1578416 - RNA, 14 nt, Human adenovirus E
cucgcagcagcugc

SEQ ID NO: 1578417 - RNA, 16 nt, Human adenovirus E
ggccugaugcaccugu

SEQ ID NO: 1578418 - RNA, 15 nt, Human adenovirus E
gucggccaugggcau

SEQ ID NO: 1578419 - RNA, 17 nt, Human adenovirus E
caagcuggaacacuuac

SEQ ID NO: 1578420 - RNA, 20 nt, Human adenovirus E
cacgaagcccugcaggaagc

SEQ ID NO: 1578421 - RNA, 14 nt, Human adenovirus E
gcgcgccaucagca

SEQ ID NO: 1578422 - RNA, 20 nt, Human adenovirus E
cccgccucguuccagacgcg

SEQ ID NO: 1578423 - RNA, 22 nt, Human adenovirus E
agcccacggccgccagcuccuc

SEQ ID NO: 1578424 - RNA, 14 nt, Human adenovirus E
gcuuucggacauuu

SEQ ID NO: 1578425 - RNA, 17 nt, Human adenovirus E
cggcccugcggugguga

SEQ ID NO: 1578426 - RNA, 20 nt, Human adenovirus E
caugcggaucucgcucaggu

SEQ ID NO: 1578427 - RNA, 15 nt, Human adenovirus E
ggccgccggugccgc

SEQ ID NO: 1578428 - RNA, 22 nt, Human adenovirus E
aacucaccccggggcuguggac

SEQ ID NO: 1578429 - RNA, 16 nt, Human adenovirus E
ucuaugcaauucugac

SEQ ID NO: 1578430 - RNA, 21 nt, Human adenovirus E
uccuccaagucugugccaccc

SEQ ID NO: 1578431 - RNA, 22 nt, Human adenovirus E
uggcuuccagcaaagccuccac

SEQ ID NO: 1578432 - RNA, 23 nt, Human adenovirus E
ggggccacgagccggggcagcgc

SEQ ID NO: 1578433 - RNA, 16 nt, Human adenovirus E
gaagcccugcaggaag

SEQ ID NO: 1578434 - RNA, 14 nt, Human adenovirus E
cucgggacccugcc

SEQ ID NO: 1578435 - RNA, 16 nt, Human adenovirus E
acaaguuucuccacca

SEQ ID NO: 1578436 - RNA, 14 nt, Human adenovirus E
ccacccuccaccgc

SEQ ID NO: 1578437 - RNA, 16 nt, Human adenovirus E
ugaauccccacuggcu

SEQ ID NO: 1578438 - RNA, 14 nt, Human adenovirus E
gcaccugugggacc

SEQ ID NO: 1578439 - RNA, 20 nt, Human adenovirus E
caagcgccgcagcaguggca

SEQ ID NO: 1578440 - RNA, 15 nt, Human adenovirus E
acugccgcugcaacc

SEQ ID NO: 1578441 - RNA, 15 nt, Human adenovirus E
gaccggggccgggac

SEQ ID NO: 1578442 - RNA, 17 nt, Human adenovirus E
gucucuucgggggcaga

SEQ ID NO: 1578443 - RNA, 14 nt, Human adenovirus E
augccccgaggaaa

SEQ ID NO: 1578444 - RNA, 14 nt, Human adenovirus E
cuuucauuuuugcg

SEQ ID NO: 1578445 - RNA, 15 nt, Human adenovirus E
uggccagcugcacca

SEQ ID NO: 1578446 - RNA, 17 nt, Human adenovirus E
ccaucugcccccaccgc

SEQ ID NO: 1578447 - RNA, 18 nt, Human adenovirus E
gcuccuagucgaagaccc

SEQ ID NO: 1578448 - RNA, 17 nt, Human adenovirus E
ugcgccaccacccccag

SEQ ID NO: 1578449 - RNA, 19 nt, Human adenovirus E
cccccggcggcgcgugcag

SEQ ID NO: 1578450 - RNA, 18 nt, Human adenovirus E
ggcgcugcagagccagcc

SEQ ID NO: 1578451 - RNA, 21 nt, Human adenovirus E
gaguucgccccccggcggcgc

SEQ ID NO: 1578452 - RNA, 22 nt, Human adenovirus E
caggccgagacgaugggcaggc

SEQ ID NO: 1578453 - RNA, 18 nt, Human adenovirus E
gcacgggacgcagggcca

SEQ ID NO: 1578454 - RNA, 17 nt, Human adenovirus E
cgcugacggcgcagcug

SEQ ID NO: 1578455 - RNA, 17 nt, Human adenovirus E
agaucucuugcacgucc

SEQ ID NO: 1578456 - RNA, 22 nt, Human adenovirus E
gcgcugguggagaacaaggcca

SEQ ID NO: 1578457 - RNA, 19 nt, Human adenovirus E
cgugcugcacaccacccug

SEQ ID NO: 1578458 - RNA, 17 nt, Human adenovirus E
aguugcaagggcccagc

SEQ ID NO: 1578459 - RNA, 12 nt, Human adenovirus E
aauaccaccuca

SEQ ID NO: 1578460 - RNA, 19 nt, Human adenovirus E
cagcggaaugccgcggugc

SEQ ID NO: 1578461 - RNA, 14 nt, Human adenovirus E
gcggcagcggccau

SEQ ID NO: 1578462 - RNA, 20 nt, Human adenovirus E
gcggccagcugaaaaccauc

SEQ ID NO: 1578463 - RNA, 16 nt, Human adenovirus E
ggggaagacgugguca

SEQ ID NO: 1578464 - RNA, 21 nt, Human adenovirus E
gcaguuauuuuuccuccaccc

SEQ ID NO: 1578465 - RNA, 17 nt, Human adenovirus E
acucagguguccagcug

SEQ ID NO: 1578466 - RNA, 12 nt, Human adenovirus E
cgaccacagcaa

SEQ ID NO: 1578467 - RNA, 23 nt, Human adenovirus E
gccgucuacucgcagcagcugcg

SEQ ID NO: 1578468 - RNA, 15 nt, Human adenovirus E
ggcuucccccaggau

SEQ ID NO: 1578469 - RNA, 19 nt, Human adenovirus E
aaaacgucacccgccccgc

SEQ ID NO: 1578470 - RNA, 21 nt, Human adenovirus E
gccaggcgcacgggacgcagg

SEQ ID NO: 1578471 - RNA, 23 nt, Human adenovirus E
uuucgcggguugggacggcugcg

SEQ ID NO: 1578472 - RNA, 21 nt, Human adenovirus E
gaagacgaaggcgcgcaggcc

SEQ ID NO: 1578473 - RNA, 16 nt, Human adenovirus E
cuugggggcgaggaag

SEQ ID NO: 1578474 - RNA, 23 nt, Human adenovirus E
uaccgcgaggccaucggccaggc

SEQ ID NO: 1578475 - RNA, 19 nt, Human adenovirus E
caaguggugcccccuccag

SEQ ID NO: 1578476 - RNA, 23 nt, Human adenovirus E
ggcacggggaacucuugcaggac

SEQ ID NO: 1578477 - RNA, 18 nt, Human adenovirus E
ccagcugaaaaccaucau

SEQ ID NO: 1578478 - RNA, 14 nt, Human adenovirus E
aacccaccacgccu

SEQ ID NO: 1578479 - RNA, 21 nt, Human adenovirus E
cuggcagcccagccgccgggc

SEQ ID NO: 1578480 - RNA, 18 nt, Human adenovirus E
ccugcuugcaggccugcg

SEQ ID NO: 1578481 - RNA, 22 nt, Human adenovirus E
gccccucagcguggaggagcuc

SEQ ID NO: 1578482 - RNA, 17 nt, Human adenovirus E
gccagaucguccagggc

SEQ ID NO: 1578483 - RNA, 20 nt, Human adenovirus E
  misc_feature (6)..(6): n is a, c, g, or u
guguangccacgugaccggg

SEQ ID NO: 1578484 - RNA, 22 nt, Human adenovirus E
aucacccagucauagcaggggc

SEQ ID NO: 1578485 - RNA, 11 nt, Human adenovirus E
ggaggcagagg

SEQ ID NO: 1578486 - RNA, 19 nt, Human adenovirus E
gacccggagacgcgcggcc

SEQ ID NO: 1578487 - RNA, 13 nt, Human adenovirus E
caaagagcugucc

SEQ ID NO: 1578488 - RNA, 14 nt, Human adenovirus E
uggaggagcucagc

SEQ ID NO: 1578489 - RNA, 20 nt, Human adenovirus E
cggcccaucaagcagguggc

SEQ ID NO: 1578490 - RNA, 21 nt, Human adenovirus E
ggcgcagggcaugguguugca

SEQ ID NO: 1578491 - RNA, 22 nt, Human adenovirus E
caaagucuaaaaauacccgcca

SEQ ID NO: 1578492 - RNA, 18 nt, Human adenovirus E
gcagggcaugguguugca

SEQ ID NO: 1578493 - RNA, 18 nt, Human adenovirus E
accccgucaccaccaaga

SEQ ID NO: 1578494 - RNA, 18 nt, Human adenovirus E
aggugcggcccaucaagc

SEQ ID NO: 1578495 - RNA, 18 nt, Human adenovirus E
uugcgcagggccaggcgc

SEQ ID NO: 1578496 - RNA, 22 nt, Human adenovirus E
aucaaguggugcccccuccaga

SEQ ID NO: 1578497 - RNA, 19 nt, Human adenovirus E
gcugguggcgguguugcuu

SEQ ID NO: 1578498 - RNA, 15 nt, Human adenovirus E
uuuggaggaagacug

SEQ ID NO: 1578499 - RNA, 17 nt, Human adenovirus E
agucuggaggaagacga

SEQ ID NO: 1578500 - RNA, 16 nt, Human adenovirus E
cugcugcugcuggugg

SEQ ID NO: 1578501 - RNA, 21 nt, Human adenovirus E
ugaacgccugcugggccuugg

SEQ ID NO: 1578502 - RNA, 20 nt, Human adenovirus E
ccugcgucaucacccagggg

SEQ ID NO: 1578503 - RNA, 15 nt, Human adenovirus E
aagcaaguuccggag

SEQ ID NO: 1578504 - RNA, 21 nt, Human adenovirus E
acccagcccgccaacgugccc

SEQ ID NO: 1578505 - RNA, 22 nt, Human adenovirus E
gcccaugaucaagcccagcacc

SEQ ID NO: 1578506 - RNA, 13 nt, Human adenovirus E
cgcgagcaaggac

SEQ ID NO: 1578507 - RNA, 16 nt, Human adenovirus E
agaccgugaaggagga

SEQ ID NO: 1578508 - RNA, 13 nt, Human adenovirus E
auucuggccugca

SEQ ID NO: 1578509 - RNA, 16 nt, Human adenovirus E
cagagacaggagcggc

SEQ ID NO: 1578510 - RNA, 16 nt, Human adenovirus E
cgguuguaccuggugg

SEQ ID NO: 1578511 - RNA, 22 nt, Human adenovirus E
aggccguccugacuuuggagag

SEQ ID NO: 1578512 - RNA, 14 nt, Human adenovirus E
ggcacagcacaggc

SEQ ID NO: 1578513 - RNA, 17 nt, Human adenovirus E
gcaagccacaguacaga

SEQ ID NO: 1578514 - RNA, 21 nt, Human adenovirus E
ucgcuuacgcacgucuucaac

SEQ ID NO: 1578515 - RNA, 15 nt, Human adenovirus E
ugggcccuucgccuc

SEQ ID NO: 1578516 - RNA, 15 nt, Human adenovirus E
cgcagugggcgcaga

SEQ ID NO: 1578517 - RNA, 22 nt, Human adenovirus E
cugccgcaagaucucuugcacg

SEQ ID NO: 1578518 - RNA, 13 nt, Human adenovirus E
aggccgaucccug

SEQ ID NO: 1578519 - RNA, 20 nt, Human adenovirus E
uggaauuuuaucaaguuucu

SEQ ID NO: 1578520 - RNA, 13 nt, Human adenovirus E
gugcauguugauc

SEQ ID NO: 1578521 - RNA, 12 nt, Human adenovirus E
ccaccugcaucu

SEQ ID NO: 1578522 - RNA, 16 nt, Human adenovirus E
cugccuuggcaguaca

SEQ ID NO: 1578523 - RNA, 13 nt, Human adenovirus E
gugucgagccugc

SEQ ID NO: 1578524 - RNA, 15 nt, Human adenovirus E
cgcgucgcccaucuc

SEQ ID NO: 1578525 - RNA, 12 nt, Human adenovirus E
gccugcugcugc

SEQ ID NO: 1578526 - RNA, 20 nt, Human adenovirus E
ccucgucaggccguccugac

SEQ ID NO: 1578527 - RNA, 20 nt, Human adenovirus E
guggaagaaggaaggcagcg

SEQ ID NO: 1578528 - RNA, 12 nt, Human adenovirus E
gucuccaugagc

SEQ ID NO: 1578529 - RNA, 23 nt, Human adenovirus E
cagcaguauccggggaguccagc

SEQ ID NO: 1578530 - RNA, 14 nt, Human adenovirus E
gcccugggccagga

SEQ ID NO: 1578531 - RNA, 18 nt, Human adenovirus E
agcaaaguuagccuugca

SEQ ID NO: 1578532 - RNA, 14 nt, Human adenovirus E
ccugcacuggcagc

SEQ ID NO: 1578533 - RNA, 15 nt, Human adenovirus E
ugaaccugagccagg

SEQ ID NO: 1578534 - RNA, 17 nt, Human adenovirus E
cuggcugacguccugca

SEQ ID NO: 1578535 - RNA, 21 nt, Human adenovirus E
auccucagguaaaucaagugg

SEQ ID NO: 1578536 - RNA, 15 nt, Human adenovirus E
ggaggccagcaccca

SEQ ID NO: 1578537 - RNA, 13 nt, Human adenovirus E
gucaggcagagga

SEQ ID NO: 1578538 - RNA, 19 nt, Human adenovirus E
  misc_feature (10)..(10): n is a, c, g, or u
uaaaucagcnuaccaccac

SEQ ID NO: 1578539 - RNA, 18 nt, Human adenovirus E
cagaccgguaagaaggag

SEQ ID NO: 1578540 - RNA, 21 nt, Human adenovirus E
ggaugaugauauucuggagca

SEQ ID NO: 1578541 - RNA, 17 nt, Human adenovirus E
cggccggcgcgcuccac

SEQ ID NO: 1578542 - RNA, 14 nt, Human adenovirus E
cacagcacaggcau

SEQ ID NO: 1578543 - RNA, 14 nt, Human adenovirus E
aaaauaacagccag

SEQ ID NO: 1578544 - RNA, 15 nt, Human adenovirus E
gcugcagagccagcc

SEQ ID NO: 1578545 - RNA, 14 nt, Human adenovirus E
aagauguugaagug

SEQ ID NO: 1578546 - RNA, 21 nt, Human adenovirus E
agcagguggacugaggaucgc

SEQ ID NO: 1578547 - RNA, 17 nt, Human adenovirus E
cucgacucccaccugcu

SEQ ID NO: 1578548 - RNA, 14 nt, Human adenovirus E
gccacucucucaga

SEQ ID NO: 1578549 - RNA, 14 nt, Human adenovirus E
caauggcaccugcg

SEQ ID NO: 1578550 - RNA, 17 nt, Human adenovirus E
ugcccuucgcccuagcc

SEQ ID NO: 1578551 - RNA, 21 nt, Human adenovirus E
cgggugaaugacauccgcgcc

SEQ ID NO: 1578552 - RNA, 23 nt, Human adenovirus E
cagcugaggauuguccucggugg

SEQ ID NO: 1578553 - RNA, 14 nt, Human adenovirus E
gaacgccugcuggg

SEQ ID NO: 1578554 - RNA, 16 nt, Human adenovirus E
auuagggcaagccaca

SEQ ID NO: 1578555 - RNA, 14 nt, Human adenovirus E
gggccacgagccgg

SEQ ID NO: 1578556 - RNA, 15 nt, Human adenovirus E
uggaacagcaccaca

SEQ ID NO: 1578557 - RNA, 19 nt, Human adenovirus E
agcaucaucugggccuggu

SEQ ID NO: 1578558 - RNA, 17 nt, Human adenovirus E
gcacguggacgagcaga

SEQ ID NO: 1578559 - RNA, 23 nt, Human adenovirus E
acauucuacacuaaaaaaauacu

SEQ ID NO: 1578560 - RNA, 17 nt, Human adenovirus E
cauggcuugcagggucc

SEQ ID NO: 1578561 - RNA, 18 nt, Human adenovirus E
gcuucuucaacgagcagg

SEQ ID NO: 1578562 - RNA, 22 nt, Human adenovirus E
ugccgaaaaagaaaaacagcca

SEQ ID NO: 1578563 - RNA, 17 nt, Human adenovirus E
gaccaccguggugcaga

SEQ ID NO: 1578564 - RNA, 14 nt, Human adenovirus E
cgagcgggagaaga

SEQ ID NO: 1578565 - RNA, 21 nt, Human adenovirus E
uccaagaagaggcagcagcag

SEQ ID NO: 1578566 - RNA, 19 nt, Human adenovirus E
cgcccguaaacgccggugg

SEQ ID NO: 1578567 - RNA, 14 nt, Human adenovirus E
accguggugcagaa

SEQ ID NO: 1578568 - RNA, 17 nt, Human adenovirus E
uaaacuuucgccagcuu

SEQ ID NO: 1578569 - RNA, 21 nt, Human adenovirus E
acugguagguguagagggugc

SEQ ID NO: 1578570 - RNA, 19 nt, Human adenovirus E
cguggaggagcucagccgc

SEQ ID NO: 1578571 - RNA, 15 nt, Human adenovirus E
ccacggccagggcgg

SEQ ID NO: 1578572 - RNA, 21 nt, Human adenovirus E
gacucccucagcaugaugccc

SEQ ID NO: 1578573 - RNA, 15 nt, Human adenovirus E
gcccacggcccucag

SEQ ID NO: 1578574 - RNA, 16 nt, Human adenovirus E
ccuguggggcgugcag

SEQ ID NO: 1578575 - RNA, 22 nt, Human adenovirus E
ccauaguucaacacgcuccagc

SEQ ID NO: 1578576 - RNA, 24 nt, Human adenovirus E
cggcagaacggggugcuggagagc

SEQ ID NO: 1578577 - RNA, 21 nt, Human adenovirus E
cuuucauguuacacaugcauc

SEQ ID NO: 1578578 - RNA, 14 nt, Human adenovirus E
gcagagaaugagca

SEQ ID NO: 1578579 - RNA, 15 nt, Human adenovirus E
caacccuucccaccc

SEQ ID NO: 1578580 - RNA, 17 nt, Human adenovirus E
agcccgagggccgcugg

SEQ ID NO: 1578581 - RNA, 18 nt, Human adenovirus E
gcaaccaacauuggaaau

SEQ ID NO: 1578582 - RNA, 14 nt, Human adenovirus E
uguaaaacagccac

SEQ ID NO: 1578583 - RNA, 15 nt, Human adenovirus E
ccggaugcaggggcg

SEQ ID NO: 1578584 - RNA, 13 nt, Human adenovirus E
gcgccaggccugc

SEQ ID NO: 1578585 - RNA, 18 nt, Human adenovirus E
uaccccuacacaugauca

SEQ ID NO: 1578586 - RNA, 17 nt, Human adenovirus E
agaacggggugcuggag

SEQ ID NO: 1578587 - RNA, 16 nt, Human adenovirus E
ccgccaccugcuccgc

SEQ ID NO: 1578588 - RNA, 16 nt, Human adenovirus E
ugagcaccacagcgcc

SEQ ID NO: 1578589 - RNA, 14 nt, Human adenovirus E
gugaagaugccggg

SEQ ID NO: 1578590 - RNA, 20 nt, Human adenovirus E
gaggaacaacaagcauggag

SEQ ID NO: 1578591 - RNA, 15 nt, Human adenovirus E
augaccaccugggcg

SEQ ID NO: 1578592 - RNA, 21 nt, Human adenovirus E
cuccgagacgaaagcccgggu

SEQ ID NO: 1578593 - RNA, 20 nt, Human adenovirus E
cuauaccucccuugcuguuc

SEQ ID NO: 1578594 - RNA, 14 nt, Human adenovirus E
aggagcugaugcau

SEQ ID NO: 1578595 - RNA, 15 nt, Human adenovirus E
gggugcgcgacgccg

SEQ ID NO: 1578596 - RNA, 19 nt, Human adenovirus E
gcuggcgggcggcgccacc

SEQ ID NO: 1578597 - RNA, 19 nt, Human adenovirus E
gaacucuucgcgguccuuc

SEQ ID NO: 1578598 - RNA, 20 nt, Human adenovirus E
cgggcggcgcugcagagcca

SEQ ID NO: 1578599 - RNA, 16 nt, Human adenovirus E
gagcugcccgaggagc

SEQ ID NO: 1578600 - RNA, 13 nt, Human adenovirus E
aucugccuccucc

SEQ ID NO: 1578601 - RNA, 16 nt, Human adenovirus E
cccgcuacaacagcac

SEQ ID NO: 1578602 - RNA, 15 nt, Human adenovirus E
agcgcucgcgguggg

SEQ ID NO: 1578603 - RNA, 23 nt, Human adenovirus E
auugcuauuuuggaucugacacu

SEQ ID NO: 1578604 - RNA, 19 nt, Human adenovirus E
acgugcagaccaaccugga

SEQ ID NO: 1578605 - RNA, 18 nt, Human adenovirus E
agccuggcgaacaggugg

SEQ ID NO: 1578606 - RNA, 20 nt, Human adenovirus E
aggauagcaagaacaggagc

SEQ ID NO: 1578607 - RNA, 15 nt, Human adenovirus E
cccauacuccaccuc

SEQ ID NO: 1578608 - RNA, 18 nt, Human adenovirus E
uggaggaauggcuguuga

SEQ ID NO: 1578609 - RNA, 20 nt, Human adenovirus E
gcagcagaaaaagaccagca

SEQ ID NO: 1578610 - RNA, 20 nt, Human adenovirus E
aagacgaggaggaggcagag

SEQ ID NO: 1578611 - RNA, 12 nt, Human adenovirus E
cacgaggaggag

SEQ ID NO: 1578612 - RNA, 23 nt, Human adenovirus E
ggugcagacggaucccuggaugc

SEQ ID NO: 1578613 - RNA, 19 nt, Human adenovirus E
gccgcgcucgacaugaccg

SEQ ID NO: 1578614 - RNA, 12 nt, Human adenovirus E
gcgcgugccccc

SEQ ID NO: 1578615 - RNA, 18 nt, Human adenovirus E
gcugacguccugcaggac

SEQ ID NO: 1578616 - RNA, 14 nt, Human adenovirus E
cguguucucccccc

SEQ ID NO: 1578617 - RNA, 14 nt, Human adenovirus E
ggcgcagggcaugg

SEQ ID NO: 1578618 - RNA, 18 nt, Human adenovirus E
cgagggggcgaggagccc

SEQ ID NO: 1578619 - RNA, 18 nt, Human adenovirus E
aggaggcagaggaggagg

SEQ ID NO: 1578620 - RNA, 22 nt, Human adenovirus E
accaggaaauuccccagcccac

SEQ ID NO: 1578621 - RNA, 19 nt, Human adenovirus E
cgaagccuuuagacagcag

SEQ ID NO: 1578622 - RNA, 20 nt, Human adenovirus E
cugccaccaauuggaggaau

SEQ ID NO: 1578623 - RNA, 14 nt, Human adenovirus E
ggaggaugcagcag

SEQ ID NO: 1578624 - RNA, 18 nt, Human adenovirus E
agaucuagggccucagga

SEQ ID NO: 1578625 - RNA, 18 nt, Human adenovirus E
caucaucugggccugguc

SEQ ID NO: 1578626 - RNA, 20 nt, Human adenovirus E
ucugggugaucuuggcccgg

SEQ ID NO: 1578627 - RNA, 15 nt, Human adenovirus E
ugggcguguggcagc

SEQ ID NO: 1578628 - RNA, 19 nt, Human adenovirus E
cuucggaucuucagccagc

SEQ ID NO: 1578629 - RNA, 14 nt, Human adenovirus E
gaaugccgcggugc

SEQ ID NO: 1578630 - RNA, 21 nt, Human adenovirus E
cuugaacucggggaucagcag

SEQ ID NO: 1578631 - RNA, 13 nt, Human adenovirus E
auccuccaccaga

SEQ ID NO: 1578632 - RNA, 17 nt, Human adenovirus E
cuucuacuuccuccuca

SEQ ID NO: 1578633 - RNA, 21 nt, Human adenovirus E
gaggacuacaccaacuucauc

SEQ ID NO: 1578634 - RNA, 14 nt, Human adenovirus E
cagaaaucccgcca

SEQ ID NO: 1578635 - RNA, 21 nt, Human adenovirus E
cucaaccccggcuucccccag

SEQ ID NO: 1578636 - RNA, 20 nt, Human adenovirus E
ucaaugucauuuucauacac

SEQ ID NO: 1578637 - RNA, 23 nt, Human adenovirus E
cccgcaucugcaccucacagcuc

SEQ ID NO: 1578638 - RNA, 16 nt, Human adenovirus E
gaagggcgugcgcucc

SEQ ID NO: 1578639 - RNA, 11 nt, Human adenovirus E
ugauccuccac

SEQ ID NO: 1578640 - RNA, 15 nt, Human adenovirus E
ggaagagcggcgcaa

SEQ ID NO: 1578641 - RNA, 23 nt, Human adenovirus E
cuugccauucgcgcacggccagc

SEQ ID NO: 1578642 - RNA, 18 nt, Human adenovirus E
aagcgcccgaggaagcaa

SEQ ID NO: 1578643 - RNA, 23 nt, Human adenovirus E
gagcgcggucauggaccaggugc

SEQ ID NO: 1578644 - RNA, 17 nt, Human adenovirus E
cgugcgcuccuggacgc

SEQ ID NO: 1578645 - RNA, 17 nt, Human adenovirus E
agccgcugacggcgcag

SEQ ID NO: 1578646 - RNA, 22 nt, Human adenovirus E
uagccccguccucuucccacuc

SEQ ID NO: 1578647 - RNA, 14 nt, Human adenovirus E
ucaucugggccugg

SEQ ID NO: 1578648 - RNA, 13 nt, Human adenovirus E
aaacacgacuuuc

SEQ ID NO: 1578649 - RNA, 22 nt, Human adenovirus E
ugaggacuccgccgacgacagc

SEQ ID NO: 1578650 - RNA, 13 nt, Human adenovirus E
guuguugauuuua

SEQ ID NO: 1578651 - RNA, 17 nt, Human adenovirus E
ggcccggaugcaggggc

SEQ ID NO: 1578652 - RNA, 20 nt, Human adenovirus E
gcguaggagucuugcagcuu

SEQ ID NO: 1578653 - RNA, 20 nt, Human adenovirus E
ccugcguuacgugcagcaga

SEQ ID NO: 1578654 - RNA, 15 nt, Human adenovirus E
ggccgaucccugcuu

SEQ ID NO: 1578655 - RNA, 14 nt, Human adenovirus E
ucugcaaggagaag

SEQ ID NO: 1578656 - RNA, 22 nt, Human adenovirus E
gggcaugaccucggcacucagg

SEQ ID NO: 1578657 - RNA, 22 nt, Human adenovirus E
cugagcauucacaugcucaucg

SEQ ID NO: 1578658 - RNA, 14 nt, Human adenovirus E
cauauccucuccga

SEQ ID NO: 1578659 - RNA, 16 nt, Human adenovirus E
auuauggaacuacagc

SEQ ID NO: 1578660 - RNA, 21 nt, Human adenovirus E
gcgucgcagggggccacgagc

SEQ ID NO: 1578661 - RNA, 16 nt, Human adenovirus E
guagaggugggcuugg

SEQ ID NO: 1578662 - RNA, 14 nt, Human adenovirus E
gagccaaagcaugu

SEQ ID NO: 1578663 - RNA, 12 nt, Human adenovirus E
aacagccagagc

SEQ ID NO: 1578664 - RNA, 16 nt, Human adenovirus E
ggaggagguggaagaa

SEQ ID NO: 1578665 - RNA, 22 nt, Human adenovirus E
cugggacagcacucaggcagag

SEQ ID NO: 1578666 - RNA, 23 nt, Human adenovirus E
ccaggacauggaauacaccaccc

SEQ ID NO: 1578667 - RNA, 19 nt, Human adenovirus E
caccagcaagccgcugacg

SEQ ID NO: 1578668 - RNA, 16 nt, Human adenovirus E
aaacugccgucauuuc

SEQ ID NO: 1578669 - RNA, 14 nt, Human adenovirus E
gcccagcaccagca

SEQ ID NO: 1578670 - RNA, 17 nt, Human adenovirus E
gcuguccaggguccuga

SEQ ID NO: 1578671 - RNA, 17 nt, Human adenovirus E
cuucucccaggccgaga

SEQ ID NO: 1578672 - RNA, 20 nt, Human adenovirus E
cagcaacuuccagccacgac

SEQ ID NO: 1578673 - RNA, 15 nt, Human adenovirus E
ugagcgaccaggagc

SEQ ID NO: 1578674 - RNA, 18 nt, Human adenovirus E
ugcuagaugcaacaacaa

SEQ ID NO: 1578675 - RNA, 13 nt, Human adenovirus E
cggagacccugcg

SEQ ID NO: 1578676 - RNA, 13 nt, Human adenovirus E
gcggccuggaccg

SEQ ID NO: 1578677 - RNA, 14 nt, Human adenovirus E
cagucucuggagcg

SEQ ID NO: 1578678 - RNA, 17 nt, Human adenovirus E
gcccccgaucccuccag

SEQ ID NO: 1578679 - RNA, 15 nt, Human adenovirus E
gccuucaccaccugc

SEQ ID NO: 1578680 - RNA, 16 nt, Human adenovirus E
caagccacaguacaga

SEQ ID NO: 1578681 - RNA, 16 nt, Human adenovirus E
ucaagggucuguggac

SEQ ID NO: 1578682 - RNA, 17 nt, Human adenovirus E
ggcucugaaccugcccc

SEQ ID NO: 1578683 - RNA, 14 nt, Human adenovirus E
ggcgauggagcgca

SEQ ID NO: 1578684 - RNA, 22 nt, Human adenovirus E
acgucagcggcgagggccugcu

SEQ ID NO: 1578685 - RNA, 14 nt, Human adenovirus E
cagccccgccaccu

SEQ ID NO: 1578686 - RNA, 20 nt, Human adenovirus E
aggccguggcccagcgcgag

SEQ ID NO: 1578687 - RNA, 21 nt, Human adenovirus E
ggcgcgacuacauccgcgacu

SEQ ID NO: 1578688 - RNA, 18 nt, Human adenovirus E
agccuuguugcgcagggc

SEQ ID NO: 1578689 - RNA, 17 nt, Human adenovirus E
caagaagaggcagcagc

SEQ ID NO: 1578690 - RNA, 12 nt, Human adenovirus E
auuccccagccc

SEQ ID NO: 1578691 - RNA, 22 nt, Human adenovirus E
gacgcccucgggaucgcgggcg

SEQ ID NO: 1578692 - RNA, 12 nt, Human adenovirus E
cuaacacuuugc

SEQ ID NO: 1578693 - RNA, 17 nt, Human adenovirus E
cugguggacaagaugag

SEQ ID NO: 1578694 - RNA, 17 nt, Human adenovirus E
agcugaaaguggagcug

SEQ ID NO: 1578695 - RNA, 20 nt, Human adenovirus E
agggcguuggagaggagcuu

SEQ ID NO: 1578696 - RNA, 15 nt, Human adenovirus E
aaacugucaaauacu

SEQ ID NO: 1578697 - RNA, 20 nt, Human adenovirus E
  misc_feature (11)..(11): n is a, c, g, or u
aggagccguanagggcguug

SEQ ID NO: 1578698 - RNA, 19 nt, Human adenovirus E
cucuguggaaacaauaaca

SEQ ID NO: 1578699 - RNA, 15 nt, Human adenovirus E
gccagcgccggcagg

SEQ ID NO: 1578700 - RNA, 20 nt, Human adenovirus E
gcucccggcggcgcucugac

SEQ ID NO: 1578701 - RNA, 21 nt, Human adenovirus E
cugaacaguauccgcagcagc

SEQ ID NO: 1578702 - RNA, 20 nt, Human adenovirus E
cuauguuggcacagcacagg

SEQ ID NO: 1578703 - RNA, 19 nt, Human adenovirus E
gucucggugacggcgcgcc

SEQ ID NO: 1578704 - RNA, 15 nt, Human adenovirus E
ucacggugaaggggu

SEQ ID NO: 1578705 - RNA, 17 nt, Human adenovirus E
cuuaccgagcagcagca

SEQ ID NO: 1578706 - RNA, 22 nt, Human adenovirus E
ccacgcggggcgggagcugcgg

SEQ ID NO: 1578707 - RNA, 22 nt, Human adenovirus E
cagggagaugaaacccuccggg

SEQ ID NO: 1578708 - RNA, 14 nt, Human adenovirus E
gcagaacagggcaa

SEQ ID NO: 1578709 - RNA, 20 nt, Human adenovirus E
auauuaacgcgcacaaaaag

SEQ ID NO: 1578710 - RNA, 17 nt, Human adenovirus E
agcgccucggccgcgug

SEQ ID NO: 1578711 - RNA, 13 nt, Human adenovirus E
aggucgaggagaa

SEQ ID NO: 1578712 - RNA, 16 nt, Human adenovirus E
gagaagcuggcggcca

SEQ ID NO: 1578713 - RNA, 15 nt, Human adenovirus E
ucaccgagagccgcc

SEQ ID NO: 1578714 - RNA, 12 nt, Human adenovirus E
acaccuggacca

SEQ ID NO: 1578715 - RNA, 19 nt, Human adenovirus E
auuucaaucccaacaaaug

SEQ ID NO: 1578716 - RNA, 12 nt, Human adenovirus E
ucgggcggccgc

SEQ ID NO: 1578717 - RNA, 14 nt, Human adenovirus E
gcgcgcgcccagca

SEQ ID NO: 1578718 - RNA, 22 nt, Human adenovirus E
gcuaagcgaacggguugggcug

SEQ ID NO: 1578719 - RNA, 15 nt, Human adenovirus E
gucucaaagcuccgc

SEQ ID NO: 1578720 - RNA, 14 nt, Human adenovirus E
ugcgcgccgggcug

SEQ ID NO: 1578721 - RNA, 18 nt, Human adenovirus E
cccgugaggcgcgcgcag

SEQ ID NO: 1578722 - RNA, 13 nt, Human adenovirus E
ggugaugaggucc

SEQ ID NO: 1578723 - RNA, 20 nt, Human adenovirus E
ugccugagcauucacaugcu

SEQ ID NO: 1578724 - RNA, 21 nt, Human adenovirus E
gauacucaccaaggccauggc

SEQ ID NO: 1578725 - RNA, 18 nt, Human adenovirus E
cggccggauuccgcggcu

SEQ ID NO: 1578726 - RNA, 16 nt, Human adenovirus E
guagcaauugaccaug

SEQ ID NO: 1578727 - RNA, 23 nt, Human adenovirus E
gcucaccacuacuaucucuuccu

SEQ ID NO: 1578728 - RNA, 16 nt, Human adenovirus E
ccgaggcccuggccac

SEQ ID NO: 1578729 - RNA, 23 nt, Human adenovirus E
gcacggauaccaucuccgcuccg

SEQ ID NO: 1578730 - RNA, 15 nt, Human adenovirus E
cccggggcuguggac

SEQ ID NO: 1578731 - RNA, 19 nt, Human adenovirus E
ggggaacucuugcaggaca

SEQ ID NO: 1578732 - RNA, 22 nt, Human adenovirus E
agcugccguccucccggaggag

SEQ ID NO: 1578733 - RNA, 13 nt, Human adenovirus E
gggacagaggagg

SEQ ID NO: 1578734 - RNA, 21 nt, Human adenovirus E
gcuccggaauccugcccgcca

SEQ ID NO: 1578735 - RNA, 21 nt, Human adenovirus E
uaacgagcgccccuuguggaa

SEQ ID NO: 1578736 - RNA, 19 nt, Human adenovirus E
ccagccccgccaccuccga

SEQ ID NO: 1578737 - RNA, 21 nt, Human adenovirus E
ugcaggccccggucggggacc

SEQ ID NO: 1578738 - RNA, 14 nt, Human adenovirus E
caggccgugcagcg

SEQ ID NO: 1578739 - RNA, 23 nt, Human adenovirus E
cggaauaucaaaaucucugccgc

SEQ ID NO: 1578740 - RNA, 19 nt, Human adenovirus E
guucuuuuaacagaacauu

SEQ ID NO: 1578741 - RNA, 21 nt, Human adenovirus E
caaguccuggcgggggcacaa

SEQ ID NO: 1578742 - RNA, 13 nt, Human adenovirus E
uggucgcugcccg

SEQ ID NO: 1578743 - RNA, 21 nt, Human adenovirus E
aggguaucgcaaucaggcagc

SEQ ID NO: 1578744 - RNA, 23 nt, Human adenovirus E
gccaacgcuccacgcaacacccc

SEQ ID NO: 1578745 - RNA, 14 nt, Human adenovirus E
ccucaagcccguga

SEQ ID NO: 1578746 - RNA, 18 nt, Human adenovirus E
acccgugcagccacagcg

SEQ ID NO: 1578747 - RNA, 13 nt, Human adenovirus E
cucugacccugcc

SEQ ID NO: 1578748 - RNA, 14 nt, Human adenovirus E
cgccccgcucaggg

SEQ ID NO: 1578749 - RNA, 14 nt, Human adenovirus E
ugcggaugaagcac

SEQ ID NO: 1578750 - RNA, 15 nt, Human adenovirus E
ccauacuccaccucc

SEQ ID NO: 1578751 - RNA, 15 nt, Human adenovirus E
ccggguccaggccag

SEQ ID NO: 1578752 - RNA, 14 nt, Human adenovirus E
aggggacgagcugc

SEQ ID NO: 1578753 - RNA, 21 nt, Human adenovirus E
gccccgccgcccagccccgcc

SEQ ID NO: 1578754 - RNA, 23 nt, Human adenovirus E
gggaagacguggucagcucgucg

SEQ ID NO: 1578755 - RNA, 15 nt, Human adenovirus E
agaguuuggaagagc

SEQ ID NO: 1578756 - RNA, 19 nt, Human adenovirus E
cccagccccgccaccuccg

SEQ ID NO: 1578757 - RNA, 22 nt, Human adenovirus E
ccacagcgacccaugcuccccg

SEQ ID NO: 1578758 - RNA, 16 nt, Human adenovirus E
gccgcggccaaccugg

SEQ ID NO: 1578759 - RNA, 17 nt, Human adenovirus E
gccccggggccaggagg

SEQ ID NO: 1578760 - RNA, 15 nt, Human adenovirus E
cgcagccccccugcu

SEQ ID NO: 1578761 - RNA, 14 nt, Human adenovirus E
cugcccgccaccug

SEQ ID NO: 1578762 - RNA, 16 nt, Human adenovirus E
ccagaguuuggaagag

SEQ ID NO: 1578763 - RNA, 14 nt, Human adenovirus E
ggcgggcggcgcca

SEQ ID NO: 1578764 - RNA, 15 nt, Human adenovirus E
acucaccccggggcu

SEQ ID NO: 1578765 - RNA, 23 nt, Human adenovirus E
cacgguggcuuccagcaaagccu

SEQ ID NO: 1578766 - RNA, 19 nt, Human adenovirus E
aucgagauugaccugggcu

SEQ ID NO: 1578767 - RNA, 16 nt, Human adenovirus E
cucagguguccagcug

SEQ ID NO: 1578768 - RNA, 15 nt, Human adenovirus E
cgagagccgccucag

SEQ ID NO: 1578769 - RNA, 14 nt, Human adenovirus E
gaccaccguccccc

SEQ ID NO: 1578770 - RNA, 21 nt, Human adenovirus E
gcccaggccgaaguccagcug

SEQ ID NO: 1578771 - RNA, 13 nt, Human adenovirus E
augugacacuggu

SEQ ID NO: 1578772 - RNA, 23 nt, Human adenovirus E
cuucacccccacggaggccagca

SEQ ID NO: 1578773 - RNA, 13 nt, Human adenovirus E
agauccucaggua

SEQ ID NO: 1578774 - RNA, 17 nt, Human adenovirus E
ggcggcgcgugcagugg

SEQ ID NO: 1578775 - RNA, 17 nt, Human adenovirus E
ccauacuccaccuccac

SEQ ID NO: 1578776 - RNA, 15 nt, Human adenovirus E
gcaucucccaggcuu

SEQ ID NO: 1578777 - RNA, 13 nt, Human adenovirus E
gccagccgacuuc

SEQ ID NO: 1578778 - RNA, 14 nt, Human adenovirus E
cugguacuuggcca

SEQ ID NO: 1578779 - RNA, 18 nt, Human adenovirus E
aagaugccgggcaggagg

SEQ ID NO: 1578780 - RNA, 23 nt, Human adenovirus E
cggugugcgcgugcccgugcgca

SEQ ID NO: 1578781 - RNA, 14 nt, Human adenovirus E
uacauuaaaucagc

SEQ ID NO: 1578782 - RNA, 18 nt, Human adenovirus E
cagaccggugaggagcuc

SEQ ID NO: 1578783 - RNA, 22 nt, Human adenovirus E
cagcaacuuccugaccaccgug

SEQ ID NO: 1578784 - RNA, 16 nt, Human adenovirus E
cucggacgucaccugc

SEQ ID NO: 1578785 - RNA, 23 nt, Human adenovirus E
ggccagacccagccagaugaugc

SEQ ID NO: 1578786 - RNA, 20 nt, Human adenovirus E
cauguggcgguucaccaccu

SEQ ID NO: 1578787 - RNA, 22 nt, Human adenovirus E
cgcgacuuggcggauggcuggc

SEQ ID NO: 1578788 - RNA, 14 nt, Human adenovirus E
ccccauagccagcc

SEQ ID NO: 1578789 - RNA, 19 nt, Human adenovirus E
augaccaucgaccugauga

SEQ ID NO: 1578790 - RNA, 23 nt, Human adenovirus E
uuuccagggcgcgcgggaggucc

SEQ ID NO: 1578791 - RNA, 14 nt, Human adenovirus E
caccaugcagcuga

SEQ ID NO: 1578792 - RNA, 12 nt, Human adenovirus E
cguugggcaggg

SEQ ID NO: 1578793 - RNA, 22 nt, Human adenovirus E
ggucagaaaagacgaucuuuuu

SEQ ID NO: 1578794 - RNA, 22 nt, Human adenovirus E
cgcaagccgguauacaagccca

SEQ ID NO: 1578795 - RNA, 23 nt, Human adenovirus E
uggcggcggcggcgaugcagccc

SEQ ID NO: 1578796 - RNA, 13 nt, Human adenovirus E
caggaccaccagc

SEQ ID NO: 1578797 - RNA, 21 nt, Human adenovirus E
cgugccccccaagcgccagcc

SEQ ID NO: 1578798 - RNA, 18 nt, Human adenovirus E
caucauguacgccagcaa

SEQ ID NO: 1578799 - RNA, 16 nt, Human adenovirus E
cgguggcuuccagcaa

SEQ ID NO: 1578800 - RNA, 18 nt, Human adenovirus E
agucauucagccggugga

SEQ ID NO: 1578801 - RNA, 22 nt, Human adenovirus E
ccagcugcaccacgcugcgccc

SEQ ID NO: 1578802 - RNA, 19 nt, Human adenovirus E
ugcggaacugguacuuggc

SEQ ID NO: 1578803 - RNA, 16 nt, Human adenovirus E
ggcaccgcagcuugcc

SEQ ID NO: 1578804 - RNA, 17 nt, Human adenovirus E
cgcucguagggacugag

SEQ ID NO: 1578805 - RNA, 19 nt, Human adenovirus E
cggauggcuggcagagccc

SEQ ID NO: 1578806 - RNA, 18 nt, Human adenovirus E
gucaaugccaccucagcu

SEQ ID NO: 1578807 - RNA, 14 nt, Human adenovirus E
ggacugggcggugc

SEQ ID NO: 1578808 - RNA, 21 nt, Human adenovirus E
gcagaggaggaggagauggag

SEQ ID NO: 1578809 - RNA, 14 nt, Human adenovirus E
aggccguggcccag

SEQ ID NO: 1578810 - RNA, 22 nt, Human adenovirus E
uguccaaaaagcgcguccgggu

SEQ ID NO: 1578811 - RNA, 22 nt, Human adenovirus E
gugagccgcgcccugggccagg

SEQ ID NO: 1578812 - RNA, 19 nt, Human adenovirus E
ggagaaccugcacuaccuc

SEQ ID NO: 1578813 - RNA, 22 nt, Human adenovirus E
gacgauccccgggcgucgcagg

SEQ ID NO: 1578814 - RNA, 21 nt, Human adenovirus E
cuaugaggccgagccacagcg

SEQ ID NO: 1578815 - RNA, 18 nt, Human adenovirus E
acuugcuguagcagaacc

SEQ ID NO: 1578816 - RNA, 18 nt, Human adenovirus E
cggugcacccgugcagcc

SEQ ID NO: 1578817 - RNA, 20 nt, Human adenovirus E
gccuuguaggcgcagcagcc

SEQ ID NO: 1578818 - RNA, 18 nt, Human adenovirus E
cgagcgcgagcaaggaca

SEQ ID NO: 1578819 - RNA, 14 nt, Human adenovirus E
cagcaccgccccgc

SEQ ID NO: 1578820 - RNA, 21 nt, Human adenovirus E
ucgcgguggggcggccagcug

SEQ ID NO: 1578821 - RNA, 20 nt, Human adenovirus E
ugcacgagaaccgccugggg

SEQ ID NO: 1578822 - RNA, 19 nt, Human adenovirus E
ccaggccgugcagcggcag

SEQ ID NO: 1578823 - RNA, 15 nt, Human adenovirus E
ccccuucacggacag

SEQ ID NO: 1578824 - RNA, 15 nt, Human adenovirus E
uggaucuuuuccagg

SEQ ID NO: 1578825 - RNA, 12 nt, Human adenovirus E
cgguccuccucg

SEQ ID NO: 1578826 - RNA, 15 nt, Human adenovirus E
agcacacagcucaac

SEQ ID NO: 1578827 - RNA, 16 nt, Human adenovirus E
cacagggccagcaccg

SEQ ID NO: 1578828 - RNA, 23 nt, Human adenovirus E
ugagggcgaaagugucccugacc

SEQ ID NO: 1578829 - RNA, 12 nt, Human adenovirus E
agugccacugcc

SEQ ID NO: 1578830 - RNA, 20 nt, Human adenovirus E
caccgcgaguccaaccuggg

SEQ ID NO: 1578831 - RNA, 13 nt, Human adenovirus E
ccaacgugcagac

SEQ ID NO: 1578832 - RNA, 16 nt, Human adenovirus E
uuaccgagcagcagca

SEQ ID NO: 1578833 - RNA, 12 nt, Human adenovirus E
ucuuccuccucc

SEQ ID NO: 1578834 - RNA, 22 nt, Human adenovirus E
ggcggcagaacggggugcugga

SEQ ID NO: 1578835 - RNA, 22 nt, Human adenovirus E
aaggccauggcgaccagcgugc

SEQ ID NO: 1578836 - RNA, 16 nt, Human adenovirus E
acuaccgucaccucca

SEQ ID NO: 1578837 - RNA, 17 nt, Human adenovirus E
acccuagugagcugcgg

SEQ ID NO: 1578838 - RNA, 21 nt, Human adenovirus E
agcagcagagguugccagcuc

SEQ ID NO: 1578839 - RNA, 18 nt, Human adenovirus E
guccggguggaugaugac

SEQ ID NO: 1578840 - RNA, 18 nt, Human adenovirus E
ccugaucccgaauaccac

SEQ ID NO: 1578841 - RNA, 20 nt, Human adenovirus E
cugcccccgccccagcagca

SEQ ID NO: 1578842 - RNA, 18 nt, Human adenovirus E
cgggggcaggagcaggaa

SEQ ID NO: 1578843 - RNA, 13 nt, Human adenovirus E
cauucuggccugc

SEQ ID NO: 1578844 - RNA, 13 nt, Human adenovirus E
ugaccacaaccac

SEQ ID NO: 1578845 - RNA, 14 nt, Human adenovirus E
cgcugcuggagcgc

SEQ ID NO: 1578846 - RNA, 15 nt, Human adenovirus E
gcguggaggagcuca

SEQ ID NO: 1578847 - RNA, 22 nt, Human adenovirus E
gacccccggucccccacccagu

SEQ ID NO: 1578848 - RNA, 15 nt, Human adenovirus E
agcgacgagcagcug

SEQ ID NO: 1578849 - RNA, 22 nt, Human adenovirus E
accauuaccaccgucagugaaa

SEQ ID NO: 1578850 - RNA, 16 nt, Human adenovirus E
cagcuguuccuggugg

SEQ ID NO: 1578851 - RNA, 15 nt, Human adenovirus E
uggaaacgcagaccg

SEQ ID NO: 1578852 - RNA, 21 nt, Human adenovirus E
ccaacgaggcuuuccaucccg

SEQ ID NO: 1578853 - RNA, 17 nt, Human adenovirus E
gucaagcugcugcucag

SEQ ID NO: 1578854 - RNA, 14 nt, Human adenovirus E
aagcgugggccugu

SEQ ID NO: 1578855 - RNA, 20 nt, Human adenovirus E
ucaaggaugcgcugcucgac

SEQ ID NO: 1578856 - RNA, 19 nt, Human adenovirus E
gacaugcaucccagcugga

SEQ ID NO: 1578857 - RNA, 16 nt, Human adenovirus E
cccggcgcuaccugcu

SEQ ID NO: 1578858 - RNA, 19 nt, Human adenovirus E
cugguugguggcgcacccg

SEQ ID NO: 1578859 - RNA, 17 nt, Human adenovirus E
ugaagcaacugcagccg

SEQ ID NO: 1578860 - RNA, 13 nt, Human adenovirus E
cucuagcaccgcc

SEQ ID NO: 1578861 - RNA, 15 nt, Human adenovirus E
gagcgccagcaggcg

SEQ ID NO: 1578862 - RNA, 18 nt, Human adenovirus E
gcagagcaucguggugca

SEQ ID NO: 1578863 - RNA, 13 nt, Human adenovirus E
cccgugcaggcac

SEQ ID NO: 1578864 - RNA, 19 nt, Human adenovirus E
ggcagugguggcgggggag

SEQ ID NO: 1578865 - RNA, 18 nt, Human adenovirus E
uuuucauuuuuccagccu

SEQ ID NO: 1578866 - RNA, 19 nt, Human adenovirus E
uagacagcagccccaggcc

SEQ ID NO: 1578867 - RNA, 22 nt, Human adenovirus E
cacucaggcagaggaggacagc

SEQ ID NO: 1578868 - RNA, 13 nt, Human adenovirus E
cgacccgcaaccc

SEQ ID NO: 1578869 - RNA, 21 nt, Human adenovirus E
aguacaggagccauaauggcu

SEQ ID NO: 1578870 - RNA, 10 nt, Human adenovirus E
caggcggcag

SEQ ID NO: 1578871 - RNA, 15 nt, Human adenovirus E
ggaucagcaucaucu

SEQ ID NO: 1578872 - RNA, 13 nt, Human adenovirus E
ccgugcagcagau

SEQ ID NO: 1578873 - RNA, 18 nt, Human adenovirus E
cuagcagccgcggccagg

SEQ ID NO: 1578874 - RNA, 16 nt, Human adenovirus E
gaaccugagccaggcu

SEQ ID NO: 1578875 - RNA, 20 nt, Human adenovirus E
  misc_feature (7)..(7): n is a, c, g, or u
gacaucnagauucccacgga

SEQ ID NO: 1578876 - RNA, 14 nt, Human adenovirus E
gcagcagcagcaga

SEQ ID NO: 1578877 - RNA, 23 nt, Human adenovirus E
cacaugcuuggucuugcgggguu

SEQ ID NO: 1578878 - RNA, 18 nt, Human adenovirus E
cagcguggaggagcucag

SEQ ID NO: 1578879 - RNA, 18 nt, Human adenovirus E
ggcggcgcugcagagcca

SEQ ID NO: 1578880 - RNA, 18 nt, Human adenovirus E
ggagaaagcaagcagcac

SEQ ID NO: 1578881 - RNA, 19 nt, Human adenovirus E
gcuugcauuucaaucccaa

SEQ ID NO: 1578882 - RNA, 15 nt, Human adenovirus E
ggccaacuaccuggc

SEQ ID NO: 1578883 - RNA, 12 nt, Human adenovirus E
gucaggcugggc

SEQ ID NO: 1578884 - RNA, 22 nt, Human adenovirus E
gccucgacucccaccugcuucg

SEQ ID NO: 1578885 - RNA, 23 nt, Human adenovirus E
cacagccuugaacaucugaaugc

SEQ ID NO: 1578886 - RNA, 20 nt, Human adenovirus E
cgagcagaaggggggcaggg

SEQ ID NO: 1578887 - RNA, 18 nt, Human adenovirus E
ugcaggagcgcgggcugc

SEQ ID NO: 1578888 - RNA, 20 nt, Human adenovirus E
cgacaauuacuuggcggugg

SEQ ID NO: 1578889 - RNA, 20 nt, Human adenovirus E
ccugaguuccuuugacgagg

SEQ ID NO: 1578890 - RNA, 19 nt, Human adenovirus E
cguaccagauccucaggua

SEQ ID NO: 1578891 - RNA, 19 nt, Human adenovirus E
agcuugcccucggccucgg

SEQ ID NO: 1578892 - RNA, 16 nt, Human adenovirus E
ccgccgccgcuccguc

SEQ ID NO: 1578893 - RNA, 13 nt, Human adenovirus E
uacaccuguuacc

SEQ ID NO: 1578894 - RNA, 18 nt, Human adenovirus E
gccaguccagacuguauu

SEQ ID NO: 1578895 - RNA, 15 nt, Human adenovirus E
gagcuugggggcgag

SEQ ID NO: 1578896 - RNA, 20 nt, Human adenovirus E
ccuucgcccuagccgccucc

SEQ ID NO: 1578897 - RNA, 15 nt, Human adenovirus E
ggaugcaugcggggg

SEQ ID NO: 1578898 - RNA, 22 nt, Human adenovirus E
gcccccgaucccuccagguaca

SEQ ID NO: 1578899 - RNA, 16 nt, Human adenovirus E
caggcgccagcgccgg

SEQ ID NO: 1578900 - RNA, 23 nt, Human adenovirus E
ggacccuacguagaagaggugga

SEQ ID NO: 1578901 - RNA, 20 nt, Human adenovirus E
ugccagcugaguuuucagcc

SEQ ID NO: 1578902 - RNA, 20 nt, Human adenovirus E
uggcggcgauguugagcugc

SEQ ID NO: 1578903 - RNA, 12 nt, Human adenovirus E
gauacgggugau

SEQ ID NO: 1578904 - RNA, 21 nt, Human adenovirus E
agcaaggaggaugcagcagcu

SEQ ID NO: 1578905 - RNA, 13 nt, Human adenovirus E
auugaccugggcu

SEQ ID NO: 1578906 - RNA, 22 nt, Human adenovirus E
gacgucagcggcgagggccugc

SEQ ID NO: 1578907 - RNA, 19 nt, Human adenovirus E
gccuccacgcgcacaucca

SEQ ID NO: 1578908 - RNA, 18 nt, Human adenovirus E
ggcauugucggugugcuu

SEQ ID NO: 1578909 - RNA, 12 nt, Human adenovirus E
gcucacccgcag

SEQ ID NO: 1578910 - RNA, 18 nt, Human adenovirus E
ucaagcccagcaccagca

SEQ ID NO: 1578911 - RNA, 13 nt, Human adenovirus E
ggccaucggccag

SEQ ID NO: 1578912 - RNA, 20 nt, Human adenovirus E
cugcacuggcagcccagccg

SEQ ID NO: 1578913 - RNA, 14 nt, Human adenovirus E
guucgugcccgagg

SEQ ID NO: 1578914 - RNA, 19 nt, Human adenovirus E
gcucugguacugcaggccc

SEQ ID NO: 1578915 - RNA, 22 nt, Human adenovirus E
ccucggacgauuggacccaggc

SEQ ID NO: 1578916 - RNA, 18 nt, Human adenovirus E
gcgggcaugaccucggca

SEQ ID NO: 1578917 - RNA, 16 nt, Human adenovirus E
gacgccaucagcgagu

SEQ ID NO: 1578918 - RNA, 23 nt, Human adenovirus E
cugugggacgauguggacagcag

SEQ ID NO: 1578919 - RNA, 15 nt, Human adenovirus E
cagcaggugcugccg

SEQ ID NO: 1578920 - RNA, 16 nt, Human adenovirus E
gccacaccuggcagac

SEQ ID NO: 1578921 - RNA, 21 nt, Human adenovirus E
ccacgccgggcuaccgcggca

SEQ ID NO: 1578922 - RNA, 20 nt, Human adenovirus E
accagcagaaaaccagcagc

SEQ ID NO: 1578923 - RNA, 22 nt, Human adenovirus E
ccacgagcgccagcuguugggg

SEQ ID NO: 1578924 - RNA, 15 nt, Human adenovirus E
ccagaugggccuggc

SEQ ID NO: 1578925 - RNA, 16 nt, Human adenovirus E
aaggaggaaagaaagc

SEQ ID NO: 1578926 - RNA, 16 nt, Human adenovirus E
acgaggccggccuggu

SEQ ID NO: 1578927 - RNA, 14 nt, Human adenovirus E
cauaggaccaccag

SEQ ID NO: 1578928 - RNA, 18 nt, Human adenovirus E
caaccaccccugccgccc

SEQ ID NO: 1578929 - RNA, 13 nt, Human adenovirus E
gacgcucgcgagg

SEQ ID NO: 1578930 - RNA, 13 nt, Human adenovirus E
ccaucggccaggc

SEQ ID NO: 1578931 - RNA, 14 nt, Human adenovirus E
cuggccaccuacca

SEQ ID NO: 1578932 - RNA, 16 nt, Human adenovirus E
augggacgagaccgga

SEQ ID NO: 1578933 - RNA, 19 nt, Human adenovirus E
acuccuagccccguccucu

SEQ ID NO: 1578934 - RNA, 14 nt, Human adenovirus E
ccaacaaaugccag

SEQ ID NO: 1578935 - RNA, 21 nt, Human adenovirus E
cucugggugaaggccacggga

SEQ ID NO: 1578936 - RNA, 20 nt, Human adenovirus E
ggcgccuacggaggggcgga

SEQ ID NO: 1578937 - RNA, 15 nt, Human adenovirus E
agucgcugccgccgc

SEQ ID NO: 1578938 - RNA, 13 nt, Human adenovirus E
auggcgaccagcg

SEQ ID NO: 1578939 - RNA, 17 nt, Human adenovirus E
caaacugucaaauacuc

SEQ ID NO: 1578940 - RNA, 18 nt, Human adenovirus E
accgccgacgagaagcag

SEQ ID NO: 1578941 - RNA, 17 nt, Human adenovirus E
cugagcgggggggagga

SEQ ID NO: 1578942 - RNA, 15 nt, Human adenovirus E
gcaaucaggcagcac

SEQ ID NO: 1578943 - RNA, 14 nt, Human adenovirus E
gacuaccuccaccu

SEQ ID NO: 1578944 - RNA, 18 nt, Human adenovirus E
ccauccgcggcgacgagg

SEQ ID NO: 1578945 - RNA, 14 nt, Human adenovirus E
cagcagucaggcag

SEQ ID NO: 1578946 - RNA, 14 nt, Human adenovirus E
ucaccuuccgcucc

SEQ ID NO: 1578947 - RNA, 21 nt, Human adenovirus E
cgaucaugugcuccuucugga

SEQ ID NO: 1578948 - RNA, 20 nt, Human adenovirus E
cagcgaguggcgcggcugcu

SEQ ID NO: 1578949 - RNA, 19 nt, Human adenovirus E
ucgaggagaaccugcacua

SEQ ID NO: 1578950 - RNA, 24 nt, Human adenovirus E
gcggugcccgaggcccuggccacc

SEQ ID NO: 1578951 - RNA, 18 nt, Human adenovirus E
gucacggcguacgagcag

SEQ ID NO: 1578952 - RNA, 21 nt, Human adenovirus E
ccuuagcuuugacaguacagg

SEQ ID NO: 1578953 - RNA, 22 nt, Human adenovirus E
  misc_feature (8)..(8): n is a, c, g, or u
acgggganggcguaggccuggg

SEQ ID NO: 1578954 - RNA, 14 nt, Human adenovirus E
gaagguggacccgg

SEQ ID NO: 1578955 - RNA, 17 nt, Human adenovirus E
cugaaaguggagcugcc

SEQ ID NO: 1578956 - RNA, 21 nt, Human adenovirus E
aggcgcucgccaacgcuccac

SEQ ID NO: 1578957 - RNA, 20 nt, Human adenovirus E
ccaccgcgaguccaaccugg

SEQ ID NO: 1578958 - RNA, 19 nt, Human adenovirus E
caaggagaaggaggagagc

SEQ ID NO: 1578959 - RNA, 20 nt, Human adenovirus E
caccgguuggggccugcgcg

SEQ ID NO: 1578960 - RNA, 16 nt, Human adenovirus E
ucagcaaccugcuggg

SEQ ID NO: 1578961 - RNA, 20 nt, Human adenovirus E
ccuggcagacgggcaugggc

SEQ ID NO: 1578962 - RNA, 19 nt, Human adenovirus E
ggccgucuacucgcagcag

SEQ ID NO: 1578963 - RNA, 15 nt, Human adenovirus E
gcacgaagcccugca

SEQ ID NO: 1578964 - RNA, 16 nt, Human adenovirus E
agcagcgagcugggca

SEQ ID NO: 1578965 - RNA, 21 nt, Human adenovirus E
cggcagaugcgcccccaccac

SEQ ID NO: 1578966 - RNA, 15 nt, Human adenovirus E
cagcaguggcagcgg

SEQ ID NO: 1578967 - RNA, 14 nt, Human adenovirus E
cggugcccgaggcc

SEQ ID NO: 1578968 - RNA, 19 nt, Human adenovirus E
accucugccacaccuggca

SEQ ID NO: 1578969 - RNA, 18 nt, Human adenovirus E
cggugucgagccugcuga

SEQ ID NO: 1578970 - RNA, 15 nt, Human adenovirus E
gcaucaucugggccu

SEQ ID NO: 1578971 - RNA, 20 nt, Human adenovirus E
augucucuucgggggcagag

SEQ ID NO: 1578972 - RNA, 21 nt, Human adenovirus E
caggccucucagcgccacuga

SEQ ID NO: 1578973 - RNA, 23 nt, Human adenovirus E
cgaccgccgcggccgccgugagc

SEQ ID NO: 1578974 - RNA, 19 nt, Human adenovirus E
ucuacuucaaccccuucuc

SEQ ID NO: 1578975 - RNA, 21 nt, Human adenovirus E
gggccacgagccggggcagcg

SEQ ID NO: 1578976 - RNA, 20 nt, Human adenovirus E
gccgcugaccuuccgcgagu

SEQ ID NO: 1578977 - RNA, 15 nt, Human adenovirus E
ugcgcgccgagacgg

SEQ ID NO: 1578978 - RNA, 14 nt, Human adenovirus E
ccuagaaugaccac

SEQ ID NO: 1578979 - RNA, 23 nt, Human adenovirus E
agaacuuacauugugcauggaca

SEQ ID NO: 1578980 - RNA, 17 nt, Human adenovirus E
gugucccagcggcgagg

SEQ ID NO: 1578981 - RNA, 23 nt, Human adenovirus E
gagcucgugucuccgcuggguga

SEQ ID NO: 1578982 - RNA, 17 nt, Human adenovirus E
cgccagacgccgcaccu

SEQ ID NO: 1578983 - RNA, 15 nt, Human adenovirus E
agccagagcaggaag

SEQ ID NO: 1578984 - RNA, 21 nt, Human adenovirus E
gcgaaagugucccugaccaug

SEQ ID NO: 1578985 - RNA, 19 nt, Human adenovirus E
ggcggauggcuggcagagc

SEQ ID NO: 1578986 - RNA, 11 nt, Human adenovirus E
gcgcuccugga

SEQ ID NO: 1578987 - RNA, 19 nt, Human adenovirus E
aagauguugaagugggcgu

SEQ ID NO: 1578988 - RNA, 16 nt, Human adenovirus E
cgcauggucucgguga

SEQ ID NO: 1578989 - RNA, 18 nt, Human adenovirus E
ggucgcccgucucucagc

SEQ ID NO: 1578990 - RNA, 21 nt, Human adenovirus E
ggcagggauacaaguccuggc

SEQ ID NO: 1578991 - RNA, 14 nt, Human adenovirus E
gacggcgacuaccu

SEQ ID NO: 1578992 - RNA, 20 nt, Human adenovirus E
gccauuggugauggacaugc

SEQ ID NO: 1578993 - RNA, 22 nt, Human adenovirus E
ugccuucaccaccugcaucugc

SEQ ID NO: 1578994 - RNA, 19 nt, Human adenovirus E
aggaagacugggacagcac

SEQ ID NO: 1578995 - RNA, 14 nt, Human adenovirus E
ggauacggaggcgg

SEQ ID NO: 1578996 - RNA, 18 nt, Human adenovirus E
ccacgguggcuuccagca

SEQ ID NO: 1578997 - RNA, 19 nt, Human adenovirus E
cgugcagaccaaccuggac

SEQ ID NO: 1578998 - RNA, 19 nt, Human adenovirus E
ccucgggggucaaaaccau

SEQ ID NO: 1578999 - RNA, 14 nt, Human adenovirus E
gccacaccacagcu

SEQ ID NO: 1579000 - RNA, 22 nt, Human adenovirus E
auucaaacaccucauuugcaua

SEQ ID NO: 1579001 - RNA, 19 nt, Human adenovirus E
cacuccccucuucccagcu

SEQ ID NO: 1579002 - RNA, 16 nt, Human adenovirus E
gaccgggggucccggc

SEQ ID NO: 1579003 - RNA, 15 nt, Human adenovirus E
cagagcaggaagcag

SEQ ID NO: 1579004 - RNA, 16 nt, Human adenovirus E
ccucugccacaccugg

SEQ ID NO: 1579005 - RNA, 22 nt, Human adenovirus E
ugcaagcggugcguuccagcau

SEQ ID NO: 1579006 - RNA, 16 nt, Human adenovirus E
ucuuccucuucuuggu

SEQ ID NO: 1579007 - RNA, 19 nt, Human adenovirus E
cgagggugcugccgcggcg

SEQ ID NO: 1579008 - RNA, 20 nt, Human adenovirus E
ggagccccgggcccagguug

SEQ ID NO: 1579009 - RNA, 22 nt, Human adenovirus E
cauccgcggcgacgaggccggc

SEQ ID NO: 1579010 - RNA, 15 nt, Human adenovirus E
gaaccccaccaccca

SEQ ID NO: 1579011 - RNA, 22 nt, Human adenovirus E
ccuccucaggcggcaguggugg

SEQ ID NO: 1579012 - RNA, 18 nt, Human adenovirus E
ucgacuccguggccugga

SEQ ID NO: 1579013 - RNA, 20 nt, Human adenovirus E
cggugcgcugguggcggugu

SEQ ID NO: 1579014 - RNA, 20 nt, Human adenovirus E
cgggugcuucacgcucgcca

SEQ ID NO: 1579015 - RNA, 12 nt, Human adenovirus E
cggcggagauga

SEQ ID NO: 1579016 - RNA, 22 nt, Human adenovirus E
gcgggguuucuucuugggcggc

SEQ ID NO: 1579017 - RNA, 16 nt, Human adenovirus E
guacggcgcggccagc

SEQ ID NO: 1579018 - RNA, 18 nt, Human adenovirus E
caucaacgggguggugga

SEQ ID NO: 1579019 - RNA, 11 nt, Human adenovirus E
agagccacacc

SEQ ID NO: 1579020 - RNA, 19 nt, Human adenovirus E
uccacgcggggcgggagcu

SEQ ID NO: 1579021 - RNA, 15 nt, Human adenovirus E
ggauaggagcuccug

SEQ ID NO: 1579022 - RNA, 19 nt, Human adenovirus E
caacgugccccggggccag

SEQ ID NO: 1579023 - RNA, 19 nt, Human adenovirus E
uuaacaucacuagagacua

SEQ ID NO: 1579024 - RNA, 20 nt, Human adenovirus E
gcuguagcauagucugccug

SEQ ID NO: 1579025 - RNA, 22 nt, Human adenovirus E
accuguuaccacuaugcagcuc

SEQ ID NO: 1579026 - RNA, 13 nt, Human adenovirus E
aaaaauacccgcc

SEQ ID NO: 1579027 - RNA, 21 nt, Human adenovirus E
agcagugucuggaggagcaga

SEQ ID NO: 1579028 - RNA, 13 nt, Human adenovirus E
gggcgcagggcau

SEQ ID NO: 1579029 - RNA, 20 nt, Human adenovirus E
ucaccgagagccgccucagc

SEQ ID NO: 1579030 - RNA, 20 nt, Human adenovirus E
acgggaugcacgugcugcac

SEQ ID NO: 1579031 - RNA, 22 nt, Human adenovirus E
  misc_feature (11)..(11): n is a, c, g, or u
aggagccguanagggcguugga

SEQ ID NO: 1579032 - RNA, 16 nt, Human adenovirus E
gcgaugcgggcggcgc

SEQ ID NO: 1579033 - RNA, 18 nt, Human adenovirus E
gugacaaagagcuguccg

SEQ ID NO: 1579034 - RNA, 17 nt, Human adenovirus E
cggcggugcccgaggcc

SEQ ID NO: 1579035 - RNA, 19 nt, Human adenovirus E
ccugagcuccucccucagc

SEQ ID NO: 1579036 - RNA, 15 nt, Human adenovirus E
ccuuggcaguacagu

SEQ ID NO: 1579037 - RNA, 22 nt, Human adenovirus E
  misc_feature (8)..(8): n is a, c, g, or u
gcaucgcnuaccugcgccacca

SEQ ID NO: 1579038 - RNA, 19 nt, Human adenovirus E
ccacgguggcuuccagcaa

SEQ ID NO: 1579039 - RNA, 21 nt, Human adenovirus E
aaucguucucuccagcaccag

SEQ ID NO: 1579040 - RNA, 20 nt, Human adenovirus E
ucaggucggucuccacgcgg

SEQ ID NO: 1579041 - RNA, 23 nt, Human adenovirus E
gcccugggcauagucgcgccgcg

SEQ ID NO: 1579042 - RNA, 15 nt, Human adenovirus E
auuaccacacagaca

SEQ ID NO: 1579043 - RNA, 20 nt, Human adenovirus E
accgcggucauaccagcagc

SEQ ID NO: 1579044 - RNA, 21 nt, Human adenovirus E
ugaacaguauccgcagcagcg

SEQ ID NO: 1579045 - RNA, 15 nt, Human adenovirus E
acauccagaaacaag

SEQ ID NO: 1579046 - RNA, 19 nt, Human adenovirus E
cacgugcgcacccugaucg

SEQ ID NO: 1579047 - RNA, 17 nt, Human adenovirus E
cuuggaagagggcgagg

SEQ ID NO: 1579048 - RNA, 19 nt, Human adenovirus E
gagcuggagugccugcgcc

SEQ ID NO: 1579049 - RNA, 15 nt, Human adenovirus E
ucgcgguccuuccag

SEQ ID NO: 1579050 - RNA, 16 nt, Human adenovirus E
caccacuacagcagca

SEQ ID NO: 1579051 - RNA, 14 nt, Human adenovirus E
cauuuuugccaugc

SEQ ID NO: 1579052 - RNA, 19 nt, Human adenovirus E
gguccucggcguuggccau

SEQ ID NO: 1579053 - RNA, 15 nt, Human adenovirus E
acgucaccugcggcg

SEQ ID NO: 1579054 - RNA, 15 nt, Human adenovirus E
acucgcagcagcugc

SEQ ID NO: 1579055 - RNA, 14 nt, Human adenovirus E
ccaacguggagcug

SEQ ID NO: 1579056 - RNA, 22 nt, Human adenovirus E
gaucgcggcgaacgagccggcg

SEQ ID NO: 1579057 - RNA, 18 nt, Human adenovirus E
acucucaacuccucgggg

SEQ ID NO: 1579058 - RNA, 14 nt, Human adenovirus E
agcgccagcaggcg

SEQ ID NO: 1579059 - RNA, 19 nt, Human adenovirus E
ggcuucaggcgccagcgcc

SEQ ID NO: 1579060 - RNA, 15 nt, Human adenovirus E
ugguggccaccucgc

SEQ ID NO: 1579061 - RNA, 14 nt, Human adenovirus E
agcaccacagcgcc

SEQ ID NO: 1579062 - RNA, 19 nt, Human adenovirus E
gcuguugaugugauggaag

SEQ ID NO: 1579063 - RNA, 15 nt, Human adenovirus E
gcccccgccccagca

SEQ ID NO: 1579064 - RNA, 19 nt, Human adenovirus E
cuccgcuugccguccuucu

SEQ ID NO: 1579065 - RNA, 17 nt, Human adenovirus E
uaaccuguccacccgcu

SEQ ID NO: 1579066 - RNA, 18 nt, Human adenovirus E
acucagccaucgccaacc

SEQ ID NO: 1579067 - RNA, 15 nt, Human adenovirus E
agucuggaggaagac

SEQ ID NO: 1579068 - RNA, 18 nt, Human adenovirus E
agcgacgaucugggggug

SEQ ID NO: 1579069 - RNA, 21 nt, Human adenovirus E
agguggacccggacgugcagc

SEQ ID NO: 1579070 - RNA, 21 nt, Human adenovirus E
cagcgacgagacucgggccgc

SEQ ID NO: 1579071 - RNA, 18 nt, Human adenovirus E
gcauguucauuuuugcuu

SEQ ID NO: 1579072 - RNA, 12 nt, Human adenovirus E
gggucuccugga

SEQ ID NO: 1579073 - RNA, 15 nt, Human adenovirus E
cuggcgccuacggag

SEQ ID NO: 1579074 - RNA, 19 nt, Human adenovirus E
gggcucucgccgccgcgac

SEQ ID NO: 1579075 - RNA, 13 nt, Human adenovirus E
cuugcauuucaau

SEQ ID NO: 1579076 - RNA, 19 nt, Human adenovirus E
cggagauggcaccucucgc

SEQ ID NO: 1579077 - RNA, 17 nt, Human adenovirus E
gccgcugcaaccacccc

SEQ ID NO: 1579078 - RNA, 13 nt, Human adenovirus E
cgaucccuccagg

SEQ ID NO: 1579079 - RNA, 21 nt, Human adenovirus E
aguggcauuuuugaugugggc

SEQ ID NO: 1579080 - RNA, 19 nt, Human adenovirus E
gcaucuggcccggcaggcc

SEQ ID NO: 1579081 - RNA, 15 nt, Human adenovirus E
gaacuugcagggccu

SEQ ID NO: 1579082 - RNA, 13 nt, Human adenovirus E
gcuugcaggccug

SEQ ID NO: 1579083 - RNA, 23 nt, Human adenovirus E
cggggaucagcaguuugggcagc

SEQ ID NO: 1579084 - RNA, 16 nt, Human adenovirus E
ugccgccgccgcuccg

SEQ ID NO: 1579085 - RNA, 15 nt, Human adenovirus E
cggcgggcgcagcag

SEQ ID NO: 1579086 - RNA, 14 nt, Human adenovirus E
caucuggcccggca

SEQ ID NO: 1579087 - RNA, 12 nt, Human adenovirus E
uaccaaugagca

SEQ ID NO: 1579088 - RNA, 18 nt, Human adenovirus E
  misc_feature (4)..(4): n is a, c, g, or u
ggcnugggcgugcagacc

SEQ ID NO: 1579089 - RNA, 16 nt, Human adenovirus E
ggccaacuaccuggcc

SEQ ID NO: 1579090 - RNA, 16 nt, Human adenovirus E
gcaggaccaccagcac

SEQ ID NO: 1579091 - RNA, 14 nt, Human adenovirus E
gggugacgcaguag

SEQ ID NO: 1579092 - RNA, 13 nt, Human adenovirus E
cuugagcuguccc

SEQ ID NO: 1579093 - RNA, 18 nt, Human adenovirus E
  misc_feature (9)..(9): n is a, c, g, or u
cuccagcunuuccaaccc

SEQ ID NO: 1579094 - RNA, 15 nt, Human adenovirus E
cucggucuccucaca

SEQ ID NO: 1579095 - RNA, 16 nt, Human adenovirus E
gagcucgacgagccgg

SEQ ID NO: 1579096 - RNA, 18 nt, Human adenovirus E
caccaagaacagccagag

SEQ ID NO: 1579097 - RNA, 15 nt, Human adenovirus E
ugcgcagggccaggc

SEQ ID NO: 1579098 - RNA, 14 nt, Human adenovirus E
cagguggcagaugc

SEQ ID NO: 1579099 - RNA, 17 nt, Human adenovirus E
ggccugcacccucaucu

SEQ ID NO: 1579100 - RNA, 15 nt, Human adenovirus E
cggaggccagcaccc

SEQ ID NO: 1579101 - RNA, 21 nt, Human adenovirus E
uuuccuccacccucccaggac

SEQ ID NO: 1579102 - RNA, 18 nt, Human adenovirus E
guugucgagcuugguggc

SEQ ID NO: 1579103 - RNA, 13 nt, Human adenovirus E
gaugaagugggcg

SEQ ID NO: 1579104 - RNA, 22 nt, Human adenovirus E
ugcaggacagcgaaccccgcag

SEQ ID NO: 1579105 - RNA, 16 nt, Human adenovirus E
gcagccccccugcucc

SEQ ID NO: 1579106 - RNA, 21 nt, Human adenovirus E
cagcacucucaacuccucggg

SEQ ID NO: 1579107 - RNA, 20 nt, Human adenovirus E
ccaugguggcgcagcugacc

SEQ ID NO: 1579108 - RNA, 22 nt, Human adenovirus E
ggcaggacccggagacgcgcgg

SEQ ID NO: 1579109 - RNA, 16 nt, Human adenovirus E
cagaccagucgccagg

SEQ ID NO: 1579110 - RNA, 13 nt, Human adenovirus E
guccaggccagca

SEQ ID NO: 1579111 - RNA, 18 nt, Human adenovirus E
caggccccggucggggac

SEQ ID NO: 1579112 - RNA, 15 nt, Human adenovirus E
guggucggccuggcc

SEQ ID NO: 1579113 - RNA, 15 nt, Human adenovirus E
cucccgccugaaccu

SEQ ID NO: 1579114 - RNA, 20 nt, Human adenovirus E
gcggaccugcacuggcagcc

SEQ ID NO: 1579115 - RNA, 15 nt, Human adenovirus E
augugauggaaguag

SEQ ID NO: 1579116 - RNA, 19 nt, Human adenovirus E
cgagcagaaggggggcagg

SEQ ID NO: 1579117 - RNA, 16 nt, Human adenovirus E
gcauagucugccugcu

SEQ ID NO: 1579118 - RNA, 15 nt, Human adenovirus E
accaucuccgcuccg

SEQ ID NO: 1579119 - RNA, 23 nt, Human adenovirus E
agcccggggaccccgagugguac

SEQ ID NO: 1579120 - RNA, 15 nt, Human adenovirus E
gauccuccaccagag

SEQ ID NO: 1579121 - RNA, 17 nt, Human adenovirus E
accacagggccagcacc

SEQ ID NO: 1579122 - RNA, 17 nt, Human adenovirus E
uuguugcgcagggccag

SEQ ID NO: 1579123 - RNA, 18 nt, Human adenovirus E
acagucuggaggaagacg

SEQ ID NO: 1579124 - RNA, 17 nt, Human adenovirus E
cgcaggcgggacagagg

SEQ ID NO: 1579125 - RNA, 13 nt, Human adenovirus E
caggaugagcuga

SEQ ID NO: 1579126 - RNA, 17 nt, Human adenovirus E
agauggcgagggggagc

SEQ ID NO: 1579127 - RNA, 13 nt, Human adenovirus E
gcaagagauggag

SEQ ID NO: 1579128 - RNA, 15 nt, Human adenovirus E
cagcuggcgggcggc

SEQ ID NO: 1579129 - RNA, 18 nt, Human adenovirus E
gcccccgcuggaggcucc

SEQ ID NO: 1579130 - RNA, 23 nt, Human adenovirus E
auggaggugcagacggaucccug

SEQ ID NO: 1579131 - RNA, 15 nt, Human adenovirus E
ccaagcgccagccca

SEQ ID NO: 1579132 - RNA, 21 nt, Human adenovirus E
  misc_feature (9)..(9): n is a, c, g, or u
cagcagccnuucuccacgggg

SEQ ID NO: 1579133 - RNA, 23 nt, Human adenovirus E
cuggccgaccccgucaccaccaa

SEQ ID NO: 1579134 - RNA, 17 nt, Human adenovirus E
cuuucauauccucuccg

SEQ ID NO: 1579135 - RNA, 15 nt, Human adenovirus E
cgcccugggccagga

SEQ ID NO: 1579136 - RNA, 12 nt, Human adenovirus E
cgcagcagcgca

SEQ ID NO: 1579137 - RNA, 22 nt, Human adenovirus E
aguagucgagggucuccuggau

SEQ ID NO: 1579138 - RNA, 15 nt, Human adenovirus E
uccgggucucggcau

SEQ ID NO: 1579139 - RNA, 12 nt, Human adenovirus E
gauccagcggcg

SEQ ID NO: 1579140 - RNA, 19 nt, Human adenovirus E
cugagacccggcaccaccg

SEQ ID NO: 1579141 - RNA, 17 nt, Human adenovirus E
cugcucgggcaucagcu

SEQ ID NO: 1579142 - RNA, 18 nt, Human adenovirus E
cgcggucauaccagcagc

SEQ ID NO: 1579143 - RNA, 12 nt, Human adenovirus E
gcucaacagcug

SEQ ID NO: 1579144 - RNA, 14 nt, Human adenovirus E
ggccgcggccaacc

SEQ ID NO: 1579145 - RNA, 20 nt, Human adenovirus E
ugaacucggggaucagcagu

SEQ ID NO: 1579146 - RNA, 14 nt, Human adenovirus E
ccucccggaggagg

SEQ ID NO: 1579147 - RNA, 20 nt, Human adenovirus E
gaccuuccgcgagugccccc

SEQ ID NO: 1579148 - RNA, 14 nt, Human adenovirus E
cggauggcuggcag

SEQ ID NO: 1579149 - RNA, 16 nt, Human adenovirus E
ggugacccugggccug

SEQ ID NO: 1579150 - RNA, 15 nt, Human adenovirus E
agacgaugggcaggc

SEQ ID NO: 1579151 - RNA, 22 nt, Human adenovirus E
caggacccggagacgcgcggcc

SEQ ID NO: 1579152 - RNA, 16 nt, Human adenovirus E
agguguccagcuggcg

SEQ ID NO: 1579153 - RNA, 15 nt, Human adenovirus E
cuguggaccucggcc

SEQ ID NO: 1579154 - RNA, 20 nt, Human adenovirus E
gcaggcaccgcagcuugccc

SEQ ID NO: 1579155 - RNA, 14 nt, Human adenovirus E
ggaccaccagcacg

SEQ ID NO: 1579156 - RNA, 13 nt, Human adenovirus E
accaccggcggcg

SEQ ID NO: 1579157 - RNA, 16 nt, Human adenovirus E
gcucgcaacgcugcac

SEQ ID NO: 1579158 - RNA, 16 nt, Human adenovirus E
caggggcgcagggcau

SEQ ID NO: 1579159 - RNA, 20 nt, Human adenovirus E
guggaggauuuggaggaaga

SEQ ID NO: 1579160 - RNA, 21 nt, Human adenovirus E
ccaucgugcagaaccccacca

SEQ ID NO: 1579161 - RNA, 18 nt, Human adenovirus E
ucgcaucaggccccgcag

SEQ ID NO: 1579162 - RNA, 15 nt, Human adenovirus E
ucaagcaucuggccc

SEQ ID NO: 1579163 - RNA, 17 nt, Human adenovirus E
ugacggguuccuguggg

SEQ ID NO: 1579164 - RNA, 14 nt, Human adenovirus E
gcaacgcugcacgg

SEQ ID NO: 1579165 - RNA, 13 nt, Human adenovirus E
uuccggagcagcu

SEQ ID NO: 1579166 - RNA, 12 nt, Human adenovirus E
gcacggccagcg

SEQ ID NO: 1579167 - RNA, 12 nt, Human adenovirus E
uucccccaggau

SEQ ID NO: 1579168 - RNA, 13 nt, Human adenovirus E
ucacccugcucau

SEQ ID NO: 1579169 - RNA, 22 nt, Human adenovirus E
cagccagagcaggaagcagaga

SEQ ID NO: 1579170 - RNA, 12 nt, Human adenovirus E
caccacccagac

SEQ ID NO: 1579171 - RNA, 21 nt, Human adenovirus E
aauuccgucgaccguuaaaaa

SEQ ID NO: 1579172 - RNA, 21 nt, Human adenovirus E
cauguccaccugcggggcgau

SEQ ID NO: 1579173 - RNA, 14 nt, Human adenovirus E
gaggagagcaugag

SEQ ID NO: 1579174 - RNA, 15 nt, Human adenovirus E
caccucacagcucaa

SEQ ID NO: 1579175 - RNA, 14 nt, Human adenovirus E
gcggcuggggcgac

SEQ ID NO: 1579176 - RNA, 20 nt, Human adenovirus E
gugcccccgcgguaccuggc

SEQ ID NO: 1579177 - RNA, 13 nt, Human adenovirus E
ucaaugccaccuc

SEQ ID NO: 1579178 - RNA, 14 nt, Human adenovirus E
accacuacagcagc

SEQ ID NO: 1579179 - RNA, 19 nt, Human adenovirus E
gcacucucaacuccucggg

SEQ ID NO: 1579180 - RNA, 14 nt, Human adenovirus E
ucgcugccgccgcc

SEQ ID NO: 1579181 - RNA, 15 nt, Human adenovirus E
ggcgauccuggccca

SEQ ID NO: 1579182 - RNA, 14 nt, Human adenovirus E
gcggggcgggagcu

SEQ ID NO: 1579183 - RNA, 18 nt, Human adenovirus E
cgagcgcuccggcaccgc

SEQ ID NO: 1579184 - RNA, 22 nt, Human adenovirus E
gucuggaggaagacgaggagga

SEQ ID NO: 1579185 - RNA, 16 nt, Human adenovirus E
gggccacgagccgggg

SEQ ID NO: 1579186 - RNA, 13 nt, Human adenovirus E
caaguccagcaaa

SEQ ID NO: 1579187 - RNA, 15 nt, Human adenovirus E
guaggugggguagca

SEQ ID NO: 1579188 - RNA, 12 nt, Human adenovirus E
uggcuggcagag

SEQ ID NO: 1579189 - RNA, 21 nt, Human adenovirus E
ucgaggacgucagcggcgagg

SEQ ID NO: 1579190 - RNA, 19 nt, Human adenovirus E
uccugcggaaccacagggc

SEQ ID NO: 1579191 - RNA, 20 nt, Human adenovirus E
ccaacuucaucagcgcccug

SEQ ID NO: 1579192 - RNA, 20 nt, Human adenovirus E
caccaaggccgccgccccuc

SEQ ID NO: 1579193 - RNA, 12 nt, Human adenovirus E
cccagcaccagc

SEQ ID NO: 1579194 - RNA, 14 nt, Human adenovirus E
cgggcuaccgcggc

SEQ ID NO: 1579195 - RNA, 16 nt, Human adenovirus E
gccgcgcccugggcca

SEQ ID NO: 1579196 - RNA, 20 nt, Human adenovirus E
ccagggacucccucagcaug

SEQ ID NO: 1579197 - RNA, 17 nt, Human adenovirus E
agggcgaguaccuggaa

SEQ ID NO: 1579198 - RNA, 19 nt, Human adenovirus E
gcugacggggaucagcccc

SEQ ID NO: 1579199 - RNA, 14 nt, Human adenovirus E
augcacgugcugca

SEQ ID NO: 1579200 - RNA, 20 nt, Human adenovirus E
caaggacagacccuucugac

SEQ ID NO: 1579201 - RNA, 14 nt, Human adenovirus E
gccggcgcuucugc

SEQ ID NO: 1579202 - RNA, 14 nt, Human adenovirus E
guaccucaccuggc

SEQ ID NO: 1579203 - RNA, 21 nt, Human adenovirus E
augucauacuugagcuguccc

SEQ ID NO: 1579204 - RNA, 15 nt, Human adenovirus E
ccgccgcccagcccc

SEQ ID NO: 1579205 - RNA, 22 nt, Human adenovirus E
gcuuuaccgacaaaaaucagac

SEQ ID NO: 1579206 - RNA, 20 nt, Human adenovirus E
ccagcaugucccgcccgcgg

SEQ ID NO: 1579207 - RNA, 13 nt, Human adenovirus E
ggcuggcagagcc

SEQ ID NO: 1579208 - RNA, 18 nt, Human adenovirus E
cgugaacgcgcuggugga

SEQ ID NO: 1579209 - RNA, 14 nt, Human adenovirus E
gcaagccacaguac

SEQ ID NO: 1579210 - RNA, 22 nt, Human adenovirus E
uccacgguggcuuccagcaaag

SEQ ID NO: 1579211 - RNA, 14 nt, Human adenovirus E
cgcucgccacaucc

SEQ ID NO: 1579212 - RNA, 15 nt, Human adenovirus E
ggcgagguugagcuc

SEQ ID NO: 1579213 - RNA, 16 nt, Human adenovirus E
gaccaggagcugaugc

SEQ ID NO: 1579214 - RNA, 13 nt, Human adenovirus E
cgccaggccugca

SEQ ID NO: 1579215 - RNA, 15 nt, Human adenovirus E
ccacagaaguuucau

SEQ ID NO: 1579216 - RNA, 22 nt, Human adenovirus E
acgcacgagaagguccuggcca

SEQ ID NO: 1579217 - RNA, 19 nt, Human adenovirus E
uugagcugcccgaggagca

SEQ ID NO: 1579218 - RNA, 14 nt, Human adenovirus E
cccgaauaccacag

SEQ ID NO: 1579219 - RNA, 19 nt, Human adenovirus E
gaccgcggcgccgcgccgg

SEQ ID NO: 1579220 - RNA, 16 nt, Human adenovirus E
agaaagcaagcagcac

SEQ ID NO: 1579221 - RNA, 19 nt, Human adenovirus E
gugcugccgcggcggugcc

SEQ ID NO: 1579222 - RNA, 18 nt, Human adenovirus E
cgccuccuuggaagaggu

SEQ ID NO: 1579223 - RNA, 16 nt, Human adenovirus E
acagccacucucucag

SEQ ID NO: 1579224 - RNA, 19 nt, Human adenovirus E
aagccuuuagacagcagcc

SEQ ID NO: 1579225 - RNA, 15 nt, Human adenovirus E
ugcaucuuggccugg

SEQ ID NO: 1579226 - RNA, 23 nt, Human adenovirus E
cuguccgagaagcuggcggccau

SEQ ID NO: 1579227 - RNA, 16 nt, Human adenovirus E
accguggugcagaaca

SEQ ID NO: 1579228 - RNA, 11 nt, Human adenovirus E
ccccgccgccc

SEQ ID NO: 1579229 - RNA, 20 nt, Human adenovirus E
ggagagacagcugccguccu

SEQ ID NO: 1579230 - RNA, 16 nt, Human adenovirus E
ccuacuuugagcugcc

SEQ ID NO: 1579231 - RNA, 15 nt, Human adenovirus E
agaugcaauugaaag

SEQ ID NO: 1579232 - RNA, 15 nt, Human adenovirus E
guaugcgcaggagca

SEQ ID NO: 1579233 - RNA, 22 nt, Human adenovirus E
caaggugcggcccaucaagcag

SEQ ID NO: 1579234 - RNA, 14 nt, Human adenovirus E
agcuggccuuggaa

SEQ ID NO: 1579235 - RNA, 15 nt, Human adenovirus E
ccacauuacacagac

SEQ ID NO: 1579236 - RNA, 21 nt, Human adenovirus E
gccucggugcacccgugcagc

SEQ ID NO: 1579237 - RNA, 15 nt, Human adenovirus E
ccgcaccgccgcugc

SEQ ID NO: 1579238 - RNA, 16 nt, Human adenovirus E
uccaccuuuuccaggg

SEQ ID NO: 1579239 - RNA, 22 nt, Human adenovirus E
gagaaccgccuggggcagaacg

SEQ ID NO: 1579240 - RNA, 21 nt, Human adenovirus E
uccgaggacgagggcaugcaa

SEQ ID NO: 1579241 - RNA, 13 nt, Human adenovirus E
cagacccacugcu

SEQ ID NO: 1579242 - RNA, 21 nt, Human adenovirus E
agucuaaaaauacccgccaaa

SEQ ID NO: 1579243 - RNA, 17 nt, Human adenovirus E
ccuuagcuuugacagua

SEQ ID NO: 1579244 - RNA, 14 nt, Human adenovirus E
gcuccucccucagc

SEQ ID NO: 1579245 - RNA, 17 nt, Human adenovirus E
cuucucgcgcuucugcu

SEQ ID NO: 1579246 - RNA, 13 nt, Human adenovirus E
ggagauggaggaa

SEQ ID NO: 1579247 - RNA, 13 nt, Human adenovirus E
gcagucccacugc

SEQ ID NO: 1579248 - RNA, 13 nt, Human adenovirus E
aggagauggagga

SEQ ID NO: 1579249 - RNA, 23 nt, Human adenovirus E
ggagcacgaggaggagcuggcag

SEQ ID NO: 1579250 - RNA, 17 nt, Human adenovirus E
ucaccgagagccgccuc

SEQ ID NO: 1579251 - RNA, 20 nt, Human adenovirus E
gcaugaauuggcucagcgcc

SEQ ID NO: 1579252 - RNA, 11 nt, Human adenovirus E
ccaggugcuca

SEQ ID NO: 1579253 - RNA, 16 nt, Human adenovirus E
ccccaggaugccccga

SEQ ID NO: 1579254 - RNA, 18 nt, Human adenovirus E
ucccuggccugcaacccc

SEQ ID NO: 1579255 - RNA, 23 nt, Human adenovirus E
cccgccaacgugccccggggcca

SEQ ID NO: 1579256 - RNA, 15 nt, Human adenovirus E
gaacagccagagcag

SEQ ID NO: 1579257 - RNA, 20 nt, Human adenovirus E
gagccacaccacagcuaccu

SEQ ID NO: 1579258 - RNA, 13 nt, Human adenovirus E
acuuggcgguggg

SEQ ID NO: 1579259 - RNA, 19 nt, Human adenovirus E
ccagcugcaccacgcugcg

SEQ ID NO: 1579260 - RNA, 14 nt, Human adenovirus E
ggaggggcggaaca

SEQ ID NO: 1579261 - RNA, 21 nt, Human adenovirus E
ggggccacgagccggggcagc

SEQ ID NO: 1579262 - RNA, 19 nt, Human adenovirus E
agccuuuagacagcagccc

SEQ ID NO: 1579263 - RNA, 21 nt, Human adenovirus E
acgugcccauagacaaggagg

SEQ ID NO: 1579264 - RNA, 19 nt, Human adenovirus E
acuacaaugcucagucuca

SEQ ID NO: 1579265 - RNA, 20 nt, Human adenovirus E
  misc_feature (10)..(10): n is a, c, g, or u
cagcacgaangaggccacgu

SEQ ID NO: 1579266 - RNA, 15 nt, Human adenovirus E
gcgugcaggccccgg

SEQ ID NO: 1579267 - RNA, 20 nt, Human adenovirus E
cagagauccacggccagggc

SEQ ID NO: 1579268 - RNA, 18 nt, Human adenovirus E
ucccgccccaguacgcgc

SEQ ID NO: 1579269 - RNA, 17 nt, Human adenovirus E
cgcgguggggcggccag

SEQ ID NO: 1579270 - RNA, 20 nt, Human adenovirus E
accgcagcagaggaggcagc

SEQ ID NO: 1579271 - RNA, 22 nt, Human adenovirus E
agcggcucgacuccguggccug

SEQ ID NO: 1579272 - RNA, 17 nt, Human adenovirus E
gugcgcuucaggcucau

SEQ ID NO: 1579273 - RNA, 18 nt, Human adenovirus E
cucguccacauccaggaa

SEQ ID NO: 1579274 - RNA, 20 nt, Human adenovirus E
cgugcucuuugccuucacca

SEQ ID NO: 1579275 - RNA, 17 nt, Human adenovirus E
cuucgcggugcccgagg

SEQ ID NO: 1579276 - RNA, 20 nt, Human adenovirus E
acugggcuuuucggcgcggu

SEQ ID NO: 1579277 - RNA, 22 nt, Human adenovirus E
gggccuuggaggcggcggcagg

SEQ ID NO: 1579278 - RNA, 17 nt, Human adenovirus E
acauccgcgacugcguc

SEQ ID NO: 1579279 - RNA, 20 nt, Human adenovirus E
cucgugcgagggggcgagga

SEQ ID NO: 1579280 - RNA, 16 nt, Human adenovirus E
ggggcgauccuggccc

SEQ ID NO: 1579281 - RNA, 17 nt, Human adenovirus E
gcggcgcgagcugagcg

SEQ ID NO: 1579282 - RNA, 14 nt, Human adenovirus E
aggugaggaagagc

SEQ ID NO: 1579283 - RNA, 16 nt, Human adenovirus E
cugcugcgccuggcca

SEQ ID NO: 1579284 - RNA, 19 nt, Human adenovirus E
ggaucagcaguuugggcag

SEQ ID NO: 1579285 - RNA, 17 nt, Human adenovirus E
ggccgaaguccagcuga

SEQ ID NO: 1579286 - RNA, 17 nt, Human adenovirus E
cagcccccgcuggaggc

SEQ ID NO: 1579287 - RNA, 14 nt, Human adenovirus E
uguuggccagcugc

SEQ ID NO: 1579288 - RNA, 14 nt, Human adenovirus E
ucguaggugagcuc

SEQ ID NO: 1579289 - RNA, 22 nt, Human adenovirus E
caggagcgcgggcugccgcugu

SEQ ID NO: 1579290 - RNA, 12 nt, Human adenovirus E
caccucacagcu

SEQ ID NO: 1579291 - RNA, 18 nt, Human adenovirus E
uggaccacugccgccgcu

SEQ ID NO: 1579292 - RNA, 17 nt, Human adenovirus E
cggaaccacagggccag

SEQ ID NO: 1579293 - RNA, 18 nt, Human adenovirus E
cagcggggugucggggaa

SEQ ID NO: 1579294 - RNA, 15 nt, Human adenovirus E
accccguacgugccc

SEQ ID NO: 1579295 - RNA, 22 nt, Human adenovirus E
gaaccugacacaccaccacagc

SEQ ID NO: 1579296 - RNA, 16 nt, Human adenovirus E
gccuuggcaguacagu

SEQ ID NO: 1579297 - RNA, 21 nt, Human adenovirus E
caugauggccgugguccuggu

SEQ ID NO: 1579298 - RNA, 12 nt, Human adenovirus E
cggaugaagugg

SEQ ID NO: 1579299 - RNA, 19 nt, Human adenovirus E
agggcgagaucgagggcga

SEQ ID NO: 1579300 - RNA, 19 nt, Human adenovirus E
agcuagaaaauccacagcg

SEQ ID NO: 1579301 - RNA, 19 nt, Human adenovirus E
gagggugcugagggacgag

SEQ ID NO: 1579302 - RNA, 20 nt, Human adenovirus E
cuggggguguugucccugcg

SEQ ID NO: 1579303 - RNA, 17 nt, Human adenovirus E
uggcuccuggaccuggu

SEQ ID NO: 1579304 - RNA, 12 nt, Human adenovirus E
uggaccucggcc

SEQ ID NO: 1579305 - RNA, 16 nt, Human adenovirus E
ugaaaacaccaccugg

SEQ ID NO: 1579306 - RNA, 15 nt, Human adenovirus E
cuuacggcaagcgca

SEQ ID NO: 1579307 - RNA, 20 nt, Human adenovirus E
acaccuggaccacugccgcc

SEQ ID NO: 1579308 - RNA, 16 nt, Human adenovirus E
caugcugacgagcccg

SEQ ID NO: 1579309 - RNA, 14 nt, Human adenovirus E
gggcgcccagcagg

SEQ ID NO: 1579310 - RNA, 13 nt, Human adenovirus E
cgccggugccgcc

SEQ ID NO: 1579311 - RNA, 11 nt, Human adenovirus E
ccugcgccgcu

SEQ ID NO: 1579312 - RNA, 12 nt, Human adenovirus E
cuaccacccaca

SEQ ID NO: 1579313 - RNA, 17 nt, Human adenovirus E
gcagcgggcccugaccg

SEQ ID NO: 1579314 - RNA, 12 nt, Human adenovirus E
cuccuccuccag

SEQ ID NO: 1579315 - RNA, 22 nt, Human adenovirus E
cggagaugccuuucaagagccc

SEQ ID NO: 1579316 - RNA, 17 nt, Human adenovirus E
ggaugucaaauuccucc

SEQ ID NO: 1579317 - RNA, 20 nt, Human adenovirus E
gacguagaggggcuccucga

SEQ ID NO: 1579318 - RNA, 13 nt, Human adenovirus E
uacaccaacuuca

SEQ ID NO: 1579319 - RNA, 15 nt, Human adenovirus E
cgaugugcucgguga

SEQ ID NO: 1579320 - RNA, 24 nt, Human adenovirus E
cgccucugggugaaggccacggga

SEQ ID NO: 1579321 - RNA, 15 nt, Human adenovirus E
ugaugacagcaacag

SEQ ID NO: 1579322 - RNA, 17 nt, Human adenovirus E
ucccagacaugcaagag

SEQ ID NO: 1579323 - RNA, 22 nt, Human adenovirus E
ggcgcacguggacgagcagacc

SEQ ID NO: 1579324 - RNA, 22 nt, Human adenovirus E
gcgcgagcagaaggggggcagg

SEQ ID NO: 1579325 - RNA, 20 nt, Human adenovirus E
ggcgagaucgagggcgagcu

SEQ ID NO: 1579326 - RNA, 16 nt, Human adenovirus E
agcacccagcccgcca

SEQ ID NO: 1579327 - RNA, 17 nt, Human adenovirus E
uccaucccgcuggacca

SEQ ID NO: 1579328 - RNA, 17 nt, Human adenovirus E
ugaaccugagccaggcu

SEQ ID NO: 1579329 - RNA, 19 nt, Human adenovirus E
accucaauccgcguaauug

SEQ ID NO: 1579330 - RNA, 19 nt, Human adenovirus E
aagcuauguuggagcaaca

SEQ ID NO: 1579331 - RNA, 16 nt, Human adenovirus E
cucagguugucaguuu

SEQ ID NO: 1579332 - RNA, 21 nt, Human adenovirus E
cgcgagcugagcgaccaggag

SEQ ID NO: 1579333 - RNA, 14 nt, Human adenovirus E
ugcacuggcagccc

SEQ ID NO: 1579334 - RNA, 13 nt, Human adenovirus E
cgugcagcagaag

SEQ ID NO: 1579335 - RNA, 12 nt, Human adenovirus E
gacggcggccug

SEQ ID NO: 1579336 - RNA, 16 nt, Human adenovirus E
accaccacagcaaccu

SEQ ID NO: 1579337 - RNA, 22 nt, Human adenovirus E
ccucggccgcguggccuuuggc

SEQ ID NO: 1579338 - RNA, 21 nt, Human adenovirus E
uguaccccaccaugcagcuga

SEQ ID NO: 1579339 - RNA, 12 nt, Human adenovirus E
gguccuggguga

SEQ ID NO: 1579340 - RNA, 14 nt, Human adenovirus E
ccccucagcgugga

SEQ ID NO: 1579341 - RNA, 18 nt, Human adenovirus E
cuacuuccaagaagaggc

SEQ ID NO: 1579342 - RNA, 18 nt, Human adenovirus E
gggcgucgucgccggagc

SEQ ID NO: 1579343 - RNA, 14 nt, Human adenovirus E
cuucuuccuccucc

SEQ ID NO: 1579344 - RNA, 20 nt, Human adenovirus E
gcccagcacacgcccagaaa

SEQ ID NO: 1579345 - RNA, 17 nt, Human adenovirus E
ggcacgacaggcagcgg

SEQ ID NO: 1579346 - RNA, 19 nt, Human adenovirus E
guaccccaccaugcagcug

SEQ ID NO: 1579347 - RNA, 14 nt, Human adenovirus E
cagaacuuccagca

SEQ ID NO: 1579348 - RNA, 17 nt, Human adenovirus E
ccuggaccgaaagaggg

SEQ ID NO: 1579349 - RNA, 13 nt, Human adenovirus E
ggagacgcgcggc

SEQ ID NO: 1579350 - RNA, 20 nt, Human adenovirus E
gggccgcuggcuccuggacc

SEQ ID NO: 1579351 - RNA, 16 nt, Human adenovirus E
ggggcagaggcggagg

SEQ ID NO: 1579352 - RNA, 16 nt, Human adenovirus E
cugaugcaccuguggg

SEQ ID NO: 1579353 - RNA, 15 nt, Human adenovirus E
gcucccuggccugca

SEQ ID NO: 1579354 - RNA, 13 nt, Human adenovirus E
cagccguuccgca

SEQ ID NO: 1579355 - RNA, 15 nt, Human adenovirus E
gacaucggcgugaag

SEQ ID NO: 1579356 - RNA, 22 nt, Human adenovirus E
cuggcgccuacggaggggcgga

SEQ ID NO: 1579357 - RNA, 20 nt, Human adenovirus E
cuccucaggcggcaguggug

SEQ ID NO: 1579358 - RNA, 16 nt, Human adenovirus E
gcagggccuguggggc

SEQ ID NO: 1579359 - RNA, 16 nt, Human adenovirus E
cgcgcccugggccagg

SEQ ID NO: 1579360 - RNA, 20 nt, Human adenovirus E
gcaugagcaccacagcgccc

SEQ ID NO: 1579361 - RNA, 14 nt, Human adenovirus E
gcugcugcucaggg

SEQ ID NO: 1579362 - RNA, 17 nt, Human adenovirus E
cugcucgaucuccuccu

SEQ ID NO: 1579363 - RNA, 17 nt, Human adenovirus E
agagccacaccacagcu

SEQ ID NO: 1579364 - RNA, 18 nt, Human adenovirus E
uggacaaaauaccaccuc

SEQ ID NO: 1579365 - RNA, 14 nt, Human adenovirus E
  misc_feature (5)..(5): n is a, c, g, or u
gcugnugagcgaga

SEQ ID NO: 1579366 - RNA, 12 nt, Human adenovirus E
acuccuccucca

SEQ ID NO: 1579367 - RNA, 18 nt, Human adenovirus E
cgccugcugggccuuggc

SEQ ID NO: 1579368 - RNA, 14 nt, Human adenovirus E
ugccagccccgauu

SEQ ID NO: 1579369 - RNA, 13 nt, Human adenovirus E
ccagcuggccuug

SEQ ID NO: 1579370 - RNA, 18 nt, Human adenovirus E
gauugaaaaccaucacag

SEQ ID NO: 1579371 - RNA, 15 nt, Human adenovirus E
agcaccacagggcag

SEQ ID NO: 1579372 - RNA, 20 nt, Human adenovirus E
caggaugcaccgugcgguga

SEQ ID NO: 1579373 - RNA, 19 nt, Human adenovirus E
caacgugcagaccaaccug

SEQ ID NO: 1579374 - RNA, 18 nt, Human adenovirus E
ccaccaugcagcugaugg

SEQ ID NO: 1579375 - RNA, 17 nt, Human adenovirus E
uccaucgcuuacagccu

SEQ ID NO: 1579376 - RNA, 19 nt, Human adenovirus E
accgagggggagagcuacu

SEQ ID NO: 1579377 - RNA, 20 nt, Human adenovirus E
cugcaguacgugcaacacag

SEQ ID NO: 1579378 - RNA, 21 nt, Human adenovirus E
cauccgcggcgacgaggccgg

SEQ ID NO: 1579379 - RNA, 19 nt, Human adenovirus E
ugccaucacaccuuccacc

SEQ ID NO: 1579380 - RNA, 21 nt, Human adenovirus E
cgccagcccaauggcaccugc

SEQ ID NO: 1579381 - RNA, 15 nt, Human adenovirus E
accggugaggagcuc

SEQ ID NO: 1579382 - RNA, 14 nt, Human adenovirus E
caguuccgccagga

SEQ ID NO: 1579383 - RNA, 20 nt, Human adenovirus E
gccaugcggaugaagcacaa

SEQ ID NO: 1579384 - RNA, 17 nt, Human adenovirus E
ccggcgcgacuacaucc

SEQ ID NO: 1579385 - RNA, 15 nt, Human adenovirus E
cucaggcggcagugg

SEQ ID NO: 1579386 - RNA, 17 nt, Human adenovirus E
caugcccgccucguucc

SEQ ID NO: 1579387 - RNA, 15 nt, Human adenovirus E
cugcacaggcagcaa

SEQ ID NO: 1579388 - RNA, 14 nt, Human adenovirus E
guacgagcagaccg

SEQ ID NO: 1579389 - RNA, 18 nt, Human adenovirus E
ugguggcgcgcaccucgc

SEQ ID NO: 1579390 - RNA, 23 nt, Human adenovirus E
ggcuuuaccgacaaaaaucagac

SEQ ID NO: 1579391 - RNA, 20 nt, Human adenovirus E
cgaaaaagaaaaacagccau

SEQ ID NO: 1579392 - RNA, 13 nt, Human adenovirus E
caccaccgccucg

SEQ ID NO: 1579393 - RNA, 22 nt, Human adenovirus E
caaggggggucugaaacucacc

SEQ ID NO: 1579394 - RNA, 15 nt, Human adenovirus E
gagccccgggcccag

SEQ ID NO: 1579395 - RNA, 15 nt, Human adenovirus E
gccccuuguggaaga

SEQ ID NO: 1579396 - RNA, 16 nt, Human adenovirus E
ggugcacuuggggaau

SEQ ID NO: 1579397 - RNA, 17 nt, Human adenovirus E
ugcugaaaaagggccgc

SEQ ID NO: 1579398 - RNA, 18 nt, Human adenovirus E
ucccgguaccacaucacc

SEQ ID NO: 1579399 - RNA, 22 nt, Human adenovirus E
uaccagauccucagguaaauca

SEQ ID NO: 1579400 - RNA, 18 nt, Human adenovirus E
gacaugcaucccagcugg

SEQ ID NO: 1579401 - RNA, 18 nt, Human adenovirus E
cgccggcggcggucucgg

SEQ ID NO: 1579402 - RNA, 19 nt, Human adenovirus E
guggaaaauaacagccagg

SEQ ID NO: 1579403 - RNA, 16 nt, Human adenovirus E
ucccauacuccaccuc

SEQ ID NO: 1579404 - RNA, 13 nt, Human adenovirus E
caacccuuccucc

SEQ ID NO: 1579405 - RNA, 14 nt, Human adenovirus E
uauccgcagcagcg

SEQ ID NO: 1579406 - RNA, 13 nt, Human adenovirus E
gacagcggcagca

SEQ ID NO: 1579407 - RNA, 19 nt, Human adenovirus E
gauucccacggagcccaug

SEQ ID NO: 1579408 - RNA, 17 nt, Human adenovirus E
gcgaguccaaccuggga

SEQ ID NO: 1579409 - RNA, 17 nt, Human adenovirus E
agacgcgcggccacggc

SEQ ID NO: 1579410 - RNA, 14 nt, Human adenovirus E
ccggugacacacuc

SEQ ID NO: 1579411 - RNA, 14 nt, Human adenovirus E
gcacggccagcgcg

SEQ ID NO: 1579412 - RNA, 18 nt, Human adenovirus E
ggcacgauucugaccugc

SEQ ID NO: 1579413 - RNA, 18 nt, Human adenovirus E
  misc_feature (7)..(7): n is a, c, g, or u
ccgggcnugggcgugcag

SEQ ID NO: 1579414 - RNA, 18 nt, Human adenovirus E
aggucgaggagaaccugc

SEQ ID NO: 1579415 - RNA, 18 nt, Human adenovirus E
gcuccggaauccugcccg

SEQ ID NO: 1579416 - RNA, 15 nt, Human adenovirus E
cgcgccugcugcugc

SEQ ID NO: 1579417 - RNA, 18 nt, Human adenovirus E
aucucgaaucaggcugga

SEQ ID NO: 1579418 - RNA, 24 nt, Human adenovirus E
gcagccccccugcucccagagcug

SEQ ID NO: 1579419 - RNA, 18 nt, Human adenovirus E
agccacugcuaccugcug

SEQ ID NO: 1579420 - RNA, 17 nt, Human adenovirus E
uggaggcggcggcagga

SEQ ID NO: 1579421 - RNA, 14 nt, Human adenovirus E
accaccacuacagc

SEQ ID NO: 1579422 - RNA, 20 nt, Human adenovirus E
uaccugcugcgccuggccaa

SEQ ID NO: 1579423 - RNA, 15 nt, Human adenovirus E
uggaggaagacuggg

SEQ ID NO: 1579424 - RNA, 15 nt, Human adenovirus E
uguaggcgcagcagc

SEQ ID NO: 1579425 - RNA, 15 nt, Human adenovirus E
cagcacucaggcaga

SEQ ID NO: 1579426 - RNA, 20 nt, Human adenovirus E
guccagagauccacggccag

SEQ ID NO: 1579427 - RNA, 12 nt, Human adenovirus E
ccagggcauggg

SEQ ID NO: 1579428 - RNA, 21 nt, Human adenovirus E
aggacgucagcggcgagggcc

SEQ ID NO: 1579429 - RNA, 23 nt, Human adenovirus E
cagaacaaugacuucacccccac

SEQ ID NO: 1579430 - RNA, 16 nt, Human adenovirus E
uuuaaugaaucagaug

SEQ ID NO: 1579431 - RNA, 15 nt, Human adenovirus E
ucaacagccgccugg

SEQ ID NO: 1579432 - RNA, 13 nt, Human adenovirus E
gagcaaggacaga

SEQ ID NO: 1579433 - RNA, 19 nt, Human adenovirus E
acgucagcggcgagggccu

SEQ ID NO: 1579434 - RNA, 21 nt, Human adenovirus E
acgagccggggcagcgccgcc

SEQ ID NO: 1579435 - RNA, 20 nt, Human adenovirus E
cuggacgcugcucaccaccu

SEQ ID NO: 1579436 - RNA, 13 nt, Human adenovirus E
gcgcccggagaaa

SEQ ID NO: 1579437 - RNA, 15 nt, Human adenovirus E
cucuucuuccuccuc

SEQ ID NO: 1579438 - RNA, 18 nt, Human adenovirus E
gccgggaccgagggggag

SEQ ID NO: 1579439 - RNA, 14 nt, Human adenovirus E
cgccggcaggaccc

SEQ ID NO: 1579440 - RNA, 14 nt, Human adenovirus E
gguauugcuauuuu

SEQ ID NO: 1579441 - RNA, 21 nt, Human adenovirus E
gcagaucuagggccucaggag

SEQ ID NO: 1579442 - RNA, 13 nt, Human adenovirus E
cagggccagcacc

SEQ ID NO: 1579443 - RNA, 13 nt, Human adenovirus E
cgacgagcagcug

SEQ ID NO: 1579444 - RNA, 23 nt, Human adenovirus E
aaccugggauccaugguggcgcu

SEQ ID NO: 1579445 - RNA, 21 nt, Human adenovirus E
gccagcgccggcaggacccgg

SEQ ID NO: 1579446 - RNA, 22 nt, Human adenovirus E
uccgggucucggcauggcccgc

SEQ ID NO: 1579447 - RNA, 21 nt, Human adenovirus E
cauggaccaggugcucaucaa

SEQ ID NO: 1579448 - RNA, 18 nt, Human adenovirus E
cgcucccuggggcgcccu

SEQ ID NO: 1579449 - RNA, 17 nt, Human adenovirus E
agugcugacccugagcg

SEQ ID NO: 1579450 - RNA, 21 nt, Human adenovirus E
cuacugaauuuuuguccacug

SEQ ID NO: 1579451 - RNA, 21 nt, Human adenovirus E
aaguggaaaccuaaaccccau

SEQ ID NO: 1579452 - RNA, 21 nt, Human adenovirus E
gugggcuuggauguugaggua

SEQ ID NO: 1579453 - RNA, 22 nt, Human adenovirus E
agcgcgagcgguuccaccgcga

SEQ ID NO: 1579454 - RNA, 15 nt, Human adenovirus E
auacuuuuaucuaug

SEQ ID NO: 1579455 - RNA, 13 nt, Human adenovirus E
gagggugcugccg

SEQ ID NO: 1579456 - RNA, 22 nt, Human adenovirus E
auugaacuaugauuccuagaca

SEQ ID NO: 1579457 - RNA, 15 nt, Human adenovirus E
uggugaaggaggaaa

SEQ ID NO: 1579458 - RNA, 16 nt, Human adenovirus E
gagcgaccaggagcug

SEQ ID NO: 1579459 - RNA, 12 nt, Human adenovirus E
uuccugaugcag

SEQ ID NO: 1579460 - RNA, 15 nt, Human adenovirus E
guucagggcggccag

SEQ ID NO: 1579461 - RNA, 14 nt, Human adenovirus E
gccagggcuugcag

SEQ ID NO: 1579462 - RNA, 13 nt, Human adenovirus E
gaacaggaagaac

SEQ ID NO: 1579463 - RNA, 13 nt, Human adenovirus E
gucaacaauagca

SEQ ID NO: 1579464 - RNA, 15 nt, Human adenovirus E
cuaccucugccacac

SEQ ID NO: 1579465 - RNA, 22 nt, Human adenovirus E
caggcgauggcggcggcggcga

SEQ ID NO: 1579466 - RNA, 15 nt, Human adenovirus E
agcccacggccgcca

SEQ ID NO: 1579467 - RNA, 16 nt, Human adenovirus E
ccaccccacccaguga

SEQ ID NO: 1579468 - RNA, 14 nt, Human adenovirus E
acccugccgcugcg

SEQ ID NO: 1579469 - RNA, 18 nt, Human adenovirus E
gacagaaaaucgcccagg

SEQ ID NO: 1579470 - RNA, 21 nt, Human adenovirus E
caaguggugcccccuccagaa

SEQ ID NO: 1579471 - RNA, 17 nt, Human adenovirus E
aggagcacccucagggc

SEQ ID NO: 1579472 - RNA, 15 nt, Human adenovirus E
ugaugcccacggccc

SEQ ID NO: 1579473 - RNA, 22 nt, Human adenovirus E
  misc_feature (9)..(9): n is a, c, g, or u
gcgcgcaanuacacccccgccg

SEQ ID NO: 1579474 - RNA, 15 nt, Human adenovirus E
uuggggcaccucggc

SEQ ID NO: 1579475 - RNA, 15 nt, Human adenovirus E
ccucauuuuccccga

SEQ ID NO: 1579476 - RNA, 21 nt, Human adenovirus E
ugccugaacgccugcugggcc

SEQ ID NO: 1579477 - RNA, 17 nt, Human adenovirus E
aggagcucaaccccggc

SEQ ID NO: 1579478 - RNA, 12 nt, Human adenovirus E
gccaccucagcu

SEQ ID NO: 1579479 - RNA, 16 nt, Human adenovirus E
gcacgaagcccugcag

SEQ ID NO: 1579480 - RNA, 23 nt, Human adenovirus E
cuucaggcgccagcgccggcagg

SEQ ID NO: 1579481 - RNA, 23 nt, Human adenovirus E
uugccugaacgccugcugggccu

SEQ ID NO: 1579482 - RNA, 18 nt, Human adenovirus E
ccccgcagcagucgcugc

SEQ ID NO: 1579483 - RNA, 18 nt, Human adenovirus E
agcgaacggguugggcug

SEQ ID NO: 1579484 - RNA, 18 nt, Human adenovirus E
gugaccguggagcuggag

SEQ ID NO: 1579485 - RNA, 16 nt, Human adenovirus E
gagaugaaacccuccg

SEQ ID NO: 1579486 - RNA, 15 nt, Human adenovirus E
gcugcugcugguggc

SEQ ID NO: 1579487 - RNA, 18 nt, Human adenovirus E
gaggccaucggccaggcg

SEQ ID NO: 1579488 - RNA, 12 nt, Human adenovirus E
ggagccacugcu

SEQ ID NO: 1579489 - RNA, 23 nt, Human adenovirus E
agaagcugaaaguggagcugccg

SEQ ID NO: 1579490 - RNA, 15 nt, Human adenovirus E
cagcugauggugccc

SEQ ID NO: 1579491 - RNA, 21 nt, Human adenovirus E
auccaucgagauugaccuggg

SEQ ID NO: 1579492 - RNA, 15 nt, Human adenovirus E
ucaagcccagcacca

SEQ ID NO: 1579493 - RNA, 12 nt, Human adenovirus E
augaccugggcg

SEQ ID NO: 1579494 - RNA, 23 nt, Human adenovirus E
ggccuguuccugaugcaggaggg

SEQ ID NO: 1579495 - RNA, 12 nt, Human adenovirus E
gaaggggggcag

SEQ ID NO: 1579496 - RNA, 16 nt, Human adenovirus E
cuggagcgcguggccc

SEQ ID NO: 1579497 - RNA, 15 nt, Human adenovirus E
cagcagucaggcaga

SEQ ID NO: 1579498 - RNA, 14 nt, Human adenovirus E
cggggcagcgccgc

SEQ ID NO: 1579499 - RNA, 18 nt, Human adenovirus E
ugaaggaggaaagaaagc

SEQ ID NO: 1579500 - RNA, 14 nt, Human adenovirus E
gccccgggcccagg

SEQ ID NO: 1579501 - RNA, 12 nt, Human adenovirus E
cgcucagcaccg

SEQ ID NO: 1579502 - RNA, 23 nt, Human adenovirus E
ggccgucccagacaugcaagaga

SEQ ID NO: 1579503 - RNA, 12 nt, Human adenovirus E
acgugcucuuug

SEQ ID NO: 1579504 - RNA, 16 nt, Human adenovirus E
cagucucaaguccagc

SEQ ID NO: 1579505 - RNA, 20 nt, Human adenovirus E
ggcgcuguccggccgcgagg

SEQ ID NO: 1579506 - RNA, 16 nt, Human adenovirus E
cucugccacaccuggc

SEQ ID NO: 1579507 - RNA, 15 nt, Human adenovirus E
acggaacugcugccc

SEQ ID NO: 1579508 - RNA, 19 nt, Human adenovirus E
accgcgaguccaaccuggg

SEQ ID NO: 1579509 - RNA, 13 nt, Human adenovirus E
ugaugcagcaggc

SEQ ID NO: 1579510 - RNA, 15 nt, Human adenovirus E
uuggcgcggaggaag

SEQ ID NO: 1579511 - RNA, 23 nt, Human adenovirus E
cugcuaccugcugcgccuggcca

SEQ ID NO: 1579512 - RNA, 20 nt, Human adenovirus E
ucugcaaggagaaggaggag

SEQ ID NO: 1579513 - RNA, 13 nt, Human adenovirus E
cgcggcgacgagg

SEQ ID NO: 1579514 - RNA, 20 nt, Human adenovirus E
cuugcccuucucgcugaaca

SEQ ID NO: 1579515 - RNA, 18 nt, Human adenovirus E
cccagaguuuggaagagc

SEQ ID NO: 1579516 - RNA, 15 nt, Human adenovirus E
gcgcugcucgaccgc

SEQ ID NO: 1579517 - RNA, 23 nt, Human adenovirus E
gcucugcaaggagaaggaggaga

SEQ ID NO: 1579518 - RNA, 22 nt, Human adenovirus E
cagguggcagaugcggcgguac

SEQ ID NO: 1579519 - RNA, 21 nt, Human adenovirus E
acccagaccgguaagaaggag

SEQ ID NO: 1579520 - RNA, 18 nt, Human adenovirus E
uacgauaccacccgguug

SEQ ID NO: 1579521 - RNA, 13 nt, Human adenovirus E
gcaguaguacaga

SEQ ID NO: 1579522 - RNA, 14 nt, Human adenovirus E
ggucccggccgggg

SEQ ID NO: 1579523 - RNA, 19 nt, Human adenovirus E
uguggggcgugcaggcccc

SEQ ID NO: 1579524 - RNA, 21 nt, Human adenovirus E
cggccauuuuuucggggguga

SEQ ID NO: 1579525 - RNA, 12 nt, Human adenovirus E
ugagcgccagca

SEQ ID NO: 1579526 - RNA, 17 nt, Human adenovirus E
cuggaccacugccgccg

SEQ ID NO: 1579527 - RNA, 17 nt, Human adenovirus E
ugccuuggcaguacagu

SEQ ID NO: 1579528 - RNA, 17 nt, Human adenovirus E
cacuggcucccgccgcc

SEQ ID NO: 1579529 - RNA, 19 nt, Human adenovirus E
ggaugcgucgccaccacca

SEQ ID NO: 1579530 - RNA, 20 nt, Human adenovirus E
cgugguggcggacgcgcgcc

SEQ ID NO: 1579531 - RNA, 19 nt, Human adenovirus E
gcccaugagcugcgagaag

SEQ ID NO: 1579532 - RNA, 15 nt, Human adenovirus E
ccauggcuugcaggg

SEQ ID NO: 1579533 - RNA, 18 nt, Human adenovirus E
uuugauacugauggaaac

SEQ ID NO: 1579534 - RNA, 15 nt, Human adenovirus E
agaagcaagcuccag

SEQ ID NO: 1579535 - RNA, 13 nt, Human adenovirus E
caccacuacagcc

SEQ ID NO: 1579536 - RNA, 20 nt, Human adenovirus E
gugcccgaggcccuggccac

SEQ ID NO: 1579537 - RNA, 23 nt, Human adenovirus E
auccugcccgccaccugcuccgc

SEQ ID NO: 1579538 - RNA, 20 nt, Human adenovirus E
ccucguuucgcggguuggga

SEQ ID NO: 1579539 - RNA, 14 nt, Human adenovirus E
ucugggugaaggcc

SEQ ID NO: 1579540 - RNA, 19 nt, Human adenovirus E
uccuaggccuuuuaauuuu

SEQ ID NO: 1579541 - RNA, 19 nt, Human adenovirus E
aacucagguguccagcugg

SEQ ID NO: 1579542 - RNA, 20 nt, Human adenovirus E
cgcgcgggaguugcgguaca

SEQ ID NO: 1579543 - RNA, 16 nt, Human adenovirus E
auaacaaaaaaaauga

SEQ ID NO: 1579544 - RNA, 18 nt, Human adenovirus E
gccgggcggcaggggcgg

SEQ ID NO: 1579545 - RNA, 15 nt, Human adenovirus E
cgacgagcagcuggc

SEQ ID NO: 1579546 - RNA, 15 nt, Human adenovirus E
caaaauucucaggug

SEQ ID NO: 1579547 - RNA, 23 nt, Human adenovirus E
cgcacguggccgcggccaaccug

SEQ ID NO: 1579548 - RNA, 19 nt, Human adenovirus E
ggacuccguggcucugccu

SEQ ID NO: 1579549 - RNA, 16 nt, Human adenovirus E
ccgcggcacgcgcuuc

SEQ ID NO: 1579550 - RNA, 22 nt, Human adenovirus E
uuagggcaagccacaguacaga

SEQ ID NO: 1579551 - RNA, 15 nt, Human adenovirus E
cggggcgggagcugc

SEQ ID NO: 1579552 - RNA, 16 nt, Human adenovirus E
cuucacccccacggag

SEQ ID NO: 1579553 - RNA, 18 nt, Human adenovirus E
caccgcgaguccaaccug

SEQ ID NO: 1579554 - RNA, 16 nt, Human adenovirus E
gcgaacgcucugcaag

SEQ ID NO: 1579555 - RNA, 15 nt, Human adenovirus E
ccacggaggccagca

SEQ ID NO: 1579556 - RNA, 19 nt, Human adenovirus E
guuccagacgcggcuguag

SEQ ID NO: 1579557 - RNA, 19 nt, Human adenovirus E
accacagcaaccucaggca

SEQ ID NO: 1579558 - RNA, 22 nt, Human adenovirus E
gauccccgucuccugccgcgcc

SEQ ID NO: 1579559 - RNA, 19 nt, Human adenovirus E
ucagcaugaugcccacggc

SEQ ID NO: 1579560 - RNA, 16 nt, Human adenovirus E
  misc_feature (7)..(7): n is a, c, g, or u
acacucnugcaccauc

SEQ ID NO: 1579561 - RNA, 15 nt, Human adenovirus E
ccaucauccccacgc

SEQ ID NO: 1579562 - RNA, 24 nt, Human adenovirus E
aggaggcgcucuccccccagggau

SEQ ID NO: 1579563 - RNA, 21 nt, Human adenovirus E
uggucagcgacgagcagcugg

SEQ ID NO: 1579564 - RNA, 18 nt, Human adenovirus E
ccauacuccaccuccacc

SEQ ID NO: 1579565 - RNA, 15 nt, Human adenovirus E
ggacugaggggcgug

SEQ ID NO: 1579566 - RNA, 16 nt, Human adenovirus E
agcccgucccgggggu

SEQ ID NO: 1579567 - RNA, 20 nt, Human adenovirus E
ucagacccacugcugaaccu

SEQ ID NO: 1579568 - RNA, 18 nt, Human adenovirus E
agcagugucuggaggagc

SEQ ID NO: 1579569 - RNA, 17 nt, Human adenovirus E
cgcaggccggagcuguc

SEQ ID NO: 1579570 - RNA, 15 nt, Human adenovirus E
cgcggaggaaggaag

SEQ ID NO: 1579571 - RNA, 20 nt, Human adenovirus E
cuggagaagaaucgccaggg

SEQ ID NO: 1579572 - RNA, 22 nt, Human adenovirus E
gcguggcccgcuacaacagcac

SEQ ID NO: 1579573 - RNA, 22 nt, Human adenovirus E
gacgcaguagaaggugcggggg

SEQ ID NO: 1579574 - RNA, 18 nt, Human adenovirus E
cuccaacguggagcugac

SEQ ID NO: 1579575 - RNA, 18 nt, Human adenovirus E
gcaccgcucccuggccug

SEQ ID NO: 1579576 - RNA, 16 nt, Human adenovirus E
cugacgcuccuggucc

SEQ ID NO: 1579577 - RNA, 20 nt, Human adenovirus E
gucagcgacgagcagcuggc

SEQ ID NO: 1579578 - RNA, 22 nt, Human adenovirus E
caccguaagcagugcucaggug

SEQ ID NO: 1579579 - RNA, 16 nt, Human adenovirus E
ccagaaaaagccacag

SEQ ID NO: 1579580 - RNA, 20 nt, Human adenovirus E
ggccagaucguccagggcag

SEQ ID NO: 1579581 - RNA, 13 nt, Human adenovirus E
gccgcgcgcgggu

SEQ ID NO: 1579582 - RNA, 16 nt, Human adenovirus E
accuguucagagacag

SEQ ID NO: 1579583 - RNA, 22 nt, Human adenovirus E
ugcacgagaaccgccuggggca

SEQ ID NO: 1579584 - RNA, 20 nt, Human adenovirus E
ugcaacacagaaccaccagg

SEQ ID NO: 1579585 - RNA, 18 nt, Human adenovirus E
cagcagcgagcugggcag

SEQ ID NO: 1579586 - RNA, 17 nt, Human adenovirus E
uuuucauuuuuccagcc

SEQ ID NO: 1579587 - RNA, 21 nt, Human adenovirus E
uaacauuuuugccaugcguca

SEQ ID NO: 1579588 - RNA, 18 nt, Human adenovirus E
uggccagaucguccaggg

SEQ ID NO: 1579589 - RNA, 17 nt, Human adenovirus E
cuccacgucgagguccu

SEQ ID NO: 1579590 - RNA, 16 nt, Human adenovirus E
cggagcacgaggagga

SEQ ID NO: 1579591 - RNA, 19 nt, Human adenovirus E
ccucuucuuccuccuccac

SEQ ID NO: 1579592 - RNA, 17 nt, Human adenovirus E
ccugcacuggcagccca

SEQ ID NO: 1579593 - RNA, 15 nt, Human adenovirus E
augacagcaacagua

SEQ ID NO: 1579594 - RNA, 11 nt, Human adenovirus E
agcaagcagca

SEQ ID NO: 1579595 - RNA, 13 nt, Human adenovirus E
gugcccccuccag

SEQ ID NO: 1579596 - RNA, 19 nt, Human adenovirus E
agcgcgcgucgcccaucuc

SEQ ID NO: 1579597 - RNA, 12 nt, Human adenovirus E
agcuucuucaac

SEQ ID NO: 1579598 - RNA, 21 nt, Human adenovirus E
cagcggcggagcggcaucucg

SEQ ID NO: 1579599 - RNA, 18 nt, Human adenovirus E
uuacaaguuucuccacca

SEQ ID NO: 1579600 - RNA, 17 nt, Human adenovirus E
acagcacucaggcagag

SEQ ID NO: 1579601 - RNA, 21 nt, Human adenovirus E
gacggcccuugacguggggca

SEQ ID NO: 1579602 - RNA, 17 nt, Human adenovirus E
aagagucagagaaaggc

SEQ ID NO: 1579603 - RNA, 19 nt, Human adenovirus E
ggcgcucuccccccaggga

SEQ ID NO: 1579604 - RNA, 15 nt, Human adenovirus E
agcaccgccccgccc

SEQ ID NO: 1579605 - RNA, 19 nt, Human adenovirus E
ugcagcccccgcuggaggc

SEQ ID NO: 1579606 - RNA, 18 nt, Human adenovirus E
agggucuuguugcuagug

SEQ ID NO: 1579607 - RNA, 20 nt, Human adenovirus E
ccaccacagcaaccucaggc

SEQ ID NO: 1579608 - RNA, 13 nt, Human adenovirus E
gcggcgcggagcc

SEQ ID NO: 1579609 - RNA, 22 nt, Human adenovirus E
gccggacuacuucuuccagacc

SEQ ID NO: 1579610 - RNA, 13 nt, Human adenovirus E
aucaucggcaccu

SEQ ID NO: 1579611 - RNA, 15 nt, Human adenovirus E
ugcagggggaucagc

SEQ ID NO: 1579612 - RNA, 19 nt, Human adenovirus E
cauguggagcuaccagccc

SEQ ID NO: 1579613 - RNA, 15 nt, Human adenovirus E
gccuuucaagagccc

SEQ ID NO: 1579614 - RNA, 14 nt, Human adenovirus E
cagcaggugcugcc

SEQ ID NO: 1579615 - RNA, 12 nt, Human adenovirus E
ggcuggggcgac

SEQ ID NO: 1579616 - RNA, 16 nt, Human adenovirus E
ggaagaacaggaagaa

SEQ ID NO: 1579617 - RNA, 22 nt, Human adenovirus E
cacugccgcugcaaccucugca

SEQ ID NO: 1579618 - RNA, 23 nt, Human adenovirus E
caauaaggcacuacaaugcucag

SEQ ID NO: 1579619 - RNA, 21 nt, Human adenovirus E
ggacuacuucuuccagaccag

SEQ ID NO: 1579620 - RNA, 15 nt, Human adenovirus E
cugcgcaacggccug

SEQ ID NO: 1579621 - RNA, 12 nt, Human adenovirus E
aagacaguucau

SEQ ID NO: 1579622 - RNA, 15 nt, Human adenovirus E
aggcgcugguagagg

SEQ ID NO: 1579623 - RNA, 19 nt, Human adenovirus E
gaggagacugauggccacg

SEQ ID NO: 1579624 - RNA, 16 nt, Human adenovirus E
caaucaggcagcaccg

SEQ ID NO: 1579625 - RNA, 20 nt, Human adenovirus E
uaccuggcgccuacggaggg

SEQ ID NO: 1579626 - RNA, 15 nt, Human adenovirus E
agguguagagggugc

SEQ ID NO: 1579627 - RNA, 20 nt, Human adenovirus E
gccggcgcuucugcccccgc

SEQ ID NO: 1579628 - RNA, 14 nt, Human adenovirus E
uugcgcacaugugc

SEQ ID NO: 1579629 - RNA, 13 nt, Human adenovirus E
cgcggggcgggag

SEQ ID NO: 1579630 - RNA, 11 nt, Human adenovirus E
uccuccuccag

SEQ ID NO: 1579631 - RNA, 20 nt, Human adenovirus E
aguggccagaucguccaggg

SEQ ID NO: 1579632 - RNA, 19 nt, Human adenovirus E
gagaacagcagucaggcag

SEQ ID NO: 1579633 - RNA, 22 nt, Human adenovirus E
gugcacgaagcccugcaggaag

SEQ ID NO: 1579634 - RNA, 24 nt, Human adenovirus E
  misc_feature (13)..(13): n is a, c, g, or u
cauguuacacucnugcaccauccc

SEQ ID NO: 1579635 - RNA, 14 nt, Human adenovirus E
caugcaucccagcu

SEQ ID NO: 1579636 - RNA, 17 nt, Human adenovirus E
cucuucagcacucucaa

SEQ ID NO: 1579637 - RNA, 18 nt, Human adenovirus E
uguccagcuggcgggcgg

SEQ ID NO: 1579638 - RNA, 13 nt, Human adenovirus E
ccuccaccugagc

SEQ ID NO: 1579639 - RNA, 21 nt, Human adenovirus E
agcuuaccgagcagcagcaca

SEQ ID NO: 1579640 - RNA, 20 nt, Human adenovirus E
ggaugauccugcggaaccac

SEQ ID NO: 1579641 - RNA, 21 nt, Human adenovirus E
agcacgaggaggagcuggcag

SEQ ID NO: 1579642 - RNA, 18 nt, Human adenovirus E
ccccacggaggccagcac

SEQ ID NO: 1579643 - RNA, 13 nt, Human adenovirus E
uccucccucagca

SEQ ID NO: 1579644 - RNA, 21 nt, Human adenovirus E
caggcuuugagcucggagggg

SEQ ID NO: 1579645 - RNA, 17 nt, Human adenovirus E
ucgagggucugggcagc

SEQ ID NO: 1579646 - RNA, 18 nt, Human adenovirus E
uacgcccgcgccaagagc

SEQ ID NO: 1579647 - RNA, 17 nt, Human adenovirus E
cgaggaauuucaguggg

SEQ ID NO: 1579648 - RNA, 19 nt, Human adenovirus E
ggcccuugacguggggcag

SEQ ID NO: 1579649 - RNA, 16 nt, Human adenovirus E
uaccuagccuacaacu

SEQ ID NO: 1579650 - RNA, 16 nt, Human adenovirus E
gcaagacagucuggag

SEQ ID NO: 1579651 - RNA, 15 nt, Human adenovirus E
cgcgcucccuggggc

SEQ ID NO: 1579652 - RNA, 20 nt, Human adenovirus E
cggcauugucggugugcuuu

SEQ ID NO: 1579653 - RNA, 24 nt, Human adenovirus E
gugcggcgggcgcagcagcgcaug

SEQ ID NO: 1579654 - RNA, 23 nt, Human adenovirus E
cgcgcugguggagaacaaggcca

SEQ ID NO: 1579655 - RNA, 20 nt, Human adenovirus E
ccuggccaacuaccuggccu

SEQ ID NO: 1579656 - RNA, 18 nt, Human adenovirus E
cuccaguucguggaggag

SEQ ID NO: 1579657 - RNA, 21 nt, Human adenovirus E
gggggccacccccagcgccgc

SEQ ID NO: 1579658 - RNA, 14 nt, Human adenovirus E
cccguaucgggcgc

SEQ ID NO: 1579659 - RNA, 18 nt, Human adenovirus E
gaaucgaguacaauaaca

SEQ ID NO: 1579660 - RNA, 13 nt, Human adenovirus E
ggagcuggcagug

SEQ ID NO: 1579661 - RNA, 17 nt, Human adenovirus E
cccagcggcgaggagga

SEQ ID NO: 1579662 - RNA, 17 nt, Human adenovirus E
ugggcguguggcagcag

SEQ ID NO: 1579663 - RNA, 19 nt, Human adenovirus E
ggcuccuagucgaagaccc

SEQ ID NO: 1579664 - RNA, 13 nt, Human adenovirus E
gugcauggacagg

SEQ ID NO: 1579665 - RNA, 19 nt, Human adenovirus E
cuccgcgacacggcacgcg

SEQ ID NO: 1579666 - RNA, 23 nt, Human adenovirus E
acggggaucagccccgcgcgcgc

SEQ ID NO: 1579667 - RNA, 22 nt, Human adenovirus E
cgcacguggccgcggccaaccu

SEQ ID NO: 1579668 - RNA, 15 nt, Human adenovirus E
caucaugccugaugg

SEQ ID NO: 1579669 - RNA, 17 nt, Human adenovirus E
cgggugauccuccacca

SEQ ID NO: 1579670 - RNA, 17 nt, Human adenovirus E
gccggagcggcacccgc

SEQ ID NO: 1579671 - RNA, 15 nt, Human adenovirus E
ccgcgaguccaaccu

SEQ ID NO: 1579672 - RNA, 22 nt, Human adenovirus E
cagcugccguccucccggagga

SEQ ID NO: 1579673 - RNA, 16 nt, Human adenovirus E
cugauggccacgggca

SEQ ID NO: 1579674 - RNA, 13 nt, Human adenovirus E
gggccgggaccga

SEQ ID NO: 1579675 - RNA, 21 nt, Human adenovirus E
acugggacagcacucaggcag

SEQ ID NO: 1579676 - RNA, 15 nt, Human adenovirus E
ugagcugcgagaagg

SEQ ID NO: 1579677 - RNA, 16 nt, Human adenovirus E
gcugggcgaagaggag

SEQ ID NO: 1579678 - RNA, 13 nt, Human adenovirus E
gcggucccagagc

SEQ ID NO: 1579679 - RNA, 14 nt, Human adenovirus E
gccgugagcggggc

SEQ ID NO: 1579680 - RNA, 14 nt, Human adenovirus E
ggacagauguggga

SEQ ID NO: 1579681 - RNA, 14 nt, Human adenovirus E
cacaccaccacagc

SEQ ID NO: 1579682 - RNA, 14 nt, Human adenovirus E
gcagggccuguggg

SEQ ID NO: 1579683 - RNA, 15 nt, Human adenovirus E
gcgcugcagagccag

SEQ ID NO: 1579684 - RNA, 23 nt, Human adenovirus E
acucaucgcgggaaggaugcuac

SEQ ID NO: 1579685 - RNA, 18 nt, Human adenovirus E
agcccacggccgccagcu

SEQ ID NO: 1579686 - RNA, 22 nt, Human adenovirus E
guacucuuucauauccucuccg

SEQ ID NO: 1579687 - RNA, 17 nt, Human adenovirus E
cuccacgagccagguga

SEQ ID NO: 1579688 - RNA, 15 nt, Human adenovirus E
cucacagaucugcau

SEQ ID NO: 1579689 - RNA, 15 nt, Human adenovirus E
gagaaggauagcaag

SEQ ID NO: 1579690 - RNA, 23 nt, Human adenovirus E
  misc_feature (12)..(12): n is a, c, g, or u
acccccagcugnugagcgagacc

SEQ ID NO: 1579691 - RNA, 23 nt, Human adenovirus E
gagccgccucagcaaccugcugg

SEQ ID NO: 1579692 - RNA, 22 nt, Human adenovirus E
agcuaccuccagugccuucucu

SEQ ID NO: 1579693 - RNA, 12 nt, Human adenovirus E
acagccacucuc

SEQ ID NO: 1579694 - RNA, 16 nt, Human adenovirus E
caaccaaacuaaccuc

SEQ ID NO: 1579695 - RNA, 21 nt, Human adenovirus E
uggggcgcccucaaaggccgc

SEQ ID NO: 1579696 - RNA, 16 nt, Human adenovirus E
cgcuggcuccuggacc

SEQ ID NO: 1579697 - RNA, 18 nt, Human adenovirus E
ccagaacgaccacagcaa

SEQ ID NO: 1579698 - RNA, 19 nt, Human adenovirus E
gcagucauaaucaucugca

SEQ ID NO: 1579699 - RNA, 15 nt, Human adenovirus E
cgcuggcuccuggac

SEQ ID NO: 1579700 - RNA, 13 nt, Human adenovirus E
ggaccugcuggag

SEQ ID NO: 1579701 - RNA, 21 nt, Human adenovirus E
cagagucgggggcaggagcag

SEQ ID NO: 1579702 - RNA, 13 nt, Human adenovirus E
aagauggagccau

SEQ ID NO: 1579703 - RNA, 13 nt, Human adenovirus E
gacccugggccug

SEQ ID NO: 1579704 - RNA, 21 nt, Human adenovirus E
ucguggaugcucuauacgggc

SEQ ID NO: 1579705 - RNA, 12 nt, Human adenovirus E
ggugugcuuucg

SEQ ID NO: 1579706 - RNA, 13 nt, Human adenovirus E
cuaccuccagugc

SEQ ID NO: 1579707 - RNA, 21 nt, Human adenovirus E
uaugauugaaaaccaucacag

SEQ ID NO: 1579708 - RNA, 22 nt, Human adenovirus E
agauggggguuggcgcggagga

SEQ ID NO: 1579709 - RNA, 20 nt, Human adenovirus E
aagaagcugaaaguggagcu

SEQ ID NO: 1579710 - RNA, 22 nt, Human adenovirus E
uacuggggguauaggcagggag

SEQ ID NO: 1579711 - RNA, 22 nt, Human adenovirus E
gagggugcugccgcggcggugc

SEQ ID NO: 1579712 - RNA, 13 nt, Human adenovirus E
ggcgugcagaccg

SEQ ID NO: 1579713 - RNA, 15 nt, Human adenovirus E
acucgccagaggcgc

SEQ ID NO: 1579714 - RNA, 22 nt, Human adenovirus E
agcguguucuccccccgaccgg

SEQ ID NO: 1579715 - RNA, 16 nt, Human adenovirus E
gccaaggggggucuga

SEQ ID NO: 1579716 - RNA, 14 nt, Human adenovirus E
acaggcagcaaagc

SEQ ID NO: 1579717 - RNA, 12 nt, Human adenovirus E
augcagcagcug

SEQ ID NO: 1579718 - RNA, 17 nt, Human adenovirus E
caucagggccgggugcu

SEQ ID NO: 1579719 - RNA, 21 nt, Human adenovirus E
cgcggccgccgugagcggggc

SEQ ID NO: 1579720 - RNA, 19 nt, Human adenovirus E
agacgaaggcgcgcaggcc

SEQ ID NO: 1579721 - RNA, 13 nt, Human adenovirus E
gccgaggcucucu

SEQ ID NO: 1579722 - RNA, 20 nt, Human adenovirus E
ccugcgcaaggucgaggaga

SEQ ID NO: 1579723 - RNA, 18 nt, Human adenovirus E
guguccggggcugcuagu

SEQ ID NO: 1579724 - RNA, 14 nt, Human adenovirus E
ccuuacgugccccc

SEQ ID NO: 1579725 - RNA, 13 nt, Human adenovirus E
cgaggaggaggca

SEQ ID NO: 1579726 - RNA, 15 nt, Human adenovirus E
gagucugaaucuuua

SEQ ID NO: 1579727 - RNA, 14 nt, Human adenovirus E
caagccacaguaca

SEQ ID NO: 1579728 - RNA, 21 nt, Human adenovirus E
ccacagcaaccucaggcacac

SEQ ID NO: 1579729 - RNA, 23 nt, Human adenovirus E
caccgccccgcccgccaugcagc

SEQ ID NO: 1579730 - RNA, 22 nt, Human adenovirus E
ccagugagcauugccaaaugca

SEQ ID NO: 1579731 - RNA, 17 nt, Human adenovirus E
ggugauggucucccgca

SEQ ID NO: 1579732 - RNA, 23 nt, Human adenovirus E
gggaucagcaguuugggcagcgg

SEQ ID NO: 1579733 - RNA, 23 nt, Human adenovirus E
gccugaugcaccugugggaccug

SEQ ID NO: 1579734 - RNA, 16 nt, Human adenovirus E
cagccgaaacucaucg

SEQ ID NO: 1579735 - RNA, 17 nt, Human adenovirus E
acacuaaaaaaauacug

SEQ ID NO: 1579736 - RNA, 14 nt, Human adenovirus E
aacccuucccaccc

SEQ ID NO: 1579737 - RNA, 16 nt, Human adenovirus E
gccucggaccuggccg

SEQ ID NO: 1579738 - RNA, 22 nt, Human adenovirus E
uccgcguaauuggcccgccgcc

SEQ ID NO: 1579739 - RNA, 18 nt, Human adenovirus E
cuuuugguucucugcuac

SEQ ID NO: 1579740 - RNA, 14 nt, Human adenovirus E
cagccaccuccuga

SEQ ID NO: 1579741 - RNA, 17 nt, Human adenovirus E
aagcgcggaaagcggcc

SEQ ID NO: 1579742 - RNA, 16 nt, Human adenovirus E
ccucggcgggggagaa

SEQ ID NO: 1579743 - RNA, 19 nt, Human adenovirus E
gcgucguuguuggccagcu

SEQ ID NO: 1579744 - RNA, 15 nt, Human adenovirus E
ugccccggggccagg

SEQ ID NO: 1579745 - RNA, 14 nt, Human adenovirus E
cgccgcccuggugu

SEQ ID NO: 1579746 - RNA, 21 nt, Human adenovirus E
aguuagcugaucuguagaaaa

SEQ ID NO: 1579747 - RNA, 14 nt, Human adenovirus E
aggagcuccuggag

SEQ ID NO: 1579748 - RNA, 17 nt, Human adenovirus E
cacgaggaggagcuggc

SEQ ID NO: 1579749 - RNA, 20 nt, Human adenovirus E
ccuguccacccgcucucugc

SEQ ID NO: 1579750 - RNA, 19 nt, Human adenovirus E
cgaggagccccgggcccag

SEQ ID NO: 1579751 - RNA, 18 nt, Human adenovirus E
gcagaaggggggcagggg

SEQ ID NO: 1579752 - RNA, 22 nt, Human adenovirus E
cgcgaggccaucggccaggcgc

SEQ ID NO: 1579753 - RNA, 17 nt, Human adenovirus E
ucgagggucuccuggau

SEQ ID NO: 1579754 - RNA, 23 nt, Human adenovirus E
gaugcgcugcucgaccgcaccga

SEQ ID NO: 1579755 - RNA, 22 nt, Human adenovirus E
gguuuaaaauuugaagauggag

SEQ ID NO: 1579756 - RNA, 15 nt, Human adenovirus E
cuccuagggaggaac

SEQ ID NO: 1579757 - RNA, 21 nt, Human adenovirus E
gcaccugugggaccugcugga

SEQ ID NO: 1579758 - RNA, 14 nt, Human adenovirus E
gcaugcggggggag

SEQ ID NO: 1579759 - RNA, 23 nt, Human adenovirus E
gcucgucugccguagucuggaga

SEQ ID NO: 1579760 - RNA, 23 nt, Human adenovirus E
ggucgagcgcgagcaaggacaga

SEQ ID NO: 1579761 - RNA, 20 nt, Human adenovirus E
cgugcgcgaggccguggccc

SEQ ID NO: 1579762 - RNA, 22 nt, Human adenovirus E
cggugaggagcucaaccccggc

SEQ ID NO: 1579763 - RNA, 23 nt, Human adenovirus E
ggaggcagaggaggagguggaag

SEQ ID NO: 1579764 - RNA, 18 nt, Human adenovirus E
cagucucaaguccagcaa

SEQ ID NO: 1579765 - RNA, 20 nt, Human adenovirus E
ggcgcagggcaugguguugc

SEQ ID NO: 1579766 - RNA, 21 nt, Human adenovirus E
cgccgcucgccgucgccgcac

SEQ ID NO: 1579767 - RNA, 17 nt, Human adenovirus E
gaugccuuucaagagcc

SEQ ID NO: 1579768 - RNA, 19 nt, Human adenovirus E
guacucuucgagggggaac

SEQ ID NO: 1579769 - RNA, 20 nt, Human adenovirus E
cgccgcuguggagccacugc

SEQ ID NO: 1579770 - RNA, 22 nt, Human adenovirus E
gacgaggauuucgaggcggacg

SEQ ID NO: 1579771 - RNA, 12 nt, Human adenovirus E
ucaggcagcacc

SEQ ID NO: 1579772 - RNA, 18 nt, Human adenovirus E
caauuauauaugcaaugg

SEQ ID NO: 1579773 - RNA, 16 nt, Human adenovirus E
cccacggagcccaugg

SEQ ID NO: 1579774 - RNA, 14 nt, Human adenovirus E
cgaggaggaggcag

SEQ ID NO: 1579775 - RNA, 20 nt, Human adenovirus E
gucgcccaucuccgaggacg

SEQ ID NO: 1579776 - RNA, 20 nt, Human adenovirus E
uggcaguuacaccugcccug

SEQ ID NO: 1579777 - RNA, 16 nt, Human adenovirus E
ggagaaggaggagagc

SEQ ID NO: 1579778 - RNA, 19 nt, Human adenovirus E
gguggcacgacaggcagcg

SEQ ID NO: 1579779 - RNA, 22 nt, Human adenovirus E
cgcugcccguucucgcucgcca

SEQ ID NO: 1579780 - RNA, 16 nt, Human adenovirus E
cacgaccgccgcggcc

SEQ ID NO: 1579781 - RNA, 14 nt, Human adenovirus E
gaugccgggcagga

SEQ ID NO: 1579782 - RNA, 19 nt, Human adenovirus E
acgccuuacauguggagcu

SEQ ID NO: 1579783 - RNA, 18 nt, Human adenovirus E
agacaugcaagagaugga

SEQ ID NO: 1579784 - RNA, 14 nt, Human adenovirus E
cgcggagacccugc

SEQ ID NO: 1579785 - RNA, 13 nt, Human adenovirus E
cccuggccaccua

SEQ ID NO: 1579786 - RNA, 15 nt, Human adenovirus E
cacagccuugaacau

SEQ ID NO: 1579787 - RNA, 22 nt, Human adenovirus E
cagccgccuggacccggugccg

SEQ ID NO: 1579788 - RNA, 22 nt, Human adenovirus E
ggcauucuuaagcacacccuca

SEQ ID NO: 1579789 - RNA, 23 nt, Human adenovirus E
gauuucgaggcggacgagcugac

SEQ ID NO: 1579790 - RNA, 20 nt, Human adenovirus E
cggagcacgaggaggagcug

SEQ ID NO: 1579791 - RNA, 17 nt, Human adenovirus E
guccaccuuuuccaggg

SEQ ID NO: 1579792 - RNA, 18 nt, Human adenovirus E
cgggugauggucucccgc

SEQ ID NO: 1579793 - RNA, 22 nt, Human adenovirus E
cucccgguaccacaucacccuc

SEQ ID NO: 1579794 - RNA, 19 nt, Human adenovirus E
ccuggccaccuaccacauc

SEQ ID NO: 1579795 - RNA, 15 nt, Human adenovirus E
gcagucaggcagagg

SEQ ID NO: 1579796 - RNA, 24 nt, Human adenovirus E
gaguuaaucuuaccauugucaaug

SEQ ID NO: 1579797 - RNA, 15 nt, Human adenovirus E
cucaucaaguuucaa

SEQ ID NO: 1579798 - RNA, 17 nt, Human adenovirus E
ucucagccaaucagcgc

SEQ ID NO: 1579799 - RNA, 20 nt, Human adenovirus E
cggacgauuggacccaggcc

SEQ ID NO: 1579800 - RNA, 13 nt, Human adenovirus E
ggccauccuggag

SEQ ID NO: 1579801 - RNA, 13 nt, Human adenovirus E
ccugacacaccac

SEQ ID NO: 1579802 - RNA, 17 nt, Human adenovirus E
cgaugaaguaaaugcaa

SEQ ID NO: 1579803 - RNA, 18 nt, Human adenovirus E
cugugggaccugcuggag

SEQ ID NO: 1579804 - RNA, 17 nt, Human adenovirus E
ggccugcaacccccagc

SEQ ID NO: 1579805 - RNA, 22 nt, Human adenovirus E
gaacgcuccggaauccugcccg

SEQ ID NO: 1579806 - RNA, 21 nt, Human adenovirus E
uagccgccuccacccaucauc

SEQ ID NO: 1579807 - RNA, 21 nt, Human adenovirus E
augugacgcccgcggagcacg

SEQ ID NO: 1579808 - RNA, 19 nt, Human adenovirus E
cuguggggcgugcaggccc

SEQ ID NO: 1579809 - RNA, 23 nt, Human adenovirus E
gagccggcgcaaacccgggagcu

SEQ ID NO: 1579810 - RNA, 23 nt, Human adenovirus E
gagcgcucgcgguggggcggcca

SEQ ID NO: 1579811 - RNA, 18 nt, Human adenovirus E
cgcgcaucuccagguggc

SEQ ID NO: 1579812 - RNA, 16 nt, Human adenovirus E
cggauaccaucuccgc

SEQ ID NO: 1579813 - RNA, 20 nt, Human adenovirus E
uacuugcuguagcagaaccu

SEQ ID NO: 1579814 - RNA, 19 nt, Human adenovirus E
gcacccuuguacgauacca

SEQ ID NO: 1579815 - RNA, 14 nt, Human adenovirus E
ccacucucucagac

SEQ ID NO: 1579816 - RNA, 23 nt, Human adenovirus E
auggcggcggcggcgaugcagcc

SEQ ID NO: 1579817 - RNA, 22 nt, Human adenovirus E
ggcccgguuguugaugaccugg

SEQ ID NO: 1579818 - RNA, 20 nt, Human adenovirus E
cgcgguggggcggccagcug

SEQ ID NO: 1579819 - RNA, 14 nt, Human adenovirus E
cgccagcuccuccu

SEQ ID NO: 1579820 - RNA, 17 nt, Human adenovirus E
cagggcaugggaugggu

SEQ ID NO: 1579821 - RNA, 14 nt, Human adenovirus E
gguggucaugcuga

SEQ ID NO: 1579822 - RNA, 17 nt, Human adenovirus E
guccuggcgggggcaca

SEQ ID NO: 1579823 - RNA, 21 nt, Human adenovirus E
cggugagcgccagcaggcggc

SEQ ID NO: 1579824 - RNA, 19 nt, Human adenovirus E
cucgccgcgcgugcccccc

SEQ ID NO: 1579825 - RNA, 18 nt, Human adenovirus E
gugcccgugcgcacccgc

SEQ ID NO: 1579826 - RNA, 16 nt, Human adenovirus E
accauggaggugcaga

SEQ ID NO: 1579827 - RNA, 24 nt, Human adenovirus E
gacggccuuguaggcgcagcagcc

SEQ ID NO: 1579828 - RNA, 16 nt, Human adenovirus E
caggcgauggcggcgg

SEQ ID NO: 1579829 - RNA, 14 nt, Human adenovirus E
caggcggcaguggu

SEQ ID NO: 1579830 - RNA, 16 nt, Human adenovirus E
acagcacucaggcaga

SEQ ID NO: 1579831 - RNA, 21 nt, Human adenovirus E
gcccaucauguacgccagcaa

SEQ ID NO: 1579832 - RNA, 17 nt, Human adenovirus E
cgcugcagagccagccg

SEQ ID NO: 1579833 - RNA, 19 nt, Human adenovirus E
caucuggcccggcaggcca

SEQ ID NO: 1579834 - RNA, 20 nt, Human adenovirus E
ccuuccaggaaggcuuccag

SEQ ID NO: 1579835 - RNA, 20 nt, Human adenovirus E
gugacacacucaaaaaaaua

SEQ ID NO: 1579836 - RNA, 17 nt, Human adenovirus E
cccaggacuacuccacc

SEQ ID NO: 1579837 - RNA, 16 nt, Human adenovirus E
gggacucccucagcau

SEQ ID NO: 1579838 - RNA, 15 nt, Human adenovirus E
uccgggccggacuac

SEQ ID NO: 1579839 - RNA, 12 nt, Human adenovirus E
cgcucccugggg

SEQ ID NO: 1579840 - RNA, 14 nt, Human adenovirus E
agauggaggaagac

SEQ ID NO: 1579841 - RNA, 16 nt, Human adenovirus E
caggcgggacagagga

SEQ ID NO: 1579842 - RNA, 12 nt, Human adenovirus E
gcacacagcuca

SEQ ID NO: 1579843 - RNA, 13 nt, Human adenovirus E
gccccuuguggaa

SEQ ID NO: 1579844 - RNA, 18 nt, Human adenovirus E
aagagccuuucggugcga

SEQ ID NO: 1579845 - RNA, 20 nt, Human adenovirus E
aacucuuauaccuucucaua

SEQ ID NO: 1579846 - RNA, 16 nt, Human adenovirus E
aggggggcaaugugac

SEQ ID NO: 1579847 - RNA, 16 nt, Human adenovirus E
cuggcccggcaggcca

SEQ ID NO: 1579848 - RNA, 21 nt, Human adenovirus E
ugcgcuccuggacgcugcuca

SEQ ID NO: 1579849 - RNA, 22 nt, Human adenovirus E
cuggagcgacaucggcaccagc

SEQ ID NO: 1579850 - RNA, 15 nt, Human adenovirus E
gcuggcgcgcacgua

SEQ ID NO: 1579851 - RNA, 12 nt, Human adenovirus E
cgcgcaccaccg

SEQ ID NO: 1579852 - RNA, 20 nt, Human adenovirus E
acaaccacaaaaacuacacc

SEQ ID NO: 1579853 - RNA, 20 nt, Human adenovirus E
gacggccuuguaggcgcagc

SEQ ID NO: 1579854 - RNA, 20 nt, Human adenovirus E
ccugcucgagugccacugcc

SEQ ID NO: 1579855 - RNA, 20 nt, Human adenovirus E
ggccugcgucaucacccagg

SEQ ID NO: 1579856 - RNA, 22 nt, Human adenovirus E
cugcuucggaucuucagccagc

SEQ ID NO: 1579857 - RNA, 15 nt, Human adenovirus E
gcaacauccccgcgc

SEQ ID NO: 1579858 - RNA, 18 nt, Human adenovirus E
uaugcagggugaugaggu

SEQ ID NO: 1579859 - RNA, 24 nt, Human adenovirus E
gagaaggaacucuucgcgguccuu

SEQ ID NO: 1579860 - RNA, 18 nt, Human adenovirus E
gccacuacccggacgagu

SEQ ID NO: 1579861 - RNA, 19 nt, Human adenovirus E
uggccuuggaagagggcga

SEQ ID NO: 1579862 - RNA, 23 nt, Human adenovirus E
cuccggcaccgcuuccaagcgcu

SEQ ID NO: 1579863 - RNA, 20 nt, Human adenovirus E
cagcuuggcgacgagcucgg

SEQ ID NO: 1579864 - RNA, 17 nt, Human adenovirus E
auuuuaaugaaucagau

SEQ ID NO: 1579865 - RNA, 13 nt, Human adenovirus E
uugaacaugcagc

SEQ ID NO: 1579866 - RNA, 22 nt, Human adenovirus E
ggccucuguuaaauuuuugcuu

SEQ ID NO: 1579867 - RNA, 12 nt, Human adenovirus E
cauuggugaugg

SEQ ID NO: 1579868 - RNA, 16 nt, Human adenovirus E
ugcuccgcgcugcccu

SEQ ID NO: 1579869 - RNA, 15 nt, Human adenovirus E
acaaagccucagcgu

SEQ ID NO: 1579870 - RNA, 18 nt, Human adenovirus E
cagcagaaaaccagcagc

SEQ ID NO: 1579871 - RNA, 22 nt, Human adenovirus E
gccccgucguuuccaagacccc

SEQ ID NO: 1579872 - RNA, 18 nt, Human adenovirus E
gccuggccaacuaccugg

SEQ ID NO: 1579873 - RNA, 16 nt, Human adenovirus E
aacuugcagggccugu

SEQ ID NO: 1579874 - RNA, 21 nt, Human adenovirus E
cauccagaaacaagacaauag

SEQ ID NO: 1579875 - RNA, 18 nt, Human adenovirus E
agcugauggugcccaagc

SEQ ID NO: 1579876 - RNA, 16 nt, Human adenovirus E
ccucaagcccgugacc

SEQ ID NO: 1579877 - RNA, 13 nt, Human adenovirus E
uguggacagcagc

SEQ ID NO: 1579878 - RNA, 13 nt, Human adenovirus E
uggugaaggagga

SEQ ID NO: 1579879 - RNA, 19 nt, Human adenovirus E
guucgcucaccugcgcccc

SEQ ID NO: 1579880 - RNA, 19 nt, Human adenovirus E
ugcccccgccccagcagca

SEQ ID NO: 1579881 - RNA, 21 nt, Human adenovirus E
uggcgacgagcucggcgguga

SEQ ID NO: 1579882 - RNA, 15 nt, Human adenovirus E
uuaacgcgcacaaaa

SEQ ID NO: 1579883 - RNA, 16 nt, Human adenovirus E
ucgagggucugggcag

SEQ ID NO: 1579884 - RNA, 23 nt, Human adenovirus E
cccugcgacuggccgaccccguc

SEQ ID NO: 1579885 - RNA, 22 nt, Human adenovirus E
gccucgcugaacuaccagaacg

SEQ ID NO: 1579886 - RNA, 16 nt, Human adenovirus E
ccggcggcgcgugcag

SEQ ID NO: 1579887 - RNA, 20 nt, Human adenovirus E
gugaaggggugcgcgccggg

SEQ ID NO: 1579888 - RNA, 16 nt, Human adenovirus E
gaucucuugcacgucc

SEQ ID NO: 1579889 - RNA, 16 nt, Human adenovirus E
cugccgcccuggugcg

SEQ ID NO: 1579890 - RNA, 14 nt, Human adenovirus E
acgucguggugguc

SEQ ID NO: 1579891 - RNA, 22 nt, Human adenovirus E
ccacugccgcugcaaccucugc

SEQ ID NO: 1579892 - RNA, 20 nt, Human adenovirus E
  misc_feature (9)..(9): n is a, c, g, or u
ccccgggcnugggcgugcag

SEQ ID NO: 1579893 - RNA, 13 nt, Human adenovirus E
cuggaccugguga

SEQ ID NO: 1579894 - RNA, 21 nt, Human adenovirus E
cagaagagcggcggugggaau

SEQ ID NO: 1579895 - RNA, 11 nt, Human adenovirus E
ugagcaccaca

SEQ ID NO: 1579896 - RNA, 12 nt, Human adenovirus E
gaugcaggggcg

SEQ ID NO: 1579897 - RNA, 11 nt, Human adenovirus E
ucguaccuggg

SEQ ID NO: 1579898 - RNA, 15 nt, Human adenovirus E
uccugcguuacgugc

SEQ ID NO: 1579899 - RNA, 19 nt, Human adenovirus E
gacagcgaaccccgcagaa

SEQ ID NO: 1579900 - RNA, 20 nt, Human adenovirus E
cgaggaggagcuggcagugc

SEQ ID NO: 1579901 - RNA, 16 nt, Human adenovirus E
gcccccgccccagcag

SEQ ID NO: 1579902 - RNA, 14 nt, Human adenovirus E
gugcccgaggccgc

SEQ ID NO: 1579903 - RNA, 14 nt, Human adenovirus E
gggucggagagcga

SEQ ID NO: 1579904 - RNA, 19 nt, Human adenovirus E
ugcccaagcagaaccuguu

SEQ ID NO: 1579905 - RNA, 14 nt, Human adenovirus E
gaguuuggaagcag

SEQ ID NO: 1579906 - RNA, 13 nt, Human adenovirus E
ggagacucagcca

SEQ ID NO: 1579907 - RNA, 17 nt, Human adenovirus E
cuucccaccccacucug

SEQ ID NO: 1579908 - RNA, 21 nt, Human adenovirus E
acgugagccgcgcccugggcc

SEQ ID NO: 1579909 - RNA, 20 nt, Human adenovirus E
caccgggugauccuccacca

SEQ ID NO: 1579910 - RNA, 13 nt, Human adenovirus E
aauaacagccagg

SEQ ID NO: 1579911 - RNA, 13 nt, Human adenovirus E
agagccggcggcg

SEQ ID NO: 1579912 - RNA, 18 nt, Human adenovirus E
caagaaguaccucaccug

SEQ ID NO: 1579913 - RNA, 14 nt, Human adenovirus E
cuaccucugccaca

SEQ ID NO: 1579914 - RNA, 20 nt, Human adenovirus E
gucuaccucuaccucugcca

SEQ ID NO: 1579915 - RNA, 17 nt, Human adenovirus E
  misc_feature (7)..(7): n is a, c, g, or u
gcagccnuucuccacgg

SEQ ID NO: 1579916 - RNA, 19 nt, Human adenovirus E
ggcgauguugagcugcacg

SEQ ID NO: 1579917 - RNA, 23 nt, Human adenovirus E
ggcgcccugcgcgucggccaggu

SEQ ID NO: 1579918 - RNA, 20 nt, Human adenovirus E
aguacaguuagucucuccac

SEQ ID NO: 1579919 - RNA, 21 nt, Human adenovirus E
caucccuucgagaucagguuc

SEQ ID NO: 1579920 - RNA, 12 nt, Human adenovirus E
ccaucacagaga

SEQ ID NO: 1579921 - RNA, 18 nt, Human adenovirus E
cagggggccacgagccgg

SEQ ID NO: 1579922 - RNA, 19 nt, Human adenovirus E
ccaugguggcgcagcugac

SEQ ID NO: 1579923 - RNA, 13 nt, Human adenovirus E
cgugcggugagcg

SEQ ID NO: 1579924 - RNA, 18 nt, Human adenovirus E
cuuugugcccgcccaggu

SEQ ID NO: 1579925 - RNA, 20 nt, Human adenovirus E
gggccuguggggcgugcagg

SEQ ID NO: 1579926 - RNA, 14 nt, Human adenovirus E
gcaagaccaccacu

SEQ ID NO: 1579927 - RNA, 16 nt, Human adenovirus E
ggaugcacgugcugca

SEQ ID NO: 1579928 - RNA, 18 nt, Human adenovirus E
uaccucgacccccagacc

SEQ ID NO: 1579929 - RNA, 15 nt, Human adenovirus E
ucucuaauuccucaa

SEQ ID NO: 1579930 - RNA, 22 nt, Human adenovirus E
guacacauacaaagccucagcg

SEQ ID NO: 1579931 - RNA, 16 nt, Human adenovirus E
uacucacaccacacac

SEQ ID NO: 1579932 - RNA, 20 nt, Human adenovirus E
cccccaaagucaugagcgcg

SEQ ID NO: 1579933 - RNA, 15 nt, Human adenovirus E
gcaagagauggagga

SEQ ID NO: 1579934 - RNA, 15 nt, Human adenovirus E
ugcucaugcaucucu

SEQ ID NO: 1579935 - RNA, 15 nt, Human adenovirus E
gacgccaucagcgag

SEQ ID NO: 1579936 - RNA, 18 nt, Human adenovirus E
acgauuggacccaggcca

SEQ ID NO: 1579937 - RNA, 12 nt, Human adenovirus E
agagcggcgcaa

SEQ ID NO: 1579938 - RNA, 22 nt, Human adenovirus E
gacagcagcguguucucccccc

SEQ ID NO: 1579939 - RNA, 22 nt, Human adenovirus E
gucugcccgcaggcgggacaga

SEQ ID NO: 1579940 - RNA, 22 nt, Human adenovirus E
ggcagcagugucuggaggagca

SEQ ID NO: 1579941 - RNA, 18 nt, Human adenovirus E
cgcccagguuuuccaugc

SEQ ID NO: 1579942 - RNA, 19 nt, Human adenovirus E
gaucccauuugagcuggag

SEQ ID NO: 1579943 - RNA, 17 nt, Human adenovirus E
gaacuugcagggccugu

SEQ ID NO: 1579944 - RNA, 19 nt, Human adenovirus E
gaagcugaaaguggagcug

SEQ ID NO: 1579945 - RNA, 18 nt, Human adenovirus E
cggggugucggggaagga

SEQ ID NO: 1579946 - RNA, 20 nt, Human adenovirus E
ucgccaaccucgccaucugc

SEQ ID NO: 1579947 - RNA, 21 nt, Human adenovirus E
caagucuacuggucgcugccc

SEQ ID NO: 1579948 - RNA, 24 nt, Human adenovirus E
agaucaaaccgcagcagaggaggc

SEQ ID NO: 1579949 - RNA, 18 nt, Human adenovirus E
gaacgccugcugggccuu

SEQ ID NO: 1579950 - RNA, 14 nt, Human adenovirus E
agacaguucauuug

SEQ ID NO: 1579951 - RNA, 20 nt, Human adenovirus E
cagucauagcaggggcgcag

SEQ ID NO: 1579952 - RNA, 14 nt, Human adenovirus E
ccccaccaugcagc

SEQ ID NO: 1579953 - RNA, 21 nt, Human adenovirus E
cgggcacgauucugaccugcc

SEQ ID NO: 1579954 - RNA, 23 nt, Human adenovirus E
cugcaggccccggcgggcugcaa

SEQ ID NO: 1579955 - RNA, 15 nt, Human adenovirus E
ggagauggaggaaga

SEQ ID NO: 1579956 - RNA, 16 nt, Human adenovirus E
ugagcuccucccucag

SEQ ID NO: 1579957 - RNA, 13 nt, Human adenovirus E
ccggagcagcugg

SEQ ID NO: 1579958 - RNA, 21 nt, Human adenovirus E
gaagaacucaagggucugugg

SEQ ID NO: 1579959 - RNA, 20 nt, Human adenovirus E
ugggcacgcacccgggcuug

SEQ ID NO: 1579960 - RNA, 13 nt, Human adenovirus E
agcuccagcucca

SEQ ID NO: 1579961 - RNA, 14 nt, Human adenovirus E
ccagcugcaccacg

SEQ ID NO: 1579962 - RNA, 18 nt, Human adenovirus E
auccgcccaaggccgagc

SEQ ID NO: 1579963 - RNA, 15 nt, Human adenovirus E
ggagagcaugagcac

SEQ ID NO: 1579964 - RNA, 22 nt, Human adenovirus E
cgcggcgaacgagccggcgcaa

SEQ ID NO: 1579965 - RNA, 20 nt, Human adenovirus E
aagaucuucgagggucuggg

SEQ ID NO: 1579966 - RNA, 23 nt, Human adenovirus E
acuccccucuucccagcucuggu

SEQ ID NO: 1579967 - RNA, 21 nt, Human adenovirus E
ccgaagccuuuagacagcagc

SEQ ID NO: 1579968 - RNA, 14 nt, Human adenovirus E
agcggggcuggaca

SEQ ID NO: 1579969 - RNA, 15 nt, Human adenovirus E
ccuggucgagcgcga

SEQ ID NO: 1579970 - RNA, 13 nt, Human adenovirus E
cuccuggaccugg

SEQ ID NO: 1579971 - RNA, 16 nt, Human adenovirus E
cagaugggccuggccg

SEQ ID NO: 1579972 - RNA, 20 nt, Human adenovirus E
acgcgucaaguuagcaacua

SEQ ID NO: 1579973 - RNA, 15 nt, Human adenovirus E
cagggacucccucag

SEQ ID NO: 1579974 - RNA, 13 nt, Human adenovirus E
aaggaggugaaga

SEQ ID NO: 1579975 - RNA, 16 nt, Human adenovirus E
ggcgcgcaggccggag

SEQ ID NO: 1579976 - RNA, 20 nt, Human adenovirus E
uccgucaagcugcugcucag

SEQ ID NO: 1579977 - RNA, 20 nt, Human adenovirus E
gauggugaagaugccgggca

SEQ ID NO: 1579978 - RNA, 22 nt, Human adenovirus E
cuuccgcgucaguugcagggcg

SEQ ID NO: 1579979 - RNA, 18 nt, Human adenovirus E
gagggucugggcagcgac

SEQ ID NO: 1579980 - RNA, 19 nt, Human adenovirus E
  misc_feature (6)..(6): n is a, c, g, or u
uuccunuacaccaaucagu

SEQ ID NO: 1579981 - RNA, 15 nt, Human adenovirus E
gaaaccgaaaguaag

SEQ ID NO: 1579982 - RNA, 14 nt, Human adenovirus E
gcgcuccuggaugu

SEQ ID NO: 1579983 - RNA, 12 nt, Human adenovirus E
cagggcccggcc

SEQ ID NO: 1579984 - RNA, 14 nt, Human adenovirus E
gaacuugcagggcc

SEQ ID NO: 1579985 - RNA, 19 nt, Human adenovirus E
cccaugguggcgcagcuga

SEQ ID NO: 1579986 - RNA, 22 nt, Human adenovirus E
agcccgcgcgggaggcaggucc

SEQ ID NO: 1579987 - RNA, 13 nt, Human adenovirus E
uucccacuccccu

SEQ ID NO: 1579988 - RNA, 19 nt, Human adenovirus E
cgcaugaccaccugggcga

SEQ ID NO: 1579989 - RNA, 14 nt, Human adenovirus E
ccgcgucagggugg

SEQ ID NO: 1579990 - RNA, 19 nt, Human adenovirus E
agggggcgauccuggccca

SEQ ID NO: 1579991 - RNA, 19 nt, Human adenovirus E
gcugaucguguucgcgacc

SEQ ID NO: 1579992 - RNA, 12 nt, Human adenovirus E
gacgcuccuggu

SEQ ID NO: 1579993 - RNA, 22 nt, Human adenovirus E
agagcuucuucaacgagcaggc

SEQ ID NO: 1579994 - RNA, 17 nt, Human adenovirus E
agguggacgaggagggc

SEQ ID NO: 1579995 - RNA, 15 nt, Human adenovirus E
acgggacgcagggcc

SEQ ID NO: 1579996 - RNA, 16 nt, Human adenovirus E
ccaagcgccagcccaa

SEQ ID NO: 1579997 - RNA, 22 nt, Human adenovirus E
acgugagccgcgcccugggcca

SEQ ID NO: 1579998 - RNA, 13 nt, Human adenovirus E
uguggagccacug

SEQ ID NO: 1579999 - RNA, 19 nt, Human adenovirus E
ccaaccgcacccgcgccga

SEQ ID NO: 1580000 - RNA, 15 nt, Human adenovirus E
cagcaaagcccccga

SEQ ID NO: 1580001 - RNA, 16 nt, Human adenovirus E
ccuuccaggaaggcuu

SEQ ID NO: 1580002 - RNA, 17 nt, Human adenovirus E
ugcugcacgagcuguac

SEQ ID NO: 1580003 - RNA, 14 nt, Human adenovirus E
cgaccacagcaacu

SEQ ID NO: 1580004 - RNA, 16 nt, Human adenovirus E
uuacuacggccccugg

SEQ ID NO: 1580005 - RNA, 19 nt, Human adenovirus E
ccucuccccccgcacagcc

SEQ ID NO: 1580006 - RNA, 16 nt, Human adenovirus E
gugacccugggccuga

SEQ ID NO: 1580007 - RNA, 14 nt, Human adenovirus E
cgguguugcuuucg

SEQ ID NO: 1580008 - RNA, 21 nt, Human adenovirus E
aacuguaaguacucuuucaua

SEQ ID NO: 1580009 - RNA, 18 nt, Human adenovirus E
cucugguacugcaggccc

SEQ ID NO: 1580010 - RNA, 16 nt, Human adenovirus E
ggcgucgucgccggag

SEQ ID NO: 1580011 - RNA, 20 nt, Human adenovirus E
ggacaagauaaacaccgccu

SEQ ID NO: 1580012 - RNA, 20 nt, Human adenovirus E
gaagggcgugcgcuccugga

SEQ ID NO: 1580013 - RNA, 17 nt, Human adenovirus E
gcaagacagucuggagg

SEQ ID NO: 1580014 - RNA, 16 nt, Human adenovirus E
acuuccuccgcggccg

SEQ ID NO: 1580015 - RNA, 21 nt, Human adenovirus E
ggccgccgugagcggggcugg

SEQ ID NO: 1580016 - RNA, 19 nt, Human adenovirus E
ggcugaaaccgaaaguaag

SEQ ID NO: 1580017 - RNA, 17 nt, Human adenovirus E
acagucuggaggaagac

SEQ ID NO: 1580018 - RNA, 21 nt, Human adenovirus E
gugaacgaguucauguacagc

SEQ ID NO: 1580019 - RNA, 16 nt, Human adenovirus E
gcggcgcgccaucagc

SEQ ID NO: 1580020 - RNA, 17 nt, Human adenovirus E
gugccucuuccaugguu

SEQ ID NO: 1580021 - RNA, 18 nt, Human adenovirus E
agcugaaguaugaauggg

SEQ ID NO: 1580022 - RNA, 18 nt, Human adenovirus E
cagcggcgagggccugcu

SEQ ID NO: 1580023 - RNA, 17 nt, Human adenovirus E
cccacauuacacagaca

SEQ ID NO: 1580024 - RNA, 14 nt, Human adenovirus E
gcagggcgcccagc

SEQ ID NO: 1580025 - RNA, 15 nt, Human adenovirus E
cgggcgcgcaugacc

SEQ ID NO: 1580026 - RNA, 16 nt, Human adenovirus E
ggcagcaccgggugau

SEQ ID NO: 1580027 - RNA, 20 nt, Human adenovirus E
cccucagcguggaggagcuc

SEQ ID NO: 1580028 - RNA, 22 nt, Human adenovirus E
gcgaugggcccgugggcggcgg

SEQ ID NO: 1580029 - RNA, 22 nt, Human adenovirus E
acguggccgcggccaaccuggu

SEQ ID NO: 1580030 - RNA, 14 nt, Human adenovirus E
ggacagcggcagca

SEQ ID NO: 1580031 - RNA, 21 nt, Human adenovirus E
ggccugaugcaccugugggac

SEQ ID NO: 1580032 - RNA, 17 nt, Human adenovirus E
gaucccauacuccaccu

SEQ ID NO: 1580033 - RNA, 17 nt, Human adenovirus E
accauugucaaugccac

SEQ ID NO: 1580034 - RNA, 13 nt, Human adenovirus E
ugcaggucugccu

SEQ ID NO: 1580035 - RNA, 19 nt, Human adenovirus E
gaucccauacuccaccucc

SEQ ID NO: 1580036 - RNA, 14 nt, Human adenovirus E
caagagauggagga

SEQ ID NO: 1580037 - RNA, 15 nt, Human adenovirus E
gaacacgcugcccac

SEQ ID NO: 1580038 - RNA, 12 nt, Human adenovirus E
guccuuccaggg

SEQ ID NO: 1580039 - RNA, 16 nt, Human adenovirus E
cucgaucuccuccucu

SEQ ID NO: 1580040 - RNA, 13 nt, Human adenovirus E
auuuacacuggca

SEQ ID NO: 1580041 - RNA, 14 nt, Human adenovirus E
gcgccaccaccccc

SEQ ID NO: 1580042 - RNA, 17 nt, Human adenovirus E
agaacagccagagcagg

SEQ ID NO: 1580043 - RNA, 13 nt, Human adenovirus E
gcgggggagauga

SEQ ID NO: 1580044 - RNA, 23 nt, Human adenovirus E
cauugccaaaugcaagacugcua

SEQ ID NO: 1580045 - RNA, 24 nt, Human adenovirus E
cacucuuaaagaguagcccgcgcc

SEQ ID NO: 1580046 - RNA, 19 nt, Human adenovirus E
gcgggcacuuccgcgcucc

SEQ ID NO: 1580047 - RNA, 22 nt, Human adenovirus E
agcuugccauucgcgcacggcc

SEQ ID NO: 1580048 - RNA, 16 nt, Human adenovirus E
cagccccaggccaacc

SEQ ID NO: 1580049 - RNA, 16 nt, Human adenovirus E
cugaccggggccggga

SEQ ID NO: 1580050 - RNA, 12 nt, Human adenovirus E
gcgcgcuaccac

SEQ ID NO: 1580051 - RNA, 23 nt, Human adenovirus E
agccguugauguuguggcccacg

SEQ ID NO: 1580052 - RNA, 20 nt, Human adenovirus E
caugaccaucgaccugauga

SEQ ID NO: 1580053 - RNA, 13 nt, Human adenovirus E
ucaggcgccagcg

SEQ ID NO: 1580054 - RNA, 18 nt, Human adenovirus E
cuaggacguccagagcgc

SEQ ID NO: 1580055 - RNA, 16 nt, Human adenovirus E
cuacugaacucugugg

SEQ ID NO: 1580056 - RNA, 15 nt, Human adenovirus E
ucacaccacacacac

SEQ ID NO: 1580057 - RNA, 18 nt, Human adenovirus E
auggcgagggggagcgcg

SEQ ID NO: 1580058 - RNA, 15 nt, Human adenovirus E
ggcguguggcagcag

SEQ ID NO: 1580059 - RNA, 22 nt, Human adenovirus E
gagggugcugaaaacaccaccu

SEQ ID NO: 1580060 - RNA, 17 nt, Human adenovirus E
ccuucucuagcaccgcc

SEQ ID NO: 1580061 - RNA, 13 nt, Human adenovirus E
accaugcuagccu

SEQ ID NO: 1580062 - RNA, 17 nt, Human adenovirus E
agccuacaacuauggcg

SEQ ID NO: 1580063 - RNA, 18 nt, Human adenovirus E
gugaagaccgcguaguug

SEQ ID NO: 1580064 - RNA, 13 nt, Human adenovirus E
gcaucugcugcug

SEQ ID NO: 1580065 - RNA, 16 nt, Human adenovirus E
ccccggggccaggagg

SEQ ID NO: 1580066 - RNA, 18 nt, Human adenovirus E
cagucuggaggaagacga

SEQ ID NO: 1580067 - RNA, 21 nt, Human adenovirus E
gcauguucauuuuugcuugcu

SEQ ID NO: 1580068 - RNA, 21 nt, Human adenovirus E
cgcagcagcgagcugggcagg

SEQ ID NO: 1580069 - RNA, 12 nt, Human adenovirus E
cggggcagaagc

SEQ ID NO: 1580070 - RNA, 17 nt, Human adenovirus E
caucggcacucuccagu

SEQ ID NO: 1580071 - RNA, 18 nt, Human adenovirus E
acgugcccaagcagaacc

SEQ ID NO: 1580072 - RNA, 14 nt, Human adenovirus E
cacaaaauucucag

SEQ ID NO: 1580073 - RNA, 11 nt, Human adenovirus E
cagaaguuuca

SEQ ID NO: 1580074 - RNA, 14 nt, Human adenovirus E
cugcagagccagcc

SEQ ID NO: 1580075 - RNA, 21 nt, Human adenovirus E
uacacauacaaagccucagcg

SEQ ID NO: 1580076 - RNA, 23 nt, Human adenovirus E
cggguucgugcgccaggccugca

SEQ ID NO: 1580077 - RNA, 15 nt, Human adenovirus E
augagcaccacagcg

SEQ ID NO: 1580078 - RNA, 18 nt, Human adenovirus E
caguuauuuuuccuccac

SEQ ID NO: 1580079 - RNA, 23 nt, Human adenovirus E
uggacuacuugcaucgggcggcc

SEQ ID NO: 1580080 - RNA, 15 nt, Human adenovirus E
guccucgcagccccg

SEQ ID NO: 1580081 - RNA, 23 nt, Human adenovirus E
cagcagagucgggggcaggagca

SEQ ID NO: 1580082 - RNA, 15 nt, Human adenovirus E
ugccccagggcaugg

SEQ ID NO: 1580083 - RNA, 22 nt, Human adenovirus E
uccugcguuacgugcagcagaa

SEQ ID NO: 1580084 - RNA, 21 nt, Human adenovirus E
gcccagucggcgagauggggg

SEQ ID NO: 1580085 - RNA, 18 nt, Human adenovirus E
gccagcugcaccacgcug

SEQ ID NO: 1580086 - RNA, 18 nt, Human adenovirus E
cacgggacgcagggccau

SEQ ID NO: 1580087 - RNA, 19 nt, Human adenovirus E
cagcaucaucugggccugg

SEQ ID NO: 1580088 - RNA, 17 nt, Human adenovirus E
accccaccacccagacc

SEQ ID NO: 1580089 - RNA, 17 nt, Human adenovirus E
guccacgagcgccagcu

SEQ ID NO: 1580090 - RNA, 22 nt, Human adenovirus E
uggagaguucguccucgcagcc

SEQ ID NO: 1580091 - RNA, 19 nt, Human adenovirus E
gacgcgcgccgggcggcag

SEQ ID NO: 1580092 - RNA, 16 nt, Human adenovirus E
guugaagugggcgugg

SEQ ID NO: 1580093 - RNA, 16 nt, Human adenovirus E
augauauucuggagca

SEQ ID NO: 1580094 - RNA, 19 nt, Human adenovirus E
cgcagcagaggaggcagca

SEQ ID NO: 1580095 - RNA, 15 nt, Human adenovirus E
cagcaucaaccgcaa

SEQ ID NO: 1580096 - RNA, 15 nt, Human adenovirus E
cucggccauccugga

SEQ ID NO: 1580097 - RNA, 17 nt, Human adenovirus E
cagggaggcgcugcuga

SEQ ID NO: 1580098 - RNA, 18 nt, Human adenovirus E
cucugccacaccuggcag

SEQ ID NO: 1580099 - RNA, 20 nt, Human adenovirus E
caggacccgguagagguggg

SEQ ID NO: 1580100 - RNA, 11 nt, Human adenovirus E
cgccaccacca

SEQ ID NO: 1580101 - RNA, 20 nt, Human adenovirus E
acagcacucaggcagaggag

SEQ ID NO: 1580102 - RNA, 14 nt, Human adenovirus E
gaccucggcgcgag

SEQ ID NO: 1580103 - RNA, 15 nt, Human adenovirus E
ccgccgcgcaucucc

SEQ ID NO: 1580104 - RNA, 23 nt, Human adenovirus E
accgccaaaaaucagacaugcau

SEQ ID NO: 1580105 - RNA, 20 nt, Human adenovirus E
gcggccggcgcgcuccacgg

SEQ ID NO: 1580106 - RNA, 18 nt, Human adenovirus E
  misc_feature (7)..(7): n is a, c, g, or u
ccccaunuagcaguccca

SEQ ID NO: 1580107 - RNA, 13 nt, Human adenovirus E
gcggcggcagcag

SEQ ID NO: 1580108 - RNA, 14 nt, Human adenovirus E
ggcuggucgggguc

SEQ ID NO: 1580109 - RNA, 17 nt, Human adenovirus E
cacacugguggccaccu

SEQ ID NO: 1580110 - RNA, 14 nt, Human adenovirus E
cuccugcacaggca

SEQ ID NO: 1580111 - RNA, 20 nt, Human adenovirus E
guggagucguggcgccugca

SEQ ID NO: 1580112 - RNA, 17 nt, Human adenovirus E
uagcacucaacccaccc

SEQ ID NO: 1580113 - RNA, 16 nt, Human adenovirus E
acggugccggcggaga

SEQ ID NO: 1580114 - RNA, 22 nt, Human adenovirus E
ucagcgacgagcagcuggcccg

SEQ ID NO: 1580115 - RNA, 15 nt, Human adenovirus E
cuguuccugaugcag

SEQ ID NO: 1580116 - RNA, 18 nt, Human adenovirus E
uagcuuaccgagcagcag

SEQ ID NO: 1580117 - RNA, 16 nt, Human adenovirus E
gcuccagcuccagugu

SEQ ID NO: 1580118 - RNA, 18 nt, Human adenovirus E
gcgcacguggccgcggcc

SEQ ID NO: 1580119 - RNA, 14 nt, Human adenovirus E
gaugcaccuguggg

SEQ ID NO: 1580120 - RNA, 16 nt, Human adenovirus E
uggaacaaacucugaa

SEQ ID NO: 1580121 - RNA, 12 nt, Human adenovirus E
caaggccauccg

SEQ ID NO: 1580122 - RNA, 21 nt, Human adenovirus E
cuugcugaaaaagggccgcgg

SEQ ID NO: 1580123 - RNA, 15 nt, Human adenovirus E
gagauggugggccuu

SEQ ID NO: 1580124 - RNA, 21 nt, Human adenovirus E
cggcgcaaacccgggagcuga

SEQ ID NO: 1580125 - RNA, 20 nt, Human adenovirus E
cugggugacaaagagcuguc

SEQ ID NO: 1580126 - RNA, 18 nt, Human adenovirus E
guacagguggcagaugcg

SEQ ID NO: 1580127 - RNA, 18 nt, Human adenovirus E
cugagcgggggggaggac

SEQ ID NO: 1580128 - RNA, 12 nt, Human adenovirus E
cguggagcugga

SEQ ID NO: 1580129 - RNA, 12 nt, Human adenovirus E
ggaucuggaggg

SEQ ID NO: 1580130 - RNA, 18 nt, Human adenovirus E
uucguccucgcagccccg

SEQ ID NO: 1580131 - RNA, 17 nt, Human adenovirus E
ggccgcgagggugcugc

SEQ ID NO: 1580132 - RNA, 17 nt, Human adenovirus E
cccucuaugccaucuuc

SEQ ID NO: 1580133 - RNA, 20 nt, Human adenovirus E
gcgucgcagggggccacgag

SEQ ID NO: 1580134 - RNA, 22 nt, Human adenovirus E
acgugcccccgcgguaccuggc

SEQ ID NO: 1580135 - RNA, 19 nt, Human adenovirus E
ucugccuucccaugguggg

SEQ ID NO: 1580136 - RNA, 21 nt, Human adenovirus E
cggcgcgcuccuuggcggcga

SEQ ID NO: 1580137 - RNA, 17 nt, Human adenovirus E
gcccacggcccucagca

SEQ ID NO: 1580138 - RNA, 13 nt, Human adenovirus E
agcaccaggcagg

SEQ ID NO: 1580139 - RNA, 22 nt, Human adenovirus E
ugcgucaucacccagggggcga

SEQ ID NO: 1580140 - RNA, 22 nt, Human adenovirus E
ccggggcagaagcacacagcuc

SEQ ID NO: 1580141 - RNA, 16 nt, Human adenovirus E
guuccggagcagcugg

SEQ ID NO: 1580142 - RNA, 13 nt, Human adenovirus E
gccgccuccaccc

SEQ ID NO: 1580143 - RNA, 19 nt, Human adenovirus E
gcugacguccugcaggacc

SEQ ID NO: 1580144 - RNA, 20 nt, Human adenovirus E
acagcagucaggcagaggag

SEQ ID NO: 1580145 - RNA, 11 nt, Human adenovirus E
ugcagcccccg

SEQ ID NO: 1580146 - RNA, 13 nt, Human adenovirus E
uccgagaagcugg

SEQ ID NO: 1580147 - RNA, 22 nt, Human adenovirus E
cggagaguguaccgccgcggcc

SEQ ID NO: 1580148 - RNA, 19 nt, Human adenovirus E
cccgguuguaccuggugga

SEQ ID NO: 1580149 - RNA, 18 nt, Human adenovirus E
gagguacaugggcaugag

SEQ ID NO: 1580150 - RNA, 15 nt, Human adenovirus E
accccaccacccaga

SEQ ID NO: 1580151 - RNA, 24 nt, Human adenovirus E
agcacaggcauaugcucaugcauc

SEQ ID NO: 1580152 - RNA, 23 nt, Human adenovirus E
cgaguugaaccucuucucgccgc

SEQ ID NO: 1580153 - RNA, 12 nt, Human adenovirus E
cagucuggagga

SEQ ID NO: 1580154 - RNA, 20 nt, Human adenovirus E
ccugcacaggcagcaaagcc

SEQ ID NO: 1580155 - RNA, 16 nt, Human adenovirus E
ggccauggcgaccagc

SEQ ID NO: 1580156 - RNA, 18 nt, Human adenovirus E
cgggcuaccgcggcacgc

SEQ ID NO: 1580157 - RNA, 14 nt, Human adenovirus E
gccgcgcccugggc

SEQ ID NO: 1580158 - RNA, 18 nt, Human adenovirus E
uccugguucaccugcagc

SEQ ID NO: 1580159 - RNA, 15 nt, Human adenovirus E
guacggaggcgcucg

SEQ ID NO: 1580160 - RNA, 16 nt, Human adenovirus E
gccgccgcaagaccac

SEQ ID NO: 1580161 - RNA, 23 nt, Human adenovirus E
gacguggggcaguuucuugagcu

SEQ ID NO: 1580162 - RNA, 19 nt, Human adenovirus E
uuagcuuugacaguacagg

SEQ ID NO: 1580163 - RNA, 18 nt, Human adenovirus E
aguuugcuuacggcaagc

SEQ ID NO: 1580164 - RNA, 20 nt, Human adenovirus E
ggaggagcucagccgcgccu

SEQ ID NO: 1580165 - RNA, 12 nt, Human adenovirus E
uucaccaccugc

SEQ ID NO: 1580166 - RNA, 23 nt, Human adenovirus E
cgaggcggacgagcugacgggga

SEQ ID NO: 1580167 - RNA, 23 nt, Human adenovirus E
gugcccauagacaaggaggugaa

SEQ ID NO: 1580168 - RNA, 20 nt, Human adenovirus E
cagcaaagccuccacgcgca

SEQ ID NO: 1580169 - RNA, 20 nt, Human adenovirus E
accugcagcagauugacaag

SEQ ID NO: 1580170 - RNA, 19 nt, Human adenovirus E
gccuuugugcccgcccagg

SEQ ID NO: 1580171 - RNA, 19 nt, Human adenovirus E
caggcugggcugggacccc

SEQ ID NO: 1580172 - RNA, 17 nt, Human adenovirus E
accagaacgaccacagc

SEQ ID NO: 1580173 - RNA, 16 nt, Human adenovirus E
cacgugcugcacgagc

SEQ ID NO: 1580174 - RNA, 19 nt, Human adenovirus E
accccauuacuggcaccgu

SEQ ID NO: 1580175 - RNA, 23 nt, Human adenovirus E
ccacccgcagaagcaagcuccag

SEQ ID NO: 1580176 - RNA, 16 nt, Human adenovirus E
agccggcggcggcgca

SEQ ID NO: 1580177 - RNA, 20 nt, Human adenovirus E
cgaguuugcuuacggcaagc

SEQ ID NO: 1580178 - RNA, 15 nt, Human adenovirus E
ggcgagggggagcgc

SEQ ID NO: 1580179 - RNA, 16 nt, Human adenovirus E
caaccacgugcgcacc

SEQ ID NO: 1580180 - RNA, 16 nt, Human adenovirus E
aaugauucgacaagau

SEQ ID NO: 1580181 - RNA, 14 nt, Human adenovirus E
agagcgugaugcag

SEQ ID NO: 1580182 - RNA, 22 nt, Human adenovirus E
ccccuggggugugaccaccguc

SEQ ID NO: 1580183 - RNA, 11 nt, Human adenovirus E
agaagcuggcg

SEQ ID NO: 1580184 - RNA, 20 nt, Human adenovirus E
cagguacacauacaaagccu

SEQ ID NO: 1580185 - RNA, 17 nt, Human adenovirus E
accuccaccaacgccac

SEQ ID NO: 1580186 - RNA, 22 nt, Human adenovirus E
uuggcgauguuaccgcccagau

SEQ ID NO: 1580187 - RNA, 23 nt, Human adenovirus E
aggacuacuccacccgcaugaau

SEQ ID NO: 1580188 - RNA, 15 nt, Human adenovirus E
aucagacccacugcu

SEQ ID NO: 1580189 - RNA, 20 nt, Human adenovirus E
cccagaccggugaggagcuc

SEQ ID NO: 1580190 - RNA, 22 nt, Human adenovirus E
cucugcucaauauauagcccag

SEQ ID NO: 1580191 - RNA, 11 nt, Human adenovirus E
aggcugagcuc

SEQ ID NO: 1580192 - RNA, 19 nt, Human adenovirus E
gccgccgcgcaucuccagg

SEQ ID NO: 1580193 - RNA, 20 nt, Human adenovirus E
  misc_feature (9)..(9): n is a, c, g, or u
gcgcgcaanuacacccccgc

SEQ ID NO: 1580194 - RNA, 17 nt, Human adenovirus E
agcuuugacaguacagg

SEQ ID NO: 1580195 - RNA, 12 nt, Human adenovirus E
ucuuccagacca

SEQ ID NO: 1580196 - RNA, 14 nt, Human adenovirus E
gaggcccggcgcga

SEQ ID NO: 1580197 - RNA, 13 nt, Human adenovirus E
uugcgcgagcaga

SEQ ID NO: 1580198 - RNA, 14 nt, Human adenovirus E
gcaagcagcacgga

SEQ ID NO: 1580199 - RNA, 19 nt, Human adenovirus E
ugacgccgaacucgcgccu

SEQ ID NO: 1580200 - RNA, 22 nt, Human adenovirus E
accguggagcuggagugccugc

SEQ ID NO: 1580201 - RNA, 16 nt, Human adenovirus E
accaugcagcugaugg

SEQ ID NO: 1580202 - RNA, 16 nt, Human adenovirus E
gugggcguggggcagu

SEQ ID NO: 1580203 - RNA, 19 nt, Human adenovirus E
ucacagcucaacagcugag

SEQ ID NO: 1580204 - RNA, 19 nt, Human adenovirus E
cacaggcauaugcucaugc

SEQ ID NO: 1580205 - RNA, 22 nt, Human adenovirus E
uaaccggcggagaugacugacc

SEQ ID NO: 1580206 - RNA, 19 nt, Human adenovirus E
cgcucaggucgcugcagua

SEQ ID NO: 1580207 - RNA, 18 nt, Human adenovirus E
caugaucaagcccagcac

SEQ ID NO: 1580208 - RNA, 19 nt, Human adenovirus E
cgcucaucaagcaucuggc

SEQ ID NO: 1580209 - RNA, 16 nt, Human adenovirus E
cucgggaucgcgggcg

SEQ ID NO: 1580210 - RNA, 13 nt, Human adenovirus E
ggaaucuucucuu

SEQ ID NO: 1580211 - RNA, 23 nt, Human adenovirus E
gucgagggucuccuggaugaugu

SEQ ID NO: 1580212 - RNA, 22 nt, Human adenovirus E
ucuugcgggguuucuucuuggg

SEQ ID NO: 1580213 - RNA, 22 nt, Human adenovirus E
ccugugggacgauguggacagc

SEQ ID NO: 1580214 - RNA, 22 nt, Human adenovirus E
cacuccauauaccaaugcugua

SEQ ID NO: 1580215 - RNA, 23 nt, Human adenovirus E
accugaucccgaauaccacagcg

SEQ ID NO: 1580216 - RNA, 16 nt, Human adenovirus E
cagaccuaccaggaga

SEQ ID NO: 1580217 - RNA, 13 nt, Human adenovirus E
cucaccgccacgc

SEQ ID NO: 1580218 - RNA, 19 nt, Human adenovirus E
gaguacuucaaaaugaaga

SEQ ID NO: 1580219 - RNA, 12 nt, Human adenovirus E
uaaccuccacca

SEQ ID NO: 1580220 - RNA, 15 nt, Human adenovirus E
cggcaggccaccauc

SEQ ID NO: 1580221 - RNA, 18 nt, Human adenovirus E
ccagcccacgaccguacu

SEQ ID NO: 1580222 - RNA, 19 nt, Human adenovirus E
gaccuggccaaccaggccg

SEQ ID NO: 1580223 - RNA, 17 nt, Human adenovirus E
caucaggccccgcagca

SEQ ID NO: 1580224 - RNA, 21 nt, Human adenovirus E
cguccgcccuugcgcgagcag

SEQ ID NO: 1580225 - RNA, 23 nt, Human adenovirus E
aauacucgcagaaaaugaugcaa

SEQ ID NO: 1580226 - RNA, 21 nt, Human adenovirus E
cuuaaccgccccgccgcccag

SEQ ID NO: 1580227 - RNA, 16 nt, Human adenovirus E
cugcgcgucggccagg

SEQ ID NO: 1580228 - RNA, 14 nt, Human adenovirus E
caccacucgccgcu

SEQ ID NO: 1580229 - RNA, 15 nt, Human adenovirus E
aguuucaauguggau

SEQ ID NO: 1580230 - RNA, 14 nt, Human adenovirus E
gacccggugccgcc

SEQ ID NO: 1580231 - RNA, 13 nt, Human adenovirus E
cgcggccacggcg

SEQ ID NO: 1580232 - RNA, 14 nt, Human adenovirus E
aggggcggaacagc

SEQ ID NO: 1580233 - RNA, 21 nt, Human adenovirus E
cugcaggccccggcgggcugc

SEQ ID NO: 1580234 - RNA, 22 nt, Human adenovirus E
acgucaccugcggcguggagca

SEQ ID NO: 1580235 - RNA, 15 nt, Human adenovirus E
ggcgaugcagccccc

SEQ ID NO: 1580236 - RNA, 16 nt, Human adenovirus E
ccgucacggugaaggg

SEQ ID NO: 1580237 - RNA, 23 nt, Human adenovirus E
cacuccgagacgaaagcccgggu

SEQ ID NO: 1580238 - RNA, 22 nt, Human adenovirus E
agccggcggcggcgcaucgccc

SEQ ID NO: 1580239 - RNA, 12 nt, Human adenovirus E
aacccccagcug

SEQ ID NO: 1580240 - RNA, 18 nt, Human adenovirus E
cccgggcccagguuggug

SEQ ID NO: 1580241 - RNA, 11 nt, Human adenovirus E
ggcggccagcu

SEQ ID NO: 1580242 - RNA, 16 nt, Human adenovirus E
guccagcuggcgggcg

SEQ ID NO: 1580243 - RNA, 12 nt, Human adenovirus E
ggcgauccuggc

SEQ ID NO: 1580244 - RNA, 16 nt, Human adenovirus E
cugccguagucuggag

SEQ ID NO: 1580245 - RNA, 13 nt, Human adenovirus E
cggaggccagcac

SEQ ID NO: 1580246 - RNA, 15 nt, Human adenovirus E
aucuaguaugaugag

SEQ ID NO: 1580247 - RNA, 15 nt, Human adenovirus E
ggaagacugggagaa

SEQ ID NO: 1580248 - RNA, 17 nt, Human adenovirus E
gccucgcugaacuacca

SEQ ID NO: 1580249 - RNA, 23 nt, Human adenovirus E
cgcgacugcgucuaccucuaccu

SEQ ID NO: 1580250 - RNA, 16 nt, Human adenovirus E
gacacaccaccacagc

SEQ ID NO: 1580251 - RNA, 18 nt, Human adenovirus E
ggaaugccgcggugcucc

SEQ ID NO: 1580252 - RNA, 16 nt, Human adenovirus E
ugggcguguggcagca

SEQ ID NO: 1580253 - RNA, 18 nt, Human adenovirus E
uggcggccaucaacuucu

SEQ ID NO: 1580254 - RNA, 21 nt, Human adenovirus E
aagagggcgaggggcuggcgc

SEQ ID NO: 1580255 - RNA, 19 nt, Human adenovirus E
ccuggacuaauggaagcua

SEQ ID NO: 1580256 - RNA, 20 nt, Human adenovirus E
gcucguagggacugaggggc

SEQ ID NO: 1580257 - RNA, 22 nt, Human adenovirus E
ugcaagacccggucaccuuccg

SEQ ID NO: 1580258 - RNA, 13 nt, Human adenovirus E
cggcacucagguu

SEQ ID NO: 1580259 - RNA, 19 nt, Human adenovirus E
ccgcaacucguaccugggc

SEQ ID NO: 1580260 - RNA, 15 nt, Human adenovirus E
ccacuacagcagcag

SEQ ID NO: 1580261 - RNA, 15 nt, Human adenovirus E
gaacaacaagcaugg

SEQ ID NO: 1580262 - RNA, 16 nt, Human adenovirus E
gcaugucccgcccgcg

SEQ ID NO: 1580263 - RNA, 23 nt, Human adenovirus E
gcauucguuacucggagcuggca

SEQ ID NO: 1580264 - RNA, 22 nt, Human adenovirus E
  misc_feature (13)..(13): n is a, c, g, or u
cauuaaaucagcnuaccaccac

SEQ ID NO: 1580265 - RNA, 14 nt, Human adenovirus E
ucuaccucgacccc

SEQ ID NO: 1580266 - RNA, 20 nt, Human adenovirus E
gagaguuucaugaccagcau

SEQ ID NO: 1580267 - RNA, 11 nt, Human adenovirus E
cuccagcacca

SEQ ID NO: 1580268 - RNA, 23 nt, Human adenovirus E
ccuggccaaccaggccgugcagc

SEQ ID NO: 1580269 - RNA, 23 nt, Human adenovirus E
ugaucacuauucuuaucugccuc

SEQ ID NO: 1580270 - RNA, 19 nt, Human adenovirus E
ccacgugagccgcgcccug

SEQ ID NO: 1580271 - RNA, 13 nt, Human adenovirus E
gcaggggcggcuc

SEQ ID NO: 1580272 - RNA, 15 nt, Human adenovirus E
cagcggcggcagcag

SEQ ID NO: 1580273 - RNA, 21 nt, Human adenovirus E
cauccccgcgcuccuggaugu

SEQ ID NO: 1580274 - RNA, 15 nt, Human adenovirus E
agccccgggcccagg

SEQ ID NO: 1580275 - RNA, 19 nt, Human adenovirus E
auuccuaaaguuagcuuua

SEQ ID NO: 1580276 - RNA, 16 nt, Human adenovirus E
gagggcgaguaccugg

SEQ ID NO: 1580277 - RNA, 23 nt, Human adenovirus E
uguuccacgguggcuuccagcaa

SEQ ID NO: 1580278 - RNA, 12 nt, Human adenovirus E
augcaggagggg

SEQ ID NO: 1580279 - RNA, 20 nt, Human adenovirus E
gccucaggagugaugaagau

SEQ ID NO: 1580280 - RNA, 15 nt, Human adenovirus E
accugcgccaccacc

SEQ ID NO: 1580281 - RNA, 19 nt, Human adenovirus E
cagcacucucaacuccucg

SEQ ID NO: 1580282 - RNA, 23 nt, Human adenovirus E
cuggcugacguccugcaggacca

SEQ ID NO: 1580283 - RNA, 15 nt, Human adenovirus E
aacaacaagcaugga

SEQ ID NO: 1580284 - RNA, 24 nt, Human adenovirus E
gccagcccaauggcaccugcgagc

SEQ ID NO: 1580285 - RNA, 17 nt, Human adenovirus E
uccgccgacgacagcag

SEQ ID NO: 1580286 - RNA, 23 nt, Human adenovirus E
ccaaggccgccgccccucucagu

SEQ ID NO: 1580287 - RNA, 20 nt, Human adenovirus E
gggcgugcagaccguggaca

SEQ ID NO: 1580288 - RNA, 15 nt, Human adenovirus E
gaggccaucggccag

SEQ ID NO: 1580289 - RNA, 12 nt, Human adenovirus E
gaagcagcagca

SEQ ID NO: 1580290 - RNA, 17 nt, Human adenovirus E
ccaggaggcgcucuccc

SEQ ID NO: 1580291 - RNA, 20 nt, Human adenovirus E
uggcauuuuugaugugggcc

SEQ ID NO: 1580292 - RNA, 17 nt, Human adenovirus E
accucaggcacacgcac

SEQ ID NO: 1580293 - RNA, 11 nt, Human adenovirus E
cgccuggccaa

SEQ ID NO: 1580294 - RNA, 22 nt, Human adenovirus E
ugcgaucucggucaugaacugc

SEQ ID NO: 1580295 - RNA, 16 nt, Human adenovirus E
gcgcucgcucacccgc

SEQ ID NO: 1580296 - RNA, 17 nt, Human adenovirus E
ucgccagggcuugcaga

SEQ ID NO: 1580297 - RNA, 13 nt, Human adenovirus E
cccacgcuacguc

SEQ ID NO: 1580298 - RNA, 14 nt, Human adenovirus E
ccagacgccgcacc

SEQ ID NO: 1580299 - RNA, 21 nt, Human adenovirus E
ggcuccgcgacacggcacgcg

SEQ ID NO: 1580300 - RNA, 15 nt, Human adenovirus E
gaucccgaauaccac

SEQ ID NO: 1580301 - RNA, 14 nt, Human adenovirus E
caagcccaucauug

SEQ ID NO: 1580302 - RNA, 17 nt, Human adenovirus E
  misc_feature (8)..(8): n is a, c, g, or u
gugggcancggcggcgc

SEQ ID NO: 1580303 - RNA, 14 nt, Human adenovirus E
agcaagcuccagcu

SEQ ID NO: 1580304 - RNA, 16 nt, Human adenovirus E
ugagcgacgaucuggg

SEQ ID NO: 1580305 - RNA, 19 nt, Human adenovirus E
guguuguaaaucacccagu

SEQ ID NO: 1580306 - RNA, 20 nt, Human adenovirus E
ucgcagccccgcucgggugg

SEQ ID NO: 1580307 - RNA, 17 nt, Human adenovirus E
acccgugcagccacagc

SEQ ID NO: 1580308 - RNA, 20 nt, Human adenovirus E
cccucggacuucgugccgcu

SEQ ID NO: 1580309 - RNA, 14 nt, Human adenovirus E
cagaaccugaaaga

SEQ ID NO: 1580310 - RNA, 21 nt, Human adenovirus E
ggacggcugcgggaguauggc

SEQ ID NO: 1580311 - RNA, 16 nt, Human adenovirus E
ucgaaggcgggcauga

SEQ ID NO: 1580312 - RNA, 12 nt, Human adenovirus E
ccugcugggccu

SEQ ID NO: 1580313 - RNA, 22 nt, Human adenovirus E
cggcuggugauccggggcagaa

SEQ ID NO: 1580314 - RNA, 20 nt, Human adenovirus E
cgaggacgagggcaugcaag

SEQ ID NO: 1580315 - RNA, 13 nt, Human adenovirus E
cccauagccagcc

SEQ ID NO: 1580316 - RNA, 23 nt, Human adenovirus E
aagcugaaaguggagcugccgcc

SEQ ID NO: 1580317 - RNA, 13 nt, Human adenovirus E
cggcgacgaggcc

SEQ ID NO: 1580318 - RNA, 11 nt, Human adenovirus E
cccagcggcga

SEQ ID NO: 1580319 - RNA, 21 nt, Human adenovirus E
cguggcucugccuuggcagua

SEQ ID NO: 1580320 - RNA, 23 nt, Human adenovirus E
ccccagggauaggagcuccugga

SEQ ID NO: 1580321 - RNA, 13 nt, Human adenovirus E
gguuccuguggga

SEQ ID NO: 1580322 - RNA, 22 nt, Human adenovirus E
cuaggacguccagagcgcagua

SEQ ID NO: 1580323 - RNA, 16 nt, Human adenovirus E
ggugggcgccgagcuc

SEQ ID NO: 1580324 - RNA, 22 nt, Human adenovirus E
aggcaauuuuuaagaaaaucaa

SEQ ID NO: 1580325 - RNA, 15 nt, Human adenovirus E
acucguaccugggcu

SEQ ID NO: 1580326 - RNA, 13 nt, Human adenovirus E
ccuagccgccucc

SEQ ID NO: 1580327 - RNA, 21 nt, Human adenovirus E
aaaucguucucuccagcacca

SEQ ID NO: 1580328 - RNA, 18 nt, Human adenovirus E
gcccgcgcuugcugggcg

SEQ ID NO: 1580329 - RNA, 16 nt, Human adenovirus E
ccgccgugagcggggc

SEQ ID NO: 1580330 - RNA, 15 nt, Human adenovirus E
cuaggacguccagag

SEQ ID NO: 1580331 - RNA, 14 nt, Human adenovirus E
cguaguugagcgcc

SEQ ID NO: 1580332 - RNA, 17 nt, Human adenovirus E
ucgugcgccaggccugc

SEQ ID NO: 1580333 - RNA, 14 nt, Human adenovirus E
ggagcuccuggagc

SEQ ID NO: 1580334 - RNA, 14 nt, Human adenovirus E
agcagccccaggcc

SEQ ID NO: 1580335 - RNA, 12 nt, Human adenovirus E
cagcgccgggcc

SEQ ID NO: 1580336 - RNA, 17 nt, Human adenovirus E
gggccugcgcgcgccca

SEQ ID NO: 1580337 - RNA, 22 nt, Human adenovirus E
gggccauguucagggcggccag

SEQ ID NO: 1580338 - RNA, 23 nt, Human adenovirus E
acgccgcaccgcucccuggccug

SEQ ID NO: 1580339 - RNA, 18 nt, Human adenovirus E
cccuccugcacaggcagc

SEQ ID NO: 1580340 - RNA, 15 nt, Human adenovirus E
ggucugcgaccugac

SEQ ID NO: 1580341 - RNA, 15 nt, Human adenovirus E
cgagggugcugccgc

SEQ ID NO: 1580342 - RNA, 16 nt, Human adenovirus E
gaccacagcaacuucc

SEQ ID NO: 1580343 - RNA, 23 nt, Human adenovirus E
gcagaggaggaggagauggagga

SEQ ID NO: 1580344 - RNA, 18 nt, Human adenovirus E
ugauccccaucaucgccg

SEQ ID NO: 1580345 - RNA, 21 nt, Human adenovirus E
cgugcaggcaccgcagcuugc

SEQ ID NO: 1580346 - RNA, 18 nt, Human adenovirus E
uccaguguaagccccaca

SEQ ID NO: 1580347 - RNA, 13 nt, Human adenovirus E
ucgggggcagagg

SEQ ID NO: 1580348 - RNA, 18 nt, Human adenovirus E
cgacaacgcgcggcuggc

SEQ ID NO: 1580349 - RNA, 18 nt, Human adenovirus E
cgauuaugcagggugaug

SEQ ID NO: 1580350 - RNA, 15 nt, Human adenovirus E
cggccagccugcuga

SEQ ID NO: 1580351 - RNA, 15 nt, Human adenovirus E
ugcagggugaugagg

SEQ ID NO: 1580352 - RNA, 13 nt, Human adenovirus E
gccgccagcuccu

SEQ ID NO: 1580353 - RNA, 16 nt, Human adenovirus E
ccugcucuuccaccgc

SEQ ID NO: 1580354 - RNA, 15 nt, Human adenovirus E
aggccggccuggugu

SEQ ID NO: 1580355 - RNA, 17 nt, Human adenovirus E
gcaccgccccgcccgcc

SEQ ID NO: 1580356 - RNA, 19 nt, Human adenovirus E
ccgaacucgcgccugcugc

SEQ ID NO: 1580357 - RNA, 15 nt, Human adenovirus E
gcggccgccaugaac

SEQ ID NO: 1580358 - RNA, 18 nt, Human adenovirus E
augccaacccuucccacc

SEQ ID NO: 1580359 - RNA, 17 nt, Human adenovirus E
ccugacacaccaccaca

SEQ ID NO: 1580360 - RNA, 22 nt, Human adenovirus E
gggaggcuuccugcccgcgcug

SEQ ID NO: 1580361 - RNA, 14 nt, Human adenovirus E
cuagccgccuccac

SEQ ID NO: 1580362 - RNA, 17 nt, Human adenovirus E
caagcugcugcucaggg

SEQ ID NO: 1580363 - RNA, 21 nt, Human adenovirus E
caggguaucgcaaucaggcag

SEQ ID NO: 1580364 - RNA, 15 nt, Human adenovirus E
uggcagaucacccug

SEQ ID NO: 1580365 - RNA, 20 nt, Human adenovirus E
cucuuugccuucaccaccug

SEQ ID NO: 1580366 - RNA, 18 nt, Human adenovirus E
aggcgcucuccccccagg

SEQ ID NO: 1580367 - RNA, 12 nt, Human adenovirus E
auucucaggugc

SEQ ID NO: 1580368 - RNA, 21 nt, Human adenovirus E
ccaccgcgaguccaaccuggg

SEQ ID NO: 1580369 - RNA, 19 nt, Human adenovirus E
gucagcgacgagcagcugg

SEQ ID NO: 1580370 - RNA, 20 nt, Human adenovirus E
gcauuauuguugcuguagug

SEQ ID NO: 1580371 - RNA, 19 nt, Human adenovirus E
caccuggacaaaauaccac

SEQ ID NO: 1580372 - RNA, 15 nt, Human adenovirus E
ucagaccgugcagca

SEQ ID NO: 1580373 - RNA, 13 nt, Human adenovirus E
cacuuccucuucu

SEQ ID NO: 1580374 - RNA, 15 nt, Human adenovirus E
accaguccgggccgg

SEQ ID NO: 1580375 - RNA, 22 nt, Human adenovirus E
cugaagcccacggccgccagcu

SEQ ID NO: 1580376 - RNA, 16 nt, Human adenovirus E
ggugaggucgggcugg

SEQ ID NO: 1580377 - RNA, 15 nt, Human adenovirus E
uuacuccccuccugc

SEQ ID NO: 1580378 - RNA, 17 nt, Human adenovirus E
ccagcgccggcaggacc

SEQ ID NO: 1580379 - RNA, 13 nt, Human adenovirus E
ccgaggugcccca

SEQ ID NO: 1580380 - RNA, 18 nt, Human adenovirus E
auggcagcaaggcgugga

SEQ ID NO: 1580381 - RNA, 16 nt, Human adenovirus E
accagcaagccgcuga

SEQ ID NO: 1580382 - RNA, 17 nt, Human adenovirus E
ccgauguagguggggua

SEQ ID NO: 1580383 - RNA, 15 nt, Human adenovirus E
gcauggucucgguga

SEQ ID NO: 1580384 - RNA, 12 nt, Human adenovirus E
aucgcagugcag

SEQ ID NO: 1580385 - RNA, 19 nt, Human adenovirus E
uggucagcgacgagcagcu

SEQ ID NO: 1580386 - RNA, 22 nt, Human adenovirus E
caggcacacgcacuaccaccac

SEQ ID NO: 1580387 - RNA, 17 nt, Human adenovirus E
ccaaacuaaccuccacc

SEQ ID NO: 1580388 - RNA, 20 nt, Human adenovirus E
aauaauacuuucauuuuugc

SEQ ID NO: 1580389 - RNA, 12 nt, Human adenovirus E
gacgcagggcca

SEQ ID NO: 1580390 - RNA, 15 nt, Human adenovirus E
uaguggugugcaugu

SEQ ID NO: 1580391 - RNA, 17 nt, Human adenovirus E
gccgcccagccccgcca

SEQ ID NO: 1580392 - RNA, 19 nt, Human adenovirus E
caaugccaccucagcucaa

SEQ ID NO: 1580393 - RNA, 21 nt, Human adenovirus E
acuccccucuucccagcucug

SEQ ID NO: 1580394 - RNA, 11 nt, Human adenovirus E
uaccuccaccu

SEQ ID NO: 1580395 - RNA, 15 nt, Human adenovirus E
acgcacgucuucaac

SEQ ID NO: 1580396 - RNA, 14 nt, Human adenovirus E
cggucauguggaug

SEQ ID NO: 1580397 - RNA, 12 nt, Human adenovirus E
cccuggccugca

SEQ ID NO: 1580398 - RNA, 16 nt, Human adenovirus E
augaagauccuaggcc

SEQ ID NO: 1580399 - RNA, 13 nt, Human adenovirus E
ggcgcggccagcc

SEQ ID NO: 1580400 - RNA, 23 nt, Human adenovirus E
gggggccacgagccggggcagcg

SEQ ID NO: 1580401 - RNA, 17 nt, Human adenovirus E
agauggauuccaagaga

SEQ ID NO: 1580402 - RNA, 13 nt, Human adenovirus E
cacagccggcgcu

SEQ ID NO: 1580403 - RNA, 14 nt, Human adenovirus E
guucuacgaggacc

SEQ ID NO: 1580404 - RNA, 19 nt, Human adenovirus E
caccacagcuaccuccagu

SEQ ID NO: 1580405 - RNA, 13 nt, Human adenovirus E
cucugaaccugcc

SEQ ID NO: 1580406 - RNA, 22 nt, Human adenovirus E
acuggcagcccagccgccgggc

SEQ ID NO: 1580407 - RNA, 24 nt, Human adenovirus E
cgccgacgcggagacccugcgcaa

SEQ ID NO: 1580408 - RNA, 16 nt, Human adenovirus E
aucuggcccggcaggc

SEQ ID NO: 1580409 - RNA, 22 nt, Human adenovirus E
cagcgaucccauuugagcugga

SEQ ID NO: 1580410 - RNA, 14 nt, Human adenovirus E
augcagccccggau

SEQ ID NO: 1580411 - RNA, 21 nt, Human adenovirus E
  misc_feature (8)..(8): n is a, c, g, or u
uccagcunuuccaacccuucc

SEQ ID NO: 1580412 - RNA, 19 nt, Human adenovirus E
uggacucugacgcuccugg

SEQ ID NO: 1580413 - RNA, 21 nt, Human adenovirus E
ccucuaccgaggucaggggcg

SEQ ID NO: 1580414 - RNA, 14 nt, Human adenovirus E
cgagcggugugccg

SEQ ID NO: 1580415 - RNA, 21 nt, Human adenovirus E
ggcaccggagcacccccgcca

SEQ ID NO: 1580416 - RNA, 23 nt, Human adenovirus E
aacaagucuauguuggcacagca

SEQ ID NO: 1580417 - RNA, 17 nt, Human adenovirus E
gaucgaccagguggugg

SEQ ID NO: 1580418 - RNA, 14 nt, Human adenovirus E
gcucgccucgggca

SEQ ID NO: 1580419 - RNA, 20 nt, Human adenovirus E
cccgccaaauaaucacacac

SEQ ID NO: 1580420 - RNA, 17 nt, Human adenovirus E
acguacucgcgcgccac

SEQ ID NO: 1580421 - RNA, 16 nt, Human adenovirus E
cucggugauccgcacc

SEQ ID NO: 1580422 - RNA, 23 nt, Human adenovirus E
acagccgccuggacccggugccg

SEQ ID NO: 1580423 - RNA, 22 nt, Human adenovirus E
cugcccgacaugaugcaagacc

SEQ ID NO: 1580424 - RNA, 13 nt, Human adenovirus E
acgcggagacccu

SEQ ID NO: 1580425 - RNA, 21 nt, Human adenovirus E
gguagcuccauugcagggccu

SEQ ID NO: 1580426 - RNA, 22 nt, Human adenovirus E
cuuaaaaccuauggcagcaagg

SEQ ID NO: 1580427 - RNA, 15 nt, Human adenovirus E
ucagggccgggugcu

SEQ ID NO: 1580428 - RNA, 14 nt, Human adenovirus E
ggcgauccccggca

SEQ ID NO: 1580429 - RNA, 22 nt, Human adenovirus E
acccagcccgccaacgugcccc

SEQ ID NO: 1580430 - RNA, 22 nt, Human adenovirus E
ccgcaguugucuguaucacaag

SEQ ID NO: 1580431 - RNA, 19 nt, Human adenovirus E
cagaacggggugcuggaga

SEQ ID NO: 1580432 - RNA, 13 nt, Human adenovirus E
gcagaggaggagg

SEQ ID NO: 1580433 - RNA, 15 nt, Human adenovirus E
caggaggcgcucucc

SEQ ID NO: 1580434 - RNA, 14 nt, Human adenovirus E
cugugucugaaccc

SEQ ID NO: 1580435 - RNA, 16 nt, Human adenovirus E
cgcgcuugcugggcga

SEQ ID NO: 1580436 - RNA, 14 nt, Human adenovirus E
caaaaccauauccc

SEQ ID NO: 1580437 - RNA, 14 nt, Human adenovirus E
agaagcgugggccu

SEQ ID NO: 1580438 - RNA, 17 nt, Human adenovirus E
cugcugcugcugguggc

SEQ ID NO: 1580439 - RNA, 17 nt, Human adenovirus E
gcugagcgaccaggagc

SEQ ID NO: 1580440 - RNA, 15 nt, Human adenovirus E
gugcgcgccgggcug

SEQ ID NO: 1580441 - RNA, 21 nt, Human adenovirus E
ggcguccgcgccgcagugggc

SEQ ID NO: 1580442 - RNA, 13 nt, Human adenovirus E
aagguccuggcca

SEQ ID NO: 1580443 - RNA, 20 nt, Human adenovirus E
acgcgcccgcgcuugcuggg

SEQ ID NO: 1580444 - RNA, 19 nt, Human adenovirus E
cguccucucgagccgcacc

SEQ ID NO: 1580445 - RNA, 15 nt, Human adenovirus E
gucuccaugagcucg

SEQ ID NO: 1580446 - RNA, 14 nt, Human adenovirus E
cgcagaacagggca

SEQ ID NO: 1580447 - RNA, 15 nt, Human adenovirus E
ccuuccucagcaccc

SEQ ID NO: 1580448 - RNA, 18 nt, Human adenovirus E
ugcgagccgauggggaag

SEQ ID NO: 1580449 - RNA, 15 nt, Human adenovirus E
cucguaccugggcua

SEQ ID NO: 1580450 - RNA, 19 nt, Human adenovirus E
ucccgugcaggcaccgcag

SEQ ID NO: 1580451 - RNA, 13 nt, Human adenovirus E
ggcuggagccgca

SEQ ID NO: 1580452 - RNA, 18 nt, Human adenovirus E
cagaccgugcagcagauc

SEQ ID NO: 1580453 - RNA, 13 nt, Human adenovirus E
caagcagcacgga

SEQ ID NO: 1580454 - RNA, 18 nt, Human adenovirus E
cagcaccaggcaggccac

SEQ ID NO: 1580455 - RNA, 20 nt, Human adenovirus E
cacuaccaccacuacagccu

SEQ ID NO: 1580456 - RNA, 22 nt, Human adenovirus E
gcgcuucugcccccgccccagc

SEQ ID NO: 1580457 - RNA, 22 nt, Human adenovirus E
cagggccagcaccgccccgccc

SEQ ID NO: 1580458 - RNA, 14 nt, Human adenovirus E
gcaagcgcagccgu

SEQ ID NO: 1580459 - RNA, 16 nt, Human adenovirus E
cccguccucgcggggc

SEQ ID NO: 1580460 - RNA, 15 nt, Human adenovirus E
gcgagggccugcucg

SEQ ID NO: 1580461 - RNA, 18 nt, Human adenovirus E
gccagggcuugcagaccg

SEQ ID NO: 1580462 - RNA, 14 nt, Human adenovirus E
ucggcgcgagcggg

SEQ ID NO: 1580463 - RNA, 18 nt, Human adenovirus E
accugaaagagcucugca

SEQ ID NO: 1580464 - RNA, 14 nt, Human adenovirus E
agccgcggccaggg

SEQ ID NO: 1580465 - RNA, 16 nt, Human adenovirus E
uaaccgccccgccgcc

SEQ ID NO: 1580466 - RNA, 16 nt, Human adenovirus E
gacgauguggacagca

SEQ ID NO: 1580467 - RNA, 15 nt, Human adenovirus E
agcccugcaggaagc

SEQ ID NO: 1580468 - RNA, 15 nt, Human adenovirus E
cgccgccgcuccguc

SEQ ID NO: 1580469 - RNA, 20 nt, Human adenovirus E
acgugccccggggccaggag

SEQ ID NO: 1580470 - RNA, 15 nt, Human adenovirus E
ccugccgcgcgcgcg

SEQ ID NO: 1580471 - RNA, 13 nt, Human adenovirus E
cugcaccucacag

SEQ ID NO: 1580472 - RNA, 16 nt, Human adenovirus E
ccuggccguguugcuc

SEQ ID NO: 1580473 - RNA, 14 nt, Human adenovirus E
uccugcccgccacc

SEQ ID NO: 1580474 - RNA, 12 nt, Human adenovirus E
uaccacccacac

SEQ ID NO: 1580475 - RNA, 23 nt, Human adenovirus E
uuuuacaguauggugauugaacu

SEQ ID NO: 1580476 - RNA, 18 nt, Human adenovirus E
gggcugcuagucagcggc

SEQ ID NO: 1580477 - RNA, 23 nt, Human adenovirus E
gcccggaugcaggggcggcaggg

SEQ ID NO: 1580478 - RNA, 19 nt, Human adenovirus E
acagcgaaccccgcagaac

SEQ ID NO: 1580479 - RNA, 20 nt, Human adenovirus E
cuuagcauuaccacacagac

SEQ ID NO: 1580480 - RNA, 20 nt, Human adenovirus E
agcuaccuccagugccuucu

SEQ ID NO: 1580481 - RNA, 18 nt, Human adenovirus E
cgcugagcccgugcugcu

SEQ ID NO: 1580482 - RNA, 18 nt, Human adenovirus E
ccaggacuacuccacccg

SEQ ID NO: 1580483 - RNA, 17 nt, Human adenovirus E
ugcggcccaugagcugc

SEQ ID NO: 1580484 - RNA, 17 nt, Human adenovirus E
gcucccuggccugcaac

SEQ ID NO: 1580485 - RNA, 20 nt, Human adenovirus E
cguggaggauuuggaggaag

SEQ ID NO: 1580486 - RNA, 14 nt, Human adenovirus E
augauuccuagaca

SEQ ID NO: 1580487 - RNA, 22 nt, Human adenovirus E
ggugccccucagcguggaggag

SEQ ID NO: 1580488 - RNA, 15 nt, Human adenovirus E
aucgccaaccucgcc

SEQ ID NO: 1580489 - RNA, 13 nt, Human adenovirus E
ugcgccaggccug

SEQ ID NO: 1580490 - RNA, 16 nt, Human adenovirus E
gcaggccccggcgggc

SEQ ID NO: 1580491 - RNA, 13 nt, Human adenovirus E
gcguaggccuggg

SEQ ID NO: 1580492 - RNA, 16 nt, Human adenovirus E
uucuacuuccuccuca

SEQ ID NO: 1580493 - RNA, 15 nt, Human adenovirus E
aucacacacgcccag

SEQ ID NO: 1580494 - RNA, 18 nt, Human adenovirus E
gcucgcgguggggcggcc

SEQ ID NO: 1580495 - RNA, 16 nt, Human adenovirus E
gaccggugaggagcuc

SEQ ID NO: 1580496 - RNA, 20 nt, Human adenovirus E
cuccgacgcggccgucccag

SEQ ID NO: 1580497 - RNA, 19 nt, Human adenovirus E
gggcagaacgugcugcaca

SEQ ID NO: 1580498 - RNA, 15 nt, Human adenovirus E
cguuacgugcagcag

SEQ ID NO: 1580499 - RNA, 12 nt, Human adenovirus E
ccagcugcacca

SEQ ID NO: 1580500 - RNA, 23 nt, Human adenovirus E
acaguagaugggacgagaccgga

SEQ ID NO: 1580501 - RNA, 10 nt, Human adenovirus E
ugccagcuga

SEQ ID NO: 1580502 - RNA, 17 nt, Human adenovirus E
ccauagcuuaccgagca

SEQ ID NO: 1580503 - RNA, 15 nt, Human adenovirus E
gcagucucuggagcg

SEQ ID NO: 1580504 - RNA, 21 nt, Human adenovirus E
caggugcugccgaccgcggcg

SEQ ID NO: 1580505 - RNA, 14 nt, Human adenovirus E
uggggaagaacugg

SEQ ID NO: 1580506 - RNA, 21 nt, Human adenovirus E
cagagcucggugaugugcucu

SEQ ID NO: 1580507 - RNA, 18 nt, Human adenovirus E
cauccccaaauucaaaca

SEQ ID NO: 1580508 - RNA, 18 nt, Human adenovirus E
cccgccaaauaaucacac

SEQ ID NO: 1580509 - RNA, 21 nt, Human adenovirus E
cgcgcagagcgcccuccaccg

SEQ ID NO: 1580510 - RNA, 18 nt, Human adenovirus E
gguuguugaugaccuggg

SEQ ID NO: 1580511 - RNA, 15 nt, Human adenovirus E
gccgccggugccgcc

SEQ ID NO: 1580512 - RNA, 17 nt, Human adenovirus E
ggggcggcucggggccc

SEQ ID NO: 1580513 - RNA, 13 nt, Human adenovirus E
cugcagagccagc

SEQ ID NO: 1580514 - RNA, 16 nt, Human adenovirus E
gggcguagagcuuggg

SEQ ID NO: 1580515 - RNA, 18 nt, Human adenovirus E
ugccgcagccgguggggc

SEQ ID NO: 1580516 - RNA, 13 nt, Human adenovirus E
gcgcacggccagc

SEQ ID NO: 1580517 - RNA, 15 nt, Human adenovirus E
cagugacagaggauu

SEQ ID NO: 1580518 - RNA, 21 nt, Human adenovirus E
ccgcagcagcgagcugggcag

SEQ ID NO: 1580519 - RNA, 14 nt, Human adenovirus E
caaauaaucacaca

SEQ ID NO: 1580520 - RNA, 19 nt, Human adenovirus E
cggccagccugcugaugcc

SEQ ID NO: 1580521 - RNA, 15 nt, Human adenovirus E
cguggucuucuccau

SEQ ID NO: 1580522 - RNA, 14 nt, Human adenovirus E
ugccccccgccgcu

SEQ ID NO: 1580523 - RNA, 19 nt, Human adenovirus E
agguuggugcgacugggcu

SEQ ID NO: 1580524 - RNA, 15 nt, Human adenovirus E
cacagggccagcacc

SEQ ID NO: 1580525 - RNA, 15 nt, Human adenovirus E
uagcgguccaucagc

SEQ ID NO: 1580526 - RNA, 21 nt, Human adenovirus E
ccuggugaccguggagcugga

SEQ ID NO: 1580527 - RNA, 17 nt, Human adenovirus E
cggagcacgaggaggag

SEQ ID NO: 1580528 - RNA, 22 nt, Human adenovirus E
accagccccagaugggccuggc

SEQ ID NO: 1580529 - RNA, 16 nt, Human adenovirus E
cagaccgugcagcaga

SEQ ID NO: 1580530 - RNA, 23 nt, Human adenovirus E
ugcuguagcauagucugccugcu

SEQ ID NO: 1580531 - RNA, 16 nt, Human adenovirus E
ugccgcugaccuuccg

SEQ ID NO: 1580532 - RNA, 14 nt, Human adenovirus E
cagccgcggccagg

SEQ ID NO: 1580533 - RNA, 23 nt, Human adenovirus E
cacgccuagaaugaccacaacca

SEQ ID NO: 1580534 - RNA, 20 nt, Human adenovirus E
uaccucugcucuaugcaauu

SEQ ID NO: 1580535 - RNA, 19 nt, Human adenovirus E
ccagcggcgaggaggaugu

SEQ ID NO: 1580536 - RNA, 14 nt, Human adenovirus E
cccauacuccaccu

SEQ ID NO: 1580537 - RNA, 22 nt, Human adenovirus E
cugcaccacgcugcgcccccag

SEQ ID NO: 1580538 - RNA, 15 nt, Human adenovirus E
ggacagccugcaaga

SEQ ID NO: 1580539 - RNA, 13 nt, Human adenovirus E
gaaaguggagcug

SEQ ID NO: 1580540 - RNA, 13 nt, Human adenovirus E
cccgugcagccac

SEQ ID NO: 1580541 - RNA, 13 nt, Human adenovirus E
caggaggucgggg

SEQ ID NO: 1580542 - RNA, 14 nt, Human adenovirus E
ccauaucccagggc

SEQ ID NO: 1580543 - RNA, 20 nt, Human adenovirus E
ucaaccacugcgacaacgac

SEQ ID NO: 1580544 - RNA, 15 nt, Human adenovirus E
cauagucugccugcu

SEQ ID NO: 1580545 - RNA, 12 nt, Human adenovirus E
cgccccagcagc

SEQ ID NO: 1580546 - RNA, 14 nt, Human adenovirus E
caggauucgagcag

SEQ ID NO: 1580547 - RNA, 19 nt, Human adenovirus E
cgccguugucaaccacugc

SEQ ID NO: 1580548 - RNA, 22 nt, Human adenovirus E
cgcgucguuguuggccagcugc

SEQ ID NO: 1580549 - RNA, 18 nt, Human adenovirus E
gcaauccucgcacagaac

SEQ ID NO: 1580550 - RNA, 14 nt, Human adenovirus E
ggcgcggccuggac

SEQ ID NO: 1580551 - RNA, 17 nt, Human adenovirus E
ccaagaccccauagcca

SEQ ID NO: 1580552 - RNA, 20 nt, Human adenovirus E
guggucagcgacgagcagcu

SEQ ID NO: 1580553 - RNA, 17 nt, Human adenovirus E
ucacaccuuccaccuga

SEQ ID NO: 1580554 - RNA, 19 nt, Human adenovirus E
guggccagaucguccaggg

SEQ ID NO: 1580555 - RNA, 16 nt, Human adenovirus E
cagggcccggcccacg

SEQ ID NO: 1580556 - RNA, 17 nt, Human adenovirus E
cagcaccgaggaggagc

SEQ ID NO: 1580557 - RNA, 22 nt, Human adenovirus E
uggacagaaaaucgcccaggca

SEQ ID NO: 1580558 - RNA, 22 nt, Human adenovirus E
uggucgaaaaccgcucccgauc

SEQ ID NO: 1580559 - RNA, 23 nt, Human adenovirus E
cgggacccugccgcugcgcagca

SEQ ID NO: 1580560 - RNA, 22 nt, Human adenovirus E
cccgaugaccggcugcaggugg

SEQ ID NO: 1580561 - RNA, 22 nt, Human adenovirus E
ugcuaccugcugcgccuggcca

SEQ ID NO: 1580562 - RNA, 15 nt, Human adenovirus E
gaagcgugggccugu

SEQ ID NO: 1580563 - RNA, 21 nt, Human adenovirus E
caccacgcugcgcccccagcg

SEQ ID NO: 1580564 - RNA, 19 nt, Human adenovirus E
gcgcgccgguacgcccgcg

SEQ ID NO: 1580565 - RNA, 13 nt, Human adenovirus E
cugcugguggccc

SEQ ID NO: 1580566 - RNA, 22 nt, Human adenovirus E
cggucuucgcggugcccgaggc

SEQ ID NO: 1580567 - RNA, 16 nt, Human adenovirus E
ggagcucagccgcgcc

SEQ ID NO: 1580568 - RNA, 14 nt, Human adenovirus E
gccguccucccgga

SEQ ID NO: 1580569 - RNA, 17 nt, Human adenovirus E
guacuuaguggugcugu

SEQ ID NO: 1580570 - RNA, 18 nt, Human adenovirus E
cucagguguccagcuggc

SEQ ID NO: 1580571 - RNA, 20 nt, Human adenovirus E
ggcgggagcugcggcgcggc

SEQ ID NO: 1580572 - RNA, 21 nt, Human adenovirus E
accucaggcacacgcacuacc

SEQ ID NO: 1580573 - RNA, 18 nt, Human adenovirus E
cgaguucgccccccggcg

SEQ ID NO: 1580574 - RNA, 13 nt, Human adenovirus E
ccacggccagggc

SEQ ID NO: 1580575 - RNA, 16 nt, Human adenovirus E
uaguuuauacauguga

SEQ ID NO: 1580576 - RNA, 13 nt, Human adenovirus E
cgugcgcuccugg

SEQ ID NO: 1580577 - RNA, 22 nt, Human adenovirus E
gaugaggugcaucuuggccugg

SEQ ID NO: 1580578 - RNA, 14 nt, Human adenovirus E
accacacacacaga

SEQ ID NO: 1580579 - RNA, 13 nt, Human adenovirus E
agugcucaggugu

SEQ ID NO: 1580580 - RNA, 14 nt, Human adenovirus E
ugcaccucacagcu

SEQ ID NO: 1580581 - RNA, 12 nt, Human adenovirus E
ccugggccagga

SEQ ID NO: 1580582 - RNA, 23 nt, Human adenovirus E
uaggagcuccuggagcgaggcga

SEQ ID NO: 1580583 - RNA, 13 nt, Human adenovirus E
caaccacaaaaac

SEQ ID NO: 1580584 - RNA, 18 nt, Human adenovirus E
aggcuccuuacgugcccc

SEQ ID NO: 1580585 - RNA, 16 nt, Human adenovirus E
cgcgcuccacgguggc

SEQ ID NO: 1580586 - RNA, 16 nt, Human adenovirus E
cacaccuuccaccuga

SEQ ID NO: 1580587 - RNA, 20 nt, Human adenovirus E
agaaggccgaucccugcuug

SEQ ID NO: 1580588 - RNA, 21 nt, Human adenovirus E
ugcaagcggugcguuccagca

SEQ ID NO: 1580589 - RNA, 17 nt, Human adenovirus E
cacugcuaccugcugcg

SEQ ID NO: 1580590 - RNA, 16 nt, Human adenovirus E
gcagcaggugcugccg

SEQ ID NO: 1580591 - RNA, 13 nt, Human adenovirus E
aucugggccuggu

SEQ ID NO: 1580592 - RNA, 16 nt, Human adenovirus E
agcugcugcucagggg

SEQ ID NO: 1580593 - RNA, 13 nt, Human adenovirus E
augguggcgcagc

SEQ ID NO: 1580594 - RNA, 14 nt, Human adenovirus E
cgaucccugagcuc

SEQ ID NO: 1580595 - RNA, 15 nt, Human adenovirus E
cgccgcaccgcuccc

SEQ ID NO: 1580596 - RNA, 15 nt, Human adenovirus E
uccccgugccagcga

SEQ ID NO: 1580597 - RNA, 19 nt, Human adenovirus E
ccgucaccuccacagcccc

SEQ ID NO: 1580598 - RNA, 16 nt, Human adenovirus E
cagcacucaggcagag

SEQ ID NO: 1580599 - RNA, 20 nt, Human adenovirus E
ccuggugaccguggagcugg

SEQ ID NO: 1580600 - RNA, 15 nt, Human adenovirus E
gacaucggcaccagc

SEQ ID NO: 1580601 - RNA, 14 nt, Human adenovirus E
cugcacgccgcacc

SEQ ID NO: 1580602 - RNA, 18 nt, Human adenovirus E
cauguacgaggaucugga

SEQ ID NO: 1580603 - RNA, 12 nt, Human adenovirus E
ggcgaugcagcc

SEQ ID NO: 1580604 - RNA, 12 nt, Human adenovirus E
uacaccacccuc

SEQ ID NO: 1580605 - RNA, 14 nt, Human adenovirus E
caucgucuccugcu

SEQ ID NO: 1580606 - RNA, 19 nt, Human adenovirus E
agacaugcaucccagcugg

SEQ ID NO: 1580607 - RNA, 18 nt, Human adenovirus E
ccugucuuucguccucgc

SEQ ID NO: 1580608 - RNA, 14 nt, Human adenovirus E
cagcagcagcagaa

SEQ ID NO: 1580609 - RNA, 23 nt, Human adenovirus E
ugagcgaccaggagcugaugcau

SEQ ID NO: 1580610 - RNA, 17 nt, Human adenovirus E
augcaggagggggccac

SEQ ID NO: 1580611 - RNA, 17 nt, Human adenovirus E
uggcccgugaggcgcgc

SEQ ID NO: 1580612 - RNA, 15 nt, Human adenovirus E
caacucguaccuggg

SEQ ID NO: 1580613 - RNA, 14 nt, Human adenovirus E
cgaccaggagcuga

SEQ ID NO: 1580614 - RNA, 16 nt, Human adenovirus E
agcgcaugcggaucuc

SEQ ID NO: 1580615 - RNA, 17 nt, Human adenovirus E
accgccucggaccuggc

SEQ ID NO: 1580616 - RNA, 23 nt, Human adenovirus E
  misc_feature (14)..(14): n is a, c, g, or u
aggucagugggcancggcggcgc

SEQ ID NO: 1580617 - RNA, 17 nt, Human adenovirus E
cagccaucgccaaccuc

SEQ ID NO: 1580618 - RNA, 16 nt, Human adenovirus E
gagcugcggcgcggcc

SEQ ID NO: 1580619 - RNA, 16 nt, Human adenovirus E
ugaccagcaugaaggg

SEQ ID NO: 1580620 - RNA, 13 nt, Human adenovirus E
ucucuucagcacu

SEQ ID NO: 1580621 - RNA, 16 nt, Human adenovirus E
gugcaucuuggccugg

SEQ ID NO: 1580622 - RNA, 23 nt, Human adenovirus E
cgugagccgcgcccugggccagg

SEQ ID NO: 1580623 - RNA, 15 nt, Human adenovirus E
cccgcgaugcgggcg

SEQ ID NO: 1580624 - RNA, 13 nt, Human adenovirus E
ccgcccgcccgcg

SEQ ID NO: 1580625 - RNA, 16 nt, Human adenovirus E
uccggcaccgcuucca

SEQ ID NO: 1580626 - RNA, 12 nt, Human adenovirus E
caaggaggugaa

SEQ ID NO: 1580627 - RNA, 17 nt, Human adenovirus E
cguuacucggagcuggc

SEQ ID NO: 1580628 - RNA, 19 nt, Human adenovirus E
gccgaccgcgauggcucgu

SEQ ID NO: 1580629 - RNA, 13 nt, Human adenovirus E
cggucccccaccc

SEQ ID NO: 1580630 - RNA, 16 nt, Human adenovirus E
cgcucccuggccugca

SEQ ID NO: 1580631 - RNA, 20 nt, Human adenovirus E
gcagcggccaucgccagcau

SEQ ID NO: 1580632 - RNA, 18 nt, Human adenovirus E
cgagggucugggcagcga

SEQ ID NO: 1580633 - RNA, 23 nt, Human adenovirus E
  misc_feature (9)..(9): n is a, c, g, or u
agcacgaangaggccacguggga

SEQ ID NO: 1580634 - RNA, 21 nt, Human adenovirus E
ucauuuccggguucccacgcu

SEQ ID NO: 1580635 - RNA, 17 nt, Human adenovirus E
gagcagaccgugaagga

SEQ ID NO: 1580636 - RNA, 19 nt, Human adenovirus E
cgggugcuucacgcucgcc

SEQ ID NO: 1580637 - RNA, 12 nt, Human adenovirus E
cugacccugagc

SEQ ID NO: 1580638 - RNA, 17 nt, Human adenovirus E
caccucugacccugccg

SEQ ID NO: 1580639 - RNA, 23 nt, Human adenovirus E
cagcgcgcgucguuguuggccag

SEQ ID NO: 1580640 - RNA, 17 nt, Human adenovirus E
acuucaucagcgcccug

SEQ ID NO: 1580641 - RNA, 19 nt, Human adenovirus E
gaccacggcaaccccacgc

SEQ ID NO: 1580642 - RNA, 13 nt, Human adenovirus E
cuccacgcgcaca

SEQ ID NO: 1580643 - RNA, 23 nt, Human adenovirus E
aucccgauauugucuugcugccc

SEQ ID NO: 1580644 - RNA, 12 nt, Human adenovirus E
uacuuccuccuc

SEQ ID NO: 1580645 - RNA, 15 nt, Human adenovirus E
ggugucggggaagga

SEQ ID NO: 1580646 - RNA, 15 nt, Human adenovirus E
cauuaccucugcucu

SEQ ID NO: 1580647 - RNA, 13 nt, Human adenovirus E
uuauuguugcugu

SEQ ID NO: 1580648 - RNA, 16 nt, Human adenovirus E
uucgugagguaaaucc

SEQ ID NO: 1580649 - RNA, 23 nt, Human adenovirus E
ugaagacgccgccgcgcaucucc

SEQ ID NO: 1580650 - RNA, 12 nt, Human adenovirus E
cgcgccaucagc

SEQ ID NO: 1580651 - RNA, 14 nt, Human adenovirus E
acuaccuccaccug

SEQ ID NO: 1580652 - RNA, 11 nt, Human adenovirus E
gugcagaccaa

SEQ ID NO: 1580653 - RNA, 21 nt, Human adenovirus E
cgaggaggauguccaagcgca

SEQ ID NO: 1580654 - RNA, 13 nt, Human adenovirus E
cgcaaucaccuca

SEQ ID NO: 1580655 - RNA, 14 nt, Human adenovirus E
cggcgcccgccuac

SEQ ID NO: 1580656 - RNA, 15 nt, Human adenovirus E
gaaguccagagaucc

SEQ ID NO: 1580657 - RNA, 16 nt, Human adenovirus E
ggcuggagccgcagcu

SEQ ID NO: 1580658 - RNA, 22 nt, Human adenovirus E
cucccaggacauggaauacacc

SEQ ID NO: 1580659 - RNA, 14 nt, Human adenovirus E
caccaggcaggcca

SEQ ID NO: 1580660 - RNA, 20 nt, Human adenovirus E
agcccccgcuggaggcuccu

SEQ ID NO: 1580661 - RNA, 13 nt, Human adenovirus E
cauggcgcugacg

SEQ ID NO: 1580662 - RNA, 13 nt, Human adenovirus E
gcgcuaccugcuc

SEQ ID NO: 1580663 - RNA, 15 nt, Human adenovirus E
gcagguggacugagg

SEQ ID NO: 1580664 - RNA, 22 nt, Human adenovirus E
auccugcccgccaccugcuccg

SEQ ID NO: 1580665 - RNA, 22 nt, Human adenovirus E
cacgagaaccgccuggggcaga

SEQ ID NO: 1580666 - RNA, 19 nt, Human adenovirus E
cgauauugucuugcugccc

SEQ ID NO: 1580667 - RNA, 15 nt, Human adenovirus E
uagguuuuggaucag

SEQ ID NO: 1580668 - RNA, 11 nt, Human adenovirus E
agcagccgccg

SEQ ID NO: 1580669 - RNA, 20 nt, Human adenovirus E
ggccgaccccgucaccacca

SEQ ID NO: 1580670 - RNA, 20 nt, Human adenovirus E
guuccaggcggucccagagc

SEQ ID NO: 1580671 - RNA, 20 nt, Human adenovirus E
gcauggucucggugacggcg

SEQ ID NO: 1580672 - RNA, 21 nt, Human adenovirus E
agacgcgcggccacggcggcg

SEQ ID NO: 1580673 - RNA, 14 nt, Human adenovirus E
gccaccacccccag

SEQ ID NO: 1580674 - RNA, 12 nt, Human adenovirus E
caucacaccuuc

SEQ ID NO: 1580675 - RNA, 20 nt, Human adenovirus E
cccaagcagaaccuguucag

SEQ ID NO: 1580676 - RNA, 15 nt, Human adenovirus E
cagcagccccaggcc

SEQ ID NO: 1580677 - RNA, 17 nt, Human adenovirus E
ccacggcccucagcauc

SEQ ID NO: 1580678 - RNA, 15 nt, Human adenovirus E
acuccguggccugga

SEQ ID NO: 1580679 - RNA, 21 nt, Human adenovirus E
augggcgcggaccugcacugg

SEQ ID NO: 1580680 - RNA, 22 nt, Human adenovirus E
agcaucuggcccggcaggccac

SEQ ID NO: 1580681 - RNA, 17 nt, Human adenovirus E
cagaccgugaaggagga

SEQ ID NO: 1580682 - RNA, 17 nt, Human adenovirus E
cugaccaccguggugca

SEQ ID NO: 1580683 - RNA, 16 nt, Human adenovirus E
ccaccuaccacaucuu

SEQ ID NO: 1580684 - RNA, 22 nt, Human adenovirus E
acuucaaccccuucuccggcuc

SEQ ID NO: 1580685 - RNA, 24 nt, Human adenovirus E
ggaugcaugcggggggagaugagg

SEQ ID NO: 1580686 - RNA, 13 nt, Human adenovirus E
gugcaacacagaa

SEQ ID NO: 1580687 - RNA, 13 nt, Human adenovirus E
ugcguacccggag

SEQ ID NO: 1580688 - RNA, 22 nt, Human adenovirus E
aggcacacgcacuaccaccacu

SEQ ID NO: 1580689 - RNA, 12 nt, Human adenovirus E
cccagagcugga

SEQ ID NO: 1580690 - RNA, 21 nt, Human adenovirus E
ggcggcgcugcagagccagcc

SEQ ID NO: 1580691 - RNA, 22 nt, Human adenovirus E
ucuucuccaucgcuuacagccu

SEQ ID NO: 1580692 - RNA, 22 nt, Human adenovirus E
augcaccugugggaccugcugg

SEQ ID NO: 1580693 - RNA, 14 nt, Human adenovirus E
ggaggaggcagagg

SEQ ID NO: 1580694 - RNA, 19 nt, Human adenovirus E
augaugauauucuggagca

SEQ ID NO: 1580695 - RNA, 23 nt, Human adenovirus E
cccgauuaugcagggugaugagg

SEQ ID NO: 1580696 - RNA, 14 nt, Human adenovirus E
cauggagacucagc

SEQ ID NO: 1580697 - RNA, 23 nt, Human adenovirus E
cagacccacugcugaaccucuau

SEQ ID NO: 1580698 - RNA, 16 nt, Human adenovirus E
cugcaaacuuccucca

SEQ ID NO: 1580699 - RNA, 20 nt, Human adenovirus E
cgggccgcgaacgcucugca

SEQ ID NO: 1580700 - RNA, 13 nt, Human adenovirus E
aaguaccucaccu

SEQ ID NO: 1580701 - RNA, 16 nt, Human adenovirus E
ccgccucggaccuggc

SEQ ID NO: 1580702 - RNA, 21 nt, Human adenovirus E
auuagcagucauaaucaucug

SEQ ID NO: 1580703 - RNA, 16 nt, Human adenovirus E
uagcauguagaacugg

SEQ ID NO: 1580704 - RNA, 15 nt, Human adenovirus E
acagggcaauccucg

SEQ ID NO: 1580705 - RNA, 15 nt, Human adenovirus E
aagggccgcgggguc

SEQ ID NO: 1580706 - RNA, 14 nt, Human adenovirus E
aguucguggaggag

SEQ ID NO: 1580707 - RNA, 19 nt, Human adenovirus E
augaggccgagccacagcg

SEQ ID NO: 1580708 - RNA, 13 nt, Human adenovirus E
ugagguggacgag

SEQ ID NO: 1580709 - RNA, 16 nt, Human adenovirus E
cacggcaaccccacgc

SEQ ID NO: 1580710 - RNA, 14 nt, Human adenovirus E
ccagacgcgcggcu

SEQ ID NO: 1580711 - RNA, 16 nt, Human adenovirus E
acuuccagccacgacc

SEQ ID NO: 1580712 - RNA, 20 nt, Human adenovirus E
cgaaggaccccauccaggug

SEQ ID NO: 1580713 - RNA, 17 nt, Human adenovirus E
gcagaccaaccuggacc

SEQ ID NO: 1580714 - RNA, 19 nt, Human adenovirus E
ggcgcuguccggccgcgag

SEQ ID NO: 1580715 - RNA, 14 nt, Human adenovirus E
ugacggcgcagcug

SEQ ID NO: 1580716 - RNA, 21 nt, Human adenovirus E
caggaggcgcucuccccccag

SEQ ID NO: 1580717 - RNA, 16 nt, Human adenovirus E
cuauguuggcacagca

SEQ ID NO: 1580718 - RNA, 16 nt, Human adenovirus E
ggcuguggaccucggc

SEQ ID NO: 1580719 - RNA, 17 nt, Human adenovirus E
ccgcaucugcaccucac

SEQ ID NO: 1580720 - RNA, 22 nt, Human adenovirus E
ggcgcccugcgcgucggccagg

SEQ ID NO: 1580721 - RNA, 18 nt, Human adenovirus E
gauguuggagauggcgag

SEQ ID NO: 1580722 - RNA, 15 nt, Human adenovirus E
aggcuggagccgcag

SEQ ID NO: 1580723 - RNA, 15 nt, Human adenovirus E
uaaaauuaacaauua

SEQ ID NO: 1580724 - RNA, 14 nt, Human adenovirus E
ugcacuaccucuuc

SEQ ID NO: 1580725 - RNA, 16 nt, Human adenovirus E
caagcggccacagugc

SEQ ID NO: 1580726 - RNA, 11 nt, Human adenovirus E
ggaugagcucg

SEQ ID NO: 1580727 - RNA, 17 nt, Human adenovirus E
accucgacccccagacc

SEQ ID NO: 1580728 - RNA, 16 nt, Human adenovirus E
gcccgccaccugcucc

SEQ ID NO: 1580729 - RNA, 22 nt, Human adenovirus E
cauggaauacaccacccucucc

SEQ ID NO: 1580730 - RNA, 12 nt, Human adenovirus E
acuccaccucca

SEQ ID NO: 1580731 - RNA, 19 nt, Human adenovirus E
gcugggucugcgaccugac

SEQ ID NO: 1580732 - RNA, 23 nt, Human adenovirus E
ccgacaaaaaucagacccacugc

SEQ ID NO: 1580733 - RNA, 12 nt, Human adenovirus E
caguaguacaga

SEQ ID NO: 1580734 - RNA, 16 nt, Human adenovirus E
uccucccggaggaggg

SEQ ID NO: 1580735 - RNA, 13 nt, Human adenovirus E
cagcagcugaagc

SEQ ID NO: 1580736 - RNA, 23 nt, Human adenovirus E
gagacgcgcggccacggcggcgg

SEQ ID NO: 1580737 - RNA, 19 nt, Human adenovirus E
agagcgugaugcagcaggc

SEQ ID NO: 1580738 - RNA, 21 nt, Human adenovirus E
gcaugucccgcccgcggcgag

SEQ ID NO: 1580739 - RNA, 13 nt, Human adenovirus E
gucgggggcagga

SEQ ID NO: 1580740 - RNA, 22 nt, Human adenovirus E
gcggcuggugauccggggcaga

SEQ ID NO: 1580741 - RNA, 14 nt, Human adenovirus E
aaagguuggggcac

SEQ ID NO: 1580742 - RNA, 15 nt, Human adenovirus E
cgagacgcccaggcc

SEQ ID NO: 1580743 - RNA, 14 nt, Human adenovirus E
caacagcugaggau

SEQ ID NO: 1580744 - RNA, 17 nt, Human adenovirus E
cuccugcacaggcagca

SEQ ID NO: 1580745 - RNA, 17 nt, Human adenovirus E
cggaauccugcccgcca

SEQ ID NO: 1580746 - RNA, 20 nt, Human adenovirus E
cucgcacuccacgagccagg

SEQ ID NO: 1580747 - RNA, 13 nt, Human adenovirus E
acccucgcucugg

SEQ ID NO: 1580748 - RNA, 16 nt, Human adenovirus E
ccggaugcaggggcgg

SEQ ID NO: 1580749 - RNA, 22 nt, Human adenovirus E
caaccgcaacucguaccugggc

SEQ ID NO: 1580750 - RNA, 13 nt, Human adenovirus E
cuaccgcagcugg

SEQ ID NO: 1580751 - RNA, 22 nt, Human adenovirus E
ucagcacucucaacuccucggg

SEQ ID NO: 1580752 - RNA, 12 nt, Human adenovirus E
uauuugcaauug

SEQ ID NO: 1580753 - RNA, 18 nt, Human adenovirus E
ucugccacaccuggcaga

SEQ ID NO: 1580754 - RNA, 18 nt, Human adenovirus E
cuuccagauaacuggaca

SEQ ID NO: 1580755 - RNA, 14 nt, Human adenovirus E
ugcuguaggauuca

SEQ ID NO: 1580756 - RNA, 19 nt, Human adenovirus E
ucgugcagaaccccaccag

SEQ ID NO: 1580757 - RNA, 16 nt, Human adenovirus E
gucgaugggcucgccu

SEQ ID NO: 1580758 - RNA, 12 nt, Human adenovirus E
agcccgaggaga

SEQ ID NO: 1580759 - RNA, 14 nt, Human adenovirus E
ccgcgagugccccc

SEQ ID NO: 1580760 - RNA, 21 nt, Human adenovirus E
ccacccugugucgucaccgcc

SEQ ID NO: 1580761 - RNA, 13 nt, Human adenovirus E
gaccguggagcug

SEQ ID NO: 1580762 - RNA, 17 nt, Human adenovirus E
gacuucacccccacgga

SEQ ID NO: 1580763 - RNA, 21 nt, Human adenovirus E
cuagcauguagaacugguuga

SEQ ID NO: 1580764 - RNA, 15 nt, Human adenovirus E
uggcccgcgggcagg

SEQ ID NO: 1580765 - RNA, 17 nt, Human adenovirus E
gcgcgguaggcccugga

SEQ ID NO: 1580766 - RNA, 23 nt, Human adenovirus E
cuucacggacagcggcagcauca

SEQ ID NO: 1580767 - RNA, 23 nt, Human adenovirus E
ccugguguacaacgcgcugcugg

SEQ ID NO: 1580768 - RNA, 16 nt, Human adenovirus E
agggagagacagcugc

SEQ ID NO: 1580769 - RNA, 22 nt, Human adenovirus E
cugaggggcgugccccagggca

SEQ ID NO: 1580770 - RNA, 20 nt, Human adenovirus E
guccacacugguggccaccu

SEQ ID NO: 1580771 - RNA, 15 nt, Human adenovirus E
ccacccucgcucugg

SEQ ID NO: 1580772 - RNA, 17 nt, Human adenovirus E
gaucgugaacauucugg

SEQ ID NO: 1580773 - RNA, 18 nt, Human adenovirus E
cagaagcaagcuccagcu

SEQ ID NO: 1580774 - RNA, 20 nt, Human adenovirus E
gggcaugagcccgucccggg

SEQ ID NO: 1580775 - RNA, 18 nt, Human adenovirus E
cucucaucaaguuucaau

SEQ ID NO: 1580776 - RNA, 20 nt, Human adenovirus E
ugcuaccgccaaaaaucaga

SEQ ID NO: 1580777 - RNA, 20 nt, Human adenovirus E
gggcaucaacgggguggugg

SEQ ID NO: 1580778 - RNA, 16 nt, Human adenovirus E
guggcggugcaggccu

SEQ ID NO: 1580779 - RNA, 15 nt, Human adenovirus E
accggcucucggcca

SEQ ID NO: 1580780 - RNA, 19 nt, Human adenovirus E
ucacaugcucaucgcuauu

SEQ ID NO: 1580781 - RNA, 16 nt, Human adenovirus E
guuagaguuuggaagc

SEQ ID NO: 1580782 - RNA, 22 nt, Human adenovirus E
ugguggacaagaugagccgcug

SEQ ID NO: 1580783 - RNA, 17 nt, Human adenovirus E
gcaagucuacuggucgc

SEQ ID NO: 1580784 - RNA, 13 nt, Human adenovirus E
aggcagaggagga

SEQ ID NO: 1580785 - RNA, 12 nt, Human adenovirus E
uccaagccagcc

SEQ ID NO: 1580786 - RNA, 14 nt, Human adenovirus E
gacuugggugggag

SEQ ID NO: 1580787 - RNA, 16 nt, Human adenovirus E
gaaugagcagagucag

SEQ ID NO: 1580788 - RNA, 22 nt, Human adenovirus E
  misc_feature (8)..(8): n is a, c, g, or u
acuugcangaguuuuuccaggg

SEQ ID NO: 1580789 - RNA, 13 nt, Human adenovirus E
gggcaccuggagc

SEQ ID NO: 1580790 - RNA, 18 nt, Human adenovirus E
aucagacaugcaucccag

SEQ ID NO: 1580791 - RNA, 17 nt, Human adenovirus E
cggucaacuccuccucc

SEQ ID NO: 1580792 - RNA, 17 nt, Human adenovirus E
ccggcgggcugcaaacu

SEQ ID NO: 1580793 - RNA, 14 nt, Human adenovirus E
aggaggagcuggca

SEQ ID NO: 1580794 - RNA, 23 nt, Human adenovirus E
ggcgcaucgcccggcggcaccgg

SEQ ID NO: 1580795 - RNA, 14 nt, Human adenovirus E
cccgggcaaccugg

SEQ ID NO: 1580796 - RNA, 21 nt, Human adenovirus E
ugcaggagcgcgggcugccgc

SEQ ID NO: 1580797 - RNA, 14 nt, Human adenovirus E
agcagccgccgcca

SEQ ID NO: 1580798 - RNA, 14 nt, Human adenovirus E
ucauuuuuccagcc

SEQ ID NO: 1580799 - RNA, 21 nt, Human adenovirus E
cggacuacuucuuccagacca

SEQ ID NO: 1580800 - RNA, 21 nt, Human adenovirus E
uucacccccacggaggccagc

SEQ ID NO: 1580801 - RNA, 13 nt, Human adenovirus E
gcgcccagcaaga

SEQ ID NO: 1580802 - RNA, 16 nt, Human adenovirus E
acauguggagcuacca

SEQ ID NO: 1580803 - RNA, 14 nt, Human adenovirus E
aggagaaccugcac

SEQ ID NO: 1580804 - RNA, 19 nt, Human adenovirus E
aggccgaaguccagcugac

SEQ ID NO: 1580805 - RNA, 22 nt, Human adenovirus E
uaccggacaagauaaacaccgc

SEQ ID NO: 1580806 - RNA, 14 nt, Human adenovirus E
ggagauagcauaga

SEQ ID NO: 1580807 - RNA, 14 nt, Human adenovirus E
cagcaagccgcuga

SEQ ID NO: 1580808 - RNA, 20 nt, Human adenovirus E
cagcgguguccggggcugcu

SEQ ID NO: 1580809 - RNA, 12 nt, Human adenovirus E
ggcagaggagga

SEQ ID NO: 1580810 - RNA, 21 nt, Human adenovirus E
gaagugggcguggggcagucc

SEQ ID NO: 1580811 - RNA, 21 nt, Human adenovirus E
ugguggucaugcugacgagcc

SEQ ID NO: 1580812 - RNA, 15 nt, Human adenovirus E
gggcguagagcuugg

SEQ ID NO: 1580813 - RNA, 14 nt, Human adenovirus E
ucaacuccuccucc

SEQ ID NO: 1580814 - RNA, 18 nt, Human adenovirus E
acagcaccaacgugcaga

SEQ ID NO: 1580815 - RNA, 22 nt, Human adenovirus E
cagccggcgcuucugcccccgc

SEQ ID NO: 1580816 - RNA, 16 nt, Human adenovirus E
cugaccaaccuggucu

SEQ ID NO: 1580817 - RNA, 18 nt, Human adenovirus E
acgccugcugggccuugg

SEQ ID NO: 1580818 - RNA, 17 nt, Human adenovirus E
ccacgcgcacauccaga

SEQ ID NO: 1580819 - RNA, 14 nt, Human adenovirus E
uucagagacaggag

SEQ ID NO: 1580820 - RNA, 19 nt, Human adenovirus E
cugcccccgccccagcagc

SEQ ID NO: 1580821 - RNA, 20 nt, Human adenovirus E
gucgggggcaggagcaggaa

SEQ ID NO: 1580822 - RNA, 16 nt, Human adenovirus E
gaucugacacuacaga

SEQ ID NO: 1580823 - RNA, 15 nt, Human adenovirus E
ccucagcguggagga

SEQ ID NO: 1580824 - RNA, 20 nt, Human adenovirus E
uccgaccgagucgcggauga

SEQ ID NO: 1580825 - RNA, 21 nt, Human adenovirus E
ugaacauucugcagagcaucg

SEQ ID NO: 1580826 - RNA, 23 nt, Human adenovirus E
gcaguagucgagggucuccugga

SEQ ID NO: 1580827 - RNA, 15 nt, Human adenovirus E
ccugcacuggcagcc

SEQ ID NO: 1580828 - RNA, 19 nt, Human adenovirus E
gaaucuuuauuugauuuuu

SEQ ID NO: 1580829 - RNA, 14 nt, Human adenovirus E
augcuacccacgug

SEQ ID NO: 1580830 - RNA, 23 nt, Human adenovirus E
gccugguggacaagaugagccgc

SEQ ID NO: 1580831 - RNA, 16 nt, Human adenovirus E
agaagcgugggccugu

SEQ ID NO: 1580832 - RNA, 19 nt, Human adenovirus E
augcaggggcggcaggggc

SEQ ID NO: 1580833 - RNA, 14 nt, Human adenovirus E
auuuggaggaagac

SEQ ID NO: 1580834 - RNA, 18 nt, Human adenovirus E
ugcucgggcaucagcugg

SEQ ID NO: 1580835 - RNA, 19 nt, Human adenovirus E
gaggcagcagcagcagaaa

SEQ ID NO: 1580836 - RNA, 14 nt, Human adenovirus E
cucgagcgcccagu

SEQ ID NO: 1580837 - RNA, 14 nt, Human adenovirus E
cagcgccccgcauc

SEQ ID NO: 1580838 - RNA, 12 nt, Human adenovirus E
gggaggcgcugc

SEQ ID NO: 1580839 - RNA, 14 nt, Human adenovirus E
ggccggccggauuc

SEQ ID NO: 1580840 - RNA, 23 nt, Human adenovirus E
accgugcggugagcgccagcagg

SEQ ID NO: 1580841 - RNA, 21 nt, Human adenovirus E
  misc_feature (6)..(6): n is a, c, g, or u
cccaunuagcagucccacugc

SEQ ID NO: 1580842 - RNA, 14 nt, Human adenovirus E
gauaggagcuccug

SEQ ID NO: 1580843 - RNA, 13 nt, Human adenovirus E
aagccacagaagu

SEQ ID NO: 1580844 - RNA, 20 nt, Human adenovirus E
gcgcagagcgcccuccaccg

SEQ ID NO: 1580845 - RNA, 16 nt, Human adenovirus E
ccgcagaacagggcaa

SEQ ID NO: 1580846 - RNA, 18 nt, Human adenovirus E
gccagcgccggcaggacc

SEQ ID NO: 1580847 - RNA, 17 nt, Human adenovirus E
acucgcgccugcugcug

SEQ ID NO: 1580848 - RNA, 14 nt, Human adenovirus E
cggcucccccggcc

SEQ ID NO: 1580849 - RNA, 15 nt, Human adenovirus E
gcacucaggcagagg

SEQ ID NO: 1580850 - RNA, 14 nt, Human adenovirus E
cacgccgcaccgcu

SEQ ID NO: 1580851 - RNA, 19 nt, Human adenovirus E
cggcgcgccaucagcaagc

SEQ ID NO: 1580852 - RNA, 14 nt, Human adenovirus E
agaggcagcagcag

SEQ ID NO: 1580853 - RNA, 19 nt, Human adenovirus E
caccucgcuuacgcacguc

SEQ ID NO: 1580854 - RNA, 22 nt, Human adenovirus E
acaucacccucugguugaacau

SEQ ID NO: 1580855 - RNA, 18 nt, Human adenovirus E
cuucugccucgauggugg

SEQ ID NO: 1580856 - RNA, 15 nt, Human adenovirus E
cgcagugcaggggga

SEQ ID NO: 1580857 - RNA, 16 nt, Human adenovirus E
cucaaguccagcaaag

SEQ ID NO: 1580858 - RNA, 21 nt, Human adenovirus E
cucgggccgcgaacgcucugc

SEQ ID NO: 1580859 - RNA, 11 nt, Human adenovirus E
ggaucuucagc

SEQ ID NO: 1580860 - RNA, 22 nt, Human adenovirus E
accugggauccaugguggcgcu

SEQ ID NO: 1580861 - RNA, 22 nt, Human adenovirus E
cugaccaccguggugcagaaca

SEQ ID NO: 1580862 - RNA, 19 nt, Human adenovirus E
gccgggccuuggaggcggc

SEQ ID NO: 1580863 - RNA, 14 nt, Human adenovirus E
agccgccuccaccc

SEQ ID NO: 1580864 - RNA, 13 nt, Human adenovirus E
aaucucuccucgc

SEQ ID NO: 1580865 - RNA, 13 nt, Human adenovirus E
ggcuuugagcucg

SEQ ID NO: 1580866 - RNA, 13 nt, Human adenovirus E
agcaccgccccgc

SEQ ID NO: 1580867 - RNA, 22 nt, Human adenovirus E
caaccuggaagccacccugaac

SEQ ID NO: 1580868 - RNA, 14 nt, Human adenovirus E
cagcacacaacagg

SEQ ID NO: 1580869 - RNA, 21 nt, Human adenovirus E
cgcagagcgcccuccaccggc

SEQ ID NO: 1580870 - RNA, 22 nt, Human adenovirus E
  misc_feature (9)..(9): n is a, c, g, or u
ugccaaccnuacuuuuuccacc

SEQ ID NO: 1580871 - RNA, 13 nt, Human adenovirus E
agcagccgcggcc

SEQ ID NO: 1580872 - RNA, 14 nt, Human adenovirus E
ugcaucugcugcug

SEQ ID NO: 1580873 - RNA, 20 nt, Human adenovirus E
ccaacgugcagaccaaccug

SEQ ID NO: 1580874 - RNA, 20 nt, Human adenovirus E
gagguccacacugguggcca

SEQ ID NO: 1580875 - RNA, 13 nt, Human adenovirus E
acgaggaggaggc

SEQ ID NO: 1580876 - RNA, 21 nt, Human adenovirus E
gcagagucgggggcaggagca

SEQ ID NO: 1580877 - RNA, 18 nt, Human adenovirus E
aagccugguggacaagau

SEQ ID NO: 1580878 - RNA, 17 nt, Human adenovirus E
cuauguuggcacagcac

SEQ ID NO: 1580879 - RNA, 13 nt, Human adenovirus E
gcuguccacgagc

SEQ ID NO: 1580880 - RNA, 16 nt, Human adenovirus E
caggccgaaguccagc

SEQ ID NO: 1580881 - RNA, 14 nt, Human adenovirus E
gcugcacaccaccc

SEQ ID NO: 1580882 - RNA, 14 nt, Human adenovirus E
caaccaaccucugg

SEQ ID NO: 1580883 - RNA, 12 nt, Human adenovirus E
acacugguggcc

SEQ ID NO: 1580884 - RNA, 15 nt, Human adenovirus E
cagauccucguccgc

SEQ ID NO: 1580885 - RNA, 16 nt, Human adenovirus E
gugggcggcggccugg

SEQ ID NO: 1580886 - RNA, 20 nt, Human adenovirus E
cgugcggugagcgccagcag

SEQ ID NO: 1580887 - RNA, 16 nt, Human adenovirus E
gagacacacuuggaaa

SEQ ID NO: 1580888 - RNA, 20 nt, Human adenovirus E
uggaggaagacugggacagc

SEQ ID NO: 1580889 - RNA, 22 nt, Human adenovirus E
accccauccagguguagguuuc

SEQ ID NO: 1580890 - RNA, 19 nt, Human adenovirus E
cucagcacccagcccgcca

SEQ ID NO: 1580891 - RNA, 14 nt, Human adenovirus E
aacgcgcacaaaaa

SEQ ID NO: 1580892 - RNA, 16 nt, Human adenovirus E
auucgcaagaggcagc

SEQ ID NO: 1580893 - RNA, 19 nt, Human adenovirus E
gccccucagcguggaggag

SEQ ID NO: 1580894 - RNA, 14 nt, Human adenovirus E
gauggccacgggca

SEQ ID NO: 1580895 - RNA, 19 nt, Human adenovirus E
ggucuucgcggugcccgag

SEQ ID NO: 1580896 - RNA, 17 nt, Human adenovirus E
uccacgcgcacauccag

SEQ ID NO: 1580897 - RNA, 17 nt, Human adenovirus E
gugcgcgugcgcgggca

SEQ ID NO: 1580898 - RNA, 22 nt, Human adenovirus E
gcugaacgccuuccucagcacc

SEQ ID NO: 1580899 - RNA, 15 nt, Human adenovirus E
gcucugaaccugccc

SEQ ID NO: 1580900 - RNA, 17 nt, Human adenovirus E
gccgccgcgcaucucca

SEQ ID NO: 1580901 - RNA, 14 nt, Human adenovirus E
cgcucccuggggcg

SEQ ID NO: 1580902 - RNA, 20 nt, Human adenovirus E
caagaugagccgcuggaaga

SEQ ID NO: 1580903 - RNA, 17 nt, Human adenovirus E
uuggacccaggccaugc

SEQ ID NO: 1580904 - RNA, 22 nt, Human adenovirus E
cacggccaccaaggccgccgcc

SEQ ID NO: 1580905 - RNA, 22 nt, Human adenovirus E
caccaacuucaucagcgcccug

SEQ ID NO: 1580906 - RNA, 14 nt, Human adenovirus E
cucggccauccugg

SEQ ID NO: 1580907 - RNA, 19 nt, Human adenovirus E
ggaagaaggaaggcagcga

SEQ ID NO: 1580908 - RNA, 18 nt, Human adenovirus E
gcgccgggcggcaggggc

SEQ ID NO: 1580909 - RNA, 19 nt, Human adenovirus E
cgggaugcgucgccaccac

SEQ ID NO: 1580910 - RNA, 12 nt, Human adenovirus E
ggggcggccagc

SEQ ID NO: 1580911 - RNA, 16 nt, Human adenovirus E
cgugaccuugcagcag

SEQ ID NO: 1580912 - RNA, 13 nt, Human adenovirus E
aagcagcagcagc

SEQ ID NO: 1580913 - RNA, 21 nt, Human adenovirus E
cagcaucaucugggccugguc

SEQ ID NO: 1580914 - RNA, 23 nt, Human adenovirus E
ucgauggugaagaugccgggcag

SEQ ID NO: 1580915 - RNA, 20 nt, Human adenovirus E
ccugcaagacagucuggagg

SEQ ID NO: 1580916 - RNA, 17 nt, Human adenovirus E
acggucaacuccuccuc

SEQ ID NO: 1580917 - RNA, 18 nt, Human adenovirus E
cauggaauacaccacccu

SEQ ID NO: 1580918 - RNA, 13 nt, Human adenovirus E
cggucgcagaaga

SEQ ID NO: 1580919 - RNA, 16 nt, Human adenovirus E
gaggaagacugggaca

SEQ ID NO: 1580920 - RNA, 22 nt, Human adenovirus E
ccgccccuaacggucgcccguc

SEQ ID NO: 1580921 - RNA, 15 nt, Human adenovirus E
aggacccggagacgc

SEQ ID NO: 1580922 - RNA, 19 nt, Human adenovirus E
ccgcagcaguggcagcggc

SEQ ID NO: 1580923 - RNA, 13 nt, Human adenovirus E
agcagcgagcugg

SEQ ID NO: 1580924 - RNA, 17 nt, Human adenovirus E
cacggcguacgagcaga

SEQ ID NO: 1580925 - RNA, 19 nt, Human adenovirus E
gcgcgccgggcggcagggg

SEQ ID NO: 1580926 - RNA, 17 nt, Human adenovirus E
ggaggaugcagcagcug

SEQ ID NO: 1580927 - RNA, 16 nt, Human adenovirus E
cuggccguguugcucu

SEQ ID NO: 1580928 - RNA, 16 nt, Human adenovirus E
cacgccgcaccgcucc

SEQ ID NO: 1580929 - RNA, 15 nt, Human adenovirus E
gccagcacccagacc

SEQ ID NO: 1580930 - RNA, 12 nt, Human adenovirus E
uacggcgcggcc

SEQ ID NO: 1580931 - RNA, 17 nt, Human adenovirus E
cuggagugccugcgccg

SEQ ID NO: 1580932 - RNA, 16 nt, Human adenovirus E
cgagggcguggcugcc

SEQ ID NO: 1580933 - RNA, 16 nt, Human adenovirus E
cgcgcgaggaggugac

SEQ ID NO: 1580934 - RNA, 15 nt, Human adenovirus E
ggaacuacagcaggc

SEQ ID NO: 1580935 - RNA, 18 nt, Human adenovirus E
caugagcucgugucuccg

SEQ ID NO: 1580936 - RNA, 20 nt, Human adenovirus E
uaaucuuaccauugucaaug

SEQ ID NO: 1580937 - RNA, 20 nt, Human adenovirus E
guauccggggaguccagcgc

SEQ ID NO: 1580938 - RNA, 20 nt, Human adenovirus E
cacgugagccgcgcccuggg

SEQ ID NO: 1580939 - RNA, 17 nt, Human adenovirus E
uuugccuucaccaccug

SEQ ID NO: 1580940 - RNA, 18 nt, Human adenovirus E
aaccccaccacccagacc

SEQ ID NO: 1580941 - RNA, 13 nt, Human adenovirus E
gcacucccaguuc

SEQ ID NO: 1580942 - RNA, 19 nt, Human adenovirus E
gacuccguggccuggaggc

SEQ ID NO: 1580943 - RNA, 21 nt, Human adenovirus E
ugcagcgaagagaccccgggu

SEQ ID NO: 1580944 - RNA, 24 nt, Human adenovirus E
gcgaugggcccgugggcggcggcc

SEQ ID NO: 1580945 - RNA, 20 nt, Human adenovirus E
cccguccucuucccacuccc

SEQ ID NO: 1580946 - RNA, 18 nt, Human adenovirus E
cccgggcaaccuggaagc

SEQ ID NO: 1580947 - RNA, 14 nt, Human adenovirus E
cagcaaccugcugg

SEQ ID NO: 1580948 - RNA, 23 nt, Human adenovirus E
acugucuuccggaucgcugucca

SEQ ID NO: 1580949 - RNA, 19 nt, Human adenovirus E
uggcauuguuuuuugcaau

SEQ ID NO: 1580950 - RNA, 21 nt, Human adenovirus E
ccucggacgucaccugcggcg

SEQ ID NO: 1580951 - RNA, 18 nt, Human adenovirus E
ccgguccuuccagggucg

SEQ ID NO: 1580952 - RNA, 16 nt, Human adenovirus E
cacacgcccagcacac

SEQ ID NO: 1580953 - RNA, 19 nt, Human adenovirus E
cuccugcuugcaggccugc

SEQ ID NO: 1580954 - RNA, 16 nt, Human adenovirus E
cguaggugagcucguc

SEQ ID NO: 1580955 - RNA, 21 nt, Human adenovirus E
gacuuggcggauggcuggcag

SEQ ID NO: 1580956 - RNA, 20 nt, Human adenovirus E
cgcgcgcaacaugguagccc

SEQ ID NO: 1580957 - RNA, 21 nt, Human adenovirus E
auaauuuucauuuuuccagcc

SEQ ID NO: 1580958 - RNA, 19 nt, Human adenovirus E
uggugaccguggagcugga

SEQ ID NO: 1580959 - RNA, 19 nt, Human adenovirus E
ugcaggaccacaugcuugg

SEQ ID NO: 1580960 - RNA, 16 nt, Human adenovirus E
ggccaucgugcagaac

SEQ ID NO: 1580961 - RNA, 17 nt, Human adenovirus E
gcggcggagcggcaucu

SEQ ID NO: 1580962 - RNA, 14 nt, Human adenovirus E
gaggagguggaaga

SEQ ID NO: 1580963 - RNA, 20 nt, Human adenovirus E
guacugcggcagaugcgccc

SEQ ID NO: 1580964 - RNA, 16 nt, Human adenovirus E
cagaugaaaagggacg

SEQ ID NO: 1580965 - RNA, 19 nt, Human adenovirus E
ggcugacguccugcaggac

SEQ ID NO: 1580966 - RNA, 20 nt, Human adenovirus E
caauggaggacccaccgcuc

SEQ ID NO: 1580967 - RNA, 12 nt, Human adenovirus E
uauucuggagca

SEQ ID NO: 1580968 - RNA, 18 nt, Human adenovirus E
cggcgggcgcagcagcgc

SEQ ID NO: 1580969 - RNA, 19 nt, Human adenovirus E
cuggccguguugcucuacu

SEQ ID NO: 1580970 - RNA, 13 nt, Human adenovirus E
gcgcaucuccagg

SEQ ID NO: 1580971 - RNA, 17 nt, Human adenovirus E
ccggugccgcccaggac

SEQ ID NO: 1580972 - RNA, 22 nt, Human adenovirus E
ccuuccgcgagugccccccgcc

SEQ ID NO: 1580973 - RNA, 20 nt, Human adenovirus E
ugcaagcgccgcagcagugg

SEQ ID NO: 1580974 - RNA, 22 nt, Human adenovirus E
uaccaccacuacagccuaggcc

SEQ ID NO: 1580975 - RNA, 14 nt, Human adenovirus E
ccuccaccaacgcc

SEQ ID NO: 1580976 - RNA, 17 nt, Human adenovirus E
uccugcacaggcagcaa

SEQ ID NO: 1580977 - RNA, 21 nt, Human adenovirus E
ggagaaagcaagcagcacgga

SEQ ID NO: 1580978 - RNA, 11 nt, Human adenovirus E
cuggacagaaa

SEQ ID NO: 1580979 - RNA, 13 nt, Human adenovirus E
augggccuggccg

SEQ ID NO: 1580980 - RNA, 20 nt, Human adenovirus E
ggcggccuugcgcagggagg

SEQ ID NO: 1580981 - RNA, 17 nt, Human adenovirus E
cauccucgaacgcuccg

SEQ ID NO: 1580982 - RNA, 19 nt, Human adenovirus E
uucacccggcgcuaccugc

SEQ ID NO: 1580983 - RNA, 20 nt, Human adenovirus E
gccaggcgcacguggacgag

SEQ ID NO: 1580984 - RNA, 15 nt, Human adenovirus E
cucgggaucucgccg

SEQ ID NO: 1580985 - RNA, 15 nt, Human adenovirus E
cugaaaguggagcug

SEQ ID NO: 1580986 - RNA, 13 nt, Human adenovirus E
cgugccccagggc

SEQ ID NO: 1580987 - RNA, 15 nt, Human adenovirus E
uggagccacugcuac

SEQ ID NO: 1580988 - RNA, 17 nt, Human adenovirus E
cagccacucucucagac

SEQ ID NO: 1580989 - RNA, 16 nt, Human adenovirus E
ggagagacagcugccg

SEQ ID NO: 1580990 - RNA, 14 nt, Human adenovirus E
ugcucgagugccac

SEQ ID NO: 1580991 - RNA, 17 nt, Human adenovirus E
ccgagacgaugggcagg

SEQ ID NO: 1580992 - RNA, 15 nt, Human adenovirus E
gcgugcgcuccugga

SEQ ID NO: 1580993 - RNA, 19 nt, Human adenovirus E
cuggcccaauugcaagcca

SEQ ID NO: 1580994 - RNA, 19 nt, Human adenovirus E
ugccgaccgcggcgccgcg

SEQ ID NO: 1580995 - RNA, 14 nt, Human adenovirus E
gcgccgggcggcag

SEQ ID NO: 1580996 - RNA, 15 nt, Human adenovirus E
gagcagcagcacaca

SEQ ID NO: 1580997 - RNA, 22 nt, Human adenovirus E
cagagcaucguggugcaggagc

SEQ ID NO: 1580998 - RNA, 13 nt, Human adenovirus E
ggcaccuggagcg

SEQ ID NO: 1580999 - RNA, 15 nt, Human adenovirus E
agcaucaucugggcc

SEQ ID NO: 1581000 - RNA, 15 nt, Human adenovirus E
caggagcugaugcau

SEQ ID NO: 1581001 - RNA, 15 nt, Human adenovirus E
ccugcccgccaccug

SEQ ID NO: 1581002 - RNA, 22 nt, Human adenovirus E
aaugcgcgugcacgaagcccug

SEQ ID NO: 1581003 - RNA, 18 nt, Human adenovirus E
agcagccccaggccaacc

SEQ ID NO: 1581004 - RNA, 12 nt, Human adenovirus E
aaugccaccuca

SEQ ID NO: 1581005 - RNA, 11 nt, Human adenovirus E
guucagccgcc

SEQ ID NO: 1581006 - RNA, 23 nt, Human adenovirus E
ggcauacgugcccaagcagaacc

SEQ ID NO: 1581007 - RNA, 13 nt, Human adenovirus E
auggcaccucucg

SEQ ID NO: 1581008 - RNA, 14 nt, Human adenovirus E
cugacgcuccuggu

SEQ ID NO: 1581009 - RNA, 16 nt, Human adenovirus E
agcgccucggccgcgu

SEQ ID NO: 1581010 - RNA, 14 nt, Human adenovirus E
ggcggcuggggcga

SEQ ID NO: 1581011 - RNA, 17 nt, Human adenovirus E
ucggagagcgaagacga

SEQ ID NO: 1581012 - RNA, 14 nt, Human adenovirus E
ucuacuucaacccc

SEQ ID NO: 1581013 - RNA, 12 nt, Human adenovirus E
accuggccaacc

SEQ ID NO: 1581014 - RNA, 18 nt, Human adenovirus E
ccacggaggccagcaccc

SEQ ID NO: 1581015 - RNA, 22 nt, Human adenovirus E
cugcucaauauauagcccagau

SEQ ID NO: 1581016 - RNA, 20 nt, Human adenovirus E
gaucugacgccucuggguga

SEQ ID NO: 1581017 - RNA, 16 nt, Human adenovirus E
gcacguggacgagcag

SEQ ID NO: 1581018 - RNA, 20 nt, Human adenovirus E
guuaccacuaugcagcucac

SEQ ID NO: 1581019 - RNA, 17 nt, Human adenovirus E
uagcaagaacaggagcu

SEQ ID NO: 1581020 - RNA, 21 nt, Human adenovirus E
acugaacgacaagcuggaaca

SEQ ID NO: 1581021 - RNA, 16 nt, Human adenovirus E
caggacuacuccaccc

SEQ ID NO: 1581022 - RNA, 12 nt, Human adenovirus E
ggcggcggccug

SEQ ID NO: 1581023 - RNA, 17 nt, Human adenovirus E
aggcguacaugccgcag

SEQ ID NO: 1581024 - RNA, 15 nt, Human adenovirus E
uggaagagggcgagg

SEQ ID NO: 1581025 - RNA, 21 nt, Human adenovirus E
gaccugcacuggcagcccagc

SEQ ID NO: 1581026 - RNA, 13 nt, Human adenovirus E
gcagcgagcuggg

SEQ ID NO: 1581027 - RNA, 13 nt, Human adenovirus E
ggcggugcaggcc

SEQ ID NO: 1581028 - RNA, 19 nt, Human adenovirus E
cucaucuccuuugugauuu

SEQ ID NO: 1581029 - RNA, 18 nt, Human adenovirus E
ugcucaggggguccgggu

SEQ ID NO: 1581030 - RNA, 22 nt, Human adenovirus E
agcagcacggauaccaucuccg

SEQ ID NO: 1581031 - RNA, 22 nt, Human adenovirus E
cccugggcauagucgcgccgcg

SEQ ID NO: 1581032 - RNA, 11 nt, Human adenovirus E
gaugaugcuga

SEQ ID NO: 1581033 - RNA, 21 nt, Human adenovirus E
uggggcgugcaggccccgguc

SEQ ID NO: 1581034 - RNA, 14 nt, Human adenovirus E
agcaucuggcccgg

SEQ ID NO: 1581035 - RNA, 15 nt, Human adenovirus E
gagaagccccugggg

SEQ ID NO: 1581036 - RNA, 16 nt, Human adenovirus E
gaacgagccggcgcaa

SEQ ID NO: 1581037 - RNA, 14 nt, Human adenovirus E
uccugcacaggcag

SEQ ID NO: 1581038 - RNA, 20 nt, Human adenovirus E
acgagcagaccuaccaggag

SEQ ID NO: 1581039 - RNA, 21 nt, Human adenovirus E
acuuggcgguggggcggcaga

SEQ ID NO: 1581040 - RNA, 21 nt, Human adenovirus E
  misc_feature (5)..(5): n is a, c, g, or u
agcunuuccaacccuuccucc

SEQ ID NO: 1581041 - RNA, 18 nt, Human adenovirus E
gugcggugagcgccagca

SEQ ID NO: 1581042 - RNA, 18 nt, Human adenovirus E
gcugccgaccgcggcgcc

SEQ ID NO: 1581043 - RNA, 21 nt, Human adenovirus E
gcaacauccccgcgcuccugg

SEQ ID NO: 1581044 - RNA, 13 nt, Human adenovirus E
cgcuuacagccug

SEQ ID NO: 1581045 - RNA, 20 nt, Human adenovirus E
cgaacgggaucggccggugg

SEQ ID NO: 1581046 - RNA, 18 nt, Human adenovirus E
cuaccgucaccuccacag

SEQ ID NO: 1581047 - RNA, 17 nt, Human adenovirus E
agcagaaaaccagcagc

SEQ ID NO: 1581048 - RNA, 14 nt, Human adenovirus E
acgccugcugggcc

SEQ ID NO: 1581049 - RNA, 14 nt, Human adenovirus E
cuggcagcccagcc

SEQ ID NO: 1581050 - RNA, 23 nt, Human adenovirus E
uccaccagcggguccaccuuuuc

SEQ ID NO: 1581051 - RNA, 23 nt, Human adenovirus E
agcggcuggugauccggggcaga

SEQ ID NO: 1581052 - RNA, 20 nt, Human adenovirus E
caggacgacccgggcaaccu

SEQ ID NO: 1581053 - RNA, 16 nt, Human adenovirus E
ucagcaucagucgucu

SEQ ID NO: 1581054 - RNA, 15 nt, Human adenovirus E
uggcagcccagccgc

SEQ ID NO: 1581055 - RNA, 21 nt, Human adenovirus E
agccccguccucuucccacuc

SEQ ID NO: 1581056 - RNA, 12 nt, Human adenovirus E
acgacagcagcg

SEQ ID NO: 1581057 - RNA, 19 nt, Human adenovirus E
guagucaaauacuggccac

SEQ ID NO: 1581058 - RNA, 18 nt, Human adenovirus E
ugaccaccguggugcaga

SEQ ID NO: 1581059 - RNA, 19 nt, Human adenovirus E
gcagcagugucuggaggag

SEQ ID NO: 1581060 - RNA, 22 nt, Human adenovirus E
gcgcucgccaacgcuccacgca

SEQ ID NO: 1581061 - RNA, 19 nt, Human adenovirus E
ggucucggcauggcccgcg

SEQ ID NO: 1581062 - RNA, 15 nt, Human adenovirus E
gacacaccaccacag

SEQ ID NO: 1581063 - RNA, 14 nt, Human adenovirus E
cacacacgcccagc

SEQ ID NO: 1581064 - RNA, 19 nt, Human adenovirus E
aaguugaaaaacugggagu

SEQ ID NO: 1581065 - RNA, 17 nt, Human adenovirus E
gaugcagcccccgcugg

SEQ ID NO: 1581066 - RNA, 15 nt, Human adenovirus E
aggacaaaaaggaag

SEQ ID NO: 1581067 - RNA, 14 nt, Human adenovirus E
ucggcguuggccau

SEQ ID NO: 1581068 - RNA, 17 nt, Human adenovirus E
aaccccaccagcaagcc

SEQ ID NO: 1581069 - RNA, 16 nt, Human adenovirus E
cccaauggcaccugcg

SEQ ID NO: 1581070 - RNA, 23 nt, Human adenovirus E
gggggacaaagguacccucgauc

SEQ ID NO: 1581071 - RNA, 21 nt, Human adenovirus E
cugcgcccccguaucgggcgc

SEQ ID NO: 1581072 - RNA, 21 nt, Human adenovirus E
cggaggcgacgggcucucgcc

SEQ ID NO: 1581073 - RNA, 17 nt, Human adenovirus E
gcaucucuucagcacuc

SEQ ID NO: 1581074 - RNA, 16 nt, Human adenovirus E
gcggcgcacgggcaga

SEQ ID NO: 1581075 - RNA, 15 nt, Human adenovirus E
ccaacguggagcuga

SEQ ID NO: 1581076 - RNA, 19 nt, Human adenovirus E
caugguggucccgugcagg

SEQ ID NO: 1581077 - RNA, 22 nt, Human adenovirus E
caggcuuucaagaacuugcagg

SEQ ID NO: 1581078 - RNA, 19 nt, Human adenovirus E
cccaugguggcgcagcuga

SEQ ID NO: 1581079 - RNA, 15 nt, Human adenovirus E
cccauccgcccaagg

SEQ ID NO: 1581080 - RNA, 12 nt, Human adenovirus E
ccauagccagcc

SEQ ID NO: 1581081 - RNA, 21 nt, Human adenovirus E
cccaggccgaaguccagcuga

SEQ ID NO: 1581082 - RNA, 15 nt, Human adenovirus E
cccgcuggaccacgg

SEQ ID NO: 1581083 - RNA, 13 nt, Human adenovirus E
cgcuguccacgag

SEQ ID NO: 1581084 - RNA, 16 nt, Human adenovirus E
cacgaagcccugcagg

SEQ ID NO: 1581085 - RNA, 22 nt, Human adenovirus E
ccuccacuuccucuucuuccuc

SEQ ID NO: 1581086 - RNA, 19 nt, Human adenovirus E
ccucagcaugaugcccacg

SEQ ID NO: 1581087 - RNA, 19 nt, Human adenovirus E
ccucagggcccggcccacg

SEQ ID NO: 1581088 - RNA, 21 nt, Human adenovirus E
cguugauguuguggcccacga

SEQ ID NO: 1581089 - RNA, 23 nt, Human adenovirus E
cguugauguuguggcccacgaug

SEQ ID NO: 1581090 - RNA, 20 nt, Human adenovirus E
cguucucuccagcaccaggc

SEQ ID NO: 1581091 - RNA, 17 nt, Human adenovirus E
ccgcagcuugcccucgg

SEQ ID NO: 1581092 - RNA, 13 nt, Human adenovirus E
gaggagcccgagg

SEQ ID NO: 1581093 - RNA, 16 nt, Human adenovirus E
gaggauuguccucggu

SEQ ID NO: 1581094 - RNA, 21 nt, Human adenovirus E
ccgguggcacgacaggcagcg

SEQ ID NO: 1581095 - RNA, 16 nt, Human adenovirus E
cacagaaccaccaggu

SEQ ID NO: 1581096 - RNA, 17 nt, Human adenovirus E
acugacgccagacgccg

SEQ ID NO: 1581097 - RNA, 11 nt, Human adenovirus E
cagagccagcc

SEQ ID NO: 1581098 - RNA, 17 nt, Human adenovirus E
cacggcguacgagcaga

SEQ ID NO: 1581099 - RNA, 14 nt, Human adenovirus E
ccacgugagccgcg

SEQ ID NO: 1581100 - RNA, 20 nt, Human adenovirus E
ccagcaugucccgcccgcgg

SEQ ID NO: 1581101 - RNA, 21 nt, Human adenovirus E
ccagcaggcggcgcgagcuga

SEQ ID NO: 1581102 - RNA, 14 nt, Human adenovirus E
ccuggcgccuacgg

SEQ ID NO: 1581103 - RNA, 23 nt, Human adenovirus E
ccugggcuaugugacgcccgcgg

SEQ ID NO: 1581104 - RNA, 17 nt, Human adenovirus E
caugcuuggucuugcgg

SEQ ID NO: 1581105 - RNA, 20 nt, Human adenovirus E
cagucgccagggcuugcaga

SEQ ID NO: 1581106 - RNA, 13 nt, Human adenovirus E
augcaagacccgg

SEQ ID NO: 1581107 - RNA, 14 nt, Human adenovirus E
cuucacccccacgg

SEQ ID NO: 1581108 - RNA, 19 nt, Human adenovirus E
cuuccgcgagacgcccagg

SEQ ID NO: 1581109 - RNA, 17 nt, Human adenovirus E
cucggcauggcccgcgg

SEQ ID NO: 1581110 - RNA, 18 nt, Human adenovirus E
gcagcguccgcgucaggg

SEQ ID NO: 1581111 - RNA, 21 nt, Human adenovirus E
gcaugcggaucucgcucaggu

SEQ ID NO: 1581112 - RNA, 17 nt, Human adenovirus E
guacccucgaucccggg

SEQ ID NO: 1581113 - RNA, 16 nt, Human adenovirus E
guaagcagugcucagg

SEQ ID NO: 1581114 - RNA, 15 nt, Human adenovirus E
gccgcgguccuccuc

SEQ ID NO: 1581115 - RNA, 14 nt, Human adenovirus E
gcggccagacgcgc

SEQ ID NO: 1581116 - RNA, 15 nt, Human adenovirus E
ccaaggccgagcugu

SEQ ID NO: 1581117 - RNA, 20 nt, Human adenovirus E
caucaagcagguggccccgg

SEQ ID NO: 1581118 - RNA, 16 nt, Human adenovirus E
cauaggaccaccagga

SEQ ID NO: 1581119 - RNA, 15 nt, Human adenovirus E
cauccgcgcccaccg

SEQ ID NO: 1581120 - RNA, 17 nt, Human adenovirus E
aggacccggagacgcgc

SEQ ID NO: 1581121 - RNA, 14 nt, Human adenovirus E
aguucaaggcgcgg

SEQ ID NO: 1581122 - RNA, 14 nt, Human adenovirus E
aguuggcuuucagg

SEQ ID NO: 1581123 - RNA, 19 nt, Human adenovirus E
accugcacuaccucuucag

SEQ ID NO: 1581124 - RNA, 14 nt, Human adenovirus E
gccccucguccauc

SEQ ID NO: 1581125 - RNA, 19 nt, Human adenovirus E
gaauaucaccgagcccgag

SEQ ID NO: 1581126 - RNA, 13 nt, Human adenovirus E
ucaacuccucggg

SEQ ID NO: 1581127 - RNA, 14 nt, Human adenovirus E
guucgugcccgagg

SEQ ID NO: 1581128 - RNA, 13 nt, Human adenovirus E
ugaccucgucggg

SEQ ID NO: 1581129 - RNA, 20 nt, Human adenovirus E
uggaccuggugaacauucug

SEQ ID NO: 1581130 - RNA, 16 nt, Human adenovirus E
gucccugcucguccuc

SEQ ID NO: 1581131 - RNA, 17 nt, Human adenovirus E
guccagcgcagccaggg

SEQ ID NO: 1581132 - RNA, 20 nt, Human adenovirus E
gucauagcaggggcgcaggg

SEQ ID NO: 1581133 - RNA, 22 nt, Human adenovirus E
guccagagauccacggccaggg

SEQ ID NO: 1581134 - RNA, 15 nt, Human adenovirus E
gggccgguccucgag

SEQ ID NO: 1581135 - RNA, 16 nt, Human adenovirus E
gggccucgugcucggg

SEQ ID NO: 1581136 - RNA, 23 nt, Human adenovirus E
cucgcgguggggcggccagcuga

SEQ ID NO: 1581137 - RNA, 22 nt, Human adenovirus E
ccggcgcaaacccgggagcuga

SEQ ID NO: 1581138 - RNA, 14 nt, Human adenovirus E
cgcgcuccacggug

SEQ ID NO: 1581139 - RNA, 15 nt, Human adenovirus E
ccgcgcugcccucgg

SEQ ID NO: 1581140 - RNA, 17 nt, Human adenovirus E
ccgcgccuacgaguuga

SEQ ID NO: 1581141 - RNA, 22 nt, Human adenovirus E
ccgcggccggcgcgcuccacgg

SEQ ID NO: 1581142 - RNA, 16 nt, Human adenovirus E
uagcugaagcccacgg

SEQ ID NO: 1581143 - RNA, 19 nt, Human adenovirus E
guggaccucgauuccucgg

SEQ ID NO: 1581144 - RNA, 21 nt, Human adenovirus E
guggacguuuagagccucggg

SEQ ID NO: 1581145 - RNA, 17 nt, Human adenovirus E
guggucagcucgucggg

SEQ ID NO: 1581146 - RNA, 19 nt, Human adenovirus E
gccaggccugcaagaucuc

SEQ ID NO: 1581147 - RNA, 19 nt, Human adenovirus E
cgucgccggcggcgcacgg

SEQ ID NO: 1581148 - RNA, 16 nt, Human adenovirus E
cucuucugccucgaug

SEQ ID NO: 1581149 - RNA, 18 nt, Human adenovirus E
gucaagcugcugcucagg

SEQ ID NO: 1581150 - RNA, 21 nt, Human adenovirus E
guagaccacgacgcccucggg

SEQ ID NO: 1581151 - RNA, 14 nt, Human adenovirus E
gugagcucgucggg

SEQ ID NO: 1581152 - RNA, 23 nt, Human adenovirus E
gugcaaccggugcugagacccgg

SEQ ID NO: 1581153 - RNA, 23 nt, Human adenovirus E
gugacggcgcgcccguccucgcg

SEQ ID NO: 1581154 - RNA, 19 nt, Human adenovirus E
gucuucgcggugcccgagg

SEQ ID NO: 1581155 - RNA, 22 nt, Human adenovirus E
gcugccgcggcggugcccgagg

SEQ ID NO: 1581156 - RNA, 20 nt, Human adenovirus E
gccgccagaccgucguccuc

SEQ ID NO: 1581157 - RNA, 23 nt, Human adenovirus E
gccgagacggucaacuccuccuc

SEQ ID NO: 1581158 - RNA, 22 nt, Human adenovirus E
gccuacuuugagcugcccgagg

SEQ ID NO: 1581159 - RNA, 17 nt, Human adenovirus E
gccgccagcuccuccuc

SEQ ID NO: 1581160 - RNA, 18 nt, Human adenovirus E
acgauguggacagcagcg

SEQ ID NO: 1581161 - RNA, 19 nt, Human adenovirus E
accgugaaccugagccagg

SEQ ID NO: 1581162 - RNA, 18 nt, Human adenovirus E
acaguauccgcagcagcg

SEQ ID NO: 1581163 - RNA, 20 nt, Human adenovirus E
accaagaacggggaaaucac

SEQ ID NO: 1581164 - RNA, 22 nt, Human adenovirus E
accaaggccauggcgaccagcg

SEQ ID NO: 1581165 - RNA, 22 nt, Human adenovirus E
ccgaagggggucaucuugcagg

SEQ ID NO: 1581166 - RNA, 22 nt, Human adenovirus E
cccagcaagauguacggaggcg

SEQ ID NO: 1581167 - RNA, 12 nt, Human adenovirus E
cccagcccacga

SEQ ID NO: 1581168 - RNA, 16 nt, Human adenovirus E
cccacggagcccaugg

SEQ ID NO: 1581169 - RNA, 20 nt, Human adenovirus E
ccucugggugaaggccacgg

SEQ ID NO: 1581170 - RNA, 18 nt, Human adenovirus E
ccucguaaaaguccacgg

SEQ ID NO: 1581171 - RNA, 22 nt, Human adenovirus E
ccucgcgcucgaaggcccccgg

SEQ ID NO: 1581172 - RNA, 20 nt, Human adenovirus E
cgcggcuguagaccacgacg

SEQ ID NO: 1581173 - RNA, 17 nt, Human adenovirus E
cgaggcggacgagcuga

SEQ ID NO: 1581174 - RNA, 16 nt, Human adenovirus E
cgcacggucgagcuga

SEQ ID NO: 1581175 - RNA, 18 nt, Human adenovirus E
cgcacguggacgagcaga

SEQ ID NO: 1581176 - RNA, 16 nt, Human adenovirus E
cgcagcagcgagcugg

SEQ ID NO: 1581177 - RNA, 18 nt, Human
cguguccccugacagggc

SEQ ID NO: 1581178 - RNA, 16 nt, Human
cguguccccugacagg

SEQ ID NO: 1581179 - RNA, 19 nt, Human
cguguccccugacagggcc

SEQ ID NO: 1581180 - RNA, 14 nt, Human
ccccgagggcugag

SEQ ID NO: 1581181 - RNA, 21 nt, Human
ccccgagggcugagccugguc

SEQ ID NO: 1581182 - RNA, 19 nt, Human
ccccgagggcugagccugg

SEQ ID NO: 1581183 - RNA, 16 nt, Human
ccccugacagggccag

SEQ ID NO: 1581184 - RNA, 17 nt, Human
ccgaagcccaggggccg

SEQ ID NO: 1581185 - RNA, 16 nt, Human
ccgaagcccaggggcc

SEQ ID NO: 1581186 - RNA, 15 nt, Human
ccgaagcccaggggc

SEQ ID NO: 1581187 - RNA, 14 nt, Human
ccuggaugcccagg

SEQ ID NO: 1581188 - RNA, 15 nt, Human
caggaccccagcucu

SEQ ID NO: 1581189 - RNA, 17 nt, Human
caggaccccagcucugc

SEQ ID NO: 1581190 - RNA, 16 nt, Human
caggaccccagcucug

SEQ ID NO: 1581191 - RNA, 18 nt, Human
caggaccccagcucugcg

SEQ ID NO: 1581192 - RNA, 21 nt, Human
caggagggaggcaggggaggg

SEQ ID NO: 1581193 - RNA, 15 nt, Human
caggagggaggcagg

SEQ ID NO: 1581194 - RNA, 22 nt, Human
caggguguggggccaugccucc

SEQ ID NO: 1581195 - RNA, 17 nt, Human
caggguguggggccaug

SEQ ID NO: 1581196 - RNA, 16 nt, Human
caggguguggggccau

SEQ ID NO: 1581197 - RNA, 16 nt, Human
ccacgagggugccgug

SEQ ID NO: 1581198 - RNA, 21 nt, Human
caugucaagagucgcugugcc

SEQ ID NO: 1581199 - RNA, 19 nt, Human
caugucaagagucgcugug

SEQ ID NO: 1581200 - RNA, 14 nt, Human
caugcaccacgggc

SEQ ID NO: 1581201 - RNA, 18 nt, Human
cacaggcuuagggacagg

SEQ ID NO: 1581202 - RNA, 22 nt, Human
cacaggcuuagggacaggaccc

SEQ ID NO: 1581203 - RNA, 19 nt, Human
cacaggcuuagggacagga

SEQ ID NO: 1581204 - RNA, 16 nt, Human
ggggccggccaguggc

SEQ ID NO: 1581205 - RNA, 16 nt, Human
gguccugcagccugca

SEQ ID NO: 1581206 - RNA, 15 nt, Human
gguccugcagccugc

SEQ ID NO: 1581207 - RNA, 15 nt, Human
aaauauuauaacuca

SEQ ID NO: 1581208 - RNA, 17 nt, Human
ggacaggaccccagcuc

SEQ ID NO: 1581209 - RNA, 16 nt, Human
ggacaggaccccagcu

SEQ ID NO: 1581210 - RNA, 15 nt, Human
ggacaggaccccagc

SEQ ID NO: 1581211 - RNA, 14 nt, Human
ggacaggaccccag

SEQ ID NO: 1581212 - RNA, 20 nt, Human
ggacaggaccccagcucugc

SEQ ID NO: 1581213 - RNA, 18 nt, Human
ggacaggaccccagcucu

SEQ ID NO: 1581214 - RNA, 21 nt, Human
ggacaggaccccagcucugcg

SEQ ID NO: 1581215 - RNA, 22 nt, Human
cuuagggacaggaccccagcuc

SEQ ID NO: 1581216 - RNA, 21 nt, Human
cuuagggacaggaccccagcu

SEQ ID NO: 1581217 - RNA, 23 nt, Human
cuuagggacaggaccccagcucu

SEQ ID NO: 1581218 - RNA, 20 nt, Human
cuuagggacaggaccccagc

SEQ ID NO: 1581219 - RNA, 18 nt, Human
cuuagggacaggacccca

SEQ ID NO: 1581220 - RNA, 14 nt, Human
guccugcagccugc

SEQ ID NO: 1581221 - RNA, 10 nt, Human
guccugcagc

SEQ ID NO: 1581222 - RNA, 16 nt, Human
aagaaaaguuuaccau

SEQ ID NO: 1581223 - RNA, 21 nt, Human
aagauguagcgcuuugaauau

SEQ ID NO: 1581224 - RNA, 17 nt, Human
gugugaggguccugcag

SEQ ID NO: 1581225 - RNA, 14 nt, Human
aaguuuaccaucug

SEQ ID NO: 1581226 - RNA, 19 nt, Human
aaguuagaacauuugcugu

SEQ ID NO: 1581227 - RNA, 24 nt, Human
guuuuuggaugguguuacauauua

SEQ ID NO: 1581228 - RNA, 12 nt, Human
aaggagcaucua

SEQ ID NO: 1581229 - RNA, 21 nt, Human
guugggucaccagacggggcu

SEQ ID NO: 1581230 - RNA, 14 nt, Human
guugggucaccaga

SEQ ID NO: 1581231 - RNA, 22 nt, Human
aauuuacccucuugaauauaau

SEQ ID NO: 1581232 - RNA, 19 nt, Human
aauuuacccucuugaauau

SEQ ID NO: 1581233 - RNA, 17 nt, Human
aauuuaucaguaccuaa

SEQ ID NO: 1581234 - RNA, 19 nt, Human
uauagauugaaauuuccua

SEQ ID NO: 1581235 - RNA, 16 nt, Human
uauggccgggcagggu

SEQ ID NO: 1581236 - RNA, 13 nt, Human
uauuucauuuauu

SEQ ID NO: 1581237 - RNA, 18 nt, Human
ucauuugacuaagagucu

SEQ ID NO: 1581238 - RNA, 18 nt, Human
accgacguugccaucaaa

SEQ ID NO: 1581239 - RNA, 11 nt, Human
ugagccugguc

SEQ ID NO: 1581240 - RNA, 19 nt, Human
ugaggguccugcagccugc

SEQ ID NO: 1581241 - RNA, 18 nt, Human
ugaggguccugcagccug

SEQ ID NO: 1581242 - RNA, 15 nt, Human
ugaggguccugcagc

SEQ ID NO: 1581243 - RNA, 14 nt, Human
ugaggguccugcag

SEQ ID NO: 1581244 - RNA, 22 nt, Human
ugaggguccugcagccugcagg

SEQ ID NO: 1581245 - RNA, 21 nt, Human
ugaggguccugcagccugcag

SEQ ID NO: 1581246 - RNA, 23 nt, Human
ugaggguccugcagccugcagga

SEQ ID NO: 1581247 - RNA, 14 nt, Human
agagucgcugugcc

SEQ ID NO: 1581248 - RNA, 19 nt, Human
agagucgcugugccacagg

SEQ ID NO: 1581249 - RNA, 15 nt, Human
agagucgcugugcca

SEQ ID NO: 1581250 - RNA, 14 nt, Human
ugaauauaaucccu

SEQ ID NO: 1581251 - RNA, 22 nt, Human
ucuggucuaaauuguguuacua

SEQ ID NO: 1581252 - RNA, 21 nt, Human
agccugcaggaccucgugcca

SEQ ID NO: 1581253 - RNA, 20 nt, Human
agccugcaggaccucgugcc

SEQ ID NO: 1581254 - RNA, 21 nt, Human
ugcaguuugguguguccuccg

SEQ ID NO: 1581255 - RNA, 22 nt, Human
agcucugcgucgguccuggugc

SEQ ID NO: 1581256 - RNA, 23 nt, Human
agcucugcgucgguccuggugcc

SEQ ID NO: 1581257 - RNA, 17 nt, Human
agggcugagccuggucc

SEQ ID NO: 1581258 - RNA, 16 nt, Human
agggcugagccugguc

SEQ ID NO: 1581259 - RNA, 13 nt, Human
agggacuuagcaa

SEQ ID NO: 1581260 - RNA, 18 nt, Human
agucgcugugccacaggc

SEQ ID NO: 1581261 - RNA, 18 nt, Human
uguccccugacagggcca

SEQ ID NO: 1581262 - RNA, 16 nt, Human
uguccccugacagggc

SEQ ID NO: 1581263 - RNA, 15 nt, Human
uguccccugacaggg

SEQ ID NO: 1581264 - RNA, 19 nt, Human
agugugaggguccugcagc

SEQ ID NO: 1581265 - RNA, 16 nt, Human
aguuuaccaucugaaa

SEQ ID NO: 1581266 - RNA, 12 nt, Human
aguuuaccaucu

SEQ ID NO: 1581267 - RNA, 21 nt, Human
aguuuugugaaggugauuuau

SEQ ID NO: 1581268 - RNA, 19 nt, Human
auaacucauuuguuguuug

SEQ ID NO: 1581269 - RNA, 17 nt, Human
auaaucaaauacauuuu

SEQ ID NO: 1581270 - RNA, 22 nt, Human
uugacacuuauagauugaaauu

SEQ ID NO: 1581271 - RNA, 13 nt, Human
uugauuauaaagu

SEQ ID NO: 1581272 - RNA, 18 nt, Human
auccuaaauuuacccucu

SEQ ID NO: 1581273 - RNA, 16 nt, Human
auauuuuuuaucauaa

SEQ ID NO: 1581274 - RNA, 18 nt, Human
augccuccucaggagccg

SEQ ID NO: 1581275 - RNA, 14 nt, Human
augccuccucagga

SEQ ID NO: 1581276 - RNA, 15 nt, Human
augccuccucaggag

SEQ ID NO: 1581277 - RNA, 13 nt, Human
augccuccucagg

SEQ ID NO: 1581278 - RNA, 21 nt, Human
auguagcgcuuugaauaugaa

SEQ ID NO: 1581279 - RNA, 19 nt, Human
auguagcgcuuugaauaug

SEQ ID NO: 1581280 - RNA, 18 nt, Human
uuugugaaggugauuuau

SEQ ID NO: 1581281 - RNA, 14 nt, Human
augguguuacauau

SEQ ID NO: 1581282 - RNA, 22 nt, Human
auugguuuuccaaucauuugac

SEQ ID NO: 1581283 - RNA, 22 nt, Human
aauauuauaacucauuuguugu

SEQ ID NO: 1581284 - RNA, 16 nt, Human
agggacaggaccccag

SEQ ID NO: 1581285 - RNA, 13 nt, Human
agggacaggaccc

SEQ ID NO: 1581286 - RNA, 18 nt, Human
agggacaggaccccagcu

SEQ ID NO: 1581287 - RNA, 17 nt, Human
agggacaggaccccagc

SEQ ID NO: 1581288 - RNA, 19 nt, Human
aguggccuuccccagcaug

SEQ ID NO: 1581289 - RNA, 18 nt, Human
aguggccuuccccagcau

SEQ ID NO: 1581290 - RNA, 13 nt, Human
caaauacauuuua

SEQ ID NO: 1581291 - RNA, 15 nt, Human
caccccgagggcuga

SEQ ID NO: 1581292 - RNA, 19 nt, Human
ccaguggccuuccccagca

SEQ ID NO: 1581293 - RNA, 17 nt, Human
ccaguggccuuccccag

SEQ ID NO: 1581294 - RNA, 23 nt, Human
ccagugcaguuugguguguccuc

SEQ ID NO: 1581295 - RNA, 15 nt, Human
ccgggcagggugugg

SEQ ID NO: 1581296 - RNA, 16 nt, Human
cgaagcccaggggccg

SEQ ID NO: 1581297 - RNA, 13 nt, Human
cggaauauauuuu

SEQ ID NO: 1581298 - RNA, 15 nt, Human
cgcugugccacaggc

SEQ ID NO: 1581299 - RNA, 11 nt, Human
cuaaaaacaua

SEQ ID NO: 1581300 - RNA, 14 nt, Human
cuaaauuuuaagug

SEQ ID NO: 1581301 - RNA, 21 nt, Human
cucaggagccgaagcccaggg

SEQ ID NO: 1581302 - RNA, 23 nt, Human
cucaggagccgaagcccaggggc

SEQ ID NO: 1581303 - RNA, 22 nt, Human
cuguauauauuuauggccgggc

SEQ ID NO: 1581304 - RNA, 13 nt, Human
cugugccacaggc

SEQ ID NO: 1581305 - RNA, 20 nt, Human
gacaggaccccagcucugcg

SEQ ID NO: 1581306 - RNA, 18 nt, Human
gacaggaccccagcucug

SEQ ID NO: 1581307 - RNA, 17 nt, Human
gacaggaccccagcucu

SEQ ID NO: 1581308 - RNA, 16 nt, Human
gacaggaccccagcuc

SEQ ID NO: 1581309 - RNA, 15 nt, Human
gacaggaccccagcu

SEQ ID NO: 1581310 - RNA, 14 nt, Human
gacaggaccccagc

SEQ ID NO: 1581311 - RNA, 19 nt, Human
gacaggaccccagcucugc

SEQ ID NO: 1581312 - RNA, 22 nt, Human
gaggggugcggcggucccagcu

SEQ ID NO: 1581313 - RNA, 19 nt, Human
gaggggugcggcgguccca

SEQ ID NO: 1581314 - RNA, 23 nt, Human
gagggugccguguccccugacag

SEQ ID NO: 1581315 - RNA, 18 nt, Human
gaggguccugcagccugc

SEQ ID NO: 1581316 - RNA, 21 nt, Human
gaggguccugcagccugcagg

SEQ ID NO: 1581317 - RNA, 17 nt, Human
gaggguccugcagccug

SEQ ID NO: 1581318 - RNA, 13 nt, Human
gaggguccugcag

SEQ ID NO: 1581319 - RNA, 20 nt, Human
gcccuggaugcccaggaauc

SEQ ID NO: 1581320 - RNA, 20 nt, Human
gcucugcgucgguccuggug

SEQ ID NO: 1581321 - RNA, 21 nt, Human
gcucugcgucgguccuggugc

SEQ ID NO: 1581322 - RNA, 23 nt, Human
gcuuagggacaggaccccagcuc

SEQ ID NO: 1581323 - RNA, 22 nt, Human
gcuuagggacaggaccccagcu

SEQ ID NO: 1581324 - RNA, 23 nt, Human
guacaguugcuguugugugauca

SEQ ID NO: 1581325 - RNA, 21 nt, Human
gguuuuccaaucauuugacua

SEQ ID NO: 1581326 - RNA, 19 nt, Human
ggugcggcggucccagcuc

SEQ ID NO: 1581327 - RNA, 20 nt, Human
ggugcccuggaugcccagga

SEQ ID NO: 1581328 - RNA, 19 nt, Human
ggugcccuggaugcccagg

SEQ ID NO: 1581329 - RNA, 18 nt, Human
ggugcccuggaugcccag

SEQ ID NO: 1581330 - RNA, 15 nt, Human
ggugcccuggaugcc

SEQ ID NO: 1581331 - RNA, 15 nt, Human
ggucccagcucccug

SEQ ID NO: 1581332 - RNA, 14 nt, Human
ggucccagcucccu

SEQ ID NO: 1581333 - RNA, 12 nt, Human
ggucccagcucc

SEQ ID NO: 1581334 - RNA, 20 nt, Human
ggucccagcucccuggcucc

SEQ ID NO: 1581335 - RNA, 13 nt, Human
gggcugagccugg

SEQ ID NO: 1581336 - RNA, 23 nt, Human
gggcugagccuggucccacgagg

SEQ ID NO: 1581337 - RNA, 15 nt, Human
gggcugagccugguc

SEQ ID NO: 1581338 - RNA, 22 nt, Human
gggcccggguugggucaccaga

SEQ ID NO: 1581339 - RNA, 21 nt, Human
gggcccggguugggucaccag

SEQ ID NO: 1581340 - RNA, 19 nt, Human
ggggugcggcggucccagc

SEQ ID NO: 1581341 - RNA, 11 nt, Human
gucccagcucc

SEQ ID NO: 1581342 - RNA, 18 nt, Human
guccuccgccuuaccagg

SEQ ID NO: 1581343 - RNA, 23 nt, Human
guccuggugcccuggaugcccag

SEQ ID NO: 1581344 - RNA, 20 nt, Human
guccuggugcccuggaugcc

SEQ ID NO: 1581345 - RNA, 12 nt, Human
guccuggugccc

SEQ ID NO: 1581346 - RNA, 11 nt, Human
guccuggugcc

SEQ ID NO: 1581347 - RNA, 15 nt, Human
gucccagcucccugg

SEQ ID NO: 1581348 - RNA, 18 nt, Human
gugcccuggaugcccagg

SEQ ID NO: 1581349 - RNA, 19 nt, Human
gugcccuggaugcccagga

SEQ ID NO: 1581350 - RNA, 19 nt, Human
ucaccagacggggcuggag

SEQ ID NO: 1581351 - RNA, 15 nt, Human
ucaccagacggggcu

SEQ ID NO: 1581352 - RNA, 17 nt, Human
uauuauauguucuagaa

SEQ ID NO: 1581353 - RNA, 14 nt, Human
uauuauauguucua

SEQ ID NO: 1581354 - RNA, 20 nt, Human
uccccagcaugcaccacggg

SEQ ID NO: 1581355 - RNA, 19 nt, Human
uccccagcaugcaccacgg

SEQ ID NO: 1581356 - RNA, 21 nt, Human
uccccagcaugcaccacgggc

SEQ ID NO: 1581357 - RNA, 19 nt, Human
uccgccuuaccaggagaag

SEQ ID NO: 1581358 - RNA, 16 nt, Human
ucuaucagauuaaguu

SEQ ID NO: 1581359 - RNA, 13 nt, Human
ugccuccucagga

SEQ ID NO: 1581360 - RNA, 12 nt, Human
ugccuccucagg

SEQ ID NO: 1581361 - RNA, 16 nt, Human
ugccuccucaggagcc

SEQ ID NO: 1581362 - RNA, 19 nt, Human
ugggucaccagacggggcu

SEQ ID NO: 1581363 - RNA, 20 nt, Human
ugggucaccagacggggcug

SEQ ID NO: 1581364 - RNA, 20 nt, Human
uuauugguuuuccaaucauu

SEQ ID NO: 1581365 - RNA, 16 nt, Human
uuauggccgggcaggg

SEQ ID NO: 1581366 - RNA, 13 nt, Human
uuuccuaauuuau

SEQ ID NO: 1581367 - RNA, 21 nt, Human
uuuacccucuugaauauaauc

SEQ ID NO: 1581368 - RNA, 13 nt, Human
uuuaccaucugaa

SEQ ID NO: 1581369 - RNA, 14 nt, Human
uuuaccaucugaaa

SEQ ID NO: 1581370 - RNA, 13 nt, Human
uuguuugguuaua

SEQ ID NO: 1581371 - RNA, 18 nt, Human
uucuaagucauucauaaa

SEQ ID NO: 1581372 - RNA, 14 nt, Human
aaaaauuuuuguuu

SEQ ID NO: 1581373 - RNA, 13 nt, Human
aaaaauuuuuguu

SEQ ID NO: 1581374 - RNA, 15 nt, Human
accccgagggcugag

SEQ ID NO: 1581375 - RNA, 13 nt, Human
agacggggcugga

SEQ ID NO: 1581376 - RNA, 15 nt, Human
agcaugcaccacggg

SEQ ID NO: 1581377 - RNA, 17 nt, Human
aggaccccagcucugcg

SEQ ID NO: 1581378 - RNA, 16 nt, Human
aggaccccagcucugc

SEQ ID NO: 1581379 - RNA, 14 nt, Human
aggaccccagcucu

SEQ ID NO: 1581380 - RNA, 13 nt, Human
aggaccccagcuc

SEQ ID NO: 1581381 - RNA, 14 nt, Human
aggaccucgugcca

SEQ ID NO: 1581382 - RNA, 17 nt, Human
cuaauuuauucuaaauu

SEQ ID NO: 1581383 - RNA, 16 nt, Human
ccugcagccugcagga

SEQ ID NO: 1581384 - RNA, 19 nt, Human
ccucaggagccgaagccca

SEQ ID NO: 1581385 - RNA, 12 nt, Human
ccucaggagccg

SEQ ID NO: 1581386 - RNA, 21 nt, Human
ccucaggagccgaagcccagg

SEQ ID NO: 1581387 - RNA, 22 nt, Human
ccaggagggaggcaggggaggg

SEQ ID NO: 1581388 - RNA, 15 nt, Human
ccaggagggaggcag

SEQ ID NO: 1581389 - RNA, 19 nt, Human
ccaggggccggccaguggc

SEQ ID NO: 1581390 - RNA, 21 nt, Human
ccaggagggaggcaggggagg

SEQ ID NO: 1581391 - RNA, 20 nt, Human
cagaauaaucaaauacauuu

SEQ ID NO: 1581392 - RNA, 22 nt, Human
cagugcaguuugguguguccuc

SEQ ID NO: 1581393 - RNA, 23 nt, Human
cuggagugugaggguccugcagc

SEQ ID NO: 1581394 - RNA, 21 nt, Human
cuggugcccuggaugcccagg

SEQ ID NO: 1581395 - RNA, 20 nt, Human
cuggugcccuggaugcccag

SEQ ID NO: 1581396 - RNA, 17 nt, Human
cuggugcccuggaugcc

SEQ ID NO: 1581397 - RNA, 16 nt, Human
gauacuugaauaacca

SEQ ID NO: 1581398 - RNA, 20 nt, Human
ggagugugaggguccugcag

SEQ ID NO: 1581399 - RNA, 18 nt, Human
aaaaaguuugucuuaguu

SEQ ID NO: 1581400 - RNA, 11 nt, Human
aaaaaguuugu

SEQ ID NO: 1581401 - RNA, 13 nt, Human
ggccuuccccagc

SEQ ID NO: 1581402 - RNA, 14 nt, Human
ggccuuccccagca

SEQ ID NO: 1581403 - RNA, 17 nt, Human
gggccggccaguggccu

SEQ ID NO: 1581404 - RNA, 23 nt, Human
ggggccaugccuccucaggagcc

SEQ ID NO: 1581405 - RNA, 19 nt, Human
ggggccaugccuccucagg

SEQ ID NO: 1581406 - RNA, 17 nt, Human
ggggccaugccuccuca

SEQ ID NO: 1581407 - RNA, 14 nt, Human
ggggccaugccucc

SEQ ID NO: 1581408 - RNA, 19 nt, Human
ggguccugcagccugcagg

SEQ ID NO: 1581409 - RNA, 23 nt, Human
ggguccugcagccugcaggaccu

SEQ ID NO: 1581410 - RNA, 18 nt, Human
ggguccugcagccugcag

SEQ ID NO: 1581411 - RNA, 13 nt, Human
guaauccuaaauu

SEQ ID NO: 1581412 - RNA, 23 nt, Human
aaagugguacuugaucauuuuua

SEQ ID NO: 1581413 - RNA, 20 nt, Human
aaagugguacuugaucauuu

SEQ ID NO: 1581414 - RNA, 14 nt, Human
aaagugguacuuga

SEQ ID NO: 1581415 - RNA, 17 nt, Human
gcggcggucccagcucc

SEQ ID NO: 1581416 - RNA, 16 nt, Human
gcggcggucccagcuc

SEQ ID NO: 1581417 - RNA, 14 nt, Human
gcggcggucccagc

SEQ ID NO: 1581418 - RNA, 16 nt, Human
gucgcugugccacagg

SEQ ID NO: 1581419 - RNA, 14 nt, Human
guccccugacaggg

SEQ ID NO: 1581420 - RNA, 14 nt, Human
aagaaacaacagaa

SEQ ID NO: 1581421 - RNA, 21 nt, Human
uagggacaggaccccagcucu

SEQ ID NO: 1581422 - RNA, 22 nt, Human
uagggacaggaccccagcucug

SEQ ID NO: 1581423 - RNA, 20 nt, Human
uagggacaggaccccagcuc

SEQ ID NO: 1581424 - RNA, 19 nt, Human
uagggacaggaccccagcu

SEQ ID NO: 1581425 - RNA, 15 nt, Human
uaguucccaggugau

SEQ ID NO: 1581426 - RNA, 16 nt, Human
acaggcuuagggacag

SEQ ID NO: 1581427 - RNA, 18 nt, Human
acaggaccccagcucugc

SEQ ID NO: 1581428 - RNA, 19 nt, Human
acaggaccccagcucugcg

SEQ ID NO: 1581429 - RNA, 17 nt, Human
acaggaccccagcucug

SEQ ID NO: 1581430 - RNA, 16 nt, Human
acaggaccccagcucu

SEQ ID NO: 1581431 - RNA, 15 nt, Human
acaggaccccagcuc

SEQ ID NO: 1581432 - RNA, 14 nt, Human
acaggaccccagcu

SEQ ID NO: 1581433 - RNA, 13 nt, Human
acaggaccccagc

SEQ ID NO: 1581434 - RNA, 12 nt, Human
acaggaccccag

SEQ ID NO: 1581435 - RNA, 21 nt, Human
aauuaguacagaaauauccau

SEQ ID NO: 1581436 - RNA, 21 nt, Human
uaagcaaguuaaguguccucc

SEQ ID NO: 1581437 - RNA, 10 nt, Human
ucccagcucc

SEQ ID NO: 1581438 - RNA, 15 nt, Human
acuaauuuuacuucu

SEQ ID NO: 1581439 - RNA, 22 nt, Human
uccucaggagccgaagcccagg

SEQ ID NO: 1581440 - RNA, 21 nt, Human
uccucaggagccgaagcccag

SEQ ID NO: 1581441 - RNA, 17 nt, Human
uccugcagccugcagga

SEQ ID NO: 1581442 - RNA, 13 nt, Human
uccugcagccugc

SEQ ID NO: 1581443 - RNA, 20 nt, Human
ucugcgucgguccuggugcc

SEQ ID NO: 1581444 - RNA, 20 nt, Human
acuugaucauuuuuaccauu

SEQ ID NO: 1581445 - RNA, 19 nt, Human
ugaaauuuccuaauuuauu

SEQ ID NO: 1581446 - RNA, 19 nt, Human
ugacagggccagugcaguu

SEQ ID NO: 1581447 - RNA, 16 nt, Human
ugacagggccagugca

SEQ ID NO: 1581448 - RNA, 22 nt, Human
aggagggaggcaggggaggggu

SEQ ID NO: 1581449 - RNA, 13 nt, Human
uggccgggcaggg

SEQ ID NO: 1581450 - RNA, 12 nt, Human
uggccgggcagg

SEQ ID NO: 1581451 - RNA, 13 nt, Human
agcccaggggccg

SEQ ID NO: 1581452 - RNA, 14 nt, Human
agccgaagcccagg

SEQ ID NO: 1581453 - RNA, 21 nt, Human
agucucaugccuugagaucug

SEQ ID NO: 1581454 - RNA, 15 nt, Human
agggugccguguccc

SEQ ID NO: 1581455 - RNA, 24 nt, Human
agggugccguguccccugacaggg

SEQ ID NO: 1581456 - RNA, 22 nt, Human
auaaaccuugucuaugaaauga

SEQ ID NO: 1581457 - RNA, 19 nt, Human
auaccaaguugauacuuga

SEQ ID NO: 1581458 - RNA, 16 nt, Human
aguuugguguguccuc

SEQ ID NO: 1581459 - RNA, 13 nt, Human
agugguuuagaaa

SEQ ID NO: 1581460 - RNA, 19 nt, Human
aucaauucuguauuccaga

SEQ ID NO: 1581461 - RNA, 23 nt, Human
auauauuuauggccgggcagggu

SEQ ID NO: 1581462 - RNA, 22 nt, Human
uuugaaaacucuguguuuggaa

SEQ ID NO: 1581463 - RNA, 14 nt, Human
augaaaugacuucu

SEQ ID NO: 1581464 - RNA, 24 nt, Human
auuacuuacguauguuuguacuug

SEQ ID NO: 1581465 - RNA, 15 nt, Human
uuuugauauaugaaa

SEQ ID NO: 1581466 - RNA, 16 nt, Human
uuuuguuugguuauau

SEQ ID NO: 1581467 - RNA, 13 nt, Human
uuuuguuugguua

SEQ ID NO: 1581468 - RNA, 21 nt, Human
uuuuguuugguuauaucgaaa

SEQ ID NO: 1581469 - RNA, 13 nt, Human
cagacggggcugg

SEQ ID NO: 1581470 - RNA, 19 nt, Human
cagacggggcuggagugug

SEQ ID NO: 1581471 - RNA, 17 nt, Human
cagcaugcaccacgggc

SEQ ID NO: 1581472 - RNA, 18 nt, Human
caggaccucgugccaccc

SEQ ID NO: 1581473 - RNA, 19 nt, Human
caggaaucuguauauauuu

SEQ ID NO: 1581474 - RNA, 19 nt, Human
caggagaagaaccugaaga

SEQ ID NO: 1581475 - RNA, 21 nt, Human
caggagccgaagcccaggggc

SEQ ID NO: 1581476 - RNA, 18 nt, Human
caggagccgaagcccagg

SEQ ID NO: 1581477 - RNA, 17 nt, Human
caggagccgaagcccag

SEQ ID NO: 1581478 - RNA, 17 nt, Human
caggcuuagggacagga

SEQ ID NO: 1581479 - RNA, 16 nt, Human
caggcuuagggacagg

SEQ ID NO: 1581480 - RNA, 16 nt, Human
cagggccagugcaguu

SEQ ID NO: 1581481 - RNA, 13 nt, Human
caggggaggggug

SEQ ID NO: 1581482 - RNA, 22 nt, Human
caggggccggccaguggccuuc

SEQ ID NO: 1581483 - RNA, 17 nt, Human
caggggccggccagugg

SEQ ID NO: 1581484 - RNA, 14 nt, Human
cauuuuuaccauua

SEQ ID NO: 1581485 - RNA, 19 nt, Human
cauucauaaaccuugucua

SEQ ID NO: 1581486 - RNA, 23 nt, Human
ccaccccgagggcugagccuggu

SEQ ID NO: 1581487 - RNA, 20 nt, Human
ccagcaugcaccacgggccc

SEQ ID NO: 1581488 - RNA, 18 nt, Human
ccagcaugcaccacgggc

SEQ ID NO: 1581489 - RNA, 18 nt, Human
ccauuauuuuuaggaugu

SEQ ID NO: 1581490 - RNA, 17 nt, Human
ccaucugaaagugguac

SEQ ID NO: 1581491 - RNA, 18 nt, Human
cccggguugggucaccag

SEQ ID NO: 1581492 - RNA, 23 nt, Human
cccgagggcugagccugguccca

SEQ ID NO: 1581493 - RNA, 19 nt, Human
ccguguccccugacagggc

SEQ ID NO: 1581494 - RNA, 17 nt, Human
ccguguccccugacagg

SEQ ID NO: 1581495 - RNA, 13 nt, Human
ccgccuuaccagg

SEQ ID NO: 1581496 - RNA, 20 nt, Human
ccuggucccacgagggugcc

SEQ ID NO: 1581497 - RNA, 20 nt, Human
ccuggugcccuggaugccca

SEQ ID NO: 1581498 - RNA, 18 nt, Human
ccuggugcccuggaugcc

SEQ ID NO: 1581499 - RNA, 12 nt, Human
ccuggugcccug

SEQ ID NO: 1581500 - RNA, 21 nt, Human
ccuggugcccuggaugcccag

SEQ ID NO: 1581501 - RNA, 22 nt, Human
ccuggugcccuggaugcccagg

SEQ ID NO: 1581502 - RNA, 13 nt, Human
cuccucaggagcc

SEQ ID NO: 1581503 - RNA, 12 nt, Human
cuccucaggagc

SEQ ID NO: 1581504 - RNA, 14 nt, Human
cugaagaacuauuu

SEQ ID NO: 1581505 - RNA, 17 nt, Human
cugcgucgguccuggug

SEQ ID NO: 1581506 - RNA, 18 nt, Human
cugcgucgguccuggugc

SEQ ID NO: 1581507 - RNA, 16 nt, Human
gaaucuguauauauuu

SEQ ID NO: 1581508 - RNA, 18 nt, Human
gaacuuacuugcauacca

SEQ ID NO: 1581509 - RNA, 18 nt, Human
gaaccugaagaacuauuu

SEQ ID NO: 1581510 - RNA, 23 nt, Human
gagccuggucccacgagggugcc

SEQ ID NO: 1581511 - RNA, 19 nt, Human
gagccuggucccacgaggg

SEQ ID NO: 1581512 - RNA, 14 nt, Human
gauagacugcuaca

SEQ ID NO: 1581513 - RNA, 13 nt, Human
gagucgcugugcc

SEQ ID NO: 1581514 - RNA, 17 nt, Human
gcacuaaaguuaguaaa

SEQ ID NO: 1581515 - RNA, 12 nt, Human
gcaggggagggg

SEQ ID NO: 1581516 - RNA, 21 nt, Human
gccuggucccacgagggugcc

SEQ ID NO: 1581517 - RNA, 14 nt, Human
ggcggucccagcuc

SEQ ID NO: 1581518 - RNA, 17 nt, Human
ggcucccaugucaagag

SEQ ID NO: 1581519 - RNA, 22 nt, Human
ggcuuagggacaggaccccagc

SEQ ID NO: 1581520 - RNA, 23 nt, Human
ucaggagccgaagcccaggggcc

SEQ ID NO: 1581521 - RNA, 22 nt, Human
uauuccagacuugggaggaugu

SEQ ID NO: 1581522 - RNA, 22 nt, Human
ucgugccaccccgagggcugag

SEQ ID NO: 1581523 - RNA, 18 nt, Human
ugcccuggaugcccagga

SEQ ID NO: 1581524 - RNA, 16 nt, Human
ugcccuggaugcccag

SEQ ID NO: 1581525 - RNA, 21 nt, Human
ugccguguccccugacagggc

SEQ ID NO: 1581526 - RNA, 20 nt, Human
ugccacaggcuuagggacag

SEQ ID NO: 1581527 - RNA, 21 nt, Human
ugccacaggcuuagggacagg

SEQ ID NO: 1581528 - RNA, 17 nt, Human
ugccacaggcuuaggga

SEQ ID NO: 1581529 - RNA, 19 nt, Human
uuauuagaaaaauauuaua

SEQ ID NO: 1581530 - RNA, 23 nt, Human
uuauguuguuguuguuuuuggau

SEQ ID NO: 1581531 - RNA, 21 nt, Human
uuauaucgaaauaguuacagg

SEQ ID NO: 1581532 - RNA, 22 nt, Human
cucugcgucgguccuggugccc

SEQ ID NO: 1581533 - RNA, 21 nt, Human
cucugcgucgguccuggugcc

SEQ ID NO: 1581534 - RNA, 20 nt, Human
cucugcgucgguccuggugc

SEQ ID NO: 1581535 - RNA, 19 nt, Human
cucugcgucgguccuggug

SEQ ID NO: 1581536 - RNA, 17 nt, Human
cuccgccuuaccaggag

SEQ ID NO: 1581537 - RNA, 16 nt, Human
cggcggucccagcucc

SEQ ID NO: 1581538 - RNA, 15 nt, Human
cggcggucccagcuc

SEQ ID NO: 1581539 - RNA, 18 nt, Human
ccugcaggaccucgugcc

SEQ ID NO: 1581540 - RNA, 17 nt, Human
ccugcaggaccucgugc

SEQ ID NO: 1581541 - RNA, 19 nt, Human
ccugcagccugcaggaccu

SEQ ID NO: 1581542 - RNA, 22 nt, Human
ccaugucaagagucgcugugcc

SEQ ID NO: 1581543 - RNA, 21 nt, Human
cagccugcaggaccucgugcc

SEQ ID NO: 1581544 - RNA, 12 nt, Human
cagccugcagga

SEQ ID NO: 1581545 - RNA, 15 nt, Human
ggcggucccagcucc

SEQ ID NO: 1581546 - RNA, 22 nt, Human
ggccaguggccuuccccagcau

SEQ ID NO: 1581547 - RNA, 19 nt, Human
ggccaguggccuuccccag

SEQ ID NO: 1581548 - RNA, 22 nt, Human
ggccagugcaguuugguguguc

SEQ ID NO: 1581549 - RNA, 21 nt, Human
ggccaugccuccucaggagcc

SEQ ID NO: 1581550 - RNA, 18 nt, Human
ggccaugccuccucagga

SEQ ID NO: 1581551 - RNA, 17 nt, Human
ggccaugccuccucagg

SEQ ID NO: 1581552 - RNA, 22 nt, Human
gggacaggaccccagcucugcg

SEQ ID NO: 1581553 - RNA, 21 nt, Human
gggacaggaccccagcucugc

SEQ ID NO: 1581554 - RNA, 19 nt, Human
gggacaggaccccagcucu

SEQ ID NO: 1581555 - RNA, 17 nt, Human
gggacaggaccccagcu

SEQ ID NO: 1581556 - RNA, 15 nt, Human
gggacaggaccccag

SEQ ID NO: 1581557 - RNA, 22 nt, Human
gggccaugccuccucaggagcc

SEQ ID NO: 1581558 - RNA, 23 nt, Human
gggccaugccuccucaggagccg

SEQ ID NO: 1581559 - RNA, 13 nt, Human
gggccaugccucc

SEQ ID NO: 1581560 - RNA, 13 nt, Human
gguccuggugccc

SEQ ID NO: 1581561 - RNA, 12 nt, Human
gguccuggugcc

SEQ ID NO: 1581562 - RNA, 24 nt, Human
gguccuggugcccuggaugcccag

SEQ ID NO: 1581563 - RNA, 14 nt, Human
gguccuggugcccu

SEQ ID NO: 1581564 - RNA, 21 nt, Human
gcuggagugugaggguccugc

SEQ ID NO: 1581565 - RNA, 15 nt, Human
gcuggagugugaggg

SEQ ID NO: 1581566 - RNA, 13 nt, Human
gcugugccacagg

SEQ ID NO: 1581567 - RNA, 19 nt, Human
gcugugccacaggcuuagg

SEQ ID NO: 1581568 - RNA, 20 nt, Human
gcugugccacaggcuuaggg

SEQ ID NO: 1581569 - RNA, 15 nt, Human
gcugugccacaggcu

SEQ ID NO: 1581570 - RNA, 14 nt, Human
gcugugccacaggc

SEQ ID NO: 1581571 - RNA, 21 nt, Human
gccaguggccuuccccagcau

SEQ ID NO: 1581572 - RNA, 17 nt, Human
cuucuaagucauucaua

SEQ ID NO: 1581573 - RNA, 18 nt, Human
gugccaccccgagggcug

SEQ ID NO: 1581574 - RNA, 15 nt, Human
gugaggguccugcag

SEQ ID NO: 1581575 - RNA, 14 nt, Human
gugaggguccugca

SEQ ID NO: 1581576 - RNA, 23 nt, Human
gugaggguccugcagccugcagg

SEQ ID NO: 1581577 - RNA, 24 nt, Human
gugaggguccugcagccugcagga

SEQ ID NO: 1581578 - RNA, 11 nt, Human
aaauuguguua

SEQ ID NO: 1581579 - RNA, 23 nt, Human
guguggggccaugccuccucagg

SEQ ID NO: 1581580 - RNA, 21 nt, Human
guguggggccaugccuccuca

SEQ ID NO: 1581581 - RNA, 14 nt, Human
guguauuucauuua

SEQ ID NO: 1581582 - RNA, 19 nt, Human
guggccuuccccagcaugc

SEQ ID NO: 1581583 - RNA, 21 nt, Human
guggccuuccccagcaugcac

SEQ ID NO: 1581584 - RNA, 18 nt, Human
guggccuuccccagcaug

SEQ ID NO: 1581585 - RNA, 17 nt, Human
guggccuuccccagcau

SEQ ID NO: 1581586 - RNA, 21 nt, Human
guggggccaugccuccucagg

SEQ ID NO: 1581587 - RNA, 22 nt, Human
guggggccaugccuccucagga

SEQ ID NO: 1581588 - RNA, 15 nt, Human
aagcccaggggccgg

SEQ ID NO: 1581589 - RNA, 18 nt, Human
uaccauuauuuuuaggau

SEQ ID NO: 1581590 - RNA, 20 nt, Human
aauuacuuacguauguuugu

SEQ ID NO: 1581591 - RNA, 15 nt, Human
uauaacucauuuguu

SEQ ID NO: 1581592 - RNA, 17 nt, Human
uagaaacauguaauccu

SEQ ID NO: 1581593 - RNA, 14 nt, Human
acgagggugccgug

SEQ ID NO: 1581594 - RNA, 15 nt, Human
uccccugacagggcc

SEQ ID NO: 1581595 - RNA, 12 nt, Human
uccccugacagg

SEQ ID NO: 1581596 - RNA, 11 nt, Human
accccagcucu

SEQ ID NO: 1581597 - RNA, 16 nt, Human
ucgcugugccacaggc

SEQ ID NO: 1581598 - RNA, 20 nt, Human
agaaauuacuaauuuuacuu

SEQ ID NO: 1581599 - RNA, 17 nt, Human
agaauaaucaaauacau

SEQ ID NO: 1581600 - RNA, 20 nt, Human
ugaaaaagcuggauuuucuu

SEQ ID NO: 1581601 - RNA, 12 nt, Human
agauuuuguugg

SEQ ID NO: 1581602 - RNA, 22 nt, Human
ugaccccaggagggaggcaggg

SEQ ID NO: 1581603 - RNA, 20 nt, Human
ugaccccaggagggaggcag

SEQ ID NO: 1581604 - RNA, 17 nt, Human
agccacauauugagaug

SEQ ID NO: 1581605 - RNA, 17 nt, Human
ugaucaaacaugucucu

SEQ ID NO: 1581606 - RNA, 19 nt, Human
ugauauuuuuuaucauaaa

SEQ ID NO: 1581607 - RNA, 17 nt, Human
ugauauuuuuuaucaua

SEQ ID NO: 1581608 - RNA, 14 nt, Human
ugaguagucucaug

SEQ ID NO: 1581609 - RNA, 17 nt, Human
ugcagccugcaggaccu

SEQ ID NO: 1581610 - RNA, 18 nt, Human
ugcagccugcaggaccuc

SEQ ID NO: 1581611 - RNA, 22 nt, Human
agccuggucccacgagggugcc

SEQ ID NO: 1581612 - RNA, 17 nt, Human
ugcggcggucccagcuc

SEQ ID NO: 1581613 - RNA, 14 nt, Human
ugcggcggucccag

SEQ ID NO: 1581614 - RNA, 13 nt, Human
ugcggcgguccca

SEQ ID NO: 1581615 - RNA, 18 nt, Human
ugcggcggucccagcucc

SEQ ID NO: 1581616 - RNA, 15 nt, Human
uggccuuccccagca

SEQ ID NO: 1581617 - RNA, 23 nt, Human
uggccuuccccagcaugcaccac

SEQ ID NO: 1581618 - RNA, 13 nt, Human
uggccuuccccag

SEQ ID NO: 1581619 - RNA, 23 nt, Human
aggguguggggccaugccuccuc

SEQ ID NO: 1581620 - RNA, 22 nt, Human
aggguguggggccaugccuccu

SEQ ID NO: 1581621 - RNA, 19 nt, Human
ugucaagagucgcugugcc

SEQ ID NO: 1581622 - RNA, 17 nt, Human
ugucaagagucgcugug

SEQ ID NO: 1581623 - RNA, 15 nt, Human
aguuagaacauuugc

SEQ ID NO: 1581624 - RNA, 16 nt, Human
uuacaggcacuaaagu

SEQ ID NO: 1581625 - RNA, 16 nt, Human
auaaccaucugaaagu

SEQ ID NO: 1581626 - RNA, 21 nt, Human
auaaucccuggaugauauuuu

SEQ ID NO: 1581627 - RNA, 20 nt, Human
auaaucccuggaugauauuu

SEQ ID NO: 1581628 - RNA, 22 nt, Human
uuagggacaggaccccagcucu

SEQ ID NO: 1581629 - RNA, 21 nt, Human
uuagggacaggaccccagcuc

SEQ ID NO: 1581630 - RNA, 20 nt, Human
auaguucccaggugauauuu

SEQ ID NO: 1581631 - RNA, 18 nt, Human
uuaguuuugugaagguga

SEQ ID NO: 1581632 - RNA, 13 nt, Human
uugaaauuuccua

SEQ ID NO: 1581633 - RNA, 14 nt, Human
uuccuuuuuuugau

SEQ ID NO: 1581634 - RNA, 17 nt, Human
uuuaagcaaguuaagug

SEQ ID NO: 1581635 - RNA, 16 nt, Human
uuuaagcaaguuaagu

SEQ ID NO: 1581636 - RNA, 14 nt, Human
auggccgggcaggg

SEQ ID NO: 1581637 - RNA, 22 nt, Human
uuggaugguguuacauauuaua

SEQ ID NO: 1581638 - RNA, 23 nt, Human
aguugauacuugaauaaccaucu

SEQ ID NO: 1581639 - RNA, 17 nt, Human
aguggccuuccccagca

SEQ ID NO: 1581640 - RNA, 21 nt, Human
aggguccugcagccugcagga

SEQ ID NO: 1581641 - RNA, 19 nt, Human
aggguccugcagccugcag

SEQ ID NO: 1581642 - RNA, 17 nt, Human
aggguccugcagccugc

SEQ ID NO: 1581643 - RNA, 16 nt, Human
aggguccugcagccug

SEQ ID NO: 1581644 - RNA, 23 nt, Human
aggcuuagggacaggaccccagc

SEQ ID NO: 1581645 - RNA, 21 nt, Human
aacuuacuugcauaccaaguu

SEQ ID NO: 1581646 - RNA, 17 nt, Human
acagggccagugcaguu

SEQ ID NO: 1581647 - RNA, 22 nt, Human
accaucugaaagugguacuuga

SEQ ID NO: 1581648 - RNA, 22 nt, Human
caagagucgcugugccacaggc

SEQ ID NO: 1581649 - RNA, 19 nt, Human
caagagucgcugugccaca

SEQ ID NO: 1581650 - RNA, 15 nt, Human
ccaugccuccucagg

SEQ ID NO: 1581651 - RNA, 16 nt, Human
ccaugccuccucagga

SEQ ID NO: 1581652 - RNA, 17 nt, Human
cccacgagggugccgug

SEQ ID NO: 1581653 - RNA, 12 nt, Human
cccagcucugcg

SEQ ID NO: 1581654 - RNA, 11 nt, Human
cccagcucugc

SEQ ID NO: 1581655 - RNA, 22 nt, Human
ccagcucugcgucgguccuggu

SEQ ID NO: 1581656 - RNA, 17 nt, Human
ccagugcuuuauguugu

SEQ ID NO: 1581657 - RNA, 15 nt, Human
caugccuccucagga

SEQ ID NO: 1581658 - RNA, 19 nt, Human
cauagaaaacacuacagug

SEQ ID NO: 1581659 - RNA, 19 nt, Human
caguggccuuccccagcau

SEQ ID NO: 1581660 - RNA, 17 nt, Human
caguggccuuccccagc

SEQ ID NO: 1581661 - RNA, 18 nt, Human
caguggccuuccccagca

SEQ ID NO: 1581662 - RNA, 22 nt, Human
cggccaguggccuuccccagca

SEQ ID NO: 1581663 - RNA, 12 nt, Human
cggucccagcuc

SEQ ID NO: 1581664 - RNA, 13 nt, Human
cggucccagcucc

SEQ ID NO: 1581665 - RNA, 13 nt, Human
cgguccuggugcc

SEQ ID NO: 1581666 - RNA, 19 nt, Human
cgugccaccccgagggcug

SEQ ID NO: 1581667 - RNA, 22 nt, Human
cgugccaccccgagggcugagc

SEQ ID NO: 1581668 - RNA, 15 nt, Human
cgugccaccccgagg

SEQ ID NO: 1581669 - RNA, 12 nt, Human
cugacagggcca

SEQ ID NO: 1581670 - RNA, 17 nt, Human
cugacagggccagugca

SEQ ID NO: 1581671 - RNA, 12 nt, Human
cugagccugguc

SEQ ID NO: 1581672 - RNA, 19 nt, Human
cuggucccacgagggugcc

SEQ ID NO: 1581673 - RNA, 17 nt, Human
cuggucccacgagggug

SEQ ID NO: 1581674 - RNA, 14 nt, Human
cuggucccacgagg

SEQ ID NO: 1581675 - RNA, 19 nt, Human
gaaauuacuaauuuuacuu

SEQ ID NO: 1581676 - RNA, 20 nt, Human
gaaauuuccuaauuuauucu

SEQ ID NO: 1581677 - RNA, 20 nt, Human
gaaauuacuaauuuuacuuc

SEQ ID NO: 1581678 - RNA, 20 nt, Human
gacaugggugaacuuacuug

SEQ ID NO: 1581679 - RNA, 14 nt, Human
gaccccagcucugc

SEQ ID NO: 1581680 - RNA, 12 nt, Human
gaccccagcucu

SEQ ID NO: 1581681 - RNA, 15 nt, Human
gagccgaagcccagg

SEQ ID NO: 1581682 - RNA, 14 nt, Human
gagccgaagcccag

SEQ ID NO: 1581683 - RNA, 15 nt, Human
gccaugccuccucag

SEQ ID NO: 1581684 - RNA, 18 nt, Human
gccguguccccugacagg

SEQ ID NO: 1581685 - RNA, 13 nt, Human
gccgaagcccagg

SEQ ID NO: 1581686 - RNA, 12 nt, Human
gccuccucagga

SEQ ID NO: 1581687 - RNA, 15 nt, Human
gcgucgguccuggug

SEQ ID NO: 1581688 - RNA, 18 nt, Human
uuuuggaugguguuacau

SEQ ID NO: 1581689 - RNA, 15 nt, Human
uuuucuaaauuuauc

SEQ ID NO: 1581690 - RNA, 13 nt, Human
uuuuuugauauau

SEQ ID NO: 1581691 - RNA, 13 nt, Human
uuugaauaugaaa

SEQ ID NO: 1581692 - RNA, 15 nt, Human
guauguuuguacuug

SEQ ID NO: 1581693 - RNA, 16 nt, Human
gucaccagacggggcu

SEQ ID NO: 1581694 - RNA, 17 nt, Human
gucaccagacggggcug

SEQ ID NO: 1581695 - RNA, 17 nt, Human
gucgcugugccacaggc

SEQ ID NO: 1581696 - RNA, 18 nt, Human
gucgguccuggugcccug

SEQ ID NO: 1581697 - RNA, 17 nt, Human
gucgguccuggugcccu

SEQ ID NO: 1581698 - RNA, 15 nt, Human
gucgguccuggugcc

SEQ ID NO: 1581699 - RNA, 14 nt, Human
gugauauuuuucuu

SEQ ID NO: 1581700 - RNA, 22 nt, Human
gugcggcggucccagcucccug

SEQ ID NO: 1581701 - RNA, 19 nt, Human
gugcggcggucccagcucc

SEQ ID NO: 1581702 - RNA, 18 nt, Human
gugcggcggucccagcuc

SEQ ID NO: 1581703 - RNA, 21 nt, Human
gugcaguuugguguguccucc

SEQ ID NO: 1581704 - RNA, 14 nt, Human
gugguacuugauca

SEQ ID NO: 1581705 - RNA, 16 nt, Human
guggugaccccaggag

SEQ ID NO: 1581706 - RNA, 18 nt, Human
guggugaccccaggaggg

SEQ ID NO: 1581707 - RNA, 23 nt, Human
guguuacuagccucaaaauacau

SEQ ID NO: 1581708 - RNA, 18 nt, Human
guguccccugacagggcc

SEQ ID NO: 1581709 - RNA, 20 nt, Human
guuacauauuauauguucua

SEQ ID NO: 1581710 - RNA, 21 nt, Human
uaaagaaaaguuuaccaucug

SEQ ID NO: 1581711 - RNA, 15 nt, Human
uaaaguuaguaaaga

SEQ ID NO: 1581712 - RNA, 22 nt, Human
uaagugguucuuugguuccagu

SEQ ID NO: 1581713 - RNA, 18 nt, Human
uaagucauucauaaaccu

SEQ ID NO: 1581714 - RNA, 14 nt, Human
uacagcuccuuuga

SEQ ID NO: 1581715 - RNA, 20 nt, Human
uacagcuccuuugaaaacuc

SEQ ID NO: 1581716 - RNA, 18 nt, Human
uccagcaaaucaagcuga

SEQ ID NO: 1581717 - RNA, 18 nt, Human
ucccacgagggugccgug

SEQ ID NO: 1581718 - RNA, 18 nt, Human
uccuccgccuuaccagga

SEQ ID NO: 1581719 - RNA, 16 nt, Human
ugcgucgguccuggug

SEQ ID NO: 1581720 - RNA, 17 nt, Human
ugcuaaaggagcaucua

SEQ ID NO: 1581721 - RNA, 21 nt, Human
uguccuccgccuuaccaggag

SEQ ID NO: 1581722 - RNA, 13 nt, Human
uuaaauauuuagu

SEQ ID NO: 1581723 - RNA, 21 nt, Human
uuaagagguugauuauaaagu

SEQ ID NO: 1581724 - RNA, 15 nt, Human
uuaagcaaguuaagu

SEQ ID NO: 1581725 - RNA, 22 nt, Human
aagagucgcugugccacaggcu

SEQ ID NO: 1581726 - RNA, 15 nt, Human
aagagucgcugugcc

SEQ ID NO: 1581727 - RNA, 19 nt, Human
accacgggcccggguuggg

SEQ ID NO: 1581728 - RNA, 13 nt, Human
agcaucuaucaga

SEQ ID NO: 1581729 - RNA, 20 nt, Human
agggacaggaccccagcucu

SEQ ID NO: 1581730 - RNA, 21 nt, Human
agggacaggaccccagcucug

SEQ ID NO: 1581731 - RNA, 21 nt, Human
cucgugccaccccgagggcug

SEQ ID NO: 1581732 - RNA, 13 nt, Human
ccuuccccagcau

SEQ ID NO: 1581733 - RNA, 12 nt, Human
ccuuccccagca

SEQ ID NO: 1581734 - RNA, 14 nt, Human
cuaagucauucaua

SEQ ID NO: 1581735 - RNA, 19 nt, Human
cggcggucccagcucccug

SEQ ID NO: 1581736 - RNA, 16 nt, Human
cccugacagggccagu

SEQ ID NO: 1581737 - RNA, 13 nt, Human
cccugacagggcc

SEQ ID NO: 1581738 - RNA, 16 nt, Human
cccuggaugcccagga

SEQ ID NO: 1581739 - RNA, 15 nt, Human
cccuggaugcccagg

SEQ ID NO: 1581740 - RNA, 22 nt, Human
ccucaggagccgaagcccaggg

SEQ ID NO: 1581741 - RNA, 19 nt, Human
cccagcaugcaccacgggc

SEQ ID NO: 1581742 - RNA, 23 nt, Human
cccagcaugcaccacgggcccgg

SEQ ID NO: 1581743 - RNA, 15 nt, Human
ccagacggggcugga

SEQ ID NO: 1581744 - RNA, 15 nt, Human
ccagaucaaggaugu

SEQ ID NO: 1581745 - RNA, 18 nt, Human
ccagacuugggaggaugu

SEQ ID NO: 1581746 - RNA, 14 nt, Human
caggaccccagcuc

SEQ ID NO: 1581747 - RNA, 13 nt, Human
caggaccccagcu

SEQ ID NO: 1581748 - RNA, 12 nt, Human
caggaccccagc

SEQ ID NO: 1581749 - RNA, 17 nt, Human
caggaccucgugccacc

SEQ ID NO: 1581750 - RNA, 14 nt, Human
cauuuguuguuuga

SEQ ID NO: 1581751 - RNA, 17 nt, Human
gccggccaguggccuuc

SEQ ID NO: 1581752 - RNA, 15 nt, Human
gccuccucaggagcc

SEQ ID NO: 1581753 - RNA, 17 nt, Human
gccaccccgagggcuga

SEQ ID NO: 1581754 - RNA, 23 nt, Human
gccaccccgagggcugagccugg

SEQ ID NO: 1581755 - RNA, 16 nt, Human
gccaccccgagggcug

SEQ ID NO: 1581756 - RNA, 13 nt, Human
ggaccccagcucu

SEQ ID NO: 1581757 - RNA, 15 nt, Human
ggaccccagcucugc

SEQ ID NO: 1581758 - RNA, 12 nt, Human
ggaccccagcuc

SEQ ID NO: 1581759 - RNA, 17 nt, Human
aaaagcuggauuuucuu

SEQ ID NO: 1581760 - RNA, 18 nt, Human
gaccucgugccaccccga

SEQ ID NO: 1581761 - RNA, 20 nt, Human
gagggcugagccugguccca

SEQ ID NO: 1581762 - RNA, 20 nt, Human
cuuauuagaaaaauauuaua

SEQ ID NO: 1581763 - RNA, 15 nt, Human
cuggaugcccaggaa

SEQ ID NO: 1581764 - RNA, 14 nt, Human
cuggaugcccagga

SEQ ID NO: 1581765 - RNA, 13 nt, Human
cuggaugcccagg

SEQ ID NO: 1581766 - RNA, 16 nt, Human
cuggaugcccaggaau

SEQ ID NO: 1581767 - RNA, 14 nt, Human
cuggaugauauuuu

SEQ ID NO: 1581768 - RNA, 11 nt, Human
cuggugcccug

SEQ ID NO: 1581769 - RNA, 15 nt, Human
cugcagccugcagga

SEQ ID NO: 1581770 - RNA, 19 nt, Human
cugcagccugcaggaccuc

SEQ ID NO: 1581771 - RNA, 14 nt, Human
cugcagccugcagg

SEQ ID NO: 1581772 - RNA, 12 nt, Human
cugcagccugca

SEQ ID NO: 1581773 - RNA, 16 nt, Human
aacauuugcugucagc

SEQ ID NO: 1581774 - RNA, 18 nt, Human
guccugcagccugcagga

SEQ ID NO: 1581775 - RNA, 23 nt, Human
gugccguguccccugacagggcc

SEQ ID NO: 1581776 - RNA, 22 nt, Human
gugccguguccccugacagggc

SEQ ID NO: 1581777 - RNA, 18 nt, Human
uaguuuugugaaggugau

SEQ ID NO: 1581778 - RNA, 12 nt, Human
accauuauuuuu

SEQ ID NO: 1581779 - RNA, 16 nt, Human
accagacggggcugga

SEQ ID NO: 1581780 - RNA, 21 nt, Human
accagacggggcuggagugug

SEQ ID NO: 1581781 - RNA, 15 nt, Human
accagacggggcugg

SEQ ID NO: 1581782 - RNA, 14 nt, Human
accagacggggcug

SEQ ID NO: 1581783 - RNA, 18 nt, Human
acaguugcuguuguguga

SEQ ID NO: 1581784 - RNA, 23 nt, Human
accucgugccaccccgagggcug

SEQ ID NO: 1581785 - RNA, 19 nt, Human
accucgugccaccccgagg

SEQ ID NO: 1581786 - RNA, 17 nt, Human
acgggcccggguugggu

SEQ ID NO: 1581787 - RNA, 16 nt, Human
acgggcccggguuggg

SEQ ID NO: 1581788 - RNA, 21 nt, Human
acgggcccggguugggucacc

SEQ ID NO: 1581789 - RNA, 20 nt, Human
acgggcccggguugggucac

SEQ ID NO: 1581790 - RNA, 16 nt, Human
ucgguccuggugcccu

SEQ ID NO: 1581791 - RNA, 13 nt, Human
ucgguccuggugc

SEQ ID NO: 1581792 - RNA, 15 nt, Human
acuuauagauugaaa

SEQ ID NO: 1581793 - RNA, 19 nt, Human
acuugaauaaccaucugaa

SEQ ID NO: 1581794 - RNA, 20 nt, Human
acuugaauaaccaucugaaa

SEQ ID NO: 1581795 - RNA, 15 nt, Human
agagucuccauuuaa

SEQ ID NO: 1581796 - RNA, 18 nt, Human
aggagccgaagcccaggg

SEQ ID NO: 1581797 - RNA, 16 nt, Human
aggagccgaagcccag

SEQ ID NO: 1581798 - RNA, 21 nt, Human
uggagugugaggguccugcag

SEQ ID NO: 1581799 - RNA, 13 nt, Human
agggaggcagggg

SEQ ID NO: 1581800 - RNA, 20 nt, Human
uggggccaugccuccucagg

SEQ ID NO: 1581801 - RNA, 21 nt, Human
uggggccaugccuccucagga

SEQ ID NO: 1581802 - RNA, 19 nt, Human
uggggccaugccuccucag

SEQ ID NO: 1581803 - RNA, 14 nt, Human
uggggccaugccuc

SEQ ID NO: 1581804 - RNA, 23 nt, Human
aggggugcggcggucccagcucc

SEQ ID NO: 1581805 - RNA, 21 nt, Human
aggggugcggcggucccagcu

SEQ ID NO: 1581806 - RNA, 20 nt, Human
aggggugcggcggucccagc

SEQ ID NO: 1581807 - RNA, 22 nt, Human
aggggugcggcggucccagcuc

SEQ ID NO: 1581808 - RNA, 18 nt, Human
aggugauauuuuucuuau

SEQ ID NO: 1581809 - RNA, 19 nt, Human
uggugcccuggaugcccag

SEQ ID NO: 1581810 - RNA, 14 nt, Human
uguaguaucucaua

SEQ ID NO: 1581811 - RNA, 19 nt, Human
agucucaugccuugagauc

SEQ ID NO: 1581812 - RNA, 16 nt, Human
ugugccacaggcuuag

SEQ ID NO: 1581813 - RNA, 12 nt, Human
ugugccacaggc

SEQ ID NO: 1581814 - RNA, 20 nt, Human
uuuacuucuaagucauucau

SEQ ID NO: 1581815 - RNA, 23 nt, Human
uuuaggauguguauuucauuuau

SEQ ID NO: 1581816 - RNA, 12 nt, Human
uuuuugauauau

SEQ ID NO: 1581817 - RNA, 16 nt, Human
auuauaaaguuuucua

SEQ ID NO: 1581818 - RNA, 13 nt, Human
auuauaaaguuuu

SEQ ID NO: 1581819 - RNA, 16 nt, Human
auuauaacucauuugu

SEQ ID NO: 1581820 - RNA, 21 nt, Human
uuugacacuuauagauugaaa

SEQ ID NO: 1581821 - RNA, 18 nt, Human
uuuuccaaucauuugacu

SEQ ID NO: 1581822 - RNA, 16 nt, Human
caccagacggggcugg

SEQ ID NO: 1581823 - RNA, 17 nt, Human
caccagacggggcugga

SEQ ID NO: 1581824 - RNA, 21 nt, Human
ccacaggcuuagggacaggac

SEQ ID NO: 1581825 - RNA, 19 nt, Human
ccacaggcuuagggacagg

SEQ ID NO: 1581826 - RNA, 18 nt, Human
ccacaggcuuagggacag

SEQ ID NO: 1581827 - RNA, 15 nt, Human
ccacaggcuuaggga

SEQ ID NO: 1581828 - RNA, 12 nt, Human
cccaggggccgg

SEQ ID NO: 1581829 - RNA, 16 nt, Human
cccaggugauauuuuu

SEQ ID NO: 1581830 - RNA, 9 nt, Human
cccagcucc

SEQ ID NO: 1581831 - RNA, 19 nt, Human
ccccaggagggaggcaggg

SEQ ID NO: 1581832 - RNA, 18 nt, Human
ccccaggagggaggcagg

SEQ ID NO: 1581833 - RNA, 22 nt, Human
ccgagggcugagccugguccca

SEQ ID NO: 1581834 - RNA, 16 nt, Human
ccgagggcugagccug

SEQ ID NO: 1581835 - RNA, 13 nt, Human
ccgagggcugagc

SEQ ID NO: 1581836 - RNA, 16 nt, Human
ccugaagaacuauuuu

SEQ ID NO: 1581837 - RNA, 21 nt, Human
cgggcaggguguggggccaug

SEQ ID NO: 1581838 - RNA, 15 nt, Human
cgucgguccuggugc

SEQ ID NO: 1581839 - RNA, 24 nt, Human
cuuacuugcauaccaaguugauac

SEQ ID NO: 1581840 - RNA, 18 nt, Human
gacagggccagugcaguu

SEQ ID NO: 1581841 - RNA, 16 nt, Human
gaaggugauuuauucu

SEQ ID NO: 1581842 - RNA, 19 nt, Human
gaauaaucaaauacauuuu

SEQ ID NO: 1581843 - RNA, 16 nt, Human
gaagcccaggggccgg

SEQ ID NO: 1581844 - RNA, 19 nt, Human
gcaagcucuuuuauaugcu

SEQ ID NO: 1581845 - RNA, 15 nt, Human
gcaugcaccacgggc

SEQ ID NO: 1581846 - RNA, 14 nt, Human
gcaugcaccacggg

SEQ ID NO: 1581847 - RNA, 15 nt, Human
gcaccacgggcccgg

SEQ ID NO: 1581848 - RNA, 13 nt, Human
gcagccugcagga

SEQ ID NO: 1581849 - RNA, 16 nt, Human
gcagccugcaggaccu

SEQ ID NO: 1581850 - RNA, 15 nt, Human
gcaggaccucgugcc

SEQ ID NO: 1581851 - RNA, 22 nt, Human
gcggucccagcucccuggcucc

SEQ ID NO: 1581852 - RNA, 18 nt, Human
gcggucccagcucccugg

SEQ ID NO: 1581853 - RNA, 14 nt, Human
gcggucccagcucc

SEQ ID NO: 1581854 - RNA, 13 nt, Human
gcggucccagcuc

SEQ ID NO: 1581855 - RNA, 23 nt, Human
gccugcaggaccucgugccaccc

SEQ ID NO: 1581856 - RNA, 18 nt, Human
gccugcaggaccucgugc

SEQ ID NO: 1581857 - RNA, 17 nt, Human
gccugcaggaccucgug

SEQ ID NO: 1581858 - RNA, 13 nt, Human
gccugcaggaccu

SEQ ID NO: 1581859 - RNA, 17 nt, Human
gccgggcaggguguggg

SEQ ID NO: 1581860 - RNA, 13 nt, Human
ggaccucgugcca

SEQ ID NO: 1581861 - RNA, 19 nt, Human
ggagccgaagcccaggggc

SEQ ID NO: 1581862 - RNA, 17 nt, Human
ggagccgaagcccaggg

SEQ ID NO: 1581863 - RNA, 15 nt, Human
ggagccgaagcccag

SEQ ID NO: 1581864 - RNA, 22 nt, Human
ggagccgaagcccaggggccgg

SEQ ID NO: 1581865 - RNA, 11 nt, Human
ggcugagccug

SEQ ID NO: 1581866 - RNA, 19 nt, Human
ggucaccagacggggcugg

SEQ ID NO: 1581867 - RNA, 21 nt, Human
gggugcggcggucccagcucc

SEQ ID NO: 1581868 - RNA, 20 nt, Human
ggggugcggcggucccagcu

SEQ ID NO: 1581869 - RNA, 22 nt, Human
ggggugcggcggucccagcucc

SEQ ID NO: 1581870 - RNA, 20 nt, Human
uacuugaauaaccaucugaa

SEQ ID NO: 1581871 - RNA, 18 nt, Human
uacuugaauaaccaucug

SEQ ID NO: 1581872 - RNA, 16 nt, Human
uacagaaauauccaug

SEQ ID NO: 1581873 - RNA, 16 nt, Human
uaagagguugauuaua

SEQ ID NO: 1581874 - RNA, 14 nt, Human
guuuucuaaauuua

SEQ ID NO: 1581875 - RNA, 22 nt, Human
uccuggugcccuggaugcccag

SEQ ID NO: 1581876 - RNA, 13 nt, Human
uccuggugcccug

SEQ ID NO: 1581877 - RNA, 12 nt, Human
uccuggugcccu

SEQ ID NO: 1581878 - RNA, 18 nt, Human
ugccaccccgagggcuga

SEQ ID NO: 1581879 - RNA, 17 nt, Human
ugccaccccgagggcug

SEQ ID NO: 1581880 - RNA, 21 nt, Human
ugggucaccagacggggcugg

SEQ ID NO: 1581881 - RNA, 13 nt, Human
uggaugcccagga

SEQ ID NO: 1581882 - RNA, 14 nt, Human
uggaugcccaggaa

SEQ ID NO: 1581883 - RNA, 19 nt, Human
uggaugauauuuuuuauca

SEQ ID NO: 1581884 - RNA, 14 nt, Human
uguguaguuccagc

SEQ ID NO: 1581885 - RNA, 15 nt, Human
uguuguuuuuggaug

SEQ ID NO: 1581886 - RNA, 23 nt, Human
uguggggccaugccuccucagga

SEQ ID NO: 1581887 - RNA, 17 nt, Human
ugugaggguccugcagc

SEQ ID NO: 1581888 - RNA, 22 nt, Human
uuccccagcaugcaccacgggc

SEQ ID NO: 1581889 - RNA, 14 nt, Human
uuugauauaugaaa

SEQ ID NO: 1581890 - RNA, 19 nt, Human adenovirus F
cagacgaacacaauauuua

SEQ ID NO: 1581891 - RNA, 18 nt, Human adenovirus F
gacgacagccaggcagag

SEQ ID NO: 1581892 - RNA, 11 nt, Human adenovirus F
uggaggcagcu

SEQ ID NO: 1581893 - RNA, 18 nt, Human adenovirus F
gccuuuuauuaaccgccu

SEQ ID NO: 1581894 - RNA, 20 nt, Human adenovirus F
cagguucccgugucaccugc

SEQ ID NO: 1581895 - RNA, 17 nt, Human adenovirus F
acaacguggcucaaugu

SEQ ID NO: 1581896 - RNA, 16 nt, Human adenovirus F
cacucuuaacagcauu

SEQ ID NO: 1581897 - RNA, 19 nt, Human adenovirus F
gaagaugaggaggacuaug

SEQ ID NO: 1581898 - RNA, 19 nt, Human adenovirus F
aguccacuuaacagcuccu

SEQ ID NO: 1581899 - RNA, 12 nt, Human adenovirus F
cucucuccggag

SEQ ID NO: 1581900 - RNA, 18 nt, Human adenovirus F
auuuauaccauuaagaag

SEQ ID NO: 1581901 - RNA, 12 nt, Human adenovirus F
cucaagcggguu

SEQ ID NO: 1581902 - RNA, 23 nt, Human adenovirus F
ccgccaugacugccgcucgggcg

SEQ ID NO: 1581903 - RNA, 21 nt, Human adenovirus F
gcacggcccccaucucugugc

SEQ ID NO: 1581904 - RNA, 14 nt, Human adenovirus F
aggacguggaggaa

SEQ ID NO: 1581905 - RNA, 14 nt, Human adenovirus F
ugcggagccugagg

SEQ ID NO: 1581906 - RNA, 14 nt, Human adenovirus F
gacuuccugguccu

SEQ ID NO: 1581907 - RNA, 17 nt, Human adenovirus F
guuggcuucugccagaa

SEQ ID NO: 1581908 - RNA, 17 nt, Human adenovirus F
guagcaccccaauguaa

SEQ ID NO: 1581909 - RNA, 24 nt, Human adenovirus F
gccuccuguguuacgccagagagc

SEQ ID NO: 1581910 - RNA, 21 nt, Human adenovirus F
uguggacgacagccagcuguu

SEQ ID NO: 1581911 - RNA, 14 nt, Human adenovirus F
gcggacccgucucc

SEQ ID NO: 1581912 - RNA, 18 nt, Human adenovirus F
gagcgcaauuagcgggcg

SEQ ID NO: 1581913 - RNA, 18 nt, Human adenovirus F
ucccgccccugccaccgc

SEQ ID NO: 1581914 - RNA, 19 nt, Human adenovirus F
aggacgguggcaugaggga

SEQ ID NO: 1581915 - RNA, 16 nt, Human adenovirus F
ucacaacaccgcuucc

SEQ ID NO: 1581916 - RNA, 13 nt, Human adenovirus F
agacuaaaaacua

SEQ ID NO: 1581917 - RNA, 18 nt, Human adenovirus F
ugaaaagaaccagaauug

SEQ ID NO: 1581918 - RNA, 12 nt, Human adenovirus F
cucauccaaauc

SEQ ID NO: 1581919 - RNA, 21 nt, Human adenovirus F
ggcucugcagcagcgcccgcc

SEQ ID NO: 1581920 - RNA, 18 nt, Human adenovirus F
gucauauacuuuaaacaa

SEQ ID NO: 1581921 - RNA, 23 nt, Human adenovirus F
cacguuacuuaggcauacaggcu

SEQ ID NO: 1581922 - RNA, 20 nt, Human adenovirus F
caugagucuguuuggugggc

SEQ ID NO: 1581923 - RNA, 14 nt, Human adenovirus F
accccuuugugccc

SEQ ID NO: 1581924 - RNA, 14 nt, Human adenovirus F
gcagcgcccgccuc

SEQ ID NO: 1581925 - RNA, 14 nt, Human adenovirus F
acugcauacaacuc

SEQ ID NO: 1581926 - RNA, 13 nt, Human adenovirus F
ugcugacagcugg

SEQ ID NO: 1581927 - RNA, 15 nt, Human adenovirus F
caagguggcggccau

SEQ ID NO: 1581928 - RNA, 19 nt, Human adenovirus F
accgccuuggccagcagcc

SEQ ID NO: 1581929 - RNA, 15 nt, Human adenovirus F
gcugcgcccccaccg

SEQ ID NO: 1581930 - RNA, 13 nt, Human adenovirus F
cucccuuuccccc

SEQ ID NO: 1581931 - RNA, 22 nt, Human adenovirus F
agacauucuugagcaggccgcc

SEQ ID NO: 1581932 - RNA, 13 nt, Human adenovirus F
uuccacuggcaac

SEQ ID NO: 1581933 - RNA, 13 nt, Human adenovirus F
auugccacccgcc

SEQ ID NO: 1581934 - RNA, 20 nt, Human adenovirus F
guuggacuaccucagcgauc

SEQ ID NO: 1581935 - RNA, 15 nt, Human adenovirus F
aaguccuggccaacu

SEQ ID NO: 1581936 - RNA, 14 nt, Human adenovirus F
agccuucaggcagc

SEQ ID NO: 1581937 - RNA, 19 nt, Human adenovirus F
agcaagccgcugacggcgc

SEQ ID NO: 1581938 - RNA, 17 nt, Human adenovirus F
gagcccugaucagccag

SEQ ID NO: 1581939 - RNA, 17 nt, Human adenovirus F
cugggcggcggccaugg

SEQ ID NO: 1581940 - RNA, 14 nt, Human adenovirus F
ggcggaggagcaga

SEQ ID NO: 1581941 - RNA, 15 nt, Human adenovirus F
uucuccugcuugucu

SEQ ID NO: 1581942 - RNA, 15 nt, Human adenovirus F
ugaccggcgcuggga

SEQ ID NO: 1581943 - RNA, 17 nt, Human adenovirus F
gccggugauggcguacg

SEQ ID NO: 1581944 - RNA, 20 nt, Human adenovirus F
cucgacucgggugcuccuuu

SEQ ID NO: 1581945 - RNA, 19 nt, Human adenovirus F
aaaucuuccucccaaagua

SEQ ID NO: 1581946 - RNA, 14 nt, Human adenovirus F
auuggcaugagugg

SEQ ID NO: 1581947 - RNA, 22 nt, Human adenovirus F
ugaugccgcaauggucuuacau

SEQ ID NO: 1581948 - RNA, 14 nt, Human adenovirus F
caugaacacuuccg

SEQ ID NO: 1581949 - RNA, 20 nt, Human adenovirus F
cugucauacgcaggcacacc

SEQ ID NO: 1581950 - RNA, 16 nt, Human adenovirus F
ccgcaaugcuggucug

SEQ ID NO: 1581951 - RNA, 18 nt, Human adenovirus F
ugucaggcucugagagug

SEQ ID NO: 1581952 - RNA, 13 nt, Human adenovirus F
cugcccuuccucc

SEQ ID NO: 1581953 - RNA, 15 nt, Human adenovirus F
uuccuauuacagccc

SEQ ID NO: 1581954 - RNA, 15 nt, Human adenovirus F
ccugaaacgccgccg

SEQ ID NO: 1581955 - RNA, 13 nt, Human adenovirus F
cccaacucugagg

SEQ ID NO: 1581956 - RNA, 21 nt, Human adenovirus F
cuacguugcgauacugcaaac

SEQ ID NO: 1581957 - RNA, 14 nt, Human adenovirus F
agguccacacuggu

SEQ ID NO: 1581958 - RNA, 16 nt, Human adenovirus F
gguguguuuuuucaaa

SEQ ID NO: 1581959 - RNA, 13 nt, Human adenovirus F
gcaauggcucugu

SEQ ID NO: 1581960 - RNA, 16 nt, Human adenovirus F
cgccgucggaccugcc

SEQ ID NO: 1581961 - RNA, 17 nt, Human adenovirus F
agucccccuuacagccu

SEQ ID NO: 1581962 - RNA, 15 nt, Human adenovirus F
gauggcgauggggcc

SEQ ID NO: 1581963 - RNA, 17 nt, Human adenovirus F
cggaacccugccgcugc

SEQ ID NO: 1581964 - RNA, 12 nt, Human adenovirus F
aggcaaagcaac

SEQ ID NO: 1581965 - RNA, 15 nt, Human adenovirus F
gcggaguaacacaaa

SEQ ID NO: 1581966 - RNA, 20 nt, Human adenovirus F
aacacgcugccaacaaaugu

SEQ ID NO: 1581967 - RNA, 20 nt, Human adenovirus F
ucgcaaacaaagaaguacau

SEQ ID NO: 1581968 - RNA, 15 nt, Human adenovirus F
gccgcccgucaggcc

SEQ ID NO: 1581969 - RNA, 13 nt, Human adenovirus F
aaacacaaacaua

SEQ ID NO: 1581970 - RNA, 16 nt, Human adenovirus F
agccggaggagugggc

SEQ ID NO: 1581971 - RNA, 17 nt, Human adenovirus F
cagauggaaacugucag

SEQ ID NO: 1581972 - RNA, 22 nt, Human adenovirus F
ccagcuguuuaccaaaggcucc

SEQ ID NO: 1581973 - RNA, 17 nt, Human adenovirus F
cauggcagcagauuuug

SEQ ID NO: 1581974 - RNA, 22 nt, Human adenovirus F
ugccuccguguuuuuugaugcg

SEQ ID NO: 1581975 - RNA, 17 nt, Human adenovirus F
gaaggaaacgcugugag

SEQ ID NO: 1581976 - RNA, 16 nt, Human adenovirus F
guauaguccagcguuc

SEQ ID NO: 1581977 - RNA, 13 nt, Human adenovirus F
cauagcuggaggg

SEQ ID NO: 1581978 - RNA, 19 nt, Human adenovirus F
uuucaccgccuuggccagc

SEQ ID NO: 1581979 - RNA, 20 nt, Human adenovirus F
gucugccaaaauggcucugc

SEQ ID NO: 1581980 - RNA, 15 nt, Human adenovirus F
uggcccuggccugga

SEQ ID NO: 1581981 - RNA, 11 nt, Human adenovirus F
gggagccagga

SEQ ID NO: 1581982 - RNA, 16 nt, Human adenovirus F
aggauacaacguggcu

SEQ ID NO: 1581983 - RNA, 13 nt, Human adenovirus F
gugacacccucag

SEQ ID NO: 1581984 - RNA, 15 nt, Human adenovirus F
accugaaccacacuu

SEQ ID NO: 1581985 - RNA, 20 nt, Human adenovirus F
cuggacgucuuuugacgagc

SEQ ID NO: 1581986 - RNA, 19 nt, Human adenovirus F
gcuaaagggaacugccagu

SEQ ID NO: 1581987 - RNA, 18 nt, Human adenovirus F
ggcccaguugagggaagc

SEQ ID NO: 1581988 - RNA, 22 nt, Human adenovirus F
gggaaggauacaacguggcuca

SEQ ID NO: 1581989 - RNA, 14 nt, Human adenovirus F
uuagguuggcaaug

SEQ ID NO: 1581990 - RNA, 22 nt, Human adenovirus F
cggcugcuucugccagugcagg

SEQ ID NO: 1581991 - RNA, 12 nt, Human adenovirus F
gcucugcuuaac

SEQ ID NO: 1581992 - RNA, 18 nt, Human adenovirus F
aggacagucugccaacac

SEQ ID NO: 1581993 - RNA, 16 nt, Human adenovirus F
uaucuugcaaaacuuu

SEQ ID NO: 1581994 - RNA, 15 nt, Human adenovirus F
cagguuugacagcau

SEQ ID NO: 1581995 - RNA, 21 nt, Human adenovirus F
caggccgcccuaaccucuacc

SEQ ID NO: 1581996 - RNA, 18 nt, Human adenovirus F
cgcucaccgcccagggaa

SEQ ID NO: 1581997 - RNA, 14 nt, Human adenovirus F
agggaaggcgugga

SEQ ID NO: 1581998 - RNA, 23 nt, Human adenovirus F
gcccuccuuugcgcgaacagagu

SEQ ID NO: 1581999 - RNA, 19 nt, Human adenovirus F
gccucaaguggggcagacg

SEQ ID NO: 1582000 - RNA, 15 nt, Human adenovirus F
uuuugcaaacuauuc

SEQ ID NO: 1582001 - RNA, 22 nt, Human adenovirus F
aggacagucugccaacacuaac

SEQ ID NO: 1582002 - RNA, 19 nt, Human adenovirus F
uggcgguggucacucucag

SEQ ID NO: 1582003 - RNA, 16 nt, Human adenovirus F
cuauuacagcccccac

SEQ ID NO: 1582004 - RNA, 14 nt, Human adenovirus F
ucacccgcagcugc

SEQ ID NO: 1582005 - RNA, 18 nt, Human adenovirus F
gaucggcaccagccagcu

SEQ ID NO: 1582006 - RNA, 15 nt, Human adenovirus F
ccucaaggaaugcac

SEQ ID NO: 1582007 - RNA, 23 nt, Human adenovirus F
agggcacaguaaucaaggguuuc

SEQ ID NO: 1582008 - RNA, 16 nt, Human adenovirus F
ucaugcugcuguuuuu

SEQ ID NO: 1582009 - RNA, 17 nt, Human adenovirus F
ccgccaugacugccgcu

SEQ ID NO: 1582010 - RNA, 16 nt, Human adenovirus F
gccauagcuggagggc

SEQ ID NO: 1582011 - RNA, 19 nt, Human adenovirus F
aacaucccucacuaccauu

SEQ ID NO: 1582012 - RNA, 16 nt, Human adenovirus F
cccccggcggcgggug

SEQ ID NO: 1582013 - RNA, 16 nt, Human adenovirus F
gauggcgauggggccu

SEQ ID NO: 1582014 - RNA, 23 nt, Human adenovirus F
uuuaauauugcuuuauugccacc

SEQ ID NO: 1582015 - RNA, 17 nt, Human adenovirus F
gacugggcggcggccau

SEQ ID NO: 1582016 - RNA, 13 nt, Human adenovirus F
caggaagcagcuc

SEQ ID NO: 1582017 - RNA, 15 nt, Human adenovirus F
caguuuggcaaugga

SEQ ID NO: 1582018 - RNA, 14 nt, Human adenovirus F
uggaaucagcaucu

SEQ ID NO: 1582019 - RNA, 13 nt, Human adenovirus F
gcaguccacuuaa

SEQ ID NO: 1582020 - RNA, 18 nt, Human adenovirus F
gaggagcgcaacuuucag

SEQ ID NO: 1582021 - RNA, 18 nt, Human adenovirus F
cuccaguuuguggaggag

SEQ ID NO: 1582022 - RNA, 13 nt, Human adenovirus F
cuaaacucugagg

SEQ ID NO: 1582023 - RNA, 15 nt, Human adenovirus F
gacaggucgcagcga

SEQ ID NO: 1582024 - RNA, 17 nt, Human adenovirus F
cgucaugcucuggggug

SEQ ID NO: 1582025 - RNA, 21 nt, Human adenovirus F
uggaagagggcgaggggcugg

SEQ ID NO: 1582026 - RNA, 15 nt, Human adenovirus F
cgaccucccaaaguc

SEQ ID NO: 1582027 - RNA, 13 nt, Human adenovirus F
cggagccaaccuc

SEQ ID NO: 1582028 - RNA, 16 nt, Human adenovirus F
aagcccggguccaggc

SEQ ID NO: 1582029 - RNA, 15 nt, Human adenovirus F
accgcugcagcugcu

SEQ ID NO: 1582030 - RNA, 11 nt, Human adenovirus F
cuaguacgagc

SEQ ID NO: 1582031 - RNA, 16 nt, Human adenovirus F
accagugggcucccau

SEQ ID NO: 1582032 - RNA, 16 nt, Human adenovirus F
uugcugcacugccauc

SEQ ID NO: 1582033 - RNA, 23 nt, Human adenovirus F
ugccuuaacauuuaugcccaaca

SEQ ID NO: 1582034 - RNA, 15 nt, Human adenovirus F
aucgccaacagcccc

SEQ ID NO: 1582035 - RNA, 22 nt, Human adenovirus F
ccuggcaacaucggcaccccuc

SEQ ID NO: 1582036 - RNA, 19 nt, Human adenovirus F
uaaaaaugccaggcagcag

SEQ ID NO: 1582037 - RNA, 18 nt, Human adenovirus F
uggcaacccugaggagga

SEQ ID NO: 1582038 - RNA, 17 nt, Human adenovirus F
cccaccgaguuccugcg

SEQ ID NO: 1582039 - RNA, 14 nt, Human adenovirus F
gcccuggccuggaa

SEQ ID NO: 1582040 - RNA, 17 nt, Human adenovirus F
gcuggcccuggccugga

SEQ ID NO: 1582041 - RNA, 20 nt, Human adenovirus F
agacgcucaccgcccaggga

SEQ ID NO: 1582042 - RNA, 15 nt, Human adenovirus F
cugaaauacacugau

SEQ ID NO: 1582043 - RNA, 17 nt, Human adenovirus F
cuuucccccuguaccac

SEQ ID NO: 1582044 - RNA, 17 nt, Human adenovirus F
cuaaaucuuccucccaa

SEQ ID NO: 1582045 - RNA, 21 nt, Human adenovirus F
agccagcucaacgggggcgcu

SEQ ID NO: 1582046 - RNA, 17 nt, Human adenovirus F
uucaccgccuuggccag

SEQ ID NO: 1582047 - RNA, 15 nt, Human adenovirus F
ugcgcacccuggugg

SEQ ID NO: 1582048 - RNA, 14 nt, Human adenovirus F
cccgcccgccgccc

SEQ ID NO: 1582049 - RNA, 20 nt, Human adenovirus F
cccggcggcgggugcagugg

SEQ ID NO: 1582050 - RNA, 15 nt, Human adenovirus F
gcaauguugccaccg

SEQ ID NO: 1582051 - RNA, 20 nt, Human adenovirus F
aacagccuuuguaacaacug

SEQ ID NO: 1582052 - RNA, 20 nt, Human adenovirus F
ugcguggguguauaaaaggg

SEQ ID NO: 1582053 - RNA, 20 nt, Human adenovirus F
aucauuuccacaaaugucuu

SEQ ID NO: 1582054 - RNA, 14 nt, Human adenovirus F
ucacuuugccagag

SEQ ID NO: 1582055 - RNA, 20 nt, Human adenovirus F
uugcacgcucugcaucucuu

SEQ ID NO: 1582056 - RNA, 19 nt, Human adenovirus F
caguaccgcuccaucaagc

SEQ ID NO: 1582057 - RNA, 20 nt, Human adenovirus F
ggcguggccuccguggccuu

SEQ ID NO: 1582058 - RNA, 12 nt, Human adenovirus F
uccucccaaagu

SEQ ID NO: 1582059 - RNA, 14 nt, Human adenovirus F
cgcuaugugcagca

SEQ ID NO: 1582060 - RNA, 20 nt, Human adenovirus F
cgaguuccugcgcugcuacu

SEQ ID NO: 1582061 - RNA, 21 nt, Human adenovirus F
caugccacccaagggaaacaa

SEQ ID NO: 1582062 - RNA, 13 nt, Human adenovirus F
cacccgcagcugc

SEQ ID NO: 1582063 - RNA, 14 nt, Human adenovirus F
guaugaagcuaacc

SEQ ID NO: 1582064 - RNA, 22 nt, Human adenovirus F
gggauucuaagggaggcagcag

SEQ ID NO: 1582065 - RNA, 13 nt, Human adenovirus F
cccaaguggcccu

SEQ ID NO: 1582066 - RNA, 16 nt, Human adenovirus F
ucaaguuugguagcaa

SEQ ID NO: 1582067 - RNA, 20 nt, Human adenovirus F
gaggccgguacccagaccau

SEQ ID NO: 1582068 - RNA, 14 nt, Human adenovirus F
cccagcugguaagc

SEQ ID NO: 1582069 - RNA, 20 nt, Human adenovirus F
ggucaaucucuucguccugg

SEQ ID NO: 1582070 - RNA, 19 nt, Human adenovirus F
gccuuguaugggcagcauc

SEQ ID NO: 1582071 - RNA, 18 nt, Human adenovirus F
caccgcaaugcuggucug

SEQ ID NO: 1582072 - RNA, 17 nt, Human adenovirus F
cgcaggacuuggcagaa

SEQ ID NO: 1582073 - RNA, 14 nt, Human adenovirus F
ugggacgacagcca

SEQ ID NO: 1582074 - RNA, 18 nt, Human adenovirus F
ugcaggaagaggaggagg

SEQ ID NO: 1582075 - RNA, 10 nt, Human adenovirus F
ugaaauuaau

SEQ ID NO: 1582076 - RNA, 20 nt, Human adenovirus F
gaccugugggucgcagcagg

SEQ ID NO: 1582077 - RNA, 23 nt, Human adenovirus F
ucauuaucauauuggcucguuuc

SEQ ID NO: 1582078 - RNA, 17 nt, Human adenovirus F
uauacaccucccuuucc

SEQ ID NO: 1582079 - RNA, 19 nt, Human adenovirus F
ucuaccacuucuauugcac

SEQ ID NO: 1582080 - RNA, 17 nt, Human adenovirus F
gaaaaccuacgcccagg

SEQ ID NO: 1582081 - RNA, 12 nt, Human adenovirus F
gggcgcgguggu

SEQ ID NO: 1582082 - RNA, 22 nt, Human adenovirus F
uccauaccagaguaacuuuugc

SEQ ID NO: 1582083 - RNA, 23 nt, Human adenovirus F
ugagauuuguaguggagggauuu

SEQ ID NO: 1582084 - RNA, 18 nt, Human adenovirus F
agcugggacagcggaggc

SEQ ID NO: 1582085 - RNA, 14 nt, Human adenovirus F
aaacacacaucacu

SEQ ID NO: 1582086 - RNA, 22 nt, Human adenovirus F
agauggcgugggaguuggagga

SEQ ID NO: 1582087 - RNA, 21 nt, Human adenovirus F
uaccaccguugaugacgucau

SEQ ID NO: 1582088 - RNA, 18 nt, Human adenovirus F
cucuucaucccagccucg

SEQ ID NO: 1582089 - RNA, 18 nt, Human adenovirus F
aaugcaaacaacgaacuu

SEQ ID NO: 1582090 - RNA, 12 nt, Human adenovirus F
ucaggcagcagc

SEQ ID NO: 1582091 - RNA, 21 nt, Human adenovirus F
augccacccaagggaaacaag

SEQ ID NO: 1582092 - RNA, 18 nt, Human adenovirus F
ucgaggaaagcuuccagc

SEQ ID NO: 1582093 - RNA, 12 nt, Human adenovirus F
ugucgccccugu

SEQ ID NO: 1582094 - RNA, 13 nt, Human adenovirus F
aaacuuucuccac

SEQ ID NO: 1582095 - RNA, 19 nt, Human adenovirus F
gaggccauccuggaccugg

SEQ ID NO: 1582096 - RNA, 15 nt, Human adenovirus F
gccacgcaggagcuc

SEQ ID NO: 1582097 - RNA, 11 nt, Human adenovirus F
uugucugucug

SEQ ID NO: 1582098 - RNA, 22 nt, Human adenovirus F
cuggccguacgguuucugggcu

SEQ ID NO: 1582099 - RNA, 14 nt, Human adenovirus F
guuuaccaaaggcu

SEQ ID NO: 1582100 - RNA, 14 nt, Human adenovirus F
cagcaccgcacaga

SEQ ID NO: 1582101 - RNA, 21 nt, Human adenovirus F
ccaaagacaaaaucacuguuu

SEQ ID NO: 1582102 - RNA, 14 nt, Human adenovirus F
gcucaaggcgcacg

SEQ ID NO: 1582103 - RNA, 17 nt, Human adenovirus F
caaccgcacaugccagc

SEQ ID NO: 1582104 - RNA, 17 nt, Human adenovirus F
accccgucacucuccgc

SEQ ID NO: 1582105 - RNA, 16 nt, Human adenovirus F
gcuagcauaaaagaag

SEQ ID NO: 1582106 - RNA, 16 nt, Human adenovirus F
uuuggaagaugaguuu

SEQ ID NO: 1582107 - RNA, 15 nt, Human adenovirus F
guucguugucgcccc

SEQ ID NO: 1582108 - RNA, 20 nt, Human adenovirus F
gagcccccgugggggaccga

SEQ ID NO: 1582109 - RNA, 17 nt, Human adenovirus F
gguuucggguggagggu

SEQ ID NO: 1582110 - RNA, 11 nt, Human adenovirus F
cgccuccacca

SEQ ID NO: 1582111 - RNA, 19 nt, Human adenovirus F
gcaagauaugucugccaaa

SEQ ID NO: 1582112 - RNA, 14 nt, Human adenovirus F
ccuggaguuugggg

SEQ ID NO: 1582113 - RNA, 14 nt, Human adenovirus F
agggccggccugga

SEQ ID NO: 1582114 - RNA, 14 nt, Human adenovirus F
ccggcacugaugcc

SEQ ID NO: 1582115 - RNA, 14 nt, Human adenovirus F
caccuacucuggcu

SEQ ID NO: 1582116 - RNA, 12 nt, Human adenovirus F
aaauucuggaau

SEQ ID NO: 1582117 - RNA, 13 nt, Human adenovirus F
acuggccgcgucu

SEQ ID NO: 1582118 - RNA, 21 nt, Human adenovirus F
gguggucacucucagcugcua

SEQ ID NO: 1582119 - RNA, 21 nt, Human adenovirus F
agucggccaaguagcauuuua

SEQ ID NO: 1582120 - RNA, 23 nt, Human adenovirus F
cacauaucgucacuuccgccgca

SEQ ID NO: 1582121 - RNA, 21 nt, Human adenovirus F
aacagcagguuaaagccaacu

SEQ ID NO: 1582122 - RNA, 17 nt, Human adenovirus F
acugugcauuugggagc

SEQ ID NO: 1582123 - RNA, 17 nt, Human adenovirus F
ccauaguaacuuucaaa

SEQ ID NO: 1582124 - RNA, 23 nt, Human adenovirus F
cgcugucguuaguggaggcagcu

SEQ ID NO: 1582125 - RNA, 23 nt, Human adenovirus F
agaaaccccaccguggcucccac

SEQ ID NO: 1582126 - RNA, 15 nt, Human adenovirus F
ugggucgcagcaggu

SEQ ID NO: 1582127 - RNA, 13 nt, Human adenovirus F
cagugggacgagg

SEQ ID NO: 1582128 - RNA, 13 nt, Human adenovirus F
cacagaucacgga

SEQ ID NO: 1582129 - RNA, 18 nt, Human adenovirus F
aacggcggaugguggcaa

SEQ ID NO: 1582130 - RNA, 15 nt, Human adenovirus F
ucuaggcauaaaguu

SEQ ID NO: 1582131 - RNA, 23 nt, Human adenovirus F
ggcgacgacggauuuuuguggga

SEQ ID NO: 1582132 - RNA, 20 nt, Human adenovirus F
gcuaaacaugagcuuacuuu

SEQ ID NO: 1582133 - RNA, 22 nt, Human adenovirus F
uuagcccguuuugcauuuuugg

SEQ ID NO: 1582134 - RNA, 18 nt, Human adenovirus F
cccccguuugcuuccucc

SEQ ID NO: 1582135 - RNA, 13 nt, Human adenovirus F
caguggagcaagg

SEQ ID NO: 1582136 - RNA, 22 nt, Human adenovirus F
gucauacauuucgugggaaggg

SEQ ID NO: 1582137 - RNA, 18 nt, Human adenovirus F
uaacccuggaauuuuugc

SEQ ID NO: 1582138 - RNA, 16 nt, Human adenovirus F
aucccgcgcuaaaucu

SEQ ID NO: 1582139 - RNA, 18 nt, Human adenovirus F
ucuuaaguuauacaguga

SEQ ID NO: 1582140 - RNA, 14 nt, Human adenovirus F
gugaccgagcagcu

SEQ ID NO: 1582141 - RNA, 17 nt, Human adenovirus F
cucgucguggcauguuu

SEQ ID NO: 1582142 - RNA, 18 nt, Human adenovirus F
gcuaaggacgguggcaug

SEQ ID NO: 1582143 - RNA, 23 nt, Human adenovirus F
ucggacucggaaccugaaagaga

SEQ ID NO: 1582144 - RNA, 16 nt, Human adenovirus F
ugccugacucuuacaa

SEQ ID NO: 1582145 - RNA, 21 nt, Human adenovirus F
cgucacuuccgccgcaccgcg

SEQ ID NO: 1582146 - RNA, 21 nt, Human adenovirus F
caaaugucuuguggcugguga

SEQ ID NO: 1582147 - RNA, 16 nt, Human adenovirus F
gacaagacauggaaga

SEQ ID NO: 1582148 - RNA, 23 nt, Human adenovirus F
uuggaaaucgugcccguggaaaa

SEQ ID NO: 1582149 - RNA, 15 nt, Human adenovirus F
auaagaagccagcca

SEQ ID NO: 1582150 - RNA, 14 nt, Human adenovirus F
uaaaaaaaagggaa

SEQ ID NO: 1582151 - RNA, 16 nt, Human adenovirus F
ccacaauaagcagcuu

SEQ ID NO: 1582152 - RNA, 17 nt, Human adenovirus F
cucgcugucuggaacca

SEQ ID NO: 1582153 - RNA, 14 nt, Human adenovirus F
cuacucuggcuccg

SEQ ID NO: 1582154 - RNA, 17 nt, Human adenovirus F
cacccccaacucugagg

SEQ ID NO: 1582155 - RNA, 13 nt, Human adenovirus F
cggcgggaagagg

SEQ ID NO: 1582156 - RNA, 22 nt, Human adenovirus F
gucagcaacuacccuguagugg

SEQ ID NO: 1582157 - RNA, 17 nt, Human adenovirus F
cugugcagauggaaacu

SEQ ID NO: 1582158 - RNA, 23 nt, Human adenovirus F
gagggauucuaagggaggcagca

SEQ ID NO: 1582159 - RNA, 14 nt, Human adenovirus F
ccaccaaauuaaau

SEQ ID NO: 1582160 - RNA, 19 nt, Human adenovirus F
ucgaagguugacuugcagg

SEQ ID NO: 1582161 - RNA, 20 nt, Human adenovirus F
gacaacggacgugagagagg

SEQ ID NO: 1582162 - RNA, 15 nt, Human adenovirus F
gcgccauagcuggag

SEQ ID NO: 1582163 - RNA, 17 nt, Human adenovirus F
uaccacagaaaugucca

SEQ ID NO: 1582164 - RNA, 12 nt, Human adenovirus F
ccgucgucaggc

SEQ ID NO: 1582165 - RNA, 17 nt, Human adenovirus F
caaagcggcaaaagcuu

SEQ ID NO: 1582166 - RNA, 16 nt, Human adenovirus F
uucgcauuucuuuuuu

SEQ ID NO: 1582167 - RNA, 19 nt, Human adenovirus F
cucguuguuuuccucugac

SEQ ID NO: 1582168 - RNA, 15 nt, Human adenovirus F
agugaugcaccucuu

SEQ ID NO: 1582169 - RNA, 15 nt, Human adenovirus F
ugaaguuucacacuu

SEQ ID NO: 1582170 - RNA, 16 nt, Human adenovirus F
caguaccgcuccauca

SEQ ID NO: 1582171 - RNA, 15 nt, Human adenovirus F
cccguuugcuuccuc

SEQ ID NO: 1582172 - RNA, 15 nt, Human adenovirus F
ggauccauagagggc

SEQ ID NO: 1582173 - RNA, 19 nt, Human adenovirus F
accauuguacgagaagccc

SEQ ID NO: 1582174 - RNA, 20 nt, Human adenovirus F
cuuccggaaggauguuaaca

SEQ ID NO: 1582175 - RNA, 12 nt, Human adenovirus F
aauacaauuuuu

SEQ ID NO: 1582176 - RNA, 21 nt, Human adenovirus F
cauaaugcgggcucugauaau

SEQ ID NO: 1582177 - RNA, 22 nt, Human adenovirus F
auccaaaucucgccuaacauca

SEQ ID NO: 1582178 - RNA, 14 nt, Human adenovirus F
cacuuaccagagcc

SEQ ID NO: 1582179 - RNA, 18 nt, Human adenovirus F
ggcgucaugcucuggggu

SEQ ID NO: 1582180 - RNA, 13 nt, Human adenovirus F
gagcagcugcgua

SEQ ID NO: 1582181 - RNA, 13 nt, Human adenovirus F
acugccaccucca

SEQ ID NO: 1582182 - RNA, 17 nt, Human adenovirus F
guggauauagccaacca

SEQ ID NO: 1582183 - RNA, 17 nt, Human adenovirus F
gcaaacggugaacgagg

SEQ ID NO: 1582184 - RNA, 18 nt, Human adenovirus F
aaauccuucgagcaagcc

SEQ ID NO: 1582185 - RNA, 22 nt, Human adenovirus F
uagcuacuuucaucuuaacucu

SEQ ID NO: 1582186 - RNA, 20 nt, Human adenovirus F
aaccacgcccaugcagccau

SEQ ID NO: 1582187 - RNA, 15 nt, Human adenovirus F
gcaacccugaggagg

SEQ ID NO: 1582188 - RNA, 22 nt, Human adenovirus F
aacacagguucuuugcuggcaa

SEQ ID NO: 1582189 - RNA, 15 nt, Human adenovirus F
acugauccacuuaca

SEQ ID NO: 1582190 - RNA, 15 nt, Human adenovirus F
ccuacgugcacaaag

SEQ ID NO: 1582191 - RNA, 20 nt, Human adenovirus F
gaauuuggggcaucacucau

SEQ ID NO: 1582192 - RNA, 20 nt, Human adenovirus F
ccgccuuuucucaucacuga

SEQ ID NO: 1582193 - RNA, 18 nt, Human adenovirus F
cuagaaugucacugccgu

SEQ ID NO: 1582194 - RNA, 20 nt, Human adenovirus F
uauaccauuaagaagacugu

SEQ ID NO: 1582195 - RNA, 23 nt, Human adenovirus F
ugcagaggcguacaugccacaga

SEQ ID NO: 1582196 - RNA, 15 nt, Human adenovirus F
aagacaucaauuuug

SEQ ID NO: 1582197 - RNA, 18 nt, Human adenovirus F
cgcgaggaaaccgccuac

SEQ ID NO: 1582198 - RNA, 12 nt, Human adenovirus F
aacauuuaugcc

SEQ ID NO: 1582199 - RNA, 13 nt, Human adenovirus F
gaaucauuuccag

SEQ ID NO: 1582200 - RNA, 22 nt, Human adenovirus F
cucagggucgauggagccagcg

SEQ ID NO: 1582201 - RNA, 20 nt, Human adenovirus F
gcugaauauugcggagccug

SEQ ID NO: 1582202 - RNA, 14 nt, Human adenovirus F
aaagucggccaagu

SEQ ID NO: 1582203 - RNA, 22 nt, Human adenovirus F
gacucggaaccugaaagagagu

SEQ ID NO: 1582204 - RNA, 15 nt, Human adenovirus F
agucauccaaaucau

SEQ ID NO: 1582205 - RNA, 14 nt, Human adenovirus F
cgagcgccaucccc

SEQ ID NO: 1582206 - RNA, 19 nt, Human adenovirus F
gguuguaaagcgagccaaa

SEQ ID NO: 1582207 - RNA, 24 nt, Human adenovirus F
gcgcaacggcaaucccagcagaaa

SEQ ID NO: 1582208 - RNA, 19 nt, Human adenovirus F
gauucuucugugacaaaau

SEQ ID NO: 1582209 - RNA, 12 nt, Human adenovirus F
guguauaaaagg

SEQ ID NO: 1582210 - RNA, 23 nt, Human adenovirus F
guuaaagugcgccccauuaaaga

SEQ ID NO: 1582211 - RNA, 14 nt, Human adenovirus F
uguacucaaaugua

SEQ ID NO: 1582212 - RNA, 23 nt, Human adenovirus F
guagcauuuuaacaugagaucau

SEQ ID NO: 1582213 - RNA, 23 nt, Human adenovirus F
ccuccgguggcucugcagcagcg

SEQ ID NO: 1582214 - RNA, 20 nt, Human adenovirus F
acugcuagaaugucacugcc

SEQ ID NO: 1582215 - RNA, 15 nt, Human adenovirus F
cccgcaacggcgcag

SEQ ID NO: 1582216 - RNA, 16 nt, Human adenovirus F
ucgcaacguccucuac

SEQ ID NO: 1582217 - RNA, 14 nt, Human adenovirus F
ccuggccuggaacc

SEQ ID NO: 1582218 - RNA, 20 nt, Human adenovirus F
ccacuguuucuccuccccuu

SEQ ID NO: 1582219 - RNA, 15 nt, Human adenovirus F
cgucauccgccucca

SEQ ID NO: 1582220 - RNA, 14 nt, Human adenovirus F
ccgcgucugcugcu

SEQ ID NO: 1582221 - RNA, 20 nt, Human adenovirus F
gcugagcguucucgcucgcu

SEQ ID NO: 1582222 - RNA, 21 nt, Human adenovirus F
gaccgacuacuuacucccaac

SEQ ID NO: 1582223 - RNA, 15 nt, Human adenovirus F
ugcgucgcuggcucc

SEQ ID NO: 1582224 - RNA, 20 nt, Human adenovirus F
caccaguagcuuggaagcca

SEQ ID NO: 1582225 - RNA, 12 nt, Human adenovirus F
ucgcuggcuccg

SEQ ID NO: 1582226 - RNA, 17 nt, Human adenovirus F
guagcucuuccaagcug

SEQ ID NO: 1582227 - RNA, 13 nt, Human adenovirus F
acgacuaccucug

SEQ ID NO: 1582228 - RNA, 15 nt, Human adenovirus F
cggcgggaagaggac

SEQ ID NO: 1582229 - RNA, 21 nt, Human adenovirus F
ugugcccauagacaaggaggu

SEQ ID NO: 1582230 - RNA, 14 nt, Human adenovirus F
uguuucacauaucg

SEQ ID NO: 1582231 - RNA, 17 nt, Human adenovirus F
cagccccaggccaaccg

SEQ ID NO: 1582232 - RNA, 13 nt, Human adenovirus F
ugguaagcagccu

SEQ ID NO: 1582233 - RNA, 19 nt, Human adenovirus F
gaaaauagccgccagccuc

SEQ ID NO: 1582234 - RNA, 22 nt, Human adenovirus F
aaacuuuauggauguuuuccaa

SEQ ID NO: 1582235 - RNA, 14 nt, Human adenovirus F
guucgccuggagag

SEQ ID NO: 1582236 - RNA, 17 nt, Human adenovirus F
ucccucagagcugcaag

SEQ ID NO: 1582237 - RNA, 19 nt, Human adenovirus F
caauaagcagcuugaagaa

SEQ ID NO: 1582238 - RNA, 23 nt, Human adenovirus F
ucgaccgcgaggaaaccgccuac

SEQ ID NO: 1582239 - RNA, 18 nt, Human adenovirus F
ugcauccucccaacaacc

SEQ ID NO: 1582240 - RNA, 22 nt, Human adenovirus F
gcagguuuuacgcggggcagga

SEQ ID NO: 1582241 - RNA, 18 nt, Human adenovirus F
accuccgacgcuugcugg

SEQ ID NO: 1582242 - RNA, 15 nt, Human adenovirus F
acggguucucgccuc

SEQ ID NO: 1582243 - RNA, 23 nt, Human adenovirus F
ccgcaaccauguucacugaaagc

SEQ ID NO: 1582244 - RNA, 12 nt, Human adenovirus F
ugaaccacgcug

SEQ ID NO: 1582245 - RNA, 20 nt, Human adenovirus F
ccccagcugguaagcagccu

SEQ ID NO: 1582246 - RNA, 19 nt, Human adenovirus F
caccgcgcggcggccauga

SEQ ID NO: 1582247 - RNA, 16 nt, Human adenovirus F
ucgcagaaucuccugc

SEQ ID NO: 1582248 - RNA, 15 nt, Human adenovirus F
agaccaucaauuuug

SEQ ID NO: 1582249 - RNA, 15 nt, Human adenovirus F
ccaaacuucacggca

SEQ ID NO: 1582250 - RNA, 14 nt, Human adenovirus F
agcuucucagcuca

SEQ ID NO: 1582251 - RNA, 20 nt, Human adenovirus F
agcacuagaugcagcgcugc

SEQ ID NO: 1582252 - RNA, 14 nt, Human adenovirus F
aaagccaacuccaa

SEQ ID NO: 1582253 - RNA, 17 nt, Human adenovirus F
cccuuuuccagcaacuu

SEQ ID NO: 1582254 - RNA, 11 nt, Human adenovirus F
cuucugccaga

SEQ ID NO: 1582255 - RNA, 21 nt, Human adenovirus F
aacgggcggcaaaugcucugc

SEQ ID NO: 1582256 - RNA, 19 nt, Human adenovirus F
cugccaacucgacaacccu

SEQ ID NO: 1582257 - RNA, 16 nt, Human adenovirus F
gauaccgcugcagcug

SEQ ID NO: 1582258 - RNA, 14 nt, Human adenovirus F
auagcuggagggca

SEQ ID NO: 1582259 - RNA, 19 nt, Human adenovirus F
cugaaugcauguacacuau

SEQ ID NO: 1582260 - RNA, 19 nt, Human adenovirus F
gaacucaaaguaaaaaacc

SEQ ID NO: 1582261 - RNA, 21 nt, Human adenovirus F
ccguggcuggcgggcaaagcu

SEQ ID NO: 1582262 - RNA, 13 nt, Human adenovirus F
gauguuuuccaag

SEQ ID NO: 1582263 - RNA, 14 nt, Human adenovirus F
acggaaacaaaaaa

SEQ ID NO: 1582264 - RNA, 15 nt, Human adenovirus F
auuguguccugcaac

SEQ ID NO: 1582265 - RNA, 15 nt, Human adenovirus F
cgggcggcgccagac

SEQ ID NO: 1582266 - RNA, 14 nt, Human adenovirus F
uuuaauacagugac

SEQ ID NO: 1582267 - RNA, 22 nt, Human adenovirus F
cgcaaggaugaggcgggacuga

SEQ ID NO: 1582268 - RNA, 18 nt, Human adenovirus F
gaauggagcuguggugcg

SEQ ID NO: 1582269 - RNA, 14 nt, Human adenovirus F
cagccgugaagcca

SEQ ID NO: 1582270 - RNA, 23 nt, Human adenovirus F
gaagcacauagcgcgacagagca

SEQ ID NO: 1582271 - RNA, 23 nt, Human adenovirus F
caccuacuuugacauccgcggcg

SEQ ID NO: 1582272 - RNA, 16 nt, Human adenovirus F
aaagacguuaaagcug

SEQ ID NO: 1582273 - RNA, 14 nt, Human adenovirus F
cucaaacaacaaaa

SEQ ID NO: 1582274 - RNA, 22 nt, Human adenovirus F
ccaaagucccccuuacagccug

SEQ ID NO: 1582275 - RNA, 22 nt, Human adenovirus F
auauuuauacacucccuuugcc

SEQ ID NO: 1582276 - RNA, 10 nt, Human adenovirus F
cuuccaaauu

SEQ ID NO: 1582277 - RNA, 19 nt, Human adenovirus F
gugccuaugugcuggggaa

SEQ ID NO: 1582278 - RNA, 16 nt, Human adenovirus F
cgggcaguggccgccg

SEQ ID NO: 1582279 - RNA, 19 nt, Human adenovirus F
gaaguucagaacauggcuc

SEQ ID NO: 1582280 - RNA, 19 nt, Human adenovirus F
cgucugagccuuuguuccu

SEQ ID NO: 1582281 - RNA, 13 nt, Human adenovirus F
cccuagucccucc

SEQ ID NO: 1582282 - RNA, 19 nt, Human adenovirus F
ggcuccgacgcuuggcacc

SEQ ID NO: 1582283 - RNA, 22 nt, Human adenovirus F
ugcugaauauugcggagccuga

SEQ ID NO: 1582284 - RNA, 14 nt, Human adenovirus F
ggcuacccccgccc

SEQ ID NO: 1582285 - RNA, 23 nt, Human adenovirus F
caaaacaugcuguacgccaacuc

SEQ ID NO: 1582286 - RNA, 13 nt, Human adenovirus F
cuggcccgcuugg

SEQ ID NO: 1582287 - RNA, 19 nt, Human adenovirus F
cuaaaaaaacuccacccaa

SEQ ID NO: 1582288 - RNA, 19 nt, Human adenovirus F
cgcccaccaaauuaaauuu

SEQ ID NO: 1582289 - RNA, 18 nt, Human adenovirus F
gcgggaagagaggcagcc

SEQ ID NO: 1582290 - RNA, 14 nt, Human adenovirus F
uaacucucuuacau

SEQ ID NO: 1582291 - RNA, 14 nt, Human adenovirus F
uaacuuucuuacac

SEQ ID NO: 1582292 - RNA, 20 nt, Human adenovirus F
cuugccacccgcgcaacaca

SEQ ID NO: 1582293 - RNA, 17 nt, Human adenovirus F
ugcucccaaagugcugu

SEQ ID NO: 1582294 - RNA, 18 nt, Human adenovirus F
gagacgugcggugggagu

SEQ ID NO: 1582295 - RNA, 14 nt, Human adenovirus F
uagccaaccaggcc

SEQ ID NO: 1582296 - RNA, 22 nt, Human adenovirus F
gaacguguugguagagcuggag

SEQ ID NO: 1582297 - RNA, 22 nt, Human adenovirus F
agccccccucguacgagcaggc

SEQ ID NO: 1582298 - RNA, 16 nt, Human adenovirus F
acaccaguagcuugga

SEQ ID NO: 1582299 - RNA, 22 nt, Human adenovirus F
gguggaccccauggaugagccc

SEQ ID NO: 1582300 - RNA, 20 nt, Human adenovirus F
cgugagagaggcgguggcgc

SEQ ID NO: 1582301 - RNA, 13 nt, Human adenovirus F
cacacaucacugu

SEQ ID NO: 1582302 - RNA, 21 nt, Human adenovirus F
cgguuguuuuccaccaggggg

SEQ ID NO: 1582303 - RNA, 22 nt, Human adenovirus F
uucccugucguugccagccggu

SEQ ID NO: 1582304 - RNA, 14 nt, Human adenovirus F
cgcggucggcacgc

SEQ ID NO: 1582305 - RNA, 14 nt, Human adenovirus F
ucaacucagaauug

SEQ ID NO: 1582306 - RNA, 18 nt, Human adenovirus F
uaaaaacaaccaacuuca

SEQ ID NO: 1582307 - RNA, 12 nt, Human adenovirus F
aaugggcaaagg

SEQ ID NO: 1582308 - RNA, 13 nt, Human adenovirus F
ccggguccaggcu

SEQ ID NO: 1582309 - RNA, 20 nt, Human adenovirus F
cuuggaaucauccaccuggc

SEQ ID NO: 1582310 - RNA, 13 nt, Human adenovirus F
cacugauccacuu

SEQ ID NO: 1582311 - RNA, 12 nt, Human adenovirus F
cuucgcugcuuu

SEQ ID NO: 1582312 - RNA, 22 nt, Human adenovirus F
cagaucacggaacccugccgcu

SEQ ID NO: 1582313 - RNA, 12 nt, Human adenovirus F
aggaagcagcuc

SEQ ID NO: 1582314 - RNA, 19 nt, Human adenovirus F
agucacuacaauauuggcu

SEQ ID NO: 1582315 - RNA, 17 nt, Human adenovirus F
uaugcagacaagacaug

SEQ ID NO: 1582316 - RNA, 17 nt, Human adenovirus F
uaugcgcguugaaaggu

SEQ ID NO: 1582317 - RNA, 22 nt, Human adenovirus F
cugggcuggaugcauccuccca

SEQ ID NO: 1582318 - RNA, 18 nt, Human adenovirus F
gcgcacgugucggcggcc

SEQ ID NO: 1582319 - RNA, 19 nt, Human adenovirus F
cgacggaacguggaggaaa

SEQ ID NO: 1582320 - RNA, 17 nt, Human adenovirus F
gucgcgaacucuggacg

SEQ ID NO: 1582321 - RNA, 14 nt, Human adenovirus F
caaucccagcagaa

SEQ ID NO: 1582322 - RNA, 24 nt, Human adenovirus F
gauggagagcugggacagccuaga

SEQ ID NO: 1582323 - RNA, 13 nt, Human adenovirus F
ugguacaggagcg

SEQ ID NO: 1582324 - RNA, 12 nt, Human adenovirus F
cccaugcagcca

SEQ ID NO: 1582325 - RNA, 16 nt, Human adenovirus F
uccgccauugccaccc

SEQ ID NO: 1582326 - RNA, 17 nt, Human adenovirus F
gcuacuacuuuaacucu

SEQ ID NO: 1582327 - RNA, 21 nt, Human adenovirus F
cuuuauugccaccgcaaaaaa

SEQ ID NO: 1582328 - RNA, 18 nt, Human adenovirus F
acccucaaacacugcgca

SEQ ID NO: 1582329 - RNA, 17 nt, Human adenovirus F
uugguaacaaggccugg

SEQ ID NO: 1582330 - RNA, 15 nt, Human adenovirus F
cguugucgccccugu

SEQ ID NO: 1582331 - RNA, 23 nt, Human adenovirus F
ccaagcaagcccauucugccagu

SEQ ID NO: 1582332 - RNA, 14 nt, Human adenovirus F
ccgcugcagcugcu

SEQ ID NO: 1582333 - RNA, 17 nt, Human adenovirus F
acugucaggcucugaga

SEQ ID NO: 1582334 - RNA, 15 nt, Human adenovirus F
gcguccaguggagca

SEQ ID NO: 1582335 - RNA, 14 nt, Human adenovirus F
caacccgaccuaaa

SEQ ID NO: 1582336 - RNA, 15 nt, Human adenovirus F
gaauguggugggguc

SEQ ID NO: 1582337 - RNA, 15 nt, Human adenovirus F
agcgcccgggcccug

SEQ ID NO: 1582338 - RNA, 14 nt, Human adenovirus F
cgucaacuccucuu

SEQ ID NO: 1582339 - RNA, 19 nt, Human adenovirus F
auaauacagacgucucaag

SEQ ID NO: 1582340 - RNA, 23 nt, Human adenovirus F
agagugagguguaccaguccggg

SEQ ID NO: 1582341 - RNA, 14 nt, Human adenovirus F
acacaggagcuuua

SEQ ID NO: 1582342 - RNA, 16 nt, Human adenovirus F
gcaaacagugccacau

SEQ ID NO: 1582343 - RNA, 15 nt, Human adenovirus F
cggggcaggagcugc

SEQ ID NO: 1582344 - RNA, 21 nt, Human adenovirus F
auccauuaaaauuucuuguaa

SEQ ID NO: 1582345 - RNA, 15 nt, Human adenovirus F
gccuccgguggcucu

SEQ ID NO: 1582346 - RNA, 14 nt, Human adenovirus F
ucgccgcagucucc

SEQ ID NO: 1582347 - RNA, 15 nt, Human adenovirus F
gccucaaguggggca

SEQ ID NO: 1582348 - RNA, 18 nt, Human adenovirus F
auuagguggcucuaaguu

SEQ ID NO: 1582349 - RNA, 22 nt, Human adenovirus F
ccuggccguacgguuucugggc

SEQ ID NO: 1582350 - RNA, 16 nt, Human adenovirus F
aaugcagagcuugggc

SEQ ID NO: 1582351 - RNA, 20 nt, Human adenovirus F
gauaccuacuucagccuggg

SEQ ID NO: 1582352 - RNA, 18 nt, Human adenovirus F
ucacgcuguaccaggagg

SEQ ID NO: 1582353 - RNA, 23 nt, Human adenovirus F
cccacaaaagcuuucacuuuaau

SEQ ID NO: 1582354 - RNA, 23 nt, Human adenovirus F
caaguagggagugauggugggga

SEQ ID NO: 1582355 - RNA, 16 nt, Human adenovirus F
cgagaucggcaccagc

SEQ ID NO: 1582356 - RNA, 14 nt, Human adenovirus F
uggagccgacuuca

SEQ ID NO: 1582357 - RNA, 18 nt, Human adenovirus F
uaauuccauaacuaaaaa

SEQ ID NO: 1582358 - RNA, 17 nt, Human adenovirus F
uacuggauacuggcaag

SEQ ID NO: 1582359 - RNA, 18 nt, Human adenovirus F
uuucuuacacuagccauu

SEQ ID NO: 1582360 - RNA, 15 nt, Human adenovirus F
gaguuguggagugag

SEQ ID NO: 1582361 - RNA, 20 nt, Human adenovirus F
acuaucccguguuugacaac

SEQ ID NO: 1582362 - RNA, 15 nt, Human adenovirus F
gugccugagggcgac

SEQ ID NO: 1582363 - RNA, 23 nt, Human adenovirus F
acuuuuuuuguggccauuuucca

SEQ ID NO: 1582364 - RNA, 13 nt, Human adenovirus F
aggggcggagccu

SEQ ID NO: 1582365 - RNA, 20 nt, Human adenovirus F
ugugcaacacagccgggaca

SEQ ID NO: 1582366 - RNA, 18 nt, Human adenovirus F
ccaaaguaucuugcaaaa

SEQ ID NO: 1582367 - RNA, 15 nt, Human adenovirus F
caagcacauccaggg

SEQ ID NO: 1582368 - RNA, 20 nt, Human adenovirus F
cggcaaugcuuuugauggug

SEQ ID NO: 1582369 - RNA, 23 nt, Human adenovirus F
gcagagcccauugauccccaaca

SEQ ID NO: 1582370 - RNA, 18 nt, Human adenovirus F
cauuucuccgcgacggcg

SEQ ID NO: 1582371 - RNA, 16 nt, Human adenovirus F
ugccagaacuuccagc

SEQ ID NO: 1582372 - RNA, 15 nt, Human adenovirus F
ugugagcuggccugg

SEQ ID NO: 1582373 - RNA, 16 nt, Human adenovirus F
cguacaaguugcaaag

SEQ ID NO: 1582374 - RNA, 22 nt, Human adenovirus F
uccaggcuaaaacaaaggaggc

SEQ ID NO: 1582375 - RNA, 18 nt, Human adenovirus F
gcauggcgcuaaaggugu

SEQ ID NO: 1582376 - RNA, 19 nt, Human adenovirus F
cauuccauuuauuacaccc

SEQ ID NO: 1582377 - RNA, 22 nt, Human adenovirus F
auacuuuuucccaaaaaaagaa

SEQ ID NO: 1582378 - RNA, 16 nt, Human adenovirus F
cgcagaaacaugccac

SEQ ID NO: 1582379 - RNA, 22 nt, Human adenovirus F
uacuaccacuaccccuaccacc

SEQ ID NO: 1582380 - RNA, 17 nt, Human adenovirus F
ggaacuuccggaaggau

SEQ ID NO: 1582381 - RNA, 19 nt, Human adenovirus F
gauugugcaacacagccgg

SEQ ID NO: 1582382 - RNA, 22 nt, Human adenovirus F
gguacucucgaaacuuuuugcc

SEQ ID NO: 1582383 - RNA, 15 nt, Human adenovirus F
uuauacaccucccuu

SEQ ID NO: 1582384 - RNA, 23 nt, Human adenovirus F
gcucugguagaaagcaaagccau

SEQ ID NO: 1582385 - RNA, 15 nt, Human adenovirus F
augcuggucugcgcu

SEQ ID NO: 1582386 - RNA, 12 nt, Human adenovirus F
ccgcccgccucu

SEQ ID NO: 1582387 - RNA, 22 nt, Human adenovirus F
caggccuccaauuugacaauaa

SEQ ID NO: 1582388 - RNA, 20 nt, Human adenovirus F
augugccgcgcgggcaggag

SEQ ID NO: 1582389 - RNA, 14 nt, Human adenovirus F
ggcaccggcacuga

SEQ ID NO: 1582390 - RNA, 17 nt, Human adenovirus F
ucacugcuaccuccucc

SEQ ID NO: 1582391 - RNA, 14 nt, Human adenovirus F
aagagccaccuugu

SEQ ID NO: 1582392 - RNA, 14 nt, Human adenovirus F
auuaugagcaaaga

SEQ ID NO: 1582393 - RNA, 20 nt, Human adenovirus F
auacuuuaaacaagcaaaga

SEQ ID NO: 1582394 - RNA, 16 nt, Human adenovirus F
cuggccaacugccacc

SEQ ID NO: 1582395 - RNA, 14 nt, Human adenovirus F
cuuucaacaaaaag

SEQ ID NO: 1582396 - RNA, 15 nt, Human adenovirus F
guugcucucuccgga

SEQ ID NO: 1582397 - RNA, 17 nt, Human adenovirus F
acgaucgcuccaggugg

SEQ ID NO: 1582398 - RNA, 17 nt, Human adenovirus F
gcgucaugcucuggggu

SEQ ID NO: 1582399 - RNA, 10 nt, Human adenovirus F
cuugggcagg

SEQ ID NO: 1582400 - RNA, 15 nt, Human adenovirus F
gcacacagaacaaaa

SEQ ID NO: 1582401 - RNA, 20 nt, Human adenovirus F
ucuuaccgcgacaaagcaca

SEQ ID NO: 1582402 - RNA, 17 nt, Human adenovirus F
cgcauuaccauuaguaa

SEQ ID NO: 1582403 - RNA, 17 nt, Human adenovirus F
aggcccuugugccugaa

SEQ ID NO: 1582404 - RNA, 20 nt, Human adenovirus F
guagggauugagugggaagc

SEQ ID NO: 1582405 - RNA, 12 nt, Human adenovirus F
ucgggcgcgggu

SEQ ID NO: 1582406 - RNA, 15 nt, Human adenovirus F
caaaugcucugcaaa

SEQ ID NO: 1582407 - RNA, 22 nt, Human adenovirus F
gccaguuggggauuggcggcua

SEQ ID NO: 1582408 - RNA, 21 nt, Human adenovirus F
uuucagggcaacguucagcca

SEQ ID NO: 1582409 - RNA, 15 nt, Human adenovirus F
ccggccuggacccuu

SEQ ID NO: 1582410 - RNA, 21 nt, Human adenovirus F
gauuccugggguagggugucu

SEQ ID NO: 1582411 - RNA, 15 nt, Human adenovirus F
uugccgcagccagug

SEQ ID NO: 1582412 - RNA, 19 nt, Human adenovirus F
acaacacaggagcuuuaca

SEQ ID NO: 1582413 - RNA, 15 nt, Human adenovirus F
auagccaaccaggcc

SEQ ID NO: 1582414 - RNA, 13 nt, Human adenovirus F
gucuggaaccacu

SEQ ID NO: 1582415 - RNA, 15 nt, Human adenovirus F
cccuuuuccagcaac

SEQ ID NO: 1582416 - RNA, 23 nt, Human adenovirus F
ggaucccagcguugagccggaag

SEQ ID NO: 1582417 - RNA, 18 nt, Human adenovirus F
uguacguuuguugcaugu

SEQ ID NO: 1582418 - RNA, 15 nt, Human adenovirus F
gcuuggauuaggaag

SEQ ID NO: 1582419 - RNA, 16 nt, Human adenovirus F
caacaaaaauacauau

SEQ ID NO: 1582420 - RNA, 13 nt, Human adenovirus F
ggucauugggcuu

SEQ ID NO: 1582421 - RNA, 22 nt, Human adenovirus F
ggagccggcgguggcaacccug

SEQ ID NO: 1582422 - RNA, 18 nt, Human adenovirus F
cuugcucggugcagccgu

SEQ ID NO: 1582423 - RNA, 19 nt, Human adenovirus F
ucacaacaccgcuuccacc

SEQ ID NO: 1582424 - RNA, 15 nt, Human adenovirus F
ucuccccacagccgu

SEQ ID NO: 1582425 - RNA, 20 nt, Human adenovirus F
gcuaauuuuucaccaaaggu

SEQ ID NO: 1582426 - RNA, 15 nt, Human adenovirus F
auauaggacaaaaaa

SEQ ID NO: 1582427 - RNA, 13 nt, Human adenovirus F
gccauugccaccc

SEQ ID NO: 1582428 - RNA, 22 nt, Human adenovirus F
agcccgcaacggcgcagcagau

SEQ ID NO: 1582429 - RNA, 19 nt, Human adenovirus F
augcuacacaacaaaucau

SEQ ID NO: 1582430 - RNA, 17 nt, Human adenovirus F
cagauggagagcuggga

SEQ ID NO: 1582431 - RNA, 18 nt, Human adenovirus F
gcaaguuucgcaaaagcu

SEQ ID NO: 1582432 - RNA, 20 nt, Human adenovirus F
aacggcgugguggauauagc

SEQ ID NO: 1582433 - RNA, 13 nt, Human adenovirus F
agcaaaaccucca

SEQ ID NO: 1582434 - RNA, 13 nt, Human adenovirus F
cgugguaaaaggg

SEQ ID NO: 1582435 - RNA, 17 nt, Human adenovirus F
uuguacaaagucaucca

SEQ ID NO: 1582436 - RNA, 20 nt, Human adenovirus F
gccgcgccaaccguacacgc

SEQ ID NO: 1582437 - RNA, 17 nt, Human adenovirus F
gggaguaaaaagccuga

SEQ ID NO: 1582438 - RNA, 14 nt, Human adenovirus F
cuccaacguagagc

SEQ ID NO: 1582439 - RNA, 19 nt, Human adenovirus F
aguuaaccuugaguuuaau

SEQ ID NO: 1582440 - RNA, 17 nt, Human adenovirus F
aagaccaacugcagcgc

SEQ ID NO: 1582441 - RNA, 21 nt, Human adenovirus F
cuugcaggagccgaauugccu

SEQ ID NO: 1582442 - RNA, 18 nt, Human adenovirus F
uacaauauuggcuaccag

SEQ ID NO: 1582443 - RNA, 17 nt, Human adenovirus F
uccuccuucacaaaguc

SEQ ID NO: 1582444 - RNA, 14 nt, Human adenovirus F
aauguaacucuccc

SEQ ID NO: 1582445 - RNA, 12 nt, Human adenovirus F
gaaaaccccgcc

SEQ ID NO: 1582446 - RNA, 20 nt, Human adenovirus F
agaacuggaguaacacaaug

SEQ ID NO: 1582447 - RNA, 13 nt, Human adenovirus F
augcuauuuucca

SEQ ID NO: 1582448 - RNA, 14 nt, Human adenovirus F
ucgcuccagguggg

SEQ ID NO: 1582449 - RNA, 14 nt, Human adenovirus F
uacagcccaacacc

SEQ ID NO: 1582450 - RNA, 22 nt, Human adenovirus F
ccugagaucguuucuuuagaag

SEQ ID NO: 1582451 - RNA, 15 nt, Human adenovirus F
agauccguggagccg

SEQ ID NO: 1582452 - RNA, 14 nt, Human adenovirus F
ugggacgaggagga

SEQ ID NO: 1582453 - RNA, 21 nt, Human adenovirus F
ucaccgccuuggccagcagcc

SEQ ID NO: 1582454 - RNA, 13 nt, Human adenovirus F
uauucaccaccuu

SEQ ID NO: 1582455 - RNA, 19 nt, Human adenovirus F
ugucaugcaacuuggaagg

SEQ ID NO: 1582456 - RNA, 21 nt, Human adenovirus F
uagcaccaacgugcaggccaa

SEQ ID NO: 1582457 - RNA, 13 nt, Human adenovirus F
guagcguguugga

SEQ ID NO: 1582458 - RNA, 16 nt, Human adenovirus F
caauuugcuaacacua

SEQ ID NO: 1582459 - RNA, 20 nt, Human adenovirus F
caaucucuucguccuggagu

SEQ ID NO: 1582460 - RNA, 14 nt, Human adenovirus F
gaacguuuugacau

SEQ ID NO: 1582461 - RNA, 15 nt, Human adenovirus F
gaccgagcagcugcg

SEQ ID NO: 1582462 - RNA, 20 nt, Human adenovirus F
augugucuccgcugggagaa

SEQ ID NO: 1582463 - RNA, 19 nt, Human adenovirus F
ugggaacuguccagggagu

SEQ ID NO: 1582464 - RNA, 19 nt, Human adenovirus F
agcgucggcgccacacugu

SEQ ID NO: 1582465 - RNA, 23 nt, Human adenovirus F
acgugcggugggagugccgccgg

SEQ ID NO: 1582466 - RNA, 13 nt, Human adenovirus F
cgccccugugagu

SEQ ID NO: 1582467 - RNA, 17 nt, Human adenovirus F
guagcguguuggacuug

SEQ ID NO: 1582468 - RNA, 22 nt, Human adenovirus F
cuguguuaucacccaaagccaa

SEQ ID NO: 1582469 - RNA, 13 nt, Human adenovirus F
uggaggcggcugg

SEQ ID NO: 1582470 - RNA, 22 nt, Human adenovirus F
ccuagcugcuuuaaucgcugga

SEQ ID NO: 1582471 - RNA, 15 nt, Human adenovirus F
augugccgcgcgggc

SEQ ID NO: 1582472 - RNA, 19 nt, Human adenovirus F
aucuuaagcugcagccaga

SEQ ID NO: 1582473 - RNA, 14 nt, Human adenovirus F
cggagacgagcugc

SEQ ID NO: 1582474 - RNA, 14 nt, Human adenovirus F
aaaugacuaacucc

SEQ ID NO: 1582475 - RNA, 18 nt, Human adenovirus F
ugccaccgcaaccauguu

SEQ ID NO: 1582476 - RNA, 17 nt, Human adenovirus F
ucccagucugccaucgc

SEQ ID NO: 1582477 - RNA, 15 nt, Human adenovirus F
gccugacucuuacaa

SEQ ID NO: 1582478 - RNA, 19 nt, Human adenovirus F
gaggcuuuccgcgaggcca

SEQ ID NO: 1582479 - RNA, 16 nt, Human adenovirus F
gguuaauaagcugggu

SEQ ID NO: 1582480 - RNA, 20 nt, Human adenovirus F
cgaccuuuucuaggguguga

SEQ ID NO: 1582481 - RNA, 23 nt, Human adenovirus F
uccugaaugugucuccgcuggga

SEQ ID NO: 1582482 - RNA, 15 nt, Human adenovirus F
aggaagggcaaaggu

SEQ ID NO: 1582483 - RNA, 14 nt, Human adenovirus F
gacaaaaucacugu

SEQ ID NO: 1582484 - RNA, 21 nt, Human adenovirus F
cgucaggccgcccgucaggcc

SEQ ID NO: 1582485 - RNA, 21 nt, Human adenovirus F
gguucgaguucacuuugccag

SEQ ID NO: 1582486 - RNA, 15 nt, Human adenovirus F
guagccccuugguga

SEQ ID NO: 1582487 - RNA, 23 nt, Human adenovirus F
guuaaaaagcgagaaaaaaaaga

SEQ ID NO: 1582488 - RNA, 17 nt, Human adenovirus F
ggcgaggggcuggcccg

SEQ ID NO: 1582489 - RNA, 16 nt, Human adenovirus F
caggcagcagccccag

SEQ ID NO: 1582490 - RNA, 19 nt, Human adenovirus F
uugauuuucuuugccaccu

SEQ ID NO: 1582491 - RNA, 15 nt, Human adenovirus F
ugauuucauuuacca

SEQ ID NO: 1582492 - RNA, 20 nt, Human adenovirus F
ggagugccgccggugauggc

SEQ ID NO: 1582493 - RNA, 10 nt, Human adenovirus F
ccauuuccaa

SEQ ID NO: 1582494 - RNA, 23 nt, Human adenovirus F
gaugguaaaaaugccaggcagca

SEQ ID NO: 1582495 - RNA, 13 nt, Human adenovirus F
uggccccuaccag

SEQ ID NO: 1582496 - RNA, 20 nt, Human adenovirus F
caccuuguguuuaagccaga

SEQ ID NO: 1582497 - RNA, 15 nt, Human adenovirus F
caugaaacuggaaga

SEQ ID NO: 1582498 - RNA, 12 nt, Human adenovirus F
ggaagggaaggc

SEQ ID NO: 1582499 - RNA, 16 nt, Human adenovirus F
cggguuuaccuggugg

SEQ ID NO: 1582500 - RNA, 17 nt, Human adenovirus F
aaaagacccauuuccaa

SEQ ID NO: 1582501 - RNA, 11 nt, Human adenovirus F
ccgagggcuuc

SEQ ID NO: 1582502 - RNA, 23 nt, Human adenovirus F
ggcguugauaugaugaaaguaga

SEQ ID NO: 1582503 - RNA, 20 nt, Human adenovirus F
ccguuucucgccccaccgcc

SEQ ID NO: 1582504 - RNA, 20 nt, Human adenovirus F
ugccuuuucacauccaagug

SEQ ID NO: 1582505 - RNA, 17 nt, Human adenovirus F
aaugcuccgggauaagc

SEQ ID NO: 1582506 - RNA, 16 nt, Human adenovirus F
ugcauacaacucccug

SEQ ID NO: 1582507 - RNA, 16 nt, Human adenovirus F
gcuugcccuuggaaau

SEQ ID NO: 1582508 - RNA, 15 nt, Human adenovirus F
augcaacuuggaagg

SEQ ID NO: 1582509 - RNA, 16 nt, Human adenovirus F
gcgucggcgccacacu

SEQ ID NO: 1582510 - RNA, 14 nt, Human adenovirus F
caccaacugcucuu

SEQ ID NO: 1582511 - RNA, 22 nt, Human adenovirus F
acagaccgcaggacuuggcaga

SEQ ID NO: 1582512 - RNA, 20 nt, Human adenovirus F
aggcguggaaaaacuuggaa

SEQ ID NO: 1582513 - RNA, 18 nt, Human adenovirus F
uagggugucugccagagg

SEQ ID NO: 1582514 - RNA, 21 nt, Human adenovirus F
acacagaacaaaacacacucc

SEQ ID NO: 1582515 - RNA, 18 nt, Human adenovirus F
uucuccuccccuuacaaa

SEQ ID NO: 1582516 - RNA, 17 nt, Human adenovirus F
gagcaugaaacuggaag

SEQ ID NO: 1582517 - RNA, 14 nt, Human adenovirus F
gugcuuccagccuc

SEQ ID NO: 1582518 - RNA, 21 nt, Human adenovirus F
uuuucagguggggggucggcg

SEQ ID NO: 1582519 - RNA, 16 nt, Human adenovirus F
cuagccaacuauuugg

SEQ ID NO: 1582520 - RNA, 12 nt, Human adenovirus F
uccagccucaaa

SEQ ID NO: 1582521 - RNA, 19 nt, Human adenovirus F
uacaagcuauucagcaggc

SEQ ID NO: 1582522 - RNA, 15 nt, Human adenovirus F
gaagccuucaggcag

SEQ ID NO: 1582523 - RNA, 18 nt, Human adenovirus F
ugcaccgcgcggcggcca

SEQ ID NO: 1582524 - RNA, 13 nt, Human adenovirus F
uggaccuggaaga

SEQ ID NO: 1582525 - RNA, 12 nt, Human adenovirus F
uucacugaaagc

SEQ ID NO: 1582526 - RNA, 20 nt, Human adenovirus F
gguggauaccgcugcagcug

SEQ ID NO: 1582527 - RNA, 19 nt, Human adenovirus F
acugccguugcaaccucug

SEQ ID NO: 1582528 - RNA, 14 nt, Human adenovirus F
aggccagucggcag

SEQ ID NO: 1582529 - RNA, 13 nt, Human adenovirus F
aacaaggccugga

SEQ ID NO: 1582530 - RNA, 14 nt, Human adenovirus F
gcucuuccaagcug

SEQ ID NO: 1582531 - RNA, 12 nt, Human adenovirus F
caacgcaguggu

SEQ ID NO: 1582532 - RNA, 18 nt, Human adenovirus F
gcuuacucuuucuuacaa

SEQ ID NO: 1582533 - RNA, 14 nt, Human adenovirus F
aaaugccuaccucu

SEQ ID NO: 1582534 - RNA, 12 nt, Human adenovirus F
caaaaugagugg

SEQ ID NO: 1582535 - RNA, 23 nt, Human adenovirus F
agcaaaaauguuaucgggguggg

SEQ ID NO: 1582536 - RNA, 12 nt, Human adenovirus F
ccuccgacccca

SEQ ID NO: 1582537 - RNA, 17 nt, Human adenovirus F
acagaugucauaaacgu

SEQ ID NO: 1582538 - RNA, 15 nt, Human adenovirus F
gguucucuucaggcu

SEQ ID NO: 1582539 - RNA, 13 nt, Human adenovirus F
augugcucgcaaa

SEQ ID NO: 1582540 - RNA, 17 nt, Human adenovirus F
gcgguggucacucucag

SEQ ID NO: 1582541 - RNA, 22 nt, Human adenovirus F
acugcuaaagggaacugccagu

SEQ ID NO: 1582542 - RNA, 16 nt, Human adenovirus F
cgucacuuccgccgca

SEQ ID NO: 1582543 - RNA, 16 nt, Human adenovirus F
cccugucguugccagc

SEQ ID NO: 1582544 - RNA, 19 nt, Human adenovirus F
cccagguuuaauacaguga

SEQ ID NO: 1582545 - RNA, 15 nt, Human adenovirus F
ucccgcccucacaga

SEQ ID NO: 1582546 - RNA, 14 nt, Human adenovirus F
cacgcucugcaucu

SEQ ID NO: 1582547 - RNA, 12 nt, Human adenovirus F
cccuaacauggc

SEQ ID NO: 1582548 - RNA, 23 nt, Human adenovirus F
ucucguuuaauccgugcgcugcc

SEQ ID NO: 1582549 - RNA, 21 nt, Human adenovirus F
gaacgaccauaguaacuuuca

SEQ ID NO: 1582550 - RNA, 22 nt, Human adenovirus F
aggauccauagagggcguugga

SEQ ID NO: 1582551 - RNA, 22 nt, Human adenovirus F
caccguuagcacugcgguggag

SEQ ID NO: 1582552 - RNA, 16 nt, Human adenovirus F
ugaccgagcagcugcg

SEQ ID NO: 1582553 - RNA, 22 nt, Human adenovirus F
gagcccugaucagccagguggu

SEQ ID NO: 1582554 - RNA, 17 nt, Human adenovirus F
gaaacacacaucacugu

SEQ ID NO: 1582555 - RNA, 23 nt, Human adenovirus F
cucuacgucaccuuacaccaccc

SEQ ID NO: 1582556 - RNA, 18 nt, Human adenovirus F
gccguugcucucuccgga

SEQ ID NO: 1582557 - RNA, 19 nt, Human adenovirus F
ugauuuucuuugccaccuu

SEQ ID NO: 1582558 - RNA, 13 nt, Human adenovirus F
agugcaggaagag

SEQ ID NO: 1582559 - RNA, 14 nt, Human adenovirus F
ccuaugacaccucc

SEQ ID NO: 1582560 - RNA, 19 nt, Human adenovirus F
aguucgcgguucaggaggu

SEQ ID NO: 1582561 - RNA, 19 nt, Human adenovirus F
gacggccguaccaagccug

SEQ ID NO: 1582562 - RNA, 16 nt, Human adenovirus F
cuaacuggcagagcac

SEQ ID NO: 1582563 - RNA, 17 nt, Human adenovirus F
acucauccauaaugaug

SEQ ID NO: 1582564 - RNA, 13 nt, Human adenovirus F
auucugaagagga

SEQ ID NO: 1582565 - RNA, 18 nt, Human adenovirus F
cuaucaggaagcagcuca

SEQ ID NO: 1582566 - RNA, 20 nt, Human adenovirus F
cccccggcggcgggugcagu

SEQ ID NO: 1582567 - RNA, 16 nt, Human adenovirus F
caggaucccucagagc

SEQ ID NO: 1582568 - RNA, 18 nt, Human adenovirus F
gacauucuugagcaggcc

SEQ ID NO: 1582569 - RNA, 12 nt, Human adenovirus F
uugacuugcagg

SEQ ID NO: 1582570 - RNA, 23 nt, Human adenovirus F
uggcagcccagcgcccgggcccu

SEQ ID NO: 1582571 - RNA, 20 nt, Human adenovirus F
gcgcggaagaagaugaggag

SEQ ID NO: 1582572 - RNA, 11 nt, Human adenovirus F
cagggcacagu

SEQ ID NO: 1582573 - RNA, 15 nt, Human adenovirus F
cagaccccauggaca

SEQ ID NO: 1582574 - RNA, 22 nt, Human adenovirus F
uagucauacauuucgugggaag

SEQ ID NO: 1582575 - RNA, 12 nt, Human adenovirus F
aauccuuuuugg

SEQ ID NO: 1582576 - RNA, 17 nt, Human adenovirus F
gagaucacgucuggggu

SEQ ID NO: 1582577 - RNA, 23 nt, Human adenovirus F
gggccccugaggcagcgacaggg

SEQ ID NO: 1582578 - RNA, 20 nt, Human adenovirus F
uuaacacuggcagaggcuua

SEQ ID NO: 1582579 - RNA, 21 nt, Human adenovirus F
gguaaaaaugccaggcagcag

SEQ ID NO: 1582580 - RNA, 17 nt, Human adenovirus F
gcggcaaugcuuuugau

SEQ ID NO: 1582581 - RNA, 22 nt, Human adenovirus F
cagacggccguaccaagccuga

SEQ ID NO: 1582582 - RNA, 21 nt, Human adenovirus F
caccguuccgcccaugccggc

SEQ ID NO: 1582583 - RNA, 19 nt, Human adenovirus F
ugauuuccauuggugaguu

SEQ ID NO: 1582584 - RNA, 24 nt, Human adenovirus F
aaaucuucaaacauuaagcugcaa

SEQ ID NO: 1582585 - RNA, 19 nt, Human adenovirus F
cuaccucugcgcugcaaac

SEQ ID NO: 1582586 - RNA, 12 nt, Human adenovirus F
acgcccaggagc

SEQ ID NO: 1582587 - RNA, 22 nt, Human adenovirus F
cgagccacagguccagaccuca

SEQ ID NO: 1582588 - RNA, 14 nt, Human adenovirus F
ccgaaguccaaaug

SEQ ID NO: 1582589 - RNA, 14 nt, Human adenovirus F
agacccauuuccaa

SEQ ID NO: 1582590 - RNA, 17 nt, Human adenovirus F
caugcacaucgccgggc

SEQ ID NO: 1582591 - RNA, 18 nt, Human adenovirus F
gccgccaggugguagaca

SEQ ID NO: 1582592 - RNA, 13 nt, Human adenovirus F
agccccaggccaa

SEQ ID NO: 1582593 - RNA, 19 nt, Human adenovirus F
ccucauacaaaugcucagu

SEQ ID NO: 1582594 - RNA, 21 nt, Human adenovirus F
acauagcaaaagcauuuuccu

SEQ ID NO: 1582595 - RNA, 17 nt, Human adenovirus F
guacgguuucugggcuu

SEQ ID NO: 1582596 - RNA, 24 nt, Human adenovirus F
auuccugggguagggugucugcca

SEQ ID NO: 1582597 - RNA, 17 nt, Human adenovirus F
ugggggcgccauccccc

SEQ ID NO: 1582598 - RNA, 17 nt, Human adenovirus F
cacucuccgccgccgcu

SEQ ID NO: 1582599 - RNA, 17 nt, Human adenovirus F
cagccaaugggcuccag

SEQ ID NO: 1582600 - RNA, 14 nt, Human adenovirus F
guaaacugauuuga

SEQ ID NO: 1582601 - RNA, 20 nt, Human adenovirus F
cgggcgguacuaaggcgggc

SEQ ID NO: 1582602 - RNA, 22 nt, Human adenovirus F
aaguucaacaucaaccagugca

SEQ ID NO: 1582603 - RNA, 23 nt, Human adenovirus F
gccuuguaugggcagcauccuuu

SEQ ID NO: 1582604 - RNA, 21 nt, Human adenovirus F
ucuaagggaacuucuccccuu

SEQ ID NO: 1582605 - RNA, 14 nt, Human adenovirus F
ccagccggaggagu

SEQ ID NO: 1582606 - RNA, 14 nt, Human adenovirus F
ucacugaaagccag

SEQ ID NO: 1582607 - RNA, 16 nt, Human adenovirus F
gcagccuguggagugg

SEQ ID NO: 1582608 - RNA, 16 nt, Human adenovirus F
cugaggaggaggccau

SEQ ID NO: 1582609 - RNA, 20 nt, Human adenovirus F
aacggcggaugguggcaagg

SEQ ID NO: 1582610 - RNA, 14 nt, Human adenovirus F
gccaucugcagcau

SEQ ID NO: 1582611 - RNA, 20 nt, Human adenovirus F
augggagugcuggccgggca

SEQ ID NO: 1582612 - RNA, 21 nt, Human adenovirus F
gcacuuggggaauuugucaug

SEQ ID NO: 1582613 - RNA, 17 nt, Human adenovirus F
cauucccuuuuccagca

SEQ ID NO: 1582614 - RNA, 14 nt, Human adenovirus F
cuuuaccccgacag

SEQ ID NO: 1582615 - RNA, 21 nt, Human adenovirus F
accagcacacagggauacugg

SEQ ID NO: 1582616 - RNA, 15 nt, Human adenovirus F
gcuccuggguaacgg

SEQ ID NO: 1582617 - RNA, 19 nt, Human adenovirus F
aggagcagauggagagcug

SEQ ID NO: 1582618 - RNA, 23 nt, Human adenovirus F
cuccgauuuugucccccucugcu

SEQ ID NO: 1582619 - RNA, 22 nt, Human adenovirus F
caggucgggcccgucgucaggc

SEQ ID NO: 1582620 - RNA, 14 nt, Human adenovirus F
uuagauguggaaaa

SEQ ID NO: 1582621 - RNA, 23 nt, Human adenovirus F
accgcuaauuuuucaccaaaggu

SEQ ID NO: 1582622 - RNA, 18 nt, Human adenovirus F
aaaaugugcagcaaaaac

SEQ ID NO: 1582623 - RNA, 22 nt, Human adenovirus F
guuggaggagauggugggccgc

SEQ ID NO: 1582624 - RNA, 15 nt, Human adenovirus F
agucuguuugguggg

SEQ ID NO: 1582625 - RNA, 16 nt, Human adenovirus F
ccacugccacugaaac

SEQ ID NO: 1582626 - RNA, 12 nt, Human adenovirus F
agaauuuaugcc

SEQ ID NO: 1582627 - RNA, 21 nt, Human adenovirus F
cguagggauugagugggaagc

SEQ ID NO: 1582628 - RNA, 14 nt, Human adenovirus F
cuacccuucugugc

SEQ ID NO: 1582629 - RNA, 17 nt, Human adenovirus F
gacagcaaggaaagaag

SEQ ID NO: 1582630 - RNA, 17 nt, Human adenovirus F
caagcgcaaguucaaag

SEQ ID NO: 1582631 - RNA, 19 nt, Human adenovirus F
aaccaggccuugcaaaacc

SEQ ID NO: 1582632 - RNA, 15 nt, Human adenovirus F
cgugcuccugaagca

SEQ ID NO: 1582633 - RNA, 14 nt, Human adenovirus F
cuccgccggcaugu

SEQ ID NO: 1582634 - RNA, 17 nt, Human adenovirus F
gccacguccaccgugga

SEQ ID NO: 1582635 - RNA, 16 nt, Human adenovirus F
caguccuucugccacg

SEQ ID NO: 1582636 - RNA, 16 nt, Human adenovirus F
aaggaauguggggcgu

SEQ ID NO: 1582637 - RNA, 13 nt, Human adenovirus F
accaauuugcuaa

SEQ ID NO: 1582638 - RNA, 19 nt, Human adenovirus F
cguagaguuugggagccag

SEQ ID NO: 1582639 - RNA, 24 nt, Human adenovirus F
cgucagaacggcgugcuggaaagc

SEQ ID NO: 1582640 - RNA, 13 nt, Human adenovirus F
gacaagacaugga

SEQ ID NO: 1582641 - RNA, 18 nt, Human adenovirus F
aaaucguagguuuaaauu

SEQ ID NO: 1582642 - RNA, 16 nt, Human adenovirus F
accggcuccugugcag

SEQ ID NO: 1582643 - RNA, 22 nt, Human adenovirus F
uauuucuuugucuaacuaaaaa

SEQ ID NO: 1582644 - RNA, 22 nt, Human adenovirus F
cggcgugguggauauagccaac

SEQ ID NO: 1582645 - RNA, 20 nt, Human adenovirus F
cucgucauaggccauuuuga

SEQ ID NO: 1582646 - RNA, 23 nt, Human adenovirus F
ccuuugacaaucagggaaauuua

SEQ ID NO: 1582647 - RNA, 15 nt, Human adenovirus F
aaaucuucaaacauu

SEQ ID NO: 1582648 - RNA, 14 nt, Human adenovirus F
cgagccggagaggg

SEQ ID NO: 1582649 - RNA, 21 nt, Human adenovirus F
caaaucucgccuaacaucacc

SEQ ID NO: 1582650 - RNA, 22 nt, Human adenovirus F
agcccccgugggggaccgagcc

SEQ ID NO: 1582651 - RNA, 21 nt, Human adenovirus F
agaacguguugguagagcugg

SEQ ID NO: 1582652 - RNA, 11 nt, Human adenovirus F
gcaccuucagu

SEQ ID NO: 1582653 - RNA, 14 nt, Human adenovirus F
cccaugagccgcca

SEQ ID NO: 1582654 - RNA, 22 nt, Human adenovirus F
caacaaaaucaggaacuguuca

SEQ ID NO: 1582655 - RNA, 20 nt, Human adenovirus F
aaaagcucgcgcacagcuuc

SEQ ID NO: 1582656 - RNA, 21 nt, Human adenovirus F
cagggcgcuaacugugcaucu

SEQ ID NO: 1582657 - RNA, 15 nt, Human adenovirus F
ucccgccccugccac

SEQ ID NO: 1582658 - RNA, 22 nt, Human adenovirus F
agggcaacguucagccacuccu

SEQ ID NO: 1582659 - RNA, 13 nt, Human adenovirus F
cugucgccccugc

SEQ ID NO: 1582660 - RNA, 16 nt, Human adenovirus F
uguacugugcauuugg

SEQ ID NO: 1582661 - RNA, 18 nt, Human adenovirus F
accaaagagcuugaacau

SEQ ID NO: 1582662 - RNA, 18 nt, Human adenovirus F
cggaagggcggaacagca

SEQ ID NO: 1582663 - RNA, 16 nt, Human adenovirus F
caaacgcaccauugaa

SEQ ID NO: 1582664 - RNA, 18 nt, Human adenovirus F
aacaacgaaauuuccauu

SEQ ID NO: 1582665 - RNA, 18 nt, Human adenovirus F
cuacuucagccuggggaa

SEQ ID NO: 1582666 - RNA, 17 nt, Human adenovirus F
caccgcgcggcggccau

SEQ ID NO: 1582667 - RNA, 21 nt, Human adenovirus F
cugcgcaaagucgaggagucc

SEQ ID NO: 1582668 - RNA, 22 nt, Human adenovirus F
ugggauuugccgcagccagugg

SEQ ID NO: 1582669 - RNA, 13 nt, Human adenovirus F
uagacgaggagga

SEQ ID NO: 1582670 - RNA, 22 nt, Human adenovirus F
cgauuuugucccccucugcuac

SEQ ID NO: 1582671 - RNA, 14 nt, Human adenovirus F
acuccucuuccucc

SEQ ID NO: 1582672 - RNA, 16 nt, Human adenovirus F
gcucaucugcggccuc

SEQ ID NO: 1582673 - RNA, 16 nt, Human adenovirus F
uggaauuacugccagu

SEQ ID NO: 1582674 - RNA, 19 nt, Human adenovirus F
gauacuggauacuggcaag

SEQ ID NO: 1582675 - RNA, 16 nt, Human adenovirus F
acccgaccuaaacucu

SEQ ID NO: 1582676 - RNA, 16 nt, Human adenovirus F
gucgcauaacccugga

SEQ ID NO: 1582677 - RNA, 13 nt, Human adenovirus F
aucacccaaagcc

SEQ ID NO: 1582678 - RNA, 14 nt, Human adenovirus F
aaacaacaaaauca

SEQ ID NO: 1582679 - RNA, 20 nt, Human adenovirus F
gaccucccaaagucccccuu

SEQ ID NO: 1582680 - RNA, 19 nt, Human adenovirus F
cuuucaccgccuuggccag

SEQ ID NO: 1582681 - RNA, 22 nt, Human adenovirus F
ccugggguagggugucugccag

SEQ ID NO: 1582682 - RNA, 22 nt, Human adenovirus F
aaguauacauuugaacagcuga

SEQ ID NO: 1582683 - RNA, 12 nt, Human adenovirus F
cccgccagcugg

SEQ ID NO: 1582684 - RNA, 19 nt, Human adenovirus F
guuaugccccacaauguaa

SEQ ID NO: 1582685 - RNA, 18 nt, Human adenovirus F
gcuugggggcgccauccc

SEQ ID NO: 1582686 - RNA, 15 nt, Human adenovirus F
ugccugaagcacugg

SEQ ID NO: 1582687 - RNA, 20 nt, Human adenovirus F
ucgcggccguuuaugggcac

SEQ ID NO: 1582688 - RNA, 13 nt, Human adenovirus F
aauucugaagagg

SEQ ID NO: 1582689 - RNA, 12 nt, Human adenovirus F
cuccauuauuuu

SEQ ID NO: 1582690 - RNA, 22 nt, Human adenovirus F
acaugggggcggaccugcaaug

SEQ ID NO: 1582691 - RNA, 15 nt, Human adenovirus F
uaacucucuuacauu

SEQ ID NO: 1582692 - RNA, 19 nt, Human adenovirus F
gcgcacugguaaaccagca

SEQ ID NO: 1582693 - RNA, 19 nt, Human adenovirus F
cccuauucgggcacugcau

SEQ ID NO: 1582694 - RNA, 16 nt, Human adenovirus F
uggagccgacuucaag

SEQ ID NO: 1582695 - RNA, 20 nt, Human adenovirus F
acacgcauguaaauuuugca

SEQ ID NO: 1582696 - RNA, 23 nt, Human adenovirus F
gagauucaagggccagagcaaca

SEQ ID NO: 1582697 - RNA, 13 nt, Human adenovirus F
aacuuuguuauga

SEQ ID NO: 1582698 - RNA, 15 nt, Human adenovirus F
cacuucuauugcacu

SEQ ID NO: 1582699 - RNA, 15 nt, Human adenovirus F
uuaaccauggagcua

SEQ ID NO: 1582700 - RNA, 22 nt, Human adenovirus F
accguucccacuguuucuccuc

SEQ ID NO: 1582701 - RNA, 16 nt, Human adenovirus F
gguagaaguggaggaa

SEQ ID NO: 1582702 - RNA, 13 nt, Human adenovirus F
acucucagcugcu

SEQ ID NO: 1582703 - RNA, 15 nt, Human adenovirus F
gagcaaguggagcaa

SEQ ID NO: 1582704 - RNA, 15 nt, Human adenovirus F
cuugcaagcagcucg

SEQ ID NO: 1582705 - RNA, 17 nt, Human adenovirus F
uaaagggaacugccagu

SEQ ID NO: 1582706 - RNA, 20 nt, Human adenovirus F
gaaauuugcugacagcuggg

SEQ ID NO: 1582707 - RNA, 13 nt, Human adenovirus F
cacuaccacccuc

SEQ ID NO: 1582708 - RNA, 15 nt, Human adenovirus F
aggaaacgcugugag

SEQ ID NO: 1582709 - RNA, 18 nt, Human adenovirus F
agaggguacuagcagugg

SEQ ID NO: 1582710 - RNA, 13 nt, Human adenovirus F
accugaaaaccau

SEQ ID NO: 1582711 - RNA, 22 nt, Human adenovirus F
gagaguugggacucuugcugga

SEQ ID NO: 1582712 - RNA, 14 nt, Human adenovirus F
aguccuucugccac

SEQ ID NO: 1582713 - RNA, 13 nt, Human adenovirus F
agcagagcucugc

SEQ ID NO: 1582714 - RNA, 22 nt, Human adenovirus F
cucagcgaacccaacuauuugg

SEQ ID NO: 1582715 - RNA, 17 nt, Human adenovirus F
gccucagggucaacugg

SEQ ID NO: 1582716 - RNA, 22 nt, Human adenovirus F
uuggaagggaaggcguggaaaa

SEQ ID NO: 1582717 - RNA, 20 nt, Human adenovirus F
gugcccauagacaaggaggu

SEQ ID NO: 1582718 - RNA, 19 nt, Human adenovirus F
ucugcaccugcacgcucuu

SEQ ID NO: 1582719 - RNA, 16 nt, Human adenovirus F
ccgcgaacuaaugcac

SEQ ID NO: 1582720 - RNA, 16 nt, Human adenovirus F
aucguaccauguggcg

SEQ ID NO: 1582721 - RNA, 14 nt, Human adenovirus F
gccauucuucucuu

SEQ ID NO: 1582722 - RNA, 14 nt, Human adenovirus F
guagacgcuggaag

SEQ ID NO: 1582723 - RNA, 18 nt, Human adenovirus F
agugacacgucaccgcca

SEQ ID NO: 1582724 - RNA, 21 nt, Human adenovirus F
uguagccuuuaacugcgcaau

SEQ ID NO: 1582725 - RNA, 19 nt, Human adenovirus F
cagcgggaagagaggcagc

SEQ ID NO: 1582726 - RNA, 17 nt, Human adenovirus F
cuggaggacgccgaggc

SEQ ID NO: 1582727 - RNA, 18 nt, Human adenovirus F
ugggaggggaggacgacg

SEQ ID NO: 1582728 - RNA, 14 nt, Human adenovirus F
ugacaaacaagcug

SEQ ID NO: 1582729 - RNA, 18 nt, Human adenovirus F
gcugacccuucccaacgc

SEQ ID NO: 1582730 - RNA, 17 nt, Human adenovirus F
agcccgcaacggcgcag

SEQ ID NO: 1582731 - RNA, 17 nt, Human adenovirus F
agggauugagugggaag

SEQ ID NO: 1582732 - RNA, 23 nt, Human adenovirus F
ccucagccugaaauacacugauc

SEQ ID NO: 1582733 - RNA, 16 nt, Human adenovirus F
cagccaaugggcucca

SEQ ID NO: 1582734 - RNA, 23 nt, Human adenovirus F
uugcgguacucucgaaacuuuuu

SEQ ID NO: 1582735 - RNA, 12 nt, Human adenovirus F
ugauggcagcag

SEQ ID NO: 1582736 - RNA, 17 nt, Human adenovirus F
uguuaucacccaaagcc

SEQ ID NO: 1582737 - RNA, 15 nt, Human adenovirus F
ccgcagucucccacc

SEQ ID NO: 1582738 - RNA, 16 nt, Human adenovirus F
cagaaacaugccaccc

SEQ ID NO: 1582739 - RNA, 14 nt, Human adenovirus F
gcgaaugcccccca

SEQ ID NO: 1582740 - RNA, 16 nt, Human adenovirus F
agccgcugacggcgca

SEQ ID NO: 1582741 - RNA, 22 nt, Human adenovirus F
cauucugagacaaaagcccggg

SEQ ID NO: 1582742 - RNA, 20 nt, Human adenovirus F
aacgggguggaaagccuggu

SEQ ID NO: 1582743 - RNA, 12 nt, Human adenovirus F
uuauugccaccg

SEQ ID NO: 1582744 - RNA, 22 nt, Human adenovirus F
caaccaggccuugcaaaaccaa

SEQ ID NO: 1582745 - RNA, 14 nt, Human adenovirus F
uacuaaaacaaacc

SEQ ID NO: 1582746 - RNA, 20 nt, Human adenovirus F
acggcaaucccagcagaaac

SEQ ID NO: 1582747 - RNA, 13 nt, Human adenovirus F
cugaacuuuuugc

SEQ ID NO: 1582748 - RNA, 19 nt, Human adenovirus F
ugacacgggcacucuucgc

SEQ ID NO: 1582749 - RNA, 16 nt, Human adenovirus F
ccuaaggacuucaccu

SEQ ID NO: 1582750 - RNA, 17 nt, Human adenovirus F
ccccacuguugccgugg

SEQ ID NO: 1582751 - RNA, 17 nt, Human adenovirus F
aaucuugaauaauuccc

SEQ ID NO: 1582752 - RNA, 19 nt, Human adenovirus F
aucgcuguggacgacagcc

SEQ ID NO: 1582753 - RNA, 23 nt, Human adenovirus F
ucuccauaccagaguaacuuuug

SEQ ID NO: 1582754 - RNA, 17 nt, Human adenovirus F
ccucuacgucaccuuac

SEQ ID NO: 1582755 - RNA, 19 nt, Human adenovirus F
caauggcagcccagcgccc

SEQ ID NO: 1582756 - RNA, 23 nt, Human adenovirus F
accgcggcuugucgcagaaucuc

SEQ ID NO: 1582757 - RNA, 24 nt, Human adenovirus F
uccagcaaaggcgcccuccuuugc

SEQ ID NO: 1582758 - RNA, 17 nt, Human adenovirus F
guucacuuugccagagg

SEQ ID NO: 1582759 - RNA, 17 nt, Human adenovirus F
guccuuugccccccggc

SEQ ID NO: 1582760 - RNA, 15 nt, Human adenovirus F
ugccuccagcacugc

SEQ ID NO: 1582761 - RNA, 14 nt, Human adenovirus F
aguaaaaagccuga

SEQ ID NO: 1582762 - RNA, 17 nt, Human adenovirus F
ugugcagauggaaacug

SEQ ID NO: 1582763 - RNA, 21 nt, Human adenovirus F
cauuguguccugcaacaaaaa

SEQ ID NO: 1582764 - RNA, 22 nt, Human adenovirus F
cugcagcgcacgcuggaggacg

SEQ ID NO: 1582765 - RNA, 17 nt, Human adenovirus F
uauaaguauuacaaaug

SEQ ID NO: 1582766 - RNA, 18 nt, Human adenovirus F
acaugcugguuuucuuua

SEQ ID NO: 1582767 - RNA, 16 nt, Human adenovirus F
cugugagcuggccugg

SEQ ID NO: 1582768 - RNA, 19 nt, Human adenovirus F
ccagccuccgguggcucug

SEQ ID NO: 1582769 - RNA, 16 nt, Human adenovirus F
ccgcacuggaugccac

SEQ ID NO: 1582770 - RNA, 15 nt, Human adenovirus F
ucacauccaagugcc

SEQ ID NO: 1582771 - RNA, 12 nt, Human adenovirus F
cguucuggacuc

SEQ ID NO: 1582772 - RNA, 23 nt, Human adenovirus F
gcaagcccauucugccaguuggg

SEQ ID NO: 1582773 - RNA, 14 nt, Human adenovirus F
ccuaugugcugggg

SEQ ID NO: 1582774 - RNA, 15 nt, Human adenovirus F
cgcgaggagguggcc

SEQ ID NO: 1582775 - RNA, 13 nt, Human adenovirus F
cacaugaacacuu

SEQ ID NO: 1582776 - RNA, 13 nt, Human adenovirus F
uacuuuaaacaag

SEQ ID NO: 1582777 - RNA, 22 nt, Human adenovirus F
uggcgcauucccuuuuccagca

SEQ ID NO: 1582778 - RNA, 18 nt, Human adenovirus F
agguuacucagcaauccg

SEQ ID NO: 1582779 - RNA, 21 nt, Human adenovirus F
gagcaugaaacuggaagaugu

SEQ ID NO: 1582780 - RNA, 13 nt, Human adenovirus F
cccuggccuguuu

SEQ ID NO: 1582781 - RNA, 15 nt, Human adenovirus F
gccuccagcacugcc

SEQ ID NO: 1582782 - RNA, 23 nt, Human adenovirus F
uaugagcggaguaacacaaacau

SEQ ID NO: 1582783 - RNA, 21 nt, Human adenovirus F
agaguaaaaaaaagggaaguu

SEQ ID NO: 1582784 - RNA, 19 nt, Human adenovirus F
acugacuuccugguccuga

SEQ ID NO: 1582785 - RNA, 20 nt, Human adenovirus F
aguucuacgugucuugcaaa

SEQ ID NO: 1582786 - RNA, 20 nt, Human adenovirus F
caguaggacgucagaacggc

SEQ ID NO: 1582787 - RNA, 18 nt, Human adenovirus F
ccuguuacuauuaaugca

SEQ ID NO: 1582788 - RNA, 13 nt, Human adenovirus F
gucugcguacuga

SEQ ID NO: 1582789 - RNA, 16 nt, Human adenovirus F
cugaccgaccuggggc

SEQ ID NO: 1582790 - RNA, 21 nt, Human adenovirus F
gugagucgggcucuuggucag

SEQ ID NO: 1582791 - RNA, 14 nt, Human adenovirus F
aaccaggcagugga

SEQ ID NO: 1582792 - RNA, 19 nt, Human adenovirus F
gccagcgacaaggcaccau

SEQ ID NO: 1582793 - RNA, 12 nt, Human adenovirus F
gccaggcagagg

SEQ ID NO: 1582794 - RNA, 19 nt, Human adenovirus F
aaacgucccaucauuucca

SEQ ID NO: 1582795 - RNA, 22 nt, Human adenovirus F
uggaagagguaguugagcgugg

SEQ ID NO: 1582796 - RNA, 19 nt, Human adenovirus F
agggcgugcaagugggcuc

SEQ ID NO: 1582797 - RNA, 22 nt, Human adenovirus F
cagcagguuaaagccaacucca

SEQ ID NO: 1582798 - RNA, 15 nt, Human adenovirus F
uugcaagauaugucu

SEQ ID NO: 1582799 - RNA, 20 nt, Human adenovirus F
agcagaaacuacaaaagcag

SEQ ID NO: 1582800 - RNA, 15 nt, Human adenovirus F
cagccaagucaaaaa

SEQ ID NO: 1582801 - RNA, 18 nt, Human adenovirus F
cauuguuuugcuaccugg

SEQ ID NO: 1582802 - RNA, 13 nt, Human adenovirus F
gauuaagaaccac

SEQ ID NO: 1582803 - RNA, 14 nt, Human adenovirus F
ggcucagccccgcc

SEQ ID NO: 1582804 - RNA, 13 nt, Human adenovirus F
cccuggccuggaa

SEQ ID NO: 1582805 - RNA, 13 nt, Human adenovirus F
cucuuacaccucc

SEQ ID NO: 1582806 - RNA, 16 nt, Human adenovirus F
cuaaaaacggagcuca

SEQ ID NO: 1582807 - RNA, 23 nt, Human adenovirus F
uuuccagcauaauaacucuggcu

SEQ ID NO: 1582808 - RNA, 19 nt, Human adenovirus F
cagcgcccuggauacauac

SEQ ID NO: 1582809 - RNA, 17 nt, Human adenovirus F
caguaccgcuccaucaa

SEQ ID NO: 1582810 - RNA, 23 nt, Human adenovirus F
gucauauacuuuaaacaagcaaa

SEQ ID NO: 1582811 - RNA, 12 nt, Human adenovirus F
acacgcugccaa

SEQ ID NO: 1582812 - RNA, 21 nt, Human adenovirus F
accauguggcgcauucccuuu

SEQ ID NO: 1582813 - RNA, 23 nt, Human adenovirus F
cugaagcccgcaacggcgcagca

SEQ ID NO: 1582814 - RNA, 15 nt, Human adenovirus F
cugaagaggaacgua

SEQ ID NO: 1582815 - RNA, 15 nt, Human adenovirus F
ucgaaggcugccggc

SEQ ID NO: 1582816 - RNA, 13 nt, Human adenovirus F
gaguuaaccuuga

SEQ ID NO: 1582817 - RNA, 14 nt, Human adenovirus F
cagcgggaagagag

SEQ ID NO: 1582818 - RNA, 15 nt, Human adenovirus F
cuugggaggauuuug

SEQ ID NO: 1582819 - RNA, 20 nt, Human adenovirus F
ucuccuccccuuacaaacag

SEQ ID NO: 1582820 - RNA, 21 nt, Human adenovirus F
cguucccgcccucacagauca

SEQ ID NO: 1582821 - RNA, 20 nt, Human adenovirus F
uccugucgccccugccaacu

SEQ ID NO: 1582822 - RNA, 22 nt, Human adenovirus F
uggaggaaacccuaguugugga

SEQ ID NO: 1582823 - RNA, 16 nt, Human adenovirus F
cacuuuacuuaaaccc

SEQ ID NO: 1582824 - RNA, 20 nt, Human adenovirus F
ucaaaaagguuuccaaauca

SEQ ID NO: 1582825 - RNA, 13 nt, Human adenovirus F
gggccuggugcag

SEQ ID NO: 1582826 - RNA, 19 nt, Human adenovirus F
acgaacacgcugccaacaa

SEQ ID NO: 1582827 - RNA, 18 nt, Human adenovirus F
cuucgaagugaugcaccu

SEQ ID NO: 1582828 - RNA, 19 nt, Human adenovirus F
gagcuauuuaaagugguga

SEQ ID NO: 1582829 - RNA, 17 nt, Human adenovirus F
ugugagcgccagccgcc

SEQ ID NO: 1582830 - RNA, 19 nt, Human adenovirus F
uuggggaauuugucaugca

SEQ ID NO: 1582831 - RNA, 21 nt, Human adenovirus F
gcggggcaccuucagcuugag

SEQ ID NO: 1582832 - RNA, 18 nt, Human adenovirus F
ccggacgggcagccgguc

SEQ ID NO: 1582833 - RNA, 22 nt, Human adenovirus F
uucccacuguuucuccuccccu

SEQ ID NO: 1582834 - RNA, 20 nt, Human adenovirus F
ccaucugcagcauugccacu

SEQ ID NO: 1582835 - RNA, 17 nt, Human adenovirus F
aguuggagcagccugug

SEQ ID NO: 1582836 - RNA, 18 nt, Human adenovirus F
guacgagaaaucggagag

SEQ ID NO: 1582837 - RNA, 20 nt, Human adenovirus F
gccauggugguagaagguca

SEQ ID NO: 1582838 - RNA, 22 nt, Human adenovirus F
acucauuuuuucaagaaauugu

SEQ ID NO: 1582839 - RNA, 17 nt, Human adenovirus F
gucguuaguggaggcag

SEQ ID NO: 1582840 - RNA, 18 nt, Human adenovirus F
ccagcagcaccaccugcc

SEQ ID NO: 1582841 - RNA, 23 nt, Human adenovirus F
auguaacgccccccgaggacggc

SEQ ID NO: 1582842 - RNA, 15 nt, Human adenovirus F
ccacuccugcaauac

SEQ ID NO: 1582843 - RNA, 16 nt, Human adenovirus F
cuagccaacacccugu

SEQ ID NO: 1582844 - RNA, 12 nt, Human adenovirus F
ggcauggcagca

SEQ ID NO: 1582845 - RNA, 16 nt, Human adenovirus F
cgcuccagguggggcg

SEQ ID NO: 1582846 - RNA, 16 nt, Human adenovirus F
cguaccaagccugacu

SEQ ID NO: 1582847 - RNA, 16 nt, Human adenovirus F
agguuacucagcaauc

SEQ ID NO: 1582848 - RNA, 21 nt, Human adenovirus F
agcauaauaacucuggcuuug

SEQ ID NO: 1582849 - RNA, 13 nt, Human adenovirus F
caaaguaaaaaac

SEQ ID NO: 1582850 - RNA, 20 nt, Human adenovirus F
cguggaaaaacuuggaaacc

SEQ ID NO: 1582851 - RNA, 18 nt, Human adenovirus F
aaucuaccacagaaaugu

SEQ ID NO: 1582852 - RNA, 14 nt, Human adenovirus F
aacuuuacaaaaug

SEQ ID NO: 1582853 - RNA, 18 nt, Human adenovirus F
gacgcuugcuggaguugg

SEQ ID NO: 1582854 - RNA, 13 nt, Human adenovirus F
guguccgaaagca

SEQ ID NO: 1582855 - RNA, 17 nt, Human adenovirus F
guugauguuaugcccca

SEQ ID NO: 1582856 - RNA, 22 nt, Human adenovirus F
gcugccagaggccguagcccgu

SEQ ID NO: 1582857 - RNA, 21 nt, Human adenovirus F
auggcagcccagcgcccgggc

SEQ ID NO: 1582858 - RNA, 12 nt, Human adenovirus F
ccugaaaaccau

SEQ ID NO: 1582859 - RNA, 18 nt, Human adenovirus F
aucacccaaagccaaauu

SEQ ID NO: 1582860 - RNA, 22 nt, Human adenovirus F
cccaccggcuccugugcagcgc

SEQ ID NO: 1582861 - RNA, 18 nt, Human adenovirus F
ccuggccaacugccaccu

SEQ ID NO: 1582862 - RNA, 22 nt, Human adenovirus F
uucuggacucgucuccugcaag

SEQ ID NO: 1582863 - RNA, 13 nt, Human adenovirus F
cuacgccuccacc

SEQ ID NO: 1582864 - RNA, 20 nt, Human adenovirus F
aacuccucuuccuccacagc

SEQ ID NO: 1582865 - RNA, 15 nt, Human adenovirus F
cauugggcugaugca

SEQ ID NO: 1582866 - RNA, 21 nt, Human adenovirus F
accuucaagcccuacaccaau

SEQ ID NO: 1582867 - RNA, 15 nt, Human adenovirus F
gcucuguccgccgcc

SEQ ID NO: 1582868 - RNA, 22 nt, Human adenovirus F
agcaagccgcugacggcgcagc

SEQ ID NO: 1582869 - RNA, 21 nt, Human adenovirus F
auucugauggaguuguggagu

SEQ ID NO: 1582870 - RNA, 12 nt, Human adenovirus F
aggcagcagggu

SEQ ID NO: 1582871 - RNA, 18 nt, Human adenovirus F
gucaggccgcccgucagg

SEQ ID NO: 1582872 - RNA, 15 nt, Human adenovirus F
cagccuagacgagga

SEQ ID NO: 1582873 - RNA, 15 nt, Human adenovirus F
augugcuggggaaug

SEQ ID NO: 1582874 - RNA, 12 nt, Human adenovirus F
ccuggaagaggg

SEQ ID NO: 1582875 - RNA, 21 nt, Human adenovirus F
uccuuaacaagggcuuccucc

SEQ ID NO: 1582876 - RNA, 15 nt, Human adenovirus F
cagauggaaacuguc

SEQ ID NO: 1582877 - RNA, 16 nt, Human adenovirus F
augccuccagcacugc

SEQ ID NO: 1582878 - RNA, 14 nt, Human adenovirus F
accgcugcagcugc

SEQ ID NO: 1582879 - RNA, 15 nt, Human adenovirus F
ugggauggguaagug

SEQ ID NO: 1582880 - RNA, 22 nt, Human adenovirus F
caggguuuuugagcaugaaacu

SEQ ID NO: 1582881 - RNA, 20 nt, Human adenovirus F
augcacagccugcgucgggc

SEQ ID NO: 1582882 - RNA, 13 nt, Human adenovirus F
ucguuggcgccgg

SEQ ID NO: 1582883 - RNA, 19 nt, Human adenovirus F
gccaucgcugaccagcagc

SEQ ID NO: 1582884 - RNA, 17 nt, Human adenovirus F
cccccacuagcgccccu

SEQ ID NO: 1582885 - RNA, 11 nt, Human adenovirus F
ugcuaccuggu

SEQ ID NO: 1582886 - RNA, 24 nt, Human adenovirus F
cuucccuuugacaaucagggaaau

SEQ ID NO: 1582887 - RNA, 12 nt, Human adenovirus F
gggccggccugg

SEQ ID NO: 1582888 - RNA, 21 nt, Human adenovirus F
gcgucucgguuaagagaagaa

SEQ ID NO: 1582889 - RNA, 18 nt, Human adenovirus F
acagccuagacgaggagg

SEQ ID NO: 1582890 - RNA, 23 nt, Human adenovirus F
ccgcgaacuaaugcacagccugc

SEQ ID NO: 1582891 - RNA, 13 nt, Human adenovirus F
ggaggcagcagag

SEQ ID NO: 1582892 - RNA, 22 nt, Human adenovirus F
guacggaccaccagaugauguc

SEQ ID NO: 1582893 - RNA, 18 nt, Human adenovirus F
cgucggcucuggacauga

SEQ ID NO: 1582894 - RNA, 14 nt, Human adenovirus F
gucguugccagccg

SEQ ID NO: 1582895 - RNA, 16 nt, Human adenovirus F
ugccuaccucugacaa

SEQ ID NO: 1582896 - RNA, 19 nt, Human adenovirus F
ugccgguuucgcauucccg

SEQ ID NO: 1582897 - RNA, 17 nt, Human adenovirus F
ugcacacaugcuuuucc

SEQ ID NO: 1582898 - RNA, 20 nt, Human adenovirus F
uaaaaacaaccaacuucaac

SEQ ID NO: 1582899 - RNA, 18 nt, Human adenovirus F
guaaugucuuuccagggu

SEQ ID NO: 1582900 - RNA, 16 nt, Human adenovirus F
ccuugcaaaaccaaau

SEQ ID NO: 1582901 - RNA, 15 nt, Human adenovirus F
ugcuccugcccgggu

SEQ ID NO: 1582902 - RNA, 20 nt, Human adenovirus F
cggcggaugguggcaaggag

SEQ ID NO: 1582903 - RNA, 14 nt, Human adenovirus F
uaaaaaugccaggc

SEQ ID NO: 1582904 - RNA, 13 nt, Human adenovirus F
gcgcggcggccau

SEQ ID NO: 1582905 - RNA, 19 nt, Human adenovirus F
agaggaacguauuuugcgc

SEQ ID NO: 1582906 - RNA, 20 nt, Human adenovirus F
gaggguacuagcagugggca

SEQ ID NO: 1582907 - RNA, 14 nt, Human adenovirus F
agccgccagccucc

SEQ ID NO: 1582908 - RNA, 18 nt, Human adenovirus F
ggccuugggaugcagccu

SEQ ID NO: 1582909 - RNA, 21 nt, Human adenovirus F
cagcgugagucgggcucuugg

SEQ ID NO: 1582910 - RNA, 19 nt, Human adenovirus F
agugcggauuugggaacug

SEQ ID NO: 1582911 - RNA, 13 nt, Human adenovirus F
ugcuaaagggaac

SEQ ID NO: 1582912 - RNA, 20 nt, Human adenovirus F
ccucugugagcuggccuggu

SEQ ID NO: 1582913 - RNA, 18 nt, Human adenovirus F
gcauacuguuucacauau

SEQ ID NO: 1582914 - RNA, 14 nt, Human adenovirus F
caucucuacagccc

SEQ ID NO: 1582915 - RNA, 15 nt, Human adenovirus F
uuauauuuuaauuuu

SEQ ID NO: 1582916 - RNA, 17 nt, Human adenovirus F
gcgcuucgccuccuggu

SEQ ID NO: 1582917 - RNA, 12 nt, Human adenovirus F
aaaccgccacau

SEQ ID NO: 1582918 - RNA, 16 nt, Human adenovirus F
aggaggaccuagagga

SEQ ID NO: 1582919 - RNA, 21 nt, Human adenovirus F
ccgaucacuccguucgcucac

SEQ ID NO: 1582920 - RNA, 14 nt, Human adenovirus F
acaaaugccucccu

SEQ ID NO: 1582921 - RNA, 17 nt, Human adenovirus F
cuuaaguuauacaguga

SEQ ID NO: 1582922 - RNA, 15 nt, Human adenovirus F
ggcgcagcgggaacg

SEQ ID NO: 1582923 - RNA, 14 nt, Human adenovirus F
ucauacaaaugcuc

SEQ ID NO: 1582924 - RNA, 16 nt, Human adenovirus F
aauucguggccccuac

SEQ ID NO: 1582925 - RNA, 19 nt, Human adenovirus F
ucaagaaacacaaacauag

SEQ ID NO: 1582926 - RNA, 14 nt, Human adenovirus F
ugcgccccauuaaa

SEQ ID NO: 1582927 - RNA, 18 nt, Human adenovirus F
gcaugccacaauuuacaa

SEQ ID NO: 1582928 - RNA, 19 nt, Human adenovirus F
aacgauucuucugugacaa

SEQ ID NO: 1582929 - RNA, 16 nt, Human adenovirus F
cgguggcucugcagca

SEQ ID NO: 1582930 - RNA, 16 nt, Human adenovirus F
gcuuucaguuggagca

SEQ ID NO: 1582931 - RNA, 20 nt, Human adenovirus F
cgcagcaguaucaguggagu

SEQ ID NO: 1582932 - RNA, 11 nt, Human adenovirus F
uauggaggagg

SEQ ID NO: 1582933 - RNA, 17 nt, Human adenovirus F
ggugacgguaaaggggc

SEQ ID NO: 1582934 - RNA, 16 nt, Human adenovirus F
acaugcuuuucccauu

SEQ ID NO: 1582935 - RNA, 15 nt, Human adenovirus F
ugauaugaugaaagu

SEQ ID NO: 1582936 - RNA, 19 nt, Human adenovirus F
aaaguccuggccaacugcc

SEQ ID NO: 1582937 - RNA, 15 nt, Human adenovirus F
aaagaagcacaggag

SEQ ID NO: 1582938 - RNA, 18 nt, Human adenovirus F
ugggcucagacuccaaca

SEQ ID NO: 1582939 - RNA, 20 nt, Human adenovirus F
cagccguccacgcucccgga

SEQ ID NO: 1582940 - RNA, 15 nt, Human adenovirus F
ccgucccugggaugc

SEQ ID NO: 1582941 - RNA, 16 nt, Human adenovirus F
cgcuggcuccgcggca

SEQ ID NO: 1582942 - RNA, 22 nt, Human adenovirus F
aguucuugcugacggccggcca

SEQ ID NO: 1582943 - RNA, 17 nt, Human adenovirus F
gucacagccuguuacua

SEQ ID NO: 1582944 - RNA, 16 nt, Human adenovirus F
cauguauuuuuacagc

SEQ ID NO: 1582945 - RNA, 15 nt, Human adenovirus F
guggcaaggagagug

SEQ ID NO: 1582946 - RNA, 18 nt, Human adenovirus F
cgccgcaccgcgcccguc

SEQ ID NO: 1582947 - RNA, 23 nt, Human adenovirus F
uaccaggaggcuauuggccagac

SEQ ID NO: 1582948 - RNA, 14 nt, Human adenovirus F
cagaacaaaacaca

SEQ ID NO: 1582949 - RNA, 22 nt, Human adenovirus F
uggaggagauggugggccgcug

SEQ ID NO: 1582950 - RNA, 20 nt, Human adenovirus F
gaccugcaauggcagcccag

SEQ ID NO: 1582951 - RNA, 12 nt, Human adenovirus F
aauaagcugggu

SEQ ID NO: 1582952 - RNA, 18 nt, Human adenovirus F
agcagcuuauccuugcuc

SEQ ID NO: 1582953 - RNA, 17 nt, Human adenovirus F
caaggaaugcacacaga

SEQ ID NO: 1582954 - RNA, 21 nt, Human adenovirus F
ccaagccucauugagcgaguc

SEQ ID NO: 1582955 - RNA, 22 nt, Human adenovirus F
ucagucuuucaacgacuaccuc

SEQ ID NO: 1582956 - RNA, 13 nt, Human adenovirus F
gcgaacagagugg

SEQ ID NO: 1582957 - RNA, 12 nt, Human adenovirus F
uuacaaaaagag

SEQ ID NO: 1582958 - RNA, 11 nt, Human adenovirus F
gguuaaacaag

SEQ ID NO: 1582959 - RNA, 15 nt, Human adenovirus F
cgaccugaaaaccau

SEQ ID NO: 1582960 - RNA, 18 nt, Human adenovirus F
acugauguaacagcuuug

SEQ ID NO: 1582961 - RNA, 18 nt, Human adenovirus F
gccaacagccccagcugg

SEQ ID NO: 1582962 - RNA, 22 nt, Human adenovirus F
ucugccaauuaucuacgccucc

SEQ ID NO: 1582963 - RNA, 19 nt, Human adenovirus F
cauugggcugaugcauuug

SEQ ID NO: 1582964 - RNA, 18 nt, Human adenovirus F
auccagugcaggaagagg

SEQ ID NO: 1582965 - RNA, 13 nt, Human adenovirus F
gccucccuuugcc

SEQ ID NO: 1582966 - RNA, 17 nt, Human adenovirus F
ggccguuuaugggcacc

SEQ ID NO: 1582967 - RNA, 23 nt, Human adenovirus F
agaccacgucgccaacaguguuu

SEQ ID NO: 1582968 - RNA, 17 nt, Human adenovirus F
ugacggagucuuucagc

SEQ ID NO: 1582969 - RNA, 15 nt, Human adenovirus F
guagaguuugggagc

SEQ ID NO: 1582970 - RNA, 20 nt, Human adenovirus F
aguucacuuugccagagggc

SEQ ID NO: 1582971 - RNA, 13 nt, Human adenovirus F
cguaggugacaaa

SEQ ID NO: 1582972 - RNA, 16 nt, Human adenovirus F
ucuaaugccuuaacau

SEQ ID NO: 1582973 - RNA, 15 nt, Human adenovirus F
uggcgggcaguggcc

SEQ ID NO: 1582974 - RNA, 13 nt, Human adenovirus F
ccucuuacaauuu

SEQ ID NO: 1582975 - RNA, 16 nt, Human adenovirus F
cccguagucucagacg

SEQ ID NO: 1582976 - RNA, 15 nt, Human adenovirus F
agccaacuauuuggc

SEQ ID NO: 1582977 - RNA, 19 nt, Human adenovirus F
caaugguaccacgcaggcg

SEQ ID NO: 1582978 - RNA, 13 nt, Human adenovirus F
aacugcuccaucu

SEQ ID NO: 1582979 - RNA, 23 nt, Human adenovirus F
gccgccaugacugccgcucgggc

SEQ ID NO: 1582980 - RNA, 15 nt, Human adenovirus F
gucaccgccaagagc

SEQ ID NO: 1582981 - RNA, 15 nt, Human adenovirus F
ugcuccugaagcaca

SEQ ID NO: 1582982 - RNA, 20 nt, Human adenovirus F
uaaagguguuaacgcugagu

SEQ ID NO: 1582983 - RNA, 19 nt, Human adenovirus F
guaugguaacuccucuucu

SEQ ID NO: 1582984 - RNA, 15 nt, Human adenovirus F
gacagucugccaaca

SEQ ID NO: 1582985 - RNA, 16 nt, Human adenovirus F
cuccgucuagccaacu

SEQ ID NO: 1582986 - RNA, 22 nt, Human adenovirus F
aagaaguuacaaucuccuagag

SEQ ID NO: 1582987 - RNA, 16 nt, Human adenovirus F
ccaggcgagcucaggg

SEQ ID NO: 1582988 - RNA, 14 nt, Human adenovirus F
uuccagcauaauaa

SEQ ID NO: 1582989 - RNA, 15 nt, Human adenovirus F
gcagcgcccgccucc

SEQ ID NO: 1582990 - RNA, 14 nt, Human adenovirus F
ucucaucuucaccu

SEQ ID NO: 1582991 - RNA, 18 nt, Human adenovirus F
aggaguuuguacccuccg

SEQ ID NO: 1582992 - RNA, 16 nt, Human adenovirus F
ccuacaccaaugcaaa

SEQ ID NO: 1582993 - RNA, 22 nt, Human adenovirus F
cgcagguuuuacgcggggcagg

SEQ ID NO: 1582994 - RNA, 19 nt, Human adenovirus F
cggcaaaugcucugcaaaa

SEQ ID NO: 1582995 - RNA, 17 nt, Human adenovirus F
ggcuacccccgcccgcc

SEQ ID NO: 1582996 - RNA, 20 nt, Human adenovirus F
ugcagcauugccacuuuuuu

SEQ ID NO: 1582997 - RNA, 20 nt, Human adenovirus F
cucuuacauuggccaccgcc

SEQ ID NO: 1582998 - RNA, 19 nt, Human adenovirus F
ccgccgcucaaggcgcacg

SEQ ID NO: 1582999 - RNA, 17 nt, Human adenovirus F
caaaaaaagaauuacuu

SEQ ID NO: 1583000 - RNA, 15 nt, Human adenovirus F
ccuacggaagggcgg

SEQ ID NO: 1583001 - RNA, 21 nt, Human adenovirus F
guugcguagacgcuggaagag

SEQ ID NO: 1583002 - RNA, 14 nt, Human adenovirus F
agggugucugccag

SEQ ID NO: 1583003 - RNA, 13 nt, Human adenovirus F
gguggcaaggaga

SEQ ID NO: 1583004 - RNA, 13 nt, Human adenovirus F
caugccuccagca

SEQ ID NO: 1583005 - RNA, 13 nt, Human adenovirus F
guugggagggaug

SEQ ID NO: 1583006 - RNA, 23 nt, Human adenovirus F
cuuccaagcgguccauugccucg

SEQ ID NO: 1583007 - RNA, 20 nt, Human adenovirus F
ccuuagaacuaccuccaccc

SEQ ID NO: 1583008 - RNA, 23 nt, Human adenovirus F
cugguuaaacaagcugaacuuug

SEQ ID NO: 1583009 - RNA, 13 nt, Human adenovirus F
acaugauucucca

SEQ ID NO: 1583010 - RNA, 14 nt, Human adenovirus F
cacuuacaaccaaa

SEQ ID NO: 1583011 - RNA, 17 nt, Human adenovirus F
cugaacaauaaaaucau

SEQ ID NO: 1583012 - RNA, 20 nt, Human adenovirus F
agaaccguaccugcuaccuc

SEQ ID NO: 1583013 - RNA, 16 nt, Human adenovirus F
cucuccccaccgcugc

SEQ ID NO: 1583014 - RNA, 17 nt, Human adenovirus F
gcaccaauaugcccaac

SEQ ID NO: 1583015 - RNA, 17 nt, Human adenovirus F
caaguuuuuccagcagc

SEQ ID NO: 1583016 - RNA, 19 nt, Human adenovirus F
accacucaauuaaccuugc

SEQ ID NO: 1583017 - RNA, 19 nt, Human adenovirus F
uuuaauggaaacugaugcu

SEQ ID NO: 1583018 - RNA, 20 nt, Human adenovirus F
gcucauccaaguuuuuacaa

SEQ ID NO: 1583019 - RNA, 20 nt, Human adenovirus F
cagugaaaacguucccgccc

SEQ ID NO: 1583020 - RNA, 23 nt, Human adenovirus F
ggcggaggagcagauggagagcu

SEQ ID NO: 1583021 - RNA, 18 nt, Human adenovirus F
aggaucccucagagcugc

SEQ ID NO: 1583022 - RNA, 19 nt, Human adenovirus F
gcauacguuacucggagcu

SEQ ID NO: 1583023 - RNA, 23 nt, Human adenovirus F
caagaucuccaacguagagcuca

SEQ ID NO: 1583024 - RNA, 16 nt, Human adenovirus F
uuaccgcgacaaagca

SEQ ID NO: 1583025 - RNA, 15 nt, Human adenovirus F
agaucacaccucucc

SEQ ID NO: 1583026 - RNA, 14 nt, Human adenovirus F
uaacccgccuuuuc

SEQ ID NO: 1583027 - RNA, 18 nt, Human adenovirus F
gauacugcuccuggcgag

SEQ ID NO: 1583028 - RNA, 14 nt, Human adenovirus F
gcgcgaacugggcu

SEQ ID NO: 1583029 - RNA, 21 nt, Human adenovirus F
caccaacgugcaggccaaccu

SEQ ID NO: 1583030 - RNA, 19 nt, Human adenovirus F
cagacggccguaccaagcc

SEQ ID NO: 1583031 - RNA, 16 nt, Human adenovirus F
uaggcuuuaacaacac

SEQ ID NO: 1583032 - RNA, 15 nt, Human adenovirus F
cagugggacgaggag

SEQ ID NO: 1583033 - RNA, 13 nt, Human adenovirus F
ggggaccagcugu

SEQ ID NO: 1583034 - RNA, 17 nt, Human adenovirus F
cugccaaaauggcucug

SEQ ID NO: 1583035 - RNA, 13 nt, Human adenovirus F
cagcuggcaaacc

SEQ ID NO: 1583036 - RNA, 14 nt, Human adenovirus F
cauuauugcacuuu

SEQ ID NO: 1583037 - RNA, 21 nt, Human adenovirus F
guuacaguggaauuggaaugc

SEQ ID NO: 1583038 - RNA, 14 nt, Human adenovirus F
gugcagacggugga

SEQ ID NO: 1583039 - RNA, 18 nt, Human adenovirus F
accccuaugacaccuccu

SEQ ID NO: 1583040 - RNA, 13 nt, Human adenovirus F
caacaaccuaccc

SEQ ID NO: 1583041 - RNA, 13 nt, Human adenovirus F
acugguaaaccag

SEQ ID NO: 1583042 - RNA, 21 nt, Human adenovirus F
ggcgggcguccggaggcagug

SEQ ID NO: 1583043 - RNA, 14 nt, Human adenovirus F
ucuccuaacgccac

SEQ ID NO: 1583044 - RNA, 13 nt, Human adenovirus F
acauccauuucca

SEQ ID NO: 1583045 - RNA, 16 nt, Human adenovirus F
cugacaguaagcaaca

SEQ ID NO: 1583046 - RNA, 19 nt, Human adenovirus F
uaaaaaggauuuugccggc

SEQ ID NO: 1583047 - RNA, 20 nt, Human adenovirus F
gaacauuggggcgcgguggu

SEQ ID NO: 1583048 - RNA, 15 nt, Human adenovirus F
caaagacaaaaucac

SEQ ID NO: 1583049 - RNA, 13 nt, Human adenovirus F
gaaacgcugugag

SEQ ID NO: 1583050 - RNA, 14 nt, Human adenovirus F
accaagggcucugc

SEQ ID NO: 1583051 - RNA, 14 nt, Human adenovirus F
uugcaaaaccaaau

SEQ ID NO: 1583052 - RNA, 16 nt, Human adenovirus F
cuggcagcuggagcuu

SEQ ID NO: 1583053 - RNA, 21 nt, Human adenovirus F
aggagcugucucagcaguugc

SEQ ID NO: 1583054 - RNA, 17 nt, Human adenovirus F
gaggguacuagcagugg

SEQ ID NO: 1583055 - RNA, 21 nt, Human adenovirus F
uggagggcggcaacauuccug

SEQ ID NO: 1583056 - RNA, 14 nt, Human adenovirus F
uaauuucugagggg

SEQ ID NO: 1583057 - RNA, 23 nt, Human adenovirus F
uuugcaucucaaagcuggagcuc

SEQ ID NO: 1583058 - RNA, 14 nt, Human adenovirus F
gacgugugugugag

SEQ ID NO: 1583059 - RNA, 24 nt, Human adenovirus F
gaaccacuucgggagacggaggca

SEQ ID NO: 1583060 - RNA, 15 nt, Human adenovirus F
agauggaaacuguca

SEQ ID NO: 1583061 - RNA, 15 nt, Human adenovirus F
cuuaauaaagacaca

SEQ ID NO: 1583062 - RNA, 22 nt, Human adenovirus F
ggccguuuaugggcaccuggaa

SEQ ID NO: 1583063 - RNA, 14 nt, Human adenovirus F
aacuaacaaugccg

SEQ ID NO: 1583064 - RNA, 16 nt, Human adenovirus F
gcugcagccagacucc

SEQ ID NO: 1583065 - RNA, 21 nt, Human adenovirus F
gcagagcuugggcccugggcu

SEQ ID NO: 1583066 - RNA, 16 nt, Human adenovirus F
ugugcagcaaaaacuc

SEQ ID NO: 1583067 - RNA, 15 nt, Human adenovirus F
caauauaaaaacaac

SEQ ID NO: 1583068 - RNA, 15 nt, Human adenovirus F
aagugggcucagacu

SEQ ID NO: 1583069 - RNA, 19 nt, Human adenovirus F
cgaagcuagcauaaaagaa

SEQ ID NO: 1583070 - RNA, 21 nt, Human adenovirus F
aaacuaucccguguuugacaa

SEQ ID NO: 1583071 - RNA, 19 nt, Human adenovirus F
ccaguagcuuggaagccac

SEQ ID NO: 1583072 - RNA, 20 nt, Human adenovirus F
accuacuaccacuaccccua

SEQ ID NO: 1583073 - RNA, 16 nt, Human adenovirus F
aguucuugcugacggc

SEQ ID NO: 1583074 - RNA, 19 nt, Human adenovirus F
aaucaaccaacuaacacug

SEQ ID NO: 1583075 - RNA, 22 nt, Human adenovirus F
acaaaggaggcgauuugggagg

SEQ ID NO: 1583076 - RNA, 21 nt, Human adenovirus F
ggaggagauggugggccgcug

SEQ ID NO: 1583077 - RNA, 22 nt, Human adenovirus F
guggcaacccugaggaggaggc

SEQ ID NO: 1583078 - RNA, 16 nt, Human adenovirus F
aaaaguccacaaaaac

SEQ ID NO: 1583079 - RNA, 19 nt, Human adenovirus F
gcacuucaagaaacacaaa

SEQ ID NO: 1583080 - RNA, 21 nt, Human adenovirus F
cgacaaagcacacagaacaaa

SEQ ID NO: 1583081 - RNA, 22 nt, Human adenovirus F
uauucggcuugcauaaaagcuu

SEQ ID NO: 1583082 - RNA, 21 nt, Human adenovirus F
gguggggccccugaggcagcg

SEQ ID NO: 1583083 - RNA, 20 nt, Human adenovirus F
cugucguuaguggaggcagc

SEQ ID NO: 1583084 - RNA, 19 nt, Human adenovirus F
cucaucuucaccucuguuu

SEQ ID NO: 1583085 - RNA, 14 nt, Human adenovirus F
gcuguacugugcau

SEQ ID NO: 1583086 - RNA, 15 nt, Human adenovirus F
cucuucguccuggag

SEQ ID NO: 1583087 - RNA, 15 nt, Human adenovirus F
gcaagcgcggccgcu

SEQ ID NO: 1583088 - RNA, 13 nt, Human adenovirus F
cgagaaaaacaga

SEQ ID NO: 1583089 - RNA, 23 nt, Human adenovirus F
uggcaacccugaggaggaggcca

SEQ ID NO: 1583090 - RNA, 23 nt, Human adenovirus F
ggagagcgguccgucacgcgggc

SEQ ID NO: 1583091 - RNA, 12 nt, Human adenovirus F
agucugccaacg

SEQ ID NO: 1583092 - RNA, 18 nt, Human adenovirus F
uggagaucuuucuucaga

SEQ ID NO: 1583093 - RNA, 21 nt, Human adenovirus F
cauauuucaccuacucuggcu

SEQ ID NO: 1583094 - RNA, 16 nt, Human adenovirus F
accuuguauuuguaua

SEQ ID NO: 1583095 - RNA, 19 nt, Human adenovirus F
ucgcaagguaagcuaagga

SEQ ID NO: 1583096 - RNA, 20 nt, Human adenovirus F
ugucuuaccaguuaaugcuu

SEQ ID NO: 1583097 - RNA, 22 nt, Human adenovirus F
agggucgauggagccagcguca

SEQ ID NO: 1583098 - RNA, 22 nt, Human adenovirus F
gagguguaccaguccgggccag

SEQ ID NO: 1583099 - RNA, 15 nt, Human adenovirus F
cccgcacuggaugcc

SEQ ID NO: 1583100 - RNA, 12 nt, Human adenovirus F
gaccaucacuga

SEQ ID NO: 1583101 - RNA, 20 nt, Human adenovirus F
cuccauguggaaccaggcag

SEQ ID NO: 1583102 - RNA, 18 nt, Human adenovirus F
gcaacugccaucuucccg

SEQ ID NO: 1583103 - RNA, 22 nt, Human adenovirus F
cccaauccucaagacuuggaaa

SEQ ID NO: 1583104 - RNA, 14 nt, Human adenovirus F
gcauggcucagccc

SEQ ID NO: 1583105 - RNA, 19 nt, Human adenovirus F
cucaucugucgcaggguua

SEQ ID NO: 1583106 - RNA, 20 nt, Human adenovirus F
uacgccgaggguccuccucc

SEQ ID NO: 1583107 - RNA, 17 nt, Human adenovirus F
ccaguggccgcacucag

SEQ ID NO: 1583108 - RNA, 12 nt, Human adenovirus F
gccaaagugcaa

SEQ ID NO: 1583109 - RNA, 22 nt, Human adenovirus F
ugcaaaucuauuucuuugucua

SEQ ID NO: 1583110 - RNA, 18 nt, Human adenovirus F
acgucccaucauuuccac

SEQ ID NO: 1583111 - RNA, 23 nt, Human adenovirus F
caccucuuguucgaaggcugccg

SEQ ID NO: 1583112 - RNA, 20 nt, Human adenovirus F
uaguuuaaggagaugcaacu

SEQ ID NO: 1583113 - RNA, 14 nt, Human adenovirus F
cuaauuuuucacca

SEQ ID NO: 1583114 - RNA, 16 nt, Human adenovirus F
uuuggacccccaaacc

SEQ ID NO: 1583115 - RNA, 12 nt, Human adenovirus F
guucggagccaa

SEQ ID NO: 1583116 - RNA, 14 nt, Human adenovirus F
gccugagggcgacg

SEQ ID NO: 1583117 - RNA, 14 nt, Human adenovirus F
accacgcaggcgag

SEQ ID NO: 1583118 - RNA, 19 nt, Human adenovirus F
cagccgccgucgcgagcuu

SEQ ID NO: 1583119 - RNA, 16 nt, Human adenovirus F
gcaacucgcaggccag

SEQ ID NO: 1583120 - RNA, 23 nt, Human adenovirus F
gagcagcgggaagagaggcagcc

SEQ ID NO: 1583121 - RNA, 16 nt, Human adenovirus F
acauaucgucacuucc

SEQ ID NO: 1583122 - RNA, 20 nt, Human adenovirus F
acaucaggggcucaggaacc

SEQ ID NO: 1583123 - RNA, 16 nt, Human adenovirus F
gacgacugggcggcgg

SEQ ID NO: 1583124 - RNA, 21 nt, Human adenovirus F
ccaacugcagcgcacgcugga

SEQ ID NO: 1583125 - RNA, 16 nt, Human adenovirus F
accccgucuaccccua

SEQ ID NO: 1583126 - RNA, 21 nt, Human adenovirus F
ccuaggaucccaaguggcccu

SEQ ID NO: 1583127 - RNA, 14 nt, Human adenovirus F
agcuuggaagccac

SEQ ID NO: 1583128 - RNA, 21 nt, Human adenovirus F
ggaagaauacuaaaacaaacc

SEQ ID NO: 1583129 - RNA, 21 nt, Human adenovirus F
aaacugucaggcucugagagu

SEQ ID NO: 1583130 - RNA, 13 nt, Human adenovirus F
ccaacgcuacuag

SEQ ID NO: 1583131 - RNA, 17 nt, Human adenovirus F
agaacaaaacacacucc

SEQ ID NO: 1583132 - RNA, 18 nt, Human adenovirus F
agcggcuuaugcaaacau

SEQ ID NO: 1583133 - RNA, 19 nt, Human adenovirus F
gcauaaaagaagcacagga

SEQ ID NO: 1583134 - RNA, 22 nt, Human adenovirus F
uaugugcuggggaauggagcug

SEQ ID NO: 1583135 - RNA, 12 nt, Human adenovirus F
ggagucacugcu

SEQ ID NO: 1583136 - RNA, 18 nt, Human adenovirus F
aggaggcuauuggccaga

SEQ ID NO: 1583137 - RNA, 10 nt, Human adenovirus F
cgccuggaga

SEQ ID NO: 1583138 - RNA, 19 nt, Human adenovirus F
acgucauccgccuccaccc

SEQ ID NO: 1583139 - RNA, 20 nt, Human adenovirus F
acgagcaggcuuugaaagag

SEQ ID NO: 1583140 - RNA, 15 nt, Human adenovirus F
cagcagcagcagcgg

SEQ ID NO: 1583141 - RNA, 17 nt, Human adenovirus F
gccugagcugccagagg

SEQ ID NO: 1583142 - RNA, 13 nt, Human adenovirus F
cugggcuugcuuu

SEQ ID NO: 1583143 - RNA, 13 nt, Human adenovirus F
gacaaagaggcgu

SEQ ID NO: 1583144 - RNA, 18 nt, Human adenovirus F
aauugccucggcuacagu

SEQ ID NO: 1583145 - RNA, 20 nt, Human adenovirus F
gcgggaagagaggcagcccc

SEQ ID NO: 1583146 - RNA, 21 nt, Human adenovirus F
caagaaggugcuuccagccuc

SEQ ID NO: 1583147 - RNA, 14 nt, Human adenovirus F
ggacauggccagca

SEQ ID NO: 1583148 - RNA, 9 nt, Human adenovirus F
agccgccgc

SEQ ID NO: 1583149 - RNA, 13 nt, Human adenovirus F
ugccggcccccac

SEQ ID NO: 1583150 - RNA, 13 nt, Human adenovirus F
gccagaaaaaacc

SEQ ID NO: 1583151 - RNA, 16 nt, Human adenovirus F
acgcuucagagcucuu

SEQ ID NO: 1583152 - RNA, 20 nt, Human adenovirus F
ccauauuauuuaaauaaaac

SEQ ID NO: 1583153 - RNA, 16 nt, Human adenovirus F
gcccauaucugacaac

SEQ ID NO: 1583154 - RNA, 20 nt, Human adenovirus F
cuccucaacucccagcauuc

SEQ ID NO: 1583155 - RNA, 16 nt, Human adenovirus F
acugacuuccuggucc

SEQ ID NO: 1583156 - RNA, 16 nt, Human adenovirus F
agccugaagcccgcaa

SEQ ID NO: 1583157 - RNA, 14 nt, Human adenovirus F
cgcgcaaccagugg

SEQ ID NO: 1583158 - RNA, 17 nt, Human adenovirus F
gagacugccaagccuca

SEQ ID NO: 1583159 - RNA, 23 nt, Human adenovirus F
gauauagccaaccaggccuugca

SEQ ID NO: 1583160 - RNA, 14 nt, Human adenovirus F
uaauccaaugcaaa

SEQ ID NO: 1583161 - RNA, 18 nt, Human adenovirus F
cucagggucgauggagcc

SEQ ID NO: 1583162 - RNA, 22 nt, Human adenovirus F
acacuccgcagacgaacacaau

SEQ ID NO: 1583163 - RNA, 23 nt, Human adenovirus F
gcccuuucaaaaagguuuccaaa

SEQ ID NO: 1583164 - RNA, 15 nt, Human adenovirus F
guugacuugcaggag

SEQ ID NO: 1583165 - RNA, 17 nt, Human adenovirus F
ccugaucccgaagaggg

SEQ ID NO: 1583166 - RNA, 12 nt, Human adenovirus F
cgcccugaaagu

SEQ ID NO: 1583167 - RNA, 21 nt, Human adenovirus F
gcaaggguaaugucuuuccag

SEQ ID NO: 1583168 - RNA, 20 nt, Human adenovirus F
caacucgacaacccuuaccu

SEQ ID NO: 1583169 - RNA, 13 nt, Human adenovirus F
cauuggcuggagg

SEQ ID NO: 1583170 - RNA, 21 nt, Human adenovirus F
acugcauacaacucccuggcc

SEQ ID NO: 1583171 - RNA, 13 nt, Human adenovirus F
cugaacacuuuug

SEQ ID NO: 1583172 - RNA, 19 nt, Human adenovirus F
aaucacgaccucccaaagu

SEQ ID NO: 1583173 - RNA, 21 nt, Human adenovirus F
guuccauggcccgaccuguau

SEQ ID NO: 1583174 - RNA, 17 nt, Human adenovirus F
acacuaaaguuuuaaug

SEQ ID NO: 1583175 - RNA, 14 nt, Human adenovirus F
ggaccuuggccacc

SEQ ID NO: 1583176 - RNA, 17 nt, Human adenovirus F
auuacauggcaauggcu

SEQ ID NO: 1583177 - RNA, 23 nt, Human adenovirus F
acgggcggcaaaugcucugcaaa

SEQ ID NO: 1583178 - RNA, 19 nt, Human adenovirus F
caagcccaauccucaagac

SEQ ID NO: 1583179 - RNA, 19 nt, Human adenovirus F
aggccgcccuaaccucuac

SEQ ID NO: 1583180 - RNA, 16 nt, Human adenovirus F
ugcguggauuccuggg

SEQ ID NO: 1583181 - RNA, 13 nt, Human adenovirus F
ggcacccccccug

SEQ ID NO: 1583182 - RNA, 22 nt, Human adenovirus F
ugcagacaagacauggaagaca

SEQ ID NO: 1583183 - RNA, 20 nt, Human adenovirus F
caggcagcagccccaggcca

SEQ ID NO: 1583184 - RNA, 13 nt, Human adenovirus F
gugcaggaagagg

SEQ ID NO: 1583185 - RNA, 17 nt, Human adenovirus F
aagaagagcugcuggag

SEQ ID NO: 1583186 - RNA, 14 nt, Human adenovirus F
ugacggcgcagcug

SEQ ID NO: 1583187 - RNA, 22 nt, Human adenovirus F
ugcgccgagcggcugcuucugc

SEQ ID NO: 1583188 - RNA, 16 nt, Human adenovirus F
cugacgguggaggaau

SEQ ID NO: 1583189 - RNA, 16 nt, Human adenovirus F
uacugcuaaagggaac

SEQ ID NO: 1583190 - RNA, 14 nt, Human adenovirus F
uagcucugaacacu

SEQ ID NO: 1583191 - RNA, 22 nt, Human adenovirus F
ccgccagccuccgguggcucug

SEQ ID NO: 1583192 - RNA, 19 nt, Human adenovirus F
agcgcgacagagcaccauu

SEQ ID NO: 1583193 - RNA, 19 nt, Human adenovirus F
auagcaaaagcauuuuccu

SEQ ID NO: 1583194 - RNA, 19 nt, Human adenovirus F
ucgcagaaacaugccaccc

SEQ ID NO: 1583195 - RNA, 13 nt, Human adenovirus F
ggaaacugaugcu

SEQ ID NO: 1583196 - RNA, 18 nt, Human adenovirus F
acuacaauauuggcuacc

SEQ ID NO: 1583197 - RNA, 14 nt, Human adenovirus F
ccagcaaaggcgcc

SEQ ID NO: 1583198 - RNA, 15 nt, Human adenovirus F
uaaaaauggagaucu

SEQ ID NO: 1583199 - RNA, 18 nt, Human adenovirus F
gaaaaaccgccacaugaa

SEQ ID NO: 1583200 - RNA, 18 nt, Human adenovirus F
ccacaaaagcuuucacuu

SEQ ID NO: 1583201 - RNA, 18 nt, Human adenovirus F
ugccacccgcgcaacaca

SEQ ID NO: 1583202 - RNA, 16 nt, Human adenovirus F
uggccaacugccaccu

SEQ ID NO: 1583203 - RNA, 22 nt, Human adenovirus F
aaucuuacuuugacaugggggc

SEQ ID NO: 1583204 - RNA, 15 nt, Human adenovirus F
cccugaucagccagg

SEQ ID NO: 1583205 - RNA, 20 nt, Human adenovirus F
uuacauugguuuuagggaca

SEQ ID NO: 1583206 - RNA, 17 nt, Human adenovirus F
ccgucggaccugccccu

SEQ ID NO: 1583207 - RNA, 23 nt, Human adenovirus F
ccaaaucaaucagcggcuggaaa

SEQ ID NO: 1583208 - RNA, 20 nt, Human adenovirus F
ugccuuggaaucauccaccu

SEQ ID NO: 1583209 - RNA, 22 nt, Human adenovirus F
uugcuauugaaaauaacucacu

SEQ ID NO: 1583210 - RNA, 17 nt, Human adenovirus F
gaggagaaccugagggc

SEQ ID NO: 1583211 - RNA, 15 nt, Human adenovirus F
gcaguaucaguggag

SEQ ID NO: 1583212 - RNA, 11 nt, Human adenovirus F
ugaagaccaau

SEQ ID NO: 1583213 - RNA, 18 nt, Human adenovirus F
gcggguuaaaaagcgaga

SEQ ID NO: 1583214 - RNA, 15 nt, Human adenovirus F
acccaacuauuuggg

SEQ ID NO: 1583215 - RNA, 17 nt, Human adenovirus F
acugcuaaagggaacug

SEQ ID NO: 1583216 - RNA, 16 nt, Human adenovirus F
acuucauugguuugau

SEQ ID NO: 1583217 - RNA, 17 nt, Human adenovirus F
aaacaguaacaacuccu

SEQ ID NO: 1583218 - RNA, 13 nt, Human adenovirus F
aaguuucgggcgc

SEQ ID NO: 1583219 - RNA, 17 nt, Human adenovirus F
guaacagcuuuggaagu

SEQ ID NO: 1583220 - RNA, 12 nt, Human adenovirus F
auggggaaggau

SEQ ID NO: 1583221 - RNA, 23 nt, Human adenovirus F
gcuacucaacagaaaccucuucc

SEQ ID NO: 1583222 - RNA, 17 nt, Human adenovirus F
acugcuaccuccuccgu

SEQ ID NO: 1583223 - RNA, 17 nt, Human adenovirus F
cacuaccccuaccaccc

SEQ ID NO: 1583224 - RNA, 21 nt, Human adenovirus F
cugccguugcaaccucugcac

SEQ ID NO: 1583225 - RNA, 20 nt, Human adenovirus F
gccauuuaccaauagcagca

SEQ ID NO: 1583226 - RNA, 19 nt, Human adenovirus F
ugccgccaugacugccgcu

SEQ ID NO: 1583227 - RNA, 12 nt, Human adenovirus F
guuucuccuccc

SEQ ID NO: 1583228 - RNA, 14 nt, Human adenovirus F
caugcgcuccaaca

SEQ ID NO: 1583229 - RNA, 18 nt, Human adenovirus F
agugcaggaagaggagga

SEQ ID NO: 1583230 - RNA, 18 nt, Human adenovirus F
gcccgucgucaggccgcc

SEQ ID NO: 1583231 - RNA, 23 nt, Human adenovirus F
cuggucaaucucuucguccugga

SEQ ID NO: 1583232 - RNA, 23 nt, Human adenovirus F
cagugggaccguaaaugacccca

SEQ ID NO: 1583233 - RNA, 20 nt, Human adenovirus F
gcuaaccugugcagauggaa

SEQ ID NO: 1583234 - RNA, 12 nt, Human adenovirus F
gcuggugugaaa

SEQ ID NO: 1583235 - RNA, 15 nt, Human adenovirus F
cgcuagaccaacaaa

SEQ ID NO: 1583236 - RNA, 16 nt, Human adenovirus F
cauaaccuugaggaau

SEQ ID NO: 1583237 - RNA, 22 nt, Human adenovirus F
gccggagaggggaggaaguagg

SEQ ID NO: 1583238 - RNA, 19 nt, Human adenovirus F
cuagcgccccugcagccgu

SEQ ID NO: 1583239 - RNA, 16 nt, Human adenovirus F
uggagcagccugugga

SEQ ID NO: 1583240 - RNA, 22 nt, Human adenovirus F
accacugauguaacagcuuugg

SEQ ID NO: 1583241 - RNA, 19 nt, Human adenovirus F
cagacuuugucagccaaag

SEQ ID NO: 1583242 - RNA, 18 nt, Human adenovirus F
cacaggagauccguggag

SEQ ID NO: 1583243 - RNA, 19 nt, Human adenovirus F
gccccgguugugcaguguu

SEQ ID NO: 1583244 - RNA, 13 nt, Human adenovirus F
cucuugggcagga

SEQ ID NO: 1583245 - RNA, 19 nt, Human adenovirus F
aaugcuggucugcgcuacc

SEQ ID NO: 1583246 - RNA, 17 nt, Human adenovirus F
aaaagucaaaugucugu

SEQ ID NO: 1583247 - RNA, 14 nt, Human adenovirus F
aaagacacaauugg

SEQ ID NO: 1583248 - RNA, 22 nt, Human adenovirus F
ugucugccaauuaucuacgccu

SEQ ID NO: 1583249 - RNA, 12 nt, Human adenovirus F
cugcgcccccac

SEQ ID NO: 1583250 - RNA, 16 nt, Human adenovirus F
guuggcggcccugcaa

SEQ ID NO: 1583251 - RNA, 16 nt, Human adenovirus F
gcaacguucagccacu

SEQ ID NO: 1583252 - RNA, 19 nt, Human adenovirus F
ggggcguguccgggcucuu

SEQ ID NO: 1583253 - RNA, 19 nt, Human adenovirus F
ucccugucguugccagccg

SEQ ID NO: 1583254 - RNA, 13 nt, Human adenovirus F
ggcgccggacggg

SEQ ID NO: 1583255 - RNA, 14 nt, Human adenovirus F
aacagccccagcug

SEQ ID NO: 1583256 - RNA, 16 nt, Human adenovirus F
uagggugucugccaga

SEQ ID NO: 1583257 - RNA, 13 nt, Human adenovirus F
guuaaucccuuua

SEQ ID NO: 1583258 - RNA, 13 nt, Human adenovirus F
cgaaugcccccca

SEQ ID NO: 1583259 - RNA, 11 nt, Human adenovirus F
aacucugaaga

SEQ ID NO: 1583260 - RNA, 16 nt, Human adenovirus F
guugcauuauggccau

SEQ ID NO: 1583261 - RNA, 20 nt, Human adenovirus F
cggguuuuauggcaccgcau

SEQ ID NO: 1583262 - RNA, 23 nt, Human adenovirus F
uccagguggggcggcgaccugaa

SEQ ID NO: 1583263 - RNA, 22 nt, Human adenovirus F
ccuccucgcugucuggaaccac

SEQ ID NO: 1583264 - RNA, 14 nt, Human adenovirus F
auuuguuuagaaaa

SEQ ID NO: 1583265 - RNA, 17 nt, Human adenovirus F
cggcuggggcagaacgu

SEQ ID NO: 1583266 - RNA, 22 nt, Human adenovirus F
auggagcuauuuaaagugguga

SEQ ID NO: 1583267 - RNA, 19 nt, Human adenovirus F
gaaauugugaucagaaauu

SEQ ID NO: 1583268 - RNA, 23 nt, Human adenovirus F
agggaucgcagcgggcaggagcc

SEQ ID NO: 1583269 - RNA, 21 nt, Human adenovirus F
cauuccauuuauuacaccccc

SEQ ID NO: 1583270 - RNA, 16 nt, Human adenovirus F
ugaauaauucccaaau

SEQ ID NO: 1583271 - RNA, 17 nt, Human adenovirus F
ugggcguccaguggagc

SEQ ID NO: 1583272 - RNA, 14 nt, Human adenovirus F
ccugucgccccugc

SEQ ID NO: 1583273 - RNA, 21 nt, Human adenovirus F
uggcaaugugcucgcaaacaa

SEQ ID NO: 1583274 - RNA, 21 nt, Human adenovirus F
guugugcaguguuauaagguc

SEQ ID NO: 1583275 - RNA, 21 nt, Human adenovirus F
uuuaucuguaaaacuucccuu

SEQ ID NO: 1583276 - RNA, 18 nt, Human adenovirus F
cgcagccugagcugccag

SEQ ID NO: 1583277 - RNA, 14 nt, Human adenovirus F
ugcucguggcaugg

SEQ ID NO: 1583278 - RNA, 17 nt, Human adenovirus F
ugaccaucacugacgcc

SEQ ID NO: 1583279 - RNA, 21 nt, Human adenovirus F
gaccugcaauggcagcccagc

SEQ ID NO: 1583280 - RNA, 15 nt, Human adenovirus F
ggagcagauggagag

SEQ ID NO: 1583281 - RNA, 18 nt, Human adenovirus F
agaaauugauuuucugcc

SEQ ID NO: 1583282 - RNA, 16 nt, Human adenovirus F
gcaugccuccagcacu

SEQ ID NO: 1583283 - RNA, 16 nt, Human adenovirus F
ggcugcuucugccagu

SEQ ID NO: 1583284 - RNA, 14 nt, Human adenovirus F
caaguuggugaugc

SEQ ID NO: 1583285 - RNA, 17 nt, Human adenovirus F
auuaggaagggcaaagg

SEQ ID NO: 1583286 - RNA, 13 nt, Human adenovirus F
aacacaaugcaaa

SEQ ID NO: 1583287 - RNA, 15 nt, Human adenovirus F
gccccuaccagccgu

SEQ ID NO: 1583288 - RNA, 13 nt, Human adenovirus F
cucaucacugacu

SEQ ID NO: 1583289 - RNA, 13 nt, Human adenovirus F
cagacgcaaugga

SEQ ID NO: 1583290 - RNA, 23 nt, Human adenovirus F
auggcaauggcucuguggagaac

SEQ ID NO: 1583291 - RNA, 20 nt, Human adenovirus F
ccacacuuuuaaaaaggugu

SEQ ID NO: 1583292 - RNA, 17 nt, Human adenovirus F
agagggaaguugagaaa

SEQ ID NO: 1583293 - RNA, 16 nt, Human adenovirus F
aguauuacaaaugccu

SEQ ID NO: 1583294 - RNA, 14 nt, Human adenovirus F
cccgacagaggccg

SEQ ID NO: 1583295 - RNA, 19 nt, Human adenovirus F
ggugccugaagcacuggcu

SEQ ID NO: 1583296 - RNA, 18 nt, Human adenovirus F
uaaagcauaacaugauuu

SEQ ID NO: 1583297 - RNA, 17 nt, Human adenovirus F
ggaaagacaguggcgcg

SEQ ID NO: 1583298 - RNA, 23 nt, Human adenovirus F
augguucuuucuccccaucgccg

SEQ ID NO: 1583299 - RNA, 12 nt, Human adenovirus F
cuauuuaaagug

SEQ ID NO: 1583300 - RNA, 15 nt, Human adenovirus F
uuuggcucaacuuua

SEQ ID NO: 1583301 - RNA, 18 nt, Human adenovirus F
ccgucacucuccgccgcc

SEQ ID NO: 1583302 - RNA, 16 nt, Human adenovirus F
aacucuuuauuuuucu

SEQ ID NO: 1583303 - RNA, 15 nt, Human adenovirus F
uugaggguacgcugu

SEQ ID NO: 1583304 - RNA, 15 nt, Human adenovirus F
agauccgggcuaugu

SEQ ID NO: 1583305 - RNA, 21 nt, Human adenovirus F
gucguacaaguugcaaagcuc

SEQ ID NO: 1583306 - RNA, 21 nt, Human adenovirus F
acugcuagaaugucacugccg

SEQ ID NO: 1583307 - RNA, 15 nt, Human adenovirus F
accuuggcucgacuc

SEQ ID NO: 1583308 - RNA, 21 nt, Human adenovirus F
acugcuacuacuuuaacucuu

SEQ ID NO: 1583309 - RNA, 23 nt, Human adenovirus F
gucacuacaauauuggcuaccag

SEQ ID NO: 1583310 - RNA, 21 nt, Human adenovirus F
ucuuugggguccggguuugau

SEQ ID NO: 1583311 - RNA, 11 nt, Human adenovirus F
uuuccagcaga

SEQ ID NO: 1583312 - RNA, 13 nt, Human adenovirus F
acccucaaacacu

SEQ ID NO: 1583313 - RNA, 21 nt, Human adenovirus F
guccugucgccccugccaacu

SEQ ID NO: 1583314 - RNA, 13 nt, Human adenovirus F
caacuccucuugc

SEQ ID NO: 1583315 - RNA, 17 nt, Human adenovirus F
cucauuuucuuauguaa

SEQ ID NO: 1583316 - RNA, 11 nt, Human adenovirus F
ugguuggaaaa

SEQ ID NO: 1583317 - RNA, 18 nt, Human adenovirus F
ccaccgguuuuguaccac

SEQ ID NO: 1583318 - RNA, 17 nt, Human adenovirus F
uccuucacaaaguccug

SEQ ID NO: 1583319 - RNA, 17 nt, Human adenovirus F
cuguacugugcauuugg

SEQ ID NO: 1583320 - RNA, 20 nt, Human adenovirus F
uuugccacacuaaaguuuua

SEQ ID NO: 1583321 - RNA, 22 nt, Human adenovirus F
auguacuacaauuccacuggca

SEQ ID NO: 1583322 - RNA, 13 nt, Human adenovirus F
agaaugucacugc

SEQ ID NO: 1583323 - RNA, 16 nt, Human adenovirus F
cagugcaggaagagga

SEQ ID NO: 1583324 - RNA, 13 nt, Human adenovirus F
caggccgcggcgg

SEQ ID NO: 1583325 - RNA, 18 nt, Human adenovirus F
ucauuuaccaccccagca

SEQ ID NO: 1583326 - RNA, 21 nt, Human adenovirus F
acggaauuguaacugagccug

SEQ ID NO: 1583327 - RNA, 18 nt, Human adenovirus F
agcaaguuucgcaaaagc

SEQ ID NO: 1583328 - RNA, 22 nt, Human adenovirus F
agcuuuauuuccuuugucaugu

SEQ ID NO: 1583329 - RNA, 13 nt, Human adenovirus F
ccucuucugcacc

SEQ ID NO: 1583330 - RNA, 15 nt, Human adenovirus F
agucaaaaguguuua

SEQ ID NO: 1583331 - RNA, 19 nt, Human adenovirus F
ccacccuauggaccaccgc

SEQ ID NO: 1583332 - RNA, 21 nt, Human adenovirus F
cgagcaaacggugaacgagga

SEQ ID NO: 1583333 - RNA, 18 nt, Human adenovirus F
uggcuacuuaucacaucu

SEQ ID NO: 1583334 - RNA, 19 nt, Human adenovirus F
aagguauuaacaaaucgau

SEQ ID NO: 1583335 - RNA, 16 nt, Human adenovirus F
acgcuguaccaggagg

SEQ ID NO: 1583336 - RNA, 13 nt, Human adenovirus F
ugccaggcagcag

SEQ ID NO: 1583337 - RNA, 13 nt, Human adenovirus F
aaaccuguucuaa

SEQ ID NO: 1583338 - RNA, 17 nt, Human adenovirus F
uugcgucgcuggcuccg

SEQ ID NO: 1583339 - RNA, 16 nt, Human adenovirus F
caccgcauaagcuggc

SEQ ID NO: 1583340 - RNA, 13 nt, Human adenovirus F
ucuuauggaagac

SEQ ID NO: 1583341 - RNA, 19 nt, Human adenovirus F
aacgguuguuuuccaccag

SEQ ID NO: 1583342 - RNA, 15 nt, Human adenovirus F
cuucaccaaugccau

SEQ ID NO: 1583343 - RNA, 14 nt, Human adenovirus F
gcggagccugaggg

SEQ ID NO: 1583344 - RNA, 19 nt, Human adenovirus F
acaaucagggaaauuuacu

SEQ ID NO: 1583345 - RNA, 13 nt, Human adenovirus F
ugguagcaguguc

SEQ ID NO: 1583346 - RNA, 12 nt, Human adenovirus F
cccauucugcca

SEQ ID NO: 1583347 - RNA, 23 nt, Human adenovirus F
agccccuacgaaacguuuggaga

SEQ ID NO: 1583348 - RNA, 18 nt, Human adenovirus F
ccgucuccuaacgccacu

SEQ ID NO: 1583349 - RNA, 18 nt, Human adenovirus F
ugccaauuaucuacgccu

SEQ ID NO: 1583350 - RNA, 22 nt, Human adenovirus F
cagcaggugaaucccgcuaugu

SEQ ID NO: 1583351 - RNA, 21 nt, Human adenovirus F
gcccuuaaguauucaccaccu

SEQ ID NO: 1583352 - RNA, 11 nt, Human adenovirus F
ggccaccgccg

SEQ ID NO: 1583353 - RNA, 13 nt, Human adenovirus F
uaaaggaccaaaa

SEQ ID NO: 1583354 - RNA, 23 nt, Human adenovirus F
uaaccuguaugccaacuuuuucc

SEQ ID NO: 1583355 - RNA, 21 nt, Human adenovirus F
gcaaguuucgcaaaagcuggg

SEQ ID NO: 1583356 - RNA, 17 nt, Human adenovirus F
gccccgguugugcagug

SEQ ID NO: 1583357 - RNA, 20 nt, Human adenovirus F
gcugcugccucuacugcucg

SEQ ID NO: 1583358 - RNA, 13 nt, Human adenovirus F
agcguguucccaa

SEQ ID NO: 1583359 - RNA, 23 nt, Human adenovirus F
agccaguggacaaaccaaaacaa

SEQ ID NO: 1583360 - RNA, 17 nt, Human adenovirus F
cucccaacaaccuaccc

SEQ ID NO: 1583361 - RNA, 16 nt, Human adenovirus F
ccgcuccaucaagccc

SEQ ID NO: 1583362 - RNA, 14 nt, Human adenovirus F
ccaaaacuuucaac

SEQ ID NO: 1583363 - RNA, 19 nt, Human adenovirus F
gccguuuaugggcaccugg

SEQ ID NO: 1583364 - RNA, 10 nt, Human adenovirus F
cacaggaaga

SEQ ID NO: 1583365 - RNA, 22 nt, Human adenovirus F
aaagaaauccacuuaccagagc

SEQ ID NO: 1583366 - RNA, 19 nt, Human adenovirus F
augcaacuuggaagggaag

SEQ ID NO: 1583367 - RNA, 13 nt, Human adenovirus F
uauggaggaggau

SEQ ID NO: 1583368 - RNA, 23 nt, Human adenovirus F
acaccaccccuagucccuccucc

SEQ ID NO: 1583369 - RNA, 22 nt, Human adenovirus F
ugcaguucgcccgugccaccga

SEQ ID NO: 1583370 - RNA, 22 nt, Human adenovirus F
augaauuggcuuagugccggcc

SEQ ID NO: 1583371 - RNA, 17 nt, Human adenovirus F
aaauguucacacucuaa

SEQ ID NO: 1583372 - RNA, 18 nt, Human adenovirus F
acacggggucuauuugga

SEQ ID NO: 1583373 - RNA, 15 nt, Human adenovirus F
ucacccgcagcugcu

SEQ ID NO: 1583374 - RNA, 12 nt, Human adenovirus F
cuggcagcagug

SEQ ID NO: 1583375 - RNA, 17 nt, Human adenovirus F
ggacggcaaggaaccag

SEQ ID NO: 1583376 - RNA, 17 nt, Human adenovirus F
augcacaucgccgggca

SEQ ID NO: 1583377 - RNA, 17 nt, Human adenovirus F
agccuccgguggcucug

SEQ ID NO: 1583378 - RNA, 15 nt, Human adenovirus F
gaggauuaaggguaa

SEQ ID NO: 1583379 - RNA, 21 nt, Human adenovirus F
gcuggggaauggagcuguggu

SEQ ID NO: 1583380 - RNA, 14 nt, Human adenovirus F
uaguaacuuucaaa

SEQ ID NO: 1583381 - RNA, 19 nt, Human adenovirus F
ucaaguuuuuccagcagca

SEQ ID NO: 1583382 - RNA, 20 nt, Human adenovirus F
ccgcaaaugggccuggcagc

SEQ ID NO: 1583383 - RNA, 15 nt, Human adenovirus F
cugugccugucauga

SEQ ID NO: 1583384 - RNA, 14 nt, Human adenovirus F
uacggaggaagagg

SEQ ID NO: 1583385 - RNA, 18 nt, Human adenovirus F
agcagccccaggccaacc

SEQ ID NO: 1583386 - RNA, 18 nt, Human adenovirus F
ggauccagugcaggaaga

SEQ ID NO: 1583387 - RNA, 23 nt, Human adenovirus F
agcaucuuaggaagggggccauc

SEQ ID NO: 1583388 - RNA, 23 nt, Human adenovirus F
aaagcaaagccauccgcaaggau

SEQ ID NO: 1583389 - RNA, 18 nt, Human adenovirus F
guagggugucugccagag

SEQ ID NO: 1583390 - RNA, 21 nt, Human adenovirus F
acggaagggcggaacagcaua

SEQ ID NO: 1583391 - RNA, 18 nt, Human adenovirus F
gcaaaaugugcagcaaaa

SEQ ID NO: 1583392 - RNA, 21 nt, Human adenovirus F
gaccauuaccaccgucaguga

SEQ ID NO: 1583393 - RNA, 20 nt, Human adenovirus F
acacuaugguaaaaacccug

SEQ ID NO: 1583394 - RNA, 15 nt, Human adenovirus F
cuuacuuucugggca

SEQ ID NO: 1583395 - RNA, 19 nt, Human adenovirus F
cugccaaaauggcucugcu

SEQ ID NO: 1583396 - RNA, 14 nt, Human adenovirus F
caggacuuggcaga

SEQ ID NO: 1583397 - RNA, 17 nt, Human adenovirus F
cacacgucauccgccuc

SEQ ID NO: 1583398 - RNA, 22 nt, Human adenovirus F
aucuccugcacgucgccagagu

SEQ ID NO: 1583399 - RNA, 13 nt, Human adenovirus F
uagcaaacagugc

SEQ ID NO: 1583400 - RNA, 19 nt, Human adenovirus F
caaaaguccacaaaaacuc

SEQ ID NO: 1583401 - RNA, 11 nt, Human adenovirus F
guaccaggagg

SEQ ID NO: 1583402 - RNA, 14 nt, Human adenovirus F
gguccagcaaaggc

SEQ ID NO: 1583403 - RNA, 13 nt, Human adenovirus F
aggaggaggccau

SEQ ID NO: 1583404 - RNA, 13 nt, Human adenovirus F
ccugagcccgggc

SEQ ID NO: 1583405 - RNA, 16 nt, Human adenovirus F
cuucgggagacggagg

SEQ ID NO: 1583406 - RNA, 14 nt, Human adenovirus F
gaugauggcagcag

SEQ ID NO: 1583407 - RNA, 14 nt, Human adenovirus F
uggagcagccugug

SEQ ID NO: 1583408 - RNA, 20 nt, Human adenovirus F
ucaaacaaccagcgcucuac

SEQ ID NO: 1583409 - RNA, 18 nt, Human adenovirus F
augcuguagaauuuaugc

SEQ ID NO: 1583410 - RNA, 20 nt, Human adenovirus F
cccuuacgaacacuacaauc

SEQ ID NO: 1583411 - RNA, 18 nt, Human adenovirus F
aagcuucuuguacucaaa

SEQ ID NO: 1583412 - RNA, 19 nt, Human adenovirus F
ugaaguuaccaaagacaaa

SEQ ID NO: 1583413 - RNA, 21 nt, Human adenovirus F
caaucagaccacaacaacaaa

SEQ ID NO: 1583414 - RNA, 19 nt, Human adenovirus F
gcacugguaaaccagcaca

SEQ ID NO: 1583415 - RNA, 17 nt, Human adenovirus F
aucuauuucuuugucua

SEQ ID NO: 1583416 - RNA, 23 nt, Human adenovirus F
acauuggcuggaggcuugggagg

SEQ ID NO: 1583417 - RNA, 22 nt, Human adenovirus F
acuaagccucucgcucugcaaa

SEQ ID NO: 1583418 - RNA, 23 nt, Human adenovirus F
ugaagaccaaucacgaccuccca

SEQ ID NO: 1583419 - RNA, 21 nt, Human adenovirus F
gccagcuaaugugccgcgcgg

SEQ ID NO: 1583420 - RNA, 20 nt, Human adenovirus F
cagaaacuacaaaagcagug

SEQ ID NO: 1583421 - RNA, 12 nt, Human adenovirus F
augccuagcucu

SEQ ID NO: 1583422 - RNA, 15 nt, Human adenovirus F
gcgagcuuagcgacc

SEQ ID NO: 1583423 - RNA, 22 nt, Human adenovirus F
ccauggaucgcauccuggcccu

SEQ ID NO: 1583424 - RNA, 13 nt, Human adenovirus F
cuacucuggcucc

SEQ ID NO: 1583425 - RNA, 16 nt, Human adenovirus F
ucggcaccagccagcu

SEQ ID NO: 1583426 - RNA, 21 nt, Human adenovirus F
cugaccgaccuggggcaaaac

SEQ ID NO: 1583427 - RNA, 12 nt, Human adenovirus F
uuuuaugaagac

SEQ ID NO: 1583428 - RNA, 13 nt, Human adenovirus F
acugauccacuua

SEQ ID NO: 1583429 - RNA, 23 nt, Human adenovirus F
uugggacucuugcuggaccaaag

SEQ ID NO: 1583430 - RNA, 12 nt, Human adenovirus F
caggccgcggcg

SEQ ID NO: 1583431 - RNA, 20 nt, Human adenovirus F
gcagcgccacucgggaaaga

SEQ ID NO: 1583432 - RNA, 20 nt, Human adenovirus F
aacgugaccgagcagcugcg

SEQ ID NO: 1583433 - RNA, 21 nt, Human adenovirus F
cagcugguaagcagccuaagc

SEQ ID NO: 1583434 - RNA, 18 nt, Human adenovirus F
ugcuacacaacaaaucau

SEQ ID NO: 1583435 - RNA, 17 nt, Human adenovirus F
auuuaugcccaacagua

SEQ ID NO: 1583436 - RNA, 15 nt, Human adenovirus F
gucgcuggcuccgcg

SEQ ID NO: 1583437 - RNA, 12 nt, Human adenovirus F
guggaggcagcu

SEQ ID NO: 1583438 - RNA, 14 nt, Human adenovirus F
uccuauuacagccc

SEQ ID NO: 1583439 - RNA, 16 nt, Human adenovirus F
uggcacagcaaacaca

SEQ ID NO: 1583440 - RNA, 18 nt, Human adenovirus F
ggaggucaagccaagcug

SEQ ID NO: 1583441 - RNA, 17 nt, Human adenovirus F
agggaggcagcagagga

SEQ ID NO: 1583442 - RNA, 18 nt, Human adenovirus F
agugcugucuagccgcac

SEQ ID NO: 1583443 - RNA, 23 nt, Human adenovirus F
uauguuagcgaaaacggaaacaa

SEQ ID NO: 1583444 - RNA, 11 nt, Human adenovirus F
uuuaauacagu

SEQ ID NO: 1583445 - RNA, 21 nt, Human adenovirus F
guguugacccgcuuggaggag

SEQ ID NO: 1583446 - RNA, 15 nt, Human adenovirus F
ccagcgcccgggccc

SEQ ID NO: 1583447 - RNA, 14 nt, Human adenovirus F
gggguggaaagccu

SEQ ID NO: 1583448 - RNA, 20 nt, Human adenovirus F
ucugcaaaaacaaauacagu

SEQ ID NO: 1583449 - RNA, 19 nt, Human adenovirus F
uggcggcccugcaaagcca

SEQ ID NO: 1583450 - RNA, 23 nt, Human adenovirus F
gucgccccugugaguguggagcu

SEQ ID NO: 1583451 - RNA, 13 nt, Human adenovirus F
accacgcugcgcc

SEQ ID NO: 1583452 - RNA, 17 nt, Human adenovirus F
gaaaacucaaacaacaa

SEQ ID NO: 1583453 - RNA, 17 nt, Human adenovirus F
aggacuucaccuacaac

SEQ ID NO: 1583454 - RNA, 13 nt, Human adenovirus F
cgcagcagauccu

SEQ ID NO: 1583455 - RNA, 21 nt, Human adenovirus F
ggccgcggcggcuauugccag

SEQ ID NO: 1583456 - RNA, 15 nt, Human adenovirus F
ggcaacguucagcca

SEQ ID NO: 1583457 - RNA, 14 nt, Human adenovirus F
gugccugaagcacu

SEQ ID NO: 1583458 - RNA, 14 nt, Human adenovirus F
auuggucaaaaacu

SEQ ID NO: 1583459 - RNA, 15 nt, Human adenovirus F
augcuuuaccccaua

SEQ ID NO: 1583460 - RNA, 14 nt, Human adenovirus F
ucccaaagugcugu

SEQ ID NO: 1583461 - RNA, 22 nt, Human adenovirus F
gcaaaaaaacgaaaccgagaau

SEQ ID NO: 1583462 - RNA, 19 nt, Human adenovirus F
ucaaucagcggcuggaaaa

SEQ ID NO: 1583463 - RNA, 18 nt, Human adenovirus F
guggacgacagccagcug

SEQ ID NO: 1583464 - RNA, 15 nt, Human adenovirus F
gaaaaauuacagcca

SEQ ID NO: 1583465 - RNA, 16 nt, Human adenovirus F
gcagacaagacaugga

SEQ ID NO: 1583466 - RNA, 23 nt, Human adenovirus F
cugcacugccaucugcagcauug

SEQ ID NO: 1583467 - RNA, 21 nt, Human adenovirus F
caggcguuuaaaaacuugcaa

SEQ ID NO: 1583468 - RNA, 23 nt, Human adenovirus F
cggugcguuuuuuugagcuugga

SEQ ID NO: 1583469 - RNA, 21 nt, Human adenovirus F
gccucuacugcucguggcaug

SEQ ID NO: 1583470 - RNA, 14 nt, Human adenovirus F
cuaucugcaaaaaa

SEQ ID NO: 1583471 - RNA, 17 nt, Human adenovirus F
gcaacauaacuuuacaa

SEQ ID NO: 1583472 - RNA, 21 nt, Human adenovirus F
cuuaacccucccgcuaauacu

SEQ ID NO: 1583473 - RNA, 13 nt, Human adenovirus F
cccuuuccagcau

SEQ ID NO: 1583474 - RNA, 19 nt, Human adenovirus F
ggcacaguaaucaaggguu

SEQ ID NO: 1583475 - RNA, 19 nt, Human adenovirus F
uguggaaucccgcgagccc

SEQ ID NO: 1583476 - RNA, 19 nt, Human adenovirus F
auauaaaaacaaccaacuu

SEQ ID NO: 1583477 - RNA, 21 nt, Human adenovirus F
guccaggcuaaaacaaaggag

SEQ ID NO: 1583478 - RNA, 18 nt, Human adenovirus F
cggcaucggaacccucca

SEQ ID NO: 1583479 - RNA, 16 nt, Human adenovirus F
caaggaaugcacacag

SEQ ID NO: 1583480 - RNA, 19 nt, Human adenovirus F
cuuuuauugauucaaaaaa

SEQ ID NO: 1583481 - RNA, 16 nt, Human adenovirus F
ccagcauggcucagcc

SEQ ID NO: 1583482 - RNA, 13 nt, Human adenovirus F
cgauaacauuacu

SEQ ID NO: 1583483 - RNA, 20 nt, Human adenovirus F
cuggagggcgucaugcucug

SEQ ID NO: 1583484 - RNA, 18 nt, Human adenovirus F
uacgugucuugcaaagac

SEQ ID NO: 1583485 - RNA, 15 nt, Human adenovirus F
aagacaaaaucacug

SEQ ID NO: 1583486 - RNA, 13 nt, Human adenovirus F
cuaaaacaaacca

SEQ ID NO: 1583487 - RNA, 21 nt, Human adenovirus F
ccgacgcgcuuugcgcaggcg

SEQ ID NO: 1583488 - RNA, 17 nt, Human adenovirus F
gucccugggaugcaggu

SEQ ID NO: 1583489 - RNA, 22 nt, Human adenovirus F
gaggaucuuaagcugcagccag

SEQ ID NO: 1583490 - RNA, 15 nt, Human adenovirus F
ucgauggagccagcg

SEQ ID NO: 1583491 - RNA, 22 nt, Human adenovirus F
uucagacgaggaggcggaggag

SEQ ID NO: 1583492 - RNA, 17 nt, Human adenovirus F
acgcuguaccaggaggc

SEQ ID NO: 1583493 - RNA, 21 nt, Human adenovirus F
cgggcgcacgugucggcggcc

SEQ ID NO: 1583494 - RNA, 15 nt, Human adenovirus F
acuaccucugcgcug

SEQ ID NO: 1583495 - RNA, 23 nt, Human adenovirus F
aagugaaccggaaaaccaacgcu

SEQ ID NO: 1583496 - RNA, 17 nt, Human adenovirus F
gacaaagcacacagaac

SEQ ID NO: 1583497 - RNA, 20 nt, Human adenovirus F
gacuuuaccccgacagaggc

SEQ ID NO: 1583498 - RNA, 18 nt, Human adenovirus F
uccucgcugucuggaacc

SEQ ID NO: 1583499 - RNA, 15 nt, Human adenovirus F
gcgcacccugguggc

SEQ ID NO: 1583500 - RNA, 12 nt, Human adenovirus F
accauggagcua

SEQ ID NO: 1583501 - RNA, 22 nt, Human adenovirus F
ugcacuuuuggccuuugucugu

SEQ ID NO: 1583502 - RNA, 21 nt, Human adenovirus F
agcauaaaggggaccagcugu

SEQ ID NO: 1583503 - RNA, 24 nt, Human adenovirus F
gugccgagcuuuuacugggacagc

SEQ ID NO: 1583504 - RNA, 20 nt, Human adenovirus F
ccacauaagaagccagccaa

SEQ ID NO: 1583505 - RNA, 21 nt, Human adenovirus F
gccagccguaggugggacacc

SEQ ID NO: 1583506 - RNA, 13 nt, Human adenovirus F
ccucugacggggg

SEQ ID NO: 1583507 - RNA, 22 nt, Human adenovirus F
ccguccccagcgcccuggauac

SEQ ID NO: 1583508 - RNA, 13 nt, Human adenovirus F
cgcagcuguuuuu

SEQ ID NO: 1583509 - RNA, 19 nt, Human adenovirus F
cuaucccguguuugacaac

SEQ ID NO: 1583510 - RNA, 14 nt, Human adenovirus F
gcaucuaucuuuuc

SEQ ID NO: 1583511 - RNA, 19 nt, Human adenovirus F
ugcauuuuggccugaauuu

SEQ ID NO: 1583512 - RNA, 12 nt, Human adenovirus F
augcucugcaaa

SEQ ID NO: 1583513 - RNA, 22 nt, Human adenovirus F
agcauaaaagaagcacaggaga

SEQ ID NO: 1583514 - RNA, 18 nt, Human adenovirus F
uuagcaguaggacgucag

SEQ ID NO: 1583515 - RNA, 21 nt, Human adenovirus F
uccuagccaguggacaaacca

SEQ ID NO: 1583516 - RNA, 22 nt, Human adenovirus F
ggcaccuuuuaccugaaccaca

SEQ ID NO: 1583517 - RNA, 19 nt, Human adenovirus F
aagcucgcgcacagcuucg

SEQ ID NO: 1583518 - RNA, 14 nt, Human adenovirus F
gagucuggcagcag

SEQ ID NO: 1583519 - RNA, 19 nt, Human adenovirus F
caucucaaagcuggagcuc

SEQ ID NO: 1583520 - RNA, 22 nt, Human adenovirus F
gcuggagggcaaaaugggcuug

SEQ ID NO: 1583521 - RNA, 18 nt, Human adenovirus F
caauagcauacagaagac

SEQ ID NO: 1583522 - RNA, 20 nt, Human adenovirus F
ccucagggucaacugggucg

SEQ ID NO: 1583523 - RNA, 23 nt, Human adenovirus F
cccaacuauuugggaggggagga

SEQ ID NO: 1583524 - RNA, 13 nt, Human adenovirus F
ucuuugccaccuu

SEQ ID NO: 1583525 - RNA, 13 nt, Human adenovirus F
ccaggcagcaggg

SEQ ID NO: 1583526 - RNA, 20 nt, Human adenovirus F
gucccuccccguuaccuggg

SEQ ID NO: 1583527 - RNA, 15 nt, Human adenovirus F
auauacguaaaugug

SEQ ID NO: 1583528 - RNA, 21 nt, Human adenovirus F
cugggauuugccgcagccagu

SEQ ID NO: 1583529 - RNA, 16 nt, Human adenovirus F
acgcuagaccaacaaa

SEQ ID NO: 1583530 - RNA, 13 nt, Human adenovirus F
acaaaaacuccaa

SEQ ID NO: 1583531 - RNA, 12 nt, Human adenovirus F
guaccaggaggc

SEQ ID NO: 1583532 - RNA, 17 nt, Human adenovirus F
cugagcugccagaggcc

SEQ ID NO: 1583533 - RNA, 16 nt, Human adenovirus F
gauggacuaucugcac

SEQ ID NO: 1583534 - RNA, 12 nt, Human adenovirus F
cuacgucaccuu

SEQ ID NO: 1583535 - RNA, 21 nt, Human adenovirus F
agcucuuccaagcugcggaaa

SEQ ID NO: 1583536 - RNA, 13 nt, Human adenovirus F
caaacaacaaaau

SEQ ID NO: 1583537 - RNA, 18 nt, Human adenovirus F
ccuucaggcagcagcccc

SEQ ID NO: 1583538 - RNA, 19 nt, Human adenovirus F
cccuuaaguauucaccacc

SEQ ID NO: 1583539 - RNA, 12 nt, Human adenovirus F
cagcgggcacag

SEQ ID NO: 1583540 - RNA, 21 nt, Human adenovirus F
gaggagcugucucagcaguug

SEQ ID NO: 1583541 - RNA, 24 nt, Human adenovirus F
gcgggcaggagcccgaagagauga

SEQ ID NO: 1583542 - RNA, 13 nt, Human adenovirus F
aauauuaaugccc

SEQ ID NO: 1583543 - RNA, 15 nt, Human adenovirus F
cggcaccagccagcu

SEQ ID NO: 1583544 - RNA, 13 nt, Human adenovirus F
aagaucagguucc

SEQ ID NO: 1583545 - RNA, 14 nt, Human adenovirus F
caggaucccucaga

SEQ ID NO: 1583546 - RNA, 17 nt, Human adenovirus F
cggaguaccugagcccg

SEQ ID NO: 1583547 - RNA, 22 nt, Human adenovirus F
acagcuaugacccagacgugag

SEQ ID NO: 1583548 - RNA, 15 nt, Human adenovirus F
ccuuacgucagcuac

SEQ ID NO: 1583549 - RNA, 23 nt, Human adenovirus F
aaagugcaagucacgaagaucac

SEQ ID NO: 1583550 - RNA, 20 nt, Human adenovirus F
ccgcgucugcugcugccucu

SEQ ID NO: 1583551 - RNA, 17 nt, Human adenovirus F
aguccucauucuucuca

SEQ ID NO: 1583552 - RNA, 18 nt, Human adenovirus F
cuugcugacuuaucucau

SEQ ID NO: 1583553 - RNA, 18 nt, Human adenovirus F
uaccagaguaacuuuugc

SEQ ID NO: 1583554 - RNA, 12 nt, Human adenovirus F
acuuuuucccca

SEQ ID NO: 1583555 - RNA, 21 nt, Human adenovirus F
ugcccgccagcuggcaaaccu

SEQ ID NO: 1583556 - RNA, 15 nt, Human adenovirus F
caccaccgaaauaaa

SEQ ID NO: 1583557 - RNA, 15 nt, Human adenovirus F
cucgggcgcuccugg

SEQ ID NO: 1583558 - RNA, 17 nt, Human adenovirus F
ggcauggcgggcagugg

SEQ ID NO: 1583559 - RNA, 18 nt, Human adenovirus F
gcagccgugaagccaaau

SEQ ID NO: 1583560 - RNA, 17 nt, Human adenovirus F
uaccaaucacggcuucc

SEQ ID NO: 1583561 - RNA, 16 nt, Human adenovirus F
cgguggcggacggguc

SEQ ID NO: 1583562 - RNA, 17 nt, Human adenovirus F
gccgucccugggaugca

SEQ ID NO: 1583563 - RNA, 17 nt, Human adenovirus F
aaauuacagccaaguca

SEQ ID NO: 1583564 - RNA, 21 nt, Human adenovirus F
gccgcugucguuaguggaggc

SEQ ID NO: 1583565 - RNA, 20 nt, Human adenovirus F
ucugccaccagccggaggag

SEQ ID NO: 1583566 - RNA, 13 nt, Human adenovirus F
aaucgcuggaaaa

SEQ ID NO: 1583567 - RNA, 22 nt, Human adenovirus F
uggauaccgcugcagcugcugc

SEQ ID NO: 1583568 - RNA, 17 nt, Human adenovirus F
guuuccucgauuuccau

SEQ ID NO: 1583569 - RNA, 21 nt, Human adenovirus F
gauggaaacugucaggcucug

SEQ ID NO: 1583570 - RNA, 18 nt, Human adenovirus F
cuccauguggaaccaggc

SEQ ID NO: 1583571 - RNA, 21 nt, Human adenovirus F
cgucuuugcggugccugaagc

SEQ ID NO: 1583572 - RNA, 22 nt, Human adenovirus F
uugacccgcuuggaggagcugu

SEQ ID NO: 1583573 - RNA, 15 nt, Human adenovirus F
ggagucuggcagcag

SEQ ID NO: 1583574 - RNA, 22 nt, Human adenovirus F
cuacguucgucaggccugcaag

SEQ ID NO: 1583575 - RNA, 20 nt, Human adenovirus F
cacugccguugcaaccucug

SEQ ID NO: 1583576 - RNA, 14 nt, Human adenovirus F
uaccacagaaaugu

SEQ ID NO: 1583577 - RNA, 18 nt, Human adenovirus F
gccaccagccggaggagu

SEQ ID NO: 1583578 - RNA, 20 nt, Human adenovirus F
aacgccccgcgagccacagg

SEQ ID NO: 1583579 - RNA, 13 nt, Human adenovirus F
ccuaacacaggcg

SEQ ID NO: 1583580 - RNA, 15 nt, Human adenovirus F
acguucuucacugca

SEQ ID NO: 1583581 - RNA, 18 nt, Human adenovirus F
augauguaacccaacagg

SEQ ID NO: 1583582 - RNA, 23 nt, Human adenovirus F
cacugauguaacagcuuuggaag

SEQ ID NO: 1583583 - RNA, 15 nt, Human adenovirus F
cacugcgguggaggc

SEQ ID NO: 1583584 - RNA, 16 nt, Human adenovirus F
agccacauccgcuccu

SEQ ID NO: 1583585 - RNA, 18 nt, Human adenovirus F
caauggcagcccagcgcc

SEQ ID NO: 1583586 - RNA, 14 nt, Human adenovirus F
gauucaagggccag

SEQ ID NO: 1583587 - RNA, 13 nt, Human adenovirus F
acaccccccgccu

SEQ ID NO: 1583588 - RNA, 19 nt, Human adenovirus F
aaaaucuaccacagaaaug

SEQ ID NO: 1583589 - RNA, 12 nt, Human adenovirus F
aggcaguggugg

SEQ ID NO: 1583590 - RNA, 23 nt, Human adenovirus F
cggaacccugccgcugcgcagca

SEQ ID NO: 1583591 - RNA, 16 nt, Human adenovirus F
gucucagcaguugcaa

SEQ ID NO: 1583592 - RNA, 15 nt, Human adenovirus F
ucuugucguaaccaa

SEQ ID NO: 1583593 - RNA, 15 nt, Human adenovirus F
cuaucccgccccugc

SEQ ID NO: 1583594 - RNA, 14 nt, Human adenovirus F
agaaaaaacccuua

SEQ ID NO: 1583595 - RNA, 23 nt, Human adenovirus F
gauucgccauaaugcgggcucug

SEQ ID NO: 1583596 - RNA, 16 nt, Human adenovirus F
cuuuauugccaccgca

SEQ ID NO: 1583597 - RNA, 16 nt, Human adenovirus F
caccuugcaaggggag

SEQ ID NO: 1583598 - RNA, 24 nt, Human adenovirus F
uccaaauuuuuaugaaacacacau

SEQ ID NO: 1583599 - RNA, 20 nt, Human adenovirus F
ucuauagagcuaaggaggag

SEQ ID NO: 1583600 - RNA, 17 nt, Human adenovirus F
cguggaaaaacuuggaa

SEQ ID NO: 1583601 - RNA, 21 nt, Human adenovirus F
accuccaccggcccaccgagu

SEQ ID NO: 1583602 - RNA, 15 nt, Human adenovirus F
augcgcuccaacacu

SEQ ID NO: 1583603 - RNA, 13 nt, Human adenovirus F
aagaagugugugu

SEQ ID NO: 1583604 - RNA, 13 nt, Human adenovirus F
gagauuuguagug

SEQ ID NO: 1583605 - RNA, 13 nt, Human adenovirus F
caauggcagccca

SEQ ID NO: 1583606 - RNA, 15 nt, Human adenovirus F
cacuccucgccaggc

SEQ ID NO: 1583607 - RNA, 18 nt, Human adenovirus F
cauaaugcgggcucugau

SEQ ID NO: 1583608 - RNA, 16 nt, Human adenovirus F
ccaaaaacggggcuuu

SEQ ID NO: 1583609 - RNA, 20 nt, Human adenovirus F
cauuaauaguggcacagcaa

SEQ ID NO: 1583610 - RNA, 20 nt, Human adenovirus F
cuuaugcgcuguacugugca

SEQ ID NO: 1583611 - RNA, 16 nt, Human adenovirus F
aauggagcuguggugc

SEQ ID NO: 1583612 - RNA, 19 nt, Human adenovirus F
uccacguaccagaaagcua

SEQ ID NO: 1583613 - RNA, 12 nt, Human adenovirus F
cucuugcaggag

SEQ ID NO: 1583614 - RNA, 20 nt, Human adenovirus F
uggugaauaagcgucggcgc

SEQ ID NO: 1583615 - RNA, 15 nt, Human adenovirus F
ugggacgaggaggag

SEQ ID NO: 1583616 - RNA, 20 nt, Human adenovirus F
accaggccuugcaaaaccaa

SEQ ID NO: 1583617 - RNA, 18 nt, Human adenovirus F
gucaucucuacagccccu

SEQ ID NO: 1583618 - RNA, 16 nt, Human adenovirus F
gaaccaggcaguggac

SEQ ID NO: 1583619 - RNA, 14 nt, Human adenovirus F
gagcagccugugga

SEQ ID NO: 1583620 - RNA, 19 nt, Human adenovirus F
gcucgcaaacaauaaaaga

SEQ ID NO: 1583621 - RNA, 18 nt, Human adenovirus F
aaacacugcgcaaagucg

SEQ ID NO: 1583622 - RNA, 14 nt, Human adenovirus F
agagcacccucuac

SEQ ID NO: 1583623 - RNA, 21 nt, Human adenovirus F
aaagcugugagcgccagccgc

SEQ ID NO: 1583624 - RNA, 14 nt, Human adenovirus F
ccccggcguacgac

SEQ ID NO: 1583625 - RNA, 13 nt, Human adenovirus F
ccgcacuggaugc

SEQ ID NO: 1583626 - RNA, 14 nt, Human adenovirus F
caacacaggagcuu

SEQ ID NO: 1583627 - RNA, 22 nt, Human adenovirus F
ucaaaauugcagcgguaucugc

SEQ ID NO: 1583628 - RNA, 21 nt, Human adenovirus F
ugcgcaccaauaugcccaaca

SEQ ID NO: 1583629 - RNA, 20 nt, Human adenovirus F
gcgguggcaacccugaggag

SEQ ID NO: 1583630 - RNA, 19 nt, Human adenovirus F
agcaccaccugcccuuccu

SEQ ID NO: 1583631 - RNA, 22 nt, Human adenovirus F
ugccucuacugcucguggcaug

SEQ ID NO: 1583632 - RNA, 21 nt, Human adenovirus F
aagaguuuuuacaacgagcag

SEQ ID NO: 1583633 - RNA, 13 nt, Human adenovirus F
uaaccucuacccc

SEQ ID NO: 1583634 - RNA, 15 nt, Human adenovirus F
ggacagcuaugaccc

SEQ ID NO: 1583635 - RNA, 13 nt, Human adenovirus F
ugcauguuggaaa

SEQ ID NO: 1583636 - RNA, 19 nt, Human adenovirus F
cuucugugccugucaugaa

SEQ ID NO: 1583637 - RNA, 21 nt, Human adenovirus F
acggccguaccaagccugacu

SEQ ID NO: 1583638 - RNA, 17 nt, Human adenovirus F
guaagguaaucaggaga

SEQ ID NO: 1583639 - RNA, 15 nt, Human adenovirus F
acugucaggcucuga

SEQ ID NO: 1583640 - RNA, 19 nt, Human adenovirus F
ccaccgccgcaccacugac

SEQ ID NO: 1583641 - RNA, 19 nt, Human adenovirus F
cagccgugaagccaaaucg

SEQ ID NO: 1583642 - RNA, 20 nt, Human adenovirus F
uucgcucacccgcagcugcu

SEQ ID NO: 1583643 - RNA, 16 nt, Human adenovirus F
ucaaaaguccacaaaa

SEQ ID NO: 1583644 - RNA, 17 nt, Human adenovirus F
ugacacgggcacucuuc

SEQ ID NO: 1583645 - RNA, 14 nt, Human adenovirus F
ugcaacuuggaagg

SEQ ID NO: 1583646 - RNA, 15 nt, Human adenovirus F
agaaagauggaaaac

SEQ ID NO: 1583647 - RNA, 21 nt, Human adenovirus F
ucuucggcaggaaagccacgc

SEQ ID NO: 1583648 - RNA, 19 nt, Human adenovirus F
cggcguucuagccaacacc

SEQ ID NO: 1583649 - RNA, 13 nt, Human adenovirus F
gucguaacaaaua

SEQ ID NO: 1583650 - RNA, 15 nt, Human adenovirus F
ccguucuaugcuccu

SEQ ID NO: 1583651 - RNA, 21 nt, Human adenovirus F
aucuugcaaaacuuucgcucc

SEQ ID NO: 1583652 - RNA, 21 nt, Human adenovirus F
gcguagcaccccaauguaagu

SEQ ID NO: 1583653 - RNA, 18 nt, Human adenovirus F
aacuuuuugcccaccgcc

SEQ ID NO: 1583654 - RNA, 13 nt, Human adenovirus F
gguuuaaacuuuu

SEQ ID NO: 1583655 - RNA, 22 nt, Human adenovirus F
ggcgagaaaauauggaggagga

SEQ ID NO: 1583656 - RNA, 23 nt, Human adenovirus F
caaaacuuucgcuccuuuguacu

SEQ ID NO: 1583657 - RNA, 22 nt, Human adenovirus F
aaccagcuuaguauuaacacug

SEQ ID NO: 1583658 - RNA, 19 nt, Human adenovirus F
gcagcucgcaaacaauaaa

SEQ ID NO: 1583659 - RNA, 13 nt, Human adenovirus F
gggcggcggccau

SEQ ID NO: 1583660 - RNA, 21 nt, Human adenovirus F
gcagcgcccgccucccaaagu

SEQ ID NO: 1583661 - RNA, 15 nt, Human adenovirus F
auggugguagaaggu

SEQ ID NO: 1583662 - RNA, 19 nt, Human adenovirus F
cuucacaaaguccuggcca

SEQ ID NO: 1583663 - RNA, 18 nt, Human adenovirus F
ccaaucguagcaggguuu

SEQ ID NO: 1583664 - RNA, 16 nt, Human adenovirus F
gcuauugccagcaugg

SEQ ID NO: 1583665 - RNA, 21 nt, Human adenovirus F
caggccuugcaaaaccaaauc

SEQ ID NO: 1583666 - RNA, 22 nt, Human adenovirus F
uagguggggccccugaggcagc

SEQ ID NO: 1583667 - RNA, 22 nt, Human adenovirus F
uagcauaaaggggaccagcugu

SEQ ID NO: 1583668 - RNA, 18 nt, Human adenovirus F
auuugugggacuuuaugg

SEQ ID NO: 1583669 - RNA, 13 nt, Human adenovirus F
ucuuuacccagac

SEQ ID NO: 1583670 - RNA, 13 nt, Human adenovirus F
cggcgccuccaac

SEQ ID NO: 1583671 - RNA, 23 nt, Human adenovirus F
cgaggagguagaaguggaggaaa

SEQ ID NO: 1583672 - RNA, 15 nt, Human adenovirus F
caugcuuagccucgg

SEQ ID NO: 1583673 - RNA, 12 nt, Human adenovirus F
ccgcgaaugccc

SEQ ID NO: 1583674 - RNA, 14 nt, Human adenovirus F
ccugagcugccaga

SEQ ID NO: 1583675 - RNA, 23 nt, Human adenovirus F
ugcuacucaacagaaaccucuuc

SEQ ID NO: 1583676 - RNA, 23 nt, Human adenovirus F
acucucuuacauuggccaccgcc

SEQ ID NO: 1583677 - RNA, 18 nt, Human adenovirus F
uaacccucaaacacugcg

SEQ ID NO: 1583678 - RNA, 13 nt, Human adenovirus F
cucugcagcagcg

SEQ ID NO: 1583679 - RNA, 12 nt, Human adenovirus F
accggcgccgcu

SEQ ID NO: 1583680 - RNA, 20 nt, Human adenovirus F
uauccauuaaagcucaaaaa

SEQ ID NO: 1583681 - RNA, 23 nt, Human adenovirus F
cccaaguaaucgguaccuuugag

SEQ ID NO: 1583682 - RNA, 21 nt, Human adenovirus F
aaccuugaguuuaaugucucg

SEQ ID NO: 1583683 - RNA, 18 nt, Human adenovirus F
cagagccauagcaacagc

SEQ ID NO: 1583684 - RNA, 20 nt, Human adenovirus F
agaacguguugguagagcug

SEQ ID NO: 1583685 - RNA, 18 nt, Human adenovirus F
aauuguaacugagccuga

SEQ ID NO: 1583686 - RNA, 22 nt, Human adenovirus F
cuuacauaucgcuugccacugg

SEQ ID NO: 1583687 - RNA, 14 nt, Human adenovirus F
aaacagugccacau

SEQ ID NO: 1583688 - RNA, 18 nt, Human adenovirus F
augccuuaacauuuaugc

SEQ ID NO: 1583689 - RNA, 21 nt, Human adenovirus F
ccgcugucguuaguggaggca

SEQ ID NO: 1583690 - RNA, 18 nt, Human adenovirus F
cccaacacuuucaccgcc

SEQ ID NO: 1583691 - RNA, 20 nt, Human adenovirus F
cguggccuugcaagcagcuc

SEQ ID NO: 1583692 - RNA, 17 nt, Human adenovirus F
agcuguuuaccaaaggc

SEQ ID NO: 1583693 - RNA, 21 nt, Human adenovirus F
gucagcuacaagauuccacca

SEQ ID NO: 1583694 - RNA, 21 nt, Human adenovirus F
uggcaugagggauucuaaggg

SEQ ID NO: 1583695 - RNA, 18 nt, Human adenovirus F
guggaaaaacuuggaaac

SEQ ID NO: 1583696 - RNA, 19 nt, Human adenovirus F
ggaucccucagagcugcaa

SEQ ID NO: 1583697 - RNA, 19 nt, Human adenovirus F
aggcauuaggccgucccug

SEQ ID NO: 1583698 - RNA, 17 nt, Human adenovirus F
gcaccagccagcucaac

SEQ ID NO: 1583699 - RNA, 20 nt, Human adenovirus F
acaaacacgcauguaaauuu

SEQ ID NO: 1583700 - RNA, 14 nt, Human adenovirus F
aacuacaaaagcag

SEQ ID NO: 1583701 - RNA, 13 nt, Human adenovirus F
uuggggaauuugu

SEQ ID NO: 1583702 - RNA, 14 nt, Human adenovirus F
caugagcugggaga

SEQ ID NO: 1583703 - RNA, 13 nt, Human adenovirus F
uuuccccauggcu

SEQ ID NO: 1583704 - RNA, 22 nt, Human adenovirus F
ccggcauuaacggcguggugga

SEQ ID NO: 1583705 - RNA, 20 nt, Human adenovirus F
uggggcagaacguucuucac

SEQ ID NO: 1583706 - RNA, 16 nt, Human adenovirus F
ugccucguagaaguca

SEQ ID NO: 1583707 - RNA, 16 nt, Human adenovirus F
agugucgcgcaccaua

SEQ ID NO: 1583708 - RNA, 18 nt, Human adenovirus F
guaguccucauucuucuc

SEQ ID NO: 1583709 - RNA, 18 nt, Human adenovirus F
cccucgucgcccucuucu

SEQ ID NO: 1583710 - RNA, 20 nt, Human adenovirus F
aauugauuuucugccaccag

SEQ ID NO: 1583711 - RNA, 14 nt, Human adenovirus F
ccuuuugcaucuca

SEQ ID NO: 1583712 - RNA, 23 nt, Human adenovirus F
ggcguguacaccaacgaggccuu

SEQ ID NO: 1583713 - RNA, 18 nt, Human adenovirus F
cgugcgcacccugguggc

SEQ ID NO: 1583714 - RNA, 13 nt, Human adenovirus F
cacaucacuguua

SEQ ID NO: 1583715 - RNA, 17 nt, Human adenovirus F
cacauccagggcacagu

SEQ ID NO: 1583716 - RNA, 17 nt, Human adenovirus F
gcagaacguucuucacu

SEQ ID NO: 1583717 - RNA, 19 nt, Human adenovirus F
guggcucugcagcagcgcc

SEQ ID NO: 1583718 - RNA, 22 nt, Human adenovirus F
uuucacguaguaucucaucccc

SEQ ID NO: 1583719 - RNA, 20 nt, Human adenovirus F
ccaaagagcuugaacauaac

SEQ ID NO: 1583720 - RNA, 15 nt, Human adenovirus F
gccguccacgcuccc

SEQ ID NO: 1583721 - RNA, 13 nt, Human adenovirus F
cagaaaacacauu

SEQ ID NO: 1583722 - RNA, 17 nt, Human adenovirus F
aacgagggggaggacuu

SEQ ID NO: 1583723 - RNA, 19 nt, Human adenovirus F
gcuuuccucuuaaugggca

SEQ ID NO: 1583724 - RNA, 19 nt, Human adenovirus F
gcaaagcucccaaaagguc

SEQ ID NO: 1583725 - RNA, 22 nt, Human adenovirus F
gaugcauuugugggacuuuaug

SEQ ID NO: 1583726 - RNA, 23 nt, Human adenovirus F
gaaggcguggaaaaacuuggaaa

SEQ ID NO: 1583727 - RNA, 12 nt, Human adenovirus F
aaaguccuggcc

SEQ ID NO: 1583728 - RNA, 21 nt, Human adenovirus F
gcucaggaaccaccaccgaaa

SEQ ID NO: 1583729 - RNA, 23 nt, Human adenovirus F
caggguuuuugagcaugaaacug

SEQ ID NO: 1583730 - RNA, 13 nt, Human adenovirus F
gagaguugggggu

SEQ ID NO: 1583731 - RNA, 14 nt, Human adenovirus F
uguucgggugagua

SEQ ID NO: 1583732 - RNA, 17 nt, Human adenovirus F
uccggguuuuauggcac

SEQ ID NO: 1583733 - RNA, 14 nt, Human adenovirus F
agggugugaaggca

SEQ ID NO: 1583734 - RNA, 14 nt, Human adenovirus F
gcuggcccuggccu

SEQ ID NO: 1583735 - RNA, 16 nt, Human adenovirus F
gccgccgugccagaaa

SEQ ID NO: 1583736 - RNA, 16 nt, Human adenovirus F
gaacacuuuugccaaa

SEQ ID NO: 1583737 - RNA, 13 nt, Human adenovirus F
cugccagagggug

SEQ ID NO: 1583738 - RNA, 14 nt, Human adenovirus F
cgggcagccgguca

SEQ ID NO: 1583739 - RNA, 15 nt, Human adenovirus F
uguacgagaagcccu

SEQ ID NO: 1583740 - RNA, 22 nt, Human adenovirus F
accacccggguuuaccuggugg

SEQ ID NO: 1583741 - RNA, 21 nt, Human adenovirus F
acgccucggaguaccugagcc

SEQ ID NO: 1583742 - RNA, 13 nt, Human adenovirus F
gccagacgcaggu

SEQ ID NO: 1583743 - RNA, 20 nt, Human adenovirus F
cuggcccuaaccacccgcaa

SEQ ID NO: 1583744 - RNA, 22 nt, Human adenovirus F
ccggaggcagugguggaugggg

SEQ ID NO: 1583745 - RNA, 16 nt, Human adenovirus F
aacuuucuccacgucc

SEQ ID NO: 1583746 - RNA, 18 nt, Human adenovirus F
ucauccaaguuuuuacaa

SEQ ID NO: 1583747 - RNA, 22 nt, Human adenovirus F
cgacgcuguaugcuauuuucca

SEQ ID NO: 1583748 - RNA, 15 nt, Human adenovirus F
cgcugaccagcagca

SEQ ID NO: 1583749 - RNA, 11 nt, Human adenovirus F
caggagcugcg

SEQ ID NO: 1583750 - RNA, 12 nt, Human adenovirus F
gcgggaagagga

SEQ ID NO: 1583751 - RNA, 14 nt, Human adenovirus F
cucaaguacacuga

SEQ ID NO: 1583752 - RNA, 19 nt, Human adenovirus F
cguugcacgcucugcaucu

SEQ ID NO: 1583753 - RNA, 20 nt, Human adenovirus F
agcucgcaaacaauaaaaga

SEQ ID NO: 1583754 - RNA, 20 nt, Human adenovirus F
acacauccauuaaaauuucu

SEQ ID NO: 1583755 - RNA, 19 nt, Human adenovirus F
uacaaggacaggauguacu

SEQ ID NO: 1583756 - RNA, 21 nt, Human adenovirus F
ucugauggaguuguggaguga

SEQ ID NO: 1583757 - RNA, 13 nt, Human adenovirus F
aaagcgagccaaa

SEQ ID NO: 1583758 - RNA, 18 nt, Human adenovirus F
cgccaucccccgagcgcc

SEQ ID NO: 1583759 - RNA, 22 nt, Human adenovirus F
cgaacacgcugccaacaaaugu

SEQ ID NO: 1583760 - RNA, 18 nt, Human adenovirus F
agccacaauaagcagcuu

SEQ ID NO: 1583761 - RNA, 18 nt, Human adenovirus F
cucaggauuacuccaguc

SEQ ID NO: 1583762 - RNA, 17 nt, Human adenovirus F
auuacgucauugacauu

SEQ ID NO: 1583763 - RNA, 14 nt, Human adenovirus F
gaaacgagccagau

SEQ ID NO: 1583764 - RNA, 17 nt, Human adenovirus F
gguugcccgccagcugg

SEQ ID NO: 1583765 - RNA, 19 nt, Human adenovirus F
acgugggacgacagccagg

SEQ ID NO: 1583766 - RNA, 20 nt, Human adenovirus F
auuugguaacaaggccugga

SEQ ID NO: 1583767 - RNA, 22 nt, Human adenovirus F
ccaggcguacguaccgccucag

SEQ ID NO: 1583768 - RNA, 18 nt, Human adenovirus F
gcgucgcguaacccgccg

SEQ ID NO: 1583769 - RNA, 17 nt, Human adenovirus F
cagcguagcacucccuc

SEQ ID NO: 1583770 - RNA, 15 nt, Human adenovirus F
gucgucggcucugga

SEQ ID NO: 1583771 - RNA, 19 nt, Human adenovirus F
uuacaaaaagagaaucuaa

SEQ ID NO: 1583772 - RNA, 16 nt, Human adenovirus F
ggcagcgacagggcgc

SEQ ID NO: 1583773 - RNA, 21 nt, Human adenovirus F
caaucagcggcuggaaaauag

SEQ ID NO: 1583774 - RNA, 12 nt, Human adenovirus F
uaugaugaguca

SEQ ID NO: 1583775 - RNA, 19 nt, Human adenovirus F
ggauaccgcugcagcugcu

SEQ ID NO: 1583776 - RNA, 20 nt, Human adenovirus F
ccaaggcguaaagacugaca

SEQ ID NO: 1583777 - RNA, 16 nt, Human adenovirus F
aucucauucgcacggc

SEQ ID NO: 1583778 - RNA, 17 nt, Human adenovirus F
gaugaugucgugucugc

SEQ ID NO: 1583779 - RNA, 22 nt, Human adenovirus F
gcaaacggugaacgaggagcgc

SEQ ID NO: 1583780 - RNA, 15 nt, Human adenovirus F
agaaaacgaaaacuu

SEQ ID NO: 1583781 - RNA, 14 nt, Human adenovirus F
ucagaccacaacaa

SEQ ID NO: 1583782 - RNA, 12 nt, Human adenovirus F
ugccagugcagg

SEQ ID NO: 1583783 - RNA, 21 nt, Human adenovirus F
cuuuauuuccuuugucaugua

SEQ ID NO: 1583784 - RNA, 18 nt, Human adenovirus F
uaagggaggcagcagagg

SEQ ID NO: 1583785 - RNA, 18 nt, Human adenovirus F
cagcaguaucaguggagu

SEQ ID NO: 1583786 - RNA, 20 nt, Human adenovirus F
guaugguaacuccucuucuc

SEQ ID NO: 1583787 - RNA, 21 nt, Human adenovirus F
acuccucugugagcuggccug

SEQ ID NO: 1583788 - RNA, 17 nt, Human adenovirus F
acagcagguuaaagcca

SEQ ID NO: 1583789 - RNA, 16 nt, Human adenovirus F
uccccgaaacaaaacc

SEQ ID NO: 1583790 - RNA, 16 nt, Human adenovirus F
guaucagaauguaacu

SEQ ID NO: 1583791 - RNA, 14 nt, Human adenovirus F
cuaauggccagagg

SEQ ID NO: 1583792 - RNA, 18 nt, Human adenovirus F
ucaaauacauaggcauua

SEQ ID NO: 1583793 - RNA, 23 nt, Human adenovirus F
aucgcuggacuuuacaaaaagag

SEQ ID NO: 1583794 - RNA, 21 nt, Human adenovirus F
cagcagugcuuggaagagcaa

SEQ ID NO: 1583795 - RNA, 12 nt, Human adenovirus F
uaugggcagcau

SEQ ID NO: 1583796 - RNA, 22 nt, Human adenovirus F
ucaaccaacuaacacugcgauu

SEQ ID NO: 1583797 - RNA, 18 nt, Human adenovirus F
ccaacggcuugcaagaaa

SEQ ID NO: 1583798 - RNA, 23 nt, Human adenovirus F
cagaggaaguuucagacgaggag

SEQ ID NO: 1583799 - RNA, 17 nt, Human adenovirus F
cuugcgcaacuucuuuu

SEQ ID NO: 1583800 - RNA, 22 nt, Human adenovirus F
cauaacuaaaaaaacuccaccc

SEQ ID NO: 1583801 - RNA, 13 nt, Human adenovirus F
auugagugggaag

SEQ ID NO: 1583802 - RNA, 17 nt, Human adenovirus F
ccaaccaagaaauacaa

SEQ ID NO: 1583803 - RNA, 21 nt, Human adenovirus F
caggagcccgaagagaugagg

SEQ ID NO: 1583804 - RNA, 22 nt, Human adenovirus F
gggccagacuacuuuuuccaaa

SEQ ID NO: 1583805 - RNA, 21 nt, Human adenovirus F
agcccucaaggaaugcacaca

SEQ ID NO: 1583806 - RNA, 19 nt, Human adenovirus F
aaugugucuccgcugggag

SEQ ID NO: 1583807 - RNA, 14 nt, Human adenovirus F
ccugcaagaucucc

SEQ ID NO: 1583808 - RNA, 21 nt, Human adenovirus F
aguauacauuugaacagcuga

SEQ ID NO: 1583809 - RNA, 21 nt, Human adenovirus F
aaucacgaccucccaaagucc

SEQ ID NO: 1583810 - RNA, 18 nt, Human adenovirus F
gaccgcuagggcgcgcuc

SEQ ID NO: 1583811 - RNA, 15 nt, Human adenovirus F
gccuugcaagcagcu

SEQ ID NO: 1583812 - RNA, 16 nt, Human adenovirus F
ugacaacggacgugag

SEQ ID NO: 1583813 - RNA, 16 nt, Human adenovirus F
aggaaugcacacagac

SEQ ID NO: 1583814 - RNA, 14 nt, Human adenovirus F
uaaccuucgcugcu

SEQ ID NO: 1583815 - RNA, 15 nt, Human adenovirus F
acguaaccuuguauu

SEQ ID NO: 1583816 - RNA, 20 nt, Human adenovirus F
aaauuaauugcacuaacucc

SEQ ID NO: 1583817 - RNA, 16 nt, Human adenovirus F
gcuacacgcggcccgu

SEQ ID NO: 1583818 - RNA, 23 nt, Human adenovirus F
caccguucccacuguuucuccuc

SEQ ID NO: 1583819 - RNA, 19 nt, Human adenovirus F
aucgcagcgggcaggagcc

SEQ ID NO: 1583820 - RNA, 15 nt, Human adenovirus F
ccaacugccaccucc

SEQ ID NO: 1583821 - RNA, 15 nt, Human adenovirus F
gacaguggcgcgcuc

SEQ ID NO: 1583822 - RNA, 15 nt, Human adenovirus F
gguuugccagacuuu

SEQ ID NO: 1583823 - RNA, 17 nt, Human adenovirus F
gccgagcuuuuacuggg

SEQ ID NO: 1583824 - RNA, 16 nt, Human adenovirus F
uugcacuuaacuguuc

SEQ ID NO: 1583825 - RNA, 17 nt, Human adenovirus F
agcaugcuuagccucgg

SEQ ID NO: 1583826 - RNA, 20 nt, Human adenovirus F
ccuccguggccuugcaagca

SEQ ID NO: 1583827 - RNA, 14 nt, Human adenovirus F
auuucgugggaagg

SEQ ID NO: 1583828 - RNA, 19 nt, Human adenovirus F
ugaccccaaugacaggcug

SEQ ID NO: 1583829 - RNA, 13 nt, Human adenovirus F
ggcagcagggugc

SEQ ID NO: 1583830 - RNA, 20 nt, Human adenovirus F
ccaaaaggucaggugcagaa

SEQ ID NO: 1583831 - RNA, 17 nt, Human adenovirus F
gcuguuuaccaaaggcu

SEQ ID NO: 1583832 - RNA, 22 nt, Human adenovirus F
ugccaaagcggcaaaagcuuga

SEQ ID NO: 1583833 - RNA, 17 nt, Human adenovirus F
gcuggccgugggcgaca

SEQ ID NO: 1583834 - RNA, 14 nt, Human adenovirus F
agcuucccaacacu

SEQ ID NO: 1583835 - RNA, 17 nt, Human adenovirus F
uguugcauguuggaaag

SEQ ID NO: 1583836 - RNA, 16 nt, Human adenovirus F
agccauccgcaaggau

SEQ ID NO: 1583837 - RNA, 22 nt, Human adenovirus F
gcguggccuccguggccuugca

SEQ ID NO: 1583838 - RNA, 20 nt, Human adenovirus F
aaguuaccaaagacaaaauc

SEQ ID NO: 1583839 - RNA, 19 nt, Human adenovirus F
acugaccccauuacuacca

SEQ ID NO: 1583840 - RNA, 13 nt, Human adenovirus F
gccgcggcggcua

SEQ ID NO: 1583841 - RNA, 16 nt, Human adenovirus F
aagguaaucaggagaa

SEQ ID NO: 1583842 - RNA, 22 nt, Human adenovirus F
uguaacaucccucacuaccauu

SEQ ID NO: 1583843 - RNA, 14 nt, Human adenovirus F
caauggaacauuaa

SEQ ID NO: 1583844 - RNA, 21 nt, Human adenovirus F
cgucaaugccaauaccagcaa

SEQ ID NO: 1583845 - RNA, 18 nt, Human adenovirus F
uauugcuuuauugccacc

SEQ ID NO: 1583846 - RNA, 18 nt, Human adenovirus F
cccggacuuggcgugcag

SEQ ID NO: 1583847 - RNA, 17 nt, Human adenovirus F
agcggaauaaguccggc

SEQ ID NO: 1583848 - RNA, 22 nt, Human adenovirus F
caccaggucguaaugaggacau

SEQ ID NO: 1583849 - RNA, 16 nt, Human adenovirus F
gcacgugucggcggcc

SEQ ID NO: 1583850 - RNA, 19 nt, Human adenovirus F
ccccggcggcgggugcagu

SEQ ID NO: 1583851 - RNA, 18 nt, Human adenovirus F
gcaacgcugcaggcgcuc

SEQ ID NO: 1583852 - RNA, 23 nt, Human adenovirus F
uagcucuaaauaugucacagccu

SEQ ID NO: 1583853 - RNA, 16 nt, Human adenovirus F
gcauaacccuggaauu

SEQ ID NO: 1583854 - RNA, 14 nt, Human adenovirus F
uuauacacucccuu

SEQ ID NO: 1583855 - RNA, 15 nt, Human adenovirus F
cagcaguccgucagc

SEQ ID NO: 1583856 - RNA, 20 nt, Human adenovirus F
cagagcucugcaaaaacaaa

SEQ ID NO: 1583857 - RNA, 18 nt, Human adenovirus F
gcaccauuguacgagaag

SEQ ID NO: 1583858 - RNA, 21 nt, Human adenovirus F
uacccuuacgaacacuacaau

SEQ ID NO: 1583859 - RNA, 12 nt, Human adenovirus F
uuuccaccaggg

SEQ ID NO: 1583860 - RNA, 21 nt, Human adenovirus F
ucccgaagccuucaggcagca

SEQ ID NO: 1583861 - RNA, 15 nt, Human adenovirus F
cugagggccggccug

SEQ ID NO: 1583862 - RNA, 19 nt, Human adenovirus F
gaaacugaugcuuuuucuc

SEQ ID NO: 1583863 - RNA, 19 nt, Human adenovirus F
uggaggcuugggaggauuu

SEQ ID NO: 1583864 - RNA, 16 nt, Human adenovirus F
ccugcaaagccaaccu

SEQ ID NO: 1583865 - RNA, 17 nt, Human adenovirus F
aaacgcaccauugaagu

SEQ ID NO: 1583866 - RNA, 16 nt, Human adenovirus F
cugucaggcucugaga

SEQ ID NO: 1583867 - RNA, 18 nt, Human adenovirus F
uagugcguccgcccgcuc

SEQ ID NO: 1583868 - RNA, 14 nt, Human adenovirus F
cugcuccuggcgag

SEQ ID NO: 1583869 - RNA, 18 nt, Human adenovirus F
caccaauaugcccaacau

SEQ ID NO: 1583870 - RNA, 21 nt, Human adenovirus F
cguggagccgacuucaagccc

SEQ ID NO: 1583871 - RNA, 22 nt, Human adenovirus F
uuagcacugcgguggaggccau

SEQ ID NO: 1583872 - RNA, 23 nt, Human adenovirus F
ccguuaaucucccuccccccuuc

SEQ ID NO: 1583873 - RNA, 23 nt, Human adenovirus F
caagacccgguacaggugggcuu

SEQ ID NO: 1583874 - RNA, 17 nt, Human adenovirus F
cucugaucuuauggaag

SEQ ID NO: 1583875 - RNA, 13 nt, Human adenovirus F
gcccuggccugga

SEQ ID NO: 1583876 - RNA, 22 nt, Human adenovirus F
ucgagguguaacaucccucacu

SEQ ID NO: 1583877 - RNA, 22 nt, Human adenovirus F
agaccucauccgccauugccac

SEQ ID NO: 1583878 - RNA, 20 nt, Human adenovirus F
gcuuaucccgcgcuaaaucu

SEQ ID NO: 1583879 - RNA, 20 nt, Human adenovirus F
gcagcaccaccugcccuucc

SEQ ID NO: 1583880 - RNA, 13 nt, Human adenovirus F
gugcuggggaaug

SEQ ID NO: 1583881 - RNA, 21 nt, Human adenovirus F
uguguuuuuuacugcuaaagg

SEQ ID NO: 1583882 - RNA, 21 nt, Human adenovirus F
ggcgcuuucaguuggagcagc

SEQ ID NO: 1583883 - RNA, 16 nt, Human adenovirus F
agacgacugggcggcg

SEQ ID NO: 1583884 - RNA, 20 nt, Human adenovirus F
ccccgugggggaccgagcca

SEQ ID NO: 1583885 - RNA, 14 nt, Human adenovirus F
gugagguaugauga

SEQ ID NO: 1583886 - RNA, 15 nt, Human adenovirus F
ggaggcagcagagga

SEQ ID NO: 1583887 - RNA, 21 nt, Human adenovirus F
aaaccgcgccauagcuggagg

SEQ ID NO: 1583888 - RNA, 18 nt, Human adenovirus F
caacugccaccuccaccg

SEQ ID NO: 1583889 - RNA, 16 nt, Human adenovirus F
ccagugcaggaagagg

SEQ ID NO: 1583890 - RNA, 14 nt, Human adenovirus F
aacaccgcuuccac

SEQ ID NO: 1583891 - RNA, 17 nt, Human adenovirus F
gagaggcgguggcgcag

SEQ ID NO: 1583892 - RNA, 18 nt, Human adenovirus F
cgguggcucugcagcagc

SEQ ID NO: 1583893 - RNA, 20 nt, Human adenovirus F
uggcgccggcgggaagagga

SEQ ID NO: 1583894 - RNA, 22 nt, Human adenovirus F
aacucgcaggccagucggcagg

SEQ ID NO: 1583895 - RNA, 14 nt, Human adenovirus F
cgcgcaccucuugu

SEQ ID NO: 1583896 - RNA, 13 nt, Human adenovirus F
uaacugagccuga

SEQ ID NO: 1583897 - RNA, 16 nt, Human adenovirus F
acacaaugcaaaaugu

SEQ ID NO: 1583898 - RNA, 16 nt, Human adenovirus F
ucaagaaacacaaaca

SEQ ID NO: 1583899 - RNA, 19 nt, Human adenovirus F
caucgcugaccagcagcag

SEQ ID NO: 1583900 - RNA, 14 nt, Human adenovirus F
ugauccacuuacaa

SEQ ID NO: 1583901 - RNA, 22 nt, Human adenovirus F
agccguccacgcucccggaaau

SEQ ID NO: 1583902 - RNA, 15 nt, Human adenovirus F
ugaccaaggacuggu

SEQ ID NO: 1583903 - RNA, 16 nt, Human adenovirus F
auuucacgcaaagucg

SEQ ID NO: 1583904 - RNA, 20 nt, Human adenovirus F
ccccaccguggcucccaccc

SEQ ID NO: 1583905 - RNA, 13 nt, Human adenovirus F
cugccagugcagg

SEQ ID NO: 1583906 - RNA, 15 nt, Human adenovirus F
agggucgcaggguuc

SEQ ID NO: 1583907 - RNA, 14 nt, Human adenovirus F
cugcagcauugcca

SEQ ID NO: 1583908 - RNA, 15 nt, Human adenovirus F
ccaaagcagagcucu

SEQ ID NO: 1583909 - RNA, 18 nt, Human adenovirus F
gccggcaacgcugcaggc

SEQ ID NO: 1583910 - RNA, 11 nt, Human adenovirus F
ggccugcaaga

SEQ ID NO: 1583911 - RNA, 22 nt, Human adenovirus F
auggcagcagauuuuggacugu

SEQ ID NO: 1583912 - RNA, 19 nt, Human adenovirus F
caaccuacccagauuuccu

SEQ ID NO: 1583913 - RNA, 11 nt, Human adenovirus F
gucugccaaaa

SEQ ID NO: 1583914 - RNA, 19 nt, Human adenovirus F
uuaaucucccuccccccuu

SEQ ID NO: 1583915 - RNA, 22 nt, Human adenovirus F
aucccgcgcuaaaucuuccucc

SEQ ID NO: 1583916 - RNA, 23 nt, Human adenovirus F
cggcgaugaaacuugauuuccau

SEQ ID NO: 1583917 - RNA, 14 nt, Human adenovirus F
gaaagcgugaugga

SEQ ID NO: 1583918 - RNA, 12 nt, Human adenovirus F
aacacaaacacg

SEQ ID NO: 1583919 - RNA, 14 nt, Human adenovirus F
cguggcugcaaggu

SEQ ID NO: 1583920 - RNA, 13 nt, Human adenovirus F
aaguuacaaaaug

SEQ ID NO: 1583921 - RNA, 21 nt, Human adenovirus F
cgcccucuucugcaccugcac

SEQ ID NO: 1583922 - RNA, 16 nt, Human adenovirus F
gaagguugacuugcag

SEQ ID NO: 1583923 - RNA, 23 nt, Human adenovirus F
cucucagcugcuaaccugugcag

SEQ ID NO: 1583924 - RNA, 21 nt, Human adenovirus F
uuggauccagugcaggaagag

SEQ ID NO: 1583925 - RNA, 18 nt, Human adenovirus F
caacggacgugagagagg

SEQ ID NO: 1583926 - RNA, 13 nt, Human adenovirus F
cucccauucauug

SEQ ID NO: 1583927 - RNA, 16 nt, Human adenovirus F
ccuucaggcagcagcc

SEQ ID NO: 1583928 - RNA, 17 nt, Human adenovirus F
ccaagaaauacaaaggc

SEQ ID NO: 1583929 - RNA, 15 nt, Human adenovirus F
ucaaggaaacaacag

SEQ ID NO: 1583930 - RNA, 13 nt, Human adenovirus F
ugaacccacccuc

SEQ ID NO: 1583931 - RNA, 15 nt, Human adenovirus F
cauguacacuauggu

SEQ ID NO: 1583932 - RNA, 14 nt, Human adenovirus F
agaauguaacucuc

SEQ ID NO: 1583933 - RNA, 14 nt, Human adenovirus F
gcggggcaggagcu

SEQ ID NO: 1583934 - RNA, 24 nt, Human adenovirus F
aaaaucguagguuuaaauuacacu

SEQ ID NO: 1583935 - RNA, 12 nt, Human adenovirus F
acaaggccugga

SEQ ID NO: 1583936 - RNA, 18 nt, Human adenovirus F
cuggcuccgcggcacggc

SEQ ID NO: 1583937 - RNA, 21 nt, Human adenovirus F
gaggcuuuccgcgaggccaug

SEQ ID NO: 1583938 - RNA, 11 nt, Human adenovirus F
cuucagcacuu

SEQ ID NO: 1583939 - RNA, 18 nt, Human adenovirus F
caaaucgcgcaaccagug

SEQ ID NO: 1583940 - RNA, 17 nt, Human adenovirus F
ccccagcgcccuggaua

SEQ ID NO: 1583941 - RNA, 20 nt, Human adenovirus F
cgccaauuuuucggggguca

SEQ ID NO: 1583942 - RNA, 22 nt, Human adenovirus F
gaugcgccucaugagcugggag

SEQ ID NO: 1583943 - RNA, 18 nt, Human adenovirus F
acuaaaaaaacuccaccc

SEQ ID NO: 1583944 - RNA, 18 nt, Human adenovirus F
gcaucucuugaaugaggu

SEQ ID NO: 1583945 - RNA, 22 nt, Human adenovirus F
cgaggccaaacccccguuccca

SEQ ID NO: 1583946 - RNA, 13 nt, Human adenovirus F
aacugccaccucc

SEQ ID NO: 1583947 - RNA, 20 nt, Human adenovirus F
ccagucgcaugaauuggcuu

SEQ ID NO: 1583948 - RNA, 22 nt, Human adenovirus F
uggccugaauuuuuagguuggc

SEQ ID NO: 1583949 - RNA, 16 nt, Human adenovirus F
uacuuuuacagaauuc

SEQ ID NO: 1583950 - RNA, 12 nt, Human adenovirus F
acaacaaaucau

SEQ ID NO: 1583951 - RNA, 14 nt, Human adenovirus F
uacacaacaaauca

SEQ ID NO: 1583952 - RNA, 20 nt, Human adenovirus F
ccaggcguggccuccguggc

SEQ ID NO: 1583953 - RNA, 15 nt, Human adenovirus F
gugggcguccagugg

SEQ ID NO: 1583954 - RNA, 21 nt, Human adenovirus F
uaucuacgccuccaccaccuu

SEQ ID NO: 1583955 - RNA, 16 nt, Human adenovirus F
ucuuaaguuauacagu

SEQ ID NO: 1583956 - RNA, 17 nt, Human adenovirus F
acgucauccgccuccac

SEQ ID NO: 1583957 - RNA, 21 nt, Human adenovirus F
ccgcagcugcuuguaucacag

SEQ ID NO: 1583958 - RNA, 15 nt, Human adenovirus F
ccugcaaagccaacc

SEQ ID NO: 1583959 - RNA, 23 nt, Human adenovirus F
ccucuacuauuaccgucaucucu

SEQ ID NO: 1583960 - RNA, 17 nt, Human adenovirus F
agcagauggagagcugg

SEQ ID NO: 1583961 - RNA, 22 nt, Human adenovirus F
gaaucccgcuauguuggcggcc

SEQ ID NO: 1583962 - RNA, 20 nt, Human adenovirus F
cugcaaaaaagccgucugag

SEQ ID NO: 1583963 - RNA, 13 nt, Human adenovirus F
gacucuggugaau

SEQ ID NO: 1583964 - RNA, 22 nt, Human adenovirus F
ccggcuggggacuuugcuccgc

SEQ ID NO: 1583965 - RNA, 14 nt, Human adenovirus F
cucaacuuuaacua

SEQ ID NO: 1583966 - RNA, 21 nt, Human adenovirus F
uaagcuggguggaaagcaagu

SEQ ID NO: 1583967 - RNA, 17 nt, Human adenovirus F
ucgucgcccucuucugc

SEQ ID NO: 1583968 - RNA, 23 nt, Human adenovirus F
cugaggaggaggccauccuggac

SEQ ID NO: 1583969 - RNA, 20 nt, Human adenovirus F
caagcaaagacagagcuuua

SEQ ID NO: 1583970 - RNA, 21 nt, Human adenovirus F
aggguguacguuuguugcaug

SEQ ID NO: 1583971 - RNA, 15 nt, Human adenovirus F
caaaaugaguggcuu

SEQ ID NO: 1583972 - RNA, 16 nt, Human adenovirus F
ucgccaucaugagucu

SEQ ID NO: 1583973 - RNA, 20 nt, Human adenovirus F
gauggggguucgccuggaga

SEQ ID NO: 1583974 - RNA, 23 nt, Human adenovirus F
uucaaagacgccgccuugcaugc

SEQ ID NO: 1583975 - RNA, 13 nt, Human adenovirus F
cacaauaagcagc

SEQ ID NO: 1583976 - RNA, 13 nt, Human adenovirus F
cugggacagccua

SEQ ID NO: 1583977 - RNA, 18 nt, Human adenovirus F
ccugaccgaccuggggca

SEQ ID NO: 1583978 - RNA, 17 nt, Human adenovirus F
ggcggaggugccccaga

SEQ ID NO: 1583979 - RNA, 13 nt, Human adenovirus F
acggcaccugcga

SEQ ID NO: 1583980 - RNA, 21 nt, Human adenovirus F
auuauccguuggaauuuuccu

SEQ ID NO: 1583981 - RNA, 22 nt, Human adenovirus F
gagcaguuuggcaauggaacgc

SEQ ID NO: 1583982 - RNA, 12 nt, Human adenovirus F
cuuuacaaaaag

SEQ ID NO: 1583983 - RNA, 20 nt, Human adenovirus F
ucccugggaugcagguagga

SEQ ID NO: 1583984 - RNA, 22 nt, Human adenovirus F
cgggcacugcauacaacucccu

SEQ ID NO: 1583985 - RNA, 19 nt, Human adenovirus F
ugggcacguuugacaaacg

SEQ ID NO: 1583986 - RNA, 16 nt, Human adenovirus F
acggcguucuagccaa

SEQ ID NO: 1583987 - RNA, 15 nt, Human adenovirus F
cuacggaggaagagg

SEQ ID NO: 1583988 - RNA, 15 nt, Human adenovirus F
gcucgucguggcaug

SEQ ID NO: 1583989 - RNA, 15 nt, Human adenovirus F
guggauggggaagga

SEQ ID NO: 1583990 - RNA, 18 nt, Human adenovirus F
uccgcccaugccggcucc

SEQ ID NO: 1583991 - RNA, 14 nt, Human adenovirus F
cuuauacaccuccc

SEQ ID NO: 1583992 - RNA, 15 nt, Human adenovirus F
ggcgccggcgggaag

SEQ ID NO: 1583993 - RNA, 13 nt, Human adenovirus F
gcacagcaaacac

SEQ ID NO: 1583994 - RNA, 22 nt, Human adenovirus F
gguguugacccgcuuggaggag

SEQ ID NO: 1583995 - RNA, 17 nt, Human adenovirus F
cauaacugaacaauaaa

SEQ ID NO: 1583996 - RNA, 13 nt, Human adenovirus F
cugccacugaaac

SEQ ID NO: 1583997 - RNA, 21 nt, Human adenovirus F
aucacuaaaaccaacaaaauc

SEQ ID NO: 1583998 - RNA, 18 nt, Human adenovirus F
aggacgucgggccaugcg

SEQ ID NO: 1583999 - RNA, 15 nt, Human adenovirus F
cggaaggaaacgcug

SEQ ID NO: 1584000 - RNA, 22 nt, Human adenovirus F
caagauaugucugccaaaaugg

SEQ ID NO: 1584001 - RNA, 17 nt, Human adenovirus F
gcgugcaagugggcuca

SEQ ID NO: 1584002 - RNA, 16 nt, Human adenovirus F
aucgcugaccagcagc

SEQ ID NO: 1584003 - RNA, 19 nt, Human adenovirus F
auucuugagcaggccgccc

SEQ ID NO: 1584004 - RNA, 18 nt, Human adenovirus F
agacauucuugagcaggc

SEQ ID NO: 1584005 - RNA, 22 nt, Human adenovirus F
cagaggaaguuucagacgagga

SEQ ID NO: 1584006 - RNA, 13 nt, Human adenovirus F
cagaauguggugg

SEQ ID NO: 1584007 - RNA, 23 nt, Human adenovirus F
ucgcgcaacggcaaucccagcag

SEQ ID NO: 1584008 - RNA, 18 nt, Human adenovirus F
caaaacuuucaacaaaaa

SEQ ID NO: 1584009 - RNA, 20 nt, Human adenovirus F
ccuaguaaaggcgaaaagcg

SEQ ID NO: 1584010 - RNA, 23 nt, Human adenovirus F
cucuguuugcugcacugccaucu

SEQ ID NO: 1584011 - RNA, 21 nt, Human adenovirus F
cguguagccuuuaacugcgca

SEQ ID NO: 1584012 - RNA, 15 nt, Human adenovirus F
cucccaaagugcugu

SEQ ID NO: 1584013 - RNA, 16 nt, Human adenovirus F
caucaggggcucagga

SEQ ID NO: 1584014 - RNA, 23 nt, Human adenovirus F
cgacgagcuugcucgcuggcuag

SEQ ID NO: 1584015 - RNA, 22 nt, Human adenovirus F
acaguggaauuggaaugccugc

SEQ ID NO: 1584016 - RNA, 20 nt, Human adenovirus F
ucgccccugugaguguggag

SEQ ID NO: 1584017 - RNA, 23 nt, Human adenovirus F
cagcagguuaaagccaacuccaa

SEQ ID NO: 1584018 - RNA, 15 nt, Human adenovirus F
aaguauuacaaaugc

SEQ ID NO: 1584019 - RNA, 21 nt, Human adenovirus F
ugggauuugccgcagccagug

SEQ ID NO: 1584020 - RNA, 14 nt, Human adenovirus F
cacuuugccagagg

SEQ ID NO: 1584021 - RNA, 17 nt, Human adenovirus F
cagacgucucaagcaac

SEQ ID NO: 1584022 - RNA, 22 nt, Human adenovirus F
guucucgcucgcuacauccauu

SEQ ID NO: 1584023 - RNA, 14 nt, Human adenovirus F
uggccaacugccac

SEQ ID NO: 1584024 - RNA, 21 nt, Human adenovirus F
gcagugucaauagcauacaga

SEQ ID NO: 1584025 - RNA, 23 nt, Human adenovirus F
cuggauacuggcaagagccaccu

SEQ ID NO: 1584026 - RNA, 11 nt, Human adenovirus F
uauaagcaggu

SEQ ID NO: 1584027 - RNA, 20 nt, Human adenovirus F
aauggaacauuaauccaaug

SEQ ID NO: 1584028 - RNA, 17 nt, Human adenovirus F
gaccacaacaacaaacg

SEQ ID NO: 1584029 - RNA, 23 nt, Human adenovirus F
auaacgcuuuaucuguaaaacuu

SEQ ID NO: 1584030 - RNA, 15 nt, Human adenovirus F
cccacgccaagccug

SEQ ID NO: 1584031 - RNA, 14 nt, Human adenovirus F
ggaaaucagaugca

SEQ ID NO: 1584032 - RNA, 20 nt, Human adenovirus F
caguguaaagcauaacauga

SEQ ID NO: 1584033 - RNA, 17 nt, Human adenovirus F
aauauugcggagccuga

SEQ ID NO: 1584034 - RNA, 17 nt, Human adenovirus F
gacgaauugcagcccac

SEQ ID NO: 1584035 - RNA, 21 nt, Human adenovirus F
guacgaagcuagcauaaaaga

SEQ ID NO: 1584036 - RNA, 14 nt, Human adenovirus F
gcuggaccaaagca

SEQ ID NO: 1584037 - RNA, 20 nt, Human adenovirus F
auacgggguuagcgcacugg

SEQ ID NO: 1584038 - RNA, 15 nt, Human adenovirus F
uuggagaacaugaaa

SEQ ID NO: 1584039 - RNA, 20 nt, Human adenovirus F
gcagcgggaagagaggcagc

SEQ ID NO: 1584040 - RNA, 21 nt, Human adenovirus F
ggcgcagcguccgcacgguuu

SEQ ID NO: 1584041 - RNA, 21 nt, Human adenovirus F
ccugacuauuuuaugcagaca

SEQ ID NO: 1584042 - RNA, 18 nt, Human adenovirus F
agcgugguaaaagggugc

SEQ ID NO: 1584043 - RNA, 12 nt, Human adenovirus F
agguuuccaaau

SEQ ID NO: 1584044 - RNA, 14 nt, Human adenovirus F
cugagccugauccc

SEQ ID NO: 1584045 - RNA, 24 nt, Human adenovirus F
gaucagguucccgugucaccugca

SEQ ID NO: 1584046 - RNA, 13 nt, Human adenovirus F
ggggaauggagcu

SEQ ID NO: 1584047 - RNA, 20 nt, Human adenovirus F
agggcaaaagugucgcgcac

SEQ ID NO: 1584048 - RNA, 15 nt, Human adenovirus F
acacuuucaccgccu

SEQ ID NO: 1584049 - RNA, 18 nt, Human adenovirus F
ugggcauaguugcuccca

SEQ ID NO: 1584050 - RNA, 14 nt, Human adenovirus F
gccccccggcggcg

SEQ ID NO: 1584051 - RNA, 17 nt, Human adenovirus F
cuaaugccuuaacauuu

SEQ ID NO: 1584052 - RNA, 16 nt, Human adenovirus F
uggggcggcgaccuga

SEQ ID NO: 1584053 - RNA, 18 nt, Human adenovirus F
gauuucauuuaccacccc

SEQ ID NO: 1584054 - RNA, 20 nt, Human adenovirus F
aagguugacuugcaggagac

SEQ ID NO: 1584055 - RNA, 17 nt, Human adenovirus F
gaaaaccauuuugcgca

SEQ ID NO: 1584056 - RNA, 20 nt, Human adenovirus F
aguccaaagcagagcucugc

SEQ ID NO: 1584057 - RNA, 20 nt, Human adenovirus F
uugcccgccagcuggcaaac

SEQ ID NO: 1584058 - RNA, 17 nt, Human adenovirus F
cauggcgggcaguggcc

SEQ ID NO: 1584059 - RNA, 17 nt, Human adenovirus F
gccuccguguuuuuuga

SEQ ID NO: 1584060 - RNA, 20 nt, Human adenovirus F
gcucugcagcagcgcccgcc

SEQ ID NO: 1584061 - RNA, 21 nt, Human adenovirus F
ccuaucacuaaaaccaacaaa

SEQ ID NO: 1584062 - RNA, 12 nt, Human adenovirus F
ggcaggagcccg

SEQ ID NO: 1584063 - RNA, 12 nt, Human adenovirus F
cuuuaucuguaa

SEQ ID NO: 1584064 - RNA, 19 nt, Human adenovirus F
ucgcuccagguggggcggc

SEQ ID NO: 1584065 - RNA, 15 nt, Human adenovirus F
ucagcaugagcaagc

SEQ ID NO: 1584066 - RNA, 14 nt, Human adenovirus F
uggaguuguggagu

SEQ ID NO: 1584067 - RNA, 14 nt, Human adenovirus F
auuaaguugggagg

SEQ ID NO: 1584068 - RNA, 14 nt, Human adenovirus F
cccugaucagccag

SEQ ID NO: 1584069 - RNA, 18 nt, Human adenovirus F
ggccauccuggaccugga

SEQ ID NO: 1584070 - RNA, 12 nt, Human adenovirus F
uacagccccuac

SEQ ID NO: 1584071 - RNA, 12 nt, Human adenovirus F
ccggaaaaccaa

SEQ ID NO: 1584072 - RNA, 20 nt, Human adenovirus F
acgccuuacauguggagcua

SEQ ID NO: 1584073 - RNA, 22 nt, Human adenovirus F
cuugcaaaacuuucgcuccuuu

SEQ ID NO: 1584074 - RNA, 21 nt, Human adenovirus F
gcacaguaaucaaggguuuca

SEQ ID NO: 1584075 - RNA, 19 nt, Human adenovirus F
acggcggaugguggcaagg

SEQ ID NO: 1584076 - RNA, 12 nt, Human adenovirus F
gaugugccaacg

SEQ ID NO: 1584077 - RNA, 15 nt, Human adenovirus F
agcauaauaacucug

SEQ ID NO: 1584078 - RNA, 23 nt, Human adenovirus F
gccacacugugcacacacgguuu

SEQ ID NO: 1584079 - RNA, 20 nt, Human adenovirus F
gauauagccaaccaggccuu

SEQ ID NO: 1584080 - RNA, 18 nt, Human adenovirus F
caggcagcagccccaggc

SEQ ID NO: 1584081 - RNA, 13 nt, Human adenovirus F
auucuccaaagca

SEQ ID NO: 1584082 - RNA, 17 nt, Human adenovirus F
ccacuucuauugcacuu

SEQ ID NO: 1584083 - RNA, 14 nt, Human adenovirus F
aucacuguuaaugg

SEQ ID NO: 1584084 - RNA, 17 nt, Human adenovirus F
aaauacagucaagcucu

SEQ ID NO: 1584085 - RNA, 11 nt, Human adenovirus F
uuagcucugaa

SEQ ID NO: 1584086 - RNA, 16 nt, Human adenovirus F
ccgagcagcugcguac

SEQ ID NO: 1584087 - RNA, 19 nt, Human adenovirus F
gggaacuguccagggaguc

SEQ ID NO: 1584088 - RNA, 14 nt, Human adenovirus F
ugcauuuuggccug

SEQ ID NO: 1584089 - RNA, 14 nt, Human adenovirus F
cuggucccuucccg

SEQ ID NO: 1584090 - RNA, 13 nt, Human adenovirus F
ggucgcaggguuc

SEQ ID NO: 1584091 - RNA, 16 nt, Human adenovirus F
cuaaugcacagccugc

SEQ ID NO: 1584092 - RNA, 18 nt, Human adenovirus F
agggugugaaggcaaagg

SEQ ID NO: 1584093 - RNA, 13 nt, Human adenovirus F
cuuccuucacucc

SEQ ID NO: 1584094 - RNA, 21 nt, Human adenovirus F
cgagaucacgucugggguuca

SEQ ID NO: 1584095 - RNA, 17 nt, Human adenovirus F
augccuccagcacugcc

SEQ ID NO: 1584096 - RNA, 16 nt, Human adenovirus F
augagcugggagaaag

SEQ ID NO: 1584097 - RNA, 15 nt, Human adenovirus F
aguaaucccugucuc

SEQ ID NO: 1584098 - RNA, 21 nt, Human adenovirus F
aagcuucuuguacucaaaugu

SEQ ID NO: 1584099 - RNA, 12 nt, Human adenovirus F
ggccgguaacgc

SEQ ID NO: 1584100 - RNA, 14 nt, Human adenovirus F
gaaacgaacacgcu

SEQ ID NO: 1584101 - RNA, 13 nt, Human adenovirus F
aauggaaacugau

SEQ ID NO: 1584102 - RNA, 14 nt, Human adenovirus F
ggaugauggaggga

SEQ ID NO: 1584103 - RNA, 14 nt, Human adenovirus F
ccucguuaagccac

SEQ ID NO: 1584104 - RNA, 14 nt, Human adenovirus F
cauaagaagccagc

SEQ ID NO: 1584105 - RNA, 15 nt, Human adenovirus F
gauaccgcugcagcu

SEQ ID NO: 1584106 - RNA, 17 nt, Human adenovirus F
gugucuccgcugggaga

SEQ ID NO: 1584107 - RNA, 13 nt, Human adenovirus F
gacagccagcugu

SEQ ID NO: 1584108 - RNA, 20 nt, Human adenovirus F
cauuaagucauuugguaaca

SEQ ID NO: 1584109 - RNA, 19 nt, Human adenovirus F
accaaucacgaccucccaa

SEQ ID NO: 1584110 - RNA, 14 nt, Human adenovirus F
gcucaucugcggcc

SEQ ID NO: 1584111 - RNA, 20 nt, Human adenovirus F
cagcgcccgggcccuggagg

SEQ ID NO: 1584112 - RNA, 21 nt, Human adenovirus F
ccguucccacuguuucuccuc

SEQ ID NO: 1584113 - RNA, 21 nt, Human adenovirus F
gccuuucacccucgucgcccu

SEQ ID NO: 1584114 - RNA, 22 nt, Human adenovirus F
ucuuccaccgguccuagaccug

SEQ ID NO: 1584115 - RNA, 21 nt, Human adenovirus F
guaguugagcgugguggcaau

SEQ ID NO: 1584116 - RNA, 22 nt, Human adenovirus F
guuagguacuauaacaauuaaa

SEQ ID NO: 1584117 - RNA, 19 nt, Human adenovirus F
ccuacccacgaaaaggugu

SEQ ID NO: 1584118 - RNA, 21 nt, Human adenovirus F
ucaucgaagccguugauguua

SEQ ID NO: 1584119 - RNA, 18 nt, Human adenovirus F
gauuuucuuugccaccuu

SEQ ID NO: 1584120 - RNA, 17 nt, Human adenovirus F
gcagcaguccgucagcu

SEQ ID NO: 1584121 - RNA, 17 nt, Human adenovirus F
ccugcccuuccucccaa

SEQ ID NO: 1584122 - RNA, 15 nt, Human adenovirus F
cuagacgaggaggac

SEQ ID NO: 1584123 - RNA, 18 nt, Human adenovirus F
aguuagcucugaacacuu

SEQ ID NO: 1584124 - RNA, 15 nt, Human adenovirus F
ggcaauaggcacaga

SEQ ID NO: 1584125 - RNA, 12 nt, Human adenovirus F
ccagcacugccg

SEQ ID NO: 1584126 - RNA, 16 nt, Human adenovirus F
gagcaaguggagcaag

SEQ ID NO: 1584127 - RNA, 21 nt, Human adenovirus F
gugggcugauuuggaagauga

SEQ ID NO: 1584128 - RNA, 19 nt, Human adenovirus F
accaccccuagucccuccu

SEQ ID NO: 1584129 - RNA, 18 nt, Human adenovirus F
gccuuguaugggcagcau

SEQ ID NO: 1584130 - RNA, 14 nt, Human adenovirus F
agaggaaaaggagg

SEQ ID NO: 1584131 - RNA, 16 nt, Human adenovirus F
cuacguccgcgacugc

SEQ ID NO: 1584132 - RNA, 23 nt, Human adenovirus F
agcaccaacgugcaggccaaccu

SEQ ID NO: 1584133 - RNA, 14 nt, Human adenovirus F
aagcgagcagagcc

SEQ ID NO: 1584134 - RNA, 21 nt, Human adenovirus F
caaguucaaagaagagcugcu

SEQ ID NO: 1584135 - RNA, 15 nt, Human adenovirus F
cacaauuuacaauuu

SEQ ID NO: 1584136 - RNA, 20 nt, Human adenovirus F
ucaauagcauacagaagacc

SEQ ID NO: 1584137 - RNA, 19 nt, Human adenovirus F
gucacucuccgccgccgcu

SEQ ID NO: 1584138 - RNA, 22 nt, Human adenovirus F
uugcacuuaacuguucuugucg

SEQ ID NO: 1584139 - RNA, 23 nt, Human adenovirus F
gguggaccccauggaugagccca

SEQ ID NO: 1584140 - RNA, 19 nt, Human adenovirus F
uaaagcauaacaugauuug

SEQ ID NO: 1584141 - RNA, 12 nt, Human adenovirus F
uuguaccaccuu

SEQ ID NO: 1584142 - RNA, 15 nt, Human adenovirus F
cuagcauaaagggga

SEQ ID NO: 1584143 - RNA, 20 nt, Human adenovirus F
cgacgacgcggcgguugagg

SEQ ID NO: 1584144 - RNA, 14 nt, Human adenovirus F
gauguuuuccaaga

SEQ ID NO: 1584145 - RNA, 18 nt, Human adenovirus F
caugcgcuccaacacuau

SEQ ID NO: 1584146 - RNA, 12 nt, Human adenovirus F
ucaccuacaacc

SEQ ID NO: 1584147 - RNA, 19 nt, Human adenovirus F
aagcuucuuguacucaaau

SEQ ID NO: 1584148 - RNA, 23 nt, Human adenovirus F
agaggcguucgacgcgaggauga

SEQ ID NO: 1584149 - RNA, 15 nt, Human adenovirus F
agguugacuugcagg

SEQ ID NO: 1584150 - RNA, 22 nt, Human adenovirus F
ggcuugucgcagaaucuccugc

SEQ ID NO: 1584151 - RNA, 22 nt, Human adenovirus F
cuguaguugauaguuuaaggag

SEQ ID NO: 1584152 - RNA, 18 nt, Human adenovirus F
auccagggcacaguaauc

SEQ ID NO: 1584153 - RNA, 17 nt, Human adenovirus F
cccucagacgacugggc

SEQ ID NO: 1584154 - RNA, 18 nt, Human adenovirus F
accuuagaacuaccucca

SEQ ID NO: 1584155 - RNA, 18 nt, Human adenovirus F
auccaucacgccaacgcc

SEQ ID NO: 1584156 - RNA, 15 nt, Human adenovirus F
gugagauuuguagug

SEQ ID NO: 1584157 - RNA, 15 nt, Human adenovirus F
cgcacuggaugccac

SEQ ID NO: 1584158 - RNA, 14 nt, Human adenovirus F
auggaacuaacugg

SEQ ID NO: 1584159 - RNA, 17 nt, Human adenovirus F
aguaaaaaaaagggaag

SEQ ID NO: 1584160 - RNA, 23 nt, Human adenovirus F
gcuccggguugggcgcuugccag

SEQ ID NO: 1584161 - RNA, 14 nt, Human adenovirus F
uaaccacuaccacc

SEQ ID NO: 1584162 - RNA, 21 nt, Human adenovirus F
ugccaucgcugaccagcagca

SEQ ID NO: 1584163 - RNA, 12 nt, Human adenovirus F
acuccucuugca

SEQ ID NO: 1584164 - RNA, 12 nt, Human adenovirus F
acggacaacccg

SEQ ID NO: 1584165 - RNA, 15 nt, Human adenovirus F
uauuuuaaaaugguu

SEQ ID NO: 1584166 - RNA, 20 nt, Human adenovirus F
guccuggccaacugccaccu

SEQ ID NO: 1584167 - RNA, 18 nt, Human adenovirus F
gaggcgauuugggaggga

SEQ ID NO: 1584168 - RNA, 10 nt, Human adenovirus F
uuacaaacag

SEQ ID NO: 1584169 - RNA, 17 nt, Human adenovirus F
agcaugaaacuggaaga

SEQ ID NO: 1584170 - RNA, 19 nt, Human adenovirus F
ucugauaauguguguuuuu

SEQ ID NO: 1584171 - RNA, 16 nt, Human adenovirus F
uuggaaugccugcagc

SEQ ID NO: 1584172 - RNA, 18 nt, Human adenovirus F
cggguuuuauggcaccgc

SEQ ID NO: 1584173 - RNA, 18 nt, Human adenovirus F
gagggaaaacaaagacga

SEQ ID NO: 1584174 - RNA, 19 nt, Human adenovirus F
aucgaggccgucuaccugc

SEQ ID NO: 1584175 - RNA, 20 nt, Human adenovirus F
caaggaaugcacacagacuc

SEQ ID NO: 1584176 - RNA, 22 nt, Human adenovirus F
gguuacucagcaauccggccca

SEQ ID NO: 1584177 - RNA, 21 nt, Human adenovirus F
gacaguaagcaacaaccagcu

SEQ ID NO: 1584178 - RNA, 17 nt, Human adenovirus F
gcggaggugccccagag

SEQ ID NO: 1584179 - RNA, 13 nt, Human adenovirus F
aggagacguggga

SEQ ID NO: 1584180 - RNA, 19 nt, Human adenovirus F
ccuuuugcaucucaaagcu

SEQ ID NO: 1584181 - RNA, 17 nt, Human adenovirus F
gcaaacgucaacuccuc

SEQ ID NO: 1584182 - RNA, 22 nt, Human adenovirus F
cccaccguuguggagucacugc

SEQ ID NO: 1584183 - RNA, 14 nt, Human adenovirus F
gcccaggagcagcg

SEQ ID NO: 1584184 - RNA, 12 nt, Human adenovirus F
acaggagcgcag

SEQ ID NO: 1584185 - RNA, 21 nt, Human adenovirus F
aagcugggauuugccgcagcc

SEQ ID NO: 1584186 - RNA, 16 nt, Human adenovirus F
uacgaacacuacaauc

SEQ ID NO: 1584187 - RNA, 21 nt, Human adenovirus F
agauggugggccgcugaaaga

SEQ ID NO: 1584188 - RNA, 19 nt, Human adenovirus F
gaccguauucacaaagcug

SEQ ID NO: 1584189 - RNA, 12 nt, Human adenovirus F
cgcuggcuccgc

SEQ ID NO: 1584190 - RNA, 23 nt, Human adenovirus F
cacguacgagaaaucggagaggg

SEQ ID NO: 1584191 - RNA, 14 nt, Human adenovirus F
ucccaaaaaaagaa

SEQ ID NO: 1584192 - RNA, 18 nt, Human adenovirus F
augugcuggggaauggag

SEQ ID NO: 1584193 - RNA, 22 nt, Human adenovirus F
gaaaaacgggcggcaaaugcuc

SEQ ID NO: 1584194 - RNA, 20 nt, Human adenovirus F
accuccgacgcuugcuggag

SEQ ID NO: 1584195 - RNA, 21 nt, Human adenovirus F
uccuggcgagcccauaaaagc

SEQ ID NO: 1584196 - RNA, 14 nt, Human adenovirus F
cccgugucaccugc

SEQ ID NO: 1584197 - RNA, 19 nt, Human adenovirus F
gcgggggcgucccuggagu

SEQ ID NO: 1584198 - RNA, 16 nt, Human adenovirus F
gcagucucgguaacga

SEQ ID NO: 1584199 - RNA, 21 nt, Human adenovirus F
cuuauuggcaugaguggggua

SEQ ID NO: 1584200 - RNA, 18 nt, Human adenovirus F
uuuccaugcacucaucca

SEQ ID NO: 1584201 - RNA, 17 nt, Human adenovirus F
guaggugacaaagaggc

SEQ ID NO: 1584202 - RNA, 15 nt, Human adenovirus F
cacagccgccgcucc

SEQ ID NO: 1584203 - RNA, 18 nt, Human adenovirus F
gcuggcuuuuggaccugg

SEQ ID NO: 1584204 - RNA, 20 nt, Human adenovirus F
ugcuacggaggaagaggguc

SEQ ID NO: 1584205 - RNA, 15 nt, Human adenovirus F
aguuuaaaaacggug

SEQ ID NO: 1584206 - RNA, 21 nt, Human adenovirus F
ggaguucuccguguccugcgc

SEQ ID NO: 1584207 - RNA, 20 nt, Human adenovirus F
gcguggccuccguggccuug

SEQ ID NO: 1584208 - RNA, 15 nt, Human adenovirus F
agcuagcauaaaaga

SEQ ID NO: 1584209 - RNA, 19 nt, Human adenovirus F
aaacagcagguuaaagcca

SEQ ID NO: 1584210 - RNA, 13 nt, Human adenovirus F
uuggccuuugucu

SEQ ID NO: 1584211 - RNA, 14 nt, Human adenovirus F
ccgucuccaucgcc

SEQ ID NO: 1584212 - RNA, 22 nt, Human adenovirus F
ggugggcugauuuggaagauga

SEQ ID NO: 1584213 - RNA, 17 nt, Human adenovirus F
ccgacuacuuacuccca

SEQ ID NO: 1584214 - RNA, 23 nt, Human adenovirus F
caagcccaauccucaagacuugg

SEQ ID NO: 1584215 - RNA, 18 nt, Human adenovirus F
aggagaggcauggcgggc

SEQ ID NO: 1584216 - RNA, 21 nt, Human adenovirus F
uccaguaaucuucggcaggaa

SEQ ID NO: 1584217 - RNA, 14 nt, Human adenovirus F
caggcacaccuuca

SEQ ID NO: 1584218 - RNA, 13 nt, Human adenovirus F
uggaugagcccac

SEQ ID NO: 1584219 - RNA, 20 nt, Human adenovirus F
aauguuaucggggugggaaa

SEQ ID NO: 1584220 - RNA, 21 nt, Human adenovirus F
caaggaugaggcgggacugau

SEQ ID NO: 1584221 - RNA, 13 nt, Human adenovirus F
gccagagggcaac

SEQ ID NO: 1584222 - RNA, 19 nt, Human adenovirus F
uggggggaaccggcgccgc

SEQ ID NO: 1584223 - RNA, 13 nt, Human adenovirus F
aauauuggcuacc

SEQ ID NO: 1584224 - RNA, 20 nt, Human adenovirus F
uaacacugccuaccgcagcu

SEQ ID NO: 1584225 - RNA, 15 nt, Human adenovirus F
ggcgccggacgggca

SEQ ID NO: 1584226 - RNA, 20 nt, Human adenovirus F
ucagacggccguaccaagcc

SEQ ID NO: 1584227 - RNA, 22 nt, Human adenovirus F
agaguuuuuacaacgagcaggc

SEQ ID NO: 1584228 - RNA, 17 nt, Human adenovirus F
gcagucuaagccuggcc

SEQ ID NO: 1584229 - RNA, 14 nt, Human adenovirus F
uacgcccaggagca

SEQ ID NO: 1584230 - RNA, 16 nt, Human adenovirus F
aaguggaucccagcgu

SEQ ID NO: 1584231 - RNA, 13 nt, Human adenovirus F
gacgacagccagg

SEQ ID NO: 1584232 - RNA, 14 nt, Human adenovirus F
auggaaacugucag

SEQ ID NO: 1584233 - RNA, 22 nt, Human adenovirus F
uaaugcgggcucugauaaugug

SEQ ID NO: 1584234 - RNA, 19 nt, Human adenovirus F
ggcggacauugccucccug

SEQ ID NO: 1584235 - RNA, 15 nt, Human adenovirus F
aggucaucuucuucu

SEQ ID NO: 1584236 - RNA, 21 nt, Human adenovirus F
ggcagaacguucuucacugca

SEQ ID NO: 1584237 - RNA, 13 nt, Human adenovirus F
uagaaguaaccaa

SEQ ID NO: 1584238 - RNA, 15 nt, Human adenovirus F
ggcccuggccuggaa

SEQ ID NO: 1584239 - RNA, 23 nt, Human adenovirus F
acgugagagaggcgguggcgcag

SEQ ID NO: 1584240 - RNA, 12 nt, Human adenovirus F
caagggcuuccu

SEQ ID NO: 1584241 - RNA, 16 nt, Human adenovirus F
gcaaucugaucucuua

SEQ ID NO: 1584242 - RNA, 13 nt, Human adenovirus F
gcuugggaggauu

SEQ ID NO: 1584243 - RNA, 17 nt, Human adenovirus F
caggagcagcgggaaga

SEQ ID NO: 1584244 - RNA, 22 nt, Human adenovirus F
cgguggcggacgggucgcagca

SEQ ID NO: 1584245 - RNA, 22 nt, Human adenovirus F
cgguggcaacccugaggaggag

SEQ ID NO: 1584246 - RNA, 11 nt, Human adenovirus F
gccaacucgac

SEQ ID NO: 1584247 - RNA, 13 nt, Human adenovirus F
ccagcaagcugcc

SEQ ID NO: 1584248 - RNA, 14 nt, Human adenovirus F
cgagaggaccacuu

SEQ ID NO: 1584249 - RNA, 14 nt, Human adenovirus F
aagacaccaguagc

SEQ ID NO: 1584250 - RNA, 15 nt, Human adenovirus F
cgccggacgggcagc

SEQ ID NO: 1584251 - RNA, 22 nt, Human adenovirus F
ccgucuucccucuugggcagga

SEQ ID NO: 1584252 - RNA, 19 nt, Human adenovirus F
accuguauacgggaaggaa

SEQ ID NO: 1584253 - RNA, 22 nt, Human adenovirus F
cuucaucacuuucuuccgcauc

SEQ ID NO: 1584254 - RNA, 17 nt, Human adenovirus F
uugcuacggaggaagag

SEQ ID NO: 1584255 - RNA, 15 nt, Human adenovirus F
aacgaaaaaggaggu

SEQ ID NO: 1584256 - RNA, 17 nt, Human adenovirus F
aaugugcagcaaaaacu

SEQ ID NO: 1584257 - RNA, 16 nt, Human adenovirus F
aacuguucuugucgua

SEQ ID NO: 1584258 - RNA, 17 nt, Human adenovirus F
acggcaaggaaccagug

SEQ ID NO: 1584259 - RNA, 13 nt, Human adenovirus F
aacuucuaccauu

SEQ ID NO: 1584260 - RNA, 21 nt, Human adenovirus F
ucaaccuucaagcccuacacc

SEQ ID NO: 1584261 - RNA, 19 nt, Human adenovirus F
cgaggccuuucacccagac

SEQ ID NO: 1584262 - RNA, 17 nt, Human adenovirus F
gcaucucaaagcuggag

SEQ ID NO: 1584263 - RNA, 18 nt, Human adenovirus F
uacaauccccuugacauu

SEQ ID NO: 1584264 - RNA, 15 nt, Human adenovirus F
gcgcaacgcaagaga

SEQ ID NO: 1584265 - RNA, 18 nt, Human adenovirus F
gcaggguuauacucugga

SEQ ID NO: 1584266 - RNA, 16 nt, Human adenovirus F
cagccgcaccgcggcg

SEQ ID NO: 1584267 - RNA, 14 nt, Human adenovirus F
gcccgugccaccga

SEQ ID NO: 1584268 - RNA, 13 nt, Human adenovirus F
aaguuaccaaaga

SEQ ID NO: 1584269 - RNA, 14 nt, Human adenovirus F
uuagcgaaaacgga

SEQ ID NO: 1584270 - RNA, 16 nt, Human adenovirus F
ugcaaaacaauucucu

SEQ ID NO: 1584271 - RNA, 20 nt, Human adenovirus F
cacaccucuccccaccgcug

SEQ ID NO: 1584272 - RNA, 13 nt, Human adenovirus F
uggaaagccuggu

SEQ ID NO: 1584273 - RNA, 18 nt, Human adenovirus F
caaacauuaagcugcaau

SEQ ID NO: 1584274 - RNA, 15 nt, Human adenovirus F
cgcuguacugugcau

SEQ ID NO: 1584275 - RNA, 22 nt, Human adenovirus F
cuucaaacggcggaugguggca

SEQ ID NO: 1584276 - RNA, 15 nt, Human adenovirus F
ugaagcuaaccuguu

SEQ ID NO: 1584277 - RNA, 15 nt, Human adenovirus F
agacuuugucagcca

SEQ ID NO: 1584278 - RNA, 15 nt, Human adenovirus F
agguuuccaaaucau

SEQ ID NO: 1584279 - RNA, 23 nt, Human adenovirus F
cugugaguuuugaggguggggug

SEQ ID NO: 1584280 - RNA, 22 nt, Human adenovirus F
ugacuacgaauccagcgaugag

SEQ ID NO: 1584281 - RNA, 16 nt, Human adenovirus F
cgccagccuccggugg

SEQ ID NO: 1584282 - RNA, 15 nt, Human adenovirus F
cuucaguugaaccac

SEQ ID NO: 1584283 - RNA, 21 nt, Human adenovirus F
auagcugugucagcuaacucu

SEQ ID NO: 1584284 - RNA, 14 nt, Human adenovirus F
cacauugccagcua

SEQ ID NO: 1584285 - RNA, 17 nt, Human adenovirus F
uuggcagcaacauaacu

SEQ ID NO: 1584286 - RNA, 22 nt, Human adenovirus F
cagcgucagguuugacagcauu

SEQ ID NO: 1584287 - RNA, 23 nt, Human adenovirus F
cgcggggcaggagcugcgggccg

SEQ ID NO: 1584288 - RNA, 21 nt, Human adenovirus F
ggaaucccgcgagccccccuc

SEQ ID NO: 1584289 - RNA, 20 nt, Human adenovirus F
gcacugcgguggaggccaug

SEQ ID NO: 1584290 - RNA, 13 nt, Human adenovirus F
gccagcuggcaaa

SEQ ID NO: 1584291 - RNA, 11 nt, Human adenovirus F
gcuucugccag

SEQ ID NO: 1584292 - RNA, 15 nt, Human adenovirus F
gcccugaucagccag

SEQ ID NO: 1584293 - RNA, 16 nt, Human adenovirus F
aggcaaaacuggaacg

SEQ ID NO: 1584294 - RNA, 20 nt, Human adenovirus F
cgcuggcuuuuggaccuggu

SEQ ID NO: 1584295 - RNA, 21 nt, Human adenovirus F
cgcgcaacuuuugcaccaggg

SEQ ID NO: 1584296 - RNA, 17 nt, Human adenovirus F
acgggcggcaaaugcuc

SEQ ID NO: 1584297 - RNA, 18 nt, Human adenovirus F
augcaacuuggaagggaa

SEQ ID NO: 1584298 - RNA, 21 nt, Human adenovirus F
ccauccuggaccuggaagagg

SEQ ID NO: 1584299 - RNA, 20 nt, Human adenovirus F
uuugguaacaaggccuggaa

SEQ ID NO: 1584300 - RNA, 19 nt, Human adenovirus F
cguuaguggaggcagcuuc

SEQ ID NO: 1584301 - RNA, 16 nt, Human adenovirus F
aaaguagcucuuccaa

SEQ ID NO: 1584302 - RNA, 14 nt, Human adenovirus F
ucccaggcggaaac

SEQ ID NO: 1584303 - RNA, 13 nt, Human adenovirus F
cucugaggacgga

SEQ ID NO: 1584304 - RNA, 16 nt, Human adenovirus F
gggcggcgguaacaag

SEQ ID NO: 1584305 - RNA, 19 nt, Human adenovirus F
cagggaucgcagcgggcag

SEQ ID NO: 1584306 - RNA, 16 nt, Human adenovirus F
caauuccacuggcaac

SEQ ID NO: 1584307 - RNA, 21 nt, Human adenovirus F
caggaucccucagagcugcaa

SEQ ID NO: 1584308 - RNA, 21 nt, Human adenovirus F
cgaagacuaucacgcccacca

SEQ ID NO: 1584309 - RNA, 21 nt, Human adenovirus F
cuucgccgcagucucccaccu

SEQ ID NO: 1584310 - RNA, 23 nt, Human adenovirus F
aagugucccacugcaacucgcag

SEQ ID NO: 1584311 - RNA, 18 nt, Human adenovirus F
uggaggaggaucuuaagc

SEQ ID NO: 1584312 - RNA, 15 nt, Human adenovirus F
cgcgucugcugcugc

SEQ ID NO: 1584313 - RNA, 20 nt, Human adenovirus F
acuuuugagguggaccccau

SEQ ID NO: 1584314 - RNA, 13 nt, Human adenovirus F
ugccaacaaaugu

SEQ ID NO: 1584315 - RNA, 13 nt, Human adenovirus F
gaggcgggacuga

SEQ ID NO: 1584316 - RNA, 17 nt, Human adenovirus F
aacucaaacaacaaaau

SEQ ID NO: 1584317 - RNA, 16 nt, Human adenovirus F
gaaaauccucaguguc

SEQ ID NO: 1584318 - RNA, 21 nt, Human adenovirus F
agcugugguuaaauuuaaugg

SEQ ID NO: 1584319 - RNA, 19 nt, Human adenovirus F
ggugggcguccaguggagc

SEQ ID NO: 1584320 - RNA, 22 nt, Human adenovirus F
uauccuugcucggcgaaaacuc

SEQ ID NO: 1584321 - RNA, 18 nt, Human adenovirus F
agggcgucaugcucuggg

SEQ ID NO: 1584322 - RNA, 17 nt, Human adenovirus F
cggcgggugcaguggcg

SEQ ID NO: 1584323 - RNA, 19 nt, Human adenovirus F
gcacuuagagugucaguuu

SEQ ID NO: 1584324 - RNA, 18 nt, Human adenovirus F
auggguaagugcagaggc

SEQ ID NO: 1584325 - RNA, 20 nt, Human adenovirus F
acuaaacauugauaaaaaug

SEQ ID NO: 1584326 - RNA, 19 nt, Human adenovirus F
agaacuggaguaacacaau

SEQ ID NO: 1584327 - RNA, 22 nt, Human adenovirus F
cauaacaccuauguuaggcuuu

SEQ ID NO: 1584328 - RNA, 13 nt, Human adenovirus F
cuggcagcuggag

SEQ ID NO: 1584329 - RNA, 13 nt, Human adenovirus F
uuucuccuccccu

SEQ ID NO: 1584330 - RNA, 16 nt, Human adenovirus F
cacaaaguccuggcca

SEQ ID NO: 1584331 - RNA, 15 nt, Human adenovirus F
aacuggucucagaau

SEQ ID NO: 1584332 - RNA, 12 nt, Human adenovirus F
ggaacuguucaa

SEQ ID NO: 1584333 - RNA, 20 nt, Human adenovirus F
cgcaacuucuuuuugggagg

SEQ ID NO: 1584334 - RNA, 11 nt, Human adenovirus F
augccugcagc

SEQ ID NO: 1584335 - RNA, 21 nt, Human adenovirus F
cgcuuggaggagcugucucag

SEQ ID NO: 1584336 - RNA, 16 nt, Human adenovirus F
caauccuaacaaaaac

SEQ ID NO: 1584337 - RNA, 17 nt, Human adenovirus F
ccaacagccccagcugg

SEQ ID NO: 1584338 - RNA, 15 nt, Human adenovirus F
caggagcugcgggcc

SEQ ID NO: 1584339 - RNA, 23 nt, Human adenovirus F
caggaggcuauuggccagacgca

SEQ ID NO: 1584340 - RNA, 23 nt, Human adenovirus F
ugcgcgguaagaacccagcaugu

SEQ ID NO: 1584341 - RNA, 22 nt, Human adenovirus F
ugaacccgguguacaccaccuc

SEQ ID NO: 1584342 - RNA, 21 nt, Human adenovirus F
ucgggaaagacaguggcgcgc

SEQ ID NO: 1584343 - RNA, 18 nt, Human adenovirus F
gaugaaaguagaagucuc

SEQ ID NO: 1584344 - RNA, 17 nt, Human adenovirus F
ucucagcaguugcaaga

SEQ ID NO: 1584345 - RNA, 19 nt, Human adenovirus F
cagcauaauaacucuggcu

SEQ ID NO: 1584346 - RNA, 15 nt, Human adenovirus F
cccgcccgccucuac

SEQ ID NO: 1584347 - RNA, 20 nt, Human adenovirus F
gccaucuucccgcaaaagcg

SEQ ID NO: 1584348 - RNA, 12 nt, Human adenovirus F
ccgagcagcugc

SEQ ID NO: 1584349 - RNA, 14 nt, Human adenovirus F
ucugagaguguuuc

SEQ ID NO: 1584350 - RNA, 19 nt, Human adenovirus F
uucgucaggccugcaagau

SEQ ID NO: 1584351 - RNA, 15 nt, Human adenovirus F
aacaauaaaaucauu

SEQ ID NO: 1584352 - RNA, 14 nt, Human adenovirus F
uucccacuguuucu

SEQ ID NO: 1584353 - RNA, 18 nt, Human adenovirus F
gaacgugaccgagcagcu

SEQ ID NO: 1584354 - RNA, 17 nt, Human adenovirus F
gccccgcccacugaccg

SEQ ID NO: 1584355 - RNA, 11 nt, Human adenovirus F
agguagaaugg

SEQ ID NO: 1584356 - RNA, 16 nt, Human adenovirus F
acgggaugugccaacg

SEQ ID NO: 1584357 - RNA, 13 nt, Human adenovirus F
gcgaaugcccuuu

SEQ ID NO: 1584358 - RNA, 17 nt, Human adenovirus F
gccgggacaacgaggcu

SEQ ID NO: 1584359 - RNA, 16 nt, Human adenovirus F
cccuggaauuuuugcu

SEQ ID NO: 1584360 - RNA, 13 nt, Human adenovirus F
gagcuggccuggu

SEQ ID NO: 1584361 - RNA, 21 nt, Human adenovirus F
cggguuuuggacauggccagc

SEQ ID NO: 1584362 - RNA, 14 nt, Human adenovirus F
aaaaagagaaucua

SEQ ID NO: 1584363 - RNA, 17 nt, Human adenovirus F
cuggagggcgucaugcu

SEQ ID NO: 1584364 - RNA, 18 nt, Human adenovirus F
auuucaccuacucuggcu

SEQ ID NO: 1584365 - RNA, 17 nt, Human adenovirus F
auuuugcgucgcuggcu

SEQ ID NO: 1584366 - RNA, 13 nt, Human adenovirus F
guguuuagcccau

SEQ ID NO: 1584367 - RNA, 11 nt, Human adenovirus F
auugacgccga

SEQ ID NO: 1584368 - RNA, 17 nt, Human adenovirus F
uugaacagcugaagaca

SEQ ID NO: 1584369 - RNA, 12 nt, Human adenovirus F
auacccagcugu

SEQ ID NO: 1584370 - RNA, 16 nt, Human adenovirus F
cguggcauggcagcag

SEQ ID NO: 1584371 - RNA, 17 nt, Human adenovirus F
cuaguuuaauauugcuu

SEQ ID NO: 1584372 - RNA, 19 nt, Human adenovirus F
gcagccugagcugccagag

SEQ ID NO: 1584373 - RNA, 21 nt, Human adenovirus F
guacggaccaccagaugaugu

SEQ ID NO: 1584374 - RNA, 21 nt, Human adenovirus F
aaaucacuguuuuuaacuauu

SEQ ID NO: 1584375 - RNA, 16 nt, Human adenovirus F
gcccuggaggcggcug

SEQ ID NO: 1584376 - RNA, 17 nt, Human adenovirus F
cuacugccgccaugacu

SEQ ID NO: 1584377 - RNA, 18 nt, Human adenovirus F
gcuccuuuguacucgagc

SEQ ID NO: 1584378 - RNA, 15 nt, Human adenovirus F
ggcaguggccgccga

SEQ ID NO: 1584379 - RNA, 19 nt, Human adenovirus F
gacuugccgguuucgcauu

SEQ ID NO: 1584380 - RNA, 23 nt, Human adenovirus F
gcauccucccaacaaccuaccca

SEQ ID NO: 1584381 - RNA, 14 nt, Human adenovirus F
gaucguagacaacu

SEQ ID NO: 1584382 - RNA, 13 nt, Human adenovirus F
gggaauggagcug

SEQ ID NO: 1584383 - RNA, 14 nt, Human adenovirus F
cuucucgaggccaa

SEQ ID NO: 1584384 - RNA, 21 nt, Human adenovirus F
agggcgcgcucguagggauug

SEQ ID NO: 1584385 - RNA, 15 nt, Human adenovirus F
gcagugguggauggg

SEQ ID NO: 1584386 - RNA, 16 nt, Human adenovirus F
cuacccuucugugccu

SEQ ID NO: 1584387 - RNA, 13 nt, Human adenovirus F
gcuguaccaggag

SEQ ID NO: 1584388 - RNA, 15 nt, Human adenovirus F
acuucagccugggga

SEQ ID NO: 1584389 - RNA, 21 nt, Human adenovirus F
cgcugagugacgaucuggggg

SEQ ID NO: 1584390 - RNA, 14 nt, Human adenovirus F
uacguaccgccuca

SEQ ID NO: 1584391 - RNA, 22 nt, Human adenovirus F
cguggccuugcaagcagcucgc

SEQ ID NO: 1584392 - RNA, 13 nt, Human adenovirus F
guguuuauuucuu

SEQ ID NO: 1584393 - RNA, 14 nt, Human adenovirus F
uaagcaacaaccag

SEQ ID NO: 1584394 - RNA, 12 nt, Human adenovirus F
agaacaaaacac

SEQ ID NO: 1584395 - RNA, 23 nt, Human adenovirus F
augguaaaaaugccaggcagcag

SEQ ID NO: 1584396 - RNA, 21 nt, Human adenovirus F
aagucauuugguaacaaggcc

SEQ ID NO: 1584397 - RNA, 21 nt, Human adenovirus F
caauccugaaugcauguacac

SEQ ID NO: 1584398 - RNA, 15 nt, Human adenovirus F
aguguaccaauccug

SEQ ID NO: 1584399 - RNA, 15 nt, Human adenovirus F
cuuccucccaaagua

SEQ ID NO: 1584400 - RNA, 15 nt, Human adenovirus F
cgccaucaugagucu

SEQ ID NO: 1584401 - RNA, 16 nt, Human adenovirus F
gcaaaucuauuucuuu

SEQ ID NO: 1584402 - RNA, 15 nt, Human adenovirus F
gaggcggaggagcag

SEQ ID NO: 1584403 - RNA, 16 nt, Human adenovirus F
cgccguaggagaggca

SEQ ID NO: 1584404 - RNA, 16 nt, Human adenovirus F
ggcccuaaccacccgc

SEQ ID NO: 1584405 - RNA, 12 nt, Human adenovirus F
accaaagguggu

SEQ ID NO: 1584406 - RNA, 16 nt, Human adenovirus F
cagaagugaagaccaa

SEQ ID NO: 1584407 - RNA, 17 nt, Human adenovirus F
cagcguugagccggaag

SEQ ID NO: 1584408 - RNA, 21 nt, Human adenovirus F
uguucacugaaagccagccgu

SEQ ID NO: 1584409 - RNA, 19 nt, Human adenovirus F
cuucgggagacggaggcaa

SEQ ID NO: 1584410 - RNA, 14 nt, Human adenovirus F
agcacugcggugga

SEQ ID NO: 1584411 - RNA, 16 nt, Human adenovirus F
gcuuaguauuaacacu

SEQ ID NO: 1584412 - RNA, 19 nt, Human adenovirus F
gcaucucuugaaugaggug

SEQ ID NO: 1584413 - RNA, 15 nt, Human adenovirus F
agagucgucgcaggc

SEQ ID NO: 1584414 - RNA, 15 nt, Human adenovirus F
cuuuuucccaaaaaa

SEQ ID NO: 1584415 - RNA, 20 nt, Human adenovirus F
acuggcuggcccuggccugg

SEQ ID NO: 1584416 - RNA, 18 nt, Human adenovirus F
gauaccgcugcagcugcu

SEQ ID NO: 1584417 - RNA, 14 nt, Human adenovirus F
ggaucaauggagcg

SEQ ID NO: 1584418 - RNA, 13 nt, Human adenovirus F
agccacuccugca

SEQ ID NO: 1584419 - RNA, 17 nt, Human adenovirus F
gcagaaacaugccaccc

SEQ ID NO: 1584420 - RNA, 16 nt, Human adenovirus F
uaccccuaccacccua

SEQ ID NO: 1584421 - RNA, 22 nt, Human adenovirus F
cccaccuuguguuuaagccaga

SEQ ID NO: 1584422 - RNA, 13 nt, Human adenovirus F
cagcaaacacaaa

SEQ ID NO: 1584423 - RNA, 19 nt, Human adenovirus F
cugguaaaccagcacacag

SEQ ID NO: 1584424 - RNA, 16 nt, Human adenovirus F
cccggguccuacaccu

SEQ ID NO: 1584425 - RNA, 15 nt, Human adenovirus F
cccaggaucccucag

SEQ ID NO: 1584426 - RNA, 14 nt, Human adenovirus F
uacacaccaaacuc

SEQ ID NO: 1584427 - RNA, 21 nt, Human adenovirus F
aagcaauauugucgcaugccu

SEQ ID NO: 1584428 - RNA, 12 nt, Human adenovirus F
gagacaaaagcc

SEQ ID NO: 1584429 - RNA, 14 nt, Human adenovirus F
uacauguggagcua

SEQ ID NO: 1584430 - RNA, 20 nt, Human adenovirus F
uggaguuggcuucugccaga

SEQ ID NO: 1584431 - RNA, 19 nt, Human adenovirus F
auacgggagggacaagcuu

SEQ ID NO: 1584432 - RNA, 21 nt, Human adenovirus F
aaacuaucccgccccugccac

SEQ ID NO: 1584433 - RNA, 17 nt, Human adenovirus F
aaggggcgcgcuccggg

SEQ ID NO: 1584434 - RNA, 21 nt, Human adenovirus F
gaagaacuggaguaacacaau

SEQ ID NO: 1584435 - RNA, 13 nt, Human adenovirus F
agcuuuaaacccu

SEQ ID NO: 1584436 - RNA, 16 nt, Human adenovirus F
ugaaccggaaaaccaa

SEQ ID NO: 1584437 - RNA, 16 nt, Human adenovirus F
accaaucuaucccuug

SEQ ID NO: 1584438 - RNA, 19 nt, Human adenovirus F
caaaagcccggguccaggc

SEQ ID NO: 1584439 - RNA, 13 nt, Human adenovirus F
aaucaggagaaaa

SEQ ID NO: 1584440 - RNA, 16 nt, Human adenovirus F
gucacucucagcugcu

SEQ ID NO: 1584441 - RNA, 22 nt, Human adenovirus F
acuaaggcuggcacacgcacuu

SEQ ID NO: 1584442 - RNA, 18 nt, Human adenovirus F
uacuucuuaauaaagaca

SEQ ID NO: 1584443 - RNA, 17 nt, Human adenovirus F
gcucacccgcagcugcu

SEQ ID NO: 1584444 - RNA, 18 nt, Human adenovirus F
cugauccacuuacaacca

SEQ ID NO: 1584445 - RNA, 15 nt, Human adenovirus F
cgguaacgaccucag

SEQ ID NO: 1584446 - RNA, 11 nt, Human adenovirus F
gacgagcccug

SEQ ID NO: 1584447 - RNA, 20 nt, Human adenovirus F
ugucugccaaaauggcucug

SEQ ID NO: 1584448 - RNA, 22 nt, Human adenovirus F
cgguacaagauuugacgaaaga

SEQ ID NO: 1584449 - RNA, 17 nt, Human adenovirus F
uccugacuauuuuaugc

SEQ ID NO: 1584450 - RNA, 21 nt, Human adenovirus F
aaaguucaacaucaaccagug

SEQ ID NO: 1584451 - RNA, 22 nt, Human adenovirus F
ccauguggaaccaggcagugga

SEQ ID NO: 1584452 - RNA, 14 nt, Human adenovirus F
gagcgugguggcaa

SEQ ID NO: 1584453 - RNA, 20 nt, Human adenovirus F
gguaaugucuuuccaggguc

SEQ ID NO: 1584454 - RNA, 17 nt, Human adenovirus F
ugccuccagcacugccg

SEQ ID NO: 1584455 - RNA, 18 nt, Human adenovirus F
gggggcauuaaugggcaa

SEQ ID NO: 1584456 - RNA, 22 nt, Human adenovirus F
cgaggaaagcuuccagccaauc

SEQ ID NO: 1584457 - RNA, 15 nt, Human adenovirus F
auccuuccaguaauc

SEQ ID NO: 1584458 - RNA, 20 nt, Human adenovirus F
gagcaagccgcugacggcgc

SEQ ID NO: 1584459 - RNA, 15 nt, Human adenovirus F
uuuaaaacuuuaugg

SEQ ID NO: 1584460 - RNA, 13 nt, Human adenovirus F
aggucaaaugcuc

SEQ ID NO: 1584461 - RNA, 15 nt, Human adenovirus F
ggacagcaggccgcu

SEQ ID NO: 1584462 - RNA, 14 nt, Human adenovirus F
guccaccugagggg

SEQ ID NO: 1584463 - RNA, 20 nt, Human adenovirus F
ggaggaaguagguggggccc

SEQ ID NO: 1584464 - RNA, 21 nt, Human adenovirus F
uacgacuccacguaggcucuc

SEQ ID NO: 1584465 - RNA, 17 nt, Human adenovirus F
aggccauccuggaccug

SEQ ID NO: 1584466 - RNA, 21 nt, Human adenovirus F
uccuuauucucaccuggcaaa

SEQ ID NO: 1584467 - RNA, 15 nt, Human adenovirus F
caaucccagcagaaa

SEQ ID NO: 1584468 - RNA, 19 nt, Human adenovirus F
ucaagaaccaacgcauucc

SEQ ID NO: 1584469 - RNA, 22 nt, Human adenovirus F
gaugaaucgcuggaaaaccuac

SEQ ID NO: 1584470 - RNA, 20 nt, Human adenovirus F
gcuguuguugauagcgccau

SEQ ID NO: 1584471 - RNA, 13 nt, Human adenovirus F
gaaaggaguaaag

SEQ ID NO: 1584472 - RNA, 20 nt, Human adenovirus F
auguguguuuuuuacugcua

SEQ ID NO: 1584473 - RNA, 21 nt, Human adenovirus F
aaaaaucuaccacagaaaugu

SEQ ID NO: 1584474 - RNA, 14 nt, Human adenovirus F
uccacgcucccgga

SEQ ID NO: 1584475 - RNA, 16 nt, Human adenovirus F
gcggcaaaagcuugag

SEQ ID NO: 1584476 - RNA, 22 nt, Human adenovirus F
gcuccuuuaacgcccgcugagc

SEQ ID NO: 1584477 - RNA, 17 nt, Human adenovirus F
gcaaucccagcagaaac

SEQ ID NO: 1584478 - RNA, 18 nt, Human adenovirus F
ggcaauggcucuguggag

SEQ ID NO: 1584479 - RNA, 14 nt, Human adenovirus F
aucacccaaagcca

SEQ ID NO: 1584480 - RNA, 15 nt, Human adenovirus F
cucggaccauucuga

SEQ ID NO: 1584481 - RNA, 15 nt, Human adenovirus F
gacagcugggacagc

SEQ ID NO: 1584482 - RNA, 18 nt, Human adenovirus F
caagcggguuaaaaagcg

SEQ ID NO: 1584483 - RNA, 22 nt, Human adenovirus F
aaugcuccgggauaagcuaaag

SEQ ID NO: 1584484 - RNA, 16 nt, Human adenovirus F
cauggcgggcaguggc

SEQ ID NO: 1584485 - RNA, 13 nt, Human adenovirus F
ggcaccagccagc

SEQ ID NO: 1584486 - RNA, 16 nt, Human adenovirus F
cuauuaaugcaaacaa

SEQ ID NO: 1584487 - RNA, 14 nt, Human adenovirus F
gccuacucuuacaa

SEQ ID NO: 1584488 - RNA, 19 nt, Human adenovirus F
acucucccuuuccagcaua

SEQ ID NO: 1584489 - RNA, 13 nt, Human adenovirus F
ggagugccgccgg

SEQ ID NO: 1584490 - RNA, 12 nt, Human adenovirus F
acugaaagccag

SEQ ID NO: 1584491 - RNA, 22 nt, Human adenovirus F
cacugauccacuuacaaccaaa

SEQ ID NO: 1584492 - RNA, 11 nt, Human adenovirus F
cuuuacaauua

SEQ ID NO: 1584493 - RNA, 22 nt, Human adenovirus F
gaugcagguaggaccacuggag

SEQ ID NO: 1584494 - RNA, 17 nt, Human adenovirus F
cugaccgaccuggggca

SEQ ID NO: 1584495 - RNA, 15 nt, Human adenovirus F
gaagagcugcuggag

SEQ ID NO: 1584496 - RNA, 14 nt, Human adenovirus F
uuugggagccagga

SEQ ID NO: 1584497 - RNA, 18 nt, Human adenovirus F
cacauuggcuggaggcuu

SEQ ID NO: 1584498 - RNA, 11 nt, Human adenovirus F
ccaggcagcag

SEQ ID NO: 1584499 - RNA, 15 nt, Human adenovirus F
ucaggcagcagcccc

SEQ ID NO: 1584500 - RNA, 16 nt, Human adenovirus F
uaccaaagacaaaauc

SEQ ID NO: 1584501 - RNA, 21 nt, Human adenovirus F
acugcuaaagggaacugccag

SEQ ID NO: 1584502 - RNA, 15 nt, Human adenovirus F
auccccaacaacccg

SEQ ID NO: 1584503 - RNA, 22 nt, Human adenovirus F
gccccuuggugaagguauuaac

SEQ ID NO: 1584504 - RNA, 20 nt, Human adenovirus F
gugccgcgcgggcaggagga

SEQ ID NO: 1584505 - RNA, 16 nt, Human adenovirus F
augcgccgagcggcug

SEQ ID NO: 1584506 - RNA, 20 nt, Human adenovirus F
cggcuccugugcagcgcgcu

SEQ ID NO: 1584507 - RNA, 17 nt, Human adenovirus F
uggggccuacggaaggg

SEQ ID NO: 1584508 - RNA, 14 nt, Human adenovirus F
ggaccacuggaggg

SEQ ID NO: 1584509 - RNA, 13 nt, Human adenovirus F
aaaguccagcgcg

SEQ ID NO: 1584510 - RNA, 16 nt, Human adenovirus F
cgcagccugagcugcc

SEQ ID NO: 1584511 - RNA, 17 nt, Human adenovirus F
gggcuuauuggcaugag

SEQ ID NO: 1584512 - RNA, 12 nt, Human adenovirus F
uauggaggagga

SEQ ID NO: 1584513 - RNA, 15 nt, Human adenovirus F
accaaacagguauaa

SEQ ID NO: 1584514 - RNA, 17 nt, Human adenovirus F
ggacucgucuccugcaa

SEQ ID NO: 1584515 - RNA, 20 nt, Human adenovirus F
aaaaccuguucuaaaaccaa

SEQ ID NO: 1584516 - RNA, 14 nt, Human adenovirus F
uggauacuggcaag

SEQ ID NO: 1584517 - RNA, 21 nt, Human adenovirus F
cuccaacguagagcucagcaa

SEQ ID NO: 1584518 - RNA, 15 nt, Human adenovirus F
uaaccaacucguuca

SEQ ID NO: 1584519 - RNA, 19 nt, Human adenovirus F
uugcuucuuugaauuuggg

SEQ ID NO: 1584520 - RNA, 12 nt, Human adenovirus F
ggacggcgccaa

SEQ ID NO: 1584521 - RNA, 14 nt, Human adenovirus F
ggacgggaucagag

SEQ ID NO: 1584522 - RNA, 22 nt, Human adenovirus F
acggagaugcagagaaaggagu

SEQ ID NO: 1584523 - RNA, 20 nt, Human adenovirus F
aagcuacaaggacaggaugu

SEQ ID NO: 1584524 - RNA, 21 nt, Human adenovirus F
cggcccugcaaagccaaccuu

SEQ ID NO: 1584525 - RNA, 19 nt, Human adenovirus F
caccucuguuugcugcacu

SEQ ID NO: 1584526 - RNA, 19 nt, Human adenovirus F
gccacagguccagaccuca

SEQ ID NO: 1584527 - RNA, 14 nt, Human adenovirus F
cucagacgacgagc

SEQ ID NO: 1584528 - RNA, 19 nt, Human adenovirus F
ggaggccauccuggaccug

SEQ ID NO: 1584529 - RNA, 20 nt, Human adenovirus F
uaaccaacggaggaaaacuc

SEQ ID NO: 1584530 - RNA, 17 nt, Human adenovirus F
cagcucaacgcaguggu

SEQ ID NO: 1584531 - RNA, 20 nt, Human adenovirus F
cgaauucguggccccuacca

SEQ ID NO: 1584532 - RNA, 14 nt, Human adenovirus F
aagagaaagaugga

SEQ ID NO: 1584533 - RNA, 12 nt, Human adenovirus F
aaacaaaaaacu

SEQ ID NO: 1584534 - RNA, 18 nt, Human adenovirus F
agcgggaacgcuuuaugc

SEQ ID NO: 1584535 - RNA, 16 nt, Human adenovirus F
uccagcaacuuuaugu

SEQ ID NO: 1584536 - RNA, 17 nt, Human adenovirus F
caaucgaccuaauuaca

SEQ ID NO: 1584537 - RNA, 21 nt, Human adenovirus F
acaaaacccccuaugugccca

SEQ ID NO: 1584538 - RNA, 22 nt, Human adenovirus F
gagaugcgccucaugagcuggg

SEQ ID NO: 1584539 - RNA, 18 nt, Human adenovirus F
gggugucugccagagggu

SEQ ID NO: 1584540 - RNA, 21 nt, Human adenovirus F
ucugcaucucuugaaugaggu

SEQ ID NO: 1584541 - RNA, 18 nt, Human adenovirus F
uacucauuaaaauucacc

SEQ ID NO: 1584542 - RNA, 17 nt, Human adenovirus F
uugauuuucugccacca

SEQ ID NO: 1584543 - RNA, 17 nt, Human adenovirus F
gcugugguuaaauuuaa

SEQ ID NO: 1584544 - RNA, 15 nt, Human adenovirus F
gcacugguaaaccag

SEQ ID NO: 1584545 - RNA, 19 nt, Human adenovirus F
cccccaccggcuccugugc

SEQ ID NO: 1584546 - RNA, 22 nt, Human adenovirus F
gcgcccgggcccuggaggcggc

SEQ ID NO: 1584547 - RNA, 14 nt, Human adenovirus F
ggcaugagggauuc

SEQ ID NO: 1584548 - RNA, 14 nt, Human adenovirus F
gcauccauaaaggu

SEQ ID NO: 1584549 - RNA, 20 nt, Human adenovirus F
ccgcauacuguuucacauau

SEQ ID NO: 1584550 - RNA, 21 nt, Human adenovirus F
uuugcgcaggcgaauaaaagg

SEQ ID NO: 1584551 - RNA, 22 nt, Human adenovirus F
ugcuacuacuuuaacucuuaca

SEQ ID NO: 1584552 - RNA, 23 nt, Human adenovirus F
cuugcaggagccgaauugccucg

SEQ ID NO: 1584553 - RNA, 13 nt, Human adenovirus F
gcgcgggcaggag

SEQ ID NO: 1584554 - RNA, 14 nt, Human adenovirus F
caacggcaauccca

SEQ ID NO: 1584555 - RNA, 14 nt, Human adenovirus F
caugcaacuuggaa

SEQ ID NO: 1584556 - RNA, 20 nt, Human adenovirus F
gauauuuguaaaagcgggcg

SEQ ID NO: 1584557 - RNA, 19 nt, Human adenovirus F
uccaaaucauugcauauaa

SEQ ID NO: 1584558 - RNA, 20 nt, Human adenovirus F
accugaaaaccauuuugcgc

SEQ ID NO: 1584559 - RNA, 19 nt, Human adenovirus F
gacagucugccaacacuaa

SEQ ID NO: 1584560 - RNA, 15 nt, Human adenovirus F
uaagggaggcagcag

SEQ ID NO: 1584561 - RNA, 15 nt, Human adenovirus F
auuuggagggcggca

SEQ ID NO: 1584562 - RNA, 16 nt, Human adenovirus F
cugacggcgcagcugu

SEQ ID NO: 1584563 - RNA, 20 nt, Human adenovirus F
gucgcguaacccgccgugga

SEQ ID NO: 1584564 - RNA, 14 nt, Human adenovirus F
acugaaagccagcc

SEQ ID NO: 1584565 - RNA, 18 nt, Human adenovirus F
accaccccuagucccucc

SEQ ID NO: 1584566 - RNA, 14 nt, Human adenovirus F
agcccgggccuggu

SEQ ID NO: 1584567 - RNA, 18 nt, Human adenovirus F
ugagugggguaacuuuua

SEQ ID NO: 1584568 - RNA, 15 nt, Human adenovirus F
gaggcgauuugggag

SEQ ID NO: 1584569 - RNA, 21 nt, Human adenovirus F
caaacaacgaacuuucucucu

SEQ ID NO: 1584570 - RNA, 19 nt, Human adenovirus F
ggugcagccgugaagccaa

SEQ ID NO: 1584571 - RNA, 12 nt, Human adenovirus F
accucccaaagu

SEQ ID NO: 1584572 - RNA, 13 nt, Human adenovirus F
cagcgcccgccuc

SEQ ID NO: 1584573 - RNA, 21 nt, Human adenovirus F
agcauugugguacaggagcgc

SEQ ID NO: 1584574 - RNA, 19 nt, Human adenovirus F
gacuccgugguagccgaug

SEQ ID NO: 1584575 - RNA, 19 nt, Human adenovirus F
caaggcguaaagacugaca

SEQ ID NO: 1584576 - RNA, 17 nt, Human adenovirus F
auguccuuaaggaggag

SEQ ID NO: 1584577 - RNA, 19 nt, Human adenovirus F
ccugcaauggcagcccagc

SEQ ID NO: 1584578 - RNA, 20 nt, Human adenovirus F
ucacauaucgucacuuccgc

SEQ ID NO: 1584579 - RNA, 18 nt, Human adenovirus F
uggaagugcuaggcucuu

SEQ ID NO: 1584580 - RNA, 24 nt, Human adenovirus F
ccccgggaguuuuagcacucaagu

SEQ ID NO: 1584581 - RNA, 15 nt, Human adenovirus F
ccacucgggaaagac

SEQ ID NO: 1584582 - RNA, 17 nt, Human adenovirus F
gaggaggccauccugga

SEQ ID NO: 1584583 - RNA, 19 nt, Human adenovirus F
agcguacgguugcccgcca

SEQ ID NO: 1584584 - RNA, 19 nt, Human adenovirus F
ugauucuccaaagcagucu

SEQ ID NO: 1584585 - RNA, 23 nt, Human adenovirus F
gguucugaaguucagaacauggc

SEQ ID NO: 1584586 - RNA, 16 nt, Human adenovirus F
uucucaccuggcaaac

SEQ ID NO: 1584587 - RNA, 14 nt, Human adenovirus F
gugcuuggaagagc

SEQ ID NO: 1584588 - RNA, 15 nt, Human adenovirus F
uggaccuggaagagg

SEQ ID NO: 1584589 - RNA, 20 nt, Human adenovirus F
ccaucgugcgcgaacugggc

SEQ ID NO: 1584590 - RNA, 23 nt, Human adenovirus F
aagacguuaagguaaagccacaa

SEQ ID NO: 1584591 - RNA, 17 nt, Human adenovirus F
uucuccugcuugucugu

SEQ ID NO: 1584592 - RNA, 18 nt, Human adenovirus F
gaacagaccuuccaggaa

SEQ ID NO: 1584593 - RNA, 18 nt, Human adenovirus F
auuaguuguacaaaguca

SEQ ID NO: 1584594 - RNA, 18 nt, Human adenovirus F
caaggcguaaagacugac

SEQ ID NO: 1584595 - RNA, 14 nt, Human adenovirus F
aaaugccucccuuu

SEQ ID NO: 1584596 - RNA, 18 nt, Human adenovirus F
guaguuuugcuccagggu

SEQ ID NO: 1584597 - RNA, 18 nt, Human adenovirus F
ggcucaauguaacaugac

SEQ ID NO: 1584598 - RNA, 15 nt, Human adenovirus F
ugcauuauggccaug

SEQ ID NO: 1584599 - RNA, 17 nt, Human adenovirus F
cagcgguaucugcgugg

SEQ ID NO: 1584600 - RNA, 21 nt, Human adenovirus F
cuuaccgcgacaaagcacaca

SEQ ID NO: 1584601 - RNA, 18 nt, Human adenovirus F
gaguucuugcugacggcc

SEQ ID NO: 1584602 - RNA, 19 nt, Human adenovirus F
gcacucgcuccacccgccg

SEQ ID NO: 1584603 - RNA, 19 nt, Human adenovirus F
guuucgcacuccacuaacc

SEQ ID NO: 1584604 - RNA, 16 nt, Human adenovirus F
ggcgcuugccaggguu

SEQ ID NO: 1584605 - RNA, 20 nt, Human adenovirus F
gcagugggacgaggaggaga

SEQ ID NO: 1584606 - RNA, 18 nt, Human adenovirus F
uauucaccaccuuuaaaa

SEQ ID NO: 1584607 - RNA, 21 nt, Human adenovirus F
auaaaagcuucuaucugcaaa

SEQ ID NO: 1584608 - RNA, 13 nt, Human adenovirus F
aggagcagaugga

SEQ ID NO: 1584609 - RNA, 21 nt, Human adenovirus F
uccagcguucaaaaccucuua

SEQ ID NO: 1584610 - RNA, 18 nt, Human adenovirus F
ugagcaaagacauuccca

SEQ ID NO: 1584611 - RNA, 19 nt, Human adenovirus F
uguuaucggggugggaaac

SEQ ID NO: 1584612 - RNA, 14 nt, Human adenovirus F
auacguuagagugg

SEQ ID NO: 1584613 - RNA, 22 nt, Human adenovirus F
ccgugauugauagugugguggc

SEQ ID NO: 1584614 - RNA, 19 nt, Human adenovirus F
agccuucaggcagcagccc

SEQ ID NO: 1584615 - RNA, 22 nt, Human adenovirus F
uugugaucagaaauuuagauuu

SEQ ID NO: 1584616 - RNA, 13 nt, Human adenovirus F
cacaggaagaggg

SEQ ID NO: 1584617 - RNA, 14 nt, Human adenovirus F
cugcacuaugccuu

SEQ ID NO: 1584618 - RNA, 20 nt, Human adenovirus F
agcacaggcggaccuuuuac

SEQ ID NO: 1584619 - RNA, 14 nt, Human adenovirus F
cgggugcaguggcg

SEQ ID NO: 1584620 - RNA, 16 nt, Human adenovirus F
uucugagucuaccacu

SEQ ID NO: 1584621 - RNA, 16 nt, Human adenovirus F
aagucauccaaaucau

SEQ ID NO: 1584622 - RNA, 20 nt, Human adenovirus F
auuuugacgaucgcuccagg

SEQ ID NO: 1584623 - RNA, 21 nt, Human adenovirus F
ucccuucccgacaugaugcaa

SEQ ID NO: 1584624 - RNA, 21 nt, Human adenovirus F
gcccccaaaggugcucccaau

SEQ ID NO: 1584625 - RNA, 22 nt, Human adenovirus F
guccuggccaacugccaccucc

SEQ ID NO: 1584626 - RNA, 20 nt, Human adenovirus F
aaaguagcucuuccaagcug

SEQ ID NO: 1584627 - RNA, 17 nt, Human adenovirus F
aaaaccuacgcccagga

SEQ ID NO: 1584628 - RNA, 22 nt, Human adenovirus F
cagugcuuggaagagcaaaacc

SEQ ID NO: 1584629 - RNA, 22 nt, Human adenovirus F
uucacaaaauggacgaagacug

SEQ ID NO: 1584630 - RNA, 14 nt, Human adenovirus F
ccaucgccagcgac

SEQ ID NO: 1584631 - RNA, 21 nt, Human adenovirus F
aggccagucggcaggcuuccu

SEQ ID NO: 1584632 - RNA, 18 nt, Human adenovirus F
cagccauguuauggguca

SEQ ID NO: 1584633 - RNA, 18 nt, Human adenovirus F
uacucggagcuggcgccu

SEQ ID NO: 1584634 - RNA, 22 nt, Human adenovirus F
agcauuuauaaucaugcaauag

SEQ ID NO: 1584635 - RNA, 20 nt, Human adenovirus F
gaagguugacuugcaggaga

SEQ ID NO: 1584636 - RNA, 20 nt, Human adenovirus F
ccacggaugugaccuguggg

SEQ ID NO: 1584637 - RNA, 13 nt, Human adenovirus F
gucugucugccaa

SEQ ID NO: 1584638 - RNA, 15 nt, Human adenovirus F
acaccgcuuccaccu

SEQ ID NO: 1584639 - RNA, 22 nt, Human adenovirus F
ggaggauuuugaguuagcucug

SEQ ID NO: 1584640 - RNA, 20 nt, Human adenovirus F
cuaucccgccccugccaccg

SEQ ID NO: 1584641 - RNA, 23 nt, Human adenovirus F
gccgcccuaaccucuaccccgcg

SEQ ID NO: 1584642 - RNA, 23 nt, Human adenovirus F
cuaaggacgguggcaugagggau

SEQ ID NO: 1584643 - RNA, 12 nt, Human adenovirus F
acaacuacggag

SEQ ID NO: 1584644 - RNA, 23 nt, Human adenovirus F
gcuucucagcucaacgcaguggu

SEQ ID NO: 1584645 - RNA, 15 nt, Human adenovirus F
gcuguaccaggaggc

SEQ ID NO: 1584646 - RNA, 14 nt, Human adenovirus F
gccccuuggugaag

SEQ ID NO: 1584647 - RNA, 17 nt, Human adenovirus F
augggggcggaccugca

SEQ ID NO: 1584648 - RNA, 21 nt, Human adenovirus F
agacgaggaggcggaggagca

SEQ ID NO: 1584649 - RNA, 11 nt, Human adenovirus F
ccaaaccaaau

SEQ ID NO: 1584650 - RNA, 15 nt, Human adenovirus F
gagccacagguccag

SEQ ID NO: 1584651 - RNA, 16 nt, Human adenovirus F
cuuaacccuaagcaca

SEQ ID NO: 1584652 - RNA, 14 nt, Human adenovirus F
ucuucaucccagcc

SEQ ID NO: 1584653 - RNA, 20 nt, Human adenovirus F
ggacaaagagaaagauggaa

SEQ ID NO: 1584654 - RNA, 14 nt, Human adenovirus F
cgucauccgccucc

SEQ ID NO: 1584655 - RNA, 20 nt, Human adenovirus F
gaggcauuuuagggcguaga

SEQ ID NO: 1584656 - RNA, 23 nt, Human adenovirus F
acgcugccaacaaauguucgcaa

SEQ ID NO: 1584657 - RNA, 18 nt, Human adenovirus F
aacucaaacaacaaaauc

SEQ ID NO: 1584658 - RNA, 21 nt, Human adenovirus F
aagaaauccacuuaccagagc

SEQ ID NO: 1584659 - RNA, 19 nt, Human adenovirus F
aaaccuacgcccaggagca

SEQ ID NO: 1584660 - RNA, 15 nt, Human adenovirus F
ugccggcucuaggca

SEQ ID NO: 1584661 - RNA, 13 nt, Human adenovirus F
ggaucauguccac

SEQ ID NO: 1584662 - RNA, 19 nt, Human adenovirus F
gaauguaacucucccuuuc

SEQ ID NO: 1584663 - RNA, 20 nt, Human adenovirus F
uaccgucaucucuacagccc

SEQ ID NO: 1584664 - RNA, 18 nt, Human adenovirus F
cauuuaugcccaacagua

SEQ ID NO: 1584665 - RNA, 14 nt, Human adenovirus F
guuuuaauggaaac

SEQ ID NO: 1584666 - RNA, 19 nt, Human adenovirus F
acgacggggauacugcucc

SEQ ID NO: 1584667 - RNA, 19 nt, Human adenovirus F
cuuaacucugaagaugucu

SEQ ID NO: 1584668 - RNA, 14 nt, Human adenovirus F
cauccauccaucac

SEQ ID NO: 1584669 - RNA, 24 nt, Human adenovirus F
uguucaccuuuuuacccugaccca

SEQ ID NO: 1584670 - RNA, 19 nt, Human adenovirus F
gacucguaccuuggucauc

SEQ ID NO: 1584671 - RNA, 16 nt, Human adenovirus F
guccaggaaggccucg

SEQ ID NO: 1584672 - RNA, 17 nt, Human adenovirus F
cggacgggucgcagcag

SEQ ID NO: 1584673 - RNA, 22 nt, Human adenovirus F
cgcccaggagcagcgggaagag

SEQ ID NO: 1584674 - RNA, 19 nt, Human adenovirus F
acuguuucuccuccccuua

SEQ ID NO: 1584675 - RNA, 23 nt, Human adenovirus F
auaugucacagccuguuacuauu

SEQ ID NO: 1584676 - RNA, 14 nt, Human adenovirus F
gguuuagccacauc

SEQ ID NO: 1584677 - RNA, 14 nt, Human adenovirus F
gcaaggaaccagug

SEQ ID NO: 1584678 - RNA, 17 nt, Human adenovirus F
acuggaguaacacaaug

SEQ ID NO: 1584679 - RNA, 13 nt, Human adenovirus F
ccgagcggcugcu

SEQ ID NO: 1584680 - RNA, 20 nt, Human adenovirus F
uggaggagauggugggccgc

SEQ ID NO: 1584681 - RNA, 22 nt, Human adenovirus F
accuuaaccacccccaacucug

SEQ ID NO: 1584682 - RNA, 19 nt, Human adenovirus F
caaccuucaaacccagccg

SEQ ID NO: 1584683 - RNA, 17 nt, Human adenovirus F
acaacccgucuucccuc

SEQ ID NO: 1584684 - RNA, 21 nt, Human adenovirus F
gcaugcccgagccggagaggg

SEQ ID NO: 1584685 - RNA, 23 nt, Human adenovirus F
ccagcguucaaaaccucuuacaa

SEQ ID NO: 1584686 - RNA, 20 nt, Human adenovirus F
ccuguuacuauuaaugcaaa

SEQ ID NO: 1584687 - RNA, 17 nt, Human adenovirus F
acccgcacuggaugcca

SEQ ID NO: 1584688 - RNA, 15 nt, Human adenovirus F
cacugaccggcaccu

SEQ ID NO: 1584689 - RNA, 20 nt, Human adenovirus F
cgucgcgaacucuggacguc

SEQ ID NO: 1584690 - RNA, 14 nt, Human adenovirus F
cgacagccagcugu

SEQ ID NO: 1584691 - RNA, 20 nt, Human adenovirus F
uuuugaugaagcgugguaaa

SEQ ID NO: 1584692 - RNA, 16 nt, Human adenovirus F
gaggcuauuggccaga

SEQ ID NO: 1584693 - RNA, 18 nt, Human adenovirus F
ggugauaucauuaaaaag

SEQ ID NO: 1584694 - RNA, 22 nt, Human adenovirus F
cgagcuuuuacugggacagcag

SEQ ID NO: 1584695 - RNA, 16 nt, Human adenovirus F
gcgcgaacugggcugc

SEQ ID NO: 1584696 - RNA, 19 nt, Human adenovirus F
gucgccaucaugagucugu

SEQ ID NO: 1584697 - RNA, 21 nt, Human adenovirus F
ggacgccgaggcacuguucaa

SEQ ID NO: 1584698 - RNA, 17 nt, Human adenovirus F
cacuagcgccccugcag

SEQ ID NO: 1584699 - RNA, 17 nt, Human adenovirus F
cuuugucagccaaagua

SEQ ID NO: 1584700 - RNA, 15 nt, Human adenovirus F
cugaaguucagaaca

SEQ ID NO: 1584701 - RNA, 15 nt, Human adenovirus F
ucuaagggaggcagc

SEQ ID NO: 1584702 - RNA, 23 nt, Human adenovirus F
gaccucagggucgauggagccag

SEQ ID NO: 1584703 - RNA, 17 nt, Human adenovirus F
augagacgugcgguggg

SEQ ID NO: 1584704 - RNA, 16 nt, Human adenovirus F
ccgccguggacgcacg

SEQ ID NO: 1584705 - RNA, 14 nt, Human adenovirus F
agcuaucagccgca

SEQ ID NO: 1584706 - RNA, 15 nt, Human adenovirus F
ucacucucagcugcu

SEQ ID NO: 1584707 - RNA, 15 nt, Human adenovirus F
ccaacgugcaggcca

SEQ ID NO: 1584708 - RNA, 16 nt, Human adenovirus F
aauggcagcccagcgc

SEQ ID NO: 1584709 - RNA, 12 nt, Human adenovirus F
cgccgccccugg

SEQ ID NO: 1584710 - RNA, 14 nt, Human adenovirus F
cggcgggaagagga

SEQ ID NO: 1584711 - RNA, 15 nt, Human adenovirus F
cuaugaguggaacuu

SEQ ID NO: 1584712 - RNA, 17 nt, Human adenovirus F
auucccuuuuccagcaa

SEQ ID NO: 1584713 - RNA, 11 nt, Human adenovirus F
cuauugccagc

SEQ ID NO: 1584714 - RNA, 21 nt, Human adenovirus F
agcucuaaauaugucacagcc

SEQ ID NO: 1584715 - RNA, 15 nt, Human adenovirus F
agagcuaaggaggag

SEQ ID NO: 1584716 - RNA, 22 nt, Human adenovirus F
gaccuuccaggaaaucaccagc

SEQ ID NO: 1584717 - RNA, 20 nt, Human adenovirus F
aacaaaaaaaaaauauuaau

SEQ ID NO: 1584718 - RNA, 16 nt, Human adenovirus F
cagccccaggccaacc

SEQ ID NO: 1584719 - RNA, 20 nt, Human adenovirus F
uccauguggaaccaggcagu

SEQ ID NO: 1584720 - RNA, 21 nt, Human adenovirus F
aagugcagaggcguacaugcc

SEQ ID NO: 1584721 - RNA, 22 nt, Human adenovirus F
ccaccuugauacggauugucuu

SEQ ID NO: 1584722 - RNA, 12 nt, Human adenovirus F
uccggaggcagu

SEQ ID NO: 1584723 - RNA, 18 nt, Human adenovirus F
augguugaaaaagaucag

SEQ ID NO: 1584724 - RNA, 13 nt, Human adenovirus F
agaccucaccucg

SEQ ID NO: 1584725 - RNA, 16 nt, Human adenovirus F
cagcagccccaggcca

SEQ ID NO: 1584726 - RNA, 21 nt, Human adenovirus F
aagaauacuaaaacaaaccac

SEQ ID NO: 1584727 - RNA, 23 nt, Human adenovirus F
agguuugacagcauuaaccugua

SEQ ID NO: 1584728 - RNA, 18 nt, Human adenovirus F
gccuugggaugcagccuu

SEQ ID NO: 1584729 - RNA, 15 nt, Human adenovirus F
aucuaucccuugauu

SEQ ID NO: 1584730 - RNA, 22 nt, Human adenovirus F
gcaguguuauaagguccacacu

SEQ ID NO: 1584731 - RNA, 22 nt, Human adenovirus F
uaaagacguuaagguaaagcca

SEQ ID NO: 1584732 - RNA, 21 nt, Human adenovirus F
auaacuuucuuacacuagcca

SEQ ID NO: 1584733 - RNA, 15 nt, Human adenovirus F
acugacgcugcgcuu

SEQ ID NO: 1584734 - RNA, 16 nt, Human adenovirus F
aagauggcgugggagu

SEQ ID NO: 1584735 - RNA, 19 nt, Human adenovirus F
uccaaaggucagaaaaacc

SEQ ID NO: 1584736 - RNA, 18 nt, Human adenovirus F
cgcucccaaucgaccuaa

SEQ ID NO: 1584737 - RNA, 14 nt, Human adenovirus F
caacgcugcaggcg

SEQ ID NO: 1584738 - RNA, 20 nt, Human adenovirus F
uaaccacccccaacucugag

SEQ ID NO: 1584739 - RNA, 13 nt, Human adenovirus F
gcaucucaaagcu

SEQ ID NO: 1584740 - RNA, 22 nt, Human adenovirus F
acagaauucuaaccguuaaucu

SEQ ID NO: 1584741 - RNA, 22 nt, Human adenovirus F
agacauuguuuugcuaccuggu

SEQ ID NO: 1584742 - RNA, 15 nt, Human adenovirus F
ugccgcggacgucaa

SEQ ID NO: 1584743 - RNA, 23 nt, Human adenovirus F
cgucuaccccuaugacaccuccu

SEQ ID NO: 1584744 - RNA, 18 nt, Human adenovirus F
acgagguagugagcucuu

SEQ ID NO: 1584745 - RNA, 18 nt, Human adenovirus F
uugccggcaacgcugcag

SEQ ID NO: 1584746 - RNA, 16 nt, Human adenovirus F
agaugcgauuuuccaa

SEQ ID NO: 1584747 - RNA, 21 nt, Human adenovirus F
gcaacucauggugccaaagcg

SEQ ID NO: 1584748 - RNA, 16 nt, Human adenovirus F
cgcaugccuccagcac

SEQ ID NO: 1584749 - RNA, 19 nt, Human adenovirus F
agcuacguugcgauacugc

SEQ ID NO: 1584750 - RNA, 20 nt, Human adenovirus F
gccugaucccgaagagggua

SEQ ID NO: 1584751 - RNA, 22 nt, Human adenovirus F
agggggaggacuuuuuaaagga

SEQ ID NO: 1584752 - RNA, 12 nt, Human adenovirus F
aacgagcaggcc

SEQ ID NO: 1584753 - RNA, 17 nt, Human adenovirus F
cacggggucuauuugga

SEQ ID NO: 1584754 - RNA, 17 nt, Human adenovirus F
uggcuuuuggaccuggu

SEQ ID NO: 1584755 - RNA, 13 nt, Human adenovirus F
auuacagguauaa

SEQ ID NO: 1584756 - RNA, 17 nt, Human adenovirus F
uaaaacuuuauggaugu

SEQ ID NO: 1584757 - RNA, 17 nt, Human adenovirus F
cggacuuggcgugcaga

SEQ ID NO: 1584758 - RNA, 12 nt, Human adenovirus F
acgcacgcugac

SEQ ID NO: 1584759 - RNA, 23 nt, Human adenovirus F
agaccucaacgcggggcaccuuc

SEQ ID NO: 1584760 - RNA, 13 nt, Human adenovirus F
gaggccauccugg

SEQ ID NO: 1584761 - RNA, 21 nt, Human adenovirus F
gucagaacggcgugcuggaaa

SEQ ID NO: 1584762 - RNA, 23 nt, Human adenovirus F
agaugcgccucaugagcugggag

SEQ ID NO: 1584763 - RNA, 14 nt, Human adenovirus F
ggucuuacaugcac

SEQ ID NO: 1584764 - RNA, 19 nt, Human adenovirus F
aggcccuugugccugaaau

SEQ ID NO: 1584765 - RNA, 15 nt, Human adenovirus F
ccguuaaucucccuc

SEQ ID NO: 1584766 - RNA, 16 nt, Human adenovirus F
accuccucaacuccca

SEQ ID NO: 1584767 - RNA, 18 nt, Human adenovirus F
uaggacgucagaacggcg

SEQ ID NO: 1584768 - RNA, 16 nt, Human adenovirus F
agggaucgcagcgggc

SEQ ID NO: 1584769 - RNA, 17 nt, Human adenovirus F
uccgcugggagaaaacc

SEQ ID NO: 1584770 - RNA, 19 nt, Human adenovirus F
caagugucccacugcaacu

SEQ ID NO: 1584771 - RNA, 23 nt, Human adenovirus F
cuggaacgagaucggcaccagcc

SEQ ID NO: 1584772 - RNA, 17 nt, Human adenovirus F
acaaucgcgauguguuu

SEQ ID NO: 1584773 - RNA, 21 nt, Human adenovirus F
ugaaaaccauuuugcgcacca

SEQ ID NO: 1584774 - RNA, 14 nt, Human adenovirus F
gaggacgagcccug

SEQ ID NO: 1584775 - RNA, 19 nt, Human adenovirus F
accgcugcagcugcugccg

SEQ ID NO: 1584776 - RNA, 14 nt, Human adenovirus F
ugacgugccugagg

SEQ ID NO: 1584777 - RNA, 15 nt, Human adenovirus F
uuccugcgcugcuac

SEQ ID NO: 1584778 - RNA, 17 nt, Human adenovirus F
ugggagucuggcagcag

SEQ ID NO: 1584779 - RNA, 12 nt, Human adenovirus F
gccccaccgccc

SEQ ID NO: 1584780 - RNA, 19 nt, Human adenovirus F
aggccauccuggaccugga

SEQ ID NO: 1584781 - RNA, 13 nt, Human adenovirus F
agcuggagggcaa

SEQ ID NO: 1584782 - RNA, 18 nt, Human adenovirus F
accggaguaugccuugca

SEQ ID NO: 1584783 - RNA, 13 nt, Human adenovirus F
cugacccuuccca

SEQ ID NO: 1584784 - RNA, 13 nt, Human adenovirus F
ucaacgcaguggu

SEQ ID NO: 1584785 - RNA, 12 nt, Human adenovirus F
uccgcccgcucc

SEQ ID NO: 1584786 - RNA, 17 nt, Human adenovirus F
caacugcagcgcacgcu

SEQ ID NO: 1584787 - RNA, 23 nt, Human adenovirus F
gaaucuaaccacuaccacccucc

SEQ ID NO: 1584788 - RNA, 14 nt, Human adenovirus F
aaacaugaggagga

SEQ ID NO: 1584789 - RNA, 15 nt, Human adenovirus F
gagaggcgguggcgc

SEQ ID NO: 1584790 - RNA, 18 nt, Human adenovirus F
cguauucacaaagcugug

SEQ ID NO: 1584791 - RNA, 20 nt, Human adenovirus F
uccagcauaauaacucuggc

SEQ ID NO: 1584792 - RNA, 18 nt, Human adenovirus F
ggcgauggggccuuggga

SEQ ID NO: 1584793 - RNA, 23 nt, Human adenovirus F
guuucgcacuccacuaaccaggc

SEQ ID NO: 1584794 - RNA, 15 nt, Human adenovirus F
auuggucaaaaacuc

SEQ ID NO: 1584795 - RNA, 16 nt, Human adenovirus F
ccagaugucaacggca

SEQ ID NO: 1584796 - RNA, 23 nt, Human adenovirus F
cucgauuuccauaaacuccucuu

SEQ ID NO: 1584797 - RNA, 15 nt, Human adenovirus F
acaaaagcaguggga

SEQ ID NO: 1584798 - RNA, 16 nt, Human adenovirus F
acggcgcagcagaucc

SEQ ID NO: 1584799 - RNA, 20 nt, Human adenovirus F
aggcauaaaguugcggguga

SEQ ID NO: 1584800 - RNA, 17 nt, Human adenovirus F
ugacgaagacauucuug

SEQ ID NO: 1584801 - RNA, 22 nt, Human adenovirus F
uaucacuaaaaccaacaaaauc

SEQ ID NO: 1584802 - RNA, 16 nt, Human adenovirus F
gcuacggaggaagagg

SEQ ID NO: 1584803 - RNA, 21 nt, Human adenovirus F
uggccgcacucagcgaaccca

SEQ ID NO: 1584804 - RNA, 14 nt, Human adenovirus F
caguucgcccgugc

SEQ ID NO: 1584805 - RNA, 21 nt, Human adenovirus F
ggaguggcauuaaaaacuuug

SEQ ID NO: 1584806 - RNA, 21 nt, Human adenovirus F
gcaaacgagaggaccacuuaa

SEQ ID NO: 1584807 - RNA, 18 nt, Human adenovirus F
cguccaguggagcaaggg

SEQ ID NO: 1584808 - RNA, 11 nt, Human adenovirus F
ccuuccacuuu

SEQ ID NO: 1584809 - RNA, 12 nt, Human adenovirus F
auggaguugugg

SEQ ID NO: 1584810 - RNA, 16 nt, Human adenovirus F
acuggagggcgucaug

SEQ ID NO: 1584811 - RNA, 19 nt, Human adenovirus F
aucaugcuucugacaugcu

SEQ ID NO: 1584812 - RNA, 16 nt, Human adenovirus F
aaagcuggagcucaca

SEQ ID NO: 1584813 - RNA, 20 nt, Human adenovirus F
ggacccuucaacggaauugu

SEQ ID NO: 1584814 - RNA, 21 nt, Human adenovirus F
caccucuguuugcugcacugc

SEQ ID NO: 1584815 - RNA, 23 nt, Human adenovirus F
cuuccucguuguuuuccucugac

SEQ ID NO: 1584816 - RNA, 18 nt, Human adenovirus F
cgcggcggcuauugccag

SEQ ID NO: 1584817 - RNA, 16 nt, Human adenovirus F
gguaggaacuugaagc

SEQ ID NO: 1584818 - RNA, 20 nt, Human adenovirus F
ggcgugggaguuggaggaga

SEQ ID NO: 1584819 - RNA, 23 nt, Human adenovirus F
gacgacugggcggcggccaugga

SEQ ID NO: 1584820 - RNA, 12 nt, Human adenovirus F
cgggccuggugc

SEQ ID NO: 1584821 - RNA, 21 nt, Human adenovirus F
cgaguucacuuugccagaggg

SEQ ID NO: 1584822 - RNA, 18 nt, Human adenovirus F
caaucagcggcuggaaaa

SEQ ID NO: 1584823 - RNA, 17 nt, Human adenovirus F
guuggugaugcccggcg

SEQ ID NO: 1584824 - RNA, 16 nt, Human adenovirus F
cuacauccauuuccac

SEQ ID NO: 1584825 - RNA, 13 nt, Human adenovirus F
uaaacccacagcu

SEQ ID NO: 1584826 - RNA, 16 nt, Human adenovirus F
ucaaccaacuaacacu

SEQ ID NO: 1584827 - RNA, 14 nt, Human adenovirus F
gcagcgggcaggag

SEQ ID NO: 1584828 - RNA, 20 nt, Human adenovirus F
agggauacuagcaaacagug

SEQ ID NO: 1584829 - RNA, 16 nt, Human adenovirus F
augggcaccuggaacg

SEQ ID NO: 1584830 - RNA, 15 nt, Human adenovirus F
gguagugagcucuuc

SEQ ID NO: 1584831 - RNA, 23 nt, Human adenovirus F
gccaauuaucuacgccuccacca

SEQ ID NO: 1584832 - RNA, 19 nt, Human adenovirus F
gcauaguugcucccaaagu

SEQ ID NO: 1584833 - RNA, 12 nt, Human adenovirus F
cggggugggaaa

SEQ ID NO: 1584834 - RNA, 21 nt, Human adenovirus F
gacagggcgcuaacugugcau

SEQ ID NO: 1584835 - RNA, 17 nt, Human adenovirus F
uaaaaacuugcaaggaa

SEQ ID NO: 1584836 - RNA, 23 nt, Human adenovirus F
ucuggaaucagcaucuuaggaag

SEQ ID NO: 1584837 - RNA, 21 nt, Human adenovirus F
gccuaagugugacauuacuuc

SEQ ID NO: 1584838 - RNA, 14 nt, Human adenovirus F
cucugaacacuuuu

SEQ ID NO: 1584839 - RNA, 17 nt, Human adenovirus F
ccauauuauuuaaauaa

SEQ ID NO: 1584840 - RNA, 15 nt, Human adenovirus F
cgagauaaacagugg

SEQ ID NO: 1584841 - RNA, 21 nt, Human adenovirus F
aaagagaguucaacagaauca

SEQ ID NO: 1584842 - RNA, 15 nt, Human adenovirus F
auggcccgaccugua

SEQ ID NO: 1584843 - RNA, 14 nt, Human adenovirus F
gacagcaaggaaag

SEQ ID NO: 1584844 - RNA, 19 nt, Human adenovirus F
ccucuucuccugcuugucu

SEQ ID NO: 1584845 - RNA, 18 nt, Human adenovirus F
cuaaggacuucaccuaca

SEQ ID NO: 1584846 - RNA, 20 nt, Human adenovirus F
acaaggacagucugccaaca

SEQ ID NO: 1584847 - RNA, 21 nt, Human adenovirus F
gaacacgcugccaacaaaugu

SEQ ID NO: 1584848 - RNA, 21 nt, Human adenovirus F
uacacugauccacuuacaacc

SEQ ID NO: 1584849 - RNA, 18 nt, Human adenovirus F
uucggcuugcauaaaagc

SEQ ID NO: 1584850 - RNA, 22 nt, Human adenovirus F
ccgagcuuuuacugggacagca

SEQ ID NO: 1584851 - RNA, 15 nt, Human adenovirus F
acgagcuugcucgcu

SEQ ID NO: 1584852 - RNA, 15 nt, Human adenovirus F
acagccccagcuggu

SEQ ID NO: 1584853 - RNA, 13 nt, Human adenovirus F
gugcaacacagcc

SEQ ID NO: 1584854 - RNA, 14 nt, Human adenovirus F
ugaacguugcauua

SEQ ID NO: 1584855 - RNA, 22 nt, Human adenovirus F
gcuacaguuucgcgcaccucuu

SEQ ID NO: 1584856 - RNA, 19 nt, Human adenovirus F
ggccauggucauuuuuuca

SEQ ID NO: 1584857 - RNA, 22 nt, Human adenovirus F
ggcuccgacgcuuggcaccgcc

SEQ ID NO: 1584858 - RNA, 16 nt, Human adenovirus F
caacgcagugguggac

SEQ ID NO: 1584859 - RNA, 17 nt, Human adenovirus F
cgauggagccagcguca

SEQ ID NO: 1584860 - RNA, 17 nt, Human adenovirus F
ugcugaauauugcggag

SEQ ID NO: 1584861 - RNA, 13 nt, Human adenovirus F
uuuaugaaucacu

SEQ ID NO: 1584862 - RNA, 21 nt, Human adenovirus F
aggcgagaaaauauggaggag

SEQ ID NO: 1584863 - RNA, 12 nt, Human adenovirus F
cuuucuuacaac

SEQ ID NO: 1584864 - RNA, 18 nt, Human adenovirus F
gguggaauuacugccagu

SEQ ID NO: 1584865 - RNA, 17 nt, Human adenovirus F
uugacauuccuccgccu

SEQ ID NO: 1584866 - RNA, 19 nt, Human adenovirus F
aaaucuaccacagaaaugu

SEQ ID NO: 1584867 - RNA, 13 nt, Human adenovirus F
gcgggaagagagg

SEQ ID NO: 1584868 - RNA, 18 nt, Human adenovirus F
gcauacguuacucggagc

SEQ ID NO: 1584869 - RNA, 12 nt, Human adenovirus F
ggcccuggaggc

SEQ ID NO: 1584870 - RNA, 21 nt, Human adenovirus F
agaacugggaguugcgcgccg

SEQ ID NO: 1584871 - RNA, 13 nt, Human adenovirus F
cagcaccauuagc

SEQ ID NO: 1584872 - RNA, 14 nt, Human adenovirus F
cuguucuaaaacca

SEQ ID NO: 1584873 - RNA, 14 nt, Human adenovirus F
caucuucaccucug

SEQ ID NO: 1584874 - RNA, 21 nt, Human adenovirus F
aaaagugaaccggaaaaccaa

SEQ ID NO: 1584875 - RNA, 16 nt, Human adenovirus F
ccaggcguggccuccg

SEQ ID NO: 1584876 - RNA, 18 nt, Human adenovirus F
gcugugucagcuaacucu

SEQ ID NO: 1584877 - RNA, 16 nt, Human adenovirus F
guguaccugucgccca

SEQ ID NO: 1584878 - RNA, 20 nt, Human adenovirus F
ggacacggggucuauuugga

SEQ ID NO: 1584879 - RNA, 12 nt, Human adenovirus F
agaugaggagga

SEQ ID NO: 1584880 - RNA, 22 nt, Human adenovirus F
aggccgagguauccagcucaac

SEQ ID NO: 1584881 - RNA, 16 nt, Human adenovirus F
aaaaaggcuaaucauu

SEQ ID NO: 1584882 - RNA, 20 nt, Human adenovirus F
uaaaccaauuugcuaacacu

SEQ ID NO: 1584883 - RNA, 23 nt, Human adenovirus F
auuuaauggcacaguguuugcuu

SEQ ID NO: 1584884 - RNA, 18 nt, Human adenovirus F
gaagcuugcccuuggaaa

SEQ ID NO: 1584885 - RNA, 12 nt, Human adenovirus F
gagcgccauccc

SEQ ID NO: 1584886 - RNA, 14 nt, Human adenovirus F
gcuaaccugugcag

SEQ ID NO: 1584887 - RNA, 18 nt, Human adenovirus F
agaguuugggagccagga

SEQ ID NO: 1584888 - RNA, 17 nt, Human adenovirus F
ucacggaacccugccgc

SEQ ID NO: 1584889 - RNA, 18 nt, Human adenovirus F
cuaccgcgaaugcccccc

SEQ ID NO: 1584890 - RNA, 18 nt, Human adenovirus F
gcggggcgucaagaggga

SEQ ID NO: 1584891 - RNA, 14 nt, Human adenovirus F
gcuaugugcagcag

SEQ ID NO: 1584892 - RNA, 20 nt, Human adenovirus F
cuaagggaggcagcagagga

SEQ ID NO: 1584893 - RNA, 15 nt, Human adenovirus F
agcccaacaccacca

SEQ ID NO: 1584894 - RNA, 19 nt, Human adenovirus F
accuuuuuacccugaccca

SEQ ID NO: 1584895 - RNA, 22 nt, Human adenovirus F
caugcugcuguuuuuacuuugc

SEQ ID NO: 1584896 - RNA, 17 nt, Human adenovirus F
acagcguagcacucccu

SEQ ID NO: 1584897 - RNA, 19 nt, Human adenovirus F
uuaccacugccacugaaac

SEQ ID NO: 1584898 - RNA, 16 nt, Human adenovirus F
agacgacuucaacccc

SEQ ID NO: 1584899 - RNA, 16 nt, Human adenovirus F
gugcaguggcggggac

SEQ ID NO: 1584900 - RNA, 21 nt, Human adenovirus F
caguuggagcagccuguggag

SEQ ID NO: 1584901 - RNA, 13 nt, Human adenovirus F
cacugacuuccug

SEQ ID NO: 1584902 - RNA, 17 nt, Human adenovirus F
cauguucacugaaagcc

SEQ ID NO: 1584903 - RNA, 23 nt, Human adenovirus F
caugaccaaaccuauugguucca

SEQ ID NO: 1584904 - RNA, 11 nt, Human adenovirus F
cagcaagcugc

SEQ ID NO: 1584905 - RNA, 23 nt, Human adenovirus F
uccucgauuuccauaaacuccuc

SEQ ID NO: 1584906 - RNA, 15 nt, Human adenovirus F
ccuggaccuggaaga

SEQ ID NO: 1584907 - RNA, 17 nt, Human adenovirus F
ggagucuuucagcuugg

SEQ ID NO: 1584908 - RNA, 20 nt, Human adenovirus F
cguagagcucagcaaucuga

SEQ ID NO: 1584909 - RNA, 14 nt, Human adenovirus F
ucaagaaauuguga

SEQ ID NO: 1584910 - RNA, 22 nt, Human adenovirus F
aacguacucuuuugccacgcag

SEQ ID NO: 1584911 - RNA, 15 nt, Human adenovirus F
ucagagcugcaagag

SEQ ID NO: 1584912 - RNA, 12 nt, Human adenovirus F
caaccauguuca

SEQ ID NO: 1584913 - RNA, 19 nt, Human adenovirus F
uggugaguugguagcagug

SEQ ID NO: 1584914 - RNA, 15 nt, Human adenovirus F
aacucuuacaccucc

SEQ ID NO: 1584915 - RNA, 13 nt, Human adenovirus F
agaguuugggagc

SEQ ID NO: 1584916 - RNA, 14 nt, Human adenovirus F
gcagcugcguacgg

SEQ ID NO: 1584917 - RNA, 21 nt, Human adenovirus F
cggccuacugccgccaugacu

SEQ ID NO: 1584918 - RNA, 13 nt, Human adenovirus F
cgggcaccggcac

SEQ ID NO: 1584919 - RNA, 23 nt, Human adenovirus F
gggagccaggaagacggacucug

SEQ ID NO: 1584920 - RNA, 14 nt, Human adenovirus F
ccgccccugccacc

SEQ ID NO: 1584921 - RNA, 19 nt, Human adenovirus F
uauuacaaaugccucccuu

SEQ ID NO: 1584922 - RNA, 21 nt, Human adenovirus F
gcguucgacgcgaggaugaga

SEQ ID NO: 1584923 - RNA, 15 nt, Human adenovirus F
aauagacgccccacu

SEQ ID NO: 1584924 - RNA, 15 nt, Human adenovirus F
gcccaccacucugau

SEQ ID NO: 1584925 - RNA, 16 nt, Human adenovirus F
cagggucgauggagcc

SEQ ID NO: 1584926 - RNA, 14 nt, Human adenovirus F
gugcacuuggggaa

SEQ ID NO: 1584927 - RNA, 16 nt, Human adenovirus F
cgaaugcccuuucaaa

SEQ ID NO: 1584928 - RNA, 16 nt, Human adenovirus F
gcggggcuaacuggca

SEQ ID NO: 1584929 - RNA, 21 nt, Human adenovirus F
cagcgcccgggcccuggaggc

SEQ ID NO: 1584930 - RNA, 17 nt, Human adenovirus F
aaagcgagccaaagugc

SEQ ID NO: 1584931 - RNA, 16 nt, Human adenovirus F
uacuucuucagcucua

SEQ ID NO: 1584932 - RNA, 17 nt, Human adenovirus F
gcaaacaacgaacuuuc

SEQ ID NO: 1584933 - RNA, 22 nt, Human adenovirus F
ugcgcuguacugugcauuuggg

SEQ ID NO: 1584934 - RNA, 15 nt, Human adenovirus F
aggguacuagcagug

SEQ ID NO: 1584935 - RNA, 12 nt, Human adenovirus F
gccccugccaac

SEQ ID NO: 1584936 - RNA, 16 nt, Human adenovirus F
guaacagaacaauaaa

SEQ ID NO: 1584937 - RNA, 15 nt, Human adenovirus F
ccaacugcagcgcac

SEQ ID NO: 1584938 - RNA, 19 nt, Human adenovirus F
uuauuguucaaggaaacaa

SEQ ID NO: 1584939 - RNA, 16 nt, Human adenovirus F
auuucaccuacucugg

SEQ ID NO: 1584940 - RNA, 20 nt, Human adenovirus F
uguuucuccuccccuuacaa

SEQ ID NO: 1584941 - RNA, 20 nt, Human adenovirus F
ucugccaucgcugaccagca

SEQ ID NO: 1584942 - RNA, 24 nt, Human adenovirus F
cuagccaacuauuuggcccaccac

SEQ ID NO: 1584943 - RNA, 19 nt, Human adenovirus F
agcggcacgucggcgugga

SEQ ID NO: 1584944 - RNA, 21 nt, Human adenovirus F
agggaucgcagcgggcaggag

SEQ ID NO: 1584945 - RNA, 16 nt, Human adenovirus F
aaggacgguggcauga

SEQ ID NO: 1584946 - RNA, 22 nt, Human adenovirus F
ugagcuuggauuaggaagggca

SEQ ID NO: 1584947 - RNA, 22 nt, Human adenovirus F
gagcuauuacuuuagcacuaga

SEQ ID NO: 1584948 - RNA, 23 nt, Human adenovirus F
auaauuuccgcuaguuuaauauu

SEQ ID NO: 1584949 - RNA, 15 nt, Human adenovirus F
cugcacgcucuugcu

SEQ ID NO: 1584950 - RNA, 20 nt, Human adenovirus F
cagguaggaccacuggaggg

SEQ ID NO: 1584951 - RNA, 14 nt, Human adenovirus F
caucuuucaaaaaa

SEQ ID NO: 1584952 - RNA, 15 nt, Human adenovirus F
ugaccgagcagcugc

SEQ ID NO: 1584953 - RNA, 19 nt, Human adenovirus F
gcggaggugccccagagug

SEQ ID NO: 1584954 - RNA, 18 nt, Human adenovirus F
uggcauggcagcagauuu

SEQ ID NO: 1584955 - RNA, 22 nt, Human adenovirus F
cguggauuccugggguagggug

SEQ ID NO: 1584956 - RNA, 16 nt, Human adenovirus F
agaccuuccaggaaau

SEQ ID NO: 1584957 - RNA, 14 nt, Human adenovirus F
cgcuguacugugca

SEQ ID NO: 1584958 - RNA, 16 nt, Human adenovirus F
ucagcucuaagacugu

SEQ ID NO: 1584959 - RNA, 17 nt, Human adenovirus F
gccaucgcugaccagca

SEQ ID NO: 1584960 - RNA, 15 nt, Human adenovirus F
uauacacucccuuug

SEQ ID NO: 1584961 - RNA, 14 nt, Human adenovirus F
ugggacagcaggcc

SEQ ID NO: 1584962 - RNA, 21 nt, Human adenovirus F
aaagcagugggacgaggagga

SEQ ID NO: 1584963 - RNA, 23 nt, Human adenovirus F
agcuuuuacugggacagcaggcc

SEQ ID NO: 1584964 - RNA, 14 nt, Human adenovirus F
cccgauacccaccu

SEQ ID NO: 1584965 - RNA, 20 nt, Human adenovirus F
auggggccuugggaugcagc

SEQ ID NO: 1584966 - RNA, 20 nt, Human adenovirus F
uucucccaggcggaaaccaa

SEQ ID NO: 1584967 - RNA, 19 nt, Human adenovirus F
ugcaauauaaaaacaacca

SEQ ID NO: 1584968 - RNA, 17 nt, Human adenovirus F
cacaugaacacuuccgc

SEQ ID NO: 1584969 - RNA, 17 nt, Human adenovirus F
agguagaaguggaggaa

SEQ ID NO: 1584970 - RNA, 21 nt, Human adenovirus F
acuggcuggcccuggccugga

SEQ ID NO: 1584971 - RNA, 13 nt, Human adenovirus F
uaugucugccaaa

SEQ ID NO: 1584972 - RNA, 20 nt, Human adenovirus F
auguggaaccaggcagugga

SEQ ID NO: 1584973 - RNA, 22 nt, Human adenovirus F
uacugggacagcaggccgcucc

SEQ ID NO: 1584974 - RNA, 11 nt, Human adenovirus F
ccagaccccau

SEQ ID NO: 1584975 - RNA, 17 nt, Human adenovirus F
ggggcccguucuggacu

SEQ ID NO: 1584976 - RNA, 15 nt, Human adenovirus F
aauagauagcuuuua

SEQ ID NO: 1584977 - RNA, 21 nt, Human adenovirus F
cguagacgcuggaagagguag

SEQ ID NO: 1584978 - RNA, 13 nt, Human adenovirus F
acaaaagcuuuca

SEQ ID NO: 1584979 - RNA, 18 nt, Human adenovirus F
cgggaagaauacuaaaac

SEQ ID NO: 1584980 - RNA, 18 nt, Human adenovirus F
caugaaaguuccucuucu

SEQ ID NO: 1584981 - RNA, 14 nt, Human adenovirus F
agucuaagccuggc

SEQ ID NO: 1584982 - RNA, 22 nt, Human adenovirus F
agaugcguccgacggcgccucc

SEQ ID NO: 1584983 - RNA, 22 nt, Human adenovirus F
aaauagagccgaucccagagcu

SEQ ID NO: 1584984 - RNA, 17 nt, Human adenovirus F
cucgcccuauuccuccg

SEQ ID NO: 1584985 - RNA, 22 nt, Human adenovirus F
gaaggguauaggcuugugcggc

SEQ ID NO: 1584986 - RNA, 14 nt, Human adenovirus F
gguuuuugagcaug

SEQ ID NO: 1584987 - RNA, 13 nt, Human adenovirus F
aucccccgagcgc

SEQ ID NO: 1584988 - RNA, 16 nt, Human adenovirus F
ccaaucguagcagggu

SEQ ID NO: 1584989 - RNA, 14 nt, Human adenovirus F
aaggacagucugcc

SEQ ID NO: 1584990 - RNA, 22 nt, Human adenovirus F
ggguagaguaaaaaaaagggaa

SEQ ID NO: 1584991 - RNA, 12 nt, Human adenovirus F
caaaacacuaaa

SEQ ID NO: 1584992 - RNA, 16 nt, Human adenovirus F
agccgaugcccaacgc

SEQ ID NO: 1584993 - RNA, 16 nt, Human adenovirus F
guucgccuggagaggc

SEQ ID NO: 1584994 - RNA, 18 nt, Human adenovirus F
aaauaauaauuuagcucu

SEQ ID NO: 1584995 - RNA, 17 nt, Human adenovirus F
ggugacccuaacauggc

SEQ ID NO: 1584996 - RNA, 16 nt, Human adenovirus F
gcccugaucagccagg

SEQ ID NO: 1584997 - RNA, 19 nt, Human adenovirus F
gacaugggggcggaccugc

SEQ ID NO: 1584998 - RNA, 16 nt, Human adenovirus F
gaaacaaaagucaaau

SEQ ID NO: 1584999 - RNA, 14 nt, Human adenovirus F
uacgugccuuuuca

SEQ ID NO: 1585000 - RNA, 16 nt, Human adenovirus F
cauauacuuuaaacaa

SEQ ID NO: 1585001 - RNA, 14 nt, Human adenovirus F
ccgcccgcuccgac

SEQ ID NO: 1585002 - RNA, 17 nt, Human adenovirus F
aaucuuccucccaaagu

SEQ ID NO: 1585003 - RNA, 18 nt, Human adenovirus F
cugcaauggcagcccagc

SEQ ID NO: 1585004 - RNA, 15 nt, Human adenovirus F
cucuuggucagcaag

SEQ ID NO: 1585005 - RNA, 20 nt, Human adenovirus F
cuggccaacugccaccucca

SEQ ID NO: 1585006 - RNA, 16 nt, Human adenovirus F
caccuuacaccacccc

SEQ ID NO: 1585007 - RNA, 13 nt, Human adenovirus F
cggcaaggaacca

SEQ ID NO: 1585008 - RNA, 20 nt, Human adenovirus F
gccagcauggcucagccccg

SEQ ID NO: 1585009 - RNA, 14 nt, Human adenovirus F
uugccuucuuuucu

SEQ ID NO: 1585010 - RNA, 12 nt, Human adenovirus F
agugagcucuuc

SEQ ID NO: 1585011 - RNA, 17 nt, Human adenovirus F
acucuuuauuuuucuga

SEQ ID NO: 1585012 - RNA, 19 nt, Human adenovirus F
uacgagaaaucggagaggg

SEQ ID NO: 1585013 - RNA, 22 nt, Human adenovirus F
aaggcuggcacacgcacuucaa

SEQ ID NO: 1585014 - RNA, 18 nt, Human adenovirus F
ucccaucaucgccgccgc

SEQ ID NO: 1585015 - RNA, 21 nt, Human adenovirus F
cuccacaugauacuuuuccau

SEQ ID NO: 1585016 - RNA, 13 nt, Human adenovirus F
ugccugcagcgcu

SEQ ID NO: 1585017 - RNA, 20 nt, Human adenovirus F
uucccgguccauacuugugc

SEQ ID NO: 1585018 - RNA, 14 nt, Human adenovirus F
gcuuacacccgcgg

SEQ ID NO: 1585019 - RNA, 21 nt, Human adenovirus F
ugaacgugaccgagcagcugc

SEQ ID NO: 1585020 - RNA, 12 nt, Human adenovirus F
ccuuacagccug

SEQ ID NO: 1585021 - RNA, 16 nt, Human adenovirus F
ggugaaaugaauuugu

SEQ ID NO: 1585022 - RNA, 12 nt, Human adenovirus F
cgcgcgggcagg

SEQ ID NO: 1585023 - RNA, 19 nt, Human adenovirus F
caggagcagcgggaagaga

SEQ ID NO: 1585024 - RNA, 17 nt, Human adenovirus F
gcggccguuuaugggca

SEQ ID NO: 1585025 - RNA, 14 nt, Human adenovirus F
cgcaaaagcuggga

SEQ ID NO: 1585026 - RNA, 13 nt, Human adenovirus F
aaaaccgccacau

SEQ ID NO: 1585027 - RNA, 12 nt, Human adenovirus F
gcgccccugcag

SEQ ID NO: 1585028 - RNA, 16 nt, Human adenovirus F
acggcccccaucucug

SEQ ID NO: 1585029 - RNA, 15 nt, Human adenovirus F
caaaucgacgguuuc

SEQ ID NO: 1585030 - RNA, 15 nt, Human adenovirus F
ccuacccagauuucc

SEQ ID NO: 1585031 - RNA, 20 nt, Human adenovirus F
caccauugaaguuucacacu

SEQ ID NO: 1585032 - RNA, 15 nt, Human adenovirus F
uaucaggaagcagcu

SEQ ID NO: 1585033 - RNA, 19 nt, Human adenovirus F
cuccaauuugacaauaacg

SEQ ID NO: 1585034 - RNA, 14 nt, Human adenovirus F
acgccaagccugaa

SEQ ID NO: 1585035 - RNA, 15 nt, Human adenovirus F
ggaccacuggagggc

SEQ ID NO: 1585036 - RNA, 18 nt, Human adenovirus F
uaucccgcgcuaaaucuu

SEQ ID NO: 1585037 - RNA, 19 nt, Human adenovirus F
cugcaacaaaaaaaaaaua

SEQ ID NO: 1585038 - RNA, 20 nt, Human adenovirus F
ggcgagaaaauauggaggag

SEQ ID NO: 1585039 - RNA, 23 nt, Human adenovirus F
ugucaugcaacuuggaagggaag

SEQ ID NO: 1585040 - RNA, 23 nt, Human adenovirus F
acccccguucccagucugccauc

SEQ ID NO: 1585041 - RNA, 19 nt, Human adenovirus F
auucuucaguugaaccacg

SEQ ID NO: 1585042 - RNA, 17 nt, Human adenovirus F
aaucagcggcuggaaaa

SEQ ID NO: 1585043 - RNA, 16 nt, Human adenovirus F
guuuguggguauauaa

SEQ ID NO: 1585044 - RNA, 14 nt, Human adenovirus F
accacgcugcgccc

SEQ ID NO: 1585045 - RNA, 22 nt, Human adenovirus F
gcguuacgcgcaacgcaagaga

SEQ ID NO: 1585046 - RNA, 13 nt, Human adenovirus F
cccucagagcugc

SEQ ID NO: 1585047 - RNA, 20 nt, Human adenovirus F
auauuauuuaaauaaaacau

SEQ ID NO: 1585048 - RNA, 14 nt, Human adenovirus F
cugugagcgccagc

SEQ ID NO: 1585049 - RNA, 21 nt, Human adenovirus F
gcagguaggaccacuggaggg

SEQ ID NO: 1585050 - RNA, 15 nt, Human adenovirus F
ugacaaacaagcugu

SEQ ID NO: 1585051 - RNA, 19 nt, Human adenovirus F
gucaaucucuucguccugg

SEQ ID NO: 1585052 - RNA, 16 nt, Human adenovirus F
ugcucggugcagccgu

SEQ ID NO: 1585053 - RNA, 16 nt, Human adenovirus F
ucgcucuguccgccgc

SEQ ID NO: 1585054 - RNA, 19 nt, Human adenovirus F
gaaauugaaguaggcgguc

SEQ ID NO: 1585055 - RNA, 16 nt, Human adenovirus F
acgccacuuuuuauga

SEQ ID NO: 1585056 - RNA, 14 nt, Human adenovirus F
uugcugacagcugg

SEQ ID NO: 1585057 - RNA, 17 nt, Human adenovirus F
ggguuucacgcaccagg

SEQ ID NO: 1585058 - RNA, 13 nt, Human adenovirus F
uuaucuguaaaac

SEQ ID NO: 1585059 - RNA, 20 nt, Human adenovirus F
aagacauucuugagcaggcc

SEQ ID NO: 1585060 - RNA, 20 nt, Human adenovirus F
gcugucucaccuacuaccac

SEQ ID NO: 1585061 - RNA, 23 nt, Human adenovirus F
cacacgucauccgccuccacccu

SEQ ID NO: 1585062 - RNA, 21 nt, Human adenovirus F
cggugcgaagccgucccccuc

SEQ ID NO: 1585063 - RNA, 18 nt, Human adenovirus F
caggguuugcaaacugua

SEQ ID NO: 1585064 - RNA, 18 nt, Human adenovirus F
cugcggcaaugcuuuuga

SEQ ID NO: 1585065 - RNA, 17 nt, Human adenovirus F
aucgcucacuggucugu

SEQ ID NO: 1585066 - RNA, 19 nt, Human adenovirus F
auuuuaauuuucaaucuug

SEQ ID NO: 1585067 - RNA, 18 nt, Human adenovirus F
uggcgcauucccuuuucc

SEQ ID NO: 1585068 - RNA, 12 nt, Human adenovirus F
uagcauaaaaga

SEQ ID NO: 1585069 - RNA, 16 nt, Human adenovirus F
auggguuacuuucggc

SEQ ID NO: 1585070 - RNA, 20 nt, Human adenovirus F
ccauagcaacagcguccguc

SEQ ID NO: 1585071 - RNA, 14 nt, Human adenovirus F
gaugguggcaagga

SEQ ID NO: 1585072 - RNA, 17 nt, Human adenovirus F
gcuuuccgcgaggccau

SEQ ID NO: 1585073 - RNA, 17 nt, Human adenovirus F
gaaaaaaaauuuuccca

SEQ ID NO: 1585074 - RNA, 15 nt, Human adenovirus F
ggacuuugcuccgcc

SEQ ID NO: 1585075 - RNA, 11 nt, Human adenovirus F
ucacuguuuuu

SEQ ID NO: 1585076 - RNA, 22 nt, Human adenovirus F
agccaaaucgcgcaaccagugg

SEQ ID NO: 1585077 - RNA, 20 nt, Human adenovirus F
gcaagccgcugacggcgcag

SEQ ID NO: 1585078 - RNA, 18 nt, Human adenovirus F
aguauuacaaaugccucc

SEQ ID NO: 1585079 - RNA, 17 nt, Human adenovirus F
ugucguugccagccggu

SEQ ID NO: 1585080 - RNA, 14 nt, Human adenovirus F
cugacgaagacauu

SEQ ID NO: 1585081 - RNA, 19 nt, Human adenovirus F
ggcaucacucauuuuuuca

SEQ ID NO: 1585082 - RNA, 12 nt, Human adenovirus F
ccaaaacaaaac

SEQ ID NO: 1585083 - RNA, 21 nt, Human adenovirus F
caaagacgaauugcagcccac

SEQ ID NO: 1585084 - RNA, 23 nt, Human adenovirus F
aggugaugcugcugaugaggaaa

SEQ ID NO: 1585085 - RNA, 17 nt, Human adenovirus F
guacguaccgccucaga

SEQ ID NO: 1585086 - RNA, 13 nt, Human adenovirus F
cgcugcaggcgcu

SEQ ID NO: 1585087 - RNA, 13 nt, Human adenovirus F
ggcauguuuucuc

SEQ ID NO: 1585088 - RNA, 16 nt, Human adenovirus F
ggagggcaaaaugggc

SEQ ID NO: 1585089 - RNA, 23 nt, Human adenovirus F
agacuccgcugacgguggaggaa

SEQ ID NO: 1585090 - RNA, 12 nt, Human adenovirus F
ucguacuucugu

SEQ ID NO: 1585091 - RNA, 22 nt, Human adenovirus F
ugccagaacuuccagcuguugg

SEQ ID NO: 1585092 - RNA, 15 nt, Human adenovirus F
aagucguggacgggc

SEQ ID NO: 1585093 - RNA, 22 nt, Human adenovirus F
gaaccuccgacgcuugcuggag

SEQ ID NO: 1585094 - RNA, 18 nt, Human adenovirus F
uguuuugggucaaaaacc

SEQ ID NO: 1585095 - RNA, 20 nt, Human adenovirus F
cuggaggcccuugugccuga

SEQ ID NO: 1585096 - RNA, 14 nt, Human adenovirus F
gcugacggccggcc

SEQ ID NO: 1585097 - RNA, 15 nt, Human adenovirus F
aagagaaucuaacca

SEQ ID NO: 1585098 - RNA, 15 nt, Human adenovirus F
aaagggggcgugucc

SEQ ID NO: 1585099 - RNA, 15 nt, Human adenovirus F
caauagcagcaccau

SEQ ID NO: 1585100 - RNA, 23 nt, Human adenovirus F
aagcaaucaaccaacuaacacug

SEQ ID NO: 1585101 - RNA, 14 nt, Human adenovirus F
gaggaggagaaccu

SEQ ID NO: 1585102 - RNA, 17 nt, Human adenovirus F
uaagcgagcagagccca

SEQ ID NO: 1585103 - RNA, 19 nt, Human adenovirus F
ucagaucagcgggcacaga

SEQ ID NO: 1585104 - RNA, 21 nt, Human adenovirus F
ugcagcccaccaugcaacuca

SEQ ID NO: 1585105 - RNA, 18 nt, Human adenovirus F
gugccgcgcgggcaggag

SEQ ID NO: 1585106 - RNA, 11 nt, Human adenovirus F
cgagccacagg

SEQ ID NO: 1585107 - RNA, 22 nt, Human adenovirus F
gacuccgcugacgguggaggaa

SEQ ID NO: 1585108 - RNA, 17 nt, Human adenovirus F
gcuguacugugcauuug

SEQ ID NO: 1585109 - RNA, 19 nt, Human adenovirus F
gcacacgcacuucaagaaa

SEQ ID NO: 1585110 - RNA, 19 nt, Human adenovirus F
cagcgcccgccucccaaag

SEQ ID NO: 1585111 - RNA, 14 nt, Human adenovirus F
gcugcaggcgcucc

SEQ ID NO: 1585112 - RNA, 20 nt, Human adenovirus F
aauuuugcgucgcuggcucc

SEQ ID NO: 1585113 - RNA, 15 nt, Human adenovirus F
uccgccauugccacc

SEQ ID NO: 1585114 - RNA, 14 nt, Human adenovirus F
ggcggcugguuaug

SEQ ID NO: 1585115 - RNA, 15 nt, Human adenovirus F
ggcaaaugcucugca

SEQ ID NO: 1585116 - RNA, 19 nt, Human adenovirus F
ccuguaccaccgcaaacaa

SEQ ID NO: 1585117 - RNA, 21 nt, Human adenovirus F
augcagcgcugccuuugcaau

SEQ ID NO: 1585118 - RNA, 22 nt, Human adenovirus F
aggggaaaucagaugcauuuug

SEQ ID NO: 1585119 - RNA, 15 nt, Human adenovirus F
ggccuuucacccaga

SEQ ID NO: 1585120 - RNA, 22 nt, Human adenovirus F
ggcauuaaugggcaaaggggga

SEQ ID NO: 1585121 - RNA, 20 nt, Human adenovirus F
cuggaggcuugggaggauuu

SEQ ID NO: 1585122 - RNA, 18 nt, Human adenovirus F
ugcuguacgccaacuccg

SEQ ID NO: 1585123 - RNA, 19 nt, Human adenovirus F
ucacugccguugcaaccuc

SEQ ID NO: 1585124 - RNA, 17 nt, Human adenovirus F
cacgcuguaccaggagg

SEQ ID NO: 1585125 - RNA, 18 nt, Human adenovirus F
cccagcacuuggauuaca

SEQ ID NO: 1585126 - RNA, 21 nt, Human adenovirus F
gcucaacuuuaacuaauguaa

SEQ ID NO: 1585127 - RNA, 15 nt, Human adenovirus F
aacuuuuuuaccacu

SEQ ID NO: 1585128 - RNA, 21 nt, Human adenovirus F
gcggaaaccaagggcucugcc

SEQ ID NO: 1585129 - RNA, 14 nt, Human adenovirus F
uuccaaacuucacg

SEQ ID NO: 1585130 - RNA, 15 nt, Human adenovirus F
gcucgucgggaagca

SEQ ID NO: 1585131 - RNA, 18 nt, Human adenovirus F
uaucccgccccugccacc

SEQ ID NO: 1585132 - RNA, 21 nt, Human adenovirus F
gauguccuuaaggaggaggcu

SEQ ID NO: 1585133 - RNA, 19 nt, Human adenovirus F
gcgcgcuucgccuccuggu

SEQ ID NO: 1585134 - RNA, 23 nt, Human adenovirus F
agagccgcggucaacagcuggaa

SEQ ID NO: 1585135 - RNA, 15 nt, Human adenovirus F
acccguucggagcca

SEQ ID NO: 1585136 - RNA, 17 nt, Human adenovirus F
ugcacuaacuccaaaua

SEQ ID NO: 1585137 - RNA, 15 nt, Human adenovirus F
agcgucagguuugac

SEQ ID NO: 1585138 - RNA, 19 nt, Human adenovirus F
uagcacuagaugcagcgcu

SEQ ID NO: 1585139 - RNA, 15 nt, Human adenovirus F
gacaagguggcggcc

SEQ ID NO: 1585140 - RNA, 21 nt, Human adenovirus F
cguucccguaaaaaggagggc

SEQ ID NO: 1585141 - RNA, 16 nt, Human adenovirus F
cagguccagaccucaa

SEQ ID NO: 1585142 - RNA, 16 nt, Human adenovirus F
ugcccauuauugcacu

SEQ ID NO: 1585143 - RNA, 20 nt, Human adenovirus F
ccccugugaguguggagcua

SEQ ID NO: 1585144 - RNA, 14 nt, Human adenovirus F
cauccuggaccugg

SEQ ID NO: 1585145 - RNA, 17 nt, Human adenovirus F
gcagcuugaagaacugg

SEQ ID NO: 1585146 - RNA, 22 nt, Human adenovirus F
uugcaugcccgagccggagagg

SEQ ID NO: 1585147 - RNA, 20 nt, Human adenovirus F
auuacauugguuuuagggac

SEQ ID NO: 1585148 - RNA, 12 nt, Human adenovirus F
cuuaacagcauu

SEQ ID NO: 1585149 - RNA, 12 nt, Human adenovirus F
gggaccagcugu

SEQ ID NO: 1585150 - RNA, 17 nt, Human adenovirus F
cagcaguccgucagcuu

SEQ ID NO: 1585151 - RNA, 16 nt, Human adenovirus F
gcgauccggcacuuga

SEQ ID NO: 1585152 - RNA, 21 nt, Human adenovirus F
gagcgguccgucacgcgggcc

SEQ ID NO: 1585153 - RNA, 17 nt, Human adenovirus F
uugcaugguguguuuuu

SEQ ID NO: 1585154 - RNA, 16 nt, Human adenovirus F
cagcaccaccugcccu

SEQ ID NO: 1585155 - RNA, 14 nt, Human adenovirus F
uaaaaucaacauua

SEQ ID NO: 1585156 - RNA, 19 nt, Human adenovirus F
gccauggaucgcauccugg

SEQ ID NO: 1585157 - RNA, 21 nt, Human adenovirus F
aagacgacuucaaccccgucu

SEQ ID NO: 1585158 - RNA, 17 nt, Human adenovirus F
ggcgcuugccaggguuc

SEQ ID NO: 1585159 - RNA, 18 nt, Human adenovirus F
gcuggaacucaaaguaaa

SEQ ID NO: 1585160 - RNA, 19 nt, Human adenovirus F
cagucucgguaacgaccuc

SEQ ID NO: 1585161 - RNA, 15 nt, Human adenovirus F
cuugccacuggccuu

SEQ ID NO: 1585162 - RNA, 18 nt, Human adenovirus F
uccauaaacuccucuucc

SEQ ID NO: 1585163 - RNA, 15 nt, Human adenovirus F
gcaauggucuuacau

SEQ ID NO: 1585164 - RNA, 13 nt, Human adenovirus F
ucaggguguuuug

SEQ ID NO: 1585165 - RNA, 16 nt, Human adenovirus F
gcauguacggcggcgc

SEQ ID NO: 1585166 - RNA, 19 nt, Human adenovirus F
aguagcucuuccaagcugc

SEQ ID NO: 1585167 - RNA, 23 nt, Human adenovirus F
cagguucccgugucaccugcagu

SEQ ID NO: 1585168 - RNA, 22 nt, Human adenovirus F
acuucacggcaggguuugcaaa

SEQ ID NO: 1585169 - RNA, 16 nt, Human adenovirus F
agaugacuucaacccc

SEQ ID NO: 1585170 - RNA, 22 nt, Human adenovirus F
gacaacgaggcuuuccgcgagg

SEQ ID NO: 1585171 - RNA, 18 nt, Human adenovirus F
ggaguuggcuucugccag

SEQ ID NO: 1585172 - RNA, 20 nt, Human adenovirus F
acaacgaagggauacuagca

SEQ ID NO: 1585173 - RNA, 14 nt, Human adenovirus F
ccgguacagguggg

SEQ ID NO: 1585174 - RNA, 17 nt, Human adenovirus F
ccugcagcgcuucuuug

SEQ ID NO: 1585175 - RNA, 22 nt, Human adenovirus F
gugacagaaaucaagcggggcg

SEQ ID NO: 1585176 - RNA, 17 nt, Human adenovirus F
ugcaucuaucuuuuccu

SEQ ID NO: 1585177 - RNA, 13 nt, Human adenovirus F
uucaaggaaacaa

SEQ ID NO: 1585178 - RNA, 16 nt, Human adenovirus F
gcaaguucaaagaaga

SEQ ID NO: 1585179 - RNA, 21 nt, Human adenovirus F
agcagccuaagcgcgcacgac

SEQ ID NO: 1585180 - RNA, 22 nt, Human adenovirus F
gcuguggugcgguuucaaacau

SEQ ID NO: 1585181 - RNA, 20 nt, Human adenovirus F
cauauaagcucugucaguuc

SEQ ID NO: 1585182 - RNA, 22 nt, Human adenovirus F
auguucgacuccucugugagcu

SEQ ID NO: 1585183 - RNA, 18 nt, Human adenovirus F
ugagcaagcgcaaguuca

SEQ ID NO: 1585184 - RNA, 15 nt, Human adenovirus F
gcauggcagcagauu

SEQ ID NO: 1585185 - RNA, 18 nt, Human adenovirus F
acccaacuauuugggagg

SEQ ID NO: 1585186 - RNA, 18 nt, Human adenovirus F
ccaaaaaagcagccuaac

SEQ ID NO: 1585187 - RNA, 16 nt, Human adenovirus F
ugccaaaguggcucuu

SEQ ID NO: 1585188 - RNA, 17 nt, Human adenovirus F
agugcacugagcagcuu

SEQ ID NO: 1585189 - RNA, 17 nt, Human adenovirus F
cagacuccgcugacggu

SEQ ID NO: 1585190 - RNA, 21 nt, Human adenovirus F
gauucgccauaaugcgggcuc

SEQ ID NO: 1585191 - RNA, 13 nt, Human adenovirus F
ggugaaggugaga

SEQ ID NO: 1585192 - RNA, 23 nt, Human adenovirus F
uuaugaaacacacaucacuguua

SEQ ID NO: 1585193 - RNA, 22 nt, Human adenovirus F
ucuguaacaccgagcuucuuag

SEQ ID NO: 1585194 - RNA, 13 nt, Human adenovirus F
gcagcuggagcuu

SEQ ID NO: 1585195 - RNA, 23 nt, Human adenovirus F
cuguguuacgccagagagccgag

SEQ ID NO: 1585196 - RNA, 17 nt, Human adenovirus F
caacugccaccuccacc

SEQ ID NO: 1585197 - RNA, 20 nt, Human adenovirus F
ugucacugccguugcaaccu

SEQ ID NO: 1585198 - RNA, 22 nt, Human adenovirus F
aagcuucuaucugcaaaaaagc

SEQ ID NO: 1585199 - RNA, 12 nt, Human adenovirus F
aaggcgaaaagc

SEQ ID NO: 1585200 - RNA, 15 nt, Human adenovirus F
caggcucugagagug

SEQ ID NO: 1585201 - RNA, 21 nt, Human adenovirus F
agguuuuacgcggggcaggag

SEQ ID NO: 1585202 - RNA, 22 nt, Human adenovirus F
caucuucaccucuguuugcugc

SEQ ID NO: 1585203 - RNA, 23 nt, Human adenovirus F
uccaucgccggaucgccaacagc

SEQ ID NO: 1585204 - RNA, 18 nt, Human adenovirus F
gaaugugucuccgcuggg

SEQ ID NO: 1585205 - RNA, 14 nt, Human adenovirus F
uaaaaaucuccugc

SEQ ID NO: 1585206 - RNA, 16 nt, Human adenovirus F
gcaaccagugggcucc

SEQ ID NO: 1585207 - RNA, 13 nt, Human adenovirus F
gggauggguaagu

SEQ ID NO: 1585208 - RNA, 22 nt, Human adenovirus F
cuuugcgcgaacagaguggggg

SEQ ID NO: 1585209 - RNA, 16 nt, Human adenovirus F
cauggcaauggcucug

SEQ ID NO: 1585210 - RNA, 20 nt, Human adenovirus F
agcuagugaaacaugaggag

SEQ ID NO: 1585211 - RNA, 14 nt, Human adenovirus F
ugaugcaccucuug

SEQ ID NO: 1585212 - RNA, 17 nt, Human adenovirus F
cagcugaacccacccuc

SEQ ID NO: 1585213 - RNA, 14 nt, Human adenovirus F
uauuuucaacuuua

SEQ ID NO: 1585214 - RNA, 17 nt, Human adenovirus F
uugcucggcgaaaacuc

SEQ ID NO: 1585215 - RNA, 20 nt, Human adenovirus F
cuacaauccccuugacauuc

SEQ ID NO: 1585216 - RNA, 17 nt, Human adenovirus F
auaugucugccaaaaug

SEQ ID NO: 1585217 - RNA, 12 nt, Human adenovirus F
aguguggagcua

SEQ ID NO: 1585218 - RNA, 14 nt, Human adenovirus F
uccaaaccaaauaa

SEQ ID NO: 1585219 - RNA, 16 nt, Human adenovirus F
accaagggcucugccu

SEQ ID NO: 1585220 - RNA, 16 nt, Human adenovirus F
cuggaccuggaagagg

SEQ ID NO: 1585221 - RNA, 13 nt, Human adenovirus F
gcggcggccauga

SEQ ID NO: 1585222 - RNA, 17 nt, Human adenovirus F
gcauaaaagcuucuauc

SEQ ID NO: 1585223 - RNA, 22 nt, Human adenovirus F
cauuacuuuacccgacaacaaa

SEQ ID NO: 1585224 - RNA, 15 nt, Human adenovirus F
uucaugcaugcagac

SEQ ID NO: 1585225 - RNA, 12 nt, Human adenovirus F
aacacaaacaua

SEQ ID NO: 1585226 - RNA, 22 nt, Human adenovirus F
uaaagcucaaaaaggcacuuua

SEQ ID NO: 1585227 - RNA, 15 nt, Human adenovirus F
uaccagagccauagc

SEQ ID NO: 1585228 - RNA, 14 nt, Human adenovirus F
caaguacacugacc

SEQ ID NO: 1585229 - RNA, 18 nt, Human adenovirus F
cugggcuuauuggcauga

SEQ ID NO: 1585230 - RNA, 13 nt, Human adenovirus F
uacucuggcuccg

SEQ ID NO: 1585231 - RNA, 13 nt, Human adenovirus F
ggacgguggcaug

SEQ ID NO: 1585232 - RNA, 13 nt, Human adenovirus F
aaucuucggcagg

SEQ ID NO: 1585233 - RNA, 16 nt, Human adenovirus F
ucccuuucccccugua

SEQ ID NO: 1585234 - RNA, 14 nt, Human adenovirus F
auuaauuacagcau

SEQ ID NO: 1585235 - RNA, 15 nt, Human adenovirus F
cugcccuuccuccca

SEQ ID NO: 1585236 - RNA, 17 nt, Human adenovirus F
cacugccuaccgcagcu

SEQ ID NO: 1585237 - RNA, 22 nt, Human adenovirus F
aacauagcaaaagcauuuuccu

SEQ ID NO: 1585238 - RNA, 23 nt, Human adenovirus F
ucuagauaauaacuuucuuacac

SEQ ID NO: 1585239 - RNA, 19 nt, Human adenovirus F
acuggcuggcccuggccug

SEQ ID NO: 1585240 - RNA, 21 nt, Human adenovirus F
ccgucuagccaacuauuuggc

SEQ ID NO: 1585241 - RNA, 18 nt, Human adenovirus F
uuaaugggcaaaggggga

SEQ ID NO: 1585242 - RNA, 21 nt, Human adenovirus F
acacuggcuggcccuggccug

SEQ ID NO: 1585243 - RNA, 22 nt, Human adenovirus F
ccaagccuuaauuucugagggg

SEQ ID NO: 1585244 - RNA, 19 nt, Human adenovirus F
gggugcuacgcgccgaaga

SEQ ID NO: 1585245 - RNA, 18 nt, Human adenovirus F
cucggaguaccugagccc

SEQ ID NO: 1585246 - RNA, 15 nt, Human adenovirus F
gggcaaaaugggcuu

SEQ ID NO: 1585247 - RNA, 20 nt, Human adenovirus F
cuggacucgucuccugcaag

SEQ ID NO: 1585248 - RNA, 15 nt, Human adenovirus F
ccguuaccuggggcc

SEQ ID NO: 1585249 - RNA, 15 nt, Human adenovirus F
aucucugugcgucgc

SEQ ID NO: 1585250 - RNA, 18 nt, Human adenovirus F
gcaagcuucucagcucaa

SEQ ID NO: 1585251 - RNA, 15 nt, Human adenovirus F
ccaguccgggccaga

SEQ ID NO: 1585252 - RNA, 22 nt, Human adenovirus F
gaccauucugagacaaaagccc

SEQ ID NO: 1585253 - RNA, 13 nt, Human adenovirus F
ucaaacaggaaga

SEQ ID NO: 1585254 - RNA, 23 nt, Human adenovirus F
gugcucgcaaacaaagaaguaca

SEQ ID NO: 1585255 - RNA, 17 nt, Human adenovirus F
cucaggaaccaccaccg

SEQ ID NO: 1585256 - RNA, 23 nt, Human adenovirus F
gacaaccggguuuuggacauggc

SEQ ID NO: 1585257 - RNA, 13 nt, Human adenovirus F
agcguaggagcua

SEQ ID NO: 1585258 - RNA, 18 nt, Human adenovirus F
ccaacgugcaggccaacc

SEQ ID NO: 1585259 - RNA, 14 nt, Human adenovirus F
gaggaggccauccu

SEQ ID NO: 1585260 - RNA, 11 nt, Human adenovirus F
gcgggcucuga

SEQ ID NO: 1585261 - RNA, 17 nt, Human adenovirus F
ucucgccccaccgcccc

SEQ ID NO: 1585262 - RNA, 23 nt, Human adenovirus F
cuagcauaaaggggaccagcugu

SEQ ID NO: 1585263 - RNA, 22 nt, Human adenovirus F
aggccauggaaacgcagccuga

SEQ ID NO: 1585264 - RNA, 21 nt, Human adenovirus F
cacugccguugcaaccucugc

SEQ ID NO: 1585265 - RNA, 19 nt, Human adenovirus F
augagggauucuaagggag

SEQ ID NO: 1585266 - RNA, 16 nt, Human adenovirus F
ccuugcaaggggaggc

SEQ ID NO: 1585267 - RNA, 16 nt, Human adenovirus F
acuggaguaacacaau

SEQ ID NO: 1585268 - RNA, 15 nt, Human adenovirus F
aaccaagggcucugc

SEQ ID NO: 1585269 - RNA, 16 nt, Human adenovirus F
cagcgacggaacgugg

SEQ ID NO: 1585270 - RNA, 21 nt, Human adenovirus F
ccaaagcagagcucugcaaaa

SEQ ID NO: 1585271 - RNA, 20 nt, Human adenovirus F
cucccuccccccuuccacuu

SEQ ID NO: 1585272 - RNA, 15 nt, Human adenovirus F
aucgacguucucucc

SEQ ID NO: 1585273 - RNA, 21 nt, Human adenovirus F
gggaacugccaguguaaagca

SEQ ID NO: 1585274 - RNA, 23 nt, Human adenovirus F
acgagcccugaucagccaggugg

SEQ ID NO: 1585275 - RNA, 22 nt, Human adenovirus F
caggcggaaaccaagggcucug

SEQ ID NO: 1585276 - RNA, 17 nt, Human adenovirus F
cuggauuacauggcaau

SEQ ID NO: 1585277 - RNA, 17 nt, Human adenovirus F
gaacccaacuauuuggg

SEQ ID NO: 1585278 - RNA, 15 nt, Human adenovirus F
cugccguugcaaccu

SEQ ID NO: 1585279 - RNA, 14 nt, Human adenovirus F
cgaggggcuggccc

SEQ ID NO: 1585280 - RNA, 13 nt, Human adenovirus F
ccgagagaugcau

SEQ ID NO: 1585281 - RNA, 14 nt, Human adenovirus F
ccugggcuggaugc

SEQ ID NO: 1585282 - RNA, 21 nt, Human adenovirus F
cgcugugaguuuugagggugg

SEQ ID NO: 1585283 - RNA, 15 nt, Human adenovirus F
gcuagcauaaaagaa

SEQ ID NO: 1585284 - RNA, 17 nt, Human adenovirus F
aucccaugaccaaaccu

SEQ ID NO: 1585285 - RNA, 20 nt, Human adenovirus F
cgaggcuuuccgcgaggcca

SEQ ID NO: 1585286 - RNA, 14 nt, Human adenovirus F
agcgugagucgggc

SEQ ID NO: 1585287 - RNA, 23 nt, Human adenovirus F
uuccagcagcaccaccugcccuu

SEQ ID NO: 1585288 - RNA, 16 nt, Human adenovirus F
cgcauaacccuggaau

SEQ ID NO: 1585289 - RNA, 20 nt, Human adenovirus F
caugcccgagccggagaggg

SEQ ID NO: 1585290 - RNA, 22 nt, Human adenovirus F
cugagccugaucccgaagaggg

SEQ ID NO: 1585291 - RNA, 19 nt, Human adenovirus F
gaaacugucaggcucugag

SEQ ID NO: 1585292 - RNA, 12 nt, Human adenovirus F
cgucccuggagu

SEQ ID NO: 1585293 - RNA, 22 nt, Human adenovirus F
cccagcugugguuaaauuuaau

SEQ ID NO: 1585294 - RNA, 21 nt, Human adenovirus F
uuggagagcaguuuggcaaug

SEQ ID NO: 1585295 - RNA, 20 nt, Human adenovirus F
gaaccacugauguaacagcu

SEQ ID NO: 1585296 - RNA, 20 nt, Human adenovirus F
agcccauaucugacaacccg

SEQ ID NO: 1585297 - RNA, 22 nt, Human adenovirus F
acaaaucgauuaaguugggagg

SEQ ID NO: 1585298 - RNA, 21 nt, Human adenovirus F
auugccucccugaacuaccag

SEQ ID NO: 1585299 - RNA, 22 nt, Human adenovirus F
ggcggggacguaaaguccagcg

SEQ ID NO: 1585300 - RNA, 15 nt, Human adenovirus F
gcccggguccaggcu

SEQ ID NO: 1585301 - RNA, 12 nt, Human adenovirus F
gacagcaggccg

SEQ ID NO: 1585302 - RNA, 15 nt, Human adenovirus F
cuguacugugcauuu

SEQ ID NO: 1585303 - RNA, 12 nt, Human adenovirus F
uuugacagcauu

SEQ ID NO: 1585304 - RNA, 15 nt, Human adenovirus F
caggccuugcaaaac

SEQ ID NO: 1585305 - RNA, 13 nt, Human adenovirus F
ccgcugaaagacg

SEQ ID NO: 1585306 - RNA, 12 nt, Human adenovirus F
agcggcuggaaa

SEQ ID NO: 1585307 - RNA, 17 nt, Human adenovirus F
agcgcccgggcccugga

SEQ ID NO: 1585308 - RNA, 22 nt, Human adenovirus F
cuaaggacgguggcaugaggga

SEQ ID NO: 1585309 - RNA, 16 nt, Human adenovirus F
ccuuuuugggauuaca

SEQ ID NO: 1585310 - RNA, 17 nt, Human adenovirus F
uaaaucuuccucccaaa

SEQ ID NO: 1585311 - RNA, 21 nt, Human adenovirus F
caccugcccuuccucccaacu

SEQ ID NO: 1585312 - RNA, 22 nt, Human adenovirus F
guugcauguuggaaaggggugg

SEQ ID NO: 1585313 - RNA, 19 nt, Human adenovirus F
gcagggugcgauugaaaua

SEQ ID NO: 1585314 - RNA, 17 nt, Human adenovirus F
acaccuccucaacuccc

SEQ ID NO: 1585315 - RNA, 22 nt, Human adenovirus F
caccguuguggagucacugcua

SEQ ID NO: 1585316 - RNA, 23 nt, Human adenovirus F
cugcuaaagggaacugccagugu

SEQ ID NO: 1585317 - RNA, 20 nt, Human adenovirus F
ugccgcgcgggcaggaggac

SEQ ID NO: 1585318 - RNA, 15 nt, Human adenovirus F
ccaaaggugcuccca

SEQ ID NO: 1585319 - RNA, 23 nt, Human adenovirus F
auccgccuccacccuuucccacc

SEQ ID NO: 1585320 - RNA, 22 nt, Human adenovirus F
aauugauuuucugccaccagcc

SEQ ID NO: 1585321 - RNA, 13 nt, Human adenovirus F
caccuccucaacu

SEQ ID NO: 1585322 - RNA, 18 nt, Human adenovirus F
auggcaccgcauaagcug

SEQ ID NO: 1585323 - RNA, 13 nt, Human adenovirus F
cuugcugacuuau

SEQ ID NO: 1585324 - RNA, 16 nt, Human adenovirus F
ggaagaugaguuuaaa

SEQ ID NO: 1585325 - RNA, 22 nt, Human adenovirus F
agugccgagcuuuuacugggac

SEQ ID NO: 1585326 - RNA, 13 nt, Human adenovirus F
uugcuacauaacu

SEQ ID NO: 1585327 - RNA, 18 nt, Human adenovirus F
gaggugccccagagugag

SEQ ID NO: 1585328 - RNA, 16 nt, Human adenovirus F
cagccuagacgaggag

SEQ ID NO: 1585329 - RNA, 17 nt, Human adenovirus F
cauaguugcucccaaag

SEQ ID NO: 1585330 - RNA, 19 nt, Human adenovirus F
agaaccuugcuacggagga

SEQ ID NO: 1585331 - RNA, 11 nt, Human adenovirus F
guaugggcagc

SEQ ID NO: 1585332 - RNA, 15 nt, Human adenovirus F
cccgucacucuccgc

SEQ ID NO: 1585333 - RNA, 15 nt, Human adenovirus F
caacaaaaucaggaa

SEQ ID NO: 1585334 - RNA, 12 nt, Human adenovirus F
cgagcgccucaa

SEQ ID NO: 1585335 - RNA, 18 nt, Human adenovirus F
guacacgcggugacggcc

SEQ ID NO: 1585336 - RNA, 22 nt, Human adenovirus F
gccgcacucgcuccacccgccg

SEQ ID NO: 1585337 - RNA, 13 nt, Human adenovirus F
ggcgguugagguc

SEQ ID NO: 1585338 - RNA, 16 nt, Human adenovirus F
cguagcacucccucuu

SEQ ID NO: 1585339 - RNA, 14 nt, Human adenovirus F
accacggugguaca

SEQ ID NO: 1585340 - RNA, 14 nt, Human adenovirus F
cuagcgugcccauu

SEQ ID NO: 1585341 - RNA, 23 nt, Human adenovirus F
gcuguaguugauaguuuaaggag

SEQ ID NO: 1585342 - RNA, 23 nt, Human adenovirus F
ccagcauaauaacucuggcuuug

SEQ ID NO: 1585343 - RNA, 17 nt, Human adenovirus F
gcuagaaugucacugcc

SEQ ID NO: 1585344 - RNA, 20 nt, Human adenovirus F
cuuaggaagggggccaucga

SEQ ID NO: 1585345 - RNA, 16 nt, Human adenovirus F
cgcaggagcucagaaa

SEQ ID NO: 1585346 - RNA, 18 nt, Human adenovirus F
agaccacaacaacaaacg

SEQ ID NO: 1585347 - RNA, 21 nt, Human adenovirus F
gaacgaggagcgcaacuuuca

SEQ ID NO: 1585348 - RNA, 17 nt, Human adenovirus F
cucguuguuuuccucug

SEQ ID NO: 1585349 - RNA, 14 nt, Human adenovirus F
gccauuuuggaagc

SEQ ID NO: 1585350 - RNA, 18 nt, Human adenovirus F
augauuuguggcgguggu

SEQ ID NO: 1585351 - RNA, 19 nt, Human adenovirus F
uaacacaggucaaaugcuc

SEQ ID NO: 1585352 - RNA, 17 nt, Human adenovirus F
gauccagugcaggaaga

SEQ ID NO: 1585353 - RNA, 17 nt, Human adenovirus F
ccaacggcuugcaagaa

SEQ ID NO: 1585354 - RNA, 19 nt, Human adenovirus F
uuggucaaaaacucuguga

SEQ ID NO: 1585355 - RNA, 15 nt, Human adenovirus F
cugacaguaagcaac

SEQ ID NO: 1585356 - RNA, 17 nt, Human adenovirus F
cgugggaaggggccagc

SEQ ID NO: 1585357 - RNA, 14 nt, Human adenovirus F
gauucuccaaagca

SEQ ID NO: 1585358 - RNA, 12 nt, Human adenovirus F
accugccccuac

SEQ ID NO: 1585359 - RNA, 22 nt, Human adenovirus F
cgcccaaacucaucugucgcag

SEQ ID NO: 1585360 - RNA, 18 nt, Human adenovirus F
ugaugcugcugaugagga

SEQ ID NO: 1585361 - RNA, 23 nt, Human adenovirus F
cuucaggcagcagccccaggcca

SEQ ID NO: 1585362 - RNA, 14 nt, Human adenovirus F
aaugcgggcucuga

SEQ ID NO: 1585363 - RNA, 14 nt, Human adenovirus F
ggcuuauuggcaug

SEQ ID NO: 1585364 - RNA, 16 nt, Human adenovirus F
uccucguuguuuuccu

SEQ ID NO: 1585365 - RNA, 22 nt, Human adenovirus F
gcagccugagcugccagaggcc

SEQ ID NO: 1585366 - RNA, 17 nt, Human adenovirus F
acggcaaucccagcaga

SEQ ID NO: 1585367 - RNA, 13 nt, Human adenovirus F
ucuaccacagaaa

SEQ ID NO: 1585368 - RNA, 21 nt, Human adenovirus F
ugaguugguagcagugucaau

SEQ ID NO: 1585369 - RNA, 22 nt, Human adenovirus F
ugcguucccguaaaaaggaggg

SEQ ID NO: 1585370 - RNA, 23 nt, Human adenovirus F
ugcagagcuugggcccugggcuu

SEQ ID NO: 1585371 - RNA, 20 nt, Human adenovirus F
ugaugcuacacaacaaauca

SEQ ID NO: 1585372 - RNA, 19 nt, Human adenovirus F
ccguucggagccaaccucc

SEQ ID NO: 1585373 - RNA, 15 nt, Human adenovirus F
ugagggucgcuggcu

SEQ ID NO: 1585374 - RNA, 13 nt, Human adenovirus F
aacaaauacaguc

SEQ ID NO: 1585375 - RNA, 20 nt, Human adenovirus F
cuaccguucuaugcuccugg

SEQ ID NO: 1585376 - RNA, 15 nt, Human adenovirus F
auguaaccacagaca

SEQ ID NO: 1585377 - RNA, 18 nt, Human adenovirus F
acaccugggaaaaccugu

SEQ ID NO: 1585378 - RNA, 14 nt, Human adenovirus F
cuuccaacccauga

SEQ ID NO: 1585379 - RNA, 22 nt, Human adenovirus F
gaaggauacaacguggcucaau

SEQ ID NO: 1585380 - RNA, 24 nt, Human adenovirus F
aagaagcacaggagauccguggag

SEQ ID NO: 1585381 - RNA, 17 nt, Human adenovirus F
agaggcgguggcgcagc

SEQ ID NO: 1585382 - RNA, 18 nt, Human adenovirus F
uccuggccaacugccacc

SEQ ID NO: 1585383 - RNA, 18 nt, Human adenovirus F
agggugcccgacuggggu

SEQ ID NO: 1585384 - RNA, 13 nt, Human adenovirus F
agacagcaaggaa

SEQ ID NO: 1585385 - RNA, 17 nt, Human adenovirus F
cacgcugacccuuccca

SEQ ID NO: 1585386 - RNA, 13 nt, Human adenovirus F
ccaucauuuccac

SEQ ID NO: 1585387 - RNA, 13 nt, Human adenovirus F
uagccaaccaggc

SEQ ID NO: 1585388 - RNA, 21 nt, Human adenovirus F
ccgcggcggcuauugccagca

SEQ ID NO: 1585389 - RNA, 18 nt, Human adenovirus F
auucagggaucgcagcgg

SEQ ID NO: 1585390 - RNA, 18 nt, Human adenovirus F
cagguuaaagccaacucc

SEQ ID NO: 1585391 - RNA, 18 nt, Human adenovirus F
ucaggagguacuccucgc

SEQ ID NO: 1585392 - RNA, 18 nt, Human adenovirus F
ucacugacgcccgccguc

SEQ ID NO: 1585393 - RNA, 20 nt, Human adenovirus F
ugccaucugcagcauugcca

SEQ ID NO: 1585394 - RNA, 23 nt, Human adenovirus F
caucguaguuuugcuccagggua

SEQ ID NO: 1585395 - RNA, 16 nt, Human adenovirus F
uuaccgucaucucuac

SEQ ID NO: 1585396 - RNA, 18 nt, Human adenovirus F
ucccuggcccccaaaggu

SEQ ID NO: 1585397 - RNA, 20 nt, Human adenovirus F
accgucaucucuacagcccc

SEQ ID NO: 1585398 - RNA, 19 nt, Human adenovirus F
gaucuuaagcugcagccag

SEQ ID NO: 1585399 - RNA, 14 nt, Human adenovirus F
caaacauugcaaaa

SEQ ID NO: 1585400 - RNA, 15 nt, Human adenovirus F
cauacccgccaacgc

SEQ ID NO: 1585401 - RNA, 20 nt, Human adenovirus F
caucaugcuucugacaugcu

SEQ ID NO: 1585402 - RNA, 21 nt, Human adenovirus F
ugcgcaacuucuuuuugggag

SEQ ID NO: 1585403 - RNA, 15 nt, Human adenovirus F
ggaggaggaggagaa

SEQ ID NO: 1585404 - RNA, 14 nt, Human adenovirus F
gacaggcuguaguu

SEQ ID NO: 1585405 - RNA, 14 nt, Human adenovirus F
cuauugccagcaug

SEQ ID NO: 1585406 - RNA, 22 nt, Human adenovirus F
uauuccuccggcucuauaaaaa

SEQ ID NO: 1585407 - RNA, 18 nt, Human adenovirus F
cuccucaacucccagcau

SEQ ID NO: 1585408 - RNA, 19 nt, Human adenovirus F
gaugaaacuugauuuccau

SEQ ID NO: 1585409 - RNA, 17 nt, Human adenovirus F
gguagggugucugccag

SEQ ID NO: 1585410 - RNA, 17 nt, Human adenovirus F
ccggggcaauaucucau

SEQ ID NO: 1585411 - RNA, 14 nt, Human adenovirus F
ucaugcaugcagac

SEQ ID NO: 1585412 - RNA, 15 nt, Human adenovirus F
gaaccaggcagugga

SEQ ID NO: 1585413 - RNA, 19 nt, Human adenovirus F
ggccgaugccaggcggcga

SEQ ID NO: 1585414 - RNA, 19 nt, Human adenovirus F
gaaaguagcucuuccaagc

SEQ ID NO: 1585415 - RNA, 15 nt, Human adenovirus F
gugaguguggagcua

SEQ ID NO: 1585416 - RNA, 14 nt, Human adenovirus F
gcuagcauaaaaga

SEQ ID NO: 1585417 - RNA, 17 nt, Human adenovirus F
ugcugccucuacugcuc

SEQ ID NO: 1585418 - RNA, 13 nt, Human adenovirus F
cacuggaugccac

SEQ ID NO: 1585419 - RNA, 23 nt, Human adenovirus F
gccacacuaaaguuuuaauggaa

SEQ ID NO: 1585420 - RNA, 23 nt, Human adenovirus F
ccaaagagcuugaacauaacacc

SEQ ID NO: 1585421 - RNA, 15 nt, Human adenovirus F
cacugcuaccuccuc

SEQ ID NO: 1585422 - RNA, 20 nt, Human adenovirus F
gugcagauggaaacugucag

SEQ ID NO: 1585423 - RNA, 19 nt, Human adenovirus F
cuaucccgccccugccacc

SEQ ID NO: 1585424 - RNA, 17 nt, Human adenovirus F
accauuaagaagacugu

SEQ ID NO: 1585425 - RNA, 22 nt, Human adenovirus F
ucuuacaaagugcgcuuuacgc

SEQ ID NO: 1585426 - RNA, 20 nt, Human adenovirus F
agagccgcggucaacagcug

SEQ ID NO: 1585427 - RNA, 14 nt, Human adenovirus F
augccuacaugaac

SEQ ID NO: 1585428 - RNA, 14 nt, Human adenovirus F
uuaaaccaauuugc

SEQ ID NO: 1585429 - RNA, 14 nt, Human adenovirus F
ucccaggcguggcc

SEQ ID NO: 1585430 - RNA, 15 nt, Human adenovirus F
ugcaauauaaaaaca

SEQ ID NO: 1585431 - RNA, 21 nt, Human adenovirus F
ccgcuugggggcgccaucccc

SEQ ID NO: 1585432 - RNA, 19 nt, Human adenovirus F
ggcuucggugacaaacaag

SEQ ID NO: 1585433 - RNA, 18 nt, Human adenovirus F
agcaaccgcacaugccag

SEQ ID NO: 1585434 - RNA, 22 nt, Human adenovirus F
aaagcaaguuucgcaaaagcug

SEQ ID NO: 1585435 - RNA, 16 nt, Human adenovirus F
ugcccaacaguacagu

SEQ ID NO: 1585436 - RNA, 12 nt, Human adenovirus F
uaucuugcaaaa

SEQ ID NO: 1585437 - RNA, 15 nt, Human adenovirus F
cagcgcgcuccauca

SEQ ID NO: 1585438 - RNA, 14 nt, Human adenovirus F
uguaguugauaguu

SEQ ID NO: 1585439 - RNA, 14 nt, Human adenovirus F
uccgaccccacacg

SEQ ID NO: 1585440 - RNA, 13 nt, Human adenovirus F
aacuuuacaaaau

SEQ ID NO: 1585441 - RNA, 17 nt, Human adenovirus F
gagcaguuuggcaaugg

SEQ ID NO: 1585442 - RNA, 18 nt, Human adenovirus F
auaggcauuaggccgucc

SEQ ID NO: 1585443 - RNA, 18 nt, Human adenovirus F
acaucaauuuugcgucgc

SEQ ID NO: 1585444 - RNA, 15 nt, Human adenovirus F
caccugcccuuccuc

SEQ ID NO: 1585445 - RNA, 22 nt, Human adenovirus F
cacgucauccgccuccacccuu

SEQ ID NO: 1585446 - RNA, 14 nt, Human adenovirus F
ggcgcaaucuucgc

SEQ ID NO: 1585447 - RNA, 16 nt, Human adenovirus F
gcucauugguccagca

SEQ ID NO: 1585448 - RNA, 16 nt, Human adenovirus F
uccaagcgucuuacau

SEQ ID NO: 1585449 - RNA, 16 nt, Human adenovirus F
uuuguaacaacuguac

SEQ ID NO: 1585450 - RNA, 12 nt, Human adenovirus F
uugucuguuuuu

SEQ ID NO: 1585451 - RNA, 14 nt, Human adenovirus F
cggagaggggagga

SEQ ID NO: 1585452 - RNA, 18 nt, Human adenovirus F
ucccaacaaccuacccag

SEQ ID NO: 1585453 - RNA, 21 nt, Human adenovirus F
ugguuccucauacaaaugcuc

SEQ ID NO: 1585454 - RNA, 20 nt, Human adenovirus F
ucgccaacagccccagcugg

SEQ ID NO: 1585455 - RNA, 14 nt, Human adenovirus F
agauuuuggacugu

SEQ ID NO: 1585456 - RNA, 18 nt, Human adenovirus F
accaucuuucaaaaaacc

SEQ ID NO: 1585457 - RNA, 15 nt, Human adenovirus F
uucaagcccuacacc

SEQ ID NO: 1585458 - RNA, 15 nt, Human adenovirus F
acucccuggccccca

SEQ ID NO: 1585459 - RNA, 16 nt, Human adenovirus F
cuaagggaggcagcag

SEQ ID NO: 1585460 - RNA, 17 nt, Human adenovirus F
uugaagacgacuucaac

SEQ ID NO: 1585461 - RNA, 14 nt, Human adenovirus F
ccaggcagcagggu

SEQ ID NO: 1585462 - RNA, 21 nt, Human adenovirus F
aaugcuagcccgaacauaguc

SEQ ID NO: 1585463 - RNA, 15 nt, Human adenovirus F
uacaacgagcaggcc

SEQ ID NO: 1585464 - RNA, 21 nt, Human adenovirus F
acuccauuauuuuuauuuuga

SEQ ID NO: 1585465 - RNA, 21 nt, Human adenovirus F
uuaaccacccccaacucugag

SEQ ID NO: 1585466 - RNA, 16 nt, Human adenovirus F
cuagaccaacaaacga

SEQ ID NO: 1585467 - RNA, 18 nt, Human adenovirus F
caugcgccgagcggcugc

SEQ ID NO: 1585468 - RNA, 17 nt, Human adenovirus F
cgcuaugugcagcaguc

SEQ ID NO: 1585469 - RNA, 16 nt, Human adenovirus F
aucaggaacuguucaa

SEQ ID NO: 1585470 - RNA, 15 nt, Human adenovirus F
gaagaagaugcccug

SEQ ID NO: 1585471 - RNA, 22 nt, Human adenovirus F
caccagcgugagucgggcucuu

SEQ ID NO: 1585472 - RNA, 22 nt, Human adenovirus F
uggauccagugcaggaagagga

SEQ ID NO: 1585473 - RNA, 18 nt, Human adenovirus F
cccucagacgacugggcg

SEQ ID NO: 1585474 - RNA, 20 nt, Human adenovirus F
cugccuaugccgccgugcca

SEQ ID NO: 1585475 - RNA, 19 nt, Human adenovirus F
cgcuaucaggaagcagcuc

SEQ ID NO: 1585476 - RNA, 17 nt, Human adenovirus F
gaggcacaccuuugggc

SEQ ID NO: 1585477 - RNA, 19 nt, Human adenovirus F
agccgcggucaacagcugg

SEQ ID NO: 1585478 - RNA, 19 nt, Human adenovirus F
auuuggucagaaaauacaa

SEQ ID NO: 1585479 - RNA, 14 nt, Human adenovirus F
uguccgccgccgcu

SEQ ID NO: 1585480 - RNA, 16 nt, Human adenovirus F
uaacaacacaggagcu

SEQ ID NO: 1585481 - RNA, 16 nt, Human adenovirus F
ccaucuuucaaaaaac

SEQ ID NO: 1585482 - RNA, 11 nt, Human adenovirus F
guuggaggaga

SEQ ID NO: 1585483 - RNA, 22 nt, Human adenovirus F
augguaaaaaugccaggcagca

SEQ ID NO: 1585484 - RNA, 19 nt, Human adenovirus F
acgcauguaaauuuugcac

SEQ ID NO: 1585485 - RNA, 18 nt, Human adenovirus F
aacacugcgauuagaaaa

SEQ ID NO: 1585486 - RNA, 22 nt, Human adenovirus F
cugggacagcggaggcauuuua

SEQ ID NO: 1585487 - RNA, 17 nt, Human adenovirus F
gaagcuagcauaaaaga

SEQ ID NO: 1585488 - RNA, 15 nt, Human adenovirus F
caauucucucuccuu

SEQ ID NO: 1585489 - RNA, 22 nt, Human adenovirus F
cacugacuuccugguccugacu

SEQ ID NO: 1585490 - RNA, 23 nt, Human adenovirus F
caaacaugugaccguguagccuu

SEQ ID NO: 1585491 - RNA, 13 nt, Human adenovirus F
gcugaagacacau

SEQ ID NO: 1585492 - RNA, 23 nt, Human adenovirus F
ccagacuccgaaaccuuaaccac

SEQ ID NO: 1585493 - RNA, 14 nt, Human adenovirus F
cagcugaagacaca

SEQ ID NO: 1585494 - RNA, 21 nt, Human adenovirus F
ugccaggcggcgaugaaacuu

SEQ ID NO: 1585495 - RNA, 23 nt, Human adenovirus F
aguccaaagcagagcucugcaaa

SEQ ID NO: 1585496 - RNA, 16 nt, Human adenovirus F
cucuuucuuacaacgc

SEQ ID NO: 1585497 - RNA, 17 nt, Human adenovirus F
cuguucuaaaaccaaac

SEQ ID NO: 1585498 - RNA, 13 nt, Human adenovirus F
uccaccugagggg

SEQ ID NO: 1585499 - RNA, 23 nt, Human adenovirus F
ccuagccaguggacaaaccaaaa

SEQ ID NO: 1585500 - RNA, 20 nt, Human adenovirus F
caccacauaagaagccagcc

SEQ ID NO: 1585501 - RNA, 17 nt, Human adenovirus F
acuuccagcuguuggag

SEQ ID NO: 1585502 - RNA, 22 nt, Human adenovirus F
cgcgaacuaaugcacagccugc

SEQ ID NO: 1585503 - RNA, 23 nt, Human adenovirus F
cagcgaguacuucaccaaugcca

SEQ ID NO: 1585504 - RNA, 23 nt, Human adenovirus F
gcggaugguggcaaggagaguga

SEQ ID NO: 1585505 - RNA, 15 nt, Human adenovirus F
ucgccgcgcaggggc

SEQ ID NO: 1585506 - RNA, 16 nt, Human adenovirus F
cacauccagggcacag

SEQ ID NO: 1585507 - RNA, 15 nt, Human adenovirus F
ccagggucgcagggu

SEQ ID NO: 1585508 - RNA, 19 nt, Human adenovirus F
ccagacuuugucagccaaa

SEQ ID NO: 1585509 - RNA, 20 nt, Human adenovirus F
guauaaguauuacaaaugcc

SEQ ID NO: 1585510 - RNA, 15 nt, Human adenovirus F
cacuuaccagagcca

SEQ ID NO: 1585511 - RNA, 14 nt, Human adenovirus F
accagccgcaccgc

SEQ ID NO: 1585512 - RNA, 13 nt, Human adenovirus F
ccacaacaacaaa

SEQ ID NO: 1585513 - RNA, 14 nt, Human adenovirus F
ccuugcaaaaccaa

SEQ ID NO: 1585514 - RNA, 19 nt, Human adenovirus F
acaucaauuuugcgucgcu

SEQ ID NO: 1585515 - RNA, 14 nt, Human adenovirus F
agaaaccaucgcca

SEQ ID NO: 1585516 - RNA, 20 nt, Human adenovirus F
caccguuguggagucacugc

SEQ ID NO: 1585517 - RNA, 13 nt, Human adenovirus F
ccuccagcacugc

SEQ ID NO: 1585518 - RNA, 15 nt, Human adenovirus F
ucgcaugccuccagc

SEQ ID NO: 1585519 - RNA, 20 nt, Human adenovirus F
gacauguuugucuuuaaaaa

SEQ ID NO: 1585520 - RNA, 17 nt, Human adenovirus F
aucacgcccaccaaauu

SEQ ID NO: 1585521 - RNA, 11 nt, Human adenovirus F
ccucugacggg

SEQ ID NO: 1585522 - RNA, 18 nt, Human adenovirus F
cuuggaaucauccaccug

SEQ ID NO: 1585523 - RNA, 15 nt, Human adenovirus F
cuuguccgcggggag

SEQ ID NO: 1585524 - RNA, 22 nt, Human adenovirus F
uguacaaagucauccaaaucau

SEQ ID NO: 1585525 - RNA, 18 nt, Human adenovirus F
acugcuagaaugucacug

SEQ ID NO: 1585526 - RNA, 22 nt, Human adenovirus F
ggaggcagugguggaugggggu

SEQ ID NO: 1585527 - RNA, 13 nt, Human adenovirus F
acuuuuuugcaag

SEQ ID NO: 1585528 - RNA, 11 nt, Human adenovirus F
caacgccaggc

SEQ ID NO: 1585529 - RNA, 17 nt, Human adenovirus F
aucuuaagcugcagcca

SEQ ID NO: 1585530 - RNA, 21 nt, Human adenovirus F
aaacuggcgccauguaauuca

SEQ ID NO: 1585531 - RNA, 16 nt, Human adenovirus F
ugccgcgcgggcagga

SEQ ID NO: 1585532 - RNA, 22 nt, Human adenovirus F
cuaguagguuuucagguggggg

SEQ ID NO: 1585533 - RNA, 23 nt, Human adenovirus F
aaucagggcgugcaagugggcuc

SEQ ID NO: 1585534 - RNA, 23 nt, Human adenovirus F
aacaacgggguggaaagccuggu

SEQ ID NO: 1585535 - RNA, 15 nt, Human adenovirus F
cagguauaaguauua

SEQ ID NO: 1585536 - RNA, 19 nt, Human adenovirus F
agacuuugucagccaaagu

SEQ ID NO: 1585537 - RNA, 14 nt, Human adenovirus F
uggcuuuacacauu

SEQ ID NO: 1585538 - RNA, 17 nt, Human adenovirus F
gccgcacucgcuccacc

SEQ ID NO: 1585539 - RNA, 21 nt, Human adenovirus F
aaaguagcucuuccaagcugc

SEQ ID NO: 1585540 - RNA, 19 nt, Human adenovirus F
auuuccauaaacuccucuu

SEQ ID NO: 1585541 - RNA, 21 nt, Human adenovirus F
caucgugcgcgaacugggcug

SEQ ID NO: 1585542 - RNA, 21 nt, Human adenovirus F
ugugccgcgcgggcaggagga

SEQ ID NO: 1585543 - RNA, 17 nt, Human adenovirus F
caggccgcccuaaccuc

SEQ ID NO: 1585544 - RNA, 15 nt, Human adenovirus F
aggguaaugucuuuc

SEQ ID NO: 1585545 - RNA, 20 nt, Human adenovirus F
agcaccaacgugcaggccaa

SEQ ID NO: 1585546 - RNA, 22 nt, Human adenovirus F
gcuuucaguuggagcagccugu

SEQ ID NO: 1585547 - RNA, 18 nt, Human adenovirus F
accucuucuucuuccucc

SEQ ID NO: 1585548 - RNA, 17 nt, Human adenovirus F
cagcccaacaccaccau

SEQ ID NO: 1585549 - RNA, 15 nt, Human adenovirus F
agaacaaaacacacu

SEQ ID NO: 1585550 - RNA, 16 nt, Human adenovirus F
ugggacagcggaggca

SEQ ID NO: 1585551 - RNA, 16 nt, Human adenovirus F
cugauccacuuacaac

SEQ ID NO: 1585552 - RNA, 16 nt, Human adenovirus F
ggcggcaacauuccug

SEQ ID NO: 1585553 - RNA, 13 nt, Human adenovirus F
uagcuggagggca

SEQ ID NO: 1585554 - RNA, 23 nt, Human adenovirus F
guggauggggguucgccuggaga

SEQ ID NO: 1585555 - RNA, 18 nt, Human adenovirus F
cgagccaccaucuccagc

SEQ ID NO: 1585556 - RNA, 23 nt, Human adenovirus F
aaaucgugcccguggaaaaagac

SEQ ID NO: 1585557 - RNA, 19 nt, Human adenovirus F
accgccaaaaaagcagccu

SEQ ID NO: 1585558 - RNA, 13 nt, Human adenovirus F
gaaucgcuggaaa

SEQ ID NO: 1585559 - RNA, 22 nt, Human adenovirus F
gaagccaaaucgcgcaaccagu

SEQ ID NO: 1585560 - RNA, 17 nt, Human adenovirus F
gaccuaaacucugagga

SEQ ID NO: 1585561 - RNA, 18 nt, Human adenovirus F
ggaugcaugcgaggggaa

SEQ ID NO: 1585562 - RNA, 15 nt, Human adenovirus F
gggagggaugcaugc

SEQ ID NO: 1585563 - RNA, 19 nt, Human adenovirus F
ggaaacugucaggcucuga

SEQ ID NO: 1585564 - RNA, 22 nt, Human adenovirus F
aacguucuucacugcaccuugc

SEQ ID NO: 1585565 - RNA, 13 nt, Human adenovirus F
gagcagccugugg

SEQ ID NO: 1585566 - RNA, 23 nt, Human adenovirus F
agcaagcccauucugccaguugg

SEQ ID NO: 1585567 - RNA, 14 nt, Human adenovirus F
aaagacagcaagga

SEQ ID NO: 1585568 - RNA, 18 nt, Human adenovirus F
cacgcgcucgacaugacu

SEQ ID NO: 1585569 - RNA, 18 nt, Human adenovirus F
uugugguacaggagcgca

SEQ ID NO: 1585570 - RNA, 18 nt, Human adenovirus F
gccucaugagcugggaga

SEQ ID NO: 1585571 - RNA, 13 nt, Human adenovirus F
cacaacaaaucau

SEQ ID NO: 1585572 - RNA, 14 nt, Human adenovirus F
ugcacugagcagcu

SEQ ID NO: 1585573 - RNA, 18 nt, Human adenovirus F
gucggcgucgaugguaaa

SEQ ID NO: 1585574 - RNA, 21 nt, Human adenovirus F
gcuaggcucuucuuccucguu

SEQ ID NO: 1585575 - RNA, 17 nt, Human adenovirus F
ggcuugcauaaaagcuu

SEQ ID NO: 1585576 - RNA, 21 nt, Human adenovirus F
ggcuaugaguugugcuuugcc

SEQ ID NO: 1585577 - RNA, 20 nt, Human adenovirus F
ucgcggggcuaacuggcaga

SEQ ID NO: 1585578 - RNA, 16 nt, Human adenovirus F
gaagagacccagguuu

SEQ ID NO: 1585579 - RNA, 19 nt, Human adenovirus F
auacguuacucggagcugg

SEQ ID NO: 1585580 - RNA, 15 nt, Human adenovirus F
aaagacagcaaggaa

SEQ ID NO: 1585581 - RNA, 12 nt, Human adenovirus F
ucacccacccac

SEQ ID NO: 1585582 - RNA, 21 nt, Human adenovirus F
gcugucguuaguggaggcagc

SEQ ID NO: 1585583 - RNA, 21 nt, Human adenovirus F
cacucgggaaagacaguggcg

SEQ ID NO: 1585584 - RNA, 19 nt, Human adenovirus F
ccaaaucaaucagcggcug

SEQ ID NO: 1585585 - RNA, 14 nt, Human adenovirus F
aggccgcggcggcu

SEQ ID NO: 1585586 - RNA, 23 nt, Human adenovirus F
cugauccguaauggaaaugaaac

SEQ ID NO: 1585587 - RNA, 13 nt, Human adenovirus F
acaaggccuggaa

SEQ ID NO: 1585588 - RNA, 21 nt, Human adenovirus F
uaccaaagacaaaaucacugu

SEQ ID NO: 1585589 - RNA, 23 nt, Human adenovirus F
gcauacguuacucggagcuggcg

SEQ ID NO: 1585590 - RNA, 17 nt, Human adenovirus F
acagccaagucaaaaaa

SEQ ID NO: 1585591 - RNA, 16 nt, Human adenovirus F
cuuacaugggcauucu

SEQ ID NO: 1585592 - RNA, 17 nt, Human adenovirus F
acgugcacaaagcucug

SEQ ID NO: 1585593 - RNA, 15 nt, Human adenovirus F
acuuggggaauuugu

SEQ ID NO: 1585594 - RNA, 13 nt, Human adenovirus F
gucgucgcaggcg

SEQ ID NO: 1585595 - RNA, 14 nt, Human adenovirus F
uuauaaucaugcaa

SEQ ID NO: 1585596 - RNA, 22 nt, Human adenovirus F
ggguaacuuuuaugaaugugag

SEQ ID NO: 1585597 - RNA, 18 nt, Human adenovirus F
ccugcaauggcagcccag

SEQ ID NO: 1585598 - RNA, 18 nt, Human adenovirus F
cauugguccagcaaaggc

SEQ ID NO: 1585599 - RNA, 19 nt, Human adenovirus F
gcucaucugcggccucagg

SEQ ID NO: 1585600 - RNA, 15 nt, Human adenovirus F
uguuacgccagagag

SEQ ID NO: 1585601 - RNA, 12 nt, Human adenovirus F
aguggccgccga

SEQ ID NO: 1585602 - RNA, 15 nt, Human adenovirus F
gugaccgagcagcug

SEQ ID NO: 1585603 - RNA, 17 nt, Human adenovirus F
agcucuucaucccagcc

SEQ ID NO: 1585604 - RNA, 14 nt, Human adenovirus F
uccauaaugauggc

SEQ ID NO: 1585605 - RNA, 15 nt, Human adenovirus F
ugccgcgcgggcagg

SEQ ID NO: 1585606 - RNA, 15 nt, Human adenovirus F
cccagauuuccuggu

SEQ ID NO: 1585607 - RNA, 19 nt, Human adenovirus F
cauuuaccaccccagcacu

SEQ ID NO: 1585608 - RNA, 13 nt, Human adenovirus F
auacgggaaggaa

SEQ ID NO: 1585609 - RNA, 22 nt, Human adenovirus F
cuaccacuaccccuaccacccu

SEQ ID NO: 1585610 - RNA, 15 nt, Human adenovirus F
guuccuuccgagaaa

SEQ ID NO: 1585611 - RNA, 14 nt, Human adenovirus F
gaggcagcagagga

SEQ ID NO: 1585612 - RNA, 22 nt, Human adenovirus F
aacgagaucggcaccagccagc

SEQ ID NO: 1585613 - RNA, 18 nt, Human adenovirus F
ucagggucgauggagcca

SEQ ID NO: 1585614 - RNA, 16 nt, Human adenovirus F
acgcgcucgacaugac

SEQ ID NO: 1585615 - RNA, 15 nt, Human adenovirus F
agucgucgcaggcgc

SEQ ID NO: 1585616 - RNA, 21 nt, Human adenovirus F
aguugugcuuugcccuccgau

SEQ ID NO: 1585617 - RNA, 19 nt, Human adenovirus F
gcuaccguucuaugcuccu

SEQ ID NO: 1585618 - RNA, 15 nt, Human adenovirus F
uuccucuucucuguc

SEQ ID NO: 1585619 - RNA, 21 nt, Human adenovirus F
uguccauauuauuuaaauaaa

SEQ ID NO: 1585620 - RNA, 22 nt, Human adenovirus F
ccgugcaaaacaauucucucuc

SEQ ID NO: 1585621 - RNA, 22 nt, Human adenovirus F
uaacgcuucagagcucuucauc

SEQ ID NO: 1585622 - RNA, 19 nt, Human adenovirus F
gaaaccccuuugugcccuc

SEQ ID NO: 1585623 - RNA, 17 nt, Human adenovirus F
auguccaccugaggggc

SEQ ID NO: 1585624 - RNA, 19 nt, Human adenovirus F
aguggacaaaccaaaacaa

SEQ ID NO: 1585625 - RNA, 18 nt, Human adenovirus F
gauuuguaguggagggau

SEQ ID NO: 1585626 - RNA, 23 nt, Human adenovirus F
uagaaggcuacucauuaaaauuc

SEQ ID NO: 1585627 - RNA, 15 nt, Human adenovirus F
aaguuaccaaagaca

SEQ ID NO: 1585628 - RNA, 19 nt, Human adenovirus F
aaaacguucccgcccucac

SEQ ID NO: 1585629 - RNA, 11 nt, Human adenovirus F
uaaacucugag

SEQ ID NO: 1585630 - RNA, 16 nt, Human adenovirus F
ccucgcugucuggaac

SEQ ID NO: 1585631 - RNA, 22 nt, Human adenovirus F
aggucguaaugaggacauugcu

SEQ ID NO: 1585632 - RNA, 16 nt, Human adenovirus F
uaagguaaagccacaa

SEQ ID NO: 1585633 - RNA, 16 nt, Human adenovirus F
agcccgcaacggcgca

SEQ ID NO: 1585634 - RNA, 14 nt, Human adenovirus F
uguaugggcagcau

SEQ ID NO: 1585635 - RNA, 13 nt, Human adenovirus F
ggaggccauccug

SEQ ID NO: 1585636 - RNA, 14 nt, Human adenovirus F
ucaccuacucuggc

SEQ ID NO: 1585637 - RNA, 23 nt, Human adenovirus F
ugcagcagcgcccgccucccaaa

SEQ ID NO: 1585638 - RNA, 18 nt, Human adenovirus F
aaaacuuggcagcaacau

SEQ ID NO: 1585639 - RNA, 16 nt, Human adenovirus F
gcuagaccaacaaacg

SEQ ID NO: 1585640 - RNA, 22 nt, Human adenovirus F
ccggcggcgggugcaguggcgg

SEQ ID NO: 1585641 - RNA, 14 nt, Human adenovirus F
auggugguagaagg

SEQ ID NO: 1585642 - RNA, 20 nt, Human adenovirus F
cucagccugaaauacacuga

SEQ ID NO: 1585643 - RNA, 17 nt, Human adenovirus F
cacauaagaagccagcc

SEQ ID NO: 1585644 - RNA, 13 nt, Human adenovirus F
cguugugcgcauc

SEQ ID NO: 1585645 - RNA, 12 nt, Human adenovirus F
uacauuggccac

SEQ ID NO: 1585646 - RNA, 23 nt, Human adenovirus F
gauuccugggguagggugucugc

SEQ ID NO: 1585647 - RNA, 20 nt, Human adenovirus F
aaguccacaaaaacuccaaa

SEQ ID NO: 1585648 - RNA, 14 nt, Human adenovirus F
cucggguauggugg

SEQ ID NO: 1585649 - RNA, 22 nt, Human adenovirus F
accaacgaggccuuucacccag

SEQ ID NO: 1585650 - RNA, 16 nt, Human adenovirus F
gcgcgaacagaguggg

SEQ ID NO: 1585651 - RNA, 18 nt, Human adenovirus F
cacauccaagugccccag

SEQ ID NO: 1585652 - RNA, 14 nt, Human adenovirus F
cauugccucccuga

SEQ ID NO: 1585653 - RNA, 13 nt, Human adenovirus F
aggaggcggagga

SEQ ID NO: 1585654 - RNA, 14 nt, Human adenovirus F
caccucgcucacau

SEQ ID NO: 1585655 - RNA, 21 nt, Human adenovirus F
ugugccauuguuaacacggcg

SEQ ID NO: 1585656 - RNA, 14 nt, Human adenovirus F
gucagguuugacag

SEQ ID NO: 1585657 - RNA, 15 nt, Human adenovirus F
ucgcauccuggcccu

SEQ ID NO: 1585658 - RNA, 22 nt, Human adenovirus F
agguaaucaggagaaaaaagac

SEQ ID NO: 1585659 - RNA, 15 nt, Human adenovirus F
cugaccagcagcagc

SEQ ID NO: 1585660 - RNA, 18 nt, Human adenovirus F
cuacaauuccacuggcaa

SEQ ID NO: 1585661 - RNA, 23 nt, Human adenovirus F
gacgugccugagggcgacgacgg

SEQ ID NO: 1585662 - RNA, 17 nt, Human adenovirus F
ugcuccuggcgagccca

SEQ ID NO: 1585663 - RNA, 14 nt, Human adenovirus F
uaugccaacuuuuu

SEQ ID NO: 1585664 - RNA, 12 nt, Human adenovirus F
acugccaccucc

SEQ ID NO: 1585665 - RNA, 14 nt, Human adenovirus F
cuagucccuccucc

SEQ ID NO: 1585666 - RNA, 22 nt, Human adenovirus F
cagcuaacucucuuacauuggc

SEQ ID NO: 1585667 - RNA, 21 nt, Human adenovirus F
ccgaagccuucaggcagcagc

SEQ ID NO: 1585668 - RNA, 14 nt, Human adenovirus F
ggcgcugggacggg

SEQ ID NO: 1585669 - RNA, 19 nt, Human adenovirus F
agccgacuucaagcccaau

SEQ ID NO: 1585670 - RNA, 19 nt, Human adenovirus F
cccaucaucgccgccgcca

SEQ ID NO: 1585671 - RNA, 22 nt, Human adenovirus F
uguaccgccaaaaaagcagccu

SEQ ID NO: 1585672 - RNA, 17 nt, Human adenovirus F
ccauuggcaauguguuu

SEQ ID NO: 1585673 - RNA, 18 nt, Human adenovirus F
acagcguagcacucccuc

SEQ ID NO: 1585674 - RNA, 22 nt, Human adenovirus F
ucccgccccccacuagcgcccc

SEQ ID NO: 1585675 - RNA, 18 nt, Human adenovirus F
caauggaacgcaguguuu

SEQ ID NO: 1585676 - RNA, 15 nt, Human adenovirus F
cgguuucaaacaugu

SEQ ID NO: 1585677 - RNA, 16 nt, Human adenovirus F
aagcagagcucugcaa

SEQ ID NO: 1585678 - RNA, 15 nt, Human adenovirus F
uuccucccaacuuuc

SEQ ID NO: 1585679 - RNA, 13 nt, Human adenovirus F
aaccuugaggaau

SEQ ID NO: 1585680 - RNA, 16 nt, Human adenovirus F
cggcacgggcgcacgu

SEQ ID NO: 1585681 - RNA, 22 nt, Human adenovirus F
guuaacaugauucuccaaagca

SEQ ID NO: 1585682 - RNA, 13 nt, Human adenovirus F
caccagaugaugu

SEQ ID NO: 1585683 - RNA, 16 nt, Human adenovirus F
aucggcaccagccagc

SEQ ID NO: 1585684 - RNA, 13 nt, Human adenovirus F
cccgaggacggca

SEQ ID NO: 1585685 - RNA, 17 nt, Human adenovirus F
acggaaggaaacgcugu

SEQ ID NO: 1585686 - RNA, 18 nt, Human adenovirus F
ugcucuuuuugaaucauu

SEQ ID NO: 1585687 - RNA, 23 nt, Human adenovirus F
agaagaugcccuguccguggugu

SEQ ID NO: 1585688 - RNA, 22 nt, Human adenovirus F
auggaaacugucaggcucugag

SEQ ID NO: 1585689 - RNA, 17 nt, Human adenovirus F
cccaccgcccccacugu

SEQ ID NO: 1585690 - RNA, 15 nt, Human adenovirus F
cgaaacuuccaaccc

SEQ ID NO: 1585691 - RNA, 15 nt, Human adenovirus F
gucguugccagccgg

SEQ ID NO: 1585692 - RNA, 17 nt, Human adenovirus F
caggucguaaugaggac

SEQ ID NO: 1585693 - RNA, 18 nt, Human adenovirus F
ccgagguauccagcucaa

SEQ ID NO: 1585694 - RNA, 22 nt, Human adenovirus F
cuugcauaaaagcuucuaucug

SEQ ID NO: 1585695 - RNA, 19 nt, Human adenovirus F
accaaaacaaaacaaacuc

SEQ ID NO: 1585696 - RNA, 19 nt, Human adenovirus F
cgcagcgggcaggagcccg

SEQ ID NO: 1585697 - RNA, 20 nt, Human adenovirus F
ucugcagcagcgcccgccuc

SEQ ID NO: 1585698 - RNA, 19 nt, Human adenovirus F
agagcuugggcccugggcu

SEQ ID NO: 1585699 - RNA, 18 nt, Human adenovirus F
acgacaaucagaccacaa

SEQ ID NO: 1585700 - RNA, 20 nt, Human adenovirus F
accaauaugcccaacaucaa

SEQ ID NO: 1585701 - RNA, 15 nt, Human adenovirus F
ucacgaccucccaaa

SEQ ID NO: 1585702 - RNA, 19 nt, Human adenovirus F
aagcugcggaaaugcuuua

SEQ ID NO: 1585703 - RNA, 16 nt, Human adenovirus F
aucaguuguuugucaa

SEQ ID NO: 1585704 - RNA, 16 nt, Human adenovirus F
cagcagauccuucccg

SEQ ID NO: 1585705 - RNA, 18 nt, Human adenovirus F
ucagcgcgcuucgccucc

SEQ ID NO: 1585706 - RNA, 16 nt, Human adenovirus F
gcaguguuauaagguc

SEQ ID NO: 1585707 - RNA, 20 nt, Human adenovirus F
cacaguguuugcuucuacca

SEQ ID NO: 1585708 - RNA, 18 nt, Human adenovirus F
cguuuccucgauuuccau

SEQ ID NO: 1585709 - RNA, 12 nt, Human adenovirus F
cguacacuggcu

SEQ ID NO: 1585710 - RNA, 19 nt, Human adenovirus F
cuugggaggauuuugaguu

SEQ ID NO: 1585711 - RNA, 14 nt, Human adenovirus F
gaccuggaagaggg

SEQ ID NO: 1585712 - RNA, 19 nt, Human adenovirus F
aaaucaaggccaaaguuca

SEQ ID NO: 1585713 - RNA, 13 nt, Human adenovirus F
ucaaucagcggcu

SEQ ID NO: 1585714 - RNA, 13 nt, Human adenovirus F
aggcaguggugga

SEQ ID NO: 1585715 - RNA, 16 nt, Human adenovirus F
uggcgcgcgaggaggu

SEQ ID NO: 1585716 - RNA, 18 nt, Human adenovirus F
aggagcagcgggaagaga

SEQ ID NO: 1585717 - RNA, 20 nt, Human adenovirus F
ugcaaacgagaggaccacuu

SEQ ID NO: 1585718 - RNA, 21 nt, Human adenovirus F
cauuaauaguggcacagcaaa

SEQ ID NO: 1585719 - RNA, 15 nt, Human adenovirus F
cccaggcggaaacca

SEQ ID NO: 1585720 - RNA, 21 nt, Human adenovirus F
uuucauuuaccaccccagcac

SEQ ID NO: 1585721 - RNA, 21 nt, Human adenovirus F
cgucgguggauaccgcugcag

SEQ ID NO: 1585722 - RNA, 21 nt, Human adenovirus F
ggaaccaggcaguggacagcu

SEQ ID NO: 1585723 - RNA, 17 nt, Human adenovirus F
uagccaguggacaaacc

SEQ ID NO: 1585724 - RNA, 15 nt, Human adenovirus F
acaugcgcuccaaca

SEQ ID NO: 1585725 - RNA, 18 nt, Human adenovirus F
agcucccuauauaggaca

SEQ ID NO: 1585726 - RNA, 22 nt, Human adenovirus F
gcggaaaccaagggcucugccu

SEQ ID NO: 1585727 - RNA, 20 nt, Human adenovirus F
cuucucuucggccuccacau

SEQ ID NO: 1585728 - RNA, 16 nt, Human adenovirus F
gcgccgagcggcugcu

SEQ ID NO: 1585729 - RNA, 14 nt, Human adenovirus F
acuucagccugggg

SEQ ID NO: 1585730 - RNA, 15 nt, Human adenovirus F
augccucccuuugcc

SEQ ID NO: 1585731 - RNA, 15 nt, Human adenovirus F
gacgcgaggaugaga

SEQ ID NO: 1585732 - RNA, 14 nt, Human adenovirus F
uggacgggcuggcu

SEQ ID NO: 1585733 - RNA, 19 nt, Human adenovirus F
ccgccaugacugccgcucg

SEQ ID NO: 1585734 - RNA, 14 nt, Human adenovirus F
ggucaacagcugga

SEQ ID NO: 1585735 - RNA, 15 nt, Human adenovirus F
gccaggcggcgauga

SEQ ID NO: 1585736 - RNA, 12 nt, Human adenovirus F
agcgggcaggag

SEQ ID NO: 1585737 - RNA, 17 nt, Human adenovirus F
guuacaaaaugaguggc

SEQ ID NO: 1585738 - RNA, 13 nt, Human adenovirus F
gcuccuggcgagc

SEQ ID NO: 1585739 - RNA, 18 nt, Human adenovirus F
guggauaccgcugcagcu

SEQ ID NO: 1585740 - RNA, 14 nt, Human adenovirus F
ugggagugcuggcc

SEQ ID NO: 1585741 - RNA, 19 nt, Human adenovirus F
aaagaaccagaauugaaga

SEQ ID NO: 1585742 - RNA, 18 nt, Human adenovirus F
acuaucccgccccugcca

SEQ ID NO: 1585743 - RNA, 15 nt, Human adenovirus F
cuacaagauuccacc

SEQ ID NO: 1585744 - RNA, 21 nt, Human adenovirus F
cccuuacgaacacuacaaucc

SEQ ID NO: 1585745 - RNA, 20 nt, Human adenovirus F
gaccucauccgccauugcca

SEQ ID NO: 1585746 - RNA, 15 nt, Human adenovirus F
uagagacugccaagc

SEQ ID NO: 1585747 - RNA, 20 nt, Human adenovirus F
gucagcuaacucucuuacau

SEQ ID NO: 1585748 - RNA, 13 nt, Human adenovirus F
caaacaacugcaa

SEQ ID NO: 1585749 - RNA, 19 nt, Human adenovirus F
ggcggcgaccugaaaacca

SEQ ID NO: 1585750 - RNA, 15 nt, Human adenovirus F
cgggucgcagcaggu

SEQ ID NO: 1585751 - RNA, 14 nt, Human adenovirus F
cugauuugagggua

SEQ ID NO: 1585752 - RNA, 14 nt, Human adenovirus F
agguggggcggcga

SEQ ID NO: 1585753 - RNA, 21 nt, Human adenovirus F
caacucguucaguggcgcgcu

SEQ ID NO: 1585754 - RNA, 19 nt, Human adenovirus F
cuacaaaaggcgcacaaga

SEQ ID NO: 1585755 - RNA, 18 nt, Human adenovirus F
ccccgcgacgucagcuga

SEQ ID NO: 1585756 - RNA, 16 nt, Human adenovirus F
uucuuuuugggaggaa

SEQ ID NO: 1585757 - RNA, 13 nt, Human adenovirus F
caaacacaaacac

SEQ ID NO: 1585758 - RNA, 22 nt, Human adenovirus F
gccagacuuugucagccaaagu

SEQ ID NO: 1585759 - RNA, 11 nt, Human adenovirus F
auaagcugggu

SEQ ID NO: 1585760 - RNA, 15 nt, Human adenovirus F
ggacguggaggaaga

SEQ ID NO: 1585761 - RNA, 14 nt, Human adenovirus F
ccguccccagcgcc

SEQ ID NO: 1585762 - RNA, 14 nt, Human adenovirus F
aaaagucaaaagug

SEQ ID NO: 1585763 - RNA, 18 nt, Human adenovirus F
ccucuugggcaggagugc

SEQ ID NO: 1585764 - RNA, 22 nt, Human adenovirus F
cgccguggcuggcgggcaaagc

SEQ ID NO: 1585765 - RNA, 19 nt, Human adenovirus F
cuagaggacguggaggaag

SEQ ID NO: 1585766 - RNA, 15 nt, Human adenovirus F
acccgccgucgucgc

SEQ ID NO: 1585767 - RNA, 15 nt, Human adenovirus F
aaagcgggggcgucc

SEQ ID NO: 1585768 - RNA, 15 nt, Human adenovirus F
auauuggcuaccagg

SEQ ID NO: 1585769 - RNA, 16 nt, Human adenovirus F
ugccaucugcagcauu

SEQ ID NO: 1585770 - RNA, 17 nt, Human adenovirus F
aaugccaggcagcaggg

SEQ ID NO: 1585771 - RNA, 18 nt, Human adenovirus F
gugauaucauuaaaaagg

SEQ ID NO: 1585772 - RNA, 15 nt, Human adenovirus F
aaucaaggccaaagu

SEQ ID NO: 1585773 - RNA, 17 nt, Human adenovirus F
aggaggaggagaaccug

SEQ ID NO: 1585774 - RNA, 22 nt, Human adenovirus F
gugguggccaacgccaggcguu

SEQ ID NO: 1585775 - RNA, 15 nt, Human adenovirus F
ccuacucuggcuccg

SEQ ID NO: 1585776 - RNA, 19 nt, Human adenovirus F
aggauuuacacaacgauuc

SEQ ID NO: 1585777 - RNA, 22 nt, Human adenovirus F
gagcaagcgcaaguucaaagaa

SEQ ID NO: 1585778 - RNA, 23 nt, Human adenovirus F
cagucggugggcguccaguggag

SEQ ID NO: 1585779 - RNA, 18 nt, Human adenovirus F
augccuccagcacugccg

SEQ ID NO: 1585780 - RNA, 14 nt, Human adenovirus F
gcuaaaucuuccuc

SEQ ID NO: 1585781 - RNA, 16 nt, Human adenovirus F
ggccccugaggcagcg

SEQ ID NO: 1585782 - RNA, 17 nt, Human adenovirus F
uggccccuaccagccgu

SEQ ID NO: 1585783 - RNA, 14 nt, Human adenovirus F
ccuggccaacugcc

SEQ ID NO: 1585784 - RNA, 18 nt, Human adenovirus F
uuaccccgacagaggccg

SEQ ID NO: 1585785 - RNA, 14 nt, Human adenovirus F
acauccauuuccac

SEQ ID NO: 1585786 - RNA, 16 nt, Human adenovirus F
aggaggccauccugga

SEQ ID NO: 1585787 - RNA, 21 nt, Human adenovirus F
acguaccaaccggagccucaa

SEQ ID NO: 1585788 - RNA, 12 nt, Human adenovirus F
cagccaguggga

SEQ ID NO: 1585789 - RNA, 20 nt, Human adenovirus F
acuaaggcgggcacaaagga

SEQ ID NO: 1585790 - RNA, 12 nt, Human adenovirus F
cugggacagccu

SEQ ID NO: 1585791 - RNA, 13 nt, Human adenovirus F
ucuuacaauuuga

SEQ ID NO: 1585792 - RNA, 19 nt, Human adenovirus F
aauuuaugccuagcucuaa

SEQ ID NO: 1585793 - RNA, 23 nt, Human adenovirus F
aggagugcgucagaauguggugg

SEQ ID NO: 1585794 - RNA, 13 nt, Human adenovirus F
cguuguggacuuc

SEQ ID NO: 1585795 - RNA, 15 nt, Human adenovirus F
gcaccagccagcuca

SEQ ID NO: 1585796 - RNA, 16 nt, Human adenovirus F
acagcugaagacacau

SEQ ID NO: 1585797 - RNA, 12 nt, Human adenovirus F
caguuggagcag

SEQ ID NO: 1585798 - RNA, 22 nt, Human adenovirus F
ccgucguacaaguugcaaagcu

SEQ ID NO: 1585799 - RNA, 16 nt, Human adenovirus F
gccuugcaagcagcuc

SEQ ID NO: 1585800 - RNA, 20 nt, Human adenovirus F
ccgcacucgcuccacccgcc

SEQ ID NO: 1585801 - RNA, 21 nt, Human adenovirus F
cagcuucucgaggccaaaccc

SEQ ID NO: 1585802 - RNA, 13 nt, Human adenovirus F
gcgcaaugcagag

SEQ ID NO: 1585803 - RNA, 21 nt, Human adenovirus F
uguacaaagucauccaaauca

SEQ ID NO: 1585804 - RNA, 15 nt, Human adenovirus F
ggaggaagagggucu

SEQ ID NO: 1585805 - RNA, 23 nt, Human adenovirus F
aucuucaaacauuaagcugcaau

SEQ ID NO: 1585806 - RNA, 19 nt, Human adenovirus F
auuaaacgucaaugccaau

SEQ ID NO: 1585807 - RNA, 19 nt, Human adenovirus F
ccgccgucgucgcucuguc

SEQ ID NO: 1585808 - RNA, 21 nt, Human adenovirus F
gaaucuaaccacuaccacccu

SEQ ID NO: 1585809 - RNA, 12 nt, Human adenovirus F
uuuacuuaaaaa

SEQ ID NO: 1585810 - RNA, 17 nt, Human adenovirus F
gauuuacaaaacccccu

SEQ ID NO: 1585811 - RNA, 20 nt, Human adenovirus F
ucuucaaucguuuuccugag

SEQ ID NO: 1585812 - RNA, 15 nt, Human adenovirus F
aaugguaccacgcag

SEQ ID NO: 1585813 - RNA, 12 nt, Human adenovirus F
acugaccccauu

SEQ ID NO: 1585814 - RNA, 16 nt, Human adenovirus F
cgcaacggcgcagcag

SEQ ID NO: 1585815 - RNA, 12 nt, Human adenovirus F
agagcuggaggg

SEQ ID NO: 1585816 - RNA, 20 nt, Human adenovirus F
gucagcaagacaccaguagc

SEQ ID NO: 1585817 - RNA, 12 nt, Human adenovirus F
ggaugguggcaa

SEQ ID NO: 1585818 - RNA, 14 nt, Human adenovirus F
ggugcgguuucaaa

SEQ ID NO: 1585819 - RNA, 19 nt, Human adenovirus F
cccgaagccuucaggcagc

SEQ ID NO: 1585820 - RNA, 21 nt, Human adenovirus F
guguuaucacccaaagccaaa

SEQ ID NO: 1585821 - RNA, 16 nt, Human adenovirus F
cucgagguguaacauc

SEQ ID NO: 1585822 - RNA, 19 nt, Human adenovirus F
uugcacgcucugcaucucu

SEQ ID NO: 1585823 - RNA, 18 nt, Human adenovirus F
aacggacgcauuaccauu

SEQ ID NO: 1585824 - RNA, 14 nt, Human adenovirus F
aguuccucuucucu

SEQ ID NO: 1585825 - RNA, 11 nt, Human adenovirus F
cugucuggaac

SEQ ID NO: 1585826 - RNA, 14 nt, Human adenovirus F
accacuucgggaga

SEQ ID NO: 1585827 - RNA, 15 nt, Human adenovirus F
uggcccaccacucug

SEQ ID NO: 1585828 - RNA, 21 nt, Human adenovirus F
gauaccgcugcagcugcugcc

SEQ ID NO: 1585829 - RNA, 19 nt, Human adenovirus F
cuagaccaacaaacgaaaa

SEQ ID NO: 1585830 - RNA, 21 nt, Human adenovirus F
aagcgggcgcaauacucgcag

SEQ ID NO: 1585831 - RNA, 14 nt, Human adenovirus F
gcuuggaggagcug

SEQ ID NO: 1585832 - RNA, 15 nt, Human adenovirus F
acugccacugaaacc

SEQ ID NO: 1585833 - RNA, 15 nt, Human adenovirus F
gaagagcaaaaccuc

SEQ ID NO: 1585834 - RNA, 23 nt, Human adenovirus F
ucccaaagucccccuuacagccu

SEQ ID NO: 1585835 - RNA, 15 nt, Human adenovirus F
caauccuaacaaaaa

SEQ ID NO: 1585836 - RNA, 14 nt, Human adenovirus F
uugcaucucaaagc

SEQ ID NO: 1585837 - RNA, 19 nt, Human adenovirus F
cacuagcgccccugcagcc

SEQ ID NO: 1585838 - RNA, 17 nt, Human adenovirus F
uacgcccaggagcagcg

SEQ ID NO: 1585839 - RNA, 23 nt, Human adenovirus F
augugccgcgcgggcaggaggac

SEQ ID NO: 1585840 - RNA, 15 nt, Human adenovirus F
cucauccgccauugc

SEQ ID NO: 1585841 - RNA, 19 nt, Human adenovirus F
accggguuuuggacauggc

SEQ ID NO: 1585842 - RNA, 23 nt, Human adenovirus F
agcgucuuacauaucgcuugcca

SEQ ID NO: 1585843 - RNA, 12 nt, Human adenovirus F
ugugacaaaauc

SEQ ID NO: 1585844 - RNA, 17 nt, Human adenovirus F
agacacauuggcuggag

SEQ ID NO: 1585845 - RNA, 16 nt, Human adenovirus F
gcaagccgcugacggc

SEQ ID NO: 1585846 - RNA, 13 nt, Human adenovirus F
caugaggaggaaa

SEQ ID NO: 1585847 - RNA, 23 nt, Human adenovirus F
auggucauuuuuucaagggauug

SEQ ID NO: 1585848 - RNA, 21 nt, Human adenovirus F
cuuuaacaacacaggagcuuu

SEQ ID NO: 1585849 - RNA, 14 nt, Human adenovirus F
gccaacuauuuggc

SEQ ID NO: 1585850 - RNA, 12 nt, Human adenovirus F
aaccggcggcgu

SEQ ID NO: 1585851 - RNA, 13 nt, Human adenovirus F
gagcuauuacuuu

SEQ ID NO: 1585852 - RNA, 17 nt, Human adenovirus F
accucuucuucuuccuc

SEQ ID NO: 1585853 - RNA, 21 nt, Human adenovirus F
gcagccguugcucucuccgga

SEQ ID NO: 1585854 - RNA, 18 nt, Human adenovirus F
gaccacuggagggcguca

SEQ ID NO: 1585855 - RNA, 21 nt, Human adenovirus F
ccuccgacgcuugcuggaguu

SEQ ID NO: 1585856 - RNA, 20 nt, Human adenovirus F
cgcagcguugcacgcucugc

SEQ ID NO: 1585857 - RNA, 15 nt, Human adenovirus F
aauaccccgucacuc

SEQ ID NO: 1585858 - RNA, 14 nt, Human adenovirus F
acagccaggcagag

SEQ ID NO: 1585859 - RNA, 21 nt, Human adenovirus F
cgugggaaggggccagcaagc

SEQ ID NO: 1585860 - RNA, 16 nt, Human adenovirus F
caguaagcaacaacca

SEQ ID NO: 1585861 - RNA, 12 nt, Human adenovirus F
aucuucaaacau

SEQ ID NO: 1585862 - RNA, 15 nt, Human adenovirus F
aaacaagcaaagaca

SEQ ID NO: 1585863 - RNA, 16 nt, Human adenovirus F
ucaaacacugcgcaaa

SEQ ID NO: 1585864 - RNA, 16 nt, Human adenovirus F
cuuaauucuucaugua

SEQ ID NO: 1585865 - RNA, 13 nt, Human adenovirus F
auucucucuccuu

SEQ ID NO: 1585866 - RNA, 17 nt, Human adenovirus F
ccagucggcaggcuucc

SEQ ID NO: 1585867 - RNA, 12 nt, Human adenovirus F
agucaagcucuc

SEQ ID NO: 1585868 - RNA, 20 nt, Human adenovirus F
guucucgcucgcuacaucca

SEQ ID NO: 1585869 - RNA, 20 nt, Human adenovirus F
cuugcgcaacuucuuuuugg

SEQ ID NO: 1585870 - RNA, 20 nt, Human adenovirus F
uaccgcgcccccuggggggc

SEQ ID NO: 1585871 - RNA, 14 nt, Human adenovirus F
augagcugggagaa

SEQ ID NO: 1585872 - RNA, 15 nt, Human adenovirus F
guuugggagccagga

SEQ ID NO: 1585873 - RNA, 17 nt, Human adenovirus F
agaaauagggcccggac

SEQ ID NO: 1585874 - RNA, 13 nt, Human adenovirus F
agcuugaggaggu

SEQ ID NO: 1585875 - RNA, 21 nt, Human adenovirus F
gcaagcgcaaguucaaagaag

SEQ ID NO: 1585876 - RNA, 17 nt, Human adenovirus F
gaacggcgugcuggaaa

SEQ ID NO: 1585877 - RNA, 22 nt, Human adenovirus F
cugcaccccucaucgcucacug

SEQ ID NO: 1585878 - RNA, 23 nt, Human adenovirus F
gcggcugguuauguuggcgcgga

SEQ ID NO: 1585879 - RNA, 21 nt, Human adenovirus F
cggacgugagagaggcggugg

SEQ ID NO: 1585880 - RNA, 18 nt, Human adenovirus F
gcguagaguuugggagcc

SEQ ID NO: 1585881 - RNA, 16 nt, Human adenovirus F
auaccgcugcagcugc

SEQ ID NO: 1585882 - RNA, 19 nt, Human adenovirus F
cucuguuugcugcacugcc

SEQ ID NO: 1585883 - RNA, 14 nt, Human adenovirus F
gaaauugaaguagg

SEQ ID NO: 1585884 - RNA, 13 nt, Human adenovirus F
ggccuguuuuuga

SEQ ID NO: 1585885 - RNA, 21 nt, Human adenovirus F
auccccuauugcgaccggccc

SEQ ID NO: 1585886 - RNA, 18 nt, Human adenovirus F
cagccccaggccaaccgc

SEQ ID NO: 1585887 - RNA, 15 nt, Human adenovirus F
ucuguccgccgccgc

SEQ ID NO: 1585888 - RNA, 18 nt, Human adenovirus F
ugcacugccaucugcagc

SEQ ID NO: 1585889 - RNA, 19 nt, Human adenovirus F
agaaacuacaaaagcagug

SEQ ID NO: 1585890 - RNA, 20 nt, Human adenovirus F
ggcacuugaacauucuugcg

SEQ ID NO: 1585891 - RNA, 18 nt, Human adenovirus F
cgucuacccuuacgaaca

SEQ ID NO: 1585892 - RNA, 15 nt, Human adenovirus F
aaugcagagcuuggg

SEQ ID NO: 1585893 - RNA, 22 nt, Human adenovirus F
aagcugugagcgccagccgccg

SEQ ID NO: 1585894 - RNA, 15 nt, Human adenovirus F
cgacagccaggcaga

SEQ ID NO: 1585895 - RNA, 21 nt, Human adenovirus F
accaccucuucuucuuccucc

SEQ ID NO: 1585896 - RNA, 16 nt, Human adenovirus F
cucuauacgacaccac

SEQ ID NO: 1585897 - RNA, 20 nt, Human adenovirus F
uuaaugcuuuucugagcaca

SEQ ID NO: 1585898 - RNA, 18 nt, Human adenovirus F
uuuuugagcaugaaacug

SEQ ID NO: 1585899 - RNA, 16 nt, Human adenovirus F
caaaacaauucucucu

SEQ ID NO: 1585900 - RNA, 20 nt, Human adenovirus F
cugccagaacuuccagcugu

SEQ ID NO: 1585901 - RNA, 21 nt, Human adenovirus F
aaacccguucggagccaaccu

SEQ ID NO: 1585902 - RNA, 20 nt, Human adenovirus F
gccggcucuaggcauaaagu

SEQ ID NO: 1585903 - RNA, 22 nt, Human adenovirus F
cuaccgccuuuggagguggcac

SEQ ID NO: 1585904 - RNA, 18 nt, Human adenovirus F
ccugaggaggaggccauc

SEQ ID NO: 1585905 - RNA, 18 nt, Human adenovirus F
cugaccgaccuggggcaa

SEQ ID NO: 1585906 - RNA, 12 nt, Human adenovirus F
cgauggagccag

SEQ ID NO: 1585907 - RNA, 15 nt, Human adenovirus F
ggggauuggcggcua

SEQ ID NO: 1585908 - RNA, 17 nt, Human adenovirus F
ccgcuuggaggagcugu

SEQ ID NO: 1585909 - RNA, 21 nt, Human adenovirus F
cucagcuuauucgccagucca

SEQ ID NO: 1585910 - RNA, 13 nt, Human adenovirus F
aauuuagcucuaa

SEQ ID NO: 1585911 - RNA, 13 nt, Human adenovirus F
ggaguuggaggag

SEQ ID NO: 1585912 - RNA, 17 nt, Human adenovirus F
uacaaacaguaacaacu

SEQ ID NO: 1585913 - RNA, 13 nt, Human adenovirus F
ccuacugccgcca

SEQ ID NO: 1585914 - RNA, 13 nt, Human adenovirus F
caugacugccgcu

SEQ ID NO: 1585915 - RNA, 18 nt, Human adenovirus F
caccucuucuucuuccuc

SEQ ID NO: 1585916 - RNA, 13 nt, Human adenovirus F
gacauuguuuugc

SEQ ID NO: 1585917 - RNA, 19 nt, Human adenovirus F
cugucaggcucugagagug

SEQ ID NO: 1585918 - RNA, 19 nt, Human adenovirus F
acgagcuugcucgcuggcu

SEQ ID NO: 1585919 - RNA, 21 nt, Human adenovirus F
gcugcguucgacggcgguggc

SEQ ID NO: 1585920 - RNA, 17 nt, Human adenovirus F
cucccaauccuagccag

SEQ ID NO: 1585921 - RNA, 21 nt, Human adenovirus F
uccagugcaggaagaggagga

SEQ ID NO: 1585922 - RNA, 22 nt, Human adenovirus F
caccgcaaugcuggucugcgcu

SEQ ID NO: 1585923 - RNA, 19 nt, Human adenovirus F
aaccggucguaacaaauac

SEQ ID NO: 1585924 - RNA, 21 nt, Human adenovirus F
aaaacgucccaucauuuccac

SEQ ID NO: 1585925 - RNA, 12 nt, Human adenovirus F
ugacucuuacaa

SEQ ID NO: 1585926 - RNA, 20 nt, Human adenovirus F
acgcugagugacgaucuggg

SEQ ID NO: 1585927 - RNA, 14 nt, Human adenovirus F
ggucggcacgcucc

SEQ ID NO: 1585928 - RNA, 22 nt, Human adenovirus F
cccaccgaguuccugcgcugcu

SEQ ID NO: 1585929 - RNA, 20 nt, Human adenovirus F
accucgccgcgcaggggcuc

SEQ ID NO: 1585930 - RNA, 14 nt, Human adenovirus F
ucaacuccucuugc

SEQ ID NO: 1585931 - RNA, 13 nt, Human adenovirus F
gcagaggagguga

SEQ ID NO: 1585932 - RNA, 15 nt, Human adenovirus F
agcagugggcaaagg

SEQ ID NO: 1585933 - RNA, 18 nt, Human adenovirus F
agauucaagggccagagc

SEQ ID NO: 1585934 - RNA, 16 nt, Human adenovirus F
aagccugacucagaaa

SEQ ID NO: 1585935 - RNA, 13 nt, Human adenovirus F
gcucauccugcug

SEQ ID NO: 1585936 - RNA, 20 nt, Human adenovirus F
aaacagcagguuaaagccaa

SEQ ID NO: 1585937 - RNA, 18 nt, Human adenovirus F
caccuacucuggcuccgu

SEQ ID NO: 1585938 - RNA, 16 nt, Human adenovirus F
ugggaacuguccaggg

SEQ ID NO: 1585939 - RNA, 22 nt, Human adenovirus F
gacggaggcaaaacuggaacgc

SEQ ID NO: 1585940 - RNA, 16 nt, Human adenovirus F
cagcucaacgggggcg

SEQ ID NO: 1585941 - RNA, 18 nt, Human adenovirus F
cuggccaacugccaccuc

SEQ ID NO: 1585942 - RNA, 22 nt, Human adenovirus F
aguagguggggccccugaggca

SEQ ID NO: 1585943 - RNA, 14 nt, Human adenovirus F
ugguggggaguucu

SEQ ID NO: 1585944 - RNA, 19 nt, Human adenovirus F
gcgcagcaccgcacagaaa

SEQ ID NO: 1585945 - RNA, 18 nt, Human adenovirus F
acgcggggcaggagcugc

SEQ ID NO: 1585946 - RNA, 13 nt, Human adenovirus F
aauauccuucaga

SEQ ID NO: 1585947 - RNA, 17 nt, Human adenovirus F
caacuuuugcaccaggg

SEQ ID NO: 1585948 - RNA, 16 nt, Human adenovirus F
gccacccaagggaaac

SEQ ID NO: 1585949 - RNA, 18 nt, Human adenovirus F
gcuuccuuaacaagggcu

SEQ ID NO: 1585950 - RNA, 11 nt, Human adenovirus F
aaacuggaaga

SEQ ID NO: 1585951 - RNA, 14 nt, Human adenovirus F
gcagcgggaagaga

SEQ ID NO: 1585952 - RNA, 19 nt, Human adenovirus F
ggagccucaaguggggcag

SEQ ID NO: 1585953 - RNA, 13 nt, Human adenovirus F
cugacagcuggga

SEQ ID NO: 1585954 - RNA, 23 nt, Human adenovirus F
guggucuaagggaacuucucccc

SEQ ID NO: 1585955 - RNA, 17 nt, Human adenovirus F
gcgccauagcuggaggg

SEQ ID NO: 1585956 - RNA, 21 nt, Human adenovirus F
uauaagcagguagaaugguuu

SEQ ID NO: 1585957 - RNA, 12 nt, Human adenovirus F
cggcggccauga

SEQ ID NO: 1585958 - RNA, 12 nt, Human adenovirus F
agucaaaugucu

SEQ ID NO: 1585959 - RNA, 16 nt, Human adenovirus F
gcauaacuucagcacu

SEQ ID NO: 1585960 - RNA, 14 nt, Human adenovirus F
aucaucgccgccgc

SEQ ID NO: 1585961 - RNA, 16 nt, Human adenovirus F
ccccuguaccaccgca

SEQ ID NO: 1585962 - RNA, 21 nt, Human adenovirus F
aaauuuauucccgaagacuau

SEQ ID NO: 1585963 - RNA, 15 nt, Human adenovirus F
ucuuacauuggccac

SEQ ID NO: 1585964 - RNA, 13 nt, Human adenovirus F
ugaggacgagccc

SEQ ID NO: 1585965 - RNA, 23 nt, Human adenovirus F
gcccgaccuguauacgggaagga

SEQ ID NO: 1585966 - RNA, 13 nt, Human adenovirus F
cuaaccacuacca

SEQ ID NO: 1585967 - RNA, 15 nt, Human adenovirus F
uacuaaaacaaacca

SEQ ID NO: 1585968 - RNA, 17 nt, Human adenovirus F
ggaacgcgauccggcac

SEQ ID NO: 1585969 - RNA, 22 nt, Human adenovirus F
gcccguccuccgaccccacacg

SEQ ID NO: 1585970 - RNA, 14 nt, Human adenovirus F
ugggcaaaggggga

SEQ ID NO: 1585971 - RNA, 23 nt, Human adenovirus F
cagacucgagguguaacaucccu

SEQ ID NO: 1585972 - RNA, 17 nt, Human adenovirus F
ugacacgcgcaacuucc

SEQ ID NO: 1585973 - RNA, 16 nt, Human adenovirus F
cagugguggacuuaca

SEQ ID NO: 1585974 - RNA, 20 nt, Human adenovirus F
auacuucuccauguggaacc

SEQ ID NO: 1585975 - RNA, 16 nt, Human adenovirus F
ggaagacgagcucccc

SEQ ID NO: 1585976 - RNA, 17 nt, Human adenovirus F
agacguuaaagcuggcu

SEQ ID NO: 1585977 - RNA, 20 nt, Human adenovirus F
gcccguggaaaaagacagca

SEQ ID NO: 1585978 - RNA, 15 nt, Human adenovirus F
guucuccguguccug

SEQ ID NO: 1585979 - RNA, 23 nt, Human adenovirus F
acgauaacgcuuuaucuguaaaa

SEQ ID NO: 1585980 - RNA, 15 nt, Human adenovirus F
ucggccuacugccgc

SEQ ID NO: 1585981 - RNA, 16 nt, Human adenovirus F
gcagcgggcaggagcc

SEQ ID NO: 1585982 - RNA, 13 nt, Human adenovirus F
gucagaauguggu

SEQ ID NO: 1585983 - RNA, 19 nt, Human adenovirus F
uggcacaguguuugcuucu

SEQ ID NO: 1585984 - RNA, 17 nt, Human adenovirus F
caccaacgugcaggcca

SEQ ID NO: 1585985 - RNA, 15 nt, Human adenovirus F
ccgggccagacuacu

SEQ ID NO: 1585986 - RNA, 18 nt, Human adenovirus F
gucgggcgugcgggugcc

SEQ ID NO: 1585987 - RNA, 20 nt, Human adenovirus F
gcgugcuuagacccggcacu

SEQ ID NO: 1585988 - RNA, 16 nt, Human adenovirus F
agcccauaaaagcaau

SEQ ID NO: 1585989 - RNA, 19 nt, Human adenovirus F
gccgcaccgcgcccguccu

SEQ ID NO: 1585990 - RNA, 19 nt, Human adenovirus F
accguuguggagucacugc

SEQ ID NO: 1585991 - RNA, 19 nt, Human adenovirus F
caaugggcuccagcgagca

SEQ ID NO: 1585992 - RNA, 15 nt, Human adenovirus F
agucggcaggcuucc

SEQ ID NO: 1585993 - RNA, 16 nt, Human adenovirus F
aacgucaacuccucuu

SEQ ID NO: 1585994 - RNA, 22 nt, Human adenovirus F
ucauccauaaugauggcgaugg

SEQ ID NO: 1585995 - RNA, 18 nt, Human adenovirus F
acggugaacgaggagcgc

SEQ ID NO: 1585996 - RNA, 21 nt, Human adenovirus F
gucugggguucauguugugca

SEQ ID NO: 1585997 - RNA, 17 nt, Human adenovirus F
ccacugacaguaagcaa

SEQ ID NO: 1585998 - RNA, 17 nt, Human adenovirus F
aacaucggcaccccucu

SEQ ID NO: 1585999 - RNA, 16 nt, Human adenovirus F
gcaaggaauguggggc

SEQ ID NO: 1586000 - RNA, 23 nt, Human adenovirus F
cccugaggaggaggccauccugg

SEQ ID NO: 1586001 - RNA, 12 nt, Human adenovirus F
aaucccagcaga

SEQ ID NO: 1586002 - RNA, 22 nt, Human adenovirus F
caccaacgugcaggccaaccua

SEQ ID NO: 1586003 - RNA, 22 nt, Human adenovirus F
gcuaucaggaagcagcucaggu

SEQ ID NO: 1586004 - RNA, 18 nt, Human adenovirus F
caaagcugugagcgccag

SEQ ID NO: 1586005 - RNA, 14 nt, Human adenovirus F
aggagucccugcac

SEQ ID NO: 1586006 - RNA, 18 nt, Human adenovirus F
cacauaagaagccagcca

SEQ ID NO: 1586007 - RNA, 22 nt, Human adenovirus F
agcuacuuucaucuuaacucug

SEQ ID NO: 1586008 - RNA, 20 nt, Human adenovirus F
caggcguggccuccguggcc

SEQ ID NO: 1586009 - RNA, 13 nt, Human adenovirus F
cuacaccaaugca

SEQ ID NO: 1586010 - RNA, 16 nt, Human adenovirus F
aggcucucaaaaaacg

SEQ ID NO: 1586011 - RNA, 14 nt, Human adenovirus F
ccauuauugcacuu

SEQ ID NO: 1586012 - RNA, 22 nt, Human adenovirus F
aacuccgacauguuugucuuua

SEQ ID NO: 1586013 - RNA, 19 nt, Human adenovirus F
cuuaauaccccgucacucu

SEQ ID NO: 1586014 - RNA, 15 nt, Human adenovirus F
gaccccauggacaac

SEQ ID NO: 1586015 - RNA, 17 nt, Human adenovirus F
cgccgccccuggccugu

SEQ ID NO: 1586016 - RNA, 17 nt, Human adenovirus F
aucucauucgcacggcg

SEQ ID NO: 1586017 - RNA, 19 nt, Human adenovirus F
gccuacggcaagcgcggcc

SEQ ID NO: 1586018 - RNA, 13 nt, Human adenovirus F
uccuuaaggagga

SEQ ID NO: 1586019 - RNA, 13 nt, Human adenovirus F
cgcgucugcugcu

SEQ ID NO: 1586020 - RNA, 21 nt, Human adenovirus F
gcagagcucugcaaaaacaaa

SEQ ID NO: 1586021 - RNA, 17 nt, Human adenovirus F
gccaccagccggaggag

SEQ ID NO: 1586022 - RNA, 19 nt, Human adenovirus F
gucuuacauaucgcuugcc

SEQ ID NO: 1586023 - RNA, 23 nt, Human adenovirus F
caguggaauuggaaugccugcag

SEQ ID NO: 1586024 - RNA, 14 nt, Human adenovirus F
ggaagcagcucagg

SEQ ID NO: 1586025 - RNA, 18 nt, Human adenovirus F
ggauuuugaguuagcucu

SEQ ID NO: 1586026 - RNA, 19 nt, Human adenovirus F
gcggacgggucgcagcagg

SEQ ID NO: 1586027 - RNA, 17 nt, Human adenovirus F
uacgcggggcaggagcu

SEQ ID NO: 1586028 - RNA, 14 nt, Human adenovirus F
ccacguaccagaaa

SEQ ID NO: 1586029 - RNA, 14 nt, Human adenovirus F
cauccgccuccacc

SEQ ID NO: 1586030 - RNA, 21 nt, Human adenovirus F
cugccaucgcugaccagcagc

SEQ ID NO: 1586031 - RNA, 15 nt, Human adenovirus F
acauaacuuuacaaa

SEQ ID NO: 1586032 - RNA, 18 nt, Human adenovirus F
aacucugaagaugucuga

SEQ ID NO: 1586033 - RNA, 21 nt, Human adenovirus F
agcuuacuuuaaaacuuggca

SEQ ID NO: 1586034 - RNA, 20 nt, Human adenovirus F
cggacucggaaccugaaaga

SEQ ID NO: 1586035 - RNA, 16 nt, Human adenovirus F
auccccgccgccccug

SEQ ID NO: 1586036 - RNA, 16 nt, Human adenovirus F
gaggccguagcccgug

SEQ ID NO: 1586037 - RNA, 20 nt, Human adenovirus F
ucuaagggaggcagcagagg

SEQ ID NO: 1586038 - RNA, 23 nt, Human adenovirus F
uacuucuucagcucuaagacugu

SEQ ID NO: 1586039 - RNA, 21 nt, Human adenovirus F
ggaaaaccuacgcccaggagc

SEQ ID NO: 1586040 - RNA, 14 nt, Human adenovirus F
ucgugucugcguac

SEQ ID NO: 1586041 - RNA, 13 nt, Human adenovirus F
aagaagcacagga

SEQ ID NO: 1586042 - RNA, 15 nt, Human adenovirus F
gcacagcaaacacaa

SEQ ID NO: 1586043 - RNA, 22 nt, Human adenovirus F
cuuuaacaacacaggagcuuua

SEQ ID NO: 1586044 - RNA, 17 nt, Human adenovirus F
ucaacuccucuugcagg

SEQ ID NO: 1586045 - RNA, 17 nt, Human adenovirus F
ccacaccugggaaaacc

SEQ ID NO: 1586046 - RNA, 15 nt, Human adenovirus F
cacuggcuggcccug

SEQ ID NO: 1586047 - RNA, 13 nt, Human adenovirus F
cacaaaaacucca

SEQ ID NO: 1586048 - RNA, 17 nt, Human adenovirus F
ucccaacaacggggugg

SEQ ID NO: 1586049 - RNA, 16 nt, Human adenovirus F
uacgugccuuuucaca

SEQ ID NO: 1586050 - RNA, 15 nt, Human adenovirus F
aucucccuccccccu

SEQ ID NO: 1586051 - RNA, 21 nt, Human adenovirus F
ggacagccuagacgaggagga

SEQ ID NO: 1586052 - RNA, 18 nt, Human adenovirus F
ccaccgccgcaccacuga

SEQ ID NO: 1586053 - RNA, 20 nt, Human adenovirus F
cucuuuuugaaucauuucca

SEQ ID NO: 1586054 - RNA, 20 nt, Human adenovirus F
cgagcuuuuacugggacagc

SEQ ID NO: 1586055 - RNA, 15 nt, Human adenovirus F
gagcugggacagccu

SEQ ID NO: 1586056 - RNA, 17 nt, Human adenovirus F
ccuucagcuugagagca

SEQ ID NO: 1586057 - RNA, 18 nt, Human adenovirus F
uaauaacuuucuuacacu

SEQ ID NO: 1586058 - RNA, 15 nt, Human adenovirus F
acuuccagcuguugg

SEQ ID NO: 1586059 - RNA, 18 nt, Human adenovirus F
gcaaccccacgccaagcc

SEQ ID NO: 1586060 - RNA, 20 nt, Human adenovirus F
accuucaaacccagccgcac

SEQ ID NO: 1586061 - RNA, 16 nt, Human adenovirus F
guggcucugcagcagc

SEQ ID NO: 1586062 - RNA, 19 nt, Human adenovirus F
ggcaggaaagccacgcucg

SEQ ID NO: 1586063 - RNA, 18 nt, Human adenovirus F
cucugucuuauccuccuu

SEQ ID NO: 1586064 - RNA, 15 nt, Human adenovirus F
aaguccacaaaaacu

SEQ ID NO: 1586065 - RNA, 17 nt, Human adenovirus F
gaaaucggagagggaag

SEQ ID NO: 1586066 - RNA, 16 nt, Human adenovirus F
cgccgcucaaggcgca

SEQ ID NO: 1586067 - RNA, 22 nt, Human adenovirus F
cgcagcugcuuguaucacagaa

SEQ ID NO: 1586068 - RNA, 18 nt, Human adenovirus F
caguggacaaaccaaaac

SEQ ID NO: 1586069 - RNA, 20 nt, Human adenovirus F
uccaaaggucagaaaaaccg

SEQ ID NO: 1586070 - RNA, 17 nt, Human adenovirus F
ugcgagaugcgucgggc

SEQ ID NO: 1586071 - RNA, 16 nt, Human adenovirus F
uugcucucuccggagc

SEQ ID NO: 1586072 - RNA, 23 nt, Human adenovirus F
cacuuuacuuaaacccacagcua

SEQ ID NO: 1586073 - RNA, 17 nt, Human adenovirus F
uuccagcagcaccaccu

SEQ ID NO: 1586074 - RNA, 18 nt, Human adenovirus F
gaaccaggcaguggacag

SEQ ID NO: 1586075 - RNA, 15 nt, Human adenovirus F
gcaguguuauaaggu

SEQ ID NO: 1586076 - RNA, 20 nt, Human adenovirus F
ccucuguuugcugcacugcc

SEQ ID NO: 1586077 - RNA, 17 nt, Human adenovirus F
cgugaccgagcagcugc

SEQ ID NO: 1586078 - RNA, 18 nt, Human adenovirus F
ugagcaggccgcccaaca

SEQ ID NO: 1586079 - RNA, 18 nt, Human adenovirus F
cccugucguugccagccg

SEQ ID NO: 1586080 - RNA, 15 nt, Human adenovirus F
gccuccaacacagcc

SEQ ID NO: 1586081 - RNA, 19 nt, Human adenovirus F
cauuaagguuacucagcaa

SEQ ID NO: 1586082 - RNA, 22 nt, Human adenovirus F
acuuuugccacacuaaaguuuu

SEQ ID NO: 1586083 - RNA, 20 nt, Human adenovirus F
gucuuccuucacuccucgcc

SEQ ID NO: 1586084 - RNA, 15 nt, Human adenovirus F
uaaugcccacaccug

SEQ ID NO: 1586085 - RNA, 17 nt, Human adenovirus F
acaguuucgcgcaccuc

SEQ ID NO: 1586086 - RNA, 12 nt, Human adenovirus F
agcuggccuggu

SEQ ID NO: 1586087 - RNA, 23 nt, Human adenovirus F
acccuucaacggaauuguaacug

SEQ ID NO: 1586088 - RNA, 18 nt, Human adenovirus F
cuccaaaggucagaaaaa

SEQ ID NO: 1586089 - RNA, 16 nt, Human adenovirus F
cacaauauuuauacac

SEQ ID NO: 1586090 - RNA, 19 nt, Human adenovirus F
auacagucaagcucuccac

SEQ ID NO: 1586091 - RNA, 22 nt, Human adenovirus F
aagacuaucacgcccaccaaau

SEQ ID NO: 1586092 - RNA, 19 nt, Human adenovirus F
aagccuucaggcagcagcc

SEQ ID NO: 1586093 - RNA, 14 nt, Human adenovirus F
gaacauuaauccaa

SEQ ID NO: 1586094 - RNA, 15 nt, Human adenovirus F
agaauacuaaaacaa

SEQ ID NO: 1586095 - RNA, 16 nt, Human adenovirus F
aagccuucaggcagca

SEQ ID NO: 1586096 - RNA, 19 nt, Human adenovirus F
uucugacaugcugguuuuc

SEQ ID NO: 1586097 - RNA, 14 nt, Human adenovirus F
ugcugcacugccau

SEQ ID NO: 1586098 - RNA, 21 nt, Human adenovirus F
gagcucaggguguuuuggguc

SEQ ID NO: 1586099 - RNA, 14 nt, Human adenovirus F
cuugcuggaccaaa

SEQ ID NO: 1586100 - RNA, 24 nt, Human adenovirus F
aaaacaaaccacgcccaugcagcc

SEQ ID NO: 1586101 - RNA, 17 nt, Human adenovirus F
aggaucccucagagcug

SEQ ID NO: 1586102 - RNA, 23 nt, Human adenovirus F
uucacccacccaccgcuguauuu

SEQ ID NO: 1586103 - RNA, 20 nt, Human adenovirus F
acacaauugguuggaaaagu

SEQ ID NO: 1586104 - RNA, 20 nt, Human adenovirus F
ggcugaugcauuugugggac

SEQ ID NO: 1586105 - RNA, 13 nt, Human adenovirus F
ugcgggcucugau

SEQ ID NO: 1586106 - RNA, 13 nt, Human adenovirus F
uggacauggccag

SEQ ID NO: 1586107 - RNA, 12 nt, Human adenovirus F
ggacgggcagcc

SEQ ID NO: 1586108 - RNA, 22 nt, Human adenovirus F
cugaacccgguguacaccaccu

SEQ ID NO: 1586109 - RNA, 19 nt, Human adenovirus F
gggggcccugaccgaccug

SEQ ID NO: 1586110 - RNA, 20 nt, Human adenovirus F
agucaaaugucuguaaagaa

SEQ ID NO: 1586111 - RNA, 21 nt, Human adenovirus F
aaaggaggucaagccaagcug

SEQ ID NO: 1586112 - RNA, 19 nt, Human adenovirus F
cagcuuauucgccagucca

SEQ ID NO: 1586113 - RNA, 17 nt, Human adenovirus F
gacgaagacauucuuga

SEQ ID NO: 1586114 - RNA, 17 nt, Human adenovirus F
gugaccgagcagcugcg

SEQ ID NO: 1586115 - RNA, 16 nt, Human adenovirus F
uggaaaacgaggggga

SEQ ID NO: 1586116 - RNA, 13 nt, Human adenovirus F
cgcaugccuccag

SEQ ID NO: 1586117 - RNA, 16 nt, Human adenovirus F
acuuaaacccacagcu

SEQ ID NO: 1586118 - RNA, 23 nt, Human adenovirus F
gcuaccguucuaugcuccugggu

SEQ ID NO: 1586119 - RNA, 19 nt, Human adenovirus F
agaaauuuagauuuuucuu

SEQ ID NO: 1586120 - RNA, 22 nt, Human adenovirus F
ccauuaaaaaucuccugcuccu

SEQ ID NO: 1586121 - RNA, 17 nt, Human adenovirus F
gaagcaggguugcuaga

SEQ ID NO: 1586122 - RNA, 15 nt, Human adenovirus F
uauaaaaacaaccaa

SEQ ID NO: 1586123 - RNA, 16 nt, Human adenovirus F
acgacggggauacugc

SEQ ID NO: 1586124 - RNA, 21 nt, Human adenovirus F
uuguuguuuuuuguagaugca

SEQ ID NO: 1586125 - RNA, 14 nt, Human adenovirus F
cgcagcgacugacg

SEQ ID NO: 1586126 - RNA, 15 nt, Human adenovirus F
cugacuuccuggucc

SEQ ID NO: 1586127 - RNA, 23 nt, Human adenovirus F
cccacgccuuacauguggagcua

SEQ ID NO: 1586128 - RNA, 13 nt, Human adenovirus F
gaaucuccugcac

SEQ ID NO: 1586129 - RNA, 19 nt, Human adenovirus F
ccaccuuggaagcaaugcu

SEQ ID NO: 1586130 - RNA, 21 nt, Human adenovirus F
ccaacgggcggcaaacuuucu

SEQ ID NO: 1586131 - RNA, 17 nt, Human adenovirus F
acaaaauggguuacuuu

SEQ ID NO: 1586132 - RNA, 18 nt, Human adenovirus F
cggcggccauggaucgca

SEQ ID NO: 1586133 - RNA, 13 nt, Human adenovirus F
agacaaaacacua

SEQ ID NO: 1586134 - RNA, 20 nt, Human adenovirus F
aaaugcucugcaaaaaaacg

SEQ ID NO: 1586135 - RNA, 13 nt, Human adenovirus F
caggaucccucag

SEQ ID NO: 1586136 - RNA, 22 nt, Human adenovirus F
ggccuacggaagggcggaacag

SEQ ID NO: 1586137 - RNA, 17 nt, Human adenovirus F
gcacaagugccgagcuu

SEQ ID NO: 1586138 - RNA, 23 nt, Human adenovirus F
ggccgcgaccggaucuggaggaa

SEQ ID NO: 1586139 - RNA, 18 nt, Human adenovirus F
cccugccgcugcgcagca

SEQ ID NO: 1586140 - RNA, 13 nt, Human adenovirus F
cucccacccacga

SEQ ID NO: 1586141 - RNA, 14 nt, Human adenovirus F
cucuuggacuagua

SEQ ID NO: 1586142 - RNA, 21 nt, Human adenovirus F
ggaucgcagcgggcaggagcc

SEQ ID NO: 1586143 - RNA, 16 nt, Human adenovirus F
gcaggccgcucccaau

SEQ ID NO: 1586144 - RNA, 22 nt, Human adenovirus F
augccuaccucugacaaacacg

SEQ ID NO: 1586145 - RNA, 16 nt, Human adenovirus F
uggauguuuuccaaga

SEQ ID NO: 1586146 - RNA, 13 nt, Human adenovirus F
uccaccagccgca

SEQ ID NO: 1586147 - RNA, 17 nt, Human adenovirus F
gugguacaggagcgcag

SEQ ID NO: 1586148 - RNA, 20 nt, Human adenovirus F
ggcuugugcggcuuuucgca

SEQ ID NO: 1586149 - RNA, 16 nt, Human adenovirus F
gucaaaaaagaugcga

SEQ ID NO: 1586150 - RNA, 14 nt, Human adenovirus F
cccuggccuggaac

SEQ ID NO: 1586151 - RNA, 16 nt, Human adenovirus F
gcaccagccagcucaa

SEQ ID NO: 1586152 - RNA, 15 nt, Human adenovirus F
cuacaaaagcagugg

SEQ ID NO: 1586153 - RNA, 15 nt, Human adenovirus F
cuccaacacagccgc

SEQ ID NO: 1586154 - RNA, 21 nt, Human adenovirus F
cagcaacuacccuguaguggg

SEQ ID NO: 1586155 - RNA, 12 nt, Human adenovirus F
ucgucacuuccg

SEQ ID NO: 1586156 - RNA, 18 nt, Human adenovirus F
cuggauacuggcaagagc

SEQ ID NO: 1586157 - RNA, 23 nt, Human adenovirus F
gcauaaaguugcgggugauuuug

SEQ ID NO: 1586158 - RNA, 22 nt, Human adenovirus F
cccucuccgugcaaaacaauuc

SEQ ID NO: 1586159 - RNA, 21 nt, Human adenovirus F
cccucgcccuauuccuccggc

SEQ ID NO: 1586160 - RNA, 17 nt, Human adenovirus F
aaucaggaacuguucaa

SEQ ID NO: 1586161 - RNA, 16 nt, Human adenovirus F
ccaccaagcuccucau

SEQ ID NO: 1586162 - RNA, 20 nt, Human adenovirus F
cgucagaauguggugggguc

SEQ ID NO: 1586163 - RNA, 21 nt, Human adenovirus F
gggauaagcuaaaggaccaaa

SEQ ID NO: 1586164 - RNA, 23 nt, Human adenovirus F
aucacuccguucgcucacccgca

SEQ ID NO: 1586165 - RNA, 13 nt, Human adenovirus F
guagcuuggaagc

SEQ ID NO: 1586166 - RNA, 20 nt, Human adenovirus F
uucgcagaaacaugccaccc

SEQ ID NO: 1586167 - RNA, 11 nt, Human adenovirus F
ggagucacugc

SEQ ID NO: 1586168 - RNA, 21 nt, Human adenovirus F
aaaaguccacaaaaacuccaa

SEQ ID NO: 1586169 - RNA, 14 nt, Human adenovirus F
gcaacguucagcca

SEQ ID NO: 1586170 - RNA, 16 nt, Human adenovirus F
ucccagcagaaacuac

SEQ ID NO: 1586171 - RNA, 18 nt, Human adenovirus F
gauacuuaaaaucagagu

SEQ ID NO: 1586172 - RNA, 14 nt, Human adenovirus F
ugcuuagacccggc

SEQ ID NO: 1586173 - RNA, 18 nt, Human adenovirus F
uuucuuaccucguguuuc

SEQ ID NO: 1586174 - RNA, 20 nt, Human adenovirus F
uuuacugcuaaagggaacug

SEQ ID NO: 1586175 - RNA, 17 nt, Human adenovirus F
aagcuacaaggacagga

SEQ ID NO: 1586176 - RNA, 13 nt, Human adenovirus F
ggcuucugccaga

SEQ ID NO: 1586177 - RNA, 18 nt, Human adenovirus F
ccugagcccgggccuggu

SEQ ID NO: 1586178 - RNA, 17 nt, Human adenovirus F
uuaggccaucggccaug

SEQ ID NO: 1586179 - RNA, 18 nt, Human adenovirus F
gccgcugacggcgcagcu

SEQ ID NO: 1586180 - RNA, 22 nt, Human adenovirus F
caaacauuaaacgucaaugcca

SEQ ID NO: 1586181 - RNA, 21 nt, Human adenovirus F
cuaguuuuaguaaaaugcaac

SEQ ID NO: 1586182 - RNA, 13 nt, Human adenovirus F
gcagcgggcagga

SEQ ID NO: 1586183 - RNA, 18 nt, Human adenovirus F
gaguguggagcuaaucau

SEQ ID NO: 1586184 - RNA, 14 nt, Human adenovirus F
aggagcugucucag

SEQ ID NO: 1586185 - RNA, 19 nt, Human adenovirus F
cuucaagcccuacaccaau

SEQ ID NO: 1586186 - RNA, 21 nt, Human adenovirus F
agcaguuuugguuacagugga

SEQ ID NO: 1586187 - RNA, 17 nt, Human adenovirus F
agccagccaaugggcuc

SEQ ID NO: 1586188 - RNA, 21 nt, Human adenovirus F
cacugcauacaacucccuggc

SEQ ID NO: 1586189 - RNA, 15 nt, Human adenovirus F
ucccagcagaaacua

SEQ ID NO: 1586190 - RNA, 14 nt, Human adenovirus F
cugucugugucucc

SEQ ID NO: 1586191 - RNA, 16 nt, Human adenovirus F
ccacuuaccagagcca

SEQ ID NO: 1586192 - RNA, 20 nt, Human adenovirus F
uggaagagcaaaaccuccag

SEQ ID NO: 1586193 - RNA, 16 nt, Human adenovirus F
auuuuccaugcacuca

SEQ ID NO: 1586194 - RNA, 17 nt, Human adenovirus F
acuggcuggcccuggcc

SEQ ID NO: 1586195 - RNA, 23 nt, Human adenovirus F
agaacuuccagcuguuggagaau

SEQ ID NO: 1586196 - RNA, 16 nt, Human adenovirus F
gaacugggcugcggac

SEQ ID NO: 1586197 - RNA, 11 nt, Human adenovirus F
cuagcugcuuu

SEQ ID NO: 1586198 - RNA, 18 nt, Human adenovirus F
cccugaggaggaggccau

SEQ ID NO: 1586199 - RNA, 18 nt, Human adenovirus F
gaggccuuucacccagac

SEQ ID NO: 1586200 - RNA, 14 nt, Human adenovirus F
cuuacaaacaguaa

SEQ ID NO: 1586201 - RNA, 16 nt, Human adenovirus F
aucugcaaaaaagccg

SEQ ID NO: 1586202 - RNA, 19 nt, Human adenovirus F
gauacuggcaagagccacc

SEQ ID NO: 1586203 - RNA, 20 nt, Human adenovirus F
cuguaguauuuacucccgga

SEQ ID NO: 1586204 - RNA, 23 nt, Human adenovirus F
ggggcgcuuucaguuggagcagc

SEQ ID NO: 1586205 - RNA, 22 nt, Human adenovirus F
ccauucuuauuucgcccgacaa

SEQ ID NO: 1586206 - RNA, 21 nt, Human adenovirus F
ccgagugacacgucaccgcca

SEQ ID NO: 1586207 - RNA, 19 nt, Human adenovirus F
agguucguugucgccccug

SEQ ID NO: 1586208 - RNA, 19 nt, Human adenovirus F
caccacauaagaagccagc

SEQ ID NO: 1586209 - RNA, 21 nt, Human adenovirus F
gugaccugugggucgcagcag

SEQ ID NO: 1586210 - RNA, 17 nt, Human adenovirus F
ucuucgcccugaaaguc

SEQ ID NO: 1586211 - RNA, 13 nt, Human adenovirus F
gcgggcaggagcc

SEQ ID NO: 1586212 - RNA, 15 nt, Human adenovirus F
caucuaucuuuuccu

SEQ ID NO: 1586213 - RNA, 14 nt, Human adenovirus F
caauggcagcccag

SEQ ID NO: 1586214 - RNA, 20 nt, Human adenovirus F
agcuccucagcccguggaga

SEQ ID NO: 1586215 - RNA, 14 nt, Human adenovirus F
uccuucugccacgc

SEQ ID NO: 1586216 - RNA, 21 nt, Human adenovirus F
gccgccccuggccuguuuuug

SEQ ID NO: 1586217 - RNA, 17 nt, Human adenovirus F
aggagcagcgggaagag

SEQ ID NO: 1586218 - RNA, 22 nt, Human adenovirus F
gaucaggccuccaauuugacaa

SEQ ID NO: 1586219 - RNA, 21 nt, Human adenovirus F
aaggaggaggcuaauggccag

SEQ ID NO: 1586220 - RNA, 13 nt, Human adenovirus F
ccuuacaaacagu

SEQ ID NO: 1586221 - RNA, 16 nt, Human adenovirus F
aguuuaaaaacgguga

SEQ ID NO: 1586222 - RNA, 13 nt, Human adenovirus F
cacacuccgcaga

SEQ ID NO: 1586223 - RNA, 12 nt, Human adenovirus F
ccgcgcgggcag

SEQ ID NO: 1586224 - RNA, 17 nt, Human adenovirus F
uugauauuuaucugccc

SEQ ID NO: 1586225 - RNA, 22 nt, Human adenovirus F
gcucugaacacuuuugccaaag

SEQ ID NO: 1586226 - RNA, 15 nt, Human adenovirus F
ugcaaagcucccaaa

SEQ ID NO: 1586227 - RNA, 12 nt, Human adenovirus F
guuuccacaaac

SEQ ID NO: 1586228 - RNA, 21 nt, Human adenovirus F
cccaggagcagcgggaagaga

SEQ ID NO: 1586229 - RNA, 17 nt, Human adenovirus F
gaguaacuuuugccaca

SEQ ID NO: 1586230 - RNA, 17 nt, Human adenovirus F
gacggcuuuggcuguac

SEQ ID NO: 1586231 - RNA, 15 nt, Human adenovirus F
gagcagccuguggag

SEQ ID NO: 1586232 - RNA, 12 nt, Human adenovirus F
ccucuacugcuc

SEQ ID NO: 1586233 - RNA, 13 nt, Human adenovirus F
acggaggaagagg

SEQ ID NO: 1586234 - RNA, 15 nt, Human adenovirus F
ggcggaugguggcaa

SEQ ID NO: 1586235 - RNA, 15 nt, Human adenovirus F
cacuaccacccuccu

SEQ ID NO: 1586236 - RNA, 15 nt, Human adenovirus F
ugauguaacagcuuu

SEQ ID NO: 1586237 - RNA, 15 nt, Human adenovirus F
caggcagcagggugc

SEQ ID NO: 1586238 - RNA, 13 nt, Human adenovirus F
uccacaaaaacuc

SEQ ID NO: 1586239 - RNA, 15 nt, Human adenovirus F
ccuaugugcugggga

SEQ ID NO: 1586240 - RNA, 16 nt, Human adenovirus F
cggaguaccugagccc

SEQ ID NO: 1586241 - RNA, 13 nt, Human adenovirus F
gcuguagaauuua

SEQ ID NO: 1586242 - RNA, 16 nt, Human adenovirus F
caugcgcuccaacacu

SEQ ID NO: 1586243 - RNA, 17 nt, Human adenovirus F
cccacuguugccguggc

SEQ ID NO: 1586244 - RNA, 18 nt, Human adenovirus F
gggcucauugguccagca

SEQ ID NO: 1586245 - RNA, 22 nt, Human adenovirus F
gcacgcucuugcugugggugga

SEQ ID NO: 1586246 - RNA, 14 nt, Human adenovirus F
uuuuuaugaaacac

SEQ ID NO: 1586247 - RNA, 21 nt, Human adenovirus F
cacuaaccaggcgagcucagg

SEQ ID NO: 1586248 - RNA, 20 nt, Human adenovirus F
accucuucuucuuccuccuc

SEQ ID NO: 1586249 - RNA, 16 nt, Human adenovirus F
accuacgcccaggagc

SEQ ID NO: 1586250 - RNA, 15 nt, Human adenovirus F
gaccggcgcugggac

SEQ ID NO: 1586251 - RNA, 16 nt, Human adenovirus F
cuauuuaaagugguga

SEQ ID NO: 1586252 - RNA, 15 nt, Human adenovirus F
gccggacgggcagcc

SEQ ID NO: 1586253 - RNA, 14 nt, Human adenovirus F
ccccagcgcccugg

SEQ ID NO: 1586254 - RNA, 22 nt, Human adenovirus F
agcgcgcuauaauagcaccaac

SEQ ID NO: 1586255 - RNA, 18 nt, Human adenovirus F
guacucaaacgcaccauu

SEQ ID NO: 1586256 - RNA, 15 nt, Human adenovirus F
gcggggcaggagcug

SEQ ID NO: 1586257 - RNA, 19 nt, Human adenovirus F
cuucuuaauaaagacacaa

SEQ ID NO: 1586258 - RNA, 20 nt, Human adenovirus F
cgcaucaccacuugugcaau

SEQ ID NO: 1586259 - RNA, 13 nt, Human adenovirus F
ggacuuggcagaa

SEQ ID NO: 1586260 - RNA, 14 nt, Human adenovirus F
uaucacgcccacca

SEQ ID NO: 1586261 - RNA, 23 nt, Human adenovirus F
aguggggguggaauuacugccag

SEQ ID NO: 1586262 - RNA, 21 nt, Human adenovirus F
uuuaauugaaauuaauugcac

SEQ ID NO: 1586263 - RNA, 12 nt, Human adenovirus F
aacuccuuugga

SEQ ID NO: 1586264 - RNA, 13 nt, Human adenovirus F
cacugcgguggag

SEQ ID NO: 1586265 - RNA, 19 nt, Human adenovirus F
gcccgggccuggugcaguu

SEQ ID NO: 1586266 - RNA, 17 nt, Human adenovirus F
ugaucccgaagagggua

SEQ ID NO: 1586267 - RNA, 13 nt, Human adenovirus F
gaaaaagacagca

SEQ ID NO: 1586268 - RNA, 16 nt, Human adenovirus F
ccgcgacugcaucuau

SEQ ID NO: 1586269 - RNA, 12 nt, Human adenovirus F
caacucugaggu

SEQ ID NO: 1586270 - RNA, 16 nt, Human adenovirus F
ucgccccugugagugu

SEQ ID NO: 1586271 - RNA, 16 nt, Human adenovirus F
gcuggcgggcaaagcu

SEQ ID NO: 1586272 - RNA, 16 nt, Human adenovirus F
aagauuccaccaaagg

SEQ ID NO: 1586273 - RNA, 15 nt, Human adenovirus F
gcauauaagcucugu

SEQ ID NO: 1586274 - RNA, 16 nt, Human adenovirus F
cgcggacgucaagccc

SEQ ID NO: 1586275 - RNA, 17 nt, Human adenovirus F
cauucuuaacccgcacu

SEQ ID NO: 1586276 - RNA, 16 nt, Human adenovirus F
cgguugugcaguguua

SEQ ID NO: 1586277 - RNA, 14 nt, Human adenovirus F
ugcacacagacucc

SEQ ID NO: 1586278 - RNA, 17 nt, Human adenovirus F
accaccugcccuuccuc

SEQ ID NO: 1586279 - RNA, 15 nt, Human adenovirus F
cugcuagaaugucac

SEQ ID NO: 1586280 - RNA, 16 nt, Human adenovirus F
ucagccacuccugcag

SEQ ID NO: 1586281 - RNA, 16 nt, Human adenovirus F
caccuacucuggcucc

SEQ ID NO: 1586282 - RNA, 12 nt, Human adenovirus F
caaagccaaccu

SEQ ID NO: 1586283 - RNA, 13 nt, Human adenovirus F
gugcuuggaagag

SEQ ID NO: 1586284 - RNA, 18 nt, Human adenovirus F
ggccgcuacgugccuuuu

SEQ ID NO: 1586285 - RNA, 21 nt, Human adenovirus F
gauuuugaguuagcucugaac

SEQ ID NO: 1586286 - RNA, 22 nt, Human adenovirus F
guggcacagcaaacacaaacac

SEQ ID NO: 1586287 - RNA, 13 nt, Human adenovirus F
ggcccuagaccac

SEQ ID NO: 1586288 - RNA, 17 nt, Human adenovirus F
auugugguacaggagcg

SEQ ID NO: 1586289 - RNA, 22 nt, Human adenovirus F
ucuacaacgagauaaacagugg

SEQ ID NO: 1586290 - RNA, 20 nt, Human adenovirus F
guucacugaaagccagccgu

SEQ ID NO: 1586291 - RNA, 11 nt, Human adenovirus F
augcccacacc

SEQ ID NO: 1586292 - RNA, 21 nt, Human adenovirus F
gcccaggagcagcgggaagag

SEQ ID NO: 1586293 - RNA, 15 nt, Human adenovirus F
acucuuacaaaauaa

SEQ ID NO: 1586294 - RNA, 17 nt, Human adenovirus F
cuggccuuuugaacgac

SEQ ID NO: 1586295 - RNA, 18 nt, Human adenovirus F
aacccugaggaggaggcc

SEQ ID NO: 1586296 - RNA, 19 nt, Human adenovirus F
cuuggaaaucgugcccgug

SEQ ID NO: 1586297 - RNA, 17 nt, Human adenovirus F
ccuguacuugccugacu

SEQ ID NO: 1586298 - RNA, 17 nt, Human adenovirus F
agggcgucaugcucugg

SEQ ID NO: 1586299 - RNA, 19 nt, Human adenovirus F
ccacgucgccaacaguguu

SEQ ID NO: 1586300 - RNA, 20 nt, Human adenovirus F
gucguggcauguuuucucca

SEQ ID NO: 1586301 - RNA, 19 nt, Human adenovirus F
cuucgcccggacacuauuu

SEQ ID NO: 1586302 - RNA, 20 nt, Human adenovirus F
cauauacuuuaaacaagcaa

SEQ ID NO: 1586303 - RNA, 15 nt, Human adenovirus F
aaacuugauuuccau

SEQ ID NO: 1586304 - RNA, 21 nt, Human adenovirus F
guuaauaagcuggguggaaag

SEQ ID NO: 1586305 - RNA, 23 nt, Human adenovirus F
cuauuugggaggggaggacgacg

SEQ ID NO: 1586306 - RNA, 14 nt, Human adenovirus F
ggucguaaugagga

SEQ ID NO: 1586307 - RNA, 18 nt, Human adenovirus F
ucggaaccugaaagagag

SEQ ID NO: 1586308 - RNA, 15 nt, Human adenovirus F
guccccgucagcaug

SEQ ID NO: 1586309 - RNA, 15 nt, Human adenovirus F
gcgcugcuacucaac

SEQ ID NO: 1586310 - RNA, 20 nt, Human adenovirus F
cgaaaaaugaugauggcagc

SEQ ID NO: 1586311 - RNA, 21 nt, Human adenovirus F
aacacaauauuuauacacucc

SEQ ID NO: 1586312 - RNA, 21 nt, Human adenovirus F
ucagugaaaacguucccgccc

SEQ ID NO: 1586313 - RNA, 15 nt, Human adenovirus F
cugucaggcucugag

SEQ ID NO: 1586314 - RNA, 20 nt, Human adenovirus F
gauucuaagggaggcagcag

SEQ ID NO: 1586315 - RNA, 13 nt, Human adenovirus F
uguuuaagccaga

SEQ ID NO: 1586316 - RNA, 17 nt, Human adenovirus F
acaguccuucugccacg

SEQ ID NO: 1586317 - RNA, 17 nt, Human adenovirus F
cacauaucgucacuucc

SEQ ID NO: 1586318 - RNA, 17 nt, Human adenovirus F
ccaucaucgccgccgcc

SEQ ID NO: 1586319 - RNA, 14 nt, Human adenovirus F
guggagaaccuugc

SEQ ID NO: 1586320 - RNA, 21 nt, Human adenovirus F
gcccgcugagcguucucgcuc

SEQ ID NO: 1586321 - RNA, 15 nt, Human adenovirus F
acauuucgugggaag

SEQ ID NO: 1586322 - RNA, 18 nt, Human adenovirus F
ucccaaagucccccuuac

SEQ ID NO: 1586323 - RNA, 13 nt, Human adenovirus F
caggaaggccucg

SEQ ID NO: 1586324 - RNA, 15 nt, Human adenovirus F
ucacugaaagccagc

SEQ ID NO: 1586325 - RNA, 13 nt, Human adenovirus F
acaaaaacuuaca

SEQ ID NO: 1586326 - RNA, 18 nt, Human adenovirus F
agaauuuaugccuagcuc

SEQ ID NO: 1586327 - RNA, 18 nt, Human adenovirus F
cuccucguuaagccacgu

SEQ ID NO: 1586328 - RNA, 18 nt, Human adenovirus F
uguuguagucugccaacg

SEQ ID NO: 1586329 - RNA, 15 nt, Human adenovirus F
cuuugccgucaaaag

SEQ ID NO: 1586330 - RNA, 20 nt, Human adenovirus F
cggccuuguaugggcagcau

SEQ ID NO: 1586331 - RNA, 13 nt, Human adenovirus F
augggcaccugga

SEQ ID NO: 1586332 - RNA, 16 nt, Human adenovirus F
uugugggucugggagu

SEQ ID NO: 1586333 - RNA, 13 nt, Human adenovirus F
ucaggaacuguuc

SEQ ID NO: 1586334 - RNA, 15 nt, Human adenovirus F
ccacaaucuucaucu

SEQ ID NO: 1586335 - RNA, 20 nt, Human adenovirus F
uauaaguauuacaaaugccu

SEQ ID NO: 1586336 - RNA, 15 nt, Human adenovirus F
ugaugauggcagcag

SEQ ID NO: 1586337 - RNA, 18 nt, Human adenovirus F
gcgguaagaacccagcau

SEQ ID NO: 1586338 - RNA, 19 nt, Human adenovirus F
gacugggcggcggccaugg

SEQ ID NO: 1586339 - RNA, 17 nt, Human adenovirus F
uggacgacagccagcug

SEQ ID NO: 1586340 - RNA, 14 nt, Human adenovirus F
auuuuaaaaugguu

SEQ ID NO: 1586341 - RNA, 17 nt, Human adenovirus F
ucugcuuaacccucccg

SEQ ID NO: 1586342 - RNA, 23 nt, Human adenovirus F
gccgcggacgucaagcccgacau

SEQ ID NO: 1586343 - RNA, 17 nt, Human adenovirus F
cuaugaggacgagcccu

SEQ ID NO: 1586344 - RNA, 16 nt, Human adenovirus F
acuucuccauguggaa

SEQ ID NO: 1586345 - RNA, 21 nt, Human adenovirus F
gggaaaucagaugcauuuugg

SEQ ID NO: 1586346 - RNA, 21 nt, Human adenovirus F
cagccugagcugccagaggcc

SEQ ID NO: 1586347 - RNA, 22 nt, Human adenovirus F
cauuguguccugcaacaaaaaa

SEQ ID NO: 1586348 - RNA, 20 nt, Human adenovirus F
aggaagaaaccaucgccagc

SEQ ID NO: 1586349 - RNA, 19 nt, Human adenovirus F
uggaaacugucaggcucug

SEQ ID NO: 1586350 - RNA, 18 nt, Human adenovirus F
cccugaccgaccuggggc

SEQ ID NO: 1586351 - RNA, 18 nt, Human adenovirus F
agccuguguuaucaccca

SEQ ID NO: 1586352 - RNA, 15 nt, Human adenovirus F
gaacacaauauuuau

SEQ ID NO: 1586353 - RNA, 21 nt, Human adenovirus F
ccgagcggcugcuucugccag

SEQ ID NO: 1586354 - RNA, 18 nt, Human adenovirus F
ugaccuuagaacuaccuc

SEQ ID NO: 1586355 - RNA, 12 nt, Human adenovirus F
aaacacugcgca

SEQ ID NO: 1586356 - RNA, 21 nt, Human adenovirus F
cuggaacgagaucggcaccag

SEQ ID NO: 1586357 - RNA, 15 nt, Human adenovirus F
cgcagcgggaacgcu

SEQ ID NO: 1586358 - RNA, 22 nt, Human adenovirus F
cggaacaaccuucaaacccagc

SEQ ID NO: 1586359 - RNA, 15 nt, Human adenovirus F
cuucuaucugcaaaa

SEQ ID NO: 1586360 - RNA, 21 nt, Human adenovirus F
cuggccgacaagguggcggcc

SEQ ID NO: 1586361 - RNA, 19 nt, Human adenovirus F
gacgugugugugagggcaa

SEQ ID NO: 1586362 - RNA, 14 nt, Human adenovirus F
cgcagcgggcagga

SEQ ID NO: 1586363 - RNA, 13 nt, Human adenovirus F
cgcgcgggcagga

SEQ ID NO: 1586364 - RNA, 22 nt, Human adenovirus F
agcugugagcgccagccgccgu

SEQ ID NO: 1586365 - RNA, 17 nt, Human adenovirus F
cgaaaaccggcuggggc

SEQ ID NO: 1586366 - RNA, 17 nt, Human adenovirus F
uguaccaguccgggcca

SEQ ID NO: 1586367 - RNA, 15 nt, Human adenovirus F
ucgccuaacaucacc

SEQ ID NO: 1586368 - RNA, 14 nt, Human adenovirus F
uccucccaacuuuc

SEQ ID NO: 1586369 - RNA, 14 nt, Human adenovirus F
aaacccagccgcac

SEQ ID NO: 1586370 - RNA, 22 nt, Human adenovirus F
cggcuggaaaauagccgccagc

SEQ ID NO: 1586371 - RNA, 17 nt, Human adenovirus F
caagcgguccauugccu

SEQ ID NO: 1586372 - RNA, 23 nt, Human adenovirus F
aucuugcaaaacuuucgcuccuu

SEQ ID NO: 1586373 - RNA, 18 nt, Human adenovirus F
gaaaaguacgaagcuagc

SEQ ID NO: 1586374 - RNA, 14 nt, Human adenovirus F
ggcaccagccagcu

SEQ ID NO: 1586375 - RNA, 13 nt, Human adenovirus F
gcaaccagugggc

SEQ ID NO: 1586376 - RNA, 23 nt, Human adenovirus F
ccaggugguagacacuaccaccu

SEQ ID NO: 1586377 - RNA, 13 nt, Human adenovirus F
uaccugcuaccuc

SEQ ID NO: 1586378 - RNA, 17 nt, Human adenovirus F
ccaaaacaaaacaaacu

SEQ ID NO: 1586379 - RNA, 20 nt, Human adenovirus F
cguucucuccccacagccgu

SEQ ID NO: 1586380 - RNA, 19 nt, Human adenovirus F
gaggguacuagcagugggc

SEQ ID NO: 1586381 - RNA, 17 nt, Human adenovirus F
agccacuccugcagucc

SEQ ID NO: 1586382 - RNA, 19 nt, Human adenovirus F
ggaaaccaagggcucugcc

SEQ ID NO: 1586383 - RNA, 14 nt, Human adenovirus F
cacaggucaaaugc

SEQ ID NO: 1586384 - RNA, 23 nt, Human adenovirus F
agugaugguggggaguucuugcu

SEQ ID NO: 1586385 - RNA, 15 nt, Human adenovirus F
uacaccaacgaggcc

SEQ ID NO: 1586386 - RNA, 16 nt, Human adenovirus F
cguggcucaauguaac

SEQ ID NO: 1586387 - RNA, 11 nt, Human adenovirus F
cguagcagggu

SEQ ID NO: 1586388 - RNA, 14 nt, Human adenovirus F
uaacuaaaaacgga

SEQ ID NO: 1586389 - RNA, 18 nt, Human adenovirus F
gcuuccaccuuggaagca

SEQ ID NO: 1586390 - RNA, 22 nt, Human adenovirus F
caucaauuuugcgucgcuggcu

SEQ ID NO: 1586391 - RNA, 15 nt, Human adenovirus F
ugcucggugcagccg

SEQ ID NO: 1586392 - RNA, 15 nt, Human adenovirus F
cccagcugguaagca

SEQ ID NO: 1586393 - RNA, 17 nt, Human adenovirus F
auccaaucguagcaggg

SEQ ID NO: 1586394 - RNA, 24 nt, Human adenovirus F
gugccguucgcagaaacaugccac

SEQ ID NO: 1586395 - RNA, 23 nt, Human adenovirus F
uccaggaaaucaccagcgugagu

SEQ ID NO: 1586396 - RNA, 22 nt, Human adenovirus F
cgguacuaaggcgggcacaaag

SEQ ID NO: 1586397 - RNA, 16 nt, Human adenovirus F
ccggcauguacggcgg

SEQ ID NO: 1586398 - RNA, 15 nt, Human adenovirus F
caaacccagccgcac

SEQ ID NO: 1586399 - RNA, 23 nt, Human adenovirus F
gagguguuggagaacaugaaagu

SEQ ID NO: 1586400 - RNA, 20 nt, Human adenovirus F
agcagggugcgauugaaaua

SEQ ID NO: 1586401 - RNA, 17 nt, Human adenovirus F
caccguucccacuguuu

SEQ ID NO: 1586402 - RNA, 21 nt, Human adenovirus F
ucccacuguuucuccuccccu

SEQ ID NO: 1586403 - RNA, 13 nt, Human adenovirus F
gcaaagccauccg

SEQ ID NO: 1586404 - RNA, 17 nt, Human adenovirus F
ccaauccuagccagugg

SEQ ID NO: 1586405 - RNA, 21 nt, Human adenovirus F
uacggaccaccagaugauguc

SEQ ID NO: 1586406 - RNA, 21 nt, Human adenovirus F
cgaauugcagcccaccaugca

SEQ ID NO: 1586407 - RNA, 16 nt, Human adenovirus F
acacugccuaccgcag

SEQ ID NO: 1586408 - RNA, 13 nt, Human adenovirus F
uccgcaaggauga

SEQ ID NO: 1586409 - RNA, 14 nt, Human adenovirus F
gcaacucgcaggcc

SEQ ID NO: 1586410 - RNA, 17 nt, Human adenovirus F
auaugaugaaaguagaa

SEQ ID NO: 1586411 - RNA, 18 nt, Human adenovirus F
aggaggcuaauggccaga

SEQ ID NO: 1586412 - RNA, 22 nt, Human adenovirus F
cgccuccaacacagccgccgcu

SEQ ID NO: 1586413 - RNA, 17 nt, Human adenovirus F
auaccgcugcagcugcu

SEQ ID NO: 1586414 - RNA, 15 nt, Human adenovirus F
cccccaucucugugc

SEQ ID NO: 1586415 - RNA, 12 nt, Human adenovirus F
aaucauuuccag

SEQ ID NO: 1586416 - RNA, 22 nt, Human adenovirus F
ugggcguguuuguggguauaua

SEQ ID NO: 1586417 - RNA, 20 nt, Human adenovirus F
aucgugcgcgaacugggcug

SEQ ID NO: 1586418 - RNA, 17 nt, Human adenovirus F
cuauauaggacaaaaaa

SEQ ID NO: 1586419 - RNA, 18 nt, Human adenovirus F
ggcggaugguggcaagga

SEQ ID NO: 1586420 - RNA, 22 nt, Human adenovirus F
cuagcauaaaggggaccagcug

SEQ ID NO: 1586421 - RNA, 21 nt, Human adenovirus F
auaagcuaaaggaccaaaacu

SEQ ID NO: 1586422 - RNA, 19 nt, Human adenovirus F
aggcuuuccgcgaggccau

SEQ ID NO: 1586423 - RNA, 18 nt, Human adenovirus F
acucggagcuggcgccuc

SEQ ID NO: 1586424 - RNA, 14 nt, Human adenovirus F
caaccuucaagccc

SEQ ID NO: 1586425 - RNA, 18 nt, Human adenovirus F
gguccgaccgcugggguu

SEQ ID NO: 1586426 - RNA, 17 nt, Human adenovirus F
aguuugguagcaaagga

SEQ ID NO: 1586427 - RNA, 13 nt, Human adenovirus F
accgccaauuuuu

SEQ ID NO: 1586428 - RNA, 19 nt, Human adenovirus F
ccugcggauuaagaaccac

SEQ ID NO: 1586429 - RNA, 13 nt, Human adenovirus F
acgcccaggagca

SEQ ID NO: 1586430 - RNA, 15 nt, Human adenovirus F
uacauccauuuccac

SEQ ID NO: 1586431 - RNA, 16 nt, Human adenovirus F
ugagaauuauugaaaa

SEQ ID NO: 1586432 - RNA, 16 nt, Human adenovirus F
uucaaacccagccgca

SEQ ID NO: 1586433 - RNA, 18 nt, Human adenovirus F
ugccauuguuaacacggc

SEQ ID NO: 1586434 - RNA, 22 nt, Human adenovirus F
gcgaguuugacgugccugaggg

SEQ ID NO: 1586435 - RNA, 11 nt, Human adenovirus F
gauggaguugu

SEQ ID NO: 1586436 - RNA, 13 nt, Human adenovirus F
cagcgggcacaga

SEQ ID NO: 1586437 - RNA, 20 nt, Human adenovirus F
ccggcggcgggugcaguggc

SEQ ID NO: 1586438 - RNA, 16 nt, Human adenovirus F
ggagguagaaguggag

SEQ ID NO: 1586439 - RNA, 22 nt, Human adenovirus F
cuuccgacggguuacaggaaaa

SEQ ID NO: 1586440 - RNA, 16 nt, Human adenovirus F
uaccccgacagaggcc

SEQ ID NO: 1586441 - RNA, 12 nt, Human adenovirus F
auaaacuccucu

SEQ ID NO: 1586442 - RNA, 23 nt, Human adenovirus F
uugcaugcccgagccggagaggg

SEQ ID NO: 1586443 - RNA, 13 nt, Human adenovirus F
caagagccaccuu

SEQ ID NO: 1586444 - RNA, 19 nt, Human adenovirus F
acucuuacaaagugcgcuu

SEQ ID NO: 1586445 - RNA, 15 nt, Human adenovirus F
cgcagccugagcugc

SEQ ID NO: 1586446 - RNA, 12 nt, Human adenovirus F
cuaucuuuuccu

SEQ ID NO: 1586447 - RNA, 23 nt, Human adenovirus F
ggaggccauccuggaccuggaag

SEQ ID NO: 1586448 - RNA, 22 nt, Human adenovirus F
ugaccugugggucgcagcaggu

SEQ ID NO: 1586449 - RNA, 22 nt, Human adenovirus F
gcuauuaaaauggaaccaagcu

SEQ ID NO: 1586450 - RNA, 21 nt, Human adenovirus F
aaauucaugcaugcagacuuu

SEQ ID NO: 1586451 - RNA, 15 nt, Human adenovirus F
ugcuacacaacaaau

SEQ ID NO: 1586452 - RNA, 14 nt, Human adenovirus F
uggacauggccagc

SEQ ID NO: 1586453 - RNA, 20 nt, Human adenovirus F
agccugagcugccagaggcc

SEQ ID NO: 1586454 - RNA, 19 nt, Human adenovirus F
cggcguacacuggcuggcc

SEQ ID NO: 1586455 - RNA, 21 nt, Human adenovirus F
ccgcgcuaaaucuuccuccca

SEQ ID NO: 1586456 - RNA, 23 nt, Human adenovirus F
cucugugagcuggccugguaacg

SEQ ID NO: 1586457 - RNA, 15 nt, Human adenovirus F
acgugcaggccaacc

SEQ ID NO: 1586458 - RNA, 18 nt, Human adenovirus F
uugccuucuuuucugcuc

SEQ ID NO: 1586459 - RNA, 15 nt, Human adenovirus F
gcaacgcaagagacg

SEQ ID NO: 1586460 - RNA, 18 nt, Human adenovirus F
ucaaagacgccgccuugc

SEQ ID NO: 1586461 - RNA, 17 nt, Human adenovirus F
augugcagcaaaaacuc

SEQ ID NO: 1586462 - RNA, 15 nt, Human adenovirus F
cauuucgugggaagg

SEQ ID NO: 1586463 - RNA, 18 nt, Human adenovirus F
cucgagguguaacauccc

SEQ ID NO: 1586464 - RNA, 20 nt, Human adenovirus F
ggagcagauggagagcuggg

SEQ ID NO: 1586465 - RNA, 14 nt, Human adenovirus F
aguugguagcagug

SEQ ID NO: 1586466 - RNA, 20 nt, Human adenovirus F
gugccgagcuuuuacuggga

SEQ ID NO: 1586467 - RNA, 12 nt, Human adenovirus F
cccagccgcacu

SEQ ID NO: 1586468 - RNA, 13 nt, Human adenovirus F
gacaaaacacuaa

SEQ ID NO: 1586469 - RNA, 18 nt, Human adenovirus F
accgacuacuuacuccca

SEQ ID NO: 1586470 - RNA, 18 nt, Human adenovirus F
cggguuagaaguaaccaa

SEQ ID NO: 1586471 - RNA, 18 nt, Human adenovirus F
cggaagccgaaguccaaa

SEQ ID NO: 1586472 - RNA, 22 nt, Human adenovirus F
auugcagcgguaucugcgugga

SEQ ID NO: 1586473 - RNA, 12 nt, Human adenovirus F
cuggaaccacuu

SEQ ID NO: 1586474 - RNA, 18 nt, Human adenovirus F
gccagccuccgguggcuc

SEQ ID NO: 1586475 - RNA, 17 nt, Human adenovirus F
uacgccuccaccaccuu

SEQ ID NO: 1586476 - RNA, 13 nt, Human adenovirus F
uaagcugcagcca

SEQ ID NO: 1586477 - RNA, 17 nt, Human adenovirus F
ucgcucuguccgccgcc

SEQ ID NO: 1586478 - RNA, 19 nt, Human adenovirus F
cugcuacucaacagaaacc

SEQ ID NO: 1586479 - RNA, 13 nt, Human adenovirus F
cgccaugacugcc

SEQ ID NO: 1586480 - RNA, 14 nt, Human adenovirus F
cgguuccucgcaac

SEQ ID NO: 1586481 - RNA, 14 nt, Human adenovirus F
guggcugcaagguc

SEQ ID NO: 1586482 - RNA, 16 nt, Human adenovirus F
cuagauaauaacuuuc

SEQ ID NO: 1586483 - RNA, 13 nt, Human adenovirus F
uguccuuaaggag

SEQ ID NO: 1586484 - RNA, 20 nt, Human adenovirus F
ucagggucgauggagccagc

SEQ ID NO: 1586485 - RNA, 17 nt, Human adenovirus F
gcucugcaucucuugaa

SEQ ID NO: 1586486 - RNA, 23 nt, Human adenovirus F
agccuguguuaucacccaaagcc

SEQ ID NO: 1586487 - RNA, 14 nt, Human adenovirus F
gaguaugccuugca

SEQ ID NO: 1586488 - RNA, 20 nt, Human adenovirus F
augcuuuuacguuuaaaugg

SEQ ID NO: 1586489 - RNA, 12 nt, Human adenovirus F
ugcagcccacca

SEQ ID NO: 1586490 - RNA, 22 nt, Human adenovirus F
cggaccugccccuacgugcaca

SEQ ID NO: 1586491 - RNA, 18 nt, Human adenovirus F
acuuuaaacaagcaaaga

SEQ ID NO: 1586492 - RNA, 14 nt, Human adenovirus F
gaagcacaggagau

SEQ ID NO: 1586493 - RNA, 15 nt, Human adenovirus F
cuucacuccucgcca

SEQ ID NO: 1586494 - RNA, 15 nt, Human adenovirus F
uacugcuaaagggaa

SEQ ID NO: 1586495 - RNA, 16 nt, Human adenovirus F
caauuggggcacaccg

SEQ ID NO: 1586496 - RNA, 18 nt, Human adenovirus F
agugcguaagaccucauc

SEQ ID NO: 1586497 - RNA, 14 nt, Human adenovirus F
gaaccggcgccgcu

SEQ ID NO: 1586498 - RNA, 17 nt, Human adenovirus F
cuuguucgaaggcugcc

SEQ ID NO: 1586499 - RNA, 15 nt, Human adenovirus F
ggcuuccuuaacaag

SEQ ID NO: 1586500 - RNA, 20 nt, Human adenovirus F
uggggcgcgguggucuccag

SEQ ID NO: 1586501 - RNA, 15 nt, Human adenovirus F
gaaaucacaguuggg

SEQ ID NO: 1586502 - RNA, 12 nt, Human adenovirus F
aaccauggagcu

SEQ ID NO: 1586503 - RNA, 20 nt, Human adenovirus F
caaacggcguucuagccaac

SEQ ID NO: 1586504 - RNA, 19 nt, Human adenovirus F
caauuuugcgucgcuggcu

SEQ ID NO: 1586505 - RNA, 12 nt, Human adenovirus F
ugugagauuugu

SEQ ID NO: 1586506 - RNA, 12 nt, Human adenovirus F
ugcuuuuucacg

SEQ ID NO: 1586507 - RNA, 11 nt, Human adenovirus F
aauggcucugc

SEQ ID NO: 1586508 - RNA, 11 nt, Human adenovirus F
agcugcuggag

SEQ ID NO: 1586509 - RNA, 19 nt, Human adenovirus F
gcguucaaaaccucuuaca

SEQ ID NO: 1586510 - RNA, 15 nt, Human adenovirus F
ggcgcauucccuuuu

SEQ ID NO: 1586511 - RNA, 23 nt, Human adenovirus F
cguguccgggcucuucaucacuu

SEQ ID NO: 1586512 - RNA, 16 nt, Human adenovirus F
augcaugcgaggggaa

SEQ ID NO: 1586513 - RNA, 11 nt, Human adenovirus F
cgcgccaaccg

SEQ ID NO: 1586514 - RNA, 13 nt, Human adenovirus F
uucuuugccaccu

SEQ ID NO: 1586515 - RNA, 18 nt, Human adenovirus F
gcagcagccccaggccaa

SEQ ID NO: 1586516 - RNA, 21 nt, Human adenovirus F
gagcucugcaaaaacaaauac

SEQ ID NO: 1586517 - RNA, 21 nt, Human adenovirus F
caagcaaagacagagcuuuau

SEQ ID NO: 1586518 - RNA, 16 nt, Human adenovirus F
cuuuccgcgaggccau

SEQ ID NO: 1586519 - RNA, 13 nt, Human adenovirus F
ugcagcugcugcc

SEQ ID NO: 1586520 - RNA, 15 nt, Human adenovirus F
ggcugcuucugccag

SEQ ID NO: 1586521 - RNA, 16 nt, Human adenovirus F
uccgaaacuuccaacc

SEQ ID NO: 1586522 - RNA, 23 nt, Human adenovirus F
cgaaacuuccaacccaugagccg

SEQ ID NO: 1586523 - RNA, 18 nt, Human adenovirus F
cagccgguccccgucagc

SEQ ID NO: 1586524 - RNA, 12 nt, Human adenovirus F
uuucccagaguu

SEQ ID NO: 1586525 - RNA, 18 nt, Human adenovirus F
cacccucagacgacuggg

SEQ ID NO: 1586526 - RNA, 13 nt, Human adenovirus F
ggcucuuggucag

SEQ ID NO: 1586527 - RNA, 20 nt, Human adenovirus F
ggguguacguuuguugcaug

SEQ ID NO: 1586528 - RNA, 19 nt, Human adenovirus F
ugcaaacaacgaacuuucu

SEQ ID NO: 1586529 - RNA, 20 nt, Human adenovirus F
ugacacgucaccgccaagag

SEQ ID NO: 1586530 - RNA, 17 nt, Human adenovirus F
cgcuucgccuccuggug

SEQ ID NO: 1586531 - RNA, 13 nt, Human adenovirus F
cgcacccuggugg

SEQ ID NO: 1586532 - RNA, 15 nt, Human adenovirus F
aggguguacguuugu

SEQ ID NO: 1586533 - RNA, 16 nt, Human adenovirus F
ugcccaccguuccgcc

SEQ ID NO: 1586534 - RNA, 18 nt, Human adenovirus F
ucgcaaacaaagaaguac

SEQ ID NO: 1586535 - RNA, 18 nt, Human adenovirus F
cuuuacccgacaacaaaa

SEQ ID NO: 1586536 - RNA, 11 nt, Human adenovirus F
gagggcuucca

SEQ ID NO: 1586537 - RNA, 18 nt, Human adenovirus F
ccaaaucaaucagcggcu

SEQ ID NO: 1586538 - RNA, 16 nt, Human adenovirus F
ccuagacgaggaggac

SEQ ID NO: 1586539 - RNA, 23 nt, Human adenovirus F
gaagugcuaggcucuucuuccuc

SEQ ID NO: 1586540 - RNA, 14 nt, Human adenovirus F
acauggccagcacc

SEQ ID NO: 1586541 - RNA, 18 nt, Human adenovirus F
gugacaaacaagcugucu

SEQ ID NO: 1586542 - RNA, 11 nt, Human adenovirus F
cuagcaaacag

SEQ ID NO: 1586543 - RNA, 22 nt, Human adenovirus F
gcugacgaagacauucuugagc

SEQ ID NO: 1586544 - RNA, 18 nt, Human adenovirus F
cgucccaucauuuccaca

SEQ ID NO: 1586545 - RNA, 23 nt, Human adenovirus F
ggccauggaaacgcagccugagc

SEQ ID NO: 1586546 - RNA, 17 nt, Human adenovirus F
caggagccgaauugccu

SEQ ID NO: 1586547 - RNA, 21 nt, Human adenovirus F
aaccggcggcguacacuggcu

SEQ ID NO: 1586548 - RNA, 15 nt, Human adenovirus F
cgaggggcuggcccg

SEQ ID NO: 1586549 - RNA, 16 nt, Human adenovirus F
gagauccguggagccg

SEQ ID NO: 1586550 - RNA, 22 nt, Human adenovirus F
cccgcaaucccgaagccuucag

SEQ ID NO: 1586551 - RNA, 17 nt, Human adenovirus F
gaagccuucaggcagca

SEQ ID NO: 1586552 - RNA, 12 nt, Human adenovirus F
accagugggcuc

SEQ ID NO: 1586553 - RNA, 17 nt, Human adenovirus F
caucuucuucugcaucc

SEQ ID NO: 1586554 - RNA, 20 nt, Human adenovirus F
gaucccucagagcugcaaga

SEQ ID NO: 1586555 - RNA, 20 nt, Human adenovirus F
cguuuaugggcaccuggaac

SEQ ID NO: 1586556 - RNA, 21 nt, Human adenovirus F
agucgcaagguaagcuaagga

SEQ ID NO: 1586557 - RNA, 22 nt, Human adenovirus F
auauuucaccuacucuggcucc

SEQ ID NO: 1586558 - RNA, 15 nt, Human adenovirus F
aauggaaccaagcua

SEQ ID NO: 1586559 - RNA, 15 nt, Human adenovirus F
uacucuuucuuacaa

SEQ ID NO: 1586560 - RNA, 21 nt, Human adenovirus F
ggauucuaagggaggcagcag

SEQ ID NO: 1586561 - RNA, 22 nt, Human adenovirus F
acgaagcuagcauaaaagaagc

SEQ ID NO: 1586562 - RNA, 16 nt, Human adenovirus F
caccguuguggaguca

SEQ ID NO: 1586563 - RNA, 20 nt, Human adenovirus F
agccgaucccagagcucggu

SEQ ID NO: 1586564 - RNA, 23 nt, Human adenovirus F
cgcgcaacggcaaucccagcaga

SEQ ID NO: 1586565 - RNA, 21 nt, Human adenovirus F
ugggaaggggccagcaagcug

SEQ ID NO: 1586566 - RNA, 13 nt, Human adenovirus F
cuaacaaaaacuu

SEQ ID NO: 1586567 - RNA, 15 nt, Human adenovirus F
uaugggagucuggca

SEQ ID NO: 1586568 - RNA, 13 nt, Human adenovirus F
cgccauagcugga

SEQ ID NO: 1586569 - RNA, 17 nt, Human adenovirus F
cagcuggagcuucucag

SEQ ID NO: 1586570 - RNA, 16 nt, Human adenovirus F
accuuauacaccuccc

SEQ ID NO: 1586571 - RNA, 14 nt, Human adenovirus F
gugacaaagaggcg

SEQ ID NO: 1586572 - RNA, 15 nt, Human adenovirus F
cagguguacuggucc

SEQ ID NO: 1586573 - RNA, 18 nt, Human adenovirus F
gcuagaaugucacugccg

SEQ ID NO: 1586574 - RNA, 20 nt, Human adenovirus F
cagccuaacggcaccugcga

SEQ ID NO: 1586575 - RNA, 13 nt, Human adenovirus F
uuacgucagcuac

SEQ ID NO: 1586576 - RNA, 22 nt, Human adenovirus F
gccuacaacuacggagaugcag

SEQ ID NO: 1586577 - RNA, 17 nt, Human adenovirus F
uuccucauacaaaugcu

SEQ ID NO: 1586578 - RNA, 15 nt, Human adenovirus F
guaaagcgagccaaa

SEQ ID NO: 1586579 - RNA, 18 nt, Human adenovirus F
gauuuuucuucuccuggc

SEQ ID NO: 1586580 - RNA, 20 nt, Human adenovirus F
uggaacauuaauccaaugca

SEQ ID NO: 1586581 - RNA, 12 nt, Human adenovirus F
auauccaaaucc

SEQ ID NO: 1586582 - RNA, 17 nt, Human adenovirus F
cagaaacaugccaccca

SEQ ID NO: 1586583 - RNA, 17 nt, Human adenovirus F
ggccguaccaagccuga

SEQ ID NO: 1586584 - RNA, 22 nt, Human adenovirus F
ccggguugggcgcuugccaggg

SEQ ID NO: 1586585 - RNA, 16 nt, Human adenovirus F
uuuuccagcaacuuua

SEQ ID NO: 1586586 - RNA, 18 nt, Human adenovirus F
cuaucacuaaaaccaaca

SEQ ID NO: 1586587 - RNA, 17 nt, Human adenovirus F
aacacaaugcaaaaugu

SEQ ID NO: 1586588 - RNA, 13 nt, Human adenovirus F
cugccagaggccg

SEQ ID NO: 1586589 - RNA, 19 nt, Human adenovirus F
uaccaaagacaaaaucacu

SEQ ID NO: 1586590 - RNA, 21 nt, Human adenovirus F
uuggcaauguguuugccaugg

SEQ ID NO: 1586591 - RNA, 24 nt, Human adenovirus F
ggcgaaaaaugaugauggcagcag

SEQ ID NO: 1586592 - RNA, 17 nt, Human adenovirus F
gacuuugcuccgccggc

SEQ ID NO: 1586593 - RNA, 17 nt, Human adenovirus F
cucauccgccauugcca

SEQ ID NO: 1586594 - RNA, 12 nt, Human adenovirus F
uauuacaaaugc

SEQ ID NO: 1586595 - RNA, 14 nt, Human adenovirus F
gaggccauccugga

SEQ ID NO: 1586596 - RNA, 18 nt, Human adenovirus F
aaauguagcccuguacuu

SEQ ID NO: 1586597 - RNA, 21 nt, Human adenovirus F
cccucaaacacugcgcaaagu

SEQ ID NO: 1586598 - RNA, 14 nt, Human adenovirus F
ucacgaccucccaa

SEQ ID NO: 1586599 - RNA, 12 nt, Human adenovirus F
ucuuucuuacaa

SEQ ID NO: 1586600 - RNA, 12 nt, Human adenovirus F
aaaaccaaauca

SEQ ID NO: 1586601 - RNA, 21 nt, Human adenovirus F
agguacagcccaacaccacca

SEQ ID NO: 1586602 - RNA, 21 nt, Human adenovirus F
gacggggcccguucuggacuc

SEQ ID NO: 1586603 - RNA, 12 nt, Human adenovirus F
gaaucauuucca

SEQ ID NO: 1586604 - RNA, 16 nt, Human adenovirus F
uggagggcgucaugcu

SEQ ID NO: 1586605 - RNA, 20 nt, Human adenovirus F
accccgccccgaccacaguc

SEQ ID NO: 1586606 - RNA, 21 nt, Human adenovirus F
cagccccaggccaaccgcuuu

SEQ ID NO: 1586607 - RNA, 20 nt, Human adenovirus F
acgacugggcggcggccaug

SEQ ID NO: 1586608 - RNA, 15 nt, Human adenovirus F
gaugauggagggaac

SEQ ID NO: 1586609 - RNA, 23 nt, Human adenovirus F
aucgcuugccacuggccuuuuga

SEQ ID NO: 1586610 - RNA, 16 nt, Human adenovirus F
cacugcaccuugcaag

SEQ ID NO: 1586611 - RNA, 20 nt, Human adenovirus F
aaggucagaaaaaccgccac

SEQ ID NO: 1586612 - RNA, 18 nt, Human adenovirus F
ugcgcuguacugugcauu

SEQ ID NO: 1586613 - RNA, 22 nt, Human adenovirus F
uacaaaugucuaauggagcuau

SEQ ID NO: 1586614 - RNA, 14 nt, Human adenovirus F
ccccugccaccgca

SEQ ID NO: 1586615 - RNA, 15 nt, Human adenovirus F
ggaaaucagaugcau

SEQ ID NO: 1586616 - RNA, 15 nt, Human adenovirus F
aauuuuucgaggaaa

SEQ ID NO: 1586617 - RNA, 15 nt, Human adenovirus F
gguacaggugggcuu

SEQ ID NO: 1586618 - RNA, 17 nt, Human adenovirus F
cgccggcgggaagagga

SEQ ID NO: 1586619 - RNA, 18 nt, Human adenovirus F
aaauuacagccaagucaa

SEQ ID NO: 1586620 - RNA, 16 nt, Human adenovirus F
ggcuuuuggaccuggu

SEQ ID NO: 1586621 - RNA, 21 nt, Human adenovirus F
ccacgcaggcgagaguugggg

SEQ ID NO: 1586622 - RNA, 22 nt, Human adenovirus F
auccccgccgccccuggccugu

SEQ ID NO: 1586623 - RNA, 14 nt, Human adenovirus F
cuugucguaaccaa

SEQ ID NO: 1586624 - RNA, 16 nt, Human adenovirus F
guagcucuuccaagcu

SEQ ID NO: 1586625 - RNA, 15 nt, Human adenovirus F
ggccuggcagcugga

SEQ ID NO: 1586626 - RNA, 16 nt, Human adenovirus F
gaggagucccugcacu

SEQ ID NO: 1586627 - RNA, 18 nt, Human adenovirus F
aacuaccucgccgcgcag

SEQ ID NO: 1586628 - RNA, 18 nt, Human adenovirus F
ccauauccauuaaagcuc

SEQ ID NO: 1586629 - RNA, 21 nt, Human adenovirus F
cagaacguucuucacugcacc

SEQ ID NO: 1586630 - RNA, 19 nt, Human adenovirus F
auugccucguagaagucaa

SEQ ID NO: 1586631 - RNA, 16 nt, Human adenovirus F
cuggaguuggcuucug

SEQ ID NO: 1586632 - RNA, 20 nt, Human adenovirus F
aagcgguugcgguacucucg

SEQ ID NO: 1586633 - RNA, 18 nt, Human adenovirus F
gacguuaagguaaagcca

SEQ ID NO: 1586634 - RNA, 16 nt, Human adenovirus F
ccacgucccuccccgu

SEQ ID NO: 1586635 - RNA, 19 nt, Human adenovirus F
aguggcuucacggaaggaa

SEQ ID NO: 1586636 - RNA, 17 nt, Human adenovirus F
uugaagaugacuucaac

SEQ ID NO: 1586637 - RNA, 19 nt, Human adenovirus F
gaagaccgauaguacggcc

SEQ ID NO: 1586638 - RNA, 18 nt, Human adenovirus F
uggcggcuaacuugugga

SEQ ID NO: 1586639 - RNA, 15 nt, Human adenovirus F
gcuucagagcucuuc

SEQ ID NO: 1586640 - RNA, 14 nt, Human adenovirus F
cucccuuuccagca

SEQ ID NO: 1586641 - RNA, 19 nt, Human adenovirus F
ccugccgcugcgcagcagu

SEQ ID NO: 1586642 - RNA, 19 nt, Human adenovirus F
gaguugucuugguaggcaa

SEQ ID NO: 1586643 - RNA, 14 nt, Human adenovirus F
acuagcauaaaggg

SEQ ID NO: 1586644 - RNA, 18 nt, Human adenovirus F
ccgcaaccauguucacug

SEQ ID NO: 1586645 - RNA, 17 nt, Human adenovirus F
uuuggccugaauuuuua

SEQ ID NO: 1586646 - RNA, 20 nt, Human adenovirus F
ggagaggcgguagcggcacg

SEQ ID NO: 1586647 - RNA, 13 nt, Human adenovirus F
ggcucuggacaug

SEQ ID NO: 1586648 - RNA, 16 nt, Human adenovirus F
aggcgauagucggugc

SEQ ID NO: 1586649 - RNA, 24 nt, Human adenovirus F
aucauuuuaaaccaauuugcuaac

SEQ ID NO: 1586650 - RNA, 23 nt, Human adenovirus F
gguccuuugccccccggcggcgg

SEQ ID NO: 1586651 - RNA, 21 nt, Human adenovirus F
cuugucgcagaaucuccugca

SEQ ID NO: 1586652 - RNA, 15 nt, Human adenovirus F
caccccucuccgugc

SEQ ID NO: 1586653 - RNA, 13 nt, Human adenovirus F
auccguggagccg

SEQ ID NO: 1586654 - RNA, 15 nt, Human adenovirus F
ggagauccguggagc

SEQ ID NO: 1586655 - RNA, 19 nt, Human adenovirus F
ccugucgccccugccaacu

SEQ ID NO: 1586656 - RNA, 13 nt, Human adenovirus F
uccuggaccugga

SEQ ID NO: 1586657 - RNA, 20 nt, Human adenovirus F
ccagcugguaagcagccuaa

SEQ ID NO: 1586658 - RNA, 20 nt, Human adenovirus F
cagauugccuccguguuuuu

SEQ ID NO: 1586659 - RNA, 19 nt, Human adenovirus F
gccauggaaacgcagccug

SEQ ID NO: 1586660 - RNA, 19 nt, Human adenovirus F
gucgccagaguugucuugg

SEQ ID NO: 1586661 - RNA, 15 nt, Human adenovirus F
uguacaccaccucuu

SEQ ID NO: 1586662 - RNA, 17 nt, Human adenovirus F
ggcacagaauccucaga

SEQ ID NO: 1586663 - RNA, 19 nt, Human adenovirus F
gcgucaggaauuucuuuua

SEQ ID NO: 1586664 - RNA, 17 nt, Human adenovirus F
cauggaucgcauccugg

SEQ ID NO: 1586665 - RNA, 22 nt, Human adenovirus F
gaagccacgcugaacuuuuugc

SEQ ID NO: 1586666 - RNA, 21 nt, Human adenovirus F
gcauuaggccgucccugggau

SEQ ID NO: 1586667 - RNA, 20 nt, Human adenovirus F
cugagggccggccuggaccc

SEQ ID NO: 1586668 - RNA, 16 nt, Human adenovirus F
ugcacuuaacuguucu

SEQ ID NO: 1586669 - RNA, 21 nt, Human adenovirus F
cuccgauuuugucccccucug

SEQ ID NO: 1586670 - RNA, 17 nt, Human adenovirus F
ggucuuagguugcuugc

SEQ ID NO: 1586671 - RNA, 19 nt, Human adenovirus F
auccuccuucacaaagucc

SEQ ID NO: 1586672 - RNA, 22 nt, Human adenovirus F
uggccuuuugaacgaccugcac

SEQ ID NO: 1586673 - RNA, 22 nt, Human adenovirus F
ggaaacugucaggcucugagag

SEQ ID NO: 1586674 - RNA, 16 nt, Human adenovirus F
cccgguacaggugggc

SEQ ID NO: 1586675 - RNA, 21 nt, Human adenovirus F
cagcgggaagagaggcagccc

SEQ ID NO: 1586676 - RNA, 21 nt, Human adenovirus F
cauggugguagaaggucaggc

SEQ ID NO: 1586677 - RNA, 18 nt, Human adenovirus F
ucaccuacucuggcuccg

SEQ ID NO: 1586678 - RNA, 16 nt, Human adenovirus F
cuugcucggugcagcc

SEQ ID NO: 1586679 - RNA, 20 nt, Human adenovirus F
aggguaaggggcggagccua

SEQ ID NO: 1586680 - RNA, 13 nt, Human adenovirus F
acaugagcuuacu

SEQ ID NO: 1586681 - RNA, 16 nt, Human adenovirus F
gagcuuuuacugggac

SEQ ID NO: 1586682 - RNA, 22 nt, Human adenovirus F
gcaguccacuuaacagcuccuc

SEQ ID NO: 1586683 - RNA, 12 nt, Human adenovirus F
agccuguggagu

SEQ ID NO: 1586684 - RNA, 11 nt, Human adenovirus F
cagaacauggc

SEQ ID NO: 1586685 - RNA, 15 nt, Human adenovirus F
cuuacaaacaguaac

SEQ ID NO: 1586686 - RNA, 10 nt, Human adenovirus F
acgagcugcc

SEQ ID NO: 1586687 - RNA, 18 nt, Human adenovirus F
cauccgccauugccaccc

SEQ ID NO: 1586688 - RNA, 20 nt, Human adenovirus F
auuuggaagaugaguuuaaa

SEQ ID NO: 1586689 - RNA, 19 nt, Human adenovirus F
guaacacaggucaaaugcu

SEQ ID NO: 1586690 - RNA, 20 nt, Human adenovirus F
aggccauccuggaccuggaa

SEQ ID NO: 1586691 - RNA, 20 nt, Human adenovirus F
ggcacaguaaucaaggguuu

SEQ ID NO: 1586692 - RNA, 17 nt, Human adenovirus F
ugggaguugcgcgccgc

SEQ ID NO: 1586693 - RNA, 14 nt, Human adenovirus F
uugggggccuuuug

SEQ ID NO: 1586694 - RNA, 17 nt, Human adenovirus F
aaaacaaaacaaacucc

SEQ ID NO: 1586695 - RNA, 20 nt, Human adenovirus F
caguuggagcagccugugga

SEQ ID NO: 1586696 - RNA, 15 nt, Human adenovirus F
gcccaccaaauuaaa

SEQ ID NO: 1586697 - RNA, 16 nt, Human adenovirus F
gcagcaacauaacuuu

SEQ ID NO: 1586698 - RNA, 19 nt, Human adenovirus F
uauuuguauaaucuuaaaa

SEQ ID NO: 1586699 - RNA, 12 nt, Human adenovirus F
cuccacccuuuc

SEQ ID NO: 1586700 - RNA, 23 nt, Human adenovirus F
ucgccagcgacaaggcaccaucu

SEQ ID NO: 1586701 - RNA, 12 nt, Human adenovirus F
agcgggcacaga

SEQ ID NO: 1586702 - RNA, 15 nt, Human adenovirus F
accacccccaacucu

SEQ ID NO: 1586703 - RNA, 15 nt, Human adenovirus F
gucuuuuuugucugg

SEQ ID NO: 1586704 - RNA, 12 nt, Human adenovirus F
accucugcaccc

SEQ ID NO: 1586705 - RNA, 15 nt, Human adenovirus F
cacccaaagccaaau

SEQ ID NO: 1586706 - RNA, 16 nt, Human adenovirus F
ugacauuccuccgccu

SEQ ID NO: 1586707 - RNA, 16 nt, Human adenovirus F
cguucucuccccacag

SEQ ID NO: 1586708 - RNA, 22 nt, Human adenovirus F
ucuccugcacgucgccagaguu

SEQ ID NO: 1586709 - RNA, 14 nt, Human adenovirus F
cagcccccaccgcc

SEQ ID NO: 1586710 - RNA, 13 nt, Human adenovirus F
agccaaugggcuc

SEQ ID NO: 1586711 - RNA, 22 nt, Human adenovirus F
gccauggaaacgcagccugagc

SEQ ID NO: 1586712 - RNA, 17 nt, Human adenovirus F
gaagagaggcagccccg

SEQ ID NO: 1586713 - RNA, 15 nt, Human adenovirus F
ggccauccuggaccu

SEQ ID NO: 1586714 - RNA, 23 nt, Human adenovirus F
ucagaaccuccgacgcuugcugg

SEQ ID NO: 1586715 - RNA, 23 nt, Human adenovirus F
aauguagcccuguacuugccuga

SEQ ID NO: 1586716 - RNA, 14 nt, Human adenovirus F
cuuuugcaccaggg

SEQ ID NO: 1586717 - RNA, 14 nt, Human adenovirus F
aaaccuggcaacau

SEQ ID NO: 1586718 - RNA, 16 nt, Human adenovirus F
guggacgacagccagc

SEQ ID NO: 1586719 - RNA, 14 nt, Human adenovirus F
uggccugccgccca

SEQ ID NO: 1586720 - RNA, 19 nt, Human adenovirus F
ccguuggaauuuuccugcg

SEQ ID NO: 1586721 - RNA, 17 nt, Human adenovirus F
cgccuuuucucaucacu

SEQ ID NO: 1586722 - RNA, 17 nt, Human adenovirus F
cuaugacaccuccucaa

SEQ ID NO: 1586723 - RNA, 23 nt, Human adenovirus F
ccuaucacuaaaaccaacaaaau

SEQ ID NO: 1586724 - RNA, 19 nt, Human adenovirus F
gggcaacguucagccacuc

SEQ ID NO: 1586725 - RNA, 17 nt, Human adenovirus F
aacggcgugcuggaaag

SEQ ID NO: 1586726 - RNA, 14 nt, Human adenovirus F
gucugguuaaacaa

SEQ ID NO: 1586727 - RNA, 17 nt, Human adenovirus F
gccucgcgugcucaagc

SEQ ID NO: 1586728 - RNA, 20 nt, Human adenovirus F
cuauucugggacgcucuuau

SEQ ID NO: 1586729 - RNA, 20 nt, Human adenovirus F
accuccgggaguccucagcc

SEQ ID NO: 1586730 - RNA, 15 nt, Human adenovirus F
acuucuucagcucua

SEQ ID NO: 1586731 - RNA, 17 nt, Human adenovirus F
cccauagacaaggaggu

SEQ ID NO: 1586732 - RNA, 15 nt, Human adenovirus F
uugcgcgaacagagu

SEQ ID NO: 1586733 - RNA, 23 nt, Human adenovirus F
agguaguccucauucuucucaua

SEQ ID NO: 1586734 - RNA, 16 nt, Human adenovirus F
uggcucugcagcagcg

SEQ ID NO: 1586735 - RNA, 19 nt, Human adenovirus F
cagccugagcugccagagg

SEQ ID NO: 1586736 - RNA, 23 nt, Human adenovirus F
cccguaaccaaguuggugaugcc

SEQ ID NO: 1586737 - RNA, 15 nt, Human adenovirus F
gaccccauggaugag

SEQ ID NO: 1586738 - RNA, 17 nt, Human adenovirus F
gaguuugugcgguccuu

SEQ ID NO: 1586739 - RNA, 14 nt, Human adenovirus F
ugugaguguggagc

SEQ ID NO: 1586740 - RNA, 19 nt, Human adenovirus F
aguaucagaauguaacucu

SEQ ID NO: 1586741 - RNA, 12 nt, Human adenovirus F
ccccaccguggc

SEQ ID NO: 1586742 - RNA, 12 nt, Human adenovirus F
uaacgccccccg

SEQ ID NO: 1586743 - RNA, 14 nt, Human adenovirus F
acagagcuuuauga

SEQ ID NO: 1586744 - RNA, 22 nt, Human adenovirus F
gcuagaaaaccgcgccauagcu

SEQ ID NO: 1586745 - RNA, 17 nt, Human adenovirus F
cgcacuucaagaaacac

SEQ ID NO: 1586746 - RNA, 14 nt, Human adenovirus F
ugccuccagcacug

SEQ ID NO: 1586747 - RNA, 17 nt, Human adenovirus F
uugcgcuaugugcagca

SEQ ID NO: 1586748 - RNA, 13 nt, Human adenovirus F
ccgacaacaaaaa

SEQ ID NO: 1586749 - RNA, 13 nt, Human adenovirus F
uacgcccaggagc

SEQ ID NO: 1586750 - RNA, 19 nt, Human adenovirus F
gcggaagaagaugaggagg

SEQ ID NO: 1586751 - RNA, 21 nt, Human adenovirus F
cuugaggagguguuggagaac

SEQ ID NO: 1586752 - RNA, 22 nt, Human adenovirus F
ggcauuaaaaacuuuggguccu

SEQ ID NO: 1586753 - RNA, 19 nt, Human adenovirus F
uggcgccggcgggaagagg

SEQ ID NO: 1586754 - RNA, 14 nt, Human adenovirus F
cauaggccauuuug

SEQ ID NO: 1586755 - RNA, 20 nt, Human adenovirus F
uuaauauccuucagagcauu

SEQ ID NO: 1586756 - RNA, 18 nt, Human adenovirus F
aacagcguagcacucccu

SEQ ID NO: 1586757 - RNA, 17 nt, Human adenovirus F
agcgacaaggcaccauc

SEQ ID NO: 1586758 - RNA, 17 nt, Human adenovirus F
uuagcgcacugguaaac

SEQ ID NO: 1586759 - RNA, 15 nt, Human adenovirus F
gucugccagagggug

SEQ ID NO: 1586760 - RNA, 14 nt, Human adenovirus F
acgggcuggcuucc

SEQ ID NO: 1586761 - RNA, 14 nt, Human adenovirus F
cgcccgccucccaa

SEQ ID NO: 1586762 - RNA, 13 nt, Human adenovirus F
cuguccagggagu

SEQ ID NO: 1586763 - RNA, 22 nt, Human adenovirus F
ggcggccauggaucgcauccug

SEQ ID NO: 1586764 - RNA, 16 nt, Human adenovirus F
gcaggacuuggcagaa

SEQ ID NO: 1586765 - RNA, 11 nt, Human adenovirus F
cuucugccagu

SEQ ID NO: 1586766 - RNA, 14 nt, Human adenovirus F
acaugaacacuucc

SEQ ID NO: 1586767 - RNA, 12 nt, Human adenovirus F
auuacugccagu

SEQ ID NO: 1586768 - RNA, 19 nt, Human adenovirus F
ucaaaaucuucaaacauua

SEQ ID NO: 1586769 - RNA, 16 nt, Human adenovirus F
ccgaggcacuguucaa

SEQ ID NO: 1586770 - RNA, 15 nt, Human adenovirus F
guggcauggcagcag

SEQ ID NO: 1586771 - RNA, 18 nt, Human adenovirus F
cgugugccauuguuaaca

SEQ ID NO: 1586772 - RNA, 21 nt, Human adenovirus F
caggagcagcgggaagagagg

SEQ ID NO: 1586773 - RNA, 11 nt, Human adenovirus F
ucgauuuccau

SEQ ID NO: 1586774 - RNA, 21 nt, Human adenovirus F
uacccagcugugguuaaauuu

SEQ ID NO: 1586775 - RNA, 13 nt, Human adenovirus F
gcguaacccgccg

SEQ ID NO: 1586776 - RNA, 19 nt, Human adenovirus F
cuggaguuggcuucugcca

SEQ ID NO: 1586777 - RNA, 22 nt, Human adenovirus F
gcagaggaaguuucagacgagg

SEQ ID NO: 1586778 - RNA, 12 nt, Human adenovirus F
gcucuguggaga

SEQ ID NO: 1586779 - RNA, 14 nt, Human adenovirus F
ccagccgcacucgc

SEQ ID NO: 1586780 - RNA, 11 nt, Human adenovirus F
cggaccugcaa

SEQ ID NO: 1586781 - RNA, 15 nt, Human adenovirus F
cgcgcacgacgggga

SEQ ID NO: 1586782 - RNA, 13 nt, Human adenovirus F
gucugcugcugcc

SEQ ID NO: 1586783 - RNA, 14 nt, Human adenovirus F
aguaacacaaacau

SEQ ID NO: 1586784 - RNA, 22 nt, Human adenovirus F
uucuguuauggaucaagugcuu

SEQ ID NO: 1586785 - RNA, 13 nt, Human adenovirus F
auacugcuccugg

SEQ ID NO: 1586786 - RNA, 12 nt, Human adenovirus F
acaugccacaga

SEQ ID NO: 1586787 - RNA, 21 nt, Human adenovirus F
ccaccagccggaggagugggc

SEQ ID NO: 1586788 - RNA, 17 nt, Human adenovirus F
ccggagagcgguccguc

SEQ ID NO: 1586789 - RNA, 16 nt, Human adenovirus F
ugccacucgaaaccaa

SEQ ID NO: 1586790 - RNA, 12 nt, Human adenovirus F
gaucagaaauuu

SEQ ID NO: 1586791 - RNA, 15 nt, Human adenovirus F
ugcagcgcacgcugg

SEQ ID NO: 1586792 - RNA, 14 nt, Human adenovirus F
ggcccugcaaagcc

SEQ ID NO: 1586793 - RNA, 21 nt, Human adenovirus F
ggcccugggcuuauuggcaug

SEQ ID NO: 1586794 - RNA, 18 nt, Human adenovirus F
gcacaggagauccgugga

SEQ ID NO: 1586795 - RNA, 18 nt, Human adenovirus F
aguccaaaugacuaacuc

SEQ ID NO: 1586796 - RNA, 16 nt, Human adenovirus F
ggaucgucgguggaua

SEQ ID NO: 1586797 - RNA, 20 nt, Human adenovirus F
cgcuguggacgacagccagc

SEQ ID NO: 1586798 - RNA, 23 nt, Human adenovirus F
guggauaccgcugcagcugcugc

SEQ ID NO: 1586799 - RNA, 14 nt, Human adenovirus F
agugcaggaagagg

SEQ ID NO: 1586800 - RNA, 17 nt, Human adenovirus F
cgucacuuccgccgcac

SEQ ID NO: 1586801 - RNA, 21 nt, Human adenovirus F
cggcacgcuccuuggcgguga

SEQ ID NO: 1586802 - RNA, 18 nt, Human adenovirus F
aagugaagaccaacugca

SEQ ID NO: 1586803 - RNA, 19 nt, Human adenovirus F
uccccagcgcccuggauac

SEQ ID NO: 1586804 - RNA, 20 nt, Human adenovirus F
uucggugacaaacaagcugu

SEQ ID NO: 1586805 - RNA, 19 nt, Human adenovirus F
cggggcuaacuggcagagc

SEQ ID NO: 1586806 - RNA, 12 nt, Human adenovirus F
auacacucccuu

SEQ ID NO: 1586807 - RNA, 14 nt, Human adenovirus F
uuuaauggaaacug

SEQ ID NO: 1586808 - RNA, 21 nt, Human adenovirus F
ccuuuucacccacccaccgcu

SEQ ID NO: 1586809 - RNA, 13 nt, Human adenovirus F
gccuucaggcagc

SEQ ID NO: 1586810 - RNA, 22 nt, Human adenovirus F
acgcaccaggucguaaugagga

SEQ ID NO: 1586811 - RNA, 13 nt, Human adenovirus F
uaaaaacaaccaa

SEQ ID NO: 1586812 - RNA, 12 nt, Human adenovirus F
acuagcgccccu

SEQ ID NO: 1586813 - RNA, 19 nt, Human adenovirus F
acaauuaaaggucuuaaag

SEQ ID NO: 1586814 - RNA, 14 nt, Human adenovirus F
cgggcaggagcccg

SEQ ID NO: 1586815 - RNA, 19 nt, Human adenovirus F
aacccacagcuagcuuuau

SEQ ID NO: 1586816 - RNA, 17 nt, Human adenovirus F
cgggcucuuggucagca

SEQ ID NO: 1586817 - RNA, 16 nt, Human adenovirus F
cucagacuccaacaau

SEQ ID NO: 1586818 - RNA, 16 nt, Human adenovirus F
ggaucuuaagcugcag

SEQ ID NO: 1586819 - RNA, 14 nt, Human adenovirus F
ucaccuacuaccac

SEQ ID NO: 1586820 - RNA, 19 nt, Human adenovirus F
ggaggugccccagagugag

SEQ ID NO: 1586821 - RNA, 22 nt, Human adenovirus F
ggaccuagaggacguggaggaa

SEQ ID NO: 1586822 - RNA, 12 nt, Human adenovirus F
acaaccagcgcu

SEQ ID NO: 1586823 - RNA, 14 nt, Human adenovirus F
gaacuugaagccau

SEQ ID NO: 1586824 - RNA, 16 nt, Human adenovirus F
ugggcauaacuucagc

SEQ ID NO: 1586825 - RNA, 15 nt, Human adenovirus F
acuuucuccacgucc

SEQ ID NO: 1586826 - RNA, 19 nt, Human adenovirus F
acccuccaguuuguggagg

SEQ ID NO: 1586827 - RNA, 21 nt, Human adenovirus F
acggccuuguaugggcagcau

SEQ ID NO: 1586828 - RNA, 13 nt, Human adenovirus F
ggacaagcucccu

SEQ ID NO: 1586829 - RNA, 17 nt, Human adenovirus F
guacgaacucagucugc

SEQ ID NO: 1586830 - RNA, 22 nt, Human adenovirus F
gcacuucaagaaacacaaacau

SEQ ID NO: 1586831 - RNA, 17 nt, Human adenovirus F
auaaaauauuguuauuu

SEQ ID NO: 1586832 - RNA, 22 nt, Human adenovirus F
caugagaucauaguugaggguu

SEQ ID NO: 1586833 - RNA, 19 nt, Human adenovirus F
acagcgaagauguuaacuu

SEQ ID NO: 1586834 - RNA, 18 nt, Human adenovirus F
cgaaccaaugcguucccg

SEQ ID NO: 1586835 - RNA, 14 nt, Human adenovirus F
gcguugcacgcucu

SEQ ID NO: 1586836 - RNA, 17 nt, Human adenovirus F
agacccgguacaggugg

SEQ ID NO: 1586837 - RNA, 23 nt, Human adenovirus F
ggacgucagaacggcgugcugga

SEQ ID NO: 1586838 - RNA, 20 nt, Human adenovirus F
cgugcgcacccugguggcgc

SEQ ID NO: 1586839 - RNA, 22 nt, Human adenovirus F
gucaaucucuucguccuggagu

SEQ ID NO: 1586840 - RNA, 14 nt, Human adenovirus F
cgggucgcagcagg

SEQ ID NO: 1586841 - RNA, 22 nt, Human adenovirus F
cuuuaaaaauagaaaacgaaaa

SEQ ID NO: 1586842 - RNA, 20 nt, Human adenovirus F
ccgcggucaacagcuggaac

SEQ ID NO: 1586843 - RNA, 23 nt, Human adenovirus F
gcggaccugcaauggcagcccag

SEQ ID NO: 1586844 - RNA, 17 nt, Human adenovirus F
cugccgcugcgcagcag

SEQ ID NO: 1586845 - RNA, 20 nt, Human adenovirus F
ccccuuacaaacaguaacaa

SEQ ID NO: 1586846 - RNA, 13 nt, Human adenovirus F
gaaauugauuuuc

SEQ ID NO: 1586847 - RNA, 13 nt, Human adenovirus F
cuccugcaauacu

SEQ ID NO: 1586848 - RNA, 15 nt, Human adenovirus F
aacgucaaugccaau

SEQ ID NO: 1586849 - RNA, 20 nt, Human adenovirus F
cgaagccuucaggcagcagc

SEQ ID NO: 1586850 - RNA, 18 nt, Human adenovirus F
ucgcucacccgcagcugc

SEQ ID NO: 1586851 - RNA, 12 nt, Human adenovirus F
gucucccaccuu

SEQ ID NO: 1586852 - RNA, 18 nt, Human adenovirus F
cagcugguaagcagccua

SEQ ID NO: 1586853 - RNA, 20 nt, Human adenovirus F
gcauaaaggggaccagcugu

SEQ ID NO: 1586854 - RNA, 14 nt, Human adenovirus F
uaggcauacaggcu

SEQ ID NO: 1586855 - RNA, 21 nt, Human adenovirus F
cucgcggccguuuaugggcac

SEQ ID NO: 1586856 - RNA, 21 nt, Human adenovirus F
uacccuccguuuacuucaacc

SEQ ID NO: 1586857 - RNA, 14 nt, Human adenovirus F
ucgcagcgggcagg

SEQ ID NO: 1586858 - RNA, 16 nt, Human adenovirus F
gggcacaguaaucaag

SEQ ID NO: 1586859 - RNA, 18 nt, Human adenovirus F
aaagacccauuuccaagc

SEQ ID NO: 1586860 - RNA, 18 nt, Human adenovirus F
ugaaaucacaguugggac

SEQ ID NO: 1586861 - RNA, 15 nt, Human adenovirus F
aucauauuagguuau

SEQ ID NO: 1586862 - RNA, 20 nt, Human adenovirus F
ugaucccgaagaggguacua

SEQ ID NO: 1586863 - RNA, 20 nt, Human adenovirus F
aauuaaccuugcauggugug

SEQ ID NO: 1586864 - RNA, 20 nt, Human adenovirus F
cuagggugugaaggcaaagg

SEQ ID NO: 1586865 - RNA, 13 nt, Human adenovirus F
gggugucugccag

SEQ ID NO: 1586866 - RNA, 21 nt, Human adenovirus F
cccacgauguaaccacagaca

SEQ ID NO: 1586867 - RNA, 16 nt, Human adenovirus F
guuuaaggagaugcaa

SEQ ID NO: 1586868 - RNA, 21 nt, Human adenovirus F
aguacucuucgcgguuugcug

SEQ ID NO: 1586869 - RNA, 13 nt, Human adenovirus F
agcucugaacacu

SEQ ID NO: 1586870 - RNA, 19 nt, Human adenovirus F
gguuaagagaagaagaugc

SEQ ID NO: 1586871 - RNA, 23 nt, Human adenovirus F
gacaccacccggguuuaccuggu

SEQ ID NO: 1586872 - RNA, 18 nt, Human adenovirus F
ccgcgcuaaaucuuccuc

SEQ ID NO: 1586873 - RNA, 17 nt, Human adenovirus F
caaaaaaaucaaggcca

SEQ ID NO: 1586874 - RNA, 16 nt, Human adenovirus F
auuucuuuuaaaaaaa

SEQ ID NO: 1586875 - RNA, 15 nt, Human adenovirus F
aguaacuuuugccac

SEQ ID NO: 1586876 - RNA, 24 nt, Human adenovirus F
caccuacacggaguaucagaaugu

SEQ ID NO: 1586877 - RNA, 21 nt, Human adenovirus F
cgcuugccacccgcgcaacac

SEQ ID NO: 1586878 - RNA, 21 nt, Human adenovirus F
cggaggcaaaacuggaacgcg

SEQ ID NO: 1586879 - RNA, 21 nt, Human adenovirus F
acaagcaaagacagagcuuua

SEQ ID NO: 1586880 - RNA, 15 nt, Human adenovirus F
caaaacaaacuccuu

SEQ ID NO: 1586881 - RNA, 13 nt, Human adenovirus F
uguuggcggcccu

SEQ ID NO: 1586882 - RNA, 22 nt, Human adenovirus F
cguuguggagucacugcuaccu

SEQ ID NO: 1586883 - RNA, 21 nt, Human adenovirus F
acacuaugguaaaaacccugu

SEQ ID NO: 1586884 - RNA, 16 nt, Human adenovirus F
gguacaggugggcuug

SEQ ID NO: 1586885 - RNA, 23 nt, Human adenovirus F
gccaugcugaauauugcggagcc

SEQ ID NO: 1586886 - RNA, 21 nt, Human adenovirus F
acuucuuaauaaagacacaau

SEQ ID NO: 1586887 - RNA, 18 nt, Human adenovirus F
uaaagcuuaccuuaaauu

SEQ ID NO: 1586888 - RNA, 20 nt, Human adenovirus F
ccuccaguuuguggaggagu

SEQ ID NO: 1586889 - RNA, 20 nt, Human adenovirus F
cuuauuucgcccgacaacaa

SEQ ID NO: 1586890 - RNA, 20 nt, Human adenovirus F
agguagccccuuggugaagg

SEQ ID NO: 1586891 - RNA, 15 nt, Human adenovirus F
cgagccaaagugcaa

SEQ ID NO: 1586892 - RNA, 12 nt, Human adenovirus F
gggaggcagcag

SEQ ID NO: 1586893 - RNA, 16 nt, Human adenovirus F
ggcggaugguggcaag

SEQ ID NO: 1586894 - RNA, 17 nt, Human adenovirus F
cccggcggcgggugcag

SEQ ID NO: 1586895 - RNA, 22 nt, Human adenovirus F
gagcuuggauuaggaagggcaa

SEQ ID NO: 1586896 - RNA, 19 nt, Human adenovirus F
ugucgguuacuucuucagc

SEQ ID NO: 1586897 - RNA, 16 nt, Human adenovirus F
uggcaacaugggagug

SEQ ID NO: 1586898 - RNA, 18 nt, Human adenovirus F
cgcaugccuccagcacug

SEQ ID NO: 1586899 - RNA, 13 nt, Human adenovirus F
aggccuggaacag

SEQ ID NO: 1586900 - RNA, 16 nt, Human adenovirus F
gucgagcuagugaaac

SEQ ID NO: 1586901 - RNA, 19 nt, Human adenovirus F
uagugaaacaugaggagga

SEQ ID NO: 1586902 - RNA, 14 nt, Human adenovirus F
guaacugagccuga

SEQ ID NO: 1586903 - RNA, 14 nt, Human adenovirus F
gaccauauccauua

SEQ ID NO: 1586904 - RNA, 18 nt, Human adenovirus F
guugcccgccagcuggca

SEQ ID NO: 1586905 - RNA, 19 nt, Human adenovirus F
acccgguacaggugggcuu

SEQ ID NO: 1586906 - RNA, 17 nt, Human adenovirus F
gauggcgugggaguugg

SEQ ID NO: 1586907 - RNA, 17 nt, Human adenovirus F
gccagccaaugggcucc

SEQ ID NO: 1586908 - RNA, 19 nt, Human adenovirus F
gccagcauggcucagcccc

SEQ ID NO: 1586909 - RNA, 22 nt, Human adenovirus F
cauuacuucacguuacuuaggc

SEQ ID NO: 1586910 - RNA, 21 nt, Human adenovirus F
cccccaccggcuccugugcag

SEQ ID NO: 1586911 - RNA, 18 nt, Human adenovirus F
aaucgguaccuuugagau

SEQ ID NO: 1586912 - RNA, 14 nt, Human adenovirus F
gcuguacuccauua

SEQ ID NO: 1586913 - RNA, 13 nt, Human adenovirus F
cauggcucagccc

SEQ ID NO: 1586914 - RNA, 24 nt, Human adenovirus F
aauguaacaugaccaaggacuggu

SEQ ID NO: 1586915 - RNA, 18 nt, Human adenovirus F
acaccgucuccaucgccg

SEQ ID NO: 1586916 - RNA, 15 nt, Human adenovirus F
gcucgcuacauccau

SEQ ID NO: 1586917 - RNA, 17 nt, Human adenovirus F
ugaagcccgcaacggcg

SEQ ID NO: 1586918 - RNA, 21 nt, Human adenovirus F
accguucuaugcuccugggua

SEQ ID NO: 1586919 - RNA, 22 nt, Human adenovirus F
ucacaaagcugugagcgccagc

SEQ ID NO: 1586920 - RNA, 14 nt, Human adenovirus F
ccagcauggcucag

SEQ ID NO: 1586921 - RNA, 16 nt, Human adenovirus F
agcugcugccgcgucu

SEQ ID NO: 1586922 - RNA, 13 nt, Human adenovirus F
cugggcggcggcc

SEQ ID NO: 1586923 - RNA, 17 nt, Human adenovirus F
ccuucgccgcagucucc

SEQ ID NO: 1586924 - RNA, 14 nt, Human adenovirus F
cguuguggacuucc

SEQ ID NO: 1586925 - RNA, 17 nt, Human adenovirus F
gcagacgcaauggaaca

SEQ ID NO: 1586926 - RNA, 21 nt, Human adenovirus F
cugaauuuuuagguuggcaau

SEQ ID NO: 1586927 - RNA, 20 nt, Human adenovirus F
aaauuugcugacagcuggga

SEQ ID NO: 1586928 - RNA, 19 nt, Human adenovirus F
ugacaaacgcuuuccgggu

SEQ ID NO: 1586929 - RNA, 13 nt, Human adenovirus F
ggccugguaacga

SEQ ID NO: 1586930 - RNA, 19 nt, Human adenovirus F
ccuaacggcaccugcgaaa

SEQ ID NO: 1586931 - RNA, 19 nt, Human adenovirus F
ggaagccccacggcauggg

SEQ ID NO: 1586932 - RNA, 17 nt, Human adenovirus F
ucugcagcauugccacu

SEQ ID NO: 1586933 - RNA, 17 nt, Human adenovirus F
aaaaacuuacaaucauu

SEQ ID NO: 1586934 - RNA, 17 nt, Human adenovirus F
cagugcuuggaagagca

SEQ ID NO: 1586935 - RNA, 19 nt, Human adenovirus F
ucuucaaacauuaagcugc

SEQ ID NO: 1586936 - RNA, 18 nt, Human adenovirus F
ugacccacaaucuucauc

SEQ ID NO: 1586937 - RNA, 23 nt, Human adenovirus F
accucugcgcugcaaacaugcuu

SEQ ID NO: 1586938 - RNA, 15 nt, Human adenovirus F
uucgcgcaacuuuug

SEQ ID NO: 1586939 - RNA, 15 nt, Human adenovirus F
ugagcgccagccgcc

SEQ ID NO: 1586940 - RNA, 15 nt, Human adenovirus F
gacugggcggcggcc

SEQ ID NO: 1586941 - RNA, 14 nt, Human adenovirus F
agcgcagcaccgca

SEQ ID NO: 1586942 - RNA, 21 nt, Human adenovirus F
cuguuccaacggugugccucu

SEQ ID NO: 1586943 - RNA, 22 nt, Human adenovirus F
auggggguaccaacuugcaaaa

SEQ ID NO: 1586944 - RNA, 13 nt, Human adenovirus F
ccgagguauccag

SEQ ID NO: 1586945 - RNA, 17 nt, Human adenovirus F
caaaaacucugugaagu

SEQ ID NO: 1586946 - RNA, 14 nt, Human adenovirus F
gccacaauuuacaa

SEQ ID NO: 1586947 - RNA, 14 nt, Human adenovirus F
uuuaaccuuaaaau

SEQ ID NO: 1586948 - RNA, 15 nt, Human adenovirus F
gaucauguccaccug

SEQ ID NO: 1586949 - RNA, 20 nt, Human adenovirus F
ugaauauugcggagccugag

SEQ ID NO: 1586950 - RNA, 15 nt, Human adenovirus F
ggcugaccggcgcug

SEQ ID NO: 1586951 - RNA, 17 nt, Human adenovirus F
uaaggaggaggcuaaug

SEQ ID NO: 1586952 - RNA, 20 nt, Human adenovirus F
ugcaaaaugugcagcaaaaa

SEQ ID NO: 1586953 - RNA, 17 nt, Human adenovirus F
uaugcuauuuuccagca

SEQ ID NO: 1586954 - RNA, 21 nt, Human adenovirus F
gaguuuaaugucucgucgcca

SEQ ID NO: 1586955 - RNA, 17 nt, Human adenovirus F
cccagcgcccgggcccu

SEQ ID NO: 1586956 - RNA, 16 nt, Human adenovirus F
ggugccuucaccuggg

SEQ ID NO: 1586957 - RNA, 16 nt, Human adenovirus F
gcaucggaacccucca

SEQ ID NO: 1586958 - RNA, 22 nt, Human adenovirus F
ccuuggccaccacgggaguugc

SEQ ID NO: 1586959 - RNA, 15 nt, Human adenovirus F
cuuuugaugguggcu

SEQ ID NO: 1586960 - RNA, 13 nt, Human adenovirus F
aauuccacuggca

SEQ ID NO: 1586961 - RNA, 14 nt, Human adenovirus F
gccguggacgcacg

SEQ ID NO: 1586962 - RNA, 16 nt, Human adenovirus F
cggaaacaaaaaacuu

SEQ ID NO: 1586963 - RNA, 14 nt, Human adenovirus F
ccaauaccagcaaa

SEQ ID NO: 1586964 - RNA, 24 nt, Human adenovirus F
caccgcccccacuguugccguggc

SEQ ID NO: 1586965 - RNA, 16 nt, Human adenovirus F
gaggaacguauuuugc

SEQ ID NO: 1586966 - RNA, 21 nt, Human adenovirus F
cucacguguuagguacuauaa

SEQ ID NO: 1586967 - RNA, 14 nt, Human adenovirus F
acggauuuuugugg

SEQ ID NO: 1586968 - RNA, 15 nt, Human adenovirus F
cuauaauagcaccaa

SEQ ID NO: 1586969 - RNA, 18 nt, Human adenovirus F
ggcacaccuuugggcucc

SEQ ID NO: 1586970 - RNA, 19 nt, Human adenovirus F
ggcaggagcugcgggccgg

SEQ ID NO: 1586971 - RNA, 19 nt, Human adenovirus F
gguaaaaaugccaggcagc

SEQ ID NO: 1586972 - RNA, 17 nt, Human adenovirus F
agccgaugcccaacgcu

SEQ ID NO: 1586973 - RNA, 19 nt, Human adenovirus F
guagacgcuggaagaggua

SEQ ID NO: 1586974 - RNA, 13 nt, Human adenovirus F
gcagcaguccguc

SEQ ID NO: 1586975 - RNA, 18 nt, Human adenovirus F
cggccaaguagcauuuua

SEQ ID NO: 1586976 - RNA, 22 nt, Human adenovirus F
ggucccuucuggaccuggggcg

SEQ ID NO: 1586977 - RNA, 17 nt, Human adenovirus F
gcccgggcacaucagaa

SEQ ID NO: 1586978 - RNA, 19 nt, Human adenovirus F
auucccaaauaauuuuccg

SEQ ID NO: 1586979 - RNA, 19 nt, Human adenovirus F
gcgcgcucgucgggaagca

SEQ ID NO: 1586980 - RNA, 18 nt, Human adenovirus F
gaaaaccggcuggggcag

SEQ ID NO: 1586981 - RNA, 18 nt, Human adenovirus F
aaccccuuugugcccucc

SEQ ID NO: 1586982 - RNA, 17 nt, Human adenovirus F
aacaguaacaacuccuu

SEQ ID NO: 1586983 - RNA, 16 nt, Human adenovirus F
aggcagcagccccagg

SEQ ID NO: 1586984 - RNA, 14 nt, Human adenovirus F
uuucuccuccccuu

SEQ ID NO: 1586985 - RNA, 14 nt, Human adenovirus F
agagcuaaggagga

SEQ ID NO: 1586986 - RNA, 15 nt, Human adenovirus F
gcucuuccaagcugc

SEQ ID NO: 1586987 - RNA, 18 nt, Human adenovirus F
gcaggguuuuugagcaug

SEQ ID NO: 1586988 - RNA, 20 nt, Human adenovirus F
uuuuacgcggggcaggagcu

SEQ ID NO: 1586989 - RNA, 16 nt, Human adenovirus F
accaaggacugguucc

SEQ ID NO: 1586990 - RNA, 12 nt, Human adenovirus F
gaucagcgggca

SEQ ID NO: 1586991 - RNA, 18 nt, Human adenovirus F
guaccgccaaaaaagcag

SEQ ID NO: 1586992 - RNA, 23 nt, Human adenovirus F
uuuaaaacuuuauggauguuuuc

SEQ ID NO: 1586993 - RNA, 20 nt, Human adenovirus F
ccuggaagagggcgaggggc

SEQ ID NO: 1586994 - RNA, 19 nt, Human adenovirus F
acugcgucgucggcucugg

SEQ ID NO: 1586995 - RNA, 13 nt, Human adenovirus F
auggaacuaacug

SEQ ID NO: 1586996 - RNA, 14 nt, Human adenovirus F
gcgagcagagccca

SEQ ID NO: 1586997 - RNA, 18 nt, Human adenovirus F
uguggggcgugcgagccc

SEQ ID NO: 1586998 - RNA, 19 nt, Human adenovirus F
ggccuuguaugggcagcau

SEQ ID NO: 1586999 - RNA, 13 nt, Human adenovirus F
cccuucccgacau

SEQ ID NO: 1587000 - RNA, 22 nt, Human adenovirus F
aacaaccuucaaacccagccgc

SEQ ID NO: 1587001 - RNA, 18 nt, Human adenovirus F
ccuguucuaaaaccaaac

SEQ ID NO: 1587002 - RNA, 16 nt, Human adenovirus F
cuagcaaacagugcca

SEQ ID NO: 1587003 - RNA, 21 nt, Human adenovirus F
gccucaugagcugggagaaag

SEQ ID NO: 1587004 - RNA, 16 nt, Human adenovirus F
cgcggaagaagaugag

SEQ ID NO: 1587005 - RNA, 15 nt, Human adenovirus F
gagucuggcagcagu

SEQ ID NO: 1587006 - RNA, 14 nt, Human adenovirus F
agcgggcaggagcc

SEQ ID NO: 1587007 - RNA, 20 nt, Human adenovirus F
cucuuauuguucaaggaaac

SEQ ID NO: 1587008 - RNA, 13 nt, Human adenovirus F
cguuaggcuuuaa

SEQ ID NO: 1587009 - RNA, 18 nt, Human adenovirus F
acgccgaggcacuguuca

SEQ ID NO: 1587010 - RNA, 21 nt, Human adenovirus F
uuucacguaguaucucauccc

SEQ ID NO: 1587011 - RNA, 17 nt, Human adenovirus F
gcggaugguggcaagga

SEQ ID NO: 1587012 - RNA, 21 nt, Human adenovirus F
agauguccuuaaggaggaggc

SEQ ID NO: 1587013 - RNA, 20 nt, Human adenovirus F
uucaccuuuuuacccugacc

SEQ ID NO: 1587014 - RNA, 20 nt, Human adenovirus F
uacggcggcgccaaacggcg

SEQ ID NO: 1587015 - RNA, 13 nt, Human adenovirus F
gcacguuugacaa

SEQ ID NO: 1587016 - RNA, 22 nt, Human adenovirus F
uaugaugaaaguagaagucucu

SEQ ID NO: 1587017 - RNA, 22 nt, Human adenovirus F
uggccgacaagguggcggccau

SEQ ID NO: 1587018 - RNA, 13 nt, Human adenovirus F
gacagucugccaa

SEQ ID NO: 1587019 - RNA, 18 nt, Human adenovirus F
uaagggccgaugccaggc

SEQ ID NO: 1587020 - RNA, 23 nt, Human adenovirus F
ccugggguagggugucugccaga

SEQ ID NO: 1587021 - RNA, 19 nt, Human adenovirus F
ugggaggaagugacggggc

SEQ ID NO: 1587022 - RNA, 23 nt, Human adenovirus F
cauuaaaaaucuccugcuccugc

SEQ ID NO: 1587023 - RNA, 16 nt, Human adenovirus F
acacuuuugccaaagu

SEQ ID NO: 1587024 - RNA, 15 nt, Human adenovirus F
cucauucgcacggcg

SEQ ID NO: 1587025 - RNA, 16 nt, Human adenovirus F
gcuggggaauggagcu

SEQ ID NO: 1587026 - RNA, 14 nt, Human adenovirus F
gcuguaccaggagg

SEQ ID NO: 1587027 - RNA, 14 nt, Human adenovirus F
cagcgacagggcgc

SEQ ID NO: 1587028 - RNA, 14 nt, Human adenovirus F
ccacucgaaaccaa

SEQ ID NO: 1587029 - RNA, 14 nt, Human adenovirus F
uggcucuguggaga

SEQ ID NO: 1587030 - RNA, 13 nt, Human adenovirus F
guaagcuaaggac

SEQ ID NO: 1587031 - RNA, 12 nt, Human adenovirus F
agaauaauacag

SEQ ID NO: 1587032 - RNA, 15 nt, Human adenovirus F
uucgccuggagaggc

SEQ ID NO: 1587033 - RNA, 18 nt, Human adenovirus F
ucugaccaacuagaaauc

SEQ ID NO: 1587034 - RNA, 20 nt, Human adenovirus F
ugcaauggcagcccagcgcc

SEQ ID NO: 1587035 - RNA, 17 nt, Human adenovirus F
accccuaugacaccucc

SEQ ID NO: 1587036 - RNA, 16 nt, Human adenovirus F
ccuugcaagcagcucg

SEQ ID NO: 1587037 - RNA, 15 nt, Human adenovirus F
caggcaguggacagc

SEQ ID NO: 1587038 - RNA, 17 nt, Human adenovirus F
acuguugccguggcuac

SEQ ID NO: 1587039 - RNA, 14 nt, Human adenovirus F
ucaucgccgccgcc

SEQ ID NO: 1587040 - RNA, 17 nt, Human adenovirus F
cagcaugagcaagcgca

SEQ ID NO: 1587041 - RNA, 15 nt, Human adenovirus F
agauaugucugccaa

SEQ ID NO: 1587042 - RNA, 16 nt, Human adenovirus F
uaccacuaccccuacc

SEQ ID NO: 1587043 - RNA, 22 nt, Human adenovirus F
cuacgugcacaaagcucugggc

SEQ ID NO: 1587044 - RNA, 22 nt, Human adenovirus F
ccgacauguuugucuuuaaaaa

SEQ ID NO: 1587045 - RNA, 23 nt, Human adenovirus F
aaccuauugguuccauggcccga

SEQ ID NO: 1587046 - RNA, 22 nt, Human adenovirus F
ucaagcccuacaccaaugcaaa

SEQ ID NO: 1587047 - RNA, 17 nt, Human adenovirus F
agguggccauugggcug

SEQ ID NO: 1587048 - RNA, 19 nt, Human adenovirus F
ucggagccaaccuccgaaa

SEQ ID NO: 1587049 - RNA, 14 nt, Human adenovirus F
cuuuauugccaccg

SEQ ID NO: 1587050 - RNA, 18 nt, Human adenovirus F
cgcagcagauccuucccg

SEQ ID NO: 1587051 - RNA, 21 nt, Human adenovirus F
cugacgggggaggcacaccuu

SEQ ID NO: 1587052 - RNA, 22 nt, Human adenovirus F
gcgguugcggccacgcgagaga

SEQ ID NO: 1587053 - RNA, 17 nt, Human adenovirus F
acacgaaaaccggcugg

SEQ ID NO: 1587054 - RNA, 20 nt, Human adenovirus F
gccuguggaguggcauuaaa

SEQ ID NO: 1587055 - RNA, 14 nt, Human adenovirus F
gcuggaggcccuug

SEQ ID NO: 1587056 - RNA, 21 nt, Human adenovirus F
accucugacaaacacgcuccc

SEQ ID NO: 1587057 - RNA, 15 nt, Human adenovirus F
cagucugccaacacu

SEQ ID NO: 1587058 - RNA, 15 nt, Human adenovirus F
auuuauuucuuuugc

SEQ ID NO: 1587059 - RNA, 17 nt, Human adenovirus F
gguguauaaaagggggc

SEQ ID NO: 1587060 - RNA, 21 nt, Human adenovirus F
uggaggaagaaaccaucgcca

SEQ ID NO: 1587061 - RNA, 17 nt, Human adenovirus F
ugcccaccguuccgccc

SEQ ID NO: 1587062 - RNA, 19 nt, Human adenovirus F
ccgucaucucuacagcccc

SEQ ID NO: 1587063 - RNA, 15 nt, Human adenovirus F
aucggcaccagccag

SEQ ID NO: 1587064 - RNA, 22 nt, Human adenovirus F
cagccaaugggcuccagcgagc

SEQ ID NO: 1587065 - RNA, 14 nt, Human adenovirus F
gcgggcggcgccag

SEQ ID NO: 1587066 - RNA, 14 nt, Human adenovirus F
uuacagcccccacc

SEQ ID NO: 1587067 - RNA, 22 nt, Human adenovirus F
agaaaauccucagugucuugcc

SEQ ID NO: 1587068 - RNA, 19 nt, Human adenovirus F
agucuguuuggugggcuga

SEQ ID NO: 1587069 - RNA, 17 nt, Human adenovirus F
cccgcaacggcgcagca

SEQ ID NO: 1587070 - RNA, 18 nt, Human adenovirus F
acgccuuacauguggagc

SEQ ID NO: 1587071 - RNA, 13 nt, Human adenovirus F
caacgugcaggcc

SEQ ID NO: 1587072 - RNA, 22 nt, Human adenovirus F
acaugcuuaugcgcuguacugu

SEQ ID NO: 1587073 - RNA, 14 nt, Human adenovirus F
ugcuaacccucaaa

SEQ ID NO: 1587074 - RNA, 20 nt, Human adenovirus F
caggaggacuaugucagcuu

SEQ ID NO: 1587075 - RNA, 16 nt, Human adenovirus F
acgcaagcgaaugccc

SEQ ID NO: 1587076 - RNA, 20 nt, Human adenovirus F
uauuuguauaaucuuaaaac

SEQ ID NO: 1587077 - RNA, 14 nt, Human adenovirus F
ggagugccgccggu

SEQ ID NO: 1587078 - RNA, 13 nt, Human adenovirus F
cucaccuggcaaa

SEQ ID NO: 1587079 - RNA, 14 nt, Human adenovirus F
aaacggugaaauga

SEQ ID NO: 1587080 - RNA, 19 nt, Human adenovirus F
gugggccgcugaaagacgu

SEQ ID NO: 1587081 - RNA, 20 nt, Human adenovirus F
gggcaucgucauucuucagu

SEQ ID NO: 1587082 - RNA, 16 nt, Human adenovirus F
agauuccaccaaaggu

SEQ ID NO: 1587083 - RNA, 17 nt, Human adenovirus F
cagcugcguacggacca

SEQ ID NO: 1587084 - RNA, 18 nt, Human adenovirus F
uggcgccggcgggaagag

SEQ ID NO: 1587085 - RNA, 12 nt, Human adenovirus F
agccaaugggcu

SEQ ID NO: 1587086 - RNA, 13 nt, Human adenovirus F
ccgcugcagcugc

SEQ ID NO: 1587087 - RNA, 23 nt, Human adenovirus F
uuuccagcagcaccaccugcccu

SEQ ID NO: 1587088 - RNA, 20 nt, Human adenovirus F
gcuaaaggaccaaaacuuuc

SEQ ID NO: 1587089 - RNA, 21 nt, Human adenovirus F
cacaaagcugugagcgccagc

SEQ ID NO: 1587090 - RNA, 9 nt, Human adenovirus F
gaggaggag

SEQ ID NO: 1587091 - RNA, 16 nt, Human adenovirus F
aaucagaugcauuuug

SEQ ID NO: 1587092 - RNA, 20 nt, Human adenovirus F
accugugggucgcagcaggu

SEQ ID NO: 1587093 - RNA, 16 nt, Human adenovirus F
ucaggcagcagcccca

SEQ ID NO: 1587094 - RNA, 18 nt, Human adenovirus F
aacgcccgcuagcucuau

SEQ ID NO: 1587095 - RNA, 17 nt, Human adenovirus F
ccgcggacgucaagccc

SEQ ID NO: 1587096 - RNA, 20 nt, Human adenovirus F
uguauuuguauaaucuuaaa

SEQ ID NO: 1587097 - RNA, 16 nt, Human adenovirus F
guagggauugaguggg

SEQ ID NO: 1587098 - RNA, 22 nt, Human adenovirus F
guggaaccaggcaguggacagc

SEQ ID NO: 1587099 - RNA, 20 nt, Human adenovirus F
gcagcagauccuucccguga

SEQ ID NO: 1587100 - RNA, 23 nt, Human adenovirus F
gcuuuaacaacacaggagcuuua

SEQ ID NO: 1587101 - RNA, 17 nt, Human adenovirus F
augggccuggcagcugg

SEQ ID NO: 1587102 - RNA, 11 nt, Human adenovirus F
ucccaaagucg

SEQ ID NO: 1587103 - RNA, 15 nt, Human adenovirus F
cauagcugucucacc

SEQ ID NO: 1587104 - RNA, 16 nt, Human adenovirus F
acauuaugagcaaaga

SEQ ID NO: 1587105 - RNA, 16 nt, Human adenovirus F
uaccaccccagcacuu

SEQ ID NO: 1587106 - RNA, 15 nt, Human adenovirus F
caagaaauacaaagg

SEQ ID NO: 1587107 - RNA, 19 nt, Human adenovirus F
acgugaccgagcagcugcg

SEQ ID NO: 1587108 - RNA, 22 nt, Human adenovirus F
ucaaucagcggcuggaaaauag

SEQ ID NO: 1587109 - RNA, 16 nt, Human adenovirus F
ugccuuucucccaggc

SEQ ID NO: 1587110 - RNA, 13 nt, Human adenovirus F
gcccgccagcugg

SEQ ID NO: 1587111 - RNA, 14 nt, Human adenovirus F
ggcgguggcgcagc

SEQ ID NO: 1587112 - RNA, 12 nt, Human adenovirus F
acguucucuccc

SEQ ID NO: 1587113 - RNA, 18 nt, Human adenovirus F
cagauccuucccgugaca

SEQ ID NO: 1587114 - RNA, 16 nt, Human adenovirus F
accaguccgggccaga

SEQ ID NO: 1587115 - RNA, 20 nt, Human adenovirus F
auagccggugcacuugggga

SEQ ID NO: 1587116 - RNA, 19 nt, Human adenovirus F
uuuaagaaacgaacacgcu

SEQ ID NO: 1587117 - RNA, 18 nt, Human adenovirus F
cagcgcgugaccaucacu

SEQ ID NO: 1587118 - RNA, 22 nt, Human adenovirus F
aacuccuuggguuuagccacau

SEQ ID NO: 1587119 - RNA, 17 nt, Human adenovirus F
auuaacauuaggcucaa

SEQ ID NO: 1587120 - RNA, 18 nt, Human adenovirus F
uuaaguauucaccaccuu

SEQ ID NO: 1587121 - RNA, 19 nt, Human adenovirus F
cagccugcgucgggcucua

SEQ ID NO: 1587122 - RNA, 22 nt, Human adenovirus F
uggaagagggcgaggggcuggc

SEQ ID NO: 1587123 - RNA, 17 nt, Human adenovirus F
cguuggagagcaguuug

SEQ ID NO: 1587124 - RNA, 19 nt, Human adenovirus F
guggauaccgcugcagcug

SEQ ID NO: 1587125 - RNA, 18 nt, Human adenovirus F
cagucgcagcgcaucacc

SEQ ID NO: 1587126 - RNA, 17 nt, Human adenovirus F
ucuggaaucagcaucuu

SEQ ID NO: 1587127 - RNA, 23 nt, Human adenovirus F
cgcaauggucuuacaugcacauc

SEQ ID NO: 1587128 - RNA, 23 nt, Human adenovirus F
auccuucccgugacagaaaucaa

SEQ ID NO: 1587129 - RNA, 13 nt, Human adenovirus F
ggaucuggaggaa

SEQ ID NO: 1587130 - RNA, 15 nt, Human adenovirus F
gcgcuuugcgcaggc

SEQ ID NO: 1587131 - RNA, 17 nt, Human adenovirus F
cgugucaccugcaguuc

SEQ ID NO: 1587132 - RNA, 11 nt, Human adenovirus F
guacacuggcu

SEQ ID NO: 1587133 - RNA, 19 nt, Human adenovirus F
guggggccccugaggcagc

SEQ ID NO: 1587134 - RNA, 11 nt, Human adenovirus F
ucuuugccacc

SEQ ID NO: 1587135 - RNA, 14 nt, Human adenovirus F
gcugcagccagacu

SEQ ID NO: 1587136 - RNA, 22 nt, Human adenovirus F
cgguggcucugcagcagcgccc

SEQ ID NO: 1587137 - RNA, 18 nt, Human adenovirus F
aaaccuguucuaaaacca

SEQ ID NO: 1587138 - RNA, 19 nt, Human adenovirus F
cuggccaacugccaccucc

SEQ ID NO: 1587139 - RNA, 15 nt, Human adenovirus F
caauuugcuaacacu

SEQ ID NO: 1587140 - RNA, 23 nt, Human adenovirus F
uucccaaaaaaagaauuacuuuu

SEQ ID NO: 1587141 - RNA, 23 nt, Human adenovirus F
cuacaccccccgccuuacauuga

SEQ ID NO: 1587142 - RNA, 23 nt, Human adenovirus F
gagcuagugaaacaugaggagga

SEQ ID NO: 1587143 - RNA, 19 nt, Human adenovirus F
aaggugggcauaacuucag

SEQ ID NO: 1587144 - RNA, 23 nt, Human adenovirus F
uucagacgaggaggcggaggagc

SEQ ID NO: 1587145 - RNA, 23 nt, Human adenovirus F
cuauuauccguuggaauuuuccu

SEQ ID NO: 1587146 - RNA, 20 nt, Human adenovirus F
aauguaacaugaccaaggac

SEQ ID NO: 1587147 - RNA, 23 nt, Human adenovirus F
auuaauaaagcuuaccuuaaauu

SEQ ID NO: 1587148 - RNA, 21 nt, Human adenovirus F
aaaaauuacagccaagucaaa

SEQ ID NO: 1587149 - RNA, 14 nt, Human adenovirus F
aaaacucaacguua

SEQ ID NO: 1587150 - RNA, 15 nt, Human adenovirus F
auaaucuuaaaacug

SEQ ID NO: 1587151 - RNA, 21 nt, Human adenovirus F
aacaagaaggugcuuccagcc

SEQ ID NO: 1587152 - RNA, 22 nt, Human adenovirus F
cuauuugggaggggaggacgac

SEQ ID NO: 1587153 - RNA, 18 nt, Human adenovirus F
ccaagcugcggaaaugcu

SEQ ID NO: 1587154 - RNA, 15 nt, Human adenovirus F
acgggagggacaagc

SEQ ID NO: 1587155 - RNA, 19 nt, Human adenovirus F
caaggacagucugccaaca

SEQ ID NO: 1587156 - RNA, 23 nt, Human adenovirus F
acaaccagcuuaguauuaacacu

SEQ ID NO: 1587157 - RNA, 21 nt, Human adenovirus F
ggaucccucagagcugcaaga

SEQ ID NO: 1587158 - RNA, 14 nt, Human adenovirus F
gucacucuccgccg

SEQ ID NO: 1587159 - RNA, 16 nt, Human adenovirus F
uccacguaccagaaag

SEQ ID NO: 1587160 - RNA, 16 nt, Human adenovirus F
aaaaagguucugaagu

SEQ ID NO: 1587161 - RNA, 15 nt, Human adenovirus F
auacguaaaugugcc

SEQ ID NO: 1587162 - RNA, 16 nt, Human adenovirus F
aaaaacuugcaaggaa

SEQ ID NO: 1587163 - RNA, 20 nt, Human adenovirus F
ccugucaugaaaguuccucu

SEQ ID NO: 1587164 - RNA, 18 nt, Human adenovirus F
ccccggcggcgggugcag

SEQ ID NO: 1587165 - RNA, 19 nt, Human adenovirus F
gguauaggcuugugcggcu

SEQ ID NO: 1587166 - RNA, 23 nt, Human adenovirus F
ucaugucccaccacauuggccac

SEQ ID NO: 1587167 - RNA, 16 nt, Human adenovirus F
cugacgggggaggcac

SEQ ID NO: 1587168 - RNA, 22 nt, Human adenovirus F
aaugccuaccucugacaaacac

SEQ ID NO: 1587169 - RNA, 21 nt, Human adenovirus F
cgguauagccggugcacuugg

SEQ ID NO: 1587170 - RNA, 17 nt, Human adenovirus F
ggcauguacggcggcgc

SEQ ID NO: 1587171 - RNA, 21 nt, Human adenovirus F
ugcaccgcgcggcggccauga

SEQ ID NO: 1587172 - RNA, 15 nt, Human adenovirus F
uuugccuucuuuucu

SEQ ID NO: 1587173 - RNA, 18 nt, Human adenovirus F
acaauccuaacaaaaacu

SEQ ID NO: 1587174 - RNA, 21 nt, Human adenovirus F
gcauguuuucuccauaccaga

SEQ ID NO: 1587175 - RNA, 17 nt, Human adenovirus F
auccagcaacucugaac

SEQ ID NO: 1587176 - RNA, 19 nt, Human adenovirus F
aaccgggaaaaccuuuuca

SEQ ID NO: 1587177 - RNA, 13 nt, Human adenovirus F
cuuaccagagcca

SEQ ID NO: 1587178 - RNA, 17 nt, Human adenovirus F
ucaaacaacaaaaucag

SEQ ID NO: 1587179 - RNA, 21 nt, Human adenovirus F
ugcaguccacuuaacagcucc

SEQ ID NO: 1587180 - RNA, 16 nt, Human adenovirus F
aucuuaagcugcagcc

SEQ ID NO: 1587181 - RNA, 15 nt, Human adenovirus F
gcugcaaucuugaau

SEQ ID NO: 1587182 - RNA, 19 nt, Human adenovirus F
cauaacuaaaaaaacucca

SEQ ID NO: 1587183 - RNA, 19 nt, Human adenovirus F
gucauacgcuagaccaaca

SEQ ID NO: 1587184 - RNA, 13 nt, Human adenovirus F
ggagggauuuaau

SEQ ID NO: 1587185 - RNA, 23 nt, Human adenovirus F
ugacagcauuaaccuguaugcca

SEQ ID NO: 1587186 - RNA, 19 nt, Human adenovirus F
gcgcaacuuuugcaccagg

SEQ ID NO: 1587187 - RNA, 17 nt, Human adenovirus F
aggaggcuauuggccag

SEQ ID NO: 1587188 - RNA, 18 nt, Human adenovirus F
guuccucuucucugucuu

SEQ ID NO: 1587189 - RNA, 13 nt, Human adenovirus F
accaggccuugca

SEQ ID NO: 1587190 - RNA, 19 nt, Human adenovirus F
aucauguccaccugagggg

SEQ ID NO: 1587191 - RNA, 15 nt, Human adenovirus F
cgcuggcuccgcggc

SEQ ID NO: 1587192 - RNA, 18 nt, Human adenovirus F
aaucagggcgugcaagug

SEQ ID NO: 1587193 - RNA, 22 nt, Human adenovirus F
gaaggggccagcaagcugccgc

SEQ ID NO: 1587194 - RNA, 12 nt, Human adenovirus F
gaauuuuugcuu

SEQ ID NO: 1587195 - RNA, 18 nt, Human adenovirus F
ccuggcccccaaaggugc

SEQ ID NO: 1587196 - RNA, 23 nt, Human adenovirus F
cgucgguggauaccgcugcagcu

SEQ ID NO: 1587197 - RNA, 12 nt, Human adenovirus F
ccugaggaggag

SEQ ID NO: 1587198 - RNA, 19 nt, Human adenovirus F
caccagccagcucaacggg

SEQ ID NO: 1587199 - RNA, 23 nt, Human adenovirus F
accaggaggcuauuggccagacg

SEQ ID NO: 1587200 - RNA, 12 nt, Human adenovirus F
caauacuacaaa

SEQ ID NO: 1587201 - RNA, 19 nt, Human adenovirus F
guaccaguccgggccagac

SEQ ID NO: 1587202 - RNA, 23 nt, Human adenovirus F
uccaaaucucgccuaacaucacc

SEQ ID NO: 1587203 - RNA, 17 nt, Human adenovirus F
gcgccacucgggaaaga

SEQ ID NO: 1587204 - RNA, 18 nt, Human adenovirus F
ccgcggucaacagcugga

SEQ ID NO: 1587205 - RNA, 19 nt, Human adenovirus F
aaucucuucguccuggagu

SEQ ID NO: 1587206 - RNA, 20 nt, Human adenovirus F
ccugagggccggccuggacc

SEQ ID NO: 1587207 - RNA, 19 nt, Human adenovirus F
aaaccccgaucccgaaucu

SEQ ID NO: 1587208 - RNA, 16 nt, Human adenovirus F
ggcggcgggugcagug

SEQ ID NO: 1587209 - RNA, 18 nt, Human adenovirus F
acaaaguccuggccaacu

SEQ ID NO: 1587210 - RNA, 16 nt, Human adenovirus F
uauuaaugcccacacc

SEQ ID NO: 1587211 - RNA, 21 nt, Human adenovirus F
gcccgugcgguugcggccacg

SEQ ID NO: 1587212 - RNA, 16 nt, Human adenovirus F
aacuaccgccuuugga

SEQ ID NO: 1587213 - RNA, 20 nt, Human adenovirus F
cgguggauaccgcugcagcu

SEQ ID NO: 1587214 - RNA, 17 nt, Human adenovirus F
cccuccccccuuccacu

SEQ ID NO: 1587215 - RNA, 21 nt, Human adenovirus F
aaggauuuugccggcucuagg

SEQ ID NO: 1587216 - RNA, 16 nt, Human adenovirus F
ccagcgcccgggcccu

SEQ ID NO: 1587217 - RNA, 13 nt, Human adenovirus F
uaaauaaaacauc

SEQ ID NO: 1587218 - RNA, 23 nt, Human adenovirus F
ggagggacaagcuuaccccgcca

SEQ ID NO: 1587219 - RNA, 13 nt, Human adenovirus F
ggcgaauaaaagg

SEQ ID NO: 1587220 - RNA, 22 nt, Human adenovirus F
guucuucacugcaccuugcaag

SEQ ID NO: 1587221 - RNA, 21 nt, Human adenovirus F
uccauccaucacgccaacgcc

SEQ ID NO: 1587222 - RNA, 16 nt, Human adenovirus F
uaccauuaagaagacu

SEQ ID NO: 1587223 - RNA, 23 nt, Human adenovirus F
acucugaagaugucugaccaacu

SEQ ID NO: 1587224 - RNA, 17 nt, Human adenovirus F
ccacaguccuucugcca

SEQ ID NO: 1587225 - RNA, 17 nt, Human adenovirus F
auccuccuucacaaagu

SEQ ID NO: 1587226 - RNA, 19 nt, Human adenovirus F
ccgccacaugaacacuucc

SEQ ID NO: 1587227 - RNA, 17 nt, Human adenovirus F
uuacaaccaaaaacggg

SEQ ID NO: 1587228 - RNA, 13 nt, Human adenovirus F
ccuggcagcugga

SEQ ID NO: 1587229 - RNA, 17 nt, Human adenovirus F
gacggcaaggaaccagu

SEQ ID NO: 1587230 - RNA, 14 nt, Human adenovirus F
acgucaacuccucu

SEQ ID NO: 1587231 - RNA, 22 nt, Human adenovirus F
gcacagccugcgucgggcucua

SEQ ID NO: 1587232 - RNA, 13 nt, Human adenovirus F
gcucuucuuccuc

SEQ ID NO: 1587233 - RNA, 21 nt, Human adenovirus F
uguaacucucccuuuccagca

SEQ ID NO: 1587234 - RNA, 17 nt, Human adenovirus F
uucgcccggacacuauu

SEQ ID NO: 1587235 - RNA, 22 nt, Human adenovirus F
ggcaggcuuccuuaacaagggc

SEQ ID NO: 1587236 - RNA, 20 nt, Human adenovirus F
agcugugucagcuaacucuc

SEQ ID NO: 1587237 - RNA, 17 nt, Human adenovirus F
uaaccacuaccacccuc

SEQ ID NO: 1587238 - RNA, 18 nt, Human adenovirus F
cgccguuucucgccccac

SEQ ID NO: 1587239 - RNA, 13 nt, Human adenovirus F
auguaaaguucua

SEQ ID NO: 1587240 - RNA, 24 nt, Human adenovirus F
agacgugugugugagggcaaaagu

SEQ ID NO: 1587241 - RNA, 17 nt, Human adenovirus F
ccugcuccugcccgggu

SEQ ID NO: 1587242 - RNA, 20 nt, Human adenovirus F
gaaaaccuacgcccaggagc

SEQ ID NO: 1587243 - RNA, 12 nt, Human adenovirus F
aucccagccucg

SEQ ID NO: 1587244 - RNA, 19 nt, Human adenovirus F
aagcgcggccgcuacggag

SEQ ID NO: 1587245 - RNA, 11 nt, Human adenovirus F
auagccaacca

SEQ ID NO: 1587246 - RNA, 15 nt, Human adenovirus F
ccacuugugcaaugu

SEQ ID NO: 1587247 - RNA, 20 nt, Human adenovirus F
uaaauggaauucgugccacu

SEQ ID NO: 1587248 - RNA, 16 nt, Human adenovirus F
gcagcgcacgcuggag

SEQ ID NO: 1587249 - RNA, 23 nt, Human adenovirus F
gagacccagguuuaauacaguga

SEQ ID NO: 1587250 - RNA, 12 nt, Human adenovirus F
gcugcagcugcu

SEQ ID NO: 1587251 - RNA, 18 nt, Human adenovirus F
cugaccccauuacuacca

SEQ ID NO: 1587252 - RNA, 19 nt, Human adenovirus F
cauacgcuagaccaacaaa

SEQ ID NO: 1587253 - RNA, 13 nt, Human adenovirus F
agguggggcggcg

SEQ ID NO: 1587254 - RNA, 16 nt, Human adenovirus F
gaguuuguacccuccg

SEQ ID NO: 1587255 - RNA, 14 nt, Human adenovirus F
ugcaauggcagccc

SEQ ID NO: 1587256 - RNA, 17 nt, Human adenovirus F
acguuugacaaacgcuu

SEQ ID NO: 1587257 - RNA, 15 nt, Human adenovirus F
acagucaagcucucc

SEQ ID NO: 1587258 - RNA, 19 nt, Human adenovirus F
acggccguaccaagccuga

SEQ ID NO: 1587259 - RNA, 19 nt, Human adenovirus F
gucauccgccuccacccuu

SEQ ID NO: 1587260 - RNA, 14 nt, Human adenovirus F
cguucagccacucc

SEQ ID NO: 1587261 - RNA, 23 nt, Human adenovirus F
aacagcagguuaaagccaacucc

SEQ ID NO: 1587262 - RNA, 20 nt, Human adenovirus F
gcgcugcuacucaacagaaa

SEQ ID NO: 1587263 - RNA, 22 nt, Human adenovirus F
caacaagaaggugcuuccagcc

SEQ ID NO: 1587264 - RNA, 16 nt, Human adenovirus F
cgccucaugagcuggg

SEQ ID NO: 1587265 - RNA, 15 nt, Human adenovirus F
aggagguacuccucg

SEQ ID NO: 1587266 - RNA, 20 nt, Human adenovirus F
cugguuuccuauuacagccc

SEQ ID NO: 1587267 - RNA, 15 nt, Human adenovirus F
aacagauuuaccagu

SEQ ID NO: 1587268 - RNA, 19 nt, Human adenovirus F
uccuguguuacgccagaga

SEQ ID NO: 1587269 - RNA, 12 nt, Human adenovirus F
cugguuaaacaa

SEQ ID NO: 1587270 - RNA, 14 nt, Human adenovirus F
cacagaacaaaaca

SEQ ID NO: 1587271 - RNA, 13 nt, Human adenovirus F
ggugugaaggcaa

SEQ ID NO: 1587272 - RNA, 13 nt, Human adenovirus F
uguuuuccucuga

SEQ ID NO: 1587273 - RNA, 14 nt, Human adenovirus F
caguuggagcagcc

SEQ ID NO: 1587274 - RNA, 13 nt, Human adenovirus F
cugaucagccagg

SEQ ID NO: 1587275 - RNA, 19 nt, Human adenovirus F
gccccugugaguguggagc

SEQ ID NO: 1587276 - RNA, 9 nt, Human adenovirus F
aggacacgg

SEQ ID NO: 1587277 - RNA, 15 nt, Human adenovirus F
cacuuacaaccaaaa

SEQ ID NO: 1587278 - RNA, 20 nt, Human adenovirus F
cagcucacgucuucuacaca

SEQ ID NO: 1587279 - RNA, 21 nt, Human adenovirus F
ccagccccgguugugcagugu

SEQ ID NO: 1587280 - RNA, 17 nt, Human adenovirus F
aaagccauccgcaagga

SEQ ID NO: 1587281 - RNA, 14 nt, Human adenovirus F
acaccggugggcuu

SEQ ID NO: 1587282 - RNA, 18 nt, Human adenovirus F
uucagccacuccugcagu

SEQ ID NO: 1587283 - RNA, 17 nt, Human adenovirus F
caguggccgcacucagc

SEQ ID NO: 1587284 - RNA, 21 nt, Human adenovirus F
gucugggaguaaaaagccuga

SEQ ID NO: 1587285 - RNA, 18 nt, Human adenovirus F
cauccccgccgccccugg

SEQ ID NO: 1587286 - RNA, 20 nt, Human adenovirus F
agcugcugccgcgucugcug

SEQ ID NO: 1587287 - RNA, 14 nt, Human adenovirus F
cacucgcuccaccc

SEQ ID NO: 1587288 - RNA, 14 nt, Human adenovirus F
gcgcuugccagggu

SEQ ID NO: 1587289 - RNA, 19 nt, Human adenovirus F
gccaaugggcuccagcgag

SEQ ID NO: 1587290 - RNA, 17 nt, Human adenovirus F
gcgcgacagagcaccau

SEQ ID NO: 1587291 - RNA, 13 nt, Human adenovirus F
acaacaacgggca

SEQ ID NO: 1587292 - RNA, 17 nt, Human adenovirus F
gugcuccugaagcacau

SEQ ID NO: 1587293 - RNA, 17 nt, Human adenovirus F
gguaagugcagaggcgu

SEQ ID NO: 1587294 - RNA, 14 nt, Human adenovirus F
ugucaggcucugag

SEQ ID NO: 1587295 - RNA, 19 nt, Human adenovirus F
cuggacucgucuccugcaa

SEQ ID NO: 1587296 - RNA, 13 nt, Human adenovirus F
ugucaacggcaca

SEQ ID NO: 1587297 - RNA, 14 nt, Human adenovirus F
gcugccaacaaaug

SEQ ID NO: 1587298 - RNA, 18 nt, Human adenovirus F
uuugccacacuaaaguuu

SEQ ID NO: 1587299 - RNA, 22 nt, Human adenovirus F
ugagcaaagacauucccacgcc

SEQ ID NO: 1587300 - RNA, 13 nt, Human adenovirus F
ugccuccagcacu

SEQ ID NO: 1587301 - RNA, 17 nt, Human adenovirus F
aagaucacaccucuccc

SEQ ID NO: 1587302 - RNA, 16 nt, Human adenovirus F
cguucuaugcuccugg

SEQ ID NO: 1587303 - RNA, 21 nt, Human adenovirus F
acugggugcgagaugcgucgg

SEQ ID NO: 1587304 - RNA, 13 nt, Human adenovirus F
ccgcgucugcugc

SEQ ID NO: 1587305 - RNA, 19 nt, Human adenovirus F
augguaacuccucuucucc

SEQ ID NO: 1587306 - RNA, 17 nt, Human adenovirus F
gcuggcuuuuggaccug

SEQ ID NO: 1587307 - RNA, 13 nt, Human adenovirus F
augcgauuuucca

SEQ ID NO: 1587308 - RNA, 18 nt, Human adenovirus F
uggaaugccugcagcgcu

SEQ ID NO: 1587309 - RNA, 22 nt, Human adenovirus F
gucgcaggguuauacucuggau

SEQ ID NO: 1587310 - RNA, 18 nt, Human adenovirus F
ggcacggcucgcggccgu

SEQ ID NO: 1587311 - RNA, 17 nt, Human adenovirus F
ggucacucucagcugcu

SEQ ID NO: 1587312 - RNA, 18 nt, Human adenovirus F
ggcggauuuuugcccgcg

SEQ ID NO: 1587313 - RNA, 21 nt, Human adenovirus F
ccugcuugucugucugccaau

SEQ ID NO: 1587314 - RNA, 15 nt, Human adenovirus F
ugcgaccggcccgga

SEQ ID NO: 1587315 - RNA, 15 nt, Human adenovirus F
agcuugcccuuggaa

SEQ ID NO: 1587316 - RNA, 15 nt, Human adenovirus F
gacagccaggcagag

SEQ ID NO: 1587317 - RNA, 14 nt, Human adenovirus F
uggaacgcaguguu

SEQ ID NO: 1587318 - RNA, 17 nt, Human adenovirus F
accaguccgggccagac

SEQ ID NO: 1587319 - RNA, 18 nt, Human adenovirus F
ggcgcaaucccaggcgug

SEQ ID NO: 1587320 - RNA, 14 nt, Human adenovirus F
cagcuccucagccc

SEQ ID NO: 1587321 - RNA, 16 nt, Human adenovirus F
aaacuguaaaccuaac

SEQ ID NO: 1587322 - RNA, 14 nt, Human adenovirus F
aggcagcagggugc

SEQ ID NO: 1587323 - RNA, 13 nt, Human adenovirus F
ccgcgcgggcagg

SEQ ID NO: 1587324 - RNA, 21 nt, Human adenovirus F
cuggaguuggcuucugccaga

SEQ ID NO: 1587325 - RNA, 22 nt, Human adenovirus F
gggcuggcccgcuugggggcgc

SEQ ID NO: 1587326 - RNA, 13 nt, Human adenovirus F
ggagucccugcac

SEQ ID NO: 1587327 - RNA, 20 nt, Human adenovirus F
caagggaaacaagcauccca

SEQ ID NO: 1587328 - RNA, 18 nt, Human adenovirus F
aaucccgaagccuucagg

SEQ ID NO: 1587329 - RNA, 20 nt, Human adenovirus F
uggcuggaggcuugggagga

SEQ ID NO: 1587330 - RNA, 15 nt, Human adenovirus F
guuggagcagccugu

SEQ ID NO: 1587331 - RNA, 13 nt, Human adenovirus F
gcgcaccucuugu

SEQ ID NO: 1587332 - RNA, 20 nt, Human adenovirus F
ccacccuauggaccaccgcg

SEQ ID NO: 1587333 - RNA, 13 nt, Human adenovirus F
cuaaaaccaacaa

SEQ ID NO: 1587334 - RNA, 14 nt, Human adenovirus F
auguuauugacauu

SEQ ID NO: 1587335 - RNA, 15 nt, Human adenovirus F
cacccuuucccaccc

SEQ ID NO: 1587336 - RNA, 14 nt, Human adenovirus F
aagggcucugccug

SEQ ID NO: 1587337 - RNA, 22 nt, Human adenovirus F
acagcuucguacuucuguuuua

SEQ ID NO: 1587338 - RNA, 17 nt, Human adenovirus F
acgacgagcuugcucgc

SEQ ID NO: 1587339 - RNA, 15 nt, Human adenovirus F
cucuuccaagcugcg

SEQ ID NO: 1587340 - RNA, 15 nt, Human adenovirus F
ucacuuugccagagg

SEQ ID NO: 1587341 - RNA, 19 nt, Human adenovirus F
caacaugggagugcuggcc

SEQ ID NO: 1587342 - RNA, 16 nt, Human adenovirus F
uuguagucugccaacg

SEQ ID NO: 1587343 - RNA, 23 nt, Human adenovirus F
auuugguaacaaggccuggaaca

SEQ ID NO: 1587344 - RNA, 14 nt, Human adenovirus F
uccgccauugccac

SEQ ID NO: 1587345 - RNA, 18 nt, Human adenovirus F
gguggcgcgcgaggaggu

SEQ ID NO: 1587346 - RNA, 19 nt, Human adenovirus F
uggaacgagaucggcacca

SEQ ID NO: 1587347 - RNA, 18 nt, Human adenovirus F
ucugagcacauugccagc

SEQ ID NO: 1587348 - RNA, 23 nt, Human adenovirus F
gccguggcuggcgggcaaagcua

SEQ ID NO: 1587349 - RNA, 20 nt, Human adenovirus F
uuggaaaucgugcccgugga

SEQ ID NO: 1587350 - RNA, 19 nt, Human adenovirus F
accugcaauggcagcccag

SEQ ID NO: 1587351 - RNA, 15 nt, Human adenovirus F
caacccgucuucccu

SEQ ID NO: 1587352 - RNA, 16 nt, Human adenovirus F
ucuugcaaagacggcg

SEQ ID NO: 1587353 - RNA, 19 nt, Human adenovirus F
agggugugaaggcaaaggu

SEQ ID NO: 1587354 - RNA, 18 nt, Human adenovirus F
cuaagugugacauuacuu

SEQ ID NO: 1587355 - RNA, 13 nt, Human adenovirus F
gcacgggcgcacg

SEQ ID NO: 1587356 - RNA, 22 nt, Human adenovirus F
ugcuuaucccgcgcuaaaucuu

SEQ ID NO: 1587357 - RNA, 21 nt, Human adenovirus F
ccagacuacuuuuuccaaacu

SEQ ID NO: 1587358 - RNA, 16 nt, Human adenovirus F
uggaauuuuugcuucu

SEQ ID NO: 1587359 - RNA, 15 nt, Human adenovirus F
auuaccgucaucucu

SEQ ID NO: 1587360 - RNA, 16 nt, Human adenovirus F
agcuucuaucugcaaa

SEQ ID NO: 1587361 - RNA, 22 nt, Human adenovirus F
ugcucgcaaacaaagaaguaca

SEQ ID NO: 1587362 - RNA, 20 nt, Human adenovirus F
gcgcuuuuuuuaggcgccaa

SEQ ID NO: 1587363 - RNA, 18 nt, Human adenovirus F
gcucuggacaugacggca

SEQ ID NO: 1587364 - RNA, 16 nt, Human adenovirus F
ucagcugaacccaccc

SEQ ID NO: 1587365 - RNA, 22 nt, Human adenovirus F
aacccaugagccgccagguggu

SEQ ID NO: 1587366 - RNA, 18 nt, Human adenovirus F
ggccuguuuuugagcaca

SEQ ID NO: 1587367 - RNA, 18 nt, Human adenovirus F
uuaacagcuccucagccc

SEQ ID NO: 1587368 - RNA, 24 nt, Human adenovirus F
cacgcaagucagcaacuacccugu

SEQ ID NO: 1587369 - RNA, 13 nt, Human adenovirus F
gcuaucagccgca

SEQ ID NO: 1587370 - RNA, 14 nt, Human adenovirus F
accacccuagcauu

SEQ ID NO: 1587371 - RNA, 20 nt, Human adenovirus F
accugcaguucauuuaaaag

SEQ ID NO: 1587372 - RNA, 13 nt, Human adenovirus F
aacuuuuugccca

SEQ ID NO: 1587373 - RNA, 18 nt, Human adenovirus F
acuaugccuuccgucaug

SEQ ID NO: 1587374 - RNA, 18 nt, Human adenovirus F
ugcuucugccagugcagg

SEQ ID NO: 1587375 - RNA, 19 nt, Human adenovirus F
cgcacugguaaaccagcac

SEQ ID NO: 1587376 - RNA, 17 nt, Human adenovirus F
gcuggggaauggagcug

SEQ ID NO: 1587377 - RNA, 20 nt, Human adenovirus F
ggcgcuuucaguuggagcag

SEQ ID NO: 1587378 - RNA, 18 nt, Human adenovirus F
ggugugaaggcaaagguc

SEQ ID NO: 1587379 - RNA, 18 nt, Human adenovirus F
cgcggacauuaccgcgcc

SEQ ID NO: 1587380 - RNA, 15 nt, Human adenovirus F
aucgacgggcagugc

SEQ ID NO: 1587381 - RNA, 17 nt, Human adenovirus F
cuagaaugucacugccg

SEQ ID NO: 1587382 - RNA, 20 nt, Human adenovirus F
gagcauugugguacaggagc

SEQ ID NO: 1587383 - RNA, 17 nt, Human adenovirus F
caaaaacggggcuuuaa

SEQ ID NO: 1587384 - RNA, 18 nt, Human adenovirus F
ggccaucggccaugguca

SEQ ID NO: 1587385 - RNA, 14 nt, Human adenovirus F
cgccccuaucacua

SEQ ID NO: 1587386 - RNA, 15 nt, Human adenovirus F
gagggcguuggagag

SEQ ID NO: 1587387 - RNA, 16 nt, Human adenovirus F
agccugaaauacacug

SEQ ID NO: 1587388 - RNA, 16 nt, Human adenovirus F
aacaguuaccaaggcg

SEQ ID NO: 1587389 - RNA, 16 nt, Human adenovirus F
cgcugaccagcagcag

SEQ ID NO: 1587390 - RNA, 16 nt, Human adenovirus F
gaugguggcaaggaga

SEQ ID NO: 1587391 - RNA, 22 nt, Human adenovirus F
caauaagcagcuugaagaacug

SEQ ID NO: 1587392 - RNA, 13 nt, Human adenovirus F
uggaggagcuguc

SEQ ID NO: 1587393 - RNA, 17 nt, Human adenovirus F
gacggcgguggcggacg

SEQ ID NO: 1587394 - RNA, 23 nt, Human adenovirus F
agcgccgcuugcaagauggccac

SEQ ID NO: 1587395 - RNA, 13 nt, Human adenovirus F
cgcugggagaaaa

SEQ ID NO: 1587396 - RNA, 18 nt, Human adenovirus F
uaaucucccuccccccuu

SEQ ID NO: 1587397 - RNA, 18 nt, Human adenovirus F
cuggcuuccggcauuaac

SEQ ID NO: 1587398 - RNA, 13 nt, Human adenovirus F
gagcugggacagc

SEQ ID NO: 1587399 - RNA, 23 nt, Human adenovirus F
uccggguugggcgcuugccaggg

SEQ ID NO: 1587400 - RNA, 10 nt, Human adenovirus F
cccuaccacc

SEQ ID NO: 1587401 - RNA, 22 nt, Human adenovirus F
caucugcagcauugccacuuuu

SEQ ID NO: 1587402 - RNA, 14 nt, Human adenovirus F
gcggcggccaugga

SEQ ID NO: 1587403 - RNA, 18 nt, Human adenovirus F
guugaggguuucggcagc

SEQ ID NO: 1587404 - RNA, 15 nt, Human adenovirus F
caccauuguacgaga

SEQ ID NO: 1587405 - RNA, 15 nt, Human adenovirus F
gccgccgcucaaggc

SEQ ID NO: 1587406 - RNA, 21 nt, Human adenovirus F
gccuuuugcaucucaaagcug

SEQ ID NO: 1587407 - RNA, 18 nt, Human adenovirus F
accucugcaccccucauc

SEQ ID NO: 1587408 - RNA, 18 nt, Human adenovirus F
ccucagacgacugggcgg

SEQ ID NO: 1587409 - RNA, 21 nt, Human adenovirus F
ugagcggaguaacacaaacau

SEQ ID NO: 1587410 - RNA, 22 nt, Human adenovirus F
uauuaccgucaucucuacagcc

SEQ ID NO: 1587411 - RNA, 15 nt, Human adenovirus F
ucaaaugcuccggga

SEQ ID NO: 1587412 - RNA, 16 nt, Human adenovirus F
cucuguggagaaccuu

SEQ ID NO: 1587413 - RNA, 18 nt, Human adenovirus F
accgcuguauuuugcuac

SEQ ID NO: 1587414 - RNA, 21 nt, Human adenovirus F
gucuuauccuccuucacaaag

SEQ ID NO: 1587415 - RNA, 19 nt, Human adenovirus F
caccgccaagagcgccgcu

SEQ ID NO: 1587416 - RNA, 21 nt, Human adenovirus F
cagcgcccgccucccaaaguc

SEQ ID NO: 1587417 - RNA, 23 nt, Human adenovirus F
uuagaaguaaccaacggaggaaa

SEQ ID NO: 1587418 - RNA, 18 nt, Human adenovirus F
ucaaaaaggcacuuuacu

SEQ ID NO: 1587419 - RNA, 19 nt, Human adenovirus F
guaguuuugcuccagggua

SEQ ID NO: 1587420 - RNA, 20 nt, Human adenovirus F
gaugaugucgugucugcgua

SEQ ID NO: 1587421 - RNA, 15 nt, Human adenovirus F
uucuucacugcaccu

SEQ ID NO: 1587422 - RNA, 21 nt, Human adenovirus F
aucccaaguggcccuuaaugc

SEQ ID NO: 1587423 - RNA, 23 nt, Human adenovirus F
caaccagcgcucuacaauauaau

SEQ ID NO: 1587424 - RNA, 16 nt, Human adenovirus F
ggcaggagcccgaaga

SEQ ID NO: 1587425 - RNA, 17 nt, Human adenovirus F
augagguuuacgcugac

SEQ ID NO: 1587426 - RNA, 22 nt, Human adenovirus F
gcguagcaccccaauguaaguu

SEQ ID NO: 1587427 - RNA, 16 nt, Human adenovirus F
cggcuggggcagaacg

SEQ ID NO: 1587428 - RNA, 22 nt, Human adenovirus F
aaaccgccgacccaggcaacau

SEQ ID NO: 1587429 - RNA, 15 nt, Human adenovirus F
ggccaugcgccgagc

SEQ ID NO: 1587430 - RNA, 14 nt, Human adenovirus F
gagccgccaggugg

SEQ ID NO: 1587431 - RNA, 17 nt, Human adenovirus F
auccucagugucuugcc

SEQ ID NO: 1587432 - RNA, 16 nt, Human adenovirus F
guguaccgcaacgacc

SEQ ID NO: 1587433 - RNA, 23 nt, Human adenovirus F
gguggauaccgcugcagcugcug

SEQ ID NO: 1587434 - RNA, 21 nt, Human adenovirus F
cuggaagauguccuuaaggag

SEQ ID NO: 1587435 - RNA, 20 nt, Human adenovirus F
cucuagcggcgacggacugc

SEQ ID NO: 1587436 - RNA, 14 nt, Human adenovirus F
ggagcagcgggaag

SEQ ID NO: 1587437 - RNA, 20 nt, Human adenovirus F
uaauggagcuauuacuuuag

SEQ ID NO: 1587438 - RNA, 15 nt, Human adenovirus F
agugcuggccgggca

SEQ ID NO: 1587439 - RNA, 17 nt, Human adenovirus F
acgugugugugagggca

SEQ ID NO: 1587440 - RNA, 14 nt, Human adenovirus F
gaacaauaaaauau

SEQ ID NO: 1587441 - RNA, 17 nt, Human adenovirus F
gaagaggguacuagcag

SEQ ID NO: 1587442 - RNA, 15 nt, Human adenovirus F
cgaacuuucucucuu

SEQ ID NO: 1587443 - RNA, 14 nt, Human adenovirus F
uaacuuuugccaca

SEQ ID NO: 1587444 - RNA, 14 nt, Human adenovirus F
gccuucaggcagca

SEQ ID NO: 1587445 - RNA, 13 nt, Human adenovirus F
ccuacucuuacaa

SEQ ID NO: 1587446 - RNA, 13 nt, Human adenovirus F
aaguuauacagug

SEQ ID NO: 1587447 - RNA, 16 nt, Human adenovirus F
augguggcaaggagag

SEQ ID NO: 1587448 - RNA, 12 nt, Human adenovirus F
uuuaaacuuuuu

SEQ ID NO: 1587449 - RNA, 19 nt, Human adenovirus F
cacgguauagccggugcac

SEQ ID NO: 1587450 - RNA, 14 nt, Human adenovirus F
aaaacuugcaagga

SEQ ID NO: 1587451 - RNA, 22 nt, Human adenovirus F
cgucaacuccucuugcaggagc

SEQ ID NO: 1587452 - RNA, 15 nt, Human adenovirus F
gacagcaaggaaaga

SEQ ID NO: 1587453 - RNA, 17 nt, Human adenovirus F
ccggcuucggugacaaa

SEQ ID NO: 1587454 - RNA, 20 nt, Human adenovirus F
gaggcagcuucucgaggcca

SEQ ID NO: 1587455 - RNA, 13 nt, Human adenovirus F
agauuugacgaaa

SEQ ID NO: 1587456 - RNA, 17 nt, Human adenovirus F
cuuccucccccgagaga

SEQ ID NO: 1587457 - RNA, 18 nt, Human adenovirus F
acuccuuuggacaagcuc

SEQ ID NO: 1587458 - RNA, 22 nt, Human adenovirus F
uagcccuguacuugccugacuc

SEQ ID NO: 1587459 - RNA, 20 nt, Human adenovirus F
aauauuuauacacucccuuu

SEQ ID NO: 1587460 - RNA, 11 nt, Human adenovirus F
gagcuggccug

SEQ ID NO: 1587461 - RNA, 22 nt, Human adenovirus F
caguguauccccgaaacaaaac

SEQ ID NO: 1587462 - RNA, 19 nt, Human adenovirus F
cuuuugcaccagggcggcg

SEQ ID NO: 1587463 - RNA, 17 nt, Human adenovirus F
cgcuaucaggaagcagc

SEQ ID NO: 1587464 - RNA, 22 nt, Human adenovirus F
gccagacuacuuuuuccaaacu

SEQ ID NO: 1587465 - RNA, 13 nt, Human adenovirus F
aguccacaaaaac

SEQ ID NO: 1587466 - RNA, 17 nt, Human adenovirus F
agauuuuggacuguaca

SEQ ID NO: 1587467 - RNA, 18 nt, Human adenovirus F
aacagcauugugggucug

SEQ ID NO: 1587468 - RNA, 16 nt, Human adenovirus F
aaaaugccaggcagca

SEQ ID NO: 1587469 - RNA, 19 nt, Human adenovirus F
ugucuucccgccuugcuga

SEQ ID NO: 1587470 - RNA, 20 nt, Human adenovirus F
gucgcuggcuuuuggaccug

SEQ ID NO: 1587471 - RNA, 18 nt, Human adenovirus F
cgcgugcuuagacccggc

SEQ ID NO: 1587472 - RNA, 17 nt, Human adenovirus F
uaagcagcuugaagaac

SEQ ID NO: 1587473 - RNA, 24 nt, Human adenovirus F
gccagccaaugggcuccagcgagc

SEQ ID NO: 1587474 - RNA, 15 nt, Human adenovirus F
gcaccugcacgcucu

SEQ ID NO: 1587475 - RNA, 17 nt, Human adenovirus F
acuaucccgccccugcc

SEQ ID NO: 1587476 - RNA, 13 nt, Human adenovirus F
ccaacuauuuggg

SEQ ID NO: 1587477 - RNA, 15 nt, Human adenovirus F
cgagaucggcaccag

SEQ ID NO: 1587478 - RNA, 13 nt, Human adenovirus F
cagaauguaacuc

SEQ ID NO: 1587479 - RNA, 16 nt, Human adenovirus F
ccggaucuggaggaaa

SEQ ID NO: 1587480 - RNA, 14 nt, Human adenovirus F
caaauaauuuuccg

SEQ ID NO: 1587481 - RNA, 22 nt, Human adenovirus F
cagcgcgcuucgccuccuggug

SEQ ID NO: 1587482 - RNA, 19 nt, Human adenovirus F
cgggaagagaggcagcccc

SEQ ID NO: 1587483 - RNA, 17 nt, Human adenovirus F
gccuuguaugggcagca

SEQ ID NO: 1587484 - RNA, 17 nt, Human adenovirus F
ggaguuggaggagaugg

SEQ ID NO: 1587485 - RNA, 20 nt, Human adenovirus F
aaagcagugggacgaggagg

SEQ ID NO: 1587486 - RNA, 13 nt, Human adenovirus F
gagcuaaggagga

SEQ ID NO: 1587487 - RNA, 19 nt, Human adenovirus F
acgugagagaggcgguggc

SEQ ID NO: 1587488 - RNA, 14 nt, Human adenovirus F
caaacauagcaaaa

SEQ ID NO: 1587489 - RNA, 14 nt, Human adenovirus F
caggucaaaugcuc

SEQ ID NO: 1587490 - RNA, 19 nt, Human adenovirus F
guagccgaugcccaacgcu

SEQ ID NO: 1587491 - RNA, 14 nt, Human adenovirus F
cgacaccacccggg

SEQ ID NO: 1587492 - RNA, 15 nt, Human adenovirus F
agcugguaagcagcc

SEQ ID NO: 1587493 - RNA, 20 nt, Human adenovirus F
ugccaccgcaaaaaaaucaa

SEQ ID NO: 1587494 - RNA, 20 nt, Human adenovirus F
uagggcguagaguuugggag

SEQ ID NO: 1587495 - RNA, 15 nt, Human adenovirus F
agccgugaagccaaa

SEQ ID NO: 1587496 - RNA, 16 nt, Human adenovirus F
cgacgcuuggcaccgc

SEQ ID NO: 1587497 - RNA, 18 nt, Human adenovirus F
augguaaaaaugccaggc

SEQ ID NO: 1587498 - RNA, 16 nt, Human adenovirus F
uccuaacgccacuuuu

SEQ ID NO: 1587499 - RNA, 18 nt, Human adenovirus F
gccaggguucucuucagg

SEQ ID NO: 1587500 - RNA, 18 nt, Human adenovirus F
cucacccgcagcugcuug

SEQ ID NO: 1587501 - RNA, 19 nt, Human adenovirus F
gggucuauuuggaccccca

SEQ ID NO: 1587502 - RNA, 23 nt, Human adenovirus F
ccaucaugagucuguuugguggg

SEQ ID NO: 1587503 - RNA, 16 nt, Human adenovirus F
ggugcaguggcgggga

SEQ ID NO: 1587504 - RNA, 12 nt, Human adenovirus F
cgauuuuguccc

SEQ ID NO: 1587505 - RNA, 18 nt, Human adenovirus F
ccgccguuucucgcccca

SEQ ID NO: 1587506 - RNA, 17 nt, Human adenovirus F
cccacuguuucuccucc

SEQ ID NO: 1587507 - RNA, 14 nt, Human adenovirus F
ugcagcgguaucug

SEQ ID NO: 1587508 - RNA, 20 nt, Human adenovirus F
aggagcagauggagagcugg

SEQ ID NO: 1587509 - RNA, 17 nt, Human adenovirus F
aagccucucgcucugca

SEQ ID NO: 1587510 - RNA, 14 nt, Human adenovirus F
gauuuggaagauga

SEQ ID NO: 1587511 - RNA, 19 nt, Human adenovirus F
agaaguggaggaaaaacua

SEQ ID NO: 1587512 - RNA, 22 nt, Human adenovirus F
ugggaaggggccagcaagcugc

SEQ ID NO: 1587513 - RNA, 16 nt, Human adenovirus F
cgugcgcacccuggug

SEQ ID NO: 1587514 - RNA, 16 nt, Human adenovirus F
aucuugguccagguuu

SEQ ID NO: 1587515 - RNA, 18 nt, Human adenovirus F
ccaaagguacacaccaaa

SEQ ID NO: 1587516 - RNA, 14 nt, Human adenovirus F
aaauuaauugcacu

SEQ ID NO: 1587517 - RNA, 15 nt, Human adenovirus F
acagcuccucagccc

SEQ ID NO: 1587518 - RNA, 23 nt, Human adenovirus F
ucagaaaccccaccguggcuccc

SEQ ID NO: 1587519 - RNA, 16 nt, Human adenovirus F
ggaccacuggagggcg

SEQ ID NO: 1587520 - RNA, 21 nt, Human adenovirus F
cuuccaagcgguccauugccu

SEQ ID NO: 1587521 - RNA, 12 nt, Human adenovirus F
ucugacaaacac

SEQ ID NO: 1587522 - RNA, 15 nt, Human adenovirus F
gcagcgggcaggagc

SEQ ID NO: 1587523 - RNA, 14 nt, Human adenovirus F
cuggcuggcccugg

SEQ ID NO: 1587524 - RNA, 15 nt, Human adenovirus F
caucugcggccucag

SEQ ID NO: 1587525 - RNA, 16 nt, Human adenovirus F
gacccauuuccaagca

SEQ ID NO: 1587526 - RNA, 13 nt, Human adenovirus F
ccccuaccagccg

SEQ ID NO: 1587527 - RNA, 23 nt, Human adenovirus F
cggcucuggacaugacggcacgu

SEQ ID NO: 1587528 - RNA, 16 nt, Human adenovirus F
guggaggguuaauaag

SEQ ID NO: 1587529 - RNA, 19 nt, Human adenovirus F
aguccuggccaacugccac

SEQ ID NO: 1587530 - RNA, 14 nt, Human adenovirus F
acuaaugcacagcc

SEQ ID NO: 1587531 - RNA, 21 nt, Human adenovirus F
cgaaaaaggaggucaagccaa

SEQ ID NO: 1587532 - RNA, 17 nt, Human adenovirus F
ccugcaauggcagccca

SEQ ID NO: 1587533 - RNA, 14 nt, Human adenovirus F
cuaaagggaacugc

SEQ ID NO: 1587534 - RNA, 16 nt, Human adenovirus F
ucuauggcccugccgc

SEQ ID NO: 1587535 - RNA, 11 nt, Human adenovirus F
aagggcaaagg

SEQ ID NO: 1587536 - RNA, 13 nt, Human adenovirus F
caauagcagcacc

SEQ ID NO: 1587537 - RNA, 22 nt, Human adenovirus F
auuucuuguaaacuggcgccau

SEQ ID NO: 1587538 - RNA, 22 nt, Human adenovirus F
acacaaacauagcaaaagcauu

SEQ ID NO: 1587539 - RNA, 13 nt, Human adenovirus F
cgccuccuggugg

SEQ ID NO: 1587540 - RNA, 14 nt, Human adenovirus F
accgccaaaaaagc

SEQ ID NO: 1587541 - RNA, 19 nt, Human adenovirus F
agcugcuaaccugugcaga

SEQ ID NO: 1587542 - RNA, 17 nt, Human adenovirus F
cucuuaccuacacuuuu

SEQ ID NO: 1587543 - RNA, 19 nt, Human adenovirus F
uaaggacgguggcaugagg

SEQ ID NO: 1587544 - RNA, 18 nt, Human adenovirus F
cgaagccuucaggcagca

SEQ ID NO: 1587545 - RNA, 13 nt, Human adenovirus F
gccuccugguggc

SEQ ID NO: 1587546 - RNA, 21 nt, Human adenovirus F
ggauuugccgcagccaguggg

SEQ ID NO: 1587547 - RNA, 16 nt, Human adenovirus F
acuuggaagggaaggc

SEQ ID NO: 1587548 - RNA, 23 nt, Human adenovirus F
gaauuuguuauacaaguauacau

SEQ ID NO: 1587549 - RNA, 20 nt, Human adenovirus F
cgcugcgcuucgugcccguc

SEQ ID NO: 1587550 - RNA, 22 nt, Human adenovirus F
ugcuacacaacaaaucaucucu

SEQ ID NO: 1587551 - RNA, 17 nt, Human adenovirus F
caugcccgagccggaga

SEQ ID NO: 1587552 - RNA, 12 nt, Human adenovirus F
cuacauaacuga

SEQ ID NO: 1587553 - RNA, 12 nt, Human adenovirus F
gggcggaccugc

SEQ ID NO: 1587554 - RNA, 17 nt, Human adenovirus F
uggcccaccacucugau

SEQ ID NO: 1587555 - RNA, 16 nt, Human adenovirus F
cacggguucucgccuc

SEQ ID NO: 1587556 - RNA, 20 nt, Human adenovirus F
caccagccgcaccgcggcgu

SEQ ID NO: 1587557 - RNA, 17 nt, Human adenovirus F
caggagacggguaaggg

SEQ ID NO: 1587558 - RNA, 18 nt, Human adenovirus F
agaugcguccgacggcgc

SEQ ID NO: 1587559 - RNA, 14 nt, Human adenovirus F
acacucccuuugcc

SEQ ID NO: 1587560 - RNA, 19 nt, Human adenovirus F
ggaggcgauuugggaggga

SEQ ID NO: 1587561 - RNA, 20 nt, Human adenovirus F
aaacuccuuuggacaagcuc

SEQ ID NO: 1587562 - RNA, 14 nt, Human adenovirus F
acggcgugcuggaa

SEQ ID NO: 1587563 - RNA, 16 nt, Human adenovirus F
cucugcagcagcgccc

SEQ ID NO: 1587564 - RNA, 21 nt, Human adenovirus F
auuacuccagucgcaugaauu

SEQ ID NO: 1587565 - RNA, 18 nt, Human adenovirus F
agucuguuuggugggcug

SEQ ID NO: 1587566 - RNA, 20 nt, Human adenovirus F
ucaagggauugacgcagcaa

SEQ ID NO: 1587567 - RNA, 12 nt, Human adenovirus F
ugcucugcaaaa

SEQ ID NO: 1587568 - RNA, 18 nt, Human adenovirus F
ugugcaauguucaguucu

SEQ ID NO: 1587569 - RNA, 15 nt, Human adenovirus F
caccacguaaaaggu

SEQ ID NO: 1587570 - RNA, 15 nt, Human adenovirus F
cggagccggcggugg

SEQ ID NO: 1587571 - RNA, 18 nt, Human adenovirus F
ccagaguaacuuuugcca

SEQ ID NO: 1587572 - RNA, 20 nt, Human adenovirus F
caggccaaccuagaccgacu

SEQ ID NO: 1587573 - RNA, 16 nt, Human adenovirus F
caggagcccgaagaga

SEQ ID NO: 1587574 - RNA, 21 nt, Human adenovirus F
ucaggugaugcuacacaacaa

SEQ ID NO: 1587575 - RNA, 14 nt, Human adenovirus F
uccuggcgagccca

SEQ ID NO: 1587576 - RNA, 16 nt, Human adenovirus F
aaagagcguguuccca

SEQ ID NO: 1587577 - RNA, 17 nt, Human adenovirus F
uuaucccaugaccaaac

SEQ ID NO: 1587578 - RNA, 14 nt, Human adenovirus F
uggcucagccccgc

SEQ ID NO: 1587579 - RNA, 16 nt, Human adenovirus F
gcaccuacuuugacau

SEQ ID NO: 1587580 - RNA, 17 nt, Human adenovirus F
gacaagguggcggccau

SEQ ID NO: 1587581 - RNA, 20 nt, Human adenovirus F
gcagccugagcugccagagg

SEQ ID NO: 1587582 - RNA, 19 nt, Human adenovirus F
gcaaagggggggcauuaau

SEQ ID NO: 1587583 - RNA, 23 nt, Human adenovirus F
agauggaaaacgagggggaggac

SEQ ID NO: 1587584 - RNA, 13 nt, Human adenovirus F
gcugacagcuggg

SEQ ID NO: 1587585 - RNA, 11 nt, Human adenovirus F
gccucccuuug

SEQ ID NO: 1587586 - RNA, 12 nt, Human adenovirus F
ccucgcuccggc

SEQ ID NO: 1587587 - RNA, 14 nt, Human adenovirus F
caagcuucucagcu

SEQ ID NO: 1587588 - RNA, 13 nt, Human adenovirus F
cuguggagaaccu

SEQ ID NO: 1587589 - RNA, 15 nt, Human adenovirus F
ucuugagcaggccgc

SEQ ID NO: 1587590 - RNA, 24 nt, Human adenovirus F
cgggaagcaaccgcacaugccagc

SEQ ID NO: 1587591 - RNA, 18 nt, Human adenovirus F
ggagcucgucguggcaug

SEQ ID NO: 1587592 - RNA, 16 nt, Human adenovirus F
gcgggcucugauaaug

SEQ ID NO: 1587593 - RNA, 11 nt, Human adenovirus F
cugaagaggaa

SEQ ID NO: 1587594 - RNA, 21 nt, Human adenovirus F
ucgggcccgucgucaggccgc

SEQ ID NO: 1587595 - RNA, 20 nt, Human adenovirus F
cggcauuaacggcguggugg

SEQ ID NO: 1587596 - RNA, 17 nt, Human adenovirus F
cuaucuagauaauaacu

SEQ ID NO: 1587597 - RNA, 13 nt, Human adenovirus F
caaggccuggaac

SEQ ID NO: 1587598 - RNA, 14 nt, Human adenovirus F
uaacagcuccucag

SEQ ID NO: 1587599 - RNA, 17 nt, Human adenovirus F
gugcauuggcacaggaa

SEQ ID NO: 1587600 - RNA, 11 nt, Human adenovirus F
gccagugcagg

SEQ ID NO: 1587601 - RNA, 17 nt, Human adenovirus F
uuacgcggggcaggagc

SEQ ID NO: 1587602 - RNA, 20 nt, Human adenovirus F
uagaguaaaaaaaagggaag

SEQ ID NO: 1587603 - RNA, 16 nt, Human adenovirus F
gucuccagaccccaug

SEQ ID NO: 1587604 - RNA, 16 nt, Human adenovirus F
ggcauguacggcggcg

SEQ ID NO: 1587605 - RNA, 18 nt, Human adenovirus F
uggcaucucgauccaaca

SEQ ID NO: 1587606 - RNA, 12 nt, Human adenovirus F
ugauuuggaaga

SEQ ID NO: 1587607 - RNA, 17 nt, Human adenovirus F
cgguuuggauccagugc

SEQ ID NO: 1587608 - RNA, 15 nt, Human adenovirus F
ucugaucucuuacau

SEQ ID NO: 1587609 - RNA, 19 nt, Human adenovirus F
acguucgucguuuccccaa

SEQ ID NO: 1587610 - RNA, 14 nt, Human adenovirus F
ggcccugccgcgga

SEQ ID NO: 1587611 - RNA, 12 nt, Human adenovirus F
ucauccgccucc

SEQ ID NO: 1587612 - RNA, 14 nt, Human adenovirus F
gcagugggacgagg

SEQ ID NO: 1587613 - RNA, 17 nt, Human adenovirus F
ggcucagccccgccggg

SEQ ID NO: 1587614 - RNA, 21 nt, Human adenovirus F
acuguuaauauacguaaaugu

SEQ ID NO: 1587615 - RNA, 19 nt, Human adenovirus F
caccaggucguaaugagga

SEQ ID NO: 1587616 - RNA, 21 nt, Human adenovirus F
ccggugcuauuaaaauggaac

SEQ ID NO: 1587617 - RNA, 16 nt, Human adenovirus F
gugccguucgcagaaa

SEQ ID NO: 1587618 - RNA, 22 nt, Human adenovirus F
cagucggugggcguccagugga

SEQ ID NO: 1587619 - RNA, 15 nt, Human adenovirus F
gcgccucaauuuuua

SEQ ID NO: 1587620 - RNA, 20 nt, Human adenovirus F
ugaugaagcgugguaaaagg

SEQ ID NO: 1587621 - RNA, 15 nt, Human adenovirus F
uaggaccacuggagg

SEQ ID NO: 1587622 - RNA, 12 nt, Human adenovirus F
agcaaacagugc

SEQ ID NO: 1587623 - RNA, 19 nt, Human adenovirus F
gccuugcaaaaccaaauca

SEQ ID NO: 1587624 - RNA, 23 nt, Human adenovirus F
gggcguagaguuugggagccagg

SEQ ID NO: 1587625 - RNA, 13 nt, Human adenovirus F
gugccucuguccu

SEQ ID NO: 1587626 - RNA, 21 nt, Human adenovirus F
accugcacgcucuugcugugg

SEQ ID NO: 1587627 - RNA, 21 nt, Human adenovirus F
gcugucucaccuacuaccacu

SEQ ID NO: 1587628 - RNA, 14 nt, Human adenovirus F
uuaaccuuaaaauu

SEQ ID NO: 1587629 - RNA, 15 nt, Human adenovirus F
gccggcgggaagagg

SEQ ID NO: 1587630 - RNA, 19 nt, Human adenovirus F
gauaacgguuguuuuccac

SEQ ID NO: 1587631 - RNA, 13 nt, Human adenovirus F
ccugaaauacacu

SEQ ID NO: 1587632 - RNA, 23 nt, Human adenovirus F
ccaaacggcguucuagccaacac

SEQ ID NO: 1587633 - RNA, 22 nt, Human adenovirus F
ugguccugacuauuuuaugcag

SEQ ID NO: 1587634 - RNA, 19 nt, Human adenovirus F
cagcuacaagauuccacca

SEQ ID NO: 1587635 - RNA, 15 nt, Human adenovirus F
accccgacagaggcc

SEQ ID NO: 1587636 - RNA, 14 nt, Human adenovirus F
cgcacgcuggagga

SEQ ID NO: 1587637 - RNA, 17 nt, Human adenovirus F
caaaguccuggccaacu

SEQ ID NO: 1587638 - RNA, 12 nt, Human adenovirus F
gugucugccaga

SEQ ID NO: 1587639 - RNA, 16 nt, Human adenovirus F
gugcagauggaaacug

SEQ ID NO: 1587640 - RNA, 12 nt, Human adenovirus F
cugacuuccugg

SEQ ID NO: 1587641 - RNA, 19 nt, Human adenovirus F
gggcccugaccgaccuggg

SEQ ID NO: 1587642 - RNA, 16 nt, Human adenovirus F
aggcucuucuuccucg

SEQ ID NO: 1587643 - RNA, 17 nt, Human adenovirus F
caggaagcagcucaggu

SEQ ID NO: 1587644 - RNA, 13 nt, Human adenovirus F
cgugaccgagcag

SEQ ID NO: 1587645 - RNA, 23 nt, Human adenovirus F
ggcagcccagcgcccgggcccug

SEQ ID NO: 1587646 - RNA, 23 nt, Human adenovirus F
cgggcccgucgucaggccgcccg

SEQ ID NO: 1587647 - RNA, 22 nt, Human adenovirus F
gaugcaugcgaggggaaaucag

SEQ ID NO: 1587648 - RNA, 21 nt, Human adenovirus F
ucagagcucuucaucccagcc

SEQ ID NO: 1587649 - RNA, 19 nt, Human adenovirus F
accguaccugcuaccucuu

SEQ ID NO: 1587650 - RNA, 19 nt, Human adenovirus F
agcucaacgcaguggugga

SEQ ID NO: 1587651 - RNA, 13 nt, Human adenovirus F
cugccaguugggg

SEQ ID NO: 1587652 - RNA, 17 nt, Human adenovirus F
auaaaggggaccagcug

SEQ ID NO: 1587653 - RNA, 16 nt, Human adenovirus F
gcucgcgcacagcuuc

SEQ ID NO: 1587654 - RNA, 16 nt, Human adenovirus F
caugccuuucucccag

SEQ ID NO: 1587655 - RNA, 16 nt, Human adenovirus F
ccauuuggucuaucuc

SEQ ID NO: 1587656 - RNA, 17 nt, Human adenovirus F
acgcccaugcagccaug

SEQ ID NO: 1587657 - RNA, 23 nt, Human adenovirus F
agcugucuuaccaguuaaugcuu

SEQ ID NO: 1587658 - RNA, 23 nt, Human adenovirus F
gauuugccggcaacgcugcaggc

SEQ ID NO: 1587659 - RNA, 11 nt, Human adenovirus F
cuuucuuacac

SEQ ID NO: 1587660 - RNA, 19 nt, Human adenovirus F
cagaggccgguacccagac

SEQ ID NO: 1587661 - RNA, 21 nt, Human adenovirus F
cuagugaaacaugaggaggaa

SEQ ID NO: 1587662 - RNA, 16 nt, Human adenovirus F
cgggucgcagcaggug

SEQ ID NO: 1587663 - RNA, 18 nt, Human adenovirus F
ccaugcgccgagcggcug

SEQ ID NO: 1587664 - RNA, 13 nt, Human adenovirus F
acucuugcuggac

SEQ ID NO: 1587665 - RNA, 19 nt, Human adenovirus F
ugccacccaagggaaacaa

SEQ ID NO: 1587666 - RNA, 16 nt, Human adenovirus F
ccaccacgggaguugc

SEQ ID NO: 1587667 - RNA, 13 nt, Human adenovirus F
gcucgcuggcuag

SEQ ID NO: 1587668 - RNA, 16 nt, Human adenovirus F
cagcaggccgcuccca

SEQ ID NO: 1587669 - RNA, 19 nt, Human adenovirus F
acccagguuuaauacagug

SEQ ID NO: 1587670 - RNA, 14 nt, Human adenovirus F
cuacgcccaggagc

SEQ ID NO: 1587671 - RNA, 23 nt, Human adenovirus F
uaagcgggggaaauuuaaaccug

SEQ ID NO: 1587672 - RNA, 20 nt, Human adenovirus F
gugcggcuuuucgcagagac

SEQ ID NO: 1587673 - RNA, 16 nt, Human adenovirus F
guggccaacgccaggc

SEQ ID NO: 1587674 - RNA, 17 nt, Human adenovirus F
gcaugcccgagccggag

SEQ ID NO: 1587675 - RNA, 14 nt, Human adenovirus F
ccuccaccaccuuc

SEQ ID NO: 1587676 - RNA, 19 nt, Human adenovirus F
gcagguaggaccacuggag

SEQ ID NO: 1587677 - RNA, 11 nt, Human adenovirus F
gauggcagcag

SEQ ID NO: 1587678 - RNA, 17 nt, Human adenovirus F
gccagcauggcucagcc

SEQ ID NO: 1587679 - RNA, 15 nt, Human adenovirus F
uucucaccuggcaaa

SEQ ID NO: 1587680 - RNA, 20 nt, Human adenovirus F
acgagaucggcaccagccag

SEQ ID NO: 1587681 - RNA, 14 nt, Human adenovirus F
aggguuucggcagc

SEQ ID NO: 1587682 - RNA, 22 nt, Human adenovirus F
aaucagaugcauuuuggccuga

SEQ ID NO: 1587683 - RNA, 18 nt, Human adenovirus F
gugcgcgaacugggcugc

SEQ ID NO: 1587684 - RNA, 20 nt, Human adenovirus F
ccacaaaugucuuguggcug

SEQ ID NO: 1587685 - RNA, 16 nt, Human adenovirus F
aguuuuaauggaaacu

SEQ ID NO: 1587686 - RNA, 16 nt, Human adenovirus F
ccggagccggcggugg

SEQ ID NO: 1587687 - RNA, 16 nt, Human adenovirus F
ccuguucuaaaaccaa

SEQ ID NO: 1587688 - RNA, 13 nt, Human adenovirus F
cgccuccaccacc

SEQ ID NO: 1587689 - RNA, 19 nt, Human adenovirus F
caccaauaugcccaacauc

SEQ ID NO: 1587690 - RNA, 15 nt, Human adenovirus F
uaacucucccuuucc

SEQ ID NO: 1587691 - RNA, 17 nt, Human adenovirus F
ggcgccggcgggaagag

SEQ ID NO: 1587692 - RNA, 15 nt, Human adenovirus F
acacuuuuuugcaag

SEQ ID NO: 1587693 - RNA, 17 nt, Human adenovirus F
cgguggucuccagaccc

SEQ ID NO: 1587694 - RNA, 21 nt, Human adenovirus F
aguugcaagauaugucugcca

SEQ ID NO: 1587695 - RNA, 12 nt, Human adenovirus F
accucugcgcug

SEQ ID NO: 1587696 - RNA, 20 nt, Human adenovirus F
augcgucgggcgugcgggug

SEQ ID NO: 1587697 - RNA, 11 nt, Human adenovirus F
ugaccuguggg

SEQ ID NO: 1587698 - RNA, 22 nt, Human adenovirus F
uagaaaacgaaaacuuaacccu

SEQ ID NO: 1587699 - RNA, 13 nt, Human adenovirus F
aagcugccccguc

SEQ ID NO: 1587700 - RNA, 18 nt, Human adenovirus F
cucaaacacugcgcaaag

SEQ ID NO: 1587701 - RNA, 23 nt, Human adenovirus F
gugcggauuugggaacuguccag

SEQ ID NO: 1587702 - RNA, 16 nt, Human adenovirus F
aacgcccgcuagcucu

SEQ ID NO: 1587703 - RNA, 16 nt, Human adenovirus F
cugauaauguguguuu

SEQ ID NO: 1587704 - RNA, 18 nt, Human adenovirus F
ccggagaggggaggaagu

SEQ ID NO: 1587705 - RNA, 18 nt, Human adenovirus F
ggcggcccugcaaagcca

SEQ ID NO: 1587706 - RNA, 22 nt, Human adenovirus F
aacacggagcugucuuaccagu

SEQ ID NO: 1587707 - RNA, 11 nt, Human adenovirus F
aacacaggcgu

SEQ ID NO: 1587708 - RNA, 16 nt, Human adenovirus F
uuacauuguucgcugc

SEQ ID NO: 1587709 - RNA, 23 nt, Human adenovirus F
acgacuucaaccccgucuacccc

SEQ ID NO: 1587710 - RNA, 21 nt, Human adenovirus F
cagguguacuggucccuuccc

SEQ ID NO: 1587711 - RNA, 18 nt, Human adenovirus F
gcugaugcauuuguggga

SEQ ID NO: 1587712 - RNA, 21 nt, Human adenovirus F
gcagcguguccuuuggcgcga

SEQ ID NO: 1587713 - RNA, 21 nt, Human adenovirus F
cuagggugugaaggcaaaggu

SEQ ID NO: 1587714 - RNA, 20 nt, Human adenovirus F
gcaugccuccagcacugccg

SEQ ID NO: 1587715 - RNA, 16 nt, Human adenovirus F
auccagcaacucugaa

SEQ ID NO: 1587716 - RNA, 22 nt, Human adenovirus F
cagcucgcaaacaauaaaagaa

SEQ ID NO: 1587717 - RNA, 14 nt, Human adenovirus F
cuuaccagagccau

SEQ ID NO: 1587718 - RNA, 17 nt, Human adenovirus F
aaaggcgaaaagcggcc

SEQ ID NO: 1587719 - RNA, 14 nt, Human adenovirus F
gaucagccaggugg

SEQ ID NO: 1587720 - RNA, 12 nt, Human adenovirus F
ucuucuccuggc

SEQ ID NO: 1587721 - RNA, 19 nt, Human adenovirus F
aaguguuuauuuauuucuu

SEQ ID NO: 1587722 - RNA, 15 nt, Human adenovirus F
ccgccccugccaccg

SEQ ID NO: 1587723 - RNA, 18 nt, Human adenovirus F
agcccagcgcccgggccc

SEQ ID NO: 1587724 - RNA, 16 nt, Human adenovirus F
ccaguccgggccagac

SEQ ID NO: 1587725 - RNA, 22 nt, Human adenovirus F
ucuuaacucugaagaugucuga

SEQ ID NO: 1587726 - RNA, 22 nt, Human adenovirus F
ccagcgcccgggcccuggaggc

SEQ ID NO: 1587727 - RNA, 16 nt, Human adenovirus F
cucaugagcugggaga

SEQ ID NO: 1587728 - RNA, 23 nt, Human adenovirus F
gggcauuaaugggcaaaggggga

SEQ ID NO: 1587729 - RNA, 16 nt, Human adenovirus F
gggcaggaggacuaug

SEQ ID NO: 1587730 - RNA, 23 nt, Human adenovirus F
auccuucagagcauugugguaca

SEQ ID NO: 1587731 - RNA, 23 nt, Human adenovirus F
cgcugccguuuuuucagauggcu

SEQ ID NO: 1587732 - RNA, 15 nt, Human adenovirus F
ccuacggcaagcgcg

SEQ ID NO: 1587733 - RNA, 17 nt, Human adenovirus F
ggcgguacuaaggcggg

SEQ ID NO: 1587734 - RNA, 16 nt, Human adenovirus F
cuauguuaggcuuuau

SEQ ID NO: 1587735 - RNA, 16 nt, Human adenovirus F
guccgacggcgccucc

SEQ ID NO: 1587736 - RNA, 23 nt, Human adenovirus F
gaucgccaacagccccagcuggu

SEQ ID NO: 1587737 - RNA, 15 nt, Human adenovirus F
acugcggacuaccua

SEQ ID NO: 1587738 - RNA, 21 nt, Human adenovirus F
agauuuuucuucuccuggccg

SEQ ID NO: 1587739 - RNA, 18 nt, Human adenovirus F
ccagcugguaagcagccu

SEQ ID NO: 1587740 - RNA, 20 nt, Human adenovirus F
caauauaaugacaaugucca

SEQ ID NO: 1587741 - RNA, 16 nt, Human adenovirus F
aagaugcgauuuucca

SEQ ID NO: 1587742 - RNA, 23 nt, Human adenovirus F
gugucaauagcauacagaagacc

SEQ ID NO: 1587743 - RNA, 21 nt, Human adenovirus F
ggucagcaagacaccaguagc

SEQ ID NO: 1587744 - RNA, 14 nt, Human adenovirus F
ggaauggagcugug

SEQ ID NO: 1587745 - RNA, 18 nt, Human adenovirus F
ccaacagccccagcuggu

SEQ ID NO: 1587746 - RNA, 22 nt, Human adenovirus F
gcgcacggcccccaucucugug

SEQ ID NO: 1587747 - RNA, 22 nt, Human adenovirus F
gggaugcagguaggaccacugg

SEQ ID NO: 1587748 - RNA, 19 nt, Human adenovirus F
aaaaguccacaaaaacucc

SEQ ID NO: 1587749 - RNA, 16 nt, Human adenovirus F
agcggccgcgaccgga

SEQ ID NO: 1587750 - RNA, 16 nt, Human adenovirus F
aggauccauagagggc

SEQ ID NO: 1587751 - RNA, 22 nt, Human adenovirus F
acgcgauccggcacuugaacau

SEQ ID NO: 1587752 - RNA, 21 nt, Human adenovirus F
gcaacaucggcaccccucucc

SEQ ID NO: 1587753 - RNA, 17 nt, Human adenovirus F
uaggcuuuaacaacaca

SEQ ID NO: 1587754 - RNA, 20 nt, Human adenovirus F
cuggauacuggcaagagcca

SEQ ID NO: 1587755 - RNA, 20 nt, Human adenovirus F
auagcaccaacgugcaggcc

SEQ ID NO: 1587756 - RNA, 14 nt, Human adenovirus F
ucccaacacuuuca

SEQ ID NO: 1587757 - RNA, 16 nt, Human adenovirus F
guuaucacccaaagcc

SEQ ID NO: 1587758 - RNA, 22 nt, Human adenovirus F
ugaagccauucuucucuucggc

SEQ ID NO: 1587759 - RNA, 23 nt, Human adenovirus F
ucagacggccguaccaagccuga

SEQ ID NO: 1587760 - RNA, 15 nt, Human adenovirus F
gcgaaauugggcugc

SEQ ID NO: 1587761 - RNA, 16 nt, Human adenovirus F
auggaaacgcagccug

SEQ ID NO: 1587762 - RNA, 12 nt, Human adenovirus F
agccgccagccu

SEQ ID NO: 1587763 - RNA, 15 nt, Human adenovirus F
gcacacgcacuucaa

SEQ ID NO: 1587764 - RNA, 12 nt, Human adenovirus F
cgcggggcagga

SEQ ID NO: 1587765 - RNA, 15 nt, Human adenovirus F
cggaccuuuuacugu

SEQ ID NO: 1587766 - RNA, 18 nt, Human adenovirus F
gcgagcccccguggggga

SEQ ID NO: 1587767 - RNA, 23 nt, Human adenovirus F
ccucggcuacaguuucgcgcacc

SEQ ID NO: 1587768 - RNA, 16 nt, Human adenovirus F
uugcggugccugaagc

SEQ ID NO: 1587769 - RNA, 18 nt, Human adenovirus F
uccucugacgggggaggc

SEQ ID NO: 1587770 - RNA, 20 nt, Human adenovirus F
aguggaacuuccggaaggau

SEQ ID NO: 1587771 - RNA, 16 nt, Human adenovirus F
gcaaacaauaaaagaa

SEQ ID NO: 1587772 - RNA, 23 nt, Human adenovirus F
ucggguugccguccccagcgccc

SEQ ID NO: 1587773 - RNA, 19 nt, Human adenovirus F
ugccgcaauggucuuacau

SEQ ID NO: 1587774 - RNA, 19 nt, Human adenovirus F
ggcagcagugcuuggaaga

SEQ ID NO: 1587775 - RNA, 21 nt, Human adenovirus F
uguucaaggaaacaacagccu

SEQ ID NO: 1587776 - RNA, 21 nt, Human adenovirus F
guccuggccaacugccaccuc

SEQ ID NO: 1587777 - RNA, 20 nt, Human adenovirus F
ggcagcagugcuuggaagag

SEQ ID NO: 1587778 - RNA, 14 nt, Human adenovirus F
acgcggggcaggag

SEQ ID NO: 1587779 - RNA, 14 nt, Human adenovirus F
gcucugccugcgga

SEQ ID NO: 1587780 - RNA, 15 nt, Human adenovirus F
cugcgguggaggcca

SEQ ID NO: 1587781 - RNA, 15 nt, Human adenovirus F
gcuucgccuccuggu

SEQ ID NO: 1587782 - RNA, 14 nt, Human adenovirus F
aaaggggugguggg

SEQ ID NO: 1587783 - RNA, 18 nt, Human adenovirus F
uuccaccaacugcucuuu

SEQ ID NO: 1587784 - RNA, 20 nt, Human adenovirus F
cuuuugccacacuaaaguuu

SEQ ID NO: 1587785 - RNA, 17 nt, Human adenovirus F
cccaggaucccucagag

SEQ ID NO: 1587786 - RNA, 21 nt, Human adenovirus F
acgggcggcaaaugcucugca

SEQ ID NO: 1587787 - RNA, 15 nt, Human adenovirus F
gcgucgcuggcuccg

SEQ ID NO: 1587788 - RNA, 12 nt, Human adenovirus F
cuaucugcaaaa

SEQ ID NO: 1587789 - RNA, 15 nt, Human adenovirus F
uccacuuacaaccaa

SEQ ID NO: 1587790 - RNA, 14 nt, Human adenovirus F
agcauaauaacucu

SEQ ID NO: 1587791 - RNA, 14 nt, Human adenovirus F
caugcuuagccucg

SEQ ID NO: 1587792 - RNA, 15 nt, Human adenovirus F
agcaggccgcccaac

SEQ ID NO: 1587793 - RNA, 14 nt, Human adenovirus F
guaagugcagaggc

SEQ ID NO: 1587794 - RNA, 14 nt, Human adenovirus F
ugcccgccagcugg

SEQ ID NO: 1587795 - RNA, 10 nt, Human adenovirus F
acagcuggga

SEQ ID NO: 1587796 - RNA, 20 nt, Human adenovirus F
ggaccuuacuuucugggcac

SEQ ID NO: 1587797 - RNA, 20 nt, Human adenovirus F
auuuaauggcacaguguuug

SEQ ID NO: 1587798 - RNA, 16 nt, Human adenovirus F
guaggaccacuggagg

SEQ ID NO: 1587799 - RNA, 12 nt, Human adenovirus F
agccaaccuccg

SEQ ID NO: 1587800 - RNA, 18 nt, Human adenovirus F
aguggaguucagcgcgug

SEQ ID NO: 1587801 - RNA, 14 nt, Human adenovirus F
augcagacaagaca

SEQ ID NO: 1587802 - RNA, 18 nt, Human adenovirus F
guucaaaaccucuuacaa

SEQ ID NO: 1587803 - RNA, 18 nt, Human adenovirus F
cagccugagcugccagag

SEQ ID NO: 1587804 - RNA, 21 nt, Human adenovirus F
auuucuuugucuaacuaaaaa

SEQ ID NO: 1587805 - RNA, 23 nt, Human adenovirus F
ucgugcccguggaaaaagacagc

SEQ ID NO: 1587806 - RNA, 13 nt, Human adenovirus F
cuguacugugcau

SEQ ID NO: 1587807 - RNA, 12 nt, Human adenovirus F
uacacuaagccu

SEQ ID NO: 1587808 - RNA, 18 nt, Human adenovirus F
aacacugccuaccgcagc

SEQ ID NO: 1587809 - RNA, 14 nt, Human adenovirus F
gcuaauuuuucacc

SEQ ID NO: 1587810 - RNA, 19 nt, Human adenovirus F
gaugcugcugaugaggaaa

SEQ ID NO: 1587811 - RNA, 13 nt, Human adenovirus F
uggccauuuucca

SEQ ID NO: 1587812 - RNA, 16 nt, Human adenovirus F
cgccaacuccgcccac

SEQ ID NO: 1587813 - RNA, 13 nt, Human adenovirus F
ggcuaauggccag

SEQ ID NO: 1587814 - RNA, 17 nt, Human adenovirus F
aaggcccauaccaaaga

SEQ ID NO: 1587815 - RNA, 16 nt, Human adenovirus F
cagcccagcgcccggg

SEQ ID NO: 1587816 - RNA, 13 nt, Human adenovirus F
cgcagcgggcagg

SEQ ID NO: 1587817 - RNA, 19 nt, Human adenovirus F
ccucguuguuuuccucuga

SEQ ID NO: 1587818 - RNA, 13 nt, Human adenovirus F
gacgugcgguggg

SEQ ID NO: 1587819 - RNA, 11 nt, Human adenovirus F
ccauggagcua

SEQ ID NO: 1587820 - RNA, 18 nt, Human adenovirus F
cugucauacgcaggcaca

SEQ ID NO: 1587821 - RNA, 15 nt, Human adenovirus F
uccaagugccccaga

SEQ ID NO: 1587822 - RNA, 14 nt, Human adenovirus F
cagcgggcaggagc

SEQ ID NO: 1587823 - RNA, 22 nt, Human adenovirus F
aaaaucacuguuuuuaacuauu

SEQ ID NO: 1587824 - RNA, 15 nt, Human adenovirus F
uucaaagaagagcug

SEQ ID NO: 1587825 - RNA, 15 nt, Human adenovirus F
auguggaaccaggca

SEQ ID NO: 1587826 - RNA, 19 nt, Human adenovirus F
cagcaguccgucagcuugu

SEQ ID NO: 1587827 - RNA, 20 nt, Human adenovirus F
gaugcgccucaugagcuggg

SEQ ID NO: 1587828 - RNA, 13 nt, Human adenovirus F
caccagccagcuc

SEQ ID NO: 1587829 - RNA, 22 nt, Human adenovirus F
cuggccuuuugaacgaccugca

SEQ ID NO: 1587830 - RNA, 12 nt, Human adenovirus F
agccuuuaacug

SEQ ID NO: 1587831 - RNA, 24 nt, Human adenovirus F
ucgcacuccacuaaccaggcgagc

SEQ ID NO: 1587832 - RNA, 23 nt, Human adenovirus F
gagcgguccgucacgcgggccuu

SEQ ID NO: 1587833 - RNA, 13 nt, Human adenovirus F
ccuagguccgacc

SEQ ID NO: 1587834 - RNA, 15 nt, Human adenovirus F
ugccgagcuuuuacu

SEQ ID NO: 1587835 - RNA, 16 nt, Human adenovirus F
ccaguagcuuggaagc

SEQ ID NO: 1587836 - RNA, 16 nt, Human adenovirus F
gugaguuuugagggug

SEQ ID NO: 1587837 - RNA, 14 nt, Human adenovirus F
caggcuacugggga

SEQ ID NO: 1587838 - RNA, 14 nt, Human adenovirus F
cggaaccugaaaga

SEQ ID NO: 1587839 - RNA, 17 nt, Human adenovirus F
gaggccgucuaccugcg

SEQ ID NO: 1587840 - RNA, 14 nt, Human adenovirus F
acaauaagcagcuu

SEQ ID NO: 1587841 - RNA, 12 nt, Human adenovirus F
agucgaggaggu

SEQ ID NO: 1587842 - RNA, 18 nt, Human adenovirus F
guucgucaggccugcaag

SEQ ID NO: 1587843 - RNA, 14 nt, Human adenovirus F
cguuuaaaaacuug

SEQ ID NO: 1587844 - RNA, 20 nt, Human adenovirus F
uguggggcgugcgagccccc

SEQ ID NO: 1587845 - RNA, 16 nt, Human adenovirus F
ccaagugccccagaaa

SEQ ID NO: 1587846 - RNA, 16 nt, Human adenovirus F
ucguagggauugagug

SEQ ID NO: 1587847 - RNA, 23 nt, Human adenovirus F
uuuaccaccccagcacuuggauu

SEQ ID NO: 1587848 - RNA, 12 nt, Human adenovirus F
cauuaaaaacuu

SEQ ID NO: 1587849 - RNA, 22 nt, Human adenovirus F
cucacagaucacggaacccugc

SEQ ID NO: 1587850 - RNA, 17 nt, Human adenovirus F
ugcuauugaaaauaacu

SEQ ID NO: 1587851 - RNA, 20 nt, Human adenovirus F
caaagcacacagaacaaaac

SEQ ID NO: 1587852 - RNA, 13 nt, Human adenovirus F
aacguucaaacag

SEQ ID NO: 1587853 - RNA, 18 nt, Human adenovirus F
cuggcguuaccaggaaac

SEQ ID NO: 1587854 - RNA, 22 nt, Human adenovirus F
cagcgggaagagaggcagcccc

SEQ ID NO: 1587855 - RNA, 20 nt, Human adenovirus F
cccgcuauguuggcggcccu

SEQ ID NO: 1587856 - RNA, 14 nt, Human adenovirus F
cggcgccggacggg

SEQ ID NO: 1587857 - RNA, 12 nt, Human adenovirus F
gugcaggucggg

SEQ ID NO: 1587858 - RNA, 13 nt, Human adenovirus F
cacugacaguaag

SEQ ID NO: 1587859 - RNA, 16 nt, Human adenovirus F
guggaaagcaaguuuc

SEQ ID NO: 1587860 - RNA, 22 nt, Human adenovirus F
ccgagcggcugcuucugccagu

SEQ ID NO: 1587861 - RNA, 18 nt, Human adenovirus F
cgacugggcggcggccau

SEQ ID NO: 1587862 - RNA, 12 nt, Human adenovirus F
agacgaggaggc

SEQ ID NO: 1587863 - RNA, 23 nt, Human adenovirus F
ccgcaaaugggccuggcagcugg

SEQ ID NO: 1587864 - RNA, 23 nt, Human adenovirus F
ugacuuuaccccgacagaggccg

SEQ ID NO: 1587865 - RNA, 18 nt, Human adenovirus F
ggacagcuaugacccaga

SEQ ID NO: 1587866 - RNA, 23 nt, Human adenovirus F
guggaguuuuacuagacuaaaaa

SEQ ID NO: 1587867 - RNA, 14 nt, Human adenovirus F
uaugggcagcaucc

SEQ ID NO: 1587868 - RNA, 15 nt, Human adenovirus F
ugaguuagcucugaa

SEQ ID NO: 1587869 - RNA, 22 nt, Human adenovirus F
uaaacuccucuuccuccacagc

SEQ ID NO: 1587870 - RNA, 22 nt, Human adenovirus F
ugaacguacucuuuugccacgc

SEQ ID NO: 1587871 - RNA, 21 nt, Human adenovirus F
accgguuuuguaccaccuugg

SEQ ID NO: 1587872 - RNA, 15 nt, Human adenovirus F
ggagccggcgguggc

SEQ ID NO: 1587873 - RNA, 14 nt, Human adenovirus F
aacucucuuacauu

SEQ ID NO: 1587874 - RNA, 14 nt, Human adenovirus F
aacuuucuuacacu

SEQ ID NO: 1587875 - RNA, 13 nt, Human adenovirus F
aaaaaaagaauua

SEQ ID NO: 1587876 - RNA, 13 nt, Human adenovirus F
cucauuuuucccg

SEQ ID NO: 1587877 - RNA, 13 nt, Human adenovirus F
aauaaagcuuacc

SEQ ID NO: 1587878 - RNA, 15 nt, Human adenovirus F
gaccccguuugcccg

SEQ ID NO: 1587879 - RNA, 19 nt, Human adenovirus F
cuggaacaguaacacaggu

SEQ ID NO: 1587880 - RNA, 20 nt, Human adenovirus F
gagcagcgggaagagaggca

SEQ ID NO: 1587881 - RNA, 16 nt, Human adenovirus F
cguucgacggcggugg

SEQ ID NO: 1587882 - RNA, 19 nt, Human adenovirus F
gcccgcuugggggcgccau

SEQ ID NO: 1587883 - RNA, 22 nt, Human adenovirus F
agggauucuaagggaggcagca

SEQ ID NO: 1587884 - RNA, 17 nt, Human adenovirus F
gaagguugacuugcagg

SEQ ID NO: 1587885 - RNA, 19 nt, Human adenovirus F
acaaagucauccaaaucau

SEQ ID NO: 1587886 - RNA, 21 nt, Human adenovirus F
ccuugcuacggaggaagaggg

SEQ ID NO: 1587887 - RNA, 14 nt, Human adenovirus F
agcagcagcagcgg

SEQ ID NO: 1587888 - RNA, 17 nt, Human adenovirus F
cgcugccuuugcaauau

SEQ ID NO: 1587889 - RNA, 14 nt, Human adenovirus F
gggucuauuuggac

SEQ ID NO: 1587890 - RNA, 18 nt, Human adenovirus F
cgccuuaguugguaccaa

SEQ ID NO: 1587891 - RNA, 20 nt, Human adenovirus F
augcaacuuggaagggaagg

SEQ ID NO: 1587892 - RNA, 21 nt, Human adenovirus F
cauuaggccgucccugggaug

SEQ ID NO: 1587893 - RNA, 22 nt, Human adenovirus F
acaacguggcucaauguaacau

SEQ ID NO: 1587894 - RNA, 24 nt, Human adenovirus F
cggcguaguugcguagacgcugga

SEQ ID NO: 1587895 - RNA, 14 nt, Human adenovirus F
gcccgggcccugga

SEQ ID NO: 1587896 - RNA, 18 nt, Human adenovirus F
cgaggggcuggcccgcuu

SEQ ID NO: 1587897 - RNA, 23 nt, Human adenovirus F
caccuucagugucgucuacaacg

SEQ ID NO: 1587898 - RNA, 18 nt, Human adenovirus F
ccgaccauuaccaccguc

SEQ ID NO: 1587899 - RNA, 17 nt, Human adenovirus F
cucccugaacuaccaga

SEQ ID NO: 1587900 - RNA, 21 nt, Human adenovirus F
cagcaguuuugguuacagugg

SEQ ID NO: 1587901 - RNA, 20 nt, Human adenovirus F
aaaaaccgccacaugaacac

SEQ ID NO: 1587902 - RNA, 13 nt, Human adenovirus F
uccaguggagcaa

SEQ ID NO: 1587903 - RNA, 14 nt, Human adenovirus F
agaugcccuguccg

SEQ ID NO: 1587904 - RNA, 22 nt, Human adenovirus F
ugcgcagcaguaucaguggagu

SEQ ID NO: 1587905 - RNA, 15 nt, Human adenovirus F
cuuuaugacuauggu

SEQ ID NO: 1587906 - RNA, 17 nt, Human adenovirus F
caacggcaaucccagca

SEQ ID NO: 1587907 - RNA, 19 nt, Human adenovirus F
agacgacugggcggcggcc

SEQ ID NO: 1587908 - RNA, 21 nt, Human adenovirus F
uaacggugaagcuucccaaca

SEQ ID NO: 1587909 - RNA, 22 nt, Human adenovirus F
gagcaaacggugaacgaggagc

SEQ ID NO: 1587910 - RNA, 22 nt, Human adenovirus F
cgccggcauguacggcggcgcc

SEQ ID NO: 1587911 - RNA, 21 nt, Human adenovirus F
ggaauguggggcgugcgagcc

SEQ ID NO: 1587912 - RNA, 18 nt, Human adenovirus F
uuccagcagcaccaccug

SEQ ID NO: 1587913 - RNA, 19 nt, Human adenovirus F
uacuggcaagagccaccuu

SEQ ID NO: 1587914 - RNA, 16 nt, Human adenovirus F
ugaaauuaauugcacu

SEQ ID NO: 1587915 - RNA, 22 nt, Human adenovirus F
caaguauacauuugaacagcug

SEQ ID NO: 1587916 - RNA, 19 nt, Human adenovirus F
guacggaccaccagaugau

SEQ ID NO: 1587917 - RNA, 13 nt, Human adenovirus F
ggcggcccugcaa

SEQ ID NO: 1587918 - RNA, 17 nt, Human adenovirus F
gaucccgacucacugga

SEQ ID NO: 1587919 - RNA, 13 nt, Human adenovirus F
gccaccuccaccg

SEQ ID NO: 1587920 - RNA, 16 nt, Human adenovirus F
gggauucuaagggagg

SEQ ID NO: 1587921 - RNA, 20 nt, Human adenovirus F
cugggacagccuagacgagg

SEQ ID NO: 1587922 - RNA, 14 nt, Human adenovirus F
caagcuaaaugcca

SEQ ID NO: 1587923 - RNA, 22 nt, Human adenovirus F
ccugcggauuaagaaccacuga

SEQ ID NO: 1587924 - RNA, 19 nt, Human adenovirus F
auguaaaguucuaaaaagc

SEQ ID NO: 1587925 - RNA, 21 nt, Human adenovirus F
gcuaaaucuuccucccaaagu

SEQ ID NO: 1587926 - RNA, 23 nt, Human adenovirus F
ccccggcggcgggugcaguggcg

SEQ ID NO: 1587927 - RNA, 18 nt, Human adenovirus F
agccuuuguuccuuccga

SEQ ID NO: 1587928 - RNA, 12 nt, Human adenovirus F
gagagccgagug

SEQ ID NO: 1587929 - RNA, 14 nt, Human adenovirus F
agccccaggccaac

SEQ ID NO: 1587930 - RNA, 14 nt, Human adenovirus F
cuuaaaggagcacu

SEQ ID NO: 1587931 - RNA, 17 nt, Human adenovirus F
agcauuaaccuguaugc

SEQ ID NO: 1587932 - RNA, 22 nt, Human adenovirus F
gccguugcucucuccggagccg

SEQ ID NO: 1587933 - RNA, 23 nt, Human adenovirus F
caugagucuguuuggugggcuga

SEQ ID NO: 1587934 - RNA, 17 nt, Human adenovirus F
ggucguccugucgcccc

SEQ ID NO: 1587935 - RNA, 20 nt, Human adenovirus F
cccccguuugcuuccuccaa

SEQ ID NO: 1587936 - RNA, 16 nt, Human adenovirus F
cacgcugacccuuccc

SEQ ID NO: 1587937 - RNA, 16 nt, Human adenovirus F
gcauccaccagccgca

SEQ ID NO: 1587938 - RNA, 13 nt, Human adenovirus F
ggguuuaccuggu

SEQ ID NO: 1587939 - RNA, 13 nt, Human adenovirus F
cucaacugugccu

SEQ ID NO: 1587940 - RNA, 23 nt, Human adenovirus F
acgguugcccgccagcuggcaaa

SEQ ID NO: 1587941 - RNA, 16 nt, Human adenovirus F
cccguaaaaaggaggg

SEQ ID NO: 1587942 - RNA, 16 nt, Human adenovirus F
accguuaaucucccuc

SEQ ID NO: 1587943 - RNA, 18 nt, Human adenovirus F
ggaguaccugagcccggg

SEQ ID NO: 1587944 - RNA, 16 nt, Human adenovirus F
cgguggcaacccugag

SEQ ID NO: 1587945 - RNA, 13 nt, Human adenovirus F
caagaaacacaaa

SEQ ID NO: 1587946 - RNA, 21 nt, Human adenovirus F
ucaacgcggggcaccuucagc

SEQ ID NO: 1587947 - RNA, 21 nt, Human adenovirus F
cggaaguuaaagugcgcccca

SEQ ID NO: 1587948 - RNA, 19 nt, Human adenovirus F
augugucuccgcugggaga

SEQ ID NO: 1587949 - RNA, 15 nt, Human adenovirus F
cgccaguccaccgcg

SEQ ID NO: 1587950 - RNA, 22 nt, Human adenovirus F
caacagggacacgagcugucau

SEQ ID NO: 1587951 - RNA, 22 nt, Human adenovirus F
gugcuggggaauggagcugugg

SEQ ID NO: 1587952 - RNA, 13 nt, Human adenovirus F
cccacuuaaugcu

SEQ ID NO: 1587953 - RNA, 14 nt, Human adenovirus F
aaucuucaaacauu

SEQ ID NO: 1587954 - RNA, 23 nt, Human adenovirus F
ccgacagaggccgguacccagac

SEQ ID NO: 1587955 - RNA, 15 nt, Human adenovirus F
ccaccguggcuccca

SEQ ID NO: 1587956 - RNA, 20 nt, Human adenovirus F
ugggcauaacuucagcacuu

SEQ ID NO: 1587957 - RNA, 19 nt, Human adenovirus F
auccucaagacuuggaaau

SEQ ID NO: 1587958 - RNA, 12 nt, Human adenovirus F
gcccgggcacau

SEQ ID NO: 1587959 - RNA, 16 nt, Human adenovirus F
uggaugcauccuccca

SEQ ID NO: 1587960 - RNA, 13 nt, Human adenovirus F
agaccaacaaacg

SEQ ID NO: 1587961 - RNA, 13 nt, Human adenovirus F
agccaaccaggcc

SEQ ID NO: 1587962 - RNA, 20 nt, Human adenovirus F
cuguauuuugcuacauaacu

SEQ ID NO: 1587963 - RNA, 22 nt, Human adenovirus F
cuauuucuuugucuaacuaaaa

SEQ ID NO: 1587964 - RNA, 13 nt, Human adenovirus F
uucgcccggacac

SEQ ID NO: 1587965 - RNA, 19 nt, Human adenovirus F
gcagaggaggugaugcugc

SEQ ID NO: 1587966 - RNA, 17 nt, Human adenovirus F
ugcuacggaggaagagg

SEQ ID NO: 1587967 - RNA, 21 nt, Human adenovirus F
cguagaguuugggagccagga

SEQ ID NO: 1587968 - RNA, 15 nt, Human adenovirus F
gaaugcccuuucaaa

SEQ ID NO: 1587969 - RNA, 19 nt, Human adenovirus F
agcgcagucuaagccuggc

SEQ ID NO: 1587970 - RNA, 20 nt, Human adenovirus F
guggauaccgcugcagcugc

SEQ ID NO: 1587971 - RNA, 22 nt, Human adenovirus F
uaagaccguuuucguuccacac

SEQ ID NO: 1587972 - RNA, 16 nt, Human adenovirus F
ggguauuugauuuaac

SEQ ID NO: 1587973 - RNA, 17 nt, Human adenovirus F
cuggggaauggagcugu

SEQ ID NO: 1587974 - RNA, 15 nt, Human adenovirus F
gaugcugcugaugag

SEQ ID NO: 1587975 - RNA, 20 nt, Human adenovirus F
gccaacuccaaccaagaaau

SEQ ID NO: 1587976 - RNA, 20 nt, Human adenovirus F
ccauccaucacgccaacgcc

SEQ ID NO: 1587977 - RNA, 17 nt, Human adenovirus F
gaaaccuuaaccacccc

SEQ ID NO: 1587978 - RNA, 20 nt, Human adenovirus F
ccucgagugcguaagaccuc

SEQ ID NO: 1587979 - RNA, 20 nt, Human adenovirus F
gaccacgucgccaacagugu

SEQ ID NO: 1587980 - RNA, 13 nt, Human adenovirus F
gguuccaccaagc

SEQ ID NO: 1587981 - RNA, 21 nt, Human adenovirus F
uaagcgucggcgccacacugu

SEQ ID NO: 1587982 - RNA, 15 nt, Human adenovirus F
auuucaccuacucug

SEQ ID NO: 1587983 - RNA, 19 nt, Human adenovirus F
ugaucuuauggaagacucu

SEQ ID NO: 1587984 - RNA, 14 nt, Human adenovirus F
gugucaguuuccac

SEQ ID NO: 1587985 - RNA, 15 nt, Human adenovirus F
ccaugccggcuccga

SEQ ID NO: 1587986 - RNA, 15 nt, Human adenovirus F
cugucuagccgcacg

SEQ ID NO: 1587987 - RNA, 20 nt, Human adenovirus F
agcccauucugccaguuggg

SEQ ID NO: 1587988 - RNA, 16 nt, Human adenovirus F
aggacucacgccaggc

SEQ ID NO: 1587989 - RNA, 16 nt, Human adenovirus F
cgaucgcuccaggugg

SEQ ID NO: 1587990 - RNA, 13 nt, Human adenovirus F
uccauaacuaaaa

SEQ ID NO: 1587991 - RNA, 15 nt, Human adenovirus F
cugaagacacauugg

SEQ ID NO: 1587992 - RNA, 16 nt, Human adenovirus F
gcaccgcgcggcggcc

SEQ ID NO: 1587993 - RNA, 20 nt, Human adenovirus F
augcagccauguuauggguc

SEQ ID NO: 1587994 - RNA, 19 nt, Human adenovirus F
ccgagcuucuuagcgaaac

SEQ ID NO: 1587995 - RNA, 13 nt, Human adenovirus F
cuguuacuauuaa

SEQ ID NO: 1587996 - RNA, 21 nt, Human adenovirus F
cuaaccguuaaucucccuccc

SEQ ID NO: 1587997 - RNA, 22 nt, Human adenovirus F
cucggguagcgguuggugcugc

SEQ ID NO: 1587998 - RNA, 22 nt, Human adenovirus F
cgcggaagaagaugaggaggac

SEQ ID NO: 1587999 - RNA, 14 nt, Human adenovirus F
aggcgagcucaggg

SEQ ID NO: 1588000 - RNA, 21 nt, Human adenovirus F
caauuuugcaaacuauucugg

SEQ ID NO: 1588001 - RNA, 21 nt, Human adenovirus F
cugggguucauguugugcaga

SEQ ID NO: 1588002 - RNA, 15 nt, Human adenovirus F
ccuccagcacugccg

SEQ ID NO: 1588003 - RNA, 18 nt, Human adenovirus F
uacaaaugcucagucacu

SEQ ID NO: 1588004 - RNA, 16 nt, Human adenovirus F
augccuuacuggagcg

SEQ ID NO: 1588005 - RNA, 22 nt, Human adenovirus F
acagccuguuacuauuaaugca

SEQ ID NO: 1588006 - RNA, 15 nt, Human adenovirus F
caaaaugugcagcaa

SEQ ID NO: 1588007 - RNA, 17 nt, Human adenovirus F
agggcucugccugcgga

SEQ ID NO: 1588008 - RNA, 13 nt, Human adenovirus F
cgccuccaacaca

SEQ ID NO: 1588009 - RNA, 21 nt, Human adenovirus F
ggccaacugccaccuccaccg

SEQ ID NO: 1588010 - RNA, 15 nt, Human adenovirus F
ggggcggaccugcaa

SEQ ID NO: 1588011 - RNA, 15 nt, Human adenovirus F
cuuuuugggaggaag

SEQ ID NO: 1588012 - RNA, 15 nt, Human adenovirus F
aguuuuaagguauau

SEQ ID NO: 1588013 - RNA, 16 nt, Human adenovirus F
accccaccguggcucc

SEQ ID NO: 1588014 - RNA, 12 nt, Human adenovirus F
guaugggcagca

SEQ ID NO: 1588015 - RNA, 18 nt, Human adenovirus F
aagcuggguggaaagcaa

SEQ ID NO: 1588016 - RNA, 20 nt, Human adenovirus F
gucgggccaugcgccgagcg

SEQ ID NO: 1588017 - RNA, 15 nt, Human adenovirus F
ggauguacuccuuuu

SEQ ID NO: 1588018 - RNA, 22 nt, Human adenovirus F
aaccggcggcguacacuggcug

SEQ ID NO: 1588019 - RNA, 13 nt, Human adenovirus F
agccgccagccuc

SEQ ID NO: 1588020 - RNA, 17 nt, Human adenovirus F
gccaucgacguucucuc

SEQ ID NO: 1588021 - RNA, 22 nt, Human adenovirus F
cagcaccgcacagaaagcucau

SEQ ID NO: 1588022 - RNA, 16 nt, Human adenovirus F
aggcgcaaucccaggc

SEQ ID NO: 1588023 - RNA, 18 nt, Human adenovirus F
ccugggaugcagguagga

SEQ ID NO: 1588024 - RNA, 12 nt, Human adenovirus F
acgcuguuccaa

SEQ ID NO: 1588025 - RNA, 23 nt, Human adenovirus F
cacaaaguccuggccaacugcca

SEQ ID NO: 1588026 - RNA, 15 nt, Human adenovirus F
gcuaacuuguggaga

SEQ ID NO: 1588027 - RNA, 19 nt, Human adenovirus F
caucugcagcauugccacu

SEQ ID NO: 1588028 - RNA, 21 nt, Human adenovirus F
cacccggguuuaccuggugga

SEQ ID NO: 1588029 - RNA, 15 nt, Human adenovirus F
gcuacacaacaaauc

SEQ ID NO: 1588030 - RNA, 15 nt, Human adenovirus F
accaaauucugcuag

SEQ ID NO: 1588031 - RNA, 22 nt, Human adenovirus F
aggacgccucggaguaccugag

SEQ ID NO: 1588032 - RNA, 18 nt, Human adenovirus F
caacucauggugccaaag

SEQ ID NO: 1588033 - RNA, 19 nt, Human adenovirus F
ccuucacuccucgccaggc

SEQ ID NO: 1588034 - RNA, 14 nt, Human adenovirus F
ucacccaaagccaa

SEQ ID NO: 1588035 - RNA, 21 nt, Human adenovirus F
ugucgucgacgacggcgccgg

SEQ ID NO: 1588036 - RNA, 17 nt, Human adenovirus F
accuggggccuacggaa

SEQ ID NO: 1588037 - RNA, 20 nt, Human adenovirus F
cagccugagcugccagaggc

SEQ ID NO: 1588038 - RNA, 18 nt, Human adenovirus F
ggcgaggggcuggcccgc

SEQ ID NO: 1588039 - RNA, 17 nt, Human adenovirus F
caccccuagucccuccu

SEQ ID NO: 1588040 - RNA, 13 nt, Human adenovirus F
cgcaacacaucca

SEQ ID NO: 1588041 - RNA, 21 nt, Human adenovirus F
cccaccgaguuccugcgcugc

SEQ ID NO: 1588042 - RNA, 13 nt, Human adenovirus F
aaaauaacucacu

SEQ ID NO: 1588043 - RNA, 23 nt, Human adenovirus F
aguggagggauuuaauggcacag

SEQ ID NO: 1588044 - RNA, 15 nt, Human adenovirus F
gcuuccggcauuaac

SEQ ID NO: 1588045 - RNA, 22 nt, Human adenovirus F
ggaccccauggaugagcccaca

SEQ ID NO: 1588046 - RNA, 20 nt, Human adenovirus F
cauuuaugcccaacaguaca

SEQ ID NO: 1588047 - RNA, 18 nt, Human adenovirus F
cggggcuaacuggcagag

SEQ ID NO: 1588048 - RNA, 17 nt, Human adenovirus F
caccgcgcccguccucc

SEQ ID NO: 1588049 - RNA, 14 nt, Human adenovirus F
aggcggaaaccaag

SEQ ID NO: 1588050 - RNA, 14 nt, Human adenovirus F
cgccagcuggcaaa

SEQ ID NO: 1588051 - RNA, 22 nt, Human adenovirus F
ugacgaacuuacuagucuuagc

SEQ ID NO: 1588052 - RNA, 20 nt, Human adenovirus F
ccaaauuacgucauugacau

SEQ ID NO: 1588053 - RNA, 19 nt, Human adenovirus F
ccgcagacgaacacaauau

SEQ ID NO: 1588054 - RNA, 15 nt, Human adenovirus F
aacagcuccucagcc

SEQ ID NO: 1588055 - RNA, 23 nt, Human adenovirus F
caccccucuccgugcaaaacaau

SEQ ID NO: 1588056 - RNA, 14 nt, Human adenovirus F
acuucuuaauaaag

SEQ ID NO: 1588057 - RNA, 17 nt, Human adenovirus F
aaacuucccuuugacaa

SEQ ID NO: 1588058 - RNA, 17 nt, Human adenovirus F
cacggaacccugccgcu

SEQ ID NO: 1588059 - RNA, 18 nt, Human adenovirus F
cuacgccuccaccaccuu

SEQ ID NO: 1588060 - RNA, 16 nt, Human adenovirus F
aucgacguucucuccc

SEQ ID NO: 1588061 - RNA, 20 nt, Human adenovirus F
uugcgcaggcgaauaaaagg

SEQ ID NO: 1588062 - RNA, 22 nt, Human adenovirus F
caaaaugugcagcaaaaacucc

SEQ ID NO: 1588063 - RNA, 22 nt, Human adenovirus F
gugcuuauuaagcgagcagagc

SEQ ID NO: 1588064 - RNA, 13 nt, Human adenovirus F
cuaccgcagcugg

SEQ ID NO: 1588065 - RNA, 20 nt, Human adenovirus F
augagcuuacuuuaaaacuu

SEQ ID NO: 1588066 - RNA, 18 nt, Human adenovirus F
cuucaccuuaucccauga

SEQ ID NO: 1588067 - RNA, 20 nt, Human adenovirus F
aggcagcuucucgaggccaa

SEQ ID NO: 1588068 - RNA, 15 nt, Human adenovirus F
ggcgcacggccccca

SEQ ID NO: 1588069 - RNA, 17 nt, Human adenovirus F
uacuauuaaugcaaaca

SEQ ID NO: 1588070 - RNA, 18 nt, Human adenovirus F
gaaucuuacuuugacaug

SEQ ID NO: 1588071 - RNA, 14 nt, Human adenovirus F
cugcccuuccuccc

SEQ ID NO: 1588072 - RNA, 21 nt, Human adenovirus F
aagaugacuucaaccccgucu

SEQ ID NO: 1588073 - RNA, 23 nt, Human adenovirus F
ggcaauguugccaccgagaucac

SEQ ID NO: 1588074 - RNA, 17 nt, Human adenovirus F
gcggugauauuaagaug

SEQ ID NO: 1588075 - RNA, 16 nt, Human adenovirus F
gaggguacuagcagug

SEQ ID NO: 1588076 - RNA, 14 nt, Human adenovirus F
caguuaccaaggcg

SEQ ID NO: 1588077 - RNA, 22 nt, Human adenovirus F
cagggcgugcaagugggcucag

SEQ ID NO: 1588078 - RNA, 16 nt, Human adenovirus F
ccaaaauggcucugcu

SEQ ID NO: 1588079 - RNA, 15 nt, Human adenovirus F
ugggauuacaaauuu

SEQ ID NO: 1588080 - RNA, 17 nt, Human adenovirus F
guggaaagccugguaga

SEQ ID NO: 1588081 - RNA, 13 nt, Human adenovirus F
ucacuuccgccgc

SEQ ID NO: 1588082 - RNA, 21 nt, Human adenovirus F
caaagugcugucuagccgcac

SEQ ID NO: 1588083 - RNA, 15 nt, Human adenovirus F
acccuaguuguggaa

SEQ ID NO: 1588084 - RNA, 16 nt, Human adenovirus F
uugaagaacugggagu

SEQ ID NO: 1588085 - RNA, 13 nt, Human adenovirus F
cugacaauggaac

SEQ ID NO: 1588086 - RNA, 16 nt, Human adenovirus F
acaccggugggcuugu

SEQ ID NO: 1588087 - RNA, 16 nt, Human adenovirus F
cuucuauugcacuuaa

SEQ ID NO: 1588088 - RNA, 14 nt, Human adenovirus F
acugcuaccuccuc

SEQ ID NO: 1588089 - RNA, 13 nt, Human adenovirus F
cuggcuggcccug

SEQ ID NO: 1588090 - RNA, 22 nt, Human adenovirus F
ccuuuaauuaaaguuauucuga

SEQ ID NO: 1588091 - RNA, 13 nt, Human adenovirus F
caaagaagagcug

SEQ ID NO: 1588092 - RNA, 19 nt, Human adenovirus F
gcccggacuuggcgugcag

SEQ ID NO: 1588093 - RNA, 13 nt, Human adenovirus F
cgauacugcaaac

SEQ ID NO: 1588094 - RNA, 17 nt, Human adenovirus F
gcuaaggacgguggcau

SEQ ID NO: 1588095 - RNA, 21 nt, Human adenovirus F
gaagccacgcugaacuuuuug

SEQ ID NO: 1588096 - RNA, 11 nt, Human adenovirus F
agacaauccua

SEQ ID NO: 1588097 - RNA, 12 nt, Human adenovirus F
cacuccugcagu

SEQ ID NO: 1588098 - RNA, 13 nt, Human adenovirus F
caguggccgcacu

SEQ ID NO: 1588099 - RNA, 22 nt, Human adenovirus F
caggagcgcagucuaagccugg

SEQ ID NO: 1588100 - RNA, 22 nt, Human adenovirus F
ggauaaacugagcguaggauuc

SEQ ID NO: 1588101 - RNA, 21 nt, Human adenovirus F
auaggcauuaggccgucccug

SEQ ID NO: 1588102 - RNA, 22 nt, Human adenovirus F
ugggggcccugaccgaccuggg

SEQ ID NO: 1588103 - RNA, 22 nt, Human adenovirus F
cguagguuuaaauuacacuaag

SEQ ID NO: 1588104 - RNA, 18 nt, Human adenovirus F
ccacgauguaaccacaga

SEQ ID NO: 1588105 - RNA, 18 nt, Human adenovirus F
cccagcgcccgggcccug

SEQ ID NO: 1588106 - RNA, 20 nt, Human adenovirus F
gcugagugacgaucuggggg

SEQ ID NO: 1588107 - RNA, 12 nt, Human adenovirus F
gcugcagccaga

SEQ ID NO: 1588108 - RNA, 16 nt, Human adenovirus F
accaaaggugguucug

SEQ ID NO: 1588109 - RNA, 14 nt, Human adenovirus F
ugggacagccuaga

SEQ ID NO: 1588110 - RNA, 22 nt, Human adenovirus F
caaccccacgccaagccugaag

SEQ ID NO: 1588111 - RNA, 17 nt, Human adenovirus F
uuggagcagccugugga

SEQ ID NO: 1588112 - RNA, 16 nt, Human adenovirus F
ccauggaaacgcagcc

SEQ ID NO: 1588113 - RNA, 17 nt, Human adenovirus F
agcgcugccuuugcaau

SEQ ID NO: 1588114 - RNA, 20 nt, Human adenovirus F
uccuggccaacugccaccuc

SEQ ID NO: 1588115 - RNA, 15 nt, Human adenovirus F
gcaaacaauaaaaga

SEQ ID NO: 1588116 - RNA, 15 nt, Human adenovirus F
gcagacgaacacaau

SEQ ID NO: 1588117 - RNA, 19 nt, Human adenovirus F
aagccacaauaagcagcuu

SEQ ID NO: 1588118 - RNA, 15 nt, Human adenovirus F
guccugucgccccug

SEQ ID NO: 1588119 - RNA, 14 nt, Human adenovirus F
gacgcuggaagagg

SEQ ID NO: 1588120 - RNA, 22 nt, Human adenovirus F
cgcuuucaguuggagcagccug

SEQ ID NO: 1588121 - RNA, 21 nt, Human adenovirus F
gccucuguuguagucugccaa

SEQ ID NO: 1588122 - RNA, 14 nt, Human adenovirus F
aaccuauugguucc

SEQ ID NO: 1588123 - RNA, 18 nt, Human adenovirus F
acaaagucauccaaauca

SEQ ID NO: 1588124 - RNA, 15 nt, Human adenovirus F
accaccgcaaacaac

SEQ ID NO: 1588125 - RNA, 21 nt, Human adenovirus F
acauuguguccugcaacaaaa

SEQ ID NO: 1588126 - RNA, 22 nt, Human adenovirus F
accccacgccaagccugaagcc

SEQ ID NO: 1588127 - RNA, 14 nt, Human adenovirus F
agaccuuccaggaa

SEQ ID NO: 1588128 - RNA, 16 nt, Human adenovirus F
cgccgaggcacuguuc

SEQ ID NO: 1588129 - RNA, 14 nt, Human adenovirus F
gaggaggaggccau

SEQ ID NO: 1588130 - RNA, 24 nt, Human adenovirus F
acguaccagaaagcuacaaggaca

SEQ ID NO: 1588131 - RNA, 13 nt, Human adenovirus F
cugcgggaggaau

SEQ ID NO: 1588132 - RNA, 23 nt, Human adenovirus F
uaacacugcgauuagaaaacggg

SEQ ID NO: 1588133 - RNA, 23 nt, Human adenovirus F
ugacuucaaccccgucuacccuu

SEQ ID NO: 1588134 - RNA, 15 nt, Human adenovirus F
cuuaugcgcuguacu

SEQ ID NO: 1588135 - RNA, 17 nt, Human adenovirus F
agcccggguccaggcua

SEQ ID NO: 1588136 - RNA, 15 nt, Human adenovirus F
cgcuaucaggaagca

SEQ ID NO: 1588137 - RNA, 14 nt, Human adenovirus F
gacguuaaccuagg

SEQ ID NO: 1588138 - RNA, 14 nt, Human adenovirus F
cugguggacaacaa

SEQ ID NO: 1588139 - RNA, 23 nt, Human adenovirus F
caacccugaggaggaggccaucc

SEQ ID NO: 1588140 - RNA, 16 nt, Human adenovirus F
gaugucauaaacguaa

SEQ ID NO: 1588141 - RNA, 12 nt, Human adenovirus F
gaagcaaucaac

SEQ ID NO: 1588142 - RNA, 22 nt, Human adenovirus F
ccggcggcguacacuggcuggc

SEQ ID NO: 1588143 - RNA, 21 nt, Human adenovirus F
acguugcauuauggccauggu

SEQ ID NO: 1588144 - RNA, 16 nt, Human adenovirus F
cuuucaucuuaacucu

SEQ ID NO: 1588145 - RNA, 15 nt, Human adenovirus F
gcucagccccgccgg

SEQ ID NO: 1588146 - RNA, 17 nt, Human adenovirus F
gcaacgcugcaggcgcu

SEQ ID NO: 1588147 - RNA, 12 nt, Human adenovirus F
cauuauugcacu

SEQ ID NO: 1588148 - RNA, 21 nt, Human adenovirus F
cuugcuuuuucacgacggggu

SEQ ID NO: 1588149 - RNA, 22 nt, Human adenovirus F
aagcucgucauaggccauuuug

SEQ ID NO: 1588150 - RNA, 18 nt, Human adenovirus F
gcaguccacuuaacagcu

SEQ ID NO: 1588151 - RNA, 17 nt, Human adenovirus F
ccaaaacuuucaacaaa

SEQ ID NO: 1588152 - RNA, 23 nt, Human adenovirus F
caaguuucgggcgcgggugaugg

SEQ ID NO: 1588153 - RNA, 11 nt, Human adenovirus F
auuuucugcca

SEQ ID NO: 1588154 - RNA, 15 nt, Human adenovirus F
cagccggaggagugg

SEQ ID NO: 1588155 - RNA, 11 nt, Human adenovirus F
acaagggcuuc

SEQ ID NO: 1588156 - RNA, 13 nt, Human adenovirus F
caaccaggccuug

SEQ ID NO: 1588157 - RNA, 23 nt, Human adenovirus F
gcaggccagucggcaggcuuccu

SEQ ID NO: 1588158 - RNA, 22 nt, Human adenovirus F
gacuuuaccccgacagaggccg

SEQ ID NO: 1588159 - RNA, 14 nt, Human adenovirus F
uuagcucugaacac

SEQ ID NO: 1588160 - RNA, 20 nt, Human adenovirus F
gcuacuuaucacaucuuuuu

SEQ ID NO: 1588161 - RNA, 16 nt, Human adenovirus F
cgccgccccuggccug

SEQ ID NO: 1588162 - RNA, 22 nt, Human adenovirus F
acgaucgcuccagguggggcgg

SEQ ID NO: 1588163 - RNA, 15 nt, Human adenovirus F
guggucacucucagc

SEQ ID NO: 1588164 - RNA, 17 nt, Human adenovirus F
aguugagcgugguggca

SEQ ID NO: 1588165 - RNA, 19 nt, Human adenovirus F
gggcaagcuucucagcuca

SEQ ID NO: 1588166 - RNA, 17 nt, Human adenovirus F
ccucccuuugcccccca

SEQ ID NO: 1588167 - RNA, 14 nt, Human adenovirus F
agguggaccccaug

SEQ ID NO: 1588168 - RNA, 11 nt, Human adenovirus F
gccccuggccu

SEQ ID NO: 1588169 - RNA, 19 nt, Human adenovirus F
accccuaugacaccuccuc

SEQ ID NO: 1588170 - RNA, 20 nt, Human adenovirus F
aggagcugucucagcaguug

SEQ ID NO: 1588171 - RNA, 23 nt, Human adenovirus F
gcuaauacuucuuaauaaagaca

SEQ ID NO: 1588172 - RNA, 21 nt, Human adenovirus F
cuauuacagguauaaagguug

SEQ ID NO: 1588173 - RNA, 18 nt, Human adenovirus F
ucagcgcgugaccaucac

SEQ ID NO: 1588174 - RNA, 21 nt, Human adenovirus F
cgcgcuucgccuccugguggc

SEQ ID NO: 1588175 - RNA, 16 nt, Human adenovirus F
cuuucaguuggagcag

SEQ ID NO: 1588176 - RNA, 17 nt, Human adenovirus F
ucgcaaacaauaaaaga

SEQ ID NO: 1588177 - RNA, 17 nt, Human adenovirus F
gcaguucauuuaaaaga

SEQ ID NO: 1588178 - RNA, 16 nt, Human adenovirus F
gcugacagcugggaca

SEQ ID NO: 1588179 - RNA, 12 nt, Human adenovirus F
cggcgcagcaga

SEQ ID NO: 1588180 - RNA, 21 nt, Human adenovirus F
uguacuacaauuccacuggca

SEQ ID NO: 1588181 - RNA, 18 nt, Human adenovirus F
gcaaccauguucacugaa

SEQ ID NO: 1588182 - RNA, 20 nt, Human adenovirus F
gacauuguuuugcuaccugg

SEQ ID NO: 1588183 - RNA, 19 nt, Human adenovirus F
gcuuuccgcgaggccaugc

SEQ ID NO: 1588184 - RNA, 13 nt, Human adenovirus F
cgccauaggcgca

SEQ ID NO: 1588185 - RNA, 21 nt, Human adenovirus F
gcgcgaacagagugggggcaa

SEQ ID NO: 1588186 - RNA, 16 nt, Human adenovirus F
cgcuaugugcagcagu

SEQ ID NO: 1588187 - RNA, 14 nt, Human adenovirus F
ccaccguggcuccc

SEQ ID NO: 1588188 - RNA, 22 nt, Human adenovirus F
auuuaaaguggugagguaugau

SEQ ID NO: 1588189 - RNA, 16 nt, Human adenovirus F
gcaccgcgcccguccu

SEQ ID NO: 1588190 - RNA, 22 nt, Human adenovirus F
caaucagggcgugcaagugggc

SEQ ID NO: 1588191 - RNA, 12 nt, Human adenovirus F
uacgagcaggcu

SEQ ID NO: 1588192 - RNA, 20 nt, Human adenovirus F
aagagcaaaaccuccaggag

SEQ ID NO: 1588193 - RNA, 20 nt, Human adenovirus F
auaacggacgcauuaccauu

SEQ ID NO: 1588194 - RNA, 22 nt, Human adenovirus F
cuguaagcgggggaaauuuaaa

SEQ ID NO: 1588195 - RNA, 23 nt, Human adenovirus F
ggaggcuauuggccagacgcagg

SEQ ID NO: 1588196 - RNA, 23 nt, Human adenovirus F
gccgucguacaaguugcaaagcu

SEQ ID NO: 1588197 - RNA, 21 nt, Human adenovirus F
gccagaaaaaacccuuaacaa

SEQ ID NO: 1588198 - RNA, 15 nt, Human adenovirus F
ucccagucugccauc

SEQ ID NO: 1588199 - RNA, 23 nt, Human adenovirus F
ggcuccgacgcuuggcaccgccg

SEQ ID NO: 1588200 - RNA, 13 nt, Human adenovirus F
gagcagauggaga

SEQ ID NO: 1588201 - RNA, 22 nt, Human adenovirus F
ugguuuuuuucgcggucggcac

SEQ ID NO: 1588202 - RNA, 16 nt, Human adenovirus F
gcagcaguaucagugg

SEQ ID NO: 1588203 - RNA, 13 nt, Human adenovirus F
aaacgcugugagu

SEQ ID NO: 1588204 - RNA, 15 nt, Human adenovirus F
aagauuuuugaaggu

SEQ ID NO: 1588205 - RNA, 22 nt, Human adenovirus F
ccguggagccgacuucaagccc

SEQ ID NO: 1588206 - RNA, 23 nt, Human adenovirus F
ugccccccggcggcgggugcagu

SEQ ID NO: 1588207 - RNA, 22 nt, Human adenovirus F
aacagggacacgagcugucaua

SEQ ID NO: 1588208 - RNA, 14 nt, Human adenovirus F
cgcgacagagcacc

SEQ ID NO: 1588209 - RNA, 16 nt, Human adenovirus F
uccagggaguccagga

SEQ ID NO: 1588210 - RNA, 23 nt, Human adenovirus F
cugaaugugucuccgcugggaga

SEQ ID NO: 1588211 - RNA, 15 nt, Human adenovirus F
gcaaggaaccagugg

SEQ ID NO: 1588212 - RNA, 17 nt, Human adenovirus F
ucaagcccgacauuaag

SEQ ID NO: 1588213 - RNA, 17 nt, Human adenovirus F
gaguuggcuucugccag

SEQ ID NO: 1588214 - RNA, 12 nt, Human adenovirus F
ccuccaauuuga

SEQ ID NO: 1588215 - RNA, 23 nt, Human adenovirus F
ccgccuagguccgaccgcugggg

SEQ ID NO: 1588216 - RNA, 17 nt, Human adenovirus F
agugccgccggugaugg

SEQ ID NO: 1588217 - RNA, 15 nt, Human adenovirus F
uagcucuuccaagcu

SEQ ID NO: 1588218 - RNA, 14 nt, Human adenovirus F
cauuggcuggaggc

SEQ ID NO: 1588219 - RNA, 19 nt, Human adenovirus F
accugagggccggccugga

SEQ ID NO: 1588220 - RNA, 18 nt, Human adenovirus F
uguacucaaauguagccc

SEQ ID NO: 1588221 - RNA, 10 nt, Human adenovirus F
gcaaaugcuc

SEQ ID NO: 1588222 - RNA, 21 nt, Human adenovirus F
gcgcagcaguaucaguggagu

SEQ ID NO: 1588223 - RNA, 19 nt, Human adenovirus F
gccaggcguacuuaacgcu

SEQ ID NO: 1588224 - RNA, 12 nt, Human adenovirus F
ugcuaaacauga

SEQ ID NO: 1588225 - RNA, 13 nt, Human adenovirus F
ugacgugccugag

SEQ ID NO: 1588226 - RNA, 20 nt, Human adenovirus F
uuuaauggcacaguguuugc

SEQ ID NO: 1588227 - RNA, 15 nt, Human adenovirus F
cgccgccccuggccu

SEQ ID NO: 1588228 - RNA, 16 nt, Human adenovirus F
cuccaggguaagcucg

SEQ ID NO: 1588229 - RNA, 17 nt, Human adenovirus F
gugaguugguagcagug

SEQ ID NO: 1588230 - RNA, 22 nt, Human adenovirus F
cauuugguaacaaggccuggaa

SEQ ID NO: 1588231 - RNA, 23 nt, Human adenovirus F
gcagccuguggaguggcauuaaa

SEQ ID NO: 1588232 - RNA, 14 nt, Human adenovirus F
aacggaaacaaaaa

SEQ ID NO: 1588233 - RNA, 17 nt, Human adenovirus F
gucccuggaguuugggg

SEQ ID NO: 1588234 - RNA, 18 nt, Human adenovirus F
agguccgaccgcuggggu

SEQ ID NO: 1588235 - RNA, 23 nt, Human adenovirus F
acuccuuggguuuagccacaucc

SEQ ID NO: 1588236 - RNA, 16 nt, Human adenovirus F
cugcuaaccugugcag

SEQ ID NO: 1588237 - RNA, 17 nt, Human adenovirus F
uaccagaaagcuacaag

SEQ ID NO: 1588238 - RNA, 21 nt, Human adenovirus F
aaaacguaccaaccggagccu

SEQ ID NO: 1588239 - RNA, 16 nt, Human adenovirus F
acuucaccaaugccau

SEQ ID NO: 1588240 - RNA, 16 nt, Human adenovirus F
ggcaccagccagcuca

SEQ ID NO: 1588241 - RNA, 13 nt, Human adenovirus F
uggcacagcucac

SEQ ID NO: 1588242 - RNA, 24 nt, Human adenovirus F
ggauccagugcaggaagaggagga

SEQ ID NO: 1588243 - RNA, 18 nt, Human adenovirus F
ggacucgucuccugcaag

SEQ ID NO: 1588244 - RNA, 21 nt, Human adenovirus F
guguuucacguaguaucucau

SEQ ID NO: 1588245 - RNA, 11 nt, Human adenovirus F
cuucagccugg

SEQ ID NO: 1588246 - RNA, 23 nt, Human adenovirus F
cuugccaggguucucuucaggcu

SEQ ID NO: 1588247 - RNA, 20 nt, Human adenovirus F
uucaacggaauuguaacuga

SEQ ID NO: 1588248 - RNA, 14 nt, Human adenovirus F
ucggcaccagccag

SEQ ID NO: 1588249 - RNA, 18 nt, Human adenovirus F
guuccucauacaaaugcu

SEQ ID NO: 1588250 - RNA, 15 nt, Human adenovirus F
acguacucuuuugcc

SEQ ID NO: 1588251 - RNA, 22 nt, Human adenovirus F
aacuccaaccaagaaauacaaa

SEQ ID NO: 1588252 - RNA, 15 nt, Human adenovirus F
gauccauagagggcg

SEQ ID NO: 1588253 - RNA, 16 nt, Human adenovirus F
auuguaaacgcucugg

SEQ ID NO: 1588254 - RNA, 18 nt, Human adenovirus F
ccuuuaaccaccaccgca

SEQ ID NO: 1588255 - RNA, 16 nt, Human adenovirus F
cuggggaauggagcug

SEQ ID NO: 1588256 - RNA, 18 nt, Human adenovirus F
cgaugaugccgcaauggu

SEQ ID NO: 1588257 - RNA, 16 nt, Human adenovirus F
uuaaguuauacaguga

SEQ ID NO: 1588258 - RNA, 22 nt, Human adenovirus F
uccagugcaggaagaggaggag

SEQ ID NO: 1588259 - RNA, 13 nt, Human adenovirus F
cccauacccgcca

SEQ ID NO: 1588260 - RNA, 18 nt, Human adenovirus F
gaagacauucuugagcag

SEQ ID NO: 1588261 - RNA, 21 nt, Human adenovirus F
uuggcuggaggcuugggagga

SEQ ID NO: 1588262 - RNA, 20 nt, Human adenovirus F
aauaauuuuccgcuugccac

SEQ ID NO: 1588263 - RNA, 18 nt, Human adenovirus F
cagcugcuaaccugugca

SEQ ID NO: 1588264 - RNA, 15 nt, Human adenovirus F
guggcggaggugccc

SEQ ID NO: 1588265 - RNA, 21 nt, Human adenovirus F
cgccauugccacccgccagga

SEQ ID NO: 1588266 - RNA, 19 nt, Human adenovirus F
ucauggcguggaagacgag

SEQ ID NO: 1588267 - RNA, 23 nt, Human adenovirus F
ugggcauaguugcucccaaagug

SEQ ID NO: 1588268 - RNA, 18 nt, Human adenovirus F
ucucgccguaggagaggc

SEQ ID NO: 1588269 - RNA, 21 nt, Human adenovirus F
ccagcgucagguuugacagca

SEQ ID NO: 1588270 - RNA, 13 nt, Human adenovirus F
agguuaaagccaa

SEQ ID NO: 1588271 - RNA, 22 nt, Human adenovirus F
gguccauacuugugcauuggca

SEQ ID NO: 1588272 - RNA, 22 nt, Human adenovirus F
cugggauuugccgcagccagug

SEQ ID NO: 1588273 - RNA, 16 nt, Human adenovirus F
cuccugcaguccacuu

SEQ ID NO: 1588274 - RNA, 14 nt, Human adenovirus F
gacuaaacacccgc

SEQ ID NO: 1588275 - RNA, 14 nt, Human adenovirus F
ccuuaaggaggagg

SEQ ID NO: 1588276 - RNA, 16 nt, Human adenovirus F
ccugcacgcucuugcu

SEQ ID NO: 1588277 - RNA, 19 nt, Human adenovirus F
cucgcuggcuagguaccca

SEQ ID NO: 1588278 - RNA, 15 nt, Human adenovirus F
ucgacuccucuguga

SEQ ID NO: 1588279 - RNA, 16 nt, Human adenovirus F
aaccccacgccaagcc

SEQ ID NO: 1588280 - RNA, 22 nt, Human adenovirus F
uagccaacuauuuggcccacca

SEQ ID NO: 1588281 - RNA, 15 nt, Human adenovirus F
uuaaaaacuugcaag

SEQ ID NO: 1588282 - RNA, 19 nt, Human adenovirus F
ccgagccaccaucuccagc

SEQ ID NO: 1588283 - RNA, 14 nt, Human adenovirus F
uccgcccgcuccga

SEQ ID NO: 1588284 - RNA, 16 nt, Human adenovirus F
gacuaugucagcuuua

SEQ ID NO: 1588285 - RNA, 17 nt, Human adenovirus F
aaacuggaagauguccu

SEQ ID NO: 1588286 - RNA, 14 nt, Human adenovirus F
ugggcguccagugg

SEQ ID NO: 1588287 - RNA, 13 nt, Human adenovirus F
caggcacaccuuc

SEQ ID NO: 1588288 - RNA, 19 nt, Human adenovirus F
uucccgugucaccugcagu

SEQ ID NO: 1588289 - RNA, 16 nt, Human adenovirus F
uuuaugcccaacagua

SEQ ID NO: 1588290 - RNA, 16 nt, Human adenovirus F
caggauucgcccgcca

SEQ ID NO: 1588291 - RNA, 18 nt, Human adenovirus F
cuggggaauggagcugug

SEQ ID NO: 1588292 - RNA, 23 nt, Human adenovirus F
gcgucagguuugacagcauuaac

SEQ ID NO: 1588293 - RNA, 16 nt, Human adenovirus F
ucggcacgcuccuugg

SEQ ID NO: 1588294 - RNA, 21 nt, Human adenovirus F
aaacgagccagauuugaagau

SEQ ID NO: 1588295 - RNA, 19 nt, Human adenovirus F
ggaaauuuacucaacugug

SEQ ID NO: 1588296 - RNA, 22 nt, Human adenovirus F
uuugaacagcugaagacacauu

SEQ ID NO: 1588297 - RNA, 22 nt, Human adenovirus F
acgucccuccccguuaccuggg

SEQ ID NO: 1588298 - RNA, 20 nt, Human adenovirus F
aacaugcuguacgccaacuc

SEQ ID NO: 1588299 - RNA, 21 nt, Human adenovirus F
cugggcuggaugcauccuccc

SEQ ID NO: 1588300 - RNA, 21 nt, Human adenovirus F
cuguggacgacagccagcugu

SEQ ID NO: 1588301 - RNA, 15 nt, Human adenovirus F
gagcccgggccuggu

SEQ ID NO: 1588302 - RNA, 17 nt, Human adenovirus F
ccggguuuaccuggugg

SEQ ID NO: 1588303 - RNA, 22 nt, Human adenovirus F
ucaaaaguguuuauuuauuucu

SEQ ID NO: 1588304 - RNA, 13 nt, Human adenovirus F
ggacgacagccag

SEQ ID NO: 1588305 - RNA, 21 nt, Human adenovirus F
agagcauugugguacaggagc

SEQ ID NO: 1588306 - RNA, 22 nt, Human adenovirus F
cugggguagggugucugccaga

SEQ ID NO: 1588307 - RNA, 18 nt, Human adenovirus F
guaugguaacuccucuuc

SEQ ID NO: 1588308 - RNA, 12 nt, Human adenovirus F
ggccaaccuaga

SEQ ID NO: 1588309 - RNA, 20 nt, Human adenovirus F
ggggcccugaccgaccuggg

SEQ ID NO: 1588310 - RNA, 17 nt, Human adenovirus F
cuccuaacgccacuuuu

SEQ ID NO: 1588311 - RNA, 19 nt, Human adenovirus F
uccgcagacgaacacaaua

SEQ ID NO: 1588312 - RNA, 11 nt, Human adenovirus F
gggcaaaacau

SEQ ID NO: 1588313 - RNA, 17 nt, Human adenovirus F
agggcaacguucagcca

SEQ ID NO: 1588314 - RNA, 14 nt, Human adenovirus F
gccaccgcaaccau

SEQ ID NO: 1588315 - RNA, 17 nt, Human adenovirus F
accuuacaccaccccua

SEQ ID NO: 1588316 - RNA, 18 nt, Human adenovirus F
ccagccggaggagugggc

SEQ ID NO: 1588317 - RNA, 14 nt, Human adenovirus F
cccugugagugugg

SEQ ID NO: 1588318 - RNA, 17 nt, Human adenovirus F
agaggaggugaugcugc

SEQ ID NO: 1588319 - RNA, 18 nt, Human adenovirus F
ugccauacgggagggaca

SEQ ID NO: 1588320 - RNA, 17 nt, Human adenovirus F
agccacaauaagcagcu

SEQ ID NO: 1588321 - RNA, 11 nt, Human adenovirus F
aaaccaaauca

SEQ ID NO: 1588322 - RNA, 19 nt, Human adenovirus F
gaacccaacuauuugggag

SEQ ID NO: 1588323 - RNA, 15 nt, Human adenovirus F
gccccccaauccaaa

SEQ ID NO: 1588324 - RNA, 17 nt, Human adenovirus F
aggucguaaugaggaca

SEQ ID NO: 1588325 - RNA, 17 nt, Human adenovirus F
ucgcgaaauugggcugc

SEQ ID NO: 1588326 - RNA, 16 nt, Human adenovirus F
aaauagccgccagccu

SEQ ID NO: 1588327 - RNA, 21 nt, Human adenovirus F
gcucugguagaaagcaaagcc

SEQ ID NO: 1588328 - RNA, 23 nt, Human adenovirus F
cgaggcuuuccgcgaggccaugc

SEQ ID NO: 1588329 - RNA, 15 nt, Human adenovirus F
uuuuuaugaaucacu

SEQ ID NO: 1588330 - RNA, 23 nt, Human adenovirus F
gcuguacugugcauuugggagcu

SEQ ID NO: 1588331 - RNA, 17 nt, Human adenovirus F
ccugugcagcgcgcucc

SEQ ID NO: 1588332 - RNA, 22 nt, Human adenovirus F
cgaggacggcaaggaaccagug

SEQ ID NO: 1588333 - RNA, 20 nt, Human adenovirus F
cccagaccaucaauuuugac

SEQ ID NO: 1588334 - RNA, 22 nt, Human adenovirus F
cccuuggaaauuugcugacagc

SEQ ID NO: 1588335 - RNA, 17 nt, Human adenovirus F
acauguuugucuuuaaa

SEQ ID NO: 1588336 - RNA, 14 nt, Human adenovirus F
acaggugggcuugg

SEQ ID NO: 1588337 - RNA, 16 nt, Human adenovirus F
accacuaccacccucc

SEQ ID NO: 1588338 - RNA, 12 nt, Human adenovirus F
aggccgcuccca

SEQ ID NO: 1588339 - RNA, 18 nt, Human adenovirus F
agggcaaaaugggcuugc

SEQ ID NO: 1588340 - RNA, 19 nt, Human adenovirus F
agggcggaacagcauacgu

SEQ ID NO: 1588341 - RNA, 13 nt, Human adenovirus F
guaggcaaucucc

SEQ ID NO: 1588342 - RNA, 20 nt, Human adenovirus F
guagagacugccaagccuca

SEQ ID NO: 1588343 - RNA, 20 nt, Human adenovirus F
guauuaacacuggcagaggc

SEQ ID NO: 1588344 - RNA, 21 nt, Human adenovirus F
gacaugggggcggaccugcaa

SEQ ID NO: 1588345 - RNA, 12 nt, Human adenovirus F
cuggaaccacuu

SEQ ID NO: 1588346 - RNA, 18 nt, Human adenovirus F
gccauucuuaacccgcac

SEQ ID NO: 1588347 - RNA, 16 nt, Human adenovirus F
gcccacugaccggcac

SEQ ID NO: 1588348 - RNA, 16 nt, Human adenovirus F
uacauuggccaccgcc

SEQ ID NO: 1588349 - RNA, 17 nt, Human adenovirus F
uaggugacaaagaggcg

SEQ ID NO: 1588350 - RNA, 15 nt, Human adenovirus F
ucucgccccaccgcc

SEQ ID NO: 1588351 - RNA, 19 nt, Human adenovirus F
ucucggccgguaacgccac

SEQ ID NO: 1588352 - RNA, 16 nt, Human adenovirus F
ucucgguaacgaccuc

SEQ ID NO: 1588353 - RNA, 18 nt, Human adenovirus F
ugaggcagcgacagggcg

SEQ ID NO: 1588354 - RNA, 19 nt, Human adenovirus F
ugcggugccugaagcacug

SEQ ID NO: 1588355 - RNA, 22 nt, Human adenovirus F
uggggguucgccuggagaggcg

SEQ ID NO: 1588356 - RNA, 18 nt, Human adenovirus F
uggguaagugcagaggcg

SEQ ID NO: 1588357 - RNA, 20 nt, Human adenovirus F
uggguguauaaaagggggcg

SEQ ID NO: 1588358 - RNA, 14 nt, Human adenovirus F
uccgccuccacccu

SEQ ID NO: 1588359 - RNA, 16 nt, Human adenovirus F
ucgccaguccaccgcg

SEQ ID NO: 1588360 - RNA, 12 nt, Human adenovirus F
ucggcacgcucc

SEQ ID NO: 1588361 - RNA, 19 nt, Human adenovirus F
gucaggccugcaagaucuc

SEQ ID NO: 1588362 - RNA, 20 nt, Human adenovirus F
gcucuaacgggcaccggcac

SEQ ID NO: 1588363 - RNA, 17 nt, Human adenovirus F
gcgucgcuggcuccgcg

SEQ ID NO: 1588364 - RNA, 20 nt, Human adenovirus F
gcgugcccaucauacagcag

SEQ ID NO: 1588365 - RNA, 17 nt, Human adenovirus F
gcguccgcccgcuccga

SEQ ID NO: 1588366 - RNA, 18 nt, Human adenovirus F
uggaccuggaagagggcg

SEQ ID NO: 1588367 - RNA, 17 nt, Human adenovirus F
ugacgugccugagggcg

SEQ ID NO: 1588368 - RNA, 16 nt, Human adenovirus F
ugacgguaaaggggcg

SEQ ID NO: 1588369 - RNA, 17 nt, Human adenovirus F
ugaggauuuggagggcg

SEQ ID NO: 1588370 - RNA, 20 nt, Human adenovirus F
ugaaccggaaaaccaacgcu

SEQ ID NO: 1588371 - RNA, 22 nt, Human adenovirus F
ucagcuugagagcaagagugcg

SEQ ID NO: 1588372 - RNA, 18 nt, Human adenovirus F
ucacucuccgccgccgcu

SEQ ID NO: 1588373 - RNA, 18 nt, Human adenovirus F
ucacuuugccagagggca

SEQ ID NO: 1588374 - RNA, 21 nt, Human adenovirus F
uauugcuuuauugccaccgca

SEQ ID NO: 1588375 - RNA, 16 nt, Human adenovirus F
ucaaacaaccagcgcu

SEQ ID NO: 1588376 - RNA, 20 nt, Human adenovirus F
ucacaccucuccccaccgcu

SEQ ID NO: 1588377 - RNA, 16 nt, Human adenovirus F
ucacccacccaccgcu

SEQ ID NO: 1588378 - RNA, 18 nt, Human adenovirus F
ucaccuuacaccaccccu

SEQ ID NO: 1588379 - RNA, 14 nt, Human adenovirus F
uaaccaccaccgca

SEQ ID NO: 1588380 - RNA, 16 nt, Human adenovirus F
uaaccacuaccacccu

SEQ ID NO: 1588381 - RNA, 16 nt, Human adenovirus F
uacagcccccaccgcc

SEQ ID NO: 1588382 - RNA, 23 nt, Human adenovirus F
gcagguaggaccacuggagggcg

SEQ ID NO: 1588383 - RNA, 13 nt, Human adenovirus F
accugcacgcucu

SEQ ID NO: 1588384 - RNA, 18 nt, Human adenovirus F
accugcaguucauuuaaa

SEQ ID NO: 1588385 - RNA, 19 nt, Human adenovirus F
accucugacaaacacgcuc

SEQ ID NO: 1588386 - RNA, 15 nt, Human adenovirus F
accccgucacucucc

SEQ ID NO: 1588387 - RNA, 14 nt, Human adenovirus F
acaaaauaaugacu

SEQ ID NO: 1588388 - RNA, 19 nt, Human adenovirus F
accugucgcggucguuuaa

SEQ ID NO: 1588389 - RNA, 21 nt, Human adenovirus F
auguccccauaaacguucaaa

SEQ ID NO: 1588390 - RNA, 20 nt, Human adenovirus F
ccaagucaaaaaagaugcga

SEQ ID NO: 1588391 - RNA, 16 nt, Human adenovirus F
aacgaaaaaggagguc

SEQ ID NO: 1588392 - RNA, 23 nt, Human adenovirus F
aacccaugagccgccagguggua

SEQ ID NO: 1588393 - RNA, 22 nt, Human adenovirus F
aacuaccgccuuuggagguggc

SEQ ID NO: 1588394 - RNA, 15 nt, Human adenovirus F
cagucaagcucucca

SEQ ID NO: 1588395 - RNA, 20 nt, Human adenovirus F
aucgccgggcaggacgccuc

SEQ ID NO: 1588396 - RNA, 21 nt, Human adenovirus F
aguccaaagcagagcucugca

SEQ ID NO: 1588397 - RNA, 19 nt, Human adenovirus F
agccuccgguggcucugca

SEQ ID NO: 1588398 - RNA, 16 nt, Human adenovirus F
agccucucgcucugca

SEQ ID NO: 1588399 - RNA, 15 nt, Human adenovirus F
agccugaaacgccgc

SEQ ID NO: 1588400 - RNA, 18 nt, Human adenovirus F
agcgagcaggaguugguc

SEQ ID NO: 1588401 - RNA, 20 nt, Human adenovirus F
gcccucuucugcaccugcac

SEQ ID NO: 1588402 - RNA, 15 nt, Human adenovirus F
ggacuuugcuccgcc

SEQ ID NO: 1588403 - RNA, 14 nt, Human adenovirus F
gucgcagaaucucc

SEQ ID NO: 1588404 - RNA, 20 nt, Human adenovirus F
gcagcgacagggcgcuaacu

SEQ ID NO: 1588405 - RNA, 17 nt, Human adenovirus F
cugccaccgcaaccaug

SEQ ID NO: 1588406 - RNA, 18 nt, Human adenovirus F
cugccguugcaaccucug

SEQ ID NO: 1588407 - RNA, 20 nt, Human adenovirus F
cugcggauuaagaaccacug

SEQ ID NO: 1588408 - RNA, 19 nt, Human adenovirus F
cuuccuccaacggcuugca

SEQ ID NO: 1588409 - RNA, 15 nt, Human adenovirus F
cuucgcccugaaagu

SEQ ID NO: 1588410 - RNA, 23 nt, Human adenovirus F
cuucggcaggaaagccacgcucg

SEQ ID NO: 1588411 - RNA, 18 nt, Human adenovirus F
ucccccuguaccaccgca

SEQ ID NO: 1588412 - RNA, 22 nt, Human adenovirus F
ucccaacgcgcguuaccacccu

SEQ ID NO: 1588413 - RNA, 13 nt, Human adenovirus F
uccauagagggcg

SEQ ID NO: 1588414 - RNA, 20 nt, Human adenovirus F
uccaugccuuucucccaggc

SEQ ID NO: 1588415 - RNA, 19 nt, Human adenovirus F
ucccgccccugccaccgca

SEQ ID NO: 1588416 - RNA, 20 nt, Human adenovirus F
ucccugcacuaugccuuccg

SEQ ID NO: 1588417 - RNA, 18 nt, Human adenovirus F
uccgaccauuaccaccgu

SEQ ID NO: 1588418 - RNA, 14 nt, Human adenovirus F
acucuuacaccucc

SEQ ID NO: 1588419 - RNA, 16 nt, Human adenovirus F
caccccuagucccucc

SEQ ID NO: 1588420 - RNA, 14 nt, Human adenovirus F
caccaaaggugguu

SEQ ID NO: 1588421 - RNA, 21 nt, Human adenovirus F
acucgcagcguugcacgcucu

SEQ ID NO: 1588422 - RNA, 14 nt, Human adenovirus F
cgcgcccguccucc

SEQ ID NO: 1588423 - RNA, 18 nt, Human adenovirus F
uccacccgugcccaccgu

SEQ ID NO: 1588424 - RNA, 20 nt, Human adenovirus F
uccaagacccgguacaggug

SEQ ID NO: 1588425 - RNA, 14 nt, Human adenovirus F
ccuaugacaccucc

SEQ ID NO: 1588426 - RNA, 20 nt, Human adenovirus F
cagccuccgguggcucugca

SEQ ID NO: 1588427 - RNA, 21 nt, Human adenovirus F
caccgccgcaccacugacagu

SEQ ID NO: 1588428 - RNA, 22 nt, Human adenovirus F
agaaaccccaccguggcuccca

SEQ ID NO: 1588429 - RNA, 19 nt, Human adenovirus F
acguggucauugggcuugu

SEQ ID NO: 1588430 - RNA, 19 nt, Human adenovirus F
cacccuauggaccaccgcg

SEQ ID NO: 1588431 - RNA, 21 nt, Human adenovirus F
acgccaagccugaagcccgca

SEQ ID NO: 1588432 - RNA, 19 nt, Human adenovirus F
caggcgcuccacgucccuc

SEQ ID NO: 1588433 - RNA, 18 nt, Human adenovirus F
caagcccauucugccagu

SEQ ID NO: 1588434 - RNA, 19 nt, Human
ccaauucgaacuuuuucca

SEQ ID NO: 1588435 - RNA, 23 nt, Human
caguuguucaauaauaaauauuu

SEQ ID NO: 1588436 - RNA, 11 nt, Human
cauacauauuu

SEQ ID NO: 1588437 - RNA, 21 nt, Human
auugauaaguucauacauugu

SEQ ID NO: 1588438 - RNA, 19 nt, Human
auugauaaguucauacauu

SEQ ID NO: 1588439 - RNA, 18 nt, Human
auugauaaguucauacau

SEQ ID NO: 1588440 - RNA, 17 nt, Human
auugauaaguucauaca

SEQ ID NO: 1588441 - RNA, 16 nt, Human
auugauaaguucauac

SEQ ID NO: 1588442 - RNA, 15 nt, Human
auugauaaguucaua

SEQ ID NO: 1588443 - RNA, 12 nt, Human
auugauaaguuc

SEQ ID NO: 1588444 - RNA, 20 nt, Human
caacuauuuuuccaaaauaa

SEQ ID NO: 1588445 - RNA, 15 nt, Human
caacuauuuuuccaa

SEQ ID NO: 1588446 - RNA, 22 nt, Human
gcuuccuucugugaaaguacau

SEQ ID NO: 1588447 - RNA, 21 nt, Human
gccacuguuuugaaucucaua

SEQ ID NO: 1588448 - RNA, 19 nt, Human
aaaagccugcaauuucaua

SEQ ID NO: 1588449 - RNA, 15 nt, Human
aaaauauauuuaaug

SEQ ID NO: 1588450 - RNA, 14 nt, Human
aaaauauauuuaau

SEQ ID NO: 1588451 - RNA, 21 nt, Human
aaagauuuucagaaaauauua

SEQ ID NO: 1588452 - RNA, 13 nt, Human
ggugaaaauuauu

SEQ ID NO: 1588453 - RNA, 21 nt, Human
ggucauauuaauauauuucca

SEQ ID NO: 1588454 - RNA, 15 nt, Human
aaagauuuucagaaa

SEQ ID NO: 1588455 - RNA, 15 nt, Human
aaaauauuauguguu

SEQ ID NO: 1588456 - RNA, 14 nt, Human
aaaauauuaugugu

SEQ ID NO: 1588457 - RNA, 21 nt, Human
aaaauauuauguguuuccaua

SEQ ID NO: 1588458 - RNA, 19 nt, Human
aaacaacuucaauauccaa

SEQ ID NO: 1588459 - RNA, 20 nt, Human
gaauauguuucaaacuuugg

SEQ ID NO: 1588460 - RNA, 15 nt, Human
gaauauguuucaaac

SEQ ID NO: 1588461 - RNA, 14 nt, Human
gaauauguuucaaa

SEQ ID NO: 1588462 - RNA, 14 nt, Human
gaugguucuagcau

SEQ ID NO: 1588463 - RNA, 12 nt, Human
cuucaucugacu

SEQ ID NO: 1588464 - RNA, 18 nt, Human
cuucaucugacuaugaca

SEQ ID NO: 1588465 - RNA, 13 nt, Human
auguuaagcagau

SEQ ID NO: 1588466 - RNA, 12 nt, Human
auguuaagcaga

SEQ ID NO: 1588467 - RNA, 12 nt, Human
auguguuuccau

SEQ ID NO: 1588468 - RNA, 13 nt, Human
uuugagaguucua

SEQ ID NO: 1588469 - RNA, 14 nt, Human
uuugagaguucuaa

SEQ ID NO: 1588470 - RNA, 21 nt, Human
uuugacagaauauguuucaaa

SEQ ID NO: 1588471 - RNA, 20 nt, Human
uuugacagaauauguuucaa

SEQ ID NO: 1588472 - RNA, 19 nt, Human
uuugacagaauauguuuca

SEQ ID NO: 1588473 - RNA, 18 nt, Human
uuugacagaauauguuuc

SEQ ID NO: 1588474 - RNA, 22 nt, Human
auucaggagaguagaacagaua

SEQ ID NO: 1588475 - RNA, 21 nt, Human
auucaggagaguagaacagau

SEQ ID NO: 1588476 - RNA, 13 nt, Human
uuuuugacagaau

SEQ ID NO: 1588477 - RNA, 12 nt, Human
uuuuugacagaa

SEQ ID NO: 1588478 - RNA, 19 nt, Human
uuuuuguagcacugacaga

SEQ ID NO: 1588479 - RNA, 21 nt, Human
uuuuuguagcacugacagauu

SEQ ID NO: 1588480 - RNA, 20 nt, Human
uuuuuguagcacugacagau

SEQ ID NO: 1588481 - RNA, 19 nt, Human
auugauguguuuauuuaua

SEQ ID NO: 1588482 - RNA, 12 nt, Human
auugauguguuu

SEQ ID NO: 1588483 - RNA, 18 nt, Human
auuugaauguuaagcaga

SEQ ID NO: 1588484 - RNA, 13 nt, Human
auuugaauguuaa

SEQ ID NO: 1588485 - RNA, 19 nt, Human
auuugaauguuaagcagau

SEQ ID NO: 1588486 - RNA, 21 nt, Human
auggaaugcuguguuaaauaa

SEQ ID NO: 1588487 - RNA, 22 nt, Human
uuucacauaucuaguaugaaau

SEQ ID NO: 1588488 - RNA, 18 nt, Human
uuguucauacauauuuuu

SEQ ID NO: 1588489 - RNA, 16 nt, Human
uuguucauacauauuu

SEQ ID NO: 1588490 - RNA, 22 nt, Human
uuguucaauaauaaauauuuuu

SEQ ID NO: 1588491 - RNA, 13 nt, Human
uuguucauacaua

SEQ ID NO: 1588492 - RNA, 20 nt, Human
uuguucaauaauaaauauuu

SEQ ID NO: 1588493 - RNA, 17 nt, Human
uuguagcuuuaucaaag

SEQ ID NO: 1588494 - RNA, 16 nt, Human
uuguagcuuuaucaaa

SEQ ID NO: 1588495 - RNA, 14 nt, Human
aucugacuaugaca

SEQ ID NO: 1588496 - RNA, 17 nt, Human
aucugacuaugacauaa

SEQ ID NO: 1588497 - RNA, 18 nt, Human
uuggagacacaacuauuu

SEQ ID NO: 1588498 - RNA, 21 nt, Human
uucagaaaauauuauguguuu

SEQ ID NO: 1588499 - RNA, 20 nt, Human
uucagaaaauauuauguguu

SEQ ID NO: 1588500 - RNA, 14 nt, Human
uucagaaaauauua

SEQ ID NO: 1588501 - RNA, 13 nt, Human
uucagaaaauauu

SEQ ID NO: 1588502 - RNA, 19 nt, Human
auauaaguauucuaaauuu

SEQ ID NO: 1588503 - RNA, 17 nt, Human
auauaaguauucuaaau

SEQ ID NO: 1588504 - RNA, 21 nt, Human
uucacauaucuaguaugaaau

SEQ ID NO: 1588505 - RNA, 20 nt, Human
uucacauaucuaguaugaaa

SEQ ID NO: 1588506 - RNA, 22 nt, Human
uucaagaaaacaacuucaauau

SEQ ID NO: 1588507 - RNA, 16 nt, Human
uucaaacuuuggaaca

SEQ ID NO: 1588508 - RNA, 19 nt, Human
aucagugugucuaaauuug

SEQ ID NO: 1588509 - RNA, 20 nt, Human
aucagugugucuaaauuuga

SEQ ID NO: 1588510 - RNA, 18 nt, Human
auauuguguugugaaugu

SEQ ID NO: 1588511 - RNA, 17 nt, Human
auauuguguugugaaug

SEQ ID NO: 1588512 - RNA, 14 nt, Human
ugugauguauucua

SEQ ID NO: 1588513 - RNA, 16 nt, Human
ugugauguauucuagc

SEQ ID NO: 1588514 - RNA, 18 nt, Human
agucacuaccuucaugca

SEQ ID NO: 1588515 - RNA, 17 nt, Human
aguguacuuaacuauuc

SEQ ID NO: 1588516 - RNA, 14 nt, Human
agugugucuaaauu

SEQ ID NO: 1588517 - RNA, 16 nt, Human
uguuaaguauguguaa

SEQ ID NO: 1588518 - RNA, 15 nt, Human
uguuaaguaugugua

SEQ ID NO: 1588519 - RNA, 19 nt, Human
uguguuaaguauguguaaa

SEQ ID NO: 1588520 - RNA, 22 nt, Human
uguguuaaguauguguaaaaug

SEQ ID NO: 1588521 - RNA, 19 nt, Human
uguuuugaaucucauaauu

SEQ ID NO: 1588522 - RNA, 24 nt, Human
uguuuauuuauagaguguacuuaa

SEQ ID NO: 1588523 - RNA, 14 nt, Human
uguuuauuuauaga

SEQ ID NO: 1588524 - RNA, 17 nt, Human
uuaauuccaauuauaug

SEQ ID NO: 1588525 - RNA, 16 nt, Human
aguacauuuggagaca

SEQ ID NO: 1588526 - RNA, 15 nt, Human
aguaauucaagaaaa

SEQ ID NO: 1588527 - RNA, 14 nt, Human
aguaauagagcaaa

SEQ ID NO: 1588528 - RNA, 16 nt, Human
aguaguaauagagcaa

SEQ ID NO: 1588529 - RNA, 22 nt, Human
uguauucuagcuaauguaauaa

SEQ ID NO: 1588530 - RNA, 20 nt, Human
uguauucuagcuaauguaau

SEQ ID NO: 1588531 - RNA, 16 nt, Human
uguaaauaguauuuga

SEQ ID NO: 1588532 - RNA, 17 nt, Human
aggagaguagaacagau

SEQ ID NO: 1588533 - RNA, 21 nt, Human
uggaacaagaugguucuagca

SEQ ID NO: 1588534 - RNA, 19 nt, Human
ugauaaguucauacauugu

SEQ ID NO: 1588535 - RNA, 17 nt, Human
ugauaaguucauacauu

SEQ ID NO: 1588536 - RNA, 15 nt, Human
ugauaaguucauaca

SEQ ID NO: 1588537 - RNA, 13 nt, Human
ugauaaguucaua

SEQ ID NO: 1588538 - RNA, 16 nt, Human
ugauaaguaaaugcua

SEQ ID NO: 1588539 - RNA, 22 nt, Human
ugaguucuacauaaguaauuca

SEQ ID NO: 1588540 - RNA, 20 nt, Human
ugaguucuacauaaguaauu

SEQ ID NO: 1588541 - RNA, 15 nt, Human
ugaguucuacauaag

SEQ ID NO: 1588542 - RNA, 17 nt, Human
ugacauaaaaacaacuu

SEQ ID NO: 1588543 - RNA, 20 nt, Human
ugacauaaaaacaacuuuau

SEQ ID NO: 1588544 - RNA, 18 nt, Human
ugacauaaaaacaacuuu

SEQ ID NO: 1588545 - RNA, 20 nt, Human
agagcaaaauugauguguuu

SEQ ID NO: 1588546 - RNA, 14 nt, Human
agagcaaaauugau

SEQ ID NO: 1588547 - RNA, 20 nt, Human
agacacaacuauuuuuccaa

SEQ ID NO: 1588548 - RNA, 19 nt, Human
agacacaacuauuuuucca

SEQ ID NO: 1588549 - RNA, 17 nt, Human
agaaaucaaagagagaa

SEQ ID NO: 1588550 - RNA, 16 nt, Human
ucugacuaugacauaa

SEQ ID NO: 1588551 - RNA, 14 nt, Human
ucugacuaugacau

SEQ ID NO: 1588552 - RNA, 22 nt, Human
ucuacauaaguaauucaagaaa

SEQ ID NO: 1588553 - RNA, 20 nt, Human
ucuacauaaguaauucaaga

SEQ ID NO: 1588554 - RNA, 17 nt, Human
ucuacauaaguaauuca

SEQ ID NO: 1588555 - RNA, 19 nt, Human
ucccuuucugcuuguguua

SEQ ID NO: 1588556 - RNA, 19 nt, Human
accucaaaaugucuaagau

SEQ ID NO: 1588557 - RNA, 21 nt, Human
uauuuccauuaaaaaaucagu

SEQ ID NO: 1588558 - RNA, 21 nt, Human
acauaaaaacaacuuuauacc

SEQ ID NO: 1588559 - RNA, 19 nt, Human
acauaaaaacaacuuuaua

SEQ ID NO: 1588560 - RNA, 16 nt, Human
acauaaaaacaacuuu

SEQ ID NO: 1588561 - RNA, 17 nt, Human
acauaucuaguaugaaa

SEQ ID NO: 1588562 - RNA, 22 nt, Human
acauaucuaguaugaaauuaua

SEQ ID NO: 1588563 - RNA, 20 nt, Human
acauaucuaguaugaaauua

SEQ ID NO: 1588564 - RNA, 23 nt, Human
acauaucuaguaugaaauuauau

SEQ ID NO: 1588565 - RNA, 17 nt, Human
ucaaagggugaaaauua

SEQ ID NO: 1588566 - RNA, 23 nt, Human
uauuuuugacagaauauguuuca

SEQ ID NO: 1588567 - RNA, 19 nt, Human
uauuuuugacagaauaugu

SEQ ID NO: 1588568 - RNA, 15 nt, Human
uauuuuugacagaau

SEQ ID NO: 1588569 - RNA, 14 nt, Human
uauuuuugacagaa

SEQ ID NO: 1588570 - RNA, 13 nt, Human
uauuuuugacaga

SEQ ID NO: 1588571 - RNA, 14 nt, Human
ucaaaaugucuaag

SEQ ID NO: 1588572 - RNA, 17 nt, Human
ucacuaccuucaugcau

SEQ ID NO: 1588573 - RNA, 22 nt, Human
ucacauaucuaguaugaaauua

SEQ ID NO: 1588574 - RNA, 21 nt, Human
ucacauaucuaguaugaaauu

SEQ ID NO: 1588575 - RNA, 17 nt, Human
ucacauaucuaguauga

SEQ ID NO: 1588576 - RNA, 18 nt, Human
acacaacuauuuuuccaa

SEQ ID NO: 1588577 - RNA, 20 nt, Human
uaguaauagagcaaaauuga

SEQ ID NO: 1588578 - RNA, 14 nt, Human
uaguaauagagcaa

SEQ ID NO: 1588579 - RNA, 14 nt, Human
acagauaaucagug

SEQ ID NO: 1588580 - RNA, 16 nt, Human
uaucuuguagcuuuau

SEQ ID NO: 1588581 - RNA, 15 nt, Human
uauauuuaaugauaa

SEQ ID NO: 1588582 - RNA, 16 nt, Human
uauaaguauucuaaau

SEQ ID NO: 1588583 - RNA, 17 nt, Human
acaagaugguucuagca

SEQ ID NO: 1588584 - RNA, 18 nt, Human
acaaugaagauaaaaaga

SEQ ID NO: 1588585 - RNA, 17 nt, Human
aauuuauacaggucaua

SEQ ID NO: 1588586 - RNA, 16 nt, Human
aauuuauacaggucau

SEQ ID NO: 1588587 - RNA, 13 nt, Human
aauaacugugaag

SEQ ID NO: 1588588 - RNA, 17 nt, Human
uaaauuuugaguucuac

SEQ ID NO: 1588589 - RNA, 16 nt, Human
aauaacugugaaguuu

SEQ ID NO: 1588590 - RNA, 14 nt, Human
aauaacugugaagu

SEQ ID NO: 1588591 - RNA, 20 nt, Human
aauaacugugaaguuuacau

SEQ ID NO: 1588592 - RNA, 21 nt, Human
aauaauuuuaagaaaucaaag

SEQ ID NO: 1588593 - RNA, 20 nt, Human
aauauugcuuuggucauaug

SEQ ID NO: 1588594 - RNA, 15 nt, Human
aauaguauuugagag

SEQ ID NO: 1588595 - RNA, 20 nt, Human
uaaauuuugucuuuaacuca

SEQ ID NO: 1588596 - RNA, 19 nt, Human
uaaauuuugaguucuacau

SEQ ID NO: 1588597 - RNA, 18 nt, Human
uaaauuuugaguucuaca

SEQ ID NO: 1588598 - RNA, 12 nt, Human
uaaguucauaca

SEQ ID NO: 1588599 - RNA, 14 nt, Human
uaaguucauacauu

SEQ ID NO: 1588600 - RNA, 13 nt, Human
uaaguucauacau

SEQ ID NO: 1588601 - RNA, 20 nt, Human
uaaguauguguaaaauguga

SEQ ID NO: 1588602 - RNA, 14 nt, Human
uaaugguguuuuaa

SEQ ID NO: 1588603 - RNA, 18 nt, Human
uacauauuuuuguagcac

SEQ ID NO: 1588604 - RNA, 17 nt, Human
uacauauuuuuguagca

SEQ ID NO: 1588605 - RNA, 17 nt, Human
uaauuuauacaggucau

SEQ ID NO: 1588606 - RNA, 13 nt, Human
uaauucaagaaaa

SEQ ID NO: 1588607 - RNA, 12 nt, Human
aaugcuguguua

SEQ ID NO: 1588608 - RNA, 18 nt, Human
guguuuccauauuuuaua

SEQ ID NO: 1588609 - RNA, 19 nt, Human
guucuagcauggcauauuu

SEQ ID NO: 1588610 - RNA, 18 nt, Human
guucuagcauggcauauu

SEQ ID NO: 1588611 - RNA, 14 nt, Human
guuaaguaugugua

SEQ ID NO: 1588612 - RNA, 23 nt, Human
guucauacauauuuuuguagcac

SEQ ID NO: 1588613 - RNA, 14 nt, Human
guucauacauauuu

SEQ ID NO: 1588614 - RNA, 13 nt, Human
guucauacauauu

SEQ ID NO: 1588615 - RNA, 10 nt, Human
guucauacau

SEQ ID NO: 1588616 - RNA, 9 nt, Human
guucauaca

SEQ ID NO: 1588617 - RNA, 14 nt, Human
guucauacauugua

SEQ ID NO: 1588618 - RNA, 11 nt, Human
guucauacauu

SEQ ID NO: 1588619 - RNA, 18 nt, Human
aacaaugaagauaaaaag

SEQ ID NO: 1588620 - RNA, 14 nt, Human
aacaaugaagauaa

SEQ ID NO: 1588621 - RNA, 17 nt, Human
aaccucaaaaugucuaa

SEQ ID NO: 1588622 - RNA, 20 nt, Human
guauuuuugacagaauaugu

SEQ ID NO: 1588623 - RNA, 18 nt, Human
aaauuauauaaguauucu

SEQ ID NO: 1588624 - RNA, 16 nt, Human
aaauuauauaaguauu

SEQ ID NO: 1588625 - RNA, 19 nt, Human
aaauuauuuuguucauaca

SEQ ID NO: 1588626 - RNA, 17 nt, Human
aaauuauuuuguucaua

SEQ ID NO: 1588627 - RNA, 22 nt, Human
aaauuauauaaguauucuaaau

SEQ ID NO: 1588628 - RNA, 21 nt, Human
aaauuauuuuguucauacaua

SEQ ID NO: 1588629 - RNA, 20 nt, Human
aaauuauuuuguucauacau

SEQ ID NO: 1588630 - RNA, 22 nt, Human
aaauuauuuuguucauacauau

SEQ ID NO: 1588631 - RNA, 18 nt, Human
aaagccugcaauuucaua

SEQ ID NO: 1588632 - RNA, 13 nt, Human
aaagccugcaauu

SEQ ID NO: 1588633 - RNA, 23 nt, Human
aaaucucaaauuuggauugcuaa

SEQ ID NO: 1588634 - RNA, 19 nt, Human
aagaguauuuuugacagaa

SEQ ID NO: 1588635 - RNA, 16 nt, Human
aagaguaguaauagag

SEQ ID NO: 1588636 - RNA, 14 nt, Human
aagagagaaaauaa

SEQ ID NO: 1588637 - RNA, 16 nt, Human
aaucucauaauuuaua

SEQ ID NO: 1588638 - RNA, 21 nt, Human
acauaaguaauucaagaaaac

SEQ ID NO: 1588639 - RNA, 18 nt, Human
aauuucauaugcuguaua

SEQ ID NO: 1588640 - RNA, 16 nt, Human
aauuucauaugcugua

SEQ ID NO: 1588641 - RNA, 17 nt, Human
aauuauauaaguauucu

SEQ ID NO: 1588642 - RNA, 16 nt, Human
aauuauauaaguauuc

SEQ ID NO: 1588643 - RNA, 15 nt, Human
aauuauauaaguauu

SEQ ID NO: 1588644 - RNA, 16 nt, Human
acugacagauuuccau

SEQ ID NO: 1588645 - RNA, 23 nt, Human
agcaaaauugauguguuuauuua

SEQ ID NO: 1588646 - RNA, 19 nt, Human
agcaaaauugauguguuua

SEQ ID NO: 1588647 - RNA, 13 nt, Human
agcaaaauugaug

SEQ ID NO: 1588648 - RNA, 19 nt, Human
agaacagauaaucagugug

SEQ ID NO: 1588649 - RNA, 17 nt, Human
auaaguaauucaagaaa

SEQ ID NO: 1588650 - RNA, 15 nt, Human
auaaguaaaugcuag

SEQ ID NO: 1588651 - RNA, 20 nt, Human
aguuguucaauaauaaauau

SEQ ID NO: 1588652 - RNA, 23 nt, Human
auaaaaauauuguguugugaaug

SEQ ID NO: 1588653 - RNA, 14 nt, Human
auaaaaacaacuuu

SEQ ID NO: 1588654 - RNA, 20 nt, Human
auaaaaagacauucuuccaa

SEQ ID NO: 1588655 - RNA, 13 nt, Human
agugaaugaaaca

SEQ ID NO: 1588656 - RNA, 17 nt, Human
augcauagguuuagcag

SEQ ID NO: 1588657 - RNA, 20 nt, Human
aucaaagggugaaaauuauu

SEQ ID NO: 1588658 - RNA, 18 nt, Human
aucaaagagagaaaauaa

SEQ ID NO: 1588659 - RNA, 23 nt, Human
uuuggaacaagaugguucuagca

SEQ ID NO: 1588660 - RNA, 13 nt, Human
uuuguucauacau

SEQ ID NO: 1588661 - RNA, 16 nt, Human
uuuguucauacauauu

SEQ ID NO: 1588662 - RNA, 13 nt, Human
uuuucacauaucu

SEQ ID NO: 1588663 - RNA, 16 nt, Human
uuuucacauaucuagu

SEQ ID NO: 1588664 - RNA, 15 nt, Human
uuuucagaaaauauu

SEQ ID NO: 1588665 - RNA, 16 nt, Human
uuuucagaaaauauua

SEQ ID NO: 1588666 - RNA, 22 nt, Human
uuuucagaaaauauuauguguu

SEQ ID NO: 1588667 - RNA, 14 nt, Human
uuuccaaaauaauu

SEQ ID NO: 1588668 - RNA, 15 nt, Human
uuuacauuguaaaua

SEQ ID NO: 1588669 - RNA, 20 nt, Human
uuuacauuguaaauaguauu

SEQ ID NO: 1588670 - RNA, 13 nt, Human
uuuacauuguaaa

SEQ ID NO: 1588671 - RNA, 20 nt, Human
uuccuucugugaaaguacau

SEQ ID NO: 1588672 - RNA, 17 nt, Human
uuccuucugugaaagua

SEQ ID NO: 1588673 - RNA, 17 nt, Human
uucaucugacuaugaca

SEQ ID NO: 1588674 - RNA, 20 nt, Human
uucaucugacuaugacauaa

SEQ ID NO: 1588675 - RNA, 21 nt, Human
uuccauccuagucacuaccuu

SEQ ID NO: 1588676 - RNA, 15 nt, Human
uugaaucucauaauu

SEQ ID NO: 1588677 - RNA, 21 nt, Human
uugaaucucauaauuuauaca

SEQ ID NO: 1588678 - RNA, 20 nt, Human
ugugaaguuuacauuguaaa

SEQ ID NO: 1588679 - RNA, 16 nt, Human
uguagcacugacagau

SEQ ID NO: 1588680 - RNA, 22 nt, Human
uguagcacugacagauuuccau

SEQ ID NO: 1588681 - RNA, 17 nt, Human
uguagcacugacagauu

SEQ ID NO: 1588682 - RNA, 12 nt, Human
uguuuuaaaaaa

SEQ ID NO: 1588683 - RNA, 15 nt, Human
uggagcaaagcugau

SEQ ID NO: 1588684 - RNA, 16 nt, Human
ugcuagguuaauucca

SEQ ID NO: 1588685 - RNA, 23 nt, Human
ugcuagguuaauuccaauuauau

SEQ ID NO: 1588686 - RNA, 20 nt, Human
uccuucugugaaaguacauu

SEQ ID NO: 1588687 - RNA, 17 nt, Human
ucuaguaugaaauuaua

SEQ ID NO: 1588688 - RNA, 15 nt, Human
ucuaguaugaaauua

SEQ ID NO: 1588689 - RNA, 21 nt, Human
ucucaaauuuggauugcuaau

SEQ ID NO: 1588690 - RNA, 23 nt, Human
ucuaaauuuuauaucuuguagcu

SEQ ID NO: 1588691 - RNA, 18 nt, Human
ucuaaauuuuauaucuug

SEQ ID NO: 1588692 - RNA, 23 nt, Human
ucuaaauuugaauguuaagcaga

SEQ ID NO: 1588693 - RNA, 22 nt, Human
ucuaaauuugaauguuaagcag

SEQ ID NO: 1588694 - RNA, 19 nt, Human
ucuaacaaaaaaauauauu

SEQ ID NO: 1588695 - RNA, 17 nt, Human
ucuaaauuugaauguua

SEQ ID NO: 1588696 - RNA, 13 nt, Human
ucuaaauuugaau

SEQ ID NO: 1588697 - RNA, 19 nt, Human
uauuugagaguucuaaauu

SEQ ID NO: 1588698 - RNA, 18 nt, Human
uauuugagaguucuaaau

SEQ ID NO: 1588699 - RNA, 16 nt, Human
uauuugagaguucuaa

SEQ ID NO: 1588700 - RNA, 15 nt, Human
uauuugagaguucua

SEQ ID NO: 1588701 - RNA, 20 nt, Human
ucagaaaauauuauguguuu

SEQ ID NO: 1588702 - RNA, 19 nt, Human
ucagaaaauauuauguguu

SEQ ID NO: 1588703 - RNA, 17 nt, Human
ucagaaaauauuaugug

SEQ ID NO: 1588704 - RNA, 16 nt, Human
ucauacauuguacgaa

SEQ ID NO: 1588705 - RNA, 15 nt, Human
ucauacauuguacga

SEQ ID NO: 1588706 - RNA, 13 nt, Human
ucauacauuguac

SEQ ID NO: 1588707 - RNA, 15 nt, Human
ucauaauuuauacag

SEQ ID NO: 1588708 - RNA, 13 nt, Human
ucaguuguacagu

SEQ ID NO: 1588709 - RNA, 13 nt, Human
guuuagcaguaua

SEQ ID NO: 1588710 - RNA, 22 nt, Human
uaaauaaaccucaaaaugucua

SEQ ID NO: 1588711 - RNA, 19 nt, Human
uaagaaaucaaagagagaa

SEQ ID NO: 1588712 - RNA, 13 nt, Human
uaacugugaaguu

SEQ ID NO: 1588713 - RNA, 19 nt, Human
uaaugauaaguaaaugcua

SEQ ID NO: 1588714 - RNA, 14 nt, Human
uaauauauuuccau

SEQ ID NO: 1588715 - RNA, 15 nt, Human
uaauaacugugaagu

SEQ ID NO: 1588716 - RNA, 13 nt, Human
uaauuuuaagaaa

SEQ ID NO: 1588717 - RNA, 23 nt, Human
uaauuaaauuuugaguucuacau

SEQ ID NO: 1588718 - RNA, 15 nt, Human
uacauaaguaauuca

SEQ ID NO: 1588719 - RNA, 23 nt, Human
uacauuuggagacacaacuauuu

SEQ ID NO: 1588720 - RNA, 17 nt, Human
uagaacagauaaucagu

SEQ ID NO: 1588721 - RNA, 23 nt, Human
uacgaagaguauuuuugacagaa

SEQ ID NO: 1588722 - RNA, 22 nt, Human
uacgaagaguauuuuugacaga

SEQ ID NO: 1588723 - RNA, 20 nt, Human
uacgaagaguauuuuugaca

SEQ ID NO: 1588724 - RNA, 21 nt, Human
uauaauucagaaggaucuuca

SEQ ID NO: 1588725 - RNA, 16 nt, Human
uauacccagaaaguua

SEQ ID NO: 1588726 - RNA, 18 nt, Human
gcagauggaaugcugugu

SEQ ID NO: 1588727 - RNA, 22 nt, Human
gcagauggaaugcuguguuaaa

SEQ ID NO: 1588728 - RNA, 11 nt, Human
gaguucuacau

SEQ ID NO: 1588729 - RNA, 17 nt, Human
gacauaaaaacaacuuu

SEQ ID NO: 1588730 - RNA, 15 nt, Human
cuuaugauugcagau

SEQ ID NO: 1588731 - RNA, 11 nt, Human
cuuaacuauuc

SEQ ID NO: 1588732 - RNA, 18 nt, Human
cuguuuugaaucucauaa

SEQ ID NO: 1588733 - RNA, 15 nt, Human
cucauaauuuauaca

SEQ ID NO: 1588734 - RNA, 13 nt, Human
cucauaauuuaua

SEQ ID NO: 1588735 - RNA, 22 nt, Human
cucauaauuuauacaggucaua

SEQ ID NO: 1588736 - RNA, 20 nt, Human
cugcaauuucauaugcugua

SEQ ID NO: 1588737 - RNA, 18 nt, Human
cugcaauuucauaugcug

SEQ ID NO: 1588738 - RNA, 20 nt, Human
ccagugaauucuugaaggaa

SEQ ID NO: 1588739 - RNA, 16 nt, Human
ccagugaauucuugaa

SEQ ID NO: 1588740 - RNA, 16 nt, Human
ccaaaggcucucuccu

SEQ ID NO: 1588741 - RNA, 19 nt, Human
acauaauuaaauuuugagu

SEQ ID NO: 1588742 - RNA, 15 nt, Human
acauaaguaauucaa

SEQ ID NO: 1588743 - RNA, 20 nt, Human
acauaaguaauucaagaaaa

SEQ ID NO: 1588744 - RNA, 21 nt, Human
aagacauucuuccaaaaagau

SEQ ID NO: 1588745 - RNA, 13 nt, Human
aagauuuucagaa

SEQ ID NO: 1588746 - RNA, 20 nt, Human
aauaaaccucaaaaugucua

SEQ ID NO: 1588747 - RNA, 14 nt, Human
aauaauaaauauuu

SEQ ID NO: 1588748 - RNA, 17 nt, Human
aauaaaccucaaaaugu

SEQ ID NO: 1588749 - RNA, 20 nt, Human
aaaugcuagguuaauuccaa

SEQ ID NO: 1588750 - RNA, 21 nt, Human
aaauugauguguuuauuuaua

SEQ ID NO: 1588751 - RNA, 14 nt, Human
aaauugauguguuu

SEQ ID NO: 1588752 - RNA, 18 nt, Human
aaaauuauuuuguucaua

SEQ ID NO: 1588753 - RNA, 16 nt, Human
aaaauuauuuuguuca

SEQ ID NO: 1588754 - RNA, 20 nt, Human
aaaauuauuuuguucauaca

SEQ ID NO: 1588755 - RNA, 21 nt, Human
aaaauuauuuuguucauacau

SEQ ID NO: 1588756 - RNA, 22 nt, Human
aaaccucaaaaugucuaagaua

SEQ ID NO: 1588757 - RNA, 17 nt, Human
aaaccucaaaaugucua

SEQ ID NO: 1588758 - RNA, 20 nt, Human
aaauaaaaauauuguguugu

SEQ ID NO: 1588759 - RNA, 19 nt, Human
aaauaaaccucaaaauguc

SEQ ID NO: 1588760 - RNA, 23 nt, Human
agcuaauguaauaacugugaagu

SEQ ID NO: 1588761 - RNA, 21 nt, Human
agcaaagcugaugacaacuuc

SEQ ID NO: 1588762 - RNA, 23 nt, Human
agcaaagcugaugacaacuuccc

SEQ ID NO: 1588763 - RNA, 14 nt, Human
agaugguucuagca

SEQ ID NO: 1588764 - RNA, 22 nt, Human
aguaaaugcuagguuaauucca

SEQ ID NO: 1588765 - RNA, 11 nt, Human
aguaaaugcua

SEQ ID NO: 1588766 - RNA, 23 nt, Human
aguaaaugcuagguuaauuccaa

SEQ ID NO: 1588767 - RNA, 19 nt, Human
aguaacaaugaagauaaaa

SEQ ID NO: 1588768 - RNA, 17 nt, Human
aguauuuuugacagaau

SEQ ID NO: 1588769 - RNA, 16 nt, Human
aguauuuuugacagaa

SEQ ID NO: 1588770 - RNA, 18 nt, Human
aguauuuuugacagaaua

SEQ ID NO: 1588771 - RNA, 13 nt, Human
aguauuuuugaca

SEQ ID NO: 1588772 - RNA, 20 nt, Human
agugaauucuugaaggaaaa

SEQ ID NO: 1588773 - RNA, 20 nt, Human
auaaaaagccugcaauuuca

SEQ ID NO: 1588774 - RNA, 22 nt, Human
auaaaaagccugcaauuucaua

SEQ ID NO: 1588775 - RNA, 17 nt, Human
auacccagaaaguuauu

SEQ ID NO: 1588776 - RNA, 17 nt, Human
auauuauguguuuccau

SEQ ID NO: 1588777 - RNA, 14 nt, Human
aucuaguaugaaau

SEQ ID NO: 1588778 - RNA, 18 nt, Human
aucuaguaugaaauuaua

SEQ ID NO: 1588779 - RNA, 17 nt, Human
aucuaguaugaaauuau

SEQ ID NO: 1588780 - RNA, 16 nt, Human
aucuaguaugaaauua

SEQ ID NO: 1588781 - RNA, 15 nt, Human
aucuaguaugaaauu

SEQ ID NO: 1588782 - RNA, 19 nt, Human
aucuaguaugaaauuauau

SEQ ID NO: 1588783 - RNA, 15 nt, Human
auguguaaaauguga

SEQ ID NO: 1588784 - RNA, 22 nt, Human
cuacauaaguaauucaagaaaa

SEQ ID NO: 1588785 - RNA, 23 nt, Human
cuacauaaguaauucaagaaaac

SEQ ID NO: 1588786 - RNA, 22 nt, Human
ccaauuauaugagacguuuuug

SEQ ID NO: 1588787 - RNA, 19 nt, Human
ccaaaaagauuuucagaaa

SEQ ID NO: 1588788 - RNA, 11 nt, Human
cacugacagau

SEQ ID NO: 1588789 - RNA, 14 nt, Human
auuguaaauaguau

SEQ ID NO: 1588790 - RNA, 22 nt, Human
auugauaaguucauacauugua

SEQ ID NO: 1588791 - RNA, 18 nt, Human
auucuugaaggaaaauga

SEQ ID NO: 1588792 - RNA, 15 nt, Human
auucuugaaggaaaa

SEQ ID NO: 1588793 - RNA, 22 nt, Human
ggaucuucaucugacuaugaca

SEQ ID NO: 1588794 - RNA, 17 nt, Human
ggcauauuuuucacaua

SEQ ID NO: 1588795 - RNA, 15 nt, Human
ggcauauuuuucaca

SEQ ID NO: 1588796 - RNA, 19 nt, Human
aaaaauauauuuaaugaua

SEQ ID NO: 1588797 - RNA, 15 nt, Human
aaaaauauauuuaau

SEQ ID NO: 1588798 - RNA, 13 nt, Human
aaaaauauauuua

SEQ ID NO: 1588799 - RNA, 12 nt, Human
aaaaugugaagu

SEQ ID NO: 1588800 - RNA, 13 nt, Human
aaagauuuucaga

SEQ ID NO: 1588801 - RNA, 14 nt, Human
aaagauuuucagaa

SEQ ID NO: 1588802 - RNA, 23 nt, Human
aaaguuauugauaaguucauaca

SEQ ID NO: 1588803 - RNA, 22 nt, Human
guaaaaugugaagugaaugaaa

SEQ ID NO: 1588804 - RNA, 20 nt, Human
guaaaaugugaagugaauga

SEQ ID NO: 1588805 - RNA, 19 nt, Human
guaaaaugugaagugaaug

SEQ ID NO: 1588806 - RNA, 12 nt, Human
guaaaaugugaa

SEQ ID NO: 1588807 - RNA, 17 nt, Human
guaacaaugaagauaaa

SEQ ID NO: 1588808 - RNA, 12 nt, Human
gcacugacagau

SEQ ID NO: 1588809 - RNA, 17 nt, Human
gcacugacagauuucca

SEQ ID NO: 1588810 - RNA, 16 nt, Human
gacagaauauguuuca

SEQ ID NO: 1588811 - RNA, 13 nt, Human
gacuaugacauaa

SEQ ID NO: 1588812 - RNA, 22 nt, Human
gagacguuuuuggaagaguagu

SEQ ID NO: 1588813 - RNA, 18 nt, Human
cugugaaguuuacauugu

SEQ ID NO: 1588814 - RNA, 20 nt, Human
cuucaugcauagguuuagca

SEQ ID NO: 1588815 - RNA, 21 nt, Human
cuucaucugacuaugacauaa

SEQ ID NO: 1588816 - RNA, 19 nt, Human
cuucaucugacuaugacau

SEQ ID NO: 1588817 - RNA, 20 nt, Human
uugauguguuuauuuauaga

SEQ ID NO: 1588818 - RNA, 11 nt, Human
uugauguguuu

SEQ ID NO: 1588819 - RNA, 17 nt, Human
aucucauaauuuauaca

SEQ ID NO: 1588820 - RNA, 18 nt, Human
aucucauaauuuauacag

SEQ ID NO: 1588821 - RNA, 17 nt, Human
auggaaugcuguguuaa

SEQ ID NO: 1588822 - RNA, 16 nt, Human
auggaaugcuguguua

SEQ ID NO: 1588823 - RNA, 20 nt, Human
uuguguuaaguauguguaaa

SEQ ID NO: 1588824 - RNA, 20 nt, Human
uucuaacaaaaaaauauauu

SEQ ID NO: 1588825 - RNA, 20 nt, Human
auccuagucacuaccuucau

SEQ ID NO: 1588826 - RNA, 17 nt, Human
uuauuuuguucauacau

SEQ ID NO: 1588827 - RNA, 21 nt, Human
uuauuuuguucauacauauuu

SEQ ID NO: 1588828 - RNA, 13 nt, Human
auagucuuucagu

SEQ ID NO: 1588829 - RNA, 15 nt, Human
auauauuuaaugaua

SEQ ID NO: 1588830 - RNA, 13 nt, Human
auauauuuaauga

SEQ ID NO: 1588831 - RNA, 19 nt, Human
uucauacauuguacgaaga

SEQ ID NO: 1588832 - RNA, 13 nt, Human
uucauacauugua

SEQ ID NO: 1588833 - RNA, 23 nt, Human
uucauacauauuuuuguagcacu

SEQ ID NO: 1588834 - RNA, 12 nt, Human
uucauacauauu

SEQ ID NO: 1588835 - RNA, 13 nt, Human
auaucuuguagcu

SEQ ID NO: 1588836 - RNA, 17 nt, Human
auaucuaguaugaaauu

SEQ ID NO: 1588837 - RNA, 15 nt, Human
auaucuaguaugaaa

SEQ ID NO: 1588838 - RNA, 14 nt, Human
auaucuaguaugaa

SEQ ID NO: 1588839 - RNA, 21 nt, Human
auuuggagacacaacuauuuu

SEQ ID NO: 1588840 - RNA, 20 nt, Human
auuuggagacacaacuauuu

SEQ ID NO: 1588841 - RNA, 21 nt, Human
auugcuaaucaccaaaggcuc

SEQ ID NO: 1588842 - RNA, 15 nt, Human
auuaauauauuucca

SEQ ID NO: 1588843 - RNA, 20 nt, Human
auuaaaaaaucaguuguaca

SEQ ID NO: 1588844 - RNA, 15 nt, Human
auguugugauguauu

SEQ ID NO: 1588845 - RNA, 11 nt, Human
uuuuaagaaau

SEQ ID NO: 1588846 - RNA, 19 nt, Human
uuuguagcacugacagauu

SEQ ID NO: 1588847 - RNA, 17 nt, Human
uuuguagcacugacaga

SEQ ID NO: 1588848 - RNA, 13 nt, Human
auaacugugaagu

SEQ ID NO: 1588849 - RNA, 18 nt, Human
auaaauauuuuugccaua

SEQ ID NO: 1588850 - RNA, 14 nt, Human
uuaaguauguguaa

SEQ ID NO: 1588851 - RNA, 13 nt, Human
aguuuacauugua

SEQ ID NO: 1588852 - RNA, 15 nt, Human
aguucuacauaagua

SEQ ID NO: 1588853 - RNA, 20 nt, Human
uguugugauguauucuagcu

SEQ ID NO: 1588854 - RNA, 14 nt, Human
uguugugauguauu

SEQ ID NO: 1588855 - RNA, 13 nt, Human
uguugugaauguu

SEQ ID NO: 1588856 - RNA, 12 nt, Human
uguugugaaugu

SEQ ID NO: 1588857 - RNA, 13 nt, Human
uguguugugaaug

SEQ ID NO: 1588858 - RNA, 16 nt, Human
aguauuugagaguucu

SEQ ID NO: 1588859 - RNA, 14 nt, Human
aguauguguaaaau

SEQ ID NO: 1588860 - RNA, 19 nt, Human
aguagaacagauaaucagu

SEQ ID NO: 1588861 - RNA, 13 nt, Human
aguagaacagaua

SEQ ID NO: 1588862 - RNA, 19 nt, Human
aggucauauuaauauauuu

SEQ ID NO: 1588863 - RNA, 18 nt, Human
aggucauauuaauauauu

SEQ ID NO: 1588864 - RNA, 17 nt, Human
uggcauauuuuucacau

SEQ ID NO: 1588865 - RNA, 16 nt, Human
uggcauauuuuucaca

SEQ ID NO: 1588866 - RNA, 23 nt, Human
agcuuuaucaaagggugaaaauu

SEQ ID NO: 1588867 - RNA, 12 nt, Human
ugauaaguaaau

SEQ ID NO: 1588868 - RNA, 19 nt, Human
ugauacgcaacauaauuaa

SEQ ID NO: 1588869 - RNA, 22 nt, Human
agcauggcauauuuuucacaua

SEQ ID NO: 1588870 - RNA, 21 nt, Human
agcauggcauauuuuucacau

SEQ ID NO: 1588871 - RNA, 19 nt, Human
agcauggcauauuuuucac

SEQ ID NO: 1588872 - RNA, 18 nt, Human
agcauggcauauuuuuca

SEQ ID NO: 1588873 - RNA, 15 nt, Human
agauggaaugcugug

SEQ ID NO: 1588874 - RNA, 13 nt, Human
agauggaaugcug

SEQ ID NO: 1588875 - RNA, 18 nt, Human
agauggaaugcuguguua

SEQ ID NO: 1588876 - RNA, 20 nt, Human
agaguauuuuugacagaaua

SEQ ID NO: 1588877 - RNA, 18 nt, Human
agaguauuuuugacagaa

SEQ ID NO: 1588878 - RNA, 17 nt, Human
agaguauuuuugacaga

SEQ ID NO: 1588879 - RNA, 23 nt, Human
ugaaaguacauuuggagacacaa

SEQ ID NO: 1588880 - RNA, 14 nt, Human
ugaaaguacauuug

SEQ ID NO: 1588881 - RNA, 15 nt, Human
agaguauuuuugaca

SEQ ID NO: 1588882 - RNA, 14 nt, Human
agaguauuuuugac

SEQ ID NO: 1588883 - RNA, 22 nt, Human
ugaaaaagaccuuuggagcaaa

SEQ ID NO: 1588884 - RNA, 14 nt, Human
agagagaaaauaaa

SEQ ID NO: 1588885 - RNA, 19 nt, Human
agacauucuuccaaaaaga

SEQ ID NO: 1588886 - RNA, 15 nt, Human
ucuuuaacucauaaa

SEQ ID NO: 1588887 - RNA, 16 nt, Human
agaaggaucuucaucu

SEQ ID NO: 1588888 - RNA, 15 nt, Human
acuuuggaacaagau

SEQ ID NO: 1588889 - RNA, 21 nt, Human
ucuaagauaguaacaaugaag

SEQ ID NO: 1588890 - RNA, 22 nt, Human
acuucccuuucugcuuguguua

SEQ ID NO: 1588891 - RNA, 17 nt, Human
acuucccagugaauucu

SEQ ID NO: 1588892 - RNA, 18 nt, Human
ucuagcauggcauauuuu

SEQ ID NO: 1588893 - RNA, 17 nt, Human
ucuagcauggcauauuu

SEQ ID NO: 1588894 - RNA, 18 nt, Human
accaaauaaaaauauugu

SEQ ID NO: 1588895 - RNA, 16 nt, Human
accaaauaaaaauauu

SEQ ID NO: 1588896 - RNA, 21 nt, Human
acauuguaaauaguauuugag

SEQ ID NO: 1588897 - RNA, 19 nt, Human
acauuguaaauaguauuug

SEQ ID NO: 1588898 - RNA, 17 nt, Human
acauuguaaauaguauu

SEQ ID NO: 1588899 - RNA, 19 nt, Human
acauuguacgaagaguauu

SEQ ID NO: 1588900 - RNA, 19 nt, Human
uauuuuuguagcacugaca

SEQ ID NO: 1588901 - RNA, 15 nt, Human
uauuuuuguagcacu

SEQ ID NO: 1588902 - RNA, 13 nt, Human
uauuuuuguagca

SEQ ID NO: 1588903 - RNA, 13 nt, Human
uauuuuucacaua

SEQ ID NO: 1588904 - RNA, 12 nt, Human
uauuuuucacau

SEQ ID NO: 1588905 - RNA, 16 nt, Human
uauuuuguucauacau

SEQ ID NO: 1588906 - RNA, 15 nt, Human
uauuuuguucauaca

SEQ ID NO: 1588907 - RNA, 17 nt, Human
uauguguaaaaugugaa

SEQ ID NO: 1588908 - RNA, 14 nt, Human
uauguguaaaaugu

SEQ ID NO: 1588909 - RNA, 14 nt, Human
acucagaauauugc

SEQ ID NO: 1588910 - RNA, 13 nt, Human
acugaaacuuccc

SEQ ID NO: 1588911 - RNA, 20 nt, Human
acgaagaguauuuuugacag

SEQ ID NO: 1588912 - RNA, 22 nt, Human
acgaagaguauuuuugacagaa

SEQ ID NO: 1588913 - RNA, 19 nt, Human
uccaaaaagauuuucagaa

SEQ ID NO: 1588914 - RNA, 20 nt, Human
uccaaaaagauuuucagaaa

SEQ ID NO: 1588915 - RNA, 17 nt, Human
aauuccaauuauaugag

SEQ ID NO: 1588916 - RNA, 16 nt, Human
aauuuggauugcuaau

SEQ ID NO: 1588917 - RNA, 19 nt, Human
uagcacugacagauuucca

SEQ ID NO: 1588918 - RNA, 14 nt, Human
uagcacugacagau

SEQ ID NO: 1588919 - RNA, 18 nt, Human
uaggcaaccuuuauuuuu

SEQ ID NO: 1588920 - RNA, 21 nt, Human
uauacaggucauauuaauaua

SEQ ID NO: 1588921 - RNA, 16 nt, Human
uauacaggucauauua

SEQ ID NO: 1588922 - RNA, 15 nt, Human
uauacaggucauauu

SEQ ID NO: 1588923 - RNA, 16 nt, Human
acacucaguuguucaa

SEQ ID NO: 1588924 - RNA, 20 nt, Human
uauauccuuucuaacaaaaa

SEQ ID NO: 1588925 - RNA, 19 nt, Human
uaucaaagggugaaaauua

SEQ ID NO: 1588926 - RNA, 18 nt, Human
uaucaaagggugaaaauu

SEQ ID NO: 1588927 - RNA, 22 nt, Human
uaucaaagggugaaaauuauuu

SEQ ID NO: 1588928 - RNA, 21 nt, Human
aauucagaaggaucuucaucu

SEQ ID NO: 1588929 - RNA, 20 nt, Human
aauucaagaaaacaacuuca

SEQ ID NO: 1588930 - RNA, 12 nt, Human
aauucaagaaaa

SEQ ID NO: 1588931 - RNA, 20 nt, Human
aaugacucagaauauugcuu

SEQ ID NO: 1588932 - RNA, 16 nt, Human
uaauuuauacagguca

SEQ ID NO: 1588933 - RNA, 14 nt, Human
aaucagugugucua

SEQ ID NO: 1588934 - RNA, 16 nt, Human
uaaguaauucaagaaa

SEQ ID NO: 1588935 - RNA, 22 nt, Human
aaucagugugucuaaauuugaa

SEQ ID NO: 1588936 - RNA, 18 nt, Human
aaucagugugucuaaauu

SEQ ID NO: 1588937 - RNA, 17 nt, Human
aaucagugugucuaaau

SEQ ID NO: 1588938 - RNA, 17 nt, Human
uaacaaugaagauaaaa

SEQ ID NO: 1588939 - RNA, 22 nt, Human
aauagagcaaaauugauguguu

SEQ ID NO: 1588940 - RNA, 20 nt, Human
aauagagcaaaauugaugug

SEQ ID NO: 1588941 - RNA, 14 nt, Human
aauauauuuaauga

SEQ ID NO: 1588942 - RNA, 22 nt, Human
aagccugcaauuucauaugcug

SEQ ID NO: 1588943 - RNA, 17 nt, Human
aagccugcaauuucaua

SEQ ID NO: 1588944 - RNA, 18 nt, Human
guuauugauaaguucaua

SEQ ID NO: 1588945 - RNA, 21 nt, Human
aagaccuuuggagcaaagcug

SEQ ID NO: 1588946 - RNA, 23 nt, Human
aagaccuugcuuaugauugcaga

SEQ ID NO: 1588947 - RNA, 12 nt, Human
guuucaaacuuu

SEQ ID NO: 1588948 - RNA, 16 nt, Human
aagggugaaaauuauu

SEQ ID NO: 1588949 - RNA, 15 nt, Human
aagggugaaaauuau

SEQ ID NO: 1588950 - RNA, 15 nt, Human
guauuuuugacagaa

SEQ ID NO: 1588951 - RNA, 12 nt, Human
guauuuuugaca

SEQ ID NO: 1588952 - RNA, 16 nt, Human
guauuuuugacagaau

SEQ ID NO: 1588953 - RNA, 13 nt, Human
aacagauaaucag

SEQ ID NO: 1588954 - RNA, 19 nt, Human
aacaagaugguucuagcau

SEQ ID NO: 1588955 - RNA, 18 nt, Human
aacuucccagugaauucu

SEQ ID NO: 1588956 - RNA, 19 nt, Human
caauaauaaauauuuuugc

SEQ ID NO: 1588957 - RNA, 22 nt, Human
caaaauaauuuuaagaaaucaa

SEQ ID NO: 1588958 - RNA, 18 nt, Human
caaaauaauuuuaagaaa

SEQ ID NO: 1588959 - RNA, 18 nt, Human
caaauaaaaauauugugu

SEQ ID NO: 1588960 - RNA, 16 nt, Human
caaauaaaaauauugu

SEQ ID NO: 1588961 - RNA, 19 nt, Human
caaagagagaaaauaaaga

SEQ ID NO: 1588962 - RNA, 16 nt, Human
caaagagagaaaauaa

SEQ ID NO: 1588963 - RNA, 13 nt, Human
uuacauuguaaau

SEQ ID NO: 1588964 - RNA, 12 nt, Human
uuacauuguaaa

SEQ ID NO: 1588965 - RNA, 16 nt, Human
uuaaugauaaguaaau

SEQ ID NO: 1588966 - RNA, 17 nt, Human
uuaaugauaaguaaaug

SEQ ID NO: 1588967 - RNA, 19 nt, Human
uguuuccauauuuuauagg

SEQ ID NO: 1588968 - RNA, 23 nt, Human
uguucauacauauuuuuguagca

SEQ ID NO: 1588969 - RNA, 14 nt, Human
uguucauacauauu

SEQ ID NO: 1588970 - RNA, 12 nt, Human
uguucauacaua

SEQ ID NO: 1588971 - RNA, 21 nt, Human
ugugaauguugugauguauuc

SEQ ID NO: 1588972 - RNA, 14 nt, Human
ugugaaguuuacau

SEQ ID NO: 1588973 - RNA, 18 nt, Human
ugugaagugaaugaaaca

SEQ ID NO: 1588974 - RNA, 14 nt, Human
uguacgaagaguau

SEQ ID NO: 1588975 - RNA, 22 nt, Human
uguacgaagaguauuuuugaca

SEQ ID NO: 1588976 - RNA, 16 nt, Human
uggaaugcuguguuaa

SEQ ID NO: 1588977 - RNA, 22 nt, Human
ucucauaauuuauacaggucau

SEQ ID NO: 1588978 - RNA, 16 nt, Human
ucucauaauuuauaca

SEQ ID NO: 1588979 - RNA, 19 nt, Human
ucagugugucuaaauuuga

SEQ ID NO: 1588980 - RNA, 22 nt, Human
ucaggagaguagaacagauaau

SEQ ID NO: 1588981 - RNA, 23 nt, Human
ucucauaauuuauacaggucaua

SEQ ID NO: 1588982 - RNA, 19 nt, Human
ugaaaauuauuuuguucau

SEQ ID NO: 1588983 - RNA, 23 nt, Human
ugaaaauuauuuuguucauacau

SEQ ID NO: 1588984 - RNA, 22 nt, Human
ugaaaauuauuuuguucauaca

SEQ ID NO: 1588985 - RNA, 23 nt, Human
ugaaacacucaguuguucaauaa

SEQ ID NO: 1588986 - RNA, 18 nt, Human
ucuuguagcuuuaucaaa

SEQ ID NO: 1588987 - RNA, 19 nt, Human
ucuugaaggaaaaugauac

SEQ ID NO: 1588988 - RNA, 23 nt, Human
ugacagaauauguuucaaacuuu

SEQ ID NO: 1588989 - RNA, 22 nt, Human
ugacagaauauguuucaaacuu

SEQ ID NO: 1588990 - RNA, 21 nt, Human
ugacagaauauguuucaaacu

SEQ ID NO: 1588991 - RNA, 22 nt, Human
ugacaacuucccagugaauucu

SEQ ID NO: 1588992 - RNA, 20 nt, Human
ugaaguuuacauuguaaaua

SEQ ID NO: 1588993 - RNA, 16 nt, Human
ugaaguuuacauugua

SEQ ID NO: 1588994 - RNA, 14 nt, Human
ugaaguuuacauug

SEQ ID NO: 1588995 - RNA, 20 nt, Human
ugaaucucauaauuuauaca

SEQ ID NO: 1588996 - RNA, 13 nt, Human
ugaaucucauaau

SEQ ID NO: 1588997 - RNA, 15 nt, Human
ugaaggaaaaugaua

SEQ ID NO: 1588998 - RNA, 13 nt, Human
uacuuaacuauuc

SEQ ID NO: 1588999 - RNA, 14 nt, Human
uacccagaaaguua

SEQ ID NO: 1589000 - RNA, 18 nt, Human
uagcauggcauauuuuuc

SEQ ID NO: 1589001 - RNA, 17 nt, Human
uagcauggcauauuuuu

SEQ ID NO: 1589002 - RNA, 15 nt, Human
uagcauggcauauuu

SEQ ID NO: 1589003 - RNA, 21 nt, Human
uagcauggcauauuuuucaca

SEQ ID NO: 1589004 - RNA, 22 nt, Human
uagguuaauuccaauuauauga

SEQ ID NO: 1589005 - RNA, 18 nt, Human
uauauaaguauucuaaau

SEQ ID NO: 1589006 - RNA, 14 nt, Human
uauaucuuguagcu

SEQ ID NO: 1589007 - RNA, 21 nt, Human
uaauaacugugaaguuuacau

SEQ ID NO: 1589008 - RNA, 19 nt, Human
uaauaaauauuuuugccau

SEQ ID NO: 1589009 - RNA, 18 nt, Human
uaacugugaaguuuacau

SEQ ID NO: 1589010 - RNA, 17 nt, Human
uaacugugaaguuuaca

SEQ ID NO: 1589011 - RNA, 14 nt, Human
uaaauuugaauguu

SEQ ID NO: 1589012 - RNA, 22 nt, Human
uaaauuugaauguuaagcagau

SEQ ID NO: 1589013 - RNA, 19 nt, Human
uaaaaagccugcaauuuca

SEQ ID NO: 1589014 - RNA, 21 nt, Human
uaaaaagacauucuuccaaaa

SEQ ID NO: 1589015 - RNA, 19 nt, Human
uaaaaacaacuuuauaccc

SEQ ID NO: 1589016 - RNA, 18 nt, Human
uaaaaacaacuuuauacc

SEQ ID NO: 1589017 - RNA, 13 nt, Human
uaaaaacaacuuu

SEQ ID NO: 1589018 - RNA, 14 nt, Human
guugugaauguugu

SEQ ID NO: 1589019 - RNA, 18 nt, Human
guucaauaauaaauauuu

SEQ ID NO: 1589020 - RNA, 15 nt, Human
guguacuuaacuauu

SEQ ID NO: 1589021 - RNA, 18 nt, Human
gugaauucuugaaggaaa

SEQ ID NO: 1589022 - RNA, 22 nt, Human
gugaauucuugaaggaaaauga

SEQ ID NO: 1589023 - RNA, 13 nt, Human
gucuaaauuugaa

SEQ ID NO: 1589024 - RNA, 21 nt, Human
gucuaagauaguaacaaugaa

SEQ ID NO: 1589025 - RNA, 23 nt, Human
gucuaagauaguaacaaugaaga

SEQ ID NO: 1589026 - RNA, 23 nt, Human
guaugaaauuauauaaguauucu

SEQ ID NO: 1589027 - RNA, 13 nt, Human
guaugaaauuaua

SEQ ID NO: 1589028 - RNA, 15 nt, Human
guagcacugacagau

SEQ ID NO: 1589029 - RNA, 14 nt, Human
guagcacugacaga

SEQ ID NO: 1589030 - RNA, 20 nt, Human
uuugaaucucauaauuuaua

SEQ ID NO: 1589031 - RNA, 19 nt, Human
uuugaaucucauaauuuau

SEQ ID NO: 1589032 - RNA, 16 nt, Human
uuugaaucucauaauu

SEQ ID NO: 1589033 - RNA, 22 nt, Human
uuugaaucucauaauuuauaca

SEQ ID NO: 1589034 - RNA, 21 nt, Human
uuugaaucucauaauuuauac

SEQ ID NO: 1589035 - RNA, 11 nt, Human
uuuugacagaa

SEQ ID NO: 1589036 - RNA, 20 nt, Human
uuuugaaucucauaauuuau

SEQ ID NO: 1589037 - RNA, 18 nt, Human
uuuuguagcacugacaga

SEQ ID NO: 1589038 - RNA, 19 nt, Human
uuuuguagcacugacagau

SEQ ID NO: 1589039 - RNA, 15 nt, Human
gccugcaauuucaua

SEQ ID NO: 1589040 - RNA, 14 nt, Human
gauagucuuucagu

SEQ ID NO: 1589041 - RNA, 15 nt, Human
gauaguaacaaugaa

SEQ ID NO: 1589042 - RNA, 22 nt, Human
gauagucuuucaguuaaggaga

SEQ ID NO: 1589043 - RNA, 16 nt, Human
gauaaguucauacauu

SEQ ID NO: 1589044 - RNA, 14 nt, Human
gauaaguucauaca

SEQ ID NO: 1589045 - RNA, 12 nt, Human
gauaaguucaua

SEQ ID NO: 1589046 - RNA, 17 nt, Human
gaugacaacuucccagu

SEQ ID NO: 1589047 - RNA, 19 nt, Human
gcauauuuuucacauaucu

SEQ ID NO: 1589048 - RNA, 16 nt, Human
gcauauuuuucacaua

SEQ ID NO: 1589049 - RNA, 15 nt, Human
gcauauuuuucacau

SEQ ID NO: 1589050 - RNA, 14 nt, Human
gcauauuuuucaca

SEQ ID NO: 1589051 - RNA, 20 nt, Human
gcauauuuuucacauaucua

SEQ ID NO: 1589052 - RNA, 23 nt, Human
gaaauuauauaaguauucuaaau

SEQ ID NO: 1589053 - RNA, 17 nt, Human
gaaauuauauaaguauu

SEQ ID NO: 1589054 - RNA, 18 nt, Human
gaacagauaaucagugug

SEQ ID NO: 1589055 - RNA, 23 nt, Human
gaaaguuauugauaaguucauac

SEQ ID NO: 1589056 - RNA, 20 nt, Human
gaagaguauuuuugacagaa

SEQ ID NO: 1589057 - RNA, 16 nt, Human
cuuuggaacaagaugg

SEQ ID NO: 1589058 - RNA, 15 nt, Human
cugacagauuuccau

SEQ ID NO: 1589059 - RNA, 11 nt, Human
cugacagauuu

SEQ ID NO: 1589060 - RNA, 15 nt, Human
cugacuaugacauaa

SEQ ID NO: 1589061 - RNA, 21 nt, Human
cucuccugauagucuuucagu

SEQ ID NO: 1589062 - RNA, 23 nt, Human
cuaaauuugaauguuaagcagau

SEQ ID NO: 1589063 - RNA, 21 nt, Human
cuaugacauaaaaacaacuuu

SEQ ID NO: 1589064 - RNA, 18 nt, Human
cuaugacauaaaaacaac

SEQ ID NO: 1589065 - RNA, 16 nt, Human
cuaguaugaaauuaua

SEQ ID NO: 1589066 - RNA, 19 nt, Human
cuaauguaauaacugugaa

SEQ ID NO: 1589067 - RNA, 14 nt, Human
cagugugucuaaau

SEQ ID NO: 1589068 - RNA, 23 nt, Human
cagugugucuaaauuugaauguu

SEQ ID NO: 1589069 - RNA, 15 nt, Human
cauaaaaacaacuuu

SEQ ID NO: 1589070 - RNA, 23 nt, Human
cauaaaaacaacuuuauacccag

SEQ ID NO: 1589071 - RNA, 21 nt, Human
cauaaaaacaacuuuauaccc

SEQ ID NO: 1589072 - RNA, 20 nt, Human
cauaaaaacaacuuuauacc

SEQ ID NO: 1589073 - RNA, 17 nt, Human
cauaaaaacaacuuuau

SEQ ID NO: 1589074 - RNA, 23 nt, Human
cauaaaaagccugcaauuucaua

SEQ ID NO: 1589075 - RNA, 22 nt, Human
cauaaguaauucaagaaaacaa

SEQ ID NO: 1589076 - RNA, 18 nt, Human
cauaaguaauucaagaaa

SEQ ID NO: 1589077 - RNA, 17 nt, Human
cauaaguaauucaagaa

SEQ ID NO: 1589078 - RNA, 16 nt, Human
cauaaguaauucaaga

SEQ ID NO: 1589079 - RNA, 19 nt, Human
cauacauauuuuuguagca

SEQ ID NO: 1589080 - RNA, 12 nt, Human
cauacauauuuu

SEQ ID NO: 1589081 - RNA, 15 nt, Human
cauacauuguacgaa

SEQ ID NO: 1589082 - RNA, 18 nt, Human
cauauuuuucacauaucu

SEQ ID NO: 1589083 - RNA, 21 nt, Human
cauauuuuucacauaucuagu

SEQ ID NO: 1589084 - RNA, 14 nt, Human
cauauuuuucacau

SEQ ID NO: 1589085 - RNA, 13 nt, Human
cugaaacuucccu

SEQ ID NO: 1589086 - RNA, 23 nt, Human
cgccacuguuuugaaucucauaa

SEQ ID NO: 1589087 - RNA, 23 nt, Human
cauaugcuguauauccuuucuaa

SEQ ID NO: 1589088 - RNA, 19 nt, Human
cauauuaauauauuuccau

SEQ ID NO: 1589089 - RNA, 15 nt, Human
cauauuaauauauuu

SEQ ID NO: 1589090 - RNA, 14 nt, Human
cauauuaauauauu

SEQ ID NO: 1589091 - RNA, 12 nt, Human
cagaauauguuu

SEQ ID NO: 1589092 - RNA, 17 nt, Human
cagaauauguuucaaac

SEQ ID NO: 1589093 - RNA, 15 nt, Human
cagaauauguuucaa

SEQ ID NO: 1589094 - RNA, 14 nt, Human
cagaauauguuuca

SEQ ID NO: 1589095 - RNA, 13 nt, Human
cagaauauguuuc

SEQ ID NO: 1589096 - RNA, 20 nt, Human
cagaauauguuucaaacuuu

SEQ ID NO: 1589097 - RNA, 18 nt, Human
cagaauauguuucaaacu

SEQ ID NO: 1589098 - RNA, 13 nt, Human
cagaauauugcuu

SEQ ID NO: 1589099 - RNA, 18 nt, Human
caaaaaaauauauuuaau

SEQ ID NO: 1589100 - RNA, 22 nt, Human
auuuaaugauaaguaaaugcua

SEQ ID NO: 1589101 - RNA, 19 nt, Human
auuuauacaggucauauua

SEQ ID NO: 1589102 - RNA, 22 nt, Human
auucaagaaaacaacuucaaua

SEQ ID NO: 1589103 - RNA, 18 nt, Human
auuaaauuuugaguucua

SEQ ID NO: 1589104 - RNA, 20 nt, Human
auuaaauuuugaguucuaca

SEQ ID NO: 1589105 - RNA, 19 nt, Human
gaaaucaaagagagaaaau

SEQ ID NO: 1589106 - RNA, 16 nt, Human
gaacaagaugguucua

SEQ ID NO: 1589107 - RNA, 23 nt, Human
cugugaaguuuacauuguaaaua

SEQ ID NO: 1589108 - RNA, 22 nt, Human
gaauauugcuuuggucauauga

SEQ ID NO: 1589109 - RNA, 17 nt, Human
gcaaaauugauguguuu

SEQ ID NO: 1589110 - RNA, 23 nt, Human
ggaucuucaucugacuaugacau

SEQ ID NO: 1589111 - RNA, 23 nt, Human
aaaaagauuuucagaaaauauua

SEQ ID NO: 1589112 - RNA, 20 nt, Human
aaaaagccugcaauuucaua

SEQ ID NO: 1589113 - RNA, 20 nt, Human
gguucuagcauggcauauuu

SEQ ID NO: 1589114 - RNA, 17 nt, Human
gguguuuuaaaaaaucu

SEQ ID NO: 1589115 - RNA, 15 nt, Human
guaauagagcaaaau

SEQ ID NO: 1589116 - RNA, 19 nt, Human
guaauagagcaaaauugau

SEQ ID NO: 1589117 - RNA, 20 nt, Human
aaauauuguguugugaaugu

SEQ ID NO: 1589118 - RNA, 15 nt, Human
aaauauauuuaauga

SEQ ID NO: 1589119 - RNA, 14 nt, Human
aaauauauuuaaug

SEQ ID NO: 1589120 - RNA, 21 nt, Human
aaacuucccuuucugcuugug

SEQ ID NO: 1589121 - RNA, 18 nt, Human
ggucauauuaauauauuu

SEQ ID NO: 1589122 - RNA, 16 nt, Human
aaaauauauuuaauga

SEQ ID NO: 1589123 - RNA, 17 nt, Human
uuuuguucauacauauu

SEQ ID NO: 1589124 - RNA, 14 nt, Human
uuuuguucauacau

SEQ ID NO: 1589125 - RNA, 14 nt, Human
uuuugaguucuaca

SEQ ID NO: 1589126 - RNA, 17 nt, Human
auuauauaaguauucua

SEQ ID NO: 1589127 - RNA, 14 nt, Human
auuauauaaguauu

SEQ ID NO: 1589128 - RNA, 20 nt, Human
auuauauaaguauucuaaau

SEQ ID NO: 1589129 - RNA, 17 nt, Human
uuuuuguagcacugaca

SEQ ID NO: 1589130 - RNA, 15 nt, Human
uuuuccaaaauaauu

SEQ ID NO: 1589131 - RNA, 14 nt, Human
auucuaaauuuuau

SEQ ID NO: 1589132 - RNA, 17 nt, Human
auuuucagaaaauauua

SEQ ID NO: 1589133 - RNA, 14 nt, Human
auuuucagaaaaua

SEQ ID NO: 1589134 - RNA, 19 nt, Human
augacauaaaaacaacuuu

SEQ ID NO: 1589135 - RNA, 19 nt, Human
augcuguauauccuuucua

SEQ ID NO: 1589136 - RNA, 22 nt, Human
uuucagaaaauauuauguguuu

SEQ ID NO: 1589137 - RNA, 15 nt, Human
uuucauaugcuguau

SEQ ID NO: 1589138 - RNA, 16 nt, Human
auauauuuaaugauaa

SEQ ID NO: 1589139 - RNA, 13 nt, Human
uucauaugcugua

SEQ ID NO: 1589140 - RNA, 21 nt, Human
auaugagcuuccuucugugaa

SEQ ID NO: 1589141 - RNA, 22 nt, Human
auaugagcuuccuucugugaaa

SEQ ID NO: 1589142 - RNA, 23 nt, Human
auauuuuuguagcacugacagau

SEQ ID NO: 1589143 - RNA, 16 nt, Human
auauuuuuguagcacu

SEQ ID NO: 1589144 - RNA, 15 nt, Human
auauuuuuguagcac

SEQ ID NO: 1589145 - RNA, 18 nt, Human
auauuuuucacauaucua

SEQ ID NO: 1589146 - RNA, 17 nt, Human
uucccagugaauucuug

SEQ ID NO: 1589147 - RNA, 17 nt, Human
auauguuucaaacuuug

SEQ ID NO: 1589148 - RNA, 16 nt, Human
auauguuucaaacuuu

SEQ ID NO: 1589149 - RNA, 14 nt, Human
auauguuucaaacu

SEQ ID NO: 1589150 - RNA, 13 nt, Human
auauguuucaaac

SEQ ID NO: 1589151 - RNA, 23 nt, Human
auauuuaaugauaaguaaaugcu

SEQ ID NO: 1589152 - RNA, 13 nt, Human
auauuuaaugaua

SEQ ID NO: 1589153 - RNA, 12 nt, Human
auauuuaaugau

SEQ ID NO: 1589154 - RNA, 14 nt, Human
uugagaguucuaaa

SEQ ID NO: 1589155 - RNA, 16 nt, Human
uugauaaguucauaca

SEQ ID NO: 1589156 - RNA, 17 nt, Human
uugauaaguucauacau

SEQ ID NO: 1589157 - RNA, 17 nt, Human
uugaaggaaaaugauac

SEQ ID NO: 1589158 - RNA, 23 nt, Human
aucagugugucuaaauuugaaug

SEQ ID NO: 1589159 - RNA, 15 nt, Human
aguucuaaauuuugu

SEQ ID NO: 1589160 - RNA, 22 nt, Human
aguuauugauaaguucauacau

SEQ ID NO: 1589161 - RNA, 21 nt, Human
aguuauugauaaguucauaca

SEQ ID NO: 1589162 - RNA, 19 nt, Human
aguuauugauaaguucaua

SEQ ID NO: 1589163 - RNA, 17 nt, Human
aguuauugauaaguuca

SEQ ID NO: 1589164 - RNA, 23 nt, Human
aguuauugauaaguucauacauu

SEQ ID NO: 1589165 - RNA, 22 nt, Human
auacauuguacgaagaguauuu

SEQ ID NO: 1589166 - RNA, 21 nt, Human
auacauuguacgaagaguauu

SEQ ID NO: 1589167 - RNA, 14 nt, Human
auacauuguacgaa

SEQ ID NO: 1589168 - RNA, 19 nt, Human
auacauauuuuuguagcac

SEQ ID NO: 1589169 - RNA, 21 nt, Human
auacaggucauauuaauauau

SEQ ID NO: 1589170 - RNA, 15 nt, Human
auacaggucauauua

SEQ ID NO: 1589171 - RNA, 22 nt, Human
uuaucaaagggugaaaauuauu

SEQ ID NO: 1589172 - RNA, 21 nt, Human
auaauuuuaagaaaucaaaga

SEQ ID NO: 1589173 - RNA, 15 nt, Human
auaauuuuaagaaau

SEQ ID NO: 1589174 - RNA, 16 nt, Human
uuauauaaguauucua

SEQ ID NO: 1589175 - RNA, 14 nt, Human
uuauauaaguauuc

SEQ ID NO: 1589176 - RNA, 13 nt, Human
uuauauaaguauu

SEQ ID NO: 1589177 - RNA, 19 nt, Human
uuauacccagaaaguuauu

SEQ ID NO: 1589178 - RNA, 18 nt, Human
uuauacccagaaaguuau

SEQ ID NO: 1589179 - RNA, 23 nt, Human
uuauacccagaaaguuauugaua

SEQ ID NO: 1589180 - RNA, 23 nt, Human
uuauagaguguacuuaacuauuc

SEQ ID NO: 1589181 - RNA, 16 nt, Human
auaaaccucaaaaugu

SEQ ID NO: 1589182 - RNA, 12 nt, Human
auaacugugaag

SEQ ID NO: 1589183 - RNA, 20 nt, Human
auaaucagugugucuaaauu

SEQ ID NO: 1589184 - RNA, 15 nt, Human
auaaguucauacauu

SEQ ID NO: 1589185 - RNA, 14 nt, Human
auaaguucauacau

SEQ ID NO: 1589186 - RNA, 13 nt, Human
auaaguucauaca

SEQ ID NO: 1589187 - RNA, 11 nt, Human
auaaguucaua

SEQ ID NO: 1589188 - RNA, 21 nt, Human
auaaguucauacauuguacga

SEQ ID NO: 1589189 - RNA, 15 nt, Human
agggugaaaauuauu

SEQ ID NO: 1589190 - RNA, 16 nt, Human
aggucauauuaauaua

SEQ ID NO: 1589191 - RNA, 15 nt, Human
uguacuuaacuauuc

SEQ ID NO: 1589192 - RNA, 18 nt, Human
ugucuaaauuugaauguu

SEQ ID NO: 1589193 - RNA, 15 nt, Human
ugucuaagauaguaa

SEQ ID NO: 1589194 - RNA, 14 nt, Human
ugucuaagauagua

SEQ ID NO: 1589195 - RNA, 14 nt, Human
ugacuaugacauaa

SEQ ID NO: 1589196 - RNA, 23 nt, Human
acuuaacuauucaggagaguaga

SEQ ID NO: 1589197 - RNA, 14 nt, Human
acuucccuuucugc

SEQ ID NO: 1589198 - RNA, 23 nt, Human
ucuagcauggcauauuuuucaca

SEQ ID NO: 1589199 - RNA, 22 nt, Human
ucuagcauggcauauuuuucac

SEQ ID NO: 1589200 - RNA, 21 nt, Human
ucuagcauggcauauuuuuca

SEQ ID NO: 1589201 - RNA, 16 nt, Human
ucugugaaaguacauu

SEQ ID NO: 1589202 - RNA, 14 nt, Human
ucugcuuguguuaa

SEQ ID NO: 1589203 - RNA, 21 nt, Human
agaauauguuucaaacuuugg

SEQ ID NO: 1589204 - RNA, 19 nt, Human
agaauauguuucaaacuuu

SEQ ID NO: 1589205 - RNA, 18 nt, Human
agaauauguuucaaacuu

SEQ ID NO: 1589206 - RNA, 17 nt, Human
agaauauguuucaaacu

SEQ ID NO: 1589207 - RNA, 13 nt, Human
agaauauguuuca

SEQ ID NO: 1589208 - RNA, 18 nt, Human
accuuuggagcaaagcug

SEQ ID NO: 1589209 - RNA, 22 nt, Human
ucauaaaaagccugcaauuuca

SEQ ID NO: 1589210 - RNA, 16 nt, Human
accucaaaaugucuaa

SEQ ID NO: 1589211 - RNA, 14 nt, Human
accccugcuucuga

SEQ ID NO: 1589212 - RNA, 17 nt, Human
ucaagaaaacaacuuca

SEQ ID NO: 1589213 - RNA, 18 nt, Human
ucaauauccaaaccaaau

SEQ ID NO: 1589214 - RNA, 19 nt, Human
acauucuuccaaaaagauu

SEQ ID NO: 1589215 - RNA, 14 nt, Human
ucacauaucuagua

SEQ ID NO: 1589216 - RNA, 22 nt, Human
uaagcagauggaaugcuguguu

SEQ ID NO: 1589217 - RNA, 18 nt, Human
aauauuguguugugaaug

SEQ ID NO: 1589218 - RNA, 17 nt, Human
aauauuguguugugaau

SEQ ID NO: 1589219 - RNA, 23 nt, Human
aauaguauuugagaguucuaaau

SEQ ID NO: 1589220 - RNA, 22 nt, Human
aauaguauuugagaguucuaaa

SEQ ID NO: 1589221 - RNA, 20 nt, Human
aauaguauuugagaguucua

SEQ ID NO: 1589222 - RNA, 16 nt, Human
uaaguauucuaaauuu

SEQ ID NO: 1589223 - RNA, 13 nt, Human
uaaguaaaugcua

SEQ ID NO: 1589224 - RNA, 21 nt, Human
uaauagagcaaaauugaugug

SEQ ID NO: 1589225 - RNA, 12 nt, Human
uaauagagcaaa

SEQ ID NO: 1589226 - RNA, 19 nt, Human
aaugaaacacucaguuguu

SEQ ID NO: 1589227 - RNA, 20 nt, Human
aauuauuuuguucauacaua

SEQ ID NO: 1589228 - RNA, 19 nt, Human
aauuauuuuguucauacau

SEQ ID NO: 1589229 - RNA, 18 nt, Human
aauuauuuuguucauaca

SEQ ID NO: 1589230 - RNA, 16 nt, Human
aauuauuuuguucaua

SEQ ID NO: 1589231 - RNA, 22 nt, Human
aauuauuuuguucauacauauu

SEQ ID NO: 1589232 - RNA, 21 nt, Human
aauuauuuuguucauacauau

SEQ ID NO: 1589233 - RNA, 15 nt, Human
aauucagaaggaucu

SEQ ID NO: 1589234 - RNA, 19 nt, Human
uacauuguacgaagaguau

SEQ ID NO: 1589235 - RNA, 14 nt, Human
aauugauguguuua

SEQ ID NO: 1589236 - RNA, 13 nt, Human
aauugauguguuu

SEQ ID NO: 1589237 - RNA, 13 nt, Human
aaugcuguguuaa

SEQ ID NO: 1589238 - RNA, 13 nt, Human
aauguuaagcaga

SEQ ID NO: 1589239 - RNA, 17 nt, Human
uacauuguaaauaguau

SEQ ID NO: 1589240 - RNA, 23 nt, Human
uacaggucauauuaauauauuuc

SEQ ID NO: 1589241 - RNA, 19 nt, Human
uauccaaaccaaauaaaaa

SEQ ID NO: 1589242 - RNA, 20 nt, Human
acagauuuccauccuaguca

SEQ ID NO: 1589243 - RNA, 19 nt, Human
uaugaaauuauauaaguau

SEQ ID NO: 1589244 - RNA, 19 nt, Human
uagcuaauguaauaacugu

SEQ ID NO: 1589245 - RNA, 12 nt, Human
uagcuaauguaa

SEQ ID NO: 1589246 - RNA, 22 nt, Human
uagcauggcauauuuuucacau

SEQ ID NO: 1589247 - RNA, 21 nt, Human
uagagcaaaauugauguguuu

SEQ ID NO: 1589248 - RNA, 14 nt, Human
uagagcaaaauuga

SEQ ID NO: 1589249 - RNA, 22 nt, Human
uagagcaaaauugauguguuua

SEQ ID NO: 1589250 - RNA, 14 nt, Human
aagaaaacaacuuc

SEQ ID NO: 1589251 - RNA, 19 nt, Human
aacugugaaguuuacauug

SEQ ID NO: 1589252 - RNA, 17 nt, Human
aacugugaaguuuacau

SEQ ID NO: 1589253 - RNA, 14 nt, Human
gugaaguuuacauu

SEQ ID NO: 1589254 - RNA, 23 nt, Human
aacuauucaggagaguagaacag

SEQ ID NO: 1589255 - RNA, 19 nt, Human
guauucuagcuaauguaau

SEQ ID NO: 1589256 - RNA, 24 nt, Human
guauucuaaauuuuauaucuugua

SEQ ID NO: 1589257 - RNA, 21 nt, Human
guauucuaaauuuuauaucuu

SEQ ID NO: 1589258 - RNA, 22 nt, Human
uaaaaauauuguguugugaaug

SEQ ID NO: 1589259 - RNA, 21 nt, Human
uaaaaauauuguguugugaau

SEQ ID NO: 1589260 - RNA, 22 nt, Human
uaaaaagccugcaauuucauau

SEQ ID NO: 1589261 - RNA, 14 nt, Human
uaaaaauauugugu

SEQ ID NO: 1589262 - RNA, 11 nt, Human
uaaaaugugaa

SEQ ID NO: 1589263 - RNA, 13 nt, Human
uaaaaugugaagu

SEQ ID NO: 1589264 - RNA, 12 nt, Human
aaggaaaaugau

SEQ ID NO: 1589265 - RNA, 19 nt, Human
aaguauguguaaaauguga

SEQ ID NO: 1589266 - RNA, 22 nt, Human
guucuagcauggcauauuuuuc

SEQ ID NO: 1589267 - RNA, 19 nt, Human
guuaauuccaauuauauga

SEQ ID NO: 1589268 - RNA, 22 nt, Human
guuauugauaaguucauacauu

SEQ ID NO: 1589269 - RNA, 21 nt, Human
guuauugauaaguucauacau

SEQ ID NO: 1589270 - RNA, 15 nt, Human
guguaaaaugugaag

SEQ ID NO: 1589271 - RNA, 12 nt, Human
aaaaacaacuuu

SEQ ID NO: 1589272 - RNA, 12 nt, Human
aaaacaacuuua

SEQ ID NO: 1589273 - RNA, 19 nt, Human
agcuuccuucugugaaagu

SEQ ID NO: 1589274 - RNA, 22 nt, Human
agguuaauuccaauuauaugag

SEQ ID NO: 1589275 - RNA, 15 nt, Human
agguuaauuccaauu

SEQ ID NO: 1589276 - RNA, 14 nt, Human
agacacaacuauuu

SEQ ID NO: 1589277 - RNA, 13 nt, Human
auccuuucuaaca

SEQ ID NO: 1589278 - RNA, 14 nt, Human
augacucagaauau

SEQ ID NO: 1589279 - RNA, 20 nt, Human
augaaacacucaguuguuca

SEQ ID NO: 1589280 - RNA, 17 nt, Human
auguaauaacugugaag

SEQ ID NO: 1589281 - RNA, 22 nt, Human
auauaaguauucuaaauuuuau

SEQ ID NO: 1589282 - RNA, 16 nt, Human
auauccuuucuaacaa

SEQ ID NO: 1589283 - RNA, 15 nt, Human
auauccuuucuaaca

SEQ ID NO: 1589284 - RNA, 19 nt, Human
acaggucauauuaauauau

SEQ ID NO: 1589285 - RNA, 21 nt, Human
acagaauauguuucaaacuuu

SEQ ID NO: 1589286 - RNA, 19 nt, Human
acagaauauguuucaaacu

SEQ ID NO: 1589287 - RNA, 17 nt, Human
acagaauauguuucaaa

SEQ ID NO: 1589288 - RNA, 16 nt, Human
acagaauauguuucaa

SEQ ID NO: 1589289 - RNA, 20 nt, Human
aauuuugaguucuacauaag

SEQ ID NO: 1589290 - RNA, 15 nt, Human
aauuuuauaucuugu

SEQ ID NO: 1589291 - RNA, 16 nt, Human
acaacuauuuuuccaa

SEQ ID NO: 1589292 - RNA, 18 nt, Human
acaacuucccagugaauu

SEQ ID NO: 1589293 - RNA, 17 nt, Human
acaacuucaauauccaa

SEQ ID NO: 1589294 - RNA, 14 nt, Human
acaacuuuauaccc

SEQ ID NO: 1589295 - RNA, 13 nt, Human
acaacuuuauacc

SEQ ID NO: 1589296 - RNA, 19 nt, Human
acuuuauacccagaaaguu

SEQ ID NO: 1589297 - RNA, 23 nt, Human
agaaaauauuauguguuuccaua

SEQ ID NO: 1589298 - RNA, 12 nt, Human
acuguuuugaau

SEQ ID NO: 1589299 - RNA, 21 nt, Human
acucauaaaaagccugcaauu

SEQ ID NO: 1589300 - RNA, 16 nt, Human
aacuuuggaacaagau

SEQ ID NO: 1589301 - RNA, 14 nt, Human
aaauaguauuugag

SEQ ID NO: 1589302 - RNA, 18 nt, Human
aaguauguguaaaaugug

SEQ ID NO: 1589303 - RNA, 14 nt, Human
aauauuauguguuu

SEQ ID NO: 1589304 - RNA, 18 nt, Human
aaucucauaauuuauaca

SEQ ID NO: 1589305 - RNA, 21 nt, Human
aaugauaaguaaaugcuaggu

SEQ ID NO: 1589306 - RNA, 18 nt, Human
aaugauaaguaaaugcua

SEQ ID NO: 1589307 - RNA, 22 nt, Human
aauuaaauuuugaguucuacau

SEQ ID NO: 1589308 - RNA, 14 nt, Human
aauuaaauuuugag

SEQ ID NO: 1589309 - RNA, 16 nt, Human
caaaauugauguguuu

SEQ ID NO: 1589310 - RNA, 15 nt, Human
caaaauugauguguu

SEQ ID NO: 1589311 - RNA, 22 nt, Human
caaaauugauguguuuauuuau

SEQ ID NO: 1589312 - RNA, 19 nt, Human
caaagcugaugacaacuuc

SEQ ID NO: 1589313 - RNA, 15 nt, Human
caagaaaacaacuuc

SEQ ID NO: 1589314 - RNA, 18 nt, Human
caagaaaacaacuucaau

SEQ ID NO: 1589315 - RNA, 15 nt, Human
uuauaucuuguagcu

SEQ ID NO: 1589316 - RNA, 22 nt, Human
uuauaucuuguagcuuuaucaa

SEQ ID NO: 1589317 - RNA, 22 nt, Human
uuauacaggucauauuaauaua

SEQ ID NO: 1589318 - RNA, 14 nt, Human
uuauacaggucaua

SEQ ID NO: 1589319 - RNA, 21 nt, Human
uuccaaaaagauuuucagaaa

SEQ ID NO: 1589320 - RNA, 16 nt, Human
uuauuuuguucauaca

SEQ ID NO: 1589321 - RNA, 14 nt, Human
uuauuuuguucaua

SEQ ID NO: 1589322 - RNA, 16 nt, Human
uucaauaauaaauauu

SEQ ID NO: 1589323 - RNA, 18 nt, Human
uucugcuuguguuaagua

SEQ ID NO: 1589324 - RNA, 17 nt, Human
uucuuccaaaaagauuu

SEQ ID NO: 1589325 - RNA, 22 nt, Human
uucuacauaaguaauucaagaa

SEQ ID NO: 1589326 - RNA, 17 nt, Human
uuguaaauaguauuuga

SEQ ID NO: 1589327 - RNA, 23 nt, Human
uuguacgaagaguauuuuugaca

SEQ ID NO: 1589328 - RNA, 21 nt, Human
uuguacgaagaguauuuuuga

SEQ ID NO: 1589329 - RNA, 13 nt, Human
uuguguugugaau

SEQ ID NO: 1589330 - RNA, 22 nt, Human
uuuugacagaauauguuucaaa

SEQ ID NO: 1589331 - RNA, 23 nt, Human
uuuugacagaauauguuucaaac

SEQ ID NO: 1589332 - RNA, 12 nt, Human
uuugaguucuac

SEQ ID NO: 1589333 - RNA, 23 nt, Human
uuuucagaaaauauuauguguuu

SEQ ID NO: 1589334 - RNA, 20 nt, Human
ugcaauuucauaugcuguau

SEQ ID NO: 1589335 - RNA, 14 nt, Human
ugcaauuucauaug

SEQ ID NO: 1589336 - RNA, 21 nt, Human
ugauguauucuagcuaaugua

SEQ ID NO: 1589337 - RNA, 20 nt, Human
ugauguauucuagcuaaugu

SEQ ID NO: 1589338 - RNA, 14 nt, Human
ugauguauucuagc

SEQ ID NO: 1589339 - RNA, 13 nt, Human
ugauguauucuag

SEQ ID NO: 1589340 - RNA, 17 nt, Human
uggagacacaacuauuu

SEQ ID NO: 1589341 - RNA, 15 nt, Human
ugcuuguguuaagua

SEQ ID NO: 1589342 - RNA, 12 nt, Human
ugcuuguguuaa

SEQ ID NO: 1589343 - RNA, 15 nt, Human
uguagcuuuaucaaa

SEQ ID NO: 1589344 - RNA, 14 nt, Human
uguagcuuuaucaa

SEQ ID NO: 1589345 - RNA, 20 nt, Human
uguaaaaugugaagugaaug

SEQ ID NO: 1589346 - RNA, 22 nt, Human
uguaauaacugugaaguuuaca

SEQ ID NO: 1589347 - RNA, 14 nt, Human
uguaauaacuguga

SEQ ID NO: 1589348 - RNA, 19 nt, Human
ucuucaucugacuaugaca

SEQ ID NO: 1589349 - RNA, 14 nt, Human
uauucuaaauuuua

SEQ ID NO: 1589350 - RNA, 19 nt, Human
uauucuagcuaauguaaua

SEQ ID NO: 1589351 - RNA, 19 nt, Human
uauucuaaauuuuauaucu

SEQ ID NO: 1589352 - RNA, 15 nt, Human
uauucuaaauuuuau

SEQ ID NO: 1589353 - RNA, 20 nt, Human
uauucuaaauuuuauaucuu

SEQ ID NO: 1589354 - RNA, 12 nt, Human
uauuaauauauu

SEQ ID NO: 1589355 - RNA, 16 nt, Human
uauguuucaaacuuug

SEQ ID NO: 1589356 - RNA, 15 nt, Human
uauguuucaaacuuu

SEQ ID NO: 1589357 - RNA, 13 nt, Human
uauguuucaaacu

SEQ ID NO: 1589358 - RNA, 15 nt, Human
uccaaaauaauuuua

SEQ ID NO: 1589359 - RNA, 19 nt, Human
uccaaaauaauuuuaagaa

SEQ ID NO: 1589360 - RNA, 18 nt, Human
ucaucugacuaugacaua

SEQ ID NO: 1589361 - RNA, 17 nt, Human
ucaucugacuaugacau

SEQ ID NO: 1589362 - RNA, 12 nt, Human
gcuuguguuaag

SEQ ID NO: 1589363 - RNA, 18 nt, Human
gcuguguuaaauaaaccu

SEQ ID NO: 1589364 - RNA, 17 nt, Human
gaguauuuuugacagaa

SEQ ID NO: 1589365 - RNA, 16 nt, Human
gaguauuuuugacaga

SEQ ID NO: 1589366 - RNA, 14 nt, Human
gaguauuuuugaca

SEQ ID NO: 1589367 - RNA, 18 nt, Human
gaguauuuuugacagaau

SEQ ID NO: 1589368 - RNA, 21 nt, Human
gauaaucagugugucuaaauu

SEQ ID NO: 1589369 - RNA, 16 nt, Human
gaucuucaucugacua

SEQ ID NO: 1589370 - RNA, 23 nt, Human
gaucuucaucugacuaugacaua

SEQ ID NO: 1589371 - RNA, 13 nt, Human
gagcaaagcugau

SEQ ID NO: 1589372 - RNA, 18 nt, Human
gaaucucauaauuuauac

SEQ ID NO: 1589373 - RNA, 17 nt, Human
gaaguuuacauuguaaa

SEQ ID NO: 1589374 - RNA, 16 nt, Human
gaaguuuacauuguaa

SEQ ID NO: 1589375 - RNA, 14 nt, Human
gaaggaaaaugaua

SEQ ID NO: 1589376 - RNA, 17 nt, Human
gaaaauauuauguguuu

SEQ ID NO: 1589377 - RNA, 19 nt, Human
cuuguguuaaguaugugua

SEQ ID NO: 1589378 - RNA, 18 nt, Human
cugugaaaguacauuugg

SEQ ID NO: 1589379 - RNA, 15 nt, Human
ccuucugugaaagua

SEQ ID NO: 1589380 - RNA, 21 nt, Human
cgaagaguauuuuugacagaa

SEQ ID NO: 1589381 - RNA, 23 nt, Human
cgaagaguauuuuugacagaaua

SEQ ID NO: 1589382 - RNA, 19 nt, Human
ccugcaauuucauaugcug

SEQ ID NO: 1589383 - RNA, 19 nt, Human
cauuguacgaagaguauuu

SEQ ID NO: 1589384 - RNA, 20 nt, Human
cauuguacgaagaguauuuu

SEQ ID NO: 1589385 - RNA, 13 nt, Human
cauggcauauuuu

SEQ ID NO: 1589386 - RNA, 19 nt, Human
cauggcauauuuuucacau

SEQ ID NO: 1589387 - RNA, 15 nt, Human
cauggcauauuuuuc

SEQ ID NO: 1589388 - RNA, 23 nt, Human
cauggcauauuuuucacauaucu

SEQ ID NO: 1589389 - RNA, 21 nt, Human
cauuaaaaaaucaguuguaca

SEQ ID NO: 1589390 - RNA, 18 nt, Human
cauaucuaguaugaaauu

SEQ ID NO: 1589391 - RNA, 17 nt, Human
cauaucuaguaugaaau

SEQ ID NO: 1589392 - RNA, 15 nt, Human
cauaucuaguaugaa

SEQ ID NO: 1589393 - RNA, 21 nt, Human
cauaucuaguaugaaauuaua

SEQ ID NO: 1589394 - RNA, 17 nt, Human
caucugacuaugacaua

SEQ ID NO: 1589395 - RNA, 12 nt, Human
caggagaguaga

SEQ ID NO: 1589396 - RNA, 12 nt, Human
cagugaauucuu

SEQ ID NO: 1589397 - RNA, 21 nt, Human
caggucauauuaauauauuuc

SEQ ID NO: 1589398 - RNA, 20 nt, Human
caggucauauuaauauauuu

SEQ ID NO: 1589399 - RNA, 21 nt, Human
cagauggaaugcuguguuaaa

SEQ ID NO: 1589400 - RNA, 19 nt, Human
cagauggaaugcuguguua

SEQ ID NO: 1589401 - RNA, 17 nt, Human
cagauggaaugcugugu

SEQ ID NO: 1589402 - RNA, 16 nt, Human
cagauggaaugcugug

SEQ ID NO: 1589403 - RNA, 17 nt, Human
cagaaggaucuucaucu

SEQ ID NO: 1589404 - RNA, 19 nt, Human
cagaaaauauuauguguuu

SEQ ID NO: 1589405 - RNA, 14 nt, Human
cagauaaucagugu

SEQ ID NO: 1589406 - RNA, 22 nt, Human
cacugacagauuuccauccuag

SEQ ID NO: 1589407 - RNA, 17 nt, Human
cacugacagauuuccau

SEQ ID NO: 1589408 - RNA, 13 nt, Human
cacugacagauuu

SEQ ID NO: 1589409 - RNA, 11 nt, Human
aguucauacau

SEQ ID NO: 1589410 - RNA, 10 nt, Human
aguucauaca

SEQ ID NO: 1589411 - RNA, 15 nt, Human
aguucauacauugua

SEQ ID NO: 1589412 - RNA, 16 nt, Human
aguaugaaauuauaua

SEQ ID NO: 1589413 - RNA, 14 nt, Human
aguaugaaauuaua

SEQ ID NO: 1589414 - RNA, 14 nt, Human
auaaaaauauugug

SEQ ID NO: 1589415 - RNA, 22 nt, Human
auaaaaauauuguguugugaau

SEQ ID NO: 1589416 - RNA, 20 nt, Human
auaauuaaauuuugaguucu

SEQ ID NO: 1589417 - RNA, 13 nt, Human
auauuauguguuu

SEQ ID NO: 1589418 - RNA, 21 nt, Human
auaguauuugagaguucuaaa

SEQ ID NO: 1589419 - RNA, 20 nt, Human
auaguauuugagaguucuaa

SEQ ID NO: 1589420 - RNA, 23 nt, Human
auaguauuugagaguucuaaauu

SEQ ID NO: 1589421 - RNA, 21 nt, Human
augcauagguuuagcaguaua

SEQ ID NO: 1589422 - RNA, 13 nt, Human
auguuucaaacuu

SEQ ID NO: 1589423 - RNA, 12 nt, Human
auguuucaaacu

SEQ ID NO: 1589424 - RNA, 17 nt, Human
auguuucaaacuuugga

SEQ ID NO: 1589425 - RNA, 14 nt, Human
auguuucaaacuuu

SEQ ID NO: 1589426 - RNA, 19 nt, Human
auguauucuagcuaaugua

SEQ ID NO: 1589427 - RNA, 20 nt, Human
auguauucuagcuaauguaa

SEQ ID NO: 1589428 - RNA, 18 nt, Human
agcacugacagauuucca

SEQ ID NO: 1589429 - RNA, 14 nt, Human
agcacugacagauu

SEQ ID NO: 1589430 - RNA, 13 nt, Human
agcacugacagau

SEQ ID NO: 1589431 - RNA, 15 nt, Human
aaucaccaaaggcuc

SEQ ID NO: 1589432 - RNA, 17 nt, Human
aauauguuucaaacuuu

SEQ ID NO: 1589433 - RNA, 16 nt, Human
aauauguuucaaacuu

SEQ ID NO: 1589434 - RNA, 15 nt, Human
aauauguuucaaacu

SEQ ID NO: 1589435 - RNA, 13 nt, Human
aauauguuucaaa

SEQ ID NO: 1589436 - RNA, 19 nt, Human
aaugcuagguuaauuccaa

SEQ ID NO: 1589437 - RNA, 18 nt, Human
aaugcuagguuaauucca

SEQ ID NO: 1589438 - RNA, 21 nt, Human
aaugcuagguuaauuccaauu

SEQ ID NO: 1589439 - RNA, 20 nt, Human
aagcagauggaaugcugugu

SEQ ID NO: 1589440 - RNA, 19 nt, Human
aagcagauggaaugcugug

SEQ ID NO: 1589441 - RNA, 17 nt, Human
aagcagauggaaugcug

SEQ ID NO: 1589442 - RNA, 23 nt, Human
aacuuuauacccagaaaguuauu

SEQ ID NO: 1589443 - RNA, 22 nt, Human
aacuuuauacccagaaaguuau

SEQ ID NO: 1589444 - RNA, 21 nt, Human
aaaauugauguguuuauuuau

SEQ ID NO: 1589445 - RNA, 14 nt, Human
aaaauugauguguu

SEQ ID NO: 1589446 - RNA, 12 nt, Human
aaaauugaugug

SEQ ID NO: 1589447 - RNA, 24 nt, Human
aaacacucaguuguucaauaauaa

SEQ ID NO: 1589448 - RNA, 17 nt, Human
aaaaucaguuguacagu

SEQ ID NO: 1589449 - RNA, 11 nt, Human
agaaaguuauu

SEQ ID NO: 1589450 - RNA, 23 nt, Human
agaaaguuauugauaaguucaua

SEQ ID NO: 1589451 - RNA, 22 nt, Human
acuuuauacccagaaaguuauu

SEQ ID NO: 1589452 - RNA, 20 nt, Human
acuuuauacccagaaaguua

SEQ ID NO: 1589453 - RNA, 22 nt, Human
acugugaaguuuacauuguaaa

SEQ ID NO: 1589454 - RNA, 22 nt, Human
acuauucaggagaguagaacag

SEQ ID NO: 1589455 - RNA, 12 nt, Human
cucagaauauug

SEQ ID NO: 1589456 - RNA, 16 nt, Human
cagaaaguuauugaua

SEQ ID NO: 1589457 - RNA, 11 nt, Human
cagaaaguuau

SEQ ID NO: 1589458 - RNA, 22 nt, Human
cacuguuuugaaucucauaauu

SEQ ID NO: 1589459 - RNA, 15 nt, Human
caaaccaaauaaaaa

SEQ ID NO: 1589460 - RNA, 14 nt, Human
caaaccaaauaaaa

SEQ ID NO: 1589461 - RNA, 12 nt, Human
auuuuauaucuu

SEQ ID NO: 1589462 - RNA, 16 nt, Human
auuuuauaucuuguag

SEQ ID NO: 1589463 - RNA, 14 nt, Human
auuuuauaucuugu

SEQ ID NO: 1589464 - RNA, 18 nt, Human
caaagggugaaaauuauu

SEQ ID NO: 1589465 - RNA, 16 nt, Human
caagaugguucuagca

SEQ ID NO: 1589466 - RNA, 13 nt, Human
caagaugguucua

SEQ ID NO: 1589467 - RNA, 16 nt, Human
auuucauaugcuguau

SEQ ID NO: 1589468 - RNA, 17 nt, Human
auuguguugugaauguu

SEQ ID NO: 1589469 - RNA, 14 nt, Human
auuguguugugaau

SEQ ID NO: 1589470 - RNA, 20 nt, Human
cauaauuuauacaggucaua

SEQ ID NO: 1589471 - RNA, 13 nt, Human
cauaauuuauaca

SEQ ID NO: 1589472 - RNA, 19 nt, Human
cauuguaaauaguauuuga

SEQ ID NO: 1589473 - RNA, 21 nt, Human
cauuuggagacacaacuauuu

SEQ ID NO: 1589474 - RNA, 21 nt, Human
aaaagauuuucagaaaauauu

SEQ ID NO: 1589475 - RNA, 14 nt, Human
aaauauuauguguu

SEQ ID NO: 1589476 - RNA, 15 nt, Human
aaauauuauguguuu

SEQ ID NO: 1589477 - RNA, 15 nt, Human
guacauuuggagaca

SEQ ID NO: 1589478 - RNA, 14 nt, Human
guacuuaacuauuc

SEQ ID NO: 1589479 - RNA, 20 nt, Human
aaaguuauugauaaguucau

SEQ ID NO: 1589480 - RNA, 14 nt, Human
aaauaaaaauauug

SEQ ID NO: 1589481 - RNA, 22 nt, Human
guaauaacugugaaguuuacau

SEQ ID NO: 1589482 - RNA, 16 nt, Human
guaauaacugugaagu

SEQ ID NO: 1589483 - RNA, 15 nt, Human
guaauaacugugaag

SEQ ID NO: 1589484 - RNA, 22 nt, Human
aaagaccuuuggagcaaagcug

SEQ ID NO: 1589485 - RNA, 17 nt, Human
aaagggugaaaauuauu

SEQ ID NO: 1589486 - RNA, 22 nt, Human
ggugaaaauuauuuuguucaua

SEQ ID NO: 1589487 - RNA, 14 nt, Human
ggugaaaauuauuu

SEQ ID NO: 1589488 - RNA, 18 nt, Human
gcauggcauauuuuucac

SEQ ID NO: 1589489 - RNA, 22 nt, Human
gaaaauuauuuuguucauacau

SEQ ID NO: 1589490 - RNA, 21 nt, Human
gaaaauuauuuuguucauaca

SEQ ID NO: 1589491 - RNA, 20 nt, Human
gaaaauuauuuuguucauac

SEQ ID NO: 1589492 - RNA, 23 nt, Human
gaaaauuauuuuguucauacaua

SEQ ID NO: 1589493 - RNA, 16 nt, Human
auuguacgaagaguau

SEQ ID NO: 1589494 - RNA, 17 nt, Human
auuguacgaagaguauu

SEQ ID NO: 1589495 - RNA, 14 nt, Human
auugcuuuggucau

SEQ ID NO: 1589496 - RNA, 18 nt, Human
auugcuuuggucauauga

SEQ ID NO: 1589497 - RNA, 18 nt, Human
auuuuguucauacauauu

SEQ ID NO: 1589498 - RNA, 16 nt, Human
auuuuguucauacaua

SEQ ID NO: 1589499 - RNA, 15 nt, Human
auuuuguucauacau

SEQ ID NO: 1589500 - RNA, 14 nt, Human
auuuuguucauaca

SEQ ID NO: 1589501 - RNA, 12 nt, Human
auuuuguucaua

SEQ ID NO: 1589502 - RNA, 21 nt, Human
auuuuucacauaucuaguaug

SEQ ID NO: 1589503 - RNA, 18 nt, Human
auuuuucacauaucuagu

SEQ ID NO: 1589504 - RNA, 15 nt, Human
auuuuucacauaucu

SEQ ID NO: 1589505 - RNA, 15 nt, Human
auuuuuccaaaauaa

SEQ ID NO: 1589506 - RNA, 15 nt, Human
auuuuugacagaaua

SEQ ID NO: 1589507 - RNA, 14 nt, Human
auuuuugacagaau

SEQ ID NO: 1589508 - RNA, 13 nt, Human
auuuuugacagaa

SEQ ID NO: 1589509 - RNA, 12 nt, Human
auuuuugacaga

SEQ ID NO: 1589510 - RNA, 22 nt, Human
auuuuugacagaauauguuuca

SEQ ID NO: 1589511 - RNA, 20 nt, Human
auuuuuguagcacugacaga

SEQ ID NO: 1589512 - RNA, 21 nt, Human
auuuuuguagcacugacagau

SEQ ID NO: 1589513 - RNA, 18 nt, Human
auucuagcuaauguaaua

SEQ ID NO: 1589514 - RNA, 15 nt, Human
auucuagcuaaugua

SEQ ID NO: 1589515 - RNA, 16 nt, Human
auuauuuuguucauac

SEQ ID NO: 1589516 - RNA, 15 nt, Human
auuauuuuguucaua

SEQ ID NO: 1589517 - RNA, 21 nt, Human
auuauuuuguucauacauauu

SEQ ID NO: 1589518 - RNA, 19 nt, Human
auuauuuuguucauacaua

SEQ ID NO: 1589519 - RNA, 18 nt, Human
auuauuuuguucauacau

SEQ ID NO: 1589520 - RNA, 17 nt, Human
auuauuuuguucauaca

SEQ ID NO: 1589521 - RNA, 24 nt, Human
auucagaaggaucuucaucugacu

SEQ ID NO: 1589522 - RNA, 18 nt, Human
auucagaaggaucuucau

SEQ ID NO: 1589523 - RNA, 22 nt, Human
uuugacagaauauguuucaaac

SEQ ID NO: 1589524 - RNA, 17 nt, Human
augauaaguaaaugcua

SEQ ID NO: 1589525 - RNA, 23 nt, Human
auggcauauuuuucacauaucua

SEQ ID NO: 1589526 - RNA, 22 nt, Human
auggcauauuuuucacauaucu

SEQ ID NO: 1589527 - RNA, 21 nt, Human
auggcauauuuuucacauauc

SEQ ID NO: 1589528 - RNA, 20 nt, Human
auggcauauuuuucacauau

SEQ ID NO: 1589529 - RNA, 18 nt, Human
auggcauauuuuucacau

SEQ ID NO: 1589530 - RNA, 14 nt, Human
uuucaaacuuugga

SEQ ID NO: 1589531 - RNA, 18 nt, Human
augcuagguuaauuccaa

SEQ ID NO: 1589532 - RNA, 21 nt, Human
uuuaucaaagggugaaaauua

SEQ ID NO: 1589533 - RNA, 17 nt, Human
auauuuuucacauaucu

SEQ ID NO: 1589534 - RNA, 15 nt, Human
auauuuuucacauau

SEQ ID NO: 1589535 - RNA, 14 nt, Human
auauuuuucacaua

SEQ ID NO: 1589536 - RNA, 13 nt, Human
auauuuuucacau

SEQ ID NO: 1589537 - RNA, 12 nt, Human
auauuuuucaca

SEQ ID NO: 1589538 - RNA, 19 nt, Human
uucuaacaaaaaaauauau

SEQ ID NO: 1589539 - RNA, 14 nt, Human
uucuaaauuuuaua

SEQ ID NO: 1589540 - RNA, 21 nt, Human
uucuagcauggcauauuuuuc

SEQ ID NO: 1589541 - RNA, 20 nt, Human
uucuagcauggcauauuuuu

SEQ ID NO: 1589542 - RNA, 18 nt, Human
uucuagcauggcauauuu

SEQ ID NO: 1589543 - RNA, 15 nt, Human
uucuagcauggcaua

SEQ ID NO: 1589544 - RNA, 14 nt, Human
uucuagcauggcau

SEQ ID NO: 1589545 - RNA, 22 nt, Human
uucuagcauggcauauuuuuca

SEQ ID NO: 1589546 - RNA, 17 nt, Human
uucuagcuaauguaaua

SEQ ID NO: 1589547 - RNA, 17 nt, Human
uugacagaauauguuuc

SEQ ID NO: 1589548 - RNA, 20 nt, Human
uugacagaauauguuucaaa

SEQ ID NO: 1589549 - RNA, 20 nt, Human
uuggagacacaacuauuuuu

SEQ ID NO: 1589550 - RNA, 21 nt, Human
augaaauuauauaaguauucu

SEQ ID NO: 1589551 - RNA, 19 nt, Human
augaaauuauauaaguauu

SEQ ID NO: 1589552 - RNA, 20 nt, Human
aucuuguagcuuuaucaaag

SEQ ID NO: 1589553 - RNA, 19 nt, Human
aucuuguagcuuuaucaaa

SEQ ID NO: 1589554 - RNA, 18 nt, Human
aucuuguagcuuuaucaa

SEQ ID NO: 1589555 - RNA, 17 nt, Human
auaauucagaaggaucu

SEQ ID NO: 1589556 - RNA, 21 nt, Human
auaauuuauacaggucauauu

SEQ ID NO: 1589557 - RNA, 19 nt, Human
auaauuuauacaggucaua

SEQ ID NO: 1589558 - RNA, 14 nt, Human
auaauuuuaagaaa

SEQ ID NO: 1589559 - RNA, 17 nt, Human
aguuuacauuguaaaua

SEQ ID NO: 1589560 - RNA, 15 nt, Human
aguuuacauuguaaa

SEQ ID NO: 1589561 - RNA, 20 nt, Human
uuaaauuuugaguucuacau

SEQ ID NO: 1589562 - RNA, 15 nt, Human
uuaaauuuugaguuc

SEQ ID NO: 1589563 - RNA, 23 nt, Human
auacgcaacauaauuaaauuuug

SEQ ID NO: 1589564 - RNA, 22 nt, Human
auagagcaaaauugauguguuu

SEQ ID NO: 1589565 - RNA, 21 nt, Human
auagagcaaaauugauguguu

SEQ ID NO: 1589566 - RNA, 17 nt, Human
auagagcaaaauugaug

SEQ ID NO: 1589567 - RNA, 15 nt, Human
auagagcaaaauuga

SEQ ID NO: 1589568 - RNA, 21 nt, Human
auagaguguacuuaacuauuc

SEQ ID NO: 1589569 - RNA, 19 nt, Human
auagaguguacuuaacuau

SEQ ID NO: 1589570 - RNA, 14 nt, Human
auagaguguacuua

SEQ ID NO: 1589571 - RNA, 22 nt, Human
ugugucuaaauuugaauguuaa

SEQ ID NO: 1589572 - RNA, 19 nt, Human
ugugucuaaauuugaaugu

SEQ ID NO: 1589573 - RNA, 14 nt, Human
uguguaaaauguga

SEQ ID NO: 1589574 - RNA, 23 nt, Human
uguuaagcagauggaaugcugug

SEQ ID NO: 1589575 - RNA, 19 nt, Human
aguacauuuggagacacaa

SEQ ID NO: 1589576 - RNA, 19 nt, Human
aguaauucaagaaaacaac

SEQ ID NO: 1589577 - RNA, 13 nt, Human
aguaauagagcaa

SEQ ID NO: 1589578 - RNA, 18 nt, Human
uguauauccuuucuaaca

SEQ ID NO: 1589579 - RNA, 21 nt, Human
agccugcaauuucauaugcug

SEQ ID NO: 1589580 - RNA, 19 nt, Human
agccugcaauuucauaugc

SEQ ID NO: 1589581 - RNA, 19 nt, Human
agauaaucagugugucuaa

SEQ ID NO: 1589582 - RNA, 12 nt, Human
agauuuucagaa

SEQ ID NO: 1589583 - RNA, 17 nt, Human
agauuuucagaaaauau

SEQ ID NO: 1589584 - RNA, 21 nt, Human
agcagauggaaugcuguguua

SEQ ID NO: 1589585 - RNA, 19 nt, Human
ucauauuaauauauuucca

SEQ ID NO: 1589586 - RNA, 22 nt, Human
uccuuucuaacaaaaaaauaua

SEQ ID NO: 1589587 - RNA, 15 nt, Human
ucccagugaauucuu

SEQ ID NO: 1589588 - RNA, 22 nt, Human
acuaugacauaaaaacaacuuu

SEQ ID NO: 1589589 - RNA, 21 nt, Human
uaugagcuuccuucugugaaa

SEQ ID NO: 1589590 - RNA, 18 nt, Human
uaugagcuuccuucugug

SEQ ID NO: 1589591 - RNA, 17 nt, Human
uaucuaguaugaaauua

SEQ ID NO: 1589592 - RNA, 16 nt, Human
uaucuaguaugaaauu

SEQ ID NO: 1589593 - RNA, 14 nt, Human
uaucuaguaugaaa

SEQ ID NO: 1589594 - RNA, 17 nt, Human
uauauccuuucuaacaa

SEQ ID NO: 1589595 - RNA, 16 nt, Human
uauauccuuucuaaca

SEQ ID NO: 1589596 - RNA, 19 nt, Human
uauuuaaugauaaguaaau

SEQ ID NO: 1589597 - RNA, 16 nt, Human
uauucaggagaguaga

SEQ ID NO: 1589598 - RNA, 21 nt, Human
aauucuugaaggaaaaugaua

SEQ ID NO: 1589599 - RNA, 16 nt, Human
aauucuugaaggaaaa

SEQ ID NO: 1589600 - RNA, 15 nt, Human
aauucuugaaggaaa

SEQ ID NO: 1589601 - RNA, 20 nt, Human
acaaaaaaauauauuuaaug

SEQ ID NO: 1589602 - RNA, 17 nt, Human
acaaaaaaauauauuua

SEQ ID NO: 1589603 - RNA, 13 nt, Human
acaaaaaaauaua

SEQ ID NO: 1589604 - RNA, 18 nt, Human
uaaucagugugucuaaau

SEQ ID NO: 1589605 - RNA, 17 nt, Human
uaaucagugugucuaaa

SEQ ID NO: 1589606 - RNA, 23 nt, Human
uaaucagugugucuaaauuugaa

SEQ ID NO: 1589607 - RNA, 17 nt, Human
uaauguaauaacuguga

SEQ ID NO: 1589608 - RNA, 18 nt, Human
uaauguaauaacugugaa

SEQ ID NO: 1589609 - RNA, 19 nt, Human
uacauaaguaauucaagaa

SEQ ID NO: 1589610 - RNA, 17 nt, Human
uacauaaguaauucaag

SEQ ID NO: 1589611 - RNA, 16 nt, Human
uacauaaguaauucaa

SEQ ID NO: 1589612 - RNA, 22 nt, Human
uacauuguacgaagaguauuuu

SEQ ID NO: 1589613 - RNA, 20 nt, Human
uacauuguacgaagaguauu

SEQ ID NO: 1589614 - RNA, 23 nt, Human
uacauuguacgaagaguauuuuu

SEQ ID NO: 1589615 - RNA, 14 nt, Human
aaggaucuucaucu

SEQ ID NO: 1589616 - RNA, 14 nt, Human
aaggaaaaugauac

SEQ ID NO: 1589617 - RNA, 13 nt, Human
guguuuauuuaua

SEQ ID NO: 1589618 - RNA, 13 nt, Human
aaguauucuaaau

SEQ ID NO: 1589619 - RNA, 15 nt, Human
aaguauucuaaauuu

SEQ ID NO: 1589620 - RNA, 12 nt, Human
aaguaaaugcua

SEQ ID NO: 1589621 - RNA, 20 nt, Human
aaguuauugauaaguucaua

SEQ ID NO: 1589622 - RNA, 19 nt, Human
aaguuauugauaaguucau

SEQ ID NO: 1589623 - RNA, 19 nt, Human
aaguuuacauuguaaauag

SEQ ID NO: 1589624 - RNA, 18 nt, Human
aaguuuacauuguaaaua

SEQ ID NO: 1589625 - RNA, 13 nt, Human
aaguucauacauu

SEQ ID NO: 1589626 - RNA, 12 nt, Human
aaguucauacau

SEQ ID NO: 1589627 - RNA, 15 nt, Human
aaguucauacauugu

SEQ ID NO: 1589628 - RNA, 23 nt, Human
aaguuauugauaaguucauacau

SEQ ID NO: 1589629 - RNA, 22 nt, Human
aaguuauugauaaguucauaca

SEQ ID NO: 1589630 - RNA, 19 nt, Human
uaaaccucaaaaugucuaa

SEQ ID NO: 1589631 - RNA, 18 nt, Human
uaaaccucaaaaugucua

SEQ ID NO: 1589632 - RNA, 23 nt, Human
uaacaaaaaaauauauuuaauga

SEQ ID NO: 1589633 - RNA, 20 nt, Human
uaacaaaaaaauauauuuaa

SEQ ID NO: 1589634 - RNA, 16 nt, Human
uaaauuuugaguucua

SEQ ID NO: 1589635 - RNA, 14 nt, Human
uaaauuuuauaucu

SEQ ID NO: 1589636 - RNA, 18 nt, Human
uaaauaguauuugagagu

SEQ ID NO: 1589637 - RNA, 22 nt, Human
aauaaaaauauuguguugugaa

SEQ ID NO: 1589638 - RNA, 12 nt, Human
aacauaauuaaa

SEQ ID NO: 1589639 - RNA, 16 nt, Human
gugaagugaaugaaac

SEQ ID NO: 1589640 - RNA, 15 nt, Human
caaauaaaaauauug

SEQ ID NO: 1589641 - RNA, 23 nt, Human
caaaaaaauauauuuaaugauaa

SEQ ID NO: 1589642 - RNA, 12 nt, Human
caacuuuauacc

SEQ ID NO: 1589643 - RNA, 19 nt, Human
cacaacuauuuuuccaaaa

SEQ ID NO: 1589644 - RNA, 14 nt, Human
cacaacuauuuuuc

SEQ ID NO: 1589645 - RNA, 23 nt, Human
cacauaucuaguaugaaauuaua

SEQ ID NO: 1589646 - RNA, 17 nt, Human
uugaauguuaagcagau

SEQ ID NO: 1589647 - RNA, 14 nt, Human
uugaauguuaagca

SEQ ID NO: 1589648 - RNA, 19 nt, Human
uuguacgaagaguauuuuu

SEQ ID NO: 1589649 - RNA, 16 nt, Human
uuguacgaagaguauu

SEQ ID NO: 1589650 - RNA, 18 nt, Human
uuguagcacugacagauu

SEQ ID NO: 1589651 - RNA, 17 nt, Human
uuguagcacugacagau

SEQ ID NO: 1589652 - RNA, 16 nt, Human
uuguagcacugacaga

SEQ ID NO: 1589653 - RNA, 14 nt, Human
uuguagcacugaca

SEQ ID NO: 1589654 - RNA, 22 nt, Human
uuguagcacugacagauuucca

SEQ ID NO: 1589655 - RNA, 19 nt, Human
uuguucaauaauaaauauu

SEQ ID NO: 1589656 - RNA, 15 nt, Human
uuuauacaggucaua

SEQ ID NO: 1589657 - RNA, 21 nt, Human
uuucuaacaaaaaaauauauu

SEQ ID NO: 1589658 - RNA, 21 nt, Human
uuucacauaucuaguaugaaa

SEQ ID NO: 1589659 - RNA, 15 nt, Human
uuucacauaucuagu

SEQ ID NO: 1589660 - RNA, 13 nt, Human
uuugaguucuaca

SEQ ID NO: 1589661 - RNA, 16 nt, Human
uuugagaguucuaaau

SEQ ID NO: 1589662 - RNA, 20 nt, Human
uuauugauaaguucauacau

SEQ ID NO: 1589663 - RNA, 19 nt, Human
uuauugauaaguucauaca

SEQ ID NO: 1589664 - RNA, 15 nt, Human
uuauugauaaguuca

SEQ ID NO: 1589665 - RNA, 12 nt, Human
uuccaaaauaau

SEQ ID NO: 1589666 - RNA, 19 nt, Human
uucaugcauagguuuagca

SEQ ID NO: 1589667 - RNA, 21 nt, Human
uuccaaaauaauuuuaagaaa

SEQ ID NO: 1589668 - RNA, 13 nt, Human
uuccaaaauaauu

SEQ ID NO: 1589669 - RNA, 21 nt, Human
uuaaugauaaguaaaugcuag

SEQ ID NO: 1589670 - RNA, 14 nt, Human
uuaauauauuucca

SEQ ID NO: 1589671 - RNA, 13 nt, Human
uuaauauauuucc

SEQ ID NO: 1589672 - RNA, 21 nt, Human
uuaagcagauggaaugcugug

SEQ ID NO: 1589673 - RNA, 16 nt, Human
ugcauagguuuagcag

SEQ ID NO: 1589674 - RNA, 18 nt, Human
ugcuguguuaaauaaacc

SEQ ID NO: 1589675 - RNA, 11 nt, Human
ugcuguguuaa

SEQ ID NO: 1589676 - RNA, 18 nt, Human
ugauguguuuauuuauag

SEQ ID NO: 1589677 - RNA, 14 nt, Human
ugauguguuuauuu

SEQ ID NO: 1589678 - RNA, 23 nt, Human
ugagacguuuuuggaagaguagu

SEQ ID NO: 1589679 - RNA, 16 nt, Human
ugacagaauauguuuc

SEQ ID NO: 1589680 - RNA, 18 nt, Human
ugacagaauauguuucaa

SEQ ID NO: 1589681 - RNA, 16 nt, Human
uccaaaccaaauaaaa

SEQ ID NO: 1589682 - RNA, 22 nt, Human
uccaaaaagauuuucagaaaau

SEQ ID NO: 1589683 - RNA, 12 nt, Human
uauuauguguuu

SEQ ID NO: 1589684 - RNA, 14 nt, Human
uauuguguugugaa

SEQ ID NO: 1589685 - RNA, 23 nt, Human
uauugauaaguucauacauugua

SEQ ID NO: 1589686 - RNA, 16 nt, Human
uauugauaaguucaua

SEQ ID NO: 1589687 - RNA, 14 nt, Human
uauugauaaguuca

SEQ ID NO: 1589688 - RNA, 15 nt, Human
ucaaagagagaaaau

SEQ ID NO: 1589689 - RNA, 20 nt, Human
ucaaagagagaaaauaaaga

SEQ ID NO: 1589690 - RNA, 13 nt, Human
uaguaugaaauua

SEQ ID NO: 1589691 - RNA, 23 nt, Human
uaguaugaaauuauauaaguauu

SEQ ID NO: 1589692 - RNA, 15 nt, Human
uaguaugaaauuaua

SEQ ID NO: 1589693 - RNA, 17 nt, Human
uauccuuucuaacaaaa

SEQ ID NO: 1589694 - RNA, 22 nt, Human
uaugacauaaaaacaacuuuau

SEQ ID NO: 1589695 - RNA, 19 nt, Human
uaugacauaaaaacaacuu

SEQ ID NO: 1589696 - RNA, 23 nt, Human
uaugacauaaaaacaacuuuaua

SEQ ID NO: 1589697 - RNA, 15 nt, Human
gugaaaauuauuuug

SEQ ID NO: 1589698 - RNA, 12 nt, Human
gugaaaauuauu

SEQ ID NO: 1589699 - RNA, 17 nt, Human
gugaaaguacauuugga

SEQ ID NO: 1589700 - RNA, 21 nt, Human
guauuugagaguucuaaauuu

SEQ ID NO: 1589701 - RNA, 19 nt, Human
guauuugagaguucuaaau

SEQ ID NO: 1589702 - RNA, 17 nt, Human
guaaauaguauuugaga

SEQ ID NO: 1589703 - RNA, 16 nt, Human
guaaauaguauuugag

SEQ ID NO: 1589704 - RNA, 15 nt, Human
guaaauaguauuuga

SEQ ID NO: 1589705 - RNA, 14 nt, Human
guaauucaagaaaa

SEQ ID NO: 1589706 - RNA, 13 nt, Human
guaauucaagaaa

SEQ ID NO: 1589707 - RNA, 15 nt, Human
guacgaagaguauuu

SEQ ID NO: 1589708 - RNA, 14 nt, Human
gcuuuaucaaaggg

SEQ ID NO: 1589709 - RNA, 14 nt, Human
ggaaugcuguguua

SEQ ID NO: 1589710 - RNA, 18 nt, Human
gaguguacuuaacuauuc

SEQ ID NO: 1589711 - RNA, 14 nt, Human
gcaauuucauaugc

SEQ ID NO: 1589712 - RNA, 21 nt, Human
gcaaagcugaugacaacuucc

SEQ ID NO: 1589713 - RNA, 13 nt, Human
gacacaacuauuu

SEQ ID NO: 1589714 - RNA, 14 nt, Human
gaaugcuguguuaa

SEQ ID NO: 1589715 - RNA, 13 nt, Human
gaaugcuguguua

SEQ ID NO: 1589716 - RNA, 19 nt, Human
gaaucucauaauuuauaca

SEQ ID NO: 1589717 - RNA, 14 nt, Human
gaauguuaagcaga

SEQ ID NO: 1589718 - RNA, 15 nt, Human
gaauguuaagcagau

SEQ ID NO: 1589719 - RNA, 23 nt, Human
gaauucuugaaggaaaaugauac

SEQ ID NO: 1589720 - RNA, 18 nt, Human
gaauucuugaaggaaaau

SEQ ID NO: 1589721 - RNA, 15 nt, Human
gagaguagaacagau

SEQ ID NO: 1589722 - RNA, 14 nt, Human
cuucugugaaagua

SEQ ID NO: 1589723 - RNA, 13 nt, Human
cuucccuuucugc

SEQ ID NO: 1589724 - RNA, 16 nt, Human
cuuucugcuuguguua

SEQ ID NO: 1589725 - RNA, 22 nt, Human
cuuuaucaaagggugaaaauua

SEQ ID NO: 1589726 - RNA, 21 nt, Human
cuuuaucaaagggugaaaauu

SEQ ID NO: 1589727 - RNA, 20 nt, Human
gaaaaugauacgcaacauaa

SEQ ID NO: 1589728 - RNA, 21 nt, Human
gaaaauauuauguguuuccau

SEQ ID NO: 1589729 - RNA, 21 nt, Human
cucauaaaaagccugcaauuu

SEQ ID NO: 1589730 - RNA, 12 nt, Human
cucaaauuugga

SEQ ID NO: 1589731 - RNA, 21 nt, Human
cuauucaggagaguagaacag

SEQ ID NO: 1589732 - RNA, 22 nt, Human
cuagcuaauguaauaacuguga

SEQ ID NO: 1589733 - RNA, 13 nt, Human
cuaaauuuuauau

SEQ ID NO: 1589734 - RNA, 16 nt, Human
cuaaauuuuauaucuu

SEQ ID NO: 1589735 - RNA, 15 nt, Human
cuaaauuuuauaucu

SEQ ID NO: 1589736 - RNA, 20 nt, Human
cuaaauuuuauaucuuguag

SEQ ID NO: 1589737 - RNA, 16 nt, Human
cuaagauaguaacaau

SEQ ID NO: 1589738 - RNA, 23 nt, Human
ccagugaauucuugaaggaaaau

SEQ ID NO: 1589739 - RNA, 21 nt, Human
cuggaugccaccucugcaggg

SEQ ID NO: 1589740 - RNA, 19 nt, Human
cuguuauaaucuuucacag

SEQ ID NO: 1589741 - RNA, 13 nt, Human
cuguuauaaucuu

SEQ ID NO: 1589742 - RNA, 12 nt, Human
cuguucacagcc

SEQ ID NO: 1589743 - RNA, 23 nt, Human
gaaaauuauuuuguucauacaua

SEQ ID NO: 1589744 - RNA, 20 nt, Human
gaaaauuauuuuguucauac

SEQ ID NO: 1589745 - RNA, 21 nt, Human
gaaaauuauuuuguucauaca

SEQ ID NO: 1589746 - RNA, 22 nt, Human
gaaaauuauuuuguucauacau

SEQ ID NO: 1589747 - RNA, 17 nt, Human
gaaaagacuccaaagaa

SEQ ID NO: 1589748 - RNA, 16 nt, Human
gaaaagacuccaaaga

SEQ ID NO: 1589749 - RNA, 18 nt, Human
gaaaagacuccaaagaaa

SEQ ID NO: 1589750 - RNA, 14 nt, Human
gaaaagacuccaaa

SEQ ID NO: 1589751 - RNA, 21 nt, Human
gaaaacuuuaugcuaagugaa

SEQ ID NO: 1589752 - RNA, 17 nt, Human
gaaaugaaagcagggac

SEQ ID NO: 1589753 - RNA, 18 nt, Human
gaaagaaaaucaggcugg

SEQ ID NO: 1589754 - RNA, 19 nt, Human
gaacccgggaggcagaggu

SEQ ID NO: 1589755 - RNA, 17 nt, Human
gaacccgggaggcagag

SEQ ID NO: 1589756 - RNA, 13 nt, Human
gaacugaaaucau

SEQ ID NO: 1589757 - RNA, 17 nt, Human
gaacccaaguccaagca

SEQ ID NO: 1589758 - RNA, 16 nt, Human
gaacccaaguccaagc

SEQ ID NO: 1589759 - RNA, 16 nt, Human
cuuggucugugagaug

SEQ ID NO: 1589760 - RNA, 19 nt, Human
cuuggucugugagaugcua

SEQ ID NO: 1589761 - RNA, 21 nt, Human
cuucuaaguaaaaccacagca

SEQ ID NO: 1589762 - RNA, 17 nt, Human
cuucuaaguaaaaccac

SEQ ID NO: 1589763 - RNA, 13 nt, Human
cuucuaaguaaaa

SEQ ID NO: 1589764 - RNA, 13 nt, Human
cuucucacauuua

SEQ ID NO: 1589765 - RNA, 20 nt, Human
cuucucacauuuauauuuuu

SEQ ID NO: 1589766 - RNA, 18 nt, Human
gcauggcauauuuuucac

SEQ ID NO: 1589767 - RNA, 16 nt, Human
gcauuguaaaugugcu

SEQ ID NO: 1589768 - RNA, 15 nt, Human
gcagcuuauucacaa

SEQ ID NO: 1589769 - RNA, 17 nt, Human
gauguagaggagaaacu

SEQ ID NO: 1589770 - RNA, 16 nt, Human
gcaauaaaauggguuu

SEQ ID NO: 1589771 - RNA, 18 nt, Human
gcaauagucaaauugugu

SEQ ID NO: 1589772 - RNA, 17 nt, Human
gagcuguucacagccag

SEQ ID NO: 1589773 - RNA, 15 nt, Human
gagcgacagugagac

SEQ ID NO: 1589774 - RNA, 20 nt, Human
gacaguauggcagcuuuccu

SEQ ID NO: 1589775 - RNA, 14 nt, Human
gacagaaagcagaa

SEQ ID NO: 1589776 - RNA, 20 nt, Human
gacagaaagcagaacaguga

SEQ ID NO: 1589777 - RNA, 21 nt, Human
gacagcccuucuuuccacaga

SEQ ID NO: 1589778 - RNA, 16 nt, Human
gacuauucaaacaguc

SEQ ID NO: 1589779 - RNA, 15 nt, Human
gacuauucaaacagu

SEQ ID NO: 1589780 - RNA, 22 nt, Human
gacuauucaaacagucucagga

SEQ ID NO: 1589781 - RNA, 14 nt, Human
ggugaaaauuauuu

SEQ ID NO: 1589782 - RNA, 22 nt, Human
ggugaaaauuauuuuguucaua

SEQ ID NO: 1589783 - RNA, 13 nt, Human
ggugaaaauuauu

SEQ ID NO: 1589784 - RNA, 17 nt, Human
aaagggugaaaauuauu

SEQ ID NO: 1589785 - RNA, 14 nt, Human
aaagguacuucaaa

SEQ ID NO: 1589786 - RNA, 20 nt, Human
aaagggauggcaagaugugg

SEQ ID NO: 1589787 - RNA, 21 nt, Human
aaagcacugacuucuaaguaa

SEQ ID NO: 1589788 - RNA, 17 nt, Human
aaagcacugacuucuaa

SEQ ID NO: 1589789 - RNA, 22 nt, Human
aaagaccuuuggagcaaagcug

SEQ ID NO: 1589790 - RNA, 19 nt, Human
aaagacuauucaaacaguc

SEQ ID NO: 1589791 - RNA, 18 nt, Human
aaagacuauucaaacagu

SEQ ID NO: 1589792 - RNA, 21 nt, Human
aaagacuccaaagaaauguaa

SEQ ID NO: 1589793 - RNA, 15 nt, Human
aaagacuccaaagaa

SEQ ID NO: 1589794 - RNA, 21 nt, Human
aaagacuauucaaacagucuc

SEQ ID NO: 1589795 - RNA, 13 nt, Human
aaagacagugaaa

SEQ ID NO: 1589796 - RNA, 23 nt, Human
aaacuucagcgguuuauauaagc

SEQ ID NO: 1589797 - RNA, 15 nt, Human
aaagaggcagcuuga

SEQ ID NO: 1589798 - RNA, 15 nt, Human
aaagaggaaugaagu

SEQ ID NO: 1589799 - RNA, 15 nt, Human
aaacagucucaggaa

SEQ ID NO: 1589800 - RNA, 14 nt, Human
aaacaguagugaua

SEQ ID NO: 1589801 - RNA, 20 nt, Human
aaacagucucaggaaaucaa

SEQ ID NO: 1589802 - RNA, 19 nt, Human
ggggaauugaggacacuga

SEQ ID NO: 1589803 - RNA, 14 nt, Human
aaacacagcaaggg

SEQ ID NO: 1589804 - RNA, 12 nt, Human
aaacacagcaag

SEQ ID NO: 1589805 - RNA, 11 nt, Human
aaacacagcaa

SEQ ID NO: 1589806 - RNA, 15 nt, Human
aaacucguuaauuug

SEQ ID NO: 1589807 - RNA, 12 nt, Human
aaaccacagcag

SEQ ID NO: 1589808 - RNA, 15 nt, Human
aaaccacagcaguug

SEQ ID NO: 1589809 - RNA, 15 nt, Human
guaauaacugugaag

SEQ ID NO: 1589810 - RNA, 16 nt, Human
guaauaacugugaagu

SEQ ID NO: 1589811 - RNA, 22 nt, Human
guaauaacugugaaguuuacau

SEQ ID NO: 1589812 - RNA, 20 nt, Human
guaauaggcguaacuaauuu

SEQ ID NO: 1589813 - RNA, 21 nt, Human
aaauaauuuuuauauuugaaa

SEQ ID NO: 1589814 - RNA, 23 nt, Human
guacacugccuucucaacuccaa

SEQ ID NO: 1589815 - RNA, 15 nt, Human
aaauacacacucaaa

SEQ ID NO: 1589816 - RNA, 23 nt, Human
aaauaauuuuuauauuugaaaua

SEQ ID NO: 1589817 - RNA, 22 nt, Human
aaauaauuuuuauauuugaaau

SEQ ID NO: 1589818 - RNA, 19 nt, Human
aaauacacacucaaaucaa

SEQ ID NO: 1589819 - RNA, 14 nt, Human
aaauaaaaauauug

SEQ ID NO: 1589820 - RNA, 20 nt, Human
aaaguuauugauaaguucau

SEQ ID NO: 1589821 - RNA, 23 nt, Human
aaaguucugcagauaaacaguag

SEQ ID NO: 1589822 - RNA, 20 nt, Human
aaagguauuuuaaucaccaa

SEQ ID NO: 1589823 - RNA, 18 nt, Human
aaaguauguuagugcaaa

SEQ ID NO: 1589824 - RNA, 14 nt, Human
guacuuaacuauuc

SEQ ID NO: 1589825 - RNA, 15 nt, Human
guacuucaugcuguc

SEQ ID NO: 1589826 - RNA, 22 nt, Human
guacuucaaauccuugaagauu

SEQ ID NO: 1589827 - RNA, 21 nt, Human
guacuucaaauccuugaagau

SEQ ID NO: 1589828 - RNA, 15 nt, Human
guacauuuggagaca

SEQ ID NO: 1589829 - RNA, 18 nt, Human
aaauccauacauuugugu

SEQ ID NO: 1589830 - RNA, 15 nt, Human
aaauccauacauuug

SEQ ID NO: 1589831 - RNA, 15 nt, Human
aaauauuauguguuu

SEQ ID NO: 1589832 - RNA, 14 nt, Human
aaauauuauguguu

SEQ ID NO: 1589833 - RNA, 17 nt, Human
aaauauuauguuaaaac

SEQ ID NO: 1589834 - RNA, 12 nt, Human
aaaucauuucug

SEQ ID NO: 1589835 - RNA, 23 nt, Human
aaaucauuucugcaucagcugcu

SEQ ID NO: 1589836 - RNA, 22 nt, Human
aaaucauuucugcaucagcugc

SEQ ID NO: 1589837 - RNA, 21 nt, Human
aaaucauuucugcaucagcug

SEQ ID NO: 1589838 - RNA, 19 nt, Human
aaaucauuucugcaucagc

SEQ ID NO: 1589839 - RNA, 21 nt, Human
aaaagauuuucagaaaauauu

SEQ ID NO: 1589840 - RNA, 15 nt, Human
aaaacuucagacaua

SEQ ID NO: 1589841 - RNA, 17 nt, Human
aaaaaugguuuaaaugg

SEQ ID NO: 1589842 - RNA, 19 nt, Human
gggacauuugcucauggaa

SEQ ID NO: 1589843 - RNA, 14 nt, Human
aaaaauaacaauga

SEQ ID NO: 1589844 - RNA, 20 nt, Human
gggaacccaaguccaagcau

SEQ ID NO: 1589845 - RNA, 22 nt, Human
gggacagucaccucauggaauu

SEQ ID NO: 1589846 - RNA, 21 nt, Human
gggacagucaccucauggaau

SEQ ID NO: 1589847 - RNA, 20 nt, Human
gggacagucaccucauggaa

SEQ ID NO: 1589848 - RNA, 14 nt, Human
ggcuccacuugguc

SEQ ID NO: 1589849 - RNA, 16 nt, Human
ggccuccauccugagg

SEQ ID NO: 1589850 - RNA, 15 nt, Human
ggccuccauccugag

SEQ ID NO: 1589851 - RNA, 14 nt, Human
ggccuccauccuga

SEQ ID NO: 1589852 - RNA, 21 nt, Human
ggcacaguuuucugagaaaga

SEQ ID NO: 1589853 - RNA, 18 nt, Human
gcuagaacucccuuucaa

SEQ ID NO: 1589854 - RNA, 16 nt, Human
gcuagaacucccuuuc

SEQ ID NO: 1589855 - RNA, 15 nt, Human
gcuagaacucccuuu

SEQ ID NO: 1589856 - RNA, 14 nt, Human
gcuagaacucccuu

SEQ ID NO: 1589857 - RNA, 13 nt, Human
gcuagaacucccu

SEQ ID NO: 1589858 - RNA, 12 nt, Human
gcuagaacuccc

SEQ ID NO: 1589859 - RNA, 15 nt, Human
gcuccacuuggucug

SEQ ID NO: 1589860 - RNA, 21 nt, Human
gcuccccucggagaagagcug

SEQ ID NO: 1589861 - RNA, 19 nt, Human
gcuccacuuggucugugag

SEQ ID NO: 1589862 - RNA, 18 nt, Human
gcuccacuuggucuguga

SEQ ID NO: 1589863 - RNA, 20 nt, Human
gccuucggccuccauccuga

SEQ ID NO: 1589864 - RNA, 23 nt, Human
gccuucggccuccauccugaggc

SEQ ID NO: 1589865 - RNA, 21 nt, Human
gccuucggccuccauccugag

SEQ ID NO: 1589866 - RNA, 12 nt, Human
gccuccauccug

SEQ ID NO: 1589867 - RNA, 15 nt, Human
gccucuuagaugcag

SEQ ID NO: 1589868 - RNA, 22 nt, Human
ggacucauuuuaaaaaauggaa

SEQ ID NO: 1589869 - RNA, 13 nt, Human
ggagaaacuggaa

SEQ ID NO: 1589870 - RNA, 21 nt, Human
cauuuggagacacaacuauuu

SEQ ID NO: 1589871 - RNA, 19 nt, Human
cauuguaaauaguauuuga

SEQ ID NO: 1589872 - RNA, 18 nt, Human
ccacagaagcuccaggua

SEQ ID NO: 1589873 - RNA, 18 nt, Human
ccaccagucugacuguuu

SEQ ID NO: 1589874 - RNA, 16 nt, Human
ccacagaagcuccagg

SEQ ID NO: 1589875 - RNA, 13 nt, Human
cauaauuuauaca

SEQ ID NO: 1589876 - RNA, 20 nt, Human
cauaauuuauacaggucaua

SEQ ID NO: 1589877 - RNA, 13 nt, Human
cauuaucucaaaa

SEQ ID NO: 1589878 - RNA, 12 nt, Human
cauuaucucaaa

SEQ ID NO: 1589879 - RNA, 15 nt, Human
cagucaccucaugga

SEQ ID NO: 1589880 - RNA, 15 nt, Human
cagucucaggaaauc

SEQ ID NO: 1589881 - RNA, 18 nt, Human
cagggaggacgcucucug

SEQ ID NO: 1589882 - RNA, 17 nt, Human
cagggaggacgcucucu

SEQ ID NO: 1589883 - RNA, 19 nt, Human
cagggaggacgcucucugg

SEQ ID NO: 1589884 - RNA, 17 nt, Human
cagagcugcccucuccu

SEQ ID NO: 1589885 - RNA, 13 nt, Human
cagagcugcccuc

SEQ ID NO: 1589886 - RNA, 15 nt, Human
cagagcugcccucuc

SEQ ID NO: 1589887 - RNA, 21 nt, Human
cagcaguugaaaagacuccaa

SEQ ID NO: 1589888 - RNA, 20 nt, Human
cagcaguugaaaagacucca

SEQ ID NO: 1589889 - RNA, 17 nt, Human
cagcaguugaaaagacu

SEQ ID NO: 1589890 - RNA, 22 nt, Human
cagcaguugaaaagacuccaaa

SEQ ID NO: 1589891 - RNA, 22 nt, Human
cagccagcaguucagagcugcc

SEQ ID NO: 1589892 - RNA, 15 nt, Human
cagccagcaguucag

SEQ ID NO: 1589893 - RNA, 21 nt, Human
cagccagcaguucagagcugc

SEQ ID NO: 1589894 - RNA, 14 nt, Human
cagccagcaguuca

SEQ ID NO: 1589895 - RNA, 22 nt, Human
cagcacagccucuuagaugcag

SEQ ID NO: 1589896 - RNA, 22 nt, Human
cagccugagcgacagugagacu

SEQ ID NO: 1589897 - RNA, 19 nt, Human
cagccugagcgacagugag

SEQ ID NO: 1589898 - RNA, 18 nt, Human
cagccugagcgacaguga

SEQ ID NO: 1589899 - RNA, 20 nt, Human
cagcccuucuuuccacagaa

SEQ ID NO: 1589900 - RNA, 19 nt, Human
cagcccuucuuuccacaga

SEQ ID NO: 1589901 - RNA, 15 nt, Human
cagcccuucuuucca

SEQ ID NO: 1589902 - RNA, 23 nt, Human
caggaaaucaaauaugcaaagca

SEQ ID NO: 1589903 - RNA, 20 nt, Human
cagcuccccucggagaagag

SEQ ID NO: 1589904 - RNA, 18 nt, Human
cagcuccccucggagaag

SEQ ID NO: 1589905 - RNA, 17 nt, Human
cagcuccccucggagaa

SEQ ID NO: 1589906 - RNA, 16 nt, Human
cagcuccccucggaga

SEQ ID NO: 1589907 - RNA, 23 nt, Human
cagcugccuccccuccucugcuu

SEQ ID NO: 1589908 - RNA, 24 nt, Human
cagcugccuccccuccucugcuug

SEQ ID NO: 1589909 - RNA, 21 nt, Human
cagcugccuccccuccucugc

SEQ ID NO: 1589910 - RNA, 22 nt, Human
cagcugccuccccuccucugcu

SEQ ID NO: 1589911 - RNA, 14 nt, Human
auuguguugugaau

SEQ ID NO: 1589912 - RNA, 17 nt, Human
auuguguugugaauguu

SEQ ID NO: 1589913 - RNA, 15 nt, Human
auuguuuaaaaucau

SEQ ID NO: 1589914 - RNA, 16 nt, Human
auuucauaugcuguau

SEQ ID NO: 1589915 - RNA, 14 nt, Human
auuucuaugaaaua

SEQ ID NO: 1589916 - RNA, 20 nt, Human
auuucauaccuaucaucuua

SEQ ID NO: 1589917 - RNA, 16 nt, Human
auuuaauaaaugugcc

SEQ ID NO: 1589918 - RNA, 22 nt, Human
auuaugaauuacauuuguauaa

SEQ ID NO: 1589919 - RNA, 20 nt, Human
auuaugaauuacauuuguau

SEQ ID NO: 1589920 - RNA, 19 nt, Human
auuaugaauuacauuugua

SEQ ID NO: 1589921 - RNA, 13 nt, Human
caagaugguucua

SEQ ID NO: 1589922 - RNA, 16 nt, Human
caagaugguucuagca

SEQ ID NO: 1589923 - RNA, 19 nt, Human
caagacccaaaaggcagaa

SEQ ID NO: 1589924 - RNA, 18 nt, Human
caaagggugaaaauuauu

SEQ ID NO: 1589925 - RNA, 21 nt, Human
caaaucuuaacuugaaggagu

SEQ ID NO: 1589926 - RNA, 14 nt, Human
auuuuauaucuugu

SEQ ID NO: 1589927 - RNA, 16 nt, Human
auuuuauaucuuguag

SEQ ID NO: 1589928 - RNA, 12 nt, Human
auuuuauaucuu

SEQ ID NO: 1589929 - RNA, 21 nt, Human
auuuuauaucaauuuaaaaaa

SEQ ID NO: 1589930 - RNA, 14 nt, Human
caaaccaaauaaaa

SEQ ID NO: 1589931 - RNA, 15 nt, Human
caaaccaaauaaaaa

SEQ ID NO: 1589932 - RNA, 17 nt, Human
caaacagucucaggaaa

SEQ ID NO: 1589933 - RNA, 16 nt, Human
caaacagucucaggaa

SEQ ID NO: 1589934 - RNA, 17 nt, Human
caaacauauauaacaau

SEQ ID NO: 1589935 - RNA, 21 nt, Human
caaaaggauaaugaauacuuu

SEQ ID NO: 1589936 - RNA, 16 nt, Human
auuuuuauauuugaaa

SEQ ID NO: 1589937 - RNA, 15 nt, Human
auuuuuauauuugaa

SEQ ID NO: 1589938 - RNA, 22 nt, Human
cacuguuuugaaucucauaauu

SEQ ID NO: 1589939 - RNA, 15 nt, Human
cacuuaaaaaugguu

SEQ ID NO: 1589940 - RNA, 17 nt, Human
cacuuguguuuugcaag

SEQ ID NO: 1589941 - RNA, 11 nt, Human
cagaaaguuau

SEQ ID NO: 1589942 - RNA, 16 nt, Human
cagaaaguuauugaua

SEQ ID NO: 1589943 - RNA, 18 nt, Human
cagaacagugauuaccag

SEQ ID NO: 1589944 - RNA, 17 nt, Human
cagaacagugauuacca

SEQ ID NO: 1589945 - RNA, 12 nt, Human
cagaacagugau

SEQ ID NO: 1589946 - RNA, 11 nt, Human
cagaacaguga

SEQ ID NO: 1589947 - RNA, 12 nt, Human
cacuccagccug

SEQ ID NO: 1589948 - RNA, 13 nt, Human
cacuccagccuga

SEQ ID NO: 1589949 - RNA, 23 nt, Human
cacuccagccugagcgacaguga

SEQ ID NO: 1589950 - RNA, 23 nt, Human
caauaaaauccauacauuugugu

SEQ ID NO: 1589951 - RNA, 20 nt, Human
caauaaaauccauacauuug

SEQ ID NO: 1589952 - RNA, 15 nt, Human
caauaaaauggguuu

SEQ ID NO: 1589953 - RNA, 12 nt, Human
cucagaauauug

SEQ ID NO: 1589954 - RNA, 23 nt, Human
cucagaaaacaaggaugaauuaa

SEQ ID NO: 1589955 - RNA, 19 nt, Human
cucagaaaacaaggaugaa

SEQ ID NO: 1589956 - RNA, 23 nt, Human
cuaugucauuugcuggagcucug

SEQ ID NO: 1589957 - RNA, 13 nt, Human
cucaaaacugcac

SEQ ID NO: 1589958 - RNA, 17 nt, Human
cucaaaacugcacuguc

SEQ ID NO: 1589959 - RNA, 14 nt, Human
cuaacuggacuggu

SEQ ID NO: 1589960 - RNA, 24 nt, Human
cggagaagagcuguucacagccag

SEQ ID NO: 1589961 - RNA, 23 nt, Human
cggagaagagcuguucacagcca

SEQ ID NO: 1589962 - RNA, 15 nt, Human
cgguuuauauaagcu

SEQ ID NO: 1589963 - RNA, 17 nt, Human
cugaaagaggaaugaag

SEQ ID NO: 1589964 - RNA, 13 nt, Human
cugaaagaggaau

SEQ ID NO: 1589965 - RNA, 17 nt, Human
cucucuggccuucggcc

SEQ ID NO: 1589966 - RNA, 22 nt, Human
cucucuggccuucggccuccau

SEQ ID NO: 1589967 - RNA, 19 nt, Human
cucucuggccuucggccuc

SEQ ID NO: 1589968 - RNA, 19 nt, Human
cuccccaugauguuuagaa

SEQ ID NO: 1589969 - RNA, 17 nt, Human
ccugucucuacuaaaaa

SEQ ID NO: 1589970 - RNA, 16 nt, Human
ccucccuucucuucac

SEQ ID NO: 1589971 - RNA, 14 nt, Human
ccucggagaagagc

SEQ ID NO: 1589972 - RNA, 12 nt, Human
ccucggagaaga

SEQ ID NO: 1589973 - RNA, 13 nt, Human
ccccugcacucca

SEQ ID NO: 1589974 - RNA, 13 nt, Human
cccuccucugcuu

SEQ ID NO: 1589975 - RNA, 22 nt, Human
cccuccucugcuugccaucccu

SEQ ID NO: 1589976 - RNA, 14 nt, Human
ccaucccucccucc

SEQ ID NO: 1589977 - RNA, 15 nt, Human
ccaucccucccucca

SEQ ID NO: 1589978 - RNA, 13 nt, Human
ccaucccucccuc

SEQ ID NO: 1589979 - RNA, 13 nt, Human
cccaacuccagaa

SEQ ID NO: 1589980 - RNA, 16 nt, Human
gugaagugaaugaaac

SEQ ID NO: 1589981 - RNA, 23 nt, Human
aacuaucucauuuccaagcaagu

SEQ ID NO: 1589982 - RNA, 20 nt, Human
aacuaucucauuuccaagca

SEQ ID NO: 1589983 - RNA, 13 nt, Human
aacuauauuguuu

SEQ ID NO: 1589984 - RNA, 20 nt, Human
aacugaaaucauacuucuua

SEQ ID NO: 1589985 - RNA, 12 nt, Human
aacauaauuaaa

SEQ ID NO: 1589986 - RNA, 16 nt, Human
aacauauauaacaaug

SEQ ID NO: 1589987 - RNA, 19 nt, Human
aacagauuauuaccuuaca

SEQ ID NO: 1589988 - RNA, 16 nt, Human
aacagauaaauaguuu

SEQ ID NO: 1589989 - RNA, 17 nt, Human
aacagucucaggaaauc

SEQ ID NO: 1589990 - RNA, 19 nt, Human
aacagucucaggaaaucaa

SEQ ID NO: 1589991 - RNA, 23 nt, Human
gucucaguccaugaagauguaga

SEQ ID NO: 1589992 - RNA, 16 nt, Human
aagcaaguauuagaau

SEQ ID NO: 1589993 - RNA, 19 nt, Human
aagcaaaauuuuuucucua

SEQ ID NO: 1589994 - RNA, 22 nt, Human
aagauguagaggagaaacugga

SEQ ID NO: 1589995 - RNA, 14 nt, Human
aagacuauucaaac

SEQ ID NO: 1589996 - RNA, 17 nt, Human
aagacuccaaagaaaug

SEQ ID NO: 1589997 - RNA, 16 nt, Human
aagacuccaaagaaau

SEQ ID NO: 1589998 - RNA, 14 nt, Human
aagacuccaaagaa

SEQ ID NO: 1589999 - RNA, 19 nt, Human
aagagcuguucacagccag

SEQ ID NO: 1590000 - RNA, 18 nt, Human
aagagcuguucacagcca

SEQ ID NO: 1590001 - RNA, 13 nt, Human
aagaaaauaucac

SEQ ID NO: 1590002 - RNA, 13 nt, Human
aagaauauuuuaa

SEQ ID NO: 1590003 - RNA, 13 nt, Human
aagacccaaaagg

SEQ ID NO: 1590004 - RNA, 22 nt, Human
aauaaaaauauuguguugugaa

SEQ ID NO: 1590005 - RNA, 12 nt, Human
aauaaaaauaau

SEQ ID NO: 1590006 - RNA, 22 nt, Human
aauaaaauccauacauuugugu

SEQ ID NO: 1590007 - RNA, 21 nt, Human
aauaaaugugccuucauuuuu

SEQ ID NO: 1590008 - RNA, 12 nt, Human
aauaaaugugcc

SEQ ID NO: 1590009 - RNA, 15 nt, Human
aauaacaauaaaaga

SEQ ID NO: 1590010 - RNA, 18 nt, Human
uaaauaguauuugagagu

SEQ ID NO: 1590011 - RNA, 14 nt, Human
aauacacacucaaa

SEQ ID NO: 1590012 - RNA, 14 nt, Human
uaaauuuuauaucu

SEQ ID NO: 1590013 - RNA, 16 nt, Human
uaaauuuugaguucua

SEQ ID NO: 1590014 - RNA, 20 nt, Human
uaacaaaaaaauauauuuaa

SEQ ID NO: 1590015 - RNA, 23 nt, Human
uaacaaaaaaauauauuuaauga

SEQ ID NO: 1590016 - RNA, 17 nt, Human
uaacaaugcuguauuuu

SEQ ID NO: 1590017 - RNA, 15 nt, Human
uaacaaugcuguauu

SEQ ID NO: 1590018 - RNA, 17 nt, Human
uaaaugauuucauucaa

SEQ ID NO: 1590019 - RNA, 18 nt, Human
uaaaccucaaaaugucua

SEQ ID NO: 1590020 - RNA, 19 nt, Human
uaaaccucaaaaugucuaa

SEQ ID NO: 1590021 - RNA, 22 nt, Human
aaguuauugauaaguucauaca

SEQ ID NO: 1590022 - RNA, 23 nt, Human
aaguuauugauaaguucauacau

SEQ ID NO: 1590023 - RNA, 15 nt, Human
aaguucauacauugu

SEQ ID NO: 1590024 - RNA, 12 nt, Human
aaguucauacau

SEQ ID NO: 1590025 - RNA, 13 nt, Human
aaguucauacauu

SEQ ID NO: 1590026 - RNA, 18 nt, Human
aaguuuacauuguaaaua

SEQ ID NO: 1590027 - RNA, 19 nt, Human
aaguuuacauuguaaauag

SEQ ID NO: 1590028 - RNA, 17 nt, Human
aaguucugcagauaaac

SEQ ID NO: 1590029 - RNA, 19 nt, Human
aaguuauugauaaguucau

SEQ ID NO: 1590030 - RNA, 20 nt, Human
aaguuauugauaaguucaua

SEQ ID NO: 1590031 - RNA, 12 nt, Human
aaguaaaugcua

SEQ ID NO: 1590032 - RNA, 18 nt, Human
aaguaaaaccacagcagu

SEQ ID NO: 1590033 - RNA, 17 nt, Human
aaguaaaaccacagcag

SEQ ID NO: 1590034 - RNA, 21 nt, Human
aagggugaugggaaagcauug

SEQ ID NO: 1590035 - RNA, 16 nt, Human
aaguaaaaccacagca

SEQ ID NO: 1590036 - RNA, 15 nt, Human
aaguaaaaccacagc

SEQ ID NO: 1590037 - RNA, 14 nt, Human
aaguaaaaccacag

SEQ ID NO: 1590038 - RNA, 22 nt, Human
guuuuauaauuuugugaagcaa

SEQ ID NO: 1590039 - RNA, 15 nt, Human
guuuuauaauuuugu

SEQ ID NO: 1590040 - RNA, 15 nt, Human
aaguauucuaaauuu

SEQ ID NO: 1590041 - RNA, 13 nt, Human
aaguauucuaaau

SEQ ID NO: 1590042 - RNA, 23 nt, Human
aaguauguuagugcaaauuguca

SEQ ID NO: 1590043 - RNA, 22 nt, Human
guuuucugagaaagacuauuca

SEQ ID NO: 1590044 - RNA, 17 nt, Human
guuuucugagaaagacu

SEQ ID NO: 1590045 - RNA, 16 nt, Human
guuuucugagaaagac

SEQ ID NO: 1590046 - RNA, 23 nt, Human
guuuuuuuuuaaaaaagaaacau

SEQ ID NO: 1590047 - RNA, 22 nt, Human
aagucuuauauauuguagauaa

SEQ ID NO: 1590048 - RNA, 13 nt, Human
guguuuauuuaua

SEQ ID NO: 1590049 - RNA, 16 nt, Human
aaggaaaaaauaacaa

SEQ ID NO: 1590050 - RNA, 19 nt, Human
aaggaaaaaauaacaauga

SEQ ID NO: 1590051 - RNA, 13 nt, Human
guugacaugggac

SEQ ID NO: 1590052 - RNA, 14 nt, Human
aaggaaaaugauac

SEQ ID NO: 1590053 - RNA, 12 nt, Human
aaggaaaaugau

SEQ ID NO: 1590054 - RNA, 14 nt, Human
aaggaucuucaucu

SEQ ID NO: 1590055 - RNA, 13 nt, Human
aaggauaaugaau

SEQ ID NO: 1590056 - RNA, 23 nt, Human
uacauuguacgaagaguauuuuu

SEQ ID NO: 1590057 - RNA, 20 nt, Human
uacauuguacgaagaguauu

SEQ ID NO: 1590058 - RNA, 22 nt, Human
uacauuguacgaagaguauuuu

SEQ ID NO: 1590059 - RNA, 18 nt, Human
aauguugacaugggacau

SEQ ID NO: 1590060 - RNA, 16 nt, Human
uaccaugccauuuaaa

SEQ ID NO: 1590061 - RNA, 16 nt, Human
uacauaaguaauucaa

SEQ ID NO: 1590062 - RNA, 17 nt, Human
uacauaaguaauucaag

SEQ ID NO: 1590063 - RNA, 19 nt, Human
uacauaaguaauucaagaa

SEQ ID NO: 1590064 - RNA, 16 nt, Human
aaugguuuaaaugguc

SEQ ID NO: 1590065 - RNA, 18 nt, Human
uaauguaauaacugugaa

SEQ ID NO: 1590066 - RNA, 17 nt, Human
uaauguaauaacuguga

SEQ ID NO: 1590067 - RNA, 15 nt, Human
aaugaaugaaugaau

SEQ ID NO: 1590068 - RNA, 13 nt, Human
uaaucuuucacag

SEQ ID NO: 1590069 - RNA, 17 nt, Human
uaaucagugugucuaaa

SEQ ID NO: 1590070 - RNA, 18 nt, Human
uaaucagugugucuaaau

SEQ ID NO: 1590071 - RNA, 19 nt, Human
uaacaaugcuguauuuuaa

SEQ ID NO: 1590072 - RNA, 18 nt, Human
uacaaaaacacagcaagg

SEQ ID NO: 1590073 - RNA, 17 nt, Human
uacaaaaacacagcaag

SEQ ID NO: 1590074 - RNA, 13 nt, Human
acaaaaaaauaua

SEQ ID NO: 1590075 - RNA, 17 nt, Human
acaaaaaaauauauuua

SEQ ID NO: 1590076 - RNA, 20 nt, Human
acaaaaaaauauauuuaaug

SEQ ID NO: 1590077 - RNA, 19 nt, Human
aauuuuuucucuaggaaau

SEQ ID NO: 1590078 - RNA, 19 nt, Human
aauuuuuauauuugaaaua

SEQ ID NO: 1590079 - RNA, 15 nt, Human
uagaacucccuuuca

SEQ ID NO: 1590080 - RNA, 16 nt, Human
uacuucaugcugucua

SEQ ID NO: 1590081 - RNA, 21 nt, Human
uacuucaaauccuugaagauu

SEQ ID NO: 1590082 - RNA, 19 nt, Human
uagaggagaaacuggaacu

SEQ ID NO: 1590083 - RNA, 16 nt, Human
uagaugcaguucugaa

SEQ ID NO: 1590084 - RNA, 19 nt, Human
uagaugcaguucugaagaa

SEQ ID NO: 1590085 - RNA, 17 nt, Human
uagaugcaguucugaag

SEQ ID NO: 1590086 - RNA, 21 nt, Human
uagcaugucgucaaagcugaa

SEQ ID NO: 1590087 - RNA, 18 nt, Human
acaagcacuaaacaaaga

SEQ ID NO: 1590088 - RNA, 15 nt, Human
aauucuugaaggaaa

SEQ ID NO: 1590089 - RNA, 16 nt, Human
aauucuugaaggaaaa

SEQ ID NO: 1590090 - RNA, 21 nt, Human
aauucuugaaggaaaaugaua

SEQ ID NO: 1590091 - RNA, 21 nt, Human
aauucuugccaaauauaaaua

SEQ ID NO: 1590092 - RNA, 19 nt, Human
aauugacccacaagaaaug

SEQ ID NO: 1590093 - RNA, 16 nt, Human
aauugacccacaagaa

SEQ ID NO: 1590094 - RNA, 21 nt, Human
aauugacccacaagaaaugaa

SEQ ID NO: 1590095 - RNA, 20 nt, Human
aauuucucccagucauuuaa

SEQ ID NO: 1590096 - RNA, 19 nt, Human
uacuucaaauccuugaaga

SEQ ID NO: 1590097 - RNA, 14 nt, Human
uacuucaaauccuu

SEQ ID NO: 1590098 - RNA, 13 nt, Human
uacuguaagaaaa

SEQ ID NO: 1590099 - RNA, 23 nt, Human
aauugugugaaagguacuucaaa

SEQ ID NO: 1590100 - RNA, 16 nt, Human
uauucaggagaguaga

SEQ ID NO: 1590101 - RNA, 23 nt, Human
uauucauagcagcuuauucacaa

SEQ ID NO: 1590102 - RNA, 16 nt, Human
uauuaaaacucauuuu

SEQ ID NO: 1590103 - RNA, 12 nt, Human
uauuaaaacuca

SEQ ID NO: 1590104 - RNA, 21 nt, Human
uauguuuucaggcuagaugua

SEQ ID NO: 1590105 - RNA, 21 nt, Human
acaguauggcagcuuuccuca

SEQ ID NO: 1590106 - RNA, 16 nt, Human
acagucucaggaaauc

SEQ ID NO: 1590107 - RNA, 15 nt, Human
acagucucaggaaau

SEQ ID NO: 1590108 - RNA, 14 nt, Human
acagucucaggaaa

SEQ ID NO: 1590109 - RNA, 13 nt, Human
acagucucaggaa

SEQ ID NO: 1590110 - RNA, 17 nt, Human
acagucucaggaaauca

SEQ ID NO: 1590111 - RNA, 20 nt, Human
acagugaaagaaaauaacaa

SEQ ID NO: 1590112 - RNA, 18 nt, Human
acagugagacucugucuc

SEQ ID NO: 1590113 - RNA, 14 nt, Human
acagugagacucug

SEQ ID NO: 1590114 - RNA, 21 nt, Human
acaguuaccucugccucagaa

SEQ ID NO: 1590115 - RNA, 19 nt, Human
uauuuaaugauaaguaaau

SEQ ID NO: 1590116 - RNA, 18 nt, Human
uauuuauuuuaauaaugu

SEQ ID NO: 1590117 - RNA, 16 nt, Human
uauuuauuuuaauaau

SEQ ID NO: 1590118 - RNA, 14 nt, Human
uauuuauuuuaaua

SEQ ID NO: 1590119 - RNA, 17 nt, Human
uauugucuagugaaacu

SEQ ID NO: 1590120 - RNA, 23 nt, Human
acaguucggugagcuacaaaugc

SEQ ID NO: 1590121 - RNA, 19 nt, Human
acaguucggugagcuacaa

SEQ ID NO: 1590122 - RNA, 22 nt, Human
acaguucggugagcuacaaaug

SEQ ID NO: 1590123 - RNA, 16 nt, Human
uauauccuuucuaaca

SEQ ID NO: 1590124 - RNA, 17 nt, Human
uauauccuuucuaacaa

SEQ ID NO: 1590125 - RNA, 19 nt, Human
uauaggaauugacccacaa

SEQ ID NO: 1590126 - RNA, 14 nt, Human
uauaggaauugacc

SEQ ID NO: 1590127 - RNA, 13 nt, Human
uauaggaauugac

SEQ ID NO: 1590128 - RNA, 21 nt, Human
uauaggugcuacaaaaacaca

SEQ ID NO: 1590129 - RNA, 23 nt, Human
uauaggugcuacaaaaacacagc

SEQ ID NO: 1590130 - RNA, 19 nt, Human
uauaauuuugugaagcaaa

SEQ ID NO: 1590131 - RNA, 14 nt, Human
uauaauuuugugaa

SEQ ID NO: 1590132 - RNA, 23 nt, Human
uauaaaauaauuuuuauauuuga

SEQ ID NO: 1590133 - RNA, 22 nt, Human
acacaucagcuugcccuguuaa

SEQ ID NO: 1590134 - RNA, 22 nt, Human
uauaaaauaauuuuuauauuug

SEQ ID NO: 1590135 - RNA, 21 nt, Human
uauaaaauaauuuuuauauuu

SEQ ID NO: 1590136 - RNA, 22 nt, Human
uagugagcagucaggaaagaga

SEQ ID NO: 1590137 - RNA, 16 nt, Human
uaguuuuauaugcuuc

SEQ ID NO: 1590138 - RNA, 14 nt, Human
uaucuaguaugaaa

SEQ ID NO: 1590139 - RNA, 16 nt, Human
uaucuaguaugaaauu

SEQ ID NO: 1590140 - RNA, 17 nt, Human
uaucuaguaugaaauua

SEQ ID NO: 1590141 - RNA, 15 nt, Human
uauauuuacaaaugg

SEQ ID NO: 1590142 - RNA, 14 nt, Human
uauauuuacaaaug

SEQ ID NO: 1590143 - RNA, 18 nt, Human
uaugagcuuccuucugug

SEQ ID NO: 1590144 - RNA, 21 nt, Human
uaugagcuuccuucugugaaa

SEQ ID NO: 1590145 - RNA, 16 nt, Human
uauggcuauaggugcu

SEQ ID NO: 1590146 - RNA, 17 nt, Human
uauggcuauaggugcua

SEQ ID NO: 1590147 - RNA, 22 nt, Human
acuaugacauaaaaacaacuuu

SEQ ID NO: 1590148 - RNA, 14 nt, Human
uccccuccucugcu

SEQ ID NO: 1590149 - RNA, 12 nt, Human
uccccuccucug

SEQ ID NO: 1590150 - RNA, 15 nt, Human
ucccagugaauucuu

SEQ ID NO: 1590151 - RNA, 13 nt, Human
acuaaaaauacaa

SEQ ID NO: 1590152 - RNA, 20 nt, Human
acucauuuuaaaaaauggaa

SEQ ID NO: 1590153 - RNA, 19 nt, Human
acuccagugagacagcucu

SEQ ID NO: 1590154 - RNA, 22 nt, Human
uccuuucuaacaaaaaaauaua

SEQ ID NO: 1590155 - RNA, 22 nt, Human
acugccuucucaacuccaaacu

SEQ ID NO: 1590156 - RNA, 22 nt, Human
acuggcacaguuuucugagaaa

SEQ ID NO: 1590157 - RNA, 13 nt, Human
uccuucagccuga

SEQ ID NO: 1590158 - RNA, 22 nt, Human
acugaggggaggggagcauggg

SEQ ID NO: 1590159 - RNA, 17 nt, Human
acugaggggaggggagc

SEQ ID NO: 1590160 - RNA, 15 nt, Human
uccugggcagcugcc

SEQ ID NO: 1590161 - RNA, 16 nt, Human
uccugggcagcugccu

SEQ ID NO: 1590162 - RNA, 17 nt, Human
uccugggcagcugccuc

SEQ ID NO: 1590163 - RNA, 18 nt, Human
uccugggcagcugccucc

SEQ ID NO: 1590164 - RNA, 19 nt, Human
uccugggcagcugccuccc

SEQ ID NO: 1590165 - RNA, 22 nt, Human
uccugggcagcugccuccccuc

SEQ ID NO: 1590166 - RNA, 23 nt, Human
uccugggcagcugccuccccucc

SEQ ID NO: 1590167 - RNA, 19 nt, Human
ucauauuaauauauuucca

SEQ ID NO: 1590168 - RNA, 22 nt, Human
ucaugaauuaguuuuauaugcu

SEQ ID NO: 1590169 - RNA, 21 nt, Human
uccaacuaucucauuuccaag

SEQ ID NO: 1590170 - RNA, 20 nt, Human
uccagccugagcgacaguga

SEQ ID NO: 1590171 - RNA, 21 nt, Human
uccagccugagcgacagugag

SEQ ID NO: 1590172 - RNA, 12 nt, Human
uauuucauuucu

SEQ ID NO: 1590173 - RNA, 13 nt, Human
uauuucauuucuu

SEQ ID NO: 1590174 - RNA, 11 nt, Human
accacagcagu

SEQ ID NO: 1590175 - RNA, 19 nt, Human
accacugcagaagacagua

SEQ ID NO: 1590176 - RNA, 14 nt, Human
accacugcagaaga

SEQ ID NO: 1590177 - RNA, 23 nt, Human
accacuuguguuuugcaagccag

SEQ ID NO: 1590178 - RNA, 19 nt, Human
accacuuguguuuugcaag

SEQ ID NO: 1590179 - RNA, 15 nt, Human
acccaaaaggcagaa

SEQ ID NO: 1590180 - RNA, 13 nt, Human
acccaaaaggcag

SEQ ID NO: 1590181 - RNA, 18 nt, Human
acccaaaaggcagaagca

SEQ ID NO: 1590182 - RNA, 21 nt, Human
acccaaauguucaucaaugaa

SEQ ID NO: 1590183 - RNA, 21 nt, Human
agcagauggaaugcuguguua

SEQ ID NO: 1590184 - RNA, 22 nt, Human
ugagguacugagagugaacaaa

SEQ ID NO: 1590185 - RNA, 17 nt, Human
ugagguacugagaguga

SEQ ID NO: 1590186 - RNA, 15 nt, Human
ugaggacacugauau

SEQ ID NO: 1590187 - RNA, 13 nt, Human
ugagcuacaaaug

SEQ ID NO: 1590188 - RNA, 14 nt, Human
ugagcuacaaaugc

SEQ ID NO: 1590189 - RNA, 16 nt, Human
ugagcuacaaaugcau

SEQ ID NO: 1590190 - RNA, 20 nt, Human
ugagcgacagugagacucug

SEQ ID NO: 1590191 - RNA, 16 nt, Human
ugagcgacagugagac

SEQ ID NO: 1590192 - RNA, 14 nt, Human
ugagcgacagugag

SEQ ID NO: 1590193 - RNA, 13 nt, Human
ugagcgacaguga

SEQ ID NO: 1590194 - RNA, 14 nt, Human
agcagaacagugau

SEQ ID NO: 1590195 - RNA, 14 nt, Human
agcaacgcaggccc

SEQ ID NO: 1590196 - RNA, 16 nt, Human
agcaccaaucaugaau

SEQ ID NO: 1590197 - RNA, 22 nt, Human
agcacagccucuuagaugcagu

SEQ ID NO: 1590198 - RNA, 17 nt, Human
agauuuucagaaaauau

SEQ ID NO: 1590199 - RNA, 14 nt, Human
agauuuuccugaaa

SEQ ID NO: 1590200 - RNA, 12 nt, Human
agauuuucagaa

SEQ ID NO: 1590201 - RNA, 21 nt, Human
agauugugccccugcacucca

SEQ ID NO: 1590202 - RNA, 16 nt, Human
agauugugccccugca

SEQ ID NO: 1590203 - RNA, 16 nt, Human
agauuuaccacuugug

SEQ ID NO: 1590204 - RNA, 15 nt, Human
ugacuguuuccauca

SEQ ID NO: 1590205 - RNA, 23 nt, Human
agaugcuagaacucccuuucaac

SEQ ID NO: 1590206 - RNA, 19 nt, Human
agauaaucagugugucuaa

SEQ ID NO: 1590207 - RNA, 22 nt, Human
agagugaacaaauuuacagaga

SEQ ID NO: 1590208 - RNA, 20 nt, Human
ugaagaagcaccaaucauga

SEQ ID NO: 1590209 - RNA, 14 nt, Human
ugaagaagauggua

SEQ ID NO: 1590210 - RNA, 22 nt, Human
ugaagaagcaccaaucaugaau

SEQ ID NO: 1590211 - RNA, 18 nt, Human
ugaagauguagaggagaa

SEQ ID NO: 1590212 - RNA, 18 nt, Human
ucuguuuuauaauuuugu

SEQ ID NO: 1590213 - RNA, 20 nt, Human
ucuguuuuauaauuuuguga

SEQ ID NO: 1590214 - RNA, 21 nt, Human
ucuuaauuaaaagaauauuuu

SEQ ID NO: 1590215 - RNA, 18 nt, Human
ucuuaauuaaaagaauau

SEQ ID NO: 1590216 - RNA, 22 nt, Human
ucuuagaugcaguucugaagaa

SEQ ID NO: 1590217 - RNA, 15 nt, Human
agacuggcacaguuu

SEQ ID NO: 1590218 - RNA, 14 nt, Human
agacuggcacaguu

SEQ ID NO: 1590219 - RNA, 18 nt, Human
agacuggcacaguuuucu

SEQ ID NO: 1590220 - RNA, 15 nt, Human
agagaaugagagaca

SEQ ID NO: 1590221 - RNA, 17 nt, Human
agagacacacugaagaa

SEQ ID NO: 1590222 - RNA, 20 nt, Human
agagacacacugaagaagca

SEQ ID NO: 1590223 - RNA, 18 nt, Human
agagacacacugaagaag

SEQ ID NO: 1590224 - RNA, 21 nt, Human
ucuuuaaagggauggcaagau

SEQ ID NO: 1590225 - RNA, 17 nt, Human
ucuuuaaaauacacacu

SEQ ID NO: 1590226 - RNA, 14 nt, Human
agacuccaaagaaa

SEQ ID NO: 1590227 - RNA, 13 nt, Human
agacuccaaagaa

SEQ ID NO: 1590228 - RNA, 12 nt, Human
agacuccaaaga

SEQ ID NO: 1590229 - RNA, 20 nt, Human
agacuauucaaacagucuca

SEQ ID NO: 1590230 - RNA, 18 nt, Human
agacuauucaaacagucu

SEQ ID NO: 1590231 - RNA, 21 nt, Human
agacuauucaaacagucucag

SEQ ID NO: 1590232 - RNA, 19 nt, Human
agacuccaaagaaauguaa

SEQ ID NO: 1590233 - RNA, 16 nt, Human
agacuccaaagaaaug

SEQ ID NO: 1590234 - RNA, 23 nt, Human
agacuauucaaacagucucagga

SEQ ID NO: 1590235 - RNA, 22 nt, Human
agacuccaaagaaauguaaggg

SEQ ID NO: 1590236 - RNA, 17 nt, Human
ucucuggccuucggccu

SEQ ID NO: 1590237 - RNA, 16 nt, Human
ucucuggccuucggcc

SEQ ID NO: 1590238 - RNA, 13 nt, Human
ucucuucuuuaaa

SEQ ID NO: 1590239 - RNA, 12 nt, Human
ucucuucuuuaa

SEQ ID NO: 1590240 - RNA, 19 nt, Human
agaaaacaaggaugaauua

SEQ ID NO: 1590241 - RNA, 15 nt, Human
agaaacuggaacucu

SEQ ID NO: 1590242 - RNA, 13 nt, Human
agaaacuggaacu

SEQ ID NO: 1590243 - RNA, 15 nt, Human
ucucccagucauuua

SEQ ID NO: 1590244 - RNA, 15 nt, Human
agaacucccuuucaa

SEQ ID NO: 1590245 - RNA, 14 nt, Human
agaacucccuuuca

SEQ ID NO: 1590246 - RNA, 15 nt, Human
ucugcagauaaacag

SEQ ID NO: 1590247 - RNA, 23 nt, Human
agaaagacuauucaaacagucuc

SEQ ID NO: 1590248 - RNA, 20 nt, Human
agaaagacuauucaaacagu

SEQ ID NO: 1590249 - RNA, 19 nt, Human
agaaagacuauucaaacag

SEQ ID NO: 1590250 - RNA, 20 nt, Human
ucugagaaagacuauucaaa

SEQ ID NO: 1590251 - RNA, 19 nt, Human
ucugagaaagacuauucaa

SEQ ID NO: 1590252 - RNA, 15 nt, Human
ucugagaaagacuau

SEQ ID NO: 1590253 - RNA, 14 nt, Human
ucugagaaagacua

SEQ ID NO: 1590254 - RNA, 21 nt, Human
ucugacuguuuccaucaaggg

SEQ ID NO: 1590255 - RNA, 22 nt, Human
ucugagaaagacuauucaaaca

SEQ ID NO: 1590256 - RNA, 21 nt, Human
ucugagaaagacuauucaaac

SEQ ID NO: 1590257 - RNA, 23 nt, Human
ucugagaaagacuauucaaacag

SEQ ID NO: 1590258 - RNA, 11 nt, Human
ucugcuugcca

SEQ ID NO: 1590259 - RNA, 21 nt, Human
agaagaacugaaaucauacuu

SEQ ID NO: 1590260 - RNA, 12 nt, Human
ucugcuugccau

SEQ ID NO: 1590261 - RNA, 14 nt, Human
ucugcuugccaucc

SEQ ID NO: 1590262 - RNA, 14 nt, Human
agaagcuccaggua

SEQ ID NO: 1590263 - RNA, 19 nt, Human
agccugcaauuucauaugc

SEQ ID NO: 1590264 - RNA, 21 nt, Human
agccugcaauuucauaugcug

SEQ ID NO: 1590265 - RNA, 13 nt, Human
ugcauacucauua

SEQ ID NO: 1590266 - RNA, 19 nt, Human
ugcagugagccgagauugu

SEQ ID NO: 1590267 - RNA, 14 nt, Human
ugcagugagccgag

SEQ ID NO: 1590268 - RNA, 18 nt, Human
agccugagcgacagugag

SEQ ID NO: 1590269 - RNA, 19 nt, Human
agccugagcgacagugaga

SEQ ID NO: 1590270 - RNA, 19 nt, Human
agcccuucuuuccacagaa

SEQ ID NO: 1590271 - RNA, 18 nt, Human
agcccuucuuuccacaga

SEQ ID NO: 1590272 - RNA, 19 nt, Human
agcuauggugucauaggcu

SEQ ID NO: 1590273 - RNA, 13 nt, Human
agcuggaaaagua

SEQ ID NO: 1590274 - RNA, 18 nt, Human
agcugccuccccuccucu

SEQ ID NO: 1590275 - RNA, 19 nt, Human
agcugccuccccuccucug

SEQ ID NO: 1590276 - RNA, 20 nt, Human
agcugccuccccuccucugc

SEQ ID NO: 1590277 - RNA, 23 nt, Human
agcugccuccccuccucugcuug

SEQ ID NO: 1590278 - RNA, 21 nt, Human
agcugccuccccuccucugcu

SEQ ID NO: 1590279 - RNA, 22 nt, Human
agcugccuccccuccucugcuu

SEQ ID NO: 1590280 - RNA, 14 nt, Human
ugcuaguaauugga

SEQ ID NO: 1590281 - RNA, 16 nt, Human
ugcuaguaauuggaaa

SEQ ID NO: 1590282 - RNA, 19 nt, Human
aggaaagagaacuuccaga

SEQ ID NO: 1590283 - RNA, 13 nt, Human
aggaaagagaacu

SEQ ID NO: 1590284 - RNA, 20 nt, Human
agcuuauuaaaacucauuuu

SEQ ID NO: 1590285 - RNA, 15 nt, Human
agcuuauuaaaacuc

SEQ ID NO: 1590286 - RNA, 21 nt, Human
agcuuauugucuagugaaacu

SEQ ID NO: 1590287 - RNA, 23 nt, Human
aggaauugacccacaagaaauga

SEQ ID NO: 1590288 - RNA, 19 nt, Human
aggaauugacccacaagaa

SEQ ID NO: 1590289 - RNA, 19 nt, Human
aggaaaucaaauaugcaaa

SEQ ID NO: 1590290 - RNA, 18 nt, Human
aggaaauauuuauuuuaa

SEQ ID NO: 1590291 - RNA, 14 nt, Human
aggaaauauuuauu

SEQ ID NO: 1590292 - RNA, 23 nt, Human
agggacuucugucuucacaacag

SEQ ID NO: 1590293 - RNA, 13 nt, Human
agggaaauuucag

SEQ ID NO: 1590294 - RNA, 14 nt, Human
agggagagaagaua

SEQ ID NO: 1590295 - RNA, 13 nt, Human
agggagagaagau

SEQ ID NO: 1590296 - RNA, 19 nt, Human
ugggaggcugagaugggag

SEQ ID NO: 1590297 - RNA, 22 nt, Human
agggcuguuauaaucuuucaca

SEQ ID NO: 1590298 - RNA, 23 nt, Human
agggaaacugccagcaacgcagg

SEQ ID NO: 1590299 - RNA, 21 nt, Human
agggaaacugccagcaacgca

SEQ ID NO: 1590300 - RNA, 19 nt, Human
agggaaacugccagcaacg

SEQ ID NO: 1590301 - RNA, 16 nt, Human
agggaaacugccagca

SEQ ID NO: 1590302 - RNA, 15 nt, Human
agggaaacugccagc

SEQ ID NO: 1590303 - RNA, 14 nt, Human
agggaaacugccag

SEQ ID NO: 1590304 - RNA, 20 nt, Human
ugggaacccaaguccaagca

SEQ ID NO: 1590305 - RNA, 19 nt, Human
uggcuauaggugcuacaaa

SEQ ID NO: 1590306 - RNA, 15 nt, Human
uggcuauaggugcua

SEQ ID NO: 1590307 - RNA, 18 nt, Human
uggcuaagcaaaauguga

SEQ ID NO: 1590308 - RNA, 23 nt, Human
uggcuauaggugcuacaaaaaca

SEQ ID NO: 1590309 - RNA, 18 nt, Human
ugggaaagcauuguaaau

SEQ ID NO: 1590310 - RNA, 17 nt, Human
ugggaaagcauuguaaa

SEQ ID NO: 1590311 - RNA, 21 nt, Human
ugggaaagcauuguaaaugug

SEQ ID NO: 1590312 - RNA, 16 nt, Human
ugggaaagcauuguaa

SEQ ID NO: 1590313 - RNA, 14 nt, Human
ugggaaagcauugu

SEQ ID NO: 1590314 - RNA, 18 nt, Human
ugggaaacaaaaggauaa

SEQ ID NO: 1590315 - RNA, 22 nt, Human
aggcuccacuuggucugugaga

SEQ ID NO: 1590316 - RNA, 21 nt, Human
aggcuccacuuggucugugag

SEQ ID NO: 1590317 - RNA, 17 nt, Human
aggcuccacuuggucug

SEQ ID NO: 1590318 - RNA, 11 nt, Human
aggcuccacuu

SEQ ID NO: 1590319 - RNA, 20 nt, Human
aggcagcucuaaaugucaau

SEQ ID NO: 1590320 - RNA, 16 nt, Human
uggagaagaacugaaa

SEQ ID NO: 1590321 - RNA, 18 nt, Human
uguauauccuuucuaaca

SEQ ID NO: 1590322 - RNA, 19 nt, Human
uguaguguuggagaagaac

SEQ ID NO: 1590323 - RNA, 18 nt, Human
uguaguguuggagaagaa

SEQ ID NO: 1590324 - RNA, 17 nt, Human
uguaguguuggagaaga

SEQ ID NO: 1590325 - RNA, 13 nt, Human
aguaauagagcaa

SEQ ID NO: 1590326 - RNA, 20 nt, Human
aguaaaaccacagcaguuga

SEQ ID NO: 1590327 - RNA, 19 nt, Human
aguaaaaccacagcaguug

SEQ ID NO: 1590328 - RNA, 17 nt, Human
aguaaaaccacagcagu

SEQ ID NO: 1590329 - RNA, 16 nt, Human
aguaaaaccacagcag

SEQ ID NO: 1590330 - RNA, 19 nt, Human
aguaauucaagaaaacaac

SEQ ID NO: 1590331 - RNA, 13 nt, Human
aguaauuggaaag

SEQ ID NO: 1590332 - RNA, 12 nt, Human
aguaauuggaaa

SEQ ID NO: 1590333 - RNA, 13 nt, Human
aguaaugauaacu

SEQ ID NO: 1590334 - RNA, 19 nt, Human
aguacauuuggagacacaa

SEQ ID NO: 1590335 - RNA, 19 nt, Human
uguaagggaaacugccagc

SEQ ID NO: 1590336 - RNA, 18 nt, Human
uguaagggaaacugccag

SEQ ID NO: 1590337 - RNA, 13 nt, Human
uguaagggaaacu

SEQ ID NO: 1590338 - RNA, 16 nt, Human
aggugcuacaaaaaca

SEQ ID NO: 1590339 - RNA, 16 nt, Human
agucucaggaaaucaa

SEQ ID NO: 1590340 - RNA, 13 nt, Human
agucucaggaaau

SEQ ID NO: 1590341 - RNA, 15 nt, Human
agucaggaaagagaa

SEQ ID NO: 1590342 - RNA, 14 nt, Human
agucaggaaagaga

SEQ ID NO: 1590343 - RNA, 23 nt, Human
uguuaagcagauggaaugcugug

SEQ ID NO: 1590344 - RNA, 22 nt, Human
uguguuaaguauguguaaaaug

SEQ ID NO: 1590345 - RNA, 14 nt, Human
uguguaaaauguga

SEQ ID NO: 1590346 - RNA, 20 nt, Human
uguggucacaggaaguagag

SEQ ID NO: 1590347 - RNA, 19 nt, Human
ugugucuaaauuugaaugu

SEQ ID NO: 1590348 - RNA, 22 nt, Human
ugugucuaaauuugaauguuaa

SEQ ID NO: 1590349 - RNA, 22 nt, Human
uguugcccacagcuguaugauu

SEQ ID NO: 1590350 - RNA, 15 nt, Human
uguucuaagaaguga

SEQ ID NO: 1590351 - RNA, 23 nt, Human
agugaacaaauuuacagagacag

SEQ ID NO: 1590352 - RNA, 22 nt, Human
agugaacaaauuuacagagaca

SEQ ID NO: 1590353 - RNA, 16 nt, Human
agucuuucacauuuaa

SEQ ID NO: 1590354 - RNA, 21 nt, Human
agugaacaaauuuacagagac

SEQ ID NO: 1590355 - RNA, 18 nt, Human
agucuuucacauuuaaau

SEQ ID NO: 1590356 - RNA, 14 nt, Human
agugcaaauuguca

SEQ ID NO: 1590357 - RNA, 14 nt, Human
auagaguguacuua

SEQ ID NO: 1590358 - RNA, 19 nt, Human
auagaguguacuuaacuau

SEQ ID NO: 1590359 - RNA, 21 nt, Human
auagaguguacuuaacuauuc

SEQ ID NO: 1590360 - RNA, 18 nt, Human
auagauaggucagugcaa

SEQ ID NO: 1590361 - RNA, 15 nt, Human
auagagcaaaauuga

SEQ ID NO: 1590362 - RNA, 17 nt, Human
auagagcaaaauugaug

SEQ ID NO: 1590363 - RNA, 21 nt, Human
auagagcaaaauugauguguu

SEQ ID NO: 1590364 - RNA, 22 nt, Human
auagagcaaaauugauguguuu

SEQ ID NO: 1590365 - RNA, 17 nt, Human
auagaauuaacacauga

SEQ ID NO: 1590366 - RNA, 13 nt, Human
auagaaguaaaaa

SEQ ID NO: 1590367 - RNA, 15 nt, Human
uuauuauauuuacaa

SEQ ID NO: 1590368 - RNA, 19 nt, Human
uuauguuaaaacugggaca

SEQ ID NO: 1590369 - RNA, 14 nt, Human
uuauuauauuuaca

SEQ ID NO: 1590370 - RNA, 16 nt, Human
auacucauuaggaugg

SEQ ID NO: 1590371 - RNA, 23 nt, Human
auacgcaacauaauuaaauuuug

SEQ ID NO: 1590372 - RNA, 17 nt, Human
auacuauggaauuucuc

SEQ ID NO: 1590373 - RNA, 19 nt, Human
uuauauuugaaauauugac

SEQ ID NO: 1590374 - RNA, 21 nt, Human
uuaugaauuacauuuguauaa

SEQ ID NO: 1590375 - RNA, 17 nt, Human
uuaugaauuacauuugu

SEQ ID NO: 1590376 - RNA, 16 nt, Human
uuaugaauuacauuug

SEQ ID NO: 1590377 - RNA, 14 nt, Human
uuaugaauuacauu

SEQ ID NO: 1590378 - RNA, 22 nt, Human
uuaugauuaaguaaugauaacu

SEQ ID NO: 1590379 - RNA, 19 nt, Human
uuaugauuaaguaaugaua

SEQ ID NO: 1590380 - RNA, 15 nt, Human
uuaaauuuugaguuc

SEQ ID NO: 1590381 - RNA, 20 nt, Human
uuaaauuuugaguucuacau

SEQ ID NO: 1590382 - RNA, 15 nt, Human
aguuuacauuguaaa

SEQ ID NO: 1590383 - RNA, 17 nt, Human
aguuuacauuguaaaua

SEQ ID NO: 1590384 - RNA, 17 nt, Human
aguuuaaauuguaauag

SEQ ID NO: 1590385 - RNA, 20 nt, Human
aguuuaaauuguaauaggcg

SEQ ID NO: 1590386 - RNA, 15 nt, Human
aguuuagcuggaaaa

SEQ ID NO: 1590387 - RNA, 16 nt, Human
aguuuagcuggaaaag

SEQ ID NO: 1590388 - RNA, 22 nt, Human
uuaaaaucauuucugcaucagc

SEQ ID NO: 1590389 - RNA, 20 nt, Human
uuaaaaaugguuuaaauggu

SEQ ID NO: 1590390 - RNA, 16 nt, Human
uuaaaaaauggaacau

SEQ ID NO: 1590391 - RNA, 16 nt, Human
aguuuuauaugcuucu

SEQ ID NO: 1590392 - RNA, 14 nt, Human
auaauuuuaagaaa

SEQ ID NO: 1590393 - RNA, 19 nt, Human
auaauuuauacaggucaua

SEQ ID NO: 1590394 - RNA, 21 nt, Human
auaauuuauacaggucauauu

SEQ ID NO: 1590395 - RNA, 17 nt, Human
auaauucagaaggaucu

SEQ ID NO: 1590396 - RNA, 14 nt, Human
auaaucuuucacag

SEQ ID NO: 1590397 - RNA, 14 nt, Human
auaagccagacauc

SEQ ID NO: 1590398 - RNA, 15 nt, Human
uuagggagagaagau

SEQ ID NO: 1590399 - RNA, 16 nt, Human
uuaggguuaugauuaa

SEQ ID NO: 1590400 - RNA, 14 nt, Human
uuaggguuaugauu

SEQ ID NO: 1590401 - RNA, 18 nt, Human
aucuuguagcuuuaucaa

SEQ ID NO: 1590402 - RNA, 14 nt, Human
aucuuauaauuuaa

SEQ ID NO: 1590403 - RNA, 19 nt, Human
aucuuguagcuuuaucaaa

SEQ ID NO: 1590404 - RNA, 20 nt, Human
aucuuguagcuuuaucaaag

SEQ ID NO: 1590405 - RNA, 19 nt, Human
augaaauuauauaaguauu

SEQ ID NO: 1590406 - RNA, 21 nt, Human
augaaauuauauaaguauucu

SEQ ID NO: 1590407 - RNA, 18 nt, Human
augaacuuguaaaggaau

SEQ ID NO: 1590408 - RNA, 17 nt, Human
augaauuacauuuguau

SEQ ID NO: 1590409 - RNA, 16 nt, Human
augaauuacauuugua

SEQ ID NO: 1590410 - RNA, 23 nt, Human
augaauggcuaagcaaaauguga

SEQ ID NO: 1590411 - RNA, 15 nt, Human
augaauuacauuugu

SEQ ID NO: 1590412 - RNA, 20 nt, Human
uuggagacacaacuauuuuu

SEQ ID NO: 1590413 - RNA, 20 nt, Human
uugacagaauauguuucaaa

SEQ ID NO: 1590414 - RNA, 19 nt, Human
aucuacacuccagugagac

SEQ ID NO: 1590415 - RNA, 18 nt, Human
aucuacacuccagugaga

SEQ ID NO: 1590416 - RNA, 17 nt, Human
uugacagaauauguuuc

SEQ ID NO: 1590417 - RNA, 17 nt, Human
uugaagggaaauuucag

SEQ ID NO: 1590418 - RNA, 13 nt, Human
uugcaucaauuuu

SEQ ID NO: 1590419 - RNA, 14 nt, Human
aucucauuuccaag

SEQ ID NO: 1590420 - RNA, 17 nt, Human
uucuagcuaauguaaua

SEQ ID NO: 1590421 - RNA, 22 nt, Human
uucuagcauggcauauuuuuca

SEQ ID NO: 1590422 - RNA, 14 nt, Human
uucuagcauggcau

SEQ ID NO: 1590423 - RNA, 15 nt, Human
uucuagcauggcaua

SEQ ID NO: 1590424 - RNA, 18 nt, Human
uucuagcauggcauauuu

SEQ ID NO: 1590425 - RNA, 20 nt, Human
uucuagcauggcauauuuuu

SEQ ID NO: 1590426 - RNA, 21 nt, Human
uucuagcauggcauauuuuuc

SEQ ID NO: 1590427 - RNA, 14 nt, Human
uucuaaauuuuaua

SEQ ID NO: 1590428 - RNA, 19 nt, Human
uucuaacaaaaaaauauau

SEQ ID NO: 1590429 - RNA, 23 nt, Human
uucuaagaagugaaaaucuacac

SEQ ID NO: 1590430 - RNA, 16 nt, Human
uucuaaguaaaaccac

SEQ ID NO: 1590431 - RNA, 17 nt, Human
uucuaaguaaaaccaca

SEQ ID NO: 1590432 - RNA, 15 nt, Human
uucuaaguaaaacca

SEQ ID NO: 1590433 - RNA, 14 nt, Human
uucggccuccaucc

SEQ ID NO: 1590434 - RNA, 15 nt, Human
uucggccuccauccu

SEQ ID NO: 1590435 - RNA, 22 nt, Human
aucacuugucaauaaaauccau

SEQ ID NO: 1590436 - RNA, 17 nt, Human
aucaggguuaguauugu

SEQ ID NO: 1590437 - RNA, 12 nt, Human
auauuuuucaca

SEQ ID NO: 1590438 - RNA, 13 nt, Human
auauuuuucacau

SEQ ID NO: 1590439 - RNA, 14 nt, Human
auauuuuucacaua

SEQ ID NO: 1590440 - RNA, 15 nt, Human
auauuuuucacauau

SEQ ID NO: 1590441 - RNA, 17 nt, Human
auauuuuucacauaucu

SEQ ID NO: 1590442 - RNA, 18 nt, Human
auauuuuuuguuaaauga

SEQ ID NO: 1590443 - RNA, 20 nt, Human
auauuuuuuguuaaaugauu

SEQ ID NO: 1590444 - RNA, 14 nt, Human
aucaacagauaaau

SEQ ID NO: 1590445 - RNA, 19 nt, Human
uuccguagguuauuuucag

SEQ ID NO: 1590446 - RNA, 19 nt, Human
uugaacccgggaggcagag

SEQ ID NO: 1590447 - RNA, 17 nt, Human
uugaaauuguauuacaa

SEQ ID NO: 1590448 - RNA, 12 nt, Human
uucucuaggaaa

SEQ ID NO: 1590449 - RNA, 21 nt, Human
uuuaucaaagggugaaaauua

SEQ ID NO: 1590450 - RNA, 13 nt, Human
augcuaagugaaa

SEQ ID NO: 1590451 - RNA, 18 nt, Human
augcuagguuaauuccaa

SEQ ID NO: 1590452 - RNA, 22 nt, Human
augcuagaacucccuuucaaca

SEQ ID NO: 1590453 - RNA, 21 nt, Human
augcuagaacucccuuucaac

SEQ ID NO: 1590454 - RNA, 20 nt, Human
augcuagaacucccuuucaa

SEQ ID NO: 1590455 - RNA, 17 nt, Human
uuucaaacauauauaac

SEQ ID NO: 1590456 - RNA, 16 nt, Human
uuucaaacauauauaa

SEQ ID NO: 1590457 - RNA, 14 nt, Human
uuucaaacuuugga

SEQ ID NO: 1590458 - RNA, 18 nt, Human
auggcauauuuuucacau

SEQ ID NO: 1590459 - RNA, 20 nt, Human
auggcauauuuuucacauau

SEQ ID NO: 1590460 - RNA, 21 nt, Human
auggcauauuuuucacauauc

SEQ ID NO: 1590461 - RNA, 22 nt, Human
auggcauauuuuucacauaucu

SEQ ID NO: 1590462 - RNA, 23 nt, Human
auggcauauuuuucacauaucua

SEQ ID NO: 1590463 - RNA, 16 nt, Human
auggcacuaguauuuc

SEQ ID NO: 1590464 - RNA, 14 nt, Human
auggcacuaguauu

SEQ ID NO: 1590465 - RNA, 19 nt, Human
auggcuaagcaaaauguga

SEQ ID NO: 1590466 - RNA, 17 nt, Human
augauaaguaaaugcua

SEQ ID NO: 1590467 - RNA, 15 nt, Human
augauaacuggaaac

SEQ ID NO: 1590468 - RNA, 18 nt, Human
augauuaaguaaugauaa

SEQ ID NO: 1590469 - RNA, 14 nt, Human
augauuaaguaaug

SEQ ID NO: 1590470 - RNA, 21 nt, Human
augccauuuaaagcuuauuaa

SEQ ID NO: 1590471 - RNA, 17 nt, Human
augccauuuaaagcuua

SEQ ID NO: 1590472 - RNA, 13 nt, Human
augcaguucugaa

SEQ ID NO: 1590473 - RNA, 18 nt, Human
uuuaaauauaugcuaagu

SEQ ID NO: 1590474 - RNA, 22 nt, Human
uuugacagaauauguuucaaac

SEQ ID NO: 1590475 - RNA, 13 nt, Human
auguagaggagaa

SEQ ID NO: 1590476 - RNA, 12 nt, Human
auguagaggaga

SEQ ID NO: 1590477 - RNA, 19 nt, Human
auguagaggagaaacugga

SEQ ID NO: 1590478 - RNA, 17 nt, Human
auguagaggagaaacug

SEQ ID NO: 1590479 - RNA, 16 nt, Human
auguacuucaugcugu

SEQ ID NO: 1590480 - RNA, 14 nt, Human
uuugcaagccagau

SEQ ID NO: 1590481 - RNA, 17 nt, Human
uuugugaagcaaaauuu

SEQ ID NO: 1590482 - RNA, 21 nt, Human
uuuguaguguuggagaagaac

SEQ ID NO: 1590483 - RNA, 19 nt, Human
uuuguaguguuggagaaga

SEQ ID NO: 1590484 - RNA, 17 nt, Human
auguccacugguucuuc

SEQ ID NO: 1590485 - RNA, 21 nt, Human
augguucccuugaugaagaag

SEQ ID NO: 1590486 - RNA, 18 nt, Human
uuucucccagucauuuaa

SEQ ID NO: 1590487 - RNA, 17 nt, Human
uuucucccagucauuua

SEQ ID NO: 1590488 - RNA, 18 nt, Human
auucagaaggaucuucau

SEQ ID NO: 1590489 - RNA, 24 nt, Human
auucagaaggaucuucaucugacu

SEQ ID NO: 1590490 - RNA, 17 nt, Human
auuauuuuguucauaca

SEQ ID NO: 1590491 - RNA, 18 nt, Human
auuauuuuguucauacau

SEQ ID NO: 1590492 - RNA, 19 nt, Human
auuauuuuguucauacaua

SEQ ID NO: 1590493 - RNA, 21 nt, Human
auuauuuuguucauacauauu

SEQ ID NO: 1590494 - RNA, 18 nt, Human
auucaaacagucucagga

SEQ ID NO: 1590495 - RNA, 20 nt, Human
auucaaacagucucaggaaa

SEQ ID NO: 1590496 - RNA, 19 nt, Human
auucaaacagucucaggaa

SEQ ID NO: 1590497 - RNA, 15 nt, Human
auuauuuuguucaua

SEQ ID NO: 1590498 - RNA, 16 nt, Human
auuauuuuguucauac

SEQ ID NO: 1590499 - RNA, 21 nt, Human
auuauguuaaaacugggacag

SEQ ID NO: 1590500 - RNA, 18 nt, Human
auuauauuuauuacugua

SEQ ID NO: 1590501 - RNA, 15 nt, Human
auuauauuuauuacu

SEQ ID NO: 1590502 - RNA, 15 nt, Human
auuauauuuacaaau

SEQ ID NO: 1590503 - RNA, 15 nt, Human
auucuagcuaaugua

SEQ ID NO: 1590504 - RNA, 18 nt, Human
auucuagcuaauguaaua

SEQ ID NO: 1590505 - RNA, 19 nt, Human
auugacacuuaaaaauggu

SEQ ID NO: 1590506 - RNA, 17 nt, Human
auugacacuuaaaaaug

SEQ ID NO: 1590507 - RNA, 15 nt, Human
auugacacuuaaaaa

SEQ ID NO: 1590508 - RNA, 21 nt, Human
auuuuuguagcacugacagau

SEQ ID NO: 1590509 - RNA, 20 nt, Human
auuuuuguagcacugacaga

SEQ ID NO: 1590510 - RNA, 22 nt, Human
auuuuugugauuuugugauuga

SEQ ID NO: 1590511 - RNA, 21 nt, Human
auuuuuguuuucauuaucuca

SEQ ID NO: 1590512 - RNA, 18 nt, Human
auuuuuuguuaaaugauu

SEQ ID NO: 1590513 - RNA, 23 nt, Human
auuuuuucucuaggaaauauuua

SEQ ID NO: 1590514 - RNA, 20 nt, Human
auuuuuucucuaggaaauau

SEQ ID NO: 1590515 - RNA, 22 nt, Human
auuuuugacagaauauguuuca

SEQ ID NO: 1590516 - RNA, 12 nt, Human
auuuuugacaga

SEQ ID NO: 1590517 - RNA, 13 nt, Human
auuuuugacagaa

SEQ ID NO: 1590518 - RNA, 14 nt, Human
auuuuugacagaau

SEQ ID NO: 1590519 - RNA, 15 nt, Human
auuuuugacagaaua

SEQ ID NO: 1590520 - RNA, 20 nt, Human
auuuuucuuauuucauuucu

SEQ ID NO: 1590521 - RNA, 19 nt, Human
auuuuucuuauuucauuuc

SEQ ID NO: 1590522 - RNA, 15 nt, Human
auuuuucuuauuuca

SEQ ID NO: 1590523 - RNA, 15 nt, Human
auuuuuccaaaauaa

SEQ ID NO: 1590524 - RNA, 15 nt, Human
auuuuucacauaucu

SEQ ID NO: 1590525 - RNA, 18 nt, Human
auuuuucacauaucuagu

SEQ ID NO: 1590526 - RNA, 21 nt, Human
auuuuucacauaucuaguaug

SEQ ID NO: 1590527 - RNA, 12 nt, Human
auuuuguucaua

SEQ ID NO: 1590528 - RNA, 14 nt, Human
auuuuguucauaca

SEQ ID NO: 1590529 - RNA, 15 nt, Human
auuuuguucauacau

SEQ ID NO: 1590530 - RNA, 16 nt, Human
auuuuguucauacaua

SEQ ID NO: 1590531 - RNA, 18 nt, Human
auuuuguucauacauauu

SEQ ID NO: 1590532 - RNA, 14 nt, Human
auuuuccugaaaac

SEQ ID NO: 1590533 - RNA, 14 nt, Human
auuuucuauaauuu

SEQ ID NO: 1590534 - RNA, 15 nt, Human
auuuucuauaauuua

SEQ ID NO: 1590535 - RNA, 12 nt, Human
auuuuaauaaug

SEQ ID NO: 1590536 - RNA, 18 nt, Human
auugcuuuggucauauga

SEQ ID NO: 1590537 - RNA, 14 nt, Human
auugcuuuggucau

SEQ ID NO: 1590538 - RNA, 18 nt, Human
auugacuuuuuauggcac

SEQ ID NO: 1590539 - RNA, 13 nt, Human
auugacuuuuuau

SEQ ID NO: 1590540 - RNA, 19 nt, Human
auuggagcucgugggacag

SEQ ID NO: 1590541 - RNA, 19 nt, Human
auuggacaguaaaauccac

SEQ ID NO: 1590542 - RNA, 17 nt, Human
auuguacgaagaguauu

SEQ ID NO: 1590543 - RNA, 16 nt, Human
auuguacgaagaguau

SEQ ID NO: 1590544 - RNA, 13 nt, Human
auugucuagugaa

SEQ ID NO: 1590545 - RNA, 14 nt, Human
auuuauuuuaauaa

SEQ ID NO: 1590546 - RNA, 20 nt, Human
auuucuugagguaaaagcau

SEQ ID NO: 1590547 - RNA, 16 nt, Human
auuuuaaaagaaugau

SEQ ID NO: 1590548 - RNA, 23 nt, Human
auuuuaaaagaaugauuaugaau

SEQ ID NO: 1590549 - RNA, 15 nt, Human
auuuguauaaaauaa

SEQ ID NO: 1590550 - RNA, 14 nt, Human
auuuguauaaaaua

SEQ ID NO: 1590551 - RNA, 22 nt, Human
auuuguaguguuggagaagaac

SEQ ID NO: 1590552 - RNA, 22 nt, Human
acuauucaggagaguagaacag

SEQ ID NO: 1590553 - RNA, 21 nt, Human
acuauucaaacagucucagga

SEQ ID NO: 1590554 - RNA, 20 nt, Human
acuaguauuucuaugaaaua

SEQ ID NO: 1590555 - RNA, 17 nt, Human
acucuauguucuaagaa

SEQ ID NO: 1590556 - RNA, 15 nt, Human
acuaagagagaauga

SEQ ID NO: 1590557 - RNA, 13 nt, Human
acuaagagagaau

SEQ ID NO: 1590558 - RNA, 22 nt, Human
acgcaggcccccaggugccagu

SEQ ID NO: 1590559 - RNA, 22 nt, Human
acugugaaguuuacauuguaaa

SEQ ID NO: 1590560 - RNA, 22 nt, Human
acuguaagaaaauaucacuugu

SEQ ID NO: 1590561 - RNA, 13 nt, Human
acuguaagaaaau

SEQ ID NO: 1590562 - RNA, 19 nt, Human
acuguaagaaaauaucacu

SEQ ID NO: 1590563 - RNA, 18 nt, Human
acucugucucaguccaug

SEQ ID NO: 1590564 - RNA, 20 nt, Human
acucugucucaguccaugaa

SEQ ID NO: 1590565 - RNA, 13 nt, Human
acugccagcaacg

SEQ ID NO: 1590566 - RNA, 21 nt, Human
acuucugucuucacaacagau

SEQ ID NO: 1590567 - RNA, 12 nt, Human
acuucagacaua

SEQ ID NO: 1590568 - RNA, 22 nt, Human
acuucugucuucacaacagauu

SEQ ID NO: 1590569 - RNA, 18 nt, Human
acuuguaaaggaauuuaa

SEQ ID NO: 1590570 - RNA, 20 nt, Human
acuuuauacccagaaaguua

SEQ ID NO: 1590571 - RNA, 22 nt, Human
acuuuauacccagaaaguuauu

SEQ ID NO: 1590572 - RNA, 22 nt, Human
acuuuauuuucuauaauuuaaa

SEQ ID NO: 1590573 - RNA, 16 nt, Human
agaaaaucaggcuggc

SEQ ID NO: 1590574 - RNA, 23 nt, Human
agaaaguuauugauaaguucaua

SEQ ID NO: 1590575 - RNA, 11 nt, Human
agaaaguuauu

SEQ ID NO: 1590576 - RNA, 21 nt, Human
acacgagcaggcuacugucag

SEQ ID NO: 1590577 - RNA, 19 nt, Human
acacgagcaggcuacuguc

SEQ ID NO: 1590578 - RNA, 14 nt, Human
acacgagcaggcua

SEQ ID NO: 1590579 - RNA, 13 nt, Human
acaagaaaugaaa

SEQ ID NO: 1590580 - RNA, 13 nt, Human
aauuuugugaagc

SEQ ID NO: 1590581 - RNA, 23 nt, Human
acagcaguugaaaagacuccaaa

SEQ ID NO: 1590582 - RNA, 22 nt, Human
acagcaguugaaaagacuccaa

SEQ ID NO: 1590583 - RNA, 21 nt, Human
acagcaguugaaaagacucca

SEQ ID NO: 1590584 - RNA, 17 nt, Human
acccacaagaaaugaaa

SEQ ID NO: 1590585 - RNA, 21 nt, Human
acccacaagaaaugaaagcag

SEQ ID NO: 1590586 - RNA, 17 nt, Human
aaaaucaguuguacagu

SEQ ID NO: 1590587 - RNA, 21 nt, Human
aaaaucuacacuccagugaga

SEQ ID NO: 1590588 - RNA, 18 nt, Human
aaaaguucugcagauaaa

SEQ ID NO: 1590589 - RNA, 16 nt, Human
aaaaagaaacauuugg

SEQ ID NO: 1590590 - RNA, 24 nt, Human
aaacacucaguuguucaauaauaa

SEQ ID NO: 1590591 - RNA, 12 nt, Human
aaaauugaugug

SEQ ID NO: 1590592 - RNA, 14 nt, Human
aaaauugauguguu

SEQ ID NO: 1590593 - RNA, 21 nt, Human
aaaauugauguguuuauuuau

SEQ ID NO: 1590594 - RNA, 17 nt, Human
aaaaucucaauauuuca

SEQ ID NO: 1590595 - RNA, 16 nt, Human
aaaaucucaauauuuc

SEQ ID NO: 1590596 - RNA, 15 nt, Human
aaagaaauguaaggg

SEQ ID NO: 1590597 - RNA, 23 nt, Human
aaacugagaugugaacacaucag

SEQ ID NO: 1590598 - RNA, 21 nt, Human
aaacugagaugugaacacauc

SEQ ID NO: 1590599 - RNA, 19 nt, Human
aaaggcagaagcaacccaa

SEQ ID NO: 1590600 - RNA, 14 nt, Human
aaaggcagaagcaa

SEQ ID NO: 1590601 - RNA, 16 nt, Human
aaaucaaauaugcaaa

SEQ ID NO: 1590602 - RNA, 15 nt, Human
aaaucaaauaugcaa

SEQ ID NO: 1590603 - RNA, 14 nt, Human
aaaucaaauaugca

SEQ ID NO: 1590604 - RNA, 12 nt, Human
aaaucaaauaug

SEQ ID NO: 1590605 - RNA, 20 nt, Human
aaauauuuauuuuaauaaug

SEQ ID NO: 1590606 - RNA, 13 nt, Human
aaauauuuauuuu

SEQ ID NO: 1590607 - RNA, 15 nt, Human
aaauauuuauuuuaa

SEQ ID NO: 1590608 - RNA, 22 nt, Human
aacuuuauacccagaaaguuau

SEQ ID NO: 1590609 - RNA, 23 nt, Human
aacuuuauacccagaaaguuauu

SEQ ID NO: 1590610 - RNA, 20 nt, Human
aacuuuaugcuaagugaaau

SEQ ID NO: 1590611 - RNA, 21 nt, Human
aacuuuaugcuaagugaaaua

SEQ ID NO: 1590612 - RNA, 23 nt, Human
aacugagaugugaacacaucagc

SEQ ID NO: 1590613 - RNA, 20 nt, Human
aacugagaugugaacacauc

SEQ ID NO: 1590614 - RNA, 20 nt, Human
aacugacucuuaagaagacu

SEQ ID NO: 1590615 - RNA, 19 nt, Human
aacugacucuuaagaagac

SEQ ID NO: 1590616 - RNA, 18 nt, Human
aacugacucuuaagaaga

SEQ ID NO: 1590617 - RNA, 15 nt, Human
aacugacucuuaaga

SEQ ID NO: 1590618 - RNA, 19 nt, Human
aaauugacacuuaaaaaug

SEQ ID NO: 1590619 - RNA, 22 nt, Human
aaauugacacuuaaaaaugguu

SEQ ID NO: 1590620 - RNA, 22 nt, Human
aaauguuguucucuucuuuaaa

SEQ ID NO: 1590621 - RNA, 17 nt, Human
aaaucuuauaauuuaaa

SEQ ID NO: 1590622 - RNA, 18 nt, Human
aacaaauuuacagagaca

SEQ ID NO: 1590623 - RNA, 16 nt, Human
aacacaucagcuugcc

SEQ ID NO: 1590624 - RNA, 17 nt, Human
aaccuagggugauauua

SEQ ID NO: 1590625 - RNA, 17 nt, Human
aagcagauggaaugcug

SEQ ID NO: 1590626 - RNA, 19 nt, Human
aagcagauggaaugcugug

SEQ ID NO: 1590627 - RNA, 20 nt, Human
aagcagauggaaugcugugu

SEQ ID NO: 1590628 - RNA, 20 nt, Human
aaggcagcucuaaaugucaa

SEQ ID NO: 1590629 - RNA, 17 nt, Human
aagggaaacugccagca

SEQ ID NO: 1590630 - RNA, 16 nt, Human
aagggaaacugccagc

SEQ ID NO: 1590631 - RNA, 23 nt, Human
aagggaaacugccagcaacgcag

SEQ ID NO: 1590632 - RNA, 17 nt, Human
aaguccaagcauaccaa

SEQ ID NO: 1590633 - RNA, 18 nt, Human
aaguccaagcauuuagau

SEQ ID NO: 1590634 - RNA, 21 nt, Human
aaguagggacuucugucuuca

SEQ ID NO: 1590635 - RNA, 21 nt, Human
aaugcuagguuaauuccaauu

SEQ ID NO: 1590636 - RNA, 23 nt, Human
aauguuucaaacauauauaacaa

SEQ ID NO: 1590637 - RNA, 18 nt, Human
aaugcuagguuaauucca

SEQ ID NO: 1590638 - RNA, 19 nt, Human
aaugcuagguuaauuccaa

SEQ ID NO: 1590639 - RNA, 13 nt, Human
aauauguuucaaa

SEQ ID NO: 1590640 - RNA, 15 nt, Human
aauauguuucaaacu

SEQ ID NO: 1590641 - RNA, 16 nt, Human
aauauguuucaaacuu

SEQ ID NO: 1590642 - RNA, 17 nt, Human
aauauguuucaaacuuu

SEQ ID NO: 1590643 - RNA, 15 nt, Human
aaucaccaaaggcuc

SEQ ID NO: 1590644 - RNA, 15 nt, Human
aauccaaugaaauga

SEQ ID NO: 1590645 - RNA, 15 nt, Human
aaugauuaugaauua

SEQ ID NO: 1590646 - RNA, 23 nt, Human
aaugauuaugaauuacauuugua

SEQ ID NO: 1590647 - RNA, 21 nt, Human
aaugauuaugaauuacauuug

SEQ ID NO: 1590648 - RNA, 13 nt, Human
agcacugacagau

SEQ ID NO: 1590649 - RNA, 14 nt, Human
agcacugacagauu

SEQ ID NO: 1590650 - RNA, 18 nt, Human
agcacugacagauuucca

SEQ ID NO: 1590651 - RNA, 16 nt, Human
agcacugacuucuaag

SEQ ID NO: 1590652 - RNA, 21 nt, Human
agcaguugaaaagacuccaaa

SEQ ID NO: 1590653 - RNA, 13 nt, Human
agcaguugaaaag

SEQ ID NO: 1590654 - RNA, 15 nt, Human
agcaguucagagcug

SEQ ID NO: 1590655 - RNA, 23 nt, Human
agcaguucagagcugcccucucc

SEQ ID NO: 1590656 - RNA, 16 nt, Human
agcaguugaaaagacu

SEQ ID NO: 1590657 - RNA, 21 nt, Human
agccgggcgugguggugagug

SEQ ID NO: 1590658 - RNA, 21 nt, Human
agacugcauuauauuuauuac

SEQ ID NO: 1590659 - RNA, 17 nt, Human
agagaacuuccagaucc

SEQ ID NO: 1590660 - RNA, 17 nt, Human
aggcuagauguauguac

SEQ ID NO: 1590661 - RNA, 16 nt, Human
aggcuagauguaugua

SEQ ID NO: 1590662 - RNA, 15 nt, Human
aggcuagauguaugu

SEQ ID NO: 1590663 - RNA, 21 nt, Human
aggcuagaaccaccugccuau

SEQ ID NO: 1590664 - RNA, 17 nt, Human
aggcuacugucagcucc

SEQ ID NO: 1590665 - RNA, 24 nt, Human
aggugcuacaaaaacacagcaagg

SEQ ID NO: 1590666 - RNA, 23 nt, Human
aggugcuacaaaaacacagcaag

SEQ ID NO: 1590667 - RNA, 22 nt, Human
aggugcuacaaaaacacagcaa

SEQ ID NO: 1590668 - RNA, 21 nt, Human
aggugcuacaaaaacacagca

SEQ ID NO: 1590669 - RNA, 20 nt, Human
aggugcuacaaaaacacagc

SEQ ID NO: 1590670 - RNA, 19 nt, Human
aggugcuacaaaaacacag

SEQ ID NO: 1590671 - RNA, 18 nt, Human
aggugcuacaaaaacaca

SEQ ID NO: 1590672 - RNA, 20 nt, Human
agguaaaagcaucacaugaa

SEQ ID NO: 1590673 - RNA, 22 nt, Human
agcuccccucggagaagagcug

SEQ ID NO: 1590674 - RNA, 23 nt, Human
aggaugguucccuugaugaagaa

SEQ ID NO: 1590675 - RNA, 20 nt, Human
auguauucuagcuaauguaa

SEQ ID NO: 1590676 - RNA, 19 nt, Human
auguauucuagcuaaugua

SEQ ID NO: 1590677 - RNA, 19 nt, Human
auguaagggaaacugccag

SEQ ID NO: 1590678 - RNA, 20 nt, Human
auguaagggaaacugccagc

SEQ ID NO: 1590679 - RNA, 16 nt, Human
auguaagggaaacugc

SEQ ID NO: 1590680 - RNA, 14 nt, Human
auguaagggaaacu

SEQ ID NO: 1590681 - RNA, 14 nt, Human
auguuucaaacuuu

SEQ ID NO: 1590682 - RNA, 17 nt, Human
auguuucaaacuuugga

SEQ ID NO: 1590683 - RNA, 12 nt, Human
auguuucaaacu

SEQ ID NO: 1590684 - RNA, 13 nt, Human
auguuucaaacuu

SEQ ID NO: 1590685 - RNA, 17 nt, Human
auguucuaagaagugaa

SEQ ID NO: 1590686 - RNA, 18 nt, Human
augugggcagugauguca

SEQ ID NO: 1590687 - RNA, 21 nt, Human
augcauagguuuagcaguaua

SEQ ID NO: 1590688 - RNA, 17 nt, Human
augcauagguuuagcag

SEQ ID NO: 1590689 - RNA, 23 nt, Human
aucagcugcugaaacaacaaaua

SEQ ID NO: 1590690 - RNA, 22 nt, Human
aucagcugcugaaacaacaaau

SEQ ID NO: 1590691 - RNA, 21 nt, Human
aucagcugcugaaacaacaaa

SEQ ID NO: 1590692 - RNA, 15 nt, Human
auauuuauuuuaaua

SEQ ID NO: 1590693 - RNA, 14 nt, Human
auauuuauuuuaau

SEQ ID NO: 1590694 - RNA, 17 nt, Human
auauuuauuuuaauaau

SEQ ID NO: 1590695 - RNA, 23 nt, Human
auaguauuugagaguucuaaauu

SEQ ID NO: 1590696 - RNA, 14 nt, Human
auagucaaauugug

SEQ ID NO: 1590697 - RNA, 20 nt, Human
auaguauuugagaguucuaa

SEQ ID NO: 1590698 - RNA, 21 nt, Human
auaguauuugagaguucuaaa

SEQ ID NO: 1590699 - RNA, 15 nt, Human
auagguuuaauaauu

SEQ ID NO: 1590700 - RNA, 21 nt, Human
auaggugcuacaaaaacacag

SEQ ID NO: 1590701 - RNA, 15 nt, Human
auaggugcuacaaaa

SEQ ID NO: 1590702 - RNA, 23 nt, Human
auaggugcuacaaaaacacagca

SEQ ID NO: 1590703 - RNA, 14 nt, Human
auaggugcuacaaa

SEQ ID NO: 1590704 - RNA, 13 nt, Human
auauuauguguuu

SEQ ID NO: 1590705 - RNA, 13 nt, Human
auauuuauuuuaa

SEQ ID NO: 1590706 - RNA, 22 nt, Human
auaugcuucuguuuuauaauuu

SEQ ID NO: 1590707 - RNA, 20 nt, Human
auaugcuucuguuuuauaau

SEQ ID NO: 1590708 - RNA, 23 nt, Human
auaugcuucuguuuuauaauuuu

SEQ ID NO: 1590709 - RNA, 15 nt, Human
auaucaauuuaaaaa

SEQ ID NO: 1590710 - RNA, 20 nt, Human
auaauuaaauuuugaguucu

SEQ ID NO: 1590711 - RNA, 23 nt, Human
auaauguuucaaacauauauaac

SEQ ID NO: 1590712 - RNA, 20 nt, Human
auacacacucaaaucaagaa

SEQ ID NO: 1590713 - RNA, 18 nt, Human
auacacacucaaaucaag

SEQ ID NO: 1590714 - RNA, 17 nt, Human
auacacacucaaaucaa

SEQ ID NO: 1590715 - RNA, 22 nt, Human
auaaaaauauuguguugugaau

SEQ ID NO: 1590716 - RNA, 14 nt, Human
auaaaaauauugug

SEQ ID NO: 1590717 - RNA, 18 nt, Human
auaaaggauuaaugucaa

SEQ ID NO: 1590718 - RNA, 14 nt, Human
aguaugaaauuaua

SEQ ID NO: 1590719 - RNA, 16 nt, Human
aguaugaaauuauaua

SEQ ID NO: 1590720 - RNA, 19 nt, Human
agucaaauugugugaaagg

SEQ ID NO: 1590721 - RNA, 23 nt, Human
agucaaauugugugaaagguacu

SEQ ID NO: 1590722 - RNA, 12 nt, Human
aguccuguaaug

SEQ ID NO: 1590723 - RNA, 15 nt, Human
aguucauacauugua

SEQ ID NO: 1590724 - RNA, 22 nt, Human
aguugaaaaucuuauaauuuaa

SEQ ID NO: 1590725 - RNA, 10 nt, Human
aguucauaca

SEQ ID NO: 1590726 - RNA, 11 nt, Human
aguucauacau

SEQ ID NO: 1590727 - RNA, 22 nt, Human
aguugaaaagacuccaaagaaa

SEQ ID NO: 1590728 - RNA, 23 nt, Human
aguugaaaaucuuauaauuuaaa

SEQ ID NO: 1590729 - RNA, 15 nt, Human
agugucuuaauuaaa

SEQ ID NO: 1590730 - RNA, 18 nt, Human
agugucuuaauuaaaaga

SEQ ID NO: 1590731 - RNA, 17 nt, Human
agugucuuaauuaaaag

SEQ ID NO: 1590732 - RNA, 21 nt, Human
agugucuuaauuaaaagaaua

SEQ ID NO: 1590733 - RNA, 18 nt, Human
aaaaacacagcaagggug

SEQ ID NO: 1590734 - RNA, 13 nt, Human
aaaaacacagcaa

SEQ ID NO: 1590735 - RNA, 23 nt, Human
cacauaucuaguaugaaauuaua

SEQ ID NO: 1590736 - RNA, 14 nt, Human
cacaguuuucugag

SEQ ID NO: 1590737 - RNA, 15 nt, Human
cacaguuuucugaga

SEQ ID NO: 1590738 - RNA, 15 nt, Human
cacaggaaguagagg

SEQ ID NO: 1590739 - RNA, 20 nt, Human
cacaggaaccacaagacugc

SEQ ID NO: 1590740 - RNA, 19 nt, Human
cacaggaaccacaagacug

SEQ ID NO: 1590741 - RNA, 14 nt, Human
cacaacuauuuuuc

SEQ ID NO: 1590742 - RNA, 19 nt, Human
cacaacuauuuuuccaaaa

SEQ ID NO: 1590743 - RNA, 13 nt, Human
cacaacuauauug

SEQ ID NO: 1590744 - RNA, 19 nt, Human
cacacucaaaucaagaaac

SEQ ID NO: 1590745 - RNA, 11 nt, Human
cacaacagauu

SEQ ID NO: 1590746 - RNA, 22 nt, Human
caaugaaugaaugaauggcuaa

SEQ ID NO: 1590747 - RNA, 12 nt, Human
caacuuuauacc

SEQ ID NO: 1590748 - RNA, 15 nt, Human
caaauuuacagagac

SEQ ID NO: 1590749 - RNA, 16 nt, Human
caaauuuacagagaca

SEQ ID NO: 1590750 - RNA, 14 nt, Human
caaauuuacagaga

SEQ ID NO: 1590751 - RNA, 17 nt, Human
caagcacuaaacaaaga

SEQ ID NO: 1590752 - RNA, 23 nt, Human
caaaaaaauauauuuaaugauaa

SEQ ID NO: 1590753 - RNA, 15 nt, Human
caaauaaaaauauug

SEQ ID NO: 1590754 - RNA, 21 nt, Human
caaauguucaucaaugaauga

SEQ ID NO: 1590755 - RNA, 17 nt, Human
caaauaugcaaagcacu

SEQ ID NO: 1590756 - RNA, 16 nt, Human
caaauaugcaaagcac

SEQ ID NO: 1590757 - RNA, 18 nt, Human
caaauaugcaaagcacug

SEQ ID NO: 1590758 - RNA, 19 nt, Human
caaauaugcaaagcacuga

SEQ ID NO: 1590759 - RNA, 23 nt, Human
ccagugaauucuugaaggaaaau

SEQ ID NO: 1590760 - RNA, 13 nt, Human
ccaggugccaguu

SEQ ID NO: 1590761 - RNA, 12 nt, Human
ccaggugccagu

SEQ ID NO: 1590762 - RNA, 18 nt, Human
ccauccugaggcuccacu

SEQ ID NO: 1590763 - RNA, 20 nt, Human
ccauccugaggcuccacuug

SEQ ID NO: 1590764 - RNA, 20 nt, Human
ccagguagaggguguguaag

SEQ ID NO: 1590765 - RNA, 15 nt, Human
ccaccucccugcaau

SEQ ID NO: 1590766 - RNA, 19 nt, Human
ccaccucccugcaauaaaa

SEQ ID NO: 1590767 - RNA, 21 nt, Human
ccaccucccugcaauaaaaug

SEQ ID NO: 1590768 - RNA, 15 nt, Human
ccacugguucuucuu

SEQ ID NO: 1590769 - RNA, 14 nt, Human
ccagacaucaacag

SEQ ID NO: 1590770 - RNA, 15 nt, Human
ccuaacgaaguaucc

SEQ ID NO: 1590771 - RNA, 23 nt, Human
cccucuccugggcagcugccucc

SEQ ID NO: 1590772 - RNA, 20 nt, Human
cccucuccugggcagcugcc

SEQ ID NO: 1590773 - RNA, 21 nt, Human
cccucuccugggcagcugccu

SEQ ID NO: 1590774 - RNA, 22 nt, Human
cccucuccugggcagcugccuc

SEQ ID NO: 1590775 - RNA, 12 nt, Human
cccucccuccac

SEQ ID NO: 1590776 - RNA, 15 nt, Human
cccuugaugaagaag

SEQ ID NO: 1590777 - RNA, 15 nt, Human
ccccucggagaagag

SEQ ID NO: 1590778 - RNA, 13 nt, Human
ccccuccucugcu

SEQ ID NO: 1590779 - RNA, 14 nt, Human
ccccuccucugcuu

SEQ ID NO: 1590780 - RNA, 17 nt, Human
ccccuccucugcuugcc

SEQ ID NO: 1590781 - RNA, 16 nt, Human
cuaagauaguaacaau

SEQ ID NO: 1590782 - RNA, 15 nt, Human
cuaagagagaaugag

SEQ ID NO: 1590783 - RNA, 14 nt, Human
cuaagagagaauga

SEQ ID NO: 1590784 - RNA, 20 nt, Human
cuaaauuuuauaucuuguag

SEQ ID NO: 1590785 - RNA, 15 nt, Human
cuaaauuuuauaucu

SEQ ID NO: 1590786 - RNA, 16 nt, Human
cuaaauuuuauaucuu

SEQ ID NO: 1590787 - RNA, 13 nt, Human
cuaaauuuuauau

SEQ ID NO: 1590788 - RNA, 19 nt, Human
cuaaauugacacuuaaaaa

SEQ ID NO: 1590789 - RNA, 20 nt, Human
cgggaggcagagguugcagu

SEQ ID NO: 1590790 - RNA, 14 nt, Human
cuacacuaagagag

SEQ ID NO: 1590791 - RNA, 23 nt, Human
cuacacgagauacagaauuuuau

SEQ ID NO: 1590792 - RNA, 21 nt, Human
cuaagcuucacuguaaaauaa

SEQ ID NO: 1590793 - RNA, 18 nt, Human
cuaaguaaaaccacagca

SEQ ID NO: 1590794 - RNA, 14 nt, Human
cuaaguaaaaccac

SEQ ID NO: 1590795 - RNA, 19 nt, Human
cuaaguaaaaccacagcag

SEQ ID NO: 1590796 - RNA, 20 nt, Human
cuaaguaaaaccacagcagu

SEQ ID NO: 1590797 - RNA, 22 nt, Human
cuaggaaauauuuauuuuaaua

SEQ ID NO: 1590798 - RNA, 22 nt, Human
cuagcuaauguaauaacuguga

SEQ ID NO: 1590799 - RNA, 20 nt, Human
cuaggaaauauuuauuuuaa

SEQ ID NO: 1590800 - RNA, 19 nt, Human
cuaggaaauauuuauuuua

SEQ ID NO: 1590801 - RNA, 15 nt, Human
cuaggaaauauuuau

SEQ ID NO: 1590802 - RNA, 14 nt, Human
cuaggaaauauuua

SEQ ID NO: 1590803 - RNA, 15 nt, Human
cuauaggugcuacaa

SEQ ID NO: 1590804 - RNA, 19 nt, Human
cuagaguuuagcuggaaaa

SEQ ID NO: 1590805 - RNA, 18 nt, Human
cuagaguuuagcuggaaa

SEQ ID NO: 1590806 - RNA, 21 nt, Human
cuauucaggagaguagaacag

SEQ ID NO: 1590807 - RNA, 16 nt, Human
cuauucaaacagucuc

SEQ ID NO: 1590808 - RNA, 12 nt, Human
cuauaauuuaaa

SEQ ID NO: 1590809 - RNA, 13 nt, Human
cuauaauuuaaau

SEQ ID NO: 1590810 - RNA, 19 nt, Human
cuaugaaauauuauguuaa

SEQ ID NO: 1590811 - RNA, 12 nt, Human
cucaaauuugga

SEQ ID NO: 1590812 - RNA, 21 nt, Human
cucauaaaaagccugcaauuu

SEQ ID NO: 1590813 - RNA, 21 nt, Human
cucauuuccaagcaaguauua

SEQ ID NO: 1590814 - RNA, 17 nt, Human
cucauuuccaagcaagu

SEQ ID NO: 1590815 - RNA, 14 nt, Human
cucauuuccaagca

SEQ ID NO: 1590816 - RNA, 13 nt, Human
cucauuuccaagc

SEQ ID NO: 1590817 - RNA, 12 nt, Human
cucauuuccaag

SEQ ID NO: 1590818 - RNA, 14 nt, Human
cuccccucggagaa

SEQ ID NO: 1590819 - RNA, 22 nt, Human
cucaggaaaucaaauaugcaaa

SEQ ID NO: 1590820 - RNA, 15 nt, Human
ccuuggacucauuuu

SEQ ID NO: 1590821 - RNA, 18 nt, Human
ccuucggccuccauccug

SEQ ID NO: 1590822 - RNA, 19 nt, Human
ccuucggccuccauccuga

SEQ ID NO: 1590823 - RNA, 17 nt, Human
ccuucggccuccauccu

SEQ ID NO: 1590824 - RNA, 13 nt, Human
ccugggcagcugc

SEQ ID NO: 1590825 - RNA, 14 nt, Human
ccugggcagcugcc

SEQ ID NO: 1590826 - RNA, 14 nt, Human
ccugaggcuccacu

SEQ ID NO: 1590827 - RNA, 13 nt, Human
ccugaggcuccac

SEQ ID NO: 1590828 - RNA, 17 nt, Human
ccugaggcuccacuugg

SEQ ID NO: 1590829 - RNA, 13 nt, Human
ccugaaagaggaa

SEQ ID NO: 1590830 - RNA, 17 nt, Human
ccugccccugagcccau

SEQ ID NO: 1590831 - RNA, 21 nt, Human
gaaaauauuauguguuuccau

SEQ ID NO: 1590832 - RNA, 18 nt, Human
gaaaauauuuguaucaca

SEQ ID NO: 1590833 - RNA, 22 nt, Human
gaaaaucuacacuccagugaga

SEQ ID NO: 1590834 - RNA, 18 nt, Human
gaaaaucuuauaauuuaa

SEQ ID NO: 1590835 - RNA, 20 nt, Human
gaaaaugauacgcaacauaa

SEQ ID NO: 1590836 - RNA, 16 nt, Human
gaaacacaacuauauu

SEQ ID NO: 1590837 - RNA, 14 nt, Human
gaaacccugucucu

SEQ ID NO: 1590838 - RNA, 23 nt, Human
gaaacucguuaauuuguaguguu

SEQ ID NO: 1590839 - RNA, 17 nt, Human
gaaagagaacuuccaga

SEQ ID NO: 1590840 - RNA, 21 nt, Human
gaaagaggaaugaaguacuca

SEQ ID NO: 1590841 - RNA, 20 nt, Human
gaaagaggcagcuugaaacu

SEQ ID NO: 1590842 - RNA, 17 nt, Human
gaaagcagaacagugau

SEQ ID NO: 1590843 - RNA, 22 nt, Human
gaaagcagaacagugauuacca

SEQ ID NO: 1590844 - RNA, 14 nt, Human
gaaagcagggacuu

SEQ ID NO: 1590845 - RNA, 21 nt, Human
gaaagcuugcccuggugccuc

SEQ ID NO: 1590846 - RNA, 21 nt, Human
cuuuaucaaagggugaaaauu

SEQ ID NO: 1590847 - RNA, 22 nt, Human
cuuuaucaaagggugaaaauua

SEQ ID NO: 1590848 - RNA, 19 nt, Human
cuugaguuuaaauuguaau

SEQ ID NO: 1590849 - RNA, 23 nt, Human
cuugucaauaaaauccauacauu

SEQ ID NO: 1590850 - RNA, 17 nt, Human
cuuguacuuuauuuucu

SEQ ID NO: 1590851 - RNA, 16 nt, Human
cuuucugcuuguguua

SEQ ID NO: 1590852 - RNA, 13 nt, Human
cuucccuuucugc

SEQ ID NO: 1590853 - RNA, 15 nt, Human
cuuauuucauuucuu

SEQ ID NO: 1590854 - RNA, 14 nt, Human
cuuauuucauuucu

SEQ ID NO: 1590855 - RNA, 22 nt, Human
cuuagaugcaguucugaagaag

SEQ ID NO: 1590856 - RNA, 19 nt, Human
cuuauaggaauugacccac

SEQ ID NO: 1590857 - RNA, 14 nt, Human
cuucugugaaagua

SEQ ID NO: 1590858 - RNA, 14 nt, Human
cuugaacccgggag

SEQ ID NO: 1590859 - RNA, 22 nt, Human
cuucugucuucacaacagauua

SEQ ID NO: 1590860 - RNA, 21 nt, Human
cuucugucuucacaacagauu

SEQ ID NO: 1590861 - RNA, 18 nt, Human
cuucugucuucacaacag

SEQ ID NO: 1590862 - RNA, 23 nt, Human
cuguuaaaagaugaaaauauuug

SEQ ID NO: 1590863 - RNA, 21 nt, Human
cuguuaaaagaugaaaauauu

SEQ ID NO: 1590864 - RNA, 20 nt, Human
cuguauuuuaaaagaaugau

SEQ ID NO: 1590865 - RNA, 22 nt, Human
cuguauuuuaaaagaaugauua

SEQ ID NO: 1590866 - RNA, 23 nt, Human
cuguaaucacagcuacuugggag

SEQ ID NO: 1590867 - RNA, 22 nt, Human
cugggggggauuguaaaauggu

SEQ ID NO: 1590868 - RNA, 14 nt, Human
cugccuccccuccu

SEQ ID NO: 1590869 - RNA, 13 nt, Human
cugccuccccucc

SEQ ID NO: 1590870 - RNA, 16 nt, Human
cugcccucuccugggc

SEQ ID NO: 1590871 - RNA, 18 nt, Human
cugcccucuccugggcag

SEQ ID NO: 1590872 - RNA, 19 nt, Human
cugcccucuccugggcagc

SEQ ID NO: 1590873 - RNA, 20 nt, Human
cugcccucuccugggcagcu

SEQ ID NO: 1590874 - RNA, 21 nt, Human
cugcccucuccugggcagcug

SEQ ID NO: 1590875 - RNA, 13 nt, Human
cuggagcucugcc

SEQ ID NO: 1590876 - RNA, 16 nt, Human
cuggagcucugcccau

SEQ ID NO: 1590877 - RNA, 23 nt, Human
cuggccuucggccuccauccuga

SEQ ID NO: 1590878 - RNA, 22 nt, Human
cuggccuucggccuccauccug

SEQ ID NO: 1590879 - RNA, 22 nt, Human
cuggcacaguuuucugagaaag

SEQ ID NO: 1590880 - RNA, 21 nt, Human
cuggcacaguuuucugagaaa

SEQ ID NO: 1590881 - RNA, 15 nt, Human
gagaguagaacagau

SEQ ID NO: 1590882 - RNA, 20 nt, Human
gagacagcucugcauacuca

SEQ ID NO: 1590883 - RNA, 21 nt, Human
gagaaugagagacacacugaa

SEQ ID NO: 1590884 - RNA, 20 nt, Human
gagaaugagagacacacuga

SEQ ID NO: 1590885 - RNA, 15 nt, Human
gacuccaaagaaaug

SEQ ID NO: 1590886 - RNA, 12 nt, Human
gacuccaaagaa

SEQ ID NO: 1590887 - RNA, 11 nt, Human
gacuccaaaga

SEQ ID NO: 1590888 - RNA, 21 nt, Human
gacucauuuuaaaaaauggaa

SEQ ID NO: 1590889 - RNA, 18 nt, Human
gacuccaaagaaauguaa

SEQ ID NO: 1590890 - RNA, 16 nt, Human
gacuccaaagaaaugu

SEQ ID NO: 1590891 - RNA, 16 nt, Human
gacugcauuauauuua

SEQ ID NO: 1590892 - RNA, 14 nt, Human
gacugcauuauauu

SEQ ID NO: 1590893 - RNA, 24 nt, Human
gacugcauuauauuuauuacugua

SEQ ID NO: 1590894 - RNA, 23 nt, Human
gacuucugucuucacaacagauu

SEQ ID NO: 1590895 - RNA, 20 nt, Human
gacuucugucuucacaacag

SEQ ID NO: 1590896 - RNA, 23 nt, Human
gacuucuaaguaaaaccacagca

SEQ ID NO: 1590897 - RNA, 19 nt, Human
gacuucuaaguaaaaccac

SEQ ID NO: 1590898 - RNA, 24 nt, Human
gacuucuaaguaaaaccacagcag

SEQ ID NO: 1590899 - RNA, 18 nt, Human
gacuucuaaguaaaacca

SEQ ID NO: 1590900 - RNA, 17 nt, Human
gacuucuaaguaaaacc

SEQ ID NO: 1590901 - RNA, 16 nt, Human
gacuucuaaguaaaac

SEQ ID NO: 1590902 - RNA, 22 nt, Human
gagaaccuagggugauauuaac

SEQ ID NO: 1590903 - RNA, 21 nt, Human
gagaaccuagggugauauuaa

SEQ ID NO: 1590904 - RNA, 23 nt, Human
gagaacuuccagauccuggaaau

SEQ ID NO: 1590905 - RNA, 22 nt, Human
gagaacuuccagauccuggaaa

SEQ ID NO: 1590906 - RNA, 13 nt, Human
gagaagagcuguu

SEQ ID NO: 1590907 - RNA, 17 nt, Human
gagaaugagagacacac

SEQ ID NO: 1590908 - RNA, 18 nt, Human
gaauucuugaaggaaaau

SEQ ID NO: 1590909 - RNA, 21 nt, Human
gaauugacccacaagaaauga

SEQ ID NO: 1590910 - RNA, 16 nt, Human
gaauugacccacaaga

SEQ ID NO: 1590911 - RNA, 16 nt, Human
gaauuggagcucgugg

SEQ ID NO: 1590912 - RNA, 15 nt, Human
gaauguuaagcagau

SEQ ID NO: 1590913 - RNA, 14 nt, Human
gaauguuaagcaga

SEQ ID NO: 1590914 - RNA, 19 nt, Human
gaaucucauaauuuauaca

SEQ ID NO: 1590915 - RNA, 13 nt, Human
gaaugcuguguua

SEQ ID NO: 1590916 - RNA, 14 nt, Human
gaaugcuguguuaa

SEQ ID NO: 1590917 - RNA, 18 nt, Human
gaaucucauaauuuauac

SEQ ID NO: 1590918 - RNA, 13 nt, Human
gacacaacuauuu

SEQ ID NO: 1590919 - RNA, 16 nt, Human
gacaaggaaaaaauaa

SEQ ID NO: 1590920 - RNA, 17 nt, Human
gacagggaggacgcucu

SEQ ID NO: 1590921 - RNA, 18 nt, Human
gacagggaggacgcucuc

SEQ ID NO: 1590922 - RNA, 20 nt, Human
gacauagaauuaacacauga

SEQ ID NO: 1590923 - RNA, 22 nt, Human
gacccacaagaaaugaaagcag

SEQ ID NO: 1590924 - RNA, 15 nt, Human
gacccacaagaaaug

SEQ ID NO: 1590925 - RNA, 16 nt, Human
gacccaaaaggcagaa

SEQ ID NO: 1590926 - RNA, 21 nt, Human
gaccacugcagaagacaguau

SEQ ID NO: 1590927 - RNA, 16 nt, Human
gacaugggacauuugc

SEQ ID NO: 1590928 - RNA, 17 nt, Human
gacaugggacauuugcu

SEQ ID NO: 1590929 - RNA, 21 nt, Human
gcaaagcugaugacaacuucc

SEQ ID NO: 1590930 - RNA, 23 nt, Human
gcaaagcacugacuucuaaguaa

SEQ ID NO: 1590931 - RNA, 16 nt, Human
gcaaauugucacagga

SEQ ID NO: 1590932 - RNA, 22 nt, Human
gaugguucccuugaugaagaag

SEQ ID NO: 1590933 - RNA, 22 nt, Human
gaugcuagaacucccuuucaac

SEQ ID NO: 1590934 - RNA, 20 nt, Human
gaugcuagaacucccuuuca

SEQ ID NO: 1590935 - RNA, 18 nt, Human
gaugcuagaacucccuuu

SEQ ID NO: 1590936 - RNA, 14 nt, Human
gcaauuucauaugc

SEQ ID NO: 1590937 - RNA, 18 nt, Human
gcacugacuucuaaguaa

SEQ ID NO: 1590938 - RNA, 15 nt, Human
gcacugacuucuaag

SEQ ID NO: 1590939 - RNA, 19 nt, Human
gcacuguggguagacacac

SEQ ID NO: 1590940 - RNA, 18 nt, Human
gaguguacuuaacuauuc

SEQ ID NO: 1590941 - RNA, 19 nt, Human
gagugucuuaauuaaaaga

SEQ ID NO: 1590942 - RNA, 22 nt, Human
gauaaauggcuuccuggcaaua

SEQ ID NO: 1590943 - RNA, 19 nt, Human
gaggcagagguugcaguga

SEQ ID NO: 1590944 - RNA, 14 nt, Human
ggaaugcuguguua

SEQ ID NO: 1590945 - RNA, 23 nt, Human
ggaauuucucccagucauuuaau

SEQ ID NO: 1590946 - RNA, 22 nt, Human
ggaauuggagcucgugggacag

SEQ ID NO: 1590947 - RNA, 16 nt, Human
ggaauuggagcucgug

SEQ ID NO: 1590948 - RNA, 20 nt, Human
ggaagugacgguuuaauggg

SEQ ID NO: 1590949 - RNA, 16 nt, Human
ggacauuugcucaugg

SEQ ID NO: 1590950 - RNA, 14 nt, Human
ggacgcucucuggc

SEQ ID NO: 1590951 - RNA, 13 nt, Human
ggacgcucucugg

SEQ ID NO: 1590952 - RNA, 15 nt, Human
ggacgcucucuggcc

SEQ ID NO: 1590953 - RNA, 19 nt, Human
ggagaaucacuugaacccg

SEQ ID NO: 1590954 - RNA, 15 nt, Human
ggagaaucacuugaa

SEQ ID NO: 1590955 - RNA, 14 nt, Human
gcuuuaucaaaggg

SEQ ID NO: 1590956 - RNA, 17 nt, Human
ggaaaucaaauaugcaa

SEQ ID NO: 1590957 - RNA, 20 nt, Human
gcugucuacacuaagagaga

SEQ ID NO: 1590958 - RNA, 14 nt, Human
ggcauggcugggaa

SEQ ID NO: 1590959 - RNA, 15 nt, Human
ggauuguaaaauggu

SEQ ID NO: 1590960 - RNA, 17 nt, Human
ggauuagggagagaaga

SEQ ID NO: 1590961 - RNA, 20 nt, Human
gcucucuggccuucggccuc

SEQ ID NO: 1590962 - RNA, 19 nt, Human
gcucucuggccuucggccu

SEQ ID NO: 1590963 - RNA, 15 nt, Human
gcucucuggccuucg

SEQ ID NO: 1590964 - RNA, 14 nt, Human
gcucucuggccuuc

SEQ ID NO: 1590965 - RNA, 13 nt, Human
gcucucuggccuu

SEQ ID NO: 1590966 - RNA, 12 nt, Human
gcucucuggccu

SEQ ID NO: 1590967 - RNA, 11 nt, Human
gcucucuggcc

SEQ ID NO: 1590968 - RNA, 17 nt, Human
gcuaagcaaaaugugau

SEQ ID NO: 1590969 - RNA, 14 nt, Human
gcuaagcauuccaa

SEQ ID NO: 1590970 - RNA, 20 nt, Human
gcuccauuuuuagugaaaua

SEQ ID NO: 1590971 - RNA, 12 nt, Human
gcccucuccugg

SEQ ID NO: 1590972 - RNA, 13 nt, Human
gcccucuccuggg

SEQ ID NO: 1590973 - RNA, 14 nt, Human
gcccucuccugggc

SEQ ID NO: 1590974 - RNA, 22 nt, Human
gcccucuccugggcagcugccu

SEQ ID NO: 1590975 - RNA, 23 nt, Human
gcccucuccugggcagcugccuc

SEQ ID NO: 1590976 - RNA, 17 nt, Human
gccuaagugcagccccg

SEQ ID NO: 1590977 - RNA, 22 nt, Human
gccuauauuuuuuguuaaauga

SEQ ID NO: 1590978 - RNA, 15 nt, Human
guacgaagaguauuu

SEQ ID NO: 1590979 - RNA, 15 nt, Human
guaccgcaaugugac

SEQ ID NO: 1590980 - RNA, 15 nt, Human
guagaggagaaacug

SEQ ID NO: 1590981 - RNA, 23 nt, Human
guacuuuauuuucuauaauuuaa

SEQ ID NO: 1590982 - RNA, 13 nt, Human
guaauucaagaaa

SEQ ID NO: 1590983 - RNA, 14 nt, Human
guaauucaagaaaa

SEQ ID NO: 1590984 - RNA, 15 nt, Human
guaauuggaaaggca

SEQ ID NO: 1590985 - RNA, 19 nt, Human
guaaugauaacuggaaacu

SEQ ID NO: 1590986 - RNA, 15 nt, Human
guaaauaguauuuga

SEQ ID NO: 1590987 - RNA, 16 nt, Human
guaaauaguauuugag

SEQ ID NO: 1590988 - RNA, 17 nt, Human
guaaauaguauuugaga

SEQ ID NO: 1590989 - RNA, 18 nt, Human
guaagggaaacugccagc

SEQ ID NO: 1590990 - RNA, 17 nt, Human
guaagggaaacugccag

SEQ ID NO: 1590991 - RNA, 23 nt, Human
guaaaaccacagcaguugaaaag

SEQ ID NO: 1590992 - RNA, 18 nt, Human
guaaaaccacagcaguug

SEQ ID NO: 1590993 - RNA, 16 nt, Human
guaaaaccacagcagu

SEQ ID NO: 1590994 - RNA, 15 nt, Human
guaaaaccacagcag

SEQ ID NO: 1590995 - RNA, 14 nt, Human
guaaaaccacagca

SEQ ID NO: 1590996 - RNA, 22 nt, Human
gguagacacacaugaaguccaa

SEQ ID NO: 1590997 - RNA, 15 nt, Human
gguagacacacauga

SEQ ID NO: 1590998 - RNA, 22 nt, Human
gguacuucaaauccuugaagau

SEQ ID NO: 1590999 - RNA, 19 nt, Human
ggugcuacaaaaacacagc

SEQ ID NO: 1591000 - RNA, 21 nt, Human
ggugcuacaaaaacacagcaa

SEQ ID NO: 1591001 - RNA, 19 nt, Human
guauuugagaguucuaaau

SEQ ID NO: 1591002 - RNA, 21 nt, Human
guauuugagaguucuaaauuu

SEQ ID NO: 1591003 - RNA, 22 nt, Human
guauuucuaugaaauauuaugu

SEQ ID NO: 1591004 - RNA, 17 nt, Human
guauuucuaugaaauau

SEQ ID NO: 1591005 - RNA, 18 nt, Human
guauuuuaaaagaaugau

SEQ ID NO: 1591006 - RNA, 17 nt, Human
guauuuuaaaagaauga

SEQ ID NO: 1591007 - RNA, 16 nt, Human
guauuuuaaaagaaug

SEQ ID NO: 1591008 - RNA, 21 nt, Human
gucaauaaaauccauacauuu

SEQ ID NO: 1591009 - RNA, 15 nt, Human
gucaauaaaauccau

SEQ ID NO: 1591010 - RNA, 14 nt, Human
gucaccucauggaa

SEQ ID NO: 1591011 - RNA, 20 nt, Human
gucccagccagcaguucaga

SEQ ID NO: 1591012 - RNA, 13 nt, Human
gucugacuguuuc

SEQ ID NO: 1591013 - RNA, 23 nt, Human
gucuacacuaagagagaaugaga

SEQ ID NO: 1591014 - RNA, 17 nt, Human
gucuacacuaagagaga

SEQ ID NO: 1591015 - RNA, 17 nt, Human
gugaaaguacauuugga

SEQ ID NO: 1591016 - RNA, 12 nt, Human
gugaaaauuauu

SEQ ID NO: 1591017 - RNA, 15 nt, Human
gugaaaauuauuuug

SEQ ID NO: 1591018 - RNA, 20 nt, Human
gugaaacucguuaauuugua

SEQ ID NO: 1591019 - RNA, 19 nt, Human
gugaaagaaaauaacaaua

SEQ ID NO: 1591020 - RNA, 16 nt, Human
gugagcagucaggaaa

SEQ ID NO: 1591021 - RNA, 16 nt, Human
gugacaagcucacaga

SEQ ID NO: 1591022 - RNA, 18 nt, Human
gugcaaauugucacagga

SEQ ID NO: 1591023 - RNA, 23 nt, Human
uaugacauaaaaacaacuuuaua

SEQ ID NO: 1591024 - RNA, 19 nt, Human
uaugacauaaaaacaacuu

SEQ ID NO: 1591025 - RNA, 22 nt, Human
uaugacauaaaaacaacuuuau

SEQ ID NO: 1591026 - RNA, 23 nt, Human
uaugaauuacauuuguauaaaau

SEQ ID NO: 1591027 - RNA, 17 nt, Human
uaugaauuacauuugua

SEQ ID NO: 1591028 - RNA, 17 nt, Human
uauccuuucuaacaaaa

SEQ ID NO: 1591029 - RNA, 15 nt, Human
uauccuucagccuga

SEQ ID NO: 1591030 - RNA, 16 nt, Human
uaugcuucuguuuuau

SEQ ID NO: 1591031 - RNA, 15 nt, Human
uaugcuucuguuuua

SEQ ID NO: 1591032 - RNA, 14 nt, Human
uaugcaaagcacug

SEQ ID NO: 1591033 - RNA, 13 nt, Human
uaugcaaagcacu

SEQ ID NO: 1591034 - RNA, 12 nt, Human
uaugcaaagcac

SEQ ID NO: 1591035 - RNA, 15 nt, Human
uaugcaaagcacuga

SEQ ID NO: 1591036 - RNA, 16 nt, Human
uaugauucccagccag

SEQ ID NO: 1591037 - RNA, 15 nt, Human
uaguaugaaauuaua

SEQ ID NO: 1591038 - RNA, 23 nt, Human
uaguaugaaauuauauaaguauu

SEQ ID NO: 1591039 - RNA, 16 nt, Human
uaguauuucuaugaaa

SEQ ID NO: 1591040 - RNA, 13 nt, Human
uaguaugaaauua

SEQ ID NO: 1591041 - RNA, 19 nt, Human
uaguauuucuaugaaauau

SEQ ID NO: 1591042 - RNA, 18 nt, Human
uaguauuucuaugaaaua

SEQ ID NO: 1591043 - RNA, 18 nt, Human
uaggugcuacaaaaacac

SEQ ID NO: 1591044 - RNA, 13 nt, Human
uaguaucaaaaga

SEQ ID NO: 1591045 - RNA, 15 nt, Human
uagugcaaauuguca

SEQ ID NO: 1591046 - RNA, 14 nt, Human
uagugcaaauuguc

SEQ ID NO: 1591047 - RNA, 14 nt, Human
uagucaaauugugu

SEQ ID NO: 1591048 - RNA, 13 nt, Human
uagucaaauugug

SEQ ID NO: 1591049 - RNA, 18 nt, Human
uaggccaugggacaggga

SEQ ID NO: 1591050 - RNA, 12 nt, Human
uaggaauugacc

SEQ ID NO: 1591051 - RNA, 20 nt, Human
uaggaauugacccacaagaa

SEQ ID NO: 1591052 - RNA, 16 nt, Human
uaggucagugcaaaua

SEQ ID NO: 1591053 - RNA, 13 nt, Human
uauaugcuucugu

SEQ ID NO: 1591054 - RNA, 13 nt, Human
uauauaacaaugc

SEQ ID NO: 1591055 - RNA, 20 nt, Human
ucaaagagagaaaauaaaga

SEQ ID NO: 1591056 - RNA, 15 nt, Human
ucaaagagagaaaau

SEQ ID NO: 1591057 - RNA, 17 nt, Human
ucaaauaugcaaagcac

SEQ ID NO: 1591058 - RNA, 19 nt, Human
ucaaauaugcaaagcacug

SEQ ID NO: 1591059 - RNA, 18 nt, Human
ucaaauaugcaaagcacu

SEQ ID NO: 1591060 - RNA, 16 nt, Human
ucaaauccuugaagau

SEQ ID NO: 1591061 - RNA, 17 nt, Human
ucaaacauauauaacaa

SEQ ID NO: 1591062 - RNA, 22 nt, Human
ucaaacagucucaggaaaucaa

SEQ ID NO: 1591063 - RNA, 22 nt, Human
ucaacuccaaacugacucuuaa

SEQ ID NO: 1591064 - RNA, 12 nt, Human
ucacauuuaaau

SEQ ID NO: 1591065 - RNA, 22 nt, Human
ucacaagacccaaaaggcagaa

SEQ ID NO: 1591066 - RNA, 14 nt, Human
ucaauaaaauccau

SEQ ID NO: 1591067 - RNA, 14 nt, Human
uauugauaaguuca

SEQ ID NO: 1591068 - RNA, 16 nt, Human
uauugauaaguucaua

SEQ ID NO: 1591069 - RNA, 23 nt, Human
uauugauaaguucauacauugua

SEQ ID NO: 1591070 - RNA, 14 nt, Human
uauuguguugugaa

SEQ ID NO: 1591071 - RNA, 17 nt, Human
uauuguuuaaaaucauu

SEQ ID NO: 1591072 - RNA, 16 nt, Human
uauuguuuaaaaucau

SEQ ID NO: 1591073 - RNA, 15 nt, Human
uauuguuuaaaauca

SEQ ID NO: 1591074 - RNA, 20 nt, Human
uauuguuuaaaaucauuucu

SEQ ID NO: 1591075 - RNA, 14 nt, Human
uauuuauuacugua

SEQ ID NO: 1591076 - RNA, 13 nt, Human
uauuucuaugaaa

SEQ ID NO: 1591077 - RNA, 15 nt, Human
uauuucuaugaaaua

SEQ ID NO: 1591078 - RNA, 14 nt, Human
uauuucuaugaaau

SEQ ID NO: 1591079 - RNA, 12 nt, Human
uauuauguguuu

SEQ ID NO: 1591080 - RNA, 16 nt, Human
uauuauguuaaaacug

SEQ ID NO: 1591081 - RNA, 17 nt, Human
uauuauauuuacaaaug

SEQ ID NO: 1591082 - RNA, 17 nt, Human
uauguucuaagaaguga

SEQ ID NO: 1591083 - RNA, 19 nt, Human
uauguuagugcaaauuguc

SEQ ID NO: 1591084 - RNA, 12 nt, Human
uauguuaaaacu

SEQ ID NO: 1591085 - RNA, 19 nt, Human
uauggaggcuuugcauaga

SEQ ID NO: 1591086 - RNA, 22 nt, Human
uccaaaaagauuuucagaaaau

SEQ ID NO: 1591087 - RNA, 16 nt, Human
uccaaaccaaauaaaa

SEQ ID NO: 1591088 - RNA, 17 nt, Human
uccaaagaaauguaagg

SEQ ID NO: 1591089 - RNA, 14 nt, Human
uccaaagaaaugua

SEQ ID NO: 1591090 - RNA, 16 nt, Human
ucauuaggauggcuag

SEQ ID NO: 1591091 - RNA, 11 nt, Human
ucauagcagcu

SEQ ID NO: 1591092 - RNA, 12 nt, Human
ucauagcagcuu

SEQ ID NO: 1591093 - RNA, 17 nt, Human
ucaucaaugaaugaaug

SEQ ID NO: 1591094 - RNA, 19 nt, Human
uccagguagagggugugua

SEQ ID NO: 1591095 - RNA, 15 nt, Human
uccauacauuugugu

SEQ ID NO: 1591096 - RNA, 20 nt, Human
uccaugggccauaugaaaag

SEQ ID NO: 1591097 - RNA, 23 nt, Human
uccacuuggucugugagaugcua

SEQ ID NO: 1591098 - RNA, 21 nt, Human
uccacuuggucugugagaugc

SEQ ID NO: 1591099 - RNA, 17 nt, Human
ucuacacuaagagagaa

SEQ ID NO: 1591100 - RNA, 16 nt, Human
ucggagaagagcuguu

SEQ ID NO: 1591101 - RNA, 14 nt, Human
ucggagaagagcug

SEQ ID NO: 1591102 - RNA, 12 nt, Human
ucggagaagagc

SEQ ID NO: 1591103 - RNA, 23 nt, Human
ucucaguccaugaagauguagag

SEQ ID NO: 1591104 - RNA, 23 nt, Human
uccuagugaaagaggcagcuuga

SEQ ID NO: 1591105 - RNA, 14 nt, Human
uccuagugaaagag

SEQ ID NO: 1591106 - RNA, 18 nt, Human
uccugccccugagcccau

SEQ ID NO: 1591107 - RNA, 17 nt, Human
uccugccccugagccca

SEQ ID NO: 1591108 - RNA, 20 nt, Human
uccugaggcuccacuugguc

SEQ ID NO: 1591109 - RNA, 19 nt, Human
uccugaggcuccacuuggu

SEQ ID NO: 1591110 - RNA, 21 nt, Human
uccugaggcuccacuuggucu

SEQ ID NO: 1591111 - RNA, 17 nt, Human
uccuggcaauagucaaa

SEQ ID NO: 1591112 - RNA, 16 nt, Human
ugacagaauauguuuc

SEQ ID NO: 1591113 - RNA, 20 nt, Human
ugacaagcucacagaccuuu

SEQ ID NO: 1591114 - RNA, 15 nt, Human
ugacaagcucacaga

SEQ ID NO: 1591115 - RNA, 12 nt, Human
ugacaagcucac

SEQ ID NO: 1591116 - RNA, 20 nt, Human
ugaccacugcagaagacagu

SEQ ID NO: 1591117 - RNA, 18 nt, Human
ugacaugggacauuugcu

SEQ ID NO: 1591118 - RNA, 17 nt, Human
ugacaugggacauuugc

SEQ ID NO: 1591119 - RNA, 16 nt, Human
ugacaugggacauuug

SEQ ID NO: 1591120 - RNA, 18 nt, Human
ugaauuacauuuguauaa

SEQ ID NO: 1591121 - RNA, 16 nt, Human
ugaauuacauuuguau

SEQ ID NO: 1591122 - RNA, 15 nt, Human
ugaauuacauuugua

SEQ ID NO: 1591123 - RNA, 11 nt, Human
ugaaguccaag

SEQ ID NO: 1591124 - RNA, 13 nt, Human
ugaaguccaagca

SEQ ID NO: 1591125 - RNA, 18 nt, Human
ugaaagaggcagcuugaa

SEQ ID NO: 1591126 - RNA, 18 nt, Human
ugaaacccugucucuacu

SEQ ID NO: 1591127 - RNA, 15 nt, Human
ugaaagguacuucaa

SEQ ID NO: 1591128 - RNA, 16 nt, Human
ugaaagguacuucaaa

SEQ ID NO: 1591129 - RNA, 22 nt, Human
ugaaacaacaaauaggaauugu

SEQ ID NO: 1591130 - RNA, 20 nt, Human
ugaaaagcuccauuuuuagu

SEQ ID NO: 1591131 - RNA, 16 nt, Human
ugaaauauugacuuuu

SEQ ID NO: 1591132 - RNA, 12 nt, Human
ucuuugccaagu

SEQ ID NO: 1591133 - RNA, 19 nt, Human
ucuuuccacagaagcucca

SEQ ID NO: 1591134 - RNA, 23 nt, Human
ugagacguuuuuggaagaguagu

SEQ ID NO: 1591135 - RNA, 16 nt, Human
ugagagugaacaaauu

SEQ ID NO: 1591136 - RNA, 16 nt, Human
ugauaacuggaaacuu

SEQ ID NO: 1591137 - RNA, 20 nt, Human
ugaggcuccacuuggucugu

SEQ ID NO: 1591138 - RNA, 18 nt, Human
ugaggcuccacuuggucu

SEQ ID NO: 1591139 - RNA, 14 nt, Human
ugauguguuuauuu

SEQ ID NO: 1591140 - RNA, 18 nt, Human
ugauguguuuauuuauag

SEQ ID NO: 1591141 - RNA, 17 nt, Human
ugaucuuuaaaauacac

SEQ ID NO: 1591142 - RNA, 23 nt, Human
ugaugcuacaggauuugaaauug

SEQ ID NO: 1591143 - RNA, 20 nt, Human
ugaugcuacaggauuugaaa

SEQ ID NO: 1591144 - RNA, 14 nt, Human
ugaucuuuaaaaua

SEQ ID NO: 1591145 - RNA, 24 nt, Human
ugaucagcuuauugucuagugaaa

SEQ ID NO: 1591146 - RNA, 17 nt, Human
ugaucagcuuauugucu

SEQ ID NO: 1591147 - RNA, 22 nt, Human
ugauuaugaauuacauuuguau

SEQ ID NO: 1591148 - RNA, 21 nt, Human
ugauuaugaauuacauuugua

SEQ ID NO: 1591149 - RNA, 22 nt, Human
ugauguuuagaaacacaacuau

SEQ ID NO: 1591150 - RNA, 19 nt, Human
ugauuaugaauuacauuug

SEQ ID NO: 1591151 - RNA, 17 nt, Human
ugauuaugaauuacauu

SEQ ID NO: 1591152 - RNA, 13 nt, Human
ugauuauauguca

SEQ ID NO: 1591153 - RNA, 11 nt, Human
ugcuguguuaa

SEQ ID NO: 1591154 - RNA, 18 nt, Human
ugcuguguuaaauaaacc

SEQ ID NO: 1591155 - RNA, 20 nt, Human
ugcugggggggauuguaaaa

SEQ ID NO: 1591156 - RNA, 17 nt, Human
ugcuagaacucccuuuc

SEQ ID NO: 1591157 - RNA, 15 nt, Human
ugcuagaacucccuu

SEQ ID NO: 1591158 - RNA, 14 nt, Human
ugcuagaacucccu

SEQ ID NO: 1591159 - RNA, 13 nt, Human
ugcuagaacuccc

SEQ ID NO: 1591160 - RNA, 18 nt, Human
ugcuagaacucccuuuca

SEQ ID NO: 1591161 - RNA, 16 nt, Human
ugcauagguuuagcag

SEQ ID NO: 1591162 - RNA, 14 nt, Human
ugcaguucugaaga

SEQ ID NO: 1591163 - RNA, 12 nt, Human
ugcaguucugaa

SEQ ID NO: 1591164 - RNA, 22 nt, Human
ugcaucaauuuuucuuauuuca

SEQ ID NO: 1591165 - RNA, 19 nt, Human
ugcaucagcugcugaaaca

SEQ ID NO: 1591166 - RNA, 13 nt, Human
ugcaucagcugcu

SEQ ID NO: 1591167 - RNA, 17 nt, Human
ugcaugguuuagaaagc

SEQ ID NO: 1591168 - RNA, 16 nt, Human
ugccacuaaauugaca

SEQ ID NO: 1591169 - RNA, 21 nt, Human
ugguauguuuucaggcuagau

SEQ ID NO: 1591170 - RNA, 13 nt, Human
ugguauguuuuca

SEQ ID NO: 1591171 - RNA, 22 nt, Human
uggucacaggaaguagaggagg

SEQ ID NO: 1591172 - RNA, 16 nt, Human
uggucccagccagcag

SEQ ID NO: 1591173 - RNA, 13 nt, Human
ugggcagcugccu

SEQ ID NO: 1591174 - RNA, 14 nt, Human
ugggcagcugccuc

SEQ ID NO: 1591175 - RNA, 15 nt, Human
ugggcagcugccucc

SEQ ID NO: 1591176 - RNA, 17 nt, Human
ugggcagcugccucccc

SEQ ID NO: 1591177 - RNA, 19 nt, Human
ugggcagcugccuccccuc

SEQ ID NO: 1591178 - RNA, 15 nt, Human
uggcacuaguauuuc

SEQ ID NO: 1591179 - RNA, 20 nt, Human
uggcaauagucaaauugugu

SEQ ID NO: 1591180 - RNA, 21 nt, Human
uuaagcagauggaaugcugug

SEQ ID NO: 1591181 - RNA, 13 nt, Human
uuaauauauuucc

SEQ ID NO: 1591182 - RNA, 14 nt, Human
uuaauauauuucca

SEQ ID NO: 1591183 - RNA, 21 nt, Human
uuaaugauaaguaaaugcuag

SEQ ID NO: 1591184 - RNA, 22 nt, Human
uuaaugucaauucuugccaaau

SEQ ID NO: 1591185 - RNA, 22 nt, Human
uuaaaagaauauuuuaacuucc

SEQ ID NO: 1591186 - RNA, 21 nt, Human
uuaaaagaauauuuuaacuuc

SEQ ID NO: 1591187 - RNA, 18 nt, Human
uuaaaagaugaaaauauu

SEQ ID NO: 1591188 - RNA, 15 nt, Human
uuaaaagaugaaaau

SEQ ID NO: 1591189 - RNA, 13 nt, Human
uuaaaagaaugau

SEQ ID NO: 1591190 - RNA, 19 nt, Human
uguuucaaacauauauaac

SEQ ID NO: 1591191 - RNA, 22 nt, Human
uguuucaaacauauauaacaau

SEQ ID NO: 1591192 - RNA, 21 nt, Human
uguuucaaacauauauaacaa

SEQ ID NO: 1591193 - RNA, 21 nt, Human
uuagaugcaguucugaagaag

SEQ ID NO: 1591194 - RNA, 20 nt, Human
uuagaugcaguucugaagaa

SEQ ID NO: 1591195 - RNA, 13 nt, Human
uuagcuggaaaag

SEQ ID NO: 1591196 - RNA, 12 nt, Human
uuagcuggaaaa

SEQ ID NO: 1591197 - RNA, 18 nt, Human
uuaggauguugaaaaagu

SEQ ID NO: 1591198 - RNA, 19 nt, Human
uuagaaacacaacuauauu

SEQ ID NO: 1591199 - RNA, 17 nt, Human
uuacuaguuucccuugc

SEQ ID NO: 1591200 - RNA, 13 nt, Human
uuccaaaauaauu

SEQ ID NO: 1591201 - RNA, 21 nt, Human
uuccaaaauaauuuuaagaaa

SEQ ID NO: 1591202 - RNA, 19 nt, Human
uucaugcauagguuuagca

SEQ ID NO: 1591203 - RNA, 12 nt, Human
uuccaaaauaau

SEQ ID NO: 1591204 - RNA, 20 nt, Human
uuccuuggacucauuuuaaa

SEQ ID NO: 1591205 - RNA, 18 nt, Human
uucccuugaugaagaagu

SEQ ID NO: 1591206 - RNA, 17 nt, Human
uucccuugaugaagaag

SEQ ID NO: 1591207 - RNA, 15 nt, Human
uuauugauaaguuca

SEQ ID NO: 1591208 - RNA, 19 nt, Human
uuauugauaaguucauaca

SEQ ID NO: 1591209 - RNA, 20 nt, Human
uuauugauaaguucauacau

SEQ ID NO: 1591210 - RNA, 17 nt, Human
uuauggcuauaggugcu

SEQ ID NO: 1591211 - RNA, 18 nt, Human
uuauuacuguaagaaaau

SEQ ID NO: 1591212 - RNA, 17 nt, Human
uuauuacuguaagaaaa

SEQ ID NO: 1591213 - RNA, 16 nt, Human
uuauuacuguaagaaa

SEQ ID NO: 1591214 - RNA, 21 nt, Human
uuauggcacuaguauuucuau

SEQ ID NO: 1591215 - RNA, 15 nt, Human
uuauugucuagugaa

SEQ ID NO: 1591216 - RNA, 16 nt, Human
uuauuuuaauaauguu

SEQ ID NO: 1591217 - RNA, 15 nt, Human
uuauuuuaauaaugu

SEQ ID NO: 1591218 - RNA, 17 nt, Human
uuauuuuaauaauguuu

SEQ ID NO: 1591219 - RNA, 17 nt, Human
uucaaauccuugaagau

SEQ ID NO: 1591220 - RNA, 20 nt, Human
uucagacauagaauuaacac

SEQ ID NO: 1591221 - RNA, 16 nt, Human
uucagacauagaauua

SEQ ID NO: 1591222 - RNA, 20 nt, Human
uucagauaaucacaauacau

SEQ ID NO: 1591223 - RNA, 13 nt, Human
uucagagcugccc

SEQ ID NO: 1591224 - RNA, 14 nt, Human
uucagagcugcccu

SEQ ID NO: 1591225 - RNA, 16 nt, Human
uuugagaguucuaaau

SEQ ID NO: 1591226 - RNA, 13 nt, Human
uuugaguucuaca

SEQ ID NO: 1591227 - RNA, 21 nt, Human
uuugaaauuguauuacaaauc

SEQ ID NO: 1591228 - RNA, 18 nt, Human
uuugguaaggggaauuga

SEQ ID NO: 1591229 - RNA, 15 nt, Human
uuucacauaucuagu

SEQ ID NO: 1591230 - RNA, 21 nt, Human
uuucacauaucuaguaugaaa

SEQ ID NO: 1591231 - RNA, 17 nt, Human
uuuauggcacuaguauu

SEQ ID NO: 1591232 - RNA, 21 nt, Human
uuucuaacaaaaaaauauauu

SEQ ID NO: 1591233 - RNA, 12 nt, Human
uuucucuaggaa

SEQ ID NO: 1591234 - RNA, 15 nt, Human
uuuauacaggucaua

SEQ ID NO: 1591235 - RNA, 13 nt, Human
uuuacagagacag

SEQ ID NO: 1591236 - RNA, 19 nt, Human
uuuaauaauguuucaaaca

SEQ ID NO: 1591237 - RNA, 15 nt, Human
uuuaauaauguuuca

SEQ ID NO: 1591238 - RNA, 13 nt, Human
uuuaauaaaccau

SEQ ID NO: 1591239 - RNA, 19 nt, Human
uuguucaauaauaaauauu

SEQ ID NO: 1591240 - RNA, 18 nt, Human
uuguuuaaaaucauuucu

SEQ ID NO: 1591241 - RNA, 17 nt, Human
uuuaaaagaaugauuau

SEQ ID NO: 1591242 - RNA, 14 nt, Human
uuuaaaagaaugau

SEQ ID NO: 1591243 - RNA, 16 nt, Human
uuuaaaaucauuucug

SEQ ID NO: 1591244 - RNA, 19 nt, Human
uuuaaaauacacacucaaa

SEQ ID NO: 1591245 - RNA, 12 nt, Human
uuuaaaaugucu

SEQ ID NO: 1591246 - RNA, 22 nt, Human
uuguagcacugacagauuucca

SEQ ID NO: 1591247 - RNA, 14 nt, Human
uuguagcacugaca

SEQ ID NO: 1591248 - RNA, 16 nt, Human
uuguagcacugacaga

SEQ ID NO: 1591249 - RNA, 17 nt, Human
uuguagcacugacagau

SEQ ID NO: 1591250 - RNA, 18 nt, Human
uuguagcacugacagauu

SEQ ID NO: 1591251 - RNA, 16 nt, Human
uuguacgaagaguauu

SEQ ID NO: 1591252 - RNA, 19 nt, Human
uuguacgaagaguauuuuu

SEQ ID NO: 1591253 - RNA, 16 nt, Human
uuguaccgcaauguga

SEQ ID NO: 1591254 - RNA, 20 nt, Human
uuguaaaauggugugaccac

SEQ ID NO: 1591255 - RNA, 13 nt, Human
uuguaaaauggug

SEQ ID NO: 1591256 - RNA, 12 nt, Human
uuguaaaauggu

SEQ ID NO: 1591257 - RNA, 15 nt, Human
uuggucugugagaug

SEQ ID NO: 1591258 - RNA, 20 nt, Human
uugguaaggggaauugagga

SEQ ID NO: 1591259 - RNA, 18 nt, Human
uugcuaagcauuccaacu

SEQ ID NO: 1591260 - RNA, 16 nt, Human
uugcuaagcauuccaa

SEQ ID NO: 1591261 - RNA, 14 nt, Human
uugaauguuaagca

SEQ ID NO: 1591262 - RNA, 17 nt, Human
uugaauguuaagcagau

SEQ ID NO: 1591263 - RNA, 21 nt, Human
uugaaaaucuuauaauuuaaa

SEQ ID NO: 1591264 - RNA, 18 nt, Human
uucuuuccacagaagcuc

SEQ ID NO: 1591265 - RNA, 24 nt, Human
uucuaaguaaaaccacagcaguug

SEQ ID NO: 1591266 - RNA, 19 nt, Human
uucuuaggguuaugauuaa

SEQ ID NO: 1591267 - RNA, 22 nt, Human
uugccaucccucccuccaccuc

SEQ ID NO: 1591268 - RNA, 23 nt, Human
uugccaucccucccuccaccucc

SEQ ID NO: 1591269 - RNA, 14 nt, Human
uugccaucccuccc

SEQ ID NO: 1591270 - RNA, 16 nt, Human
uugccaucccucccuc

SEQ ID NO: 1591271 - RNA, 17 nt, Human
uugccaucccucccucc

SEQ ID NO: 1591272 - RNA, 18 nt, Human
uugccaucccucccucca

SEQ ID NO: 1591273 - RNA, 13 nt, Human
uugccaucccucc

SEQ ID NO: 1591274 - RNA, 20 nt, Human
uugauaugccuuuucccaac

SEQ ID NO: 1591275 - RNA, 18 nt, Human
caagaaaacaacuucaau

SEQ ID NO: 1591276 - RNA, 15 nt, Human
caagaaaacaacuuc

SEQ ID NO: 1591277 - RNA, 19 nt, Human
caagacugcacaucaaaau

SEQ ID NO: 1591278 - RNA, 17 nt, Human
caaggcugauuaaacca

SEQ ID NO: 1591279 - RNA, 21 nt, Human
caagccagauuuuccugaaaa

SEQ ID NO: 1591280 - RNA, 23 nt, Human
caauacaucccuuaccugggaaa

SEQ ID NO: 1591281 - RNA, 19 nt, Human
caaagcugaugacaacuuc

SEQ ID NO: 1591282 - RNA, 22 nt, Human
caaaauugauguguuuauuuau

SEQ ID NO: 1591283 - RNA, 15 nt, Human
caaaauugauguguu

SEQ ID NO: 1591284 - RNA, 16 nt, Human
caaaauugauguguuu

SEQ ID NO: 1591285 - RNA, 22 nt, Human
caaaauuuuuucucuaggaaau

SEQ ID NO: 1591286 - RNA, 21 nt, Human
caaaauuuuuucucuaggaaa

SEQ ID NO: 1591287 - RNA, 16 nt, Human
caaaauuuuuucucua

SEQ ID NO: 1591288 - RNA, 15 nt, Human
caaauugugugaaag

SEQ ID NO: 1591289 - RNA, 21 nt, Human
caaauaugcaaagcacugacu

SEQ ID NO: 1591290 - RNA, 13 nt, Human
auuuuccugaaaa

SEQ ID NO: 1591291 - RNA, 14 nt, Human
caaaaacacagcaa

SEQ ID NO: 1591292 - RNA, 13 nt, Human
caaaaacacagca

SEQ ID NO: 1591293 - RNA, 17 nt, Human
caaaaacacagcaaggg

SEQ ID NO: 1591294 - RNA, 15 nt, Human
caaaaacacagcaag

SEQ ID NO: 1591295 - RNA, 23 nt, Human
caaaacuucagacauagaauuaa

SEQ ID NO: 1591296 - RNA, 19 nt, Human
caaaaaucucaauauuuca

SEQ ID NO: 1591297 - RNA, 20 nt, Human
cacaguuuucugagaaagac

SEQ ID NO: 1591298 - RNA, 19 nt, Human
cacaguuuucugagaaaga

SEQ ID NO: 1591299 - RNA, 17 nt, Human
cacaguuuucugagaaa

SEQ ID NO: 1591300 - RNA, 16 nt, Human
cacaguuuucugagaa

SEQ ID NO: 1591301 - RNA, 14 nt, Human
aauuaaauuuugag

SEQ ID NO: 1591302 - RNA, 22 nt, Human
aauuaaauuuugaguucuacau

SEQ ID NO: 1591303 - RNA, 20 nt, Human
aauuaguuuuauaugcuucu

SEQ ID NO: 1591304 - RNA, 17 nt, Human
aauuaguuuuauaugcu

SEQ ID NO: 1591305 - RNA, 14 nt, Human
aauuaguuuuauau

SEQ ID NO: 1591306 - RNA, 18 nt, Human
aaugauaaguaaaugcua

SEQ ID NO: 1591307 - RNA, 20 nt, Human
aaugauaacuggaaacuuca

SEQ ID NO: 1591308 - RNA, 21 nt, Human
aaugauaaguaaaugcuaggu

SEQ ID NO: 1591309 - RNA, 17 nt, Human
aaugauaacuggaaacu

SEQ ID NO: 1591310 - RNA, 18 nt, Human
aaucucauaauuuauaca

SEQ ID NO: 1591311 - RNA, 14 nt, Human
aauccauacauuug

SEQ ID NO: 1591312 - RNA, 13 nt, Human
aauccauacauuu

SEQ ID NO: 1591313 - RNA, 14 nt, Human
aauauuauguguuu

SEQ ID NO: 1591314 - RNA, 16 nt, Human
aauauuauguuaaaac

SEQ ID NO: 1591315 - RNA, 15 nt, Human
aaucaagaaacuuaa

SEQ ID NO: 1591316 - RNA, 13 nt, Human
aaucacaauacau

SEQ ID NO: 1591317 - RNA, 18 nt, Human
aaguauguguaaaaugug

SEQ ID NO: 1591318 - RNA, 21 nt, Human
aauaauccuaaacauaugaau

SEQ ID NO: 1591319 - RNA, 19 nt, Human
aauaaaauggguuuuacug

SEQ ID NO: 1591320 - RNA, 14 nt, Human
aauaaaauggguuu

SEQ ID NO: 1591321 - RNA, 13 nt, Human
aagccagauuuuc

SEQ ID NO: 1591322 - RNA, 16 nt, Human
aagauuuaccacuugu

SEQ ID NO: 1591323 - RNA, 14 nt, Human
aaauaguauuugag

SEQ ID NO: 1591324 - RNA, 19 nt, Human
aaaucaaauaugcaaagca

SEQ ID NO: 1591325 - RNA, 18 nt, Human
aaaucaaauaugcaaagc

SEQ ID NO: 1591326 - RNA, 18 nt, Human
aaauggcuuccuggcaau

SEQ ID NO: 1591327 - RNA, 12 nt, Human
aaauaacaauga

SEQ ID NO: 1591328 - RNA, 16 nt, Human
aaagaugaaaauauuu

SEQ ID NO: 1591329 - RNA, 13 nt, Human
aaagaugaaaaua

SEQ ID NO: 1591330 - RNA, 17 nt, Human
aaagaugaaaauauuug

SEQ ID NO: 1591331 - RNA, 15 nt, Human
aaacugccagcaacg

SEQ ID NO: 1591332 - RNA, 14 nt, Human
aaacugccagcaac

SEQ ID NO: 1591333 - RNA, 17 nt, Human
aaacugacucuuaagaa

SEQ ID NO: 1591334 - RNA, 16 nt, Human
aaacugacucuuaaga

SEQ ID NO: 1591335 - RNA, 19 nt, Human
aaacugccagcaacgcagg

SEQ ID NO: 1591336 - RNA, 16 nt, Human
aacuuuggaacaagau

SEQ ID NO: 1591337 - RNA, 14 nt, Human
aagaaauguaaggg

SEQ ID NO: 1591338 - RNA, 13 nt, Human
aagaaauguaagg

SEQ ID NO: 1591339 - RNA, 15 nt, Human
aacacgagcaggcua

SEQ ID NO: 1591340 - RNA, 22 nt, Human
aaccacuggaaaguuuaugguu

SEQ ID NO: 1591341 - RNA, 21 nt, Human
acucauaaaaagccugcaauu

SEQ ID NO: 1591342 - RNA, 14 nt, Human
acucaaaucaagaa

SEQ ID NO: 1591343 - RNA, 14 nt, Human
acuagcuauggugu

SEQ ID NO: 1591344 - RNA, 13 nt, Human
acucccuuucaac

SEQ ID NO: 1591345 - RNA, 12 nt, Human
acucccuuucaa

SEQ ID NO: 1591346 - RNA, 16 nt, Human
acuaagagagaaugag

SEQ ID NO: 1591347 - RNA, 12 nt, Human
acuguuuugaau

SEQ ID NO: 1591348 - RNA, 21 nt, Human
acuuggucugugagaugcuag

SEQ ID NO: 1591349 - RNA, 15 nt, Human
acuuggucugugaga

SEQ ID NO: 1591350 - RNA, 14 nt, Human
acuuggucugugag

SEQ ID NO: 1591351 - RNA, 19 nt, Human
acuuguaaaggaauuuaaa

SEQ ID NO: 1591352 - RNA, 20 nt, Human
acuuguaaaggaauuuaaaa

SEQ ID NO: 1591353 - RNA, 23 nt, Human
agaaaauauuauguguuuccaua

SEQ ID NO: 1591354 - RNA, 14 nt, Human
agaaaauaacaaua

SEQ ID NO: 1591355 - RNA, 19 nt, Human
acuuuauacccagaaaguu

SEQ ID NO: 1591356 - RNA, 13 nt, Human
acaacuuuauacc

SEQ ID NO: 1591357 - RNA, 14 nt, Human
acaacuuuauaccc

SEQ ID NO: 1591358 - RNA, 17 nt, Human
acaacuucaauauccaa

SEQ ID NO: 1591359 - RNA, 18 nt, Human
acaacuucccagugaauu

SEQ ID NO: 1591360 - RNA, 16 nt, Human
acaacuauuuuuccaa

SEQ ID NO: 1591361 - RNA, 15 nt, Human
aauuuuauaucuugu

SEQ ID NO: 1591362 - RNA, 20 nt, Human
aauuuugaguucuacauaag

SEQ ID NO: 1591363 - RNA, 13 nt, Human
acaacuauauugu

SEQ ID NO: 1591364 - RNA, 16 nt, Human
acagaauauguuucaa

SEQ ID NO: 1591365 - RNA, 17 nt, Human
acagaauauguuucaaa

SEQ ID NO: 1591366 - RNA, 19 nt, Human
acagaauauguuucaaacu

SEQ ID NO: 1591367 - RNA, 21 nt, Human
acagaauauguuucaaacuuu

SEQ ID NO: 1591368 - RNA, 18 nt, Human
acagcaguugaaaagacu

SEQ ID NO: 1591369 - RNA, 15 nt, Human
acagcaguugaaaag

SEQ ID NO: 1591370 - RNA, 15 nt, Human
acagccagacuggca

SEQ ID NO: 1591371 - RNA, 13 nt, Human
acagccagacugg

SEQ ID NO: 1591372 - RNA, 16 nt, Human
acagccagacuggcac

SEQ ID NO: 1591373 - RNA, 19 nt, Human
acaggucauauuaauauau

SEQ ID NO: 1591374 - RNA, 20 nt, Human
acagcucugcauacucauua

SEQ ID NO: 1591375 - RNA, 15 nt, Human
acccacaagaaauga

SEQ ID NO: 1591376 - RNA, 16 nt, Human
acccaaguccaagcau

SEQ ID NO: 1591377 - RNA, 14 nt, Human
acauuuguauaaaa

SEQ ID NO: 1591378 - RNA, 18 nt, Human
acauuugcucauggaauu

SEQ ID NO: 1591379 - RNA, 13 nt, Human
acauguuacaaca

SEQ ID NO: 1591380 - RNA, 15 nt, Human
auauccuuucuaaca

SEQ ID NO: 1591381 - RNA, 16 nt, Human
auauccuuucuaacaa

SEQ ID NO: 1591382 - RNA, 18 nt, Human
auaucacuugucaauaaa

SEQ ID NO: 1591383 - RNA, 22 nt, Human
auauuuauuacuguaagaaaau

SEQ ID NO: 1591384 - RNA, 18 nt, Human
auauuuauuuuaauaaug

SEQ ID NO: 1591385 - RNA, 19 nt, Human
auauuuauuacuguaagaa

SEQ ID NO: 1591386 - RNA, 14 nt, Human
auauuuauuacugu

SEQ ID NO: 1591387 - RNA, 23 nt, Human
auauuucagauaaucacaauaca

SEQ ID NO: 1591388 - RNA, 22 nt, Human
auauaaguauucuaaauuuuau

SEQ ID NO: 1591389 - RNA, 14 nt, Human
auaauuacuauguc

SEQ ID NO: 1591390 - RNA, 13 nt, Human
agucaaauugugu

SEQ ID NO: 1591391 - RNA, 17 nt, Human
agucaaauugugugaaa

SEQ ID NO: 1591392 - RNA, 15 nt, Human
agucaaauuguguga

SEQ ID NO: 1591393 - RNA, 21 nt, Human
aguccaagcauuuagauguau

SEQ ID NO: 1591394 - RNA, 16 nt, Human
aguccaagcauuuaga

SEQ ID NO: 1591395 - RNA, 18 nt, Human
agugauuaccagggacug

SEQ ID NO: 1591396 - RNA, 19 nt, Human
aguuguaccgcaaugugac

SEQ ID NO: 1591397 - RNA, 17 nt, Human
auguaauaacugugaag

SEQ ID NO: 1591398 - RNA, 22 nt, Human
auguaagggaaacugccagcaa

SEQ ID NO: 1591399 - RNA, 21 nt, Human
auguaagggaaacugccagca

SEQ ID NO: 1591400 - RNA, 16 nt, Human
augucaaucagccuag

SEQ ID NO: 1591401 - RNA, 14 nt, Human
augccuuuucccaa

SEQ ID NO: 1591402 - RNA, 20 nt, Human
augaaacacucaguuguuca

SEQ ID NO: 1591403 - RNA, 14 nt, Human
augacucagaauau

SEQ ID NO: 1591404 - RNA, 22 nt, Human
aucuuauaauuuaaaauaugcu

SEQ ID NO: 1591405 - RNA, 13 nt, Human
auccuuucuaaca

SEQ ID NO: 1591406 - RNA, 17 nt, Human
aucagcugcugaaacaa

SEQ ID NO: 1591407 - RNA, 14 nt, Human
agacacaacuauuu

SEQ ID NO: 1591408 - RNA, 17 nt, Human
agacugcauuauauuua

SEQ ID NO: 1591409 - RNA, 21 nt, Human
agauaggucagugcaaauacu

SEQ ID NO: 1591410 - RNA, 19 nt, Human
agccagauuuuccugaaaa

SEQ ID NO: 1591411 - RNA, 15 nt, Human
agccagauuuuccug

SEQ ID NO: 1591412 - RNA, 20 nt, Human
agcaguucagagcugcccuc

SEQ ID NO: 1591413 - RNA, 19 nt, Human
agcaguucagagcugcccu

SEQ ID NO: 1591414 - RNA, 16 nt, Human
agauguagaggagaaa

SEQ ID NO: 1591415 - RNA, 21 nt, Human
agaugggagaaucacuugaac

SEQ ID NO: 1591416 - RNA, 14 nt, Human
agauguagaggaga

SEQ ID NO: 1591417 - RNA, 23 nt, Human
agcaguugaaaagacuccaaaga

SEQ ID NO: 1591418 - RNA, 16 nt, Human
agcaguucagagcugc

SEQ ID NO: 1591419 - RNA, 17 nt, Human
agcaguucagagcugcc

SEQ ID NO: 1591420 - RNA, 18 nt, Human
agcaguucagagcugccc

SEQ ID NO: 1591421 - RNA, 15 nt, Human
agguuaauuccaauu

SEQ ID NO: 1591422 - RNA, 22 nt, Human
agguuaauuccaauuauaugag

SEQ ID NO: 1591423 - RNA, 19 nt, Human
agcuuccuucugugaaagu

SEQ ID NO: 1591424 - RNA, 14 nt, Human
agcuguaugauucc

SEQ ID NO: 1591425 - RNA, 14 nt, Human
aggauguugaaaaa

SEQ ID NO: 1591426 - RNA, 17 nt, Human
aggauguugaaaaaguu

SEQ ID NO: 1591427 - RNA, 12 nt, Human
aaaacaacuuua

SEQ ID NO: 1591428 - RNA, 14 nt, Human
aaaacaaggaugaa

SEQ ID NO: 1591429 - RNA, 13 nt, Human
aaaacacagcaag

SEQ ID NO: 1591430 - RNA, 12 nt, Human
aaaacacagcaa

SEQ ID NO: 1591431 - RNA, 18 nt, Human
aaaacacagcaaggguga

SEQ ID NO: 1591432 - RNA, 17 nt, Human
aaaacaaggaugaauua

SEQ ID NO: 1591433 - RNA, 12 nt, Human
aaaaacaacuuu

SEQ ID NO: 1591434 - RNA, 12 nt, Human
aaaaacacagca

SEQ ID NO: 1591435 - RNA, 15 nt, Human
guguaaaaugugaag

SEQ ID NO: 1591436 - RNA, 15 nt, Human
aagauagcagggcau

SEQ ID NO: 1591437 - RNA, 22 nt, Human
gugucuuaauuaaaagaauauu

SEQ ID NO: 1591438 - RNA, 17 nt, Human
aagcaacccaaauguuc

SEQ ID NO: 1591439 - RNA, 13 nt, Human
aagcaaaauguga

SEQ ID NO: 1591440 - RNA, 19 nt, Human
aagcauuguaaaugugcuu

SEQ ID NO: 1591441 - RNA, 20 nt, Human
aagcacugacuucuaaguaa

SEQ ID NO: 1591442 - RNA, 19 nt, Human
aagcacugacuucuaagua

SEQ ID NO: 1591443 - RNA, 17 nt, Human
aagcacugacuucuaag

SEQ ID NO: 1591444 - RNA, 16 nt, Human
aagcacugacuucuaa

SEQ ID NO: 1591445 - RNA, 16 nt, Human
aagcacuaaacaaaga

SEQ ID NO: 1591446 - RNA, 21 nt, Human
guuauugauaaguucauacau

SEQ ID NO: 1591447 - RNA, 22 nt, Human
guuauugauaaguucauacauu

SEQ ID NO: 1591448 - RNA, 20 nt, Human
guuauuauauuuacaaaugg

SEQ ID NO: 1591449 - RNA, 19 nt, Human
guuauuauauuuacaaaug

SEQ ID NO: 1591450 - RNA, 19 nt, Human
guuaauuccaauuauauga

SEQ ID NO: 1591451 - RNA, 21 nt, Human
aagccuuggggcugaugcagu

SEQ ID NO: 1591452 - RNA, 22 nt, Human
guucuagcauggcauauuuuuc

SEQ ID NO: 1591453 - RNA, 18 nt, Human
guucccuugaugaagaag

SEQ ID NO: 1591454 - RNA, 18 nt, Human
aagcuuauuaaaacucau

SEQ ID NO: 1591455 - RNA, 23 nt, Human
aagcuuguauuccuuuuucucuc

SEQ ID NO: 1591456 - RNA, 19 nt, Human
aaguauguguaaaauguga

SEQ ID NO: 1591457 - RNA, 21 nt, Human
aaguauguuagugcaaauugu

SEQ ID NO: 1591458 - RNA, 19 nt, Human
aaguauguuagugcaaauu

SEQ ID NO: 1591459 - RNA, 18 nt, Human
aaguauguuagugcaaau

SEQ ID NO: 1591460 - RNA, 14 nt, Human
guuuaugauuccac

SEQ ID NO: 1591461 - RNA, 17 nt, Human
aagggcuguuauaaucu

SEQ ID NO: 1591462 - RNA, 15 nt, Human
aagggcuguuauaau

SEQ ID NO: 1591463 - RNA, 13 nt, Human
uaaaaugugaagu

SEQ ID NO: 1591464 - RNA, 11 nt, Human
uaaaaugugaa

SEQ ID NO: 1591465 - RNA, 9 nt, Human
uaaaauggu

SEQ ID NO: 1591466 - RNA, 14 nt, Human
uaaaaauauugugu

SEQ ID NO: 1591467 - RNA, 22 nt, Human
uaaaaagccugcaauuucauau

SEQ ID NO: 1591468 - RNA, 21 nt, Human
uaaaaaaaaaccugagcccca

SEQ ID NO: 1591469 - RNA, 21 nt, Human
uaaaaauauuguguugugaau

SEQ ID NO: 1591470 - RNA, 22 nt, Human
uaaaaauauuguguugugaaug

SEQ ID NO: 1591471 - RNA, 14 nt, Human
uaaaaccacagcag

SEQ ID NO: 1591472 - RNA, 15 nt, Human
uaaaaccacagcagu

SEQ ID NO: 1591473 - RNA, 16 nt, Human
uaaaagaauauuuuaa

SEQ ID NO: 1591474 - RNA, 13 nt, Human
uaaaagaauauuu

SEQ ID NO: 1591475 - RNA, 21 nt, Human
uaaaauacacacucaaaucaa

SEQ ID NO: 1591476 - RNA, 22 nt, Human
uaaaauaauuuuuauauuugaa

SEQ ID NO: 1591477 - RNA, 21 nt, Human
guauucuaaauuuuauaucuu

SEQ ID NO: 1591478 - RNA, 24 nt, Human
guauucuaaauuuuauaucuugua

SEQ ID NO: 1591479 - RNA, 19 nt, Human
guauucuagcuaauguaau

SEQ ID NO: 1591480 - RNA, 11 nt, Human
aaaucauuucu

SEQ ID NO: 1591481 - RNA, 17 nt, Human
aaauuccaagugauuga

SEQ ID NO: 1591482 - RNA, 17 nt, Human
aaauuguauuacaaauc

SEQ ID NO: 1591483 - RNA, 15 nt, Human
aaaugugcuuuuaaa

SEQ ID NO: 1591484 - RNA, 18 nt, Human
aaaugugccuucauuuuu

SEQ ID NO: 1591485 - RNA, 14 nt, Human
gucaggaaagagaa

SEQ ID NO: 1591486 - RNA, 15 nt, Human
gucacaggaaguaga

SEQ ID NO: 1591487 - RNA, 13 nt, Human
gucacaggaagua

SEQ ID NO: 1591488 - RNA, 21 nt, Human
gucaauuuuguuauguauauu

SEQ ID NO: 1591489 - RNA, 20 nt, Human
gucacaggaaguagaggagg

SEQ ID NO: 1591490 - RNA, 23 nt, Human
guccaugaagauguagaggagaa

SEQ ID NO: 1591491 - RNA, 22 nt, Human
guccaugaagauguagaggaga

SEQ ID NO: 1591492 - RNA, 20 nt, Human
aacacagcaagggugauggg

SEQ ID NO: 1591493 - RNA, 13 nt, Human
aacagucucagga

SEQ ID NO: 1591494 - RNA, 12 nt, Human
aacauauauaac

SEQ ID NO: 1591495 - RNA, 14 nt, Human
aacagucucaggaa

SEQ ID NO: 1591496 - RNA, 14 nt, Human
aacauaaaauacaa

SEQ ID NO: 1591497 - RNA, 23 nt, Human
aacuauucaggagaguagaacag

SEQ ID NO: 1591498 - RNA, 24 nt, Human
aacucauuuuuguuuucauuaucu

SEQ ID NO: 1591499 - RNA, 21 nt, Human
aacucauuuuuguuuucauua

SEQ ID NO: 1591500 - RNA, 14 nt, Human
gucuuaauuaaaag

SEQ ID NO: 1591501 - RNA, 13 nt, Human
gucuucacaacag

SEQ ID NO: 1591502 - RNA, 14 nt, Human
gugaaguuuacauu

SEQ ID NO: 1591503 - RNA, 17 nt, Human
aacugugaaguuuacau

SEQ ID NO: 1591504 - RNA, 19 nt, Human
aacugugaaguuuacauug

SEQ ID NO: 1591505 - RNA, 23 nt, Human
aacuuccuuggacucauuuuaaa

SEQ ID NO: 1591506 - RNA, 21 nt, Human
aacuucagcgguuuauauaag

SEQ ID NO: 1591507 - RNA, 13 nt, Human
aacuucagacaua

SEQ ID NO: 1591508 - RNA, 18 nt, Human
aacuucagcgguuuauau

SEQ ID NO: 1591509 - RNA, 22 nt, Human
aacuuccuuggacucauuuuaa

SEQ ID NO: 1591510 - RNA, 17 nt, Human
gugauuaccagggacug

SEQ ID NO: 1591511 - RNA, 16 nt, Human
gugauuaccagggacu

SEQ ID NO: 1591512 - RNA, 11 nt, Human
gugauuaccag

SEQ ID NO: 1591513 - RNA, 14 nt, Human
aagaaaacaacuuc

SEQ ID NO: 1591514 - RNA, 11 nt, Human
aagaaacauuu

SEQ ID NO: 1591515 - RNA, 16 nt, Human
aagaaagaaaaucagg

SEQ ID NO: 1591516 - RNA, 14 nt, Human
aagaaagaaaauca

SEQ ID NO: 1591517 - RNA, 22 nt, Human
gugcuacaaaaacacagcaagg

SEQ ID NO: 1591518 - RNA, 22 nt, Human
aagaagcaccaaucaugaauua

SEQ ID NO: 1591519 - RNA, 22 nt, Human
uagagcaaaauugauguguuua

SEQ ID NO: 1591520 - RNA, 14 nt, Human
uagagcaaaauuga

SEQ ID NO: 1591521 - RNA, 21 nt, Human
uagagcaaaauugauguguuu

SEQ ID NO: 1591522 - RNA, 22 nt, Human
uagaggagaaacuggaacucuc

SEQ ID NO: 1591523 - RNA, 18 nt, Human
acaaaaggauaaugaaua

SEQ ID NO: 1591524 - RNA, 22 nt, Human
uagcauggcauauuuuucacau

SEQ ID NO: 1591525 - RNA, 21 nt, Human
uagcauggcauauuuuucaca

SEQ ID NO: 1591526 - RNA, 15 nt, Human
uagaugcaguucuga

SEQ ID NO: 1591527 - RNA, 18 nt, Human
uagcaugucgucaaagcu

SEQ ID NO: 1591528 - RNA, 20 nt, Human
acaagacccaaaaggcagaa

SEQ ID NO: 1591529 - RNA, 18 nt, Human
acaaauuuacagagacag

SEQ ID NO: 1591530 - RNA, 19 nt, Human
acaaauuuacagagacaga

SEQ ID NO: 1591531 - RNA, 12 nt, Human
uagcuaauguaa

SEQ ID NO: 1591532 - RNA, 19 nt, Human
uagcuaauguaauaacugu

SEQ ID NO: 1591533 - RNA, 23 nt, Human
acaauacaucccuuaccugggaa

SEQ ID NO: 1591534 - RNA, 14 nt, Human
acaagacugcacau

SEQ ID NO: 1591535 - RNA, 13 nt, Human
acaagacugcaca

SEQ ID NO: 1591536 - RNA, 15 nt, Human
uagggagagaagaua

SEQ ID NO: 1591537 - RNA, 14 nt, Human
uagggagagaagau

SEQ ID NO: 1591538 - RNA, 18 nt, Human
uaggcaaccuuuauuuuu

SEQ ID NO: 1591539 - RNA, 18 nt, Human
uaggaaauauuuauuuua

SEQ ID NO: 1591540 - RNA, 19 nt, Human
uaggaaauauuuauuuuaa

SEQ ID NO: 1591541 - RNA, 18 nt, Human
acacaugauccugcaauu

SEQ ID NO: 1591542 - RNA, 15 nt, Human
acacaucagcuugcc

SEQ ID NO: 1591543 - RNA, 15 nt, Human
acacaugaaguccaa

SEQ ID NO: 1591544 - RNA, 19 nt, Human
acacucaaaucaagaaacu

SEQ ID NO: 1591545 - RNA, 14 nt, Human
acacuaagagagaa

SEQ ID NO: 1591546 - RNA, 13 nt, Human
acacuaagagaga

SEQ ID NO: 1591547 - RNA, 23 nt, Human
uaguguuggagaagaacugaaau

SEQ ID NO: 1591548 - RNA, 22 nt, Human
uagugaaacucguuaauuugua

SEQ ID NO: 1591549 - RNA, 22 nt, Human
acaaugcuguauuuuaaaagaa

SEQ ID NO: 1591550 - RNA, 15 nt, Human
acacacucaaaucaa

SEQ ID NO: 1591551 - RNA, 20 nt, Human
acacacucaaaucaagaaac

SEQ ID NO: 1591552 - RNA, 19 nt, Human
uaugaaauuauauaaguau

SEQ ID NO: 1591553 - RNA, 18 nt, Human
acagcaagggugauggga

SEQ ID NO: 1591554 - RNA, 20 nt, Human
acagauuuccauccuaguca

SEQ ID NO: 1591555 - RNA, 21 nt, Human
uaugauuaaguaaugauaacu

SEQ ID NO: 1591556 - RNA, 20 nt, Human
uaugauuaaguaaugauaac

SEQ ID NO: 1591557 - RNA, 16 nt, Human
uaugauuaaguaauga

SEQ ID NO: 1591558 - RNA, 19 nt, Human
uaugccccauucaacaucu

SEQ ID NO: 1591559 - RNA, 16 nt, Human
acagccucuuagaugc

SEQ ID NO: 1591560 - RNA, 19 nt, Human
uauccaaaccaaauaaaaa

SEQ ID NO: 1591561 - RNA, 17 nt, Human
uaucucaaaacugcacu

SEQ ID NO: 1591562 - RNA, 15 nt, Human
uauauuguuugcuaa

SEQ ID NO: 1591563 - RNA, 17 nt, Human
acaggaaguagaggagg

SEQ ID NO: 1591564 - RNA, 21 nt, Human
acagggaggacgcucucuggc

SEQ ID NO: 1591565 - RNA, 20 nt, Human
acagggaggacgcucucugg

SEQ ID NO: 1591566 - RNA, 18 nt, Human
acagucaccucauggaau

SEQ ID NO: 1591567 - RNA, 17 nt, Human
acagucaccucauggaa

SEQ ID NO: 1591568 - RNA, 16 nt, Human
acagucaccucaugga

SEQ ID NO: 1591569 - RNA, 14 nt, Human
uauuacuguaagaa

SEQ ID NO: 1591570 - RNA, 15 nt, Human
uauuagaauaccaca

SEQ ID NO: 1591571 - RNA, 15 nt, Human
uauucaaacagucuc

SEQ ID NO: 1591572 - RNA, 23 nt, Human
uauucaaacagucucaggaaauc

SEQ ID NO: 1591573 - RNA, 23 nt, Human
uacaggucauauuaauauauuuc

SEQ ID NO: 1591574 - RNA, 20 nt, Human
uacaucccuuaccugggaaa

SEQ ID NO: 1591575 - RNA, 17 nt, Human
uacauuguaaauaguau

SEQ ID NO: 1591576 - RNA, 13 nt, Human
aauguuaagcaga

SEQ ID NO: 1591577 - RNA, 13 nt, Human
aaugcuguguuaa

SEQ ID NO: 1591578 - RNA, 16 nt, Human
aaugcuguauuuuaaa

SEQ ID NO: 1591579 - RNA, 18 nt, Human
uacacuaagagagaauga

SEQ ID NO: 1591580 - RNA, 14 nt, Human
uacacuaagagaga

SEQ ID NO: 1591581 - RNA, 13 nt, Human
aauugauguguuu

SEQ ID NO: 1591582 - RNA, 14 nt, Human
aauugauguguuua

SEQ ID NO: 1591583 - RNA, 22 nt, Human
aauugacccacaagaaaugaaa

SEQ ID NO: 1591584 - RNA, 14 nt, Human
uacuguaagaaaau

SEQ ID NO: 1591585 - RNA, 19 nt, Human
uacauuguacgaagaguau

SEQ ID NO: 1591586 - RNA, 15 nt, Human
aauucagaaggaucu

SEQ ID NO: 1591587 - RNA, 18 nt, Human
aauuccaagugauugaaa

SEQ ID NO: 1591588 - RNA, 22 nt, Human
aauuccacuuauaggaauugac

SEQ ID NO: 1591589 - RNA, 21 nt, Human
aauuauuuuguucauacauau

SEQ ID NO: 1591590 - RNA, 22 nt, Human
aauuauuuuguucauacauauu

SEQ ID NO: 1591591 - RNA, 16 nt, Human
aauuauuuuguucaua

SEQ ID NO: 1591592 - RNA, 18 nt, Human
aauuauuuuguucauaca

SEQ ID NO: 1591593 - RNA, 19 nt, Human
aauuauuuuguucauacau

SEQ ID NO: 1591594 - RNA, 20 nt, Human
aauuauuuuguucauacaua

SEQ ID NO: 1591595 - RNA, 19 nt, Human
aaugaaacacucaguuguu

SEQ ID NO: 1591596 - RNA, 22 nt, Human
aaugaauggcuaagcaaaaugu

SEQ ID NO: 1591597 - RNA, 12 nt, Human
uaauagagcaaa

SEQ ID NO: 1591598 - RNA, 21 nt, Human
uaauagagcaaaauugaugug

SEQ ID NO: 1591599 - RNA, 13 nt, Human
uaaguaaaugcua

SEQ ID NO: 1591600 - RNA, 19 nt, Human
uaaguaaugauaacuggaa

SEQ ID NO: 1591601 - RNA, 16 nt, Human
uaagcuuguauuccuu

SEQ ID NO: 1591602 - RNA, 16 nt, Human
uaaguauucuaaauuu

SEQ ID NO: 1591603 - RNA, 15 nt, Human
aaucaugaauuaguu

SEQ ID NO: 1591604 - RNA, 12 nt, Human
aaucaugaauua

SEQ ID NO: 1591605 - RNA, 19 nt, Human
aaucuacacuccagugaga

SEQ ID NO: 1591606 - RNA, 19 nt, Human
aaucuuauaauuuaaaaua

SEQ ID NO: 1591607 - RNA, 20 nt, Human
aauaguauuugagaguucua

SEQ ID NO: 1591608 - RNA, 22 nt, Human
aauaguauuugagaguucuaaa

SEQ ID NO: 1591609 - RNA, 16 nt, Human
aauagucaaauugugu

SEQ ID NO: 1591610 - RNA, 23 nt, Human
aauaguauuugagaguucuaaau

SEQ ID NO: 1591611 - RNA, 19 nt, Human
aauagucaaauugugugaa

SEQ ID NO: 1591612 - RNA, 22 nt, Human
aauaucacuugucaauaaaauc

SEQ ID NO: 1591613 - RNA, 20 nt, Human
uaacgauaaaagacagugaa

SEQ ID NO: 1591614 - RNA, 17 nt, Human
aauauuguguugugaau

SEQ ID NO: 1591615 - RNA, 14 nt, Human
aauauuucagauaa

SEQ ID NO: 1591616 - RNA, 19 nt, Human
aauauuuauuuuaauaaug

SEQ ID NO: 1591617 - RNA, 18 nt, Human
aauauuuauuuuaauaau

SEQ ID NO: 1591618 - RNA, 24 nt, Human
aauaugccccauucaacaucuagu

SEQ ID NO: 1591619 - RNA, 21 nt, Human
aauaugccccauucaacaucu

SEQ ID NO: 1591620 - RNA, 22 nt, Human
uaagcagauggaaugcuguguu

SEQ ID NO: 1591621 - RNA, 21 nt, Human
aaucaggguuaguauugucca

SEQ ID NO: 1591622 - RNA, 16 nt, Human
aaucaggguuaguauu

SEQ ID NO: 1591623 - RNA, 22 nt, Human
aaucaggguuaguauuguccag

SEQ ID NO: 1591624 - RNA, 14 nt, Human
ucacauaucuagua

SEQ ID NO: 1591625 - RNA, 16 nt, Human
ucaauucuugccaaau

SEQ ID NO: 1591626 - RNA, 23 nt, Human
ucacuugaacccgggaggcagag

SEQ ID NO: 1591627 - RNA, 14 nt, Human
accagucugacugu

SEQ ID NO: 1591628 - RNA, 14 nt, Human
ucaccucauggaau

SEQ ID NO: 1591629 - RNA, 13 nt, Human
ucaccucauggaa

SEQ ID NO: 1591630 - RNA, 12 nt, Human
ucaccucaugga

SEQ ID NO: 1591631 - RNA, 19 nt, Human
acauucuuccaaaaagauu

SEQ ID NO: 1591632 - RNA, 23 nt, Human
ucaaugaaugaaugaauggcuaa

SEQ ID NO: 1591633 - RNA, 19 nt, Human
ucaauauuucagauaauca

SEQ ID NO: 1591634 - RNA, 15 nt, Human
ucaauauuucagaua

SEQ ID NO: 1591635 - RNA, 18 nt, Human
ucaauauccaaaccaaau

SEQ ID NO: 1591636 - RNA, 22 nt, Human
ucaauaucuuuuuuuuaauaaa

SEQ ID NO: 1591637 - RNA, 17 nt, Human
ucaagaaaacaacuuca

SEQ ID NO: 1591638 - RNA, 20 nt, Human
acaugagguacugagaguga

SEQ ID NO: 1591639 - RNA, 23 nt, Human
acaugagguacugagagugaaca

SEQ ID NO: 1591640 - RNA, 14 nt, Human
acaugggacauuug

SEQ ID NO: 1591641 - RNA, 11 nt, Human
acaugggacau

SEQ ID NO: 1591642 - RNA, 21 nt, Human
acaugggacauuugcucaugg

SEQ ID NO: 1591643 - RNA, 20 nt, Human
acaugggacauuugcucaug

SEQ ID NO: 1591644 - RNA, 15 nt, Human
acaugggacauuugc

SEQ ID NO: 1591645 - RNA, 18 nt, Human
ucaaauugugugaaaggu

SEQ ID NO: 1591646 - RNA, 14 nt, Human
accccugcuucuga

SEQ ID NO: 1591647 - RNA, 17 nt, Human
acccgggaggcagaggu

SEQ ID NO: 1591648 - RNA, 16 nt, Human
accucaaaaugucuaa

SEQ ID NO: 1591649 - RNA, 16 nt, Human
accuagggugauauua

SEQ ID NO: 1591650 - RNA, 22 nt, Human
ucauaaaaagccugcaauuuca

SEQ ID NO: 1591651 - RNA, 17 nt, Human
ucaguuuuugugaaaag

SEQ ID NO: 1591652 - RNA, 15 nt, Human
ucaguuuuugugaaa

SEQ ID NO: 1591653 - RNA, 18 nt, Human
accuuuggagcaaagcug

SEQ ID NO: 1591654 - RNA, 19 nt, Human
accuugaaaacuuuaugcu

SEQ ID NO: 1591655 - RNA, 22 nt, Human
uccacugguucuucuuggucuc

SEQ ID NO: 1591656 - RNA, 20 nt, Human
accuuuuggucuggagggaa

SEQ ID NO: 1591657 - RNA, 14 nt, Human
acgcucucuggccu

SEQ ID NO: 1591658 - RNA, 11 nt, Human
acgcucucugg

SEQ ID NO: 1591659 - RNA, 18 nt, Human
uccagugagacagcucug

SEQ ID NO: 1591660 - RNA, 15 nt, Human
acuaauuuuaaaaug

SEQ ID NO: 1591661 - RNA, 15 nt, Human
uccauccugaggcuc

SEQ ID NO: 1591662 - RNA, 12 nt, Human
uccauccugagg

SEQ ID NO: 1591663 - RNA, 19 nt, Human
uccauccugaggcuccacu

SEQ ID NO: 1591664 - RNA, 22 nt, Human
acuauauuguuugcuaagcauu

SEQ ID NO: 1591665 - RNA, 17 nt, Human
acuauauuguuugcuaa

SEQ ID NO: 1591666 - RNA, 15 nt, Human
acuaucucauuucca

SEQ ID NO: 1591667 - RNA, 17 nt, Human
acuaucucauuuccaag

SEQ ID NO: 1591668 - RNA, 16 nt, Human
acuaucucauuuccaa

SEQ ID NO: 1591669 - RNA, 16 nt, Human
uccuggaaaucagggu

SEQ ID NO: 1591670 - RNA, 17 nt, Human
acugagaugugaacaca

SEQ ID NO: 1591671 - RNA, 22 nt, Human
acugagaugugaacacaucagc

SEQ ID NO: 1591672 - RNA, 18 nt, Human
acugagagugaacaaauu

SEQ ID NO: 1591673 - RNA, 22 nt, Human
acugacuucuaaguaaaaccac

SEQ ID NO: 1591674 - RNA, 16 nt, Human
acugacuucuaaguaa

SEQ ID NO: 1591675 - RNA, 15 nt, Human
acugacuucuaagua

SEQ ID NO: 1591676 - RNA, 13 nt, Human
acugacuucuaag

SEQ ID NO: 1591677 - RNA, 20 nt, Human
acugacucuuaagaagacug

SEQ ID NO: 1591678 - RNA, 18 nt, Human
acugacucuuaagaagac

SEQ ID NO: 1591679 - RNA, 17 nt, Human
acugacucuuaagaaga

SEQ ID NO: 1591680 - RNA, 16 nt, Human
acugacucuuaagaag

SEQ ID NO: 1591681 - RNA, 15 nt, Human
acugacucuuaagaa

SEQ ID NO: 1591682 - RNA, 14 nt, Human
acugacucuuaaga

SEQ ID NO: 1591683 - RNA, 13 nt, Human
acugacucuuaag

SEQ ID NO: 1591684 - RNA, 12 nt, Human
acugaagaagca

SEQ ID NO: 1591685 - RNA, 21 nt, Human
acucuuaagaagacugcauua

SEQ ID NO: 1591686 - RNA, 13 nt, Human
agaauauguuuca

SEQ ID NO: 1591687 - RNA, 17 nt, Human
agaauauguuucaaacu

SEQ ID NO: 1591688 - RNA, 18 nt, Human
agaauauguuucaaacuu

SEQ ID NO: 1591689 - RNA, 19 nt, Human
agaauauguuucaaacuuu

SEQ ID NO: 1591690 - RNA, 21 nt, Human
agaauauguuucaaacuuugg

SEQ ID NO: 1591691 - RNA, 14 nt, Human
ucugcuuguguuaa

SEQ ID NO: 1591692 - RNA, 15 nt, Human
agaauuaacacauga

SEQ ID NO: 1591693 - RNA, 23 nt, Human
agaauuaacacaugauccugcaa

SEQ ID NO: 1591694 - RNA, 16 nt, Human
ucugugaaaguacauu

SEQ ID NO: 1591695 - RNA, 14 nt, Human
ucugugagaugcua

SEQ ID NO: 1591696 - RNA, 22 nt, Human
ucugugagaugcuagaacuccc

SEQ ID NO: 1591697 - RNA, 17 nt, Human
ucugugagaugcuagaa

SEQ ID NO: 1591698 - RNA, 23 nt, Human
ucugugagaugcuagaacucccu

SEQ ID NO: 1591699 - RNA, 15 nt, Human
agacacacaugaagu

SEQ ID NO: 1591700 - RNA, 12 nt, Human
agacacacauga

SEQ ID NO: 1591701 - RNA, 16 nt, Human
ucugcuugccaucccu

SEQ ID NO: 1591702 - RNA, 17 nt, Human
ucugcuugccaucccuc

SEQ ID NO: 1591703 - RNA, 20 nt, Human
ucugcuugccaucccucccu

SEQ ID NO: 1591704 - RNA, 23 nt, Human
ucugcuugccaucccucccucca

SEQ ID NO: 1591705 - RNA, 19 nt, Human
agaagcaacccaaauguuc

SEQ ID NO: 1591706 - RNA, 14 nt, Human
agaagaacugaaau

SEQ ID NO: 1591707 - RNA, 13 nt, Human
agaagaacugaaa

SEQ ID NO: 1591708 - RNA, 18 nt, Human
agaagaugguaccaccag

SEQ ID NO: 1591709 - RNA, 18 nt, Human
ucugcagauaaacaguag

SEQ ID NO: 1591710 - RNA, 21 nt, Human
ucuagcauggcauauuuuuca

SEQ ID NO: 1591711 - RNA, 22 nt, Human
ucuagcauggcauauuuuucac

SEQ ID NO: 1591712 - RNA, 23 nt, Human
ucuagcauggcauauuuuucaca

SEQ ID NO: 1591713 - RNA, 14 nt, Human
acuucccuuucugc

SEQ ID NO: 1591714 - RNA, 16 nt, Human
ucuaggaaauauuuau

SEQ ID NO: 1591715 - RNA, 17 nt, Human
ucuaggaaauauuuauu

SEQ ID NO: 1591716 - RNA, 23 nt, Human
acuuaacuauucaggagaguaga

SEQ ID NO: 1591717 - RNA, 15 nt, Human
ucuaaguaaaaccac

SEQ ID NO: 1591718 - RNA, 14 nt, Human
ucuaaguaaaacca

SEQ ID NO: 1591719 - RNA, 19 nt, Human
ucuaaguaaaaccacagca

SEQ ID NO: 1591720 - RNA, 20 nt, Human
ucuaaguaaaaccacagcag

SEQ ID NO: 1591721 - RNA, 12 nt, Human
uccugggcagcu

SEQ ID NO: 1591722 - RNA, 13 nt, Human
uccugggcagcug

SEQ ID NO: 1591723 - RNA, 14 nt, Human
uccugggcagcugc

SEQ ID NO: 1591724 - RNA, 15 nt, Human
acuugucaauaaaau

SEQ ID NO: 1591725 - RNA, 21 nt, Human
ucucaggaaaucaaauaugca

SEQ ID NO: 1591726 - RNA, 14 nt, Human
ucucaggaaaucaa

SEQ ID NO: 1591727 - RNA, 23 nt, Human
ucucaggaaaucaaauaugcaaa

SEQ ID NO: 1591728 - RNA, 15 nt, Human
ucucauuuccaagca

SEQ ID NO: 1591729 - RNA, 22 nt, Human
acuuuuuauggcacuaguauuu

SEQ ID NO: 1591730 - RNA, 14 nt, Human
ugacuaugacauaa

SEQ ID NO: 1591731 - RNA, 17 nt, Human
agaugugaacacaucag

SEQ ID NO: 1591732 - RNA, 22 nt, Human
agauguauguacuucaugcugu

SEQ ID NO: 1591733 - RNA, 22 nt, Human
agaugugaacacaucagcuugc

SEQ ID NO: 1591734 - RNA, 16 nt, Human
ugacacuuaaaaaugg

SEQ ID NO: 1591735 - RNA, 15 nt, Human
ugacacuuaaaaaug

SEQ ID NO: 1591736 - RNA, 14 nt, Human
agauccuggaaauc

SEQ ID NO: 1591737 - RNA, 13 nt, Human
agauccuggaaau

SEQ ID NO: 1591738 - RNA, 22 nt, Human
agaugcuagaacucccuuucaa

SEQ ID NO: 1591739 - RNA, 21 nt, Human
agaugcuagaacucccuuuca

SEQ ID NO: 1591740 - RNA, 19 nt, Human
agaugcuagaacucccuuu

SEQ ID NO: 1591741 - RNA, 21 nt, Human
agaugcaguucugaagaagau

SEQ ID NO: 1591742 - RNA, 16 nt, Human
agcaagggugauggga

SEQ ID NO: 1591743 - RNA, 22 nt, Human
agcaagggugaugggaaagcau

SEQ ID NO: 1591744 - RNA, 20 nt, Human
agcaagggugaugggaaagc

SEQ ID NO: 1591745 - RNA, 16 nt, Human
agauuuuccugaaaac

SEQ ID NO: 1591746 - RNA, 15 nt, Human
agauuuuccugaaaa

SEQ ID NO: 1591747 - RNA, 12 nt, Human
ugagacagcucu

SEQ ID NO: 1591748 - RNA, 20 nt, Human
ugagacucugucucagucca

SEQ ID NO: 1591749 - RNA, 20 nt, Human
ugagagacacacugaagaag

SEQ ID NO: 1591750 - RNA, 19 nt, Human
ugagagacacacugaagaa

SEQ ID NO: 1591751 - RNA, 17 nt, Human
ugagagacacacugaag

SEQ ID NO: 1591752 - RNA, 16 nt, Human
ugagagacacacugaa

SEQ ID NO: 1591753 - RNA, 13 nt, Human
ugagaugugaaca

SEQ ID NO: 1591754 - RNA, 19 nt, Human
ugagaugugaacacaucag

SEQ ID NO: 1591755 - RNA, 18 nt, Human
ugagaugugaacacauca

SEQ ID NO: 1591756 - RNA, 24 nt, Human
ugagaugugaacacaucagcuugc

SEQ ID NO: 1591757 - RNA, 22 nt, Human
ugagagacacacugaagaagca

SEQ ID NO: 1591758 - RNA, 21 nt, Human
ugagagacacacugaagaagc

SEQ ID NO: 1591759 - RNA, 22 nt, Human
agagcugcccucuccugggcag

SEQ ID NO: 1591760 - RNA, 19 nt, Human
agagcugcccucuccuggg

SEQ ID NO: 1591761 - RNA, 20 nt, Human
agagcugcccucuccugggc

SEQ ID NO: 1591762 - RNA, 16 nt, Human
agagcugcccucuccu

SEQ ID NO: 1591763 - RNA, 17 nt, Human
agagcugcccucuccug

SEQ ID NO: 1591764 - RNA, 18 nt, Human
agagcugcccucuccugg

SEQ ID NO: 1591765 - RNA, 14 nt, Human
ugaaauaagccaga

SEQ ID NO: 1591766 - RNA, 13 nt, Human
ugaacaaauuuac

SEQ ID NO: 1591767 - RNA, 18 nt, Human
ugaacaaauuuacagaga

SEQ ID NO: 1591768 - RNA, 18 nt, Human
ugaacccgggaggcagag

SEQ ID NO: 1591769 - RNA, 22 nt, Human
ugaacccauauuuguacaccaa

SEQ ID NO: 1591770 - RNA, 23 nt, Human
ugaacuagaguuuagcuggaaaa

SEQ ID NO: 1591771 - RNA, 20 nt, Human
ugaagauuuaccacuugugu

SEQ ID NO: 1591772 - RNA, 17 nt, Human
ugaagauuuaccacuug

SEQ ID NO: 1591773 - RNA, 17 nt, Human
ugaaguacucauacaug

SEQ ID NO: 1591774 - RNA, 19 nt, Human
agagcuguucacagccaga

SEQ ID NO: 1591775 - RNA, 18 nt, Human
agagcuguucacagccag

SEQ ID NO: 1591776 - RNA, 17 nt, Human
ugaaagaggaaugaagu

SEQ ID NO: 1591777 - RNA, 18 nt, Human
ugaaagaggaaugaagua

SEQ ID NO: 1591778 - RNA, 17 nt, Human
ugaaaauauuuguauca

SEQ ID NO: 1591779 - RNA, 22 nt, Human
ugaaaauauuuguaucacaaau

SEQ ID NO: 1591780 - RNA, 21 nt, Human
ugaaaauauuuguaucacaaa

SEQ ID NO: 1591781 - RNA, 13 nt, Human
ugaaagaaaauaa

SEQ ID NO: 1591782 - RNA, 21 nt, Human
agacuggcacaguuuucugag

SEQ ID NO: 1591783 - RNA, 20 nt, Human
agacuggcacaguuuucuga

SEQ ID NO: 1591784 - RNA, 23 nt, Human
agacuggcacaguuuucugagaa

SEQ ID NO: 1591785 - RNA, 15 nt, Human
agagacagaaagcag

SEQ ID NO: 1591786 - RNA, 14 nt, Human
agagacagaaagca

SEQ ID NO: 1591787 - RNA, 16 nt, Human
agagacacacugaaga

SEQ ID NO: 1591788 - RNA, 14 nt, Human
ugucuaagauagua

SEQ ID NO: 1591789 - RNA, 15 nt, Human
ugucuaagauaguaa

SEQ ID NO: 1591790 - RNA, 18 nt, Human
ugucuaaauuugaauguu

SEQ ID NO: 1591791 - RNA, 21 nt, Human
ugucagcuccccucggagaag

SEQ ID NO: 1591792 - RNA, 20 nt, Human
ugucagcuccccucggagaa

SEQ ID NO: 1591793 - RNA, 23 nt, Human
ugucagcuccccucggagaagag

SEQ ID NO: 1591794 - RNA, 21 nt, Human
aguauguuagugcaaauuguc

SEQ ID NO: 1591795 - RNA, 18 nt, Human
aguauguuagugcaaauu

SEQ ID NO: 1591796 - RNA, 20 nt, Human
agucacauuccaagccucau

SEQ ID NO: 1591797 - RNA, 16 nt, Human
aguauuguccaggucu

SEQ ID NO: 1591798 - RNA, 15 nt, Human
aguauuguccagguc

SEQ ID NO: 1591799 - RNA, 14 nt, Human
ugugaagcaaaauu

SEQ ID NO: 1591800 - RNA, 16 nt, Human
agugaaagaggcagcu

SEQ ID NO: 1591801 - RNA, 22 nt, Human
agugaaagaggcagcuugaaac

SEQ ID NO: 1591802 - RNA, 14 nt, Human
agugagacagcucu

SEQ ID NO: 1591803 - RNA, 20 nt, Human
agugaaacucguuaauuugu

SEQ ID NO: 1591804 - RNA, 16 nt, Human
agugagccgagauugu

SEQ ID NO: 1591805 - RNA, 21 nt, Human
agugagcagucaggaaagaga

SEQ ID NO: 1591806 - RNA, 14 nt, Human
ugucuucacaacag

SEQ ID NO: 1591807 - RNA, 14 nt, Human
ugucuuaauuaaaa

SEQ ID NO: 1591808 - RNA, 17 nt, Human
ugucucuacuaaaaaua

SEQ ID NO: 1591809 - RNA, 15 nt, Human
uguacuuaacuauuc

SEQ ID NO: 1591810 - RNA, 18 nt, Human
uguaagaaaauaucacuu

SEQ ID NO: 1591811 - RNA, 16 nt, Human
uguaaaggaauuuaaa

SEQ ID NO: 1591812 - RNA, 16 nt, Human
aggucauauuaauaua

SEQ ID NO: 1591813 - RNA, 15 nt, Human
aggucagugcaaaua

SEQ ID NO: 1591814 - RNA, 20 nt, Human
aggguuuauguuuaggaugu

SEQ ID NO: 1591815 - RNA, 22 nt, Human
uggucugugagaugcuagaacu

SEQ ID NO: 1591816 - RNA, 22 nt, Human
ugguccaugggccauaugaaaa

SEQ ID NO: 1591817 - RNA, 15 nt, Human
agggugaaaauuauu

SEQ ID NO: 1591818 - RNA, 22 nt, Human
agggugaugggaaagcauugua

SEQ ID NO: 1591819 - RNA, 21 nt, Human
agggugaugggaaagcauugu

SEQ ID NO: 1591820 - RNA, 21 nt, Human
auaaguucauacauuguacga

SEQ ID NO: 1591821 - RNA, 11 nt, Human
auaaguucaua

SEQ ID NO: 1591822 - RNA, 13 nt, Human
auaaguucauaca

SEQ ID NO: 1591823 - RNA, 14 nt, Human
auaaguucauacau

SEQ ID NO: 1591824 - RNA, 15 nt, Human
auaaguucauacauu

SEQ ID NO: 1591825 - RNA, 12 nt, Human
uuaccugggaaa

SEQ ID NO: 1591826 - RNA, 20 nt, Human
auaaucagugugucuaaauu

SEQ ID NO: 1591827 - RNA, 21 nt, Human
auaaucuuucacaggggacag

SEQ ID NO: 1591828 - RNA, 14 nt, Human
auaaugaauacuuu

SEQ ID NO: 1591829 - RNA, 22 nt, Human
uuagaugcaguucugaagaaga

SEQ ID NO: 1591830 - RNA, 23 nt, Human
uuagaugcaguucugaagaagau

SEQ ID NO: 1591831 - RNA, 12 nt, Human
auaacugugaag

SEQ ID NO: 1591832 - RNA, 12 nt, Human
auaacuggaaac

SEQ ID NO: 1591833 - RNA, 19 nt, Human
auaaaugugccuucauuuu

SEQ ID NO: 1591834 - RNA, 16 nt, Human
auaaaccucaaaaugu

SEQ ID NO: 1591835 - RNA, 13 nt, Human
aguuuucugagaa

SEQ ID NO: 1591836 - RNA, 12 nt, Human
aguuuucugaga

SEQ ID NO: 1591837 - RNA, 17 nt, Human
aguuuucugagaaagac

SEQ ID NO: 1591838 - RNA, 14 nt, Human
aguuuucugagaaa

SEQ ID NO: 1591839 - RNA, 18 nt, Human
aguuuucugagaaagacu

SEQ ID NO: 1591840 - RNA, 23 nt, Human
uuauagaguguacuuaacuauuc

SEQ ID NO: 1591841 - RNA, 23 nt, Human
uuauacccagaaaguuauugaua

SEQ ID NO: 1591842 - RNA, 18 nt, Human
uuauacccagaaaguuau

SEQ ID NO: 1591843 - RNA, 19 nt, Human
uuauacccagaaaguuauu

SEQ ID NO: 1591844 - RNA, 13 nt, Human
uuauauaaguauu

SEQ ID NO: 1591845 - RNA, 14 nt, Human
uuauauaaguauuc

SEQ ID NO: 1591846 - RNA, 16 nt, Human
uuauauaaguauucua

SEQ ID NO: 1591847 - RNA, 18 nt, Human
uuauauaagcuuguauuc

SEQ ID NO: 1591848 - RNA, 15 nt, Human
auaauuuuaagaaau

SEQ ID NO: 1591849 - RNA, 21 nt, Human
auaauuuuaagaaaucaaaga

SEQ ID NO: 1591850 - RNA, 22 nt, Human
auacaaaaaaaaaaaaaaauua

SEQ ID NO: 1591851 - RNA, 22 nt, Human
auaauuuuuauauuugaaauau

SEQ ID NO: 1591852 - RNA, 21 nt, Human
auaauuuuuauauuugaaaua

SEQ ID NO: 1591853 - RNA, 19 nt, Human
auaauuuuuauauuugaaa

SEQ ID NO: 1591854 - RNA, 16 nt, Human
auaauuuuuauauuug

SEQ ID NO: 1591855 - RNA, 14 nt, Human
auaauuuuuauauu

SEQ ID NO: 1591856 - RNA, 20 nt, Human
auaauuuugugaagcaaaau

SEQ ID NO: 1591857 - RNA, 15 nt, Human
auaauuuugugaagc

SEQ ID NO: 1591858 - RNA, 14 nt, Human
auaauuuugugaag

SEQ ID NO: 1591859 - RNA, 13 nt, Human
auaauuuugugaa

SEQ ID NO: 1591860 - RNA, 22 nt, Human
uuaucaaagggugaaaauuauu

SEQ ID NO: 1591861 - RNA, 22 nt, Human
auaccacaggaaccacaagacu

SEQ ID NO: 1591862 - RNA, 15 nt, Human
auacaggucauauua

SEQ ID NO: 1591863 - RNA, 21 nt, Human
auacaggucauauuaauauau

SEQ ID NO: 1591864 - RNA, 21 nt, Human
auacaguucggugagcuacaa

SEQ ID NO: 1591865 - RNA, 19 nt, Human
auacauauuuuuguagcac

SEQ ID NO: 1591866 - RNA, 20 nt, Human
auacaucccuuaccugggaa

SEQ ID NO: 1591867 - RNA, 14 nt, Human
auacauuguacgaa

SEQ ID NO: 1591868 - RNA, 21 nt, Human
auacauuguacgaagaguauu

SEQ ID NO: 1591869 - RNA, 22 nt, Human
auacauuguacgaagaguauuu

SEQ ID NO: 1591870 - RNA, 23 nt, Human
aguuauugauaaguucauacauu

SEQ ID NO: 1591871 - RNA, 17 nt, Human
aguuauugauaaguuca

SEQ ID NO: 1591872 - RNA, 19 nt, Human
aguuauugauaaguucaua

SEQ ID NO: 1591873 - RNA, 21 nt, Human
aguuauugauaaguucauaca

SEQ ID NO: 1591874 - RNA, 22 nt, Human
aguuauugauaaguucauacau

SEQ ID NO: 1591875 - RNA, 19 nt, Human
aguuauggcuauaggugcu

SEQ ID NO: 1591876 - RNA, 20 nt, Human
aguuauuauauuuacaaaug

SEQ ID NO: 1591877 - RNA, 15 nt, Human
aguucuaaauuuugu

SEQ ID NO: 1591878 - RNA, 15 nt, Human
aguucagagcugccc

SEQ ID NO: 1591879 - RNA, 16 nt, Human
aguucagagcugcccu

SEQ ID NO: 1591880 - RNA, 17 nt, Human
aguucagagcugcccuc

SEQ ID NO: 1591881 - RNA, 18 nt, Human
aguucagagcugcccucu

SEQ ID NO: 1591882 - RNA, 19 nt, Human
aguucagagcugcccucuc

SEQ ID NO: 1591883 - RNA, 14 nt, Human
uuaaaaucauuucu

SEQ ID NO: 1591884 - RNA, 18 nt, Human
uuaaaaaagaaacauuug

SEQ ID NO: 1591885 - RNA, 15 nt, Human
uuaaaaaagaaacau

SEQ ID NO: 1591886 - RNA, 19 nt, Human
uuaaaaaagaaacauuugg

SEQ ID NO: 1591887 - RNA, 16 nt, Human
aguucugaagaagaug

SEQ ID NO: 1591888 - RNA, 15 nt, Human
aguucugaagaagau

SEQ ID NO: 1591889 - RNA, 14 nt, Human
aguucugaagaaga

SEQ ID NO: 1591890 - RNA, 13 nt, Human
aguucugaagaag

SEQ ID NO: 1591891 - RNA, 21 nt, Human
aguugauaugccuuuucccaa

SEQ ID NO: 1591892 - RNA, 15 nt, Human
uguuugcuaagcauu

SEQ ID NO: 1591893 - RNA, 19 nt, Human
uguuugcuaagcauuccaa

SEQ ID NO: 1591894 - RNA, 20 nt, Human
uguuuuauaauuuugugaag

SEQ ID NO: 1591895 - RNA, 13 nt, Human
uguuuuauaauuu

SEQ ID NO: 1591896 - RNA, 15 nt, Human
ugcagaagacaguau

SEQ ID NO: 1591897 - RNA, 14 nt, Human
ugcagaagacagua

SEQ ID NO: 1591898 - RNA, 17 nt, Human
agccagcaguucagagc

SEQ ID NO: 1591899 - RNA, 19 nt, Human
agccagcaguucagagcug

SEQ ID NO: 1591900 - RNA, 22 nt, Human
agccagcaguucagagcugccc

SEQ ID NO: 1591901 - RNA, 20 nt, Human
agccagcaguucagagcugc

SEQ ID NO: 1591902 - RNA, 21 nt, Human
agccagcaguucagagcugcc

SEQ ID NO: 1591903 - RNA, 18 nt, Human
ugauuaaguaaugauaac

SEQ ID NO: 1591904 - RNA, 23 nt, Human
ugauuaaguaaugauaacuggaa

SEQ ID NO: 1591905 - RNA, 12 nt, Human
ugaugaagaagu

SEQ ID NO: 1591906 - RNA, 11 nt, Human
ugaugaagaag

SEQ ID NO: 1591907 - RNA, 19 nt, Human
ugaugggaaagcauuguaa

SEQ ID NO: 1591908 - RNA, 16 nt, Human
ugccccauucaacauc

SEQ ID NO: 1591909 - RNA, 22 nt, Human
ugccauuuaaagcuuauuaaaa

SEQ ID NO: 1591910 - RNA, 23 nt, Human
agcucugcccauccugccccuga

SEQ ID NO: 1591911 - RNA, 12 nt, Human
ugcccucuccug

SEQ ID NO: 1591912 - RNA, 13 nt, Human
ugcccucuccugg

SEQ ID NO: 1591913 - RNA, 14 nt, Human
ugcccucuccuggg

SEQ ID NO: 1591914 - RNA, 15 nt, Human
ugcccucuccugggc

SEQ ID NO: 1591915 - RNA, 22 nt, Human
ugcccucuccugggcagcugcc

SEQ ID NO: 1591916 - RNA, 23 nt, Human
ugcccucuccugggcagcugccu

SEQ ID NO: 1591917 - RNA, 16 nt, Human
ugcccucuccugggca

SEQ ID NO: 1591918 - RNA, 17 nt, Human
ugcccucuccugggcag

SEQ ID NO: 1591919 - RNA, 18 nt, Human
ugcccucuccugggcagc

SEQ ID NO: 1591920 - RNA, 20 nt, Human
ugcccucuccugggcagcug

SEQ ID NO: 1591921 - RNA, 19 nt, Human
ugcccuguuaaaagaugaa

SEQ ID NO: 1591922 - RNA, 15 nt, Human
ugccucaccccuugc

SEQ ID NO: 1591923 - RNA, 18 nt, Human
ugccucagaaaacaagga

SEQ ID NO: 1591924 - RNA, 16 nt, Human
ugccuccccuccucug

SEQ ID NO: 1591925 - RNA, 11 nt, Human
ugccuccccuc

SEQ ID NO: 1591926 - RNA, 12 nt, Human
ugccuccccucc

SEQ ID NO: 1591927 - RNA, 13 nt, Human
ugccuccccuccu

SEQ ID NO: 1591928 - RNA, 14 nt, Human
ugccuccccuccuc

SEQ ID NO: 1591929 - RNA, 15 nt, Human
ugccuccccuccucu

SEQ ID NO: 1591930 - RNA, 17 nt, Human
agcugcccucuccuggg

SEQ ID NO: 1591931 - RNA, 18 nt, Human
agcugcccucuccugggc

SEQ ID NO: 1591932 - RNA, 19 nt, Human
agcugcccucuccugggca

SEQ ID NO: 1591933 - RNA, 20 nt, Human
agcugcccucuccugggcag

SEQ ID NO: 1591934 - RNA, 21 nt, Human
agcugcccucuccugggcagc

SEQ ID NO: 1591935 - RNA, 22 nt, Human
uggcacaguuuucugagaaaga

SEQ ID NO: 1591936 - RNA, 18 nt, Human
uggacgagaaaacaauaa

SEQ ID NO: 1591937 - RNA, 22 nt, Human
uggaauuucucccagucauuua

SEQ ID NO: 1591938 - RNA, 18 nt, Human
uggaauuggagcucgugg

SEQ ID NO: 1591939 - RNA, 13 nt, Human
uggaaaggcagcu

SEQ ID NO: 1591940 - RNA, 15 nt, Human
ugcuugccaucccuc

SEQ ID NO: 1591941 - RNA, 16 nt, Human
ugcuugccaucccucc

SEQ ID NO: 1591942 - RNA, 17 nt, Human
aggagaaacuggaacuc

SEQ ID NO: 1591943 - RNA, 11 nt, Human
aggagaaacug

SEQ ID NO: 1591944 - RNA, 11 nt, Human
aggaauuuaaa

SEQ ID NO: 1591945 - RNA, 17 nt, Human
aggacacugauaugggu

SEQ ID NO: 1591946 - RNA, 14 nt, Human
aggacacugauaug

SEQ ID NO: 1591947 - RNA, 14 nt, Human
ugcuggagcucugc

SEQ ID NO: 1591948 - RNA, 13 nt, Human
ugcuggagcucug

SEQ ID NO: 1591949 - RNA, 23 nt, Human
aucagugugucuaaauuugaaug

SEQ ID NO: 1591950 - RNA, 23 nt, Human
aucacuugaacccgggaggcaga

SEQ ID NO: 1591951 - RNA, 16 nt, Human
uucugcaucagcugcu

SEQ ID NO: 1591952 - RNA, 17 nt, Human
uucuguuuuauaauuuu

SEQ ID NO: 1591953 - RNA, 16 nt, Human
uucuguuuuauaauuu

SEQ ID NO: 1591954 - RNA, 16 nt, Human
aucccucccuccaccu

SEQ ID NO: 1591955 - RNA, 17 nt, Human
aucccucccuccaccuc

SEQ ID NO: 1591956 - RNA, 18 nt, Human
aucccucccuccaccucc

SEQ ID NO: 1591957 - RNA, 20 nt, Human
aucccucccuccaccucccu

SEQ ID NO: 1591958 - RNA, 21 nt, Human
aucccucccuccaccucccug

SEQ ID NO: 1591959 - RNA, 17 nt, Human
uugaaggaaaaugauac

SEQ ID NO: 1591960 - RNA, 17 nt, Human
uugacacuuaaaaaugg

SEQ ID NO: 1591961 - RNA, 17 nt, Human
uugauaaguucauacau

SEQ ID NO: 1591962 - RNA, 16 nt, Human
uugauaaguucauaca

SEQ ID NO: 1591963 - RNA, 14 nt, Human
uugagaguucuaaa

SEQ ID NO: 1591964 - RNA, 14 nt, Human
uugacccacaagaa

SEQ ID NO: 1591965 - RNA, 19 nt, Human
uugacacuuaaaaaugguu

SEQ ID NO: 1591966 - RNA, 18 nt, Human
auccugaggcuccacuug

SEQ ID NO: 1591967 - RNA, 16 nt, Human
auccugaggcuccacu

SEQ ID NO: 1591968 - RNA, 13 nt, Human
auccugaggcucc

SEQ ID NO: 1591969 - RNA, 11 nt, Human
auccugaggcu

SEQ ID NO: 1591970 - RNA, 13 nt, Human
auccugccccuga

SEQ ID NO: 1591971 - RNA, 22 nt, Human
auccugaggcuccacuuggucu

SEQ ID NO: 1591972 - RNA, 16 nt, Human
auccugcaauuccacu

SEQ ID NO: 1591973 - RNA, 12 nt, Human
auauuuaaugau

SEQ ID NO: 1591974 - RNA, 13 nt, Human
auauuuaaugaua

SEQ ID NO: 1591975 - RNA, 23 nt, Human
auauuuaaugauaaguaaaugcu

SEQ ID NO: 1591976 - RNA, 13 nt, Human
auauuuacaaaug

SEQ ID NO: 1591977 - RNA, 14 nt, Human
auauuguuugcuaa

SEQ ID NO: 1591978 - RNA, 13 nt, Human
auauguuucaaac

SEQ ID NO: 1591979 - RNA, 14 nt, Human
auauguuucaaacu

SEQ ID NO: 1591980 - RNA, 16 nt, Human
auauguuucaaacuuu

SEQ ID NO: 1591981 - RNA, 17 nt, Human
auauguuucaaacuuug

SEQ ID NO: 1591982 - RNA, 17 nt, Human
uucccagugaauucuug

SEQ ID NO: 1591983 - RNA, 18 nt, Human
auauuuuucacauaucua

SEQ ID NO: 1591984 - RNA, 15 nt, Human
auauuuuuguagcac

SEQ ID NO: 1591985 - RNA, 16 nt, Human
auauuuuuguagcacu

SEQ ID NO: 1591986 - RNA, 23 nt, Human
auauuuuuguagcacugacagau

SEQ ID NO: 1591987 - RNA, 18 nt, Human
aucaaauaugcaaagcac

SEQ ID NO: 1591988 - RNA, 17 nt, Human
aucaaauaugcaaagca

SEQ ID NO: 1591989 - RNA, 16 nt, Human
aucaaauaugcaaagc

SEQ ID NO: 1591990 - RNA, 16 nt, Human
aucaaggguacacugc

SEQ ID NO: 1591991 - RNA, 13 nt, Human
aucaauuuaaaaa

SEQ ID NO: 1591992 - RNA, 21 nt, Human
aucaaggguacacugccuucu

SEQ ID NO: 1591993 - RNA, 19 nt, Human
aucaauuuuucuuauuuca

SEQ ID NO: 1591994 - RNA, 14 nt, Human
aucaauuuuucuua

SEQ ID NO: 1591995 - RNA, 22 nt, Human
auaugagcuuccuucugugaaa

SEQ ID NO: 1591996 - RNA, 21 nt, Human
auaugagcuuccuucugugaa

SEQ ID NO: 1591997 - RNA, 14 nt, Human
auaugcaaagcacu

SEQ ID NO: 1591998 - RNA, 13 nt, Human
auaugcaaagcac

SEQ ID NO: 1591999 - RNA, 15 nt, Human
auaugcaaagcacug

SEQ ID NO: 1592000 - RNA, 23 nt, Human
auauguaccuaacgaaguauccu

SEQ ID NO: 1592001 - RNA, 14 nt, Human
uucauuaucucaaa

SEQ ID NO: 1592002 - RNA, 13 nt, Human
uucauaugcugua

SEQ ID NO: 1592003 - RNA, 16 nt, Human
auauauuuaaugauaa

SEQ ID NO: 1592004 - RNA, 15 nt, Human
uucaucaaugaauga

SEQ ID NO: 1592005 - RNA, 13 nt, Human
auauaugcuaagu

SEQ ID NO: 1592006 - RNA, 17 nt, Human
uucagcgguuuauauaa

SEQ ID NO: 1592007 - RNA, 15 nt, Human
uuucauaugcuguau

SEQ ID NO: 1592008 - RNA, 23 nt, Human
auggaauuggagcucgugggaca

SEQ ID NO: 1592009 - RNA, 22 nt, Human
uuucagaaaauauuauguguuu

SEQ ID NO: 1592010 - RNA, 19 nt, Human
augcuguauauccuuucua

SEQ ID NO: 1592011 - RNA, 19 nt, Human
uuuauuacuguaagaaaau

SEQ ID NO: 1592012 - RNA, 19 nt, Human
augcuguauuuuaaaagaa

SEQ ID NO: 1592013 - RNA, 14 nt, Human
augcuguauuuuaa

SEQ ID NO: 1592014 - RNA, 16 nt, Human
auggaacauaaaauac

SEQ ID NO: 1592015 - RNA, 16 nt, Human
uuuauuuuaauaaugu

SEQ ID NO: 1592016 - RNA, 20 nt, Human
uuuagcuggaaaaguauguu

SEQ ID NO: 1592017 - RNA, 19 nt, Human
uuuauaugcuucuguuuua

SEQ ID NO: 1592018 - RNA, 17 nt, Human
uuuauaugcuucuguuu

SEQ ID NO: 1592019 - RNA, 24 nt, Human
uuuaaagcuuauuaaaacucauuu

SEQ ID NO: 1592020 - RNA, 15 nt, Human
uuugaaauauugacu

SEQ ID NO: 1592021 - RNA, 14 nt, Human
uuugaaauauugac

SEQ ID NO: 1592022 - RNA, 14 nt, Human
uuucugcaucagcu

SEQ ID NO: 1592023 - RNA, 20 nt, Human
uuucuaugaaauauuauguu

SEQ ID NO: 1592024 - RNA, 14 nt, Human
uuucuaugaaauau

SEQ ID NO: 1592025 - RNA, 13 nt, Human
uuucuaugaaaua

SEQ ID NO: 1592026 - RNA, 17 nt, Human
auggaauuucucccagu

SEQ ID NO: 1592027 - RNA, 19 nt, Human
auggcuauaggugcuacaa

SEQ ID NO: 1592028 - RNA, 16 nt, Human
auggcuauaggugcua

SEQ ID NO: 1592029 - RNA, 23 nt, Human
auggcuauaggugcuacaaaaac

SEQ ID NO: 1592030 - RNA, 21 nt, Human
auggcuauaggugcuacaaaa

SEQ ID NO: 1592031 - RNA, 21 nt, Human
augggacauuugcucauggaa

SEQ ID NO: 1592032 - RNA, 22 nt, Human
augggacauuugcucauggaau

SEQ ID NO: 1592033 - RNA, 19 nt, Human
augacauaaaaacaacuuu

SEQ ID NO: 1592034 - RNA, 14 nt, Human
augauaacuggaaa

SEQ ID NO: 1592035 - RNA, 18 nt, Human
uugugaagcaaaauuuuu

SEQ ID NO: 1592036 - RNA, 22 nt, Human
augaauuacauuuguauaaaau

SEQ ID NO: 1592037 - RNA, 19 nt, Human
augaauuacauuuguauaa

SEQ ID NO: 1592038 - RNA, 18 nt, Human
augaauuacauuuguaua

SEQ ID NO: 1592039 - RNA, 23 nt, Human
augaauuaguuuuauaugcuucu

SEQ ID NO: 1592040 - RNA, 21 nt, Human
augaauuaguuuuauaugcuu

SEQ ID NO: 1592041 - RNA, 15 nt, Human
uuguauaaaauaauu

SEQ ID NO: 1592042 - RNA, 13 nt, Human
uuguauaaaauaa

SEQ ID NO: 1592043 - RNA, 21 nt, Human
augaaauauuauguuaaaacu

SEQ ID NO: 1592044 - RNA, 12 nt, Human
uugcucauggaa

SEQ ID NO: 1592045 - RNA, 11 nt, Human
uugcucaugga

SEQ ID NO: 1592046 - RNA, 14 nt, Human
auuuucagaaaaua

SEQ ID NO: 1592047 - RNA, 17 nt, Human
auuuucagaaaauauua

SEQ ID NO: 1592048 - RNA, 22 nt, Human
auuuucaguuauuauauuuaca

SEQ ID NO: 1592049 - RNA, 17 nt, Human
auuuuaaaagaaugauu

SEQ ID NO: 1592050 - RNA, 21 nt, Human
auuuguauaaaauaauuuuua

SEQ ID NO: 1592051 - RNA, 19 nt, Human
auuuguauaaaauaauuuu

SEQ ID NO: 1592052 - RNA, 18 nt, Human
auuuguauaaaauaauuu

SEQ ID NO: 1592053 - RNA, 22 nt, Human
auuuuaaaagaaugauuaugaa

SEQ ID NO: 1592054 - RNA, 18 nt, Human
auuuuaaaagaaugauua

SEQ ID NO: 1592055 - RNA, 13 nt, Human
auuuagauguaua

SEQ ID NO: 1592056 - RNA, 17 nt, Human
auuuauuuuaauaaugu

SEQ ID NO: 1592057 - RNA, 12 nt, Human
auuucauuucuu

SEQ ID NO: 1592058 - RNA, 20 nt, Human
auuuauuuuaauaauguuuc

SEQ ID NO: 1592059 - RNA, 19 nt, Human
auuuauuuuaauaauguuu

SEQ ID NO: 1592060 - RNA, 14 nt, Human
auuugaaauauuga

SEQ ID NO: 1592061 - RNA, 21 nt, Human
auugacccacaagaaaugaaa

SEQ ID NO: 1592062 - RNA, 18 nt, Human
auugacccacaagaaaug

SEQ ID NO: 1592063 - RNA, 14 nt, Human
auucuaaauuuuau

SEQ ID NO: 1592064 - RNA, 15 nt, Human
uuuuccaaaauaauu

SEQ ID NO: 1592065 - RNA, 18 nt, Human
uuuucugagaaagacuau

SEQ ID NO: 1592066 - RNA, 15 nt, Human
uuuucugagaaagac

SEQ ID NO: 1592067 - RNA, 16 nt, Human
uuuucucuaggaaaua

SEQ ID NO: 1592068 - RNA, 14 nt, Human
uuuucucuaggaaa

SEQ ID NO: 1592069 - RNA, 15 nt, Human
auuaaaagaauauuu

SEQ ID NO: 1592070 - RNA, 21 nt, Human
auguuuucaggcuagauguau

SEQ ID NO: 1592071 - RNA, 17 nt, Human
auguuuucaggcuagau

SEQ ID NO: 1592072 - RNA, 15 nt, Human
auguuuucaggcuag

SEQ ID NO: 1592073 - RNA, 18 nt, Human
auguucaucaaugaauga

SEQ ID NO: 1592074 - RNA, 14 nt, Human
uuuuaauaauguuu

SEQ ID NO: 1592075 - RNA, 13 nt, Human
uuuuaauaauguu

SEQ ID NO: 1592076 - RNA, 12 nt, Human
uuuuaauaaugu

SEQ ID NO: 1592077 - RNA, 16 nt, Human
uuuuaauaauguuuca

SEQ ID NO: 1592078 - RNA, 19 nt, Human
augugcuaguaauuggaaa

SEQ ID NO: 1592079 - RNA, 20 nt, Human
augugcuaguaauuggaaag

SEQ ID NO: 1592080 - RNA, 17 nt, Human
uuuuuguagcacugaca

SEQ ID NO: 1592081 - RNA, 23 nt, Human
auuaaguaaugauaacuggaaac

SEQ ID NO: 1592082 - RNA, 19 nt, Human
uuuuugugaaaagcuccau

SEQ ID NO: 1592083 - RNA, 20 nt, Human
auuacauuuguauaaaauaa

SEQ ID NO: 1592084 - RNA, 18 nt, Human
auuacauuuguauaaaau

SEQ ID NO: 1592085 - RNA, 17 nt, Human
auuacauuuguauaaaa

SEQ ID NO: 1592086 - RNA, 20 nt, Human
auuauauaaguauucuaaau

SEQ ID NO: 1592087 - RNA, 14 nt, Human
auuauauaaguauu

SEQ ID NO: 1592088 - RNA, 17 nt, Human
auuauauaaguauucua

SEQ ID NO: 1592089 - RNA, 14 nt, Human
uuuugaguucuaca

SEQ ID NO: 1592090 - RNA, 14 nt, Human
uuuuguucauacau

SEQ ID NO: 1592091 - RNA, 17 nt, Human
uuuuguucauacauauu

SEQ ID NO: 1592092 - RNA, 19 nt, Human
uuuuuauauuugaaauauu

SEQ ID NO: 1592093 - RNA, 16 nt, Human
aaaauauauuuaauga

SEQ ID NO: 1592094 - RNA, 15 nt, Human
aaaauauauuuaaug

SEQ ID NO: 1592095 - RNA, 14 nt, Human
aaaauacacacuca

SEQ ID NO: 1592096 - RNA, 20 nt, Human
aaaauaauuuuuauauuuga

SEQ ID NO: 1592097 - RNA, 17 nt, Human
aaaauaauuuuuauauu

SEQ ID NO: 1592098 - RNA, 16 nt, Human
aaaauaauuuuuauau

SEQ ID NO: 1592099 - RNA, 11 nt, Human
aaaauaauuuu

SEQ ID NO: 1592100 - RNA, 15 nt, Human
gggcgugguggugag

SEQ ID NO: 1592101 - RNA, 16 nt, Human
aaaauggguuuuacug

SEQ ID NO: 1592102 - RNA, 18 nt, Human
aaaaugguuuaaaugguc

SEQ ID NO: 1592103 - RNA, 16 nt, Human
aaaaugguuuaaaugg

SEQ ID NO: 1592104 - RNA, 18 nt, Human
ggucauauuaauauauuu

SEQ ID NO: 1592105 - RNA, 14 nt, Human
ggucagugcaaaua

SEQ ID NO: 1592106 - RNA, 21 nt, Human
aaacuucccuuucugcuugug

SEQ ID NO: 1592107 - RNA, 19 nt, Human
aaacuucagacauagaauu

SEQ ID NO: 1592108 - RNA, 14 nt, Human
aaauauauuuaaug

SEQ ID NO: 1592109 - RNA, 18 nt, Human
aaauauaugcuaagucuu

SEQ ID NO: 1592110 - RNA, 15 nt, Human
aaauauauuuaauga

SEQ ID NO: 1592111 - RNA, 22 nt, Human
aaauaucacuugucaauaaaau

SEQ ID NO: 1592112 - RNA, 21 nt, Human
aaauaccaugccauuuaaagc

SEQ ID NO: 1592113 - RNA, 20 nt, Human
aaauauuguguugugaaugu

SEQ ID NO: 1592114 - RNA, 17 nt, Human
aaauaugcaaagcacug

SEQ ID NO: 1592115 - RNA, 16 nt, Human
aaauaugcaaagcacu

SEQ ID NO: 1592116 - RNA, 15 nt, Human
aaauaugcaaagcac

SEQ ID NO: 1592117 - RNA, 13 nt, Human
aaauaugcaaagc

SEQ ID NO: 1592118 - RNA, 19 nt, Human
guaauagagcaaaauugau

SEQ ID NO: 1592119 - RNA, 15 nt, Human
guaauagagcaaaau

SEQ ID NO: 1592120 - RNA, 17 nt, Human
gguguuuuaaaaaaucu

SEQ ID NO: 1592121 - RNA, 20 nt, Human
gguucuagcauggcauauuu

SEQ ID NO: 1592122 - RNA, 17 nt, Human
aaaguauguuagugcaa

SEQ ID NO: 1592123 - RNA, 19 nt, Human
gguuuuauuguuuaaaauc

SEQ ID NO: 1592124 - RNA, 19 nt, Human
aaacuuuaugcuaagugaa

SEQ ID NO: 1592125 - RNA, 12 nt, Human
aaacuuuaugcu

SEQ ID NO: 1592126 - RNA, 16 nt, Human
aaagcagaacagugau

SEQ ID NO: 1592127 - RNA, 13 nt, Human
aaagcuuauuaaa

SEQ ID NO: 1592128 - RNA, 22 nt, Human
aaagggcuguuauaaucuuuca

SEQ ID NO: 1592129 - RNA, 20 nt, Human
aaagggcuguuauaaucuuu

SEQ ID NO: 1592130 - RNA, 20 nt, Human
aaaaagccugcaauuucaua

SEQ ID NO: 1592131 - RNA, 13 nt, Human
aaaaauacaaaaa

SEQ ID NO: 1592132 - RNA, 23 nt, Human
aaaaagauuuucagaaaauauua

SEQ ID NO: 1592133 - RNA, 16 nt, Human
ggccuucggccuccau

SEQ ID NO: 1592134 - RNA, 22 nt, Human
ggccuucggccuccauccugag

SEQ ID NO: 1592135 - RNA, 18 nt, Human
ggccuucggccuccaucc

SEQ ID NO: 1592136 - RNA, 20 nt, Human
ggcuaagcuucacuguaaaa

SEQ ID NO: 1592137 - RNA, 23 nt, Human
ggaucuucaucugacuaugacau

SEQ ID NO: 1592138 - RNA, 14 nt, Human
gcugccuccccucc

SEQ ID NO: 1592139 - RNA, 21 nt, Human
gcuguauuuuaaaagaaugau

SEQ ID NO: 1592140 - RNA, 18 nt, Human
gcuguauuuuaaaagaau

SEQ ID NO: 1592141 - RNA, 20 nt, Human
gcuguauuuuaaaagaauga

SEQ ID NO: 1592142 - RNA, 13 nt, Human
gcugcugaaacaa

SEQ ID NO: 1592143 - RNA, 21 nt, Human
ggacagucaccucauggaauu

SEQ ID NO: 1592144 - RNA, 18 nt, Human
ggacagucaccucaugga

SEQ ID NO: 1592145 - RNA, 17 nt, Human
ggacagucaccucaugg

SEQ ID NO: 1592146 - RNA, 19 nt, Human
ggaaaucaggguuaguauu

SEQ ID NO: 1592147 - RNA, 13 nt, Human
ggaaacugccagc

SEQ ID NO: 1592148 - RNA, 16 nt, Human
ggaaaaaauaacaaug

SEQ ID NO: 1592149 - RNA, 12 nt, Human
gcauuuagaugu

SEQ ID NO: 1592150 - RNA, 19 nt, Human
gcauuuaggccaugggaca

SEQ ID NO: 1592151 - RNA, 13 nt, Human
gcauuuagaugua

SEQ ID NO: 1592152 - RNA, 11 nt, Human
gccccaaaagg

SEQ ID NO: 1592153 - RNA, 22 nt, Human
gccucauguccacugguucuuc

SEQ ID NO: 1592154 - RNA, 15 nt, Human
gccuccauccugagg

SEQ ID NO: 1592155 - RNA, 14 nt, Human
gccuccauccugag

SEQ ID NO: 1592156 - RNA, 13 nt, Human
gccuccauccuga

SEQ ID NO: 1592157 - RNA, 17 nt, Human
gcaaaauugauguguuu

SEQ ID NO: 1592158 - RNA, 20 nt, Human
gcaucuagcaugucgucaaa

SEQ ID NO: 1592159 - RNA, 13 nt, Human
gcagugaugucac

SEQ ID NO: 1592160 - RNA, 22 nt, Human
gcaguuguugcccacagcugua

SEQ ID NO: 1592161 - RNA, 11 nt, Human
gcagcugccuc

SEQ ID NO: 1592162 - RNA, 13 nt, Human
gcagaacagugau

SEQ ID NO: 1592163 - RNA, 12 nt, Human
gcagaacaguga

SEQ ID NO: 1592164 - RNA, 22 nt, Human
gcagaacagugauuaccaggga

SEQ ID NO: 1592165 - RNA, 18 nt, Human
gcagaacagugauuacca

SEQ ID NO: 1592166 - RNA, 22 nt, Human
gaauauugcuuuggucauauga

SEQ ID NO: 1592167 - RNA, 14 nt, Human
gaaugaauggcuaa

SEQ ID NO: 1592168 - RNA, 20 nt, Human
gaaugaauggcuaagcaaaa

SEQ ID NO: 1592169 - RNA, 15 nt, Human
gaaugaauggcuaag

SEQ ID NO: 1592170 - RNA, 14 nt, Human
gaaugauuaugaau

SEQ ID NO: 1592171 - RNA, 22 nt, Human
gaaugauuaugaauuacauuug

SEQ ID NO: 1592172 - RNA, 15 nt, Human
gaauuaacacaugau

SEQ ID NO: 1592173 - RNA, 14 nt, Human
gaauuaacacauga

SEQ ID NO: 1592174 - RNA, 20 nt, Human
gaauuacauuuguauaaaau

SEQ ID NO: 1592175 - RNA, 18 nt, Human
gaauuacauuuguauaaa

SEQ ID NO: 1592176 - RNA, 15 nt, Human
gaauuacauuuguau

SEQ ID NO: 1592177 - RNA, 13 nt, Human
gaauuacauuugu

SEQ ID NO: 1592178 - RNA, 12 nt, Human
gacagcucugca

SEQ ID NO: 1592179 - RNA, 18 nt, Human
gacagucaccucauggaa

SEQ ID NO: 1592180 - RNA, 14 nt, Human
gacgcucucuggcc

SEQ ID NO: 1592181 - RNA, 22 nt, Human
gacuuuuuauggcacuaguauu

SEQ ID NO: 1592182 - RNA, 21 nt, Human
gagauugugccccugcacucc

SEQ ID NO: 1592183 - RNA, 16 nt, Human
gagaugcuagaacucc

SEQ ID NO: 1592184 - RNA, 20 nt, Human
gagaugcuagaacucccuuu

SEQ ID NO: 1592185 - RNA, 22 nt, Human
gagcuguucacagccagacugg

SEQ ID NO: 1592186 - RNA, 20 nt, Human
gagcuguucacagccagacu

SEQ ID NO: 1592187 - RNA, 14 nt, Human
gagcagucaggaaa

SEQ ID NO: 1592188 - RNA, 15 nt, Human
gaggcuccacuuggu

SEQ ID NO: 1592189 - RNA, 18 nt, Human
gaggcuccacuuggucug

SEQ ID NO: 1592190 - RNA, 17 nt, Human
gaggcuccacuuggucu

SEQ ID NO: 1592191 - RNA, 18 nt, Human
gaggcugagaugggagaa

SEQ ID NO: 1592192 - RNA, 21 nt, Human
gaggacgcucucuggccuucg

SEQ ID NO: 1592193 - RNA, 14 nt, Human
gaggagaaacugga

SEQ ID NO: 1592194 - RNA, 12 nt, Human
gaggagaaacug

SEQ ID NO: 1592195 - RNA, 23 nt, Human
cugugaaguuuacauuguaaaua

SEQ ID NO: 1592196 - RNA, 23 nt, Human
cugugagaugcuagaacucccuu

SEQ ID NO: 1592197 - RNA, 22 nt, Human
cuguucacagccagacuggcac

SEQ ID NO: 1592198 - RNA, 19 nt, Human
cuguucacagccagacugg

SEQ ID NO: 1592199 - RNA, 20 nt, Human
cuuaaaaaugguuuaaaugg

SEQ ID NO: 1592200 - RNA, 13 nt, Human
cuuaaaaaugguu

SEQ ID NO: 1592201 - RNA, 21 nt, Human
cuuaaaaaugguuuaaauggu

SEQ ID NO: 1592202 - RNA, 20 nt, Human
cugucuacacuaagagagaa

SEQ ID NO: 1592203 - RNA, 20 nt, Human
cuguaagaaaauaucacuug

SEQ ID NO: 1592204 - RNA, 12 nt, Human
cuggugccucac

SEQ ID NO: 1592205 - RNA, 17 nt, Human
cugccuccccuccucug

SEQ ID NO: 1592206 - RNA, 18 nt, Human
cugccuccccuccucugc

SEQ ID NO: 1592207 - RNA, 21 nt, Human
cugccuccccuccucugcuug

SEQ ID NO: 1592208 - RNA, 19 nt, Human
cugccuccccuccucugcu

SEQ ID NO: 1592209 - RNA, 20 nt, Human
cugccuccccuccucugcuu

SEQ ID NO: 1592210 - RNA, 23 nt, Human
cuggaaaaguauguuagugcaaa

SEQ ID NO: 1592211 - RNA, 16 nt, Human
gaacaagaugguucua

SEQ ID NO: 1592212 - RNA, 23 nt, Human
gaacaaauuuacagagacagaaa

SEQ ID NO: 1592213 - RNA, 18 nt, Human
gaacaaauuuacagagac

SEQ ID NO: 1592214 - RNA, 17 nt, Human
gaacaaauuuacagaga

SEQ ID NO: 1592215 - RNA, 18 nt, Human
gaaaugaaagcagggacu

SEQ ID NO: 1592216 - RNA, 23 nt, Human
gaaaucaaauaugcaaagcacug

SEQ ID NO: 1592217 - RNA, 19 nt, Human
gaaaucaaagagagaaaau

SEQ ID NO: 1592218 - RNA, 16 nt, Human
gaaaucaaauaugcaa

SEQ ID NO: 1592219 - RNA, 17 nt, Human
gaaaucaaauaugcaaa

SEQ ID NO: 1592220 - RNA, 23 nt, Human
gaaacuucagcgguuuauauaag

SEQ ID NO: 1592221 - RNA, 21 nt, Human
gaaaagacuccaaagaaaugu

SEQ ID NO: 1592222 - RNA, 20 nt, Human
gaaaagacuccaaagaaaug

SEQ ID NO: 1592223 - RNA, 23 nt, Human
cuuggucucagugucaaugcagc

SEQ ID NO: 1592224 - RNA, 20 nt, Human
auuaaauuuugaguucuaca

SEQ ID NO: 1592225 - RNA, 18 nt, Human
auuaaauuuugaguucua

SEQ ID NO: 1592226 - RNA, 22 nt, Human
auucaagaaaacaacuucaaua

SEQ ID NO: 1592227 - RNA, 18 nt, Human
auucacaagacccaaaag

SEQ ID NO: 1592228 - RNA, 17 nt, Human
auucuugccaaauauaa

SEQ ID NO: 1592229 - RNA, 19 nt, Human
auuuauacaggucauauua

SEQ ID NO: 1592230 - RNA, 16 nt, Human
auuucagcagcugcag

SEQ ID NO: 1592231 - RNA, 22 nt, Human
auuuaaugauaaguaaaugcua

SEQ ID NO: 1592232 - RNA, 20 nt, Human
auuucuaugaaauauuaugu

SEQ ID NO: 1592233 - RNA, 18 nt, Human
auuucuaugaaauauuau

SEQ ID NO: 1592234 - RNA, 15 nt, Human
auuucuaugaaauau

SEQ ID NO: 1592235 - RNA, 19 nt, Human
auuguuuaaaaucauuucu

SEQ ID NO: 1592236 - RNA, 17 nt, Human
auuguaaaugugcuuuu

SEQ ID NO: 1592237 - RNA, 15 nt, Human
auuguaaaugugcuu

SEQ ID NO: 1592238 - RNA, 14 nt, Human
auuguaaaugugcu

SEQ ID NO: 1592239 - RNA, 23 nt, Human
auuguaauaggcguaacuaauuu

SEQ ID NO: 1592240 - RNA, 13 nt, Human
auuguaaaauggu

SEQ ID NO: 1592241 - RNA, 18 nt, Human
caaaaaaauauauuuaau

SEQ ID NO: 1592242 - RNA, 17 nt, Human
auuuuauagcuacuaau

SEQ ID NO: 1592243 - RNA, 19 nt, Human
caacccaaauguucaucaa

SEQ ID NO: 1592244 - RNA, 21 nt, Human
caacuaucucauuuccaagca

SEQ ID NO: 1592245 - RNA, 15 nt, Human
caacacgagcaggcu

SEQ ID NO: 1592246 - RNA, 13 nt, Human
cagaauauugcuu

SEQ ID NO: 1592247 - RNA, 18 nt, Human
cagaauauguuucaaacu

SEQ ID NO: 1592248 - RNA, 20 nt, Human
cagaauauguuucaaacuuu

SEQ ID NO: 1592249 - RNA, 13 nt, Human
cagaauauguuuc

SEQ ID NO: 1592250 - RNA, 14 nt, Human
cagaauauguuuca

SEQ ID NO: 1592251 - RNA, 15 nt, Human
cagaauauguuucaa

SEQ ID NO: 1592252 - RNA, 17 nt, Human
cagaauauguuucaaac

SEQ ID NO: 1592253 - RNA, 12 nt, Human
cagaauauguuu

SEQ ID NO: 1592254 - RNA, 20 nt, Human
cacuuggucugugagaugcu

SEQ ID NO: 1592255 - RNA, 23 nt, Human
caccucaaaauaccaugccauuu

SEQ ID NO: 1592256 - RNA, 21 nt, Human
caccuacaugagguacugaga

SEQ ID NO: 1592257 - RNA, 11 nt, Human
cacugaagaag

SEQ ID NO: 1592258 - RNA, 23 nt, Human
caaugcuguauuuuaaaagaaug

SEQ ID NO: 1592259 - RNA, 14 nt, Human
caaugcuguauuuu

SEQ ID NO: 1592260 - RNA, 21 nt, Human
caauauuucagauaaucacaa

SEQ ID NO: 1592261 - RNA, 20 nt, Human
caauauuucagauaaucaca

SEQ ID NO: 1592262 - RNA, 12 nt, Human
caauauuucaga

SEQ ID NO: 1592263 - RNA, 12 nt, Human
caauuuaaaaaa

SEQ ID NO: 1592264 - RNA, 16 nt, Human
cacaagacugcacauc

SEQ ID NO: 1592265 - RNA, 20 nt, Human
caaguauuagaauaccacag

SEQ ID NO: 1592266 - RNA, 14 nt, Human
caaguauuagaaua

SEQ ID NO: 1592267 - RNA, 13 nt, Human
cacaucagcuugc

SEQ ID NO: 1592268 - RNA, 14 nt, Human
cauauuaauauauu

SEQ ID NO: 1592269 - RNA, 15 nt, Human
cauauuaauauauuu

SEQ ID NO: 1592270 - RNA, 19 nt, Human
cauauuaauauauuuccau

SEQ ID NO: 1592271 - RNA, 23 nt, Human
cauaugcuguauauccuuucuaa

SEQ ID NO: 1592272 - RNA, 19 nt, Human
cauuauauuuauuacugua

SEQ ID NO: 1592273 - RNA, 14 nt, Human
caugauguuuagaa

SEQ ID NO: 1592274 - RNA, 17 nt, Human
ccaaauguucaucaaug

SEQ ID NO: 1592275 - RNA, 18 nt, Human
ccaaauguucaucaauga

SEQ ID NO: 1592276 - RNA, 20 nt, Human
cauuuguauaaaauaauuuu

SEQ ID NO: 1592277 - RNA, 19 nt, Human
cauuuguauaaaauaauuu

SEQ ID NO: 1592278 - RNA, 12 nt, Human
ccacagcaguug

SEQ ID NO: 1592279 - RNA, 18 nt, Human
ccacagcaguugaaaaga

SEQ ID NO: 1592280 - RNA, 17 nt, Human
ccacagcaguugaaaag

SEQ ID NO: 1592281 - RNA, 23 nt, Human
ccacagcaguugaaaagacucca

SEQ ID NO: 1592282 - RNA, 20 nt, Human
cagucugacuguuuccauca

SEQ ID NO: 1592283 - RNA, 19 nt, Human
caggugccaguuauggcua

SEQ ID NO: 1592284 - RNA, 19 nt, Human
cagucaccucauggaauug

SEQ ID NO: 1592285 - RNA, 15 nt, Human
cagucacauuccaag

SEQ ID NO: 1592286 - RNA, 16 nt, Human
cagucaccucauggaa

SEQ ID NO: 1592287 - RNA, 22 nt, Human
cagcuccccucggagaagagcu

SEQ ID NO: 1592288 - RNA, 21 nt, Human
cagcuccccucggagaagagc

SEQ ID NO: 1592289 - RNA, 13 nt, Human
cagcaguucagag

SEQ ID NO: 1592290 - RNA, 18 nt, Human
cagcaguucagagcugcc

SEQ ID NO: 1592291 - RNA, 17 nt, Human
cagagguugcagugagc

SEQ ID NO: 1592292 - RNA, 12 nt, Human
cagauccuggaa

SEQ ID NO: 1592293 - RNA, 13 nt, Human
cagauccuggaaa

SEQ ID NO: 1592294 - RNA, 23 nt, Human
cgccacuguuuugaaucucauaa

SEQ ID NO: 1592295 - RNA, 18 nt, Human
cgcaggcccccaggugcc

SEQ ID NO: 1592296 - RNA, 17 nt, Human
cuacaaaaacacagcaa

SEQ ID NO: 1592297 - RNA, 16 nt, Human
cuacaaaaacacagca

SEQ ID NO: 1592298 - RNA, 18 nt, Human
cuacaaaaacacagcaag

SEQ ID NO: 1592299 - RNA, 18 nt, Human
cuacauacuauggaauuu

SEQ ID NO: 1592300 - RNA, 20 nt, Human
cuacaugagguacugagagu

SEQ ID NO: 1592301 - RNA, 23 nt, Human
cuaaguaaaaccacagcaguuga

SEQ ID NO: 1592302 - RNA, 22 nt, Human
cuaaguaaaaccacagcaguug

SEQ ID NO: 1592303 - RNA, 13 nt, Human
cuagaacucccuu

SEQ ID NO: 1592304 - RNA, 12 nt, Human
cuagaacucccu

SEQ ID NO: 1592305 - RNA, 23 nt, Human
cucaaaauaccaugccauuuaaa

SEQ ID NO: 1592306 - RNA, 13 nt, Human
cugaaacuucccu

SEQ ID NO: 1592307 - RNA, 15 nt, Human
cugaaacaacaaaua

SEQ ID NO: 1592308 - RNA, 22 nt, Human
cucuuagaugcaguucugaaga

SEQ ID NO: 1592309 - RNA, 16 nt, Human
cugagaugugaacaca

SEQ ID NO: 1592310 - RNA, 12 nt, Human
cuccucugcuug

SEQ ID NO: 1592311 - RNA, 14 nt, Human
cuccucugcuugcc

SEQ ID NO: 1592312 - RNA, 12 nt, Human
cuccugggcagc

SEQ ID NO: 1592313 - RNA, 14 nt, Human
cuccugggcagcug

SEQ ID NO: 1592314 - RNA, 15 nt, Human
cuccugggcagcugc

SEQ ID NO: 1592315 - RNA, 16 nt, Human
cuccugggcagcugcc

SEQ ID NO: 1592316 - RNA, 17 nt, Human
cuccugggcagcugccu

SEQ ID NO: 1592317 - RNA, 18 nt, Human
cuccugggcagcugccuc

SEQ ID NO: 1592318 - RNA, 19 nt, Human
cuccugggcagcugccucc

SEQ ID NO: 1592319 - RNA, 22 nt, Human
cuccugggcagcugccuccccu

SEQ ID NO: 1592320 - RNA, 21 nt, Human
cuccucugcuugccaucccuc

SEQ ID NO: 1592321 - RNA, 22 nt, Human
cuccucugcuugccaucccucc

SEQ ID NO: 1592322 - RNA, 15 nt, Human
cuccucugcuugcca

SEQ ID NO: 1592323 - RNA, 16 nt, Human
cuccucugcuugccau

SEQ ID NO: 1592324 - RNA, 17 nt, Human
cuccucugcuugccauc

SEQ ID NO: 1592325 - RNA, 20 nt, Human
cuccucugcuugccaucccu

SEQ ID NO: 1592326 - RNA, 14 nt, Human
cucguuaauuugua

SEQ ID NO: 1592327 - RNA, 23 nt, Human
cuccacuuggucugugagaugcu

SEQ ID NO: 1592328 - RNA, 22 nt, Human
cuccacuuggucugugagaugc

SEQ ID NO: 1592329 - RNA, 21 nt, Human
cuccacuuggucugugagaug

SEQ ID NO: 1592330 - RNA, 17 nt, Human
cuccacuuggucuguga

SEQ ID NO: 1592331 - RNA, 16 nt, Human
cuccacuuggucugug

SEQ ID NO: 1592332 - RNA, 15 nt, Human
cuccacuuggucugu

SEQ ID NO: 1592333 - RNA, 13 nt, Human
cuccacuuggucu

SEQ ID NO: 1592334 - RNA, 22 nt, Human
ccauuuaaagcuuauuaaaacu

SEQ ID NO: 1592335 - RNA, 14 nt, Human
ccauacauuugugu

SEQ ID NO: 1592336 - RNA, 13 nt, Human
ccauacauuugug

SEQ ID NO: 1592337 - RNA, 18 nt, Human
ccccugcacuccagccug

SEQ ID NO: 1592338 - RNA, 23 nt, Human
ccucauggaauuggagcucgugg

SEQ ID NO: 1592339 - RNA, 15 nt, Human
ccuguaaucacagcu

SEQ ID NO: 1592340 - RNA, 13 nt, Human
cacugacagauuu

SEQ ID NO: 1592341 - RNA, 17 nt, Human
cacugacagauuuccau

SEQ ID NO: 1592342 - RNA, 22 nt, Human
cacugacagauuuccauccuag

SEQ ID NO: 1592343 - RNA, 20 nt, Human
cacugacuucuaaguaaaac

SEQ ID NO: 1592344 - RNA, 16 nt, Human
cacugacuucuaagua

SEQ ID NO: 1592345 - RNA, 15 nt, Human
cacugacuucuaagu

SEQ ID NO: 1592346 - RNA, 14 nt, Human
cacugacuucuaag

SEQ ID NO: 1592347 - RNA, 21 nt, Human
cacugacuucuaaguaaaacc

SEQ ID NO: 1592348 - RNA, 20 nt, Human
cacugccuucucaacuccaa

SEQ ID NO: 1592349 - RNA, 23 nt, Human
cacuugaacccgggaggcagagg

SEQ ID NO: 1592350 - RNA, 21 nt, Human
cacuugaacccgggaggcaga

SEQ ID NO: 1592351 - RNA, 20 nt, Human
cacuugaacccgggaggcag

SEQ ID NO: 1592352 - RNA, 17 nt, Human
cacuuggucugugagau

SEQ ID NO: 1592353 - RNA, 15 nt, Human
cacuuggucugugag

SEQ ID NO: 1592354 - RNA, 19 nt, Human
cacuguggguagacacaca

SEQ ID NO: 1592355 - RNA, 24 nt, Human
cacuguggguagacacacaugaag

SEQ ID NO: 1592356 - RNA, 22 nt, Human
cacuguggguagacacacauga

SEQ ID NO: 1592357 - RNA, 14 nt, Human
cacugucaagauga

SEQ ID NO: 1592358 - RNA, 22 nt, Human
cacgagcaggcuacugucagcu

SEQ ID NO: 1592359 - RNA, 20 nt, Human
cacgagcaggcuacugucag

SEQ ID NO: 1592360 - RNA, 19 nt, Human
cacgagcaggcuacuguca

SEQ ID NO: 1592361 - RNA, 17 nt, Human
cacgagcaggcuacugu

SEQ ID NO: 1592362 - RNA, 22 nt, Human
cacguucuuacuaguuucccuu

SEQ ID NO: 1592363 - RNA, 13 nt, Human
cacuaaacaaaga

SEQ ID NO: 1592364 - RNA, 16 nt, Human
cacucaaaucaagaaa

SEQ ID NO: 1592365 - RNA, 19 nt, Human
cacuaguauuucuaugaaa

SEQ ID NO: 1592366 - RNA, 14 nt, Human
cacuaguauuucua

SEQ ID NO: 1592367 - RNA, 21 nt, Human
cacuaaauugacacuuaaaaa

SEQ ID NO: 1592368 - RNA, 17 nt, Human
cacuaagagagaaugag

SEQ ID NO: 1592369 - RNA, 13 nt, Human
caccucccugcaa

SEQ ID NO: 1592370 - RNA, 14 nt, Human
caccucccugcaau

SEQ ID NO: 1592371 - RNA, 14 nt, Human
caccucauggaauu

SEQ ID NO: 1592372 - RNA, 12 nt, Human
caccucauggaa

SEQ ID NO: 1592373 - RNA, 11 nt, Human
caccucaugga

SEQ ID NO: 1592374 - RNA, 10 nt, Human
caccucccug

SEQ ID NO: 1592375 - RNA, 14 nt, Human
cagauaaucagugu

SEQ ID NO: 1592376 - RNA, 14 nt, Human
cagauaaucacaau

SEQ ID NO: 1592377 - RNA, 14 nt, Human
cagauaaacaguag

SEQ ID NO: 1592378 - RNA, 23 nt, Human
cagauaaauaguuuaugauucca

SEQ ID NO: 1592379 - RNA, 14 nt, Human
cagauccuggaaau

SEQ ID NO: 1592380 - RNA, 19 nt, Human
cagaaaauauuauguguuu

SEQ ID NO: 1592381 - RNA, 23 nt, Human
cagaacagugauuaccagggacu

SEQ ID NO: 1592382 - RNA, 19 nt, Human
cagaaagcagaacagugau

SEQ ID NO: 1592383 - RNA, 18 nt, Human
cagaaagcagaacaguga

SEQ ID NO: 1592384 - RNA, 17 nt, Human
cagaaggaucuucaucu

SEQ ID NO: 1592385 - RNA, 20 nt, Human
cagaagcaacccaaauguuc

SEQ ID NO: 1592386 - RNA, 19 nt, Human
cagaagcaacccaaauguu

SEQ ID NO: 1592387 - RNA, 19 nt, Human
cagacauagaauuaacaca

SEQ ID NO: 1592388 - RNA, 17 nt, Human
cagacauagaauuaaca

SEQ ID NO: 1592389 - RNA, 16 nt, Human
cagauggaaugcugug

SEQ ID NO: 1592390 - RNA, 17 nt, Human
cagauggaaugcugugu

SEQ ID NO: 1592391 - RNA, 19 nt, Human
cagauggaaugcuguguua

SEQ ID NO: 1592392 - RNA, 21 nt, Human
cagauggaaugcuguguuaaa

SEQ ID NO: 1592393 - RNA, 15 nt, Human
cagauuuuccugaaa

SEQ ID NO: 1592394 - RNA, 14 nt, Human
cagauuuuccugaa

SEQ ID NO: 1592395 - RNA, 23 nt, Human
cagcaacgcaggcccccaggugc

SEQ ID NO: 1592396 - RNA, 19 nt, Human
cagcaagggugaugggaaa

SEQ ID NO: 1592397 - RNA, 23 nt, Human
cagcaagggugaugggaaagcau

SEQ ID NO: 1592398 - RNA, 22 nt, Human
cagcaagggugaugggaaagca

SEQ ID NO: 1592399 - RNA, 15 nt, Human
caggaaguagaggag

SEQ ID NO: 1592400 - RNA, 16 nt, Human
caggaaguagaggagg

SEQ ID NO: 1592401 - RNA, 23 nt, Human
cagcuuuccucaaaacuucagac

SEQ ID NO: 1592402 - RNA, 18 nt, Human
caggaaccacaagacugc

SEQ ID NO: 1592403 - RNA, 18 nt, Human
cagcuugaaacugagaug

SEQ ID NO: 1592404 - RNA, 19 nt, Human
cagcuguaugauucccagc

SEQ ID NO: 1592405 - RNA, 21 nt, Human
cagcugcugaaacaacaaaua

SEQ ID NO: 1592406 - RNA, 20 nt, Human
cagcugcugaaacaacaaau

SEQ ID NO: 1592407 - RNA, 18 nt, Human
cagcuguaugauucccag

SEQ ID NO: 1592408 - RNA, 20 nt, Human
cagcucugcauacucauuag

SEQ ID NO: 1592409 - RNA, 16 nt, Human
cagccuaguugaucag

SEQ ID NO: 1592410 - RNA, 19 nt, Human
cagcuacuugggaggcuga

SEQ ID NO: 1592411 - RNA, 20 nt, Human
caggucauauuaauauauuu

SEQ ID NO: 1592412 - RNA, 21 nt, Human
caggucauauuaauauauuuc

SEQ ID NO: 1592413 - RNA, 12 nt, Human
cagugaauucuu

SEQ ID NO: 1592414 - RNA, 15 nt, Human
cagugagacagcucu

SEQ ID NO: 1592415 - RNA, 16 nt, Human
cagugaaagaaaauaa

SEQ ID NO: 1592416 - RNA, 20 nt, Human
cagugaaagaaaauaacaau

SEQ ID NO: 1592417 - RNA, 18 nt, Human
cagugauuaccagggacu

SEQ ID NO: 1592418 - RNA, 17 nt, Human
cagugauuaccagggac

SEQ ID NO: 1592419 - RNA, 12 nt, Human
caguauggcagc

SEQ ID NO: 1592420 - RNA, 12 nt, Human
caguagugauag

SEQ ID NO: 1592421 - RNA, 13 nt, Human
caguccaugaaga

SEQ ID NO: 1592422 - RNA, 22 nt, Human
cagucaggaaagagaacuucca

SEQ ID NO: 1592423 - RNA, 18 nt, Human
cagucaggaaagagaacu

SEQ ID NO: 1592424 - RNA, 15 nt, Human
cagucaggaaagaga

SEQ ID NO: 1592425 - RNA, 12 nt, Human
caggagaguaga

SEQ ID NO: 1592426 - RNA, 20 nt, Human
caggcccccaggugccaguu

SEQ ID NO: 1592427 - RNA, 19 nt, Human
caggcccccaggugccagu

SEQ ID NO: 1592428 - RNA, 14 nt, Human
caggcccccaggug

SEQ ID NO: 1592429 - RNA, 23 nt, Human
caggaugguucccuugaugaaga

SEQ ID NO: 1592430 - RNA, 21 nt, Human
caggaugguucccuugaugaa

SEQ ID NO: 1592431 - RNA, 16 nt, Human
caggauuuuaaucuuu

SEQ ID NO: 1592432 - RNA, 16 nt, Human
caggggacaggauggu

SEQ ID NO: 1592433 - RNA, 11 nt, Human
caggggacagg

SEQ ID NO: 1592434 - RNA, 17 nt, Human
cagggcauggcugggaa

SEQ ID NO: 1592435 - RNA, 18 nt, Human
cagggacaggauaagagg

SEQ ID NO: 1592436 - RNA, 14 nt, Human
caggcuacugucag

SEQ ID NO: 1592437 - RNA, 19 nt, Human
caggcuagauguauguacu

SEQ ID NO: 1592438 - RNA, 13 nt, Human
caggcuagaugua

SEQ ID NO: 1592439 - RNA, 17 nt, Human
caucugacuaugacaua

SEQ ID NO: 1592440 - RNA, 19 nt, Human
caugaagauguagaggaga

SEQ ID NO: 1592441 - RNA, 18 nt, Human
caugaagauguagaggag

SEQ ID NO: 1592442 - RNA, 16 nt, Human
caugagguacugagag

SEQ ID NO: 1592443 - RNA, 19 nt, Human
caugagguacugagaguga

SEQ ID NO: 1592444 - RNA, 21 nt, Human
cauaucuaguaugaaauuaua

SEQ ID NO: 1592445 - RNA, 15 nt, Human
cauaucuaguaugaa

SEQ ID NO: 1592446 - RNA, 17 nt, Human
cauaucuaguaugaaau

SEQ ID NO: 1592447 - RNA, 18 nt, Human
cauaucuaguaugaaauu

SEQ ID NO: 1592448 - RNA, 20 nt, Human
cauauauaacaaugcuguau

SEQ ID NO: 1592449 - RNA, 15 nt, Human
cauauauaacaaugc

SEQ ID NO: 1592450 - RNA, 13 nt, Human
cauauauaacaau

SEQ ID NO: 1592451 - RNA, 22 nt, Human
caucccucccuccaccucccug

SEQ ID NO: 1592452 - RNA, 23 nt, Human
caucccucccuccaccucccugc

SEQ ID NO: 1592453 - RNA, 18 nt, Human
caucccuuaccugggaaa

SEQ ID NO: 1592454 - RNA, 21 nt, Human
cauuaaaaaaucaguuguaca

SEQ ID NO: 1592455 - RNA, 20 nt, Human
caugugcuaguaauuggaaa

SEQ ID NO: 1592456 - RNA, 23 nt, Human
cauggcauauuuuucacauaucu

SEQ ID NO: 1592457 - RNA, 15 nt, Human
cauggcauauuuuuc

SEQ ID NO: 1592458 - RNA, 19 nt, Human
cauggcauauuuuucacau

SEQ ID NO: 1592459 - RNA, 13 nt, Human
cauggcauauuuu

SEQ ID NO: 1592460 - RNA, 20 nt, Human
cauggaauuggagcucgugg

SEQ ID NO: 1592461 - RNA, 20 nt, Human
cauuguacgaagaguauuuu

SEQ ID NO: 1592462 - RNA, 19 nt, Human
cauuguacgaagaguauuu

SEQ ID NO: 1592463 - RNA, 21 nt, Human
cauuguaaaugugcuuuuaaa

SEQ ID NO: 1592464 - RNA, 22 nt, Human
cauuccaacuaucucauuucca

SEQ ID NO: 1592465 - RNA, 13 nt, Human
cauucuggaauaa

SEQ ID NO: 1592466 - RNA, 19 nt, Human
ccaugggacagggaggacg

SEQ ID NO: 1592467 - RNA, 16 nt, Human
ccaugggacagggagg

SEQ ID NO: 1592468 - RNA, 14 nt, Human
ccaguuauggcuau

SEQ ID NO: 1592469 - RNA, 21 nt, Human
ccaguuauggcuauaggugcu

SEQ ID NO: 1592470 - RNA, 23 nt, Human
ccagcaguucagagcugcccucu

SEQ ID NO: 1592471 - RNA, 13 nt, Human
ccagcaguucaga

SEQ ID NO: 1592472 - RNA, 18 nt, Human
ccagcaguucagagcugc

SEQ ID NO: 1592473 - RNA, 19 nt, Human
ccagcaguucagagcugcc

SEQ ID NO: 1592474 - RNA, 20 nt, Human
ccagcaguucagagcugccc

SEQ ID NO: 1592475 - RNA, 21 nt, Human
ccagcaguucagagcugcccu

SEQ ID NO: 1592476 - RNA, 22 nt, Human
ccagcaguucagagcugcccuc

SEQ ID NO: 1592477 - RNA, 22 nt, Human
ccagccagcaguucagagcugc

SEQ ID NO: 1592478 - RNA, 14 nt, Human
ccaccucccugcaa

SEQ ID NO: 1592479 - RNA, 19 nt, Human
ccugcaauuucauaugcug

SEQ ID NO: 1592480 - RNA, 16 nt, Human
ccugcaauaaaauggg

SEQ ID NO: 1592481 - RNA, 11 nt, Human
ccugagcccca

SEQ ID NO: 1592482 - RNA, 23 nt, Human
ccuggaaaucaggguuaguauug

SEQ ID NO: 1592483 - RNA, 23 nt, Human
cgaagaguauuuuugacagaaua

SEQ ID NO: 1592484 - RNA, 21 nt, Human
cgaagaguauuuuugacagaa

SEQ ID NO: 1592485 - RNA, 18 nt, Human
cgagcaggcuacugucag

SEQ ID NO: 1592486 - RNA, 15 nt, Human
ccuucugugaaagua

SEQ ID NO: 1592487 - RNA, 16 nt, Human
ccuucggccuccaucc

SEQ ID NO: 1592488 - RNA, 19 nt, Human
ccuuggggcugaugcaguu

SEQ ID NO: 1592489 - RNA, 20 nt, Human
ccuucggccuccauccugag

SEQ ID NO: 1592490 - RNA, 14 nt, Human
ccuucggccuccau

SEQ ID NO: 1592491 - RNA, 12 nt, Human
ccuucagccuga

SEQ ID NO: 1592492 - RNA, 21 nt, Human
ccuguuaaaagaugaaaauau

SEQ ID NO: 1592493 - RNA, 20 nt, Human
ccuguuaaaagaugaaaaua

SEQ ID NO: 1592494 - RNA, 16 nt, Human
ccgggcguggugguga

SEQ ID NO: 1592495 - RNA, 13 nt, Human
ccuccaccucccu

SEQ ID NO: 1592496 - RNA, 14 nt, Human
ccuccaccucccug

SEQ ID NO: 1592497 - RNA, 15 nt, Human
ccuccaccucccugc

SEQ ID NO: 1592498 - RNA, 17 nt, Human
ccuccaccucccugcaa

SEQ ID NO: 1592499 - RNA, 22 nt, Human
ccuccaccucccugcaauaaaa

SEQ ID NO: 1592500 - RNA, 17 nt, Human
ccucccuccaccucccu

SEQ ID NO: 1592501 - RNA, 20 nt, Human
ccucccuccaccucccugca

SEQ ID NO: 1592502 - RNA, 16 nt, Human
ccuccucugcuugcca

SEQ ID NO: 1592503 - RNA, 18 nt, Human
ccuccucugcuugccauc

SEQ ID NO: 1592504 - RNA, 15 nt, Human
cccgugggguuccuc

SEQ ID NO: 1592505 - RNA, 14 nt, Human
cccucuccugggca

SEQ ID NO: 1592506 - RNA, 15 nt, Human
cccucuccugggcag

SEQ ID NO: 1592507 - RNA, 11 nt, Human
cccucuccugg

SEQ ID NO: 1592508 - RNA, 12 nt, Human
cccucuccuggg

SEQ ID NO: 1592509 - RNA, 13 nt, Human
cccucuccugggc

SEQ ID NO: 1592510 - RNA, 14 nt, Human
cccuccaccucccu

SEQ ID NO: 1592511 - RNA, 12 nt, Human
cccuccaccucc

SEQ ID NO: 1592512 - RNA, 19 nt, Human
cccuccaccucccugcaau

SEQ ID NO: 1592513 - RNA, 15 nt, Human
cccuccaccucccug

SEQ ID NO: 1592514 - RNA, 17 nt, Human
cccuccaccucccugca

SEQ ID NO: 1592515 - RNA, 13 nt, Human
cccacaagaaaug

SEQ ID NO: 1592516 - RNA, 20 nt, Human
cccacaagaaaugaaagcag

SEQ ID NO: 1592517 - RNA, 18 nt, Human
cugugaaaguacauuugg

SEQ ID NO: 1592518 - RNA, 18 nt, Human
cugucuucacaacagauu

SEQ ID NO: 1592519 - RNA, 16 nt, Human
cuguuaaaagaugaaa

SEQ ID NO: 1592520 - RNA, 15 nt, Human
cuguuaaaagaugaa

SEQ ID NO: 1592521 - RNA, 19 nt, Human
cuguuaaaagaugaaaaua

SEQ ID NO: 1592522 - RNA, 20 nt, Human
cuguuaaaagaugaaaauau

SEQ ID NO: 1592523 - RNA, 15 nt, Human
cuguuuuauaauuuu

SEQ ID NO: 1592524 - RNA, 14 nt, Human
cuguuuuauaauuu

SEQ ID NO: 1592525 - RNA, 17 nt, Human
cuuaauuaaaagaauau

SEQ ID NO: 1592526 - RNA, 16 nt, Human
cuuaauuaaaagaaua

SEQ ID NO: 1592527 - RNA, 20 nt, Human
cuuaauuaaaagaauauuuu

SEQ ID NO: 1592528 - RNA, 19 nt, Human
cuuaauuaaaagaauauuu

SEQ ID NO: 1592529 - RNA, 12 nt, Human
cuuaaaaauggu

SEQ ID NO: 1592530 - RNA, 23 nt, Human
cuuaagaagacugcauuauauuu

SEQ ID NO: 1592531 - RNA, 20 nt, Human
cuucggccuccauccugagg

SEQ ID NO: 1592532 - RNA, 19 nt, Human
cuuccagauccuggaaauc

SEQ ID NO: 1592533 - RNA, 14 nt, Human
cuucacaacagauu

SEQ ID NO: 1592534 - RNA, 12 nt, Human
cuucacaacaga

SEQ ID NO: 1592535 - RNA, 17 nt, Human
cuucaaauccuugaaga

SEQ ID NO: 1592536 - RNA, 15 nt, Human
cuucagccugaaaga

SEQ ID NO: 1592537 - RNA, 16 nt, Human
cuucagcgguuuauau

SEQ ID NO: 1592538 - RNA, 19 nt, Human
cuuguguuaaguaugugua

SEQ ID NO: 1592539 - RNA, 18 nt, Human
cuuuaaagggauggcaag

SEQ ID NO: 1592540 - RNA, 20 nt, Human
cuuuaaagggauggcaagau

SEQ ID NO: 1592541 - RNA, 21 nt, Human
cuuuauuuucuauaauuuaaa

SEQ ID NO: 1592542 - RNA, 13 nt, Human
cuuuccacagaag

SEQ ID NO: 1592543 - RNA, 21 nt, Human
cuugccaucccucccuccacc

SEQ ID NO: 1592544 - RNA, 18 nt, Human
cuugcccuggugccucac

SEQ ID NO: 1592545 - RNA, 22 nt, Human
cuugccaucccucccuccaccu

SEQ ID NO: 1592546 - RNA, 19 nt, Human
cuuguaaaggaauuuaaaa

SEQ ID NO: 1592547 - RNA, 17 nt, Human
gaaaauauuauguguuu

SEQ ID NO: 1592548 - RNA, 12 nt, Human
gaaaauaucacu

SEQ ID NO: 1592549 - RNA, 19 nt, Human
gaaaaucuuauaauuuaaa

SEQ ID NO: 1592550 - RNA, 19 nt, Human
gaaaauaacgauaaaagac

SEQ ID NO: 1592551 - RNA, 20 nt, Human
gaaaaucuuauaauuuaaaa

SEQ ID NO: 1592552 - RNA, 22 nt, Human
gaaaacaauaacgauaaaagac

SEQ ID NO: 1592553 - RNA, 14 nt, Human
gaaggaaaaugaua

SEQ ID NO: 1592554 - RNA, 21 nt, Human
gaagccuuggggcugaugcag

SEQ ID NO: 1592555 - RNA, 17 nt, Human
gaagacugcauuauauu

SEQ ID NO: 1592556 - RNA, 16 nt, Human
gaaguuuacauuguaa

SEQ ID NO: 1592557 - RNA, 17 nt, Human
gaaguuuacauuguaaa

SEQ ID NO: 1592558 - RNA, 14 nt, Human
gaauacuuuauaaa

SEQ ID NO: 1592559 - RNA, 22 nt, Human
gaacuagaguuuagcuggaaaa

SEQ ID NO: 1592560 - RNA, 22 nt, Human
gaacuuccagauccuggaaauc

SEQ ID NO: 1592561 - RNA, 14 nt, Human
gaacucccuuucaa

SEQ ID NO: 1592562 - RNA, 15 nt, Human
gaacucccuuucaac

SEQ ID NO: 1592563 - RNA, 21 nt, Human
gaacuuguaaaggaauuuaaa

SEQ ID NO: 1592564 - RNA, 21 nt, Human
gaagaagcaccaaucaugaau

SEQ ID NO: 1592565 - RNA, 11 nt, Human
gaaacauuugg

SEQ ID NO: 1592566 - RNA, 22 nt, Human
gaaauguaagggaaacugccag

SEQ ID NO: 1592567 - RNA, 16 nt, Human
gaaauauuauguuaaa

SEQ ID NO: 1592568 - RNA, 13 nt, Human
gaaauauuauguu

SEQ ID NO: 1592569 - RNA, 22 nt, Human
cugcaauaaaauggguuuuacu

SEQ ID NO: 1592570 - RNA, 15 nt, Human
cugcaauaaaauggg

SEQ ID NO: 1592571 - RNA, 21 nt, Human
cugaggcuccacuuggucugu

SEQ ID NO: 1592572 - RNA, 15 nt, Human
cugaggcuccacuug

SEQ ID NO: 1592573 - RNA, 14 nt, Human
cugaagaagauggu

SEQ ID NO: 1592574 - RNA, 20 nt, Human
cugagaugugaacacaucag

SEQ ID NO: 1592575 - RNA, 20 nt, Human
cugagaaagacuauucaaac

SEQ ID NO: 1592576 - RNA, 19 nt, Human
cugagaaagacuauucaaa

SEQ ID NO: 1592577 - RNA, 22 nt, Human
cugagaaagacuauucaaacag

SEQ ID NO: 1592578 - RNA, 21 nt, Human
cugagaugugaacacaucagc

SEQ ID NO: 1592579 - RNA, 16 nt, Human
cugagcaggauuuuaa

SEQ ID NO: 1592580 - RNA, 18 nt, Human
cugagaaagacuauucaa

SEQ ID NO: 1592581 - RNA, 15 nt, Human
cugagaaagacuauu

SEQ ID NO: 1592582 - RNA, 13 nt, Human
cugagaaagacua

SEQ ID NO: 1592583 - RNA, 12 nt, Human
cugagaaagacu

SEQ ID NO: 1592584 - RNA, 22 nt, Human
cucuggccuucggccuccaucc

SEQ ID NO: 1592585 - RNA, 21 nt, Human
cucuggccuucggccuccauc

SEQ ID NO: 1592586 - RNA, 19 nt, Human
cucuuaagaagacugcauu

SEQ ID NO: 1592587 - RNA, 12 nt, Human
cucccuuucaac

SEQ ID NO: 1592588 - RNA, 20 nt, Human
cuccccuccucugcuugcca

SEQ ID NO: 1592589 - RNA, 13 nt, Human
cuccauccugagg

SEQ ID NO: 1592590 - RNA, 14 nt, Human
cuccauccugaggc

SEQ ID NO: 1592591 - RNA, 11 nt, Human
cuccccuccuc

SEQ ID NO: 1592592 - RNA, 13 nt, Human
cuccccuccucug

SEQ ID NO: 1592593 - RNA, 12 nt, Human
cuccauccugag

SEQ ID NO: 1592594 - RNA, 13 nt, Human
cuccaaagaaaug

SEQ ID NO: 1592595 - RNA, 12 nt, Human
cuccaaagaaau

SEQ ID NO: 1592596 - RNA, 21 nt, Human
cuccaaacugacucuuaagaa

SEQ ID NO: 1592597 - RNA, 21 nt, Human
cuagugagcagucaggaaaga

SEQ ID NO: 1592598 - RNA, 19 nt, Human
cuagugaaagaggcagcuu

SEQ ID NO: 1592599 - RNA, 18 nt, Human
cuagugaaagaggcagcu

SEQ ID NO: 1592600 - RNA, 20 nt, Human
cuagugaaacucguuaauuu

SEQ ID NO: 1592601 - RNA, 16 nt, Human
cuaguaauuggaaagg

SEQ ID NO: 1592602 - RNA, 22 nt, Human
cuauaggugcuacaaaaacaca

SEQ ID NO: 1592603 - RNA, 21 nt, Human
cuauaggugcuacaaaaacac

SEQ ID NO: 1592604 - RNA, 20 nt, Human
cuauaggugcuacaaaaaca

SEQ ID NO: 1592605 - RNA, 18 nt, Human
cuauauuguuugcuaagc

SEQ ID NO: 1592606 - RNA, 18 nt, Human
cuauucaaacagucucag

SEQ ID NO: 1592607 - RNA, 23 nt, Human
cuauucaaacagucucaggaaau

SEQ ID NO: 1592608 - RNA, 13 nt, Human
gagcaaagcugau

SEQ ID NO: 1592609 - RNA, 21 nt, Human
gagcaggcuacugucagcucc

SEQ ID NO: 1592610 - RNA, 12 nt, Human
gagcuacaaaug

SEQ ID NO: 1592611 - RNA, 13 nt, Human
gagcuacaaaugc

SEQ ID NO: 1592612 - RNA, 14 nt, Human
gagcugcccucucc

SEQ ID NO: 1592613 - RNA, 15 nt, Human
gagcugcccucuccu

SEQ ID NO: 1592614 - RNA, 16 nt, Human
gagcugcccucuccug

SEQ ID NO: 1592615 - RNA, 17 nt, Human
gagcugcccucuccugg

SEQ ID NO: 1592616 - RNA, 14 nt, Human
gagcuacaaaugca

SEQ ID NO: 1592617 - RNA, 23 nt, Human
gaucuucaucugacuaugacaua

SEQ ID NO: 1592618 - RNA, 14 nt, Human
gaucuuuaaaauac

SEQ ID NO: 1592619 - RNA, 16 nt, Human
gaucuucaucugacua

SEQ ID NO: 1592620 - RNA, 16 nt, Human
gaugggaaagcauugu

SEQ ID NO: 1592621 - RNA, 18 nt, Human
gaugcaguucugaagaag

SEQ ID NO: 1592622 - RNA, 13 nt, Human
gauugugccccug

SEQ ID NO: 1592623 - RNA, 19 nt, Human
gauguugaaaaaguucugc

SEQ ID NO: 1592624 - RNA, 21 nt, Human
gauaaucagugugucuaaauu

SEQ ID NO: 1592625 - RNA, 19 nt, Human
gagugaacaaauuuacaga

SEQ ID NO: 1592626 - RNA, 23 nt, Human
gagugaacaaauuuacagagaca

SEQ ID NO: 1592627 - RNA, 22 nt, Human
gagugaacaaauuuacagagac

SEQ ID NO: 1592628 - RNA, 21 nt, Human
gaguugaaaaucuuauaauuu

SEQ ID NO: 1592629 - RNA, 18 nt, Human
gaguauuuuugacagaau

SEQ ID NO: 1592630 - RNA, 14 nt, Human
gaguauuuuugaca

SEQ ID NO: 1592631 - RNA, 16 nt, Human
gaguauuuuugacaga

SEQ ID NO: 1592632 - RNA, 17 nt, Human
gaguauuuuugacagaa

SEQ ID NO: 1592633 - RNA, 22 nt, Human
gcaguugaaaagacuccaaaga

SEQ ID NO: 1592634 - RNA, 21 nt, Human
gcaguugaaaagacuccaaag

SEQ ID NO: 1592635 - RNA, 19 nt, Human
gcaguugaaaagacuccaa

SEQ ID NO: 1592636 - RNA, 16 nt, Human
gcaguugaaaagacuc

SEQ ID NO: 1592637 - RNA, 20 nt, Human
gcaguucagagcugcccucu

SEQ ID NO: 1592638 - RNA, 22 nt, Human
gcaguucagagcugcccucucc

SEQ ID NO: 1592639 - RNA, 23 nt, Human
gcaguucagagcugcccucuccu

SEQ ID NO: 1592640 - RNA, 22 nt, Human
gcaucagcugcugaaacaacaa

SEQ ID NO: 1592641 - RNA, 23 nt, Human
gcaucagcugcugaaacaacaaa

SEQ ID NO: 1592642 - RNA, 18 nt, Human
gcacagccucuuagaugc

SEQ ID NO: 1592643 - RNA, 15 nt, Human
gcacagccucuuaga

SEQ ID NO: 1592644 - RNA, 18 nt, Human
gcagagguugcagugagc

SEQ ID NO: 1592645 - RNA, 23 nt, Human
gcagagguugcagugagccgaga

SEQ ID NO: 1592646 - RNA, 19 nt, Human
gccagauuuuccugaaaac

SEQ ID NO: 1592647 - RNA, 23 nt, Human
gccaugggacagggaggacgcuc

SEQ ID NO: 1592648 - RNA, 19 nt, Human
gccaugggcacugugggua

SEQ ID NO: 1592649 - RNA, 18 nt, Human
gccagacuggcacaguuu

SEQ ID NO: 1592650 - RNA, 15 nt, Human
gccagacuggcacag

SEQ ID NO: 1592651 - RNA, 19 nt, Human
gccagacuggcacaguuuu

SEQ ID NO: 1592652 - RNA, 18 nt, Human
gcuguguuaaauaaaccu

SEQ ID NO: 1592653 - RNA, 23 nt, Human
gcuggucccagccagcaguucag

SEQ ID NO: 1592654 - RNA, 12 nt, Human
gcuuguguuaag

SEQ ID NO: 1592655 - RNA, 19 nt, Human
gcuucuguuuuauaauuuu

SEQ ID NO: 1592656 - RNA, 23 nt, Human
gcugcccucuccugggcagcugc

SEQ ID NO: 1592657 - RNA, 13 nt, Human
gcugcccucuccu

SEQ ID NO: 1592658 - RNA, 14 nt, Human
gcugcccucuccug

SEQ ID NO: 1592659 - RNA, 15 nt, Human
gcugcccucuccugg

SEQ ID NO: 1592660 - RNA, 16 nt, Human
gcugcccucuccuggg

SEQ ID NO: 1592661 - RNA, 17 nt, Human
gcugcccucuccugggc

SEQ ID NO: 1592662 - RNA, 18 nt, Human
gcugcccucuccugggca

SEQ ID NO: 1592663 - RNA, 20 nt, Human
gcugcccucuccugggcagc

SEQ ID NO: 1592664 - RNA, 22 nt, Human
gcugcccucuccugggcagcug

SEQ ID NO: 1592665 - RNA, 23 nt, Human
gcuggaaaaguauguuagugcaa

SEQ ID NO: 1592666 - RNA, 21 nt, Human
gcuggaaaaguauguuagugc

SEQ ID NO: 1592667 - RNA, 12 nt, Human
gcugcccucucc

SEQ ID NO: 1592668 - RNA, 21 nt, Human
gcugauuaaaccaaggcuaga

SEQ ID NO: 1592669 - RNA, 20 nt, Human
gccugagcgacagugagacu

SEQ ID NO: 1592670 - RNA, 17 nt, Human
gccugagcgacagugag

SEQ ID NO: 1592671 - RNA, 13 nt, Human
gcuagauguaugu

SEQ ID NO: 1592672 - RNA, 16 nt, Human
gcuagauguauguacu

SEQ ID NO: 1592673 - RNA, 14 nt, Human
gcuagauguaugua

SEQ ID NO: 1592674 - RNA, 21 nt, Human
gcuauaggugcuacaaaaaca

SEQ ID NO: 1592675 - RNA, 21 nt, Human
gggacugaggggaggggagca

SEQ ID NO: 1592676 - RNA, 14 nt, Human
gggaauugaggaca

SEQ ID NO: 1592677 - RNA, 11 nt, Human
gggaggcagag

SEQ ID NO: 1592678 - RNA, 20 nt, Human
gggaggacgcucucuggccu

SEQ ID NO: 1592679 - RNA, 17 nt, Human
gggaggacgcucucugg

SEQ ID NO: 1592680 - RNA, 23 nt, Human
ggcuauaggugcuacaaaaacac

SEQ ID NO: 1592681 - RNA, 20 nt, Human
ggcuaguaucaaaagaaaga

SEQ ID NO: 1592682 - RNA, 16 nt, Human
ggcuccacuuggucug

SEQ ID NO: 1592683 - RNA, 11 nt, Human
ggcagcugccu

SEQ ID NO: 1592684 - RNA, 12 nt, Human
ggcagcugccuc

SEQ ID NO: 1592685 - RNA, 13 nt, Human
ggcagcugccucc

SEQ ID NO: 1592686 - RNA, 16 nt, Human
ggcagcugccuccccu

SEQ ID NO: 1592687 - RNA, 21 nt, Human
ggcagagguugcagugagccg

SEQ ID NO: 1592688 - RNA, 20 nt, Human
ggacauuugcucauggaauu

SEQ ID NO: 1592689 - RNA, 17 nt, Human
ggacauuugcucaugga

SEQ ID NO: 1592690 - RNA, 19 nt, Human
ggacgcucucuggccuucg

SEQ ID NO: 1592691 - RNA, 16 nt, Human
ggacgcucucuggccu

SEQ ID NO: 1592692 - RNA, 23 nt, Human
ggagaagagcuguucacagccag

SEQ ID NO: 1592693 - RNA, 15 nt, Human
ggagaagagcuguuc

SEQ ID NO: 1592694 - RNA, 14 nt, Human
ggagaagaacugaa

SEQ ID NO: 1592695 - RNA, 11 nt, Human
ggagaagaacu

SEQ ID NO: 1592696 - RNA, 19 nt, Human
ggaggggagcaugggaagu

SEQ ID NO: 1592697 - RNA, 16 nt, Human
ggaggacgcucucugg

SEQ ID NO: 1592698 - RNA, 17 nt, Human
ucaucugacuaugacau

SEQ ID NO: 1592699 - RNA, 18 nt, Human
ucaucugacuaugacaua

SEQ ID NO: 1592700 - RNA, 18 nt, Human
ucauaccuaucaucuuaa

SEQ ID NO: 1592701 - RNA, 16 nt, Human
ucauuuccaagcaagu

SEQ ID NO: 1592702 - RNA, 13 nt, Human
ucauuuccaagca

SEQ ID NO: 1592703 - RNA, 13 nt, Human
ucauuaucucaaa

SEQ ID NO: 1592704 - RNA, 20 nt, Human
ucauuaucucaaaacugcac

SEQ ID NO: 1592705 - RNA, 19 nt, Human
ucauuaucucaaaacugca

SEQ ID NO: 1592706 - RNA, 19 nt, Human
uccaaaauaauuuuaagaa

SEQ ID NO: 1592707 - RNA, 15 nt, Human
uccaaaauaauuuua

SEQ ID NO: 1592708 - RNA, 15 nt, Human
uccaccucccugcaa

SEQ ID NO: 1592709 - RNA, 16 nt, Human
uccaccucccugcaau

SEQ ID NO: 1592710 - RNA, 17 nt, Human
uccaccucccugcaaua

SEQ ID NO: 1592711 - RNA, 23 nt, Human
uccaccucccugcaauaaaaugg

SEQ ID NO: 1592712 - RNA, 13 nt, Human
uccaccucccugc

SEQ ID NO: 1592713 - RNA, 14 nt, Human
uccaccucccugca

SEQ ID NO: 1592714 - RNA, 19 nt, Human
uccacagaagcuccaggua

SEQ ID NO: 1592715 - RNA, 16 nt, Human
uccacuuggucuguga

SEQ ID NO: 1592716 - RNA, 15 nt, Human
uccacuuggucugug

SEQ ID NO: 1592717 - RNA, 17 nt, Human
uccacuuggucugugag

SEQ ID NO: 1592718 - RNA, 17 nt, Human
ucaggcuagauguaugu

SEQ ID NO: 1592719 - RNA, 13 nt, Human
ucaggcuagaugu

SEQ ID NO: 1592720 - RNA, 21 nt, Human
ucagcuccccucggagaagag

SEQ ID NO: 1592721 - RNA, 18 nt, Human
ucagcuccccucggagaa

SEQ ID NO: 1592722 - RNA, 17 nt, Human
ucagcuccccucggaga

SEQ ID NO: 1592723 - RNA, 22 nt, Human
ucagagcugcccucuccugggc

SEQ ID NO: 1592724 - RNA, 23 nt, Human
ucagagcugcccucuccugggca

SEQ ID NO: 1592725 - RNA, 19 nt, Human
ucagagcugcccucuccug

SEQ ID NO: 1592726 - RNA, 20 nt, Human
ucagagcugcccucuccugg

SEQ ID NO: 1592727 - RNA, 21 nt, Human
ucagagcugcccucuccuggg

SEQ ID NO: 1592728 - RNA, 13 nt, Human
uauguuucaaacu

SEQ ID NO: 1592729 - RNA, 15 nt, Human
uauguuucaaacuuu

SEQ ID NO: 1592730 - RNA, 16 nt, Human
uauguuucaaacuuug

SEQ ID NO: 1592731 - RNA, 12 nt, Human
uauuaauauauu

SEQ ID NO: 1592732 - RNA, 17 nt, Human
uauguacuucaugcugu

SEQ ID NO: 1592733 - RNA, 13 nt, Human
uauguacuucaug

SEQ ID NO: 1592734 - RNA, 20 nt, Human
uauucuaaauuuuauaucuu

SEQ ID NO: 1592735 - RNA, 15 nt, Human
uauucuaaauuuuau

SEQ ID NO: 1592736 - RNA, 19 nt, Human
uauucuaaauuuuauaucu

SEQ ID NO: 1592737 - RNA, 19 nt, Human
uauucuagcuaauguaaua

SEQ ID NO: 1592738 - RNA, 14 nt, Human
uauucuaaauuuua

SEQ ID NO: 1592739 - RNA, 16 nt, Human
uauuauucccauucua

SEQ ID NO: 1592740 - RNA, 16 nt, Human
ucacagucacauucca

SEQ ID NO: 1592741 - RNA, 18 nt, Human
ucacaagacccaaaaggc

SEQ ID NO: 1592742 - RNA, 17 nt, Human
ucacaagacccaaaagg

SEQ ID NO: 1592743 - RNA, 13 nt, Human
ucacaagacccaa

SEQ ID NO: 1592744 - RNA, 14 nt, Human
ucaccaaggcugau

SEQ ID NO: 1592745 - RNA, 21 nt, Human
ucaauaaaauccauacauuug

SEQ ID NO: 1592746 - RNA, 15 nt, Human
ucaaauugugugaaa

SEQ ID NO: 1592747 - RNA, 14 nt, Human
ucaaauugugugaa

SEQ ID NO: 1592748 - RNA, 15 nt, Human
ucaaauccuugaaga

SEQ ID NO: 1592749 - RNA, 20 nt, Human
ucaaaucaagaaacuuaagg

SEQ ID NO: 1592750 - RNA, 14 nt, Human
ucaaauaugcaaag

SEQ ID NO: 1592751 - RNA, 16 nt, Human
ucaaauaugcaaagca

SEQ ID NO: 1592752 - RNA, 19 nt, Human
ucuucaucugacuaugaca

SEQ ID NO: 1592753 - RNA, 22 nt, Human
ucuuaggguuaugauuaaguaa

SEQ ID NO: 1592754 - RNA, 15 nt, Human
ucugucuucacaaca

SEQ ID NO: 1592755 - RNA, 18 nt, Human
ucuuaagaagacugcauu

SEQ ID NO: 1592756 - RNA, 12 nt, Human
ucuuaagaagac

SEQ ID NO: 1592757 - RNA, 23 nt, Human
ucuggccuucggccuccauccug

SEQ ID NO: 1592758 - RNA, 18 nt, Human
ucuggccuucggccucca

SEQ ID NO: 1592759 - RNA, 17 nt, Human
ucuggccuucggccucc

SEQ ID NO: 1592760 - RNA, 21 nt, Human
ucugcaucagcugcugaaaca

SEQ ID NO: 1592761 - RNA, 19 nt, Human
ucugcaucagcugcugaaa

SEQ ID NO: 1592762 - RNA, 14 nt, Human
ucugcaucagcugc

SEQ ID NO: 1592763 - RNA, 22 nt, Human
ucgugggacagucaccucaugg

SEQ ID NO: 1592764 - RNA, 21 nt, Human
ucguggaacaguuaccucugc

SEQ ID NO: 1592765 - RNA, 18 nt, Human
ucggccuccauccugagg

SEQ ID NO: 1592766 - RNA, 13 nt, Human
ucguuaauuugua

SEQ ID NO: 1592767 - RNA, 18 nt, Human
ucuaugaaauauuauguu

SEQ ID NO: 1592768 - RNA, 17 nt, Human
ucuaugaaauauuaugu

SEQ ID NO: 1592769 - RNA, 14 nt, Human
ucuaugaaauauua

SEQ ID NO: 1592770 - RNA, 13 nt, Human
ucuaugaaauauu

SEQ ID NO: 1592771 - RNA, 19 nt, Human
ucuagugagcagucaggaa

SEQ ID NO: 1592772 - RNA, 22 nt, Human
ucuagugagcagucaggaaaga

SEQ ID NO: 1592773 - RNA, 20 nt, Human
uccugccuaagugcagcccc

SEQ ID NO: 1592774 - RNA, 16 nt, Human
uccuuggacucauuuu

SEQ ID NO: 1592775 - RNA, 20 nt, Human
uccucugcuugccaucccuc

SEQ ID NO: 1592776 - RNA, 21 nt, Human
uccucugcuugccaucccucc

SEQ ID NO: 1592777 - RNA, 22 nt, Human
uccucugcuugccaucccuccc

SEQ ID NO: 1592778 - RNA, 16 nt, Human
ucccuugaugaagaag

SEQ ID NO: 1592779 - RNA, 15 nt, Human
ucccuugaugaagaa

SEQ ID NO: 1592780 - RNA, 14 nt, Human
uguaauaacuguga

SEQ ID NO: 1592781 - RNA, 22 nt, Human
uguaauaacugugaaguuuaca

SEQ ID NO: 1592782 - RNA, 20 nt, Human
uguaaaaugugaagugaaug

SEQ ID NO: 1592783 - RNA, 12 nt, Human
uguaaaauggug

SEQ ID NO: 1592784 - RNA, 11 nt, Human
uguaaaauggu

SEQ ID NO: 1592785 - RNA, 14 nt, Human
uggguagacacaca

SEQ ID NO: 1592786 - RNA, 20 nt, Human
ugguucccuugaugaagaag

SEQ ID NO: 1592787 - RNA, 17 nt, Human
ugguucccuugaugaag

SEQ ID NO: 1592788 - RNA, 16 nt, Human
ugguucccuugaugaa

SEQ ID NO: 1592789 - RNA, 14 nt, Human
uguagcuuuaucaa

SEQ ID NO: 1592790 - RNA, 15 nt, Human
uguagcuuuaucaaa

SEQ ID NO: 1592791 - RNA, 13 nt, Human
uguauaaaauaau

SEQ ID NO: 1592792 - RNA, 14 nt, Human
uguauaaaauaauu

SEQ ID NO: 1592793 - RNA, 21 nt, Human
uguaguguuggagaagaacug

SEQ ID NO: 1592794 - RNA, 20 nt, Human
uguaguguuggagaagaacu

SEQ ID NO: 1592795 - RNA, 19 nt, Human
uguauuuuaaaagaaugau

SEQ ID NO: 1592796 - RNA, 18 nt, Human
uguauuuuaaaagaauga

SEQ ID NO: 1592797 - RNA, 12 nt, Human
ugucuuaauuaa

SEQ ID NO: 1592798 - RNA, 22 nt, Human
ugucuacacuaagagagaauga

SEQ ID NO: 1592799 - RNA, 17 nt, Human
ugucuacacuaagagag

SEQ ID NO: 1592800 - RNA, 12 nt, Human
ugcuuguguuaa

SEQ ID NO: 1592801 - RNA, 22 nt, Human
ugcuucuguuuuauaauuuugu

SEQ ID NO: 1592802 - RNA, 15 nt, Human
ugcuuguguuaagua

SEQ ID NO: 1592803 - RNA, 22 nt, Human
uggaaaaguauguuagugcaaa

SEQ ID NO: 1592804 - RNA, 17 nt, Human
ugcuucuguuuuauaau

SEQ ID NO: 1592805 - RNA, 17 nt, Human
uggagacacaacuauuu

SEQ ID NO: 1592806 - RNA, 22 nt, Human
uggccuucggccuccauccuga

SEQ ID NO: 1592807 - RNA, 23 nt, Human
uggccuucggccuccauccugag

SEQ ID NO: 1592808 - RNA, 14 nt, Human
ugggacagggagga

SEQ ID NO: 1592809 - RNA, 12 nt, Human
ugggcagcugcc

SEQ ID NO: 1592810 - RNA, 20 nt, Human
ugggcagcugccuccccucc

SEQ ID NO: 1592811 - RNA, 22 nt, Human
ugggcagcugccuccccuccuc

SEQ ID NO: 1592812 - RNA, 23 nt, Human
ugggcagcugccuccccuccucu

SEQ ID NO: 1592813 - RNA, 13 nt, Human
ugauguauucuag

SEQ ID NO: 1592814 - RNA, 14 nt, Human
ugauguauucuagc

SEQ ID NO: 1592815 - RNA, 20 nt, Human
ugauguauucuagcuaaugu

SEQ ID NO: 1592816 - RNA, 21 nt, Human
ugauguauucuagcuaaugua

SEQ ID NO: 1592817 - RNA, 24 nt, Human
ugauaguuguaccgcaaugugacu

SEQ ID NO: 1592818 - RNA, 12 nt, Human
ugacucuuaaga

SEQ ID NO: 1592819 - RNA, 13 nt, Human
ugacucuuaagaa

SEQ ID NO: 1592820 - RNA, 16 nt, Human
ugagacagcucugcau

SEQ ID NO: 1592821 - RNA, 14 nt, Human
ugagacagcucugc

SEQ ID NO: 1592822 - RNA, 17 nt, Human
ugagaaagacuauucaa

SEQ ID NO: 1592823 - RNA, 16 nt, Human
ugagaaagacuauuca

SEQ ID NO: 1592824 - RNA, 18 nt, Human
ugagaaagacuauucaaa

SEQ ID NO: 1592825 - RNA, 20 nt, Human
ugagaaagacuauucaaaca

SEQ ID NO: 1592826 - RNA, 13 nt, Human
ugagccccaaaag

SEQ ID NO: 1592827 - RNA, 20 nt, Human
ugagaugcuagaacucccuu

SEQ ID NO: 1592828 - RNA, 16 nt, Human
ugagaugcuagaacuc

SEQ ID NO: 1592829 - RNA, 14 nt, Human
ugagaugcuagaac

SEQ ID NO: 1592830 - RNA, 20 nt, Human
ugagcagucaggaaagagaa

SEQ ID NO: 1592831 - RNA, 15 nt, Human
ugagcagucaggaaa

SEQ ID NO: 1592832 - RNA, 17 nt, Human
ugagcagucaggaaaga

SEQ ID NO: 1592833 - RNA, 14 nt, Human
ugcaauuucauaug

SEQ ID NO: 1592834 - RNA, 20 nt, Human
ugcaauuucauaugcuguau

SEQ ID NO: 1592835 - RNA, 14 nt, Human
ugcauuauauuuau

SEQ ID NO: 1592836 - RNA, 19 nt, Human
ugcagauaaacaguaguga

SEQ ID NO: 1592837 - RNA, 23 nt, Human
uuuucagaaaauauuauguguuu

SEQ ID NO: 1592838 - RNA, 13 nt, Human
uuuucuuauuuca

SEQ ID NO: 1592839 - RNA, 21 nt, Human
uuuuauaauuuugugaagcaa

SEQ ID NO: 1592840 - RNA, 23 nt, Human
uuuuauaauuuugugaagcaaaa

SEQ ID NO: 1592841 - RNA, 21 nt, Human
uuuuaaaguaacccuacaaaa

SEQ ID NO: 1592842 - RNA, 18 nt, Human
uuuuauauuugaaauauu

SEQ ID NO: 1592843 - RNA, 13 nt, Human
uuuuauauuugaa

SEQ ID NO: 1592844 - RNA, 12 nt, Human
uuugaguucuac

SEQ ID NO: 1592845 - RNA, 15 nt, Human
uuuccacagaagcuc

SEQ ID NO: 1592846 - RNA, 17 nt, Human
uuuguauaaaauaauuu

SEQ ID NO: 1592847 - RNA, 19 nt, Human
uuuguauaaaauaauuuuu

SEQ ID NO: 1592848 - RNA, 18 nt, Human
uuuguauaaaauaauuuu

SEQ ID NO: 1592849 - RNA, 23 nt, Human
uuuugacagaauauguuucaaac

SEQ ID NO: 1592850 - RNA, 22 nt, Human
uuuugacagaauauguuucaaa

SEQ ID NO: 1592851 - RNA, 13 nt, Human
uuguguugugaau

SEQ ID NO: 1592852 - RNA, 12 nt, Human
uugugccccugc

SEQ ID NO: 1592853 - RNA, 17 nt, Human
uuguuuaaaaucauuuc

SEQ ID NO: 1592854 - RNA, 14 nt, Human
uuguuuaaaaucau

SEQ ID NO: 1592855 - RNA, 18 nt, Human
uuguguuuugcaagccag

SEQ ID NO: 1592856 - RNA, 21 nt, Human
uuguacgaagaguauuuuuga

SEQ ID NO: 1592857 - RNA, 23 nt, Human
uuguacgaagaguauuuuugaca

SEQ ID NO: 1592858 - RNA, 14 nt, Human
uuguauuacaaauc

SEQ ID NO: 1592859 - RNA, 15 nt, Human
uugucuagugaaacu

SEQ ID NO: 1592860 - RNA, 17 nt, Human
uuguaaauaguauuuga

SEQ ID NO: 1592861 - RNA, 16 nt, Human
uuggucugugagaugc

SEQ ID NO: 1592862 - RNA, 13 nt, Human
uuuaauaauguuu

SEQ ID NO: 1592863 - RNA, 19 nt, Human
uuuaacucuauaauguguu

SEQ ID NO: 1592864 - RNA, 14 nt, Human
uuuaauaauguuuc

SEQ ID NO: 1592865 - RNA, 13 nt, Human
uuuaccacuugug

SEQ ID NO: 1592866 - RNA, 22 nt, Human
uuuauaauuuugugaagcaaaa

SEQ ID NO: 1592867 - RNA, 22 nt, Human
uucuacauaaguaauucaagaa

SEQ ID NO: 1592868 - RNA, 15 nt, Human
uucuacauacuaugg

SEQ ID NO: 1592869 - RNA, 17 nt, Human
uuccuuggacucauuuu

SEQ ID NO: 1592870 - RNA, 18 nt, Human
uucggugagcuacaaaug

SEQ ID NO: 1592871 - RNA, 21 nt, Human
uucugagaaagacuauucaaa

SEQ ID NO: 1592872 - RNA, 16 nt, Human
uucugagaaagacuau

SEQ ID NO: 1592873 - RNA, 21 nt, Human
uucuaugaaauauuauguuaa

SEQ ID NO: 1592874 - RNA, 14 nt, Human
uucuaugaaauauu

SEQ ID NO: 1592875 - RNA, 17 nt, Human
uucuuccaaaaagauuu

SEQ ID NO: 1592876 - RNA, 16 nt, Human
uugaaaagacuccaaa

SEQ ID NO: 1592877 - RNA, 18 nt, Human
uucugcuuguguuaagua

SEQ ID NO: 1592878 - RNA, 17 nt, Human
uucugucuucacaacag

SEQ ID NO: 1592879 - RNA, 23 nt, Human
uugaugaagaaguugauaugccu

SEQ ID NO: 1592880 - RNA, 14 nt, Human
uugaugaagaaguu

SEQ ID NO: 1592881 - RNA, 17 nt, Human
uugacccacaagaaaug

SEQ ID NO: 1592882 - RNA, 16 nt, Human
uucaauaauaaauauu

SEQ ID NO: 1592883 - RNA, 14 nt, Human
uuauuuuguucaua

SEQ ID NO: 1592884 - RNA, 16 nt, Human
uuauuuuguucauaca

SEQ ID NO: 1592885 - RNA, 20 nt, Human
uuauuuuaauaauguuucaa

SEQ ID NO: 1592886 - RNA, 19 nt, Human
uuauuuuaauaauguuuca

SEQ ID NO: 1592887 - RNA, 15 nt, Human
uucagagcugcccuc

SEQ ID NO: 1592888 - RNA, 17 nt, Human
uucagagcugcccucuc

SEQ ID NO: 1592889 - RNA, 18 nt, Human
uucagagcugcccucucc

SEQ ID NO: 1592890 - RNA, 19 nt, Human
uucagagcugcccucuccu

SEQ ID NO: 1592891 - RNA, 20 nt, Human
uucagagcugcccucuccug

SEQ ID NO: 1592892 - RNA, 21 nt, Human
uucagagcugcccucuccugg

SEQ ID NO: 1592893 - RNA, 22 nt, Human
uucacaagacccaaaaggcaga

SEQ ID NO: 1592894 - RNA, 21 nt, Human
uuccaaaaagauuuucagaaa

SEQ ID NO: 1592895 - RNA, 19 nt, Human
uuccagauccuggaaauca

SEQ ID NO: 1592896 - RNA, 18 nt, Human
uuccagauccuggaaauc

SEQ ID NO: 1592897 - RNA, 23 nt, Human
uucaguuauuauauuuacaaaug

SEQ ID NO: 1592898 - RNA, 14 nt, Human
uuauacaggucaua

SEQ ID NO: 1592899 - RNA, 18 nt, Human
uuauaauuuugugaagca

SEQ ID NO: 1592900 - RNA, 17 nt, Human
uuauaauuuugugaagc

SEQ ID NO: 1592901 - RNA, 16 nt, Human
uuauaauuuugugaag

SEQ ID NO: 1592902 - RNA, 22 nt, Human
uuauacaggucauauuaauaua

SEQ ID NO: 1592903 - RNA, 22 nt, Human
uuauaucuuguagcuuuaucaa

SEQ ID NO: 1592904 - RNA, 15 nt, Human
uuauaucuuguagcu

SEQ ID NO: 1592905 - RNA, 11 nt, Human
uuauaaucuuu

SEQ ID NO: 1592906 - RNA, 15 nt, Human
uuauaauuuugugaa

SEQ ID NO: 1592907 - RNA, 14 nt, Human
uuauaauuuuguga

SEQ ID NO: 1592908 - RNA, 12 nt, Human
uuauaauuuaaa

SEQ ID NO: 1592909 - RNA, 18 nt, Human
uuauggcuauaggugcua

SEQ ID NO: 1592910 - RNA, 11 nt, Human
uuaucucaaaa

SEQ ID NO: 1592911 - RNA, 15 nt, Human
uuauauuugaaauau

SEQ ID NO: 1592912 - RNA, 13 nt, Human
uuauauuugaaau

SEQ ID NO: 1592913 - RNA, 12 nt, Human
uuauauuugaaa

SEQ ID NO: 1592914 - RNA, 20 nt, Human
uuauauuuauuacuguaaga

SEQ ID NO: 1592915 - RNA, 16 nt, Human
uuauauuuacaaaugg

SEQ ID NO: 1592916 - RNA, 16 nt, Human
caaagagagaaaauaa

SEQ ID NO: 1592917 - RNA, 19 nt, Human
caaagagagaaaauaaaga

SEQ ID NO: 1592918 - RNA, 16 nt, Human
caaauaaaaauauugu

SEQ ID NO: 1592919 - RNA, 18 nt, Human
caaauaaaaauauugugu

SEQ ID NO: 1592920 - RNA, 14 nt, Human
caaauguucaucaa

SEQ ID NO: 1592921 - RNA, 18 nt, Human
caaauguucaucaaugaa

SEQ ID NO: 1592922 - RNA, 20 nt, Human
caaauguucaucaaugaaug

SEQ ID NO: 1592923 - RNA, 12 nt, Human
caaauaugcaaa

SEQ ID NO: 1592924 - RNA, 13 nt, Human
caaauaugcaaag

SEQ ID NO: 1592925 - RNA, 14 nt, Human
caaauaugcaaagc

SEQ ID NO: 1592926 - RNA, 19 nt, Human
caagaaaugaaagcaggga

SEQ ID NO: 1592927 - RNA, 17 nt, Human
caagaaaugaaagcagg

SEQ ID NO: 1592928 - RNA, 18 nt, Human
caaaauaauuuuaagaaa

SEQ ID NO: 1592929 - RNA, 22 nt, Human
caaaauaauuuuaagaaaucaa

SEQ ID NO: 1592930 - RNA, 18 nt, Human
caaaacugcacugucaag

SEQ ID NO: 1592931 - RNA, 17 nt, Human
caaaacugcacugucaa

SEQ ID NO: 1592932 - RNA, 14 nt, Human
caaaacugcacugu

SEQ ID NO: 1592933 - RNA, 16 nt, Human
caaacugacucuuaag

SEQ ID NO: 1592934 - RNA, 21 nt, Human
caaacugacucuuaagaagac

SEQ ID NO: 1592935 - RNA, 17 nt, Human
caaacugacucuuaaga

SEQ ID NO: 1592936 - RNA, 19 nt, Human
caauaauaaauauuuuugc

SEQ ID NO: 1592937 - RNA, 19 nt, Human
caauagucaaauuguguga

SEQ ID NO: 1592938 - RNA, 17 nt, Human
caauagucaaauugugu

SEQ ID NO: 1592939 - RNA, 21 nt, Human
caagggugaugggaaagcauu

SEQ ID NO: 1592940 - RNA, 23 nt, Human
caagggugaugggaaagcauugu

SEQ ID NO: 1592941 - RNA, 18 nt, Human
caaggaaaaaauaacaau

SEQ ID NO: 1592942 - RNA, 20 nt, Human
caaggaaaaaauaacaauga

SEQ ID NO: 1592943 - RNA, 14 nt, Human
cacacugaagaagc

SEQ ID NO: 1592944 - RNA, 13 nt, Human
cacacugaagaag

SEQ ID NO: 1592945 - RNA, 19 nt, Human
cacagcaguugaaaagacu

SEQ ID NO: 1592946 - RNA, 22 nt, Human
cacagcaguugaaaagacucca

SEQ ID NO: 1592947 - RNA, 21 nt, Human
cacagcaguugaaaagacucc

SEQ ID NO: 1592948 - RNA, 18 nt, Human
cacagccagacuggcaca

SEQ ID NO: 1592949 - RNA, 17 nt, Human
cacagccagacuggcac

SEQ ID NO: 1592950 - RNA, 22 nt, Human
caauuuuucuuauuucauuucu

SEQ ID NO: 1592951 - RNA, 21 nt, Human
caauaucuuuuuuuuaauaaa

SEQ ID NO: 1592952 - RNA, 22 nt, Human
caaugugacuuaaugccacuaa

SEQ ID NO: 1592953 - RNA, 18 nt, Human
cacaagaaaugaaagcag

SEQ ID NO: 1592954 - RNA, 21 nt, Human
cacaagaaaugaaagcaggga

SEQ ID NO: 1592955 - RNA, 20 nt, Human
cacaagaaaugaaagcaggg

SEQ ID NO: 1592956 - RNA, 18 nt, Human
aacuucccagugaauucu

SEQ ID NO: 1592957 - RNA, 18 nt, Human
aacuuccagauccuggaa

SEQ ID NO: 1592958 - RNA, 17 nt, Human
gugaugggaaagcauug

SEQ ID NO: 1592959 - RNA, 13 nt, Human
aacugaaaucaua

SEQ ID NO: 1592960 - RNA, 12 nt, Human
aacugaaaucau

SEQ ID NO: 1592961 - RNA, 21 nt, Human
gugagaugcuagaacucccuu

SEQ ID NO: 1592962 - RNA, 19 nt, Human
aacugcacugucaagauga

SEQ ID NO: 1592963 - RNA, 19 nt, Human
aacuggacugguucaaaug

SEQ ID NO: 1592964 - RNA, 17 nt, Human
aacugggacaggggaga

SEQ ID NO: 1592965 - RNA, 18 nt, Human
aaccugagccccaaaagg

SEQ ID NO: 1592966 - RNA, 16 nt, Human
aacccgggaggcagag

SEQ ID NO: 1592967 - RNA, 23 nt, Human
aacccaaauguucaucaaugaau

SEQ ID NO: 1592968 - RNA, 18 nt, Human
aacccaaguccaagcaua

SEQ ID NO: 1592969 - RNA, 18 nt, Human
aaccuugaaaacuuuaug

SEQ ID NO: 1592970 - RNA, 21 nt, Human
aacuagaguuuagcuggaaaa

SEQ ID NO: 1592971 - RNA, 16 nt, Human
gucuuucacauuuaaa

SEQ ID NO: 1592972 - RNA, 20 nt, Human
aaccugagccccaaaaggua

SEQ ID NO: 1592973 - RNA, 19 nt, Human
aacaagaugguucuagcau

SEQ ID NO: 1592974 - RNA, 20 nt, Human
aaauuuuuucucuaggaaau

SEQ ID NO: 1592975 - RNA, 15 nt, Human
aacaaugcuguauuu

SEQ ID NO: 1592976 - RNA, 14 nt, Human
aacaaugcuguauu

SEQ ID NO: 1592977 - RNA, 12 nt, Human
aacaauaaaaga

SEQ ID NO: 1592978 - RNA, 16 nt, Human
aacacaacuauauugu

SEQ ID NO: 1592979 - RNA, 15 nt, Human
aacacaacuauauug

SEQ ID NO: 1592980 - RNA, 22 nt, Human
aacaaugcuguauuuuaaaaga

SEQ ID NO: 1592981 - RNA, 17 nt, Human
aacaaugcuguauuuua

SEQ ID NO: 1592982 - RNA, 13 nt, Human
aacagauaaucag

SEQ ID NO: 1592983 - RNA, 22 nt, Human
aacagugauuaccagggacuga

SEQ ID NO: 1592984 - RNA, 15 nt, Human
aacagugauuaccag

SEQ ID NO: 1592985 - RNA, 18 nt, Human
aacacagcaagggugaug

SEQ ID NO: 1592986 - RNA, 15 nt, Human
aacacagcaagggug

SEQ ID NO: 1592987 - RNA, 17 nt, Human
aacacaacuauauuguu

SEQ ID NO: 1592988 - RNA, 16 nt, Human
guauuuuugacagaau

SEQ ID NO: 1592989 - RNA, 12 nt, Human
guauuuuugaca

SEQ ID NO: 1592990 - RNA, 15 nt, Human
guauuuuugacagaa

SEQ ID NO: 1592991 - RNA, 18 nt, Human
guauguacuucaugcugu

SEQ ID NO: 1592992 - RNA, 15 nt, Human
aaauggguuuuacug

SEQ ID NO: 1592993 - RNA, 14 nt, Human
aaauggguuuuacu

SEQ ID NO: 1592994 - RNA, 16 nt, Human
aaauguaagggaaacu

SEQ ID NO: 1592995 - RNA, 20 nt, Human
guaguguuggagaagaacug

SEQ ID NO: 1592996 - RNA, 16 nt, Human
guauauuuuauaucaa

SEQ ID NO: 1592997 - RNA, 21 nt, Human
guauaaaauaauuuuuauauu

SEQ ID NO: 1592998 - RNA, 15 nt, Human
guauaaaauaauuuu

SEQ ID NO: 1592999 - RNA, 15 nt, Human
aagggugaaaauuau

SEQ ID NO: 1593000 - RNA, 16 nt, Human
aagggugaaaauuauu

SEQ ID NO: 1593001 - RNA, 19 nt, Human
aagggugaugggaaagcau

SEQ ID NO: 1593002 - RNA, 14 nt, Human
aagguacuucaaau

SEQ ID NO: 1593003 - RNA, 12 nt, Human
guuucaaacuuu

SEQ ID NO: 1593004 - RNA, 16 nt, Human
aagucuuucacauuua

SEQ ID NO: 1593005 - RNA, 19 nt, Human
aaguaaugauaacuggaaa

SEQ ID NO: 1593006 - RNA, 14 nt, Human
aaguaaugauaacu

SEQ ID NO: 1593007 - RNA, 13 nt, Human
aaguauuagaaua

SEQ ID NO: 1593008 - RNA, 20 nt, Human
uaaaauaauuuuuauauuug

SEQ ID NO: 1593009 - RNA, 20 nt, Human
uaaaagacagugaaagaaaa

SEQ ID NO: 1593010 - RNA, 23 nt, Human
uaaaagaauauuuuaacuuccuu

SEQ ID NO: 1593011 - RNA, 12 nt, Human
uaaaagaaugau

SEQ ID NO: 1593012 - RNA, 23 nt, Human
aagaccuugcuuaugauugcaga

SEQ ID NO: 1593013 - RNA, 21 nt, Human
aagaccuuuggagcaaagcug

SEQ ID NO: 1593014 - RNA, 17 nt, Human
aagacugcauuauauuu

SEQ ID NO: 1593015 - RNA, 16 nt, Human
aagacugcacaucaaa

SEQ ID NO: 1593016 - RNA, 23 nt, Human
aagaggaaugaaguacucauaca

SEQ ID NO: 1593017 - RNA, 19 nt, Human
aagauguagaggagaaacu

SEQ ID NO: 1593018 - RNA, 13 nt, Human
aagauguagagga

SEQ ID NO: 1593019 - RNA, 21 nt, Human
gugugaccacugcagaagaca

SEQ ID NO: 1593020 - RNA, 14 nt, Human
aagaugaaaauauu

SEQ ID NO: 1593021 - RNA, 13 nt, Human
aagaugaaaauau

SEQ ID NO: 1593022 - RNA, 18 nt, Human
guuauugauaaguucaua

SEQ ID NO: 1593023 - RNA, 17 nt, Human
aagccugcaauuucaua

SEQ ID NO: 1593024 - RNA, 22 nt, Human
aagccugcaauuucauaugcug

SEQ ID NO: 1593025 - RNA, 20 nt, Human
aagcucacagaccuuugaac

SEQ ID NO: 1593026 - RNA, 14 nt, Human
aagcuccagguaga

SEQ ID NO: 1593027 - RNA, 13 nt, Human
aagcuccagguag

SEQ ID NO: 1593028 - RNA, 13 nt, Human
aagcauuguaaau

SEQ ID NO: 1593029 - RNA, 18 nt, Human
aagcauuguaaaugugcu

SEQ ID NO: 1593030 - RNA, 16 nt, Human
aagcauuuagauguau

SEQ ID NO: 1593031 - RNA, 14 nt, Human
aauauauuuaauga

SEQ ID NO: 1593032 - RNA, 21 nt, Human
uaacuuccuuggacucauuuu

SEQ ID NO: 1593033 - RNA, 13 nt, Human
uaagaagugaaaa

SEQ ID NO: 1593034 - RNA, 18 nt, Human
uaagaagugaaaaucuac

SEQ ID NO: 1593035 - RNA, 20 nt, Human
aauagagcaaaauugaugug

SEQ ID NO: 1593036 - RNA, 22 nt, Human
aauagagcaaaauugauguguu

SEQ ID NO: 1593037 - RNA, 23 nt, Human
aauacaucccuuaccugggaaag

SEQ ID NO: 1593038 - RNA, 18 nt, Human
aauaccaugccauuuaaa

SEQ ID NO: 1593039 - RNA, 23 nt, Human
aauaccacaggaaccacaagacu

SEQ ID NO: 1593040 - RNA, 17 nt, Human
uaacaaugaagauaaaa

SEQ ID NO: 1593041 - RNA, 13 nt, Human
uaacaaugcugua

SEQ ID NO: 1593042 - RNA, 17 nt, Human
aaucagugugucuaaau

SEQ ID NO: 1593043 - RNA, 18 nt, Human
aaucagugugucuaaauu

SEQ ID NO: 1593044 - RNA, 22 nt, Human
aaucagugugucuaaauuugaa

SEQ ID NO: 1593045 - RNA, 16 nt, Human
uaaguaauucaagaaa

SEQ ID NO: 1593046 - RNA, 20 nt, Human
uaaguaaugauaacuggaaa

SEQ ID NO: 1593047 - RNA, 19 nt, Human
uaaguaaaaccacagcagu

SEQ ID NO: 1593048 - RNA, 18 nt, Human
uaaguaaaaccacagcag

SEQ ID NO: 1593049 - RNA, 17 nt, Human
uaaguaaaaccacagca

SEQ ID NO: 1593050 - RNA, 16 nt, Human
uaaguaaaaccacagc

SEQ ID NO: 1593051 - RNA, 15 nt, Human
uaaguaaaaccacag

SEQ ID NO: 1593052 - RNA, 13 nt, Human
uaaguaaaaccac

SEQ ID NO: 1593053 - RNA, 14 nt, Human
aaucagugugucua

SEQ ID NO: 1593054 - RNA, 14 nt, Human
uaagcaaaauguga

SEQ ID NO: 1593055 - RNA, 21 nt, Human
uaagcaaaaugugauauguac

SEQ ID NO: 1593056 - RNA, 15 nt, Human
uaagcaaaaugugau

SEQ ID NO: 1593057 - RNA, 16 nt, Human
aaucagccuaguugau

SEQ ID NO: 1593058 - RNA, 15 nt, Human
aauauuuauuuuaau

SEQ ID NO: 1593059 - RNA, 16 nt, Human
uaauuuauacagguca

SEQ ID NO: 1593060 - RNA, 18 nt, Human
uaauuuuuauauuugaaa

SEQ ID NO: 1593061 - RNA, 21 nt, Human
uaauuuuuauauuugaaauau

SEQ ID NO: 1593062 - RNA, 19 nt, Human
uaauuuuuauauuugaaau

SEQ ID NO: 1593063 - RNA, 22 nt, Human
uaauuccguagguuauuuucag

SEQ ID NO: 1593064 - RNA, 16 nt, Human
aaugauuucauucaau

SEQ ID NO: 1593065 - RNA, 20 nt, Human
aaugacucagaauauugcuu

SEQ ID NO: 1593066 - RNA, 22 nt, Human
aaugagagacacacugaagaag

SEQ ID NO: 1593067 - RNA, 21 nt, Human
uacaaaaaaaaaaaaaaauua

SEQ ID NO: 1593068 - RNA, 21 nt, Human
aaugcuguauuuuaaaagaau

SEQ ID NO: 1593069 - RNA, 20 nt, Human
aaugcuguauuuuaaaagaa

SEQ ID NO: 1593070 - RNA, 22 nt, Human
aaugcuguauuuuaaaagaaug

SEQ ID NO: 1593071 - RNA, 20 nt, Human
aauguaagggaaacugccag

SEQ ID NO: 1593072 - RNA, 17 nt, Human
uacagagacagaaagca

SEQ ID NO: 1593073 - RNA, 12 nt, Human
aauucaagaaaa

SEQ ID NO: 1593074 - RNA, 20 nt, Human
aauucaagaaaacaacuuca

SEQ ID NO: 1593075 - RNA, 21 nt, Human
aauucagaaggaucuucaucu

SEQ ID NO: 1593076 - RNA, 14 nt, Human
aauuacauuuguau

SEQ ID NO: 1593077 - RNA, 13 nt, Human
aauuacauuugua

SEQ ID NO: 1593078 - RNA, 19 nt, Human
uaccagggacugaggggag

SEQ ID NO: 1593079 - RNA, 20 nt, Human
aauguucaucaaugaaugaa

SEQ ID NO: 1593080 - RNA, 16 nt, Human
aauguucaucaaugaa

SEQ ID NO: 1593081 - RNA, 13 nt, Human
aauguucaucaau

SEQ ID NO: 1593082 - RNA, 22 nt, Human
uaucaaagggugaaaauuauuu

SEQ ID NO: 1593083 - RNA, 18 nt, Human
uaucaaagggugaaaauu

SEQ ID NO: 1593084 - RNA, 19 nt, Human
uaucaaagggugaaaauua

SEQ ID NO: 1593085 - RNA, 14 nt, Human
acagaccuuugaac

SEQ ID NO: 1593086 - RNA, 20 nt, Human
uaucacaaaucuuaacuuga

SEQ ID NO: 1593087 - RNA, 16 nt, Human
uaucacaaaucuuaac

SEQ ID NO: 1593088 - RNA, 14 nt, Human
uaucacaaaucuua

SEQ ID NO: 1593089 - RNA, 20 nt, Human
uauauccuuucuaacaaaaa

SEQ ID NO: 1593090 - RNA, 16 nt, Human
acacucaguuguucaa

SEQ ID NO: 1593091 - RNA, 12 nt, Human
uauaggaauuga

SEQ ID NO: 1593092 - RNA, 20 nt, Human
uauaggugcuacaaaaacac

SEQ ID NO: 1593093 - RNA, 16 nt, Human
uauaggugcuacaaaa

SEQ ID NO: 1593094 - RNA, 15 nt, Human
uauacaggucauauu

SEQ ID NO: 1593095 - RNA, 16 nt, Human
uauacaggucauauua

SEQ ID NO: 1593096 - RNA, 21 nt, Human
uauacaggucauauuaauaua

SEQ ID NO: 1593097 - RNA, 17 nt, Human
acacucaaaucaagaaa

SEQ ID NO: 1593098 - RNA, 18 nt, Human
acacucaaaucaagaaac

SEQ ID NO: 1593099 - RNA, 13 nt, Human
acacucaaaucaa

SEQ ID NO: 1593100 - RNA, 22 nt, Human
acaggaaccacaagacugcaca

SEQ ID NO: 1593101 - RNA, 23 nt, Human
acagcuguaugauucccagccag

SEQ ID NO: 1593102 - RNA, 20 nt, Human
acagcuguaugauucccagc

SEQ ID NO: 1593103 - RNA, 19 nt, Human
acagcuguaugauucccag

SEQ ID NO: 1593104 - RNA, 14 nt, Human
acagcuguaugauu

SEQ ID NO: 1593105 - RNA, 19 nt, Human
acagcccuucuuuccacag

SEQ ID NO: 1593106 - RNA, 15 nt, Human
uaugccccauucaac

SEQ ID NO: 1593107 - RNA, 13 nt, Human
uaggauguugaaa

SEQ ID NO: 1593108 - RNA, 13 nt, Human
acacaacuauauu

SEQ ID NO: 1593109 - RNA, 14 nt, Human
uagcacugacagau

SEQ ID NO: 1593110 - RNA, 19 nt, Human
uagcacugacagauuucca

SEQ ID NO: 1593111 - RNA, 14 nt, Human
uagaggguguguaa

SEQ ID NO: 1593112 - RNA, 15 nt, Human
acaaaaacacagcaa

SEQ ID NO: 1593113 - RNA, 14 nt, Human
acaaaaacacagca

SEQ ID NO: 1593114 - RNA, 16 nt, Human
acaaaaacacagcaag

SEQ ID NO: 1593115 - RNA, 13 nt, Human
acaaaaacacagc

SEQ ID NO: 1593116 - RNA, 16 nt, Human
aauuuggauugcuaau

SEQ ID NO: 1593117 - RNA, 13 nt, Human
uagacacacauga

SEQ ID NO: 1593118 - RNA, 17 nt, Human
aauuccaauuauaugag

SEQ ID NO: 1593119 - RNA, 16 nt, Human
uagaacucccuuucaa

SEQ ID NO: 1593120 - RNA, 18 nt, Human
uagaacucccuuucaaca

SEQ ID NO: 1593121 - RNA, 17 nt, Human
uagaacucccuuucaac

SEQ ID NO: 1593122 - RNA, 15 nt, Human
uagaaacacaacuau

SEQ ID NO: 1593123 - RNA, 20 nt, Human
uccaaaaagauuuucagaaa

SEQ ID NO: 1593124 - RNA, 19 nt, Human
uccaaaaagauuuucagaa

SEQ ID NO: 1593125 - RNA, 17 nt, Human
accugagccccaaaagg

SEQ ID NO: 1593126 - RNA, 12 nt, Human
accugagcccca

SEQ ID NO: 1593127 - RNA, 16 nt, Human
ucauaauaaguugcau

SEQ ID NO: 1593128 - RNA, 22 nt, Human
acgaagaguauuuuugacagaa

SEQ ID NO: 1593129 - RNA, 20 nt, Human
acgaagaguauuuuugacag

SEQ ID NO: 1593130 - RNA, 16 nt, Human
acgcucucuggccuuc

SEQ ID NO: 1593131 - RNA, 15 nt, Human
acgcucucuggccuu

SEQ ID NO: 1593132 - RNA, 17 nt, Human
acgcucucuggccuucg

SEQ ID NO: 1593133 - RNA, 22 nt, Human
uccaugaagauguagaggagaa

SEQ ID NO: 1593134 - RNA, 11 nt, Human
uccauccugag

SEQ ID NO: 1593135 - RNA, 14 nt, Human
uccagugagacagc

SEQ ID NO: 1593136 - RNA, 13 nt, Human
acugaaacuuccc

SEQ ID NO: 1593137 - RNA, 22 nt, Human
uccugaaaacccuugccaugug

SEQ ID NO: 1593138 - RNA, 21 nt, Human
uccugaaaacccuugccaugu

SEQ ID NO: 1593139 - RNA, 17 nt, Human
uccucuccccaugaugu

SEQ ID NO: 1593140 - RNA, 18 nt, Human
acuccagaaagugacaag

SEQ ID NO: 1593141 - RNA, 14 nt, Human
acuccagaaaguga

SEQ ID NO: 1593142 - RNA, 14 nt, Human
acucagaauauugc

SEQ ID NO: 1593143 - RNA, 21 nt, Human
acuccaaacugacucuuaaga

SEQ ID NO: 1593144 - RNA, 14 nt, Human
ucccuccaccuccc

SEQ ID NO: 1593145 - RNA, 15 nt, Human
ucccuccaccucccu

SEQ ID NO: 1593146 - RNA, 17 nt, Human
ucccuccaccucccugc

SEQ ID NO: 1593147 - RNA, 19 nt, Human
ucccuccaccucccugcaa

SEQ ID NO: 1593148 - RNA, 15 nt, Human
uccccuccucugcuu

SEQ ID NO: 1593149 - RNA, 18 nt, Human
uccccuccucugcuugcc

SEQ ID NO: 1593150 - RNA, 24 nt, Human
uccccuccucugcuugccaucccu

SEQ ID NO: 1593151 - RNA, 18 nt, Human
acuauucaaacagucuca

SEQ ID NO: 1593152 - RNA, 16 nt, Human
acuauucaaacagucu

SEQ ID NO: 1593153 - RNA, 14 nt, Human
acuauucaaacagu

SEQ ID NO: 1593154 - RNA, 13 nt, Human
acuauucaaacag

SEQ ID NO: 1593155 - RNA, 20 nt, Human
acuagaguuuagcuggaaaa

SEQ ID NO: 1593156 - RNA, 14 nt, Human
uauguguaaaaugu

SEQ ID NO: 1593157 - RNA, 17 nt, Human
uauguguaaaaugugaa

SEQ ID NO: 1593158 - RNA, 18 nt, Human
uauuuuaaaagaaugauu

SEQ ID NO: 1593159 - RNA, 14 nt, Human
uauuuuaaaagaau

SEQ ID NO: 1593160 - RNA, 15 nt, Human
uauuuuguucauaca

SEQ ID NO: 1593161 - RNA, 16 nt, Human
uauuuuguucauacau

SEQ ID NO: 1593162 - RNA, 12 nt, Human
uauuuuucacau

SEQ ID NO: 1593163 - RNA, 13 nt, Human
uauuuuucacaua

SEQ ID NO: 1593164 - RNA, 13 nt, Human
uauuuuuguagca

SEQ ID NO: 1593165 - RNA, 22 nt, Human
uauuuuaauaauguuucaaaca

SEQ ID NO: 1593166 - RNA, 19 nt, Human
uauuuuaauaauguuucaa

SEQ ID NO: 1593167 - RNA, 15 nt, Human
uauuuuuguagcacu

SEQ ID NO: 1593168 - RNA, 19 nt, Human
uauuuuuguagcacugaca

SEQ ID NO: 1593169 - RNA, 21 nt, Human
ucaaacagucucaggaaauca

SEQ ID NO: 1593170 - RNA, 20 nt, Human
ucaaacagucucaggaaauc

SEQ ID NO: 1593171 - RNA, 13 nt, Human
ucaaacagucuca

SEQ ID NO: 1593172 - RNA, 16 nt, Human
acaugagguacugaga

SEQ ID NO: 1593173 - RNA, 19 nt, Human
acauuguacgaagaguauu

SEQ ID NO: 1593174 - RNA, 17 nt, Human
acauuguaaauaguauu

SEQ ID NO: 1593175 - RNA, 19 nt, Human
acauuguaaauaguauuug

SEQ ID NO: 1593176 - RNA, 21 nt, Human
acauuguaaauaguauuugag

SEQ ID NO: 1593177 - RNA, 23 nt, Human
ucaauauuucagauaaucacaau

SEQ ID NO: 1593178 - RNA, 16 nt, Human
accaaauaaaaauauu

SEQ ID NO: 1593179 - RNA, 18 nt, Human
accaaauaaaaauauugu

SEQ ID NO: 1593180 - RNA, 23 nt, Human
accaaaaaucucaauauuucaga

SEQ ID NO: 1593181 - RNA, 19 nt, Human
accaacacgagcaggcuac

SEQ ID NO: 1593182 - RNA, 14 nt, Human
accaacacgagcag

SEQ ID NO: 1593183 - RNA, 16 nt, Human
accacaagacugcaca

SEQ ID NO: 1593184 - RNA, 14 nt, Human
ucacaggaaguaga

SEQ ID NO: 1593185 - RNA, 23 nt, Human
ucacagccagacuggcacaguuu

SEQ ID NO: 1593186 - RNA, 17 nt, Human
ucacagccagacuggca

SEQ ID NO: 1593187 - RNA, 13 nt, Human
ucaauuuaaaaaa

SEQ ID NO: 1593188 - RNA, 12 nt, Human
ucaauuuaaaaa

SEQ ID NO: 1593189 - RNA, 16 nt, Human
ucacagaccuuugaac

SEQ ID NO: 1593190 - RNA, 18 nt, Human
ucagagcugcccucuccu

SEQ ID NO: 1593191 - RNA, 17 nt, Human
ucagagcugcccucucc

SEQ ID NO: 1593192 - RNA, 15 nt, Human
ucagagcugcccucu

SEQ ID NO: 1593193 - RNA, 16 nt, Human
ucagagcugcccucuc

SEQ ID NO: 1593194 - RNA, 14 nt, Human
ucagagcugcccuc

SEQ ID NO: 1593195 - RNA, 20 nt, Human
acccaaauguucaucaauga

SEQ ID NO: 1593196 - RNA, 16 nt, Human
acccaaauguucauca

SEQ ID NO: 1593197 - RNA, 15 nt, Human
acccgggaggcagag

SEQ ID NO: 1593198 - RNA, 17 nt, Human
ucuagcauggcauauuu

SEQ ID NO: 1593199 - RNA, 18 nt, Human
ucuagcauggcauauuuu

SEQ ID NO: 1593200 - RNA, 17 nt, Human
acuucccagugaauucu

SEQ ID NO: 1593201 - RNA, 13 nt, Human
ucuauaauuuaaa

SEQ ID NO: 1593202 - RNA, 20 nt, Human
acuuccagauccuggaaauc

SEQ ID NO: 1593203 - RNA, 22 nt, Human
acuucccuuucugcuuguguua

SEQ ID NO: 1593204 - RNA, 21 nt, Human
acuucuaaguaaaaccacagc

SEQ ID NO: 1593205 - RNA, 19 nt, Human
acuucuaaguaaaaccaca

SEQ ID NO: 1593206 - RNA, 18 nt, Human
acuucuaaguaaaaccac

SEQ ID NO: 1593207 - RNA, 13 nt, Human
acuucuaaguaaa

SEQ ID NO: 1593208 - RNA, 17 nt, Human
ucucaaaacugcacugu

SEQ ID NO: 1593209 - RNA, 23 nt, Human
acuugaacccgggaggcagaggu

SEQ ID NO: 1593210 - RNA, 21 nt, Human
ucuaagauaguaacaaugaag

SEQ ID NO: 1593211 - RNA, 17 nt, Human
ucuaccaaaaaucucaa

SEQ ID NO: 1593212 - RNA, 13 nt, Human
acuguggguagac

SEQ ID NO: 1593213 - RNA, 22 nt, Human
acugaagaagcaccaaucauga

SEQ ID NO: 1593214 - RNA, 23 nt, Human
acugucagcuccccucggagaag

SEQ ID NO: 1593215 - RNA, 15 nt, Human
acuuuggaacaagau

SEQ ID NO: 1593216 - RNA, 15 nt, Human
agaaacauuugguaa

SEQ ID NO: 1593217 - RNA, 23 nt, Human
agaaacuuaagguuaccuuuguu

SEQ ID NO: 1593218 - RNA, 16 nt, Human
agaaacacaacuauau

SEQ ID NO: 1593219 - RNA, 16 nt, Human
agaaaacaaggaugaa

SEQ ID NO: 1593220 - RNA, 16 nt, Human
agaaagacuauucaaa

SEQ ID NO: 1593221 - RNA, 18 nt, Human
agaaagacuauucaaaca

SEQ ID NO: 1593222 - RNA, 18 nt, Human
agaaagcagaacagugau

SEQ ID NO: 1593223 - RNA, 17 nt, Human
agaaagcagaacaguga

SEQ ID NO: 1593224 - RNA, 20 nt, Human
agaaagcagaacagugauua

SEQ ID NO: 1593225 - RNA, 16 nt, Human
agaaggaucuucaucu

SEQ ID NO: 1593226 - RNA, 13 nt, Human
agaaguugauaug

SEQ ID NO: 1593227 - RNA, 10 nt, Human
ucuggccuuc

SEQ ID NO: 1593228 - RNA, 16 nt, Human
agaacucccuuucaac

SEQ ID NO: 1593229 - RNA, 17 nt, Human
agaacucccuuucaaca

SEQ ID NO: 1593230 - RNA, 20 nt, Human
ucugcccauccugccccuga

SEQ ID NO: 1593231 - RNA, 19 nt, Human
agaagcaccaaucaugaau

SEQ ID NO: 1593232 - RNA, 15 nt, Human
ucuuuaacucauaaa

SEQ ID NO: 1593233 - RNA, 14 nt, Human
agacuauucaaaca

SEQ ID NO: 1593234 - RNA, 12 nt, Human
agacuauucaaa

SEQ ID NO: 1593235 - RNA, 15 nt, Human
agacuauucaaacag

SEQ ID NO: 1593236 - RNA, 16 nt, Human
agacuauucaaacagu

SEQ ID NO: 1593237 - RNA, 19 nt, Human
agacauucuuccaaaaaga

SEQ ID NO: 1593238 - RNA, 18 nt, Human
agacaucaacagauaaau

SEQ ID NO: 1593239 - RNA, 17 nt, Human
agacaucaacagauaaa

SEQ ID NO: 1593240 - RNA, 21 nt, Human
agacauagaauuaacacauga

SEQ ID NO: 1593241 - RNA, 15 nt, Human
ucuucacaacagauu

SEQ ID NO: 1593242 - RNA, 14 nt, Human
agaaucacuugaac

SEQ ID NO: 1593243 - RNA, 14 nt, Human
agagagaaaauaaa

SEQ ID NO: 1593244 - RNA, 22 nt, Human
ugaaaaagaccuuuggagcaaa

SEQ ID NO: 1593245 - RNA, 22 nt, Human
ugaaaaaguucugcagauaaac

SEQ ID NO: 1593246 - RNA, 20 nt, Human
ugaaaaucuuauaauuuaaa

SEQ ID NO: 1593247 - RNA, 22 nt, Human
ugaaacugagaugugaacacau

SEQ ID NO: 1593248 - RNA, 19 nt, Human
ugaaacucguuaauuugua

SEQ ID NO: 1593249 - RNA, 14 nt, Human
agaguauuuuugac

SEQ ID NO: 1593250 - RNA, 15 nt, Human
agaguauuuuugaca

SEQ ID NO: 1593251 - RNA, 14 nt, Human
ugaaaguacauuug

SEQ ID NO: 1593252 - RNA, 23 nt, Human
ugaaaguacauuuggagacacaa

SEQ ID NO: 1593253 - RNA, 17 nt, Human
agaguauuuuugacaga

SEQ ID NO: 1593254 - RNA, 18 nt, Human
agaguauuuuugacagaa

SEQ ID NO: 1593255 - RNA, 15 nt, Human
ugaauacuuuauaaa

SEQ ID NO: 1593256 - RNA, 20 nt, Human
agaguauuuuugacagaaua

SEQ ID NO: 1593257 - RNA, 18 nt, Human
agauggaaugcuguguua

SEQ ID NO: 1593258 - RNA, 13 nt, Human
agauggaaugcug

SEQ ID NO: 1593259 - RNA, 15 nt, Human
agauggaaugcugug

SEQ ID NO: 1593260 - RNA, 17 nt, Human
ugacacuuaaaaauggu

SEQ ID NO: 1593261 - RNA, 17 nt, Human
agaugcaguucugaaga

SEQ ID NO: 1593262 - RNA, 16 nt, Human
agaugcaguucugaag

SEQ ID NO: 1593263 - RNA, 24 nt, Human
ugacuucuaaguaaaaccacagca

SEQ ID NO: 1593264 - RNA, 23 nt, Human
ugacuucuaaguaaaaccacagc

SEQ ID NO: 1593265 - RNA, 22 nt, Human
ugacuucuaaguaaaaccacag

SEQ ID NO: 1593266 - RNA, 15 nt, Human
ugacuucuaaguaaa

SEQ ID NO: 1593267 - RNA, 15 nt, Human
agauucccugagcag

SEQ ID NO: 1593268 - RNA, 23 nt, Human
agcaacgcaggcccccaggugcc

SEQ ID NO: 1593269 - RNA, 18 nt, Human
agcauggcauauuuuuca

SEQ ID NO: 1593270 - RNA, 19 nt, Human
agcauggcauauuuuucac

SEQ ID NO: 1593271 - RNA, 21 nt, Human
agcauggcauauuuuucacau

SEQ ID NO: 1593272 - RNA, 22 nt, Human
agcauggcauauuuuucacaua

SEQ ID NO: 1593273 - RNA, 17 nt, Human
agcaugucgucaaagcu

SEQ ID NO: 1593274 - RNA, 20 nt, Human
agcaugucgucaaagcugaa

SEQ ID NO: 1593275 - RNA, 18 nt, Human
agcauuguaaaugugcuu

SEQ ID NO: 1593276 - RNA, 17 nt, Human
agcauuguaaaugugcu

SEQ ID NO: 1593277 - RNA, 20 nt, Human
agcaucacaugaacuuguaa

SEQ ID NO: 1593278 - RNA, 12 nt, Human
ugauaugggucu

SEQ ID NO: 1593279 - RNA, 19 nt, Human
ugauacgcaacauaauuaa

SEQ ID NO: 1593280 - RNA, 12 nt, Human
ugauaaguaaau

SEQ ID NO: 1593281 - RNA, 18 nt, Human
ugagugucuuaauuaaaa

SEQ ID NO: 1593282 - RNA, 22 nt, Human
ugaguaacugauuuguaacaag

SEQ ID NO: 1593283 - RNA, 23 nt, Human
agcauaaauguugacaugggaca

SEQ ID NO: 1593284 - RNA, 17 nt, Human
ugaugaagaaguugaua

SEQ ID NO: 1593285 - RNA, 14 nt, Human
ugauuaccagggac

SEQ ID NO: 1593286 - RNA, 16 nt, Human
ugauuaccagggacug

SEQ ID NO: 1593287 - RNA, 12 nt, Human
ugauuaaaccaa

SEQ ID NO: 1593288 - RNA, 17 nt, Human
ugaugaucuuuaaaaua

SEQ ID NO: 1593289 - RNA, 14 nt, Human
ugaugaucuuuaaa

SEQ ID NO: 1593290 - RNA, 15 nt, Human
ugauggugguauguu

SEQ ID NO: 1593291 - RNA, 14 nt, Human
agccagacuggcac

SEQ ID NO: 1593292 - RNA, 19 nt, Human
agccagacuggcacaguuu

SEQ ID NO: 1593293 - RNA, 20 nt, Human
agccuuggggcugaugcagu

SEQ ID NO: 1593294 - RNA, 18 nt, Human
agcuacuugggaggcuga

SEQ ID NO: 1593295 - RNA, 17 nt, Human
agcuacuugggaggcug

SEQ ID NO: 1593296 - RNA, 19 nt, Human
agcuacuaauuuuaaaaug

SEQ ID NO: 1593297 - RNA, 22 nt, Human
agccugaaagaggaaugaagua

SEQ ID NO: 1593298 - RNA, 15 nt, Human
agccucauguccacu

SEQ ID NO: 1593299 - RNA, 20 nt, Human
agccucauguccacugguuc

SEQ ID NO: 1593300 - RNA, 17 nt, Human
agcccuucuuuccacag

SEQ ID NO: 1593301 - RNA, 18 nt, Human
agcccauggcacucuaug

SEQ ID NO: 1593302 - RNA, 23 nt, Human
agcuuuaucaaagggugaaaauu

SEQ ID NO: 1593303 - RNA, 14 nt, Human
ugcucauggaauug

SEQ ID NO: 1593304 - RNA, 12 nt, Human
aggaaauauuua

SEQ ID NO: 1593305 - RNA, 13 nt, Human
aggaaauauuuau

SEQ ID NO: 1593306 - RNA, 23 nt, Human
ugcuguauuuuaaaagaaugauu

SEQ ID NO: 1593307 - RNA, 13 nt, Human
ugcuguauuuuaa

SEQ ID NO: 1593308 - RNA, 22 nt, Human
ugcuguauuuuaaaagaaugau

SEQ ID NO: 1593309 - RNA, 21 nt, Human
ugcuguauuuuaaaagaauga

SEQ ID NO: 1593310 - RNA, 17 nt, Human
agcuugaaacugagaug

SEQ ID NO: 1593311 - RNA, 19 nt, Human
ugcuacaaaaacacagcaa

SEQ ID NO: 1593312 - RNA, 18 nt, Human
ugcuacaaaaacacagca

SEQ ID NO: 1593313 - RNA, 17 nt, Human
ugcuacaaaaacacagc

SEQ ID NO: 1593314 - RNA, 16 nt, Human
ugcuacaaaaacacag

SEQ ID NO: 1593315 - RNA, 20 nt, Human
ugcuacaaaaacacagcaag

SEQ ID NO: 1593316 - RNA, 16 nt, Human
agcugccuccccuccu

SEQ ID NO: 1593317 - RNA, 17 nt, Human
agcugccuccccuccuc

SEQ ID NO: 1593318 - RNA, 15 nt, Human
agcugccuccccucc

SEQ ID NO: 1593319 - RNA, 22 nt, Human
agcugcccucuccugggcagcu

SEQ ID NO: 1593320 - RNA, 19 nt, Human
agcuguucacagccagacu

SEQ ID NO: 1593321 - RNA, 16 nt, Human
agcuguucacagccag

SEQ ID NO: 1593322 - RNA, 16 nt, Human
uggcauauuuuucaca

SEQ ID NO: 1593323 - RNA, 17 nt, Human
uggcauauuuuucacau

SEQ ID NO: 1593324 - RNA, 14 nt, Human
uggccuucggccuc

SEQ ID NO: 1593325 - RNA, 20 nt, Human
uggcacaguuuucugagaaa

SEQ ID NO: 1593326 - RNA, 19 nt, Human
uggcacaguuuucugagaa

SEQ ID NO: 1593327 - RNA, 18 nt, Human
uggcacaguuuucugaga

SEQ ID NO: 1593328 - RNA, 13 nt, Human
uggagaagaacug

SEQ ID NO: 1593329 - RNA, 14 nt, Human
uggagaagaacuga

SEQ ID NO: 1593330 - RNA, 14 nt, Human
uggagcucguggaa

SEQ ID NO: 1593331 - RNA, 23 nt, Human
aggacagcccuucuuuccacaga

SEQ ID NO: 1593332 - RNA, 18 nt, Human
aggucauauuaauauauu

SEQ ID NO: 1593333 - RNA, 19 nt, Human
aggucauauuaauauauuu

SEQ ID NO: 1593334 - RNA, 23 nt, Human
agguacuucaaauccuugaagau

SEQ ID NO: 1593335 - RNA, 17 nt, Human
aggguuaugauuaagua

SEQ ID NO: 1593336 - RNA, 20 nt, Human
ugguaaggggaauugaggac

SEQ ID NO: 1593337 - RNA, 17 nt, Human
agggcagggacaggaua

SEQ ID NO: 1593338 - RNA, 14 nt, Human
ugggaguacaaaag

SEQ ID NO: 1593339 - RNA, 13 nt, Human
aguagaacagaua

SEQ ID NO: 1593340 - RNA, 19 nt, Human
aguagaacagauaaucagu

SEQ ID NO: 1593341 - RNA, 19 nt, Human
aguagauaggccaugggca

SEQ ID NO: 1593342 - RNA, 18 nt, Human
uguagaggagaaacugga

SEQ ID NO: 1593343 - RNA, 15 nt, Human
aguaaaaccacagca

SEQ ID NO: 1593344 - RNA, 14 nt, Human
agguugcagugagc

SEQ ID NO: 1593345 - RNA, 17 nt, Human
uguaagaaaauaucacu

SEQ ID NO: 1593346 - RNA, 14 nt, Human
aguauguguaaaau

SEQ ID NO: 1593347 - RNA, 15 nt, Human
aguauuucuaugaaa

SEQ ID NO: 1593348 - RNA, 13 nt, Human
aguauuucuauga

SEQ ID NO: 1593349 - RNA, 16 nt, Human
aguauuugagaguucu

SEQ ID NO: 1593350 - RNA, 22 nt, Human
aguauuucuaugaaauauuaug

SEQ ID NO: 1593351 - RNA, 23 nt, Human
ugucauuugcuggagcucugccc

SEQ ID NO: 1593352 - RNA, 21 nt, Human
ugucaauaaaauccauacauu

SEQ ID NO: 1593353 - RNA, 20 nt, Human
ugucaaucagccuaguugau

SEQ ID NO: 1593354 - RNA, 16 nt, Human
agucaggaaagagaac

SEQ ID NO: 1593355 - RNA, 13 nt, Human
uguguugugaaug

SEQ ID NO: 1593356 - RNA, 21 nt, Human
agugccuguaaucacagcuac

SEQ ID NO: 1593357 - RNA, 21 nt, Human
agugcaaauugucacaggaca

SEQ ID NO: 1593358 - RNA, 18 nt, Human
agugcaaauugucacagg

SEQ ID NO: 1593359 - RNA, 22 nt, Human
agugcaaauugucacaggacag

SEQ ID NO: 1593360 - RNA, 12 nt, Human
uguugugaaugu

SEQ ID NO: 1593361 - RNA, 13 nt, Human
uguugugaauguu

SEQ ID NO: 1593362 - RNA, 14 nt, Human
uguugugauguauu

SEQ ID NO: 1593363 - RNA, 20 nt, Human
uguugugauguauucuagcu

SEQ ID NO: 1593364 - RNA, 15 nt, Human
aguucuacauaagua

SEQ ID NO: 1593365 - RNA, 20 nt, Human
aguucggugagcuacaaaug

SEQ ID NO: 1593366 - RNA, 19 nt, Human
aguucggugagcuacaaau

SEQ ID NO: 1593367 - RNA, 14 nt, Human
aguucagagcugcc

SEQ ID NO: 1593368 - RNA, 16 nt, Human
aguguuggagaagaac

SEQ ID NO: 1593369 - RNA, 14 nt, Human
aguguuggagaaga

SEQ ID NO: 1593370 - RNA, 18 nt, Human
aguguuggagaagaacug

SEQ ID NO: 1593371 - RNA, 17 nt, Human
aguguuggagaagaacu

SEQ ID NO: 1593372 - RNA, 23 nt, Human
aguguuggagaagaacugaaauc

SEQ ID NO: 1593373 - RNA, 13 nt, Human
aguuuacauugua

SEQ ID NO: 1593374 - RNA, 14 nt, Human
aguuuaaauuguaa

SEQ ID NO: 1593375 - RNA, 13 nt, Human
uguuucaaacaua

SEQ ID NO: 1593376 - RNA, 14 nt, Human
uuaaguauguguaa

SEQ ID NO: 1593377 - RNA, 20 nt, Human
uuaagaagacugcauuauau

SEQ ID NO: 1593378 - RNA, 23 nt, Human
aguuuucugagaaagacuauuca

SEQ ID NO: 1593379 - RNA, 19 nt, Human
aguuuucugagaaagacua

SEQ ID NO: 1593380 - RNA, 15 nt, Human
auaaaauaauuuuua

SEQ ID NO: 1593381 - RNA, 12 nt, Human
auaaaauaauuu

SEQ ID NO: 1593382 - RNA, 18 nt, Human
auaaauauuuuugccaua

SEQ ID NO: 1593383 - RNA, 15 nt, Human
auaaauaguuuauga

SEQ ID NO: 1593384 - RNA, 14 nt, Human
auaaauaaaaauaa

SEQ ID NO: 1593385 - RNA, 13 nt, Human
auaaauaaaaaua

SEQ ID NO: 1593386 - RNA, 13 nt, Human
auaacugugaagu

SEQ ID NO: 1593387 - RNA, 22 nt, Human
auaacgauaaaagacagugaaa

SEQ ID NO: 1593388 - RNA, 14 nt, Human
uuagggagagaaga

SEQ ID NO: 1593389 - RNA, 18 nt, Human
auaauccuaaacauauga

SEQ ID NO: 1593390 - RNA, 17 nt, Human
uuuguagcacugacaga

SEQ ID NO: 1593391 - RNA, 19 nt, Human
uuuguagcacugacagauu

SEQ ID NO: 1593392 - RNA, 11 nt, Human
uuuuaagaaau

SEQ ID NO: 1593393 - RNA, 13 nt, Human
uuuuaaaaaagaa

SEQ ID NO: 1593394 - RNA, 15 nt, Human
uuuuaaaagaaugau

SEQ ID NO: 1593395 - RNA, 14 nt, Human
uuuuaaaagaauga

SEQ ID NO: 1593396 - RNA, 13 nt, Human
uuugcucauggaa

SEQ ID NO: 1593397 - RNA, 15 nt, Human
auggcuauaggugcu

SEQ ID NO: 1593398 - RNA, 12 nt, Human
uuugcucaugga

SEQ ID NO: 1593399 - RNA, 11 nt, Human
uuugcucaugg

SEQ ID NO: 1593400 - RNA, 16 nt, Human
auguccacugguucuu

SEQ ID NO: 1593401 - RNA, 15 nt, Human
auguugugauguauu

SEQ ID NO: 1593402 - RNA, 21 nt, Human
auguuucaaacauauauaaca

SEQ ID NO: 1593403 - RNA, 18 nt, Human
auguuucaaacauauaua

SEQ ID NO: 1593404 - RNA, 20 nt, Human
auuaaaaaaucaguuguaca

SEQ ID NO: 1593405 - RNA, 16 nt, Human
auuaaaagaauauuuu

SEQ ID NO: 1593406 - RNA, 19 nt, Human
auguucaucaaugaaugaa

SEQ ID NO: 1593407 - RNA, 15 nt, Human
auguugacaugggac

SEQ ID NO: 1593408 - RNA, 14 nt, Human
uuuuauaauuuugu

SEQ ID NO: 1593409 - RNA, 23 nt, Human
uuuuauggaggcuuugcauagau

SEQ ID NO: 1593410 - RNA, 19 nt, Human
uuuuauggcacuaguauuu

SEQ ID NO: 1593411 - RNA, 22 nt, Human
uuuuauggcacuaguauuucua

SEQ ID NO: 1593412 - RNA, 15 nt, Human
auuaauauauuucca

SEQ ID NO: 1593413 - RNA, 21 nt, Human
auuaaguaaugauaacuggaa

SEQ ID NO: 1593414 - RNA, 15 nt, Human
auuaaguaaugauaa

SEQ ID NO: 1593415 - RNA, 13 nt, Human
auuaaguaaugau

SEQ ID NO: 1593416 - RNA, 23 nt, Human
uuuuuuaaaaaagaaacauuugg

SEQ ID NO: 1593417 - RNA, 12 nt, Human
auuaccagggac

SEQ ID NO: 1593418 - RNA, 16 nt, Human
auuacauuuguauaaa

SEQ ID NO: 1593419 - RNA, 15 nt, Human
auuacauuuguauaa

SEQ ID NO: 1593420 - RNA, 13 nt, Human
auuacauuuguau

SEQ ID NO: 1593421 - RNA, 20 nt, Human
auuauuaccuuacagaaguu

SEQ ID NO: 1593422 - RNA, 17 nt, Human
auuauauuuacaaaugg

SEQ ID NO: 1593423 - RNA, 23 nt, Human
auuaucucaaaacugcacuguca

SEQ ID NO: 1593424 - RNA, 18 nt, Human
auuaucucaaaacugcac

SEQ ID NO: 1593425 - RNA, 16 nt, Human
auuauauuuacaaaug

SEQ ID NO: 1593426 - RNA, 16 nt, Human
auucaaacagucucag

SEQ ID NO: 1593427 - RNA, 15 nt, Human
auucaaacagucuca

SEQ ID NO: 1593428 - RNA, 14 nt, Human
auucaaacagucuc

SEQ ID NO: 1593429 - RNA, 20 nt, Human
auuccacuuauaggaauuga

SEQ ID NO: 1593430 - RNA, 21 nt, Human
auugcuaaucaccaaaggcuc

SEQ ID NO: 1593431 - RNA, 13 nt, Human
auugugccccugc

SEQ ID NO: 1593432 - RNA, 14 nt, Human
auuguauuacaaau

SEQ ID NO: 1593433 - RNA, 15 nt, Human
auuguauuacaaauc

SEQ ID NO: 1593434 - RNA, 19 nt, Human
auuuaaagcuuauuaaaac

SEQ ID NO: 1593435 - RNA, 16 nt, Human
auuuacaaaugggaaa

SEQ ID NO: 1593436 - RNA, 20 nt, Human
auugacacuuaaaaaugguu

SEQ ID NO: 1593437 - RNA, 20 nt, Human
auuuggagacacaacuauuu

SEQ ID NO: 1593438 - RNA, 21 nt, Human
auuuggagacacaacuauuuu

SEQ ID NO: 1593439 - RNA, 23 nt, Human
auuugguaaggggaauugaggac

SEQ ID NO: 1593440 - RNA, 18 nt, Human
auuuguaguguuggagaa

SEQ ID NO: 1593441 - RNA, 22 nt, Human
auuuauuacuguaagaaaauau

SEQ ID NO: 1593442 - RNA, 16 nt, Human
auuuuaauaauguuuc

SEQ ID NO: 1593443 - RNA, 15 nt, Human
auuuuaauaauguuu

SEQ ID NO: 1593444 - RNA, 14 nt, Human
auuuuaauaauguu

SEQ ID NO: 1593445 - RNA, 15 nt, Human
auuuguaucacaaau

SEQ ID NO: 1593446 - RNA, 19 nt, Human
auuuguaguguuggagaag

SEQ ID NO: 1593447 - RNA, 14 nt, Human
auaucuaguaugaa

SEQ ID NO: 1593448 - RNA, 15 nt, Human
auaucuaguaugaaa

SEQ ID NO: 1593449 - RNA, 17 nt, Human
auaucuaguaugaaauu

SEQ ID NO: 1593450 - RNA, 13 nt, Human
auaucuuguagcu

SEQ ID NO: 1593451 - RNA, 12 nt, Human
uucauacauauu

SEQ ID NO: 1593452 - RNA, 23 nt, Human
uucauacauauuuuuguagcacu

SEQ ID NO: 1593453 - RNA, 13 nt, Human
uucauacauugua

SEQ ID NO: 1593454 - RNA, 19 nt, Human
uucauacauuguacgaaga

SEQ ID NO: 1593455 - RNA, 13 nt, Human
auauauuuaauga

SEQ ID NO: 1593456 - RNA, 15 nt, Human
auauauuuaaugaua

SEQ ID NO: 1593457 - RNA, 12 nt, Human
uucccaaauuuc

SEQ ID NO: 1593458 - RNA, 18 nt, Human
uucccaacuccagaaagu

SEQ ID NO: 1593459 - RNA, 13 nt, Human
auagucuuucagu

SEQ ID NO: 1593460 - RNA, 20 nt, Human
auaguuguaccgcaauguga

SEQ ID NO: 1593461 - RNA, 14 nt, Human
auauauaacaaugc

SEQ ID NO: 1593462 - RNA, 21 nt, Human
uuauuuuguucauacauauuu

SEQ ID NO: 1593463 - RNA, 17 nt, Human
uuauuuuguucauacau

SEQ ID NO: 1593464 - RNA, 18 nt, Human
uucaaacagucucaggaa

SEQ ID NO: 1593465 - RNA, 14 nt, Human
uucaaacauauaua

SEQ ID NO: 1593466 - RNA, 23 nt, Human
uucacaagacccaaaaggcagaa

SEQ ID NO: 1593467 - RNA, 17 nt, Human
auaggcguaacuaauuu

SEQ ID NO: 1593468 - RNA, 20 nt, Human
auccuagucacuaccuucau

SEQ ID NO: 1593469 - RNA, 18 nt, Human
uugaacccgggaggcaga

SEQ ID NO: 1593470 - RNA, 19 nt, Human
uugaaauauugacuuuuua

SEQ ID NO: 1593471 - RNA, 20 nt, Human
aucauuucugcaucagcugc

SEQ ID NO: 1593472 - RNA, 14 nt, Human
auccauacauuugu

SEQ ID NO: 1593473 - RNA, 20 nt, Human
uucuaacaaaaaaauauauu

SEQ ID NO: 1593474 - RNA, 20 nt, Human
uucuaaguaaaaccacagca

SEQ ID NO: 1593475 - RNA, 19 nt, Human
uucuaaguaaaaccacagc

SEQ ID NO: 1593476 - RNA, 13 nt, Human
uucuaagaaguga

SEQ ID NO: 1593477 - RNA, 13 nt, Human
uucuauaauuuaa

SEQ ID NO: 1593478 - RNA, 14 nt, Human
uucuauaauuuaaa

SEQ ID NO: 1593479 - RNA, 21 nt, Human
uucuaaguaaaaccacagcag

SEQ ID NO: 1593480 - RNA, 20 nt, Human
aucaaauaugcaaagcacug

SEQ ID NO: 1593481 - RNA, 20 nt, Human
uuguguuaaguauguguaaa

SEQ ID NO: 1593482 - RNA, 23 nt, Human
uugugugaaagguacuucaaauc

SEQ ID NO: 1593483 - RNA, 23 nt, Human
augagagacacacugaagaagca

SEQ ID NO: 1593484 - RNA, 21 nt, Human
augagagacacacugaagaag

SEQ ID NO: 1593485 - RNA, 20 nt, Human
augagagacacacugaagaa

SEQ ID NO: 1593486 - RNA, 22 nt, Human
augauuaugaauuacauuugua

SEQ ID NO: 1593487 - RNA, 12 nt, Human
augauucccagc

SEQ ID NO: 1593488 - RNA, 14 nt, Human
uuguuuucauuauc

SEQ ID NO: 1593489 - RNA, 17 nt, Human
augcaguucugaagaag

SEQ ID NO: 1593490 - RNA, 15 nt, Human
augcaguucugaaga

SEQ ID NO: 1593491 - RNA, 17 nt, Human
augccacuaaauugaca

SEQ ID NO: 1593492 - RNA, 15 nt, Human
augccacuaaauuga

SEQ ID NO: 1593493 - RNA, 19 nt, Human
augcaguucugaagaagau

SEQ ID NO: 1593494 - RNA, 18 nt, Human
augcaguucugaagaaga

SEQ ID NO: 1593495 - RNA, 16 nt, Human
auggaaugcuguguua

SEQ ID NO: 1593496 - RNA, 20 nt, Human
auggcuaguaucaaaagaaa

SEQ ID NO: 1593497 - RNA, 15 nt, Human
augcuagaacucccu

SEQ ID NO: 1593498 - RNA, 19 nt, Human
augcuagaacucccuuuca

SEQ ID NO: 1593499 - RNA, 16 nt, Human
augcuagaacucccuu

SEQ ID NO: 1593500 - RNA, 16 nt, Human
uuuauuacuguaagaa

SEQ ID NO: 1593501 - RNA, 22 nt, Human
augcugucuacacuaagagaga

SEQ ID NO: 1593502 - RNA, 23 nt, Human
augcugucuacacuaagagagaa

SEQ ID NO: 1593503 - RNA, 13 nt, Human
uuuauauaagcuu

SEQ ID NO: 1593504 - RNA, 22 nt, Human
uuuagcuggaaaaguauguuag

SEQ ID NO: 1593505 - RNA, 18 nt, Human
aucucauaauuuauacag

SEQ ID NO: 1593506 - RNA, 21 nt, Human
aucucauuuccaagcaaguau

SEQ ID NO: 1593507 - RNA, 17 nt, Human
aucucauaauuuauaca

SEQ ID NO: 1593508 - RNA, 23 nt, Human
aucucauuuccaagcaaguauua

SEQ ID NO: 1593509 - RNA, 13 nt, Human
aucucaauauuuc

SEQ ID NO: 1593510 - RNA, 11 nt, Human
uugauguguuu

SEQ ID NO: 1593511 - RNA, 20 nt, Human
uugauguguuuauuuauaga

SEQ ID NO: 1593512 - RNA, 19 nt, Human
uugauggugguauguuuuc

SEQ ID NO: 1593513 - RNA, 18 nt, Human
uugauggugguauguuuu

SEQ ID NO: 1593514 - RNA, 13 nt, Human
uugcccuguuaaa

SEQ ID NO: 1593515 - RNA, 15 nt, Human
augaaagcagggacu

SEQ ID NO: 1593516 - RNA, 13 nt, Human
aucuuuuucuaac

SEQ ID NO: 1593517 - RNA, 15 nt, Human
augaauuaaguuuuu

SEQ ID NO: 1593518 - RNA, 20 nt, Human
augaaauauuauguuaaaac

SEQ ID NO: 1593519 - RNA, 18 nt, Human
augaaauauuauguuaaa

SEQ ID NO: 1593520 - RNA, 17 nt, Human
augaaauauuauguuaa

SEQ ID NO: 1593521 - RNA, 13 nt, Human
augaaauauuaug

SEQ ID NO: 1593522 - RNA, 13 nt, Human
augaaugaauggc

SEQ ID NO: 1593523 - RNA, 18 nt, Human
augaagauguagaggaga

SEQ ID NO: 1593524 - RNA, 19 nt, Human
augagagacacacugaaga

SEQ ID NO: 1593525 - RNA, 17 nt, Human
augagagacacacugaa

SEQ ID NO: 1593526 - RNA, 14 nt, Human
augagagacacacu

SEQ ID NO: 1593527 - RNA, 13 nt, Human
augagagacacac

SEQ ID NO: 1593528 - RNA, 16 nt, Human
uuguaucacaaaucuu

SEQ ID NO: 1593529 - RNA, 19 nt, Human
uuguauaaaauaauuuuua

SEQ ID NO: 1593530 - RNA, 23 nt, Human
uuguaguguuggagaagaacuga

SEQ ID NO: 1593531 - RNA, 17 nt, Human
uuguauaaaauaauuuu

SEQ ID NO: 1593532 - RNA, 16 nt, Human
uuguauaaaauaauuu

SEQ ID NO: 1593533 - RNA, 19 nt, Human
cuucaucugacuaugacau

SEQ ID NO: 1593534 - RNA, 21 nt, Human
cuucaucugacuaugacauaa

SEQ ID NO: 1593535 - RNA, 20 nt, Human
cuucaugcauagguuuagca

SEQ ID NO: 1593536 - RNA, 15 nt, Human
cuucacuguaaaaua

SEQ ID NO: 1593537 - RNA, 13 nt, Human
cuugaugaagaag

SEQ ID NO: 1593538 - RNA, 12 nt, Human
cuugaugaagaa

SEQ ID NO: 1593539 - RNA, 23 nt, Human
cuucuaaguaaaaccacagcagu

SEQ ID NO: 1593540 - RNA, 22 nt, Human
cuucuaaguaaaaccacagcag

SEQ ID NO: 1593541 - RNA, 17 nt, Human
gaaagacuauucaaaca

SEQ ID NO: 1593542 - RNA, 15 nt, Human
gaaagacuauucaaa

SEQ ID NO: 1593543 - RNA, 14 nt, Human
gaaagacuauucaa

SEQ ID NO: 1593544 - RNA, 17 nt, Human
gaaauauuuauuuuaau

SEQ ID NO: 1593545 - RNA, 20 nt, Human
gaaaucaaauaugcaaagca

SEQ ID NO: 1593546 - RNA, 19 nt, Human
gaaaucaaauaugcaaagc

SEQ ID NO: 1593547 - RNA, 21 nt, Human
gaaaucaaauaugcaaagcac

SEQ ID NO: 1593548 - RNA, 18 nt, Human
gaaaucaaauaugcaaag

SEQ ID NO: 1593549 - RNA, 22 nt, Human
gaaauauuuauuuuaauaaugu

SEQ ID NO: 1593550 - RNA, 18 nt, Human
gaaauauuuauuuuaaua

SEQ ID NO: 1593551 - RNA, 18 nt, Human
cugugaaguuuacauugu

SEQ ID NO: 1593552 - RNA, 21 nt, Human
cugugagaugcuagaacuccc

SEQ ID NO: 1593553 - RNA, 16 nt, Human
cugugagaugcuagaa

SEQ ID NO: 1593554 - RNA, 21 nt, Human
cugucagcuccccucggagaa

SEQ ID NO: 1593555 - RNA, 23 nt, Human
cugucagcuccccucggagaaga

SEQ ID NO: 1593556 - RNA, 22 nt, Human
cugggcagcugccuccccuccu

SEQ ID NO: 1593557 - RNA, 20 nt, Human
cugggcagcugccuccccuc

SEQ ID NO: 1593558 - RNA, 21 nt, Human
cugggcagcugccuccccucc

SEQ ID NO: 1593559 - RNA, 19 nt, Human
cugggcagcugccuccccu

SEQ ID NO: 1593560 - RNA, 10 nt, Human
cugggacagg

SEQ ID NO: 1593561 - RNA, 21 nt, Human
cuggaaaucaggguuaguauu

SEQ ID NO: 1593562 - RNA, 22 nt, Human
gagacguuuuuggaagaguagu

SEQ ID NO: 1593563 - RNA, 14 nt, Human
gagaaucacuugaa

SEQ ID NO: 1593564 - RNA, 15 nt, Human
gagaaucacuugaac

SEQ ID NO: 1593565 - RNA, 13 nt, Human
gacuaugacauaa

SEQ ID NO: 1593566 - RNA, 16 nt, Human
gacucuuaagaagacu

SEQ ID NO: 1593567 - RNA, 18 nt, Human
gacucuuaagaagacugc

SEQ ID NO: 1593568 - RNA, 17 nt, Human
gacucuuaagaagacug

SEQ ID NO: 1593569 - RNA, 13 nt, Human
gagcgacagugag

SEQ ID NO: 1593570 - RNA, 16 nt, Human
gacagaauauguuuca

SEQ ID NO: 1593571 - RNA, 16 nt, Human
gacacuuaaaaauggu

SEQ ID NO: 1593572 - RNA, 17 nt, Human
gacagucaccucaugga

SEQ ID NO: 1593573 - RNA, 14 nt, Human
gacagugaaagaaa

SEQ ID NO: 1593574 - RNA, 14 nt, Human
gacacacugaagaa

SEQ ID NO: 1593575 - RNA, 12 nt, Human
gacacacaugaa

SEQ ID NO: 1593576 - RNA, 13 nt, Human
gacacacugaaga

SEQ ID NO: 1593577 - RNA, 11 nt, Human
gaauuaguuuu

SEQ ID NO: 1593578 - RNA, 20 nt, Human
gaaugagagacacacugaag

SEQ ID NO: 1593579 - RNA, 23 nt, Human
gaaugagagacacacugaagaag

SEQ ID NO: 1593580 - RNA, 22 nt, Human
gaaugagagacacacugaagaa

SEQ ID NO: 1593581 - RNA, 17 nt, Human
gcacugacagauuucca

SEQ ID NO: 1593582 - RNA, 12 nt, Human
gcacugacagau

SEQ ID NO: 1593583 - RNA, 17 nt, Human
gcacaguuuucugagaa

SEQ ID NO: 1593584 - RNA, 14 nt, Human
gcacaguuuucuga

SEQ ID NO: 1593585 - RNA, 18 nt, Human
gcacaguuuucugagaaa

SEQ ID NO: 1593586 - RNA, 20 nt, Human
gcacaguuuucugagaaaga

SEQ ID NO: 1593587 - RNA, 12 nt, Human
gcagcugccucc

SEQ ID NO: 1593588 - RNA, 13 nt, Human
gcagcugccuccc

SEQ ID NO: 1593589 - RNA, 15 nt, Human
gcagcugccuccccu

SEQ ID NO: 1593590 - RNA, 16 nt, Human
gcagcugccuccccuc

SEQ ID NO: 1593591 - RNA, 17 nt, Human
gcagcugccuccccucc

SEQ ID NO: 1593592 - RNA, 18 nt, Human
gcagcugccuccccuccu

SEQ ID NO: 1593593 - RNA, 22 nt, Human
gcagcugccuccccuccucugc

SEQ ID NO: 1593594 - RNA, 19 nt, Human
gcagggacuugaacccaua

SEQ ID NO: 1593595 - RNA, 17 nt, Human
gauuagggagagaagau

SEQ ID NO: 1593596 - RNA, 14 nt, Human
gauuaccagggacu

SEQ ID NO: 1593597 - RNA, 16 nt, Human
gaugugaacacaucag

SEQ ID NO: 1593598 - RNA, 14 nt, Human
gaugugaacacauc

SEQ ID NO: 1593599 - RNA, 16 nt, Human
gaguuuagcuggaaaa

SEQ ID NO: 1593600 - RNA, 20 nt, Human
gauauguaccuaacgaagua

SEQ ID NO: 1593601 - RNA, 17 nt, Human
guaacaaugaagauaaa

SEQ ID NO: 1593602 - RNA, 12 nt, Human
guaaaaugugaa

SEQ ID NO: 1593603 - RNA, 19 nt, Human
guaaaaugugaagugaaug

SEQ ID NO: 1593604 - RNA, 20 nt, Human
guaaaaugugaagugaauga

SEQ ID NO: 1593605 - RNA, 22 nt, Human
guaaaaugugaagugaaugaaa

SEQ ID NO: 1593606 - RNA, 20 nt, Human
aaauaauuuuuauauuugaa

SEQ ID NO: 1593607 - RNA, 18 nt, Human
aaauaauuuuuauauuug

SEQ ID NO: 1593608 - RNA, 15 nt, Human
aaauaauuuuuauau

SEQ ID NO: 1593609 - RNA, 23 nt, Human
aaaguuauugauaaguucauaca

SEQ ID NO: 1593610 - RNA, 16 nt, Human
ggugugaccacugcag

SEQ ID NO: 1593611 - RNA, 16 nt, Human
gguuuagaaagcuugc

SEQ ID NO: 1593612 - RNA, 14 nt, Human
aaagauuuucagaa

SEQ ID NO: 1593613 - RNA, 13 nt, Human
aaagauuuucaga

SEQ ID NO: 1593614 - RNA, 15 nt, Human
aaagacuauucaaac

SEQ ID NO: 1593615 - RNA, 17 nt, Human
aaagacuauucaaacag

SEQ ID NO: 1593616 - RNA, 17 nt, Human
aaagcagggacuugaac

SEQ ID NO: 1593617 - RNA, 15 nt, Human
ggugccaguuauggc

SEQ ID NO: 1593618 - RNA, 20 nt, Human
ggguuuuauuguuuaaaauc

SEQ ID NO: 1593619 - RNA, 14 nt, Human
aaagacuauucaaa

SEQ ID NO: 1593620 - RNA, 12 nt, Human
aaaaugugaagu

SEQ ID NO: 1593621 - RNA, 15 nt, Human
aaaaugugauaugua

SEQ ID NO: 1593622 - RNA, 22 nt, Human
aaaauuuuuucucuaggaaaua

SEQ ID NO: 1593623 - RNA, 20 nt, Human
aaacaagcacuaaacaaaga

SEQ ID NO: 1593624 - RNA, 19 nt, Human
aaaaguauguuagugcaaa

SEQ ID NO: 1593625 - RNA, 13 nt, Human
aaaaauauauuua

SEQ ID NO: 1593626 - RNA, 15 nt, Human
aaaaauauauuuaau

SEQ ID NO: 1593627 - RNA, 19 nt, Human
aaaaauauauuuaaugaua

SEQ ID NO: 1593628 - RNA, 21 nt, Human
gggacauuugcucauggaauu

SEQ ID NO: 1593629 - RNA, 20 nt, Human
gggacauuugcucauggaau

SEQ ID NO: 1593630 - RNA, 22 nt, Human
aaaaauggaacauaaaauacaa

SEQ ID NO: 1593631 - RNA, 12 nt, Human
aaaaccacagca

SEQ ID NO: 1593632 - RNA, 13 nt, Human
aaaacucauuuuu

SEQ ID NO: 1593633 - RNA, 13 nt, Human
aaaaccacagcag

SEQ ID NO: 1593634 - RNA, 14 nt, Human
aaaaccacagcagu

SEQ ID NO: 1593635 - RNA, 17 nt, Human
gggauuguaaaauggug

SEQ ID NO: 1593636 - RNA, 16 nt, Human
gggauuguaaaauggu

SEQ ID NO: 1593637 - RNA, 12 nt, Human
gggcagcugccu

SEQ ID NO: 1593638 - RNA, 15 nt, Human
ggcauauuuuucaca

SEQ ID NO: 1593639 - RNA, 17 nt, Human
ggcauauuuuucacaua

SEQ ID NO: 1593640 - RNA, 13 nt, Human
ggccuccauccug

SEQ ID NO: 1593641 - RNA, 23 nt, Human
ggccuucggccuccauccugagg

SEQ ID NO: 1593642 - RNA, 22 nt, Human
ggaucuucaucugacuaugaca

SEQ ID NO: 1593643 - RNA, 12 nt, Human
ggauggcaagau

SEQ ID NO: 1593644 - RNA, 22 nt, Human
ggauguugaaaaaguucugcag

SEQ ID NO: 1593645 - RNA, 15 nt, Human
gcucugcccauccug

SEQ ID NO: 1593646 - RNA, 21 nt, Human
gcucugcccauccugccccug

SEQ ID NO: 1593647 - RNA, 16 nt, Human
gcugaaacaacaaaua

SEQ ID NO: 1593648 - RNA, 20 nt, Human
gcuccacuuggucugugaga

SEQ ID NO: 1593649 - RNA, 19 nt, Human
gcuuccuggcaauagucaa

SEQ ID NO: 1593650 - RNA, 14 nt, Human
gcuggagcucugcc

SEQ ID NO: 1593651 - RNA, 13 nt, Human
gcuguauuuuaaa

SEQ ID NO: 1593652 - RNA, 12 nt, Human
gcuguauuuuaa

SEQ ID NO: 1593653 - RNA, 20 nt, Human
gccuccauccugaggcucca

SEQ ID NO: 1593654 - RNA, 16 nt, Human
gccuccauccugaggc

SEQ ID NO: 1593655 - RNA, 17 nt, Human
gcuacuugggaggcuga

SEQ ID NO: 1593656 - RNA, 15 nt, Human
gcuacugucagcucc

SEQ ID NO: 1593657 - RNA, 19 nt, Human
gcuacaaaaacacagcaag

SEQ ID NO: 1593658 - RNA, 18 nt, Human
gcuacaaaaacacagcaa

SEQ ID NO: 1593659 - RNA, 17 nt, Human
gcuacaaaaacacagca

SEQ ID NO: 1593660 - RNA, 22 nt, Human
gccaugugcuaguaauuggaaa

SEQ ID NO: 1593661 - RNA, 13 nt, Human
gccagcaguucag

SEQ ID NO: 1593662 - RNA, 14 nt, Human
gccagcaguucaga

SEQ ID NO: 1593663 - RNA, 19 nt, Human
gccagcaguucagagcugc

SEQ ID NO: 1593664 - RNA, 20 nt, Human
gccagcaguucagagcugcc

SEQ ID NO: 1593665 - RNA, 21 nt, Human
gccagcaguucagagcugccc

SEQ ID NO: 1593666 - RNA, 22 nt, Human
gccaguuauggcuauaggugcu

SEQ ID NO: 1593667 - RNA, 16 nt, Human
gccauaugaaaaggcu

SEQ ID NO: 1593668 - RNA, 15 nt, Human
auucuugaaggaaaa

SEQ ID NO: 1593669 - RNA, 18 nt, Human
auucuugaaggaaaauga

SEQ ID NO: 1593670 - RNA, 22 nt, Human
auugauaaguucauacauugua

SEQ ID NO: 1593671 - RNA, 14 nt, Human
auuguaaauaguau

SEQ ID NO: 1593672 - RNA, 14 nt, Human
auuguaaaauggug

SEQ ID NO: 1593673 - RNA, 22 nt, Human
auucauagcagcuuauucacaa

SEQ ID NO: 1593674 - RNA, 19 nt, Human
auucauagcagcuuauuca

SEQ ID NO: 1593675 - RNA, 16 nt, Human
auuagggagagaagau

SEQ ID NO: 1593676 - RNA, 17 nt, Human
auuaugaauuacauuug

SEQ ID NO: 1593677 - RNA, 14 nt, Human
auuaugaauuacau

SEQ ID NO: 1593678 - RNA, 18 nt, Human
auuaugaauuacauuugu

SEQ ID NO: 1593679 - RNA, 19 nt, Human
auucacaagacccaaaagg

SEQ ID NO: 1593680 - RNA, 22 nt, Human
caaagcacugacuucuaaguaa

SEQ ID NO: 1593681 - RNA, 20 nt, Human
caaagcacugacuucuaagu

SEQ ID NO: 1593682 - RNA, 15 nt, Human
caaauccuugaagau

SEQ ID NO: 1593683 - RNA, 23 nt, Human
caacacgagcaggcuacugucag

SEQ ID NO: 1593684 - RNA, 20 nt, Human
caaaaaaaaaaaaaaauuag

SEQ ID NO: 1593685 - RNA, 15 nt, Human
caaaaggcagaagca

SEQ ID NO: 1593686 - RNA, 15 nt, Human
caaacagucucagga

SEQ ID NO: 1593687 - RNA, 17 nt, Human
auuugcucauggaauug

SEQ ID NO: 1593688 - RNA, 14 nt, Human
auuugcucauggaa

SEQ ID NO: 1593689 - RNA, 19 nt, Human
auuuuauagcuacuaauuu

SEQ ID NO: 1593690 - RNA, 11 nt, Human
cacugacagau

SEQ ID NO: 1593691 - RNA, 21 nt, Human
cacuagggcagggacaggaua

SEQ ID NO: 1593692 - RNA, 20 nt, Human
cacuagggcagggacaggau

SEQ ID NO: 1593693 - RNA, 16 nt, Human
cacuccagugagacag

SEQ ID NO: 1593694 - RNA, 22 nt, Human
cacugguucuucuuggucucag

SEQ ID NO: 1593695 - RNA, 19 nt, Human
cacuuguguuuugcaagcc

SEQ ID NO: 1593696 - RNA, 16 nt, Human
cacuugucaauaaaau

SEQ ID NO: 1593697 - RNA, 22 nt, Human
cacuuguguuuugcaagccaga

SEQ ID NO: 1593698 - RNA, 21 nt, Human
cacugcagaagacaguauggc

SEQ ID NO: 1593699 - RNA, 14 nt, Human
caaguccaagcaua

SEQ ID NO: 1593700 - RNA, 18 nt, Human
cacaagacugcacaucaa

SEQ ID NO: 1593701 - RNA, 15 nt, Human
caauucuugccaaau

SEQ ID NO: 1593702 - RNA, 17 nt, Human
caaugcuguauuuuaaa

SEQ ID NO: 1593703 - RNA, 16 nt, Human
caaugcuguauuuuaa

SEQ ID NO: 1593704 - RNA, 15 nt, Human
caaugcuguauuuua

SEQ ID NO: 1593705 - RNA, 21 nt, Human
cacagccucuuagaugcaguu

SEQ ID NO: 1593706 - RNA, 17 nt, Human
cacagccucuuagaugc

SEQ ID NO: 1593707 - RNA, 22 nt, Human
cacacaugaaguccaagcauuu

SEQ ID NO: 1593708 - RNA, 17 nt, Human
cacacaugaaguccaag

SEQ ID NO: 1593709 - RNA, 19 nt, Human
ccaaaaagauuuucagaaa

SEQ ID NO: 1593710 - RNA, 12 nt, Human
cauuuccaagca

SEQ ID NO: 1593711 - RNA, 15 nt, Human
cauuaggauggcuag

SEQ ID NO: 1593712 - RNA, 22 nt, Human
ccaauuauaugagacguuuuug

SEQ ID NO: 1593713 - RNA, 18 nt, Human
cauagauucccugagcag

SEQ ID NO: 1593714 - RNA, 17 nt, Human
cauagauucccugagca

SEQ ID NO: 1593715 - RNA, 16 nt, Human
caugaauuaguuuuau

SEQ ID NO: 1593716 - RNA, 18 nt, Human
caucagcugcugaaacaa

SEQ ID NO: 1593717 - RNA, 17 nt, Human
caucagcugcugaaaca

SEQ ID NO: 1593718 - RNA, 15 nt, Human
caucagcugcugaaa

SEQ ID NO: 1593719 - RNA, 20 nt, Human
caucagcuugcccuguuaaa

SEQ ID NO: 1593720 - RNA, 23 nt, Human
cagccugagcgacagugagacuc

SEQ ID NO: 1593721 - RNA, 19 nt, Human
cagccccgugggguuccuc

SEQ ID NO: 1593722 - RNA, 19 nt, Human
cagcaguucagagcugccc

SEQ ID NO: 1593723 - RNA, 20 nt, Human
cagcaguucagagcugcccu

SEQ ID NO: 1593724 - RNA, 21 nt, Human
cagcaguucagagcugcccuc

SEQ ID NO: 1593725 - RNA, 22 nt, Human
cagcaguucagagcugcccucu

SEQ ID NO: 1593726 - RNA, 16 nt, Human
cagagguugcagugag

SEQ ID NO: 1593727 - RNA, 19 nt, Human
caggaaaucaaauaugcaa

SEQ ID NO: 1593728 - RNA, 21 nt, Human
caggaaaucaaauaugcaaag

SEQ ID NO: 1593729 - RNA, 22 nt, Human
caggaaaucaaauaugcaaagc

SEQ ID NO: 1593730 - RNA, 17 nt, Human
cagcuuauucacaagac

SEQ ID NO: 1593731 - RNA, 16 nt, Human
cagcuuauucacaaga

SEQ ID NO: 1593732 - RNA, 24 nt, Human
caggacagcccuucuuuccacaga

SEQ ID NO: 1593733 - RNA, 23 nt, Human
caggacagcccuucuuuccacag

SEQ ID NO: 1593734 - RNA, 22 nt, Human
cagggaggacgcucucuggccu

SEQ ID NO: 1593735 - RNA, 23 nt, Human
cuacauaaguaauucaagaaaac

SEQ ID NO: 1593736 - RNA, 22 nt, Human
cuacauaaguaauucaagaaaa

SEQ ID NO: 1593737 - RNA, 15 nt, Human
cuacaugagguacug

SEQ ID NO: 1593738 - RNA, 18 nt, Human
cuacaugagguacugaga

SEQ ID NO: 1593739 - RNA, 15 nt, Human
cuacaaaaacacagc

SEQ ID NO: 1593740 - RNA, 23 nt, Human
cuaagugaaauaagccagacauc

SEQ ID NO: 1593741 - RNA, 20 nt, Human
cuaagugaaauaagccagac

SEQ ID NO: 1593742 - RNA, 20 nt, Human
cuaacgaaguauccuucagc

SEQ ID NO: 1593743 - RNA, 19 nt, Human
cuagaacucccuuucaaca

SEQ ID NO: 1593744 - RNA, 18 nt, Human
cuagaacucccuuucaac

SEQ ID NO: 1593745 - RNA, 17 nt, Human
cuagaacucccuuucaa

SEQ ID NO: 1593746 - RNA, 16 nt, Human
cuagaacucccuuuca

SEQ ID NO: 1593747 - RNA, 23 nt, Human
cuaguugaucagcuuauugucua

SEQ ID NO: 1593748 - RNA, 16 nt, Human
cgacagugagacucug

SEQ ID NO: 1593749 - RNA, 15 nt, Human
cgacagugagacucu

SEQ ID NO: 1593750 - RNA, 21 nt, Human
cucuuagaugcaguucugaag

SEQ ID NO: 1593751 - RNA, 20 nt, Human
cucuuagaugcaguucugaa

SEQ ID NO: 1593752 - RNA, 11 nt, Human
cucucuggccu

SEQ ID NO: 1593753 - RNA, 12 nt, Human
cucucuggccuu

SEQ ID NO: 1593754 - RNA, 13 nt, Human
cucucuggccuuc

SEQ ID NO: 1593755 - RNA, 15 nt, Human
cucuccccaugaugu

SEQ ID NO: 1593756 - RNA, 15 nt, Human
cucuuagaugcaguu

SEQ ID NO: 1593757 - RNA, 21 nt, Human
cuccagugagacagcucugca

SEQ ID NO: 1593758 - RNA, 16 nt, Human
cucccugcaauaaaau

SEQ ID NO: 1593759 - RNA, 14 nt, Human
cucccugcaauaaa

SEQ ID NO: 1593760 - RNA, 15 nt, Human
ccagauccuggaaau

SEQ ID NO: 1593761 - RNA, 23 nt, Human
cccgggaggcagagguugcagug

SEQ ID NO: 1593762 - RNA, 23 nt, Human
cccauuguggucacaggaaguag

SEQ ID NO: 1593763 - RNA, 22 nt, Human
cccauuguggucacaggaagua

SEQ ID NO: 1593764 - RNA, 17 nt, Human
cccagccagcaguucag

SEQ ID NO: 1593765 - RNA, 20 nt, Human
cccagccagcaguucagagc

SEQ ID NO: 1593766 - RNA, 16 nt, Human
cccagccagcaguuca

SEQ ID NO: 1593767 - RNA, 24 nt, Human
cccagccagcaguucagagcugcc

SEQ ID NO: 1593768 - RNA, 20 nt, Human
cccauauuuguacaccaaua

SEQ ID NO: 1593769 - RNA, 17 nt, Human
ccucugcuugccauccc

SEQ ID NO: 1593770 - RNA, 13 nt, Human
ccucugcuugcca

SEQ ID NO: 1593771 - RNA, 20 nt, Human
ccucauguccacugguucuu

SEQ ID NO: 1593772 - RNA, 15 nt, Human
ccucauguccacugg

SEQ ID NO: 1593773 - RNA, 16 nt, Human
ccguagguuauuuuca

SEQ ID NO: 1593774 - RNA, 17 nt, Human
cccuucuuuccacagaa

SEQ ID NO: 1593775 - RNA, 15 nt, Human
auguguaaaauguga

SEQ ID NO: 1593776 - RNA, 16 nt, Human
auguuccuagugaaag

SEQ ID NO: 1593777 - RNA, 15 nt, Human
auguuccuagugaaa

SEQ ID NO: 1593778 - RNA, 17 nt, Human
auguuccuagugaaaga

SEQ ID NO: 1593779 - RNA, 21 nt, Human
augucaaucagccuaguugau

SEQ ID NO: 1593780 - RNA, 15 nt, Human
augugaacacaucag

SEQ ID NO: 1593781 - RNA, 16 nt, Human
augaucuuuaaaauac

SEQ ID NO: 1593782 - RNA, 21 nt, Human
augaugaucuuuaaaauacac

SEQ ID NO: 1593783 - RNA, 18 nt, Human
augaugaucuuuaaaaua

SEQ ID NO: 1593784 - RNA, 19 nt, Human
aucuaguaugaaauuauau

SEQ ID NO: 1593785 - RNA, 15 nt, Human
aucuaguaugaaauu

SEQ ID NO: 1593786 - RNA, 16 nt, Human
aucuaguaugaaauua

SEQ ID NO: 1593787 - RNA, 17 nt, Human
aucuaguaugaaauuau

SEQ ID NO: 1593788 - RNA, 18 nt, Human
aucuaguaugaaauuaua

SEQ ID NO: 1593789 - RNA, 14 nt, Human
aucuaguaugaaau

SEQ ID NO: 1593790 - RNA, 21 nt, Human
augaaguacucauacauguua

SEQ ID NO: 1593791 - RNA, 23 nt, Human
augaaguccaagcauuuagaugu

SEQ ID NO: 1593792 - RNA, 20 nt, Human
augaaguccaagcauuuaga

SEQ ID NO: 1593793 - RNA, 17 nt, Human
aucaugaauuaguuuua

SEQ ID NO: 1593794 - RNA, 22 nt, Human
aucagcuugcccuguuaaaaga

SEQ ID NO: 1593795 - RNA, 13 nt, Human
aucagcuuauugu

SEQ ID NO: 1593796 - RNA, 15 nt, Human
aucaaauaugcaaag

SEQ ID NO: 1593797 - RNA, 14 nt, Human
aucaaauaugcaaa

SEQ ID NO: 1593798 - RNA, 19 nt, Human
auccucaguuuuugugaaa

SEQ ID NO: 1593799 - RNA, 17 nt, Human
auauuauguguuuccau

SEQ ID NO: 1593800 - RNA, 13 nt, Human
auauuauguuaaa

SEQ ID NO: 1593801 - RNA, 16 nt, Human
auauuauguuaaaacu

SEQ ID NO: 1593802 - RNA, 14 nt, Human
auauuauguuaaaa

SEQ ID NO: 1593803 - RNA, 15 nt, Human
auagcagcuuauuca

SEQ ID NO: 1593804 - RNA, 18 nt, Human
auagcagcuuauucacaa

SEQ ID NO: 1593805 - RNA, 17 nt, Human
auacccagaaaguuauu

SEQ ID NO: 1593806 - RNA, 18 nt, Human
auaauguuucaaacauau

SEQ ID NO: 1593807 - RNA, 22 nt, Human
auaagccagacaucaacagaua

SEQ ID NO: 1593808 - RNA, 21 nt, Human
auaagccagacaucaacagau

SEQ ID NO: 1593809 - RNA, 13 nt, Human
auaauguuucaaa

SEQ ID NO: 1593810 - RNA, 22 nt, Human
auaaaaagccugcaauuucaua

SEQ ID NO: 1593811 - RNA, 20 nt, Human
auaaaaagccugcaauuuca

SEQ ID NO: 1593812 - RNA, 21 nt, Human
auaacaaugcuguauuuuaaa

SEQ ID NO: 1593813 - RNA, 20 nt, Human
auaacaaugcuguauuuuaa

SEQ ID NO: 1593814 - RNA, 19 nt, Human
auaacaaugcuguauuuua

SEQ ID NO: 1593815 - RNA, 17 nt, Human
auaacaaugcuguauuu

SEQ ID NO: 1593816 - RNA, 15 nt, Human
auaacaaugcuguau

SEQ ID NO: 1593817 - RNA, 14 nt, Human
auaacaaugaaagu

SEQ ID NO: 1593818 - RNA, 20 nt, Human
agugaauucuugaaggaaaa

SEQ ID NO: 1593819 - RNA, 11 nt, Human
aguccaagcau

SEQ ID NO: 1593820 - RNA, 13 nt, Human
aguauuuuugaca

SEQ ID NO: 1593821 - RNA, 18 nt, Human
aguauuuuugacagaaua

SEQ ID NO: 1593822 - RNA, 16 nt, Human
aguauuuuugacagaa

SEQ ID NO: 1593823 - RNA, 17 nt, Human
aguauuuuugacagaau

SEQ ID NO: 1593824 - RNA, 19 nt, Human
aguaacaaugaagauaaaa

SEQ ID NO: 1593825 - RNA, 23 nt, Human
aguaaaugcuagguuaauuccaa

SEQ ID NO: 1593826 - RNA, 11 nt, Human
aguaaaugcua

SEQ ID NO: 1593827 - RNA, 22 nt, Human
aguaaaugcuagguuaauucca

SEQ ID NO: 1593828 - RNA, 13 nt, Human
aguacucauacau

SEQ ID NO: 1593829 - RNA, 19 nt, Human
agugucaaugcagccccca

SEQ ID NO: 1593830 - RNA, 20 nt, Human
aguugaaaagacuccaaaga

SEQ ID NO: 1593831 - RNA, 19 nt, Human
aguugaaaagacuccaaag

SEQ ID NO: 1593832 - RNA, 18 nt, Human
aguugaaaagacuccaaa

SEQ ID NO: 1593833 - RNA, 21 nt, Human
aguugaaaagacuccaaagaa

SEQ ID NO: 1593834 - RNA, 23 nt, Human
aguucagagcugcccucuccugg

SEQ ID NO: 1593835 - RNA, 21 nt, Human
aguucagagcugcccucuccu

SEQ ID NO: 1593836 - RNA, 22 nt, Human
aguucagagcugcccucuccug

SEQ ID NO: 1593837 - RNA, 20 nt, Human
aguucagagcugcccucucc

SEQ ID NO: 1593838 - RNA, 14 nt, Human
agaugguucuagca

SEQ ID NO: 1593839 - RNA, 19 nt, Human
agaugaugaugaucuuuaa

SEQ ID NO: 1593840 - RNA, 19 nt, Human
agauguagaggagaaacug

SEQ ID NO: 1593841 - RNA, 23 nt, Human
agcaaagcugaugacaacuuccc

SEQ ID NO: 1593842 - RNA, 21 nt, Human
agcaaagcugaugacaacuuc

SEQ ID NO: 1593843 - RNA, 24 nt, Human
agcaaaauuuuuucucuaggaaau

SEQ ID NO: 1593844 - RNA, 19 nt, Human
agacccaaaaggcagaagc

SEQ ID NO: 1593845 - RNA, 17 nt, Human
agaaugauuaugaauua

SEQ ID NO: 1593846 - RNA, 22 nt, Human
agaaugagagacacacugaaga

SEQ ID NO: 1593847 - RNA, 17 nt, Human
agaaugagagacacacu

SEQ ID NO: 1593848 - RNA, 21 nt, Human
agaagugaaaaucuacacucc

SEQ ID NO: 1593849 - RNA, 22 nt, Human
agaagagcuguucacagccaga

SEQ ID NO: 1593850 - RNA, 18 nt, Human
agaagacugcauuauauu

SEQ ID NO: 1593851 - RNA, 13 nt, Human
agaagauagcagg

SEQ ID NO: 1593852 - RNA, 18 nt, Human
agacucugucucagucca

SEQ ID NO: 1593853 - RNA, 13 nt, Human
agaggaaugaagu

SEQ ID NO: 1593854 - RNA, 23 nt, Human
agcuaauguaauaacugugaagu

SEQ ID NO: 1593855 - RNA, 12 nt, Human
agcuacaaaugc

SEQ ID NO: 1593856 - RNA, 19 nt, Human
agcuccccucggagaagag

SEQ ID NO: 1593857 - RNA, 17 nt, Human
agcuccccucggagaag

SEQ ID NO: 1593858 - RNA, 20 nt, Human
agcuccccucggagaagagc

SEQ ID NO: 1593859 - RNA, 18 nt, Human
agcuucacuguaaaauaa

SEQ ID NO: 1593860 - RNA, 15 nt, Human
agggacugaggggag

SEQ ID NO: 1593861 - RNA, 23 nt, Human
aggccaugggcacuguggguaga

SEQ ID NO: 1593862 - RNA, 21 nt, Human
aggccaugggcacugugggua

SEQ ID NO: 1593863 - RNA, 15 nt, Human
agggauuagggagag

SEQ ID NO: 1593864 - RNA, 20 nt, Human
agggauuagggagagaagau

SEQ ID NO: 1593865 - RNA, 19 nt, Human
aaauaaaccucaaaauguc

SEQ ID NO: 1593866 - RNA, 20 nt, Human
aaauaaaaauauuguguugu

SEQ ID NO: 1593867 - RNA, 20 nt, Human
aaagcauuguaaaugugcuu

SEQ ID NO: 1593868 - RNA, 17 nt, Human
aaaccucaaaaugucua

SEQ ID NO: 1593869 - RNA, 22 nt, Human
aaaccucaaaaugucuaagaua

SEQ ID NO: 1593870 - RNA, 19 nt, Human
aaacccuugccaugugcua

SEQ ID NO: 1593871 - RNA, 21 nt, Human
aaacccugucucuacuaaaaa

SEQ ID NO: 1593872 - RNA, 13 nt, Human
aaagaaacauuug

SEQ ID NO: 1593873 - RNA, 21 nt, Human
aaaauuauuuuguucauacau

SEQ ID NO: 1593874 - RNA, 20 nt, Human
aaaauuauuuuguucauaca

SEQ ID NO: 1593875 - RNA, 16 nt, Human
aaaauuauuuuguuca

SEQ ID NO: 1593876 - RNA, 18 nt, Human
aaaauuauuuuguucaua

SEQ ID NO: 1593877 - RNA, 19 nt, Human
aaaauccauacauuugugu

SEQ ID NO: 1593878 - RNA, 14 nt, Human
aaauugauguguuu

SEQ ID NO: 1593879 - RNA, 21 nt, Human
aaauugauguguuuauuuaua

SEQ ID NO: 1593880 - RNA, 12 nt, Human
aacacaucagcu

SEQ ID NO: 1593881 - RNA, 20 nt, Human
aaauguucaucaaugaauga

SEQ ID NO: 1593882 - RNA, 20 nt, Human
aaaugcuagguuaauuccaa

SEQ ID NO: 1593883 - RNA, 14 nt, Human
aaaucuuaacuuga

SEQ ID NO: 1593884 - RNA, 17 nt, Human
aauaaaccucaaaaugu

SEQ ID NO: 1593885 - RNA, 10 nt, Human
aauaaaccau

SEQ ID NO: 1593886 - RNA, 14 nt, Human
aauaauaaauauuu

SEQ ID NO: 1593887 - RNA, 20 nt, Human
aauaaaccucaaaaugucua

SEQ ID NO: 1593888 - RNA, 22 nt, Human
aaguugauaugccuuuucccaa

SEQ ID NO: 1593889 - RNA, 12 nt, Human
aauaauguuuca

SEQ ID NO: 1593890 - RNA, 19 nt, Human
aauaauguuucaaacauau

SEQ ID NO: 1593891 - RNA, 14 nt, Human
aauaauguuucaaa

SEQ ID NO: 1593892 - RNA, 16 nt, Human
aaucaaauaugcaaag

SEQ ID NO: 1593893 - RNA, 15 nt, Human
aaucaaauaugcaaa

SEQ ID NO: 1593894 - RNA, 22 nt, Human
aaucaaauaugcaaagcacuga

SEQ ID NO: 1593895 - RNA, 16 nt, Human
aaugauaacuggaaac

SEQ ID NO: 1593896 - RNA, 15 nt, Human
aaugauaacuggaaa

SEQ ID NO: 1593897 - RNA, 14 nt, Human
aaugauaacuggaa

SEQ ID NO: 1593898 - RNA, 17 nt, Human
aauccauacauuugugu

SEQ ID NO: 1593899 - RNA, 16 nt, Human
aauccauacauuugug

SEQ ID NO: 1593900 - RNA, 13 nt, Human
aagauuuucagaa

SEQ ID NO: 1593901 - RNA, 15 nt, Human
aagcagggacuugaa

SEQ ID NO: 1593902 - RNA, 14 nt, Human
aagauagcagggca

SEQ ID NO: 1593903 - RNA, 21 nt, Human
aagacauucuuccaaaaagau

SEQ ID NO: 1593904 - RNA, 23 nt, Human
aagacagugaaagaaaauaacaa

SEQ ID NO: 1593905 - RNA, 15 nt, Human
aagagaacuuccaga

SEQ ID NO: 1593906 - RNA, 19 nt, Human
aagccagauuuuccugaaa

SEQ ID NO: 1593907 - RNA, 17 nt, Human
aagggauggcaagaugu

SEQ ID NO: 1593908 - RNA, 14 nt, Human
aagggauggcaaga

SEQ ID NO: 1593909 - RNA, 12 nt, Human
aaguagaggagg

SEQ ID NO: 1593910 - RNA, 20 nt, Human
acauaaguaauucaagaaaa

SEQ ID NO: 1593911 - RNA, 15 nt, Human
acauaaguaauucaa

SEQ ID NO: 1593912 - RNA, 19 nt, Human
acauaauuaaauuuugagu

SEQ ID NO: 1593913 - RNA, 21 nt, Human
acagugauuaccagggacuga

SEQ ID NO: 1593914 - RNA, 20 nt, Human
accaaggcugauuaaaccaa

SEQ ID NO: 1593915 - RNA, 19 nt, Human
accaaggcugauuaaacca

SEQ ID NO: 1593916 - RNA, 16 nt, Human
acagaagcuccaggua

SEQ ID NO: 1593917 - RNA, 18 nt, Human
aauuuugugaagcaaaau

SEQ ID NO: 1593918 - RNA, 17 nt, Human
aauuuugugaagcaaaa

SEQ ID NO: 1593919 - RNA, 16 nt, Human
acaagaaaugaaagca

SEQ ID NO: 1593920 - RNA, 15 nt, Human
acaagaaaugaaagc

SEQ ID NO: 1593921 - RNA, 22 nt, Human
acaagaaaugaaagcagggacu

SEQ ID NO: 1593922 - RNA, 21 nt, Human
acaaggaugaauuaaguuuuu

SEQ ID NO: 1593923 - RNA, 22 nt, Human
aauuucauaccuaucaucuuaa

SEQ ID NO: 1593924 - RNA, 17 nt, Human
acucugucucaguccau

SEQ ID NO: 1593925 - RNA, 15 nt, Human
acucugucucagucc

SEQ ID NO: 1593926 - RNA, 20 nt, Human
acucuuaagaagacugcauu

SEQ ID NO: 1593927 - RNA, 15 nt, Human
acucuuaagaagacu

SEQ ID NO: 1593928 - RNA, 14 nt, Human
acucuuaagaagac

SEQ ID NO: 1593929 - RNA, 22 nt, Human
acuugggaggcugagaugggag

SEQ ID NO: 1593930 - RNA, 17 nt, Human
acuuuaugcuaagugaa

SEQ ID NO: 1593931 - RNA, 12 nt, Human
acuuuaugcuaa

SEQ ID NO: 1593932 - RNA, 14 nt, Human
acuuaaaaaugguu

SEQ ID NO: 1593933 - RNA, 13 nt, Human
acuuaaaaauggu

SEQ ID NO: 1593934 - RNA, 21 nt, Human
acuuaaaaaugguuuaaaugg

SEQ ID NO: 1593935 - RNA, 19 nt, Human
acuucagcgguuuauauaa

SEQ ID NO: 1593936 - RNA, 18 nt, Human
acuucagcgguuuauaua

SEQ ID NO: 1593937 - RNA, 20 nt, Human
acuucaaauccuugaagauu

SEQ ID NO: 1593938 - RNA, 20 nt, Human
accucugccucagaaaacaa

SEQ ID NO: 1593939 - RNA, 18 nt, Human
accucugccucagaaaac

SEQ ID NO: 1593940 - RNA, 17 nt, Human
accucugccucagaaaa

SEQ ID NO: 1593941 - RNA, 19 nt, Human
acggacgaaccuugaaaac

SEQ ID NO: 1593942 - RNA, 18 nt, Human
acuaguauuucuaugaaa

SEQ ID NO: 1593943 - RNA, 19 nt, Human
acuaguauuucuaugaaau

SEQ ID NO: 1593944 - RNA, 14 nt, Human
cauauuuuucacau

SEQ ID NO: 1593945 - RNA, 21 nt, Human
cauauuuuucacauaucuagu

SEQ ID NO: 1593946 - RNA, 18 nt, Human
caucaaugaaugaaugaa

SEQ ID NO: 1593947 - RNA, 22 nt, Human
caucaagucuuucacauuuaaa

SEQ ID NO: 1593948 - RNA, 18 nt, Human
cauauuuuucacauaucu

SEQ ID NO: 1593949 - RNA, 20 nt, Human
caucccucccuccaccuccc

SEQ ID NO: 1593950 - RNA, 14 nt, Human
caucccucccucca

SEQ ID NO: 1593951 - RNA, 12 nt, Human
caucccucccuc

SEQ ID NO: 1593952 - RNA, 13 nt, Human
caucccucccucc

SEQ ID NO: 1593953 - RNA, 22 nt, Human
caucuagugagcagucaggaaa

SEQ ID NO: 1593954 - RNA, 14 nt, Human
caucuagugagcag

SEQ ID NO: 1593955 - RNA, 15 nt, Human
cauacauuguacgaa

SEQ ID NO: 1593956 - RNA, 12 nt, Human
cauacauauuuu

SEQ ID NO: 1593957 - RNA, 19 nt, Human
cauacauauuuuuguagca

SEQ ID NO: 1593958 - RNA, 17 nt, Human
cauaccaacacgagcag

SEQ ID NO: 1593959 - RNA, 11 nt, Human
cauacauauuu

SEQ ID NO: 1593960 - RNA, 16 nt, Human
cauaaguaauucaaga

SEQ ID NO: 1593961 - RNA, 17 nt, Human
cauaaguaauucaagaa

SEQ ID NO: 1593962 - RNA, 18 nt, Human
cauaaguaauucaagaaa

SEQ ID NO: 1593963 - RNA, 22 nt, Human
cauaaguaauucaagaaaacaa

SEQ ID NO: 1593964 - RNA, 23 nt, Human
cauaaaaagccugcaauuucaua

SEQ ID NO: 1593965 - RNA, 17 nt, Human
cauaaaaacaacuuuau

SEQ ID NO: 1593966 - RNA, 20 nt, Human
cauaaaaacaacuuuauacc

SEQ ID NO: 1593967 - RNA, 21 nt, Human
cauaaaaacaacuuuauaccc

SEQ ID NO: 1593968 - RNA, 23 nt, Human
cauaaaaacaacuuuauacccag

SEQ ID NO: 1593969 - RNA, 15 nt, Human
cauaaaaacaacuuu

SEQ ID NO: 1593970 - RNA, 20 nt, Human
caguuuucugagaaagacua

SEQ ID NO: 1593971 - RNA, 19 nt, Human
caguuuucugagaaagacu

SEQ ID NO: 1593972 - RNA, 15 nt, Human
caguuuucugagaaa

SEQ ID NO: 1593973 - RNA, 14 nt, Human
caguuuucugagaa

SEQ ID NO: 1593974 - RNA, 14 nt, Human
caguugaaaagacu

SEQ ID NO: 1593975 - RNA, 18 nt, Human
caguugaaaagacuccaa

SEQ ID NO: 1593976 - RNA, 22 nt, Human
caguugaaaagacuccaaagaa

SEQ ID NO: 1593977 - RNA, 21 nt, Human
caguugaaaagacuccaaaga

SEQ ID NO: 1593978 - RNA, 23 nt, Human
caguugaaaagacuccaaagaaa

SEQ ID NO: 1593979 - RNA, 23 nt, Human
cagugugucuaaauuugaauguu

SEQ ID NO: 1593980 - RNA, 14 nt, Human
cagugugucuaaau

SEQ ID NO: 1593981 - RNA, 14 nt, Human
cagugucaaugcag

SEQ ID NO: 1593982 - RNA, 22 nt, Human
caguucggugagcuacaaaugc

SEQ ID NO: 1593983 - RNA, 12 nt, Human
caguucugaaga

SEQ ID NO: 1593984 - RNA, 14 nt, Human
caguucugaagaag

SEQ ID NO: 1593985 - RNA, 13 nt, Human
caguucugaagaa

SEQ ID NO: 1593986 - RNA, 22 nt, Human
caguucugaagaagaugguacc

SEQ ID NO: 1593987 - RNA, 16 nt, Human
caguucugaagaagau

SEQ ID NO: 1593988 - RNA, 15 nt, Human
caguucugaagaaga

SEQ ID NO: 1593989 - RNA, 21 nt, Human
caguuaccucugccucagaaa

SEQ ID NO: 1593990 - RNA, 17 nt, Human
caugggacagggaggac

SEQ ID NO: 1593991 - RNA, 23 nt, Human
caugggacagggaggacgcucuc

SEQ ID NO: 1593992 - RNA, 23 nt, Human
caugcugucuacacuaagagaga

SEQ ID NO: 1593993 - RNA, 20 nt, Human
ccaauauucauagcagcuua

SEQ ID NO: 1593994 - RNA, 19 nt, Human
ccaaggcugauuaaaccaa

SEQ ID NO: 1593995 - RNA, 22 nt, Human
ccacaagaaaugaaagcaggga

SEQ ID NO: 1593996 - RNA, 16 nt, Human
ccacaagaaaugaaag

SEQ ID NO: 1593997 - RNA, 18 nt, Human
ccaaggcuagaaccaccu

SEQ ID NO: 1593998 - RNA, 14 nt, Human
ccaacacgagcagg

SEQ ID NO: 1593999 - RNA, 23 nt, Human
ccaaauuucauaccuaucaucuu

SEQ ID NO: 1594000 - RNA, 21 nt, Human
ccaacacgagcaggcuacugu

SEQ ID NO: 1594001 - RNA, 17 nt, Human
ccaaagaaauguaaggg

SEQ ID NO: 1594002 - RNA, 18 nt, Human
cauuugcucauggaauug

SEQ ID NO: 1594003 - RNA, 16 nt, Human
cauuugcucauggaau

SEQ ID NO: 1594004 - RNA, 14 nt, Human
cauuugcucaugga

SEQ ID NO: 1594005 - RNA, 15 nt, Human
cauuugcucauggaa

SEQ ID NO: 1594006 - RNA, 19 nt, Human
cauuuaaagcuuauuaaaa

SEQ ID NO: 1594007 - RNA, 23 nt, Human
cauuucugcaucagcugcugaaa

SEQ ID NO: 1594008 - RNA, 15 nt, Human
ccauccugaggcucc

SEQ ID NO: 1594009 - RNA, 16 nt, Human
ccauccugaggcucca

SEQ ID NO: 1594010 - RNA, 19 nt, Human
ccagccugagcgacaguga

SEQ ID NO: 1594011 - RNA, 23 nt, Human
ccauggcacucuauguucuaaga

SEQ ID NO: 1594012 - RNA, 14 nt, Human
ccccaggugccagu

SEQ ID NO: 1594013 - RNA, 20 nt, Human
cccucccuccaccucccugc

SEQ ID NO: 1594014 - RNA, 13 nt, Human
cccucccuccacc

SEQ ID NO: 1594015 - RNA, 14 nt, Human
cccugcaauaaaau

SEQ ID NO: 1594016 - RNA, 15 nt, Human
cccugcaauaaaaug

SEQ ID NO: 1594017 - RNA, 13 nt, Human
ccuaaacauauga

SEQ ID NO: 1594018 - RNA, 22 nt, Human
ccgggaggcagagguugcagug

SEQ ID NO: 1594019 - RNA, 12 nt, Human
ccuccccuccuc

SEQ ID NO: 1594020 - RNA, 13 nt, Human
ccuccccuccucu

SEQ ID NO: 1594021 - RNA, 14 nt, Human
ccuccccuccucug

SEQ ID NO: 1594022 - RNA, 13 nt, Human
ccuccauccugag

SEQ ID NO: 1594023 - RNA, 12 nt, Human
ccuccauccuga

SEQ ID NO: 1594024 - RNA, 14 nt, Human
ccuccauccugagg

SEQ ID NO: 1594025 - RNA, 19 nt, Human
cuaauguaauaacugugaa

SEQ ID NO: 1594026 - RNA, 17 nt, Human
cuacacuccagugagac

SEQ ID NO: 1594027 - RNA, 16 nt, Human
cuacacuccagugaga

SEQ ID NO: 1594028 - RNA, 14 nt, Human
cuaagcaaaaugug

SEQ ID NO: 1594029 - RNA, 18 nt, Human
cuaagcaaaaugugauau

SEQ ID NO: 1594030 - RNA, 15 nt, Human
cuaagcaaaauguga

SEQ ID NO: 1594031 - RNA, 19 nt, Human
cuacuugggaggcugagau

SEQ ID NO: 1594032 - RNA, 18 nt, Human
cuacuugggaggcugaga

SEQ ID NO: 1594033 - RNA, 15 nt, Human
cuacuugggaggcug

SEQ ID NO: 1594034 - RNA, 16 nt, Human
cuaguaugaaauuaua

SEQ ID NO: 1594035 - RNA, 23 nt, Human
cuaguaucaaaagaaagaaaauc

SEQ ID NO: 1594036 - RNA, 17 nt, Human
cuaguaucaaaagaaag

SEQ ID NO: 1594037 - RNA, 15 nt, Human
cuaguaucaaaagaa

SEQ ID NO: 1594038 - RNA, 20 nt, Human
cuaguauuucuaugaaauau

SEQ ID NO: 1594039 - RNA, 19 nt, Human
cuaguauuucuaugaaaua

SEQ ID NO: 1594040 - RNA, 22 nt, Human
cuaguauuucuaugaaauauua

SEQ ID NO: 1594041 - RNA, 18 nt, Human
cuaugacauaaaaacaac

SEQ ID NO: 1594042 - RNA, 18 nt, Human
cuaugaaauauuauguua

SEQ ID NO: 1594043 - RNA, 13 nt, Human
cuaugaaauauua

SEQ ID NO: 1594044 - RNA, 22 nt, Human
cuauauuuuuuguuaaaugauu

SEQ ID NO: 1594045 - RNA, 20 nt, Human
cuauauuuuuuguuaaauga

SEQ ID NO: 1594046 - RNA, 19 nt, Human
cuauauuguuugcuaagca

SEQ ID NO: 1594047 - RNA, 21 nt, Human
cuaugacauaaaaacaacuuu

SEQ ID NO: 1594048 - RNA, 17 nt, Human
cucaccccuugccauaa

SEQ ID NO: 1594049 - RNA, 13 nt, Human
cucacauuuauau

SEQ ID NO: 1594050 - RNA, 23 nt, Human
cuaaauuugaauguuaagcagau

SEQ ID NO: 1594051 - RNA, 23 nt, Human
cuaaauugacacuuaaaaauggu

SEQ ID NO: 1594052 - RNA, 22 nt, Human
cggucggguuuuauuguuuaaa

SEQ ID NO: 1594053 - RNA, 17 nt, Human
cggugagcuacaaaugc

SEQ ID NO: 1594054 - RNA, 21 nt, Human
cggguuuuauuguuuaaaauc

SEQ ID NO: 1594055 - RNA, 14 nt, Human
cggccuccauccug

SEQ ID NO: 1594056 - RNA, 12 nt, Human
cggccuccaucc

SEQ ID NO: 1594057 - RNA, 18 nt, Human
cgcucucuggccuucggc

SEQ ID NO: 1594058 - RNA, 15 nt, Human
cgcucucuggccuuc

SEQ ID NO: 1594059 - RNA, 14 nt, Human
cgcucucuggccuu

SEQ ID NO: 1594060 - RNA, 21 nt, Human
cucuccugauagucuuucagu

SEQ ID NO: 1594061 - RNA, 20 nt, Human
cucuccugggcagcugccuc

SEQ ID NO: 1594062 - RNA, 12 nt, Human
cucuccugggca

SEQ ID NO: 1594063 - RNA, 15 nt, Human
cucuccugggcagcu

SEQ ID NO: 1594064 - RNA, 16 nt, Human
cucuccugggcagcug

SEQ ID NO: 1594065 - RNA, 18 nt, Human
cucuccugggcagcugcc

SEQ ID NO: 1594066 - RNA, 19 nt, Human
cucuccugggcagcugccu

SEQ ID NO: 1594067 - RNA, 17 nt, Human
cucuaggaaauauuuau

SEQ ID NO: 1594068 - RNA, 15 nt, Human
cucuaggaaauauuu

SEQ ID NO: 1594069 - RNA, 20 nt, Human
cuccauccugaggcuccacu

SEQ ID NO: 1594070 - RNA, 18 nt, Human
cuccauccugaggcucca

SEQ ID NO: 1594071 - RNA, 16 nt, Human
cuccauccugaggcuc

SEQ ID NO: 1594072 - RNA, 11 nt, Human
cuccauccuga

SEQ ID NO: 1594073 - RNA, 15 nt, Human
cucccuccaccuccc

SEQ ID NO: 1594074 - RNA, 17 nt, Human
cucccuccaccucccug

SEQ ID NO: 1594075 - RNA, 15 nt, Human
cugacuaugacauaa

SEQ ID NO: 1594076 - RNA, 17 nt, Human
cugacucuuaagaagac

SEQ ID NO: 1594077 - RNA, 15 nt, Human
cugacuucuaaguaa

SEQ ID NO: 1594078 - RNA, 13 nt, Human
cugacuucuaagu

SEQ ID NO: 1594079 - RNA, 16 nt, Human
cugacuucuaaguaaa

SEQ ID NO: 1594080 - RNA, 23 nt, Human
cugagaaagacuauucaaacagu

SEQ ID NO: 1594081 - RNA, 11 nt, Human
cugacagauuu

SEQ ID NO: 1594082 - RNA, 15 nt, Human
cugacagauuuccau

SEQ ID NO: 1594083 - RNA, 20 nt, Human
cugagcgacagugagacucu

SEQ ID NO: 1594084 - RNA, 16 nt, Human
cugagcgacagugaga

SEQ ID NO: 1594085 - RNA, 12 nt, Human
cucugcuugcca

SEQ ID NO: 1594086 - RNA, 14 nt, Human
cucugcuugccauc

SEQ ID NO: 1594087 - RNA, 17 nt, Human
cucugcuugccaucccu

SEQ ID NO: 1594088 - RNA, 20 nt, Human
cucugcuugccaucccuccc

SEQ ID NO: 1594089 - RNA, 19 nt, Human
cucuggccuucggccucca

SEQ ID NO: 1594090 - RNA, 12 nt, Human
cucuggccuucg

SEQ ID NO: 1594091 - RNA, 23 nt, Human
cugaagaagcaccaaucaugaau

SEQ ID NO: 1594092 - RNA, 22 nt, Human
cucuucuuuaaagggauggcaa

SEQ ID NO: 1594093 - RNA, 18 nt, Human
cugucucuacuaaaaaua

SEQ ID NO: 1594094 - RNA, 19 nt, Human
cuguauuuuaaaagaauga

SEQ ID NO: 1594095 - RNA, 16 nt, Human
cuguauuuuaaaagaa

SEQ ID NO: 1594096 - RNA, 13 nt, Human
cuguauuuuaaaa

SEQ ID NO: 1594097 - RNA, 15 nt, Human
cuguaugauucccag

SEQ ID NO: 1594098 - RNA, 15 nt, Human
cuggccuucggccuc

SEQ ID NO: 1594099 - RNA, 21 nt, Human
cuggccuucggccuccauccu

SEQ ID NO: 1594100 - RNA, 18 nt, Human
cuggccuucggccuccau

SEQ ID NO: 1594101 - RNA, 17 nt, Human
cuggccuucggccucca

SEQ ID NO: 1594102 - RNA, 16 nt, Human
cuggccuucggccucc

SEQ ID NO: 1594103 - RNA, 18 nt, Human
cugcuugccaucccuccc

SEQ ID NO: 1594104 - RNA, 19 nt, Human
cugcuugccaucccucccu

SEQ ID NO: 1594105 - RNA, 20 nt, Human
cugcuugccaucccucccuc

SEQ ID NO: 1594106 - RNA, 22 nt, Human
cugcuugccaucccucccucca

SEQ ID NO: 1594107 - RNA, 16 nt, Human
cugcuugccaucccuc

SEQ ID NO: 1594108 - RNA, 15 nt, Human
cugcuugccaucccu

SEQ ID NO: 1594109 - RNA, 12 nt, Human
cugcccucuccu

SEQ ID NO: 1594110 - RNA, 13 nt, Human
cugcccucuccug

SEQ ID NO: 1594111 - RNA, 14 nt, Human
cugcccucuccugg

SEQ ID NO: 1594112 - RNA, 15 nt, Human
cugcccucuccuggg

SEQ ID NO: 1594113 - RNA, 20 nt, Human
cugcaucagcugcugaaaca

SEQ ID NO: 1594114 - RNA, 15 nt, Human
cugccagcaacgcag

SEQ ID NO: 1594115 - RNA, 12 nt, Human
cugcacugucaa

SEQ ID NO: 1594116 - RNA, 16 nt, Human
cuuuggaacaagaugg

SEQ ID NO: 1594117 - RNA, 19 nt, Human
cuuuccucaaaacuucaga

SEQ ID NO: 1594118 - RNA, 23 nt, Human
cuugcaucaauuuuucuuauuuc

SEQ ID NO: 1594119 - RNA, 21 nt, Human
cuugcaugguuuagaaagcuu

SEQ ID NO: 1594120 - RNA, 20 nt, Human
cuugaacccgggaggcagag

SEQ ID NO: 1594121 - RNA, 19 nt, Human
cuugaacccgggaggcaga

SEQ ID NO: 1594122 - RNA, 19 nt, Human
cuucuuuccacagaagcuc

SEQ ID NO: 1594123 - RNA, 13 nt, Human
cuucuuuccacag

SEQ ID NO: 1594124 - RNA, 17 nt, Human
cuugccaaauauaaaua

SEQ ID NO: 1594125 - RNA, 18 nt, Human
cuuguaaaggaauuuaaa

SEQ ID NO: 1594126 - RNA, 20 nt, Human
gaagaguauuuuugacagaa

SEQ ID NO: 1594127 - RNA, 23 nt, Human
gaagagcuguucacagccagacu

SEQ ID NO: 1594128 - RNA, 20 nt, Human
gaagagcuguucacagccag

SEQ ID NO: 1594129 - RNA, 15 nt, Human
gaagagcuguucaca

SEQ ID NO: 1594130 - RNA, 13 nt, Human
gaagagcuguuca

SEQ ID NO: 1594131 - RNA, 17 nt, Human
gaagauguagaggagaa

SEQ ID NO: 1594132 - RNA, 22 nt, Human
gaacuuguaaaggaauuuaaaa

SEQ ID NO: 1594133 - RNA, 16 nt, Human
gaacucccuuucaaca

SEQ ID NO: 1594134 - RNA, 15 nt, Human
gaaccacaagacugc

SEQ ID NO: 1594135 - RNA, 14 nt, Human
gaaccacaagacug

SEQ ID NO: 1594136 - RNA, 23 nt, Human
gaaguccaagcauuuagauguau

SEQ ID NO: 1594137 - RNA, 23 nt, Human
gaaaguuauugauaaguucauac

SEQ ID NO: 1594138 - RNA, 14 nt, Human
gaaagcagaacagu

SEQ ID NO: 1594139 - RNA, 13 nt, Human
gaaagcagaacag

SEQ ID NO: 1594140 - RNA, 23 nt, Human
gaaagacuauucaaacagucuca

SEQ ID NO: 1594141 - RNA, 22 nt, Human
gaaagacuauucaaacagucuc

SEQ ID NO: 1594142 - RNA, 19 nt, Human
gaaagacuauucaaacagu

SEQ ID NO: 1594143 - RNA, 15 nt, Human
gaaacugccagcaac

SEQ ID NO: 1594144 - RNA, 13 nt, Human
gaaacugccagca

SEQ ID NO: 1594145 - RNA, 18 nt, Human
gaacagauaaucagugug

SEQ ID NO: 1594146 - RNA, 24 nt, Human
gaacaguuaccucugccucagaaa

SEQ ID NO: 1594147 - RNA, 17 nt, Human
gaaauuauauaaguauu

SEQ ID NO: 1594148 - RNA, 23 nt, Human
gaaauuauauaaguauucuaaau

SEQ ID NO: 1594149 - RNA, 13 nt, Human
gaaauauuuauuu

SEQ ID NO: 1594150 - RNA, 16 nt, Human
gaaauauuuauuuuaa

SEQ ID NO: 1594151 - RNA, 15 nt, Human
gaaauauuuauuuua

SEQ ID NO: 1594152 - RNA, 18 nt, Human
gagcugcccucuccuggg

SEQ ID NO: 1594153 - RNA, 19 nt, Human
gagcugcccucuccugggc

SEQ ID NO: 1594154 - RNA, 21 nt, Human
gagcugcccucuccugggcag

SEQ ID NO: 1594155 - RNA, 23 nt, Human
gagcugcccucuccugggcagcu

SEQ ID NO: 1594156 - RNA, 16 nt, Human
gagcucgugggacagu

SEQ ID NO: 1594157 - RNA, 13 nt, Human
gagacagcucugc

SEQ ID NO: 1594158 - RNA, 18 nt, Human
gagacagcucugcauacu

SEQ ID NO: 1594159 - RNA, 15 nt, Human
gagacagcucugcau

SEQ ID NO: 1594160 - RNA, 15 nt, Human
gagagugaacaaauu

SEQ ID NO: 1594161 - RNA, 19 nt, Human
gagagugaacaaauuuaca

SEQ ID NO: 1594162 - RNA, 17 nt, Human
gagauacagaauuuuau

SEQ ID NO: 1594163 - RNA, 19 nt, Human
gagagacacacugaagaag

SEQ ID NO: 1594164 - RNA, 18 nt, Human
gagaaagacuauucaaac

SEQ ID NO: 1594165 - RNA, 17 nt, Human
gagaaagacuauucaaa

SEQ ID NO: 1594166 - RNA, 15 nt, Human
gagaaagacuauuca

SEQ ID NO: 1594167 - RNA, 13 nt, Human
gagaaagacuauu

SEQ ID NO: 1594168 - RNA, 18 nt, Human
gagacacacugaagaagc

SEQ ID NO: 1594169 - RNA, 22 nt, Human
gagaagagcuguucacagccag

SEQ ID NO: 1594170 - RNA, 15 nt, Human
gagaagagcuguuca

SEQ ID NO: 1594171 - RNA, 16 nt, Human
gagaagaacugaaauc

SEQ ID NO: 1594172 - RNA, 14 nt, Human
gagaagaacugaaa

SEQ ID NO: 1594173 - RNA, 13 nt, Human
gagaagaacugaa

SEQ ID NO: 1594174 - RNA, 23 nt, Human
gaccugauuucugagcauuuaau

SEQ ID NO: 1594175 - RNA, 22 nt, Human
gacaugggacauuugcucaugg

SEQ ID NO: 1594176 - RNA, 14 nt, Human
gacaucaacagaua

SEQ ID NO: 1594177 - RNA, 15 nt, Human
gacaagcucacagac

SEQ ID NO: 1594178 - RNA, 20 nt, Human
gcauauuuuucacauaucua

SEQ ID NO: 1594179 - RNA, 14 nt, Human
gcauauuuuucaca

SEQ ID NO: 1594180 - RNA, 15 nt, Human
gcauauuuuucacau

SEQ ID NO: 1594181 - RNA, 16 nt, Human
gcauauuuuucacaua

SEQ ID NO: 1594182 - RNA, 19 nt, Human
gcauauuuuucacauaucu

SEQ ID NO: 1594183 - RNA, 15 nt, Human
gcaguugaaaagacu

SEQ ID NO: 1594184 - RNA, 17 nt, Human
gcauagguuuaauaauu

SEQ ID NO: 1594185 - RNA, 16 nt, Human
gcaguucagagcugcc

SEQ ID NO: 1594186 - RNA, 15 nt, Human
gcaguucugaagaag

SEQ ID NO: 1594187 - RNA, 17 nt, Human
gcaguucagagcugccc

SEQ ID NO: 1594188 - RNA, 18 nt, Human
gcaguucagagcugcccu

SEQ ID NO: 1594189 - RNA, 17 nt, Human
gcaguucugaagaagau

SEQ ID NO: 1594190 - RNA, 19 nt, Human
gcaguucagagcugcccuc

SEQ ID NO: 1594191 - RNA, 13 nt, Human
gcauagaaguaaa

SEQ ID NO: 1594192 - RNA, 13 nt, Human
gcauuauauuuau

SEQ ID NO: 1594193 - RNA, 12 nt, Human
gcaucagcugcu

SEQ ID NO: 1594194 - RNA, 20 nt, Human
gcagccccgugggguuccuc

SEQ ID NO: 1594195 - RNA, 18 nt, Human
gcagauaaacaguaguga

SEQ ID NO: 1594196 - RNA, 17 nt, Human
gaugacaacuucccagu

SEQ ID NO: 1594197 - RNA, 21 nt, Human
gauggcuaguaucaaaagaaa

SEQ ID NO: 1594198 - RNA, 14 nt, Human
gaugaaaauauuug

SEQ ID NO: 1594199 - RNA, 13 nt, Human
gauccuggaaauc

SEQ ID NO: 1594200 - RNA, 12 nt, Human
gauaaguucaua

SEQ ID NO: 1594201 - RNA, 14 nt, Human
gauaaguucauaca

SEQ ID NO: 1594202 - RNA, 16 nt, Human
gauaaguucauacauu

SEQ ID NO: 1594203 - RNA, 22 nt, Human
gauaaauaguuuaugauuccac

SEQ ID NO: 1594204 - RNA, 13 nt, Human
gauagcagggcau

SEQ ID NO: 1594205 - RNA, 23 nt, Human
gauagauaggucagugcaaauac

SEQ ID NO: 1594206 - RNA, 22 nt, Human
gauagucuuucaguuaaggaga

SEQ ID NO: 1594207 - RNA, 15 nt, Human
gauaguaacaaugaa

SEQ ID NO: 1594208 - RNA, 14 nt, Human
gauagucuuucagu

SEQ ID NO: 1594209 - RNA, 10 nt, Human
gcaagccaga

SEQ ID NO: 1594210 - RNA, 14 nt, Human
gcaagggugauggg

SEQ ID NO: 1594211 - RNA, 15 nt, Human
gauuuuccugaaaac

SEQ ID NO: 1594212 - RNA, 15 nt, Human
gccugcaauuucaua

SEQ ID NO: 1594213 - RNA, 12 nt, Human
gcgacagugaga

SEQ ID NO: 1594214 - RNA, 22 nt, Human
gcgacagugagacucugucuca

SEQ ID NO: 1594215 - RNA, 13 nt, Human
gcuauaggugcua

SEQ ID NO: 1594216 - RNA, 19 nt, Human
gcuagaacucccuuucaac

SEQ ID NO: 1594217 - RNA, 17 nt, Human
gccuccccuccucugcu

SEQ ID NO: 1594218 - RNA, 19 nt, Human
gccuccccuccucugcuug

SEQ ID NO: 1594219 - RNA, 20 nt, Human
gccuccccuccucugcuugc

SEQ ID NO: 1594220 - RNA, 22 nt, Human
gccuccccuccucugcuugcca

SEQ ID NO: 1594221 - RNA, 23 nt, Human
gccuccccuccucugcuugccau

SEQ ID NO: 1594222 - RNA, 20 nt, Human
gccgggcgugguggugagug

SEQ ID NO: 1594223 - RNA, 18 nt, Human
gccaucccucccuccacc

SEQ ID NO: 1594224 - RNA, 23 nt, Human
gccaucccucccuccaccucccu

SEQ ID NO: 1594225 - RNA, 19 nt, Human
uuuuguagcacugacagau

SEQ ID NO: 1594226 - RNA, 18 nt, Human
uuuuguagcacugacaga

SEQ ID NO: 1594227 - RNA, 18 nt, Human
uuuuuaaaaaagaaacau

SEQ ID NO: 1594228 - RNA, 20 nt, Human
uuuugaaucucauaauuuau

SEQ ID NO: 1594229 - RNA, 11 nt, Human
uuuugacagaa

SEQ ID NO: 1594230 - RNA, 18 nt, Human
uuuuggucuggagggaag

SEQ ID NO: 1594231 - RNA, 14 nt, Human
uuuuccugaaaacc

SEQ ID NO: 1594232 - RNA, 15 nt, Human
uuuuugaagcuguau

SEQ ID NO: 1594233 - RNA, 19 nt, Human
uuuuucucuaggaaauauu

SEQ ID NO: 1594234 - RNA, 21 nt, Human
uuugaaucucauaauuuauac

SEQ ID NO: 1594235 - RNA, 22 nt, Human
uuugaaucucauaauuuauaca

SEQ ID NO: 1594236 - RNA, 16 nt, Human
uuugaaucucauaauu

SEQ ID NO: 1594237 - RNA, 19 nt, Human
uuugaaucucauaauuuau

SEQ ID NO: 1594238 - RNA, 20 nt, Human
uuugaaucucauaauuuaua

SEQ ID NO: 1594239 - RNA, 18 nt, Human
uuugaaucaucaagucuu

SEQ ID NO: 1594240 - RNA, 17 nt, Human
uuucuuauuucauuucu

SEQ ID NO: 1594241 - RNA, 13 nt, Human
uuucugagaaaga

SEQ ID NO: 1594242 - RNA, 15 nt, Human
uuucugagaaagacu

SEQ ID NO: 1594243 - RNA, 20 nt, Human
uuuuaauaauguuucaaaca

SEQ ID NO: 1594244 - RNA, 21 nt, Human
uuuuaaaagaaugauuaugaa

SEQ ID NO: 1594245 - RNA, 16 nt, Human
uuuguauaaaauaauu

SEQ ID NO: 1594246 - RNA, 14 nt, Human
uuuguauaaaauaa

SEQ ID NO: 1594247 - RNA, 13 nt, Human
uuuguauaaaaua

SEQ ID NO: 1594248 - RNA, 14 nt, Human
guagcacugacaga

SEQ ID NO: 1594249 - RNA, 15 nt, Human
guagcacugacagau

SEQ ID NO: 1594250 - RNA, 18 nt, Human
gcuauaggugcuacaaaa

SEQ ID NO: 1594251 - RNA, 19 nt, Human
gcuauaggugcuacaaaaa

SEQ ID NO: 1594252 - RNA, 17 nt, Human
guaguguuggagaagaa

SEQ ID NO: 1594253 - RNA, 15 nt, Human
guaguguuggagaag

SEQ ID NO: 1594254 - RNA, 14 nt, Human
guaguguuggagaa

SEQ ID NO: 1594255 - RNA, 13 nt, Human
guaugaaauuaua

SEQ ID NO: 1594256 - RNA, 23 nt, Human
guaugaaauuauauaaguauucu

SEQ ID NO: 1594257 - RNA, 17 nt, Human
guauguuagugcaaauu

SEQ ID NO: 1594258 - RNA, 15 nt, Human
gucaaugcagccccc

SEQ ID NO: 1594259 - RNA, 22 nt, Human
gucaauaaaauccauacauuug

SEQ ID NO: 1594260 - RNA, 23 nt, Human
gucaauaaaauccauacauuugu

SEQ ID NO: 1594261 - RNA, 13 nt, Human
guauuuuaaucac

SEQ ID NO: 1594262 - RNA, 20 nt, Human
guauuuuaaaagaaugauua

SEQ ID NO: 1594263 - RNA, 19 nt, Human
gucagcuccccucggagaa

SEQ ID NO: 1594264 - RNA, 23 nt, Human
gucagcuccccucggagaagagc

SEQ ID NO: 1594265 - RNA, 22 nt, Human
gucagcuccccucggagaagag

SEQ ID NO: 1594266 - RNA, 21 nt, Human
gucagcuccccucggagaaga

SEQ ID NO: 1594267 - RNA, 13 nt, Human
gucaggaaagaga

SEQ ID NO: 1594268 - RNA, 23 nt, Human
gucuaagauaguaacaaugaaga

SEQ ID NO: 1594269 - RNA, 21 nt, Human
gucuaagauaguaacaaugaa

SEQ ID NO: 1594270 - RNA, 13 nt, Human
gucuaaauuugaa

SEQ ID NO: 1594271 - RNA, 18 nt, Human
gucgucaaagcugaaaug

SEQ ID NO: 1594272 - RNA, 23 nt, Human
gucggguuuuauuguuuaaaauc

SEQ ID NO: 1594273 - RNA, 21 nt, Human
gucugugagaugcuagaacuc

SEQ ID NO: 1594274 - RNA, 17 nt, Human
gucugugagaugcuaga

SEQ ID NO: 1594275 - RNA, 16 nt, Human
gucugugagaugcuag

SEQ ID NO: 1594276 - RNA, 15 nt, Human
gucugugagaugcua

SEQ ID NO: 1594277 - RNA, 23 nt, Human
gucugugagaugcuagaacuccc

SEQ ID NO: 1594278 - RNA, 22 nt, Human
gucugugagaugcuagaacucc

SEQ ID NO: 1594279 - RNA, 22 nt, Human
gugaauucuugaaggaaaauga

SEQ ID NO: 1594280 - RNA, 18 nt, Human
gugaauucuugaaggaaa

SEQ ID NO: 1594281 - RNA, 13 nt, Human
gugaacacaucag

SEQ ID NO: 1594282 - RNA, 15 nt, Human
gugaacacaucagcu

SEQ ID NO: 1594283 - RNA, 21 nt, Human
gugaacaaauuuacagagaca

SEQ ID NO: 1594284 - RNA, 14 nt, Human
gugagcuacaaaug

SEQ ID NO: 1594285 - RNA, 15 nt, Human
guguacuuaacuauu

SEQ ID NO: 1594286 - RNA, 21 nt, Human
guguaaguagauaggccaugg

SEQ ID NO: 1594287 - RNA, 21 nt, Human
gugcuacaaaaacacagcaag

SEQ ID NO: 1594288 - RNA, 20 nt, Human
gugcuacaaaaacacagcaa

SEQ ID NO: 1594289 - RNA, 15 nt, Human
gugcuacaaaaacac

SEQ ID NO: 1594290 - RNA, 16 nt, Human
guuaaaagaugaaaau

SEQ ID NO: 1594291 - RNA, 14 nt, Human
guuaaaagaugaaa

SEQ ID NO: 1594292 - RNA, 20 nt, Human
guuaaaagaugaaaauauuu

SEQ ID NO: 1594293 - RNA, 18 nt, Human
guucaauaauaaauauuu

SEQ ID NO: 1594294 - RNA, 17 nt, Human
guuauuauauuuacaaa

SEQ ID NO: 1594295 - RNA, 23 nt, Human
guuaccucugccucagaaaacaa

SEQ ID NO: 1594296 - RNA, 13 nt, Human
guucagagcugcc

SEQ ID NO: 1594297 - RNA, 14 nt, Human
guucagagcugccc

SEQ ID NO: 1594298 - RNA, 23 nt, Human
guucagagcugcccucuccuggg

SEQ ID NO: 1594299 - RNA, 20 nt, Human
guucagagcugcccucuccu

SEQ ID NO: 1594300 - RNA, 22 nt, Human
guucagagcugcccucuccugg

SEQ ID NO: 1594301 - RNA, 15 nt, Human
guucagagcugcccu

SEQ ID NO: 1594302 - RNA, 16 nt, Human
guucagagcugcccuc

SEQ ID NO: 1594303 - RNA, 17 nt, Human
guucagagcugcccucu

SEQ ID NO: 1594304 - RNA, 19 nt, Human
guucagagcugcccucucc

SEQ ID NO: 1594305 - RNA, 16 nt, Human
guucaucaaugaauga

SEQ ID NO: 1594306 - RNA, 21 nt, Human
guugauggugguauguuuuca

SEQ ID NO: 1594307 - RNA, 20 nt, Human
guugauggugguauguuuuc

SEQ ID NO: 1594308 - RNA, 22 nt, Human
guugaaaagacuccaaagaaau

SEQ ID NO: 1594309 - RNA, 17 nt, Human
guugaaaagacuccaaa

SEQ ID NO: 1594310 - RNA, 23 nt, Human
guugaaaagacuccaaagaaaug

SEQ ID NO: 1594311 - RNA, 15 nt, Human
guucugaagaagaug

SEQ ID NO: 1594312 - RNA, 14 nt, Human
guucugaagaagau

SEQ ID NO: 1594313 - RNA, 13 nt, Human
guucugaagaaga

SEQ ID NO: 1594314 - RNA, 12 nt, Human
guucugaagaag

SEQ ID NO: 1594315 - RNA, 14 nt, Human
guugugaauguugu

SEQ ID NO: 1594316 - RNA, 20 nt, Human
guuuauauaagcuuguauuc

SEQ ID NO: 1594317 - RNA, 20 nt, Human
guuuaggauguugaaaaagu

SEQ ID NO: 1594318 - RNA, 21 nt, Human
guuuagcuggaaaaguauguu

SEQ ID NO: 1594319 - RNA, 20 nt, Human
guuuagcuggaaaaguaugu

SEQ ID NO: 1594320 - RNA, 13 nt, Human
uaaaaacaacuuu

SEQ ID NO: 1594321 - RNA, 18 nt, Human
uaaaaacaacuuuauacc

SEQ ID NO: 1594322 - RNA, 19 nt, Human
uaaaaacaacuuuauaccc

SEQ ID NO: 1594323 - RNA, 21 nt, Human
uaaaaagacauucuuccaaaa

SEQ ID NO: 1594324 - RNA, 19 nt, Human
uaaaaagccugcaauuuca

SEQ ID NO: 1594325 - RNA, 18 nt, Human
uaaaaaugguuuaaaugg

SEQ ID NO: 1594326 - RNA, 19 nt, Human
uaaaaaugguuuaaauggu

SEQ ID NO: 1594327 - RNA, 22 nt, Human
uaaaacaagcacuaaacaaaga

SEQ ID NO: 1594328 - RNA, 13 nt, Human
uaaaaccacagca

SEQ ID NO: 1594329 - RNA, 13 nt, Human
uaaaaucauuucu

SEQ ID NO: 1594330 - RNA, 10 nt, Human
uaaaaucauu

SEQ ID NO: 1594331 - RNA, 22 nt, Human
uaaaaucauuucugcaucagcu

SEQ ID NO: 1594332 - RNA, 18 nt, Human
uaaaaucauuucugcauc

SEQ ID NO: 1594333 - RNA, 17 nt, Human
uaaaauccauacauuug

SEQ ID NO: 1594334 - RNA, 15 nt, Human
uaaaauccauacauu

SEQ ID NO: 1594335 - RNA, 14 nt, Human
uaaaguguuugaaa

SEQ ID NO: 1594336 - RNA, 14 nt, Human
uaaaggaauuuaaa

SEQ ID NO: 1594337 - RNA, 19 nt, Human
uaaaccaaggcuagaacca

SEQ ID NO: 1594338 - RNA, 22 nt, Human
uaaauuugaauguuaagcagau

SEQ ID NO: 1594339 - RNA, 14 nt, Human
uaaauuugaauguu

SEQ ID NO: 1594340 - RNA, 23 nt, Human
uaaauugacacuuaaaaaugguu

SEQ ID NO: 1594341 - RNA, 20 nt, Human
uaaauugacacuuaaaaaug

SEQ ID NO: 1594342 - RNA, 16 nt, Human
uaaaugugcuuuuaaa

SEQ ID NO: 1594343 - RNA, 16 nt, Human
uaaaugugccuucauu

SEQ ID NO: 1594344 - RNA, 20 nt, Human
uaaauggcuuccuggcaaua

SEQ ID NO: 1594345 - RNA, 17 nt, Human
uaacugugaaguuuaca

SEQ ID NO: 1594346 - RNA, 15 nt, Human
uaacuggaaacuuca

SEQ ID NO: 1594347 - RNA, 18 nt, Human
uaacugugaaguuuacau

SEQ ID NO: 1594348 - RNA, 21 nt, Human
uaagaaaauaucacuugucaa

SEQ ID NO: 1594349 - RNA, 13 nt, Human
uaagagagaauga

SEQ ID NO: 1594350 - RNA, 23 nt, Human
uaagagagaaugagagacacacu

SEQ ID NO: 1594351 - RNA, 14 nt, Human
uaagagagaaugag

SEQ ID NO: 1594352 - RNA, 17 nt, Human
uaaccaggggccaugaa

SEQ ID NO: 1594353 - RNA, 19 nt, Human
uaauaaauauuuuugccau

SEQ ID NO: 1594354 - RNA, 21 nt, Human
uaauaacugugaaguuuacau

SEQ ID NO: 1594355 - RNA, 13 nt, Human
uaagugaaauaag

SEQ ID NO: 1594356 - RNA, 18 nt, Human
uaagguuaccuuuguucc

SEQ ID NO: 1594357 - RNA, 22 nt, Human
uaauguuucaaacauauauaac

SEQ ID NO: 1594358 - RNA, 23 nt, Human
uaaugauaacuggaaacuucagc

SEQ ID NO: 1594359 - RNA, 22 nt, Human
uaaugauaacuggaaacuucag

SEQ ID NO: 1594360 - RNA, 17 nt, Human
uaaugauaacuggaaac

SEQ ID NO: 1594361 - RNA, 14 nt, Human
uaauaauguuucaa

SEQ ID NO: 1594362 - RNA, 14 nt, Human
uauaucuuguagcu

SEQ ID NO: 1594363 - RNA, 18 nt, Human
uauauaaguauucuaaau

SEQ ID NO: 1594364 - RNA, 19 nt, Human
uauauaacaaugcuguauu

SEQ ID NO: 1594365 - RNA, 17 nt, Human
uauauaacaaugcugua

SEQ ID NO: 1594366 - RNA, 14 nt, Human
uaucaaaagaaaga

SEQ ID NO: 1594367 - RNA, 16 nt, Human
uauaugcuucuguuuu

SEQ ID NO: 1594368 - RNA, 14 nt, Human
uauaugcuucuguu

SEQ ID NO: 1594369 - RNA, 20 nt, Human
uauauuugaaauauugacuu

SEQ ID NO: 1594370 - RNA, 21 nt, Human
uauauuuuuuguuaaaugauu

SEQ ID NO: 1594371 - RNA, 22 nt, Human
uagguuaauuccaauuauauga

SEQ ID NO: 1594372 - RNA, 22 nt, Human
uaggugcuacaaaaacacagca

SEQ ID NO: 1594373 - RNA, 20 nt, Human
uaggugcuacaaaaacacag

SEQ ID NO: 1594374 - RNA, 23 nt, Human
uaggugcuacaaaaacacagcaa

SEQ ID NO: 1594375 - RNA, 17 nt, Human
uaguauuguccaggucu

SEQ ID NO: 1594376 - RNA, 15 nt, Human
uagcauggcauauuu

SEQ ID NO: 1594377 - RNA, 17 nt, Human
uagcauggcauauuuuu

SEQ ID NO: 1594378 - RNA, 18 nt, Human
uagcauggcauauuuuuc

SEQ ID NO: 1594379 - RNA, 14 nt, Human
uagauaggccaugg

SEQ ID NO: 1594380 - RNA, 18 nt, Human
uagaauuaacacaugauc

SEQ ID NO: 1594381 - RNA, 16 nt, Human
uagaauuaacacauga

SEQ ID NO: 1594382 - RNA, 15 nt, Human
uagaauuaacacaug

SEQ ID NO: 1594383 - RNA, 23 nt, Human
uagaauaccacaggaaccacaag

SEQ ID NO: 1594384 - RNA, 14 nt, Human
uacccagaaaguua

SEQ ID NO: 1594385 - RNA, 22 nt, Human
uaccaaaaaucucaauauuuca

SEQ ID NO: 1594386 - RNA, 22 nt, Human
uaccuaacgaaguauccuucag

SEQ ID NO: 1594387 - RNA, 16 nt, Human
uaccuaucaucuuaag

SEQ ID NO: 1594388 - RNA, 13 nt, Human
uacuuaacuauuc

SEQ ID NO: 1594389 - RNA, 23 nt, Human
uacugucagcuccccucggagaa

SEQ ID NO: 1594390 - RNA, 14 nt, Human
uacaggauuugaaa

SEQ ID NO: 1594391 - RNA, 23 nt, Human
uacaguucggugagcuacaaaug

SEQ ID NO: 1594392 - RNA, 17 nt, Human
uaauuuuuauauuugaa

SEQ ID NO: 1594393 - RNA, 16 nt, Human
uaauuuuuauauuuga

SEQ ID NO: 1594394 - RNA, 12 nt, Human
uaauuuuuauau

SEQ ID NO: 1594395 - RNA, 18 nt, Human
uaauuuugugaagcaaaa

SEQ ID NO: 1594396 - RNA, 16 nt, Human
uacacacucaaaucaa

SEQ ID NO: 1594397 - RNA, 17 nt, Human
uacacacucaaaucaag

SEQ ID NO: 1594398 - RNA, 15 nt, Human
ugaaggaaaaugaua

SEQ ID NO: 1594399 - RNA, 13 nt, Human
ugaaucucauaau

SEQ ID NO: 1594400 - RNA, 20 nt, Human
ugaaucucauaauuuauaca

SEQ ID NO: 1594401 - RNA, 20 nt, Human
ugaaugaauggcuaagcaaa

SEQ ID NO: 1594402 - RNA, 15 nt, Human
ugaaugaauggcuaa

SEQ ID NO: 1594403 - RNA, 14 nt, Human
ugaaguuuacauug

SEQ ID NO: 1594404 - RNA, 16 nt, Human
ugaaguuuacauugua

SEQ ID NO: 1594405 - RNA, 20 nt, Human
ugaaguuuacauuguaaaua

SEQ ID NO: 1594406 - RNA, 22 nt, Human
ugacaacuucccagugaauucu

SEQ ID NO: 1594407 - RNA, 21 nt, Human
ugacagaauauguuucaaacu

SEQ ID NO: 1594408 - RNA, 22 nt, Human
ugacagaauauguuucaaacuu

SEQ ID NO: 1594409 - RNA, 18 nt, Human
ugacagaauauguuucaa

SEQ ID NO: 1594410 - RNA, 14 nt, Human
ugaauuacauuugu

SEQ ID NO: 1594411 - RNA, 13 nt, Human
ugaauuacauuug

SEQ ID NO: 1594412 - RNA, 14 nt, Human
ugaauuaaguuuuu

SEQ ID NO: 1594413 - RNA, 23 nt, Human
ugacagaauauguuucaaacuuu

SEQ ID NO: 1594414 - RNA, 18 nt, Human
ugaccacugcagaagaca

SEQ ID NO: 1594415 - RNA, 17 nt, Human
ugaccacugcagaagac

SEQ ID NO: 1594416 - RNA, 16 nt, Human
ugaccacugcagaaga

SEQ ID NO: 1594417 - RNA, 15 nt, Human
ugagcaggauuuuaa

SEQ ID NO: 1594418 - RNA, 20 nt, Human
ugagcaggauuuuaaucuuu

SEQ ID NO: 1594419 - RNA, 15 nt, Human
ugagaaagacuauuc

SEQ ID NO: 1594420 - RNA, 16 nt, Human
ugacucuuaagaagac

SEQ ID NO: 1594421 - RNA, 15 nt, Human
ugacucuuaagaaga

SEQ ID NO: 1594422 - RNA, 14 nt, Human
ugacucuuaagaag

SEQ ID NO: 1594423 - RNA, 19 nt, Human
ucuugaaggaaaaugauac

SEQ ID NO: 1594424 - RNA, 19 nt, Human
ucuugccaaauauaaauaa

SEQ ID NO: 1594425 - RNA, 18 nt, Human
ucuuguagcuuuaucaaa

SEQ ID NO: 1594426 - RNA, 16 nt, Human
ucuucuuggucucagu

SEQ ID NO: 1594427 - RNA, 13 nt, Human
ucuuauaauuuaa

SEQ ID NO: 1594428 - RNA, 14 nt, Human
ucuuauaauuuaaa

SEQ ID NO: 1594429 - RNA, 23 nt, Human
ugaaacacucaguuguucaauaa

SEQ ID NO: 1594430 - RNA, 22 nt, Human
ugaaaauuauuuuguucauaca

SEQ ID NO: 1594431 - RNA, 23 nt, Human
ugaaaauuauuuuguucauacau

SEQ ID NO: 1594432 - RNA, 19 nt, Human
ugaaaauuauuuuguucau

SEQ ID NO: 1594433 - RNA, 17 nt, Human
ucuuuccacagaagcuc

SEQ ID NO: 1594434 - RNA, 23 nt, Human
ucucauaauuuauacaggucaua

SEQ ID NO: 1594435 - RNA, 14 nt, Human
ucugucucagucca

SEQ ID NO: 1594436 - RNA, 22 nt, Human
ucaggagaguagaacagauaau

SEQ ID NO: 1594437 - RNA, 16 nt, Human
ucagcugcugaaacaa

SEQ ID NO: 1594438 - RNA, 22 nt, Human
ucagcuccccucggagaagagc

SEQ ID NO: 1594439 - RNA, 19 nt, Human
ucagugugucuaaauuuga

SEQ ID NO: 1594440 - RNA, 18 nt, Human
ucaguccaugaagaugua

SEQ ID NO: 1594441 - RNA, 19 nt, Human
ucauggaauuggagcucgu

SEQ ID NO: 1594442 - RNA, 21 nt, Human
ucauggaauuggagcucgugg

SEQ ID NO: 1594443 - RNA, 12 nt, Human
uccauacauuug

SEQ ID NO: 1594444 - RNA, 16 nt, Human
ucucauaauuuauaca

SEQ ID NO: 1594445 - RNA, 22 nt, Human
ucucauaauuuauacaggucau

SEQ ID NO: 1594446 - RNA, 19 nt, Human
ucuacuaaaaauacaaaaa

SEQ ID NO: 1594447 - RNA, 15 nt, Human
ucuacuaaaaauaca

SEQ ID NO: 1594448 - RNA, 12 nt, Human
ucuacuaaaaau

SEQ ID NO: 1594449 - RNA, 17 nt, Human
uccuugcaucaauuuuu

SEQ ID NO: 1594450 - RNA, 17 nt, Human
ucggccuccauccugag

SEQ ID NO: 1594451 - RNA, 16 nt, Human
ucggccuccauccuga

SEQ ID NO: 1594452 - RNA, 15 nt, Human
ucggccuccauccug

SEQ ID NO: 1594453 - RNA, 20 nt, Human
uccucaaaacuucagacaua

SEQ ID NO: 1594454 - RNA, 17 nt, Human
uccugaggcuccacuug

SEQ ID NO: 1594455 - RNA, 16 nt, Human
uccugaggcuccacuu

SEQ ID NO: 1594456 - RNA, 15 nt, Human
uccugaggcuccacu

SEQ ID NO: 1594457 - RNA, 19 nt, Human
uccucugcuugccaucccu

SEQ ID NO: 1594458 - RNA, 14 nt, Human
uccucugcuugcca

SEQ ID NO: 1594459 - RNA, 15 nt, Human
uccucugcuugccau

SEQ ID NO: 1594460 - RNA, 16 nt, Human
uccucugcuugccauc

SEQ ID NO: 1594461 - RNA, 17 nt, Human
uccucugcuugccaucc

SEQ ID NO: 1594462 - RNA, 16 nt, Human
uggaaugcuguguuaa

SEQ ID NO: 1594463 - RNA, 22 nt, Human
uggaauaauccuaaacauauga

SEQ ID NO: 1594464 - RNA, 21 nt, Human
uggaacauaaaauacaauguu

SEQ ID NO: 1594465 - RNA, 20 nt, Human
uggaacauaaaauacaaugu

SEQ ID NO: 1594466 - RNA, 23 nt, Human
uggaaacuucagcgguuuauaua

SEQ ID NO: 1594467 - RNA, 11 nt, Human
uggagggaagc

SEQ ID NO: 1594468 - RNA, 21 nt, Human
uggcuugaguuuaaauuguaa

SEQ ID NO: 1594469 - RNA, 16 nt, Human
uggcuuccuggcaaua

SEQ ID NO: 1594470 - RNA, 17 nt, Human
ugccuucucaacuccaa

SEQ ID NO: 1594471 - RNA, 15 nt, Human
ugccuucucaacucc

SEQ ID NO: 1594472 - RNA, 18 nt, Human
ugccuguaaucacagcua

SEQ ID NO: 1594473 - RNA, 19 nt, Human
ugcuaagcauuccaacuau

SEQ ID NO: 1594474 - RNA, 15 nt, Human
ugcuaagcauuccaa

SEQ ID NO: 1594475 - RNA, 22 nt, Human
ugcaguucugaagaagauggua

SEQ ID NO: 1594476 - RNA, 19 nt, Human
ugcaguucugaagaagaug

SEQ ID NO: 1594477 - RNA, 18 nt, Human
ugcaguucugaagaagau

SEQ ID NO: 1594478 - RNA, 17 nt, Human
ugcaguucugaagaaga

SEQ ID NO: 1594479 - RNA, 16 nt, Human
ugcaguucugaagaag

SEQ ID NO: 1594480 - RNA, 15 nt, Human
ugcaguucugaagaa

SEQ ID NO: 1594481 - RNA, 16 nt, Human
ugcacugucaagauga

SEQ ID NO: 1594482 - RNA, 14 nt, Human
ugccaucccucccu

SEQ ID NO: 1594483 - RNA, 11 nt, Human
ugccaucccuc

SEQ ID NO: 1594484 - RNA, 12 nt, Human
ugccaucccucc

SEQ ID NO: 1594485 - RNA, 19 nt, Human
ugccaaauauaaauaaaaa

SEQ ID NO: 1594486 - RNA, 22 nt, Human
ugccaaauauaaauaaaaauaa

SEQ ID NO: 1594487 - RNA, 17 nt, Human
ugccaaauauaaauaaa

SEQ ID NO: 1594488 - RNA, 18 nt, Human
ugccaaauauaaauaaaa

SEQ ID NO: 1594489 - RNA, 20 nt, Human
ugccacuaaauugacacuua

SEQ ID NO: 1594490 - RNA, 22 nt, Human
uguacgaagaguauuuuugaca

SEQ ID NO: 1594491 - RNA, 14 nt, Human
uguacgaagaguau

SEQ ID NO: 1594492 - RNA, 22 nt, Human
uguaguguuggagaagaacuga

SEQ ID NO: 1594493 - RNA, 16 nt, Human
uguaccgcaaugugac

SEQ ID NO: 1594494 - RNA, 17 nt, Human
uggucacaggaaguaga

SEQ ID NO: 1594495 - RNA, 14 nt, Human
uguaaucacagcua

SEQ ID NO: 1594496 - RNA, 16 nt, Human
uguaugauucccagcc

SEQ ID NO: 1594497 - RNA, 15 nt, Human
uguaugauucccagc

SEQ ID NO: 1594498 - RNA, 18 nt, Human
ugugaagugaaugaaaca

SEQ ID NO: 1594499 - RNA, 21 nt, Human
ugugaauguugugauguauuc

SEQ ID NO: 1594500 - RNA, 19 nt, Human
ugugcuaguaauuggaaag

SEQ ID NO: 1594501 - RNA, 12 nt, Human
uguucauacaua

SEQ ID NO: 1594502 - RNA, 14 nt, Human
uguucauacauauu

SEQ ID NO: 1594503 - RNA, 23 nt, Human
uguucauacauauuuuuguagca

SEQ ID NO: 1594504 - RNA, 14 nt, Human
uguuagugcaaauu

SEQ ID NO: 1594505 - RNA, 21 nt, Human
uguuaaaagaugaaaauauuu

SEQ ID NO: 1594506 - RNA, 19 nt, Human
uguguuuugcaagccagau

SEQ ID NO: 1594507 - RNA, 13 nt, Human
uguguuuugcaag

SEQ ID NO: 1594508 - RNA, 22 nt, Human
ugugugaaagguacuucaaauc

SEQ ID NO: 1594509 - RNA, 21 nt, Human
ugugugaaagguacuucaaau

SEQ ID NO: 1594510 - RNA, 20 nt, Human
uguuggagaagaacugaaau

SEQ ID NO: 1594511 - RNA, 19 nt, Human
uguuggagaagaacugaaa

SEQ ID NO: 1594512 - RNA, 17 nt, Human
uguuggagaagaacuga

SEQ ID NO: 1594513 - RNA, 16 nt, Human
uguuggagaagaacug

SEQ ID NO: 1594514 - RNA, 14 nt, Human
uguuggagaagaac

SEQ ID NO: 1594515 - RNA, 18 nt, Human
uguuuaaaaucauuucug

SEQ ID NO: 1594516 - RNA, 17 nt, Human
uguuuaaaaucauuucu

SEQ ID NO: 1594517 - RNA, 20 nt, Human
uguugacaugggacauuugc

SEQ ID NO: 1594518 - RNA, 19 nt, Human
uguuuccauauuuuauagg

SEQ ID NO: 1594519 - RNA, 22 nt, Human
uuaaaaaaaaaccugagcccca

SEQ ID NO: 1594520 - RNA, 19 nt, Human
uuaaaauacacacucaaau

SEQ ID NO: 1594521 - RNA, 18 nt, Human
uuaaaauacacacucaaa

SEQ ID NO: 1594522 - RNA, 17 nt, Human
uuaaugauaaguaaaug

SEQ ID NO: 1594523 - RNA, 16 nt, Human
uuaaugauaaguaaau

SEQ ID NO: 1594524 - RNA, 12 nt, Human
uuacauuguaaa

SEQ ID NO: 1594525 - RNA, 13 nt, Human
uuacauuguaaau

SEQ ID NO: 1594526 - RNA, 20 nt, Human
uuacagagacagaaagcaga

SEQ ID NO: 1594527 - RNA, 20 nt, Human
uuacauuuguauaaaauaau

SEQ ID NO: 1594528 - RNA, 16 nt, Human
uuaauaauguuucaaa

SEQ ID NO: 1594529 - RNA, 18 nt, Human
aucaaagagagaaaauaa

SEQ ID NO: 1594530 - RNA, 20 nt, Human
aucaaagggugaaaauuauu

SEQ ID NO: 1594531 - RNA, 14 nt, Human
aucaaaagaaagaa

SEQ ID NO: 1594532 - RNA, 21 nt, Human
aucaugaauuaguuuuauaug

SEQ ID NO: 1594533 - RNA, 12 nt, Human
auccuugaagau

SEQ ID NO: 1594534 - RNA, 23 nt, Human
auggcuuccuggcaauagucaaa

SEQ ID NO: 1594535 - RNA, 20 nt, Human
augggaaagcauuguaaaug

SEQ ID NO: 1594536 - RNA, 14 nt, Human
augggaaagcauug

SEQ ID NO: 1594537 - RNA, 15 nt, Human
augggacagggagga

SEQ ID NO: 1594538 - RNA, 20 nt, Human
augggacauuugcucaugga

SEQ ID NO: 1594539 - RNA, 13 nt, Human
augaaguacucau

SEQ ID NO: 1594540 - RNA, 13 nt, Human
agugaaugaaaca

SEQ ID NO: 1594541 - RNA, 19 nt, Human
agugaugucacuagggcag

SEQ ID NO: 1594542 - RNA, 13 nt, Human
agugauuaccagg

SEQ ID NO: 1594543 - RNA, 15 nt, Human
agugauuaccaggga

SEQ ID NO: 1594544 - RNA, 13 nt, Human
agucauuuaauaa

SEQ ID NO: 1594545 - RNA, 20 nt, Human
auaaaaagacauucuuccaa

SEQ ID NO: 1594546 - RNA, 14 nt, Human
auaaaaacaacuuu

SEQ ID NO: 1594547 - RNA, 23 nt, Human
auaaaaauauuguguugugaaug

SEQ ID NO: 1594548 - RNA, 16 nt, Human
auaaaagacagugaaa

SEQ ID NO: 1594549 - RNA, 15 nt, Human
auaaaagacagugaa

SEQ ID NO: 1594550 - RNA, 20 nt, Human
aguuguucaauaauaaauau

SEQ ID NO: 1594551 - RNA, 14 nt, Human
aguugaaaagacuc

SEQ ID NO: 1594552 - RNA, 15 nt, Human
auaaguaaaugcuag

SEQ ID NO: 1594553 - RNA, 17 nt, Human
auaaguaauucaagaaa

SEQ ID NO: 1594554 - RNA, 19 nt, Human
agaacagauaaucagugug

SEQ ID NO: 1594555 - RNA, 22 nt, Human
agaacagugauuaccagggacu

SEQ ID NO: 1594556 - RNA, 13 nt, Human
agaagagcuguuc

SEQ ID NO: 1594557 - RNA, 21 nt, Human
agaagagcuguucacagccag

SEQ ID NO: 1594558 - RNA, 20 nt, Human
agaagagcuguucacagcca

SEQ ID NO: 1594559 - RNA, 21 nt, Human
agaagacugcauuauauuuau

SEQ ID NO: 1594560 - RNA, 19 nt, Human
agacaaggaaaaaauaaca

SEQ ID NO: 1594561 - RNA, 17 nt, Human
agacccaaaaggcagaa

SEQ ID NO: 1594562 - RNA, 13 nt, Human
agcaaaauugaug

SEQ ID NO: 1594563 - RNA, 19 nt, Human
agcaaaauugauguguuua

SEQ ID NO: 1594564 - RNA, 23 nt, Human
agcaaaauugauguguuuauuua

SEQ ID NO: 1594565 - RNA, 23 nt, Human
agcaaaauuuuuucucuaggaaa

SEQ ID NO: 1594566 - RNA, 20 nt, Human
agauagauaggucagugcaa

SEQ ID NO: 1594567 - RNA, 14 nt, Human
agccagcaguucag

SEQ ID NO: 1594568 - RNA, 15 nt, Human
agccagcaguucaga

SEQ ID NO: 1594569 - RNA, 17 nt, Human
agcacugacuucuaagu

SEQ ID NO: 1594570 - RNA, 19 nt, Human
agcacugacuucuaaguaa

SEQ ID NO: 1594571 - RNA, 17 nt, Human
agggacaggauaagagg

SEQ ID NO: 1594572 - RNA, 20 nt, Human
aggcagagguugcagugagc

SEQ ID NO: 1594573 - RNA, 13 nt, Human
aggaaguagagga

SEQ ID NO: 1594574 - RNA, 13 nt, Human
agcuacaaaugca

SEQ ID NO: 1594575 - RNA, 17 nt, Human
agcgacagugagacucu

SEQ ID NO: 1594576 - RNA, 15 nt, Human
agcgacagugagacu

SEQ ID NO: 1594577 - RNA, 13 nt, Human
agcgacagugaga

SEQ ID NO: 1594578 - RNA, 20 nt, Human
agcugcugaaacaacaaaua

SEQ ID NO: 1594579 - RNA, 16 nt, Human
agcugcugaaacaaca

SEQ ID NO: 1594580 - RNA, 15 nt, Human
agcugcugaaacaac

SEQ ID NO: 1594581 - RNA, 14 nt, Human
agcugcugaaacaa

SEQ ID NO: 1594582 - RNA, 18 nt, Human
aggaaaaaauaacaauga

SEQ ID NO: 1594583 - RNA, 18 nt, Human
agcuguaugauucccagc

SEQ ID NO: 1594584 - RNA, 17 nt, Human
agcuguaugauucccag

SEQ ID NO: 1594585 - RNA, 16 nt, Human
acugacagauuuccau

SEQ ID NO: 1594586 - RNA, 19 nt, Human
acugauaugggucuugaua

SEQ ID NO: 1594587 - RNA, 14 nt, Human
acucccuuucaaca

SEQ ID NO: 1594588 - RNA, 19 nt, Human
acucguuaauuuguagugu

SEQ ID NO: 1594589 - RNA, 14 nt, Human
acucguuaauuugu

SEQ ID NO: 1594590 - RNA, 12 nt, Human
acuggaacucuc

SEQ ID NO: 1594591 - RNA, 17 nt, Human
acuguaaaauaauaacu

SEQ ID NO: 1594592 - RNA, 22 nt, Human
acuuaaaaaugguuuaaauggu

SEQ ID NO: 1594593 - RNA, 19 nt, Human
acuucaaauccuugaagau

SEQ ID NO: 1594594 - RNA, 18 nt, Human
acuucaaauccuugaaga

SEQ ID NO: 1594595 - RNA, 17 nt, Human
acuucaaauccuugaag

SEQ ID NO: 1594596 - RNA, 13 nt, Human
acuuggucuguga

SEQ ID NO: 1594597 - RNA, 21 nt, Human
acuucagacauagaauuaaca

SEQ ID NO: 1594598 - RNA, 17 nt, Human
acuucagcgguuuauau

SEQ ID NO: 1594599 - RNA, 19 nt, Human
acgcaggcccccaggugcc

SEQ ID NO: 1594600 - RNA, 21 nt, Human
acccugucucuacuaaaaaua

SEQ ID NO: 1594601 - RNA, 15 nt, Human
aauuauauaaguauu

SEQ ID NO: 1594602 - RNA, 16 nt, Human
aauuauauaaguauuc

SEQ ID NO: 1594603 - RNA, 17 nt, Human
aauuauauaaguauucu

SEQ ID NO: 1594604 - RNA, 16 nt, Human
aauuucauaugcugua

SEQ ID NO: 1594605 - RNA, 18 nt, Human
aauuucauaugcuguaua

SEQ ID NO: 1594606 - RNA, 11 nt, Human
aauuguaauag

SEQ ID NO: 1594607 - RNA, 15 nt, Human
acaccaauauucaua

SEQ ID NO: 1594608 - RNA, 21 nt, Human
acauaaguaauucaagaaaac

SEQ ID NO: 1594609 - RNA, 20 nt, Human
acaucccuuaccugggaaag

SEQ ID NO: 1594610 - RNA, 21 nt, Human
acauuuguauaaaauaauuuu

SEQ ID NO: 1594611 - RNA, 19 nt, Human
acauuuguauaaaauaauu

SEQ ID NO: 1594612 - RNA, 16 nt, Human
acauuuguauaaaaua

SEQ ID NO: 1594613 - RNA, 16 nt, Human
acauuugcucauggaa

SEQ ID NO: 1594614 - RNA, 15 nt, Human
acauuugcucaugga

SEQ ID NO: 1594615 - RNA, 22 nt, Human
acaggaugguucccuugaugaa

SEQ ID NO: 1594616 - RNA, 24 nt, Human
acaggaugguucccuugaugaaga

SEQ ID NO: 1594617 - RNA, 20 nt, Human
acagugauuaccagggacug

SEQ ID NO: 1594618 - RNA, 19 nt, Human
acagugauuaccagggacu

SEQ ID NO: 1594619 - RNA, 16 nt, Human
aaucucauaauuuaua

SEQ ID NO: 1594620 - RNA, 16 nt, Human
aaucucaauauuucag

SEQ ID NO: 1594621 - RNA, 20 nt, Human
aaugaauacuuuauaaagga

SEQ ID NO: 1594622 - RNA, 14 nt, Human
aagagagaaaauaa

SEQ ID NO: 1594623 - RNA, 15 nt, Human
aagaagacugcauua

SEQ ID NO: 1594624 - RNA, 20 nt, Human
aagaagacugcauuauauuu

SEQ ID NO: 1594625 - RNA, 21 nt, Human
aagacaaggaaaaaauaacaa

SEQ ID NO: 1594626 - RNA, 15 nt, Human
aagaacugaaaucau

SEQ ID NO: 1594627 - RNA, 13 nt, Human
aagaacugaaauc

SEQ ID NO: 1594628 - RNA, 12 nt, Human
aagaacugaaau

SEQ ID NO: 1594629 - RNA, 11 nt, Human
aagaacugaaa

SEQ ID NO: 1594630 - RNA, 20 nt, Human
aacgcaggcccccaggugcc

SEQ ID NO: 1594631 - RNA, 16 nt, Human
aagaguaguaauagag

SEQ ID NO: 1594632 - RNA, 19 nt, Human
aagaguauuuuugacagaa

SEQ ID NO: 1594633 - RNA, 23 nt, Human
aaaucucaaauuuggauugcuaa

SEQ ID NO: 1594634 - RNA, 18 nt, Human
aaaucucaauauuucaga

SEQ ID NO: 1594635 - RNA, 21 nt, Human
aaauauuuauuuuaauaaugu

SEQ ID NO: 1594636 - RNA, 23 nt, Human
aaauguugacaugggacauuugc

SEQ ID NO: 1594637 - RNA, 13 nt, Human
aaauguucaucaa

SEQ ID NO: 1594638 - RNA, 17 nt, Human
aaauguucaucaaugaa

SEQ ID NO: 1594639 - RNA, 22 nt, Human
aaauguugacaugggacauuug

SEQ ID NO: 1594640 - RNA, 13 nt, Human
aaagccugcaauu

SEQ ID NO: 1594641 - RNA, 18 nt, Human
aaagccugcaauuucaua

SEQ ID NO: 1594642 - RNA, 19 nt, Human
aaagcauuguaaaugugcu

SEQ ID NO: 1594643 - RNA, 17 nt, Human
aaagcauuguaaaugug

SEQ ID NO: 1594644 - RNA, 15 nt, Human
aaagcauuguaaaug

SEQ ID NO: 1594645 - RNA, 21 nt, Human
aaaaucauuucugcaucagcu

SEQ ID NO: 1594646 - RNA, 15 nt, Human
aaacugcacugucaa

SEQ ID NO: 1594647 - RNA, 13 nt, Human
aaaagacuccaaa

SEQ ID NO: 1594648 - RNA, 11 nt, Human
aaaagaaugau

SEQ ID NO: 1594649 - RNA, 13 nt, Human
aaaagaauauuuu

SEQ ID NO: 1594650 - RNA, 20 nt, Human
aaaagacaaggaaaaaauaa

SEQ ID NO: 1594651 - RNA, 12 nt, Human
aaaagaauauuu

SEQ ID NO: 1594652 - RNA, 17 nt, Human
aaaagaaagaaaaucag

SEQ ID NO: 1594653 - RNA, 17 nt, Human
aaaagaugaaaauauuu

SEQ ID NO: 1594654 - RNA, 12 nt, Human
aaaaucauuucu

SEQ ID NO: 1594655 - RNA, 11 nt, Human
aaaaucauuuc

SEQ ID NO: 1594656 - RNA, 10 nt, Human
aaaaucauuu

SEQ ID NO: 1594657 - RNA, 22 nt, Human
aaauuauuuuguucauacauau

SEQ ID NO: 1594658 - RNA, 20 nt, Human
aaauuauuuuguucauacau

SEQ ID NO: 1594659 - RNA, 21 nt, Human
aaauuauuuuguucauacaua

SEQ ID NO: 1594660 - RNA, 22 nt, Human
aaauuauauaaguauucuaaau

SEQ ID NO: 1594661 - RNA, 17 nt, Human
aaauuauuuuguucaua

SEQ ID NO: 1594662 - RNA, 19 nt, Human
aaauuauuuuguucauaca

SEQ ID NO: 1594663 - RNA, 16 nt, Human
aaauuauauaaguauu

SEQ ID NO: 1594664 - RNA, 18 nt, Human
aaauuauauaaguauucu

SEQ ID NO: 1594665 - RNA, 20 nt, Human
guauuuuugacagaauaugu

SEQ ID NO: 1594666 - RNA, 17 nt, Human
aaauuucagcagcugca

SEQ ID NO: 1594667 - RNA, 18 nt, Human
aaauuucagcagcugcag

SEQ ID NO: 1594668 - RNA, 16 nt, Human
gucaaauugugugaaa

SEQ ID NO: 1594669 - RNA, 22 nt, Human
aaauguaagggaaacugccagc

SEQ ID NO: 1594670 - RNA, 14 nt, Human
guaugauucccagc

SEQ ID NO: 1594671 - RNA, 14 nt, Human
aaaugcauuucuaa

SEQ ID NO: 1594672 - RNA, 19 nt, Human
aaauggcuuccuggcaaua

SEQ ID NO: 1594673 - RNA, 22 nt, Human
aaaugaaagcagggacuugaac

SEQ ID NO: 1594674 - RNA, 21 nt, Human
aaaugaaagcagggacuugaa

SEQ ID NO: 1594675 - RNA, 19 nt, Human
aaaucuacacuccagugag

SEQ ID NO: 1594676 - RNA, 14 nt, Human
aaauccuugaagau

SEQ ID NO: 1594677 - RNA, 17 nt, Human
aaccucaaaaugucuaa

SEQ ID NO: 1594678 - RNA, 20 nt, Human
aaccuagggugauauuaacc

SEQ ID NO: 1594679 - RNA, 18 nt, Human
aacccaaauguucaucaa

SEQ ID NO: 1594680 - RNA, 13 nt, Human
aacccaaauguuc

SEQ ID NO: 1594681 - RNA, 20 nt, Human
aacccauauuuguacaccaa

SEQ ID NO: 1594682 - RNA, 12 nt, Human
aaccacagcagu

SEQ ID NO: 1594683 - RNA, 21 nt, Human
gucuuaauuaaaagaauauuu

SEQ ID NO: 1594684 - RNA, 19 nt, Human
gucuuaauuaaaagaauau

SEQ ID NO: 1594685 - RNA, 22 nt, Human
gucuuaauuaaaagaauauuuu

SEQ ID NO: 1594686 - RNA, 19 nt, Human
gucuuauauauuguagaua

SEQ ID NO: 1594687 - RNA, 14 nt, Human
aacucccuuucaac

SEQ ID NO: 1594688 - RNA, 13 nt, Human
aacucccuuucaa

SEQ ID NO: 1594689 - RNA, 18 nt, Human
aacucguuaauuuguagu

SEQ ID NO: 1594690 - RNA, 21 nt, Human
aacuccagaaagugacaagcu

SEQ ID NO: 1594691 - RNA, 14 nt, Human
aacuccagaaagug

SEQ ID NO: 1594692 - RNA, 14 nt, Human
aacaaugaagauaa

SEQ ID NO: 1594693 - RNA, 18 nt, Human
aacaaugaagauaaaaag

SEQ ID NO: 1594694 - RNA, 21 nt, Human
aacaagccuccuuuuaaagua

SEQ ID NO: 1594695 - RNA, 15 nt, Human
aacaaggaugaauua

SEQ ID NO: 1594696 - RNA, 24 nt, Human
guccaagcauaccaacacgagcag

SEQ ID NO: 1594697 - RNA, 21 nt, Human
guccaagcauuuagauguaua

SEQ ID NO: 1594698 - RNA, 18 nt, Human
aacauuugguaaggggaa

SEQ ID NO: 1594699 - RNA, 22 nt, Human
aacaguagugauaguuguaccg

SEQ ID NO: 1594700 - RNA, 11 nt, Human
guucauacauu

SEQ ID NO: 1594701 - RNA, 14 nt, Human
guucauacauugua

SEQ ID NO: 1594702 - RNA, 9 nt, Human
guucauaca

SEQ ID NO: 1594703 - RNA, 10 nt, Human
guucauacau

SEQ ID NO: 1594704 - RNA, 13 nt, Human
guucauacauauu

SEQ ID NO: 1594705 - RNA, 14 nt, Human
guucauacauauuu

SEQ ID NO: 1594706 - RNA, 23 nt, Human
guucauacauauuuuuguagcac

SEQ ID NO: 1594707 - RNA, 14 nt, Human
guuaaguaugugua

SEQ ID NO: 1594708 - RNA, 18 nt, Human
guucuagcauggcauauu

SEQ ID NO: 1594709 - RNA, 19 nt, Human
guucuagcauggcauauuu

SEQ ID NO: 1594710 - RNA, 18 nt, Human
guugacaugggacauuug

SEQ ID NO: 1594711 - RNA, 14 nt, Human
guugacaugggaca

SEQ ID NO: 1594712 - RNA, 18 nt, Human
guuguaccgcaaugugac

SEQ ID NO: 1594713 - RNA, 16 nt, Human
guuuaaaaucauuucu

SEQ ID NO: 1594714 - RNA, 10 nt, Human
guuuaaaauc

SEQ ID NO: 1594715 - RNA, 13 nt, Human
aagguacuucaaa

SEQ ID NO: 1594716 - RNA, 17 nt, Human
aaggggaauugaggaca

SEQ ID NO: 1594717 - RNA, 21 nt, Human
guuucaaacauauauaacaau

SEQ ID NO: 1594718 - RNA, 23 nt, Human
guuuucugagaaagacuauucaa

SEQ ID NO: 1594719 - RNA, 18 nt, Human
guguuuccauauuuuaua

SEQ ID NO: 1594720 - RNA, 13 nt, Human
aagacuauucaaa

SEQ ID NO: 1594721 - RNA, 14 nt, Human
guggguagacacac

SEQ ID NO: 1594722 - RNA, 21 nt, Human
gugggacagucaccucaugga

SEQ ID NO: 1594723 - RNA, 13 nt, Human
aagaaagaaaauc

SEQ ID NO: 1594724 - RNA, 22 nt, Human
aagaagugaaaaucuacacucc

SEQ ID NO: 1594725 - RNA, 16 nt, Human
aagaagugaaaaucua

SEQ ID NO: 1594726 - RNA, 18 nt, Human
gugcuaguaauuggaaag

SEQ ID NO: 1594727 - RNA, 18 nt, Human
aagaaugauuaugaauua

SEQ ID NO: 1594728 - RNA, 16 nt, Human
aagaaugauuaugaau

SEQ ID NO: 1594729 - RNA, 12 nt, Human
aaugcuguguua

SEQ ID NO: 1594730 - RNA, 13 nt, Human
uaauucaagaaaa

SEQ ID NO: 1594731 - RNA, 17 nt, Human
uaauuuauacaggucau

SEQ ID NO: 1594732 - RNA, 16 nt, Human
uacaaaaacacagcaa

SEQ ID NO: 1594733 - RNA, 15 nt, Human
uacaaaaacacagca

SEQ ID NO: 1594734 - RNA, 14 nt, Human
uacaaaaacacagc

SEQ ID NO: 1594735 - RNA, 13 nt, Human
uacaaaaacacag

SEQ ID NO: 1594736 - RNA, 17 nt, Human
uacauauuuuuguagca

SEQ ID NO: 1594737 - RNA, 18 nt, Human
uacauauuuuuguagcac

SEQ ID NO: 1594738 - RNA, 11 nt, Human
aaugugauaug

SEQ ID NO: 1594739 - RNA, 19 nt, Human
aauggacuuuuguacauag

SEQ ID NO: 1594740 - RNA, 14 nt, Human
uacacuccagugag

SEQ ID NO: 1594741 - RNA, 19 nt, Human
uacacuaagagagaaugag

SEQ ID NO: 1594742 - RNA, 14 nt, Human
uaaugguguuuuaa

SEQ ID NO: 1594743 - RNA, 16 nt, Human
uaaugauaacuggaaa

SEQ ID NO: 1594744 - RNA, 21 nt, Human
aaugagagacacacugaagaa

SEQ ID NO: 1594745 - RNA, 23 nt, Human
uaaucagugugucuaaauuugaa

SEQ ID NO: 1594746 - RNA, 20 nt, Human
uaaguauguguaaaauguga

SEQ ID NO: 1594747 - RNA, 13 nt, Human
uaaguucauacau

SEQ ID NO: 1594748 - RNA, 14 nt, Human
uaaguucauacauu

SEQ ID NO: 1594749 - RNA, 18 nt, Human
uaaguuuuuuuuuaaaaa

SEQ ID NO: 1594750 - RNA, 12 nt, Human
uaaguucauaca

SEQ ID NO: 1594751 - RNA, 23 nt, Human
aaucaugaauuaguuuuauaugc

SEQ ID NO: 1594752 - RNA, 17 nt, Human
aaucaugaauuaguuuu

SEQ ID NO: 1594753 - RNA, 19 nt, Human
aaucaugaauuaguuuuau

SEQ ID NO: 1594754 - RNA, 15 nt, Human
aaucaucaagucuuu

SEQ ID NO: 1594755 - RNA, 14 nt, Human
aaucuuauaauuua

SEQ ID NO: 1594756 - RNA, 16 nt, Human
aaucuuauaauuuaaa

SEQ ID NO: 1594757 - RNA, 13 nt, Human
aauccuugaagau

SEQ ID NO: 1594758 - RNA, 22 nt, Human
aaucauuucugcaucagcugcu

SEQ ID NO: 1594759 - RNA, 20 nt, Human
aauccucaguuuuugugaaa

SEQ ID NO: 1594760 - RNA, 18 nt, Human
uaaauuuugaguucuaca

SEQ ID NO: 1594761 - RNA, 19 nt, Human
uaaauuuugaguucuacau

SEQ ID NO: 1594762 - RNA, 20 nt, Human
uaaauuuugucuuuaacuca

SEQ ID NO: 1594763 - RNA, 18 nt, Human
aauaggcguaacuaauuu

SEQ ID NO: 1594764 - RNA, 15 nt, Human
aauaguauuugagag

SEQ ID NO: 1594765 - RNA, 12 nt, Human
aauaucacuugu

SEQ ID NO: 1594766 - RNA, 20 nt, Human
aauaucacuugucaauaaaa

SEQ ID NO: 1594767 - RNA, 15 nt, Human
aauaucacuugucaa

SEQ ID NO: 1594768 - RNA, 20 nt, Human
aauauugcuuuggucauaug

SEQ ID NO: 1594769 - RNA, 18 nt, Human
aauauuguguugugaaug

SEQ ID NO: 1594770 - RNA, 15 nt, Human
aauauuucagauaau

SEQ ID NO: 1594771 - RNA, 24 nt, Human
aauaugcaaagcacugacuucuaa

SEQ ID NO: 1594772 - RNA, 17 nt, Human
aauaugcaaagcacuga

SEQ ID NO: 1594773 - RNA, 15 nt, Human
aauaugcaaagcacu

SEQ ID NO: 1594774 - RNA, 19 nt, Human
aauaucuuuuuuuuaauaa

SEQ ID NO: 1594775 - RNA, 21 nt, Human
aauaauuuuaagaaaucaaag

SEQ ID NO: 1594776 - RNA, 19 nt, Human
aauaauuuuuauauuugaa

SEQ ID NO: 1594777 - RNA, 17 nt, Human
aauaauuuuuauauuug

SEQ ID NO: 1594778 - RNA, 16 nt, Human
aauaauuuuuauauuu

SEQ ID NO: 1594779 - RNA, 20 nt, Human
aauaacugugaaguuuacau

SEQ ID NO: 1594780 - RNA, 14 nt, Human
aauaacugugaagu

SEQ ID NO: 1594781 - RNA, 16 nt, Human
aauaacugugaaguuu

SEQ ID NO: 1594782 - RNA, 20 nt, Human
aauaauuuuuauauuugaaa

SEQ ID NO: 1594783 - RNA, 17 nt, Human
uaaauuuugaguucuac

SEQ ID NO: 1594784 - RNA, 15 nt, Human
uaaauguugacaugg

SEQ ID NO: 1594785 - RNA, 13 nt, Human
aauaacugugaag

SEQ ID NO: 1594786 - RNA, 15 nt, Human
aauaacgauaaaaga

SEQ ID NO: 1594787 - RNA, 21 nt, Human
aauaacaaugaaaguugauaa

SEQ ID NO: 1594788 - RNA, 16 nt, Human
aauuuauacaggucau

SEQ ID NO: 1594789 - RNA, 17 nt, Human
aauuuauacaggucaua

SEQ ID NO: 1594790 - RNA, 19 nt, Human
aauuucucccagucauuua

SEQ ID NO: 1594791 - RNA, 18 nt, Human
aauuuacagagacagaaa

SEQ ID NO: 1594792 - RNA, 17 nt, Human
aauuuacagagacagaa

SEQ ID NO: 1594793 - RNA, 15 nt, Human
aauuggagcucgugg

SEQ ID NO: 1594794 - RNA, 19 nt, Human
uacuucuuaggguuaugau

SEQ ID NO: 1594795 - RNA, 13 nt, Human
aauugacccacaa

SEQ ID NO: 1594796 - RNA, 14 nt, Human
uacuaaaaauacaa

SEQ ID NO: 1594797 - RNA, 18 nt, Human
uacuaaaaauacaaaaaa

SEQ ID NO: 1594798 - RNA, 18 nt, Human
aauugaggacacugauau

SEQ ID NO: 1594799 - RNA, 19 nt, Human
uacugagagugaacaaauu

SEQ ID NO: 1594800 - RNA, 17 nt, Human
uacugagagugaacaaa

SEQ ID NO: 1594801 - RNA, 18 nt, Human
acaaugaagauaaaaaga

SEQ ID NO: 1594802 - RNA, 16 nt, Human
uagcuacuaauuuuaa

SEQ ID NO: 1594803 - RNA, 17 nt, Human
acaagaugguucuagca

SEQ ID NO: 1594804 - RNA, 22 nt, Human
acaagcucacagaccuuugaac

SEQ ID NO: 1594805 - RNA, 17 nt, Human
acaaauuuacagagaca

SEQ ID NO: 1594806 - RNA, 20 nt, Human
uagaugcaguucugaagaag

SEQ ID NO: 1594807 - RNA, 21 nt, Human
uagaugcaguucugaagaaga

SEQ ID NO: 1594808 - RNA, 17 nt, Human
uagauaggccaugggca

SEQ ID NO: 1594809 - RNA, 22 nt, Human
uagauaggucagugcaaauacu

SEQ ID NO: 1594810 - RNA, 22 nt, Human
aauuuuuucucuaggaaauauu

SEQ ID NO: 1594811 - RNA, 21 nt, Human
aauuuuucuuauuucauuucu

SEQ ID NO: 1594812 - RNA, 16 nt, Human
uauaaguauucuaaau

SEQ ID NO: 1594813 - RNA, 14 nt, Human
acacuccagugaga

SEQ ID NO: 1594814 - RNA, 14 nt, Human
acacugaagaagca

SEQ ID NO: 1594815 - RNA, 12 nt, Human
acacugaagaag

SEQ ID NO: 1594816 - RNA, 15 nt, Human
uauauuuaaugauaa

SEQ ID NO: 1594817 - RNA, 12 nt, Human
uauauuuacaaa

SEQ ID NO: 1594818 - RNA, 19 nt, Human
acagaaagcagaacaguga

SEQ ID NO: 1594819 - RNA, 15 nt, Human
acacuuaaaaauggu

SEQ ID NO: 1594820 - RNA, 13 nt, Human
acacuuaaaaaug

SEQ ID NO: 1594821 - RNA, 16 nt, Human
uaucuuguagcuuuau

SEQ ID NO: 1594822 - RNA, 21 nt, Human
acagcccuucuuuccacagaa

SEQ ID NO: 1594823 - RNA, 20 nt, Human
acagcccuucuuuccacaga

SEQ ID NO: 1594824 - RNA, 14 nt, Human
acagauaaucagug

SEQ ID NO: 1594825 - RNA, 19 nt, Human
uauauuuauuacuguaaga

SEQ ID NO: 1594826 - RNA, 15 nt, Human
uauauuuauuacugu

SEQ ID NO: 1594827 - RNA, 14 nt, Human
uaguaauagagcaa

SEQ ID NO: 1594828 - RNA, 14 nt, Human
acacacugaagaag

SEQ ID NO: 1594829 - RNA, 20 nt, Human
uaguaauagagcaaaauuga

SEQ ID NO: 1594830 - RNA, 17 nt, Human
uaguguuggagaagaac

SEQ ID NO: 1594831 - RNA, 16 nt, Human
uaguguuggagaagaa

SEQ ID NO: 1594832 - RNA, 12 nt, Human
uaguguuggaga

SEQ ID NO: 1594833 - RNA, 18 nt, Human
acacaacuauuuuuccaa

SEQ ID NO: 1594834 - RNA, 17 nt, Human
acacaacuauauuguuu

SEQ ID NO: 1594835 - RNA, 14 nt, Human
acacaacuauauug

SEQ ID NO: 1594836 - RNA, 18 nt, Human
acaaugcuguauuuuaaa

SEQ ID NO: 1594837 - RNA, 17 nt, Human
acaaugcuguauuuuaa

SEQ ID NO: 1594838 - RNA, 14 nt, Human
acaaugcuguauuu

SEQ ID NO: 1594839 - RNA, 13 nt, Human
acacacugaagaa

SEQ ID NO: 1594840 - RNA, 17 nt, Human
acacuaagagagaauga

SEQ ID NO: 1594841 - RNA, 19 nt, Human
acacuaagagagaaugaga

SEQ ID NO: 1594842 - RNA, 18 nt, Human
acacuaagagagaaugag

SEQ ID NO: 1594843 - RNA, 17 nt, Human
ucacauaucuaguauga

SEQ ID NO: 1594844 - RNA, 21 nt, Human
ucacauaucuaguaugaaauu

SEQ ID NO: 1594845 - RNA, 22 nt, Human
ucacauaucuaguaugaaauua

SEQ ID NO: 1594846 - RNA, 21 nt, Human
ucacaacagauuauuaccuua

SEQ ID NO: 1594847 - RNA, 15 nt, Human
accaaucaugaauua

SEQ ID NO: 1594848 - RNA, 13 nt, Human
accaaucaugaau

SEQ ID NO: 1594849 - RNA, 23 nt, Human
ucaauuuuucuuauuucauuucu

SEQ ID NO: 1594850 - RNA, 20 nt, Human
ucaauuuuucuuauuucauu

SEQ ID NO: 1594851 - RNA, 15 nt, Human
ucaauucuugccaaa

SEQ ID NO: 1594852 - RNA, 17 nt, Human
ucacuaccuucaugcau

SEQ ID NO: 1594853 - RNA, 14 nt, Human
accagggacugagg

SEQ ID NO: 1594854 - RNA, 13 nt, Human
accacugcagaag

SEQ ID NO: 1594855 - RNA, 18 nt, Human
accacuuguguuuugcaa

SEQ ID NO: 1594856 - RNA, 23 nt, Human
accauuucuugagguaaaagcau

SEQ ID NO: 1594857 - RNA, 21 nt, Human
ucaggaaaucaaauaugcaaa

SEQ ID NO: 1594858 - RNA, 20 nt, Human
ucaggaaaucaaauaugcaa

SEQ ID NO: 1594859 - RNA, 19 nt, Human
ucaggaaagagaacuucca

SEQ ID NO: 1594860 - RNA, 13 nt, Human
ucaggaaagagaa

SEQ ID NO: 1594861 - RNA, 12 nt, Human
ucagagcugccc

SEQ ID NO: 1594862 - RNA, 13 nt, Human
ucagagcugcccu

SEQ ID NO: 1594863 - RNA, 14 nt, Human
ucaaaaugucuaag

SEQ ID NO: 1594864 - RNA, 21 nt, Human
ucaaaauaccaugccauuuaa

SEQ ID NO: 1594865 - RNA, 23 nt, Human
ucaaaauaccaugccauuuaaag

SEQ ID NO: 1594866 - RNA, 21 nt, Human
ucaaaauaugccccauucaac

SEQ ID NO: 1594867 - RNA, 13 nt, Human
uauuuuugacaga

SEQ ID NO: 1594868 - RNA, 14 nt, Human
uauuuuugacagaa

SEQ ID NO: 1594869 - RNA, 15 nt, Human
uauuuuugacagaau

SEQ ID NO: 1594870 - RNA, 19 nt, Human
uauuuuugacagaauaugu

SEQ ID NO: 1594871 - RNA, 23 nt, Human
uauuuuugacagaauauguuuca

SEQ ID NO: 1594872 - RNA, 18 nt, Human
ucaaaagaaagaaaauca

SEQ ID NO: 1594873 - RNA, 17 nt, Human
ucaaagggugaaaauua

SEQ ID NO: 1594874 - RNA, 14 nt, Human
ucaaagcugaaaug

SEQ ID NO: 1594875 - RNA, 19 nt, Human
acaugauccugcaauucca

SEQ ID NO: 1594876 - RNA, 16 nt, Human
acaugaaguccaagca

SEQ ID NO: 1594877 - RNA, 22 nt, Human
ucaagaugaugaugaucuuuaa

SEQ ID NO: 1594878 - RNA, 23 nt, Human
acauaucuaguaugaaauuauau

SEQ ID NO: 1594879 - RNA, 20 nt, Human
acauaucuaguaugaaauua

SEQ ID NO: 1594880 - RNA, 22 nt, Human
acauaucuaguaugaaauuaua

SEQ ID NO: 1594881 - RNA, 17 nt, Human
acauaucuaguaugaaa

SEQ ID NO: 1594882 - RNA, 18 nt, Human
acauagaauuaacacaug

SEQ ID NO: 1594883 - RNA, 14 nt, Human
acauagaauuaaca

SEQ ID NO: 1594884 - RNA, 19 nt, Human
acauauauaacaaugcugu

SEQ ID NO: 1594885 - RNA, 13 nt, Human
acaucaacagaua

SEQ ID NO: 1594886 - RNA, 16 nt, Human
acauaaaaacaacuuu

SEQ ID NO: 1594887 - RNA, 19 nt, Human
acauaaaaacaacuuuaua

SEQ ID NO: 1594888 - RNA, 21 nt, Human
acauaaaaacaacuuuauacc

SEQ ID NO: 1594889 - RNA, 21 nt, Human
acaguuuucugagaaagacua

SEQ ID NO: 1594890 - RNA, 20 nt, Human
acaguuuucugagaaagacu

SEQ ID NO: 1594891 - RNA, 19 nt, Human
acaguuuucugagaaagac

SEQ ID NO: 1594892 - RNA, 18 nt, Human
acaguuuucugagaaaga

SEQ ID NO: 1594893 - RNA, 17 nt, Human
acaguuuucugagaaag

SEQ ID NO: 1594894 - RNA, 16 nt, Human
acaguuuucugagaaa

SEQ ID NO: 1594895 - RNA, 15 nt, Human
acaguuuucugagaa

SEQ ID NO: 1594896 - RNA, 21 nt, Human
uauuuccauuaaaaaaucagu

SEQ ID NO: 1594897 - RNA, 21 nt, Human
uaugaaauauuauguuaaaac

SEQ ID NO: 1594898 - RNA, 19 nt, Human
accucaaaaugucuaagau

SEQ ID NO: 1594899 - RNA, 21 nt, Human
accuagggugauauuaaccag

SEQ ID NO: 1594900 - RNA, 23 nt, Human
ucaggaaaucaaauaugcaaagc

SEQ ID NO: 1594901 - RNA, 22 nt, Human
ucaggaaaucaaauaugcaaag

SEQ ID NO: 1594902 - RNA, 12 nt, Human
accucccugcaa

SEQ ID NO: 1594903 - RNA, 13 nt, Human
accucccugcaau

SEQ ID NO: 1594904 - RNA, 16 nt, Human
ucaugaauuaguuuua

SEQ ID NO: 1594905 - RNA, 21 nt, Human
ucaugaauuaguuuuauaugc

SEQ ID NO: 1594906 - RNA, 20 nt, Human
acgagcaggcuacugucagc

SEQ ID NO: 1594907 - RNA, 19 nt, Human
acgagcaggcuacugucag

SEQ ID NO: 1594908 - RNA, 14 nt, Human
acgagaaaacaaua

SEQ ID NO: 1594909 - RNA, 19 nt, Human
ucccuuucugcuuguguua

SEQ ID NO: 1594910 - RNA, 21 nt, Human
acuccaaagaaauguaaggga

SEQ ID NO: 1594911 - RNA, 18 nt, Human
acuccaaagaaauguaag

SEQ ID NO: 1594912 - RNA, 15 nt, Human
acuccaaagaaaugu

SEQ ID NO: 1594913 - RNA, 14 nt, Human
acuccaaagaaaug

SEQ ID NO: 1594914 - RNA, 11 nt, Human
ucccugagcag

SEQ ID NO: 1594915 - RNA, 16 nt, Human
ucccugcaauaaaaug

SEQ ID NO: 1594916 - RNA, 15 nt, Human
ucccucccuccaccu

SEQ ID NO: 1594917 - RNA, 16 nt, Human
ucccucccuccaccuc

SEQ ID NO: 1594918 - RNA, 17 nt, Human
ucccucccuccaccucc

SEQ ID NO: 1594919 - RNA, 21 nt, Human
ucccuccaccucccugcaaua

SEQ ID NO: 1594920 - RNA, 23 nt, Human
ucccuccaccucccugcaauaaa

SEQ ID NO: 1594921 - RNA, 13 nt, Human
ucccucccuccac

SEQ ID NO: 1594922 - RNA, 14 nt, Human
ucccucccuccacc

SEQ ID NO: 1594923 - RNA, 17 nt, Human
uccccucggagaagagc

SEQ ID NO: 1594924 - RNA, 16 nt, Human
uccccucggagaagag

SEQ ID NO: 1594925 - RNA, 21 nt, Human
uccauccugaggcuccacuug

SEQ ID NO: 1594926 - RNA, 20 nt, Human
uccauccugaggcuccacuu

SEQ ID NO: 1594927 - RNA, 21 nt, Human
uccaugaagauguagaggaga

SEQ ID NO: 1594928 - RNA, 13 nt, Human
uccaugaagaugu

SEQ ID NO: 1594929 - RNA, 22 nt, Human
ucccagucauuuaauaaaugug

SEQ ID NO: 1594930 - RNA, 14 nt, Human
ucccagucauuuaa

SEQ ID NO: 1594931 - RNA, 17 nt, Human
ucccagccagcaguuca

SEQ ID NO: 1594932 - RNA, 18 nt, Human
ucccagccagcaguucag

SEQ ID NO: 1594933 - RNA, 17 nt, Human
ucuacauaaguaauuca

SEQ ID NO: 1594934 - RNA, 20 nt, Human
ucuacauaaguaauucaaga

SEQ ID NO: 1594935 - RNA, 16 nt, Human
ucuacauacuauggaa

SEQ ID NO: 1594936 - RNA, 23 nt, Human
ucuaaguaaaaccacagcaguug

SEQ ID NO: 1594937 - RNA, 22 nt, Human
ucuaaguaaaaccacagcaguu

SEQ ID NO: 1594938 - RNA, 21 nt, Human
ucuaaguaaaaccacagcagu

SEQ ID NO: 1594939 - RNA, 20 nt, Human
ucuaaagccauuguaguccu

SEQ ID NO: 1594940 - RNA, 22 nt, Human
ucuacauaaguaauucaagaaa

SEQ ID NO: 1594941 - RNA, 22 nt, Human
ucggguuuuauuguuuaaaauc

SEQ ID NO: 1594942 - RNA, 22 nt, Human
acugucagcuccccucggagaa

SEQ ID NO: 1594943 - RNA, 18 nt, Human
acugggacaggggagaac

SEQ ID NO: 1594944 - RNA, 21 nt, Human
acugucagcuccccucggaga

SEQ ID NO: 1594945 - RNA, 18 nt, Human
acuguggguagacacaca

SEQ ID NO: 1594946 - RNA, 14 nt, Human
acugcauuauauuu

SEQ ID NO: 1594947 - RNA, 15 nt, Human
acugcauuauauuua

SEQ ID NO: 1594948 - RNA, 13 nt, Human
acuggcacaguuu

SEQ ID NO: 1594949 - RNA, 20 nt, Human
acuggcacaguuuucugaga

SEQ ID NO: 1594950 - RNA, 19 nt, Human
acuggcacaguuuucugag

SEQ ID NO: 1594951 - RNA, 21 nt, Human
acuggcacaguuuucugagaa

SEQ ID NO: 1594952 - RNA, 20 nt, Human
acugccuucucaacuccaaa

SEQ ID NO: 1594953 - RNA, 19 nt, Human
acugccuucucaacuccaa

SEQ ID NO: 1594954 - RNA, 13 nt, Human
acugccuucucaa

SEQ ID NO: 1594955 - RNA, 14 nt, Human
ucugacuaugacau

SEQ ID NO: 1594956 - RNA, 16 nt, Human
ucugacuaugacauaa

SEQ ID NO: 1594957 - RNA, 17 nt, Human
agaaaucaaagagagaa

SEQ ID NO: 1594958 - RNA, 14 nt, Human
agaaagaaaaucag

SEQ ID NO: 1594959 - RNA, 12 nt, Human
ucugaagaagau

SEQ ID NO: 1594960 - RNA, 14 nt, Human
agaaaugaaagcag

SEQ ID NO: 1594961 - RNA, 13 nt, Human
ucucuggccuucg

SEQ ID NO: 1594962 - RNA, 23 nt, Human
ucucuggccuucggccuccaucc

SEQ ID NO: 1594963 - RNA, 22 nt, Human
ucucuggccuucggccuccauc

SEQ ID NO: 1594964 - RNA, 21 nt, Human
ucucuggccuucggccuccau

SEQ ID NO: 1594965 - RNA, 12 nt, Human
ucucuggccuuc

SEQ ID NO: 1594966 - RNA, 21 nt, Human
acuugaacccgggaggcagag

SEQ ID NO: 1594967 - RNA, 20 nt, Human
acuugaacccgggaggcaga

SEQ ID NO: 1594968 - RNA, 19 nt, Human
acuugaacccgggaggcag

SEQ ID NO: 1594969 - RNA, 21 nt, Human
acuugaacccauauuuguaca

SEQ ID NO: 1594970 - RNA, 16 nt, Human
acuugucaauaaaauc

SEQ ID NO: 1594971 - RNA, 23 nt, Human
acuucuaaguaaaaccacagcag

SEQ ID NO: 1594972 - RNA, 16 nt, Human
acuuguguuuugcaag

SEQ ID NO: 1594973 - RNA, 12 nt, Human
ucucaggaaauc

SEQ ID NO: 1594974 - RNA, 19 nt, Human
agacacaacuauuuuucca

SEQ ID NO: 1594975 - RNA, 20 nt, Human
agacacaacuauuuuuccaa

SEQ ID NO: 1594976 - RNA, 17 nt, Human
agacacacugaagaagc

SEQ ID NO: 1594977 - RNA, 16 nt, Human
agacacacugaagaag

SEQ ID NO: 1594978 - RNA, 14 nt, Human
ucuuaauuaaaaga

SEQ ID NO: 1594979 - RNA, 23 nt, Human
ucuuagaugcaguucugaagaag

SEQ ID NO: 1594980 - RNA, 24 nt, Human
agagacagaaagcagaacagugau

SEQ ID NO: 1594981 - RNA, 15 nt, Human
ucuuauuucauuucu

SEQ ID NO: 1594982 - RNA, 16 nt, Human
ucuuauuucauuucuu

SEQ ID NO: 1594983 - RNA, 14 nt, Human
agacauagaauuaa

SEQ ID NO: 1594984 - RNA, 14 nt, Human
agagcaaaauugau

SEQ ID NO: 1594985 - RNA, 20 nt, Human
agagcaaaauugauguguuu

SEQ ID NO: 1594986 - RNA, 23 nt, Human
ugaaauaagccagacaucaacag

SEQ ID NO: 1594987 - RNA, 20 nt, Human
ugaaauaagccagacaucaa

SEQ ID NO: 1594988 - RNA, 18 nt, Human
ugaaauaagccagacauc

SEQ ID NO: 1594989 - RNA, 17 nt, Human
ugaaauaagccagacau

SEQ ID NO: 1594990 - RNA, 15 nt, Human
agagcugcccucucc

SEQ ID NO: 1594991 - RNA, 13 nt, Human
agagcugcccucu

SEQ ID NO: 1594992 - RNA, 14 nt, Human
agagcugcccucuc

SEQ ID NO: 1594993 - RNA, 18 nt, Human
ugaaauauuauguuaaaa

SEQ ID NO: 1594994 - RNA, 15 nt, Human
ugaaauuguauuaca

SEQ ID NO: 1594995 - RNA, 20 nt, Human
ugaacaaauuuacagagaca

SEQ ID NO: 1594996 - RNA, 19 nt, Human
ugaacaaauuuacagagac

SEQ ID NO: 1594997 - RNA, 21 nt, Human
agagcuguucacagccagacu

SEQ ID NO: 1594998 - RNA, 15 nt, Human
agagguugcagugag

SEQ ID NO: 1594999 - RNA, 18 nt, Human
ugacauaaaaacaacuuu

SEQ ID NO: 1595000 - RNA, 20 nt, Human
ugacauaaaaacaacuuuau

SEQ ID NO: 1595001 - RNA, 17 nt, Human
ugacauaaaaacaacuu

SEQ ID NO: 1595002 - RNA, 17 nt, Human
ugacccacaagaaauga

SEQ ID NO: 1595003 - RNA, 15 nt, Human
agaugcuagaacucc

SEQ ID NO: 1595004 - RNA, 14 nt, Human
agaugcuagaacuc

SEQ ID NO: 1595005 - RNA, 20 nt, Human
agaugcaguucugaagaaga

SEQ ID NO: 1595006 - RNA, 19 nt, Human
agaugcaguucugaagaag

SEQ ID NO: 1595007 - RNA, 18 nt, Human
agaugcaguucugaagaa

SEQ ID NO: 1595008 - RNA, 14 nt, Human
agagugaacaaauu

SEQ ID NO: 1595009 - RNA, 17 nt, Human
agaguuuagcuggaaaa

SEQ ID NO: 1595010 - RNA, 16 nt, Human
agaguuuagcuggaaa

SEQ ID NO: 1595011 - RNA, 15 nt, Human
ugaguucuacauaag

SEQ ID NO: 1595012 - RNA, 20 nt, Human
ugaguucuacauaaguaauu

SEQ ID NO: 1595013 - RNA, 22 nt, Human
ugaguucuacauaaguaauuca

SEQ ID NO: 1595014 - RNA, 16 nt, Human
ugauaaguaaaugcua

SEQ ID NO: 1595015 - RNA, 13 nt, Human
ugauaaguucaua

SEQ ID NO: 1595016 - RNA, 15 nt, Human
ugauaaguucauaca

SEQ ID NO: 1595017 - RNA, 17 nt, Human
ugauaaguucauacauu

SEQ ID NO: 1595018 - RNA, 19 nt, Human
ugauaaguucauacauugu

SEQ ID NO: 1595019 - RNA, 13 nt, Human
agcauaccaacac

SEQ ID NO: 1595020 - RNA, 22 nt, Human
agcauaccaacacgagcaggcu

SEQ ID NO: 1595021 - RNA, 19 nt, Human
agcauaccaacacgagcag

SEQ ID NO: 1595022 - RNA, 19 nt, Human
agcagucaggaaagagaac

SEQ ID NO: 1595023 - RNA, 18 nt, Human
agcagucaggaaagagaa

SEQ ID NO: 1595024 - RNA, 17 nt, Human
agcagucaggaaagaga

SEQ ID NO: 1595025 - RNA, 20 nt, Human
agcaggcuacugucagcucc

SEQ ID NO: 1595026 - RNA, 19 nt, Human
agcaggcuacugucagcuc

SEQ ID NO: 1595027 - RNA, 17 nt, Human
agcaggcuacugucagc

SEQ ID NO: 1595028 - RNA, 16 nt, Human
agcaggcuacugucag

SEQ ID NO: 1595029 - RNA, 14 nt, Human
agcaggcuacuguc

SEQ ID NO: 1595030 - RNA, 19 nt, Human
agcagggcauggcugggaa

SEQ ID NO: 1595031 - RNA, 22 nt, Human
agcauuuagauguauagguuga

SEQ ID NO: 1595032 - RNA, 14 nt, Human
ugaugggaaagcau

SEQ ID NO: 1595033 - RNA, 16 nt, Human
ugauuaaguaaugaua

SEQ ID NO: 1595034 - RNA, 15 nt, Human
ugauuaaguaaugau

SEQ ID NO: 1595035 - RNA, 22 nt, Human
ugcaaagcacugacuucuaagu

SEQ ID NO: 1595036 - RNA, 20 nt, Human
ugcaaagcacugacuucuaa

SEQ ID NO: 1595037 - RNA, 18 nt, Human
ugcaaagcacugacuucu

SEQ ID NO: 1595038 - RNA, 13 nt, Human
ugauuucauucaa

SEQ ID NO: 1595039 - RNA, 21 nt, Human
ugcaagccagauuuuccugaa

SEQ ID NO: 1595040 - RNA, 15 nt, Human
ugcaagccagauuuu

SEQ ID NO: 1595041 - RNA, 17 nt, Human
ugcaauaaaauggguuu

SEQ ID NO: 1595042 - RNA, 21 nt, Human
ugcaauaaaauggguuuuacu

SEQ ID NO: 1595043 - RNA, 18 nt, Human
agccccgugggguuccuc

SEQ ID NO: 1595044 - RNA, 15 nt, Human
ugcacuccagccuga

SEQ ID NO: 1595045 - RNA, 17 nt, Human
ugcacuccagccugagc

SEQ ID NO: 1595046 - RNA, 22 nt, Human
ugcagaagacaguauggcagcu

SEQ ID NO: 1595047 - RNA, 17 nt, Human
ugccaguuauggcuaua

SEQ ID NO: 1595048 - RNA, 13 nt, Human
ugccauaauuacu

SEQ ID NO: 1595049 - RNA, 19 nt, Human
ugcauacucauuaggaugg

SEQ ID NO: 1595050 - RNA, 20 nt, Human
ugcauagauucccugagcag

SEQ ID NO: 1595051 - RNA, 21 nt, Human
uggaacaagaugguucuagca

SEQ ID NO: 1595052 - RNA, 17 nt, Human
ugcuuuuaaaaaaaaau

SEQ ID NO: 1595053 - RNA, 17 nt, Human
aggagaguagaacagau

SEQ ID NO: 1595054 - RNA, 19 nt, Human
aggagaaacuggaacucuc

SEQ ID NO: 1595055 - RNA, 18 nt, Human
aggagaaacuggaacucu

SEQ ID NO: 1595056 - RNA, 20 nt, Human
aggacgcucucuggccuucg

SEQ ID NO: 1595057 - RNA, 19 nt, Human
aggacgcucucuggccuuc

SEQ ID NO: 1595058 - RNA, 17 nt, Human
aggacgcucucuggccu

SEQ ID NO: 1595059 - RNA, 16 nt, Human
aggacgcucucuggcc

SEQ ID NO: 1595060 - RNA, 14 nt, Human
aggacgcucucugg

SEQ ID NO: 1595061 - RNA, 13 nt, Human
aggacgcucucug

SEQ ID NO: 1595062 - RNA, 14 nt, Human
uggaguugaaaauc

SEQ ID NO: 1595063 - RNA, 15 nt, Human
aggcccccaggugcc

SEQ ID NO: 1595064 - RNA, 20 nt, Human
aggcauuuaggccaugggac

SEQ ID NO: 1595065 - RNA, 15 nt, Human
aggcagcuugaaacu

SEQ ID NO: 1595066 - RNA, 21 nt, Human
uggagcucgugggacagucac

SEQ ID NO: 1595067 - RNA, 21 nt, Human
uggagcucguggaacaguuac

SEQ ID NO: 1595068 - RNA, 17 nt, Human
uggagcucguggaacag

SEQ ID NO: 1595069 - RNA, 20 nt, Human
ugcccuguuaaaagaugaaa

SEQ ID NO: 1595070 - RNA, 13 nt, Human
agcugcccucucc

SEQ ID NO: 1595071 - RNA, 14 nt, Human
agcugcccucuccu

SEQ ID NO: 1595072 - RNA, 15 nt, Human
agcugcccucuccug

SEQ ID NO: 1595073 - RNA, 16 nt, Human
agcugcccucuccugg

SEQ ID NO: 1595074 - RNA, 14 nt, Human
agcuguucacagcc

SEQ ID NO: 1595075 - RNA, 20 nt, Human
agcuugcccuggugccucac

SEQ ID NO: 1595076 - RNA, 19 nt, Human
agcuugcccuguuaaaaga

SEQ ID NO: 1595077 - RNA, 18 nt, Human
agcuugcccuguuaaaag

SEQ ID NO: 1595078 - RNA, 16 nt, Human
agcuugcccuguuaaa

SEQ ID NO: 1595079 - RNA, 19 nt, Human
ugccuuuucccaacuccag

SEQ ID NO: 1595080 - RNA, 17 nt, Human
ugccuuuucccaacucc

SEQ ID NO: 1595081 - RNA, 15 nt, Human
ugcuacaaaaacaca

SEQ ID NO: 1595082 - RNA, 14 nt, Human
ugcuacaaaaacac

SEQ ID NO: 1595083 - RNA, 20 nt, Human
aggaaaucaaauaugcaaag

SEQ ID NO: 1595084 - RNA, 22 nt, Human
aggaaaucaaauaugcaaagca

SEQ ID NO: 1595085 - RNA, 21 nt, Human
aggaaaucaaauaugcaaagc

SEQ ID NO: 1595086 - RNA, 23 nt, Human
aggaaaucaaauaugcaaagcac

SEQ ID NO: 1595087 - RNA, 16 nt, Human
uguaaauaguauuuga

SEQ ID NO: 1595088 - RNA, 23 nt, Human
uggugugaccacugcagaagaca

SEQ ID NO: 1595089 - RNA, 20 nt, Human
uguauucuagcuaauguaau

SEQ ID NO: 1595090 - RNA, 22 nt, Human
uguauuacaaauccaaugaaau

SEQ ID NO: 1595091 - RNA, 13 nt, Human
uguauuacaaauc

SEQ ID NO: 1595092 - RNA, 22 nt, Human
uguauucuagcuaauguaauaa

SEQ ID NO: 1595093 - RNA, 18 nt, Human
uguaucacaaaucuuaac

SEQ ID NO: 1595094 - RNA, 15 nt, Human
uguaucacaaaucuu

SEQ ID NO: 1595095 - RNA, 16 nt, Human
uguaguguuggagaag

SEQ ID NO: 1595096 - RNA, 15 nt, Human
uguaguguuggagaa

SEQ ID NO: 1595097 - RNA, 14 nt, Human
uguaguguuggaga

SEQ ID NO: 1595098 - RNA, 16 nt, Human
aguaguaauagagcaa

SEQ ID NO: 1595099 - RNA, 18 nt, Human
aguauuagaauaccacag

SEQ ID NO: 1595100 - RNA, 17 nt, Human
agucaccucauggaauu

SEQ ID NO: 1595101 - RNA, 15 nt, Human
agucaccucauggaa

SEQ ID NO: 1595102 - RNA, 14 nt, Human
agucaccucaugga

SEQ ID NO: 1595103 - RNA, 21 nt, Human
aguauuagaauaccacaggaa

SEQ ID NO: 1595104 - RNA, 18 nt, Human
aguauuucuaugaaauau

SEQ ID NO: 1595105 - RNA, 16 nt, Human
aguauuucuaugaaau

SEQ ID NO: 1595106 - RNA, 17 nt, Human
aguauuucuaugaaaua

SEQ ID NO: 1595107 - RNA, 14 nt, Human
aguaauagagcaaa

SEQ ID NO: 1595108 - RNA, 17 nt, Human
aguaaugauaacuggaa

SEQ ID NO: 1595109 - RNA, 20 nt, Human
aguaaugauaacuggaaacu

SEQ ID NO: 1595110 - RNA, 18 nt, Human
aguaaugauaacuggaaa

SEQ ID NO: 1595111 - RNA, 13 nt, Human
aguaaaauccaca

SEQ ID NO: 1595112 - RNA, 16 nt, Human
uguagaggagaaacug

SEQ ID NO: 1595113 - RNA, 15 nt, Human
aguaauucaagaaaa

SEQ ID NO: 1595114 - RNA, 16 nt, Human
aguacauuuggagaca

SEQ ID NO: 1595115 - RNA, 18 nt, Human
aggggagcaugggaagug

SEQ ID NO: 1595116 - RNA, 16 nt, Human
aggggaauugaggaca

SEQ ID NO: 1595117 - RNA, 22 nt, Human
agggaggacgcucucuggccuu

SEQ ID NO: 1595118 - RNA, 21 nt, Human
agggaggacgcucucuggccu

SEQ ID NO: 1595119 - RNA, 23 nt, Human
agggaggacgcucucuggccuuc

SEQ ID NO: 1595120 - RNA, 17 nt, Human
uuaauuccaauuauaug

SEQ ID NO: 1595121 - RNA, 22 nt, Human
uuaagaagacugcauuauauuu

SEQ ID NO: 1595122 - RNA, 18 nt, Human
uuaaguaaugauaacugg

SEQ ID NO: 1595123 - RNA, 19 nt, Human
auaaaauccauacauuugu

SEQ ID NO: 1595124 - RNA, 18 nt, Human
auaaaauccauacauuug

SEQ ID NO: 1595125 - RNA, 22 nt, Human
auaaaauaauuuuuauauuuga

SEQ ID NO: 1595126 - RNA, 21 nt, Human
auaaaauaauuuuuauauuug

SEQ ID NO: 1595127 - RNA, 16 nt, Human
auaaaauaauuuuuau

SEQ ID NO: 1595128 - RNA, 14 nt, Human
uuaccuuacagaag

SEQ ID NO: 1595129 - RNA, 15 nt, Human
uuacuguaagaaaau

SEQ ID NO: 1595130 - RNA, 14 nt, Human
uguuuauuuauaga

SEQ ID NO: 1595131 - RNA, 24 nt, Human
uguuuauuuauagaguguacuuaa

SEQ ID NO: 1595132 - RNA, 19 nt, Human
uguuuugaaucucauaauu

SEQ ID NO: 1595133 - RNA, 19 nt, Human
uguuuucauuaucucaaaa

SEQ ID NO: 1595134 - RNA, 16 nt, Human
aguucugcagauaaac

SEQ ID NO: 1595135 - RNA, 21 nt, Human
aguucugcagauaaacaguag

SEQ ID NO: 1595136 - RNA, 14 nt, Human
uguuuugcaagcca

SEQ ID NO: 1595137 - RNA, 18 nt, Human
aguuguaccgcaauguga

SEQ ID NO: 1595138 - RNA, 22 nt, Human
aguugcauagguuuaauaauuu

SEQ ID NO: 1595139 - RNA, 19 nt, Human
uguguuaaguauguguaaa

SEQ ID NO: 1595140 - RNA, 15 nt, Human
uguuaaguaugugua

SEQ ID NO: 1595141 - RNA, 16 nt, Human
uguuaaguauguguaa

SEQ ID NO: 1595142 - RNA, 13 nt, Human
uguguaaguagau

SEQ ID NO: 1595143 - RNA, 20 nt, Human
ugugugaaagguacuucaaa

SEQ ID NO: 1595144 - RNA, 14 nt, Human
agugugucuaaauu

SEQ ID NO: 1595145 - RNA, 15 nt, Human
uguuauaaucuuuca

SEQ ID NO: 1595146 - RNA, 18 nt, Human
uguuccuagugaaagagg

SEQ ID NO: 1595147 - RNA, 14 nt, Human
uguuccuagugaaa

SEQ ID NO: 1595148 - RNA, 17 nt, Human
aguguacuuaacuauuc

SEQ ID NO: 1595149 - RNA, 18 nt, Human
agucacuaccuucaugca

SEQ ID NO: 1595150 - RNA, 22 nt, Human
agucucaggaaaucaaauaugc

SEQ ID NO: 1595151 - RNA, 22 nt, Human
ugugagaugcuagaacucccuu

SEQ ID NO: 1595152 - RNA, 19 nt, Human
ugugagaugcuagaacucc

SEQ ID NO: 1595153 - RNA, 15 nt, Human
ugugagaugcuagaa

SEQ ID NO: 1595154 - RNA, 16 nt, Human
ugugauguauucuagc

SEQ ID NO: 1595155 - RNA, 14 nt, Human
ugugauguauucua

SEQ ID NO: 1595156 - RNA, 20 nt, Human
agugaacaaauuuacagaga

SEQ ID NO: 1595157 - RNA, 16 nt, Human
agugaacaaauuuaca

SEQ ID NO: 1595158 - RNA, 15 nt, Human
agugaaagaaaauaa

SEQ ID NO: 1595159 - RNA, 17 nt, Human
agugaaagaaaauaaca

SEQ ID NO: 1595160 - RNA, 17 nt, Human
auauuguguugugaaug

SEQ ID NO: 1595161 - RNA, 18 nt, Human
auauuguguugugaaugu

SEQ ID NO: 1595162 - RNA, 13 nt, Human
auauuugaaauau

SEQ ID NO: 1595163 - RNA, 22 nt, Human
auauuuguaucacaaaucuuaa

SEQ ID NO: 1595164 - RNA, 12 nt, Human
auauuuuaacuu

SEQ ID NO: 1595165 - RNA, 23 nt, Human
auauuugaaauauugacuuuuua

SEQ ID NO: 1595166 - RNA, 19 nt, Human
auauuugaaauauugacuu

SEQ ID NO: 1595167 - RNA, 14 nt, Human
auauuugaaauauu

SEQ ID NO: 1595168 - RNA, 20 nt, Human
aucagugugucuaaauuuga

SEQ ID NO: 1595169 - RNA, 19 nt, Human
aucagugugucuaaauuug

SEQ ID NO: 1595170 - RNA, 18 nt, Human
uucucaacuccaaacuga

SEQ ID NO: 1595171 - RNA, 14 nt, Human
uucucaacuccaaa

SEQ ID NO: 1595172 - RNA, 14 nt, Human
aucccucccuccac

SEQ ID NO: 1595173 - RNA, 23 nt, Human
aucccucccuccaccucccugca

SEQ ID NO: 1595174 - RNA, 11 nt, Human
aucccucccuc

SEQ ID NO: 1595175 - RNA, 13 nt, Human
aucccucccucca

SEQ ID NO: 1595176 - RNA, 13 nt, Human
uucugaagaagau

SEQ ID NO: 1595177 - RNA, 12 nt, Human
uucugaagaaga

SEQ ID NO: 1595178 - RNA, 23 nt, Human
uucugcaucagcugcugaaacaa

SEQ ID NO: 1595179 - RNA, 14 nt, Human
uucugaagaagaug

SEQ ID NO: 1595180 - RNA, 16 nt, Human
uucaaacuuuggaaca

SEQ ID NO: 1595181 - RNA, 15 nt, Human
uucaaacauauauaa

SEQ ID NO: 1595182 - RNA, 22 nt, Human
uucaagaaaacaacuucaauau

SEQ ID NO: 1595183 - RNA, 20 nt, Human
uucacauaucuaguaugaaa

SEQ ID NO: 1595184 - RNA, 21 nt, Human
uucacauaucuaguaugaaau

SEQ ID NO: 1595185 - RNA, 21 nt, Human
auaggaauugacccacaagaa

SEQ ID NO: 1595186 - RNA, 22 nt, Human
auaggaauugacccacaagaaa

SEQ ID NO: 1595187 - RNA, 17 nt, Human
uuauuguuuaaaaucau

SEQ ID NO: 1595188 - RNA, 18 nt, Human
auagcuacuaauuuuaaa

SEQ ID NO: 1595189 - RNA, 14 nt, Human
auagcuacuaauuu

SEQ ID NO: 1595190 - RNA, 17 nt, Human
auagcuacuaauuuuaa

SEQ ID NO: 1595191 - RNA, 17 nt, Human
auauaaguauucuaaau

SEQ ID NO: 1595192 - RNA, 19 nt, Human
auauaagcuuguauuccuu

SEQ ID NO: 1595193 - RNA, 17 nt, Human
auauaacaaugcuguau

SEQ ID NO: 1595194 - RNA, 15 nt, Human
auauaacaaugcugu

SEQ ID NO: 1595195 - RNA, 12 nt, Human
auauaacaaugc

SEQ ID NO: 1595196 - RNA, 19 nt, Human
auauaaguauucuaaauuu

SEQ ID NO: 1595197 - RNA, 19 nt, Human
auauauaacaaugcuguau

SEQ ID NO: 1595198 - RNA, 18 nt, Human
auauauaacaaugcugua

SEQ ID NO: 1595199 - RNA, 17 nt, Human
auauauaacaaugcugu

SEQ ID NO: 1595200 - RNA, 18 nt, Human
auagucaaauugugugaa

SEQ ID NO: 1595201 - RNA, 17 nt, Human
auagucaaauuguguga

SEQ ID NO: 1595202 - RNA, 13 nt, Human
uucagaaaauauu

SEQ ID NO: 1595203 - RNA, 14 nt, Human
uucagaaaauauua

SEQ ID NO: 1595204 - RNA, 20 nt, Human
uucagaaaauauuauguguu

SEQ ID NO: 1595205 - RNA, 21 nt, Human
uucagaaaauauuauguguuu

SEQ ID NO: 1595206 - RNA, 16 nt, Human
auaugcaaagcacuga

SEQ ID NO: 1595207 - RNA, 23 nt, Human
auaugcaaagcacugacuucuaa

SEQ ID NO: 1595208 - RNA, 18 nt, Human
uuggagacacaacuauuu

SEQ ID NO: 1595209 - RNA, 15 nt, Human
uuggagaagaacuga

SEQ ID NO: 1595210 - RNA, 22 nt, Human
uuggagaagaacugaaaucaua

SEQ ID NO: 1595211 - RNA, 17 nt, Human
uuggagaagaacugaaa

SEQ ID NO: 1595212 - RNA, 15 nt, Human
aucuuuaaaauacac

SEQ ID NO: 1595213 - RNA, 12 nt, Human
aucuuuaaaaua

SEQ ID NO: 1595214 - RNA, 16 nt, Human
aucuuauaauuuaaaa

SEQ ID NO: 1595215 - RNA, 15 nt, Human
aucuuauaauuuaaa

SEQ ID NO: 1595216 - RNA, 17 nt, Human
aucugacuaugacauaa

SEQ ID NO: 1595217 - RNA, 14 nt, Human
aucugacuaugaca

SEQ ID NO: 1595218 - RNA, 22 nt, Human
uugcaagccagauuuuccugaa

SEQ ID NO: 1595219 - RNA, 20 nt, Human
aucucaaaacugcacuguca

SEQ ID NO: 1595220 - RNA, 19 nt, Human
aucucaaaacugcacuguc

SEQ ID NO: 1595221 - RNA, 15 nt, Human
aucucaaaacugcac

SEQ ID NO: 1595222 - RNA, 12 nt, Human
uugacuuuuuau

SEQ ID NO: 1595223 - RNA, 13 nt, Human
uugacaugggaca

SEQ ID NO: 1595224 - RNA, 16 nt, Human
uuguagcuuuaucaaa

SEQ ID NO: 1595225 - RNA, 17 nt, Human
uuguagcuuuaucaaag

SEQ ID NO: 1595226 - RNA, 15 nt, Human
augagguacugagag

SEQ ID NO: 1595227 - RNA, 18 nt, Human
augagguacugagaguga

SEQ ID NO: 1595228 - RNA, 17 nt, Human
augagguacugagagug

SEQ ID NO: 1595229 - RNA, 20 nt, Human
uugucaauaaaauccauaca

SEQ ID NO: 1595230 - RNA, 20 nt, Human
uuguucaauaauaaauauuu

SEQ ID NO: 1595231 - RNA, 13 nt, Human
uuguucauacaua

SEQ ID NO: 1595232 - RNA, 22 nt, Human
uuguucaauaauaaauauuuuu

SEQ ID NO: 1595233 - RNA, 16 nt, Human
uuguucauacauauuu

SEQ ID NO: 1595234 - RNA, 18 nt, Human
uuguucauacauauuuuu

SEQ ID NO: 1595235 - RNA, 13 nt, Human
augauuucauuca

SEQ ID NO: 1595236 - RNA, 15 nt, Human
augcaaagcacugac

SEQ ID NO: 1595237 - RNA, 14 nt, Human
augcaaagcacuga

SEQ ID NO: 1595238 - RNA, 13 nt, Human
augcaaagcacug

SEQ ID NO: 1595239 - RNA, 12 nt, Human
augcaaagcacu

SEQ ID NO: 1595240 - RNA, 18 nt, Human
uuuaaaaaaauuccaagu

SEQ ID NO: 1595241 - RNA, 21 nt, Human
uuuaaauauaugcuaagucuu

SEQ ID NO: 1595242 - RNA, 20 nt, Human
uuuaaaaaagaaacauuugg

SEQ ID NO: 1595243 - RNA, 22 nt, Human
uuucacauaucuaguaugaaau

SEQ ID NO: 1595244 - RNA, 19 nt, Human
uuucaaacauauauaacaa

SEQ ID NO: 1595245 - RNA, 21 nt, Human
auggaaugcuguguuaaauaa

SEQ ID NO: 1595246 - RNA, 17 nt, Human
auggaaugcuguguuaa

SEQ ID NO: 1595247 - RNA, 21 nt, Human
augcuucuguuuuauaauuuu

SEQ ID NO: 1595248 - RNA, 22 nt, Human
augcuguauuuuaaaagaauga

SEQ ID NO: 1595249 - RNA, 23 nt, Human
augcuguauuuuaaaagaaugau

SEQ ID NO: 1595250 - RNA, 21 nt, Human
uuuauaugcuucuguuuuaua

SEQ ID NO: 1595251 - RNA, 18 nt, Human
augcuacaggauuugaaa

SEQ ID NO: 1595252 - RNA, 22 nt, Human
augccuuuucccaacuccagaa

SEQ ID NO: 1595253 - RNA, 20 nt, Human
augccuuuucccaacuccag

SEQ ID NO: 1595254 - RNA, 19 nt, Human
auuugaauguuaagcagau

SEQ ID NO: 1595255 - RNA, 13 nt, Human
auuugaauguuaa

SEQ ID NO: 1595256 - RNA, 18 nt, Human
auuugaauguuaagcaga

SEQ ID NO: 1595257 - RNA, 21 nt, Human
auuuauuuuaauaauguuuca

SEQ ID NO: 1595258 - RNA, 20 nt, Human
auuuauuacuguaagaaaau

SEQ ID NO: 1595259 - RNA, 19 nt, Human
auuuauuacuguaagaaaa

SEQ ID NO: 1595260 - RNA, 17 nt, Human
auuuaaaaaaaaaccug

SEQ ID NO: 1595261 - RNA, 16 nt, Human
auuguaguccuguaau

SEQ ID NO: 1595262 - RNA, 22 nt, Human
auuuaccacuuguguuuugcaa

SEQ ID NO: 1595263 - RNA, 15 nt, Human
auuuaccacuugugu

SEQ ID NO: 1595264 - RNA, 12 nt, Human
auugauguguuu

SEQ ID NO: 1595265 - RNA, 19 nt, Human
auugauguguuuauuuaua

SEQ ID NO: 1595266 - RNA, 17 nt, Human
auuggagcucgugggac

SEQ ID NO: 1595267 - RNA, 16 nt, Human
auuggagcucguggaa

SEQ ID NO: 1595268 - RNA, 20 nt, Human
uuuuuguagcacugacagau

SEQ ID NO: 1595269 - RNA, 21 nt, Human
uuuuuguagcacugacagauu

SEQ ID NO: 1595270 - RNA, 19 nt, Human
uuuuuguagcacugacaga

SEQ ID NO: 1595271 - RNA, 12 nt, Human
uuuuugacagaa

SEQ ID NO: 1595272 - RNA, 13 nt, Human
uuuuugacagaau

SEQ ID NO: 1595273 - RNA, 17 nt, Human
uuuuuauauuugaaaua

SEQ ID NO: 1595274 - RNA, 14 nt, Human
uuuugugaagcaaa

SEQ ID NO: 1595275 - RNA, 15 nt, Human
uuuuguuuucauuau

SEQ ID NO: 1595276 - RNA, 16 nt, Human
auuacuguaagaaaau

SEQ ID NO: 1595277 - RNA, 15 nt, Human
auuacuguaagaaaa

SEQ ID NO: 1595278 - RNA, 21 nt, Human
auucaggagaguagaacagau

SEQ ID NO: 1595279 - RNA, 22 nt, Human
auucaggagaguagaacagaua

SEQ ID NO: 1595280 - RNA, 17 nt, Human
auuccaagugauugaaa

SEQ ID NO: 1595281 - RNA, 20 nt, Human
auuauauggcuugaguuuaa

SEQ ID NO: 1595282 - RNA, 22 nt, Human
auucaaacagucucaggaaauc

SEQ ID NO: 1595283 - RNA, 18 nt, Human
uuugacagaauauguuuc

SEQ ID NO: 1595284 - RNA, 19 nt, Human
uuugacagaauauguuuca

SEQ ID NO: 1595285 - RNA, 20 nt, Human
uuugacagaauauguuucaa

SEQ ID NO: 1595286 - RNA, 21 nt, Human
uuugacagaauauguuucaaa

SEQ ID NO: 1595287 - RNA, 14 nt, Human
uuugagaguucuaa

SEQ ID NO: 1595288 - RNA, 13 nt, Human
uuugagaguucua

SEQ ID NO: 1595289 - RNA, 20 nt, Human
uuugcuggagcucugcccau

SEQ ID NO: 1595290 - RNA, 19 nt, Human
uuugcuaagcauuccaacu

SEQ ID NO: 1595291 - RNA, 19 nt, Human
auguauauuuuauaucaau

SEQ ID NO: 1595292 - RNA, 23 nt, Human
augucgucaaagcugaaauggac

SEQ ID NO: 1595293 - RNA, 17 nt, Human
uuuguaguguuggagaa

SEQ ID NO: 1595294 - RNA, 12 nt, Human
auguguuuccau

SEQ ID NO: 1595295 - RNA, 21 nt, Human
augugcuaguaauuggaaagg

SEQ ID NO: 1595296 - RNA, 12 nt, Human
auguuaagcaga

SEQ ID NO: 1595297 - RNA, 13 nt, Human
auguuaagcagau

SEQ ID NO: 1595298 - RNA, 20 nt, Human
uuuucaggcuagauguaugu

SEQ ID NO: 1595299 - RNA, 16 nt, Human
uuuucuauaauuuaaa

SEQ ID NO: 1595300 - RNA, 18 nt, Human
cuucaucugacuaugaca

SEQ ID NO: 1595301 - RNA, 23 nt, Human
cuucaugcugucuacacuaagag

SEQ ID NO: 1595302 - RNA, 12 nt, Human
cuucaucugacu

SEQ ID NO: 1595303 - RNA, 11 nt, Human
cuucagacaua

SEQ ID NO: 1595304 - RNA, 21 nt, Human
cuuugagugucuuaauuaaaa

SEQ ID NO: 1595305 - RNA, 20 nt, Human
cuucuguuuuauaauuuugu

SEQ ID NO: 1595306 - RNA, 15 nt, Human
cuucuguuuuauaau

SEQ ID NO: 1595307 - RNA, 13 nt, Human
cugggcagcugcc

SEQ ID NO: 1595308 - RNA, 16 nt, Human
cugggcagcugccucc

SEQ ID NO: 1595309 - RNA, 14 nt, Human
cugggcagcugccu

SEQ ID NO: 1595310 - RNA, 15 nt, Human
cugggcagcugccuc

SEQ ID NO: 1595311 - RNA, 21 nt, Human
cuggugccucaccccuugcca

SEQ ID NO: 1595312 - RNA, 16 nt, Human
cugcacuccagccuga

SEQ ID NO: 1595313 - RNA, 20 nt, Human
cugcacuccagccugagcga

SEQ ID NO: 1595314 - RNA, 17 nt, Human
cugcacuccagccugag

SEQ ID NO: 1595315 - RNA, 14 nt, Human
gaugguucuagcau

SEQ ID NO: 1595316 - RNA, 18 nt, Human
gauguagaggagaaacug

SEQ ID NO: 1595317 - RNA, 16 nt, Human
gaugaucuuuaaaaua

SEQ ID NO: 1595318 - RNA, 15 nt, Human
gauuuaccacuugug

SEQ ID NO: 1595319 - RNA, 16 nt, Human
gauuuaccacuugugu

SEQ ID NO: 1595320 - RNA, 20 nt, Human
gcaaguauuagaauaccaca

SEQ ID NO: 1595321 - RNA, 22 nt, Human
gcaauagucaaauugugugaaa

SEQ ID NO: 1595322 - RNA, 22 nt, Human
gcacaguuuucugagaaagacu

SEQ ID NO: 1595323 - RNA, 23 nt, Human
gcacaguuuucugagaaagacua

SEQ ID NO: 1595324 - RNA, 16 nt, Human
gaguuuaaauuguaau

SEQ ID NO: 1595325 - RNA, 15 nt, Human
gaggacgcucucugg

SEQ ID NO: 1595326 - RNA, 20 nt, Human
gaggacgcucucuggccuuc

SEQ ID NO: 1595327 - RNA, 23 nt, Human
gaggcuccacuuggucugugaga

SEQ ID NO: 1595328 - RNA, 12 nt, Human
gaggcuccacuu

SEQ ID NO: 1595329 - RNA, 19 nt, Human
gaggcuccacuuggucugu

SEQ ID NO: 1595330 - RNA, 14 nt, Human
gaauauguuucaaa

SEQ ID NO: 1595331 - RNA, 15 nt, Human
gaauauguuucaaac

SEQ ID NO: 1595332 - RNA, 20 nt, Human
gaauauguuucaaacuuugg

SEQ ID NO: 1595333 - RNA, 14 nt, Human
gaagcaaaauuuuu

SEQ ID NO: 1595334 - RNA, 23 nt, Human
gaagcaacccaaauguucaucaa

SEQ ID NO: 1595335 - RNA, 14 nt, Human
gaacugaaaucaua

SEQ ID NO: 1595336 - RNA, 17 nt, Human
gacauuugcucauggaa

SEQ ID NO: 1595337 - RNA, 16 nt, Human
gacauuugcucaugga

SEQ ID NO: 1595338 - RNA, 21 nt, Human
gacagugagacucugucucag

SEQ ID NO: 1595339 - RNA, 16 nt, Human
gacacacugaagaagc

SEQ ID NO: 1595340 - RNA, 15 nt, Human
gacacacugaagaag

SEQ ID NO: 1595341 - RNA, 21 nt, Human
gacagaaagcagaacagugau

SEQ ID NO: 1595342 - RNA, 21 nt, Human
gacucuuaagaagacugcauu

SEQ ID NO: 1595343 - RNA, 15 nt, Human
gacucuuaagaagac

SEQ ID NO: 1595344 - RNA, 14 nt, Human
gacucuuaagaaga

SEQ ID NO: 1595345 - RNA, 17 nt, Human
gacgcucucuggccuuc

SEQ ID NO: 1595346 - RNA, 16 nt, Human
gacgcucucuggccuu

SEQ ID NO: 1595347 - RNA, 15 nt, Human
gacgcucucuggccu

SEQ ID NO: 1595348 - RNA, 19 nt, Human
aaacaacuucaauauccaa

SEQ ID NO: 1595349 - RNA, 17 nt, Human
aaacaaggaugaauuaa

SEQ ID NO: 1595350 - RNA, 19 nt, Human
aaaauuuuuucucuaggaa

SEQ ID NO: 1595351 - RNA, 21 nt, Human
aaaauauuauguguuuccaua

SEQ ID NO: 1595352 - RNA, 14 nt, Human
aaaauauuaugugu

SEQ ID NO: 1595353 - RNA, 15 nt, Human
aaaauauuauguguu

SEQ ID NO: 1595354 - RNA, 21 nt, Human
aaacauauauaacaaugcugu

SEQ ID NO: 1595355 - RNA, 19 nt, Human
aaacauauauaacaaugcu

SEQ ID NO: 1595356 - RNA, 16 nt, Human
aaacauauauaacaau

SEQ ID NO: 1595357 - RNA, 13 nt, Human
aaacauauauaac

SEQ ID NO: 1595358 - RNA, 14 nt, Human
aaacacaacuauau

SEQ ID NO: 1595359 - RNA, 16 nt, Human
aaaccacagcaguuga

SEQ ID NO: 1595360 - RNA, 15 nt, Human
aaagauuuucagaaa

SEQ ID NO: 1595361 - RNA, 20 nt, Human
aaagaggcagcuugaaacug

SEQ ID NO: 1595362 - RNA, 23 nt, Human
aaagacuauucaaacagucucag

SEQ ID NO: 1595363 - RNA, 13 nt, Human
aaagacuccaaag

SEQ ID NO: 1595364 - RNA, 14 nt, Human
aaagacuccaaaga

SEQ ID NO: 1595365 - RNA, 22 nt, Human
aaagacuauucaaacagucuca

SEQ ID NO: 1595366 - RNA, 18 nt, Human
aaagagaacuuccagauc

SEQ ID NO: 1595367 - RNA, 21 nt, Human
ggucauauuaauauauuucca

SEQ ID NO: 1595368 - RNA, 16 nt, Human
aaagaaugauuaugaa

SEQ ID NO: 1595369 - RNA, 21 nt, Human
aaagauuuucagaaaauauua

SEQ ID NO: 1595370 - RNA, 24 nt, Human
ggucugugagaugcuagaacuccc

SEQ ID NO: 1595371 - RNA, 14 nt, Human
ggucugugagaugc

SEQ ID NO: 1595372 - RNA, 13 nt, Human
aaaggaauuuaaa

SEQ ID NO: 1595373 - RNA, 14 nt, Human
aaaauauauuuaau

SEQ ID NO: 1595374 - RNA, 23 nt, Human
aaaauaauuuuuauauuugaaau

SEQ ID NO: 1595375 - RNA, 21 nt, Human
aaaauaauuuuuauauuugaa

SEQ ID NO: 1595376 - RNA, 20 nt, Human
gggcagcugccuccccuccu

SEQ ID NO: 1595377 - RNA, 23 nt, Human
gggcagcugccuccccuccucug

SEQ ID NO: 1595378 - RNA, 13 nt, Human
gggcagcugccuc

SEQ ID NO: 1595379 - RNA, 14 nt, Human
gggcagcugccucc

SEQ ID NO: 1595380 - RNA, 19 nt, Human
gggcagcugccuccccucc

SEQ ID NO: 1595381 - RNA, 19 nt, Human
aaaagccugcaauuucaua

SEQ ID NO: 1595382 - RNA, 21 nt, Human
aaaacuuuaugcuaagugaaa

SEQ ID NO: 1595383 - RNA, 22 nt, Human
aaaagcuccauuuuuagugaaa

SEQ ID NO: 1595384 - RNA, 20 nt, Human
gggaggcagagguugcagug

SEQ ID NO: 1595385 - RNA, 23 nt, Human
ggaugguucccuugaugaagaag

SEQ ID NO: 1595386 - RNA, 22 nt, Human
ggaugguucccuugaugaagaa

SEQ ID NO: 1595387 - RNA, 19 nt, Human
ggaggcugagaugggagaa

SEQ ID NO: 1595388 - RNA, 15 nt, Human
ggaggcugagauggg

SEQ ID NO: 1595389 - RNA, 21 nt, Human
gccacuguuuugaaucucaua

SEQ ID NO: 1595390 - RNA, 22 nt, Human
gccagcaguucagagcugcccu

SEQ ID NO: 1595391 - RNA, 23 nt, Human
gccagcaguucagagcugcccuc

SEQ ID NO: 1595392 - RNA, 22 nt, Human
gccagacaucaacagauaaaua

SEQ ID NO: 1595393 - RNA, 16 nt, Human
gcccccaggugccagu

SEQ ID NO: 1595394 - RNA, 13 nt, Human
gcccuguuaaaag

SEQ ID NO: 1595395 - RNA, 17 nt, Human
gcccuguuaaaagauga

SEQ ID NO: 1595396 - RNA, 14 nt, Human
gcccuguuaaaaga

SEQ ID NO: 1595397 - RNA, 22 nt, Human
gcuuccuucugugaaaguacau

SEQ ID NO: 1595398 - RNA, 17 nt, Human
gcuggagcucugcccau

SEQ ID NO: 1595399 - RNA, 16 nt, Human
gcugccuccccuccuc

SEQ ID NO: 1595400 - RNA, 17 nt, Human
gcugccuccccuccucu

SEQ ID NO: 1595401 - RNA, 20 nt, Human
gcugccuccccuccucugcu

SEQ ID NO: 1595402 - RNA, 21 nt, Human
gcugccuccccuccucugcuu

SEQ ID NO: 1595403 - RNA, 22 nt, Human
gcugccuccccuccucugcuug

SEQ ID NO: 1595404 - RNA, 15 nt, Human
gcuccccucggagaa

SEQ ID NO: 1595405 - RNA, 18 nt, Human
gcuccccucggagaagag

SEQ ID NO: 1595406 - RNA, 16 nt, Human
gcuaguaucaaaagaa

SEQ ID NO: 1595407 - RNA, 21 nt, Human
gcuaguaauuggaaaggcagc

SEQ ID NO: 1595408 - RNA, 15 nt, Human
caacuauuuuuccaa

SEQ ID NO: 1595409 - RNA, 12 nt, Human
caacuccagaaa

SEQ ID NO: 1595410 - RNA, 20 nt, Human
caacuauuuuuccaaaauaa

SEQ ID NO: 1595411 - RNA, 19 nt, Human
caacuaucucauuuccaag

SEQ ID NO: 1595412 - RNA, 19 nt, Human
caacuauauuguuugcuaa

SEQ ID NO: 1595413 - RNA, 14 nt, Human
caagcaaguauuag

SEQ ID NO: 1595414 - RNA, 17 nt, Human
caaucagccuaguugau

SEQ ID NO: 1595415 - RNA, 23 nt, Human
cacaucagcuugcccuguuaaaa

SEQ ID NO: 1595416 - RNA, 21 nt, Human
cacuccagugagacagcucug

SEQ ID NO: 1595417 - RNA, 23 nt, Human
cacugaagaagcaccaaucauga

SEQ ID NO: 1595418 - RNA, 12 nt, Human
auugauaaguuc

SEQ ID NO: 1595419 - RNA, 15 nt, Human
auugauaaguucaua

SEQ ID NO: 1595420 - RNA, 16 nt, Human
auugauaaguucauac

SEQ ID NO: 1595421 - RNA, 17 nt, Human
auugauaaguucauaca

SEQ ID NO: 1595422 - RNA, 18 nt, Human
auugauaaguucauacau

SEQ ID NO: 1595423 - RNA, 19 nt, Human
auugauaaguucauacauu

SEQ ID NO: 1595424 - RNA, 21 nt, Human
auugauaaguucauacauugu

SEQ ID NO: 1595425 - RNA, 17 nt, Human
auuuucuauaauuuaaa

SEQ ID NO: 1595426 - RNA, 18 nt, Human
auuuucuauaauuuaaau

SEQ ID NO: 1595427 - RNA, 19 nt, Human
auuuucuauaauuuaaaua

SEQ ID NO: 1595428 - RNA, 21 nt, Human
caaaagguauuuuaaucacca

SEQ ID NO: 1595429 - RNA, 19 nt, Human
auuuuuauauuugaaauau

SEQ ID NO: 1595430 - RNA, 22 nt, Human
auugaggacacugauauggguc

SEQ ID NO: 1595431 - RNA, 19 nt, Human
cauagcagcuuauucacaa

SEQ ID NO: 1595432 - RNA, 20 nt, Human
cauagcagcuuauucacaag

SEQ ID NO: 1595433 - RNA, 16 nt, Human
cauagguuuaauaauu

SEQ ID NO: 1595434 - RNA, 23 nt, Human
caguuguucaauaauaaauauuu

SEQ ID NO: 1595435 - RNA, 13 nt, Human
caucagcugcuga

SEQ ID NO: 1595436 - RNA, 19 nt, Human
cauccugaggcuccacuug

SEQ ID NO: 1595437 - RNA, 18 nt, Human
cauccugaggcuccacuu

SEQ ID NO: 1595438 - RNA, 22 nt, Human
cagugauuaccagggacugagg

SEQ ID NO: 1595439 - RNA, 20 nt, Human
caguuauggcuauaggugcu

SEQ ID NO: 1595440 - RNA, 19 nt, Human
caguuauggcuauaggugc

SEQ ID NO: 1595441 - RNA, 13 nt, Human
caguuauggcuau

SEQ ID NO: 1595442 - RNA, 17 nt, Human
caguuauuauauuuaca

SEQ ID NO: 1595443 - RNA, 21 nt, Human
caguuauuauauuuacaaaug

SEQ ID NO: 1595444 - RNA, 22 nt, Human
caguuauuauauuuacaaaugg

SEQ ID NO: 1595445 - RNA, 15 nt, Human
caguucagagcugcc

SEQ ID NO: 1595446 - RNA, 16 nt, Human
caguucagagcugccc

SEQ ID NO: 1595447 - RNA, 17 nt, Human
caguucagagcugcccu

SEQ ID NO: 1595448 - RNA, 23 nt, Human
caguucagagcugcccucuccug

SEQ ID NO: 1595449 - RNA, 24 nt, Human
caguucagagcugcccucuccugg

SEQ ID NO: 1595450 - RNA, 18 nt, Human
caguucagagcugcccuc

SEQ ID NO: 1595451 - RNA, 19 nt, Human
caguucagagcugcccucu

SEQ ID NO: 1595452 - RNA, 21 nt, Human
caguucagagcugcccucucc

SEQ ID NO: 1595453 - RNA, 22 nt, Human
caguucagagcugcccucuccu

SEQ ID NO: 1595454 - RNA, 19 nt, Human
ccaauucgaacuuuuucca

SEQ ID NO: 1595455 - RNA, 21 nt, Human
ccaacuccagaaagugacaag

SEQ ID NO: 1595456 - RNA, 16 nt, Human
cauuuguauaaaauaa

SEQ ID NO: 1595457 - RNA, 14 nt, Human
cauuuguauaaaau

SEQ ID NO: 1595458 - RNA, 17 nt, Human
cauuuguauaaaauaau

SEQ ID NO: 1595459 - RNA, 14 nt, Human
ccaaaaggcagaag

SEQ ID NO: 1595460 - RNA, 11 nt, Human
caggcuacugu

SEQ ID NO: 1595461 - RNA, 10 nt, Human
cagcugccuc

SEQ ID NO: 1595462 - RNA, 11 nt, Human
cagcugccucc

SEQ ID NO: 1595463 - RNA, 9 nt, Human
cagcugccu

SEQ ID NO: 1595464 - RNA, 14 nt, Human
cagcugccuccccu

SEQ ID NO: 1595465 - RNA, 15 nt, Human
cagcugccuccccuc

SEQ ID NO: 1595466 - RNA, 16 nt, Human
cagcugccuccccucc

SEQ ID NO: 1595467 - RNA, 17 nt, Human
cagcugccuccccuccu

SEQ ID NO: 1595468 - RNA, 18 nt, Human
cagcugccuccccuccuc

SEQ ID NO: 1595469 - RNA, 19 nt, Human
cagcugccuccccuccucu

SEQ ID NO: 1595470 - RNA, 20 nt, Human
cagcugccuccccuccucug

SEQ ID NO: 1595471 - RNA, 20 nt, Human
caggaaagagaacuuccaga

SEQ ID NO: 1595472 - RNA, 16 nt, Human
caggaaagagaacuuc

SEQ ID NO: 1595473 - RNA, 20 nt, Human
cagcuuauugucuagugaaa

SEQ ID NO: 1595474 - RNA, 14 nt, Human
cagcuuauugucua

SEQ ID NO: 1595475 - RNA, 20 nt, Human
cagcuguaugauucccagcc

SEQ ID NO: 1595476 - RNA, 18 nt, Human
cagacuggcacaguuuuc

SEQ ID NO: 1595477 - RNA, 17 nt, Human
cagacuggcacaguuuu

SEQ ID NO: 1595478 - RNA, 23 nt, Human
cagacuggcacaguuuucugaga

SEQ ID NO: 1595479 - RNA, 22 nt, Human
cagacuggcacaguuuucugag

SEQ ID NO: 1595480 - RNA, 23 nt, Human
cagagcugcccucuccugggcag

SEQ ID NO: 1595481 - RNA, 18 nt, Human
cagagcugcccucuccug

SEQ ID NO: 1595482 - RNA, 19 nt, Human
cagagcugcccucuccugg

SEQ ID NO: 1595483 - RNA, 20 nt, Human
cagagcugcccucuccuggg

SEQ ID NO: 1595484 - RNA, 21 nt, Human
cagagcugcccucuccugggc

SEQ ID NO: 1595485 - RNA, 18 nt, Human
cagccagacuggcacagu

SEQ ID NO: 1595486 - RNA, 15 nt, Human
cagccagacuggcac

SEQ ID NO: 1595487 - RNA, 20 nt, Human
cagccagacuggcacaguuu

SEQ ID NO: 1595488 - RNA, 23 nt, Human
cagccagcaguucagagcugccc

SEQ ID NO: 1595489 - RNA, 14 nt, Human
cagccagacuggca

SEQ ID NO: 1595490 - RNA, 16 nt, Human
cucucuggccuucggc

SEQ ID NO: 1595491 - RNA, 14 nt, Human
cucucuggccuucg

SEQ ID NO: 1595492 - RNA, 19 nt, Human
cucuauguucuaagaagug

SEQ ID NO: 1595493 - RNA, 16 nt, Human
cucuccccaugauguu

SEQ ID NO: 1595494 - RNA, 20 nt, Human
cucccuccaccucccugcaa

SEQ ID NO: 1595495 - RNA, 21 nt, Human
cucccuccaccucccugcaau

SEQ ID NO: 1595496 - RNA, 22 nt, Human
cucccuccaccucccugcaaua

SEQ ID NO: 1595497 - RNA, 19 nt, Human
cucccuccaccucccugca

SEQ ID NO: 1595498 - RNA, 18 nt, Human
cuauguucuaagaaguga

SEQ ID NO: 1595499 - RNA, 18 nt, Human
cuaucucauuuccaagca

SEQ ID NO: 1595500 - RNA, 16 nt, Human
cucaguccaugaagau

SEQ ID NO: 1595501 - RNA, 12 nt, Human
ccuuuucccaac

SEQ ID NO: 1595502 - RNA, 20 nt, Human
cuacaaaaacacagcaaggg

SEQ ID NO: 1595503 - RNA, 17 nt, Human
ccuucucuucacaguca

SEQ ID NO: 1595504 - RNA, 19 nt, Human
ccacuuggucugugagaug

SEQ ID NO: 1595505 - RNA, 17 nt, Human
ccacuuggucugugaga

SEQ ID NO: 1595506 - RNA, 16 nt, Human
ccacuuggucugugag

SEQ ID NO: 1595507 - RNA, 15 nt, Human
ccacuuggucuguga

SEQ ID NO: 1595508 - RNA, 22 nt, Human
ccacuuggucugugagaugcua

SEQ ID NO: 1595509 - RNA, 20 nt, Human
ccacuuggucugugagaugc

SEQ ID NO: 1595510 - RNA, 12 nt, Human
ccacuuggucug

SEQ ID NO: 1595511 - RNA, 15 nt, Human
ccaggggccaugaau

SEQ ID NO: 1595512 - RNA, 15 nt, Human
ccccauuguggucac

SEQ ID NO: 1595513 - RNA, 18 nt, Human
ccaugggcacugugggua

SEQ ID NO: 1595514 - RNA, 13 nt, Human
ccauuuaaagcuu

SEQ ID NO: 1595515 - RNA, 22 nt, Human
ccauuguggucacaggaaguag

SEQ ID NO: 1595516 - RNA, 21 nt, Human
ccucuccugggcagcugccuc

SEQ ID NO: 1595517 - RNA, 22 nt, Human
ccucuccugggcagcugccucc

SEQ ID NO: 1595518 - RNA, 15 nt, Human
ccucuccugggcagc

SEQ ID NO: 1595519 - RNA, 16 nt, Human
ccucuccugggcagcu

SEQ ID NO: 1595520 - RNA, 17 nt, Human
ccucuccugggcagcug

SEQ ID NO: 1595521 - RNA, 18 nt, Human
ccucuccugggcagcugc

SEQ ID NO: 1595522 - RNA, 19 nt, Human
ccucuccugggcagcugcc

SEQ ID NO: 1595523 - RNA, 20 nt, Human
ccucuccugggcagcugccu

SEQ ID NO: 1595524 - RNA, 14 nt, Human
cccugagcaggauu

SEQ ID NO: 1595525 - RNA, 13 nt, Human
cccucggagaaga

SEQ ID NO: 1595526 - RNA, 20 nt, Human
ccuaacgaaguauccuucag

SEQ ID NO: 1595527 - RNA, 22 nt, Human
cacaguuuucugagaaagacua

SEQ ID NO: 1595528 - RNA, 21 nt, Human
cacaguuuucugagaaagacu

SEQ ID NO: 1595529 - RNA, 20 nt, Human
cacaugaaguccaagcauuu

SEQ ID NO: 1595530 - RNA, 17 nt, Human
cacaugaaguccaagca

SEQ ID NO: 1595531 - RNA, 16 nt, Human
cacaugaaguccaagc

SEQ ID NO: 1595532 - RNA, 23 nt, Human
cacaagacccaaaaggcagaagc

SEQ ID NO: 1595533 - RNA, 23 nt, Human
cacaagaaaugaaagcagggacu

SEQ ID NO: 1595534 - RNA, 15 nt, Human
cacaagaaaugaaag

SEQ ID NO: 1595535 - RNA, 13 nt, Human
cacaagaaaugaa

SEQ ID NO: 1595536 - RNA, 14 nt, Human
caaagaaauguaag

SEQ ID NO: 1595537 - RNA, 19 nt, Human
auuuuaauaauguuucaaa

SEQ ID NO: 1595538 - RNA, 18 nt, Human
auuuuaauaauguuucaa

SEQ ID NO: 1595539 - RNA, 23 nt, Human
caaauuuacagagacagaaagca

SEQ ID NO: 1595540 - RNA, 17 nt, Human
caaauuuacagagacag

SEQ ID NO: 1595541 - RNA, 16 nt, Human
caagcauaccaacacg

SEQ ID NO: 1595542 - RNA, 21 nt, Human
caagcauaccaacacgagcag

SEQ ID NO: 1595543 - RNA, 19 nt, Human
caagcauuuagauguauag

SEQ ID NO: 1595544 - RNA, 16 nt, Human
caagcauuuagaugua

SEQ ID NO: 1595545 - RNA, 13 nt, Human
caagaaaugaaag

SEQ ID NO: 1595546 - RNA, 15 nt, Human
caagaaaugaaagca

SEQ ID NO: 1595547 - RNA, 16 nt, Human
ccaaaggcucucuccu

SEQ ID NO: 1595548 - RNA, 22 nt, Human
ccaaacugacucuuaagaagac

SEQ ID NO: 1595549 - RNA, 22 nt, Human
ccaagcauaccaacacgagcag

SEQ ID NO: 1595550 - RNA, 17 nt, Human
ccaagcauuuagaugua

SEQ ID NO: 1595551 - RNA, 14 nt, Human
ccaagcaaguauua

SEQ ID NO: 1595552 - RNA, 13 nt, Human
cauuugcucaugg

SEQ ID NO: 1595553 - RNA, 17 nt, Human
cauuuaggccaugggac

SEQ ID NO: 1595554 - RNA, 20 nt, Human
ccacaggaaccacaagacug

SEQ ID NO: 1595555 - RNA, 16 nt, Human
ccaauauucauagcag

SEQ ID NO: 1595556 - RNA, 18 nt, Human
ccacugcagaagacagua

SEQ ID NO: 1595557 - RNA, 13 nt, Human
ccacugcagaaga

SEQ ID NO: 1595558 - RNA, 16 nt, Human
ccagugaauucuugaa

SEQ ID NO: 1595559 - RNA, 20 nt, Human
ccagugaauucuugaaggaa

SEQ ID NO: 1595560 - RNA, 17 nt, Human
ccaggugccaguuaugg

SEQ ID NO: 1595561 - RNA, 14 nt, Human
ccaugaagauguag

SEQ ID NO: 1595562 - RNA, 16 nt, Human
ccaugauguuuagaaa

SEQ ID NO: 1595563 - RNA, 18 nt, Human
ccaucaaggguacacugc

SEQ ID NO: 1595564 - RNA, 13 nt, Human
cccaaaaggcaga

SEQ ID NO: 1595565 - RNA, 18 nt, Human
cccaaaaggcagaagcaa

SEQ ID NO: 1595566 - RNA, 13 nt, Human
cccaggugccagu

SEQ ID NO: 1595567 - RNA, 17 nt, Human
cggccuccauccugagg

SEQ ID NO: 1595568 - RNA, 16 nt, Human
cggccuccauccugag

SEQ ID NO: 1595569 - RNA, 11 nt, Human
cgcaaugugac

SEQ ID NO: 1595570 - RNA, 20 nt, Human
ccuugaaaacuuuaugcuaa

SEQ ID NO: 1595571 - RNA, 14 nt, Human
ccuugaugaagaag

SEQ ID NO: 1595572 - RNA, 20 nt, Human
ccugggcagcugccuccccu

SEQ ID NO: 1595573 - RNA, 22 nt, Human
ccugggcagcugccuccccucc

SEQ ID NO: 1595574 - RNA, 15 nt, Human
ccugggcagcugccu

SEQ ID NO: 1595575 - RNA, 16 nt, Human
ccugggcagcugccuc

SEQ ID NO: 1595576 - RNA, 17 nt, Human
ccugggcagcugccucc

SEQ ID NO: 1595577 - RNA, 18 nt, Human
ccugggcagcugccuccc

SEQ ID NO: 1595578 - RNA, 23 nt, Human
ccugaaagaggaaugaaguacuc

SEQ ID NO: 1595579 - RNA, 18 nt, Human
ccugaaagaggaaugaag

SEQ ID NO: 1595580 - RNA, 23 nt, Human
ccucuuagaugcaguucugaaga

SEQ ID NO: 1595581 - RNA, 20 nt, Human
ccugaggcuccacuuggucu

SEQ ID NO: 1595582 - RNA, 18 nt, Human
ccugaggcuccacuuggu

SEQ ID NO: 1595583 - RNA, 15 nt, Human
ccuccccuccucugc

SEQ ID NO: 1595584 - RNA, 20 nt, Human
ccucagaaaacaaggaugaa

SEQ ID NO: 1595585 - RNA, 12 nt, Human
ccucccugcaau

SEQ ID NO: 1595586 - RNA, 16 nt, Human
ccucccugcaauaaaa

SEQ ID NO: 1595587 - RNA, 17 nt, Human
ccuccccuccucugcuu

SEQ ID NO: 1595588 - RNA, 18 nt, Human
ccuccccuccucugcuug

SEQ ID NO: 1595589 - RNA, 11 nt, Human
ccuccucugcu

SEQ ID NO: 1595590 - RNA, 13 nt, Human
ccuccucugcuug

SEQ ID NO: 1595591 - RNA, 14 nt, Human
ccucuccugggcag

SEQ ID NO: 1595592 - RNA, 11 nt, Human
ccucuccuggg

SEQ ID NO: 1595593 - RNA, 12 nt, Human
ccucuccugggc

SEQ ID NO: 1595594 - RNA, 13 nt, Human
ccucuccugggca

SEQ ID NO: 1595595 - RNA, 20 nt, Human
ccucugcuugccaucccucc

SEQ ID NO: 1595596 - RNA, 21 nt, Human
ccucugcuugccaucccuccc

SEQ ID NO: 1595597 - RNA, 16 nt, Human
cccuugaugaagaagu

SEQ ID NO: 1595598 - RNA, 18 nt, Human
cugcaauuucauaugcug

SEQ ID NO: 1595599 - RNA, 20 nt, Human
cugcaauuucauaugcugua

SEQ ID NO: 1595600 - RNA, 13 nt, Human
cugcagaagacag

SEQ ID NO: 1595601 - RNA, 23 nt, Human
cugcagaagacaguauggcagcu

SEQ ID NO: 1595602 - RNA, 21 nt, Human
cugauguuccuagugaaagag

SEQ ID NO: 1595603 - RNA, 20 nt, Human
cugauguuccuagugaaaga

SEQ ID NO: 1595604 - RNA, 18 nt, Human
cugauguuccuagugaaa

SEQ ID NO: 1595605 - RNA, 13 nt, Human
cugauguuccuag

SEQ ID NO: 1595606 - RNA, 15 nt, Human
cugccuaagugcagc

SEQ ID NO: 1595607 - RNA, 21 nt, Human
cuggucccagccagcaguuca

SEQ ID NO: 1595608 - RNA, 22 nt, Human
cugggaacccaaguccaagcau

SEQ ID NO: 1595609 - RNA, 13 nt, Human
cugcugaaacaac

SEQ ID NO: 1595610 - RNA, 18 nt, Human
cugcugaaacaacaaaua

SEQ ID NO: 1595611 - RNA, 23 nt, Human
cuggaauaauccuaaacauauga

SEQ ID NO: 1595612 - RNA, 12 nt, Human
cuggagcucugc

SEQ ID NO: 1595613 - RNA, 16 nt, Human
cuggccaacgggguga

SEQ ID NO: 1595614 - RNA, 20 nt, Human
cuggcacaguuuucugagaa

SEQ ID NO: 1595615 - RNA, 19 nt, Human
cuggcacaguuuucugaga

SEQ ID NO: 1595616 - RNA, 18 nt, Human
cuggcacaguuuucugag

SEQ ID NO: 1595617 - RNA, 22 nt, Human
cucauaauuuauacaggucaua

SEQ ID NO: 1595618 - RNA, 13 nt, Human
cucauaauuuaua

SEQ ID NO: 1595619 - RNA, 15 nt, Human
cucauaauuuauaca

SEQ ID NO: 1595620 - RNA, 18 nt, Human
cucauuaggauggcuagu

SEQ ID NO: 1595621 - RNA, 17 nt, Human
cucauuaggauggcuag

SEQ ID NO: 1595622 - RNA, 17 nt, Human
cucccagucauuuaaua

SEQ ID NO: 1595623 - RNA, 21 nt, Human
cuccauccugaggcuccacuu

SEQ ID NO: 1595624 - RNA, 23 nt, Human
cuccauccugaggcuccacuugg

SEQ ID NO: 1595625 - RNA, 23 nt, Human
cuccaccucccugcaauaaaaug

SEQ ID NO: 1595626 - RNA, 14 nt, Human
cuccaccucccugc

SEQ ID NO: 1595627 - RNA, 15 nt, Human
cuccaccucccugca

SEQ ID NO: 1595628 - RNA, 16 nt, Human
cuccaccucccugcaa

SEQ ID NO: 1595629 - RNA, 17 nt, Human
cuccaccucccugcaau

SEQ ID NO: 1595630 - RNA, 16 nt, Human
cucccuucucuucaca

SEQ ID NO: 1595631 - RNA, 13 nt, Human
cucccuuucaaca

SEQ ID NO: 1595632 - RNA, 20 nt, Human
cucggagaagagcuguucac

SEQ ID NO: 1595633 - RNA, 13 nt, Human
cucggagaagagc

SEQ ID NO: 1595634 - RNA, 12 nt, Human
cucggagaagag

SEQ ID NO: 1595635 - RNA, 23 nt, Human
cucugcauacucauuaggauggc

SEQ ID NO: 1595636 - RNA, 21 nt, Human
cucuccugggcagcugccucc

SEQ ID NO: 1595637 - RNA, 13 nt, Human
cucuuaagaagac

SEQ ID NO: 1595638 - RNA, 18 nt, Human
cuguuuugaaucucauaa

SEQ ID NO: 1595639 - RNA, 19 nt, Human
cuguuuuauaauuuuguga

SEQ ID NO: 1595640 - RNA, 11 nt, Human
cuuaacuauuc

SEQ ID NO: 1595641 - RNA, 18 nt, Human
cuuaaugccacuaaauug

SEQ ID NO: 1595642 - RNA, 21 nt, Human
cuuaagaagacugcauuauau

SEQ ID NO: 1595643 - RNA, 15 nt, Human
cuuaugauugcagau

SEQ ID NO: 1595644 - RNA, 21 nt, Human
cuuaggguuaugauuaaguaa

SEQ ID NO: 1595645 - RNA, 13 nt, Human
cuuauaauuuaaa

SEQ ID NO: 1595646 - RNA, 14 nt, Human
cuuauaauuuaaaa

SEQ ID NO: 1595647 - RNA, 19 nt, Human
cuuacuaguuucccuugca

SEQ ID NO: 1595648 - RNA, 20 nt, Human
cuuagaugcaguucugaaga

SEQ ID NO: 1595649 - RNA, 19 nt, Human
cuuagaugcaguucugaag

SEQ ID NO: 1595650 - RNA, 18 nt, Human
cuucagcgguuuauauaa

SEQ ID NO: 1595651 - RNA, 17 nt, Human
cuucggccuccauccug

SEQ ID NO: 1595652 - RNA, 19 nt, Human
cuucggccuccauccugag

SEQ ID NO: 1595653 - RNA, 18 nt, Human
cuucggccuccauccuga

SEQ ID NO: 1595654 - RNA, 19 nt, Human
cuuccuuggacucauuuua

SEQ ID NO: 1595655 - RNA, 20 nt, Human
cuuccuuggacucauuuuaa

SEQ ID NO: 1595656 - RNA, 20 nt, Human
gaaaaguauguuagugcaaa

SEQ ID NO: 1595657 - RNA, 14 nt, Human
gaaaaguauguuag

SEQ ID NO: 1595658 - RNA, 19 nt, Human
gaaaauaacaauaaaagac

SEQ ID NO: 1595659 - RNA, 14 nt, Human
gaaaacaaggauga

SEQ ID NO: 1595660 - RNA, 16 nt, Human
cuuggacucauuuuaa

SEQ ID NO: 1595661 - RNA, 18 nt, Human
cuuggggcugaugcaguu

SEQ ID NO: 1595662 - RNA, 16 nt, Human
cuuggggcugaugcag

SEQ ID NO: 1595663 - RNA, 14 nt, Human
cuugcccuguuaaa

SEQ ID NO: 1595664 - RNA, 15 nt, Human
cuugccaucccuccc

SEQ ID NO: 1595665 - RNA, 16 nt, Human
cuugccaucccucccu

SEQ ID NO: 1595666 - RNA, 19 nt, Human
cuugccaucccucccucca

SEQ ID NO: 1595667 - RNA, 17 nt, Human
cuugccaucccucccuc

SEQ ID NO: 1595668 - RNA, 14 nt, Human
cuugccaucccucc

SEQ ID NO: 1595669 - RNA, 22 nt, Human
cuugcccuguuaaaagaugaaa

SEQ ID NO: 1595670 - RNA, 20 nt, Human
cuugcuugauuguauggugg

SEQ ID NO: 1595671 - RNA, 17 nt, Human
gacauaaaaacaacuuu

SEQ ID NO: 1595672 - RNA, 23 nt, Human
gacaggaugguucccuugaugaa

SEQ ID NO: 1595673 - RNA, 18 nt, Human
gaccacugcagaagacag

SEQ ID NO: 1595674 - RNA, 16 nt, Human
gaccacugcagaagac

SEQ ID NO: 1595675 - RNA, 19 nt, Human
gacccaaaaggcagaagca

SEQ ID NO: 1595676 - RNA, 18 nt, Human
gacccaaaaggcagaagc

SEQ ID NO: 1595677 - RNA, 20 nt, Human
gacccaaaaggcagaagcaa

SEQ ID NO: 1595678 - RNA, 16 nt, Human
gacugaggggagggga

SEQ ID NO: 1595679 - RNA, 22 nt, Human
gacuggcacaguuuucugagaa

SEQ ID NO: 1595680 - RNA, 18 nt, Human
gacuggcacaguuuucug

SEQ ID NO: 1595681 - RNA, 14 nt, Human
gacuggcacaguuu

SEQ ID NO: 1595682 - RNA, 18 nt, Human
gaagauguagaggagaaa

SEQ ID NO: 1595683 - RNA, 19 nt, Human
gaagacugcauuauauuua

SEQ ID NO: 1595684 - RNA, 12 nt, Human
gaagaacugaaa

SEQ ID NO: 1595685 - RNA, 21 nt, Human
gaacuagaguuuagcuggaaa

SEQ ID NO: 1595686 - RNA, 18 nt, Human
gaaauuguauuacaaauc

SEQ ID NO: 1595687 - RNA, 16 nt, Human
gaaauuguauuacaaa

SEQ ID NO: 1595688 - RNA, 20 nt, Human
gaacagugauuaccagggac

SEQ ID NO: 1595689 - RNA, 16 nt, Human
gaacagugauuaccag

SEQ ID NO: 1595690 - RNA, 15 nt, Human
gaacauaaaauacaa

SEQ ID NO: 1595691 - RNA, 20 nt, Human
gaauaauccuaaacauauga

SEQ ID NO: 1595692 - RNA, 16 nt, Human
gaauauuuuaacuucc

SEQ ID NO: 1595693 - RNA, 14 nt, Human
gaaguauccuucag

SEQ ID NO: 1595694 - RNA, 16 nt, Human
gaaguauccuucagcc

SEQ ID NO: 1595695 - RNA, 22 nt, Human
gaaguccaagcauuuagaugua

SEQ ID NO: 1595696 - RNA, 12 nt, Human
gaaguccaagca

SEQ ID NO: 1595697 - RNA, 23 nt, Human
gaauucuugaaggaaaaugauac

SEQ ID NO: 1595698 - RNA, 11 nt, Human
gaguucuacau

SEQ ID NO: 1595699 - RNA, 13 nt, Human
gauaaacaguagu

SEQ ID NO: 1595700 - RNA, 17 nt, Human
gauaggucagugcaaau

SEQ ID NO: 1595701 - RNA, 23 nt, Human
gaucagcuuauugucuagugaaa

SEQ ID NO: 1595702 - RNA, 13 nt, Human
gaucuuuaaaaua

SEQ ID NO: 1595703 - RNA, 14 nt, Human
gauccuggaaauca

SEQ ID NO: 1595704 - RNA, 16 nt, Human
gcaagaugugggcagu

SEQ ID NO: 1595705 - RNA, 12 nt, Human
gcaagauguggg

SEQ ID NO: 1595706 - RNA, 16 nt, Human
gaugcuagaacucccu

SEQ ID NO: 1595707 - RNA, 14 nt, Human
gauuaaguaaugau

SEQ ID NO: 1595708 - RNA, 22 nt, Human
gauuaaguaaugauaacuggaa

SEQ ID NO: 1595709 - RNA, 22 nt, Human
gcagauggaaugcuguguuaaa

SEQ ID NO: 1595710 - RNA, 18 nt, Human
gcagauggaaugcugugu

SEQ ID NO: 1595711 - RNA, 20 nt, Human
gcacagccucuuagaugcag

SEQ ID NO: 1595712 - RNA, 14 nt, Human
gcagaagacaguau

SEQ ID NO: 1595713 - RNA, 15 nt, Human
gcacugucaagauga

SEQ ID NO: 1595714 - RNA, 14 nt, Human
gcaguucugaagaa

SEQ ID NO: 1595715 - RNA, 13 nt, Human
gcaguucugaaga

SEQ ID NO: 1595716 - RNA, 18 nt, Human
gcauagauucccugagca

SEQ ID NO: 1595717 - RNA, 15 nt, Human
gcaggcuacugucag

SEQ ID NO: 1595718 - RNA, 19 nt, Human
gcccuucuuuccacagaag

SEQ ID NO: 1595719 - RNA, 16 nt, Human
gccuccccuccucugc

SEQ ID NO: 1595720 - RNA, 11 nt, Human
gccuccccucc

SEQ ID NO: 1595721 - RNA, 12 nt, Human
gccuccccuccu

SEQ ID NO: 1595722 - RNA, 13 nt, Human
gccuccccuccuc

SEQ ID NO: 1595723 - RNA, 14 nt, Human
gccuccccuccucu

SEQ ID NO: 1595724 - RNA, 18 nt, Human
gccuguaaucacagcuac

SEQ ID NO: 1595725 - RNA, 18 nt, Human
gccuucggccuccauccu

SEQ ID NO: 1595726 - RNA, 19 nt, Human
gccuucggccuccauccug

SEQ ID NO: 1595727 - RNA, 18 nt, Human
gccuuggggcugaugcag

SEQ ID NO: 1595728 - RNA, 22 nt, Human
gccacguucuuacuaguuuccc

SEQ ID NO: 1595729 - RNA, 11 nt, Human
gccaucccucc

SEQ ID NO: 1595730 - RNA, 13 nt, Human
gccaucccucccu

SEQ ID NO: 1595731 - RNA, 14 nt, Human
gccaucccucccuc

SEQ ID NO: 1595732 - RNA, 19 nt, Human
gccaugggacagggaggac

SEQ ID NO: 1595733 - RNA, 14 nt, Human
gccaugggacaggg

SEQ ID NO: 1595734 - RNA, 15 nt, Human
gccaucccucccucc

SEQ ID NO: 1595735 - RNA, 16 nt, Human
gccaucccucccucca

SEQ ID NO: 1595736 - RNA, 22 nt, Human
gccauuuaaagcuuauuaaaac

SEQ ID NO: 1595737 - RNA, 22 nt, Human
gccaugggacagggaggacgcu

SEQ ID NO: 1595738 - RNA, 16 nt, Human
gcccacagcuguauga

SEQ ID NO: 1595739 - RNA, 18 nt, Human
gcccucuccugggcagcu

SEQ ID NO: 1595740 - RNA, 19 nt, Human
gcccucuccugggcagcug

SEQ ID NO: 1595741 - RNA, 21 nt, Human
gcccucuccugggcagcugcc

SEQ ID NO: 1595742 - RNA, 15 nt, Human
gcccucuccugggca

SEQ ID NO: 1595743 - RNA, 16 nt, Human
gcccucuccugggcag

SEQ ID NO: 1595744 - RNA, 19 nt, Human
gccccugcacuccagccug

SEQ ID NO: 1595745 - RNA, 17 nt, Human
gccccgugggguuccuc

SEQ ID NO: 1595746 - RNA, 23 nt, Human
ggugcuacaaaaacacagcaagg

SEQ ID NO: 1595747 - RNA, 22 nt, Human
ggcuugaguuuaaauuguaaua

SEQ ID NO: 1595748 - RNA, 19 nt, Human
ggaggacgcucucuggccu

SEQ ID NO: 1595749 - RNA, 21 nt, Human
ggaggacgcucucuggccuuc

SEQ ID NO: 1595750 - RNA, 20 nt, Human
ggaggacgcucucuggccuu

SEQ ID NO: 1595751 - RNA, 18 nt, Human
ggcagcugccuccccucc

SEQ ID NO: 1595752 - RNA, 21 nt, Human
ggcagcugccuccccuccucu

SEQ ID NO: 1595753 - RNA, 22 nt, Human
ggcagcugccuccccuccucug

SEQ ID NO: 1595754 - RNA, 22 nt, Human
ggccaugggacagggaggacgc

SEQ ID NO: 1595755 - RNA, 18 nt, Human
gcuagauguauguacuuc

SEQ ID NO: 1595756 - RNA, 22 nt, Human
gcuguauuuuaaaagaaugauu

SEQ ID NO: 1595757 - RNA, 19 nt, Human
gcuugcccuggugccucac

SEQ ID NO: 1595758 - RNA, 17 nt, Human
gcuugcccuggugccuc

SEQ ID NO: 1595759 - RNA, 18 nt, Human
gcuugccaucccucccuc

SEQ ID NO: 1595760 - RNA, 21 nt, Human
gcuugccaucccucccuccac

SEQ ID NO: 1595761 - RNA, 18 nt, Human
gcuugcccuguuaaaaga

SEQ ID NO: 1595762 - RNA, 16 nt, Human
gcuugccaucccuccc

SEQ ID NO: 1595763 - RNA, 16 nt, Human
gcuguucacagccaga

SEQ ID NO: 1595764 - RNA, 15 nt, Human
gcuguucacagccag

SEQ ID NO: 1595765 - RNA, 23 nt, Human
gcuguucacagccagacuggcac

SEQ ID NO: 1595766 - RNA, 20 nt, Human
ggaaaaaauaacaaugaaag

SEQ ID NO: 1595767 - RNA, 17 nt, Human
gcuuuuaaaaaaaaaua

SEQ ID NO: 1595768 - RNA, 16 nt, Human
ggaaaucaaauaugca

SEQ ID NO: 1595769 - RNA, 18 nt, Human
ggaaauauuuauuuuaau

SEQ ID NO: 1595770 - RNA, 17 nt, Human
ggaaauauuuauuuuaa

SEQ ID NO: 1595771 - RNA, 15 nt, Human
ggaaauauuuauuuu

SEQ ID NO: 1595772 - RNA, 13 nt, Human
ggaaauauuuauu

SEQ ID NO: 1595773 - RNA, 12 nt, Human
ggaaauauuuau

SEQ ID NO: 1595774 - RNA, 16 nt, Human
uauacccagaaaguua

SEQ ID NO: 1595775 - RNA, 21 nt, Human
uauaauucagaaggaucuuca

SEQ ID NO: 1595776 - RNA, 18 nt, Human
uauaacaaugcuguauuu

SEQ ID NO: 1595777 - RNA, 15 nt, Human
uaguuuuauaugcuu

SEQ ID NO: 1595778 - RNA, 21 nt, Human
uaguuguaccgcaaugugacu

SEQ ID NO: 1595779 - RNA, 18 nt, Human
uagucaaauugugugaaa

SEQ ID NO: 1595780 - RNA, 19 nt, Human
uauauuuuuuguuaaauga

SEQ ID NO: 1595781 - RNA, 14 nt, Human
uauccuucagccug

SEQ ID NO: 1595782 - RNA, 23 nt, Human
uauauuuauuacuguaagaaaau

SEQ ID NO: 1595783 - RNA, 20 nt, Human
uauauuuauuacuguaagaa

SEQ ID NO: 1595784 - RNA, 14 nt, Human
uauauuugaaauau

SEQ ID NO: 1595785 - RNA, 13 nt, Human
uauauuugaaaua

SEQ ID NO: 1595786 - RNA, 16 nt, Human
uaggccaugggacagg

SEQ ID NO: 1595787 - RNA, 13 nt, Human
uaggccaugggac

SEQ ID NO: 1595788 - RNA, 23 nt, Human
uaggaauugacccacaagaaaug

SEQ ID NO: 1595789 - RNA, 18 nt, Human
uagaguuuagcuggaaaa

SEQ ID NO: 1595790 - RNA, 17 nt, Human
uagaguuuagcuggaaa

SEQ ID NO: 1595791 - RNA, 20 nt, Human
uagcagggcauggcugggaa

SEQ ID NO: 1595792 - RNA, 20 nt, Human
uagauguauguacuucaugc

SEQ ID NO: 1595793 - RNA, 16 nt, Human
uagauguauguacuuc

SEQ ID NO: 1595794 - RNA, 20 nt, Human
uacgaagaguauuuuugaca

SEQ ID NO: 1595795 - RNA, 22 nt, Human
uacgaagaguauuuuugacaga

SEQ ID NO: 1595796 - RNA, 23 nt, Human
uaccuuuguucccaaauuucaua

SEQ ID NO: 1595797 - RNA, 23 nt, Human
uacgaagaguauuuuugacagaa

SEQ ID NO: 1595798 - RNA, 23 nt, Human
uacugauguuccuagugaaagag

SEQ ID NO: 1595799 - RNA, 17 nt, Human
uagaacagauaaucagu

SEQ ID NO: 1595800 - RNA, 23 nt, Human
uacauuuggagacacaacuauuu

SEQ ID NO: 1595801 - RNA, 16 nt, Human
uacauuuguauaaaau

SEQ ID NO: 1595802 - RNA, 11 nt, Human
uacauuugugu

SEQ ID NO: 1595803 - RNA, 17 nt, Human
uacauuuguauaaaaua

SEQ ID NO: 1595804 - RNA, 22 nt, Human
uacaugagguacugagagugaa

SEQ ID NO: 1595805 - RNA, 21 nt, Human
uacaugagguacugagaguga

SEQ ID NO: 1595806 - RNA, 16 nt, Human
uaccaacacgagcagg

SEQ ID NO: 1595807 - RNA, 15 nt, Human
uacauaaguaauuca

SEQ ID NO: 1595808 - RNA, 18 nt, Human
uaccaccagucugacugu

SEQ ID NO: 1595809 - RNA, 23 nt, Human
uaccacaggaaccacaagacugc

SEQ ID NO: 1595810 - RNA, 13 nt, Human
uacagaauuuuau

SEQ ID NO: 1595811 - RNA, 13 nt, Human
uaauuuugugaag

SEQ ID NO: 1595812 - RNA, 23 nt, Human
uaauuaaauuuugaguucuacau

SEQ ID NO: 1595813 - RNA, 20 nt, Human
uaauuaaaagaauauuuuaa

SEQ ID NO: 1595814 - RNA, 15 nt, Human
uaauguuucaaacau

SEQ ID NO: 1595815 - RNA, 14 nt, Human
uaauguuucaaaca

SEQ ID NO: 1595816 - RNA, 13 nt, Human
uaauuuuaagaaa

SEQ ID NO: 1595817 - RNA, 23 nt, Human
uaauuuguaguguuggagaagaa

SEQ ID NO: 1595818 - RNA, 20 nt, Human
uaauuuguaguguuggagaa

SEQ ID NO: 1595819 - RNA, 22 nt, Human
uaauuggaaaggcagcucuaaa

SEQ ID NO: 1595820 - RNA, 15 nt, Human
uaauaacugugaagu

SEQ ID NO: 1595821 - RNA, 15 nt, Human
uaauaauguuucaaa

SEQ ID NO: 1595822 - RNA, 14 nt, Human
uaauauauuuccau

SEQ ID NO: 1595823 - RNA, 19 nt, Human
uaaugauaaguaaaugcua

SEQ ID NO: 1595824 - RNA, 19 nt, Human
uaaugccacuaaauugaca

SEQ ID NO: 1595825 - RNA, 13 nt, Human
uaacugugaaguu

SEQ ID NO: 1595826 - RNA, 19 nt, Human
uaagaaaucaaagagagaa

SEQ ID NO: 1595827 - RNA, 23 nt, Human
uaagagggauuagggagagaaga

SEQ ID NO: 1595828 - RNA, 21 nt, Human
uaagccagacaucaacagaua

SEQ ID NO: 1595829 - RNA, 20 nt, Human
uaagccagacaucaacagau

SEQ ID NO: 1595830 - RNA, 13 nt, Human
uaagccagacauc

SEQ ID NO: 1595831 - RNA, 20 nt, Human
uaagcauuccaacuaucuca

SEQ ID NO: 1595832 - RNA, 18 nt, Human
uaagcauuccaacuaucu

SEQ ID NO: 1595833 - RNA, 16 nt, Human
uaagcauuccaacuau

SEQ ID NO: 1595834 - RNA, 22 nt, Human
uaaauaaaccucaaaaugucua

SEQ ID NO: 1595835 - RNA, 18 nt, Human
uaaauauaugcuaagucu

SEQ ID NO: 1595836 - RNA, 17 nt, Human
uaaauaaaaauaauccu

SEQ ID NO: 1595837 - RNA, 17 nt, Human
uaaaauggguuuuacug

SEQ ID NO: 1595838 - RNA, 14 nt, Human
uaaaagaugaaaau

SEQ ID NO: 1595839 - RNA, 15 nt, Human
uaaaaaugguuuaaa

SEQ ID NO: 1595840 - RNA, 18 nt, Human
uaaaauccauacauuugu

SEQ ID NO: 1595841 - RNA, 19 nt, Human
uaaaauccauacauuugug

SEQ ID NO: 1595842 - RNA, 13 nt, Human
guuuagcaguaua

SEQ ID NO: 1595843 - RNA, 17 nt, Human
guuuagaaagcuugccc

SEQ ID NO: 1595844 - RNA, 13 nt, Human
guuuagaaagcuu

SEQ ID NO: 1595845 - RNA, 16 nt, Human
guuuucauuaucucaa

SEQ ID NO: 1595846 - RNA, 18 nt, Human
guuuucaggcuagaugua

SEQ ID NO: 1595847 - RNA, 15 nt, Human
guuuucugagaaaga

SEQ ID NO: 1595848 - RNA, 16 nt, Human
uaaaaaagaaacauuu

SEQ ID NO: 1595849 - RNA, 13 nt, Human
ucaguuguacagu

SEQ ID NO: 1595850 - RNA, 15 nt, Human
ucauaauuuauacag

SEQ ID NO: 1595851 - RNA, 13 nt, Human
ucauacauuguac

SEQ ID NO: 1595852 - RNA, 15 nt, Human
ucauacauuguacga

SEQ ID NO: 1595853 - RNA, 16 nt, Human
ucauacauuguacgaa

SEQ ID NO: 1595854 - RNA, 20 nt, Human
uccaagcauuuagauguaua

SEQ ID NO: 1595855 - RNA, 12 nt, Human
uccaccucccug

SEQ ID NO: 1595856 - RNA, 14 nt, Human
uccaccuacaugag

SEQ ID NO: 1595857 - RNA, 13 nt, Human
uccacuuggucug

SEQ ID NO: 1595858 - RNA, 12 nt, Human
uccacuuggucu

SEQ ID NO: 1595859 - RNA, 14 nt, Human
uccacuuggucugu

SEQ ID NO: 1595860 - RNA, 14 nt, Human
uccagauccuggaa

SEQ ID NO: 1595861 - RNA, 17 nt, Human
uccagauccuggaaauc

SEQ ID NO: 1595862 - RNA, 16 nt, Human
uccagauccuggaaau

SEQ ID NO: 1595863 - RNA, 23 nt, Human
uccaagcauaccaacacgagcag

SEQ ID NO: 1595864 - RNA, 17 nt, Human
uccaagcauuuagaugu

SEQ ID NO: 1595865 - RNA, 12 nt, Human
uccaaagaaaug

SEQ ID NO: 1595866 - RNA, 23 nt, Human
uccaaacugacucuuaagaagac

SEQ ID NO: 1595867 - RNA, 22 nt, Human
ucauuucugcaucagcugcuga

SEQ ID NO: 1595868 - RNA, 16 nt, Human
ucauuucugcaucagc

SEQ ID NO: 1595869 - RNA, 14 nt, Human
ucauuucuuugagu

SEQ ID NO: 1595870 - RNA, 16 nt, Human
ucccaaauuucauacc

SEQ ID NO: 1595871 - RNA, 17 nt, Human
ucagaaaauauuaugug

SEQ ID NO: 1595872 - RNA, 19 nt, Human
ucagaaaauauuauguguu

SEQ ID NO: 1595873 - RNA, 20 nt, Human
ucagaaaauauuauguguuu

SEQ ID NO: 1595874 - RNA, 17 nt, Human
ucacuugucaauaaaau

SEQ ID NO: 1595875 - RNA, 19 nt, Human
ucagacauagaauuaacac

SEQ ID NO: 1595876 - RNA, 22 nt, Human
ucagacauagaauuaacacaug

SEQ ID NO: 1595877 - RNA, 15 nt, Human
uauuugagaguucua

SEQ ID NO: 1595878 - RNA, 16 nt, Human
uauuugagaguucuaa

SEQ ID NO: 1595879 - RNA, 18 nt, Human
uauuugagaguucuaaau

SEQ ID NO: 1595880 - RNA, 19 nt, Human
uauuugagaguucuaaauu

SEQ ID NO: 1595881 - RNA, 21 nt, Human
uauuucuaugaaauauuaugu

SEQ ID NO: 1595882 - RNA, 22 nt, Human
uauuucuaugaaauauuauguu

SEQ ID NO: 1595883 - RNA, 13 nt, Human
uauuuauuacugu

SEQ ID NO: 1595884 - RNA, 13 nt, Human
ucaaaacugcacu

SEQ ID NO: 1595885 - RNA, 13 nt, Human
ucaaugcagcccc

SEQ ID NO: 1595886 - RNA, 19 nt, Human
ucacaggaaguagaggagg

SEQ ID NO: 1595887 - RNA, 23 nt, Human
ucacaggacagcccuucuuucca

SEQ ID NO: 1595888 - RNA, 19 nt, Human
ucaacuccaaacugacucu

SEQ ID NO: 1595889 - RNA, 13 nt, Human
ucuaaauuugaau

SEQ ID NO: 1595890 - RNA, 17 nt, Human
ucuaaauuugaauguua

SEQ ID NO: 1595891 - RNA, 19 nt, Human
ucuaacaaaaaaauauauu

SEQ ID NO: 1595892 - RNA, 22 nt, Human
ucuaaauuugaauguuaagcag

SEQ ID NO: 1595893 - RNA, 23 nt, Human
ucuaaauuugaauguuaagcaga

SEQ ID NO: 1595894 - RNA, 18 nt, Human
ucuaaauuuuauaucuug

SEQ ID NO: 1595895 - RNA, 23 nt, Human
ucuaaauuuuauaucuuguagcu

SEQ ID NO: 1595896 - RNA, 21 nt, Human
ucuacacuaagagagaaugag

SEQ ID NO: 1595897 - RNA, 17 nt, Human
ucuacacuccagugaga

SEQ ID NO: 1595898 - RNA, 21 nt, Human
ucucaaauuuggauugcuaau

SEQ ID NO: 1595899 - RNA, 15 nt, Human
ucuaguaugaaauua

SEQ ID NO: 1595900 - RNA, 17 nt, Human
ucuaguaugaaauuaua

SEQ ID NO: 1595901 - RNA, 15 nt, Human
ucucaacuccaaacu

SEQ ID NO: 1595902 - RNA, 20 nt, Human
uccuucugugaaaguacauu

SEQ ID NO: 1595903 - RNA, 15 nt, Human
uccuugcaucaauuu

SEQ ID NO: 1595904 - RNA, 18 nt, Human
ucucuucacagucacauu

SEQ ID NO: 1595905 - RNA, 19 nt, Human
ucuccugggcagcugccuc

SEQ ID NO: 1595906 - RNA, 20 nt, Human
ucuccugggcagcugccucc

SEQ ID NO: 1595907 - RNA, 21 nt, Human
ucuccugggcagcugccuccc

SEQ ID NO: 1595908 - RNA, 19 nt, Human
ucucuaggaaauauuuauu

SEQ ID NO: 1595909 - RNA, 13 nt, Human
ucucuaggaaaua

SEQ ID NO: 1595910 - RNA, 13 nt, Human
ucuccugggcagc

SEQ ID NO: 1595911 - RNA, 14 nt, Human
ucuccugggcagcu

SEQ ID NO: 1595912 - RNA, 15 nt, Human
ucuccugggcagcug

SEQ ID NO: 1595913 - RNA, 16 nt, Human
ucuccugggcagcugc

SEQ ID NO: 1595914 - RNA, 17 nt, Human
ucuccugggcagcugcc

SEQ ID NO: 1595915 - RNA, 18 nt, Human
ucuccugggcagcugccu

SEQ ID NO: 1595916 - RNA, 21 nt, Human
ucucagugucaaugcagcccc

SEQ ID NO: 1595917 - RNA, 22 nt, Human
ugaacuuguaaaggaauuuaaa

SEQ ID NO: 1595918 - RNA, 22 nt, Human
ugaaguccaagcauuuagaugu

SEQ ID NO: 1595919 - RNA, 21 nt, Human
ugaaguccaagcauuuagaug

SEQ ID NO: 1595920 - RNA, 17 nt, Human
ugaagauguagaggaga

SEQ ID NO: 1595921 - RNA, 14 nt, Human
ugaacacaucagcu

SEQ ID NO: 1595922 - RNA, 19 nt, Human
ugaaauggacuuuuguaca

SEQ ID NO: 1595923 - RNA, 22 nt, Human
ugaaaagacuccaaagaaaugu

SEQ ID NO: 1595924 - RNA, 23 nt, Human
ugaaagcagggacuugaacccau

SEQ ID NO: 1595925 - RNA, 19 nt, Human
ugaaagcagggacuugaac

SEQ ID NO: 1595926 - RNA, 18 nt, Human
ugaaagcagggacuugaa

SEQ ID NO: 1595927 - RNA, 19 nt, Human
ugaaaagacuccaaagaaa

SEQ ID NO: 1595928 - RNA, 17 nt, Human
ugaaaagacuccaaaga

SEQ ID NO: 1595929 - RNA, 16 nt, Human
ugaaaagacuccaaag

SEQ ID NO: 1595930 - RNA, 15 nt, Human
ugaaaagacuccaaa

SEQ ID NO: 1595931 - RNA, 19 nt, Human
ugaaaacuuuaugcuaagu

SEQ ID NO: 1595932 - RNA, 17 nt, Human
ucuuucacauuuaaaua

SEQ ID NO: 1595933 - RNA, 22 nt, Human
ucuguuuuauaauuuugugaag

SEQ ID NO: 1595934 - RNA, 23 nt, Human
ugcuagguuaauuccaauuauau

SEQ ID NO: 1595935 - RNA, 16 nt, Human
ugcuagguuaauucca

SEQ ID NO: 1595936 - RNA, 11 nt, Human
ugcucauggaa

SEQ ID NO: 1595937 - RNA, 21 nt, Human
ugcuagaacucccuuucaaca

SEQ ID NO: 1595938 - RNA, 20 nt, Human
ugcuagaacucccuuucaac

SEQ ID NO: 1595939 - RNA, 19 nt, Human
ugcuagaacucccuuucaa

SEQ ID NO: 1595940 - RNA, 17 nt, Human
ugcugaaacaacaaaua

SEQ ID NO: 1595941 - RNA, 18 nt, Human
ugccuccccuccucugcu

SEQ ID NO: 1595942 - RNA, 23 nt, Human
ugccuccccuccucugcuugcca

SEQ ID NO: 1595943 - RNA, 19 nt, Human
ugccuccccuccucugcuu

SEQ ID NO: 1595944 - RNA, 22 nt, Human
ugccuccccuccucugcuugcc

SEQ ID NO: 1595945 - RNA, 22 nt, Human
ugccuucucaacuccaaacuga

SEQ ID NO: 1595946 - RNA, 15 nt, Human
ugccaucccucccuc

SEQ ID NO: 1595947 - RNA, 19 nt, Human
ugccaucccucccuccacc

SEQ ID NO: 1595948 - RNA, 20 nt, Human
ugccaucccucccuccaccu

SEQ ID NO: 1595949 - RNA, 21 nt, Human
ugccaucccucccuccaccuc

SEQ ID NO: 1595950 - RNA, 22 nt, Human
ugccaucccucccuccaccucc

SEQ ID NO: 1595951 - RNA, 22 nt, Human
ugcaucagcugcugaaacaaca

SEQ ID NO: 1595952 - RNA, 21 nt, Human
ugcauuauauuuauuacugua

SEQ ID NO: 1595953 - RNA, 20 nt, Human
ugcauuauauuuauuacugu

SEQ ID NO: 1595954 - RNA, 15 nt, Human
ugcauuauauuuauu

SEQ ID NO: 1595955 - RNA, 17 nt, Human
ugcagauaaacaguagu

SEQ ID NO: 1595956 - RNA, 16 nt, Human
ugcagauaaacaguag

SEQ ID NO: 1595957 - RNA, 15 nt, Human
ugcacaucaaaauau

SEQ ID NO: 1595958 - RNA, 15 nt, Human
uggagcaaagcugau

SEQ ID NO: 1595959 - RNA, 14 nt, Human
ugcuucuguuuuau

SEQ ID NO: 1595960 - RNA, 14 nt, Human
uggaacucucgagc

SEQ ID NO: 1595961 - RNA, 16 nt, Human
uggguagacacacaug

SEQ ID NO: 1595962 - RNA, 17 nt, Human
uggguagacacacauga

SEQ ID NO: 1595963 - RNA, 18 nt, Human
uggccuucggccuccauc

SEQ ID NO: 1595964 - RNA, 17 nt, Human
uggccuucggccuccau

SEQ ID NO: 1595965 - RNA, 20 nt, Human
uggccuucggccuccauccu

SEQ ID NO: 1595966 - RNA, 21 nt, Human
ugggacagucaccucauggaa

SEQ ID NO: 1595967 - RNA, 20 nt, Human
ugggacagucaccucaugga

SEQ ID NO: 1595968 - RNA, 18 nt, Human
ugggacagucaccucaug

SEQ ID NO: 1595969 - RNA, 20 nt, Human
ugggacauuugcucauggaa

SEQ ID NO: 1595970 - RNA, 19 nt, Human
ugggacauuugcucaugga

SEQ ID NO: 1595971 - RNA, 12 nt, Human
uguuuuaaaaaa

SEQ ID NO: 1595972 - RNA, 20 nt, Human
uuaaagcuuauuaaaacuca

SEQ ID NO: 1595973 - RNA, 19 nt, Human
uuaaaagaaugauuaugaa

SEQ ID NO: 1595974 - RNA, 18 nt, Human
uuaauaauguuucaaaca

SEQ ID NO: 1595975 - RNA, 21 nt, Human
uuaccacuuguguuuugcaag

SEQ ID NO: 1595976 - RNA, 15 nt, Human
uuacauuuguauaaa

SEQ ID NO: 1595977 - RNA, 14 nt, Human
uuacauuuguauaa

SEQ ID NO: 1595978 - RNA, 13 nt, Human
uguuuaaaaucau

SEQ ID NO: 1595979 - RNA, 14 nt, Human
uguuuaaaaucauu

SEQ ID NO: 1595980 - RNA, 21 nt, Human
uguuggagaagaacugaaauc

SEQ ID NO: 1595981 - RNA, 16 nt, Human
uguucacagccagacu

SEQ ID NO: 1595982 - RNA, 12 nt, Human
uguuauaaucuu

SEQ ID NO: 1595983 - RNA, 17 nt, Human
uguagcacugacagauu

SEQ ID NO: 1595984 - RNA, 22 nt, Human
uguagcacugacagauuuccau

SEQ ID NO: 1595985 - RNA, 16 nt, Human
uguagcacugacagau

SEQ ID NO: 1595986 - RNA, 15 nt, Human
uguaaucacagcuac

SEQ ID NO: 1595987 - RNA, 15 nt, Human
uguaccgcaauguga

SEQ ID NO: 1595988 - RNA, 17 nt, Human
uguagauaauacaguuc

SEQ ID NO: 1595989 - RNA, 20 nt, Human
ugugaaguuuacauuguaaa

SEQ ID NO: 1595990 - RNA, 14 nt, Human
ugugaaguuuacau

SEQ ID NO: 1595991 - RNA, 22 nt, Human
ugucucaguccaugaagaugua

SEQ ID NO: 1595992 - RNA, 21 nt, Human
ugucucaguccaugaagaugu

SEQ ID NO: 1595993 - RNA, 22 nt, Human
ugugaccacugcagaagacagu

SEQ ID NO: 1595994 - RNA, 21 nt, Human
uugaaucucauaauuuauaca

SEQ ID NO: 1595995 - RNA, 15 nt, Human
uugaaucucauaauu

SEQ ID NO: 1595996 - RNA, 23 nt, Human
uugaaaagacuccaaagaaaugu

SEQ ID NO: 1595997 - RNA, 22 nt, Human
uugaaaagacuccaaagaaaug

SEQ ID NO: 1595998 - RNA, 18 nt, Human
uugaaaagacuccaaaga

SEQ ID NO: 1595999 - RNA, 23 nt, Human
uugaaacugagaugugaacacau

SEQ ID NO: 1596000 - RNA, 15 nt, Human
uucuuauuucauuuc

SEQ ID NO: 1596001 - RNA, 15 nt, Human
uucugagaaagacua

SEQ ID NO: 1596002 - RNA, 14 nt, Human
uucugagcauuuaa

SEQ ID NO: 1596003 - RNA, 18 nt, Human
uugcauagauucccugag

SEQ ID NO: 1596004 - RNA, 13 nt, Human
uugaugaagaagu

SEQ ID NO: 1596005 - RNA, 12 nt, Human
uugaugaagaag

SEQ ID NO: 1596006 - RNA, 15 nt, Human
uugaggacacugaua

SEQ ID NO: 1596007 - RNA, 14 nt, Human
uugaggacacugau

SEQ ID NO: 1596008 - RNA, 19 nt, Human
uuguaucacaaaucuuaac

SEQ ID NO: 1596009 - RNA, 18 nt, Human
uuguaaaugugcuuuuaa

SEQ ID NO: 1596010 - RNA, 14 nt, Human
uuguaaaugugcuu

SEQ ID NO: 1596011 - RNA, 11 nt, Human
uuguaaaugug

SEQ ID NO: 1596012 - RNA, 16 nt, Human
uuguaaaggaauuuaa

SEQ ID NO: 1596013 - RNA, 12 nt, Human
uugggaggcuga

SEQ ID NO: 1596014 - RNA, 21 nt, Human
uuccauccuagucacuaccuu

SEQ ID NO: 1596015 - RNA, 19 nt, Human
uuccacuuauaggaauuga

SEQ ID NO: 1596016 - RNA, 20 nt, Human
uucaucugacuaugacauaa

SEQ ID NO: 1596017 - RNA, 17 nt, Human
uucaucugacuaugaca

SEQ ID NO: 1596018 - RNA, 22 nt, Human
uucagagcugcccucuccuggg

SEQ ID NO: 1596019 - RNA, 23 nt, Human
uucagagcugcccucuccugggc

SEQ ID NO: 1596020 - RNA, 17 nt, Human
uuccuucugugaaagua

SEQ ID NO: 1596021 - RNA, 20 nt, Human
uuccuucugugaaaguacau

SEQ ID NO: 1596022 - RNA, 19 nt, Human
uucggccuccauccugagg

SEQ ID NO: 1596023 - RNA, 18 nt, Human
uucggccuccauccugag

SEQ ID NO: 1596024 - RNA, 22 nt, Human
uucggccuccauccugaggcuc

SEQ ID NO: 1596025 - RNA, 12 nt, Human
uuccuagugaaa

SEQ ID NO: 1596026 - RNA, 23 nt, Human
uucucuccucuccccaugauguu

SEQ ID NO: 1596027 - RNA, 13 nt, Human
uuuacauuguaaa

SEQ ID NO: 1596028 - RNA, 20 nt, Human
uuuacauuguaaauaguauu

SEQ ID NO: 1596029 - RNA, 15 nt, Human
uuuacauuguaaaua

SEQ ID NO: 1596030 - RNA, 12 nt, Human
uuuagaaacaca

SEQ ID NO: 1596031 - RNA, 20 nt, Human
uuuagaaacacaacuauauu

SEQ ID NO: 1596032 - RNA, 22 nt, Human
uuuauuguuuaaaaucauuucu

SEQ ID NO: 1596033 - RNA, 14 nt, Human
uuuccaaaauaauu

SEQ ID NO: 1596034 - RNA, 21 nt, Human
uuucagauaaucacaauacau

SEQ ID NO: 1596035 - RNA, 15 nt, Human
uuucagcagcugcag

SEQ ID NO: 1596036 - RNA, 15 nt, Human
uuucagauaaucaca

SEQ ID NO: 1596037 - RNA, 22 nt, Human
uuuccucaaaacuucagacaua

SEQ ID NO: 1596038 - RNA, 22 nt, Human
uuucugagaaagacuauucaaa

SEQ ID NO: 1596039 - RNA, 22 nt, Human
uuuucagaaaauauuauguguu

SEQ ID NO: 1596040 - RNA, 16 nt, Human
uuuucagaaaauauua

SEQ ID NO: 1596041 - RNA, 13 nt, Human
uuuuccugaaaac

SEQ ID NO: 1596042 - RNA, 15 nt, Human
uuuucagaaaauauu

SEQ ID NO: 1596043 - RNA, 16 nt, Human
uuuucacauaucuagu

SEQ ID NO: 1596044 - RNA, 13 nt, Human
uuuucacauaucu

SEQ ID NO: 1596045 - RNA, 10 nt, Human
uuuuauauuu

SEQ ID NO: 1596046 - RNA, 20 nt, Human
uuuuauaucaauuuaaaaaa

SEQ ID NO: 1596047 - RNA, 20 nt, Human
uuuuauaugcuucuguuuua

SEQ ID NO: 1596048 - RNA, 15 nt, Human
uuuuauaugcuucug

SEQ ID NO: 1596049 - RNA, 16 nt, Human
uuuguucauacauauu

SEQ ID NO: 1596050 - RNA, 13 nt, Human
uuuguucauacau

SEQ ID NO: 1596051 - RNA, 21 nt, Human
uuuguauaaaauaauuuuuau

SEQ ID NO: 1596052 - RNA, 23 nt, Human
uuuggaacaagaugguucuagca

SEQ ID NO: 1596053 - RNA, 21 nt, Human
uuugcauagauucccugagca

SEQ ID NO: 1596054 - RNA, 18 nt, Human
gccugcaauuucauaugc

SEQ ID NO: 1596055 - RNA, 20 nt, Human
gaauucauucacucaacaaa

SEQ ID NO: 1596056 - RNA, 15 nt, Human
ggaaaaaauaacaau

SEQ ID NO: 1596057 - RNA, 20 nt, Human
gcuagaacucccuuucaaca

SEQ ID NO: 1596058 - RNA, 14 nt, Human
uagcacugacagau

SEQ ID NO: 1596059 - RNA, 14 nt, Human
uauuuuugacagaa

SEQ ID NO: 1596060 - RNA, 13 nt, Human
uauuuuuuaaaaa

SEQ ID NO: 1596061 - RNA, 16 nt, Human
acuaguauuucuauga

SEQ ID NO: 1596062 - RNA, 15 nt, Human
uuuaaaaaaucucaa

SEQ ID NO: 1596063 - RNA, 18 nt, Human
uuuccaaaauaauuuuaa

SEQ ID NO: 1596064 - RNA, 16 nt, Human
ugcuuuggucauauga

SEQ ID NO: 1596065 - RNA, 16 nt, Human
cuaaauuugaauguua

SEQ ID NO: 1596066 - RNA, 22 nt, Human
uuaacaucucagaaaacucugg

SEQ ID NO: 1596067 - RNA, 21 nt, Human
uauuuuauaucaauuuaaaaa

SEQ ID NO: 1596068 - RNA, 22 nt, Human
uaaaacuuauccuccaugaaua

SEQ ID NO: 1596069 - RNA, 18 nt, Human
uaaauugacacuuaaaaa

SEQ ID NO: 1596070 - RNA, 17 nt, Human
guuauuauauuuacaaa

SEQ ID NO: 1596071 - RNA, 16 nt, Human
gaaauuguauuacaaa

SEQ ID NO: 1596072 - RNA, 13 nt, Human
aaaacucugguaa

SEQ ID NO: 1596073 - RNA, 18 nt, Human
ucuaaauuugaauguuaa

SEQ ID NO: 1596074 - RNA, 18 nt, Human
gugaaagaaaauaacaau

SEQ ID NO: 1596075 - RNA, 19 nt, Human
aaauauugacuuuuuaugg

SEQ ID NO: 1596076 - RNA, 21 nt, Human
caaagaugaucaguaugaaaa

SEQ ID NO: 1596077 - RNA, 13 nt, Human
cagugaaagaaaa

SEQ ID NO: 1596078 - RNA, 16 nt, Human
cagaaaguuauugaua

SEQ ID NO: 1596079 - RNA, 22 nt, Human
cagcaguucagagcugcccucu

SEQ ID NO: 1596080 - RNA, 21 nt, Human
cacaugaacuuguaaaggaau

SEQ ID NO: 1596081 - RNA, 21 nt, Human
cagcugccuccccuccucugc

SEQ ID NO: 1596082 - RNA, 16 nt, Human
ccugugguuaacaucu

SEQ ID NO: 1596083 - RNA, 13 nt, Human
cucaaaaugucua

SEQ ID NO: 1596084 - RNA, 14 nt, Human coronavirus 229E
gucaacagcugcua

SEQ ID NO: 1596085 - RNA, 12 nt, Human coronavirus 229E
gcaucuuuuaac

SEQ ID NO: 1596086 - RNA, 21 nt, Human coronavirus 229E
caagacgugaaagauggcacu

SEQ ID NO: 1596087 - RNA, 17 nt, Human coronavirus 229E
aauguuacauuggacaa

SEQ ID NO: 1596088 - RNA, 22 nt, Human coronavirus 229E
agaguccugcuucuucucaaac

SEQ ID NO: 1596089 - RNA, 19 nt, Human coronavirus 229E
aacuucaccugcaacugcu

SEQ ID NO: 1596090 - RNA, 14 nt, Human coronavirus 229E
acuacgucugcuuu

SEQ ID NO: 1596091 - RNA, 21 nt, Human coronavirus 229E
cuucaguuuggacacuauaaa

SEQ ID NO: 1596092 - RNA, 17 nt, Human coronavirus 229E
aucucgcauaauguuug

SEQ ID NO: 1596093 - RNA, 17 nt, Human coronavirus 229E
uacaaccucaauuuuga

SEQ ID NO: 1596094 - RNA, 19 nt, Human coronavirus 229E
uguuuuaugguuugaagau

SEQ ID NO: 1596095 - RNA, 21 nt, Human coronavirus 229E
uuacgcaacuuugauugcugu

SEQ ID NO: 1596096 - RNA, 17 nt, Human coronavirus 229E
ucucugaucuauguaug

SEQ ID NO: 1596097 - RNA, 12 nt, Human coronavirus 229E
ccuuuguugcuu

SEQ ID NO: 1596098 - RNA, 12 nt, Human coronavirus 229E
ucuauaauugcu

SEQ ID NO: 1596099 - RNA, 15 nt, Human coronavirus 229E
cagaguccugcuucu

SEQ ID NO: 1596100 - RNA, 19 nt, Human coronavirus 229E
cucucccaugagcaacaug

SEQ ID NO: 1596101 - RNA, 17 nt, Human coronavirus 229E
caauuuuaaugaaacua

SEQ ID NO: 1596102 - RNA, 19 nt, Human coronavirus 229E
gacgugaaagauggcacug

SEQ ID NO: 1596103 - RNA, 19 nt, Human coronavirus 229E
aaagcucccaaaugguguu

SEQ ID NO: 1596104 - RNA, 17 nt, Human coronavirus 229E
ugcaaugucacauuugu

SEQ ID NO: 1596105 - RNA, 18 nt, Human coronavirus 229E
uuuaaauuauguugcauu

SEQ ID NO: 1596106 - RNA, 19 nt, Human coronavirus 229E
gaacugccgaaauuuuucu

SEQ ID NO: 1596107 - RNA, 15 nt, Human coronavirus 229E
acuaaacaugccacu

SEQ ID NO: 1596108 - RNA, 12 nt, Human coronavirus 229E
acacccagcugu

SEQ ID NO: 1596109 - RNA, 19 nt, Human coronavirus 229E
aggcuggagucugcagaug

SEQ ID NO: 1596110 - RNA, 17 nt, Human coronavirus 229E
cacauuguuuccaaaga

SEQ ID NO: 1596111 - RNA, 21 nt, Human coronavirus 229E
uguuauccugcugguguuaau

SEQ ID NO: 1596112 - RNA, 15 nt, Human coronavirus 229E
cacuuugcuaugcaa

SEQ ID NO: 1596113 - RNA, 22 nt, Human coronavirus 229E
cuugcuuugucaaucuuugaca

SEQ ID NO: 1596114 - RNA, 20 nt, Human coronavirus 229E
uaguuguuuugcaucuucua

SEQ ID NO: 1596115 - RNA, 17 nt, Human coronavirus 229E
uggugcuuauagugaua

SEQ ID NO: 1596116 - RNA, 21 nt, Human coronavirus 229E
agauugcuucauuuuuucuaa

SEQ ID NO: 1596117 - RNA, 14 nt, Human coronavirus 229E
uagaugccuuuacu

SEQ ID NO: 1596118 - RNA, 21 nt, Human coronavirus 229E
guaaagguuuuuccucagaug

SEQ ID NO: 1596119 - RNA, 18 nt, Human coronavirus 229E
ggaucaauuccuuuacau

SEQ ID NO: 1596120 - RNA, 16 nt, Human coronavirus 229E
ugagacuuacaucaag

SEQ ID NO: 1596121 - RNA, 22 nt, Human coronavirus 229E
aggaugacaucaugaaggcagu

SEQ ID NO: 1596122 - RNA, 19 nt, Human coronavirus 229E
ucauaaacauacguuuauu

SEQ ID NO: 1596123 - RNA, 15 nt, Human coronavirus 229E
uucuauaauugcugu

SEQ ID NO: 1596124 - RNA, 22 nt, Human coronavirus 229E
cuagaauucaacccaucucaaa

SEQ ID NO: 1596125 - RNA, 19 nt, Human coronavirus 229E
auucuucaguuuggacacu

SEQ ID NO: 1596126 - RNA, 17 nt, Human coronavirus 229E
guuguucuacugguugc

SEQ ID NO: 1596127 - RNA, 17 nt, Human coronavirus 229E
gaaaaagauaaaaaguc

SEQ ID NO: 1596128 - RNA, 12 nt, Human coronavirus 229E
accuucuggguu

SEQ ID NO: 1596129 - RNA, 13 nt, Human coronavirus 229E
uucacauugcaac

SEQ ID NO: 1596130 - RNA, 20 nt, Human coronavirus 229E
gagccaacaauggaagagcc

SEQ ID NO: 1596131 - RNA, 19 nt, Human coronavirus 229E
uugccaaauuacacuguuc

SEQ ID NO: 1596132 - RNA, 16 nt, Human coronavirus 229E
gaccagugaaauuagc

SEQ ID NO: 1596133 - RNA, 15 nt, Human coronavirus 229E
cuguggaaauggcac

SEQ ID NO: 1596134 - RNA, 19 nt, Human coronavirus 229E
gcuuaauuacacuguucaa

SEQ ID NO: 1596135 - RNA, 23 nt, Human coronavirus 229E
uuguaacccaccagaucagcuug

SEQ ID NO: 1596136 - RNA, 21 nt, Human coronavirus 229E
cuacugcagaaaccacugauu

SEQ ID NO: 1596137 - RNA, 20 nt, Human coronavirus 229E
aguuaaaugcauucacuaga

SEQ ID NO: 1596138 - RNA, 16 nt, Human coronavirus 229E
cauuguuuccaaagag

SEQ ID NO: 1596139 - RNA, 14 nt, Human coronavirus 229E
guugagcuaccugu

SEQ ID NO: 1596140 - RNA, 19 nt, Human coronavirus 229E
gauccaggauguuguuaau

SEQ ID NO: 1596141 - RNA, 20 nt, Human coronavirus 229E
cuguuaccuucaacuugcua

SEQ ID NO: 1596142 - RNA, 15 nt, Human coronavirus 229E
cauauguuuuguaau

SEQ ID NO: 1596143 - RNA, 13 nt, Human coronavirus 229E
ucagaacuagaaa

SEQ ID NO: 1596144 - RNA, 13 nt, Human coronavirus 229E
ucacgacagguua

SEQ ID NO: 1596145 - RNA, 13 nt, Human coronavirus 229E
cuuguuuugugaa

SEQ ID NO: 1596146 - RNA, 16 nt, Human coronavirus 229E
cuaaacaugccacugu

SEQ ID NO: 1596147 - RNA, 16 nt, Human coronavirus 229E
guuuguucacauugca

SEQ ID NO: 1596148 - RNA, 13 nt, Human coronavirus 229E
ccacuuauguuug

SEQ ID NO: 1596149 - RNA, 23 nt, Human coronavirus 229E
agaguucugaaacaaaagaacaa

SEQ ID NO: 1596150 - RNA, 17 nt, Human coronavirus 229E
gcaacucuguuauuaac

SEQ ID NO: 1596151 - RNA, 18 nt, Human coronavirus 229E
auuagagguuguugugaa

SEQ ID NO: 1596152 - RNA, 15 nt, Human coronavirus 229E
gucaaucuuugacac

SEQ ID NO: 1596153 - RNA, 14 nt, Human coronavirus 229E
augauaguguuuca

SEQ ID NO: 1596154 - RNA, 14 nt, Human coronavirus 229E
caggcauuacugug

SEQ ID NO: 1596155 - RNA, 18 nt, Human coronavirus 229E
caaacuuguuacuucugg

SEQ ID NO: 1596156 - RNA, 18 nt, Human coronavirus 229E
agaauuggaauuuugguu

SEQ ID NO: 1596157 - RNA, 13 nt, Human coronavirus 229E
ugacaucaugaag

SEQ ID NO: 1596158 - RNA, 20 nt, Human coronavirus 229E
gcuaucucuagcucuauuca

SEQ ID NO: 1596159 - RNA, 17 nt, Human coronavirus 229E
uucaaaaacguuucaga

SEQ ID NO: 1596160 - RNA, 12 nt, Human coronavirus 229E
gguuugaagaug

SEQ ID NO: 1596161 - RNA, 13 nt, Human coronavirus 229E
aauaacuuuguua

SEQ ID NO: 1596162 - RNA, 14 nt, Human coronavirus 229E
cugcugguguuaau

SEQ ID NO: 1596163 - RNA, 17 nt, Human coronavirus 229E
cacugcuggcucuacaa

SEQ ID NO: 1596164 - RNA, 22 nt, Human coronavirus 229E
accuaucguaguugauugcucc

SEQ ID NO: 1596165 - RNA, 17 nt, Human coronavirus 229E
ccacguaauguuucaua

SEQ ID NO: 1596166 - RNA, 18 nt, Human coronavirus 229E
auggcacuuauaauugca

SEQ ID NO: 1596167 - RNA, 12 nt, Human coronavirus 229E
cguuucagaacu

SEQ ID NO: 1596168 - RNA, 13 nt, Human coronavirus 229E
acgcagacuacaa

SEQ ID NO: 1596169 - RNA, 21 nt, Human coronavirus 229E
uugcuccacuuauguuugcaa

SEQ ID NO: 1596170 - RNA, 16 nt, Human coronavirus 229E
cagagauaccacacuu

SEQ ID NO: 1596171 - RNA, 14 nt, Human coronavirus 229E
caguauacuucugc

SEQ ID NO: 1596172 - RNA, 20 nt, Human coronavirus 229E
ugaaacugacauaauugaug

SEQ ID NO: 1596173 - RNA, 20 nt, Human coronavirus 229E
caauguuuuggccccagaga

SEQ ID NO: 1596174 - RNA, 21 nt, Human coronavirus 229E
uucaauguaaccacacuuugc

SEQ ID NO: 1596175 - RNA, 14 nt, Human coronavirus 229E
uucauuguuauucu

SEQ ID NO: 1596176 - RNA, 19 nt, Human coronavirus 229E
auuacugugaccuugcuga

SEQ ID NO: 1596177 - RNA, 22 nt, Human coronavirus 229E
agaaauuugcuacuauguuacu

SEQ ID NO: 1596178 - RNA, 15 nt, Human coronavirus 229E
agcuuggcacugcug

SEQ ID NO: 1596179 - RNA, 19 nt, Human coronavirus 229E
auuuagagagcguguugaa

SEQ ID NO: 1596180 - RNA, 17 nt, Human coronavirus 229E
ugucgcuaccuguuuau

SEQ ID NO: 1596181 - RNA, 16 nt, Human coronavirus 229E
ugaaucaacuaaacuu

SEQ ID NO: 1596182 - RNA, 15 nt, Human coronavirus 229E
acugaacgaaaagau

SEQ ID NO: 1596183 - RNA, 19 nt, Human coronavirus 229E
uaguuuuggugacuacaac

SEQ ID NO: 1596184 - RNA, 20 nt, Human coronavirus 229E
gccacucguacuugcuuugu

SEQ ID NO: 1596185 - RNA, 17 nt, Human coronavirus 229E
aagcaugaaaugcaaaa

SEQ ID NO: 1596186 - RNA, 20 nt, Human coronavirus 229E
gagcacuacuauaauuuaua

SEQ ID NO: 1596187 - RNA, 21 nt, Human coronavirus 229E
aucaacacucguuaugugggu

SEQ ID NO: 1596188 - RNA, 22 nt, Human coronavirus 229E
ugcuucauuuuuucuaaacuga

SEQ ID NO: 1596189 - RNA, 19 nt, Human coronavirus 229E
ugucacauuuguuaacauu

SEQ ID NO: 1596190 - RNA, 16 nt, Human coronavirus 229E
aaugucaaaugacaau

SEQ ID NO: 1596191 - RNA, 13 nt, Human coronavirus 229E
acagcuuggcacu

SEQ ID NO: 1596192 - RNA, 17 nt, Human coronavirus 229E
ugcacagacgcuguuuu

SEQ ID NO: 1596193 - RNA, 14 nt, Human coronavirus 229E
uuaauuacacuguu

SEQ ID NO: 1596194 - RNA, 14 nt, Human coronavirus 229E
agcaugaaaugcaa

SEQ ID NO: 1596195 - RNA, 23 nt, Human coronavirus 229E
augcauucacuagagaaaugcaa

SEQ ID NO: 1596196 - RNA, 13 nt, Human coronavirus 229E
uucgauauggaua

SEQ ID NO: 1596197 - RNA, 16 nt, Human coronavirus 229E
aguuuguuauuucacg

SEQ ID NO: 1596198 - RNA, 14 nt, Human coronavirus 229E
acaucuaaugucac

SEQ ID NO: 1596199 - RNA, 18 nt, Human coronavirus 229E
acuugugucugcuguuaa

SEQ ID NO: 1596200 - RNA, 13 nt, Human coronavirus 229E
aaccucuauugcu

SEQ ID NO: 1596201 - RNA, 20 nt, Human coronavirus 229E
ccuaucguaguugauugcuc

SEQ ID NO: 1596202 - RNA, 13 nt, Human coronavirus 229E
cuaccuguuuauc

SEQ ID NO: 1596203 - RNA, 16 nt, Human coronavirus 229E
cacaaugguaagccag

SEQ ID NO: 1596204 - RNA, 21 nt, Human coronavirus 229E
guugagcuaccugugucuauu

SEQ ID NO: 1596205 - RNA, 23 nt, Human coronavirus 229E
uguaaccacacuuugcuaugcaa

SEQ ID NO: 1596206 - RNA, 11 nt, Human coronavirus 229E
uuacugugacc

SEQ ID NO: 1596207 - RNA, 16 nt, Human coronavirus 229E
ucuuauacacaauggu

SEQ ID NO: 1596208 - RNA, 15 nt, Human coronavirus 229E
cugcuuugaauguau

SEQ ID NO: 1596209 - RNA, 13 nt, Human coronavirus 229E
uuugcuuguugau

SEQ ID NO: 1596210 - RNA, 23 nt, Human coronavirus 229E
uacaaauugccaaauuacacugu

SEQ ID NO: 1596211 - RNA, 14 nt, Human coronavirus 229E
aagaacaaaagcau

SEQ ID NO: 1596212 - RNA, 22 nt, Human coronavirus 229E
ugcucuuuacaaagaaggcaau

SEQ ID NO: 1596213 - RNA, 14 nt, Human coronavirus 229E
ucaauuuugaagaa

SEQ ID NO: 1596214 - RNA, 18 nt, Human coronavirus 229E
agcaaugcgaaaguuagu

SEQ ID NO: 1596215 - RNA, 13 nt, Human coronavirus 229E
uugaaaagaucca

SEQ ID NO: 1596216 - RNA, 22 nt, Human coronavirus 229E
aacucauugaaccauuuaacuu

SEQ ID NO: 1596217 - RNA, 21 nt, Human coronavirus 229E
accuaucuaguuaguaacugc

SEQ ID NO: 1596218 - RNA, 15 nt, Human coronavirus 229E
aaugugucacaaacc

SEQ ID NO: 1596219 - RNA, 17 nt, Human coronavirus 229E
cugcugaaccagugcgu

SEQ ID NO: 1596220 - RNA, 20 nt, Human coronavirus 229E
cuugaaaauaaggcucugaa

SEQ ID NO: 1596221 - RNA, 17 nt, Human coronavirus 229E
uugaagaugcuuguacu

SEQ ID NO: 1596222 - RNA, 23 nt, Human coronavirus 229E
gacaucaugaaggcaguugcugc

SEQ ID NO: 1596223 - RNA, 16 nt, Human coronavirus 229E
uccacuuauguuugca

SEQ ID NO: 1596224 - RNA, 21 nt, Human coronavirus 229E
agaggugauuguaaagguuuu

SEQ ID NO: 1596225 - RNA, 16 nt, Human coronavirus 229E
guuguguauuuugcuu

SEQ ID NO: 1596226 - RNA, 22 nt, Human coronavirus 229E
acacuaaugagccucuuuguug

SEQ ID NO: 1596227 - RNA, 21 nt, Human coronavirus 229E
cagaaaauguauuugcuguug

SEQ ID NO: 1596228 - RNA, 23 nt, Human coronavirus 229E
agaacugccgaaauuuuucuaug

SEQ ID NO: 1596229 - RNA, 12 nt, Human coronavirus 229E
caguuucagacu

SEQ ID NO: 1596230 - RNA, 16 nt, Human coronavirus 229E
ugagaugcucacuuuu

SEQ ID NO: 1596231 - RNA, 16 nt, Human coronavirus 229E
ugcucguucucagagu

SEQ ID NO: 1596232 - RNA, 15 nt, Human coronavirus 229E
ucaauaccauuuuca

SEQ ID NO: 1596233 - RNA, 12 nt, Human coronavirus 229E
agguuaaugcaa

SEQ ID NO: 1596234 - RNA, 15 nt, Human coronavirus 229E
ucgugcucaucuuug

SEQ ID NO: 1596235 - RNA, 13 nt, Human coronavirus 229E
uauugaaacugac

SEQ ID NO: 1596236 - RNA, 18 nt, Human coronavirus 229E
caacuuuggaagugcagg

SEQ ID NO: 1596237 - RNA, 21 nt, Human coronavirus 229E
uuauuguaccaacaacacuuu

SEQ ID NO: 1596238 - RNA, 21 nt, Human coronavirus 229E
ugcagaugguucuauaauugc

SEQ ID NO: 1596239 - RNA, 23 nt, Human coronavirus 229E
ccaagacgugaaagauggcacug

SEQ ID NO: 1596240 - RNA, 13 nt, Human coronavirus 229E
aauugcuguucaa

SEQ ID NO: 1596241 - RNA, 12 nt, Human coronavirus 229E
uguaccagaugg

SEQ ID NO: 1596242 - RNA, 13 nt, Human coronavirus 229E
gcauuacugugac

SEQ ID NO: 1596243 - RNA, 17 nt, Human coronavirus 229E
uugaugaaguaaacuaa

SEQ ID NO: 1596244 - RNA, 17 nt, Human coronavirus 229E
ugcuguauuggucucaa

SEQ ID NO: 1596245 - RNA, 20 nt, Human coronavirus 229E
aacgaaagauugcuucauuu

SEQ ID NO: 1596246 - RNA, 11 nt, Human coronavirus 229E
ccaacaaugga

SEQ ID NO: 1596247 - RNA, 16 nt, Human coronavirus 229E
aguccugcuucuucuc

SEQ ID NO: 1596248 - RNA, 24 nt, Human coronavirus 229E
ccuaucguaguugauugcuccacu

SEQ ID NO: 1596249 - RNA, 22 nt, Human coronavirus 229E
uguauucguuucucauacauug

SEQ ID NO: 1596250 - RNA, 16 nt, Human coronavirus 229E
auaacuuuguuaaauu

SEQ ID NO: 1596251 - RNA, 19 nt, Human coronavirus 229E
gauuucuaaacuaaacgac

SEQ ID NO: 1596252 - RNA, 19 nt, Human coronavirus 229E
uugcaacuugugucugcug

SEQ ID NO: 1596253 - RNA, 12 nt, Human coronavirus 229E
agcuuggcacug

SEQ ID NO: 1596254 - RNA, 12 nt, Human coronavirus 229E
cagagcugcucu

SEQ ID NO: 1596255 - RNA, 16 nt, Human coronavirus 229E
cguauacacuaaugag

SEQ ID NO: 1596256 - RNA, 18 nt, Human coronavirus 229E
guuugauagucacauugu

SEQ ID NO: 1596257 - RNA, 20 nt, Human coronavirus 229E
uauccugcugguguuaauau

SEQ ID NO: 1596258 - RNA, 16 nt, Human coronavirus 229E
uauaguguuuaaaauu

SEQ ID NO: 1596259 - RNA, 20 nt, Human coronavirus 229E
uuauguguugcgacaaccua

SEQ ID NO: 1596260 - RNA, 13 nt, Human coronavirus 229E
ugugguugugcau

SEQ ID NO: 1596261 - RNA, 13 nt, Human coronavirus 229E
uucuuuaguuguu

SEQ ID NO: 1596262 - RNA, 15 nt, Human coronavirus 229E
ucacauaccauuugg

SEQ ID NO: 1596263 - RNA, 23 nt, Human coronavirus 229E
uugucaaacuacaaaugggcuga

SEQ ID NO: 1596264 - RNA, 23 nt, Human coronavirus 229E
aagcauauauuuacgcaacuuug

SEQ ID NO: 1596265 - RNA, 23 nt, Human coronavirus 229E
gcggagcuuaauuacacuguuca

SEQ ID NO: 1596266 - RNA, 16 nt, Human coronavirus 229E
cuauguuacugaaccu

SEQ ID NO: 1596267 - RNA, 16 nt, Human coronavirus 229E
uggcagauuuuguuca

SEQ ID NO: 1596268 - RNA, 18 nt, Human coronavirus 229E
ccugcuucuucucaaacu

SEQ ID NO: 1596269 - RNA, 13 nt, Human coronavirus 229E
uaaaacugaaccu

SEQ ID NO: 1596270 - RNA, 13 nt, Human coronavirus 229E
acugcugaaccag

SEQ ID NO: 1596271 - RNA, 17 nt, Human coronavirus 229E
aauccuuuucguuuaug

SEQ ID NO: 1596272 - RNA, 14 nt, Human coronavirus 229E
guccaauggcacuu

SEQ ID NO: 1596273 - RNA, 20 nt, Human coronavirus 229E
uacuggcgucccacaaccug

SEQ ID NO: 1596274 - RNA, 13 nt, Human coronavirus 229E
acuagagaaaugc

SEQ ID NO: 1596275 - RNA, 21 nt, Human coronavirus 229E
agaauucaacccaucucaaac

SEQ ID NO: 1596276 - RNA, 17 nt, Human coronavirus 229E
guugauagugaacaacc

SEQ ID NO: 1596277 - RNA, 19 nt, Human coronavirus 229E
auacuccagauuguuuuau

SEQ ID NO: 1596278 - RNA, 23 nt, Human coronavirus 229E
cggagcuuaauuacacuguucaa

SEQ ID NO: 1596279 - RNA, 14 nt, Human coronavirus 229E
uguugguuucuuga

SEQ ID NO: 1596280 - RNA, 22 nt, Human coronavirus 229E
uuauauacccuccgacuuugca

SEQ ID NO: 1596281 - RNA, 17 nt, Human coronavirus 229E
cuauguuacugaaccua

SEQ ID NO: 1596282 - RNA, 13 nt, Human coronavirus 229E
uguugguuucuug

SEQ ID NO: 1596283 - RNA, 23 nt, Human coronavirus 229E
cuucuauuagagguuguugugaa

SEQ ID NO: 1596284 - RNA, 23 nt, Human coronavirus 229E
ucaauauuauaauggcauuaugg

SEQ ID NO: 1596285 - RNA, 16 nt, Human coronavirus 229E
ugaugaaguaaacuaa

SEQ ID NO: 1596286 - RNA, 14 nt, Human coronavirus 229E
cuuggcacaggacc

SEQ ID NO: 1596287 - RNA, 14 nt, Human coronavirus 229E
auuggcugcuuuga

SEQ ID NO: 1596288 - RNA, 17 nt, Human coronavirus 229E
cuauuggaauguucaaa

SEQ ID NO: 1596289 - RNA, 23 nt, Human coronavirus 229E
cugcugaaccagugcgugaugaa

SEQ ID NO: 1596290 - RNA, 16 nt, Human coronavirus 229E
ucacaagcccuacaaa

SEQ ID NO: 1596291 - RNA, 16 nt, Human coronavirus 229E
uggugacuacaaccuu

SEQ ID NO: 1596292 - RNA, 12 nt, Human coronavirus 229E
uaaaacugaacc

SEQ ID NO: 1596293 - RNA, 13 nt, Human coronavirus 229E
aguauaacucauu

SEQ ID NO: 1596294 - RNA, 18 nt, Human coronavirus 229E
auugcuuuguaaauacua

SEQ ID NO: 1596295 - RNA, 20 nt, Human coronavirus 229E
gaaaacgaaagauugcuuca

SEQ ID NO: 1596296 - RNA, 23 nt, Human coronavirus 229E
agaucacaccguggcagagcugc

SEQ ID NO: 1596297 - RNA, 15 nt, Human coronavirus 229E
aauuacacuguucaa

SEQ ID NO: 1596298 - RNA, 19 nt, Human coronavirus 229E
ugcuuguaaaacuauugaa

SEQ ID NO: 1596299 - RNA, 15 nt, Human coronavirus 229E
aaugucaaaugacaa

SEQ ID NO: 1596300 - RNA, 16 nt, Human coronavirus 229E
ucagcaagcuguuguu

SEQ ID NO: 1596301 - RNA, 14 nt, Human coronavirus 229E
cuugaggaguuaaa

SEQ ID NO: 1596302 - RNA, 13 nt, Human coronavirus 229E
ggacuuggcacug

SEQ ID NO: 1596303 - RNA, 17 nt, Human coronavirus 229E
gcuaucgcuauuucacu

SEQ ID NO: 1596304 - RNA, 15 nt, Human coronavirus 229E
gcuguauuggucuca

SEQ ID NO: 1596305 - RNA, 18 nt, Human coronavirus 229E
ucgauauggauacacaaa

SEQ ID NO: 1596306 - RNA, 23 nt, Human coronavirus 229E
auaauggcauuaugguuuugccu

SEQ ID NO: 1596307 - RNA, 16 nt, Human coronavirus 229E
cucuuauaguguuuaa

SEQ ID NO: 1596308 - RNA, 17 nt, Human coronavirus 229E
ccugagguuaaugcaau

SEQ ID NO: 1596309 - RNA, 18 nt, Human coronavirus 229E
uaugcuguuugauaguca

SEQ ID NO: 1596310 - RNA, 15 nt, Human coronavirus 229E
cuagagaaaugcaac

SEQ ID NO: 1596311 - RNA, 13 nt, Human coronavirus 229E
accugcaacugcu

SEQ ID NO: 1596312 - RNA, 22 nt, Human coronavirus 229E
aucacaccguggcagagcugcu

SEQ ID NO: 1596313 - RNA, 19 nt, Human coronavirus 229E
gccacucguacuugcuuug

SEQ ID NO: 1596314 - RNA, 13 nt, Human coronavirus 229E
acauagauuggcu

SEQ ID NO: 1596315 - RNA, 23 nt, Human coronavirus 229E
cuaguuacucuguuugcaacggc

SEQ ID NO: 1596316 - RNA, 15 nt, Human coronavirus 229E
cuuguuacuucugga

SEQ ID NO: 1596317 - RNA, 22 nt, Human coronavirus 229E
acuuuuugggcauggaauccug

SEQ ID NO: 1596318 - RNA, 14 nt, Human coronavirus 229E
aauggaagagccag

SEQ ID NO: 1596319 - RNA, 15 nt, Human coronavirus 229E
cuuguugauagugaa

SEQ ID NO: 1596320 - RNA, 23 nt, Human coronavirus 229E
gcaaaguuaauaacuuuguuaaa

SEQ ID NO: 1596321 - RNA, 20 nt, Human coronavirus 229E
cugcaacugcugaaccagug

SEQ ID NO: 1596322 - RNA, 16 nt, Human coronavirus 229E
agaucagcuuguuguu

SEQ ID NO: 1596323 - RNA, 19 nt, Human coronavirus 229E
agauuggcugcuuugaaug

SEQ ID NO: 1596324 - RNA, 15 nt, Human coronavirus 229E
caguuuauggcccca

SEQ ID NO: 1596325 - RNA, 23 nt, Human coronavirus 229E
augugcgcuguguugaauugcuu

SEQ ID NO: 1596326 - RNA, 18 nt, Human coronavirus 229E
ccguggcagagcugcucu

SEQ ID NO: 1596327 - RNA, 12 nt, Human coronavirus 229E
aaucaaaagcuc

SEQ ID NO: 1596328 - RNA, 16 nt, Human coronavirus 229E
cuguaauuuugcuugg

SEQ ID NO: 1596329 - RNA, 12 nt, Human coronavirus 229E
cuugcugcaucu

SEQ ID NO: 1596330 - RNA, 23 nt, Human coronavirus 229E
guucaaccacguaauguuucaua

SEQ ID NO: 1596331 - RNA, 16 nt, Human coronavirus 229E
acgaaagauugcuuca

SEQ ID NO: 1596332 - RNA, 22 nt, Human coronavirus 229E
aaugagccucuuuguuguguau

SEQ ID NO: 1596333 - RNA, 16 nt, Human coronavirus 229E
cagucauuugucuuga

SEQ ID NO: 1596334 - RNA, 15 nt, Human coronavirus 229E
gcuccugaggggcuu

SEQ ID NO: 1596335 - RNA, 22 nt, Human coronavirus 229E
acugguagauuggcugcuuuga

SEQ ID NO: 1596336 - RNA, 16 nt, Human coronavirus 229E
agauggcacuguuacc

SEQ ID NO: 1596337 - RNA, 22 nt, Human coronavirus 229E
uaacaagauccaggauguuguu

SEQ ID NO: 1596338 - RNA, 16 nt, Human coronavirus 229E
cuggcucuacaagaca

SEQ ID NO: 1596339 - RNA, 15 nt, Human coronavirus 229E
caagcccuacaaaca

SEQ ID NO: 1596340 - RNA, 18 nt, Human coronavirus 229E
acuaguuacucuguuugc

SEQ ID NO: 1596341 - RNA, 16 nt, Human coronavirus 229E
aggugaacgcuaguau

SEQ ID NO: 1596342 - RNA, 17 nt, Human coronavirus 229E
cauuggacaaauguacu

SEQ ID NO: 1596343 - RNA, 15 nt, Human coronavirus 229E
uggucgcagugccau

SEQ ID NO: 1596344 - RNA, 18 nt, Human coronavirus 229E
auacuauaggcucauugu

SEQ ID NO: 1596345 - RNA, 22 nt, Human coronavirus 229E
ucauugaaccauuuaacuucuc

SEQ ID NO: 1596346 - RNA, 16 nt, Human coronavirus 229E
cuucaccugcaacugc

SEQ ID NO: 1596347 - RNA, 21 nt, Human coronavirus 229E
caacauccucuucuuaacccu

SEQ ID NO: 1596348 - RNA, 19 nt, Human coronavirus 229E
ugaccacaacuuuggaagu

SEQ ID NO: 1596349 - RNA, 17 nt, Human coronavirus 229E
ucauacguuacaaccuc

SEQ ID NO: 1596350 - RNA, 13 nt, Human coronavirus 229E
ccucaauuuugaa

SEQ ID NO: 1596351 - RNA, 21 nt, Human coronavirus 229E
uucaaccacguaauguuucau

SEQ ID NO: 1596352 - RNA, 14 nt, Human coronavirus 229E
cuugcuuugucaau

SEQ ID NO: 1596353 - RNA, 12 nt, Human coronavirus 229E
cacacuuugcua

SEQ ID NO: 1596354 - RNA, 12 nt, Human coronavirus 229E
uugccuguuuuu

SEQ ID NO: 1596355 - RNA, 22 nt, Human coronavirus 229E
ugaucaugcuuugguuguuaau

SEQ ID NO: 1596356 - RNA, 15 nt, Human coronavirus 229E
guuacaaccucaauu

SEQ ID NO: 1596357 - RNA, 15 nt, Human coronavirus 229E
acugcacuuaacaag

SEQ ID NO: 1596358 - RNA, 16 nt, Human coronavirus 229E
auugcaaacucugauu

SEQ ID NO: 1596359 - RNA, 14 nt, Human coronavirus 229E
caagagucuugcuc

SEQ ID NO: 1596360 - RNA, 12 nt, Human coronavirus 229E
guaaguuucuug

SEQ ID NO: 1596361 - RNA, 17 nt, Human coronavirus 229E
ugacaagccucaggaaa

SEQ ID NO: 1596362 - RNA, 16 nt, Human coronavirus 229E
aguugcuacugcacuu

SEQ ID NO: 1596363 - RNA, 11 nt, Human coronavirus 229E
cuauaauugcu

SEQ ID NO: 1596364 - RNA, 11 nt, Human coronavirus 229E
gccauugcugu

SEQ ID NO: 1596365 - RNA, 19 nt, Human coronavirus 229E
uugauugcuccacuuaugu

SEQ ID NO: 1596366 - RNA, 20 nt, Human coronavirus 229E
acuugacacuauucaggcug

SEQ ID NO: 1596367 - RNA, 17 nt, Human coronavirus 229E
cugguagauuggcugcu

SEQ ID NO: 1596368 - RNA, 22 nt, Human coronavirus 229E
aucucuagcucuauucaggcua

SEQ ID NO: 1596369 - RNA, 18 nt, Human coronavirus 229E
uuacugaaccuaggugaa

SEQ ID NO: 1596370 - RNA, 13 nt, Human coronavirus 229E
caaauacguugcu

SEQ ID NO: 1596371 - RNA, 20 nt, Human coronavirus 229E
caaacaguugcuacugcacu

SEQ ID NO: 1596372 - RNA, 19 nt, Human coronavirus 229E
cucagauguuuugucugau

SEQ ID NO: 1596373 - RNA, 13 nt, Human coronavirus 229E
uuccaaagaguca

SEQ ID NO: 1596374 - RNA, 17 nt, Human coronavirus 229E
agccguuaauuucaaug

SEQ ID NO: 1596375 - RNA, 11 nt, Human coronavirus 229E
uguauuuugcu

SEQ ID NO: 1596376 - RNA, 14 nt, Human coronavirus 229E
uugauagugaacaa

SEQ ID NO: 1596377 - RNA, 23 nt, Human coronavirus 229E
uuuuuccauacagcuuggcacug

SEQ ID NO: 1596378 - RNA, 18 nt, Human coronavirus 229E
cugacucccgugcuccuu

SEQ ID NO: 1596379 - RNA, 16 nt, Human coronavirus 229E
uagaauucaacccauc

SEQ ID NO: 1596380 - RNA, 23 nt, Human coronavirus 229E
uugaaacugacauaauugaugaa

SEQ ID NO: 1596381 - RNA, 14 nt, Human coronavirus 229E
cuguauuggucuca

SEQ ID NO: 1596382 - RNA, 15 nt, Human coronavirus 229E
auaaagaugcaaaau

SEQ ID NO: 1596383 - RNA, 20 nt, Human coronavirus 229E
uguaauuuugcuuggaagau

SEQ ID NO: 1596384 - RNA, 19 nt, Human coronavirus 229E
acuuugcauucaauaauug

SEQ ID NO: 1596385 - RNA, 16 nt, Human coronavirus 229E
ugcauucaauaauugg

SEQ ID NO: 1596386 - RNA, 20 nt, Human coronavirus 229E
ugggcugaacacuaguuacu

SEQ ID NO: 1596387 - RNA, 13 nt, Human coronavirus 229E
cuucuuuggccac

SEQ ID NO: 1596388 - RNA, 22 nt, Human coronavirus 229E
uuguugcuuaauugcuuauggu

SEQ ID NO: 1596389 - RNA, 21 nt, Human coronavirus 229E
ccuagugcacuagaauucaac

SEQ ID NO: 1596390 - RNA, 13 nt, Human coronavirus 229E
ugauugacaacau

SEQ ID NO: 1596391 - RNA, 16 nt, Human coronavirus 229E
gaaaauaaggcucuga

SEQ ID NO: 1596392 - RNA, 15 nt, Human coronavirus 229E
agaggugauuguaaa

SEQ ID NO: 1596393 - RNA, 18 nt, Human coronavirus 229E
ucaauguaaccacacuuu

SEQ ID NO: 1596394 - RNA, 18 nt, Human coronavirus 229E
acuccagauuguuuuaug

SEQ ID NO: 1596395 - RNA, 17 nt, Human coronavirus 229E
guuauugauuucuaaac

SEQ ID NO: 1596396 - RNA, 17 nt, Human coronavirus 229E
cuuuacugguguuaaug

SEQ ID NO: 1596397 - RNA, 23 nt, Human coronavirus 229E
cagauguuagugagaugcucacu

SEQ ID NO: 1596398 - RNA, 23 nt, Human coronavirus 229E
ugcaaugucacauuuguuaacau

SEQ ID NO: 1596399 - RNA, 13 nt, Human coronavirus 229E
uugauagugaaca

SEQ ID NO: 1596400 - RNA, 20 nt, Human coronavirus 229E
acacuggccaauuuuaauga

SEQ ID NO: 1596401 - RNA, 14 nt, Human coronavirus 229E
cacccaagcugcau

SEQ ID NO: 1596402 - RNA, 12 nt, Human coronavirus 229E
ugcuuaauugcu

SEQ ID NO: 1596403 - RNA, 23 nt, Human coronavirus 229E
uucaauccguugagcuaccugug

SEQ ID NO: 1596404 - RNA, 19 nt, Human coronavirus 229E
ugugucugcuguuaaucaa

SEQ ID NO: 1596405 - RNA, 14 nt, Human coronavirus 229E
acucuguuugcaac

SEQ ID NO: 1596406 - RNA, 15 nt, Human coronavirus 229E
ugcuacuauguuacu

SEQ ID NO: 1596407 - RNA, 21 nt, Human coronavirus 229E
gaaccagugcgugaugaaguu

SEQ ID NO: 1596408 - RNA, 13 nt, Human coronavirus 229E
ggcagagcugcuc

SEQ ID NO: 1596409 - RNA, 20 nt, Human coronavirus 229E
gagagauuuggcgccuuggu

SEQ ID NO: 1596410 - RNA, 14 nt, Human coronavirus 229E
gccuauaguggcua

SEQ ID NO: 1596411 - RNA, 22 nt, Human coronavirus 229E
gcaagaauucagaaccagagau

SEQ ID NO: 1596412 - RNA, 13 nt, Human coronavirus 229E
uauguugucugaa

SEQ ID NO: 1596413 - RNA, 13 nt, Human coronavirus 229E
ucuaaacugaacg

SEQ ID NO: 1596414 - RNA, 18 nt, Human coronavirus 229E
uaaucuugcucuuuacaa

SEQ ID NO: 1596415 - RNA, 18 nt, Human coronavirus 229E
cauuugaagaauuggaau

SEQ ID NO: 1596416 - RNA, 20 nt, Human coronavirus 229E
cuuguacuguggcuucuuug

SEQ ID NO: 1596417 - RNA, 14 nt, Human coronavirus 229E
cuagagaaaugcaa

SEQ ID NO: 1596418 - RNA, 20 nt, Human coronavirus 229E
cagacuacaaaaagugcacu

SEQ ID NO: 1596419 - RNA, 16 nt, Human coronavirus 229E
aucuuggcacaggacc

SEQ ID NO: 1596420 - RNA, 18 nt, Human coronavirus 229E
cuuauaggcuauuggaau

SEQ ID NO: 1596421 - RNA, 22 nt, Human coronavirus 229E
caauggcacuuauaauugcaca

SEQ ID NO: 1596422 - RNA, 13 nt, Human coronavirus 229E
uuaauuaacauga

SEQ ID NO: 1596423 - RNA, 19 nt, Human coronavirus 229E
uguaauagaacaguuuaug

SEQ ID NO: 1596424 - RNA, 21 nt, Human coronavirus 229E
acucauuacaaaugugcugga

SEQ ID NO: 1596425 - RNA, 13 nt, Human coronavirus 229E
uugcucuuuacaa

SEQ ID NO: 1596426 - RNA, 23 nt, Human coronavirus 229E
uuauacacaaugguaagccagug

SEQ ID NO: 1596427 - RNA, 19 nt, Human coronavirus 229E
ugugcguugaugguacaaa

SEQ ID NO: 1596428 - RNA, 20 nt, Human coronavirus 229E
cgucacagcuaauuugucua

SEQ ID NO: 1596429 - RNA, 16 nt, Human coronavirus 229E
gugcuuuaacuguuau

SEQ ID NO: 1596430 - RNA, 21 nt, Human coronavirus 229E
uacgcaacuuugauugcugua

SEQ ID NO: 1596431 - RNA, 23 nt, Human coronavirus 229E
aagguccguaaauucacaaaaua

SEQ ID NO: 1596432 - RNA, 13 nt, Human coronavirus 229E
ugcaaacucugau

SEQ ID NO: 1596433 - RNA, 23 nt, Human coronavirus 229E
cucauugaaccauuuaacuucuc

SEQ ID NO: 1596434 - RNA, 14 nt, Human coronavirus 229E
accuguuuaucaua

SEQ ID NO: 1596435 - RNA, 14 nt, Human coronavirus 229E
aaugcaaucacugu

SEQ ID NO: 1596436 - RNA, 14 nt, Human coronavirus 229E
cuaauuugucuaua

SEQ ID NO: 1596437 - RNA, 12 nt, Human coronavirus 229E
auauaacgguga

SEQ ID NO: 1596438 - RNA, 13 nt, Human coronavirus 229E
ucaaauugaaaau

SEQ ID NO: 1596439 - RNA, 15 nt, Human coronavirus 229E
cucagccuuucuaga

SEQ ID NO: 1596440 - RNA, 11 nt, Human coronavirus 229E
gacuuggcacu

SEQ ID NO: 1596441 - RNA, 17 nt, Human coronavirus 229E
cugcaacugcugaacca

SEQ ID NO: 1596442 - RNA, 15 nt, Human coronavirus 229E
agugacagaaaccau

SEQ ID NO: 1596443 - RNA, 15 nt, Human coronavirus 229E
caggugaugcucaca

SEQ ID NO: 1596444 - RNA, 13 nt, Human coronavirus 229E
cacauuuguuaac

SEQ ID NO: 1596445 - RNA, 11 nt, Human coronavirus 229E
gaauugcuuua

SEQ ID NO: 1596446 - RNA, 16 nt, Human coronavirus 229E
auuaagcuuuguuuca

SEQ ID NO: 1596447 - RNA, 21 nt, Human coronavirus 229E
uccacacuuggguaaguuucu

SEQ ID NO: 1596448 - RNA, 17 nt, Human coronavirus 229E
ugugcuggaguaaucaa

SEQ ID NO: 1596449 - RNA, 17 nt, Human coronavirus 229E
cucaggaaaaagauaaa

SEQ ID NO: 1596450 - RNA, 20 nt, Human coronavirus 229E
gagugacugugcccaaagac

SEQ ID NO: 1596451 - RNA, 21 nt, Human coronavirus 229E
guuacaaauugccaaauuaca

SEQ ID NO: 1596452 - RNA, 23 nt, Human coronavirus 229E
aguuccuuuaugaauguuacauu

SEQ ID NO: 1596453 - RNA, 19 nt, Human coronavirus 229E
ccacaacuuuggaagugca

SEQ ID NO: 1596454 - RNA, 14 nt, Human coronavirus 229E
aacaagaaagacaa

SEQ ID NO: 1596455 - RNA, 15 nt, Human coronavirus 229E
cucugaguugcaaac

SEQ ID NO: 1596456 - RNA, 21 nt, Human coronavirus 229E
uaauugggccuuuguugcauu

SEQ ID NO: 1596457 - RNA, 13 nt, Human coronavirus 229E
agacugauguuuu

SEQ ID NO: 1596458 - RNA, 12 nt, Human coronavirus 229E
ugaauguuacau

SEQ ID NO: 1596459 - RNA, 18 nt, Human coronavirus 229E
aaugaugaugugacaucu

SEQ ID NO: 1596460 - RNA, 21 nt, Human coronavirus 229E
auauaugcacauagacccuuu

SEQ ID NO: 1596461 - RNA, 14 nt, Human coronavirus 229E
acuuaaaguggcuc

SEQ ID NO: 1596462 - RNA, 17 nt, Human coronavirus 229E
gaugcaucugaaccaca

SEQ ID NO: 1596463 - RNA, 12 nt, Human coronavirus 229E
ccuaagccuucu

SEQ ID NO: 1596464 - RNA, 18 nt, Human coronavirus 229E
ccuuguugcauauugcug

SEQ ID NO: 1596465 - RNA, 21 nt, Human coronavirus 229E
uuagacguggaaccauuuugu

SEQ ID NO: 1596466 - RNA, 16 nt, Human coronavirus 229E
uaaauuauguugcauu

SEQ ID NO: 1596467 - RNA, 20 nt, Human coronavirus 229E
uuuaauugguggaauugcuu

SEQ ID NO: 1596468 - RNA, 17 nt, Human coronavirus 229E
auuguuuuaugguuuga

SEQ ID NO: 1596469 - RNA, 20 nt, Human coronavirus 229E
aaucaaucgcuuagcaaugc

SEQ ID NO: 1596470 - RNA, 20 nt, Human coronavirus 229E
gaugguucuauaauugcugu

SEQ ID NO: 1596471 - RNA, 17 nt, Human coronavirus 229E
uucacuagagaaaugca

SEQ ID NO: 1596472 - RNA, 19 nt, Human coronavirus 229E
cuucagguaaccuucuggg

SEQ ID NO: 1596473 - RNA, 19 nt, Human coronavirus 229E
aagacaaaaauaagcuuau

SEQ ID NO: 1596474 - RNA, 19 nt, Human coronavirus 229E
uaaaugcauucacuagaga

SEQ ID NO: 1596475 - RNA, 20 nt, Human coronavirus 229E
aaacaugccacuguguuguu

SEQ ID NO: 1596476 - RNA, 14 nt, Human coronavirus 229E
ugucgcuaccuguu

SEQ ID NO: 1596477 - RNA, 13 nt, Human coronavirus 229E
auugcuuuucucu

SEQ ID NO: 1596478 - RNA, 19 nt, Human coronavirus 229E
cuugcgguuuacuacuggu

SEQ ID NO: 1596479 - RNA, 12 nt, Human coronavirus 229E
ggugaaugugua

SEQ ID NO: 1596480 - RNA, 14 nt, Human coronavirus 229E
uucuaaacugaacg

SEQ ID NO: 1596481 - RNA, 21 nt, Human coronavirus 229E
ugauggugcuaaaacugaacc

SEQ ID NO: 1596482 - RNA, 17 nt, Human coronavirus 229E
aauugaaaauugcaaug

SEQ ID NO: 1596483 - RNA, 17 nt, Human coronavirus 229E
gaugucauacguuacaa

SEQ ID NO: 1596484 - RNA, 18 nt, Human coronavirus 229E
uguguuuuauuguaccaa

SEQ ID NO: 1596485 - RNA, 19 nt, Human coronavirus 229E
ccugcaacugcugaaccag

SEQ ID NO: 1596486 - RNA, 21 nt, Human coronavirus 229E
uauucuacaagcccuauucaa

SEQ ID NO: 1596487 - RNA, 17 nt, Human coronavirus 229E
acuuggcuugugcucaa

SEQ ID NO: 1596488 - RNA, 19 nt, Human coronavirus 229E
agguuaaugcaaucacugu

SEQ ID NO: 1596489 - RNA, 16 nt, Human coronavirus 229E
auugguggaauugcuu

SEQ ID NO: 1596490 - RNA, 15 nt, Human coronavirus 229E
ucaacuaacgacuug

SEQ ID NO: 1596491 - RNA, 19 nt, Human coronavirus 229E
acacaaugguaagccagug

SEQ ID NO: 1596492 - RNA, 22 nt, Human coronavirus 229E
aaguguugguuucuugaaaaua

SEQ ID NO: 1596493 - RNA, 18 nt, Human coronavirus 229E
gcaaacaguuucagacuu

SEQ ID NO: 1596494 - RNA, 18 nt, Human coronavirus 229E
aagaauucagaaccagag

SEQ ID NO: 1596495 - RNA, 14 nt, Human coronavirus 229E
uggccccagagacc

SEQ ID NO: 1596496 - RNA, 18 nt, Human coronavirus 229E
agucgcggucguggugaa

SEQ ID NO: 1596497 - RNA, 20 nt, Human coronavirus 229E
guuauuucacgcacaggaca

SEQ ID NO: 1596498 - RNA, 16 nt, Human coronavirus 229E
ugcaacaacauccucu

SEQ ID NO: 1596499 - RNA, 13 nt, Human coronavirus 229E
aagacagccuaau

SEQ ID NO: 1596500 - RNA, 15 nt, Human coronavirus 229E
uauacuucugcuugu

SEQ ID NO: 1596501 - RNA, 16 nt, Human coronavirus 229E
ucuugcugcaucuuuu

SEQ ID NO: 1596502 - RNA, 20 nt, Human coronavirus 229E
ucaauguaaccacacuuugc

SEQ ID NO: 1596503 - RNA, 15 nt, Human coronavirus 229E
gaaaguuagugcuga

SEQ ID NO: 1596504 - RNA, 22 nt, Human coronavirus 229E
uguugauggugcuaaaacugaa

SEQ ID NO: 1596505 - RNA, 20 nt, Human coronavirus 229E
cgcuguguugaauugcuuaa

SEQ ID NO: 1596506 - RNA, 19 nt, Human coronavirus 229E
gcugcuuugaauguauucg

SEQ ID NO: 1596507 - RNA, 15 nt, Human coronavirus 229E
ucugaaaauuuuacu

SEQ ID NO: 1596508 - RNA, 17 nt, Human coronavirus 229E
aguggcuaauugggcuu

SEQ ID NO: 1596509 - RNA, 21 nt, Human coronavirus 229E
acauaguagaugccuuuacug

SEQ ID NO: 1596510 - RNA, 20 nt, Human coronavirus 229E
gauuguuuuaugguuugaag

SEQ ID NO: 1596511 - RNA, 23 nt, Human coronavirus 229E
ugauagugaacaaccuuggaagg

SEQ ID NO: 1596512 - RNA, 12 nt, Human coronavirus 229E
uaaggcucugaa

SEQ ID NO: 1596513 - RNA, 15 nt, Human coronavirus 229E
aaccauugugccaga

SEQ ID NO: 1596514 - RNA, 21 nt, Human coronavirus 229E
uaacucauuacaaaugugcug

SEQ ID NO: 1596515 - RNA, 22 nt, Human coronavirus 229E
uauugugucgcuaccuguuuau

SEQ ID NO: 1596516 - RNA, 14 nt, Human coronavirus 229E
aagaaauuugcuac

SEQ ID NO: 1596517 - RNA, 20 nt, Human coronavirus 229E
augcgaaaguuagugcugaa

SEQ ID NO: 1596518 - RNA, 16 nt, Human coronavirus 229E
auguugucugaaaauu

SEQ ID NO: 1596519 - RNA, 18 nt, Human coronavirus 229E
uuggcaguguauguuuuu

SEQ ID NO: 1596520 - RNA, 14 nt, Human coronavirus 229E
ugagcaacaugaca

SEQ ID NO: 1596521 - RNA, 21 nt, Human coronavirus 229E
ugcaacuugugucugcuguua

SEQ ID NO: 1596522 - RNA, 18 nt, Human coronavirus 229E
uguaaaacuauugaagac

SEQ ID NO: 1596523 - RNA, 22 nt, Human coronavirus 229E
cuaauaccucaucuguuguaga

SEQ ID NO: 1596524 - RNA, 14 nt, Human coronavirus 229E
uaguauaacucauu

SEQ ID NO: 1596525 - RNA, 16 nt, Human coronavirus 229E
gagaggugauuguaaa

SEQ ID NO: 1596526 - RNA, 16 nt, Human coronavirus 229E
ugcuguaauuuugcuu

SEQ ID NO: 1596527 - RNA, 22 nt, Human coronavirus 229E
auucaggcacguuuaaauuaug

SEQ ID NO: 1596528 - RNA, 20 nt, Human coronavirus 229E
uugggcaauuuuuauugcuu

SEQ ID NO: 1596529 - RNA, 16 nt, Human coronavirus 229E
ugaacaaccuuggaag

SEQ ID NO: 1596530 - RNA, 13 nt, Human coronavirus 229E
caugaaaugcaaa

SEQ ID NO: 1596531 - RNA, 14 nt, Human coronavirus 229E
acaugggauuucau

SEQ ID NO: 1596532 - RNA, 17 nt, Human coronavirus 229E
uauguuuuguaauagaa

SEQ ID NO: 1596533 - RNA, 15 nt, Human coronavirus 229E
agcuccaacaggcau

SEQ ID NO: 1596534 - RNA, 15 nt, Human coronavirus 229E
aagcccuacaaacag

SEQ ID NO: 1596535 - RNA, 16 nt, Human coronavirus 229E
aaccacguaauguuuc

SEQ ID NO: 1596536 - RNA, 18 nt, Human coronavirus 229E
aaaaauguguaccacauu

SEQ ID NO: 1596537 - RNA, 15 nt, Human coronavirus 229E
ugcuauguugucuga

SEQ ID NO: 1596538 - RNA, 16 nt, Human coronavirus 229E
acacuggccaauuuua

SEQ ID NO: 1596539 - RNA, 14 nt, Human coronavirus 229E
uaccugugucuauu

SEQ ID NO: 1596540 - RNA, 16 nt, Human coronavirus 229E
uguuaaugaugcuauu

SEQ ID NO: 1596541 - RNA, 16 nt, Human coronavirus 229E
uccugcuucuucucaa

SEQ ID NO: 1596542 - RNA, 16 nt, Human coronavirus 229E
cuaugcguccaauggc

SEQ ID NO: 1596543 - RNA, 11 nt, Human coronavirus 229E
aauugaaaauu

SEQ ID NO: 1596544 - RNA, 23 nt, Human coronavirus 229E
caagguaaguguugguuucuuga

SEQ ID NO: 1596545 - RNA, 16 nt, Human coronavirus 229E
ugcaacugcugaacca

SEQ ID NO: 1596546 - RNA, 23 nt, Human coronavirus 229E
aaacuucaccugcaacugcugaa

SEQ ID NO: 1596547 - RNA, 22 nt, Human coronavirus 229E
gguguuauucgcguuagcaaug

SEQ ID NO: 1596548 - RNA, 22 nt, Human coronavirus 229E
acuauaauuuauaguagagucg

SEQ ID NO: 1596549 - RNA, 20 nt, Human coronavirus 229E
gaacaaaagcaugaaaugca

SEQ ID NO: 1596550 - RNA, 22 nt, Human coronavirus 229E
uucuaugcguccaauggcacuu

SEQ ID NO: 1596551 - RNA, 17 nt, Human coronavirus 229E
gacaagccucaggaaaa

SEQ ID NO: 1596552 - RNA, 15 nt, Human coronavirus 229E
agaaaccacugauuu

SEQ ID NO: 1596553 - RNA, 17 nt, Human coronavirus 229E
augcuauuacacaaacu

SEQ ID NO: 1596554 - RNA, 18 nt, Human coronavirus 229E
caaagaccauccacacuu

SEQ ID NO: 1596555 - RNA, 16 nt, Human coronavirus 229E
cuauuuuaaugguacu

SEQ ID NO: 1596556 - RNA, 15 nt, Human coronavirus 229E
uuuaaaauucuaauc

SEQ ID NO: 1596557 - RNA, 23 nt, Human coronavirus 229E
aguuucuauugaaacugacauaa

SEQ ID NO: 1596558 - RNA, 17 nt, Human coronavirus 229E
uaaugugucacaaaccu

SEQ ID NO: 1596559 - RNA, 20 nt, Human coronavirus 229E
cuuuacugguguuaaugaug

SEQ ID NO: 1596560 - RNA, 15 nt, Human coronavirus 229E
cuguuuuaacuuauu

SEQ ID NO: 1596561 - RNA, 11 nt, Human coronavirus 229E
agccuuuguug

SEQ ID NO: 1596562 - RNA, 12 nt, Human coronavirus 229E
uuuuuauugcuu

SEQ ID NO: 1596563 - RNA, 22 nt, Human coronavirus 229E
uguugguagguggagugcuagu

SEQ ID NO: 1596564 - RNA, 19 nt, Human coronavirus 229E
auuuugaagaaaaccuuag

SEQ ID NO: 1596565 - RNA, 18 nt, Human coronavirus 229E
uaaccacacuuugcuaug

SEQ ID NO: 1596566 - RNA, 23 nt, Human coronavirus 229E
uaaugagccucuuuguuguguau

SEQ ID NO: 1596567 - RNA, 17 nt, Human coronavirus 229E
uuaacuucucaguugag

SEQ ID NO: 1596568 - RNA, 17 nt, Human coronavirus 229E
caaaagcucccaaaugg

SEQ ID NO: 1596569 - RNA, 17 nt, Human coronavirus 229E
auacguugcuguuuaug

SEQ ID NO: 1596570 - RNA, 18 nt, Human coronavirus 229E
cucagauguuuugucuga

SEQ ID NO: 1596571 - RNA, 13 nt, Human coronavirus 229E
uuauaauugcaca

SEQ ID NO: 1596572 - RNA, 14 nt, Human coronavirus 229E
agcuaauuugucua

SEQ ID NO: 1596573 - RNA, 14 nt, Human coronavirus 229E
uugcuuaauugcuu

SEQ ID NO: 1596574 - RNA, 18 nt, Human coronavirus 229E
uguuauuaacagacugag

SEQ ID NO: 1596575 - RNA, 22 nt, Human coronavirus 229E
caauaauuaaacuaauuaagcu

SEQ ID NO: 1596576 - RNA, 15 nt, Human coronavirus 229E
uuugcaucuucuauu

SEQ ID NO: 1596577 - RNA, 16 nt, Human coronavirus 229E
gucuuuccauugcuga

SEQ ID NO: 1596578 - RNA, 19 nt, Human coronavirus 229E
uacaaccagacuauuuuga

SEQ ID NO: 1596579 - RNA, 12 nt, Human coronavirus 229E
acuguuguugaa

SEQ ID NO: 1596580 - RNA, 20 nt, Human coronavirus 229E
acaaaugugcuggaguaauc

SEQ ID NO: 1596581 - RNA, 21 nt, Human coronavirus 229E
uaacuaauaccucaucuguug

SEQ ID NO: 1596582 - RNA, 21 nt, Human coronavirus 229E
gauuuuguucaaauugaaaau

SEQ ID NO: 1596583 - RNA, 22 nt, Human coronavirus 229E
gcaguguauguuuuucgcuaaa

SEQ ID NO: 1596584 - RNA, 20 nt, Human coronavirus 229E
cucccaugagcaacaugaca

SEQ ID NO: 1596585 - RNA, 13 nt, Human coronavirus 229E
cuaauguuguaga

SEQ ID NO: 1596586 - RNA, 22 nt, Human coronavirus 229E
acauacuuuuuagcaaacuugu

SEQ ID NO: 1596587 - RNA, 17 nt, Human coronavirus 229E
ucacacuucacuaccaa

SEQ ID NO: 1596588 - RNA, 23 nt, Human coronavirus 229E
cagaugguucuauaauugcuguu

SEQ ID NO: 1596589 - RNA, 16 nt, Human coronavirus 229E
cuuaauuacacuguuc

SEQ ID NO: 1596590 - RNA, 13 nt, Human coronavirus 229E
gcagguguugugg

SEQ ID NO: 1596591 - RNA, 16 nt, Human coronavirus 229E
uaauugguuccuucua

SEQ ID NO: 1596592 - RNA, 21 nt, Human coronavirus 229E
uggaaaagacagccuaaugau

SEQ ID NO: 1596593 - RNA, 23 nt, Human coronavirus 229E
gaauuaaguuacaaauugccaaa

SEQ ID NO: 1596594 - RNA, 15 nt, Human coronavirus 229E
uauguuugcaauggu

SEQ ID NO: 1596595 - RNA, 23 nt, Human coronavirus 229E
uaauugcacagacgcuguuuuaa

SEQ ID NO: 1596596 - RNA, 19 nt, Human coronavirus 229E
uuaacacgggaaauugccc

SEQ ID NO: 1596597 - RNA, 12 nt, Human coronavirus 229E
caacagcugcua

SEQ ID NO: 1596598 - RNA, 19 nt, Human coronavirus 229E
cuaagauguuccuuaagcu

SEQ ID NO: 1596599 - RNA, 16 nt, Human coronavirus 229E
gucuugcucguucuca

SEQ ID NO: 1596600 - RNA, 19 nt, Human coronavirus 229E
ugcuggcucuacaagacau

SEQ ID NO: 1596601 - RNA, 15 nt, Human coronavirus 229E
cuuucccuaaacgag

SEQ ID NO: 1596602 - RNA, 16 nt, Human coronavirus 229E
caaucuuugacaccug

SEQ ID NO: 1596603 - RNA, 17 nt, Human coronavirus 229E
aaauugcccuuuuucuu

SEQ ID NO: 1596604 - RNA, 13 nt, Human coronavirus 229E
cacaggaccccau

SEQ ID NO: 1596605 - RNA, 23 nt, Human coronavirus 229E
gccacuguguuguuugaaauuca

SEQ ID NO: 1596606 - RNA, 13 nt, Human coronavirus 229E
guggucuggguug

SEQ ID NO: 1596607 - RNA, 19 nt, Human coronavirus 229E
acugaaguucgugcuucca

SEQ ID NO: 1596608 - RNA, 14 nt, Human coronavirus 229E
uaauugcuguucaa

SEQ ID NO: 1596609 - RNA, 19 nt, Human coronavirus 229E
acacuggccaauuuuaaug

SEQ ID NO: 1596610 - RNA, 23 nt, Human coronavirus 229E
auucuaauugggccuuuguugca

SEQ ID NO: 1596611 - RNA, 21 nt, Human coronavirus 229E
acuuugauugcuguaauuuug

SEQ ID NO: 1596612 - RNA, 19 nt, Human coronavirus 229E
auaagaaauuugcuacuau

SEQ ID NO: 1596613 - RNA, 17 nt, Human coronavirus 229E
uuauucagaaaauguau

SEQ ID NO: 1596614 - RNA, 19 nt, Human coronavirus 229E
uaacaugaucccuugcuuu

SEQ ID NO: 1596615 - RNA, 14 nt, Human coronavirus 229E
uaacucauuacaaa

SEQ ID NO: 1596616 - RNA, 20 nt, Human coronavirus 229E
uauuacaauaauuaaacuaa

SEQ ID NO: 1596617 - RNA, 13 nt, Human coronavirus 229E
ugacaacauaaau

SEQ ID NO: 1596618 - RNA, 20 nt, Human coronavirus 229E
caauuguuaaugcugcuccu

SEQ ID NO: 1596619 - RNA, 13 nt, Human coronavirus 229E
agauuuuguucaa

SEQ ID NO: 1596620 - RNA, 21 nt, Human coronavirus 229E
ucuaacaucagccguuucaau

SEQ ID NO: 1596621 - RNA, 21 nt, Human coronavirus 229E
cagacuacaaaaagugcacua

SEQ ID NO: 1596622 - RNA, 14 nt, Human coronavirus 229E
auuucucaacuaac

SEQ ID NO: 1596623 - RNA, 15 nt, Human coronavirus 229E
acuucaccugcaacu

SEQ ID NO: 1596624 - RNA, 18 nt, Human coronavirus 229E
ugaagaauuggaauuuug

SEQ ID NO: 1596625 - RNA, 14 nt, Human coronavirus 229E
cucaauuguuaaug

SEQ ID NO: 1596626 - RNA, 20 nt, Human coronavirus 229E
agacguggaaccauuuuguu

SEQ ID NO: 1596627 - RNA, 17 nt, Human coronavirus 229E
ugccaaauuacacuguu

SEQ ID NO: 1596628 - RNA, 18 nt, Human coronavirus 229E
cuguauuggucucaagca

SEQ ID NO: 1596629 - RNA, 18 nt, Human coronavirus 229E
acacuuggguaaguuucu

SEQ ID NO: 1596630 - RNA, 21 nt, Human coronavirus 229E
cgugaugaaguuucuauugaa

SEQ ID NO: 1596631 - RNA, 16 nt, Human coronavirus 229E
aaauguauuugcuguu

SEQ ID NO: 1596632 - RNA, 21 nt, Human coronavirus 229E
cuaacgacuuguacguugcuc

SEQ ID NO: 1596633 - RNA, 18 nt, Human coronavirus 229E
ugcugagcggcgugcuuu

SEQ ID NO: 1596634 - RNA, 18 nt, Human coronavirus 229E
uguuacuguuguugaaga

SEQ ID NO: 1596635 - RNA, 13 nt, Human coronavirus 229E
ugucgcuaccugu

SEQ ID NO: 1596636 - RNA, 13 nt, Human coronavirus 229E
acguaauguuuca

SEQ ID NO: 1596637 - RNA, 15 nt, Human coronavirus 229E
cucauuguauguuuc

SEQ ID NO: 1596638 - RNA, 21 nt, Human coronavirus 229E
ugacaagaaagcguuuacacu

SEQ ID NO: 1596639 - RNA, 20 nt, Human coronavirus 229E
cacaaaccucuauugcuaau

SEQ ID NO: 1596640 - RNA, 18 nt, Human coronavirus 229E
cugguugcuguggcuucu

SEQ ID NO: 1596641 - RNA, 23 nt, Human coronavirus 229E
gcuguguugaauugcuuaagcag

SEQ ID NO: 1596642 - RNA, 19 nt, Human coronavirus 229E
uauaagaaauuugcuacua

SEQ ID NO: 1596643 - RNA, 23 nt, Human coronavirus 229E
guaauguuucauaugauaguguu

SEQ ID NO: 1596644 - RNA, 22 nt, Human coronavirus 229E
accuaucuaguuaguaacugcu

SEQ ID NO: 1596645 - RNA, 15 nt, Human coronavirus 229E
ugaguauguugcuau

SEQ ID NO: 1596646 - RNA, 13 nt, Human coronavirus 229E
aaaugcauucacu

SEQ ID NO: 1596647 - RNA, 21 nt, Human coronavirus 229E
gaucacaccguggcagagcug

SEQ ID NO: 1596648 - RNA, 18 nt, Human coronavirus 229E
agguuaaugcaaucacug

SEQ ID NO: 1596649 - RNA, 17 nt, Human coronavirus 229E
caaauacguugcuguuu

SEQ ID NO: 1596650 - RNA, 18 nt, Human coronavirus 229E
augggauuucauugucuu

SEQ ID NO: 1596651 - RNA, 22 nt, Human coronavirus 229E
acuucugcuuguaaaacuauug

SEQ ID NO: 1596652 - RNA, 23 nt, Human coronavirus 229E
acacuguggucuugacuuucacu

SEQ ID NO: 1596653 - RNA, 22 nt, Human coronavirus 229E
ggguugugcguugaugguacaa

SEQ ID NO: 1596654 - RNA, 13 nt, Human coronavirus 229E
cuauguuacugaa

SEQ ID NO: 1596655 - RNA, 14 nt, Human coronavirus 229E
acuugugucugcug

SEQ ID NO: 1596656 - RNA, 22 nt, Human coronavirus 229E
agacagcuugcacaacaaaaag

SEQ ID NO: 1596657 - RNA, 22 nt, Human coronavirus 229E
cuucauuuuuucuaaacugaac

SEQ ID NO: 1596658 - RNA, 22 nt, Human coronavirus 229E
agaucacaccguggcagagcug

SEQ ID NO: 1596659 - RNA, 21 nt, Human coronavirus 229E
caagcccuacaaacaguugcu

SEQ ID NO: 1596660 - RNA, 19 nt, Human coronavirus 229E
agugguaguagaguggcug

SEQ ID NO: 1596661 - RNA, 14 nt, Human coronavirus 229E
aaugucacacaaug

SEQ ID NO: 1596662 - RNA, 13 nt, Human coronavirus 229E
aaugguaagccag

SEQ ID NO: 1596663 - RNA, 16 nt, Human coronavirus 229E
ucaaugucacuacugc

SEQ ID NO: 1596664 - RNA, 18 nt, Human coronavirus 229E
caaauugaaaauugcaau

SEQ ID NO: 1596665 - RNA, 20 nt, Human coronavirus 229E
uuaacauuucucgcucugag

SEQ ID NO: 1596666 - RNA, 15 nt, Human coronavirus 229E
agcguuuacacuugc

SEQ ID NO: 1596667 - RNA, 14 nt, Human coronavirus 229E
uggaauguuauucu

SEQ ID NO: 1596668 - RNA, 16 nt, Human coronavirus 229E
ucuucaguuuggacac

SEQ ID NO: 1596669 - RNA, 19 nt, Human coronavirus 229E
uauccugcugguguuaaua

SEQ ID NO: 1596670 - RNA, 22 nt, Human coronavirus 229E
ucguggugaauccaaaccucaa

SEQ ID NO: 1596671 - RNA, 13 nt, Human coronavirus 229E
agucaaaugggcu

SEQ ID NO: 1596672 - RNA, 21 nt, Human coronavirus 229E
aaauuuggcaguguauguuuu

SEQ ID NO: 1596673 - RNA, 14 nt, Human coronavirus 229E
ugguuuuuauucua

SEQ ID NO: 1596674 - RNA, 19 nt, Human coronavirus 229E
uaauugguggaauugcuuu

SEQ ID NO: 1596675 - RNA, 18 nt, Human coronavirus 229E
acgugaaagauggcacug

SEQ ID NO: 1596676 - RNA, 17 nt, Human coronavirus 229E
aauugguggaauugcuu

SEQ ID NO: 1596677 - RNA, 22 nt, Human coronavirus 229E
caagacgugaaagauggcacug

SEQ ID NO: 1596678 - RNA, 13 nt, Human coronavirus 229E
ugcuuaauugcuu

SEQ ID NO: 1596679 - RNA, 16 nt, Human coronavirus 229E
gccaauuuuaaugaaa

SEQ ID NO: 1596680 - RNA, 18 nt, Human coronavirus 229E
uacuauguuacugaaccu

SEQ ID NO: 1596681 - RNA, 14 nt, Human coronavirus 229E
acgacguugaaaag

SEQ ID NO: 1596682 - RNA, 18 nt, Human coronavirus 229E
cauuucagucgugcucau

SEQ ID NO: 1596683 - RNA, 15 nt, Human coronavirus 229E
cucuagguuuguuca

SEQ ID NO: 1596684 - RNA, 22 nt, Human coronavirus 229E
gauggugcuaaaacugaaccua

SEQ ID NO: 1596685 - RNA, 13 nt, Human coronavirus 229E
uaauuugucuaua

SEQ ID NO: 1596686 - RNA, 16 nt, Human coronavirus 229E
cugugaccuugcugag

SEQ ID NO: 1596687 - RNA, 21 nt, Human coronavirus 229E
gauugcuguaauuuugcuugg

SEQ ID NO: 1596688 - RNA, 14 nt, Human coronavirus 229E
uucagaaccagaga

SEQ ID NO: 1596689 - RNA, 15 nt, Human coronavirus 229E
ugugacaucuaaugu

SEQ ID NO: 1596690 - RNA, 18 nt, Human coronavirus 229E
acaauguuuuggccccag

SEQ ID NO: 1596691 - RNA, 12 nt, Human coronavirus 229E
caauuugcugag

SEQ ID NO: 1596692 - RNA, 16 nt, Human coronavirus 229E
ucugauugacaacaua

SEQ ID NO: 1596693 - RNA, 16 nt, Human coronavirus 229E
auuguuaaugcugcuc

SEQ ID NO: 1596694 - RNA, 18 nt, Human coronavirus 229E
accguggcagagcugcuc

SEQ ID NO: 1596695 - RNA, 22 nt, Human coronavirus 229E
ugugcgcuguguugaauugcuu

SEQ ID NO: 1596696 - RNA, 15 nt, Human coronavirus 229E
gaucuauguaugaug

SEQ ID NO: 1596697 - RNA, 16 nt, Human coronavirus 229E
aguuggaauuuugcuu

SEQ ID NO: 1596698 - RNA, 17 nt, Human coronavirus 229E
acucuguuauuaacaga

SEQ ID NO: 1596699 - RNA, 23 nt, Human coronavirus 229E
ccacugauuuuuguacuguugcg

SEQ ID NO: 1596700 - RNA, 23 nt, Human coronavirus 229E
cauacagcuuggcacugcuggcu

SEQ ID NO: 1596701 - RNA, 20 nt, Human coronavirus 229E
cauaugccuuguugcauauu

SEQ ID NO: 1596702 - RNA, 15 nt, Human coronavirus 229E
uaugaauguuacauu

SEQ ID NO: 1596703 - RNA, 23 nt, Human coronavirus 229E
ucaacaaggcaacucauugaacc

SEQ ID NO: 1596704 - RNA, 20 nt, Human coronavirus 229E
uaguuuuggcguuugugcag

SEQ ID NO: 1596705 - RNA, 17 nt, Human coronavirus 229E
uuuggcguuugugcaga

SEQ ID NO: 1596706 - RNA, 13 nt, Human coronavirus 229E
acuacaaccuuag

SEQ ID NO: 1596707 - RNA, 19 nt, Human coronavirus 229E
ugguuggaauguuauucua

SEQ ID NO: 1596708 - RNA, 12 nt, Human coronavirus 229E
auguuugcaaug

SEQ ID NO: 1596709 - RNA, 12 nt, Human coronavirus 229E
cuaagccuucuc

SEQ ID NO: 1596710 - RNA, 18 nt, Human coronavirus 229E
auaauauuuaugauguau

SEQ ID NO: 1596711 - RNA, 21 nt, Human coronavirus 229E
cauaaagaugcaaaauuuaga

SEQ ID NO: 1596712 - RNA, 16 nt, Human coronavirus 229E
aaacaguugcuacugc

SEQ ID NO: 1596713 - RNA, 18 nt, Human coronavirus 229E
cucaaucucggaauccuu

SEQ ID NO: 1596714 - RNA, 13 nt, Human coronavirus 229E
uaaugaugcuauu

SEQ ID NO: 1596715 - RNA, 16 nt, Human coronavirus 229E
aucuuuagguuuugac

SEQ ID NO: 1596716 - RNA, 15 nt, Human coronavirus 229E
gaauacauugcuuuu

SEQ ID NO: 1596717 - RNA, 21 nt, Human coronavirus 229E
agccuuuguugcuuaauugcu

SEQ ID NO: 1596718 - RNA, 21 nt, Human coronavirus 229E
auucuaauugggccuuuguug

SEQ ID NO: 1596719 - RNA, 15 nt, Human coronavirus 229E
agcguggucuggguu

SEQ ID NO: 1596720 - RNA, 13 nt, Human coronavirus 229E
acuuauaauugca

SEQ ID NO: 1596721 - RNA, 14 nt, Human coronavirus 229E
uguuguugaagaac

SEQ ID NO: 1596722 - RNA, 13 nt, Human coronavirus 229E
gaugaaguuucua

SEQ ID NO: 1596723 - RNA, 18 nt, Human coronavirus 229E
cuuggcacugcuggcucu

SEQ ID NO: 1596724 - RNA, 17 nt, Human coronavirus 229E
uucuggacuuggcacug

SEQ ID NO: 1596725 - RNA, 17 nt, Human coronavirus 229E
ucuugcucguucucaga

SEQ ID NO: 1596726 - RNA, 19 nt, Human coronavirus 229E
gaaguuucuauugaaacug

SEQ ID NO: 1596727 - RNA, 13 nt, Human coronavirus 229E
cgcagacuacaaa

SEQ ID NO: 1596728 - RNA, 16 nt, Human coronavirus 229E
guuuacacuugcuaau

SEQ ID NO: 1596729 - RNA, 19 nt, Human coronavirus 229E
ugcauaugccuuguugcau

SEQ ID NO: 1596730 - RNA, 19 nt, Human coronavirus 229E
aucucgcauaauguuugaa

SEQ ID NO: 1596731 - RNA, 14 nt, Human coronavirus 229E
aaauuauguugcau

SEQ ID NO: 1596732 - RNA, 17 nt, Human coronavirus 229E
ccuacaaacaguugcua

SEQ ID NO: 1596733 - RNA, 17 nt, Human coronavirus 229E
uacugguuuugucuauu

SEQ ID NO: 1596734 - RNA, 20 nt, Human coronavirus 229E
aguauauugauguuaauaag

SEQ ID NO: 1596735 - RNA, 13 nt, Human coronavirus 229E
cuuauuucucaac

SEQ ID NO: 1596736 - RNA, 14 nt, Human coronavirus 229E
uaauauuacacugg

SEQ ID NO: 1596737 - RNA, 22 nt, Human coronavirus 229E
ucuaacuaauaccucaucuguu

SEQ ID NO: 1596738 - RNA, 20 nt, Human coronavirus 229E
cauugcaacuugugucugcu

SEQ ID NO: 1596739 - RNA, 13 nt, Human coronavirus 229E
uuccaauuggacc

SEQ ID NO: 1596740 - RNA, 14 nt, Human coronavirus 229E
accacacuuugcua

SEQ ID NO: 1596741 - RNA, 22 nt, Human coronavirus 229E
acaucucgcauaauguuugaac

SEQ ID NO: 1596742 - RNA, 16 nt, Human coronavirus 229E
acgaucagagcugcuu

SEQ ID NO: 1596743 - RNA, 14 nt, Human coronavirus 229E
gaaaugcaaaagcc

SEQ ID NO: 1596744 - RNA, 18 nt, Human coronavirus 229E
guaauuuugcuuggaaga

SEQ ID NO: 1596745 - RNA, 13 nt, Human coronavirus 229E
ugaauacaugaca

SEQ ID NO: 1596746 - RNA, 13 nt, Human coronavirus 229E
cucaauuguuaau

SEQ ID NO: 1596747 - RNA, 15 nt, Human coronavirus 229E
ucaacacagauuuca

SEQ ID NO: 1596748 - RNA, 19 nt, Human coronavirus 229E
uagaugaauacauugcuuu

SEQ ID NO: 1596749 - RNA, 22 nt, Human coronavirus 229E
guauacuuguuuugugaacacc

SEQ ID NO: 1596750 - RNA, 16 nt, Human coronavirus 229E
acuuuagguaauguag

SEQ ID NO: 1596751 - RNA, 18 nt, Human coronavirus 229E
auguuguuguucuacugg

SEQ ID NO: 1596752 - RNA, 17 nt, Human coronavirus 229E
gugccauugcuguauug

SEQ ID NO: 1596753 - RNA, 16 nt, Human coronavirus 229E
acugguagauuggcug

SEQ ID NO: 1596754 - RNA, 19 nt, Human coronavirus 229E
gaugcaaaauuuagagagc

SEQ ID NO: 1596755 - RNA, 22 nt, Human coronavirus 229E
guuuucagccuuuguugcuuaa

SEQ ID NO: 1596756 - RNA, 22 nt, Human coronavirus 229E
uacacuggccaauuuuaaugaa

SEQ ID NO: 1596757 - RNA, 16 nt, Human coronavirus 229E
uugcaaacucugauug

SEQ ID NO: 1596758 - RNA, 23 nt, Human coronavirus 229E
gcuuauggucuguuucuggcuug

SEQ ID NO: 1596759 - RNA, 12 nt, Human coronavirus 229E
uguuuugucuga

SEQ ID NO: 1596760 - RNA, 17 nt, Human coronavirus 229E
uggcguuugugcagaug

SEQ ID NO: 1596761 - RNA, 16 nt, Human coronavirus 229E
cuauaauugcuguuca

SEQ ID NO: 1596762 - RNA, 14 nt, Human coronavirus 229E
caaggcaacucauu

SEQ ID NO: 1596763 - RNA, 13 nt, Human coronavirus 229E
uuuccauugcuga

SEQ ID NO: 1596764 - RNA, 15 nt, Human coronavirus 229E
aaaugcaaaagccac

SEQ ID NO: 1596765 - RNA, 22 nt, Human coronavirus 229E
ucguucucagaguucugaaaca

SEQ ID NO: 1596766 - RNA, 16 nt, Human coronavirus 229E
cuguuauccugcuggu

SEQ ID NO: 1596767 - RNA, 15 nt, Human coronavirus 229E
caagaauucagaacc

SEQ ID NO: 1596768 - RNA, 14 nt, Human coronavirus 229E
gguaaguuucuuga

SEQ ID NO: 1596769 - RNA, 17 nt, Human coronavirus 229E
ucgcaaacaguuucaga

SEQ ID NO: 1596770 - RNA, 16 nt, Human coronavirus 229E
gacacuauucaggcug

SEQ ID NO: 1596771 - RNA, 23 nt, Human coronavirus 229E
agcuugugccgucaacagcugcu

SEQ ID NO: 1596772 - RNA, 14 nt, Human coronavirus 229E
gcucucccaugagc

SEQ ID NO: 1596773 - RNA, 15 nt, Human coronavirus 229E
ucaccugcaacugcu

SEQ ID NO: 1596774 - RNA, 19 nt, Human coronavirus 229E
gcacagacgcuguuuuaac

SEQ ID NO: 1596775 - RNA, 15 nt, Human coronavirus 229E
ugcuguaauuuugcu

SEQ ID NO: 1596776 - RNA, 14 nt, Human coronavirus 229E
cuggcucuacaaga

SEQ ID NO: 1596777 - RNA, 14 nt, Human coronavirus 229E
uaaugaaacuaaag

SEQ ID NO: 1596778 - RNA, 18 nt, Human coronavirus 229E
gaguuauauaacggugaa

SEQ ID NO: 1596779 - RNA, 15 nt, Human coronavirus 229E
uuauugcuuuguaaa

SEQ ID NO: 1596780 - RNA, 15 nt, Human coronavirus 229E
cuggacuuggcacug

SEQ ID NO: 1596781 - RNA, 22 nt, Human coronavirus 229E
agaacugccgaaauuuuucuau

SEQ ID NO: 1596782 - RNA, 17 nt, Human coronavirus 229E
uccaggauguuguuaau

SEQ ID NO: 1596783 - RNA, 22 nt, Human coronavirus 229E
caacuugugucugcuguuaauc

SEQ ID NO: 1596784 - RNA, 15 nt, Human coronavirus 229E
agcacccuugaaaau

SEQ ID NO: 1596785 - RNA, 19 nt, Human coronavirus 229E
gcuuagcaaugcgaaaguu

SEQ ID NO: 1596786 - RNA, 17 nt, Human coronavirus 229E
cuugcuuuggcuugaca

SEQ ID NO: 1596787 - RNA, 13 nt, Human coronavirus 229E
gaauuuugcuuuu

SEQ ID NO: 1596788 - RNA, 21 nt, Human coronavirus 229E
uaguauaacucauuacaaaug

SEQ ID NO: 1596789 - RNA, 23 nt, Human coronavirus 229E
agauuggcugcuuugaauguauu

SEQ ID NO: 1596790 - RNA, 19 nt, Human coronavirus 229E
ugucuuguugccgacacaa

SEQ ID NO: 1596791 - RNA, 20 nt, Human coronavirus 229E
aacgaguuauugauuucuaa

SEQ ID NO: 1596792 - RNA, 13 nt, Human coronavirus 229E
ggcaguguauguu

SEQ ID NO: 1596793 - RNA, 20 nt, Human coronavirus 229E
cucaauuguuaaugcugcuc

SEQ ID NO: 1596794 - RNA, 22 nt, Human coronavirus 229E
ugacagaaaacgaaagauugcu

SEQ ID NO: 1596795 - RNA, 19 nt, Human coronavirus 229E
ucaguuuggacacuauaaa

SEQ ID NO: 1596796 - RNA, 22 nt, Human coronavirus 229E
caaaauuuagagagcguguuga

SEQ ID NO: 1596797 - RNA, 23 nt, Human coronavirus 229E
ugcuucauuuuuucuaaacugaa

SEQ ID NO: 1596798 - RNA, 15 nt, Human coronavirus 229E
ugaaauucaggcuuu

SEQ ID NO: 1596799 - RNA, 20 nt, Human coronavirus 229E
ugucuauuuuaaugguacug

SEQ ID NO: 1596800 - RNA, 20 nt, Human coronavirus 229E
agcaguauacuucugcuugu

SEQ ID NO: 1596801 - RNA, 14 nt, Human coronavirus 229E
gcugacuuggcuug

SEQ ID NO: 1596802 - RNA, 16 nt, Human coronavirus 229E
caacacagauuucaaa

SEQ ID NO: 1596803 - RNA, 13 nt, Human coronavirus 229E
guauuuugcuuua

SEQ ID NO: 1596804 - RNA, 16 nt, Human coronavirus 229E
caccguggcagagcug

SEQ ID NO: 1596805 - RNA, 16 nt, Human coronavirus 229E
ugaauacaugacaguu

SEQ ID NO: 1596806 - RNA, 17 nt, Human coronavirus 229E
ugauugcuguaauuuug

SEQ ID NO: 1596807 - RNA, 23 nt, Human coronavirus 229E
uaagcuaguggaugaucaugcuu

SEQ ID NO: 1596808 - RNA, 17 nt, Human coronavirus 229E
cuccacuuauguuugca

SEQ ID NO: 1596809 - RNA, 13 nt, Human coronavirus 229E
auuuugguuggaa

SEQ ID NO: 1596810 - RNA, 17 nt, Human coronavirus 229E
uaaccacacuuugcuau

SEQ ID NO: 1596811 - RNA, 13 nt, Human coronavirus 229E
agaacaguuuaug

SEQ ID NO: 1596812 - RNA, 23 nt, Human coronavirus 229E
ucucaaacuucaccugcaacugc

SEQ ID NO: 1596813 - RNA, 13 nt, Human coronavirus 229E
guugcuguugaug

SEQ ID NO: 1596814 - RNA, 16 nt, Human coronavirus 229E
gccuuucuagaaaggu

SEQ ID NO: 1596815 - RNA, 19 nt, Human coronavirus 229E
augcucacuuuugacaaga

SEQ ID NO: 1596816 - RNA, 20 nt, Human coronavirus 229E
uugauggugcuaaaacugaa

SEQ ID NO: 1596817 - RNA, 21 nt, Human coronavirus 229E
uggcucuagguuuguucacau

SEQ ID NO: 1596818 - RNA, 20 nt, Human coronavirus 229E
gccucuuuguuguguauuuu

SEQ ID NO: 1596819 - RNA, 14 nt, Human coronavirus 229E
ucagccuuucuaga

SEQ ID NO: 1596820 - RNA, 15 nt, Human coronavirus 229E
uaaacuaaacaugcc

SEQ ID NO: 1596821 - RNA, 21 nt, Human coronavirus 229E
gcugcaagaauuaaguuacaa

SEQ ID NO: 1596822 - RNA, 14 nt, Human coronavirus 229E
aaugcaaaagccac

SEQ ID NO: 1596823 - RNA, 16 nt, Human coronavirus 229E
auucuucaguuuggac

SEQ ID NO: 1596824 - RNA, 15 nt, Human coronavirus 229E
cuuauaguaaguacu

SEQ ID NO: 1596825 - RNA, 19 nt, Human coronavirus 229E
cuuaauuacacuguucaaa

SEQ ID NO: 1596826 - RNA, 12 nt, Human coronavirus 229E
uauuuaaagcaa

SEQ ID NO: 1596827 - RNA, 11 nt, Human coronavirus 229E
uacacuguuca

SEQ ID NO: 1596828 - RNA, 18 nt, Human coronavirus 229E
ccacacugucuuguugcc

SEQ ID NO: 1596829 - RNA, 16 nt, Human coronavirus 229E
uguuuugcaucuucua

SEQ ID NO: 1596830 - RNA, 19 nt, Human coronavirus 229E
ucacauuguuuccaaagag

SEQ ID NO: 1596831 - RNA, 23 nt, Human coronavirus 229E
aguaaagguauaagaaauuugcu

SEQ ID NO: 1596832 - RNA, 18 nt, Human coronavirus 229E
acuucugccaagagucuu

SEQ ID NO: 1596833 - RNA, 14 nt, Human coronavirus 229E
cuuaacaagaucca

SEQ ID NO: 1596834 - RNA, 23 nt, Human coronavirus 229E
gguacgaucagagcugcuuuuaa

SEQ ID NO: 1596835 - RNA, 16 nt, Human coronavirus 229E
uauauugauguuaaua

SEQ ID NO: 1596836 - RNA, 14 nt, Human coronavirus 229E
aacauacguuuauu

SEQ ID NO: 1596837 - RNA, 14 nt, Human coronavirus 229E
acccauuugaagaa

SEQ ID NO: 1596838 - RNA, 12 nt, Human coronavirus 229E
gcaaugaaacua

SEQ ID NO: 1596839 - RNA, 23 nt, Human coronavirus 229E
caaagaucgcauugacgagccaa

SEQ ID NO: 1596840 - RNA, 22 nt, Human coronavirus 229E
ugauggugcuaaaacugaaccu

SEQ ID NO: 1596841 - RNA, 15 nt, Human coronavirus 229E
auugcuuuaggaggu

SEQ ID NO: 1596842 - RNA, 14 nt, Human coronavirus 229E
caugaucccuugcu

SEQ ID NO: 1596843 - RNA, 20 nt, Human coronavirus 229E
ugcuauguugucugaaaauu

SEQ ID NO: 1596844 - RNA, 22 nt, Human coronavirus 229E
uuauccugcugguguuaauauu

SEQ ID NO: 1596845 - RNA, 19 nt, Human coronavirus 229E
ugcagaaaccacugauuuu

SEQ ID NO: 1596846 - RNA, 15 nt, Human coronavirus 229E
uuggccacucguacu

SEQ ID NO: 1596847 - RNA, 19 nt, Human coronavirus 229E
acgaucagagcugcuuuua

SEQ ID NO: 1596848 - RNA, 16 nt, Human coronavirus 229E
ucuugaggaguuaaau

SEQ ID NO: 1596849 - RNA, 14 nt, Human coronavirus 229E
gaaccuacagguua

SEQ ID NO: 1596850 - RNA, 22 nt, Human coronavirus 229E
aguuaaaugcauucacuagaga

SEQ ID NO: 1596851 - RNA, 17 nt, Human coronavirus 229E
auacccuccgacuuugc

SEQ ID NO: 1596852 - RNA, 14 nt, Human coronavirus 229E
acugguguuaauga

SEQ ID NO: 1596853 - RNA, 17 nt, Human coronavirus 229E
uuuuauuaucuuggcac

SEQ ID NO: 1596854 - RNA, 16 nt, Human coronavirus 229E
caguugcuacugcacu

SEQ ID NO: 1596855 - RNA, 14 nt, Human coronavirus 229E
cugugaccuugcug

SEQ ID NO: 1596856 - RNA, 20 nt, Human coronavirus 229E
gcuauuggaauguucaaaaa

SEQ ID NO: 1596857 - RNA, 21 nt, Human coronavirus 229E
ucaaaaauugcaaacucugau

SEQ ID NO: 1596858 - RNA, 20 nt, Human coronavirus 229E
uuuuccauacagcuuggcac

SEQ ID NO: 1596859 - RNA, 21 nt, Human coronavirus 229E
auuuugcuuuuguucuuucuu

SEQ ID NO: 1596860 - RNA, 22 nt, Human coronavirus 229E
cagucuaagcguuauggcuucu

SEQ ID NO: 1596861 - RNA, 18 nt, Human coronavirus 229E
caacaauggaagagccag

SEQ ID NO: 1596862 - RNA, 13 nt, Human coronavirus 229E
aaccucaauuuug

SEQ ID NO: 1596863 - RNA, 19 nt, Human coronavirus 229E
gauuggcuucagguguuca

SEQ ID NO: 1596864 - RNA, 13 nt, Human coronavirus 229E
ugcaucugaacca

SEQ ID NO: 1596865 - RNA, 22 nt, Human coronavirus 229E
cuuuguggugaguauguugcua

SEQ ID NO: 1596866 - RNA, 12 nt, Human coronavirus 229E
uggaauuuugcu

SEQ ID NO: 1596867 - RNA, 15 nt, Human coronavirus 229E
gcaacuugugucugc

SEQ ID NO: 1596868 - RNA, 17 nt, Human coronavirus 229E
uagaggacguauugaua

SEQ ID NO: 1596869 - RNA, 12 nt, Human coronavirus 229E
aaaacgaaagau

SEQ ID NO: 1596870 - RNA, 13 nt, Human coronavirus 229E
aacaaggcaacuc

SEQ ID NO: 1596871 - RNA, 19 nt, Human coronavirus 229E
ugcccaaagaccauccaca

SEQ ID NO: 1596872 - RNA, 16 nt, Human coronavirus 229E
ucaaaaacguuucaga

SEQ ID NO: 1596873 - RNA, 16 nt, Human coronavirus 229E
cagcuugcacaacaaa

SEQ ID NO: 1596874 - RNA, 22 nt, Human coronavirus 229E
uguucaaauugaaaauugcaau

SEQ ID NO: 1596875 - RNA, 13 nt, Human coronavirus 229E
acaauuugcugag

SEQ ID NO: 1596876 - RNA, 21 nt, Human coronavirus 229E
agagucgcggucguggugaau

SEQ ID NO: 1596877 - RNA, 17 nt, Human coronavirus 229E
ggaugaucaugcuuugg

SEQ ID NO: 1596878 - RNA, 14 nt, Human coronavirus 229E
ucagagcugcuuuu

SEQ ID NO: 1596879 - RNA, 13 nt, Human coronavirus 229E
gaaauucaggcuu

SEQ ID NO: 1596880 - RNA, 18 nt, Human coronavirus 229E
cuuguaaaacuauugaag

SEQ ID NO: 1596881 - RNA, 22 nt, Human coronavirus 229E
uggaacgguuucgauauggaua

SEQ ID NO: 1596882 - RNA, 14 nt, Human coronavirus 229E
uguguuguacguug

SEQ ID NO: 1596883 - RNA, 22 nt, Human coronavirus 229E
uaccauggcagauuuuguucaa

SEQ ID NO: 1596884 - RNA, 17 nt, Human coronavirus 229E
ccacuuauguuugcaau

SEQ ID NO: 1596885 - RNA, 15 nt, Human coronavirus 229E
cucguacuugcuuug

SEQ ID NO: 1596886 - RNA, 23 nt, Human coronavirus 229E
cgaaaacggguacuccuaagccu

SEQ ID NO: 1596887 - RNA, 15 nt, Human coronavirus 229E
gcacugcuggcucua

SEQ ID NO: 1596888 - RNA, 16 nt, Human coronavirus 229E
uaguuuuggcguuugu

SEQ ID NO: 1596889 - RNA, 13 nt, Human coronavirus 229E
ugaugaugugaca

SEQ ID NO: 1596890 - RNA, 15 nt, Human coronavirus 229E
cuguuguugaagaac

SEQ ID NO: 1596891 - RNA, 15 nt, Human coronavirus 229E
caugaucccuugcuu

SEQ ID NO: 1596892 - RNA, 19 nt, Human coronavirus 229E
acaguuuugggcaauuuuu

SEQ ID NO: 1596893 - RNA, 23 nt, Human coronavirus 229E
uguuuuucuccacacugucuugu

SEQ ID NO: 1596894 - RNA, 17 nt, Human coronavirus 229E
uaguuacggcuuuucua

SEQ ID NO: 1596895 - RNA, 18 nt, Human coronavirus 229E
cuaugcguccaauggcac

SEQ ID NO: 1596896 - RNA, 23 nt, Human coronavirus 229E
uaguuccuuuaugaauguuacau

SEQ ID NO: 1596897 - RNA, 18 nt, Human coronavirus 229E
guagaugaauacauugcu

SEQ ID NO: 1596898 - RNA, 12 nt, Human coronavirus 229E
cucguucucaga

SEQ ID NO: 1596899 - RNA, 13 nt, Human coronavirus 229E
cacaauuugcuga

SEQ ID NO: 1596900 - RNA, 22 nt, Human coronavirus 229E
ucaacuucagguaaccuucugg

SEQ ID NO: 1596901 - RNA, 18 nt, Human coronavirus 229E
uuuguuuaaaacaucuua

SEQ ID NO: 1596902 - RNA, 16 nt, Human coronavirus 229E
cucgcauaauguuuga

SEQ ID NO: 1596903 - RNA, 19 nt, Human coronavirus 229E
ugcacaacaaaaagugaau

SEQ ID NO: 1596904 - RNA, 21 nt, Human coronavirus 229E
agagugacugugcccaaagac

SEQ ID NO: 1596905 - RNA, 22 nt, Human coronavirus 229E
caauguaaccacacuuugcuau

SEQ ID NO: 1596906 - RNA, 18 nt, Human coronavirus 229E
cuuagacguggaaccauu

SEQ ID NO: 1596907 - RNA, 21 nt, Human coronavirus 229E
agcuuauaggcuauuggaaug

SEQ ID NO: 1596908 - RNA, 16 nt, Human coronavirus 229E
uucaaaaauugcaaac

SEQ ID NO: 1596909 - RNA, 13 nt, Human coronavirus 229E
guuuuucgcuaaa

SEQ ID NO: 1596910 - RNA, 14 nt, Human coronavirus 229E
ugcgugaugaaguu

SEQ ID NO: 1596911 - RNA, 15 nt, Human coronavirus 229E
uucacaaaauagcac

SEQ ID NO: 1596912 - RNA, 16 nt, Human coronavirus 229E
accauauucauuguua

SEQ ID NO: 1596913 - RNA, 15 nt, Human coronavirus 229E
ugguuucuugaaaau

SEQ ID NO: 1596914 - RNA, 16 nt, Human coronavirus 229E
agucaggcaacacugu

SEQ ID NO: 1596915 - RNA, 18 nt, Human coronavirus 229E
acucauuacaaaugugcu

SEQ ID NO: 1596916 - RNA, 13 nt, Human coronavirus 229E
cuuguuguuuauc

SEQ ID NO: 1596917 - RNA, 14 nt, Human coronavirus 229E
acuuguuacuucug

SEQ ID NO: 1596918 - RNA, 19 nt, Human coronavirus 229E
gcagacugauguuuuacaa

SEQ ID NO: 1596919 - RNA, 23 nt, Human coronavirus 229E
uucaauguaaccacacuuugcua

SEQ ID NO: 1596920 - RNA, 16 nt, Human coronavirus 229E
ucuaguuaguaacugc

SEQ ID NO: 1596921 - RNA, 21 nt, Human coronavirus 229E
aagccacgguggaaaagacag

SEQ ID NO: 1596922 - RNA, 17 nt, Human coronavirus 229E
ugacauaauugaugaag

SEQ ID NO: 1596923 - RNA, 20 nt, Human coronavirus 229E
ggauuucauugucuucaaug

SEQ ID NO: 1596924 - RNA, 20 nt, Human coronavirus 229E
uuuauggccguaucaacacu

SEQ ID NO: 1596925 - RNA, 11 nt, Human coronavirus 229E
cucgcucugag

SEQ ID NO: 1596926 - RNA, 16 nt, Human coronavirus 229E
aaaauucuugcugcau

SEQ ID NO: 1596927 - RNA, 14 nt, Human coronavirus 229E
ugaauguuacauug

SEQ ID NO: 1596928 - RNA, 14 nt, Human coronavirus 229E
cauaauugaugaag

SEQ ID NO: 1596929 - RNA, 21 nt, Human coronavirus 229E
aagaaauuugcuacuauguua

SEQ ID NO: 1596930 - RNA, 18 nt, Human coronavirus 229E
ucaaacuucugccaagag

SEQ ID NO: 1596931 - RNA, 14 nt, Human coronavirus 229E
cuuuauuuaaagca

SEQ ID NO: 1596932 - RNA, 12 nt, Human coronavirus 229E
cgaucagagcug

SEQ ID NO: 1596933 - RNA, 13 nt, Human coronavirus 229E
gaguaaucaaaga

SEQ ID NO: 1596934 - RNA, 16 nt, Human coronavirus 229E
aggcucauuguauguu

SEQ ID NO: 1596935 - RNA, 14 nt, Human coronavirus 229E
caguuuggacacua

SEQ ID NO: 1596936 - RNA, 19 nt, Human coronavirus 229E
cguuuaaauuauguugcau

SEQ ID NO: 1596937 - RNA, 15 nt, Human coronavirus 229E
cugcuucuucucaaa

SEQ ID NO: 1596938 - RNA, 14 nt, Human coronavirus 229E
acugguuuugucua

SEQ ID NO: 1596939 - RNA, 14 nt, Human coronavirus 229E
aagugcuuuaacug

SEQ ID NO: 1596940 - RNA, 22 nt, Human coronavirus 229E
uaauugcuuauggucuguuucu

SEQ ID NO: 1596941 - RNA, 22 nt, Human coronavirus 229E
gaaagcguuuacacuugcuaau

SEQ ID NO: 1596942 - RNA, 13 nt, Human coronavirus 229E
cagcuuggcacug

SEQ ID NO: 1596943 - RNA, 19 nt, Human coronavirus 229E
agaugcucacuuuugacaa

SEQ ID NO: 1596944 - RNA, 20 nt, Human coronavirus 229E
ggcaguugcugcggcucuua

SEQ ID NO: 1596945 - RNA, 18 nt, Human coronavirus 229E
guuaauaacuuuguuaaa

SEQ ID NO: 1596946 - RNA, 15 nt, Human coronavirus 229E
cuguuucuggcuugc

SEQ ID NO: 1596947 - RNA, 12 nt, Human coronavirus 229E
auuaucuuucuu

SEQ ID NO: 1596948 - RNA, 16 nt, Human coronavirus 229E
uuguuuugugaacacc

SEQ ID NO: 1596949 - RNA, 20 nt, Human coronavirus 229E
auuucuaaacuaaacgacaa

SEQ ID NO: 1596950 - RNA, 15 nt, Human coronavirus 229E
caauggaagagccag

SEQ ID NO: 1596951 - RNA, 18 nt, Human coronavirus 229E
agcaguauacuucugcuu

SEQ ID NO: 1596952 - RNA, 19 nt, Human coronavirus 229E
aaccacguaauguuucaua

SEQ ID NO: 1596953 - RNA, 15 nt, Human coronavirus 229E
aaccagacuauuuug

SEQ ID NO: 1596954 - RNA, 15 nt, Human coronavirus 229E
uguauguuuuucgcu

SEQ ID NO: 1596955 - RNA, 23 nt, Human coronavirus 229E
caagauccaggauguuguuaauc

SEQ ID NO: 1596956 - RNA, 17 nt, Human coronavirus 229E
cugcuuguaaaacuauu

SEQ ID NO: 1596957 - RNA, 12 nt, Human coronavirus 229E
ucaaacuacaaa

SEQ ID NO: 1596958 - RNA, 12 nt, Human coronavirus 229E
ucaacagcugcu

SEQ ID NO: 1596959 - RNA, 18 nt, Human coronavirus 229E
cuaccugaauacaugaca

SEQ ID NO: 1596960 - RNA, 19 nt, Human coronavirus 229E
acuguggucuugacuuuca

SEQ ID NO: 1596961 - RNA, 14 nt, Human coronavirus 229E
ugaagaaccugacu

SEQ ID NO: 1596962 - RNA, 14 nt, Human coronavirus 229E
gugcagguguugug

SEQ ID NO: 1596963 - RNA, 16 nt, Human coronavirus 229E
acuuugauugcuguaa

SEQ ID NO: 1596964 - RNA, 10 nt, Human coronavirus 229E
cuuguugcau

SEQ ID NO: 1596965 - RNA, 16 nt, Human coronavirus 229E
uacugguguuaaugau

SEQ ID NO: 1596966 - RNA, 17 nt, Human coronavirus 229E
uauaagaaauuugcuac

SEQ ID NO: 1596967 - RNA, 22 nt, Human coronavirus 229E
accacugauuuuuguacuguug

SEQ ID NO: 1596968 - RNA, 18 nt, Human coronavirus 229E
ucuauaauugcuguucaa

SEQ ID NO: 1596969 - RNA, 16 nt, Human coronavirus 229E
auuuaacuucucaguu

SEQ ID NO: 1596970 - RNA, 17 nt, Human coronavirus 229E
cugaguugcaaaccauu

SEQ ID NO: 1596971 - RNA, 21 nt, Human coronavirus 229E
agcacaggcuggguuuucuac

SEQ ID NO: 1596972 - RNA, 14 nt, Human coronavirus 229E
caggugaugcucac

SEQ ID NO: 1596973 - RNA, 18 nt, Human coronavirus 229E
aaauacguugcuguuuau

SEQ ID NO: 1596974 - RNA, 20 nt, Human coronavirus 229E
cuuuacauaggcgacagaau

SEQ ID NO: 1596975 - RNA, 17 nt, Human coronavirus 229E
ucuaauugggccuuugu

SEQ ID NO: 1596976 - RNA, 14 nt, Human coronavirus 229E
accaacaacacuuu

SEQ ID NO: 1596977 - RNA, 19 nt, Human coronavirus 229E
uggcuucuguggaaauggc

SEQ ID NO: 1596978 - RNA, 18 nt, Human coronavirus 229E
guugcauauugcugguug

SEQ ID NO: 1596979 - RNA, 16 nt, Human coronavirus 229E
caaauacguugcuguu

SEQ ID NO: 1596980 - RNA, 15 nt, Human coronavirus 229E
uuacucuguuugcaa

SEQ ID NO: 1596981 - RNA, 19 nt, Human coronavirus 229E
gccuucucguaaucagagu

SEQ ID NO: 1596982 - RNA, 14 nt, Human coronavirus 229E
agacauacuuuuua

SEQ ID NO: 1596983 - RNA, 15 nt, Human coronavirus 229E
aguaaaacacgguga

SEQ ID NO: 1596984 - RNA, 14 nt, Human coronavirus 229E
uauguuacugaacc

SEQ ID NO: 1596985 - RNA, 23 nt, Human coronavirus 229E
uucuggguuuuaaagauguuacu

SEQ ID NO: 1596986 - RNA, 14 nt, Human coronavirus 229E
accugcaacugcug

SEQ ID NO: 1596987 - RNA, 14 nt, Human coronavirus 229E
aagacgcugcaaga

SEQ ID NO: 1596988 - RNA, 16 nt, Human coronavirus 229E
ggccuuuguugcauuu

SEQ ID NO: 1596989 - RNA, 14 nt, Human coronavirus 229E
cucagaguucugaa

SEQ ID NO: 1596990 - RNA, 15 nt, Human coronavirus 229E
acuuggcuugugcuc

SEQ ID NO: 1596991 - RNA, 17 nt, Human coronavirus 229E
ugauuacugguagauug

SEQ ID NO: 1596992 - RNA, 18 nt, Human coronavirus 229E
agacuauuuugaauuuga

SEQ ID NO: 1596993 - RNA, 18 nt, Human coronavirus 229E
cuaaacaugccacugugu

SEQ ID NO: 1596994 - RNA, 17 nt, Human coronavirus 229E
guuuaugugccauugcu

SEQ ID NO: 1596995 - RNA, 23 nt, Human coronavirus 229E
ugcccaaagaccauccacacuug

SEQ ID NO: 1596996 - RNA, 21 nt, Human coronavirus 229E
ggccacucguacuugcuuugu

SEQ ID NO: 1596997 - RNA, 18 nt, Human coronavirus 229E
auaacggugaauguguau

SEQ ID NO: 1596998 - RNA, 19 nt, Human coronavirus 229E
gcauuacugugaccuugcu

SEQ ID NO: 1596999 - RNA, 15 nt, Human coronavirus 229E
guucagguucauaac

SEQ ID NO: 1597000 - RNA, 18 nt, Human coronavirus 229E
ugaccacaacuuuggaag

SEQ ID NO: 1597001 - RNA, 14 nt, Human coronavirus 229E
cagaaccagagaua

SEQ ID NO: 1597002 - RNA, 22 nt, Human coronavirus 229E
ugcuaauauaauuuauugcaac

SEQ ID NO: 1597003 - RNA, 16 nt, Human coronavirus 229E
gcuguugauggugcua

SEQ ID NO: 1597004 - RNA, 12 nt, Human coronavirus 229E
aguauaacucau

SEQ ID NO: 1597005 - RNA, 17 nt, Human coronavirus 229E
ucuacguacgaguaaaa

SEQ ID NO: 1597006 - RNA, 18 nt, Human coronavirus 229E
aagacaugggauuucauu

SEQ ID NO: 1597007 - RNA, 12 nt, Human coronavirus 229E
uacuucugcuug

SEQ ID NO: 1597008 - RNA, 17 nt, Human coronavirus 229E
uguuuuaacuuauucua

SEQ ID NO: 1597009 - RNA, 22 nt, Human coronavirus 229E
accagugcgugaugaaguuucu

SEQ ID NO: 1597010 - RNA, 16 nt, Human coronavirus 229E
uugcaacucuguuauu

SEQ ID NO: 1597011 - RNA, 16 nt, Human coronavirus 229E
uaauuucaaugucacu

SEQ ID NO: 1597012 - RNA, 22 nt, Human coronavirus 229E
uauauacccuccgacuuugcau

SEQ ID NO: 1597013 - RNA, 15 nt, Human coronavirus 229E
ucacauugcaacuug

SEQ ID NO: 1597014 - RNA, 22 nt, Human coronavirus 229E
auguguauacuuguuuugugaa

SEQ ID NO: 1597015 - RNA, 14 nt, Human coronavirus 229E
guuuaugugccauu

SEQ ID NO: 1597016 - RNA, 17 nt, Human coronavirus 229E
uacuauguuacugaacc

SEQ ID NO: 1597017 - RNA, 15 nt, Human coronavirus 229E
cgaucagagcugcuu

SEQ ID NO: 1597018 - RNA, 15 nt, Human coronavirus 229E
ugauuucuaaacuaa

SEQ ID NO: 1597019 - RNA, 20 nt, Human coronavirus 229E
cgugaaagauggcacuguua

SEQ ID NO: 1597020 - RNA, 19 nt, Human coronavirus 229E
cuuuuggcaaaguuaauaa

SEQ ID NO: 1597021 - RNA, 13 nt, Human coronavirus 229E
uguuguuguucua

SEQ ID NO: 1597022 - RNA, 14 nt, Human coronavirus 229E
auuacaaaugugcu

SEQ ID NO: 1597023 - RNA, 21 nt, Human coronavirus 229E
uguugauggugcuaaaacuga

SEQ ID NO: 1597024 - RNA, 14 nt, Human coronavirus 229E
ugucugcuguuaau

SEQ ID NO: 1597025 - RNA, 23 nt, Human coronavirus 229E
aagcuuuguuucacuugccauau

SEQ ID NO: 1597026 - RNA, 18 nt, Human coronavirus 229E
caaugaaacuacgucugc

SEQ ID NO: 1597027 - RNA, 15 nt, Human coronavirus 229E
gccaaauuacacugu

SEQ ID NO: 1597028 - RNA, 19 nt, Human coronavirus 229E
aauguauucguuucucaua

SEQ ID NO: 1597029 - RNA, 21 nt, Human coronavirus 229E
agcaugaaaugcaaaagccac

SEQ ID NO: 1597030 - RNA, 20 nt, Human coronavirus 229E
agauugcuucauuuuuucua

SEQ ID NO: 1597031 - RNA, 19 nt, Human coronavirus 229E
uucuguggaaauggcacuc

SEQ ID NO: 1597032 - RNA, 23 nt, Human coronavirus 229E
cuaguauaacucauuacaaaugu

SEQ ID NO: 1597033 - RNA, 21 nt, Human coronavirus 229E
ugcacagacgcuguuuuaacu

SEQ ID NO: 1597034 - RNA, 21 nt, Human coronavirus 229E
cuauugugucgcuaccuguuu

SEQ ID NO: 1597035 - RNA, 20 nt, Human coronavirus 229E
ccaaugguguuaaagcuaaa

SEQ ID NO: 1597036 - RNA, 18 nt, Human coronavirus 229E
cucuagguuuguucacau

SEQ ID NO: 1597037 - RNA, 17 nt, Human coronavirus 229E
uucuauugaaacugaca

SEQ ID NO: 1597038 - RNA, 17 nt, Human coronavirus 229E
gcucuagguuuguucac

SEQ ID NO: 1597039 - RNA, 16 nt, Human coronavirus 229E
guguugggacagacau

SEQ ID NO: 1597040 - RNA, 12 nt, Human coronavirus 229E
gaacaguuuaug

SEQ ID NO: 1597041 - RNA, 11 nt, Human coronavirus 229E
uaauguuguag

SEQ ID NO: 1597042 - RNA, 17 nt, Human coronavirus 229E
ucuacaagcccuauuca

SEQ ID NO: 1597043 - RNA, 15 nt, Human coronavirus 229E
uuguucacauugcaa

SEQ ID NO: 1597044 - RNA, 19 nt, Human coronavirus 229E
uggugaguauguugcuauu

SEQ ID NO: 1597045 - RNA, 17 nt, Human coronavirus 229E
aguuuuggugacuacaa

SEQ ID NO: 1597046 - RNA, 11 nt, Human coronavirus 229E
uacacuguucc

SEQ ID NO: 1597047 - RNA, 14 nt, Human coronavirus 229E
aacuuauucuaguu

SEQ ID NO: 1597048 - RNA, 15 nt, Human coronavirus 229E
cagucgugcucaucu

SEQ ID NO: 1597049 - RNA, 20 nt, Human coronavirus 229E
uaguuacggcuuuucuaaug

SEQ ID NO: 1597050 - RNA, 18 nt, Human coronavirus 229E
caaacaguuucagacuuu

SEQ ID NO: 1597051 - RNA, 17 nt, Human coronavirus 229E
cacuacuagagugacug

SEQ ID NO: 1597052 - RNA, 16 nt, Human coronavirus 229E
aauaauuaaacuaauu

SEQ ID NO: 1597053 - RNA, 19 nt, Human coronavirus 229E
auuuggcaguguauguuuu

SEQ ID NO: 1597054 - RNA, 13 nt, Human coronavirus 229E
ucagguguucagg

SEQ ID NO: 1597055 - RNA, 18 nt, Human coronavirus 229E
uugcuguaauuuugcuug

SEQ ID NO: 1597056 - RNA, 15 nt, Human coronavirus 229E
cagaguucugaaaca

SEQ ID NO: 1597057 - RNA, 18 nt, Human coronavirus 229E
uguaacccaccagaucag

SEQ ID NO: 1597058 - RNA, 20 nt, Human coronavirus 229E
agaugguuuuuauucuacaa

SEQ ID NO: 1597059 - RNA, 17 nt, Human coronavirus 229E
acugugaccuugcugag

SEQ ID NO: 1597060 - RNA, 12 nt, Human coronavirus 229E
cuccaacaggca

SEQ ID NO: 1597061 - RNA, 16 nt, Human coronavirus 229E
ucgugcucaucuuugu

SEQ ID NO: 1597062 - RNA, 19 nt, Human coronavirus 229E
cugaugcugaacgaauggc

SEQ ID NO: 1597063 - RNA, 18 nt, Human coronavirus 229E
acuguguuguuugaaauu

SEQ ID NO: 1597064 - RNA, 20 nt, Human coronavirus 229E
acugauuuuuguacuguugc

SEQ ID NO: 1597065 - RNA, 14 nt, Human coronavirus 229E
acuuugauugcugu

SEQ ID NO: 1597066 - RNA, 17 nt, Human coronavirus 229E
uagcucuauucaggcua

SEQ ID NO: 1597067 - RNA, 13 nt, Human coronavirus 229E
ugacacuauucag

SEQ ID NO: 1597068 - RNA, 21 nt, Human coronavirus 229E
cagagaccuugaccacaacuu

SEQ ID NO: 1597069 - RNA, 19 nt, Human coronavirus 229E
gguacgaucagagcugcuu

SEQ ID NO: 1597070 - RNA, 13 nt, Human coronavirus 229E
cacuccuuguaac

SEQ ID NO: 1597071 - RNA, 23 nt, Human coronavirus 229E
gucuugacuuucacuacuagagu

SEQ ID NO: 1597072 - RNA, 15 nt, Human coronavirus 229E
aaauuauguugcauu

SEQ ID NO: 1597073 - RNA, 14 nt, Human coronavirus 229E
uuacucuguuugca

SEQ ID NO: 1597074 - RNA, 12 nt, Human coronavirus 229E
uguuacuucugg

SEQ ID NO: 1597075 - RNA, 19 nt, Human coronavirus 229E
gauugcuguaauuuugcuu

SEQ ID NO: 1597076 - RNA, 19 nt, Human coronavirus 229E
aaacaguuucagacuuuuc

SEQ ID NO: 1597077 - RNA, 13 nt, Human coronavirus 229E
cagcuaucgucac

SEQ ID NO: 1597078 - RNA, 22 nt, Human coronavirus 229E
gucacaaaccucuauugcuaau

SEQ ID NO: 1597079 - RNA, 14 nt, Human coronavirus 229E
guguguggugcuua

SEQ ID NO: 1597080 - RNA, 14 nt, Human coronavirus 229E
gaaggcaguugcug

SEQ ID NO: 1597081 - RNA, 15 nt, Human coronavirus 229E
cuuggcacugcuggc

SEQ ID NO: 1597082 - RNA, 17 nt, Human coronavirus 229E
acuuucacuacuagagu

SEQ ID NO: 1597083 - RNA, 23 nt, Human coronavirus 229E
agauuguuuuaugguuugaagau

SEQ ID NO: 1597084 - RNA, 21 nt, Human coronavirus 229E
gguucuauaauugcuguucaa

SEQ ID NO: 1597085 - RNA, 13 nt, Human coronavirus 229E
auaauugcuguuc

SEQ ID NO: 1597086 - RNA, 18 nt, Human coronavirus 229E
auaccucaucuguuguag

SEQ ID NO: 1597087 - RNA, 22 nt, Human coronavirus 229E
aaaauaaggcucugaaaccauu

SEQ ID NO: 1597088 - RNA, 15 nt, Human coronavirus 229E
gagcaacaugacaga

SEQ ID NO: 1597089 - RNA, 20 nt, Human coronavirus 229E
ccguuaauuucaaugucacu

SEQ ID NO: 1597090 - RNA, 22 nt, Human coronavirus 229E
uguuaguuccuuuaugaauguu

SEQ ID NO: 1597091 - RNA, 12 nt, Human coronavirus 229E
gcauauugcugg

SEQ ID NO: 1597092 - RNA, 15 nt, Human coronavirus 229E
aacaggcauuacugu

SEQ ID NO: 1597093 - RNA, 18 nt, Human coronavirus 229E
ugagcaacaugacagaaa

SEQ ID NO: 1597094 - RNA, 23 nt, Human coronavirus 229E
ucuacaagacaugggauuucauu

SEQ ID NO: 1597095 - RNA, 20 nt, Human coronavirus 229E
aaucagaguccugcuucuuc

SEQ ID NO: 1597096 - RNA, 19 nt, Human coronavirus 229E
ugcucguucucagaguucu

SEQ ID NO: 1597097 - RNA, 21 nt, Human coronavirus 229E
ccauggcagauuuuguucaaa

SEQ ID NO: 1597098 - RNA, 18 nt, Human coronavirus 229E
uguugguuucuugaaaau

SEQ ID NO: 1597099 - RNA, 12 nt, Human coronavirus 229E
aggcaauuauua

SEQ ID NO: 1597100 - RNA, 21 nt, Human coronavirus 229E
ucuauuagagguuguugugaa

SEQ ID NO: 1597101 - RNA, 21 nt, Human coronavirus 229E
guuauucagaaaauguauuug

SEQ ID NO: 1597102 - RNA, 17 nt, Human coronavirus 229E
gucacacaauguuuugg

SEQ ID NO: 1597103 - RNA, 22 nt, Human coronavirus 229E
acuaguuacucuguuugcaacg

SEQ ID NO: 1597104 - RNA, 22 nt, Human coronavirus 229E
agugaacaaccuuggaagguga

SEQ ID NO: 1597105 - RNA, 16 nt, Human coronavirus 229E
uggcacuuauaauugc

SEQ ID NO: 1597106 - RNA, 19 nt, Human coronavirus 229E
uacuacugguuuugucuau

SEQ ID NO: 1597107 - RNA, 16 nt, Human coronavirus 229E
cguggcagagcugcuc

SEQ ID NO: 1597108 - RNA, 18 nt, Human coronavirus 229E
agagucaggcaacacugu

SEQ ID NO: 1597109 - RNA, 17 nt, Human coronavirus 229E
uuuuguucuuucuuuua

SEQ ID NO: 1597110 - RNA, 24 nt, Human coronavirus 229E
uuugccuggcgucgcugaugcuga

SEQ ID NO: 1597111 - RNA, 20 nt, Human coronavirus 229E
auacguuuauuguguuguac

SEQ ID NO: 1597112 - RNA, 12 nt, Human coronavirus 229E
caacuuuggaag

SEQ ID NO: 1597113 - RNA, 19 nt, Human coronavirus 229E
uaguauaacucauuacaaa

SEQ ID NO: 1597114 - RNA, 22 nt, Human coronavirus 229E
guuaggcgcaagaauucagaac

SEQ ID NO: 1597115 - RNA, 19 nt, Human coronavirus 229E
ugaugaaguaaacuaaaca

SEQ ID NO: 1597116 - RNA, 13 nt, Human coronavirus 229E
caagugacagaaa

SEQ ID NO: 1597117 - RNA, 16 nt, Human coronavirus 229E
cugauguuuuacaaga

SEQ ID NO: 1597118 - RNA, 18 nt, Human coronavirus 229E
agaguucugaaacaaaag

SEQ ID NO: 1597119 - RNA, 22 nt, Human coronavirus 229E
ugaaauuagcacccuugaaaau

SEQ ID NO: 1597120 - RNA, 13 nt, Human coronavirus 229E
ucaacagcugcua

SEQ ID NO: 1597121 - RNA, 15 nt, Human coronavirus 229E
acuguuguugaagaa

SEQ ID NO: 1597122 - RNA, 21 nt, Human coronavirus 229E
uaaugagccucuuuguugugu

SEQ ID NO: 1597123 - RNA, 19 nt, Human coronavirus 229E
agcgucauaccuagcuugc

SEQ ID NO: 1597124 - RNA, 18 nt, Human coronavirus 229E
gcaguauacuucugcuug

SEQ ID NO: 1597125 - RNA, 15 nt, Human coronavirus 229E
aaacuucugccaaga

SEQ ID NO: 1597126 - RNA, 13 nt, Human coronavirus 229E
acgaucagagcug

SEQ ID NO: 1597127 - RNA, 16 nt, Human coronavirus 229E
auauugauguuaauaa

SEQ ID NO: 1597128 - RNA, 20 nt, Human coronavirus 229E
auacuuguuuugugaacacc

SEQ ID NO: 1597129 - RNA, 22 nt, Human coronavirus 229E
uaaccuucuggguuuuaaagau

SEQ ID NO: 1597130 - RNA, 12 nt, Human coronavirus 229E
auuuuaaugaaa

SEQ ID NO: 1597131 - RNA, 17 nt, Human coronavirus 229E
cugcaucuuuuaacaaa

SEQ ID NO: 1597132 - RNA, 17 nt, Human coronavirus 229E
guuuucuacguacgagu

SEQ ID NO: 1597133 - RNA, 20 nt, Human coronavirus 229E
gcauucacuagagaaaugca

SEQ ID NO: 1597134 - RNA, 18 nt, Human coronavirus 229E
cuacaagcccuauucaau

SEQ ID NO: 1597135 - RNA, 18 nt, Human coronavirus 229E
uucacuagagaaaugcaa

SEQ ID NO: 1597136 - RNA, 18 nt, Human coronavirus 229E
uugcuuuauuuaaagcaa

SEQ ID NO: 1597137 - RNA, 20 nt, Human coronavirus 229E
aauauaauuuauugcaacuc

SEQ ID NO: 1597138 - RNA, 12 nt, Human coronavirus 229E
uucagccuuugu

SEQ ID NO: 1597139 - RNA, 22 nt, Human coronavirus 229E
aaagauggcuacagucaaaugg

SEQ ID NO: 1597140 - RNA, 21 nt, Human coronavirus 229E
uacaaauugccaaauuacacu

SEQ ID NO: 1597141 - RNA, 17 nt, Human coronavirus 229E
cuauaauugcuguucaa

SEQ ID NO: 1597142 - RNA, 18 nt, Human coronavirus 229E
uagauuggcugcuuugaa

SEQ ID NO: 1597143 - RNA, 15 nt, Human coronavirus 229E
uagugagaugcucac

SEQ ID NO: 1597144 - RNA, 14 nt, Human coronavirus 229E
guuucagaacuaga

SEQ ID NO: 1597145 - RNA, 18 nt, Human coronavirus 229E
uuugcuuuuguucuuucu

SEQ ID NO: 1597146 - RNA, 19 nt, Human coronavirus 229E
guacccaucaacaagaaag

SEQ ID NO: 1597147 - RNA, 14 nt, Human coronavirus 229E
uuauucuacaagcc

SEQ ID NO: 1597148 - RNA, 13 nt, Human coronavirus 229E
cuaaguacacuga

SEQ ID NO: 1597149 - RNA, 19 nt, Human coronavirus 229E
uaauaacuuuguuaaauuu

SEQ ID NO: 1597150 - RNA, 16 nt, Human coronavirus 229E
caauguuuuggcccca

SEQ ID NO: 1597151 - RNA, 13 nt, Human coronavirus 229E
uagguuuugacaa

SEQ ID NO: 1597152 - RNA, 19 nt, Human coronavirus 229E
uugucgaacaguacaacca

SEQ ID NO: 1597153 - RNA, 15 nt, Human coronavirus 229E
acuuucacuacuaga

SEQ ID NO: 1597154 - RNA, 19 nt, Human coronavirus 229E
ugaugcuauuacacaaacu

SEQ ID NO: 1597155 - RNA, 20 nt, Human coronavirus 229E
ggaugacaucaugaaggcag

SEQ ID NO: 1597156 - RNA, 23 nt, Human coronavirus 229E
cugccaagagucuugcucguucu

SEQ ID NO: 1597157 - RNA, 20 nt, Human coronavirus 229E
uuaacacgggaaauugcccu

SEQ ID NO: 1597158 - RNA, 17 nt, Human coronavirus 229E
gacagaauuguuucuua

SEQ ID NO: 1597159 - RNA, 14 nt, Human coronavirus 229E
agcccuuugcuugu

SEQ ID NO: 1597160 - RNA, 19 nt, Human coronavirus 229E
uguaauuuugcuuggaaga

SEQ ID NO: 1597161 - RNA, 14 nt, Human coronavirus 229E
cuuaauuacacugu

SEQ ID NO: 1597162 - RNA, 18 nt, Human coronavirus 229E
acgacagguuauccaaga

SEQ ID NO: 1597163 - RNA, 15 nt, Human coronavirus 229E
auuggcugcuuugaa

SEQ ID NO: 1597164 - RNA, 17 nt, Human coronavirus 229E
uaauggcuaucgcuauu

SEQ ID NO: 1597165 - RNA, 15 nt, Human coronavirus 229E
cagugcgugaugaag

SEQ ID NO: 1597166 - RNA, 21 nt, Human coronavirus 229E
auuuaccaaucauauaugcac

SEQ ID NO: 1597167 - RNA, 17 nt, Human coronavirus 229E
aguuucacgacagguua

SEQ ID NO: 1597168 - RNA, 16 nt, Human coronavirus 229E
agagaaaugcaacaac

SEQ ID NO: 1597169 - RNA, 20 nt, Human coronavirus 229E
uuugucuauaccuuccaauu

SEQ ID NO: 1597170 - RNA, 14 nt, Human coronavirus 229E
uuucuauugaaacu

SEQ ID NO: 1597171 - RNA, 11 nt, Human coronavirus 229E
gcuuguugaua

SEQ ID NO: 1597172 - RNA, 21 nt, Human coronavirus 229E
ggcgcaagaauucagaaccag

SEQ ID NO: 1597173 - RNA, 16 nt, Human coronavirus 229E
uaguuacucuguuugc

SEQ ID NO: 1597174 - RNA, 14 nt, Human coronavirus 229E
uguuuaaaauucua

SEQ ID NO: 1597175 - RNA, 15 nt, Human coronavirus 229E
ucuuuguuguguauu

SEQ ID NO: 1597176 - RNA, 18 nt, Human coronavirus 229E
cuauaauugcuguucaac

SEQ ID NO: 1597177 - RNA, 23 nt, Human coronavirus 229E
uguugauggugcuaaaacugaac

SEQ ID NO: 1597178 - RNA, 22 nt, Human coronavirus 229E
gaaagacaaaaauaagcuuaua

SEQ ID NO: 1597179 - RNA, 17 nt, Human coronavirus 229E
gagccaacaauggaaga

SEQ ID NO: 1597180 - RNA, 13 nt, Human coronavirus 229E
augacagacuuga

SEQ ID NO: 1597181 - RNA, 21 nt, Human coronavirus 229E
cuuaagcaguauacuucugcu

SEQ ID NO: 1597182 - RNA, 14 nt, Human coronavirus 229E
cucugaguugcaaa

SEQ ID NO: 1597183 - RNA, 15 nt, Human coronavirus 229E
accuaaucuugcucu

SEQ ID NO: 1597184 - RNA, 13 nt, Human coronavirus 229E
uguuguugaagaa

SEQ ID NO: 1597185 - RNA, 17 nt, Human coronavirus 229E
gagucaggcaacacugu

SEQ ID NO: 1597186 - RNA, 17 nt, Human coronavirus 229E
agcuuggcacugcuggc

SEQ ID NO: 1597187 - RNA, 21 nt, Human coronavirus 229E
uguuuaucauaaacauacguu

SEQ ID NO: 1597188 - RNA, 22 nt, Human coronavirus 229E
cccaucucaaacuucaccugca

SEQ ID NO: 1597189 - RNA, 13 nt, Human coronavirus 229E
ucacuagagaaau

SEQ ID NO: 1597190 - RNA, 13 nt, Human coronavirus 229E
cgagccaacaaug

SEQ ID NO: 1597191 - RNA, 19 nt, Human coronavirus 229E
accccauaaagaugcaaaa

SEQ ID NO: 1597192 - RNA, 22 nt, Human coronavirus 229E
cagucaggaugacaucaugaag

SEQ ID NO: 1597193 - RNA, 20 nt, Human coronavirus 229E
ucaacaagcuccaacaggca

SEQ ID NO: 1597194 - RNA, 15 nt, Human coronavirus 229E
acgcuguuuuaacuu

SEQ ID NO: 1597195 - RNA, 15 nt, Human coronavirus 229E
gaucccuugcuuugg

SEQ ID NO: 1597196 - RNA, 18 nt, Human coronavirus 229E
cauugacuaaguacacug

SEQ ID NO: 1597197 - RNA, 17 nt, Human coronavirus 229E
uauugcaacucuguuau

SEQ ID NO: 1597198 - RNA, 19 nt, Human coronavirus 229E
uugaagacgccuuaagaaa

SEQ ID NO: 1597199 - RNA, 20 nt, Human coronavirus 229E
aauuagcacccuugaaaaua

SEQ ID NO: 1597200 - RNA, 17 nt, Human coronavirus 229E
agguugaguauuuacaa

SEQ ID NO: 1597201 - RNA, 20 nt, Human coronavirus 229E
uaacuuuguuaaauuuggca

SEQ ID NO: 1597202 - RNA, 18 nt, Human coronavirus 229E
aacaucagccguuucaau

SEQ ID NO: 1597203 - RNA, 16 nt, Human coronavirus 229E
agcuuaauuacacugu

SEQ ID NO: 1597204 - RNA, 18 nt, Human coronavirus 229E
gccaaauuacacuguucc

SEQ ID NO: 1597205 - RNA, 23 nt, Human coronavirus 229E
agccaacaauggaagagccaguc

SEQ ID NO: 1597206 - RNA, 19 nt, Human coronavirus 229E
aacuaauuaagcuuuguuu

SEQ ID NO: 1597207 - RNA, 20 nt, Human coronavirus 229E
cugcuuuugugggugcacua

SEQ ID NO: 1597208 - RNA, 20 nt, Human coronavirus 229E
cucguucucagaguucugaa

SEQ ID NO: 1597209 - RNA, 12 nt, Human coronavirus 229E
uguauuuugcuu

SEQ ID NO: 1597210 - RNA, 17 nt, Human coronavirus 229E
acuucaaaccucagagu

SEQ ID NO: 1597211 - RNA, 16 nt, Human coronavirus 229E
uaaagaccucagccuu

SEQ ID NO: 1597212 - RNA, 13 nt, Human coronavirus 229E
auaaccuaccuga

SEQ ID NO: 1597213 - RNA, 20 nt, Human coronavirus 229E
aaacaucuuaugguguuguu

SEQ ID NO: 1597214 - RNA, 16 nt, Human coronavirus 229E
cauacguuuauugugu

SEQ ID NO: 1597215 - RNA, 14 nt, Human coronavirus 229E
ggauacacaaaaaa

SEQ ID NO: 1597216 - RNA, 19 nt, Human coronavirus 229E
aauaaggcucugaaaccau

SEQ ID NO: 1597217 - RNA, 21 nt, Human coronavirus 229E
cuaggugaacgcuaguauaac

SEQ ID NO: 1597218 - RNA, 13 nt, Human coronavirus 229E
ugaaaauaaaucu

SEQ ID NO: 1597219 - RNA, 12 nt, Human coronavirus 229E
cucuagcucuau

SEQ ID NO: 1597220 - RNA, 18 nt, Human coronavirus 229E
ugucacccauuugaagaa

SEQ ID NO: 1597221 - RNA, 20 nt, Human coronavirus 229E
gagccagucauuugucuuga

SEQ ID NO: 1597222 - RNA, 14 nt, Human coronavirus 229E
gaucccuugcuuug

SEQ ID NO: 1597223 - RNA, 20 nt, Human coronavirus 229E
uccagacagcuugcacaaca

SEQ ID NO: 1597224 - RNA, 13 nt, Human coronavirus 229E
uggccccagagac

SEQ ID NO: 1597225 - RNA, 18 nt, Human coronavirus 229E
uuuuucuccacacugucu

SEQ ID NO: 1597226 - RNA, 14 nt, Human coronavirus 229E
agcuuggcacugcu

SEQ ID NO: 1597227 - RNA, 15 nt, Human coronavirus 229E
gccgagcacuacuau

SEQ ID NO: 1597228 - RNA, 16 nt, Human coronavirus 229E
ggcacucacauuuucu

SEQ ID NO: 1597229 - RNA, 23 nt, Human coronavirus 229E
cuaaacgaguuauugauuucuaa

SEQ ID NO: 1597230 - RNA, 16 nt, Human coronavirus 229E
ugugucugcuguuaau

SEQ ID NO: 1597231 - RNA, 17 nt, Human coronavirus 229E
uugcauuuagcuuuuuu

SEQ ID NO: 1597232 - RNA, 15 nt, Human coronavirus 229E
uuuauugcuuuguaa

SEQ ID NO: 1597233 - RNA, 13 nt, Human coronavirus 229E
ugagcuaccugug

SEQ ID NO: 1597234 - RNA, 14 nt, Human coronavirus 229E
guucuuucuuuuau

SEQ ID NO: 1597235 - RNA, 22 nt, Human coronavirus 229E
ccagaguauauugauguuaaua

SEQ ID NO: 1597236 - RNA, 19 nt, Human coronavirus 229E
caaauugccaaauuacacu

SEQ ID NO: 1597237 - RNA, 14 nt, Human coronavirus 229E
aagacgugaaagau

SEQ ID NO: 1597238 - RNA, 17 nt, Human coronavirus 229E
aguuacggcuuuucuaa

SEQ ID NO: 1597239 - RNA, 17 nt, Human coronavirus 229E
cuauuacacaaacuuca

SEQ ID NO: 1597240 - RNA, 17 nt, Human coronavirus 229E
augaugcuauuacacaa

SEQ ID NO: 1597241 - RNA, 22 nt, Human coronavirus 229E
gacagguuauccaagacgugaa

SEQ ID NO: 1597242 - RNA, 16 nt, Human coronavirus 229E
cauaacagucaggaug

SEQ ID NO: 1597243 - RNA, 23 nt, Human coronavirus 229E
cgucccacaaccuguugagggug

SEQ ID NO: 1597244 - RNA, 21 nt, Human coronavirus 229E
ucaagcuaucucuagcucuau

SEQ ID NO: 1597245 - RNA, 17 nt, Human coronavirus 229E
cuaaugagccucuuugu

SEQ ID NO: 1597246 - RNA, 16 nt, Human coronavirus 229E
guccugcuucuucuca

SEQ ID NO: 1597247 - RNA, 14 nt, Human coronavirus 229E
agcuccaacaggca

SEQ ID NO: 1597248 - RNA, 14 nt, Human coronavirus 229E
auacuucugcuugu

SEQ ID NO: 1597249 - RNA, 17 nt, Human coronavirus 229E
uagucuuauacacaaug

SEQ ID NO: 1597250 - RNA, 19 nt, Human coronavirus 229E
cuucgcaaacaguuucaga

SEQ ID NO: 1597251 - RNA, 13 nt, Human coronavirus 229E
auuacguacacau

SEQ ID NO: 1597252 - RNA, 16 nt, Human coronavirus 229E
auaccucaucuguugu

SEQ ID NO: 1597253 - RNA, 21 nt, Human coronavirus 229E
gccacuguguuguuugaaauu

SEQ ID NO: 1597254 - RNA, 17 nt, Human coronavirus 229E
cugaugcaucugaacca

SEQ ID NO: 1597255 - RNA, 18 nt, Human coronavirus 229E
cugaugcaucugaaccac

SEQ ID NO: 1597256 - RNA, 16 nt, Human coronavirus 229E
gaaaauuuuacuaguu

SEQ ID NO: 1597257 - RNA, 16 nt, Human coronavirus 229E
uuaaaauucuaauccu

SEQ ID NO: 1597258 - RNA, 20 nt, Human coronavirus 229E
agcguuuacacuugcuaaug

SEQ ID NO: 1597259 - RNA, 23 nt, Human coronavirus 229E
gacagaaaacgaaagauugcuuc

SEQ ID NO: 1597260 - RNA, 15 nt, Human coronavirus 229E
acagcugcuaugcug

SEQ ID NO: 1597261 - RNA, 19 nt, Human coronavirus 229E
augguacgaucagagcugc

SEQ ID NO: 1597262 - RNA, 23 nt, Human coronavirus 229E
uuucucaacuaacgacuuguacg

SEQ ID NO: 1597263 - RNA, 12 nt, Human coronavirus 229E
ccuagugcacua

SEQ ID NO: 1597264 - RNA, 21 nt, Human coronavirus 229E
uguuuaucagcaagcuguugu

SEQ ID NO: 1597265 - RNA, 16 nt, Human coronavirus 229E
gguacgaucagagcug

SEQ ID NO: 1597266 - RNA, 17 nt, Human coronavirus 229E
auacuacuaguguguau

SEQ ID NO: 1597267 - RNA, 16 nt, Human coronavirus 229E
gaagagccagucauuu

SEQ ID NO: 1597268 - RNA, 20 nt, Human coronavirus 229E
accuaccugaauacaugaca

SEQ ID NO: 1597269 - RNA, 14 nt, Human coronavirus 229E
cagccuuuguugcu

SEQ ID NO: 1597270 - RNA, 19 nt, Human coronavirus 229E
aggcucauuguauguuucu

SEQ ID NO: 1597271 - RNA, 14 nt, Human coronavirus 229E
ugagguuaaugcaa

SEQ ID NO: 1597272 - RNA, 11 nt, Human coronavirus 229E
uauaauuuaua

SEQ ID NO: 1597273 - RNA, 12 nt, Human coronavirus 229E
uauguugcuauu

SEQ ID NO: 1597274 - RNA, 21 nt, Human coronavirus 229E
ccaaauacguugcuguuuaug

SEQ ID NO: 1597275 - RNA, 22 nt, Human coronavirus 229E
caugaaggcaguugcugcggcu

SEQ ID NO: 1597276 - RNA, 16 nt, Human coronavirus 229E
ccugugucuauugugu

SEQ ID NO: 1597277 - RNA, 17 nt, Human coronavirus 229E
uccaagacgugaaagau

SEQ ID NO: 1597278 - RNA, 15 nt, Human coronavirus 229E
auuucuaaacuaaac

SEQ ID NO: 1597279 - RNA, 15 nt, Human coronavirus 229E
cacgguggaaaagac

SEQ ID NO: 1597280 - RNA, 22 nt, Human coronavirus 229E
aucagaguccugcuucuucuca

SEQ ID NO: 1597281 - RNA, 14 nt, Human coronavirus 229E
auguuacugaaccu

SEQ ID NO: 1597282 - RNA, 13 nt, Human coronavirus 229E
aaacucugauuga

SEQ ID NO: 1597283 - RNA, 17 nt, Human coronavirus 229E
ugucacccauuugaaga

SEQ ID NO: 1597284 - RNA, 12 nt, Human coronavirus 229E
uguuggugcuau

SEQ ID NO: 1597285 - RNA, 16 nt, Human coronavirus 229E
ccagugaaauuagcac

SEQ ID NO: 1597286 - RNA, 21 nt, Human coronavirus 229E
cauugucacccauuugaagaa

SEQ ID NO: 1597287 - RNA, 20 nt, Human coronavirus 229E
ucaggcuaucuaugacagac

SEQ ID NO: 1597288 - RNA, 16 nt, Human coronavirus 229E
uuuguaaauacuacua

SEQ ID NO: 1597289 - RNA, 17 nt, Human coronavirus 229E
uuguucacauugcaacu

SEQ ID NO: 1597290 - RNA, 23 nt, Human coronavirus 229E
uuucaggugaugcucacauacca

SEQ ID NO: 1597291 - RNA, 13 nt, Human coronavirus 229E
gauuuuguucaaa

SEQ ID NO: 1597292 - RNA, 19 nt, Human coronavirus 229E
gauuuuuccauacagcuug

SEQ ID NO: 1597293 - RNA, 17 nt, Human coronavirus 229E
gcaaacaguuucagacu

SEQ ID NO: 1597294 - RNA, 18 nt, Human coronavirus 229E
cuauaauugcuguucaac

SEQ ID NO: 1597295 - RNA, 15 nt, Human coronavirus 229E
acucuguuugcaacg

SEQ ID NO: 1597296 - RNA, 16 nt, Human coronavirus 229E
cacauuuguuaacauu

SEQ ID NO: 1597297 - RNA, 17 nt, Human coronavirus 229E
cuguucaaaaauugcaa

SEQ ID NO: 1597298 - RNA, 13 nt, Human coronavirus 229E
cuuauaauugcac

SEQ ID NO: 1597299 - RNA, 14 nt, Human coronavirus 229E
cuguuguugaagaa

SEQ ID NO: 1597300 - RNA, 15 nt, Human coronavirus 229E
gcaucuuuuaacaaa

SEQ ID NO: 1597301 - RNA, 14 nt, Human coronavirus 229E
auugaaaauugcaa

SEQ ID NO: 1597302 - RNA, 23 nt, Human coronavirus 229E
agauuguuuuaugguuugaagau

SEQ ID NO: 1597303 - RNA, 24 nt, Human coronavirus 229E
aauugcaaacucugauugacaaca

SEQ ID NO: 1597304 - RNA, 14 nt, Human coronavirus 229E
aauuuauugcaacu

SEQ ID NO: 1597305 - RNA, 19 nt, Human coronavirus 229E
uaaucuugcucuuuacaaa

SEQ ID NO: 1597306 - RNA, 12 nt, Human coronavirus 229E
uacaaagaaggc

SEQ ID NO: 1597307 - RNA, 19 nt, Human coronavirus 229E
ugaccagugaaauuagcac

SEQ ID NO: 1597308 - RNA, 19 nt, Human coronavirus 229E
gcuuaauuacacuguucaa

SEQ ID NO: 1597309 - RNA, 15 nt, Human coronavirus 229E
gaauuaaguuacaaa

SEQ ID NO: 1597310 - RNA, 21 nt, Human coronavirus 229E
gaucaauuccuuuacauaggc

SEQ ID NO: 1597311 - RNA, 21 nt, Human coronavirus 229E
uuauauaacggugaaugugua

SEQ ID NO: 1597312 - RNA, 19 nt, Human coronavirus 229E
uugaaaagauccacauaca

SEQ ID NO: 1597313 - RNA, 13 nt, Human coronavirus 229E
uuaaaaaugugua

SEQ ID NO: 1597314 - RNA, 20 nt, Human coronavirus 229E
ugaucaacaaguagauaggc

SEQ ID NO: 1597315 - RNA, 19 nt, Human coronavirus 229E
ugauuacugguagauuggc

SEQ ID NO: 1597316 - RNA, 22 nt, Human coronavirus 229E
uauccaagacgugaaagauggc

SEQ ID NO: 1597317 - RNA, 16 nt, Human coronavirus 229E
uacugcacuuaacaag

SEQ ID NO: 1597318 - RNA, 14 nt, Human coronavirus 229E
uacuuuuuagcaaa

SEQ ID NO: 1597319 - RNA, 14 nt, Human coronavirus 229E
uagaagacauacuu

SEQ ID NO: 1597320 - RNA, 20 nt, Human coronavirus 229E
uacuaucaacccauucaaca

SEQ ID NO: 1597321 - RNA, 18 nt, Human coronavirus 229E
guuaauaacuuuguuaaa

SEQ ID NO: 1597322 - RNA, 20 nt, Human coronavirus 229E
guggccaaugguguuaaagc

SEQ ID NO: 1597323 - RNA, 18 nt, Human coronavirus 229E
gugcuuccagacagcuug

SEQ ID NO: 1597324 - RNA, 15 nt, Human coronavirus 229E
cccagagaccuugac

SEQ ID NO: 1597325 - RNA, 14 nt, Human coronavirus 229E
ccuuccaauuggac

SEQ ID NO: 1597326 - RNA, 22 nt, Human coronavirus 229E
caauuauuauagaaucacaucu

SEQ ID NO: 1597327 - RNA, 18 nt, Human coronavirus OC43 (HCoV-OC43)
uuguugaggcuuauaaua

SEQ ID NO: 1597328 - RNA, 22 nt, Human coronavirus OC43 (HCoV-OC43)
uuuaccauaguggccauuauua

SEQ ID NO: 1597329 - RNA, 16 nt, Human coronavirus OC43 (HCoV-OC43)
uaguaaaugaaugaag

SEQ ID NO: 1597330 - RNA, 15 nt, Human coronavirus OC43 (HCoV-OC43)
caacacuguuucaaa

SEQ ID NO: 1597331 - RNA, 16 nt, Human coronavirus OC43 (HCoV-OC43)
acucucuaucagaaug

SEQ ID NO: 1597332 - RNA, 18 nt, Human coronavirus OC43 (HCoV-OC43)
aagagccagcauguuaag

SEQ ID NO: 1597333 - RNA, 16 nt, Human coronavirus OC43 (HCoV-OC43)
aguguugcagugccca

SEQ ID NO: 1597334 - RNA, 18 nt, Human coronavirus OC43 (HCoV-OC43)
cagguuuugagaccauaa

SEQ ID NO: 1597335 - RNA, 22 nt, Human coronavirus OC43 (HCoV-OC43)
uauguuaggccgauaauugagg

SEQ ID NO: 1597336 - RNA, 19 nt, Human coronavirus OC43 (HCoV-OC43)
ucaaaagcuuauugcuaau

SEQ ID NO: 1597337 - RNA, 23 nt, Human coronavirus OC43 (HCoV-OC43)
aauaugaguccaaaaccacagcg

SEQ ID NO: 1597338 - RNA, 18 nt, Human coronavirus OC43 (HCoV-OC43)
gacugcagaggacaucag

SEQ ID NO: 1597339 - RNA, 19 nt, Human coronavirus OC43 (HCoV-OC43)
uauggagaagguuaaugaa

SEQ ID NO: 1597340 - RNA, 18 nt, Human coronavirus OC43 (HCoV-OC43)
aagccccgccagaagagg

SEQ ID NO: 1597341 - RNA, 17 nt, Human coronavirus OC43 (HCoV-OC43)
aguugaaaguuuugugu

SEQ ID NO: 1597342 - RNA, 19 nt, Human coronavirus OC43 (HCoV-OC43)
uacuaguuauauuaaugau

SEQ ID NO: 1597343 - RNA, 13 nt, Human coronavirus OC43 (HCoV-OC43)
guacugauacugu

SEQ ID NO: 1597344 - RNA, 22 nt, Human coronavirus OC43 (HCoV-OC43)
gaaugugucaaaagccaaucau

SEQ ID NO: 1597345 - RNA, 16 nt, Human coronavirus OC43 (HCoV-OC43)
uugcuguuuauguuaa

SEQ ID NO: 1597346 - RNA, 23 nt, Human coronavirus OC43 (HCoV-OC43)
gcaacuuuuaaauuguguauuca

SEQ ID NO: 1597347 - RNA, 18 nt, Human coronavirus OC43 (HCoV-OC43)
uacaaucauauugcaauu

SEQ ID NO: 1597348 - RNA, 16 nt, Human coronavirus OC43 (HCoV-OC43)
auggacauuuggagac

SEQ ID NO: 1597349 - RNA, 19 nt, Human coronavirus OC43 (HCoV-OC43)
guaaccccucgcagaaaag

SEQ ID NO: 1597350 - RNA, 19 nt, Human coronavirus OC43 (HCoV-OC43)
guuuguaugaaauucaaau

SEQ ID NO: 1597351 - RNA, 23 nt, Human coronavirus OC43 (HCoV-OC43)
uuucugugguaaugguaaucaua

SEQ ID NO: 1597352 - RNA, 17 nt, Human coronavirus OC43 (HCoV-OC43)
ucaagguauaaaacuag

SEQ ID NO: 1597353 - RNA, 11 nt, Human coronavirus OC43 (HCoV-OC43)
uuaauuucaau

SEQ ID NO: 1597354 - RNA, 11 nt, Human coronavirus OC43 (HCoV-OC43)
ccgccagaaga

SEQ ID NO: 1597355 - RNA, 22 nt, Human coronavirus OC43 (HCoV-OC43)
guuauuacccuacuucagguuc

SEQ ID NO: 1597356 - RNA, 23 nt, Human coronavirus OC43 (HCoV-OC43)
gcgcacauccagcagagccucua

SEQ ID NO: 1597357 - RNA, 18 nt, Human coronavirus OC43 (HCoV-OC43)
agcuaauaguuuaaugaa

SEQ ID NO: 1597358 - RNA, 17 nt, Human coronavirus OC43 (HCoV-OC43)
aagucgcaguauguuug

SEQ ID NO: 1597359 - RNA, 12 nt, Human coronavirus OC43 (HCoV-OC43)
uuuaaauugugu

SEQ ID NO: 1597360 - RNA, 22 nt, Human coronavirus OC43 (HCoV-OC43)
guaggcaguuuuaugaguuuua

SEQ ID NO: 1597361 - RNA, 15 nt, Human coronavirus OC43 (HCoV-OC43)
gaagagccagcaugu

SEQ ID NO: 1597362 - RNA, 22 nt, Human coronavirus OC43 (HCoV-OC43)
auuguugagaaauaauaucuaa

SEQ ID NO: 1597363 - RNA, 13 nt, Human coronavirus OC43 (HCoV-OC43)
caauucuggcaau

SEQ ID NO: 1597364 - RNA, 19 nt, Human coronavirus OC43 (HCoV-OC43)
ucacuugauuauauaaaug

SEQ ID NO: 1597365 - RNA, 22 nt, Human coronavirus OC43 (HCoV-OC43)
aaagugcagaauuuaucuggga

SEQ ID NO: 1597366 - RNA, 20 nt, Human coronavirus OC43 (HCoV-OC43)
gacugccaucaacccaaaag

SEQ ID NO: 1597367 - RNA, 16 nt, Human coronavirus OC43 (HCoV-OC43)
uauuuaaauacuacgu

SEQ ID NO: 1597368 - RNA, 19 nt, Human coronavirus OC43 (HCoV-OC43)
uacuguugauguuacuaau

SEQ ID NO: 1597369 - RNA, 17 nt, Human coronavirus OC43 (HCoV-OC43)
auguucaaaccaggggu

SEQ ID NO: 1597370 - RNA, 22 nt, Human coronavirus OC43 (HCoV-OC43)
uggaguuucaacccagaaacaa

SEQ ID NO: 1597371 - RNA, 17 nt, Human coronavirus OC43 (HCoV-OC43)
aagaaugguuuuacuuu

SEQ ID NO: 1597372 - RNA, 16 nt, Human coronavirus OC43 (HCoV-OC43)
acuacaccagcaccag

SEQ ID NO: 1597373 - RNA, 19 nt, Human coronavirus OC43 (HCoV-OC43)
ugccacuaaaccucagcaa

SEQ ID NO: 1597374 - RNA, 17 nt, Human coronavirus OC43 (HCoV-OC43)
auaagaauggacaagga

SEQ ID NO: 1597375 - RNA, 14 nt, Human coronavirus OC43 (HCoV-OC43)
cugcgcuguuaauu

SEQ ID NO: 1597376 - RNA, 17 nt, Human coronavirus OC43 (HCoV-OC43)
auguaaugcugaacacu

SEQ ID NO: 1597377 - RNA, 19 nt, Human coronavirus OC43 (HCoV-OC43)
uacuaauuauuuaacuugu

SEQ ID NO: 1597378 - RNA, 20 nt, Human coronavirus OC43 (HCoV-OC43)
gacaucagccuucuuaagaa

SEQ ID NO: 1597379 - RNA, 12 nt, Human coronavirus OC43 (HCoV-OC43)
gccuuucacgcu

SEQ ID NO: 1597380 - RNA, 23 nt, Human coronavirus OC43 (HCoV-OC43)
gaugccacuaaaccucagcaagu

SEQ ID NO: 1597381 - RNA, 14 nt, Human coronavirus OC43 (HCoV-OC43)
ccgacaagugccca

SEQ ID NO: 1597382 - RNA, 16 nt, Human coronavirus OC43 (HCoV-OC43)
uaaaggaauggaauuu

SEQ ID NO: 1597383 - RNA, 22 nt, Human coronavirus OC43 (HCoV-OC43)
caaugguuuaaaaaucaaacau

SEQ ID NO: 1597384 - RNA, 19 nt, Human coronavirus OC43 (HCoV-OC43)
cucugguguaacaccugac

SEQ ID NO: 1597385 - RNA, 16 nt, Human coronavirus OC43 (HCoV-OC43)
agcuuggcuuaaugau

SEQ ID NO: 1597386 - RNA, 22 nt, Human coronavirus OC43 (HCoV-OC43)
caaguguaauauuuuugcuaau

SEQ ID NO: 1597387 - RNA, 16 nt, Human coronavirus OC43 (HCoV-OC43)
uaugaggguguuaauu

SEQ ID NO: 1597388 - RNA, 17 nt, Human coronavirus OC43 (HCoV-OC43)
gacguucuuuuaaaaca

SEQ ID NO: 1597389 - RNA, 17 nt, Human coronavirus OC43 (HCoV-OC43)
auaagcgugguuuucuu

SEQ ID NO: 1597390 - RNA, 22 nt, Human coronavirus OC43 (HCoV-OC43)
uacacugguagugguuacuacu

SEQ ID NO: 1597391 - RNA, 20 nt, Human coronavirus OC43 (HCoV-OC43)
caaugauguaaaaccaccag

SEQ ID NO: 1597392 - RNA, 22 nt, Human coronavirus OC43 (HCoV-OC43)
uguguuaaauuauaaagguuua

SEQ ID NO: 1597393 - RNA, 23 nt, Human coronavirus OC43 (HCoV-OC43)
acaacaagaugguaugaugaaua

SEQ ID NO: 1597394 - RNA, 11 nt, Human coronavirus OC43 (HCoV-OC43)
uuaaaacuugg

SEQ ID NO: 1597395 - RNA, 21 nt, Human coronavirus OC43 (HCoV-OC43)
gggauuauuauuauaagguug

SEQ ID NO: 1597396 - RNA, 19 nt, Human coronavirus OC43 (HCoV-OC43)
gcagaacucgcacccacag

SEQ ID NO: 1597397 - RNA, 17 nt, Human coronavirus OC43 (HCoV-OC43)
acuacuacccugaaccu

SEQ ID NO: 1597398 - RNA, 15 nt, Human coronavirus OC43 (HCoV-OC43)
uuauuauaagguuga

SEQ ID NO: 1597399 - RNA, 19 nt, Human coronavirus OC43 (HCoV-OC43)
guguugcagugcccaaaag

SEQ ID NO: 1597400 - RNA, 15 nt, Human coronavirus OC43 (HCoV-OC43)
gaagagcucaaccca

SEQ ID NO: 1597401 - RNA, 17 nt, Human coronavirus OC43 (HCoV-OC43)
uuacagacacugguguu

SEQ ID NO: 1597402 - RNA, 15 nt, Human coronavirus OC43 (HCoV-OC43)
guccccuucuauuua

SEQ ID NO: 1597403 - RNA, 18 nt, Human coronavirus OC43 (HCoV-OC43)
auuuuuaggaguuuucac

SEQ ID NO: 1597404 - RNA, 17 nt, Human coronavirus OC43 (HCoV-OC43)
gcaguguuuugguaaga

SEQ ID NO: 1597405 - RNA, 23 nt, Human coronavirus OC43 (HCoV-OC43)
cagaauuuuggugguggagaaau

SEQ ID NO: 1597406 - RNA, 17 nt, Human coronavirus OC43 (HCoV-OC43)
gauucguaguugcuaua

SEQ ID NO: 1597407 - RNA, 13 nt, Human coronavirus OC43 (HCoV-OC43)
agaagauggauga

SEQ ID NO: 1597408 - RNA, 16 nt, Human coronavirus OC43 (HCoV-OC43)
auaguguuggagaaag

SEQ ID NO: 1597409 - RNA, 15 nt, Human coronavirus OC43 (HCoV-OC43)
aaaacuuggcaagga

SEQ ID NO: 1597410 - RNA, 20 nt, Human coronavirus OC43 (HCoV-OC43)
guaaauccaaacauuaugau

SEQ ID NO: 1597411 - RNA, 14 nt, Human coronavirus OC43 (HCoV-OC43)
aaugaaugaaguua

SEQ ID NO: 1597412 - RNA, 17 nt, Human coronavirus OC43 (HCoV-OC43)
aggagauuuaaagugua

SEQ ID NO: 1597413 - RNA, 23 nt, Human coronavirus OC43 (HCoV-OC43)
acccaguaauuaguaaaugaaug

SEQ ID NO: 1597414 - RNA, 19 nt, Human coronavirus OC43 (HCoV-OC43)
gugacagucguucagauug

SEQ ID NO: 1597415 - RNA, 19 nt, Human coronavirus OC43 (HCoV-OC43)
uaaauuuaacuaucaauuu

SEQ ID NO: 1597416 - RNA, 13 nt, Human coronavirus OC43 (HCoV-OC43)
caugauguuaaua

SEQ ID NO: 1597417 - RNA, 18 nt, Human coronavirus OC43 (HCoV-OC43)
gauacuaguuauauuaau

SEQ ID NO: 1597418 - RNA, 15 nt, Human coronavirus OC43 (HCoV-OC43)
gauggaugagcccua

SEQ ID NO: 1597419 - RNA, 15 nt, Human coronavirus OC43 (HCoV-OC43)
gcugcugauauuaau

SEQ ID NO: 1597420 - RNA, 22 nt, Human coronavirus OC43 (HCoV-OC43)
uauagcaccaccuacugguguu

SEQ ID NO: 1597421 - RNA, 18 nt, Human coronavirus OC43 (HCoV-OC43)
auuuuacgccuuaucaug

SEQ ID NO: 1597422 - RNA, 13 nt, Human coronavirus OC43 (HCoV-OC43)
caacaaauuauuu

SEQ ID NO: 1597423 - RNA, 17 nt, Human coronavirus OC43 (HCoV-OC43)
gcagguacuaauuauuu

SEQ ID NO: 1597424 - RNA, 17 nt, Human coronavirus OC43 (HCoV-OC43)
uaaucauauuguuaaua

SEQ ID NO: 1597425 - RNA, 22 nt, Human coronavirus OC43 (HCoV-OC43)
auuguuugggguuuuaugaauc

SEQ ID NO: 1597426 - RNA, 19 nt, Human coronavirus OC43 (HCoV-OC43)
auguauaguguuggagaaa

SEQ ID NO: 1597427 - RNA, 19 nt, Human coronavirus OC43 (HCoV-OC43)
ccugacgagccccagaagg

SEQ ID NO: 1597428 - RNA, 21 nt, Human coronavirus OC43 (HCoV-OC43)
uuauaagaauauggcugugua

SEQ ID NO: 1597429 - RNA, 18 nt, Human coronavirus OC43 (HCoV-OC43)
ggaacuagugacccacag

SEQ ID NO: 1597430 - RNA, 19 nt, Human coronavirus OC43 (HCoV-OC43)
uauguugguguuuaugaua

SEQ ID NO: 1597431 - RNA, 21 nt, Human coronavirus OC43 (HCoV-OC43)
cagccuuacuuuuguuaaugu

SEQ ID NO: 1597432 - RNA, 17 nt, Human coronavirus OC43 (HCoV-OC43)
ucuaucagaauggaugu

SEQ ID NO: 1597433 - RNA, 18 nt, Human coronavirus OC43 (HCoV-OC43)
uuuaaugcuguugauugu

SEQ ID NO: 1597434 - RNA, 13 nt, Human coronavirus OC43 (HCoV-OC43)
aggcugaugucaa

SEQ ID NO: 1597435 - RNA, 11 nt, Human coronavirus OC43 (HCoV-OC43)
uacuguuaauu

SEQ ID NO: 1597436 - RNA, 16 nt, Human coronavirus OC43 (HCoV-OC43)
gacugccaucaaccca

SEQ ID NO: 1597437 - RNA, 16 nt, Human coronavirus OC43 (HCoV-OC43)
cucuuccgaaccagca

SEQ ID NO: 1597438 - RNA, 18 nt, Human coronavirus OC43 (HCoV-OC43)
gauuuacuuuuugauaaa

SEQ ID NO: 1597439 - RNA, 14 nt, Human coronavirus OC43 (HCoV-OC43)
auugcaccaggagu

SEQ ID NO: 1597440 - RNA, 16 nt, Human coronavirus OC43 (HCoV-OC43)
uuauuuuuaaugcugu

SEQ ID NO: 1597441 - RNA, 16 nt, Human coronavirus OC43 (HCoV-OC43)
ucucagaauuagaaga

SEQ ID NO: 1597442 - RNA, 13 nt, Human coronavirus OC43 (HCoV-OC43)
uauuuuguuaaug

SEQ ID NO: 1597443 - RNA, 20 nt, Human coronavirus OC43 (HCoV-OC43)
uuucuguuagcagguuuaau

SEQ ID NO: 1597444 - RNA, 21 nt, Human coronavirus OC43 (HCoV-OC43)
aacaaugcacuguucagcagu

SEQ ID NO: 1597445 - RNA, 18 nt, Human coronavirus OC43 (HCoV-OC43)
guuaauguaccauauguu

SEQ ID NO: 1597446 - RNA, 18 nt, Human coronavirus OC43 (HCoV-OC43)
ugcagguacuaauuauuu

SEQ ID NO: 1597447 - RNA, 11 nt, Human coronavirus OC43 (HCoV-OC43)
cuaucugggaa

SEQ ID NO: 1597448 - RNA, 17 nt, Human coronavirus OC43 (HCoV-OC43)
agcuccuaagagugguu

SEQ ID NO: 1597449 - RNA, 17 nt, Human coronavirus OC43 (HCoV-OC43)
uccugacgagccccaga

SEQ ID NO: 1597450 - RNA, 21 nt, Human coronavirus OC43 (HCoV-OC43)
auuguuauuauuuaguuuuac

SEQ ID NO: 1597451 - RNA, 15 nt, Human coronavirus OC43 (HCoV-OC43)
uacuuuuuaugcaua

SEQ ID NO: 1597452 - RNA, 17 nt, Human coronavirus OC43 (HCoV-OC43)
aggcccuaaucagaauu

SEQ ID NO: 1597453 - RNA, 13 nt, Human coronavirus OC43 (HCoV-OC43)
uguuuaauguuua

SEQ ID NO: 1597454 - RNA, 14 nt, Human coronavirus OC43 (HCoV-OC43)
ucaacaaauuauuu

SEQ ID NO: 1597455 - RNA, 18 nt, Human coronavirus OC43 (HCoV-OC43)
uugcgauuguaauuauug

SEQ ID NO: 1597456 - RNA, 12 nt, Human coronavirus OC43 (HCoV-OC43)
uauugaugcugc

SEQ ID NO: 1597457 - RNA, 22 nt, Human coronavirus OC43 (HCoV-OC43)
auaagaauggacaaggagaaaa

SEQ ID NO: 1597458 - RNA, 22 nt, Human coronavirus OC43 (HCoV-OC43)
auuaccuggcgcagacaggagu

SEQ ID NO: 1597459 - RNA, 12 nt, Human coronavirus OC43 (HCoV-OC43)
uugcagugccca

SEQ ID NO: 1597460 - RNA, 23 nt, Human coronavirus OC43 (HCoV-OC43)
auugcuagucuuguucuggcaaa

SEQ ID NO: 1597461 - RNA, 13 nt, Human coronavirus OC43 (HCoV-OC43)
gaaauauaagaga

SEQ ID NO: 1597462 - RNA, 20 nt, Human coronavirus OC43 (HCoV-OC43)
acaggaguuaaauguuuaug

SEQ ID NO: 1597463 - RNA, 15 nt, Human coronavirus OC43 (HCoV-OC43)
gaagguuauagcaga

SEQ ID NO: 1597464 - RNA, 23 nt, Human coronavirus OC43 (HCoV-OC43)
auuuuuauuugucagguugugac

SEQ ID NO: 1597465 - RNA, 17 nt, Human coronavirus OC43 (HCoV-OC43)
cugacuuguaauaguaa

SEQ ID NO: 1597466 - RNA, 16 nt, Human coronavirus OC43 (HCoV-OC43)
aaaggaacaauguaug

SEQ ID NO: 1597467 - RNA, 22 nt, Human coronavirus OC43 (HCoV-OC43)
gaugucuugcugcuauaauaga

SEQ ID NO: 1597468 - RNA, 14 nt, Human coronavirus OC43 (HCoV-OC43)
cuauuacauuuaaa

SEQ ID NO: 1597469 - RNA, 13 nt, Human coronavirus OC43 (HCoV-OC43)
cagcauugcuauu

SEQ ID NO: 1597470 - RNA, 16 nt, Human coronavirus OC43 (HCoV-OC43)
cuuacuuuuguuaaug

SEQ ID NO: 1597471 - RNA, 15 nt, Human coronavirus OC43 (HCoV-OC43)
gauuauauaaauguu

SEQ ID NO: 1597472 - RNA, 21 nt, Human coronavirus OC43 (HCoV-OC43)
guugguguuuaugauauuaau

SEQ ID NO: 1597473 - RNA, 21 nt, Human coronavirus OC43 (HCoV-OC43)
aagcucagauagauagacuua

SEQ ID NO: 1597474 - RNA, 14 nt, Human coronavirus OC43 (HCoV-OC43)
gagaccauaaugaa

SEQ ID NO: 1597475 - RNA, 21 nt, Human coronavirus OC43 (HCoV-OC43)
uaugucaugccucugacuugu

SEQ ID NO: 1597476 - RNA, 21 nt, Human coronavirus OC43 (HCoV-OC43)
uuacuauucuucauaugcugu

SEQ ID NO: 1597477 - RNA, 13 nt, Human coronavirus OC43 (HCoV-OC43)
gcgcuuucacacu

SEQ ID NO: 1597478 - RNA, 16 nt, Human coronavirus OC43 (HCoV-OC43)
agcauacugccaaaga

SEQ ID NO: 1597479 - RNA, 16 nt, Human coronavirus OC43 (HCoV-OC43)
uguccugcagguacua

SEQ ID NO: 1597480 - RNA, 20 nt, Human coronavirus OC43 (HCoV-OC43)
uuacccucugguaauuauuu

SEQ ID NO: 1597481 - RNA, 19 nt, Human coronavirus OC43 (HCoV-OC43)
aacaagaugguaugaugaa

SEQ ID NO: 1597482 - RNA, 15 nt, Human coronavirus OC43 (HCoV-OC43)
caacagcuuagugau

SEQ ID NO: 1597483 - RNA, 14 nt, Human coronavirus OC43 (HCoV-OC43)
auauguuuauaaug

SEQ ID NO: 1597484 - RNA, 21 nt, Human coronavirus OC43 (HCoV-OC43)
uuggugguggagaaauguuaa

SEQ ID NO: 1597485 - RNA, 20 nt, Human coronavirus OC43 (HCoV-OC43)
uacgguuuuagagacuacau

SEQ ID NO: 1597486 - RNA, 13 nt, Human coronavirus OC43 (HCoV-OC43)
uaaguuugcuaua

SEQ ID NO: 1597487 - RNA, 16 nt, Human coronavirus OC43 (HCoV-OC43)
agugagauuaagugua

SEQ ID NO: 1597488 - RNA, 14 nt, Human coronavirus OC43 (HCoV-OC43)
uauaguguuggaga

SEQ ID NO: 1597489 - RNA, 17 nt, Human coronavirus OC43 (HCoV-OC43)
ugggucgcuagcaacca

SEQ ID NO: 1597490 - RNA, 19 nt, Human coronavirus OC43 (HCoV-OC43)
ucaacccccauaauuauuc

SEQ ID NO: 1597491 - RNA, 19 nt, Human coronavirus OC43 (HCoV-OC43)
ugauguaaaaccaccaguc

SEQ ID NO: 1597492 - RNA, 14 nt, Human coronavirus OC43 (HCoV-OC43)
acagaaguaaauga

SEQ ID NO: 1597493 - RNA, 13 nt, Human coronavirus OC43 (HCoV-OC43)
cugacgagcccca

SEQ ID NO: 1597494 - RNA, 22 nt, Human coronavirus OC43 (HCoV-OC43)
augguauuuuuacuaucuggga

SEQ ID NO: 1597495 - RNA, 16 nt, Human coronavirus OC43 (HCoV-OC43)
cuaucagaauggaugu

SEQ ID NO: 1597496 - RNA, 12 nt, Human coronavirus OC43 (HCoV-OC43)
uaauaauuguac

SEQ ID NO: 1597497 - RNA, 15 nt, Human coronavirus OC43 (HCoV-OC43)
uucuauaguuuuuac

SEQ ID NO: 1597498 - RNA, 20 nt, Human coronavirus OC43 (HCoV-OC43)
aaucaagguagauuuugugc

SEQ ID NO: 1597499 - RNA, 19 nt, Human coronavirus OC43 (HCoV-OC43)
uagcuaauaguuuaaugaa

SEQ ID NO: 1597500 - RNA, 13 nt, Human coronavirus OC43 (HCoV-OC43)
acuaugguuuaaa

SEQ ID NO: 1597501 - RNA, 21 nt, Human coronavirus OC43 (HCoV-OC43)
gcuuuaguuaaaauucaagcu

SEQ ID NO: 1597502 - RNA, 14 nt, Human coronavirus OC43 (HCoV-OC43)
aguaugucacagcg

SEQ ID NO: 1597503 - RNA, 17 nt, Human coronavirus OC43 (HCoV-OC43)
agucuuaaaucagagcu

SEQ ID NO: 1597504 - RNA, 23 nt, Human coronavirus OC43 (HCoV-OC43)
guguaccauuuuauuuaaauguu

SEQ ID NO: 1597505 - RNA, 15 nt, Human coronavirus OC43 (HCoV-OC43)
auguuuauaauggcu

SEQ ID NO: 1597506 - RNA, 18 nt, Human coronavirus OC43 (HCoV-OC43)
auacuaguuauauuaaug

SEQ ID NO: 1597507 - RNA, 16 nt, Human coronavirus OC43 (HCoV-OC43)
uguaauaguaagguua

SEQ ID NO: 1597508 - RNA, 22 nt, Human coronavirus OC43 (HCoV-OC43)
uguguugucaaugcuuauaaua

SEQ ID NO: 1597509 - RNA, 20 nt, Human coronavirus OC43 (HCoV-OC43)
caaaccagggguagaagagc

SEQ ID NO: 1597510 - RNA, 16 nt, Human coronavirus OC43 (HCoV-OC43)
uacaccagcaccaguu

SEQ ID NO: 1597511 - RNA, 21 nt, Human coronavirus OC43 (HCoV-OC43)
ugaaugcugauuauuuguauu

SEQ ID NO: 1597512 - RNA, 18 nt, Human coronavirus OC43 (HCoV-OC43)
agcacuaagcuuaaagau

SEQ ID NO: 1597513 - RNA, 19 nt, Human coronavirus OC43 (HCoV-OC43)
uguuuuauacucagguuua

SEQ ID NO: 1597514 - RNA, 21 nt, Human coronavirus OC43 (HCoV-OC43)
aaugguuuuacuuuagaauau

SEQ ID NO: 1597515 - RNA, 16 nt, Human coronavirus OC43 (HCoV-OC43)
aacucgcacccacagc

SEQ ID NO: 1597516 - RNA, 13 nt, Human coronavirus OC43 (HCoV-OC43)
uaaaguuacuauu

SEQ ID NO: 1597517 - RNA, 19 nt, Human coronavirus OC43 (HCoV-OC43)
aagauuagaguuggccaaa

SEQ ID NO: 1597518 - RNA, 12 nt, Human coronavirus OC43 (HCoV-OC43)
gcuuucaaucaa

SEQ ID NO: 1597519 - RNA, 16 nt, Human coronavirus OC43 (HCoV-OC43)
uauaaucuuaacuauu

SEQ ID NO: 1597520 - RNA, 14 nt, Human coronavirus OC43 (HCoV-OC43)
uugauguggaugac

SEQ ID NO: 1597521 - RNA, 14 nt, Human coronavirus OC43 (HCoV-OC43)
cuuguucuggcaaa

SEQ ID NO: 1597522 - RNA, 19 nt, Human coronavirus OC43 (HCoV-OC43)
gaaguuaauuauggccaau

SEQ ID NO: 1597523 - RNA, 14 nt, Human coronavirus OC43 (HCoV-OC43)
augcuugguuuaag

SEQ ID NO: 1597524 - RNA, 22 nt, Human coronavirus OC43 (HCoV-OC43)
uguuaauaguggucuuacuugu

SEQ ID NO: 1597525 - RNA, 22 nt, Human coronavirus OC43 (HCoV-OC43)
cugguuuugaucuuaauuguua

SEQ ID NO: 1597526 - RNA, 16 nt, Human coronavirus OC43 (HCoV-OC43)
uaagaagauggaugag

SEQ ID NO: 1597527 - RNA, 18 nt, Human coronavirus OC43 (HCoV-OC43)
uauuuucauuuuuaucaa

SEQ ID NO: 1597528 - RNA, 19 nt, Human coronavirus OC43 (HCoV-OC43)
aagccccgccagaagagga

SEQ ID NO: 1597529 - RNA, 18 nt, Human coronavirus OC43 (HCoV-OC43)
uaguagagccaauucugg

SEQ ID NO: 1597530 - RNA, 14 nt, Human coronavirus OC43 (HCoV-OC43)
aucaaugguuuaaa

SEQ ID NO: 1597531 - RNA, 22 nt, Human coronavirus OC43 (HCoV-OC43)
gaauccugacgagccccagaag

SEQ ID NO: 1597532 - RNA, 23 nt, Human coronavirus OC43 (HCoV-OC43)
cuauacugaagacaccucagaaa

SEQ ID NO: 1597533 - RNA, 22 nt, Human coronavirus OC43 (HCoV-OC43)
gaguccaaaaccacagcgucag

SEQ ID NO: 1597534 - RNA, 17 nt, Human coronavirus OC43 (HCoV-OC43)
auacuuggauguacacu

SEQ ID NO: 1597535 - RNA, 21 nt, Human coronavirus OC43 (HCoV-OC43)
ugauuuuuauuugucagguug

SEQ ID NO: 1597536 - RNA, 12 nt, Human coronavirus OC43 (HCoV-OC43)
auucguuuugaa

SEQ ID NO: 1597537 - RNA, 19 nt, Human coronavirus OC43 (HCoV-OC43)
guuuuauagaagauucugu

SEQ ID NO: 1597538 - RNA, 22 nt, Human coronavirus OC43 (HCoV-OC43)
agcuauggagaagguuaaugaa

SEQ ID NO: 1597539 - RNA, 16 nt, Human coronavirus OC43 (HCoV-OC43)
uucuggcaaaacuugg

SEQ ID NO: 1597540 - RNA, 21 nt, Human coronavirus OC43 (HCoV-OC43)
cagccuucuuaagaagaugga

SEQ ID NO: 1597541 - RNA, 16 nt, Human coronavirus OC43 (HCoV-OC43)
uuguaugaaauucaaa

SEQ ID NO: 1597542 - RNA, 15 nt, Human coronavirus OC43 (HCoV-OC43)
cuuacuaaucaugau

SEQ ID NO: 1597543 - RNA, 13 nt, Human coronavirus OC43 (HCoV-OC43)
uuaacuauuuuca

SEQ ID NO: 1597544 - RNA, 20 nt, Human coronavirus OC43 (HCoV-OC43)
aagauucuguuuuuaagccu

SEQ ID NO: 1597545 - RNA, 18 nt, Human coronavirus OC43 (HCoV-OC43)
cagaaccuuuuauaugau

SEQ ID NO: 1597546 - RNA, 16 nt, Human coronavirus OC43 (HCoV-OC43)
uagaauugauacuacu

SEQ ID NO: 1597547 - RNA, 13 nt, Human coronavirus OC43 (HCoV-OC43)
uucagguuuugag

SEQ ID NO: 1597548 - RNA, 20 nt, Human coronavirus OC43 (HCoV-OC43)
gcagacaagccuaaucauuu

SEQ ID NO: 1597549 - RNA, 18 nt, Human coronavirus OC43 (HCoV-OC43)
uagauaugaaaggaacaa

SEQ ID NO: 1597550 - RNA, 16 nt, Human coronavirus OC43 (HCoV-OC43)
uaccgcucuuaaugcu

SEQ ID NO: 1597551 - RNA, 23 nt, Human coronavirus OC43 (HCoV-OC43)
agagugguuauuuuguuaaugua

SEQ ID NO: 1597552 - RNA, 14 nt, Human coronavirus OC43 (HCoV-OC43)
aggagaaaaugaua

SEQ ID NO: 1597553 - RNA, 14 nt, Human coronavirus OC43 (HCoV-OC43)
gaaaaugauaauau

SEQ ID NO: 1597554 - RNA, 13 nt, Human coronavirus OC43 (HCoV-OC43)
auauuuuugcuaa

SEQ ID NO: 1597555 - RNA, 16 nt, Human coronavirus OC43 (HCoV-OC43)
augaaguuaauuaugg

SEQ ID NO: 1597556 - RNA, 15 nt, Human coronavirus OC43 (HCoV-OC43)
gauaaguuugcuaua

SEQ ID NO: 1597557 - RNA, 22 nt, Human coronavirus OC43 (HCoV-OC43)
gaccacaagcauuuuuggguug

SEQ ID NO: 1597558 - RNA, 13 nt, Human coronavirus OC43 (HCoV-OC43)
gcuuauugcuaau

SEQ ID NO: 1597559 - RNA, 20 nt, Human coronavirus OC43 (HCoV-OC43)
auuugucacuugauuauaua

SEQ ID NO: 1597560 - RNA, 20 nt, Human coronavirus OC43 (HCoV-OC43)
gaaaggaguuugaguuugua

SEQ ID NO: 1597561 - RNA, 16 nt, Human coronavirus OC43 (HCoV-OC43)
auacuagugguuuugc

SEQ ID NO: 1597562 - RNA, 22 nt, Human coronavirus OC43 (HCoV-OC43)
auguggauuguguauuuuguga

SEQ ID NO: 1597563 - RNA, 23 nt, Human coronavirus OC43 (HCoV-OC43)
gcuauaacuauagguaguacuuu

SEQ ID NO: 1597564 - RNA, 19 nt, Human coronavirus OC43 (HCoV-OC43)
ugcagaauuuaucugggaa

SEQ ID NO: 1597565 - RNA, 15 nt, Human coronavirus OC43 (HCoV-OC43)
uuuuaugaguuuuac

SEQ ID NO: 1597566 - RNA, 13 nt, Human coronavirus OC43 (HCoV-OC43)
accaucaggaggg

SEQ ID NO: 1597567 - RNA, 17 nt, Human coronavirus OC43 (HCoV-OC43)
gucaacugcugccacga

SEQ ID NO: 1597568 - RNA, 20 nt, Human coronavirus OC43 (HCoV-OC43)
cuauauugaaggcucaggaa

SEQ ID NO: 1597569 - RNA, 18 nt, Human coronavirus OC43 (HCoV-OC43)
uuauggccaauuggaaga

SEQ ID NO: 1597570 - RNA, 22 nt, Human coronavirus OC43 (HCoV-OC43)
aauggacaaggagaaaaugaua

SEQ ID NO: 1597571 - RNA, 23 nt, Human coronavirus OC43 (HCoV-OC43)
cucgaugaaggaguggauuguaa

SEQ ID NO: 1597572 - RNA, 20 nt, Human coronavirus OC43 (HCoV-OC43)
cuuaaucuucccaauugcaa

SEQ ID NO: 1597573 - RNA, 16 nt, Human coronavirus OC43 (HCoV-OC43)
acauaugaugugaaug

SEQ ID NO: 1597574 - RNA, 17 nt, Human coronavirus OC43 (HCoV-OC43)
acaaggagaaaaugaua

SEQ ID NO: 1597575 - RNA, 16 nt, Human coronavirus OC43 (HCoV-OC43)
caagcuguuguuaaug

SEQ ID NO: 1597576 - RNA, 18 nt, Human coronavirus OC43 (HCoV-OC43)
auuaccacugguuuugau

SEQ ID NO: 1597577 - RNA, 21 nt, Human coronavirus OC43 (HCoV-OC43)
gcagguguucuuacuaaucau

SEQ ID NO: 1597578 - RNA, 14 nt, Human coronavirus OC43 (HCoV-OC43)
acuguuucaaagcu

SEQ ID NO: 1597579 - RNA, 18 nt, Human coronavirus OC43 (HCoV-OC43)
gacauuuucaaauuguaa

SEQ ID NO: 1597580 - RNA, 15 nt, Human coronavirus OC43 (HCoV-OC43)
auuauuuuuaaugcu

SEQ ID NO: 1597581 - RNA, 23 nt, Human coronavirus OC43 (HCoV-OC43)
cuuauauggaccuuaauccuguu

SEQ ID NO: 1597582 - RNA, 13 nt, Human coronavirus OC43 (HCoV-OC43)
acuacuugacacu

SEQ ID NO: 1597583 - RNA, 20 nt, Human coronavirus OC43 (HCoV-OC43)
aggaugguuauaauaaauua

SEQ ID NO: 1597584 - RNA, 17 nt, Human coronavirus OC43 (HCoV-OC43)
uaaagcuacagguacuu

SEQ ID NO: 1597585 - RNA, 14 nt, Human coronavirus OC43 (HCoV-OC43)
agcauacugccaaa

SEQ ID NO: 1597586 - RNA, 19 nt, Human coronavirus OC43 (HCoV-OC43)
uaucuagacuugaugcucu

SEQ ID NO: 1597587 - RNA, 15 nt, Human coronavirus OC43 (HCoV-OC43)
ugagauuaaguguaa

SEQ ID NO: 1597588 - RNA, 23 nt, Human coronavirus OC43 (HCoV-OC43)
auacuaaagcgccguauguaaug

SEQ ID NO: 1597589 - RNA, 14 nt, Human coronavirus OC43 (HCoV-OC43)
gagaaaaugauaau

SEQ ID NO: 1597590 - RNA, 23 nt, Human coronavirus OC43 (HCoV-OC43)
uuuaguuggcauaggugagcacu

SEQ ID NO: 1597591 - RNA, 15 nt, Human coronavirus OC43 (HCoV-OC43)
cugugguaaugguaa

SEQ ID NO: 1597592 - RNA, 19 nt, Human coronavirus OC43 (HCoV-OC43)
aguuuuacaaugauguaaa

SEQ ID NO: 1597593 - RNA, 17 nt, Human coronavirus OC43 (HCoV-OC43)
aauucuaucuagacuug

SEQ ID NO: 1597594 - RNA, 14 nt, Human coronavirus OC43 (HCoV-OC43)
ucguaguugcuaua

SEQ ID NO: 1597595 - RNA, 21 nt, Human coronavirus OC43 (HCoV-OC43)
agcaaccaggcugaugucaau

SEQ ID NO: 1597596 - RNA, 13 nt, Human coronavirus OC43 (HCoV-OC43)
aacauuaaugcca

SEQ ID NO: 1597597 - RNA, 23 nt, Human coronavirus OC43 (HCoV-OC43)
cucagaaauauaagagaaugaac

SEQ ID NO: 1597598 - RNA, 15 nt, Human coronavirus OC43 (HCoV-OC43)
cuacugauuuacaaa

SEQ ID NO: 1597599 - RNA, 13 nt, Human coronavirus OC43 (HCoV-OC43)
gcacucucuauca

SEQ ID NO: 1597600 - RNA, 18 nt, Human coronavirus OC43 (HCoV-OC43)
aguuuagaaauguucaaa

SEQ ID NO: 1597601 - RNA, 19 nt, Human coronavirus OC43 (HCoV-OC43)
gcuauuucuguucaaacau

SEQ ID NO: 1597602 - RNA, 19 nt, Human coronavirus OC43 (HCoV-OC43)
uaauaaagacacugguguu

SEQ ID NO: 1597603 - RNA, 12 nt, Human coronavirus OC43 (HCoV-OC43)
guuuauucaaac

SEQ ID NO: 1597604 - RNA, 17 nt, Human coronavirus OC43 (HCoV-OC43)
acuauuaugucaugccu

SEQ ID NO: 1597605 - RNA, 19 nt, Human coronavirus OC43 (HCoV-OC43)
acauugguacauaugaaua

SEQ ID NO: 1597606 - RNA, 14 nt, Human coronavirus OC43 (HCoV-OC43)
ugguuuguuauaua

SEQ ID NO: 1597607 - RNA, 13 nt, Human coronavirus OC43 (HCoV-OC43)
guauuuuugcuaa

SEQ ID NO: 1597608 - RNA, 22 nt, Human coronavirus OC43 (HCoV-OC43)
gcguauacgcauugaauaaugu

SEQ ID NO: 1597609 - RNA, 14 nt, Human coronavirus OC43 (HCoV-OC43)
agcaccaguuuaua

SEQ ID NO: 1597610 - RNA, 23 nt, Human coronavirus OC43 (HCoV-OC43)
aauucuugguguuuguguuaauu

SEQ ID NO: 1597611 - RNA, 24 nt, Human coronavirus OC43 (HCoV-OC43)
uuaaaugcaaccguucugguagua

SEQ ID NO: 1597612 - RNA, 13 nt, Human coronavirus OC43 (HCoV-OC43)
gaguuucaaccca

SEQ ID NO: 1597613 - RNA, 16 nt, Human coronavirus OC43 (HCoV-OC43)
ugcuaccucucagcaa

SEQ ID NO: 1597614 - RNA, 21 nt, Human coronavirus OC43 (HCoV-OC43)
gaucaguccgaccaguuuaga

SEQ ID NO: 1597615 - RNA, 14 nt, Human coronavirus OC43 (HCoV-OC43)
guaaugguaaucau

SEQ ID NO: 1597616 - RNA, 15 nt, Human coronavirus OC43 (HCoV-OC43)
cuacaccagcaccag

SEQ ID NO: 1597617 - RNA, 22 nt, Human coronavirus OC43 (HCoV-OC43)
aauuuuacgccuuaucaugccu

SEQ ID NO: 1597618 - RNA, 14 nt, Human coronavirus OC43 (HCoV-OC43)
aauuaguaaaugaa

SEQ ID NO: 1597619 - RNA, 23 nt, Human coronavirus OC43 (HCoV-OC43)
uaguuuuagauguuaaaggugua

SEQ ID NO: 1597620 - RNA, 16 nt, Human coronavirus OC43 (HCoV-OC43)
cucuaucagaauggau

SEQ ID NO: 1597621 - RNA, 19 nt, Human coronavirus OC43 (HCoV-OC43)
aagacaccucagaaauaua

SEQ ID NO: 1597622 - RNA, 15 nt, Human coronavirus OC43 (HCoV-OC43)
uccagcagagccucu

SEQ ID NO: 1597623 - RNA, 20 nt, Human coronavirus OC43 (HCoV-OC43)
cgguuuuaaugucucagaau

SEQ ID NO: 1597624 - RNA, 22 nt, Human coronavirus OC43 (HCoV-OC43)
gcuaccucucagcaaccaucag

SEQ ID NO: 1597625 - RNA, 14 nt, Human coronavirus OC43 (HCoV-OC43)
uauaguugccauuu

SEQ ID NO: 1597626 - RNA, 23 nt, Human coronavirus OC43 (HCoV-OC43)
uaauauggaggaguuuauucaaa

SEQ ID NO: 1597627 - RNA, 18 nt, Human coronavirus OC43 (HCoV-OC43)
aauagauagagaagguua

SEQ ID NO: 1597628 - RNA, 23 nt, Human coronavirus OC43 (HCoV-OC43)
uaucaacaacaagaugguaugau

SEQ ID NO: 1597629 - RNA, 17 nt, Human coronavirus OC43 (HCoV-OC43)
guuuuauacucagguuu

SEQ ID NO: 1597630 - RNA, 20 nt, Human coronavirus OC43 (HCoV-OC43)
uauauaagcguaauuucaca

SEQ ID NO: 1597631 - RNA, 21 nt, Human coronavirus OC43 (HCoV-OC43)
agaauuuuggugguggagaaa

SEQ ID NO: 1597632 - RNA, 19 nt, Human coronavirus OC43 (HCoV-OC43)
aauugccgacaagugccca

SEQ ID NO: 1597633 - RNA, 23 nt, Human coronavirus OC43 (HCoV-OC43)
aagauggcguuaauuucaaugua

SEQ ID NO: 1597634 - RNA, 18 nt, Human coronavirus OC43 (HCoV-OC43)
agaguugacugcagagga

SEQ ID NO: 1597635 - RNA, 15 nt, Human coronavirus OC43 (HCoV-OC43)
acaggaguuaaaugu

SEQ ID NO: 1597636 - RNA, 16 nt, Human coronavirus OC43 (HCoV-OC43)
caagaugguauuauuu

SEQ ID NO: 1597637 - RNA, 17 nt, Human coronavirus OC43 (HCoV-OC43)
agaugauuauuuugugg

SEQ ID NO: 1597638 - RNA, 20 nt, Human coronavirus OC43 (HCoV-OC43)
uguuucuguuagcagguuua

SEQ ID NO: 1597639 - RNA, 15 nt, Human coronavirus OC43 (HCoV-OC43)
ugcacuguucagcag

SEQ ID NO: 1597640 - RNA, 23 nt, Human coronavirus OC43 (HCoV-OC43)
cagauacuaguuauauuaaugau

SEQ ID NO: 1597641 - RNA, 23 nt, Human coronavirus OC43 (HCoV-OC43)
auuucuuucugauuuuauuaaug

SEQ ID NO: 1597642 - RNA, 23 nt, Human coronavirus OC43 (HCoV-OC43)
guaacuaagcauacugccaaaga

SEQ ID NO: 1597643 - RNA, 13 nt, Human coronavirus OC43 (HCoV-OC43)
cgcucuuaaugcu

SEQ ID NO: 1597644 - RNA, 18 nt, Human coronavirus OC43 (HCoV-OC43)
uacugguguuuaugaauu

SEQ ID NO: 1597645 - RNA, 15 nt, Human coronavirus OC43 (HCoV-OC43)
guuucaacccagaaa

SEQ ID NO: 1597646 - RNA, 20 nt, Human coronavirus OC43 (HCoV-OC43)
guucagauuguaaucauauu

SEQ ID NO: 1597647 - RNA, 15 nt, Human coronavirus OC43 (HCoV-OC43)
cagaacuuuuaugau

SEQ ID NO: 1597648 - RNA, 17 nt, Human coronavirus OC43 (HCoV-OC43)
uauuuagccauuucaaa

SEQ ID NO: 1597649 - RNA, 17 nt, Human
cugcacuccagccugag

SEQ ID NO: 1597650 - RNA, 20 nt, Human
cugcacuccagccugagcga

SEQ ID NO: 1597651 - RNA, 16 nt, Human
cugcacuccagccuga

SEQ ID NO: 1597652 - RNA, 21 nt, Human
cuggugccucaccccuugcca

SEQ ID NO: 1597653 - RNA, 15 nt, Human
cugggcagcugccuc

SEQ ID NO: 1597654 - RNA, 14 nt, Human
cugggcagcugccu

SEQ ID NO: 1597655 - RNA, 16 nt, Human
cugggcagcugccucc

SEQ ID NO: 1597656 - RNA, 13 nt, Human
cugggcagcugcc

SEQ ID NO: 1597657 - RNA, 15 nt, Human
cuucuguuuuauaau

SEQ ID NO: 1597658 - RNA, 20 nt, Human
cuucuguuuuauaauuuugu

SEQ ID NO: 1597659 - RNA, 21 nt, Human
cuuugagugucuuaauuaaaa

SEQ ID NO: 1597660 - RNA, 11 nt, Human
cuucagacaua

SEQ ID NO: 1597661 - RNA, 12 nt, Human
cuucaucugacu

SEQ ID NO: 1597662 - RNA, 23 nt, Human
cuucaugcugucuacacuaagag

SEQ ID NO: 1597663 - RNA, 18 nt, Human
cuucaucugacuaugaca

SEQ ID NO: 1597664 - RNA, 21 nt, Human
gacagaaagcagaacagugau

SEQ ID NO: 1597665 - RNA, 15 nt, Human
gacacacugaagaag

SEQ ID NO: 1597666 - RNA, 16 nt, Human
gacacacugaagaagc

SEQ ID NO: 1597667 - RNA, 16 nt, Human
gacauuugcucaugga

SEQ ID NO: 1597668 - RNA, 17 nt, Human
gacauuugcucauggaa

SEQ ID NO: 1597669 - RNA, 21 nt, Human
gacagugagacucugucucag

SEQ ID NO: 1597670 - RNA, 14 nt, Human
gacucuuaagaaga

SEQ ID NO: 1597671 - RNA, 15 nt, Human
gacucuuaagaagac

SEQ ID NO: 1597672 - RNA, 21 nt, Human
gacucuuaagaagacugcauu

SEQ ID NO: 1597673 - RNA, 16 nt, Human
gacgcucucuggccuu

SEQ ID NO: 1597674 - RNA, 17 nt, Human
gacgcucucuggccuuc

SEQ ID NO: 1597675 - RNA, 15 nt, Human
gacgcucucuggccu

SEQ ID NO: 1597676 - RNA, 23 nt, Human
gaagcaacccaaauguucaucaa

SEQ ID NO: 1597677 - RNA, 14 nt, Human
gaagcaaaauuuuu

SEQ ID NO: 1597678 - RNA, 14 nt, Human
gaacugaaaucaua

SEQ ID NO: 1597679 - RNA, 20 nt, Human
gaauauguuucaaacuuugg

SEQ ID NO: 1597680 - RNA, 15 nt, Human
gaauauguuucaaac

SEQ ID NO: 1597681 - RNA, 14 nt, Human
gaauauguuucaaa

SEQ ID NO: 1597682 - RNA, 16 nt, Human
gaguuuaaauuguaau

SEQ ID NO: 1597683 - RNA, 19 nt, Human
gaggcuccacuuggucugu

SEQ ID NO: 1597684 - RNA, 12 nt, Human
gaggcuccacuu

SEQ ID NO: 1597685 - RNA, 23 nt, Human
gaggcuccacuuggucugugaga

SEQ ID NO: 1597686 - RNA, 20 nt, Human
gaggacgcucucuggccuuc

SEQ ID NO: 1597687 - RNA, 15 nt, Human
gaggacgcucucugg

SEQ ID NO: 1597688 - RNA, 23 nt, Human
gcacaguuuucugagaaagacua

SEQ ID NO: 1597689 - RNA, 22 nt, Human
gcacaguuuucugagaaagacu

SEQ ID NO: 1597690 - RNA, 22 nt, Human
gcaauagucaaauugugugaaa

SEQ ID NO: 1597691 - RNA, 20 nt, Human
gcaaguauuagaauaccaca

SEQ ID NO: 1597692 - RNA, 16 nt, Human
gauuuaccacuugugu

SEQ ID NO: 1597693 - RNA, 15 nt, Human
gauuuaccacuugug

SEQ ID NO: 1597694 - RNA, 16 nt, Human
gaugaucuuuaaaaua

SEQ ID NO: 1597695 - RNA, 18 nt, Human
gauguagaggagaaacug

SEQ ID NO: 1597696 - RNA, 14 nt, Human
gaugguucuagcau

SEQ ID NO: 1597697 - RNA, 21 nt, Human
gcuaguaauuggaaaggcagc

SEQ ID NO: 1597698 - RNA, 16 nt, Human
gcuaguaucaaaagaa

SEQ ID NO: 1597699 - RNA, 18 nt, Human
gcuccccucggagaagag

SEQ ID NO: 1597700 - RNA, 15 nt, Human
gcuccccucggagaa

SEQ ID NO: 1597701 - RNA, 22 nt, Human
gcugccuccccuccucugcuug

SEQ ID NO: 1597702 - RNA, 21 nt, Human
gcugccuccccuccucugcuu

SEQ ID NO: 1597703 - RNA, 20 nt, Human
gcugccuccccuccucugcu

SEQ ID NO: 1597704 - RNA, 17 nt, Human
gcugccuccccuccucu

SEQ ID NO: 1597705 - RNA, 16 nt, Human
gcugccuccccuccuc

SEQ ID NO: 1597706 - RNA, 17 nt, Human
gcuggagcucugcccau

SEQ ID NO: 1597707 - RNA, 22 nt, Human
gcuuccuucugugaaaguacau

SEQ ID NO: 1597708 - RNA, 14 nt, Human
gcccuguuaaaaga

SEQ ID NO: 1597709 - RNA, 17 nt, Human
gcccuguuaaaagauga

SEQ ID NO: 1597710 - RNA, 13 nt, Human
gcccuguuaaaag

SEQ ID NO: 1597711 - RNA, 16 nt, Human
gcccccaggugccagu

SEQ ID NO: 1597712 - RNA, 22 nt, Human
gccagacaucaacagauaaaua

SEQ ID NO: 1597713 - RNA, 23 nt, Human
gccagcaguucagagcugcccuc

SEQ ID NO: 1597714 - RNA, 22 nt, Human
gccagcaguucagagcugcccu

SEQ ID NO: 1597715 - RNA, 21 nt, Human
gccacuguuuugaaucucaua

SEQ ID NO: 1597716 - RNA, 15 nt, Human
ggaggcugagauggg

SEQ ID NO: 1597717 - RNA, 19 nt, Human
ggaggcugagaugggagaa

SEQ ID NO: 1597718 - RNA, 22 nt, Human
ggaugguucccuugaugaagaa

SEQ ID NO: 1597719 - RNA, 23 nt, Human
ggaugguucccuugaugaagaag

SEQ ID NO: 1597720 - RNA, 20 nt, Human
gggaggcagagguugcagug

SEQ ID NO: 1597721 - RNA, 22 nt, Human
aaaagcuccauuuuuagugaaa

SEQ ID NO: 1597722 - RNA, 21 nt, Human
aaaacuuuaugcuaagugaaa

SEQ ID NO: 1597723 - RNA, 19 nt, Human
aaaagccugcaauuucaua

SEQ ID NO: 1597724 - RNA, 19 nt, Human
gggcagcugccuccccucc

SEQ ID NO: 1597725 - RNA, 14 nt, Human
gggcagcugccucc

SEQ ID NO: 1597726 - RNA, 13 nt, Human
gggcagcugccuc

SEQ ID NO: 1597727 - RNA, 23 nt, Human
gggcagcugccuccccuccucug

SEQ ID NO: 1597728 - RNA, 20 nt, Human
gggcagcugccuccccuccu

SEQ ID NO: 1597729 - RNA, 21 nt, Human
aaaauaauuuuuauauuugaa

SEQ ID NO: 1597730 - RNA, 23 nt, Human
aaaauaauuuuuauauuugaaau

SEQ ID NO: 1597731 - RNA, 14 nt, Human
aaaauauauuuaau

SEQ ID NO: 1597732 - RNA, 13 nt, Human
aaaggaauuuaaa

SEQ ID NO: 1597733 - RNA, 14 nt, Human
ggucugugagaugc

SEQ ID NO: 1597734 - RNA, 24 nt, Human
ggucugugagaugcuagaacuccc

SEQ ID NO: 1597735 - RNA, 21 nt, Human
aaagauuuucagaaaauauua

SEQ ID NO: 1597736 - RNA, 16 nt, Human
aaagaaugauuaugaa

SEQ ID NO: 1597737 - RNA, 21 nt, Human
ggucauauuaauauauuucca

SEQ ID NO: 1597738 - RNA, 18 nt, Human
aaagagaacuuccagauc

SEQ ID NO: 1597739 - RNA, 22 nt, Human
aaagacuauucaaacagucuca

SEQ ID NO: 1597740 - RNA, 14 nt, Human
aaagacuccaaaga

SEQ ID NO: 1597741 - RNA, 13 nt, Human
aaagacuccaaag

SEQ ID NO: 1597742 - RNA, 23 nt, Human
aaagacuauucaaacagucucag

SEQ ID NO: 1597743 - RNA, 20 nt, Human
aaagaggcagcuugaaacug

SEQ ID NO: 1597744 - RNA, 15 nt, Human
aaagauuuucagaaa

SEQ ID NO: 1597745 - RNA, 14 nt, Human
aaagauuuucagaa

SEQ ID NO: 1597746 - RNA, 16 nt, Human
aaaccacagcaguuga

SEQ ID NO: 1597747 - RNA, 15 nt, Human
aaaccacagcaguug

SEQ ID NO: 1597748 - RNA, 14 nt, Human
aaacacaacuauau

SEQ ID NO: 1597749 - RNA, 13 nt, Human
aaacauauauaac

SEQ ID NO: 1597750 - RNA, 16 nt, Human
aaacauauauaacaau

SEQ ID NO: 1597751 - RNA, 19 nt, Human
aaacauauauaacaaugcu

SEQ ID NO: 1597752 - RNA, 21 nt, Human
aaacauauauaacaaugcugu

SEQ ID NO: 1597753 - RNA, 15 nt, Human
aaaauauuauguguu

SEQ ID NO: 1597754 - RNA, 14 nt, Human
aaaauauuaugugu

SEQ ID NO: 1597755 - RNA, 21 nt, Human
aaaauauuauguguuuccaua

SEQ ID NO: 1597756 - RNA, 19 nt, Human
aaaauuuuuucucuaggaa

SEQ ID NO: 1597757 - RNA, 17 nt, Human
aaacaaggaugaauuaa

SEQ ID NO: 1597758 - RNA, 19 nt, Human
aaacaacuucaauauccaa

SEQ ID NO: 1597759 - RNA, 16 nt, Human
cucuccccaugauguu

SEQ ID NO: 1597760 - RNA, 15 nt, Human
cucuccccaugaugu

SEQ ID NO: 1597761 - RNA, 19 nt, Human
cucuauguucuaagaagug

SEQ ID NO: 1597762 - RNA, 14 nt, Human
cucucuggccuucg

SEQ ID NO: 1597763 - RNA, 16 nt, Human
cucucuggccuucggc

SEQ ID NO: 1597764 - RNA, 13 nt, Human
cucucuggccuuc

SEQ ID NO: 1597765 - RNA, 19 nt, Human
cucccuccaccucccugca

SEQ ID NO: 1597766 - RNA, 22 nt, Human
cucccuccaccucccugcaaua

SEQ ID NO: 1597767 - RNA, 21 nt, Human
cucccuccaccucccugcaau

SEQ ID NO: 1597768 - RNA, 20 nt, Human
cucccuccaccucccugcaa

SEQ ID NO: 1597769 - RNA, 16 nt, Human
cucaguccaugaagau

SEQ ID NO: 1597770 - RNA, 18 nt, Human
cuaucucauuuccaagca

SEQ ID NO: 1597771 - RNA, 18 nt, Human
cuauguucuaagaaguga

SEQ ID NO: 1597772 - RNA, 17 nt, Human
ccuucucuucacaguca

SEQ ID NO: 1597773 - RNA, 20 nt, Human
cuacaaaaacacagcaaggg

SEQ ID NO: 1597774 - RNA, 12 nt, Human
ccuuuucccaac

SEQ ID NO: 1597775 - RNA, 20 nt, Human
ccuaacgaaguauccuucag

SEQ ID NO: 1597776 - RNA, 13 nt, Human
cccucggagaaga

SEQ ID NO: 1597777 - RNA, 14 nt, Human
cccugagcaggauu

SEQ ID NO: 1597778 - RNA, 20 nt, Human
ccucuccugggcagcugccu

SEQ ID NO: 1597779 - RNA, 19 nt, Human
ccucuccugggcagcugcc

SEQ ID NO: 1597780 - RNA, 18 nt, Human
ccucuccugggcagcugc

SEQ ID NO: 1597781 - RNA, 17 nt, Human
ccucuccugggcagcug

SEQ ID NO: 1597782 - RNA, 16 nt, Human
ccucuccugggcagcu

SEQ ID NO: 1597783 - RNA, 15 nt, Human
ccucuccugggcagc

SEQ ID NO: 1597784 - RNA, 22 nt, Human
ccucuccugggcagcugccucc

SEQ ID NO: 1597785 - RNA, 21 nt, Human
ccucuccugggcagcugccuc

SEQ ID NO: 1597786 - RNA, 22 nt, Human
ccauuguggucacaggaaguag

SEQ ID NO: 1597787 - RNA, 13 nt, Human
ccauuuaaagcuu

SEQ ID NO: 1597788 - RNA, 18 nt, Human
ccaugggcacugugggua

SEQ ID NO: 1597789 - RNA, 15 nt, Human
ccccauuguggucac

SEQ ID NO: 1597790 - RNA, 15 nt, Human
ccaggggccaugaau

SEQ ID NO: 1597791 - RNA, 12 nt, Human
ccacuuggucug

SEQ ID NO: 1597792 - RNA, 20 nt, Human
ccacuuggucugugagaugc

SEQ ID NO: 1597793 - RNA, 22 nt, Human
ccacuuggucugugagaugcua

SEQ ID NO: 1597794 - RNA, 15 nt, Human
ccacuuggucuguga

SEQ ID NO: 1597795 - RNA, 16 nt, Human
ccacuuggucugugag

SEQ ID NO: 1597796 - RNA, 17 nt, Human
ccacuuggucugugaga

SEQ ID NO: 1597797 - RNA, 19 nt, Human
ccacuuggucugugagaug

SEQ ID NO: 1597798 - RNA, 14 nt, Human
cagccagacuggca

SEQ ID NO: 1597799 - RNA, 23 nt, Human
cagccagcaguucagagcugccc

SEQ ID NO: 1597800 - RNA, 20 nt, Human
cagccagacuggcacaguuu

SEQ ID NO: 1597801 - RNA, 15 nt, Human
cagccagacuggcac

SEQ ID NO: 1597802 - RNA, 18 nt, Human
cagccagacuggcacagu

SEQ ID NO: 1597803 - RNA, 21 nt, Human
cagagcugcccucuccugggc

SEQ ID NO: 1597804 - RNA, 20 nt, Human
cagagcugcccucuccuggg

SEQ ID NO: 1597805 - RNA, 19 nt, Human
cagagcugcccucuccugg

SEQ ID NO: 1597806 - RNA, 18 nt, Human
cagagcugcccucuccug

SEQ ID NO: 1597807 - RNA, 23 nt, Human
cagagcugcccucuccugggcag

SEQ ID NO: 1597808 - RNA, 22 nt, Human
cagacuggcacaguuuucugag

SEQ ID NO: 1597809 - RNA, 23 nt, Human
cagacuggcacaguuuucugaga

SEQ ID NO: 1597810 - RNA, 17 nt, Human
cagacuggcacaguuuu

SEQ ID NO: 1597811 - RNA, 18 nt, Human
cagacuggcacaguuuuc

SEQ ID NO: 1597812 - RNA, 20 nt, Human
cagcuguaugauucccagcc

SEQ ID NO: 1597813 - RNA, 14 nt, Human
cagcuuauugucua

SEQ ID NO: 1597814 - RNA, 20 nt, Human
cagcuuauugucuagugaaa

SEQ ID NO: 1597815 - RNA, 16 nt, Human
caggaaagagaacuuc

SEQ ID NO: 1597816 - RNA, 20 nt, Human
caggaaagagaacuuccaga

SEQ ID NO: 1597817 - RNA, 20 nt, Human
cagcugccuccccuccucug

SEQ ID NO: 1597818 - RNA, 19 nt, Human
cagcugccuccccuccucu

SEQ ID NO: 1597819 - RNA, 18 nt, Human
cagcugccuccccuccuc

SEQ ID NO: 1597820 - RNA, 17 nt, Human
cagcugccuccccuccu

SEQ ID NO: 1597821 - RNA, 16 nt, Human
cagcugccuccccucc

SEQ ID NO: 1597822 - RNA, 15 nt, Human
cagcugccuccccuc

SEQ ID NO: 1597823 - RNA, 14 nt, Human
cagcugccuccccu

SEQ ID NO: 1597824 - RNA, 9 nt, Human
cagcugccu

SEQ ID NO: 1597825 - RNA, 11 nt, Human
cagcugccucc

SEQ ID NO: 1597826 - RNA, 10 nt, Human
cagcugccuc

SEQ ID NO: 1597827 - RNA, 11 nt, Human
caggcuacugu

SEQ ID NO: 1597828 - RNA, 14 nt, Human
ccaaaaggcagaag

SEQ ID NO: 1597829 - RNA, 17 nt, Human
cauuuguauaaaauaau

SEQ ID NO: 1597830 - RNA, 14 nt, Human
cauuuguauaaaau

SEQ ID NO: 1597831 - RNA, 16 nt, Human
cauuuguauaaaauaa

SEQ ID NO: 1597832 - RNA, 21 nt, Human
ccaacuccagaaagugacaag

SEQ ID NO: 1597833 - RNA, 19 nt, Human
ccaauucgaacuuuuucca

SEQ ID NO: 1597834 - RNA, 22 nt, Human
caguucagagcugcccucuccu

SEQ ID NO: 1597835 - RNA, 21 nt, Human
caguucagagcugcccucucc

SEQ ID NO: 1597836 - RNA, 19 nt, Human
caguucagagcugcccucu

SEQ ID NO: 1597837 - RNA, 18 nt, Human
caguucagagcugcccuc

SEQ ID NO: 1597838 - RNA, 24 nt, Human
caguucagagcugcccucuccugg

SEQ ID NO: 1597839 - RNA, 23 nt, Human
caguucagagcugcccucuccug

SEQ ID NO: 1597840 - RNA, 17 nt, Human
caguucagagcugcccu

SEQ ID NO: 1597841 - RNA, 16 nt, Human
caguucagagcugccc

SEQ ID NO: 1597842 - RNA, 15 nt, Human
caguucagagcugcc

SEQ ID NO: 1597843 - RNA, 22 nt, Human
caguuauuauauuuacaaaugg

SEQ ID NO: 1597844 - RNA, 21 nt, Human
caguuauuauauuuacaaaug

SEQ ID NO: 1597845 - RNA, 17 nt, Human
caguuauuauauuuaca

SEQ ID NO: 1597846 - RNA, 13 nt, Human
caguuauggcuau

SEQ ID NO: 1597847 - RNA, 19 nt, Human
caguuauggcuauaggugc

SEQ ID NO: 1597848 - RNA, 20 nt, Human
caguuauggcuauaggugcu

SEQ ID NO: 1597849 - RNA, 22 nt, Human
cagugauuaccagggacugagg

SEQ ID NO: 1597850 - RNA, 18 nt, Human
cauccugaggcuccacuu

SEQ ID NO: 1597851 - RNA, 19 nt, Human
cauccugaggcuccacuug

SEQ ID NO: 1597852 - RNA, 13 nt, Human
caucagcugcuga

SEQ ID NO: 1597853 - RNA, 23 nt, Human
caguuguucaauaauaaauauuu

SEQ ID NO: 1597854 - RNA, 16 nt, Human
cauagguuuaauaauu

SEQ ID NO: 1597855 - RNA, 20 nt, Human
cauagcagcuuauucacaag

SEQ ID NO: 1597856 - RNA, 19 nt, Human
cauagcagcuuauucacaa

SEQ ID NO: 1597857 - RNA, 22 nt, Human
auugaggacacugauauggguc

SEQ ID NO: 1597858 - RNA, 19 nt, Human
auuuuuauauuugaaauau

SEQ ID NO: 1597859 - RNA, 21 nt, Human
caaaagguauuuuaaucacca

SEQ ID NO: 1597860 - RNA, 19 nt, Human
auuuucuauaauuuaaaua

SEQ ID NO: 1597861 - RNA, 18 nt, Human
auuuucuauaauuuaaau

SEQ ID NO: 1597862 - RNA, 17 nt, Human
auuuucuauaauuuaaa

SEQ ID NO: 1597863 - RNA, 21 nt, Human
auugauaaguucauacauugu

SEQ ID NO: 1597864 - RNA, 19 nt, Human
auugauaaguucauacauu

SEQ ID NO: 1597865 - RNA, 18 nt, Human
auugauaaguucauacau

SEQ ID NO: 1597866 - RNA, 17 nt, Human
auugauaaguucauaca

SEQ ID NO: 1597867 - RNA, 16 nt, Human
auugauaaguucauac

SEQ ID NO: 1597868 - RNA, 15 nt, Human
auugauaaguucaua

SEQ ID NO: 1597869 - RNA, 12 nt, Human
auugauaaguuc

SEQ ID NO: 1597870 - RNA, 23 nt, Human
cacugaagaagcaccaaucauga

SEQ ID NO: 1597871 - RNA, 21 nt, Human
cacuccagugagacagcucug

SEQ ID NO: 1597872 - RNA, 23 nt, Human
cacaucagcuugcccuguuaaaa

SEQ ID NO: 1597873 - RNA, 13 nt, Human
cacaucagcuugc

SEQ ID NO: 1597874 - RNA, 17 nt, Human
caaucagccuaguugau

SEQ ID NO: 1597875 - RNA, 14 nt, Human
caagcaaguauuag

SEQ ID NO: 1597876 - RNA, 19 nt, Human
caacuauauuguuugcuaa

SEQ ID NO: 1597877 - RNA, 19 nt, Human
caacuaucucauuuccaag

SEQ ID NO: 1597878 - RNA, 20 nt, Human
caacuauuuuuccaaaauaa

SEQ ID NO: 1597879 - RNA, 12 nt, Human
caacuccagaaa

SEQ ID NO: 1597880 - RNA, 15 nt, Human
caacuauuuuuccaa

SEQ ID NO: 1597881 - RNA, 16 nt, Human
uuuucuauaauuuaaa

SEQ ID NO: 1597882 - RNA, 20 nt, Human
uuuucaggcuagauguaugu

SEQ ID NO: 1597883 - RNA, 13 nt, Human
auguuaagcagau

SEQ ID NO: 1597884 - RNA, 12 nt, Human
auguuaagcaga

SEQ ID NO: 1597885 - RNA, 21 nt, Human
augugcuaguaauuggaaagg

SEQ ID NO: 1597886 - RNA, 12 nt, Human
auguguuuccau

SEQ ID NO: 1597887 - RNA, 17 nt, Human
uuuguaguguuggagaa

SEQ ID NO: 1597888 - RNA, 23 nt, Human
augucgucaaagcugaaauggac

SEQ ID NO: 1597889 - RNA, 19 nt, Human
auguauauuuuauaucaau

SEQ ID NO: 1597890 - RNA, 19 nt, Human
uuugcuaagcauuccaacu

SEQ ID NO: 1597891 - RNA, 20 nt, Human
uuugcuggagcucugcccau

SEQ ID NO: 1597892 - RNA, 13 nt, Human
uuugagaguucua
